United States Patent Application Publication US 2007/0042381 A1 - sequence listing, part 30

SEQ ID NO: 1322053 - RNA, 17 nt, Human
cccaggccccaugaccu

SEQ ID NO: 1322054 - RNA, 20 nt, Human
cccaggccccaugaccucca

SEQ ID NO: 1322055 - RNA, 11 nt, Human
cccaggcccac

SEQ ID NO: 1322056 - RNA, 18 nt, Human
cccaggcccacugugccu

SEQ ID NO: 1322057 - RNA, 13 nt, Human
ccccaagccuggc

SEQ ID NO: 1322058 - RNA, 14 nt, Human
ccccaagccuggca

SEQ ID NO: 1322059 - RNA, 22 nt, Human
ccccaagauugagcucucugcc

SEQ ID NO: 1322060 - RNA, 14 nt, Human
ccccaagcuguuuu

SEQ ID NO: 1322061 - RNA, 16 nt, Human
ccccaagcuguuuucu

SEQ ID NO: 1322062 - RNA, 17 nt, Human
ccccaagcuguuuucuu

SEQ ID NO: 1322063 - RNA, 20 nt, Human
ccccaagggaggcugcugcu

SEQ ID NO: 1322064 - RNA, 14 nt, Human
ccccaacagcgccc

SEQ ID NO: 1322065 - RNA, 15 nt, Human
ccccaacagcgccca

SEQ ID NO: 1322066 - RNA, 17 nt, Human
ccccaacagcgcccaaa

SEQ ID NO: 1322067 - RNA, 13 nt, Human
ccccaacagcugg

SEQ ID NO: 1322068 - RNA, 14 nt, Human
ccccaacagcugga

SEQ ID NO: 1322069 - RNA, 21 nt, Human
ccccaacagcuggacccugac

SEQ ID NO: 1322070 - RNA, 22 nt, Human
ccccaacagcuggacccugacc

SEQ ID NO: 1322071 - RNA, 23 nt, Human
ccccaacagcuggacccugacca

SEQ ID NO: 1322072 - RNA, 16 nt, Human
ccccaacaugcacuga

SEQ ID NO: 1322073 - RNA, 23 nt, Human
ccccaaccauuuccucagacucu

SEQ ID NO: 1322074 - RNA, 16 nt, Human
ccccaacuccuuccag

SEQ ID NO: 1322075 - RNA, 17 nt, Human
ccccaacuccuuccagc

SEQ ID NO: 1322076 - RNA, 22 nt, Human
ccccaacuccuuccagcuagug

SEQ ID NO: 1322077 - RNA, 16 nt, Human
cccagugcacuugcug

SEQ ID NO: 1322078 - RNA, 20 nt, Human
cccauggagauugaccugga

SEQ ID NO: 1322079 - RNA, 21 nt, Human
cccauggagauugaccuggau

SEQ ID NO: 1322080 - RNA, 23 nt, Human
cccauggagauugaccuggaugg

SEQ ID NO: 1322081 - RNA, 22 nt, Human
cccauggcagugggaaaaaugu

SEQ ID NO: 1322082 - RNA, 15 nt, Human
cccauggcauuuuau

SEQ ID NO: 1322083 - RNA, 14 nt, Human
cccauggcccugag

SEQ ID NO: 1322084 - RNA, 14 nt, Human
cccauuccugggaa

SEQ ID NO: 1322085 - RNA, 18 nt, Human
cccauuccuucccagagg

SEQ ID NO: 1322086 - RNA, 23 nt, Human
ccaucagaaacacccucacacug

SEQ ID NO: 1322087 - RNA, 13 nt, Human
ccaucagccucca

SEQ ID NO: 1322088 - RNA, 12 nt, Human
ccaucagaugac

SEQ ID NO: 1322089 - RNA, 20 nt, Human
ccaucaggguaggcuggagu

SEQ ID NO: 1322090 - RNA, 12 nt, Human
ccaucagugcuc

SEQ ID NO: 1322091 - RNA, 17 nt, Human
ccaucagugcucccuca

SEQ ID NO: 1322092 - RNA, 16 nt, Human
ccaucaucaugugugu

SEQ ID NO: 1322093 - RNA, 15 nt, Human
ccauccaaggccagg

SEQ ID NO: 1322094 - RNA, 17 nt, Human
ccauccacaugggagcc

SEQ ID NO: 1322095 - RNA, 17 nt, Human
ccauccaccuuucccaa

SEQ ID NO: 1322096 - RNA, 12 nt, Human
ccaucucccugg

SEQ ID NO: 1322097 - RNA, 15 nt, Human
ccaucucccuggugc

SEQ ID NO: 1322098 - RNA, 16 nt, Human
ccaucucccuggugcu

SEQ ID NO: 1322099 - RNA, 17 nt, Human
ccaucucccuggugcuu

SEQ ID NO: 1322100 - RNA, 20 nt, Human
ccaucucccuggugcuuaug

SEQ ID NO: 1322101 - RNA, 19 nt, Human
ccaucucccuggugcuuau

SEQ ID NO: 1322102 - RNA, 23 nt, Human
ccaucugcgugacaauaaaacau

SEQ ID NO: 1322103 - RNA, 11 nt, Human
ccaucugcucc

SEQ ID NO: 1322104 - RNA, 12 nt, Human
ccaucugcuccu

SEQ ID NO: 1322105 - RNA, 13 nt, Human
ccaucugcuccug

SEQ ID NO: 1322106 - RNA, 14 nt, Human
ccaucugcuccugg

SEQ ID NO: 1322107 - RNA, 15 nt, Human
ccaucugcuccugga

SEQ ID NO: 1322108 - RNA, 16 nt, Human
ccaucaaguugugcca

SEQ ID NO: 1322109 - RNA, 21 nt, Human
ccauaguggaucacucaccau

SEQ ID NO: 1322110 - RNA, 14 nt, Human
ccauauacuuuaaa

SEQ ID NO: 1322111 - RNA, 21 nt, Human
ccauaucacacacauugcugu

SEQ ID NO: 1322112 - RNA, 18 nt, Human
ccauauccuuacccuccu

SEQ ID NO: 1322113 - RNA, 22 nt, Human
ccagugaagagccacugccauu

SEQ ID NO: 1322114 - RNA, 12 nt, Human
ccauacuaauua

SEQ ID NO: 1322115 - RNA, 13 nt, Human
ccauacuaauuau

SEQ ID NO: 1322116 - RNA, 23 nt, Human
ccauacuaauuauacccccugca

SEQ ID NO: 1322117 - RNA, 15 nt, Human
ccauagucuuaacug

SEQ ID NO: 1322118 - RNA, 18 nt, Human
ccauagucuuaacugguc

SEQ ID NO: 1322119 - RNA, 14 nt, Human
ccaugcagaaagca

SEQ ID NO: 1322120 - RNA, 15 nt, Human
ccaugcagaaagcau

SEQ ID NO: 1322121 - RNA, 11 nt, Human
ccaugcagaaa

SEQ ID NO: 1322122 - RNA, 21 nt, Human
ccaugcacugugaaggacccu

SEQ ID NO: 1322123 - RNA, 19 nt, Human
ccaugcacugugaaggacc

SEQ ID NO: 1322124 - RNA, 20 nt, Human
ccaugcacugugaaggaccc

SEQ ID NO: 1322125 - RNA, 21 nt, Human
ccaugcccggcuaauuuuugu

SEQ ID NO: 1322126 - RNA, 13 nt, Human
ccaugcgcucagg

SEQ ID NO: 1322127 - RNA, 15 nt, Human
ccaugcgcucagggc

SEQ ID NO: 1322128 - RNA, 16 nt, Human
ccaugcgcucagggcc

SEQ ID NO: 1322129 - RNA, 22 nt, Human
ccaugcgcucagggccaugcug

SEQ ID NO: 1322130 - RNA, 20 nt, Human
ccaugcguguuucugacucu

SEQ ID NO: 1322131 - RNA, 13 nt, Human
ccaugcucaucug

SEQ ID NO: 1322132 - RNA, 16 nt, Human
ccaugcucaucugcug

SEQ ID NO: 1322133 - RNA, 19 nt, Human
ccaugcuccucuuccccag

SEQ ID NO: 1322134 - RNA, 20 nt, Human
ccaugcuccucuuccccaga

SEQ ID NO: 1322135 - RNA, 13 nt, Human
ccaugcuccucuu

SEQ ID NO: 1322136 - RNA, 15 nt, Human
ccaugcuccucuucc

SEQ ID NO: 1322137 - RNA, 16 nt, Human
ccaugcuccucuuccc

SEQ ID NO: 1322138 - RNA, 18 nt, Human
ccaugcuccucuucccca

SEQ ID NO: 1322139 - RNA, 17 nt, Human
ccaugcucaucugcugg

SEQ ID NO: 1322140 - RNA, 18 nt, Human
ccaugcucaucugcuggu

SEQ ID NO: 1322141 - RNA, 20 nt, Human
ccaugcucaucugcuggucc

SEQ ID NO: 1322142 - RNA, 20 nt, Human
ccaugcugaggccugggccg

SEQ ID NO: 1322143 - RNA, 18 nt, Human
ccaugcugaggccugggc

SEQ ID NO: 1322144 - RNA, 19 nt, Human
ccaugcugaggccugggcc

SEQ ID NO: 1322145 - RNA, 24 nt, Human
ccaugcuccucuuccccagacgcc

SEQ ID NO: 1322146 - RNA, 22 nt, Human
ccaugcugcuggggaagacagu

SEQ ID NO: 1322147 - RNA, 23 nt, Human
ccaugcugcuggggaagacagug

SEQ ID NO: 1322148 - RNA, 16 nt, Human
ccaugauguuuagaaa

SEQ ID NO: 1322149 - RNA, 22 nt, Human
ccaugauuucauguacugcauu

SEQ ID NO: 1322150 - RNA, 21 nt, Human
ccaugauuucauguacugcau

SEQ ID NO: 1322151 - RNA, 18 nt, Human
ccaugauuucauguacug

SEQ ID NO: 1322152 - RNA, 15 nt, Human
ccaugauuucaugua

SEQ ID NO: 1322153 - RNA, 23 nt, Human
ccaugauucuauuuauauguaca

SEQ ID NO: 1322154 - RNA, 21 nt, Human
ccaugcacccucauacacaga

SEQ ID NO: 1322155 - RNA, 11 nt, Human
ccaugcacugu

SEQ ID NO: 1322156 - RNA, 13 nt, Human
ccaugcacuguga

SEQ ID NO: 1322157 - RNA, 15 nt, Human
ccaugcacugugaag

SEQ ID NO: 1322158 - RNA, 16 nt, Human
ccaugcacugugaagg

SEQ ID NO: 1322159 - RNA, 17 nt, Human
ccaugcacugugaagga

SEQ ID NO: 1322160 - RNA, 14 nt, Human
ccaugaagauguag

SEQ ID NO: 1322161 - RNA, 18 nt, Human
ccaugaagagauuuuuca

SEQ ID NO: 1322162 - RNA, 22 nt, Human
ccaugaagagauuuuucaugau

SEQ ID NO: 1322163 - RNA, 14 nt, Human
ccaugauggcaaca

SEQ ID NO: 1322164 - RNA, 15 nt, Human
ccaugauggcaacag

SEQ ID NO: 1322165 - RNA, 16 nt, Human
ccaugauggcaacaga

SEQ ID NO: 1322166 - RNA, 19 nt, Human
ccaugauggcaacagaucu

SEQ ID NO: 1322167 - RNA, 21 nt, Human
ccaugauggcaacagaucugg

SEQ ID NO: 1322168 - RNA, 12 nt, Human
ccaucugggcuc

SEQ ID NO: 1322169 - RNA, 16 nt, Human
ccaucugggcuccucc

SEQ ID NO: 1322170 - RNA, 15 nt, Human
ccauucuggaaguga

SEQ ID NO: 1322171 - RNA, 12 nt, Human
ccauucuggaag

SEQ ID NO: 1322172 - RNA, 16 nt, Human
ccauucugcuccuucc

SEQ ID NO: 1322173 - RNA, 19 nt, Human
ccauucugcuccuucccca

SEQ ID NO: 1322174 - RNA, 19 nt, Human
ccauucuggaagugacuuu

SEQ ID NO: 1322175 - RNA, 13 nt, Human
cccaaaaggcaga

SEQ ID NO: 1322176 - RNA, 18 nt, Human
cccaaaaggcagaagcaa

SEQ ID NO: 1322177 - RNA, 20 nt, Human
cccaaaauuagccaguaauc

SEQ ID NO: 1322178 - RNA, 22 nt, Human
cccaaacgcccuuuccuccuca

SEQ ID NO: 1322179 - RNA, 13 nt, Human
cccaaagcaagca

SEQ ID NO: 1322180 - RNA, 21 nt, Human
cccaaagcaagcaagaggccg

SEQ ID NO: 1322181 - RNA, 16 nt, Human
cccaaacgcccuuucc

SEQ ID NO: 1322182 - RNA, 23 nt, Human
cccaaacgcccuuuccuccucag

SEQ ID NO: 1322183 - RNA, 16 nt, Human
cccaaacaccuuccag

SEQ ID NO: 1322184 - RNA, 19 nt, Human
cccaaacaccuuccagcuc

SEQ ID NO: 1322185 - RNA, 21 nt, Human
cccaaacaccuuccagcuccu

SEQ ID NO: 1322186 - RNA, 22 nt, Human
cccaaacaccuuccagcuccug

SEQ ID NO: 1322187 - RNA, 19 nt, Human
ccaugcugugcgcccaggg

SEQ ID NO: 1322188 - RNA, 20 nt, Human
ccaugcugugcgcccagggc

SEQ ID NO: 1322189 - RNA, 22 nt, Human
ccaugcugugcgcccagggcug

SEQ ID NO: 1322190 - RNA, 16 nt, Human
ccauggacaggcuggc

SEQ ID NO: 1322191 - RNA, 18 nt, Human
ccauggacaggcuggcuc

SEQ ID NO: 1322192 - RNA, 19 nt, Human
ccauggacaggcuggcucc

SEQ ID NO: 1322193 - RNA, 15 nt, Human
ccauggacucugucc

SEQ ID NO: 1322194 - RNA, 16 nt, Human
ccauggacucuguccu

SEQ ID NO: 1322195 - RNA, 18 nt, Human
ccauggacucuguccuga

SEQ ID NO: 1322196 - RNA, 21 nt, Human
ccauggacucuguccugaagg

SEQ ID NO: 1322197 - RNA, 13 nt, Human
ccauggagaaagc

SEQ ID NO: 1322198 - RNA, 14 nt, Human
ccauggagaaagcu

SEQ ID NO: 1322199 - RNA, 13 nt, Human
ccauucugcuccu

SEQ ID NO: 1322200 - RNA, 14 nt, Human
ccauucugcuccuu

SEQ ID NO: 1322201 - RNA, 15 nt, Human
ccauggagaaagcug

SEQ ID NO: 1322202 - RNA, 13 nt, Human
ccaggacaggauc

SEQ ID NO: 1322203 - RNA, 17 nt, Human
ccaggacaagcaugguc

SEQ ID NO: 1322204 - RNA, 20 nt, Human
ccaggacaagcaugguccca

SEQ ID NO: 1322205 - RNA, 23 nt, Human
ccaggacaagcauggucccacau

SEQ ID NO: 1322206 - RNA, 19 nt, Human
ccaggacaggauccaggcc

SEQ ID NO: 1322207 - RNA, 17 nt, Human
ccaggacaggauccagg

SEQ ID NO: 1322208 - RNA, 15 nt, Human
ccaggacaggaucca

SEQ ID NO: 1322209 - RNA, 12 nt, Human
ccaggaccacag

SEQ ID NO: 1322210 - RNA, 13 nt, Human
ccaggaccacagg

SEQ ID NO: 1322211 - RNA, 20 nt, Human
ccaggacuauauuugggccu

SEQ ID NO: 1322212 - RNA, 21 nt, Human
ccaggacuauauuugggccug

SEQ ID NO: 1322213 - RNA, 23 nt, Human
ccagcuggggccaggcugggucg

SEQ ID NO: 1322214 - RNA, 22 nt, Human
ccagcuggggccaggcuggguc

SEQ ID NO: 1322215 - RNA, 21 nt, Human
ccagcuggggccaggcugggu

SEQ ID NO: 1322216 - RNA, 20 nt, Human
ccagcuggggccaggcuggg

SEQ ID NO: 1322217 - RNA, 19 nt, Human
ccagcuggggccaggcugg

SEQ ID NO: 1322218 - RNA, 18 nt, Human
ccagcuggggccaggcug

SEQ ID NO: 1322219 - RNA, 17 nt, Human
ccagcuggggccaggcu

SEQ ID NO: 1322220 - RNA, 19 nt, Human
ccagcugggcucugcaauu

SEQ ID NO: 1322221 - RNA, 14 nt, Human
ccaggaagucucau

SEQ ID NO: 1322222 - RNA, 15 nt, Human
ccaggaagucucauc

SEQ ID NO: 1322223 - RNA, 20 nt, Human
ccaggaagucucaucugggg

SEQ ID NO: 1322224 - RNA, 14 nt, Human
ccaggaauuuccca

SEQ ID NO: 1322225 - RNA, 16 nt, Human
ccaggaauuucccagg

SEQ ID NO: 1322226 - RNA, 17 nt, Human
ccaggaauuucccagga

SEQ ID NO: 1322227 - RNA, 18 nt, Human
ccaggaauuucccaggac

SEQ ID NO: 1322228 - RNA, 19 nt, Human
ccaggaauuucccaggacc

SEQ ID NO: 1322229 - RNA, 20 nt, Human
ccaggaauuucccaggaccc

SEQ ID NO: 1322230 - RNA, 21 nt, Human
ccaggaauuucccaggacccu

SEQ ID NO: 1322231 - RNA, 23 nt, Human
ccaggaauuucccaggacccuga

SEQ ID NO: 1322232 - RNA, 22 nt, Human
ccaggaauuucccaggacccug

SEQ ID NO: 1322233 - RNA, 15 nt, Human
ccaggacaagcaugg

SEQ ID NO: 1322234 - RNA, 11 nt, Human
ccaggaagccg

SEQ ID NO: 1322235 - RNA, 16 nt, Human
ccaggaagccguccug

SEQ ID NO: 1322236 - RNA, 22 nt, Human
ccaggaagccguccuggcgccu

SEQ ID NO: 1322237 - RNA, 15 nt, Human
ccaggaagcuuuggu

SEQ ID NO: 1322238 - RNA, 15 nt, Human
ccagagcccacucca

SEQ ID NO: 1322239 - RNA, 20 nt, Human
ccagagcccacuccaucugg

SEQ ID NO: 1322240 - RNA, 11 nt, Human
ccagagcccag

SEQ ID NO: 1322241 - RNA, 12 nt, Human
ccagagcccagc

SEQ ID NO: 1322242 - RNA, 13 nt, Human
ccagagcccagcu

SEQ ID NO: 1322243 - RNA, 14 nt, Human
ccagagcccagcuc

SEQ ID NO: 1322244 - RNA, 15 nt, Human
ccagagcccagcucc

SEQ ID NO: 1322245 - RNA, 16 nt, Human
ccagagcccagcucca

SEQ ID NO: 1322246 - RNA, 19 nt, Human
ccagcucuggaggggaggg

SEQ ID NO: 1322247 - RNA, 18 nt, Human
ccagcugcacugaugcug

SEQ ID NO: 1322248 - RNA, 19 nt, Human
ccagcugcacugaugcugc

SEQ ID NO: 1322249 - RNA, 17 nt, Human
ccagcugcccccagagc

SEQ ID NO: 1322250 - RNA, 19 nt, Human
ccagcugcccccagagcca

SEQ ID NO: 1322251 - RNA, 21 nt, Human
ccagcugcccccagagccaca

SEQ ID NO: 1322252 - RNA, 22 nt, Human
ccagcugcccccagagccacag

SEQ ID NO: 1322253 - RNA, 18 nt, Human
ccagcugccccggccccu

SEQ ID NO: 1322254 - RNA, 23 nt, Human
ccagcugcccccagagccacagu

SEQ ID NO: 1322255 - RNA, 22 nt, Human
ccagcugccuagauucagggaa

SEQ ID NO: 1322256 - RNA, 13 nt, Human
ccagcuggaggca

SEQ ID NO: 1322257 - RNA, 15 nt, Human
ccagcuggaggcagg

SEQ ID NO: 1322258 - RNA, 17 nt, Human
ccagcuggaggcagggg

SEQ ID NO: 1322259 - RNA, 18 nt, Human
ccagcuggaggcaggggc

SEQ ID NO: 1322260 - RNA, 22 nt, Human
ccagcuggaggcaggggcuucc

SEQ ID NO: 1322261 - RNA, 23 nt, Human
ccagcuggaggcaggggcuuccu

SEQ ID NO: 1322262 - RNA, 16 nt, Human
ccagcugggcucugca

SEQ ID NO: 1322263 - RNA, 18 nt, Human
ccagcugggcucugcaau

SEQ ID NO: 1322264 - RNA, 22 nt, Human
ccagcugcuccgaggacccagg

SEQ ID NO: 1322265 - RNA, 16 nt, Human
ccaguaucucuucagu

SEQ ID NO: 1322266 - RNA, 15 nt, Human
ccaguaucucuucag

SEQ ID NO: 1322267 - RNA, 13 nt, Human
ccaguaucgcuca

SEQ ID NO: 1322268 - RNA, 20 nt, Human
ccaguaggggcuuauaauaa

SEQ ID NO: 1322269 - RNA, 18 nt, Human
ccaguaccuagcuggcuc

SEQ ID NO: 1322270 - RNA, 22 nt, Human
ccaguagaccuuguuacuucug

SEQ ID NO: 1322271 - RNA, 20 nt, Human
ccaguaucucuucagucucu

SEQ ID NO: 1322272 - RNA, 18 nt, Human
ccaguaucucuucagucu

SEQ ID NO: 1322273 - RNA, 17 nt, Human
ccagucuuccugacacu

SEQ ID NO: 1322274 - RNA, 20 nt, Human
ccagugaaaucaguuacucu

SEQ ID NO: 1322275 - RNA, 22 nt, Human
ccagucuuccugacacuuuaau

SEQ ID NO: 1322276 - RNA, 14 nt, Human
ccaguaacaggcuc

SEQ ID NO: 1322277 - RNA, 15 nt, Human
ccaguaacaggcuca

SEQ ID NO: 1322278 - RNA, 19 nt, Human
ccaguaacgcgucuuccug

SEQ ID NO: 1322279 - RNA, 20 nt, Human
ccaguaacgcgucuuccuga

SEQ ID NO: 1322280 - RNA, 14 nt, Human
ccaguaauccugua

SEQ ID NO: 1322281 - RNA, 21 nt, Human
ccaguaacgcgucuuccugag

SEQ ID NO: 1322282 - RNA, 15 nt, Human
ccaguaacucaucug

SEQ ID NO: 1322283 - RNA, 16 nt, Human
ccaguaacucaucugu

SEQ ID NO: 1322284 - RNA, 16 nt, Human
ccaguaacaggcucaa

SEQ ID NO: 1322285 - RNA, 22 nt, Human
ccaggugcuacacccuuuucca

SEQ ID NO: 1322286 - RNA, 19 nt, Human
ccagguguuaacauuccaa

SEQ ID NO: 1322287 - RNA, 20 nt, Human
ccagguguuaacauuccaag

SEQ ID NO: 1322288 - RNA, 23 nt, Human
ccagguguuaacauuccaagacu

SEQ ID NO: 1322289 - RNA, 17 nt, Human
ccagguguuacuguaau

SEQ ID NO: 1322290 - RNA, 21 nt, Human
ccagguguuacuguaauuccu

SEQ ID NO: 1322291 - RNA, 15 nt, Human
ccaggugaggucagc

SEQ ID NO: 1322292 - RNA, 19 nt, Human
ccaggugaggucagcacau

SEQ ID NO: 1322293 - RNA, 20 nt, Human
ccaggugaggucagcacauc

SEQ ID NO: 1322294 - RNA, 12 nt, Human
ccagguccuggu

SEQ ID NO: 1322295 - RNA, 13 nt, Human
ccagguccuggug

SEQ ID NO: 1322296 - RNA, 14 nt, Human
ccagguccuggugg

SEQ ID NO: 1322297 - RNA, 15 nt, Human
ccagguccugguggg

SEQ ID NO: 1322298 - RNA, 19 nt, Human
ccagguccugguggggcag

SEQ ID NO: 1322299 - RNA, 21 nt, Human
ccagguccugguggggcagcu

SEQ ID NO: 1322300 - RNA, 20 nt, Human
ccaggucucccuggaucaga

SEQ ID NO: 1322301 - RNA, 13 nt, Human
ccaggucucccug

SEQ ID NO: 1322302 - RNA, 23 nt, Human
ccaggugaacaaaguuuaccaga

SEQ ID NO: 1322303 - RNA, 15 nt, Human
ccagggccugucuca

SEQ ID NO: 1322304 - RNA, 16 nt, Human
ccagggcuagugacuu

SEQ ID NO: 1322305 - RNA, 19 nt, Human
ccagggcuagugacuugug

SEQ ID NO: 1322306 - RNA, 17 nt, Human
ccagggcuccagccccu

SEQ ID NO: 1322307 - RNA, 12 nt, Human
ccagggcuccag

SEQ ID NO: 1322308 - RNA, 20 nt, Human
ccaggucacccuuugcugug

SEQ ID NO: 1322309 - RNA, 14 nt, Human
ccagggcuccagcc

SEQ ID NO: 1322310 - RNA, 17 nt, Human
ccagguccaaugagcuu

SEQ ID NO: 1322311 - RNA, 18 nt, Human
ccagguccaaugagcuuu

SEQ ID NO: 1322312 - RNA, 19 nt, Human
ccagguccaaugagcuuuc

SEQ ID NO: 1322313 - RNA, 20 nt, Human
ccagguccaaugagcuuucu

SEQ ID NO: 1322314 - RNA, 13 nt, Human
ccagguccagcuc

SEQ ID NO: 1322315 - RNA, 14 nt, Human
ccagguccagcucu

SEQ ID NO: 1322316 - RNA, 15 nt, Human
ccagguccagcucug

SEQ ID NO: 1322317 - RNA, 16 nt, Human
ccagguccagcucugg

SEQ ID NO: 1322318 - RNA, 17 nt, Human
ccagguccagcucugga

SEQ ID NO: 1322319 - RNA, 19 nt, Human
ccagguccagcucuggagg

SEQ ID NO: 1322320 - RNA, 18 nt, Human
ccagguccagcucuggag

SEQ ID NO: 1322321 - RNA, 12 nt, Human
ccaggucccucu

SEQ ID NO: 1322322 - RNA, 13 nt, Human
ccaggucccucuc

SEQ ID NO: 1322323 - RNA, 15 nt, Human
ccaggucccucucau

SEQ ID NO: 1322324 - RNA, 16 nt, Human
ccaggucccucucauu

SEQ ID NO: 1322325 - RNA, 23 nt, Human
ccaggucccucucauuuagccug

SEQ ID NO: 1322326 - RNA, 19 nt, Human
ccaggcuuuuuuaucaugu

SEQ ID NO: 1322327 - RNA, 18 nt, Human
ccaggcuugccugcaggc

SEQ ID NO: 1322328 - RNA, 21 nt, Human
ccaggcugguuucgaacuccu

SEQ ID NO: 1322329 - RNA, 14 nt, Human
ccagggaagcagca

SEQ ID NO: 1322330 - RNA, 16 nt, Human
ccagggaagcagcagc

SEQ ID NO: 1322331 - RNA, 18 nt, Human
ccagggaagcagcagccu

SEQ ID NO: 1322332 - RNA, 23 nt, Human
ccagggaagcagcagccucgccc

SEQ ID NO: 1322333 - RNA, 13 nt, Human
ccagggcagccag

SEQ ID NO: 1322334 - RNA, 14 nt, Human
ccagggcagccagg

SEQ ID NO: 1322335 - RNA, 15 nt, Human
ccagggcagccaggg

SEQ ID NO: 1322336 - RNA, 19 nt, Human
ccagggcagccagggagag

SEQ ID NO: 1322337 - RNA, 20 nt, Human
ccagggcagccagggagagc

SEQ ID NO: 1322338 - RNA, 13 nt, Human
ccagggcaucucu

SEQ ID NO: 1322339 - RNA, 14 nt, Human
ccagggcaucucug

SEQ ID NO: 1322340 - RNA, 15 nt, Human
ccagggcaucucugg

SEQ ID NO: 1322341 - RNA, 16 nt, Human
ccagggcaucucuggg

SEQ ID NO: 1322342 - RNA, 17 nt, Human
ccagggcaucucugggc

SEQ ID NO: 1322343 - RNA, 18 nt, Human
ccagggcaucucugggcu

SEQ ID NO: 1322344 - RNA, 20 nt, Human
ccagggcaucucugggcugg

SEQ ID NO: 1322345 - RNA, 19 nt, Human
ccagggcaucucugggcug

SEQ ID NO: 1322346 - RNA, 14 nt, Human
ccagggccacgcuc

SEQ ID NO: 1322347 - RNA, 16 nt, Human
ccagggccacgcucca

SEQ ID NO: 1322348 - RNA, 19 nt, Human
ccagggccacgcuccagcu

SEQ ID NO: 1322349 - RNA, 18 nt, Human
ccagggccacgcuccagc

SEQ ID NO: 1322350 - RNA, 21 nt, Human
ccaggcuggucucgaacuccu

SEQ ID NO: 1322351 - RNA, 17 nt, Human
ccaggcuugccugcagg

SEQ ID NO: 1322352 - RNA, 13 nt, Human
ccaggccccauga

SEQ ID NO: 1322353 - RNA, 15 nt, Human
ccaggccccaugacc

SEQ ID NO: 1322354 - RNA, 16 nt, Human
ccaggccccaugaccu

SEQ ID NO: 1322355 - RNA, 17 nt, Human
ccaggccccaugaccuc

SEQ ID NO: 1322356 - RNA, 18 nt, Human
ccaggccccaugaccucc

SEQ ID NO: 1322357 - RNA, 20 nt, Human
ccaggccccaugaccuccag

SEQ ID NO: 1322358 - RNA, 21 nt, Human
ccaggccccaugaccuccagc

SEQ ID NO: 1322359 - RNA, 22 nt, Human
ccaggccccaugaccuccagcu

SEQ ID NO: 1322360 - RNA, 23 nt, Human
ccaggccccaugaccuccagcuu

SEQ ID NO: 1322361 - RNA, 12 nt, Human
ccagggaagggg

SEQ ID NO: 1322362 - RNA, 12 nt, Human
ccaggacucugc

SEQ ID NO: 1322363 - RNA, 13 nt, Human
ccaggacucugca

SEQ ID NO: 1322364 - RNA, 14 nt, Human
ccaggacucugcag

SEQ ID NO: 1322365 - RNA, 14 nt, Human
ccaggaggacccag

SEQ ID NO: 1322366 - RNA, 15 nt, Human
ccaggaggacccagg

SEQ ID NO: 1322367 - RNA, 18 nt, Human
ccaggaggacccagggcu

SEQ ID NO: 1322368 - RNA, 19 nt, Human
ccaggaggacccagggcuc

SEQ ID NO: 1322369 - RNA, 21 nt, Human
ccaggaggacccagggcucug

SEQ ID NO: 1322370 - RNA, 20 nt, Human
ccaggaggacccagggcucu

SEQ ID NO: 1322371 - RNA, 20 nt, Human
ccaggcauccuccacaauag

SEQ ID NO: 1322372 - RNA, 18 nt, Human
ccaggcauguggcagggg

SEQ ID NO: 1322373 - RNA, 16 nt, Human
ccaggcauugccaagg

SEQ ID NO: 1322374 - RNA, 22 nt, Human
ccaggccaaaggggaccuggaa

SEQ ID NO: 1322375 - RNA, 23 nt, Human
ccaggccaaaggggaccuggaag

SEQ ID NO: 1322376 - RNA, 20 nt, Human
ccacaggaaccacaagacug

SEQ ID NO: 1322377 - RNA, 13 nt, Human
ccacagcuuuugc

SEQ ID NO: 1322378 - RNA, 15 nt, Human
ccacagcuuuugcaa

SEQ ID NO: 1322379 - RNA, 22 nt, Human
ccacagcuuuuuaccaaguuuc

SEQ ID NO: 1322380 - RNA, 19 nt, Human
ccacaggaagccugcaguc

SEQ ID NO: 1322381 - RNA, 22 nt, Human
ccacaggaagccugcaguccug

SEQ ID NO: 1322382 - RNA, 12 nt, Human
ccacacuccagc

SEQ ID NO: 1322383 - RNA, 14 nt, Human
ccacacucagcaca

SEQ ID NO: 1322384 - RNA, 21 nt, Human
ccacacucagauccuccucau

SEQ ID NO: 1322385 - RNA, 16 nt, Human
ccacacccuguacugu

SEQ ID NO: 1322386 - RNA, 19 nt, Human
ccacacccuguacuguucu

SEQ ID NO: 1322387 - RNA, 17 nt, Human
ccacacgagaaccugaa

SEQ ID NO: 1322388 - RNA, 11 nt, Human
ccacacucaga

SEQ ID NO: 1322389 - RNA, 18 nt, Human
ccacacucagauccuccu

SEQ ID NO: 1322390 - RNA, 19 nt, Human
ccacacucagauccuccuc

SEQ ID NO: 1322391 - RNA, 23 nt, Human
ccacaggaagccugcaguccugg

SEQ ID NO: 1322392 - RNA, 16 nt, Human
ccacaggacauuucuc

SEQ ID NO: 1322393 - RNA, 21 nt, Human
ccacaggacauuucucuaaga

SEQ ID NO: 1322394 - RNA, 15 nt, Human
ccacaggcccuuccu

SEQ ID NO: 1322395 - RNA, 16 nt, Human
ccacaggcccuuccuc

SEQ ID NO: 1322396 - RNA, 17 nt, Human
ccacaggcccuuccucu

SEQ ID NO: 1322397 - RNA, 18 nt, Human
ccacaggcccuuccucuc

SEQ ID NO: 1322398 - RNA, 19 nt, Human
ccacaggcccuuccucucc

SEQ ID NO: 1322399 - RNA, 22 nt, Human
ccacaggcccuuccucuccacu

SEQ ID NO: 1322400 - RNA, 23 nt, Human
ccacaggcccuuccucuccacug

SEQ ID NO: 1322401 - RNA, 16 nt, Human
ccacaggcccacagua

SEQ ID NO: 1322402 - RNA, 16 nt, Human
ccacaggccgcccugc

SEQ ID NO: 1322403 - RNA, 17 nt, Human
ccacaggccgcccugcg

SEQ ID NO: 1322404 - RNA, 19 nt, Human
ccacaccagggccagccuc

SEQ ID NO: 1322405 - RNA, 20 nt, Human
ccacaccagggccagccucu

SEQ ID NO: 1322406 - RNA, 18 nt, Human
ccaauauuaaaucugcug

SEQ ID NO: 1322407 - RNA, 22 nt, Human
ccaauagggcugagcucucugu

SEQ ID NO: 1322408 - RNA, 15 nt, Human
ccaauauuaaaucug

SEQ ID NO: 1322409 - RNA, 12 nt, Human
ccacacagcugc

SEQ ID NO: 1322410 - RNA, 16 nt, Human
ccacacagcugccggu

SEQ ID NO: 1322411 - RNA, 20 nt, Human
ccacacagugcucaaggcca

SEQ ID NO: 1322412 - RNA, 23 nt, Human
ccacacagugcucaaggccagcu

SEQ ID NO: 1322413 - RNA, 22 nt, Human
ccacacagugcucaaggccagc

SEQ ID NO: 1322414 - RNA, 20 nt, Human
ccacaugccauuuguacuga

SEQ ID NO: 1322415 - RNA, 22 nt, Human
ccacaugccauuuguacugacc

SEQ ID NO: 1322416 - RNA, 14 nt, Human
ccacaugccccauc

SEQ ID NO: 1322417 - RNA, 12 nt, Human
ccacaugcccca

SEQ ID NO: 1322418 - RNA, 15 nt, Human
ccacauggcacagag

SEQ ID NO: 1322419 - RNA, 17 nt, Human
ccacauggcacagagau

SEQ ID NO: 1322420 - RNA, 16 nt, Human
ccacaugggaggcuca

SEQ ID NO: 1322421 - RNA, 22 nt, Human
ccacauuuggaauacuuuuugu

SEQ ID NO: 1322422 - RNA, 19 nt, Human
ccacauuuggaauacuuuu

SEQ ID NO: 1322423 - RNA, 13 nt, Human
ccacauuaaagaa

SEQ ID NO: 1322424 - RNA, 14 nt, Human
ccacauuaaagaag

SEQ ID NO: 1322425 - RNA, 16 nt, Human
ccacauuaaagaagac

SEQ ID NO: 1322426 - RNA, 20 nt, Human
ccacauuaaagaagaccuga

SEQ ID NO: 1322427 - RNA, 14 nt, Human
ccacauuggaagag

SEQ ID NO: 1322428 - RNA, 19 nt, Human
ccacauuggaagagcagca

SEQ ID NO: 1322429 - RNA, 17 nt, Human
ccacauuggaagagcag

SEQ ID NO: 1322430 - RNA, 14 nt, Human
ccacauuucuaaaa

SEQ ID NO: 1322431 - RNA, 15 nt, Human
ccacauuucuaaaau

SEQ ID NO: 1322432 - RNA, 13 nt, Human
ccacauuuggaau

SEQ ID NO: 1322433 - RNA, 21 nt, Human
ccaccaagagggacgccuggg

SEQ ID NO: 1322434 - RNA, 17 nt, Human
ccaccaagagggacgcc

SEQ ID NO: 1322435 - RNA, 15 nt, Human
ccaccaacccucaga

SEQ ID NO: 1322436 - RNA, 15 nt, Human
ccaccaaaacugcuc

SEQ ID NO: 1322437 - RNA, 16 nt, Human
ccaccaaaacugcucc

SEQ ID NO: 1322438 - RNA, 13 nt, Human
ccaccaacccuca

SEQ ID NO: 1322439 - RNA, 14 nt, Human
ccaccaacccucag

SEQ ID NO: 1322440 - RNA, 15 nt, Human
ccaccaacccucagg

SEQ ID NO: 1322441 - RNA, 16 nt, Human
ccaccaacccucaggg

SEQ ID NO: 1322442 - RNA, 17 nt, Human
ccaccaacccucagggc

SEQ ID NO: 1322443 - RNA, 18 nt, Human
ccaccaacccucagggca

SEQ ID NO: 1322444 - RNA, 15 nt, Human
ccacaggcucaggca

SEQ ID NO: 1322445 - RNA, 16 nt, Human
ccacaggcucaggcag

SEQ ID NO: 1322446 - RNA, 21 nt, Human
ccacaggcucaggcaggggcc

SEQ ID NO: 1322447 - RNA, 17 nt, Human
ccacaggcucaggcagg

SEQ ID NO: 1322448 - RNA, 19 nt, Human
ccacaggcucaggcagggg

SEQ ID NO: 1322449 - RNA, 20 nt, Human
ccacaggcucaggcaggggc

SEQ ID NO: 1322450 - RNA, 14 nt, Human
ccacaggcuucuga

SEQ ID NO: 1322451 - RNA, 19 nt, Human
ccacaggcuucugagcagc

SEQ ID NO: 1322452 - RNA, 16 nt, Human
ccacagggucccacag

SEQ ID NO: 1322453 - RNA, 19 nt, Human
ccacagggucccacagcca

SEQ ID NO: 1322454 - RNA, 20 nt, Human
ccacagggucccacagccac

SEQ ID NO: 1322455 - RNA, 21 nt, Human
ccacagggucccacagccacg

SEQ ID NO: 1322456 - RNA, 14 nt, Human
ccacaggucuagac

SEQ ID NO: 1322457 - RNA, 15 nt, Human
ccacaggucuagacu

SEQ ID NO: 1322458 - RNA, 15 nt, Human
ccacaguagucuuga

SEQ ID NO: 1322459 - RNA, 17 nt, Human
ccacaguagucuugaug

SEQ ID NO: 1322460 - RNA, 19 nt, Human
ccacagucccaucugcuuc

SEQ ID NO: 1322461 - RNA, 20 nt, Human
ccacagugccuaauaauacu

SEQ ID NO: 1322462 - RNA, 13 nt, Human
ccacagugucagg

SEQ ID NO: 1322463 - RNA, 14 nt, Human
ccacagugucaggc

SEQ ID NO: 1322464 - RNA, 19 nt, Human
ccacagugucaggcacugg

SEQ ID NO: 1322465 - RNA, 22 nt, Human
ccacaucccacucacaacagcu

SEQ ID NO: 1322466 - RNA, 16 nt, Human
ccacaucccaucgucu

SEQ ID NO: 1322467 - RNA, 13 nt, Human
ccacaucccuggg

SEQ ID NO: 1322468 - RNA, 14 nt, Human
ccacaucccugggc

SEQ ID NO: 1322469 - RNA, 15 nt, Human
ccacaucccugggcc

SEQ ID NO: 1322470 - RNA, 16 nt, Human
ccacaucccugggccu

SEQ ID NO: 1322471 - RNA, 17 nt, Human
ccacaucccugggccug

SEQ ID NO: 1322472 - RNA, 18 nt, Human
ccacaucccugggccugc

SEQ ID NO: 1322473 - RNA, 19 nt, Human
ccacaucccugggccugcu

SEQ ID NO: 1322474 - RNA, 20 nt, Human
ccacaucccugggccugcug

SEQ ID NO: 1322475 - RNA, 21 nt, Human
ccacaucccugggccugcugc

SEQ ID NO: 1322476 - RNA, 23 nt, Human
ccacaucccugggccugcugcug

SEQ ID NO: 1322477 - RNA, 22 nt, Human
ccacaucccugggccugcugcu

SEQ ID NO: 1322478 - RNA, 13 nt, Human
ccacauccuccac

SEQ ID NO: 1322479 - RNA, 16 nt, Human
ccaauauucauagcag

SEQ ID NO: 1322480 - RNA, 16 nt, Human
ccaccauggccagcua

SEQ ID NO: 1322481 - RNA, 16 nt, Human
ccaccauuuggcaucc

SEQ ID NO: 1322482 - RNA, 17 nt, Human
ccaccauuuggcauccc

SEQ ID NO: 1322483 - RNA, 18 nt, Human
ccaccauuuggcaucccu

SEQ ID NO: 1322484 - RNA, 22 nt, Human
ccaccauuuggcaucccugggc

SEQ ID NO: 1322485 - RNA, 21 nt, Human
ccaccauuuggcaucccuggg

SEQ ID NO: 1322486 - RNA, 12 nt, Human
ccacccaggcca

SEQ ID NO: 1322487 - RNA, 14 nt, Human
ccacccaggccagg

SEQ ID NO: 1322488 - RNA, 23 nt, Human
ccacccaggggcagccccaggcc

SEQ ID NO: 1322489 - RNA, 17 nt, Human
ccacccaggggcagccc

SEQ ID NO: 1322490 - RNA, 16 nt, Human
ccaccccaaccugcuc

SEQ ID NO: 1322491 - RNA, 14 nt, Human
ccacgguguucugu

SEQ ID NO: 1322492 - RNA, 17 nt, Human
ccacggggacucagccc

SEQ ID NO: 1322493 - RNA, 16 nt, Human
ccaccugucugucugu

SEQ ID NO: 1322494 - RNA, 14 nt, Human
ccaccugucugucu

SEQ ID NO: 1322495 - RNA, 12 nt, Human
ccaccugucugu

SEQ ID NO: 1322496 - RNA, 11 nt, Human
ccaccugucug

SEQ ID NO: 1322497 - RNA, 22 nt, Human
ccaccugucugucugucugucc

SEQ ID NO: 1322498 - RNA, 18 nt, Human
ccaccccauccaguucau

SEQ ID NO: 1322499 - RNA, 16 nt, Human
ccaccccauucccgca

SEQ ID NO: 1322500 - RNA, 13 nt, Human
ccacccccaaggu

SEQ ID NO: 1322501 - RNA, 22 nt, Human
ccaccccaaccugcucuccucu

SEQ ID NO: 1322502 - RNA, 15 nt, Human
ccaccccacccacuu

SEQ ID NO: 1322503 - RNA, 17 nt, Human
ccaccccaauccuccca

SEQ ID NO: 1322504 - RNA, 14 nt, Human
ccaccccagggcag

SEQ ID NO: 1322505 - RNA, 18 nt, Human
ccaccccagggcagccag

SEQ ID NO: 1322506 - RNA, 20 nt, Human
ccaccccagggcagccaggg

SEQ ID NO: 1322507 - RNA, 19 nt, Human
ccaccccagggcagccagg

SEQ ID NO: 1322508 - RNA, 21 nt, Human
ccacgucagcugggacacccc

SEQ ID NO: 1322509 - RNA, 13 nt, Human
ccacguacugcag

SEQ ID NO: 1322510 - RNA, 16 nt, Human
ccacguacugcagccu

SEQ ID NO: 1322511 - RNA, 17 nt, Human
ccacguacugcagccuc

SEQ ID NO: 1322512 - RNA, 15 nt, Human
ccacuagacccacug

SEQ ID NO: 1322513 - RNA, 17 nt, Human
ccacuagacccacugga

SEQ ID NO: 1322514 - RNA, 14 nt, Human
ccacuagccucagg

SEQ ID NO: 1322515 - RNA, 15 nt, Human
ccacuagccucaggg

SEQ ID NO: 1322516 - RNA, 16 nt, Human
ccacuagccucagggg

SEQ ID NO: 1322517 - RNA, 21 nt, Human
ccacuccagaccccuggcuuu

SEQ ID NO: 1322518 - RNA, 22 nt, Human
ccacuccagaccccuggcuuuu

SEQ ID NO: 1322519 - RNA, 12 nt, Human
ccacucagagac

SEQ ID NO: 1322520 - RNA, 13 nt, Human
ccacucagagaca

SEQ ID NO: 1322521 - RNA, 15 nt, Human
ccacucagagacaug

SEQ ID NO: 1322522 - RNA, 17 nt, Human
ccacucagagacaugca

SEQ ID NO: 1322523 - RNA, 14 nt, Human
ccacuucagccucc

SEQ ID NO: 1322524 - RNA, 21 nt, Human
ccagaaagcaguugagacaag

SEQ ID NO: 1322525 - RNA, 22 nt, Human
ccagaaagccccacccaggcca

SEQ ID NO: 1322526 - RNA, 23 nt, Human
ccagaaagccccacccaggccag

SEQ ID NO: 1322527 - RNA, 15 nt, Human
ccagaaaguaaaggu

SEQ ID NO: 1322528 - RNA, 21 nt, Human
ccacuuagaaauugcauuucc

SEQ ID NO: 1322529 - RNA, 16 nt, Human
ccacuuauagccucug

SEQ ID NO: 1322530 - RNA, 22 nt, Human
ccacuuauuccccauucuuccu

SEQ ID NO: 1322531 - RNA, 15 nt, Human
ccacuuauagccucu

SEQ ID NO: 1322532 - RNA, 18 nt, Human
ccacugcagaagacagua

SEQ ID NO: 1322533 - RNA, 13 nt, Human
ccacugcagaaga

SEQ ID NO: 1322534 - RNA, 13 nt, Human
ccacuccaucugg

SEQ ID NO: 1322535 - RNA, 16 nt, Human
ccacuccaucugguag

SEQ ID NO: 1322536 - RNA, 17 nt, Human
ccacuccaucugguaga

SEQ ID NO: 1322537 - RNA, 18 nt, Human
ccacuccaucugguagaa

SEQ ID NO: 1322538 - RNA, 19 nt, Human
ccacuuagaaauugcauuu

SEQ ID NO: 1322539 - RNA, 15 nt, Human
ccacuuaauguaugu

SEQ ID NO: 1322540 - RNA, 17 nt, Human
ccacuuaauguauguua

SEQ ID NO: 1322541 - RNA, 20 nt, Human
ccacuuaauguauguuacca

SEQ ID NO: 1322542 - RNA, 21 nt, Human
ccacuuacauuuacaaacuga

SEQ ID NO: 1322543 - RNA, 16 nt, Human
ccacuuaaaaauuaaa

SEQ ID NO: 1322544 - RNA, 13 nt, Human
ccacuuaaaaugu

SEQ ID NO: 1322545 - RNA, 16 nt, Human
ccagaagugugacugg

SEQ ID NO: 1322546 - RNA, 18 nt, Human
ccagaagugugacuggcu

SEQ ID NO: 1322547 - RNA, 13 nt, Human
ccagaagaugacu

SEQ ID NO: 1322548 - RNA, 21 nt, Human
ccagaagaugacugaggguga

SEQ ID NO: 1322549 - RNA, 16 nt, Human
ccagaagaugacugag

SEQ ID NO: 1322550 - RNA, 16 nt, Human
ccagaaugcuuuagga

SEQ ID NO: 1322551 - RNA, 23 nt, Human
ccagaauggucuuucuaaugugu

SEQ ID NO: 1322552 - RNA, 13 nt, Human
ccagaauuucaaa

SEQ ID NO: 1322553 - RNA, 16 nt, Human
ccagaauuuaaaccua

SEQ ID NO: 1322554 - RNA, 15 nt, Human
ccagacacaggcccu

SEQ ID NO: 1322555 - RNA, 14 nt, Human
ccagaccccuggcu

SEQ ID NO: 1322556 - RNA, 12 nt, Human
ccagacacuggu

SEQ ID NO: 1322557 - RNA, 14 nt, Human
ccagacacaggccc

SEQ ID NO: 1322558 - RNA, 11 nt, Human
ccagacacugg

SEQ ID NO: 1322559 - RNA, 13 nt, Human
ccagacacugguu

SEQ ID NO: 1322560 - RNA, 15 nt, Human
ccagaccccuggcuu

SEQ ID NO: 1322561 - RNA, 16 nt, Human
ccagaccccuggcuuu

SEQ ID NO: 1322562 - RNA, 17 nt, Human
ccagaccccuggcuuuu

SEQ ID NO: 1322563 - RNA, 18 nt, Human
ccagaccccuggcuuuuc

SEQ ID NO: 1322564 - RNA, 20 nt, Human
ccaagcaccugggauuacaa

SEQ ID NO: 1322565 - RNA, 18 nt, Human
ccaagcacuucuuuuucu

SEQ ID NO: 1322566 - RNA, 13 nt, Human
ccaagcacagcag

SEQ ID NO: 1322567 - RNA, 14 nt, Human
ccaagcacagcagc

SEQ ID NO: 1322568 - RNA, 15 nt, Human
ccaagcacagcagcc

SEQ ID NO: 1322569 - RNA, 17 nt, Human
ccaagcacagcagccug

SEQ ID NO: 1322570 - RNA, 18 nt, Human
ccaagcacagcagccugg

SEQ ID NO: 1322571 - RNA, 14 nt, Human
ccaagcaaguauua

SEQ ID NO: 1322572 - RNA, 12 nt, Human
ccaagcacagca

SEQ ID NO: 1322573 - RNA, 22 nt, Human
ccaagaugggcaucuuuuguau

SEQ ID NO: 1322574 - RNA, 13 nt, Human
ccaagauuccgga

SEQ ID NO: 1322575 - RNA, 20 nt, Human
ccaagauuccggauccuaag

SEQ ID NO: 1322576 - RNA, 13 nt, Human
ccaagauucuaga

SEQ ID NO: 1322577 - RNA, 14 nt, Human
ccaagauucuagau

SEQ ID NO: 1322578 - RNA, 15 nt, Human
ccaagauucuagaug

SEQ ID NO: 1322579 - RNA, 16 nt, Human
ccaagauucuagauga

SEQ ID NO: 1322580 - RNA, 21 nt, Human
ccaagauuggccugaggcugc

SEQ ID NO: 1322581 - RNA, 18 nt, Human
ccaagauugagcucucug

SEQ ID NO: 1322582 - RNA, 17 nt, Human
ccaagauucuagaugau

SEQ ID NO: 1322583 - RNA, 17 nt, Human
ccaagcauuuagaugua

SEQ ID NO: 1322584 - RNA, 13 nt, Human
ccaagcaucuugg

SEQ ID NO: 1322585 - RNA, 22 nt, Human
ccaagcaucuuggggggguggc

SEQ ID NO: 1322586 - RNA, 23 nt, Human
ccaagcaucuuggggggguggcc

SEQ ID NO: 1322587 - RNA, 22 nt, Human
ccaagcaguugggacuacaggc

SEQ ID NO: 1322588 - RNA, 20 nt, Human
ccaagcaguugggacuacag

SEQ ID NO: 1322589 - RNA, 21 nt, Human
ccaagcaguugggacuacagg

SEQ ID NO: 1322590 - RNA, 16 nt, Human
ccaagcauauaaaauu

SEQ ID NO: 1322591 - RNA, 18 nt, Human
ccaagcauauaaaauuuu

SEQ ID NO: 1322592 - RNA, 17 nt, Human
ccaagcuauucaauucu

SEQ ID NO: 1322593 - RNA, 17 nt, Human
ccaagcuaagcacugcc

SEQ ID NO: 1322594 - RNA, 20 nt, Human
ccaagcuaagcacugccacu

SEQ ID NO: 1322595 - RNA, 15 nt, Human
ccaagcggugucucu

SEQ ID NO: 1322596 - RNA, 17 nt, Human
ccaagcggugucucucc

SEQ ID NO: 1322597 - RNA, 22 nt, Human
ccaagccuuggggauucuucca

SEQ ID NO: 1322598 - RNA, 22 nt, Human
ccaagccuugauugguguugcc

SEQ ID NO: 1322599 - RNA, 14 nt, Human
ccaagccguggcuu

SEQ ID NO: 1322600 - RNA, 15 nt, Human
ccaagccuggcaagg

SEQ ID NO: 1322601 - RNA, 13 nt, Human
ccaagccguggcu

SEQ ID NO: 1322602 - RNA, 22 nt, Human
ccaagccuacuuuugccauuga

SEQ ID NO: 1322603 - RNA, 20 nt, Human
ccaagccauggguagccugg

SEQ ID NO: 1322604 - RNA, 15 nt, Human
ccaagcccagcccau

SEQ ID NO: 1322605 - RNA, 21 nt, Human
ccaagccauggguagccuggg

SEQ ID NO: 1322606 - RNA, 18 nt, Human
ccaagccaagggaaccug

SEQ ID NO: 1322607 - RNA, 20 nt, Human
ccaagccaagggaaccugug

SEQ ID NO: 1322608 - RNA, 22 nt, Human
ccaagccaagggaaccuguguc

SEQ ID NO: 1322609 - RNA, 23 nt, Human
ccaagccaagggaaccugugucc

SEQ ID NO: 1322610 - RNA, 16 nt, Human
ccaagccagaggcugg

SEQ ID NO: 1322611 - RNA, 17 nt, Human
ccaagccagaggcuggg

SEQ ID NO: 1322612 - RNA, 19 nt, Human
ccaagccagaggcuggguu

SEQ ID NO: 1322613 - RNA, 20 nt, Human
ccaaguagcugagacuacag

SEQ ID NO: 1322614 - RNA, 20 nt, Human
ccaaguagcugggauuacag

SEQ ID NO: 1322615 - RNA, 20 nt, Human
ccaaguaacugggauuacag

SEQ ID NO: 1322616 - RNA, 19 nt, Human
ccaaguaaagguuaaaaau

SEQ ID NO: 1322617 - RNA, 22 nt, Human
ccaaguagaaucucaguugauu

SEQ ID NO: 1322618 - RNA, 16 nt, Human
ccaaggucuucuuaau

SEQ ID NO: 1322619 - RNA, 19 nt, Human
ccaagguuuuauaaggcug

SEQ ID NO: 1322620 - RNA, 20 nt, Human
ccaagguuuuauaaggcuga

SEQ ID NO: 1322621 - RNA, 21 nt, Human
ccaagguuuuauaaggcugau

SEQ ID NO: 1322622 - RNA, 22 nt, Human
ccaauaguuguugauuggcagg

SEQ ID NO: 1322623 - RNA, 18 nt, Human
ccaauagggcugagcucu

SEQ ID NO: 1322624 - RNA, 15 nt, Human
ccaaguccagguccu

SEQ ID NO: 1322625 - RNA, 16 nt, Human
ccaaguccagguccug

SEQ ID NO: 1322626 - RNA, 17 nt, Human
ccaaguccagguccugg

SEQ ID NO: 1322627 - RNA, 18 nt, Human
ccaaguccagguccuggu

SEQ ID NO: 1322628 - RNA, 19 nt, Human
ccaaguccagguccuggug

SEQ ID NO: 1322629 - RNA, 13 nt, Human
ccaaguuccucua

SEQ ID NO: 1322630 - RNA, 11 nt, Human
ccaaguuccuc

SEQ ID NO: 1322631 - RNA, 17 nt, Human
ccaaguugugcuugagc

SEQ ID NO: 1322632 - RNA, 20 nt, Human
ccaaguugugcuugagccag

SEQ ID NO: 1322633 - RNA, 22 nt, Human
ccaaguugugcuugagccagga

SEQ ID NO: 1322634 - RNA, 16 nt, Human
ccaaggcuuucucuac

SEQ ID NO: 1322635 - RNA, 18 nt, Human
ccaagggauggacaucuu

SEQ ID NO: 1322636 - RNA, 19 nt, Human
ccaagggcauaaauuauug

SEQ ID NO: 1322637 - RNA, 18 nt, Human
ccaagggccgacuaagag

SEQ ID NO: 1322638 - RNA, 16 nt, Human
ccaagggaaccugugu

SEQ ID NO: 1322639 - RNA, 17 nt, Human
ccaagggaaccuguguc

SEQ ID NO: 1322640 - RNA, 18 nt, Human
ccaagggaaccugugucc

SEQ ID NO: 1322641 - RNA, 19 nt, Human
ccaagggaaccuguguccg

SEQ ID NO: 1322642 - RNA, 13 nt, Human
ccaagggaggcug

SEQ ID NO: 1322643 - RNA, 15 nt, Human
ccaagggaggcugcu

SEQ ID NO: 1322644 - RNA, 22 nt, Human
ccaagggaggcugcugcugcuc

SEQ ID NO: 1322645 - RNA, 18 nt, Human
ccaagggaggcugcugcu

SEQ ID NO: 1322646 - RNA, 13 nt, Human
ccaagggcugccg

SEQ ID NO: 1322647 - RNA, 21 nt, Human
ccaagggcuuuguuuugcaca

SEQ ID NO: 1322648 - RNA, 19 nt, Human
ccaaggggaaucagaacuc

SEQ ID NO: 1322649 - RNA, 22 nt, Human
ccaaggggauuuuuaugucugg

SEQ ID NO: 1322650 - RNA, 14 nt, Human
ccaaggggccugag

SEQ ID NO: 1322651 - RNA, 15 nt, Human
ccaaggggccugagc

SEQ ID NO: 1322652 - RNA, 16 nt, Human
ccaaggggccugagca

SEQ ID NO: 1322653 - RNA, 17 nt, Human
ccaaggggccugagcag

SEQ ID NO: 1322654 - RNA, 22 nt, Human
ccaaggggccugagcaguccuu

SEQ ID NO: 1322655 - RNA, 16 nt, Human
ccaaggggcuucaggu

SEQ ID NO: 1322656 - RNA, 16 nt, Human
ccaagguaccauccua

SEQ ID NO: 1322657 - RNA, 21 nt, Human
ccaacaagauugcuuaauaaa

SEQ ID NO: 1322658 - RNA, 21 nt, Human
ccaacaagaagggacugagag

SEQ ID NO: 1322659 - RNA, 13 nt, Human
ccaacaccaagca

SEQ ID NO: 1322660 - RNA, 16 nt, Human
ccaacaccaagcacag

SEQ ID NO: 1322661 - RNA, 17 nt, Human
ccaacaccaagcacagc

SEQ ID NO: 1322662 - RNA, 19 nt, Human
ccaacaccaagcacagcag

SEQ ID NO: 1322663 - RNA, 22 nt, Human
ccaacaccaagcacagcagccu

SEQ ID NO: 1322664 - RNA, 23 nt, Human
ccaacaccaagcacagcagccug

SEQ ID NO: 1322665 - RNA, 13 nt, Human
ccaacacugccag

SEQ ID NO: 1322666 - RNA, 20 nt, Human
ccaacacgcaccugccucag

SEQ ID NO: 1322667 - RNA, 21 nt, Human
ccaacacgcaccugccucagg

SEQ ID NO: 1322668 - RNA, 14 nt, Human
ccaacacugccagc

SEQ ID NO: 1322669 - RNA, 15 nt, Human
ccaacacugccagca

SEQ ID NO: 1322670 - RNA, 16 nt, Human
ccaacacugccagcau

SEQ ID NO: 1322671 - RNA, 13 nt, Human
ccaaagggagucu

SEQ ID NO: 1322672 - RNA, 18 nt, Human
ccaaagggagucugccag

SEQ ID NO: 1322673 - RNA, 19 nt, Human
ccaaagggagucugccagg

SEQ ID NO: 1322674 - RNA, 21 nt, Human
ccaaagggagucugccagggc

SEQ ID NO: 1322675 - RNA, 19 nt, Human
ccaaaggggaccuggaagg

SEQ ID NO: 1322676 - RNA, 18 nt, Human
ccaaaggggaccuggaag

SEQ ID NO: 1322677 - RNA, 15 nt, Human
ccaaauuugauugau

SEQ ID NO: 1322678 - RNA, 20 nt, Human
ccaaauuugauugauuugaa

SEQ ID NO: 1322679 - RNA, 19 nt, Human
ccaacaaagaacacuaacu

SEQ ID NO: 1322680 - RNA, 20 nt, Human
ccaaccaaguggcucccaca

SEQ ID NO: 1322681 - RNA, 13 nt, Human
ccaaccauuuccu

SEQ ID NO: 1322682 - RNA, 14 nt, Human
ccaaccauuuccuc

SEQ ID NO: 1322683 - RNA, 17 nt, Human
ccaaccauuuccucaga

SEQ ID NO: 1322684 - RNA, 23 nt, Human
ccaacagcgcccaaaggacgcac

SEQ ID NO: 1322685 - RNA, 16 nt, Human
ccaacagcgcccaaag

SEQ ID NO: 1322686 - RNA, 12 nt, Human
ccaacagcugga

SEQ ID NO: 1322687 - RNA, 22 nt, Human
ccaacagcuggacccugaccag

SEQ ID NO: 1322688 - RNA, 18 nt, Human
ccaacagcuggacccuga

SEQ ID NO: 1322689 - RNA, 22 nt, Human
ccaaacugacucuuaagaagac

SEQ ID NO: 1322690 - RNA, 18 nt, Human
ccaaacucuucccucucu

SEQ ID NO: 1322691 - RNA, 17 nt, Human
ccaaacugauccaguau

SEQ ID NO: 1322692 - RNA, 20 nt, Human
ccaaacauccucuuccauau

SEQ ID NO: 1322693 - RNA, 16 nt, Human
ccaaagcuuuccugcc

SEQ ID NO: 1322694 - RNA, 17 nt, Human
ccaaagcuuuccugccc

SEQ ID NO: 1322695 - RNA, 19 nt, Human
ccaaagcuuuccugcccca

SEQ ID NO: 1322696 - RNA, 20 nt, Human
ccaaagcuuuccugccccag

SEQ ID NO: 1322697 - RNA, 17 nt, Human
ccaaaggacagccgccu

SEQ ID NO: 1322698 - RNA, 18 nt, Human
ccaaaggacgcacugagc

SEQ ID NO: 1322699 - RNA, 19 nt, Human
ccaaaggacgcacugagca

SEQ ID NO: 1322700 - RNA, 21 nt, Human
ccaaaggacgcacugagcaac

SEQ ID NO: 1322701 - RNA, 14 nt, Human
ccaaaggaggaugg

SEQ ID NO: 1322702 - RNA, 16 nt, Human
ccaaaggaugugauau

SEQ ID NO: 1322703 - RNA, 19 nt, Human
ccaaaggaugugauauaua

SEQ ID NO: 1322704 - RNA, 14 nt, Human
ccaaaggcucccug

SEQ ID NO: 1322705 - RNA, 17 nt, Human
ccaaagcuucccacggc

SEQ ID NO: 1322706 - RNA, 16 nt, Human
ccaaagcuuucaugua

SEQ ID NO: 1322707 - RNA, 13 nt, Human
ccaaagcuuuccu

SEQ ID NO: 1322708 - RNA, 14 nt, Human
ccaaagcuuuccug

SEQ ID NO: 1322709 - RNA, 15 nt, Human
ccaaagcuuuccugc

SEQ ID NO: 1322710 - RNA, 12 nt, Human
ccaacccuagca

SEQ ID NO: 1322711 - RNA, 20 nt, Human
ccaacccguggaggcugcuc

SEQ ID NO: 1322712 - RNA, 21 nt, Human
ccaacccguggaggcugcucg

SEQ ID NO: 1322713 - RNA, 14 nt, Human
ccaacccguggagg

SEQ ID NO: 1322714 - RNA, 15 nt, Human
ccaacccguggaggc

SEQ ID NO: 1322715 - RNA, 17 nt, Human
ccaacccguggaggcug

SEQ ID NO: 1322716 - RNA, 18 nt, Human
ccaacccguggaggcugc

SEQ ID NO: 1322717 - RNA, 14 nt, Human
ccaacccucagagc

SEQ ID NO: 1322718 - RNA, 15 nt, Human
ccaacccucagagcc

SEQ ID NO: 1322719 - RNA, 19 nt, Human
ccaacccccgacuucaucc

SEQ ID NO: 1322720 - RNA, 22 nt, Human
ccaacccgucuggcccaccagg

SEQ ID NO: 1322721 - RNA, 19 nt, Human
ccaagaauagaugcugacu

SEQ ID NO: 1322722 - RNA, 15 nt, Human
ccaacccucagggca

SEQ ID NO: 1322723 - RNA, 12 nt, Human
ccaacccucagg

SEQ ID NO: 1322724 - RNA, 13 nt, Human
ccaacccucaggg

SEQ ID NO: 1322725 - RNA, 14 nt, Human
ccaacccucagggc

SEQ ID NO: 1322726 - RNA, 20 nt, Human
ccaagaauagaugcugacug

SEQ ID NO: 1322727 - RNA, 18 nt, Human
ccaagaauccacauuucu

SEQ ID NO: 1322728 - RNA, 19 nt, Human
ccaagaauccacauuucua

SEQ ID NO: 1322729 - RNA, 21 nt, Human
ccaagaauccacauuucuaaa

SEQ ID NO: 1322730 - RNA, 11 nt, Human
ccaagaaucuu

SEQ ID NO: 1322731 - RNA, 14 nt, Human
ccaagacucuagag

SEQ ID NO: 1322732 - RNA, 15 nt, Human
ccaagacucuagagu

SEQ ID NO: 1322733 - RNA, 21 nt, Human
ccaagacucuagaguccaagg

SEQ ID NO: 1322734 - RNA, 11 nt, Human
ccaagagucua

SEQ ID NO: 1322735 - RNA, 15 nt, Human
ccaagagucuaaaga

SEQ ID NO: 1322736 - RNA, 16 nt, Human
ccaagagucuaaagau

SEQ ID NO: 1322737 - RNA, 18 nt, Human
ccaagauacuuaagugcu

SEQ ID NO: 1322738 - RNA, 15 nt, Human
ccaagauggcccauc

SEQ ID NO: 1322739 - RNA, 18 nt, Human
ccaagauggcccauccug

SEQ ID NO: 1322740 - RNA, 18 nt, Human
ccaagaugggcaucuuuu

SEQ ID NO: 1322741 - RNA, 22 nt, Human
ccaagacucuagaguccaaggu

SEQ ID NO: 1322742 - RNA, 17 nt, Human
ccaagacugcuguggcc

SEQ ID NO: 1322743 - RNA, 18 nt, Human
ccaagacugcuguggcca

SEQ ID NO: 1322744 - RNA, 21 nt, Human
ccaagacugcuguggccagga

SEQ ID NO: 1322745 - RNA, 23 nt, Human
ccaagacugcuguggccaggagg

SEQ ID NO: 1322746 - RNA, 22 nt, Human
ccaagacugcuguggccaggag

SEQ ID NO: 1322747 - RNA, 15 nt, Human
ccaagagaaacuucc

SEQ ID NO: 1322748 - RNA, 17 nt, Human
ccaagagaaacuuccua

SEQ ID NO: 1322749 - RNA, 23 nt, Human
cauuguauucagaguugaugguu

SEQ ID NO: 1322750 - RNA, 15 nt, Human
cauuguaugugguca

SEQ ID NO: 1322751 - RNA, 19 nt, Human
cauuguccaauccuauguu

SEQ ID NO: 1322752 - RNA, 21 nt, Human
cauuguccaauccuauguuuu

SEQ ID NO: 1322753 - RNA, 14 nt, Human
cauuguauauguga

SEQ ID NO: 1322754 - RNA, 13 nt, Human
cauuguccucuuu

SEQ ID NO: 1322755 - RNA, 14 nt, Human
cauugucucagagc

SEQ ID NO: 1322756 - RNA, 20 nt, Human
cauugucuuuuuagaugccc

SEQ ID NO: 1322757 - RNA, 14 nt, Human
cauugucuuuuuag

SEQ ID NO: 1322758 - RNA, 16 nt, Human
cauugugauuggccug

SEQ ID NO: 1322759 - RNA, 16 nt, Human
cauugugcauucuaga

SEQ ID NO: 1322760 - RNA, 18 nt, Human
cauugugauuggccugua

SEQ ID NO: 1322761 - RNA, 22 nt, Human
cauugugccaugucaaacaaau

SEQ ID NO: 1322762 - RNA, 13 nt, Human
cauuguugagcua

SEQ ID NO: 1322763 - RNA, 20 nt, Human
cauuguugagcuauugcugu

SEQ ID NO: 1322764 - RNA, 12 nt, Human
cauuguuuaaaa

SEQ ID NO: 1322765 - RNA, 14 nt, Human
cauuguuuaaaaau

SEQ ID NO: 1322766 - RNA, 18 nt, Human
cauuguuuagaaagaaua

SEQ ID NO: 1322767 - RNA, 17 nt, Human
cauuguuucguaacaca

SEQ ID NO: 1322768 - RNA, 15 nt, Human
cauugccaagggcuu

SEQ ID NO: 1322769 - RNA, 15 nt, Human
cauuguagagcuucu

SEQ ID NO: 1322770 - RNA, 14 nt, Human
cauuguagaaaagc

SEQ ID NO: 1322771 - RNA, 16 nt, Human
cauuguagagcuucug

SEQ ID NO: 1322772 - RNA, 17 nt, Human
cauuguagagcuucugg

SEQ ID NO: 1322773 - RNA, 19 nt, Human
cauuguagagcuucuggca

SEQ ID NO: 1322774 - RNA, 21 nt, Human
cauuguagagcuucuggcacu

SEQ ID NO: 1322775 - RNA, 18 nt, Human
cauuguagcgucuuucuu

SEQ ID NO: 1322776 - RNA, 19 nt, Human
cauuguagcgucuuucuuu

SEQ ID NO: 1322777 - RNA, 15 nt, Human
cauuguagugcuuug

SEQ ID NO: 1322778 - RNA, 18 nt, Human
cauuguagugcuuugaga

SEQ ID NO: 1322779 - RNA, 20 nt, Human
cauuguagugcuuugagaga

SEQ ID NO: 1322780 - RNA, 24 nt, Human
cauuguagugcuuugagagagaaa

SEQ ID NO: 1322781 - RNA, 22 nt, Human
cauuguauaguuggaaucauau

SEQ ID NO: 1322782 - RNA, 22 nt, Human
cauuuaauggggaggacaaaau

SEQ ID NO: 1322783 - RNA, 13 nt, Human
cauuuaauagacu

SEQ ID NO: 1322784 - RNA, 16 nt, Human
cauuuagcauguuguu

SEQ ID NO: 1322785 - RNA, 16 nt, Human
cauuuagccuguccug

SEQ ID NO: 1322786 - RNA, 17 nt, Human
cauuuaggccaugggac

SEQ ID NO: 1322787 - RNA, 17 nt, Human
cauuuagccuguccugu

SEQ ID NO: 1322788 - RNA, 18 nt, Human
cauuuagccuguccuguc

SEQ ID NO: 1322789 - RNA, 22 nt, Human
cauuuagcuaaacggauuccaa

SEQ ID NO: 1322790 - RNA, 13 nt, Human
cauuuccugacag

SEQ ID NO: 1322791 - RNA, 20 nt, Human
cauuuccugacagaaggacu

SEQ ID NO: 1322792 - RNA, 23 nt, Human
cauuuccuaucaccuauuuccau

SEQ ID NO: 1322793 - RNA, 14 nt, Human
cauuuccucagacu

SEQ ID NO: 1322794 - RNA, 22 nt, Human
cauuuccucagacucuaagaaa

SEQ ID NO: 1322795 - RNA, 21 nt, Human
cauuuaaaacauuaaaauaua

SEQ ID NO: 1322796 - RNA, 12 nt, Human
cauuuccugggu

SEQ ID NO: 1322797 - RNA, 14 nt, Human
cauuuccugggugg

SEQ ID NO: 1322798 - RNA, 20 nt, Human
cauuuccuggguggcuacuc

SEQ ID NO: 1322799 - RNA, 21 nt, Human
cauuuccuggguggcuacucu

SEQ ID NO: 1322800 - RNA, 22 nt, Human
cauuuccuggguggcuacucug

SEQ ID NO: 1322801 - RNA, 12 nt, Human
cauuucuaaaau

SEQ ID NO: 1322802 - RNA, 11 nt, Human
cauuucuaauu

SEQ ID NO: 1322803 - RNA, 19 nt, Human
cauuucuaauuauguagcu

SEQ ID NO: 1322804 - RNA, 20 nt, Human
cauuucuaauuauguagcuc

SEQ ID NO: 1322805 - RNA, 23 nt, Human
cauuucuaauuauguagcucuuu

SEQ ID NO: 1322806 - RNA, 21 nt, Human
cauuucuaauuauguagcucu

SEQ ID NO: 1322807 - RNA, 20 nt, Human
cauuucuagcgcauggccug

SEQ ID NO: 1322808 - RNA, 12 nt, Human
cauuucuauuaa

SEQ ID NO: 1322809 - RNA, 19 nt, Human
cauuuuagggguagcauuu

SEQ ID NO: 1322810 - RNA, 11 nt, Human
cauuugcugaa

SEQ ID NO: 1322811 - RNA, 17 nt, Human
cauuuguuuuguuuaca

SEQ ID NO: 1322812 - RNA, 19 nt, Human
cauuuguuuuguuuacaga

SEQ ID NO: 1322813 - RNA, 12 nt, Human
cauuuuguacca

SEQ ID NO: 1322814 - RNA, 22 nt, Human
cauuuuguaccaaccauccaau

SEQ ID NO: 1322815 - RNA, 13 nt, Human
cauuuuguaauaa

SEQ ID NO: 1322816 - RNA, 16 nt, Human
cauuuuguaauaauaa

SEQ ID NO: 1322817 - RNA, 12 nt, Human
cauuuuguaaua

SEQ ID NO: 1322818 - RNA, 16 nt, Human
cauuuuucaugauaau

SEQ ID NO: 1322819 - RNA, 16 nt, Human
cauuuuuccguaaaaa

SEQ ID NO: 1322820 - RNA, 17 nt, Human
cauuuuucaauagcaca

SEQ ID NO: 1322821 - RNA, 16 nt, Human
ccaaacaggcucagag

SEQ ID NO: 1322822 - RNA, 22 nt, Human
ccaaacaccuuccagcuccugu

SEQ ID NO: 1322823 - RNA, 19 nt, Human
ccaaacauccuacaagaca

SEQ ID NO: 1322824 - RNA, 20 nt, Human
ccaaacauccuacaagacac

SEQ ID NO: 1322825 - RNA, 13 nt, Human
cauuugcucaugg

SEQ ID NO: 1322826 - RNA, 14 nt, Human
cauuugcucaugga

SEQ ID NO: 1322827 - RNA, 19 nt, Human
cauuugaaaccccuguagg

SEQ ID NO: 1322828 - RNA, 21 nt, Human
cauuugaaaccccuguaggcc

SEQ ID NO: 1322829 - RNA, 23 nt, Human
cauuucuauagccaaaaauagcu

SEQ ID NO: 1322830 - RNA, 15 nt, Human
ggaguuuugcaaagu

SEQ ID NO: 1322831 - RNA, 17 nt, Human
ggaguuuuguuuccucu

SEQ ID NO: 1322832 - RNA, 16 nt, Human
ggaguuuuuuguacca

SEQ ID NO: 1322833 - RNA, 18 nt, Human
ggaguuuuuaugagaaac

SEQ ID NO: 1322834 - RNA, 21 nt, Human
ggaguuggaagugugugaucu

SEQ ID NO: 1322835 - RNA, 13 nt, Human
ggaguugugggua

SEQ ID NO: 1322836 - RNA, 20 nt, Human
ggaguuuagggaacaauuug

SEQ ID NO: 1322837 - RNA, 21 nt, Human
ggaguuuauguuccauuaaac

SEQ ID NO: 1322838 - RNA, 12 nt, Human
ggaguuucuaag

SEQ ID NO: 1322839 - RNA, 14 nt, Human
ggaguuucuaaggu

SEQ ID NO: 1322840 - RNA, 12 nt, Human
ggagugcagugg

SEQ ID NO: 1322841 - RNA, 22 nt, Human
ggagugcggaccacccucacug

SEQ ID NO: 1322842 - RNA, 21 nt, Human
ggagugcuguuuuguuauaua

SEQ ID NO: 1322843 - RNA, 18 nt, Human
ggagugcggaccacccuc

SEQ ID NO: 1322844 - RNA, 16 nt, Human
ggaguggcagcccagc

SEQ ID NO: 1322845 - RNA, 17 nt, Human
ggaguggcagcccagcc

SEQ ID NO: 1322846 - RNA, 19 nt, Human
ggaguggcagcccagccag

SEQ ID NO: 1322847 - RNA, 20 nt, Human
ggaguggcagcccagccagc

SEQ ID NO: 1322848 - RNA, 20 nt, Human
ggaguugaucgccuuuccca

SEQ ID NO: 1322849 - RNA, 23 nt, Human
ggaguugaucgccuuucccaggu

SEQ ID NO: 1322850 - RNA, 14 nt, Human
ggaguugaucugga

SEQ ID NO: 1322851 - RNA, 17 nt, Human
ggaguugaucuggaacc

SEQ ID NO: 1322852 - RNA, 21 nt, Human
ggaguugaucuggaacccaga

SEQ ID NO: 1322853 - RNA, 22 nt, Human
ggaguugaucuggaacccagac

SEQ ID NO: 1322854 - RNA, 21 nt, Human
ggauguacaaggacagccccu

SEQ ID NO: 1322855 - RNA, 16 nt, Human
ggauggccccagcaca

SEQ ID NO: 1322856 - RNA, 13 nt, Human
ggauggccccagc

SEQ ID NO: 1322857 - RNA, 14 nt, Human
ggauggccccagca

SEQ ID NO: 1322858 - RNA, 22 nt, Human
ggauguugaaaaaguucugcag

SEQ ID NO: 1322859 - RNA, 16 nt, Human
ggauguccccagcaga

SEQ ID NO: 1322860 - RNA, 14 nt, Human
ggauguccccagca

SEQ ID NO: 1322861 - RNA, 15 nt, Human
ggauguccccagcag

SEQ ID NO: 1322862 - RNA, 12 nt, Human
ggaugucccugg

SEQ ID NO: 1322863 - RNA, 13 nt, Human
ggauggggcuccc

SEQ ID NO: 1322864 - RNA, 13 nt, Human
ggauguccccagc

SEQ ID NO: 1322865 - RNA, 19 nt, Human
ggcaauuaauuccuucagc

SEQ ID NO: 1322866 - RNA, 11 nt, Human
ggcaauuuugu

SEQ ID NO: 1322867 - RNA, 20 nt, Human
ggcaauuaauuccuucagca

SEQ ID NO: 1322868 - RNA, 17 nt, Human
ggcaauuaauuccuuca

SEQ ID NO: 1322869 - RNA, 22 nt, Human
ggcaauguuaauuuaguggaaa

SEQ ID NO: 1322870 - RNA, 14 nt, Human
ggcacacaccacca

SEQ ID NO: 1322871 - RNA, 22 nt, Human
ggcacaaucucggcucacugca

SEQ ID NO: 1322872 - RNA, 13 nt, Human
ggcacaagacuga

SEQ ID NO: 1322873 - RNA, 15 nt, Human
ggcaauuuugugguu

SEQ ID NO: 1322874 - RNA, 14 nt, Human
ggcaauuuuguaac

SEQ ID NO: 1322875 - RNA, 14 nt, Human
ggcacaagacugac

SEQ ID NO: 1322876 - RNA, 12 nt, Human
ggcacagccugg

SEQ ID NO: 1322877 - RNA, 13 nt, Human
ggcacagccuggc

SEQ ID NO: 1322878 - RNA, 13 nt, Human
ggcacaggagcua

SEQ ID NO: 1322879 - RNA, 16 nt, Human
ggcacaggagcuaccu

SEQ ID NO: 1322880 - RNA, 17 nt, Human
ggcacaggagcuaccug

SEQ ID NO: 1322881 - RNA, 20 nt, Human
ggcacaggagcuaccugugu

SEQ ID NO: 1322882 - RNA, 16 nt, Human
ggcacagggcaguggg

SEQ ID NO: 1322883 - RNA, 16 nt, Human
ggcaccagacacccag

SEQ ID NO: 1322884 - RNA, 19 nt, Human
ggcacaggagcuaccugug

SEQ ID NO: 1322885 - RNA, 19 nt, Human
ggcacaggaguguccucuu

SEQ ID NO: 1322886 - RNA, 20 nt, Human
ggcacaggaguguccucuuc

SEQ ID NO: 1322887 - RNA, 14 nt, Human
ggcacaggcccccu

SEQ ID NO: 1322888 - RNA, 15 nt, Human
ggcacaggcccccuu

SEQ ID NO: 1322889 - RNA, 16 nt, Human
ggagcaucagugcccu

SEQ ID NO: 1322890 - RNA, 17 nt, Human
ggaggugagaccaccuc

SEQ ID NO: 1322891 - RNA, 16 nt, Human
ggaggugccacuggag

SEQ ID NO: 1322892 - RNA, 20 nt, Human
ggagguccuuaggccucuga

SEQ ID NO: 1322893 - RNA, 23 nt, Human
ggaggccuuucccuaagccagcu

SEQ ID NO: 1322894 - RNA, 15 nt, Human
ggaggcccugugccc

SEQ ID NO: 1322895 - RNA, 12 nt, Human
ggaggccgaagc

SEQ ID NO: 1322896 - RNA, 23 nt, Human
ggaggcccugugccccuugacaa

SEQ ID NO: 1322897 - RNA, 20 nt, Human
ggaggccuaggaggguccuc

SEQ ID NO: 1322898 - RNA, 15 nt, Human
ggaggguaggcagga

SEQ ID NO: 1322899 - RNA, 13 nt, Human
ggaggguaggcag

SEQ ID NO: 1322900 - RNA, 22 nt, Human
ggagggggucguggagagcuag

SEQ ID NO: 1322901 - RNA, 15 nt, Human
ggagggguaggggcu

SEQ ID NO: 1322902 - RNA, 18 nt, Human
ggagggguaggggcuggg

SEQ ID NO: 1322903 - RNA, 16 nt, Human
ggagggguaggggcug

SEQ ID NO: 1322904 - RNA, 15 nt, Human
ggagggguguggcuc

SEQ ID NO: 1322905 - RNA, 13 nt, Human
ggaggacccagga

SEQ ID NO: 1322906 - RNA, 14 nt, Human
ggaggacccaggac

SEQ ID NO: 1322907 - RNA, 12 nt, Human
ggaggacccagg

SEQ ID NO: 1322908 - RNA, 23 nt, Human
ggaggaauaagcucccagggccu

SEQ ID NO: 1322909 - RNA, 12 nt, Human
ggaggaauacug

SEQ ID NO: 1322910 - RNA, 18 nt, Human
ggaggaaggaggacccag

SEQ ID NO: 1322911 - RNA, 20 nt, Human
ggagcuucauggcagaaggc

SEQ ID NO: 1322912 - RNA, 21 nt, Human
ggaggaaggcuuacacccaca

SEQ ID NO: 1322913 - RNA, 17 nt, Human
ggagcugccuggacccg

SEQ ID NO: 1322914 - RNA, 13 nt, Human
ggagcugggccug

SEQ ID NO: 1322915 - RNA, 14 nt, Human
ggagcugggccugg

SEQ ID NO: 1322916 - RNA, 17 nt, Human
ggagcuggggaucccuc

SEQ ID NO: 1322917 - RNA, 18 nt, Human
ggagcugguuagaaaugc

SEQ ID NO: 1322918 - RNA, 23 nt, Human
ggagcugguuagaaaugcagaau

SEQ ID NO: 1322919 - RNA, 20 nt, Human
ggagcugugaguucucccug

SEQ ID NO: 1322920 - RNA, 22 nt, Human
ggagcccccacccuguuccugc

SEQ ID NO: 1322921 - RNA, 13 nt, Human
ggagcccccagcc

SEQ ID NO: 1322922 - RNA, 14 nt, Human
ggagcccccagccu

SEQ ID NO: 1322923 - RNA, 15 nt, Human
ggagcccccagccug

SEQ ID NO: 1322924 - RNA, 16 nt, Human
ggagcccccagccugu

SEQ ID NO: 1322925 - RNA, 17 nt, Human
ggagcccccagccuguc

SEQ ID NO: 1322926 - RNA, 18 nt, Human
ggagcccccagccuguca

SEQ ID NO: 1322927 - RNA, 11 nt, Human
ggagcugccug

SEQ ID NO: 1322928 - RNA, 13 nt, Human
ggagcugccugga

SEQ ID NO: 1322929 - RNA, 14 nt, Human
ggagcugccuggac

SEQ ID NO: 1322930 - RNA, 15 nt, Human
ggagcugccuggacc

SEQ ID NO: 1322931 - RNA, 16 nt, Human
ggagcugccuggaccc

SEQ ID NO: 1322932 - RNA, 16 nt, Human
ggagccaauggagacu

SEQ ID NO: 1322933 - RNA, 18 nt, Human
ggagccaagggauggaca

SEQ ID NO: 1322934 - RNA, 16 nt, Human
ggagccaagggaugga

SEQ ID NO: 1322935 - RNA, 14 nt, Human
ggagccaccaguuc

SEQ ID NO: 1322936 - RNA, 15 nt, Human
ggagccaccaguucu

SEQ ID NO: 1322937 - RNA, 16 nt, Human
ggagccacuccucuga

SEQ ID NO: 1322938 - RNA, 19 nt, Human
ggagccacuccucugacuc

SEQ ID NO: 1322939 - RNA, 21 nt, Human
ggagccacuccucugacucag

SEQ ID NO: 1322940 - RNA, 14 nt, Human
ggagccagccgagc

SEQ ID NO: 1322941 - RNA, 14 nt, Human
ggagcccacugucc

SEQ ID NO: 1322942 - RNA, 17 nt, Human
ggagcccacuguccugg

SEQ ID NO: 1322943 - RNA, 18 nt, Human
ggagcccacuguccuggg

SEQ ID NO: 1322944 - RNA, 20 nt, Human
ggagcccacuguccugggcc

SEQ ID NO: 1322945 - RNA, 22 nt, Human
ggagcccacuguccugggccug

SEQ ID NO: 1322946 - RNA, 23 nt, Human
ggagcccacuguccugggccugc

SEQ ID NO: 1322947 - RNA, 16 nt, Human
ggagcccagcucugaa

SEQ ID NO: 1322948 - RNA, 14 nt, Human
ggagcccaggccag

SEQ ID NO: 1322949 - RNA, 15 nt, Human
ggagcccaggccagg

SEQ ID NO: 1322950 - RNA, 16 nt, Human
ggagcccaggccagga

SEQ ID NO: 1322951 - RNA, 24 nt, Human
ggagcccaggccaggacucugcag

SEQ ID NO: 1322952 - RNA, 22 nt, Human
ggagcccaggccaggacucugc

SEQ ID NO: 1322953 - RNA, 16 nt, Human
ggcucacugcauccuc

SEQ ID NO: 1322954 - RNA, 19 nt, Human
ggcucacugcauccuccgc

SEQ ID NO: 1322955 - RNA, 15 nt, Human
ggcucagccagcacu

SEQ ID NO: 1322956 - RNA, 23 nt, Human
ggcucagccccaccccagggcag

SEQ ID NO: 1322957 - RNA, 22 nt, Human
ggcucagccccaccccagggca

SEQ ID NO: 1322958 - RNA, 13 nt, Human
ggccuccauccug

SEQ ID NO: 1322959 - RNA, 15 nt, Human
ggccggccagccccu

SEQ ID NO: 1322960 - RNA, 15 nt, Human
ggccucauguggcug

SEQ ID NO: 1322961 - RNA, 16 nt, Human
ggccucauguggcugg

SEQ ID NO: 1322962 - RNA, 17 nt, Human
ggccucauguggcugga

SEQ ID NO: 1322963 - RNA, 19 nt, Human
ggccucauguggcuggaag

SEQ ID NO: 1322964 - RNA, 20 nt, Human
ggccucauguggcuggaaga

SEQ ID NO: 1322965 - RNA, 11 nt, Human
ggccuggagau

SEQ ID NO: 1322966 - RNA, 14 nt, Human
ggccuggagauccu

SEQ ID NO: 1322967 - RNA, 15 nt, Human
ggccuggagauccuc

SEQ ID NO: 1322968 - RNA, 17 nt, Human
ggccuggagauccuccu

SEQ ID NO: 1322969 - RNA, 19 nt, Human
ggccuggagauccuccugc

SEQ ID NO: 1322970 - RNA, 18 nt, Human
ggccuggagauccuccug

SEQ ID NO: 1322971 - RNA, 15 nt, Human
ggccugaucagacca

SEQ ID NO: 1322972 - RNA, 18 nt, Human
ggccugaucagaccacgg

SEQ ID NO: 1322973 - RNA, 20 nt, Human
ggccugaucagaccacggcu

SEQ ID NO: 1322974 - RNA, 18 nt, Human
ggccuggacuuuccugca

SEQ ID NO: 1322975 - RNA, 21 nt, Human
ggccuggacuuuccugcaacu

SEQ ID NO: 1322976 - RNA, 17 nt, Human
ggccuguguagcuguga

SEQ ID NO: 1322977 - RNA, 19 nt, Human
ggccuguguagcugugacc

SEQ ID NO: 1322978 - RNA, 20 nt, Human
ggccuguguagcugugaccu

SEQ ID NO: 1322979 - RNA, 14 nt, Human
ggccuggccagugc

SEQ ID NO: 1322980 - RNA, 16 nt, Human
ggccuggccagugccc

SEQ ID NO: 1322981 - RNA, 19 nt, Human
ggccuggccagugcccuga

SEQ ID NO: 1322982 - RNA, 20 nt, Human
ggccuggccagugcccugau

SEQ ID NO: 1322983 - RNA, 23 nt, Human
ggccuucggccuccauccugagg

SEQ ID NO: 1322984 - RNA, 21 nt, Human
ggccuguguagcugugaccug

SEQ ID NO: 1322985 - RNA, 22 nt, Human
ggccuguguagcugugaccugc

SEQ ID NO: 1322986 - RNA, 23 nt, Human
ggccuguguagcugugaccugcu

SEQ ID NO: 1322987 - RNA, 16 nt, Human
ggccuguguucuuccu

SEQ ID NO: 1322988 - RNA, 19 nt, Human
ggccuguguucuuccuggc

SEQ ID NO: 1322989 - RNA, 21 nt, Human
ggccuguguucuuccuggccg

SEQ ID NO: 1322990 - RNA, 22 nt, Human
ggccuguguucuuccuggccgc

SEQ ID NO: 1322991 - RNA, 15 nt, Human
ggccuuucccuaagc

SEQ ID NO: 1322992 - RNA, 17 nt, Human
ggccuuucccuaagcca

SEQ ID NO: 1322993 - RNA, 13 nt, Human
ggccuuugagcuc

SEQ ID NO: 1322994 - RNA, 15 nt, Human
ggccuuggccuggag

SEQ ID NO: 1322995 - RNA, 16 nt, Human
ggccuuggccuggagc

SEQ ID NO: 1322996 - RNA, 17 nt, Human
ggccuuggccuggagca

SEQ ID NO: 1322997 - RNA, 18 nt, Human
ggccuuggccuggagcac

SEQ ID NO: 1322998 - RNA, 13 nt, Human
ggccuugggcucc

SEQ ID NO: 1322999 - RNA, 12 nt, Human
ggccuugggcuc

SEQ ID NO: 1323000 - RNA, 13 nt, Human
ggccuuguucugu

SEQ ID NO: 1323001 - RNA, 16 nt, Human
ggccuuguucugucac

SEQ ID NO: 1323002 - RNA, 18 nt, Human
ggccuuguucugucacca

SEQ ID NO: 1323003 - RNA, 17 nt, Human
ggccuugcggcuccuca

SEQ ID NO: 1323004 - RNA, 18 nt, Human
ggccuugcggcuccucag

SEQ ID NO: 1323005 - RNA, 19 nt, Human
ggccuugcggcuccucagg

SEQ ID NO: 1323006 - RNA, 14 nt, Human
ggccuuggccugga

SEQ ID NO: 1323007 - RNA, 16 nt, Human
ggccuuugagcucaga

SEQ ID NO: 1323008 - RNA, 14 nt, Human
ggccuuugcgcucc

SEQ ID NO: 1323009 - RNA, 23 nt, Human
ggccuuugcgcuccuggcccagc

SEQ ID NO: 1323010 - RNA, 15 nt, Human
ggccuuuuucauuua

SEQ ID NO: 1323011 - RNA, 22 nt, Human
ggcgaagcguuguccucagccc

SEQ ID NO: 1323012 - RNA, 18 nt, Human
ggcgagaagggcugcuuc

SEQ ID NO: 1323013 - RNA, 11 nt, Human
ggcgaccuccu

SEQ ID NO: 1323014 - RNA, 14 nt, Human
ggcguaaguacaga

SEQ ID NO: 1323015 - RNA, 15 nt, Human
ggcguaaguacagag

SEQ ID NO: 1323016 - RNA, 16 nt, Human
ggcguaaguacagaga

SEQ ID NO: 1323017 - RNA, 18 nt, Human
ggcguaaguacagagaag

SEQ ID NO: 1323018 - RNA, 19 nt, Human
ggcguaaguacagagaagc

SEQ ID NO: 1323019 - RNA, 20 nt, Human
ggcguaaguacagagaagcc

SEQ ID NO: 1323020 - RNA, 22 nt, Human
ggcguaaguacagagaagccau

SEQ ID NO: 1323021 - RNA, 21 nt, Human
ggcguaaguacagagaagcca

SEQ ID NO: 1323022 - RNA, 15 nt, Human
ggcguaggcuacaga

SEQ ID NO: 1323023 - RNA, 17 nt, Human
ggcguaggcuacagaga

SEQ ID NO: 1323024 - RNA, 19 nt, Human
ggcguaggcuacagagaag

SEQ ID NO: 1323025 - RNA, 20 nt, Human
ggcguaggcuacagagaagc

SEQ ID NO: 1323026 - RNA, 21 nt, Human
ggcguaggcuacagagaagcc

SEQ ID NO: 1323027 - RNA, 22 nt, Human
ggcguaggcuacagagaagccu

SEQ ID NO: 1323028 - RNA, 16 nt, Human
ggcacuggcgaggaga

SEQ ID NO: 1323029 - RNA, 15 nt, Human
ggcacuggggcaggg

SEQ ID NO: 1323030 - RNA, 15 nt, Human
ggcacugggcaugag

SEQ ID NO: 1323031 - RNA, 16 nt, Human
ggcacugggcaugagg

SEQ ID NO: 1323032 - RNA, 17 nt, Human
ggcaccagacacccagg

SEQ ID NO: 1323033 - RNA, 18 nt, Human
ggcaccagacacccagga

SEQ ID NO: 1323034 - RNA, 19 nt, Human
ggcaccagacacccaggac

SEQ ID NO: 1323035 - RNA, 20 nt, Human
ggcaccagacacccaggacu

SEQ ID NO: 1323036 - RNA, 13 nt, Human
ggcauagcucugg

SEQ ID NO: 1323037 - RNA, 15 nt, Human
ggcauagcucugggg

SEQ ID NO: 1323038 - RNA, 22 nt, Human
ggcauccagagucccugccugg

SEQ ID NO: 1323039 - RNA, 12 nt, Human
ggcaucccuggg

SEQ ID NO: 1323040 - RNA, 14 nt, Human
ggcaucccugggcc

SEQ ID NO: 1323041 - RNA, 13 nt, Human
ggcaucccugggc

SEQ ID NO: 1323042 - RNA, 14 nt, Human
ggcauccuccagcc

SEQ ID NO: 1323043 - RNA, 16 nt, Human
ggcauccuccagcccc

SEQ ID NO: 1323044 - RNA, 17 nt, Human
ggcauccucuuuuucca

SEQ ID NO: 1323045 - RNA, 20 nt, Human
ggcauccuuccucacaccag

SEQ ID NO: 1323046 - RNA, 12 nt, Human
ggcaucucuggg

SEQ ID NO: 1323047 - RNA, 13 nt, Human
ggcaucucugggc

SEQ ID NO: 1323048 - RNA, 14 nt, Human
ggcaucucugggcu

SEQ ID NO: 1323049 - RNA, 17 nt, Human
ggcaucucugggcugga

SEQ ID NO: 1323050 - RNA, 16 nt, Human
ggcaucucugggcugg

SEQ ID NO: 1323051 - RNA, 16 nt, Human
ggcaucuggccuggcc

SEQ ID NO: 1323052 - RNA, 18 nt, Human
ggcaucuggccuggccag

SEQ ID NO: 1323053 - RNA, 21 nt, Human
ggcaucuggccuggccagugc

SEQ ID NO: 1323054 - RNA, 15 nt, Human
ggcauuuuuauuuua

SEQ ID NO: 1323055 - RNA, 18 nt, Human
ggccaggcuugucucgaa

SEQ ID NO: 1323056 - RNA, 19 nt, Human
ggccaggcuggucuaaaac

SEQ ID NO: 1323057 - RNA, 15 nt, Human
ggccagggagaagcu

SEQ ID NO: 1323058 - RNA, 16 nt, Human
ggccagggagaagcuc

SEQ ID NO: 1323059 - RNA, 17 nt, Human
ggccagggagaagcucc

SEQ ID NO: 1323060 - RNA, 18 nt, Human
ggccagggagaagcuccu

SEQ ID NO: 1323061 - RNA, 21 nt, Human
ggcauuuuuaccaucacugag

SEQ ID NO: 1323062 - RNA, 11 nt, Human
ggccagagcca

SEQ ID NO: 1323063 - RNA, 14 nt, Human
ggccagagccaagg

SEQ ID NO: 1323064 - RNA, 12 nt, Human
ggccagagccag

SEQ ID NO: 1323065 - RNA, 13 nt, Human
ggccagagccagg

SEQ ID NO: 1323066 - RNA, 14 nt, Human
ggccagagccaggg

SEQ ID NO: 1323067 - RNA, 12 nt, Human
ggccagagccca

SEQ ID NO: 1323068 - RNA, 13 nt, Human
ggccagagcccac

SEQ ID NO: 1323069 - RNA, 17 nt, Human
ggccagagcccacucca

SEQ ID NO: 1323070 - RNA, 15 nt, Human
ggccagagcccacuc

SEQ ID NO: 1323071 - RNA, 16 nt, Human
ggccagaggcccccag

SEQ ID NO: 1323072 - RNA, 18 nt, Human
ggccagaggcccccagcc

SEQ ID NO: 1323073 - RNA, 19 nt, Human
ggccagaggcccccagccc

SEQ ID NO: 1323074 - RNA, 12 nt, Human
ggccagcagcac

SEQ ID NO: 1323075 - RNA, 18 nt, Human
ggccagcagcaccugccc

SEQ ID NO: 1323076 - RNA, 19 nt, Human
ggccagcagcaccugcccu

SEQ ID NO: 1323077 - RNA, 21 nt, Human
ggccagugcccugaucccaga

SEQ ID NO: 1323078 - RNA, 18 nt, Human
ggccauauuuaccucagc

SEQ ID NO: 1323079 - RNA, 19 nt, Human
ggccauauuuaccucagcc

SEQ ID NO: 1323080 - RNA, 20 nt, Human
ggccauauuuaccucagccu

SEQ ID NO: 1323081 - RNA, 21 nt, Human
ggccauauuuaccucagccug

SEQ ID NO: 1323082 - RNA, 22 nt, Human
ggccauauuuaccucagccugg

SEQ ID NO: 1323083 - RNA, 19 nt, Human
ggccagugcccugauccca

SEQ ID NO: 1323084 - RNA, 20 nt, Human
ggccagugcccugaucccag

SEQ ID NO: 1323085 - RNA, 13 nt, Human
ggccagggcagag

SEQ ID NO: 1323086 - RNA, 20 nt, Human
ggccagggccacgcuccagc

SEQ ID NO: 1323087 - RNA, 21 nt, Human
ggccagggccacgcuccagcu

SEQ ID NO: 1323088 - RNA, 23 nt, Human
ggccagggccccucacccugccu

SEQ ID NO: 1323089 - RNA, 15 nt, Human
ggccaugauggcaac

SEQ ID NO: 1323090 - RNA, 18 nt, Human
ggccaugauggcaacaga

SEQ ID NO: 1323091 - RNA, 22 nt, Human
ggccaugauggcaacagaucug

SEQ ID NO: 1323092 - RNA, 13 nt, Human
ggccaucugcucc

SEQ ID NO: 1323093 - RNA, 14 nt, Human
ggccaucugcuccu

SEQ ID NO: 1323094 - RNA, 16 nt, Human
ggccaucugcuccugg

SEQ ID NO: 1323095 - RNA, 17 nt, Human
ggccaucugcuccugga

SEQ ID NO: 1323096 - RNA, 22 nt, Human
ggccaucugggcuccuccaggg

SEQ ID NO: 1323097 - RNA, 16 nt, Human
ggccaugacccugccu

SEQ ID NO: 1323098 - RNA, 17 nt, Human
ggccaugacccugccuc

SEQ ID NO: 1323099 - RNA, 18 nt, Human
ggccaugacccugccucu

SEQ ID NO: 1323100 - RNA, 20 nt, Human
ggccaugacccugccucucc

SEQ ID NO: 1323101 - RNA, 22 nt, Human
ggccaugacccugccucuccca

SEQ ID NO: 1323102 - RNA, 23 nt, Human
ggccccacccucguggacaccug

SEQ ID NO: 1323103 - RNA, 13 nt, Human
ggccccacccugg

SEQ ID NO: 1323104 - RNA, 12 nt, Human
ggccccacccuc

SEQ ID NO: 1323105 - RNA, 19 nt, Human
ggcccagggcccagagccc

SEQ ID NO: 1323106 - RNA, 21 nt, Human
ggcccagggcccagagcccag

SEQ ID NO: 1323107 - RNA, 22 nt, Human
ggcccagggcccagagcccagc

SEQ ID NO: 1323108 - RNA, 18 nt, Human
ggcccaggucagccacug

SEQ ID NO: 1323109 - RNA, 20 nt, Human
ggcccaggucagccacuguu

SEQ ID NO: 1323110 - RNA, 22 nt, Human
ggcccaguaccuagcuggcucu

SEQ ID NO: 1323111 - RNA, 15 nt, Human
ggccccacccugggc

SEQ ID NO: 1323112 - RNA, 17 nt, Human
ggccccacccugggccc

SEQ ID NO: 1323113 - RNA, 21 nt, Human
ggccccacccugggcccuggg

SEQ ID NO: 1323114 - RNA, 23 nt, Human
ggccccacccugggcccugggcu

SEQ ID NO: 1323115 - RNA, 17 nt, Human
ggccccacccucgggga

SEQ ID NO: 1323116 - RNA, 15 nt, Human
ggccccagcacagcu

SEQ ID NO: 1323117 - RNA, 16 nt, Human
ggcccagggcccagag

SEQ ID NO: 1323118 - RNA, 17 nt, Human
ggcccagggcccagagc

SEQ ID NO: 1323119 - RNA, 18 nt, Human
ggcccagggcccagagcc

SEQ ID NO: 1323120 - RNA, 17 nt, Human
ggcccuuccucuccacu

SEQ ID NO: 1323121 - RNA, 13 nt, Human
ggccgaguccaag

SEQ ID NO: 1323122 - RNA, 16 nt, Human
ggccgaguccaagcug

SEQ ID NO: 1323123 - RNA, 15 nt, Human
ggccgaugcccagag

SEQ ID NO: 1323124 - RNA, 12 nt, Human
ggccgcccccug

SEQ ID NO: 1323125 - RNA, 23 nt, Human
ggccgcccccagcccccuccugg

SEQ ID NO: 1323126 - RNA, 17 nt, Human
ggccgcugaguggcagg

SEQ ID NO: 1323127 - RNA, 12 nt, Human
ggccgcugccac

SEQ ID NO: 1323128 - RNA, 13 nt, Human
ggcccuuccucuc

SEQ ID NO: 1323129 - RNA, 15 nt, Human
ggcccuuccucucca

SEQ ID NO: 1323130 - RNA, 18 nt, Human
ggcccuuccucuccacug

SEQ ID NO: 1323131 - RNA, 15 nt, Human
ggcccgacagccugg

SEQ ID NO: 1323132 - RNA, 20 nt, Human
ggcccuuaugacugccaaga

SEQ ID NO: 1323133 - RNA, 19 nt, Human
ggcccuucccacaggacau

SEQ ID NO: 1323134 - RNA, 18 nt, Human
ggccccuuugcugacccu

SEQ ID NO: 1323135 - RNA, 21 nt, Human
aaauaauuuuuauauuugaaa

SEQ ID NO: 1323136 - RNA, 16 nt, Human
aaauaaugcuuugaaa

SEQ ID NO: 1323137 - RNA, 12 nt, Human
guaaaauacuuu

SEQ ID NO: 1323138 - RNA, 22 nt, Human
guaaaauacuuuuacucugccu

SEQ ID NO: 1323139 - RNA, 13 nt, Human
guaaaauacuuuu

SEQ ID NO: 1323140 - RNA, 15 nt, Human
guaaaauauuuugaa

SEQ ID NO: 1323141 - RNA, 18 nt, Human
guaaaauauuuugaauca

SEQ ID NO: 1323142 - RNA, 19 nt, Human
guaaaauauuuugaaucaa

SEQ ID NO: 1323143 - RNA, 21 nt, Human
guaaaauauuuugaaucaaua

SEQ ID NO: 1323144 - RNA, 12 nt, Human
guaaaaucuugu

SEQ ID NO: 1323145 - RNA, 15 nt, Human
guaaaaucuugucau

SEQ ID NO: 1323146 - RNA, 16 nt, Human
guaaaaucuugucaug

SEQ ID NO: 1323147 - RNA, 18 nt, Human
guaaaaucuugucaugug

SEQ ID NO: 1323148 - RNA, 19 nt, Human
guaaaaucuugucaugugu

SEQ ID NO: 1323149 - RNA, 20 nt, Human
guaaaaucuugucaugugua

SEQ ID NO: 1323150 - RNA, 21 nt, Human
guaaaaucuugucauguguau

SEQ ID NO: 1323151 - RNA, 22 nt, Human
guaaaaucuugucauguguaua

SEQ ID NO: 1323152 - RNA, 23 nt, Human
guaaaaucuugucauguguauaa

SEQ ID NO: 1323153 - RNA, 16 nt, Human
guaaaaugacaaucau

SEQ ID NO: 1323154 - RNA, 22 nt, Human
guaaaaugacaaucaugugugu

SEQ ID NO: 1323155 - RNA, 21 nt, Human
guaaaaugacaaucaugugug

SEQ ID NO: 1323156 - RNA, 19 nt, Human
guaacaauacaaauggauu

SEQ ID NO: 1323157 - RNA, 12 nt, Human
guaaagccaugc

SEQ ID NO: 1323158 - RNA, 22 nt, Human
guaaauuauuaauuuaugcaga

SEQ ID NO: 1323159 - RNA, 19 nt, Human
guaaauuggcauggaaauu

SEQ ID NO: 1323160 - RNA, 18 nt, Human
guaaaaugugggauuaug

SEQ ID NO: 1323161 - RNA, 13 nt, Human
guaaagaauuauu

SEQ ID NO: 1323162 - RNA, 14 nt, Human
guaaagaauuauuu

SEQ ID NO: 1323163 - RNA, 14 nt, Human
guaaagacuggcuu

SEQ ID NO: 1323164 - RNA, 19 nt, Human
guaaagacuggcuuuuauu

SEQ ID NO: 1323165 - RNA, 15 nt, Human
guaaagacuggcuuu

SEQ ID NO: 1323166 - RNA, 15 nt, Human
guaaagaauuauuuu

SEQ ID NO: 1323167 - RNA, 19 nt, Human
guaaagauauuuuuaucuu

SEQ ID NO: 1323168 - RNA, 22 nt, Human
guaaagauauuuuuaucuuuau

SEQ ID NO: 1323169 - RNA, 16 nt, Human
guaaagaucaauaaaa

SEQ ID NO: 1323170 - RNA, 21 nt, Human
guaaagauguuuauuucaggc

SEQ ID NO: 1323171 - RNA, 18 nt, Human
aaauaauuuuuauauuug

SEQ ID NO: 1323172 - RNA, 20 nt, Human
aaauaauuuuuauauuugaa

SEQ ID NO: 1323173 - RNA, 19 nt, Human
aaauaaugaauacauuucc

SEQ ID NO: 1323174 - RNA, 19 nt, Human
aaauaagugcccucuccca

SEQ ID NO: 1323175 - RNA, 14 nt, Human
aaauaagucaacag

SEQ ID NO: 1323176 - RNA, 15 nt, Human
aaauaagucaacagu

SEQ ID NO: 1323177 - RNA, 21 nt, Human
aaauaagucaacaguaaacca

SEQ ID NO: 1323178 - RNA, 18 nt, Human
aaauaagucaacaguaaa

SEQ ID NO: 1323179 - RNA, 12 nt, Human
aaauaaugcuuu

SEQ ID NO: 1323180 - RNA, 13 nt, Human
aaauaaugcuuug

SEQ ID NO: 1323181 - RNA, 19 nt, Human
aaauaaaaaaaaaaaagag

SEQ ID NO: 1323182 - RNA, 11 nt, Human
aaaguuuuuua

SEQ ID NO: 1323183 - RNA, 20 nt, Human
aaaguuuuauauauuauaug

SEQ ID NO: 1323184 - RNA, 21 nt, Human
aaaguuuuauauauuauaugg

SEQ ID NO: 1323185 - RNA, 23 nt, Human
aaaguuuuauauauuauauggaa

SEQ ID NO: 1323186 - RNA, 22 nt, Human
aaaguuuuauauauuauaugga

SEQ ID NO: 1323187 - RNA, 22 nt, Human
aaaguuuuuuauuaugcauuau

SEQ ID NO: 1323188 - RNA, 16 nt, Human
aaauaaaaaagauccc

SEQ ID NO: 1323189 - RNA, 15 nt, Human
aaauaaaaaagaucc

SEQ ID NO: 1323190 - RNA, 14 nt, Human
aaauaagauucuaa

SEQ ID NO: 1323191 - RNA, 15 nt, Human
aaauaagauucuaac

SEQ ID NO: 1323192 - RNA, 16 nt, Human
aaauaagauucuaacg

SEQ ID NO: 1323193 - RNA, 13 nt, Human
aaauaagcaggug

SEQ ID NO: 1323194 - RNA, 15 nt, Human
aaauaagcaggugga

SEQ ID NO: 1323195 - RNA, 22 nt, Human
aaauaagcagguggaucuauuu

SEQ ID NO: 1323196 - RNA, 12 nt, Human
aaauaagcuauu

SEQ ID NO: 1323197 - RNA, 17 nt, Human
aaauaagcuauuugaug

SEQ ID NO: 1323198 - RNA, 18 nt, Human
aaauaagcuauuugaugu

SEQ ID NO: 1323199 - RNA, 16 nt, Human
aaauaaggaaaagcuu

SEQ ID NO: 1323200 - RNA, 22 nt, Human
aaauaagcuauuugauguaaua

SEQ ID NO: 1323201 - RNA, 22 nt, Human
aaauaaggcacccaucugucug

SEQ ID NO: 1323202 - RNA, 19 nt, Human
aaauaaggcacccaucugu

SEQ ID NO: 1323203 - RNA, 13 nt, Human
aaauaagucaaca

SEQ ID NO: 1323204 - RNA, 20 nt, Human
gguuuggacaaaauggaaua

SEQ ID NO: 1323205 - RNA, 15 nt, Human
gguuucugcccugcc

SEQ ID NO: 1323206 - RNA, 17 nt, Human
gguuucugcccugccca

SEQ ID NO: 1323207 - RNA, 18 nt, Human
gguuucugcccugcccac

SEQ ID NO: 1323208 - RNA, 21 nt, Human
aaaguucccuacuuccuguga

SEQ ID NO: 1323209 - RNA, 16 nt, Human
aaaguuccaagagucu

SEQ ID NO: 1323210 - RNA, 18 nt, Human
aaaguuccaagagucuaa

SEQ ID NO: 1323211 - RNA, 20 nt, Human
aaaguuccaagagucuaaag

SEQ ID NO: 1323212 - RNA, 21 nt, Human
aaaguuccaagagucuaaaga

SEQ ID NO: 1323213 - RNA, 18 nt, Human
aaaguucaacauguuauu

SEQ ID NO: 1323214 - RNA, 10 nt, Human
aaaguguauu

SEQ ID NO: 1323215 - RNA, 14 nt, Human
aaaguguauuugga

SEQ ID NO: 1323216 - RNA, 15 nt, Human
aaaguguauuuggaa

SEQ ID NO: 1323217 - RNA, 22 nt, Human
aaaguguauuuggaaauaaagu

SEQ ID NO: 1323218 - RNA, 23 nt, Human
aaaguguauuuggaaauaaaguc

SEQ ID NO: 1323219 - RNA, 21 nt, Human
aaagugugaaauaaauuuuuu

SEQ ID NO: 1323220 - RNA, 15 nt, Human
aaaguuuaaucagag

SEQ ID NO: 1323221 - RNA, 19 nt, Human
aaaguugcagcuguuuugu

SEQ ID NO: 1323222 - RNA, 20 nt, Human
aaaguugauaaagauuuuuu

SEQ ID NO: 1323223 - RNA, 17 nt, Human
aaaguugcagcuguuuu

SEQ ID NO: 1323224 - RNA, 18 nt, Human
aaaguugcagcuguuuug

SEQ ID NO: 1323225 - RNA, 20 nt, Human
aaaguugcagcuguuuuguu

SEQ ID NO: 1323226 - RNA, 23 nt, Human
aaaguucccuacuuccugugacu

SEQ ID NO: 1323227 - RNA, 22 nt, Human
aaaguuccaagagucuaaagau

SEQ ID NO: 1323228 - RNA, 11 nt, Human
aaaguucuaag

SEQ ID NO: 1323229 - RNA, 12 nt, Human
aaaguucuaaga

SEQ ID NO: 1323230 - RNA, 16 nt, Human
aaaguugaauuuuaca

SEQ ID NO: 1323231 - RNA, 17 nt, Human
aaaguugauaaagauuu

SEQ ID NO: 1323232 - RNA, 18 nt, Human
aaaguugauaaagauuuu

SEQ ID NO: 1323233 - RNA, 23 nt, Human
aaaguugauaaagauuuuuuaau

SEQ ID NO: 1323234 - RNA, 16 nt, Human
aaaguuuguugaaaca

SEQ ID NO: 1323235 - RNA, 14 nt, Human
aaaguuuguuugcu

SEQ ID NO: 1323236 - RNA, 13 nt, Human
aaaguuuuauaua

SEQ ID NO: 1323237 - RNA, 14 nt, Human
aaaguuuuauauau

SEQ ID NO: 1323238 - RNA, 15 nt, Human
aaaguuuuauauauu

SEQ ID NO: 1323239 - RNA, 16 nt, Human
aaaguuuuauauauua

SEQ ID NO: 1323240 - RNA, 17 nt, Human
aaaguuuuauauauuau

SEQ ID NO: 1323241 - RNA, 18 nt, Human
aaaguuuuauauauuaua

SEQ ID NO: 1323242 - RNA, 19 nt, Human
aaaguuuagccccugaaag

SEQ ID NO: 1323243 - RNA, 19 nt, Human
aaaguuucaauuuguuucc

SEQ ID NO: 1323244 - RNA, 19 nt, Human
gguuucaccauguuggcca

SEQ ID NO: 1323245 - RNA, 16 nt, Human
gguuucaaagaugcug

SEQ ID NO: 1323246 - RNA, 18 nt, Human
gguuucaaagaugcugug

SEQ ID NO: 1323247 - RNA, 20 nt, Human
gguuucaaagaugcugugag

SEQ ID NO: 1323248 - RNA, 19 nt, Human
gguuucaccauguugccca

SEQ ID NO: 1323249 - RNA, 21 nt, Human
gguuucucgcauaggaccuuu

SEQ ID NO: 1323250 - RNA, 20 nt, Human
gguuucaccauguuggccag

SEQ ID NO: 1323251 - RNA, 17 nt, Human
gguuucugaguuccugc

SEQ ID NO: 1323252 - RNA, 14 nt, Human
gguuucugcccugc

SEQ ID NO: 1323253 - RNA, 19 nt, Human
gguuccuuccucugagccu

SEQ ID NO: 1323254 - RNA, 20 nt, Human
gguuccuuccucugagccuu

SEQ ID NO: 1323255 - RNA, 18 nt, Human
gguuccuccccuccagcu

SEQ ID NO: 1323256 - RNA, 18 nt, Human
gguucucagguguugcca

SEQ ID NO: 1323257 - RNA, 19 nt, Human
gguucuccguuagcuccug

SEQ ID NO: 1323258 - RNA, 20 nt, Human
gguucuccguuagcuccugu

SEQ ID NO: 1323259 - RNA, 21 nt, Human
gguucuccguuagcuccugug

SEQ ID NO: 1323260 - RNA, 21 nt, Human
gguuuaugacaguaauugugu

SEQ ID NO: 1323261 - RNA, 16 nt, Human
gguuuagaaagcuugc

SEQ ID NO: 1323262 - RNA, 17 nt, Human
gguucugagauggcucc

SEQ ID NO: 1323263 - RNA, 18 nt, Human
gguucugagauggcuccc

SEQ ID NO: 1323264 - RNA, 20 nt, Human
gguucugccugccagcugca

SEQ ID NO: 1323265 - RNA, 19 nt, Human
gguucugccugccagcugc

SEQ ID NO: 1323266 - RNA, 13 nt, Human
gguucuggcuguu

SEQ ID NO: 1323267 - RNA, 12 nt, Human
ggugugcuggga

SEQ ID NO: 1323268 - RNA, 19 nt, Human
ggugugcugggagcuccac

SEQ ID NO: 1323269 - RNA, 22 nt, Human
ggugugcugggagcuccacucu

SEQ ID NO: 1323270 - RNA, 12 nt, Human
gguucaggcccg

SEQ ID NO: 1323271 - RNA, 13 nt, Human
gguucaggcccgg

SEQ ID NO: 1323272 - RNA, 17 nt, Human
gguuccguguccacccc

SEQ ID NO: 1323273 - RNA, 19 nt, Human
gguuccguguccaccccca

SEQ ID NO: 1323274 - RNA, 16 nt, Human
gguuccuccccuccuc

SEQ ID NO: 1323275 - RNA, 12 nt, Human
gguuccacagac

SEQ ID NO: 1323276 - RNA, 24 nt, Human
gguuccagcaauucuccugccuca

SEQ ID NO: 1323277 - RNA, 15 nt, Human
gguuccccuguucac

SEQ ID NO: 1323278 - RNA, 17 nt, Human
gguucccguuucuccac

SEQ ID NO: 1323279 - RNA, 23 nt, Human
gguuccagcaauucuccugccuc

SEQ ID NO: 1323280 - RNA, 18 nt, Human
aaagccuguuuaagagac

SEQ ID NO: 1323281 - RNA, 16 nt, Human
aaagccuguuuaagag

SEQ ID NO: 1323282 - RNA, 15 nt, Human
aaagcaucuugcauu

SEQ ID NO: 1323283 - RNA, 18 nt, Human
aaagccuucuuuuggggg

SEQ ID NO: 1323284 - RNA, 11 nt, Human
aaagccuucuu

SEQ ID NO: 1323285 - RNA, 16 nt, Human
aaagccuuuauuuguu

SEQ ID NO: 1323286 - RNA, 12 nt, Human
aaagcgaaaaaa

SEQ ID NO: 1323287 - RNA, 16 nt, Human
aaagcgaaaaaaucag

SEQ ID NO: 1323288 - RNA, 17 nt, Human
ggugggaggaugugaau

SEQ ID NO: 1323289 - RNA, 17 nt, Human
gguggggggggugcugg

SEQ ID NO: 1323290 - RNA, 12 nt, Human
gguggggcagcu

SEQ ID NO: 1323291 - RNA, 13 nt, Human
gguggggcagcuc

SEQ ID NO: 1323292 - RNA, 15 nt, Human
gguggggcagcuccu

SEQ ID NO: 1323293 - RNA, 10 nt, Human
ggugggggua

SEQ ID NO: 1323294 - RNA, 23 nt, Human
gguggggguaggguuucccuacu

SEQ ID NO: 1323295 - RNA, 20 nt, Human
gguggggguagggggcugga

SEQ ID NO: 1323296 - RNA, 15 nt, Human
ggugucucaggcugc

SEQ ID NO: 1323297 - RNA, 16 nt, Human
ggugucucaggcugcc

SEQ ID NO: 1323298 - RNA, 17 nt, Human
ggugucucaggcugccu

SEQ ID NO: 1323299 - RNA, 18 nt, Human
ggugucucaggcugccug

SEQ ID NO: 1323300 - RNA, 20 nt, Human
ggugucucaggcugccugag

SEQ ID NO: 1323301 - RNA, 16 nt, Human
ggugugaccacugcag

SEQ ID NO: 1323302 - RNA, 21 nt, Human
ggugucucaggcugccugagu

SEQ ID NO: 1323303 - RNA, 20 nt, Human
ggugucuugggcagagcugg

SEQ ID NO: 1323304 - RNA, 15 nt, Human
ggugugaucgucuga

SEQ ID NO: 1323305 - RNA, 18 nt, Human
ggugugaucgucugacug

SEQ ID NO: 1323306 - RNA, 16 nt, Human
ggugugcaccaggguu

SEQ ID NO: 1323307 - RNA, 17 nt, Human
ggugugcaccaggguug

SEQ ID NO: 1323308 - RNA, 14 nt, Human
ggucggaccagcuu

SEQ ID NO: 1323309 - RNA, 22 nt, Human
ggucgggcagcacaaguguaau

SEQ ID NO: 1323310 - RNA, 14 nt, Human
ggucggggcaucug

SEQ ID NO: 1323311 - RNA, 20 nt, Human
ggucggggcaucuggccugg

SEQ ID NO: 1323312 - RNA, 20 nt, Human
ggucgguagguucagccaag

SEQ ID NO: 1323313 - RNA, 14 nt, Human
ggucggugccuuca

SEQ ID NO: 1323314 - RNA, 15 nt, Human
ggucggugccuucaa

SEQ ID NO: 1323315 - RNA, 14 nt, Human
ggucguggagagcu

SEQ ID NO: 1323316 - RNA, 15 nt, Human
ggucguggagagcua

SEQ ID NO: 1323317 - RNA, 20 nt, Human
ggucguggagagcuaggagc

SEQ ID NO: 1323318 - RNA, 13 nt, Human
ggucggaccagcu

SEQ ID NO: 1323319 - RNA, 19 nt, Human
ggucgcccuuugcugcaug

SEQ ID NO: 1323320 - RNA, 18 nt, Human
ggucgcuugggaauuuua

SEQ ID NO: 1323321 - RNA, 14 nt, Human
ggucguuuuuuuca

SEQ ID NO: 1323322 - RNA, 19 nt, Human
ggucguggagagcuaggag

SEQ ID NO: 1323323 - RNA, 14 nt, Human
ggucuaggacacag

SEQ ID NO: 1323324 - RNA, 17 nt, Human
gguccugguggggcagc

SEQ ID NO: 1323325 - RNA, 18 nt, Human
gguccugguggggcagcu

SEQ ID NO: 1323326 - RNA, 12 nt, Human
ggucgcuccugc

SEQ ID NO: 1323327 - RNA, 13 nt, Human
ggucgcuccugcc

SEQ ID NO: 1323328 - RNA, 14 nt, Human
ggucgcuccugccc

SEQ ID NO: 1323329 - RNA, 19 nt, Human
gguccugguggggcagcuc

SEQ ID NO: 1323330 - RNA, 20 nt, Human
gguccugagcacugccagga

SEQ ID NO: 1323331 - RNA, 17 nt, Human
gguccuggagcagacca

SEQ ID NO: 1323332 - RNA, 21 nt, Human
gguccuggagcagaccacccc

SEQ ID NO: 1323333 - RNA, 15 nt, Human
gguccugggaggaga

SEQ ID NO: 1323334 - RNA, 18 nt, Human
gguccuccuccagggaca

SEQ ID NO: 1323335 - RNA, 13 nt, Human
gguccucugucag

SEQ ID NO: 1323336 - RNA, 21 nt, Human
gguccucugucagucacagcc

SEQ ID NO: 1323337 - RNA, 23 nt, Human
gguccucugucagucacagccac

SEQ ID NO: 1323338 - RNA, 22 nt, Human
gguccucuucugggccugacca

SEQ ID NO: 1323339 - RNA, 19 nt, Human
gguccucuucugggccuga

SEQ ID NO: 1323340 - RNA, 15 nt, Human
gguccugagcacugc

SEQ ID NO: 1323341 - RNA, 16 nt, Human
gguccugagcacugcc

SEQ ID NO: 1323342 - RNA, 18 nt, Human
gguccugagcacugccag

SEQ ID NO: 1323343 - RNA, 19 nt, Human
gguccugagcacugccagg

SEQ ID NO: 1323344 - RNA, 13 nt, Human
aaagcaaaugucu

SEQ ID NO: 1323345 - RNA, 14 nt, Human
aaagcaacacuuuu

SEQ ID NO: 1323346 - RNA, 18 nt, Human
aaagcaagaaucagagaa

SEQ ID NO: 1323347 - RNA, 22 nt, Human
aaagcaagcauucagaagaaaa

SEQ ID NO: 1323348 - RNA, 14 nt, Human
aaagcaagaaucag

SEQ ID NO: 1323349 - RNA, 20 nt, Human
aaagcaagcauucagaagaa

SEQ ID NO: 1323350 - RNA, 21 nt, Human
gguccucagagaauuucuacc

SEQ ID NO: 1323351 - RNA, 14 nt, Human
gguccucagagaau

SEQ ID NO: 1323352 - RNA, 16 nt, Human
gguccuauggccucau

SEQ ID NO: 1323353 - RNA, 14 nt, Human
gguccuccuccagg

SEQ ID NO: 1323354 - RNA, 17 nt, Human
gguccuccuccagggac

SEQ ID NO: 1323355 - RNA, 19 nt, Human
gguccuccuccagggacag

SEQ ID NO: 1323356 - RNA, 15 nt, Human
aaagcaaaccuguaa

SEQ ID NO: 1323357 - RNA, 11 nt, Human
aaagcaaagca

SEQ ID NO: 1323358 - RNA, 17 nt, Human
aaagcaaagcacagaga

SEQ ID NO: 1323359 - RNA, 14 nt, Human
aaagcaaaucauuu

SEQ ID NO: 1323360 - RNA, 22 nt, Human
aaagcaaaagaucccuuuuucu

SEQ ID NO: 1323361 - RNA, 20 nt, Human
aaagacguuuuauaagcauc

SEQ ID NO: 1323362 - RNA, 21 nt, Human
aaagauucuauaguucuagac

SEQ ID NO: 1323363 - RNA, 22 nt, Human
aaagauucugaccuuaaaugca

SEQ ID NO: 1323364 - RNA, 23 nt, Human
aaagauugaaguauuuugcugga

SEQ ID NO: 1323365 - RNA, 15 nt, Human
aaagauugagagaau

SEQ ID NO: 1323366 - RNA, 19 nt, Human
aaagauugcugaaauuuua

SEQ ID NO: 1323367 - RNA, 21 nt, Human
aaagauugcugaaauuuuaua

SEQ ID NO: 1323368 - RNA, 20 nt, Human
ggugcugggccccugccucu

SEQ ID NO: 1323369 - RNA, 16 nt, Human
ggugcuggggccuggu

SEQ ID NO: 1323370 - RNA, 13 nt, Human
ggugcuggucccg

SEQ ID NO: 1323371 - RNA, 21 nt, Human
ggugcaauguguguauaugga

SEQ ID NO: 1323372 - RNA, 22 nt, Human
ggugcaauguguguauauggac

SEQ ID NO: 1323373 - RNA, 13 nt, Human
ggugcaauuucaa

SEQ ID NO: 1323374 - RNA, 23 nt, Human
ggugccaaacaaaaagguucuca

SEQ ID NO: 1323375 - RNA, 23 nt, Human
ggugccaauuucaaguuccaagu

SEQ ID NO: 1323376 - RNA, 10 nt, Human
ggugccaccu

SEQ ID NO: 1323377 - RNA, 12 nt, Human
ggugccagaagc

SEQ ID NO: 1323378 - RNA, 19 nt, Human
ggucuguuggcaggcuggc

SEQ ID NO: 1323379 - RNA, 20 nt, Human
ggucuguuggcaggcuggcc

SEQ ID NO: 1323380 - RNA, 12 nt, Human
ggucuguuugca

SEQ ID NO: 1323381 - RNA, 15 nt, Human
ggucuuacagcaggc

SEQ ID NO: 1323382 - RNA, 24 nt, Human
aaagcaucccucacccauccuaga

SEQ ID NO: 1323383 - RNA, 17 nt, Human
aaagcaucccucaccca

SEQ ID NO: 1323384 - RNA, 22 nt, Human
aaagcaucuugcauuaugcaau

SEQ ID NO: 1323385 - RNA, 15 nt, Human
aaagcaucccucacc

SEQ ID NO: 1323386 - RNA, 12 nt, Human
aaagcaucccuc

SEQ ID NO: 1323387 - RNA, 20 nt, Human
aaagcaucauggcuaucugu

SEQ ID NO: 1323388 - RNA, 17 nt, Human
aaagcaggcagaacuca

SEQ ID NO: 1323389 - RNA, 19 nt, Human
aaagcaggcagaacucauc

SEQ ID NO: 1323390 - RNA, 17 nt, Human
aaagcagggacuugaac

SEQ ID NO: 1323391 - RNA, 17 nt, Human
gguggcacaggcccccu

SEQ ID NO: 1323392 - RNA, 23 nt, Human
gguggcacaggaguguccucuuc

SEQ ID NO: 1323393 - RNA, 18 nt, Human
gguggcacaggcccccuu

SEQ ID NO: 1323394 - RNA, 14 nt, Human
gguggauggcccca

SEQ ID NO: 1323395 - RNA, 22 nt, Human
gguggauggccccagcacagcu

SEQ ID NO: 1323396 - RNA, 21 nt, Human
ggugcuucuaguucugccagg

SEQ ID NO: 1323397 - RNA, 22 nt, Human
gguaugaacuugaggacacaug

SEQ ID NO: 1323398 - RNA, 21 nt, Human
gguaugaacuugaggacacau

SEQ ID NO: 1323399 - RNA, 17 nt, Human
gguaugaagaguguuau

SEQ ID NO: 1323400 - RNA, 12 nt, Human
gguaggaaaugu

SEQ ID NO: 1323401 - RNA, 14 nt, Human
gguagcuuuucccu

SEQ ID NO: 1323402 - RNA, 23 nt, Human
gguaugaacuugaggacacaugu

SEQ ID NO: 1323403 - RNA, 13 nt, Human
gguaugaagagug

SEQ ID NO: 1323404 - RNA, 16 nt, Human
gguccacaacacacag

SEQ ID NO: 1323405 - RNA, 17 nt, Human
gguccaauuaguuuccu

SEQ ID NO: 1323406 - RNA, 18 nt, Human
gguccaauuaguuuccuu

SEQ ID NO: 1323407 - RNA, 18 nt, Human
gguccacaggucuagacu

SEQ ID NO: 1323408 - RNA, 12 nt, Human
gguccagggcua

SEQ ID NO: 1323409 - RNA, 16 nt, Human
aaagaaugauuaugaa

SEQ ID NO: 1323410 - RNA, 16 nt, Human
aaagaauagaagcuaa

SEQ ID NO: 1323411 - RNA, 13 nt, Human
aaagacaccuacu

SEQ ID NO: 1323412 - RNA, 19 nt, Human
aaagacaccuacugagugg

SEQ ID NO: 1323413 - RNA, 22 nt, Human
aaagacacauuuuuuaggaaau

SEQ ID NO: 1323414 - RNA, 14 nt, Human
gguccaugggcaga

SEQ ID NO: 1323415 - RNA, 16 nt, Human
gguccaugggcagagc

SEQ ID NO: 1323416 - RNA, 18 nt, Human
aaagaaguggggacagag

SEQ ID NO: 1323417 - RNA, 24 nt, Human
aaagaaguguggggauuuucacug

SEQ ID NO: 1323418 - RNA, 13 nt, Human
gguccaugggcag

SEQ ID NO: 1323419 - RNA, 18 nt, Human
ggguggggggggugcugg

SEQ ID NO: 1323420 - RNA, 13 nt, Human
ggguggggagaga

SEQ ID NO: 1323421 - RNA, 16 nt, Human
gggugggguggcugca

SEQ ID NO: 1323422 - RNA, 23 nt, Human
gggugucuugggcagagcuggcu

SEQ ID NO: 1323423 - RNA, 13 nt, Human
gggugugcuggga

SEQ ID NO: 1323424 - RNA, 23 nt, Human
ggguguccugcaccggggccugg

SEQ ID NO: 1323425 - RNA, 15 nt, Human
gggugucuugggcag

SEQ ID NO: 1323426 - RNA, 21 nt, Human
gggugucuugggcagagcugg

SEQ ID NO: 1323427 - RNA, 11 nt, Human
ggggccuggca

SEQ ID NO: 1323428 - RNA, 12 nt, Human
ggggccuggcag

SEQ ID NO: 1323429 - RNA, 22 nt, Human
ggggccugccaccuggaccccu

SEQ ID NO: 1323430 - RNA, 15 nt, Human
gggugggcaguuuuu

SEQ ID NO: 1323431 - RNA, 19 nt, Human
ggguuucugcccugcccac

SEQ ID NO: 1323432 - RNA, 15 nt, Human
ggguuucugcccugc

SEQ ID NO: 1323433 - RNA, 17 nt, Human
ggguuugugacagggcg

SEQ ID NO: 1323434 - RNA, 16 nt, Human
ggguuuuaacuuuguu

SEQ ID NO: 1323435 - RNA, 15 nt, Human
ggguuuuaacuuugu

SEQ ID NO: 1323436 - RNA, 14 nt, Human
gguaaucgaccugc

SEQ ID NO: 1323437 - RNA, 17 nt, Human
gguaaucgaccugccuc

SEQ ID NO: 1323438 - RNA, 18 nt, Human
gguaaucgaccugccucg

SEQ ID NO: 1323439 - RNA, 23 nt, Human
gguacaaccuguucugcuuuccu

SEQ ID NO: 1323440 - RNA, 22 nt, Human
gguaauuguugcuaaucuucuu

SEQ ID NO: 1323441 - RNA, 24 nt, Human
gguacaaccuguucugcuuuccuc

SEQ ID NO: 1323442 - RNA, 10 nt, Human
gguacagaga

SEQ ID NO: 1323443 - RNA, 12 nt, Human
gguacagagaag

SEQ ID NO: 1323444 - RNA, 13 nt, Human
gguacagagaagc

SEQ ID NO: 1323445 - RNA, 14 nt, Human
gguacagagaagcc

SEQ ID NO: 1323446 - RNA, 15 nt, Human
gguacagagaagcca

SEQ ID NO: 1323447 - RNA, 16 nt, Human
gguacagagaagccag

SEQ ID NO: 1323448 - RNA, 21 nt, Human
gguacagagaagccagcuugu

SEQ ID NO: 1323449 - RNA, 17 nt, Human
gguacaguauggggguu

SEQ ID NO: 1323450 - RNA, 16 nt, Human
gguacauggugcuggg

SEQ ID NO: 1323451 - RNA, 18 nt, Human
gguacaugguguuugugg

SEQ ID NO: 1323452 - RNA, 14 nt, Human
gguaccagaugcag

SEQ ID NO: 1323453 - RNA, 17 nt, Human
gguaccagauaacuuuu

SEQ ID NO: 1323454 - RNA, 22 nt, Human
gguagcgggggaggguaggcag

SEQ ID NO: 1323455 - RNA, 15 nt, Human
aaacacccucacacu

SEQ ID NO: 1323456 - RNA, 18 nt, Human
aaacaccuccucauguac

SEQ ID NO: 1323457 - RNA, 15 nt, Human
aaacaccaacauaaa

SEQ ID NO: 1323458 - RNA, 19 nt, Human
aaacaccaacauaaaaaug

SEQ ID NO: 1323459 - RNA, 19 nt, Human
aaacaccaacauguuggga

SEQ ID NO: 1323460 - RNA, 22 nt, Human
aaacaccuuccagcuccuguaa

SEQ ID NO: 1323461 - RNA, 14 nt, Human
aaacagugagccug

SEQ ID NO: 1323462 - RNA, 21 nt, Human
aaacaguugcacagcaucuca

SEQ ID NO: 1323463 - RNA, 19 nt, Human
aaacaguugcacagcaucu

SEQ ID NO: 1323464 - RNA, 18 nt, Human
aaacaguugcauguagua

SEQ ID NO: 1323465 - RNA, 19 nt, Human
aaacaguugcauguaguaa

SEQ ID NO: 1323466 - RNA, 18 nt, Human
aaacaguugcacagcauc

SEQ ID NO: 1323467 - RNA, 17 nt, Human
aaacaguugcacagcau

SEQ ID NO: 1323468 - RNA, 16 nt, Human
aaacaguugcacagca

SEQ ID NO: 1323469 - RNA, 15 nt, Human
aaacaguugcacagc

SEQ ID NO: 1323470 - RNA, 23 nt, Human
aaacaguggaucacaaaguggaa

SEQ ID NO: 1323471 - RNA, 20 nt, Human
aaacaguugcauguaguaac

SEQ ID NO: 1323472 - RNA, 24 nt, Human
aaacaguugcauguaguaacacua

SEQ ID NO: 1323473 - RNA, 20 nt, Human
aaacaagcacuaaacaaaga

SEQ ID NO: 1323474 - RNA, 13 nt, Human
aaacaaaaacacu

SEQ ID NO: 1323475 - RNA, 19 nt, Human
aaacaaaaauuaaaauccu

SEQ ID NO: 1323476 - RNA, 13 nt, Human
ggggccaggcugg

SEQ ID NO: 1323477 - RNA, 19 nt, Human
ggggccagauccagccugg

SEQ ID NO: 1323478 - RNA, 21 nt, Human
ggggccuccaugggccccagg

SEQ ID NO: 1323479 - RNA, 13 nt, Human
ggggccagaggcu

SEQ ID NO: 1323480 - RNA, 13 nt, Human
ggggccagaucca

SEQ ID NO: 1323481 - RNA, 14 nt, Human
ggggccagauccag

SEQ ID NO: 1323482 - RNA, 17 nt, Human
ggggccagauccagccu

SEQ ID NO: 1323483 - RNA, 12 nt, Human
ggggccugagca

SEQ ID NO: 1323484 - RNA, 17 nt, Human
ggggccugagcaguccu

SEQ ID NO: 1323485 - RNA, 23 nt, Human
ggggccugagcaguccuuggccu

SEQ ID NO: 1323486 - RNA, 12 nt, Human
ggggccugccac

SEQ ID NO: 1323487 - RNA, 18 nt, Human
ggggccugccaccuggac

SEQ ID NO: 1323488 - RNA, 19 nt, Human
ggggccugccaccuggacc

SEQ ID NO: 1323489 - RNA, 20 nt, Human
ggggccugccaccuggaccc

SEQ ID NO: 1323490 - RNA, 23 nt, Human
ggggccugcccagugcacuugcu

SEQ ID NO: 1323491 - RNA, 19 nt, Human
ggggccuggagauccuccu

SEQ ID NO: 1323492 - RNA, 20 nt, Human
aaacaugcagaacaaaugaa

SEQ ID NO: 1323493 - RNA, 16 nt, Human
aaacaugcagaacaaa

SEQ ID NO: 1323494 - RNA, 16 nt, Human
ggggcaucuggccugg

SEQ ID NO: 1323495 - RNA, 15 nt, Human
ggggcaucuggccug

SEQ ID NO: 1323496 - RNA, 12 nt, Human
ggggccagaggc

SEQ ID NO: 1323497 - RNA, 22 nt, Human
aaacaucuuugaaauuauguaa

SEQ ID NO: 1323498 - RNA, 19 nt, Human
aaacaugacccuaaaucuu

SEQ ID NO: 1323499 - RNA, 21 nt, Human
aaacaugacccuaaaucuuga

SEQ ID NO: 1323500 - RNA, 18 nt, Human
aaacauccuacaagacac

SEQ ID NO: 1323501 - RNA, 19 nt, Human
aaacaucauucauuuuugu

SEQ ID NO: 1323502 - RNA, 22 nt, Human
aaacauccuacaagacacagug

SEQ ID NO: 1323503 - RNA, 17 nt, Human
aaacauccucuuccaua

SEQ ID NO: 1323504 - RNA, 16 nt, Human
aaacaucuuugaaauu

SEQ ID NO: 1323505 - RNA, 17 nt, Human
aaacaucuuugaaauua

SEQ ID NO: 1323506 - RNA, 19 nt, Human
gggcuggugggugccuagg

SEQ ID NO: 1323507 - RNA, 14 nt, Human
gggcugguucugua

SEQ ID NO: 1323508 - RNA, 18 nt, Human
aaaaugucuuguguuacc

SEQ ID NO: 1323509 - RNA, 15 nt, Human
aaaaugugauaugua

SEQ ID NO: 1323510 - RNA, 15 nt, Human
aaaaugugauguucu

SEQ ID NO: 1323511 - RNA, 17 nt, Human
aaaaugugauguucuaa

SEQ ID NO: 1323512 - RNA, 19 nt, Human
aaaaugugauguucuaagg

SEQ ID NO: 1323513 - RNA, 20 nt, Human
aaaaugugauguucuaaggc

SEQ ID NO: 1323514 - RNA, 21 nt, Human
aaaaugugauguucuaaggcu

SEQ ID NO: 1323515 - RNA, 19 nt, Human
aaaaugugcuauacugcau

SEQ ID NO: 1323516 - RNA, 12 nt, Human
aaaaugugugug

SEQ ID NO: 1323517 - RNA, 20 nt, Human
aaaaugugcuauacugcaua

SEQ ID NO: 1323518 - RNA, 22 nt, Human
aaaaugugggauuaugggucac

SEQ ID NO: 1323519 - RNA, 21 nt, Human
aaaaugugggauuauggguca

SEQ ID NO: 1323520 - RNA, 18 nt, Human
aaaauguuaucuucucaa

SEQ ID NO: 1323521 - RNA, 18 nt, Human
aaaauuuguuauuuugca

SEQ ID NO: 1323522 - RNA, 16 nt, Human
aaaauuuguucuugua

SEQ ID NO: 1323523 - RNA, 19 nt, Human
aaaauuuguucuuguauuu

SEQ ID NO: 1323524 - RNA, 20 nt, Human
aaaauuuguucuuguauuua

SEQ ID NO: 1323525 - RNA, 13 nt, Human
aaaauuuguugca

SEQ ID NO: 1323526 - RNA, 14 nt, Human
aaaauuuguugcau

SEQ ID NO: 1323527 - RNA, 13 nt, Human
gggcugggaaguc

SEQ ID NO: 1323528 - RNA, 16 nt, Human
gggcugggagcucugc

SEQ ID NO: 1323529 - RNA, 18 nt, Human
gggcugggagcucugcag

SEQ ID NO: 1323530 - RNA, 11 nt, Human
gggcuggcugg

SEQ ID NO: 1323531 - RNA, 13 nt, Human
gggcugcccuggu

SEQ ID NO: 1323532 - RNA, 14 nt, Human
gggcugcccuggug

SEQ ID NO: 1323533 - RNA, 15 nt, Human
gggcugcccuggugc

SEQ ID NO: 1323534 - RNA, 21 nt, Human
gggcugcccuggugcugccac

SEQ ID NO: 1323535 - RNA, 20 nt, Human
gggcuacccugagcugaggc

SEQ ID NO: 1323536 - RNA, 21 nt, Human
gggcuauuuuguuugcuucau

SEQ ID NO: 1323537 - RNA, 18 nt, Human
gggcucaaucucuggggg

SEQ ID NO: 1323538 - RNA, 19 nt, Human
gggcugcaguucgacucug

SEQ ID NO: 1323539 - RNA, 14 nt, Human
gggcucacacaccu

SEQ ID NO: 1323540 - RNA, 15 nt, Human
gggcuaccaggaaag

SEQ ID NO: 1323541 - RNA, 13 nt, Human
gggcuacccugag

SEQ ID NO: 1323542 - RNA, 12 nt, Human
gggcuaccagga

SEQ ID NO: 1323543 - RNA, 16 nt, Human
gggcuacccugagcug

SEQ ID NO: 1323544 - RNA, 19 nt, Human
gggcuacccugagcugagg

SEQ ID NO: 1323545 - RNA, 21 nt, Human
gggcuacccugagcugaggca

SEQ ID NO: 1323546 - RNA, 23 nt, Human
gggcuacaccuuagccugcccuc

SEQ ID NO: 1323547 - RNA, 13 nt, Human
gggcuaauuuaac

SEQ ID NO: 1323548 - RNA, 17 nt, Human
gggcgggcagagggcug

SEQ ID NO: 1323549 - RNA, 14 nt, Human
gggcggggguggcg

SEQ ID NO: 1323550 - RNA, 17 nt, Human
gggcggcaggggccugg

SEQ ID NO: 1323551 - RNA, 21 nt, Human
gggcggcaggggccuggagau

SEQ ID NO: 1323552 - RNA, 22 nt, Human
gggcggccuaugacuugggcac

SEQ ID NO: 1323553 - RNA, 22 nt, Human
gggccucggacuuagcugggag

SEQ ID NO: 1323554 - RNA, 22 nt, Human
gggccuauggagagcccuggga

SEQ ID NO: 1323555 - RNA, 19 nt, Human
gggccucaaaggcccgcuc

SEQ ID NO: 1323556 - RNA, 20 nt, Human
gggccucaaaggcccgcucu

SEQ ID NO: 1323557 - RNA, 20 nt, Human
gggccuccaugggccccagg

SEQ ID NO: 1323558 - RNA, 12 nt, Human
gggccugagcag

SEQ ID NO: 1323559 - RNA, 20 nt, Human
gggccugagcaguccuuggc

SEQ ID NO: 1323560 - RNA, 21 nt, Human
gggccugagcaguccuuggcc

SEQ ID NO: 1323561 - RNA, 22 nt, Human
gggccaugauggcaacagaucu

SEQ ID NO: 1323562 - RNA, 23 nt, Human
gggccaugauggcaacagaucug

SEQ ID NO: 1323563 - RNA, 14 nt, Human
gggccaugcugagg

SEQ ID NO: 1323564 - RNA, 15 nt, Human
gggccaugcugaggc

SEQ ID NO: 1323565 - RNA, 22 nt, Human
gggcccuggugguggcucggga

SEQ ID NO: 1323566 - RNA, 18 nt, Human
gggcccuggggccuguac

SEQ ID NO: 1323567 - RNA, 17 nt, Human
gggccaugcugaggccu

SEQ ID NO: 1323568 - RNA, 12 nt, Human
gggcccuggggc

SEQ ID NO: 1323569 - RNA, 14 nt, Human
gggcccuggggccu

SEQ ID NO: 1323570 - RNA, 15 nt, Human
gggcccuggggccug

SEQ ID NO: 1323571 - RNA, 17 nt, Human
gggcccuggggccugua

SEQ ID NO: 1323572 - RNA, 20 nt, Human
gggcccuggggccuguacug

SEQ ID NO: 1323573 - RNA, 17 nt, Human
gggcccuuugagugcag

SEQ ID NO: 1323574 - RNA, 14 nt, Human
gggccgacuaagag

SEQ ID NO: 1323575 - RNA, 15 nt, Human
gggccgaugcccaga

SEQ ID NO: 1323576 - RNA, 17 nt, Human
gggccgaugcccagaga

SEQ ID NO: 1323577 - RNA, 16 nt, Human
gggccgaugcccagag

SEQ ID NO: 1323578 - RNA, 17 nt, Human
gggccuacuagagucug

SEQ ID NO: 1323579 - RNA, 15 nt, Human
gggccuaggcugcau

SEQ ID NO: 1323580 - RNA, 14 nt, Human
gggccuauggagag

SEQ ID NO: 1323581 - RNA, 16 nt, Human
gggccuauggagagcc

SEQ ID NO: 1323582 - RNA, 18 nt, Human
gggccuauggagagcccu

SEQ ID NO: 1323583 - RNA, 19 nt, Human
gggccuauggagagcccug

SEQ ID NO: 1323584 - RNA, 20 nt, Human
gggccuauggagagcccugg

SEQ ID NO: 1323585 - RNA, 21 nt, Human
gggccuauggagagcccuggg

SEQ ID NO: 1323586 - RNA, 15 nt, Human
gggccaggcuggguc

SEQ ID NO: 1323587 - RNA, 14 nt, Human
gggccaggcugggu

SEQ ID NO: 1323588 - RNA, 21 nt, Human
gggccaggcugggucgcccug

SEQ ID NO: 1323589 - RNA, 22 nt, Human
gggccagucuguggaucagaga

SEQ ID NO: 1323590 - RNA, 11 nt, Human
gggccagccuc

SEQ ID NO: 1323591 - RNA, 12 nt, Human
gggccagccucu

SEQ ID NO: 1323592 - RNA, 21 nt, Human
aaaaugcuguauuagucacag

SEQ ID NO: 1323593 - RNA, 18 nt, Human
aaaaugcucuuauuucau

SEQ ID NO: 1323594 - RNA, 19 nt, Human
aaaaugcuggcuauagaug

SEQ ID NO: 1323595 - RNA, 20 nt, Human
aaaaugcucuuauuucauca

SEQ ID NO: 1323596 - RNA, 17 nt, Human
aaaaugcucuuauuuca

SEQ ID NO: 1323597 - RNA, 16 nt, Human
aaaaugcuagguucua

SEQ ID NO: 1323598 - RNA, 18 nt, Human
aaaaugcgguuauaaaaa

SEQ ID NO: 1323599 - RNA, 22 nt, Human
aaaaugcgguuauaaaaaaugg

SEQ ID NO: 1323600 - RNA, 13 nt, Human
aaaaugcuagguu

SEQ ID NO: 1323601 - RNA, 15 nt, Human
aaaaugcuagguucu

SEQ ID NO: 1323602 - RNA, 19 nt, Human
aaaaguauguuagugcaaa

SEQ ID NO: 1323603 - RNA, 13 nt, Human
aaaaguagcaauu

SEQ ID NO: 1323604 - RNA, 23 nt, Human
aaaaguauguucuaaccuuuaca

SEQ ID NO: 1323605 - RNA, 14 nt, Human
aaaaucuuaaugua

SEQ ID NO: 1323606 - RNA, 18 nt, Human
aaaaucuuauaguucuag

SEQ ID NO: 1323607 - RNA, 19 nt, Human
aaaaucuuauaguucuagg

SEQ ID NO: 1323608 - RNA, 20 nt, Human
aaaaucuuauaguucuaggc

SEQ ID NO: 1323609 - RNA, 18 nt, Human
aaaaucuugaucaguuaa

SEQ ID NO: 1323610 - RNA, 15 nt, Human
aaaaucuugaucagu

SEQ ID NO: 1323611 - RNA, 11 nt, Human
aaaaucuuguc

SEQ ID NO: 1323612 - RNA, 12 nt, Human
aaaaucuuguca

SEQ ID NO: 1323613 - RNA, 13 nt, Human
aaaaucuugucau

SEQ ID NO: 1323614 - RNA, 19 nt, Human
aaaaucuugucauguguau

SEQ ID NO: 1323615 - RNA, 14 nt, Human
aaaaugacaaucau

SEQ ID NO: 1323616 - RNA, 14 nt, Human
aaaaugauacagca

SEQ ID NO: 1323617 - RNA, 19 nt, Human
aaaaugauauuguuauaua

SEQ ID NO: 1323618 - RNA, 14 nt, Human
aaaaugaaagcuac

SEQ ID NO: 1323619 - RNA, 19 nt, Human
aaaaugaaagcuacucaua

SEQ ID NO: 1323620 - RNA, 13 nt, Human
aaaagcagacauu

SEQ ID NO: 1323621 - RNA, 14 nt, Human
aaaagcaaaucauu

SEQ ID NO: 1323622 - RNA, 13 nt, Human
aaaagcaacacuu

SEQ ID NO: 1323623 - RNA, 14 nt, Human
aaaagcaacauuca

SEQ ID NO: 1323624 - RNA, 18 nt, Human
aaaagaugaaagagcagu

SEQ ID NO: 1323625 - RNA, 18 nt, Human
aaaagaugcacuuugcuu

SEQ ID NO: 1323626 - RNA, 22 nt, Human
aaaagaugcacuuugcuuuaau

SEQ ID NO: 1323627 - RNA, 13 nt, Human
aaaagaugcuuuu

SEQ ID NO: 1323628 - RNA, 19 nt, Human
aaaagaugcuuuuaacaga

SEQ ID NO: 1323629 - RNA, 14 nt, Human
aaaagcagacauuu

SEQ ID NO: 1323630 - RNA, 22 nt, Human
aaaagcagguugauaaaucauu

SEQ ID NO: 1323631 - RNA, 18 nt, Human
aaaagcagguugauaaau

SEQ ID NO: 1323632 - RNA, 12 nt, Human
gggagaagcucc

SEQ ID NO: 1323633 - RNA, 14 nt, Human
gggagacacuggcc

SEQ ID NO: 1323634 - RNA, 19 nt, Human
gggagacacuggccccuca

SEQ ID NO: 1323635 - RNA, 12 nt, Human
gggagacagcau

SEQ ID NO: 1323636 - RNA, 15 nt, Human
gggagacaugugaca

SEQ ID NO: 1323637 - RNA, 17 nt, Human
gggagaccggccugcca

SEQ ID NO: 1323638 - RNA, 20 nt, Human
gggagaccggccugccagga

SEQ ID NO: 1323639 - RNA, 21 nt, Human
gggagaccggccugccaggag

SEQ ID NO: 1323640 - RNA, 22 nt, Human
gggagaccggccugccaggagg

SEQ ID NO: 1323641 - RNA, 19 nt, Human
gggagaccucagaaguaaa

SEQ ID NO: 1323642 - RNA, 17 nt, Human
gggagaggggccucaaa

SEQ ID NO: 1323643 - RNA, 20 nt, Human
gggagagggcgcaggccgug

SEQ ID NO: 1323644 - RNA, 17 nt, Human
gggagauucaagggacc

SEQ ID NO: 1323645 - RNA, 19 nt, Human
gggagcaaacugcaugccc

SEQ ID NO: 1323646 - RNA, 12 nt, Human
gggagcaggcag

SEQ ID NO: 1323647 - RNA, 14 nt, Human
gggagcaggcagcc

SEQ ID NO: 1323648 - RNA, 13 nt, Human
gggagcaggcagc

SEQ ID NO: 1323649 - RNA, 13 nt, Human
gggaggcucaggu

SEQ ID NO: 1323650 - RNA, 22 nt, Human
gggaggcucuggagcccacugu

SEQ ID NO: 1323651 - RNA, 18 nt, Human
gggaugguggagggccac

SEQ ID NO: 1323652 - RNA, 17 nt, Human
gggaugguggagggcca

SEQ ID NO: 1323653 - RNA, 12 nt, Human
gggauguguccu

SEQ ID NO: 1323654 - RNA, 13 nt, Human
gggauguguccug

SEQ ID NO: 1323655 - RNA, 18 nt, Human
gggauguguccugacacu

SEQ ID NO: 1323656 - RNA, 22 nt, Human
gggauguucagcacugucccuu

SEQ ID NO: 1323657 - RNA, 16 nt, Human
gggauuaaccucugca

SEQ ID NO: 1323658 - RNA, 15 nt, Human
gggaggcucaggucc

SEQ ID NO: 1323659 - RNA, 16 nt, Human
gggauggacaucuugu

SEQ ID NO: 1323660 - RNA, 19 nt, Human
gggauggacgaucucccac

SEQ ID NO: 1323661 - RNA, 14 nt, Human
gggaugguaguuuu

SEQ ID NO: 1323662 - RNA, 16 nt, Human
gggcaaauuggagaaa

SEQ ID NO: 1323663 - RNA, 12 nt, Human
gggauuacaggu

SEQ ID NO: 1323664 - RNA, 20 nt, Human
gggauuacaggcgugagcca

SEQ ID NO: 1323665 - RNA, 14 nt, Human
gggauuacaggcgu

SEQ ID NO: 1323666 - RNA, 13 nt, Human
gggauuacaggcu

SEQ ID NO: 1323667 - RNA, 16 nt, Human
gggauuacaggcuccu

SEQ ID NO: 1323668 - RNA, 21 nt, Human
gggauuacaggcuccugccac

SEQ ID NO: 1323669 - RNA, 17 nt, Human
gggauuaugggucacag

SEQ ID NO: 1323670 - RNA, 16 nt, Human
gggauuguaaaauggu

SEQ ID NO: 1323671 - RNA, 17 nt, Human
gggauuguaaaauggug

SEQ ID NO: 1323672 - RNA, 13 nt, Human
gggcaaagccagg

SEQ ID NO: 1323673 - RNA, 16 nt, Human
gggcaaagccaggucc

SEQ ID NO: 1323674 - RNA, 20 nt, Human
gggcaaagccaggucccucu

SEQ ID NO: 1323675 - RNA, 14 nt, Human
gggcaaagccuagu

SEQ ID NO: 1323676 - RNA, 22 nt, Human
aaaagggccaaagaaccaaaga

SEQ ID NO: 1323677 - RNA, 14 nt, Human
aaaagggaggggga

SEQ ID NO: 1323678 - RNA, 12 nt, Human
gggcagggagcg

SEQ ID NO: 1323679 - RNA, 21 nt, Human
gggcaggccaccuggcucuca

SEQ ID NO: 1323680 - RNA, 23 nt, Human
gggcaggccaccuggcucucacc

SEQ ID NO: 1323681 - RNA, 12 nt, Human
gggcaggcuggg

SEQ ID NO: 1323682 - RNA, 13 nt, Human
gggcaggcugggc

SEQ ID NO: 1323683 - RNA, 14 nt, Human
gggcaggcugggcc

SEQ ID NO: 1323684 - RNA, 15 nt, Human
gggcaggcugggcca

SEQ ID NO: 1323685 - RNA, 16 nt, Human
gggcaggcugggccau

SEQ ID NO: 1323686 - RNA, 21 nt, Human
gggcagaggcaguaccugggc

SEQ ID NO: 1323687 - RNA, 13 nt, Human
gggcagagggcug

SEQ ID NO: 1323688 - RNA, 14 nt, Human
gggcagagggcugg

SEQ ID NO: 1323689 - RNA, 15 nt, Human
gggcagagggcugga

SEQ ID NO: 1323690 - RNA, 16 nt, Human
gggcagagggcuggag

SEQ ID NO: 1323691 - RNA, 22 nt, Human
gggcagagggcuggaggcccag

SEQ ID NO: 1323692 - RNA, 17 nt, Human
gggcagagugagaccca

SEQ ID NO: 1323693 - RNA, 16 nt, Human
gggcagauuuucagca

SEQ ID NO: 1323694 - RNA, 13 nt, Human
gggcagccccagg

SEQ ID NO: 1323695 - RNA, 22 nt, Human
gggcagccagggagagcccagg

SEQ ID NO: 1323696 - RNA, 13 nt, Human
gggcagcgccagg

SEQ ID NO: 1323697 - RNA, 15 nt, Human
gggcagcgccaggcu

SEQ ID NO: 1323698 - RNA, 16 nt, Human
gggcagcgccaggcug

SEQ ID NO: 1323699 - RNA, 12 nt, Human
gggcagcuccuc

SEQ ID NO: 1323700 - RNA, 14 nt, Human
gggcagcuccucug

SEQ ID NO: 1323701 - RNA, 17 nt, Human
gggcagcuccucugucu

SEQ ID NO: 1323702 - RNA, 21 nt, Human
gggcagcuccucugucucgag

SEQ ID NO: 1323703 - RNA, 22 nt, Human
gggcagcuccucugucucgagc

SEQ ID NO: 1323704 - RNA, 15 nt, Human
aaaaauauauacuaa

SEQ ID NO: 1323705 - RNA, 17 nt, Human
aaaaauauauguauaua

SEQ ID NO: 1323706 - RNA, 21 nt, Human
aaaaauaugaccacacuccag

SEQ ID NO: 1323707 - RNA, 23 nt, Human
aaaaauaugaccacacuccagcu

SEQ ID NO: 1323708 - RNA, 20 nt, Human
gggacauuugcucauggaau

SEQ ID NO: 1323709 - RNA, 21 nt, Human
gggacauuugcucauggaauu

SEQ ID NO: 1323710 - RNA, 21 nt, Human
aaaaauagcuaaauaccucaa

SEQ ID NO: 1323711 - RNA, 23 nt, Human
aaaaauaguuuggauauguaaaa

SEQ ID NO: 1323712 - RNA, 14 nt, Human
aaaaauaguuugga

SEQ ID NO: 1323713 - RNA, 19 nt, Human
gggaagcccauccugacca

SEQ ID NO: 1323714 - RNA, 15 nt, Human
gggaagcuagucuuu

SEQ ID NO: 1323715 - RNA, 15 nt, Human
gggaaggaggagccu

SEQ ID NO: 1323716 - RNA, 22 nt, Human
gggaagagagccugcaggaucu

SEQ ID NO: 1323717 - RNA, 12 nt, Human
gggaagaggccu

SEQ ID NO: 1323718 - RNA, 19 nt, Human
gggaagaggguuaggaggg

SEQ ID NO: 1323719 - RNA, 23 nt, Human
gggaagaggguuaggaggguuuc

SEQ ID NO: 1323720 - RNA, 13 nt, Human
gggaagcagcagc

SEQ ID NO: 1323721 - RNA, 17 nt, Human
gggaagcagcagccucg

SEQ ID NO: 1323722 - RNA, 18 nt, Human
gggaagcccauccugacc

SEQ ID NO: 1323723 - RNA, 15 nt, Human
aaaacccagauaaag

SEQ ID NO: 1323724 - RNA, 13 nt, Human
aaaacauuuauuu

SEQ ID NO: 1323725 - RNA, 16 nt, Human
aaaacauuuauuuuga

SEQ ID NO: 1323726 - RNA, 13 nt, Human
aaaacccccaaac

SEQ ID NO: 1323727 - RNA, 17 nt, Human
aaaaccccccagauauc

SEQ ID NO: 1323728 - RNA, 18 nt, Human
aaaaccccccagauauca

SEQ ID NO: 1323729 - RNA, 20 nt, Human
aaaaccccccagauaucauc

SEQ ID NO: 1323730 - RNA, 16 nt, Human
aaaacccuugggccag

SEQ ID NO: 1323731 - RNA, 19 nt, Human
aaaacccuugggccagaag

SEQ ID NO: 1323732 - RNA, 20 nt, Human
aaaacccuugggccagaagu

SEQ ID NO: 1323733 - RNA, 15 nt, Human
aaaaccugagauuua

SEQ ID NO: 1323734 - RNA, 22 nt, Human
aaaacuagaggugagaaauuua

SEQ ID NO: 1323735 - RNA, 19 nt, Human
aaaacuauauguaugguuu

SEQ ID NO: 1323736 - RNA, 18 nt, Human
aaaaccugagauuuauua

SEQ ID NO: 1323737 - RNA, 18 nt, Human
aaaacucuacuuaaucca

SEQ ID NO: 1323738 - RNA, 19 nt, Human
aaaacucuacuuaauccaa

SEQ ID NO: 1323739 - RNA, 17 nt, Human
aaaacuccaccuuccca

SEQ ID NO: 1323740 - RNA, 16 nt, Human
aaaacuccaccuuccc

SEQ ID NO: 1323741 - RNA, 12 nt, Human
aaaacucuacuu

SEQ ID NO: 1323742 - RNA, 15 nt, Human
aaaacucuacuuaau

SEQ ID NO: 1323743 - RNA, 16 nt, Human
aaaacauuccauccuu

SEQ ID NO: 1323744 - RNA, 15 nt, Human
aaaacauguuuauuu

SEQ ID NO: 1323745 - RNA, 12 nt, Human
aaaacauuuauu

SEQ ID NO: 1323746 - RNA, 22 nt, Human
aaaacauuuauuuugacauaaa

SEQ ID NO: 1323747 - RNA, 19 nt, Human
aaaacaguggaucacaaag

SEQ ID NO: 1323748 - RNA, 17 nt, Human
aaaacauaaucuucugc

SEQ ID NO: 1323749 - RNA, 18 nt, Human
aaaacauaaucuucugcc

SEQ ID NO: 1323750 - RNA, 20 nt, Human
aaaacauaaucuucugccuu

SEQ ID NO: 1323751 - RNA, 24 nt, Human
aaaacauaaucuucugccuucuca

SEQ ID NO: 1323752 - RNA, 19 nt, Human
aaaacauguuuauuuuucu

SEQ ID NO: 1323753 - RNA, 19 nt, Human
aaaacagguauauacuuug

SEQ ID NO: 1323754 - RNA, 21 nt, Human
aaaacaggucuucaucgaauc

SEQ ID NO: 1323755 - RNA, 18 nt, Human
aaaacagguauauacuuu

SEQ ID NO: 1323756 - RNA, 17 nt, Human
gcugaguauuaaaaugu

SEQ ID NO: 1323757 - RNA, 16 nt, Human
gcugaguauuaaaaug

SEQ ID NO: 1323758 - RNA, 17 nt, Human
gcugaggccugggccgc

SEQ ID NO: 1323759 - RNA, 20 nt, Human
gcugaggccugggccgcugc

SEQ ID NO: 1323760 - RNA, 23 nt, Human
gcugaggccugggccgcugccac

SEQ ID NO: 1323761 - RNA, 13 nt, Human
gcugaggcuggca

SEQ ID NO: 1323762 - RNA, 18 nt, Human
gcugccaguguccugagc

SEQ ID NO: 1323763 - RNA, 19 nt, Human
gcugccaguguccugagcc

SEQ ID NO: 1323764 - RNA, 15 nt, Human
gcugcagaggccaga

SEQ ID NO: 1323765 - RNA, 18 nt, Human
gcugcagaggccagaggc

SEQ ID NO: 1323766 - RNA, 22 nt, Human
gcugcagaggccagaggccccc

SEQ ID NO: 1323767 - RNA, 21 nt, Human
gcugcagccugcgccaccgcc

SEQ ID NO: 1323768 - RNA, 22 nt, Human
gcugcaggaaucuuuaaaagau

SEQ ID NO: 1323769 - RNA, 17 nt, Human
gcugcaggaaucuuuaa

SEQ ID NO: 1323770 - RNA, 20 nt, Human
gcugcacugaugcugccccu

SEQ ID NO: 1323771 - RNA, 21 nt, Human
gcuggagaugaggccagacca

SEQ ID NO: 1323772 - RNA, 20 nt, Human
gcuggagaugaggccagacc

SEQ ID NO: 1323773 - RNA, 18 nt, Human
gcuggagaugaggccaga

SEQ ID NO: 1323774 - RNA, 13 nt, Human
gcugcugagaacc

SEQ ID NO: 1323775 - RNA, 14 nt, Human
gcugcugagaaccu

SEQ ID NO: 1323776 - RNA, 15 nt, Human
gcugcugagaaccug

SEQ ID NO: 1323777 - RNA, 16 nt, Human
gcugcugagaaccugg

SEQ ID NO: 1323778 - RNA, 17 nt, Human
gcugcugagaaccuggc

SEQ ID NO: 1323779 - RNA, 18 nt, Human
gcugcugagaaccuggcc

SEQ ID NO: 1323780 - RNA, 19 nt, Human
gcugcugagaaccuggccu

SEQ ID NO: 1323781 - RNA, 20 nt, Human
gcugcugagaaccuggccuu

SEQ ID NO: 1323782 - RNA, 22 nt, Human
gcugcugagaaccuggccuuca

SEQ ID NO: 1323783 - RNA, 21 nt, Human
gcugcugagaaccuggccuuc

SEQ ID NO: 1323784 - RNA, 16 nt, Human
gcugcuguacugaagu

SEQ ID NO: 1323785 - RNA, 15 nt, Human
gcugcugucccuccc

SEQ ID NO: 1323786 - RNA, 16 nt, Human
gcugcugucccucccc

SEQ ID NO: 1323787 - RNA, 18 nt, Human
gcugcugucccucccccu

SEQ ID NO: 1323788 - RNA, 22 nt, Human
gcugcugucccucccccuuguc

SEQ ID NO: 1323789 - RNA, 23 nt, Human
gcugcugucccucccccuugucc

SEQ ID NO: 1323790 - RNA, 13 nt, Human
gcugcugucuggg

SEQ ID NO: 1323791 - RNA, 16 nt, Human
gcugcugucugggugc

SEQ ID NO: 1323792 - RNA, 20 nt, Human
gcugcugucugggugcuacu

SEQ ID NO: 1323793 - RNA, 13 nt, Human
gcugcugggcuca

SEQ ID NO: 1323794 - RNA, 16 nt, Human
gcugcugggcucagug

SEQ ID NO: 1323795 - RNA, 19 nt, Human
gcugcugggcucagugaag

SEQ ID NO: 1323796 - RNA, 20 nt, Human
gcugcugggcucagugaagu

SEQ ID NO: 1323797 - RNA, 18 nt, Human
gcugcuggggaagacagu

SEQ ID NO: 1323798 - RNA, 19 nt, Human
gcugcuggggaagacagug

SEQ ID NO: 1323799 - RNA, 20 nt, Human
gcugcuggggaagacagugg

SEQ ID NO: 1323800 - RNA, 21 nt, Human
gcugcuggggaagacaguggc

SEQ ID NO: 1323801 - RNA, 13 nt, Human
gcugcuccccacg

SEQ ID NO: 1323802 - RNA, 22 nt, Human
gcugcuccccacgucagcuggg

SEQ ID NO: 1323803 - RNA, 12 nt, Human
gcugcucccuca

SEQ ID NO: 1323804 - RNA, 13 nt, Human
gcugcucccucag

SEQ ID NO: 1323805 - RNA, 14 nt, Human
gcugcucccucaga

SEQ ID NO: 1323806 - RNA, 15 nt, Human
gcugcucccucagac

SEQ ID NO: 1323807 - RNA, 16 nt, Human
gcugcucccucagacu

SEQ ID NO: 1323808 - RNA, 19 nt, Human
gcugcucccucagacuggg

SEQ ID NO: 1323809 - RNA, 21 nt, Human
gcugcucccucagacuggggc

SEQ ID NO: 1323810 - RNA, 20 nt, Human
gcugcuccgaggacccagga

SEQ ID NO: 1323811 - RNA, 21 nt, Human
gcugcugucugggugcuacug

SEQ ID NO: 1323812 - RNA, 22 nt, Human
gcugcugucugggugcuacugg

SEQ ID NO: 1323813 - RNA, 24 nt, Human
gcugcugucugggugcuacugggg

SEQ ID NO: 1323814 - RNA, 16 nt, Human
gcuccucuccccagcc

SEQ ID NO: 1323815 - RNA, 18 nt, Human
gcuccucuccccagccca

SEQ ID NO: 1323816 - RNA, 19 nt, Human
gcuccucuccccagcccag

SEQ ID NO: 1323817 - RNA, 20 nt, Human
gcuccucuccccagcccaga

SEQ ID NO: 1323818 - RNA, 21 nt, Human
gcuccucuccccagcccagag

SEQ ID NO: 1323819 - RNA, 22 nt, Human
gcuccucuccccagcccagaga

SEQ ID NO: 1323820 - RNA, 23 nt, Human
gcuccucuccccagcccagagac

SEQ ID NO: 1323821 - RNA, 18 nt, Human
gcucuacaucuucugccu

SEQ ID NO: 1323822 - RNA, 19 nt, Human
gcucuacaucuucugccuu

SEQ ID NO: 1323823 - RNA, 20 nt, Human
gcucuacaucuucugccuua

SEQ ID NO: 1323824 - RNA, 21 nt, Human
gcucuacuggucuuguggaau

SEQ ID NO: 1323825 - RNA, 15 nt, Human
gcucuacuuccccau

SEQ ID NO: 1323826 - RNA, 16 nt, Human
gcucuacuuccccaug

SEQ ID NO: 1323827 - RNA, 22 nt, Human
gcucuacuuccccauggcccug

SEQ ID NO: 1323828 - RNA, 23 nt, Human
gcucuacuuccccauggcccuga

SEQ ID NO: 1323829 - RNA, 13 nt, Human
gcucuagaaucug

SEQ ID NO: 1323830 - RNA, 18 nt, Human
gcucuauuaugaauguga

SEQ ID NO: 1323831 - RNA, 21 nt, Human
gcucuauuaugaaugugaagc

SEQ ID NO: 1323832 - RNA, 23 nt, Human
gcucuauuaugaaugugaagccu

SEQ ID NO: 1323833 - RNA, 22 nt, Human
gcucuauuaugaaugugaagcc

SEQ ID NO: 1323834 - RNA, 17 nt, Human
gcucucaccuggcccug

SEQ ID NO: 1323835 - RNA, 12 nt, Human
gcucucaccucu

SEQ ID NO: 1323836 - RNA, 23 nt, Human
gcucucacggccacacagcugcc

SEQ ID NO: 1323837 - RNA, 21 nt, Human
gcucucacggccacacagcug

SEQ ID NO: 1323838 - RNA, 22 nt, Human
gcucuagaucauaaggcuucaa

SEQ ID NO: 1323839 - RNA, 23 nt, Human
gcucuagauugagagaagagaca

SEQ ID NO: 1323840 - RNA, 20 nt, Human
gcucuagaucauaaggcuuc

SEQ ID NO: 1323841 - RNA, 19 nt, Human
gcucuagguacgaugacag

SEQ ID NO: 1323842 - RNA, 13 nt, Human
gcucuaugagucu

SEQ ID NO: 1323843 - RNA, 14 nt, Human
gcucuaugagucua

SEQ ID NO: 1323844 - RNA, 18 nt, Human
gcucuaugagucuagaug

SEQ ID NO: 1323845 - RNA, 21 nt, Human
gcucuaugagucuagauguuu

SEQ ID NO: 1323846 - RNA, 16 nt, Human
gcucuauuaugaaugu

SEQ ID NO: 1323847 - RNA, 20 nt, Human
gcuccacuuggucugugaga

SEQ ID NO: 1323848 - RNA, 14 nt, Human
gcuccagacaggga

SEQ ID NO: 1323849 - RNA, 12 nt, Human
gcuccagaccug

SEQ ID NO: 1323850 - RNA, 13 nt, Human
gcuccagaccuga

SEQ ID NO: 1323851 - RNA, 20 nt, Human
gcuccagaccugauccugga

SEQ ID NO: 1323852 - RNA, 21 nt, Human
gcuccagaccugauccuggag

SEQ ID NO: 1323853 - RNA, 22 nt, Human
gcuccagaccugauccuggagg

SEQ ID NO: 1323854 - RNA, 23 nt, Human
gcuccagaccugauccuggaggc

SEQ ID NO: 1323855 - RNA, 12 nt, Human
gcuccagagggc

SEQ ID NO: 1323856 - RNA, 20 nt, Human
gcuccagagggcacucugcu

SEQ ID NO: 1323857 - RNA, 21 nt, Human
gcuccagagggcacucugcuu

SEQ ID NO: 1323858 - RNA, 17 nt, Human
gcuccagaugcagggca

SEQ ID NO: 1323859 - RNA, 18 nt, Human
gcuccagaugcagggcag

SEQ ID NO: 1323860 - RNA, 19 nt, Human
gcuccagaugcagggcagu

SEQ ID NO: 1323861 - RNA, 21 nt, Human
gcuccagaugcagggcaguca

SEQ ID NO: 1323862 - RNA, 22 nt, Human
gcuccagaugcagggcagucau

SEQ ID NO: 1323863 - RNA, 16 nt, Human
gcuccagccccucuug

SEQ ID NO: 1323864 - RNA, 12 nt, Human
gcuccagccuga

SEQ ID NO: 1323865 - RNA, 13 nt, Human
gcuccagccugac

SEQ ID NO: 1323866 - RNA, 17 nt, Human
gcuccagccugacauca

SEQ ID NO: 1323867 - RNA, 11 nt, Human
gcucccagggc

SEQ ID NO: 1323868 - RNA, 22 nt, Human
gcucccagggacaccugggaga

SEQ ID NO: 1323869 - RNA, 19 nt, Human
gcucccaggggcucccucc

SEQ ID NO: 1323870 - RNA, 21 nt, Human
gcucccaggggcucccuccgc

SEQ ID NO: 1323871 - RNA, 20 nt, Human
gcucccaggggcucccuccg

SEQ ID NO: 1323872 - RNA, 15 nt, Human
gcuccucuccccagc

SEQ ID NO: 1323873 - RNA, 18 nt, Human
gcuccucgagaucccaac

SEQ ID NO: 1323874 - RNA, 17 nt, Human
gcuccuccuucugcugc

SEQ ID NO: 1323875 - RNA, 19 nt, Human
gcuccucccggugcccaag

SEQ ID NO: 1323876 - RNA, 22 nt, Human
gcuccucccucucaacacccag

SEQ ID NO: 1323877 - RNA, 17 nt, Human
gcucccauccugugugu

SEQ ID NO: 1323878 - RNA, 14 nt, Human
gcuccucccucuca

SEQ ID NO: 1323879 - RNA, 16 nt, Human
gcucuggagcccacug

SEQ ID NO: 1323880 - RNA, 15 nt, Human
gcucuggagcccacu

SEQ ID NO: 1323881 - RNA, 21 nt, Human
gcucugcccauccugccccug

SEQ ID NO: 1323882 - RNA, 18 nt, Human
gcucugccaguccugucc

SEQ ID NO: 1323883 - RNA, 16 nt, Human
gcucugccaguccugu

SEQ ID NO: 1323884 - RNA, 17 nt, Human
gcucugccaguccuguc

SEQ ID NO: 1323885 - RNA, 13 nt, Human
gcucugccagucc

SEQ ID NO: 1323886 - RNA, 15 nt, Human
gcucugcccauccug

SEQ ID NO: 1323887 - RNA, 19 nt, Human
gcucucugugggcuggcag

SEQ ID NO: 1323888 - RNA, 14 nt, Human
gcucucuuucuguc

SEQ ID NO: 1323889 - RNA, 15 nt, Human
gcucucuuucugucu

SEQ ID NO: 1323890 - RNA, 16 nt, Human
gcucugaaaccagugu

SEQ ID NO: 1323891 - RNA, 17 nt, Human
gcucugaaagagaaaca

SEQ ID NO: 1323892 - RNA, 20 nt, Human
gcucucugugggcuggcagu

SEQ ID NO: 1323893 - RNA, 24 nt, Human
gcugaauuucccucucucauaccc

SEQ ID NO: 1323894 - RNA, 17 nt, Human
gcugaauuucccucucu

SEQ ID NO: 1323895 - RNA, 20 nt, Human
gcugaacuuguuuucuggga

SEQ ID NO: 1323896 - RNA, 18 nt, Human
gcugaagaauuauuuuuu

SEQ ID NO: 1323897 - RNA, 20 nt, Human
gcugaagguuguggccuuug

SEQ ID NO: 1323898 - RNA, 17 nt, Human
gcugaagguuguggccu

SEQ ID NO: 1323899 - RNA, 16 nt, Human
gcugacaccuaacucu

SEQ ID NO: 1323900 - RNA, 17 nt, Human
gcugacaccuaacucuu

SEQ ID NO: 1323901 - RNA, 12 nt, Human
gcugagccucag

SEQ ID NO: 1323902 - RNA, 16 nt, Human
gcugagccucagucuc

SEQ ID NO: 1323903 - RNA, 23 nt, Human
gcugagcgaggagaugcuccuug

SEQ ID NO: 1323904 - RNA, 12 nt, Human
gcugaggccugg

SEQ ID NO: 1323905 - RNA, 13 nt, Human
gcugaggccugga

SEQ ID NO: 1323906 - RNA, 14 nt, Human
gcugaggccuggac

SEQ ID NO: 1323907 - RNA, 21 nt, Human
gcugaggccuggacuuuccug

SEQ ID NO: 1323908 - RNA, 13 nt, Human
gcugaggccuggg

SEQ ID NO: 1323909 - RNA, 14 nt, Human
gcugaggccugggc

SEQ ID NO: 1323910 - RNA, 15 nt, Human
gcugaggccugggcc

SEQ ID NO: 1323911 - RNA, 16 nt, Human
gcugaggccugggccg

SEQ ID NO: 1323912 - RNA, 17 nt, Human
gcucuggagcccacugu

SEQ ID NO: 1323913 - RNA, 19 nt, Human
gcucugguuguuucuguuc

SEQ ID NO: 1323914 - RNA, 20 nt, Human
gcucugguuguuucuguucc

SEQ ID NO: 1323915 - RNA, 21 nt, Human
gcucugguuguuucuguucca

SEQ ID NO: 1323916 - RNA, 23 nt, Human
gcucuguaaguagaugcauuugg

SEQ ID NO: 1323917 - RNA, 22 nt, Human
gcucugguuguuucuguuccaa

SEQ ID NO: 1323918 - RNA, 17 nt, Human
gcucuguagugcuacag

SEQ ID NO: 1323919 - RNA, 23 nt, Human
gcucuguagugcuacagggucca

SEQ ID NO: 1323920 - RNA, 13 nt, Human
gcucuguccccag

SEQ ID NO: 1323921 - RNA, 14 nt, Human
gcucuguccccagc

SEQ ID NO: 1323922 - RNA, 18 nt, Human
gcucuguaucaggaccca

SEQ ID NO: 1323923 - RNA, 19 nt, Human
gcucuguaucaggacccag

SEQ ID NO: 1323924 - RNA, 22 nt, Human
gcucuguaucaggacccagagg

SEQ ID NO: 1323925 - RNA, 23 nt, Human
gcucuguaucaggacccagagga

SEQ ID NO: 1323926 - RNA, 21 nt, Human
gcucugucuacuugcucaggu

SEQ ID NO: 1323927 - RNA, 22 nt, Human
gcucugugagggugcugacugg

SEQ ID NO: 1323928 - RNA, 15 nt, Human
gcucuguccccagcc

SEQ ID NO: 1323929 - RNA, 17 nt, Human
gcucuguccccagccug

SEQ ID NO: 1323930 - RNA, 13 nt, Human
gcucugucuacuu

SEQ ID NO: 1323931 - RNA, 19 nt, Human
gcucugucuacuugcucag

SEQ ID NO: 1323932 - RNA, 18 nt, Human
gcugaaacgcaucuaguu

SEQ ID NO: 1323933 - RNA, 18 nt, Human
gcugaaaauguccuugug

SEQ ID NO: 1323934 - RNA, 13 nt, Human
gcugaacagugga

SEQ ID NO: 1323935 - RNA, 22 nt, Human
gcugaacaguggaggaagaggg

SEQ ID NO: 1323936 - RNA, 11 nt, Human
gcugaaaauau

SEQ ID NO: 1323937 - RNA, 15 nt, Human
gcuuugauguuccuu

SEQ ID NO: 1323938 - RNA, 19 nt, Human
gcuuugauguuccuuccag

SEQ ID NO: 1323939 - RNA, 20 nt, Human
gcuuugauguuccuuccagu

SEQ ID NO: 1323940 - RNA, 22 nt, Human
gcuuuuuucucugauacagaaa

SEQ ID NO: 1323941 - RNA, 23 nt, Human
gcuuuuugugauaugcacaaugu

SEQ ID NO: 1323942 - RNA, 16 nt, Human
gcuuuuuguguuuuuu

SEQ ID NO: 1323943 - RNA, 17 nt, Human
gcuuuuuuguuuuggcu

SEQ ID NO: 1323944 - RNA, 18 nt, Human
ggaaaauucuaacccagg

SEQ ID NO: 1323945 - RNA, 17 nt, Human
ggaaaccuuccacccag

SEQ ID NO: 1323946 - RNA, 20 nt, Human
gcuuuuuuaucaugugaaau

SEQ ID NO: 1323947 - RNA, 18 nt, Human
gcuuuuuuaucaugugaa

SEQ ID NO: 1323948 - RNA, 15 nt, Human
gcuuuuuuaucaugu

SEQ ID NO: 1323949 - RNA, 22 nt, Human
gcuuuuggcggggaggaggaaa

SEQ ID NO: 1323950 - RNA, 21 nt, Human
gcuuuuggcggggaggaggaa

SEQ ID NO: 1323951 - RNA, 20 nt, Human
gcuuuugucuacacacccug

SEQ ID NO: 1323952 - RNA, 19 nt, Human
gcuuuugugauggagugcu

SEQ ID NO: 1323953 - RNA, 19 nt, Human
gcuuuuuauuccuccugcu

SEQ ID NO: 1323954 - RNA, 15 nt, Human
gcuuuuuauuucugc

SEQ ID NO: 1323955 - RNA, 21 nt, Human
gcuuuuuauuucugcauaugu

SEQ ID NO: 1323956 - RNA, 17 nt, Human
gcuuuuuauuucugcau

SEQ ID NO: 1323957 - RNA, 13 nt, Human
gcuuuuuccagag

SEQ ID NO: 1323958 - RNA, 18 nt, Human
ggaagacgcaagggccug

SEQ ID NO: 1323959 - RNA, 17 nt, Human
ggaagacccauuccuuc

SEQ ID NO: 1323960 - RNA, 20 nt, Human
ggaagacccauuccuuccca

SEQ ID NO: 1323961 - RNA, 22 nt, Human
ggaagaagagaucaggaagaga

SEQ ID NO: 1323962 - RNA, 21 nt, Human
ggaagaagagaucaggaagag

SEQ ID NO: 1323963 - RNA, 20 nt, Human
ggaagaagagaucaggaaga

SEQ ID NO: 1323964 - RNA, 23 nt, Human
ggaacuuggggaguuaagaccug

SEQ ID NO: 1323965 - RNA, 15 nt, Human
ggaacugcugccacu

SEQ ID NO: 1323966 - RNA, 16 nt, Human
ggaacugcugccacug

SEQ ID NO: 1323967 - RNA, 17 nt, Human
ggaacugcugccacuga

SEQ ID NO: 1323968 - RNA, 21 nt, Human
ggaacugcugccacugagggg

SEQ ID NO: 1323969 - RNA, 15 nt, Human
ggaagaaagaagaca

SEQ ID NO: 1323970 - RNA, 17 nt, Human
ggaacaccauaggucac

SEQ ID NO: 1323971 - RNA, 14 nt, Human
ggaacacggccaca

SEQ ID NO: 1323972 - RNA, 20 nt, Human
ggaacacuagacaagccaga

SEQ ID NO: 1323973 - RNA, 21 nt, Human
ggaacacuagacaagccagaa

SEQ ID NO: 1323974 - RNA, 15 nt, Human
ggaacaauugaagua

SEQ ID NO: 1323975 - RNA, 19 nt, Human
ggaacaauugaaguaaacu

SEQ ID NO: 1323976 - RNA, 21 nt, Human
ggaacaauugaaguaaacuuu

SEQ ID NO: 1323977 - RNA, 12 nt, Human
ggaacugaaggg

SEQ ID NO: 1323978 - RNA, 21 nt, Human
ggaacugaagggggcggccua

SEQ ID NO: 1323979 - RNA, 20 nt, Human
ggaacugaagggggcggccu

SEQ ID NO: 1323980 - RNA, 12 nt, Human
ggaacugcugcc

SEQ ID NO: 1323981 - RNA, 13 nt, Human
ggaacugcugcca

SEQ ID NO: 1323982 - RNA, 14 nt, Human
ggaacugcugccac

SEQ ID NO: 1323983 - RNA, 21 nt, Human
ggaaacuaggugcauauuuau

SEQ ID NO: 1323984 - RNA, 15 nt, Human
ggaaacgagacuuuc

SEQ ID NO: 1323985 - RNA, 18 nt, Human
ggaaaccuuccacccagu

SEQ ID NO: 1323986 - RNA, 20 nt, Human
ggaaauucccuucaucugga

SEQ ID NO: 1323987 - RNA, 16 nt, Human
ggaaauucugcucaga

SEQ ID NO: 1323988 - RNA, 22 nt, Human
ggaaauucccuucaucuggaac

SEQ ID NO: 1323989 - RNA, 16 nt, Human
ggaaauugauuuugaa

SEQ ID NO: 1323990 - RNA, 17 nt, Human
ggaaauuggaagagcac

SEQ ID NO: 1323991 - RNA, 21 nt, Human
ggaaauuuaaagcagguucuu

SEQ ID NO: 1323992 - RNA, 14 nt, Human
ggaaauuuagcauu

SEQ ID NO: 1323993 - RNA, 17 nt, Human
ggaaauuuagcauugua

SEQ ID NO: 1323994 - RNA, 19 nt, Human
ggaaauucccuucaucugg

SEQ ID NO: 1323995 - RNA, 17 nt, Human
ggaaaugucaacaagua

SEQ ID NO: 1323996 - RNA, 15 nt, Human
ggaacaaacagggcu

SEQ ID NO: 1323997 - RNA, 14 nt, Human
ggaacaaacagggc

SEQ ID NO: 1323998 - RNA, 18 nt, Human
ggaacaaggagucagaca

SEQ ID NO: 1323999 - RNA, 19 nt, Human
gcuuccuggcaauagucaa

SEQ ID NO: 1324000 - RNA, 13 nt, Human
gcuuccugcuugc

SEQ ID NO: 1324001 - RNA, 14 nt, Human
gcuuccugcuugcc

SEQ ID NO: 1324002 - RNA, 21 nt, Human
gcuuccugcuugccaaggcag

SEQ ID NO: 1324003 - RNA, 12 nt, Human
gcuuccuggagc

SEQ ID NO: 1324004 - RNA, 13 nt, Human
gcuuccuggagca

SEQ ID NO: 1324005 - RNA, 15 nt, Human
gcuuccuggagcaga

SEQ ID NO: 1324006 - RNA, 18 nt, Human
gcuuccuggagcagaagc

SEQ ID NO: 1324007 - RNA, 22 nt, Human
gcuuccuggagcagaagcagca

SEQ ID NO: 1324008 - RNA, 11 nt, Human
gcuuccuggug

SEQ ID NO: 1324009 - RNA, 14 nt, Human
gcuuccuggugcug

SEQ ID NO: 1324010 - RNA, 16 nt, Human
gcuuccuggugcugga

SEQ ID NO: 1324011 - RNA, 13 nt, Human
gcuuccuucagag

SEQ ID NO: 1324012 - RNA, 14 nt, Human
gcuuccuucagaga

SEQ ID NO: 1324013 - RNA, 16 nt, Human
gcuuccuucagagagc

SEQ ID NO: 1324014 - RNA, 17 nt, Human
gcuuccuucagagagca

SEQ ID NO: 1324015 - RNA, 19 nt, Human
gcuuccuucagagagcagu

SEQ ID NO: 1324016 - RNA, 20 nt, Human
gcuuccuucagagagcagug

SEQ ID NO: 1324017 - RNA, 13 nt, Human
gcuuccuucauuu

SEQ ID NO: 1324018 - RNA, 14 nt, Human
gcuuccaugauucu

SEQ ID NO: 1324019 - RNA, 15 nt, Human
gcuuccaugauucua

SEQ ID NO: 1324020 - RNA, 18 nt, Human
gcuuccaugauucuauuu

SEQ ID NO: 1324021 - RNA, 19 nt, Human
gcuuccaugauucuauuua

SEQ ID NO: 1324022 - RNA, 22 nt, Human
gcuuccuucagagagcagugcu

SEQ ID NO: 1324023 - RNA, 20 nt, Human
gcuugaacuaggcugagcaa

SEQ ID NO: 1324024 - RNA, 19 nt, Human
gcuugaacuaggcugagca

SEQ ID NO: 1324025 - RNA, 21 nt, Human
gcuuuccccaugucucgacuc

SEQ ID NO: 1324026 - RNA, 14 nt, Human
gcuugaccugaggc

SEQ ID NO: 1324027 - RNA, 16 nt, Human
gcuugguuccuuccca

SEQ ID NO: 1324028 - RNA, 22 nt, Human
gcuuuccccaugucucgacuca

SEQ ID NO: 1324029 - RNA, 15 nt, Human
gcuugguuccuuccc

SEQ ID NO: 1324030 - RNA, 19 nt, Human
gcuuucuccuuuaauugua

SEQ ID NO: 1324031 - RNA, 16 nt, Human
gcuuucugaacagcug

SEQ ID NO: 1324032 - RNA, 16 nt, Human
gcuuuccucuuccuga

SEQ ID NO: 1324033 - RNA, 15 nt, Human
gcuuucccugccucu

SEQ ID NO: 1324034 - RNA, 16 nt, Human
gcuuucuguuccaaau

SEQ ID NO: 1324035 - RNA, 22 nt, Human
gcuuugagagagaaaggacucc

SEQ ID NO: 1324036 - RNA, 12 nt, Human
gcuuucuguucc

SEQ ID NO: 1324037 - RNA, 13 nt, Human
gcuuucuguucca

SEQ ID NO: 1324038 - RNA, 14 nt, Human
gcuuucuguuccaa

SEQ ID NO: 1324039 - RNA, 15 nt, Human
gcuuucuguuccaaa

SEQ ID NO: 1324040 - RNA, 18 nt, Human
gcuuucugaacagcuggu

SEQ ID NO: 1324041 - RNA, 19 nt, Human
gcuuucugaacagcuggug

SEQ ID NO: 1324042 - RNA, 21 nt, Human
gcuuucugaacagcuggugua

SEQ ID NO: 1324043 - RNA, 17 nt, Human
gcuuucugaucaaggcc

SEQ ID NO: 1324044 - RNA, 20 nt, Human
gcuuucugaacagcuggugu

SEQ ID NO: 1324045 - RNA, 16 nt, Human
gcuucaaauuguaagc

SEQ ID NO: 1324046 - RNA, 23 nt, Human
gcuucaggcccccgccuuggccu

SEQ ID NO: 1324047 - RNA, 21 nt, Human
gcuucagguccaggcuguguu

SEQ ID NO: 1324048 - RNA, 15 nt, Human
gcuucagguccaggc

SEQ ID NO: 1324049 - RNA, 15 nt, Human
gcuuaauucaaauaa

SEQ ID NO: 1324050 - RNA, 14 nt, Human
gcuuaauucaaaua

SEQ ID NO: 1324051 - RNA, 20 nt, Human
gcuuaauggcugauaauuuu

SEQ ID NO: 1324052 - RNA, 13 nt, Human
gcuguuuuuuugu

SEQ ID NO: 1324053 - RNA, 23 nt, Human
gcuguuuuguugacauucugaau

SEQ ID NO: 1324054 - RNA, 23 nt, Human
gcuguuuuguuauauaauuuaga

SEQ ID NO: 1324055 - RNA, 19 nt, Human
gcuguuuuguuauauaauu

SEQ ID NO: 1324056 - RNA, 14 nt, Human
gcuguuuuguugac

SEQ ID NO: 1324057 - RNA, 19 nt, Human
gcuguuuuguugacauucu

SEQ ID NO: 1324058 - RNA, 12 nt, Human
gcuuaaaacuuu

SEQ ID NO: 1324059 - RNA, 16 nt, Human
gcuguuuuaaacauua

SEQ ID NO: 1324060 - RNA, 13 nt, Human
gcuguuuuguuau

SEQ ID NO: 1324061 - RNA, 14 nt, Human
gcuguuuuguuaua

SEQ ID NO: 1324062 - RNA, 16 nt, Human
gcuguuuuguuauaua

SEQ ID NO: 1324063 - RNA, 12 nt, Human
gcugugccucug

SEQ ID NO: 1324064 - RNA, 15 nt, Human
gcugugccucgcucc

SEQ ID NO: 1324065 - RNA, 18 nt, Human
gcugugccucgcucccca

SEQ ID NO: 1324066 - RNA, 23 nt, Human
gcugugccucgcuccccacucug

SEQ ID NO: 1324067 - RNA, 20 nt, Human
gcuggagugcaguggcgcga

SEQ ID NO: 1324068 - RNA, 19 nt, Human
gcuggagugcaguggugca

SEQ ID NO: 1324069 - RNA, 14 nt, Human
gcuggagcucugcc

SEQ ID NO: 1324070 - RNA, 20 nt, Human
gcuggagugcagugguguga

SEQ ID NO: 1324071 - RNA, 17 nt, Human
gcuggaguuagggacug

SEQ ID NO: 1324072 - RNA, 21 nt, Human
gcuggaguuagggacugacca

SEQ ID NO: 1324073 - RNA, 16 nt, Human
gcuggaguuucaugua

SEQ ID NO: 1324074 - RNA, 12 nt, Human
gcuguauuuuaa

SEQ ID NO: 1324075 - RNA, 19 nt, Human
gcuguauuagucacagaga

SEQ ID NO: 1324076 - RNA, 13 nt, Human
gcuguauuuuaaa

SEQ ID NO: 1324077 - RNA, 18 nt, Human
gcuguauuuuaaaagaau

SEQ ID NO: 1324078 - RNA, 12 nt, Human
gcuguauugucu

SEQ ID NO: 1324079 - RNA, 14 nt, Human
gcuguauugucuga

SEQ ID NO: 1324080 - RNA, 15 nt, Human
gcuguauugucugaa

SEQ ID NO: 1324081 - RNA, 19 nt, Human
gcuguacugaaguaaaaca

SEQ ID NO: 1324082 - RNA, 13 nt, Human
gcuguagaaaaaa

SEQ ID NO: 1324083 - RNA, 20 nt, Human
gcuguacugaaguaaaacaa

SEQ ID NO: 1324084 - RNA, 23 nt, Human
gcuguacaucuauuuuggauugu

SEQ ID NO: 1324085 - RNA, 13 nt, Human
gcuguacccaguu

SEQ ID NO: 1324086 - RNA, 16 nt, Human
gcuguacccaguuucu

SEQ ID NO: 1324087 - RNA, 12 nt, Human
gcuguacaucua

SEQ ID NO: 1324088 - RNA, 16 nt, Human
gcuguacaucuauuuu

SEQ ID NO: 1324089 - RNA, 20 nt, Human
gcuguacaucuauuuuggau

SEQ ID NO: 1324090 - RNA, 22 nt, Human
gcuguacaucuauuuuggauug

SEQ ID NO: 1324091 - RNA, 12 nt, Human
gcugguucugua

SEQ ID NO: 1324092 - RNA, 15 nt, Human
gcugguuuaauguuu

SEQ ID NO: 1324093 - RNA, 17 nt, Human
gccauguguuuauccua

SEQ ID NO: 1324094 - RNA, 11 nt, Human
gcccaggagcu

SEQ ID NO: 1324095 - RNA, 14 nt, Human
gcccaggagcuccc

SEQ ID NO: 1324096 - RNA, 15 nt, Human
gcccaggagcucccc

SEQ ID NO: 1324097 - RNA, 17 nt, Human
gcccaggagcuccccuc

SEQ ID NO: 1324098 - RNA, 20 nt, Human
gcccaggagcuccccucccc

SEQ ID NO: 1324099 - RNA, 21 nt, Human
gcccaggagcuccccucccca

SEQ ID NO: 1324100 - RNA, 22 nt, Human
gccaugugcuaguaauuggaaa

SEQ ID NO: 1324101 - RNA, 14 nt, Human
gccaucaaaaugcu

SEQ ID NO: 1324102 - RNA, 15 nt, Human
gccaucaaaaugcuu

SEQ ID NO: 1324103 - RNA, 16 nt, Human
gccaucaaaaugcuuu

SEQ ID NO: 1324104 - RNA, 18 nt, Human
gccaucaaaaugcuuuuu

SEQ ID NO: 1324105 - RNA, 19 nt, Human
gccaucaaaaugcuuuuua

SEQ ID NO: 1324106 - RNA, 20 nt, Human
gccauauuuguaaaaugaca

SEQ ID NO: 1324107 - RNA, 15 nt, Human
gccaucaagagacug

SEQ ID NO: 1324108 - RNA, 16 nt, Human
gccaucaagagacuga

SEQ ID NO: 1324109 - RNA, 24 nt, Human
gcccaggagcuccccuccccaacu

SEQ ID NO: 1324110 - RNA, 16 nt, Human
gcccucacccuggggc

SEQ ID NO: 1324111 - RNA, 21 nt, Human
gcccuauuuagaugauaaaga

SEQ ID NO: 1324112 - RNA, 17 nt, Human
gcccucacccuggggcu

SEQ ID NO: 1324113 - RNA, 19 nt, Human
gcccucaguagucccugca

SEQ ID NO: 1324114 - RNA, 23 nt, Human
gcccucaguagucccugcacagu

SEQ ID NO: 1324115 - RNA, 12 nt, Human
gcccucaucccg

SEQ ID NO: 1324116 - RNA, 16 nt, Human
gcccucauggccccuc

SEQ ID NO: 1324117 - RNA, 18 nt, Human
gcccucauggccccucug

SEQ ID NO: 1324118 - RNA, 23 nt, Human
gcccauucauuccauucuggaag

SEQ ID NO: 1324119 - RNA, 19 nt, Human
gcccauucauuccauucug

SEQ ID NO: 1324120 - RNA, 16 nt, Human
gcccauucauuccauu

SEQ ID NO: 1324121 - RNA, 14 nt, Human
gccccaacuccuuc

SEQ ID NO: 1324122 - RNA, 17 nt, Human
gccccaacuccuuccag

SEQ ID NO: 1324123 - RNA, 18 nt, Human
gccccaacuccuuccagc

SEQ ID NO: 1324124 - RNA, 19 nt, Human
gccccaacuccuuccagcu

SEQ ID NO: 1324125 - RNA, 21 nt, Human
gccccaacuccuuccagcuag

SEQ ID NO: 1324126 - RNA, 21 nt, Human
gccccaacucuccccugaccu

SEQ ID NO: 1324127 - RNA, 20 nt, Human
gccccaacuccuuccagcua

SEQ ID NO: 1324128 - RNA, 23 nt, Human
gccccacccucguggacaccugc

SEQ ID NO: 1324129 - RNA, 22 nt, Human
gccccacccucguggacaccug

SEQ ID NO: 1324130 - RNA, 12 nt, Human
gccccacccugg

SEQ ID NO: 1324131 - RNA, 14 nt, Human
gccccacccugggc

SEQ ID NO: 1324132 - RNA, 21 nt, Human
gccccacccucguggacaccu

SEQ ID NO: 1324133 - RNA, 20 nt, Human
gccccacccucguggacacc

SEQ ID NO: 1324134 - RNA, 12 nt, Human
gccccacccucg

SEQ ID NO: 1324135 - RNA, 13 nt, Human
gccccacccucgg

SEQ ID NO: 1324136 - RNA, 16 nt, Human
gccccacccucgggga

SEQ ID NO: 1324137 - RNA, 22 nt, Human
gccccacccucggggauguguc

SEQ ID NO: 1324138 - RNA, 12 nt, Human
gccccccuggcc

SEQ ID NO: 1324139 - RNA, 13 nt, Human
gccccccuggccu

SEQ ID NO: 1324140 - RNA, 19 nt, Human
gccccccuggccuccccca

SEQ ID NO: 1324141 - RNA, 18 nt, Human
gccccccugguccccucc

SEQ ID NO: 1324142 - RNA, 20 nt, Human
gccccccugguccccuccuu

SEQ ID NO: 1324143 - RNA, 21 nt, Human
gccccacaccagggccagccu

SEQ ID NO: 1324144 - RNA, 22 nt, Human
gccccacaccagggccagccuc

SEQ ID NO: 1324145 - RNA, 16 nt, Human
gccccacccaggccag

SEQ ID NO: 1324146 - RNA, 15 nt, Human
gccccaccccagggc

SEQ ID NO: 1324147 - RNA, 17 nt, Human
gccccaccccagggcag

SEQ ID NO: 1324148 - RNA, 18 nt, Human
gccccaccccagggcagc

SEQ ID NO: 1324149 - RNA, 19 nt, Human
gccccaccccagggcagcc

SEQ ID NO: 1324150 - RNA, 20 nt, Human
gccccaccccagggcagcca

SEQ ID NO: 1324151 - RNA, 21 nt, Human
gccccaccccagggcagccag

SEQ ID NO: 1324152 - RNA, 22 nt, Human
gccccaccccagggcagccagg

SEQ ID NO: 1324153 - RNA, 16 nt, Human
gccccugccucucugc

SEQ ID NO: 1324154 - RNA, 15 nt, Human
gccccugccucucug

SEQ ID NO: 1324155 - RNA, 17 nt, Human
gcccccgccuuggccug

SEQ ID NO: 1324156 - RNA, 23 nt, Human
gcccccucacaguauugcucacc

SEQ ID NO: 1324157 - RNA, 14 nt, Human
gcccccucccugga

SEQ ID NO: 1324158 - RNA, 16 nt, Human
gcccccuccgcccugc

SEQ ID NO: 1324159 - RNA, 18 nt, Human
gccccugccucucugcag

SEQ ID NO: 1324160 - RNA, 17 nt, Human
gccccugccucucugca

SEQ ID NO: 1324161 - RNA, 15 nt, Human
gcccccucccuggau

SEQ ID NO: 1324162 - RNA, 16 nt, Human
gcccccucccuggaug

SEQ ID NO: 1324163 - RNA, 14 nt, Human
gccaggcauguggc

SEQ ID NO: 1324164 - RNA, 14 nt, Human
gccaggcccagccg

SEQ ID NO: 1324165 - RNA, 16 nt, Human
gccaggauggcgcagg

SEQ ID NO: 1324166 - RNA, 14 nt, Human
gccaggauggcgca

SEQ ID NO: 1324167 - RNA, 16 nt, Human
gccauaugaaaaggcu

SEQ ID NO: 1324168 - RNA, 16 nt, Human
gccauauuuaccucag

SEQ ID NO: 1324169 - RNA, 17 nt, Human
gccauauuuaccucagc

SEQ ID NO: 1324170 - RNA, 18 nt, Human
gccauauuuaccucagcc

SEQ ID NO: 1324171 - RNA, 19 nt, Human
gccauauuuaccucagccu

SEQ ID NO: 1324172 - RNA, 20 nt, Human
gccauauuuaccucagccug

SEQ ID NO: 1324173 - RNA, 22 nt, Human
gccauauuuaccucagccuggg

SEQ ID NO: 1324174 - RNA, 21 nt, Human
gccauauuuaccucagccugg

SEQ ID NO: 1324175 - RNA, 13 nt, Human
gccauauuuguaa

SEQ ID NO: 1324176 - RNA, 14 nt, Human
gccauauuuguaaa

SEQ ID NO: 1324177 - RNA, 18 nt, Human
gccauauuuguaaaauga

SEQ ID NO: 1324178 - RNA, 17 nt, Human
gccauauuuucaccauu

SEQ ID NO: 1324179 - RNA, 14 nt, Human
gccauacugugucc

SEQ ID NO: 1324180 - RNA, 13 nt, Human
gccaguuguccuc

SEQ ID NO: 1324181 - RNA, 14 nt, Human
gccaguuguccucc

SEQ ID NO: 1324182 - RNA, 16 nt, Human
gccaguuguccuccuu

SEQ ID NO: 1324183 - RNA, 22 nt, Human
gccauaaaacagguaauauaaa

SEQ ID NO: 1324184 - RNA, 17 nt, Human
gccaguguuuaaaacuu

SEQ ID NO: 1324185 - RNA, 16 nt, Human
gccaguguccugagcc

SEQ ID NO: 1324186 - RNA, 14 nt, Human
gcuagaacaugguu

SEQ ID NO: 1324187 - RNA, 15 nt, Human
gcuagaacccucugu

SEQ ID NO: 1324188 - RNA, 14 nt, Human
gcuagaacccucug

SEQ ID NO: 1324189 - RNA, 17 nt, Human
gcuacuugggaggcuga

SEQ ID NO: 1324190 - RNA, 18 nt, Human
gcuacuuccuccucccca

SEQ ID NO: 1324191 - RNA, 19 nt, Human
gcuacuuccuccuccccac

SEQ ID NO: 1324192 - RNA, 18 nt, Human
gcuacuucggggcuggga

SEQ ID NO: 1324193 - RNA, 23 nt, Human
gcuacuuugcugcuaugguuuuc

SEQ ID NO: 1324194 - RNA, 16 nt, Human
gcuacuuugcugcuau

SEQ ID NO: 1324195 - RNA, 19 nt, Human
gcuacuguaaggcaaucau

SEQ ID NO: 1324196 - RNA, 18 nt, Human
gcuacuguaaggcaauca

SEQ ID NO: 1324197 - RNA, 16 nt, Human
gcuacuggggaaacug

SEQ ID NO: 1324198 - RNA, 17 nt, Human
gcuacuggggaaacugg

SEQ ID NO: 1324199 - RNA, 18 nt, Human
gcuacuggggaaacuggc

SEQ ID NO: 1324200 - RNA, 20 nt, Human
gcuacuggggaaacuggcca

SEQ ID NO: 1324201 - RNA, 21 nt, Human
gcuacuggggaaacuggccau

SEQ ID NO: 1324202 - RNA, 23 nt, Human
gcuacuggggaaacuggccaugg

SEQ ID NO: 1324203 - RNA, 15 nt, Human
gcuacugugugugug

SEQ ID NO: 1324204 - RNA, 18 nt, Human
gcuacugugugugugaau

SEQ ID NO: 1324205 - RNA, 19 nt, Human
gcuacugugugugugaaug

SEQ ID NO: 1324206 - RNA, 21 nt, Human
gcuacugugugugugaaugaa

SEQ ID NO: 1324207 - RNA, 18 nt, Human
gcuaauuuugaaaaacug

SEQ ID NO: 1324208 - RNA, 20 nt, Human
gcuaauuuauccugaaauuu

SEQ ID NO: 1324209 - RNA, 12 nt, Human
gcuaauuugcau

SEQ ID NO: 1324210 - RNA, 13 nt, Human
gcuaauuugcauu

SEQ ID NO: 1324211 - RNA, 15 nt, Human
gcuaauuugcauuaa

SEQ ID NO: 1324212 - RNA, 20 nt, Human
gcuaauuuguuuuggauaua

SEQ ID NO: 1324213 - RNA, 13 nt, Human
gcguggugcgagu

SEQ ID NO: 1324214 - RNA, 12 nt, Human
gcuaauuuuuau

SEQ ID NO: 1324215 - RNA, 15 nt, Human
gcuaauuuuuguaau

SEQ ID NO: 1324216 - RNA, 16 nt, Human
gcuaauuuuuguaauu

SEQ ID NO: 1324217 - RNA, 17 nt, Human
gcuaauuuuuguaauuu

SEQ ID NO: 1324218 - RNA, 21 nt, Human
gcuaauuuuuuuguauuuuag

SEQ ID NO: 1324219 - RNA, 18 nt, Human
gcuaauuuuuauuaauuu

SEQ ID NO: 1324220 - RNA, 20 nt, Human
gcuaauuuuuguauuuuuag

SEQ ID NO: 1324221 - RNA, 20 nt, Human
gcuaauuuuuuguuguuucu

SEQ ID NO: 1324222 - RNA, 19 nt, Human
gcuaauuuuuuuguauuuu

SEQ ID NO: 1324223 - RNA, 18 nt, Human
gcuacugccgucagugcu

SEQ ID NO: 1324224 - RNA, 22 nt, Human
gcuacugccgucagugcugugc

SEQ ID NO: 1324225 - RNA, 12 nt, Human
gcuacugcuuca

SEQ ID NO: 1324226 - RNA, 23 nt, Human
gcggaggaaggaggacccaggac

SEQ ID NO: 1324227 - RNA, 21 nt, Human
gcggagguguggagccgaggc

SEQ ID NO: 1324228 - RNA, 16 nt, Human
gcgugaucucagcuca

SEQ ID NO: 1324229 - RNA, 15 nt, Human
gcggccuccuucuga

SEQ ID NO: 1324230 - RNA, 15 nt, Human
gcgugaucucagcuc

SEQ ID NO: 1324231 - RNA, 12 nt, Human
gcgugaucucag

SEQ ID NO: 1324232 - RNA, 16 nt, Human
gcggcuggggucccag

SEQ ID NO: 1324233 - RNA, 16 nt, Human
gcgugguggucccugg

SEQ ID NO: 1324234 - RNA, 22 nt, Human
gcguggagggguaggggcuggg

SEQ ID NO: 1324235 - RNA, 21 nt, Human
gcguggccuuguucugucacc

SEQ ID NO: 1324236 - RNA, 12 nt, Human
gcguggcugacu

SEQ ID NO: 1324237 - RNA, 19 nt, Human
gcggccuccuucugagcuc

SEQ ID NO: 1324238 - RNA, 23 nt, Human
gcggccuaugacuugggcacccc

SEQ ID NO: 1324239 - RNA, 19 nt, Human
gcggccuaugacuugggca

SEQ ID NO: 1324240 - RNA, 14 nt, Human
gcggccuccuucug

SEQ ID NO: 1324241 - RNA, 14 nt, Human
gcggcugggaggag

SEQ ID NO: 1324242 - RNA, 17 nt, Human
gcggcugggaggagggc

SEQ ID NO: 1324243 - RNA, 18 nt, Human
gcggcugggaggagggca

SEQ ID NO: 1324244 - RNA, 19 nt, Human
gcggcugggaggagggcag

SEQ ID NO: 1324245 - RNA, 22 nt, Human
gcggcugggaggagggcaggca

SEQ ID NO: 1324246 - RNA, 13 nt, Human
gcggcccucagua

SEQ ID NO: 1324247 - RNA, 14 nt, Human
gcggcccugucauc

SEQ ID NO: 1324248 - RNA, 13 nt, Human
gcggcccugucau

SEQ ID NO: 1324249 - RNA, 13 nt, Human
gcggccggccagc

SEQ ID NO: 1324250 - RNA, 18 nt, Human
gcggccuaugacuugggc

SEQ ID NO: 1324251 - RNA, 17 nt, Human
gcggaggggacagagcg

SEQ ID NO: 1324252 - RNA, 16 nt, Human
gcggcccaauccaagg

SEQ ID NO: 1324253 - RNA, 22 nt, Human
gcggcccaauccaagguggggu

SEQ ID NO: 1324254 - RNA, 18 nt, Human
gcgauucucuugccucaa

SEQ ID NO: 1324255 - RNA, 23 nt, Human
gcgauucuccugccucagccucc

SEQ ID NO: 1324256 - RNA, 17 nt, Human
gcgauucuccugccuca

SEQ ID NO: 1324257 - RNA, 13 nt, Human
gcgauagagucuc

SEQ ID NO: 1324258 - RNA, 19 nt, Human
gcgagauaccccaccuccc

SEQ ID NO: 1324259 - RNA, 18 nt, Human
gcgagcaugucguggaca

SEQ ID NO: 1324260 - RNA, 15 nt, Human
gcgagagaugugugu

SEQ ID NO: 1324261 - RNA, 16 nt, Human
gcgagagauguguguu

SEQ ID NO: 1324262 - RNA, 22 nt, Human
gcgagagauguguguugauacu

SEQ ID NO: 1324263 - RNA, 16 nt, Human
gcgacuuucugccugg

SEQ ID NO: 1324264 - RNA, 17 nt, Human
gcgacuuucugccugga

SEQ ID NO: 1324265 - RNA, 19 nt, Human
gcgagagaucaaagaugaa

SEQ ID NO: 1324266 - RNA, 12 nt, Human
gcgagagaugug

SEQ ID NO: 1324267 - RNA, 13 nt, Human
gcgagagaugugu

SEQ ID NO: 1324268 - RNA, 14 nt, Human
gcgagagaugugug

SEQ ID NO: 1324269 - RNA, 20 nt, Human
gccugcuaaggucuuggaac

SEQ ID NO: 1324270 - RNA, 20 nt, Human
gccugcuauuugaaguguaa

SEQ ID NO: 1324271 - RNA, 12 nt, Human
gccugcuccaga

SEQ ID NO: 1324272 - RNA, 13 nt, Human
gccugcuccagac

SEQ ID NO: 1324273 - RNA, 14 nt, Human
gccugcuccagacc

SEQ ID NO: 1324274 - RNA, 15 nt, Human
gccugcuccagaccu

SEQ ID NO: 1324275 - RNA, 16 nt, Human
gccugcuccagaccug

SEQ ID NO: 1324276 - RNA, 12 nt, Human
gccugcccuggu

SEQ ID NO: 1324277 - RNA, 14 nt, Human
gccugcccugguga

SEQ ID NO: 1324278 - RNA, 13 nt, Human
gccucggacuuag

SEQ ID NO: 1324279 - RNA, 18 nt, Human
gccucgcuccccacucug

SEQ ID NO: 1324280 - RNA, 19 nt, Human
gccucgcuccccacucugc

SEQ ID NO: 1324281 - RNA, 20 nt, Human
gccucgcuccccacucugcu

SEQ ID NO: 1324282 - RNA, 23 nt, Human
gccucgcuccccacucugcucug

SEQ ID NO: 1324283 - RNA, 24 nt, Human
gccucgcuccccacucugcucuga

SEQ ID NO: 1324284 - RNA, 20 nt, Human
gccugcccucauggccccuc

SEQ ID NO: 1324285 - RNA, 21 nt, Human
gccugcccucauggccccucu

SEQ ID NO: 1324286 - RNA, 22 nt, Human
gccugcccucauggccccucug

SEQ ID NO: 1324287 - RNA, 20 nt, Human
gccuccuucugagcuccugu

SEQ ID NO: 1324288 - RNA, 21 nt, Human
gccuccuucugagcuccuguc

SEQ ID NO: 1324289 - RNA, 22 nt, Human
gccuccuucugagcuccugucc

SEQ ID NO: 1324290 - RNA, 12 nt, Human
gccucgcaaccc

SEQ ID NO: 1324291 - RNA, 18 nt, Human
gccucgcaacccgugcca

SEQ ID NO: 1324292 - RNA, 23 nt, Human
gccucgcaacccgugccaagucc

SEQ ID NO: 1324293 - RNA, 20 nt, Human
gccucgcaacccgugccaag

SEQ ID NO: 1324294 - RNA, 16 nt, Human
gccucgcccauccccu

SEQ ID NO: 1324295 - RNA, 13 nt, Human
gccucgccccugg

SEQ ID NO: 1324296 - RNA, 14 nt, Human
gccucgccccuggc

SEQ ID NO: 1324297 - RNA, 16 nt, Human
gccucgccccuggcag

SEQ ID NO: 1324298 - RNA, 17 nt, Human
gccucgccccuggcaga

SEQ ID NO: 1324299 - RNA, 18 nt, Human
gccucgccccuggcagag

SEQ ID NO: 1324300 - RNA, 14 nt, Human
gccucgcuccccac

SEQ ID NO: 1324301 - RNA, 16 nt, Human
gccucgcuccccacuc

SEQ ID NO: 1324302 - RNA, 17 nt, Human
gccugcuccagaccuga

SEQ ID NO: 1324303 - RNA, 21 nt, Human
gccugcuccagaccugauccu

SEQ ID NO: 1324304 - RNA, 20 nt, Human
gccuccaacccuagcaaaag

SEQ ID NO: 1324305 - RNA, 22 nt, Human
gccuccaaggaggggcuguaaa

SEQ ID NO: 1324306 - RNA, 23 nt, Human
gccuccaaggaggggcuguaaaa

SEQ ID NO: 1324307 - RNA, 22 nt, Human
gccuccaauuuuuuaagugaaa

SEQ ID NO: 1324308 - RNA, 22 nt, Human
gccuccagaggggcucagguca

SEQ ID NO: 1324309 - RNA, 16 nt, Human
gccuccaacccuagca

SEQ ID NO: 1324310 - RNA, 17 nt, Human
gccuccaagcuccaucu

SEQ ID NO: 1324311 - RNA, 15 nt, Human
gccucauuuuuuucc

SEQ ID NO: 1324312 - RNA, 21 nt, Human
gccucauuuuuuuccuugcaa

SEQ ID NO: 1324313 - RNA, 19 nt, Human
gccucauuuuuuuccuugc

SEQ ID NO: 1324314 - RNA, 18 nt, Human
gccucauguggcuggaag

SEQ ID NO: 1324315 - RNA, 19 nt, Human
gccucauguggcuggaaga

SEQ ID NO: 1324316 - RNA, 11 nt, Human
gccuccaugcu

SEQ ID NO: 1324317 - RNA, 12 nt, Human
gccuccuucuga

SEQ ID NO: 1324318 - RNA, 18 nt, Human
gccuccuucugagcuccu

SEQ ID NO: 1324319 - RNA, 20 nt, Human
gccuccauccugaggcucca

SEQ ID NO: 1324320 - RNA, 16 nt, Human
gccuccauccugaggc

SEQ ID NO: 1324321 - RNA, 19 nt, Human
gagcuggggaccugguacc

SEQ ID NO: 1324322 - RNA, 22 nt, Human
gagcuggcucugagcgccucca

SEQ ID NO: 1324323 - RNA, 12 nt, Human
gagcugggccug

SEQ ID NO: 1324324 - RNA, 13 nt, Human
gagcugggccugg

SEQ ID NO: 1324325 - RNA, 14 nt, Human
gagcugggccuggu

SEQ ID NO: 1324326 - RNA, 16 nt, Human
gagcugggccuggucu

SEQ ID NO: 1324327 - RNA, 21 nt, Human
gagcugggccuggucucaccc

SEQ ID NO: 1324328 - RNA, 17 nt, Human
gagcugggccuggucuc

SEQ ID NO: 1324329 - RNA, 13 nt, Human
gagcuggggaccu

SEQ ID NO: 1324330 - RNA, 15 nt, Human
gagcuggggaccugg

SEQ ID NO: 1324331 - RNA, 23 nt, Human
gagccuuuucccucuuuggcucc

SEQ ID NO: 1324332 - RNA, 13 nt, Human
gagcgacagugag

SEQ ID NO: 1324333 - RNA, 17 nt, Human
gagcgggucugcuccca

SEQ ID NO: 1324334 - RNA, 15 nt, Human
gagcgggucugcucc

SEQ ID NO: 1324335 - RNA, 13 nt, Human
gagcuggcucuga

SEQ ID NO: 1324336 - RNA, 17 nt, Human
gagcuggcucugagcgc

SEQ ID NO: 1324337 - RNA, 20 nt, Human
gagcagggauuaaccucugc

SEQ ID NO: 1324338 - RNA, 21 nt, Human
gagcagggauuaaccucugca

SEQ ID NO: 1324339 - RNA, 22 nt, Human
gagcagggauuaaccucugcac

SEQ ID NO: 1324340 - RNA, 15 nt, Human
gagcagggccgggga

SEQ ID NO: 1324341 - RNA, 16 nt, Human
gagcagggccggggaa

SEQ ID NO: 1324342 - RNA, 21 nt, Human
gagcagggccggggaacuggc

SEQ ID NO: 1324343 - RNA, 22 nt, Human
gagcagggccggggaacuggcc

SEQ ID NO: 1324344 - RNA, 21 nt, Human
gagcauaggugauccauguaa

SEQ ID NO: 1324345 - RNA, 22 nt, Human
gagcauaggugauccauguaac

SEQ ID NO: 1324346 - RNA, 12 nt, Human
gagcaucacaga

SEQ ID NO: 1324347 - RNA, 13 nt, Human
gagcaucacagaa

SEQ ID NO: 1324348 - RNA, 14 nt, Human
gagcaucacagaau

SEQ ID NO: 1324349 - RNA, 19 nt, Human
gagcauggaacacuucgag

SEQ ID NO: 1324350 - RNA, 18 nt, Human
gagcauggaacacuucga

SEQ ID NO: 1324351 - RNA, 22 nt, Human
gagcauguacugagccuuguaa

SEQ ID NO: 1324352 - RNA, 15 nt, Human
gagcaugucguggac

SEQ ID NO: 1324353 - RNA, 16 nt, Human
gagccccagcuacccu

SEQ ID NO: 1324354 - RNA, 14 nt, Human
gagccccagggaga

SEQ ID NO: 1324355 - RNA, 23 nt, Human
gagccccagggagagggggcugg

SEQ ID NO: 1324356 - RNA, 16 nt, Human
gagccccauuccuggg

SEQ ID NO: 1324357 - RNA, 17 nt, Human
gagccccauuccuggga

SEQ ID NO: 1324358 - RNA, 18 nt, Human
gagccccauuccugggaa

SEQ ID NO: 1324359 - RNA, 14 nt, Human
gagcccccacccug

SEQ ID NO: 1324360 - RNA, 15 nt, Human
gagcccccacccugu

SEQ ID NO: 1324361 - RNA, 22 nt, Human
gagcccccacccuguuccugcu

SEQ ID NO: 1324362 - RNA, 23 nt, Human
gagcccccacccuguuccugcug

SEQ ID NO: 1324363 - RNA, 13 nt, Human
gagcccccagccu

SEQ ID NO: 1324364 - RNA, 14 nt, Human
gagcccccagccug

SEQ ID NO: 1324365 - RNA, 15 nt, Human
gagcccccagccugu

SEQ ID NO: 1324366 - RNA, 16 nt, Human
gagcccccagccuguc

SEQ ID NO: 1324367 - RNA, 17 nt, Human
gagcccccagccuguca

SEQ ID NO: 1324368 - RNA, 18 nt, Human
gagcccccagccugucag

SEQ ID NO: 1324369 - RNA, 14 nt, Human
gagauguagccccu

SEQ ID NO: 1324370 - RNA, 16 nt, Human
gagaugggcuucccaa

SEQ ID NO: 1324371 - RNA, 16 nt, Human
gagauguaaaagguau

SEQ ID NO: 1324372 - RNA, 17 nt, Human
gagauguaaaagguauu

SEQ ID NO: 1324373 - RNA, 14 nt, Human
gagauggcucccag

SEQ ID NO: 1324374 - RNA, 15 nt, Human
gagauggcucccagg

SEQ ID NO: 1324375 - RNA, 14 nt, Human
gagaugggcuuccc

SEQ ID NO: 1324376 - RNA, 17 nt, Human
gagaugggcuucccaag

SEQ ID NO: 1324377 - RNA, 21 nt, Human
gagauugcaccacugcacucc

SEQ ID NO: 1324378 - RNA, 20 nt, Human
gagauucucauaacuugaga

SEQ ID NO: 1324379 - RNA, 23 nt, Human
gagauucucauaacuugagaccu

SEQ ID NO: 1324380 - RNA, 14 nt, Human
gagauucugccuuu

SEQ ID NO: 1324381 - RNA, 15 nt, Human
gagauucugccuuug

SEQ ID NO: 1324382 - RNA, 21 nt, Human
gagauucugccuuugccaggu

SEQ ID NO: 1324383 - RNA, 14 nt, Human
gagauugaauuuca

SEQ ID NO: 1324384 - RNA, 22 nt, Human
gagauugaauuucacugucuuu

SEQ ID NO: 1324385 - RNA, 14 nt, Human
gagauugaccugga

SEQ ID NO: 1324386 - RNA, 16 nt, Human
gagauuuauuaaagaa

SEQ ID NO: 1324387 - RNA, 17 nt, Human
gagauuuauuaaagaaa

SEQ ID NO: 1324388 - RNA, 21 nt, Human
gagauuuucaacauuucaaaa

SEQ ID NO: 1324389 - RNA, 12 nt, Human
gagauuuuucau

SEQ ID NO: 1324390 - RNA, 21 nt, Human
gagaggcagcccaggaagucu

SEQ ID NO: 1324391 - RNA, 18 nt, Human
gagaugcaccaccaagcc

SEQ ID NO: 1324392 - RNA, 21 nt, Human
gagaugcaccaccaagccaag

SEQ ID NO: 1324393 - RNA, 16 nt, Human
gagaugcagugccagg

SEQ ID NO: 1324394 - RNA, 19 nt, Human
gagaugcuggcuugggcag

SEQ ID NO: 1324395 - RNA, 12 nt, Human
gagaugcuggcu

SEQ ID NO: 1324396 - RNA, 18 nt, Human
gagauggagucuugcucu

SEQ ID NO: 1324397 - RNA, 13 nt, Human
gagaagccuucaa

SEQ ID NO: 1324398 - RNA, 16 nt, Human
gagaagccuucaagcu

SEQ ID NO: 1324399 - RNA, 18 nt, Human
gagaagccuucaagcucu

SEQ ID NO: 1324400 - RNA, 20 nt, Human
gagaaggacccggaggggcc

SEQ ID NO: 1324401 - RNA, 18 nt, Human
gagaaggaaaauuuuagc

SEQ ID NO: 1324402 - RNA, 22 nt, Human
gagaaggacccggaggggccug

SEQ ID NO: 1324403 - RNA, 23 nt, Human
gagaaggacccggaggggccugg

SEQ ID NO: 1324404 - RNA, 16 nt, Human
gagaagucacagggca

SEQ ID NO: 1324405 - RNA, 17 nt, Human
gagaagucacagggcag

SEQ ID NO: 1324406 - RNA, 18 nt, Human
gagaagucacagggcagu

SEQ ID NO: 1324407 - RNA, 22 nt, Human
gagaagucacagggcaguaccu

SEQ ID NO: 1324408 - RNA, 13 nt, Human
gagaagucucagc

SEQ ID NO: 1324409 - RNA, 19 nt, Human
gagaagccuucaagcucug

SEQ ID NO: 1324410 - RNA, 20 nt, Human
gagaagccuucaagcucuga

SEQ ID NO: 1324411 - RNA, 22 nt, Human
gagaagccuucaagcucugagg

SEQ ID NO: 1324412 - RNA, 21 nt, Human
gagaagccuucaagcucugag

SEQ ID NO: 1324413 - RNA, 13 nt, Human
gagaccucagaag

SEQ ID NO: 1324414 - RNA, 18 nt, Human
gagaccucagaaguaaag

SEQ ID NO: 1324415 - RNA, 11 nt, Human
gagaccugccc

SEQ ID NO: 1324416 - RNA, 12 nt, Human
gagaccugcccc

SEQ ID NO: 1324417 - RNA, 13 nt, Human
gagaccugccccu

SEQ ID NO: 1324418 - RNA, 15 nt, Human
gagaaucacuugaac

SEQ ID NO: 1324419 - RNA, 14 nt, Human
gagaaucagacuga

SEQ ID NO: 1324420 - RNA, 18 nt, Human
gagacccagcccucaucc

SEQ ID NO: 1324421 - RNA, 11 nt, Human
gagacccagcg

SEQ ID NO: 1324422 - RNA, 18 nt, Human
gagacccagcggacacac

SEQ ID NO: 1324423 - RNA, 14 nt, Human
gagaaucacuugaa

SEQ ID NO: 1324424 - RNA, 14 nt, Human
gagaagucucagcu

SEQ ID NO: 1324425 - RNA, 21 nt, Human
gagaagucucagcuaagcuca

SEQ ID NO: 1324426 - RNA, 22 nt, Human
gagaagucucagcuaagcucac

SEQ ID NO: 1324427 - RNA, 17 nt, Human
gagaagugaaugcuggg

SEQ ID NO: 1324428 - RNA, 19 nt, Human
gagaagugaaugcugggac

SEQ ID NO: 1324429 - RNA, 20 nt, Human
gagaagugaaugcugggacu

SEQ ID NO: 1324430 - RNA, 18 nt, Human
gacuggugcuaaugucaa

SEQ ID NO: 1324431 - RNA, 21 nt, Human
gacuggguaggaaagaggaag

SEQ ID NO: 1324432 - RNA, 15 nt, Human
gacugaaaauauugu

SEQ ID NO: 1324433 - RNA, 11 nt, Human
gacuuuccucu

SEQ ID NO: 1324434 - RNA, 14 nt, Human
gacuuuccauuaca

SEQ ID NO: 1324435 - RNA, 11 nt, Human
gacuuucccca

SEQ ID NO: 1324436 - RNA, 12 nt, Human
gacuuuccccac

SEQ ID NO: 1324437 - RNA, 18 nt, Human
gacuuuccccaccagaug

SEQ ID NO: 1324438 - RNA, 21 nt, Human
gacuuuccccaccagaugcug

SEQ ID NO: 1324439 - RNA, 11 nt, Human
gacuuuccugc

SEQ ID NO: 1324440 - RNA, 12 nt, Human
gacuuuccugca

SEQ ID NO: 1324441 - RNA, 20 nt, Human
gacuuuccccaccagaugcu

SEQ ID NO: 1324442 - RNA, 12 nt, Human
gacuuucugccu

SEQ ID NO: 1324443 - RNA, 14 nt, Human
gacuuucugccugg

SEQ ID NO: 1324444 - RNA, 15 nt, Human
gacuuucugccugga

SEQ ID NO: 1324445 - RNA, 12 nt, Human
gacuuuugugaa

SEQ ID NO: 1324446 - RNA, 17 nt, Human
gacucuuaagaagacug

SEQ ID NO: 1324447 - RNA, 18 nt, Human
gacucuuaagaagacugc

SEQ ID NO: 1324448 - RNA, 16 nt, Human
gacucuuaagaagacu

SEQ ID NO: 1324449 - RNA, 18 nt, Human
gacucuggugccuccaga

SEQ ID NO: 1324450 - RNA, 13 nt, Human
gacucuguccuga

SEQ ID NO: 1324451 - RNA, 24 nt, Human
gacucuguccugaaggccugaggu

SEQ ID NO: 1324452 - RNA, 19 nt, Human
gacucugucuaccuggucu

SEQ ID NO: 1324453 - RNA, 16 nt, Human
gacucuuuaugcuugc

SEQ ID NO: 1324454 - RNA, 17 nt, Human
gacucuuuuccuucccu

SEQ ID NO: 1324455 - RNA, 17 nt, Human
gacucuuuugccauuaa

SEQ ID NO: 1324456 - RNA, 14 nt, Human
gacucaaaccaaau

SEQ ID NO: 1324457 - RNA, 18 nt, Human
gacuaucugucugguggc

SEQ ID NO: 1324458 - RNA, 15 nt, Human
gacuaggguccuggg

SEQ ID NO: 1324459 - RNA, 16 nt, Human
gacuaggguccugggg

SEQ ID NO: 1324460 - RNA, 18 nt, Human
gacuaggguccuggggaa

SEQ ID NO: 1324461 - RNA, 22 nt, Human
gacuauauuugggccugcucca

SEQ ID NO: 1324462 - RNA, 17 nt, Human
gacuaucuuacuauuuc

SEQ ID NO: 1324463 - RNA, 19 nt, Human
gacuaucuuacuauuucac

SEQ ID NO: 1324464 - RNA, 15 nt, Human
gacuaugaaaagcua

SEQ ID NO: 1324465 - RNA, 19 nt, Human
gacuaugaaaaugcuggcu

SEQ ID NO: 1324466 - RNA, 21 nt, Human
gacuauucuugauguaaaauc

SEQ ID NO: 1324467 - RNA, 22 nt, Human
gacuauucuugauguaaaaucu

SEQ ID NO: 1324468 - RNA, 17 nt, Human
gacuagccuggcuuggg

SEQ ID NO: 1324469 - RNA, 23 nt, Human
gacuaggccuugcggcuccucag

SEQ ID NO: 1324470 - RNA, 16 nt, Human
gacuagggagccaugu

SEQ ID NO: 1324471 - RNA, 20 nt, Human
gaaugagagacacacugaag

SEQ ID NO: 1324472 - RNA, 14 nt, Human
gaaugaauuaaaua

SEQ ID NO: 1324473 - RNA, 16 nt, Human
gaaugaauuaaauaaa

SEQ ID NO: 1324474 - RNA, 12 nt, Human
gaaugacacugu

SEQ ID NO: 1324475 - RNA, 15 nt, Human
gaaugagacauccag

SEQ ID NO: 1324476 - RNA, 13 nt, Human
gaaugagacaucc

SEQ ID NO: 1324477 - RNA, 11 nt, Human
gaaugagccuc

SEQ ID NO: 1324478 - RNA, 13 nt, Human
gaaugagccucgg

SEQ ID NO: 1324479 - RNA, 22 nt, Human
gaaugagagacacacugaagaa

SEQ ID NO: 1324480 - RNA, 23 nt, Human
gaaugagagacacacugaagaag

SEQ ID NO: 1324481 - RNA, 15 nt, Human
gaagugugacuggcu

SEQ ID NO: 1324482 - RNA, 20 nt, Human
gaagugugccuucucucucc

SEQ ID NO: 1324483 - RNA, 13 nt, Human
gaaauccagggug

SEQ ID NO: 1324484 - RNA, 18 nt, Human
gaaauccagggugguggu

SEQ ID NO: 1324485 - RNA, 14 nt, Human
gaaauccauucaca

SEQ ID NO: 1324486 - RNA, 15 nt, Human
gaagcuacugugugu

SEQ ID NO: 1324487 - RNA, 20 nt, Human
gaagcuacugugugugugaa

SEQ ID NO: 1324488 - RNA, 22 nt, Human
gaagcuacugugugugugaaug

SEQ ID NO: 1324489 - RNA, 23 nt, Human
gaagcuacugugugugugaauga

SEQ ID NO: 1324490 - RNA, 18 nt, Human
gaagcuagacacaugaag

SEQ ID NO: 1324491 - RNA, 12 nt, Human
gaagcucagcug

SEQ ID NO: 1324492 - RNA, 14 nt, Human
gaagcuaauuugca

SEQ ID NO: 1324493 - RNA, 15 nt, Human
gaagcuaauuugcau

SEQ ID NO: 1324494 - RNA, 16 nt, Human
gaagcuaauuugcauu

SEQ ID NO: 1324495 - RNA, 17 nt, Human
gaagcuaauuugcauua

SEQ ID NO: 1324496 - RNA, 21 nt, Human
gaagcucagcugcauuccgca

SEQ ID NO: 1324497 - RNA, 21 nt, Human
gaagugacuuuggcugcaugc

SEQ ID NO: 1324498 - RNA, 12 nt, Human
gaagugagaccu

SEQ ID NO: 1324499 - RNA, 16 nt, Human
gaagugagcacagccu

SEQ ID NO: 1324500 - RNA, 20 nt, Human
gaagugacuuuggcugcaug

SEQ ID NO: 1324501 - RNA, 15 nt, Human
gaagugacuuuggcu

SEQ ID NO: 1324502 - RNA, 13 nt, Human
gaagugacuuugg

SEQ ID NO: 1324503 - RNA, 22 nt, Human
gaagugagggcucacucagcca

SEQ ID NO: 1324504 - RNA, 23 nt, Human
gaagugcaucuggagagaacagg

SEQ ID NO: 1324505 - RNA, 15 nt, Human
gaaguggggacagag

SEQ ID NO: 1324506 - RNA, 21 nt, Human
gaagugcugccgcgcagugug

SEQ ID NO: 1324507 - RNA, 18 nt, Human
gaagugcuguuuauuaau

SEQ ID NO: 1324508 - RNA, 20 nt, Human
gaagugcuguuuauuaaucu

SEQ ID NO: 1324509 - RNA, 21 nt, Human
gaagugcuuaguguacuugga

SEQ ID NO: 1324510 - RNA, 13 nt, Human
gaagggccagagc

SEQ ID NO: 1324511 - RNA, 14 nt, Human
gaagucuuuuguuc

SEQ ID NO: 1324512 - RNA, 15 nt, Human
gaagugaagaaugca

SEQ ID NO: 1324513 - RNA, 15 nt, Human
gaagugaaugcuggg

SEQ ID NO: 1324514 - RNA, 16 nt, Human
gaagugaaugcuggga

SEQ ID NO: 1324515 - RNA, 17 nt, Human
gaagugaaugcugggac

SEQ ID NO: 1324516 - RNA, 13 nt, Human
gaagggcaaguuu

SEQ ID NO: 1324517 - RNA, 23 nt, Human
gaagggagggcagagcuggugcg

SEQ ID NO: 1324518 - RNA, 14 nt, Human
gaagggagggcaga

SEQ ID NO: 1324519 - RNA, 15 nt, Human
gaagggagggcagag

SEQ ID NO: 1324520 - RNA, 16 nt, Human
gaagggagggcagagc

SEQ ID NO: 1324521 - RNA, 17 nt, Human
gaagggagggcagagcu

SEQ ID NO: 1324522 - RNA, 20 nt, Human
gaagggagggcagagcuggu

SEQ ID NO: 1324523 - RNA, 21 nt, Human
gaagggagggcagagcuggug

SEQ ID NO: 1324524 - RNA, 16 nt, Human
gaagggaggggcugug

SEQ ID NO: 1324525 - RNA, 12 nt, Human
gaagggagccaa

SEQ ID NO: 1324526 - RNA, 13 nt, Human
gaagggagccaag

SEQ ID NO: 1324527 - RNA, 14 nt, Human
gaagggagccaagg

SEQ ID NO: 1324528 - RNA, 15 nt, Human
gaagggagccaaggg

SEQ ID NO: 1324529 - RNA, 16 nt, Human
gaagggagccaaggga

SEQ ID NO: 1324530 - RNA, 20 nt, Human
gaagggagccaagggaugga

SEQ ID NO: 1324531 - RNA, 22 nt, Human
gaagggagccaagggauggaca

SEQ ID NO: 1324532 - RNA, 23 nt, Human
gaagggagccaagggauggacau

SEQ ID NO: 1324533 - RNA, 16 nt, Human
gaaggcuugggauuug

SEQ ID NO: 1324534 - RNA, 17 nt, Human
gaaggcuugggauuugc

SEQ ID NO: 1324535 - RNA, 20 nt, Human
gaaggcuugggauuugcugu

SEQ ID NO: 1324536 - RNA, 21 nt, Human
gaaggcuugggauuugcugug

SEQ ID NO: 1324537 - RNA, 20 nt, Human
gaaggcuuguugugcuuuua

SEQ ID NO: 1324538 - RNA, 17 nt, Human
gaaggcuuguugugcuu

SEQ ID NO: 1324539 - RNA, 19 nt, Human
gaaggcuuguugugcuuuu

SEQ ID NO: 1324540 - RNA, 15 nt, Human
gaagggaagagacag

SEQ ID NO: 1324541 - RNA, 22 nt, Human
gaagggaauaagguacaagaag

SEQ ID NO: 1324542 - RNA, 17 nt, Human
gaagggaauaagguaca

SEQ ID NO: 1324543 - RNA, 14 nt, Human
gaagggacugagag

SEQ ID NO: 1324544 - RNA, 15 nt, Human
gaagcucccccagca

SEQ ID NO: 1324545 - RNA, 20 nt, Human
gaagcucccccagcaaagcc

SEQ ID NO: 1324546 - RNA, 12 nt, Human
gaagcuccccca

SEQ ID NO: 1324547 - RNA, 14 nt, Human
gaagcugcucaacu

SEQ ID NO: 1324548 - RNA, 21 nt, Human
gaagcucccccagcaaagccc

SEQ ID NO: 1324549 - RNA, 16 nt, Human
gaagcugcccugccca

SEQ ID NO: 1324550 - RNA, 20 nt, Human
gaagcugcucaacuugcaaa

SEQ ID NO: 1324551 - RNA, 19 nt, Human
gaagcugugcgugugugug

SEQ ID NO: 1324552 - RNA, 19 nt, Human
gaaggcuacuucggggcug

SEQ ID NO: 1324553 - RNA, 21 nt, Human
gaaggcuacuucggggcuggg

SEQ ID NO: 1324554 - RNA, 22 nt, Human
gaaggcuacuucggggcuggga

SEQ ID NO: 1324555 - RNA, 14 nt, Human
gacauuaacucauu

SEQ ID NO: 1324556 - RNA, 21 nt, Human
gacauuaacucauuagacugg

SEQ ID NO: 1324557 - RNA, 22 nt, Human
gacauuaacucauuagacugga

SEQ ID NO: 1324558 - RNA, 23 nt, Human
gacauuaugugguuuuagauuuu

SEQ ID NO: 1324559 - RNA, 14 nt, Human
gacauucaccugcc

SEQ ID NO: 1324560 - RNA, 15 nt, Human
gacauucaccugccc

SEQ ID NO: 1324561 - RNA, 16 nt, Human
gacauucaccugcccc

SEQ ID NO: 1324562 - RNA, 17 nt, Human
gacauucaccugcccca

SEQ ID NO: 1324563 - RNA, 17 nt, Human
gacauuaugugguuuua

SEQ ID NO: 1324564 - RNA, 18 nt, Human
gacauucaccugccccaa

SEQ ID NO: 1324565 - RNA, 14 nt, Human
gacagugaaagaaa

SEQ ID NO: 1324566 - RNA, 17 nt, Human
gacagucguucccagug

SEQ ID NO: 1324567 - RNA, 13 nt, Human
gacagucucacuu

SEQ ID NO: 1324568 - RNA, 17 nt, Human
gacagucaccucaugga

SEQ ID NO: 1324569 - RNA, 15 nt, Human
gacagucaaaaccaa

SEQ ID NO: 1324570 - RNA, 12 nt, Human
gacagcuccacc

SEQ ID NO: 1324571 - RNA, 13 nt, Human
gacagcccuccau

SEQ ID NO: 1324572 - RNA, 19 nt, Human
gacagccuggcacagggca

SEQ ID NO: 1324573 - RNA, 16 nt, Human
gacagguuagcugcuc

SEQ ID NO: 1324574 - RNA, 16 nt, Human
gacaggucccuccccu

SEQ ID NO: 1324575 - RNA, 18 nt, Human
gacagcuccacccuggcc

SEQ ID NO: 1324576 - RNA, 16 nt, Human
gacacugccacacagg

SEQ ID NO: 1324577 - RNA, 16 nt, Human
gacacuuaaaaauggu

SEQ ID NO: 1324578 - RNA, 12 nt, Human
gacacuguucuu

SEQ ID NO: 1324579 - RNA, 18 nt, Human
gacacuguucuuagcuca

SEQ ID NO: 1324580 - RNA, 22 nt, Human
gacacuguucuuagcucaauga

SEQ ID NO: 1324581 - RNA, 23 nt, Human
gacacuguucuuagcucaaugag

SEQ ID NO: 1324582 - RNA, 20 nt, Human
gacacuuaauacuaccuuga

SEQ ID NO: 1324583 - RNA, 15 nt, Human
gacagaaguuugcac

SEQ ID NO: 1324584 - RNA, 20 nt, Human
gacagaaguuugcacuaucu

SEQ ID NO: 1324585 - RNA, 22 nt, Human
gacagaaguuugcacuaucuuu

SEQ ID NO: 1324586 - RNA, 14 nt, Human
gacacacugaagaa

SEQ ID NO: 1324587 - RNA, 15 nt, Human
gacacacuaaccaag

SEQ ID NO: 1324588 - RNA, 18 nt, Human
gacacacuaaccaagcug

SEQ ID NO: 1324589 - RNA, 19 nt, Human
gacacacuaaccaagcuga

SEQ ID NO: 1324590 - RNA, 13 nt, Human
gacacacugaaga

SEQ ID NO: 1324591 - RNA, 13 nt, Human
gacaaaauguuau

SEQ ID NO: 1324592 - RNA, 18 nt, Human
gacacaccaggcgcuaau

SEQ ID NO: 1324593 - RNA, 16 nt, Human
gacaaacaccucccag

SEQ ID NO: 1324594 - RNA, 15 nt, Human
gacacaccaggcgcu

SEQ ID NO: 1324595 - RNA, 12 nt, Human
gacacacaugaa

SEQ ID NO: 1324596 - RNA, 11 nt, Human
gaauuaguuuu

SEQ ID NO: 1324597 - RNA, 12 nt, Human
gaauuaugaaac

SEQ ID NO: 1324598 - RNA, 14 nt, Human
gaauuaucuaauuu

SEQ ID NO: 1324599 - RNA, 20 nt, Human
gaauuaucuugguugaaaau

SEQ ID NO: 1324600 - RNA, 14 nt, Human
gaauuaugaaacuu

SEQ ID NO: 1324601 - RNA, 17 nt, Human
gaauuaguuuuaaaaug

SEQ ID NO: 1324602 - RNA, 19 nt, Human
gaauuauaacuggaaagaa

SEQ ID NO: 1324603 - RNA, 21 nt, Human
gaauuauaacuguaaagaugu

SEQ ID NO: 1324604 - RNA, 20 nt, Human
gaauuauaacuggaaagaag

SEQ ID NO: 1324605 - RNA, 13 nt, Human
gaauuauaacugu

SEQ ID NO: 1324606 - RNA, 14 nt, Human
gaauuauaacugua

SEQ ID NO: 1324607 - RNA, 21 nt, Human
gaauuuucuuuguguagcuuu

SEQ ID NO: 1324608 - RNA, 23 nt, Human
gaauuuucuuuguguagcuuugc

SEQ ID NO: 1324609 - RNA, 21 nt, Human
gaauuuuauuuuuugggaaaa

SEQ ID NO: 1324610 - RNA, 18 nt, Human
gaauuuuauugacacagu

SEQ ID NO: 1324611 - RNA, 15 nt, Human
gaauuuuagcuuuug

SEQ ID NO: 1324612 - RNA, 16 nt, Human
gaauuuuagcuuuugu

SEQ ID NO: 1324613 - RNA, 18 nt, Human
gaauuuuauacuuucccu

SEQ ID NO: 1324614 - RNA, 19 nt, Human
gaauuuuauacuuucccua

SEQ ID NO: 1324615 - RNA, 20 nt, Human
gaauuuuauacuuucccuac

SEQ ID NO: 1324616 - RNA, 21 nt, Human
gaauuuuauacuuucccuacc

SEQ ID NO: 1324617 - RNA, 22 nt, Human
gaauuuuauacuuucccuaccc

SEQ ID NO: 1324618 - RNA, 23 nt, Human
gaauuuuauacuuucccuacccu

SEQ ID NO: 1324619 - RNA, 15 nt, Human
gacaaaauggaauac

SEQ ID NO: 1324620 - RNA, 22 nt, Human
gacaaaauacuugucuguuuua

SEQ ID NO: 1324621 - RNA, 20 nt, Human
gacaaaaccccccagauauc

SEQ ID NO: 1324622 - RNA, 23 nt, Human
gacaaaaccccccagauaucauc

SEQ ID NO: 1324623 - RNA, 15 nt, Human
gacaaaacuagagac

SEQ ID NO: 1324624 - RNA, 16 nt, Human
gacaaaauguuauuuc

SEQ ID NO: 1324625 - RNA, 12 nt, Human
gacaaaauguua

SEQ ID NO: 1324626 - RNA, 17 nt, Human
gacaaacaccucccagg

SEQ ID NO: 1324627 - RNA, 15 nt, Human
gaauuuuguugcugu

SEQ ID NO: 1324628 - RNA, 17 nt, Human
gaauuuuuaaacaagua

SEQ ID NO: 1324629 - RNA, 18 nt, Human
gaauuuuuaaacaaguau

SEQ ID NO: 1324630 - RNA, 21 nt, Human
gaauuuugcaaagauuuaauc

SEQ ID NO: 1324631 - RNA, 22 nt, Human
gaauuuugcaaagauuuaaucu

SEQ ID NO: 1324632 - RNA, 21 nt, Human
gaucucuucuuaauguacaua

SEQ ID NO: 1324633 - RNA, 19 nt, Human
gaucucuucuuaauguaca

SEQ ID NO: 1324634 - RNA, 17 nt, Human
gauccaguauaagacua

SEQ ID NO: 1324635 - RNA, 12 nt, Human
gauccaguuuug

SEQ ID NO: 1324636 - RNA, 12 nt, Human
gaucccaacacu

SEQ ID NO: 1324637 - RNA, 16 nt, Human
gaucccaacacugcca

SEQ ID NO: 1324638 - RNA, 14 nt, Human
gauccauguaacug

SEQ ID NO: 1324639 - RNA, 17 nt, Human
gauccauguaacugccu

SEQ ID NO: 1324640 - RNA, 14 nt, Human
gauccauuucuaau

SEQ ID NO: 1324641 - RNA, 16 nt, Human
gaucucccugagaugg

SEQ ID NO: 1324642 - RNA, 15 nt, Human
gaucucccugagaug

SEQ ID NO: 1324643 - RNA, 15 nt, Human
gauccauuucuaauu

SEQ ID NO: 1324644 - RNA, 21 nt, Human
gaucucauuggacccuuccau

SEQ ID NO: 1324645 - RNA, 23 nt, Human
gauccaggccggcuugccacacc

SEQ ID NO: 1324646 - RNA, 23 nt, Human
gauccaggagcuccaguguccug

SEQ ID NO: 1324647 - RNA, 13 nt, Human
gauccaggagcuc

SEQ ID NO: 1324648 - RNA, 15 nt, Human
gauccaggagcucca

SEQ ID NO: 1324649 - RNA, 16 nt, Human
gauccaggagcuccag

SEQ ID NO: 1324650 - RNA, 19 nt, Human
gauccaggagcuccagugu

SEQ ID NO: 1324651 - RNA, 13 nt, Human
gauccagccuggg

SEQ ID NO: 1324652 - RNA, 21 nt, Human
gauccagccuggggucuggag

SEQ ID NO: 1324653 - RNA, 12 nt, Human
gauccaggacua

SEQ ID NO: 1324654 - RNA, 12 nt, Human
gauccagggaca

SEQ ID NO: 1324655 - RNA, 13 nt, Human
gauccagggacag

SEQ ID NO: 1324656 - RNA, 14 nt, Human
gauccagggacaga

SEQ ID NO: 1324657 - RNA, 15 nt, Human
gauccagggacagag

SEQ ID NO: 1324658 - RNA, 18 nt, Human
gauccagggacagaggcc

SEQ ID NO: 1324659 - RNA, 22 nt, Human
gauccagggacagaggccccag

SEQ ID NO: 1324660 - RNA, 19 nt, Human
gauccagggaggcuggucc

SEQ ID NO: 1324661 - RNA, 20 nt, Human
gauccagggaggcugguccu

SEQ ID NO: 1324662 - RNA, 16 nt, Human
gauccaguauaagacu

SEQ ID NO: 1324663 - RNA, 17 nt, Human
gauauuuuuaucuuuau

SEQ ID NO: 1324664 - RNA, 18 nt, Human
gauauuuuuccauuuuuu

SEQ ID NO: 1324665 - RNA, 12 nt, Human
gaugcuggccca

SEQ ID NO: 1324666 - RNA, 13 nt, Human
gaugcuggcccag

SEQ ID NO: 1324667 - RNA, 14 nt, Human
gaugcuggcccagg

SEQ ID NO: 1324668 - RNA, 15 nt, Human
gaugcuggcccaggg

SEQ ID NO: 1324669 - RNA, 12 nt, Human
gaugagcuccca

SEQ ID NO: 1324670 - RNA, 13 nt, Human
gaugagcucccac

SEQ ID NO: 1324671 - RNA, 17 nt, Human
gauuagagccuguaaac

SEQ ID NO: 1324672 - RNA, 19 nt, Human
gauuagcuuugucacuguu

SEQ ID NO: 1324673 - RNA, 16 nt, Human
gauuaugggucacagg

SEQ ID NO: 1324674 - RNA, 17 nt, Human
gauuaugggucacagga

SEQ ID NO: 1324675 - RNA, 18 nt, Human
gauuaugggucacaggaa

SEQ ID NO: 1324676 - RNA, 19 nt, Human
gauuauguagcaaaauaca

SEQ ID NO: 1324677 - RNA, 19 nt, Human
gauuauuaacgauguccaa

SEQ ID NO: 1324678 - RNA, 22 nt, Human
gauuacaggugugagccaccac

SEQ ID NO: 1324679 - RNA, 20 nt, Human
gauuacaggugugagccacc

SEQ ID NO: 1324680 - RNA, 12 nt, Human
gaugugaagcca

SEQ ID NO: 1324681 - RNA, 13 nt, Human
gaugugaagccaa

SEQ ID NO: 1324682 - RNA, 14 nt, Human
gaugugaagccaau

SEQ ID NO: 1324683 - RNA, 23 nt, Human
gaugugaagccaauucagacagg

SEQ ID NO: 1324684 - RNA, 16 nt, Human
gaugcuggcccagggc

SEQ ID NO: 1324685 - RNA, 17 nt, Human
gaugcuggcccagggcc

SEQ ID NO: 1324686 - RNA, 19 nt, Human
gaugcuggcccagggccca

SEQ ID NO: 1324687 - RNA, 21 nt, Human
gaugcuggcccagggcccaga

SEQ ID NO: 1324688 - RNA, 22 nt, Human
gaugcuggcccagggcccagag

SEQ ID NO: 1324689 - RNA, 23 nt, Human
gaugcuggcccagggcccagagc

SEQ ID NO: 1324690 - RNA, 14 nt, Human
gauuagacagaaca

SEQ ID NO: 1324691 - RNA, 16 nt, Human
gauuagacagaacacc

SEQ ID NO: 1324692 - RNA, 19 nt, Human
gauuagacagaacaccuau

SEQ ID NO: 1324693 - RNA, 18 nt, Human
gauuagacuggacagcuu

SEQ ID NO: 1324694 - RNA, 19 nt, Human
gauuagacuggacagcuug

SEQ ID NO: 1324695 - RNA, 20 nt, Human
gauuagacuggacagcuugu

SEQ ID NO: 1324696 - RNA, 20 nt, Human
gauuagaaauuaccugugga

SEQ ID NO: 1324697 - RNA, 22 nt, Human
gauuagaaauuaccuguggaua

SEQ ID NO: 1324698 - RNA, 22 nt, Human
gauuacuggccuuuuucauuua

SEQ ID NO: 1324699 - RNA, 15 nt, Human
gauuagaaauuaccu

SEQ ID NO: 1324700 - RNA, 18 nt, Human
gauuacugccuauuuuaa

SEQ ID NO: 1324701 - RNA, 13 nt, Human
gauuaccuccuga

SEQ ID NO: 1324702 - RNA, 14 nt, Human
gauuaccuccugag

SEQ ID NO: 1324703 - RNA, 17 nt, Human
gauuaccuccugagaaa

SEQ ID NO: 1324704 - RNA, 14 nt, Human
gauuaccagggacu

SEQ ID NO: 1324705 - RNA, 14 nt, Human
gauuacauuuuaaa

SEQ ID NO: 1324706 - RNA, 22 nt, Human
gauucucuggcuguaaggcucu

SEQ ID NO: 1324707 - RNA, 23 nt, Human
gauucucuggcuguaaggcucua

SEQ ID NO: 1324708 - RNA, 15 nt, Human
gauucucugugucua

SEQ ID NO: 1324709 - RNA, 18 nt, Human
gauucucugugucuaaga

SEQ ID NO: 1324710 - RNA, 22 nt, Human
gauucucugugucuaagauucu

SEQ ID NO: 1324711 - RNA, 23 nt, Human
gauucucugugucuaagauucua

SEQ ID NO: 1324712 - RNA, 14 nt, Human
gauucucuugccuc

SEQ ID NO: 1324713 - RNA, 16 nt, Human
gauucucuugccucaa

SEQ ID NO: 1324714 - RNA, 15 nt, Human
gauucucuugccuca

SEQ ID NO: 1324715 - RNA, 17 nt, Human
gauacuugaaaauuaac

SEQ ID NO: 1324716 - RNA, 20 nt, Human
gauacuucgacacuguucuu

SEQ ID NO: 1324717 - RNA, 22 nt, Human
gauacuucgacacuguucuuag

SEQ ID NO: 1324718 - RNA, 23 nt, Human
gauacuucgacacuguucuuagc

SEQ ID NO: 1324719 - RNA, 17 nt, Human
gauaugcauauuuguuu

SEQ ID NO: 1324720 - RNA, 14 nt, Human
gauaugcguauuau

SEQ ID NO: 1324721 - RNA, 12 nt, Human
gauaugcuugua

SEQ ID NO: 1324722 - RNA, 22 nt, Human
gauaugcuuguaacuaaaauaa

SEQ ID NO: 1324723 - RNA, 16 nt, Human
gauacuugaaaauuaa

SEQ ID NO: 1324724 - RNA, 19 nt, Human
gauacuguugcacgugugu

SEQ ID NO: 1324725 - RNA, 21 nt, Human
gauacuguugcacguguguuu

SEQ ID NO: 1324726 - RNA, 19 nt, Human
gauacuucgacacuguucu

SEQ ID NO: 1324727 - RNA, 13 nt, Human
gauacuguugcac

SEQ ID NO: 1324728 - RNA, 14 nt, Human
gauacuguugcacg

SEQ ID NO: 1324729 - RNA, 15 nt, Human
gauacuguugcacgu

SEQ ID NO: 1324730 - RNA, 16 nt, Human
gauacuguugcacgug

SEQ ID NO: 1324731 - RNA, 17 nt, Human
gauacuguugcacgugu

SEQ ID NO: 1324732 - RNA, 18 nt, Human
gauacuguugcacgugug

SEQ ID NO: 1324733 - RNA, 20 nt, Human
gauacuuaagugcugcaauu

SEQ ID NO: 1324734 - RNA, 13 nt, Human
gauaugugaacag

SEQ ID NO: 1324735 - RNA, 14 nt, Human
gauaugugaacagu

SEQ ID NO: 1324736 - RNA, 16 nt, Human
gauauguaaaacauuu

SEQ ID NO: 1324737 - RNA, 17 nt, Human
gauauguaaaacauuua

SEQ ID NO: 1324738 - RNA, 19 nt, Human
gauauguaaaacauuuauu

SEQ ID NO: 1324739 - RNA, 18 nt, Human
gauauguaaaacauuuau

SEQ ID NO: 1324740 - RNA, 17 nt, Human
gauauguauggguaggg

SEQ ID NO: 1324741 - RNA, 18 nt, Human
gauauguauggguagggu

SEQ ID NO: 1324742 - RNA, 20 nt, Human
gauauguaccuaacgaagua

SEQ ID NO: 1324743 - RNA, 17 nt, Human
gauaugggacauuuuug

SEQ ID NO: 1324744 - RNA, 16 nt, Human
gauaugggacauuuuu

SEQ ID NO: 1324745 - RNA, 19 nt, Human
gauauuaaauuuuuuaaaa

SEQ ID NO: 1324746 - RNA, 17 nt, Human
gauauuaaugcccagac

SEQ ID NO: 1324747 - RNA, 12 nt, Human
gauauucuaaga

SEQ ID NO: 1324748 - RNA, 22 nt, Human
gauauuccuauugugcaaugua

SEQ ID NO: 1324749 - RNA, 13 nt, Human
gauauucuaagac

SEQ ID NO: 1324750 - RNA, 15 nt, Human
gauauuggaacuugc

SEQ ID NO: 1324751 - RNA, 19 nt, Human
gauaccaugcuguaaggau

SEQ ID NO: 1324752 - RNA, 13 nt, Human
gauaccccccucu

SEQ ID NO: 1324753 - RNA, 21 nt, Human
gauaccccccucugucuugug

SEQ ID NO: 1324754 - RNA, 16 nt, Human
gauacgacaguacacu

SEQ ID NO: 1324755 - RNA, 17 nt, Human
gauacgacaguacacug

SEQ ID NO: 1324756 - RNA, 13 nt, Human
gauacuaaggacg

SEQ ID NO: 1324757 - RNA, 22 nt, Human
gauacuaauaaacuaauaauug

SEQ ID NO: 1324758 - RNA, 16 nt, Human
gaguuuagcuggaaaa

SEQ ID NO: 1324759 - RNA, 14 nt, Human
gaguuuaggguggg

SEQ ID NO: 1324760 - RNA, 15 nt, Human
gaguuuagggugggg

SEQ ID NO: 1324761 - RNA, 15 nt, Human
gaguuguggguagug

SEQ ID NO: 1324762 - RNA, 20 nt, Human
gaguuuagggaacaauuugg

SEQ ID NO: 1324763 - RNA, 22 nt, Human
gaguuuagggaacaauuuggca

SEQ ID NO: 1324764 - RNA, 22 nt, Human
gaguuuauguuccauuaaacga

SEQ ID NO: 1324765 - RNA, 15 nt, Human
gaguuucauguacaa

SEQ ID NO: 1324766 - RNA, 18 nt, Human
gaguuucauguacaagau

SEQ ID NO: 1324767 - RNA, 18 nt, Human
gaguuuauguuccauuaa

SEQ ID NO: 1324768 - RNA, 17 nt, Human
gaguuuccuaugggaac

SEQ ID NO: 1324769 - RNA, 12 nt, Human
gaguuucuaagg

SEQ ID NO: 1324770 - RNA, 13 nt, Human
gaguuucuaaggu

SEQ ID NO: 1324771 - RNA, 16 nt, Human
gaguuucuaagguccg

SEQ ID NO: 1324772 - RNA, 17 nt, Human
gaguuugaugaggcccu

SEQ ID NO: 1324773 - RNA, 19 nt, Human
gagugcugaaggaauggaa

SEQ ID NO: 1324774 - RNA, 12 nt, Human
gagugcuguuuu

SEQ ID NO: 1324775 - RNA, 15 nt, Human
gagugcuguuuuguu

SEQ ID NO: 1324776 - RNA, 19 nt, Human
gagugcuugcuuuucaugc

SEQ ID NO: 1324777 - RNA, 18 nt, Human
gagugcggaccacccuca

SEQ ID NO: 1324778 - RNA, 15 nt, Human
gagugcguggugcga

SEQ ID NO: 1324779 - RNA, 17 nt, Human
gagugcaguccugauca

SEQ ID NO: 1324780 - RNA, 18 nt, Human
gagugcaguccugaucag

SEQ ID NO: 1324781 - RNA, 22 nt, Human
gagugcaguccugaucagagcc

SEQ ID NO: 1324782 - RNA, 18 nt, Human
gagugcuugcuuuucaug

SEQ ID NO: 1324783 - RNA, 22 nt, Human
gaguuuggagagagcagacugg

SEQ ID NO: 1324784 - RNA, 19 nt, Human
gaguuuggagagagcagac

SEQ ID NO: 1324785 - RNA, 17 nt, Human
gaguuugucgcucaugu

SEQ ID NO: 1324786 - RNA, 18 nt, Human
gaguuugucgcucaugug

SEQ ID NO: 1324787 - RNA, 22 nt, Human
gaguuugucgcucaugugugca

SEQ ID NO: 1324788 - RNA, 14 nt, Human
gaggucuguuccuu

SEQ ID NO: 1324789 - RNA, 16 nt, Human
gaggucuguuccuuuu

SEQ ID NO: 1324790 - RNA, 18 nt, Human
gaggugcacugggaggcu

SEQ ID NO: 1324791 - RNA, 16 nt, Human
gaggugcacugggagg

SEQ ID NO: 1324792 - RNA, 13 nt, Human
gaggugccugucc

SEQ ID NO: 1324793 - RNA, 15 nt, Human
gaggugccuguccca

SEQ ID NO: 1324794 - RNA, 21 nt, Human
gaggugccugucccaccccca

SEQ ID NO: 1324795 - RNA, 14 nt, Human
gaggugccacugga

SEQ ID NO: 1324796 - RNA, 13 nt, Human
gaggugccacugg

SEQ ID NO: 1324797 - RNA, 13 nt, Human
gaggugcccagga

SEQ ID NO: 1324798 - RNA, 14 nt, Human
gaggugcccaggag

SEQ ID NO: 1324799 - RNA, 15 nt, Human
gaggugcccaggaga

SEQ ID NO: 1324800 - RNA, 16 nt, Human
gaggugcccaggagaa

SEQ ID NO: 1324801 - RNA, 13 nt, Human
gagucaauacaua

SEQ ID NO: 1324802 - RNA, 14 nt, Human
gagucaaguuguuc

SEQ ID NO: 1324803 - RNA, 12 nt, Human
gagucacacagu

SEQ ID NO: 1324804 - RNA, 13 nt, Human
gaguccacuuugu

SEQ ID NO: 1324805 - RNA, 22 nt, Human
gaguccacuuuguuucgugggg

SEQ ID NO: 1324806 - RNA, 13 nt, Human
gaguccaucagcc

SEQ ID NO: 1324807 - RNA, 14 nt, Human
gaguccaucagccu

SEQ ID NO: 1324808 - RNA, 15 nt, Human
gaguccaucagccuc

SEQ ID NO: 1324809 - RNA, 16 nt, Human
gaguccaucagccucc

SEQ ID NO: 1324810 - RNA, 14 nt, Human
gagugcaguccuga

SEQ ID NO: 1324811 - RNA, 21 nt, Human
gcaaguccuaagccuguuagc

SEQ ID NO: 1324812 - RNA, 13 nt, Human
gcaagugaauuug

SEQ ID NO: 1324813 - RNA, 16 nt, Human
gcaauaaaucugaccc

SEQ ID NO: 1324814 - RNA, 18 nt, Human
gcaauaaaucugacccag

SEQ ID NO: 1324815 - RNA, 19 nt, Human
gcaauaaaucugacccagu

SEQ ID NO: 1324816 - RNA, 21 nt, Human
gcaauaaaucugacccagugc

SEQ ID NO: 1324817 - RNA, 21 nt, Human
gcaauaacguuuaagccaaaa

SEQ ID NO: 1324818 - RNA, 23 nt, Human
gauucugaccuuaaaugcaacca

SEQ ID NO: 1324819 - RNA, 20 nt, Human
gauucugaccuuaaaugcaa

SEQ ID NO: 1324820 - RNA, 21 nt, Human
gauucugaccuuaaaugcaac

SEQ ID NO: 1324821 - RNA, 21 nt, Human
gcacaaucucggcucacugca

SEQ ID NO: 1324822 - RNA, 22 nt, Human
gcacaaucucggcucacugcau

SEQ ID NO: 1324823 - RNA, 19 nt, Human
gcacaauguagauaagugu

SEQ ID NO: 1324824 - RNA, 21 nt, Human
gcacaguugaagggaggggcu

SEQ ID NO: 1324825 - RNA, 13 nt, Human
gcacaugacucgg

SEQ ID NO: 1324826 - RNA, 21 nt, Human
gcacaucuguaaaucuacaca

SEQ ID NO: 1324827 - RNA, 17 nt, Human
gcacaucugugucuugu

SEQ ID NO: 1324828 - RNA, 18 nt, Human
gcacaucugugucuuguu

SEQ ID NO: 1324829 - RNA, 16 nt, Human
gcacaugaacuuagau

SEQ ID NO: 1324830 - RNA, 22 nt, Human
gcacaucuguaaaucuacacac

SEQ ID NO: 1324831 - RNA, 14 nt, Human
gcaccgaagcccag

SEQ ID NO: 1324832 - RNA, 15 nt, Human
gcaccgaagcccaga

SEQ ID NO: 1324833 - RNA, 16 nt, Human
gcaccgaagcccagag

SEQ ID NO: 1324834 - RNA, 23 nt, Human
gcaccgaagcccagagggucugg

SEQ ID NO: 1324835 - RNA, 20 nt, Human
gcaccggggccugggcagga

SEQ ID NO: 1324836 - RNA, 14 nt, Human
gcaccguucugugc

SEQ ID NO: 1324837 - RNA, 15 nt, Human
gcaccguucugugca

SEQ ID NO: 1324838 - RNA, 14 nt, Human
gcaccuaaaacuua

SEQ ID NO: 1324839 - RNA, 17 nt, Human
gcaccuaaagaaaaaca

SEQ ID NO: 1324840 - RNA, 14 nt, Human
gcaccuaaagaaaa

SEQ ID NO: 1324841 - RNA, 15 nt, Human
gcaccuaauccaggc

SEQ ID NO: 1324842 - RNA, 16 nt, Human
gcaccuaauccaggca

SEQ ID NO: 1324843 - RNA, 21 nt, Human
gcacugaauaaauuguacagc

SEQ ID NO: 1324844 - RNA, 22 nt, Human
gcacugaauaaauuguacagcc

SEQ ID NO: 1324845 - RNA, 20 nt, Human
gcagaaagcaucccucaccc

SEQ ID NO: 1324846 - RNA, 13 nt, Human
gcagaaagugccu

SEQ ID NO: 1324847 - RNA, 14 nt, Human
gcagaaagugccuu

SEQ ID NO: 1324848 - RNA, 19 nt, Human
gcagaaagugccuuucagg

SEQ ID NO: 1324849 - RNA, 23 nt, Human
gcagaaagugccuuucaggaucu

SEQ ID NO: 1324850 - RNA, 20 nt, Human
gcagaaagugccuuucagga

SEQ ID NO: 1324851 - RNA, 16 nt, Human
gcagaaauccaagcac

SEQ ID NO: 1324852 - RNA, 20 nt, Human
gcacuuuagaauaugccuug

SEQ ID NO: 1324853 - RNA, 19 nt, Human
gcacuuuagaauaugccuu

SEQ ID NO: 1324854 - RNA, 18 nt, Human
gcacuuuagaauaugccu

SEQ ID NO: 1324855 - RNA, 12 nt, Human
gcacuuuauccu

SEQ ID NO: 1324856 - RNA, 19 nt, Human
gcacugacggacucaugau

SEQ ID NO: 1324857 - RNA, 20 nt, Human
gcacugacugggaccaggca

SEQ ID NO: 1324858 - RNA, 22 nt, Human
gcacuuggggguucaggcccgg

SEQ ID NO: 1324859 - RNA, 16 nt, Human
gcacuuguccagcuga

SEQ ID NO: 1324860 - RNA, 15 nt, Human
gcagagccaggaaga

SEQ ID NO: 1324861 - RNA, 14 nt, Human
gcagagccaggaag

SEQ ID NO: 1324862 - RNA, 19 nt, Human
gcagagauuuucaacauuu

SEQ ID NO: 1324863 - RNA, 21 nt, Human
gcagagagguuugcaguccca

SEQ ID NO: 1324864 - RNA, 22 nt, Human
gcagagagguuugcagucccaa

SEQ ID NO: 1324865 - RNA, 15 nt, Human
gcagagaugccuccc

SEQ ID NO: 1324866 - RNA, 17 nt, Human
gcagagaugccucccug

SEQ ID NO: 1324867 - RNA, 16 nt, Human
gcagagaugccucccu

SEQ ID NO: 1324868 - RNA, 15 nt, Human
gcagaacaaaugaag

SEQ ID NO: 1324869 - RNA, 18 nt, Human
gcagaacacauuucaaau

SEQ ID NO: 1324870 - RNA, 14 nt, Human
gcagaacaaaugaa

SEQ ID NO: 1324871 - RNA, 16 nt, Human
gcagagccaggaagau

SEQ ID NO: 1324872 - RNA, 16 nt, Human
gcagagcccaagggaa

SEQ ID NO: 1324873 - RNA, 19 nt, Human
gcagagcugauggagaagg

SEQ ID NO: 1324874 - RNA, 18 nt, Human
gcagagcugauggagaag

SEQ ID NO: 1324875 - RNA, 12 nt, Human
gcagccacccug

SEQ ID NO: 1324876 - RNA, 14 nt, Human
gcagccacccugag

SEQ ID NO: 1324877 - RNA, 15 nt, Human
gcagccacccugagg

SEQ ID NO: 1324878 - RNA, 16 nt, Human
gcagccacccugagga

SEQ ID NO: 1324879 - RNA, 17 nt, Human
gcagccacccugaggag

SEQ ID NO: 1324880 - RNA, 20 nt, Human
gcagccacccugaggagucu

SEQ ID NO: 1324881 - RNA, 21 nt, Human
gcagccacccugaggagucug

SEQ ID NO: 1324882 - RNA, 19 nt, Human
gcagccagaccagcaggcu

SEQ ID NO: 1324883 - RNA, 13 nt, Human
gcagccagcaucu

SEQ ID NO: 1324884 - RNA, 14 nt, Human
gcagccagcaucug

SEQ ID NO: 1324885 - RNA, 15 nt, Human
gcagccagcaucugg

SEQ ID NO: 1324886 - RNA, 12 nt, Human
gcagcccagcca

SEQ ID NO: 1324887 - RNA, 12 nt, Human
gcagccccaggc

SEQ ID NO: 1324888 - RNA, 14 nt, Human
gcagcccaggaagu

SEQ ID NO: 1324889 - RNA, 14 nt, Human
gcagccccacccag

SEQ ID NO: 1324890 - RNA, 22 nt, Human
gcagccccacaccagggccagc

SEQ ID NO: 1324891 - RNA, 13 nt, Human
gcagcccagccag

SEQ ID NO: 1324892 - RNA, 14 nt, Human
gcagcccagccagc

SEQ ID NO: 1324893 - RNA, 16 nt, Human
gcagcccaggaagucu

SEQ ID NO: 1324894 - RNA, 22 nt, Human
gcauaacguauaaaagccuguu

SEQ ID NO: 1324895 - RNA, 13 nt, Human
gcaguuugcaaaa

SEQ ID NO: 1324896 - RNA, 12 nt, Human
gcaguuuuuuga

SEQ ID NO: 1324897 - RNA, 18 nt, Human
gcaguuuuuugaaaaugg

SEQ ID NO: 1324898 - RNA, 20 nt, Human
gcaguuuuuuuuuucuuguc

SEQ ID NO: 1324899 - RNA, 11 nt, Human
gcaguuuuuuu

SEQ ID NO: 1324900 - RNA, 14 nt, Human
gcauaaccugucuc

SEQ ID NO: 1324901 - RNA, 19 nt, Human
gcauaaccugucucaccug

SEQ ID NO: 1324902 - RNA, 17 nt, Human
gcaguuuuuuuuuucuu

SEQ ID NO: 1324903 - RNA, 19 nt, Human
gcagucauuauccagguaa

SEQ ID NO: 1324904 - RNA, 18 nt, Human
gcaguccacuucugacag

SEQ ID NO: 1324905 - RNA, 19 nt, Human
gcaguccacuucugacagc

SEQ ID NO: 1324906 - RNA, 20 nt, Human
gcaguccacuucugacagcc

SEQ ID NO: 1324907 - RNA, 21 nt, Human
gcaguccacuucugacagccu

SEQ ID NO: 1324908 - RNA, 23 nt, Human
gcaguccacuucugacagccuca

SEQ ID NO: 1324909 - RNA, 22 nt, Human
gcaguccacuucugacagccuc

SEQ ID NO: 1324910 - RNA, 16 nt, Human
gcagucccaagcggug

SEQ ID NO: 1324911 - RNA, 14 nt, Human
gcaguccccuuccc

SEQ ID NO: 1324912 - RNA, 21 nt, Human
gcaguccccuucccuccaaga

SEQ ID NO: 1324913 - RNA, 23 nt, Human
gcaguccccuucccuccaagaag

SEQ ID NO: 1324914 - RNA, 19 nt, Human
gcaguccugaucagagccg

SEQ ID NO: 1324915 - RNA, 18 nt, Human
gcaguccuggaagccagc

SEQ ID NO: 1324916 - RNA, 20 nt, Human
gcaguccuggaagccagcuu

SEQ ID NO: 1324917 - RNA, 14 nt, Human
gcaguccuuggccu

SEQ ID NO: 1324918 - RNA, 15 nt, Human
gcaguccuuggccug

SEQ ID NO: 1324919 - RNA, 18 nt, Human
gcaguccuuggccugcua

SEQ ID NO: 1324920 - RNA, 13 nt, Human
gcagucgugccug

SEQ ID NO: 1324921 - RNA, 15 nt, Human
gcagucgugccugug

SEQ ID NO: 1324922 - RNA, 16 nt, Human
gcagucgugccugugu

SEQ ID NO: 1324923 - RNA, 16 nt, Human
gcaguuuaucauucaa

SEQ ID NO: 1324924 - RNA, 20 nt, Human
gcaguuuaucauucaagugu

SEQ ID NO: 1324925 - RNA, 12 nt, Human
gcaguuugcaaa

SEQ ID NO: 1324926 - RNA, 16 nt, Human
gcaguuugcaaaaaau

SEQ ID NO: 1324927 - RNA, 23 nt, Human
gcauaccagguuuuacacuugca

SEQ ID NO: 1324928 - RNA, 20 nt, Human
gcauacccacacaaauaaca

SEQ ID NO: 1324929 - RNA, 18 nt, Human
gcauaccuccuauggguu

SEQ ID NO: 1324930 - RNA, 20 nt, Human
gcauacgagagcagaggucu

SEQ ID NO: 1324931 - RNA, 15 nt, Human
gcaggcuggcccugc

SEQ ID NO: 1324932 - RNA, 16 nt, Human
gcaggcuggcccugcc

SEQ ID NO: 1324933 - RNA, 17 nt, Human
gcaggcuggcccugccc

SEQ ID NO: 1324934 - RNA, 18 nt, Human
gcaggcuggcccugcccu

SEQ ID NO: 1324935 - RNA, 19 nt, Human
gcaggcuggcccugcccug

SEQ ID NO: 1324936 - RNA, 20 nt, Human
gcaggcuggcccugcccugg

SEQ ID NO: 1324937 - RNA, 21 nt, Human
gcaggcuggcccugcccuggu

SEQ ID NO: 1324938 - RNA, 17 nt, Human
gcaggcuggccuaugug

SEQ ID NO: 1324939 - RNA, 10 nt, Human
gcaggcuggg

SEQ ID NO: 1324940 - RNA, 11 nt, Human
gcaggcugggc

SEQ ID NO: 1324941 - RNA, 12 nt, Human
gcaggcugggcc

SEQ ID NO: 1324942 - RNA, 13 nt, Human
gcaggcugggcca

SEQ ID NO: 1324943 - RNA, 14 nt, Human
gcaggcugggccau

SEQ ID NO: 1324944 - RNA, 15 nt, Human
gcaggcugggccaug

SEQ ID NO: 1324945 - RNA, 23 nt, Human
gcaggcugggccauguccaaaga

SEQ ID NO: 1324946 - RNA, 21 nt, Human
gcagggaaaauuauuugcaua

SEQ ID NO: 1324947 - RNA, 19 nt, Human
gcagggagcggccggccag

SEQ ID NO: 1324948 - RNA, 16 nt, Human
gcagggagcugggcuu

SEQ ID NO: 1324949 - RNA, 17 nt, Human
gcagggagcugggcuuc

SEQ ID NO: 1324950 - RNA, 10 nt, Human
gcagggaggg

SEQ ID NO: 1324951 - RNA, 13 nt, Human
gcagggagggccu

SEQ ID NO: 1324952 - RNA, 13 nt, Human
gcagguucuuguu

SEQ ID NO: 1324953 - RNA, 17 nt, Human
gcagguucuuguuggug

SEQ ID NO: 1324954 - RNA, 22 nt, Human
gcagguucuuguuggugcacag

SEQ ID NO: 1324955 - RNA, 23 nt, Human
gcagguucuuguuggugcacagc

SEQ ID NO: 1324956 - RNA, 19 nt, Human
gcagguugauaaaucauuu

SEQ ID NO: 1324957 - RNA, 17 nt, Human
gcagguugauaaaucau

SEQ ID NO: 1324958 - RNA, 16 nt, Human
gcagguugauaaauca

SEQ ID NO: 1324959 - RNA, 22 nt, Human
gcaguaucggcacuguacaaaa

SEQ ID NO: 1324960 - RNA, 20 nt, Human
gcaguaucggcacuguacaa

SEQ ID NO: 1324961 - RNA, 21 nt, Human
gcaguaucaugcccugugcaa

SEQ ID NO: 1324962 - RNA, 15 nt, Human
gcaguaugaaaauaa

SEQ ID NO: 1324963 - RNA, 22 nt, Human
gcagucacucuagucaaugaca

SEQ ID NO: 1324964 - RNA, 21 nt, Human
gcaguagaggcuauggacagg

SEQ ID NO: 1324965 - RNA, 13 nt, Human
gcaguaauaaaaa

SEQ ID NO: 1324966 - RNA, 19 nt, Human
gcaguaccugggcaagcug

SEQ ID NO: 1324967 - RNA, 14 nt, Human
gcaguaccugaggg

SEQ ID NO: 1324968 - RNA, 15 nt, Human
gcaguaccugagggu

SEQ ID NO: 1324969 - RNA, 15 nt, Human
cugcuacaauguccu

SEQ ID NO: 1324970 - RNA, 20 nt, Human
cugcuacaccuauuauccca

SEQ ID NO: 1324971 - RNA, 23 nt, Human
cugcuacaccuauuaucccagcu

SEQ ID NO: 1324972 - RNA, 12 nt, Human
cugcuacagcaa

SEQ ID NO: 1324973 - RNA, 20 nt, Human
cugcuacagcaauuucuaau

SEQ ID NO: 1324974 - RNA, 13 nt, Human
cugcucagacaga

SEQ ID NO: 1324975 - RNA, 14 nt, Human
cugcucagcccugc

SEQ ID NO: 1324976 - RNA, 15 nt, Human
cugcucagcccugca

SEQ ID NO: 1324977 - RNA, 18 nt, Human
cugcucagcccugcacca

SEQ ID NO: 1324978 - RNA, 21 nt, Human
cugcucagcccugcaccaugc

SEQ ID NO: 1324979 - RNA, 13 nt, Human
cugcucagcucug

SEQ ID NO: 1324980 - RNA, 14 nt, Human
cugcucagcucugg

SEQ ID NO: 1324981 - RNA, 16 nt, Human
cugcucagcucugggc

SEQ ID NO: 1324982 - RNA, 22 nt, Human
cugcucagcucugggccauucu

SEQ ID NO: 1324983 - RNA, 15 nt, Human
cugcuaauauuuucc

SEQ ID NO: 1324984 - RNA, 16 nt, Human
cugcuaauauuuuccu

SEQ ID NO: 1324985 - RNA, 24 nt, Human
cugcuaauauuuuccuccugagug

SEQ ID NO: 1324986 - RNA, 23 nt, Human
cugcuaauauuuuccuccugagu

SEQ ID NO: 1324987 - RNA, 20 nt, Human
cugccugguauauccaaaag

SEQ ID NO: 1324988 - RNA, 14 nt, Human
cugccuguggccau

SEQ ID NO: 1324989 - RNA, 21 nt, Human
cugccuguggccaugacccug

SEQ ID NO: 1324990 - RNA, 12 nt, Human
cugccuguggcg

SEQ ID NO: 1324991 - RNA, 22 nt, Human
cugccuguggcgccgucuccag

SEQ ID NO: 1324992 - RNA, 23 nt, Human
cugccuguggcgccgucuccagg

SEQ ID NO: 1324993 - RNA, 23 nt, Human
cugccuguggccaugacccugcc

SEQ ID NO: 1324994 - RNA, 13 nt, Human
cuggacugugugc

SEQ ID NO: 1324995 - RNA, 18 nt, Human
cuggacugucauagaaau

SEQ ID NO: 1324996 - RNA, 16 nt, Human
cuggaacugucucuca

SEQ ID NO: 1324997 - RNA, 18 nt, Human
cuggaacugucucucaug

SEQ ID NO: 1324998 - RNA, 19 nt, Human
cuggaacugucucucauga

SEQ ID NO: 1324999 - RNA, 16 nt, Human
cuggaacuugaacuga

SEQ ID NO: 1325000 - RNA, 19 nt, Human
cuggaacuugaacugauuc

SEQ ID NO: 1325001 - RNA, 20 nt, Human
cuggaacuugaacugauuca

SEQ ID NO: 1325002 - RNA, 14 nt, Human
cuggaacccagacu

SEQ ID NO: 1325003 - RNA, 16 nt, Human
cuggaacccagacuca

SEQ ID NO: 1325004 - RNA, 18 nt, Human
cuggaacccagacucaga

SEQ ID NO: 1325005 - RNA, 19 nt, Human
cuggaacccagacucagac

SEQ ID NO: 1325006 - RNA, 22 nt, Human
cuggaacccagacucagacauu

SEQ ID NO: 1325007 - RNA, 12 nt, Human
cuggaaccucag

SEQ ID NO: 1325008 - RNA, 15 nt, Human
cuggaaccucagccu

SEQ ID NO: 1325009 - RNA, 16 nt, Human
cuggaaccucagccug

SEQ ID NO: 1325010 - RNA, 17 nt, Human
cuggaaccucagccugg

SEQ ID NO: 1325011 - RNA, 18 nt, Human
cuggaaccucagccuggc

SEQ ID NO: 1325012 - RNA, 20 nt, Human
cuggaaccucagccuggcca

SEQ ID NO: 1325013 - RNA, 22 nt, Human
cuggaaccucagccuggccaga

SEQ ID NO: 1325014 - RNA, 23 nt, Human
cuggaaccucagccuggccagac

SEQ ID NO: 1325015 - RNA, 16 nt, Human
cuggaaccaucagaaa

SEQ ID NO: 1325016 - RNA, 13 nt, Human
cuggaacccagac

SEQ ID NO: 1325017 - RNA, 15 nt, Human
cuggaaccaucagaa

SEQ ID NO: 1325018 - RNA, 21 nt, Human
cuggaacacuagacaagccag

SEQ ID NO: 1325019 - RNA, 22 nt, Human
cuggaacacuagacaagccaga

SEQ ID NO: 1325020 - RNA, 23 nt, Human
cuggaacacuagacaagccagaa

SEQ ID NO: 1325021 - RNA, 21 nt, Human
cugcuguuccagugguaagcu

SEQ ID NO: 1325022 - RNA, 20 nt, Human
cuggaacacuagacaagcca

SEQ ID NO: 1325023 - RNA, 21 nt, Human
cuggaaaucaggguuaguauu

SEQ ID NO: 1325024 - RNA, 18 nt, Human
cugcuuuuuauggccugu

SEQ ID NO: 1325025 - RNA, 22 nt, Human
cugcuuuuuccaacucagaaau

SEQ ID NO: 1325026 - RNA, 17 nt, Human
cugcuuuuuauggccug

SEQ ID NO: 1325027 - RNA, 21 nt, Human
cugcuguuugacaccucuuuu

SEQ ID NO: 1325028 - RNA, 22 nt, Human
cugcugugugcuuuuuuugugu

SEQ ID NO: 1325029 - RNA, 23 nt, Human
cugcugugugcuuuuuuugugug

SEQ ID NO: 1325030 - RNA, 20 nt, Human
cugcuguuauauuucaucau

SEQ ID NO: 1325031 - RNA, 15 nt, Human
cugcuguuccagugg

SEQ ID NO: 1325032 - RNA, 16 nt, Human
cugcccccucugcccu

SEQ ID NO: 1325033 - RNA, 17 nt, Human
cugcccccucugcccug

SEQ ID NO: 1325034 - RNA, 18 nt, Human
cugcccccucugcccugc

SEQ ID NO: 1325035 - RNA, 19 nt, Human
cugcccccucugcccugcg

SEQ ID NO: 1325036 - RNA, 17 nt, Human
cugcccuggugcugcca

SEQ ID NO: 1325037 - RNA, 18 nt, Human
cugcccuggugcugccac

SEQ ID NO: 1325038 - RNA, 19 nt, Human
cugcccuggugcugccaca

SEQ ID NO: 1325039 - RNA, 13 nt, Human
cugcccuguaccc

SEQ ID NO: 1325040 - RNA, 21 nt, Human
cugcccuguaccccagcacuu

SEQ ID NO: 1325041 - RNA, 20 nt, Human
cugcccuggugcugccacac

SEQ ID NO: 1325042 - RNA, 21 nt, Human
cugcccuggugcugccacacu

SEQ ID NO: 1325043 - RNA, 22 nt, Human
cugcccugguuuccugcccugg

SEQ ID NO: 1325044 - RNA, 23 nt, Human
cugcccugguuuccugcccuggg

SEQ ID NO: 1325045 - RNA, 12 nt, Human
cugccccaggcc

SEQ ID NO: 1325046 - RNA, 19 nt, Human
cugccccagggcucccggc

SEQ ID NO: 1325047 - RNA, 13 nt, Human
cugccccaggccu

SEQ ID NO: 1325048 - RNA, 14 nt, Human
cugccccaggccug

SEQ ID NO: 1325049 - RNA, 15 nt, Human
cugccccaggccuga

SEQ ID NO: 1325050 - RNA, 14 nt, Human
cugcccccucugcc

SEQ ID NO: 1325051 - RNA, 15 nt, Human
cugcccccucugccc

SEQ ID NO: 1325052 - RNA, 17 nt, Human
cugccaagacugcugug

SEQ ID NO: 1325053 - RNA, 21 nt, Human
cugccaagacugcuguggcca

SEQ ID NO: 1325054 - RNA, 13 nt, Human
cugccaagccaug

SEQ ID NO: 1325055 - RNA, 20 nt, Human
cugccaagacugcuguggcc

SEQ ID NO: 1325056 - RNA, 12 nt, Human
cugccaagccau

SEQ ID NO: 1325057 - RNA, 14 nt, Human
cugcauuugugaaa

SEQ ID NO: 1325058 - RNA, 15 nt, Human
cugcauuugugaaau

SEQ ID NO: 1325059 - RNA, 17 nt, Human
cugcauuugugaaauga

SEQ ID NO: 1325060 - RNA, 22 nt, Human
cugcauuugugaaaugauggug

SEQ ID NO: 1325061 - RNA, 12 nt, Human
cugcauuuuuca

SEQ ID NO: 1325062 - RNA, 14 nt, Human
cugccaaaggaugu

SEQ ID NO: 1325063 - RNA, 16 nt, Human
cugccaaaggauguga

SEQ ID NO: 1325064 - RNA, 18 nt, Human
cugccaaaggaugugaua

SEQ ID NO: 1325065 - RNA, 19 nt, Human
cugccaaaggaugugauau

SEQ ID NO: 1325066 - RNA, 22 nt, Human
cugccaaaggaugugauauaua

SEQ ID NO: 1325067 - RNA, 22 nt, Human
cugccaaccuaaaacucuuucg

SEQ ID NO: 1325068 - RNA, 16 nt, Human
cugccaaccuaaaacu

SEQ ID NO: 1325069 - RNA, 23 nt, Human
cugcauugagcuugcaugcuugc

SEQ ID NO: 1325070 - RNA, 15 nt, Human
cugcauuggaacugg

SEQ ID NO: 1325071 - RNA, 16 nt, Human
cugcauuggaacugga

SEQ ID NO: 1325072 - RNA, 19 nt, Human
cugcauuggaacuggaggc

SEQ ID NO: 1325073 - RNA, 17 nt, Human
cugcauugaaaagagcu

SEQ ID NO: 1325074 - RNA, 18 nt, Human
cugcauugaaaagagcug

SEQ ID NO: 1325075 - RNA, 22 nt, Human
cugcauugaaaagagcugaagg

SEQ ID NO: 1325076 - RNA, 19 nt, Human
cugcauugaaaagagcuga

SEQ ID NO: 1325077 - RNA, 17 nt, Human
cugcauugagcuugcau

SEQ ID NO: 1325078 - RNA, 20 nt, Human
cugcauucaggaucaaaccc

SEQ ID NO: 1325079 - RNA, 12 nt, Human
cugcauuccgca

SEQ ID NO: 1325080 - RNA, 13 nt, Human
cugcauuccgcag

SEQ ID NO: 1325081 - RNA, 21 nt, Human
cugcauucugccucucuagga

SEQ ID NO: 1325082 - RNA, 18 nt, Human
cugcauucuucugagcac

SEQ ID NO: 1325083 - RNA, 22 nt, Human
cugcauucuucugagcacuguu

SEQ ID NO: 1325084 - RNA, 13 nt, Human
cugcauuugugaa

SEQ ID NO: 1325085 - RNA, 21 nt, Human
cugcauuggaacuggaggcag

SEQ ID NO: 1325086 - RNA, 22 nt, Human
cugcauuggaacuggaggcagg

SEQ ID NO: 1325087 - RNA, 23 nt, Human
cugcauuggaacuggaggcaggg

SEQ ID NO: 1325088 - RNA, 24 nt, Human
cugcauuauuugagaagcugcuca

SEQ ID NO: 1325089 - RNA, 17 nt, Human
cugcauuauuugagaag

SEQ ID NO: 1325090 - RNA, 23 nt, Human
cugcauuauuggaauauaauugu

SEQ ID NO: 1325091 - RNA, 15 nt, Human
cugagacuccagacc

SEQ ID NO: 1325092 - RNA, 16 nt, Human
cugagacuccagaccu

SEQ ID NO: 1325093 - RNA, 18 nt, Human
cugagacuccagaccuga

SEQ ID NO: 1325094 - RNA, 14 nt, Human
cugugaaggacccu

SEQ ID NO: 1325095 - RNA, 17 nt, Human
cugugaagugagaccuu

SEQ ID NO: 1325096 - RNA, 22 nt, Human
cugugaagugagaccuuccuuu

SEQ ID NO: 1325097 - RNA, 21 nt, Human
cugugagaugcuagaacuccc

SEQ ID NO: 1325098 - RNA, 16 nt, Human
cugugagaugcuagaa

SEQ ID NO: 1325099 - RNA, 16 nt, Human
cugucgcccaggcugg

SEQ ID NO: 1325100 - RNA, 15 nt, Human
cugucgauuagacug

SEQ ID NO: 1325101 - RNA, 17 nt, Human
cugucgauuagacugga

SEQ ID NO: 1325102 - RNA, 19 nt, Human
cuguccuuuuuccucucca

SEQ ID NO: 1325103 - RNA, 20 nt, Human
cuguccuuuuuccucuccac

SEQ ID NO: 1325104 - RNA, 18 nt, Human
cuguccuuuuuccucucc

SEQ ID NO: 1325105 - RNA, 19 nt, Human
cugucgauuagacuggaca

SEQ ID NO: 1325106 - RNA, 20 nt, Human
cugucgauuagacuggacag

SEQ ID NO: 1325107 - RNA, 23 nt, Human
cugucgauuagacuggacagcuu

SEQ ID NO: 1325108 - RNA, 23 nt, Human
cuguacuugcucuugaugccugg

SEQ ID NO: 1325109 - RNA, 22 nt, Human
cuguacuugcucuugaugccug

SEQ ID NO: 1325110 - RNA, 21 nt, Human
cuguaaaaugugggauuaugg

SEQ ID NO: 1325111 - RNA, 20 nt, Human
cuguaaaccucucgagggca

SEQ ID NO: 1325112 - RNA, 17 nt, Human
cuguaaaauaaaagguc

SEQ ID NO: 1325113 - RNA, 13 nt, Human
cuguaaaacuaag

SEQ ID NO: 1325114 - RNA, 15 nt, Human
cuguaaaacagguua

SEQ ID NO: 1325115 - RNA, 15 nt, Human
cuguaaaauguggga

SEQ ID NO: 1325116 - RNA, 15 nt, Human
cuguaaacacagaca

SEQ ID NO: 1325117 - RNA, 22 nt, Human
cugucacccagguuggagugca

SEQ ID NO: 1325118 - RNA, 23 nt, Human
cugucaccacccugcucauccac

SEQ ID NO: 1325119 - RNA, 21 nt, Human
cuguagggagggcggcagggg

SEQ ID NO: 1325120 - RNA, 16 nt, Human
cugucaccacccugcu

SEQ ID NO: 1325121 - RNA, 18 nt, Human
cugucaccacccugcuca

SEQ ID NO: 1325122 - RNA, 12 nt, Human
cuguaggccuca

SEQ ID NO: 1325123 - RNA, 13 nt, Human
cuguaggccucag

SEQ ID NO: 1325124 - RNA, 22 nt, Human
cuguaggccucaggugaaacuc

SEQ ID NO: 1325125 - RNA, 20 nt, Human
cuguagggagggcggcaggg

SEQ ID NO: 1325126 - RNA, 15 nt, Human
cuguccugaaggccu

SEQ ID NO: 1325127 - RNA, 16 nt, Human
cuguccugaaggccug

SEQ ID NO: 1325128 - RNA, 19 nt, Human
cuguccugaaggccugagg

SEQ ID NO: 1325129 - RNA, 20 nt, Human
cuguccugaaggccugaggu

SEQ ID NO: 1325130 - RNA, 12 nt, Human
cuguccugccua

SEQ ID NO: 1325131 - RNA, 13 nt, Human
cuguccugccugu

SEQ ID NO: 1325132 - RNA, 17 nt, Human
cuguccugccuguggcc

SEQ ID NO: 1325133 - RNA, 18 nt, Human
cuguccugccuguggcca

SEQ ID NO: 1325134 - RNA, 17 nt, Human
cuguccugccacccagc

SEQ ID NO: 1325135 - RNA, 22 nt, Human
cuguccugccacccagccccag

SEQ ID NO: 1325136 - RNA, 23 nt, Human
cuguccugccacccagccccagc

SEQ ID NO: 1325137 - RNA, 11 nt, Human
cuguccugccu

SEQ ID NO: 1325138 - RNA, 12 nt, Human
cugucagcugca

SEQ ID NO: 1325139 - RNA, 21 nt, Human
cugucagauccaggagcucca

SEQ ID NO: 1325140 - RNA, 22 nt, Human
cugucagauccaggagcuccag

SEQ ID NO: 1325141 - RNA, 23 nt, Human
cugucagauccaggagcuccagu

SEQ ID NO: 1325142 - RNA, 12 nt, Human
cugucagcauga

SEQ ID NO: 1325143 - RNA, 14 nt, Human
cugucagcaugaau

SEQ ID NO: 1325144 - RNA, 15 nt, Human
cugucagcaugaauu

SEQ ID NO: 1325145 - RNA, 16 nt, Human
cugucagcaugaauuu

SEQ ID NO: 1325146 - RNA, 22 nt, Human
cugucagcaugaauuuguaaug

SEQ ID NO: 1325147 - RNA, 13 nt, Human
cugucagauccag

SEQ ID NO: 1325148 - RNA, 18 nt, Human
cugucagauccaggagcu

SEQ ID NO: 1325149 - RNA, 19 nt, Human
cugucagauccaggagcuc

SEQ ID NO: 1325150 - RNA, 24 nt, Human
cugucagauccaggagcuccagug

SEQ ID NO: 1325151 - RNA, 18 nt, Human
cugguuuccugcccuggg

SEQ ID NO: 1325152 - RNA, 21 nt, Human
cugguuuccugcccugggagg

SEQ ID NO: 1325153 - RNA, 22 nt, Human
cugguuuccugcccugggaggc

SEQ ID NO: 1325154 - RNA, 17 nt, Human
cugguuugaagaauguu

SEQ ID NO: 1325155 - RNA, 16 nt, Human
cugggaccgcuacacc

SEQ ID NO: 1325156 - RNA, 17 nt, Human
cugggaccgcuacacca

SEQ ID NO: 1325157 - RNA, 20 nt, Human
cugggaccgcuacaccacuc

SEQ ID NO: 1325158 - RNA, 22 nt, Human
cugggaccgcuacaccacucug

SEQ ID NO: 1325159 - RNA, 23 nt, Human
cugggaccgcuacaccacucugg

SEQ ID NO: 1325160 - RNA, 24 nt, Human
cugggaccgcuacaccacucuggc

SEQ ID NO: 1325161 - RNA, 15 nt, Human
cugggacguggcuca

SEQ ID NO: 1325162 - RNA, 16 nt, Human
cugggacguggcucag

SEQ ID NO: 1325163 - RNA, 17 nt, Human
cugggacguggcucagc

SEQ ID NO: 1325164 - RNA, 18 nt, Human
cugggacguggcucagcc

SEQ ID NO: 1325165 - RNA, 10 nt, Human
cugggacagg

SEQ ID NO: 1325166 - RNA, 18 nt, Human
cuggcucccacaggcccu

SEQ ID NO: 1325167 - RNA, 18 nt, Human
cugggaccaggcaccagg

SEQ ID NO: 1325168 - RNA, 15 nt, Human
cuggcucccacaggc

SEQ ID NO: 1325169 - RNA, 13 nt, Human
cuggcuccagcug

SEQ ID NO: 1325170 - RNA, 14 nt, Human
cuggcuccagcugg

SEQ ID NO: 1325171 - RNA, 18 nt, Human
cuggcuccagcuggccgg

SEQ ID NO: 1325172 - RNA, 20 nt, Human
cuggcuccagcuggccggga

SEQ ID NO: 1325173 - RNA, 14 nt, Human
cuggcuccagaugc

SEQ ID NO: 1325174 - RNA, 20 nt, Human
cuggcuccagaugcagggca

SEQ ID NO: 1325175 - RNA, 21 nt, Human
cuggcuccagaugcagggcag

SEQ ID NO: 1325176 - RNA, 19 nt, Human
cuggacugucauagaaauu

SEQ ID NO: 1325177 - RNA, 20 nt, Human
cuggacugucauagaaauua

SEQ ID NO: 1325178 - RNA, 16 nt, Human
cuggacugugugcuca

SEQ ID NO: 1325179 - RNA, 15 nt, Human
cuggagaccaccagg

SEQ ID NO: 1325180 - RNA, 19 nt, Human
cuggagaccaccagggcau

SEQ ID NO: 1325181 - RNA, 22 nt, Human
cuggagaccaccagggcaucuc

SEQ ID NO: 1325182 - RNA, 20 nt, Human
cuggagacugugugugcccu

SEQ ID NO: 1325183 - RNA, 22 nt, Human
cuggagacugugugugcccucu

SEQ ID NO: 1325184 - RNA, 23 nt, Human
cuggagacugugugugcccucug

SEQ ID NO: 1325185 - RNA, 15 nt, Human
cuggagacuuagggc

SEQ ID NO: 1325186 - RNA, 12 nt, Human
cuggcagcucug

SEQ ID NO: 1325187 - RNA, 17 nt, Human
cuggcagcucuggacag

SEQ ID NO: 1325188 - RNA, 18 nt, Human
cuggcagcucuggacagc

SEQ ID NO: 1325189 - RNA, 20 nt, Human
cuggcagcucuggacagccc

SEQ ID NO: 1325190 - RNA, 21 nt, Human
cuggcagcucuggacagcccc

SEQ ID NO: 1325191 - RNA, 24 nt, Human
cuggcaggcaggcucccagggaca

SEQ ID NO: 1325192 - RNA, 18 nt, Human
cuggcaggcaggcuccca

SEQ ID NO: 1325193 - RNA, 14 nt, Human
cuggggaagacagu

SEQ ID NO: 1325194 - RNA, 15 nt, Human
cuggggaagacagug

SEQ ID NO: 1325195 - RNA, 16 nt, Human
cuggggaagacagugg

SEQ ID NO: 1325196 - RNA, 17 nt, Human
cuggggaagacaguggc

SEQ ID NO: 1325197 - RNA, 18 nt, Human
cuggggaagacaguggcc

SEQ ID NO: 1325198 - RNA, 13 nt, Human
cugggcagaccuu

SEQ ID NO: 1325199 - RNA, 15 nt, Human
cuggggaaccugacc

SEQ ID NO: 1325200 - RNA, 16 nt, Human
cuggggaaccugaccc

SEQ ID NO: 1325201 - RNA, 17 nt, Human
cuggggaaccugacccc

SEQ ID NO: 1325202 - RNA, 19 nt, Human
cuggugcacuggccccacc

SEQ ID NO: 1325203 - RNA, 16 nt, Human
cuggugcacuggcccc

SEQ ID NO: 1325204 - RNA, 23 nt, Human
cuggugcaaguugaggacuucuu

SEQ ID NO: 1325205 - RNA, 14 nt, Human
cuggugagccaagc

SEQ ID NO: 1325206 - RNA, 24 nt, Human
cuggugagucaccacuucagggcu

SEQ ID NO: 1325207 - RNA, 21 nt, Human
cuggugaucacguggucacgg

SEQ ID NO: 1325208 - RNA, 22 nt, Human
cuggguuccagcaauucuccug

SEQ ID NO: 1325209 - RNA, 18 nt, Human
cuggguuccuuccucuga

SEQ ID NO: 1325210 - RNA, 22 nt, Human
cuggguuccuuccucugagccu

SEQ ID NO: 1325211 - RNA, 23 nt, Human
cuggguuccuuccucugagccuu

SEQ ID NO: 1325212 - RNA, 23 nt, Human
cuuauuguagcauccuggaauau

SEQ ID NO: 1325213 - RNA, 15 nt, Human
cuuauuggaacucug

SEQ ID NO: 1325214 - RNA, 17 nt, Human
cuuauuggaacucugcu

SEQ ID NO: 1325215 - RNA, 18 nt, Human
cuuauuggaacucugcuu

SEQ ID NO: 1325216 - RNA, 20 nt, Human
cuuauuguagcauccuggaa

SEQ ID NO: 1325217 - RNA, 16 nt, Human
cuuauuauuuuugaga

SEQ ID NO: 1325218 - RNA, 19 nt, Human
cuuauucagcaccaagcau

SEQ ID NO: 1325219 - RNA, 14 nt, Human
cuuauucauuuucu

SEQ ID NO: 1325220 - RNA, 16 nt, Human
cuuauucauuuucucu

SEQ ID NO: 1325221 - RNA, 17 nt, Human
cuuauucauuuucucua

SEQ ID NO: 1325222 - RNA, 18 nt, Human
cuuauucauuuucucuaa

SEQ ID NO: 1325223 - RNA, 14 nt, Human
cuuauuauuuuuga

SEQ ID NO: 1325224 - RNA, 20 nt, Human
cuuauuagagugucuuucca

SEQ ID NO: 1325225 - RNA, 21 nt, Human
cuuauuagagugucuuuccac

SEQ ID NO: 1325226 - RNA, 15 nt, Human
cuuauucccuuccug

SEQ ID NO: 1325227 - RNA, 19 nt, Human
cuuauucauuuucucuaau

SEQ ID NO: 1325228 - RNA, 14 nt, Human
cuuauuccaugacu

SEQ ID NO: 1325229 - RNA, 17 nt, Human
cuuauuccaugacugcu

SEQ ID NO: 1325230 - RNA, 18 nt, Human
cuuauuccaugacugcuu

SEQ ID NO: 1325231 - RNA, 19 nt, Human
cuuauuccaugacugcuug

SEQ ID NO: 1325232 - RNA, 14 nt, Human
cuuauucccuuccu

SEQ ID NO: 1325233 - RNA, 14 nt, Human
cuuaugcuuaaauu

SEQ ID NO: 1325234 - RNA, 18 nt, Human
cuuaugcuguacccaguu

SEQ ID NO: 1325235 - RNA, 15 nt, Human
cuuaugcucuuaauu

SEQ ID NO: 1325236 - RNA, 19 nt, Human
cuuaugcucuuaauugcca

SEQ ID NO: 1325237 - RNA, 22 nt, Human
cuuaugcucuuaauugccaccu

SEQ ID NO: 1325238 - RNA, 15 nt, Human
cuuaugcugauuuau

SEQ ID NO: 1325239 - RNA, 16 nt, Human
cuuaugcgguuaauuu

SEQ ID NO: 1325240 - RNA, 17 nt, Human
cuuaugcgguuaauuuu

SEQ ID NO: 1325241 - RNA, 18 nt, Human
cuuaugcgguuaauuuug

SEQ ID NO: 1325242 - RNA, 12 nt, Human
cuuaugcucuua

SEQ ID NO: 1325243 - RNA, 11 nt, Human
cuuccauaauc

SEQ ID NO: 1325244 - RNA, 21 nt, Human
cuuccauaaucuggacuccuc

SEQ ID NO: 1325245 - RNA, 14 nt, Human
cuuccaguuugcuu

SEQ ID NO: 1325246 - RNA, 17 nt, Human
cuuccaguuugcuuugc

SEQ ID NO: 1325247 - RNA, 21 nt, Human
cuuccaguuugcuuugcccuu

SEQ ID NO: 1325248 - RNA, 15 nt, Human
cuucacuguaaaaua

SEQ ID NO: 1325249 - RNA, 19 nt, Human
cuucacucuucaaaugccu

SEQ ID NO: 1325250 - RNA, 12 nt, Human
cuucacugucac

SEQ ID NO: 1325251 - RNA, 15 nt, Human
cuucauaacaauuuu

SEQ ID NO: 1325252 - RNA, 19 nt, Human
cuucauaacaauuuuagga

SEQ ID NO: 1325253 - RNA, 13 nt, Human
cuucaguugucuc

SEQ ID NO: 1325254 - RNA, 14 nt, Human
cuucaguugucucu

SEQ ID NO: 1325255 - RNA, 15 nt, Human
cuucaguugucucug

SEQ ID NO: 1325256 - RNA, 17 nt, Human
cuucaguugucucugau

SEQ ID NO: 1325257 - RNA, 23 nt, Human
cuucaguugucucugaugcagcu

SEQ ID NO: 1325258 - RNA, 20 nt, Human
cuucaguugucucugaugca

SEQ ID NO: 1325259 - RNA, 15 nt, Human
cuucaguuucacaga

SEQ ID NO: 1325260 - RNA, 17 nt, Human
cuucaguuucacagaaa

SEQ ID NO: 1325261 - RNA, 20 nt, Human
cuucaguuucacagaaaaua

SEQ ID NO: 1325262 - RNA, 19 nt, Human
cuucaucuggauuccagag

SEQ ID NO: 1325263 - RNA, 13 nt, Human
cuucaucuggcaa

SEQ ID NO: 1325264 - RNA, 14 nt, Human
cuucaucuggcaac

SEQ ID NO: 1325265 - RNA, 19 nt, Human
cuucaucuggcaacaucuu

SEQ ID NO: 1325266 - RNA, 23 nt, Human
cuucaucuggcaacaucuuuauc

SEQ ID NO: 1325267 - RNA, 15 nt, Human
cuucaucuggaacca

SEQ ID NO: 1325268 - RNA, 13 nt, Human
cuucaucuggaac

SEQ ID NO: 1325269 - RNA, 12 nt, Human
cuucaucuggaa

SEQ ID NO: 1325270 - RNA, 11 nt, Human
cuucaucugga

SEQ ID NO: 1325271 - RNA, 12 nt, Human
cuucauaaucca

SEQ ID NO: 1325272 - RNA, 13 nt, Human
cuucauacuugaa

SEQ ID NO: 1325273 - RNA, 16 nt, Human
cuucauacuugaacgu

SEQ ID NO: 1325274 - RNA, 23 nt, Human
cuucauacuugaacguuuucuaa

SEQ ID NO: 1325275 - RNA, 19 nt, Human
cuucauagagacuugggaa

SEQ ID NO: 1325276 - RNA, 16 nt, Human
cuucauaucauccaca

SEQ ID NO: 1325277 - RNA, 17 nt, Human
cuucauaucauccacac

SEQ ID NO: 1325278 - RNA, 18 nt, Human
cuucauaucauccacaca

SEQ ID NO: 1325279 - RNA, 20 nt, Human
cuucauaucauccacacaug

SEQ ID NO: 1325280 - RNA, 21 nt, Human
cuucauaucauccacacauga

SEQ ID NO: 1325281 - RNA, 17 nt, Human
cuuccagugucauuucu

SEQ ID NO: 1325282 - RNA, 15 nt, Human
cuucaugcauggaaa

SEQ ID NO: 1325283 - RNA, 13 nt, Human
cuucaugcaugga

SEQ ID NO: 1325284 - RNA, 16 nt, Human
cuucaugacagccucc

SEQ ID NO: 1325285 - RNA, 21 nt, Human
cuugccuuauuagagugucuu

SEQ ID NO: 1325286 - RNA, 15 nt, Human
cuugccuucuggugu

SEQ ID NO: 1325287 - RNA, 15 nt, Human
cuugcggcuccucag

SEQ ID NO: 1325288 - RNA, 16 nt, Human
cuuggcaccagacacc

SEQ ID NO: 1325289 - RNA, 19 nt, Human
cuuggcaccagacacccag

SEQ ID NO: 1325290 - RNA, 20 nt, Human
cuuggcaccagacacccagg

SEQ ID NO: 1325291 - RNA, 21 nt, Human
cuuggcaccagacacccagga

SEQ ID NO: 1325292 - RNA, 13 nt, Human
cuuggcagccuug

SEQ ID NO: 1325293 - RNA, 13 nt, Human
cuugaugccuggc

SEQ ID NO: 1325294 - RNA, 13 nt, Human
cuugccugcaggc

SEQ ID NO: 1325295 - RNA, 13 nt, Human
cuugccugccuuu

SEQ ID NO: 1325296 - RNA, 15 nt, Human
cuugccugccuuucc

SEQ ID NO: 1325297 - RNA, 16 nt, Human
cuugccugccuuucca

SEQ ID NO: 1325298 - RNA, 15 nt, Human
cuugccugguacagu

SEQ ID NO: 1325299 - RNA, 16 nt, Human
cuugccugguacagua

SEQ ID NO: 1325300 - RNA, 11 nt, Human
cuugccugugc

SEQ ID NO: 1325301 - RNA, 14 nt, Human
cuugccugugccag

SEQ ID NO: 1325302 - RNA, 15 nt, Human
cuugccugugccagg

SEQ ID NO: 1325303 - RNA, 16 nt, Human
cuugccugugccaggu

SEQ ID NO: 1325304 - RNA, 18 nt, Human
cuugccugugccagguga

SEQ ID NO: 1325305 - RNA, 20 nt, Human
cuugccuguuucccaggccc

SEQ ID NO: 1325306 - RNA, 22 nt, Human
cuugccuguuucccaggcccac

SEQ ID NO: 1325307 - RNA, 18 nt, Human
cuugccuuauuagagugu

SEQ ID NO: 1325308 - RNA, 20 nt, Human
cuugccuuauuagagugucu

SEQ ID NO: 1325309 - RNA, 12 nt, Human
cuugaugccugg

SEQ ID NO: 1325310 - RNA, 21 nt, Human
cuugaugcaugcacuguuccc

SEQ ID NO: 1325311 - RNA, 13 nt, Human
cuugaugaagaag

SEQ ID NO: 1325312 - RNA, 18 nt, Human
cuugaugaccaaaguccu

SEQ ID NO: 1325313 - RNA, 21 nt, Human
cuugaugaccaaaguccuuuu

SEQ ID NO: 1325314 - RNA, 16 nt, Human
cuuggcagccuuguga

SEQ ID NO: 1325315 - RNA, 14 nt, Human
cuuggcagccuugu

SEQ ID NO: 1325316 - RNA, 20 nt, Human
cuuggcgaugccagccaagc

SEQ ID NO: 1325317 - RNA, 12 nt, Human
cuugaugaagaa

SEQ ID NO: 1325318 - RNA, 17 nt, Human
cuugauagaaaugccaa

SEQ ID NO: 1325319 - RNA, 22 nt, Human
cuugauagaaaugccaagcacu

SEQ ID NO: 1325320 - RNA, 12 nt, Human
cuugauagaaau

SEQ ID NO: 1325321 - RNA, 14 nt, Human
cuugauagaaaugc

SEQ ID NO: 1325322 - RNA, 20 nt, Human
cuugauccauuucuaauuau

SEQ ID NO: 1325323 - RNA, 19 nt, Human
cuugauccauuucuaauua

SEQ ID NO: 1325324 - RNA, 21 nt, Human
cuugaguuugucgcucaugug

SEQ ID NO: 1325325 - RNA, 16 nt, Human
cuugauaccccccucu

SEQ ID NO: 1325326 - RNA, 17 nt, Human
cuugauaccccccucug

SEQ ID NO: 1325327 - RNA, 18 nt, Human
cuugauaccccccucugu

SEQ ID NO: 1325328 - RNA, 19 nt, Human
cuugauaccccccucuguc

SEQ ID NO: 1325329 - RNA, 20 nt, Human
cuugauaccccccucugucu

SEQ ID NO: 1325330 - RNA, 21 nt, Human
cuugauaccccccucugucuu

SEQ ID NO: 1325331 - RNA, 15 nt, Human
cuuccuccugggccc

SEQ ID NO: 1325332 - RNA, 22 nt, Human
cuuccuccugggcccucucugc

SEQ ID NO: 1325333 - RNA, 12 nt, Human
cuuccuccugga

SEQ ID NO: 1325334 - RNA, 13 nt, Human
cuuccuccuggaa

SEQ ID NO: 1325335 - RNA, 14 nt, Human
cuuccuccuggaaa

SEQ ID NO: 1325336 - RNA, 12 nt, Human
cuuccuccuggg

SEQ ID NO: 1325337 - RNA, 14 nt, Human
cuuccuccugggcc

SEQ ID NO: 1325338 - RNA, 20 nt, Human
cuuccugcaggcaggaacaa

SEQ ID NO: 1325339 - RNA, 21 nt, Human
cuuccugcaggcaggaacaaa

SEQ ID NO: 1325340 - RNA, 22 nt, Human
cuuccugccagccccugccauu

SEQ ID NO: 1325341 - RNA, 13 nt, Human
cuucuagaaccag

SEQ ID NO: 1325342 - RNA, 13 nt, Human
cuucuacuuuuaa

SEQ ID NO: 1325343 - RNA, 21 nt, Human
cuucuacuuuuaaguugcuga

SEQ ID NO: 1325344 - RNA, 14 nt, Human
cuuccugccagccc

SEQ ID NO: 1325345 - RNA, 15 nt, Human
cuuccugccagcccc

SEQ ID NO: 1325346 - RNA, 17 nt, Human
cuuccugccagccccug

SEQ ID NO: 1325347 - RNA, 18 nt, Human
cuuccugccagccccugc

SEQ ID NO: 1325348 - RNA, 20 nt, Human
cuuccugccagccccugcca

SEQ ID NO: 1325349 - RNA, 14 nt, Human
cuucuaaguaaaua

SEQ ID NO: 1325350 - RNA, 17 nt, Human
cuucuaaguaaauacaa

SEQ ID NO: 1325351 - RNA, 21 nt, Human
cuucuaaguaaauacaauuuu

SEQ ID NO: 1325352 - RNA, 18 nt, Human
cuucuaaguaaauacaau

SEQ ID NO: 1325353 - RNA, 17 nt, Human
cuucuagaaccaggcaa

SEQ ID NO: 1325354 - RNA, 9 nt, Human
cuucuagag

SEQ ID NO: 1325355 - RNA, 13 nt, Human
cuucuagaguuca

SEQ ID NO: 1325356 - RNA, 14 nt, Human
cuucuagaguucag

SEQ ID NO: 1325357 - RNA, 23 nt, Human
cuucuauuuggggcuugaugacu

SEQ ID NO: 1325358 - RNA, 14 nt, Human
cuucuauuuuguaa

SEQ ID NO: 1325359 - RNA, 15 nt, Human
cuucuauuuuguaaa

SEQ ID NO: 1325360 - RNA, 16 nt, Human
cuucuauuuuguaaac

SEQ ID NO: 1325361 - RNA, 17 nt, Human
cuucuauuuuguaaacu

SEQ ID NO: 1325362 - RNA, 16 nt, Human
cuuccuccuccccacu

SEQ ID NO: 1325363 - RNA, 17 nt, Human
cuuccuccuccccacuu

SEQ ID NO: 1325364 - RNA, 21 nt, Human
cuucuguugcugccucaugcu

SEQ ID NO: 1325365 - RNA, 14 nt, Human
cuucuucagggacu

SEQ ID NO: 1325366 - RNA, 17 nt, Human
cuucuguugcugccuca

SEQ ID NO: 1325367 - RNA, 18 nt, Human
cuucuguugcugccucau

SEQ ID NO: 1325368 - RNA, 19 nt, Human
cuucuguugcugccucaug

SEQ ID NO: 1325369 - RNA, 20 nt, Human
cuucuguugcugccucaugc

SEQ ID NO: 1325370 - RNA, 14 nt, Human
cuucucaaguucua

SEQ ID NO: 1325371 - RNA, 15 nt, Human
cuucucaaguucuaa

SEQ ID NO: 1325372 - RNA, 16 nt, Human
cuucucaaguucuaag

SEQ ID NO: 1325373 - RNA, 17 nt, Human
cuucucaaguucuaaga

SEQ ID NO: 1325374 - RNA, 18 nt, Human
cuucucaaguucuaagau

SEQ ID NO: 1325375 - RNA, 23 nt, Human
cuucucaaguucuaagauucuaa

SEQ ID NO: 1325376 - RNA, 21 nt, Human
cuucucaaguucuaagauucu

SEQ ID NO: 1325377 - RNA, 13 nt, Human
cuucugagcuccu

SEQ ID NO: 1325378 - RNA, 14 nt, Human
cuucugagcuccug

SEQ ID NO: 1325379 - RNA, 15 nt, Human
cuucugagcuccugu

SEQ ID NO: 1325380 - RNA, 16 nt, Human
cuucugagcuccuguc

SEQ ID NO: 1325381 - RNA, 19 nt, Human
cuucugagcuccugucccc

SEQ ID NO: 1325382 - RNA, 23 nt, Human
cuucugagcuccuguccccugcu

SEQ ID NO: 1325383 - RNA, 22 nt, Human
cuucugagcuccuguccccugc

SEQ ID NO: 1325384 - RNA, 18 nt, Human
cuuuuaugugaaacaugu

SEQ ID NO: 1325385 - RNA, 14 nt, Human
cuuuuaugugaaac

SEQ ID NO: 1325386 - RNA, 15 nt, Human
cuuuuauguaguaau

SEQ ID NO: 1325387 - RNA, 18 nt, Human
cuuuuauguaguaauuga

SEQ ID NO: 1325388 - RNA, 22 nt, Human
cuuuuauguaguaauugacaug

SEQ ID NO: 1325389 - RNA, 23 nt, Human
cuuuuauguaguaauugacaugu

SEQ ID NO: 1325390 - RNA, 17 nt, Human
cuuuuauacucuuucug

SEQ ID NO: 1325391 - RNA, 19 nt, Human
cuuuuauacucuuucugua

SEQ ID NO: 1325392 - RNA, 20 nt, Human
cuuuuauacucuuucuguau

SEQ ID NO: 1325393 - RNA, 15 nt, Human
cuuuuauacugacac

SEQ ID NO: 1325394 - RNA, 21 nt, Human
cuuuuauaggauuuauuuaaa

SEQ ID NO: 1325395 - RNA, 14 nt, Human
cuuuuauaucccau

SEQ ID NO: 1325396 - RNA, 22 nt, Human
cuuuuaucccaaaguuguugua

SEQ ID NO: 1325397 - RNA, 17 nt, Human
cuuuguaagugaaaaac

SEQ ID NO: 1325398 - RNA, 21 nt, Human
cuuuguaagugaaaaacauga

SEQ ID NO: 1325399 - RNA, 21 nt, Human
cuuuuaguuccugugcacagc

SEQ ID NO: 1325400 - RNA, 22 nt, Human
cuuuuaguuccugugcacagcc

SEQ ID NO: 1325401 - RNA, 15 nt, Human
cuuuuaguuccugug

SEQ ID NO: 1325402 - RNA, 13 nt, Human
cuuuguaaugaaa

SEQ ID NO: 1325403 - RNA, 15 nt, Human
cuuuguaaauuguca

SEQ ID NO: 1325404 - RNA, 16 nt, Human
cuuugggcuucagcug

SEQ ID NO: 1325405 - RNA, 14 nt, Human
cuuugggcugcccu

SEQ ID NO: 1325406 - RNA, 15 nt, Human
cuuugggcugcccug

SEQ ID NO: 1325407 - RNA, 19 nt, Human
cuuugggcugcccuggugc

SEQ ID NO: 1325408 - RNA, 20 nt, Human
cuuugggcugcccuggugcu

SEQ ID NO: 1325409 - RNA, 21 nt, Human
cuuugggcugcccuggugcug

SEQ ID NO: 1325410 - RNA, 22 nt, Human
cuuucuagaaagagaaacaguu

SEQ ID NO: 1325411 - RNA, 17 nt, Human
cuuucuagaccaauaaa

SEQ ID NO: 1325412 - RNA, 16 nt, Human
cuuucuagccuggcua

SEQ ID NO: 1325413 - RNA, 22 nt, Human
cuuugauauuuucaacgcagcc

SEQ ID NO: 1325414 - RNA, 15 nt, Human
cuuugauauuucaau

SEQ ID NO: 1325415 - RNA, 17 nt, Human
cuuuccuugaguaguuu

SEQ ID NO: 1325416 - RNA, 14 nt, Human
cuuucacaaccuuc

SEQ ID NO: 1325417 - RNA, 16 nt, Human
cuuucacaaccuucug

SEQ ID NO: 1325418 - RNA, 12 nt, Human
cuuucagcuccu

SEQ ID NO: 1325419 - RNA, 13 nt, Human
cuuucagcuccug

SEQ ID NO: 1325420 - RNA, 14 nt, Human
cuuucagcuccuga

SEQ ID NO: 1325421 - RNA, 15 nt, Human
cuuucagcuccugac

SEQ ID NO: 1325422 - RNA, 17 nt, Human
cuuucagcuccugacca

SEQ ID NO: 1325423 - RNA, 19 nt, Human
cuuucagcuccugaccagu

SEQ ID NO: 1325424 - RNA, 21 nt, Human
cuuucagcuccugaccaguug

SEQ ID NO: 1325425 - RNA, 12 nt, Human
cuuucagcuguc

SEQ ID NO: 1325426 - RNA, 13 nt, Human
cuuucagcugucu

SEQ ID NO: 1325427 - RNA, 17 nt, Human
cuuucagcugucuuuug

SEQ ID NO: 1325428 - RNA, 22 nt, Human
cuuucagcugucuuuuggagga

SEQ ID NO: 1325429 - RNA, 15 nt, Human
cuuucaggaucuauu

SEQ ID NO: 1325430 - RNA, 16 nt, Human
cuuucaggaucuauuu

SEQ ID NO: 1325431 - RNA, 21 nt, Human
cuuucaggaucuauuuuugga

SEQ ID NO: 1325432 - RNA, 17 nt, Human
cuuucaggaucuauuuu

SEQ ID NO: 1325433 - RNA, 22 nt, Human
cuuuccugagucccaucccugc

SEQ ID NO: 1325434 - RNA, 20 nt, Human
cuuuccugagucccaucccu

SEQ ID NO: 1325435 - RNA, 18 nt, Human
cuuuccugagucccaucc

SEQ ID NO: 1325436 - RNA, 21 nt, Human
cuuuccugcaacucaaggacu

SEQ ID NO: 1325437 - RNA, 10 nt, Human
cuuuccugcc

SEQ ID NO: 1325438 - RNA, 12 nt, Human
cuuuccugcccc

SEQ ID NO: 1325439 - RNA, 13 nt, Human
cuuuccugcccca

SEQ ID NO: 1325440 - RNA, 14 nt, Human
cuuuccugccccag

SEQ ID NO: 1325441 - RNA, 18 nt, Human
cuuuccugccccaggccu

SEQ ID NO: 1325442 - RNA, 19 nt, Human
cuuuccugccccaggccug

SEQ ID NO: 1325443 - RNA, 20 nt, Human
cuuuccuggacacucagacc

SEQ ID NO: 1325444 - RNA, 23 nt, Human
cuuuccuggacacucagaccuga

SEQ ID NO: 1325445 - RNA, 23 nt, Human
cuuuccuguauuuguucccaaga

SEQ ID NO: 1325446 - RNA, 13 nt, Human
gaaacuuuuggaa

SEQ ID NO: 1325447 - RNA, 15 nt, Human
gaaacuuuuggaagg

SEQ ID NO: 1325448 - RNA, 11 nt, Human
gaaacuuuucu

SEQ ID NO: 1325449 - RNA, 21 nt, Human
gaaacuuuucuuaaaaaguua

SEQ ID NO: 1325450 - RNA, 16 nt, Human
gaaacuuucuuucuca

SEQ ID NO: 1325451 - RNA, 17 nt, Human
gaaacuuuuuuauuuaa

SEQ ID NO: 1325452 - RNA, 18 nt, Human
gaaacuuuuuuauuuaaa

SEQ ID NO: 1325453 - RNA, 18 nt, Human
gaaaggcugcuguacuga

SEQ ID NO: 1325454 - RNA, 18 nt, Human
gaaauauuuauuuuaaua

SEQ ID NO: 1325455 - RNA, 22 nt, Human
gaaauauuuauuuuaauaaugu

SEQ ID NO: 1325456 - RNA, 17 nt, Human
gaaaggugguguuucug

SEQ ID NO: 1325457 - RNA, 22 nt, Human
gaaaggugguguuucuguaaga

SEQ ID NO: 1325458 - RNA, 20 nt, Human
gaaaggugugagacugggaa

SEQ ID NO: 1325459 - RNA, 20 nt, Human
gaaagguuagagaauaaauu

SEQ ID NO: 1325460 - RNA, 17 nt, Human
gaaauauuuauuuuaau

SEQ ID NO: 1325461 - RNA, 14 nt, Human
gaaaggugguguuu

SEQ ID NO: 1325462 - RNA, 16 nt, Human
gaaaggugguguuucu

SEQ ID NO: 1325463 - RNA, 17 nt, Human
gaaaggggucggcugac

SEQ ID NO: 1325464 - RNA, 23 nt, Human
gaaaggcugcuguacugaaguaa

SEQ ID NO: 1325465 - RNA, 20 nt, Human
gaaaggcugcuguacugaag

SEQ ID NO: 1325466 - RNA, 19 nt, Human
gaaaggcugcuguacugaa

SEQ ID NO: 1325467 - RNA, 22 nt, Human
gaaaggcuguuaaauacaggaa

SEQ ID NO: 1325468 - RNA, 15 nt, Human
cuuuuggcauuuuac

SEQ ID NO: 1325469 - RNA, 23 nt, Human
cuuuuggauuggacaaaaugacu

SEQ ID NO: 1325470 - RNA, 21 nt, Human
cuuuuggauuggacaaaauga

SEQ ID NO: 1325471 - RNA, 19 nt, Human
cuuuuggauuggacaaaau

SEQ ID NO: 1325472 - RNA, 17 nt, Human
cuuuuggcggggaggag

SEQ ID NO: 1325473 - RNA, 21 nt, Human
cuuuugguuaugaauacuuug

SEQ ID NO: 1325474 - RNA, 19 nt, Human
cuuuuguagaagucacauu

SEQ ID NO: 1325475 - RNA, 10 nt, Human
cuuuuguaag

SEQ ID NO: 1325476 - RNA, 13 nt, Human
cuuuuguaagaca

SEQ ID NO: 1325477 - RNA, 20 nt, Human
cuuuuguaagacaaagguuu

SEQ ID NO: 1325478 - RNA, 15 nt, Human
cuuuugucucugcaa

SEQ ID NO: 1325479 - RNA, 13 nt, Human
cuuuugugaauua

SEQ ID NO: 1325480 - RNA, 20 nt, Human
cuuuugugauggagugcugu

SEQ ID NO: 1325481 - RNA, 21 nt, Human
cuuuugugauggagugcuguu

SEQ ID NO: 1325482 - RNA, 22 nt, Human
cuuuugugauggagugcuguuu

SEQ ID NO: 1325483 - RNA, 13 nt, Human
cuuuuggagucag

SEQ ID NO: 1325484 - RNA, 18 nt, Human
cuuuuggauuggacaaaa

SEQ ID NO: 1325485 - RNA, 12 nt, Human
cuuuuggaggac

SEQ ID NO: 1325486 - RNA, 17 nt, Human
cuuuugccauuaaacuu

SEQ ID NO: 1325487 - RNA, 17 nt, Human
cuuuugcccauuuugaa

SEQ ID NO: 1325488 - RNA, 16 nt, Human
cuuuugcccauuuuga

SEQ ID NO: 1325489 - RNA, 15 nt, Human
cuuuugcccuuugau

SEQ ID NO: 1325490 - RNA, 13 nt, Human
cuuuugccauuga

SEQ ID NO: 1325491 - RNA, 13 nt, Human
gaaaaaaaauuau

SEQ ID NO: 1325492 - RNA, 23 nt, Human
cuuuuuuuuuucuuuauaagaaa

SEQ ID NO: 1325493 - RNA, 18 nt, Human
gaaaaaaaaauucacaug

SEQ ID NO: 1325494 - RNA, 16 nt, Human
gaaaaaaaacagugga

SEQ ID NO: 1325495 - RNA, 18 nt, Human
gaaaaaaaaccugagauu

SEQ ID NO: 1325496 - RNA, 21 nt, Human
gaaaaaaaaccugagauuuau

SEQ ID NO: 1325497 - RNA, 21 nt, Human
cuuuuuuuuuuuugagacaga

SEQ ID NO: 1325498 - RNA, 21 nt, Human
gaaaaacaaacucguuuuuua

SEQ ID NO: 1325499 - RNA, 23 nt, Human
gaaaaacaaacucguuuuuuaca

SEQ ID NO: 1325500 - RNA, 13 nt, Human
gaaaaacaggcac

SEQ ID NO: 1325501 - RNA, 11 nt, Human
gaaaaacaggu

SEQ ID NO: 1325502 - RNA, 18 nt, Human
gaaaaacaggcacuuggc

SEQ ID NO: 1325503 - RNA, 13 nt, Human
cuuuuuuguuuug

SEQ ID NO: 1325504 - RNA, 20 nt, Human
cuuuuuuuuuuuugagacag

SEQ ID NO: 1325505 - RNA, 14 nt, Human
cuuuuuuuuuucuu

SEQ ID NO: 1325506 - RNA, 16 nt, Human
cuuuuuuuuuucuuua

SEQ ID NO: 1325507 - RNA, 18 nt, Human
cuuuuuuuuuucuuuaua

SEQ ID NO: 1325508 - RNA, 20 nt, Human
cuuuuuuucuguaccaguua

SEQ ID NO: 1325509 - RNA, 16 nt, Human
cuuuuuuuagagaagu

SEQ ID NO: 1325510 - RNA, 19 nt, Human
cuuuuuuuccaucuuuaca

SEQ ID NO: 1325511 - RNA, 14 nt, Human
cuuuuuuucuguac

SEQ ID NO: 1325512 - RNA, 16 nt, Human
cuuuuuuucuguacca

SEQ ID NO: 1325513 - RNA, 19 nt, Human
cuuuuuuucuguaccaguu

SEQ ID NO: 1325514 - RNA, 23 nt, Human
gaaaaugcuguauuagucacaga

SEQ ID NO: 1325515 - RNA, 15 nt, Human
gaaaaugcgguuaua

SEQ ID NO: 1325516 - RNA, 12 nt, Human
gaaaagaaaaag

SEQ ID NO: 1325517 - RNA, 11 nt, Human
gaaaaugcuga

SEQ ID NO: 1325518 - RNA, 22 nt, Human
gaaaaugguccaauuaguuucc

SEQ ID NO: 1325519 - RNA, 18 nt, Human
gaaaaugguccaggagaa

SEQ ID NO: 1325520 - RNA, 22 nt, Human
gaaaauggucgagaaagaggca

SEQ ID NO: 1325521 - RNA, 23 nt, Human
gaaaaugguccaauuaguuuccu

SEQ ID NO: 1325522 - RNA, 13 nt, Human
gaaaauucauuuu

SEQ ID NO: 1325523 - RNA, 14 nt, Human
gaaaauucauuuuu

SEQ ID NO: 1325524 - RNA, 22 nt, Human
gaaaauucuaacccagguaucc

SEQ ID NO: 1325525 - RNA, 13 nt, Human
gaaaauucugugc

SEQ ID NO: 1325526 - RNA, 22 nt, Human
gaaaauucugugccuuguuuuu

SEQ ID NO: 1325527 - RNA, 20 nt, Human
gaaaauucugugccuuguuu

SEQ ID NO: 1325528 - RNA, 17 nt, Human
gaaaauuuguuauuuug

SEQ ID NO: 1325529 - RNA, 21 nt, Human
gaaaauuuguuauuuugcaac

SEQ ID NO: 1325530 - RNA, 20 nt, Human
cucuuagaugcaguucugaa

SEQ ID NO: 1325531 - RNA, 21 nt, Human
cucuuagaugcaguucugaag

SEQ ID NO: 1325532 - RNA, 22 nt, Human
cugaaaauugaugggauuuggu

SEQ ID NO: 1325533 - RNA, 17 nt, Human
cugaaaauuauuuaaac

SEQ ID NO: 1325534 - RNA, 22 nt, Human
cugaaggaauaaauugcuccuu

SEQ ID NO: 1325535 - RNA, 14 nt, Human
cugaaaauguccuu

SEQ ID NO: 1325536 - RNA, 16 nt, Human
cugaaaauguccuugu

SEQ ID NO: 1325537 - RNA, 17 nt, Human
cugaaaauguccuugug

SEQ ID NO: 1325538 - RNA, 18 nt, Human
cugaaaauguccuuguga

SEQ ID NO: 1325539 - RNA, 19 nt, Human
cugaaaauguccuugugau

SEQ ID NO: 1325540 - RNA, 12 nt, Human
cugaaaaugugc

SEQ ID NO: 1325541 - RNA, 13 nt, Human
cugaaaaugugcu

SEQ ID NO: 1325542 - RNA, 18 nt, Human
cucuuggagaagucucag

SEQ ID NO: 1325543 - RNA, 19 nt, Human
cucuuggagaagucucagc

SEQ ID NO: 1325544 - RNA, 21 nt, Human
cucuuggagaagucucagcua

SEQ ID NO: 1325545 - RNA, 17 nt, Human
cugaaaacacugugcac

SEQ ID NO: 1325546 - RNA, 17 nt, Human
cugaaaacuucauucuu

SEQ ID NO: 1325547 - RNA, 13 nt, Human
cucuuggagaagu

SEQ ID NO: 1325548 - RNA, 15 nt, Human
cucuuggagaagucu

SEQ ID NO: 1325549 - RNA, 22 nt, Human
cucuugcuugugggacuagccu

SEQ ID NO: 1325550 - RNA, 22 nt, Human
cucuugccacugccucuuccuc

SEQ ID NO: 1325551 - RNA, 16 nt, Human
cucuugccacugccuc

SEQ ID NO: 1325552 - RNA, 17 nt, Human
cucuugccacugccucu

SEQ ID NO: 1325553 - RNA, 18 nt, Human
cucuugccacugccucuu

SEQ ID NO: 1325554 - RNA, 19 nt, Human
cucuugccacugccucuuc

SEQ ID NO: 1325555 - RNA, 20 nt, Human
cucuugccacugccucuucc

SEQ ID NO: 1325556 - RNA, 14 nt, Human
cugacagaaggacu

SEQ ID NO: 1325557 - RNA, 21 nt, Human
cugaaggguugacuuuaccca

SEQ ID NO: 1325558 - RNA, 15 nt, Human
cugaagggggcggcc

SEQ ID NO: 1325559 - RNA, 16 nt, Human
cugaagggggcggccu

SEQ ID NO: 1325560 - RNA, 20 nt, Human
cugaagggggcggccuauga

SEQ ID NO: 1325561 - RNA, 22 nt, Human
cugaaggggaaggaaauagcuu

SEQ ID NO: 1325562 - RNA, 23 nt, Human
cugaaggggccaugauggcaaca

SEQ ID NO: 1325563 - RNA, 15 nt, Human
cugaaggggccauga

SEQ ID NO: 1325564 - RNA, 19 nt, Human
cugaaggggccaugauggc

SEQ ID NO: 1325565 - RNA, 17 nt, Human
cugaccucaagugaucu

SEQ ID NO: 1325566 - RNA, 14 nt, Human
cugaccuccgccau

SEQ ID NO: 1325567 - RNA, 16 nt, Human
cugaccuccgccaucc

SEQ ID NO: 1325568 - RNA, 19 nt, Human
cugaccuccgccauccacc

SEQ ID NO: 1325569 - RNA, 17 nt, Human
cugaccuccgccaucca

SEQ ID NO: 1325570 - RNA, 17 nt, Human
cugaccugugagcccag

SEQ ID NO: 1325571 - RNA, 18 nt, Human
cugaccugugagcccagc

SEQ ID NO: 1325572 - RNA, 20 nt, Human
cugaccugugagcccagcug

SEQ ID NO: 1325573 - RNA, 21 nt, Human
cugaccugugagcccagcugg

SEQ ID NO: 1325574 - RNA, 15 nt, Human
cugaccuuaaaugca

SEQ ID NO: 1325575 - RNA, 19 nt, Human
cugaccuuaaaugcaacca

SEQ ID NO: 1325576 - RNA, 21 nt, Human
cucucacuuguuuuauuuaac

SEQ ID NO: 1325577 - RNA, 15 nt, Human
cucucacucccuccc

SEQ ID NO: 1325578 - RNA, 19 nt, Human
cucucaauauucaauaaag

SEQ ID NO: 1325579 - RNA, 21 nt, Human
cucucaauauucaauaaagcu

SEQ ID NO: 1325580 - RNA, 10 nt, Human
cucucaauau

SEQ ID NO: 1325581 - RNA, 18 nt, Human
cucucaauauucaauaaa

SEQ ID NO: 1325582 - RNA, 17 nt, Human
cucucaauaaaauuaua

SEQ ID NO: 1325583 - RNA, 14 nt, Human
cucuauuaugaaug

SEQ ID NO: 1325584 - RNA, 15 nt, Human
cucuauuaugaaugu

SEQ ID NO: 1325585 - RNA, 21 nt, Human
cucuauuaugaaugugaagcc

SEQ ID NO: 1325586 - RNA, 23 nt, Human
cucuauuaugaaugugaagccuu

SEQ ID NO: 1325587 - RNA, 22 nt, Human
cucuauuaugaaugugaagccu

SEQ ID NO: 1325588 - RNA, 20 nt, Human
cucuauucgccacacaguau

SEQ ID NO: 1325589 - RNA, 13 nt, Human
cucuauucuuuaa

SEQ ID NO: 1325590 - RNA, 23 nt, Human
cucuauucgccacacaguauuuu

SEQ ID NO: 1325591 - RNA, 17 nt, Human
cucucaaagcaaauaau

SEQ ID NO: 1325592 - RNA, 14 nt, Human
cucucaacaccaug

SEQ ID NO: 1325593 - RNA, 15 nt, Human
cucucaacaccauga

SEQ ID NO: 1325594 - RNA, 18 nt, Human
cucucaacaccaugauuc

SEQ ID NO: 1325595 - RNA, 22 nt, Human
cucucaacaccaugauuccuuu

SEQ ID NO: 1325596 - RNA, 17 nt, Human
cucucaacacccaguuu

SEQ ID NO: 1325597 - RNA, 15 nt, Human
cucuccccaugaugu

SEQ ID NO: 1325598 - RNA, 18 nt, Human
cucuccccagguccagcu

SEQ ID NO: 1325599 - RNA, 20 nt, Human
cucuccccagguccagcucu

SEQ ID NO: 1325600 - RNA, 23 nt, Human
cucuccccagguccagcucugga

SEQ ID NO: 1325601 - RNA, 24 nt, Human
cucuccgacucacaccacuagccu

SEQ ID NO: 1325602 - RNA, 24 nt, Human
cucuccccagggaagcagcagccu

SEQ ID NO: 1325603 - RNA, 15 nt, Human
cucuccggucucucu

SEQ ID NO: 1325604 - RNA, 15 nt, Human
cucuccuagccccug

SEQ ID NO: 1325605 - RNA, 21 nt, Human
cucuccuaggcauucuggacc

SEQ ID NO: 1325606 - RNA, 22 nt, Human
cucuccuaggcauucuggaccu

SEQ ID NO: 1325607 - RNA, 13 nt, Human
cucucagcccuca

SEQ ID NO: 1325608 - RNA, 21 nt, Human
cucucagcccucacacacccu

SEQ ID NO: 1325609 - RNA, 13 nt, Human
cucuccccagccc

SEQ ID NO: 1325610 - RNA, 15 nt, Human
cucuccccagcccag

SEQ ID NO: 1325611 - RNA, 16 nt, Human
cucuccccagcccaga

SEQ ID NO: 1325612 - RNA, 17 nt, Human
cucuccccagcccagag

SEQ ID NO: 1325613 - RNA, 18 nt, Human
cucuccccagcccagaga

SEQ ID NO: 1325614 - RNA, 19 nt, Human
cucuccccagcccagagac

SEQ ID NO: 1325615 - RNA, 20 nt, Human
cucuccccagcccagagaca

SEQ ID NO: 1325616 - RNA, 20 nt, Human
cucuccccagggaagcagca

SEQ ID NO: 1325617 - RNA, 22 nt, Human
cucuccccagggaagcagcagc

SEQ ID NO: 1325618 - RNA, 15 nt, Human
cucuccccaggucca

SEQ ID NO: 1325619 - RNA, 16 nt, Human
cucuccccagguccag

SEQ ID NO: 1325620 - RNA, 11 nt, Human
cucucuggccu

SEQ ID NO: 1325621 - RNA, 12 nt, Human
cucucuggccuu

SEQ ID NO: 1325622 - RNA, 20 nt, Human
cucucuggaagccccugggc

SEQ ID NO: 1325623 - RNA, 12 nt, Human
cucucuggagaa

SEQ ID NO: 1325624 - RNA, 17 nt, Human
cucugaagccacaaaua

SEQ ID NO: 1325625 - RNA, 19 nt, Human
cucugaagccacaaauagg

SEQ ID NO: 1325626 - RNA, 13 nt, Human
cucucuggccuuc

SEQ ID NO: 1325627 - RNA, 19 nt, Human
cucugaagaacucucugga

SEQ ID NO: 1325628 - RNA, 18 nt, Human
cuccguccaggagccugg

SEQ ID NO: 1325629 - RNA, 19 nt, Human
cuccguccaggagccuggc

SEQ ID NO: 1325630 - RNA, 20 nt, Human
cuccguccaggagccugugc

SEQ ID NO: 1325631 - RNA, 22 nt, Human
cuccguccaggagccugugccu

SEQ ID NO: 1325632 - RNA, 12 nt, Human
cuccguguggga

SEQ ID NO: 1325633 - RNA, 14 nt, Human
cuccgugugggaga

SEQ ID NO: 1325634 - RNA, 15 nt, Human
cuccguuagcuccug

SEQ ID NO: 1325635 - RNA, 16 nt, Human
cuccguuagcuccugu

SEQ ID NO: 1325636 - RNA, 18 nt, Human
cuccgugugggagaccgg

SEQ ID NO: 1325637 - RNA, 20 nt, Human
cucgggauuaguacacacuu

SEQ ID NO: 1325638 - RNA, 15 nt, Human
cucuuagaugcaguu

SEQ ID NO: 1325639 - RNA, 22 nt, Human
cucuguauuugaaucagccuac

SEQ ID NO: 1325640 - RNA, 20 nt, Human
cucugucacuccucaugccu

SEQ ID NO: 1325641 - RNA, 13 nt, Human
cucuguagccuaa

SEQ ID NO: 1325642 - RNA, 22 nt, Human
cucuguaucaggacccagagga

SEQ ID NO: 1325643 - RNA, 18 nt, Human
cucuguaauugaauauua

SEQ ID NO: 1325644 - RNA, 19 nt, Human
cucuguaauugaauauuau

SEQ ID NO: 1325645 - RNA, 14 nt, Human
cucuguaauugcaa

SEQ ID NO: 1325646 - RNA, 15 nt, Human
cucuguaauugcaaa

SEQ ID NO: 1325647 - RNA, 16 nt, Human
cucuguaauugcaaaa

SEQ ID NO: 1325648 - RNA, 17 nt, Human
cucugguuguuucuguu

SEQ ID NO: 1325649 - RNA, 18 nt, Human
cucugguuguuucuguuc

SEQ ID NO: 1325650 - RNA, 20 nt, Human
cucugguuguuucuguucca

SEQ ID NO: 1325651 - RNA, 23 nt, Human
cucugguuguuucuguuccaaau

SEQ ID NO: 1325652 - RNA, 22 nt, Human
cucugguuguuucuguuccaaa

SEQ ID NO: 1325653 - RNA, 15 nt, Human
cucuguaaagcuaaa

SEQ ID NO: 1325654 - RNA, 21 nt, Human
cucuguaaagcuaaaauaaag

SEQ ID NO: 1325655 - RNA, 23 nt, Human
cucuguaaguagaugcauuuggg

SEQ ID NO: 1325656 - RNA, 14 nt, Human
cucugguuccuccc

SEQ ID NO: 1325657 - RNA, 20 nt, Human
cucugcacuacugacaugug

SEQ ID NO: 1325658 - RNA, 22 nt, Human
cucugcacuacugacauguggg

SEQ ID NO: 1325659 - RNA, 19 nt, Human
cucugcacucccaccugac

SEQ ID NO: 1325660 - RNA, 20 nt, Human
cucugcacucccaccugaca

SEQ ID NO: 1325661 - RNA, 16 nt, Human
cucugcacuacugaca

SEQ ID NO: 1325662 - RNA, 18 nt, Human
cucugcacuacugacaug

SEQ ID NO: 1325663 - RNA, 23 nt, Human
cucugcacucccaccugacacac

SEQ ID NO: 1325664 - RNA, 22 nt, Human
cucugcgugucaccugugcuuc

SEQ ID NO: 1325665 - RNA, 18 nt, Human
cucugcuauuaggccagc

SEQ ID NO: 1325666 - RNA, 18 nt, Human
cuccaacccuagcaaaag

SEQ ID NO: 1325667 - RNA, 23 nt, Human
cuccaacaccaagcacagcagcc

SEQ ID NO: 1325668 - RNA, 21 nt, Human
cuccaacaccaccucuccaga

SEQ ID NO: 1325669 - RNA, 19 nt, Human
cuccaacaucacagcccag

SEQ ID NO: 1325670 - RNA, 20 nt, Human
cuccaacccaaccucauccu

SEQ ID NO: 1325671 - RNA, 16 nt, Human
cuccaaagucucugga

SEQ ID NO: 1325672 - RNA, 12 nt, Human
cuccaaagucau

SEQ ID NO: 1325673 - RNA, 17 nt, Human
cuccaaagucauaauug

SEQ ID NO: 1325674 - RNA, 19 nt, Human
cuccaaagucauaauugca

SEQ ID NO: 1325675 - RNA, 20 nt, Human
cuccaaagucauaauugcau

SEQ ID NO: 1325676 - RNA, 21 nt, Human
cuccaaagucauaauugcauu

SEQ ID NO: 1325677 - RNA, 23 nt, Human
cuccaaagucauaauugcauuga

SEQ ID NO: 1325678 - RNA, 12 nt, Human
cuccaacaauaa

SEQ ID NO: 1325679 - RNA, 15 nt, Human
cuccaacaccaagca

SEQ ID NO: 1325680 - RNA, 16 nt, Human
cuccaacaccaagcac

SEQ ID NO: 1325681 - RNA, 18 nt, Human
cuccaacaccaagcacag

SEQ ID NO: 1325682 - RNA, 22 nt, Human
cuccaacaccaagcacagcagc

SEQ ID NO: 1325683 - RNA, 14 nt, Human
cucauggccccucu

SEQ ID NO: 1325684 - RNA, 18 nt, Human
cucaugccucagccuccu

SEQ ID NO: 1325685 - RNA, 20 nt, Human
cucaugccucagccuccuga

SEQ ID NO: 1325686 - RNA, 13 nt, Human
cucaugaauguaa

SEQ ID NO: 1325687 - RNA, 14 nt, Human
cucaugaauguaaa

SEQ ID NO: 1325688 - RNA, 12 nt, Human
cucagucucucu

SEQ ID NO: 1325689 - RNA, 17 nt, Human
cucagucucucuucucu

SEQ ID NO: 1325690 - RNA, 19 nt, Human
cucagucucucuucucucc

SEQ ID NO: 1325691 - RNA, 13 nt, Human
cucagucucugag

SEQ ID NO: 1325692 - RNA, 14 nt, Human
cucagucucugagc

SEQ ID NO: 1325693 - RNA, 20 nt, Human
cucagucucugagcagugaa

SEQ ID NO: 1325694 - RNA, 22 nt, Human
cucaguggcccauggcauuuua

SEQ ID NO: 1325695 - RNA, 16 nt, Human
cucaguggggcagagg

SEQ ID NO: 1325696 - RNA, 16 nt, Human
cucaucuuucuuccaa

SEQ ID NO: 1325697 - RNA, 14 nt, Human
cucaucuuuuuacu

SEQ ID NO: 1325698 - RNA, 12 nt, Human
cucaugaaccuc

SEQ ID NO: 1325699 - RNA, 21 nt, Human
cucaugaaccucaagcugcau

SEQ ID NO: 1325700 - RNA, 12 nt, Human
cucaugaaugua

SEQ ID NO: 1325701 - RNA, 20 nt, Human
cucaguguccucaggggccu

SEQ ID NO: 1325702 - RNA, 17 nt, Human
cucaucuucuucaccau

SEQ ID NO: 1325703 - RNA, 14 nt, Human
cucaucuuucccuc

SEQ ID NO: 1325704 - RNA, 15 nt, Human
cucaucuuucccucc

SEQ ID NO: 1325705 - RNA, 16 nt, Human
cucaucuuucccuccu

SEQ ID NO: 1325706 - RNA, 17 nt, Human
cucaucuuucccuccuu

SEQ ID NO: 1325707 - RNA, 18 nt, Human
cucaucuuucccuccuug

SEQ ID NO: 1325708 - RNA, 19 nt, Human
cucaucuuucccuccuugg

SEQ ID NO: 1325709 - RNA, 20 nt, Human
cucaucuuucccuccuuggu

SEQ ID NO: 1325710 - RNA, 18 nt, Human
cucagccucccaaguaac

SEQ ID NO: 1325711 - RNA, 17 nt, Human
cuaucccggcugcccuu

SEQ ID NO: 1325712 - RNA, 15 nt, Human
cucagccucccaaag

SEQ ID NO: 1325713 - RNA, 17 nt, Human
cucagccucccaaagug

SEQ ID NO: 1325714 - RNA, 15 nt, Human
cuaucccggcugccc

SEQ ID NO: 1325715 - RNA, 16 nt, Human
cuaucccggcugcccu

SEQ ID NO: 1325716 - RNA, 14 nt, Human
cucagcgaaugaau

SEQ ID NO: 1325717 - RNA, 22 nt, Human
cucagccuugccagagauccaa

SEQ ID NO: 1325718 - RNA, 13 nt, Human
cucaggccagagc

SEQ ID NO: 1325719 - RNA, 16 nt, Human
cucaggccagagccaa

SEQ ID NO: 1325720 - RNA, 17 nt, Human
cucaggccagagccaag

SEQ ID NO: 1325721 - RNA, 18 nt, Human
cucaggccagagccaagg

SEQ ID NO: 1325722 - RNA, 12 nt, Human
cucagccuccug

SEQ ID NO: 1325723 - RNA, 13 nt, Human
cucagccuccuga

SEQ ID NO: 1325724 - RNA, 15 nt, Human
cucagccuucagaca

SEQ ID NO: 1325725 - RNA, 16 nt, Human
cucagccuucagacag

SEQ ID NO: 1325726 - RNA, 17 nt, Human
cucagccuucagacaga

SEQ ID NO: 1325727 - RNA, 19 nt, Human
cucagccuucagacagaga

SEQ ID NO: 1325728 - RNA, 15 nt, Human
cucagccuugccaga

SEQ ID NO: 1325729 - RNA, 16 nt, Human
cucagccuugccagag

SEQ ID NO: 1325730 - RNA, 17 nt, Human
cucagccuugccagaga

SEQ ID NO: 1325731 - RNA, 18 nt, Human
cucagccuugccagagau

SEQ ID NO: 1325732 - RNA, 19 nt, Human
cucagccuugccagagauc

SEQ ID NO: 1325733 - RNA, 20 nt, Human
cucagccuugccagagaucc

SEQ ID NO: 1325734 - RNA, 21 nt, Human
cucagccuugccagagaucca

SEQ ID NO: 1325735 - RNA, 20 nt, Human
cucaggcccccaccuggcuc

SEQ ID NO: 1325736 - RNA, 21 nt, Human
cucaggcccccaccuggcuca

SEQ ID NO: 1325737 - RNA, 23 nt, Human
cuccagguauucguuaucuaaua

SEQ ID NO: 1325738 - RNA, 19 nt, Human
cuccaggguggcagcaaca

SEQ ID NO: 1325739 - RNA, 16 nt, Human
cuccagggugugugcu

SEQ ID NO: 1325740 - RNA, 22 nt, Human
cuccaggggcugcuuccuccug

SEQ ID NO: 1325741 - RNA, 23 nt, Human
cuccaggggcugcuuccuccugg

SEQ ID NO: 1325742 - RNA, 13 nt, Human
cuccaaccugcaa

SEQ ID NO: 1325743 - RNA, 14 nt, Human
cuccagaccccugg

SEQ ID NO: 1325744 - RNA, 15 nt, Human
cuccgcucuguagug

SEQ ID NO: 1325745 - RNA, 16 nt, Human
cuccgccuggccuggc

SEQ ID NO: 1325746 - RNA, 12 nt, Human
cucccacccucu

SEQ ID NO: 1325747 - RNA, 14 nt, Human
cucccacccucuuc

SEQ ID NO: 1325748 - RNA, 15 nt, Human
cucccacccucuucc

SEQ ID NO: 1325749 - RNA, 16 nt, Human
cucccacccucuuccu

SEQ ID NO: 1325750 - RNA, 21 nt, Human
cucccacccucuuccuacugg

SEQ ID NO: 1325751 - RNA, 18 nt, Human
cucccaccuagcagcacc

SEQ ID NO: 1325752 - RNA, 20 nt, Human
cucccacccucuuccuacug

SEQ ID NO: 1325753 - RNA, 21 nt, Human
cuccagugagacagcucugca

SEQ ID NO: 1325754 - RNA, 17 nt, Human
cucccacccggcugcag

SEQ ID NO: 1325755 - RNA, 19 nt, Human
cucccacccggcugcagag

SEQ ID NO: 1325756 - RNA, 17 nt, Human
cuccccgauaaagaaug

SEQ ID NO: 1325757 - RNA, 12 nt, Human
cuccccucagcc

SEQ ID NO: 1325758 - RNA, 13 nt, Human
cuccccucagccu

SEQ ID NO: 1325759 - RNA, 15 nt, Human
cuccccucagccucu

SEQ ID NO: 1325760 - RNA, 16 nt, Human
cuccccucagccucuc

SEQ ID NO: 1325761 - RNA, 21 nt, Human
cuccccucagccucuccccug

SEQ ID NO: 1325762 - RNA, 20 nt, Human
cuccccuccaaaaugugccu

SEQ ID NO: 1325763 - RNA, 12 nt, Human
cuccccuccagc

SEQ ID NO: 1325764 - RNA, 13 nt, Human
cuccccuccagcu

SEQ ID NO: 1325765 - RNA, 14 nt, Human
cuccccuccauccc

SEQ ID NO: 1325766 - RNA, 15 nt, Human
cuccccuccaucccu

SEQ ID NO: 1325767 - RNA, 16 nt, Human
cuccccuccaucccug

SEQ ID NO: 1325768 - RNA, 19 nt, Human
cuccccuccaucccuggcc

SEQ ID NO: 1325769 - RNA, 23 nt, Human
cuccccuccaucccuggcccccu

SEQ ID NO: 1325770 - RNA, 16 nt, Human
cuccccuccccaacug

SEQ ID NO: 1325771 - RNA, 15 nt, Human
cuccccuccccaacu

SEQ ID NO: 1325772 - RNA, 15 nt, Human
cucccuccgccccca

SEQ ID NO: 1325773 - RNA, 16 nt, Human
cucccuccgcccccag

SEQ ID NO: 1325774 - RNA, 18 nt, Human
cucccuccgcccccaggu

SEQ ID NO: 1325775 - RNA, 20 nt, Human
cucccuccgcccccagguag

SEQ ID NO: 1325776 - RNA, 19 nt, Human
cucccuccuaaccuagaga

SEQ ID NO: 1325777 - RNA, 13 nt, Human
cucccuccucugc

SEQ ID NO: 1325778 - RNA, 12 nt, Human
cucccuccucca

SEQ ID NO: 1325779 - RNA, 14 nt, Human
cucccuccucugcc

SEQ ID NO: 1325780 - RNA, 20 nt, Human
cucccugcagaggggcugag

SEQ ID NO: 1325781 - RNA, 12 nt, Human
cucccugagaug

SEQ ID NO: 1325782 - RNA, 19 nt, Human
cuaaacuggagacugugug

SEQ ID NO: 1325783 - RNA, 23 nt, Human
cuaaacugcccccucugcccugc

SEQ ID NO: 1325784 - RNA, 13 nt, Human
cgugugcaggagc

SEQ ID NO: 1325785 - RNA, 12 nt, Human
cuaaacuggaga

SEQ ID NO: 1325786 - RNA, 13 nt, Human
cuaaacuggagac

SEQ ID NO: 1325787 - RNA, 14 nt, Human
cuaaacuggagacu

SEQ ID NO: 1325788 - RNA, 15 nt, Human
cuaaacuggagacug

SEQ ID NO: 1325789 - RNA, 17 nt, Human
cuaaacuggagacugug

SEQ ID NO: 1325790 - RNA, 16 nt, Human
cuaaacuuccccaucu

SEQ ID NO: 1325791 - RNA, 20 nt, Human
cuaaacuuccccaucuucua

SEQ ID NO: 1325792 - RNA, 14 nt, Human
cgugucuggcacag

SEQ ID NO: 1325793 - RNA, 21 nt, Human
cgugucuggcacagccuggcu

SEQ ID NO: 1325794 - RNA, 22 nt, Human
cuaaacugcccccucugcccug

SEQ ID NO: 1325795 - RNA, 22 nt, Human
cgugugagaagugaaugcuggg

SEQ ID NO: 1325796 - RNA, 21 nt, Human
cgugugagaagugaaugcugg

SEQ ID NO: 1325797 - RNA, 23 nt, Human
cgugugagaagugaaugcuggga

SEQ ID NO: 1325798 - RNA, 13 nt, Human
cgugagaccugcc

SEQ ID NO: 1325799 - RNA, 14 nt, Human
cgugagaccugccc

SEQ ID NO: 1325800 - RNA, 16 nt, Human
cgugagaccugccccu

SEQ ID NO: 1325801 - RNA, 23 nt, Human
cgugagccaccgugccuggccac

SEQ ID NO: 1325802 - RNA, 20 nt, Human
cgugagcauguuuggaaggg

SEQ ID NO: 1325803 - RNA, 15 nt, Human
cguggggugugcugg

SEQ ID NO: 1325804 - RNA, 17 nt, Human
cguggggugugcuggga

SEQ ID NO: 1325805 - RNA, 18 nt, Human
cguggggugugcugggag

SEQ ID NO: 1325806 - RNA, 13 nt, Human
cgugggugugugc

SEQ ID NO: 1325807 - RNA, 20 nt, Human
cgugaccggacuuuucugca

SEQ ID NO: 1325808 - RNA, 22 nt, Human
cgugaccugcuaggccagagcc

SEQ ID NO: 1325809 - RNA, 15 nt, Human
cgugacgucugggug

SEQ ID NO: 1325810 - RNA, 20 nt, Human
cgugacgucuggguggcccu

SEQ ID NO: 1325811 - RNA, 13 nt, Human
cggcucucaccug

SEQ ID NO: 1325812 - RNA, 16 nt, Human
cggcucucaccuggcc

SEQ ID NO: 1325813 - RNA, 18 nt, Human
cggcucucaccuggcccu

SEQ ID NO: 1325814 - RNA, 14 nt, Human
cggcucugucccca

SEQ ID NO: 1325815 - RNA, 15 nt, Human
cggcucuguccccag

SEQ ID NO: 1325816 - RNA, 16 nt, Human
cggcucuguccccagc

SEQ ID NO: 1325817 - RNA, 19 nt, Human
cggcucuguccccagccug

SEQ ID NO: 1325818 - RNA, 17 nt, Human
cggcucuguccccagcc

SEQ ID NO: 1325819 - RNA, 11 nt, Human
cggcugaccau

SEQ ID NO: 1325820 - RNA, 14 nt, Human
cggcugaccaugcu

SEQ ID NO: 1325821 - RNA, 15 nt, Human
cggcugaccaugcuc

SEQ ID NO: 1325822 - RNA, 16 nt, Human
cggcugaccaugcuca

SEQ ID NO: 1325823 - RNA, 22 nt, Human
cggcugaccaugcucaucugcu

SEQ ID NO: 1325824 - RNA, 23 nt, Human
cggcugaccaugcucaucugcug

SEQ ID NO: 1325825 - RNA, 16 nt, Human
cuaagaaacuuaaauu

SEQ ID NO: 1325826 - RNA, 22 nt, Human
cuaagaaacauuuauauugaua

SEQ ID NO: 1325827 - RNA, 19 nt, Human
cuaagaaacauuuauauug

SEQ ID NO: 1325828 - RNA, 20 nt, Human
cuaagaaacauuuauauuga

SEQ ID NO: 1325829 - RNA, 21 nt, Human
cuaagaaacauuuauauugau

SEQ ID NO: 1325830 - RNA, 12 nt, Human
cuaagaaagaac

SEQ ID NO: 1325831 - RNA, 15 nt, Human
cuaagaaagaacacg

SEQ ID NO: 1325832 - RNA, 21 nt, Human
cuaaccuugccugguacagua

SEQ ID NO: 1325833 - RNA, 13 nt, Human
cuaaccuuuacau

SEQ ID NO: 1325834 - RNA, 21 nt, Human
cuaaccuuuacaugaggacuc

SEQ ID NO: 1325835 - RNA, 21 nt, Human
cuaacuuacaaagauucucua

SEQ ID NO: 1325836 - RNA, 20 nt, Human
cuaacgaaguauccuucagc

SEQ ID NO: 1325837 - RNA, 18 nt, Human
cuaaagauucuauaguuc

SEQ ID NO: 1325838 - RNA, 20 nt, Human
cuaaagauucuauaguucua

SEQ ID NO: 1325839 - RNA, 13 nt, Human
cuaaccuugccug

SEQ ID NO: 1325840 - RNA, 16 nt, Human
cuaaccuugccuggua

SEQ ID NO: 1325841 - RNA, 17 nt, Human
cuaaccuugccugguac

SEQ ID NO: 1325842 - RNA, 20 nt, Human
cuaaccuugccugguacagu

SEQ ID NO: 1325843 - RNA, 12 nt, Human
cuaaccugccga

SEQ ID NO: 1325844 - RNA, 23 nt, Human
cuaaagauggaguuucuaagguc

SEQ ID NO: 1325845 - RNA, 12 nt, Human
cuaaagauucua

SEQ ID NO: 1325846 - RNA, 14 nt, Human
cuaaagauucuaua

SEQ ID NO: 1325847 - RNA, 17 nt, Human
cuaaagauucuauaguu

SEQ ID NO: 1325848 - RNA, 19 nt, Human
cuaaccugccgagagucca

SEQ ID NO: 1325849 - RNA, 21 nt, Human
cuaaccugccgagaguccauc

SEQ ID NO: 1325850 - RNA, 17 nt, Human
cuaaagauggaguuucu

SEQ ID NO: 1325851 - RNA, 18 nt, Human
cuaaagauggaguuucua

SEQ ID NO: 1325852 - RNA, 19 nt, Human
cuaaagauggaguuucuaa

SEQ ID NO: 1325853 - RNA, 20 nt, Human
cuaaagauggaguuucuaag

SEQ ID NO: 1325854 - RNA, 21 nt, Human
cuaaagauggaguuucuaagg

SEQ ID NO: 1325855 - RNA, 18 nt, Human
cuaccucuccagccucag

SEQ ID NO: 1325856 - RNA, 18 nt, Human
cuacaugagguacugaga

SEQ ID NO: 1325857 - RNA, 14 nt, Human
cuacaugagaacaa

SEQ ID NO: 1325858 - RNA, 17 nt, Human
cuacaugagaacaaaca

SEQ ID NO: 1325859 - RNA, 15 nt, Human
cuacaugagguacug

SEQ ID NO: 1325860 - RNA, 15 nt, Human
cuacaugaaacagaa

SEQ ID NO: 1325861 - RNA, 16 nt, Human
cuacaugaaacagaaa

SEQ ID NO: 1325862 - RNA, 18 nt, Human
cuacaugaaacagaaaca

SEQ ID NO: 1325863 - RNA, 13 nt, Human
cuacaugagaaca

SEQ ID NO: 1325864 - RNA, 19 nt, Human
cuacauaacuaauacagcu

SEQ ID NO: 1325865 - RNA, 15 nt, Human
cuacauaauuuaguu

SEQ ID NO: 1325866 - RNA, 17 nt, Human
cuacaguuuuaacugug

SEQ ID NO: 1325867 - RNA, 18 nt, Human
cuacaguuuuaacugugg

SEQ ID NO: 1325868 - RNA, 20 nt, Human
cuacaguuuuaacuguggau

SEQ ID NO: 1325869 - RNA, 19 nt, Human
cuacaguuuuaacugugga

SEQ ID NO: 1325870 - RNA, 13 nt, Human
cuaauuuuuuugu

SEQ ID NO: 1325871 - RNA, 16 nt, Human
cuaauuuuuuuguauu

SEQ ID NO: 1325872 - RNA, 20 nt, Human
cuaauuuuuuuguauuuuag

SEQ ID NO: 1325873 - RNA, 21 nt, Human
cuaauuuuuuuguauuuuagc

SEQ ID NO: 1325874 - RNA, 20 nt, Human
cuaauuuuuguauuuuuagu

SEQ ID NO: 1325875 - RNA, 13 nt, Human
cuaauuuuuguau

SEQ ID NO: 1325876 - RNA, 23 nt, Human
cuaauuuuuguauuuuuaguaga

SEQ ID NO: 1325877 - RNA, 14 nt, Human
cuaauuuuuuguug

SEQ ID NO: 1325878 - RNA, 16 nt, Human
cuaauuuuuuguuguu

SEQ ID NO: 1325879 - RNA, 11 nt, Human
cuaauuuuugu

SEQ ID NO: 1325880 - RNA, 21 nt, Human
cuaauuuuuauuuuugcugag

SEQ ID NO: 1325881 - RNA, 14 nt, Human
cuaauuuuuguaau

SEQ ID NO: 1325882 - RNA, 20 nt, Human
cuaauuuuuguaauuuuagu

SEQ ID NO: 1325883 - RNA, 12 nt, Human
cuaauuuauaaa

SEQ ID NO: 1325884 - RNA, 22 nt, Human
cuaauuuuuaagaauugaguaa

SEQ ID NO: 1325885 - RNA, 22 nt, Human
cuaauuuuuauuaauuuuaguu

SEQ ID NO: 1325886 - RNA, 17 nt, Human
cuaauuuuuauuaauuu

SEQ ID NO: 1325887 - RNA, 18 nt, Human
cuaauuuuuauuuuugcu

SEQ ID NO: 1325888 - RNA, 16 nt, Human
cuacaaccuccgccuc

SEQ ID NO: 1325889 - RNA, 15 nt, Human
cuacaagacacagug

SEQ ID NO: 1325890 - RNA, 21 nt, Human
cuacaaagguuuaaaugaaca

SEQ ID NO: 1325891 - RNA, 22 nt, Human
cuacaaagguuuaaaugaacaa

SEQ ID NO: 1325892 - RNA, 15 nt, Human
cuacaaccaauggaa

SEQ ID NO: 1325893 - RNA, 15 nt, Human
cuacaaagguuuaaa

SEQ ID NO: 1325894 - RNA, 17 nt, Human
cuacaaagguuuaaaug

SEQ ID NO: 1325895 - RNA, 18 nt, Human
cuacaaagguuuaaauga

SEQ ID NO: 1325896 - RNA, 19 nt, Human
cuacaaagguuuaaaugaa

SEQ ID NO: 1325897 - RNA, 20 nt, Human
cuacaaagguuuaaaugaac

SEQ ID NO: 1325898 - RNA, 10 nt, Human
cuacaaauca

SEQ ID NO: 1325899 - RNA, 16 nt, Human
cuaagucuuuccauug

SEQ ID NO: 1325900 - RNA, 13 nt, Human
cuaagugauauaa

SEQ ID NO: 1325901 - RNA, 11 nt, Human
cuaauugcuua

SEQ ID NO: 1325902 - RNA, 12 nt, Human
cuaauugcuuau

SEQ ID NO: 1325903 - RNA, 14 nt, Human
cuaagugauauaaa

SEQ ID NO: 1325904 - RNA, 16 nt, Human
cuaagugauauaaauc

SEQ ID NO: 1325905 - RNA, 13 nt, Human
cuaauugcuuauu

SEQ ID NO: 1325906 - RNA, 14 nt, Human
cuaauugcuuauuu

SEQ ID NO: 1325907 - RNA, 18 nt, Human
cuaauugcuuauuuauug

SEQ ID NO: 1325908 - RNA, 22 nt, Human
cuaauuggcaugaaggugucau

SEQ ID NO: 1325909 - RNA, 11 nt, Human
cuaauuuaaca

SEQ ID NO: 1325910 - RNA, 23 nt, Human
cuaagugaaauaagccagacauc

SEQ ID NO: 1325911 - RNA, 20 nt, Human
cuaagugaaauaagccagac

SEQ ID NO: 1325912 - RNA, 14 nt, Human
cuaagucuuuccau

SEQ ID NO: 1325913 - RNA, 23 nt, Human
cuaguugaucagcuuauugucua

SEQ ID NO: 1325914 - RNA, 22 nt, Human
cuaguucuuuguucauagccca

SEQ ID NO: 1325915 - RNA, 21 nt, Human
cuaguucuucaucccacucca

SEQ ID NO: 1325916 - RNA, 18 nt, Human
cuaguuccccuguuuauu

SEQ ID NO: 1325917 - RNA, 16 nt, Human
cuaguuccccuguuua

SEQ ID NO: 1325918 - RNA, 17 nt, Human
cuauaaccaaaugaaau

SEQ ID NO: 1325919 - RNA, 19 nt, Human
cuauaaccaaaugaaauau

SEQ ID NO: 1325920 - RNA, 16 nt, Human
cuauaaccagacacau

SEQ ID NO: 1325921 - RNA, 17 nt, Human
cuauaagaacuuugagc

SEQ ID NO: 1325922 - RNA, 20 nt, Human
cuagccucaggggucugagc

SEQ ID NO: 1325923 - RNA, 13 nt, Human
cuagccucagggg

SEQ ID NO: 1325924 - RNA, 19 nt, Human
cuagccugcauugagcuug

SEQ ID NO: 1325925 - RNA, 17 nt, Human
cuagcccuccuuuuucc

SEQ ID NO: 1325926 - RNA, 18 nt, Human
cuagcccuccuuuuucca

SEQ ID NO: 1325927 - RNA, 19 nt, Human
cuagcccuccuuuuuccaa

SEQ ID NO: 1325928 - RNA, 13 nt, Human
cuagcccucucac

SEQ ID NO: 1325929 - RNA, 18 nt, Human
cuagcccucucacauuua

SEQ ID NO: 1325930 - RNA, 19 nt, Human
cuagcccucucacauuuau

SEQ ID NO: 1325931 - RNA, 13 nt, Human
cuagggaucccuc

SEQ ID NO: 1325932 - RNA, 17 nt, Human
cuagggaucccucaucu

SEQ ID NO: 1325933 - RNA, 23 nt, Human
cuagggaucccucaucugucccu

SEQ ID NO: 1325934 - RNA, 16 nt, Human
cuagggccaagcccag

SEQ ID NO: 1325935 - RNA, 17 nt, Human
cuagggccaagcccagc

SEQ ID NO: 1325936 - RNA, 18 nt, Human
cuagggccaagcccagca

SEQ ID NO: 1325937 - RNA, 19 nt, Human
cuaccugacacucccuugg

SEQ ID NO: 1325938 - RNA, 20 nt, Human
cuaccugacacucccuuggg

SEQ ID NO: 1325939 - RNA, 14 nt, Human
cuaccugagcuaaa

SEQ ID NO: 1325940 - RNA, 14 nt, Human
cuagaacacaggca

SEQ ID NO: 1325941 - RNA, 19 nt, Human
cuagaacacaggcaaaauc

SEQ ID NO: 1325942 - RNA, 21 nt, Human
cuagaacacaggcaaaauccu

SEQ ID NO: 1325943 - RNA, 22 nt, Human
cuagaacacaggcaaaauccuu

SEQ ID NO: 1325944 - RNA, 19 nt, Human
cuagaacucccuuucaaca

SEQ ID NO: 1325945 - RNA, 18 nt, Human
cuagaacucccuuucaac

SEQ ID NO: 1325946 - RNA, 17 nt, Human
cuagaacucccuuucaa

SEQ ID NO: 1325947 - RNA, 16 nt, Human
cuagaacucccuuuca

SEQ ID NO: 1325948 - RNA, 13 nt, Human
cuagcaguggcag

SEQ ID NO: 1325949 - RNA, 15 nt, Human
cuagcaguggcaggc

SEQ ID NO: 1325950 - RNA, 18 nt, Human
cuagcaguggcaggcaga

SEQ ID NO: 1325951 - RNA, 20 nt, Human
cuagcaguggcaggcagagg

SEQ ID NO: 1325952 - RNA, 21 nt, Human
cuagcaguggcaggcagaggc

SEQ ID NO: 1325953 - RNA, 15 nt, Human
cuagccccuggggug

SEQ ID NO: 1325954 - RNA, 18 nt, Human
cuagccaaaccucaccaa

SEQ ID NO: 1325955 - RNA, 20 nt, Human
cuagccaaaccucaccaacu

SEQ ID NO: 1325956 - RNA, 21 nt, Human
cuagccaaaccucaccaacuc

SEQ ID NO: 1325957 - RNA, 22 nt, Human
cuagcauuguaaaauuauuuca

SEQ ID NO: 1325958 - RNA, 23 nt, Human
cuagcauuguaaaauuauuucau

SEQ ID NO: 1325959 - RNA, 19 nt, Human
cuagcauuucccaacacaa

SEQ ID NO: 1325960 - RNA, 16 nt, Human
cuagccaaaccaggac

SEQ ID NO: 1325961 - RNA, 20 nt, Human
cuagccaaaccaggacccug

SEQ ID NO: 1325962 - RNA, 13 nt, Human
cuagccaaaccuc

SEQ ID NO: 1325963 - RNA, 17 nt, Human
cuagccaaaccucacca

SEQ ID NO: 1325964 - RNA, 17 nt, Human
cggagucaaaaauuaaa

SEQ ID NO: 1325965 - RNA, 22 nt, Human
cggagguugggugggccggcuu

SEQ ID NO: 1325966 - RNA, 16 nt, Human
cggagguguggagccg

SEQ ID NO: 1325967 - RNA, 18 nt, Human
cggaggggccuggcagcc

SEQ ID NO: 1325968 - RNA, 17 nt, Human
cggcucacugcauccuc

SEQ ID NO: 1325969 - RNA, 17 nt, Human
cggcggccccuagcgcu

SEQ ID NO: 1325970 - RNA, 23 nt, Human
cggcuccucgagaucccaacacu

SEQ ID NO: 1325971 - RNA, 21 nt, Human
cggcucacugcauccuccgcc

SEQ ID NO: 1325972 - RNA, 13 nt, Human
cggcuccucaggg

SEQ ID NO: 1325973 - RNA, 14 nt, Human
cggcuccucaggga

SEQ ID NO: 1325974 - RNA, 20 nt, Human
cggcuccucagggacucagg

SEQ ID NO: 1325975 - RNA, 11 nt, Human
cggcuccuggu

SEQ ID NO: 1325976 - RNA, 19 nt, Human
cggcuccuggucaccuagg

SEQ ID NO: 1325977 - RNA, 13 nt, Human
cggcuccugguca

SEQ ID NO: 1325978 - RNA, 16 nt, Human
cggcucggaggaagcc

SEQ ID NO: 1325979 - RNA, 20 nt, Human
cggcucggaggaagccccca

SEQ ID NO: 1325980 - RNA, 11 nt, Human
cggagccacuc

SEQ ID NO: 1325981 - RNA, 13 nt, Human
cggagccacuccu

SEQ ID NO: 1325982 - RNA, 17 nt, Human
cggagccacuccucuga

SEQ ID NO: 1325983 - RNA, 18 nt, Human
cggagccacuccucugac

SEQ ID NO: 1325984 - RNA, 21 nt, Human
cggagccacuccucugacuca

SEQ ID NO: 1325985 - RNA, 15 nt, Human
cgccggaucugaggg

SEQ ID NO: 1325986 - RNA, 12 nt, Human
cgccgccucuuu

SEQ ID NO: 1325987 - RNA, 15 nt, Human
cgccgucuccagggg

SEQ ID NO: 1325988 - RNA, 19 nt, Human
cgcaggcuggcccugcccu

SEQ ID NO: 1325989 - RNA, 20 nt, Human
cgcaggcuggcccugcccug

SEQ ID NO: 1325990 - RNA, 14 nt, Human
cgcaggcuggcccu

SEQ ID NO: 1325991 - RNA, 15 nt, Human
cgcaggcuggcccug

SEQ ID NO: 1325992 - RNA, 17 nt, Human
cgcaggcuggcccugcc

SEQ ID NO: 1325993 - RNA, 18 nt, Human
cgcaggcuggcccugccc

SEQ ID NO: 1325994 - RNA, 21 nt, Human
cgcaggcuggcccugcccugg

SEQ ID NO: 1325995 - RNA, 14 nt, Human
cgaguggagucugc

SEQ ID NO: 1325996 - RNA, 19 nt, Human
cgaguggagucugccaccc

SEQ ID NO: 1325997 - RNA, 18 nt, Human
cgaguggagucugccacc

SEQ ID NO: 1325998 - RNA, 16 nt, Human
cgaccugccucggccu

SEQ ID NO: 1325999 - RNA, 13 nt, Human
cgaccaucugauu

SEQ ID NO: 1326000 - RNA, 13 nt, Human
cgaccgccccagu

SEQ ID NO: 1326001 - RNA, 13 nt, Human
cgaccgcccccuc

SEQ ID NO: 1326002 - RNA, 13 nt, Human
ccuuuuucauuua

SEQ ID NO: 1326003 - RNA, 21 nt, Human
ccuuuuggguuucugcccugc

SEQ ID NO: 1326004 - RNA, 12 nt, Human
ccuuuugucucu

SEQ ID NO: 1326005 - RNA, 15 nt, Human
ccuuuuggguuucug

SEQ ID NO: 1326006 - RNA, 18 nt, Human
ccuuuuucugcacuauau

SEQ ID NO: 1326007 - RNA, 21 nt, Human
ccuuuuucugcacuauaugca

SEQ ID NO: 1326008 - RNA, 17 nt, Human
ccuuuuucugcacuaua

SEQ ID NO: 1326009 - RNA, 15 nt, Human
ccuuuuucugcacua

SEQ ID NO: 1326010 - RNA, 14 nt, Human
ccuuuuucugcacu

SEQ ID NO: 1326011 - RNA, 13 nt, Human
ccuuuuuccucuc

SEQ ID NO: 1326012 - RNA, 15 nt, Human
ccuuuuuccucucca

SEQ ID NO: 1326013 - RNA, 16 nt, Human
ccuuuuuccucuccac

SEQ ID NO: 1326014 - RNA, 17 nt, Human
ccuuuuuccucuccaca

SEQ ID NO: 1326015 - RNA, 14 nt, Human
ccuuuuucuccagc

SEQ ID NO: 1326016 - RNA, 16 nt, Human
ccuuuuucuccagcug

SEQ ID NO: 1326017 - RNA, 12 nt, Human
cgaccaccugcc

SEQ ID NO: 1326018 - RNA, 14 nt, Human
cgaccaccugccca

SEQ ID NO: 1326019 - RNA, 21 nt, Human
cgacaguggaugcugggucca

SEQ ID NO: 1326020 - RNA, 22 nt, Human
ccuuuuuuaggaagcaagcuua

SEQ ID NO: 1326021 - RNA, 16 nt, Human
cgacagugagacucug

SEQ ID NO: 1326022 - RNA, 15 nt, Human
cgacagugagacucu

SEQ ID NO: 1326023 - RNA, 16 nt, Human
ccuuggacacgcucag

SEQ ID NO: 1326024 - RNA, 16 nt, Human
ccuuuagaucucugaa

SEQ ID NO: 1326025 - RNA, 23 nt, Human
ccuuuccaccacagccagcaccu

SEQ ID NO: 1326026 - RNA, 13 nt, Human
ccuuuagguucuu

SEQ ID NO: 1326027 - RNA, 12 nt, Human
ccuugcuuguua

SEQ ID NO: 1326028 - RNA, 18 nt, Human
ccuuggacaacuuuucuc

SEQ ID NO: 1326029 - RNA, 16 nt, Human
ccuuggacauccuccu

SEQ ID NO: 1326030 - RNA, 17 nt, Human
ccuuggacauccuccuc

SEQ ID NO: 1326031 - RNA, 17 nt, Human
ccuuuagaucucugaag

SEQ ID NO: 1326032 - RNA, 20 nt, Human
ccuuuccauaaauccuugau

SEQ ID NO: 1326033 - RNA, 22 nt, Human
ccuuuccauaaauccuugauga

SEQ ID NO: 1326034 - RNA, 18 nt, Human
ccuuuccauccauggcca

SEQ ID NO: 1326035 - RNA, 11 nt, Human
ccuuucccacc

SEQ ID NO: 1326036 - RNA, 12 nt, Human
ccuuucccaccc

SEQ ID NO: 1326037 - RNA, 18 nt, Human
ccuuucccaccccaaccu

SEQ ID NO: 1326038 - RNA, 22 nt, Human
ccuuucccaccccaaccugcuc

SEQ ID NO: 1326039 - RNA, 19 nt, Human
ccuuucccaggugcuacac

SEQ ID NO: 1326040 - RNA, 12 nt, Human
ccuuucccuaag

SEQ ID NO: 1326041 - RNA, 12 nt, Human
ccuuuucugacc

SEQ ID NO: 1326042 - RNA, 18 nt, Human
ccuuuucugaccaaagag

SEQ ID NO: 1326043 - RNA, 13 nt, Human
ccuuuucugacca

SEQ ID NO: 1326044 - RNA, 14 nt, Human
ccuuuucuguucua

SEQ ID NO: 1326045 - RNA, 21 nt, Human
ccuuuugaaauuaaccucuca

SEQ ID NO: 1326046 - RNA, 15 nt, Human
ccuugccucaaugcc

SEQ ID NO: 1326047 - RNA, 16 nt, Human
ccuugccucaaugcca

SEQ ID NO: 1326048 - RNA, 19 nt, Human
ccuugccucaaugccagua

SEQ ID NO: 1326049 - RNA, 20 nt, Human
ccuugccucaaugccaguaa

SEQ ID NO: 1326050 - RNA, 17 nt, Human
ccuggccuccugccucu

SEQ ID NO: 1326051 - RNA, 18 nt, Human
ccuggccuccugccucua

SEQ ID NO: 1326052 - RNA, 21 nt, Human
ccuggccuccugccucuacug

SEQ ID NO: 1326053 - RNA, 14 nt, Human
ccuucugagcuccu

SEQ ID NO: 1326054 - RNA, 15 nt, Human
ccuucugagcuccug

SEQ ID NO: 1326055 - RNA, 17 nt, Human
ccuucugagcuccuguc

SEQ ID NO: 1326056 - RNA, 21 nt, Human
ccuucugagcuccuguccccu

SEQ ID NO: 1326057 - RNA, 10 nt, Human
ccuucuggcc

SEQ ID NO: 1326058 - RNA, 22 nt, Human
ccuucugagcuccuguccccug

SEQ ID NO: 1326059 - RNA, 12 nt, Human
ccuucugcucag

SEQ ID NO: 1326060 - RNA, 17 nt, Human
ccuucugcucagcucug

SEQ ID NO: 1326061 - RNA, 11 nt, Human
ccuucugcugc

SEQ ID NO: 1326062 - RNA, 16 nt, Human
ccuucuggccuuguaa

SEQ ID NO: 1326063 - RNA, 20 nt, Human
ccuucugggcagaccuugac

SEQ ID NO: 1326064 - RNA, 18 nt, Human
ccagagugcugaaggaau

SEQ ID NO: 1326065 - RNA, 15 nt, Human
ccagauccuggaaau

SEQ ID NO: 1326066 - RNA, 13 nt, Human
ccagauccagccu

SEQ ID NO: 1326067 - RNA, 14 nt, Human
ccagauccagccug

SEQ ID NO: 1326068 - RNA, 15 nt, Human
ccagauccagccugg

SEQ ID NO: 1326069 - RNA, 16 nt, Human
ccagauccagccuggg

SEQ ID NO: 1326070 - RNA, 16 nt, Human
ccagagucccugccug

SEQ ID NO: 1326071 - RNA, 17 nt, Human
ccagagucccugccugg

SEQ ID NO: 1326072 - RNA, 18 nt, Human
ccagagucccugccugga

SEQ ID NO: 1326073 - RNA, 19 nt, Human
ccagagucccugccuggac

SEQ ID NO: 1326074 - RNA, 22 nt, Human
ccagagucccugccuggaccag

SEQ ID NO: 1326075 - RNA, 20 nt, Human
ccaggaaagcgccuccaacc

SEQ ID NO: 1326076 - RNA, 20 nt, Human
ccagcuuauagucauauaua

SEQ ID NO: 1326077 - RNA, 19 nt, Human
ccaggaacagcaaaugcaa

SEQ ID NO: 1326078 - RNA, 19 nt, Human
ccaggaagaucccccagaa

SEQ ID NO: 1326079 - RNA, 18 nt, Human
ccaggaagaucccccaga

SEQ ID NO: 1326080 - RNA, 17 nt, Human
ccaggaagaucccccag

SEQ ID NO: 1326081 - RNA, 14 nt, Human
ccaggaacugggcc

SEQ ID NO: 1326082 - RNA, 10 nt, Human
ccaggaagcc

SEQ ID NO: 1326083 - RNA, 15 nt, Human
ccagccccucugguc

SEQ ID NO: 1326084 - RNA, 17 nt, Human
ccagccccucuggucgc

SEQ ID NO: 1326085 - RNA, 22 nt, Human
ccagccccucuggucgcuccug

SEQ ID NO: 1326086 - RNA, 23 nt, Human
ccagccccucuggucgcuccugc

SEQ ID NO: 1326087 - RNA, 13 nt, Human
ccagccccucuug

SEQ ID NO: 1326088 - RNA, 18 nt, Human
ccagccccucuuggagaa

SEQ ID NO: 1326089 - RNA, 21 nt, Human
ccagccccucuuggagaaguc

SEQ ID NO: 1326090 - RNA, 20 nt, Human
ccagccccucuuggagaagu

SEQ ID NO: 1326091 - RNA, 16 nt, Human
ccagcuacccuuuuuc

SEQ ID NO: 1326092 - RNA, 21 nt, Human
ccagcuacccuuuuucuccag

SEQ ID NO: 1326093 - RNA, 22 nt, Human
ccagcuacccuuuuucuccagc

SEQ ID NO: 1326094 - RNA, 22 nt, Human
ccagcucaauggacuggaaggg

SEQ ID NO: 1326095 - RNA, 23 nt, Human
ccaggaaacucugcauucuagua

SEQ ID NO: 1326096 - RNA, 18 nt, Human
ccagcagauuuccagccu

SEQ ID NO: 1326097 - RNA, 20 nt, Human
ccagcagcaccugcccuacc

SEQ ID NO: 1326098 - RNA, 14 nt, Human
ccagcagcaccugc

SEQ ID NO: 1326099 - RNA, 10 nt, Human
ccagcagcug

SEQ ID NO: 1326100 - RNA, 20 nt, Human
ccagcagcugccaggagcac

SEQ ID NO: 1326101 - RNA, 22 nt, Human
ccagcagcuuuagaaucccagc

SEQ ID NO: 1326102 - RNA, 23 nt, Human
ccagcagcugccaggagcacggc

SEQ ID NO: 1326103 - RNA, 16 nt, Human
ccaggcucggccugcc

SEQ ID NO: 1326104 - RNA, 17 nt, Human
ccaggcucggccugccc

SEQ ID NO: 1326105 - RNA, 18 nt, Human
ccaggcucguggacugag

SEQ ID NO: 1326106 - RNA, 20 nt, Human
ccaggcucguggacugagug

SEQ ID NO: 1326107 - RNA, 21 nt, Human
ccaggcucguggacugagugg

SEQ ID NO: 1326108 - RNA, 23 nt, Human
ccaggcucucgcacaccucugca

SEQ ID NO: 1326109 - RNA, 23 nt, Human
ccaggcucguggacugaguggga

SEQ ID NO: 1326110 - RNA, 15 nt, Human
ccagggcugggagga

SEQ ID NO: 1326111 - RNA, 18 nt, Human
ccagggcugggaggaagg

SEQ ID NO: 1326112 - RNA, 19 nt, Human
ccagggcugggaggaagga

SEQ ID NO: 1326113 - RNA, 21 nt, Human
ccagggcugggaggaaggacu

SEQ ID NO: 1326114 - RNA, 19 nt, Human
ccagggcuguaacugccag

SEQ ID NO: 1326115 - RNA, 20 nt, Human
ccagggcuguaacugccagg

SEQ ID NO: 1326116 - RNA, 22 nt, Human
ccagggcuguaacugccaggcu

SEQ ID NO: 1326117 - RNA, 13 nt, Human
ccagggguuucuc

SEQ ID NO: 1326118 - RNA, 16 nt, Human
ccaggcacugcugccc

SEQ ID NO: 1326119 - RNA, 18 nt, Human
ccaggcacugcugcccag

SEQ ID NO: 1326120 - RNA, 12 nt, Human
ccaggcacugca

SEQ ID NO: 1326121 - RNA, 13 nt, Human
ccaggcacugcaa

SEQ ID NO: 1326122 - RNA, 16 nt, Human
ccaggcacugcuaggc

SEQ ID NO: 1326123 - RNA, 15 nt, Human
ccaggcacugucuua

SEQ ID NO: 1326124 - RNA, 13 nt, Human
ccaggcagaucca

SEQ ID NO: 1326125 - RNA, 15 nt, Human
ccaggcagauccagg

SEQ ID NO: 1326126 - RNA, 16 nt, Human
ccaggcagauccagga

SEQ ID NO: 1326127 - RNA, 17 nt, Human
ccaggcagauccaggac

SEQ ID NO: 1326128 - RNA, 18 nt, Human
ccaggcagauccaggacu

SEQ ID NO: 1326129 - RNA, 19 nt, Human
ccaggcagauccaggacua

SEQ ID NO: 1326130 - RNA, 17 nt, Human
ccaggcaccaaaagaag

SEQ ID NO: 1326131 - RNA, 17 nt, Human
ccaggcaccaggacuag

SEQ ID NO: 1326132 - RNA, 15 nt, Human
ccaggcaccaggcag

SEQ ID NO: 1326133 - RNA, 16 nt, Human
ccagggucccucugug

SEQ ID NO: 1326134 - RNA, 17 nt, Human
ccagggucccucugugu

SEQ ID NO: 1326135 - RNA, 18 nt, Human
ccagggucccucugugua

SEQ ID NO: 1326136 - RNA, 17 nt, Human
ccaggguaugaagagug

SEQ ID NO: 1326137 - RNA, 17 nt, Human
ccaguucauugcacuuu

SEQ ID NO: 1326138 - RNA, 18 nt, Human
ccaguucauugcacuuug

SEQ ID NO: 1326139 - RNA, 13 nt, Human
ccaguucacccug

SEQ ID NO: 1326140 - RNA, 21 nt, Human
ccaguugucccgauuguaacu

SEQ ID NO: 1326141 - RNA, 22 nt, Human
ccaguugucccgauuguaacuc

SEQ ID NO: 1326142 - RNA, 12 nt, Human
ccaguuguccuc

SEQ ID NO: 1326143 - RNA, 13 nt, Human
ccaguuguccucc

SEQ ID NO: 1326144 - RNA, 14 nt, Human
ccaguuguccuccu

SEQ ID NO: 1326145 - RNA, 15 nt, Human
ccaguuguccuccuu

SEQ ID NO: 1326146 - RNA, 21 nt, Human
ccaguuguuagauuaagaaau

SEQ ID NO: 1326147 - RNA, 16 nt, Human
ccaguuguccuccuuc

SEQ ID NO: 1326148 - RNA, 16 nt, Human
ccaguuuccuugggag

SEQ ID NO: 1326149 - RNA, 17 nt, Human
ccaguuucuaaacugga

SEQ ID NO: 1326150 - RNA, 19 nt, Human
ccaguuucuaaacuggaga

SEQ ID NO: 1326151 - RNA, 20 nt, Human
ccaguuucuaaacuggagac

SEQ ID NO: 1326152 - RNA, 21 nt, Human
ccaguuucuaaacuggagacu

SEQ ID NO: 1326153 - RNA, 22 nt, Human
ccaugacaacuucuaauugcca

SEQ ID NO: 1326154 - RNA, 14 nt, Human
ccaugacaucaaga

SEQ ID NO: 1326155 - RNA, 15 nt, Human
ccaugacccugccuc

SEQ ID NO: 1326156 - RNA, 21 nt, Human
ccaugacccugccucucccag

SEQ ID NO: 1326157 - RNA, 22 nt, Human
ccauggugcuaggaagaggagu

SEQ ID NO: 1326158 - RNA, 18 nt, Human
ccauggugugaucgucug

SEQ ID NO: 1326159 - RNA, 19 nt, Human
ccauggugugaucgucuga

SEQ ID NO: 1326160 - RNA, 17 nt, Human
ccauggugcuaggaaga

SEQ ID NO: 1326161 - RNA, 20 nt, Human
ccaugguuaagaguccaaga

SEQ ID NO: 1326162 - RNA, 11 nt, Human
ccauguaacug

SEQ ID NO: 1326163 - RNA, 14 nt, Human
ccauguaacugccu

SEQ ID NO: 1326164 - RNA, 17 nt, Human
ccauguaacugccuaga

SEQ ID NO: 1326165 - RNA, 18 nt, Human
ccauguaacugccuagaa

SEQ ID NO: 1326166 - RNA, 19 nt, Human
ccauguaacugccuagaaa

SEQ ID NO: 1326167 - RNA, 12 nt, Human
ccaugagcuccu

SEQ ID NO: 1326168 - RNA, 16 nt, Human
ccaugacccugccucu

SEQ ID NO: 1326169 - RNA, 17 nt, Human
ccaugacccugccucuc

SEQ ID NO: 1326170 - RNA, 18 nt, Human
ccaugacccugccucucc

SEQ ID NO: 1326171 - RNA, 19 nt, Human
ccaugacccugccucuccc

SEQ ID NO: 1326172 - RNA, 20 nt, Human
ccaugacccugccucuccca

SEQ ID NO: 1326173 - RNA, 17 nt, Human
ccaugucaagauucagc

SEQ ID NO: 1326174 - RNA, 19 nt, Human
ccaugucaagauucagcua

SEQ ID NO: 1326175 - RNA, 13 nt, Human
ccauguccaaaga

SEQ ID NO: 1326176 - RNA, 14 nt, Human
ccauguccaaagag

SEQ ID NO: 1326177 - RNA, 17 nt, Human
ccauguccaaagaggcu

SEQ ID NO: 1326178 - RNA, 15 nt, Human
ccaugucaagauuca

SEQ ID NO: 1326179 - RNA, 16 nt, Human
ccaugucaaacaaaua

SEQ ID NO: 1326180 - RNA, 20 nt, Human
ccauguaacugccuagaaac

SEQ ID NO: 1326181 - RNA, 20 nt, Human
ccauguccaaagaggcugcc

SEQ ID NO: 1326182 - RNA, 18 nt, Human
ccauguccaaagaggcug

SEQ ID NO: 1326183 - RNA, 19 nt, Human
ccauguccaaagaggcugc

SEQ ID NO: 1326184 - RNA, 14 nt, Human
cccauccuagaggc

SEQ ID NO: 1326185 - RNA, 19 nt, Human
cccaggaaaggcaggauug

SEQ ID NO: 1326186 - RNA, 16 nt, Human
cccaggaaaggcccag

SEQ ID NO: 1326187 - RNA, 15 nt, Human
cccagcuugaaaccu

SEQ ID NO: 1326188 - RNA, 19 nt, Human
cccaggcuggagugcagug

SEQ ID NO: 1326189 - RNA, 20 nt, Human
cccauauuuguacaccaaua

SEQ ID NO: 1326190 - RNA, 15 nt, Human
cccauauuguaaaac

SEQ ID NO: 1326191 - RNA, 18 nt, Human
cccauauuguaaaacagg

SEQ ID NO: 1326192 - RNA, 19 nt, Human
cccauauuguaaaacaggu

SEQ ID NO: 1326193 - RNA, 20 nt, Human
cccauaugcuaccaccagcu

SEQ ID NO: 1326194 - RNA, 21 nt, Human
cccauaugcuaccaccagcug

SEQ ID NO: 1326195 - RNA, 13 nt, Human
cccagggcccaga

SEQ ID NO: 1326196 - RNA, 14 nt, Human
cccagggcccagag

SEQ ID NO: 1326197 - RNA, 15 nt, Human
cccagggcccagagc

SEQ ID NO: 1326198 - RNA, 16 nt, Human
cccagggcccagagcc

SEQ ID NO: 1326199 - RNA, 17 nt, Human
cccagggcccagagccc

SEQ ID NO: 1326200 - RNA, 19 nt, Human
cccagggcccagagcccag

SEQ ID NO: 1326201 - RNA, 20 nt, Human
cccagggcccagagcccagc

SEQ ID NO: 1326202 - RNA, 22 nt, Human
cccagggcccagagcccagcuc

SEQ ID NO: 1326203 - RNA, 20 nt, Human
cccacccucguggacaccug

SEQ ID NO: 1326204 - RNA, 21 nt, Human
cccacccucggggaugugucc

SEQ ID NO: 1326205 - RNA, 14 nt, Human
cccacccccggcag

SEQ ID NO: 1326206 - RNA, 23 nt, Human
cccacccucguggacaccugccc

SEQ ID NO: 1326207 - RNA, 22 nt, Human
cccacccucguggacaccugcc

SEQ ID NO: 1326208 - RNA, 13 nt, Human
cccacccucuucc

SEQ ID NO: 1326209 - RNA, 15 nt, Human
cccacccucuuccua

SEQ ID NO: 1326210 - RNA, 13 nt, Human
cccacccccagcu

SEQ ID NO: 1326211 - RNA, 15 nt, Human
cccacuucagccucc

SEQ ID NO: 1326212 - RNA, 13 nt, Human
cccacuucagccu

SEQ ID NO: 1326213 - RNA, 16 nt, Human
cccacugugccucaga

SEQ ID NO: 1326214 - RNA, 15 nt, Human
cccacugugccucag

SEQ ID NO: 1326215 - RNA, 22 nt, Human
cccacugugccucagagaccag

SEQ ID NO: 1326216 - RNA, 14 nt, Human
cccacuuacauuua

SEQ ID NO: 1326217 - RNA, 14 nt, Human
cccacugccuuuga

SEQ ID NO: 1326218 - RNA, 16 nt, Human
cccacucccaggacca

SEQ ID NO: 1326219 - RNA, 13 nt, Human
cccacucccucac

SEQ ID NO: 1326220 - RNA, 14 nt, Human
cccacucccucaca

SEQ ID NO: 1326221 - RNA, 18 nt, Human
cccacuagacccacugga

SEQ ID NO: 1326222 - RNA, 13 nt, Human
cccacccuggccu

SEQ ID NO: 1326223 - RNA, 20 nt, Human
cccacccuggccuagaccag

SEQ ID NO: 1326224 - RNA, 15 nt, Human
cccacuagcucuugu

SEQ ID NO: 1326225 - RNA, 22 nt, Human
cccacuagcucuuguugagccg

SEQ ID NO: 1326226 - RNA, 14 nt, Human
cccacuccaucugg

SEQ ID NO: 1326227 - RNA, 18 nt, Human
cccacuccaucugguaga

SEQ ID NO: 1326228 - RNA, 19 nt, Human
cccacuccaucugguagaa

SEQ ID NO: 1326229 - RNA, 12 nt, Human
cccacucccaca

SEQ ID NO: 1326230 - RNA, 12 nt, Human
cccacuucugca

SEQ ID NO: 1326231 - RNA, 14 nt, Human
cccacuucugcacu

SEQ ID NO: 1326232 - RNA, 16 nt, Human
cccacuucugcacuug

SEQ ID NO: 1326233 - RNA, 18 nt, Human
ccccuuugcugacccucc

SEQ ID NO: 1326234 - RNA, 22 nt, Human
ccccuuuucggccccauguauc

SEQ ID NO: 1326235 - RNA, 12 nt, Human
ccccucugucuu

SEQ ID NO: 1326236 - RNA, 14 nt, Human
ccccucuguccagg

SEQ ID NO: 1326237 - RNA, 22 nt, Human
ccccucuguccaggcacugaga

SEQ ID NO: 1326238 - RNA, 11 nt, Human
ccccuugccug

SEQ ID NO: 1326239 - RNA, 16 nt, Human
ccccuugccugugcca

SEQ ID NO: 1326240 - RNA, 16 nt, Human
ccccuugggcccacac

SEQ ID NO: 1326241 - RNA, 18 nt, Human
ccccuugggcccacaccu

SEQ ID NO: 1326242 - RNA, 19 nt, Human
ccccuugggcccacaccuc

SEQ ID NO: 1326243 - RNA, 15 nt, Human
ccccuuguccuuucc

SEQ ID NO: 1326244 - RNA, 18 nt, Human
ccccuuguccuuucccuu

SEQ ID NO: 1326245 - RNA, 20 nt, Human
ccccuuuagaucucugaagc

SEQ ID NO: 1326246 - RNA, 15 nt, Human
ccccuuucacaggca

SEQ ID NO: 1326247 - RNA, 16 nt, Human
ccccuuucacaggcag

SEQ ID NO: 1326248 - RNA, 21 nt, Human
ccccuuucacaggcagccagu

SEQ ID NO: 1326249 - RNA, 19 nt, Human
ccccuuucacaggcagcca

SEQ ID NO: 1326250 - RNA, 13 nt, Human
ccccuuucccacc

SEQ ID NO: 1326251 - RNA, 14 nt, Human
ccccuuucccaccc

SEQ ID NO: 1326252 - RNA, 10 nt, Human
ccccuuuccu

SEQ ID NO: 1326253 - RNA, 22 nt, Human
ccccuuuccuggacacucagac

SEQ ID NO: 1326254 - RNA, 23 nt, Human
ccccuuuccuggacacucagacc

SEQ ID NO: 1326255 - RNA, 17 nt, Human
cccuauugguaaagaau

SEQ ID NO: 1326256 - RNA, 13 nt, Human
cccuauuaaccua

SEQ ID NO: 1326257 - RNA, 23 nt, Human
cccgggaggcagagguugcagug

SEQ ID NO: 1326258 - RNA, 13 nt, Human
cccggcuccuggu

SEQ ID NO: 1326259 - RNA, 15 nt, Human
cccggcuccugguca

SEQ ID NO: 1326260 - RNA, 18 nt, Human
cccggcuccuggucaccu

SEQ ID NO: 1326261 - RNA, 22 nt, Human
cccggcuccuggucaccuagga

SEQ ID NO: 1326262 - RNA, 16 nt, Human
cccggcugcagaggcc

SEQ ID NO: 1326263 - RNA, 21 nt, Human
cccggcugcagaggccagagg

SEQ ID NO: 1326264 - RNA, 14 nt, Human
cccgggagcucagg

SEQ ID NO: 1326265 - RNA, 19 nt, Human
ccccucuggcuccagcugg

SEQ ID NO: 1326266 - RNA, 12 nt, Human
ccccucuggucg

SEQ ID NO: 1326267 - RNA, 19 nt, Human
ccccucuggucgcuccugc

SEQ ID NO: 1326268 - RNA, 20 nt, Human
ccccucuggucgcuccugcc

SEQ ID NO: 1326269 - RNA, 23 nt, Human
ccccucuggucgcuccugcccac

SEQ ID NO: 1326270 - RNA, 12 nt, Human
ccccucugucca

SEQ ID NO: 1326271 - RNA, 16 nt, Human
ccccagagcccaggcu

SEQ ID NO: 1326272 - RNA, 13 nt, Human
ccccagaggcugg

SEQ ID NO: 1326273 - RNA, 23 nt, Human
ccccagacuuguuggcguaggcu

SEQ ID NO: 1326274 - RNA, 13 nt, Human
ccccagagccaca

SEQ ID NO: 1326275 - RNA, 14 nt, Human
ccccagagccacag

SEQ ID NO: 1326276 - RNA, 15 nt, Human
ccccagagccacagu

SEQ ID NO: 1326277 - RNA, 16 nt, Human
ccccagagccacaguu

SEQ ID NO: 1326278 - RNA, 13 nt, Human
ccccagagcccag

SEQ ID NO: 1326279 - RNA, 14 nt, Human
ccccagagcccagg

SEQ ID NO: 1326280 - RNA, 16 nt, Human
ccccagagcccccggg

SEQ ID NO: 1326281 - RNA, 14 nt, Human
ccccauuucugagg

SEQ ID NO: 1326282 - RNA, 19 nt, Human
ccccaucguugcccccauu

SEQ ID NO: 1326283 - RNA, 22 nt, Human
ccccaucguugcccccauuucu

SEQ ID NO: 1326284 - RNA, 13 nt, Human
ccccaucucaggc

SEQ ID NO: 1326285 - RNA, 14 nt, Human
ccccaucucaggcc

SEQ ID NO: 1326286 - RNA, 17 nt, Human
ccccaucucaggccaga

SEQ ID NO: 1326287 - RNA, 21 nt, Human
ccccaucucaugccccuggcu

SEQ ID NO: 1326288 - RNA, 23 nt, Human
ccccaucucaugccccuggcugg

SEQ ID NO: 1326289 - RNA, 23 nt, Human
cccauuguggucacaggaaguag

SEQ ID NO: 1326290 - RNA, 22 nt, Human
cccauuguggucacaggaagua

SEQ ID NO: 1326291 - RNA, 20 nt, Human
cccauuuaaauuuuuuuccu

SEQ ID NO: 1326292 - RNA, 19 nt, Human
ccccaaaagcgugagcuua

SEQ ID NO: 1326293 - RNA, 13 nt, Human
ccccaaaauuagc

SEQ ID NO: 1326294 - RNA, 18 nt, Human
ccccaaacaccuuccagc

SEQ ID NO: 1326295 - RNA, 22 nt, Human
ccccaaacaccuuccagcuccu

SEQ ID NO: 1326296 - RNA, 18 nt, Human
ccccggcagcagccccca

SEQ ID NO: 1326297 - RNA, 13 nt, Human
ccccggcagcagc

SEQ ID NO: 1326298 - RNA, 14 nt, Human
ccccgacuuuuguu

SEQ ID NO: 1326299 - RNA, 13 nt, Human
ccccgacuggggc

SEQ ID NO: 1326300 - RNA, 16 nt, Human
ccccgacuucauccca

SEQ ID NO: 1326301 - RNA, 23 nt, Human
ccugacccuccaccgcagaagga

SEQ ID NO: 1326302 - RNA, 13 nt, Human
ccugaccucaggc

SEQ ID NO: 1326303 - RNA, 14 nt, Human
ccucuugccacugc

SEQ ID NO: 1326304 - RNA, 19 nt, Human
ccucuugagcaguggcugg

SEQ ID NO: 1326305 - RNA, 24 nt, Human
ccucuugagcaguggcugguccag

SEQ ID NO: 1326306 - RNA, 14 nt, Human
ccugaccuggcccc

SEQ ID NO: 1326307 - RNA, 15 nt, Human
ccugaccuggccccc

SEQ ID NO: 1326308 - RNA, 13 nt, Human
ccugacugccaag

SEQ ID NO: 1326309 - RNA, 14 nt, Human
ccugacugccaagc

SEQ ID NO: 1326310 - RNA, 15 nt, Human
ccugacugccaagcc

SEQ ID NO: 1326311 - RNA, 16 nt, Human
ccugacugccaagcca

SEQ ID NO: 1326312 - RNA, 18 nt, Human
ccugacugccaagccaug

SEQ ID NO: 1326313 - RNA, 20 nt, Human
ccucuugaccaggcugccuc

SEQ ID NO: 1326314 - RNA, 14 nt, Human
ccucuugagcagug

SEQ ID NO: 1326315 - RNA, 15 nt, Human
ccucuugagcagugg

SEQ ID NO: 1326316 - RNA, 16 nt, Human
ccucuugagcaguggc

SEQ ID NO: 1326317 - RNA, 17 nt, Human
ccucuugagcaguggcu

SEQ ID NO: 1326318 - RNA, 21 nt, Human
ccugcagaaccggagagccag

SEQ ID NO: 1326319 - RNA, 22 nt, Human
ccugcagaaccggagagccagc

SEQ ID NO: 1326320 - RNA, 23 nt, Human
ccugcagaaccggagagccagcu

SEQ ID NO: 1326321 - RNA, 16 nt, Human
ccugcagaauuugggu

SEQ ID NO: 1326322 - RNA, 13 nt, Human
ccugcagacccug

SEQ ID NO: 1326323 - RNA, 14 nt, Human
ccugcagacccugc

SEQ ID NO: 1326324 - RNA, 15 nt, Human
ccugcagacccugcc

SEQ ID NO: 1326325 - RNA, 16 nt, Human
ccugcagacccugccc

SEQ ID NO: 1326326 - RNA, 17 nt, Human
ccugcagacccugcccu

SEQ ID NO: 1326327 - RNA, 18 nt, Human
ccugcagacccugcccuu

SEQ ID NO: 1326328 - RNA, 15 nt, Human
ccugcagacucacug

SEQ ID NO: 1326329 - RNA, 16 nt, Human
ccugcagacucacugu

SEQ ID NO: 1326330 - RNA, 12 nt, Human
ccugcagcuugu

SEQ ID NO: 1326331 - RNA, 16 nt, Human
ccugcagcuuguagcc

SEQ ID NO: 1326332 - RNA, 17 nt, Human
ccugcagcuuguagcca

SEQ ID NO: 1326333 - RNA, 18 nt, Human
ccugcagcuuguagccag

SEQ ID NO: 1326334 - RNA, 19 nt, Human
ccugcagcuuguagccagc

SEQ ID NO: 1326335 - RNA, 20 nt, Human
ccugcagcuuguagccagcc

SEQ ID NO: 1326336 - RNA, 21 nt, Human
ccugcagcuuguagccagccg

SEQ ID NO: 1326337 - RNA, 13 nt, Human
ccugcaggaagga

SEQ ID NO: 1326338 - RNA, 17 nt, Human
ccugaguacuccacacu

SEQ ID NO: 1326339 - RNA, 18 nt, Human
ccugaguacuccacacug

SEQ ID NO: 1326340 - RNA, 23 nt, Human
ccugaguacuccacacugcacaa

SEQ ID NO: 1326341 - RNA, 21 nt, Human
ccugaguacuccacacugcac

SEQ ID NO: 1326342 - RNA, 14 nt, Human
ccugagguuacugg

SEQ ID NO: 1326343 - RNA, 14 nt, Human
ccugagaaagcuca

SEQ ID NO: 1326344 - RNA, 17 nt, Human
ccugagaaagcucaaag

SEQ ID NO: 1326345 - RNA, 18 nt, Human
ccugagagauuuaacauu

SEQ ID NO: 1326346 - RNA, 14 nt, Human
ccugcaggaaggag

SEQ ID NO: 1326347 - RNA, 17 nt, Human
ccugcaggaaggagcug

SEQ ID NO: 1326348 - RNA, 19 nt, Human
ccugcaggaaggagcugcc

SEQ ID NO: 1326349 - RNA, 20 nt, Human
ccugcaggaaggagcugccu

SEQ ID NO: 1326350 - RNA, 23 nt, Human
ccugcaggaaggagcugccugga

SEQ ID NO: 1326351 - RNA, 21 nt, Human
ccugcaggaaggagcugccug

SEQ ID NO: 1326352 - RNA, 22 nt, Human
ccugcaggaaggagcugccugg

SEQ ID NO: 1326353 - RNA, 15 nt, Human
ccucucugcaggucc

SEQ ID NO: 1326354 - RNA, 17 nt, Human
ccucucugcagacuucc

SEQ ID NO: 1326355 - RNA, 21 nt, Human
ccucucugcagacuucccagc

SEQ ID NO: 1326356 - RNA, 13 nt, Human
ccucucugcaggu

SEQ ID NO: 1326357 - RNA, 22 nt, Human
ccucucugcaggucccuaauaa

SEQ ID NO: 1326358 - RNA, 21 nt, Human
ccucucugcaggucccuaaua

SEQ ID NO: 1326359 - RNA, 23 nt, Human
ccucucugcaggucccuaauaaa

SEQ ID NO: 1326360 - RNA, 12 nt, Human
ccucucugcccu

SEQ ID NO: 1326361 - RNA, 22 nt, Human
ccucucugcagacuucccagcu

SEQ ID NO: 1326362 - RNA, 23 nt, Human
ccucucugcagacuucccagcua

SEQ ID NO: 1326363 - RNA, 12 nt, Human
ccucugccuguc

SEQ ID NO: 1326364 - RNA, 15 nt, Human
ccucugcugauccuc

SEQ ID NO: 1326365 - RNA, 18 nt, Human
ccucugcugauccuccca

SEQ ID NO: 1326366 - RNA, 17 nt, Human
ccucugcugaccugcug

SEQ ID NO: 1326367 - RNA, 15 nt, Human
ccucugcuucucacg

SEQ ID NO: 1326368 - RNA, 14 nt, Human
ccucugcugcuguc

SEQ ID NO: 1326369 - RNA, 19 nt, Human
ccucugcugcugucccucc

SEQ ID NO: 1326370 - RNA, 20 nt, Human
ccucugcugcugucccuccc

SEQ ID NO: 1326371 - RNA, 18 nt, Human
ccucugcugaccugcuga

SEQ ID NO: 1326372 - RNA, 16 nt, Human
ccuggcacagggcagu

SEQ ID NO: 1326373 - RNA, 17 nt, Human
ccuggcacagggcagug

SEQ ID NO: 1326374 - RNA, 18 nt, Human
ccuggcacagggcagugg

SEQ ID NO: 1326375 - RNA, 18 nt, Human
ccuggaucagcguggccu

SEQ ID NO: 1326376 - RNA, 19 nt, Human
ccuggaucagcguggccuu

SEQ ID NO: 1326377 - RNA, 20 nt, Human
ccuggaucagcguggccuug

SEQ ID NO: 1326378 - RNA, 21 nt, Human
ccuggauccaucaggccacuu

SEQ ID NO: 1326379 - RNA, 17 nt, Human
ccuggaucagaacagga

SEQ ID NO: 1326380 - RNA, 14 nt, Human
ccuggaucagcgug

SEQ ID NO: 1326381 - RNA, 16 nt, Human
ccuggaucagcguggc

SEQ ID NO: 1326382 - RNA, 17 nt, Human
ccuggaucagcguggcc

SEQ ID NO: 1326383 - RNA, 14 nt, Human
ccuggaucucccug

SEQ ID NO: 1326384 - RNA, 16 nt, Human
ccuggaugacauuaaa

SEQ ID NO: 1326385 - RNA, 14 nt, Human
ccuggaugauacua

SEQ ID NO: 1326386 - RNA, 22 nt, Human
ccuggaguguaugacugcacau

SEQ ID NO: 1326387 - RNA, 19 nt, Human
ccuggaggggcuggggacu

SEQ ID NO: 1326388 - RNA, 22 nt, Human
ccuggagggggaauggcagcag

SEQ ID NO: 1326389 - RNA, 21 nt, Human
ccuggagggggaauggcagca

SEQ ID NO: 1326390 - RNA, 22 nt, Human
ccugccccaacuccuuccagcu

SEQ ID NO: 1326391 - RNA, 18 nt, Human
ccugcccagugcacuugc

SEQ ID NO: 1326392 - RNA, 22 nt, Human
ccugcccagugcacuugcugga

SEQ ID NO: 1326393 - RNA, 16 nt, Human
ccugcccaguugcacu

SEQ ID NO: 1326394 - RNA, 22 nt, Human
ccugcccaguugcacucaggug

SEQ ID NO: 1326395 - RNA, 16 nt, Human
ccugcccaugggagcu

SEQ ID NO: 1326396 - RNA, 14 nt, Human
ccugccccaacucc

SEQ ID NO: 1326397 - RNA, 15 nt, Human
ccugccccaacuccu

SEQ ID NO: 1326398 - RNA, 17 nt, Human
ccugccccaacuccuuc

SEQ ID NO: 1326399 - RNA, 21 nt, Human
ccugccccaacucuccccuga

SEQ ID NO: 1326400 - RNA, 12 nt, Human
ccuggaggaccu

SEQ ID NO: 1326401 - RNA, 13 nt, Human
ccuggaggaccug

SEQ ID NO: 1326402 - RNA, 14 nt, Human
ccuggaggaccuga

SEQ ID NO: 1326403 - RNA, 15 nt, Human
ccuggaggaccugag

SEQ ID NO: 1326404 - RNA, 16 nt, Human
ccuggaggaccugagc

SEQ ID NO: 1326405 - RNA, 17 nt, Human
ccuggaggaccugagcc

SEQ ID NO: 1326406 - RNA, 18 nt, Human
ccuggaggaccugagccu

SEQ ID NO: 1326407 - RNA, 19 nt, Human
ccuggaggaccugagccug

SEQ ID NO: 1326408 - RNA, 20 nt, Human
ccuggaggaccugagccugc

SEQ ID NO: 1326409 - RNA, 22 nt, Human
ccuggaggaccugagccugccg

SEQ ID NO: 1326410 - RNA, 21 nt, Human
ccuggaggaccugagccugcc

SEQ ID NO: 1326411 - RNA, 14 nt, Human
ccuggaggcacuga

SEQ ID NO: 1326412 - RNA, 22 nt, Human
ccuggaggcacugaagugcuua

SEQ ID NO: 1326413 - RNA, 12 nt, Human
ccuggaggccca

SEQ ID NO: 1326414 - RNA, 13 nt, Human
ccuggaggcccag

SEQ ID NO: 1326415 - RNA, 14 nt, Human
ccuggaggcccagu

SEQ ID NO: 1326416 - RNA, 16 nt, Human
ccuggaggcccaguuc

SEQ ID NO: 1326417 - RNA, 23 nt, Human
ccuggaggccccaacccuguccu

SEQ ID NO: 1326418 - RNA, 18 nt, Human
ccuggccgaguccaagcu

SEQ ID NO: 1326419 - RNA, 19 nt, Human
ccuggccgaguccaagcug

SEQ ID NO: 1326420 - RNA, 12 nt, Human
ccuggccgcccc

SEQ ID NO: 1326421 - RNA, 14 nt, Human
ccuggccgcccccu

SEQ ID NO: 1326422 - RNA, 13 nt, Human
ccuggcccugcuu

SEQ ID NO: 1326423 - RNA, 14 nt, Human
ccuggcccugcuuc

SEQ ID NO: 1326424 - RNA, 16 nt, Human
ccuggcccugcuuccu

SEQ ID NO: 1326425 - RNA, 17 nt, Human
ccuggcccugcuuccug

SEQ ID NO: 1326426 - RNA, 21 nt, Human
ccuggcccugcuuccugcuug

SEQ ID NO: 1326427 - RNA, 23 nt, Human
ccuggcccugcuuccugcuugcc

SEQ ID NO: 1326428 - RNA, 15 nt, Human
ccuggccgcccccug

SEQ ID NO: 1326429 - RNA, 20 nt, Human
ccuggccgcccccugccccc

SEQ ID NO: 1326430 - RNA, 14 nt, Human
ccuggccccucucc

SEQ ID NO: 1326431 - RNA, 15 nt, Human
ccuggccccucuccc

SEQ ID NO: 1326432 - RNA, 16 nt, Human
ccuggccccucucccu

SEQ ID NO: 1326433 - RNA, 20 nt, Human
ccuggccccucucccuuggg

SEQ ID NO: 1326434 - RNA, 17 nt, Human
ccuggccccucucccuu

SEQ ID NO: 1326435 - RNA, 17 nt, Human
cccuucuuuccacagaa

SEQ ID NO: 1326436 - RNA, 14 nt, Human
cccuucugcucagc

SEQ ID NO: 1326437 - RNA, 23 nt, Human
cccuucugcucagcucugggcca

SEQ ID NO: 1326438 - RNA, 12 nt, Human
cccuucuucccu

SEQ ID NO: 1326439 - RNA, 23 nt, Human
ccgaaucucuuuuugcuuucgaa

SEQ ID NO: 1326440 - RNA, 15 nt, Human
ccgaaugugucuuua

SEQ ID NO: 1326441 - RNA, 13 nt, Human
ccgaaugugucuu

SEQ ID NO: 1326442 - RNA, 14 nt, Human
ccgaaugugucuuu

SEQ ID NO: 1326443 - RNA, 16 nt, Human
ccgaccccaagaguuu

SEQ ID NO: 1326444 - RNA, 13 nt, Human
ccgccacuggggc

SEQ ID NO: 1326445 - RNA, 14 nt, Human
ccgccacuggggcu

SEQ ID NO: 1326446 - RNA, 20 nt, Human
ccgccacuggggcucagagc

SEQ ID NO: 1326447 - RNA, 16 nt, Human
ccgccacuggggcuca

SEQ ID NO: 1326448 - RNA, 13 nt, Human
ccgccagcucugu

SEQ ID NO: 1326449 - RNA, 14 nt, Human
ccgccagcucuguu

SEQ ID NO: 1326450 - RNA, 15 nt, Human
ccgccagcucuguuc

SEQ ID NO: 1326451 - RNA, 20 nt, Human
ccgcccccagcccccuccug

SEQ ID NO: 1326452 - RNA, 14 nt, Human
ccgcccccagguag

SEQ ID NO: 1326453 - RNA, 12 nt, Human
ccgcccccuccu

SEQ ID NO: 1326454 - RNA, 19 nt, Human
cccugugccuccucccucc

SEQ ID NO: 1326455 - RNA, 15 nt, Human
cccugugccuuguca

SEQ ID NO: 1326456 - RNA, 20 nt, Human
cccugugccuugucacgcca

SEQ ID NO: 1326457 - RNA, 22 nt, Human
cccugugccuugucacgccaga

SEQ ID NO: 1326458 - RNA, 12 nt, Human
cccugugccccc

SEQ ID NO: 1326459 - RNA, 19 nt, Human
cccugugcccccagggucc

SEQ ID NO: 1326460 - RNA, 13 nt, Human
cccugugccccca

SEQ ID NO: 1326461 - RNA, 17 nt, Human
cccugugccuccucccu

SEQ ID NO: 1326462 - RNA, 17 nt, Human
cccucacccauccuaga

SEQ ID NO: 1326463 - RNA, 13 nt, Human
cccucacccaucc

SEQ ID NO: 1326464 - RNA, 11 nt, Human
cccucacccau

SEQ ID NO: 1326465 - RNA, 18 nt, Human
cccucacaguauugcuca

SEQ ID NO: 1326466 - RNA, 20 nt, Human
cccuauuuagaugauaaaga

SEQ ID NO: 1326467 - RNA, 15 nt, Human
cccucacccuggggc

SEQ ID NO: 1326468 - RNA, 13 nt, Human
cccucacccugcc

SEQ ID NO: 1326469 - RNA, 16 nt, Human
cccucacccugccuua

SEQ ID NO: 1326470 - RNA, 12 nt, Human
cccuggcagaga

SEQ ID NO: 1326471 - RNA, 21 nt, Human
cccuggcagagaugccucccu

SEQ ID NO: 1326472 - RNA, 22 nt, Human
cccuggcagagaugccucccug

SEQ ID NO: 1326473 - RNA, 20 nt, Human
cccuggcaugucaacagcgu

SEQ ID NO: 1326474 - RNA, 9 nt, Human
cccuggccc

SEQ ID NO: 1326475 - RNA, 13 nt, Human
cccuggccccagg

SEQ ID NO: 1326476 - RNA, 14 nt, Human
cccuggccccagga

SEQ ID NO: 1326477 - RNA, 13 nt, Human
cccuggcccccuc

SEQ ID NO: 1326478 - RNA, 21 nt, Human
cccuggcccccucccuggaug

SEQ ID NO: 1326479 - RNA, 20 nt, Human
cccuggcccccucccuggau

SEQ ID NO: 1326480 - RNA, 11 nt, Human
cccuggccccu

SEQ ID NO: 1326481 - RNA, 18 nt, Human
cccuggccccucucccuu

SEQ ID NO: 1326482 - RNA, 17 nt, Human
cccuggccccucucccu

SEQ ID NO: 1326483 - RNA, 17 nt, Human
cccuggcucccacaggc

SEQ ID NO: 1326484 - RNA, 19 nt, Human
cccuggcucccacaggccc

SEQ ID NO: 1326485 - RNA, 23 nt, Human
cccuggcugggacguggcucagc

SEQ ID NO: 1326486 - RNA, 17 nt, Human
cccuggcuuuucacugc

SEQ ID NO: 1326487 - RNA, 23 nt, Human
cccuggcuuucauuuucucucag

SEQ ID NO: 1326488 - RNA, 24 nt, Human
cccuggcuuucauuuucucucagg

SEQ ID NO: 1326489 - RNA, 13 nt, Human
cccuggcuuuuca

SEQ ID NO: 1326490 - RNA, 10 nt, Human
cccuggcuuu

SEQ ID NO: 1326491 - RNA, 23 nt, Human
ccuaauaaagcuguguggcaguc

SEQ ID NO: 1326492 - RNA, 16 nt, Human
ccuaauaaaguucugu

SEQ ID NO: 1326493 - RNA, 21 nt, Human
ccuaauaaaguucuguacuca

SEQ ID NO: 1326494 - RNA, 20 nt, Human
ccuaauaauaucccacuggg

SEQ ID NO: 1326495 - RNA, 19 nt, Human
ccuaauaauaucccacugg

SEQ ID NO: 1326496 - RNA, 13 nt, Human
ccuaauccaggca

SEQ ID NO: 1326497 - RNA, 14 nt, Human
ccuaauccaggcag

SEQ ID NO: 1326498 - RNA, 15 nt, Human
ccuaauccaggcaga

SEQ ID NO: 1326499 - RNA, 21 nt, Human
ccuagagucccagguuggcuc

SEQ ID NO: 1326500 - RNA, 14 nt, Human
ccuaauaaagcugu

SEQ ID NO: 1326501 - RNA, 23 nt, Human
ccuaagggucgaaagcucuagaa

SEQ ID NO: 1326502 - RNA, 22 nt, Human
ccuaagggucgaaagcucuaga

SEQ ID NO: 1326503 - RNA, 19 nt, Human
ccuaagcuggagugcagug

SEQ ID NO: 1326504 - RNA, 17 nt, Human
ccuaagccagcugcccc

SEQ ID NO: 1326505 - RNA, 18 nt, Human
ccuaagggauccugccug

SEQ ID NO: 1326506 - RNA, 19 nt, Human
ccuaagggucgaaagcucu

SEQ ID NO: 1326507 - RNA, 21 nt, Human
ccuaagggucgaaagcucuag

SEQ ID NO: 1326508 - RNA, 18 nt, Human
ccuaagcuggagugcagu

SEQ ID NO: 1326509 - RNA, 18 nt, Human
ccuaagccagcugccccc

SEQ ID NO: 1326510 - RNA, 13 nt, Human
ccuaagcaucuaa

SEQ ID NO: 1326511 - RNA, 14 nt, Human
ccuaagccagcugc

SEQ ID NO: 1326512 - RNA, 16 nt, Human
ccuaagccagcugccc

SEQ ID NO: 1326513 - RNA, 23 nt, Human
ccuaagcagaaagugccuuucag

SEQ ID NO: 1326514 - RNA, 12 nt, Human
ccuaagcaucua

SEQ ID NO: 1326515 - RNA, 16 nt, Human
ccuaagcaucuaaguu

SEQ ID NO: 1326516 - RNA, 18 nt, Human
ccgucucugguuccuccc

SEQ ID NO: 1326517 - RNA, 16 nt, Human
ccgucuggcccaccag

SEQ ID NO: 1326518 - RNA, 17 nt, Human
ccgucuggcccaccagg

SEQ ID NO: 1326519 - RNA, 18 nt, Human
ccgucuggcccaccaggg

SEQ ID NO: 1326520 - RNA, 19 nt, Human
ccuaagaggcugcccuccu

SEQ ID NO: 1326521 - RNA, 14 nt, Human
ccuaagcagaaagu

SEQ ID NO: 1326522 - RNA, 15 nt, Human
ccuaagcagaaagug

SEQ ID NO: 1326523 - RNA, 17 nt, Human
ccuaagcagaaagugcc

SEQ ID NO: 1326524 - RNA, 19 nt, Human
ccuaagcagaaagugccuu

SEQ ID NO: 1326525 - RNA, 20 nt, Human
ccuaagcagaaagugccuuu

SEQ ID NO: 1326526 - RNA, 16 nt, Human
ccguagguuauuuuca

SEQ ID NO: 1326527 - RNA, 19 nt, Human
ccggcuaauuuuuguauuu

SEQ ID NO: 1326528 - RNA, 17 nt, Human
ccggcuaugggggcacu

SEQ ID NO: 1326529 - RNA, 22 nt, Human
ccggcuaugggggcacugagga

SEQ ID NO: 1326530 - RNA, 23 nt, Human
ccggcuaugggggcacugaggac

SEQ ID NO: 1326531 - RNA, 15 nt, Human
ccggcuaauuuuugu

SEQ ID NO: 1326532 - RNA, 18 nt, Human
ccggcuaauuuuuguaau

SEQ ID NO: 1326533 - RNA, 22 nt, Human
ccgucaaaacagauuguuugca

SEQ ID NO: 1326534 - RNA, 23 nt, Human
ccgucaagagugaauucccucac

SEQ ID NO: 1326535 - RNA, 22 nt, Human
ccgucaagagugaauucccuca

SEQ ID NO: 1326536 - RNA, 19 nt, Human
ccgucaccacgacuggcca

SEQ ID NO: 1326537 - RNA, 20 nt, Human
ccgucaccacgacuggccag

SEQ ID NO: 1326538 - RNA, 21 nt, Human
ccgucaccacgacuggccagg

SEQ ID NO: 1326539 - RNA, 17 nt, Human
ccgucaccccuguuucu

SEQ ID NO: 1326540 - RNA, 12 nt, Human
ccgucagugcug

SEQ ID NO: 1326541 - RNA, 16 nt, Human
ccguccaggagccugg

SEQ ID NO: 1326542 - RNA, 18 nt, Human
ccguccaggagccugugc

SEQ ID NO: 1326543 - RNA, 21 nt, Human
ccgucucaguguugagccuuu

SEQ ID NO: 1326544 - RNA, 20 nt, Human
ccgucuccaggggcugcuuc

SEQ ID NO: 1326545 - RNA, 21 nt, Human
ccgucuccaggggcugcuucc

SEQ ID NO: 1326546 - RNA, 16 nt, Human
ccuaggcauucuggac

SEQ ID NO: 1326547 - RNA, 15 nt, Human
ccuaggaggguccuc

SEQ ID NO: 1326548 - RNA, 11 nt, Human
ccuaggauucu

SEQ ID NO: 1326549 - RNA, 14 nt, Human
ccuaggauucuaaa

SEQ ID NO: 1326550 - RNA, 15 nt, Human
ccuagcacagauggc

SEQ ID NO: 1326551 - RNA, 12 nt, Human
ccuagaguccca

SEQ ID NO: 1326552 - RNA, 14 nt, Human
ccuagauccuaagg

SEQ ID NO: 1326553 - RNA, 16 nt, Human
ccuagauccuaagggu

SEQ ID NO: 1326554 - RNA, 20 nt, Human
ccuagauguauaacuaggag

SEQ ID NO: 1326555 - RNA, 22 nt, Human
ccuagauguauaacuaggagcu

SEQ ID NO: 1326556 - RNA, 21 nt, Human
ccuagauguauaacuaggagc

SEQ ID NO: 1326557 - RNA, 16 nt, Human
ccuagauucagggaaa

SEQ ID NO: 1326558 - RNA, 16 nt, Human
ccuagauuuaauauaa

SEQ ID NO: 1326559 - RNA, 15 nt, Human
ccuauuuuaauaaac

SEQ ID NO: 1326560 - RNA, 16 nt, Human
ccuauuuccagaaaua

SEQ ID NO: 1326561 - RNA, 18 nt, Human
ccuauuuccauucaacaa

SEQ ID NO: 1326562 - RNA, 19 nt, Human
ccuauugugcaauguaaau

SEQ ID NO: 1326563 - RNA, 18 nt, Human
ccucaacguauuguuucg

SEQ ID NO: 1326564 - RNA, 17 nt, Human
ccucaagaugaaggcaa

SEQ ID NO: 1326565 - RNA, 15 nt, Human
ccucaagcugcaucu

SEQ ID NO: 1326566 - RNA, 13 nt, Human
ccucagccuccug

SEQ ID NO: 1326567 - RNA, 19 nt, Human
ccucagccucccaaagugc

SEQ ID NO: 1326568 - RNA, 22 nt, Human
ccucagccucccaaguagcugg

SEQ ID NO: 1326569 - RNA, 13 nt, Human
ccucauguggcug

SEQ ID NO: 1326570 - RNA, 15 nt, Human
ccucauguggcugga

SEQ ID NO: 1326571 - RNA, 16 nt, Human
ccucauguggcuggaa

SEQ ID NO: 1326572 - RNA, 17 nt, Human
ccucauguggcuggaag

SEQ ID NO: 1326573 - RNA, 20 nt, Human
ccucauguccacugguucuu

SEQ ID NO: 1326574 - RNA, 21 nt, Human
ccucagccucccaaagugcug

SEQ ID NO: 1326575 - RNA, 21 nt, Human
ccuccaagcuccaucuccacu

SEQ ID NO: 1326576 - RNA, 22 nt, Human
ccuccaagcuccaucuccacuc

SEQ ID NO: 1326577 - RNA, 18 nt, Human
ccucauguggcuggaaga

SEQ ID NO: 1326578 - RNA, 23 nt, Human
ccucauguggcuggaagauccug

SEQ ID NO: 1326579 - RNA, 22 nt, Human
ccuccaaucccaccaacccuca

SEQ ID NO: 1326580 - RNA, 20 nt, Human
ccuccaaggaggggcuguaa

SEQ ID NO: 1326581 - RNA, 21 nt, Human
ccuccaaggaggggcuguaaa

SEQ ID NO: 1326582 - RNA, 14 nt, Human
ccucccaggcgccc

SEQ ID NO: 1326583 - RNA, 20 nt, Human
ccucccaggcgccccuuccc

SEQ ID NO: 1326584 - RNA, 14 nt, Human
ccucccaagcaguu

SEQ ID NO: 1326585 - RNA, 19 nt, Human
ccucccaauuucagacucc

SEQ ID NO: 1326586 - RNA, 20 nt, Human
ccucccaauuucagacuccc

SEQ ID NO: 1326587 - RNA, 16 nt, Human
auuguugucugcaacu

SEQ ID NO: 1326588 - RNA, 16 nt, Human
auuguuguccuuuuca

SEQ ID NO: 1326589 - RNA, 17 nt, Human
auuguuguccuuuucau

SEQ ID NO: 1326590 - RNA, 18 nt, Human
auuguuguccuuuucaua

SEQ ID NO: 1326591 - RNA, 16 nt, Human
auuguugagcuauugc

SEQ ID NO: 1326592 - RNA, 19 nt, Human
auuguugagcuauugcugu

SEQ ID NO: 1326593 - RNA, 12 nt, Human
auuguugcauua

SEQ ID NO: 1326594 - RNA, 16 nt, Human
auuguugcauugcuuu

SEQ ID NO: 1326595 - RNA, 14 nt, Human
auuguugcauugcu

SEQ ID NO: 1326596 - RNA, 21 nt, Human
auuguuguacacagaaauaca

SEQ ID NO: 1326597 - RNA, 13 nt, Human
auuguuguccuuu

SEQ ID NO: 1326598 - RNA, 15 nt, Human
auuguuguccuuuuc

SEQ ID NO: 1326599 - RNA, 19 nt, Human
auuguguggauucuuuaaa

SEQ ID NO: 1326600 - RNA, 21 nt, Human
auuguuacauuauguggaaaa

SEQ ID NO: 1326601 - RNA, 19 nt, Human
auuguuacguagccuaagg

SEQ ID NO: 1326602 - RNA, 15 nt, Human
auuguuaguuucuga

SEQ ID NO: 1326603 - RNA, 22 nt, Human
auuguuauauacauacuaugaa

SEQ ID NO: 1326604 - RNA, 13 nt, Human
auuguaaucacug

SEQ ID NO: 1326605 - RNA, 16 nt, Human
auuguaaucugaauaa

SEQ ID NO: 1326606 - RNA, 12 nt, Human
auuguaaucacu

SEQ ID NO: 1326607 - RNA, 14 nt, Human
auuguaaaauggug

SEQ ID NO: 1326608 - RNA, 20 nt, Human
auuguaaaauuauuucauga

SEQ ID NO: 1326609 - RNA, 23 nt, Human
auuguaaacaaacuguguaacug

SEQ ID NO: 1326610 - RNA, 12 nt, Human
auuguaaaguaa

SEQ ID NO: 1326611 - RNA, 12 nt, Human
auugcuccuuga

SEQ ID NO: 1326612 - RNA, 19 nt, Human
auugcucugaauaugucau

SEQ ID NO: 1326613 - RNA, 12 nt, Human
auugcugaaauu

SEQ ID NO: 1326614 - RNA, 16 nt, Human
auugcucacccagugc

SEQ ID NO: 1326615 - RNA, 23 nt, Human
auugcucacccagugcccucucc

SEQ ID NO: 1326616 - RNA, 13 nt, Human
auugcugaaauuu

SEQ ID NO: 1326617 - RNA, 16 nt, Human
auugcugaaauuuuau

SEQ ID NO: 1326618 - RNA, 16 nt, Human
auugcugacuguagcu

SEQ ID NO: 1326619 - RNA, 20 nt, Human
auugcugccccaucagugcu

SEQ ID NO: 1326620 - RNA, 21 nt, Human
auugcugccccaucagugcuc

SEQ ID NO: 1326621 - RNA, 17 nt, Human
auugcuuauuuauugua

SEQ ID NO: 1326622 - RNA, 20 nt, Human
auugcuuauuuauuguauuc

SEQ ID NO: 1326623 - RNA, 23 nt, Human
auugcuuauuuauuguauucugg

SEQ ID NO: 1326624 - RNA, 16 nt, Human
auugcuuccuccuccc

SEQ ID NO: 1326625 - RNA, 19 nt, Human
auugcuuccuccuccccaa

SEQ ID NO: 1326626 - RNA, 19 nt, Human
auugaguaaugguguagaa

SEQ ID NO: 1326627 - RNA, 20 nt, Human
auugaguaaugguguagaac

SEQ ID NO: 1326628 - RNA, 15 nt, Human
auugagucaaauggu

SEQ ID NO: 1326629 - RNA, 13 nt, Human
auugaguuggaau

SEQ ID NO: 1326630 - RNA, 15 nt, Human
auugaguuuucagug

SEQ ID NO: 1326631 - RNA, 16 nt, Human
auugaguuuucagugg

SEQ ID NO: 1326632 - RNA, 19 nt, Human
auugauaaccuugaaaaaa

SEQ ID NO: 1326633 - RNA, 22 nt, Human
auugaguaaugguguagaacac

SEQ ID NO: 1326634 - RNA, 18 nt, Human
auugauagaguguuauca

SEQ ID NO: 1326635 - RNA, 14 nt, Human
auugcuagagcucc

SEQ ID NO: 1326636 - RNA, 15 nt, Human
auugcuagagcuccu

SEQ ID NO: 1326637 - RNA, 23 nt, Human
auugcuagagcuccucccucuca

SEQ ID NO: 1326638 - RNA, 16 nt, Human
auugcuagagcuccuc

SEQ ID NO: 1326639 - RNA, 18 nt, Human
auugcuagagcuccuccc

SEQ ID NO: 1326640 - RNA, 19 nt, Human
auugcuagagcuccucccu

SEQ ID NO: 1326641 - RNA, 22 nt, Human
auugcuauguuuugacauuuuu

SEQ ID NO: 1326642 - RNA, 16 nt, Human
auucuugauguaaaau

SEQ ID NO: 1326643 - RNA, 17 nt, Human
auucuugauguaaaauc

SEQ ID NO: 1326644 - RNA, 21 nt, Human
auucuuucccaauucacaucu

SEQ ID NO: 1326645 - RNA, 19 nt, Human
auucuuucccagucugucg

SEQ ID NO: 1326646 - RNA, 20 nt, Human
auucuuucccagucugucga

SEQ ID NO: 1326647 - RNA, 15 nt, Human
auucugaaugcuucu

SEQ ID NO: 1326648 - RNA, 16 nt, Human
auucugaaugcuucua

SEQ ID NO: 1326649 - RNA, 17 nt, Human
auucugaaugcuucuaa

SEQ ID NO: 1326650 - RNA, 19 nt, Human
auucugaaugcuucuaagu

SEQ ID NO: 1326651 - RNA, 22 nt, Human
auucugaaugcuucuaaguaaa

SEQ ID NO: 1326652 - RNA, 14 nt, Human
auucugaccuuaaa

SEQ ID NO: 1326653 - RNA, 13 nt, Human
auucuucugaacu

SEQ ID NO: 1326654 - RNA, 16 nt, Human
auucauaguaacuucu

SEQ ID NO: 1326655 - RNA, 17 nt, Human
auucauaguaacuucuu

SEQ ID NO: 1326656 - RNA, 20 nt, Human
auucucuuguauaagauccu

SEQ ID NO: 1326657 - RNA, 18 nt, Human
auucauaguaacuucuua

SEQ ID NO: 1326658 - RNA, 22 nt, Human
auucucuuguauaagauccuag

SEQ ID NO: 1326659 - RNA, 22 nt, Human
auucugaacuaaagugcugcac

SEQ ID NO: 1326660 - RNA, 19 nt, Human
auucugaacuaaagugcug

SEQ ID NO: 1326661 - RNA, 15 nt, Human
auucugaaggagccc

SEQ ID NO: 1326662 - RNA, 16 nt, Human
auucugaaggagcccc

SEQ ID NO: 1326663 - RNA, 21 nt, Human
auucuucugaacucaaacuga

SEQ ID NO: 1326664 - RNA, 17 nt, Human
auucuucugagcacugu

SEQ ID NO: 1326665 - RNA, 16 nt, Human
auucuuucccaacacc

SEQ ID NO: 1326666 - RNA, 19 nt, Human
auucuuucccaacaccucu

SEQ ID NO: 1326667 - RNA, 12 nt, Human
auucuugaugua

SEQ ID NO: 1326668 - RNA, 14 nt, Human
auucuugauguaaa

SEQ ID NO: 1326669 - RNA, 18 nt, Human
auucuugauguaaaaucu

SEQ ID NO: 1326670 - RNA, 18 nt, Human
auuagcagucccuccaca

SEQ ID NO: 1326671 - RNA, 17 nt, Human
auuagcaguuugcuuug

SEQ ID NO: 1326672 - RNA, 22 nt, Human
auuagcaauugacugucacugu

SEQ ID NO: 1326673 - RNA, 23 nt, Human
auuagauuucucauuugccaaua

SEQ ID NO: 1326674 - RNA, 23 nt, Human
auuagccaguaauccuguaggaa

SEQ ID NO: 1326675 - RNA, 17 nt, Human
auuagccagugaaaaac

SEQ ID NO: 1326676 - RNA, 19 nt, Human
auuagccaguaauccugua

SEQ ID NO: 1326677 - RNA, 18 nt, Human
auuagccaguaauccugu

SEQ ID NO: 1326678 - RNA, 17 nt, Human
auuagccaguaauccug

SEQ ID NO: 1326679 - RNA, 16 nt, Human
auuagccaguaauccu

SEQ ID NO: 1326680 - RNA, 14 nt, Human
auuagccaguaauc

SEQ ID NO: 1326681 - RNA, 12 nt, Human
auuagccaguaa

SEQ ID NO: 1326682 - RNA, 19 nt, Human
auuacaguggggaaugaag

SEQ ID NO: 1326683 - RNA, 17 nt, Human
auuacaggcgugagcca

SEQ ID NO: 1326684 - RNA, 15 nt, Human
auuacagauaaaaug

SEQ ID NO: 1326685 - RNA, 22 nt, Human
auuacagauaaaauguaaacug

SEQ ID NO: 1326686 - RNA, 19 nt, Human
auuacagaugggcaaauua

SEQ ID NO: 1326687 - RNA, 21 nt, Human
auuacagaugggcaaauuaag

SEQ ID NO: 1326688 - RNA, 15 nt, Human
auuacagcuggagaa

SEQ ID NO: 1326689 - RNA, 20 nt, Human
auuacaggcaccugccacca

SEQ ID NO: 1326690 - RNA, 22 nt, Human
auuacaggcaccugccaccaug

SEQ ID NO: 1326691 - RNA, 22 nt, Human
auuacaggcgugagccaccucg

SEQ ID NO: 1326692 - RNA, 22 nt, Human
auuaauuccuucagcacuuuag

SEQ ID NO: 1326693 - RNA, 13 nt, Human
auuaauucuauaa

SEQ ID NO: 1326694 - RNA, 18 nt, Human
auuaauuccuguuugucu

SEQ ID NO: 1326695 - RNA, 14 nt, Human
auuaauucuauaag

SEQ ID NO: 1326696 - RNA, 20 nt, Human
auuaauuccuguuugucuac

SEQ ID NO: 1326697 - RNA, 17 nt, Human
auuacaacggagucaaa

SEQ ID NO: 1326698 - RNA, 15 nt, Human
auuacaacggaguca

SEQ ID NO: 1326699 - RNA, 14 nt, Human
auuacaaaucagaa

SEQ ID NO: 1326700 - RNA, 16 nt, Human
auuacaaaucagaagu

SEQ ID NO: 1326701 - RNA, 18 nt, Human
auuacaaaucagaaguca

SEQ ID NO: 1326702 - RNA, 19 nt, Human
auuacaaaucagaagucau

SEQ ID NO: 1326703 - RNA, 21 nt, Human
auuacaaaucagaagucaucu

SEQ ID NO: 1326704 - RNA, 22 nt, Human
auuacaaaucagaagucaucuu

SEQ ID NO: 1326705 - RNA, 23 nt, Human
auuacaaaucagaagucaucuug

SEQ ID NO: 1326706 - RNA, 23 nt, Human
auguuugggagacugcugaguca

SEQ ID NO: 1326707 - RNA, 22 nt, Human
auguuucuucuagguucuaaaa

SEQ ID NO: 1326708 - RNA, 23 nt, Human
auguuuggcugcuagaacauggu

SEQ ID NO: 1326709 - RNA, 13 nt, Human
auguuugguaaga

SEQ ID NO: 1326710 - RNA, 16 nt, Human
auucaaauguauuaca

SEQ ID NO: 1326711 - RNA, 18 nt, Human
auucaaauguauuacagu

SEQ ID NO: 1326712 - RNA, 18 nt, Human
auucaaugccccugaauu

SEQ ID NO: 1326713 - RNA, 20 nt, Human
auucaaugccccugaauuua

SEQ ID NO: 1326714 - RNA, 16 nt, Human
auucaauucaaagcug

SEQ ID NO: 1326715 - RNA, 19 nt, Human
auucacaagacccaaaagg

SEQ ID NO: 1326716 - RNA, 18 nt, Human
auuaugaauuacauuugu

SEQ ID NO: 1326717 - RNA, 19 nt, Human
auuaugaagaaggugaaua

SEQ ID NO: 1326718 - RNA, 20 nt, Human
auuaugaaugugaagccuuc

SEQ ID NO: 1326719 - RNA, 15 nt, Human
auuaugauuagcuuu

SEQ ID NO: 1326720 - RNA, 18 nt, Human
auuaugcaauuuuuauau

SEQ ID NO: 1326721 - RNA, 14 nt, Human
auucaaaguguuau

SEQ ID NO: 1326722 - RNA, 14 nt, Human
auuaugaauuacau

SEQ ID NO: 1326723 - RNA, 17 nt, Human
auuaugaauuacauuug

SEQ ID NO: 1326724 - RNA, 18 nt, Human
auuaugaaacuuuuggaa

SEQ ID NO: 1326725 - RNA, 22 nt, Human
auuaucuuuucauacauuuucu

SEQ ID NO: 1326726 - RNA, 23 nt, Human
auuaucuuuucauacauuuucua

SEQ ID NO: 1326727 - RNA, 15 nt, Human
auuagggaugccucc

SEQ ID NO: 1326728 - RNA, 18 nt, Human
auuagggcccugugucug

SEQ ID NO: 1326729 - RNA, 15 nt, Human
auuagggcccugugu

SEQ ID NO: 1326730 - RNA, 22 nt, Human
auuagcuuauguuaacugacaa

SEQ ID NO: 1326731 - RNA, 21 nt, Human
auuagcuuauguuaacugaca

SEQ ID NO: 1326732 - RNA, 13 nt, Human
auuagcuuauguu

SEQ ID NO: 1326733 - RNA, 21 nt, Human
auucauaauuauuauuuggcc

SEQ ID NO: 1326734 - RNA, 22 nt, Human
auucauagcagcuuauucacaa

SEQ ID NO: 1326735 - RNA, 19 nt, Human
auucauagcagcuuauuca

SEQ ID NO: 1326736 - RNA, 22 nt, Human
auucacaguucuuugggccaga

SEQ ID NO: 1326737 - RNA, 21 nt, Human
auucacagugcucuuuucucc

SEQ ID NO: 1326738 - RNA, 19 nt, Human
auucacagugcucuuuucu

SEQ ID NO: 1326739 - RNA, 20 nt, Human
auucacagugcucuuuucuc

SEQ ID NO: 1326740 - RNA, 17 nt, Human
auuuuauaggaaaaaau

SEQ ID NO: 1326741 - RNA, 19 nt, Human
auuuuauaggaaaaaauaa

SEQ ID NO: 1326742 - RNA, 22 nt, Human
auuuuauaggcauaccuccuau

SEQ ID NO: 1326743 - RNA, 19 nt, Human
auuuuauagcuacuaauuu

SEQ ID NO: 1326744 - RNA, 18 nt, Human
auuuguuucuuucucuga

SEQ ID NO: 1326745 - RNA, 19 nt, Human
auuuguuuauguaauuuca

SEQ ID NO: 1326746 - RNA, 13 nt, Human
auuuguuucuacu

SEQ ID NO: 1326747 - RNA, 15 nt, Human
auuuguuggaaugaa

SEQ ID NO: 1326748 - RNA, 17 nt, Human
auuuguuuaaaaaguaa

SEQ ID NO: 1326749 - RNA, 16 nt, Human
auuuguuuaaaaagua

SEQ ID NO: 1326750 - RNA, 20 nt, Human
auuuguuuaugguaaaaaau

SEQ ID NO: 1326751 - RNA, 22 nt, Human
auuuguuuaugguaaaaaauuu

SEQ ID NO: 1326752 - RNA, 13 nt, Human
auuuguuuaugua

SEQ ID NO: 1326753 - RNA, 17 nt, Human
auuuguuuauguaauuu

SEQ ID NO: 1326754 - RNA, 18 nt, Human
auuuguuuauguaauuuc

SEQ ID NO: 1326755 - RNA, 22 nt, Human
auuuguggguuuuuauuuccua

SEQ ID NO: 1326756 - RNA, 21 nt, Human
auuuguggguuuuuauuuccu

SEQ ID NO: 1326757 - RNA, 13 nt, Human
auuuguugagagu

SEQ ID NO: 1326758 - RNA, 22 nt, Human
auuuguugagagugugaccaaa

SEQ ID NO: 1326759 - RNA, 11 nt, Human
auuuguugcau

SEQ ID NO: 1326760 - RNA, 13 nt, Human
auuuguuggaaug

SEQ ID NO: 1326761 - RNA, 14 nt, Human
auuuguuggaauga

SEQ ID NO: 1326762 - RNA, 15 nt, Human
auuuggaaauaaagu

SEQ ID NO: 1326763 - RNA, 17 nt, Human
auuuggaaauaaaguca

SEQ ID NO: 1326764 - RNA, 22 nt, Human
auuuggaaauaaagucagaugg

SEQ ID NO: 1326765 - RNA, 18 nt, Human
auuugcuuuuugugauau

SEQ ID NO: 1326766 - RNA, 14 nt, Human
auuugugccagaau

SEQ ID NO: 1326767 - RNA, 19 nt, Human
auuugugcccccaaccauu

SEQ ID NO: 1326768 - RNA, 14 nt, Human
auuugcucauggaa

SEQ ID NO: 1326769 - RNA, 17 nt, Human
auuugcucauggaauug

SEQ ID NO: 1326770 - RNA, 13 nt, Human
auuuggaaaauaa

SEQ ID NO: 1326771 - RNA, 12 nt, Human
auuuggaaaaua

SEQ ID NO: 1326772 - RNA, 17 nt, Human
auuugcuuuuugugaua

SEQ ID NO: 1326773 - RNA, 13 nt, Human
auuugcuuuggaa

SEQ ID NO: 1326774 - RNA, 14 nt, Human
auuugcuuuggaag

SEQ ID NO: 1326775 - RNA, 15 nt, Human
auuugcuuuggaagu

SEQ ID NO: 1326776 - RNA, 11 nt, Human
auuugcuuuuu

SEQ ID NO: 1326777 - RNA, 18 nt, Human
auuugcuuuuucaccaga

SEQ ID NO: 1326778 - RNA, 16 nt, Human
auuugccuguaacaag

SEQ ID NO: 1326779 - RNA, 13 nt, Human
auuugcuaauuuu

SEQ ID NO: 1326780 - RNA, 14 nt, Human
auuugcuaauuuuu

SEQ ID NO: 1326781 - RNA, 16 nt, Human
auuugcuaauuuuuau

SEQ ID NO: 1326782 - RNA, 19 nt, Human
auuugcuaauuuuuauuaa

SEQ ID NO: 1326783 - RNA, 11 nt, Human
auuugccugua

SEQ ID NO: 1326784 - RNA, 13 nt, Human
auuugccuguaac

SEQ ID NO: 1326785 - RNA, 15 nt, Human
auuugccuguaacaa

SEQ ID NO: 1326786 - RNA, 22 nt, Human
auuugccuguaacaagccagau

SEQ ID NO: 1326787 - RNA, 15 nt, Human
auuugccaauaauaa

SEQ ID NO: 1326788 - RNA, 16 nt, Human
auuugcauuuguuuau

SEQ ID NO: 1326789 - RNA, 21 nt, Human
auuugcauuuguuuauguaau

SEQ ID NO: 1326790 - RNA, 23 nt, Human
auuugcauuuguuuauguaauuu

SEQ ID NO: 1326791 - RNA, 16 nt, Human
auuugcauugaacaca

SEQ ID NO: 1326792 - RNA, 21 nt, Human
auuugcauugaacacaaacug

SEQ ID NO: 1326793 - RNA, 22 nt, Human
auuugcauugaacacaaacugu

SEQ ID NO: 1326794 - RNA, 12 nt, Human
auuugcauuugu

SEQ ID NO: 1326795 - RNA, 13 nt, Human
auuugcauuuguu

SEQ ID NO: 1326796 - RNA, 16 nt, Human
auuugccaauaauaau

SEQ ID NO: 1326797 - RNA, 22 nt, Human
auuugcauuuguuuauguaauu

SEQ ID NO: 1326798 - RNA, 17 nt, Human
auuugcauacauucuuc

SEQ ID NO: 1326799 - RNA, 18 nt, Human
auuugcauuaaauucaca

SEQ ID NO: 1326800 - RNA, 19 nt, Human
auuugcauuaaauucacaa

SEQ ID NO: 1326801 - RNA, 23 nt, Human
auuugcauuaaauucacaaacuu

SEQ ID NO: 1326802 - RNA, 15 nt, Human
auuugcaagggaaaa

SEQ ID NO: 1326803 - RNA, 20 nt, Human
auuugcaagggaaaagucuc

SEQ ID NO: 1326804 - RNA, 22 nt, Human
auuugcagcugagagaaaauaa

SEQ ID NO: 1326805 - RNA, 14 nt, Human
auuugcaggguccu

SEQ ID NO: 1326806 - RNA, 21 nt, Human
auuugcauaacaauuccucua

SEQ ID NO: 1326807 - RNA, 22 nt, Human
auuugcauaacaauuccucuac

SEQ ID NO: 1326808 - RNA, 13 nt, Human
auuugauugauuu

SEQ ID NO: 1326809 - RNA, 16 nt, Human
auuugauugauuugaa

SEQ ID NO: 1326810 - RNA, 20 nt, Human
caaacaggaucaguuaacua

SEQ ID NO: 1326811 - RNA, 15 nt, Human
caaacaggcucagag

SEQ ID NO: 1326812 - RNA, 14 nt, Human
caaacaggcucaga

SEQ ID NO: 1326813 - RNA, 20 nt, Human
caaacagccaacuagccccu

SEQ ID NO: 1326814 - RNA, 19 nt, Human
caaaagggccaaagaacca

SEQ ID NO: 1326815 - RNA, 24 nt, Human
caaaagggggauucccugauggaa

SEQ ID NO: 1326816 - RNA, 20 nt, Human
caaaagggccaaagaaccaa

SEQ ID NO: 1326817 - RNA, 21 nt, Human
caaacccaccugcuaguguga

SEQ ID NO: 1326818 - RNA, 20 nt, Human
caaaaaaaaaaaaaaauuag

SEQ ID NO: 1326819 - RNA, 20 nt, Human
auuuuuuuuuuuuuccuguc

SEQ ID NO: 1326820 - RNA, 19 nt, Human
auuuuuuuuuuuuuuuccu

SEQ ID NO: 1326821 - RNA, 23 nt, Human
auuuuuuuuuuuuuuuuuuuaag

SEQ ID NO: 1326822 - RNA, 19 nt, Human
auuuuuuuuuuuucucuca

SEQ ID NO: 1326823 - RNA, 16 nt, Human
caaaagauugcugaaa

SEQ ID NO: 1326824 - RNA, 19 nt, Human
caaaagauugcugaaauuu

SEQ ID NO: 1326825 - RNA, 20 nt, Human
caaaagauugcugaaauuuu

SEQ ID NO: 1326826 - RNA, 15 nt, Human
caaaaggcagaagca

SEQ ID NO: 1326827 - RNA, 12 nt, Human
caacaauaaaua

SEQ ID NO: 1326828 - RNA, 13 nt, Human
caacaauucuaaa

SEQ ID NO: 1326829 - RNA, 22 nt, Human
caacaccaagcacagcagccug

SEQ ID NO: 1326830 - RNA, 17 nt, Human
caacaccaugauuccuu

SEQ ID NO: 1326831 - RNA, 19 nt, Human
caacaccaugauuccuuua

SEQ ID NO: 1326832 - RNA, 22 nt, Human
caacaccaugauuccuuuaaca

SEQ ID NO: 1326833 - RNA, 15 nt, Human
caacacgcaccugcc

SEQ ID NO: 1326834 - RNA, 17 nt, Human
caacacgcaccugccuc

SEQ ID NO: 1326835 - RNA, 15 nt, Human
caaauccuugaagau

SEQ ID NO: 1326836 - RNA, 17 nt, Human
caaauccuuagaucugg

SEQ ID NO: 1326837 - RNA, 21 nt, Human
caaauccuuagaucuggcaug

SEQ ID NO: 1326838 - RNA, 14 nt, Human
caacacuaacauga

SEQ ID NO: 1326839 - RNA, 19 nt, Human
caacacgcaccugccucag

SEQ ID NO: 1326840 - RNA, 16 nt, Human
caacacccauuuuucc

SEQ ID NO: 1326841 - RNA, 13 nt, Human
caacacguuacua

SEQ ID NO: 1326842 - RNA, 21 nt, Human
caaagucucuggaauuugaaa

SEQ ID NO: 1326843 - RNA, 12 nt, Human
caaagucucuaa

SEQ ID NO: 1326844 - RNA, 13 nt, Human
caaagucucuaau

SEQ ID NO: 1326845 - RNA, 14 nt, Human
caaagucucuaauu

SEQ ID NO: 1326846 - RNA, 15 nt, Human
caaagucucuaauuc

SEQ ID NO: 1326847 - RNA, 16 nt, Human
caaagugcaaggaccu

SEQ ID NO: 1326848 - RNA, 12 nt, Human
caaagugcaagg

SEQ ID NO: 1326849 - RNA, 15 nt, Human
caaagugcugagauu

SEQ ID NO: 1326850 - RNA, 16 nt, Human
caaagugcugagauua

SEQ ID NO: 1326851 - RNA, 12 nt, Human
caaagguucuag

SEQ ID NO: 1326852 - RNA, 14 nt, Human
caaagguucuaggu

SEQ ID NO: 1326853 - RNA, 19 nt, Human
caaagguucuagguuucaa

SEQ ID NO: 1326854 - RNA, 21 nt, Human
caaagguucuagguuucaaag

SEQ ID NO: 1326855 - RNA, 22 nt, Human
caaagguucuagguuucaaaga

SEQ ID NO: 1326856 - RNA, 15 nt, Human
caaagguugagaugu

SEQ ID NO: 1326857 - RNA, 13 nt, Human
caaagguuuaaau

SEQ ID NO: 1326858 - RNA, 16 nt, Human
caaagguuuaaaugaa

SEQ ID NO: 1326859 - RNA, 20 nt, Human
caaagguuuaaaugaacaag

SEQ ID NO: 1326860 - RNA, 23 nt, Human
caaagguuuaaaugaacaagaga

SEQ ID NO: 1326861 - RNA, 16 nt, Human
caaagguuuggaagga

SEQ ID NO: 1326862 - RNA, 17 nt, Human
caaagguuuggaaggag

SEQ ID NO: 1326863 - RNA, 18 nt, Human
caaagguuuggaaggagc

SEQ ID NO: 1326864 - RNA, 19 nt, Human
caaagguuuggaaggagca

SEQ ID NO: 1326865 - RNA, 11 nt, Human
caaagguuuuc

SEQ ID NO: 1326866 - RNA, 19 nt, Human
caaagguuuuccucuucua

SEQ ID NO: 1326867 - RNA, 21 nt, Human
caaagguuuggaaggagcaga

SEQ ID NO: 1326868 - RNA, 11 nt, Human
caaagaugcug

SEQ ID NO: 1326869 - RNA, 16 nt, Human
caaagaugcugugagu

SEQ ID NO: 1326870 - RNA, 17 nt, Human
caaagauucucuaugua

SEQ ID NO: 1326871 - RNA, 13 nt, Human
caaagauuuaauc

SEQ ID NO: 1326872 - RNA, 16 nt, Human
caaagauuuaaucugc

SEQ ID NO: 1326873 - RNA, 14 nt, Human
caaagcaagacccu

SEQ ID NO: 1326874 - RNA, 22 nt, Human
caaagcaagcauucagaagaaa

SEQ ID NO: 1326875 - RNA, 13 nt, Human
caaagcaaggaaa

SEQ ID NO: 1326876 - RNA, 15 nt, Human
caaagcaaggaaacu

SEQ ID NO: 1326877 - RNA, 14 nt, Human
caaagcaauaauag

SEQ ID NO: 1326878 - RNA, 16 nt, Human
caaagcaauaauagua

SEQ ID NO: 1326879 - RNA, 23 nt, Human
caaagcaagcauucagaagaaaa

SEQ ID NO: 1326880 - RNA, 18 nt, Human
caaagcaauucuuucaag

SEQ ID NO: 1326881 - RNA, 11 nt, Human
caaagcacaga

SEQ ID NO: 1326882 - RNA, 13 nt, Human
caaagcacagaga

SEQ ID NO: 1326883 - RNA, 19 nt, Human
caaagcacagagagucugg

SEQ ID NO: 1326884 - RNA, 14 nt, Human
caaagcacagagag

SEQ ID NO: 1326885 - RNA, 20 nt, Human
caaagcacgaaauguuauuu

SEQ ID NO: 1326886 - RNA, 22 nt, Human
caaagcacgaaauguuauuuuu

SEQ ID NO: 1326887 - RNA, 12 nt, Human
caaagcagacag

SEQ ID NO: 1326888 - RNA, 13 nt, Human
caaagcagacagc

SEQ ID NO: 1326889 - RNA, 15 nt, Human
caaagcagacagcuc

SEQ ID NO: 1326890 - RNA, 16 nt, Human
caaagcagacagcucc

SEQ ID NO: 1326891 - RNA, 17 nt, Human
caaagcagacagcucca

SEQ ID NO: 1326892 - RNA, 19 nt, Human
caaagcagacagcuccacc

SEQ ID NO: 1326893 - RNA, 19 nt, Human
caaagcagauucagaaaug

SEQ ID NO: 1326894 - RNA, 12 nt, Human
caaagcagccac

SEQ ID NO: 1326895 - RNA, 13 nt, Human
caaagcagccacg

SEQ ID NO: 1326896 - RNA, 17 nt, Human
cacugggacuugcaaaa

SEQ ID NO: 1326897 - RNA, 12 nt, Human
cacuggggcuca

SEQ ID NO: 1326898 - RNA, 15 nt, Human
cacuggggcucagag

SEQ ID NO: 1326899 - RNA, 16 nt, Human
cacuggggcucagagc

SEQ ID NO: 1326900 - RNA, 17 nt, Human
cacuggggcucagagcc

SEQ ID NO: 1326901 - RNA, 18 nt, Human
cacuggggcucagagccg

SEQ ID NO: 1326902 - RNA, 19 nt, Human
cacuggggcucagagccgg

SEQ ID NO: 1326903 - RNA, 20 nt, Human
cacuggggcucagagccggg

SEQ ID NO: 1326904 - RNA, 22 nt, Human
cacuggggcucagagccggggu

SEQ ID NO: 1326905 - RNA, 18 nt, Human
cacugggagaaaugaaaa

SEQ ID NO: 1326906 - RNA, 14 nt, Human
cacugccaggaggg

SEQ ID NO: 1326907 - RNA, 15 nt, Human
cacugccaggaggga

SEQ ID NO: 1326908 - RNA, 16 nt, Human
cacugccaggagggac

SEQ ID NO: 1326909 - RNA, 17 nt, Human
cacugccaggagggaca

SEQ ID NO: 1326910 - RNA, 22 nt, Human
cacugccaggagggacaaagga

SEQ ID NO: 1326911 - RNA, 14 nt, Human
cacugcauccuccg

SEQ ID NO: 1326912 - RNA, 16 nt, Human
cacugcauccuccgcc

SEQ ID NO: 1326913 - RNA, 18 nt, Human
cacugcagccccacccag

SEQ ID NO: 1326914 - RNA, 18 nt, Human
cacugccagcauuucccu

SEQ ID NO: 1326915 - RNA, 22 nt, Human
cacugccagcauuucccuuccu

SEQ ID NO: 1326916 - RNA, 12 nt, Human
cacugccaggag

SEQ ID NO: 1326917 - RNA, 13 nt, Human
cacugccaggagg

SEQ ID NO: 1326918 - RNA, 18 nt, Human
cacugcauccuccgccuc

SEQ ID NO: 1326919 - RNA, 12 nt, Human
cacugccacugg

SEQ ID NO: 1326920 - RNA, 21 nt, Human
cacugcacucaaccuuaagac

SEQ ID NO: 1326921 - RNA, 21 nt, Human
cacugcagaagacaguauggc

SEQ ID NO: 1326922 - RNA, 17 nt, Human
cacugcacucaaccuua

SEQ ID NO: 1326923 - RNA, 22 nt, Human
cacuuguguuuugcaagccaga

SEQ ID NO: 1326924 - RNA, 23 nt, Human
cacuuguccagcugagcgccagg

SEQ ID NO: 1326925 - RNA, 18 nt, Human
cacuugucauuguuauau

SEQ ID NO: 1326926 - RNA, 16 nt, Human
cacuugucaauaaaau

SEQ ID NO: 1326927 - RNA, 19 nt, Human
cacuuguguuuugcaagcc

SEQ ID NO: 1326928 - RNA, 16 nt, Human
cacuugucaggagugu

SEQ ID NO: 1326929 - RNA, 20 nt, Human
cacuugucaggagugugugu

SEQ ID NO: 1326930 - RNA, 22 nt, Human
cacuugucaggaguguguguga

SEQ ID NO: 1326931 - RNA, 14 nt, Human
cacuuguccagcug

SEQ ID NO: 1326932 - RNA, 15 nt, Human
cacuuguccagcuga

SEQ ID NO: 1326933 - RNA, 23 nt, Human
cacuuaggaacguaaucgugucc

SEQ ID NO: 1326934 - RNA, 24 nt, Human
cacuuagaaauugcauuuccugac

SEQ ID NO: 1326935 - RNA, 16 nt, Human
cacuuauagccucugu

SEQ ID NO: 1326936 - RNA, 14 nt, Human
cacuuauagccucu

SEQ ID NO: 1326937 - RNA, 16 nt, Human
cacuuaucugaucaga

SEQ ID NO: 1326938 - RNA, 17 nt, Human
cacuuaucugaucagaa

SEQ ID NO: 1326939 - RNA, 20 nt, Human
cacuuauuccccauucuucc

SEQ ID NO: 1326940 - RNA, 19 nt, Human
cacuuauguuauacaauac

SEQ ID NO: 1326941 - RNA, 21 nt, Human
cacuuauuggaacucugcuug

SEQ ID NO: 1326942 - RNA, 14 nt, Human
cacuuacauuuaca

SEQ ID NO: 1326943 - RNA, 22 nt, Human
cacugguucuucuuggucucag

SEQ ID NO: 1326944 - RNA, 22 nt, Human
cacugguggggauaggccagcc

SEQ ID NO: 1326945 - RNA, 14 nt, Human
cacugguuugaaga

SEQ ID NO: 1326946 - RNA, 23 nt, Human
cacugguggcccgacagccuggc

SEQ ID NO: 1326947 - RNA, 21 nt, Human
cacugguggggauaggccagc

SEQ ID NO: 1326948 - RNA, 23 nt, Human
cacugguggggauaggccagccg

SEQ ID NO: 1326949 - RNA, 15 nt, Human
cacucuuucuuucaa

SEQ ID NO: 1326950 - RNA, 14 nt, Human
cacucuuucuuuca

SEQ ID NO: 1326951 - RNA, 15 nt, Human
cacucuuuguaagag

SEQ ID NO: 1326952 - RNA, 12 nt, Human
cacucuuuguaa

SEQ ID NO: 1326953 - RNA, 15 nt, Human
cacucuuuugcuuua

SEQ ID NO: 1326954 - RNA, 23 nt, Human
cacucuuuugcuuuauuccagaa

SEQ ID NO: 1326955 - RNA, 12 nt, Human
cacugaaaaaau

SEQ ID NO: 1326956 - RNA, 13 nt, Human
cacugaaaaaaua

SEQ ID NO: 1326957 - RNA, 14 nt, Human
cacugaaaaaauau

SEQ ID NO: 1326958 - RNA, 14 nt, Human
cacuaguauuucua

SEQ ID NO: 1326959 - RNA, 15 nt, Human
cacuccaagcccagc

SEQ ID NO: 1326960 - RNA, 21 nt, Human
cacuccaagcccagcccaugg

SEQ ID NO: 1326961 - RNA, 16 nt, Human
cacuccaagcccagcc

SEQ ID NO: 1326962 - RNA, 16 nt, Human
cacuccagugagacag

SEQ ID NO: 1326963 - RNA, 15 nt, Human
cacuccagcugggau

SEQ ID NO: 1326964 - RNA, 11 nt, Human
cacuccagcug

SEQ ID NO: 1326965 - RNA, 12 nt, Human
cacuccagcugg

SEQ ID NO: 1326966 - RNA, 14 nt, Human
cacuaggcuucugg

SEQ ID NO: 1326967 - RNA, 23 nt, Human
caccugcccugcccugccaccug

SEQ ID NO: 1326968 - RNA, 22 nt, Human
caccugcccugcccugccaccu

SEQ ID NO: 1326969 - RNA, 21 nt, Human
caccugcccugcccugccacc

SEQ ID NO: 1326970 - RNA, 20 nt, Human
caccugcccugcccugccac

SEQ ID NO: 1326971 - RNA, 19 nt, Human
caccugcccugcccugcca

SEQ ID NO: 1326972 - RNA, 18 nt, Human
caccugcccugcccugcc

SEQ ID NO: 1326973 - RNA, 17 nt, Human
caccugcccugcccugc

SEQ ID NO: 1326974 - RNA, 20 nt, Human
caccuaauccaggcagaucc

SEQ ID NO: 1326975 - RNA, 21 nt, Human
caccuaauccaggcagaucca

SEQ ID NO: 1326976 - RNA, 22 nt, Human
caccuaauccaggcagauccag

SEQ ID NO: 1326977 - RNA, 16 nt, Human
caccucagccucccaa

SEQ ID NO: 1326978 - RNA, 23 nt, Human
cacccucguggacaccugcccug

SEQ ID NO: 1326979 - RNA, 21 nt, Human
cacccucguggacaccugccc

SEQ ID NO: 1326980 - RNA, 11 nt, Human
cacccucuucc

SEQ ID NO: 1326981 - RNA, 12 nt, Human
cacccucuuccu

SEQ ID NO: 1326982 - RNA, 14 nt, Human
cacccucuuccuac

SEQ ID NO: 1326983 - RNA, 15 nt, Human
cacccucuuccuacu

SEQ ID NO: 1326984 - RNA, 16 nt, Human
cacccucuuccuacug

SEQ ID NO: 1326985 - RNA, 17 nt, Human
cacccucuuccuacugg

SEQ ID NO: 1326986 - RNA, 21 nt, Human
cacccucuuccuacuggucuc

SEQ ID NO: 1326987 - RNA, 23 nt, Human
cacccugggcccugggcuggaau

SEQ ID NO: 1326988 - RNA, 21 nt, Human
cacccucaugcugugugacuc

SEQ ID NO: 1326989 - RNA, 16 nt, Human
cacccucaugcugugu

SEQ ID NO: 1326990 - RNA, 14 nt, Human
cacccucaugcugu

SEQ ID NO: 1326991 - RNA, 13 nt, Human
cacccucaugcug

SEQ ID NO: 1326992 - RNA, 17 nt, Human
cacccucauucuacuga

SEQ ID NO: 1326993 - RNA, 16 nt, Human
cacccuccagagacaa

SEQ ID NO: 1326994 - RNA, 13 nt, Human
caccugccucagg

SEQ ID NO: 1326995 - RNA, 14 nt, Human
caccugccucagga

SEQ ID NO: 1326996 - RNA, 20 nt, Human
caccugccucaggacugcga

SEQ ID NO: 1326997 - RNA, 15 nt, Human
caccccacucccaca

SEQ ID NO: 1326998 - RNA, 18 nt, Human
caccccacgccuuauccc

SEQ ID NO: 1326999 - RNA, 18 nt, Human
cacacaugcuucccuuuc

SEQ ID NO: 1327000 - RNA, 17 nt, Human
cacacaugaaguccaag

SEQ ID NO: 1327001 - RNA, 22 nt, Human
cacacaugaaguccaagcauuu

SEQ ID NO: 1327002 - RNA, 18 nt, Human
cacacagugcucaaggcc

SEQ ID NO: 1327003 - RNA, 23 nt, Human
cacacagggucugcaaggucuuu

SEQ ID NO: 1327004 - RNA, 13 nt, Human
cacacaguauuuu

SEQ ID NO: 1327005 - RNA, 14 nt, Human
cacacaguauuuuu

SEQ ID NO: 1327006 - RNA, 12 nt, Human
cacacagcugcc

SEQ ID NO: 1327007 - RNA, 14 nt, Human
cacacagcugccgg

SEQ ID NO: 1327008 - RNA, 13 nt, Human
cacacagcugccg

SEQ ID NO: 1327009 - RNA, 10 nt, Human
cacacaggca

SEQ ID NO: 1327010 - RNA, 16 nt, Human
cacacaggcauuuccu

SEQ ID NO: 1327011 - RNA, 17 nt, Human
cacacaggcauuuccug

SEQ ID NO: 1327012 - RNA, 18 nt, Human
cacacaggcauuuccugg

SEQ ID NO: 1327013 - RNA, 19 nt, Human
cacacaggcauuuccuggg

SEQ ID NO: 1327014 - RNA, 20 nt, Human
cacacaggcauuuccugggu

SEQ ID NO: 1327015 - RNA, 12 nt, Human
cacacagggcag

SEQ ID NO: 1327016 - RNA, 21 nt, Human
cacacaggcauuuccugggug

SEQ ID NO: 1327017 - RNA, 21 nt, Human
cacaguaaaaauggaaacuau

SEQ ID NO: 1327018 - RNA, 19 nt, Human
cacaguacgaaccuacagu

SEQ ID NO: 1327019 - RNA, 13 nt, Human
cacaguagucuug

SEQ ID NO: 1327020 - RNA, 15 nt, Human
cacaguauuuguaau

SEQ ID NO: 1327021 - RNA, 15 nt, Human
cacaguauugcucac

SEQ ID NO: 1327022 - RNA, 19 nt, Human
cacaguauugcucacccag

SEQ ID NO: 1327023 - RNA, 15 nt, Human
cacagucacugcucu

SEQ ID NO: 1327024 - RNA, 14 nt, Human
cacaguauuuguaa

SEQ ID NO: 1327025 - RNA, 17 nt, Human
cacagccucuuagaugc

SEQ ID NO: 1327026 - RNA, 21 nt, Human
cacagccucuuagaugcaguu

SEQ ID NO: 1327027 - RNA, 23 nt, Human
cacaggcccuuccucuccacugc

SEQ ID NO: 1327028 - RNA, 20 nt, Human
cacagcggagguguggagcc

SEQ ID NO: 1327029 - RNA, 13 nt, Human
cacaggccugugu

SEQ ID NO: 1327030 - RNA, 14 nt, Human
cacaggccugugua

SEQ ID NO: 1327031 - RNA, 15 nt, Human
cacagggucccacag

SEQ ID NO: 1327032 - RNA, 17 nt, Human
cacagggucccacagcc

SEQ ID NO: 1327033 - RNA, 18 nt, Human
cacagggucccacagcca

SEQ ID NO: 1327034 - RNA, 15 nt, Human
cacagggucugcucu

SEQ ID NO: 1327035 - RNA, 19 nt, Human
cacaggugcaacagacuug

SEQ ID NO: 1327036 - RNA, 23 nt, Human
caaugcuguauuuuaaaagaaug

SEQ ID NO: 1327037 - RNA, 20 nt, Human
caauggagacugucucaaga

SEQ ID NO: 1327038 - RNA, 22 nt, Human
caauggaccggagagugggggu

SEQ ID NO: 1327039 - RNA, 16 nt, Human
caaugcuguauuuuaa

SEQ ID NO: 1327040 - RNA, 17 nt, Human
caaugcuguauuuuaaa

SEQ ID NO: 1327041 - RNA, 14 nt, Human
caauuuaaauguua

SEQ ID NO: 1327042 - RNA, 13 nt, Human
caauuuaaauguu

SEQ ID NO: 1327043 - RNA, 11 nt, Human
caauuuaaaug

SEQ ID NO: 1327044 - RNA, 13 nt, Human
caauucuuucaag

SEQ ID NO: 1327045 - RNA, 19 nt, Human
caauucuuuuaacuguugu

SEQ ID NO: 1327046 - RNA, 22 nt, Human
caauugaaagugggcaaaagcu

SEQ ID NO: 1327047 - RNA, 22 nt, Human
caauucuucccuaucuuugcca

SEQ ID NO: 1327048 - RNA, 21 nt, Human
caauucuucccuaucuuugcc

SEQ ID NO: 1327049 - RNA, 15 nt, Human
caauucuugccaaau

SEQ ID NO: 1327050 - RNA, 22 nt, Human
caauuuauaccucaauuuucac

SEQ ID NO: 1327051 - RNA, 14 nt, Human
caauuuaugaauug

SEQ ID NO: 1327052 - RNA, 14 nt, Human
caauuuauaccuca

SEQ ID NO: 1327053 - RNA, 13 nt, Human
caauuuauaccuc

SEQ ID NO: 1327054 - RNA, 20 nt, Human
caauuuaguuguuguagaga

SEQ ID NO: 1327055 - RNA, 17 nt, Human
caauuuaguuguuguag

SEQ ID NO: 1327056 - RNA, 22 nt, Human
caauaaagcugcugagaaucua

SEQ ID NO: 1327057 - RNA, 23 nt, Human
caauaaagcugcugagaaucuag

SEQ ID NO: 1327058 - RNA, 17 nt, Human
caauaaagcugcugaga

SEQ ID NO: 1327059 - RNA, 15 nt, Human
caauaaagcugcuga

SEQ ID NO: 1327060 - RNA, 24 nt, Human
caaguccagguccugguggggcag

SEQ ID NO: 1327061 - RNA, 16 nt, Human
caaguccagguccugg

SEQ ID NO: 1327062 - RNA, 17 nt, Human
caaguccagguccuggu

SEQ ID NO: 1327063 - RNA, 15 nt, Human
caagcuauucaauuc

SEQ ID NO: 1327064 - RNA, 21 nt, Human
caagcuaggugcuauuuguca

SEQ ID NO: 1327065 - RNA, 21 nt, Human
caagcucacuccccaaccccc

SEQ ID NO: 1327066 - RNA, 21 nt, Human
caagcucagaggcgcacugug

SEQ ID NO: 1327067 - RNA, 19 nt, Human
caagcucuaucaccaagga

SEQ ID NO: 1327068 - RNA, 19 nt, Human
caagcuccaagccccaucu

SEQ ID NO: 1327069 - RNA, 13 nt, Human
caagcuccaagcc

SEQ ID NO: 1327070 - RNA, 14 nt, Human
caagcuccaagccc

SEQ ID NO: 1327071 - RNA, 14 nt, Human
caagcucugaggga

SEQ ID NO: 1327072 - RNA, 17 nt, Human
caagcucugagggaaag

SEQ ID NO: 1327073 - RNA, 23 nt, Human
caagcucugagggaaagggcccu

SEQ ID NO: 1327074 - RNA, 15 nt, Human
caaggcacugucacu

SEQ ID NO: 1327075 - RNA, 18 nt, Human
caaggcacuugaggggga

SEQ ID NO: 1327076 - RNA, 20 nt, Human
caaggcacuugagggggaag

SEQ ID NO: 1327077 - RNA, 13 nt, Human
caaggcagaggcc

SEQ ID NO: 1327078 - RNA, 14 nt, Human
caaggcagaggccu

SEQ ID NO: 1327079 - RNA, 15 nt, Human
caaggcagaggccug

SEQ ID NO: 1327080 - RNA, 16 nt, Human
caaggcagaggccugg

SEQ ID NO: 1327081 - RNA, 19 nt, Human
caaggcagaggccugggcu

SEQ ID NO: 1327082 - RNA, 20 nt, Human
caaggcagaggccugggcug

SEQ ID NO: 1327083 - RNA, 14 nt, Human
caaggcagcaaggc

SEQ ID NO: 1327084 - RNA, 16 nt, Human
caaguaugaauaaaga

SEQ ID NO: 1327085 - RNA, 18 nt, Human
caaguauacuagggagcc

SEQ ID NO: 1327086 - RNA, 15 nt, Human
caaggcagcaaggcc

SEQ ID NO: 1327087 - RNA, 16 nt, Human
caaggcagcaaggccc

SEQ ID NO: 1327088 - RNA, 17 nt, Human
caaggcagcaaggcccg

SEQ ID NO: 1327089 - RNA, 19 nt, Human
caaggcagcaaggcccgag

SEQ ID NO: 1327090 - RNA, 13 nt, Human
caaggcagccgug

SEQ ID NO: 1327091 - RNA, 12 nt, Human
caaggcagccgu

SEQ ID NO: 1327092 - RNA, 19 nt, Human
caaguaugaauaaagacac

SEQ ID NO: 1327093 - RNA, 21 nt, Human
caaguaugaauaaagacaccu

SEQ ID NO: 1327094 - RNA, 22 nt, Human
caaguaugugggcagauuuuca

SEQ ID NO: 1327095 - RNA, 22 nt, Human
caaguauuuguuaauuuagaaa

SEQ ID NO: 1327096 - RNA, 11 nt, Human
caaguauuuuu

SEQ ID NO: 1327097 - RNA, 15 nt, Human
caaguauuuuuaauu

SEQ ID NO: 1327098 - RNA, 16 nt, Human
caaguauuuuuaauua

SEQ ID NO: 1327099 - RNA, 13 nt, Human
caaguccaggucc

SEQ ID NO: 1327100 - RNA, 15 nt, Human
caaguccagguccug

SEQ ID NO: 1327101 - RNA, 14 nt, Human
caagcuaagcacug

SEQ ID NO: 1327102 - RNA, 16 nt, Human
caagcuaagcacugcc

SEQ ID NO: 1327103 - RNA, 22 nt, Human
caagcuaagcacugccacuggg

SEQ ID NO: 1327104 - RNA, 12 nt, Human
caggguggcagc

SEQ ID NO: 1327105 - RNA, 20 nt, Human
cagggugcaguaucaugccc

SEQ ID NO: 1327106 - RNA, 18 nt, Human
cagggucuccagaaagcc

SEQ ID NO: 1327107 - RNA, 19 nt, Human
cagggucuccagaaagccc

SEQ ID NO: 1327108 - RNA, 11 nt, Human
cagguuuuucc

SEQ ID NO: 1327109 - RNA, 15 nt, Human
cagguugauaaauca

SEQ ID NO: 1327110 - RNA, 18 nt, Human
cagguugauaaaucauuu

SEQ ID NO: 1327111 - RNA, 13 nt, Human
cagguugauaaau

SEQ ID NO: 1327112 - RNA, 20 nt, Human
caggugcugacuucaucucc

SEQ ID NO: 1327113 - RNA, 21 nt, Human
caggugcugacuucaucuccc

SEQ ID NO: 1327114 - RNA, 23 nt, Human
caggugcugacuucaucucccac

SEQ ID NO: 1327115 - RNA, 15 nt, Human
caggguuuuaacuuu

SEQ ID NO: 1327116 - RNA, 21 nt, Human
cagguucuccguuagcuccug

SEQ ID NO: 1327117 - RNA, 22 nt, Human
cagguucuccguuagcuccugu

SEQ ID NO: 1327118 - RNA, 23 nt, Human
cagguucuccguuagcuccugug

SEQ ID NO: 1327119 - RNA, 24 nt, Human
cagguucuccguuagcuccugugg

SEQ ID NO: 1327120 - RNA, 12 nt, Human
cagguucuuguu

SEQ ID NO: 1327121 - RNA, 18 nt, Human
cagguucuuguuggugca

SEQ ID NO: 1327122 - RNA, 21 nt, Human
cagguucuuguuggugcacag

SEQ ID NO: 1327123 - RNA, 19 nt, Human
caggguuucaccauguugc

SEQ ID NO: 1327124 - RNA, 16 nt, Human
caggguuuuaacuuug

SEQ ID NO: 1327125 - RNA, 19 nt, Human
caggugcucaauaaaugau

SEQ ID NO: 1327126 - RNA, 16 nt, Human
caguaaauaacuggaa

SEQ ID NO: 1327127 - RNA, 17 nt, Human
caguaaauaacuggaaa

SEQ ID NO: 1327128 - RNA, 18 nt, Human
caguaaauaacuggaaaa

SEQ ID NO: 1327129 - RNA, 22 nt, Human
caguaaauaacuggaaaacaga

SEQ ID NO: 1327130 - RNA, 12 nt, Human
caguaaaucuuu

SEQ ID NO: 1327131 - RNA, 20 nt, Human
caguaaaucuuuuacaacug

SEQ ID NO: 1327132 - RNA, 12 nt, Human
cagguuuuuccc

SEQ ID NO: 1327133 - RNA, 13 nt, Human
cagguuuuuccuu

SEQ ID NO: 1327134 - RNA, 15 nt, Human
cagguuuuuccuuuu

SEQ ID NO: 1327135 - RNA, 23 nt, Human
caguaaauaacuggaaaacagaa

SEQ ID NO: 1327136 - RNA, 13 nt, Human
caguauuauaugu

SEQ ID NO: 1327137 - RNA, 15 nt, Human
caguauuauauguac

SEQ ID NO: 1327138 - RNA, 14 nt, Human
caguauuauaugua

SEQ ID NO: 1327139 - RNA, 18 nt, Human
caguauuuguaauuaaaa

SEQ ID NO: 1327140 - RNA, 23 nt, Human
caguauuuguaauuaaaagcaaa

SEQ ID NO: 1327141 - RNA, 12 nt, Human
caguauuuguaa

SEQ ID NO: 1327142 - RNA, 13 nt, Human
caguauuuguaau

SEQ ID NO: 1327143 - RNA, 14 nt, Human
caguauuuguaauu

SEQ ID NO: 1327144 - RNA, 15 nt, Human
caguauuuguaauua

SEQ ID NO: 1327145 - RNA, 16 nt, Human
caguauuuaacuucug

SEQ ID NO: 1327146 - RNA, 16 nt, Human
caguauuuagaagcca

SEQ ID NO: 1327147 - RNA, 17 nt, Human
caguauuuagaagccaa

SEQ ID NO: 1327148 - RNA, 13 nt, Human
caguauuuaacua

SEQ ID NO: 1327149 - RNA, 14 nt, Human
caguauuuaacuaa

SEQ ID NO: 1327150 - RNA, 17 nt, Human
caguauuuaacuaauua

SEQ ID NO: 1327151 - RNA, 15 nt, Human
cagggaggaggcaga

SEQ ID NO: 1327152 - RNA, 21 nt, Human
cagggaggaggcagagaagaa

SEQ ID NO: 1327153 - RNA, 22 nt, Human
cagggaggacgcucucuggccu

SEQ ID NO: 1327154 - RNA, 23 nt, Human
caggcugggccauguccaaagag

SEQ ID NO: 1327155 - RNA, 11 nt, Human
caggcugggcc

SEQ ID NO: 1327156 - RNA, 12 nt, Human
caggcugggcca

SEQ ID NO: 1327157 - RNA, 13 nt, Human
caggcugggccau

SEQ ID NO: 1327158 - RNA, 17 nt, Human
caggcugggccaugucc

SEQ ID NO: 1327159 - RNA, 18 nt, Human
caggcugggccaugucca

SEQ ID NO: 1327160 - RNA, 20 nt, Human
caggcugggccauguccaaa

SEQ ID NO: 1327161 - RNA, 22 nt, Human
caggcugggccauguccaaaga

SEQ ID NO: 1327162 - RNA, 18 nt, Human
cagggagggccugggccc

SEQ ID NO: 1327163 - RNA, 16 nt, Human
cagggaggucauuuug

SEQ ID NO: 1327164 - RNA, 19 nt, Human
cagggcuguaacugccagg

SEQ ID NO: 1327165 - RNA, 18 nt, Human
cagggcuguaacugccag

SEQ ID NO: 1327166 - RNA, 21 nt, Human
cagggcuguaacugccaggcu

SEQ ID NO: 1327167 - RNA, 13 nt, Human
cagggcugggagg

SEQ ID NO: 1327168 - RNA, 14 nt, Human
cagggcugggagga

SEQ ID NO: 1327169 - RNA, 19 nt, Human
cagggcugggaggaaggac

SEQ ID NO: 1327170 - RNA, 16 nt, Human
cagggcugggaggaag

SEQ ID NO: 1327171 - RNA, 23 nt, Human
caggacagcccuucuuuccacag

SEQ ID NO: 1327172 - RNA, 24 nt, Human
caggacagcccuucuuuccacaga

SEQ ID NO: 1327173 - RNA, 18 nt, Human
caggacaugcgguagcca

SEQ ID NO: 1327174 - RNA, 20 nt, Human
caggacaugcgguagccagc

SEQ ID NO: 1327175 - RNA, 21 nt, Human
caggacaugcgguagccagca

SEQ ID NO: 1327176 - RNA, 22 nt, Human
caggacaugcgguagccagcac

SEQ ID NO: 1327177 - RNA, 23 nt, Human
caggacaugcgguagccagcaca

SEQ ID NO: 1327178 - RNA, 15 nt, Human
caggaccagcucagg

SEQ ID NO: 1327179 - RNA, 16 nt, Human
caggaccagcucagga

SEQ ID NO: 1327180 - RNA, 17 nt, Human
caggaccagcucaggac

SEQ ID NO: 1327181 - RNA, 19 nt, Human
caggaccagcucaggacag

SEQ ID NO: 1327182 - RNA, 20 nt, Human
caggaccagcucaggacaga

SEQ ID NO: 1327183 - RNA, 17 nt, Human
caggacccugaaggggc

SEQ ID NO: 1327184 - RNA, 18 nt, Human
caggacccugaaggggcc

SEQ ID NO: 1327185 - RNA, 13 nt, Human
caggacccuggac

SEQ ID NO: 1327186 - RNA, 14 nt, Human
caggacccuggacc

SEQ ID NO: 1327187 - RNA, 17 nt, Human
caggacccuggacccag

SEQ ID NO: 1327188 - RNA, 22 nt, Human
caggacccuggacccagccaga

SEQ ID NO: 1327189 - RNA, 18 nt, Human
caggacccuggacccagc

SEQ ID NO: 1327190 - RNA, 15 nt, Human
caggaggcaggaccu

SEQ ID NO: 1327191 - RNA, 18 nt, Human
caggaggcaggaccuucg

SEQ ID NO: 1327192 - RNA, 13 nt, Human
caggacagaugcc

SEQ ID NO: 1327193 - RNA, 14 nt, Human
caggacagaugcca

SEQ ID NO: 1327194 - RNA, 17 nt, Human
caggacagaugccacac

SEQ ID NO: 1327195 - RNA, 16 nt, Human
caggcacugcugccca

SEQ ID NO: 1327196 - RNA, 17 nt, Human
caggcacugcugcccag

SEQ ID NO: 1327197 - RNA, 23 nt, Human
caggcacugagauaccagcgagg

SEQ ID NO: 1327198 - RNA, 14 nt, Human
caggcacugcaaac

SEQ ID NO: 1327199 - RNA, 21 nt, Human
caggcacugcaaaccgccacc

SEQ ID NO: 1327200 - RNA, 13 nt, Human
caggcacugcccu

SEQ ID NO: 1327201 - RNA, 15 nt, Human
caggcacugcccugg

SEQ ID NO: 1327202 - RNA, 16 nt, Human
caggcacugcccuggu

SEQ ID NO: 1327203 - RNA, 22 nt, Human
caggcacugcccugguggcccu

SEQ ID NO: 1327204 - RNA, 17 nt, Human
caggccaccuggcucuc

SEQ ID NO: 1327205 - RNA, 21 nt, Human
caggccaccuggcucucaccu

SEQ ID NO: 1327206 - RNA, 22 nt, Human
caggccaccuggcucucaccuc

SEQ ID NO: 1327207 - RNA, 23 nt, Human
caggcacugcugcccagccucca

SEQ ID NO: 1327208 - RNA, 15 nt, Human
caggcacugcuaggc

SEQ ID NO: 1327209 - RNA, 16 nt, Human
caggcacugggcauga

SEQ ID NO: 1327210 - RNA, 17 nt, Human
caggcacugggcaugag

SEQ ID NO: 1327211 - RNA, 18 nt, Human
caggcacugggcaugagg

SEQ ID NO: 1327212 - RNA, 12 nt, Human
caggcacuuggc

SEQ ID NO: 1327213 - RNA, 16 nt, Human
caggcacuuggcagcc

SEQ ID NO: 1327214 - RNA, 21 nt, Human
caggcacuuggcagccuugug

SEQ ID NO: 1327215 - RNA, 20 nt, Human
caggcacuuggcagccuugu

SEQ ID NO: 1327216 - RNA, 11 nt, Human
caggccaccuc

SEQ ID NO: 1327217 - RNA, 12 nt, Human
caggccaccucc

SEQ ID NO: 1327218 - RNA, 15 nt, Human
caggccaccucccca

SEQ ID NO: 1327219 - RNA, 16 nt, Human
caggccaccuccccag

SEQ ID NO: 1327220 - RNA, 19 nt, Human
caggccaccuccccagcau

SEQ ID NO: 1327221 - RNA, 20 nt, Human
caggccaccuccccagcauu

SEQ ID NO: 1327222 - RNA, 19 nt, Human
cagcuguggcagaguuaca

SEQ ID NO: 1327223 - RNA, 23 nt, Human
cagcuguggcagaguuacaguuc

SEQ ID NO: 1327224 - RNA, 17 nt, Human
cagcuuauucacaagac

SEQ ID NO: 1327225 - RNA, 16 nt, Human
cagcuuauucacaaga

SEQ ID NO: 1327226 - RNA, 22 nt, Human
cagcuguguccaaaaccgccag

SEQ ID NO: 1327227 - RNA, 14 nt, Human
cagcuuagauuuca

SEQ ID NO: 1327228 - RNA, 19 nt, Human
cagcuuagauuucauaguu

SEQ ID NO: 1327229 - RNA, 15 nt, Human
cagcuuagauuucau

SEQ ID NO: 1327230 - RNA, 16 nt, Human
cagcuuagauuucaua

SEQ ID NO: 1327231 - RNA, 17 nt, Human
cagcuuagauuucauag

SEQ ID NO: 1327232 - RNA, 13 nt, Human
cagcuuauacgaa

SEQ ID NO: 1327233 - RNA, 16 nt, Human
cagcuuauacgaaaua

SEQ ID NO: 1327234 - RNA, 19 nt, Human
cagcuuauacgaaauaauu

SEQ ID NO: 1327235 - RNA, 21 nt, Human
cagcuuauacgaaauaauugu

SEQ ID NO: 1327236 - RNA, 13 nt, Human
caggaaaaggccu

SEQ ID NO: 1327237 - RNA, 14 nt, Human
caggaaaaggccug

SEQ ID NO: 1327238 - RNA, 15 nt, Human
caggaaaaggccugg

SEQ ID NO: 1327239 - RNA, 16 nt, Human
caggaaaaggccuggg

SEQ ID NO: 1327240 - RNA, 17 nt, Human
caggaaaaggccugggg

SEQ ID NO: 1327241 - RNA, 18 nt, Human
caggaaaaggccuggggu

SEQ ID NO: 1327242 - RNA, 19 nt, Human
caggaaaaggccuggggug

SEQ ID NO: 1327243 - RNA, 21 nt, Human
caggaaaaggccuggggugac

SEQ ID NO: 1327244 - RNA, 17 nt, Human
caggaaaauugaaugca

SEQ ID NO: 1327245 - RNA, 13 nt, Human
caggaaaauugaa

SEQ ID NO: 1327246 - RNA, 16 nt, Human
caggaaaguggccaag

SEQ ID NO: 1327247 - RNA, 21 nt, Human
cagcccccacugccuuugacc

SEQ ID NO: 1327248 - RNA, 18 nt, Human
cagcccccacccccaagg

SEQ ID NO: 1327249 - RNA, 24 nt, Human
cagccccgcguggaacucgugucu

SEQ ID NO: 1327250 - RNA, 19 nt, Human
cagccccgugggguuccuc

SEQ ID NO: 1327251 - RNA, 18 nt, Human
cagcccccagcucccacc

SEQ ID NO: 1327252 - RNA, 19 nt, Human
cagcccccagcucccaccu

SEQ ID NO: 1327253 - RNA, 21 nt, Human
cagcccccagcucccaccucc

SEQ ID NO: 1327254 - RNA, 17 nt, Human
cagcccccuaagagagc

SEQ ID NO: 1327255 - RNA, 19 nt, Human
cagcccccuaagagagcac

SEQ ID NO: 1327256 - RNA, 12 nt, Human
cagcccccucac

SEQ ID NO: 1327257 - RNA, 14 nt, Human
cagcccccucacag

SEQ ID NO: 1327258 - RNA, 14 nt, Human
cagcccccuccugg

SEQ ID NO: 1327259 - RNA, 22 nt, Human
cagcccccuccuggugccaccu

SEQ ID NO: 1327260 - RNA, 12 nt, Human
cagcccccugac

SEQ ID NO: 1327261 - RNA, 13 nt, Human
cagcccccugacc

SEQ ID NO: 1327262 - RNA, 14 nt, Human
cagcccccugacca

SEQ ID NO: 1327263 - RNA, 16 nt, Human
cagcccccugaccacu

SEQ ID NO: 1327264 - RNA, 18 nt, Human
cagcccccugaccacuca

SEQ ID NO: 1327265 - RNA, 20 nt, Human
cagcccccugaccacucaga

SEQ ID NO: 1327266 - RNA, 21 nt, Human
cagcccccugaccacucagag

SEQ ID NO: 1327267 - RNA, 22 nt, Human
cagcccccugaccacucagaga

SEQ ID NO: 1327268 - RNA, 13 nt, Human
cagccccugcaca

SEQ ID NO: 1327269 - RNA, 24 nt, Human
cagccccucuuggagaagucucag

SEQ ID NO: 1327270 - RNA, 23 nt, Human
cagccccucuuggagaagucuca

SEQ ID NO: 1327271 - RNA, 18 nt, Human
cagccccucuuggagaag

SEQ ID NO: 1327272 - RNA, 20 nt, Human
cagccccucuuggagaaguc

SEQ ID NO: 1327273 - RNA, 21 nt, Human
cagccccucuuggagaagucu

SEQ ID NO: 1327274 - RNA, 13 nt, Human
cagcccugucagc

SEQ ID NO: 1327275 - RNA, 13 nt, Human
cagccccucuggu

SEQ ID NO: 1327276 - RNA, 14 nt, Human
cagccccucugguc

SEQ ID NO: 1327277 - RNA, 16 nt, Human
cagccccucuggucgc

SEQ ID NO: 1327278 - RNA, 18 nt, Human
cagccccucuggucgcuc

SEQ ID NO: 1327279 - RNA, 21 nt, Human
cagccccucuggucgcuccug

SEQ ID NO: 1327280 - RNA, 22 nt, Human
cagccccucuggucgcuccugc

SEQ ID NO: 1327281 - RNA, 22 nt, Human
cagcguggagggguaggggcug

SEQ ID NO: 1327282 - RNA, 23 nt, Human
cagcguggagggguaggggcugg

SEQ ID NO: 1327283 - RNA, 12 nt, Human
cagcguggccuu

SEQ ID NO: 1327284 - RNA, 13 nt, Human
cagcguggccuug

SEQ ID NO: 1327285 - RNA, 14 nt, Human
cagcguggccuugu

SEQ ID NO: 1327286 - RNA, 15 nt, Human
cagcguggccuuguu

SEQ ID NO: 1327287 - RNA, 18 nt, Human
cagcguggccuuguucug

SEQ ID NO: 1327288 - RNA, 21 nt, Human
cagcguuccuagagaagacag

SEQ ID NO: 1327289 - RNA, 19 nt, Human
cagcgugcuuuaaaaaaua

SEQ ID NO: 1327290 - RNA, 14 nt, Human
cagcggcccuguca

SEQ ID NO: 1327291 - RNA, 21 nt, Human
cagcggcuugccugccugcuc

SEQ ID NO: 1327292 - RNA, 23 nt, Human
cagccugagcgacagugagacuc

SEQ ID NO: 1327293 - RNA, 18 nt, Human
cagccucuccccugccug

SEQ ID NO: 1327294 - RNA, 16 nt, Human
cagccucuccccaggu

SEQ ID NO: 1327295 - RNA, 19 nt, Human
cagccucuccccaggucca

SEQ ID NO: 1327296 - RNA, 20 nt, Human
cagccucuccccagguccag

SEQ ID NO: 1327297 - RNA, 23 nt, Human
cagccucuccccagguccagcuc

SEQ ID NO: 1327298 - RNA, 18 nt, Human
cagccugcagacucacug

SEQ ID NO: 1327299 - RNA, 16 nt, Human
cagcccugucagcaug

SEQ ID NO: 1327300 - RNA, 17 nt, Human
cagcccugucagcauga

SEQ ID NO: 1327301 - RNA, 21 nt, Human
cagcccugucagcaugaauuu

SEQ ID NO: 1327302 - RNA, 18 nt, Human
cagcccugucagcaugaa

SEQ ID NO: 1327303 - RNA, 16 nt, Human
cagcccugucuuccua

SEQ ID NO: 1327304 - RNA, 24 nt, Human
cagccucuccacucaugugacucu

SEQ ID NO: 1327305 - RNA, 14 nt, Human
cagccucuccccag

SEQ ID NO: 1327306 - RNA, 17 nt, Human
cagccgcgcaucagacu

SEQ ID NO: 1327307 - RNA, 13 nt, Human
cagauuugagcuc

SEQ ID NO: 1327308 - RNA, 14 nt, Human
cagauuugagcuca

SEQ ID NO: 1327309 - RNA, 16 nt, Human
cagauuugagcucagc

SEQ ID NO: 1327310 - RNA, 20 nt, Human
cagauuugcuaauuuauccu

SEQ ID NO: 1327311 - RNA, 13 nt, Human
cagauuuggaaag

SEQ ID NO: 1327312 - RNA, 18 nt, Human
cagauuuggcuugacaaa

SEQ ID NO: 1327313 - RNA, 16 nt, Human
cagcacaucucaacag

SEQ ID NO: 1327314 - RNA, 22 nt, Human
cagcacagcuuagauuucauag

SEQ ID NO: 1327315 - RNA, 22 nt, Human
cagcacagcuugaccugaggcu

SEQ ID NO: 1327316 - RNA, 16 nt, Human
cagcacaggagggcgg

SEQ ID NO: 1327317 - RNA, 19 nt, Human
cagcacaucucaacaggcc

SEQ ID NO: 1327318 - RNA, 23 nt, Human
cagcaccaaaucaaaaucucucc

SEQ ID NO: 1327319 - RNA, 17 nt, Human
cagcacagcuuagauuu

SEQ ID NO: 1327320 - RNA, 13 nt, Human
cagcacagcuuga

SEQ ID NO: 1327321 - RNA, 15 nt, Human
cagcacagcuugacc

SEQ ID NO: 1327322 - RNA, 16 nt, Human
cagcacagcuugaccu

SEQ ID NO: 1327323 - RNA, 17 nt, Human
cagcacagcuugaccug

SEQ ID NO: 1327324 - RNA, 20 nt, Human
cagcacagcuugaccugagg

SEQ ID NO: 1327325 - RNA, 21 nt, Human
cagcacagcuugaccugaggc

SEQ ID NO: 1327326 - RNA, 11 nt, Human
cagcaccaaau

SEQ ID NO: 1327327 - RNA, 15 nt, Human
cagcaccaaaucaaa

SEQ ID NO: 1327328 - RNA, 19 nt, Human
cagcaccaaaucaaaaucu

SEQ ID NO: 1327329 - RNA, 22 nt, Human
cagcacucgcuagcaguggcag

SEQ ID NO: 1327330 - RNA, 14 nt, Human
cagcacugccugcu

SEQ ID NO: 1327331 - RNA, 15 nt, Human
cagcacugccugcuc

SEQ ID NO: 1327332 - RNA, 17 nt, Human
cagcacugccugcuccc

SEQ ID NO: 1327333 - RNA, 18 nt, Human
cagcacugccugcuccca

SEQ ID NO: 1327334 - RNA, 16 nt, Human
cagcacugcuugagga

SEQ ID NO: 1327335 - RNA, 18 nt, Human
cagcacugcuugaggaaa

SEQ ID NO: 1327336 - RNA, 19 nt, Human
cagcacugcuugaggaaaa

SEQ ID NO: 1327337 - RNA, 23 nt, Human
cagcacugccugcucccauccug

SEQ ID NO: 1327338 - RNA, 14 nt, Human
cagccagcaccugg

SEQ ID NO: 1327339 - RNA, 16 nt, Human
cagccagcaccuggca

SEQ ID NO: 1327340 - RNA, 12 nt, Human
cagccagcaccu

SEQ ID NO: 1327341 - RNA, 13 nt, Human
cagccagcaccug

SEQ ID NO: 1327342 - RNA, 16 nt, Human
cagaucauugugaaau

SEQ ID NO: 1327343 - RNA, 21 nt, Human
cagauacggacagagaccaag

SEQ ID NO: 1327344 - RNA, 22 nt, Human
cagauacggacagagaccaaga

SEQ ID NO: 1327345 - RNA, 22 nt, Human
cagaucauugugaaauuauuca

SEQ ID NO: 1327346 - RNA, 12 nt, Human
cagauccagccu

SEQ ID NO: 1327347 - RNA, 18 nt, Human
cagauccagccugggguc

SEQ ID NO: 1327348 - RNA, 13 nt, Human
cagauccagccug

SEQ ID NO: 1327349 - RNA, 14 nt, Human
cagauccagccugg

SEQ ID NO: 1327350 - RNA, 15 nt, Human
cagauccagccuggg

SEQ ID NO: 1327351 - RNA, 17 nt, Human
cagauccagccuggggu

SEQ ID NO: 1327352 - RNA, 23 nt, Human
cagagcuggagaugaggccagac

SEQ ID NO: 1327353 - RNA, 22 nt, Human
cagagcuggagaugaggccaga

SEQ ID NO: 1327354 - RNA, 21 nt, Human
cagagcuggagaugaggccag

SEQ ID NO: 1327355 - RNA, 17 nt, Human
cagagcuggagaugagg

SEQ ID NO: 1327356 - RNA, 13 nt, Human
cagagcuggcucu

SEQ ID NO: 1327357 - RNA, 17 nt, Human
cagagcuggcucugagc

SEQ ID NO: 1327358 - RNA, 18 nt, Human
cagagcuggcucugagcg

SEQ ID NO: 1327359 - RNA, 13 nt, Human
cagaggucuccca

SEQ ID NO: 1327360 - RNA, 16 nt, Human
cagagguugcagugag

SEQ ID NO: 1327361 - RNA, 11 nt, Human
cagagagcagu

SEQ ID NO: 1327362 - RNA, 14 nt, Human
cagagagcagugcu

SEQ ID NO: 1327363 - RNA, 17 nt, Human
cagagagcagugcuuuu

SEQ ID NO: 1327364 - RNA, 20 nt, Human
cagagaggccuuuuggaaug

SEQ ID NO: 1327365 - RNA, 18 nt, Human
cagagaggacuguaggga

SEQ ID NO: 1327366 - RNA, 20 nt, Human
cagagaggacuguagggagg

SEQ ID NO: 1327367 - RNA, 11 nt, Human
cagagccuggg

SEQ ID NO: 1327368 - RNA, 15 nt, Human
cagagcgugagcuga

SEQ ID NO: 1327369 - RNA, 19 nt, Human
cagagcgugagcugagcag

SEQ ID NO: 1327370 - RNA, 22 nt, Human
cagagcgugagcugagcaggcc

SEQ ID NO: 1327371 - RNA, 16 nt, Human
cagagccuggggcucu

SEQ ID NO: 1327372 - RNA, 12 nt, Human
cagagccugggg

SEQ ID NO: 1327373 - RNA, 13 nt, Human
cagagccuggggc

SEQ ID NO: 1327374 - RNA, 14 nt, Human
cagagccuggggcu

SEQ ID NO: 1327375 - RNA, 15 nt, Human
cagagcgcacaggga

SEQ ID NO: 1327376 - RNA, 13 nt, Human
cagagcgcacagg

SEQ ID NO: 1327377 - RNA, 11 nt, Human
caucagcaaac

SEQ ID NO: 1327378 - RNA, 19 nt, Human
caucagacugugaacccca

SEQ ID NO: 1327379 - RNA, 19 nt, Human
caucaggccuagaggccug

SEQ ID NO: 1327380 - RNA, 12 nt, Human
caucccaugcug

SEQ ID NO: 1327381 - RNA, 14 nt, Human
cauccuugagucaa

SEQ ID NO: 1327382 - RNA, 23 nt, Human
cauccuguguguuaagcucugcu

SEQ ID NO: 1327383 - RNA, 22 nt, Human
cauccuugucuuauucccuucc

SEQ ID NO: 1327384 - RNA, 13 nt, Human
cauccuugucuua

SEQ ID NO: 1327385 - RNA, 12 nt, Human
caucgcaaugua

SEQ ID NO: 1327386 - RNA, 21 nt, Human
caucgaaucuacuaauuccac

SEQ ID NO: 1327387 - RNA, 17 nt, Human
caucugucccuccggga

SEQ ID NO: 1327388 - RNA, 18 nt, Human
caucugucccuccgggac

SEQ ID NO: 1327389 - RNA, 20 nt, Human
caucugucccuccgggaccu

SEQ ID NO: 1327390 - RNA, 23 nt, Human
caucugucugccaaccuaaaacu

SEQ ID NO: 1327391 - RNA, 14 nt, Human
caugaccaguaaag

SEQ ID NO: 1327392 - RNA, 14 nt, Human
caugacccugccuc

SEQ ID NO: 1327393 - RNA, 18 nt, Human
caugaccuaguuuuccau

SEQ ID NO: 1327394 - RNA, 19 nt, Human
caugaccuaguuuuccaug

SEQ ID NO: 1327395 - RNA, 16 nt, Human
caugauucaugccaau

SEQ ID NO: 1327396 - RNA, 21 nt, Human
caugauucaugccaauuagca

SEQ ID NO: 1327397 - RNA, 13 nt, Human
caugauucauuuu

SEQ ID NO: 1327398 - RNA, 14 nt, Human
caugauucauuuua

SEQ ID NO: 1327399 - RNA, 16 nt, Human
caugaauuaguuuuau

SEQ ID NO: 1327400 - RNA, 14 nt, Human
caugaauuugugaa

SEQ ID NO: 1327401 - RNA, 17 nt, Human
caugaauuauuacagug

SEQ ID NO: 1327402 - RNA, 18 nt, Human
caugaauuauuacagugu

SEQ ID NO: 1327403 - RNA, 20 nt, Human
caugaauuauuacaguguuu

SEQ ID NO: 1327404 - RNA, 16 nt, Human
caugaauuugugaagg

SEQ ID NO: 1327405 - RNA, 19 nt, Human
caugaauuuguaaugucuu

SEQ ID NO: 1327406 - RNA, 22 nt, Human
caugaauuuguaaugucuugag

SEQ ID NO: 1327407 - RNA, 12 nt, Human
caugaauuugua

SEQ ID NO: 1327408 - RNA, 18 nt, Human
caugaauuuguaaugucu

SEQ ID NO: 1327409 - RNA, 21 nt, Human
caugauugguuucuaggcagu

SEQ ID NO: 1327410 - RNA, 17 nt, Human
caugauuccuuuaacaa

SEQ ID NO: 1327411 - RNA, 16 nt, Human
caugcaauacauacca

SEQ ID NO: 1327412 - RNA, 16 nt, Human
caugcugaggccuggg

SEQ ID NO: 1327413 - RNA, 17 nt, Human
caugcugaggccugggc

SEQ ID NO: 1327414 - RNA, 18 nt, Human
caugcugaggccugggcc

SEQ ID NO: 1327415 - RNA, 19 nt, Human
caugcugaggccugggccg

SEQ ID NO: 1327416 - RNA, 18 nt, Human
caugauucauuuuaacau

SEQ ID NO: 1327417 - RNA, 15 nt, Human
caugacccugccucu

SEQ ID NO: 1327418 - RNA, 14 nt, Human
caugauuccagcca

SEQ ID NO: 1327419 - RNA, 15 nt, Human
caugauuccagccau

SEQ ID NO: 1327420 - RNA, 16 nt, Human
caugauuccagccauc

SEQ ID NO: 1327421 - RNA, 17 nt, Human
caugauuccagccauca

SEQ ID NO: 1327422 - RNA, 13 nt, Human
caugauuccuuua

SEQ ID NO: 1327423 - RNA, 16 nt, Human
caugauuccuuuaaca

SEQ ID NO: 1327424 - RNA, 22 nt, Human
caugauuccuuuaacaacaugu

SEQ ID NO: 1327425 - RNA, 14 nt, Human
caugauucuauuua

SEQ ID NO: 1327426 - RNA, 12 nt, Human
caugcugccucc

SEQ ID NO: 1327427 - RNA, 14 nt, Human
caugcugccuccag

SEQ ID NO: 1327428 - RNA, 22 nt, Human
caugcugccuuauucagggaag

SEQ ID NO: 1327429 - RNA, 14 nt, Human
caugcugcugggga

SEQ ID NO: 1327430 - RNA, 12 nt, Human
cauagcccucac

SEQ ID NO: 1327431 - RNA, 15 nt, Human
cauagcccaguagac

SEQ ID NO: 1327432 - RNA, 15 nt, Human
cauagccaggaaacu

SEQ ID NO: 1327433 - RNA, 11 nt, Human
cauagcccagu

SEQ ID NO: 1327434 - RNA, 15 nt, Human
cauagcccucacccu

SEQ ID NO: 1327435 - RNA, 19 nt, Human
cauagcccucacccugggg

SEQ ID NO: 1327436 - RNA, 18 nt, Human
cauagcgggggccuaaaa

SEQ ID NO: 1327437 - RNA, 16 nt, Human
cauaggaccuuuccac

SEQ ID NO: 1327438 - RNA, 18 nt, Human
cauaggaccuuuccacca

SEQ ID NO: 1327439 - RNA, 16 nt, Human
cauaggaguuuggagg

SEQ ID NO: 1327440 - RNA, 17 nt, Human
cauaggaguuuggagga

SEQ ID NO: 1327441 - RNA, 20 nt, Human
cauaggaguuuggaggaagu

SEQ ID NO: 1327442 - RNA, 19 nt, Human
cauaggaguuuggaggaag

SEQ ID NO: 1327443 - RNA, 15 nt, Human
caguuugugugucuu

SEQ ID NO: 1327444 - RNA, 16 nt, Human
caguuugugugucuua

SEQ ID NO: 1327445 - RNA, 20 nt, Human
cauaaucuggacuccucugu

SEQ ID NO: 1327446 - RNA, 21 nt, Human
caguuugugugucuuaauuau

SEQ ID NO: 1327447 - RNA, 23 nt, Human
caguuugugugucuuaauuauua

SEQ ID NO: 1327448 - RNA, 21 nt, Human
cauaaucuggacuccucuguc

SEQ ID NO: 1327449 - RNA, 22 nt, Human
cauaaucuggacuccucugucc

SEQ ID NO: 1327450 - RNA, 23 nt, Human
cauaaucuggacuccucugucca

SEQ ID NO: 1327451 - RNA, 13 nt, Human
cauaaucuucugc

SEQ ID NO: 1327452 - RNA, 15 nt, Human
cauaaucuucugccu

SEQ ID NO: 1327453 - RNA, 21 nt, Human
cauaaucuucugccuucucau

SEQ ID NO: 1327454 - RNA, 22 nt, Human
cauaaucuucugccuucucaug

SEQ ID NO: 1327455 - RNA, 20 nt, Human
cauaaugcauucuucucugu

SEQ ID NO: 1327456 - RNA, 21 nt, Human
cauaaugcauucuucucuguu

SEQ ID NO: 1327457 - RNA, 22 nt, Human
cauaaugcauucuucucuguug

SEQ ID NO: 1327458 - RNA, 22 nt, Human
caguuuggguaaaauacuuuua

SEQ ID NO: 1327459 - RNA, 20 nt, Human
caguuuggguaaaauacuuu

SEQ ID NO: 1327460 - RNA, 18 nt, Human
caguuuguagugccacug

SEQ ID NO: 1327461 - RNA, 12 nt, Human
caguuugcuuug

SEQ ID NO: 1327462 - RNA, 14 nt, Human
caguuugcuuugcc

SEQ ID NO: 1327463 - RNA, 16 nt, Human
caguuugcuuugcccu

SEQ ID NO: 1327464 - RNA, 14 nt, Human
caguuugcuuugua

SEQ ID NO: 1327465 - RNA, 21 nt, Human
caguuugcuuuguaugcacuu

SEQ ID NO: 1327466 - RNA, 14 nt, Human
caguuuaaaagcac

SEQ ID NO: 1327467 - RNA, 13 nt, Human
caguuuaaugaag

SEQ ID NO: 1327468 - RNA, 18 nt, Human
caguuuaaugaagaucua

SEQ ID NO: 1327469 - RNA, 19 nt, Human
caguuuaaugaagaucuaa

SEQ ID NO: 1327470 - RNA, 21 nt, Human
caguuuaaugaagaucuaaau

SEQ ID NO: 1327471 - RNA, 23 nt, Human
caguuuacagacgcugcugucac

SEQ ID NO: 1327472 - RNA, 23 nt, Human
caguuuaccaguugccuuuuauc

SEQ ID NO: 1327473 - RNA, 18 nt, Human
caguuuaccaguugccuu

SEQ ID NO: 1327474 - RNA, 19 nt, Human
caguuuauauuuaacucuc

SEQ ID NO: 1327475 - RNA, 14 nt, Human
caguuuauauuuaa

SEQ ID NO: 1327476 - RNA, 13 nt, Human
caguuuaucauuc

SEQ ID NO: 1327477 - RNA, 17 nt, Human
caguuuauauuuaacuc

SEQ ID NO: 1327478 - RNA, 11 nt, Human
caguuugcaaa

SEQ ID NO: 1327479 - RNA, 15 nt, Human
caguuugcaaaaaau

SEQ ID NO: 1327480 - RNA, 17 nt, Human
caguuugcaaaaaaugu

SEQ ID NO: 1327481 - RNA, 15 nt, Human
caguuguucuuuuua

SEQ ID NO: 1327482 - RNA, 19 nt, Human
caguuguucuuuuuagaaa

SEQ ID NO: 1327483 - RNA, 15 nt, Human
caguuuaaaagcacg

SEQ ID NO: 1327484 - RNA, 20 nt, Human
cauuuuuguacuaacuagca

SEQ ID NO: 1327485 - RNA, 13 nt, Human
cauuuuuguauuu

SEQ ID NO: 1327486 - RNA, 20 nt, Human
cauuuuuguauuuuguuuaa

SEQ ID NO: 1327487 - RNA, 19 nt, Human
ccaaaaauguguaagaaca

SEQ ID NO: 1327488 - RNA, 14 nt, Human
ccaaaacaauguuu

SEQ ID NO: 1327489 - RNA, 22 nt, Human
ccaaaaauuacuuaguauugca

SEQ ID NO: 1327490 - RNA, 16 nt, Human
ccaaaaagugaaauaa

SEQ ID NO: 1327491 - RNA, 12 nt, Human
ccaaaaauagcu

SEQ ID NO: 1327492 - RNA, 13 nt, Human
ccaaaaauagcua

SEQ ID NO: 1327493 - RNA, 16 nt, Human
ccaaaaauaaauauau

SEQ ID NO: 1327494 - RNA, 12 nt, Human
cauuuccaagca

SEQ ID NO: 1327495 - RNA, 18 nt, Human
cauuuuugaauacaggca

SEQ ID NO: 1327496 - RNA, 20 nt, Human
cauuuuugaauacaggcaua

SEQ ID NO: 1327497 - RNA, 16 nt, Human
cauuugguucauuaau

SEQ ID NO: 1327498 - RNA, 20 nt, Human
cauuugguucauuaauucua

SEQ ID NO: 1327499 - RNA, 21 nt, Human
cauuugguucauuaauucuau

SEQ ID NO: 1327500 - RNA, 14 nt, Human
cauuggcuauuuaa

SEQ ID NO: 1327501 - RNA, 18 nt, Human
cauuggcuauuuaaaacu

SEQ ID NO: 1327502 - RNA, 19 nt, Human
cauuggcuauuuaaaacuu

SEQ ID NO: 1327503 - RNA, 14 nt, Human
cauugcugugaaca

SEQ ID NO: 1327504 - RNA, 20 nt, Human
cauuggcaccuaauccaggc

SEQ ID NO: 1327505 - RNA, 21 nt, Human
cauuggcaccuaauccaggca

SEQ ID NO: 1327506 - RNA, 18 nt, Human
cauuucauuugugccaga

SEQ ID NO: 1327507 - RNA, 14 nt, Human
cauuucauuuccua

SEQ ID NO: 1327508 - RNA, 15 nt, Human
cauuucacuuauuua

SEQ ID NO: 1327509 - RNA, 19 nt, Human
cauuucacuugucaggagu

SEQ ID NO: 1327510 - RNA, 13 nt, Human
cauuucagaaguu

SEQ ID NO: 1327511 - RNA, 21 nt, Human
cauuucagaaguuaguuugua

SEQ ID NO: 1327512 - RNA, 14 nt, Human
cauuuauuuugaca

SEQ ID NO: 1327513 - RNA, 14 nt, Human
cauuucaaaaugau

SEQ ID NO: 1327514 - RNA, 15 nt, Human
cauuucaacuguuug

SEQ ID NO: 1327515 - RNA, 23 nt, Human
cauugcguuugaccuuuuaugua

SEQ ID NO: 1327516 - RNA, 22 nt, Human
cauggcuggagcuagaauuuga

SEQ ID NO: 1327517 - RNA, 16 nt, Human
caugcugcuggggaag

SEQ ID NO: 1327518 - RNA, 16 nt, Human
cauggccugcaaacug

SEQ ID NO: 1327519 - RNA, 19 nt, Human
cauggccugcaaacuggga

SEQ ID NO: 1327520 - RNA, 20 nt, Human
cauggccugcaaacugggaa

SEQ ID NO: 1327521 - RNA, 14 nt, Human
cauggcuaacuggc

SEQ ID NO: 1327522 - RNA, 16 nt, Human
cauggcuaacuggcga

SEQ ID NO: 1327523 - RNA, 23 nt, Human
cauguuauuuguaauagauguuu

SEQ ID NO: 1327524 - RNA, 19 nt, Human
cauuaggaaaaguugcuau

SEQ ID NO: 1327525 - RNA, 15 nt, Human
cauuaggauggcuag

SEQ ID NO: 1327526 - RNA, 20 nt, Human
cauuagggaugccuccuuuc

SEQ ID NO: 1327527 - RNA, 15 nt, Human
cauucucauuggaaa

SEQ ID NO: 1327528 - RNA, 17 nt, Human
cauucucauuggaaauu

SEQ ID NO: 1327529 - RNA, 22 nt, Human
cauucucauuggaaauuuagca

SEQ ID NO: 1327530 - RNA, 14 nt, Human
cauucuccacagca

SEQ ID NO: 1327531 - RNA, 17 nt, Human
cauuagggaugccuccu

SEQ ID NO: 1327532 - RNA, 13 nt, Human
cauuaugaugugu

SEQ ID NO: 1327533 - RNA, 19 nt, Human
cauuaugcaauuuuuauau

SEQ ID NO: 1327534 - RNA, 16 nt, Human
cauucucacuccuacc

SEQ ID NO: 1327535 - RNA, 21 nt, Human
cauuaugugguuuuagauuuu

SEQ ID NO: 1327536 - RNA, 17 nt, Human
cauucucacuccuaccu

SEQ ID NO: 1327537 - RNA, 17 nt, Human
cauuaugugguuuuaga

SEQ ID NO: 1327538 - RNA, 18 nt, Human
ccaaagugcugggauuaa

SEQ ID NO: 1327539 - RNA, 15 nt, Human
ccaaauccccuaagc

SEQ ID NO: 1327540 - RNA, 22 nt, Human
ccaaagugcugggauuacaggu

SEQ ID NO: 1327541 - RNA, 20 nt, Human
ccaaauccuuagaucuggca

SEQ ID NO: 1327542 - RNA, 21 nt, Human
ccaaauccuuagaucuggcau

SEQ ID NO: 1327543 - RNA, 14 nt, Human
ccaaaucuggaagc

SEQ ID NO: 1327544 - RNA, 12 nt, Human
ccaaauuaagag

SEQ ID NO: 1327545 - RNA, 18 nt, Human
ccaaauuaaaaaagauaa

SEQ ID NO: 1327546 - RNA, 13 nt, Human
ccaaauuaaaaaa

SEQ ID NO: 1327547 - RNA, 15 nt, Human
ccaaauuaaaaaaga

SEQ ID NO: 1327548 - RNA, 17 nt, Human
ccaaauuaaaaaagaua

SEQ ID NO: 1327549 - RNA, 18 nt, Human
ccaaaugaaauauauuua

SEQ ID NO: 1327550 - RNA, 21 nt, Human
ccaaaugaaauauauuuaaaa

SEQ ID NO: 1327551 - RNA, 12 nt, Human
ccaaaugcagcu

SEQ ID NO: 1327552 - RNA, 11 nt, Human
ccaacuuguaa

SEQ ID NO: 1327553 - RNA, 17 nt, Human
ccaacuuggcugcagga

SEQ ID NO: 1327554 - RNA, 22 nt, Human
ccaacuacuguguuaugcaaaa

SEQ ID NO: 1327555 - RNA, 15 nt, Human
ccaacuagccccugg

SEQ ID NO: 1327556 - RNA, 17 nt, Human
ccaacuagccccugggg

SEQ ID NO: 1327557 - RNA, 14 nt, Human
ccaacuaugauuau

SEQ ID NO: 1327558 - RNA, 13 nt, Human
ccaaauucaguuu

SEQ ID NO: 1327559 - RNA, 15 nt, Human
ccaaauucaguuuca

SEQ ID NO: 1327560 - RNA, 18 nt, Human
ccaaauucaguuucauaa

SEQ ID NO: 1327561 - RNA, 19 nt, Human
ccaaauucaguuucauaaa

SEQ ID NO: 1327562 - RNA, 19 nt, Human
ccaacuaaugccuuacucu

SEQ ID NO: 1327563 - RNA, 20 nt, Human
ccaacuaaugccuuacucuu

SEQ ID NO: 1327564 - RNA, 14 nt, Human
ccaacuacuaauag

SEQ ID NO: 1327565 - RNA, 22 nt, Human
ccaacuacuaauagaauaaagg

SEQ ID NO: 1327566 - RNA, 21 nt, Human
ccaaaaccgccagcucuguuc

SEQ ID NO: 1327567 - RNA, 15 nt, Human
ccaaaaccgccagcu

SEQ ID NO: 1327568 - RNA, 16 nt, Human
ccaaaaccgccagcuc

SEQ ID NO: 1327569 - RNA, 17 nt, Human
ccaaaaccgccagcucu

SEQ ID NO: 1327570 - RNA, 18 nt, Human
ccaaaaccgccagcucug

SEQ ID NO: 1327571 - RNA, 19 nt, Human
ccaaaaccgccagcucugu

SEQ ID NO: 1327572 - RNA, 19 nt, Human
ccaaagugcugggauuaca

SEQ ID NO: 1327573 - RNA, 22 nt, Human
ccaaagugcugggauuacaggc

SEQ ID NO: 1327574 - RNA, 23 nt, Human
ccaauguuucaagaggagccccc

SEQ ID NO: 1327575 - RNA, 14 nt, Human
ccaauuaguuuccu

SEQ ID NO: 1327576 - RNA, 15 nt, Human
ccaauuaguuuccuu

SEQ ID NO: 1327577 - RNA, 16 nt, Human
ccaauuaguuuccuuu

SEQ ID NO: 1327578 - RNA, 20 nt, Human
ccaauuaguuuccuuuuuaa

SEQ ID NO: 1327579 - RNA, 14 nt, Human
ccaagcuguuuucu

SEQ ID NO: 1327580 - RNA, 17 nt, Human
ccaagcuguuuucuucu

SEQ ID NO: 1327581 - RNA, 18 nt, Human
ccaagcuguuuucuucua

SEQ ID NO: 1327582 - RNA, 13 nt, Human
ccacccugggccc

SEQ ID NO: 1327583 - RNA, 23 nt, Human
ccaccgggcugggagcucugcag

SEQ ID NO: 1327584 - RNA, 15 nt, Human
ccaccguugucucau

SEQ ID NO: 1327585 - RNA, 19 nt, Human
ccaccguugucucaugcca

SEQ ID NO: 1327586 - RNA, 21 nt, Human
ccaccaggccaccuccccagc

SEQ ID NO: 1327587 - RNA, 20 nt, Human
ccacccuggccgaguccaag

SEQ ID NO: 1327588 - RNA, 21 nt, Human
ccacccuggccgaguccaagc

SEQ ID NO: 1327589 - RNA, 22 nt, Human
ccacccuggccgaguccaagcu

SEQ ID NO: 1327590 - RNA, 12 nt, Human
ccacccugggcc

SEQ ID NO: 1327591 - RNA, 16 nt, Human
ccaccagcugugucca

SEQ ID NO: 1327592 - RNA, 15 nt, Human
ccaccagcugugucc

SEQ ID NO: 1327593 - RNA, 13 nt, Human
ccaccaggccacc

SEQ ID NO: 1327594 - RNA, 19 nt, Human
ccaccaggccaccucccca

SEQ ID NO: 1327595 - RNA, 13 nt, Human
ccaccagaugcug

SEQ ID NO: 1327596 - RNA, 12 nt, Human
ccaccagaugcu

SEQ ID NO: 1327597 - RNA, 14 nt, Human
ccaccagcuguguc

SEQ ID NO: 1327598 - RNA, 17 nt, Human
ccacacuucucaggaca

SEQ ID NO: 1327599 - RNA, 18 nt, Human
ccacacuucucaggacac

SEQ ID NO: 1327600 - RNA, 21 nt, Human
ccacacuucucaggacacagg

SEQ ID NO: 1327601 - RNA, 22 nt, Human
ccacacuucucaggacacaggc

SEQ ID NO: 1327602 - RNA, 24 nt, Human
ccacacuucucaggacacaggccu

SEQ ID NO: 1327603 - RNA, 23 nt, Human
ccacacuucucaggacacaggcc

SEQ ID NO: 1327604 - RNA, 22 nt, Human
ccacacuucaggcucuucuccu

SEQ ID NO: 1327605 - RNA, 14 nt, Human
ccacacuucucagg

SEQ ID NO: 1327606 - RNA, 15 nt, Human
ccacacuucucagga

SEQ ID NO: 1327607 - RNA, 22 nt, Human
augucuauaaaccgaacugaug

SEQ ID NO: 1327608 - RNA, 14 nt, Human
augucuauucagcu

SEQ ID NO: 1327609 - RNA, 15 nt, Human
augucuauucagcuu

SEQ ID NO: 1327610 - RNA, 16 nt, Human
augucuauucagcuuc

SEQ ID NO: 1327611 - RNA, 16 nt, Human
auguccacugguucuu

SEQ ID NO: 1327612 - RNA, 20 nt, Human
augucccaacuuguaaaaau

SEQ ID NO: 1327613 - RNA, 18 nt, Human
auguccaucagaugacaa

SEQ ID NO: 1327614 - RNA, 14 nt, Human
auguccauuuacac

SEQ ID NO: 1327615 - RNA, 24 nt, Human
augucccuaccgagucucuucucc

SEQ ID NO: 1327616 - RNA, 17 nt, Human
augucaguaccuucaaa

SEQ ID NO: 1327617 - RNA, 20 nt, Human
augucaggguaccuggggcc

SEQ ID NO: 1327618 - RNA, 20 nt, Human
auguaguaugcuaugauuaa

SEQ ID NO: 1327619 - RNA, 15 nt, Human
uuuggggcuugauga

SEQ ID NO: 1327620 - RNA, 12 nt, Human
auguaguauuuu

SEQ ID NO: 1327621 - RNA, 21 nt, Human
auguaguauuuuuuguauaau

SEQ ID NO: 1327622 - RNA, 22 nt, Human
auguaguauuuuuuguauaauu

SEQ ID NO: 1327623 - RNA, 23 nt, Human
auguaguauuuuuuguauaauug

SEQ ID NO: 1327624 - RNA, 17 nt, Human
auguaguucugcuccag

SEQ ID NO: 1327625 - RNA, 18 nt, Human
auguaguucugcuccaga

SEQ ID NO: 1327626 - RNA, 21 nt, Human
auguaguuuuuauauguugua

SEQ ID NO: 1327627 - RNA, 20 nt, Human
auguaguuuuuauauguugu

SEQ ID NO: 1327628 - RNA, 20 nt, Human
auguauaacuuuaacuucug

SEQ ID NO: 1327629 - RNA, 11 nt, Human
auguaucacua

SEQ ID NO: 1327630 - RNA, 23 nt, Human
auguauaacuaggagcuuugacu

SEQ ID NO: 1327631 - RNA, 16 nt, Human
auguaucauagaaaug

SEQ ID NO: 1327632 - RNA, 17 nt, Human
auguaucauagaaaugu

SEQ ID NO: 1327633 - RNA, 19 nt, Human
auguauggguaggguaaau

SEQ ID NO: 1327634 - RNA, 21 nt, Human
auguauggguaggguaaauca

SEQ ID NO: 1327635 - RNA, 22 nt, Human
auguauggugcaauguguguau

SEQ ID NO: 1327636 - RNA, 12 nt, Human
auguauggugca

SEQ ID NO: 1327637 - RNA, 11 nt, Human
uuugcucaugg

SEQ ID NO: 1327638 - RNA, 12 nt, Human
uuugcucaugga

SEQ ID NO: 1327639 - RNA, 13 nt, Human
uuugcccauuuug

SEQ ID NO: 1327640 - RNA, 14 nt, Human
uuugccccuuuaua

SEQ ID NO: 1327641 - RNA, 17 nt, Human
uuugcccugcugcccuc

SEQ ID NO: 1327642 - RNA, 21 nt, Human
uuugcccugcugcccuccccc

SEQ ID NO: 1327643 - RNA, 23 nt, Human
uuugcccugcugcccucccccuc

SEQ ID NO: 1327644 - RNA, 12 nt, Human
uuugcccuuuga

SEQ ID NO: 1327645 - RNA, 14 nt, Human
uuugcuaauuuuua

SEQ ID NO: 1327646 - RNA, 21 nt, Human
uuugcuaauuuuuauuaauuu

SEQ ID NO: 1327647 - RNA, 13 nt, Human
uuugcuaguuuuu

SEQ ID NO: 1327648 - RNA, 16 nt, Human
uuugcuaucugggcug

SEQ ID NO: 1327649 - RNA, 24 nt, Human
uuugcaaggugcauuuuuacuauu

SEQ ID NO: 1327650 - RNA, 12 nt, Human
uuugcacagcuc

SEQ ID NO: 1327651 - RNA, 16 nt, Human
uuugcacagcucuccg

SEQ ID NO: 1327652 - RNA, 19 nt, Human
uuugcacauguuuccucua

SEQ ID NO: 1327653 - RNA, 18 nt, Human
uuugcccagaaagaagau

SEQ ID NO: 1327654 - RNA, 13 nt, Human
uuugcucauggaa

SEQ ID NO: 1327655 - RNA, 16 nt, Human
uuugcucauauuuccc

SEQ ID NO: 1327656 - RNA, 13 nt, Human
uuugcucauauuu

SEQ ID NO: 1327657 - RNA, 18 nt, Human
uuugcucagcuucuccaa

SEQ ID NO: 1327658 - RNA, 17 nt, Human
uuugcucauauuuccca

SEQ ID NO: 1327659 - RNA, 17 nt, Human
uuugcugugaggcuguc

SEQ ID NO: 1327660 - RNA, 19 nt, Human
uuugcugugaggcuguccu

SEQ ID NO: 1327661 - RNA, 21 nt, Human
uuugcugugaggcuguccugu

SEQ ID NO: 1327662 - RNA, 21 nt, Human
uuugcuguuuuaaacauuaau

SEQ ID NO: 1327663 - RNA, 23 nt, Human
uuuggccaaugcaccuaaagaaa

SEQ ID NO: 1327664 - RNA, 17 nt, Human
uuuggccaucugcuccu

SEQ ID NO: 1327665 - RNA, 20 nt, Human
uuuggggcaggaguagcuga

SEQ ID NO: 1327666 - RNA, 18 nt, Human
uuuggggcagaaaggacu

SEQ ID NO: 1327667 - RNA, 16 nt, Human
uuuggcuaguccuugu

SEQ ID NO: 1327668 - RNA, 20 nt, Human
uuugggaagugaagacugga

SEQ ID NO: 1327669 - RNA, 22 nt, Human
uuugggaagugaagacuggaag

SEQ ID NO: 1327670 - RNA, 16 nt, Human
uuugggagacauguga

SEQ ID NO: 1327671 - RNA, 18 nt, Human
uuugggagacaugugaca

SEQ ID NO: 1327672 - RNA, 21 nt, Human
uuugggagacaugugacauuu

SEQ ID NO: 1327673 - RNA, 14 nt, Human
uuugggagagacuu

SEQ ID NO: 1327674 - RNA, 23 nt, Human
uuugggagagacuuguuuuggau

SEQ ID NO: 1327675 - RNA, 16 nt, Human
uuugugagcaggcugu

SEQ ID NO: 1327676 - RNA, 23 nt, Human
uuugucucugcaaacugccuucu

SEQ ID NO: 1327677 - RNA, 17 nt, Human
uuuguagaagucacauu

SEQ ID NO: 1327678 - RNA, 20 nt, Human
uuuguagcuggggcuuugau

SEQ ID NO: 1327679 - RNA, 19 nt, Human
uuugucgcucaugugugca

SEQ ID NO: 1327680 - RNA, 17 nt, Human
uuuguuucuuucucuga

SEQ ID NO: 1327681 - RNA, 18 nt, Human
uuugugagucaauacaua

SEQ ID NO: 1327682 - RNA, 18 nt, Human
uuuguacauuugggaguu

SEQ ID NO: 1327683 - RNA, 19 nt, Human
uuuguaccauuuuaaaguu

SEQ ID NO: 1327684 - RNA, 14 nt, Human
uuuguacugaaaaa

SEQ ID NO: 1327685 - RNA, 15 nt, Human
uuuguacugaaaaau

SEQ ID NO: 1327686 - RNA, 19 nt, Human
uuuguaacccacugagagg

SEQ ID NO: 1327687 - RNA, 13 nt, Human
uuuguaaauuguc

SEQ ID NO: 1327688 - RNA, 12 nt, Human
augucuggagac

SEQ ID NO: 1327689 - RNA, 13 nt, Human
augucuggagacc

SEQ ID NO: 1327690 - RNA, 14 nt, Human
augucuggagacca

SEQ ID NO: 1327691 - RNA, 18 nt, Human
augucuggagaccaccag

SEQ ID NO: 1327692 - RNA, 23 nt, Human
augucuggagaccaccagggcau

SEQ ID NO: 1327693 - RNA, 12 nt, Human
augucuggggca

SEQ ID NO: 1327694 - RNA, 13 nt, Human
augucugguucuc

SEQ ID NO: 1327695 - RNA, 14 nt, Human
augucugguucuca

SEQ ID NO: 1327696 - RNA, 16 nt, Human
augucugguucucaau

SEQ ID NO: 1327697 - RNA, 17 nt, Human
augucugguucucaauu

SEQ ID NO: 1327698 - RNA, 19 nt, Human
augucugguucucaauucc

SEQ ID NO: 1327699 - RNA, 23 nt, Human
augucugguucucaauuccaaca

SEQ ID NO: 1327700 - RNA, 21 nt, Human
augucugguucucaauuccaa

SEQ ID NO: 1327701 - RNA, 14 nt, Human
augucuguggauuu

SEQ ID NO: 1327702 - RNA, 14 nt, Human
augucuguucuaca

SEQ ID NO: 1327703 - RNA, 16 nt, Human
augucuguucuacaua

SEQ ID NO: 1327704 - RNA, 23 nt, Human
augucuuaaaaccugcuuuucaa

SEQ ID NO: 1327705 - RNA, 16 nt, Human
uuuuaaguaaggaauu

SEQ ID NO: 1327706 - RNA, 23 nt, Human
uuuuaaggguuuguggaaaauga

SEQ ID NO: 1327707 - RNA, 15 nt, Human
uuuuaaguauuuagg

SEQ ID NO: 1327708 - RNA, 20 nt, Human
uuuuaaggguuuguggaaaa

SEQ ID NO: 1327709 - RNA, 15 nt, Human
uuuuaagcucugagc

SEQ ID NO: 1327710 - RNA, 16 nt, Human
uuuuaagaauaucugu

SEQ ID NO: 1327711 - RNA, 15 nt, Human
uuuuaacuuuguuuu

SEQ ID NO: 1327712 - RNA, 19 nt, Human
uuuuaagaauugaguaaug

SEQ ID NO: 1327713 - RNA, 13 nt, Human
uuuuaagaauauc

SEQ ID NO: 1327714 - RNA, 14 nt, Human
uuuuaacuguggau

SEQ ID NO: 1327715 - RNA, 11 nt, Human
uuuuaacuuug

SEQ ID NO: 1327716 - RNA, 12 nt, Human
uuuuaacuuugu

SEQ ID NO: 1327717 - RNA, 13 nt, Human
uuuuaacuuuguu

SEQ ID NO: 1327718 - RNA, 14 nt, Human
uuuuaacuuuguuu

SEQ ID NO: 1327719 - RNA, 18 nt, Human
uuuuaacuuuguuuuauu

SEQ ID NO: 1327720 - RNA, 14 nt, Human
uuuuaaaagaauga

SEQ ID NO: 1327721 - RNA, 15 nt, Human
uuuuaaaagaaugau

SEQ ID NO: 1327722 - RNA, 14 nt, Human
uuuuaacauuccuc

SEQ ID NO: 1327723 - RNA, 13 nt, Human
uuuuaacauuccu

SEQ ID NO: 1327724 - RNA, 16 nt, Human
uuuuaaaacacuucca

SEQ ID NO: 1327725 - RNA, 22 nt, Human
uuuuaaaacacuuccauaaucu

SEQ ID NO: 1327726 - RNA, 13 nt, Human
uuuuaaaacccag

SEQ ID NO: 1327727 - RNA, 17 nt, Human
uuuuaaaaauagacacu

SEQ ID NO: 1327728 - RNA, 22 nt, Human
uuuuaaaaauuaaaucaaccuu

SEQ ID NO: 1327729 - RNA, 20 nt, Human
uuuuaaaaauuguuaauuuu

SEQ ID NO: 1327730 - RNA, 17 nt, Human
uuuuaaaaaauggucac

SEQ ID NO: 1327731 - RNA, 16 nt, Human
uuuuaaaaaaugguca

SEQ ID NO: 1327732 - RNA, 14 nt, Human
uuuuaaaaagcaaa

SEQ ID NO: 1327733 - RNA, 14 nt, Human
uuuuaaaaaagcuu

SEQ ID NO: 1327734 - RNA, 15 nt, Human
uuuuaaaaaagcuua

SEQ ID NO: 1327735 - RNA, 17 nt, Human
uuuuaaaaaagcuuaaa

SEQ ID NO: 1327736 - RNA, 20 nt, Human
uuuuaaaaaagcuuaaaacu

SEQ ID NO: 1327737 - RNA, 21 nt, Human
uuuuaaaaaagcuuaaaacuu

SEQ ID NO: 1327738 - RNA, 22 nt, Human
uuuuaaaaaagcuuaaaacuuu

SEQ ID NO: 1327739 - RNA, 23 nt, Human
uuuuaaaaaagcuuaaaacuuug

SEQ ID NO: 1327740 - RNA, 13 nt, Human
uuuuaaaaaagaa

SEQ ID NO: 1327741 - RNA, 16 nt, Human
auguuuauucuucuag

SEQ ID NO: 1327742 - RNA, 17 nt, Human
auguuuauucuucuaga

SEQ ID NO: 1327743 - RNA, 18 nt, Human
auguuuauucuucuagag

SEQ ID NO: 1327744 - RNA, 19 nt, Human
auguuuagacuuuaacaua

SEQ ID NO: 1327745 - RNA, 21 nt, Human
auguuuagacuuuaacauaag

SEQ ID NO: 1327746 - RNA, 14 nt, Human
auguuuaguaaacu

SEQ ID NO: 1327747 - RNA, 17 nt, Human
auguuuagacuuuaaca

SEQ ID NO: 1327748 - RNA, 18 nt, Human
auguuuagacuuuaacau

SEQ ID NO: 1327749 - RNA, 18 nt, Human
auguuucaaacauauaua

SEQ ID NO: 1327750 - RNA, 21 nt, Human
auguuuauucuucuagaguuc

SEQ ID NO: 1327751 - RNA, 19 nt, Human
auguuuauucuucuagagu

SEQ ID NO: 1327752 - RNA, 14 nt, Human
auguuuauuucagg

SEQ ID NO: 1327753 - RNA, 21 nt, Human
auguuucaaacauauauaaca

SEQ ID NO: 1327754 - RNA, 11 nt, Human
uuuucuauuaa

SEQ ID NO: 1327755 - RNA, 12 nt, Human
uuuucuauuaaa

SEQ ID NO: 1327756 - RNA, 13 nt, Human
uuuucuauuaaaa

SEQ ID NO: 1327757 - RNA, 14 nt, Human
uuuucuauuaaaag

SEQ ID NO: 1327758 - RNA, 15 nt, Human
uuuucuauuaaaaga

SEQ ID NO: 1327759 - RNA, 16 nt, Human
uuuucuauuaaaagac

SEQ ID NO: 1327760 - RNA, 17 nt, Human
uuuucuauuaaaagacu

SEQ ID NO: 1327761 - RNA, 18 nt, Human
uuuucuauuaaaagacuc

SEQ ID NO: 1327762 - RNA, 19 nt, Human
uuuucuauuaaaagacuca

SEQ ID NO: 1327763 - RNA, 20 nt, Human
uuuucuauuaaaagacucau

SEQ ID NO: 1327764 - RNA, 21 nt, Human
uuuucuauuaaaagacucauc

SEQ ID NO: 1327765 - RNA, 18 nt, Human
uuuucuauuucacuggag

SEQ ID NO: 1327766 - RNA, 16 nt, Human
uuuucuauuuuaauaa

SEQ ID NO: 1327767 - RNA, 23 nt, Human
uuuucuauuucacuggagcacaa

SEQ ID NO: 1327768 - RNA, 14 nt, Human
auguuguaagcaac

SEQ ID NO: 1327769 - RNA, 14 nt, Human
auguuguaauauuu

SEQ ID NO: 1327770 - RNA, 17 nt, Human
auguuguaauauuucuu

SEQ ID NO: 1327771 - RNA, 19 nt, Human
auguuguaauauuucuuca

SEQ ID NO: 1327772 - RNA, 13 nt, Human
auguugucuaaga

SEQ ID NO: 1327773 - RNA, 14 nt, Human
auguugucuaagaa

SEQ ID NO: 1327774 - RNA, 16 nt, Human
auguugucuaagaaau

SEQ ID NO: 1327775 - RNA, 17 nt, Human
auguugucuaagaaauu

SEQ ID NO: 1327776 - RNA, 22 nt, Human
auguugucuaagaaauugaaua

SEQ ID NO: 1327777 - RNA, 22 nt, Human
auguuuuugaucaaaaacuauu

SEQ ID NO: 1327778 - RNA, 19 nt, Human
auguuuuuguucaaagcca

SEQ ID NO: 1327779 - RNA, 17 nt, Human
auguuuuccuugccaaa

SEQ ID NO: 1327780 - RNA, 18 nt, Human
auguuuucgaaaaucaaa

SEQ ID NO: 1327781 - RNA, 20 nt, Human
auguuuucgaaaaucaaaug

SEQ ID NO: 1327782 - RNA, 22 nt, Human
auguuuucgaaaaucaaauggu

SEQ ID NO: 1327783 - RNA, 18 nt, Human
auguuuucugaaaauaua

SEQ ID NO: 1327784 - RNA, 20 nt, Human
auguuuucugaaaauauaac

SEQ ID NO: 1327785 - RNA, 21 nt, Human
auguuuucugaaaauauaacc

SEQ ID NO: 1327786 - RNA, 23 nt, Human
auguuuucgaaaaucaaauggua

SEQ ID NO: 1327787 - RNA, 14 nt, Human
auguuuugacauuu

SEQ ID NO: 1327788 - RNA, 16 nt, Human
auguuuugacauuuuu

SEQ ID NO: 1327789 - RNA, 18 nt, Human
auuaaaaaagauaaacac

SEQ ID NO: 1327790 - RNA, 13 nt, Human
auuaaaaacugag

SEQ ID NO: 1327791 - RNA, 14 nt, Human
auuaaaaacugagu

SEQ ID NO: 1327792 - RNA, 20 nt, Human
auuaaaaacugagugacucu

SEQ ID NO: 1327793 - RNA, 19 nt, Human
auuaaaaagguuuacagaa

SEQ ID NO: 1327794 - RNA, 18 nt, Human
auuaaaaagguuuacaga

SEQ ID NO: 1327795 - RNA, 11 nt, Human
auuaaaagacu

SEQ ID NO: 1327796 - RNA, 12 nt, Human
auuaaaagacuc

SEQ ID NO: 1327797 - RNA, 13 nt, Human
auuaaaagacuca

SEQ ID NO: 1327798 - RNA, 14 nt, Human
auuaaaagacucau

SEQ ID NO: 1327799 - RNA, 15 nt, Human
auuaaaagacucauc

SEQ ID NO: 1327800 - RNA, 15 nt, Human
auuaaaagcaaauca

SEQ ID NO: 1327801 - RNA, 22 nt, Human
auuaaaagcaaaucauuuguuu

SEQ ID NO: 1327802 - RNA, 16 nt, Human
auuaaaagcaaaucau

SEQ ID NO: 1327803 - RNA, 13 nt, Human
auuaaaauauaau

SEQ ID NO: 1327804 - RNA, 18 nt, Human
auuaaaauauaaucucua

SEQ ID NO: 1327805 - RNA, 21 nt, Human
auuaacccacuagcucuuguu

SEQ ID NO: 1327806 - RNA, 11 nt, Human
auuaaccuaga

SEQ ID NO: 1327807 - RNA, 13 nt, Human
auuaaccuagaga

SEQ ID NO: 1327808 - RNA, 13 nt, Human
auuaaccucucac

SEQ ID NO: 1327809 - RNA, 13 nt, Human
auuaaccucugca

SEQ ID NO: 1327810 - RNA, 22 nt, Human
auuaacuggguaaugaaacaaa

SEQ ID NO: 1327811 - RNA, 19 nt, Human
auuaacuggguaaugaaac

SEQ ID NO: 1327812 - RNA, 14 nt, Human
auuaaccucugcac

SEQ ID NO: 1327813 - RNA, 15 nt, Human
auuaacgauguccaa

SEQ ID NO: 1327814 - RNA, 12 nt, Human
auuaacucauua

SEQ ID NO: 1327815 - RNA, 17 nt, Human
auuaacucauuagacug

SEQ ID NO: 1327816 - RNA, 18 nt, Human
auuaacuggguaaugaaa

SEQ ID NO: 1327817 - RNA, 13 nt, Human
auuaacuuuaaug

SEQ ID NO: 1327818 - RNA, 15 nt, Human
auuaagaaaaucuau

SEQ ID NO: 1327819 - RNA, 12 nt, Human
auuaagaaagga

SEQ ID NO: 1327820 - RNA, 13 nt, Human
auuaagaaaggaa

SEQ ID NO: 1327821 - RNA, 17 nt, Human
auuaagaaaggaagcau

SEQ ID NO: 1327822 - RNA, 11 nt, Human
auuaagaaaua

SEQ ID NO: 1327823 - RNA, 12 nt, Human
auuaagaaauag

SEQ ID NO: 1327824 - RNA, 23 nt, Human
auuaagaaaggaagcauuguaaa

SEQ ID NO: 1327825 - RNA, 15 nt, Human
auuaagaaggcaaaa

SEQ ID NO: 1327826 - RNA, 19 nt, Human
auuaagaaggcaaaaaugu

SEQ ID NO: 1327827 - RNA, 22 nt, Human
auuaagaaggcaaaaauguaaa

SEQ ID NO: 1327828 - RNA, 21 nt, Human
uuuuauucagcucauggacuu

SEQ ID NO: 1327829 - RNA, 11 nt, Human
uuuucagaugu

SEQ ID NO: 1327830 - RNA, 18 nt, Human
uuuucagaugugaaccau

SEQ ID NO: 1327831 - RNA, 17 nt, Human
uuuucagaugugaacca

SEQ ID NO: 1327832 - RNA, 18 nt, Human
uuuucagcaaacucuuuu

SEQ ID NO: 1327833 - RNA, 19 nt, Human
uuuucagcaaacucuuuuc

SEQ ID NO: 1327834 - RNA, 21 nt, Human
uuuucauuccaugugcccagu

SEQ ID NO: 1327835 - RNA, 20 nt, Human
uuuucauuccaugugcccag

SEQ ID NO: 1327836 - RNA, 22 nt, Human
uuuucauuaaauaaauuugacu

SEQ ID NO: 1327837 - RNA, 20 nt, Human
uuuucauuaaauaaauuuga

SEQ ID NO: 1327838 - RNA, 14 nt, Human
uuuucauuaaauaa

SEQ ID NO: 1327839 - RNA, 18 nt, Human
uuuucauuaaauaaauuu

SEQ ID NO: 1327840 - RNA, 17 nt, Human
uuuuccaggcuucugcu

SEQ ID NO: 1327841 - RNA, 19 nt, Human
uuuuccaggcuucugcugg

SEQ ID NO: 1327842 - RNA, 20 nt, Human
uuuuccaggcuucugcuggg

SEQ ID NO: 1327843 - RNA, 22 nt, Human
uuuuauguugcauagaauaaaa

SEQ ID NO: 1327844 - RNA, 19 nt, Human
uuuuaugugaaacauguuu

SEQ ID NO: 1327845 - RNA, 23 nt, Human
uuuuauggugccuaguauugaca

SEQ ID NO: 1327846 - RNA, 19 nt, Human
uuuuauguaguaauugaca

SEQ ID NO: 1327847 - RNA, 18 nt, Human
uuuuaugugaaacauguu

SEQ ID NO: 1327848 - RNA, 18 nt, Human
uuuuauggugccuaguau

SEQ ID NO: 1327849 - RNA, 19 nt, Human
uuuuauaauucucauuaaa

SEQ ID NO: 1327850 - RNA, 22 nt, Human
uuuuauggcacuaguauuucua

SEQ ID NO: 1327851 - RNA, 19 nt, Human
uuuuauggcacuaguauuu

SEQ ID NO: 1327852 - RNA, 14 nt, Human
uuuuauaauuuugu

SEQ ID NO: 1327853 - RNA, 13 nt, Human
uuuuauaaauacu

SEQ ID NO: 1327854 - RNA, 22 nt, Human
uuuuauaaauacugcaaaucag

SEQ ID NO: 1327855 - RNA, 18 nt, Human
uuuuaguuuuucauuaaa

SEQ ID NO: 1327856 - RNA, 15 nt, Human
auguugcauagaaua

SEQ ID NO: 1327857 - RNA, 16 nt, Human
auguuggccaggcugg

SEQ ID NO: 1327858 - RNA, 16 nt, Human
auguuggccaggcugc

SEQ ID NO: 1327859 - RNA, 16 nt, Human
auguugagaaucccaa

SEQ ID NO: 1327860 - RNA, 22 nt, Human
auguugagaaucccaaauuuga

SEQ ID NO: 1327861 - RNA, 18 nt, Human
auguugauuacagugcag

SEQ ID NO: 1327862 - RNA, 20 nt, Human
uuuuaguuuaaaaaccuugu

SEQ ID NO: 1327863 - RNA, 16 nt, Human
uuuuaguuuuucauua

SEQ ID NO: 1327864 - RNA, 22 nt, Human
uuuuaguuuuucauuaaauaaa

SEQ ID NO: 1327865 - RNA, 22 nt, Human
uuuuagauuuucugguucuaac

SEQ ID NO: 1327866 - RNA, 23 nt, Human
uuuuagcaaagauaucucaucuc

SEQ ID NO: 1327867 - RNA, 16 nt, Human
uuuuagccuucucugu

SEQ ID NO: 1327868 - RNA, 23 nt, Human
uuuuagccuucucuguucauuuc

SEQ ID NO: 1327869 - RNA, 15 nt, Human
auguugacaugggac

SEQ ID NO: 1327870 - RNA, 14 nt, Human
auguugaauacuuu

SEQ ID NO: 1327871 - RNA, 15 nt, Human
auguugaauacuuuu

SEQ ID NO: 1327872 - RNA, 19 nt, Human
auguugaauacuuuuuaca

SEQ ID NO: 1327873 - RNA, 16 nt, Human
auguugaagccuuugu

SEQ ID NO: 1327874 - RNA, 21 nt, Human
auguuauauguuguucuuaca

SEQ ID NO: 1327875 - RNA, 15 nt, Human
auguuaucuucucaa

SEQ ID NO: 1327876 - RNA, 16 nt, Human
auguuaucuucucaag

SEQ ID NO: 1327877 - RNA, 17 nt, Human
auguuaucuucucaagu

SEQ ID NO: 1327878 - RNA, 19 nt, Human
auguucaucaaugaaugaa

SEQ ID NO: 1327879 - RNA, 15 nt, Human
auguuauauauaaau

SEQ ID NO: 1327880 - RNA, 17 nt, Human
auguuauauauaaauau

SEQ ID NO: 1327881 - RNA, 18 nt, Human
auguuauauauaaauaua

SEQ ID NO: 1327882 - RNA, 19 nt, Human
auguuauauauaaauauau

SEQ ID NO: 1327883 - RNA, 22 nt, Human
auguuauauauaaauauauuau

SEQ ID NO: 1327884 - RNA, 20 nt, Human
auguuaguaauaccucuaau

SEQ ID NO: 1327885 - RNA, 14 nt, Human
auguuauauauaaa

SEQ ID NO: 1327886 - RNA, 20 nt, Human
auguuaguuaccuuauaguu

SEQ ID NO: 1327887 - RNA, 21 nt, Human
auguuaguuaccuuauaguua

SEQ ID NO: 1327888 - RNA, 22 nt, Human
auguuaguuaccuuauaguuac

SEQ ID NO: 1327889 - RNA, 23 nt, Human
auguuaguuaccuuauaguuacu

SEQ ID NO: 1327890 - RNA, 21 nt, Human
auguuaguaauaccucuaaua

SEQ ID NO: 1327891 - RNA, 16 nt, Human
auguuaguaauaccuc

SEQ ID NO: 1327892 - RNA, 15 nt, Human
auguuaguaauaccu

SEQ ID NO: 1327893 - RNA, 14 nt, Human
uuuuaaguugcuga

SEQ ID NO: 1327894 - RNA, 19 nt, Human
auuagaaucaaacauuuug

SEQ ID NO: 1327895 - RNA, 20 nt, Human
auuagaaucaaacauuuuga

SEQ ID NO: 1327896 - RNA, 21 nt, Human
auuagaaucaaacauuuugaa

SEQ ID NO: 1327897 - RNA, 14 nt, Human
auuagaauuauuua

SEQ ID NO: 1327898 - RNA, 13 nt, Human
auuagaauuauuu

SEQ ID NO: 1327899 - RNA, 20 nt, Human
auuagagauuaccuccugag

SEQ ID NO: 1327900 - RNA, 13 nt, Human
auuagagccugua

SEQ ID NO: 1327901 - RNA, 16 nt, Human
auuagagccuguaaac

SEQ ID NO: 1327902 - RNA, 19 nt, Human
auuagagggaggagaauga

SEQ ID NO: 1327903 - RNA, 18 nt, Human
auuauaagggcaaauugg

SEQ ID NO: 1327904 - RNA, 23 nt, Human
auuauaagggcaaauuggagaaa

SEQ ID NO: 1327905 - RNA, 22 nt, Human
auuauaauauacuauauuuaug

SEQ ID NO: 1327906 - RNA, 12 nt, Human
auuauaauauuu

SEQ ID NO: 1327907 - RNA, 14 nt, Human
auuauaaucuuaua

SEQ ID NO: 1327908 - RNA, 17 nt, Human
auuacuggccuuuuuca

SEQ ID NO: 1327909 - RNA, 21 nt, Human
auuacuggccuuuuucauuua

SEQ ID NO: 1327910 - RNA, 22 nt, Human
auuacuggccuuuuucauuuau

SEQ ID NO: 1327911 - RNA, 21 nt, Human
auuacuuuggggcuaauuuaa

SEQ ID NO: 1327912 - RNA, 23 nt, Human
auuacuuuggggcuaauuuaaca

SEQ ID NO: 1327913 - RNA, 14 nt, Human
auuacuuugugaau

SEQ ID NO: 1327914 - RNA, 14 nt, Human
auuacuuuugcugu

SEQ ID NO: 1327915 - RNA, 15 nt, Human
auuagaaauaaagca

SEQ ID NO: 1327916 - RNA, 12 nt, Human
auuagaaauauu

SEQ ID NO: 1327917 - RNA, 14 nt, Human
auuagaaauauuuu

SEQ ID NO: 1327918 - RNA, 15 nt, Human
auuagaaauauuuua

SEQ ID NO: 1327919 - RNA, 17 nt, Human
auuagaaauauuuuaaa

SEQ ID NO: 1327920 - RNA, 24 nt, Human
auuagaaauauuuuaaaaucagcu

SEQ ID NO: 1327921 - RNA, 22 nt, Human
auuagaaauuaccuguggauau

SEQ ID NO: 1327922 - RNA, 21 nt, Human
auuagaaauauuuuaaaauca

SEQ ID NO: 1327923 - RNA, 21 nt, Human
auuagaagacaauugacaaca

SEQ ID NO: 1327924 - RNA, 16 nt, Human
auuauauuuacaaaug

SEQ ID NO: 1327925 - RNA, 23 nt, Human
auuauagcucuaauguuugcaua

SEQ ID NO: 1327926 - RNA, 22 nt, Human
auuauagcucuaauguuugcau

SEQ ID NO: 1327927 - RNA, 21 nt, Human
auuauagcucuaauguuugca

SEQ ID NO: 1327928 - RNA, 17 nt, Human
auuauaggaucauuugu

SEQ ID NO: 1327929 - RNA, 19 nt, Human
auuauagcucuaauguuug

SEQ ID NO: 1327930 - RNA, 18 nt, Human
auuauagcucuaauguuu

SEQ ID NO: 1327931 - RNA, 17 nt, Human
auuauagcucuaauguu

SEQ ID NO: 1327932 - RNA, 16 nt, Human
auuauagcucuaaugu

SEQ ID NO: 1327933 - RNA, 15 nt, Human
auuauagcucuaaug

SEQ ID NO: 1327934 - RNA, 13 nt, Human
auuauagcucuaa

SEQ ID NO: 1327935 - RNA, 12 nt, Human
auuauagcucua

SEQ ID NO: 1327936 - RNA, 19 nt, Human
auuauagauucuaaagauu

SEQ ID NO: 1327937 - RNA, 13 nt, Human
auuauaaugaauu

SEQ ID NO: 1327938 - RNA, 14 nt, Human
auuauaaugaauuu

SEQ ID NO: 1327939 - RNA, 18 nt, Human
auuauaaucuuauaauug

SEQ ID NO: 1327940 - RNA, 21 nt, Human
auuauacuuguaauuauggag

SEQ ID NO: 1327941 - RNA, 13 nt, Human
auuauagauucua

SEQ ID NO: 1327942 - RNA, 14 nt, Human
auuauagauucuaa

SEQ ID NO: 1327943 - RNA, 15 nt, Human
auuauagauucuaaa

SEQ ID NO: 1327944 - RNA, 16 nt, Human
auuauagauucuaaag

SEQ ID NO: 1327945 - RNA, 17 nt, Human
auuauagauucuaaaga

SEQ ID NO: 1327946 - RNA, 18 nt, Human
auuauagauucuaaagau

SEQ ID NO: 1327947 - RNA, 22 nt, Human
auuaucuauagcuaaguacaca

SEQ ID NO: 1327948 - RNA, 19 nt, Human
auuaucuauagcuaaguac

SEQ ID NO: 1327949 - RNA, 12 nt, Human
auuaucuuaaaa

SEQ ID NO: 1327950 - RNA, 14 nt, Human
auuaucugggcuua

SEQ ID NO: 1327951 - RNA, 23 nt, Human
auuauuaacauaccuaagaagua

SEQ ID NO: 1327952 - RNA, 14 nt, Human
auuauuaaguaacu

SEQ ID NO: 1327953 - RNA, 18 nt, Human
auuauuaaguaacuuauu

SEQ ID NO: 1327954 - RNA, 19 nt, Human
auuauuaaguaacuuauuu

SEQ ID NO: 1327955 - RNA, 21 nt, Human
auuauuaaguaacuuauuuau

SEQ ID NO: 1327956 - RNA, 14 nt, Human
auuauuaaugaaaa

SEQ ID NO: 1327957 - RNA, 19 nt, Human
auuaucguuuucuuaaagu

SEQ ID NO: 1327958 - RNA, 20 nt, Human
auuaucguuuucuuaaagug

SEQ ID NO: 1327959 - RNA, 17 nt, Human
auuauauuuacaaaugg

SEQ ID NO: 1327960 - RNA, 23 nt, Human
auuauagugauguaaucuugaau

SEQ ID NO: 1327961 - RNA, 19 nt, Human
auuaucaauuaccacacca

SEQ ID NO: 1327962 - RNA, 12 nt, Human
auuaucagaugc

SEQ ID NO: 1327963 - RNA, 20 nt, Human
auuaucaggcaaauuugcau

SEQ ID NO: 1327964 - RNA, 21 nt, Human
auuaucaggcaaauuugcauu

SEQ ID NO: 1327965 - RNA, 17 nt, Human
auuauccagguaaucca

SEQ ID NO: 1327966 - RNA, 14 nt, Human
auuauccauauuga

SEQ ID NO: 1327967 - RNA, 17 nt, Human
auuauccauauugaguc

SEQ ID NO: 1327968 - RNA, 14 nt, Human
auuaucccagcugc

SEQ ID NO: 1327969 - RNA, 18 nt, Human
auuauuuuauguugcaua

SEQ ID NO: 1327970 - RNA, 16 nt, Human
auuauuuuauguugca

SEQ ID NO: 1327971 - RNA, 12 nt, Human
auuauuuaugua

SEQ ID NO: 1327972 - RNA, 13 nt, Human
auuauuuauguau

SEQ ID NO: 1327973 - RNA, 14 nt, Human
auuauuuauguaug

SEQ ID NO: 1327974 - RNA, 16 nt, Human
auuauuuauguauggu

SEQ ID NO: 1327975 - RNA, 19 nt, Human
auuauuuauguauggugca

SEQ ID NO: 1327976 - RNA, 14 nt, Human
auuauuuauguauu

SEQ ID NO: 1327977 - RNA, 15 nt, Human
auuauuuauguauug

SEQ ID NO: 1327978 - RNA, 15 nt, Human
auuauuuguguuuua

SEQ ID NO: 1327979 - RNA, 22 nt, Human
auuauuuguguuuuaauuuaaa

SEQ ID NO: 1327980 - RNA, 12 nt, Human
auuauuuguguu

SEQ ID NO: 1327981 - RNA, 22 nt, Human
auuauuaaugaaaauaagaauu

SEQ ID NO: 1327982 - RNA, 16 nt, Human
auuauuaauuuaugca

SEQ ID NO: 1327983 - RNA, 15 nt, Human
auuauuacaguguuu

SEQ ID NO: 1327984 - RNA, 13 nt, Human
auuauuacagugu

SEQ ID NO: 1327985 - RNA, 16 nt, Human
auuauuccucaaaaaa

SEQ ID NO: 1327986 - RNA, 16 nt, Human
auuauuuauauaugua

SEQ ID NO: 1327987 - RNA, 13 nt, Human
auuaaguaaugau

SEQ ID NO: 1327988 - RNA, 15 nt, Human
auuaaguaaugauaa

SEQ ID NO: 1327989 - RNA, 21 nt, Human
auuaaguaaugauaacuggaa

SEQ ID NO: 1327990 - RNA, 17 nt, Human
auuaauauauauuaucu

SEQ ID NO: 1327991 - RNA, 18 nt, Human
auuaauaucccuacaugu

SEQ ID NO: 1327992 - RNA, 19 nt, Human
auuaauaucccuacaugua

SEQ ID NO: 1327993 - RNA, 20 nt, Human
auuaauaucccuacauguau

SEQ ID NO: 1327994 - RNA, 16 nt, Human
auuaaucuuaguguau

SEQ ID NO: 1327995 - RNA, 17 nt, Human
auuaaucuuaguguaug

SEQ ID NO: 1327996 - RNA, 19 nt, Human
auuaaucuuaguguaugau

SEQ ID NO: 1327997 - RNA, 20 nt, Human
auuaaucuuaguguaugauu

SEQ ID NO: 1327998 - RNA, 21 nt, Human
auuaaucuuaguguaugauua

SEQ ID NO: 1327999 - RNA, 22 nt, Human
auuaaucuuaguguaugauuac

SEQ ID NO: 1328000 - RNA, 16 nt, Human
auuaaucugccucccu

SEQ ID NO: 1328001 - RNA, 23 nt, Human
uuuuuuaaaaaagaaacauuugg

SEQ ID NO: 1328002 - RNA, 15 nt, Human
auuaaguaacuuauu

SEQ ID NO: 1328003 - RNA, 19 nt, Human
auuaaguaacuuauuuaug

SEQ ID NO: 1328004 - RNA, 20 nt, Human
uuuuuguucugguccuuuuu

SEQ ID NO: 1328005 - RNA, 13 nt, Human
uuuuuguugacau

SEQ ID NO: 1328006 - RNA, 15 nt, Human
uuuuuguuuguuugu

SEQ ID NO: 1328007 - RNA, 12 nt, Human
uuuuuguugaca

SEQ ID NO: 1328008 - RNA, 13 nt, Human
uuuuuuaaaaaag

SEQ ID NO: 1328009 - RNA, 20 nt, Human
auuaagagagucuauuuacg

SEQ ID NO: 1328010 - RNA, 23 nt, Human
auuaagaaugaucugauugaccg

SEQ ID NO: 1328011 - RNA, 15 nt, Human
auuaagaaugaucug

SEQ ID NO: 1328012 - RNA, 14 nt, Human
auuaagaaugaucu

SEQ ID NO: 1328013 - RNA, 21 nt, Human
auuaagauaugggacauuuuu

SEQ ID NO: 1328014 - RNA, 16 nt, Human
auuaagaaugaucuga

SEQ ID NO: 1328015 - RNA, 13 nt, Human
auuacauuuguau

SEQ ID NO: 1328016 - RNA, 11 nt, Human
auuaaugcacu

SEQ ID NO: 1328017 - RNA, 12 nt, Human
auuaaugcacuu

SEQ ID NO: 1328018 - RNA, 17 nt, Human
auuaaugaaaauaagaa

SEQ ID NO: 1328019 - RNA, 19 nt, Human
auuaaugaaaauaagaauu

SEQ ID NO: 1328020 - RNA, 15 nt, Human
auuacauuuguauaa

SEQ ID NO: 1328021 - RNA, 16 nt, Human
auuacauuuguauaaa

SEQ ID NO: 1328022 - RNA, 15 nt, Human
auuacauuuucagug

SEQ ID NO: 1328023 - RNA, 16 nt, Human
auuaccaaccuguuac

SEQ ID NO: 1328024 - RNA, 12 nt, Human
auuaccuccuga

SEQ ID NO: 1328025 - RNA, 13 nt, Human
auuaccuccugag

SEQ ID NO: 1328026 - RNA, 17 nt, Human
auuaccuccugagaaaa

SEQ ID NO: 1328027 - RNA, 12 nt, Human
auuaccagggac

SEQ ID NO: 1328028 - RNA, 14 nt, Human
auuaccaaccuguu

SEQ ID NO: 1328029 - RNA, 14 nt, Human
auuaccuguggaua

SEQ ID NO: 1328030 - RNA, 15 nt, Human
auuaccuguggauau

SEQ ID NO: 1328031 - RNA, 16 nt, Human
auuaccuguggauauu

SEQ ID NO: 1328032 - RNA, 19 nt, Human
auuaccuguggauauuugu

SEQ ID NO: 1328033 - RNA, 19 nt, Human
auuaccuucuauuggucuc

SEQ ID NO: 1328034 - RNA, 16 nt, Human
auuacugaaaacuuca

SEQ ID NO: 1328035 - RNA, 14 nt, Human
auuacugcaugcac

SEQ ID NO: 1328036 - RNA, 17 nt, Human
auuacugcaugcacuuc

SEQ ID NO: 1328037 - RNA, 13 nt, Human
auuacugccauuc

SEQ ID NO: 1328038 - RNA, 20 nt, Human
auuacugccauucacuucau

SEQ ID NO: 1328039 - RNA, 21 nt, Human
auuccauucuggaagugacuu

SEQ ID NO: 1328040 - RNA, 15 nt, Human
auuccaugugcccag

SEQ ID NO: 1328041 - RNA, 16 nt, Human
auuccauugguccaag

SEQ ID NO: 1328042 - RNA, 17 nt, Human
auuccauugguccaaga

SEQ ID NO: 1328043 - RNA, 23 nt, Human
auuccauugguccaagauuccgg

SEQ ID NO: 1328044 - RNA, 13 nt, Human
auuccaugacugc

SEQ ID NO: 1328045 - RNA, 14 nt, Human
auuccaugacugcu

SEQ ID NO: 1328046 - RNA, 20 nt, Human
auuccaugacugcuugcccu

SEQ ID NO: 1328047 - RNA, 17 nt, Human
auuccaugacugcuugc

SEQ ID NO: 1328048 - RNA, 14 nt, Human
auuccaugugccca

SEQ ID NO: 1328049 - RNA, 16 nt, Human
auuccaugugcccagu

SEQ ID NO: 1328050 - RNA, 20 nt, Human
auuccacuuauaggaauuga

SEQ ID NO: 1328051 - RNA, 16 nt, Human
auuccaccugcaauca

SEQ ID NO: 1328052 - RNA, 14 nt, Human
auucaguuuucauu

SEQ ID NO: 1328053 - RNA, 17 nt, Human
auucaguuucauaaaag

SEQ ID NO: 1328054 - RNA, 13 nt, Human
auucaguuuucau

SEQ ID NO: 1328055 - RNA, 15 nt, Human
auucaguuuucauuu

SEQ ID NO: 1328056 - RNA, 19 nt, Human
auucccuucaucuggaacc

SEQ ID NO: 1328057 - RNA, 16 nt, Human
auucccuucaucugga

SEQ ID NO: 1328058 - RNA, 15 nt, Human
auucccuuccugcca

SEQ ID NO: 1328059 - RNA, 23 nt, Human
auucccuuccugccagccccugc

SEQ ID NO: 1328060 - RNA, 19 nt, Human
auucccuuccugccagccc

SEQ ID NO: 1328061 - RNA, 13 nt, Human
auuccggauccua

SEQ ID NO: 1328062 - RNA, 15 nt, Human
auuccggauccuaag

SEQ ID NO: 1328063 - RNA, 16 nt, Human
auuccggauccuaagc

SEQ ID NO: 1328064 - RNA, 19 nt, Human
auuccggauccuaagcauc

SEQ ID NO: 1328065 - RNA, 12 nt, Human
auuccgucacca

SEQ ID NO: 1328066 - RNA, 14 nt, Human
auucagcucaugga

SEQ ID NO: 1328067 - RNA, 23 nt, Human
auuauuuucauccuugucuuauu

SEQ ID NO: 1328068 - RNA, 12 nt, Human
auuauuuucauc

SEQ ID NO: 1328069 - RNA, 16 nt, Human
auucaaaaugauguau

SEQ ID NO: 1328070 - RNA, 20 nt, Human
auucaaaauaggguauauuu

SEQ ID NO: 1328071 - RNA, 21 nt, Human
auucaaaaguuccaagagucu

SEQ ID NO: 1328072 - RNA, 18 nt, Human
auucaaaauaggguauau

SEQ ID NO: 1328073 - RNA, 19 nt, Human
auucaggacugcugguuug

SEQ ID NO: 1328074 - RNA, 13 nt, Human
auucaguuucaua

SEQ ID NO: 1328075 - RNA, 14 nt, Human
auucaguuucauaa

SEQ ID NO: 1328076 - RNA, 22 nt, Human
auugaccuauuuccagaaauac

SEQ ID NO: 1328077 - RNA, 12 nt, Human
auugcaaaucuu

SEQ ID NO: 1328078 - RNA, 16 nt, Human
auugcaaaucuugaaa

SEQ ID NO: 1328079 - RNA, 17 nt, Human
auugcaaaucuugaaau

SEQ ID NO: 1328080 - RNA, 19 nt, Human
auugcaaaucuugaaauua

SEQ ID NO: 1328081 - RNA, 21 nt, Human
auugaccguguuggucuguac

SEQ ID NO: 1328082 - RNA, 23 nt, Human
auugaccgcgacuaauuucaaaa

SEQ ID NO: 1328083 - RNA, 17 nt, Human
auugaccgcgacuaauu

SEQ ID NO: 1328084 - RNA, 20 nt, Human
auugaccgcgacuaauuuca

SEQ ID NO: 1328085 - RNA, 14 nt, Human
auugcaauaucuga

SEQ ID NO: 1328086 - RNA, 16 nt, Human
auugcaauaucugaag

SEQ ID NO: 1328087 - RNA, 17 nt, Human
auugcaauaucugaagc

SEQ ID NO: 1328088 - RNA, 16 nt, Human
auucucagaaaggcaa

SEQ ID NO: 1328089 - RNA, 14 nt, Human
auugcaggauggug

SEQ ID NO: 1328090 - RNA, 17 nt, Human
auugcaggauggugucu

SEQ ID NO: 1328091 - RNA, 18 nt, Human
auugcagaaaauucugug

SEQ ID NO: 1328092 - RNA, 17 nt, Human
auugcagaaaauucugu

SEQ ID NO: 1328093 - RNA, 14 nt, Human
auugccaagggcuu

SEQ ID NO: 1328094 - RNA, 12 nt, Human
auugccaccucu

SEQ ID NO: 1328095 - RNA, 21 nt, Human
auugccaccucuaacagcacc

SEQ ID NO: 1328096 - RNA, 22 nt, Human
auugccaccucuaacagcacca

SEQ ID NO: 1328097 - RNA, 17 nt, Human
auugcauuuccugacag

SEQ ID NO: 1328098 - RNA, 23 nt, Human
auugcaguuuaucauucaagugu

SEQ ID NO: 1328099 - RNA, 14 nt, Human
auugcaguuuauca

SEQ ID NO: 1328100 - RNA, 17 nt, Human
auugcaguuuaucauuc

SEQ ID NO: 1328101 - RNA, 18 nt, Human
auugcaguuuaucauuca

SEQ ID NO: 1328102 - RNA, 19 nt, Human
auugcaguuuaucauucaa

SEQ ID NO: 1328103 - RNA, 20 nt, Human
auugccaaaaagugaaauaa

SEQ ID NO: 1328104 - RNA, 20 nt, Human
auugccuaagaauaaacauu

SEQ ID NO: 1328105 - RNA, 21 nt, Human
auugccuaagaauaaacauuu

SEQ ID NO: 1328106 - RNA, 15 nt, Human
auugccucacuucag

SEQ ID NO: 1328107 - RNA, 14 nt, Human
auugccucugagag

SEQ ID NO: 1328108 - RNA, 19 nt, Human
auucucacagcuccaagaa

SEQ ID NO: 1328109 - RNA, 22 nt, Human
auucuagaucagaugcuccaag

SEQ ID NO: 1328110 - RNA, 23 nt, Human
auucuagaucagaugcuccaaga

SEQ ID NO: 1328111 - RNA, 21 nt, Human
auucucacagcuccaagaauu

SEQ ID NO: 1328112 - RNA, 22 nt, Human
auucucacagcuccaagaauuu

SEQ ID NO: 1328113 - RNA, 16 nt, Human
auuuaaccucuaaauu

SEQ ID NO: 1328114 - RNA, 18 nt, Human
auuuaaccccccuguaca

SEQ ID NO: 1328115 - RNA, 19 nt, Human
auuuaaccccccuguacac

SEQ ID NO: 1328116 - RNA, 20 nt, Human
auuuaaccccccuguacaca

SEQ ID NO: 1328117 - RNA, 21 nt, Human
auuuaaccccccuguacacaa

SEQ ID NO: 1328118 - RNA, 18 nt, Human
auuuaaccucuaaauucu

SEQ ID NO: 1328119 - RNA, 13 nt, Human
auuuaacucucuu

SEQ ID NO: 1328120 - RNA, 16 nt, Human
auuuaaccccccugua

SEQ ID NO: 1328121 - RNA, 23 nt, Human
auuuaaccccccuguacacaacu

SEQ ID NO: 1328122 - RNA, 13 nt, Human
auuuaacugacua

SEQ ID NO: 1328123 - RNA, 11 nt, Human
auuuaacuucu

SEQ ID NO: 1328124 - RNA, 12 nt, Human
auuuaacuucug

SEQ ID NO: 1328125 - RNA, 16 nt, Human
auuuacaaaugggaaa

SEQ ID NO: 1328126 - RNA, 19 nt, Human
auuuacaaaaauauaaaau

SEQ ID NO: 1328127 - RNA, 20 nt, Human
auuuacaaaaauauaaaaua

SEQ ID NO: 1328128 - RNA, 23 nt, Human
auuuacaaaaauauaaaauauga

SEQ ID NO: 1328129 - RNA, 15 nt, Human
auuuacaaacugaag

SEQ ID NO: 1328130 - RNA, 14 nt, Human
auuuacaaacugaa

SEQ ID NO: 1328131 - RNA, 19 nt, Human
auuuacccaacucuguaca

SEQ ID NO: 1328132 - RNA, 14 nt, Human
auuuaccuaagauu

SEQ ID NO: 1328133 - RNA, 15 nt, Human
auuuaccuaagauua

SEQ ID NO: 1328134 - RNA, 17 nt, Human
auuuaccuaagauuaca

SEQ ID NO: 1328135 - RNA, 18 nt, Human
auuuaccuaagauuacaa

SEQ ID NO: 1328136 - RNA, 11 nt, Human
auuuaccucag

SEQ ID NO: 1328137 - RNA, 12 nt, Human
auuuaccucagc

SEQ ID NO: 1328138 - RNA, 13 nt, Human
auuuaccucagcc

SEQ ID NO: 1328139 - RNA, 14 nt, Human
auuuaccucagccu

SEQ ID NO: 1328140 - RNA, 14 nt, Human
auuuaacagaaauu

SEQ ID NO: 1328141 - RNA, 16 nt, Human
auuuaacagaaauugu

SEQ ID NO: 1328142 - RNA, 17 nt, Human
auuuaacagaaauugua

SEQ ID NO: 1328143 - RNA, 18 nt, Human
auuuaacagaaauuguau

SEQ ID NO: 1328144 - RNA, 20 nt, Human
auuuaacagaaauuguauau

SEQ ID NO: 1328145 - RNA, 22 nt, Human
auuuaacagaaauuguauauug

SEQ ID NO: 1328146 - RNA, 22 nt, Human
auuuaaaguuguuugugccuuu

SEQ ID NO: 1328147 - RNA, 14 nt, Human
auuuaaaguuguuu

SEQ ID NO: 1328148 - RNA, 13 nt, Human
auuuaaaacauua

SEQ ID NO: 1328149 - RNA, 19 nt, Human
auuuaaaacauuaaaauau

SEQ ID NO: 1328150 - RNA, 20 nt, Human
auuuaaaacauuaaaauaua

SEQ ID NO: 1328151 - RNA, 21 nt, Human
auuuaaaacauuaaaauauaa

SEQ ID NO: 1328152 - RNA, 13 nt, Human
auuuaaaacuguu

SEQ ID NO: 1328153 - RNA, 11 nt, Human
auuuaaaacuu

SEQ ID NO: 1328154 - RNA, 18 nt, Human
auuuaaacagauguccau

SEQ ID NO: 1328155 - RNA, 12 nt, Human
auuuaaacagau

SEQ ID NO: 1328156 - RNA, 11 nt, Human
auuuaaacaga

SEQ ID NO: 1328157 - RNA, 11 nt, Human
auuuaaagcag

SEQ ID NO: 1328158 - RNA, 12 nt, Human
auuuaaagcagg

SEQ ID NO: 1328159 - RNA, 15 nt, Human
auuuaaagcagguuc

SEQ ID NO: 1328160 - RNA, 16 nt, Human
auuuaaagcagguucu

SEQ ID NO: 1328161 - RNA, 19 nt, Human
auuuaaagcagguucuugu

SEQ ID NO: 1328162 - RNA, 20 nt, Human
auuuaaagcagguucuuguu

SEQ ID NO: 1328163 - RNA, 15 nt, Human
auuuaaagccuccuc

SEQ ID NO: 1328164 - RNA, 18 nt, Human
auugugccaugucaaaca

SEQ ID NO: 1328165 - RNA, 13 nt, Human
auugugcuagugc

SEQ ID NO: 1328166 - RNA, 21 nt, Human
auugugccaugucaaacaaau

SEQ ID NO: 1328167 - RNA, 22 nt, Human
auugugccaugucaaacaaaua

SEQ ID NO: 1328168 - RNA, 22 nt, Human
auuguuucaauugcaucuccca

SEQ ID NO: 1328169 - RNA, 15 nt, Human
auuuaaaacagacac

SEQ ID NO: 1328170 - RNA, 16 nt, Human
auuuaaaacagacacu

SEQ ID NO: 1328171 - RNA, 17 nt, Human
auuuaaaacagacacug

SEQ ID NO: 1328172 - RNA, 18 nt, Human
auuuaaaacagacacugg

SEQ ID NO: 1328173 - RNA, 23 nt, Human
auuuaaaacagacacuggcaugg

SEQ ID NO: 1328174 - RNA, 15 nt, Human
auuguauuacaaauc

SEQ ID NO: 1328175 - RNA, 23 nt, Human
auugucugaaaagugaagacaga

SEQ ID NO: 1328176 - RNA, 16 nt, Human
auugucugaacuugca

SEQ ID NO: 1328177 - RNA, 18 nt, Human
auugucugaacuugcauu

SEQ ID NO: 1328178 - RNA, 14 nt, Human
auuguauuacaaau

SEQ ID NO: 1328179 - RNA, 15 nt, Human
auugugaaauuauuc

SEQ ID NO: 1328180 - RNA, 13 nt, Human
auugugccccugc

SEQ ID NO: 1328181 - RNA, 16 nt, Human
auugucuuaauauugu

SEQ ID NO: 1328182 - RNA, 15 nt, Human
auugucugugaagug

SEQ ID NO: 1328183 - RNA, 20 nt, Human
auuguauauuacaaugauca

SEQ ID NO: 1328184 - RNA, 19 nt, Human
auuguauauuacaaugauc

SEQ ID NO: 1328185 - RNA, 18 nt, Human
auuguauauuacaaugau

SEQ ID NO: 1328186 - RNA, 17 nt, Human
auuguauauuacaauga

SEQ ID NO: 1328187 - RNA, 13 nt, Human
auuguauauugua

SEQ ID NO: 1328188 - RNA, 15 nt, Human
auuguauauuacaau

SEQ ID NO: 1328189 - RNA, 17 nt, Human
auuguauauuguguuug

SEQ ID NO: 1328190 - RNA, 15 nt, Human
auuguauauuguaau

SEQ ID NO: 1328191 - RNA, 17 nt, Human
auuguauauuguaauuu

SEQ ID NO: 1328192 - RNA, 17 nt, Human
auuguaugaaguuugaa

SEQ ID NO: 1328193 - RNA, 15 nt, Human
auuguauguggucau

SEQ ID NO: 1328194 - RNA, 13 nt, Human
auugccucugaga

SEQ ID NO: 1328195 - RNA, 21 nt, Human
auugcgagagauguguguuga

SEQ ID NO: 1328196 - RNA, 20 nt, Human
auugcguuugaccuuuuaug

SEQ ID NO: 1328197 - RNA, 21 nt, Human
auugcguuugaccuuuuaugu

SEQ ID NO: 1328198 - RNA, 20 nt, Human
auugcgagagauguguguug

SEQ ID NO: 1328199 - RNA, 23 nt, Human
auuuccugggagcuuuuguagaa

SEQ ID NO: 1328200 - RNA, 22 nt, Human
auuuccugggagcuuuuguaga

SEQ ID NO: 1328201 - RNA, 14 nt, Human
auuuccuugaaugu

SEQ ID NO: 1328202 - RNA, 23 nt, Human
auuuaggaaguugacuuauagua

SEQ ID NO: 1328203 - RNA, 16 nt, Human
auuuaggaaguugacu

SEQ ID NO: 1328204 - RNA, 23 nt, Human
auuuagcuaaacggauuccaaag

SEQ ID NO: 1328205 - RNA, 14 nt, Human
auuuaggagaagcc

SEQ ID NO: 1328206 - RNA, 17 nt, Human
auuuaggagaagccagg

SEQ ID NO: 1328207 - RNA, 14 nt, Human
auuuagguuucuga

SEQ ID NO: 1328208 - RNA, 17 nt, Human
auuuagguuucugaguu

SEQ ID NO: 1328209 - RNA, 21 nt, Human
auuuagguuucugaguuccug

SEQ ID NO: 1328210 - RNA, 19 nt, Human
auuuacgcuuugauucaua

SEQ ID NO: 1328211 - RNA, 15 nt, Human
auuuagcauguuguu

SEQ ID NO: 1328212 - RNA, 16 nt, Human
auuuaccucagccugg

SEQ ID NO: 1328213 - RNA, 15 nt, Human
auuuaccucagccug

SEQ ID NO: 1328214 - RNA, 15 nt, Human
auuuacgcuuugauu

SEQ ID NO: 1328215 - RNA, 17 nt, Human
auuuacgcuuugauuca

SEQ ID NO: 1328216 - RNA, 13 nt, Human
auuuagcauugua

SEQ ID NO: 1328217 - RNA, 19 nt, Human
auuuagcauuguagugcuu

SEQ ID NO: 1328218 - RNA, 22 nt, Human
auuuagcauuguagugcuuuga

SEQ ID NO: 1328219 - RNA, 20 nt, Human
auuuagcauuguagugcuuu

SEQ ID NO: 1328220 - RNA, 14 nt, Human
auuuagccuguccu

SEQ ID NO: 1328221 - RNA, 15 nt, Human
auuuagccuguccug

SEQ ID NO: 1328222 - RNA, 16 nt, Human
auuuagccuguccugu

SEQ ID NO: 1328223 - RNA, 22 nt, Human
auuuagccuguccugucaucau

SEQ ID NO: 1328224 - RNA, 21 nt, Human
auuuagcuaaacggauuccaa

SEQ ID NO: 1328225 - RNA, 22 nt, Human
auuuagcuaaacggauuccaaa

SEQ ID NO: 1328226 - RNA, 22 nt, Human
auuuauuacuguaagaaaauau

SEQ ID NO: 1328227 - RNA, 22 nt, Human
auuuauuaaagaaaaaaaugua

SEQ ID NO: 1328228 - RNA, 23 nt, Human
auuuagguuucugaguuccugca

SEQ ID NO: 1328229 - RNA, 23 nt, Human
auuuagguuuuuguuuguuuccu

SEQ ID NO: 1328230 - RNA, 14 nt, Human
auuuaguaaaccaa

SEQ ID NO: 1328231 - RNA, 19 nt, Human
auuuaguaauagccugggu

SEQ ID NO: 1328232 - RNA, 12 nt, Human
auuuauuaaaga

SEQ ID NO: 1328233 - RNA, 13 nt, Human
auuuauuaaagaa

SEQ ID NO: 1328234 - RNA, 14 nt, Human
auuuauuaaagaaa

SEQ ID NO: 1328235 - RNA, 15 nt, Human
auuuauuaaagaaaa

SEQ ID NO: 1328236 - RNA, 16 nt, Human
auuuauuaaagaaaaa

SEQ ID NO: 1328237 - RNA, 17 nt, Human
auuuauuaaagaaaaaa

SEQ ID NO: 1328238 - RNA, 18 nt, Human
auuuauuaaagaaaaaaa

SEQ ID NO: 1328239 - RNA, 20 nt, Human
auuuauuaaagaaaaaaaug

SEQ ID NO: 1328240 - RNA, 23 nt, Human
auuuauuaaagaaaaaaauguau

SEQ ID NO: 1328241 - RNA, 16 nt, Human
auuuggaaccuuguuu

SEQ ID NO: 1328242 - RNA, 14 nt, Human
auuugagugcucug

SEQ ID NO: 1328243 - RNA, 16 nt, Human
auuugagugcucugau

SEQ ID NO: 1328244 - RNA, 22 nt, Human
auuugaggacaaccauuccaga

SEQ ID NO: 1328245 - RNA, 17 nt, Human
auuugaaugauuuuucu

SEQ ID NO: 1328246 - RNA, 20 nt, Human
auuugaaugauuuuucuuua

SEQ ID NO: 1328247 - RNA, 22 nt, Human
auuugaaugauuuuucuuuaca

SEQ ID NO: 1328248 - RNA, 18 nt, Human
auuucuaauguuggacac

SEQ ID NO: 1328249 - RNA, 14 nt, Human
auuucuaauuaugu

SEQ ID NO: 1328250 - RNA, 19 nt, Human
auuucuaauuauguagcuc

SEQ ID NO: 1328251 - RNA, 15 nt, Human
auuucuaauuaugua

SEQ ID NO: 1328252 - RNA, 18 nt, Human
auuuguaguguuggagaa

SEQ ID NO: 1328253 - RNA, 20 nt, Human
auuuguacuauuuaacugac

SEQ ID NO: 1328254 - RNA, 22 nt, Human
auuuguacuauuuaacugacua

SEQ ID NO: 1328255 - RNA, 15 nt, Human
auuuguaaaaugaca

SEQ ID NO: 1328256 - RNA, 16 nt, Human
auuuguaaaaugacaa

SEQ ID NO: 1328257 - RNA, 22 nt, Human
auuuguaaaaugacaaucaugu

SEQ ID NO: 1328258 - RNA, 19 nt, Human
auuuguaaaaugacaauca

SEQ ID NO: 1328259 - RNA, 23 nt, Human
auuuguacugaaaaaugguaauu

SEQ ID NO: 1328260 - RNA, 21 nt, Human
auuugguuuucacauuggaaa

SEQ ID NO: 1328261 - RNA, 22 nt, Human
auuugguuuucacauuggaaac

SEQ ID NO: 1328262 - RNA, 17 nt, Human
auuugguuuucacauug

SEQ ID NO: 1328263 - RNA, 23 nt, Human
auuugguaaggggaauugaggac

SEQ ID NO: 1328264 - RNA, 14 nt, Human
auuuggguccagga

SEQ ID NO: 1328265 - RNA, 15 nt, Human
auuuggguccaggag

SEQ ID NO: 1328266 - RNA, 16 nt, Human
auuuggguccaggagg

SEQ ID NO: 1328267 - RNA, 17 nt, Human
auuuggguccaggagga

SEQ ID NO: 1328268 - RNA, 14 nt, Human
auuugggugggagu

SEQ ID NO: 1328269 - RNA, 17 nt, Human
auuuggguucugccugc

SEQ ID NO: 1328270 - RNA, 17 nt, Human
auuuggaaccuuguuuu

SEQ ID NO: 1328271 - RNA, 13 nt, Human
auuuggaauacuu

SEQ ID NO: 1328272 - RNA, 14 nt, Human
auuuggaauacuuu

SEQ ID NO: 1328273 - RNA, 15 nt, Human
auuuggaauacuuuu

SEQ ID NO: 1328274 - RNA, 15 nt, Human
auuuggggcuuccaa

SEQ ID NO: 1328275 - RNA, 19 nt, Human
auuuguaguguuggagaag

SEQ ID NO: 1328276 - RNA, 16 nt, Human
auuuguaggguuucua

SEQ ID NO: 1328277 - RNA, 16 nt, Human
auuuguauaugguauu

SEQ ID NO: 1328278 - RNA, 14 nt, Human
auuuuaauaauguu

SEQ ID NO: 1328279 - RNA, 15 nt, Human
auuuuaauaauguuu

SEQ ID NO: 1328280 - RNA, 16 nt, Human
auuuuaauaauguuuc

SEQ ID NO: 1328281 - RNA, 22 nt, Human
auuuuacuguacagacagaaaa

SEQ ID NO: 1328282 - RNA, 20 nt, Human
auuuuacuguacagacagaa

SEQ ID NO: 1328283 - RNA, 13 nt, Human
auuuuacauaaau

SEQ ID NO: 1328284 - RNA, 12 nt, Human
auuuuacaauuu

SEQ ID NO: 1328285 - RNA, 21 nt, Human
auuuuacacgcuuuugugaug

SEQ ID NO: 1328286 - RNA, 16 nt, Human
auuuuauuaugaagaa

SEQ ID NO: 1328287 - RNA, 22 nt, Human
auuuuauuaugaagaaggugaa

SEQ ID NO: 1328288 - RNA, 23 nt, Human
auuuuauuaugaagaaggugaau

SEQ ID NO: 1328289 - RNA, 22 nt, Human
auuuuauuuaccccuccccuau

SEQ ID NO: 1328290 - RNA, 14 nt, Human
auuuuauuaugaag

SEQ ID NO: 1328291 - RNA, 15 nt, Human
auuuuauuaugaaga

SEQ ID NO: 1328292 - RNA, 12 nt, Human
auuuuauuauga

SEQ ID NO: 1328293 - RNA, 21 nt, Human
auuuuauguugcauagaauaa

SEQ ID NO: 1328294 - RNA, 18 nt, Human
auuuuauguugcauagaa

SEQ ID NO: 1328295 - RNA, 18 nt, Human
aucuguaaugguacugac

SEQ ID NO: 1328296 - RNA, 19 nt, Human
aucugguagaagggaaagc

SEQ ID NO: 1328297 - RNA, 13 nt, Human
aucuguaaacugu

SEQ ID NO: 1328298 - RNA, 14 nt, Human
aucuguaaacugug

SEQ ID NO: 1328299 - RNA, 17 nt, Human
aucuguaaacuguguau

SEQ ID NO: 1328300 - RNA, 22 nt, Human
aucuguaaacuguguauuccaa

SEQ ID NO: 1328301 - RNA, 15 nt, Human
aucuguaaaucuaca

SEQ ID NO: 1328302 - RNA, 16 nt, Human
aucuguaaaucuacac

SEQ ID NO: 1328303 - RNA, 23 nt, Human
aucugguagaagggaaagcccau

SEQ ID NO: 1328304 - RNA, 15 nt, Human
aucuuagauucucug

SEQ ID NO: 1328305 - RNA, 18 nt, Human
aucuuagauucucugugu

SEQ ID NO: 1328306 - RNA, 20 nt, Human
aucuuagauucucugugucu

SEQ ID NO: 1328307 - RNA, 22 nt, Human
aucuuagauucucugugucuaa

SEQ ID NO: 1328308 - RNA, 23 nt, Human
aucuuagauucucugugucuaag

SEQ ID NO: 1328309 - RNA, 16 nt, Human
aucuugacucacugca

SEQ ID NO: 1328310 - RNA, 17 nt, Human
aucuugacuacagucag

SEQ ID NO: 1328311 - RNA, 14 nt, Human
aucuugcuucccua

SEQ ID NO: 1328312 - RNA, 15 nt, Human
aucuugcuucccuaa

SEQ ID NO: 1328313 - RNA, 16 nt, Human
aucuuacuauuucaca

SEQ ID NO: 1328314 - RNA, 13 nt, Human
aucuuagauucuc

SEQ ID NO: 1328315 - RNA, 15 nt, Human
aucugugucuuguuu

SEQ ID NO: 1328316 - RNA, 20 nt, Human
aucugugugaaacuuucauu

SEQ ID NO: 1328317 - RNA, 15 nt, Human
aucugugugaaacuu

SEQ ID NO: 1328318 - RNA, 16 nt, Human
aucugagucagagcca

SEQ ID NO: 1328319 - RNA, 13 nt, Human
aucugaguccugg

SEQ ID NO: 1328320 - RNA, 23 nt, Human
uugccucaaauaaaaagugcuuu

SEQ ID NO: 1328321 - RNA, 18 nt, Human
aucugaugcaagcaagaa

SEQ ID NO: 1328322 - RNA, 18 nt, Human
aucugaucagaacaaaug

SEQ ID NO: 1328323 - RNA, 19 nt, Human
aucugaucagaacaaaugu

SEQ ID NO: 1328324 - RNA, 17 nt, Human
aucugaguccuggauga

SEQ ID NO: 1328325 - RNA, 14 nt, Human
aucugaguccugga

SEQ ID NO: 1328326 - RNA, 12 nt, Human
aucugauagggu

SEQ ID NO: 1328327 - RNA, 22 nt, Human
aucugauaggguuugugacagg

SEQ ID NO: 1328328 - RNA, 17 nt, Human
aucugauugugauguga

SEQ ID NO: 1328329 - RNA, 21 nt, Human
aucugauuuguaacccacuga

SEQ ID NO: 1328330 - RNA, 21 nt, Human
aucugcaauucaaaaguucca

SEQ ID NO: 1328331 - RNA, 20 nt, Human
aucugcagggggugugucug

SEQ ID NO: 1328332 - RNA, 19 nt, Human
uugccuaagaauaaacauu

SEQ ID NO: 1328333 - RNA, 22 nt, Human
uugccuaagaauaaacauuugu

SEQ ID NO: 1328334 - RNA, 23 nt, Human
uugccuaagaauaaacauuuguu

SEQ ID NO: 1328335 - RNA, 13 nt, Human
uugcauuaaauua

SEQ ID NO: 1328336 - RNA, 15 nt, Human
uugcauuaaauuaca

SEQ ID NO: 1328337 - RNA, 13 nt, Human
uugcauuaaauuc

SEQ ID NO: 1328338 - RNA, 20 nt, Human
uugcauuaaauucacaaacu

SEQ ID NO: 1328339 - RNA, 21 nt, Human
uugcauuaaauucacaaacuu

SEQ ID NO: 1328340 - RNA, 22 nt, Human
uugcauuaaauucacaaacuuu

SEQ ID NO: 1328341 - RNA, 14 nt, Human
uugcauuaugcaau

SEQ ID NO: 1328342 - RNA, 13 nt, Human
uugcauuaugcaa

SEQ ID NO: 1328343 - RNA, 18 nt, Human
uugcccugcugcccuccc

SEQ ID NO: 1328344 - RNA, 16 nt, Human
uugcccugcugcccuc

SEQ ID NO: 1328345 - RNA, 21 nt, Human
aucucauuuccaagcaaguau

SEQ ID NO: 1328346 - RNA, 20 nt, Human
aucucagugaagaauacuuc

SEQ ID NO: 1328347 - RNA, 14 nt, Human
aucucagugaagaa

SEQ ID NO: 1328348 - RNA, 15 nt, Human
aucucagugaagaau

SEQ ID NO: 1328349 - RNA, 17 nt, Human
aucucagugaagaauac

SEQ ID NO: 1328350 - RNA, 19 nt, Human
aucucaguugauuuucugg

SEQ ID NO: 1328351 - RNA, 21 nt, Human
aucucaguugauuuucuggau

SEQ ID NO: 1328352 - RNA, 23 nt, Human
aucucauuuccaagcaaguauua

SEQ ID NO: 1328353 - RNA, 20 nt, Human
aucucaucucagugaagaau

SEQ ID NO: 1328354 - RNA, 19 nt, Human
aucucaucucagugaagaa

SEQ ID NO: 1328355 - RNA, 21 nt, Human
aucucauuuuuccguaaaaau

SEQ ID NO: 1328356 - RNA, 16 nt, Human
aucuccagcggcccug

SEQ ID NO: 1328357 - RNA, 23 nt, Human
aucucauuuuuccguaaaaauga

SEQ ID NO: 1328358 - RNA, 16 nt, Human
aucuccccaucauugg

SEQ ID NO: 1328359 - RNA, 20 nt, Human
aucucccaccuagcagcacc

SEQ ID NO: 1328360 - RNA, 19 nt, Human
aucucccagauaaugugaa

SEQ ID NO: 1328361 - RNA, 20 nt, Human
aucucccagauaaugugaaa

SEQ ID NO: 1328362 - RNA, 17 nt, Human
aucucccauuuuggaau

SEQ ID NO: 1328363 - RNA, 18 nt, Human
aucucccauuuuggaauu

SEQ ID NO: 1328364 - RNA, 22 nt, Human
aucuccauugugccuaagucca

SEQ ID NO: 1328365 - RNA, 18 nt, Human
aucucccaccuagcagca

SEQ ID NO: 1328366 - RNA, 19 nt, Human
aucucccaccuagcagcac

SEQ ID NO: 1328367 - RNA, 19 nt, Human
aucucccauuuuggaauuu

SEQ ID NO: 1328368 - RNA, 16 nt, Human
aucucaauucuucccu

SEQ ID NO: 1328369 - RNA, 14 nt, Human
aucucaauucuucc

SEQ ID NO: 1328370 - RNA, 13 nt, Human
aucucaauauuuc

SEQ ID NO: 1328371 - RNA, 16 nt, Human
auccuaucucuccaac

SEQ ID NO: 1328372 - RNA, 21 nt, Human
auccuaucucuccaaccagau

SEQ ID NO: 1328373 - RNA, 13 nt, Human
auccuaugcaugg

SEQ ID NO: 1328374 - RNA, 17 nt, Human
auccuaugcaugguuuc

SEQ ID NO: 1328375 - RNA, 21 nt, Human
auccuaugcaugguuucagca

SEQ ID NO: 1328376 - RNA, 22 nt, Human
auccuaugcaugguuucagcac

SEQ ID NO: 1328377 - RNA, 23 nt, Human
auccuaugcaugguuucagcacu

SEQ ID NO: 1328378 - RNA, 15 nt, Human
aucucagcucacuac

SEQ ID NO: 1328379 - RNA, 13 nt, Human
aucucagcucacu

SEQ ID NO: 1328380 - RNA, 11 nt, Human
aucucagcuca

SEQ ID NO: 1328381 - RNA, 14 nt, Human
aucucagcucacug

SEQ ID NO: 1328382 - RNA, 16 nt, Human
aucucagcucaucuuc

SEQ ID NO: 1328383 - RNA, 12 nt, Human
aucucagcucau

SEQ ID NO: 1328384 - RNA, 18 nt, Human
aucucaggccagagccaa

SEQ ID NO: 1328385 - RNA, 14 nt, Human
aucucaggccagag

SEQ ID NO: 1328386 - RNA, 17 nt, Human
aucucaggccagagcca

SEQ ID NO: 1328387 - RNA, 12 nt, Human
aucucagaaagu

SEQ ID NO: 1328388 - RNA, 15 nt, Human
aucucagaaagugcc

SEQ ID NO: 1328389 - RNA, 16 nt, Human
aucucagaaagugccu

SEQ ID NO: 1328390 - RNA, 17 nt, Human
aucucagaaagugccug

SEQ ID NO: 1328391 - RNA, 11 nt, Human
aucucagccca

SEQ ID NO: 1328392 - RNA, 20 nt, Human
aucucagaucaguguaccau

SEQ ID NO: 1328393 - RNA, 18 nt, Human
aucucagaaagugccuga

SEQ ID NO: 1328394 - RNA, 19 nt, Human
aucucagaaagugccugac

SEQ ID NO: 1328395 - RNA, 20 nt, Human
aucucagaaagugccugaca

SEQ ID NO: 1328396 - RNA, 14 nt, Human
uugcaucugaaaau

SEQ ID NO: 1328397 - RNA, 23 nt, Human
uugcaucccaaaccacgccucuu

SEQ ID NO: 1328398 - RNA, 20 nt, Human
uugcaucucccagauaaugu

SEQ ID NO: 1328399 - RNA, 16 nt, Human
uugcacauguuuccuc

SEQ ID NO: 1328400 - RNA, 15 nt, Human
uugcauguggaucaa

SEQ ID NO: 1328401 - RNA, 19 nt, Human
uugcacagcaucucagcuc

SEQ ID NO: 1328402 - RNA, 18 nt, Human
uugcacagccaaauuuaa

SEQ ID NO: 1328403 - RNA, 16 nt, Human
uugcacagcuaugaag

SEQ ID NO: 1328404 - RNA, 21 nt, Human
uugcacagucacugcucuuca

SEQ ID NO: 1328405 - RNA, 19 nt, Human
uugcacagccaaauuuaaa

SEQ ID NO: 1328406 - RNA, 18 nt, Human
uugcacagcaucucagcu

SEQ ID NO: 1328407 - RNA, 15 nt, Human
uugcacagcaucuca

SEQ ID NO: 1328408 - RNA, 20 nt, Human
uugcacacuuugguaccaga

SEQ ID NO: 1328409 - RNA, 14 nt, Human
uugcacacuuuggu

SEQ ID NO: 1328410 - RNA, 21 nt, Human
aucucuucagucucuauacca

SEQ ID NO: 1328411 - RNA, 13 nt, Human
aucucuucagucu

SEQ ID NO: 1328412 - RNA, 12 nt, Human
aucucuucaguc

SEQ ID NO: 1328413 - RNA, 12 nt, Human
uugaugccuggc

SEQ ID NO: 1328414 - RNA, 19 nt, Human
aucucuucuggguuccuuc

SEQ ID NO: 1328415 - RNA, 15 nt, Human
uugaugggauuuggu

SEQ ID NO: 1328416 - RNA, 22 nt, Human
uugaugccaaaaaaaaauacau

SEQ ID NO: 1328417 - RNA, 14 nt, Human
uugaugccaaaaaa

SEQ ID NO: 1328418 - RNA, 18 nt, Human
uugauggugguauguuuu

SEQ ID NO: 1328419 - RNA, 20 nt, Human
uugauggcuaacuuacaaag

SEQ ID NO: 1328420 - RNA, 17 nt, Human
uugaugggauucuggac

SEQ ID NO: 1328421 - RNA, 19 nt, Human
uugauggugguauguuuuc

SEQ ID NO: 1328422 - RNA, 23 nt, Human
uugauggugaugaaauguaaaua

SEQ ID NO: 1328423 - RNA, 13 nt, Human
uugauguaaaauc

SEQ ID NO: 1328424 - RNA, 15 nt, Human
uugauguaaaaucuu

SEQ ID NO: 1328425 - RNA, 16 nt, Human
uugauguaaaaucuug

SEQ ID NO: 1328426 - RNA, 18 nt, Human
uugauguaaaaucuuguc

SEQ ID NO: 1328427 - RNA, 21 nt, Human
uugauguaaaaucuugucaug

SEQ ID NO: 1328428 - RNA, 14 nt, Human
uugauguaaagaug

SEQ ID NO: 1328429 - RNA, 23 nt, Human
uugauguaaagauguucuggaua

SEQ ID NO: 1328430 - RNA, 20 nt, Human
uugauguaaggaugggcaug

SEQ ID NO: 1328431 - RNA, 21 nt, Human
uugauguggugaaaagcaggu

SEQ ID NO: 1328432 - RNA, 16 nt, Human
augaagauacugaaau

SEQ ID NO: 1328433 - RNA, 17 nt, Human
augaagauacugaaaua

SEQ ID NO: 1328434 - RNA, 22 nt, Human
augaacuuagauuuuacaugaa

SEQ ID NO: 1328435 - RNA, 22 nt, Human
augaagauauuuuuccauuuuu

SEQ ID NO: 1328436 - RNA, 22 nt, Human
augaagaucuaaauaaaaugcu

SEQ ID NO: 1328437 - RNA, 18 nt, Human
augaagauguagaggaga

SEQ ID NO: 1328438 - RNA, 15 nt, Human
augaaugcuuaaaga

SEQ ID NO: 1328439 - RNA, 12 nt, Human
augaaugcuuaa

SEQ ID NO: 1328440 - RNA, 14 nt, Human
augaaugugaagcc

SEQ ID NO: 1328441 - RNA, 16 nt, Human
augaaugagaaucuac

SEQ ID NO: 1328442 - RNA, 17 nt, Human
augaaauauuauguuaa

SEQ ID NO: 1328443 - RNA, 18 nt, Human
augaaauauuauguuaaa

SEQ ID NO: 1328444 - RNA, 20 nt, Human
augaaauauuauguuaaaac

SEQ ID NO: 1328445 - RNA, 14 nt, Human
augaacucaacuuu

SEQ ID NO: 1328446 - RNA, 16 nt, Human
augaacucuuaaucaa

SEQ ID NO: 1328447 - RNA, 12 nt, Human
augaacuuagau

SEQ ID NO: 1328448 - RNA, 19 nt, Human
augaacuuagauuuuacau

SEQ ID NO: 1328449 - RNA, 20 nt, Human
augaacuuagauuuuacaug

SEQ ID NO: 1328450 - RNA, 15 nt, Human
augaagauacugaaa

SEQ ID NO: 1328451 - RNA, 16 nt, Human
uugggccugcuccaga

SEQ ID NO: 1328452 - RNA, 17 nt, Human
uugggccugcuccagac

SEQ ID NO: 1328453 - RNA, 20 nt, Human
uugggccugcuccagaccug

SEQ ID NO: 1328454 - RNA, 18 nt, Human
uugggccccagaggcugg

SEQ ID NO: 1328455 - RNA, 22 nt, Human
uugggcccacaccuccuucccu

SEQ ID NO: 1328456 - RNA, 20 nt, Human
uugggcccacaccuccuucc

SEQ ID NO: 1328457 - RNA, 15 nt, Human
augaauuaaguuuuu

SEQ ID NO: 1328458 - RNA, 16 nt, Human
augaauuaaauaaacc

SEQ ID NO: 1328459 - RNA, 17 nt, Human
uugggccagacaugcca

SEQ ID NO: 1328460 - RNA, 18 nt, Human
uugggccagcuuuucaaa

SEQ ID NO: 1328461 - RNA, 19 nt, Human
uugggcccacaccuccuuc

SEQ ID NO: 1328462 - RNA, 15 nt, Human
augaaugugaagccu

SEQ ID NO: 1328463 - RNA, 16 nt, Human
augaaugugaagccuu

SEQ ID NO: 1328464 - RNA, 18 nt, Human
augaaugugaagccuucc

SEQ ID NO: 1328465 - RNA, 17 nt, Human
augaaugugaagccuuc

SEQ ID NO: 1328466 - RNA, 11 nt, Human
augaauguuua

SEQ ID NO: 1328467 - RNA, 22 nt, Human
augaauguuuacacucuuugua

SEQ ID NO: 1328468 - RNA, 14 nt, Human
augaauuaaagugg

SEQ ID NO: 1328469 - RNA, 14 nt, Human
augaauuaaauaaa

SEQ ID NO: 1328470 - RNA, 19 nt, Human
uugggccugcuccagaccu

SEQ ID NO: 1328471 - RNA, 20 nt, Human
uuggggcaggaguagcugag

SEQ ID NO: 1328472 - RNA, 23 nt, Human
uuggggcaggaguagcugagcuc

SEQ ID NO: 1328473 - RNA, 22 nt, Human
uuggggcaggaguagcugagcu

SEQ ID NO: 1328474 - RNA, 19 nt, Human
uuggggggaaggggacccu

SEQ ID NO: 1328475 - RNA, 23 nt, Human
uuggggggaguaaagaauuauuu

SEQ ID NO: 1328476 - RNA, 20 nt, Human
uuggggggguggccgcugag

SEQ ID NO: 1328477 - RNA, 13 nt, Human
uuggggggguggc

SEQ ID NO: 1328478 - RNA, 20 nt, Human
uuggggguccuccuccaggg

SEQ ID NO: 1328479 - RNA, 17 nt, Human
uuggggguucaggcccg

SEQ ID NO: 1328480 - RNA, 15 nt, Human
uugguuccuucccaa

SEQ ID NO: 1328481 - RNA, 13 nt, Human
uugguucuaagga

SEQ ID NO: 1328482 - RNA, 14 nt, Human
uugguucuaaggac

SEQ ID NO: 1328483 - RNA, 18 nt, Human
uugguucuaaggaccuga

SEQ ID NO: 1328484 - RNA, 15 nt, Human
uuggagugcaguggc

SEQ ID NO: 1328485 - RNA, 23 nt, Human
aucuugcuuucuuuguuuggcug

SEQ ID NO: 1328486 - RNA, 23 nt, Human
aucuugcuucccuaaucuauggu

SEQ ID NO: 1328487 - RNA, 19 nt, Human
uuggaguguuccccuucca

SEQ ID NO: 1328488 - RNA, 22 nt, Human
uuggaguguuccccuuccacug

SEQ ID NO: 1328489 - RNA, 23 nt, Human
uuggaucucuucuuaauguacau

SEQ ID NO: 1328490 - RNA, 20 nt, Human
uuggauauguaaaacauuua

SEQ ID NO: 1328491 - RNA, 13 nt, Human
uuggauccugugu

SEQ ID NO: 1328492 - RNA, 18 nt, Human
uuggauccuguguggaga

SEQ ID NO: 1328493 - RNA, 19 nt, Human
uuggauacuuggauuuagu

SEQ ID NO: 1328494 - RNA, 19 nt, Human
uuggauauguaaaacauuu

SEQ ID NO: 1328495 - RNA, 19 nt, Human
uuggauauuuuuuacuuua

SEQ ID NO: 1328496 - RNA, 22 nt, Human
uuggcggggaggaggaaauccc

SEQ ID NO: 1328497 - RNA, 17 nt, Human
uuggcguaggcuacaga

SEQ ID NO: 1328498 - RNA, 18 nt, Human
uuggcguaggcuacagag

SEQ ID NO: 1328499 - RNA, 19 nt, Human
uuggcguaggcuacagaga

SEQ ID NO: 1328500 - RNA, 20 nt, Human
uuggcguaggcuacagagaa

SEQ ID NO: 1328501 - RNA, 21 nt, Human
uuggcguaggcuacagagaag

SEQ ID NO: 1328502 - RNA, 22 nt, Human
uuggcguaggcuacagagaagc

SEQ ID NO: 1328503 - RNA, 23 nt, Human
uuggcguaggcuacagagaagcc

SEQ ID NO: 1328504 - RNA, 22 nt, Human
uuggcucgaaucucugugccuu

SEQ ID NO: 1328505 - RNA, 12 nt, Human
uuggcucugcca

SEQ ID NO: 1328506 - RNA, 13 nt, Human
uuggcucugccag

SEQ ID NO: 1328507 - RNA, 14 nt, Human
uuggcucugccagu

SEQ ID NO: 1328508 - RNA, 16 nt, Human
uuggcucugccagucc

SEQ ID NO: 1328509 - RNA, 23 nt, Human
uuggcucugccaguccuguccuu

SEQ ID NO: 1328510 - RNA, 19 nt, Human
uuggcucugccaguccugu

SEQ ID NO: 1328511 - RNA, 19 nt, Human
uuggcugaaauucuccugg

SEQ ID NO: 1328512 - RNA, 20 nt, Human
uuggcugaaauucuccugga

SEQ ID NO: 1328513 - RNA, 21 nt, Human
uuggcugaaauucuccuggag

SEQ ID NO: 1328514 - RNA, 22 nt, Human
uuggcugaaauucuccuggagg

SEQ ID NO: 1328515 - RNA, 23 nt, Human
uuggcugagauaugaacauauug

SEQ ID NO: 1328516 - RNA, 13 nt, Human
aucuuuuuauuca

SEQ ID NO: 1328517 - RNA, 12 nt, Human
augaaagauuca

SEQ ID NO: 1328518 - RNA, 15 nt, Human
augaaagcagggacu

SEQ ID NO: 1328519 - RNA, 18 nt, Human
aucuuuuuaccuuucaua

SEQ ID NO: 1328520 - RNA, 19 nt, Human
aucuuuuuaccuuucauac

SEQ ID NO: 1328521 - RNA, 14 nt, Human
aucuuugccacccu

SEQ ID NO: 1328522 - RNA, 15 nt, Human
aucuuuauaaaugua

SEQ ID NO: 1328523 - RNA, 15 nt, Human
aucuuugccacccuc

SEQ ID NO: 1328524 - RNA, 16 nt, Human
aucuuugccacccuca

SEQ ID NO: 1328525 - RNA, 21 nt, Human
aucuuuaauuuuacauuuccu

SEQ ID NO: 1328526 - RNA, 16 nt, Human
aucuuuaauuuuacau

SEQ ID NO: 1328527 - RNA, 22 nt, Human
aucuuuaauuuuacauuuccua

SEQ ID NO: 1328528 - RNA, 17 nt, Human
aucuuuacaaaacuaca

SEQ ID NO: 1328529 - RNA, 21 nt, Human
aucuuuacaaaacuacaugag

SEQ ID NO: 1328530 - RNA, 23 nt, Human
uugguuuaaagaaaguguauuug

SEQ ID NO: 1328531 - RNA, 18 nt, Human
uugguugguaggguggga

SEQ ID NO: 1328532 - RNA, 17 nt, Human
uugguuuaaagaaagug

SEQ ID NO: 1328533 - RNA, 18 nt, Human
uugguuuaaagaaagugu

SEQ ID NO: 1328534 - RNA, 22 nt, Human
uugguuuaaagaaaguguauuu

SEQ ID NO: 1328535 - RNA, 20 nt, Human
uugguucuagcgcaguuuuu

SEQ ID NO: 1328536 - RNA, 18 nt, Human
uugguucuagcgcaguuu

SEQ ID NO: 1328537 - RNA, 15 nt, Human
uugguucuugagggg

SEQ ID NO: 1328538 - RNA, 23 nt, Human
uugguucuugaggggaccaggag

SEQ ID NO: 1328539 - RNA, 20 nt, Human
uugguugaaaauaaaaagau

SEQ ID NO: 1328540 - RNA, 22 nt, Human
uugguucuugaggggaccagga

SEQ ID NO: 1328541 - RNA, 23 nt, Human
uuguacaaaauaaacaaauaaca

SEQ ID NO: 1328542 - RNA, 21 nt, Human
uuguaggggaggggcuccuuu

SEQ ID NO: 1328543 - RNA, 23 nt, Human
uuguaguagcguuuuuuaaaugu

SEQ ID NO: 1328544 - RNA, 22 nt, Human
uuguaguagcguuuuuuaaaug

SEQ ID NO: 1328545 - RNA, 19 nt, Human
uuguagugccacuguuguu

SEQ ID NO: 1328546 - RNA, 21 nt, Human
uuguaguagcguuuuuuaaau

SEQ ID NO: 1328547 - RNA, 13 nt, Human
uuguaggguuucu

SEQ ID NO: 1328548 - RNA, 14 nt, Human
uuguaggguuucua

SEQ ID NO: 1328549 - RNA, 16 nt, Human
uuguauaaaauaauuu

SEQ ID NO: 1328550 - RNA, 17 nt, Human
uuguauaaaauaauuuu

SEQ ID NO: 1328551 - RNA, 23 nt, Human
uuguaguguuggagaagaacuga

SEQ ID NO: 1328552 - RNA, 19 nt, Human
uuguauaaaauaauuuuua

SEQ ID NO: 1328553 - RNA, 23 nt, Human
uuguagugcuuugagagagaaag

SEQ ID NO: 1328554 - RNA, 17 nt, Human
uuguagugcuuugagag

SEQ ID NO: 1328555 - RNA, 20 nt, Human
uuguauaccuuguaauuuga

SEQ ID NO: 1328556 - RNA, 13 nt, Human
uuguauaguuaac

SEQ ID NO: 1328557 - RNA, 16 nt, Human
uuguauaguuaacaca

SEQ ID NO: 1328558 - RNA, 19 nt, Human
uuguauaguuaacacacua

SEQ ID NO: 1328559 - RNA, 18 nt, Human
uuguauaguuaacacacu

SEQ ID NO: 1328560 - RNA, 14 nt, Human
uuguauauuguaau

SEQ ID NO: 1328561 - RNA, 13 nt, Human
uuguauauugugu

SEQ ID NO: 1328562 - RNA, 15 nt, Human
uuguauauuguguuu

SEQ ID NO: 1328563 - RNA, 19 nt, Human
augaauuuguaaugucuug

SEQ ID NO: 1328564 - RNA, 14 nt, Human
augaauuuguaaug

SEQ ID NO: 1328565 - RNA, 14 nt, Human
augaauuuuagcuu

SEQ ID NO: 1328566 - RNA, 16 nt, Human
augaauuuuagcuuuu

SEQ ID NO: 1328567 - RNA, 17 nt, Human
augaauuuuagcuuuug

SEQ ID NO: 1328568 - RNA, 18 nt, Human
augaauuuuagcuuuugu

SEQ ID NO: 1328569 - RNA, 19 nt, Human
uuguauauuguguuugugu

SEQ ID NO: 1328570 - RNA, 12 nt, Human
augaauuuagug

SEQ ID NO: 1328571 - RNA, 13 nt, Human
augagagacacac

SEQ ID NO: 1328572 - RNA, 14 nt, Human
augagagacacacu

SEQ ID NO: 1328573 - RNA, 17 nt, Human
augagagacacacugaa

SEQ ID NO: 1328574 - RNA, 19 nt, Human
augagagacacacugaaga

SEQ ID NO: 1328575 - RNA, 16 nt, Human
augagaaggaacuucc

SEQ ID NO: 1328576 - RNA, 11 nt, Human
augagaaucua

SEQ ID NO: 1328577 - RNA, 23 nt, Human
augagaaucuacccccagaucca

SEQ ID NO: 1328578 - RNA, 21 nt, Human
augagaauuugagugcucuga

SEQ ID NO: 1328579 - RNA, 18 nt, Human
augagaccacuguuauca

SEQ ID NO: 1328580 - RNA, 23 nt, Human
augagaaaucuaaaaaacgaaaa

SEQ ID NO: 1328581 - RNA, 14 nt, Human
augagaaagccuuc

SEQ ID NO: 1328582 - RNA, 15 nt, Human
augagaaagccuucu

SEQ ID NO: 1328583 - RNA, 19 nt, Human
augagaaagccuucuuuug

SEQ ID NO: 1328584 - RNA, 15 nt, Human
augagaaauacaaaa

SEQ ID NO: 1328585 - RNA, 13 nt, Human
augagaacaaaca

SEQ ID NO: 1328586 - RNA, 22 nt, Human
augagaaauacaaaaauacuca

SEQ ID NO: 1328587 - RNA, 14 nt, Human
augagaacucugag

SEQ ID NO: 1328588 - RNA, 18 nt, Human
augagaaaucuaaaaaac

SEQ ID NO: 1328589 - RNA, 15 nt, Human
augagaaaucuaaaa

SEQ ID NO: 1328590 - RNA, 22 nt, Human
augacauuuauaucacauguuu

SEQ ID NO: 1328591 - RNA, 18 nt, Human
augacauuuauuuuucau

SEQ ID NO: 1328592 - RNA, 15 nt, Human
augaccaaaguccuu

SEQ ID NO: 1328593 - RNA, 17 nt, Human
augacaaucaugugugu

SEQ ID NO: 1328594 - RNA, 18 nt, Human
augacaaucauguguguu

SEQ ID NO: 1328595 - RNA, 19 nt, Human
augacaauuuuuuccacuu

SEQ ID NO: 1328596 - RNA, 17 nt, Human
augacuuaguacaaagu

SEQ ID NO: 1328597 - RNA, 18 nt, Human
augacuugggcaccccca

SEQ ID NO: 1328598 - RNA, 23 nt, Human
augacuugggcacccccagccug

SEQ ID NO: 1328599 - RNA, 20 nt, Human
augacuugggcacccccagc

SEQ ID NO: 1328600 - RNA, 21 nt, Human
augacuugggcacccccagcc

SEQ ID NO: 1328601 - RNA, 22 nt, Human
augacuugggcacccccagccu

SEQ ID NO: 1328602 - RNA, 20 nt, Human
augacuuucuuuuuguagcu

SEQ ID NO: 1328603 - RNA, 21 nt, Human
augacuuucuuuuuguagcug

SEQ ID NO: 1328604 - RNA, 11 nt, Human
augagaaacuu

SEQ ID NO: 1328605 - RNA, 20 nt, Human
augagaaacuuaaauguuau

SEQ ID NO: 1328606 - RNA, 21 nt, Human
augagaaacuuaaauguuauu

SEQ ID NO: 1328607 - RNA, 21 nt, Human
uuuaguagcagugauugucuu

SEQ ID NO: 1328608 - RNA, 15 nt, Human
uuuagucaugugacc

SEQ ID NO: 1328609 - RNA, 16 nt, Human
uuuaguaucuuuuuau

SEQ ID NO: 1328610 - RNA, 21 nt, Human
uuuaguagauauuaccaguuu

SEQ ID NO: 1328611 - RNA, 23 nt, Human
uuuaguagauauuaccaguuuuc

SEQ ID NO: 1328612 - RNA, 22 nt, Human
uuuaguagcagugauugucuua

SEQ ID NO: 1328613 - RNA, 22 nt, Human
uuuaggaaguugacuuauagua

SEQ ID NO: 1328614 - RNA, 18 nt, Human
uuuaggaagcaagcuuaa

SEQ ID NO: 1328615 - RNA, 22 nt, Human
uuuagcuggaaaaguauguuag

SEQ ID NO: 1328616 - RNA, 10 nt, Human
uuuaggaaau

SEQ ID NO: 1328617 - RNA, 18 nt, Human
augccccgucccccucug

SEQ ID NO: 1328618 - RNA, 18 nt, Human
augccccaucccaugcug

SEQ ID NO: 1328619 - RNA, 22 nt, Human
augcccccuaauccccuucucc

SEQ ID NO: 1328620 - RNA, 21 nt, Human
uuuagaugauaaagagacagu

SEQ ID NO: 1328621 - RNA, 17 nt, Human
uuuagauguaauuuugu

SEQ ID NO: 1328622 - RNA, 19 nt, Human
uuuagauuuucugguucua

SEQ ID NO: 1328623 - RNA, 19 nt, Human
uuuagauuuucuuuugccu

SEQ ID NO: 1328624 - RNA, 13 nt, Human
uuuauuaaaaacu

SEQ ID NO: 1328625 - RNA, 18 nt, Human
uuuauuaaaaacugagug

SEQ ID NO: 1328626 - RNA, 20 nt, Human
uuuauguuaagggaagaauu

SEQ ID NO: 1328627 - RNA, 20 nt, Human
uuuauguuacuacaugcacu

SEQ ID NO: 1328628 - RNA, 14 nt, Human
uuuauguuauauau

SEQ ID NO: 1328629 - RNA, 17 nt, Human
uuuauguuauauauaaa

SEQ ID NO: 1328630 - RNA, 20 nt, Human
uuuauguuauauauaaauau

SEQ ID NO: 1328631 - RNA, 22 nt, Human
uuuauguuauauauaaauauau

SEQ ID NO: 1328632 - RNA, 19 nt, Human
uuuauguuccauuaaacga

SEQ ID NO: 1328633 - RNA, 21 nt, Human
uuuauguuauauauaaauaua

SEQ ID NO: 1328634 - RNA, 13 nt, Human
uuuauauaagcuu

SEQ ID NO: 1328635 - RNA, 12 nt, Human
uuuauaggaaaa

SEQ ID NO: 1328636 - RNA, 19 nt, Human
uuuauggugccuaguauug

SEQ ID NO: 1328637 - RNA, 24 nt, Human
uuuauggugccuaguauugacaaa

SEQ ID NO: 1328638 - RNA, 19 nt, Human
uuuaugguaaaaaauuuau

SEQ ID NO: 1328639 - RNA, 23 nt, Human
uuuaugguaacugcuuucuguuc

SEQ ID NO: 1328640 - RNA, 21 nt, Human
uuuaugguaacugcuuucugu

SEQ ID NO: 1328641 - RNA, 23 nt, Human
augcugucuacacuaagagagaa

SEQ ID NO: 1328642 - RNA, 22 nt, Human
augcugucuacacuaagagaga

SEQ ID NO: 1328643 - RNA, 12 nt, Human
augcuguacauc

SEQ ID NO: 1328644 - RNA, 16 nt, Human
augcuguacaucuauu

SEQ ID NO: 1328645 - RNA, 22 nt, Human
augcuguacaucuauuuuggau

SEQ ID NO: 1328646 - RNA, 15 nt, Human
augcuagaacucccu

SEQ ID NO: 1328647 - RNA, 14 nt, Human
uuuauuacguaugu

SEQ ID NO: 1328648 - RNA, 16 nt, Human
uuuauuacguaugucu

SEQ ID NO: 1328649 - RNA, 19 nt, Human
uuuauuacguaugucuggu

SEQ ID NO: 1328650 - RNA, 16 nt, Human
uuuauuacuguaagaa

SEQ ID NO: 1328651 - RNA, 18 nt, Human
uuuauuacguaugucugg

SEQ ID NO: 1328652 - RNA, 15 nt, Human
augcuccuugggccc

SEQ ID NO: 1328653 - RNA, 16 nt, Human
augcuccuugggcccu

SEQ ID NO: 1328654 - RNA, 19 nt, Human
augcuagaacucccuuuca

SEQ ID NO: 1328655 - RNA, 16 nt, Human
augcuagaacucccuu

SEQ ID NO: 1328656 - RNA, 19 nt, Human
augcucuccaaaccacuuu

SEQ ID NO: 1328657 - RNA, 12 nt, Human
augcuggcccag

SEQ ID NO: 1328658 - RNA, 13 nt, Human
augcuggcccagg

SEQ ID NO: 1328659 - RNA, 15 nt, Human
augcuggcccagggc

SEQ ID NO: 1328660 - RNA, 16 nt, Human
augcuggcccagggcc

SEQ ID NO: 1328661 - RNA, 18 nt, Human
augcuggcccagggccca

SEQ ID NO: 1328662 - RNA, 19 nt, Human
augcuggcccagggcccag

SEQ ID NO: 1328663 - RNA, 20 nt, Human
augcuggcccagggcccaga

SEQ ID NO: 1328664 - RNA, 21 nt, Human
augcuggcccagggcccagag

SEQ ID NO: 1328665 - RNA, 22 nt, Human
augcuggcccagggcccagagc

SEQ ID NO: 1328666 - RNA, 23 nt, Human
augcuggcccagggcccagagcc

SEQ ID NO: 1328667 - RNA, 22 nt, Human
augcuggcuauagaugucuuuu

SEQ ID NO: 1328668 - RNA, 21 nt, Human
augcuggcuauagaugucuuu

SEQ ID NO: 1328669 - RNA, 17 nt, Human
auggaauacucuuauau

SEQ ID NO: 1328670 - RNA, 16 nt, Human
auggaauacucuuaua

SEQ ID NO: 1328671 - RNA, 14 nt, Human
uuucacugcuggcu

SEQ ID NO: 1328672 - RNA, 17 nt, Human
uuucacugcuggcugcc

SEQ ID NO: 1328673 - RNA, 18 nt, Human
uuucacugcuggcugccu

SEQ ID NO: 1328674 - RNA, 20 nt, Human
uuucacugcuggcugccuua

SEQ ID NO: 1328675 - RNA, 22 nt, Human
uuucacugcuggcugccuuaga

SEQ ID NO: 1328676 - RNA, 24 nt, Human
uuucacugcuggcugccuuagaac

SEQ ID NO: 1328677 - RNA, 22 nt, Human
uuucaucauucacuucacugug

SEQ ID NO: 1328678 - RNA, 21 nt, Human
uuucaucauucacuucacugu

SEQ ID NO: 1328679 - RNA, 20 nt, Human
uuucaucauucacuucacug

SEQ ID NO: 1328680 - RNA, 17 nt, Human
uuucauauuuuaaacag

SEQ ID NO: 1328681 - RNA, 16 nt, Human
uuucagaaguuaguuu

SEQ ID NO: 1328682 - RNA, 20 nt, Human
uuucagaaguuaguuuguau

SEQ ID NO: 1328683 - RNA, 22 nt, Human
uuucagaaguuaguuuguauau

SEQ ID NO: 1328684 - RNA, 23 nt, Human
uuucagaaguuaguuuguauaua

SEQ ID NO: 1328685 - RNA, 15 nt, Human
uuucagaauauguca

SEQ ID NO: 1328686 - RNA, 21 nt, Human
uuucagacucccauuccugaa

SEQ ID NO: 1328687 - RNA, 11 nt, Human
uuucagacucc

SEQ ID NO: 1328688 - RNA, 24 nt, Human
uuucaugaccaguaaaggcugcug

SEQ ID NO: 1328689 - RNA, 17 nt, Human
uuucaugaccaguaaag

SEQ ID NO: 1328690 - RNA, 19 nt, Human
uuucaugauaaugaacaga

SEQ ID NO: 1328691 - RNA, 22 nt, Human
uuucaugauaaugaacagaaca

SEQ ID NO: 1328692 - RNA, 15 nt, Human
uuucaucuucaguug

SEQ ID NO: 1328693 - RNA, 16 nt, Human
uuucaucuucaguugu

SEQ ID NO: 1328694 - RNA, 17 nt, Human
uuucaucuucaguuguc

SEQ ID NO: 1328695 - RNA, 22 nt, Human
uuucaucuucaguugucucuga

SEQ ID NO: 1328696 - RNA, 19 nt, Human
uuucaugcuguucaugaaa

SEQ ID NO: 1328697 - RNA, 21 nt, Human
uuucaugcaaacucuuugguc

SEQ ID NO: 1328698 - RNA, 15 nt, Human
uuucauguacugcau

SEQ ID NO: 1328699 - RNA, 19 nt, Human
uuucaugcuaucucugugu

SEQ ID NO: 1328700 - RNA, 16 nt, Human
uuucaugauuuugaaa

SEQ ID NO: 1328701 - RNA, 16 nt, Human
uuucaugauuagaaau

SEQ ID NO: 1328702 - RNA, 13 nt, Human
uuucaugcaaacu

SEQ ID NO: 1328703 - RNA, 17 nt, Human
uuucaugcaaacucuuu

SEQ ID NO: 1328704 - RNA, 18 nt, Human
uuucaugcaaacucuuug

SEQ ID NO: 1328705 - RNA, 16 nt, Human
uuucaugcuaucucug

SEQ ID NO: 1328706 - RNA, 22 nt, Human
uuucauguacugcauuauuuga

SEQ ID NO: 1328707 - RNA, 20 nt, Human
uuucauguacugcauuauuu

SEQ ID NO: 1328708 - RNA, 16 nt, Human
uuucauguacugcauu

SEQ ID NO: 1328709 - RNA, 19 nt, Human
uuucauguuaguuaccuua

SEQ ID NO: 1328710 - RNA, 15 nt, Human
uuucauguuuuugau

SEQ ID NO: 1328711 - RNA, 14 nt, Human
uuucauuaaauaaa

SEQ ID NO: 1328712 - RNA, 15 nt, Human
uuucauuaaauaaau

SEQ ID NO: 1328713 - RNA, 17 nt, Human
uuucauuaaauaaauuu

SEQ ID NO: 1328714 - RNA, 18 nt, Human
uuucauuaaauaaauuug

SEQ ID NO: 1328715 - RNA, 19 nt, Human
uuucauuaaauaaauuuga

SEQ ID NO: 1328716 - RNA, 22 nt, Human
uuucauuaaauaaauuugacuu

SEQ ID NO: 1328717 - RNA, 19 nt, Human
auggacaucuugucauuuu

SEQ ID NO: 1328718 - RNA, 20 nt, Human
auggacaucuugucauuuuu

SEQ ID NO: 1328719 - RNA, 14 nt, Human
auggacaggcuggc

SEQ ID NO: 1328720 - RNA, 18 nt, Human
auggacagggcaugccac

SEQ ID NO: 1328721 - RNA, 19 nt, Human
auggacaggcuggcuccag

SEQ ID NO: 1328722 - RNA, 12 nt, Human
auggacaucuug

SEQ ID NO: 1328723 - RNA, 17 nt, Human
auggacaucuugucauu

SEQ ID NO: 1328724 - RNA, 21 nt, Human
uuucccaugauuucauguacu

SEQ ID NO: 1328725 - RNA, 18 nt, Human
uuucccaugauuucaugu

SEQ ID NO: 1328726 - RNA, 15 nt, Human
uuucccaugauuuca

SEQ ID NO: 1328727 - RNA, 16 nt, Human
uuucccauggggaggg

SEQ ID NO: 1328728 - RNA, 18 nt, Human
uuuccccaccagaugcug

SEQ ID NO: 1328729 - RNA, 15 nt, Human
uuuccccagacuugu

SEQ ID NO: 1328730 - RNA, 23 nt, Human
uuuccccauuuagguuucugagu

SEQ ID NO: 1328731 - RNA, 13 nt, Human
auggcagaaaagu

SEQ ID NO: 1328732 - RNA, 13 nt, Human
auggcagaaggca

SEQ ID NO: 1328733 - RNA, 19 nt, Human
auggcaaggacugcaggga

SEQ ID NO: 1328734 - RNA, 18 nt, Human
auggcaaccauuauaacc

SEQ ID NO: 1328735 - RNA, 16 nt, Human
auggcaacagaucugg

SEQ ID NO: 1328736 - RNA, 17 nt, Human
auggcaacagaucugga

SEQ ID NO: 1328737 - RNA, 24 nt, Human
auggcaacagaucuggaaccucag

SEQ ID NO: 1328738 - RNA, 15 nt, Human
auggcaaccauuaua

SEQ ID NO: 1328739 - RNA, 16 nt, Human
auggcaaccauuauaa

SEQ ID NO: 1328740 - RNA, 22 nt, Human
auggcacaaucucggcucacug

SEQ ID NO: 1328741 - RNA, 22 nt, Human
auggcaaucaaacauuuucugg

SEQ ID NO: 1328742 - RNA, 15 nt, Human
auggcaauuuuguaa

SEQ ID NO: 1328743 - RNA, 16 nt, Human
auggcaauuuuguaac

SEQ ID NO: 1328744 - RNA, 17 nt, Human
auggauuucuuugaaaa

SEQ ID NO: 1328745 - RNA, 15 nt, Human
auggauuuugggagu

SEQ ID NO: 1328746 - RNA, 21 nt, Human
auggauuuugggagugacuca

SEQ ID NO: 1328747 - RNA, 15 nt, Human
auggauuuuucuuua

SEQ ID NO: 1328748 - RNA, 16 nt, Human
auggauuuuucuuuaa

SEQ ID NO: 1328749 - RNA, 19 nt, Human
auggauuuuucuuuaacug

SEQ ID NO: 1328750 - RNA, 20 nt, Human
auggauuuuucuuuaacugc

SEQ ID NO: 1328751 - RNA, 18 nt, Human
auggcaaaggaaggugga

SEQ ID NO: 1328752 - RNA, 14 nt, Human
auggcaacagaucu

SEQ ID NO: 1328753 - RNA, 15 nt, Human
auggcaacagaucug

SEQ ID NO: 1328754 - RNA, 18 nt, Human
auggccggagaggaccgg

SEQ ID NO: 1328755 - RNA, 18 nt, Human
auggccgugaaugggugc

SEQ ID NO: 1328756 - RNA, 16 nt, Human
auggccagguggccac

SEQ ID NO: 1328757 - RNA, 22 nt, Human
auggccagccccuuagacagag

SEQ ID NO: 1328758 - RNA, 14 nt, Human
auggccagcuggag

SEQ ID NO: 1328759 - RNA, 20 nt, Human
auggccagcuggaggcaggg

SEQ ID NO: 1328760 - RNA, 22 nt, Human
auggccagguggccacuccaga

SEQ ID NO: 1328761 - RNA, 15 nt, Human
auggcagaaggcaaa

SEQ ID NO: 1328762 - RNA, 20 nt, Human
auggcagaaggcaaacccau

SEQ ID NO: 1328763 - RNA, 21 nt, Human
auggcagaaggcaaacccauc

SEQ ID NO: 1328764 - RNA, 19 nt, Human
auggcaugagaaauacaaa

SEQ ID NO: 1328765 - RNA, 22 nt, Human
auggccacaguagucuugauga

SEQ ID NO: 1328766 - RNA, 14 nt, Human
auggcagauguagg

SEQ ID NO: 1328767 - RNA, 13 nt, Human
auggccagcagca

SEQ ID NO: 1328768 - RNA, 13 nt, Human
auggccagccccu

SEQ ID NO: 1328769 - RNA, 17 nt, Human
auggccagccccuuaga

SEQ ID NO: 1328770 - RNA, 19 nt, Human
auggccagccccuuagaca

SEQ ID NO: 1328771 - RNA, 21 nt, Human
auggccagccccuuagacaga

SEQ ID NO: 1328772 - RNA, 22 nt, Human
auggccugcaaacugggaaccc

SEQ ID NO: 1328773 - RNA, 22 nt, Human
auggccgugaaugggugcccac

SEQ ID NO: 1328774 - RNA, 18 nt, Human
auggccugcaaacuggga

SEQ ID NO: 1328775 - RNA, 20 nt, Human
auggcuaguaucaaaagaaa

SEQ ID NO: 1328776 - RNA, 23 nt, Human
auggccuucauaucauccacaca

SEQ ID NO: 1328777 - RNA, 14 nt, Human
auggccuucauauc

SEQ ID NO: 1328778 - RNA, 13 nt, Human
auggcgcaggaac

SEQ ID NO: 1328779 - RNA, 12 nt, Human
augauucccagc

SEQ ID NO: 1328780 - RNA, 17 nt, Human
augauuucagcucacug

SEQ ID NO: 1328781 - RNA, 21 nt, Human
augauucaaaugucuauaaac

SEQ ID NO: 1328782 - RNA, 16 nt, Human
augauucaguguuaaa

SEQ ID NO: 1328783 - RNA, 13 nt, Human
augauucauuuua

SEQ ID NO: 1328784 - RNA, 20 nt, Human
augauuauuuuuuucuguaa

SEQ ID NO: 1328785 - RNA, 13 nt, Human
augauuccagcca

SEQ ID NO: 1328786 - RNA, 24 nt, Human
augauuaaauaagauucuaacggu

SEQ ID NO: 1328787 - RNA, 15 nt, Human
uuguugucugcaacu

SEQ ID NO: 1328788 - RNA, 18 nt, Human
uuguuguagagaaaacau

SEQ ID NO: 1328789 - RNA, 20 nt, Human
uuguuguagauugauuguau

SEQ ID NO: 1328790 - RNA, 23 nt, Human
uuguuguagauugauuguauugu

SEQ ID NO: 1328791 - RNA, 23 nt, Human
uuguuggcguaggcuacagagaa

SEQ ID NO: 1328792 - RNA, 22 nt, Human
uuguuggcguaggcuacagaga

SEQ ID NO: 1328793 - RNA, 15 nt, Human
uuguuggugcacagc

SEQ ID NO: 1328794 - RNA, 16 nt, Human
uuguugguugguuuuc

SEQ ID NO: 1328795 - RNA, 20 nt, Human
uuguugguugguuuucuucu

SEQ ID NO: 1328796 - RNA, 20 nt, Human
uuguugguuuuuaaagauuu

SEQ ID NO: 1328797 - RNA, 15 nt, Human
uuguuguaaccugcu

SEQ ID NO: 1328798 - RNA, 18 nt, Human
uuguuguaaccugcugug

SEQ ID NO: 1328799 - RNA, 22 nt, Human
augauuaugaauuacauuugua

SEQ ID NO: 1328800 - RNA, 23 nt, Human
augauuagaaauuaccuguggau

SEQ ID NO: 1328801 - RNA, 19 nt, Human
augauuaaauaagauucua

SEQ ID NO: 1328802 - RNA, 20 nt, Human
augauuaaauaagauucuaa

SEQ ID NO: 1328803 - RNA, 14 nt, Human
uuguuguccuuuuc

SEQ ID NO: 1328804 - RNA, 16 nt, Human
uuguuguccuuuucau

SEQ ID NO: 1328805 - RNA, 13 nt, Human
uuguugugcuuuu

SEQ ID NO: 1328806 - RNA, 14 nt, Human
augauuucauguac

SEQ ID NO: 1328807 - RNA, 14 nt, Human
augauuucuucuua

SEQ ID NO: 1328808 - RNA, 21 nt, Human
augauuuccuugaauguggcu

SEQ ID NO: 1328809 - RNA, 19 nt, Human
augauuucagcucacugca

SEQ ID NO: 1328810 - RNA, 14 nt, Human
augauuucaguagc

SEQ ID NO: 1328811 - RNA, 20 nt, Human
augauuucaguucuaggaaa

SEQ ID NO: 1328812 - RNA, 16 nt, Human
augauuucauguacug

SEQ ID NO: 1328813 - RNA, 13 nt, Human
augauuucaugua

SEQ ID NO: 1328814 - RNA, 21 nt, Human
augauuucaguucuaggaaaa

SEQ ID NO: 1328815 - RNA, 20 nt, Human
augauuucaugcuaucucug

SEQ ID NO: 1328816 - RNA, 21 nt, Human
augauuucaugcuaucucugu

SEQ ID NO: 1328817 - RNA, 21 nt, Human
augauuuuaaguuucucugca

SEQ ID NO: 1328818 - RNA, 14 nt, Human
augcacaucccugg

SEQ ID NO: 1328819 - RNA, 17 nt, Human
augcacaugaacuuaga

SEQ ID NO: 1328820 - RNA, 14 nt, Human
augcaccaccaagc

SEQ ID NO: 1328821 - RNA, 18 nt, Human
augcaaaucaauuacugg

SEQ ID NO: 1328822 - RNA, 15 nt, Human
augcaccaccaagcc

SEQ ID NO: 1328823 - RNA, 18 nt, Human
augcaccaccaagccaag

SEQ ID NO: 1328824 - RNA, 21 nt, Human
augcaccaccaagccaaggga

SEQ ID NO: 1328825 - RNA, 19 nt, Human
augcacuuauaauuuuccu

SEQ ID NO: 1328826 - RNA, 20 nt, Human
augcacuucaaauucaaaua

SEQ ID NO: 1328827 - RNA, 22 nt, Human
augcacuuucuauccucuguaa

SEQ ID NO: 1328828 - RNA, 12 nt, Human
augcacuuugcu

SEQ ID NO: 1328829 - RNA, 13 nt, Human
augcacuuugcuu

SEQ ID NO: 1328830 - RNA, 15 nt, Human
augcacuuugcuuua

SEQ ID NO: 1328831 - RNA, 16 nt, Human
augcacuuugcuuuaa

SEQ ID NO: 1328832 - RNA, 20 nt, Human
augagagacacacugaagaa

SEQ ID NO: 1328833 - RNA, 21 nt, Human
augagagacacacugaagaag

SEQ ID NO: 1328834 - RNA, 23 nt, Human
augagagacacacugaagaagca

SEQ ID NO: 1328835 - RNA, 22 nt, Human
uugugaguuuaccuuguauacu

SEQ ID NO: 1328836 - RNA, 17 nt, Human
uuguggccuaagaggcu

SEQ ID NO: 1328837 - RNA, 18 nt, Human
uuguggguuuuuauuucc

SEQ ID NO: 1328838 - RNA, 18 nt, Human
uugugggggacuguaagu

SEQ ID NO: 1328839 - RNA, 19 nt, Human
uugugggggacuguaaguu

SEQ ID NO: 1328840 - RNA, 20 nt, Human
uugugggccugggcuccugg

SEQ ID NO: 1328841 - RNA, 14 nt, Human
uuguggggccuggg

SEQ ID NO: 1328842 - RNA, 17 nt, Human
uuguggggccugggagg

SEQ ID NO: 1328843 - RNA, 16 nt, Human
uugugggggacuguaa

SEQ ID NO: 1328844 - RNA, 14 nt, Human
uugugggccugggc

SEQ ID NO: 1328845 - RNA, 15 nt, Human
uugugggccugggcu

SEQ ID NO: 1328846 - RNA, 18 nt, Human
uugugggccugggcuccu

SEQ ID NO: 1328847 - RNA, 19 nt, Human
uugugggccugggcuccug

SEQ ID NO: 1328848 - RNA, 23 nt, Human
uugugggccugggcuccuggacc

SEQ ID NO: 1328849 - RNA, 17 nt, Human
uuguggggaugaugaaa

SEQ ID NO: 1328850 - RNA, 18 nt, Human
uuguggccuuugcgcucc

SEQ ID NO: 1328851 - RNA, 13 nt, Human
uugugggccuggg

SEQ ID NO: 1328852 - RNA, 14 nt, Human
uuguguaagaaaua

SEQ ID NO: 1328853 - RNA, 23 nt, Human
uugugugaaagguacuucaaauc

SEQ ID NO: 1328854 - RNA, 20 nt, Human
uuguggguuuuuauuuccua

SEQ ID NO: 1328855 - RNA, 20 nt, Human
uugugguuuauauauuuaaa

SEQ ID NO: 1328856 - RNA, 18 nt, Human
uuguguaagaaauacaga

SEQ ID NO: 1328857 - RNA, 13 nt, Human
uugugugcucucc

SEQ ID NO: 1328858 - RNA, 14 nt, Human
uugugugcucucca

SEQ ID NO: 1328859 - RNA, 15 nt, Human
uugugugcucuccau

SEQ ID NO: 1328860 - RNA, 13 nt, Human
uuguguggauucu

SEQ ID NO: 1328861 - RNA, 16 nt, Human
uuguguggauucuuua

SEQ ID NO: 1328862 - RNA, 13 nt, Human
uuguguguugucu

SEQ ID NO: 1328863 - RNA, 15 nt, Human
uuguguguugucucu

SEQ ID NO: 1328864 - RNA, 17 nt, Human
uuguguguugucucuug

SEQ ID NO: 1328865 - RNA, 14 nt, Human
uuguucugucacca

SEQ ID NO: 1328866 - RNA, 14 nt, Human
uuguucuguuaacu

SEQ ID NO: 1328867 - RNA, 16 nt, Human
uuguuggcauagcucu

SEQ ID NO: 1328868 - RNA, 15 nt, Human
uuguucuguuaacug

SEQ ID NO: 1328869 - RNA, 18 nt, Human
uuguuggcguaggcuaca

SEQ ID NO: 1328870 - RNA, 21 nt, Human
uuguuggcguaggcuacagag

SEQ ID NO: 1328871 - RNA, 14 nt, Human
uuuaaauguuuuuu

SEQ ID NO: 1328872 - RNA, 15 nt, Human
uuuaaauguauacua

SEQ ID NO: 1328873 - RNA, 14 nt, Human
uuuaaauguauacu

SEQ ID NO: 1328874 - RNA, 15 nt, Human
uuguuuuacugucuu

SEQ ID NO: 1328875 - RNA, 22 nt, Human
augcacuuugcuuuaauauaaa

SEQ ID NO: 1328876 - RNA, 23 nt, Human
augcacuuugcuuuaauauaaau

SEQ ID NO: 1328877 - RNA, 18 nt, Human
augcacuuugcuuuaaua

SEQ ID NO: 1328878 - RNA, 19 nt, Human
augcacuuugcuuuaauau

SEQ ID NO: 1328879 - RNA, 20 nt, Human
augcacuuugcuuuaauaua

SEQ ID NO: 1328880 - RNA, 21 nt, Human
augcacuuugcuuuaauauaa

SEQ ID NO: 1328881 - RNA, 12 nt, Human
uuuaaauugugu

SEQ ID NO: 1328882 - RNA, 11 nt, Human
uuuaaauugug

SEQ ID NO: 1328883 - RNA, 15 nt, Human
uuuaagauaauuaua

SEQ ID NO: 1328884 - RNA, 14 nt, Human
uuuaagauaauuau

SEQ ID NO: 1328885 - RNA, 12 nt, Human
uuuaauuuuaca

SEQ ID NO: 1328886 - RNA, 15 nt, Human
uuuaauuguaaagua

SEQ ID NO: 1328887 - RNA, 21 nt, Human
uuuaauuguaaaguaaaagcu

SEQ ID NO: 1328888 - RNA, 12 nt, Human
uuuaauuguaaa

SEQ ID NO: 1328889 - RNA, 23 nt, Human
uuuaaugccgauauacucuagau

SEQ ID NO: 1328890 - RNA, 19 nt, Human
uuuaauggggugcaccugu

SEQ ID NO: 1328891 - RNA, 21 nt, Human
uuuaauguaauagggaaaauu

SEQ ID NO: 1328892 - RNA, 18 nt, Human
uuuaauguacuaauauuu

SEQ ID NO: 1328893 - RNA, 18 nt, Human
uuuaauguauaguaaauc

SEQ ID NO: 1328894 - RNA, 22 nt, Human
uuuaaugaaugcuuaaagaauu

SEQ ID NO: 1328895 - RNA, 16 nt, Human
uuuaaugaaugcuuaa

SEQ ID NO: 1328896 - RNA, 19 nt, Human
uuuaaugaagaucuaaaua

SEQ ID NO: 1328897 - RNA, 14 nt, Human
uuuaaugagauaau

SEQ ID NO: 1328898 - RNA, 14 nt, Human
uuuaagcucugagc

SEQ ID NO: 1328899 - RNA, 17 nt, Human
uuuaagcucugagcugu

SEQ ID NO: 1328900 - RNA, 18 nt, Human
uuuaagcucugagcuguc

SEQ ID NO: 1328901 - RNA, 19 nt, Human
uuuaagcucugagcuguca

SEQ ID NO: 1328902 - RNA, 15 nt, Human
uuuaaugaacaaaug

SEQ ID NO: 1328903 - RNA, 16 nt, Human
uuuaaugaacaaaugg

SEQ ID NO: 1328904 - RNA, 16 nt, Human
uuuaaugaagaucuaa

SEQ ID NO: 1328905 - RNA, 12 nt, Human
uuuaagccaaaa

SEQ ID NO: 1328906 - RNA, 20 nt, Human
uuuaagccaaaacaauguuu

SEQ ID NO: 1328907 - RNA, 18 nt, Human
uuuaagccaaaacaaugu

SEQ ID NO: 1328908 - RNA, 13 nt, Human
uuuaagcucugag

SEQ ID NO: 1328909 - RNA, 18 nt, Human
augcaguucugaagaaga

SEQ ID NO: 1328910 - RNA, 19 nt, Human
augcaguucugaagaagau

SEQ ID NO: 1328911 - RNA, 14 nt, Human
augcaguugucucu

SEQ ID NO: 1328912 - RNA, 15 nt, Human
augcaguugucucug

SEQ ID NO: 1328913 - RNA, 16 nt, Human
augcaguugucucugu

SEQ ID NO: 1328914 - RNA, 18 nt, Human
augcaguugucucuguuu

SEQ ID NO: 1328915 - RNA, 13 nt, Human
augccaaauuaaa

SEQ ID NO: 1328916 - RNA, 14 nt, Human
augccaaauuaaaa

SEQ ID NO: 1328917 - RNA, 15 nt, Human
augccaaauuaaaaa

SEQ ID NO: 1328918 - RNA, 18 nt, Human
augccaaauuaaaaaaga

SEQ ID NO: 1328919 - RNA, 22 nt, Human
augccaaauuaaaaaagauaaa

SEQ ID NO: 1328920 - RNA, 19 nt, Human
augccaaauuaaaaaagau

SEQ ID NO: 1328921 - RNA, 17 nt, Human
augcccagagacccagc

SEQ ID NO: 1328922 - RNA, 18 nt, Human
augcccagagacccagcg

SEQ ID NO: 1328923 - RNA, 10 nt, Human
augcccagag

SEQ ID NO: 1328924 - RNA, 11 nt, Human
augcccagaga

SEQ ID NO: 1328925 - RNA, 14 nt, Human
augcccagagaccc

SEQ ID NO: 1328926 - RNA, 16 nt, Human
augcccagagacccag

SEQ ID NO: 1328927 - RNA, 17 nt, Human
augccacuaaauugaca

SEQ ID NO: 1328928 - RNA, 15 nt, Human
augccacuaaauuga

SEQ ID NO: 1328929 - RNA, 14 nt, Human
augccacugccuuc

SEQ ID NO: 1328930 - RNA, 15 nt, Human
augccacugccuucg

SEQ ID NO: 1328931 - RNA, 13 nt, Human
augcagggcaguc

SEQ ID NO: 1328932 - RNA, 15 nt, Human
augcagggcagucau

SEQ ID NO: 1328933 - RNA, 15 nt, Human
augcaguucugaaga

SEQ ID NO: 1328934 - RNA, 17 nt, Human
augcaguucugaagaag

SEQ ID NO: 1328935 - RNA, 13 nt, Human
augcagugccagg

SEQ ID NO: 1328936 - RNA, 17 nt, Human
augcagugccuuucuuc

SEQ ID NO: 1328937 - RNA, 15 nt, Human
uucuaguguagaauu

SEQ ID NO: 1328938 - RNA, 16 nt, Human
uucuagagcacugcca

SEQ ID NO: 1328939 - RNA, 14 nt, Human
uucuagaguucaga

SEQ ID NO: 1328940 - RNA, 19 nt, Human
uucuagaguucagaguccu

SEQ ID NO: 1328941 - RNA, 16 nt, Human
uucuagaucagaugcu

SEQ ID NO: 1328942 - RNA, 22 nt, Human
uucuagaucagaugcuccaaga

SEQ ID NO: 1328943 - RNA, 23 nt, Human
uucuagaucagaugcuccaagau

SEQ ID NO: 1328944 - RNA, 21 nt, Human
uucuagguuucaaagaugcug

SEQ ID NO: 1328945 - RNA, 23 nt, Human
uucuaaggaccugaaauuccaaa

SEQ ID NO: 1328946 - RNA, 15 nt, Human
uucuaaggccuagga

SEQ ID NO: 1328947 - RNA, 17 nt, Human
uucuaaggccuaggauu

SEQ ID NO: 1328948 - RNA, 12 nt, Human
uucuagaaaaac

SEQ ID NO: 1328949 - RNA, 19 nt, Human
uucuagaaagagaaacagu

SEQ ID NO: 1328950 - RNA, 22 nt, Human
uucuagaaagagaaacaguugg

SEQ ID NO: 1328951 - RNA, 20 nt, Human
uucuagacauggagguucua

SEQ ID NO: 1328952 - RNA, 22 nt, Human
uucuagacauggagguucuaag

SEQ ID NO: 1328953 - RNA, 23 nt, Human
uucuagacauggagguucuaagg

SEQ ID NO: 1328954 - RNA, 12 nt, Human
uucuagaccaau

SEQ ID NO: 1328955 - RNA, 14 nt, Human
uucuauaauuuaaa

SEQ ID NO: 1328956 - RNA, 13 nt, Human
uucuauaauuuaa

SEQ ID NO: 1328957 - RNA, 15 nt, Human
uucuaguucugccag

SEQ ID NO: 1328958 - RNA, 16 nt, Human
uucuaguucugccagg

SEQ ID NO: 1328959 - RNA, 22 nt, Human
uucuauaaguuuuauguuaaau

SEQ ID NO: 1328960 - RNA, 19 nt, Human
aucagacuaugaaguuuuu

SEQ ID NO: 1328961 - RNA, 16 nt, Human
aucagacuaagccagc

SEQ ID NO: 1328962 - RNA, 17 nt, Human
aucagacuaagccagca

SEQ ID NO: 1328963 - RNA, 19 nt, Human
aucagacuaagccagcacc

SEQ ID NO: 1328964 - RNA, 20 nt, Human
aucagacuaagccagcaccg

SEQ ID NO: 1328965 - RNA, 17 nt, Human
aucagacugacaguuua

SEQ ID NO: 1328966 - RNA, 15 nt, Human
aucagaaagggaggg

SEQ ID NO: 1328967 - RNA, 16 nt, Human
aucagaaagggagggc

SEQ ID NO: 1328968 - RNA, 17 nt, Human
aucagaaagggagggcu

SEQ ID NO: 1328969 - RNA, 16 nt, Human
aucagaccauaauguu

SEQ ID NO: 1328970 - RNA, 20 nt, Human
aucagaccauaauguuacau

SEQ ID NO: 1328971 - RNA, 13 nt, Human
aucagacugacag

SEQ ID NO: 1328972 - RNA, 14 nt, Human
aucagagaaggaac

SEQ ID NO: 1328973 - RNA, 19 nt, Human
aucaggaauauuuuccaaa

SEQ ID NO: 1328974 - RNA, 22 nt, Human
aucaggaauauuuuccaaagag

SEQ ID NO: 1328975 - RNA, 16 nt, Human
aucaggacccagagga

SEQ ID NO: 1328976 - RNA, 18 nt, Human
aucaggacccagaggaag

SEQ ID NO: 1328977 - RNA, 20 nt, Human
aucaggacccagaggaaggg

SEQ ID NO: 1328978 - RNA, 20 nt, Human
aucagaaacacccucacacu

SEQ ID NO: 1328979 - RNA, 16 nt, Human
aucagaaacacccuca

SEQ ID NO: 1328980 - RNA, 14 nt, Human
aucagaaagaggca

SEQ ID NO: 1328981 - RNA, 20 nt, Human
aucagaaaggaaaaacaaac

SEQ ID NO: 1328982 - RNA, 22 nt, Human
aucagaaaggaaaaacaaacuc

SEQ ID NO: 1328983 - RNA, 21 nt, Human
aucacuuucucaguuuucaua

SEQ ID NO: 1328984 - RNA, 20 nt, Human
aucacuuucucaguuuucau

SEQ ID NO: 1328985 - RNA, 16 nt, Human
uucucagauuucugag

SEQ ID NO: 1328986 - RNA, 14 nt, Human
uucucagauuucug

SEQ ID NO: 1328987 - RNA, 20 nt, Human
uucucagauuucugaggaaa

SEQ ID NO: 1328988 - RNA, 13 nt, Human
uucucagcuccca

SEQ ID NO: 1328989 - RNA, 15 nt, Human
uucucagauuucuga

SEQ ID NO: 1328990 - RNA, 15 nt, Human
uucuaaaguaaaaac

SEQ ID NO: 1328991 - RNA, 12 nt, Human
uucuaaaguucu

SEQ ID NO: 1328992 - RNA, 13 nt, Human
uucuaaaguucua

SEQ ID NO: 1328993 - RNA, 14 nt, Human
uucuaaaguucuaa

SEQ ID NO: 1328994 - RNA, 16 nt, Human
uucuaaaguucuaaga

SEQ ID NO: 1328995 - RNA, 17 nt, Human
uucuaaaguucuaagau

SEQ ID NO: 1328996 - RNA, 18 nt, Human
uucuaaaguucuaagauu

SEQ ID NO: 1328997 - RNA, 20 nt, Human
uucuaaaguucuaagauucu

SEQ ID NO: 1328998 - RNA, 14 nt, Human
uucuaacaagucau

SEQ ID NO: 1328999 - RNA, 14 nt, Human
uucuaaccuuuaca

SEQ ID NO: 1329000 - RNA, 13 nt, Human
uucuaagaaguga

SEQ ID NO: 1329001 - RNA, 14 nt, Human
uucuaagaaacauu

SEQ ID NO: 1329002 - RNA, 16 nt, Human
uucuaagaaacauuua

SEQ ID NO: 1329003 - RNA, 23 nt, Human
uucuaagaaacauuuauauugau

SEQ ID NO: 1329004 - RNA, 15 nt, Human
uucuaaccuuuacau

SEQ ID NO: 1329005 - RNA, 16 nt, Human
uucuaaccuuuacaug

SEQ ID NO: 1329006 - RNA, 23 nt, Human
uucuaacuacaaagguuuaaaug

SEQ ID NO: 1329007 - RNA, 22 nt, Human
uucuaacuacaaagguuuaaau

SEQ ID NO: 1329008 - RNA, 20 nt, Human
uucuaagaaacauuuauauu

SEQ ID NO: 1329009 - RNA, 12 nt, Human
uucuaagaugug

SEQ ID NO: 1329010 - RNA, 19 nt, Human
uucuaagaugugauauucu

SEQ ID NO: 1329011 - RNA, 20 nt, Human
uucuaagaugugauauucua

SEQ ID NO: 1329012 - RNA, 21 nt, Human
uucuaagaugugauauucuaa

SEQ ID NO: 1329013 - RNA, 22 nt, Human
uucuaagaugugauauucuaag

SEQ ID NO: 1329014 - RNA, 23 nt, Human
uucuaagaugugauauucuaaga

SEQ ID NO: 1329015 - RNA, 12 nt, Human
uucuaagauucu

SEQ ID NO: 1329016 - RNA, 13 nt, Human
uucuaagauucua

SEQ ID NO: 1329017 - RNA, 14 nt, Human
uucuaagauucuaa

SEQ ID NO: 1329018 - RNA, 15 nt, Human
uucuaagauucuaaa

SEQ ID NO: 1329019 - RNA, 16 nt, Human
uucuaagauucuaaag

SEQ ID NO: 1329020 - RNA, 17 nt, Human
uucuaagauucuaaagg

SEQ ID NO: 1329021 - RNA, 15 nt, Human
uucuaagauucuaau

SEQ ID NO: 1329022 - RNA, 16 nt, Human
uucuaagauucuaaug

SEQ ID NO: 1329023 - RNA, 17 nt, Human
uucuaagauucuaauga

SEQ ID NO: 1329024 - RNA, 19 nt, Human
uucuaagauucuaaugaug

SEQ ID NO: 1329025 - RNA, 13 nt, Human
uucuaagauucug

SEQ ID NO: 1329026 - RNA, 17 nt, Human
uucuaagcauaaaagau

SEQ ID NO: 1329027 - RNA, 14 nt, Human
uucuaagauucuga

SEQ ID NO: 1329028 - RNA, 21 nt, Human
uucuaaggaccugaaauucca

SEQ ID NO: 1329029 - RNA, 22 nt, Human
uucuaaggaccugaaauuccaa

SEQ ID NO: 1329030 - RNA, 19 nt, Human
uucuaaggccuaggauucu

SEQ ID NO: 1329031 - RNA, 16 nt, Human
aucaauaauauauuuu

SEQ ID NO: 1329032 - RNA, 13 nt, Human
uucgaaaaucaaa

SEQ ID NO: 1329033 - RNA, 14 nt, Human
uuccuuuuuuugua

SEQ ID NO: 1329034 - RNA, 16 nt, Human
uuccuuuuuuuguacc

SEQ ID NO: 1329035 - RNA, 21 nt, Human
uucgacuguuguuaucuguuu

SEQ ID NO: 1329036 - RNA, 16 nt, Human
uucgacuguuguuauc

SEQ ID NO: 1329037 - RNA, 14 nt, Human
uucgacacuguucu

SEQ ID NO: 1329038 - RNA, 15 nt, Human
uucgaaugacacugu

SEQ ID NO: 1329039 - RNA, 15 nt, Human
uucgacacuguucuu

SEQ ID NO: 1329040 - RNA, 11 nt, Human
uucgcagccac

SEQ ID NO: 1329041 - RNA, 13 nt, Human
uucgcagccaccc

SEQ ID NO: 1329042 - RNA, 14 nt, Human
uucgcagccacccu

SEQ ID NO: 1329043 - RNA, 15 nt, Human
uucgcagccacccug

SEQ ID NO: 1329044 - RNA, 16 nt, Human
uucgcagccacccuga

SEQ ID NO: 1329045 - RNA, 18 nt, Human
uucgcagccacccugagg

SEQ ID NO: 1329046 - RNA, 20 nt, Human
uucgauacaccgggccugga

SEQ ID NO: 1329047 - RNA, 23 nt, Human
uucgagauuaucguuuucuuaaa

SEQ ID NO: 1329048 - RNA, 19 nt, Human
uucgcagccacccugagga

SEQ ID NO: 1329049 - RNA, 24 nt, Human
uucgcagccacccugaggagucug

SEQ ID NO: 1329050 - RNA, 22 nt, Human
uucgcaguccacuucugacagc

SEQ ID NO: 1329051 - RNA, 14 nt, Human
uucgcauggucaca

SEQ ID NO: 1329052 - RNA, 16 nt, Human
uucgcauggucacaca

SEQ ID NO: 1329053 - RNA, 17 nt, Human
uucgcauggucacacac

SEQ ID NO: 1329054 - RNA, 18 nt, Human
uucgcauggucacacacu

SEQ ID NO: 1329055 - RNA, 19 nt, Human
uucgcauggucacacacug

SEQ ID NO: 1329056 - RNA, 20 nt, Human
uucgcauggucacacacuga

SEQ ID NO: 1329057 - RNA, 21 nt, Human
uucgcauggucacacacugau

SEQ ID NO: 1329058 - RNA, 23 nt, Human
uucgcauggucacacacugaugc

SEQ ID NO: 1329059 - RNA, 15 nt, Human
auauuuuacauaaau

SEQ ID NO: 1329060 - RNA, 16 nt, Human
auauuuuacauaaauu

SEQ ID NO: 1329061 - RNA, 20 nt, Human
auauuuuacauaaauuuagu

SEQ ID NO: 1329062 - RNA, 23 nt, Human
uucccagagcaaaauaauuuuaa

SEQ ID NO: 1329063 - RNA, 11 nt, Human
uucccagaggg

SEQ ID NO: 1329064 - RNA, 13 nt, Human
auauuuuaaugua

SEQ ID NO: 1329065 - RNA, 20 nt, Human
uucccacggccuuucuagcc

SEQ ID NO: 1329066 - RNA, 21 nt, Human
uucccacuccaagcccagccc

SEQ ID NO: 1329067 - RNA, 14 nt, Human
uucccacuccaagc

SEQ ID NO: 1329068 - RNA, 15 nt, Human
uucccacuguuuaag

SEQ ID NO: 1329069 - RNA, 20 nt, Human
uucccacuuaaaaauuaaau

SEQ ID NO: 1329070 - RNA, 17 nt, Human
uucccacuuucccaccc

SEQ ID NO: 1329071 - RNA, 18 nt, Human
uucccacuuucccacccc

SEQ ID NO: 1329072 - RNA, 20 nt, Human
uucccacuuucccaccccac

SEQ ID NO: 1329073 - RNA, 18 nt, Human
uucccagagcaaaauaau

SEQ ID NO: 1329074 - RNA, 14 nt, Human
uucccccucuccca

SEQ ID NO: 1329075 - RNA, 18 nt, Human
uucccccucucccaguug

SEQ ID NO: 1329076 - RNA, 17 nt, Human
uucccccucucccaguu

SEQ ID NO: 1329077 - RNA, 22 nt, Human
uucccccuguuucagaggcuca

SEQ ID NO: 1329078 - RNA, 12 nt, Human
uuccccucugcu

SEQ ID NO: 1329079 - RNA, 14 nt, Human
uuccccucugcugc

SEQ ID NO: 1329080 - RNA, 15 nt, Human
uuccccucugcugcu

SEQ ID NO: 1329081 - RNA, 18 nt, Human
uuccccucugcugcuguc

SEQ ID NO: 1329082 - RNA, 16 nt, Human
uucccuaucuuugcca

SEQ ID NO: 1329083 - RNA, 12 nt, Human
uucccuaucacu

SEQ ID NO: 1329084 - RNA, 15 nt, Human
uucccuauccaauca

SEQ ID NO: 1329085 - RNA, 17 nt, Human
uucccuacuuccuguga

SEQ ID NO: 1329086 - RNA, 22 nt, Human
uucccuagaaacuuccaaaucc

SEQ ID NO: 1329087 - RNA, 14 nt, Human
uucccuacuuccug

SEQ ID NO: 1329088 - RNA, 16 nt, Human
uucccuacuuccugug

SEQ ID NO: 1329089 - RNA, 14 nt, Human
uuccccuguucacu

SEQ ID NO: 1329090 - RNA, 17 nt, Human
uuccccuguucacucua

SEQ ID NO: 1329091 - RNA, 19 nt, Human
uuccccuguuuauucauau

SEQ ID NO: 1329092 - RNA, 18 nt, Human
uuccccuguuuauucaua

SEQ ID NO: 1329093 - RNA, 22 nt, Human
uuccccuuccuaauuccacagc

SEQ ID NO: 1329094 - RNA, 21 nt, Human
uuccccuuccacugagggcag

SEQ ID NO: 1329095 - RNA, 16 nt, Human
uuccccuuauccuccc

SEQ ID NO: 1329096 - RNA, 17 nt, Human
uuccccuuauccucccu

SEQ ID NO: 1329097 - RNA, 19 nt, Human
uuccccuuauccucccugu

SEQ ID NO: 1329098 - RNA, 20 nt, Human
uuccccuuauccucccugua

SEQ ID NO: 1329099 - RNA, 14 nt, Human
uuccccuuccacug

SEQ ID NO: 1329100 - RNA, 15 nt, Human
uuccccuuccacuga

SEQ ID NO: 1329101 - RNA, 14 nt, Human
uucccuuuucuguu

SEQ ID NO: 1329102 - RNA, 19 nt, Human
uuccuaccaagucaaacuu

SEQ ID NO: 1329103 - RNA, 15 nt, Human
uuccuucagcacuuu

SEQ ID NO: 1329104 - RNA, 13 nt, Human
auauuuuccuaua

SEQ ID NO: 1329105 - RNA, 19 nt, Human
auauuuuccuauauuacgg

SEQ ID NO: 1329106 - RNA, 13 nt, Human
auauuuuccuccu

SEQ ID NO: 1329107 - RNA, 12 nt, Human
auauuuucucua

SEQ ID NO: 1329108 - RNA, 19 nt, Human
auauuuucucuaggaaaua

SEQ ID NO: 1329109 - RNA, 13 nt, Human
auauuuucucuag

SEQ ID NO: 1329110 - RNA, 16 nt, Human
auauuuucucuaggaa

SEQ ID NO: 1329111 - RNA, 12 nt, Human
auauuuucuguu

SEQ ID NO: 1329112 - RNA, 13 nt, Human
auauuuucuguuu

SEQ ID NO: 1329113 - RNA, 14 nt, Human
uuccuucagcacuu

SEQ ID NO: 1329114 - RNA, 21 nt, Human
uuccuucagagagcagugcuu

SEQ ID NO: 1329115 - RNA, 12 nt, Human
uuccuucagauu

SEQ ID NO: 1329116 - RNA, 22 nt, Human
uuccuucagagagcagugcuuu

SEQ ID NO: 1329117 - RNA, 20 nt, Human
uuccuucaaagcaaaugucu

SEQ ID NO: 1329118 - RNA, 22 nt, Human
uuccuuagacucuuuuccuucc

SEQ ID NO: 1329119 - RNA, 12 nt, Human
uuccucuccacu

SEQ ID NO: 1329120 - RNA, 15 nt, Human
uuccucuccacacag

SEQ ID NO: 1329121 - RNA, 15 nt, Human
uuccuacuggucucu

SEQ ID NO: 1329122 - RNA, 13 nt, Human
uuccucuccacug

SEQ ID NO: 1329123 - RNA, 14 nt, Human
uuccucuccacugc

SEQ ID NO: 1329124 - RNA, 15 nt, Human
uuccucuccacugcc

SEQ ID NO: 1329125 - RNA, 16 nt, Human
uuccucuccacugccu

SEQ ID NO: 1329126 - RNA, 14 nt, Human
uuccuggugcugga

SEQ ID NO: 1329127 - RNA, 15 nt, Human
uuccuggugcuggag

SEQ ID NO: 1329128 - RNA, 20 nt, Human
uuccuguauuuguucccaag

SEQ ID NO: 1329129 - RNA, 22 nt, Human
uuccuguauuuguucccaagag

SEQ ID NO: 1329130 - RNA, 21 nt, Human
uuccuguauuuguucccaaga

SEQ ID NO: 1329131 - RNA, 15 nt, Human
uuccuguccagcucc

SEQ ID NO: 1329132 - RNA, 16 nt, Human
uuccuguccagcucca

SEQ ID NO: 1329133 - RNA, 17 nt, Human
uuccuguccagcuccaa

SEQ ID NO: 1329134 - RNA, 22 nt, Human
uuccuguccagcuccaaccugc

SEQ ID NO: 1329135 - RNA, 13 nt, Human
auauuuuuagaua

SEQ ID NO: 1329136 - RNA, 15 nt, Human
aucaaauguuuaauc

SEQ ID NO: 1329137 - RNA, 14 nt, Human
aucaaauguuuaau

SEQ ID NO: 1329138 - RNA, 13 nt, Human
aucaaauguuuaa

SEQ ID NO: 1329139 - RNA, 12 nt, Human
aucaaauguuua

SEQ ID NO: 1329140 - RNA, 18 nt, Human
aucaaaugguaucuuuug

SEQ ID NO: 1329141 - RNA, 18 nt, Human
aucaaauguaacuuacug

SEQ ID NO: 1329142 - RNA, 20 nt, Human
aucaaaucuaccacuguaug

SEQ ID NO: 1329143 - RNA, 17 nt, Human
aucaaaugguaucuuuu

SEQ ID NO: 1329144 - RNA, 14 nt, Human
aucaaguuauuuuu

SEQ ID NO: 1329145 - RNA, 23 nt, Human
aucaagucuguuuacugcaaggu

SEQ ID NO: 1329146 - RNA, 15 nt, Human
aucaagucuguuuac

SEQ ID NO: 1329147 - RNA, 21 nt, Human
aucaaguauuugggaagugaa

SEQ ID NO: 1329148 - RNA, 20 nt, Human
aucaaguauuugggaaguga

SEQ ID NO: 1329149 - RNA, 13 nt, Human
aucaagucuguuu

SEQ ID NO: 1329150 - RNA, 22 nt, Human
aucaaguuggcuucuaaucaaa

SEQ ID NO: 1329151 - RNA, 23 nt, Human
aucaaguuggcuucuaaucaaag

SEQ ID NO: 1329152 - RNA, 18 nt, Human
aucaaauguuuaaucaua

SEQ ID NO: 1329153 - RNA, 18 nt, Human
aucaaccccagacacugg

SEQ ID NO: 1329154 - RNA, 19 nt, Human
aucaaccccagacacuggu

SEQ ID NO: 1329155 - RNA, 21 nt, Human
aucaaauguuuaaucauauaa

SEQ ID NO: 1329156 - RNA, 17 nt, Human
aucaaauguuuaaucau

SEQ ID NO: 1329157 - RNA, 16 nt, Human
aucaaauguuuaauca

SEQ ID NO: 1329158 - RNA, 23 nt, Human
uucucuuguauaagauccuagau

SEQ ID NO: 1329159 - RNA, 16 nt, Human
uucucuuuccaugaca

SEQ ID NO: 1329160 - RNA, 21 nt, Human
uucucuuucccuggucccuug

SEQ ID NO: 1329161 - RNA, 21 nt, Human
uucucuaauauggcaaccauu

SEQ ID NO: 1329162 - RNA, 21 nt, Human
uucucuaauucuuccuuugua

SEQ ID NO: 1329163 - RNA, 12 nt, Human
uucucuaauaug

SEQ ID NO: 1329164 - RNA, 24 nt, Human
uucucuaagagaacaaugugcuau

SEQ ID NO: 1329165 - RNA, 14 nt, Human
uucucuuucccugg

SEQ ID NO: 1329166 - RNA, 14 nt, Human
uucucuuugccuca

SEQ ID NO: 1329167 - RNA, 15 nt, Human
uucucuuugccucaa

SEQ ID NO: 1329168 - RNA, 15 nt, Human
uucucuuuuccuuug

SEQ ID NO: 1329169 - RNA, 13 nt, Human
uucugacagccuc

SEQ ID NO: 1329170 - RNA, 15 nt, Human
uucugcacacagcac

SEQ ID NO: 1329171 - RNA, 16 nt, Human
uucugcacuauaugca

SEQ ID NO: 1329172 - RNA, 22 nt, Human
uucugcacuugcgguuccggca

SEQ ID NO: 1329173 - RNA, 19 nt, Human
aucauugcuuccuccuccc

SEQ ID NO: 1329174 - RNA, 12 nt, Human
uucuccugccuc

SEQ ID NO: 1329175 - RNA, 13 nt, Human
uucuccugccuca

SEQ ID NO: 1329176 - RNA, 14 nt, Human
uucuccugccucag

SEQ ID NO: 1329177 - RNA, 19 nt, Human
uucucuaagagaacaaugu

SEQ ID NO: 1329178 - RNA, 21 nt, Human
uucuccugaggauguguccca

SEQ ID NO: 1329179 - RNA, 16 nt, Human
aucauuucacuuguca

SEQ ID NO: 1329180 - RNA, 18 nt, Human
aucauuucuauuaaauga

SEQ ID NO: 1329181 - RNA, 21 nt, Human
aucauuucuauuaaaugagca

SEQ ID NO: 1329182 - RNA, 15 nt, Human
aucauuucuauuucu

SEQ ID NO: 1329183 - RNA, 22 nt, Human
auccaauggacugcauaaauaa

SEQ ID NO: 1329184 - RNA, 16 nt, Human
auccaaguuaaaugua

SEQ ID NO: 1329185 - RNA, 21 nt, Human
auccaaguuaaauguagaguu

SEQ ID NO: 1329186 - RNA, 13 nt, Human
auccaaucaaucu

SEQ ID NO: 1329187 - RNA, 18 nt, Human
auccaaucaaucuugcau

SEQ ID NO: 1329188 - RNA, 13 nt, Human
auccaaaagaagc

SEQ ID NO: 1329189 - RNA, 18 nt, Human
auccaaaagaagccccca

SEQ ID NO: 1329190 - RNA, 19 nt, Human
auccaaaagaagcccccag

SEQ ID NO: 1329191 - RNA, 22 nt, Human
auccaaaagaagcccccagcua

SEQ ID NO: 1329192 - RNA, 13 nt, Human
auccaaaagcuuu

SEQ ID NO: 1329193 - RNA, 19 nt, Human
auccaaaaucuugaucagu

SEQ ID NO: 1329194 - RNA, 15 nt, Human
auccaaagcagacag

SEQ ID NO: 1329195 - RNA, 21 nt, Human
auccaaggugggguggaagcu

SEQ ID NO: 1329196 - RNA, 14 nt, Human
auccaaguuaaaug

SEQ ID NO: 1329197 - RNA, 15 nt, Human
auccaaguuaaaugu

SEQ ID NO: 1329198 - RNA, 14 nt, Human
auccauuucuaauu

SEQ ID NO: 1329199 - RNA, 15 nt, Human
auccauuucuaauua

SEQ ID NO: 1329200 - RNA, 23 nt, Human
auccauuucuaauuauguagcuc

SEQ ID NO: 1329201 - RNA, 20 nt, Human
aucccaaguagaaucucagu

SEQ ID NO: 1329202 - RNA, 15 nt, Human
aucccaccaacccuc

SEQ ID NO: 1329203 - RNA, 14 nt, Human
auccauacauuugu

SEQ ID NO: 1329204 - RNA, 11 nt, Human
auccauaaaga

SEQ ID NO: 1329205 - RNA, 14 nt, Human
auccauaacugaac

SEQ ID NO: 1329206 - RNA, 15 nt, Human
auccauaacugaaca

SEQ ID NO: 1329207 - RNA, 13 nt, Human
auccauuuccccu

SEQ ID NO: 1329208 - RNA, 18 nt, Human
auccauuuccccuccuuc

SEQ ID NO: 1329209 - RNA, 19 nt, Human
auccauuuccccuccuucc

SEQ ID NO: 1329210 - RNA, 12 nt, Human
auccauuucuaa

SEQ ID NO: 1329211 - RNA, 13 nt, Human
auccauuucuaau

SEQ ID NO: 1329212 - RNA, 22 nt, Human
uucugguugaugccugugaacu

SEQ ID NO: 1329213 - RNA, 18 nt, Human
uucugguguuggacaagc

SEQ ID NO: 1329214 - RNA, 12 nt, Human
uucugguucuaa

SEQ ID NO: 1329215 - RNA, 14 nt, Human
uucugguucuaaca

SEQ ID NO: 1329216 - RNA, 21 nt, Human
uucugguucuuguguuggcug

SEQ ID NO: 1329217 - RNA, 13 nt, Human
uucuguauaaaug

SEQ ID NO: 1329218 - RNA, 14 nt, Human
aucauuuuuuacuu

SEQ ID NO: 1329219 - RNA, 23 nt, Human
uucugguguuggacaagcuucug

SEQ ID NO: 1329220 - RNA, 15 nt, Human
uucugguuccagggu

SEQ ID NO: 1329221 - RNA, 17 nt, Human
uucugguuccagggucc

SEQ ID NO: 1329222 - RNA, 12 nt, Human
uugaaccaauaa

SEQ ID NO: 1329223 - RNA, 18 nt, Human
uugaacccgggaggcaga

SEQ ID NO: 1329224 - RNA, 20 nt, Human
uugaacacaaacuguaaaua

SEQ ID NO: 1329225 - RNA, 21 nt, Human
uugaacacaaacuguaaauaa

SEQ ID NO: 1329226 - RNA, 18 nt, Human
auccuaagggucgaaagc

SEQ ID NO: 1329227 - RNA, 19 nt, Human
auccuaagggucgaaagcu

SEQ ID NO: 1329228 - RNA, 21 nt, Human
auccuaagggucgaaagcucu

SEQ ID NO: 1329229 - RNA, 16 nt, Human
auccuaggcugacacc

SEQ ID NO: 1329230 - RNA, 14 nt, Human
auccuaggcugaca

SEQ ID NO: 1329231 - RNA, 12 nt, Human
auccuaaugaau

SEQ ID NO: 1329232 - RNA, 13 nt, Human
auccuaaugaaug

SEQ ID NO: 1329233 - RNA, 19 nt, Human
auccuaaugaaugcauaaa

SEQ ID NO: 1329234 - RNA, 22 nt, Human
auccuaagggucgaaagcucua

SEQ ID NO: 1329235 - RNA, 23 nt, Human
auccuaagggucgaaagcucuag

SEQ ID NO: 1329236 - RNA, 14 nt, Human
auccuacaagacac

SEQ ID NO: 1329237 - RNA, 19 nt, Human
uugaaauauugacuuuuua

SEQ ID NO: 1329238 - RNA, 18 nt, Human
uugaaauauccugcuuga

SEQ ID NO: 1329239 - RNA, 21 nt, Human
uugaaauauggucuuuugguu

SEQ ID NO: 1329240 - RNA, 14 nt, Human
uugaacacaaacug

SEQ ID NO: 1329241 - RNA, 15 nt, Human
uugaacacaaacugu

SEQ ID NO: 1329242 - RNA, 18 nt, Human
uugaacacaaacuguaaa

SEQ ID NO: 1329243 - RNA, 16 nt, Human
uugaaaguuuacagga

SEQ ID NO: 1329244 - RNA, 15 nt, Human
uucuuuuugaaguau

SEQ ID NO: 1329245 - RNA, 18 nt, Human
uucuuuuugaaguauuua

SEQ ID NO: 1329246 - RNA, 16 nt, Human
uucuuuuugaaguauu

SEQ ID NO: 1329247 - RNA, 19 nt, Human
uugaaagugggcaaaagcu

SEQ ID NO: 1329248 - RNA, 20 nt, Human
uugaaagugggcaaaagcuu

SEQ ID NO: 1329249 - RNA, 15 nt, Human
uugaaauaagcuauu

SEQ ID NO: 1329250 - RNA, 16 nt, Human
uugaaauaagaauuca

SEQ ID NO: 1329251 - RNA, 21 nt, Human
uugaaauaagaauucagacau

SEQ ID NO: 1329252 - RNA, 12 nt, Human
uugaaauaagcu

SEQ ID NO: 1329253 - RNA, 22 nt, Human
uucuuuuuacccauuuguucau

SEQ ID NO: 1329254 - RNA, 13 nt, Human
uucuuuucccccu

SEQ ID NO: 1329255 - RNA, 15 nt, Human
uucuguugcugccuc

SEQ ID NO: 1329256 - RNA, 16 nt, Human
uucuguugcugccuca

SEQ ID NO: 1329257 - RNA, 18 nt, Human
aucccaccuccaucccag

SEQ ID NO: 1329258 - RNA, 17 nt, Human
uucuguugcugccucau

SEQ ID NO: 1329259 - RNA, 17 nt, Human
uucuguuuuguuucgcu

SEQ ID NO: 1329260 - RNA, 14 nt, Human
uucuuaaaaaguua

SEQ ID NO: 1329261 - RNA, 15 nt, Human
uucuuaauguacaua

SEQ ID NO: 1329262 - RNA, 14 nt, Human
uucuuaauguacau

SEQ ID NO: 1329263 - RNA, 15 nt, Human
uucuuaaagugccag

SEQ ID NO: 1329264 - RNA, 21 nt, Human
uucuuaauguacauagugcua

SEQ ID NO: 1329265 - RNA, 20 nt, Human
uucuuaaagugccaguauuu

SEQ ID NO: 1329266 - RNA, 16 nt, Human
uucuuaaacacuugca

SEQ ID NO: 1329267 - RNA, 17 nt, Human
uucuuaaacacuugcaa

SEQ ID NO: 1329268 - RNA, 17 nt, Human
uucuuaaagucaagauu

SEQ ID NO: 1329269 - RNA, 11 nt, Human
uucuuccucug

SEQ ID NO: 1329270 - RNA, 12 nt, Human
uucuuccucugc

SEQ ID NO: 1329271 - RNA, 13 nt, Human
uucuuccucugcu

SEQ ID NO: 1329272 - RNA, 14 nt, Human
uucuuccuggccgc

SEQ ID NO: 1329273 - RNA, 13 nt, Human
uucuuccuggccg

SEQ ID NO: 1329274 - RNA, 13 nt, Human
uucuuacaaacca

SEQ ID NO: 1329275 - RNA, 14 nt, Human
uucuuacaaaccau

SEQ ID NO: 1329276 - RNA, 13 nt, Human
uucuuucuuccuc

SEQ ID NO: 1329277 - RNA, 15 nt, Human
uucuuucuuccucug

SEQ ID NO: 1329278 - RNA, 16 nt, Human
uucuugguugaggaaa

SEQ ID NO: 1329279 - RNA, 15 nt, Human
uucuuucugucuuua

SEQ ID NO: 1329280 - RNA, 20 nt, Human
uucuuugaaaaaaaauaaau

SEQ ID NO: 1329281 - RNA, 19 nt, Human
uucuuugaaaaaaaauaaa

SEQ ID NO: 1329282 - RNA, 12 nt, Human
uucuuuguguag

SEQ ID NO: 1329283 - RNA, 19 nt, Human
uucuuuguguagcuuugcu

SEQ ID NO: 1329284 - RNA, 17 nt, Human
uucuuuguuucuuucuu

SEQ ID NO: 1329285 - RNA, 14 nt, Human
uucuugauguaaaa

SEQ ID NO: 1329286 - RNA, 15 nt, Human
uucuugauguaaaau

SEQ ID NO: 1329287 - RNA, 20 nt, Human
uucuugauguaaaaucuugu

SEQ ID NO: 1329288 - RNA, 19 nt, Human
uucuugauguaaaaucuug

SEQ ID NO: 1329289 - RNA, 19 nt, Human
uucuucgacuguuguuauc

SEQ ID NO: 1329290 - RNA, 16 nt, Human
uucuucgacuguuguu

SEQ ID NO: 1329291 - RNA, 21 nt, Human
uucuugaauuuaauaaucugu

SEQ ID NO: 1329292 - RNA, 16 nt, Human
uucuuccuuuucacug

SEQ ID NO: 1329293 - RNA, 21 nt, Human
uucuuccuuuucacugcuguu

SEQ ID NO: 1329294 - RNA, 21 nt, Human
uucuugaggggaagcuagucu

SEQ ID NO: 1329295 - RNA, 23 nt, Human
uucuugaggggaagcuagucuuu

SEQ ID NO: 1329296 - RNA, 20 nt, Human
uucuugaggggaccaggagu

SEQ ID NO: 1329297 - RNA, 19 nt, Human
uucuugaggggaccaggag

SEQ ID NO: 1329298 - RNA, 17 nt, Human
uucuugcuucuuucuag

SEQ ID NO: 1329299 - RNA, 19 nt, Human
uucuugcuucuuucuagaa

SEQ ID NO: 1329300 - RNA, 17 nt, Human
uucuuggccaugggagg

SEQ ID NO: 1329301 - RNA, 22 nt, Human
auagcuuuucccuuuuuuuaag

SEQ ID NO: 1329302 - RNA, 15 nt, Human
auagcuuuuuucucu

SEQ ID NO: 1329303 - RNA, 16 nt, Human
uucacauuagaagaca

SEQ ID NO: 1329304 - RNA, 15 nt, Human
uucacauuagaagac

SEQ ID NO: 1329305 - RNA, 17 nt, Human
auaggcguaacuaauuu

SEQ ID NO: 1329306 - RNA, 14 nt, Human
auaggaccuuucca

SEQ ID NO: 1329307 - RNA, 20 nt, Human
auaggaccuuuccaccacag

SEQ ID NO: 1329308 - RNA, 23 nt, Human
auaggaccuuuccaccacagcca

SEQ ID NO: 1329309 - RNA, 13 nt, Human
uucacagaaaaua

SEQ ID NO: 1329310 - RNA, 19 nt, Human
uucacagccuauaaccaga

SEQ ID NO: 1329311 - RNA, 12 nt, Human
uucacagcuccu

SEQ ID NO: 1329312 - RNA, 20 nt, Human
uucacaguucuuugggccag

SEQ ID NO: 1329313 - RNA, 21 nt, Human
uucacaguucuuugggccaga

SEQ ID NO: 1329314 - RNA, 14 nt, Human
uucacaguuugaaa

SEQ ID NO: 1329315 - RNA, 16 nt, Human
uucacaguuugaaaua

SEQ ID NO: 1329316 - RNA, 17 nt, Human
uucacaguuugaaauaa

SEQ ID NO: 1329317 - RNA, 23 nt, Human
uucacaguuugaaauaagcuauu

SEQ ID NO: 1329318 - RNA, 22 nt, Human
uucacaguuugaaauaagcuau

SEQ ID NO: 1329319 - RNA, 21 nt, Human
uucacaucgcagauucucccu

SEQ ID NO: 1329320 - RNA, 18 nt, Human
uucacaucuaaccucauc

SEQ ID NO: 1329321 - RNA, 19 nt, Human
uucacaucuaaccucaucu

SEQ ID NO: 1329322 - RNA, 20 nt, Human
uucacaucuaaccucaucuu

SEQ ID NO: 1329323 - RNA, 13 nt, Human
uucacaucucauu

SEQ ID NO: 1329324 - RNA, 23 nt, Human
uucacaagacccaaaaggcagaa

SEQ ID NO: 1329325 - RNA, 17 nt, Human
uucaagugauucucaug

SEQ ID NO: 1329326 - RNA, 20 nt, Human
uucaagucuaccaauuauaa

SEQ ID NO: 1329327 - RNA, 15 nt, Human
uucaagguucuaacc

SEQ ID NO: 1329328 - RNA, 13 nt, Human
uucacaauguuaa

SEQ ID NO: 1329329 - RNA, 19 nt, Human
uucaagucaguucugugau

SEQ ID NO: 1329330 - RNA, 12 nt, Human
uucaaaagaaag

SEQ ID NO: 1329331 - RNA, 17 nt, Human
uucaaaaccuuuugaaa

SEQ ID NO: 1329332 - RNA, 18 nt, Human
uucaaaacauugugccau

SEQ ID NO: 1329333 - RNA, 17 nt, Human
uuauuuuuuucugaauu

SEQ ID NO: 1329334 - RNA, 13 nt, Human
uuauuuuuuucug

SEQ ID NO: 1329335 - RNA, 23 nt, Human
uuauuuuuuaaagaaaucuauuu

SEQ ID NO: 1329336 - RNA, 14 nt, Human
uuauuuuuuaauua

SEQ ID NO: 1329337 - RNA, 16 nt, Human
uuauuuuuuaauuauu

SEQ ID NO: 1329338 - RNA, 14 nt, Human
uuauuuuucuuguc

SEQ ID NO: 1329339 - RNA, 23 nt, Human
uuauuuuugacaguguugaaaau

SEQ ID NO: 1329340 - RNA, 23 nt, Human
uuauuuuuggcguggcugacuua

SEQ ID NO: 1329341 - RNA, 18 nt, Human
uuauuuuuacauucugaa

SEQ ID NO: 1329342 - RNA, 16 nt, Human
uuaguuuguguguugu

SEQ ID NO: 1329343 - RNA, 16 nt, Human
uuaguuuugaugaguu

SEQ ID NO: 1329344 - RNA, 12 nt, Human
uuaguuuugauu

SEQ ID NO: 1329345 - RNA, 13 nt, Human
uuaguuuuucauu

SEQ ID NO: 1329346 - RNA, 17 nt, Human
uuaguuuuucauuaaau

SEQ ID NO: 1329347 - RNA, 16 nt, Human
uuaguuuuucauuaaa

SEQ ID NO: 1329348 - RNA, 14 nt, Human
uucaaacauauaua

SEQ ID NO: 1329349 - RNA, 23 nt, Human
uucaagaauaaucacgcuuuccu

SEQ ID NO: 1329350 - RNA, 13 nt, Human
uucaaaagaaagu

SEQ ID NO: 1329351 - RNA, 20 nt, Human
uucaaaaccagguccaauga

SEQ ID NO: 1329352 - RNA, 12 nt, Human
uucaaaaguucc

SEQ ID NO: 1329353 - RNA, 14 nt, Human
uucaaaaguuccaa

SEQ ID NO: 1329354 - RNA, 15 nt, Human
uucaaaaguuccaag

SEQ ID NO: 1329355 - RNA, 21 nt, Human
uucaaaauuguuacaaauugu

SEQ ID NO: 1329356 - RNA, 20 nt, Human
uucaaaaguuuguuugcuua

SEQ ID NO: 1329357 - RNA, 16 nt, Human
uucaaaaguuccaaga

SEQ ID NO: 1329358 - RNA, 16 nt, Human
uucaagcaauccuccc

SEQ ID NO: 1329359 - RNA, 14 nt, Human
uucaagcaauccuc

SEQ ID NO: 1329360 - RNA, 17 nt, Human
uucaagaucccauuuga

SEQ ID NO: 1329361 - RNA, 23 nt, Human
uucaagaggagcccccacccugu

SEQ ID NO: 1329362 - RNA, 15 nt, Human
uucaagaggagcccc

SEQ ID NO: 1329363 - RNA, 21 nt, Human
uucaagaggagcccccacccu

SEQ ID NO: 1329364 - RNA, 22 nt, Human
uucaagaggagcccccacccug

SEQ ID NO: 1329365 - RNA, 18 nt, Human
uucaagcgauucuccugc

SEQ ID NO: 1329366 - RNA, 20 nt, Human
uucaagccugugcaaugcau

SEQ ID NO: 1329367 - RNA, 11 nt, Human
uucaagauucc

SEQ ID NO: 1329368 - RNA, 23 nt, Human
uucaagcagucgugccugugucc

SEQ ID NO: 1329369 - RNA, 17 nt, Human
uucaagcagucgugccu

SEQ ID NO: 1329370 - RNA, 18 nt, Human
uucaagcagucgugccug

SEQ ID NO: 1329371 - RNA, 22 nt, Human
uucaagcagucgugccuguguc

SEQ ID NO: 1329372 - RNA, 17 nt, Human
uucaaggucugcuuuuc

SEQ ID NO: 1329373 - RNA, 14 nt, Human
uucaagguucuaac

SEQ ID NO: 1329374 - RNA, 16 nt, Human
uucaaggaauuucuua

SEQ ID NO: 1329375 - RNA, 21 nt, Human
uucaagcgauucuccugccuc

SEQ ID NO: 1329376 - RNA, 12 nt, Human
uucaagcucuga

SEQ ID NO: 1329377 - RNA, 14 nt, Human
uucaagcucugagg

SEQ ID NO: 1329378 - RNA, 16 nt, Human
uucaagcucugaggga

SEQ ID NO: 1329379 - RNA, 21 nt, Human
auauauauuuuuuucugaaau

SEQ ID NO: 1329380 - RNA, 23 nt, Human
auauauauucuauuacauuuuca

SEQ ID NO: 1329381 - RNA, 20 nt, Human
auauauauuaucuuuucaua

SEQ ID NO: 1329382 - RNA, 17 nt, Human
auauaucacccagacau

SEQ ID NO: 1329383 - RNA, 21 nt, Human
auauaucacccagacauaaag

SEQ ID NO: 1329384 - RNA, 15 nt, Human
auauaucaugaguga

SEQ ID NO: 1329385 - RNA, 15 nt, Human
auauauauguacagu

SEQ ID NO: 1329386 - RNA, 16 nt, Human
auauauauguacaguu

SEQ ID NO: 1329387 - RNA, 20 nt, Human
auauauauguacaguuaucu

SEQ ID NO: 1329388 - RNA, 12 nt, Human
auauauauuaua

SEQ ID NO: 1329389 - RNA, 14 nt, Human
auauauauuauacu

SEQ ID NO: 1329390 - RNA, 16 nt, Human
auauauauuaucuuuu

SEQ ID NO: 1329391 - RNA, 16 nt, Human
auauauauauauaugu

SEQ ID NO: 1329392 - RNA, 14 nt, Human
auauauauauaugu

SEQ ID NO: 1329393 - RNA, 15 nt, Human
auauauauauguaca

SEQ ID NO: 1329394 - RNA, 15 nt, Human
auauauauaaauaua

SEQ ID NO: 1329395 - RNA, 14 nt, Human
auauauauaaauau

SEQ ID NO: 1329396 - RNA, 15 nt, Human
auauauauauaaaga

SEQ ID NO: 1329397 - RNA, 15 nt, Human
uucacuuacagcacc

SEQ ID NO: 1329398 - RNA, 13 nt, Human
uucacugugcugu

SEQ ID NO: 1329399 - RNA, 18 nt, Human
uucacugugcuguuguua

SEQ ID NO: 1329400 - RNA, 12 nt, Human
uucacugugcug

SEQ ID NO: 1329401 - RNA, 16 nt, Human
uucacugucuuuaauu

SEQ ID NO: 1329402 - RNA, 15 nt, Human
uucacuuaacaaaca

SEQ ID NO: 1329403 - RNA, 22 nt, Human
uucacuuaaguuaguuccacug

SEQ ID NO: 1329404 - RNA, 13 nt, Human
auauaugaggacu

SEQ ID NO: 1329405 - RNA, 23 nt, Human
uucacugucaccacccugcucau

SEQ ID NO: 1329406 - RNA, 20 nt, Human
uucacugucaccacccugcu

SEQ ID NO: 1329407 - RNA, 19 nt, Human
uucacugucuuuaauucug

SEQ ID NO: 1329408 - RNA, 24 nt, Human
auauaucuaccccagacuagaugu

SEQ ID NO: 1329409 - RNA, 14 nt, Human
auauauaacaaugc

SEQ ID NO: 1329410 - RNA, 11 nt, Human
auauauaaaua

SEQ ID NO: 1329411 - RNA, 13 nt, Human
auauauaaauaua

SEQ ID NO: 1329412 - RNA, 10 nt, Human
auauauaaau

SEQ ID NO: 1329413 - RNA, 14 nt, Human
auauauaaauauau

SEQ ID NO: 1329414 - RNA, 18 nt, Human
auauauaaauauauuauu

SEQ ID NO: 1329415 - RNA, 19 nt, Human
auauauaaauauauuauua

SEQ ID NO: 1329416 - RNA, 15 nt, Human
auauauaaguguaca

SEQ ID NO: 1329417 - RNA, 16 nt, Human
auauauaaguguacau

SEQ ID NO: 1329418 - RNA, 20 nt, Human
auauauaaguguacauaugu

SEQ ID NO: 1329419 - RNA, 22 nt, Human
auauaaauagaauguaaauguc

SEQ ID NO: 1329420 - RNA, 13 nt, Human
auauaacuaacaa

SEQ ID NO: 1329421 - RNA, 17 nt, Human
auauaacuguauuugaa

SEQ ID NO: 1329422 - RNA, 20 nt, Human
auauaacuguauuugaaaua

SEQ ID NO: 1329423 - RNA, 21 nt, Human
auauaaauagaauguaaaugu

SEQ ID NO: 1329424 - RNA, 19 nt, Human
auauaaauagaauguaaau

SEQ ID NO: 1329425 - RNA, 15 nt, Human
auauaaauagaaugu

SEQ ID NO: 1329426 - RNA, 13 nt, Human
auauaaaguuuua

SEQ ID NO: 1329427 - RNA, 17 nt, Human
auauaaaguuuuauaua

SEQ ID NO: 1329428 - RNA, 22 nt, Human
auauaaaguuuuauauauuaua

SEQ ID NO: 1329429 - RNA, 19 nt, Human
auauaaaguuuuauauauu

SEQ ID NO: 1329430 - RNA, 19 nt, Human
auauaaaguaguccuguga

SEQ ID NO: 1329431 - RNA, 24 nt, Human
auauaaaguaucaucaguguagaa

SEQ ID NO: 1329432 - RNA, 21 nt, Human
auagucucuuuaaaaggaaag

SEQ ID NO: 1329433 - RNA, 14 nt, Human
auagucucuuuaaa

SEQ ID NO: 1329434 - RNA, 19 nt, Human
auaggcggggcuugccuuc

SEQ ID NO: 1329435 - RNA, 20 nt, Human
auaggcggggcuugccuucu

SEQ ID NO: 1329436 - RNA, 21 nt, Human
auagugaggcaucgcaaugua

SEQ ID NO: 1329437 - RNA, 20 nt, Human
auagugauguaaucuugaau

SEQ ID NO: 1329438 - RNA, 19 nt, Human
auagugcuaacaugaagac

SEQ ID NO: 1329439 - RNA, 14 nt, Human
auagugcuaacaug

SEQ ID NO: 1329440 - RNA, 14 nt, Human
auagucuuuugcuu

SEQ ID NO: 1329441 - RNA, 16 nt, Human
auagucuuuugcuuuu

SEQ ID NO: 1329442 - RNA, 17 nt, Human
auagucuuuugcuuuug

SEQ ID NO: 1329443 - RNA, 16 nt, Human
auagucuuuggagaaa

SEQ ID NO: 1329444 - RNA, 18 nt, Human
auagucuuuuucaguucc

SEQ ID NO: 1329445 - RNA, 13 nt, Human
auagugaauacug

SEQ ID NO: 1329446 - RNA, 21 nt, Human
auagugcuaacaugaagaccu

SEQ ID NO: 1329447 - RNA, 22 nt, Human
auagugcuaacaugaagaccuu

SEQ ID NO: 1329448 - RNA, 19 nt, Human
auaguguagcugaggaggc

SEQ ID NO: 1329449 - RNA, 14 nt, Human
auaguuaacacacu

SEQ ID NO: 1329450 - RNA, 15 nt, Human
auaguuaacacacua

SEQ ID NO: 1329451 - RNA, 17 nt, Human
auaguuaacacacuacc

SEQ ID NO: 1329452 - RNA, 13 nt, Human
auaguuacugugu

SEQ ID NO: 1329453 - RNA, 14 nt, Human
auaguuacugugua

SEQ ID NO: 1329454 - RNA, 17 nt, Human
auaguuacuguguaauu

SEQ ID NO: 1329455 - RNA, 18 nt, Human
auaguuacuguguaauua

SEQ ID NO: 1329456 - RNA, 20 nt, Human
auaguuacuguguaauuagu

SEQ ID NO: 1329457 - RNA, 15 nt, Human
auaguuagaaccugg

SEQ ID NO: 1329458 - RNA, 16 nt, Human
auaguuagcuaauaaa

SEQ ID NO: 1329459 - RNA, 21 nt, Human
auaguucagaauuuaguguau

SEQ ID NO: 1329460 - RNA, 18 nt, Human
auaguucagaauuuagug

SEQ ID NO: 1329461 - RNA, 15 nt, Human
auaguuccugcuaaa

SEQ ID NO: 1329462 - RNA, 12 nt, Human
auaguucuagac

SEQ ID NO: 1329463 - RNA, 13 nt, Human
auaguucuagaca

SEQ ID NO: 1329464 - RNA, 14 nt, Human
auaguucuagacau

SEQ ID NO: 1329465 - RNA, 23 nt, Human
auaguucuagacauggagguucu

SEQ ID NO: 1329466 - RNA, 12 nt, Human
auaguucuaggc

SEQ ID NO: 1329467 - RNA, 20 nt, Human
auaguuguaccgcaauguga

SEQ ID NO: 1329468 - RNA, 13 nt, Human
auaguuguaacua

SEQ ID NO: 1329469 - RNA, 13 nt, Human
auaguuuucaucc

SEQ ID NO: 1329470 - RNA, 20 nt, Human
auaguuuucauccauaacug

SEQ ID NO: 1329471 - RNA, 23 nt, Human
auaguuuucauccauaacugaac

SEQ ID NO: 1329472 - RNA, 22 nt, Human
auaguuuucauccauaacugaa

SEQ ID NO: 1329473 - RNA, 14 nt, Human
uucauuccuccagg

SEQ ID NO: 1329474 - RNA, 22 nt, Human
uucauuccuucagauuuggcuu

SEQ ID NO: 1329475 - RNA, 21 nt, Human
uucauuccuucagauuuggcu

SEQ ID NO: 1329476 - RNA, 18 nt, Human
uucauucucccuuucacu

SEQ ID NO: 1329477 - RNA, 18 nt, Human
uucauucugcaaguauac

SEQ ID NO: 1329478 - RNA, 13 nt, Human
uucauucugcaag

SEQ ID NO: 1329479 - RNA, 13 nt, Human
uucauuccuccag

SEQ ID NO: 1329480 - RNA, 12 nt, Human
uucauuccucca

SEQ ID NO: 1329481 - RNA, 22 nt, Human
uucauucaugucauguguacaa

SEQ ID NO: 1329482 - RNA, 16 nt, Human
uucauuccauucugga

SEQ ID NO: 1329483 - RNA, 18 nt, Human
auaugugcuggaauucua

SEQ ID NO: 1329484 - RNA, 19 nt, Human
auaugugcuggaauucuaa

SEQ ID NO: 1329485 - RNA, 9 nt, Human
uucauucag

SEQ ID NO: 1329486 - RNA, 12 nt, Human
uuccaagagucu

SEQ ID NO: 1329487 - RNA, 13 nt, Human
uuccaagagucua

SEQ ID NO: 1329488 - RNA, 14 nt, Human
uuccaagagucuaa

SEQ ID NO: 1329489 - RNA, 21 nt, Human
uucauuuagcuaaacggauuc

SEQ ID NO: 1329490 - RNA, 14 nt, Human
uucauugucuguga

SEQ ID NO: 1329491 - RNA, 23 nt, Human
uuccacccagugcugaauuuccc

SEQ ID NO: 1329492 - RNA, 19 nt, Human
uuccacccaggggcagccc

SEQ ID NO: 1329493 - RNA, 21 nt, Human
uuccacccaggggcagcccca

SEQ ID NO: 1329494 - RNA, 13 nt, Human
uuccacagaggac

SEQ ID NO: 1329495 - RNA, 10 nt, Human
uuccacagac

SEQ ID NO: 1329496 - RNA, 12 nt, Human
uuccacagacgg

SEQ ID NO: 1329497 - RNA, 12 nt, Human
uuccacccaggg

SEQ ID NO: 1329498 - RNA, 24 nt, Human
uuccagcuagugacccacaugcca

SEQ ID NO: 1329499 - RNA, 23 nt, Human
uuccagcuagugacccacaugcc

SEQ ID NO: 1329500 - RNA, 14 nt, Human
uuccagcuccugua

SEQ ID NO: 1329501 - RNA, 11 nt, Human
uuccagcuccu

SEQ ID NO: 1329502 - RNA, 18 nt, Human
uuccagcuggaugagaau

SEQ ID NO: 1329503 - RNA, 17 nt, Human
uuccagcugucccccca

SEQ ID NO: 1329504 - RNA, 16 nt, Human
uuccaggacuguuuca

SEQ ID NO: 1329505 - RNA, 20 nt, Human
uuccaggacuguuucaaaca

SEQ ID NO: 1329506 - RNA, 21 nt, Human
uuccaggacuguuucaaacau

SEQ ID NO: 1329507 - RNA, 23 nt, Human
uuccaggacuguuucaaacaugc

SEQ ID NO: 1329508 - RNA, 15 nt, Human
uuccacaccuuuuau

SEQ ID NO: 1329509 - RNA, 22 nt, Human
uuccacaccuuuuauugacaca

SEQ ID NO: 1329510 - RNA, 15 nt, Human
uuccaagagucuaaa

SEQ ID NO: 1329511 - RNA, 17 nt, Human
uuccaagagucuaaaga

SEQ ID NO: 1329512 - RNA, 15 nt, Human
uuccaagucuccacc

SEQ ID NO: 1329513 - RNA, 16 nt, Human
uuccaaguugcuaaua

SEQ ID NO: 1329514 - RNA, 18 nt, Human
uucccaacuccagaaagu

SEQ ID NO: 1329515 - RNA, 13 nt, Human
uucccaacacaaa

SEQ ID NO: 1329516 - RNA, 15 nt, Human
uucccaacacaaaga

SEQ ID NO: 1329517 - RNA, 20 nt, Human
uucccaagagcaucaugccu

SEQ ID NO: 1329518 - RNA, 21 nt, Human
uucccaagagcaucaugccuc

SEQ ID NO: 1329519 - RNA, 22 nt, Human
uucccaagagcaucaugccucu

SEQ ID NO: 1329520 - RNA, 11 nt, Human
uucccaagcuc

SEQ ID NO: 1329521 - RNA, 13 nt, Human
uucccaagggcug

SEQ ID NO: 1329522 - RNA, 16 nt, Human
uucccaagggcugccg

SEQ ID NO: 1329523 - RNA, 23 nt, Human
uucccaagugagucucucugggc

SEQ ID NO: 1329524 - RNA, 14 nt, Human
uucccaauucacau

SEQ ID NO: 1329525 - RNA, 13 nt, Human
uucccaauugcuu

SEQ ID NO: 1329526 - RNA, 18 nt, Human
uucccacaggacauuucu

SEQ ID NO: 1329527 - RNA, 16 nt, Human
uucccacauuaaagaa

SEQ ID NO: 1329528 - RNA, 13 nt, Human
uucccacauuugu

SEQ ID NO: 1329529 - RNA, 16 nt, Human
uucccacauuugucuu

SEQ ID NO: 1329530 - RNA, 21 nt, Human
uucccacccaauucaaaacau

SEQ ID NO: 1329531 - RNA, 22 nt, Human
uucccaccccaaccugcucucc

SEQ ID NO: 1329532 - RNA, 20 nt, Human
uucccaccccaaccugcucu

SEQ ID NO: 1329533 - RNA, 21 nt, Human
uucccaccccaaccugcucuc

SEQ ID NO: 1329534 - RNA, 14 nt, Human
uucccacgaggaau

SEQ ID NO: 1329535 - RNA, 23 nt, Human
uucccaaaggcauuauaaaaaga

SEQ ID NO: 1329536 - RNA, 17 nt, Human
uuccaguucuucgacug

SEQ ID NO: 1329537 - RNA, 19 nt, Human
uuccauaaucuggacuccu

SEQ ID NO: 1329538 - RNA, 22 nt, Human
uuccauaaucuggacuccucug

SEQ ID NO: 1329539 - RNA, 23 nt, Human
uuccauaaucuggacuccucugu

SEQ ID NO: 1329540 - RNA, 16 nt, Human
uuccagggucccucug

SEQ ID NO: 1329541 - RNA, 18 nt, Human
uuccagggucccucugug

SEQ ID NO: 1329542 - RNA, 19 nt, Human
uuccagggucccucugugu

SEQ ID NO: 1329543 - RNA, 20 nt, Human
uuccagggucccucugugua

SEQ ID NO: 1329544 - RNA, 22 nt, Human
uuccagguagcugaaaggggaa

SEQ ID NO: 1329545 - RNA, 15 nt, Human
auauauuuuaagacg

SEQ ID NO: 1329546 - RNA, 14 nt, Human
auauauuuuaagac

SEQ ID NO: 1329547 - RNA, 21 nt, Human
auaucuagguuuaugacagua

SEQ ID NO: 1329548 - RNA, 19 nt, Human
auaucuagguuuaugacag

SEQ ID NO: 1329549 - RNA, 18 nt, Human
auaucuagguuuaugaca

SEQ ID NO: 1329550 - RNA, 17 nt, Human
auaucuagguuuaugac

SEQ ID NO: 1329551 - RNA, 22 nt, Human
auaucuagguuuaugacaguaa

SEQ ID NO: 1329552 - RNA, 23 nt, Human
auaucuagguuuaugacaguaau

SEQ ID NO: 1329553 - RNA, 19 nt, Human
auaucuccgucaacucaua

SEQ ID NO: 1329554 - RNA, 20 nt, Human
auaucuccgucaacucauau

SEQ ID NO: 1329555 - RNA, 21 nt, Human
auaucuccgucaacucauauu

SEQ ID NO: 1329556 - RNA, 12 nt, Human
auaucucaucuc

SEQ ID NO: 1329557 - RNA, 13 nt, Human
auaucuccugaaa

SEQ ID NO: 1329558 - RNA, 15 nt, Human
auaucuccugaaaag

SEQ ID NO: 1329559 - RNA, 22 nt, Human
auaucuccugaaaagguuuaug

SEQ ID NO: 1329560 - RNA, 23 nt, Human
auaucuccugaaaagguuuauga

SEQ ID NO: 1329561 - RNA, 12 nt, Human
auaugauucaaa

SEQ ID NO: 1329562 - RNA, 21 nt, Human
auaugauguuaaaaaaauaag

SEQ ID NO: 1329563 - RNA, 15 nt, Human
auaugauguuaaaaa

SEQ ID NO: 1329564 - RNA, 15 nt, Human
auaugaucugucugu

SEQ ID NO: 1329565 - RNA, 16 nt, Human
auaugaucugucugug

SEQ ID NO: 1329566 - RNA, 17 nt, Human
auaugaucugucugugg

SEQ ID NO: 1329567 - RNA, 13 nt, Human
auaugaaagcuga

SEQ ID NO: 1329568 - RNA, 12 nt, Human
auauguaaaaca

SEQ ID NO: 1329569 - RNA, 13 nt, Human
auauguaaaacau

SEQ ID NO: 1329570 - RNA, 14 nt, Human
auauguaaaacauu

SEQ ID NO: 1329571 - RNA, 15 nt, Human
auauguaaaacauuu

SEQ ID NO: 1329572 - RNA, 16 nt, Human
auauguaaaacauuua

SEQ ID NO: 1329573 - RNA, 18 nt, Human
auauguaaaacauuuauu

SEQ ID NO: 1329574 - RNA, 24 nt, Human
auauguaaaacauuuauuuugaca

SEQ ID NO: 1329575 - RNA, 22 nt, Human
auauguaaaugguaugucauuc

SEQ ID NO: 1329576 - RNA, 14 nt, Human
auauguacaguuau

SEQ ID NO: 1329577 - RNA, 16 nt, Human
auauguacaguuaucu

SEQ ID NO: 1329578 - RNA, 14 nt, Human
auauguacaugaga

SEQ ID NO: 1329579 - RNA, 11 nt, Human
auauguaccaa

SEQ ID NO: 1329580 - RNA, 14 nt, Human
auauguaccaugua

SEQ ID NO: 1329581 - RNA, 19 nt, Human
auauguaccauguacauga

SEQ ID NO: 1329582 - RNA, 17 nt, Human
auauguacccucugaaa

SEQ ID NO: 1329583 - RNA, 19 nt, Human
auauguacccucugaaaua

SEQ ID NO: 1329584 - RNA, 20 nt, Human
auauguacccucugaaauac

SEQ ID NO: 1329585 - RNA, 19 nt, Human
uucauaauuauuauuuggc

SEQ ID NO: 1329586 - RNA, 14 nt, Human
uucauacaaagcau

SEQ ID NO: 1329587 - RNA, 22 nt, Human
uucauauuaagaaugaucugau

SEQ ID NO: 1329588 - RNA, 16 nt, Human
uucauauuaagaauga

SEQ ID NO: 1329589 - RNA, 20 nt, Human
uucauauguaccauguacau

SEQ ID NO: 1329590 - RNA, 15 nt, Human
uucacuucacugugc

SEQ ID NO: 1329591 - RNA, 14 nt, Human
uucacuucacugug

SEQ ID NO: 1329592 - RNA, 12 nt, Human
uucacuucacug

SEQ ID NO: 1329593 - RNA, 22 nt, Human
uucagaaaugaggccauggacu

SEQ ID NO: 1329594 - RNA, 13 nt, Human
auauauuuuaaga

SEQ ID NO: 1329595 - RNA, 12 nt, Human
auauauuuuaag

SEQ ID NO: 1329596 - RNA, 18 nt, Human
auauauuuaaaaguguca

SEQ ID NO: 1329597 - RNA, 18 nt, Human
auauauuuaaaauauauu

SEQ ID NO: 1329598 - RNA, 15 nt, Human
auauauugaauauuu

SEQ ID NO: 1329599 - RNA, 18 nt, Human
auauauugaauauuuuau

SEQ ID NO: 1329600 - RNA, 13 nt, Human
auauauugaauua

SEQ ID NO: 1329601 - RNA, 14 nt, Human
auauauugaauuaa

SEQ ID NO: 1329602 - RNA, 16 nt, Human
auauauuuaaaaauaa

SEQ ID NO: 1329603 - RNA, 21 nt, Human
uucaucccacuccaacucuuc

SEQ ID NO: 1329604 - RNA, 23 nt, Human
uucauauuguugcauugcuuuuu

SEQ ID NO: 1329605 - RNA, 15 nt, Human
uucauccauaacuga

SEQ ID NO: 1329606 - RNA, 17 nt, Human
uucauccauaacugaac

SEQ ID NO: 1329607 - RNA, 24 nt, Human
uucaucccaaaggacagccgccug

SEQ ID NO: 1329608 - RNA, 14 nt, Human
auauauguacaguu

SEQ ID NO: 1329609 - RNA, 15 nt, Human
auauauguauauaca

SEQ ID NO: 1329610 - RNA, 12 nt, Human
auauauguauuu

SEQ ID NO: 1329611 - RNA, 13 nt, Human
auauauguacagu

SEQ ID NO: 1329612 - RNA, 17 nt, Human
uuagggaaaacauucca

SEQ ID NO: 1329613 - RNA, 16 nt, Human
uuagggaacaauuugg

SEQ ID NO: 1329614 - RNA, 15 nt, Human
uuagggaaaacauuc

SEQ ID NO: 1329615 - RNA, 21 nt, Human
uuagccuuuuuuccccagacu

SEQ ID NO: 1329616 - RNA, 14 nt, Human
uuagggaagggccu

SEQ ID NO: 1329617 - RNA, 18 nt, Human
uuaggugcaauuucaagg

SEQ ID NO: 1329618 - RNA, 22 nt, Human
uuaggugcaauuucaagguucu

SEQ ID NO: 1329619 - RNA, 20 nt, Human
uuaguuucugaguuuuacca

SEQ ID NO: 1329620 - RNA, 13 nt, Human
uuaguuucugagu

SEQ ID NO: 1329621 - RNA, 15 nt, Human
uuaguuuguauauau

SEQ ID NO: 1329622 - RNA, 15 nt, Human
uuaguuuguguguug

SEQ ID NO: 1329623 - RNA, 14 nt, Human
uuaggugucugucc

SEQ ID NO: 1329624 - RNA, 18 nt, Human
uuaguaaagucaaggaga

SEQ ID NO: 1329625 - RNA, 12 nt, Human
uuaguaaaccaa

SEQ ID NO: 1329626 - RNA, 12 nt, Human
uuaguaacaugu

SEQ ID NO: 1329627 - RNA, 23 nt, Human
uuaguaacauguguuaaguauuu

SEQ ID NO: 1329628 - RNA, 22 nt, Human
uuaguuucaguagauugcagaa

SEQ ID NO: 1329629 - RNA, 11 nt, Human
uuaguuuccuu

SEQ ID NO: 1329630 - RNA, 20 nt, Human
uuaguuuccuuuuuaauaug

SEQ ID NO: 1329631 - RNA, 12 nt, Human
uuagcaccaggg

SEQ ID NO: 1329632 - RNA, 23 nt, Human
auaauuuaccuaagauuacaaau

SEQ ID NO: 1329633 - RNA, 23 nt, Human
auaauuguuguucuguuaacuga

SEQ ID NO: 1329634 - RNA, 22 nt, Human
uuagcaaagauaucucaucucu

SEQ ID NO: 1329635 - RNA, 13 nt, Human
auaauuuaccuaa

SEQ ID NO: 1329636 - RNA, 16 nt, Human
auaauuuaccuaagau

SEQ ID NO: 1329637 - RNA, 21 nt, Human
auaauuguuuuaucugaauuu

SEQ ID NO: 1329638 - RNA, 21 nt, Human
auaauuguuguucuguuaacu

SEQ ID NO: 1329639 - RNA, 22 nt, Human
auaauuguuguucuguuaacug

SEQ ID NO: 1329640 - RNA, 23 nt, Human
auaauuguucucagaaucccuua

SEQ ID NO: 1329641 - RNA, 15 nt, Human
auaauuguucucaga

SEQ ID NO: 1329642 - RNA, 15 nt, Human
auaauuguuguucug

SEQ ID NO: 1329643 - RNA, 17 nt, Human
auaauuguuguucuguu

SEQ ID NO: 1329644 - RNA, 18 nt, Human
auaauuguuguucuguua

SEQ ID NO: 1329645 - RNA, 19 nt, Human
auaauuguuguucuguuaa

SEQ ID NO: 1329646 - RNA, 15 nt, Human
uuagccaguaauccu

SEQ ID NO: 1329647 - RNA, 20 nt, Human
uuagcauuuucugcaucucc

SEQ ID NO: 1329648 - RNA, 19 nt, Human
uuagcauguuguugaaagg

SEQ ID NO: 1329649 - RNA, 22 nt, Human
uuagcauuguagugcuuugaga

SEQ ID NO: 1329650 - RNA, 21 nt, Human
uuagccuucucuguucauuuc

SEQ ID NO: 1329651 - RNA, 12 nt, Human
uuagccuguccu

SEQ ID NO: 1329652 - RNA, 17 nt, Human
uuagccuuuuuucccca

SEQ ID NO: 1329653 - RNA, 18 nt, Human
uuagccuuuuuuccccag

SEQ ID NO: 1329654 - RNA, 20 nt, Human
uuagccuuuuuuccccagac

SEQ ID NO: 1329655 - RNA, 23 nt, Human
uuagccuuuuuuccccagacuug

SEQ ID NO: 1329656 - RNA, 15 nt, Human
uuagccuucucuguu

SEQ ID NO: 1329657 - RNA, 17 nt, Human
uuagccuucucuguuca

SEQ ID NO: 1329658 - RNA, 22 nt, Human
uuagccuggaccucugacagca

SEQ ID NO: 1329659 - RNA, 14 nt, Human
uuagccuguccugu

SEQ ID NO: 1329660 - RNA, 12 nt, Human
uuagccuucucu

SEQ ID NO: 1329661 - RNA, 14 nt, Human
uuagccuucucugu

SEQ ID NO: 1329662 - RNA, 19 nt, Human
auaauacuugcuuuggaaa

SEQ ID NO: 1329663 - RNA, 22 nt, Human
auaauacugcugagauacauac

SEQ ID NO: 1329664 - RNA, 12 nt, Human
auaauagauucu

SEQ ID NO: 1329665 - RNA, 21 nt, Human
auaauacugcugagauacaua

SEQ ID NO: 1329666 - RNA, 15 nt, Human
auaauaaauguacau

SEQ ID NO: 1329667 - RNA, 18 nt, Human
auaauaaaggacuguaau

SEQ ID NO: 1329668 - RNA, 13 nt, Human
auaauaaaggacu

SEQ ID NO: 1329669 - RNA, 11 nt, Human
auaauaaagga

SEQ ID NO: 1329670 - RNA, 23 nt, Human
auaauaaagaauagcuuuaauga

SEQ ID NO: 1329671 - RNA, 13 nt, Human
auaauaaagaaua

SEQ ID NO: 1329672 - RNA, 14 nt, Human
auaauaaagaauag

SEQ ID NO: 1329673 - RNA, 15 nt, Human
auaagagaaucaaca

SEQ ID NO: 1329674 - RNA, 16 nt, Human
auaagaauucagacau

SEQ ID NO: 1329675 - RNA, 17 nt, Human
auaagaauuauuuugau

SEQ ID NO: 1329676 - RNA, 17 nt, Human
auaagacggauuuauuu

SEQ ID NO: 1329677 - RNA, 21 nt, Human
auaagacggauuuauuuuucc

SEQ ID NO: 1329678 - RNA, 18 nt, Human
auaauccuaaacauauga

SEQ ID NO: 1329679 - RNA, 13 nt, Human
auaauagauucuc

SEQ ID NO: 1329680 - RNA, 18 nt, Human
auaaucuggacuccucug

SEQ ID NO: 1329681 - RNA, 19 nt, Human
auaaucuggacuccucugu

SEQ ID NO: 1329682 - RNA, 20 nt, Human
auaaucuggacuccucuguc

SEQ ID NO: 1329683 - RNA, 22 nt, Human
auaaucuggacuccucugucca

SEQ ID NO: 1329684 - RNA, 12 nt, Human
auaaucuagaac

SEQ ID NO: 1329685 - RNA, 15 nt, Human
auaaucuagaacaca

SEQ ID NO: 1329686 - RNA, 23 nt, Human
auaauucuuucaauacagauaua

SEQ ID NO: 1329687 - RNA, 15 nt, Human
auaauucuuucaaua

SEQ ID NO: 1329688 - RNA, 19 nt, Human
auaauucuuucaauacaga

SEQ ID NO: 1329689 - RNA, 22 nt, Human
auaaaguuuuauauauuauaug

SEQ ID NO: 1329690 - RNA, 14 nt, Human
auaaaguuuuauau

SEQ ID NO: 1329691 - RNA, 17 nt, Human
auaaaguuuuauauauu

SEQ ID NO: 1329692 - RNA, 18 nt, Human
auaaaguuuuauauauua

SEQ ID NO: 1329693 - RNA, 20 nt, Human
auaaaguuuuauauauuaua

SEQ ID NO: 1329694 - RNA, 21 nt, Human
auaaaguuuuauauauuauau

SEQ ID NO: 1329695 - RNA, 14 nt, Human
auaaauaaaaauaa

SEQ ID NO: 1329696 - RNA, 15 nt, Human
auaaauaguuuauga

SEQ ID NO: 1329697 - RNA, 15 nt, Human
auaaagguucaugca

SEQ ID NO: 1329698 - RNA, 18 nt, Human
uuaauugggccagcuuuu

SEQ ID NO: 1329699 - RNA, 22 nt, Human
uuaauugggccagcuuuucaaa

SEQ ID NO: 1329700 - RNA, 21 nt, Human
uuaauugggccagcuuuucaa

SEQ ID NO: 1329701 - RNA, 14 nt, Human
uuaauuguaaagua

SEQ ID NO: 1329702 - RNA, 14 nt, Human
uuaauuguaaucug

SEQ ID NO: 1329703 - RNA, 15 nt, Human
uuaauuguaaaguaa

SEQ ID NO: 1329704 - RNA, 17 nt, Human
auaaagguucaugcaaa

SEQ ID NO: 1329705 - RNA, 13 nt, Human
auaaauaaaaaua

SEQ ID NO: 1329706 - RNA, 14 nt, Human
auaacguauaaaag

SEQ ID NO: 1329707 - RNA, 22 nt, Human
auaaccugucucaccuggacuu

SEQ ID NO: 1329708 - RNA, 14 nt, Human
auaaccuuaauuua

SEQ ID NO: 1329709 - RNA, 22 nt, Human
auaacgauaaaagacagugaaa

SEQ ID NO: 1329710 - RNA, 22 nt, Human
auaacguuuaagccaaaacaau

SEQ ID NO: 1329711 - RNA, 20 nt, Human
auaacguuuaagccaaaaca

SEQ ID NO: 1329712 - RNA, 18 nt, Human
auaacguguucaauauuu

SEQ ID NO: 1329713 - RNA, 17 nt, Human
auaacguuuaagccaaa

SEQ ID NO: 1329714 - RNA, 18 nt, Human
auaacguuuaagccaaaa

SEQ ID NO: 1329715 - RNA, 13 nt, Human
auaaauuauuguu

SEQ ID NO: 1329716 - RNA, 19 nt, Human
auaaauuauuguuuuucuu

SEQ ID NO: 1329717 - RNA, 19 nt, Human
auaaaucauuuuaugucaa

SEQ ID NO: 1329718 - RNA, 18 nt, Human
auaaaucauuuuauguca

SEQ ID NO: 1329719 - RNA, 16 nt, Human
auaaaucauuuuaugu

SEQ ID NO: 1329720 - RNA, 15 nt, Human
auaaaucauuuuaug

SEQ ID NO: 1329721 - RNA, 14 nt, Human
auaaaucauuuuau

SEQ ID NO: 1329722 - RNA, 12 nt, Human
auaacccacuuu

SEQ ID NO: 1329723 - RNA, 20 nt, Human
uuaccuuugacaaagguaaa

SEQ ID NO: 1329724 - RNA, 13 nt, Human
uuaccuuugacaa

SEQ ID NO: 1329725 - RNA, 18 nt, Human
uuaccuuauaguuacugu

SEQ ID NO: 1329726 - RNA, 15 nt, Human
uuaccuuauugcacu

SEQ ID NO: 1329727 - RNA, 13 nt, Human
uuaccuacuuuga

SEQ ID NO: 1329728 - RNA, 23 nt, Human
uuaccuacuuugacuuuuugcau

SEQ ID NO: 1329729 - RNA, 12 nt, Human
uuaccucagccu

SEQ ID NO: 1329730 - RNA, 13 nt, Human
uuaccucagccug

SEQ ID NO: 1329731 - RNA, 14 nt, Human
uuaccucagccugg

SEQ ID NO: 1329732 - RNA, 15 nt, Human
uuaccucagccuggg

SEQ ID NO: 1329733 - RNA, 20 nt, Human
uuaccucagccugggcgcug

SEQ ID NO: 1329734 - RNA, 18 nt, Human
uuaccucagccugggcgc

SEQ ID NO: 1329735 - RNA, 11 nt, Human
uuaccuccuga

SEQ ID NO: 1329736 - RNA, 19 nt, Human
uuaccuccugagaaaaaag

SEQ ID NO: 1329737 - RNA, 17 nt, Human
uuacccauuuguucaua

SEQ ID NO: 1329738 - RNA, 19 nt, Human
uuacccauuuguucauauu

SEQ ID NO: 1329739 - RNA, 23 nt, Human
uuacccauuugggugggaguguu

SEQ ID NO: 1329740 - RNA, 20 nt, Human
uuacaggcaugagccacugc

SEQ ID NO: 1329741 - RNA, 24 nt, Human
uuacaggcgugagccaccgugccu

SEQ ID NO: 1329742 - RNA, 16 nt, Human
uuacaggcuccugcca

SEQ ID NO: 1329743 - RNA, 18 nt, Human
uuacaggcuccugccacc

SEQ ID NO: 1329744 - RNA, 17 nt, Human
uuagaacacacacacuu

SEQ ID NO: 1329745 - RNA, 17 nt, Human
uuagaaauugcauuucc

SEQ ID NO: 1329746 - RNA, 20 nt, Human
uuagaacacacacacuuacu

SEQ ID NO: 1329747 - RNA, 16 nt, Human
uuagaaaugcagaauc

SEQ ID NO: 1329748 - RNA, 19 nt, Human
uuagaaauuaccuguggau

SEQ ID NO: 1329749 - RNA, 23 nt, Human
uuagaaauuaccuguggauauuu

SEQ ID NO: 1329750 - RNA, 16 nt, Human
uuagaaagauaauuca

SEQ ID NO: 1329751 - RNA, 13 nt, Human
uuagaaauauuuu

SEQ ID NO: 1329752 - RNA, 22 nt, Human
uuagaaauauuuuaaaaucagc

SEQ ID NO: 1329753 - RNA, 13 nt, Human
uuagaaaucauuu

SEQ ID NO: 1329754 - RNA, 23 nt, Human
uuacucuucaguuaagccuuugg

SEQ ID NO: 1329755 - RNA, 18 nt, Human
uuacucugccuacagaac

SEQ ID NO: 1329756 - RNA, 16 nt, Human
uuaccuuguauacugu

SEQ ID NO: 1329757 - RNA, 13 nt, Human
uuaccuuucauac

SEQ ID NO: 1329758 - RNA, 14 nt, Human
uuacucugccuaca

SEQ ID NO: 1329759 - RNA, 23 nt, Human
aguugcugcuucaauuuauaccu

SEQ ID NO: 1329760 - RNA, 18 nt, Human
aguugcugcuucucccag

SEQ ID NO: 1329761 - RNA, 21 nt, Human
aguugcugcuucucccaggca

SEQ ID NO: 1329762 - RNA, 13 nt, Human
uguuucaaacaua

SEQ ID NO: 1329763 - RNA, 12 nt, Human
uguuuauuuuuc

SEQ ID NO: 1329764 - RNA, 19 nt, Human
uguuuauuuuucuugucuu

SEQ ID NO: 1329765 - RNA, 19 nt, Human
uguuucaaacauauauaac

SEQ ID NO: 1329766 - RNA, 23 nt, Human
uguuuauuuuucuugucuuuauu

SEQ ID NO: 1329767 - RNA, 19 nt, Human
aguuggaguuuuuuguacc

SEQ ID NO: 1329768 - RNA, 20 nt, Human
aguuggaguuuuuuguacca

SEQ ID NO: 1329769 - RNA, 15 nt, Human
aguugggcuugcuau

SEQ ID NO: 1329770 - RNA, 19 nt, Human
aguugggcuugcuauucug

SEQ ID NO: 1329771 - RNA, 15 nt, Human
aguugguaacuuuug

SEQ ID NO: 1329772 - RNA, 16 nt, Human
aguuggggacacaugu

SEQ ID NO: 1329773 - RNA, 20 nt, Human
aguugggcuugcuauucugu

SEQ ID NO: 1329774 - RNA, 17 nt, Human
aguuggggucuggcagc

SEQ ID NO: 1329775 - RNA, 21 nt, Human
aguuggggucuggcagccucc

SEQ ID NO: 1329776 - RNA, 13 nt, Human
aguugcuuuucag

SEQ ID NO: 1329777 - RNA, 19 nt, Human
aguuggagcuccagccuga

SEQ ID NO: 1329778 - RNA, 17 nt, Human
aguuggagucacucuua

SEQ ID NO: 1329779 - RNA, 14 nt, Human
aguuuaaauuguaa

SEQ ID NO: 1329780 - RNA, 21 nt, Human
aguuuaaaaucaucagaaagg

SEQ ID NO: 1329781 - RNA, 18 nt, Human
aguuuaaaacagaagccu

SEQ ID NO: 1329782 - RNA, 21 nt, Human
aguuuaaaagcacgacagugg

SEQ ID NO: 1329783 - RNA, 15 nt, Human
aguuuaaaaucauca

SEQ ID NO: 1329784 - RNA, 16 nt, Human
aguugguaacuuuugu

SEQ ID NO: 1329785 - RNA, 20 nt, Human
aguugguaacuuuugugaau

SEQ ID NO: 1329786 - RNA, 12 nt, Human
uuaaaaaaauaa

SEQ ID NO: 1329787 - RNA, 19 nt, Human
uuaaagugcuaagguucua

SEQ ID NO: 1329788 - RNA, 21 nt, Human
uuaaagugcuaagguucuaag

SEQ ID NO: 1329789 - RNA, 22 nt, Human
uuaaagugcuaagguucuaagg

SEQ ID NO: 1329790 - RNA, 13 nt, Human
uuaaaguauucuu

SEQ ID NO: 1329791 - RNA, 21 nt, Human
uuaaagugacuaauggcauga

SEQ ID NO: 1329792 - RNA, 20 nt, Human
uuaaagugacuaauggcaug

SEQ ID NO: 1329793 - RNA, 13 nt, Human
uuaaagugccagu

SEQ ID NO: 1329794 - RNA, 21 nt, Human
uuaaacaguugcacagcaucu

SEQ ID NO: 1329795 - RNA, 19 nt, Human
uuaaacauuaauagcagcc

SEQ ID NO: 1329796 - RNA, 23 nt, Human
uuaaacauuaauagcagccuuuc

SEQ ID NO: 1329797 - RNA, 23 nt, Human
uuaaacaguugcacagcaucuca

SEQ ID NO: 1329798 - RNA, 19 nt, Human
uuaaacaguugcacagcau

SEQ ID NO: 1329799 - RNA, 18 nt, Human
uuaaacaguugcacagca

SEQ ID NO: 1329800 - RNA, 17 nt, Human
uuaaacaguugcacagc

SEQ ID NO: 1329801 - RNA, 13 nt, Human
uuaaacaguugca

SEQ ID NO: 1329802 - RNA, 19 nt, Human
uuaaacaucaaucuuuaaa

SEQ ID NO: 1329803 - RNA, 16 nt, Human
uuaaacagauguccau

SEQ ID NO: 1329804 - RNA, 13 nt, Human
uuaaacagaggau

SEQ ID NO: 1329805 - RNA, 18 nt, Human
uuaaacagugagccugaa

SEQ ID NO: 1329806 - RNA, 23 nt, Human
uuaaacagugagccugaauuuug

SEQ ID NO: 1329807 - RNA, 14 nt, Human
uuaaacaaagguug

SEQ ID NO: 1329808 - RNA, 13 nt, Human
uuaaacaccuccu

SEQ ID NO: 1329809 - RNA, 16 nt, Human
uuaaacaccuccucau

SEQ ID NO: 1329810 - RNA, 20 nt, Human
uuaaaguuaguaucuuuuga

SEQ ID NO: 1329811 - RNA, 10 nt, Human
uuaaauacag

SEQ ID NO: 1329812 - RNA, 14 nt, Human
uuaaauacaggaaa

SEQ ID NO: 1329813 - RNA, 15 nt, Human
uuaaauacaggaaac

SEQ ID NO: 1329814 - RNA, 17 nt, Human
uuaaauacaggaaacag

SEQ ID NO: 1329815 - RNA, 19 nt, Human
uuaaauacaggaaacaguu

SEQ ID NO: 1329816 - RNA, 20 nt, Human
uuaaauacaggaaacaguug

SEQ ID NO: 1329817 - RNA, 13 nt, Human
uuaaauacagucu

SEQ ID NO: 1329818 - RNA, 18 nt, Human
uuaacaccuuuaaagugu

SEQ ID NO: 1329819 - RNA, 17 nt, Human
uuaacaauuaggcagac

SEQ ID NO: 1329820 - RNA, 12 nt, Human
uuaacacacuac

SEQ ID NO: 1329821 - RNA, 13 nt, Human
uuaacagaaauug

SEQ ID NO: 1329822 - RNA, 15 nt, Human
uuaacagaaauugua

SEQ ID NO: 1329823 - RNA, 16 nt, Human
uuaacagaaauuguau

SEQ ID NO: 1329824 - RNA, 17 nt, Human
uuaacagaaauuguaua

SEQ ID NO: 1329825 - RNA, 19 nt, Human
uuaacagaaauuguauauu

SEQ ID NO: 1329826 - RNA, 21 nt, Human
uuaacagaaauuguauauugu

SEQ ID NO: 1329827 - RNA, 20 nt, Human
uuaacagaagggagggcaga

SEQ ID NO: 1329828 - RNA, 14 nt, Human
uuaacagaagggag

SEQ ID NO: 1329829 - RNA, 13 nt, Human
uuaacagagucug

SEQ ID NO: 1329830 - RNA, 14 nt, Human
uuaacagagucuga

SEQ ID NO: 1329831 - RNA, 20 nt, Human
aguuucaguagauugcagaa

SEQ ID NO: 1329832 - RNA, 16 nt, Human
aguuucauauaaagua

SEQ ID NO: 1329833 - RNA, 15 nt, Human
aguuucauguacaag

SEQ ID NO: 1329834 - RNA, 18 nt, Human
aguuucauguacaagaug

SEQ ID NO: 1329835 - RNA, 21 nt, Human
aguuucauguacaagaugaag

SEQ ID NO: 1329836 - RNA, 13 nt, Human
auaaaagccuguu

SEQ ID NO: 1329837 - RNA, 17 nt, Human
aguuuuuauauguugua

SEQ ID NO: 1329838 - RNA, 16 nt, Human
aguuuuuaugagaaac

SEQ ID NO: 1329839 - RNA, 18 nt, Human
aguuuuuaugagaaacuu

SEQ ID NO: 1329840 - RNA, 19 nt, Human
aguuuuuauuaaaccccuu

SEQ ID NO: 1329841 - RNA, 19 nt, Human
auaaaagccuguuuaagag

SEQ ID NO: 1329842 - RNA, 18 nt, Human
auaaaagccuguuuaaga

SEQ ID NO: 1329843 - RNA, 12 nt, Human
auaaaauaauuu

SEQ ID NO: 1329844 - RNA, 23 nt, Human
auaaaauaaugggauuuucuuuu

SEQ ID NO: 1329845 - RNA, 22 nt, Human
auaaaauaauuuuaucucuuuc

SEQ ID NO: 1329846 - RNA, 15 nt, Human
auaaaauaauuuuua

SEQ ID NO: 1329847 - RNA, 21 nt, Human
auaaaauaugaagacauaaac

SEQ ID NO: 1329848 - RNA, 18 nt, Human
aguuuugauauuucuagc

SEQ ID NO: 1329849 - RNA, 16 nt, Human
aguuuugcaaagugca

SEQ ID NO: 1329850 - RNA, 24 nt, Human
uuaaggggaggaaccagagugcug

SEQ ID NO: 1329851 - RNA, 14 nt, Human
uuaagguguagcca

SEQ ID NO: 1329852 - RNA, 17 nt, Human
uuaagguguagccacac

SEQ ID NO: 1329853 - RNA, 20 nt, Human
uuaagaagacugcauuauau

SEQ ID NO: 1329854 - RNA, 15 nt, Human
uuaagaaauagaauu

SEQ ID NO: 1329855 - RNA, 22 nt, Human
uuaagaaauagacagcaugaga

SEQ ID NO: 1329856 - RNA, 16 nt, Human
uuaauauugauuuauu

SEQ ID NO: 1329857 - RNA, 13 nt, Human
uuaauauugauuu

SEQ ID NO: 1329858 - RNA, 13 nt, Human
uuaagucagaaca

SEQ ID NO: 1329859 - RNA, 22 nt, Human
uuaauauuuauaggucacuuug

SEQ ID NO: 1329860 - RNA, 21 nt, Human
uuaaucugggccagaauuuca

SEQ ID NO: 1329861 - RNA, 17 nt, Human
uuaaucucuaacagugg

SEQ ID NO: 1329862 - RNA, 18 nt, Human
uuaaucucuaacagugga

SEQ ID NO: 1329863 - RNA, 16 nt, Human
uuaaucuguauuuccc

SEQ ID NO: 1329864 - RNA, 14 nt, Human
uuaaucuuagugua

SEQ ID NO: 1329865 - RNA, 16 nt, Human
uuaaucuuaguguaug

SEQ ID NO: 1329866 - RNA, 15 nt, Human
uuaaugaaaauaaga

SEQ ID NO: 1329867 - RNA, 19 nt, Human
uuaauugccaccucuaaca

SEQ ID NO: 1329868 - RNA, 23 nt, Human
aguguuggagaagaacugaaauc

SEQ ID NO: 1329869 - RNA, 21 nt, Human
aguuacucuucaguuaagccu

SEQ ID NO: 1329870 - RNA, 17 nt, Human
aguguuggagaagaacu

SEQ ID NO: 1329871 - RNA, 18 nt, Human
aguguuggagaagaacug

SEQ ID NO: 1329872 - RNA, 20 nt, Human
aguguugagcaucugucccc

SEQ ID NO: 1329873 - RNA, 17 nt, Human
aguguugagccuuuucc

SEQ ID NO: 1329874 - RNA, 14 nt, Human
aguguuggagaaga

SEQ ID NO: 1329875 - RNA, 16 nt, Human
aguguuggagaagaac

SEQ ID NO: 1329876 - RNA, 11 nt, Human
aguuacugugu

SEQ ID NO: 1329877 - RNA, 14 nt, Human
aguuacuguguaau

SEQ ID NO: 1329878 - RNA, 15 nt, Human
aguuacuguguaauu

SEQ ID NO: 1329879 - RNA, 16 nt, Human
aguuacuguguaauua

SEQ ID NO: 1329880 - RNA, 18 nt, Human
aguuacuguguaauuagu

SEQ ID NO: 1329881 - RNA, 19 nt, Human
aguuacuguguaauuagug

SEQ ID NO: 1329882 - RNA, 14 nt, Human
aguuauagugaaua

SEQ ID NO: 1329883 - RNA, 15 nt, Human
aguuauagugaauac

SEQ ID NO: 1329884 - RNA, 20 nt, Human
aguuauagugaauacugcua

SEQ ID NO: 1329885 - RNA, 23 nt, Human
aguuauagugaauacugcuacag

SEQ ID NO: 1329886 - RNA, 21 nt, Human
aguguucauaaauaaaguuug

SEQ ID NO: 1329887 - RNA, 17 nt, Human
aguguuauuuucauuca

SEQ ID NO: 1329888 - RNA, 16 nt, Human
aguguuaucagucaua

SEQ ID NO: 1329889 - RNA, 23 nt, Human
aguguuaucagucauaacuaaau

SEQ ID NO: 1329890 - RNA, 15 nt, Human
aguguuagggaaggg

SEQ ID NO: 1329891 - RNA, 18 nt, Human
aguguuagggaagggccu

SEQ ID NO: 1329892 - RNA, 19 nt, Human
aguguuagggaagggccug

SEQ ID NO: 1329893 - RNA, 23 nt, Human
aguguuagggaagggccugccac

SEQ ID NO: 1329894 - RNA, 15 nt, Human
aguguuaaaugugau

SEQ ID NO: 1329895 - RNA, 23 nt, Human
aguguuagccuuuuuuccccaga

SEQ ID NO: 1329896 - RNA, 21 nt, Human
aguguuagccuuuuuucccca

SEQ ID NO: 1329897 - RNA, 13 nt, Human
uguucuugaauuu

SEQ ID NO: 1329898 - RNA, 23 nt, Human
uguucuugaauuuaauaaucugu

SEQ ID NO: 1329899 - RNA, 10 nt, Human
uguucuugua

SEQ ID NO: 1329900 - RNA, 14 nt, Human
uguucuuguauuua

SEQ ID NO: 1329901 - RNA, 13 nt, Human
uguucuuguauuu

SEQ ID NO: 1329902 - RNA, 17 nt, Human
uguucuaaguuucuaag

SEQ ID NO: 1329903 - RNA, 18 nt, Human
uguucuaaguuucuaaga

SEQ ID NO: 1329904 - RNA, 19 nt, Human
uguucuaaguuucuaagau

SEQ ID NO: 1329905 - RNA, 22 nt, Human
uguucuaaguuucuaagauucu

SEQ ID NO: 1329906 - RNA, 23 nt, Human
uguucuaaguuucuaagauucua

SEQ ID NO: 1329907 - RNA, 16 nt, Human
uguucccuauccaauc

SEQ ID NO: 1329908 - RNA, 15 nt, Human
uguucuaaggcucug

SEQ ID NO: 1329909 - RNA, 16 nt, Human
uguucuaaggcucuga

SEQ ID NO: 1329910 - RNA, 18 nt, Human
uguucuaaggcucugaga

SEQ ID NO: 1329911 - RNA, 23 nt, Human
uguucuaaggcucugagagucua

SEQ ID NO: 1329912 - RNA, 17 nt, Human
uguucuaagucuuucca

SEQ ID NO: 1329913 - RNA, 19 nt, Human
uguucuaaggcucugagag

SEQ ID NO: 1329914 - RNA, 12 nt, Human
uguucuaaguuu

SEQ ID NO: 1329915 - RNA, 14 nt, Human
uguucuaaguuucu

SEQ ID NO: 1329916 - RNA, 16 nt, Human
uguucuaaguuucuaa

SEQ ID NO: 1329917 - RNA, 10 nt, Human
uguucuuccu

SEQ ID NO: 1329918 - RNA, 15 nt, Human
uguucuuccucagcc

SEQ ID NO: 1329919 - RNA, 16 nt, Human
uguucuuccucagcca

SEQ ID NO: 1329920 - RNA, 17 nt, Human
uguucuuccucagccag

SEQ ID NO: 1329921 - RNA, 20 nt, Human
uguucuuccucagccagccu

SEQ ID NO: 1329922 - RNA, 21 nt, Human
uguucuuccucagccagccuc

SEQ ID NO: 1329923 - RNA, 13 nt, Human
uguucuuccuggc

SEQ ID NO: 1329924 - RNA, 15 nt, Human
uguucuuccuggccg

SEQ ID NO: 1329925 - RNA, 23 nt, Human
uguuauuucccuacauuaaacau

SEQ ID NO: 1329926 - RNA, 21 nt, Human
uguuauuucccuacauuaaac

SEQ ID NO: 1329927 - RNA, 20 nt, Human
uguuauuucccuacauuaaa

SEQ ID NO: 1329928 - RNA, 14 nt, Human
uguuauuuaaagaa

SEQ ID NO: 1329929 - RNA, 14 nt, Human
uguuccccuuccac

SEQ ID NO: 1329930 - RNA, 17 nt, Human
uguuccccuuccacuga

SEQ ID NO: 1329931 - RNA, 20 nt, Human
uguuccccuuccacugaggg

SEQ ID NO: 1329932 - RNA, 21 nt, Human
uguuccccuuccacugagggc

SEQ ID NO: 1329933 - RNA, 23 nt, Human
uguuccccuuccacugagggcag

SEQ ID NO: 1329934 - RNA, 22 nt, Human
uguuccccuuugcuucauucaa

SEQ ID NO: 1329935 - RNA, 15 nt, Human
aguggaucacaaagu

SEQ ID NO: 1329936 - RNA, 18 nt, Human
aguggaucacucaccauu

SEQ ID NO: 1329937 - RNA, 14 nt, Human
aguggagucugcca

SEQ ID NO: 1329938 - RNA, 17 nt, Human
aguggagucugccaccc

SEQ ID NO: 1329939 - RNA, 19 nt, Human
aguggagucugccacccag

SEQ ID NO: 1329940 - RNA, 20 nt, Human
aguggagucugccacccagg

SEQ ID NO: 1329941 - RNA, 18 nt, Human
agugcuuuuggcggggag

SEQ ID NO: 1329942 - RNA, 14 nt, Human
aguggaaaaggcac

SEQ ID NO: 1329943 - RNA, 22 nt, Human
aguggaaagacagcuucucauc

SEQ ID NO: 1329944 - RNA, 16 nt, Human
aguggaacgaaaauga

SEQ ID NO: 1329945 - RNA, 24 nt, Human
aguggaacgaaaaugaaagcuacu

SEQ ID NO: 1329946 - RNA, 16 nt, Human
aguggaucacaaagug

SEQ ID NO: 1329947 - RNA, 19 nt, Human
uguuauauguuguucuuac

SEQ ID NO: 1329948 - RNA, 13 nt, Human
uguuauauuucau

SEQ ID NO: 1329949 - RNA, 20 nt, Human
uguuaucaaaacuuucuuuu

SEQ ID NO: 1329950 - RNA, 22 nt, Human
uguuaucaaacaccaacauaaa

SEQ ID NO: 1329951 - RNA, 19 nt, Human
uguuaucaccgugggcucc

SEQ ID NO: 1329952 - RNA, 21 nt, Human
uguuaucagucaauauuuuua

SEQ ID NO: 1329953 - RNA, 18 nt, Human
uguuaucuguuugagaaa

SEQ ID NO: 1329954 - RNA, 15 nt, Human
uguuaucuucucaag

SEQ ID NO: 1329955 - RNA, 19 nt, Human
uguuaucuguuugagaaag

SEQ ID NO: 1329956 - RNA, 17 nt, Human
uguuaucuguuugagaa

SEQ ID NO: 1329957 - RNA, 14 nt, Human
uguuaucuguuuga

SEQ ID NO: 1329958 - RNA, 20 nt, Human
uguuaucuucucaaguucua

SEQ ID NO: 1329959 - RNA, 16 nt, Human
uguuaucuucucaagu

SEQ ID NO: 1329960 - RNA, 21 nt, Human
uguuauuagagauuaccuccu

SEQ ID NO: 1329961 - RNA, 23 nt, Human
uguuauuagagauuaccuccuga

SEQ ID NO: 1329962 - RNA, 16 nt, Human
uguuauuaucugggcu

SEQ ID NO: 1329963 - RNA, 23 nt, Human
uguuauuaucugggcuuauaucu

SEQ ID NO: 1329964 - RNA, 22 nt, Human
uguuauuauuacuuauuuuuga

SEQ ID NO: 1329965 - RNA, 13 nt, Human
uguugucugcaac

SEQ ID NO: 1329966 - RNA, 16 nt, Human
uguugucugcaacucu

SEQ ID NO: 1329967 - RNA, 16 nt, Human
uguuggucuguacuga

SEQ ID NO: 1329968 - RNA, 15 nt, Human
uguuggucuguacug

SEQ ID NO: 1329969 - RNA, 14 nt, Human
uguuggucuguacu

SEQ ID NO: 1329970 - RNA, 11 nt, Human
uguuggugcac

SEQ ID NO: 1329971 - RNA, 14 nt, Human
uguuggugcacagc

SEQ ID NO: 1329972 - RNA, 18 nt, Human
uguuggugcacagcacaa

SEQ ID NO: 1329973 - RNA, 14 nt, Human
uguuggucauuuua

SEQ ID NO: 1329974 - RNA, 15 nt, Human
uguugguugguuuuc

SEQ ID NO: 1329975 - RNA, 20 nt, Human
uguugguugguuuucuucuu

SEQ ID NO: 1329976 - RNA, 15 nt, Human
uguugguuuuuaaag

SEQ ID NO: 1329977 - RNA, 15 nt, Human
uguugucucuugagu

SEQ ID NO: 1329978 - RNA, 13 nt, Human
uguugugcuuuua

SEQ ID NO: 1329979 - RNA, 21 nt, Human
uguuguuaucuguuugagaaa

SEQ ID NO: 1329980 - RNA, 17 nt, Human
uguuguuaugaugugcu

SEQ ID NO: 1329981 - RNA, 23 nt, Human
uguuguuccaaauacuaaugaaa

SEQ ID NO: 1329982 - RNA, 11 nt, Human
uguuguucugu

SEQ ID NO: 1329983 - RNA, 13 nt, Human
uguuguucuguua

SEQ ID NO: 1329984 - RNA, 18 nt, Human
uguuguucuguuaacuga

SEQ ID NO: 1329985 - RNA, 19 nt, Human
uguuguuaugaugugcuua

SEQ ID NO: 1329986 - RNA, 15 nt, Human
uguuguuaugaugug

SEQ ID NO: 1329987 - RNA, 14 nt, Human
uguuguuaugaugu

SEQ ID NO: 1329988 - RNA, 11 nt, Human
uguuguuauuu

SEQ ID NO: 1329989 - RNA, 13 nt, Human
uguuguuauuuaa

SEQ ID NO: 1329990 - RNA, 22 nt, Human
uguuguucuguuaacugaauac

SEQ ID NO: 1329991 - RNA, 16 nt, Human
uguuuaguagcaguga

SEQ ID NO: 1329992 - RNA, 18 nt, Human
uguuuaguagcagugauu

SEQ ID NO: 1329993 - RNA, 15 nt, Human
uguuuauccuuucau

SEQ ID NO: 1329994 - RNA, 16 nt, Human
uguuuauccuuucaua

SEQ ID NO: 1329995 - RNA, 17 nt, Human
uguuuauccuuucauau

SEQ ID NO: 1329996 - RNA, 21 nt, Human
uguuuauccuuucauauaguu

SEQ ID NO: 1329997 - RNA, 18 nt, Human
uguuuauccuuucauaua

SEQ ID NO: 1329998 - RNA, 17 nt, Human
uguuuaguaaucauauu

SEQ ID NO: 1329999 - RNA, 14 nt, Human
uguuuaguaaucau

SEQ ID NO: 1330000 - RNA, 13 nt, Human
uguuuaguaauca

SEQ ID NO: 1330001 - RNA, 19 nt, Human
uguuuaguaaacucaauaa

SEQ ID NO: 1330002 - RNA, 19 nt, Human
uguuuauucauaugcauau

SEQ ID NO: 1330003 - RNA, 18 nt, Human
uguuuauucauaugcaua

SEQ ID NO: 1330004 - RNA, 17 nt, Human
uguuuauucauaugcau

SEQ ID NO: 1330005 - RNA, 16 nt, Human
uguuuauucauaugca

SEQ ID NO: 1330006 - RNA, 13 nt, Human
uguuuauucauau

SEQ ID NO: 1330007 - RNA, 16 nt, Human
uguuuauucuucuaga

SEQ ID NO: 1330008 - RNA, 17 nt, Human
uguuuauucuucuagag

SEQ ID NO: 1330009 - RNA, 20 nt, Human
uguuuauugaauucauuuca

SEQ ID NO: 1330010 - RNA, 23 nt, Human
uguuuauugaauucauuucacug

SEQ ID NO: 1330011 - RNA, 16 nt, Human
uguuuaugguaaaaaa

SEQ ID NO: 1330012 - RNA, 13 nt, Human
uguuuaugguaaa

SEQ ID NO: 1330013 - RNA, 14 nt, Human
uguuuauguaauuu

SEQ ID NO: 1330014 - RNA, 16 nt, Human
uguuuauguaauuuca

SEQ ID NO: 1330015 - RNA, 15 nt, Human
uguuuauguaauuuc

SEQ ID NO: 1330016 - RNA, 20 nt, Human
aguucggugagcuacaaaug

SEQ ID NO: 1330017 - RNA, 13 nt, Human
aguuccugcuaaa

SEQ ID NO: 1330018 - RNA, 13 nt, Human
aguucgcagccac

SEQ ID NO: 1330019 - RNA, 14 nt, Human
aguucgcagccacc

SEQ ID NO: 1330020 - RNA, 17 nt, Human
aguucgcagccacccug

SEQ ID NO: 1330021 - RNA, 21 nt, Human
aguucgcagccacccugagga

SEQ ID NO: 1330022 - RNA, 18 nt, Human
aguucgcagccacccuga

SEQ ID NO: 1330023 - RNA, 21 nt, Human
aguucuaauaauuucuaaugu

SEQ ID NO: 1330024 - RNA, 20 nt, Human
aguucuaccucaggcagcuc

SEQ ID NO: 1330025 - RNA, 19 nt, Human
aguucggugagcuacaaau

SEQ ID NO: 1330026 - RNA, 20 nt, Human
aguuccccuguuuauucaua

SEQ ID NO: 1330027 - RNA, 19 nt, Human
aguuccccuguuuauucau

SEQ ID NO: 1330028 - RNA, 18 nt, Human
aguuccccuguuuauuca

SEQ ID NO: 1330029 - RNA, 21 nt, Human
aguuccucuaacuuggcucac

SEQ ID NO: 1330030 - RNA, 19 nt, Human
aguuccucuaacuuggcuc

SEQ ID NO: 1330031 - RNA, 13 nt, Human
aguucucccugua

SEQ ID NO: 1330032 - RNA, 22 nt, Human
aguucucccuguacaguguuac

SEQ ID NO: 1330033 - RNA, 22 nt, Human
aguucuaccucaggcagcucaa

SEQ ID NO: 1330034 - RNA, 23 nt, Human
aguucuaccucaggcagcucaag

SEQ ID NO: 1330035 - RNA, 12 nt, Human
aguucuagaaaa

SEQ ID NO: 1330036 - RNA, 14 nt, Human
aguucuagaaaaac

SEQ ID NO: 1330037 - RNA, 15 nt, Human
aguucuagaaaaaca

SEQ ID NO: 1330038 - RNA, 10 nt, Human
aguucuagac

SEQ ID NO: 1330039 - RNA, 21 nt, Human
aguucuagacauggagguucu

SEQ ID NO: 1330040 - RNA, 22 nt, Human
aguucuagacauggagguucua

SEQ ID NO: 1330041 - RNA, 23 nt, Human
aguucuagacauggagguucuaa

SEQ ID NO: 1330042 - RNA, 13 nt, Human
aguucuaggaaaa

SEQ ID NO: 1330043 - RNA, 14 nt, Human
aguucuaggaaaau

SEQ ID NO: 1330044 - RNA, 15 nt, Human
aguucuaggaaaaua

SEQ ID NO: 1330045 - RNA, 10 nt, Human
aguucuaggc

SEQ ID NO: 1330046 - RNA, 14 nt, Human
aguucuaggcacug

SEQ ID NO: 1330047 - RNA, 22 nt, Human
aguucuaggcacuguaguucua

SEQ ID NO: 1330048 - RNA, 15 nt, Human
aguucagaauuuagu

SEQ ID NO: 1330049 - RNA, 17 nt, Human
aguucccacauuaaaga

SEQ ID NO: 1330050 - RNA, 18 nt, Human
aguucccacauuaaagaa

SEQ ID NO: 1330051 - RNA, 19 nt, Human
aguucccacauuaaagaag

SEQ ID NO: 1330052 - RNA, 22 nt, Human
aguucccacauuaaagaagacc

SEQ ID NO: 1330053 - RNA, 15 nt, Human
aguucccuacuuccu

SEQ ID NO: 1330054 - RNA, 18 nt, Human
aguuccccuauguggaag

SEQ ID NO: 1330055 - RNA, 17 nt, Human
aguucccaguuggagcu

SEQ ID NO: 1330056 - RNA, 18 nt, Human
aguucccaguuggagcuc

SEQ ID NO: 1330057 - RNA, 19 nt, Human
aguucccaguuggagcucc

SEQ ID NO: 1330058 - RNA, 20 nt, Human
aguucccaguuggagcucca

SEQ ID NO: 1330059 - RNA, 21 nt, Human
aguucccaguuggagcuccag

SEQ ID NO: 1330060 - RNA, 14 nt, Human
aguuccccuaugug

SEQ ID NO: 1330061 - RNA, 19 nt, Human
aguuaucauguuaguaaua

SEQ ID NO: 1330062 - RNA, 22 nt, Human
aguuaucauguuaguaauaccu

SEQ ID NO: 1330063 - RNA, 18 nt, Human
aguuaucauguuaguaau

SEQ ID NO: 1330064 - RNA, 17 nt, Human
aguuaucauguuaguaa

SEQ ID NO: 1330065 - RNA, 15 nt, Human
aguuaucauguuagu

SEQ ID NO: 1330066 - RNA, 14 nt, Human
aguuaucauguuag

SEQ ID NO: 1330067 - RNA, 13 nt, Human
aguuaucauguua

SEQ ID NO: 1330068 - RNA, 12 nt, Human
aguuaucauguu

SEQ ID NO: 1330069 - RNA, 16 nt, Human
aguuauauuuugcagu

SEQ ID NO: 1330070 - RNA, 14 nt, Human
aguuauauuuugca

SEQ ID NO: 1330071 - RNA, 16 nt, Human
uguggugagggaagac

SEQ ID NO: 1330072 - RNA, 17 nt, Human
uguggugaaaagcaggu

SEQ ID NO: 1330073 - RNA, 21 nt, Human
ugugguucugagauggcuccc

SEQ ID NO: 1330074 - RNA, 14 nt, Human
ugugguuuauauau

SEQ ID NO: 1330075 - RNA, 13 nt, Human
agugcuugcuuuu

SEQ ID NO: 1330076 - RNA, 17 nt, Human
agugcuugcuuuucaug

SEQ ID NO: 1330077 - RNA, 22 nt, Human
agugcuugcuuuucaugcaaac

SEQ ID NO: 1330078 - RNA, 20 nt, Human
agugcuggcauuacaggugu

SEQ ID NO: 1330079 - RNA, 20 nt, Human
agugcugggauuacaggcgu

SEQ ID NO: 1330080 - RNA, 20 nt, Human
agugcugggauuacaggugu

SEQ ID NO: 1330081 - RNA, 20 nt, Human
agugcuguuuuguuauauaa

SEQ ID NO: 1330082 - RNA, 19 nt, Human
agugcugggauuacaggcu

SEQ ID NO: 1330083 - RNA, 23 nt, Human
agugcuguuuuguuauauaauuu

SEQ ID NO: 1330084 - RNA, 22 nt, Human
agugcuguuuuguuauauaauu

SEQ ID NO: 1330085 - RNA, 21 nt, Human
agugccuguaaucacagcuac

SEQ ID NO: 1330086 - RNA, 13 nt, Human
agugcccugagcc

SEQ ID NO: 1330087 - RNA, 15 nt, Human
agugcccugagccag

SEQ ID NO: 1330088 - RNA, 16 nt, Human
agugcccugagccagg

SEQ ID NO: 1330089 - RNA, 20 nt, Human
agugcccugagccagggucu

SEQ ID NO: 1330090 - RNA, 23 nt, Human
agugcccugagccagggucucca

SEQ ID NO: 1330091 - RNA, 21 nt, Human
agugcccugagccagggucuc

SEQ ID NO: 1330092 - RNA, 18 nt, Human
agugccugacacacuaac

SEQ ID NO: 1330093 - RNA, 13 nt, Human
uguuaacagaagg

SEQ ID NO: 1330094 - RNA, 21 nt, Human
uguuaacagaagggagggcag

SEQ ID NO: 1330095 - RNA, 22 nt, Human
uguuaacagaagggagggcaga

SEQ ID NO: 1330096 - RNA, 15 nt, Human
uguuaacauuccaag

SEQ ID NO: 1330097 - RNA, 16 nt, Human
uguuaacauuccaaga

SEQ ID NO: 1330098 - RNA, 20 nt, Human
uguuaacauuccaagacucu

SEQ ID NO: 1330099 - RNA, 21 nt, Human
uguuaacauuccaagacucua

SEQ ID NO: 1330100 - RNA, 16 nt, Human
uguguugccaagcucc

SEQ ID NO: 1330101 - RNA, 17 nt, Human
uguguucccauuucagc

SEQ ID NO: 1330102 - RNA, 12 nt, Human
uguguuggcugu

SEQ ID NO: 1330103 - RNA, 22 nt, Human
uguguugggauugagucugugc

SEQ ID NO: 1330104 - RNA, 13 nt, Human
uguguugucucua

SEQ ID NO: 1330105 - RNA, 19 nt, Human
uguguugucucuugaguuu

SEQ ID NO: 1330106 - RNA, 14 nt, Human
agugcuuugagaga

SEQ ID NO: 1330107 - RNA, 19 nt, Human
agugcuuuuaagugaaaau

SEQ ID NO: 1330108 - RNA, 23 nt, Human
agugcuuuuaagugaaaaugguc

SEQ ID NO: 1330109 - RNA, 15 nt, Human
ugugguuuauauauu

SEQ ID NO: 1330110 - RNA, 17 nt, Human
ugugguuucauguuagu

SEQ ID NO: 1330111 - RNA, 22 nt, Human
ugugguuucauguuaguuaccu

SEQ ID NO: 1330112 - RNA, 16 nt, Human
ugugucuaagauucua

SEQ ID NO: 1330113 - RNA, 17 nt, Human
ugugucuaagauucuag

SEQ ID NO: 1330114 - RNA, 18 nt, Human
ugugucuaagauucuaga

SEQ ID NO: 1330115 - RNA, 19 nt, Human
ugugucuaagauucuagau

SEQ ID NO: 1330116 - RNA, 20 nt, Human
ugugucuaagauucuagauc

SEQ ID NO: 1330117 - RNA, 19 nt, Human
uguguuaugcaaaagcaag

SEQ ID NO: 1330118 - RNA, 15 nt, Human
uguguguugauacug

SEQ ID NO: 1330119 - RNA, 16 nt, Human
uguguucccauuucag

SEQ ID NO: 1330120 - RNA, 23 nt, Human
uguguugauacuguugcacgugu

SEQ ID NO: 1330121 - RNA, 13 nt, Human
uguguugccaagc

SEQ ID NO: 1330122 - RNA, 20 nt, Human
uguguguuaagcucugcuau

SEQ ID NO: 1330123 - RNA, 16 nt, Human
uguguguugauacugu

SEQ ID NO: 1330124 - RNA, 14 nt, Human
agugcacuaaugug

SEQ ID NO: 1330125 - RNA, 16 nt, Human
agugcaccaaagagaa

SEQ ID NO: 1330126 - RNA, 18 nt, Human
agugcaccaaagagaaug

SEQ ID NO: 1330127 - RNA, 20 nt, Human
agugcaccaaagagaaugcc

SEQ ID NO: 1330128 - RNA, 15 nt, Human
agugcaucucagccc

SEQ ID NO: 1330129 - RNA, 14 nt, Human
agugcaucucagcc

SEQ ID NO: 1330130 - RNA, 16 nt, Human
agugcaguccugauca

SEQ ID NO: 1330131 - RNA, 22 nt, Human
agugcaguccugaucagagccg

SEQ ID NO: 1330132 - RNA, 16 nt, Human
agugcaucucagccca

SEQ ID NO: 1330133 - RNA, 17 nt, Human
agugcaucucagcccac

SEQ ID NO: 1330134 - RNA, 14 nt, Human
agugcaucuggaga

SEQ ID NO: 1330135 - RNA, 19 nt, Human
agugcaucuggagagaaca

SEQ ID NO: 1330136 - RNA, 21 nt, Human
agugcaucuggagagaacagg

SEQ ID NO: 1330137 - RNA, 14 nt, Human
agugccacuuaaug

SEQ ID NO: 1330138 - RNA, 16 nt, Human
agugccacuuaaugua

SEQ ID NO: 1330139 - RNA, 17 nt, Human
agugccacuuaauguau

SEQ ID NO: 1330140 - RNA, 17 nt, Human
agugccacuguuguuuu

SEQ ID NO: 1330141 - RNA, 14 nt, Human
agugcccccacuga

SEQ ID NO: 1330142 - RNA, 16 nt, Human
agugcccccacugacc

SEQ ID NO: 1330143 - RNA, 15 nt, Human
agugcccucuccccu

SEQ ID NO: 1330144 - RNA, 22 nt, Human
agugcaaauugucacaggacag

SEQ ID NO: 1330145 - RNA, 13 nt, Human
agugcaccaaaga

SEQ ID NO: 1330146 - RNA, 18 nt, Human
agugcaaauugucacagg

SEQ ID NO: 1330147 - RNA, 21 nt, Human
agugcaaauugucacaggaca

SEQ ID NO: 1330148 - RNA, 16 nt, Human
agugauuguaugaauu

SEQ ID NO: 1330149 - RNA, 15 nt, Human
agugauugucuuaau

SEQ ID NO: 1330150 - RNA, 17 nt, Human
agugauugucuuaauau

SEQ ID NO: 1330151 - RNA, 13 nt, Human
agugagucucucu

SEQ ID NO: 1330152 - RNA, 23 nt, Human
uguggccccacccugggcccugg

SEQ ID NO: 1330153 - RNA, 17 nt, Human
uguggccccugaacaag

SEQ ID NO: 1330154 - RNA, 22 nt, Human
uguggccccugaacaagaauug

SEQ ID NO: 1330155 - RNA, 14 nt, Human
agugagucucucug

SEQ ID NO: 1330156 - RNA, 15 nt, Human
agugagucucucugg

SEQ ID NO: 1330157 - RNA, 24 nt, Human
agugagucucucugggccuuagga

SEQ ID NO: 1330158 - RNA, 17 nt, Human
agugagucucucugggc

SEQ ID NO: 1330159 - RNA, 14 nt, Human
agugaguggcccuu

SEQ ID NO: 1330160 - RNA, 12 nt, Human
ugugccucugcc

SEQ ID NO: 1330161 - RNA, 13 nt, Human
ugugccucugccu

SEQ ID NO: 1330162 - RNA, 21 nt, Human
ugugccucgcuccccacucug

SEQ ID NO: 1330163 - RNA, 20 nt, Human
ugugccucgcuccccacucu

SEQ ID NO: 1330164 - RNA, 16 nt, Human
ugugccucagagacca

SEQ ID NO: 1330165 - RNA, 14 nt, Human
ugugccucagagac

SEQ ID NO: 1330166 - RNA, 14 nt, Human
ugugccuccucacc

SEQ ID NO: 1330167 - RNA, 15 nt, Human
ugugccuccucaccc

SEQ ID NO: 1330168 - RNA, 16 nt, Human
ugugccuccucacccc

SEQ ID NO: 1330169 - RNA, 13 nt, Human
ugugccuccuccc

SEQ ID NO: 1330170 - RNA, 14 nt, Human
ugugccuccucccu

SEQ ID NO: 1330171 - RNA, 15 nt, Human
ugugccuccucccuc

SEQ ID NO: 1330172 - RNA, 16 nt, Human
ugugccuccucccucc

SEQ ID NO: 1330173 - RNA, 21 nt, Human
ugugccuccucccucccucuc

SEQ ID NO: 1330174 - RNA, 18 nt, Human
agucucacugcuugaacu

SEQ ID NO: 1330175 - RNA, 18 nt, Human
ugugccccuuccgccacu

SEQ ID NO: 1330176 - RNA, 20 nt, Human
ugugccccuuccgccacugg

SEQ ID NO: 1330177 - RNA, 21 nt, Human
ugugccccuuccgccacuggg

SEQ ID NO: 1330178 - RNA, 16 nt, Human
ugugccccuugacaac

SEQ ID NO: 1330179 - RNA, 23 nt, Human
ugugccccuugacaacuggcagg

SEQ ID NO: 1330180 - RNA, 13 nt, Human
ugugcccuaucac

SEQ ID NO: 1330181 - RNA, 13 nt, Human
ugugcccucccug

SEQ ID NO: 1330182 - RNA, 19 nt, Human
uguggcacuggggcagggg

SEQ ID NO: 1330183 - RNA, 17 nt, Human
uguggcaaggaaaaaca

SEQ ID NO: 1330184 - RNA, 15 nt, Human
uguggcaagugaauu

SEQ ID NO: 1330185 - RNA, 14 nt, Human
uguggcaagugaau

SEQ ID NO: 1330186 - RNA, 14 nt, Human
uguggcagaguuac

SEQ ID NO: 1330187 - RNA, 15 nt, Human
uguggcagaguuaca

SEQ ID NO: 1330188 - RNA, 19 nt, Human
uguggcagaguuacaguuc

SEQ ID NO: 1330189 - RNA, 20 nt, Human
uguggcagaguuacaguucu

SEQ ID NO: 1330190 - RNA, 12 nt, Human
uguggccccacc

SEQ ID NO: 1330191 - RNA, 13 nt, Human
uguggccccaccc

SEQ ID NO: 1330192 - RNA, 17 nt, Human
uguggccccacccuggg

SEQ ID NO: 1330193 - RNA, 19 nt, Human
uguggccccacccugggcc

SEQ ID NO: 1330194 - RNA, 17 nt, Human
uguggagagggaaugug

SEQ ID NO: 1330195 - RNA, 20 nt, Human
uguggagagggaaugugaaa

SEQ ID NO: 1330196 - RNA, 19 nt, Human
uguggagagggaaugugaa

SEQ ID NO: 1330197 - RNA, 16 nt, Human
uguggagccgaggccu

SEQ ID NO: 1330198 - RNA, 19 nt, Human
uguggagccgaggccuacc

SEQ ID NO: 1330199 - RNA, 20 nt, Human
uguggagccgaggccuaccc

SEQ ID NO: 1330200 - RNA, 22 nt, Human
uguggauuuuuuccuucaaagu

SEQ ID NO: 1330201 - RNA, 17 nt, Human
uguaagaaaauaucacu

SEQ ID NO: 1330202 - RNA, 20 nt, Human
uguaacuuuuguaagacaaa

SEQ ID NO: 1330203 - RNA, 17 nt, Human
uguaacuuucucuauga

SEQ ID NO: 1330204 - RNA, 18 nt, Human
uguaacuuucucuaugaa

SEQ ID NO: 1330205 - RNA, 15 nt, Human
uguaacuuuuguaag

SEQ ID NO: 1330206 - RNA, 16 nt, Human
uguaacuuuuguaaga

SEQ ID NO: 1330207 - RNA, 20 nt, Human
uguaagacaaagguuuuccu

SEQ ID NO: 1330208 - RNA, 21 nt, Human
uguaagacaaagguuuuccuc

SEQ ID NO: 1330209 - RNA, 18 nt, Human
uguaagacccuuauugcu

SEQ ID NO: 1330210 - RNA, 22 nt, Human
uguaagacccuuauugcugucc

SEQ ID NO: 1330211 - RNA, 22 nt, Human
uguaacuugauccauuucuaau

SEQ ID NO: 1330212 - RNA, 23 nt, Human
uguaacuugauccauuucuaauu

SEQ ID NO: 1330213 - RNA, 19 nt, Human
agguguagccacaccagga

SEQ ID NO: 1330214 - RNA, 13 nt, Human
aggugguguuucu

SEQ ID NO: 1330215 - RNA, 20 nt, Human
agguugauaaaucauuuuau

SEQ ID NO: 1330216 - RNA, 22 nt, Human
agguugauaaaucauuuuaugu

SEQ ID NO: 1330217 - RNA, 12 nt, Human
agguugauaaau

SEQ ID NO: 1330218 - RNA, 17 nt, Human
agguugagcucuucuua

SEQ ID NO: 1330219 - RNA, 24 nt, Human
agguugagcucuucuuaaaguauu

SEQ ID NO: 1330220 - RNA, 16 nt, Human
agguuggcucugccag

SEQ ID NO: 1330221 - RNA, 18 nt, Human
agguuggcucugccaguc

SEQ ID NO: 1330222 - RNA, 19 nt, Human
agguuggcucugccagucc

SEQ ID NO: 1330223 - RNA, 21 nt, Human
agguuggcucugccaguccug

SEQ ID NO: 1330224 - RNA, 22 nt, Human
agguuggcucugccaguccugu

SEQ ID NO: 1330225 - RNA, 14 nt, Human
agguugcagugagc

SEQ ID NO: 1330226 - RNA, 16 nt, Human
agguugcacacuuugg

SEQ ID NO: 1330227 - RNA, 17 nt, Human
agguugcacacuuuggu

SEQ ID NO: 1330228 - RNA, 19 nt, Human
agguugcacacuuugguac

SEQ ID NO: 1330229 - RNA, 12 nt, Human
agguugcacacu

SEQ ID NO: 1330230 - RNA, 13 nt, Human
agguugcacacuu

SEQ ID NO: 1330231 - RNA, 21 nt, Human
uguaauuagugccacuuaaug

SEQ ID NO: 1330232 - RNA, 23 nt, Human
uguaauuagugccacuuaaugua

SEQ ID NO: 1330233 - RNA, 14 nt, Human
uguaaguugggcuu

SEQ ID NO: 1330234 - RNA, 18 nt, Human
uguaaguugggcuugcua

SEQ ID NO: 1330235 - RNA, 21 nt, Human
uguaaguugggcuugcuauuc

SEQ ID NO: 1330236 - RNA, 19 nt, Human
uguaaguugggcuugcuau

SEQ ID NO: 1330237 - RNA, 20 nt, Human
uguaauuauuuauguauggu

SEQ ID NO: 1330238 - RNA, 15 nt, Human
uguaaguaaacgguc

SEQ ID NO: 1330239 - RNA, 21 nt, Human
uguaagggccagaaauaucuu

SEQ ID NO: 1330240 - RNA, 23 nt, Human
uguaagauuauagauucuaaaga

SEQ ID NO: 1330241 - RNA, 13 nt, Human
uguaagauuuguu

SEQ ID NO: 1330242 - RNA, 21 nt, Human
uguaagauuuguuuuuaaacu

SEQ ID NO: 1330243 - RNA, 17 nt, Human
uguaagugaaaaacaug

SEQ ID NO: 1330244 - RNA, 18 nt, Human
uguaagugaaaaacauga

SEQ ID NO: 1330245 - RNA, 16 nt, Human
uguaaguugaagcaaa

SEQ ID NO: 1330246 - RNA, 18 nt, Human
uguaagauuauagauucu

SEQ ID NO: 1330247 - RNA, 19 nt, Human
uguaagauuauagauucua

SEQ ID NO: 1330248 - RNA, 20 nt, Human
uguaagauuauagauucuaa

SEQ ID NO: 1330249 - RNA, 21 nt, Human
uguaagauuauagauucuaaa

SEQ ID NO: 1330250 - RNA, 22 nt, Human
uguaagauuauagauucuaaag

SEQ ID NO: 1330251 - RNA, 23 nt, Human
uguaagauuuguuuuuaaacugu

SEQ ID NO: 1330252 - RNA, 21 nt, Human
aggucuuggaacuugccugcc

SEQ ID NO: 1330253 - RNA, 19 nt, Human
aggucuuggaacuugccug

SEQ ID NO: 1330254 - RNA, 18 nt, Human
aggucuuugguucagcua

SEQ ID NO: 1330255 - RNA, 10 nt, Human
aggucccuaa

SEQ ID NO: 1330256 - RNA, 11 nt, Human
aggucccuaau

SEQ ID NO: 1330257 - RNA, 15 nt, Human
uguaaaucuacacac

SEQ ID NO: 1330258 - RNA, 21 nt, Human
aggugcaacagacuugaaugc

SEQ ID NO: 1330259 - RNA, 15 nt, Human
aggugcaauuucaag

SEQ ID NO: 1330260 - RNA, 21 nt, Human
agguggugguagagaagcaag

SEQ ID NO: 1330261 - RNA, 19 nt, Human
aggugggcacuggauuagu

SEQ ID NO: 1330262 - RNA, 14 nt, Human
agguggcccuacug

SEQ ID NO: 1330263 - RNA, 19 nt, Human
agguggccaaguuccucua

SEQ ID NO: 1330264 - RNA, 20 nt, Human
aggugcauauuuauaaaaau

SEQ ID NO: 1330265 - RNA, 14 nt, Human
agguggccacucca

SEQ ID NO: 1330266 - RNA, 17 nt, Human
agguggccacuccagac

SEQ ID NO: 1330267 - RNA, 16 nt, Human
agguggccaaguuccu

SEQ ID NO: 1330268 - RNA, 17 nt, Human
agguggccaaguuccuc

SEQ ID NO: 1330269 - RNA, 16 nt, Human
aggugcaauuucaagg

SEQ ID NO: 1330270 - RNA, 18 nt, Human
aggugcaauuucaagguu

SEQ ID NO: 1330271 - RNA, 19 nt, Human
aggugcaauuucaagguuc

SEQ ID NO: 1330272 - RNA, 20 nt, Human
aggugcaauuucaagguucu

SEQ ID NO: 1330273 - RNA, 21 nt, Human
aggugcaauuucaagguucua

SEQ ID NO: 1330274 - RNA, 22 nt, Human
aggugcaauuucaagguucuaa

SEQ ID NO: 1330275 - RNA, 15 nt, Human
aggugcacugggagg

SEQ ID NO: 1330276 - RNA, 22 nt, Human
aggugcacugggaggcuccccu

SEQ ID NO: 1330277 - RNA, 23 nt, Human
aggugcacugggaggcuccccuu

SEQ ID NO: 1330278 - RNA, 12 nt, Human
uguaccauguac

SEQ ID NO: 1330279 - RNA, 17 nt, Human
uguaccauguacaugaa

SEQ ID NO: 1330280 - RNA, 18 nt, Human
uguagaggagaaacugga

SEQ ID NO: 1330281 - RNA, 23 nt, Human
uguaauuucaggaggaauacuga

SEQ ID NO: 1330282 - RNA, 18 nt, Human
uguaccaaccauccaauu

SEQ ID NO: 1330283 - RNA, 19 nt, Human
uguaauuucaggaggaaua

SEQ ID NO: 1330284 - RNA, 15 nt, Human
uguaccaagaaucuu

SEQ ID NO: 1330285 - RNA, 11 nt, Human
uguaccaguua

SEQ ID NO: 1330286 - RNA, 12 nt, Human
uguaccaguuaa

SEQ ID NO: 1330287 - RNA, 14 nt, Human
uguaccaguuaauu

SEQ ID NO: 1330288 - RNA, 15 nt, Human
uguaccaguuaauuu

SEQ ID NO: 1330289 - RNA, 21 nt, Human
uguaccaguuaauuuuuccaa

SEQ ID NO: 1330290 - RNA, 22 nt, Human
uguaccaguuaauuuuuccaac

SEQ ID NO: 1330291 - RNA, 23 nt, Human
uguaccaguuaauuuuuccaacu

SEQ ID NO: 1330292 - RNA, 23 nt, Human
aguaaggaauuuuauuuuuuucu

SEQ ID NO: 1330293 - RNA, 20 nt, Human
aguaaaacaaacaauaccug

SEQ ID NO: 1330294 - RNA, 16 nt, Human
aguaaaacaaacaaua

SEQ ID NO: 1330295 - RNA, 19 nt, Human
aguaaaacaaacaauaccu

SEQ ID NO: 1330296 - RNA, 22 nt, Human
aguaagggcacugacggacuca

SEQ ID NO: 1330297 - RNA, 22 nt, Human
aguaauaugccugcuauuugaa

SEQ ID NO: 1330298 - RNA, 10 nt, Human
agguuuucag

SEQ ID NO: 1330299 - RNA, 22 nt, Human
agguuuuccucuucuauuuugu

SEQ ID NO: 1330300 - RNA, 21 nt, Human
uguaauuauaucuaaaauauu

SEQ ID NO: 1330301 - RNA, 12 nt, Human
aguaaaaauaaa

SEQ ID NO: 1330302 - RNA, 15 nt, Human
aguaaaaauaaaauu

SEQ ID NO: 1330303 - RNA, 22 nt, Human
aguacacaauaagcaaaaacaa

SEQ ID NO: 1330304 - RNA, 21 nt, Human
aguacacaauaagcaaaaaca

SEQ ID NO: 1330305 - RNA, 18 nt, Human
aguacacaauaagcaaaa

SEQ ID NO: 1330306 - RNA, 17 nt, Human
aguacacaauaagcaaa

SEQ ID NO: 1330307 - RNA, 16 nt, Human
aguacacaauaagcaa

SEQ ID NO: 1330308 - RNA, 15 nt, Human
aguaauuugaggaca

SEQ ID NO: 1330309 - RNA, 21 nt, Human
aguaauuuguuuaaaaaguaa

SEQ ID NO: 1330310 - RNA, 15 nt, Human
aguaauuuguagauu

SEQ ID NO: 1330311 - RNA, 21 nt, Human
aguaauccaagcaaaugugaa

SEQ ID NO: 1330312 - RNA, 15 nt, Human
aguaauccaagcaaa

SEQ ID NO: 1330313 - RNA, 22 nt, Human
aguaaucaaucuacucaaagca

SEQ ID NO: 1330314 - RNA, 19 nt, Human
aguacuuuuggcauuuuac

SEQ ID NO: 1330315 - RNA, 13 nt, Human
aguacuuugugca

SEQ ID NO: 1330316 - RNA, 15 nt, Human
aguacuuugugcauu

SEQ ID NO: 1330317 - RNA, 16 nt, Human
aguacuuugugcauuc

SEQ ID NO: 1330318 - RNA, 20 nt, Human
aguacacagcaccagaaugu

SEQ ID NO: 1330319 - RNA, 14 nt, Human
aguacacucugcug

SEQ ID NO: 1330320 - RNA, 15 nt, Human
aguacacucugcugu

SEQ ID NO: 1330321 - RNA, 17 nt, Human
aguacacucugcuguuu

SEQ ID NO: 1330322 - RNA, 22 nt, Human
aguagagacgagguuucacugu

SEQ ID NO: 1330323 - RNA, 19 nt, Human
aguagaagucucuuccagu

SEQ ID NO: 1330324 - RNA, 13 nt, Human
aguagagacaggg

SEQ ID NO: 1330325 - RNA, 12 nt, Human
aguagagacagg

SEQ ID NO: 1330326 - RNA, 12 nt, Human
aguagaaaucau

SEQ ID NO: 1330327 - RNA, 19 nt, Human
aguagauaggccaugggca

SEQ ID NO: 1330328 - RNA, 21 nt, Human
aguagaugcauuuggguccag

SEQ ID NO: 1330329 - RNA, 23 nt, Human
aguagaugcauuuggguccagga

SEQ ID NO: 1330330 - RNA, 22 nt, Human
aguagaugcauuuggguccagg

SEQ ID NO: 1330331 - RNA, 22 nt, Human
uguagguuauuaugauuagcuu

SEQ ID NO: 1330332 - RNA, 14 nt, Human
uguagguugcacac

SEQ ID NO: 1330333 - RNA, 20 nt, Human
uguaggagagguugucugug

SEQ ID NO: 1330334 - RNA, 13 nt, Human
aguauuucuauga

SEQ ID NO: 1330335 - RNA, 15 nt, Human
aguauuucuaugaaa

SEQ ID NO: 1330336 - RNA, 13 nt, Human
aguauguauuauu

SEQ ID NO: 1330337 - RNA, 23 nt, Human
aguaugugggcagauuuucagca

SEQ ID NO: 1330338 - RNA, 17 nt, Human
aguauaaagaauugugg

SEQ ID NO: 1330339 - RNA, 16 nt, Human
aguauuucuaugaaau

SEQ ID NO: 1330340 - RNA, 17 nt, Human
aguauuugggaagugaa

SEQ ID NO: 1330341 - RNA, 19 nt, Human
agucacauuccugaacagg

SEQ ID NO: 1330342 - RNA, 20 nt, Human
agucacauuccugaacagga

SEQ ID NO: 1330343 - RNA, 21 nt, Human
aguauuugggaagugaagacu

SEQ ID NO: 1330344 - RNA, 13 nt, Human
agucacugcacag

SEQ ID NO: 1330345 - RNA, 23 nt, Human
agucacugagaccaaggcuuucu

SEQ ID NO: 1330346 - RNA, 13 nt, Human
agucacugagacc

SEQ ID NO: 1330347 - RNA, 22 nt, Human
ugucagcugcaagguacucugg

SEQ ID NO: 1330348 - RNA, 23 nt, Human
ugucagcugcaagguacucuggu

SEQ ID NO: 1330349 - RNA, 23 nt, Human
ugucagggaguguucccuaucca

SEQ ID NO: 1330350 - RNA, 16 nt, Human
ugucaggagugugugu

SEQ ID NO: 1330351 - RNA, 13 nt, Human
ugucaggauugcg

SEQ ID NO: 1330352 - RNA, 19 nt, Human
ugucaggauugcgagagau

SEQ ID NO: 1330353 - RNA, 21 nt, Human
ugucaggauugcgagagaugu

SEQ ID NO: 1330354 - RNA, 22 nt, Human
ugucaggauugcgagagaugug

SEQ ID NO: 1330355 - RNA, 14 nt, Human
ugucaggcacuggg

SEQ ID NO: 1330356 - RNA, 23 nt, Human
ugucaggauugcgagagaugugu

SEQ ID NO: 1330357 - RNA, 20 nt, Human
ugucaguaccuucaaacuag

SEQ ID NO: 1330358 - RNA, 19 nt, Human
ugucagggaguguucccua

SEQ ID NO: 1330359 - RNA, 17 nt, Human
uguauuuuuaguagaga

SEQ ID NO: 1330360 - RNA, 13 nt, Human
uguauuccaagac

SEQ ID NO: 1330361 - RNA, 15 nt, Human
uguauuccaagacau

SEQ ID NO: 1330362 - RNA, 20 nt, Human
uguauuccaagacaugucug

SEQ ID NO: 1330363 - RNA, 21 nt, Human
uguauuccaagacaugucugu

SEQ ID NO: 1330364 - RNA, 14 nt, Human
uguauucagacaga

SEQ ID NO: 1330365 - RNA, 14 nt, Human
uguauucagcuuua

SEQ ID NO: 1330366 - RNA, 18 nt, Human
uguauucagacagaugag

SEQ ID NO: 1330367 - RNA, 15 nt, Human
uguagguugcacacu

SEQ ID NO: 1330368 - RNA, 18 nt, Human
uguagguugcacacuuug

SEQ ID NO: 1330369 - RNA, 20 nt, Human
uguagguugcacacuuuggu

SEQ ID NO: 1330370 - RNA, 16 nt, Human
uguaguaaauaaugcu

SEQ ID NO: 1330371 - RNA, 17 nt, Human
uguaguaaauaaugcuu

SEQ ID NO: 1330372 - RNA, 18 nt, Human
uguaguaaauaaugcuuu

SEQ ID NO: 1330373 - RNA, 21 nt, Human
uguaguaaauaaugcuuugaa

SEQ ID NO: 1330374 - RNA, 14 nt, Human
uguaguaacacuaa

SEQ ID NO: 1330375 - RNA, 15 nt, Human
uguaguaacacuaau

SEQ ID NO: 1330376 - RNA, 17 nt, Human
uguaguaacacuaauau

SEQ ID NO: 1330377 - RNA, 20 nt, Human
uguaguaacacuaauauauu

SEQ ID NO: 1330378 - RNA, 19 nt, Human
uguaguaaucugcauuauu

SEQ ID NO: 1330379 - RNA, 14 nt, Human
uguaguaauugaca

SEQ ID NO: 1330380 - RNA, 15 nt, Human
uguaguaauugacau

SEQ ID NO: 1330381 - RNA, 16 nt, Human
uguaguaauugacaug

SEQ ID NO: 1330382 - RNA, 18 nt, Human
uguaguaauugacaugug

SEQ ID NO: 1330383 - RNA, 18 nt, Human
uguauuauuuacauuuaa

SEQ ID NO: 1330384 - RNA, 21 nt, Human
uguauuauuuacauuuaauag

SEQ ID NO: 1330385 - RNA, 16 nt, Human
ugucaagauucagcua

SEQ ID NO: 1330386 - RNA, 15 nt, Human
ugucaagauucagcu

SEQ ID NO: 1330387 - RNA, 21 nt, Human
ugucaagaauagcauuguaaa

SEQ ID NO: 1330388 - RNA, 20 nt, Human
ugucaaucagccuaguugau

SEQ ID NO: 1330389 - RNA, 15 nt, Human
ugucaaucuguccgu

SEQ ID NO: 1330390 - RNA, 23 nt, Human
aguaguuaucauguuaguaauac

SEQ ID NO: 1330391 - RNA, 17 nt, Human
aguaguuaucauguuag

SEQ ID NO: 1330392 - RNA, 16 nt, Human
aguaguuaucauguua

SEQ ID NO: 1330393 - RNA, 15 nt, Human
aguaguuaucauguu

SEQ ID NO: 1330394 - RNA, 12 nt, Human
aguaguucacau

SEQ ID NO: 1330395 - RNA, 15 nt, Human
aguaguucucaaagu

SEQ ID NO: 1330396 - RNA, 14 nt, Human
aguaguuaucaugu

SEQ ID NO: 1330397 - RNA, 13 nt, Human
aguaguuaucaug

SEQ ID NO: 1330398 - RNA, 12 nt, Human
aguaguuaucau

SEQ ID NO: 1330399 - RNA, 13 nt, Human
aguaggagcccag

SEQ ID NO: 1330400 - RNA, 17 nt, Human
aguaggcauuuuuacca

SEQ ID NO: 1330401 - RNA, 22 nt, Human
aguaggcauuuuuaccaucacu

SEQ ID NO: 1330402 - RNA, 21 nt, Human
aguagucccugcacagugacu

SEQ ID NO: 1330403 - RNA, 12 nt, Human
aguaguccugug

SEQ ID NO: 1330404 - RNA, 13 nt, Human
aguaguccuguga

SEQ ID NO: 1330405 - RNA, 14 nt, Human
aguaguccugugaa

SEQ ID NO: 1330406 - RNA, 22 nt, Human
aguccaggcuuuuuuaucaugu

SEQ ID NO: 1330407 - RNA, 14 nt, Human
aguccaggcugccg

SEQ ID NO: 1330408 - RNA, 17 nt, Human
aguccaggcugccgugg

SEQ ID NO: 1330409 - RNA, 18 nt, Human
aguccaggcugccguggg

SEQ ID NO: 1330410 - RNA, 12 nt, Human
agucaggaaagg

SEQ ID NO: 1330411 - RNA, 17 nt, Human
agucaggcccaggcacu

SEQ ID NO: 1330412 - RNA, 22 nt, Human
aguccaggaugcuaacaucuaa

SEQ ID NO: 1330413 - RNA, 14 nt, Human
agucccugccugga

SEQ ID NO: 1330414 - RNA, 19 nt, Human
agucccugcacagugacuu

SEQ ID NO: 1330415 - RNA, 21 nt, Human
agucccugcacagugacuucu

SEQ ID NO: 1330416 - RNA, 15 nt, Human
agucccugccuggac

SEQ ID NO: 1330417 - RNA, 21 nt, Human
agucccugccuggaccagccu

SEQ ID NO: 1330418 - RNA, 22 nt, Human
agucccugccuggaccagccuc

SEQ ID NO: 1330419 - RNA, 23 nt, Human
agucccugccuggaccagccucu

SEQ ID NO: 1330420 - RNA, 21 nt, Human
aguccggccccaguacacagg

SEQ ID NO: 1330421 - RNA, 15 nt, Human
aguccgucaaaacag

SEQ ID NO: 1330422 - RNA, 14 nt, Human
aguccgucaaaaca

SEQ ID NO: 1330423 - RNA, 23 nt, Human
aguccgugggacgggaugguucu

SEQ ID NO: 1330424 - RNA, 13 nt, Human
aguccgugggacg

SEQ ID NO: 1330425 - RNA, 21 nt, Human
agucgugaccugcuaggccag

SEQ ID NO: 1330426 - RNA, 12 nt, Human
agucgugccugu

SEQ ID NO: 1330427 - RNA, 13 nt, Human
agucgugccugug

SEQ ID NO: 1330428 - RNA, 14 nt, Human
agucgugccugugu

SEQ ID NO: 1330429 - RNA, 15 nt, Human
agucgugccuguguc

SEQ ID NO: 1330430 - RNA, 17 nt, Human
agucgugaccugcuagg

SEQ ID NO: 1330431 - RNA, 17 nt, Human
agucguggggugugcug

SEQ ID NO: 1330432 - RNA, 13 nt, Human
agucuagauucuc

SEQ ID NO: 1330433 - RNA, 14 nt, Human
agucuagauucucu

SEQ ID NO: 1330434 - RNA, 20 nt, Human
agucuagauucucuggcugu

SEQ ID NO: 1330435 - RNA, 16 nt, Human
agucuagauucucugg

SEQ ID NO: 1330436 - RNA, 21 nt, Human
agucucacaugauuccagcca

SEQ ID NO: 1330437 - RNA, 22 nt, Human
agucucacaugauuccagccau

SEQ ID NO: 1330438 - RNA, 23 nt, Human
agucucacaugauuccagccauc

SEQ ID NO: 1330439 - RNA, 24 nt, Human
agucucacaugauuccagccauca

SEQ ID NO: 1330440 - RNA, 18 nt, Human
agucguggggugugcugg

SEQ ID NO: 1330441 - RNA, 19 nt, Human
agucguggggugugcuggg

SEQ ID NO: 1330442 - RNA, 20 nt, Human
agucguggggugugcuggga

SEQ ID NO: 1330443 - RNA, 21 nt, Human
agucguggggugugcugggag

SEQ ID NO: 1330444 - RNA, 20 nt, Human
agucuaaagauggaguuucu

SEQ ID NO: 1330445 - RNA, 21 nt, Human
agucuaaagauggaguuucua

SEQ ID NO: 1330446 - RNA, 22 nt, Human
agucuaaagauggaguuucuaa

SEQ ID NO: 1330447 - RNA, 23 nt, Human
agucuagauguuuauucuucuag

SEQ ID NO: 1330448 - RNA, 14 nt, Human
agucuagauucaaa

SEQ ID NO: 1330449 - RNA, 15 nt, Human
agucuagauucaaag

SEQ ID NO: 1330450 - RNA, 18 nt, Human
agucuagauucaaagguu

SEQ ID NO: 1330451 - RNA, 20 nt, Human
agucuagauucaaagguucu

SEQ ID NO: 1330452 - RNA, 21 nt, Human
agucuagauucaaagguucua

SEQ ID NO: 1330453 - RNA, 22 nt, Human
agucuagauucaaagguucuag

SEQ ID NO: 1330454 - RNA, 16 nt, Human
agucaggaaagagaac

SEQ ID NO: 1330455 - RNA, 23 nt, Human
agucagagccaugucuucucccu

SEQ ID NO: 1330456 - RNA, 16 nt, Human
agucagacagaugugg

SEQ ID NO: 1330457 - RNA, 20 nt, Human
ugucguggacacacacagac

SEQ ID NO: 1330458 - RNA, 13 nt, Human
ugucgccucugca

SEQ ID NO: 1330459 - RNA, 18 nt, Human
ugucgauuagacuggaca

SEQ ID NO: 1330460 - RNA, 20 nt, Human
ugucgauuagacuggacagc

SEQ ID NO: 1330461 - RNA, 23 nt, Human
ugucgauuagacuggacagcuug

SEQ ID NO: 1330462 - RNA, 16 nt, Human
ugucguaaagauuugg

SEQ ID NO: 1330463 - RNA, 17 nt, Human
ugucguuaaaaacagau

SEQ ID NO: 1330464 - RNA, 16 nt, Human
uguccuacagaaaaac

SEQ ID NO: 1330465 - RNA, 18 nt, Human
uguccuacagaaaaaccu

SEQ ID NO: 1330466 - RNA, 13 nt, Human
uguccuuucccuu

SEQ ID NO: 1330467 - RNA, 14 nt, Human
uguccuuucccuuc

SEQ ID NO: 1330468 - RNA, 22 nt, Human
uguccuaauaauaucccacugg

SEQ ID NO: 1330469 - RNA, 12 nt, Human
uguccuacagaa

SEQ ID NO: 1330470 - RNA, 13 nt, Human
uguccuacagaaa

SEQ ID NO: 1330471 - RNA, 14 nt, Human
uguccuacagaaaa

SEQ ID NO: 1330472 - RNA, 15 nt, Human
uguccuacagaaaaa

SEQ ID NO: 1330473 - RNA, 15 nt, Human
ugucgcccaggcugg

SEQ ID NO: 1330474 - RNA, 16 nt, Human
ugucgcccaggcugga

SEQ ID NO: 1330475 - RNA, 14 nt, Human
ugucgauuagacug

SEQ ID NO: 1330476 - RNA, 23 nt, Human
uguccuuucccuucaguacccuc

SEQ ID NO: 1330477 - RNA, 13 nt, Human
uguccuuucuaga

SEQ ID NO: 1330478 - RNA, 14 nt, Human
uguccuuucuagag

SEQ ID NO: 1330479 - RNA, 18 nt, Human
uguccuuucuagagcacu

SEQ ID NO: 1330480 - RNA, 19 nt, Human
uguccuuucuagagcacug

SEQ ID NO: 1330481 - RNA, 13 nt, Human
uguccuuuucaua

SEQ ID NO: 1330482 - RNA, 22 nt, Human
uguccuuuucauaggucugaaa

SEQ ID NO: 1330483 - RNA, 15 nt, Human
uguccuuuugcaaag

SEQ ID NO: 1330484 - RNA, 15 nt, Human
uguccuuuuuccucu

SEQ ID NO: 1330485 - RNA, 16 nt, Human
uguccuuuuuccucuc

SEQ ID NO: 1330486 - RNA, 17 nt, Human
uguccuuuuuccucucc

SEQ ID NO: 1330487 - RNA, 18 nt, Human
uguccuuuuuccucucca

SEQ ID NO: 1330488 - RNA, 21 nt, Human
uguccuuuuuccucuccacac

SEQ ID NO: 1330489 - RNA, 15 nt, Human
uguccgcuggguggu

SEQ ID NO: 1330490 - RNA, 20 nt, Human
uguccgcugggugguacccu

SEQ ID NO: 1330491 - RNA, 22 nt, Human
uguccgcugggugguacccucu

SEQ ID NO: 1330492 - RNA, 23 nt, Human
uguccgcugggugguacccucug

SEQ ID NO: 1330493 - RNA, 13 nt, Human
ugucauuuuggua

SEQ ID NO: 1330494 - RNA, 15 nt, Human
ugucauuuuuuuucu

SEQ ID NO: 1330495 - RNA, 16 nt, Human
uguccaaaaccgccag

SEQ ID NO: 1330496 - RNA, 15 nt, Human
uguccaaaacugccu

SEQ ID NO: 1330497 - RNA, 18 nt, Human
uguccaaaaccgccagcu

SEQ ID NO: 1330498 - RNA, 19 nt, Human
uguccaaaaccgccagcuc

SEQ ID NO: 1330499 - RNA, 20 nt, Human
uguccaaaaccgccagcucu

SEQ ID NO: 1330500 - RNA, 21 nt, Human
uguccaaaaccgccagcucug

SEQ ID NO: 1330501 - RNA, 22 nt, Human
uguccaaaaccgccagcucugu

SEQ ID NO: 1330502 - RNA, 23 nt, Human
uguccaaaaccgccagcucuguu

SEQ ID NO: 1330503 - RNA, 15 nt, Human
uguccgacucuucug

SEQ ID NO: 1330504 - RNA, 20 nt, Human
ugguaaggggaauugaggac

SEQ ID NO: 1330505 - RNA, 18 nt, Human
ugguaagcaacauggcuu

SEQ ID NO: 1330506 - RNA, 19 nt, Human
ugguaagcaacauggcuuu

SEQ ID NO: 1330507 - RNA, 20 nt, Human
ugguaagcaacauggcuuug

SEQ ID NO: 1330508 - RNA, 17 nt, Human
ugguaagcuauguccca

SEQ ID NO: 1330509 - RNA, 14 nt, Human
ugguaauauugacu

SEQ ID NO: 1330510 - RNA, 14 nt, Human
uggguggcuacucu

SEQ ID NO: 1330511 - RNA, 19 nt, Human
uggguggcuacucugugcc

SEQ ID NO: 1330512 - RNA, 20 nt, Human
uggguggcuacucugugcca

SEQ ID NO: 1330513 - RNA, 23 nt, Human
uggguggcuacucugugccagag

SEQ ID NO: 1330514 - RNA, 14 nt, Human
uggguggcucacuc

SEQ ID NO: 1330515 - RNA, 17 nt, Human
ugguacucccucucagg

SEQ ID NO: 1330516 - RNA, 20 nt, Human
ugguagcuuuucccuucuuu

SEQ ID NO: 1330517 - RNA, 22 nt, Human
ugguacucccucucaggaucca

SEQ ID NO: 1330518 - RNA, 17 nt, Human
ugguacugacuuugcuu

SEQ ID NO: 1330519 - RNA, 21 nt, Human
ugguacugacuuugcuugcuu

SEQ ID NO: 1330520 - RNA, 17 nt, Human
ugguacuguacagcugg

SEQ ID NO: 1330521 - RNA, 19 nt, Human
ugguacuguacagcuggcu

SEQ ID NO: 1330522 - RNA, 21 nt, Human
ugguacuguacagcuggcucu

SEQ ID NO: 1330523 - RNA, 17 nt, Human
ugguaggaauagcaugu

SEQ ID NO: 1330524 - RNA, 21 nt, Human
ugguagcuuuucccuucuuuu

SEQ ID NO: 1330525 - RNA, 22 nt, Human
uggucacaggacucugccuccu

SEQ ID NO: 1330526 - RNA, 23 nt, Human
uggucacaggacucugccuccuc

SEQ ID NO: 1330527 - RNA, 16 nt, Human
ugguaggaccaagcau

SEQ ID NO: 1330528 - RNA, 22 nt, Human
ugguaggaccaagcaucuuggg

SEQ ID NO: 1330529 - RNA, 16 nt, Human
aggguggcagcaacaa

SEQ ID NO: 1330530 - RNA, 15 nt, Human
aggguggcagcaaca

SEQ ID NO: 1330531 - RNA, 13 nt, Human
aggguggcagcaa

SEQ ID NO: 1330532 - RNA, 11 nt, Human
aggguggcagc

SEQ ID NO: 1330533 - RNA, 12 nt, Human
agggugggaagg

SEQ ID NO: 1330534 - RNA, 22 nt, Human
ugggucuaggacacaguuccug

SEQ ID NO: 1330535 - RNA, 21 nt, Human
ugggucuaggacacaguuccu

SEQ ID NO: 1330536 - RNA, 23 nt, Human
ugggucucaccggcucucaccug

SEQ ID NO: 1330537 - RNA, 21 nt, Human
ugggucugggagucacacagu

SEQ ID NO: 1330538 - RNA, 18 nt, Human
ugggucucaccggcucuc

SEQ ID NO: 1330539 - RNA, 15 nt, Human
aggggcuaccaggaa

SEQ ID NO: 1330540 - RNA, 14 nt, Human
aggggcuaccagga

SEQ ID NO: 1330541 - RNA, 17 nt, Human
aggggcuaccaggaaag

SEQ ID NO: 1330542 - RNA, 13 nt, Human
aggggcucccucc

SEQ ID NO: 1330543 - RNA, 15 nt, Human
aggggcucccuccgc

SEQ ID NO: 1330544 - RNA, 22 nt, Human
agggggaaggugggguccugga

SEQ ID NO: 1330545 - RNA, 16 nt, Human
agggggaauggcagca

SEQ ID NO: 1330546 - RNA, 15 nt, Human
agggggagagggcug

SEQ ID NO: 1330547 - RNA, 16 nt, Human
agggggagagggcugc

SEQ ID NO: 1330548 - RNA, 21 nt, Human
agggggagccccuucugcuca

SEQ ID NO: 1330549 - RNA, 22 nt, Human
agggggagccccuucugcucag

SEQ ID NO: 1330550 - RNA, 22 nt, Human
agggggagcugggccuggucuc

SEQ ID NO: 1330551 - RNA, 18 nt, Human
aggggccuggcagccgug

SEQ ID NO: 1330552 - RNA, 23 nt, Human
aggggccuggcagccgugccuuc

SEQ ID NO: 1330553 - RNA, 19 nt, Human
ugggguauggauucuaaaa

SEQ ID NO: 1330554 - RNA, 20 nt, Human
ugggguauggauucuaaaau

SEQ ID NO: 1330555 - RNA, 19 nt, Human
aggggagaccucagaagua

SEQ ID NO: 1330556 - RNA, 21 nt, Human
aggggagaccucagaaguaaa

SEQ ID NO: 1330557 - RNA, 16 nt, Human
agggggcaagaggaau

SEQ ID NO: 1330558 - RNA, 19 nt, Human
agggggucguggagagcua

SEQ ID NO: 1330559 - RNA, 14 nt, Human
aggggcucccuccg

SEQ ID NO: 1330560 - RNA, 23 nt, Human
agggggucguggagagcuaggag

SEQ ID NO: 1330561 - RNA, 19 nt, Human
agggggauccgacugcuuu

SEQ ID NO: 1330562 - RNA, 20 nt, Human
agggggauccgacugcuuug

SEQ ID NO: 1330563 - RNA, 11 nt, Human
agggggucugg

SEQ ID NO: 1330564 - RNA, 15 nt, Human
agggggucuggcugg

SEQ ID NO: 1330565 - RNA, 16 nt, Human
agggggucuggcuggu

SEQ ID NO: 1330566 - RNA, 17 nt, Human
agggggucuggcuggug

SEQ ID NO: 1330567 - RNA, 23 nt, Human
agggggugauuagagggaggaga

SEQ ID NO: 1330568 - RNA, 13 nt, Human
aggggugggcugg

SEQ ID NO: 1330569 - RNA, 14 nt, Human
aggggugggcuggu

SEQ ID NO: 1330570 - RNA, 14 nt, Human
aggggugucuuggg

SEQ ID NO: 1330571 - RNA, 22 nt, Human
aggggugucuugggcagagcug

SEQ ID NO: 1330572 - RNA, 24 nt, Human
aggggugucuugggcagagcuggc

SEQ ID NO: 1330573 - RNA, 15 nt, Human
agggguguggcuccu

SEQ ID NO: 1330574 - RNA, 15 nt, Human
agggguuagagcagg

SEQ ID NO: 1330575 - RNA, 14 nt, Human
agggguuccucccc

SEQ ID NO: 1330576 - RNA, 15 nt, Human
agggguuccuccccu

SEQ ID NO: 1330577 - RNA, 17 nt, Human
agggguuccuccccucc

SEQ ID NO: 1330578 - RNA, 21 nt, Human
agggguuccuccccuccagcu

SEQ ID NO: 1330579 - RNA, 22 nt, Human
agggguuccuccccuccagcuc

SEQ ID NO: 1330580 - RNA, 17 nt, Human
aggguuaugauuaagua

SEQ ID NO: 1330581 - RNA, 12 nt, Human
agggugugugcu

SEQ ID NO: 1330582 - RNA, 20 nt, Human
agggugguucaacaaagaaa

SEQ ID NO: 1330583 - RNA, 15 nt, Human
uggucucgaacuccu

SEQ ID NO: 1330584 - RNA, 15 nt, Human
uggucucccuucucu

SEQ ID NO: 1330585 - RNA, 16 nt, Human
uggucuuguggaauug

SEQ ID NO: 1330586 - RNA, 18 nt, Human
ugguaggaauagcauguc

SEQ ID NO: 1330587 - RNA, 15 nt, Human
uggucagcccuaggg

SEQ ID NO: 1330588 - RNA, 19 nt, Human
uggucagcccuagggugga

SEQ ID NO: 1330589 - RNA, 22 nt, Human
uggucagcccuaggguggagag

SEQ ID NO: 1330590 - RNA, 19 nt, Human
uggucuaucuuugagcgcc

SEQ ID NO: 1330591 - RNA, 15 nt, Human
uggucucacccugga

SEQ ID NO: 1330592 - RNA, 17 nt, Human
uggucucacccuggagg

SEQ ID NO: 1330593 - RNA, 23 nt, Human
uggucucacccuggaggcaccug

SEQ ID NO: 1330594 - RNA, 18 nt, Human
uggucucaaacuccugac

SEQ ID NO: 1330595 - RNA, 23 nt, Human
uggucucaaacuccugaccucag

SEQ ID NO: 1330596 - RNA, 14 nt, Human
uggucucacccugg

SEQ ID NO: 1330597 - RNA, 20 nt, Human
agguauucguuaucuaauag

SEQ ID NO: 1330598 - RNA, 14 nt, Human
agguauuuaucuuu

SEQ ID NO: 1330599 - RNA, 15 nt, Human
aggucacauaaaacu

SEQ ID NO: 1330600 - RNA, 18 nt, Human
agguauucguuaucuaau

SEQ ID NO: 1330601 - RNA, 14 nt, Human
agguauuacacucu

SEQ ID NO: 1330602 - RNA, 13 nt, Human
agguauaccucac

SEQ ID NO: 1330603 - RNA, 18 nt, Human
aggucaccuuuauucugg

SEQ ID NO: 1330604 - RNA, 15 nt, Human
aggucacccuuugcu

SEQ ID NO: 1330605 - RNA, 19 nt, Human
aggucaccuuuauucuggc

SEQ ID NO: 1330606 - RNA, 23 nt, Human
agguccagcucuggaggggaggg

SEQ ID NO: 1330607 - RNA, 23 nt, Human
agguacuucaaauccuugaagau

SEQ ID NO: 1330608 - RNA, 22 nt, Human
agguacuguaugaucaaauguu

SEQ ID NO: 1330609 - RNA, 23 nt, Human
agguacuuucauauuuuaaacag

SEQ ID NO: 1330610 - RNA, 23 nt, Human
agguacuguaugaucaaauguuu

SEQ ID NO: 1330611 - RNA, 21 nt, Human
agguacuguaugaucaaaugu

SEQ ID NO: 1330612 - RNA, 19 nt, Human
agguacuguaugaucaaau

SEQ ID NO: 1330613 - RNA, 15 nt, Human
agguacuguaugauc

SEQ ID NO: 1330614 - RNA, 23 nt, Human
agguauaauucacauuguauuca

SEQ ID NO: 1330615 - RNA, 19 nt, Human
agguauaaguggugugugu

SEQ ID NO: 1330616 - RNA, 20 nt, Human
agguauaaguggugugugua

SEQ ID NO: 1330617 - RNA, 15 nt, Human
agguauaccucacuu

SEQ ID NO: 1330618 - RNA, 21 nt, Human
agguagaauguaaagcuuguc

SEQ ID NO: 1330619 - RNA, 14 nt, Human
agguagaauguaaa

SEQ ID NO: 1330620 - RNA, 22 nt, Human
agguagaauuaucuaauuuaua

SEQ ID NO: 1330621 - RNA, 19 nt, Human
agguagaauguaaagcuug

SEQ ID NO: 1330622 - RNA, 15 nt, Human
agguagucucacugc

SEQ ID NO: 1330623 - RNA, 14 nt, Human
uggggaaugaagau

SEQ ID NO: 1330624 - RNA, 15 nt, Human
uggggaaugaagaua

SEQ ID NO: 1330625 - RNA, 22 nt, Human
uggggaagagagccugcaggau

SEQ ID NO: 1330626 - RNA, 17 nt, Human
uggggaagagagccugc

SEQ ID NO: 1330627 - RNA, 16 nt, Human
uggggaagggccugcc

SEQ ID NO: 1330628 - RNA, 20 nt, Human
uggggaagguuaucagugcu

SEQ ID NO: 1330629 - RNA, 24 nt, Human
uggggaagacccauuccuucccag

SEQ ID NO: 1330630 - RNA, 18 nt, Human
uggggaagacaguggccc

SEQ ID NO: 1330631 - RNA, 15 nt, Human
uggggaagagagccu

SEQ ID NO: 1330632 - RNA, 18 nt, Human
ugggcuggaaucaggaau

SEQ ID NO: 1330633 - RNA, 15 nt, Human
ugggcuggaugagcu

SEQ ID NO: 1330634 - RNA, 16 nt, Human
ugggcuggaugagcuc

SEQ ID NO: 1330635 - RNA, 18 nt, Human
ugggcuggaugagcuccc

SEQ ID NO: 1330636 - RNA, 19 nt, Human
ugggcuggcaguccuggaa

SEQ ID NO: 1330637 - RNA, 22 nt, Human
uggggaccagcagccccacacc

SEQ ID NO: 1330638 - RNA, 15 nt, Human
uggggaccagcagcc

SEQ ID NO: 1330639 - RNA, 17 nt, Human
uggggacagagcagaac

SEQ ID NO: 1330640 - RNA, 17 nt, Human
ugggcugcccuggugcu

SEQ ID NO: 1330641 - RNA, 19 nt, Human
ugggcugcccuggugcugc

SEQ ID NO: 1330642 - RNA, 20 nt, Human
ugggcugcccuggugcugcc

SEQ ID NO: 1330643 - RNA, 21 nt, Human
ugggcugcccuggugcugcca

SEQ ID NO: 1330644 - RNA, 11 nt, Human
ugggcugaggg

SEQ ID NO: 1330645 - RNA, 20 nt, Human
agggccucaaaggcccgcuc

SEQ ID NO: 1330646 - RNA, 23 nt, Human
uggggcuaggaaauccagggugg

SEQ ID NO: 1330647 - RNA, 20 nt, Human
uggggcuagggggagccccu

SEQ ID NO: 1330648 - RNA, 22 nt, Human
uggggcucuaacgccugagccc

SEQ ID NO: 1330649 - RNA, 23 nt, Human
uggggcucuaacgccugagccca

SEQ ID NO: 1330650 - RNA, 24 nt, Human
uggggcucuaacgccugagcccag

SEQ ID NO: 1330651 - RNA, 19 nt, Human
uggggccgccgccucuuuc

SEQ ID NO: 1330652 - RNA, 17 nt, Human
uggggaguggggguggg

SEQ ID NO: 1330653 - RNA, 18 nt, Human
uggggaccugguacccuc

SEQ ID NO: 1330654 - RNA, 14 nt, Human
uggggacuuggccu

SEQ ID NO: 1330655 - RNA, 19 nt, Human
uggggacuuggccucucuc

SEQ ID NO: 1330656 - RNA, 16 nt, Human
uggggacuugugucug

SEQ ID NO: 1330657 - RNA, 23 nt, Human
uggggagacauaaccacugcuuc

SEQ ID NO: 1330658 - RNA, 18 nt, Human
uggggaguuuaggguggg

SEQ ID NO: 1330659 - RNA, 19 nt, Human
uggggaguuuagggugggg

SEQ ID NO: 1330660 - RNA, 16 nt, Human
uggggaguuaagaccu

SEQ ID NO: 1330661 - RNA, 17 nt, Human
uggggaguuaagaccug

SEQ ID NO: 1330662 - RNA, 18 nt, Human
uggggaguuaagaccugg

SEQ ID NO: 1330663 - RNA, 19 nt, Human
uggggaguuaagaccuggc

SEQ ID NO: 1330664 - RNA, 20 nt, Human
uggggaguuaagaccuggca

SEQ ID NO: 1330665 - RNA, 18 nt, Human
uggggguuguaaauuggc

SEQ ID NO: 1330666 - RNA, 12 nt, Human
uggggguuuuuu

SEQ ID NO: 1330667 - RNA, 20 nt, Human
ugggggaacucagauccagg

SEQ ID NO: 1330668 - RNA, 16 nt, Human
uggggcuugggggcuc

SEQ ID NO: 1330669 - RNA, 15 nt, Human
ugggggaaagcaaag

SEQ ID NO: 1330670 - RNA, 17 nt, Human
ugggggaaagcaaagca

SEQ ID NO: 1330671 - RNA, 20 nt, Human
ugggggaaagcaaagcacag

SEQ ID NO: 1330672 - RNA, 22 nt, Human
ugggggaaagcaaagcacagag

SEQ ID NO: 1330673 - RNA, 21 nt, Human
ugggggaaagcaaagcacaga

SEQ ID NO: 1330674 - RNA, 18 nt, Human
ugggggaacucagaucca

SEQ ID NO: 1330675 - RNA, 16 nt, Human
uggggcugguucugua

SEQ ID NO: 1330676 - RNA, 16 nt, Human
ugggauuuggucaaca

SEQ ID NO: 1330677 - RNA, 14 nt, Human
ugggauuugcugug

SEQ ID NO: 1330678 - RNA, 21 nt, Human
ugggauucuggacaggaugug

SEQ ID NO: 1330679 - RNA, 16 nt, Human
ugggauugagucugug

SEQ ID NO: 1330680 - RNA, 19 nt, Human
ugggauugagucugugcca

SEQ ID NO: 1330681 - RNA, 19 nt, Human
ugggaggugagaccaccuc

SEQ ID NO: 1330682 - RNA, 14 nt, Human
ugggaguacaaaag

SEQ ID NO: 1330683 - RNA, 20 nt, Human
ugggagguguuggcugcacg

SEQ ID NO: 1330684 - RNA, 23 nt, Human
ugggauucaggaaaaggccuggg

SEQ ID NO: 1330685 - RNA, 18 nt, Human
aggccuguuuggccucuc

SEQ ID NO: 1330686 - RNA, 16 nt, Human
aggccuguuuggccuc

SEQ ID NO: 1330687 - RNA, 17 nt, Human
ugggccagaauuucaaa

SEQ ID NO: 1330688 - RNA, 20 nt, Human
ugggccagaaguaccagacu

SEQ ID NO: 1330689 - RNA, 19 nt, Human
ugggcacccccagccuggg

SEQ ID NO: 1330690 - RNA, 20 nt, Human
ugggcacccccagccugggc

SEQ ID NO: 1330691 - RNA, 21 nt, Human
ugggcacccccagccugggcc

SEQ ID NO: 1330692 - RNA, 22 nt, Human
ugggcacccccagccugggccu

SEQ ID NO: 1330693 - RNA, 23 nt, Human
ugggcacccccagccugggccua

SEQ ID NO: 1330694 - RNA, 15 nt, Human
ugggcacccccagcc

SEQ ID NO: 1330695 - RNA, 16 nt, Human
ugggcacccccagccu

SEQ ID NO: 1330696 - RNA, 17 nt, Human
ugggcacccccagccug

SEQ ID NO: 1330697 - RNA, 18 nt, Human
ugggcacccccagccugg

SEQ ID NO: 1330698 - RNA, 21 nt, Human
ugggccagaaguaccagacua

SEQ ID NO: 1330699 - RNA, 18 nt, Human
ugggccagcuuuucaaac

SEQ ID NO: 1330700 - RNA, 18 nt, Human
ugggccagaauuucaaac

SEQ ID NO: 1330701 - RNA, 13 nt, Human
ugggccagacaug

SEQ ID NO: 1330702 - RNA, 18 nt, Human
ugggccagacaugccaca

SEQ ID NO: 1330703 - RNA, 19 nt, Human
ugggccagacaugccacaa

SEQ ID NO: 1330704 - RNA, 19 nt, Human
ugggccauucuccacagca

SEQ ID NO: 1330705 - RNA, 20 nt, Human
ugggccauucuccacagcaa

SEQ ID NO: 1330706 - RNA, 13 nt, Human
agggaggggcugu

SEQ ID NO: 1330707 - RNA, 15 nt, Human
agggagucugccagg

SEQ ID NO: 1330708 - RNA, 18 nt, Human
agggagucugccagggcc

SEQ ID NO: 1330709 - RNA, 12 nt, Human
agggcagcagcc

SEQ ID NO: 1330710 - RNA, 13 nt, Human
agggcagcagcca

SEQ ID NO: 1330711 - RNA, 14 nt, Human
agggcagcagccag

SEQ ID NO: 1330712 - RNA, 15 nt, Human
agggcagcagccagc

SEQ ID NO: 1330713 - RNA, 16 nt, Human
agggcagcagccagcc

SEQ ID NO: 1330714 - RNA, 17 nt, Human
agggcagcagccagccc

SEQ ID NO: 1330715 - RNA, 18 nt, Human
agggcagcagccagcccu

SEQ ID NO: 1330716 - RNA, 19 nt, Human
agggcagcagccagcccug

SEQ ID NO: 1330717 - RNA, 20 nt, Human
agggcagcagccagcccugc

SEQ ID NO: 1330718 - RNA, 21 nt, Human
agggcagcagccagcccugcc

SEQ ID NO: 1330719 - RNA, 22 nt, Human
agggcagcagccagcccugccu

SEQ ID NO: 1330720 - RNA, 23 nt, Human
agggcagcagccagcccugccug

SEQ ID NO: 1330721 - RNA, 15 nt, Human
ugggcccacaccucc

SEQ ID NO: 1330722 - RNA, 20 nt, Human
ugggcccacaccuccuuccc

SEQ ID NO: 1330723 - RNA, 16 nt, Human
ugggcccacaccuccu

SEQ ID NO: 1330724 - RNA, 15 nt, Human
ugggcccaggccuca

SEQ ID NO: 1330725 - RNA, 16 nt, Human
ugggccccacccucgg

SEQ ID NO: 1330726 - RNA, 14 nt, Human
ugggccccacccuc

SEQ ID NO: 1330727 - RNA, 12 nt, Human
agggcccagagc

SEQ ID NO: 1330728 - RNA, 13 nt, Human
agggcccagagcc

SEQ ID NO: 1330729 - RNA, 14 nt, Human
agggcccagagccc

SEQ ID NO: 1330730 - RNA, 15 nt, Human
agggcccagagccca

SEQ ID NO: 1330731 - RNA, 16 nt, Human
agggcccagagcccag

SEQ ID NO: 1330732 - RNA, 18 nt, Human
agggccggggaacuggcc

SEQ ID NO: 1330733 - RNA, 19 nt, Human
agggccggggaacuggcca

SEQ ID NO: 1330734 - RNA, 20 nt, Human
agggccggggaacuggccaa

SEQ ID NO: 1330735 - RNA, 21 nt, Human
agggccggggaacuggccaag

SEQ ID NO: 1330736 - RNA, 22 nt, Human
agggccggggaacuggccaagc

SEQ ID NO: 1330737 - RNA, 23 nt, Human
agggccggggaacuggccaagcu

SEQ ID NO: 1330738 - RNA, 14 nt, Human
agggcagcagggcu

SEQ ID NO: 1330739 - RNA, 15 nt, Human
agggcagcagggcua

SEQ ID NO: 1330740 - RNA, 13 nt, Human
agggcagccaggg

SEQ ID NO: 1330741 - RNA, 14 nt, Human
agggcagccaggga

SEQ ID NO: 1330742 - RNA, 15 nt, Human
agggcagccagggag

SEQ ID NO: 1330743 - RNA, 19 nt, Human
agggcagccagggagagcc

SEQ ID NO: 1330744 - RNA, 21 nt, Human
agggcagccagggagagccca

SEQ ID NO: 1330745 - RNA, 22 nt, Human
agggcagccagggagagcccag

SEQ ID NO: 1330746 - RNA, 23 nt, Human
agggcagccagggagagcccagg

SEQ ID NO: 1330747 - RNA, 14 nt, Human
agggcagcgccagg

SEQ ID NO: 1330748 - RNA, 16 nt, Human
agggcagcgccaggcu

SEQ ID NO: 1330749 - RNA, 22 nt, Human
agggcagggaccacacccugua

SEQ ID NO: 1330750 - RNA, 12 nt, Human
agggcagggccc

SEQ ID NO: 1330751 - RNA, 17 nt, Human
agggcagggccccaggc

SEQ ID NO: 1330752 - RNA, 16 nt, Human
agggcaggugcuucag

SEQ ID NO: 1330753 - RNA, 16 nt, Human
agggcagggggccccu

SEQ ID NO: 1330754 - RNA, 15 nt, Human
agggcaguaccugag

SEQ ID NO: 1330755 - RNA, 18 nt, Human
agggcaguaccugagggu

SEQ ID NO: 1330756 - RNA, 22 nt, Human
agggcaguaccugagggucugu

SEQ ID NO: 1330757 - RNA, 20 nt, Human
agggcagucauuggcugucu

SEQ ID NO: 1330758 - RNA, 20 nt, Human
agggcagucgauagagcugu

SEQ ID NO: 1330759 - RNA, 18 nt, Human
agggccagccucuagagc

SEQ ID NO: 1330760 - RNA, 23 nt, Human
aggacagcccuucuuuccacaga

SEQ ID NO: 1330761 - RNA, 17 nt, Human
aggacagaugccuccuu

SEQ ID NO: 1330762 - RNA, 20 nt, Human
aggacagaugccuccuuccu

SEQ ID NO: 1330763 - RNA, 21 nt, Human
aggacagaugccuccuuccuc

SEQ ID NO: 1330764 - RNA, 15 nt, Human
aggacagcacagacu

SEQ ID NO: 1330765 - RNA, 18 nt, Human
ugcuugauagaaaugcca

SEQ ID NO: 1330766 - RNA, 13 nt, Human
ugcuugauagaaa

SEQ ID NO: 1330767 - RNA, 19 nt, Human
ugcuugaugggauucugga

SEQ ID NO: 1330768 - RNA, 20 nt, Human
ugcuugaugggauucuggac

SEQ ID NO: 1330769 - RNA, 22 nt, Human
ugcuugaugggauucuggacag

SEQ ID NO: 1330770 - RNA, 12 nt, Human
ugcuugauuuuu

SEQ ID NO: 1330771 - RNA, 16 nt, Human
ugcuugcauaagagcu

SEQ ID NO: 1330772 - RNA, 17 nt, Human
ugcuugcauaagagcuu

SEQ ID NO: 1330773 - RNA, 15 nt, Human
ugcuugcuuugaagu

SEQ ID NO: 1330774 - RNA, 23 nt, Human
ugcuugcuuuucaugcaaacucu

SEQ ID NO: 1330775 - RNA, 15 nt, Human
ugcuuggagcugagc

SEQ ID NO: 1330776 - RNA, 17 nt, Human
ugcuuggagcugagcaa

SEQ ID NO: 1330777 - RNA, 15 nt, Human
ugcuuguaacuaaaa

SEQ ID NO: 1330778 - RNA, 12 nt, Human
ugcuuuugccca

SEQ ID NO: 1330779 - RNA, 14 nt, Human
ugcuuuugcccauu

SEQ ID NO: 1330780 - RNA, 19 nt, Human
ugcuuuuggcaaaacucua

SEQ ID NO: 1330781 - RNA, 21 nt, Human
ugcuuuuggcaaaacucuacu

SEQ ID NO: 1330782 - RNA, 17 nt, Human
ugcuuuuggcggggagg

SEQ ID NO: 1330783 - RNA, 18 nt, Human
ugcuuuugcccauuuuga

SEQ ID NO: 1330784 - RNA, 19 nt, Human
uggaaaggugugagacugg

SEQ ID NO: 1330785 - RNA, 22 nt, Human
uggaaaggugugagacugggaa

SEQ ID NO: 1330786 - RNA, 13 nt, Human
uggaagguauuua

SEQ ID NO: 1330787 - RNA, 17 nt, Human
uggaagguauuuaauag

SEQ ID NO: 1330788 - RNA, 23 nt, Human
uggaaggggacacgugacagccg

SEQ ID NO: 1330789 - RNA, 16 nt, Human
aggagcuaaggcucua

SEQ ID NO: 1330790 - RNA, 17 nt, Human
aggagcuaaggcucuau

SEQ ID NO: 1330791 - RNA, 19 nt, Human
aggagcuaaggcucuauga

SEQ ID NO: 1330792 - RNA, 20 nt, Human
aggagcuaaggcucuaugag

SEQ ID NO: 1330793 - RNA, 16 nt, Human
uggaagcuuggggaag

SEQ ID NO: 1330794 - RNA, 12 nt, Human
uggaaggagcag

SEQ ID NO: 1330795 - RNA, 20 nt, Human
uggaaggcaagauugugucc

SEQ ID NO: 1330796 - RNA, 14 nt, Human
uggaaggagcagaa

SEQ ID NO: 1330797 - RNA, 13 nt, Human
uggaaggagcaga

SEQ ID NO: 1330798 - RNA, 11 nt, Human
uggaaggcaug

SEQ ID NO: 1330799 - RNA, 14 nt, Human
uggaaggcauggcg

SEQ ID NO: 1330800 - RNA, 16 nt, Human
uggaagggaggugggc

SEQ ID NO: 1330801 - RNA, 19 nt, Human
uggaaaguacacucugcug

SEQ ID NO: 1330802 - RNA, 20 nt, Human
uggaaaguacacucugcugu

SEQ ID NO: 1330803 - RNA, 21 nt, Human
uggaagauggggaccagcagc

SEQ ID NO: 1330804 - RNA, 14 nt, Human
uggaagauagcugu

SEQ ID NO: 1330805 - RNA, 16 nt, Human
uggaagauagcuguga

SEQ ID NO: 1330806 - RNA, 18 nt, Human
uggaagauagcugugacu

SEQ ID NO: 1330807 - RNA, 21 nt, Human
uggaagauccugcgggugggg

SEQ ID NO: 1330808 - RNA, 13 nt, Human
uggaagauccugc

SEQ ID NO: 1330809 - RNA, 23 nt, Human
uggaagauggggaccagcagccc

SEQ ID NO: 1330810 - RNA, 19 nt, Human
aggaucccaugagcuccuu

SEQ ID NO: 1330811 - RNA, 14 nt, Human
aggauagaugcugg

SEQ ID NO: 1330812 - RNA, 14 nt, Human
aggauccggaaaga

SEQ ID NO: 1330813 - RNA, 16 nt, Human
aggauccggaaagaag

SEQ ID NO: 1330814 - RNA, 17 nt, Human
aggaggaaaucccuuca

SEQ ID NO: 1330815 - RNA, 23 nt, Human
aggagcuuugacucaggagccug

SEQ ID NO: 1330816 - RNA, 15 nt, Human
aggauaccauauaca

SEQ ID NO: 1330817 - RNA, 22 nt, Human
aggauaccauauacagcucaga

SEQ ID NO: 1330818 - RNA, 18 nt, Human
aggauacgacaguacacu

SEQ ID NO: 1330819 - RNA, 20 nt, Human
aggauacgacaguacacugu

SEQ ID NO: 1330820 - RNA, 18 nt, Human
aggauacuauauuuuagg

SEQ ID NO: 1330821 - RNA, 18 nt, Human
aggauacuggcacagagg

SEQ ID NO: 1330822 - RNA, 23 nt, Human
aggauagaaguauaccugauuuu

SEQ ID NO: 1330823 - RNA, 14 nt, Human
aggauagagacugg

SEQ ID NO: 1330824 - RNA, 21 nt, Human
aggagcuaaggcucuaugagu

SEQ ID NO: 1330825 - RNA, 12 nt, Human
aggagcuaccug

SEQ ID NO: 1330826 - RNA, 14 nt, Human
aggagcuaccugug

SEQ ID NO: 1330827 - RNA, 15 nt, Human
aggagcuaccugugu

SEQ ID NO: 1330828 - RNA, 16 nt, Human
aggagcuaccugugug

SEQ ID NO: 1330829 - RNA, 17 nt, Human
aggagcuaccugugugg

SEQ ID NO: 1330830 - RNA, 18 nt, Human
aggagcuaccugugugga

SEQ ID NO: 1330831 - RNA, 23 nt, Human
aggagcuaccuguguggacagga

SEQ ID NO: 1330832 - RNA, 22 nt, Human
aggagcuaccuguguggacagg

SEQ ID NO: 1330833 - RNA, 14 nt, Human
aggagcuccagugu

SEQ ID NO: 1330834 - RNA, 22 nt, Human
aggagcuccaguguccugagcu

SEQ ID NO: 1330835 - RNA, 12 nt, Human
aggagcuccccu

SEQ ID NO: 1330836 - RNA, 15 nt, Human
aggagcuccccuccc

SEQ ID NO: 1330837 - RNA, 17 nt, Human
aggagcuccccucccca

SEQ ID NO: 1330838 - RNA, 20 nt, Human
aggagcuccccuccccaacu

SEQ ID NO: 1330839 - RNA, 23 nt, Human
aggagcucuuaacuacaguggcu

SEQ ID NO: 1330840 - RNA, 22 nt, Human
aggagcugacucacaccugaac

SEQ ID NO: 1330841 - RNA, 15 nt, Human
aggagcugauacuuu

SEQ ID NO: 1330842 - RNA, 21 nt, Human
aggagcuccccuccccaacug

SEQ ID NO: 1330843 - RNA, 12 nt, Human
aggagcugggga

SEQ ID NO: 1330844 - RNA, 20 nt, Human
aggagcuggggaucccuccc

SEQ ID NO: 1330845 - RNA, 21 nt, Human
aggagcuggggaucccucccc

SEQ ID NO: 1330846 - RNA, 17 nt, Human
aggagcuuugacucagg

SEQ ID NO: 1330847 - RNA, 18 nt, Human
aggagcuuugacucagga

SEQ ID NO: 1330848 - RNA, 19 nt, Human
aggagcuuugacucaggag

SEQ ID NO: 1330849 - RNA, 14 nt, Human
uggaccugccugca

SEQ ID NO: 1330850 - RNA, 15 nt, Human
uggaccugccugcau

SEQ ID NO: 1330851 - RNA, 20 nt, Human
uggacacacacagacuauuu

SEQ ID NO: 1330852 - RNA, 16 nt, Human
uggacacacacagacu

SEQ ID NO: 1330853 - RNA, 13 nt, Human
uggaauucuaaca

SEQ ID NO: 1330854 - RNA, 22 nt, Human
uggaauucuuagucacaaaaua

SEQ ID NO: 1330855 - RNA, 12 nt, Human
uggaauugauuu

SEQ ID NO: 1330856 - RNA, 15 nt, Human
uggaauugauuugca

SEQ ID NO: 1330857 - RNA, 16 nt, Human
uggaauugauuugcau

SEQ ID NO: 1330858 - RNA, 17 nt, Human
uggaauugauuugcauu

SEQ ID NO: 1330859 - RNA, 18 nt, Human
uggaauugauuugcauug

SEQ ID NO: 1330860 - RNA, 19 nt, Human
uggaauugauuugcauuga

SEQ ID NO: 1330861 - RNA, 20 nt, Human
uggaauugauuugcauugaa

SEQ ID NO: 1330862 - RNA, 22 nt, Human
uggaauugauuugcauugaaca

SEQ ID NO: 1330863 - RNA, 23 nt, Human
uggaauugauuugcauugaacac

SEQ ID NO: 1330864 - RNA, 16 nt, Human
uggacaagcuucugag

SEQ ID NO: 1330865 - RNA, 17 nt, Human
uggacaagcuucugaga

SEQ ID NO: 1330866 - RNA, 19 nt, Human
uggacaagcuucugagacg

SEQ ID NO: 1330867 - RNA, 19 nt, Human
aggcaaaauugcaaaucuu

SEQ ID NO: 1330868 - RNA, 20 nt, Human
aggcaaaauugcaaaucuug

SEQ ID NO: 1330869 - RNA, 22 nt, Human
aggcaaacccaucaacaaaaau

SEQ ID NO: 1330870 - RNA, 13 nt, Human
aggcaaucauggu

SEQ ID NO: 1330871 - RNA, 14 nt, Human
uggagcucguggaa

SEQ ID NO: 1330872 - RNA, 22 nt, Human
aggcaaggcuguggaccaugga

SEQ ID NO: 1330873 - RNA, 16 nt, Human
uggagcuccagccuga

SEQ ID NO: 1330874 - RNA, 14 nt, Human
uggagcuccagccu

SEQ ID NO: 1330875 - RNA, 15 nt, Human
uggagcuccagccug

SEQ ID NO: 1330876 - RNA, 17 nt, Human
uggagcuccagccugac

SEQ ID NO: 1330877 - RNA, 20 nt, Human
aggcaccuaccaccacgccc

SEQ ID NO: 1330878 - RNA, 21 nt, Human
aggcaccuacacucaccugca

SEQ ID NO: 1330879 - RNA, 23 nt, Human
aggcaccuacacucaccugcacu

SEQ ID NO: 1330880 - RNA, 20 nt, Human
aggcaccucacaggccccag

SEQ ID NO: 1330881 - RNA, 14 nt, Human
aggcacccaucugu

SEQ ID NO: 1330882 - RNA, 14 nt, Human
uggagaagaacuga

SEQ ID NO: 1330883 - RNA, 15 nt, Human
uggacugugugcuca

SEQ ID NO: 1330884 - RNA, 14 nt, Human
uggacuugccucug

SEQ ID NO: 1330885 - RNA, 13 nt, Human
uggacuuuccugc

SEQ ID NO: 1330886 - RNA, 13 nt, Human
uggagaagaacug

SEQ ID NO: 1330887 - RNA, 14 nt, Human
uggagaacuagaga

SEQ ID NO: 1330888 - RNA, 19 nt, Human
uggacuuuccugcaacuca

SEQ ID NO: 1330889 - RNA, 14 nt, Human
uggacuuuccugca

SEQ ID NO: 1330890 - RNA, 18 nt, Human
uggacuuuccugcaacuc

SEQ ID NO: 1330891 - RNA, 17 nt, Human
aggccugacugccaagc

SEQ ID NO: 1330892 - RNA, 18 nt, Human
aggccugacugccaagcc

SEQ ID NO: 1330893 - RNA, 19 nt, Human
aggccugacugccaagcca

SEQ ID NO: 1330894 - RNA, 22 nt, Human
aggccugacugccaagccaugg

SEQ ID NO: 1330895 - RNA, 21 nt, Human
aggccugacugccaagccaug

SEQ ID NO: 1330896 - RNA, 14 nt, Human
uggcauagcucugg

SEQ ID NO: 1330897 - RNA, 15 nt, Human
uggcauagcucuggg

SEQ ID NO: 1330898 - RNA, 16 nt, Human
uggcauagcucugggg

SEQ ID NO: 1330899 - RNA, 13 nt, Human
uggcaucccuggg

SEQ ID NO: 1330900 - RNA, 14 nt, Human
uggcaucccugggc

SEQ ID NO: 1330901 - RNA, 15 nt, Human
uggcaucccugggcc

SEQ ID NO: 1330902 - RNA, 16 nt, Human
uggcaucccugggccu

SEQ ID NO: 1330903 - RNA, 20 nt, Human
uggcaucccugggccuuggg

SEQ ID NO: 1330904 - RNA, 21 nt, Human
uggcaucgcaccauucugacu

SEQ ID NO: 1330905 - RNA, 22 nt, Human
uggcaucgcaccauucugacuc

SEQ ID NO: 1330906 - RNA, 23 nt, Human
uggcaucgcaccauucugacucg

SEQ ID NO: 1330907 - RNA, 13 nt, Human
uggcaugagaaau

SEQ ID NO: 1330908 - RNA, 21 nt, Human
uggcaugagaaauacaaaaau

SEQ ID NO: 1330909 - RNA, 18 nt, Human
uggcaugagaaauacaaa

SEQ ID NO: 1330910 - RNA, 12 nt, Human
uggccacagcca

SEQ ID NO: 1330911 - RNA, 13 nt, Human
uggccacagccag

SEQ ID NO: 1330912 - RNA, 14 nt, Human
uggccacagccagg

SEQ ID NO: 1330913 - RNA, 18 nt, Human
uggccacagccaggggag

SEQ ID NO: 1330914 - RNA, 16 nt, Human
uggccacagccagggg

SEQ ID NO: 1330915 - RNA, 11 nt, Human
uggccaggugg

SEQ ID NO: 1330916 - RNA, 15 nt, Human
uggccagguggccac

SEQ ID NO: 1330917 - RNA, 11 nt, Human
uggccaccagu

SEQ ID NO: 1330918 - RNA, 17 nt, Human
uggccacaguagucuug

SEQ ID NO: 1330919 - RNA, 16 nt, Human
uggccaguccaggcug

SEQ ID NO: 1330920 - RNA, 16 nt, Human
uggccagguggccacu

SEQ ID NO: 1330921 - RNA, 17 nt, Human
uggccagguggccacuc

SEQ ID NO: 1330922 - RNA, 19 nt, Human
uggccagguggccacucca

SEQ ID NO: 1330923 - RNA, 14 nt, Human
uggccaguccaggc

SEQ ID NO: 1330924 - RNA, 15 nt, Human
uggccaguccaggcu

SEQ ID NO: 1330925 - RNA, 19 nt, Human
uggccaguguuuaaaacuu

SEQ ID NO: 1330926 - RNA, 18 nt, Human
uggccaguguuuaaaacu

SEQ ID NO: 1330927 - RNA, 16 nt, Human
uggccauacugugucc

SEQ ID NO: 1330928 - RNA, 15 nt, Human
uggccauauuuaccu

SEQ ID NO: 1330929 - RNA, 18 nt, Human
uggccauauuuaccucag

SEQ ID NO: 1330930 - RNA, 19 nt, Human
uggccauauuuaccucagc

SEQ ID NO: 1330931 - RNA, 20 nt, Human
uggccauauuuaccucagcc

SEQ ID NO: 1330932 - RNA, 21 nt, Human
uggccauauuuaccucagccu

SEQ ID NO: 1330933 - RNA, 22 nt, Human
uggccauauuuaccucagccug

SEQ ID NO: 1330934 - RNA, 24 nt, Human
uggccauauuuaccucagccuggg

SEQ ID NO: 1330935 - RNA, 23 nt, Human
uggccauauuuaccucagccugg

SEQ ID NO: 1330936 - RNA, 14 nt, Human
uggccaucugcucc

SEQ ID NO: 1330937 - RNA, 18 nt, Human
uggccaucugcuccugga

SEQ ID NO: 1330938 - RNA, 15 nt, Human
uggccaucugcuccu

SEQ ID NO: 1330939 - RNA, 14 nt, Human
uggccaugacccug

SEQ ID NO: 1330940 - RNA, 15 nt, Human
uggccaugacccugc

SEQ ID NO: 1330941 - RNA, 16 nt, Human
uggccaugacccugcc

SEQ ID NO: 1330942 - RNA, 17 nt, Human
uggccaugacccugccu

SEQ ID NO: 1330943 - RNA, 20 nt, Human
uggccaugacccugccucuc

SEQ ID NO: 1330944 - RNA, 14 nt, Human
uggcccugcccugg

SEQ ID NO: 1330945 - RNA, 19 nt, Human
uggcccaccccacccacuu

SEQ ID NO: 1330946 - RNA, 22 nt, Human
uggcccaccccacccacuucug

SEQ ID NO: 1330947 - RNA, 14 nt, Human
uggccauuugcuuu

SEQ ID NO: 1330948 - RNA, 15 nt, Human
uggccauuugcuuuu

SEQ ID NO: 1330949 - RNA, 21 nt, Human
uggccaugacccugccucucc

SEQ ID NO: 1330950 - RNA, 16 nt, Human
uggccaugcuccucuu

SEQ ID NO: 1330951 - RNA, 17 nt, Human
uggccaugcuccucuuc

SEQ ID NO: 1330952 - RNA, 21 nt, Human
uggccaugcuccucuucccca

SEQ ID NO: 1330953 - RNA, 22 nt, Human
uggccaugcuccucuuccccag

SEQ ID NO: 1330954 - RNA, 16 nt, Human
uggccauggagaaagc

SEQ ID NO: 1330955 - RNA, 17 nt, Human
uggccauggagaaagcu

SEQ ID NO: 1330956 - RNA, 18 nt, Human
uggccauggagaaagcug

SEQ ID NO: 1330957 - RNA, 22 nt, Human
uggccauggagaaagcugacuu

SEQ ID NO: 1330958 - RNA, 23 nt, Human
uggccauggagaaagcugacuug

SEQ ID NO: 1330959 - RNA, 13 nt, Human
uggccauggccug

SEQ ID NO: 1330960 - RNA, 14 nt, Human
uggccauggccugc

SEQ ID NO: 1330961 - RNA, 14 nt, Human
uggccaugggaggc

SEQ ID NO: 1330962 - RNA, 15 nt, Human
uggccaugggaggcc

SEQ ID NO: 1330963 - RNA, 16 nt, Human
uggccaugggaggccu

SEQ ID NO: 1330964 - RNA, 22 nt, Human
uggccaugggaggccuuucccu

SEQ ID NO: 1330965 - RNA, 23 nt, Human
uggccaugggaggccuuucccua

SEQ ID NO: 1330966 - RNA, 16 nt, Human
uggccuaaccugccga

SEQ ID NO: 1330967 - RNA, 17 nt, Human
uggccgugaaugggugc

SEQ ID NO: 1330968 - RNA, 21 nt, Human
uggccgugaaugggugcccac

SEQ ID NO: 1330969 - RNA, 23 nt, Human
uggcccaccccacccacuucugc

SEQ ID NO: 1330970 - RNA, 14 nt, Human
uggcccugcuuccu

SEQ ID NO: 1330971 - RNA, 17 nt, Human
uggcccugcuuccugcu

SEQ ID NO: 1330972 - RNA, 23 nt, Human
uggcccugggagaaucgcuccug

SEQ ID NO: 1330973 - RNA, 22 nt, Human
uggcccugggagaaucgcuccu

SEQ ID NO: 1330974 - RNA, 21 nt, Human
uggcccugggucccaggaccc

SEQ ID NO: 1330975 - RNA, 16 nt, Human
aggccugggcugggaa

SEQ ID NO: 1330976 - RNA, 22 nt, Human
aggccuguguagcugugaccug

SEQ ID NO: 1330977 - RNA, 24 nt, Human
aggccuguguagcugugaccugcu

SEQ ID NO: 1330978 - RNA, 23 nt, Human
aggccuguguagcugugaccugc

SEQ ID NO: 1330979 - RNA, 14 nt, Human
uggccuucggccuc

SEQ ID NO: 1330980 - RNA, 20 nt, Human
aggccugggccgcugccacg

SEQ ID NO: 1330981 - RNA, 21 nt, Human
aggccugggccgcugccacgu

SEQ ID NO: 1330982 - RNA, 17 nt, Human
uggccucuugagcagug

SEQ ID NO: 1330983 - RNA, 19 nt, Human
uggccucuugagcaguggc

SEQ ID NO: 1330984 - RNA, 20 nt, Human
uggccucuugagcaguggcu

SEQ ID NO: 1330985 - RNA, 22 nt, Human
uggccucuugagcaguggcugg

SEQ ID NO: 1330986 - RNA, 20 nt, Human
uggccucuuuccucagccuu

SEQ ID NO: 1330987 - RNA, 17 nt, Human
uggauuauauuaugaag

SEQ ID NO: 1330988 - RNA, 13 nt, Human
uggauggggcagg

SEQ ID NO: 1330989 - RNA, 20 nt, Human
uggauuacugccauucacuu

SEQ ID NO: 1330990 - RNA, 20 nt, Human
uggcaaucaaacauuuucug

SEQ ID NO: 1330991 - RNA, 13 nt, Human
uggcaaugccaca

SEQ ID NO: 1330992 - RNA, 14 nt, Human
uggcaaugccacag

SEQ ID NO: 1330993 - RNA, 15 nt, Human
uggaguacuuagcua

SEQ ID NO: 1330994 - RNA, 13 nt, Human
uggagguucuaag

SEQ ID NO: 1330995 - RNA, 15 nt, Human
uggagguucuaaggc

SEQ ID NO: 1330996 - RNA, 16 nt, Human
uggagguucuaaggcc

SEQ ID NO: 1330997 - RNA, 15 nt, Human
uggauggaaggggcu

SEQ ID NO: 1330998 - RNA, 14 nt, Human
uggauggccccagc

SEQ ID NO: 1330999 - RNA, 15 nt, Human
uggauggccccagca

SEQ ID NO: 1331000 - RNA, 16 nt, Human
uggauggccccagcac

SEQ ID NO: 1331001 - RNA, 17 nt, Human
uggauggccccagcaca

SEQ ID NO: 1331002 - RNA, 18 nt, Human
uggauggccccagcacag

SEQ ID NO: 1331003 - RNA, 21 nt, Human
uggauggccccagcacagcuu

SEQ ID NO: 1331004 - RNA, 20 nt, Human
uggauggggcaggccaccug

SEQ ID NO: 1331005 - RNA, 18 nt, Human
uggaugggggaacucaga

SEQ ID NO: 1331006 - RNA, 21 nt, Human
uggaugggggaacucagaucc

SEQ ID NO: 1331007 - RNA, 22 nt, Human
uggaugggggaacucagaucca

SEQ ID NO: 1331008 - RNA, 17 nt, Human
aggcagccagugcccug

SEQ ID NO: 1331009 - RNA, 18 nt, Human
aggcagccagugcccuga

SEQ ID NO: 1331010 - RNA, 19 nt, Human
aggcagccagugcccugag

SEQ ID NO: 1331011 - RNA, 20 nt, Human
aggcagccagugcccugagc

SEQ ID NO: 1331012 - RNA, 22 nt, Human
aggcagccagugcccugagcca

SEQ ID NO: 1331013 - RNA, 12 nt, Human
aggcagcccagg

SEQ ID NO: 1331014 - RNA, 15 nt, Human
aggcagcccaggaag

SEQ ID NO: 1331015 - RNA, 17 nt, Human
aggcagcccaggaaguc

SEQ ID NO: 1331016 - RNA, 21 nt, Human
aggcagcccaggaagucucau

SEQ ID NO: 1331017 - RNA, 17 nt, Human
uggagggguaggggcug

SEQ ID NO: 1331018 - RNA, 20 nt, Human
uggagggguaggggcuggga

SEQ ID NO: 1331019 - RNA, 22 nt, Human
uggagggguaggggcugggaac

SEQ ID NO: 1331020 - RNA, 21 nt, Human
uggagggguaggggcugggaa

SEQ ID NO: 1331021 - RNA, 13 nt, Human
uggaggggugugg

SEQ ID NO: 1331022 - RNA, 14 nt, Human
uggagggguguggc

SEQ ID NO: 1331023 - RNA, 23 nt, Human
uggagggguguggcuccuuccca

SEQ ID NO: 1331024 - RNA, 18 nt, Human
uggcacagggcaguggga

SEQ ID NO: 1331025 - RNA, 14 nt, Human
uggcaauuuugugg

SEQ ID NO: 1331026 - RNA, 18 nt, Human
uggcaauuuauuuuaaga

SEQ ID NO: 1331027 - RNA, 13 nt, Human
uggcaauuuugua

SEQ ID NO: 1331028 - RNA, 14 nt, Human
uggcaauuuuguaa

SEQ ID NO: 1331029 - RNA, 15 nt, Human
uggcaauuuuguaac

SEQ ID NO: 1331030 - RNA, 15 nt, Human
uggcaaugccacagc

SEQ ID NO: 1331031 - RNA, 19 nt, Human
uggcaaugccacagcccug

SEQ ID NO: 1331032 - RNA, 20 nt, Human
uggcaaugccacagcccugu

SEQ ID NO: 1331033 - RNA, 21 nt, Human
uggcaaugccacagcccuguc

SEQ ID NO: 1331034 - RNA, 19 nt, Human
uggcaaugccaucaucucc

SEQ ID NO: 1331035 - RNA, 23 nt, Human
uggcaaugccacagcccugucag

SEQ ID NO: 1331036 - RNA, 12 nt, Human
aggccccagccu

SEQ ID NO: 1331037 - RNA, 13 nt, Human
aggccccagccuc

SEQ ID NO: 1331038 - RNA, 14 nt, Human
aggccccagccucc

SEQ ID NO: 1331039 - RNA, 15 nt, Human
aggccccaacccugu

SEQ ID NO: 1331040 - RNA, 13 nt, Human
aggccagccuggc

SEQ ID NO: 1331041 - RNA, 20 nt, Human
aggcccagccgacccccucu

SEQ ID NO: 1331042 - RNA, 18 nt, Human
aggcccagccgacccccu

SEQ ID NO: 1331043 - RNA, 13 nt, Human
aggcccaggcugc

SEQ ID NO: 1331044 - RNA, 15 nt, Human
aggcccaggcugccg

SEQ ID NO: 1331045 - RNA, 17 nt, Human
aggcccaggcugccguc

SEQ ID NO: 1331046 - RNA, 18 nt, Human
aggcccaggcugccgucc

SEQ ID NO: 1331047 - RNA, 13 nt, Human
aggcccaggcugg

SEQ ID NO: 1331048 - RNA, 15 nt, Human
aggcccaggcuggga

SEQ ID NO: 1331049 - RNA, 16 nt, Human
aggcccaggcugggaa

SEQ ID NO: 1331050 - RNA, 17 nt, Human
aggcccaggcugggaac

SEQ ID NO: 1331051 - RNA, 17 nt, Human
aggcccaguucacccug

SEQ ID NO: 1331052 - RNA, 12 nt, Human
uggcagccuugu

SEQ ID NO: 1331053 - RNA, 15 nt, Human
uggcagccuugugau

SEQ ID NO: 1331054 - RNA, 22 nt, Human
aggccagaggcccccagcccag

SEQ ID NO: 1331055 - RNA, 22 nt, Human
aggccagcacucgcuagcagug

SEQ ID NO: 1331056 - RNA, 18 nt, Human
aggccagauuacaaauua

SEQ ID NO: 1331057 - RNA, 12 nt, Human
aggccagccugg

SEQ ID NO: 1331058 - RNA, 22 nt, Human
aggccagccgcgcaucagacug

SEQ ID NO: 1331059 - RNA, 14 nt, Human
ugcucauuucagga

SEQ ID NO: 1331060 - RNA, 14 nt, Human
ugcuccaagauucu

SEQ ID NO: 1331061 - RNA, 15 nt, Human
ugcuccaagauucua

SEQ ID NO: 1331062 - RNA, 16 nt, Human
ugcuccaagauucuag

SEQ ID NO: 1331063 - RNA, 17 nt, Human
ugcuccaagauucuaga

SEQ ID NO: 1331064 - RNA, 18 nt, Human
ugcuccaagauucuagau

SEQ ID NO: 1331065 - RNA, 19 nt, Human
ugcuccaagauucuagaug

SEQ ID NO: 1331066 - RNA, 14 nt, Human
ugcucauggaauug

SEQ ID NO: 1331067 - RNA, 15 nt, Human
ugcucccucacaugu

SEQ ID NO: 1331068 - RNA, 12 nt, Human
ugcucccucaga

SEQ ID NO: 1331069 - RNA, 13 nt, Human
ugcucccucagac

SEQ ID NO: 1331070 - RNA, 19 nt, Human
ugcucccucagacuggggc

SEQ ID NO: 1331071 - RNA, 14 nt, Human
ugcucccucagacu

SEQ ID NO: 1331072 - RNA, 16 nt, Human
ugcugacuguacuccu

SEQ ID NO: 1331073 - RNA, 19 nt, Human
ugcugacuguacuccuccc

SEQ ID NO: 1331074 - RNA, 21 nt, Human
agcuuuaaugauaugcuugua

SEQ ID NO: 1331075 - RNA, 18 nt, Human
agcuuuaacuuaaauagu

SEQ ID NO: 1331076 - RNA, 18 nt, Human
agcuuuagaaacagugca

SEQ ID NO: 1331077 - RNA, 18 nt, Human
agcuuuagaaucccagcc

SEQ ID NO: 1331078 - RNA, 16 nt, Human
ugcuaucucugugugc

SEQ ID NO: 1331079 - RNA, 21 nt, Human
ugcuaucucugugugcacaaa

SEQ ID NO: 1331080 - RNA, 20 nt, Human
ugcuaucucugugugcacaa

SEQ ID NO: 1331081 - RNA, 15 nt, Human
ugcuauggugcucug

SEQ ID NO: 1331082 - RNA, 17 nt, Human
ugcuaugguuuucucca

SEQ ID NO: 1331083 - RNA, 14 nt, Human
ugcuaugguuuucu

SEQ ID NO: 1331084 - RNA, 16 nt, Human
ugcuauucugucccua

SEQ ID NO: 1331085 - RNA, 17 nt, Human
ugcuauucugucccuag

SEQ ID NO: 1331086 - RNA, 20 nt, Human
ugcuauucugucccuaggug

SEQ ID NO: 1331087 - RNA, 20 nt, Human
ugcuauguuuugacauuuuu

SEQ ID NO: 1331088 - RNA, 11 nt, Human
ugcuauucugu

SEQ ID NO: 1331089 - RNA, 12 nt, Human
ugcuauucuguc

SEQ ID NO: 1331090 - RNA, 13 nt, Human
ugcuauucugucc

SEQ ID NO: 1331091 - RNA, 14 nt, Human
ugcuauucuguccc

SEQ ID NO: 1331092 - RNA, 15 nt, Human
ugcuauucugucccu

SEQ ID NO: 1331093 - RNA, 22 nt, Human
aggaagcccccaccgugggcag

SEQ ID NO: 1331094 - RNA, 14 nt, Human
aggaagccguccug

SEQ ID NO: 1331095 - RNA, 13 nt, Human
aggaagccucaga

SEQ ID NO: 1331096 - RNA, 14 nt, Human
aggaagccucagau

SEQ ID NO: 1331097 - RNA, 20 nt, Human
aggaagccucagauuccuuc

SEQ ID NO: 1331098 - RNA, 22 nt, Human
aggaagccucagauuccuuccc

SEQ ID NO: 1331099 - RNA, 19 nt, Human
aggaagccugcaguccugg

SEQ ID NO: 1331100 - RNA, 20 nt, Human
aggaagccugcaguccugga

SEQ ID NO: 1331101 - RNA, 12 nt, Human
aggaagccuucc

SEQ ID NO: 1331102 - RNA, 15 nt, Human
aggaaauccagggug

SEQ ID NO: 1331103 - RNA, 13 nt, Human
aggaaaucaaaug

SEQ ID NO: 1331104 - RNA, 21 nt, Human
aggaaaucaacuugcuuauca

SEQ ID NO: 1331105 - RNA, 15 nt, Human
aggaagcaagcuuaa

SEQ ID NO: 1331106 - RNA, 17 nt, Human
aggaagcaagcuuaaug

SEQ ID NO: 1331107 - RNA, 19 nt, Human
aggaagcccaauugcugga

SEQ ID NO: 1331108 - RNA, 13 nt, Human
aggaaauauuuau

SEQ ID NO: 1331109 - RNA, 14 nt, Human
aggaaauccagggu

SEQ ID NO: 1331110 - RNA, 15 nt, Human
aggaaauauacuuuu

SEQ ID NO: 1331111 - RNA, 12 nt, Human
aggaaauauuua

SEQ ID NO: 1331112 - RNA, 14 nt, Human
ugcugacuguagcu

SEQ ID NO: 1331113 - RNA, 17 nt, Human
ugcugacuguagcuuug

SEQ ID NO: 1331114 - RNA, 22 nt, Human
ugcugacuguagcuuuggaagu

SEQ ID NO: 1331115 - RNA, 21 nt, Human
ugcugacuguacuccucccag

SEQ ID NO: 1331116 - RNA, 22 nt, Human
ugcugacuguacuccucccagg

SEQ ID NO: 1331117 - RNA, 21 nt, Human
ugcuguauuuuaaaagaauga

SEQ ID NO: 1331118 - RNA, 22 nt, Human
ugcuguauuuuaaaagaaugau

SEQ ID NO: 1331119 - RNA, 13 nt, Human
ugcuguauuuuaa

SEQ ID NO: 1331120 - RNA, 16 nt, Human
ugcugggacucagccu

SEQ ID NO: 1331121 - RNA, 18 nt, Human
ugcugggacucagccuuc

SEQ ID NO: 1331122 - RNA, 22 nt, Human
ugcugggacucagccuucagac

SEQ ID NO: 1331123 - RNA, 23 nt, Human
ugcugggacucagccuucagaca

SEQ ID NO: 1331124 - RNA, 13 nt, Human
ugcuggcugccuu

SEQ ID NO: 1331125 - RNA, 23 nt, Human
ugcuggccgcccccagcccccuc

SEQ ID NO: 1331126 - RNA, 13 nt, Human
ugcuggccucugc

SEQ ID NO: 1331127 - RNA, 16 nt, Human
ugcuggccucugcgag

SEQ ID NO: 1331128 - RNA, 14 nt, Human
aggaauggaagucc

SEQ ID NO: 1331129 - RNA, 16 nt, Human
aggaaggacuaugaaa

SEQ ID NO: 1331130 - RNA, 23 nt, Human
aggaaugggaaggaugaagggcc

SEQ ID NO: 1331131 - RNA, 20 nt, Human
ugcuggaguuucauguacaa

SEQ ID NO: 1331132 - RNA, 13 nt, Human
aggacacaugucc

SEQ ID NO: 1331133 - RNA, 12 nt, Human
aggacacauguc

SEQ ID NO: 1331134 - RNA, 11 nt, Human
aggacacaugu

SEQ ID NO: 1331135 - RNA, 18 nt, Human
aggacacgggccugucca

SEQ ID NO: 1331136 - RNA, 23 nt, Human
aggacacgggccuguccacaggc

SEQ ID NO: 1331137 - RNA, 17 nt, Human
aggacagccccuccucc

SEQ ID NO: 1331138 - RNA, 15 nt, Human
aggacagagagaaau

SEQ ID NO: 1331139 - RNA, 14 nt, Human
aggacagagagaaa

SEQ ID NO: 1331140 - RNA, 16 nt, Human
aggacagaugccuccu

SEQ ID NO: 1331141 - RNA, 14 nt, Human
ugcuucaacugucu

SEQ ID NO: 1331142 - RNA, 16 nt, Human
ugcuucaagagaaaau

SEQ ID NO: 1331143 - RNA, 23 nt, Human
ugcuucaagagaaaaugcgguua

SEQ ID NO: 1331144 - RNA, 15 nt, Human
ugcuucauguguccc

SEQ ID NO: 1331145 - RNA, 17 nt, Human
ugcuucaugugucccag

SEQ ID NO: 1331146 - RNA, 19 nt, Human
ugcuucaugugucccagaa

SEQ ID NO: 1331147 - RNA, 21 nt, Human
ugcuucaugugucccagaaga

SEQ ID NO: 1331148 - RNA, 15 nt, Human
ugcuuccaauuuucu

SEQ ID NO: 1331149 - RNA, 23 nt, Human
ugcuguauuuuaaaagaaugauu

SEQ ID NO: 1331150 - RNA, 13 nt, Human
ugcugugcaaaug

SEQ ID NO: 1331151 - RNA, 20 nt, Human
ugcugugauacgaugcuuca

SEQ ID NO: 1331152 - RNA, 22 nt, Human
ugcugugauacgaugcuucaag

SEQ ID NO: 1331153 - RNA, 16 nt, Human
ugcugugcgcccaggg

SEQ ID NO: 1331154 - RNA, 17 nt, Human
ugcugugcgcccagggc

SEQ ID NO: 1331155 - RNA, 18 nt, Human
ugcugugcgcccagggcu

SEQ ID NO: 1331156 - RNA, 15 nt, Human
ugcugugcugugcua

SEQ ID NO: 1331157 - RNA, 22 nt, Human
ugcuguggaacuacauuacugu

SEQ ID NO: 1331158 - RNA, 18 nt, Human
ugcugugcugugcuaugg

SEQ ID NO: 1331159 - RNA, 13 nt, Human
ugcuguggccagg

SEQ ID NO: 1331160 - RNA, 14 nt, Human
ugcuguggccagga

SEQ ID NO: 1331161 - RNA, 15 nt, Human
ugcuguggccaggag

SEQ ID NO: 1331162 - RNA, 16 nt, Human
ugcuguggccaggagg

SEQ ID NO: 1331163 - RNA, 17 nt, Human
ugcuguggccaggaggu

SEQ ID NO: 1331164 - RNA, 14 nt, Human
ugcuuacugauaua

SEQ ID NO: 1331165 - RNA, 22 nt, Human
ugcuuacugauauauuuuacaa

SEQ ID NO: 1331166 - RNA, 18 nt, Human
ugcuuauuuauuguauuc

SEQ ID NO: 1331167 - RNA, 19 nt, Human
ugcuuauuuauuguauucu

SEQ ID NO: 1331168 - RNA, 21 nt, Human
ugcuuauuuauuguauucugg

SEQ ID NO: 1331169 - RNA, 23 nt, Human
ugcuuauuugacaacguuucagc

SEQ ID NO: 1331170 - RNA, 16 nt, Human
agcuguguggcagucu

SEQ ID NO: 1331171 - RNA, 14 nt, Human
agcuguguggcagu

SEQ ID NO: 1331172 - RNA, 16 nt, Human
agcugucuuuuggagg

SEQ ID NO: 1331173 - RNA, 14 nt, Human
agcuguccuuuuuc

SEQ ID NO: 1331174 - RNA, 16 nt, Human
agcuguccuuuuuccu

SEQ ID NO: 1331175 - RNA, 17 nt, Human
agcuguccuuuuuccuc

SEQ ID NO: 1331176 - RNA, 18 nt, Human
agcuguccuuuuuccucu

SEQ ID NO: 1331177 - RNA, 20 nt, Human
agcuguccuuuuuccucucc

SEQ ID NO: 1331178 - RNA, 23 nt, Human
agcuguccuuuuuccucuccaca

SEQ ID NO: 1331179 - RNA, 11 nt, Human
agcugucugcu

SEQ ID NO: 1331180 - RNA, 17 nt, Human
agcugucugcucagaca

SEQ ID NO: 1331181 - RNA, 21 nt, Human
agcuguccuuuuuccucucca

SEQ ID NO: 1331182 - RNA, 21 nt, Human
agcuggcucugugagggugcu

SEQ ID NO: 1331183 - RNA, 21 nt, Human
agcugggacaccccgacuuuu

SEQ ID NO: 1331184 - RNA, 18 nt, Human
agcuggcucugugagggu

SEQ ID NO: 1331185 - RNA, 20 nt, Human
agcuggcucugugagggugc

SEQ ID NO: 1331186 - RNA, 19 nt, Human
agcugucaucaauuaaagg

SEQ ID NO: 1331187 - RNA, 14 nt, Human
agcuguccccccac

SEQ ID NO: 1331188 - RNA, 23 nt, Human
agcuguccccccacucccucaca

SEQ ID NO: 1331189 - RNA, 22 nt, Human
agcuguccccccacucccucac

SEQ ID NO: 1331190 - RNA, 13 nt, Human
agcuggcucugag

SEQ ID NO: 1331191 - RNA, 14 nt, Human
agcuggcucugagc

SEQ ID NO: 1331192 - RNA, 19 nt, Human
agcuggcucugagcgccuc

SEQ ID NO: 1331193 - RNA, 20 nt, Human
agcuggcucugagcgccucc

SEQ ID NO: 1331194 - RNA, 23 nt, Human
agcuggcucugagcgccuccauc

SEQ ID NO: 1331195 - RNA, 11 nt, Human
agcuggcucua

SEQ ID NO: 1331196 - RNA, 14 nt, Human
agcuggcucuguga

SEQ ID NO: 1331197 - RNA, 22 nt, Human
agcuggcucugugagggugcug

SEQ ID NO: 1331198 - RNA, 14 nt, Human
ugccuguuucccag

SEQ ID NO: 1331199 - RNA, 16 nt, Human
ugccuguuucccaggc

SEQ ID NO: 1331200 - RNA, 19 nt, Human
ugccuguuucccaggccca

SEQ ID NO: 1331201 - RNA, 15 nt, Human
ugccuuagucucagu

SEQ ID NO: 1331202 - RNA, 22 nt, Human
agcuguguguuuggaagacuau

SEQ ID NO: 1331203 - RNA, 14 nt, Human
agcugucuuuugga

SEQ ID NO: 1331204 - RNA, 15 nt, Human
ugccugcccuauucu

SEQ ID NO: 1331205 - RNA, 21 nt, Human
ugccugccccuacccuggacu

SEQ ID NO: 1331206 - RNA, 22 nt, Human
ugccugccccuacccuggacuu

SEQ ID NO: 1331207 - RNA, 13 nt, Human
ugccugcccuggu

SEQ ID NO: 1331208 - RNA, 15 nt, Human
ugccugcccugguga

SEQ ID NO: 1331209 - RNA, 13 nt, Human
ugccugccugcuc

SEQ ID NO: 1331210 - RNA, 12 nt, Human
ugccuggacccg

SEQ ID NO: 1331211 - RNA, 12 nt, Human
ugcccaggcacu

SEQ ID NO: 1331212 - RNA, 15 nt, Human
ugcccaggcacugca

SEQ ID NO: 1331213 - RNA, 20 nt, Human
ugccuggagacuuagggcac

SEQ ID NO: 1331214 - RNA, 11 nt, Human
ugccuggagga

SEQ ID NO: 1331215 - RNA, 15 nt, Human
ugccuggaggaccug

SEQ ID NO: 1331216 - RNA, 16 nt, Human
ugccuggaggaccuga

SEQ ID NO: 1331217 - RNA, 18 nt, Human
ugccuggaggaccugagc

SEQ ID NO: 1331218 - RNA, 19 nt, Human
ugccuggaggaccugagcc

SEQ ID NO: 1331219 - RNA, 20 nt, Human
ugccuggaggaccugagccu

SEQ ID NO: 1331220 - RNA, 22 nt, Human
ugccuggaggaccugagccugc

SEQ ID NO: 1331221 - RNA, 23 nt, Human
ugccuggaguguaugacugcaca

SEQ ID NO: 1331222 - RNA, 21 nt, Human
ugccuggaggaccugagccug

SEQ ID NO: 1331223 - RNA, 19 nt, Human
agcugccggucgcccuuug

SEQ ID NO: 1331224 - RNA, 21 nt, Human
agcugccuagauucagggaaa

SEQ ID NO: 1331225 - RNA, 16 nt, Human
agcugccggucgcccu

SEQ ID NO: 1331226 - RNA, 14 nt, Human
agcuggaugagaau

SEQ ID NO: 1331227 - RNA, 15 nt, Human
agcuggcauuacagc

SEQ ID NO: 1331228 - RNA, 21 nt, Human
agcuggcauuacagcuggaga

SEQ ID NO: 1331229 - RNA, 15 nt, Human
ugcuaaggucuugga

SEQ ID NO: 1331230 - RNA, 23 nt, Human
ugcuaaggucuuggaacuugccu

SEQ ID NO: 1331231 - RNA, 12 nt, Human
ugcuaagguucu

SEQ ID NO: 1331232 - RNA, 13 nt, Human
ugcuaagguucua

SEQ ID NO: 1331233 - RNA, 14 nt, Human
ugcuaagguucuaa

SEQ ID NO: 1331234 - RNA, 15 nt, Human
ugcuaagguucuaag

SEQ ID NO: 1331235 - RNA, 16 nt, Human
ugcuaagguucuaagg

SEQ ID NO: 1331236 - RNA, 17 nt, Human
ugcuaagguucuaaggc

SEQ ID NO: 1331237 - RNA, 18 nt, Human
ugcuaagguucuaaggcc

SEQ ID NO: 1331238 - RNA, 12 nt, Human
ugcuacaauguc

SEQ ID NO: 1331239 - RNA, 15 nt, Human
agcuuagacuaaggc

SEQ ID NO: 1331240 - RNA, 20 nt, Human
agcuugaccugaggcugugg

SEQ ID NO: 1331241 - RNA, 14 nt, Human
agcuuggggaagac

SEQ ID NO: 1331242 - RNA, 23 nt, Human
ugccuuugaccugccucccuuca

SEQ ID NO: 1331243 - RNA, 17 nt, Human
ugccuuugaccugccuc

SEQ ID NO: 1331244 - RNA, 13 nt, Human
ugccuuugaccug

SEQ ID NO: 1331245 - RNA, 16 nt, Human
ugccuuagucucaguu

SEQ ID NO: 1331246 - RNA, 20 nt, Human
ugccuuagucucaguuugug

SEQ ID NO: 1331247 - RNA, 14 nt, Human
ugccuuaucuugca

SEQ ID NO: 1331248 - RNA, 17 nt, Human
ugccuuucaggaucuau

SEQ ID NO: 1331249 - RNA, 19 nt, Human
ugccuuucaggaucuauuu

SEQ ID NO: 1331250 - RNA, 22 nt, Human
ugccuuuccauccauggccagc

SEQ ID NO: 1331251 - RNA, 20 nt, Human
ugccuuuccauccauggcca

SEQ ID NO: 1331252 - RNA, 21 nt, Human
ugccuuuccauccauggccag

SEQ ID NO: 1331253 - RNA, 16 nt, Human
ugccuuuuaguuccug

SEQ ID NO: 1331254 - RNA, 16 nt, Human
ugccuuugccagguga

SEQ ID NO: 1331255 - RNA, 17 nt, Human
ugccuuugccaggugac

SEQ ID NO: 1331256 - RNA, 23 nt, Human
ugcggaggaaggaggacccagga

SEQ ID NO: 1331257 - RNA, 22 nt, Human
ugcggaggaaggaggacccagg

SEQ ID NO: 1331258 - RNA, 21 nt, Human
ugcggaggaaggaggacccag

SEQ ID NO: 1331259 - RNA, 13 nt, Human
ugcggauggccgg

SEQ ID NO: 1331260 - RNA, 17 nt, Human
ugccuuuucccaacucc

SEQ ID NO: 1331261 - RNA, 18 nt, Human
ugccuuuuaguuccugug

SEQ ID NO: 1331262 - RNA, 14 nt, Human
ugccuuuuauccca

SEQ ID NO: 1331263 - RNA, 18 nt, Human
ugcggaccacccucacug

SEQ ID NO: 1331264 - RNA, 22 nt, Human
ugcggaccacccucacuggcuc

SEQ ID NO: 1331265 - RNA, 22 nt, Human
ugcgggugaacaaagcagccac

SEQ ID NO: 1331266 - RNA, 23 nt, Human
ugcgggugaacaaagcagccacg

SEQ ID NO: 1331267 - RNA, 23 nt, Human
ugcggguggggcuuggggcucac

SEQ ID NO: 1331268 - RNA, 16 nt, Human
ugcgggugagaguaau

SEQ ID NO: 1331269 - RNA, 14 nt, Human
ugcgggucacagga

SEQ ID NO: 1331270 - RNA, 16 nt, Human
ugcgggucacaggagg

SEQ ID NO: 1331271 - RNA, 22 nt, Human
ugcggggguuccguguccaccc

SEQ ID NO: 1331272 - RNA, 15 nt, Human
ugcggggugggggca

SEQ ID NO: 1331273 - RNA, 17 nt, Human
ugcgggucacaggaggg

SEQ ID NO: 1331274 - RNA, 18 nt, Human
ugcgggugaacaaagcag

SEQ ID NO: 1331275 - RNA, 21 nt, Human
ugcgggugaacaaagcagcca

SEQ ID NO: 1331276 - RNA, 13 nt, Human
ugcggcuccucag

SEQ ID NO: 1331277 - RNA, 15 nt, Human
ugcggcuccucaggg

SEQ ID NO: 1331278 - RNA, 14 nt, Human
ugcggcuggccaug

SEQ ID NO: 1331279 - RNA, 15 nt, Human
ugcggcuggccaugg

SEQ ID NO: 1331280 - RNA, 23 nt, Human
ugcggcuggccauggagaaagcu

SEQ ID NO: 1331281 - RNA, 22 nt, Human
ugcggcuggccauggagaaagc

SEQ ID NO: 1331282 - RNA, 12 nt, Human
ugcggcugugug

SEQ ID NO: 1331283 - RNA, 13 nt, Human
ugcggcugugugu

SEQ ID NO: 1331284 - RNA, 14 nt, Human
ugcggcugugugug

SEQ ID NO: 1331285 - RNA, 18 nt, Human
agcuaggaauuguguuua

SEQ ID NO: 1331286 - RNA, 18 nt, Human
agcuaggaagagcaggac

SEQ ID NO: 1331287 - RNA, 21 nt, Human
agcuaggaagagcaggacucc

SEQ ID NO: 1331288 - RNA, 12 nt, Human
agcuaggaauga

SEQ ID NO: 1331289 - RNA, 13 nt, Human
agcuaggaaugaa

SEQ ID NO: 1331290 - RNA, 15 nt, Human
agcuaggagcaaagc

SEQ ID NO: 1331291 - RNA, 16 nt, Human
agcuaggagcaaagcc

SEQ ID NO: 1331292 - RNA, 17 nt, Human
agcuaggagcaaagccu

SEQ ID NO: 1331293 - RNA, 18 nt, Human
agcuaggagcaaagccug

SEQ ID NO: 1331294 - RNA, 19 nt, Human
agcuaggagcaaagccugu

SEQ ID NO: 1331295 - RNA, 20 nt, Human
agcuaggagcaaagccuguu

SEQ ID NO: 1331296 - RNA, 21 nt, Human
agcuaggagcaaagccuguuc

SEQ ID NO: 1331297 - RNA, 13 nt, Human
agcucagcugcau

SEQ ID NO: 1331298 - RNA, 19 nt, Human
agcucagcugcauuccgca

SEQ ID NO: 1331299 - RNA, 13 nt, Human
agcucaggacaga

SEQ ID NO: 1331300 - RNA, 17 nt, Human
agcucaggacagaugcc

SEQ ID NO: 1331301 - RNA, 18 nt, Human
agcucaggacagaugcca

SEQ ID NO: 1331302 - RNA, 20 nt, Human
agcucaggaaccgaggcagg

SEQ ID NO: 1331303 - RNA, 23 nt, Human
agcucagcugcauuccgcagccc

SEQ ID NO: 1331304 - RNA, 21 nt, Human
agcucaggaaccgaggcaggg

SEQ ID NO: 1331305 - RNA, 22 nt, Human
agcucaggaaccgaggcaggga

SEQ ID NO: 1331306 - RNA, 17 nt, Human
agcucaucuucacugca

SEQ ID NO: 1331307 - RNA, 16 nt, Human
agcucaucuucacugc

SEQ ID NO: 1331308 - RNA, 22 nt, Human
agcucaugugcauuauuuucca

SEQ ID NO: 1331309 - RNA, 21 nt, Human
agcucauccaugccucagaag

SEQ ID NO: 1331310 - RNA, 21 nt, Human
ugcccaagaauagaugcugac

SEQ ID NO: 1331311 - RNA, 16 nt, Human
agcuccaaccugcaaa

SEQ ID NO: 1331312 - RNA, 18 nt, Human
agcuccaaccugcaaaga

SEQ ID NO: 1331313 - RNA, 13 nt, Human
agcuccaaccugc

SEQ ID NO: 1331314 - RNA, 14 nt, Human
agcuccaaccugca

SEQ ID NO: 1331315 - RNA, 15 nt, Human
agcuccaaccugcaa

SEQ ID NO: 1331316 - RNA, 22 nt, Human
ugcccaagaauagaugcugacu

SEQ ID NO: 1331317 - RNA, 23 nt, Human
ugcccaagaauagaugcugacug

SEQ ID NO: 1331318 - RNA, 11 nt, Human
ugcccaagcca

SEQ ID NO: 1331319 - RNA, 13 nt, Human
ugcccaagccaga

SEQ ID NO: 1331320 - RNA, 14 nt, Human
ugcccaagccagag

SEQ ID NO: 1331321 - RNA, 15 nt, Human
ugcccaagccagagg

SEQ ID NO: 1331322 - RNA, 22 nt, Human
ugcccaagccagaggcuggguu

SEQ ID NO: 1331323 - RNA, 16 nt, Human
ugcccaagccagaggc

SEQ ID NO: 1331324 - RNA, 18 nt, Human
ugcccaagccagaggcug

SEQ ID NO: 1331325 - RNA, 20 nt, Human
ugcccaagccagaggcuggg

SEQ ID NO: 1331326 - RNA, 12 nt, Human
ugcccacaggcc

SEQ ID NO: 1331327 - RNA, 14 nt, Human
ugcccacaggccgc

SEQ ID NO: 1331328 - RNA, 21 nt, Human
ugcccacaggccgcccugcgg

SEQ ID NO: 1331329 - RNA, 19 nt, Human
ugcccagcccuaaacauca

SEQ ID NO: 1331330 - RNA, 19 nt, Human
agcuacuaauuuuaaaaug

SEQ ID NO: 1331331 - RNA, 18 nt, Human
agcuaccuguguggacag

SEQ ID NO: 1331332 - RNA, 19 nt, Human
agcuaccuguguggacagg

SEQ ID NO: 1331333 - RNA, 20 nt, Human
agcuaccuguguggacagga

SEQ ID NO: 1331334 - RNA, 22 nt, Human
agcuaccuguguggacaggacu

SEQ ID NO: 1331335 - RNA, 16 nt, Human
agcuacguauuuaaua

SEQ ID NO: 1331336 - RNA, 14 nt, Human
agcuacuaaaauca

SEQ ID NO: 1331337 - RNA, 15 nt, Human
agcgugagcugagca

SEQ ID NO: 1331338 - RNA, 16 nt, Human
agcgugagcugagcag

SEQ ID NO: 1331339 - RNA, 12 nt, Human
agcgugagcuua

SEQ ID NO: 1331340 - RNA, 20 nt, Human
agcgugagcuuaaaauacaa

SEQ ID NO: 1331341 - RNA, 21 nt, Human
agcuacccuuuuucuccagcu

SEQ ID NO: 1331342 - RNA, 22 nt, Human
agcuaccugcucagcccugcac

SEQ ID NO: 1331343 - RNA, 22 nt, Human
ugccacacuucaggcucuucuc

SEQ ID NO: 1331344 - RNA, 23 nt, Human
ugccacacuucaggcucuucucc

SEQ ID NO: 1331345 - RNA, 21 nt, Human
ugccagagaacccagcccacc

SEQ ID NO: 1331346 - RNA, 13 nt, Human
ugccagagaaccc

SEQ ID NO: 1331347 - RNA, 12 nt, Human
agcgggggaggg

SEQ ID NO: 1331348 - RNA, 21 nt, Human
agcgggggaggguaggcagga

SEQ ID NO: 1331349 - RNA, 18 nt, Human
agcgggggccuaaaaaaa

SEQ ID NO: 1331350 - RNA, 16 nt, Human
agcgggucugcuccca

SEQ ID NO: 1331351 - RNA, 13 nt, Human
agcgggucugcuc

SEQ ID NO: 1331352 - RNA, 14 nt, Human
agcggugucucucc

SEQ ID NO: 1331353 - RNA, 20 nt, Human
agcggugucucuccugcccc

SEQ ID NO: 1331354 - RNA, 13 nt, Human
agcuagaauuuga

SEQ ID NO: 1331355 - RNA, 16 nt, Human
agcuagaauuugauau

SEQ ID NO: 1331356 - RNA, 15 nt, Human
agcuagaacccucug

SEQ ID NO: 1331357 - RNA, 16 nt, Human
agcuagaacccucugu

SEQ ID NO: 1331358 - RNA, 17 nt, Human
agcuagaacccucuguu

SEQ ID NO: 1331359 - RNA, 18 nt, Human
agcuacuugggaggcuga

SEQ ID NO: 1331360 - RNA, 17 nt, Human
agcuacuugggaggcug

SEQ ID NO: 1331361 - RNA, 16 nt, Human
agcuacuaaaaucagu

SEQ ID NO: 1331362 - RNA, 14 nt, Human
agcuagaauugagu

SEQ ID NO: 1331363 - RNA, 20 nt, Human
agcuagaauugaguguuuaa

SEQ ID NO: 1331364 - RNA, 15 nt, Human
agcuagacacaugaa

SEQ ID NO: 1331365 - RNA, 16 nt, Human
agcuagacacaugaag

SEQ ID NO: 1331366 - RNA, 17 nt, Human
agcuagacacaugaagg

SEQ ID NO: 1331367 - RNA, 15 nt, Human
agccuguuuaagaga

SEQ ID NO: 1331368 - RNA, 13 nt, Human
agccuguuuaaga

SEQ ID NO: 1331369 - RNA, 14 nt, Human
agccuguucauggc

SEQ ID NO: 1331370 - RNA, 16 nt, Human
agccuguucauggcag

SEQ ID NO: 1331371 - RNA, 17 nt, Human
agccuguucauggcaga

SEQ ID NO: 1331372 - RNA, 18 nt, Human
agccuguucauggcagau

SEQ ID NO: 1331373 - RNA, 19 nt, Human
agccuguucauggcagaug

SEQ ID NO: 1331374 - RNA, 20 nt, Human
agccuuagcucucccaacuc

SEQ ID NO: 1331375 - RNA, 13 nt, Human
agccuucaagcuc

SEQ ID NO: 1331376 - RNA, 14 nt, Human
agccuucaagcucu

SEQ ID NO: 1331377 - RNA, 15 nt, Human
agccuucaagcucug

SEQ ID NO: 1331378 - RNA, 16 nt, Human
agccuucaagcucuga

SEQ ID NO: 1331379 - RNA, 17 nt, Human
agccuucaagcucugag

SEQ ID NO: 1331380 - RNA, 18 nt, Human
agccuucaagcucugagg

SEQ ID NO: 1331381 - RNA, 19 nt, Human
agccuucaagcucugaggg

SEQ ID NO: 1331382 - RNA, 20 nt, Human
agccuucaagcucugaggga

SEQ ID NO: 1331383 - RNA, 23 nt, Human
agccuucaagcucugagggaaag

SEQ ID NO: 1331384 - RNA, 22 nt, Human
agccuggguguaaaaccuggag

SEQ ID NO: 1331385 - RNA, 21 nt, Human
agccuggguguaaaaccugga

SEQ ID NO: 1331386 - RNA, 20 nt, Human
ugcauacauucuucaagauc

SEQ ID NO: 1331387 - RNA, 22 nt, Human
ugcauacacuuuuucucuuucc

SEQ ID NO: 1331388 - RNA, 14 nt, Human
agccugggggccug

SEQ ID NO: 1331389 - RNA, 15 nt, Human
agccugggggccugg

SEQ ID NO: 1331390 - RNA, 16 nt, Human
agccugggggccuggc

SEQ ID NO: 1331391 - RNA, 17 nt, Human
agccugggggccuggcu

SEQ ID NO: 1331392 - RNA, 18 nt, Human
agccugggggccuggcug

SEQ ID NO: 1331393 - RNA, 19 nt, Human
agccugggggccuggcugg

SEQ ID NO: 1331394 - RNA, 20 nt, Human
agccugggggccuggcuggc

SEQ ID NO: 1331395 - RNA, 21 nt, Human
agccugggggccuggcuggcu

SEQ ID NO: 1331396 - RNA, 22 nt, Human
agccugggggccuggcuggcug

SEQ ID NO: 1331397 - RNA, 15 nt, Human
agccuggggucugga

SEQ ID NO: 1331398 - RNA, 23 nt, Human
agccugggggccuggcuggcuga

SEQ ID NO: 1331399 - RNA, 12 nt, Human
agccugggugua

SEQ ID NO: 1331400 - RNA, 20 nt, Human
agccuggguguaaaaccugg

SEQ ID NO: 1331401 - RNA, 23 nt, Human
agcgccuccaacccuagcaaaag

SEQ ID NO: 1331402 - RNA, 22 nt, Human
agcgccuccaacccuagcaaaa

SEQ ID NO: 1331403 - RNA, 19 nt, Human
agcgccuccaacccuagca

SEQ ID NO: 1331404 - RNA, 18 nt, Human
agcgccuccaacccuagc

SEQ ID NO: 1331405 - RNA, 18 nt, Human
agcgccuccauccaaggc

SEQ ID NO: 1331406 - RNA, 20 nt, Human
agcgccuccauccaaggcca

SEQ ID NO: 1331407 - RNA, 23 nt, Human
agcgccuccauccaaggccaggu

SEQ ID NO: 1331408 - RNA, 22 nt, Human
agcgccuccauccaaggccagg

SEQ ID NO: 1331409 - RNA, 14 nt, Human
agcggaggugugga

SEQ ID NO: 1331410 - RNA, 20 nt, Human
agccuuggggcugaugcagu

SEQ ID NO: 1331411 - RNA, 13 nt, Human
agccuuccaccca

SEQ ID NO: 1331412 - RNA, 14 nt, Human
agccuuccacccag

SEQ ID NO: 1331413 - RNA, 15 nt, Human
agccuuccacccagg

SEQ ID NO: 1331414 - RNA, 16 nt, Human
agccuuguaauucuaa

SEQ ID NO: 1331415 - RNA, 18 nt, Human
agccuuguaauucuaaau

SEQ ID NO: 1331416 - RNA, 21 nt, Human
agccuugugaugucauacaga

SEQ ID NO: 1331417 - RNA, 22 nt, Human
agccuugugaugucauacagag

SEQ ID NO: 1331418 - RNA, 23 nt, Human
agccuugugaugucauacagaga

SEQ ID NO: 1331419 - RNA, 13 nt, Human
ugcauuaugcaau

SEQ ID NO: 1331420 - RNA, 18 nt, Human
ugcauuaugcaauuuuua

SEQ ID NO: 1331421 - RNA, 23 nt, Human
ugcauugaacacaaacuguaaau

SEQ ID NO: 1331422 - RNA, 22 nt, Human
ugcauugaccgcgacuaauuuc

SEQ ID NO: 1331423 - RNA, 20 nt, Human
ugcauugaccgcgacuaauu

SEQ ID NO: 1331424 - RNA, 17 nt, Human
ugcauugacuuucccca

SEQ ID NO: 1331425 - RNA, 22 nt, Human
ugcauugacuuuccccaccaga

SEQ ID NO: 1331426 - RNA, 18 nt, Human
ugcauugacuuuccccac

SEQ ID NO: 1331427 - RNA, 19 nt, Human
ugcauugcuuuuuuuuccu

SEQ ID NO: 1331428 - RNA, 17 nt, Human
ugcauuggaacuggagg

SEQ ID NO: 1331429 - RNA, 18 nt, Human
ugcauuggaacuggaggc

SEQ ID NO: 1331430 - RNA, 21 nt, Human
ugcauuggaacuggaggcagg

SEQ ID NO: 1331431 - RNA, 22 nt, Human
ugcauuggaacuggaggcaggg

SEQ ID NO: 1331432 - RNA, 17 nt, Human
ugccaagggcauaaauu

SEQ ID NO: 1331433 - RNA, 21 nt, Human
ugccaagggcauaaauuauug

SEQ ID NO: 1331434 - RNA, 21 nt, Human
ugccaagggcuuuguuuugca

SEQ ID NO: 1331435 - RNA, 13 nt, Human
ugccaaguccagg

SEQ ID NO: 1331436 - RNA, 15 nt, Human
ugccaaguccagguc

SEQ ID NO: 1331437 - RNA, 17 nt, Human
ugccaaguccagguccu

SEQ ID NO: 1331438 - RNA, 20 nt, Human
ugccaaguccagguccuggu

SEQ ID NO: 1331439 - RNA, 21 nt, Human
ugccaauaauaauaccucccu

SEQ ID NO: 1331440 - RNA, 22 nt, Human
ugccaauaauaauaccucccuu

SEQ ID NO: 1331441 - RNA, 21 nt, Human
ugccaaguccagguccuggug

SEQ ID NO: 1331442 - RNA, 13 nt, Human
ugccaauuucaag

SEQ ID NO: 1331443 - RNA, 15 nt, Human
ugccaauuagcaauu

SEQ ID NO: 1331444 - RNA, 13 nt, Human
ugccacacuucag

SEQ ID NO: 1331445 - RNA, 14 nt, Human
ugccacacuucagg

SEQ ID NO: 1331446 - RNA, 15 nt, Human
ugccacacuucaggc

SEQ ID NO: 1331447 - RNA, 16 nt, Human
ugccacacuucaggcu

SEQ ID NO: 1331448 - RNA, 15 nt, Human
ugccacaaggacuuc

SEQ ID NO: 1331449 - RNA, 16 nt, Human
ugccacaaggacuucc

SEQ ID NO: 1331450 - RNA, 23 nt, Human
ugcagcccccacugccuuugacc

SEQ ID NO: 1331451 - RNA, 17 nt, Human
ugcagcccccacugccu

SEQ ID NO: 1331452 - RNA, 19 nt, Human
agccugaaccccagggcug

SEQ ID NO: 1331453 - RNA, 22 nt, Human
agccugaaagaggaaugaagua

SEQ ID NO: 1331454 - RNA, 18 nt, Human
agccugacccucaucuuu

SEQ ID NO: 1331455 - RNA, 22 nt, Human
agccugacaucaaaaaaggcag

SEQ ID NO: 1331456 - RNA, 20 nt, Human
agccugaauuuuguugcugu

SEQ ID NO: 1331457 - RNA, 21 nt, Human
agccugaauuuuguugcuguu

SEQ ID NO: 1331458 - RNA, 17 nt, Human
agccugacaacauuucu

SEQ ID NO: 1331459 - RNA, 18 nt, Human
agccugaaccccagggcu

SEQ ID NO: 1331460 - RNA, 14 nt, Human
ugcagcccugcugc

SEQ ID NO: 1331461 - RNA, 14 nt, Human
ugcagccugcgcca

SEQ ID NO: 1331462 - RNA, 17 nt, Human
ugcagcgacuggcauac

SEQ ID NO: 1331463 - RNA, 20 nt, Human
ugcagcucaagagaucccaa

SEQ ID NO: 1331464 - RNA, 16 nt, Human
ugcaggucccuaauaa

SEQ ID NO: 1331465 - RNA, 15 nt, Human
ugcaggucccuaaua

SEQ ID NO: 1331466 - RNA, 14 nt, Human
ugcaggucccuaau

SEQ ID NO: 1331467 - RNA, 12 nt, Human
ugcaggucccua

SEQ ID NO: 1331468 - RNA, 17 nt, Human
ugcaggucccuaauaaa

SEQ ID NO: 1331469 - RNA, 14 nt, Human
ugcaguaaaucuuu

SEQ ID NO: 1331470 - RNA, 15 nt, Human
ugcaguaaaucuuuu

SEQ ID NO: 1331471 - RNA, 18 nt, Human
ugcaguaaaucuuuuaca

SEQ ID NO: 1331472 - RNA, 21 nt, Human
ugcaguaaaucuuuuacaacu

SEQ ID NO: 1331473 - RNA, 11 nt, Human
ugcaguaacug

SEQ ID NO: 1331474 - RNA, 16 nt, Human
ugcaguaacuguuuuu

SEQ ID NO: 1331475 - RNA, 18 nt, Human
ugcaguaacuguuuuuua

SEQ ID NO: 1331476 - RNA, 18 nt, Human
ugcaguacuuuaccuccu

SEQ ID NO: 1331477 - RNA, 21 nt, Human
ugcaguaacuguuuuuuaagu

SEQ ID NO: 1331478 - RNA, 17 nt, Human
ugcaguacuuugugcau

SEQ ID NO: 1331479 - RNA, 18 nt, Human
ugcaguacuuugugcauu

SEQ ID NO: 1331480 - RNA, 22 nt, Human
ugcagucucuauaccaauaaag

SEQ ID NO: 1331481 - RNA, 23 nt, Human
ugcagucucuauaccaauaaagu

SEQ ID NO: 1331482 - RNA, 21 nt, Human
ugcagucucuauaccaauaaa

SEQ ID NO: 1331483 - RNA, 20 nt, Human
ugcagucucuauaccaauaa

SEQ ID NO: 1331484 - RNA, 19 nt, Human
ugcagucucuauaccaaua

SEQ ID NO: 1331485 - RNA, 18 nt, Human
ugcagucucuauaccaau

SEQ ID NO: 1331486 - RNA, 16 nt, Human
ugcagucucuauacca

SEQ ID NO: 1331487 - RNA, 19 nt, Human
ugcaguccugaucagagcc

SEQ ID NO: 1331488 - RNA, 22 nt, Human
ugcaguccugaucagagccgug

SEQ ID NO: 1331489 - RNA, 11 nt, Human
ugcagucccaa

SEQ ID NO: 1331490 - RNA, 13 nt, Human
ugcagucccaagc

SEQ ID NO: 1331491 - RNA, 14 nt, Human
ugcagucccaagcg

SEQ ID NO: 1331492 - RNA, 20 nt, Human
ugcagucccaagcggugucu

SEQ ID NO: 1331493 - RNA, 21 nt, Human
ugcagucccaagcggugucuc

SEQ ID NO: 1331494 - RNA, 22 nt, Human
ugcagucccaagcggugucucu

SEQ ID NO: 1331495 - RNA, 23 nt, Human
ugcagucccaagcggugucucuc

SEQ ID NO: 1331496 - RNA, 23 nt, Human
ugcauaacguauaaaagccuguu

SEQ ID NO: 1331497 - RNA, 22 nt, Human
agcccuucuauacccacccaga

SEQ ID NO: 1331498 - RNA, 20 nt, Human
agcccuucuauacccaccca

SEQ ID NO: 1331499 - RNA, 19 nt, Human
agcccuucuauacccaccc

SEQ ID NO: 1331500 - RNA, 15 nt, Human
ugcacuaucuuucag

SEQ ID NO: 1331501 - RNA, 14 nt, Human
ugcacucaaccuua

SEQ ID NO: 1331502 - RNA, 11 nt, Human
ugcacgugugu

SEQ ID NO: 1331503 - RNA, 12 nt, Human
ugcacguguguu

SEQ ID NO: 1331504 - RNA, 13 nt, Human
ugcacguguguuu

SEQ ID NO: 1331505 - RNA, 15 nt, Human
ugcacguguguuuuu

SEQ ID NO: 1331506 - RNA, 18 nt, Human
ugcacguguguuuuucua

SEQ ID NO: 1331507 - RNA, 22 nt, Human
ugcacguguguuuuucuauuaa

SEQ ID NO: 1331508 - RNA, 20 nt, Human
ugcacuauaugcaaacaggg

SEQ ID NO: 1331509 - RNA, 18 nt, Human
ugcacuauaugcaaacag

SEQ ID NO: 1331510 - RNA, 16 nt, Human
ugcacuaucuuucagc

SEQ ID NO: 1331511 - RNA, 17 nt, Human
ugcacuauaugcaaaca

SEQ ID NO: 1331512 - RNA, 16 nt, Human
ugcacuauaugcaaac

SEQ ID NO: 1331513 - RNA, 15 nt, Human
ugcacuauaugcaaa

SEQ ID NO: 1331514 - RNA, 14 nt, Human
ugcacuauaugcaa

SEQ ID NO: 1331515 - RNA, 12 nt, Human
ugcacuauaugc

SEQ ID NO: 1331516 - RNA, 19 nt, Human
ugcacguguguuuuucuau

SEQ ID NO: 1331517 - RNA, 23 nt, Human
agcccuucuccauggcccugcca

SEQ ID NO: 1331518 - RNA, 21 nt, Human
agccgacaccuuuuuucaaca

SEQ ID NO: 1331519 - RNA, 20 nt, Human
agccgacccccucucccugc

SEQ ID NO: 1331520 - RNA, 21 nt, Human
agcccuucuccauggcccugc

SEQ ID NO: 1331521 - RNA, 23 nt, Human
agcccuucuauacccacccagaa

SEQ ID NO: 1331522 - RNA, 17 nt, Human
agcccuucuuuccacag

SEQ ID NO: 1331523 - RNA, 13 nt, Human
agccgacccccuc

SEQ ID NO: 1331524 - RNA, 14 nt, Human
agccguggcuuccc

SEQ ID NO: 1331525 - RNA, 21 nt, Human
agccguggcuucccgcucagc

SEQ ID NO: 1331526 - RNA, 22 nt, Human
agccguggcuucccgcucagcc

SEQ ID NO: 1331527 - RNA, 23 nt, Human
agccguggcuucccgcucagccc

SEQ ID NO: 1331528 - RNA, 19 nt, Human
agccguuuguuccccaaga

SEQ ID NO: 1331529 - RNA, 16 nt, Human
agccgugguccuuugg

SEQ ID NO: 1331530 - RNA, 13 nt, Human
agccucccaaagu

SEQ ID NO: 1331531 - RNA, 14 nt, Human
agccucccaaagug

SEQ ID NO: 1331532 - RNA, 20 nt, Human
agccucauguccacugguuc

SEQ ID NO: 1331533 - RNA, 18 nt, Human
agccuccaugcugccucc

SEQ ID NO: 1331534 - RNA, 20 nt, Human
agccuccaugcugccuccag

SEQ ID NO: 1331535 - RNA, 15 nt, Human
agccucauguccacu

SEQ ID NO: 1331536 - RNA, 22 nt, Human
ugcacaccuacuagucaccaga

SEQ ID NO: 1331537 - RNA, 20 nt, Human
ugcacaccuacuagucacca

SEQ ID NO: 1331538 - RNA, 19 nt, Human
ugcacaccccacucccaca

SEQ ID NO: 1331539 - RNA, 20 nt, Human
ugcacacccuccagagacaa

SEQ ID NO: 1331540 - RNA, 19 nt, Human
ugcaccaugcugcugggga

SEQ ID NO: 1331541 - RNA, 23 nt, Human
ugcaccaugcugcuggggaagac

SEQ ID NO: 1331542 - RNA, 22 nt, Human
ugcaccaugcugcuggggaaga

SEQ ID NO: 1331543 - RNA, 16 nt, Human
ugcacaccccacuccc

SEQ ID NO: 1331544 - RNA, 18 nt, Human
ugcacaccccacucccac

SEQ ID NO: 1331545 - RNA, 19 nt, Human
ugcacguggccucuugagc

SEQ ID NO: 1331546 - RNA, 22 nt, Human
ugcacguggccucuugagcagu

SEQ ID NO: 1331547 - RNA, 21 nt, Human
agcccugcuuugggcugcccu

SEQ ID NO: 1331548 - RNA, 15 nt, Human
agccccuucugcuca

SEQ ID NO: 1331549 - RNA, 16 nt, Human
agccccuucugcucag

SEQ ID NO: 1331550 - RNA, 19 nt, Human
agccccuucugcucagcuc

SEQ ID NO: 1331551 - RNA, 22 nt, Human
agccccuucugcucagcucugg

SEQ ID NO: 1331552 - RNA, 22 nt, Human
agcccugcuuugggcugcccug

SEQ ID NO: 1331553 - RNA, 23 nt, Human
agcccugcuuugggcugcccugg

SEQ ID NO: 1331554 - RNA, 12 nt, Human
ugcacacagcac

SEQ ID NO: 1331555 - RNA, 24 nt, Human
ugcacacagcacgggggccaagga

SEQ ID NO: 1331556 - RNA, 20 nt, Human
agcccugucagcaugaauuu

SEQ ID NO: 1331557 - RNA, 16 nt, Human
agccccugccccuccu

SEQ ID NO: 1331558 - RNA, 22 nt, Human
agccccuaagucaacuuagcau

SEQ ID NO: 1331559 - RNA, 22 nt, Human
agcccccagcucccaccucccc

SEQ ID NO: 1331560 - RNA, 19 nt, Human
agcccauggagauugaccu

SEQ ID NO: 1331561 - RNA, 21 nt, Human
agcccauggagauugaccugg

SEQ ID NO: 1331562 - RNA, 22 nt, Human
agcccauggagauugaccugga

SEQ ID NO: 1331563 - RNA, 13 nt, Human
agcccccacccug

SEQ ID NO: 1331564 - RNA, 17 nt, Human
agcccccacccuguucc

SEQ ID NO: 1331565 - RNA, 18 nt, Human
agcccccacccuguuccu

SEQ ID NO: 1331566 - RNA, 19 nt, Human
agcccccacccuguuccug

SEQ ID NO: 1331567 - RNA, 22 nt, Human
agcccccacccuguuccugcug

SEQ ID NO: 1331568 - RNA, 23 nt, Human
agcccccacccuguuccugcugc

SEQ ID NO: 1331569 - RNA, 19 nt, Human
agcccccaccgugggcagg

SEQ ID NO: 1331570 - RNA, 12 nt, Human
agcccccagagc

SEQ ID NO: 1331571 - RNA, 13 nt, Human
agcccccagagcc

SEQ ID NO: 1331572 - RNA, 18 nt, Human
agcccccagagcccaggc

SEQ ID NO: 1331573 - RNA, 14 nt, Human
agcccccagagccc

SEQ ID NO: 1331574 - RNA, 13 nt, Human
agcccccagccug

SEQ ID NO: 1331575 - RNA, 14 nt, Human
agcccccagccugu

SEQ ID NO: 1331576 - RNA, 15 nt, Human
agcccccagccuguc

SEQ ID NO: 1331577 - RNA, 12 nt, Human
agcccccagcua

SEQ ID NO: 1331578 - RNA, 19 nt, Human
agcccccagcuaagaaccu

SEQ ID NO: 1331579 - RNA, 20 nt, Human
agcccccagcuaagaaccug

SEQ ID NO: 1331580 - RNA, 22 nt, Human
agcccccagcuaagaaccugga

SEQ ID NO: 1331581 - RNA, 16 nt, Human
agcccccagccuguca

SEQ ID NO: 1331582 - RNA, 17 nt, Human
agcccccagcucccacc

SEQ ID NO: 1331583 - RNA, 18 nt, Human
agcccauggcacucuaug

SEQ ID NO: 1331584 - RNA, 21 nt, Human
agcccauaugcuaccaccagc

SEQ ID NO: 1331585 - RNA, 14 nt, Human
agcccauaugcuac

SEQ ID NO: 1331586 - RNA, 14 nt, Human
agcccauccugacc

SEQ ID NO: 1331587 - RNA, 15 nt, Human
agcccauccugacca

SEQ ID NO: 1331588 - RNA, 16 nt, Human
agcccauccugaccag

SEQ ID NO: 1331589 - RNA, 23 nt, Human
agcccauccugaccagcugcucc

SEQ ID NO: 1331590 - RNA, 17 nt, Human
agcccauccugaccagc

SEQ ID NO: 1331591 - RNA, 17 nt, Human
agcccauggagauugac

SEQ ID NO: 1331592 - RNA, 18 nt, Human
ugauucgaaugacacugu

SEQ ID NO: 1331593 - RNA, 21 nt, Human
ugauucuauuuauauguacau

SEQ ID NO: 1331594 - RNA, 22 nt, Human
ugauucuauuuauauguacaug

SEQ ID NO: 1331595 - RNA, 18 nt, Human
agcccaguagaccuuguu

SEQ ID NO: 1331596 - RNA, 18 nt, Human
agcccagugcacugaaag

SEQ ID NO: 1331597 - RNA, 15 nt, Human
agcccaguagaccuu

SEQ ID NO: 1331598 - RNA, 15 nt, Human
ugagucaaaaaaucu

SEQ ID NO: 1331599 - RNA, 18 nt, Human
ugagucaaguuguuccuu

SEQ ID NO: 1331600 - RNA, 17 nt, Human
ugaguauuaaaauguau

SEQ ID NO: 1331601 - RNA, 14 nt, Human
ugaguauuaaaaug

SEQ ID NO: 1331602 - RNA, 18 nt, Human
ugaguauuaaaauguaug

SEQ ID NO: 1331603 - RNA, 12 nt, Human
ugagugcucuga

SEQ ID NO: 1331604 - RNA, 13 nt, Human
ugagugcucugau

SEQ ID NO: 1331605 - RNA, 19 nt, Human
ugagugcucugaucccucu

SEQ ID NO: 1331606 - RNA, 19 nt, Human
ugagugcuugcuuuucaug

SEQ ID NO: 1331607 - RNA, 21 nt, Human
ugagugggguuaucucugugu

SEQ ID NO: 1331608 - RNA, 22 nt, Human
ugagugggguuaucucuguguu

SEQ ID NO: 1331609 - RNA, 12 nt, Human
ugauacagaaaa

SEQ ID NO: 1331610 - RNA, 21 nt, Human
ugauacagaaaaguugaauuu

SEQ ID NO: 1331611 - RNA, 16 nt, Human
ugauacgaugcuucaa

SEQ ID NO: 1331612 - RNA, 14 nt, Human
ugauacuaagcauu

SEQ ID NO: 1331613 - RNA, 16 nt, Human
ugauacuaagcauuga

SEQ ID NO: 1331614 - RNA, 13 nt, Human
ugauacuaauaaa

SEQ ID NO: 1331615 - RNA, 14 nt, Human
ugauacuaauaaac

SEQ ID NO: 1331616 - RNA, 15 nt, Human
ugauacuaauaaacu

SEQ ID NO: 1331617 - RNA, 17 nt, Human
ugauaagagaaucaaca

SEQ ID NO: 1331618 - RNA, 18 nt, Human
ugauaagagaaucaacau

SEQ ID NO: 1331619 - RNA, 12 nt, Human
ugauaagaucuu

SEQ ID NO: 1331620 - RNA, 15 nt, Human
ugauaagaucuuuua

SEQ ID NO: 1331621 - RNA, 22 nt, Human
ugauaagaucuuuuauuuugcc

SEQ ID NO: 1331622 - RNA, 15 nt, Human
ugauaaugaacagaa

SEQ ID NO: 1331623 - RNA, 16 nt, Human
ugauaaugaacagaac

SEQ ID NO: 1331624 - RNA, 20 nt, Human
ugauaaugaacagaacauag

SEQ ID NO: 1331625 - RNA, 18 nt, Human
ugauaaugaacagaacau

SEQ ID NO: 1331626 - RNA, 23 nt, Human
agcauaaauguugacaugggaca

SEQ ID NO: 1331627 - RNA, 17 nt, Human
agcauaaguuucuggga

SEQ ID NO: 1331628 - RNA, 23 nt, Human
agcauaaguuucugggaccucag

SEQ ID NO: 1331629 - RNA, 21 nt, Human
agcauaauacuugcuuuggaa

SEQ ID NO: 1331630 - RNA, 20 nt, Human
ugagaauuugagugcucuga

SEQ ID NO: 1331631 - RNA, 21 nt, Human
ugagacaagaaaauaagagcu

SEQ ID NO: 1331632 - RNA, 23 nt, Human
ugagacaagaaaauaagagcuca

SEQ ID NO: 1331633 - RNA, 16 nt, Human
ugagacaaugccuugu

SEQ ID NO: 1331634 - RNA, 15 nt, Human
ugagacaaugccuug

SEQ ID NO: 1331635 - RNA, 22 nt, Human
ugaguaacugauuuguaacaag

SEQ ID NO: 1331636 - RNA, 10 nt, Human
ugaguaacau

SEQ ID NO: 1331637 - RNA, 15 nt, Human
ugaguaacauuugcu

SEQ ID NO: 1331638 - RNA, 16 nt, Human
ugaguaacauuugcug

SEQ ID NO: 1331639 - RNA, 17 nt, Human
ugaguaacauuugcugu

SEQ ID NO: 1331640 - RNA, 18 nt, Human
ugaguaacauuugcuguu

SEQ ID NO: 1331641 - RNA, 19 nt, Human
ugaguaacauuugcuguuu

SEQ ID NO: 1331642 - RNA, 14 nt, Human
ugaguagaguugau

SEQ ID NO: 1331643 - RNA, 20 nt, Human
ugaguagagagcaagggaag

SEQ ID NO: 1331644 - RNA, 20 nt, Human
ugaguacuccacacugcaca

SEQ ID NO: 1331645 - RNA, 21 nt, Human
ugaguacuccacacugcacaa

SEQ ID NO: 1331646 - RNA, 17 nt, Human
ugaguagaguugaucaa

SEQ ID NO: 1331647 - RNA, 13 nt, Human
ugaguagcuggga

SEQ ID NO: 1331648 - RNA, 19 nt, Human
ugaguagcuuauacaauua

SEQ ID NO: 1331649 - RNA, 18 nt, Human
ugauagacaauugaggua

SEQ ID NO: 1331650 - RNA, 17 nt, Human
ugauagacaauugaggu

SEQ ID NO: 1331651 - RNA, 19 nt, Human
ugauagaaaugccaagcac

SEQ ID NO: 1331652 - RNA, 12 nt, Human
ugauaugggucu

SEQ ID NO: 1331653 - RNA, 15 nt, Human
ugauaugugaacagu

SEQ ID NO: 1331654 - RNA, 16 nt, Human
ugauaugugaacaguu

SEQ ID NO: 1331655 - RNA, 17 nt, Human
ugauacuucgacacugu

SEQ ID NO: 1331656 - RNA, 18 nt, Human
ugauacuucgacacuguu

SEQ ID NO: 1331657 - RNA, 21 nt, Human
ugauacuucgacacuguucuu

SEQ ID NO: 1331658 - RNA, 20 nt, Human
ugauacuucgacacuguucu

SEQ ID NO: 1331659 - RNA, 16 nt, Human
ugauacuaauaaacua

SEQ ID NO: 1331660 - RNA, 22 nt, Human
ugauacuaauaaacuaauaauu

SEQ ID NO: 1331661 - RNA, 11 nt, Human
ugauacuguug

SEQ ID NO: 1331662 - RNA, 13 nt, Human
ugauacuguugca

SEQ ID NO: 1331663 - RNA, 14 nt, Human
ugauacuguugcac

SEQ ID NO: 1331664 - RNA, 16 nt, Human
ugauacuguugcacgu

SEQ ID NO: 1331665 - RNA, 18 nt, Human
ugauacuguugcacgugu

SEQ ID NO: 1331666 - RNA, 19 nt, Human
ugauacuguugcacgugug

SEQ ID NO: 1331667 - RNA, 20 nt, Human
ugauacuguugcacgugugu

SEQ ID NO: 1331668 - RNA, 19 nt, Human
ugauauuuucaacgcagcc

SEQ ID NO: 1331669 - RNA, 21 nt, Human
ugauauuuucaacgcagcccu

SEQ ID NO: 1331670 - RNA, 22 nt, Human
ugauauuuucaacgcagcccug

SEQ ID NO: 1331671 - RNA, 23 nt, Human
ugauauuuucaacgcagcccugc

SEQ ID NO: 1331672 - RNA, 19 nt, Human
ugauauuuccccaugguuu

SEQ ID NO: 1331673 - RNA, 17 nt, Human
ugauauuucuagcuuau

SEQ ID NO: 1331674 - RNA, 12 nt, Human
ugauauucuaag

SEQ ID NO: 1331675 - RNA, 15 nt, Human
ugauauucuaagacu

SEQ ID NO: 1331676 - RNA, 17 nt, Human
ugauauucuaagacuua

SEQ ID NO: 1331677 - RNA, 17 nt, Human
ugauauuguuauauaca

SEQ ID NO: 1331678 - RNA, 19 nt, Human
ugauauuguuauauacaua

SEQ ID NO: 1331679 - RNA, 19 nt, Human
ugaucaaaaucaauuaaaa

SEQ ID NO: 1331680 - RNA, 15 nt, Human
ugauauuuucucuag

SEQ ID NO: 1331681 - RNA, 16 nt, Human
ugaucaaauguuuaau

SEQ ID NO: 1331682 - RNA, 15 nt, Human
ugaucaaauguuuaa

SEQ ID NO: 1331683 - RNA, 14 nt, Human
ugaucaaauguuua

SEQ ID NO: 1331684 - RNA, 13 nt, Human
ugaucaaauguuu

SEQ ID NO: 1331685 - RNA, 19 nt, Human
ugaucaaauguuuaaucau

SEQ ID NO: 1331686 - RNA, 22 nt, Human
ugaucaaauguuuaaucauaua

SEQ ID NO: 1331687 - RNA, 18 nt, Human
ugaucaaauguuuaauca

SEQ ID NO: 1331688 - RNA, 17 nt, Human
ugaucaaauguuuaauc

SEQ ID NO: 1331689 - RNA, 14 nt, Human
ugauauuuucucua

SEQ ID NO: 1331690 - RNA, 17 nt, Human
ugauauuuucugugccu

SEQ ID NO: 1331691 - RNA, 20 nt, Human
ugauauuuucugugccugaa

SEQ ID NO: 1331692 - RNA, 11 nt, Human
ugaucaaggcc

SEQ ID NO: 1331693 - RNA, 13 nt, Human
ugaucaaggccuu

SEQ ID NO: 1331694 - RNA, 12 nt, Human
ugaucaaggccu

SEQ ID NO: 1331695 - RNA, 20 nt, Human
agcaucacaugaacuuguaa

SEQ ID NO: 1331696 - RNA, 14 nt, Human
agcaucacagaaug

SEQ ID NO: 1331697 - RNA, 13 nt, Human
agcaucacagaau

SEQ ID NO: 1331698 - RNA, 20 nt, Human
agcaugucgucaaagcugaa

SEQ ID NO: 1331699 - RNA, 17 nt, Human
agcaugucgucaaagcu

SEQ ID NO: 1331700 - RNA, 15 nt, Human
agcauggcuauuuua

SEQ ID NO: 1331701 - RNA, 18 nt, Human
agcauggcuauuuuauau

SEQ ID NO: 1331702 - RNA, 17 nt, Human
agcauggcuauuuuaua

SEQ ID NO: 1331703 - RNA, 20 nt, Human
agcauguacggauuuucagu

SEQ ID NO: 1331704 - RNA, 21 nt, Human
agcauguacggauuuucaguu

SEQ ID NO: 1331705 - RNA, 21 nt, Human
agcauguacugagccuuguaa

SEQ ID NO: 1331706 - RNA, 16 nt, Human
agcaugucacuaaagc

SEQ ID NO: 1331707 - RNA, 17 nt, Human
agcauuucccuuccuuc

SEQ ID NO: 1331708 - RNA, 14 nt, Human
agcauuucucauca

SEQ ID NO: 1331709 - RNA, 22 nt, Human
agcauuguaaaauuauuucaug

SEQ ID NO: 1331710 - RNA, 15 nt, Human
agcauuguagugcuu

SEQ ID NO: 1331711 - RNA, 18 nt, Human
agcauuguagugcuuuga

SEQ ID NO: 1331712 - RNA, 22 nt, Human
agcauuguagugcuuugagaga

SEQ ID NO: 1331713 - RNA, 20 nt, Human
agcauuguagugcuuugaga

SEQ ID NO: 1331714 - RNA, 17 nt, Human
agcauuucacuuauuua

SEQ ID NO: 1331715 - RNA, 17 nt, Human
agcauuguaaaagcauu

SEQ ID NO: 1331716 - RNA, 14 nt, Human
agcauuguaaaaua

SEQ ID NO: 1331717 - RNA, 15 nt, Human
agcauuguaaaauaa

SEQ ID NO: 1331718 - RNA, 16 nt, Human
agcauuguaaaauaau

SEQ ID NO: 1331719 - RNA, 20 nt, Human
agcauuguaaaauaauucug

SEQ ID NO: 1331720 - RNA, 17 nt, Human
agcaugucuauucagcu

SEQ ID NO: 1331721 - RNA, 19 nt, Human
agcaugucuauucagcuuc

SEQ ID NO: 1331722 - RNA, 12 nt, Human
agcauguuacug

SEQ ID NO: 1331723 - RNA, 12 nt, Human
agcauguuuaga

SEQ ID NO: 1331724 - RNA, 13 nt, Human
agcauguuuagac

SEQ ID NO: 1331725 - RNA, 18 nt, Human
agcauguuuagacuuuaa

SEQ ID NO: 1331726 - RNA, 21 nt, Human
agcauguuuagacuuuaacau

SEQ ID NO: 1331727 - RNA, 22 nt, Human
agcauguuuagacuuuaacaua

SEQ ID NO: 1331728 - RNA, 24 nt, Human
agcauguuuagacuuuaacauaag

SEQ ID NO: 1331729 - RNA, 23 nt, Human
agcauguuuagacuuuaacauaa

SEQ ID NO: 1331730 - RNA, 15 nt, Human
agcauugaauggcua

SEQ ID NO: 1331731 - RNA, 17 nt, Human
ugaugaagaaguugaua

SEQ ID NO: 1331732 - RNA, 15 nt, Human
ugaucgccuuuccca

SEQ ID NO: 1331733 - RNA, 17 nt, Human
ugaucgccuuucccagg

SEQ ID NO: 1331734 - RNA, 15 nt, Human
ugaucgccuucccca

SEQ ID NO: 1331735 - RNA, 13 nt, Human
ugaugaagaggag

SEQ ID NO: 1331736 - RNA, 14 nt, Human
ugaugaagaggagu

SEQ ID NO: 1331737 - RNA, 14 nt, Human
ugaugaagagagag

SEQ ID NO: 1331738 - RNA, 14 nt, Human
ugaugaauacugua

SEQ ID NO: 1331739 - RNA, 14 nt, Human
ugaugaggcccucc

SEQ ID NO: 1331740 - RNA, 15 nt, Human
ugaugaggcccucca

SEQ ID NO: 1331741 - RNA, 16 nt, Human
ugaugaggcccuccac

SEQ ID NO: 1331742 - RNA, 17 nt, Human
ugaugaggcccuccaca

SEQ ID NO: 1331743 - RNA, 21 nt, Human
ugaugaggcccuccacaccug

SEQ ID NO: 1331744 - RNA, 23 nt, Human
ugaugaggcccuccacaccugcg

SEQ ID NO: 1331745 - RNA, 13 nt, Human
ugaugagggcagc

SEQ ID NO: 1331746 - RNA, 15 nt, Human
ugaugagggcagcag

SEQ ID NO: 1331747 - RNA, 16 nt, Human
ugaugagggcagcagc

SEQ ID NO: 1331748 - RNA, 17 nt, Human
ugaugagggcagcagcc

SEQ ID NO: 1331749 - RNA, 19 nt, Human
ugaugagggcagcagccag

SEQ ID NO: 1331750 - RNA, 21 nt, Human
ugaugagggcagcagccagcc

SEQ ID NO: 1331751 - RNA, 22 nt, Human
ugaugagggcagcagccagccc

SEQ ID NO: 1331752 - RNA, 23 nt, Human
ugaugagggcagcagccagcccu

SEQ ID NO: 1331753 - RNA, 12 nt, Human
ugauccauguaa

SEQ ID NO: 1331754 - RNA, 13 nt, Human
ugauccauguaac

SEQ ID NO: 1331755 - RNA, 14 nt, Human
ugauccauguaacu

SEQ ID NO: 1331756 - RNA, 15 nt, Human
ugauccauguaacug

SEQ ID NO: 1331757 - RNA, 21 nt, Human
ugauccuguauucagacagau

SEQ ID NO: 1331758 - RNA, 18 nt, Human
ugauccuuuuggagucag

SEQ ID NO: 1331759 - RNA, 20 nt, Human
ugauccuguauucagacaga

SEQ ID NO: 1331760 - RNA, 15 nt, Human
ugauccuuacaaguu

SEQ ID NO: 1331761 - RNA, 13 nt, Human
ugaucgccuuccc

SEQ ID NO: 1331762 - RNA, 14 nt, Human
ugaucgccuucccc

SEQ ID NO: 1331763 - RNA, 18 nt, Human
agccaccgugccuggcca

SEQ ID NO: 1331764 - RNA, 22 nt, Human
agccaccgaagccgccugugga

SEQ ID NO: 1331765 - RNA, 14 nt, Human
agccacccugaguu

SEQ ID NO: 1331766 - RNA, 21 nt, Human
agccacauuuggaauacuuuu

SEQ ID NO: 1331767 - RNA, 22 nt, Human
agccacauuuggaauacuuuuu

SEQ ID NO: 1331768 - RNA, 23 nt, Human
agccacauuuggaauacuuuuug

SEQ ID NO: 1331769 - RNA, 12 nt, Human
agccacccugag

SEQ ID NO: 1331770 - RNA, 13 nt, Human
agccacccugagg

SEQ ID NO: 1331771 - RNA, 14 nt, Human
agccacccugagga

SEQ ID NO: 1331772 - RNA, 18 nt, Human
agccacccugaggagucu

SEQ ID NO: 1331773 - RNA, 19 nt, Human
agccacccugaggagucug

SEQ ID NO: 1331774 - RNA, 20 nt, Human
agccacccugaggagucuga

SEQ ID NO: 1331775 - RNA, 21 nt, Human
agccacccugaggagucugag

SEQ ID NO: 1331776 - RNA, 22 nt, Human
agccacccugaggagucugagg

SEQ ID NO: 1331777 - RNA, 15 nt, Human
agccaccgaagccgc

SEQ ID NO: 1331778 - RNA, 20 nt, Human
agccaccgaagccgccugug

SEQ ID NO: 1331779 - RNA, 21 nt, Human
agccaccgaagccgccugugg

SEQ ID NO: 1331780 - RNA, 18 nt, Human
agcauuucucaucaguag

SEQ ID NO: 1331781 - RNA, 15 nt, Human
agccacauuuggaau

SEQ ID NO: 1331782 - RNA, 20 nt, Human
agccacauuuggaauacuuu

SEQ ID NO: 1331783 - RNA, 15 nt, Human
ugauggugguauguu

SEQ ID NO: 1331784 - RNA, 13 nt, Human
ugaugauccauua

SEQ ID NO: 1331785 - RNA, 23 nt, Human
ugauuaaaaugcuuccucccagc

SEQ ID NO: 1331786 - RNA, 24 nt, Human
ugaugagggcagcagccagcccug

SEQ ID NO: 1331787 - RNA, 13 nt, Human
ugaugaguuguga

SEQ ID NO: 1331788 - RNA, 20 nt, Human
agccacuuucaaucuucaau

SEQ ID NO: 1331789 - RNA, 19 nt, Human
agccacuugccugugcuac

SEQ ID NO: 1331790 - RNA, 22 nt, Human
agccacuugccugugcuacaau

SEQ ID NO: 1331791 - RNA, 23 nt, Human
agccacuuucaaucuucaauccu

SEQ ID NO: 1331792 - RNA, 15 nt, Human
agccacuugccugug

SEQ ID NO: 1331793 - RNA, 12 nt, Human
agccacugccau

SEQ ID NO: 1331794 - RNA, 17 nt, Human
agccacuuaaaauguuc

SEQ ID NO: 1331795 - RNA, 16 nt, Human
ugauuaccagggacug

SEQ ID NO: 1331796 - RNA, 14 nt, Human
agccacuccucuga

SEQ ID NO: 1331797 - RNA, 15 nt, Human
agccacuccucugac

SEQ ID NO: 1331798 - RNA, 14 nt, Human
ugauuaccagggac

SEQ ID NO: 1331799 - RNA, 21 nt, Human
agccacuccucugacucaggg

SEQ ID NO: 1331800 - RNA, 22 nt, Human
agccacuccucugacucagggc

SEQ ID NO: 1331801 - RNA, 16 nt, Human
ugauuacagugcagug

SEQ ID NO: 1331802 - RNA, 12 nt, Human
ugauuaaaccaa

SEQ ID NO: 1331803 - RNA, 15 nt, Human
ugauuaaagaugagc

SEQ ID NO: 1331804 - RNA, 22 nt, Human
ugauuaaagaugagcuuugucu

SEQ ID NO: 1331805 - RNA, 14 nt, Human
ugauuacagugcag

SEQ ID NO: 1331806 - RNA, 22 nt, Human
agccaggaagaucccccagaaa

SEQ ID NO: 1331807 - RNA, 21 nt, Human
agccaggaagaucccccagaa

SEQ ID NO: 1331808 - RNA, 17 nt, Human
agccaggaauuucccag

SEQ ID NO: 1331809 - RNA, 19 nt, Human
agccaggaauuucccagga

SEQ ID NO: 1331810 - RNA, 20 nt, Human
agccaggaagaucccccaga

SEQ ID NO: 1331811 - RNA, 22 nt, Human
agccagcuuucccugccucuca

SEQ ID NO: 1331812 - RNA, 16 nt, Human
agccagcuuucccugc

SEQ ID NO: 1331813 - RNA, 18 nt, Human
agccagcuuucccugccu

SEQ ID NO: 1331814 - RNA, 20 nt, Human
agccaggaauuucccaggac

SEQ ID NO: 1331815 - RNA, 21 nt, Human
agccaggaauuucccaggacc

SEQ ID NO: 1331816 - RNA, 22 nt, Human
agccaggaauuucccaggaccc

SEQ ID NO: 1331817 - RNA, 23 nt, Human
agccaggaauuucccaggacccu

SEQ ID NO: 1331818 - RNA, 13 nt, Human
agccaggagaagc

SEQ ID NO: 1331819 - RNA, 14 nt, Human
agccaggagaagcu

SEQ ID NO: 1331820 - RNA, 15 nt, Human
agccaggagaagcuc

SEQ ID NO: 1331821 - RNA, 20 nt, Human
agccaggagaagcucagcug

SEQ ID NO: 1331822 - RNA, 14 nt, Human
agccaggaggccug

SEQ ID NO: 1331823 - RNA, 16 nt, Human
agccaggaggccugcu

SEQ ID NO: 1331824 - RNA, 19 nt, Human
agccaggaggccugcuagg

SEQ ID NO: 1331825 - RNA, 22 nt, Human
agccagaacuugacccugagcu

SEQ ID NO: 1331826 - RNA, 15 nt, Human
agccagaccagcagg

SEQ ID NO: 1331827 - RNA, 13 nt, Human
agccagcugcccc

SEQ ID NO: 1331828 - RNA, 14 nt, Human
agccagcugccccc

SEQ ID NO: 1331829 - RNA, 19 nt, Human
agccagcugcccccagagc

SEQ ID NO: 1331830 - RNA, 20 nt, Human
agccagcugcccccagagcc

SEQ ID NO: 1331831 - RNA, 12 nt, Human
agccagcuuguu

SEQ ID NO: 1331832 - RNA, 19 nt, Human
agccagcuuguuuacaugc

SEQ ID NO: 1331833 - RNA, 20 nt, Human
agccagcuuguuuacaugcu

SEQ ID NO: 1331834 - RNA, 21 nt, Human
agccagcuuguuuacaugcuu

SEQ ID NO: 1331835 - RNA, 13 nt, Human
agccagcuuuccc

SEQ ID NO: 1331836 - RNA, 14 nt, Human
agccagcuuucccu

SEQ ID NO: 1331837 - RNA, 15 nt, Human
agccagggucuccag

SEQ ID NO: 1331838 - RNA, 15 nt, Human
agccaguaauccugu

SEQ ID NO: 1331839 - RNA, 14 nt, Human
agccaguaauccug

SEQ ID NO: 1331840 - RNA, 13 nt, Human
agccaguaauccu

SEQ ID NO: 1331841 - RNA, 15 nt, Human
agccagugcccugag

SEQ ID NO: 1331842 - RNA, 16 nt, Human
agccagugcccugagc

SEQ ID NO: 1331843 - RNA, 17 nt, Human
agccagugcccugagcc

SEQ ID NO: 1331844 - RNA, 18 nt, Human
agccagugcccugagcca

SEQ ID NO: 1331845 - RNA, 23 nt, Human
agccagugcccugagccaggguc

SEQ ID NO: 1331846 - RNA, 22 nt, Human
agccaguuuggguaaaauacuu

SEQ ID NO: 1331847 - RNA, 23 nt, Human
agccaguuuggguaaaauacuuu

SEQ ID NO: 1331848 - RNA, 10 nt, Human
agccauagug

SEQ ID NO: 1331849 - RNA, 14 nt, Human
agccauauuuguaa

SEQ ID NO: 1331850 - RNA, 16 nt, Human
agccauauuuguaaaa

SEQ ID NO: 1331851 - RNA, 19 nt, Human
agccagggggagcugggcc

SEQ ID NO: 1331852 - RNA, 21 nt, Human
agccagggggagcugggccug

SEQ ID NO: 1331853 - RNA, 14 nt, Human
agccagggucucca

SEQ ID NO: 1331854 - RNA, 16 nt, Human
agccagggucuccaga

SEQ ID NO: 1331855 - RNA, 17 nt, Human
agccaggggagcagagg

SEQ ID NO: 1331856 - RNA, 18 nt, Human
agccaggggagcagaggg

SEQ ID NO: 1331857 - RNA, 23 nt, Human
agccaggggagcagaggggcaga

SEQ ID NO: 1331858 - RNA, 14 nt, Human
agccaggcccagcc

SEQ ID NO: 1331859 - RNA, 13 nt, Human
agccaggcccagc

SEQ ID NO: 1331860 - RNA, 21 nt, Human
agccaugucuucucccuggaa

SEQ ID NO: 1331861 - RNA, 10 nt, Human
agcccagaga

SEQ ID NO: 1331862 - RNA, 11 nt, Human
agcccagagac

SEQ ID NO: 1331863 - RNA, 12 nt, Human
agcccagagaca

SEQ ID NO: 1331864 - RNA, 21 nt, Human
agcccagagacauacuugaag

SEQ ID NO: 1331865 - RNA, 22 nt, Human
agcccagagacauacuugaagg

SEQ ID NO: 1331866 - RNA, 15 nt, Human
agccaugucuucucc

SEQ ID NO: 1331867 - RNA, 16 nt, Human
agccaugucuucuccc

SEQ ID NO: 1331868 - RNA, 17 nt, Human
agccaugucuucucccu

SEQ ID NO: 1331869 - RNA, 13 nt, Human
agccaucaaaaug

SEQ ID NO: 1331870 - RNA, 14 nt, Human
agccaucaaaaugc

SEQ ID NO: 1331871 - RNA, 15 nt, Human
agccaucaaaaugcu

SEQ ID NO: 1331872 - RNA, 16 nt, Human
agccaucaaaaugcuu

SEQ ID NO: 1331873 - RNA, 21 nt, Human
agccauauuuguaaaaugaca

SEQ ID NO: 1331874 - RNA, 18 nt, Human
agccauggguagccuggg

SEQ ID NO: 1331875 - RNA, 14 nt, Human
agcccagcucugaa

SEQ ID NO: 1331876 - RNA, 13 nt, Human
agcccagcugggu

SEQ ID NO: 1331877 - RNA, 15 nt, Human
agcccagcuggguca

SEQ ID NO: 1331878 - RNA, 16 nt, Human
agcccagcugggucag

SEQ ID NO: 1331879 - RNA, 11 nt, Human
agcccagccca

SEQ ID NO: 1331880 - RNA, 16 nt, Human
agcccagccccacucc

SEQ ID NO: 1331881 - RNA, 19 nt, Human
agcccagccccacuccucu

SEQ ID NO: 1331882 - RNA, 12 nt, Human
agcccagcucca

SEQ ID NO: 1331883 - RNA, 17 nt, Human
agcccagcugggucagg

SEQ ID NO: 1331884 - RNA, 21 nt, Human
agcccaggaagucucaucugg

SEQ ID NO: 1331885 - RNA, 24 nt, Human
ugauucaguguuaaaugugaugaa

SEQ ID NO: 1331886 - RNA, 20 nt, Human
ugauucauuuuaacaucuga

SEQ ID NO: 1331887 - RNA, 12 nt, Human
ugauucaguguu

SEQ ID NO: 1331888 - RNA, 21 nt, Human
ugauucaguguuaaaugugau

SEQ ID NO: 1331889 - RNA, 22 nt, Human
ugauucauuuuaacaucugaga

SEQ ID NO: 1331890 - RNA, 15 nt, Human
ugauuccagccauca

SEQ ID NO: 1331891 - RNA, 19 nt, Human
ugauuccagccaucaccuu

SEQ ID NO: 1331892 - RNA, 16 nt, Human
ugauuccauccaccuu

SEQ ID NO: 1331893 - RNA, 18 nt, Human
ugauuccauccaccuuuc

SEQ ID NO: 1331894 - RNA, 15 nt, Human
ugauuccuuuaacaa

SEQ ID NO: 1331895 - RNA, 14 nt, Human
ugauuccuuuaaca

SEQ ID NO: 1331896 - RNA, 16 nt, Human
agaugcaguucugaag

SEQ ID NO: 1331897 - RNA, 17 nt, Human
agaugcaguucugaaga

SEQ ID NO: 1331898 - RNA, 13 nt, Human
agaugcagggcag

SEQ ID NO: 1331899 - RNA, 17 nt, Human
ugacacuuaaaaauggu

SEQ ID NO: 1331900 - RNA, 14 nt, Human
ugacacucccuugg

SEQ ID NO: 1331901 - RNA, 16 nt, Human
agaugcagggcaguca

SEQ ID NO: 1331902 - RNA, 15 nt, Human
agaugcccaaauccu

SEQ ID NO: 1331903 - RNA, 15 nt, Human
agaugcagugccagg

SEQ ID NO: 1331904 - RNA, 20 nt, Human
agaugcugacuguacuccuc

SEQ ID NO: 1331905 - RNA, 16 nt, Human
agaugcugaaaauguc

SEQ ID NO: 1331906 - RNA, 15 nt, Human
agaugcuccuugggc

SEQ ID NO: 1331907 - RNA, 20 nt, Human
agaugcuccuugggcccuuu

SEQ ID NO: 1331908 - RNA, 23 nt, Human
agaugcugacuguacuccuccca

SEQ ID NO: 1331909 - RNA, 20 nt, Human
agaugcugauggagccuucc

SEQ ID NO: 1331910 - RNA, 20 nt, Human
agauuaaccuucucuguccg

SEQ ID NO: 1331911 - RNA, 13 nt, Human
agauuaagaaaua

SEQ ID NO: 1331912 - RNA, 21 nt, Human
ugaccccaaacaccuuccagc

SEQ ID NO: 1331913 - RNA, 18 nt, Human
agauguuuauucuucuag

SEQ ID NO: 1331914 - RNA, 19 nt, Human
agauguuuauucuucuaga

SEQ ID NO: 1331915 - RNA, 20 nt, Human
agauguuuauucuucuagag

SEQ ID NO: 1331916 - RNA, 21 nt, Human
agauguuuauucuucuagagu

SEQ ID NO: 1331917 - RNA, 22 nt, Human
agauguuuauucuucuagaguu

SEQ ID NO: 1331918 - RNA, 15 nt, Human
agauguuuauuucag

SEQ ID NO: 1331919 - RNA, 16 nt, Human
agauguuuauuucagg

SEQ ID NO: 1331920 - RNA, 17 nt, Human
agauguuugauagauuu

SEQ ID NO: 1331921 - RNA, 19 nt, Human
agauguuugauagauuuuc

SEQ ID NO: 1331922 - RNA, 16 nt, Human
ugacucgggggugggg

SEQ ID NO: 1331923 - RNA, 17 nt, Human
ugacucgggggugggga

SEQ ID NO: 1331924 - RNA, 17 nt, Human
ugacuccauagaccuuu

SEQ ID NO: 1331925 - RNA, 21 nt, Human
ugacuccauagaccuuuucau

SEQ ID NO: 1331926 - RNA, 14 nt, Human
ugacucacaccuga

SEQ ID NO: 1331927 - RNA, 19 nt, Human
ugacucacaccugaacuga

SEQ ID NO: 1331928 - RNA, 23 nt, Human
ugacuagaugauggaugccaaua

SEQ ID NO: 1331929 - RNA, 13 nt, Human
ugacuagggagcc

SEQ ID NO: 1331930 - RNA, 17 nt, Human
ugacuagggagccaugu

SEQ ID NO: 1331931 - RNA, 18 nt, Human
ugacuagggagccauguu

SEQ ID NO: 1331932 - RNA, 20 nt, Human
ugacuagggagccauguuuc

SEQ ID NO: 1331933 - RNA, 21 nt, Human
ugacuagggagccauguuuca

SEQ ID NO: 1331934 - RNA, 12 nt, Human
ugacucaagaag

SEQ ID NO: 1331935 - RNA, 14 nt, Human
ugacucaagaagug

SEQ ID NO: 1331936 - RNA, 15 nt, Human
ugacucaagaaguga

SEQ ID NO: 1331937 - RNA, 22 nt, Human
ugacucaagaagugaagaaugc

SEQ ID NO: 1331938 - RNA, 21 nt, Human
ugacccucaucuuucuuccaa

SEQ ID NO: 1331939 - RNA, 19 nt, Human
ugacccggcacccccugca

SEQ ID NO: 1331940 - RNA, 20 nt, Human
ugacccggcacccccugcag

SEQ ID NO: 1331941 - RNA, 22 nt, Human
ugacccggcacccccugcagcu

SEQ ID NO: 1331942 - RNA, 18 nt, Human
ugacccggcacccccugc

SEQ ID NO: 1331943 - RNA, 22 nt, Human
ugaccccaaacaccuuccagcu

SEQ ID NO: 1331944 - RNA, 13 nt, Human
ugaccccagagga

SEQ ID NO: 1331945 - RNA, 11 nt, Human
ugaccccaggg

SEQ ID NO: 1331946 - RNA, 12 nt, Human
ugaccccagggc

SEQ ID NO: 1331947 - RNA, 13 nt, Human
ugaccccagggca

SEQ ID NO: 1331948 - RNA, 17 nt, Human
ugaccccagggcacagg

SEQ ID NO: 1331949 - RNA, 18 nt, Human
ugaccccagggcacagga

SEQ ID NO: 1331950 - RNA, 19 nt, Human
ugaccccagggcacaggag

SEQ ID NO: 1331951 - RNA, 20 nt, Human
ugaccccagggcacaggagc

SEQ ID NO: 1331952 - RNA, 21 nt, Human
ugaccccagggcacaggagcu

SEQ ID NO: 1331953 - RNA, 13 nt, Human
ugaccccugcuca

SEQ ID NO: 1331954 - RNA, 14 nt, Human
ugaccuuaaaugca

SEQ ID NO: 1331955 - RNA, 16 nt, Human
ugaccuuaaaugcaac

SEQ ID NO: 1331956 - RNA, 21 nt, Human
ugacccggcacccccugcagc

SEQ ID NO: 1331957 - RNA, 12 nt, Human
ugaccugaggcu

SEQ ID NO: 1331958 - RNA, 21 nt, Human
ugacccuaugggucuaggaca

SEQ ID NO: 1331959 - RNA, 15 nt, Human
ugaccugaggcugug

SEQ ID NO: 1331960 - RNA, 17 nt, Human
ugaccugaggcuguggu

SEQ ID NO: 1331961 - RNA, 20 nt, Human
ugaccugugagcccagcugg

SEQ ID NO: 1331962 - RNA, 17 nt, Human
agcaagaccccaucuca

SEQ ID NO: 1331963 - RNA, 21 nt, Human
agcaagacccuaaacauccau

SEQ ID NO: 1331964 - RNA, 21 nt, Human
agcaagacuucucuuugccuc

SEQ ID NO: 1331965 - RNA, 23 nt, Human
agcaagacuucucuuugccucaa

SEQ ID NO: 1331966 - RNA, 22 nt, Human
agcaagacuucucuuugccuca

SEQ ID NO: 1331967 - RNA, 19 nt, Human
agcaagaggccguggcugc

SEQ ID NO: 1331968 - RNA, 15 nt, Human
agcaagauaaacauu

SEQ ID NO: 1331969 - RNA, 16 nt, Human
agcaagauaaacauua

SEQ ID NO: 1331970 - RNA, 17 nt, Human
agcaagauaaacauuau

SEQ ID NO: 1331971 - RNA, 21 nt, Human
agcaagaggccguggcugcug

SEQ ID NO: 1331972 - RNA, 18 nt, Human
ugagaagugaaugcuggg

SEQ ID NO: 1331973 - RNA, 19 nt, Human
ugagaagugaaugcuggga

SEQ ID NO: 1331974 - RNA, 21 nt, Human
ugagaagugaaugcugggacu

SEQ ID NO: 1331975 - RNA, 22 nt, Human
ugagaagugaaugcugggacuc

SEQ ID NO: 1331976 - RNA, 13 nt, Human
agauuuuuuaaua

SEQ ID NO: 1331977 - RNA, 14 nt, Human
agauuuuuuaauaa

SEQ ID NO: 1331978 - RNA, 16 nt, Human
agauuuuuuaauaauu

SEQ ID NO: 1331979 - RNA, 18 nt, Human
agauuuuuuuuuuuucuc

SEQ ID NO: 1331980 - RNA, 12 nt, Human
agcaaaaaagaa

SEQ ID NO: 1331981 - RNA, 14 nt, Human
agcaaaaaagaaaa

SEQ ID NO: 1331982 - RNA, 18 nt, Human
agcaacgcuauuccagcu

SEQ ID NO: 1331983 - RNA, 19 nt, Human
agcaacgcuauuccagcug

SEQ ID NO: 1331984 - RNA, 20 nt, Human
agcaacgcuauuccagcugu

SEQ ID NO: 1331985 - RNA, 23 nt, Human
agcaacgcuauuccagcuguccc

SEQ ID NO: 1331986 - RNA, 13 nt, Human
agcaacggcacag

SEQ ID NO: 1331987 - RNA, 21 nt, Human
agcaacuacagucuaaagcug

SEQ ID NO: 1331988 - RNA, 16 nt, Human
agcaacuaggccuuca

SEQ ID NO: 1331989 - RNA, 16 nt, Human
agcaacuaucagacua

SEQ ID NO: 1331990 - RNA, 14 nt, Human
agcaacucuugauu

SEQ ID NO: 1331991 - RNA, 14 nt, Human
agcaacuuguccua

SEQ ID NO: 1331992 - RNA, 19 nt, Human
agcaagaaggcaaaaauag

SEQ ID NO: 1331993 - RNA, 16 nt, Human
agcaacucuugauuau

SEQ ID NO: 1331994 - RNA, 20 nt, Human
agcaacucuugauuauccau

SEQ ID NO: 1331995 - RNA, 11 nt, Human
agcaacuauuc

SEQ ID NO: 1331996 - RNA, 21 nt, Human
agcaacuuguccuagcacaga

SEQ ID NO: 1331997 - RNA, 19 nt, Human
agauuuucugcuacuuugc

SEQ ID NO: 1331998 - RNA, 12 nt, Human
agauuuucuggu

SEQ ID NO: 1331999 - RNA, 16 nt, Human
agauuuucugguucua

SEQ ID NO: 1332000 - RNA, 17 nt, Human
agauuuucugguucuaa

SEQ ID NO: 1332001 - RNA, 18 nt, Human
agauuuucugguucuaac

SEQ ID NO: 1332002 - RNA, 19 nt, Human
agauuuucugguucuaaca

SEQ ID NO: 1332003 - RNA, 22 nt, Human
agauuuucuuuugccuuuugca

SEQ ID NO: 1332004 - RNA, 17 nt, Human
agauuuuucaugauuuu

SEQ ID NO: 1332005 - RNA, 15 nt, Human
agauuucugaggaaa

SEQ ID NO: 1332006 - RNA, 14 nt, Human
agauuucugaggaa

SEQ ID NO: 1332007 - RNA, 21 nt, Human
agauuuccuucuuuuuuucuu

SEQ ID NO: 1332008 - RNA, 22 nt, Human
agauuucucagaagucuuucag

SEQ ID NO: 1332009 - RNA, 20 nt, Human
agauuucucauuugccaaua

SEQ ID NO: 1332010 - RNA, 18 nt, Human
agauuuccauauaaauau

SEQ ID NO: 1332011 - RNA, 16 nt, Human
agauuuccuucuuuuu

SEQ ID NO: 1332012 - RNA, 18 nt, Human
agauuccagagaguggcu

SEQ ID NO: 1332013 - RNA, 18 nt, Human
ugacucggggguggggaa

SEQ ID NO: 1332014 - RNA, 11 nt, Human
agauucuaaag

SEQ ID NO: 1332015 - RNA, 12 nt, Human
agauucuaaaga

SEQ ID NO: 1332016 - RNA, 14 nt, Human
agauucuaaagauu

SEQ ID NO: 1332017 - RNA, 22 nt, Human
agauugcugaaauuuuauaugc

SEQ ID NO: 1332018 - RNA, 13 nt, Human
agauucuaaagau

SEQ ID NO: 1332019 - RNA, 19 nt, Human
agauuccagagaguggcuc

SEQ ID NO: 1332020 - RNA, 16 nt, Human
agauuccggauccuaa

SEQ ID NO: 1332021 - RNA, 18 nt, Human
agauuccggauccuaagc

SEQ ID NO: 1332022 - RNA, 20 nt, Human
agauuccggauccuaagcau

SEQ ID NO: 1332023 - RNA, 23 nt, Human
agauuccggauccuaagcaucua

SEQ ID NO: 1332024 - RNA, 24 nt, Human
agauuccggauccuaagcaucuaa

SEQ ID NO: 1332025 - RNA, 13 nt, Human
agauuccuuccca

SEQ ID NO: 1332026 - RNA, 15 nt, Human
agauuccuucccaug

SEQ ID NO: 1332027 - RNA, 17 nt, Human
agauuccuucccaugga

SEQ ID NO: 1332028 - RNA, 20 nt, Human
ugaagcuaucguaaaauuaa

SEQ ID NO: 1332029 - RNA, 14 nt, Human
ugaagcuacugugu

SEQ ID NO: 1332030 - RNA, 22 nt, Human
ugaagcuacugugugugugaau

SEQ ID NO: 1332031 - RNA, 16 nt, Human
ugaagcucacuucugg

SEQ ID NO: 1332032 - RNA, 19 nt, Human
ugaagggccagagccaggg

SEQ ID NO: 1332033 - RNA, 14 nt, Human
ugaagggcccgaga

SEQ ID NO: 1332034 - RNA, 15 nt, Human
ugaagggggcggccu

SEQ ID NO: 1332035 - RNA, 18 nt, Human
ugaagggggcggccuaug

SEQ ID NO: 1332036 - RNA, 12 nt, Human
ugaagccuuugu

SEQ ID NO: 1332037 - RNA, 19 nt, Human
ugaagccaauucagacagg

SEQ ID NO: 1332038 - RNA, 24 nt, Human
agaggugggccagucuguggauca

SEQ ID NO: 1332039 - RNA, 16 nt, Human
agagguguuauuugga

SEQ ID NO: 1332040 - RNA, 21 nt, Human
agagcugauggagaaggaagg

SEQ ID NO: 1332041 - RNA, 20 nt, Human
agagcugauggagaaggaag

SEQ ID NO: 1332042 - RNA, 19 nt, Human
agagcugauggagaaggaa

SEQ ID NO: 1332043 - RNA, 18 nt, Human
ugaaagguuuuuuuucag

SEQ ID NO: 1332044 - RNA, 17 nt, Human
ugaaagguuuuuuuuca

SEQ ID NO: 1332045 - RNA, 19 nt, Human
ugaaagucacggcugcgca

SEQ ID NO: 1332046 - RNA, 12 nt, Human
ugaaagucuguc

SEQ ID NO: 1332047 - RNA, 15 nt, Human
ugaaagucuguccuu

SEQ ID NO: 1332048 - RNA, 16 nt, Human
ugaaagucuguccuug

SEQ ID NO: 1332049 - RNA, 23 nt, Human
ugaaagucuguccuugaaggacu

SEQ ID NO: 1332050 - RNA, 12 nt, Human
agaggccccagc

SEQ ID NO: 1332051 - RNA, 13 nt, Human
agaggccccagcc

SEQ ID NO: 1332052 - RNA, 14 nt, Human
agaggccccagccu

SEQ ID NO: 1332053 - RNA, 15 nt, Human
agaggccccagccuc

SEQ ID NO: 1332054 - RNA, 16 nt, Human
agaggccccagccucc

SEQ ID NO: 1332055 - RNA, 23 nt, Human
agaggccccagccucccugaagc

SEQ ID NO: 1332056 - RNA, 14 nt, Human
agaggcccccagcc

SEQ ID NO: 1332057 - RNA, 16 nt, Human
agaggcccccagccca

SEQ ID NO: 1332058 - RNA, 17 nt, Human
agaggcccccagcccag

SEQ ID NO: 1332059 - RNA, 20 nt, Human
agaggcccccagcccagggc

SEQ ID NO: 1332060 - RNA, 21 nt, Human
agaggcccccagcccagggcu

SEQ ID NO: 1332061 - RNA, 22 nt, Human
agaggcccccagcccagggcuc

SEQ ID NO: 1332062 - RNA, 17 nt, Human
ugaaagucuguccuuga

SEQ ID NO: 1332063 - RNA, 14 nt, Human
agaggcccucaagu

SEQ ID NO: 1332064 - RNA, 24 nt, Human
agagggaggagaaugagccucggc

SEQ ID NO: 1332065 - RNA, 14 nt, Human
agaggcccucgcug

SEQ ID NO: 1332066 - RNA, 19 nt, Human
agaggcccucgcugccagc

SEQ ID NO: 1332067 - RNA, 14 nt, Human
agaggcuggguuca

SEQ ID NO: 1332068 - RNA, 14 nt, Human
agaggcugucuguu

SEQ ID NO: 1332069 - RNA, 20 nt, Human
agaggcuuccuucauuuccu

SEQ ID NO: 1332070 - RNA, 18 nt, Human
ugaauauuuaguguucau

SEQ ID NO: 1332071 - RNA, 22 nt, Human
ugaauaugucaucacucuaggu

SEQ ID NO: 1332072 - RNA, 13 nt, Human
ugaauauuauucc

SEQ ID NO: 1332073 - RNA, 15 nt, Human
ugaauauuauuccuc

SEQ ID NO: 1332074 - RNA, 16 nt, Human
ugaauauugccauuau

SEQ ID NO: 1332075 - RNA, 18 nt, Human
ugaauauugccauuaugc

SEQ ID NO: 1332076 - RNA, 17 nt, Human
ugaauacuuugaaugug

SEQ ID NO: 1332077 - RNA, 18 nt, Human
ugaauacuuugaaugugu

SEQ ID NO: 1332078 - RNA, 19 nt, Human
ugaauacuuugaauguguu

SEQ ID NO: 1332079 - RNA, 20 nt, Human
ugaauacuuugaauguguuu

SEQ ID NO: 1332080 - RNA, 16 nt, Human
ugaauacuuuuuacaa

SEQ ID NO: 1332081 - RNA, 21 nt, Human
ugaauagauaugaaagcugau

SEQ ID NO: 1332082 - RNA, 18 nt, Human
ugaauagauaugaaagcu

SEQ ID NO: 1332083 - RNA, 16 nt, Human
ugaauagccauauuug

SEQ ID NO: 1332084 - RNA, 18 nt, Human
ugaauagccauauuugua

SEQ ID NO: 1332085 - RNA, 20 nt, Human
ugaauagccauauuuguaaa

SEQ ID NO: 1332086 - RNA, 22 nt, Human
ugaauagccauauuuguaaaau

SEQ ID NO: 1332087 - RNA, 18 nt, Human
ugaaugggacagaguuga

SEQ ID NO: 1332088 - RNA, 22 nt, Human
ugaauguaaauuuguacuauuu

SEQ ID NO: 1332089 - RNA, 21 nt, Human
ugaauguaaauuuguacuauu

SEQ ID NO: 1332090 - RNA, 15 nt, Human
ugaauacuuuauaaa

SEQ ID NO: 1332091 - RNA, 14 nt, Human
ugaauacugcuaca

SEQ ID NO: 1332092 - RNA, 16 nt, Human
ugaauacuguauuuug

SEQ ID NO: 1332093 - RNA, 13 nt, Human
ugaauacuuugaa

SEQ ID NO: 1332094 - RNA, 14 nt, Human
ugaauacuuugaau

SEQ ID NO: 1332095 - RNA, 15 nt, Human
ugaauacuuugaaug

SEQ ID NO: 1332096 - RNA, 16 nt, Human
ugaauacuuugaaugu

SEQ ID NO: 1332097 - RNA, 22 nt, Human
ugaauaccuuagugcaguuauu

SEQ ID NO: 1332098 - RNA, 21 nt, Human
ugaauaccuuagugcaguuau

SEQ ID NO: 1332099 - RNA, 16 nt, Human
ugaauaccuuagugca

SEQ ID NO: 1332100 - RNA, 20 nt, Human
ugaauaccacucuguaauug

SEQ ID NO: 1332101 - RNA, 16 nt, Human
ugaauacccuuuucug

SEQ ID NO: 1332102 - RNA, 14 nt, Human
ugaauaccugcuca

SEQ ID NO: 1332103 - RNA, 15 nt, Human
ugaauaaaugucuug

SEQ ID NO: 1332104 - RNA, 17 nt, Human
ugaauaccacucuguaa

SEQ ID NO: 1332105 - RNA, 18 nt, Human
ugaauaccacucuguaau

SEQ ID NO: 1332106 - RNA, 19 nt, Human
ugaauaccacucuguaauu

SEQ ID NO: 1332107 - RNA, 23 nt, Human
ugaauaccacucuguaauugcaa

SEQ ID NO: 1332108 - RNA, 12 nt, Human
ugaauaaauguc

SEQ ID NO: 1332109 - RNA, 13 nt, Human
ugaauaaauguca

SEQ ID NO: 1332110 - RNA, 15 nt, Human
ugaauaaaugucacu

SEQ ID NO: 1332111 - RNA, 16 nt, Human
ugaauaaaugucacuu

SEQ ID NO: 1332112 - RNA, 19 nt, Human
ugaauaaaugucacuuuuu

SEQ ID NO: 1332113 - RNA, 20 nt, Human
ugaauaaaugucacuuuuug

SEQ ID NO: 1332114 - RNA, 13 nt, Human
ugaauaaaugucu

SEQ ID NO: 1332115 - RNA, 14 nt, Human
ugaauaaaugucuu

SEQ ID NO: 1332116 - RNA, 14 nt, Human
ugaauaaagcaauu

SEQ ID NO: 1332117 - RNA, 17 nt, Human
ugaauaaaguguaacaa

SEQ ID NO: 1332118 - RNA, 15 nt, Human
ugaagucacugcaca

SEQ ID NO: 1332119 - RNA, 16 nt, Human
ugaagucacugcacag

SEQ ID NO: 1332120 - RNA, 21 nt, Human
ugaagucacugcacagugcau

SEQ ID NO: 1332121 - RNA, 16 nt, Human
ugaauaaagacaccua

SEQ ID NO: 1332122 - RNA, 22 nt, Human
ugaaggguaauuauauaguuac

SEQ ID NO: 1332123 - RNA, 14 nt, Human
ugaagguaaauaaa

SEQ ID NO: 1332124 - RNA, 20 nt, Human
ugaagguaaauaaaaagaaa

SEQ ID NO: 1332125 - RNA, 14 nt, Human
ugaagucacugcac

SEQ ID NO: 1332126 - RNA, 15 nt, Human
ugaagguauaucuag

SEQ ID NO: 1332127 - RNA, 18 nt, Human
ugaagguaaauaaaaaga

SEQ ID NO: 1332128 - RNA, 14 nt, Human
agauacauacagaa

SEQ ID NO: 1332129 - RNA, 15 nt, Human
agauacauacagaau

SEQ ID NO: 1332130 - RNA, 16 nt, Human
agauacauacagaauu

SEQ ID NO: 1332131 - RNA, 13 nt, Human
agaguuuccugaa

SEQ ID NO: 1332132 - RNA, 15 nt, Human
agauaacugaaaauu

SEQ ID NO: 1332133 - RNA, 18 nt, Human
agauaacugaaaauuauu

SEQ ID NO: 1332134 - RNA, 22 nt, Human
agauaacugaaaauuauuuaaa

SEQ ID NO: 1332135 - RNA, 11 nt, Human
agauaacuuuu

SEQ ID NO: 1332136 - RNA, 18 nt, Human
agaguuugaugaggcccu

SEQ ID NO: 1332137 - RNA, 20 nt, Human
agaguuugaugaggcccucc

SEQ ID NO: 1332138 - RNA, 23 nt, Human
agaguuugaugaggcccuccaca

SEQ ID NO: 1332139 - RNA, 22 nt, Human
agaguuugaugaggcccuccac

SEQ ID NO: 1332140 - RNA, 13 nt, Human
agauaacuaggaa

SEQ ID NO: 1332141 - RNA, 20 nt, Human
ugacaaagguaaaucagacu

SEQ ID NO: 1332142 - RNA, 22 nt, Human
ugacaaagcagauucagaaaug

SEQ ID NO: 1332143 - RNA, 17 nt, Human
ugacaaaggcaagcacu

SEQ ID NO: 1332144 - RNA, 16 nt, Human
ugacacauggccccuc

SEQ ID NO: 1332145 - RNA, 22 nt, Human
ugacacauggccccucccccug

SEQ ID NO: 1332146 - RNA, 14 nt, Human
ugacacccuucucc

SEQ ID NO: 1332147 - RNA, 18 nt, Human
ugacacuagcccaaugaa

SEQ ID NO: 1332148 - RNA, 19 nt, Human
ugacacuagcccaaugaaa

SEQ ID NO: 1332149 - RNA, 21 nt, Human
ugacacuagcccaaugaaaug

SEQ ID NO: 1332150 - RNA, 22 nt, Human
ugacacuagcccaaugaaauga

SEQ ID NO: 1332151 - RNA, 23 nt, Human
ugacacuagcccaaugaaaugaa

SEQ ID NO: 1332152 - RNA, 16 nt, Human
ugacacucauauaauu

SEQ ID NO: 1332153 - RNA, 22 nt, Human
ugacacucauauaauuauaugu

SEQ ID NO: 1332154 - RNA, 22 nt, Human
ugacacucccuugggcucccug

SEQ ID NO: 1332155 - RNA, 14 nt, Human
ugaauuuuguugcu

SEQ ID NO: 1332156 - RNA, 23 nt, Human
ugaauuugugaagguggaaauaa

SEQ ID NO: 1332157 - RNA, 13 nt, Human
ugaauuuguaaug

SEQ ID NO: 1332158 - RNA, 17 nt, Human
ugaauuuguaaugucuu

SEQ ID NO: 1332159 - RNA, 21 nt, Human
ugaauuuguaaugucuugagc

SEQ ID NO: 1332160 - RNA, 20 nt, Human
ugacaaaauguuauuucccu

SEQ ID NO: 1332161 - RNA, 15 nt, Human
ugacaaaauguuauu

SEQ ID NO: 1332162 - RNA, 14 nt, Human
ugacaaaauguuau

SEQ ID NO: 1332163 - RNA, 13 nt, Human
ugacaaaauguua

SEQ ID NO: 1332164 - RNA, 12 nt, Human
ugacaaaauguu

SEQ ID NO: 1332165 - RNA, 22 nt, Human
ugacaaaauacuugucuguuuu

SEQ ID NO: 1332166 - RNA, 16 nt, Human
ugaauuuuguugcugu

SEQ ID NO: 1332167 - RNA, 22 nt, Human
ugaauuuuuaaaacccauuuaa

SEQ ID NO: 1332168 - RNA, 17 nt, Human
ugaauuuuuaaacaagu

SEQ ID NO: 1332169 - RNA, 19 nt, Human
ugaauuuuuaaacaaguau

SEQ ID NO: 1332170 - RNA, 23 nt, Human
ugaauuuuuaaacaaguauuugu

SEQ ID NO: 1332171 - RNA, 21 nt, Human
ugaauuuuuaaacaaguauuu

SEQ ID NO: 1332172 - RNA, 21 nt, Human
ugaauuugugaagguggaaau

SEQ ID NO: 1332173 - RNA, 13 nt, Human
ugaauuugugaag

SEQ ID NO: 1332174 - RNA, 12 nt, Human
agaucaaagaug

SEQ ID NO: 1332175 - RNA, 13 nt, Human
agaucaaagauga

SEQ ID NO: 1332176 - RNA, 12 nt, Human
ugaaacuuuugg

SEQ ID NO: 1332177 - RNA, 23 nt, Human
ugaaacuuucauuccuucagauu

SEQ ID NO: 1332178 - RNA, 14 nt, Human
ugaaacuuucauuc

SEQ ID NO: 1332179 - RNA, 13 nt, Human
ugaaagaagaaaa

SEQ ID NO: 1332180 - RNA, 20 nt, Human
ugaaagaauagaacacaguu

SEQ ID NO: 1332181 - RNA, 17 nt, Human
agagacgggcccuggug

SEQ ID NO: 1332182 - RNA, 16 nt, Human
agagaccuuccagaaa

SEQ ID NO: 1332183 - RNA, 16 nt, Human
agagacuccagcuggg

SEQ ID NO: 1332184 - RNA, 20 nt, Human
agagaucaggaagagaagga

SEQ ID NO: 1332185 - RNA, 19 nt, Human
agagaucaggaagagaagg

SEQ ID NO: 1332186 - RNA, 18 nt, Human
agagauccaaaagaagcc

SEQ ID NO: 1332187 - RNA, 12 nt, Human
agagaugugugu

SEQ ID NO: 1332188 - RNA, 13 nt, Human
agagauguguguu

SEQ ID NO: 1332189 - RNA, 14 nt, Human
agagauguguguug

SEQ ID NO: 1332190 - RNA, 20 nt, Human
agagauguguguugauacug

SEQ ID NO: 1332191 - RNA, 15 nt, Human
agagauguguguuga

SEQ ID NO: 1332192 - RNA, 17 nt, Human
agagauguguguugaua

SEQ ID NO: 1332193 - RNA, 18 nt, Human
agagauguguguugauac

SEQ ID NO: 1332194 - RNA, 15 nt, Human
agagaucaggaagag

SEQ ID NO: 1332195 - RNA, 14 nt, Human
agagaucaggaaga

SEQ ID NO: 1332196 - RNA, 14 nt, Human
agagaucaaagaug

SEQ ID NO: 1332197 - RNA, 15 nt, Human
agagaucaaagauga

SEQ ID NO: 1332198 - RNA, 15 nt, Human
agagagaaaggacuc

SEQ ID NO: 1332199 - RNA, 18 nt, Human
agagcugauggagaagga

SEQ ID NO: 1332200 - RNA, 17 nt, Human
agagcugauggagaagg

SEQ ID NO: 1332201 - RNA, 16 nt, Human
agagcugauggagaag

SEQ ID NO: 1332202 - RNA, 19 nt, Human
agagcugaagguuguggcc

SEQ ID NO: 1332203 - RNA, 20 nt, Human
agagcugaagguuguggccu

SEQ ID NO: 1332204 - RNA, 23 nt, Human
agagcugaagguuguggccuuug

SEQ ID NO: 1332205 - RNA, 13 nt, Human
agagcuaggagca

SEQ ID NO: 1332206 - RNA, 18 nt, Human
agagcuaggagcaaagcc

SEQ ID NO: 1332207 - RNA, 19 nt, Human
agagcuaggagcaaagccu

SEQ ID NO: 1332208 - RNA, 20 nt, Human
agagcuaggagcaaagccug

SEQ ID NO: 1332209 - RNA, 21 nt, Human
agagcuaggagcaaagccugu

SEQ ID NO: 1332210 - RNA, 10 nt, Human
agagcucagg

SEQ ID NO: 1332211 - RNA, 12 nt, Human
agagcucaggau

SEQ ID NO: 1332212 - RNA, 13 nt, Human
agagcucaggaug

SEQ ID NO: 1332213 - RNA, 12 nt, Human
agagcuccuccc

SEQ ID NO: 1332214 - RNA, 17 nt, Human
agagcuccucccucuca

SEQ ID NO: 1332215 - RNA, 13 nt, Human
agagcuccucccu

SEQ ID NO: 1332216 - RNA, 23 nt, Human
agagccaggggggugaggagcug

SEQ ID NO: 1332217 - RNA, 11 nt, Human
agagcuacaua

SEQ ID NO: 1332218 - RNA, 14 nt, Human
agagcuacauaauu

SEQ ID NO: 1332219 - RNA, 16 nt, Human
agagcuacauaauuua

SEQ ID NO: 1332220 - RNA, 18 nt, Human
agagcuacauaauuuagu

SEQ ID NO: 1332221 - RNA, 14 nt, Human
agagcuacguauuu

SEQ ID NO: 1332222 - RNA, 16 nt, Human
agagcuacguauuuaa

SEQ ID NO: 1332223 - RNA, 17 nt, Human
agagcuacguauuuaau

SEQ ID NO: 1332224 - RNA, 18 nt, Human
agagcaagaccccaucuc

SEQ ID NO: 1332225 - RNA, 21 nt, Human
agagcacgccuguacuagagc

SEQ ID NO: 1332226 - RNA, 20 nt, Human
agagcacgccuguacuagag

SEQ ID NO: 1332227 - RNA, 12 nt, Human
agagcacugcca

SEQ ID NO: 1332228 - RNA, 13 nt, Human
agagcacugccac

SEQ ID NO: 1332229 - RNA, 14 nt, Human
agagcacugccacc

SEQ ID NO: 1332230 - RNA, 12 nt, Human
agagcagcaccu

SEQ ID NO: 1332231 - RNA, 16 nt, Human
agagcagcaccuccuc

SEQ ID NO: 1332232 - RNA, 23 nt, Human
agagcagcaccuccucagccuga

SEQ ID NO: 1332233 - RNA, 22 nt, Human
agagcagcaccuccucagccug

SEQ ID NO: 1332234 - RNA, 14 nt, Human
agagcaggaauggg

SEQ ID NO: 1332235 - RNA, 13 nt, Human
agagcaggacucc

SEQ ID NO: 1332236 - RNA, 15 nt, Human
agagcaggacuccag

SEQ ID NO: 1332237 - RNA, 17 nt, Human
agagcaggacuccaggc

SEQ ID NO: 1332238 - RNA, 20 nt, Human
agagcaggacuccaggccca

SEQ ID NO: 1332239 - RNA, 21 nt, Human
agagcaggacuccaggcccaa

SEQ ID NO: 1332240 - RNA, 22 nt, Human
agagcaggacuccaggcccaag

SEQ ID NO: 1332241 - RNA, 17 nt, Human
agagcaggacugauguc

SEQ ID NO: 1332242 - RNA, 19 nt, Human
agagcaggacugaugucuc

SEQ ID NO: 1332243 - RNA, 22 nt, Human
agagcaggacugaugucuccua

SEQ ID NO: 1332244 - RNA, 13 nt, Human
agagcauaggguc

SEQ ID NO: 1332245 - RNA, 15 nt, Human
agagcaucaggccua

SEQ ID NO: 1332246 - RNA, 19 nt, Human
agagcaucaggccuagagg

SEQ ID NO: 1332247 - RNA, 14 nt, Human
agagcaucaugccu

SEQ ID NO: 1332248 - RNA, 15 nt, Human
agagcaucaugccuc

SEQ ID NO: 1332249 - RNA, 16 nt, Human
agagcaucaugccucu

SEQ ID NO: 1332250 - RNA, 17 nt, Human
agagcaucaugccucug

SEQ ID NO: 1332251 - RNA, 18 nt, Human
agagcaucaugccucuga

SEQ ID NO: 1332252 - RNA, 19 nt, Human
agagcaucaugccucugag

SEQ ID NO: 1332253 - RNA, 20 nt, Human
agagcaucaugccucugagg

SEQ ID NO: 1332254 - RNA, 21 nt, Human
agagcaucaugccucugaggc

SEQ ID NO: 1332255 - RNA, 22 nt, Human
agagcaucaugccucugaggcc

SEQ ID NO: 1332256 - RNA, 23 nt, Human
agagcaucaugccucugaggcca

SEQ ID NO: 1332257 - RNA, 21 nt, Human
agagccagcuaaggggugggg

SEQ ID NO: 1332258 - RNA, 12 nt, Human
agagccaggaga

SEQ ID NO: 1332259 - RNA, 13 nt, Human
agagccaggagaa

SEQ ID NO: 1332260 - RNA, 15 nt, Human
agagccaggagaagc

SEQ ID NO: 1332261 - RNA, 16 nt, Human
agagccaggagaagcu

SEQ ID NO: 1332262 - RNA, 18 nt, Human
agagccaggagaagcuca

SEQ ID NO: 1332263 - RNA, 22 nt, Human
agagccaggagaagcucagcug

SEQ ID NO: 1332264 - RNA, 19 nt, Human
agagccaggagaagcucag

SEQ ID NO: 1332265 - RNA, 22 nt, Human
agagccaggggggugaggagcu

SEQ ID NO: 1332266 - RNA, 15 nt, Human
ugaaacgcaucuagu

SEQ ID NO: 1332267 - RNA, 22 nt, Human
ugaaacuagaaagcagagauuu

SEQ ID NO: 1332268 - RNA, 19 nt, Human
ugaaacucauagacacuga

SEQ ID NO: 1332269 - RNA, 18 nt, Human
ugaaacucauagacacug

SEQ ID NO: 1332270 - RNA, 17 nt, Human
ugaaacuccagaugcca

SEQ ID NO: 1332271 - RNA, 19 nt, Human
ugaaacucguuaauuugua

SEQ ID NO: 1332272 - RNA, 18 nt, Human
ugaaacuccagaugccac

SEQ ID NO: 1332273 - RNA, 19 nt, Human
ugaaacuccagaugccaca

SEQ ID NO: 1332274 - RNA, 14 nt, Human
ugaaaaugucuugu

SEQ ID NO: 1332275 - RNA, 15 nt, Human
ugaaaaugucuugug

SEQ ID NO: 1332276 - RNA, 16 nt, Human
ugaaaauguccaggaa

SEQ ID NO: 1332277 - RNA, 20 nt, Human
ugaaaauguccaggaaagug

SEQ ID NO: 1332278 - RNA, 13 nt, Human
ugaaaauguccuu

SEQ ID NO: 1332279 - RNA, 14 nt, Human
ugaaaauguccuug

SEQ ID NO: 1332280 - RNA, 16 nt, Human
ugaaaauguccuugug

SEQ ID NO: 1332281 - RNA, 17 nt, Human
ugaaaauguccuuguga

SEQ ID NO: 1332282 - RNA, 18 nt, Human
ugaaaauguccuugugau

SEQ ID NO: 1332283 - RNA, 19 nt, Human
ugaaaauguccuugugaug

SEQ ID NO: 1332284 - RNA, 23 nt, Human
ugaaaauguccuugugaugugca

SEQ ID NO: 1332285 - RNA, 13 nt, Human
ugaaaaugucuug

SEQ ID NO: 1332286 - RNA, 20 nt, Human
ugaaaaucuuauaauuuaaa

SEQ ID NO: 1332287 - RNA, 23 nt, Human
ugaaaauauuguuuuacaauagu

SEQ ID NO: 1332288 - RNA, 20 nt, Human
ugaaaauauuguuuuacaau

SEQ ID NO: 1332289 - RNA, 16 nt, Human
ugaaaauauuguuuua

SEQ ID NO: 1332290 - RNA, 20 nt, Human
ugaaaaggguguugggaggg

SEQ ID NO: 1332291 - RNA, 19 nt, Human
ugaaaagguuuaugaaaaa

SEQ ID NO: 1332292 - RNA, 21 nt, Human
ugaaaagguuuaugaaaaaga

SEQ ID NO: 1332293 - RNA, 22 nt, Human
ugaaaagguuuaugaaaaagaa

SEQ ID NO: 1332294 - RNA, 20 nt, Human
ugaaaaguagcaauuaugga

SEQ ID NO: 1332295 - RNA, 21 nt, Human
ugaaaaguauauugauaaccu

SEQ ID NO: 1332296 - RNA, 17 nt, Human
ugaaaagugaagacaga

SEQ ID NO: 1332297 - RNA, 14 nt, Human
ugaaaauauaacca

SEQ ID NO: 1332298 - RNA, 16 nt, Human
ugaaaauauaaccagc

SEQ ID NO: 1332299 - RNA, 22 nt, Human
ugaaaaaguucugcagauaaac

SEQ ID NO: 1332300 - RNA, 15 nt, Human
ugaaaaaguuuguuu

SEQ ID NO: 1332301 - RNA, 19 nt, Human
ugaaaaaugggcacuuaaa

SEQ ID NO: 1332302 - RNA, 21 nt, Human
ugaaaaauuccacucaaaaua

SEQ ID NO: 1332303 - RNA, 14 nt, Human
ugaaaaauugcuga

SEQ ID NO: 1332304 - RNA, 16 nt, Human
ugaaaaauugcugacu

SEQ ID NO: 1332305 - RNA, 23 nt, Human
ugaaaaauugcugacuguagcuu

SEQ ID NO: 1332306 - RNA, 22 nt, Human
ugaaaaauugcugacuguagcu

SEQ ID NO: 1332307 - RNA, 23 nt, Human
ugaaaaaauauauaucaaauaua

SEQ ID NO: 1332308 - RNA, 18 nt, Human
ugaaaaaauguauaugca

SEQ ID NO: 1332309 - RNA, 13 nt, Human
ugaaaaaauauau

SEQ ID NO: 1332310 - RNA, 12 nt, Human
ugaaaaacauga

SEQ ID NO: 1332311 - RNA, 16 nt, Human
ugaaaaaaaauaaauu

SEQ ID NO: 1332312 - RNA, 22 nt, Human
ugaaaaaauagagccugaggga

SEQ ID NO: 1332313 - RNA, 12 nt, Human
ugaaaaaauaua

SEQ ID NO: 1332314 - RNA, 13 nt, Human
ugaaaaagcgaaa

SEQ ID NO: 1332315 - RNA, 13 nt, Human
ugaaaaagaagaa

SEQ ID NO: 1332316 - RNA, 18 nt, Human
ucuuuguuaagacugcug

SEQ ID NO: 1332317 - RNA, 16 nt, Human
ucuuuguucauagccc

SEQ ID NO: 1332318 - RNA, 23 nt, Human
ucuuuguucauagcccaguagac

SEQ ID NO: 1332319 - RNA, 15 nt, Human
ucuuuguuucuuucu

SEQ ID NO: 1332320 - RNA, 16 nt, Human
ucuuuguuuugugucu

SEQ ID NO: 1332321 - RNA, 17 nt, Human
ucuuuguuuugugucuc

SEQ ID NO: 1332322 - RNA, 18 nt, Human
ucuuuguuuugugucucu

SEQ ID NO: 1332323 - RNA, 19 nt, Human
ucuuuguuuugugucucuu

SEQ ID NO: 1332324 - RNA, 20 nt, Human
ucuuuguuuugugucucuua

SEQ ID NO: 1332325 - RNA, 12 nt, Human
ucuuuuacaacu

SEQ ID NO: 1332326 - RNA, 22 nt, Human
ucuuuuacccuggccccucucc

SEQ ID NO: 1332327 - RNA, 13 nt, Human
ucuuuuacccugg

SEQ ID NO: 1332328 - RNA, 17 nt, Human
ucuuuuacccuggcccc

SEQ ID NO: 1332329 - RNA, 18 nt, Human
ucuuuuacccuggccccu

SEQ ID NO: 1332330 - RNA, 16 nt, Human
ugaaaaaaaacagugg

SEQ ID NO: 1332331 - RNA, 22 nt, Human
ugaaaaaaaaccugagauuuau

SEQ ID NO: 1332332 - RNA, 21 nt, Human
ugaaaaaaaaccugagauuua

SEQ ID NO: 1332333 - RNA, 11 nt, Human
ucuuucucugc

SEQ ID NO: 1332334 - RNA, 12 nt, Human
ucuuucucugcc

SEQ ID NO: 1332335 - RNA, 13 nt, Human
ucuuucucugcca

SEQ ID NO: 1332336 - RNA, 15 nt, Human
ucuuucucugccagu

SEQ ID NO: 1332337 - RNA, 16 nt, Human
ucuuucucugccagug

SEQ ID NO: 1332338 - RNA, 17 nt, Human
ucuuucucugccaguga

SEQ ID NO: 1332339 - RNA, 16 nt, Human
ucuuucucuuucccug

SEQ ID NO: 1332340 - RNA, 17 nt, Human
ucuuucucuuucccugg

SEQ ID NO: 1332341 - RNA, 10 nt, Human
ucuuucugua

SEQ ID NO: 1332342 - RNA, 15 nt, Human
agagacaucagcccu

SEQ ID NO: 1332343 - RNA, 15 nt, Human
agagacaugcagaga

SEQ ID NO: 1332344 - RNA, 18 nt, Human
agagacauuaacucauua

SEQ ID NO: 1332345 - RNA, 22 nt, Human
agagacauuaacucauuagacu

SEQ ID NO: 1332346 - RNA, 17 nt, Human
agagacauacuugaagg

SEQ ID NO: 1332347 - RNA, 22 nt, Human
agagacauacuugaagggccag

SEQ ID NO: 1332348 - RNA, 23 nt, Human
agagacauacuugaagggccaga

SEQ ID NO: 1332349 - RNA, 13 nt, Human
agagacaucagcc

SEQ ID NO: 1332350 - RNA, 23 nt, Human
agagacauuaacucauuagacug

SEQ ID NO: 1332351 - RNA, 12 nt, Human
ucuuugguucua

SEQ ID NO: 1332352 - RNA, 14 nt, Human
ucuuugguucuaag

SEQ ID NO: 1332353 - RNA, 15 nt, Human
ucuuugguucuaagg

SEQ ID NO: 1332354 - RNA, 16 nt, Human
ucuuugguucuaagga

SEQ ID NO: 1332355 - RNA, 21 nt, Human
ucuuugguucuaaggaccuga

SEQ ID NO: 1332356 - RNA, 13 nt, Human
ucuuuguguagcu

SEQ ID NO: 1332357 - RNA, 15 nt, Human
ucuuuguguagcuuu

SEQ ID NO: 1332358 - RNA, 18 nt, Human
ucuuuguguagcuuugcu

SEQ ID NO: 1332359 - RNA, 21 nt, Human
ucuugaugccuggcggggugg

SEQ ID NO: 1332360 - RNA, 14 nt, Human
ucuugauguaaaau

SEQ ID NO: 1332361 - RNA, 15 nt, Human
ucuugauguaaaauc

SEQ ID NO: 1332362 - RNA, 16 nt, Human
ucuugauguaaaaucu

SEQ ID NO: 1332363 - RNA, 19 nt, Human
ucuugauguaaaaucuugu

SEQ ID NO: 1332364 - RNA, 21 nt, Human
ucuugauguaaggaugggcau

SEQ ID NO: 1332365 - RNA, 22 nt, Human
ucuugauguaaaaucuugucau

SEQ ID NO: 1332366 - RNA, 14 nt, Human
ucuugauuauccau

SEQ ID NO: 1332367 - RNA, 23 nt, Human
ucuugauuauccauauugaguca

SEQ ID NO: 1332368 - RNA, 22 nt, Human
ucuugagcaguggcugguccag

SEQ ID NO: 1332369 - RNA, 13 nt, Human
ucuugagcucuau

SEQ ID NO: 1332370 - RNA, 14 nt, Human
ucuugagcucuauu

SEQ ID NO: 1332371 - RNA, 16 nt, Human
ucuugagcucuauuau

SEQ ID NO: 1332372 - RNA, 22 nt, Human
ucuugaggggaagcuagucuuu

SEQ ID NO: 1332373 - RNA, 15 nt, Human
ucuugaggggaccag

SEQ ID NO: 1332374 - RNA, 17 nt, Human
ucuugaggggaccagga

SEQ ID NO: 1332375 - RNA, 18 nt, Human
ucuugaggggaccaggag

SEQ ID NO: 1332376 - RNA, 19 nt, Human
ucuugaggggaccaggagu

SEQ ID NO: 1332377 - RNA, 13 nt, Human
ucuugaguuuguc

SEQ ID NO: 1332378 - RNA, 14 nt, Human
ucuugaguuugucg

SEQ ID NO: 1332379 - RNA, 20 nt, Human
ucuugaguuugucgcucaug

SEQ ID NO: 1332380 - RNA, 14 nt, Human
ucuugagcaguggc

SEQ ID NO: 1332381 - RNA, 13 nt, Human
agacucagcucug

SEQ ID NO: 1332382 - RNA, 18 nt, Human
agacucagcucugacauu

SEQ ID NO: 1332383 - RNA, 20 nt, Human
agacucagcucugacauucu

SEQ ID NO: 1332384 - RNA, 19 nt, Human
agacucaggccaagaaacg

SEQ ID NO: 1332385 - RNA, 20 nt, Human
agacucaggccaagaaacgu

SEQ ID NO: 1332386 - RNA, 23 nt, Human
agacucaggccaagaaacgucuu

SEQ ID NO: 1332387 - RNA, 19 nt, Human
agaccuguuagcagacagg

SEQ ID NO: 1332388 - RNA, 14 nt, Human
agaccccuggcuuu

SEQ ID NO: 1332389 - RNA, 11 nt, Human
agaccuggcag

SEQ ID NO: 1332390 - RNA, 14 nt, Human
agaccuggcagcuc

SEQ ID NO: 1332391 - RNA, 15 nt, Human
agaccuggcagcucu

SEQ ID NO: 1332392 - RNA, 16 nt, Human
agaccuggcagcucug

SEQ ID NO: 1332393 - RNA, 17 nt, Human
agaccuggcagcucugg

SEQ ID NO: 1332394 - RNA, 18 nt, Human
agaccuggcagcucugga

SEQ ID NO: 1332395 - RNA, 23 nt, Human
agaccuggcagcucuggacagcc

SEQ ID NO: 1332396 - RNA, 13 nt, Human
agaccuguaauca

SEQ ID NO: 1332397 - RNA, 18 nt, Human
agaccuguuagcagacag

SEQ ID NO: 1332398 - RNA, 18 nt, Human
agaccuuguuacuucuga

SEQ ID NO: 1332399 - RNA, 19 nt, Human
agaccuuguuacuucugag

SEQ ID NO: 1332400 - RNA, 21 nt, Human
agaccuuguuacuucugaggu

SEQ ID NO: 1332401 - RNA, 22 nt, Human
agaccuuguuacuucugaggua

SEQ ID NO: 1332402 - RNA, 20 nt, Human
agacuaucuuacuauuucac

SEQ ID NO: 1332403 - RNA, 15 nt, Human
agacuaugaaaaugc

SEQ ID NO: 1332404 - RNA, 18 nt, Human
ucuuucuaaugugugaau

SEQ ID NO: 1332405 - RNA, 19 nt, Human
ucuuucuaaugugugaauc

SEQ ID NO: 1332406 - RNA, 13 nt, Human
ucuuucucugagg

SEQ ID NO: 1332407 - RNA, 15 nt, Human
ucuuucucugaggac

SEQ ID NO: 1332408 - RNA, 15 nt, Human
ucuuuaugcuugcaa

SEQ ID NO: 1332409 - RNA, 14 nt, Human
ucuuuaugcuugca

SEQ ID NO: 1332410 - RNA, 23 nt, Human
ucuuuauuuuaaccuuugauaga

SEQ ID NO: 1332411 - RNA, 12 nt, Human
ucuuuauuuuga

SEQ ID NO: 1332412 - RNA, 17 nt, Human
ucuuuaaccaaacaaua

SEQ ID NO: 1332413 - RNA, 23 nt, Human
ucuuuaacucccauuaccaugua

SEQ ID NO: 1332414 - RNA, 11 nt, Human
ucuuuaacugc

SEQ ID NO: 1332415 - RNA, 20 nt, Human
ucuuuaacugccguaauuua

SEQ ID NO: 1332416 - RNA, 21 nt, Human
ucuuuaacugccguaauuuaa

SEQ ID NO: 1332417 - RNA, 22 nt, Human
ucuuuaacugccguaauuuaac

SEQ ID NO: 1332418 - RNA, 20 nt, Human
ucuuuaacuuaauugcuaug

SEQ ID NO: 1332419 - RNA, 11 nt, Human
ucuuuauauga

SEQ ID NO: 1332420 - RNA, 15 nt, Human
ucuuuauaugaagaa

SEQ ID NO: 1332421 - RNA, 16 nt, Human
ucuuggccaugggagg

SEQ ID NO: 1332422 - RNA, 22 nt, Human
ucuuggccaugggaggccuuuc

SEQ ID NO: 1332423 - RNA, 14 nt, Human
ucuuggcuggaccc

SEQ ID NO: 1332424 - RNA, 17 nt, Human
ucuuggcuggacccagc

SEQ ID NO: 1332425 - RNA, 18 nt, Human
ucuuggcuggacccagcc

SEQ ID NO: 1332426 - RNA, 19 nt, Human
ucuuggcuggacccagcca

SEQ ID NO: 1332427 - RNA, 20 nt, Human
ucuuggcuggacccagccag

SEQ ID NO: 1332428 - RNA, 19 nt, Human
ucuuggggggguggccgcu

SEQ ID NO: 1332429 - RNA, 20 nt, Human
ucuuggggggguggccgcug

SEQ ID NO: 1332430 - RNA, 22 nt, Human
ucuuggggaguuuagggugggg

SEQ ID NO: 1332431 - RNA, 23 nt, Human
ucuugggcagagcuggcucugag

SEQ ID NO: 1332432 - RNA, 23 nt, Human
ucuuggggaguuuaggguggggg

SEQ ID NO: 1332433 - RNA, 13 nt, Human
ucuuggggaagau

SEQ ID NO: 1332434 - RNA, 13 nt, Human
ucuugggaacuga

SEQ ID NO: 1332435 - RNA, 14 nt, Human
ucuugggaacugaa

SEQ ID NO: 1332436 - RNA, 19 nt, Human
ucuugggcagagcuggcuc

SEQ ID NO: 1332437 - RNA, 20 nt, Human
ucuugggcagagcuggcucu

SEQ ID NO: 1332438 - RNA, 21 nt, Human
ucuugggcagagcuggcucug

SEQ ID NO: 1332439 - RNA, 22 nt, Human
ucuucuuaauauguucuuuuaa

SEQ ID NO: 1332440 - RNA, 14 nt, Human
agacauaaaggaaa

SEQ ID NO: 1332441 - RNA, 18 nt, Human
ucuucuggguuccuuccu

SEQ ID NO: 1332442 - RNA, 22 nt, Human
ucuucuggggcaggcugggcca

SEQ ID NO: 1332443 - RNA, 19 nt, Human
ucuucucuuccuuuuauca

SEQ ID NO: 1332444 - RNA, 21 nt, Human
ucuucucuuccuuuuaucagu

SEQ ID NO: 1332445 - RNA, 19 nt, Human
ucuucugaacucaaacuga

SEQ ID NO: 1332446 - RNA, 24 nt, Human
ucuucugaacucaaacugaggaau

SEQ ID NO: 1332447 - RNA, 22 nt, Human
ucuucugggagggcagcagggc

SEQ ID NO: 1332448 - RNA, 23 nt, Human
ucuucugggagggcagcagggcu

SEQ ID NO: 1332449 - RNA, 18 nt, Human
ucuucuggggcaggcugg

SEQ ID NO: 1332450 - RNA, 20 nt, Human
ucuucuggggcaggcugggc

SEQ ID NO: 1332451 - RNA, 21 nt, Human
ucuucuggggcaggcugggcc

SEQ ID NO: 1332452 - RNA, 15 nt, Human
agacauaaaggaaaa

SEQ ID NO: 1332453 - RNA, 16 nt, Human
agacauaaaggaaaag

SEQ ID NO: 1332454 - RNA, 21 nt, Human
agacauaaaggaaaagacaca

SEQ ID NO: 1332455 - RNA, 23 nt, Human
agacauaaaggaaaagacacauu

SEQ ID NO: 1332456 - RNA, 18 nt, Human
agacauaaccacugcuuc

SEQ ID NO: 1332457 - RNA, 21 nt, Human
agacauagaauuaacacauga

SEQ ID NO: 1332458 - RNA, 18 nt, Human
agacaucaacagauaaau

SEQ ID NO: 1332459 - RNA, 17 nt, Human
agacaucaacagauaaa

SEQ ID NO: 1332460 - RNA, 14 nt, Human
agacaucagcccuu

SEQ ID NO: 1332461 - RNA, 16 nt, Human
agacaucagcccuugg

SEQ ID NO: 1332462 - RNA, 20 nt, Human
agacauccaaacuaaaagga

SEQ ID NO: 1332463 - RNA, 24 nt, Human
agaccccuaacccuuugugugcuc

SEQ ID NO: 1332464 - RNA, 14 nt, Human
agacccccagcacu

SEQ ID NO: 1332465 - RNA, 19 nt, Human
agacaucugagguuuuauu

SEQ ID NO: 1332466 - RNA, 22 nt, Human
agacauuaacucauuagacugg

SEQ ID NO: 1332467 - RNA, 20 nt, Human
agacauuaacucauuagacu

SEQ ID NO: 1332468 - RNA, 15 nt, Human
agacauuggcaccua

SEQ ID NO: 1332469 - RNA, 14 nt, Human
agaaucacuugaac

SEQ ID NO: 1332470 - RNA, 13 nt, Human
agaaucagagaag

SEQ ID NO: 1332471 - RNA, 15 nt, Human
ucuucaacucccugc

SEQ ID NO: 1332472 - RNA, 23 nt, Human
agaaucagagaaggaacauaccc

SEQ ID NO: 1332473 - RNA, 16 nt, Human
ucuucaacugaccagc

SEQ ID NO: 1332474 - RNA, 19 nt, Human
ucuucaacugaccagccuc

SEQ ID NO: 1332475 - RNA, 16 nt, Human
ucuucaagaucccauu

SEQ ID NO: 1332476 - RNA, 14 nt, Human
ucuucaagaaaucu

SEQ ID NO: 1332477 - RNA, 14 nt, Human
ucuuccaugcugug

SEQ ID NO: 1332478 - RNA, 15 nt, Human
ucuuccaugcugugc

SEQ ID NO: 1332479 - RNA, 17 nt, Human
ucuuccaugcugugcgc

SEQ ID NO: 1332480 - RNA, 13 nt, Human
ucuuccauuugca

SEQ ID NO: 1332481 - RNA, 14 nt, Human
ucuuccauuugcaa

SEQ ID NO: 1332482 - RNA, 11 nt, Human
ucuuccucugc

SEQ ID NO: 1332483 - RNA, 12 nt, Human
ucuuccucugcu

SEQ ID NO: 1332484 - RNA, 14 nt, Human
ucuuccucugcuga

SEQ ID NO: 1332485 - RNA, 16 nt, Human
ucuuccucuuccccca

SEQ ID NO: 1332486 - RNA, 13 nt, Human
ucuuccugacacu

SEQ ID NO: 1332487 - RNA, 15 nt, Human
ucuuccugacacuuu

SEQ ID NO: 1332488 - RNA, 16 nt, Human
ucuuccugacacuuua

SEQ ID NO: 1332489 - RNA, 14 nt, Human
ucuuccugaguggu

SEQ ID NO: 1332490 - RNA, 18 nt, Human
ucuuccugaguggugcca

SEQ ID NO: 1332491 - RNA, 14 nt, Human
ucuucucuccagcu

SEQ ID NO: 1332492 - RNA, 18 nt, Human
ucuucucuccagcugacu

SEQ ID NO: 1332493 - RNA, 20 nt, Human
ucuucucucucaauuuuauc

SEQ ID NO: 1332494 - RNA, 13 nt, Human
ucuucucuguugu

SEQ ID NO: 1332495 - RNA, 16 nt, Human
ucuuccucagccagcc

SEQ ID NO: 1332496 - RNA, 17 nt, Human
ucuuccucagccagccu

SEQ ID NO: 1332497 - RNA, 18 nt, Human
ucuuccucagccagccuc

SEQ ID NO: 1332498 - RNA, 13 nt, Human
ucuuccccagacg

SEQ ID NO: 1332499 - RNA, 19 nt, Human
ucuuccccagacgccuggc

SEQ ID NO: 1332500 - RNA, 21 nt, Human
ucuuccccagacgccuggcug

SEQ ID NO: 1332501 - RNA, 14 nt, Human
ucuucccccaccac

SEQ ID NO: 1332502 - RNA, 14 nt, Human
ucuucccccucucc

SEQ ID NO: 1332503 - RNA, 16 nt, Human
ucuucccccucuccca

SEQ ID NO: 1332504 - RNA, 17 nt, Human
ucuucccccucucccag

SEQ ID NO: 1332505 - RNA, 18 nt, Human
ucuucccccucucccagu

SEQ ID NO: 1332506 - RNA, 21 nt, Human
ucuucccccucucccaguugu

SEQ ID NO: 1332507 - RNA, 22 nt, Human
ucuggauuccagagcacugcuc

SEQ ID NO: 1332508 - RNA, 20 nt, Human
ucuggauuccccaucucagg

SEQ ID NO: 1332509 - RNA, 15 nt, Human
ucuggcaacaucuuu

SEQ ID NO: 1332510 - RNA, 16 nt, Human
ucuggcaacaucuuua

SEQ ID NO: 1332511 - RNA, 12 nt, Human
ucuggcaaggac

SEQ ID NO: 1332512 - RNA, 18 nt, Human
ucuggcaaggacuuugua

SEQ ID NO: 1332513 - RNA, 23 nt, Human
ucuggcaaggacuuuguacauuu

SEQ ID NO: 1332514 - RNA, 14 nt, Human
ucuggcaaugccac

SEQ ID NO: 1332515 - RNA, 15 nt, Human
ucuggcaaugccaca

SEQ ID NO: 1332516 - RNA, 16 nt, Human
ucuggcaaugccacag

SEQ ID NO: 1332517 - RNA, 17 nt, Human
ucuggcaaugccacagc

SEQ ID NO: 1332518 - RNA, 20 nt, Human
ucuggcaaugccacagcccu

SEQ ID NO: 1332519 - RNA, 21 nt, Human
ucuggcaaugccacagcccug

SEQ ID NO: 1332520 - RNA, 23 nt, Human
ucuggcaaugccacagcccuguc

SEQ ID NO: 1332521 - RNA, 22 nt, Human
ucuggcaaugccacagcccugu

SEQ ID NO: 1332522 - RNA, 22 nt, Human
ucuggaagugacuuuggcugca

SEQ ID NO: 1332523 - RNA, 19 nt, Human
ucuggaagugacuuuggcu

SEQ ID NO: 1332524 - RNA, 18 nt, Human
ucuggaagugacuuuggc

SEQ ID NO: 1332525 - RNA, 13 nt, Human
ucuggaaguccaa

SEQ ID NO: 1332526 - RNA, 14 nt, Human
ucuggauuccagag

SEQ ID NO: 1332527 - RNA, 17 nt, Human
ucuggaagccccugggc

SEQ ID NO: 1332528 - RNA, 18 nt, Human
ucuggaaccucagccugg

SEQ ID NO: 1332529 - RNA, 19 nt, Human
ucuggaaccucagccuggc

SEQ ID NO: 1332530 - RNA, 20 nt, Human
ucuggaaccucagccuggcc

SEQ ID NO: 1332531 - RNA, 21 nt, Human
ucuggaaccucagccuggcca

SEQ ID NO: 1332532 - RNA, 23 nt, Human
ucuggaaccucagccuggccaga

SEQ ID NO: 1332533 - RNA, 15 nt, Human
ucuggaagaugggga

SEQ ID NO: 1332534 - RNA, 23 nt, Human
ucuggaagauggggaccagcagc

SEQ ID NO: 1332535 - RNA, 18 nt, Human
ucuggaagccccugggcc

SEQ ID NO: 1332536 - RNA, 20 nt, Human
ucugcuuugcucuucaagaa

SEQ ID NO: 1332537 - RNA, 17 nt, Human
ucuggaaccucagccug

SEQ ID NO: 1332538 - RNA, 12 nt, Human
ucugccugucuc

SEQ ID NO: 1332539 - RNA, 14 nt, Human
ucugccugucuccc

SEQ ID NO: 1332540 - RNA, 15 nt, Human
ucugccuuagucuca

SEQ ID NO: 1332541 - RNA, 19 nt, Human
ucugccuuagucucaguuu

SEQ ID NO: 1332542 - RNA, 23 nt, Human
ucuggcccuugcuuaccucucag

SEQ ID NO: 1332543 - RNA, 22 nt, Human
ucuggcacagccuggcuguggc

SEQ ID NO: 1332544 - RNA, 10 nt, Human
ucuggccuuc

SEQ ID NO: 1332545 - RNA, 15 nt, Human
ucuggccucugcuuu

SEQ ID NO: 1332546 - RNA, 13 nt, Human
ucuggccuggcca

SEQ ID NO: 1332547 - RNA, 19 nt, Human
ucuggccuggccagugccc

SEQ ID NO: 1332548 - RNA, 14 nt, Human
ucuggccuggccag

SEQ ID NO: 1332549 - RNA, 17 nt, Human
ucuggccuggccagugc

SEQ ID NO: 1332550 - RNA, 17 nt, Human
agaagccugaugcugac

SEQ ID NO: 1332551 - RNA, 21 nt, Human
agaagccugaugcugacauuc

SEQ ID NO: 1332552 - RNA, 13 nt, Human
agaaguugauaug

SEQ ID NO: 1332553 - RNA, 23 nt, Human
agaagugcaucuggagagaacag

SEQ ID NO: 1332554 - RNA, 16 nt, Human
agaaguuuagauuuua

SEQ ID NO: 1332555 - RNA, 15 nt, Human
agaaguuuagauuuu

SEQ ID NO: 1332556 - RNA, 13 nt, Human
agaaguuucuguc

SEQ ID NO: 1332557 - RNA, 21 nt, Human
agaaguuguaaaguauguauu

SEQ ID NO: 1332558 - RNA, 22 nt, Human
agaaguuggggacacauguauu

SEQ ID NO: 1332559 - RNA, 23 nt, Human
agaagcucccugaaguaagcaaa

SEQ ID NO: 1332560 - RNA, 13 nt, Human
agaagcuccccca

SEQ ID NO: 1332561 - RNA, 15 nt, Human
agaagcucccccagc

SEQ ID NO: 1332562 - RNA, 16 nt, Human
agaagcucccccagca

SEQ ID NO: 1332563 - RNA, 14 nt, Human
agaagcuccucucc

SEQ ID NO: 1332564 - RNA, 17 nt, Human
agaagcuccucucccca

SEQ ID NO: 1332565 - RNA, 18 nt, Human
agaagcuccucuccccag

SEQ ID NO: 1332566 - RNA, 20 nt, Human
agaagcuccucuccccagcc

SEQ ID NO: 1332567 - RNA, 22 nt, Human
agaagcuccucuccccagccca

SEQ ID NO: 1332568 - RNA, 23 nt, Human
agaagcuccucuccccagcccag

SEQ ID NO: 1332569 - RNA, 19 nt, Human
agaagcucugaagaacucu

SEQ ID NO: 1332570 - RNA, 11 nt, Human
agaaggcaaaa

SEQ ID NO: 1332571 - RNA, 16 nt, Human
agaaggcaaaaauagu

SEQ ID NO: 1332572 - RNA, 17 nt, Human
agaagugacauugcauc

SEQ ID NO: 1332573 - RNA, 16 nt, Human
agaagugacauugcau

SEQ ID NO: 1332574 - RNA, 13 nt, Human
agaaguuugcacu

SEQ ID NO: 1332575 - RNA, 16 nt, Human
agaaguuugcacuauc

SEQ ID NO: 1332576 - RNA, 21 nt, Human
agaaguuugcacuaucuuuca

SEQ ID NO: 1332577 - RNA, 23 nt, Human
agaaguuugcacuaucuuucagc

SEQ ID NO: 1332578 - RNA, 13 nt, Human
agaauaaaggcag

SEQ ID NO: 1332579 - RNA, 14 nt, Human
agaauaaaggcagu

SEQ ID NO: 1332580 - RNA, 15 nt, Human
agaauaaaggcaguu

SEQ ID NO: 1332581 - RNA, 18 nt, Human
agaauaaaggcaguuuuc

SEQ ID NO: 1332582 - RNA, 20 nt, Human
agaauaaaggcaguuuucua

SEQ ID NO: 1332583 - RNA, 21 nt, Human
agaauaaaggcaguuuucuaa

SEQ ID NO: 1332584 - RNA, 17 nt, Human
agaauaaucacgcuuuc

SEQ ID NO: 1332585 - RNA, 20 nt, Human
agaauaaucacgcuuuccug

SEQ ID NO: 1332586 - RNA, 21 nt, Human
agaauaaucacgcuuuccuga

SEQ ID NO: 1332587 - RNA, 15 nt, Human
agaauaaauugauuu

SEQ ID NO: 1332588 - RNA, 20 nt, Human
agaauagccacauuuggaau

SEQ ID NO: 1332589 - RNA, 21 nt, Human
agaauagccacauuuggaaua

SEQ ID NO: 1332590 - RNA, 14 nt, Human
agaaucaaacauuu

SEQ ID NO: 1332591 - RNA, 21 nt, Human
agaaucaacauuucucaauaa

SEQ ID NO: 1332592 - RNA, 23 nt, Human
agaaucaacauuucucaauaauu

SEQ ID NO: 1332593 - RNA, 12 nt, Human
agaaauuaugug

SEQ ID NO: 1332594 - RNA, 13 nt, Human
agaaccuggaacu

SEQ ID NO: 1332595 - RNA, 20 nt, Human
agaaccuggaacuuggggag

SEQ ID NO: 1332596 - RNA, 21 nt, Human
agaaccuggaacuuggggagu

SEQ ID NO: 1332597 - RNA, 12 nt, Human
agaaccuggccu

SEQ ID NO: 1332598 - RNA, 13 nt, Human
agaaccuggccuu

SEQ ID NO: 1332599 - RNA, 14 nt, Human
agaaccuggccuuc

SEQ ID NO: 1332600 - RNA, 22 nt, Human
agaaccuggccuucaguguacc

SEQ ID NO: 1332601 - RNA, 21 nt, Human
agaaccuggguugcagacagg

SEQ ID NO: 1332602 - RNA, 15 nt, Human
ucugcaguaaaucuu

SEQ ID NO: 1332603 - RNA, 18 nt, Human
agaaauuacacccaaaga

SEQ ID NO: 1332604 - RNA, 18 nt, Human
agaaauuaccuguggaua

SEQ ID NO: 1332605 - RNA, 19 nt, Human
agaaauuaccuguggauau

SEQ ID NO: 1332606 - RNA, 20 nt, Human
agaaauuaccuguggauauu

SEQ ID NO: 1332607 - RNA, 23 nt, Human
ucugcaggucccuaauaaagcug

SEQ ID NO: 1332608 - RNA, 22 nt, Human
ucugcaggucccuaauaaagcu

SEQ ID NO: 1332609 - RNA, 21 nt, Human
ucugcaggucccuaauaaagc

SEQ ID NO: 1332610 - RNA, 17 nt, Human
ucugaauaaagcaauua

SEQ ID NO: 1332611 - RNA, 17 nt, Human
ucugaauaaaguguaac

SEQ ID NO: 1332612 - RNA, 18 nt, Human
ucugaauaaaguguaaca

SEQ ID NO: 1332613 - RNA, 14 nt, Human
ucugaauaaagcaa

SEQ ID NO: 1332614 - RNA, 13 nt, Human
agaacggaagaag

SEQ ID NO: 1332615 - RNA, 18 nt, Human
agaacuaccaccugacau

SEQ ID NO: 1332616 - RNA, 12 nt, Human
agaacggaagaa

SEQ ID NO: 1332617 - RNA, 16 nt, Human
agaacgcugauuuaaa

SEQ ID NO: 1332618 - RNA, 17 nt, Human
agaacuagaauuugauu

SEQ ID NO: 1332619 - RNA, 17 nt, Human
agaacuagccaaaccag

SEQ ID NO: 1332620 - RNA, 21 nt, Human
agaacuagccaaaccaggacc

SEQ ID NO: 1332621 - RNA, 19 nt, Human
agaacuagccaaaccagga

SEQ ID NO: 1332622 - RNA, 19 nt, Human
agaacucaaauggggccag

SEQ ID NO: 1332623 - RNA, 12 nt, Human
agaaccuucucu

SEQ ID NO: 1332624 - RNA, 14 nt, Human
agaaccuucucuau

SEQ ID NO: 1332625 - RNA, 18 nt, Human
agaaccuucucuaugggg

SEQ ID NO: 1332626 - RNA, 17 nt, Human
agaacucccuuucaaca

SEQ ID NO: 1332627 - RNA, 20 nt, Human
agaacucaaauggggccaga

SEQ ID NO: 1332628 - RNA, 16 nt, Human
agaacucccuuucaac

SEQ ID NO: 1332629 - RNA, 12 nt, Human
agaacugcaggc

SEQ ID NO: 1332630 - RNA, 15 nt, Human
agaacugcaggcccu

SEQ ID NO: 1332631 - RNA, 16 nt, Human
agaacugcaggcccug

SEQ ID NO: 1332632 - RNA, 18 nt, Human
agaacugcaggcccuggc

SEQ ID NO: 1332633 - RNA, 20 nt, Human
agaacugcaggcccuggccu

SEQ ID NO: 1332634 - RNA, 12 nt, Human
agaagcccccag

SEQ ID NO: 1332635 - RNA, 14 nt, Human
agaagcccccagcu

SEQ ID NO: 1332636 - RNA, 17 nt, Human
agaagcccccagcuaag

SEQ ID NO: 1332637 - RNA, 23 nt, Human
agaagcccccagcuaagaaccug

SEQ ID NO: 1332638 - RNA, 24 nt, Human
agaagcccccagcuaagaaccugg

SEQ ID NO: 1332639 - RNA, 13 nt, Human
agaagcccggcuc

SEQ ID NO: 1332640 - RNA, 14 nt, Human
agaagcccggcucc

SEQ ID NO: 1332641 - RNA, 15 nt, Human
agaagcccggcuccu

SEQ ID NO: 1332642 - RNA, 16 nt, Human
agaagcccggcuccug

SEQ ID NO: 1332643 - RNA, 17 nt, Human
agaagcccggcuccugg

SEQ ID NO: 1332644 - RNA, 18 nt, Human
agaagcccggcuccuggu

SEQ ID NO: 1332645 - RNA, 20 nt, Human
ucugcccauccugccccuga

SEQ ID NO: 1332646 - RNA, 22 nt, Human
ucugcccaggcacugcuaggcu

SEQ ID NO: 1332647 - RNA, 13 nt, Human
ucugcccaggcac

SEQ ID NO: 1332648 - RNA, 20 nt, Human
agaagcccgugugagaagug

SEQ ID NO: 1332649 - RNA, 20 nt, Human
agaagcccggcuccugguca

SEQ ID NO: 1332650 - RNA, 14 nt, Human
ucugcccccugcag

SEQ ID NO: 1332651 - RNA, 16 nt, Human
ucugcccccugcagaa

SEQ ID NO: 1332652 - RNA, 22 nt, Human
ucugcccugcgggucacaggag

SEQ ID NO: 1332653 - RNA, 15 nt, Human
ucugcccccugcaga

SEQ ID NO: 1332654 - RNA, 13 nt, Human
agaagcaaguaaa

SEQ ID NO: 1332655 - RNA, 23 nt, Human
agaagcaaccucaguaauuuaga

SEQ ID NO: 1332656 - RNA, 21 nt, Human
agaagcaaccucaguaauuua

SEQ ID NO: 1332657 - RNA, 19 nt, Human
agaagcaccaaucaugaau

SEQ ID NO: 1332658 - RNA, 15 nt, Human
agaacuugacccuga

SEQ ID NO: 1332659 - RNA, 18 nt, Human
agaacuuggauguaccug

SEQ ID NO: 1332660 - RNA, 23 nt, Human
agaacuuggauguaccugccccc

SEQ ID NO: 1332661 - RNA, 15 nt, Human
agaacuuugagcuac

SEQ ID NO: 1332662 - RNA, 20 nt, Human
agaacuuugagcuacugccg

SEQ ID NO: 1332663 - RNA, 15 nt, Human
agaagcaguggccuu

SEQ ID NO: 1332664 - RNA, 13 nt, Human
agaagccagcuug

SEQ ID NO: 1332665 - RNA, 14 nt, Human
agaagccagcuugu

SEQ ID NO: 1332666 - RNA, 15 nt, Human
agaagccagcuuguu

SEQ ID NO: 1332667 - RNA, 19 nt, Human
agaagccagcuuguuuaca

SEQ ID NO: 1332668 - RNA, 20 nt, Human
agaagccagcuuguuuacau

SEQ ID NO: 1332669 - RNA, 21 nt, Human
agaagccagcuuguuuacaug

SEQ ID NO: 1332670 - RNA, 12 nt, Human
agaagccaggaa

SEQ ID NO: 1332671 - RNA, 13 nt, Human
agaagccaggaau

SEQ ID NO: 1332672 - RNA, 22 nt, Human
agaagccaggaauuucccagga

SEQ ID NO: 1332673 - RNA, 16 nt, Human
agaagccaucaccuca

SEQ ID NO: 1332674 - RNA, 18 nt, Human
agaagccaucaccucaga

SEQ ID NO: 1332675 - RNA, 20 nt, Human
agaagccaucaccucagaug

SEQ ID NO: 1332676 - RNA, 22 nt, Human
agaagccaucaccucagauggc

SEQ ID NO: 1332677 - RNA, 22 nt, Human
ucucucacuuguuuuauuuaac

SEQ ID NO: 1332678 - RNA, 15 nt, Human
ucucggcucacugca

SEQ ID NO: 1332679 - RNA, 18 nt, Human
ucucggccuucacaaucu

SEQ ID NO: 1332680 - RNA, 18 nt, Human
ucucuccagcugacuaaa

SEQ ID NO: 1332681 - RNA, 19 nt, Human
ucucuccagcugacuaaac

SEQ ID NO: 1332682 - RNA, 13 nt, Human
ucucuccagugca

SEQ ID NO: 1332683 - RNA, 17 nt, Human
ucucgaacuccugaccu

SEQ ID NO: 1332684 - RNA, 14 nt, Human
ucuccuucuuagcu

SEQ ID NO: 1332685 - RNA, 14 nt, Human
ucucgagcgcccug

SEQ ID NO: 1332686 - RNA, 16 nt, Human
ucucgagcgcccugca

SEQ ID NO: 1332687 - RNA, 17 nt, Human
ucucgagcgcccugcag

SEQ ID NO: 1332688 - RNA, 18 nt, Human
ucucgagcgcccugcaga

SEQ ID NO: 1332689 - RNA, 19 nt, Human
ucucgagcgcccugcagac

SEQ ID NO: 1332690 - RNA, 22 nt, Human
ucucgagcgcccugcagacccu

SEQ ID NO: 1332691 - RNA, 14 nt, Human
ucucgaugcaauga

SEQ ID NO: 1332692 - RNA, 17 nt, Human
ucucgaugcaaugaaca

SEQ ID NO: 1332693 - RNA, 13 nt, Human
ucucgaucuccug

SEQ ID NO: 1332694 - RNA, 20 nt, Human
ucucgcuauugucaccaggg

SEQ ID NO: 1332695 - RNA, 16 nt, Human
ucucgcauaggaccuu

SEQ ID NO: 1332696 - RNA, 23 nt, Human
ucucgcauaggaccuuuccacca

SEQ ID NO: 1332697 - RNA, 14 nt, Human
ucucgcacaccucu

SEQ ID NO: 1332698 - RNA, 18 nt, Human
acuuugugcauucuggau

SEQ ID NO: 1332699 - RNA, 20 nt, Human
acuuugucgcccaggcugga

SEQ ID NO: 1332700 - RNA, 14 nt, Human
acuuugugaauaga

SEQ ID NO: 1332701 - RNA, 19 nt, Human
agaaaaaaaaauucacaug

SEQ ID NO: 1332702 - RNA, 14 nt, Human
agaaaaaaauguau

SEQ ID NO: 1332703 - RNA, 13 nt, Human
ucuccuucuuagc

SEQ ID NO: 1332704 - RNA, 16 nt, Human
agaaaaaaauguauuu

SEQ ID NO: 1332705 - RNA, 18 nt, Human
agaaaaaaauguauuuua

SEQ ID NO: 1332706 - RNA, 23 nt, Human
agaaaaaaauguauuuuauguua

SEQ ID NO: 1332707 - RNA, 22 nt, Human
agaaaaaaauguauuuuauguu

SEQ ID NO: 1332708 - RNA, 18 nt, Human
agaaaaaaauugaaaugu

SEQ ID NO: 1332709 - RNA, 14 nt, Human
agaaaaaaauugaa

SEQ ID NO: 1332710 - RNA, 16 nt, Human
agaaaaaaauugaaau

SEQ ID NO: 1332711 - RNA, 17 nt, Human
agaaaaaaauugaaaug

SEQ ID NO: 1332712 - RNA, 13 nt, Human
acuuuagggaagu

SEQ ID NO: 1332713 - RNA, 13 nt, Human
acuuucuuucuca

SEQ ID NO: 1332714 - RNA, 22 nt, Human
acuuucuuucucacuaaaucuu

SEQ ID NO: 1332715 - RNA, 15 nt, Human
acuuucuuuucugga

SEQ ID NO: 1332716 - RNA, 19 nt, Human
acuuucuuuucuggaaugu

SEQ ID NO: 1332717 - RNA, 16 nt, Human
acuuucuuucucacua

SEQ ID NO: 1332718 - RNA, 18 nt, Human
acuuucuuuuuguagcug

SEQ ID NO: 1332719 - RNA, 23 nt, Human
acuuucuuuuuguagcuggggcu

SEQ ID NO: 1332720 - RNA, 17 nt, Human
acuuucuuuuuugauau

SEQ ID NO: 1332721 - RNA, 23 nt, Human
acuuucuuuuuugauauagaagu

SEQ ID NO: 1332722 - RNA, 22 nt, Human
acuuucuuuuuuuucuauuuca

SEQ ID NO: 1332723 - RNA, 23 nt, Human
acuuucuuuuuuuucuauuucac

SEQ ID NO: 1332724 - RNA, 18 nt, Human
acuuugaaaggagauguc

SEQ ID NO: 1332725 - RNA, 17 nt, Human
acuuuagaauaugccuu

SEQ ID NO: 1332726 - RNA, 15 nt, Human
acuuuagaagccugc

SEQ ID NO: 1332727 - RNA, 16 nt, Human
acuuuagaagccugca

SEQ ID NO: 1332728 - RNA, 22 nt, Human
acuuguuuuauuuaaccucuaa

SEQ ID NO: 1332729 - RNA, 16 nt, Human
acuuguuuucugggaa

SEQ ID NO: 1332730 - RNA, 21 nt, Human
acuugugcccucccuguccuu

SEQ ID NO: 1332731 - RNA, 20 nt, Human
acuugugcccucccuguccu

SEQ ID NO: 1332732 - RNA, 16 nt, Human
acuuguuuuggaugcc

SEQ ID NO: 1332733 - RNA, 13 nt, Human
acuuguuuuggau

SEQ ID NO: 1332734 - RNA, 12 nt, Human
acuugucuguuu

SEQ ID NO: 1332735 - RNA, 13 nt, Human
acuugucuguuuu

SEQ ID NO: 1332736 - RNA, 20 nt, Human
acuuugcuugcuuugaagua

SEQ ID NO: 1332737 - RNA, 15 nt, Human
acuuugcuuuaauau

SEQ ID NO: 1332738 - RNA, 16 nt, Human
acuuugcuuuaauaua

SEQ ID NO: 1332739 - RNA, 17 nt, Human
acuuugcuuuaauauaa

SEQ ID NO: 1332740 - RNA, 18 nt, Human
acuuugcuuuaauauaaa

SEQ ID NO: 1332741 - RNA, 19 nt, Human
acuuugcuuuaauauaaau

SEQ ID NO: 1332742 - RNA, 21 nt, Human
acuuugcuuuaauauaaaugc

SEQ ID NO: 1332743 - RNA, 22 nt, Human
acuuugcuuuaauauaaaugca

SEQ ID NO: 1332744 - RNA, 19 nt, Human
acuuuguauaaaagggacu

SEQ ID NO: 1332745 - RNA, 20 nt, Human
acuuugaaaggagaugucuu

SEQ ID NO: 1332746 - RNA, 14 nt, Human
acuuugaaguuagc

SEQ ID NO: 1332747 - RNA, 17 nt, Human
acuuugcacugauauau

SEQ ID NO: 1332748 - RNA, 18 nt, Human
acuuugcacugauauauc

SEQ ID NO: 1332749 - RNA, 19 nt, Human
acuuugcacugauauauca

SEQ ID NO: 1332750 - RNA, 21 nt, Human
acuuugcacugauauaucaug

SEQ ID NO: 1332751 - RNA, 22 nt, Human
acuuugcagcacagcugagagg

SEQ ID NO: 1332752 - RNA, 23 nt, Human
acuuugcagccggcacagggucu

SEQ ID NO: 1332753 - RNA, 16 nt, Human
acuuugcaucucagua

SEQ ID NO: 1332754 - RNA, 17 nt, Human
acuuugcuaaagacaug

SEQ ID NO: 1332755 - RNA, 20 nt, Human
acuuugcuaaagacaugaag

SEQ ID NO: 1332756 - RNA, 21 nt, Human
acuuugcuaaagacaugaagc

SEQ ID NO: 1332757 - RNA, 11 nt, Human
acuuugcuugc

SEQ ID NO: 1332758 - RNA, 13 nt, Human
acuuugcuugcuu

SEQ ID NO: 1332759 - RNA, 14 nt, Human
acuuugcuugcuuu

SEQ ID NO: 1332760 - RNA, 15 nt, Human
acuuugcuugcuuug

SEQ ID NO: 1332761 - RNA, 12 nt, Human
agaaaugaaaaa

SEQ ID NO: 1332762 - RNA, 22 nt, Human
agaaaucuauagaacugaauga

SEQ ID NO: 1332763 - RNA, 13 nt, Human
agaaaugaaaaaa

SEQ ID NO: 1332764 - RNA, 16 nt, Human
agaaaugaaaaaauau

SEQ ID NO: 1332765 - RNA, 13 nt, Human
agaaaucuauuuc

SEQ ID NO: 1332766 - RNA, 23 nt, Human
agaaauacuacuguguaagggcc

SEQ ID NO: 1332767 - RNA, 16 nt, Human
agaaauagaauuauaa

SEQ ID NO: 1332768 - RNA, 13 nt, Human
agaaauagaacaa

SEQ ID NO: 1332769 - RNA, 19 nt, Human
agaaauagcuuaugaaaag

SEQ ID NO: 1332770 - RNA, 15 nt, Human
agaaauagucgguga

SEQ ID NO: 1332771 - RNA, 20 nt, Human
agaaauagcuuaugaaaaga

SEQ ID NO: 1332772 - RNA, 20 nt, Human
ucugaaggguaauuauauag

SEQ ID NO: 1332773 - RNA, 20 nt, Human
ucugaaggagccccauuccu

SEQ ID NO: 1332774 - RNA, 21 nt, Human
ucugaaggagccccauuccug

SEQ ID NO: 1332775 - RNA, 17 nt, Human
agaaaucuggcuucugg

SEQ ID NO: 1332776 - RNA, 15 nt, Human
agaaaugcuuagaaa

SEQ ID NO: 1332777 - RNA, 22 nt, Human
agaaagcaucccucacccaucc

SEQ ID NO: 1332778 - RNA, 19 nt, Human
agaaagcaucccucaccca

SEQ ID NO: 1332779 - RNA, 17 nt, Human
agaaagcaucccucacc

SEQ ID NO: 1332780 - RNA, 23 nt, Human
agaaauacaaaaauacucagaua

SEQ ID NO: 1332781 - RNA, 14 nt, Human
agaaauacaaaaau

SEQ ID NO: 1332782 - RNA, 20 nt, Human
agaaagcagaacagugauua

SEQ ID NO: 1332783 - RNA, 14 nt, Human
agaaagcagagauu

SEQ ID NO: 1332784 - RNA, 18 nt, Human
agaaagcagaacagugau

SEQ ID NO: 1332785 - RNA, 17 nt, Human
agaaagcagaacaguga

SEQ ID NO: 1332786 - RNA, 20 nt, Human
agaaagaggugaccccaggg

SEQ ID NO: 1332787 - RNA, 21 nt, Human
agaaagaggugaccccagggc

SEQ ID NO: 1332788 - RNA, 23 nt, Human
agaaagaggugaccccagggcac

SEQ ID NO: 1332789 - RNA, 22 nt, Human
agaaagaggugaccccagggca

SEQ ID NO: 1332790 - RNA, 23 nt, Human
agaaacuuaaauguuauuaucug

SEQ ID NO: 1332791 - RNA, 22 nt, Human
agaaagaggcaccaggaagccg

SEQ ID NO: 1332792 - RNA, 19 nt, Human
agaaagaggugaccccagg

SEQ ID NO: 1332793 - RNA, 12 nt, Human
agaaagacuugg

SEQ ID NO: 1332794 - RNA, 22 nt, Human
agaaagacuugguugguagggu

SEQ ID NO: 1332795 - RNA, 17 nt, Human
agaaagagaaacaguug

SEQ ID NO: 1332796 - RNA, 16 nt, Human
agaaaacaaggaugaa

SEQ ID NO: 1332797 - RNA, 12 nt, Human
agaaaagaugca

SEQ ID NO: 1332798 - RNA, 13 nt, Human
agaaaagaugcac

SEQ ID NO: 1332799 - RNA, 15 nt, Human
agaaaagaugcacuu

SEQ ID NO: 1332800 - RNA, 19 nt, Human
agaaaagaugcacuuugcu

SEQ ID NO: 1332801 - RNA, 16 nt, Human
agaaaagaugcacuuu

SEQ ID NO: 1332802 - RNA, 16 nt, Human
agaaacacaacuauau

SEQ ID NO: 1332803 - RNA, 17 nt, Human
agaaaagcuaagagaag

SEQ ID NO: 1332804 - RNA, 13 nt, Human
agaaaagcuauaa

SEQ ID NO: 1332805 - RNA, 21 nt, Human
agaaaagcuauaaaaugaaua

SEQ ID NO: 1332806 - RNA, 14 nt, Human
agaaaagcuuugaa

SEQ ID NO: 1332807 - RNA, 20 nt, Human
agaaacaacucuuugagaaa

SEQ ID NO: 1332808 - RNA, 18 nt, Human
agaaacaagguuuucagu

SEQ ID NO: 1332809 - RNA, 17 nt, Human
agaaacacccucacacu

SEQ ID NO: 1332810 - RNA, 21 nt, Human
agaaacaguugguaacuuuug

SEQ ID NO: 1332811 - RNA, 22 nt, Human
agaaacaguugguaacuuuugu

SEQ ID NO: 1332812 - RNA, 12 nt, Human
agaaacauuuau

SEQ ID NO: 1332813 - RNA, 15 nt, Human
agaaacauuuauauu

SEQ ID NO: 1332814 - RNA, 19 nt, Human
agaaacauuuauauugaua

SEQ ID NO: 1332815 - RNA, 21 nt, Human
agaaacuuaaauuuuaguucu

SEQ ID NO: 1332816 - RNA, 18 nt, Human
agaaacuuaaauguuauu

SEQ ID NO: 1332817 - RNA, 20 nt, Human
agaaacuuaaauguuauuau

SEQ ID NO: 1332818 - RNA, 17 nt, Human
agaaacuuaaauguuau

SEQ ID NO: 1332819 - RNA, 15 nt, Human
agaaacauuugguaa

SEQ ID NO: 1332820 - RNA, 21 nt, Human
ucucugcaggucccuaauaaa

SEQ ID NO: 1332821 - RNA, 20 nt, Human
ucucugcaggucccuaauaa

SEQ ID NO: 1332822 - RNA, 19 nt, Human
ucucugcaggucccuaaua

SEQ ID NO: 1332823 - RNA, 22 nt, Human
ucucugcaggucccuaauaaag

SEQ ID NO: 1332824 - RNA, 18 nt, Human
ucucuuguaauuuggauc

SEQ ID NO: 1332825 - RNA, 23 nt, Human
agaaaaacaaacucguuuuuuac

SEQ ID NO: 1332826 - RNA, 22 nt, Human
ucucuuguauaagauccuagau

SEQ ID NO: 1332827 - RNA, 13 nt, Human
agaaaaacaggca

SEQ ID NO: 1332828 - RNA, 15 nt, Human
agaaaaacaggcacu

SEQ ID NO: 1332829 - RNA, 14 nt, Human
agaaaaacaggcac

SEQ ID NO: 1332830 - RNA, 19 nt, Human
agaaaaauguguauuuuaa

SEQ ID NO: 1332831 - RNA, 21 nt, Human
agaaaacaaaacugcauuuca

SEQ ID NO: 1332832 - RNA, 13 nt, Human
agaaaacaaaacu

SEQ ID NO: 1332833 - RNA, 20 nt, Human
acuuccagauccuggaaauc

SEQ ID NO: 1332834 - RNA, 20 nt, Human
acuuccagguguuacuguaa

SEQ ID NO: 1332835 - RNA, 21 nt, Human
acuuccagguguuacuguaau

SEQ ID NO: 1332836 - RNA, 17 nt, Human
acuuccauaaucuggac

SEQ ID NO: 1332837 - RNA, 19 nt, Human
acuuccaaacuaauuuuua

SEQ ID NO: 1332838 - RNA, 19 nt, Human
acuuccaaauccccuaagc

SEQ ID NO: 1332839 - RNA, 21 nt, Human
acuuccaaauccccuaagcag

SEQ ID NO: 1332840 - RNA, 16 nt, Human
acuuccacaggguccc

SEQ ID NO: 1332841 - RNA, 20 nt, Human
acuuccacagggucccacag

SEQ ID NO: 1332842 - RNA, 21 nt, Human
acuuccacagggucccacagc

SEQ ID NO: 1332843 - RNA, 17 nt, Human
acuucaggcucuucucc

SEQ ID NO: 1332844 - RNA, 18 nt, Human
acuucaggcucuucuccu

SEQ ID NO: 1332845 - RNA, 20 nt, Human
acuucaggcucuucuccuuu

SEQ ID NO: 1332846 - RNA, 16 nt, Human
acuuaucugaucagaa

SEQ ID NO: 1332847 - RNA, 13 nt, Human
acuucauuucaga

SEQ ID NO: 1332848 - RNA, 14 nt, Human
acuuccaaacuaau

SEQ ID NO: 1332849 - RNA, 16 nt, Human
acuuccaaacuaauuu

SEQ ID NO: 1332850 - RNA, 17 nt, Human
acuuccaaacuaauuuu

SEQ ID NO: 1332851 - RNA, 18 nt, Human
acuuccaaacuaauuuuu

SEQ ID NO: 1332852 - RNA, 16 nt, Human
acuuacucuaagaucu

SEQ ID NO: 1332853 - RNA, 18 nt, Human
acuuacugcgacuaaacu

SEQ ID NO: 1332854 - RNA, 15 nt, Human
acuuagauuuuacau

SEQ ID NO: 1332855 - RNA, 16 nt, Human
acuuagauuuuacaug

SEQ ID NO: 1332856 - RNA, 17 nt, Human
acuuagauuuuacauga

SEQ ID NO: 1332857 - RNA, 18 nt, Human
acuuagauuuuacaugaa

SEQ ID NO: 1332858 - RNA, 19 nt, Human
acuuagauuuuacaugaag

SEQ ID NO: 1332859 - RNA, 20 nt, Human
acuuagauuuuacaugaagu

SEQ ID NO: 1332860 - RNA, 21 nt, Human
acuuagcauuuucugcaucuc

SEQ ID NO: 1332861 - RNA, 16 nt, Human
acuuagcuaguuuuau

SEQ ID NO: 1332862 - RNA, 22 nt, Human
acuuagcauuuucugcaucucc

SEQ ID NO: 1332863 - RNA, 20 nt, Human
acuuagcauuuucugcaucu

SEQ ID NO: 1332864 - RNA, 24 nt, Human
acuuagauuuuacaugaaguauuu

SEQ ID NO: 1332865 - RNA, 21 nt, Human
acuuagauuuuacaugaagua

SEQ ID NO: 1332866 - RNA, 19 nt, Human
ucuaccucaggcagcucaa

SEQ ID NO: 1332867 - RNA, 21 nt, Human
ucuaccuggucucuccuuguu

SEQ ID NO: 1332868 - RNA, 13 nt, Human
acuuacucuaaga

SEQ ID NO: 1332869 - RNA, 14 nt, Human
acuuacucuaagau

SEQ ID NO: 1332870 - RNA, 13 nt, Human
ucuauaauuuaaa

SEQ ID NO: 1332871 - RNA, 20 nt, Human
ucuaguuuuuucuuccuuuu

SEQ ID NO: 1332872 - RNA, 22 nt, Human
ucuaguuuuuucuuccuuuuca

SEQ ID NO: 1332873 - RNA, 22 nt, Human
ucuaguuuuuuacuuuuguuua

SEQ ID NO: 1332874 - RNA, 13 nt, Human
ucuauaaaccgaa

SEQ ID NO: 1332875 - RNA, 12 nt, Human
ucuauaauuuac

SEQ ID NO: 1332876 - RNA, 16 nt, Human
ucuauaauuuaccuaa

SEQ ID NO: 1332877 - RNA, 17 nt, Human
ucuauagccaaaaauag

SEQ ID NO: 1332878 - RNA, 20 nt, Human
ucuauagccaaaaauagcua

SEQ ID NO: 1332879 - RNA, 19 nt, Human
ucuaguguaucaaaaugcu

SEQ ID NO: 1332880 - RNA, 22 nt, Human
ucuaguguaucaaaaugcucuu

SEQ ID NO: 1332881 - RNA, 22 nt, Human
ucuaggaaauauacuuuuacaa

SEQ ID NO: 1332882 - RNA, 16 nt, Human
ucuaguguaucaaaau

SEQ ID NO: 1332883 - RNA, 14 nt, Human
ucuaguguaucaaa

SEQ ID NO: 1332884 - RNA, 13 nt, Human
ucuaguguaucaa

SEQ ID NO: 1332885 - RNA, 12 nt, Human
ucuaguguauca

SEQ ID NO: 1332886 - RNA, 14 nt, Human
ucuagcuuaucuac

SEQ ID NO: 1332887 - RNA, 15 nt, Human
ucuaggaaauauacu

SEQ ID NO: 1332888 - RNA, 14 nt, Human
ucuaguucugccag

SEQ ID NO: 1332889 - RNA, 14 nt, Human
ucuaguucauugaa

SEQ ID NO: 1332890 - RNA, 17 nt, Human
ucuaguuccccuguuua

SEQ ID NO: 1332891 - RNA, 21 nt, Human
ucuaguuccccuguuuauuca

SEQ ID NO: 1332892 - RNA, 20 nt, Human
acuuccccauggcccugagc

SEQ ID NO: 1332893 - RNA, 23 nt, Human
acuucccagcuaggaagagcagg

SEQ ID NO: 1332894 - RNA, 15 nt, Human
ucuagauaucgacuu

SEQ ID NO: 1332895 - RNA, 16 nt, Human
ucuagaucagaugcuc

SEQ ID NO: 1332896 - RNA, 18 nt, Human
ucuagaucagaugcucca

SEQ ID NO: 1332897 - RNA, 20 nt, Human
ucuagaucagaugcuccaag

SEQ ID NO: 1332898 - RNA, 21 nt, Human
ucuagaucagaugcuccaaga

SEQ ID NO: 1332899 - RNA, 22 nt, Human
ucuagaucagaugcuccaagau

SEQ ID NO: 1332900 - RNA, 14 nt, Human
ucuagaucauaagg

SEQ ID NO: 1332901 - RNA, 19 nt, Human
ucuagaugaaguuuuacau

SEQ ID NO: 1332902 - RNA, 20 nt, Human
ucuagaugaaguuuuacauu

SEQ ID NO: 1332903 - RNA, 21 nt, Human
ucuagaugaaguuuuacauug

SEQ ID NO: 1332904 - RNA, 22 nt, Human
ucuagaugaaguuuuacauugu

SEQ ID NO: 1332905 - RNA, 23 nt, Human
ucuagaugaaguuuuacauuguu

SEQ ID NO: 1332906 - RNA, 22 nt, Human
ucuagaugauuaaauaagauuc

SEQ ID NO: 1332907 - RNA, 21 nt, Human
ucuagauguuuauucuucuag

SEQ ID NO: 1332908 - RNA, 23 nt, Human
ucuagauguuuauucuucuagag

SEQ ID NO: 1332909 - RNA, 22 nt, Human
ucuagauguuuauucuucuaga

SEQ ID NO: 1332910 - RNA, 13 nt, Human
ucuagauucaaag

SEQ ID NO: 1332911 - RNA, 17 nt, Human
ucuagauucaaagguuc

SEQ ID NO: 1332912 - RNA, 18 nt, Human
ucuagauucaaagguucu

SEQ ID NO: 1332913 - RNA, 19 nt, Human
ucuagauucaaagguucua

SEQ ID NO: 1332914 - RNA, 20 nt, Human
ucuagauucaaagguucuag

SEQ ID NO: 1332915 - RNA, 22 nt, Human
ucuagauucaaagguucuaggu

SEQ ID NO: 1332916 - RNA, 23 nt, Human
ucuagauucaaagguucuagguu

SEQ ID NO: 1332917 - RNA, 19 nt, Human
ucuagauuccauuggucca

SEQ ID NO: 1332918 - RNA, 21 nt, Human
ucuagauuccauugguccaag

SEQ ID NO: 1332919 - RNA, 22 nt, Human
ucuagauuccauugguccaaga

SEQ ID NO: 1332920 - RNA, 23 nt, Human
ucuagauuccauugguccaagau

SEQ ID NO: 1332921 - RNA, 11 nt, Human
ucuagauucuc

SEQ ID NO: 1332922 - RNA, 14 nt, Human
ucuagauucucugg

SEQ ID NO: 1332923 - RNA, 15 nt, Human
ucuagauugagagaa

SEQ ID NO: 1332924 - RNA, 21 nt, Human
ucuagauucucuggcuguaag

SEQ ID NO: 1332925 - RNA, 13 nt, Human
ucuagccuggcua

SEQ ID NO: 1332926 - RNA, 23 nt, Human
ucuagcgcaguuuuuuuuuucuu

SEQ ID NO: 1332927 - RNA, 18 nt, Human
acuugaaaauuaacauga

SEQ ID NO: 1332928 - RNA, 15 nt, Human
acuucugacagccuc

SEQ ID NO: 1332929 - RNA, 16 nt, Human
acuucugacagccuca

SEQ ID NO: 1332930 - RNA, 12 nt, Human
acuugaaagaaa

SEQ ID NO: 1332931 - RNA, 17 nt, Human
acuugaaaauuaacaug

SEQ ID NO: 1332932 - RNA, 21 nt, Human
acuucucuuguuagguaauuu

SEQ ID NO: 1332933 - RNA, 14 nt, Human
acuucucuuugccu

SEQ ID NO: 1332934 - RNA, 15 nt, Human
acuucucuuugccuc

SEQ ID NO: 1332935 - RNA, 16 nt, Human
acuucucuuugccuca

SEQ ID NO: 1332936 - RNA, 17 nt, Human
acuucucuuugccucaa

SEQ ID NO: 1332937 - RNA, 21 nt, Human
acuucucuuugccucaaauaa

SEQ ID NO: 1332938 - RNA, 14 nt, Human
acuucugacagccu

SEQ ID NO: 1332939 - RNA, 20 nt, Human
acuugaaauauccugcuuga

SEQ ID NO: 1332940 - RNA, 23 nt, Human
acuugaacccgggaggcagaggu

SEQ ID NO: 1332941 - RNA, 17 nt, Human
acuugaacguuuucuaa

SEQ ID NO: 1332942 - RNA, 18 nt, Human
acuugaacguuuucuaau

SEQ ID NO: 1332943 - RNA, 19 nt, Human
acuugaacguuuucuaauu

SEQ ID NO: 1332944 - RNA, 20 nt, Human
acuugaacguuuucuaauug

SEQ ID NO: 1332945 - RNA, 21 nt, Human
acuugaacguuuucuaauugc

SEQ ID NO: 1332946 - RNA, 22 nt, Human
acuugaacguuuucuaauugcu

SEQ ID NO: 1332947 - RNA, 19 nt, Human
acuugaggacacaugucca

SEQ ID NO: 1332948 - RNA, 18 nt, Human
acuugaggacacaugucc

SEQ ID NO: 1332949 - RNA, 17 nt, Human
acuugaggacacauguc

SEQ ID NO: 1332950 - RNA, 21 nt, Human
acuugaacugauucacaucuc

SEQ ID NO: 1332951 - RNA, 13 nt, Human
acuugaacugauu

SEQ ID NO: 1332952 - RNA, 14 nt, Human
acuugaagggccag

SEQ ID NO: 1332953 - RNA, 12 nt, Human
acuugacagugg

SEQ ID NO: 1332954 - RNA, 14 nt, Human
acuugacaguggaa

SEQ ID NO: 1332955 - RNA, 13 nt, Human
acuugacagugga

SEQ ID NO: 1332956 - RNA, 14 nt, Human
acuugacccugagc

SEQ ID NO: 1332957 - RNA, 15 nt, Human
acuugacccugagcu

SEQ ID NO: 1332958 - RNA, 18 nt, Human
acuugacccugagcugac

SEQ ID NO: 1332959 - RNA, 14 nt, Human
acuuguauuaugug

SEQ ID NO: 1332960 - RNA, 13 nt, Human
acuuguauuaugu

SEQ ID NO: 1332961 - RNA, 14 nt, Human
acuuguaugaaaga

SEQ ID NO: 1332962 - RNA, 20 nt, Human
acuuguauauuuuaagaaau

SEQ ID NO: 1332963 - RNA, 14 nt, Human
acuuguauauuuua

SEQ ID NO: 1332964 - RNA, 15 nt, Human
acuuguauuaugugu

SEQ ID NO: 1332965 - RNA, 17 nt, Human
acuuguccuagcacaga

SEQ ID NO: 1332966 - RNA, 18 nt, Human
acuuguccuagcacagau

SEQ ID NO: 1332967 - RNA, 21 nt, Human
acuuguccuuagccuggaccu

SEQ ID NO: 1332968 - RNA, 20 nt, Human
acuuguccuuagccuggacc

SEQ ID NO: 1332969 - RNA, 16 nt, Human
acuugucuauuaccug

SEQ ID NO: 1332970 - RNA, 12 nt, Human
acuugccucuuc

SEQ ID NO: 1332971 - RNA, 13 nt, Human
acuugccucuucc

SEQ ID NO: 1332972 - RNA, 23 nt, Human
acuuggaacugaagggggcggcc

SEQ ID NO: 1332973 - RNA, 13 nt, Human
acuugccucugca

SEQ ID NO: 1332974 - RNA, 14 nt, Human
acuugccaaauuua

SEQ ID NO: 1332975 - RNA, 19 nt, Human
acuugccaaauuuagauuu

SEQ ID NO: 1332976 - RNA, 20 nt, Human
ucuauuuuuugaaaagcaga

SEQ ID NO: 1332977 - RNA, 22 nt, Human
ucuauuuuuggagguuuauuac

SEQ ID NO: 1332978 - RNA, 21 nt, Human
ucuauuuuuggagguuuauua

SEQ ID NO: 1332979 - RNA, 17 nt, Human
ucucacauauacaagua

SEQ ID NO: 1332980 - RNA, 19 nt, Human
ucucacaugauuccagcca

SEQ ID NO: 1332981 - RNA, 22 nt, Human
ucucacaugauuccagccauca

SEQ ID NO: 1332982 - RNA, 13 nt, Human
ucucacuccuacc

SEQ ID NO: 1332983 - RNA, 18 nt, Human
ucucaccaggcagccucu

SEQ ID NO: 1332984 - RNA, 19 nt, Human
ucucaccaggcagccucug

SEQ ID NO: 1332985 - RNA, 22 nt, Human
ucucaccaggcagccucugggg

SEQ ID NO: 1332986 - RNA, 21 nt, Human
ucucaccaggcagccucuggg

SEQ ID NO: 1332987 - RNA, 20 nt, Human
ucucacaugauuccagccau

SEQ ID NO: 1332988 - RNA, 13 nt, Human
ucucaccaggcag

SEQ ID NO: 1332989 - RNA, 14 nt, Human
ucucaccaggcagc

SEQ ID NO: 1332990 - RNA, 16 nt, Human
ucucaccaggcagccu

SEQ ID NO: 1332991 - RNA, 17 nt, Human
ucucaccaggcagccuc

SEQ ID NO: 1332992 - RNA, 22 nt, Human
ucuauuguuguacacagaaaua

SEQ ID NO: 1332993 - RNA, 23 nt, Human
ucuauuguuguacacagaaauac

SEQ ID NO: 1332994 - RNA, 15 nt, Human
ucuauuuuuaucuga

SEQ ID NO: 1332995 - RNA, 15 nt, Human
ucuauuuuuggaggu

SEQ ID NO: 1332996 - RNA, 18 nt, Human
ucuauuuuuggagguuua

SEQ ID NO: 1332997 - RNA, 19 nt, Human
ucuauuuuuggagguuuau

SEQ ID NO: 1332998 - RNA, 15 nt, Human
ucuauaguucuagac

SEQ ID NO: 1332999 - RNA, 19 nt, Human
ucuauagccaaaaauagcu

SEQ ID NO: 1333000 - RNA, 12 nt, Human
ucuauaguucua

SEQ ID NO: 1333001 - RNA, 14 nt, Human
ucuauaguucuaga

SEQ ID NO: 1333002 - RNA, 12 nt, Human
ucuauuggucuc

SEQ ID NO: 1333003 - RNA, 18 nt, Human
acuuccucucgcggcccu

SEQ ID NO: 1333004 - RNA, 16 nt, Human
ucucacuccuaccugg

SEQ ID NO: 1333005 - RNA, 17 nt, Human
ucucacuccuaccuggu

SEQ ID NO: 1333006 - RNA, 18 nt, Human
ucucacuccuaccuggua

SEQ ID NO: 1333007 - RNA, 20 nt, Human
acuuccuaaauauuaugaga

SEQ ID NO: 1333008 - RNA, 15 nt, Human
acuuccuccucccca

SEQ ID NO: 1333009 - RNA, 17 nt, Human
acuuccuccuccccacu

SEQ ID NO: 1333010 - RNA, 18 nt, Human
acuuccuccuccccacuu

SEQ ID NO: 1333011 - RNA, 22 nt, Human
acuuccucucgcggcccucagu

SEQ ID NO: 1333012 - RNA, 19 nt, Human
acuucuaagacuuuacuua

SEQ ID NO: 1333013 - RNA, 12 nt, Human
ucgccucagccu

SEQ ID NO: 1333014 - RNA, 11 nt, Human
ucgccugacaa

SEQ ID NO: 1333015 - RNA, 20 nt, Human
ucgccugacaaccacugguc

SEQ ID NO: 1333016 - RNA, 21 nt, Human
ucgccugacaaccacuggucu

SEQ ID NO: 1333017 - RNA, 22 nt, Human
ucgccugacaaccacuggucug

SEQ ID NO: 1333018 - RNA, 16 nt, Human
ucgccuguaaucucac

SEQ ID NO: 1333019 - RNA, 12 nt, Human
ucgccuguaauc

SEQ ID NO: 1333020 - RNA, 14 nt, Human
ucgcucucaguucu

SEQ ID NO: 1333021 - RNA, 17 nt, Human
ucgccggaucugaggga

SEQ ID NO: 1333022 - RNA, 16 nt, Human
ucgccggaucugaggg

SEQ ID NO: 1333023 - RNA, 16 nt, Human
ucgcccuuugcugcau

SEQ ID NO: 1333024 - RNA, 18 nt, Human
ucgcccuggacugugugc

SEQ ID NO: 1333025 - RNA, 22 nt, Human
acugaagaagcaccaaucauga

SEQ ID NO: 1333026 - RNA, 12 nt, Human
acugaagaguaa

SEQ ID NO: 1333027 - RNA, 19 nt, Human
acugaacaccauugaaggc

SEQ ID NO: 1333028 - RNA, 13 nt, Human
acugaagcagccu

SEQ ID NO: 1333029 - RNA, 14 nt, Human
acugaagcagccuc

SEQ ID NO: 1333030 - RNA, 21 nt, Human
acugaagcagccucuccccag

SEQ ID NO: 1333031 - RNA, 19 nt, Human
ucgcccaugcuggagugca

SEQ ID NO: 1333032 - RNA, 14 nt, Human
ucgccccagcaggu

SEQ ID NO: 1333033 - RNA, 20 nt, Human
ucgccccagcaggugcugac

SEQ ID NO: 1333034 - RNA, 14 nt, Human
ucgccccuggcaga

SEQ ID NO: 1333035 - RNA, 23 nt, Human
ucgcuggacucucagucucugag

SEQ ID NO: 1333036 - RNA, 16 nt, Human
ucgcugucacaggcgg

SEQ ID NO: 1333037 - RNA, 17 nt, Human
ucgcuguccuuucuaga

SEQ ID NO: 1333038 - RNA, 11 nt, Human
ucgcuguccuu

SEQ ID NO: 1333039 - RNA, 13 nt, Human
ucgcucuuugaga

SEQ ID NO: 1333040 - RNA, 15 nt, Human
ucgcucuuugagaaa

SEQ ID NO: 1333041 - RNA, 19 nt, Human
ucgcugccagcucuguauc

SEQ ID NO: 1333042 - RNA, 20 nt, Human
ucgcugccagcucuguauca

SEQ ID NO: 1333043 - RNA, 16 nt, Human
ucgcugcuucguggga

SEQ ID NO: 1333044 - RNA, 20 nt, Human
ucgcuggacucucagucucu

SEQ ID NO: 1333045 - RNA, 22 nt, Human
ucgcuggacucucagucucuga

SEQ ID NO: 1333046 - RNA, 13 nt, Human
acuggggcucaga

SEQ ID NO: 1333047 - RNA, 15 nt, Human
acuggggcucagagc

SEQ ID NO: 1333048 - RNA, 18 nt, Human
acuggggcucagagccgg

SEQ ID NO: 1333049 - RNA, 16 nt, Human
acuggggcucagagcc

SEQ ID NO: 1333050 - RNA, 15 nt, Human
acugggggaaaagau

SEQ ID NO: 1333051 - RNA, 13 nt, Human
acugggcugaggg

SEQ ID NO: 1333052 - RNA, 14 nt, Human
acugggcugaggga

SEQ ID NO: 1333053 - RNA, 17 nt, Human
acugggcugagggagcc

SEQ ID NO: 1333054 - RNA, 16 nt, Human
acuggggcaggggccg

SEQ ID NO: 1333055 - RNA, 18 nt, Human
acuguacagacagaaaaa

SEQ ID NO: 1333056 - RNA, 14 nt, Human
acuggguaaugaaa

SEQ ID NO: 1333057 - RNA, 20 nt, Human
acuggguaaugaaacaaaga

SEQ ID NO: 1333058 - RNA, 20 nt, Human
acuguacagacagaaaaaac

SEQ ID NO: 1333059 - RNA, 23 nt, Human
acuguacuugcucuugaugccug

SEQ ID NO: 1333060 - RNA, 14 nt, Human
acuguauauucagg

SEQ ID NO: 1333061 - RNA, 15 nt, Human
acuguacuugcucuu

SEQ ID NO: 1333062 - RNA, 20 nt, Human
acuguacuccucccaggcgc

SEQ ID NO: 1333063 - RNA, 19 nt, Human
acuguaugaucaaauguuu

SEQ ID NO: 1333064 - RNA, 18 nt, Human
acuguaugaucaaauguu

SEQ ID NO: 1333065 - RNA, 17 nt, Human
acuguaugaucaaaugu

SEQ ID NO: 1333066 - RNA, 16 nt, Human
acuguaugaucaaaug

SEQ ID NO: 1333067 - RNA, 15 nt, Human
acuguaugaucaaau

SEQ ID NO: 1333068 - RNA, 14 nt, Human
acuguaugaucaaa

SEQ ID NO: 1333069 - RNA, 13 nt, Human
acuguaugaucaa

SEQ ID NO: 1333070 - RNA, 15 nt, Human
acuguaucuaggcaa

SEQ ID NO: 1333071 - RNA, 22 nt, Human
acuguaucuaggcaacauagua

SEQ ID NO: 1333072 - RNA, 23 nt, Human
acuguaucuaggcaacauaguau

SEQ ID NO: 1333073 - RNA, 22 nt, Human
acuguaugaucaaauguuuaau

SEQ ID NO: 1333074 - RNA, 12 nt, Human
acuguauuugaa

SEQ ID NO: 1333075 - RNA, 23 nt, Human
acuguauuugaaauaagaauuca

SEQ ID NO: 1333076 - RNA, 24 nt, Human
acuguaugaucaaauguuuaauca

SEQ ID NO: 1333077 - RNA, 21 nt, Human
acuguaugaucaaauguuuaa

SEQ ID NO: 1333078 - RNA, 20 nt, Human
acuguaugaucaaauguuua

SEQ ID NO: 1333079 - RNA, 21 nt, Human
acuguauuuuguauuguuuca

SEQ ID NO: 1333080 - RNA, 13 nt, Human
acugucauagaaa

SEQ ID NO: 1333081 - RNA, 21 nt, Human
acugucauccucaaagaaagu

SEQ ID NO: 1333082 - RNA, 22 nt, Human
acugucauccucaaagaaagug

SEQ ID NO: 1333083 - RNA, 14 nt, Human
ucguuaucuaauag

SEQ ID NO: 1333084 - RNA, 15 nt, Human
ucguucaaagcauga

SEQ ID NO: 1333085 - RNA, 22 nt, Human
ucguaugauacuucgacacugu

SEQ ID NO: 1333086 - RNA, 21 nt, Human
ucguaugauacuucgacacug

SEQ ID NO: 1333087 - RNA, 11 nt, Human
ucguucugugg

SEQ ID NO: 1333088 - RNA, 20 nt, Human
ucguuuaaugaaugcuuaaa

SEQ ID NO: 1333089 - RNA, 18 nt, Human
ucguuuaaugaaugcuua

SEQ ID NO: 1333090 - RNA, 14 nt, Human
ucguuuaaugaaug

SEQ ID NO: 1333091 - RNA, 19 nt, Human
ucguuuauuuucaagaaua

SEQ ID NO: 1333092 - RNA, 18 nt, Human
ucuaaaaugugauguucu

SEQ ID NO: 1333093 - RNA, 19 nt, Human
ucuaaaaugugauguucua

SEQ ID NO: 1333094 - RNA, 20 nt, Human
ucuaaaaugugauguucuaa

SEQ ID NO: 1333095 - RNA, 21 nt, Human
ucuaaaaugugauguucuaag

SEQ ID NO: 1333096 - RNA, 22 nt, Human
ucuaaaaugugauguucuaagg

SEQ ID NO: 1333097 - RNA, 18 nt, Human
ucuaaaauuauaaaugac

SEQ ID NO: 1333098 - RNA, 16 nt, Human
ucuaaacccaauccaa

SEQ ID NO: 1333099 - RNA, 19 nt, Human
ucuaaacccaauccaaaug

SEQ ID NO: 1333100 - RNA, 12 nt, Human
ucgggcugugcc

SEQ ID NO: 1333101 - RNA, 20 nt, Human
ucggggagccgggagccuga

SEQ ID NO: 1333102 - RNA, 19 nt, Human
ucggggagaggcugaggac

SEQ ID NO: 1333103 - RNA, 13 nt, Human
ucgggcugugccc

SEQ ID NO: 1333104 - RNA, 17 nt, Human
ucggggauguguccuga

SEQ ID NO: 1333105 - RNA, 15 nt, Human
ucggggcaucuggcc

SEQ ID NO: 1333106 - RNA, 16 nt, Human
ucggggcugggaaguc

SEQ ID NO: 1333107 - RNA, 20 nt, Human
ucguaagauuuccuucuuuu

SEQ ID NO: 1333108 - RNA, 15 nt, Human
ucguacagaaagcug

SEQ ID NO: 1333109 - RNA, 16 nt, Human
ucguacagaaagcugc

SEQ ID NO: 1333110 - RNA, 18 nt, Human
ucguaugauacuucgaca

SEQ ID NO: 1333111 - RNA, 13 nt, Human
acuguggguagac

SEQ ID NO: 1333112 - RNA, 14 nt, Human
acugugugugcccu

SEQ ID NO: 1333113 - RNA, 17 nt, Human
acugugugugcccucug

SEQ ID NO: 1333114 - RNA, 18 nt, Human
acugugugugcccucugg

SEQ ID NO: 1333115 - RNA, 19 nt, Human
acugugugugcccucuggg

SEQ ID NO: 1333116 - RNA, 20 nt, Human
acugugugugcccucugggc

SEQ ID NO: 1333117 - RNA, 21 nt, Human
acugugugugcccucugggcu

SEQ ID NO: 1333118 - RNA, 22 nt, Human
acugugugugcccucugggcuc

SEQ ID NO: 1333119 - RNA, 23 nt, Human
acugugugugcccucugggcucu

SEQ ID NO: 1333120 - RNA, 15 nt, Human
acugugugugugaau

SEQ ID NO: 1333121 - RNA, 16 nt, Human
acugugugugugaaug

SEQ ID NO: 1333122 - RNA, 18 nt, Human
acugugugugugaaugaa

SEQ ID NO: 1333123 - RNA, 22 nt, Human
acugugugugugaaugaacacu

SEQ ID NO: 1333124 - RNA, 14 nt, Human
acuguccugggccu

SEQ ID NO: 1333125 - RNA, 16 nt, Human
acuguccugggccugc

SEQ ID NO: 1333126 - RNA, 15 nt, Human
acuguggauauuguu

SEQ ID NO: 1333127 - RNA, 21 nt, Human
acuguguuaugcaaaagcaag

SEQ ID NO: 1333128 - RNA, 16 nt, Human
acuguguuaugcaaaa

SEQ ID NO: 1333129 - RNA, 14 nt, Human
acuguguuccuucc

SEQ ID NO: 1333130 - RNA, 12 nt, Human
acuguguuccuu

SEQ ID NO: 1333131 - RNA, 16 nt, Human
ucgggagacagcauca

SEQ ID NO: 1333132 - RNA, 21 nt, Human
ucgggagacagcaucaggguu

SEQ ID NO: 1333133 - RNA, 17 nt, Human
ucuaccaaaaaucucaa

SEQ ID NO: 1333134 - RNA, 15 nt, Human
ucuacccauauuaca

SEQ ID NO: 1333135 - RNA, 21 nt, Human
ucuacauaugaucugucugug

SEQ ID NO: 1333136 - RNA, 15 nt, Human
ucuacaucuucugcc

SEQ ID NO: 1333137 - RNA, 16 nt, Human
ucuacaucuucugccu

SEQ ID NO: 1333138 - RNA, 17 nt, Human
ucuacaucuucugccuu

SEQ ID NO: 1333139 - RNA, 16 nt, Human
ucuacauaugaucugu

SEQ ID NO: 1333140 - RNA, 16 nt, Human
ucuaccccagacuaga

SEQ ID NO: 1333141 - RNA, 18 nt, Human
ucuaccccagacuagaug

SEQ ID NO: 1333142 - RNA, 21 nt, Human
ucuaccccagacuagauguag

SEQ ID NO: 1333143 - RNA, 23 nt, Human
ucuaccccagacuagauguagua

SEQ ID NO: 1333144 - RNA, 12 nt, Human
ucuaagauucua

SEQ ID NO: 1333145 - RNA, 13 nt, Human
ucuaagauucuaa

SEQ ID NO: 1333146 - RNA, 14 nt, Human
ucuaagauucuaaa

SEQ ID NO: 1333147 - RNA, 15 nt, Human
ucuaagauucuaaag

SEQ ID NO: 1333148 - RNA, 16 nt, Human
ucuaagauucuaaagg

SEQ ID NO: 1333149 - RNA, 17 nt, Human
ucuaagauucuaaaggu

SEQ ID NO: 1333150 - RNA, 18 nt, Human
ucuaagauucuaaagguc

SEQ ID NO: 1333151 - RNA, 19 nt, Human
ucuaagauucuaaaggucc

SEQ ID NO: 1333152 - RNA, 14 nt, Human
ucuaagauucuaau

SEQ ID NO: 1333153 - RNA, 15 nt, Human
ucuaagauucuaaug

SEQ ID NO: 1333154 - RNA, 16 nt, Human
ucuaagauucuaauga

SEQ ID NO: 1333155 - RNA, 17 nt, Human
ucuaagauucuaaugau

SEQ ID NO: 1333156 - RNA, 19 nt, Human
ucuaagauucuaaugauga

SEQ ID NO: 1333157 - RNA, 20 nt, Human
ucuaagauucuaaugaugau

SEQ ID NO: 1333158 - RNA, 13 nt, Human
ucuaagauucuag

SEQ ID NO: 1333159 - RNA, 14 nt, Human
ucuaagauucuaga

SEQ ID NO: 1333160 - RNA, 15 nt, Human
ucuaagauucuagau

SEQ ID NO: 1333161 - RNA, 16 nt, Human
ucuaagauucuagauc

SEQ ID NO: 1333162 - RNA, 19 nt, Human
ucuaagauucuagaucaga

SEQ ID NO: 1333163 - RNA, 12 nt, Human
ucuaagauucug

SEQ ID NO: 1333164 - RNA, 19 nt, Human
ucuaagauucugauuuuag

SEQ ID NO: 1333165 - RNA, 13 nt, Human
ucuaagauucuga

SEQ ID NO: 1333166 - RNA, 17 nt, Human
ucuaagcauaaaagaug

SEQ ID NO: 1333167 - RNA, 20 nt, Human
ucuaaguaaauacaauuuuu

SEQ ID NO: 1333168 - RNA, 19 nt, Human
ucuaaguaaauacaauuuu

SEQ ID NO: 1333169 - RNA, 13 nt, Human
ucuaagucuuucc

SEQ ID NO: 1333170 - RNA, 14 nt, Human
ucuaagucuuucca

SEQ ID NO: 1333171 - RNA, 13 nt, Human
ucuaagugauaua

SEQ ID NO: 1333172 - RNA, 18 nt, Human
ucuaaguguuucauaaau

SEQ ID NO: 1333173 - RNA, 14 nt, Human
ucuaaguuaauuua

SEQ ID NO: 1333174 - RNA, 16 nt, Human
ucuaaguuaauuuaaa

SEQ ID NO: 1333175 - RNA, 18 nt, Human
ucuaaguuaauuuaaagu

SEQ ID NO: 1333176 - RNA, 20 nt, Human
ucuaaguuaauuuaaaguug

SEQ ID NO: 1333177 - RNA, 21 nt, Human
ucuaaguuaauuuaaaguugu

SEQ ID NO: 1333178 - RNA, 14 nt, Human
ucuaaguuauaaga

SEQ ID NO: 1333179 - RNA, 16 nt, Human
ucuaaguuauaagacu

SEQ ID NO: 1333180 - RNA, 17 nt, Human
ucuaaguuauaagacuc

SEQ ID NO: 1333181 - RNA, 20 nt, Human
ucuaaguuauaagacucuca

SEQ ID NO: 1333182 - RNA, 22 nt, Human
ucuaaguuauaagacucucaca

SEQ ID NO: 1333183 - RNA, 12 nt, Human
ucuaaguuucua

SEQ ID NO: 1333184 - RNA, 18 nt, Human
ucuaaagauggaguuucu

SEQ ID NO: 1333185 - RNA, 19 nt, Human
ucuaaagcugguuuaaugu

SEQ ID NO: 1333186 - RNA, 21 nt, Human
ucuaaagcugguuuaauguuu

SEQ ID NO: 1333187 - RNA, 13 nt, Human
ucuaaaggaguuu

SEQ ID NO: 1333188 - RNA, 13 nt, Human
ucuaaacugcccc

SEQ ID NO: 1333189 - RNA, 16 nt, Human
ucuaaacugcccccuc

SEQ ID NO: 1333190 - RNA, 22 nt, Human
ucuaaacugcccccucugcccu

SEQ ID NO: 1333191 - RNA, 23 nt, Human
ucuaaacugcccccucugcccug

SEQ ID NO: 1333192 - RNA, 13 nt, Human
ucuaaacuggaga

SEQ ID NO: 1333193 - RNA, 14 nt, Human
ucuaaacuggagac

SEQ ID NO: 1333194 - RNA, 15 nt, Human
ucuaaacuggagacu

SEQ ID NO: 1333195 - RNA, 21 nt, Human
ucuaaacuggauucacagcuc

SEQ ID NO: 1333196 - RNA, 17 nt, Human
ucuaaacuuccccaucu

SEQ ID NO: 1333197 - RNA, 19 nt, Human
ucuaaacuggagacugugu

SEQ ID NO: 1333198 - RNA, 17 nt, Human
ucuaaaggaguuuaugu

SEQ ID NO: 1333199 - RNA, 18 nt, Human
ucuaaaggaguuuauguu

SEQ ID NO: 1333200 - RNA, 13 nt, Human
ucuaagaaacauu

SEQ ID NO: 1333201 - RNA, 19 nt, Human
ucuaacuuggcucacacuc

SEQ ID NO: 1333202 - RNA, 15 nt, Human
ucuaagaaacauuua

SEQ ID NO: 1333203 - RNA, 17 nt, Human
ucuaagaaacauuuaua

SEQ ID NO: 1333204 - RNA, 22 nt, Human
ucuaagaaacauuuauauugau

SEQ ID NO: 1333205 - RNA, 13 nt, Human
ucuaagaaagaac

SEQ ID NO: 1333206 - RNA, 18 nt, Human
ucuaagaaacauuuauau

SEQ ID NO: 1333207 - RNA, 12 nt, Human
ucuaagaaagaa

SEQ ID NO: 1333208 - RNA, 12 nt, Human
ucuaagaaauug

SEQ ID NO: 1333209 - RNA, 16 nt, Human
ucuaagaaauugaaua

SEQ ID NO: 1333210 - RNA, 24 nt, Human
ucuaagaaauugaauacuuugaau

SEQ ID NO: 1333211 - RNA, 19 nt, Human
ucuaagaaauugaauacuu

SEQ ID NO: 1333212 - RNA, 16 nt, Human
ucuaagacucaaaugu

SEQ ID NO: 1333213 - RNA, 18 nt, Human
ucuaagacucaaauguuc

SEQ ID NO: 1333214 - RNA, 19 nt, Human
ucuaagacucaaauguucu

SEQ ID NO: 1333215 - RNA, 21 nt, Human
ucuaagacucaaauguucuaa

SEQ ID NO: 1333216 - RNA, 22 nt, Human
ucuaagacucaaauguucuaag

SEQ ID NO: 1333217 - RNA, 19 nt, Human
ucuaagacuuacucuaaga

SEQ ID NO: 1333218 - RNA, 20 nt, Human
ucuaagacuuacucuaagau

SEQ ID NO: 1333219 - RNA, 20 nt, Human
ucuaagagaacaaugugcua

SEQ ID NO: 1333220 - RNA, 23 nt, Human
ucuaagacuuacucuaagaucuu

SEQ ID NO: 1333221 - RNA, 12 nt, Human
ucuaagaucuua

SEQ ID NO: 1333222 - RNA, 15 nt, Human
ucuaagaucuuagau

SEQ ID NO: 1333223 - RNA, 17 nt, Human
ucuaagaucuuagauuc

SEQ ID NO: 1333224 - RNA, 19 nt, Human
ucuaagaucuuagauucuc

SEQ ID NO: 1333225 - RNA, 21 nt, Human
ucuaagaucuuagauucucug

SEQ ID NO: 1333226 - RNA, 12 nt, Human
ucuaagauguga

SEQ ID NO: 1333227 - RNA, 13 nt, Human
ucuaagaugugau

SEQ ID NO: 1333228 - RNA, 18 nt, Human
ucuaagaugugauauucu

SEQ ID NO: 1333229 - RNA, 19 nt, Human
ucuaagaugugauauucua

SEQ ID NO: 1333230 - RNA, 20 nt, Human
ucuaagaugugauauucuaa

SEQ ID NO: 1333231 - RNA, 21 nt, Human
ucuaagaugugauauucuaag

SEQ ID NO: 1333232 - RNA, 22 nt, Human
ucuaagaugugauauucuaaga

SEQ ID NO: 1333233 - RNA, 24 nt, Human
ucuaagaugugauauucuaagacu

SEQ ID NO: 1333234 - RNA, 19 nt, Human
uaugugccagauuuaugca

SEQ ID NO: 1333235 - RNA, 14 nt, Human
uaugugccagauuu

SEQ ID NO: 1333236 - RNA, 23 nt, Human
uaugugccagauuuaugcauauu

SEQ ID NO: 1333237 - RNA, 16 nt, Human
uaugugguuuuagauu

SEQ ID NO: 1333238 - RNA, 18 nt, Human
uaugugguuuuagauuuu

SEQ ID NO: 1333239 - RNA, 19 nt, Human
uaugugguuuuagauuuuc

SEQ ID NO: 1333240 - RNA, 20 nt, Human
acaucuuuaaggggaggaac

SEQ ID NO: 1333241 - RNA, 11 nt, Human
acaucuuuaag

SEQ ID NO: 1333242 - RNA, 13 nt, Human
acaucuuuauccg

SEQ ID NO: 1333243 - RNA, 14 nt, Human
acaucuuugaaauu

SEQ ID NO: 1333244 - RNA, 17 nt, Human
acaucuuugaaauuaug

SEQ ID NO: 1333245 - RNA, 22 nt, Human
acaucuuugaaauuauguaaau

SEQ ID NO: 1333246 - RNA, 23 nt, Human
acaucuuugaaauuauguaaauu

SEQ ID NO: 1333247 - RNA, 23 nt, Human
acaucuugucauuuuuuuucuuu

SEQ ID NO: 1333248 - RNA, 22 nt, Human
uauuuuaagacgaaacauuugu

SEQ ID NO: 1333249 - RNA, 14 nt, Human
uauuuuaagacgaa

SEQ ID NO: 1333250 - RNA, 22 nt, Human
uauuuuaaaauagcguucuugu

SEQ ID NO: 1333251 - RNA, 23 nt, Human
uauuuuaaaauagcguucuugua

SEQ ID NO: 1333252 - RNA, 18 nt, Human
uauuuuaaaaucugucac

SEQ ID NO: 1333253 - RNA, 13 nt, Human
uauuuuaaaauuu

SEQ ID NO: 1333254 - RNA, 14 nt, Human
uauuuuaaaauuug

SEQ ID NO: 1333255 - RNA, 17 nt, Human
uauuuuaaaauuuguuc

SEQ ID NO: 1333256 - RNA, 14 nt, Human
uauuuuaaaagaau

SEQ ID NO: 1333257 - RNA, 17 nt, Human
uauuuguucccaagagc

SEQ ID NO: 1333258 - RNA, 21 nt, Human
uauuuguuuaugguaaaaaau

SEQ ID NO: 1333259 - RNA, 18 nt, Human
uauuuuaaaagaaugauu

SEQ ID NO: 1333260 - RNA, 14 nt, Human
uauuuguaauagau

SEQ ID NO: 1333261 - RNA, 15 nt, Human
uauuuguaauagaug

SEQ ID NO: 1333262 - RNA, 20 nt, Human
uauuuguaauagauguuuga

SEQ ID NO: 1333263 - RNA, 12 nt, Human
uauuuguaauua

SEQ ID NO: 1333264 - RNA, 13 nt, Human
uauuuguaauuaa

SEQ ID NO: 1333265 - RNA, 14 nt, Human
uauuuguaauuaaa

SEQ ID NO: 1333266 - RNA, 15 nt, Human
uauuuguaauuaaaa

SEQ ID NO: 1333267 - RNA, 12 nt, Human
uauuuguacaua

SEQ ID NO: 1333268 - RNA, 18 nt, Human
uauuuguauaaaagugug

SEQ ID NO: 1333269 - RNA, 22 nt, Human
uauuuguauaaaagugugaaau

SEQ ID NO: 1333270 - RNA, 20 nt, Human
uauuugucaugcugggauuu

SEQ ID NO: 1333271 - RNA, 12 nt, Human
uauuuguguuuu

SEQ ID NO: 1333272 - RNA, 19 nt, Human
uauuuguguuuuaauuuaa

SEQ ID NO: 1333273 - RNA, 21 nt, Human
uauuuguguuuuaauuuaaac

SEQ ID NO: 1333274 - RNA, 19 nt, Human
uauuuguuaauaguuccug

SEQ ID NO: 1333275 - RNA, 14 nt, Human
uauuuuaauaaaca

SEQ ID NO: 1333276 - RNA, 12 nt, Human
uauuuuaaagaa

SEQ ID NO: 1333277 - RNA, 13 nt, Human
uauuuuaaagaau

SEQ ID NO: 1333278 - RNA, 16 nt, Human
uauuuuaaagaauugu

SEQ ID NO: 1333279 - RNA, 14 nt, Human
uauuuuaaagaauu

SEQ ID NO: 1333280 - RNA, 17 nt, Human
uauuuuaauaaacacuc

SEQ ID NO: 1333281 - RNA, 19 nt, Human
uauuuuaauaauguuucaa

SEQ ID NO: 1333282 - RNA, 22 nt, Human
uauuuuaauaauguuucaaaca

SEQ ID NO: 1333283 - RNA, 13 nt, Human
uauuuuacauaaa

SEQ ID NO: 1333284 - RNA, 14 nt, Human
uauuuuacaauuuu

SEQ ID NO: 1333285 - RNA, 23 nt, Human
uauuuuacaauuuuuuaucaugc

SEQ ID NO: 1333286 - RNA, 20 nt, Human
uauuuuggauuguauauugu

SEQ ID NO: 1333287 - RNA, 23 nt, Human
uauuuuggauuguauauuguguu

SEQ ID NO: 1333288 - RNA, 17 nt, Human
uauuuugauguaaagau

SEQ ID NO: 1333289 - RNA, 21 nt, Human
uauuuugcaguucccacauua

SEQ ID NO: 1333290 - RNA, 22 nt, Human
uauuuugccaagggcauaaauu

SEQ ID NO: 1333291 - RNA, 23 nt, Human
uauuuugccaagggcauaaauua

SEQ ID NO: 1333292 - RNA, 14 nt, Human
uauuuugcuggaau

SEQ ID NO: 1333293 - RNA, 20 nt, Human
uauuuuguguuuaggaacua

SEQ ID NO: 1333294 - RNA, 17 nt, Human
uauuuuguguuuaggaa

SEQ ID NO: 1333295 - RNA, 13 nt, Human
uauuuuguaaacu

SEQ ID NO: 1333296 - RNA, 20 nt, Human
uauuuuguaaacucaaaaua

SEQ ID NO: 1333297 - RNA, 21 nt, Human
uauuuuguaaacucaaaauau

SEQ ID NO: 1333298 - RNA, 16 nt, Human
uauuuuuggagguuua

SEQ ID NO: 1333299 - RNA, 16 nt, Human
uauuuuucauccuaaa

SEQ ID NO: 1333300 - RNA, 12 nt, Human
uauuuuucauga

SEQ ID NO: 1333301 - RNA, 20 nt, Human
uauuuuucaugauuuugaaa

SEQ ID NO: 1333302 - RNA, 13 nt, Human
uauuuuucuaacu

SEQ ID NO: 1333303 - RNA, 12 nt, Human
uauuuuuggagg

SEQ ID NO: 1333304 - RNA, 19 nt, Human
uauuuuuggcagucugaau

SEQ ID NO: 1333305 - RNA, 20 nt, Human
uauuuuuggcagucugaauu

SEQ ID NO: 1333306 - RNA, 21 nt, Human
uauuuuguuuugugcagagau

SEQ ID NO: 1333307 - RNA, 21 nt, Human
uauuuuuaauauauacuauga

SEQ ID NO: 1333308 - RNA, 21 nt, Human
ucaaauacgugggcauucaaa

SEQ ID NO: 1333309 - RNA, 22 nt, Human
ucaaauacgugggcauucaaau

SEQ ID NO: 1333310 - RNA, 13 nt, Human
ucaaauauauuca

SEQ ID NO: 1333311 - RNA, 23 nt, Human
ucaaauacgugggcauucaaaug

SEQ ID NO: 1333312 - RNA, 18 nt, Human
ucaaaguguuuucucuga

SEQ ID NO: 1333313 - RNA, 12 nt, Human
ucaaagguucua

SEQ ID NO: 1333314 - RNA, 16 nt, Human
ucaaagguucuagguu

SEQ ID NO: 1333315 - RNA, 20 nt, Human
ucaaagguucuagguuucaa

SEQ ID NO: 1333316 - RNA, 21 nt, Human
ucaaagguucuagguuucaaa

SEQ ID NO: 1333317 - RNA, 23 nt, Human
ucaaagguucuagguuucaaaga

SEQ ID NO: 1333318 - RNA, 18 nt, Human
ucaaagguuuggaaggag

SEQ ID NO: 1333319 - RNA, 19 nt, Human
ucaaaguguuuucucugaa

SEQ ID NO: 1333320 - RNA, 21 nt, Human
ucaaauauauucagccuggcu

SEQ ID NO: 1333321 - RNA, 13 nt, Human
acaugaaacagaa

SEQ ID NO: 1333322 - RNA, 15 nt, Human
acaugaaacagaaac

SEQ ID NO: 1333323 - RNA, 17 nt, Human
acaugaaaggacccugu

SEQ ID NO: 1333324 - RNA, 14 nt, Human
acaugaacuuagau

SEQ ID NO: 1333325 - RNA, 19 nt, Human
acaugaacuuagauuuuac

SEQ ID NO: 1333326 - RNA, 18 nt, Human
acaugacuccauagaccu

SEQ ID NO: 1333327 - RNA, 15 nt, Human
acaugagaacaaaca

SEQ ID NO: 1333328 - RNA, 20 nt, Human
acaugacuccauagaccuuu

SEQ ID NO: 1333329 - RNA, 20 nt, Human
acaugaacuuagauuuuaca

SEQ ID NO: 1333330 - RNA, 22 nt, Human
acaugaacuuagauuuuacaug

SEQ ID NO: 1333331 - RNA, 13 nt, Human
acaugaagaagcu

SEQ ID NO: 1333332 - RNA, 19 nt, Human
acaugaauuuuagcuuuug

SEQ ID NO: 1333333 - RNA, 22 nt, Human
acaugaauuuuagcuuuugugg

SEQ ID NO: 1333334 - RNA, 19 nt, Human
acaugacccuaaaucuuga

SEQ ID NO: 1333335 - RNA, 21 nt, Human
acaugacccuaaaucuugacu

SEQ ID NO: 1333336 - RNA, 22 nt, Human
ucaaacaguacacuaucuuaau

SEQ ID NO: 1333337 - RNA, 12 nt, Human
ucaaagaugcug

SEQ ID NO: 1333338 - RNA, 15 nt, Human
ucaaagcaaaugucu

SEQ ID NO: 1333339 - RNA, 23 nt, Human
ucaaagcaaaugucuuccuggau

SEQ ID NO: 1333340 - RNA, 19 nt, Human
ucaaagaugcugugagucu

SEQ ID NO: 1333341 - RNA, 13 nt, Human
ucaaagcaagcau

SEQ ID NO: 1333342 - RNA, 15 nt, Human
ucaaagcaagcauuc

SEQ ID NO: 1333343 - RNA, 19 nt, Human
ucaaagcaagcauucagaa

SEQ ID NO: 1333344 - RNA, 21 nt, Human
ucaaagcaagcauucagaaga

SEQ ID NO: 1333345 - RNA, 22 nt, Human
ucaaagcaagcauucagaagaa

SEQ ID NO: 1333346 - RNA, 15 nt, Human
ucaaagcaaggaaac

SEQ ID NO: 1333347 - RNA, 16 nt, Human
ucaaagcaaggaaacu

SEQ ID NO: 1333348 - RNA, 20 nt, Human
ucaaagcaaggaaacuaugu

SEQ ID NO: 1333349 - RNA, 14 nt, Human
ucaaaagggccaaa

SEQ ID NO: 1333350 - RNA, 21 nt, Human
ucaaaagggccaaagaaccaa

SEQ ID NO: 1333351 - RNA, 20 nt, Human
ucaaaagggccaaagaacca

SEQ ID NO: 1333352 - RNA, 13 nt, Human
ucaaaaguuccaa

SEQ ID NO: 1333353 - RNA, 14 nt, Human
ucaaaaguuccaag

SEQ ID NO: 1333354 - RNA, 15 nt, Human
ucaaaaguuccaaga

SEQ ID NO: 1333355 - RNA, 17 nt, Human
ucaaaaguuccaagagu

SEQ ID NO: 1333356 - RNA, 21 nt, Human
ucaaaaguuccaagagucuaa

SEQ ID NO: 1333357 - RNA, 22 nt, Human
ucaaaaguuccaagagucuaaa

SEQ ID NO: 1333358 - RNA, 22 nt, Human
acauggcuggagcuagaauuug

SEQ ID NO: 1333359 - RNA, 13 nt, Human
acauggcacagag

SEQ ID NO: 1333360 - RNA, 21 nt, Human
acauggccccucccccugcca

SEQ ID NO: 1333361 - RNA, 22 nt, Human
acauggccccucccccugccag

SEQ ID NO: 1333362 - RNA, 14 nt, Human
acauggagguucua

SEQ ID NO: 1333363 - RNA, 15 nt, Human
acauggagguucuaa

SEQ ID NO: 1333364 - RNA, 16 nt, Human
acauggagguucuaag

SEQ ID NO: 1333365 - RNA, 17 nt, Human
acauggagguucuaagg

SEQ ID NO: 1333366 - RNA, 18 nt, Human
acauggagguucuaaggc

SEQ ID NO: 1333367 - RNA, 19 nt, Human
acauggagguucuaaggcc

SEQ ID NO: 1333368 - RNA, 13 nt, Human
acaugaggacucu

SEQ ID NO: 1333369 - RNA, 18 nt, Human
acaugaggacucuauucu

SEQ ID NO: 1333370 - RNA, 20 nt, Human
acaugaggacucuauucuuu

SEQ ID NO: 1333371 - RNA, 21 nt, Human
acaugaggacucuauucuuua

SEQ ID NO: 1333372 - RNA, 22 nt, Human
acaugaggacucuauucuuuaa

SEQ ID NO: 1333373 - RNA, 15 nt, Human
acaugaggccacugg

SEQ ID NO: 1333374 - RNA, 13 nt, Human
acaugaggccacu

SEQ ID NO: 1333375 - RNA, 16 nt, Human
acaugagguacugaga

SEQ ID NO: 1333376 - RNA, 18 nt, Human
acauuaauagcagccuuu

SEQ ID NO: 1333377 - RNA, 18 nt, Human
acauuaauauacuugaau

SEQ ID NO: 1333378 - RNA, 19 nt, Human
acauuaauagcagccuuuc

SEQ ID NO: 1333379 - RNA, 15 nt, Human
acauuacugaaaacu

SEQ ID NO: 1333380 - RNA, 17 nt, Human
acauuacugaaaacuuc

SEQ ID NO: 1333381 - RNA, 20 nt, Human
acauuacugaaaacuucauu

SEQ ID NO: 1333382 - RNA, 14 nt, Human
acauuagaagacaa

SEQ ID NO: 1333383 - RNA, 15 nt, Human
acauuagaagacaau

SEQ ID NO: 1333384 - RNA, 20 nt, Human
acauuagaagacaauugaca

SEQ ID NO: 1333385 - RNA, 21 nt, Human
acauuagaagacaauugacaa

SEQ ID NO: 1333386 - RNA, 16 nt, Human
acauggugcugggaga

SEQ ID NO: 1333387 - RNA, 23 nt, Human
acauggugcugggagaggcagcc

SEQ ID NO: 1333388 - RNA, 18 nt, Human
acaugguggguccauggg

SEQ ID NO: 1333389 - RNA, 19 nt, Human
acaugguggguccaugggc

SEQ ID NO: 1333390 - RNA, 19 nt, Human
acaugguuaccaugucuuu

SEQ ID NO: 1333391 - RNA, 18 nt, Human
acaugguuaccaugucuu

SEQ ID NO: 1333392 - RNA, 18 nt, Human
acauguaucuaugcauuu

SEQ ID NO: 1333393 - RNA, 21 nt, Human
acauguaucuaugcauuuucu

SEQ ID NO: 1333394 - RNA, 18 nt, Human
acauguauugcacauugu

SEQ ID NO: 1333395 - RNA, 19 nt, Human
acauguauugcacauugua

SEQ ID NO: 1333396 - RNA, 21 nt, Human
acauguauugcacauuguaaa

SEQ ID NO: 1333397 - RNA, 22 nt, Human
acauugguucuuucauuugcuu

SEQ ID NO: 1333398 - RNA, 14 nt, Human
acauuuaaaacauu

SEQ ID NO: 1333399 - RNA, 18 nt, Human
acauuuaaaacauuaaaa

SEQ ID NO: 1333400 - RNA, 16 nt, Human
acauuggaaacaaguc

SEQ ID NO: 1333401 - RNA, 12 nt, Human
acauugcuuuuc

SEQ ID NO: 1333402 - RNA, 15 nt, Human
acauuggaauguucu

SEQ ID NO: 1333403 - RNA, 17 nt, Human
acauuggaauguucuca

SEQ ID NO: 1333404 - RNA, 21 nt, Human
acauuggcaccuaauccaggc

SEQ ID NO: 1333405 - RNA, 22 nt, Human
acauuggcaccuaauccaggca

SEQ ID NO: 1333406 - RNA, 15 nt, Human
acauugcguuugacc

SEQ ID NO: 1333407 - RNA, 23 nt, Human
acauugcguuugaccuuuuaugu

SEQ ID NO: 1333408 - RNA, 14 nt, Human
acauuuuacauuaa

SEQ ID NO: 1333409 - RNA, 16 nt, Human
acauuuacaaacugaa

SEQ ID NO: 1333410 - RNA, 17 nt, Human
acauuuacaaacugaag

SEQ ID NO: 1333411 - RNA, 21 nt, Human
acauuuacaaacugaagagua

SEQ ID NO: 1333412 - RNA, 22 nt, Human
acauuuaaaacauuaaaauaua

SEQ ID NO: 1333413 - RNA, 15 nt, Human
acauuuacaaacuga

SEQ ID NO: 1333414 - RNA, 18 nt, Human
acauuuuacauuaaauuu

SEQ ID NO: 1333415 - RNA, 15 nt, Human
acauuuuacauuaaa

SEQ ID NO: 1333416 - RNA, 20 nt, Human
acauuuuauggugccuagua

SEQ ID NO: 1333417 - RNA, 16 nt, Human
acauuuuuuaggaaau

SEQ ID NO: 1333418 - RNA, 20 nt, Human
acauuuuuuaggaaauguuu

SEQ ID NO: 1333419 - RNA, 14 nt, Human
ucaaggucugcuuu

SEQ ID NO: 1333420 - RNA, 21 nt, Human
ucaaggucguuuuuuucauuc

SEQ ID NO: 1333421 - RNA, 11 nt, Human
ucaagguucua

SEQ ID NO: 1333422 - RNA, 14 nt, Human
ucaagguucuaacc

SEQ ID NO: 1333423 - RNA, 13 nt, Human
ucaagguuuuagg

SEQ ID NO: 1333424 - RNA, 18 nt, Human
ucaagguuuuagguucua

SEQ ID NO: 1333425 - RNA, 20 nt, Human
ucaagguuuuagguucuaaa

SEQ ID NO: 1333426 - RNA, 15 nt, Human
ucaaggucugcuuuu

SEQ ID NO: 1333427 - RNA, 16 nt, Human
ucaaggcggugcuuga

SEQ ID NO: 1333428 - RNA, 11 nt, Human
ucaaggcucag

SEQ ID NO: 1333429 - RNA, 17 nt, Human
ucaaggcacucuagauu

SEQ ID NO: 1333430 - RNA, 18 nt, Human
ucaaggcacucuagauuc

SEQ ID NO: 1333431 - RNA, 20 nt, Human
ucaaggcacucuagauucca

SEQ ID NO: 1333432 - RNA, 21 nt, Human
ucaaggcacucuagauuccau

SEQ ID NO: 1333433 - RNA, 19 nt, Human
ucaagauuguuccugcuuu

SEQ ID NO: 1333434 - RNA, 21 nt, Human
ucaagcaaacagcuucacaaa

SEQ ID NO: 1333435 - RNA, 18 nt, Human
ucaagcagcgaccgcccc

SEQ ID NO: 1333436 - RNA, 21 nt, Human
ucaagcagcgaccgcccccuc

SEQ ID NO: 1333437 - RNA, 22 nt, Human
ucaagcagcgaccgcccccucc

SEQ ID NO: 1333438 - RNA, 13 nt, Human
ucaaggcacucua

SEQ ID NO: 1333439 - RNA, 14 nt, Human
ucaaggcacucuag

SEQ ID NO: 1333440 - RNA, 15 nt, Human
ucaaggcacucuaga

SEQ ID NO: 1333441 - RNA, 16 nt, Human
ucaaggcacucuagau

SEQ ID NO: 1333442 - RNA, 20 nt, Human
ucaagagggcacugguggcc

SEQ ID NO: 1333443 - RNA, 21 nt, Human
ucaagagggcacugguggccc

SEQ ID NO: 1333444 - RNA, 18 nt, Human
ucaagagugguaucuugc

SEQ ID NO: 1333445 - RNA, 19 nt, Human
ucaagagugaauucccuca

SEQ ID NO: 1333446 - RNA, 20 nt, Human
ucaagagugaauucccucac

SEQ ID NO: 1333447 - RNA, 13 nt, Human
ucaagaggagccc

SEQ ID NO: 1333448 - RNA, 21 nt, Human
ucaagagugaauucccucacu

SEQ ID NO: 1333449 - RNA, 16 nt, Human
ucaagauuguuccugc

SEQ ID NO: 1333450 - RNA, 20 nt, Human
acauuauauuucuauuuuau

SEQ ID NO: 1333451 - RNA, 19 nt, Human
acauuaugugguuuuagau

SEQ ID NO: 1333452 - RNA, 21 nt, Human
acauuaugugguuuuagauuu

SEQ ID NO: 1333453 - RNA, 22 nt, Human
acauuaugugguuuuagauuuu

SEQ ID NO: 1333454 - RNA, 18 nt, Human
acauuauuaucaacaaua

SEQ ID NO: 1333455 - RNA, 22 nt, Human
acauuauuaaguaacuuauuua

SEQ ID NO: 1333456 - RNA, 24 nt, Human
acauucaaaauaggguauauuuuc

SEQ ID NO: 1333457 - RNA, 18 nt, Human
acauucaacagagacuga

SEQ ID NO: 1333458 - RNA, 20 nt, Human
ucaagaggagcccccacccu

SEQ ID NO: 1333459 - RNA, 21 nt, Human
ucaagugauucucaugccuca

SEQ ID NO: 1333460 - RNA, 22 nt, Human
ucaagugauucucaugccucag

SEQ ID NO: 1333461 - RNA, 21 nt, Human
ucaagguuuuagguucuaaag

SEQ ID NO: 1333462 - RNA, 22 nt, Human
ucaagguuuuagguucuaaagu

SEQ ID NO: 1333463 - RNA, 23 nt, Human
ucaagguuuuagguucuaaaguu

SEQ ID NO: 1333464 - RNA, 15 nt, Human
ucaaguaauacaaac

SEQ ID NO: 1333465 - RNA, 16 nt, Human
ucaauauuuuuagaua

SEQ ID NO: 1333466 - RNA, 17 nt, Human
ucaauauuuucuuuucc

SEQ ID NO: 1333467 - RNA, 19 nt, Human
ucaaucagucucagaaugu

SEQ ID NO: 1333468 - RNA, 22 nt, Human
ucaaucagucucagaaugucau

SEQ ID NO: 1333469 - RNA, 21 nt, Human
ucaaucagucucagaauguca

SEQ ID NO: 1333470 - RNA, 13 nt, Human
ucaaucauuucua

SEQ ID NO: 1333471 - RNA, 16 nt, Human
ucaaucauuucuauua

SEQ ID NO: 1333472 - RNA, 15 nt, Human
ucaauccagcuaugu

SEQ ID NO: 1333473 - RNA, 16 nt, Human
ucacagaccuuugaac

SEQ ID NO: 1333474 - RNA, 23 nt, Human
ucacagaaguguuaacuuuucua

SEQ ID NO: 1333475 - RNA, 12 nt, Human
ucaauuuaaaaa

SEQ ID NO: 1333476 - RNA, 17 nt, Human
accacacccacacucag

SEQ ID NO: 1333477 - RNA, 13 nt, Human
ucaauuuaaaaaa

SEQ ID NO: 1333478 - RNA, 21 nt, Human
ucacagaacccuuggagccaa

SEQ ID NO: 1333479 - RNA, 19 nt, Human
ucacagcuccaagaauuuc

SEQ ID NO: 1333480 - RNA, 15 nt, Human
ucacagcccagcccg

SEQ ID NO: 1333481 - RNA, 13 nt, Human
ucacagcccagcc

SEQ ID NO: 1333482 - RNA, 16 nt, Human
ucacagccaccccuga

SEQ ID NO: 1333483 - RNA, 13 nt, Human
ucacauuccugaa

SEQ ID NO: 1333484 - RNA, 17 nt, Human
ucacauuccugaacagg

SEQ ID NO: 1333485 - RNA, 22 nt, Human
ucacauuagaagacaauugaca

SEQ ID NO: 1333486 - RNA, 22 nt, Human
ucacauuccucugcccuuccug

SEQ ID NO: 1333487 - RNA, 20 nt, Human
ucacauuccugaacaggaua

SEQ ID NO: 1333488 - RNA, 20 nt, Human
ucacaugauuccagccauca

SEQ ID NO: 1333489 - RNA, 16 nt, Human
ucacaugguuuacauc

SEQ ID NO: 1333490 - RNA, 21 nt, Human
ucacaugucaguaccuucaaa

SEQ ID NO: 1333491 - RNA, 12 nt, Human
ucacauuagaag

SEQ ID NO: 1333492 - RNA, 14 nt, Human
ucacauuagaagac

SEQ ID NO: 1333493 - RNA, 15 nt, Human
ucacauuagaagaca

SEQ ID NO: 1333494 - RNA, 14 nt, Human
ucacaggaaguaga

SEQ ID NO: 1333495 - RNA, 11 nt, Human
ucacagcuccu

SEQ ID NO: 1333496 - RNA, 14 nt, Human
ucacagcuccuccc

SEQ ID NO: 1333497 - RNA, 16 nt, Human
ucacagcuccucccac

SEQ ID NO: 1333498 - RNA, 14 nt, Human
ucacauauuuuaaa

SEQ ID NO: 1333499 - RNA, 22 nt, Human
ucacauauuuuaaaauuuguuc

SEQ ID NO: 1333500 - RNA, 20 nt, Human
ucacaucagagugacaucca

SEQ ID NO: 1333501 - RNA, 21 nt, Human
ucacaugaugcacuucaaauu

SEQ ID NO: 1333502 - RNA, 17 nt, Human
ucacaugauuccagcca

SEQ ID NO: 1333503 - RNA, 19 nt, Human
ucacaugauuccagccauc

SEQ ID NO: 1333504 - RNA, 21 nt, Human
ucacaugauuccagccaucac

SEQ ID NO: 1333505 - RNA, 23 nt, Human
accaaaaaucucaauauuucaga

SEQ ID NO: 1333506 - RNA, 14 nt, Human
accaaaguucuaau

SEQ ID NO: 1333507 - RNA, 15 nt, Human
accaaaguucuaaua

SEQ ID NO: 1333508 - RNA, 20 nt, Human
accaaaguucuaauaauuuc

SEQ ID NO: 1333509 - RNA, 21 nt, Human
accaaaguucuaauaauuucu

SEQ ID NO: 1333510 - RNA, 23 nt, Human
accaaaguucuaauaauuucuaa

SEQ ID NO: 1333511 - RNA, 14 nt, Human
accaaaucaaaauc

SEQ ID NO: 1333512 - RNA, 15 nt, Human
accaaaucaaaaucu

SEQ ID NO: 1333513 - RNA, 20 nt, Human
accaaaucaaaaucucucca

SEQ ID NO: 1333514 - RNA, 22 nt, Human
accaaaucaaaaucucuccacu

SEQ ID NO: 1333515 - RNA, 13 nt, Human
accaaaucuggaa

SEQ ID NO: 1333516 - RNA, 15 nt, Human
accaaaucuggaagc

SEQ ID NO: 1333517 - RNA, 23 nt, Human
accaaaucaaaaucucuccacuu

SEQ ID NO: 1333518 - RNA, 14 nt, Human
accaacauaaaaau

SEQ ID NO: 1333519 - RNA, 15 nt, Human
accaacauaaaaaug

SEQ ID NO: 1333520 - RNA, 23 nt, Human
accaacauaaaaaugaucuaaac

SEQ ID NO: 1333521 - RNA, 21 nt, Human
accaacaucuacaaaacauua

SEQ ID NO: 1333522 - RNA, 20 nt, Human
accaaaugugcuuugagaag

SEQ ID NO: 1333523 - RNA, 20 nt, Human
accaacaaucuuccuguuua

SEQ ID NO: 1333524 - RNA, 20 nt, Human
accaacacguggccaagaga

SEQ ID NO: 1333525 - RNA, 16 nt, Human
accacaagacugcaca

SEQ ID NO: 1333526 - RNA, 22 nt, Human
accacaaacuguaauacaauga

SEQ ID NO: 1333527 - RNA, 13 nt, Human
accacaacaugag

SEQ ID NO: 1333528 - RNA, 17 nt, Human
accacaacaugaggcca

SEQ ID NO: 1333529 - RNA, 21 nt, Human
accacaacaugaggccacugg

SEQ ID NO: 1333530 - RNA, 14 nt, Human
accaauguacccac

SEQ ID NO: 1333531 - RNA, 12 nt, Human
accaaugucuug

SEQ ID NO: 1333532 - RNA, 13 nt, Human
accaaugucuuga

SEQ ID NO: 1333533 - RNA, 21 nt, Human
accaauguacccaccgggcca

SEQ ID NO: 1333534 - RNA, 15 nt, Human
accaacccucagagc

SEQ ID NO: 1333535 - RNA, 13 nt, Human
accaacccucagg

SEQ ID NO: 1333536 - RNA, 15 nt, Human
accaacccucagggc

SEQ ID NO: 1333537 - RNA, 14 nt, Human
accaacccucaggg

SEQ ID NO: 1333538 - RNA, 17 nt, Human
accaauccuaugcaugg

SEQ ID NO: 1333539 - RNA, 13 nt, Human
accaauccuggac

SEQ ID NO: 1333540 - RNA, 14 nt, Human
accaaugaaaaaau

SEQ ID NO: 1333541 - RNA, 17 nt, Human
accaaugaaaaaaugua

SEQ ID NO: 1333542 - RNA, 20 nt, Human
accacaacuauuuucagaug

SEQ ID NO: 1333543 - RNA, 17 nt, Human
accacaaugcagugccu

SEQ ID NO: 1333544 - RNA, 21 nt, Human
ucacugaacuuugcugagccu

SEQ ID NO: 1333545 - RNA, 15 nt, Human
ucacugagcacuguu

SEQ ID NO: 1333546 - RNA, 14 nt, Human
ucacugagcacugu

SEQ ID NO: 1333547 - RNA, 18 nt, Human
ucacugagaccaaggcuu

SEQ ID NO: 1333548 - RNA, 16 nt, Human
ucacugaagcuuuuua

SEQ ID NO: 1333549 - RNA, 16 nt, Human
ucaccagcccuggcaa

SEQ ID NO: 1333550 - RNA, 19 nt, Human
ucacauuccugaacaggau

SEQ ID NO: 1333551 - RNA, 20 nt, Human
ucacucaaggcggugcuuga

SEQ ID NO: 1333552 - RNA, 12 nt, Human
ucacucaaggcg

SEQ ID NO: 1333553 - RNA, 19 nt, Human
ucacucagccacccugagu

SEQ ID NO: 1333554 - RNA, 20 nt, Human
ucacucagccacccugaguu

SEQ ID NO: 1333555 - RNA, 21 nt, Human
ucacucaucaauggggccagu

SEQ ID NO: 1333556 - RNA, 18 nt, Human
ucacugcaaccuccaccu

SEQ ID NO: 1333557 - RNA, 20 nt, Human
ucacugcaacaugaugaggu

SEQ ID NO: 1333558 - RNA, 14 nt, Human
ucacugcaaccucc

SEQ ID NO: 1333559 - RNA, 21 nt, Human
ucacugaguuuuccauggcag

SEQ ID NO: 1333560 - RNA, 17 nt, Human
ucacugcaacaugauga

SEQ ID NO: 1333561 - RNA, 19 nt, Human
ucacugagcacuguuuucu

SEQ ID NO: 1333562 - RNA, 17 nt, Human
ucacugaguuuuccaug

SEQ ID NO: 1333563 - RNA, 23 nt, Human
ucacugaguuuuccauggcagga

SEQ ID NO: 1333564 - RNA, 22 nt, Human
ucacugagcacuguuuucuagu

SEQ ID NO: 1333565 - RNA, 18 nt, Human
ucacugagcacuguuuuc

SEQ ID NO: 1333566 - RNA, 16 nt, Human
ucacugagcacuguuu

SEQ ID NO: 1333567 - RNA, 18 nt, Human
ucacugcaaccucugccu

SEQ ID NO: 1333568 - RNA, 21 nt, Human
ucacugcaaccuucgccaccu

SEQ ID NO: 1333569 - RNA, 15 nt, Human
ucacugcacagugca

SEQ ID NO: 1333570 - RNA, 16 nt, Human
ucacugcaaccuucac

SEQ ID NO: 1333571 - RNA, 18 nt, Human
ucacugcaagcuccgccu

SEQ ID NO: 1333572 - RNA, 22 nt, Human
ucacuuaaacuugcaucacuua

SEQ ID NO: 1333573 - RNA, 15 nt, Human
ucacuuaacaaacaa

SEQ ID NO: 1333574 - RNA, 22 nt, Human
ucacuuaaguuaguuccacuga

SEQ ID NO: 1333575 - RNA, 16 nt, Human
ucacuuaauugcuaca

SEQ ID NO: 1333576 - RNA, 21 nt, Human
ucacuuaggaaauggcuuugu

SEQ ID NO: 1333577 - RNA, 21 nt, Human
ucacuucacugugcuguuguu

SEQ ID NO: 1333578 - RNA, 21 nt, Human
ucacuucagguauaccucacu

SEQ ID NO: 1333579 - RNA, 15 nt, Human
ucacuucacugugcu

SEQ ID NO: 1333580 - RNA, 14 nt, Human
ucacuucacugugc

SEQ ID NO: 1333581 - RNA, 16 nt, Human
ucacuucauaauccag

SEQ ID NO: 1333582 - RNA, 12 nt, Human
ucacuucacugu

SEQ ID NO: 1333583 - RNA, 20 nt, Human
ucacuuauuuagauucacuu

SEQ ID NO: 1333584 - RNA, 22 nt, Human
accaugucaaggguucaagauu

SEQ ID NO: 1333585 - RNA, 12 nt, Human
accaugucauuu

SEQ ID NO: 1333586 - RNA, 15 nt, Human
accaugucauuucag

SEQ ID NO: 1333587 - RNA, 18 nt, Human
accaugucauuucagaag

SEQ ID NO: 1333588 - RNA, 16 nt, Human
accaugucuuucucuc

SEQ ID NO: 1333589 - RNA, 14 nt, Human
accaugucuuucuc

SEQ ID NO: 1333590 - RNA, 20 nt, Human
accauggccagcuaauuuuu

SEQ ID NO: 1333591 - RNA, 21 nt, Human
accauggaguggcagcccagc

SEQ ID NO: 1333592 - RNA, 22 nt, Human
accauggaguggcagcccagcc

SEQ ID NO: 1333593 - RNA, 23 nt, Human
accauggaguggcagcccagcca

SEQ ID NO: 1333594 - RNA, 24 nt, Human
accauggacacuacacccagcaau

SEQ ID NO: 1333595 - RNA, 16 nt, Human
accauggaguggcagc

SEQ ID NO: 1333596 - RNA, 23 nt, Human
accauggacacuacacccagcaa

SEQ ID NO: 1333597 - RNA, 22 nt, Human
accauggacacuacacccagca

SEQ ID NO: 1333598 - RNA, 21 nt, Human
accauggacacuacacccagc

SEQ ID NO: 1333599 - RNA, 18 nt, Human
accaugcugcuggggaag

SEQ ID NO: 1333600 - RNA, 19 nt, Human
accaugcugcuggggaaga

SEQ ID NO: 1333601 - RNA, 21 nt, Human
accaugcugcuggggaagaca

SEQ ID NO: 1333602 - RNA, 22 nt, Human
accaugcugcuggggaagacag

SEQ ID NO: 1333603 - RNA, 23 nt, Human
accaugcugcuggggaagacagu

SEQ ID NO: 1333604 - RNA, 14 nt, Human
accagggguuucuc

SEQ ID NO: 1333605 - RNA, 16 nt, Human
accagggguuucucgc

SEQ ID NO: 1333606 - RNA, 17 nt, Human
accagggguuucucgca

SEQ ID NO: 1333607 - RNA, 21 nt, Human
accaggguccuuuugacacug

SEQ ID NO: 1333608 - RNA, 20 nt, Human
accaggguugaccccagagg

SEQ ID NO: 1333609 - RNA, 21 nt, Human
accaggguugaccccagagga

SEQ ID NO: 1333610 - RNA, 18 nt, Human
accagguccaaugagcuu

SEQ ID NO: 1333611 - RNA, 19 nt, Human
accagguccaaugagcuuu

SEQ ID NO: 1333612 - RNA, 21 nt, Human
accagguccaaugagcuuucu

SEQ ID NO: 1333613 - RNA, 15 nt, Human
accaugauuccuuua

SEQ ID NO: 1333614 - RNA, 18 nt, Human
accaugauuccuuuaaca

SEQ ID NO: 1333615 - RNA, 16 nt, Human
accaugcaaaugcuau

SEQ ID NO: 1333616 - RNA, 19 nt, Human
accaugccaggcuaauuuu

SEQ ID NO: 1333617 - RNA, 20 nt, Human
accaugcccggcuaauuuuu

SEQ ID NO: 1333618 - RNA, 22 nt, Human
accaugcccggcuaauuuuugu

SEQ ID NO: 1333619 - RNA, 19 nt, Human
accaugcucaucugcuggu

SEQ ID NO: 1333620 - RNA, 20 nt, Human
accaugcucaucugcugguc

SEQ ID NO: 1333621 - RNA, 20 nt, Human
accaugccaggcuaauuuuu

SEQ ID NO: 1333622 - RNA, 14 nt, Human
accaugcugcuggg

SEQ ID NO: 1333623 - RNA, 16 nt, Human
accaugcugcugggga

SEQ ID NO: 1333624 - RNA, 17 nt, Human
accaugcugcuggggaa

SEQ ID NO: 1333625 - RNA, 23 nt, Human
accauguuggccaggcuugucuc

SEQ ID NO: 1333626 - RNA, 17 nt, Human
accauguguuauguuuu

SEQ ID NO: 1333627 - RNA, 18 nt, Human
accauguuggccaggcug

SEQ ID NO: 1333628 - RNA, 13 nt, Human
accauucugacuc

SEQ ID NO: 1333629 - RNA, 21 nt, Human
accauucugacucgguuucuc

SEQ ID NO: 1333630 - RNA, 14 nt, Human
acccacuggacuca

SEQ ID NO: 1333631 - RNA, 17 nt, Human
acccacuggacucaccu

SEQ ID NO: 1333632 - RNA, 21 nt, Human
acccacuggacucaccucccc

SEQ ID NO: 1333633 - RNA, 15 nt, Human
acccacuucugcacu

SEQ ID NO: 1333634 - RNA, 13 nt, Human
acccacuucugca

SEQ ID NO: 1333635 - RNA, 14 nt, Human
acccacuucugcac

SEQ ID NO: 1333636 - RNA, 24 nt, Human
accauucugacucgguuucuccaa

SEQ ID NO: 1333637 - RNA, 18 nt, Human
acccaaagagguauuuau

SEQ ID NO: 1333638 - RNA, 20 nt, Human
acccaaauguucaucaauga

SEQ ID NO: 1333639 - RNA, 16 nt, Human
acccaaauguucauca

SEQ ID NO: 1333640 - RNA, 22 nt, Human
accccagcuggggccaggcugg

SEQ ID NO: 1333641 - RNA, 19 nt, Human
accccagcuggggccaggc

SEQ ID NO: 1333642 - RNA, 13 nt, Human
acccagggcucug

SEQ ID NO: 1333643 - RNA, 12 nt, Human
acccagggcucu

SEQ ID NO: 1333644 - RNA, 15 nt, Human
acccagggcucugua

SEQ ID NO: 1333645 - RNA, 21 nt, Human
acccaggggcagccccaggcc

SEQ ID NO: 1333646 - RNA, 15 nt, Human
acccaggggcagccc

SEQ ID NO: 1333647 - RNA, 14 nt, Human
acccaggucucccu

SEQ ID NO: 1333648 - RNA, 17 nt, Human
accccagggcagccagg

SEQ ID NO: 1333649 - RNA, 22 nt, Human
accccagggcuguaacugccag

SEQ ID NO: 1333650 - RNA, 23 nt, Human
accccagggcuguaacugccagg

SEQ ID NO: 1333651 - RNA, 19 nt, Human
accccagggcacaggagcu

SEQ ID NO: 1333652 - RNA, 15 nt, Human
accccagggcagcca

SEQ ID NO: 1333653 - RNA, 16 nt, Human
accccagggcagccag

SEQ ID NO: 1333654 - RNA, 21 nt, Human
accccagggcagccagggaga

SEQ ID NO: 1333655 - RNA, 14 nt, Human
acccccacccccag

SEQ ID NO: 1333656 - RNA, 15 nt, Human
acccccacccccagc

SEQ ID NO: 1333657 - RNA, 18 nt, Human
acccccacccccagcuca

SEQ ID NO: 1333658 - RNA, 19 nt, Human
acccccacccccagcucaa

SEQ ID NO: 1333659 - RNA, 15 nt, Human
ucagauuucugagga

SEQ ID NO: 1333660 - RNA, 19 nt, Human
ucagcccuaggguggagag

SEQ ID NO: 1333661 - RNA, 18 nt, Human
ucagcccucacacacccu

SEQ ID NO: 1333662 - RNA, 14 nt, Human
ucagauucuugcau

SEQ ID NO: 1333663 - RNA, 13 nt, Human
ucagauucuugca

SEQ ID NO: 1333664 - RNA, 15 nt, Human
ucagauuccuuccca

SEQ ID NO: 1333665 - RNA, 14 nt, Human
ucagauuccuuccc

SEQ ID NO: 1333666 - RNA, 16 nt, Human
ucagauuccuucccau

SEQ ID NO: 1333667 - RNA, 12 nt, Human
ucagauggaaaa

SEQ ID NO: 1333668 - RNA, 19 nt, Human
ucagauggaaaauucauuu

SEQ ID NO: 1333669 - RNA, 20 nt, Human
ucagauggaaaauucauuuu

SEQ ID NO: 1333670 - RNA, 19 nt, Human
ucagauucccagagcaaaa

SEQ ID NO: 1333671 - RNA, 21 nt, Human
ucagauucccagagcaaaaua

SEQ ID NO: 1333672 - RNA, 22 nt, Human
ucagauucccagagcaaaauaa

SEQ ID NO: 1333673 - RNA, 20 nt, Human
acccaggacaggauccaggc

SEQ ID NO: 1333674 - RNA, 17 nt, Human
acccaggacaggaucca

SEQ ID NO: 1333675 - RNA, 23 nt, Human
acccaggacuuauuuaaacucug

SEQ ID NO: 1333676 - RNA, 23 nt, Human
ucagcccuaggguggagagccac

SEQ ID NO: 1333677 - RNA, 16 nt, Human
ucagaauagaaauuag

SEQ ID NO: 1333678 - RNA, 14 nt, Human
acccagcccacccc

SEQ ID NO: 1333679 - RNA, 15 nt, Human
acccagcccaccccc

SEQ ID NO: 1333680 - RNA, 21 nt, Human
ucagaauagccacauuuggaa

SEQ ID NO: 1333681 - RNA, 22 nt, Human
ucagaauagccacauuuggaau

SEQ ID NO: 1333682 - RNA, 23 nt, Human
ucagaauagccacauuuggaaua

SEQ ID NO: 1333683 - RNA, 15 nt, Human
ucagaauaugucagu

SEQ ID NO: 1333684 - RNA, 16 nt, Human
acccagcccacccccg

SEQ ID NO: 1333685 - RNA, 18 nt, Human
ucagaaucccuuaacagu

SEQ ID NO: 1333686 - RNA, 14 nt, Human
acccagcaauagag

SEQ ID NO: 1333687 - RNA, 13 nt, Human
acccagccaggcc

SEQ ID NO: 1333688 - RNA, 14 nt, Human
acccagccaggccc

SEQ ID NO: 1333689 - RNA, 18 nt, Human
acccagccaggcccagcc

SEQ ID NO: 1333690 - RNA, 17 nt, Human
acccagccaggcccagc

SEQ ID NO: 1333691 - RNA, 23 nt, Human
ucagagaauuucuaccauuucag

SEQ ID NO: 1333692 - RNA, 22 nt, Human
ucagaauuagagcaugggaggu

SEQ ID NO: 1333693 - RNA, 19 nt, Human
ucagagacaucagcccuug

SEQ ID NO: 1333694 - RNA, 12 nt, Human
ucagagaccagg

SEQ ID NO: 1333695 - RNA, 15 nt, Human
ucagagacaugcaga

SEQ ID NO: 1333696 - RNA, 14 nt, Human
ucagagaccagggc

SEQ ID NO: 1333697 - RNA, 15 nt, Human
ucagagaccagggcu

SEQ ID NO: 1333698 - RNA, 16 nt, Human
ucagagaccagggcuc

SEQ ID NO: 1333699 - RNA, 20 nt, Human
ucagagaccagggcuccagc

SEQ ID NO: 1333700 - RNA, 21 nt, Human
ucagaugcugugcaaauguua

SEQ ID NO: 1333701 - RNA, 14 nt, Human
ucagaugcuccaag

SEQ ID NO: 1333702 - RNA, 15 nt, Human
ucagaugcuccaaga

SEQ ID NO: 1333703 - RNA, 16 nt, Human
ucagaugcuccaagau

SEQ ID NO: 1333704 - RNA, 18 nt, Human
ucagaugcuccaagauuc

SEQ ID NO: 1333705 - RNA, 19 nt, Human
ucagaugcuccaagauucu

SEQ ID NO: 1333706 - RNA, 20 nt, Human
ucagaugcuccaagauucua

SEQ ID NO: 1333707 - RNA, 22 nt, Human
ucagaugcuccaagauucuaga

SEQ ID NO: 1333708 - RNA, 20 nt, Human
ucagagccgugguccuuugg

SEQ ID NO: 1333709 - RNA, 19 nt, Human
ucagagagaauggcuuugg

SEQ ID NO: 1333710 - RNA, 12 nt, Human
ucagagagcagu

SEQ ID NO: 1333711 - RNA, 15 nt, Human
ucagagagcagugcu

SEQ ID NO: 1333712 - RNA, 20 nt, Human
ucagagagcagugcuuuugg

SEQ ID NO: 1333713 - RNA, 18 nt, Human
ucagagagcagugcuuuu

SEQ ID NO: 1333714 - RNA, 16 nt, Human
ucagagaggccuuuug

SEQ ID NO: 1333715 - RNA, 16 nt, Human
ucagagaugcaccacc

SEQ ID NO: 1333716 - RNA, 21 nt, Human
ucagagaugcaccaccaagcc

SEQ ID NO: 1333717 - RNA, 21 nt, Human
ucagagccaccccuaaagaga

SEQ ID NO: 1333718 - RNA, 22 nt, Human
ucagagaugcaccaccaagcca

SEQ ID NO: 1333719 - RNA, 19 nt, Human
ucagagcaggugcuggcuc

SEQ ID NO: 1333720 - RNA, 22 nt, Human
ucagagccaugucuucucccug

SEQ ID NO: 1333721 - RNA, 16 nt, Human
ucagagccgugguccu

SEQ ID NO: 1333722 - RNA, 20 nt, Human
acccucaugcugugugacuc

SEQ ID NO: 1333723 - RNA, 17 nt, Human
acccucauucuacugaa

SEQ ID NO: 1333724 - RNA, 15 nt, Human
acccgggaggcagag

SEQ ID NO: 1333725 - RNA, 22 nt, Human
acccuccccaaaggcuuugccc

SEQ ID NO: 1333726 - RNA, 23 nt, Human
acccuccccgcaccccccaagcu

SEQ ID NO: 1333727 - RNA, 17 nt, Human
acccucccucccuaccc

SEQ ID NO: 1333728 - RNA, 11 nt, Human
acccucccucc

SEQ ID NO: 1333729 - RNA, 15 nt, Human
acccggaggggccug

SEQ ID NO: 1333730 - RNA, 17 nt, Human
acccugaccagcucccc

SEQ ID NO: 1333731 - RNA, 13 nt, Human
acccugaccuggc

SEQ ID NO: 1333732 - RNA, 16 nt, Human
acccugaccuggcccc

SEQ ID NO: 1333733 - RNA, 20 nt, Human
acccugaccuggcccccuca

SEQ ID NO: 1333734 - RNA, 12 nt, Human
acccugagccgg

SEQ ID NO: 1333735 - RNA, 22 nt, Human
acccugagcugaccagccguga

SEQ ID NO: 1333736 - RNA, 17 nt, Human
acccugagcugaggcag

SEQ ID NO: 1333737 - RNA, 22 nt, Human
acccugagcugaggcagcagug

SEQ ID NO: 1333738 - RNA, 23 nt, Human
acccugagcugaggcagcagugu

SEQ ID NO: 1333739 - RNA, 13 nt, Human
acccugaggaguc

SEQ ID NO: 1333740 - RNA, 14 nt, Human
acccugaggagucu

SEQ ID NO: 1333741 - RNA, 17 nt, Human
acccugaggagucugag

SEQ ID NO: 1333742 - RNA, 19 nt, Human
acccugaggagucugaggu

SEQ ID NO: 1333743 - RNA, 22 nt, Human
acccugaggagucugagguccu

SEQ ID NO: 1333744 - RNA, 23 nt, Human
acccugaggagucugagguccug

SEQ ID NO: 1333745 - RNA, 16 nt, Human
acccugaguugcuuuu

SEQ ID NO: 1333746 - RNA, 19 nt, Human
acccugauaggaagagggg

SEQ ID NO: 1333747 - RNA, 19 nt, Human
acccugaguugcuuuucag

SEQ ID NO: 1333748 - RNA, 20 nt, Human
acccugauuuaggagaagcc

SEQ ID NO: 1333749 - RNA, 22 nt, Human
acccugauuuaggagaagccag

SEQ ID NO: 1333750 - RNA, 23 nt, Human
acccugauuuaggagaagccagg

SEQ ID NO: 1333751 - RNA, 17 nt, Human
acccugccccagcuggg

SEQ ID NO: 1333752 - RNA, 13 nt, Human
acccugccucucc

SEQ ID NO: 1333753 - RNA, 16 nt, Human
acccugccucucccag

SEQ ID NO: 1333754 - RNA, 20 nt, Human
acccugccucucccaggcag

SEQ ID NO: 1333755 - RNA, 14 nt, Human
acccugccuuaucu

SEQ ID NO: 1333756 - RNA, 18 nt, Human
acccugccuuaucuugca

SEQ ID NO: 1333757 - RNA, 13 nt, Human
ucaggccacuuga

SEQ ID NO: 1333758 - RNA, 14 nt, Human
ucaggccagagcca

SEQ ID NO: 1333759 - RNA, 17 nt, Human
ucaggccagagccaagg

SEQ ID NO: 1333760 - RNA, 12 nt, Human
acccccagccug

SEQ ID NO: 1333761 - RNA, 12 nt, Human
acccccagcacu

SEQ ID NO: 1333762 - RNA, 13 nt, Human
ucaggcagcucaa

SEQ ID NO: 1333763 - RNA, 16 nt, Human
ucaggcaggggccucc

SEQ ID NO: 1333764 - RNA, 17 nt, Human
ucaggcaggggccucca

SEQ ID NO: 1333765 - RNA, 21 nt, Human
ucaggcaggggccuccauggg

SEQ ID NO: 1333766 - RNA, 18 nt, Human
ucagguaaucgaccugcc

SEQ ID NO: 1333767 - RNA, 19 nt, Human
ucagguaaucgaccugccu

SEQ ID NO: 1333768 - RNA, 20 nt, Human
ucagguaaucgaccugccuc

SEQ ID NO: 1333769 - RNA, 15 nt, Human
acccgccccacuccc

SEQ ID NO: 1333770 - RNA, 23 nt, Human
acccgauuccaccaaaugugcuu

SEQ ID NO: 1333771 - RNA, 21 nt, Human
ucagguaaucgaccugccucg

SEQ ID NO: 1333772 - RNA, 14 nt, Human
ucagguacuuguaa

SEQ ID NO: 1333773 - RNA, 17 nt, Human
ucagguauaccucacuu

SEQ ID NO: 1333774 - RNA, 15 nt, Human
ucagguauaccucac

SEQ ID NO: 1333775 - RNA, 17 nt, Human
ucagggggcgccugugg

SEQ ID NO: 1333776 - RNA, 20 nt, Human
ucaggggucugagcuccagc

SEQ ID NO: 1333777 - RNA, 21 nt, Human
accgaacugauguaaguaaac

SEQ ID NO: 1333778 - RNA, 16 nt, Human
acccuugcugugaauu

SEQ ID NO: 1333779 - RNA, 14 nt, Human
acccuggacccagc

SEQ ID NO: 1333780 - RNA, 23 nt, Human
acccugccucucccaggcagggg

SEQ ID NO: 1333781 - RNA, 18 nt, Human
acccugcucauccacucu

SEQ ID NO: 1333782 - RNA, 16 nt, Human
acccuugggccagaag

SEQ ID NO: 1333783 - RNA, 17 nt, Human
acccuugggccagaagu

SEQ ID NO: 1333784 - RNA, 18 nt, Human
acccuugggccagaagua

SEQ ID NO: 1333785 - RNA, 20 nt, Human
acccuugggccagaaguacc

SEQ ID NO: 1333786 - RNA, 17 nt, Human
acccuugguuccuaacu

SEQ ID NO: 1333787 - RNA, 14 nt, Human
ucagguguugccaa

SEQ ID NO: 1333788 - RNA, 22 nt, Human
ucagguugucugaagucacugc

SEQ ID NO: 1333789 - RNA, 22 nt, Human
ucagguuuuuccuuuuuuugua

SEQ ID NO: 1333790 - RNA, 17 nt, Human
ucaguaaauaacuggaa

SEQ ID NO: 1333791 - RNA, 18 nt, Human
ucaguaaauaacuggaaa

SEQ ID NO: 1333792 - RNA, 12 nt, Human
ucaguaagaggu

SEQ ID NO: 1333793 - RNA, 18 nt, Human
ucaguaauuuagaaauca

SEQ ID NO: 1333794 - RNA, 19 nt, Human
ucaguaauuuagaaaucau

SEQ ID NO: 1333795 - RNA, 20 nt, Human
ucaguaauuuagaaaucauu

SEQ ID NO: 1333796 - RNA, 14 nt, Human
ucaguaauuugagg

SEQ ID NO: 1333797 - RNA, 15 nt, Human
ucaguaauuugagga

SEQ ID NO: 1333798 - RNA, 17 nt, Human
ucaguaauuugaggaca

SEQ ID NO: 1333799 - RNA, 18 nt, Human
ucaguaauuugaggacaa

SEQ ID NO: 1333800 - RNA, 18 nt, Human
ucaguaauuuguuuaaaa

SEQ ID NO: 1333801 - RNA, 16 nt, Human
ucaguacccucucagc

SEQ ID NO: 1333802 - RNA, 17 nt, Human
ucaguacccucucagcu

SEQ ID NO: 1333803 - RNA, 19 nt, Human
ucaguacccucucagcucc

SEQ ID NO: 1333804 - RNA, 17 nt, Human
ucaguagauugcagaaa

SEQ ID NO: 1333805 - RNA, 23 nt, Human
ucaguaggugcccagaauaaguu

SEQ ID NO: 1333806 - RNA, 18 nt, Human
ucauaaauaaaguuuguu

SEQ ID NO: 1333807 - RNA, 24 nt, Human
ucauaaagcaggcagaacucaucu

SEQ ID NO: 1333808 - RNA, 18 nt, Human
ucauaagauauuuuucau

SEQ ID NO: 1333809 - RNA, 21 nt, Human
ucauaagauauuuuucaugau

SEQ ID NO: 1333810 - RNA, 14 nt, Human
ucauaaggcuucaa

SEQ ID NO: 1333811 - RNA, 15 nt, Human
ucauaaggcuucaaa

SEQ ID NO: 1333812 - RNA, 20 nt, Human
ucauaaguauuaugucucuu

SEQ ID NO: 1333813 - RNA, 15 nt, Human
ucauaaguauuucaa

SEQ ID NO: 1333814 - RNA, 20 nt, Human
ucauaaguauuucaaauugg

SEQ ID NO: 1333815 - RNA, 15 nt, Human
ucaguuguucuuuuu

SEQ ID NO: 1333816 - RNA, 19 nt, Human
ucaguuuaaaagcacgaca

SEQ ID NO: 1333817 - RNA, 17 nt, Human
ucaguuucacagaaaau

SEQ ID NO: 1333818 - RNA, 18 nt, Human
ucaguuucacagaaaaua

SEQ ID NO: 1333819 - RNA, 19 nt, Human
ucaguuucacagaaaauaa

SEQ ID NO: 1333820 - RNA, 14 nt, Human
ucaguuucauaaaa

SEQ ID NO: 1333821 - RNA, 19 nt, Human
ucaguuucauaaaaggaga

SEQ ID NO: 1333822 - RNA, 15 nt, Human
ucaguuugugugucu

SEQ ID NO: 1333823 - RNA, 16 nt, Human
ucaguuugugugucuu

SEQ ID NO: 1333824 - RNA, 17 nt, Human
ucaguuugugugucuua

SEQ ID NO: 1333825 - RNA, 15 nt, Human
ucagugcuucgcaga

SEQ ID NO: 1333826 - RNA, 14 nt, Human
ucagugcugugcug

SEQ ID NO: 1333827 - RNA, 16 nt, Human
ucagugcugugcugug

SEQ ID NO: 1333828 - RNA, 22 nt, Human
ucagugcugugcugugcuaugg

SEQ ID NO: 1333829 - RNA, 12 nt, Human
ucagugcucccu

SEQ ID NO: 1333830 - RNA, 13 nt, Human
ucagugcucccuc

SEQ ID NO: 1333831 - RNA, 19 nt, Human
ucagugcucccucacaugu

SEQ ID NO: 1333832 - RNA, 13 nt, Human
ucagugcugugcu

SEQ ID NO: 1333833 - RNA, 15 nt, Human
ucaguagucccugca

SEQ ID NO: 1333834 - RNA, 14 nt, Human
ucaguauuauaugu

SEQ ID NO: 1333835 - RNA, 15 nt, Human
ucaguauuauaugua

SEQ ID NO: 1333836 - RNA, 16 nt, Human
ucaguauuauauguac

SEQ ID NO: 1333837 - RNA, 21 nt, Human
uccugaaaacccuugccaugu

SEQ ID NO: 1333838 - RNA, 22 nt, Human
uccugaaaacccuugccaugug

SEQ ID NO: 1333839 - RNA, 18 nt, Human
uccucuuuuccuucccaa

SEQ ID NO: 1333840 - RNA, 13 nt, Human
uccugaagaacca

SEQ ID NO: 1333841 - RNA, 14 nt, Human
uccugaagaaccag

SEQ ID NO: 1333842 - RNA, 16 nt, Human
uccugaagaaccaguc

SEQ ID NO: 1333843 - RNA, 18 nt, Human
uccugaagaaccaguccc

SEQ ID NO: 1333844 - RNA, 23 nt, Human
uccugaagaaccaguccccccac

SEQ ID NO: 1333845 - RNA, 17 nt, Human
uccucuuucagcuccug

SEQ ID NO: 1333846 - RNA, 12 nt, Human
uccucuuucagc

SEQ ID NO: 1333847 - RNA, 13 nt, Human
uccucuuucagcu

SEQ ID NO: 1333848 - RNA, 14 nt, Human
uccucuuucagcuc

SEQ ID NO: 1333849 - RNA, 15 nt, Human
uccucuuucagcucc

SEQ ID NO: 1333850 - RNA, 16 nt, Human
uccucuuucagcuccu

SEQ ID NO: 1333851 - RNA, 19 nt, Human
uccucuugccacugccucu

SEQ ID NO: 1333852 - RNA, 21 nt, Human
uccucugcugaccugcugacc

SEQ ID NO: 1333853 - RNA, 16 nt, Human
uccucugcccgggagc

SEQ ID NO: 1333854 - RNA, 22 nt, Human
uccucugcccgggagcucagga

SEQ ID NO: 1333855 - RNA, 14 nt, Human
uccucugaggcuga

SEQ ID NO: 1333856 - RNA, 18 nt, Human
uccucugacucagggcuc

SEQ ID NO: 1333857 - RNA, 12 nt, Human
uccucugcacuc

SEQ ID NO: 1333858 - RNA, 16 nt, Human
uccucugcacucccac

SEQ ID NO: 1333859 - RNA, 18 nt, Human
acugaaaauauuguuuua

SEQ ID NO: 1333860 - RNA, 20 nt, Human
acugaaaaggaggggucugg

SEQ ID NO: 1333861 - RNA, 15 nt, Human
acugaaaaugugcua

SEQ ID NO: 1333862 - RNA, 17 nt, Human
acugaaaauuauuuaaa

SEQ ID NO: 1333863 - RNA, 19 nt, Human
acugaaaaugugcuauacu

SEQ ID NO: 1333864 - RNA, 19 nt, Human
acucuuucuuucaauaaaa

SEQ ID NO: 1333865 - RNA, 13 nt, Human
acucuuugagaaa

SEQ ID NO: 1333866 - RNA, 21 nt, Human
acucuuucuguauauacuuuu

SEQ ID NO: 1333867 - RNA, 22 nt, Human
acucuuucuguauauacuuuuu

SEQ ID NO: 1333868 - RNA, 16 nt, Human
acucuuugagaaacaa

SEQ ID NO: 1333869 - RNA, 18 nt, Human
acucuuugagaaacaaca

SEQ ID NO: 1333870 - RNA, 12 nt, Human
acucuuugagag

SEQ ID NO: 1333871 - RNA, 15 nt, Human
acucuuugcugcugc

SEQ ID NO: 1333872 - RNA, 14 nt, Human
acucuuuggucguu

SEQ ID NO: 1333873 - RNA, 19 nt, Human
acucuuuggucguuuuuuu

SEQ ID NO: 1333874 - RNA, 21 nt, Human
uccugaccccaaguuauccac

SEQ ID NO: 1333875 - RNA, 15 nt, Human
uccugaccucaggca

SEQ ID NO: 1333876 - RNA, 16 nt, Human
uccugaccucagguga

SEQ ID NO: 1333877 - RNA, 15 nt, Human
uccugaccuccgcca

SEQ ID NO: 1333878 - RNA, 16 nt, Human
uccugaccuccgccau

SEQ ID NO: 1333879 - RNA, 20 nt, Human
uccugaccuccgccauccac

SEQ ID NO: 1333880 - RNA, 14 nt, Human
acucuuucuguaua

SEQ ID NO: 1333881 - RNA, 22 nt, Human
uccugaauccaaacuaauccau

SEQ ID NO: 1333882 - RNA, 17 nt, Human
uccugaaggccugaggu

SEQ ID NO: 1333883 - RNA, 11 nt, Human
uccugaccagc

SEQ ID NO: 1333884 - RNA, 14 nt, Human
uccugaccaguugc

SEQ ID NO: 1333885 - RNA, 22 nt, Human
uccugaccaguugcagucacuc

SEQ ID NO: 1333886 - RNA, 21 nt, Human
uccugaccaguugcagucacu

SEQ ID NO: 1333887 - RNA, 17 nt, Human
uccucuccccaugaugu

SEQ ID NO: 1333888 - RNA, 21 nt, Human
uccucuccccagcccagagac

SEQ ID NO: 1333889 - RNA, 23 nt, Human
uccucuccccagcccagagacau

SEQ ID NO: 1333890 - RNA, 13 nt, Human
uccucuccugucu

SEQ ID NO: 1333891 - RNA, 17 nt, Human
uccucuccuagccccug

SEQ ID NO: 1333892 - RNA, 17 nt, Human
uccucuccacugccuuc

SEQ ID NO: 1333893 - RNA, 18 nt, Human
uccucuccacugccuucg

SEQ ID NO: 1333894 - RNA, 12 nt, Human
uccucucugccc

SEQ ID NO: 1333895 - RNA, 13 nt, Human
uccucucugcccu

SEQ ID NO: 1333896 - RNA, 14 nt, Human
uccucucugcccua

SEQ ID NO: 1333897 - RNA, 15 nt, Human
uccucucugcccuaa

SEQ ID NO: 1333898 - RNA, 15 nt, Human
uccucucgcggcccu

SEQ ID NO: 1333899 - RNA, 19 nt, Human
uccucucgcggcccucagu

SEQ ID NO: 1333900 - RNA, 17 nt, Human
uccucucgcggcccuca

SEQ ID NO: 1333901 - RNA, 16 nt, Human
uccucucucuguguua

SEQ ID NO: 1333902 - RNA, 12 nt, Human
uccucugagccu

SEQ ID NO: 1333903 - RNA, 16 nt, Human
uccucugacucagggc

SEQ ID NO: 1333904 - RNA, 17 nt, Human
uccucugacucagggcu

SEQ ID NO: 1333905 - RNA, 13 nt, Human
uccucugagccuu

SEQ ID NO: 1333906 - RNA, 17 nt, Human
uccucugagccuuggga

SEQ ID NO: 1333907 - RNA, 14 nt, Human
uccucucuuccucu

SEQ ID NO: 1333908 - RNA, 17 nt, Human
uccucucuuccucuucc

SEQ ID NO: 1333909 - RNA, 15 nt, Human
uccucugacucaggg

SEQ ID NO: 1333910 - RNA, 20 nt, Human
uccucccacuucagccuccc

SEQ ID NO: 1333911 - RNA, 19 nt, Human
acucuucuugaaauuuuaa

SEQ ID NO: 1333912 - RNA, 21 nt, Human
uccuccccacuuguccgcugg

SEQ ID NO: 1333913 - RNA, 19 nt, Human
uccuccccuccagcucccu

SEQ ID NO: 1333914 - RNA, 11 nt, Human
uccucccugua

SEQ ID NO: 1333915 - RNA, 12 nt, Human
uccucccuguaa

SEQ ID NO: 1333916 - RNA, 14 nt, Human
uccucccuguaacu

SEQ ID NO: 1333917 - RNA, 15 nt, Human
uccucccuguaacuu

SEQ ID NO: 1333918 - RNA, 14 nt, Human
uccucccuuccucc

SEQ ID NO: 1333919 - RNA, 19 nt, Human
acucuugaaaaaugcaugu

SEQ ID NO: 1333920 - RNA, 14 nt, Human
acucuugaaaaaug

SEQ ID NO: 1333921 - RNA, 21 nt, Human
acucuugaaaaaugcauguug

SEQ ID NO: 1333922 - RNA, 23 nt, Human
acucguguguuucuauuuuuuga

SEQ ID NO: 1333923 - RNA, 13 nt, Human
acucuauucuuua

SEQ ID NO: 1333924 - RNA, 15 nt, Human
acucguguguuucua

SEQ ID NO: 1333925 - RNA, 19 nt, Human
acucguauagcaugcaucu

SEQ ID NO: 1333926 - RNA, 15 nt, Human
acucuauucuuuaac

SEQ ID NO: 1333927 - RNA, 14 nt, Human
acucuauucuuuaa

SEQ ID NO: 1333928 - RNA, 22 nt, Human
acucgugucuggcacagccugg

SEQ ID NO: 1333929 - RNA, 23 nt, Human
acucgugucuggcacagccuggc

SEQ ID NO: 1333930 - RNA, 14 nt, Human
acucguauaugucu

SEQ ID NO: 1333931 - RNA, 15 nt, Human
acucgucucccccaa

SEQ ID NO: 1333932 - RNA, 14 nt, Human
acucgguuucucca

SEQ ID NO: 1333933 - RNA, 16 nt, Human
acucgguuucuccaaa

SEQ ID NO: 1333934 - RNA, 11 nt, Human
acucugcucug

SEQ ID NO: 1333935 - RNA, 18 nt, Human
acucugacaacagacuuc

SEQ ID NO: 1333936 - RNA, 20 nt, Human
acucugacaacagacuucug

SEQ ID NO: 1333937 - RNA, 22 nt, Human
acucugacaacagacuucugaa

SEQ ID NO: 1333938 - RNA, 23 nt, Human
acucugacaacagacuucugaaa

SEQ ID NO: 1333939 - RNA, 17 nt, Human
acucugacaacagacuu

SEQ ID NO: 1333940 - RNA, 17 nt, Human
acucucagucucugagc

SEQ ID NO: 1333941 - RNA, 18 nt, Human
acucucagucucugagca

SEQ ID NO: 1333942 - RNA, 22 nt, Human
acucucaggaccaaagcuuuca

SEQ ID NO: 1333943 - RNA, 13 nt, Human
acucucagucucu

SEQ ID NO: 1333944 - RNA, 14 nt, Human
acucucagucucug

SEQ ID NO: 1333945 - RNA, 16 nt, Human
acucucagucucugag

SEQ ID NO: 1333946 - RNA, 13 nt, Human
acucuugaaaaau

SEQ ID NO: 1333947 - RNA, 15 nt, Human
acucuucuugaaauu

SEQ ID NO: 1333948 - RNA, 16 nt, Human
acucuucuugaaauuu

SEQ ID NO: 1333949 - RNA, 23 nt, Human
acucuucugagcaccuacuuaca

SEQ ID NO: 1333950 - RNA, 19 nt, Human
acucuucaaggucugcuuu

SEQ ID NO: 1333951 - RNA, 16 nt, Human
acucuucacucuucaa

SEQ ID NO: 1333952 - RNA, 20 nt, Human
acucuucaaggucugcuuuu

SEQ ID NO: 1333953 - RNA, 20 nt, Human
acucuucaguuaagccuuug

SEQ ID NO: 1333954 - RNA, 21 nt, Human
acucuucaguuaagccuuugg

SEQ ID NO: 1333955 - RNA, 15 nt, Human
acucuucacucuuca

SEQ ID NO: 1333956 - RNA, 14 nt, Human
acucuucccucucu

SEQ ID NO: 1333957 - RNA, 12 nt, Human
acucugcucuga

SEQ ID NO: 1333958 - RNA, 13 nt, Human
acucugcucugau

SEQ ID NO: 1333959 - RNA, 14 nt, Human
acucugcucugaug

SEQ ID NO: 1333960 - RNA, 15 nt, Human
acucugcucugaugc

SEQ ID NO: 1333961 - RNA, 16 nt, Human
acucugcucugaugca

SEQ ID NO: 1333962 - RNA, 12 nt, Human
acucugcuucuc

SEQ ID NO: 1333963 - RNA, 14 nt, Human
acucugcuucucug

SEQ ID NO: 1333964 - RNA, 15 nt, Human
acucugcuucucuga

SEQ ID NO: 1333965 - RNA, 14 nt, Human
acucugcuguuuga

SEQ ID NO: 1333966 - RNA, 16 nt, Human
acucugcuucucugac

SEQ ID NO: 1333967 - RNA, 15 nt, Human
acucuucaaaugccu

SEQ ID NO: 1333968 - RNA, 14 nt, Human
acuccagaaaguga

SEQ ID NO: 1333969 - RNA, 18 nt, Human
acuccagaaagugacaag

SEQ ID NO: 1333970 - RNA, 13 nt, Human
acuccaccuuccc

SEQ ID NO: 1333971 - RNA, 19 nt, Human
uccggcagcuucugccccc

SEQ ID NO: 1333972 - RNA, 19 nt, Human
uccggcauggacaauggac

SEQ ID NO: 1333973 - RNA, 13 nt, Human
uccggcauggaca

SEQ ID NO: 1333974 - RNA, 21 nt, Human
uccgugcuuaaccaaagaagc

SEQ ID NO: 1333975 - RNA, 14 nt, Human
uccgugcuuaacca

SEQ ID NO: 1333976 - RNA, 16 nt, Human
uccgugggacggugcc

SEQ ID NO: 1333977 - RNA, 23 nt, Human
uccgugggacggugcccaagcca

SEQ ID NO: 1333978 - RNA, 17 nt, Human
uccgugggacggugccc

SEQ ID NO: 1333979 - RNA, 16 nt, Human
uccguguccaccccca

SEQ ID NO: 1333980 - RNA, 16 nt, Human
uccgugugggagaccg

SEQ ID NO: 1333981 - RNA, 15 nt, Human
uccguuagcuccugu

SEQ ID NO: 1333982 - RNA, 16 nt, Human
uccguuagcuccugug

SEQ ID NO: 1333983 - RNA, 17 nt, Human
uccguuagcuccugugg

SEQ ID NO: 1333984 - RNA, 19 nt, Human
uccguuagcuccuguggcc

SEQ ID NO: 1333985 - RNA, 15 nt, Human
uccguguccaccccc

SEQ ID NO: 1333986 - RNA, 15 nt, Human
uccuaccucaaaauu

SEQ ID NO: 1333987 - RNA, 12 nt, Human
acuccuuccugc

SEQ ID NO: 1333988 - RNA, 14 nt, Human
acuccuuucucauc

SEQ ID NO: 1333989 - RNA, 14 nt, Human
acuccuuuuaaaga

SEQ ID NO: 1333990 - RNA, 23 nt, Human
acuccuuuuaaagaaaaaaauug

SEQ ID NO: 1333991 - RNA, 15 nt, Human
acucgaaucugugug

SEQ ID NO: 1333992 - RNA, 15 nt, Human
acuccugugggagcc

SEQ ID NO: 1333993 - RNA, 16 nt, Human
acuccugugggagccu

SEQ ID NO: 1333994 - RNA, 17 nt, Human
acuccugugggagccuc

SEQ ID NO: 1333995 - RNA, 18 nt, Human
acuccugugggagccucg

SEQ ID NO: 1333996 - RNA, 20 nt, Human
acuccugugggagccucgca

SEQ ID NO: 1333997 - RNA, 19 nt, Human
acuccugugggagccucgc

SEQ ID NO: 1333998 - RNA, 20 nt, Human
acuccuucaacaauucuaaa

SEQ ID NO: 1333999 - RNA, 22 nt, Human
acuccuucaacaauucuaaaau

SEQ ID NO: 1334000 - RNA, 12 nt, Human
acuccuuccagc

SEQ ID NO: 1334001 - RNA, 13 nt, Human
acuccuuccagcu

SEQ ID NO: 1334002 - RNA, 11 nt, Human
acuccuuccug

SEQ ID NO: 1334003 - RNA, 13 nt, Human
acuccuuccugcc

SEQ ID NO: 1334004 - RNA, 13 nt, Human
uccuaccgucuuu

SEQ ID NO: 1334005 - RNA, 21 nt, Human
acuccaaacugacucuuaaga

SEQ ID NO: 1334006 - RNA, 23 nt, Human
acucauuuuucaugauaaugaac

SEQ ID NO: 1334007 - RNA, 20 nt, Human
acucauuuuucaugauaaug

SEQ ID NO: 1334008 - RNA, 13 nt, Human
acuccaaaauguu

SEQ ID NO: 1334009 - RNA, 22 nt, Human
acuccaaaauguuggucauuuu

SEQ ID NO: 1334010 - RNA, 22 nt, Human
acuccaaacagaccccuguuca

SEQ ID NO: 1334011 - RNA, 19 nt, Human
acuccaaacagaccccugu

SEQ ID NO: 1334012 - RNA, 13 nt, Human
acucaucuuuccc

SEQ ID NO: 1334013 - RNA, 16 nt, Human
acucaucuuucccucc

SEQ ID NO: 1334014 - RNA, 19 nt, Human
acucauuuuucaugauaau

SEQ ID NO: 1334015 - RNA, 23 nt, Human
acucaucuagguaaauuacaguu

SEQ ID NO: 1334016 - RNA, 22 nt, Human
acucagauaagguaaaaugcca

SEQ ID NO: 1334017 - RNA, 18 nt, Human
acucagacauuggcaccu

SEQ ID NO: 1334018 - RNA, 12 nt, Human
acucagaccuga

SEQ ID NO: 1334019 - RNA, 14 nt, Human
acucagagacaugc

SEQ ID NO: 1334020 - RNA, 17 nt, Human
acucagagacaugcaga

SEQ ID NO: 1334021 - RNA, 20 nt, Human
acucagagacaugcagagau

SEQ ID NO: 1334022 - RNA, 22 nt, Human
acucaccugcacuaacagagug

SEQ ID NO: 1334023 - RNA, 13 nt, Human
acucagaagccug

SEQ ID NO: 1334024 - RNA, 14 nt, Human
acucagaagccugg

SEQ ID NO: 1334025 - RNA, 15 nt, Human
acucagaagccuggg

SEQ ID NO: 1334026 - RNA, 16 nt, Human
acucagaagccugggg

SEQ ID NO: 1334027 - RNA, 17 nt, Human
acucagaagccuggggg

SEQ ID NO: 1334028 - RNA, 21 nt, Human
acucagaagccugggggccug

SEQ ID NO: 1334029 - RNA, 22 nt, Human
acucagaagccugggggccugg

SEQ ID NO: 1334030 - RNA, 23 nt, Human
acucagaagccugggggccuggc

SEQ ID NO: 1334031 - RNA, 23 nt, Human
ucccucuuccuucccugcuguga

SEQ ID NO: 1334032 - RNA, 22 nt, Human
ucccucuuccuucccugcugug

SEQ ID NO: 1334033 - RNA, 23 nt, Human
ucccucccagaggagccaccagu

SEQ ID NO: 1334034 - RNA, 12 nt, Human
ucccuccccccc

SEQ ID NO: 1334035 - RNA, 14 nt, Human
ucccucccccccau

SEQ ID NO: 1334036 - RNA, 16 nt, Human
ucccucccccccaugc

SEQ ID NO: 1334037 - RNA, 21 nt, Human
ucccucccccccaugcacugu

SEQ ID NO: 1334038 - RNA, 12 nt, Human
ucccucccccuu

SEQ ID NO: 1334039 - RNA, 14 nt, Human
ucccucccccuugu

SEQ ID NO: 1334040 - RNA, 19 nt, Human
ucccucacucgucuccccc

SEQ ID NO: 1334041 - RNA, 20 nt, Human
ucccucacucgucuccccca

SEQ ID NO: 1334042 - RNA, 22 nt, Human
ucccucacucgucucccccaac

SEQ ID NO: 1334043 - RNA, 21 nt, Human
ucccucacucgucucccccaa

SEQ ID NO: 1334044 - RNA, 22 nt, Human
ucccucaccuuggcaccagaca

SEQ ID NO: 1334045 - RNA, 13 nt, Human
uccccugcacugu

SEQ ID NO: 1334046 - RNA, 18 nt, Human
ucccucacucgucucccc

SEQ ID NO: 1334047 - RNA, 12 nt, Human
ucccucagacug

SEQ ID NO: 1334048 - RNA, 14 nt, Human
ucccucagacuggg

SEQ ID NO: 1334049 - RNA, 16 nt, Human
ucccucagacuggggc

SEQ ID NO: 1334050 - RNA, 22 nt, Human
ucccugacucauucugaaggag

SEQ ID NO: 1334051 - RNA, 19 nt, Human
acucaccucccccaucucu

SEQ ID NO: 1334052 - RNA, 20 nt, Human
acucaccucccccaucucuu

SEQ ID NO: 1334053 - RNA, 14 nt, Human
ucccugacucauuc

SEQ ID NO: 1334054 - RNA, 16 nt, Human
ucccugacucauucug

SEQ ID NO: 1334055 - RNA, 19 nt, Human
ucccugacucauucugaag

SEQ ID NO: 1334056 - RNA, 18 nt, Human
ucccucuuuggcuccccu

SEQ ID NO: 1334057 - RNA, 23 nt, Human
ucccucuuuggcuccccuguacc

SEQ ID NO: 1334058 - RNA, 20 nt, Human
acuagaguuuagcuggaaaa

SEQ ID NO: 1334059 - RNA, 14 nt, Human
acuagaggugagaa

SEQ ID NO: 1334060 - RNA, 18 nt, Human
acuagaggugagaaauuu

SEQ ID NO: 1334061 - RNA, 21 nt, Human
acuagaggugagaaauuuaaa

SEQ ID NO: 1334062 - RNA, 15 nt, Human
acuagagucugaaca

SEQ ID NO: 1334063 - RNA, 12 nt, Human
acuagacaagcc

SEQ ID NO: 1334064 - RNA, 15 nt, Human
acuagacaagccaga

SEQ ID NO: 1334065 - RNA, 17 nt, Human
acuagacaagccagaac

SEQ ID NO: 1334066 - RNA, 21 nt, Human
acuagacaagccagaacuuga

SEQ ID NO: 1334067 - RNA, 17 nt, Human
acuagacaccaaaguuc

SEQ ID NO: 1334068 - RNA, 18 nt, Human
acuagacaccaaaguucu

SEQ ID NO: 1334069 - RNA, 20 nt, Human
acuagacaccaaaguucuaa

SEQ ID NO: 1334070 - RNA, 23 nt, Human
acuacuucuuuuuucaaaagaaa

SEQ ID NO: 1334071 - RNA, 17 nt, Human
acuacuugggagcaccg

SEQ ID NO: 1334072 - RNA, 12 nt, Human
acuacuuuauaa

SEQ ID NO: 1334073 - RNA, 14 nt, Human
acuacuagggaaau

SEQ ID NO: 1334074 - RNA, 16 nt, Human
acuacuuugcugcuaa

SEQ ID NO: 1334075 - RNA, 13 nt, Human
acuacgccuggcu

SEQ ID NO: 1334076 - RNA, 19 nt, Human
acuacuaauagaauaaagg

SEQ ID NO: 1334077 - RNA, 17 nt, Human
acuaccuugaaaauaag

SEQ ID NO: 1334078 - RNA, 18 nt, Human
acuaccuugguuccccca

SEQ ID NO: 1334079 - RNA, 23 nt, Human
ucccccagcaaagcccccagagc

SEQ ID NO: 1334080 - RNA, 16 nt, Human
uccccacucugcucug

SEQ ID NO: 1334081 - RNA, 17 nt, Human
uccccacucugcucuga

SEQ ID NO: 1334082 - RNA, 20 nt, Human
uccccacucugcucugaugc

SEQ ID NO: 1334083 - RNA, 18 nt, Human
uccccacucugcucugau

SEQ ID NO: 1334084 - RNA, 12 nt, Human
uccccacuggag

SEQ ID NO: 1334085 - RNA, 13 nt, Human
uccccacuggagc

SEQ ID NO: 1334086 - RNA, 14 nt, Human
uccccacuggagca

SEQ ID NO: 1334087 - RNA, 15 nt, Human
uccccacuggagcag

SEQ ID NO: 1334088 - RNA, 15 nt, Human
uccccacuguaucua

SEQ ID NO: 1334089 - RNA, 19 nt, Human
uccccacuguaucuaggca

SEQ ID NO: 1334090 - RNA, 23 nt, Human
uccccauacuccuaugaucugag

SEQ ID NO: 1334091 - RNA, 18 nt, Human
uccccaucguugccccca

SEQ ID NO: 1334092 - RNA, 22 nt, Human
uccccaucguugcccccauuuc

SEQ ID NO: 1334093 - RNA, 13 nt, Human
uccccaucucagg

SEQ ID NO: 1334094 - RNA, 14 nt, Human
uccccaucucaggc

SEQ ID NO: 1334095 - RNA, 14 nt, Human
uccccaucuucuaa

SEQ ID NO: 1334096 - RNA, 10 nt, Human
ucccccaaga

SEQ ID NO: 1334097 - RNA, 12 nt, Human
ucccccacuuuc

SEQ ID NO: 1334098 - RNA, 21 nt, Human
ucccccagcaaagcccccaga

SEQ ID NO: 1334099 - RNA, 22 nt, Human
ucccccagcaaagcccccagag

SEQ ID NO: 1334100 - RNA, 16 nt, Human
acuauguaaacuacuu

SEQ ID NO: 1334101 - RNA, 14 nt, Human
acuauguaaacuac

SEQ ID NO: 1334102 - RNA, 14 nt, Human
acuauguaacaugu

SEQ ID NO: 1334103 - RNA, 12 nt, Human
acuauguaaacu

SEQ ID NO: 1334104 - RNA, 11 nt, Human
acuauguaaac

SEQ ID NO: 1334105 - RNA, 14 nt, Human
acuauguggaugug

SEQ ID NO: 1334106 - RNA, 13 nt, Human
acuauguugauaa

SEQ ID NO: 1334107 - RNA, 15 nt, Human
acuaugauuuggaaa

SEQ ID NO: 1334108 - RNA, 15 nt, Human
acuaugauuauuaac

SEQ ID NO: 1334109 - RNA, 19 nt, Human
acuaugauuuaauuugaaa

SEQ ID NO: 1334110 - RNA, 16 nt, Human
acuaugauuuggaaaa

SEQ ID NO: 1334111 - RNA, 20 nt, Human
acuaugcauggugccccagg

SEQ ID NO: 1334112 - RNA, 21 nt, Human
acuaugcauggugccccagga

SEQ ID NO: 1334113 - RNA, 22 nt, Human
acuaugcauggugccccaggac

SEQ ID NO: 1334114 - RNA, 23 nt, Human
acuaugcauggugccccaggacc

SEQ ID NO: 1334115 - RNA, 24 nt, Human
acuaugcauggugccccaggacca

SEQ ID NO: 1334116 - RNA, 20 nt, Human
acuagagucugaacagcugu

SEQ ID NO: 1334117 - RNA, 21 nt, Human
acuagagucugaacagcugua

SEQ ID NO: 1334118 - RNA, 13 nt, Human
acuagaugaugga

SEQ ID NO: 1334119 - RNA, 18 nt, Human
acucaaguugauuagaaa

SEQ ID NO: 1334120 - RNA, 16 nt, Human
uccccggacucaagcc

SEQ ID NO: 1334121 - RNA, 15 nt, Human
uccccuaaagccuca

SEQ ID NO: 1334122 - RNA, 22 nt, Human
uccccuaaagccucaaaacaaa

SEQ ID NO: 1334123 - RNA, 15 nt, Human
uccccuccuucccaa

SEQ ID NO: 1334124 - RNA, 13 nt, Human
uccccucugcugc

SEQ ID NO: 1334125 - RNA, 14 nt, Human
uccccucugcugcu

SEQ ID NO: 1334126 - RNA, 15 nt, Human
uccccucugcugcug

SEQ ID NO: 1334127 - RNA, 17 nt, Human
uccccucugcugcuguc

SEQ ID NO: 1334128 - RNA, 20 nt, Human
uccccucugcugcugucccu

SEQ ID NO: 1334129 - RNA, 14 nt, Human
uccauuuaaacaga

SEQ ID NO: 1334130 - RNA, 13 nt, Human
uccauuuaaacag

SEQ ID NO: 1334131 - RNA, 22 nt, Human
uccauugguccaagauuccgga

SEQ ID NO: 1334132 - RNA, 23 nt, Human
uccaugacugcuugcccuaagca

SEQ ID NO: 1334133 - RNA, 22 nt, Human
uccaugacugcuugcccuaagc

SEQ ID NO: 1334134 - RNA, 16 nt, Human
uccauuggaucucauu

SEQ ID NO: 1334135 - RNA, 15 nt, Human
uccauugguccaaga

SEQ ID NO: 1334136 - RNA, 16 nt, Human
uccauugguccaagau

SEQ ID NO: 1334137 - RNA, 18 nt, Human
uccauugguccaagauuc

SEQ ID NO: 1334138 - RNA, 19 nt, Human
uccauugguccaagauucc

SEQ ID NO: 1334139 - RNA, 20 nt, Human
uccaugaccuaguuuuccau

SEQ ID NO: 1334140 - RNA, 15 nt, Human
uccaugacaucaaga

SEQ ID NO: 1334141 - RNA, 13 nt, Human
uccaugacugcuu

SEQ ID NO: 1334142 - RNA, 15 nt, Human
uccaugacugcuugc

SEQ ID NO: 1334143 - RNA, 19 nt, Human
uccaugacugcuugcccua

SEQ ID NO: 1334144 - RNA, 20 nt, Human
uccaugacugcuugcccuaa

SEQ ID NO: 1334145 - RNA, 11 nt, Human
uccauccugag

SEQ ID NO: 1334146 - RNA, 21 nt, Human
uccaucugguagaagggaaag

SEQ ID NO: 1334147 - RNA, 22 nt, Human
uccaucugguagaagggaaagc

SEQ ID NO: 1334148 - RNA, 13 nt, Human
uccaucuuuacaa

SEQ ID NO: 1334149 - RNA, 14 nt, Human
uccaugacaucaag

SEQ ID NO: 1334150 - RNA, 14 nt, Human
acggccuuucuagc

SEQ ID NO: 1334151 - RNA, 21 nt, Human
acggccuuucuagccuggcua

SEQ ID NO: 1334152 - RNA, 15 nt, Human
uccagucuuccugac

SEQ ID NO: 1334153 - RNA, 19 nt, Human
uccagucuuccugacacuu

SEQ ID NO: 1334154 - RNA, 21 nt, Human
uccagucuuccugacacuuua

SEQ ID NO: 1334155 - RNA, 22 nt, Human
uccagucuuccugacacuuuaa

SEQ ID NO: 1334156 - RNA, 23 nt, Human
uccagucuuccugacacuuuaau

SEQ ID NO: 1334157 - RNA, 14 nt, Human
uccagugagacagc

SEQ ID NO: 1334158 - RNA, 16 nt, Human
uccauccuacccccug

SEQ ID NO: 1334159 - RNA, 13 nt, Human
uccaucccuggcc

SEQ ID NO: 1334160 - RNA, 14 nt, Human
uccaucccuggccc

SEQ ID NO: 1334161 - RNA, 15 nt, Human
uccaucccuggcccc

SEQ ID NO: 1334162 - RNA, 20 nt, Human
uccaucccuggcccccuccc

SEQ ID NO: 1334163 - RNA, 20 nt, Human
uccauccuacccccugugcc

SEQ ID NO: 1334164 - RNA, 22 nt, Human
uccaucccuggcccccucccug

SEQ ID NO: 1334165 - RNA, 23 nt, Human
uccaucccuggcccccucccugg

SEQ ID NO: 1334166 - RNA, 24 nt, Human
uccaucccuggcccccucccugga

SEQ ID NO: 1334167 - RNA, 16 nt, Human
ucccaauugagaaaaa

SEQ ID NO: 1334168 - RNA, 17 nt, Human
ucccaauuucagacucc

SEQ ID NO: 1334169 - RNA, 18 nt, Human
ucccaauuucagacuccc

SEQ ID NO: 1334170 - RNA, 23 nt, Human
ucccaauuucagacucccauucc

SEQ ID NO: 1334171 - RNA, 21 nt, Human
ucccaaagugcugggauuaca

SEQ ID NO: 1334172 - RNA, 15 nt, Human
ucccaauucacaucu

SEQ ID NO: 1334173 - RNA, 20 nt, Human
ucccaauucauccucacuca

SEQ ID NO: 1334174 - RNA, 18 nt, Human
ucccacaggacauuucuc

SEQ ID NO: 1334175 - RNA, 21 nt, Human
ucccacaggacauuucucuaa

SEQ ID NO: 1334176 - RNA, 15 nt, Human
ucccacaggcccuuc

SEQ ID NO: 1334177 - RNA, 17 nt, Human
ucccacaggcccuuccu

SEQ ID NO: 1334178 - RNA, 21 nt, Human
ucccacaggcccuuccucucc

SEQ ID NO: 1334179 - RNA, 22 nt, Human
ucccacaggcccuuccucucca

SEQ ID NO: 1334180 - RNA, 18 nt, Human
ucccacagguucaggcga

SEQ ID NO: 1334181 - RNA, 21 nt, Human
ucccacagucccaucugcuuc

SEQ ID NO: 1334182 - RNA, 16 nt, Human
uccauuugcauuuguu

SEQ ID NO: 1334183 - RNA, 15 nt, Human
uccauuugcaaggga

SEQ ID NO: 1334184 - RNA, 12 nt, Human
uccauuugcauu

SEQ ID NO: 1334185 - RNA, 15 nt, Human
uccauuugcauuugu

SEQ ID NO: 1334186 - RNA, 21 nt, Human
uccauuuaaacagauguccau

SEQ ID NO: 1334187 - RNA, 18 nt, Human
uccauuuaaacagauguc

SEQ ID NO: 1334188 - RNA, 15 nt, Human
uccauuuaaacagau

SEQ ID NO: 1334189 - RNA, 20 nt, Human
ucccaaagugcugggauuac

SEQ ID NO: 1334190 - RNA, 19 nt, Human
ucccacccaauucaaaaca

SEQ ID NO: 1334191 - RNA, 19 nt, Human
ucccaccccaaccugcucu

SEQ ID NO: 1334192 - RNA, 19 nt, Human
ucccaccaacccucagagc

SEQ ID NO: 1334193 - RNA, 22 nt, Human
ucccacaugggcccaggccuca

SEQ ID NO: 1334194 - RNA, 15 nt, Human
ucccacauuaaagaa

SEQ ID NO: 1334195 - RNA, 19 nt, Human
ucccacauuaaagaagacc

SEQ ID NO: 1334196 - RNA, 22 nt, Human
ucccacauuaaagaagaccuga

SEQ ID NO: 1334197 - RNA, 13 nt, Human
ucccacaucccug

SEQ ID NO: 1334198 - RNA, 14 nt, Human
ucccacaucccugg

SEQ ID NO: 1334199 - RNA, 15 nt, Human
ucccacaucccuggg

SEQ ID NO: 1334200 - RNA, 16 nt, Human
ucccacaucccugggc

SEQ ID NO: 1334201 - RNA, 17 nt, Human
ucccacaucccugggcc

SEQ ID NO: 1334202 - RNA, 18 nt, Human
ucccacaucccugggccu

SEQ ID NO: 1334203 - RNA, 20 nt, Human
ucccacaucccugggccugc

SEQ ID NO: 1334204 - RNA, 21 nt, Human
ucccacaucccugggccugcu

SEQ ID NO: 1334205 - RNA, 22 nt, Human
ucccacaucccugggccugcug

SEQ ID NO: 1334206 - RNA, 23 nt, Human
ucccacaucccugggccugcugc

SEQ ID NO: 1334207 - RNA, 13 nt, Human
ucccacaugggcc

SEQ ID NO: 1334208 - RNA, 16 nt, Human
ucccacaugggcccag

SEQ ID NO: 1334209 - RNA, 19 nt, Human
ucccacaugggcccaggcc

SEQ ID NO: 1334210 - RNA, 20 nt, Human
ucccaccccaaccugcucuc

SEQ ID NO: 1334211 - RNA, 21 nt, Human
ucccaccccaaccugcucucc

SEQ ID NO: 1334212 - RNA, 23 nt, Human
ucccaccccaaccugcucuccuc

SEQ ID NO: 1334213 - RNA, 22 nt, Human
ucccacccccacccccagcuca

SEQ ID NO: 1334214 - RNA, 23 nt, Human
ucccacccccacccccagcucaa

SEQ ID NO: 1334215 - RNA, 12 nt, Human
ucccacccucuu

SEQ ID NO: 1334216 - RNA, 15 nt, Human
ucccacccucuuccu

SEQ ID NO: 1334217 - RNA, 21 nt, Human
ucccacccucuuccuacuggu

SEQ ID NO: 1334218 - RNA, 24 nt, Human
ucccaccgcccagcggcuugccug

SEQ ID NO: 1334219 - RNA, 23 nt, Human
ucccaccgcccagcggcuugccu

SEQ ID NO: 1334220 - RNA, 16 nt, Human
ucccaccuagcagcac

SEQ ID NO: 1334221 - RNA, 15 nt, Human
acgggguuucaccau

SEQ ID NO: 1334222 - RNA, 15 nt, Human
acgggugccagaagc

SEQ ID NO: 1334223 - RNA, 15 nt, Human
acggcagccacagcu

SEQ ID NO: 1334224 - RNA, 20 nt, Human
acggcaccugggcccugggg

SEQ ID NO: 1334225 - RNA, 21 nt, Human
acggcaccugggcccuggggc

SEQ ID NO: 1334226 - RNA, 23 nt, Human
acggcaccugggcccuggggccu

SEQ ID NO: 1334227 - RNA, 17 nt, Human
acggccagggagaagcu

SEQ ID NO: 1334228 - RNA, 23 nt, Human
acggccagggagaagcuccucuc

SEQ ID NO: 1334229 - RNA, 18 nt, Human
acggccagggagaagcuc

SEQ ID NO: 1334230 - RNA, 12 nt, Human
acggauuccaaa

SEQ ID NO: 1334231 - RNA, 15 nt, Human
acggauuuauuuuuc

SEQ ID NO: 1334232 - RNA, 15 nt, Human
acggauuuucaguua

SEQ ID NO: 1334233 - RNA, 14 nt, Human
acggauuuucaguu

SEQ ID NO: 1334234 - RNA, 19 nt, Human
acggcaccugggcccuggg

SEQ ID NO: 1334235 - RNA, 12 nt, Human
acgcugcuguca

SEQ ID NO: 1334236 - RNA, 14 nt, Human
acgcugcugucaca

SEQ ID NO: 1334237 - RNA, 21 nt, Human
acggagccacuccucugacuc

SEQ ID NO: 1334238 - RNA, 17 nt, Human
acgcucucuggccuucg

SEQ ID NO: 1334239 - RNA, 16 nt, Human
acgcucucuggccuuc

SEQ ID NO: 1334240 - RNA, 15 nt, Human
acgcucucuggccuu

SEQ ID NO: 1334241 - RNA, 15 nt, Human
acgcccaggacccca

SEQ ID NO: 1334242 - RNA, 16 nt, Human
acgcccguccugccug

SEQ ID NO: 1334243 - RNA, 18 nt, Human
acgcccguccugccugug

SEQ ID NO: 1334244 - RNA, 19 nt, Human
acgcccguccugccugugg

SEQ ID NO: 1334245 - RNA, 20 nt, Human
acgcccguccugccuguggc

SEQ ID NO: 1334246 - RNA, 21 nt, Human
acgcccuuuccuccucaggca

SEQ ID NO: 1334247 - RNA, 17 nt, Human
acgcccuuuccuccuca

SEQ ID NO: 1334248 - RNA, 18 nt, Human
acgcccuuuccuccucag

SEQ ID NO: 1334249 - RNA, 21 nt, Human
acgacacggucggggcaucug

SEQ ID NO: 1334250 - RNA, 14 nt, Human
acgacacugcagcc

SEQ ID NO: 1334251 - RNA, 13 nt, Human
acgacacugcagc

SEQ ID NO: 1334252 - RNA, 12 nt, Human
acgacugucucc

SEQ ID NO: 1334253 - RNA, 20 nt, Human
acgagggcuggcuggccuca

SEQ ID NO: 1334254 - RNA, 11 nt, Human
acgagggcugg

SEQ ID NO: 1334255 - RNA, 12 nt, Human
acgagggcuggc

SEQ ID NO: 1334256 - RNA, 14 nt, Human
acgagggcuggcug

SEQ ID NO: 1334257 - RNA, 16 nt, Human
acgagggcuggcuggc

SEQ ID NO: 1334258 - RNA, 18 nt, Human
acgaggggugucuugggc

SEQ ID NO: 1334259 - RNA, 20 nt, Human
acgaggggugucuugggcag

SEQ ID NO: 1334260 - RNA, 21 nt, Human
acgaggggugucuugggcaga

SEQ ID NO: 1334261 - RNA, 16 nt, Human
uccaggcugccguggg

SEQ ID NO: 1334262 - RNA, 22 nt, Human
uccacgagcuguuuacuaggga

SEQ ID NO: 1334263 - RNA, 14 nt, Human
uccacggagccacu

SEQ ID NO: 1334264 - RNA, 15 nt, Human
uccacggagccacuc

SEQ ID NO: 1334265 - RNA, 20 nt, Human
uccacggagccacuccucug

SEQ ID NO: 1334266 - RNA, 21 nt, Human
uccacggagccacuccucuga

SEQ ID NO: 1334267 - RNA, 22 nt, Human
uccacggagccacuccucugac

SEQ ID NO: 1334268 - RNA, 14 nt, Human
acgaauacuuuugc

SEQ ID NO: 1334269 - RNA, 22 nt, Human
acgaauacuuuugcccuuugau

SEQ ID NO: 1334270 - RNA, 13 nt, Human
acgaaggagccca

SEQ ID NO: 1334271 - RNA, 14 nt, Human
acgaaggagcccau

SEQ ID NO: 1334272 - RNA, 14 nt, Human
uccagggacagagg

SEQ ID NO: 1334273 - RNA, 15 nt, Human
uccagggacagaggc

SEQ ID NO: 1334274 - RNA, 19 nt, Human
uccagggacagaggcccca

SEQ ID NO: 1334275 - RNA, 21 nt, Human
uccagggacagaggccccagc

SEQ ID NO: 1334276 - RNA, 23 nt, Human
uccagggacagaggccccagccu

SEQ ID NO: 1334277 - RNA, 12 nt, Human
uccagggacagc

SEQ ID NO: 1334278 - RNA, 14 nt, Human
uccagggacagcaa

SEQ ID NO: 1334279 - RNA, 13 nt, Human
uccagggacagca

SEQ ID NO: 1334280 - RNA, 14 nt, Human
uccagggaggcugg

SEQ ID NO: 1334281 - RNA, 17 nt, Human
uccagggaggcuggucc

SEQ ID NO: 1334282 - RNA, 22 nt, Human
uccagggaggcugguccuaugg

SEQ ID NO: 1334283 - RNA, 18 nt, Human
uccagggaggcugguccu

SEQ ID NO: 1334284 - RNA, 19 nt, Human
acgaaccuacaguuuuaac

SEQ ID NO: 1334285 - RNA, 18 nt, Human
uccacauuucccccuagc

SEQ ID NO: 1334286 - RNA, 12 nt, Human
uccacccagggg

SEQ ID NO: 1334287 - RNA, 22 nt, Human
uccacccaggggcagccccagg

SEQ ID NO: 1334288 - RNA, 22 nt, Human
uccaccccaauccucccagaaa

SEQ ID NO: 1334289 - RNA, 12 nt, Human
uccaccccaucc

SEQ ID NO: 1334290 - RNA, 20 nt, Human
uccaccccaucccuccccag

SEQ ID NO: 1334291 - RNA, 22 nt, Human
uccaccccaucccuccccaguu

SEQ ID NO: 1334292 - RNA, 17 nt, Human
accuggcccaucagggu

SEQ ID NO: 1334293 - RNA, 18 nt, Human
accuggcccaucagggua

SEQ ID NO: 1334294 - RNA, 15 nt, Human
accuggcccugcuuc

SEQ ID NO: 1334295 - RNA, 17 nt, Human
accuggcccugcuuccu

SEQ ID NO: 1334296 - RNA, 18 nt, Human
accuggcccugcuuccug

SEQ ID NO: 1334297 - RNA, 19 nt, Human
accuggcccugcuuccugc

SEQ ID NO: 1334298 - RNA, 16 nt, Human
accuggcugccauacu

SEQ ID NO: 1334299 - RNA, 22 nt, Human
accugggagaaaucuggcuucu

SEQ ID NO: 1334300 - RNA, 22 nt, Human
accugggaggcggauguugaag

SEQ ID NO: 1334301 - RNA, 17 nt, Human
accugggcaagcuggcg

SEQ ID NO: 1334302 - RNA, 13 nt, Human
accugggcccugg

SEQ ID NO: 1334303 - RNA, 14 nt, Human
accugggcccuggg

SEQ ID NO: 1334304 - RNA, 15 nt, Human
accugggcccugggg

SEQ ID NO: 1334305 - RNA, 16 nt, Human
accugggcccuggggc

SEQ ID NO: 1334306 - RNA, 18 nt, Human
accugggcccuggggccu

SEQ ID NO: 1334307 - RNA, 19 nt, Human
accugggcccuggggccug

SEQ ID NO: 1334308 - RNA, 21 nt, Human
uccaaugagcuuucugaacag

SEQ ID NO: 1334309 - RNA, 15 nt, Human
uccaaugucuggaga

SEQ ID NO: 1334310 - RNA, 16 nt, Human
uccaaugucuggagac

SEQ ID NO: 1334311 - RNA, 17 nt, Human
uccaaugucuggagacc

SEQ ID NO: 1334312 - RNA, 18 nt, Human
uccaaugucuggagacca

SEQ ID NO: 1334313 - RNA, 20 nt, Human
uccaauuagcuuauguuaac

SEQ ID NO: 1334314 - RNA, 15 nt, Human
uccaauuaguuuccu

SEQ ID NO: 1334315 - RNA, 17 nt, Human
uccaauuagcuuauguu

SEQ ID NO: 1334316 - RNA, 23 nt, Human
uccaaugucuggagaccaccagg

SEQ ID NO: 1334317 - RNA, 18 nt, Human
uccaauguggcaaggaaa

SEQ ID NO: 1334318 - RNA, 16 nt, Human
uccaauuaguuuccuu

SEQ ID NO: 1334319 - RNA, 19 nt, Human
uccaauuaguuuccuuuuu

SEQ ID NO: 1334320 - RNA, 20 nt, Human
uccaauuaguuuccuuuuua

SEQ ID NO: 1334321 - RNA, 23 nt, Human
uccaauuaguuuccuuuuuaaua

SEQ ID NO: 1334322 - RNA, 22 nt, Human
uccaauuauaagaggauaugaa

SEQ ID NO: 1334323 - RNA, 19 nt, Human
uccacauacccugaccugg

SEQ ID NO: 1334324 - RNA, 12 nt, Human
uccacauccucc

SEQ ID NO: 1334325 - RNA, 13 nt, Human
uccacauccucca

SEQ ID NO: 1334326 - RNA, 19 nt, Human
uccacauccuccacguucu

SEQ ID NO: 1334327 - RNA, 16 nt, Human
uccacauagguuuaga

SEQ ID NO: 1334328 - RNA, 15 nt, Human
uccacaugggagccg

SEQ ID NO: 1334329 - RNA, 19 nt, Human
uccaaaugcagcuuuaaaa

SEQ ID NO: 1334330 - RNA, 18 nt, Human
uccaaauggcgucuggaa

SEQ ID NO: 1334331 - RNA, 20 nt, Human
uccaaauggcgucuggaagu

SEQ ID NO: 1334332 - RNA, 12 nt, Human
uccaaauucagu

SEQ ID NO: 1334333 - RNA, 14 nt, Human
uccaaauucaguuu

SEQ ID NO: 1334334 - RNA, 16 nt, Human
uccaaauucaguuuca

SEQ ID NO: 1334335 - RNA, 18 nt, Human
uccaaauucaguuucaua

SEQ ID NO: 1334336 - RNA, 19 nt, Human
uccaaauucaguuucauaa

SEQ ID NO: 1334337 - RNA, 23 nt, Human
uccaacaagaagggacugagaga

SEQ ID NO: 1334338 - RNA, 20 nt, Human
uccaaggaggggcuguaaaa

SEQ ID NO: 1334339 - RNA, 21 nt, Human
uccaaggggaaucagaacuca

SEQ ID NO: 1334340 - RNA, 22 nt, Human
accuucucuauggggcauccuc

SEQ ID NO: 1334341 - RNA, 23 nt, Human
accuucucuauggggcauccucu

SEQ ID NO: 1334342 - RNA, 15 nt, Human
accuucugaguacag

SEQ ID NO: 1334343 - RNA, 18 nt, Human
accuugccugguacagua

SEQ ID NO: 1334344 - RNA, 15 nt, Human
accuugccugguaca

SEQ ID NO: 1334345 - RNA, 20 nt, Human
accugggcccuggggccugu

SEQ ID NO: 1334346 - RNA, 21 nt, Human
accugggcccuggggccugua

SEQ ID NO: 1334347 - RNA, 23 nt, Human
accugggcccuggggccuguacu

SEQ ID NO: 1334348 - RNA, 19 nt, Human
accuucaguuaugauuuuu

SEQ ID NO: 1334349 - RNA, 17 nt, Human
accuucccaugcccugg

SEQ ID NO: 1334350 - RNA, 14 nt, Human
accuuccucaucua

SEQ ID NO: 1334351 - RNA, 13 nt, Human
accuuccuuuuac

SEQ ID NO: 1334352 - RNA, 15 nt, Human
accuucgccaccugg

SEQ ID NO: 1334353 - RNA, 17 nt, Human
accuucgccaccugggu

SEQ ID NO: 1334354 - RNA, 14 nt, Human
accuucgggcugug

SEQ ID NO: 1334355 - RNA, 15 nt, Human
accuucgggcugugc

SEQ ID NO: 1334356 - RNA, 16 nt, Human
accuucgggcugugcc

SEQ ID NO: 1334357 - RNA, 17 nt, Human
accuucgggcugugccc

SEQ ID NO: 1334358 - RNA, 18 nt, Human
accuucgggcugugcccg

SEQ ID NO: 1334359 - RNA, 20 nt, Human
accuuccuuuuacuuuucuu

SEQ ID NO: 1334360 - RNA, 21 nt, Human
accuuccuuuuacuuuucuuc

SEQ ID NO: 1334361 - RNA, 23 nt, Human
accugccucccuucaugcaugga

SEQ ID NO: 1334362 - RNA, 21 nt, Human
accugccucccuucaugcaug

SEQ ID NO: 1334363 - RNA, 22 nt, Human
accugccucccuucaugcaugg

SEQ ID NO: 1334364 - RNA, 17 nt, Human
accugccucggccuccc

SEQ ID NO: 1334365 - RNA, 15 nt, Human
accugcaaagaucug

SEQ ID NO: 1334366 - RNA, 16 nt, Human
accugcaaagaucugu

SEQ ID NO: 1334367 - RNA, 22 nt, Human
accugcaaagaucuguccucag

SEQ ID NO: 1334368 - RNA, 16 nt, Human
accugagccugccgag

SEQ ID NO: 1334369 - RNA, 14 nt, Human
accugaggcugguu

SEQ ID NO: 1334370 - RNA, 12 nt, Human
accugaggcugu

SEQ ID NO: 1334371 - RNA, 14 nt, Human
accugaggcugugg

SEQ ID NO: 1334372 - RNA, 13 nt, Human
accugauccugga

SEQ ID NO: 1334373 - RNA, 20 nt, Human
accugauccuggaggcccag

SEQ ID NO: 1334374 - RNA, 22 nt, Human
accugauccuggaggcccaguu

SEQ ID NO: 1334375 - RNA, 13 nt, Human
accugaugaaaau

SEQ ID NO: 1334376 - RNA, 14 nt, Human
accugaugaaaaua

SEQ ID NO: 1334377 - RNA, 16 nt, Human
accugauuuuuuuucc

SEQ ID NO: 1334378 - RNA, 17 nt, Human
accugauuuuuuuuccu

SEQ ID NO: 1334379 - RNA, 20 nt, Human
accugauuuuuuuuccuuuu

SEQ ID NO: 1334380 - RNA, 15 nt, Human
accugaugaaaauaa

SEQ ID NO: 1334381 - RNA, 18 nt, Human
accugaugaaaauaaaga

SEQ ID NO: 1334382 - RNA, 19 nt, Human
accugaugaaaauaaagaa

SEQ ID NO: 1334383 - RNA, 21 nt, Human
accugaugaaaauaaagaaug

SEQ ID NO: 1334384 - RNA, 22 nt, Human
accugaugaaaauaaagaaugg

SEQ ID NO: 1334385 - RNA, 16 nt, Human
ucauaauaaguugcau

SEQ ID NO: 1334386 - RNA, 20 nt, Human
ucauaaggcuucaaaauguu

SEQ ID NO: 1334387 - RNA, 19 nt, Human
accugaaauuccaaagucu

SEQ ID NO: 1334388 - RNA, 20 nt, Human
accugaaauuccaaagucuc

SEQ ID NO: 1334389 - RNA, 22 nt, Human
accugaaauuccaaagucucua

SEQ ID NO: 1334390 - RNA, 16 nt, Human
accugaacugaacacc

SEQ ID NO: 1334391 - RNA, 11 nt, Human
accugaagaau

SEQ ID NO: 1334392 - RNA, 14 nt, Human
accugaagaaucac

SEQ ID NO: 1334393 - RNA, 16 nt, Human
accugaagaaucacaa

SEQ ID NO: 1334394 - RNA, 22 nt, Human
accugaagcuaucguaaaauua

SEQ ID NO: 1334395 - RNA, 19 nt, Human
accugacacaccaggcgcu

SEQ ID NO: 1334396 - RNA, 21 nt, Human
accugacacaccaggcgcuaa

SEQ ID NO: 1334397 - RNA, 16 nt, Human
accugacacucccuug

SEQ ID NO: 1334398 - RNA, 17 nt, Human
accugacacucccuugg

SEQ ID NO: 1334399 - RNA, 17 nt, Human
accugaccccugacccc

SEQ ID NO: 1334400 - RNA, 19 nt, Human
accugacacucccuugggc

SEQ ID NO: 1334401 - RNA, 15 nt, Human
accugaccccugcuc

SEQ ID NO: 1334402 - RNA, 10 nt, Human
accugagccu

SEQ ID NO: 1334403 - RNA, 12 nt, Human
accugagccugc

SEQ ID NO: 1334404 - RNA, 13 nt, Human
accugagccugcc

SEQ ID NO: 1334405 - RNA, 14 nt, Human
accugagccugccg

SEQ ID NO: 1334406 - RNA, 17 nt, Human
accugagccccaaaagg

SEQ ID NO: 1334407 - RNA, 12 nt, Human
accugagcccca

SEQ ID NO: 1334408 - RNA, 21 nt, Human
accugcugucuggguggcuca

SEQ ID NO: 1334409 - RNA, 20 nt, Human
accugcugugauacgaugcu

SEQ ID NO: 1334410 - RNA, 21 nt, Human
accugcugugauacgaugcuu

SEQ ID NO: 1334411 - RNA, 15 nt, Human
accuggaccccugca

SEQ ID NO: 1334412 - RNA, 16 nt, Human
accuggaccccugcau

SEQ ID NO: 1334413 - RNA, 20 nt, Human
accuggaccccugcauugga

SEQ ID NO: 1334414 - RNA, 21 nt, Human
accuggaccccugcauuggaa

SEQ ID NO: 1334415 - RNA, 22 nt, Human
accuggacuuaagcaucuggcu

SEQ ID NO: 1334416 - RNA, 12 nt, Human
accugcucuccu

SEQ ID NO: 1334417 - RNA, 13 nt, Human
accugcucuccuc

SEQ ID NO: 1334418 - RNA, 14 nt, Human
accugcucuccucu

SEQ ID NO: 1334419 - RNA, 15 nt, Human
accugcucuccucuu

SEQ ID NO: 1334420 - RNA, 16 nt, Human
accugcucuccucuuc

SEQ ID NO: 1334421 - RNA, 18 nt, Human
accugcugagcucugaga

SEQ ID NO: 1334422 - RNA, 17 nt, Human
accugcucuccucuucu

SEQ ID NO: 1334423 - RNA, 23 nt, Human
accugcucuccucuucuacucac

SEQ ID NO: 1334424 - RNA, 19 nt, Human
accugcugagcucugagag

SEQ ID NO: 1334425 - RNA, 20 nt, Human
accugcugagcucugagagg

SEQ ID NO: 1334426 - RNA, 23 nt, Human
accugcugagcucugagaggccc

SEQ ID NO: 1334427 - RNA, 21 nt, Human
accugcugagcucugagaggc

SEQ ID NO: 1334428 - RNA, 21 nt, Human
accugccucggccucccaaag

SEQ ID NO: 1334429 - RNA, 23 nt, Human
accugccucggccucccaaagug

SEQ ID NO: 1334430 - RNA, 21 nt, Human
accugccugacauuuggagug

SEQ ID NO: 1334431 - RNA, 16 nt, Human
accugcggcccaaucc

SEQ ID NO: 1334432 - RNA, 18 nt, Human
accugcuaggccagagcc

SEQ ID NO: 1334433 - RNA, 21 nt, Human
accugcuaggccagagcccac

SEQ ID NO: 1334434 - RNA, 22 nt, Human
accugcuaggccagagcccacu

SEQ ID NO: 1334435 - RNA, 16 nt, Human
accugcucacgucaaa

SEQ ID NO: 1334436 - RNA, 20 nt, Human
accugcucacgucaaaugca

SEQ ID NO: 1334437 - RNA, 16 nt, Human
accugcucagcccugc

SEQ ID NO: 1334438 - RNA, 17 nt, Human
accugcucagcccugca

SEQ ID NO: 1334439 - RNA, 14 nt, Human
ucauuuuugaauac

SEQ ID NO: 1334440 - RNA, 15 nt, Human
ucauuuuuccguaaa

SEQ ID NO: 1334441 - RNA, 20 nt, Human
ucauuuuuuuucuuugaaua

SEQ ID NO: 1334442 - RNA, 22 nt, Human
ucauuuuuuuucuuugaauaaa

SEQ ID NO: 1334443 - RNA, 23 nt, Human
ucauuuuuuuucuuugaauaaau

SEQ ID NO: 1334444 - RNA, 12 nt, Human
ucauuuuuacaa

SEQ ID NO: 1334445 - RNA, 20 nt, Human
ucauuuuuacaauguaauua

SEQ ID NO: 1334446 - RNA, 21 nt, Human
ucauuuuuacaauguaauuau

SEQ ID NO: 1334447 - RNA, 19 nt, Human
ucauuuuucaauagcacau

SEQ ID NO: 1334448 - RNA, 22 nt, Human
ucauuuugguaaaauacuucuu

SEQ ID NO: 1334449 - RNA, 14 nt, Human
ucauuuugguacuu

SEQ ID NO: 1334450 - RNA, 16 nt, Human
ucauuugcuuuggaag

SEQ ID NO: 1334451 - RNA, 18 nt, Human
ucauuugguucauuaauu

SEQ ID NO: 1334452 - RNA, 16 nt, Human
accuggagauggugga

SEQ ID NO: 1334453 - RNA, 20 nt, Human
ucauuugguucauuaauucu

SEQ ID NO: 1334454 - RNA, 12 nt, Human
ucauuuucucua

SEQ ID NO: 1334455 - RNA, 13 nt, Human
ucauuuucucuaa

SEQ ID NO: 1334456 - RNA, 15 nt, Human
ucauuuucucuaaua

SEQ ID NO: 1334457 - RNA, 16 nt, Human
ucauuuucucuaauau

SEQ ID NO: 1334458 - RNA, 14 nt, Human
ucauuuucucucag

SEQ ID NO: 1334459 - RNA, 15 nt, Human
ucauuuucucucagg

SEQ ID NO: 1334460 - RNA, 15 nt, Human
uagaaacacaacuau

SEQ ID NO: 1334461 - RNA, 16 nt, Human
uagaaacagugcaaca

SEQ ID NO: 1334462 - RNA, 22 nt, Human
uagaaaauuuaaaacauuacuc

SEQ ID NO: 1334463 - RNA, 22 nt, Human
uagaaaauuuguuauuuugcaa

SEQ ID NO: 1334464 - RNA, 23 nt, Human
uagaaaauuuguuauuuugcaac

SEQ ID NO: 1334465 - RNA, 16 nt, Human
uagaaaauuagacugu

SEQ ID NO: 1334466 - RNA, 13 nt, Human
uagaaacaaaaua

SEQ ID NO: 1334467 - RNA, 16 nt, Human
uagaaacaaaauacaa

SEQ ID NO: 1334468 - RNA, 17 nt, Human
uagaaacaaaauacaau

SEQ ID NO: 1334469 - RNA, 13 nt, Human
uagaaacaacacu

SEQ ID NO: 1334470 - RNA, 16 nt, Human
uagaaacaacacugua

SEQ ID NO: 1334471 - RNA, 17 nt, Human
uagaaacaacacuguag

SEQ ID NO: 1334472 - RNA, 18 nt, Human
uagaaacaacacuguagu

SEQ ID NO: 1334473 - RNA, 19 nt, Human
uagaaacaacacuguagua

SEQ ID NO: 1334474 - RNA, 20 nt, Human
uagaaacaacacuguaguaa

SEQ ID NO: 1334475 - RNA, 11 nt, Human
uagaaaacuuu

SEQ ID NO: 1334476 - RNA, 16 nt, Human
uagaaaacuuuaaagc

SEQ ID NO: 1334477 - RNA, 15 nt, Human
uagaaaacuuuaaag

SEQ ID NO: 1334478 - RNA, 17 nt, Human
uagaaaaggacuauaag

SEQ ID NO: 1334479 - RNA, 21 nt, Human
uagaaaaggcuagguacacag

SEQ ID NO: 1334480 - RNA, 16 nt, Human
uagaaaaguauguucu

SEQ ID NO: 1334481 - RNA, 18 nt, Human
uagaaaaguauguucuaa

SEQ ID NO: 1334482 - RNA, 12 nt, Human
uagaaaaugguc

SEQ ID NO: 1334483 - RNA, 17 nt, Human
uagaaaauuuaaaacau

SEQ ID NO: 1334484 - RNA, 18 nt, Human
uagaagacaaaauguuca

SEQ ID NO: 1334485 - RNA, 18 nt, Human
uagaacucccuuucaaca

SEQ ID NO: 1334486 - RNA, 17 nt, Human
uagaacucccuuucaac

SEQ ID NO: 1334487 - RNA, 16 nt, Human
uagaacucccuuucaa

SEQ ID NO: 1334488 - RNA, 15 nt, Human
uagaaaaaaaauuau

SEQ ID NO: 1334489 - RNA, 13 nt, Human
uacuuuuuauaua

SEQ ID NO: 1334490 - RNA, 16 nt, Human
uacuuuuuauauauau

SEQ ID NO: 1334491 - RNA, 14 nt, Human
uacuuuuuauauau

SEQ ID NO: 1334492 - RNA, 14 nt, Human
uagaaaaacaggca

SEQ ID NO: 1334493 - RNA, 15 nt, Human
uagaaaaacaggcac

SEQ ID NO: 1334494 - RNA, 16 nt, Human
uagaaaaacaggcacu

SEQ ID NO: 1334495 - RNA, 16 nt, Human
uagaaaacauaaucuu

SEQ ID NO: 1334496 - RNA, 23 nt, Human
uacuuuuacaaguaacaaaaaua

SEQ ID NO: 1334497 - RNA, 20 nt, Human
uacuuuuacaaguaacaaaa

SEQ ID NO: 1334498 - RNA, 22 nt, Human
uacuuuucuucuauugccucug

SEQ ID NO: 1334499 - RNA, 21 nt, Human
uacuuuucuucuauugccucu

SEQ ID NO: 1334500 - RNA, 15 nt, Human
uacuuuugcccuuug

SEQ ID NO: 1334501 - RNA, 14 nt, Human
uacuuuuuaaaugu

SEQ ID NO: 1334502 - RNA, 21 nt, Human
aauucauuaaucugccucccu

SEQ ID NO: 1334503 - RNA, 16 nt, Human
aauuccacaccuuuua

SEQ ID NO: 1334504 - RNA, 12 nt, Human
aauuccacagcu

SEQ ID NO: 1334505 - RNA, 13 nt, Human
aauuccacagcug

SEQ ID NO: 1334506 - RNA, 14 nt, Human
aauuccacagcugc

SEQ ID NO: 1334507 - RNA, 20 nt, Human
aauuccacaccuuuuauuga

SEQ ID NO: 1334508 - RNA, 13 nt, Human
aauuccacucaaa

SEQ ID NO: 1334509 - RNA, 20 nt, Human
uacuuuggggcuaauuuaac

SEQ ID NO: 1334510 - RNA, 22 nt, Human
uacuuugguggccacauaagcc

SEQ ID NO: 1334511 - RNA, 17 nt, Human
uacuuuggaauucuuag

SEQ ID NO: 1334512 - RNA, 22 nt, Human
uagaauuugauaugugaacagu

SEQ ID NO: 1334513 - RNA, 16 nt, Human
uagaaguauaaagaau

SEQ ID NO: 1334514 - RNA, 17 nt, Human
uagaaguauaaagaauu

SEQ ID NO: 1334515 - RNA, 13 nt, Human
uagaauuugauua

SEQ ID NO: 1334516 - RNA, 20 nt, Human
uagaauuugauaugugaaca

SEQ ID NO: 1334517 - RNA, 19 nt, Human
uagaaguauaaagaauugu

SEQ ID NO: 1334518 - RNA, 20 nt, Human
uagaagacaauugacaacag

SEQ ID NO: 1334519 - RNA, 18 nt, Human
uagaaggcuguggugagg

SEQ ID NO: 1334520 - RNA, 23 nt, Human
uagaaggcuguggugagggaaga

SEQ ID NO: 1334521 - RNA, 17 nt, Human
uagaagggaaagcccau

SEQ ID NO: 1334522 - RNA, 13 nt, Human
uagacacacauga

SEQ ID NO: 1334523 - RNA, 13 nt, Human
uagacacaugaag

SEQ ID NO: 1334524 - RNA, 19 nt, Human
uagacacaugaagguaaau

SEQ ID NO: 1334525 - RNA, 20 nt, Human
uagacacaugaagguaaaua

SEQ ID NO: 1334526 - RNA, 22 nt, Human
uagacacaugaagguaaauaaa

SEQ ID NO: 1334527 - RNA, 21 nt, Human
uagacacaugaagguaaauaa

SEQ ID NO: 1334528 - RNA, 14 nt, Human
uagacaccaaaguu

SEQ ID NO: 1334529 - RNA, 17 nt, Human
uagacaccaaaguucua

SEQ ID NO: 1334530 - RNA, 18 nt, Human
uagacaccaaaguucuaa

SEQ ID NO: 1334531 - RNA, 20 nt, Human
uagacaccaaaguucuaaua

SEQ ID NO: 1334532 - RNA, 21 nt, Human
uagacaccaaaguucuaauaa

SEQ ID NO: 1334533 - RNA, 16 nt, Human
uagacacgcacggcag

SEQ ID NO: 1334534 - RNA, 21 nt, Human
uagacacuccccgaagucuuu

SEQ ID NO: 1334535 - RNA, 15 nt, Human
uagacacuuuggaag

SEQ ID NO: 1334536 - RNA, 14 nt, Human
uagacagaacaccu

SEQ ID NO: 1334537 - RNA, 15 nt, Human
uagacagaacaccua

SEQ ID NO: 1334538 - RNA, 12 nt, Human
uagacagaagaa

SEQ ID NO: 1334539 - RNA, 14 nt, Human
uagacagaagaaac

SEQ ID NO: 1334540 - RNA, 23 nt, Human
aauuuggaucucuucuuaaugua

SEQ ID NO: 1334541 - RNA, 12 nt, Human
aauuuggauuua

SEQ ID NO: 1334542 - RNA, 23 nt, Human
aauuuggauuuaaaagccugcuc

SEQ ID NO: 1334543 - RNA, 13 nt, Human
aauuuggcaauuu

SEQ ID NO: 1334544 - RNA, 18 nt, Human
aauuuggcaauuuugugg

SEQ ID NO: 1334545 - RNA, 15 nt, Human
aauuuggcaauuuug

SEQ ID NO: 1334546 - RNA, 16 nt, Human
aauuuuaaugaagaaa

SEQ ID NO: 1334547 - RNA, 18 nt, Human
uagacagucucacuuugu

SEQ ID NO: 1334548 - RNA, 15 nt, Human
uagacagaagaaaca

SEQ ID NO: 1334549 - RNA, 15 nt, Human
uagacagaggcccuc

SEQ ID NO: 1334550 - RNA, 19 nt, Human
uagacagaggcccucaagu

SEQ ID NO: 1334551 - RNA, 17 nt, Human
uagacauggagguucua

SEQ ID NO: 1334552 - RNA, 18 nt, Human
uagacauggagguucuaa

SEQ ID NO: 1334553 - RNA, 19 nt, Human
uagacauggagguucuaag

SEQ ID NO: 1334554 - RNA, 20 nt, Human
uagacauggagguucuaagg

SEQ ID NO: 1334555 - RNA, 21 nt, Human
uagacauggagguucuaaggc

SEQ ID NO: 1334556 - RNA, 22 nt, Human
uagacauggagguucuaaggcc

SEQ ID NO: 1334557 - RNA, 23 nt, Human
uagacauggagguucuaaggccu

SEQ ID NO: 1334558 - RNA, 22 nt, Human
aauuuggaucucuucuuaaugu

SEQ ID NO: 1334559 - RNA, 13 nt, Human
uagaccaaaauaa

SEQ ID NO: 1334560 - RNA, 14 nt, Human
uagaccaaaauaaa

SEQ ID NO: 1334561 - RNA, 12 nt, Human
aauuuuacauuu

SEQ ID NO: 1334562 - RNA, 20 nt, Human
aauuuuacauggcuggagcu

SEQ ID NO: 1334563 - RNA, 19 nt, Human
aauuuuacacgcuuuugug

SEQ ID NO: 1334564 - RNA, 20 nt, Human
aauuuuacacgcuuuuguga

SEQ ID NO: 1334565 - RNA, 16 nt, Human
acaaaaagcuacuuau

SEQ ID NO: 1334566 - RNA, 20 nt, Human
acaaaaagccacaaugaaca

SEQ ID NO: 1334567 - RNA, 19 nt, Human
acaaaaagcuaauaccagu

SEQ ID NO: 1334568 - RNA, 14 nt, Human
acaaaaauuaaaau

SEQ ID NO: 1334569 - RNA, 20 nt, Human
acaaaaagguucucaggugu

SEQ ID NO: 1334570 - RNA, 12 nt, Human
acaaaaauaaaa

SEQ ID NO: 1334571 - RNA, 16 nt, Human
acaaaaauacucagau

SEQ ID NO: 1334572 - RNA, 13 nt, Human
acaaaaauauaaa

SEQ ID NO: 1334573 - RNA, 13 nt, Human
acaaaacaaacuc

SEQ ID NO: 1334574 - RNA, 19 nt, Human
acaaaacaaagcaauucuu

SEQ ID NO: 1334575 - RNA, 19 nt, Human
acaaaaccccccagauauc

SEQ ID NO: 1334576 - RNA, 20 nt, Human
acaaaaccccccagauauca

SEQ ID NO: 1334577 - RNA, 15 nt, Human
acaaaacuacaugag

SEQ ID NO: 1334578 - RNA, 22 nt, Human
acaaaaguuucauccuuuucau

SEQ ID NO: 1334579 - RNA, 12 nt, Human
acaaaauaaaca

SEQ ID NO: 1334580 - RNA, 14 nt, Human
acaaaauaaacaaa

SEQ ID NO: 1334581 - RNA, 14 nt, Human
acaaauaauuuaga

SEQ ID NO: 1334582 - RNA, 13 nt, Human
acaaauaauuuag

SEQ ID NO: 1334583 - RNA, 23 nt, Human
acaaagguuuaaaugaacaagag

SEQ ID NO: 1334584 - RNA, 16 nt, Human
acaaauacuaaaaaga

SEQ ID NO: 1334585 - RNA, 16 nt, Human
acaaauaacaagaaua

SEQ ID NO: 1334586 - RNA, 16 nt, Human
acaaauaacaaugugc

SEQ ID NO: 1334587 - RNA, 21 nt, Human
acaaagguuuuccucuucuau

SEQ ID NO: 1334588 - RNA, 22 nt, Human
acaaaauaaccaauccuggaca

SEQ ID NO: 1334589 - RNA, 20 nt, Human
acaaaaucagguaacuaacu

SEQ ID NO: 1334590 - RNA, 24 nt, Human
acaaagguugagauguaaaaggua

SEQ ID NO: 1334591 - RNA, 14 nt, Human
acaaagguuuaaau

SEQ ID NO: 1334592 - RNA, 15 nt, Human
acaaagguuuaaaug

SEQ ID NO: 1334593 - RNA, 16 nt, Human
acaaagguuuaaauga

SEQ ID NO: 1334594 - RNA, 17 nt, Human
acaaagguuuaaaugaa

SEQ ID NO: 1334595 - RNA, 18 nt, Human
acaaagguuuaaaugaac

SEQ ID NO: 1334596 - RNA, 19 nt, Human
acaaagguuuaaaugaaca

SEQ ID NO: 1334597 - RNA, 20 nt, Human
acaaagguuuaaaugaacaa

SEQ ID NO: 1334598 - RNA, 22 nt, Human
acaaagguuuaaaugaacaaga

SEQ ID NO: 1334599 - RNA, 19 nt, Human
acaaauaggaugcuuggga

SEQ ID NO: 1334600 - RNA, 18 nt, Human
uagagccgggugucccca

SEQ ID NO: 1334601 - RNA, 14 nt, Human
uagagccugaggga

SEQ ID NO: 1334602 - RNA, 13 nt, Human
acaaauagaaaau

SEQ ID NO: 1334603 - RNA, 15 nt, Human
acaaauagaaaaugg

SEQ ID NO: 1334604 - RNA, 16 nt, Human
acaaauagaaaauggu

SEQ ID NO: 1334605 - RNA, 21 nt, Human
uagagccggguguccccaaca

SEQ ID NO: 1334606 - RNA, 17 nt, Human
uagagccuguaaacuuu

SEQ ID NO: 1334607 - RNA, 10 nt, Human
uagagcuccu

SEQ ID NO: 1334608 - RNA, 13 nt, Human
uagagcuccuccc

SEQ ID NO: 1334609 - RNA, 21 nt, Human
uagaggccugacugccaagcc

SEQ ID NO: 1334610 - RNA, 22 nt, Human
uagaggccugacugccaagcca

SEQ ID NO: 1334611 - RNA, 16 nt, Human
uagaggcuuccuucau

SEQ ID NO: 1334612 - RNA, 17 nt, Human
uagaggcuuccuucauu

SEQ ID NO: 1334613 - RNA, 18 nt, Human
uagaggcuuccuucauuu

SEQ ID NO: 1334614 - RNA, 19 nt, Human
uagaggcuuccuucauuuc

SEQ ID NO: 1334615 - RNA, 14 nt, Human
uagaggguguguaa

SEQ ID NO: 1334616 - RNA, 23 nt, Human
uagagggaggagaaugagccucg

SEQ ID NO: 1334617 - RNA, 14 nt, Human
uagcaaaagaagaa

SEQ ID NO: 1334618 - RNA, 16 nt, Human
uagcaaaagaagaagu

SEQ ID NO: 1334619 - RNA, 12 nt, Human
uagcaaagaauu

SEQ ID NO: 1334620 - RNA, 14 nt, Human
uagcaaagaauuga

SEQ ID NO: 1334621 - RNA, 16 nt, Human
uagcaaagauaucuca

SEQ ID NO: 1334622 - RNA, 13 nt, Human
uagcacaaguuau

SEQ ID NO: 1334623 - RNA, 19 nt, Human
uagcacaaguuauuuaaau

SEQ ID NO: 1334624 - RNA, 14 nt, Human
uagccaaaccucac

SEQ ID NO: 1334625 - RNA, 22 nt, Human
uagccaaaccucaccaacuccu

SEQ ID NO: 1334626 - RNA, 17 nt, Human
uagccaaaccucaccaa

SEQ ID NO: 1334627 - RNA, 20 nt, Human
uagccacauuuggaauacuu

SEQ ID NO: 1334628 - RNA, 21 nt, Human
uagccacauuuggaauacuuu

SEQ ID NO: 1334629 - RNA, 20 nt, Human
uagccacuaaccuugccugg

SEQ ID NO: 1334630 - RNA, 21 nt, Human
uagccacuaaccuugccuggu

SEQ ID NO: 1334631 - RNA, 14 nt, Human
acaaaucagaaguc

SEQ ID NO: 1334632 - RNA, 15 nt, Human
acaaaucagaaguca

SEQ ID NO: 1334633 - RNA, 16 nt, Human
acaaaucagaagucau

SEQ ID NO: 1334634 - RNA, 23 nt, Human
acaaaucagaagucaucuugcua

SEQ ID NO: 1334635 - RNA, 14 nt, Human
uagcuaaguacaca

SEQ ID NO: 1334636 - RNA, 18 nt, Human
uagcguucuuguaauuuu

SEQ ID NO: 1334637 - RNA, 22 nt, Human
uagcguuuuuuaaauguauacu

SEQ ID NO: 1334638 - RNA, 18 nt, Human
uagcuaaacggauuccaa

SEQ ID NO: 1334639 - RNA, 19 nt, Human
uagcuaaacggauuccaaa

SEQ ID NO: 1334640 - RNA, 20 nt, Human
uagcuaaacggauuccaaag

SEQ ID NO: 1334641 - RNA, 22 nt, Human
uagcuucccuccccucuaguuu

SEQ ID NO: 1334642 - RNA, 16 nt, Human
uagcuuuaacuuaaau

SEQ ID NO: 1334643 - RNA, 22 nt, Human
uagcuuuaacuuaaauaguauu

SEQ ID NO: 1334644 - RNA, 23 nt, Human
uagcuuuaaugauaugcuuguaa

SEQ ID NO: 1334645 - RNA, 13 nt, Human
uagcuuuuuucuc

SEQ ID NO: 1334646 - RNA, 23 nt, Human
uagcuuuuuucucugauacagaa

SEQ ID NO: 1334647 - RNA, 20 nt, Human
uagcuuuugugggggacugu

SEQ ID NO: 1334648 - RNA, 13 nt, Human
uagcuuuucccuu

SEQ ID NO: 1334649 - RNA, 12 nt, Human
uagcuuuugugg

SEQ ID NO: 1334650 - RNA, 19 nt, Human
uagcuuuugugggggacug

SEQ ID NO: 1334651 - RNA, 22 nt, Human
uagcuuuggaaguuuagcucug

SEQ ID NO: 1334652 - RNA, 15 nt, Human
uagcuuugcucuuug

SEQ ID NO: 1334653 - RNA, 17 nt, Human
uagcuuuggaaguuuag

SEQ ID NO: 1334654 - RNA, 11 nt, Human
uagcuuugcuc

SEQ ID NO: 1334655 - RNA, 18 nt, Human
uagcguuuuuuaaaugua

SEQ ID NO: 1334656 - RNA, 17 nt, Human
uagcguuuuuuaaaugu

SEQ ID NO: 1334657 - RNA, 16 nt, Human
uagcguuuuuuaaaug

SEQ ID NO: 1334658 - RNA, 21 nt, Human
uagcguucuuguaauuuuaca

SEQ ID NO: 1334659 - RNA, 17 nt, Human
uagcgugcucacugacc

SEQ ID NO: 1334660 - RNA, 13 nt, Human
uagcguucuugua

SEQ ID NO: 1334661 - RNA, 14 nt, Human
uagcguucuuguaa

SEQ ID NO: 1334662 - RNA, 15 nt, Human
uagcguucuuguaau

SEQ ID NO: 1334663 - RNA, 16 nt, Human
uagcguucuuguaauu

SEQ ID NO: 1334664 - RNA, 17 nt, Human
uagcguucuuguaauuu

SEQ ID NO: 1334665 - RNA, 16 nt, Human
uagcgcacucuucaug

SEQ ID NO: 1334666 - RNA, 21 nt, Human
uagcgcuaucucccugccucc

SEQ ID NO: 1334667 - RNA, 18 nt, Human
uagcgggauggggcuccc

SEQ ID NO: 1334668 - RNA, 16 nt, Human
uagcgugcucacugac

SEQ ID NO: 1334669 - RNA, 16 nt, Human
acaaucagaaacucuu

SEQ ID NO: 1334670 - RNA, 18 nt, Human
acaaucagcuccuuccug

SEQ ID NO: 1334671 - RNA, 22 nt, Human
acaaucagcuccuuccuggaga

SEQ ID NO: 1334672 - RNA, 20 nt, Human
acaaaucagaagucaucuug

SEQ ID NO: 1334673 - RNA, 21 nt, Human
acaaaucucaagcaaacagcu

SEQ ID NO: 1334674 - RNA, 11 nt, Human
acaaaugaaaa

SEQ ID NO: 1334675 - RNA, 23 nt, Human
uaggggcuuauaauaaaggacug

SEQ ID NO: 1334676 - RNA, 22 nt, Human
uaggggcuuauaauaaaggacu

SEQ ID NO: 1334677 - RNA, 21 nt, Human
uaggggcuuauaauaaaggac

SEQ ID NO: 1334678 - RNA, 11 nt, Human
uaggggcuggg

SEQ ID NO: 1334679 - RNA, 14 nt, Human
uaggggcugggaac

SEQ ID NO: 1334680 - RNA, 18 nt, Human
uaggggaggggcuccuuu

SEQ ID NO: 1334681 - RNA, 21 nt, Human
uaggggaggggcuccuuucca

SEQ ID NO: 1334682 - RNA, 19 nt, Human
uaggggccccucucagccc

SEQ ID NO: 1334683 - RNA, 23 nt, Human
uaggggccccucucagcccucac

SEQ ID NO: 1334684 - RNA, 15 nt, Human
uagggggcuggagga

SEQ ID NO: 1334685 - RNA, 16 nt, Human
uagggggcuggaggag

SEQ ID NO: 1334686 - RNA, 18 nt, Human
uagggggcuggaggagcc

SEQ ID NO: 1334687 - RNA, 20 nt, Human
uagggggcuggaggagccca

SEQ ID NO: 1334688 - RNA, 16 nt, Human
uagggccaagcccagc

SEQ ID NO: 1334689 - RNA, 23 nt, Human
uagggccaagcccagcacugcuu

SEQ ID NO: 1334690 - RNA, 23 nt, Human
uagggcaauuaauuccuucagca

SEQ ID NO: 1334691 - RNA, 21 nt, Human
uagggcaauuaauuccuucag

SEQ ID NO: 1334692 - RNA, 15 nt, Human
uagggcaccaggggu

SEQ ID NO: 1334693 - RNA, 20 nt, Human
uagggcaccagggguuucuc

SEQ ID NO: 1334694 - RNA, 18 nt, Human
uagggcaauuaauuccuu

SEQ ID NO: 1334695 - RNA, 16 nt, Human
uagggaugccuccuuu

SEQ ID NO: 1334696 - RNA, 19 nt, Human
uagggauggggcugugggg

SEQ ID NO: 1334697 - RNA, 14 nt, Human
uagggaugccuccu

SEQ ID NO: 1334698 - RNA, 15 nt, Human
uagggaugccuccuu

SEQ ID NO: 1334699 - RNA, 17 nt, Human
uagggaucccucaucug

SEQ ID NO: 1334700 - RNA, 18 nt, Human
uagggaaaacauuccauc

SEQ ID NO: 1334701 - RNA, 16 nt, Human
uagggaaaacauucca

SEQ ID NO: 1334702 - RNA, 20 nt, Human
uaggcauucuggaccucugg

SEQ ID NO: 1334703 - RNA, 13 nt, Human
uagggaaaacauu

SEQ ID NO: 1334704 - RNA, 13 nt, Human
uagggaacaauuu

SEQ ID NO: 1334705 - RNA, 14 nt, Human
uagggaacaauuug

SEQ ID NO: 1334706 - RNA, 15 nt, Human
uagggaacaauuugg

SEQ ID NO: 1334707 - RNA, 13 nt, Human
uaggaaaauaaaa

SEQ ID NO: 1334708 - RNA, 19 nt, Human
uaggaaagaccauuuuucc

SEQ ID NO: 1334709 - RNA, 23 nt, Human
uaggaguuuagggaacaauuugg

SEQ ID NO: 1334710 - RNA, 20 nt, Human
uaggaucauuuguuggaaug

SEQ ID NO: 1334711 - RNA, 21 nt, Human
uaggauccagugauccuuaca

SEQ ID NO: 1334712 - RNA, 13 nt, Human
uaggauguugaaa

SEQ ID NO: 1334713 - RNA, 12 nt, Human
uaggauucuaaa

SEQ ID NO: 1334714 - RNA, 14 nt, Human
uaggauucuaaaau

SEQ ID NO: 1334715 - RNA, 16 nt, Human
uaggauuuauuuaaaa

SEQ ID NO: 1334716 - RNA, 17 nt, Human
uaggauuuauuuaaaau

SEQ ID NO: 1334717 - RNA, 22 nt, Human
uaggauuuauuuaaaauagcaa

SEQ ID NO: 1334718 - RNA, 21 nt, Human
uaggauuuauuuaaaauagca

SEQ ID NO: 1334719 - RNA, 21 nt, Human
uaggauuuuuuuuaauguuua

SEQ ID NO: 1334720 - RNA, 22 nt, Human
uaggauuuuuuuuaauguuuaa

SEQ ID NO: 1334721 - RNA, 12 nt, Human
uaggcaacauag

SEQ ID NO: 1334722 - RNA, 12 nt, Human
uaguaaucauau

SEQ ID NO: 1334723 - RNA, 17 nt, Human
uaguaaucugcauuauu

SEQ ID NO: 1334724 - RNA, 14 nt, Human
uaguaaucugcauu

SEQ ID NO: 1334725 - RNA, 14 nt, Human
uaguaauugacaug

SEQ ID NO: 1334726 - RNA, 12 nt, Human
uaguacaaaguu

SEQ ID NO: 1334727 - RNA, 14 nt, Human
uaguacaaaguuuc

SEQ ID NO: 1334728 - RNA, 13 nt, Human
uaguagagacggg

SEQ ID NO: 1334729 - RNA, 19 nt, Human
acacaguaccauuuaaugg

SEQ ID NO: 1334730 - RNA, 23 nt, Human
uagguuuuaauaauuuuuuaauu

SEQ ID NO: 1334731 - RNA, 14 nt, Human
uagguuuuacagau

SEQ ID NO: 1334732 - RNA, 11 nt, Human
acacagggcag

SEQ ID NO: 1334733 - RNA, 22 nt, Human
acacaggggcuugacuuuuuca

SEQ ID NO: 1334734 - RNA, 16 nt, Human
acacaggggcuugacu

SEQ ID NO: 1334735 - RNA, 13 nt, Human
uaguaaaaauaaa

SEQ ID NO: 1334736 - RNA, 16 nt, Human
uaguaaaaauaaaauu

SEQ ID NO: 1334737 - RNA, 15 nt, Human
uagguuuuuguuugu

SEQ ID NO: 1334738 - RNA, 16 nt, Human
acacaggcauuuccug

SEQ ID NO: 1334739 - RNA, 23 nt, Human
acacacagauuugagcucagccc

SEQ ID NO: 1334740 - RNA, 18 nt, Human
acacaggcauuuccuggg

SEQ ID NO: 1334741 - RNA, 20 nt, Human
acacaggcauuuccugggug

SEQ ID NO: 1334742 - RNA, 23 nt, Human
acacaggcauuuccuggguggcu

SEQ ID NO: 1334743 - RNA, 13 nt, Human
acacaggcccucc

SEQ ID NO: 1334744 - RNA, 16 nt, Human
acacaggcccucccug

SEQ ID NO: 1334745 - RNA, 12 nt, Human
acacaggccugu

SEQ ID NO: 1334746 - RNA, 13 nt, Human
acacaggccugug

SEQ ID NO: 1334747 - RNA, 16 nt, Human
acacaggccuguguag

SEQ ID NO: 1334748 - RNA, 22 nt, Human
acacaggccuguguagcuguga

SEQ ID NO: 1334749 - RNA, 13 nt, Human
acacaauaagcaa

SEQ ID NO: 1334750 - RNA, 14 nt, Human
acacaauaagcaaa

SEQ ID NO: 1334751 - RNA, 19 nt, Human
acacaaggauagaugcugg

SEQ ID NO: 1334752 - RNA, 23 nt, Human
acacaaggauagaugcuggccca

SEQ ID NO: 1334753 - RNA, 13 nt, Human
acacaacuauauu

SEQ ID NO: 1334754 - RNA, 14 nt, Human
acacaacuauauug

SEQ ID NO: 1334755 - RNA, 23 nt, Human
acacaagauugguguuuuuuucu

SEQ ID NO: 1334756 - RNA, 18 nt, Human
acacaaauuaucuuaaaa

SEQ ID NO: 1334757 - RNA, 22 nt, Human
acaaugauccuguauucagaca

SEQ ID NO: 1334758 - RNA, 21 nt, Human
acaaugaucaccgacugaaaa

SEQ ID NO: 1334759 - RNA, 20 nt, Human
acaaugauccuguauucaga

SEQ ID NO: 1334760 - RNA, 16 nt, Human
uagguaaauuacaguu

SEQ ID NO: 1334761 - RNA, 19 nt, Human
uaggguuucccuacugaag

SEQ ID NO: 1334762 - RNA, 19 nt, Human
uaggguuugugacagggcg

SEQ ID NO: 1334763 - RNA, 12 nt, Human
uaggguaaauca

SEQ ID NO: 1334764 - RNA, 13 nt, Human
uaggguaaaucag

SEQ ID NO: 1334765 - RNA, 16 nt, Human
uaggguaaaucaguaa

SEQ ID NO: 1334766 - RNA, 22 nt, Human
uaggguaaaucaguaagaggug

SEQ ID NO: 1334767 - RNA, 15 nt, Human
uaggguacauggugc

SEQ ID NO: 1334768 - RNA, 13 nt, Human
uaggguccugggg

SEQ ID NO: 1334769 - RNA, 19 nt, Human
uaggguacauggugcuggg

SEQ ID NO: 1334770 - RNA, 15 nt, Human
uaggguauauuuucc

SEQ ID NO: 1334771 - RNA, 22 nt, Human
uagggucuggaacaccaggcug

SEQ ID NO: 1334772 - RNA, 15 nt, Human
uagggugggccuuca

SEQ ID NO: 1334773 - RNA, 16 nt, Human
uaggguggagagccac

SEQ ID NO: 1334774 - RNA, 13 nt, Human
uaucuauagcuaa

SEQ ID NO: 1334775 - RNA, 22 nt, Human
uaucuaguuuaauuaaucugua

SEQ ID NO: 1334776 - RNA, 13 nt, Human
uaucuauaauuua

SEQ ID NO: 1334777 - RNA, 14 nt, Human
uaucuauaauuuac

SEQ ID NO: 1334778 - RNA, 16 nt, Human
uaucuauaauuuaccu

SEQ ID NO: 1334779 - RNA, 19 nt, Human
uaucuauaauuuaccuaag

SEQ ID NO: 1334780 - RNA, 15 nt, Human
uaucccggcugcccu

SEQ ID NO: 1334781 - RNA, 14 nt, Human
uaucccagcugccu

SEQ ID NO: 1334782 - RNA, 15 nt, Human
uauccccccaucuug

SEQ ID NO: 1334783 - RNA, 17 nt, Human
uauccccccaucuugcu

SEQ ID NO: 1334784 - RNA, 19 nt, Human
uauccccccaucuugcuuc

SEQ ID NO: 1334785 - RNA, 20 nt, Human
uauccccccaucuugcuucc

SEQ ID NO: 1334786 - RNA, 22 nt, Human
uaucccaccugacauguccuuc

SEQ ID NO: 1334787 - RNA, 20 nt, Human
uaucccaccuccaucccaga

SEQ ID NO: 1334788 - RNA, 16 nt, Human
uaucccagcugccuag

SEQ ID NO: 1334789 - RNA, 16 nt, Human
uauccccauuucuuuu

SEQ ID NO: 1334790 - RNA, 23 nt, Human
uauccaccaaaagggcucccuga

SEQ ID NO: 1334791 - RNA, 16 nt, Human
uaucacacaaagcaga

SEQ ID NO: 1334792 - RNA, 15 nt, Human
uauccaaucaaucuu

SEQ ID NO: 1334793 - RNA, 17 nt, Human
uaucagacuaagccagc

SEQ ID NO: 1334794 - RNA, 21 nt, Human
uaucagacucggaaucuauuu

SEQ ID NO: 1334795 - RNA, 14 nt, Human
acagaccuuugaac

SEQ ID NO: 1334796 - RNA, 18 nt, Human
acagacgcugcugucaca

SEQ ID NO: 1334797 - RNA, 17 nt, Human
acagacggaaggguaaa

SEQ ID NO: 1334798 - RNA, 21 nt, Human
acagacggaaggguaaacaau

SEQ ID NO: 1334799 - RNA, 13 nt, Human
acagacaggcucu

SEQ ID NO: 1334800 - RNA, 15 nt, Human
acagacaggcucuua

SEQ ID NO: 1334801 - RNA, 23 nt, Human
acagacggaaggguaaacaauau

SEQ ID NO: 1334802 - RNA, 23 nt, Human
uaucaaauacauuuaaaacauua

SEQ ID NO: 1334803 - RNA, 15 nt, Human
uaucaaaucuaccac

SEQ ID NO: 1334804 - RNA, 14 nt, Human
uaucacacaaagca

SEQ ID NO: 1334805 - RNA, 20 nt, Human
uaucacccagacauaaagga

SEQ ID NO: 1334806 - RNA, 22 nt, Human
uaucacccagacauaaaggaaa

SEQ ID NO: 1334807 - RNA, 23 nt, Human
uaucacccagacauaaaggaaaa

SEQ ID NO: 1334808 - RNA, 19 nt, Human
uaucaccgugggcucccug

SEQ ID NO: 1334809 - RNA, 23 nt, Human
uaucaccgugggcucccugacug

SEQ ID NO: 1334810 - RNA, 18 nt, Human
uaucaccuagcugaaugu

SEQ ID NO: 1334811 - RNA, 16 nt, Human
uaucaccuagcugaau

SEQ ID NO: 1334812 - RNA, 19 nt, Human
uaucaauuaccacaccauc

SEQ ID NO: 1334813 - RNA, 17 nt, Human
acacuuacuuuuucugg

SEQ ID NO: 1334814 - RNA, 20 nt, Human
acacuuauuggaacucugcu

SEQ ID NO: 1334815 - RNA, 16 nt, Human
acacuucaaacuacuu

SEQ ID NO: 1334816 - RNA, 15 nt, Human
acacuucaggcucuu

SEQ ID NO: 1334817 - RNA, 19 nt, Human
acacuucaggcucuucucc

SEQ ID NO: 1334818 - RNA, 22 nt, Human
acacuucaggcucuucuccuuu

SEQ ID NO: 1334819 - RNA, 14 nt, Human
acacuuccauaauc

SEQ ID NO: 1334820 - RNA, 14 nt, Human
acacuuaauacuac

SEQ ID NO: 1334821 - RNA, 24 nt, Human
acagaaaugauuacuaaggaagau

SEQ ID NO: 1334822 - RNA, 13 nt, Human
acagaaagcugcc

SEQ ID NO: 1334823 - RNA, 14 nt, Human
acacuucucaggac

SEQ ID NO: 1334824 - RNA, 16 nt, Human
acacuucucaggacac

SEQ ID NO: 1334825 - RNA, 20 nt, Human
acacuucucaggacacaggc

SEQ ID NO: 1334826 - RNA, 22 nt, Human
acacuucucaggacacaggccu

SEQ ID NO: 1334827 - RNA, 24 nt, Human
acacuucucaggacacaggccugu

SEQ ID NO: 1334828 - RNA, 23 nt, Human
acacuucucaggacacaggccug

SEQ ID NO: 1334829 - RNA, 13 nt, Human
acacuugcaaccu

SEQ ID NO: 1334830 - RNA, 14 nt, Human
acacuugguaauug

SEQ ID NO: 1334831 - RNA, 21 nt, Human
acacuuguaauuuuguaucuu

SEQ ID NO: 1334832 - RNA, 21 nt, Human
acacuuuuucucuuuccauga

SEQ ID NO: 1334833 - RNA, 11 nt, Human
acagaaaaacc

SEQ ID NO: 1334834 - RNA, 14 nt, Human
acagaaaaaccuug

SEQ ID NO: 1334835 - RNA, 21 nt, Human
acagaaaaaccuuggguuaga

SEQ ID NO: 1334836 - RNA, 19 nt, Human
acagaaaaauauguaccaa

SEQ ID NO: 1334837 - RNA, 23 nt, Human
uauauauguguaugcacaguaaa

SEQ ID NO: 1334838 - RNA, 21 nt, Human
uauauauguguaugcacagua

SEQ ID NO: 1334839 - RNA, 19 nt, Human
uauauauguacaguuaucu

SEQ ID NO: 1334840 - RNA, 17 nt, Human
uauauauguacaguuau

SEQ ID NO: 1334841 - RNA, 13 nt, Human
uauauauuauacu

SEQ ID NO: 1334842 - RNA, 14 nt, Human
uauauauuauacuu

SEQ ID NO: 1334843 - RNA, 16 nt, Human
uauauauuauacuugu

SEQ ID NO: 1334844 - RNA, 18 nt, Human
uauauauuauacuuguaa

SEQ ID NO: 1334845 - RNA, 15 nt, Human
uauauauuauaugga

SEQ ID NO: 1334846 - RNA, 16 nt, Human
uauauauuauauggaa

SEQ ID NO: 1334847 - RNA, 17 nt, Human
uauauauuauauggaaa

SEQ ID NO: 1334848 - RNA, 14 nt, Human
uauauauuaucuuu

SEQ ID NO: 1334849 - RNA, 18 nt, Human
uauauauuaucuuuucau

SEQ ID NO: 1334850 - RNA, 14 nt, Human
uauauauucuauua

SEQ ID NO: 1334851 - RNA, 15 nt, Human
uauauauuuaaaagu

SEQ ID NO: 1334852 - RNA, 19 nt, Human
uauauauuuaaaaguguca

SEQ ID NO: 1334853 - RNA, 21 nt, Human
uauauagccaauauaacuauc

SEQ ID NO: 1334854 - RNA, 22 nt, Human
uauauauggggaugguaguuuu

SEQ ID NO: 1334855 - RNA, 14 nt, Human
uauauauguacagu

SEQ ID NO: 1334856 - RNA, 19 nt, Human
uauauauuuuuuucugaaa

SEQ ID NO: 1334857 - RNA, 20 nt, Human
uauauauuuuuuucugaaau

SEQ ID NO: 1334858 - RNA, 21 nt, Human
uauaucuauauuuuacauaaa

SEQ ID NO: 1334859 - RNA, 18 nt, Human
uauaucuagguuuaugac

SEQ ID NO: 1334860 - RNA, 22 nt, Human
uauaucuagguuuaugacagua

SEQ ID NO: 1334861 - RNA, 21 nt, Human
uauaucuaccccagacuagau

SEQ ID NO: 1334862 - RNA, 19 nt, Human
acacucaugcauuguccuc

SEQ ID NO: 1334863 - RNA, 23 nt, Human
uauagaugggggaaagcaaagca

SEQ ID NO: 1334864 - RNA, 22 nt, Human
uauagaugggggaaagcaaagc

SEQ ID NO: 1334865 - RNA, 14 nt, Human
uauagaugucuuuu

SEQ ID NO: 1334866 - RNA, 18 nt, Human
uauagaugucuuuuccca

SEQ ID NO: 1334867 - RNA, 15 nt, Human
uauagaugucuuuuc

SEQ ID NO: 1334868 - RNA, 18 nt, Human
uauagccaaaaauagcua

SEQ ID NO: 1334869 - RNA, 19 nt, Human
uauagccaaaaauagcuaa

SEQ ID NO: 1334870 - RNA, 22 nt, Human
uauagccaaaaauagcuaaaua

SEQ ID NO: 1334871 - RNA, 23 nt, Human
uauagcucuaauguuugcauaua

SEQ ID NO: 1334872 - RNA, 14 nt, Human
uauagccaauauaa

SEQ ID NO: 1334873 - RNA, 17 nt, Human
uauagccaauauaacua

SEQ ID NO: 1334874 - RNA, 17 nt, Human
uauagcugcuuccagug

SEQ ID NO: 1334875 - RNA, 22 nt, Human
uauagcugcuuccaguguagac

SEQ ID NO: 1334876 - RNA, 12 nt, Human
uauaggaauuga

SEQ ID NO: 1334877 - RNA, 15 nt, Human
uauaggaucauuugu

SEQ ID NO: 1334878 - RNA, 19 nt, Human
uauaggauuuauuuaaaau

SEQ ID NO: 1334879 - RNA, 15 nt, Human
uauaggcaccuacca

SEQ ID NO: 1334880 - RNA, 19 nt, Human
uauaggcauaccuccuaug

SEQ ID NO: 1334881 - RNA, 21 nt, Human
uauaggauuuauuuaaaauag

SEQ ID NO: 1334882 - RNA, 19 nt, Human
uauaagugauugcugguuu

SEQ ID NO: 1334883 - RNA, 16 nt, Human
uauaacuggaaagaag

SEQ ID NO: 1334884 - RNA, 13 nt, Human
uauaacuguauuu

SEQ ID NO: 1334885 - RNA, 23 nt, Human
uauaacuguauuugaaauaagaa

SEQ ID NO: 1334886 - RNA, 21 nt, Human
acacuaauauauuuaaaaaua

SEQ ID NO: 1334887 - RNA, 22 nt, Human
acacuaauauauuuaaaaauaa

SEQ ID NO: 1334888 - RNA, 13 nt, Human
acacuaauucaua

SEQ ID NO: 1334889 - RNA, 12 nt, Human
acacuaauucau

SEQ ID NO: 1334890 - RNA, 18 nt, Human
uagucaccagagacuuua

SEQ ID NO: 1334891 - RNA, 15 nt, Human
uagucaccagagacu

SEQ ID NO: 1334892 - RNA, 13 nt, Human
acacuaauauauu

SEQ ID NO: 1334893 - RNA, 14 nt, Human
acacuaauauauuu

SEQ ID NO: 1334894 - RNA, 17 nt, Human
acacuaauauauuuaaa

SEQ ID NO: 1334895 - RNA, 19 nt, Human
acacuaauauauuuaaaaa

SEQ ID NO: 1334896 - RNA, 20 nt, Human
acacuaauauauuuaaaaau

SEQ ID NO: 1334897 - RNA, 14 nt, Human
uauaauuuaccuaa

SEQ ID NO: 1334898 - RNA, 16 nt, Human
uauaauuuaccuaaga

SEQ ID NO: 1334899 - RNA, 13 nt, Human
uauaaguguacau

SEQ ID NO: 1334900 - RNA, 14 nt, Human
uauaaguguacaua

SEQ ID NO: 1334901 - RNA, 22 nt, Human
uauaauuguuuuaucugaauuu

SEQ ID NO: 1334902 - RNA, 18 nt, Human
uauaauuguuuuaucuga

SEQ ID NO: 1334903 - RNA, 17 nt, Human
uauaauuuaccuaagau

SEQ ID NO: 1334904 - RNA, 18 nt, Human
uauaauuuaccuaagauu

SEQ ID NO: 1334905 - RNA, 20 nt, Human
uauaauuuaccuaagauuac

SEQ ID NO: 1334906 - RNA, 16 nt, Human
uauacauacuaugaaa

SEQ ID NO: 1334907 - RNA, 21 nt, Human
uauacauacuaugaaauaugu

SEQ ID NO: 1334908 - RNA, 20 nt, Human
uauacagcuguauugucuga

SEQ ID NO: 1334909 - RNA, 13 nt, Human
uauagaucagcca

SEQ ID NO: 1334910 - RNA, 15 nt, Human
uaugccccauucaac

SEQ ID NO: 1334911 - RNA, 19 nt, Human
uaugccauugggguaguug

SEQ ID NO: 1334912 - RNA, 17 nt, Human
uaugccauauaauucac

SEQ ID NO: 1334913 - RNA, 20 nt, Human
uaugccaccugaauaaagaa

SEQ ID NO: 1334914 - RNA, 14 nt, Human
uaugcauuauauca

SEQ ID NO: 1334915 - RNA, 17 nt, Human
uaugauacuugaaaauu

SEQ ID NO: 1334916 - RNA, 17 nt, Human
uaugauaauagauucuc

SEQ ID NO: 1334917 - RNA, 20 nt, Human
uaugauacuucgacacuguu

SEQ ID NO: 1334918 - RNA, 24 nt, Human
uaugauagguuauuuugauguaaa

SEQ ID NO: 1334919 - RNA, 18 nt, Human
uaugaucaaauguuuaau

SEQ ID NO: 1334920 - RNA, 16 nt, Human
uaugaucaaauguuua

SEQ ID NO: 1334921 - RNA, 15 nt, Human
uaugaucaaauguuu

SEQ ID NO: 1334922 - RNA, 14 nt, Human
uaugaucaaauguu

SEQ ID NO: 1334923 - RNA, 13 nt, Human
uaugaucaaaugu

SEQ ID NO: 1334924 - RNA, 12 nt, Human
uaugaucaaaug

SEQ ID NO: 1334925 - RNA, 22 nt, Human
uaugauauuuucugugccugaa

SEQ ID NO: 1334926 - RNA, 23 nt, Human
uaugauacuucgacacuguucuu

SEQ ID NO: 1334927 - RNA, 15 nt, Human
uaugauauuuucugu

SEQ ID NO: 1334928 - RNA, 22 nt, Human
uaugaucaaauguuuaaucaua

SEQ ID NO: 1334929 - RNA, 20 nt, Human
uaugaucaaauguuuaauca

SEQ ID NO: 1334930 - RNA, 18 nt, Human
uaugcauggugccccagg

SEQ ID NO: 1334931 - RNA, 20 nt, Human
uaugcauggugccccaggac

SEQ ID NO: 1334932 - RNA, 21 nt, Human
uaugcauggugccccaggacc

SEQ ID NO: 1334933 - RNA, 22 nt, Human
uaugcauggugccccaggacca

SEQ ID NO: 1334934 - RNA, 23 nt, Human
uaugcauggugccccaggaccag

SEQ ID NO: 1334935 - RNA, 16 nt, Human
uaugcaugguuucagc

SEQ ID NO: 1334936 - RNA, 17 nt, Human
uaugcaugguuucagca

SEQ ID NO: 1334937 - RNA, 18 nt, Human
uaugcaugguuucagcac

SEQ ID NO: 1334938 - RNA, 19 nt, Human
uaugcaugguuucagcacu

SEQ ID NO: 1334939 - RNA, 20 nt, Human
uaugcaugguuucagcacua

SEQ ID NO: 1334940 - RNA, 22 nt, Human
uaugcauguugucuaagaaauu

SEQ ID NO: 1334941 - RNA, 16 nt, Human
uaugcauuauaucaaa

SEQ ID NO: 1334942 - RNA, 16 nt, Human
acagcggaggugugga

SEQ ID NO: 1334943 - RNA, 21 nt, Human
acagcgcccaaaggacgcacu

SEQ ID NO: 1334944 - RNA, 15 nt, Human
acagcggaggugugg

SEQ ID NO: 1334945 - RNA, 18 nt, Human
uauggugccuaguauuga

SEQ ID NO: 1334946 - RNA, 19 nt, Human
uauggugccuaguauugac

SEQ ID NO: 1334947 - RNA, 17 nt, Human
uauggugccuaguauug

SEQ ID NO: 1334948 - RNA, 22 nt, Human
uauggugcaauguguguauaug

SEQ ID NO: 1334949 - RNA, 20 nt, Human
uauggugcaauguguguaua

SEQ ID NO: 1334950 - RNA, 21 nt, Human
uaugguauuuauuuuuucuuu

SEQ ID NO: 1334951 - RNA, 15 nt, Human
uaucuauauuuuaca

SEQ ID NO: 1334952 - RNA, 22 nt, Human
acagauuugagcucagcccugg

SEQ ID NO: 1334953 - RNA, 14 nt, Human
acagauuuggaaag

SEQ ID NO: 1334954 - RNA, 15 nt, Human
acagauuuggaaaga

SEQ ID NO: 1334955 - RNA, 21 nt, Human
acagauuuggaaagacuggac

SEQ ID NO: 1334956 - RNA, 15 nt, Human
acagcaauuccucag

SEQ ID NO: 1334957 - RNA, 17 nt, Human
acagcaauuccucaggc

SEQ ID NO: 1334958 - RNA, 19 nt, Human
acagcaauuccucaggcua

SEQ ID NO: 1334959 - RNA, 14 nt, Human
acagcaauuucuaa

SEQ ID NO: 1334960 - RNA, 12 nt, Human
acagcacagcca

SEQ ID NO: 1334961 - RNA, 13 nt, Human
acagcaccaaauc

SEQ ID NO: 1334962 - RNA, 23 nt, Human
acagcccuccaucuaaacugccc

SEQ ID NO: 1334963 - RNA, 14 nt, Human
acagccccuccucc

SEQ ID NO: 1334964 - RNA, 16 nt, Human
acagccccuccuccau

SEQ ID NO: 1334965 - RNA, 19 nt, Human
acagcacgggggccaagga

SEQ ID NO: 1334966 - RNA, 17 nt, Human
acagcagccccugcaca

SEQ ID NO: 1334967 - RNA, 14 nt, Human
acagcagcaucucu

SEQ ID NO: 1334968 - RNA, 13 nt, Human
acagcagcaucuc

SEQ ID NO: 1334969 - RNA, 13 nt, Human
acagcagacucag

SEQ ID NO: 1334970 - RNA, 18 nt, Human
acagcagacucagcucug

SEQ ID NO: 1334971 - RNA, 19 nt, Human
acagcagacucagcucuga

SEQ ID NO: 1334972 - RNA, 23 nt, Human
acagcagacucagcucugacauu

SEQ ID NO: 1334973 - RNA, 14 nt, Human
uaugaaaaagaaga

SEQ ID NO: 1334974 - RNA, 15 nt, Human
uaugaaaaagaagaa

SEQ ID NO: 1334975 - RNA, 14 nt, Human
uaugaaaagcuaga

SEQ ID NO: 1334976 - RNA, 19 nt, Human
uaugaaaagcuagaauuga

SEQ ID NO: 1334977 - RNA, 19 nt, Human
acagcccuucuuuccacag

SEQ ID NO: 1334978 - RNA, 22 nt, Human
acagcccugucagcaugaauuu

SEQ ID NO: 1334979 - RNA, 21 nt, Human
acagcccugucagcaugaauu

SEQ ID NO: 1334980 - RNA, 22 nt, Human
acagcccuuaugcgguuaauuu

SEQ ID NO: 1334981 - RNA, 23 nt, Human
acagcccuuaugcgguuaauuuu

SEQ ID NO: 1334982 - RNA, 12 nt, Human
acagcccuguca

SEQ ID NO: 1334983 - RNA, 13 nt, Human
acagcccugucag

SEQ ID NO: 1334984 - RNA, 14 nt, Human
acagcccugucagc

SEQ ID NO: 1334985 - RNA, 17 nt, Human
acagcccugucagcaug

SEQ ID NO: 1334986 - RNA, 18 nt, Human
acagcccugucagcauga

SEQ ID NO: 1334987 - RNA, 19 nt, Human
acagcccugucagcaugaa

SEQ ID NO: 1334988 - RNA, 23 nt, Human
uaugaagcuuuuaugugaaacau

SEQ ID NO: 1334989 - RNA, 21 nt, Human
uaugaaggcuguacacugcac

SEQ ID NO: 1334990 - RNA, 22 nt, Human
uaugaagcuuuuaugugaaaca

SEQ ID NO: 1334991 - RNA, 20 nt, Human
uaugaagcuuuuaugugaaa

SEQ ID NO: 1334992 - RNA, 14 nt, Human
acagcuguaugauu

SEQ ID NO: 1334993 - RNA, 19 nt, Human
acagcuguaugauucccag

SEQ ID NO: 1334994 - RNA, 20 nt, Human
acagcuguaugauucccagc

SEQ ID NO: 1334995 - RNA, 23 nt, Human
acagcuguaugauucccagccag

SEQ ID NO: 1334996 - RNA, 17 nt, Human
acagcuguauugucuga

SEQ ID NO: 1334997 - RNA, 19 nt, Human
acagcuguauugucugaac

SEQ ID NO: 1334998 - RNA, 20 nt, Human
acagcuguauugucugaacu

SEQ ID NO: 1334999 - RNA, 12 nt, Human
acagcugugccu

SEQ ID NO: 1335000 - RNA, 13 nt, Human
acagcugugccuc

SEQ ID NO: 1335001 - RNA, 15 nt, Human
acagcugugccucgc

SEQ ID NO: 1335002 - RNA, 17 nt, Human
acagcugugccucgcuc

SEQ ID NO: 1335003 - RNA, 16 nt, Human
acagcugugccucgcu

SEQ ID NO: 1335004 - RNA, 23 nt, Human
acagcuguucaguugcacuucua

SEQ ID NO: 1335005 - RNA, 14 nt, Human
acagcuuagauuuc

SEQ ID NO: 1335006 - RNA, 16 nt, Human
acagcuuagauuucau

SEQ ID NO: 1335007 - RNA, 18 nt, Human
acagcuuagauuucauag

SEQ ID NO: 1335008 - RNA, 21 nt, Human
acagcuaauucuacucacagu

SEQ ID NO: 1335009 - RNA, 14 nt, Human
acagcuacucuccc

SEQ ID NO: 1335010 - RNA, 22 nt, Human
acagcuacucuccccacgaggg

SEQ ID NO: 1335011 - RNA, 23 nt, Human
acagcuacucuccccacgagggc

SEQ ID NO: 1335012 - RNA, 18 nt, Human
acagcucagaaguuucuu

SEQ ID NO: 1335013 - RNA, 11 nt, Human
acagcuggugu

SEQ ID NO: 1335014 - RNA, 12 nt, Human
acagcuggugua

SEQ ID NO: 1335015 - RNA, 15 nt, Human
acagcugguguagcu

SEQ ID NO: 1335016 - RNA, 16 nt, Human
acagcugguguagcua

SEQ ID NO: 1335017 - RNA, 19 nt, Human
acagcugguguagcuacag

SEQ ID NO: 1335018 - RNA, 20 nt, Human
acagcugguguagcuacaga

SEQ ID NO: 1335019 - RNA, 21 nt, Human
acagcugguguagcuacagag

SEQ ID NO: 1335020 - RNA, 22 nt, Human
acagcugguguagcuacagaga

SEQ ID NO: 1335021 - RNA, 23 nt, Human
acagcugguguagcuacagagaa

SEQ ID NO: 1335022 - RNA, 22 nt, Human
acagcuguauagcugcuuccag

SEQ ID NO: 1335023 - RNA, 17 nt, Human
acagcuuagauuucaua

SEQ ID NO: 1335024 - RNA, 20 nt, Human
acagcuucucauccugcagg

SEQ ID NO: 1335025 - RNA, 21 nt, Human
acagcuucucauccugcaggc

SEQ ID NO: 1335026 - RNA, 15 nt, Human
acagcuugaccugag

SEQ ID NO: 1335027 - RNA, 17 nt, Human
acagcuugaccugaggc

SEQ ID NO: 1335028 - RNA, 19 nt, Human
acagcuugaccugaggcug

SEQ ID NO: 1335029 - RNA, 21 nt, Human
acagcuugaccugaggcugug

SEQ ID NO: 1335030 - RNA, 22 nt, Human
acagcuugaccugaggcugugg

SEQ ID NO: 1335031 - RNA, 17 nt, Human
acagcuuguaggggagg

SEQ ID NO: 1335032 - RNA, 22 nt, Human
acaggaaccacaagacugcaca

SEQ ID NO: 1335033 - RNA, 19 nt, Human
acaggaaacuccugugacc

SEQ ID NO: 1335034 - RNA, 22 nt, Human
acaggaaacuccugugaccaca

SEQ ID NO: 1335035 - RNA, 20 nt, Human
acaggaaacuccugugacca

SEQ ID NO: 1335036 - RNA, 23 nt, Human
acagcuugaccugaggcuguggu

SEQ ID NO: 1335037 - RNA, 16 nt, Human
acaggacucugccucc

SEQ ID NO: 1335038 - RNA, 15 nt, Human
acaggacucugccuc

SEQ ID NO: 1335039 - RNA, 13 nt, Human
acaggagcuaccu

SEQ ID NO: 1335040 - RNA, 23 nt, Human
acaggagcuaccuguguggacag

SEQ ID NO: 1335041 - RNA, 21 nt, Human
acaggcagccagugcccugag

SEQ ID NO: 1335042 - RNA, 14 nt, Human
acaggagcuaccug

SEQ ID NO: 1335043 - RNA, 15 nt, Human
acaggcagccagugc

SEQ ID NO: 1335044 - RNA, 19 nt, Human
acaggcagccagugcccug

SEQ ID NO: 1335045 - RNA, 22 nt, Human
acaggcagccagugcccugagc

SEQ ID NO: 1335046 - RNA, 12 nt, Human
acaggcccccuu

SEQ ID NO: 1335047 - RNA, 21 nt, Human
acaggcccccuugaguggggu

SEQ ID NO: 1335048 - RNA, 13 nt, Human
acaggcccuuccu

SEQ ID NO: 1335049 - RNA, 21 nt, Human
acaggcccucccuguucccca

SEQ ID NO: 1335050 - RNA, 22 nt, Human
acaggcccucccuguuccccag

SEQ ID NO: 1335051 - RNA, 23 nt, Human
acaggcccucccuguuccccaga

SEQ ID NO: 1335052 - RNA, 15 nt, Human
acaggcccuuccucu

SEQ ID NO: 1335053 - RNA, 22 nt, Human
acaggcccuuccucuccacugc

SEQ ID NO: 1335054 - RNA, 19 nt, Human
acaggccucacacacaaug

SEQ ID NO: 1335055 - RNA, 16 nt, Human
acaggccgcccugcgg

SEQ ID NO: 1335056 - RNA, 13 nt, Human
acaggccucaggg

SEQ ID NO: 1335057 - RNA, 14 nt, Human
acaggccucagggc

SEQ ID NO: 1335058 - RNA, 18 nt, Human
acaggccucagggcuccu

SEQ ID NO: 1335059 - RNA, 15 nt, Human
acaggccucagggcu

SEQ ID NO: 1335060 - RNA, 19 nt, Human
acaggccuguguagcugug

SEQ ID NO: 1335061 - RNA, 20 nt, Human
acaggccuguguagcuguga

SEQ ID NO: 1335062 - RNA, 23 nt, Human
acaggccuguguagcugugaccu

SEQ ID NO: 1335063 - RNA, 13 nt, Human
uauguccaggugu

SEQ ID NO: 1335064 - RNA, 14 nt, Human
uaugucucuucuga

SEQ ID NO: 1335065 - RNA, 19 nt, Human
uaugucucuucugagcuau

SEQ ID NO: 1335066 - RNA, 13 nt, Human
uaugucugguucu

SEQ ID NO: 1335067 - RNA, 17 nt, Human
uaugucugguucucaau

SEQ ID NO: 1335068 - RNA, 18 nt, Human
uaugucugguucucaauu

SEQ ID NO: 1335069 - RNA, 21 nt, Human
uaugucugguucucaauucca

SEQ ID NO: 1335070 - RNA, 22 nt, Human
uaugucugguucucaauuccaa

SEQ ID NO: 1335071 - RNA, 18 nt, Human
uaauuuuuauauuugaaa

SEQ ID NO: 1335072 - RNA, 16 nt, Human
uaauuuauaaaaaggu

SEQ ID NO: 1335073 - RNA, 19 nt, Human
uaauuuuuauauuugaaau

SEQ ID NO: 1335074 - RNA, 21 nt, Human
uaauuuuuauauuugaaauau

SEQ ID NO: 1335075 - RNA, 19 nt, Human
uaauuuaacuuucuggguu

SEQ ID NO: 1335076 - RNA, 11 nt, Human
uaauuuaacuu

SEQ ID NO: 1335077 - RNA, 14 nt, Human
uaauuuagaaaacu

SEQ ID NO: 1335078 - RNA, 15 nt, Human
uaauuuagaaaacuu

SEQ ID NO: 1335079 - RNA, 16 nt, Human
uaauuuagaaaacuuu

SEQ ID NO: 1335080 - RNA, 17 nt, Human
uaauuuagaaaacuuua

SEQ ID NO: 1335081 - RNA, 21 nt, Human
uaauuuagaaaacuuuaaagc

SEQ ID NO: 1335082 - RNA, 14 nt, Human
uaauuuagaaauca

SEQ ID NO: 1335083 - RNA, 15 nt, Human
uaauuuagaaaucau

SEQ ID NO: 1335084 - RNA, 21 nt, Human
uaauuuagacuucaagcaugg

SEQ ID NO: 1335085 - RNA, 17 nt, Human
uaauuuagacuuggauu

SEQ ID NO: 1335086 - RNA, 21 nt, Human
uaauuuagacuuggauucuuu

SEQ ID NO: 1335087 - RNA, 16 nt, Human
uaauuuaguaaaccaa

SEQ ID NO: 1335088 - RNA, 16 nt, Human
uaauuuaguuucauau

SEQ ID NO: 1335089 - RNA, 17 nt, Human
uaauuuaguuucauaua

SEQ ID NO: 1335090 - RNA, 13 nt, Human
uaauuuauaaaaa

SEQ ID NO: 1335091 - RNA, 22 nt, Human
uaauuccguagguuauuuucag

SEQ ID NO: 1335092 - RNA, 14 nt, Human
uaauuauuauuuau

SEQ ID NO: 1335093 - RNA, 17 nt, Human
uaauuauuauuuauaua

SEQ ID NO: 1335094 - RNA, 22 nt, Human
uaauuauuauuuauauauguau

SEQ ID NO: 1335095 - RNA, 14 nt, Human
uaauuauuauuugu

SEQ ID NO: 1335096 - RNA, 17 nt, Human
uaauuauuauuuguguu

SEQ ID NO: 1335097 - RNA, 19 nt, Human
uaauuccucaacguauugu

SEQ ID NO: 1335098 - RNA, 11 nt, Human
uaauuuaaaca

SEQ ID NO: 1335099 - RNA, 17 nt, Human
uaauuuaaacaccuccu

SEQ ID NO: 1335100 - RNA, 19 nt, Human
uaauuuaaacaccuccuca

SEQ ID NO: 1335101 - RNA, 22 nt, Human
aaugcacuuucuauccucugua

SEQ ID NO: 1335102 - RNA, 16 nt, Human
uaauuauguagcucuu

SEQ ID NO: 1335103 - RNA, 14 nt, Human
uaauuauguagcuc

SEQ ID NO: 1335104 - RNA, 15 nt, Human
uaauuauguagcucu

SEQ ID NO: 1335105 - RNA, 12 nt, Human
uaauuauuauuc

SEQ ID NO: 1335106 - RNA, 14 nt, Human
uaauuauuauucuu

SEQ ID NO: 1335107 - RNA, 12 nt, Human
uaauuauuauuu

SEQ ID NO: 1335108 - RNA, 13 nt, Human
uaauuauuauuua

SEQ ID NO: 1335109 - RNA, 11 nt, Human
aaugcacuuuc

SEQ ID NO: 1335110 - RNA, 13 nt, Human
aaugcacuuucua

SEQ ID NO: 1335111 - RNA, 15 nt, Human
aaugcacuuucuauc

SEQ ID NO: 1335112 - RNA, 15 nt, Human
aaugauuuuucuuua

SEQ ID NO: 1335113 - RNA, 17 nt, Human
aaugauuuuucuuuaca

SEQ ID NO: 1335114 - RNA, 18 nt, Human
aaugauuuuucuuuacaa

SEQ ID NO: 1335115 - RNA, 11 nt, Human
aaugauuucag

SEQ ID NO: 1335116 - RNA, 20 nt, Human
aaugauuuccucuguaaucu

SEQ ID NO: 1335117 - RNA, 23 nt, Human
aaugauuuccucuguaaucuauu

SEQ ID NO: 1335118 - RNA, 16 nt, Human
aaugauuucauucaau

SEQ ID NO: 1335119 - RNA, 17 nt, Human
aaugcaaaaacucuuug

SEQ ID NO: 1335120 - RNA, 17 nt, Human
aaugcacaagaauggau

SEQ ID NO: 1335121 - RNA, 15 nt, Human
aaugcaccuaaagaa

SEQ ID NO: 1335122 - RNA, 16 nt, Human
aaugcaccuaaagaaa

SEQ ID NO: 1335123 - RNA, 22 nt, Human
aaugagaaaucuaaaaaacgaa

SEQ ID NO: 1335124 - RNA, 12 nt, Human
aaugagaaaucu

SEQ ID NO: 1335125 - RNA, 22 nt, Human
aaugagagacacacugaagaag

SEQ ID NO: 1335126 - RNA, 14 nt, Human
aaugagaaccaaca

SEQ ID NO: 1335127 - RNA, 12 nt, Human
aaugagcauguu

SEQ ID NO: 1335128 - RNA, 14 nt, Human
aaugagcauguuua

SEQ ID NO: 1335129 - RNA, 22 nt, Human
aaugagcauguuuagacuuuaa

SEQ ID NO: 1335130 - RNA, 16 nt, Human
aaugagcauguuuaga

SEQ ID NO: 1335131 - RNA, 17 nt, Human
aaugagagguuccuaag

SEQ ID NO: 1335132 - RNA, 15 nt, Human
aaugagauugaauuu

SEQ ID NO: 1335133 - RNA, 16 nt, Human
aaugagauugaauuuc

SEQ ID NO: 1335134 - RNA, 14 nt, Human
aaucuguaaacugu

SEQ ID NO: 1335135 - RNA, 15 nt, Human
aaucuguaaacugug

SEQ ID NO: 1335136 - RNA, 16 nt, Human
aaucuguaaacugugu

SEQ ID NO: 1335137 - RNA, 21 nt, Human
aaucuguaaacuguguauucc

SEQ ID NO: 1335138 - RNA, 23 nt, Human
aaucuguaaacuguguauuccaa

SEQ ID NO: 1335139 - RNA, 16 nt, Human
aaugaggccauggacu

SEQ ID NO: 1335140 - RNA, 22 nt, Human
aaugaggccauggacucugucc

SEQ ID NO: 1335141 - RNA, 24 nt, Human
aaugaggcuuggggcuggagagga

SEQ ID NO: 1335142 - RNA, 15 nt, Human
aaugaggucagcaug

SEQ ID NO: 1335143 - RNA, 19 nt, Human
aaugaggucagcaugucua

SEQ ID NO: 1335144 - RNA, 12 nt, Human
aaugauuauuuu

SEQ ID NO: 1335145 - RNA, 13 nt, Human
aaugauucagugu

SEQ ID NO: 1335146 - RNA, 14 nt, Human
aaugauucaguguu

SEQ ID NO: 1335147 - RNA, 12 nt, Human
aaugaguaacau

SEQ ID NO: 1335148 - RNA, 19 nt, Human
aaugaguaacauuugcugu

SEQ ID NO: 1335149 - RNA, 17 nt, Human
aaugaguaacauuugcu

SEQ ID NO: 1335150 - RNA, 24 nt, Human
aaugauuucagcucacugcaaccu

SEQ ID NO: 1335151 - RNA, 13 nt, Human
aaugauuucaugc

SEQ ID NO: 1335152 - RNA, 22 nt, Human
aaugauuucaugcuaucucugu

SEQ ID NO: 1335153 - RNA, 15 nt, Human
aaugauuguaguaau

SEQ ID NO: 1335154 - RNA, 21 nt, Human
aaugauucaguguuaaaugug

SEQ ID NO: 1335155 - RNA, 22 nt, Human
aaugauucaguguuaaauguga

SEQ ID NO: 1335156 - RNA, 23 nt, Human
aaugauucaguguuaaaugugau

SEQ ID NO: 1335157 - RNA, 14 nt, Human
uacacccagcaaua

SEQ ID NO: 1335158 - RNA, 15 nt, Human
uacacccuuuuccag

SEQ ID NO: 1335159 - RNA, 16 nt, Human
uacacccuuuuccagc

SEQ ID NO: 1335160 - RNA, 12 nt, Human
uacacccagcaa

SEQ ID NO: 1335161 - RNA, 11 nt, Human
uacacccagca

SEQ ID NO: 1335162 - RNA, 14 nt, Human
uacacccaaagagg

SEQ ID NO: 1335163 - RNA, 19 nt, Human
aauguaaucaauguuucuu

SEQ ID NO: 1335164 - RNA, 12 nt, Human
aauguaauuauu

SEQ ID NO: 1335165 - RNA, 22 nt, Human
aauguaauuauuuauguauggu

SEQ ID NO: 1335166 - RNA, 17 nt, Human
aauguaauuauuuaugu

SEQ ID NO: 1335167 - RNA, 15 nt, Human
uacaccgggccugga

SEQ ID NO: 1335168 - RNA, 17 nt, Human
uacaccgggccuggaga

SEQ ID NO: 1335169 - RNA, 17 nt, Human
uacagagaagccuucaa

SEQ ID NO: 1335170 - RNA, 18 nt, Human
uacagagaagccuucaag

SEQ ID NO: 1335171 - RNA, 19 nt, Human
uacagagaagccuucaagc

SEQ ID NO: 1335172 - RNA, 20 nt, Human
uacagagaagccuucaagcu

SEQ ID NO: 1335173 - RNA, 21 nt, Human
uacagagaagccuucaagcuc

SEQ ID NO: 1335174 - RNA, 17 nt, Human
uacagagacagaaagca

SEQ ID NO: 1335175 - RNA, 22 nt, Human
uacagagaagccuucaagcucu

SEQ ID NO: 1335176 - RNA, 23 nt, Human
uacagagaagccuucaagcucug

SEQ ID NO: 1335177 - RNA, 24 nt, Human
uacagagaagccuucaagcucuga

SEQ ID NO: 1335178 - RNA, 13 nt, Human
uacagagaaguca

SEQ ID NO: 1335179 - RNA, 20 nt, Human
uacagagaagucacagggca

SEQ ID NO: 1335180 - RNA, 22 nt, Human
uacagagaagucacagggcagu

SEQ ID NO: 1335181 - RNA, 21 nt, Human
uacagagaagucacagggcag

SEQ ID NO: 1335182 - RNA, 22 nt, Human
aauggaggggcagagccaggaa

SEQ ID NO: 1335183 - RNA, 21 nt, Human
aauggaggggcagagccagga

SEQ ID NO: 1335184 - RNA, 20 nt, Human
aauggaggggcagagccagg

SEQ ID NO: 1335185 - RNA, 19 nt, Human
aauggaggggcagagccag

SEQ ID NO: 1335186 - RNA, 17 nt, Human
aauggaggccauugugu

SEQ ID NO: 1335187 - RNA, 13 nt, Human
aauggaucacaag

SEQ ID NO: 1335188 - RNA, 16 nt, Human
aauggaucacaagaug

SEQ ID NO: 1335189 - RNA, 18 nt, Human
aauggaucacaagaugga

SEQ ID NO: 1335190 - RNA, 17 nt, Human
aauggaucacaagaugg

SEQ ID NO: 1335191 - RNA, 14 nt, Human
aauguaaacuguuu

SEQ ID NO: 1335192 - RNA, 16 nt, Human
aauguaaacuguuucu

SEQ ID NO: 1335193 - RNA, 17 nt, Human
aauguaaacuguuucuu

SEQ ID NO: 1335194 - RNA, 21 nt, Human
aauguaaacuguuucuuuaaa

SEQ ID NO: 1335195 - RNA, 15 nt, Human
aauguaaagacaaaa

SEQ ID NO: 1335196 - RNA, 14 nt, Human
aauguaaagccaug

SEQ ID NO: 1335197 - RNA, 15 nt, Human
aauguaaagccaugc

SEQ ID NO: 1335198 - RNA, 20 nt, Human
aauguaaaggagucaaaacu

SEQ ID NO: 1335199 - RNA, 21 nt, Human
aauguaaaggagucaaaacua

SEQ ID NO: 1335200 - RNA, 23 nt, Human
aauguaaaggagucaaaacuaca

SEQ ID NO: 1335201 - RNA, 12 nt, Human
aauguaaauaaa

SEQ ID NO: 1335202 - RNA, 19 nt, Human
aauguaaagcuugucugau

SEQ ID NO: 1335203 - RNA, 16 nt, Human
aauguaaauauuuuaa

SEQ ID NO: 1335204 - RNA, 17 nt, Human
aauguaaauauuuuaaa

SEQ ID NO: 1335205 - RNA, 19 nt, Human
aauguaaauauuuuaaaga

SEQ ID NO: 1335206 - RNA, 20 nt, Human
aauguaaauauuuuaaagaa

SEQ ID NO: 1335207 - RNA, 21 nt, Human
aauguaaauauuuuaaagaau

SEQ ID NO: 1335208 - RNA, 22 nt, Human
aauguaaauauuuuaaagaauu

SEQ ID NO: 1335209 - RNA, 22 nt, Human
aauguaaggcuguguaagauuu

SEQ ID NO: 1335210 - RNA, 13 nt, Human
aauguaaggcugu

SEQ ID NO: 1335211 - RNA, 15 nt, Human
aauguaaggcugugu

SEQ ID NO: 1335212 - RNA, 17 nt, Human
aauguaaggcuguguaa

SEQ ID NO: 1335213 - RNA, 18 nt, Human
aauguaaggcuguguaag

SEQ ID NO: 1335214 - RNA, 16 nt, Human
aauguaauagggaaaa

SEQ ID NO: 1335215 - RNA, 22 nt, Human
aaugcuguauuuuaaaagaaug

SEQ ID NO: 1335216 - RNA, 14 nt, Human
aaugcuucuaagua

SEQ ID NO: 1335217 - RNA, 18 nt, Human
aaugcuucuaaguaaaua

SEQ ID NO: 1335218 - RNA, 19 nt, Human
aaugcuucuaaguaaauac

SEQ ID NO: 1335219 - RNA, 20 nt, Human
aaugcuucuaaguaaauaca

SEQ ID NO: 1335220 - RNA, 21 nt, Human
aaugcuucuaaguaaauacaa

SEQ ID NO: 1335221 - RNA, 23 nt, Human
aaugcuucuaaguaaauacaauu

SEQ ID NO: 1335222 - RNA, 22 nt, Human
aaugcuucuaaguaaauacaau

SEQ ID NO: 1335223 - RNA, 21 nt, Human
aaugcuguauuuuaaaagaau

SEQ ID NO: 1335224 - RNA, 18 nt, Human
aaugcugggacucagccu

SEQ ID NO: 1335225 - RNA, 22 nt, Human
aaugcauuauaggaucauuugu

SEQ ID NO: 1335226 - RNA, 21 nt, Human
uaauuuuuuucaccuagauuu

SEQ ID NO: 1335227 - RNA, 21 nt, Human
uaauuuuugauacuaagcauu

SEQ ID NO: 1335228 - RNA, 21 nt, Human
uacaaaaaaaaaaaaaaauua

SEQ ID NO: 1335229 - RNA, 22 nt, Human
uaauuuuuuuuuuccuuuuaaa

SEQ ID NO: 1335230 - RNA, 15 nt, Human
uaauuuuuguauuuu

SEQ ID NO: 1335231 - RNA, 20 nt, Human
uaauuuuugauacuaagcau

SEQ ID NO: 1335232 - RNA, 14 nt, Human
uaauuuuuguaauu

SEQ ID NO: 1335233 - RNA, 16 nt, Human
uaauuuuuccuauauu

SEQ ID NO: 1335234 - RNA, 23 nt, Human
uaauuuuugauacuaagcauuga

SEQ ID NO: 1335235 - RNA, 22 nt, Human
uaauuuuuauuaauuuuaguuu

SEQ ID NO: 1335236 - RNA, 16 nt, Human
uaauuuuuauuucuuc

SEQ ID NO: 1335237 - RNA, 17 nt, Human
uaauuuuuauuucuucc

SEQ ID NO: 1335238 - RNA, 18 nt, Human
uaauuuuuauuucuuccu

SEQ ID NO: 1335239 - RNA, 17 nt, Human
uaauuuuucacuucaaa

SEQ ID NO: 1335240 - RNA, 13 nt, Human
uaauuuuuccaac

SEQ ID NO: 1335241 - RNA, 14 nt, Human
uaauuuuuccaacu

SEQ ID NO: 1335242 - RNA, 23 nt, Human
uaauuuuuauuuuugcugagacu

SEQ ID NO: 1335243 - RNA, 18 nt, Human
uacaauuaaaaaaaaaga

SEQ ID NO: 1335244 - RNA, 22 nt, Human
uacaauuaaaaaaaaagaucug

SEQ ID NO: 1335245 - RNA, 19 nt, Human
uacaauuaaagcuguuauu

SEQ ID NO: 1335246 - RNA, 16 nt, Human
uacaauucauuguguu

SEQ ID NO: 1335247 - RNA, 21 nt, Human
uacaauucauuguguuaccug

SEQ ID NO: 1335248 - RNA, 17 nt, Human
uacccuaaccaaguucc

SEQ ID NO: 1335249 - RNA, 16 nt, Human
uacccuaaccaaguuc

SEQ ID NO: 1335250 - RNA, 14 nt, Human
uacccuaaccaagu

SEQ ID NO: 1335251 - RNA, 17 nt, Human
uacccguucacauuuuu

SEQ ID NO: 1335252 - RNA, 15 nt, Human
uacccccugugccuu

SEQ ID NO: 1335253 - RNA, 23 nt, Human
uaccugaagcuaucguaaaauua

SEQ ID NO: 1335254 - RNA, 13 nt, Human
uaccugaaaacac

SEQ ID NO: 1335255 - RNA, 20 nt, Human
uaccugaaaacacugugcac

SEQ ID NO: 1335256 - RNA, 21 nt, Human
uaccugaaaacacugugcaca

SEQ ID NO: 1335257 - RNA, 16 nt, Human
uaccugaaugcucugu

SEQ ID NO: 1335258 - RNA, 17 nt, Human
uaccugacacucccuug

SEQ ID NO: 1335259 - RNA, 14 nt, Human
uaccugaaugcucu

SEQ ID NO: 1335260 - RNA, 13 nt, Human
aauuacauuugua

SEQ ID NO: 1335261 - RNA, 14 nt, Human
aauuacauuuguau

SEQ ID NO: 1335262 - RNA, 19 nt, Human
aauuacauuacugaaaacu

SEQ ID NO: 1335263 - RNA, 22 nt, Human
aauuacauuacugaaaacuuca

SEQ ID NO: 1335264 - RNA, 20 nt, Human
uaccugacacucccuugggc

SEQ ID NO: 1335265 - RNA, 15 nt, Human
uaccugagggucugu

SEQ ID NO: 1335266 - RNA, 11 nt, Human
uaccugagggu

SEQ ID NO: 1335267 - RNA, 12 nt, Human
uaccugauuuuu

SEQ ID NO: 1335268 - RNA, 18 nt, Human
uaccugauuuuuuuuccu

SEQ ID NO: 1335269 - RNA, 12 nt, Human
uaccugugccug

SEQ ID NO: 1335270 - RNA, 12 nt, Human
uaccuguggaua

SEQ ID NO: 1335271 - RNA, 16 nt, Human
uaccuguguggacagg

SEQ ID NO: 1335272 - RNA, 17 nt, Human
uaccuguguuucuugcc

SEQ ID NO: 1335273 - RNA, 21 nt, Human
uaccuguguuucuugccucau

SEQ ID NO: 1335274 - RNA, 20 nt, Human
uaccuguguuucuugccuca

SEQ ID NO: 1335275 - RNA, 13 nt, Human
uaccuguugagca

SEQ ID NO: 1335276 - RNA, 14 nt, Human
uaccuguugagcau

SEQ ID NO: 1335277 - RNA, 21 nt, Human
uaccuguugagcaucacagaa

SEQ ID NO: 1335278 - RNA, 22 nt, Human
aauuaugugacauuuuacauua

SEQ ID NO: 1335279 - RNA, 22 nt, Human
aauuaugugccagauuuaugca

SEQ ID NO: 1335280 - RNA, 20 nt, Human
aauuaugugacauuuuacau

SEQ ID NO: 1335281 - RNA, 17 nt, Human
aauuaugugacauuuua

SEQ ID NO: 1335282 - RNA, 15 nt, Human
aauuaugugacauuu

SEQ ID NO: 1335283 - RNA, 15 nt, Human
aauuagacugugauu

SEQ ID NO: 1335284 - RNA, 19 nt, Human
aauuagacugugauucaga

SEQ ID NO: 1335285 - RNA, 20 nt, Human
aauuagacugugauucagaa

SEQ ID NO: 1335286 - RNA, 21 nt, Human
aauuagacugugauucagaaa

SEQ ID NO: 1335287 - RNA, 23 nt, Human
aauuagacugugauucagaaaau

SEQ ID NO: 1335288 - RNA, 13 nt, Human
aauuacuuaguau

SEQ ID NO: 1335289 - RNA, 22 nt, Human
aauuacuuuggggcuaauuuaa

SEQ ID NO: 1335290 - RNA, 17 nt, Human
aauuacuuaguauugca

SEQ ID NO: 1335291 - RNA, 15 nt, Human
aauuaccaaccuguu

SEQ ID NO: 1335292 - RNA, 21 nt, Human
aauuaccacaccaucucccau

SEQ ID NO: 1335293 - RNA, 21 nt, Human
aauuaccaugcuucacaaugu

SEQ ID NO: 1335294 - RNA, 23 nt, Human
aauuacuuuggggcuaauuuaac

SEQ ID NO: 1335295 - RNA, 16 nt, Human
aauuagacacuuugga

SEQ ID NO: 1335296 - RNA, 17 nt, Human
aauuagacacuuuggaa

SEQ ID NO: 1335297 - RNA, 16 nt, Human
aauuauuguuuuucuu

SEQ ID NO: 1335298 - RNA, 22 nt, Human
aauuauuuaaaccgcuaaaaga

SEQ ID NO: 1335299 - RNA, 11 nt, Human
aauuauuauuu

SEQ ID NO: 1335300 - RNA, 13 nt, Human
aauuauuauuuau

SEQ ID NO: 1335301 - RNA, 16 nt, Human
aauuauuauuuauaua

SEQ ID NO: 1335302 - RNA, 18 nt, Human
aauuauuauuuauauaug

SEQ ID NO: 1335303 - RNA, 21 nt, Human
aauuauuauuuauauauguau

SEQ ID NO: 1335304 - RNA, 12 nt, Human
aauuauuguaca

SEQ ID NO: 1335305 - RNA, 21 nt, Human
aauuauuguacauuuauaguu

SEQ ID NO: 1335306 - RNA, 16 nt, Human
aauuauuaaugaaaau

SEQ ID NO: 1335307 - RNA, 17 nt, Human
aauuauuaaugaaaaua

SEQ ID NO: 1335308 - RNA, 22 nt, Human
aauuauuaaugaaaauaagaau

SEQ ID NO: 1335309 - RNA, 23 nt, Human
aauuauuacaguguuuauccuuu

SEQ ID NO: 1335310 - RNA, 14 nt, Human
aauuauuacagugu

SEQ ID NO: 1335311 - RNA, 18 nt, Human
aauuauuacaguguuuau

SEQ ID NO: 1335312 - RNA, 13 nt, Human
aauuauuauucuu

SEQ ID NO: 1335313 - RNA, 21 nt, Human
aauuauuauucuucauaacaa

SEQ ID NO: 1335314 - RNA, 22 nt, Human
aauucagacaucugagguuuua

SEQ ID NO: 1335315 - RNA, 14 nt, Human
aauucagcauuuga

SEQ ID NO: 1335316 - RNA, 15 nt, Human
aauucagguuuuucc

SEQ ID NO: 1335317 - RNA, 17 nt, Human
aauucaauuuggauuua

SEQ ID NO: 1335318 - RNA, 13 nt, Human
aauucacaaacuu

SEQ ID NO: 1335319 - RNA, 16 nt, Human
aauucagacaucugag

SEQ ID NO: 1335320 - RNA, 21 nt, Human
aauucagacaucugagguuuu

SEQ ID NO: 1335321 - RNA, 19 nt, Human
aauucagguuuuuccuuuu

SEQ ID NO: 1335322 - RNA, 13 nt, Human
aauucaguuucau

SEQ ID NO: 1335323 - RNA, 14 nt, Human
aauucaguuucaua

SEQ ID NO: 1335324 - RNA, 15 nt, Human
aauucaguuucauaa

SEQ ID NO: 1335325 - RNA, 16 nt, Human
aauucaguuucauaaa

SEQ ID NO: 1335326 - RNA, 17 nt, Human
aauucauaaucacucua

SEQ ID NO: 1335327 - RNA, 22 nt, Human
aauuauuucaugauuagaaauu

SEQ ID NO: 1335328 - RNA, 12 nt, Human
aauuauuugcau

SEQ ID NO: 1335329 - RNA, 21 nt, Human
aauucaacuuaacuaucaucu

SEQ ID NO: 1335330 - RNA, 16 nt, Human
aauucaaggaauuucu

SEQ ID NO: 1335331 - RNA, 17 nt, Human
aauucaaggaauuucuu

SEQ ID NO: 1335332 - RNA, 23 nt, Human
aauucaaggaauuucuuaacuuc

SEQ ID NO: 1335333 - RNA, 15 nt, Human
aauucaauucaaagc

SEQ ID NO: 1335334 - RNA, 13 nt, Human
aauucaauucaaa

SEQ ID NO: 1335335 - RNA, 22 nt, Human
aauguuaugacuauguaaacua

SEQ ID NO: 1335336 - RNA, 19 nt, Human
aauguuaugacuauguaaa

SEQ ID NO: 1335337 - RNA, 16 nt, Human
aauguuaucuucucaa

SEQ ID NO: 1335338 - RNA, 17 nt, Human
aauguuaucuucucaag

SEQ ID NO: 1335339 - RNA, 22 nt, Human
aauguuaucuucucaaguucua

SEQ ID NO: 1335340 - RNA, 23 nt, Human
aauguuaucuucucaaguucuaa

SEQ ID NO: 1335341 - RNA, 14 nt, Human
aauguuauuucccu

SEQ ID NO: 1335342 - RNA, 18 nt, Human
aauguucacaauauauuu

SEQ ID NO: 1335343 - RNA, 19 nt, Human
aauguuauuuuuuaauuau

SEQ ID NO: 1335344 - RNA, 20 nt, Human
aauguuauuuuuuaauuauu

SEQ ID NO: 1335345 - RNA, 13 nt, Human
aauguucaucaau

SEQ ID NO: 1335346 - RNA, 15 nt, Human
aauguuacauuauua

SEQ ID NO: 1335347 - RNA, 16 nt, Human
aauguuacauuauuau

SEQ ID NO: 1335348 - RNA, 17 nt, Human
aauguuagccucaauuu

SEQ ID NO: 1335349 - RNA, 14 nt, Human
uacagggggucugg

SEQ ID NO: 1335350 - RNA, 16 nt, Human
uacagggggucuggcu

SEQ ID NO: 1335351 - RNA, 17 nt, Human
uacagggggucuggcug

SEQ ID NO: 1335352 - RNA, 22 nt, Human
uacagggggucuggcugguguu

SEQ ID NO: 1335353 - RNA, 18 nt, Human
uacagggggucuggcugg

SEQ ID NO: 1335354 - RNA, 19 nt, Human
uacagggggucuggcuggu

SEQ ID NO: 1335355 - RNA, 21 nt, Human
uacagggggucuggcuggugu

SEQ ID NO: 1335356 - RNA, 22 nt, Human
aauguggcaaggaaaaacaggu

SEQ ID NO: 1335357 - RNA, 21 nt, Human
aauguggccccugaacaagaa

SEQ ID NO: 1335358 - RNA, 21 nt, Human
aauguucuaaguuucuaagau

SEQ ID NO: 1335359 - RNA, 22 nt, Human
aauguucuaaguuucuaagauu

SEQ ID NO: 1335360 - RNA, 23 nt, Human
aauguucuaaguuucuaagauuc

SEQ ID NO: 1335361 - RNA, 13 nt, Human
aauguucuaaguu

SEQ ID NO: 1335362 - RNA, 14 nt, Human
aauguucuaaguuu

SEQ ID NO: 1335363 - RNA, 16 nt, Human
aauguucuaaguuucu

SEQ ID NO: 1335364 - RNA, 17 nt, Human
aauguucuaaguuucua

SEQ ID NO: 1335365 - RNA, 19 nt, Human
aauguucuaaguuucuaag

SEQ ID NO: 1335366 - RNA, 20 nt, Human
aauguucuaaguuucuaaga

SEQ ID NO: 1335367 - RNA, 17 nt, Human
aauguucucagauuucu

SEQ ID NO: 1335368 - RNA, 20 nt, Human
aauguuggacaccuuuaggu

SEQ ID NO: 1335369 - RNA, 21 nt, Human
aauguuggacaccuuuagguu

SEQ ID NO: 1335370 - RNA, 13 nt, Human
aauguugggacug

SEQ ID NO: 1335371 - RNA, 21 nt, Human
aauguugggacugcuaaauaa

SEQ ID NO: 1335372 - RNA, 23 nt, Human
aauguuggucauuuuauguuaag

SEQ ID NO: 1335373 - RNA, 20 nt, Human
aauguucaucaaugaaugaa

SEQ ID NO: 1335374 - RNA, 16 nt, Human
aauguucaucaaugaa

SEQ ID NO: 1335375 - RNA, 21 nt, Human
aauguuauuuuuuaauuauua

SEQ ID NO: 1335376 - RNA, 12 nt, Human
aauguucaucau

SEQ ID NO: 1335377 - RNA, 22 nt, Human
aauguugggacugcuaaauaaa

SEQ ID NO: 1335378 - RNA, 15 nt, Human
aauguuguuauuuaa

SEQ ID NO: 1335379 - RNA, 13 nt, Human
uacauuuccuaaa

SEQ ID NO: 1335380 - RNA, 14 nt, Human
uacauuccaacucg

SEQ ID NO: 1335381 - RNA, 13 nt, Human
aauguuuaaaaca

SEQ ID NO: 1335382 - RNA, 13 nt, Human
uacauucauuuag

SEQ ID NO: 1335383 - RNA, 15 nt, Human
uacauucauuuagcu

SEQ ID NO: 1335384 - RNA, 14 nt, Human
uaccagauaacuuu

SEQ ID NO: 1335385 - RNA, 15 nt, Human
uaccagauaacuuuu

SEQ ID NO: 1335386 - RNA, 23 nt, Human
uaccagauaacuuuuuuuuuucu

SEQ ID NO: 1335387 - RNA, 16 nt, Human
uacauuugaacuugau

SEQ ID NO: 1335388 - RNA, 19 nt, Human
uaccagggacugaggggag

SEQ ID NO: 1335389 - RNA, 12 nt, Human
uaccagaugcag

SEQ ID NO: 1335390 - RNA, 13 nt, Human
uaccagcgaggag

SEQ ID NO: 1335391 - RNA, 15 nt, Human
uaccagcgaggaggc

SEQ ID NO: 1335392 - RNA, 20 nt, Human
uaccagcgaggaggcuccag

SEQ ID NO: 1335393 - RNA, 17 nt, Human
uaccaggcaccaaaaga

SEQ ID NO: 1335394 - RNA, 18 nt, Human
uaccaggcaccaaaagaa

SEQ ID NO: 1335395 - RNA, 21 nt, Human
uaccaggcaccaaaagaagua

SEQ ID NO: 1335396 - RNA, 12 nt, Human
uaccaguauuua

SEQ ID NO: 1335397 - RNA, 18 nt, Human
uaccaguauuuaacuucu

SEQ ID NO: 1335398 - RNA, 15 nt, Human
uaccaguauuuagaa

SEQ ID NO: 1335399 - RNA, 18 nt, Human
uaccaguauuuagaagcc

SEQ ID NO: 1335400 - RNA, 19 nt, Human
uaccaguauuuagaagcca

SEQ ID NO: 1335401 - RNA, 20 nt, Human
uaccaguauuuagaagccaa

SEQ ID NO: 1335402 - RNA, 14 nt, Human
uaccagucucacau

SEQ ID NO: 1335403 - RNA, 15 nt, Human
uacccccugcaaagc

SEQ ID NO: 1335404 - RNA, 19 nt, Human
uacccccugcaaagcccag

SEQ ID NO: 1335405 - RNA, 23 nt, Human
uacccccugcaaagcccagcuug

SEQ ID NO: 1335406 - RNA, 14 nt, Human
uaccauuaaaccau

SEQ ID NO: 1335407 - RNA, 22 nt, Human
uaccauuaaaccaucucccugg

SEQ ID NO: 1335408 - RNA, 15 nt, Human
uaccauuaaaccauc

SEQ ID NO: 1335409 - RNA, 16 nt, Human
uaccauuaaaccaucu

SEQ ID NO: 1335410 - RNA, 20 nt, Human
uaccauuaaaccaucucccu

SEQ ID NO: 1335411 - RNA, 18 nt, Human
uaccaguuaauuuuucca

SEQ ID NO: 1335412 - RNA, 19 nt, Human
uaccaguuaauuuuuccaa

SEQ ID NO: 1335413 - RNA, 12 nt, Human
uaccaguugccu

SEQ ID NO: 1335414 - RNA, 18 nt, Human
uaccaugcuucacaaugu

SEQ ID NO: 1335415 - RNA, 18 nt, Human
uaccauguaauggcaguu

SEQ ID NO: 1335416 - RNA, 15 nt, Human
uaccauguaauggca

SEQ ID NO: 1335417 - RNA, 14 nt, Human
uaccaugucuuucu

SEQ ID NO: 1335418 - RNA, 13 nt, Human
uaagacaaauaug

SEQ ID NO: 1335419 - RNA, 23 nt, Human
uaagacaaaaagcuacuuauugu

SEQ ID NO: 1335420 - RNA, 17 nt, Human
uaagaccuggcagcucu

SEQ ID NO: 1335421 - RNA, 18 nt, Human
uaagaccuggcagcucug

SEQ ID NO: 1335422 - RNA, 20 nt, Human
uaagacggauuuauuuuucc

SEQ ID NO: 1335423 - RNA, 16 nt, Human
uaagaauucagacauc

SEQ ID NO: 1335424 - RNA, 15 nt, Human
uaagaauucagacau

SEQ ID NO: 1335425 - RNA, 16 nt, Human
uaagaauugaguaaug

SEQ ID NO: 1335426 - RNA, 18 nt, Human
uaagaauugaguaauggu

SEQ ID NO: 1335427 - RNA, 19 nt, Human
uaagaauugaguaauggug

SEQ ID NO: 1335428 - RNA, 20 nt, Human
uaagaauugaguaauggugu

SEQ ID NO: 1335429 - RNA, 21 nt, Human
uaagaauugaguaauggugua

SEQ ID NO: 1335430 - RNA, 22 nt, Human
uaagaauugaguaaugguguag

SEQ ID NO: 1335431 - RNA, 18 nt, Human
uaagaagugaaaaucuac

SEQ ID NO: 1335432 - RNA, 18 nt, Human
uaagaaggcaaaaaugua

SEQ ID NO: 1335433 - RNA, 12 nt, Human
uaagaauuauuu

SEQ ID NO: 1335434 - RNA, 17 nt, Human
uaagaauuauuuugaug

SEQ ID NO: 1335435 - RNA, 13 nt, Human
uaagaagugaaaa

SEQ ID NO: 1335436 - RNA, 13 nt, Human
uaagaaggcaaaa

SEQ ID NO: 1335437 - RNA, 17 nt, Human
uaagaaggcaaaaaugu

SEQ ID NO: 1335438 - RNA, 16 nt, Human
uaacuuuaauguuuuu

SEQ ID NO: 1335439 - RNA, 21 nt, Human
uaacuucccugaaaaaucuaa

SEQ ID NO: 1335440 - RNA, 12 nt, Human
uaacuucuguuu

SEQ ID NO: 1335441 - RNA, 16 nt, Human
uaacuucuguuuuacc

SEQ ID NO: 1335442 - RNA, 17 nt, Human
uaacuucuuauggaauu

SEQ ID NO: 1335443 - RNA, 18 nt, Human
uaacuucuuauggaauug

SEQ ID NO: 1335444 - RNA, 19 nt, Human
uaacuucuuauggaauuga

SEQ ID NO: 1335445 - RNA, 17 nt, Human
uaacuuggccgcuguau

SEQ ID NO: 1335446 - RNA, 12 nt, Human
uaacuuggcuca

SEQ ID NO: 1335447 - RNA, 17 nt, Human
uaacguauaaaagccug

SEQ ID NO: 1335448 - RNA, 13 nt, Human
uaacguauaaaag

SEQ ID NO: 1335449 - RNA, 15 nt, Human
uaacgcgucuuccug

SEQ ID NO: 1335450 - RNA, 16 nt, Human
uaacgcgucuuccuga

SEQ ID NO: 1335451 - RNA, 17 nt, Human
uaacgcgucuuccugag

SEQ ID NO: 1335452 - RNA, 14 nt, Human
uaacggaccaaagc

SEQ ID NO: 1335453 - RNA, 19 nt, Human
uaacgccugagcccaggga

SEQ ID NO: 1335454 - RNA, 20 nt, Human
uaacuaaaacaaagccacuu

SEQ ID NO: 1335455 - RNA, 17 nt, Human
uaacuaaaacaaagcca

SEQ ID NO: 1335456 - RNA, 17 nt, Human
uaacguuuaagccaaaa

SEQ ID NO: 1335457 - RNA, 20 nt, Human
uaacguuuaagccaaaacaa

SEQ ID NO: 1335458 - RNA, 22 nt, Human
uaacggucuguucuguuucaag

SEQ ID NO: 1335459 - RNA, 23 nt, Human
uaacggucuguucuguuucaagg

SEQ ID NO: 1335460 - RNA, 16 nt, Human
uaacguugagccccug

SEQ ID NO: 1335461 - RNA, 20 nt, Human
uaacuuccacagggucccac

SEQ ID NO: 1335462 - RNA, 23 nt, Human
uaacuuccacagggucccacagc

SEQ ID NO: 1335463 - RNA, 20 nt, Human
uaacuucccugaaaaaucua

SEQ ID NO: 1335464 - RNA, 16 nt, Human
uaacuauguugauaaa

SEQ ID NO: 1335465 - RNA, 15 nt, Human
uaacuuaauugcuau

SEQ ID NO: 1335466 - RNA, 14 nt, Human
uaacuuacaaagau

SEQ ID NO: 1335467 - RNA, 12 nt, Human
uaacuaggagcu

SEQ ID NO: 1335468 - RNA, 23 nt, Human
uaacuauaguccagcuuuguucu

SEQ ID NO: 1335469 - RNA, 19 nt, Human
uaacaugaauauuuagugu

SEQ ID NO: 1335470 - RNA, 15 nt, Human
uaacaguaucucaaa

SEQ ID NO: 1335471 - RNA, 15 nt, Human
aauauauuuucuguu

SEQ ID NO: 1335472 - RNA, 21 nt, Human
aauauauuuucuguuuucuuu

SEQ ID NO: 1335473 - RNA, 19 nt, Human
aauauauuuuguuuacaaa

SEQ ID NO: 1335474 - RNA, 20 nt, Human
uaacagggaaggcaggcagg

SEQ ID NO: 1335475 - RNA, 23 nt, Human
uaacagggaaggcaggcagggcu

SEQ ID NO: 1335476 - RNA, 22 nt, Human
uaacagggaaggcaggcagggc

SEQ ID NO: 1335477 - RNA, 17 nt, Human
uaacgcaaguucccagu

SEQ ID NO: 1335478 - RNA, 12 nt, Human
uaacgccugagc

SEQ ID NO: 1335479 - RNA, 13 nt, Human
uaacgccugagcc

SEQ ID NO: 1335480 - RNA, 14 nt, Human
uaacgccugagccc

SEQ ID NO: 1335481 - RNA, 18 nt, Human
uaacgccugagcccaggg

SEQ ID NO: 1335482 - RNA, 19 nt, Human
uaacaugugaaaagaauag

SEQ ID NO: 1335483 - RNA, 22 nt, Human
uaacauguguuaaguauuuuca

SEQ ID NO: 1335484 - RNA, 15 nt, Human
uaacauguaggaagu

SEQ ID NO: 1335485 - RNA, 22 nt, Human
uaacauguccugccuauuaucu

SEQ ID NO: 1335486 - RNA, 21 nt, Human
uaacaugaauauuuaguguuc

SEQ ID NO: 1335487 - RNA, 20 nt, Human
uaacaugaauauuuaguguu

SEQ ID NO: 1335488 - RNA, 21 nt, Human
aauauauuuuaagacgaaaca

SEQ ID NO: 1335489 - RNA, 19 nt, Human
aauauauuuaagauaauua

SEQ ID NO: 1335490 - RNA, 20 nt, Human
aauauauuuaagauaauuau

SEQ ID NO: 1335491 - RNA, 22 nt, Human
aauauauuauuacuuguaaaua

SEQ ID NO: 1335492 - RNA, 14 nt, Human
aauauauuuaaaaa

SEQ ID NO: 1335493 - RNA, 16 nt, Human
aauauauuuaaaaaua

SEQ ID NO: 1335494 - RNA, 15 nt, Human
aauauauuuaagaua

SEQ ID NO: 1335495 - RNA, 21 nt, Human
aauauauucagccuggcuuca

SEQ ID NO: 1335496 - RNA, 21 nt, Human
aauaguuaagacaugauuucc

SEQ ID NO: 1335497 - RNA, 22 nt, Human
aauaguuaagacaugauuuccu

SEQ ID NO: 1335498 - RNA, 23 nt, Human
aauaguuaagacaugauuuccuu

SEQ ID NO: 1335499 - RNA, 14 nt, Human
aauagcguucuugu

SEQ ID NO: 1335500 - RNA, 15 nt, Human
aauagcguucuugua

SEQ ID NO: 1335501 - RNA, 16 nt, Human
aauagcguucuuguaa

SEQ ID NO: 1335502 - RNA, 18 nt, Human
aauagcguucuuguaauu

SEQ ID NO: 1335503 - RNA, 19 nt, Human
aauagcguucuuguaauuu

SEQ ID NO: 1335504 - RNA, 21 nt, Human
aauagcuaaauaccucaauca

SEQ ID NO: 1335505 - RNA, 17 nt, Human
aauagucggugaagaaa

SEQ ID NO: 1335506 - RNA, 23 nt, Human
aauaccacaggaaccacaagacu

SEQ ID NO: 1335507 - RNA, 14 nt, Human
aauacauuuaaaac

SEQ ID NO: 1335508 - RNA, 17 nt, Human
aauacauuuaaaacauu

SEQ ID NO: 1335509 - RNA, 20 nt, Human
aauacauuuaaaacauuaaa

SEQ ID NO: 1335510 - RNA, 21 nt, Human
aauacauuuaaaacauuaaaa

SEQ ID NO: 1335511 - RNA, 22 nt, Human
aauacauuuaaaacauuaaaau

SEQ ID NO: 1335512 - RNA, 23 nt, Human
aauacauuuaaaacauuaaaaua

SEQ ID NO: 1335513 - RNA, 17 nt, Human
aauaccacucuguaauu

SEQ ID NO: 1335514 - RNA, 18 nt, Human
aauaccacucuguaauug

SEQ ID NO: 1335515 - RNA, 19 nt, Human
aauaccacucuguaauugc

SEQ ID NO: 1335516 - RNA, 15 nt, Human
aauacagacuggaug

SEQ ID NO: 1335517 - RNA, 12 nt, Human
aauacagauaua

SEQ ID NO: 1335518 - RNA, 13 nt, Human
aauacagauauau

SEQ ID NO: 1335519 - RNA, 14 nt, Human
aauacagauauauu

SEQ ID NO: 1335520 - RNA, 15 nt, Human
aauacagauauauuu

SEQ ID NO: 1335521 - RNA, 19 nt, Human
aauacagauauauuuucuu

SEQ ID NO: 1335522 - RNA, 16 nt, Human
aauacagaucaucuug

SEQ ID NO: 1335523 - RNA, 18 nt, Human
aauacagcaacaauuuau

SEQ ID NO: 1335524 - RNA, 15 nt, Human
aauacagaucaucuu

SEQ ID NO: 1335525 - RNA, 13 nt, Human
aauacaggaaaca

SEQ ID NO: 1335526 - RNA, 15 nt, Human
aauacaggaaacagu

SEQ ID NO: 1335527 - RNA, 16 nt, Human
aauacaggaaacaguu

SEQ ID NO: 1335528 - RNA, 18 nt, Human
aauacaggaaacaguugc

SEQ ID NO: 1335529 - RNA, 23 nt, Human
aauacaggaaacaguugcaugua

SEQ ID NO: 1335530 - RNA, 16 nt, Human
aauacagggcauuuug

SEQ ID NO: 1335531 - RNA, 17 nt, Human
aauacaugacauuuauu

SEQ ID NO: 1335532 - RNA, 23 nt, Human
aauacaugacauuuauuuuucau

SEQ ID NO: 1335533 - RNA, 21 nt, Human
aauacaugcuaagagaaguag

SEQ ID NO: 1335534 - RNA, 22 nt, Human
aauacaugcuaagagaaguaga

SEQ ID NO: 1335535 - RNA, 23 nt, Human
aauacaugcuaagagaaguagaa

SEQ ID NO: 1335536 - RNA, 19 nt, Human
aauacauuauauuucuauu

SEQ ID NO: 1335537 - RNA, 18 nt, Human
aauaccugaaugcucugu

SEQ ID NO: 1335538 - RNA, 17 nt, Human
aauaccugaaugcucug

SEQ ID NO: 1335539 - RNA, 15 nt, Human
aauaccucuaauagu

SEQ ID NO: 1335540 - RNA, 21 nt, Human
aauacccaugucuacacagau

SEQ ID NO: 1335541 - RNA, 20 nt, Human
aauaccacucuguaauugca

SEQ ID NO: 1335542 - RNA, 21 nt, Human
aauaccacucuguaauugcaa

SEQ ID NO: 1335543 - RNA, 12 nt, Human
aauaccugcuca

SEQ ID NO: 1335544 - RNA, 16 nt, Human
aauagacuuaaaucuc

SEQ ID NO: 1335545 - RNA, 14 nt, Human
aauagagccugagg

SEQ ID NO: 1335546 - RNA, 16 nt, Human
aauagagccugaggga

SEQ ID NO: 1335547 - RNA, 13 nt, Human
aauagcaaaagaa

SEQ ID NO: 1335548 - RNA, 16 nt, Human
aauagcaaaagaagaa

SEQ ID NO: 1335549 - RNA, 19 nt, Human
aauagcaaaagaagaaguu

SEQ ID NO: 1335550 - RNA, 20 nt, Human
aauagcaaaagaagaaguuu

SEQ ID NO: 1335551 - RNA, 14 nt, Human
aauagcaaagaauu

SEQ ID NO: 1335552 - RNA, 15 nt, Human
aauagcaaagaauug

SEQ ID NO: 1335553 - RNA, 18 nt, Human
aauagcaaagaauugacu

SEQ ID NO: 1335554 - RNA, 23 nt, Human
aauagcagaaaaaccaacaucua

SEQ ID NO: 1335555 - RNA, 14 nt, Human
aauagcagccuuuc

SEQ ID NO: 1335556 - RNA, 12 nt, Human
aauagcauguca

SEQ ID NO: 1335557 - RNA, 15 nt, Human
aauagcaugucacua

SEQ ID NO: 1335558 - RNA, 13 nt, Human
uaacaaugcugua

SEQ ID NO: 1335559 - RNA, 13 nt, Human
uaacaauacaaau

SEQ ID NO: 1335560 - RNA, 14 nt, Human
uaacaauacaaaug

SEQ ID NO: 1335561 - RNA, 16 nt, Human
uaacaauacaaaugga

SEQ ID NO: 1335562 - RNA, 17 nt, Human
uaacaauacaaauggau

SEQ ID NO: 1335563 - RNA, 18 nt, Human
uaacaauacaaauggauu

SEQ ID NO: 1335564 - RNA, 19 nt, Human
uaacaauacaaauggauuu

SEQ ID NO: 1335565 - RNA, 20 nt, Human
uaacaauacaaauggauuuu

SEQ ID NO: 1335566 - RNA, 14 nt, Human
uaacaaucagcucc

SEQ ID NO: 1335567 - RNA, 20 nt, Human
uaaauguuaugacuauguaa

SEQ ID NO: 1335568 - RNA, 22 nt, Human
uaaauuaucaggcaaauuugca

SEQ ID NO: 1335569 - RNA, 13 nt, Human
uaaauuauguaaa

SEQ ID NO: 1335570 - RNA, 16 nt, Human
uaaauuauguaaauua

SEQ ID NO: 1335571 - RNA, 15 nt, Human
uaacaaaauguaugu

SEQ ID NO: 1335572 - RNA, 16 nt, Human
uaacaaaauguauguc

SEQ ID NO: 1335573 - RNA, 19 nt, Human
uaacaaaauguaugucugg

SEQ ID NO: 1335574 - RNA, 18 nt, Human
uaaauuauuguuuuucuu

SEQ ID NO: 1335575 - RNA, 13 nt, Human
uaacaaacaaauu

SEQ ID NO: 1335576 - RNA, 20 nt, Human
uaacaaaauguaugucuggu

SEQ ID NO: 1335577 - RNA, 21 nt, Human
uaaauguuaugacuauguaaa

SEQ ID NO: 1335578 - RNA, 19 nt, Human
uaaauguuaugacuaugua

SEQ ID NO: 1335579 - RNA, 13 nt, Human
uaaaugugguaaa

SEQ ID NO: 1335580 - RNA, 15 nt, Human
uaaaugaacaagaga

SEQ ID NO: 1335581 - RNA, 16 nt, Human
uaaaugaacaagagaa

SEQ ID NO: 1335582 - RNA, 17 nt, Human
uaaaugaacaagagaag

SEQ ID NO: 1335583 - RNA, 23 nt, Human
uaaaugaacaagagaagcauucu

SEQ ID NO: 1335584 - RNA, 12 nt, Human
uaaaugaagaaa

SEQ ID NO: 1335585 - RNA, 12 nt, Human
uaaaugaauguu

SEQ ID NO: 1335586 - RNA, 19 nt, Human
uaaaucuuuuauaggauuu

SEQ ID NO: 1335587 - RNA, 23 nt, Human
uaaaucuuuuauaggauuuauuu

SEQ ID NO: 1335588 - RNA, 13 nt, Human
uaaaugaacaaga

SEQ ID NO: 1335589 - RNA, 13 nt, Human
aagugccuuucag

SEQ ID NO: 1335590 - RNA, 14 nt, Human
aagugccuuucagg

SEQ ID NO: 1335591 - RNA, 19 nt, Human
aagugccuuucaggaucua

SEQ ID NO: 1335592 - RNA, 20 nt, Human
aagugccuuucaggaucuau

SEQ ID NO: 1335593 - RNA, 21 nt, Human
aagugccuuucaggaucuauu

SEQ ID NO: 1335594 - RNA, 22 nt, Human
aagugcguccacgagcuguuua

SEQ ID NO: 1335595 - RNA, 13 nt, Human
aaguguauuugga

SEQ ID NO: 1335596 - RNA, 15 nt, Human
aaguguauuuggaaa

SEQ ID NO: 1335597 - RNA, 21 nt, Human
aaguguauuuggaaauaaagu

SEQ ID NO: 1335598 - RNA, 11 nt, Human
aaucuguaaaa

SEQ ID NO: 1335599 - RNA, 13 nt, Human
aaucuauuuuucc

SEQ ID NO: 1335600 - RNA, 11 nt, Human
aaucuguaaac

SEQ ID NO: 1335601 - RNA, 12 nt, Human
aaucuguaaacu

SEQ ID NO: 1335602 - RNA, 19 nt, Human
aaucuauuuucucauugcu

SEQ ID NO: 1335603 - RNA, 14 nt, Human
aaucuauuuuguaa

SEQ ID NO: 1335604 - RNA, 17 nt, Human
aaucuauuuuguaacuu

SEQ ID NO: 1335605 - RNA, 21 nt, Human
aaucuauggucgggagacagc

SEQ ID NO: 1335606 - RNA, 14 nt, Human
aauccucccagaaa

SEQ ID NO: 1335607 - RNA, 18 nt, Human
aauccucucucuguguua

SEQ ID NO: 1335608 - RNA, 18 nt, Human
aauccccaacaugcacug

SEQ ID NO: 1335609 - RNA, 13 nt, Human
aauccccuucucc

SEQ ID NO: 1335610 - RNA, 14 nt, Human
aauccccuucuccc

SEQ ID NO: 1335611 - RNA, 15 nt, Human
aauccccuucucccc

SEQ ID NO: 1335612 - RNA, 16 nt, Human
aauccccuucuccccu

SEQ ID NO: 1335613 - RNA, 17 nt, Human
aauccccuucuccccug

SEQ ID NO: 1335614 - RNA, 20 nt, Human
aauccccuucuccccugcac

SEQ ID NO: 1335615 - RNA, 23 nt, Human
aauccccuucuccccugcacugu

SEQ ID NO: 1335616 - RNA, 19 nt, Human
aaucccucaccuucugagu

SEQ ID NO: 1335617 - RNA, 13 nt, Human
aaucccugcuuuu

SEQ ID NO: 1335618 - RNA, 14 nt, Human
aaucccugcuuuuu

SEQ ID NO: 1335619 - RNA, 22 nt, Human
aaucccugcuuuuuguguuuuu

SEQ ID NO: 1335620 - RNA, 13 nt, Human
uaauaaaaauaaa

SEQ ID NO: 1335621 - RNA, 14 nt, Human
aaucaguuuuccuc

SEQ ID NO: 1335622 - RNA, 20 nt, Human
aaucauaagauauuuuucau

SEQ ID NO: 1335623 - RNA, 19 nt, Human
aaucaguguuugauugccc

SEQ ID NO: 1335624 - RNA, 17 nt, Human
aaucaguucauuagaaa

SEQ ID NO: 1335625 - RNA, 18 nt, Human
aaucaguucauuagaaau

SEQ ID NO: 1335626 - RNA, 19 nt, Human
aaucaguucauuagaaaua

SEQ ID NO: 1335627 - RNA, 20 nt, Human
aaucaguucauuagaaauau

SEQ ID NO: 1335628 - RNA, 23 nt, Human
aaucaguucauuagaaauauuuu

SEQ ID NO: 1335629 - RNA, 12 nt, Human
aaucccaggaug

SEQ ID NO: 1335630 - RNA, 19 nt, Human
aaucccagcccccugacca

SEQ ID NO: 1335631 - RNA, 23 nt, Human
aaucauaagauauuuuucaugau

SEQ ID NO: 1335632 - RNA, 17 nt, Human
uaaguguguguuuuuca

SEQ ID NO: 1335633 - RNA, 13 nt, Human
uaaguauuucaaa

SEQ ID NO: 1335634 - RNA, 16 nt, Human
uaaguuaauaaauaag

SEQ ID NO: 1335635 - RNA, 14 nt, Human
uaaguuaauuuaaa

SEQ ID NO: 1335636 - RNA, 17 nt, Human
uaaguuaguuccacuga

SEQ ID NO: 1335637 - RNA, 19 nt, Human
uaaguuaguuccacugaga

SEQ ID NO: 1335638 - RNA, 21 nt, Human
uaaguacagagaagccaucac

SEQ ID NO: 1335639 - RNA, 12 nt, Human
uaaguauuuagg

SEQ ID NO: 1335640 - RNA, 20 nt, Human
uaaguauuuagguuuuuguu

SEQ ID NO: 1335641 - RNA, 20 nt, Human
uaaguuaguuccacugagac

SEQ ID NO: 1335642 - RNA, 14 nt, Human
uaaguuauaagacu

SEQ ID NO: 1335643 - RNA, 18 nt, Human
uaaguuauagugaauacu

SEQ ID NO: 1335644 - RNA, 17 nt, Human
uaaguuuauuucuuaaa

SEQ ID NO: 1335645 - RNA, 12 nt, Human
uaaguuucuaag

SEQ ID NO: 1335646 - RNA, 13 nt, Human
uaaguuucuaaga

SEQ ID NO: 1335647 - RNA, 14 nt, Human
uaaguuucuaagau

SEQ ID NO: 1335648 - RNA, 15 nt, Human
uaaguuucuaagauu

SEQ ID NO: 1335649 - RNA, 16 nt, Human
uaaguuucuaagauuc

SEQ ID NO: 1335650 - RNA, 17 nt, Human
uaaguuucuaagauucu

SEQ ID NO: 1335651 - RNA, 18 nt, Human
uaaguuucuaagauucua

SEQ ID NO: 1335652 - RNA, 19 nt, Human
uaaguuucuaagauucuaa

SEQ ID NO: 1335653 - RNA, 20 nt, Human
uaaguuucuaagauucuaaa

SEQ ID NO: 1335654 - RNA, 21 nt, Human
uaaguuucuaagauucuaaag

SEQ ID NO: 1335655 - RNA, 23 nt, Human
uaaguuucuaagauucuaaaggu

SEQ ID NO: 1335656 - RNA, 13 nt, Human
uaauaaaaagauu

SEQ ID NO: 1335657 - RNA, 16 nt, Human
uaauaaaaagauugaa

SEQ ID NO: 1335658 - RNA, 15 nt, Human
uaauaaaaagcuuuu

SEQ ID NO: 1335659 - RNA, 18 nt, Human
uaaguacacaauaagcaa

SEQ ID NO: 1335660 - RNA, 11 nt, Human
uaaguacagag

SEQ ID NO: 1335661 - RNA, 12 nt, Human
uaaguacagaga

SEQ ID NO: 1335662 - RNA, 13 nt, Human
uaaguacagagaa

SEQ ID NO: 1335663 - RNA, 14 nt, Human
uaaguacagagaag

SEQ ID NO: 1335664 - RNA, 16 nt, Human
uaaguacagagaagcc

SEQ ID NO: 1335665 - RNA, 17 nt, Human
uaaguacagagaagcca

SEQ ID NO: 1335666 - RNA, 18 nt, Human
uaaguacagagaagccau

SEQ ID NO: 1335667 - RNA, 22 nt, Human
uaaguacagagaagccaucacc

SEQ ID NO: 1335668 - RNA, 20 nt, Human
uaaguaaugauaacuggaaa

SEQ ID NO: 1335669 - RNA, 17 nt, Human
uaagguuuuaauuuagu

SEQ ID NO: 1335670 - RNA, 19 nt, Human
uaaggagaaaucuauagaa

SEQ ID NO: 1335671 - RNA, 21 nt, Human
uaagguuaucuacuuuuacuc

SEQ ID NO: 1335672 - RNA, 15 nt, Human
uaagguucuaaggcc

SEQ ID NO: 1335673 - RNA, 17 nt, Human
uaaggauccggaaagaa

SEQ ID NO: 1335674 - RNA, 18 nt, Human
uaaggauccggaaagaag

SEQ ID NO: 1335675 - RNA, 18 nt, Human
uaagguuuuaauuuagua

SEQ ID NO: 1335676 - RNA, 15 nt, Human
uaaggaccugaaauu

SEQ ID NO: 1335677 - RNA, 21 nt, Human
uaaggaccugaaauuccaaag

SEQ ID NO: 1335678 - RNA, 22 nt, Human
uaaggaccugaaauuccaaagu

SEQ ID NO: 1335679 - RNA, 22 nt, Human
uaaggaauuuuauuuuuuucug

SEQ ID NO: 1335680 - RNA, 13 nt, Human
uaagcugaaaaua

SEQ ID NO: 1335681 - RNA, 14 nt, Human
uaagcugaaaauau

SEQ ID NO: 1335682 - RNA, 19 nt, Human
uaagcucacguccugagaa

SEQ ID NO: 1335683 - RNA, 22 nt, Human
uaagcucccagggccugucuca

SEQ ID NO: 1335684 - RNA, 10 nt, Human
uaagcucuga

SEQ ID NO: 1335685 - RNA, 16 nt, Human
uaagcucugagcuguc

SEQ ID NO: 1335686 - RNA, 12 nt, Human
uaagcucugagc

SEQ ID NO: 1335687 - RNA, 19 nt, Human
uaaggaaaucaacuugcuu

SEQ ID NO: 1335688 - RNA, 20 nt, Human
uaaggaaaucaacuugcuua

SEQ ID NO: 1335689 - RNA, 14 nt, Human
uaaggaaccaacaa

SEQ ID NO: 1335690 - RNA, 17 nt, Human
uaaggaaccaacaaucu

SEQ ID NO: 1335691 - RNA, 21 nt, Human
uaagcauaagcuuaugcuuaa

SEQ ID NO: 1335692 - RNA, 21 nt, Human
uaagcagguggaucuauuuca

SEQ ID NO: 1335693 - RNA, 18 nt, Human
uaagcagugucuguguuu

SEQ ID NO: 1335694 - RNA, 22 nt, Human
uaagcagguggaucuauuucau

SEQ ID NO: 1335695 - RNA, 19 nt, Human
uaagauuauagauucuaaa

SEQ ID NO: 1335696 - RNA, 20 nt, Human
uaagauuauagauucuaaag

SEQ ID NO: 1335697 - RNA, 21 nt, Human
uaagauuauagauucuaaaga

SEQ ID NO: 1335698 - RNA, 22 nt, Human
uaagauuauagauucuaaagau

SEQ ID NO: 1335699 - RNA, 23 nt, Human
uaagauuauagauucuaaagauu

SEQ ID NO: 1335700 - RNA, 23 nt, Human
uaagcauaaaagaugaaagagca

SEQ ID NO: 1335701 - RNA, 14 nt, Human
uaagcuauuugaug

SEQ ID NO: 1335702 - RNA, 15 nt, Human
uaagcuauuugaugu

SEQ ID NO: 1335703 - RNA, 18 nt, Human
uaagcuauuugauguaau

SEQ ID NO: 1335704 - RNA, 19 nt, Human
uaagcuauuugauguaaua

SEQ ID NO: 1335705 - RNA, 21 nt, Human
uaagcuauuugauguaauacu

SEQ ID NO: 1335706 - RNA, 22 nt, Human
uaagcuauuugauguaauacuu

SEQ ID NO: 1335707 - RNA, 23 nt, Human
uaagcuauuugauguaauacuuc

SEQ ID NO: 1335708 - RNA, 14 nt, Human
uaagcuauuuuucu

SEQ ID NO: 1335709 - RNA, 16 nt, Human
uaagcuauuuuucuaa

SEQ ID NO: 1335710 - RNA, 17 nt, Human
uaagcuauuuuucuaac

SEQ ID NO: 1335711 - RNA, 21 nt, Human
uaagcuauuuuucuaacuaca

SEQ ID NO: 1335712 - RNA, 22 nt, Human
uaagcucacguccugagaaagc

SEQ ID NO: 1335713 - RNA, 14 nt, Human
uaagcaaaauguga

SEQ ID NO: 1335714 - RNA, 21 nt, Human
uaagcaaaaugugauauguac

SEQ ID NO: 1335715 - RNA, 15 nt, Human
uaagcaaaaugugau

SEQ ID NO: 1335716 - RNA, 24 nt, Human
aaucagucucagaaugucauuuug

SEQ ID NO: 1335717 - RNA, 17 nt, Human
aaucagucucagaaugu

SEQ ID NO: 1335718 - RNA, 19 nt, Human
uaagauuacaaaucagaag

SEQ ID NO: 1335719 - RNA, 22 nt, Human
uaagauuacaaaucagaaguca

SEQ ID NO: 1335720 - RNA, 15 nt, Human
uaagauuauagauuc

SEQ ID NO: 1335721 - RNA, 16 nt, Human
uaagauuauagauucu

SEQ ID NO: 1335722 - RNA, 17 nt, Human
uaagauuauagauucua

SEQ ID NO: 1335723 - RNA, 18 nt, Human
uaagauuauagauucuaa

SEQ ID NO: 1335724 - RNA, 15 nt, Human
aauauuuauuuuaau

SEQ ID NO: 1335725 - RNA, 20 nt, Human
aauauuuuccuccugagugc

SEQ ID NO: 1335726 - RNA, 13 nt, Human
aauauuuugaauc

SEQ ID NO: 1335727 - RNA, 14 nt, Human
aauauuuugaauca

SEQ ID NO: 1335728 - RNA, 15 nt, Human
aauauuuugaaucaa

SEQ ID NO: 1335729 - RNA, 16 nt, Human
aauauuuugaaucaau

SEQ ID NO: 1335730 - RNA, 18 nt, Human
aauauuuugaaucaauaa

SEQ ID NO: 1335731 - RNA, 22 nt, Human
aauauuuugaaucaauaauaua

SEQ ID NO: 1335732 - RNA, 20 nt, Human
aauauuuugaaucaauaaua

SEQ ID NO: 1335733 - RNA, 17 nt, Human
aaucacuaaaaaugauc

SEQ ID NO: 1335734 - RNA, 15 nt, Human
aauauuuauagguca

SEQ ID NO: 1335735 - RNA, 17 nt, Human
uaagacuuacucuaaga

SEQ ID NO: 1335736 - RNA, 18 nt, Human
uaagacuuacucuaagau

SEQ ID NO: 1335737 - RNA, 15 nt, Human
uaagacucaaauguu

SEQ ID NO: 1335738 - RNA, 18 nt, Human
uaagacucaaauguucua

SEQ ID NO: 1335739 - RNA, 19 nt, Human
uaagacucaaauguucuaa

SEQ ID NO: 1335740 - RNA, 21 nt, Human
uaagacucaaauguucuaagu

SEQ ID NO: 1335741 - RNA, 22 nt, Human
uaagacucaaauguucuaaguu

SEQ ID NO: 1335742 - RNA, 16 nt, Human
uaagacucucacacuc

SEQ ID NO: 1335743 - RNA, 16 nt, Human
aaucaggguuaguauu

SEQ ID NO: 1335744 - RNA, 19 nt, Human
aaucagggaggucauuuug

SEQ ID NO: 1335745 - RNA, 16 nt, Human
aaucagguggcuuuug

SEQ ID NO: 1335746 - RNA, 15 nt, Human
aaucaggcuuuuguu

SEQ ID NO: 1335747 - RNA, 16 nt, Human
aaucagcuauuuugug

SEQ ID NO: 1335748 - RNA, 17 nt, Human
aaucagcuauuuuguga

SEQ ID NO: 1335749 - RNA, 18 nt, Human
aaucaggaauauuuucca

SEQ ID NO: 1335750 - RNA, 20 nt, Human
aaucaggaauauuuuccaaa

SEQ ID NO: 1335751 - RNA, 18 nt, Human
aaucagggaggucauuuu

SEQ ID NO: 1335752 - RNA, 22 nt, Human
aaucaguaagagguguuauuug

SEQ ID NO: 1335753 - RNA, 14 nt, Human
aaucaguaagaggu

SEQ ID NO: 1335754 - RNA, 15 nt, Human
aaucagcuauuuugu

SEQ ID NO: 1335755 - RNA, 20 nt, Human
aaucagcuccuuccuggaga

SEQ ID NO: 1335756 - RNA, 16 nt, Human
aaucagccuaguugau

SEQ ID NO: 1335757 - RNA, 17 nt, Human
aaucagccuacaggccu

SEQ ID NO: 1335758 - RNA, 18 nt, Human
aaucagcauucucacucc

SEQ ID NO: 1335759 - RNA, 19 nt, Human
aaucagcauucucacuccu

SEQ ID NO: 1335760 - RNA, 14 nt, Human
aauauuuucuuuuc

SEQ ID NO: 1335761 - RNA, 18 nt, Human
aaucacucuaauuaauug

SEQ ID NO: 1335762 - RNA, 21 nt, Human
aaucacucuaauuaauuguaa

SEQ ID NO: 1335763 - RNA, 20 nt, Human
aaucacucuaauuaauugua

SEQ ID NO: 1335764 - RNA, 14 nt, Human
aagguacuucaaau

SEQ ID NO: 1335765 - RNA, 18 nt, Human
aagguacuuucauauuuu

SEQ ID NO: 1335766 - RNA, 19 nt, Human
aagguacuuucauauuuua

SEQ ID NO: 1335767 - RNA, 22 nt, Human
aagguacuuucauauuuuaaac

SEQ ID NO: 1335768 - RNA, 18 nt, Human
aagggucgaaagcucuag

SEQ ID NO: 1335769 - RNA, 19 nt, Human
aagggucgaaagcucuaga

SEQ ID NO: 1335770 - RNA, 21 nt, Human
aagggucgaaagcucuagaau

SEQ ID NO: 1335771 - RNA, 22 nt, Human
aagggucgaaagcucuagaauc

SEQ ID NO: 1335772 - RNA, 17 nt, Human
aaggggccagaggcucg

SEQ ID NO: 1335773 - RNA, 23 nt, Human
aaggggccucaccgagugggggc

SEQ ID NO: 1335774 - RNA, 13 nt, Human
aaggggccugagc

SEQ ID NO: 1335775 - RNA, 15 nt, Human
aaggggccugagcag

SEQ ID NO: 1335776 - RNA, 14 nt, Human
aaggggccugagca

SEQ ID NO: 1335777 - RNA, 13 nt, Human
aaggggcuucagg

SEQ ID NO: 1335778 - RNA, 14 nt, Human
aaggcucuuuugua

SEQ ID NO: 1335779 - RNA, 23 nt, Human
aaggcucugagcaaauguggcuc

SEQ ID NO: 1335780 - RNA, 23 nt, Human
aaggcucuguuccacauauauuu

SEQ ID NO: 1335781 - RNA, 22 nt, Human
aaggcucugagagucuagauuc

SEQ ID NO: 1335782 - RNA, 11 nt, Human
aaggcucuaga

SEQ ID NO: 1335783 - RNA, 12 nt, Human
aaggcucuagau

SEQ ID NO: 1335784 - RNA, 13 nt, Human
aaggcucuagauc

SEQ ID NO: 1335785 - RNA, 16 nt, Human
aaggcucuaugagucu

SEQ ID NO: 1335786 - RNA, 20 nt, Human
aaggcucuaugagucuagau

SEQ ID NO: 1335787 - RNA, 21 nt, Human
aaggcucuaugagucuagaug

SEQ ID NO: 1335788 - RNA, 12 nt, Human
aaggcucugaga

SEQ ID NO: 1335789 - RNA, 13 nt, Human
aaggcucugagag

SEQ ID NO: 1335790 - RNA, 14 nt, Human
aaggcucugagagu

SEQ ID NO: 1335791 - RNA, 16 nt, Human
aaggcucugagagucu

SEQ ID NO: 1335792 - RNA, 17 nt, Human
aaggcucugagagucua

SEQ ID NO: 1335793 - RNA, 20 nt, Human
aaggcucugagagucuagau

SEQ ID NO: 1335794 - RNA, 21 nt, Human
aaggcucugagagucuagauu

SEQ ID NO: 1335795 - RNA, 16 nt, Human
aaguaaggaauuuuau

SEQ ID NO: 1335796 - RNA, 13 nt, Human
aaguaagcaaaga

SEQ ID NO: 1335797 - RNA, 18 nt, Human
aagguauuuaauagguuu

SEQ ID NO: 1335798 - RNA, 17 nt, Human
guuucuauuuuuugaaa

SEQ ID NO: 1335799 - RNA, 18 nt, Human
guuucucuuagaaaagcu

SEQ ID NO: 1335800 - RNA, 12 nt, Human
guuucugacucu

SEQ ID NO: 1335801 - RNA, 17 nt, Human
guuucugacucugagcu

SEQ ID NO: 1335802 - RNA, 13 nt, Human
guuucugacucug

SEQ ID NO: 1335803 - RNA, 22 nt, Human
guuucugaggcuuuaugauaau

SEQ ID NO: 1335804 - RNA, 19 nt, Human
guuuaaucauauaaauaga

SEQ ID NO: 1335805 - RNA, 17 nt, Human
guuuaaucauauaaaua

SEQ ID NO: 1335806 - RNA, 22 nt, Human
guugggcagggugacccugaag

SEQ ID NO: 1335807 - RNA, 19 nt, Human
guuuacaugcuuauuccau

SEQ ID NO: 1335808 - RNA, 14 nt, Human
guuuacaugcuuau

SEQ ID NO: 1335809 - RNA, 22 nt, Human
guuuauuuaacuuuuaguaaag

SEQ ID NO: 1335810 - RNA, 15 nt, Human
guuuaaugaaugcuu

SEQ ID NO: 1335811 - RNA, 20 nt, Human
guuuaaugaagaucuaaaua

SEQ ID NO: 1335812 - RNA, 18 nt, Human
guuuaaugaaugcuuaaa

SEQ ID NO: 1335813 - RNA, 11 nt, Human
guuuacagaau

SEQ ID NO: 1335814 - RNA, 14 nt, Human
guuuauuucuuaaa

SEQ ID NO: 1335815 - RNA, 19 nt, Human
guuuauuuucaagaauaau

SEQ ID NO: 1335816 - RNA, 15 nt, Human
aaggaaagaaaacau

SEQ ID NO: 1335817 - RNA, 14 nt, Human
aagcuccaucucca

SEQ ID NO: 1335818 - RNA, 13 nt, Human
aagcuccaagccc

SEQ ID NO: 1335819 - RNA, 20 nt, Human
aagcuccaucuccacuccag

SEQ ID NO: 1335820 - RNA, 13 nt, Human
aaggaaccaacaa

SEQ ID NO: 1335821 - RNA, 17 nt, Human
aaggaaccaacaaucuu

SEQ ID NO: 1335822 - RNA, 16 nt, Human
aaggaaccaacaaucu

SEQ ID NO: 1335823 - RNA, 21 nt, Human
aaggaauaaauugcuccuuga

SEQ ID NO: 1335824 - RNA, 22 nt, Human
aaggaagcauuguaaaauaauu

SEQ ID NO: 1335825 - RNA, 18 nt, Human
aaggaagcauuguaaaau

SEQ ID NO: 1335826 - RNA, 23 nt, Human
aaggaagcauuguaaaauaauuc

SEQ ID NO: 1335827 - RNA, 20 nt, Human
aaggagaggcaacauccaaa

SEQ ID NO: 1335828 - RNA, 18 nt, Human
aaggagaugucuuggaac

SEQ ID NO: 1335829 - RNA, 10 nt, Human
aaggagccug

SEQ ID NO: 1335830 - RNA, 12 nt, Human
aaggagccugug

SEQ ID NO: 1335831 - RNA, 13 nt, Human
aaggagccuguga

SEQ ID NO: 1335832 - RNA, 22 nt, Human
aaggagccugugaacccaggac

SEQ ID NO: 1335833 - RNA, 21 nt, Human
aaggagccugugaacccagga

SEQ ID NO: 1335834 - RNA, 11 nt, Human
aaggagcugcc

SEQ ID NO: 1335835 - RNA, 12 nt, Human
aaggagcugccu

SEQ ID NO: 1335836 - RNA, 13 nt, Human
aaggagcugccug

SEQ ID NO: 1335837 - RNA, 16 nt, Human
aaggagcugccuggac

SEQ ID NO: 1335838 - RNA, 17 nt, Human
aaggagcugccuggacc

SEQ ID NO: 1335839 - RNA, 19 nt, Human
aaggagcugccuggacccg

SEQ ID NO: 1335840 - RNA, 18 nt, Human
aaggagcugccuggaccc

SEQ ID NO: 1335841 - RNA, 17 nt, Human
aaggaggggcuguaaaa

SEQ ID NO: 1335842 - RNA, 17 nt, Human
aaggagucaaaacuaca

SEQ ID NO: 1335843 - RNA, 19 nt, Human
aaggcauuauaaaaagaau

SEQ ID NO: 1335844 - RNA, 17 nt, Human
aaggcauggcggccccc

SEQ ID NO: 1335845 - RNA, 22 nt, Human
aaggcaucgucaugcacaguau

SEQ ID NO: 1335846 - RNA, 17 nt, Human
aaggcaucugacaugca

SEQ ID NO: 1335847 - RNA, 17 nt, Human
aaggaguuuauguucca

SEQ ID NO: 1335848 - RNA, 15 nt, Human
aaggauagaugcugg

SEQ ID NO: 1335849 - RNA, 19 nt, Human
aaggauagaugcuggccca

SEQ ID NO: 1335850 - RNA, 11 nt, Human
aaggauaaagu

SEQ ID NO: 1335851 - RNA, 12 nt, Human
aaggaguuuaug

SEQ ID NO: 1335852 - RNA, 13 nt, Human
aaggaguuuaugu

SEQ ID NO: 1335853 - RNA, 14 nt, Human
aaggaguuuauguu

SEQ ID NO: 1335854 - RNA, 17 nt, Human
aaggagucacugagacc

SEQ ID NO: 1335855 - RNA, 20 nt, Human
aaggagucagacauuuuaag

SEQ ID NO: 1335856 - RNA, 18 nt, Human
aaggagucacugagacca

SEQ ID NO: 1335857 - RNA, 19 nt, Human
aaggaguguagcaacuaca

SEQ ID NO: 1335858 - RNA, 13 nt, Human
aaggccagcacuc

SEQ ID NO: 1335859 - RNA, 14 nt, Human
aaggccauaaaaca

SEQ ID NO: 1335860 - RNA, 17 nt, Human
aaggccauaaaacaggu

SEQ ID NO: 1335861 - RNA, 18 nt, Human
aaggccauaaaacaggua

SEQ ID NO: 1335862 - RNA, 24 nt, Human
aaggccauaaaacagguaauauaa

SEQ ID NO: 1335863 - RNA, 22 nt, Human
aaggccaucugggcuccuccag

SEQ ID NO: 1335864 - RNA, 21 nt, Human
aaggcccgagcagcugagcag

SEQ ID NO: 1335865 - RNA, 17 nt, Human
aaggcccgagcagcuga

SEQ ID NO: 1335866 - RNA, 18 nt, Human
aaggcccgagcagcugag

SEQ ID NO: 1335867 - RNA, 19 nt, Human
aaggcccgagcagcugagc

SEQ ID NO: 1335868 - RNA, 20 nt, Human
aaggcccgagcagcugagca

SEQ ID NO: 1335869 - RNA, 12 nt, Human
guugccuuuuau

SEQ ID NO: 1335870 - RNA, 22 nt, Human
aaggccuaauucuaugccuguc

SEQ ID NO: 1335871 - RNA, 15 nt, Human
aaggccuaggauucu

SEQ ID NO: 1335872 - RNA, 16 nt, Human
aaggccuaggauucua

SEQ ID NO: 1335873 - RNA, 18 nt, Human
aaggccuaggauucuaaa

SEQ ID NO: 1335874 - RNA, 17 nt, Human
guugcguuccuuucuuu

SEQ ID NO: 1335875 - RNA, 22 nt, Human
guuggaaugaauuaaauaaacc

SEQ ID NO: 1335876 - RNA, 15 nt, Human
guuggaauggauuuu

SEQ ID NO: 1335877 - RNA, 22 nt, Human
guuggaauggauuuuucuuuaa

SEQ ID NO: 1335878 - RNA, 23 nt, Human
guugggagagggcgcaggccgug

SEQ ID NO: 1335879 - RNA, 17 nt, Human
guuggaauggauuuuuc

SEQ ID NO: 1335880 - RNA, 22 nt, Human
guugggaucagggguaggaaug

SEQ ID NO: 1335881 - RNA, 14 nt, Human
guugggcagccaga

SEQ ID NO: 1335882 - RNA, 19 nt, Human
guugggcagccagaccagc

SEQ ID NO: 1335883 - RNA, 12 nt, Human
uaaaagaaugau

SEQ ID NO: 1335884 - RNA, 15 nt, Human
uaaaacuuuccucgc

SEQ ID NO: 1335885 - RNA, 17 nt, Human
uaaaacuuuccucgccu

SEQ ID NO: 1335886 - RNA, 14 nt, Human
uaaaacuuugaagu

SEQ ID NO: 1335887 - RNA, 13 nt, Human
uaaaacuuuccuc

SEQ ID NO: 1335888 - RNA, 15 nt, Human
uaaaacuuugaaguu

SEQ ID NO: 1335889 - RNA, 11 nt, Human
uaaaacuaaga

SEQ ID NO: 1335890 - RNA, 18 nt, Human
uaaaacgcaguugcaaac

SEQ ID NO: 1335891 - RNA, 22 nt, Human
uaaaaccuuccaugucaagauu

SEQ ID NO: 1335892 - RNA, 17 nt, Human
uaaaacccguugauuac

SEQ ID NO: 1335893 - RNA, 18 nt, Human
uaaaacccguugauuacu

SEQ ID NO: 1335894 - RNA, 17 nt, Human
uaaaaccugcuuuucaa

SEQ ID NO: 1335895 - RNA, 13 nt, Human
uaaaaccuggaga

SEQ ID NO: 1335896 - RNA, 16 nt, Human
uaaaaauaaacauguu

SEQ ID NO: 1335897 - RNA, 19 nt, Human
uaaaaauaaaaaagauccc

SEQ ID NO: 1335898 - RNA, 21 nt, Human
uaaaaauaaaaaagaucccaa

SEQ ID NO: 1335899 - RNA, 14 nt, Human
uaaaaauaaggucu

SEQ ID NO: 1335900 - RNA, 15 nt, Human
uaaaaauaagucaac

SEQ ID NO: 1335901 - RNA, 21 nt, Human
uaaaaauaaaaaacacuggga

SEQ ID NO: 1335902 - RNA, 20 nt, Human
uaaaaaguuuuaguuuugau

SEQ ID NO: 1335903 - RNA, 16 nt, Human
uaaaaauaaaaaagau

SEQ ID NO: 1335904 - RNA, 17 nt, Human
uaaaaauaaaaaagauc

SEQ ID NO: 1335905 - RNA, 19 nt, Human
uaaaaauaagucaacagua

SEQ ID NO: 1335906 - RNA, 16 nt, Human
uaaaaauaagucaaca

SEQ ID NO: 1335907 - RNA, 19 nt, Human
uaaaaauaaaaaacacugg

SEQ ID NO: 1335908 - RNA, 18 nt, Human
uaaaaauaaaaaacacug

SEQ ID NO: 1335909 - RNA, 16 nt, Human
guuuuugagauauuaa

SEQ ID NO: 1335910 - RNA, 17 nt, Human
uaaaaagugcuuuugug

SEQ ID NO: 1335911 - RNA, 13 nt, Human
guuuuugagauau

SEQ ID NO: 1335912 - RNA, 14 nt, Human
guuuuugagauauu

SEQ ID NO: 1335913 - RNA, 20 nt, Human
uaaaagacagugaaagaaaa

SEQ ID NO: 1335914 - RNA, 12 nt, Human
uaaaagacucau

SEQ ID NO: 1335915 - RNA, 13 nt, Human
uaaaagacucauc

SEQ ID NO: 1335916 - RNA, 14 nt, Human
uaaaagacucaucc

SEQ ID NO: 1335917 - RNA, 16 nt, Human
uaaaagacucauccgu

SEQ ID NO: 1335918 - RNA, 16 nt, Human
uaaaaguguccauuga

SEQ ID NO: 1335919 - RNA, 18 nt, Human
uaaaaguguccauugaaa

SEQ ID NO: 1335920 - RNA, 23 nt, Human
uaaaagugggcuugauucugcag

SEQ ID NO: 1335921 - RNA, 21 nt, Human
uaaaaguuuuuuauuaugcau

SEQ ID NO: 1335922 - RNA, 22 nt, Human
uaaaaguuuuuuauuaugcauu

SEQ ID NO: 1335923 - RNA, 18 nt, Human
uaaaauaauuauauaacu

SEQ ID NO: 1335924 - RNA, 19 nt, Human
uaaaauaauuauauaacug

SEQ ID NO: 1335925 - RNA, 20 nt, Human
uaaaauaauuauauaacugu

SEQ ID NO: 1335926 - RNA, 21 nt, Human
uaaaauaauuauauaacugua

SEQ ID NO: 1335927 - RNA, 22 nt, Human
uaaaauaauuuuaucucuuucu

SEQ ID NO: 1335928 - RNA, 13 nt, Human
uaaaauaauuuug

SEQ ID NO: 1335929 - RNA, 14 nt, Human
uaaaauaauuuugu

SEQ ID NO: 1335930 - RNA, 20 nt, Human
uaaaauaauuuuuauauuug

SEQ ID NO: 1335931 - RNA, 15 nt, Human
uaaaauaauuuugua

SEQ ID NO: 1335932 - RNA, 16 nt, Human
uaaaauaauuuuguaa

SEQ ID NO: 1335933 - RNA, 21 nt, Human
uaaaauaauuuuguaauguau

SEQ ID NO: 1335934 - RNA, 16 nt, Human
uaaaauaauucugagu

SEQ ID NO: 1335935 - RNA, 14 nt, Human
uaaaauacuuuuac

SEQ ID NO: 1335936 - RNA, 19 nt, Human
uaaaauacuuuuacucugc

SEQ ID NO: 1335937 - RNA, 21 nt, Human
uaaaauacuuuuacucugccu

SEQ ID NO: 1335938 - RNA, 20 nt, Human
uaaaauacuuuuacucugcc

SEQ ID NO: 1335939 - RNA, 14 nt, Human
uaaaauaucuacau

SEQ ID NO: 1335940 - RNA, 19 nt, Human
uaaaauaugaagacauaaa

SEQ ID NO: 1335941 - RNA, 21 nt, Human
aagugaucaaacuacauauug

SEQ ID NO: 1335942 - RNA, 20 nt, Human
aagugauucucaugccucag

SEQ ID NO: 1335943 - RNA, 17 nt, Human
aagugagggcucacuca

SEQ ID NO: 1335944 - RNA, 19 nt, Human
aagugagggcucacucagc

SEQ ID NO: 1335945 - RNA, 21 nt, Human
aagugagggcucacucagcca

SEQ ID NO: 1335946 - RNA, 17 nt, Human
aagugagucucucuggg

SEQ ID NO: 1335947 - RNA, 13 nt, Human
uaaaauauuccug

SEQ ID NO: 1335948 - RNA, 22 nt, Human
uaaaauauuccugcauuuguga

SEQ ID NO: 1335949 - RNA, 20 nt, Human
uaaaauaugaagacauaaac

SEQ ID NO: 1335950 - RNA, 21 nt, Human
aagugauucucaugccucagc

SEQ ID NO: 1335951 - RNA, 12 nt, Human
aagugcccucca

SEQ ID NO: 1335952 - RNA, 18 nt, Human
aagugcccuccaggcuuu

SEQ ID NO: 1335953 - RNA, 13 nt, Human
aagugcccucucc

SEQ ID NO: 1335954 - RNA, 15 nt, Human
aagugcccucuccca

SEQ ID NO: 1335955 - RNA, 23 nt, Human
aagugcccucucccacccucuuc

SEQ ID NO: 1335956 - RNA, 19 nt, Human
aagugcccucucccacccu

SEQ ID NO: 1335957 - RNA, 13 nt, Human
aaguauuagaaua

SEQ ID NO: 1335958 - RNA, 10 nt, Human
aaguauuuag

SEQ ID NO: 1335959 - RNA, 11 nt, Human
aaguauuuagg

SEQ ID NO: 1335960 - RNA, 16 nt, Human
aaguauuuagguuuuu

SEQ ID NO: 1335961 - RNA, 20 nt, Human
aaguacccguucacauuuuu

SEQ ID NO: 1335962 - RNA, 12 nt, Human
aaguaccagacu

SEQ ID NO: 1335963 - RNA, 13 nt, Human
aaguaccagacua

SEQ ID NO: 1335964 - RNA, 18 nt, Human
aaguacccguucacauuu

SEQ ID NO: 1335965 - RNA, 11 nt, Human
aaguacagaga

SEQ ID NO: 1335966 - RNA, 12 nt, Human
aaguacagagaa

SEQ ID NO: 1335967 - RNA, 13 nt, Human
aaguacagagaag

SEQ ID NO: 1335968 - RNA, 14 nt, Human
aaguacagagaagc

SEQ ID NO: 1335969 - RNA, 15 nt, Human
aaguacagagaagcc

SEQ ID NO: 1335970 - RNA, 16 nt, Human
aaguacagagaagcca

SEQ ID NO: 1335971 - RNA, 22 nt, Human
aaguacagagaagccaucaccu

SEQ ID NO: 1335972 - RNA, 17 nt, Human
aaguacagagaagccau

SEQ ID NO: 1335973 - RNA, 17 nt, Human
aaguaaugacagaacau

SEQ ID NO: 1335974 - RNA, 18 nt, Human
aaguaaugacagaacaug

SEQ ID NO: 1335975 - RNA, 14 nt, Human
aaguaaugauaacu

SEQ ID NO: 1335976 - RNA, 19 nt, Human
aaguaaugauaacuggaaa

SEQ ID NO: 1335977 - RNA, 17 nt, Human
guuuugcuacauaauua

SEQ ID NO: 1335978 - RNA, 18 nt, Human
guuuuggacaguuuacca

SEQ ID NO: 1335979 - RNA, 17 nt, Human
guuuuggacaguuuacc

SEQ ID NO: 1335980 - RNA, 20 nt, Human
guuuuggcugaaauucuccu

SEQ ID NO: 1335981 - RNA, 22 nt, Human
guuuuggcugaaauucuccugg

SEQ ID NO: 1335982 - RNA, 23 nt, Human
guuuuggcugaaauucuccugga

SEQ ID NO: 1335983 - RNA, 20 nt, Human
guuucugaguuccugcaugc

SEQ ID NO: 1335984 - RNA, 17 nt, Human
guuucugaguuuuacca

SEQ ID NO: 1335985 - RNA, 16 nt, Human
guuucugaguuuuacc

SEQ ID NO: 1335986 - RNA, 13 nt, Human
guuucugcccugc

SEQ ID NO: 1335987 - RNA, 16 nt, Human
aagucuuucacauuua

SEQ ID NO: 1335988 - RNA, 16 nt, Human
aagucuuucucuuucc

SEQ ID NO: 1335989 - RNA, 17 nt, Human
aagucuuucucuuuccc

SEQ ID NO: 1335990 - RNA, 18 nt, Human
aagucuuucucuuucccu

SEQ ID NO: 1335991 - RNA, 20 nt, Human
aagucuuucucuuucccugg

SEQ ID NO: 1335992 - RNA, 22 nt, Human
aagucuuucucuuucccugguc

SEQ ID NO: 1335993 - RNA, 23 nt, Human
aagucuuucucuuucccuggucc

SEQ ID NO: 1335994 - RNA, 14 nt, Human
aagucuuuuguucg

SEQ ID NO: 1335995 - RNA, 21 nt, Human
aagucaugcguuuaaucacau

SEQ ID NO: 1335996 - RNA, 20 nt, Human
aaguauuuguuaauuuagaa

SEQ ID NO: 1335997 - RNA, 19 nt, Human
aaguauuuguuaauuuaga

SEQ ID NO: 1335998 - RNA, 21 nt, Human
aaguauuuguuaauuuagaaa

SEQ ID NO: 1335999 - RNA, 17 nt, Human
aaguauuuucauaagua

SEQ ID NO: 1336000 - RNA, 22 nt, Human
aaguauuuucauaaguauuuca

SEQ ID NO: 1336001 - RNA, 13 nt, Human
aaguauuucaaau

SEQ ID NO: 1336002 - RNA, 21 nt, Human
aaguauuucaaauuggagcuu

SEQ ID NO: 1336003 - RNA, 22 nt, Human
aaguauuucaaauuggagcuuc

SEQ ID NO: 1336004 - RNA, 13 nt, Human
aaguauuugggaa

SEQ ID NO: 1336005 - RNA, 15 nt, Human
aaguauuuuccuguu

SEQ ID NO: 1336006 - RNA, 15 nt, Human
guuuuucauaaagca

SEQ ID NO: 1336007 - RNA, 18 nt, Human
guuuuucauuaaauaaau

SEQ ID NO: 1336008 - RNA, 22 nt, Human
guuuuuccuuccaaugucugga

SEQ ID NO: 1336009 - RNA, 18 nt, Human
guuuuuccuuuuuuugua

SEQ ID NO: 1336010 - RNA, 16 nt, Human
guuuuucggacaguuu

SEQ ID NO: 1336011 - RNA, 13 nt, Human
guuuuucuaaagg

SEQ ID NO: 1336012 - RNA, 18 nt, Human
aagucuuuuguucgcaug

SEQ ID NO: 1336013 - RNA, 13 nt, Human
aagugaaaaacau

SEQ ID NO: 1336014 - RNA, 15 nt, Human
aagugaaaaacauga

SEQ ID NO: 1336015 - RNA, 12 nt, Human
aagugaaaacuu

SEQ ID NO: 1336016 - RNA, 12 nt, Human
aagugaaaauau

SEQ ID NO: 1336017 - RNA, 14 nt, Human
aagugaaaauauag

SEQ ID NO: 1336018 - RNA, 14 nt, Human
aagugaaaaugguc

SEQ ID NO: 1336019 - RNA, 11 nt, Human
aagugaaauaa

SEQ ID NO: 1336020 - RNA, 16 nt, Human
aagugaaauaaugugu

SEQ ID NO: 1336021 - RNA, 14 nt, Human
aagugaaauaaugu

SEQ ID NO: 1336022 - RNA, 13 nt, Human
aagugaagacaga

SEQ ID NO: 1336023 - RNA, 13 nt, Human
aagugaagacugg

SEQ ID NO: 1336024 - RNA, 16 nt, Human
aagugaagacuggaag

SEQ ID NO: 1336025 - RNA, 16 nt, Human
aagugagaccuuccuu

SEQ ID NO: 1336026 - RNA, 23 nt, Human
aagcaucccucacccauccuaga

SEQ ID NO: 1336027 - RNA, 14 nt, Human
aagcaucccucacc

SEQ ID NO: 1336028 - RNA, 13 nt, Human
aagcaucccucac

SEQ ID NO: 1336029 - RNA, 13 nt, Human
aagcaucuaaguu

SEQ ID NO: 1336030 - RNA, 13 nt, Human
aagcaucuggcuc

SEQ ID NO: 1336031 - RNA, 17 nt, Human
aagcaucuggcucuaau

SEQ ID NO: 1336032 - RNA, 19 nt, Human
aagcaucuggcucuaauuc

SEQ ID NO: 1336033 - RNA, 18 nt, Human
aagcaucuaaguuauaag

SEQ ID NO: 1336034 - RNA, 12 nt, Human
aagcauucacaa

SEQ ID NO: 1336035 - RNA, 13 nt, Human
aagcauucacaac

SEQ ID NO: 1336036 - RNA, 21 nt, Human
aagcauucagaagaaaaagaa

SEQ ID NO: 1336037 - RNA, 15 nt, Human
aagcauucagaagaa

SEQ ID NO: 1336038 - RNA, 15 nt, Human
aagcauucucauugg

SEQ ID NO: 1336039 - RNA, 17 nt, Human
aagcauucucauuggaa

SEQ ID NO: 1336040 - RNA, 18 nt, Human
aagcauucucauuggaaa

SEQ ID NO: 1336041 - RNA, 22 nt, Human
aagcauucucauuggaaauuua

SEQ ID NO: 1336042 - RNA, 23 nt, Human
aagcauucucauuggaaauuuag

SEQ ID NO: 1336043 - RNA, 16 nt, Human
aagcauuuagauguau

SEQ ID NO: 1336044 - RNA, 13 nt, Human
aagcauucugucu

SEQ ID NO: 1336045 - RNA, 16 nt, Human
aagcauugaauggcua

SEQ ID NO: 1336046 - RNA, 18 nt, Human
aagcauuguaaaauaauu

SEQ ID NO: 1336047 - RNA, 13 nt, Human
aagcauugaaugg

SEQ ID NO: 1336048 - RNA, 14 nt, Human
aagcauuguaaaau

SEQ ID NO: 1336049 - RNA, 15 nt, Human
aagcauuguaaaaua

SEQ ID NO: 1336050 - RNA, 17 nt, Human
aagcauuguaaaauaau

SEQ ID NO: 1336051 - RNA, 16 nt, Human
aagcauuuagaaaacu

SEQ ID NO: 1336052 - RNA, 14 nt, Human
aagcauuuuguaau

SEQ ID NO: 1336053 - RNA, 17 nt, Human
aagcauuuuguaauaau

SEQ ID NO: 1336054 - RNA, 18 nt, Human
aagccaaaacaauguuua

SEQ ID NO: 1336055 - RNA, 12 nt, Human
aagccaaaacaa

SEQ ID NO: 1336056 - RNA, 22 nt, Human
aagcauaaaagaugaaagagca

SEQ ID NO: 1336057 - RNA, 23 nt, Human
aagcauaaaagaugaaagagcag

SEQ ID NO: 1336058 - RNA, 21 nt, Human
aagcaucauuauuuauguauu

SEQ ID NO: 1336059 - RNA, 23 nt, Human
aagcaucauuauuuauguauugu

SEQ ID NO: 1336060 - RNA, 22 nt, Human
aagcaucauuauuuauguauug

SEQ ID NO: 1336061 - RNA, 18 nt, Human
aagcaguauuuuucuuga

SEQ ID NO: 1336062 - RNA, 17 nt, Human
aagcagucgugccugug

SEQ ID NO: 1336063 - RNA, 18 nt, Human
aagcagucgugccugugu

SEQ ID NO: 1336064 - RNA, 19 nt, Human
aagcagucgugccuguguc

SEQ ID NO: 1336065 - RNA, 16 nt, Human
aagcagguuucaagga

SEQ ID NO: 1336066 - RNA, 17 nt, Human
aagcagguuucaaggaa

SEQ ID NO: 1336067 - RNA, 19 nt, Human
aagcagguuucaaggaagu

SEQ ID NO: 1336068 - RNA, 17 nt, Human
aagcaguauuuuucuug

SEQ ID NO: 1336069 - RNA, 17 nt, Human
gugugugaaugaacacu

SEQ ID NO: 1336070 - RNA, 14 nt, Human
gugugugcccucug

SEQ ID NO: 1336071 - RNA, 17 nt, Human
gugugugcccucugggc

SEQ ID NO: 1336072 - RNA, 19 nt, Human
gugugugcccucugggcuc

SEQ ID NO: 1336073 - RNA, 21 nt, Human
gugugugcccucugggcucug

SEQ ID NO: 1336074 - RNA, 23 nt, Human
gugugugcccucugggcucugag

SEQ ID NO: 1336075 - RNA, 19 nt, Human
aagcagguugauaaaucau

SEQ ID NO: 1336076 - RNA, 15 nt, Human
aagcagguugauaaa

SEQ ID NO: 1336077 - RNA, 14 nt, Human
aagcagguugauaa

SEQ ID NO: 1336078 - RNA, 14 nt, Human
aagcagguucuugu

SEQ ID NO: 1336079 - RNA, 15 nt, Human
aagcagguucuuguu

SEQ ID NO: 1336080 - RNA, 23 nt, Human
aagcccauucauuccauucugga

SEQ ID NO: 1336081 - RNA, 16 nt, Human
aagccccacccaggcc

SEQ ID NO: 1336082 - RNA, 17 nt, Human
aagccccacccaggcca

SEQ ID NO: 1336083 - RNA, 18 nt, Human
aagccccacccaggccag

SEQ ID NO: 1336084 - RNA, 22 nt, Human
aagccccacccaggccaggcau

SEQ ID NO: 1336085 - RNA, 21 nt, Human
aagcccauucauuccauucug

SEQ ID NO: 1336086 - RNA, 16 nt, Human
aagcccauucauucca

SEQ ID NO: 1336087 - RNA, 18 nt, Human
aagcccauccugaccagc

SEQ ID NO: 1336088 - RNA, 20 nt, Human
aagcccauccugaccagcug

SEQ ID NO: 1336089 - RNA, 17 nt, Human
aagcccagugcacugaa

SEQ ID NO: 1336090 - RNA, 22 nt, Human
aagcccauaugcuaccaccagc

SEQ ID NO: 1336091 - RNA, 22 nt, Human
aagcccagugcacugaaaguca

SEQ ID NO: 1336092 - RNA, 14 nt, Human
aagcccauccugac

SEQ ID NO: 1336093 - RNA, 15 nt, Human
aagcccauccugacc

SEQ ID NO: 1336094 - RNA, 16 nt, Human
aagcccauccugacca

SEQ ID NO: 1336095 - RNA, 23 nt, Human
aagcccuuccaugucgccucugc

SEQ ID NO: 1336096 - RNA, 15 nt, Human
aagcccuuccauguc

SEQ ID NO: 1336097 - RNA, 20 nt, Human
aagcccuuccaugucgccuc

SEQ ID NO: 1336098 - RNA, 13 nt, Human
aagccguccuggc

SEQ ID NO: 1336099 - RNA, 17 nt, Human
guuaagacaugauuucc

SEQ ID NO: 1336100 - RNA, 19 nt, Human
guuaagacaugauuuccuu

SEQ ID NO: 1336101 - RNA, 22 nt, Human
guuaagacaugauuuccuugaa

SEQ ID NO: 1336102 - RNA, 13 nt, Human
guuaagaccuggc

SEQ ID NO: 1336103 - RNA, 14 nt, Human
guuaagaccuggca

SEQ ID NO: 1336104 - RNA, 16 nt, Human
guuaagaccuggcagc

SEQ ID NO: 1336105 - RNA, 15 nt, Human
guuaagacuugacag

SEQ ID NO: 1336106 - RNA, 16 nt, Human
guuaagacuugacagu

SEQ ID NO: 1336107 - RNA, 17 nt, Human
guuaagacuugacagug

SEQ ID NO: 1336108 - RNA, 15 nt, Human
aagcccggcuccugg

SEQ ID NO: 1336109 - RNA, 22 nt, Human
aagcccggcuccuggucaccua

SEQ ID NO: 1336110 - RNA, 18 nt, Human
aagcccggcuccugguca

SEQ ID NO: 1336111 - RNA, 13 nt, Human
aagcccucccagg

SEQ ID NO: 1336112 - RNA, 20 nt, Human
aagcccucccagguguuaac

SEQ ID NO: 1336113 - RNA, 14 nt, Human
aagcccccaccgug

SEQ ID NO: 1336114 - RNA, 20 nt, Human
aagcccccaccgugggcagg

SEQ ID NO: 1336115 - RNA, 12 nt, Human
aagcccccagag

SEQ ID NO: 1336116 - RNA, 13 nt, Human
aagcccccagagc

SEQ ID NO: 1336117 - RNA, 14 nt, Human
aagcccccagagcc

SEQ ID NO: 1336118 - RNA, 15 nt, Human
aagcccccagagccc

SEQ ID NO: 1336119 - RNA, 16 nt, Human
aagcccccagagccca

SEQ ID NO: 1336120 - RNA, 17 nt, Human
aagcccccagagcccag

SEQ ID NO: 1336121 - RNA, 18 nt, Human
aagcccccagagcccagg

SEQ ID NO: 1336122 - RNA, 16 nt, Human
aagcccccagcuaaga

SEQ ID NO: 1336123 - RNA, 21 nt, Human
aagcccccagcuaagaaccug

SEQ ID NO: 1336124 - RNA, 23 nt, Human
aagcccccagcuaagaaccugga

SEQ ID NO: 1336125 - RNA, 19 nt, Human
aagcccccagagcccaggc

SEQ ID NO: 1336126 - RNA, 14 nt, Human
aagccccugggccc

SEQ ID NO: 1336127 - RNA, 18 nt, Human
aagccccugccccuccuc

SEQ ID NO: 1336128 - RNA, 20 nt, Human
guuagggaaaacauuccauc

SEQ ID NO: 1336129 - RNA, 15 nt, Human
guuagggaaaacauu

SEQ ID NO: 1336130 - RNA, 13 nt, Human
guuaggagguccu

SEQ ID NO: 1336131 - RNA, 20 nt, Human
guuagcuccuguggccccac

SEQ ID NO: 1336132 - RNA, 19 nt, Human
guuaagacuugacagugga

SEQ ID NO: 1336133 - RNA, 14 nt, Human
guuacuucucuaau

SEQ ID NO: 1336134 - RNA, 14 nt, Human
guuacuucugaggu

SEQ ID NO: 1336135 - RNA, 19 nt, Human
guuagaaaugcagaauccu

SEQ ID NO: 1336136 - RNA, 23 nt, Human
guuagggaaaacauuccauccuu

SEQ ID NO: 1336137 - RNA, 19 nt, Human
guuagggacugaccagcag

SEQ ID NO: 1336138 - RNA, 17 nt, Human
guuauuaucugggcuua

SEQ ID NO: 1336139 - RNA, 22 nt, Human
guuauuaucugggcuuauaucu

SEQ ID NO: 1336140 - RNA, 20 nt, Human
guuagggacugaccagcagc

SEQ ID NO: 1336141 - RNA, 18 nt, Human
guuauuaugauuagcuuu

SEQ ID NO: 1336142 - RNA, 16 nt, Human
guuauuuuuuaauuau

SEQ ID NO: 1336143 - RNA, 13 nt, Human
guuauuuugcaac

SEQ ID NO: 1336144 - RNA, 17 nt, Human
guuauuuuguuuuuccu

SEQ ID NO: 1336145 - RNA, 19 nt, Human
guuauuuuuacauucugaa

SEQ ID NO: 1336146 - RNA, 20 nt, Human
guuauuuuuacauucugaau

SEQ ID NO: 1336147 - RNA, 21 nt, Human
guuauuuuuuaauuauuauuu

SEQ ID NO: 1336148 - RNA, 14 nt, Human
guucaacuuauuaa

SEQ ID NO: 1336149 - RNA, 19 nt, Human
guucaacuuuuccuuugaa

SEQ ID NO: 1336150 - RNA, 16 nt, Human
guucaagaaauaaguu

SEQ ID NO: 1336151 - RNA, 12 nt, Human
guucaaagccag

SEQ ID NO: 1336152 - RNA, 13 nt, Human
guucaaagccagc

SEQ ID NO: 1336153 - RNA, 14 nt, Human
guucaaagcugccu

SEQ ID NO: 1336154 - RNA, 13 nt, Human
guucaacaaagaa

SEQ ID NO: 1336155 - RNA, 22 nt, Human
guucaacaaagaaacaaagaug

SEQ ID NO: 1336156 - RNA, 23 nt, Human
guucaacaaagaaacaaagaugu

SEQ ID NO: 1336157 - RNA, 13 nt, Human
aagcuccagguag

SEQ ID NO: 1336158 - RNA, 14 nt, Human
aagcuccagguaga

SEQ ID NO: 1336159 - RNA, 15 nt, Human
aagcucagcugcauu

SEQ ID NO: 1336160 - RNA, 20 nt, Human
aagcucacagaccuuugaac

SEQ ID NO: 1336161 - RNA, 21 nt, Human
aagcucaaagguuuggaagga

SEQ ID NO: 1336162 - RNA, 18 nt, Human
aagcuauuuaaagcaucu

SEQ ID NO: 1336163 - RNA, 13 nt, Human
aagcuauuuaaag

SEQ ID NO: 1336164 - RNA, 14 nt, Human
aagcuauuugaugu

SEQ ID NO: 1336165 - RNA, 16 nt, Human
aagcuauuugauguaa

SEQ ID NO: 1336166 - RNA, 18 nt, Human
aagcuauuugauguaaua

SEQ ID NO: 1336167 - RNA, 23 nt, Human
aagcuauuugauguaauacuucu

SEQ ID NO: 1336168 - RNA, 13 nt, Human
aagcuauuuuucu

SEQ ID NO: 1336169 - RNA, 14 nt, Human
aagcuauuuuucua

SEQ ID NO: 1336170 - RNA, 16 nt, Human
aagcuauuuuucuaac

SEQ ID NO: 1336171 - RNA, 21 nt, Human
aagcuauuuuucuaacuacaa

SEQ ID NO: 1336172 - RNA, 20 nt, Human
aagcucaaagguuuggaagg

SEQ ID NO: 1336173 - RNA, 22 nt, Human
aagcucaaagguuuggaaggag

SEQ ID NO: 1336174 - RNA, 16 nt, Human
aagcuagcaaauagua

SEQ ID NO: 1336175 - RNA, 14 nt, Human
aagcuaggaaugaa

SEQ ID NO: 1336176 - RNA, 16 nt, Human
aagccugagggaaagg

SEQ ID NO: 1336177 - RNA, 21 nt, Human
aagccugagggaaaggccagc

SEQ ID NO: 1336178 - RNA, 22 nt, Human
aagccugagggaaaggccagca

SEQ ID NO: 1336179 - RNA, 24 nt, Human
aagccugagggaaaggccagcacu

SEQ ID NO: 1336180 - RNA, 22 nt, Human
aagccugaguacuccacacugc

SEQ ID NO: 1336181 - RNA, 15 nt, Human
aagccugaugcugac

SEQ ID NO: 1336182 - RNA, 21 nt, Human
aagccugcacaauaaaaaugu

SEQ ID NO: 1336183 - RNA, 22 nt, Human
aagccugcacaauaaaaauguu

SEQ ID NO: 1336184 - RNA, 22 nt, Human
guucagcuaagcuaggaaugaa

SEQ ID NO: 1336185 - RNA, 22 nt, Human
guucagcgcugucaggauugcg

SEQ ID NO: 1336186 - RNA, 19 nt, Human
guucagcuaagcuaggaau

SEQ ID NO: 1336187 - RNA, 17 nt, Human
guucaagcgauucucuu

SEQ ID NO: 1336188 - RNA, 18 nt, Human
guucaagcgauucucuug

SEQ ID NO: 1336189 - RNA, 14 nt, Human
aagccuaagaaucu

SEQ ID NO: 1336190 - RNA, 17 nt, Human
aagccuaagggauccug

SEQ ID NO: 1336191 - RNA, 22 nt, Human
aagccuaagggauccugccugc

SEQ ID NO: 1336192 - RNA, 22 nt, Human
aagccuagugaaggcuucucuc

SEQ ID NO: 1336193 - RNA, 15 nt, Human
aagccucaaaacaaa

SEQ ID NO: 1336194 - RNA, 16 nt, Human
aagccucaaaacaaag

SEQ ID NO: 1336195 - RNA, 18 nt, Human
aagccucaaaacaaaggc

SEQ ID NO: 1336196 - RNA, 21 nt, Human
aagccucaagguuuuagguuc

SEQ ID NO: 1336197 - RNA, 23 nt, Human
aagccucaagguuuuagguucua

SEQ ID NO: 1336198 - RNA, 19 nt, Human
aagccucagauuccuuccc

SEQ ID NO: 1336199 - RNA, 20 nt, Human
aagccucagauuccuuccca

SEQ ID NO: 1336200 - RNA, 19 nt, Human
aagaggaauuacgugcucu

SEQ ID NO: 1336201 - RNA, 14 nt, Human
aagagccacugcca

SEQ ID NO: 1336202 - RNA, 23 nt, Human
aagaggaaugaaguacucauaca

SEQ ID NO: 1336203 - RNA, 23 nt, Human
aagaggagcccccacccuguucc

SEQ ID NO: 1336204 - RNA, 17 nt, Human
aagaggaggggaagagg

SEQ ID NO: 1336205 - RNA, 20 nt, Human
aagaggaggggaagaggccu

SEQ ID NO: 1336206 - RNA, 21 nt, Human
aagaggaggggaagaggccug

SEQ ID NO: 1336207 - RNA, 22 nt, Human
aagaggaggggaagaggccugu

SEQ ID NO: 1336208 - RNA, 21 nt, Human
guggccuaaccugccgagagu

SEQ ID NO: 1336209 - RNA, 18 nt, Human
guggccgaaccagaacca

SEQ ID NO: 1336210 - RNA, 22 nt, Human
guggccuaaccugccgagaguc

SEQ ID NO: 1336211 - RNA, 18 nt, Human
guggcccuuccuggacag

SEQ ID NO: 1336212 - RNA, 23 nt, Human
guggcccuuucggauccagggag

SEQ ID NO: 1336213 - RNA, 15 nt, Human
aagaggcaccaggaa

SEQ ID NO: 1336214 - RNA, 20 nt, Human
guggcccuuaugacugccaa

SEQ ID NO: 1336215 - RNA, 23 nt, Human
guggcccuuaugacugccaagac

SEQ ID NO: 1336216 - RNA, 13 nt, Human
guggcccuuccug

SEQ ID NO: 1336217 - RNA, 14 nt, Human
guggcccuuccugg

SEQ ID NO: 1336218 - RNA, 15 nt, Human
guggcccuuccugga

SEQ ID NO: 1336219 - RNA, 16 nt, Human
guggcccuuccuggac

SEQ ID NO: 1336220 - RNA, 17 nt, Human
guggcccuuccuggaca

SEQ ID NO: 1336221 - RNA, 21 nt, Human
guggcccuuccuggacagcug

SEQ ID NO: 1336222 - RNA, 17 nt, Human
guggccucuugagcagu

SEQ ID NO: 1336223 - RNA, 20 nt, Human
guggccucuugagcaguggc

SEQ ID NO: 1336224 - RNA, 21 nt, Human
guggccucuugagcaguggcu

SEQ ID NO: 1336225 - RNA, 14 nt, Human
guggccuggucccu

SEQ ID NO: 1336226 - RNA, 15 nt, Human
guggccuggucccug

SEQ ID NO: 1336227 - RNA, 17 nt, Human
gugggaagggcuacacc

SEQ ID NO: 1336228 - RNA, 17 nt, Human
guggggccgccgccucu

SEQ ID NO: 1336229 - RNA, 12 nt, Human
guggggcuuggg

SEQ ID NO: 1336230 - RNA, 12 nt, Human
guggggccuggg

SEQ ID NO: 1336231 - RNA, 14 nt, Human
guggggccugggag

SEQ ID NO: 1336232 - RNA, 20 nt, Human
guggccuuguucugucacca

SEQ ID NO: 1336233 - RNA, 17 nt, Human
guggccuuugcgcuccu

SEQ ID NO: 1336234 - RNA, 20 nt, Human
guggccuuugcgcuccuggc

SEQ ID NO: 1336235 - RNA, 19 nt, Human
guggccuuugcgcuccugg

SEQ ID NO: 1336236 - RNA, 20 nt, Human
gugggaagcccauccugacc

SEQ ID NO: 1336237 - RNA, 21 nt, Human
gugggaagcccauccugacca

SEQ ID NO: 1336238 - RNA, 16 nt, Human
aagacugcacaucaaa

SEQ ID NO: 1336239 - RNA, 17 nt, Human
aagacugcauuauauuu

SEQ ID NO: 1336240 - RNA, 21 nt, Human
aagacuagaaaauuagacugu

SEQ ID NO: 1336241 - RNA, 22 nt, Human
aagacgcacuuuggcuuauaau

SEQ ID NO: 1336242 - RNA, 17 nt, Human
aagacgccuuucuccuc

SEQ ID NO: 1336243 - RNA, 20 nt, Human
aagacgugaugccaggacca

SEQ ID NO: 1336244 - RNA, 15 nt, Human
aagacguuuuauaag

SEQ ID NO: 1336245 - RNA, 17 nt, Human
aagacguuuuauaagca

SEQ ID NO: 1336246 - RNA, 18 nt, Human
aagacguuuuauaagcau

SEQ ID NO: 1336247 - RNA, 19 nt, Human
aagacuucucuuugccuca

SEQ ID NO: 1336248 - RNA, 20 nt, Human
aagacuucucuuugccucaa

SEQ ID NO: 1336249 - RNA, 13 nt, Human
aagacuugacagu

SEQ ID NO: 1336250 - RNA, 23 nt, Human
aagacuugguugguaggguggga

SEQ ID NO: 1336251 - RNA, 14 nt, Human
aagacuugacagug

SEQ ID NO: 1336252 - RNA, 16 nt, Human
aagacuuguuucugau

SEQ ID NO: 1336253 - RNA, 22 nt, Human
aagagcagcaccuccucagccu

SEQ ID NO: 1336254 - RNA, 22 nt, Human
aagagcaggacuccaggcccaa

SEQ ID NO: 1336255 - RNA, 17 nt, Human
aagagcaggacuccagg

SEQ ID NO: 1336256 - RNA, 15 nt, Human
aagagcaucaugccu

SEQ ID NO: 1336257 - RNA, 17 nt, Human
aagagcaucaugccucu

SEQ ID NO: 1336258 - RNA, 18 nt, Human
aagagcaucaugccucug

SEQ ID NO: 1336259 - RNA, 19 nt, Human
aagagcaucaugccucuga

SEQ ID NO: 1336260 - RNA, 20 nt, Human
aagagcaucaugccucugag

SEQ ID NO: 1336261 - RNA, 21 nt, Human
aagagcaucaugccucugagg

SEQ ID NO: 1336262 - RNA, 22 nt, Human
aagagcaucaugccucugaggc

SEQ ID NO: 1336263 - RNA, 24 nt, Human
aagagcaucaugccucugaggcca

SEQ ID NO: 1336264 - RNA, 23 nt, Human
aagagcaucaugccucugaggcc

SEQ ID NO: 1336265 - RNA, 18 nt, Human
aagaccuuuuucugcacu

SEQ ID NO: 1336266 - RNA, 20 nt, Human
aagaccuuuuucugcacuau

SEQ ID NO: 1336267 - RNA, 16 nt, Human
aagaccuuuuucugca

SEQ ID NO: 1336268 - RNA, 15 nt, Human
aagaccuuuuucugc

SEQ ID NO: 1336269 - RNA, 19 nt, Human
aacuugcaaaaucaguuuu

SEQ ID NO: 1336270 - RNA, 18 nt, Human
aacuugcaaaaucaguuu

SEQ ID NO: 1336271 - RNA, 17 nt, Human
aacuugcaaaaucaguu

SEQ ID NO: 1336272 - RNA, 14 nt, Human
aacuugcaaaauca

SEQ ID NO: 1336273 - RNA, 17 nt, Human
aacuugauccauuucua

SEQ ID NO: 1336274 - RNA, 19 nt, Human
aacuugauccauuucuaau

SEQ ID NO: 1336275 - RNA, 14 nt, Human
aacuugcaucacuu

SEQ ID NO: 1336276 - RNA, 13 nt, Human
aacuugccugccu

SEQ ID NO: 1336277 - RNA, 16 nt, Human
aacuugccugccuuuc

SEQ ID NO: 1336278 - RNA, 20 nt, Human
aacuugcugcaguaugaaaa

SEQ ID NO: 1336279 - RNA, 22 nt, Human
aacuugcugcaguaugaaaaua

SEQ ID NO: 1336280 - RNA, 21 nt, Human
guguauuuggaaauaaaguca

SEQ ID NO: 1336281 - RNA, 20 nt, Human
gugucagacccuggaggccc

SEQ ID NO: 1336282 - RNA, 19 nt, Human
gugucaacucuuuguuauu

SEQ ID NO: 1336283 - RNA, 22 nt, Human
gugucacucaaggcggugcuug

SEQ ID NO: 1336284 - RNA, 19 nt, Human
aagauguagaggagaaacu

SEQ ID NO: 1336285 - RNA, 17 nt, Human
guguauuuacgcuuuga

SEQ ID NO: 1336286 - RNA, 21 nt, Human
guguauuuacgcuuugauuca

SEQ ID NO: 1336287 - RNA, 10 nt, Human
guguauuugc

SEQ ID NO: 1336288 - RNA, 19 nt, Human
guguauuugcuaauuuuua

SEQ ID NO: 1336289 - RNA, 14 nt, Human
guguauuugcuuuu

SEQ ID NO: 1336290 - RNA, 19 nt, Human
guguauuuggaaauaaagu

SEQ ID NO: 1336291 - RNA, 13 nt, Human
aagauguagagga

SEQ ID NO: 1336292 - RNA, 19 nt, Human
aagaugggcaucuuuugua

SEQ ID NO: 1336293 - RNA, 20 nt, Human
aagaugggcaucuuuuguau

SEQ ID NO: 1336294 - RNA, 22 nt, Human
aagaugggcaucuuuuguauua

SEQ ID NO: 1336295 - RNA, 18 nt, Human
aagauggggaccagcagc

SEQ ID NO: 1336296 - RNA, 20 nt, Human
aagauggggaccagcagccc

SEQ ID NO: 1336297 - RNA, 11 nt, Human
guguccacccc

SEQ ID NO: 1336298 - RNA, 12 nt, Human
guguccaccccc

SEQ ID NO: 1336299 - RNA, 14 nt, Human
gugugaaugaacac

SEQ ID NO: 1336300 - RNA, 21 nt, Human
gugugaccacugcagaagaca

SEQ ID NO: 1336301 - RNA, 15 nt, Human
gugugaaugaacacu

SEQ ID NO: 1336302 - RNA, 22 nt, Human
gugucaggcacugggcaugagg

SEQ ID NO: 1336303 - RNA, 19 nt, Human
gugucaggcacugggcaug

SEQ ID NO: 1336304 - RNA, 20 nt, Human
gugucauccucacagugaac

SEQ ID NO: 1336305 - RNA, 16 nt, Human
gugucauuucucaucc

SEQ ID NO: 1336306 - RNA, 17 nt, Human
guguccaaaaccgccag

SEQ ID NO: 1336307 - RNA, 18 nt, Human
guguccaaaaccgccagc

SEQ ID NO: 1336308 - RNA, 20 nt, Human
guguccaaaaccgccagcuc

SEQ ID NO: 1336309 - RNA, 22 nt, Human
guguccaaaaccgccagcucug

SEQ ID NO: 1336310 - RNA, 23 nt, Human
guguccaaaaccgccagcucugu

SEQ ID NO: 1336311 - RNA, 24 nt, Human
guguccaaaaccgccagcucuguu

SEQ ID NO: 1336312 - RNA, 14 nt, Human
gugugguacagaga

SEQ ID NO: 1336313 - RNA, 15 nt, Human
gugugguacagagaa

SEQ ID NO: 1336314 - RNA, 16 nt, Human
gugugguacagagaag

SEQ ID NO: 1336315 - RNA, 17 nt, Human
gugugguacagagaagc

SEQ ID NO: 1336316 - RNA, 18 nt, Human
gugugguacagagaagcc

SEQ ID NO: 1336317 - RNA, 19 nt, Human
gugugguacagagaagcca

SEQ ID NO: 1336318 - RNA, 20 nt, Human
gugugguacagagaagccag

SEQ ID NO: 1336319 - RNA, 18 nt, Human
guguguccaaaacugccu

SEQ ID NO: 1336320 - RNA, 20 nt, Human
gugugugaaaaugugugugu

SEQ ID NO: 1336321 - RNA, 15 nt, Human
guguguauuugcuaa

SEQ ID NO: 1336322 - RNA, 19 nt, Human
guguguccaaaacugccuc

SEQ ID NO: 1336323 - RNA, 22 nt, Human
aagaugcuuuuaacagagucug

SEQ ID NO: 1336324 - RNA, 12 nt, Human
aagaugcuuuua

SEQ ID NO: 1336325 - RNA, 20 nt, Human
aagauggaauuuaucaaacc

SEQ ID NO: 1336326 - RNA, 15 nt, Human
aagauggaguuucua

SEQ ID NO: 1336327 - RNA, 20 nt, Human
aagauggcugugccucugcc

SEQ ID NO: 1336328 - RNA, 21 nt, Human
aagauggcugugccucugccu

SEQ ID NO: 1336329 - RNA, 23 nt, Human
aagauggcugugccucugccugu

SEQ ID NO: 1336330 - RNA, 14 nt, Human
aagauggaguuucu

SEQ ID NO: 1336331 - RNA, 16 nt, Human
aagaugaaagagcagu

SEQ ID NO: 1336332 - RNA, 23 nt, Human
aagaugaaggagaggcaacaucc

SEQ ID NO: 1336333 - RNA, 22 nt, Human
aagaugaacccgaggcugagaa

SEQ ID NO: 1336334 - RNA, 23 nt, Human
aagaugaacccgaggcugagaau

SEQ ID NO: 1336335 - RNA, 11 nt, Human
aagaugaauga

SEQ ID NO: 1336336 - RNA, 23 nt, Human
aagaucugcagggggugugucug

SEQ ID NO: 1336337 - RNA, 17 nt, Human
aagaucuguccucagcc

SEQ ID NO: 1336338 - RNA, 18 nt, Human
aagaucuguccucagccu

SEQ ID NO: 1336339 - RNA, 15 nt, Human
aagaguagaauugca

SEQ ID NO: 1336340 - RNA, 22 nt, Human
aagaggcugccccucucaccaa

SEQ ID NO: 1336341 - RNA, 23 nt, Human
aagaggcugccccucucaccaaa

SEQ ID NO: 1336342 - RNA, 16 nt, Human
aagaggcugcccuccu

SEQ ID NO: 1336343 - RNA, 17 nt, Human
aagaggcugccccucuc

SEQ ID NO: 1336344 - RNA, 21 nt, Human
aagaggcugccccucucacca

SEQ ID NO: 1336345 - RNA, 18 nt, Human
aagaggcugaggccugga

SEQ ID NO: 1336346 - RNA, 20 nt, Human
aagaggcugaggccuggacu

SEQ ID NO: 1336347 - RNA, 22 nt, Human
aagaggcugaggcuggcacagg

SEQ ID NO: 1336348 - RNA, 15 nt, Human
aagaggcugaggccu

SEQ ID NO: 1336349 - RNA, 16 nt, Human
aaauucugugccuugu

SEQ ID NO: 1336350 - RNA, 22 nt, Human
aaauucugugccuuguuuuuug

SEQ ID NO: 1336351 - RNA, 20 nt, Human
aaauuguaagcaugcacaaa

SEQ ID NO: 1336352 - RNA, 18 nt, Human
aaauucugucucuggauu

SEQ ID NO: 1336353 - RNA, 19 nt, Human
aaauuguaagcaugcacaa

SEQ ID NO: 1336354 - RNA, 16 nt, Human
aaauucugucucugga

SEQ ID NO: 1336355 - RNA, 15 nt, Human
aaauucugcucagau

SEQ ID NO: 1336356 - RNA, 13 nt, Human
aaauuauuugcau

SEQ ID NO: 1336357 - RNA, 14 nt, Human
aaauuguacagccg

SEQ ID NO: 1336358 - RNA, 15 nt, Human
aaauuguacagccgg

SEQ ID NO: 1336359 - RNA, 23 nt, Human
aaauugugcaguacuuugugcau

SEQ ID NO: 1336360 - RNA, 22 nt, Human
aaauuuauuucaauauuagcaa

SEQ ID NO: 1336361 - RNA, 17 nt, Human
guauuuuucuuuaacca

SEQ ID NO: 1336362 - RNA, 13 nt, Human
guauuuuucuuga

SEQ ID NO: 1336363 - RNA, 14 nt, Human
gucaaaacacuugu

SEQ ID NO: 1336364 - RNA, 13 nt, Human
gucaaaacagauu

SEQ ID NO: 1336365 - RNA, 15 nt, Human
gucaaaacagauugu

SEQ ID NO: 1336366 - RNA, 20 nt, Human
gucaaaacagauuguuugca

SEQ ID NO: 1336367 - RNA, 18 nt, Human
gucaaaauagugccacua

SEQ ID NO: 1336368 - RNA, 17 nt, Human
gucaacacuaacaugau

SEQ ID NO: 1336369 - RNA, 21 nt, Human
gucaacaaguaugaauaaaga

SEQ ID NO: 1336370 - RNA, 17 nt, Human
gucaaacuuggauacuu

SEQ ID NO: 1336371 - RNA, 14 nt, Human
gucaaacgugaaaa

SEQ ID NO: 1336372 - RNA, 12 nt, Human
gucaaacaaaua

SEQ ID NO: 1336373 - RNA, 15 nt, Human
gucaaacgugaaaau

SEQ ID NO: 1336374 - RNA, 17 nt, Human
gucaaacgugaaaaugc

SEQ ID NO: 1336375 - RNA, 13 nt, Human
gucaaacuuggau

SEQ ID NO: 1336376 - RNA, 21 nt, Human
gucaaacuuggauacuuggau

SEQ ID NO: 1336377 - RNA, 18 nt, Human
guauguacuucaugcugu

SEQ ID NO: 1336378 - RNA, 13 nt, Human
guauguauuauuu

SEQ ID NO: 1336379 - RNA, 15 nt, Human
guaugguugacacua

SEQ ID NO: 1336380 - RNA, 16 nt, Human
guaugguuuuguggau

SEQ ID NO: 1336381 - RNA, 15 nt, Human
aaauguauuacagug

SEQ ID NO: 1336382 - RNA, 13 nt, Human
guaugucuccagu

SEQ ID NO: 1336383 - RNA, 13 nt, Human
aaauguaugcaug

SEQ ID NO: 1336384 - RNA, 14 nt, Human
aaauguaugcaugu

SEQ ID NO: 1336385 - RNA, 15 nt, Human
aaauguaugcauguu

SEQ ID NO: 1336386 - RNA, 16 nt, Human
aaauguaugcauguug

SEQ ID NO: 1336387 - RNA, 19 nt, Human
aaauguaugcauguugucu

SEQ ID NO: 1336388 - RNA, 20 nt, Human
aaauguaugcauguugucua

SEQ ID NO: 1336389 - RNA, 15 nt, Human
aaauguauuuuaugu

SEQ ID NO: 1336390 - RNA, 16 nt, Human
aaauguauuuuauguu

SEQ ID NO: 1336391 - RNA, 18 nt, Human
aaauguauuuuauguuau

SEQ ID NO: 1336392 - RNA, 21 nt, Human
aaauguauuuuauguuauaua

SEQ ID NO: 1336393 - RNA, 19 nt, Human
aaauguauuuuauguuaua

SEQ ID NO: 1336394 - RNA, 16 nt, Human
aaaugucaugcugccu

SEQ ID NO: 1336395 - RNA, 22 nt, Human
aaauguccuugugaugugcacg

SEQ ID NO: 1336396 - RNA, 15 nt, Human
aaauguccuugugau

SEQ ID NO: 1336397 - RNA, 13 nt, Human
aaaugucacuuuu

SEQ ID NO: 1336398 - RNA, 14 nt, Human
aaaugucacuuuuu

SEQ ID NO: 1336399 - RNA, 15 nt, Human
aaaugucacuuuuug

SEQ ID NO: 1336400 - RNA, 16 nt, Human
aaaugucacuuuuuga

SEQ ID NO: 1336401 - RNA, 22 nt, Human
aaaugucacuuuuugaggcaaa

SEQ ID NO: 1336402 - RNA, 20 nt, Human
aaaugucacuuuuugaggca

SEQ ID NO: 1336403 - RNA, 15 nt, Human
aaaugucaugcugcc

SEQ ID NO: 1336404 - RNA, 18 nt, Human
aaaugucaugcugccuua

SEQ ID NO: 1336405 - RNA, 14 nt, Human
aaaugucuuuaaug

SEQ ID NO: 1336406 - RNA, 18 nt, Human
aaaugucuuuaaugcaau

SEQ ID NO: 1336407 - RNA, 19 nt, Human
aaaugucuuuaaugcaaua

SEQ ID NO: 1336408 - RNA, 16 nt, Human
aaaugugaguguuuuu

SEQ ID NO: 1336409 - RNA, 13 nt, Human
aaaugugaugaau

SEQ ID NO: 1336410 - RNA, 12 nt, Human
aaaugugugugu

SEQ ID NO: 1336411 - RNA, 12 nt, Human
aaauguguuguu

SEQ ID NO: 1336412 - RNA, 15 nt, Human
aaauguguauuuuaa

SEQ ID NO: 1336413 - RNA, 21 nt, Human
aaaugugaugaauacuguauu

SEQ ID NO: 1336414 - RNA, 15 nt, Human
aaaugugauguucua

SEQ ID NO: 1336415 - RNA, 18 nt, Human
aaaugugauguucuaagg

SEQ ID NO: 1336416 - RNA, 19 nt, Human
aaaugugauguucuaaggc

SEQ ID NO: 1336417 - RNA, 20 nt, Human
aaaugugauguucuaaggcu

SEQ ID NO: 1336418 - RNA, 22 nt, Human
aaaugugauguucuaaggcucu

SEQ ID NO: 1336419 - RNA, 22 nt, Human
aaaugugggauuaugggucaca

SEQ ID NO: 1336420 - RNA, 20 nt, Human
aaaugugggauuauggguca

SEQ ID NO: 1336421 - RNA, 13 nt, Human
aaauguuaaaaug

SEQ ID NO: 1336422 - RNA, 14 nt, Human
aaauguuaaaaugu

SEQ ID NO: 1336423 - RNA, 14 nt, Human
aaauuaagaaagga

SEQ ID NO: 1336424 - RNA, 14 nt, Human
aaauuaagaaggca

SEQ ID NO: 1336425 - RNA, 15 nt, Human
aaauuaagaaggcaa

SEQ ID NO: 1336426 - RNA, 13 nt, Human
aaauuaagacuuu

SEQ ID NO: 1336427 - RNA, 21 nt, Human
aaauuaguuagccaauauuuu

SEQ ID NO: 1336428 - RNA, 13 nt, Human
aaauuaguuauau

SEQ ID NO: 1336429 - RNA, 13 nt, Human
aaauuauagaagu

SEQ ID NO: 1336430 - RNA, 14 nt, Human
aaauuauuaaugaa

SEQ ID NO: 1336431 - RNA, 18 nt, Human
aaauuauuaauuuaugca

SEQ ID NO: 1336432 - RNA, 12 nt, Human
aaauuauuguuu

SEQ ID NO: 1336433 - RNA, 20 nt, Human
aaauuauuguuuuucuuuuu

SEQ ID NO: 1336434 - RNA, 12 nt, Human
aaauuauuuaaa

SEQ ID NO: 1336435 - RNA, 13 nt, Human
aaauuauuuaaac

SEQ ID NO: 1336436 - RNA, 13 nt, Human
guauauuguguuu

SEQ ID NO: 1336437 - RNA, 19 nt, Human
guauauuguguuuguguau

SEQ ID NO: 1336438 - RNA, 20 nt, Human
guauauuguguuuguguauu

SEQ ID NO: 1336439 - RNA, 15 nt, Human
guauaaaauaauuuu

SEQ ID NO: 1336440 - RNA, 21 nt, Human
guauaaaauaauuuuuauauu

SEQ ID NO: 1336441 - RNA, 15 nt, Human
guauaaguggugugu

SEQ ID NO: 1336442 - RNA, 21 nt, Human
guauaaaacuuuccucgccug

SEQ ID NO: 1336443 - RNA, 23 nt, Human
guauaaaaauaaaaaagauccca

SEQ ID NO: 1336444 - RNA, 22 nt, Human
guaucaaaaugcucuuauuuca

SEQ ID NO: 1336445 - RNA, 13 nt, Human
guaucaaauacau

SEQ ID NO: 1336446 - RNA, 14 nt, Human
guaucaaauacauu

SEQ ID NO: 1336447 - RNA, 14 nt, Human
guaucaaaaugcuc

SEQ ID NO: 1336448 - RNA, 13 nt, Human
guaucaaaaugcu

SEQ ID NO: 1336449 - RNA, 14 nt, Human
guauauuuuccuau

SEQ ID NO: 1336450 - RNA, 15 nt, Human
guauauuuuccuaua

SEQ ID NO: 1336451 - RNA, 16 nt, Human
guauauuuuauaucaa

SEQ ID NO: 1336452 - RNA, 19 nt, Human
guaucaaauacauuuaaaa

SEQ ID NO: 1336453 - RNA, 12 nt, Human
guaucauagaaa

SEQ ID NO: 1336454 - RNA, 15 nt, Human
guaucauagaaaugu

SEQ ID NO: 1336455 - RNA, 13 nt, Human
guaucaucagugu

SEQ ID NO: 1336456 - RNA, 17 nt, Human
guaucaugcccugugca

SEQ ID NO: 1336457 - RNA, 18 nt, Human
guaucaugcccugugcaa

SEQ ID NO: 1336458 - RNA, 14 nt, Human
guauccacuuugca

SEQ ID NO: 1336459 - RNA, 19 nt, Human
guauccacuuugcacagcu

SEQ ID NO: 1336460 - RNA, 20 nt, Human
guauccagguucccucccag

SEQ ID NO: 1336461 - RNA, 12 nt, Human
guaugcauguug

SEQ ID NO: 1336462 - RNA, 15 nt, Human
guaugcgugugugug

SEQ ID NO: 1336463 - RNA, 16 nt, Human
guaugcauguugucua

SEQ ID NO: 1336464 - RNA, 19 nt, Human
guauaaaagggacugagaa

SEQ ID NO: 1336465 - RNA, 15 nt, Human
guauaaaacuuuccu

SEQ ID NO: 1336466 - RNA, 16 nt, Human
guauaaaacuuuccuc

SEQ ID NO: 1336467 - RNA, 18 nt, Human
guauaaaacuuuccucgc

SEQ ID NO: 1336468 - RNA, 19 nt, Human
guauaaaacuuuccucgcc

SEQ ID NO: 1336469 - RNA, 12 nt, Human
guaguugucuuu

SEQ ID NO: 1336470 - RNA, 16 nt, Human
guaguugucuuuccug

SEQ ID NO: 1336471 - RNA, 20 nt, Human
guaguuuuuauauguuguaa

SEQ ID NO: 1336472 - RNA, 13 nt, Human
guaguuuuuucau

SEQ ID NO: 1336473 - RNA, 14 nt, Human
guaguuuuuucauc

SEQ ID NO: 1336474 - RNA, 15 nt, Human
guaguuuuuucaucu

SEQ ID NO: 1336475 - RNA, 17 nt, Human
guaguuuuuucaucuuc

SEQ ID NO: 1336476 - RNA, 16 nt, Human
guauaaaaauaaaaaa

SEQ ID NO: 1336477 - RNA, 19 nt, Human
guauaaaaauaaaaaagau

SEQ ID NO: 1336478 - RNA, 17 nt, Human
guaguugccuuaaaaua

SEQ ID NO: 1336479 - RNA, 18 nt, Human
aaauguaaggcuguguaa

SEQ ID NO: 1336480 - RNA, 14 nt, Human
guaguugaauauug

SEQ ID NO: 1336481 - RNA, 20 nt, Human
guaguguuggagaagaacug

SEQ ID NO: 1336482 - RNA, 15 nt, Human
aaaugguucagaauu

SEQ ID NO: 1336483 - RNA, 19 nt, Human
aaauguaaacuguuucuuu

SEQ ID NO: 1336484 - RNA, 20 nt, Human
aaauguaaacuguuucuuua

SEQ ID NO: 1336485 - RNA, 22 nt, Human
aaauguaaagauauuuuuaucu

SEQ ID NO: 1336486 - RNA, 13 nt, Human
aaauguaaagcca

SEQ ID NO: 1336487 - RNA, 17 nt, Human
aaauguaacuuuuguaa

SEQ ID NO: 1336488 - RNA, 18 nt, Human
aaauguaacuuuuguaag

SEQ ID NO: 1336489 - RNA, 20 nt, Human
aaauguaagauuauagauuc

SEQ ID NO: 1336490 - RNA, 21 nt, Human
aaauguaagauuauagauucu

SEQ ID NO: 1336491 - RNA, 22 nt, Human
aaauguaagauuauagauucua

SEQ ID NO: 1336492 - RNA, 13 nt, Human
aaauguaaggcug

SEQ ID NO: 1336493 - RNA, 17 nt, Human
aaauguaaggcugugua

SEQ ID NO: 1336494 - RNA, 20 nt, Human
aaauguaaggcuguguaaga

SEQ ID NO: 1336495 - RNA, 20 nt, Human
aaauggucucuaacauuucc

SEQ ID NO: 1336496 - RNA, 22 nt, Human
aaaugguccaauuaguuuccuu

SEQ ID NO: 1336497 - RNA, 14 nt, Human
aaaugguucagaau

SEQ ID NO: 1336498 - RNA, 23 nt, Human
aaaugguucagaauuaaacuuuu

SEQ ID NO: 1336499 - RNA, 18 nt, Human
aaaugguacuguacagcu

SEQ ID NO: 1336500 - RNA, 19 nt, Human
aaaugguaggcauuuccua

SEQ ID NO: 1336501 - RNA, 16 nt, Human
aaaugguaucuuuugg

SEQ ID NO: 1336502 - RNA, 21 nt, Human
aaaugguccaauuaguuuccu

SEQ ID NO: 1336503 - RNA, 14 nt, Human
aaaugguccaggag

SEQ ID NO: 1336504 - RNA, 22 nt, Human
guaaauuggcauggaaauuuaa

SEQ ID NO: 1336505 - RNA, 14 nt, Human
guaacaauacaaau

SEQ ID NO: 1336506 - RNA, 17 nt, Human
guaacaauacaaaugga

SEQ ID NO: 1336507 - RNA, 21 nt, Human
guaacaauuguguagccuuuu

SEQ ID NO: 1336508 - RNA, 18 nt, Human
guaacaauacaaauggau

SEQ ID NO: 1336509 - RNA, 15 nt, Human
guaacacuaauauau

SEQ ID NO: 1336510 - RNA, 16 nt, Human
guaacacuaauauauu

SEQ ID NO: 1336511 - RNA, 17 nt, Human
guaacacuaauauauuu

SEQ ID NO: 1336512 - RNA, 19 nt, Human
guaacacuaauauauuuaa

SEQ ID NO: 1336513 - RNA, 22 nt, Human
guaacacuaauauauuuaaaaa

SEQ ID NO: 1336514 - RNA, 20 nt, Human
guaacacuaauauauuuaaa

SEQ ID NO: 1336515 - RNA, 12 nt, Human
aaauuugccaag

SEQ ID NO: 1336516 - RNA, 15 nt, Human
aaauuugauugauuu

SEQ ID NO: 1336517 - RNA, 17 nt, Human
aaauuugauugauuuga

SEQ ID NO: 1336518 - RNA, 17 nt, Human
aaauuugcauuaaauua

SEQ ID NO: 1336519 - RNA, 11 nt, Human
aaauuuguacu

SEQ ID NO: 1336520 - RNA, 12 nt, Human
aaauuuguacua

SEQ ID NO: 1336521 - RNA, 13 nt, Human
aaauuuguacuau

SEQ ID NO: 1336522 - RNA, 17 nt, Human
aaauuuguacuauuuaa

SEQ ID NO: 1336523 - RNA, 19 nt, Human
aaauuuguacuauuuaacu

SEQ ID NO: 1336524 - RNA, 20 nt, Human
aaauuuguacuauuuaacug

SEQ ID NO: 1336525 - RNA, 19 nt, Human
aaauuuguuauuuugcaac

SEQ ID NO: 1336526 - RNA, 18 nt, Human
aaauuuguucuuguauuu

SEQ ID NO: 1336527 - RNA, 13 nt, Human
aaauuuguugcau

SEQ ID NO: 1336528 - RNA, 14 nt, Human
aaauuuguugcaua

SEQ ID NO: 1336529 - RNA, 15 nt, Human
aaauuuguucuugua

SEQ ID NO: 1336530 - RNA, 14 nt, Human
gucagucacagcca

SEQ ID NO: 1336531 - RNA, 16 nt, Human
gucagucacagccacc

SEQ ID NO: 1336532 - RNA, 18 nt, Human
gucauaacuaaauaaagc

SEQ ID NO: 1336533 - RNA, 14 nt, Human
aaauuugauugauu

SEQ ID NO: 1336534 - RNA, 13 nt, Human
gucagucacagcc

SEQ ID NO: 1336535 - RNA, 22 nt, Human
gucaguaccuucaaacuagggc

SEQ ID NO: 1336536 - RNA, 17 nt, Human
gucagaauagaaauuag

SEQ ID NO: 1336537 - RNA, 13 nt, Human
gucagaauagaaa

SEQ ID NO: 1336538 - RNA, 19 nt, Human
gucacacaguguuggaggu

SEQ ID NO: 1336539 - RNA, 20 nt, Human
gucacacaguguuggagguu

SEQ ID NO: 1336540 - RNA, 12 nt, Human
gucacagccacc

SEQ ID NO: 1336541 - RNA, 13 nt, Human
gucaacaguaaac

SEQ ID NO: 1336542 - RNA, 14 nt, Human
gucaacaguaaacc

SEQ ID NO: 1336543 - RNA, 15 nt, Human
gucagacccuggagg

SEQ ID NO: 1336544 - RNA, 14 nt, Human
gucagacccuggag

SEQ ID NO: 1336545 - RNA, 18 nt, Human
gucaggauugcgagagau

SEQ ID NO: 1336546 - RNA, 19 nt, Human
gucaggauugcgagagaug

SEQ ID NO: 1336547 - RNA, 21 nt, Human
gucaggauugcgagagaugug

SEQ ID NO: 1336548 - RNA, 22 nt, Human
gucaggauugcgagagaugugu

SEQ ID NO: 1336549 - RNA, 23 nt, Human
gucaggauugcgagagaugugug

SEQ ID NO: 1336550 - RNA, 16 nt, Human
gucaggcacugggcau

SEQ ID NO: 1336551 - RNA, 18 nt, Human
gucaggcacugggcauga

SEQ ID NO: 1336552 - RNA, 13 nt, Human
gucaggcagggug

SEQ ID NO: 1336553 - RNA, 21 nt, Human
gucaggcccuuauuuucaaga

SEQ ID NO: 1336554 - RNA, 22 nt, Human
gucaggcccuuauuuucaagaa

SEQ ID NO: 1336555 - RNA, 20 nt, Human
aaauuuuuucucuaggaaau

SEQ ID NO: 1336556 - RNA, 23 nt, Human
aaauuuuaucugccucucuugua

SEQ ID NO: 1336557 - RNA, 12 nt, Human
aaauuuuauaug

SEQ ID NO: 1336558 - RNA, 23 nt, Human
aaauuuuagcgugcucacugacc

SEQ ID NO: 1336559 - RNA, 22 nt, Human
aaauuuuccuguccucuuucag

SEQ ID NO: 1336560 - RNA, 23 nt, Human
aaauuuuccuguccucuuucagc

SEQ ID NO: 1336561 - RNA, 20 nt, Human
aaauuuuuguaguagcguuu

SEQ ID NO: 1336562 - RNA, 11 nt, Human
aaauuuuuugu

SEQ ID NO: 1336563 - RNA, 14 nt, Human
aaauuuuuuguuga

SEQ ID NO: 1336564 - RNA, 18 nt, Human
aaauuuuuuguugacauu

SEQ ID NO: 1336565 - RNA, 15 nt, Human
aaauuuuuuguugac

SEQ ID NO: 1336566 - RNA, 22 nt, Human
aacaagaccucagugccuuccu

SEQ ID NO: 1336567 - RNA, 23 nt, Human
aacaagaccucagugccuuccug

SEQ ID NO: 1336568 - RNA, 15 nt, Human
aacaagagaagcauu

SEQ ID NO: 1336569 - RNA, 16 nt, Human
aacaagagaagcauuc

SEQ ID NO: 1336570 - RNA, 17 nt, Human
aacaagaugaaauucca

SEQ ID NO: 1336571 - RNA, 17 nt, Human
aacaagagaagcauucu

SEQ ID NO: 1336572 - RNA, 21 nt, Human
aacaagagaagcauucucauu

SEQ ID NO: 1336573 - RNA, 19 nt, Human
aacaagagcacuacauuca

SEQ ID NO: 1336574 - RNA, 17 nt, Human
aacaaugcuguauuuua

SEQ ID NO: 1336575 - RNA, 22 nt, Human
aacaaugcuguauuuuaaaaga

SEQ ID NO: 1336576 - RNA, 19 nt, Human
aacaauaaaaguguccauu

SEQ ID NO: 1336577 - RNA, 15 nt, Human
aacacaacuauauug

SEQ ID NO: 1336578 - RNA, 16 nt, Human
aacacaacuauauugu

SEQ ID NO: 1336579 - RNA, 12 nt, Human
aacaauucuaaa

SEQ ID NO: 1336580 - RNA, 14 nt, Human
aacaauucuaaaau

SEQ ID NO: 1336581 - RNA, 22 nt, Human
aacaauucuaaaaugauuguag

SEQ ID NO: 1336582 - RNA, 19 nt, Human
aacaauucuaaaaugauug

SEQ ID NO: 1336583 - RNA, 16 nt, Human
aacaauugaaguaaac

SEQ ID NO: 1336584 - RNA, 17 nt, Human
aacaauugaaguaaacu

SEQ ID NO: 1336585 - RNA, 23 nt, Human
aacaauugaaguaaacuuuuugu

SEQ ID NO: 1336586 - RNA, 12 nt, Human
aacaauaaaaga

SEQ ID NO: 1336587 - RNA, 15 nt, Human
aacaaugcuguauuu

SEQ ID NO: 1336588 - RNA, 15 nt, Human
guccaguguuucuuu

SEQ ID NO: 1336589 - RNA, 24 nt, Human
guccagugggaggugagaccaccu

SEQ ID NO: 1336590 - RNA, 23 nt, Human
guccaagaauccacauuucuaaa

SEQ ID NO: 1336591 - RNA, 16 nt, Human
guccaagauuccggau

SEQ ID NO: 1336592 - RNA, 20 nt, Human
guccaagauuccggauccua

SEQ ID NO: 1336593 - RNA, 22 nt, Human
guccaagauuccggauccuaag

SEQ ID NO: 1336594 - RNA, 14 nt, Human
guccauaucacaca

SEQ ID NO: 1336595 - RNA, 17 nt, Human
guccauaucacacacau

SEQ ID NO: 1336596 - RNA, 15 nt, Human
guccauaucacacac

SEQ ID NO: 1336597 - RNA, 16 nt, Human
guccauaucacacaca

SEQ ID NO: 1336598 - RNA, 14 nt, Human
gucccacccccacc

SEQ ID NO: 1336599 - RNA, 15 nt, Human
gucccacccccaccc

SEQ ID NO: 1336600 - RNA, 19 nt, Human
gucccacccccacccccag

SEQ ID NO: 1336601 - RNA, 21 nt, Human
gucccacccccacccccagcu

SEQ ID NO: 1336602 - RNA, 22 nt, Human
gucccacccccacccccagcuc

SEQ ID NO: 1336603 - RNA, 23 nt, Human
gucccacccccacccccagcuca

SEQ ID NO: 1336604 - RNA, 16 nt, Human
guccccauacuccuau

SEQ ID NO: 1336605 - RNA, 17 nt, Human
guccccauacuccuaug

SEQ ID NO: 1336606 - RNA, 20 nt, Human
gucccccacucuaaagcaaa

SEQ ID NO: 1336607 - RNA, 11 nt, Human
guccccccacc

SEQ ID NO: 1336608 - RNA, 12 nt, Human
guccccccaccc

SEQ ID NO: 1336609 - RNA, 17 nt, Human
aacacaacuauauuguu

SEQ ID NO: 1336610 - RNA, 17 nt, Human
aacacacuaccgaaugu

SEQ ID NO: 1336611 - RNA, 19 nt, Human
aacacacuaccgaaugugu

SEQ ID NO: 1336612 - RNA, 23 nt, Human
aacacacuaccgaaugugucuuu

SEQ ID NO: 1336613 - RNA, 19 nt, Human
aacacagaaaccuuuuuaa

SEQ ID NO: 1336614 - RNA, 20 nt, Human
gucauuuugguacuuuggug

SEQ ID NO: 1336615 - RNA, 18 nt, Human
gucauuuugguacuuugg

SEQ ID NO: 1336616 - RNA, 17 nt, Human
gucauuuuuacaaugua

SEQ ID NO: 1336617 - RNA, 22 nt, Human
gucauuuuuacaauguaauuau

SEQ ID NO: 1336618 - RNA, 23 nt, Human
gucauuuuuuuucuuugaauaaa

SEQ ID NO: 1336619 - RNA, 20 nt, Human
gucauuuuuacaauguaauu

SEQ ID NO: 1336620 - RNA, 15 nt, Human
guccaaaaccgccag

SEQ ID NO: 1336621 - RNA, 17 nt, Human
guccaaaaccgccagcu

SEQ ID NO: 1336622 - RNA, 18 nt, Human
guccaaaaccgccagcuc

SEQ ID NO: 1336623 - RNA, 20 nt, Human
guccaaaaccgccagcucug

SEQ ID NO: 1336624 - RNA, 22 nt, Human
guccaagaauccacauuucuaa

SEQ ID NO: 1336625 - RNA, 22 nt, Human
guccccccacccucauucuacu

SEQ ID NO: 1336626 - RNA, 13 nt, Human
guccccccacccu

SEQ ID NO: 1336627 - RNA, 13 nt, Human
gucccuugccccc

SEQ ID NO: 1336628 - RNA, 15 nt, Human
gucccuugccccccu

SEQ ID NO: 1336629 - RNA, 18 nt, Human
gucccuugccccccuggc

SEQ ID NO: 1336630 - RNA, 19 nt, Human
gucccuugccccccuggcc

SEQ ID NO: 1336631 - RNA, 20 nt, Human
gucccuugccccccuggccu

SEQ ID NO: 1336632 - RNA, 13 nt, Human
gucccuugccuca

SEQ ID NO: 1336633 - RNA, 14 nt, Human
gucccuugccucaa

SEQ ID NO: 1336634 - RNA, 19 nt, Human
gucccuugccucaaugcca

SEQ ID NO: 1336635 - RNA, 21 nt, Human
gucccuugccccccuggccuc

SEQ ID NO: 1336636 - RNA, 20 nt, Human
gucccuuguauccccugcag

SEQ ID NO: 1336637 - RNA, 19 nt, Human
gucccuuguauccccugca

SEQ ID NO: 1336638 - RNA, 18 nt, Human
aacagaagggagggcaga

SEQ ID NO: 1336639 - RNA, 22 nt, Human
aacagaagggagggcagagcug

SEQ ID NO: 1336640 - RNA, 21 nt, Human
aacagaaugucucuuccuggu

SEQ ID NO: 1336641 - RNA, 21 nt, Human
aacagaagggagggcagagcu

SEQ ID NO: 1336642 - RNA, 14 nt, Human
aacagaucaguaaa

SEQ ID NO: 1336643 - RNA, 13 nt, Human
aacagaucuggaa

SEQ ID NO: 1336644 - RNA, 22 nt, Human
aacagaucuggaaccucagccu

SEQ ID NO: 1336645 - RNA, 21 nt, Human
aacagaucuggaaccucagcc

SEQ ID NO: 1336646 - RNA, 22 nt, Human
aacagugauuaccagggacuga

SEQ ID NO: 1336647 - RNA, 17 nt, Human
aacagguauauacuuug

SEQ ID NO: 1336648 - RNA, 18 nt, Human
aacagguaauauaaaaag

SEQ ID NO: 1336649 - RNA, 15 nt, Human
aacagguauauacuu

SEQ ID NO: 1336650 - RNA, 17 nt, Human
aacagugcaacacuggu

SEQ ID NO: 1336651 - RNA, 13 nt, Human
aacagggaaggca

SEQ ID NO: 1336652 - RNA, 15 nt, Human
aacagggaaggcagg

SEQ ID NO: 1336653 - RNA, 20 nt, Human
aacagggaaggcaggcaggg

SEQ ID NO: 1336654 - RNA, 23 nt, Human
aacagggaaggcaggcagggcuc

SEQ ID NO: 1336655 - RNA, 22 nt, Human
aacagggaaggcaggcagggcu

SEQ ID NO: 1336656 - RNA, 20 nt, Human
aacagggccacauagaugcu

SEQ ID NO: 1336657 - RNA, 16 nt, Human
aacagggccacauaga

SEQ ID NO: 1336658 - RNA, 14 nt, Human
aacagggcugccuu

SEQ ID NO: 1336659 - RNA, 21 nt, Human
aacagggcugccuucuggccu

SEQ ID NO: 1336660 - RNA, 15 nt, Human
aacagguaauauaaa

SEQ ID NO: 1336661 - RNA, 16 nt, Human
gucugucugucugucc

SEQ ID NO: 1336662 - RNA, 14 nt, Human
gucugucugucugu

SEQ ID NO: 1336663 - RNA, 16 nt, Human
gucuguacugauucaa

SEQ ID NO: 1336664 - RNA, 16 nt, Human
gucuguagguugcaca

SEQ ID NO: 1336665 - RNA, 17 nt, Human
gucuguagguugcacac

SEQ ID NO: 1336666 - RNA, 18 nt, Human
gucuguagguugcacacu

SEQ ID NO: 1336667 - RNA, 19 nt, Human
gucuguagguugcacacuu

SEQ ID NO: 1336668 - RNA, 22 nt, Human
gucuguagugucacucaaggcg

SEQ ID NO: 1336669 - RNA, 20 nt, Human
gucuguagguugcacacuuu

SEQ ID NO: 1336670 - RNA, 12 nt, Human
gucuggcagccu

SEQ ID NO: 1336671 - RNA, 22 nt, Human
gucuggcagccucccauccagg

SEQ ID NO: 1336672 - RNA, 15 nt, Human
gucuggcccaccagg

SEQ ID NO: 1336673 - RNA, 17 nt, Human
gucuggccccccugguc

SEQ ID NO: 1336674 - RNA, 19 nt, Human
gucuggcaguuuauauuua

SEQ ID NO: 1336675 - RNA, 17 nt, Human
gucuggcacagccuggc

SEQ ID NO: 1336676 - RNA, 19 nt, Human
gucuggcacagccuggcug

SEQ ID NO: 1336677 - RNA, 21 nt, Human
aaccugaugaaaauaaagaau

SEQ ID NO: 1336678 - RNA, 22 nt, Human
aaccugaugaaaauaaagaaug

SEQ ID NO: 1336679 - RNA, 23 nt, Human
aaccugaugaaaauaaagaaugg

SEQ ID NO: 1336680 - RNA, 22 nt, Human
gucuggcaaugccacagcccug

SEQ ID NO: 1336681 - RNA, 23 nt, Human
gucuggcaaugccacagcccugu

SEQ ID NO: 1336682 - RNA, 20 nt, Human
aaccugagccccaaaaggua

SEQ ID NO: 1336683 - RNA, 21 nt, Human
aaccugagauuuauuaaagaa

SEQ ID NO: 1336684 - RNA, 22 nt, Human
aaccugagauuuauuaaagaaa

SEQ ID NO: 1336685 - RNA, 20 nt, Human
aaccugagucguacagaaag

SEQ ID NO: 1336686 - RNA, 17 nt, Human
aaccugaugaaaauaaa

SEQ ID NO: 1336687 - RNA, 19 nt, Human
aaccugaugaaaauaaaga

SEQ ID NO: 1336688 - RNA, 20 nt, Human
aaccugaugaaaauaaagaa

SEQ ID NO: 1336689 - RNA, 16 nt, Human
gucuuucacauuuaaa

SEQ ID NO: 1336690 - RNA, 18 nt, Human
gucuuuggagaaaugcuu

SEQ ID NO: 1336691 - RNA, 22 nt, Human
gucuuuggagaaaugcuuagaa

SEQ ID NO: 1336692 - RNA, 15 nt, Human
gucuuugguucagcu

SEQ ID NO: 1336693 - RNA, 15 nt, Human
gucuuugguucuaag

SEQ ID NO: 1336694 - RNA, 17 nt, Human
gucuuugguucuaagga

SEQ ID NO: 1336695 - RNA, 16 nt, Human
gucuuuagauagcccu

SEQ ID NO: 1336696 - RNA, 21 nt, Human
gucuuuagauagcccuguccu

SEQ ID NO: 1336697 - RNA, 22 nt, Human
gucuuuagauagcccuguccug

SEQ ID NO: 1336698 - RNA, 24 nt, Human
gucuuuagauagcccuguccuggu

SEQ ID NO: 1336699 - RNA, 15 nt, Human
gucuuucacagcucc

SEQ ID NO: 1336700 - RNA, 16 nt, Human
gucuuucacagcuccu

SEQ ID NO: 1336701 - RNA, 14 nt, Human
gucuucuaaacuuc

SEQ ID NO: 1336702 - RNA, 23 nt, Human
gucuucuaaacuuccccaucuuc

SEQ ID NO: 1336703 - RNA, 16 nt, Human
gucuuuuuagaugccc

SEQ ID NO: 1336704 - RNA, 15 nt, Human
gucuuuuguucgcau

SEQ ID NO: 1336705 - RNA, 12 nt, Human
gucuuuugcuuu

SEQ ID NO: 1336706 - RNA, 13 nt, Human
gucuuuugcuuuu

SEQ ID NO: 1336707 - RNA, 14 nt, Human
gucuuuugcuuuug

SEQ ID NO: 1336708 - RNA, 22 nt, Human
gucuuuugcuuuugcccauuuu

SEQ ID NO: 1336709 - RNA, 16 nt, Human
gucuuuugcuuuuggc

SEQ ID NO: 1336710 - RNA, 12 nt, Human
gucuuuuggagg

SEQ ID NO: 1336711 - RNA, 14 nt, Human
gucuuuuggaggac

SEQ ID NO: 1336712 - RNA, 16 nt, Human
gucuuuugguuaugaa

SEQ ID NO: 1336713 - RNA, 21 nt, Human
aacuagaguuuagcuggaaaa

SEQ ID NO: 1336714 - RNA, 20 nt, Human
aacuagaggugagaaauuua

SEQ ID NO: 1336715 - RNA, 21 nt, Human
aacuagaggugagaaauuuaa

SEQ ID NO: 1336716 - RNA, 23 nt, Human
aacuagacucccaagcuggacua

SEQ ID NO: 1336717 - RNA, 20 nt, Human
aacuagacucccaagcugga

SEQ ID NO: 1336718 - RNA, 17 nt, Human
aacuacuguguuaugca

SEQ ID NO: 1336719 - RNA, 14 nt, Human
aacuacuguguuau

SEQ ID NO: 1336720 - RNA, 16 nt, Human
aacuaugauuuggaaa

SEQ ID NO: 1336721 - RNA, 21 nt, Human
aacuaugauuuggaaaauaaa

SEQ ID NO: 1336722 - RNA, 16 nt, Human
aacuaugauuauuaac

SEQ ID NO: 1336723 - RNA, 17 nt, Human
aacuaugcauggugccc

SEQ ID NO: 1336724 - RNA, 22 nt, Human
aacuaugcauggugccccagga

SEQ ID NO: 1336725 - RNA, 23 nt, Human
aacuaugcauggugccccaggac

SEQ ID NO: 1336726 - RNA, 22 nt, Human
aacuagaggugagaaauuuaaa

SEQ ID NO: 1336727 - RNA, 18 nt, Human
aacuaucuuggugaauuu

SEQ ID NO: 1336728 - RNA, 11 nt, Human
aacuaucuugg

SEQ ID NO: 1336729 - RNA, 18 nt, Human
aaccuugaaaacuuuaug

SEQ ID NO: 1336730 - RNA, 17 nt, Human
aaccuugaaaaaaaaca

SEQ ID NO: 1336731 - RNA, 20 nt, Human
aaccuugaaaaaaaacagug

SEQ ID NO: 1336732 - RNA, 13 nt, Human
aaccuugccuggu

SEQ ID NO: 1336733 - RNA, 16 nt, Human
aaccuugccugguaca

SEQ ID NO: 1336734 - RNA, 19 nt, Human
aaccuugccugguacagua

SEQ ID NO: 1336735 - RNA, 17 nt, Human
aacuaccaccugacauu

SEQ ID NO: 1336736 - RNA, 18 nt, Human
aaccuugccugguacagu

SEQ ID NO: 1336737 - RNA, 21 nt, Human
aaccuuggguuagaccuacag

SEQ ID NO: 1336738 - RNA, 15 nt, Human
aacuaccugagcuaa

SEQ ID NO: 1336739 - RNA, 17 nt, Human
aacuacuaauagaauaa

SEQ ID NO: 1336740 - RNA, 20 nt, Human
aacuacuaccuguaaugaca

SEQ ID NO: 1336741 - RNA, 21 nt, Human
aacucguauagcaugcaucug

SEQ ID NO: 1336742 - RNA, 17 nt, Human
gugaacccaggacaagc

SEQ ID NO: 1336743 - RNA, 13 nt, Human
gugaacccaggac

SEQ ID NO: 1336744 - RNA, 15 nt, Human
gugaacccaggacaa

SEQ ID NO: 1336745 - RNA, 15 nt, Human
aacucguauagcaug

SEQ ID NO: 1336746 - RNA, 19 nt, Human
aacucguauagcaugcauc

SEQ ID NO: 1336747 - RNA, 21 nt, Human
aacuccugugaccacaacaug

SEQ ID NO: 1336748 - RNA, 13 nt, Human
aacuccugugacc

SEQ ID NO: 1336749 - RNA, 16 nt, Human
aacucgaaucugugug

SEQ ID NO: 1336750 - RNA, 15 nt, Human
aacucgaaucugugu

SEQ ID NO: 1336751 - RNA, 17 nt, Human
aacucaucugucaccaa

SEQ ID NO: 1336752 - RNA, 23 nt, Human
aacucauuagacuggaacuugaa

SEQ ID NO: 1336753 - RNA, 15 nt, Human
aacucauuagacugg

SEQ ID NO: 1336754 - RNA, 22 nt, Human
aacucauugcucuguuaauaau

SEQ ID NO: 1336755 - RNA, 20 nt, Human
aaccaagugaucaaacuaca

SEQ ID NO: 1336756 - RNA, 18 nt, Human
aaccaagcugaguuuccu

SEQ ID NO: 1336757 - RNA, 19 nt, Human
aaccaagcugaguuuccua

SEQ ID NO: 1336758 - RNA, 20 nt, Human
aaccaagcugaguuuccuau

SEQ ID NO: 1336759 - RNA, 13 nt, Human
gucucgaacuccu

SEQ ID NO: 1336760 - RNA, 18 nt, Human
gucucgaacuccugaccu

SEQ ID NO: 1336761 - RNA, 19 nt, Human
gucucgaacuccugaccuu

SEQ ID NO: 1336762 - RNA, 13 nt, Human
gucucgagcgccc

SEQ ID NO: 1336763 - RNA, 18 nt, Human
aaccaagccguggcuucc

SEQ ID NO: 1336764 - RNA, 17 nt, Human
aacaguuccuuucaaag

SEQ ID NO: 1336765 - RNA, 19 nt, Human
gucucccuccucugcccgg

SEQ ID NO: 1336766 - RNA, 21 nt, Human
aacaguugcauguaguaacac

SEQ ID NO: 1336767 - RNA, 22 nt, Human
aacaguugcauguaguaacacu

SEQ ID NO: 1336768 - RNA, 14 nt, Human
aacaguugguaacu

SEQ ID NO: 1336769 - RNA, 22 nt, Human
aacaguugcacagcaucucagc

SEQ ID NO: 1336770 - RNA, 14 nt, Human
aacaguugcaugua

SEQ ID NO: 1336771 - RNA, 18 nt, Human
aacaguugcauguaguaa

SEQ ID NO: 1336772 - RNA, 20 nt, Human
aacaguugcauguaguaaca

SEQ ID NO: 1336773 - RNA, 20 nt, Human
aacaguugcacagcaucuca

SEQ ID NO: 1336774 - RNA, 18 nt, Human
aacaguugcacagcaucu

SEQ ID NO: 1336775 - RNA, 17 nt, Human
aacaguugcacagcauc

SEQ ID NO: 1336776 - RNA, 15 nt, Human
aacaguugcacagca

SEQ ID NO: 1336777 - RNA, 14 nt, Human
aacaguugcacagc

SEQ ID NO: 1336778 - RNA, 17 nt, Human
aacaguugguaacuuuu

SEQ ID NO: 1336779 - RNA, 20 nt, Human
gucucccuggaucagaacag

SEQ ID NO: 1336780 - RNA, 13 nt, Human
aaccauugugcau

SEQ ID NO: 1336781 - RNA, 16 nt, Human
aaccauugugcauucu

SEQ ID NO: 1336782 - RNA, 12 nt, Human
aaccauuuccuc

SEQ ID NO: 1336783 - RNA, 15 nt, Human
aaccauuuccucaga

SEQ ID NO: 1336784 - RNA, 16 nt, Human
aaccauuuccucagac

SEQ ID NO: 1336785 - RNA, 19 nt, Human
aaccauuugaaaccccugu

SEQ ID NO: 1336786 - RNA, 13 nt, Human
aacccaauaguug

SEQ ID NO: 1336787 - RNA, 19 nt, Human
aacccaagguaccauccua

SEQ ID NO: 1336788 - RNA, 14 nt, Human
aacccaauccaaau

SEQ ID NO: 1336789 - RNA, 19 nt, Human
aacccacaggcccacagua

SEQ ID NO: 1336790 - RNA, 20 nt, Human
aaccauguguuauguuuucg

SEQ ID NO: 1336791 - RNA, 19 nt, Human
aaccauuauaaccuuaauu

SEQ ID NO: 1336792 - RNA, 17 nt, Human
aaccauuaaccagaucu

SEQ ID NO: 1336793 - RNA, 14 nt, Human
aaccucauccucuc

SEQ ID NO: 1336794 - RNA, 16 nt, Human
aaccucaucuucuuca

SEQ ID NO: 1336795 - RNA, 18 nt, Human
aaccucaguaauuuagaa

SEQ ID NO: 1336796 - RNA, 14 nt, Human
aaccucaguaauuu

SEQ ID NO: 1336797 - RNA, 20 nt, Human
aaccucauccuccuucuuca

SEQ ID NO: 1336798 - RNA, 13 nt, Human
aaccuccaccucc

SEQ ID NO: 1336799 - RNA, 16 nt, Human
aacccgggaggcagag

SEQ ID NO: 1336800 - RNA, 22 nt, Human
aacccgaggcugagaaucagac

SEQ ID NO: 1336801 - RNA, 23 nt, Human
aacccgagucauucguucugugg

SEQ ID NO: 1336802 - RNA, 20 nt, Human
aaccucagccuggccagaca

SEQ ID NO: 1336803 - RNA, 17 nt, Human
aaccccuguaggccuca

SEQ ID NO: 1336804 - RNA, 18 nt, Human
aaccccuuucccacccca

SEQ ID NO: 1336805 - RNA, 12 nt, Human
aaccucuaaauu

SEQ ID NO: 1336806 - RNA, 24 nt, Human
aaccucuaaauucuuucauuuuag

SEQ ID NO: 1336807 - RNA, 16 nt, Human
aaccucgggccugcug

SEQ ID NO: 1336808 - RNA, 14 nt, Human
aaccucgcuggacu

SEQ ID NO: 1336809 - RNA, 19 nt, Human
aaccucgcuggacucucag

SEQ ID NO: 1336810 - RNA, 18 nt, Human
aaccugagccccaaaagg

SEQ ID NO: 1336811 - RNA, 19 nt, Human
aaccugaccccugcucagu

SEQ ID NO: 1336812 - RNA, 14 nt, Human
aaccugagauuuau

SEQ ID NO: 1336813 - RNA, 15 nt, Human
aaccugagauuuauu

SEQ ID NO: 1336814 - RNA, 20 nt, Human
aaccugagauuuauuaaaga

SEQ ID NO: 1336815 - RNA, 11 nt, Human
aaccugacccc

SEQ ID NO: 1336816 - RNA, 16 nt, Human
aaccugaccccugcuc

SEQ ID NO: 1336817 - RNA, 17 nt, Human
aaccugaccccugcuca

SEQ ID NO: 1336818 - RNA, 14 nt, Human
aacccagauaaagg

SEQ ID NO: 1336819 - RNA, 15 nt, Human
aacccagacucagac

SEQ ID NO: 1336820 - RNA, 16 nt, Human
aacccagacucagaca

SEQ ID NO: 1336821 - RNA, 18 nt, Human
aacccagacucagacauu

SEQ ID NO: 1336822 - RNA, 19 nt, Human
aacccacuuuaaaauaucu

SEQ ID NO: 1336823 - RNA, 23 nt, Human
aacccacuuuaaaauaucuacau

SEQ ID NO: 1336824 - RNA, 22 nt, Human
aacccagaccuguuagcagaca

SEQ ID NO: 1336825 - RNA, 23 nt, Human
aacccagaccuguuagcagacag

SEQ ID NO: 1336826 - RNA, 12 nt, Human
aacccagacuca

SEQ ID NO: 1336827 - RNA, 14 nt, Human
aacccagacucaga

SEQ ID NO: 1336828 - RNA, 16 nt, Human
aacccagcccaccccc

SEQ ID NO: 1336829 - RNA, 20 nt, Human
aacccagcucccuucuuccc

SEQ ID NO: 1336830 - RNA, 21 nt, Human
aaccccuacaugaaacagaaa

SEQ ID NO: 1336831 - RNA, 20 nt, Human
aaccccuccccuccaucccu

SEQ ID NO: 1336832 - RNA, 21 nt, Human
aaccccuccccuccaucccug

SEQ ID NO: 1336833 - RNA, 23 nt, Human
aaccccuccccuccaucccuggc

SEQ ID NO: 1336834 - RNA, 15 nt, Human
aaccccccuguacac

SEQ ID NO: 1336835 - RNA, 20 nt, Human
aaccccggggugcccacagg

SEQ ID NO: 1336836 - RNA, 12 nt, Human
aacugaaaucau

SEQ ID NO: 1336837 - RNA, 13 nt, Human
aacugaaaucaua

SEQ ID NO: 1336838 - RNA, 17 nt, Human
aacugaaaauuauuuaa

SEQ ID NO: 1336839 - RNA, 15 nt, Human
aacucuucacucuuc

SEQ ID NO: 1336840 - RNA, 12 nt, Human
aacugaaaaugu

SEQ ID NO: 1336841 - RNA, 12 nt, Human
aacugaaaauua

SEQ ID NO: 1336842 - RNA, 13 nt, Human
aacugaaaauuau

SEQ ID NO: 1336843 - RNA, 19 nt, Human
aacucuucaaggucugcuu

SEQ ID NO: 1336844 - RNA, 16 nt, Human
aacucuucaaggucug

SEQ ID NO: 1336845 - RNA, 22 nt, Human
aacucuuauaaauuucuauuuu

SEQ ID NO: 1336846 - RNA, 15 nt, Human
aacucuuauaaauuu

SEQ ID NO: 1336847 - RNA, 22 nt, Human
aacucuguuacacuuuuuggaa

SEQ ID NO: 1336848 - RNA, 23 nt, Human
aacucuguuacacuuuuuggaag

SEQ ID NO: 1336849 - RNA, 19 nt, Human
aacucuguugcaagugcaa

SEQ ID NO: 1336850 - RNA, 22 nt, Human
aacucuguugcaagugcaauaa

SEQ ID NO: 1336851 - RNA, 16 nt, Human
gugagucguuuccccu

SEQ ID NO: 1336852 - RNA, 18 nt, Human
gugagucucucugggccu

SEQ ID NO: 1336853 - RNA, 22 nt, Human
gugagucucucugggccuuagg

SEQ ID NO: 1336854 - RNA, 20 nt, Human
aacucugacaacagacuucu

SEQ ID NO: 1336855 - RNA, 17 nt, Human
gugagucuuugguucua

SEQ ID NO: 1336856 - RNA, 19 nt, Human
gugagucuuugguucuaag

SEQ ID NO: 1336857 - RNA, 22 nt, Human
aacucugacaacagacuucuga

SEQ ID NO: 1336858 - RNA, 23 nt, Human
aacucugacaacagacuucugaa

SEQ ID NO: 1336859 - RNA, 21 nt, Human
gugagaugcuagaacucccuu

SEQ ID NO: 1336860 - RNA, 14 nt, Human
gugaggccagggca

SEQ ID NO: 1336861 - RNA, 15 nt, Human
gugaggccagggcag

SEQ ID NO: 1336862 - RNA, 17 nt, Human
gugaggccagggcagag

SEQ ID NO: 1336863 - RNA, 17 nt, Human
gugagggggggcucccu

SEQ ID NO: 1336864 - RNA, 18 nt, Human
gugaggguaaguauuuuc

SEQ ID NO: 1336865 - RNA, 15 nt, Human
gugagggucccaugu

SEQ ID NO: 1336866 - RNA, 16 nt, Human
gugagggucccaugug

SEQ ID NO: 1336867 - RNA, 16 nt, Human
aacuggggcuccucca

SEQ ID NO: 1336868 - RNA, 16 nt, Human
aacugggggaaaagau

SEQ ID NO: 1336869 - RNA, 18 nt, Human
aacugggaaccccuuucc

SEQ ID NO: 1336870 - RNA, 20 nt, Human
aacugggaaccccuuuccca

SEQ ID NO: 1336871 - RNA, 21 nt, Human
aacugggaaccccuuucccac

SEQ ID NO: 1336872 - RNA, 22 nt, Human
aacugggaaccccuuucccacc

SEQ ID NO: 1336873 - RNA, 17 nt, Human
aacugggacaggggaga

SEQ ID NO: 1336874 - RNA, 22 nt, Human
aacuggcccuauuuagaugaua

SEQ ID NO: 1336875 - RNA, 18 nt, Human
aacuggcccuauuuagau

SEQ ID NO: 1336876 - RNA, 22 nt, Human
aacuggcaggcaggcucccagg

SEQ ID NO: 1336877 - RNA, 14 nt, Human
aacuggcaggcagg

SEQ ID NO: 1336878 - RNA, 16 nt, Human
aacuggccaagcugag

SEQ ID NO: 1336879 - RNA, 17 nt, Human
aacuggccaagcugagg

SEQ ID NO: 1336880 - RNA, 19 nt, Human
aacuggccaagcugaggug

SEQ ID NO: 1336881 - RNA, 21 nt, Human
aacuggccaagcugaggugcc

SEQ ID NO: 1336882 - RNA, 18 nt, Human
aacuggccauggccugca

SEQ ID NO: 1336883 - RNA, 19 nt, Human
aacugcuaaucuacuuucu

SEQ ID NO: 1336884 - RNA, 22 nt, Human
aacugccuagaaacaacacugu

SEQ ID NO: 1336885 - RNA, 13 nt, Human
aacugcaggcccu

SEQ ID NO: 1336886 - RNA, 13 nt, Human
aacugccuagaaa

SEQ ID NO: 1336887 - RNA, 14 nt, Human
aacugccuagaaac

SEQ ID NO: 1336888 - RNA, 17 nt, Human
aacugccuagaaacaac

SEQ ID NO: 1336889 - RNA, 20 nt, Human
aacugccucgaaacacagaa

SEQ ID NO: 1336890 - RNA, 17 nt, Human
aacugcucccaccuccu

SEQ ID NO: 1336891 - RNA, 13 nt, Human
aacugcuccuccu

SEQ ID NO: 1336892 - RNA, 20 nt, Human
aacugcaccaguugcugcuu

SEQ ID NO: 1336893 - RNA, 20 nt, Human
aacugcaauacaaguuucau

SEQ ID NO: 1336894 - RNA, 12 nt, Human
aacugcugccac

SEQ ID NO: 1336895 - RNA, 14 nt, Human
aacugcugccacug

SEQ ID NO: 1336896 - RNA, 13 nt, Human
aacugcugccacu

SEQ ID NO: 1336897 - RNA, 14 nt, Human
aacugcuuucuguu

SEQ ID NO: 1336898 - RNA, 15 nt, Human
aacugcuuucuguuc

SEQ ID NO: 1336899 - RNA, 17 nt, Human
aacugcuuucuguucca

SEQ ID NO: 1336900 - RNA, 18 nt, Human
aacugcuuucuguuccaa

SEQ ID NO: 1336901 - RNA, 20 nt, Human
aacugcuuucuguuccaaau

SEQ ID NO: 1336902 - RNA, 15 nt, Human
aacuggaaaacagaa

SEQ ID NO: 1336903 - RNA, 17 nt, Human
aacuggaaaacagaaca

SEQ ID NO: 1336904 - RNA, 19 nt, Human
aacuggaaaacagaacacu

SEQ ID NO: 1336905 - RNA, 20 nt, Human
aacuggaaaacagaacacuu

SEQ ID NO: 1336906 - RNA, 21 nt, Human
aacuggaaaacagaacacuua

SEQ ID NO: 1336907 - RNA, 13 nt, Human
aacuggaaagaag

SEQ ID NO: 1336908 - RNA, 12 nt, Human
aacuggaaagaa

SEQ ID NO: 1336909 - RNA, 16 nt, Human
aacuggaaucagcuca

SEQ ID NO: 1336910 - RNA, 19 nt, Human
aacuggaaucagcucagga

SEQ ID NO: 1336911 - RNA, 18 nt, Human
aacuuccagauccuggaa

SEQ ID NO: 1336912 - RNA, 19 nt, Human
aacuuccagguguuacugu

SEQ ID NO: 1336913 - RNA, 22 nt, Human
aacuuccagguguuacuguaau

SEQ ID NO: 1336914 - RNA, 17 nt, Human
aacuuccccaucuucua

SEQ ID NO: 1336915 - RNA, 18 nt, Human
aacuuccccaucuucuaa

SEQ ID NO: 1336916 - RNA, 16 nt, Human
aacuucauuucagagu

SEQ ID NO: 1336917 - RNA, 19 nt, Human
aacuucaguuucacagaaa

SEQ ID NO: 1336918 - RNA, 20 nt, Human
aacuucauauaugaggacuu

SEQ ID NO: 1336919 - RNA, 18 nt, Human
aacuggguaaugaaacaa

SEQ ID NO: 1336920 - RNA, 13 nt, Human
aacuguaaauaaa

SEQ ID NO: 1336921 - RNA, 14 nt, Human
aacuguaaagaugu

SEQ ID NO: 1336922 - RNA, 13 nt, Human
aacuguaauacaa

SEQ ID NO: 1336923 - RNA, 10 nt, Human
aacuguacag

SEQ ID NO: 1336924 - RNA, 11 nt, Human
aacuguacagu

SEQ ID NO: 1336925 - RNA, 16 nt, Human
aacuguacagugucuu

SEQ ID NO: 1336926 - RNA, 17 nt, Human
aacuguacagugucuuu

SEQ ID NO: 1336927 - RNA, 18 nt, Human
aacuguacagugucuuuu

SEQ ID NO: 1336928 - RNA, 12 nt, Human
aacuucuugcuu

SEQ ID NO: 1336929 - RNA, 18 nt, Human
aacuucuugcuucuuucu

SEQ ID NO: 1336930 - RNA, 13 nt, Human
aacuucuguuuua

SEQ ID NO: 1336931 - RNA, 15 nt, Human
aacuucuuauggaau

SEQ ID NO: 1336932 - RNA, 16 nt, Human
aacuucuuauggaauu

SEQ ID NO: 1336933 - RNA, 17 nt, Human
aacuucuuauggaauug

SEQ ID NO: 1336934 - RNA, 19 nt, Human
aacuucuuauggaauugau

SEQ ID NO: 1336935 - RNA, 24 nt, Human
aacuucuuauggaauugauuugca

SEQ ID NO: 1336936 - RNA, 19 nt, Human
aacuucuugcuucuuucua

SEQ ID NO: 1336937 - RNA, 14 nt, Human
gugaugaauacugu

SEQ ID NO: 1336938 - RNA, 14 nt, Human
gugaugagggcagc

SEQ ID NO: 1336939 - RNA, 16 nt, Human
gugaugagggcagcag

SEQ ID NO: 1336940 - RNA, 17 nt, Human
gugaugagggcagcagc

SEQ ID NO: 1336941 - RNA, 18 nt, Human
gugaugagggcagcagcc

SEQ ID NO: 1336942 - RNA, 19 nt, Human
gugaugagggcagcagcca

SEQ ID NO: 1336943 - RNA, 20 nt, Human
gugaugagggcagcagccag

SEQ ID NO: 1336944 - RNA, 21 nt, Human
gugaugagggcagcagccagc

SEQ ID NO: 1336945 - RNA, 22 nt, Human
gugaugagggcagcagccagcc

SEQ ID NO: 1336946 - RNA, 23 nt, Human
gugaugagggcagcagccagccc

SEQ ID NO: 1336947 - RNA, 16 nt, Human
gugauggagugcuguu

SEQ ID NO: 1336948 - RNA, 23 nt, Human
gugauggagugcuguuuuguuau

SEQ ID NO: 1336949 - RNA, 18 nt, Human
gugauggagugcuguuuu

SEQ ID NO: 1336950 - RNA, 14 nt, Human
gugcauucuccagc

SEQ ID NO: 1336951 - RNA, 21 nt, Human
gugccaauuucaaguuccaag

SEQ ID NO: 1336952 - RNA, 12 nt, Human
gugccucugccu

SEQ ID NO: 1336953 - RNA, 15 nt, Human
gugccugucccaccc

SEQ ID NO: 1336954 - RNA, 20 nt, Human
gugccugucccacccccacc

SEQ ID NO: 1336955 - RNA, 13 nt, Human
gugccugugucca

SEQ ID NO: 1336956 - RNA, 22 nt, Human
gugccuguguccaugcgcucag

SEQ ID NO: 1336957 - RNA, 15 nt, Human
gugccacuuaaugua

SEQ ID NO: 1336958 - RNA, 18 nt, Human
gugccacuuaauguaugu

SEQ ID NO: 1336959 - RNA, 14 nt, Human
gugccagaagcuac

SEQ ID NO: 1336960 - RNA, 16 nt, Human
gugccagagaacccag

SEQ ID NO: 1336961 - RNA, 23 nt, Human
gugccuccagaggggcucagguc

SEQ ID NO: 1336962 - RNA, 13 nt, Human
gugccuccucccu

SEQ ID NO: 1336963 - RNA, 14 nt, Human
gugccuccucccuc

SEQ ID NO: 1336964 - RNA, 16 nt, Human
gugccuccucccuccc

SEQ ID NO: 1336965 - RNA, 21 nt, Human
gugccuccucccucccucucc

SEQ ID NO: 1336966 - RNA, 22 nt, Human
gugccuccucccucccucuccg

SEQ ID NO: 1336967 - RNA, 15 nt, Human
gugccucgcucccca

SEQ ID NO: 1336968 - RNA, 19 nt, Human
gugccucgcuccccacucu

SEQ ID NO: 1336969 - RNA, 20 nt, Human
gugccucgcuccccacucug

SEQ ID NO: 1336970 - RNA, 21 nt, Human
gugccucgcuccccacucugc

SEQ ID NO: 1336971 - RNA, 20 nt, Human
gugcacaaauauuuauuuuc

SEQ ID NO: 1336972 - RNA, 20 nt, Human
gugcacaccccacucccaca

SEQ ID NO: 1336973 - RNA, 20 nt, Human
gugcaauguguguauaugga

SEQ ID NO: 1336974 - RNA, 23 nt, Human
gugcaauguguauaaacaagaaa

SEQ ID NO: 1336975 - RNA, 18 nt, Human
gugcaauuucaagguucu

SEQ ID NO: 1336976 - RNA, 19 nt, Human
gugcaauuucaagguucua

SEQ ID NO: 1336977 - RNA, 20 nt, Human
gugcaauuucaagguucuaa

SEQ ID NO: 1336978 - RNA, 18 nt, Human
gugcacaaaacccagacc

SEQ ID NO: 1336979 - RNA, 15 nt, Human
gugcacaaauauuua

SEQ ID NO: 1336980 - RNA, 14 nt, Human
gugcacagccccua

SEQ ID NO: 1336981 - RNA, 11 nt, Human
gugcacagccc

SEQ ID NO: 1336982 - RNA, 19 nt, Human
gugcacagcacaaauuagu

SEQ ID NO: 1336983 - RNA, 12 nt, Human
gugcacaggagg

SEQ ID NO: 1336984 - RNA, 13 nt, Human
gugcacaggaggg

SEQ ID NO: 1336985 - RNA, 14 nt, Human
gugcacaggagggg

SEQ ID NO: 1336986 - RNA, 22 nt, Human
gugcacauauccaggcaccagg

SEQ ID NO: 1336987 - RNA, 18 nt, Human
gugcacaucugugucuug

SEQ ID NO: 1336988 - RNA, 14 nt, Human
gugaugguuccccu

SEQ ID NO: 1336989 - RNA, 16 nt, Human
gugaugguuccccugu

SEQ ID NO: 1336990 - RNA, 22 nt, Human
gugaugguuccccuguucacuc

SEQ ID NO: 1336991 - RNA, 23 nt, Human
gugcaaccucuuggccugaucag

SEQ ID NO: 1336992 - RNA, 15 nt, Human
gugcaaggaccuaaa

SEQ ID NO: 1336993 - RNA, 19 nt, Human
gugcaaggaccuaaaacau

SEQ ID NO: 1336994 - RNA, 12 nt, Human
gugcaaggcagc

SEQ ID NO: 1336995 - RNA, 15 nt, Human
gugcaaggcagccgu

SEQ ID NO: 1336996 - RNA, 14 nt, Human
gugcaaggcagccg

SEQ ID NO: 1336997 - RNA, 13 nt, Human
gugcaauguaaau

SEQ ID NO: 1336998 - RNA, 17 nt, Human
gugcaauguaaauauuu

SEQ ID NO: 1336999 - RNA, 22 nt, Human
gugcaauguaaauauuuuaaag

SEQ ID NO: 1337000 - RNA, 20 nt, Human
gugcaauguaaauauuuuaa

SEQ ID NO: 1337001 - RNA, 15 nt, Human
gugcaauguguauaa

SEQ ID NO: 1337002 - RNA, 17 nt, Human
gugcaauguguauaaac

SEQ ID NO: 1337003 - RNA, 19 nt, Human
gugcaauguguauaaacaa

SEQ ID NO: 1337004 - RNA, 15 nt, Human
accaucucuccaacu

SEQ ID NO: 1337005 - RNA, 15 nt, Human
accauccaccaggcc

SEQ ID NO: 1337006 - RNA, 23 nt, Human
accaucagaaacacccucacacu

SEQ ID NO: 1337007 - RNA, 20 nt, Human
accaucagaaacacccucac

SEQ ID NO: 1337008 - RNA, 13 nt, Human
accaucacugagu

SEQ ID NO: 1337009 - RNA, 22 nt, Human
accaucaccagaauuaauuuua

SEQ ID NO: 1337010 - RNA, 17 nt, Human
accaucaaguugugcca

SEQ ID NO: 1337011 - RNA, 21 nt, Human
accauacuaauuauacccccu

SEQ ID NO: 1337012 - RNA, 12 nt, Human
accauacugaaa

SEQ ID NO: 1337013 - RNA, 17 nt, Human
accauaggucaccuuua

SEQ ID NO: 1337014 - RNA, 22 nt, Human
accauagcacaggcuaauuuuu

SEQ ID NO: 1337015 - RNA, 13 nt, Human
accauacuaauua

SEQ ID NO: 1337016 - RNA, 16 nt, Human
accauacuaauuauac

SEQ ID NO: 1337017 - RNA, 15 nt, Human
acccacccagaauga

SEQ ID NO: 1337018 - RNA, 15 nt, Human
acccaccccugcaca

SEQ ID NO: 1337019 - RNA, 12 nt, Human
acccaccccugc

SEQ ID NO: 1337020 - RNA, 12 nt, Human
acccacccagaa

SEQ ID NO: 1337021 - RNA, 16 nt, Human
acccaccaguugaauu

SEQ ID NO: 1337022 - RNA, 19 nt, Human
acccaccaacccucagggc

SEQ ID NO: 1337023 - RNA, 18 nt, Human
acccaccaacccucaggg

SEQ ID NO: 1337024 - RNA, 19 nt, Human
accaugaagagauuuuuca

SEQ ID NO: 1337025 - RNA, 23 nt, Human
acccacacucagauccuccucau

SEQ ID NO: 1337026 - RNA, 20 nt, Human
accaugaagagauuuuucau

SEQ ID NO: 1337027 - RNA, 18 nt, Human
acccacaggcccacagua

SEQ ID NO: 1337028 - RNA, 23 nt, Human
acccacaugccauuuguacugac

SEQ ID NO: 1337029 - RNA, 14 nt, Human
acccacaugcucca

SEQ ID NO: 1337030 - RNA, 17 nt, Human
acccaccaacccucagg

SEQ ID NO: 1337031 - RNA, 14 nt, Human
acccaccgggccac

SEQ ID NO: 1337032 - RNA, 16 nt, Human
acccaccgggccacuc

SEQ ID NO: 1337033 - RNA, 18 nt, Human
acccaccgggccacuccu

SEQ ID NO: 1337034 - RNA, 19 nt, Human
acccaccgggccacuccuu

SEQ ID NO: 1337035 - RNA, 22 nt, Human
acccaccgggccacuccuuccu

SEQ ID NO: 1337036 - RNA, 23 nt, Human
acccaguuucuaaacuggagacu

SEQ ID NO: 1337037 - RNA, 22 nt, Human
acccaguuucuaaacuggagac

SEQ ID NO: 1337038 - RNA, 23 nt, Human
acccauauccuuacccuccuugg

SEQ ID NO: 1337039 - RNA, 16 nt, Human
acccauauuguaaaac

SEQ ID NO: 1337040 - RNA, 20 nt, Human
acccauauuguaaaacaggu

SEQ ID NO: 1337041 - RNA, 15 nt, Human
acccaucaacaaaaa

SEQ ID NO: 1337042 - RNA, 17 nt, Human
acauuuccuaaauauau

SEQ ID NO: 1337043 - RNA, 16 nt, Human
acauuuccuaaauaua

SEQ ID NO: 1337044 - RNA, 14 nt, Human
acaugugaaaagaa

SEQ ID NO: 1337045 - RNA, 17 nt, Human
acaugugaaaagaauag

SEQ ID NO: 1337046 - RNA, 18 nt, Human
acaugugaaaagaauaga

SEQ ID NO: 1337047 - RNA, 18 nt, Human
acauuuccuuacagaacu

SEQ ID NO: 1337048 - RNA, 13 nt, Human
acauuucuaaaau

SEQ ID NO: 1337049 - RNA, 20 nt, Human
acauuucuauagccaaaaau

SEQ ID NO: 1337050 - RNA, 12 nt, Human
acauuucucaau

SEQ ID NO: 1337051 - RNA, 23 nt, Human
acauuucucuaagagaacaaugu

SEQ ID NO: 1337052 - RNA, 21 nt, Human
accaacuuuucuauuaaaagu

SEQ ID NO: 1337053 - RNA, 22 nt, Human
accaacuuuucuauuaaaagug

SEQ ID NO: 1337054 - RNA, 19 nt, Human
accaaggcugauuaaacca

SEQ ID NO: 1337055 - RNA, 21 nt, Human
accaagauacuuaagugcugc

SEQ ID NO: 1337056 - RNA, 15 nt, Human
accaagauacuuaag

SEQ ID NO: 1337057 - RNA, 20 nt, Human
accaagauacuuaagugcug

SEQ ID NO: 1337058 - RNA, 20 nt, Human
accaaggcugauuaaaccaa

SEQ ID NO: 1337059 - RNA, 22 nt, Human
accaccccgccugcccucaugg

SEQ ID NO: 1337060 - RNA, 13 nt, Human
accacccucacug

SEQ ID NO: 1337061 - RNA, 12 nt, Human
accaccugccca

SEQ ID NO: 1337062 - RNA, 21 nt, Human
accacccugagccggccccag

SEQ ID NO: 1337063 - RNA, 20 nt, Human
accacccucacuggcucucc

SEQ ID NO: 1337064 - RNA, 19 nt, Human
accacccucacuggcucuc

SEQ ID NO: 1337065 - RNA, 12 nt, Human
accacccugagc

SEQ ID NO: 1337066 - RNA, 13 nt, Human
accacccugagcc

SEQ ID NO: 1337067 - RNA, 14 nt, Human
accacccugagccg

SEQ ID NO: 1337068 - RNA, 20 nt, Human
accaccuuuguuucuccccc

SEQ ID NO: 1337069 - RNA, 22 nt, Human
accaccuuuguuucucccccau

SEQ ID NO: 1337070 - RNA, 13 nt, Human
accacgacuggcc

SEQ ID NO: 1337071 - RNA, 16 nt, Human
accacgacuggccagg

SEQ ID NO: 1337072 - RNA, 24 nt, Human
accacgacuggccagggccacgcu

SEQ ID NO: 1337073 - RNA, 19 nt, Human
accacgacuggccagggcc

SEQ ID NO: 1337074 - RNA, 19 nt, Human
accagcagacagagccagg

SEQ ID NO: 1337075 - RNA, 20 nt, Human
accagcagacagagccagga

SEQ ID NO: 1337076 - RNA, 22 nt, Human
accagcagacagagccaggaga

SEQ ID NO: 1337077 - RNA, 15 nt, Human
acaguggggaaugaa

SEQ ID NO: 1337078 - RNA, 13 nt, Human
acagugcaucuca

SEQ ID NO: 1337079 - RNA, 19 nt, Human
acaguggggaaugaagaua

SEQ ID NO: 1337080 - RNA, 21 nt, Human
acagugauuaccagggacuga

SEQ ID NO: 1337081 - RNA, 14 nt, Human
acagugcagugcgc

SEQ ID NO: 1337082 - RNA, 21 nt, Human
acagggccuuuggcaggugca

SEQ ID NO: 1337083 - RNA, 16 nt, Human
acagggcggggguggc

SEQ ID NO: 1337084 - RNA, 15 nt, Human
acagcugccucuucc

SEQ ID NO: 1337085 - RNA, 16 nt, Human
acagggcugccuucug

SEQ ID NO: 1337086 - RNA, 16 nt, Human
acaggucuucaucgaa

SEQ ID NO: 1337087 - RNA, 18 nt, Human
acaggugcuaauuuguuu

SEQ ID NO: 1337088 - RNA, 18 nt, Human
acagugagccugaauuuu

SEQ ID NO: 1337089 - RNA, 21 nt, Human
acagugagccugaauuuuguu

SEQ ID NO: 1337090 - RNA, 14 nt, Human
acagcugccucuuc

SEQ ID NO: 1337091 - RNA, 12 nt, Human
acagcugccugc

SEQ ID NO: 1337092 - RNA, 16 nt, Human
acagcugccugcagua

SEQ ID NO: 1337093 - RNA, 20 nt, Human
acauaauucaggaagcagcu

SEQ ID NO: 1337094 - RNA, 18 nt, Human
acauaauucacucugagu

SEQ ID NO: 1337095 - RNA, 20 nt, Human
acauaauucacucugagugu

SEQ ID NO: 1337096 - RNA, 21 nt, Human
acauaauuuaguuucauauaa

SEQ ID NO: 1337097 - RNA, 12 nt, Human
acaucagcccuu

SEQ ID NO: 1337098 - RNA, 15 nt, Human
acaucagguuuuucc

SEQ ID NO: 1337099 - RNA, 16 nt, Human
acaucagguuuuuccc

SEQ ID NO: 1337100 - RNA, 15 nt, Human
acauaagccauuauu

SEQ ID NO: 1337101 - RNA, 18 nt, Human
acauaagccauuauucac

SEQ ID NO: 1337102 - RNA, 12 nt, Human
acauaagcuauu

SEQ ID NO: 1337103 - RNA, 13 nt, Human
acauaagcuauuu

SEQ ID NO: 1337104 - RNA, 17 nt, Human
acauaagcuauuuuucu

SEQ ID NO: 1337105 - RNA, 18 nt, Human
acauaagcuauuuuucua

SEQ ID NO: 1337106 - RNA, 20 nt, Human
acauaagcuauuuuucuaac

SEQ ID NO: 1337107 - RNA, 19 nt, Human
acauaagcuauuuuucuaa

SEQ ID NO: 1337108 - RNA, 17 nt, Human
acauaauuauccaggaa

SEQ ID NO: 1337109 - RNA, 23 nt, Human
acauaauuauccaggaagggaau

SEQ ID NO: 1337110 - RNA, 16 nt, Human
acauaauucacucuga

SEQ ID NO: 1337111 - RNA, 17 nt, Human
acauaauucacucugag

SEQ ID NO: 1337112 - RNA, 16 nt, Human
acauccucuuccauau

SEQ ID NO: 1337113 - RNA, 21 nt, Human
acaugauuuccuugaaugugg

SEQ ID NO: 1337114 - RNA, 15 nt, Human
acauccuacaagaca

SEQ ID NO: 1337115 - RNA, 21 nt, Human
acauccuccacguucugcuca

SEQ ID NO: 1337116 - RNA, 13 nt, Human
acauccuccuccc

SEQ ID NO: 1337117 - RNA, 15 nt, Human
acauccuccucccac

SEQ ID NO: 1337118 - RNA, 15 nt, Human
acaucauuacuauaa

SEQ ID NO: 1337119 - RNA, 18 nt, Human
acaucauuacuauaagaa

SEQ ID NO: 1337120 - RNA, 21 nt, Human
acaucauuacuauaagaacuu

SEQ ID NO: 1337121 - RNA, 15 nt, Human
acaucauucauuuuu

SEQ ID NO: 1337122 - RNA, 23 nt, Human
acaugauuuccuugaauguggcu

SEQ ID NO: 1337123 - RNA, 14 nt, Human
acaugccacaagga

SEQ ID NO: 1337124 - RNA, 21 nt, Human
acaugccauuuguacugaccc

SEQ ID NO: 1337125 - RNA, 17 nt, Human
acaugccauuuguacug

SEQ ID NO: 1337126 - RNA, 18 nt, Human
acaugccauuuguacuga

SEQ ID NO: 1337127 - RNA, 18 nt, Human
aauuuccugggagcuuuu

SEQ ID NO: 1337128 - RNA, 21 nt, Human
aauuuccugggagcuuuugua

SEQ ID NO: 1337129 - RNA, 19 nt, Human
aauuucaccuguaaaccug

SEQ ID NO: 1337130 - RNA, 20 nt, Human
aauuucaccuguaaaccuga

SEQ ID NO: 1337131 - RNA, 18 nt, Human
aauuucaagguucuaacc

SEQ ID NO: 1337132 - RNA, 13 nt, Human
aauuucagacucc

SEQ ID NO: 1337133 - RNA, 23 nt, Human
aauuucagacucccauuccugaa

SEQ ID NO: 1337134 - RNA, 23 nt, Human
aauuucacugucuuuaauucugu

SEQ ID NO: 1337135 - RNA, 21 nt, Human
aauuucaggaggaauacugaa

SEQ ID NO: 1337136 - RNA, 13 nt, Human
aauuuauuuucuu

SEQ ID NO: 1337137 - RNA, 12 nt, Human
aauuucaaaaug

SEQ ID NO: 1337138 - RNA, 16 nt, Human
aauuucaaaaugcuuu

SEQ ID NO: 1337139 - RNA, 14 nt, Human
aauuucaagguucu

SEQ ID NO: 1337140 - RNA, 15 nt, Human
aauuucaagguucua

SEQ ID NO: 1337141 - RNA, 16 nt, Human
aauuucaagguucuaa

SEQ ID NO: 1337142 - RNA, 17 nt, Human
aauuucaagguucuaac

SEQ ID NO: 1337143 - RNA, 16 nt, Human
aauuucaccuguaaac

SEQ ID NO: 1337144 - RNA, 21 nt, Human
aauuucggauuuuuuccaaaa

SEQ ID NO: 1337145 - RNA, 17 nt, Human
aauuucggauuuuuucc

SEQ ID NO: 1337146 - RNA, 18 nt, Human
aauuucggauuuuuucca

SEQ ID NO: 1337147 - RNA, 20 nt, Human
aauuucggauuuuuuccaaa

SEQ ID NO: 1337148 - RNA, 13 nt, Human
aauuuauuauuaa

SEQ ID NO: 1337149 - RNA, 23 nt, Human
aauuuauuugaaugauuuuucuu

SEQ ID NO: 1337150 - RNA, 11 nt, Human
aauugucccuu

SEQ ID NO: 1337151 - RNA, 16 nt, Human
aauugucccuuaaaca

SEQ ID NO: 1337152 - RNA, 18 nt, Human
aauugucccuuaaacaaa

SEQ ID NO: 1337153 - RNA, 12 nt, Human
aauugucugaaa

SEQ ID NO: 1337154 - RNA, 21 nt, Human
aauuguguagccuuuuuguau

SEQ ID NO: 1337155 - RNA, 17 nt, Human
aauuguguagccuuuuu

SEQ ID NO: 1337156 - RNA, 21 nt, Human
aauugugauuagacagaacac

SEQ ID NO: 1337157 - RNA, 16 nt, Human
aauugugguuuauaua

SEQ ID NO: 1337158 - RNA, 17 nt, Human
aauugugguuuauauau

SEQ ID NO: 1337159 - RNA, 15 nt, Human
aauuguguagccuuu

SEQ ID NO: 1337160 - RNA, 16 nt, Human
aauuguguagccuuuu

SEQ ID NO: 1337161 - RNA, 21 nt, Human
aauugugcaguacuuugugca

SEQ ID NO: 1337162 - RNA, 18 nt, Human
aauugugauuagacagaa

SEQ ID NO: 1337163 - RNA, 20 nt, Human
aauugugauuagacagaaca

SEQ ID NO: 1337164 - RNA, 21 nt, Human
aauuguggggaugaugaaaua

SEQ ID NO: 1337165 - RNA, 15 nt, Human
aauuggguucacagc

SEQ ID NO: 1337166 - RNA, 21 nt, Human
aauuguaaaguaaaagcuaua

SEQ ID NO: 1337167 - RNA, 14 nt, Human
aauuguaacuguuc

SEQ ID NO: 1337168 - RNA, 16 nt, Human
aauuguaacuguucuu

SEQ ID NO: 1337169 - RNA, 14 nt, Human
aauuguauauugua

SEQ ID NO: 1337170 - RNA, 16 nt, Human
aauuguauuuuaguaa

SEQ ID NO: 1337171 - RNA, 21 nt, Human
acaaggaugaauuaaguuuuu

SEQ ID NO: 1337172 - RNA, 22 nt, Human
acaagaaaugaaagcagggacu

SEQ ID NO: 1337173 - RNA, 16 nt, Human
acaagaaaugaaagca

SEQ ID NO: 1337174 - RNA, 15 nt, Human
acaagaaaugaaagc

SEQ ID NO: 1337175 - RNA, 18 nt, Human
acaaccuucuguggcuca

SEQ ID NO: 1337176 - RNA, 15 nt, Human
acaaccucaacugcc

SEQ ID NO: 1337177 - RNA, 18 nt, Human
acaaagaaacaaagaugu

SEQ ID NO: 1337178 - RNA, 16 nt, Human
acaaccucaacugccu

SEQ ID NO: 1337179 - RNA, 16 nt, Human
acaaagaaauuaugug

SEQ ID NO: 1337180 - RNA, 14 nt, Human
acaaagaaauuaug

SEQ ID NO: 1337181 - RNA, 12 nt, Human
acaaagaaauua

SEQ ID NO: 1337182 - RNA, 13 nt, Human
acaaacuuuuaua

SEQ ID NO: 1337183 - RNA, 19 nt, Human
acaaacuuugcaucucagu

SEQ ID NO: 1337184 - RNA, 17 nt, Human
acaaagaaacaaagaug

SEQ ID NO: 1337185 - RNA, 20 nt, Human
acaaagaaacaaagauguua

SEQ ID NO: 1337186 - RNA, 13 nt, Human
acaaaauggaaua

SEQ ID NO: 1337187 - RNA, 14 nt, Human
acaaaauggaauac

SEQ ID NO: 1337188 - RNA, 15 nt, Human
acaaaauggaauacu

SEQ ID NO: 1337189 - RNA, 13 nt, Human
acaaacuuugcau

SEQ ID NO: 1337190 - RNA, 15 nt, Human
acaaacuuugcaucu

SEQ ID NO: 1337191 - RNA, 18 nt, Human
aauuuucaucuaggauuu

SEQ ID NO: 1337192 - RNA, 14 nt, Human
aauuuucacugugu

SEQ ID NO: 1337193 - RNA, 17 nt, Human
aauuuugugaagcaaaa

SEQ ID NO: 1337194 - RNA, 18 nt, Human
aauuuugugaagcaaaau

SEQ ID NO: 1337195 - RNA, 12 nt, Human
aauuuuggauuu

SEQ ID NO: 1337196 - RNA, 16 nt, Human
aauuuugaugaacaaa

SEQ ID NO: 1337197 - RNA, 16 nt, Human
acagaagcuccaggua

SEQ ID NO: 1337198 - RNA, 17 nt, Human
acagaacuucagaaaga

SEQ ID NO: 1337199 - RNA, 18 nt, Human
acagaacuucagaaagac

SEQ ID NO: 1337200 - RNA, 19 nt, Human
acagaacuucagaaagacu

SEQ ID NO: 1337201 - RNA, 20 nt, Human
acagaacuucagaaagacuu

SEQ ID NO: 1337202 - RNA, 21 nt, Human
acagaacuucagaaagacuug

SEQ ID NO: 1337203 - RNA, 12 nt, Human
acagaagaaaca

SEQ ID NO: 1337204 - RNA, 16 nt, Human
acagaagggagggcag

SEQ ID NO: 1337205 - RNA, 17 nt, Human
acagaagggagggcaga

SEQ ID NO: 1337206 - RNA, 19 nt, Human
acagaagggagggcagagc

SEQ ID NO: 1337207 - RNA, 21 nt, Human
acagaagggagggcagagcug

SEQ ID NO: 1337208 - RNA, 22 nt, Human
acagaagggagggcagagcugg

SEQ ID NO: 1337209 - RNA, 23 nt, Human
acagaagggagggcagagcuggu

SEQ ID NO: 1337210 - RNA, 13 nt, Human
acagaggcagccc

SEQ ID NO: 1337211 - RNA, 16 nt, Human
acagaggacacagaga

SEQ ID NO: 1337212 - RNA, 20 nt, Human
acacugggagaaaugaaaaa

SEQ ID NO: 1337213 - RNA, 19 nt, Human
acacugggacuugcaaaaa

SEQ ID NO: 1337214 - RNA, 18 nt, Human
acacugggacuugcaaaa

SEQ ID NO: 1337215 - RNA, 13 nt, Human
acacugggacuug

SEQ ID NO: 1337216 - RNA, 23 nt, Human
acacuguguaaauacccauaugu

SEQ ID NO: 1337217 - RNA, 17 nt, Human
acacuggggacuuggcc

SEQ ID NO: 1337218 - RNA, 22 nt, Human
acacuggggacuuggccucucu

SEQ ID NO: 1337219 - RNA, 18 nt, Human
acacuggggacuuggccu

SEQ ID NO: 1337220 - RNA, 18 nt, Human
acacuguguacugcaguu

SEQ ID NO: 1337221 - RNA, 16 nt, Human
acagaacaugcuguua

SEQ ID NO: 1337222 - RNA, 21 nt, Human
acagaacaugcuguuauuuag

SEQ ID NO: 1337223 - RNA, 17 nt, Human
acagaaccccuacauga

SEQ ID NO: 1337224 - RNA, 16 nt, Human
acagaacauagacaga

SEQ ID NO: 1337225 - RNA, 18 nt, Human
acagaacucuuucaaaac

SEQ ID NO: 1337226 - RNA, 20 nt, Human
acagaacucuuucaaaaccu

SEQ ID NO: 1337227 - RNA, 14 nt, Human
acagaacuucagaa

SEQ ID NO: 1337228 - RNA, 18 nt, Human
acaauuuaugaauugaau

SEQ ID NO: 1337229 - RNA, 22 nt, Human
acaauuccucuacuaacaauca

SEQ ID NO: 1337230 - RNA, 23 nt, Human
acaauuccucuacuaacaaucag

SEQ ID NO: 1337231 - RNA, 12 nt, Human
acaauucuaaaa

SEQ ID NO: 1337232 - RNA, 14 nt, Human
acaauucuaaaaug

SEQ ID NO: 1337233 - RNA, 17 nt, Human
acaauucuaaaaugauu

SEQ ID NO: 1337234 - RNA, 23 nt, Human
acaauucuaaaaugauuguagua

SEQ ID NO: 1337235 - RNA, 24 nt, Human
acaauucuaaaaugauuguaguaa

SEQ ID NO: 1337236 - RNA, 21 nt, Human
acaauuaggcagacucuuuau

SEQ ID NO: 1337237 - RNA, 16 nt, Human
acaauuuuuuaucaug

SEQ ID NO: 1337238 - RNA, 22 nt, Human
acaauuuuuuaucaugcauguc

SEQ ID NO: 1337239 - RNA, 17 nt, Human
acaauuuuuuuuauuag

SEQ ID NO: 1337240 - RNA, 24 nt, Human
acaauuuuuuuuauuaguauuguu

SEQ ID NO: 1337241 - RNA, 18 nt, Human
acaauuuuuuuuauuagu

SEQ ID NO: 1337242 - RNA, 12 nt, Human
acacggccacau

SEQ ID NO: 1337243 - RNA, 14 nt, Human
acacggccacauca

SEQ ID NO: 1337244 - RNA, 13 nt, Human
acacgggccuguc

SEQ ID NO: 1337245 - RNA, 20 nt, Human
acacggccacaucaaagagg

SEQ ID NO: 1337246 - RNA, 15 nt, Human
acacgggccugucca

SEQ ID NO: 1337247 - RNA, 23 nt, Human
acacggucggggcaucuggccug

SEQ ID NO: 1337248 - RNA, 19 nt, Human
acuaguauuucuaugaaau

SEQ ID NO: 1337249 - RNA, 19 nt, Human
acuauucuugauguaaaau

SEQ ID NO: 1337250 - RNA, 18 nt, Human
acuaguauuucuaugaaa

SEQ ID NO: 1337251 - RNA, 16 nt, Human
acuagggaucccucau

SEQ ID NO: 1337252 - RNA, 18 nt, Human
acuagggaucccucaucu

SEQ ID NO: 1337253 - RNA, 15 nt, Human
acuauugcauuuaua

SEQ ID NO: 1337254 - RNA, 23 nt, Human
acuauucuugauguaaaaucuug

SEQ ID NO: 1337255 - RNA, 20 nt, Human
acuauucuugauguaaaauc

SEQ ID NO: 1337256 - RNA, 22 nt, Human
acuauucuugauguaaaaucuu

SEQ ID NO: 1337257 - RNA, 14 nt, Human
acuauuguuacauu

SEQ ID NO: 1337258 - RNA, 14 nt, Human
acuagggagccaug

SEQ ID NO: 1337259 - RNA, 15 nt, Human
acuagggagccaugu

SEQ ID NO: 1337260 - RNA, 18 nt, Human
acuagggagccauguuuc

SEQ ID NO: 1337261 - RNA, 19 nt, Human
acuagggagccauguuuca

SEQ ID NO: 1337262 - RNA, 22 nt, Human
acuagggagccauguuucacaa

SEQ ID NO: 1337263 - RNA, 19 nt, Human
acuagggagccauuugaga

SEQ ID NO: 1337264 - RNA, 23 nt, Human
acuaggcccccacuugccucuuc

SEQ ID NO: 1337265 - RNA, 23 nt, Human
acuaggccuugcggcuccucagg

SEQ ID NO: 1337266 - RNA, 22 nt, Human
acuaggccuugcggcuccucag

SEQ ID NO: 1337267 - RNA, 14 nt, Human
acuaggcugagcaa

SEQ ID NO: 1337268 - RNA, 23 nt, Human
acuaggcugagcaaucugacccu

SEQ ID NO: 1337269 - RNA, 19 nt, Human
acuaaugccuuacucuucu

SEQ ID NO: 1337270 - RNA, 18 nt, Human
acuaaugaaaacagaaug

SEQ ID NO: 1337271 - RNA, 17 nt, Human
acgcacggcagccacag

SEQ ID NO: 1337272 - RNA, 17 nt, Human
acgcaccugccucagga

SEQ ID NO: 1337273 - RNA, 15 nt, Human
acgcacggcagccac

SEQ ID NO: 1337274 - RNA, 23 nt, Human
acgcacugagcaacgcuauucca

SEQ ID NO: 1337275 - RNA, 16 nt, Human
acggaaggguaaacaa

SEQ ID NO: 1337276 - RNA, 22 nt, Human
acggaaggguaaacaauauagu

SEQ ID NO: 1337277 - RNA, 19 nt, Human
acggacgaaccuugaaaac

SEQ ID NO: 1337278 - RNA, 17 nt, Human
acggacagagaccaaga

SEQ ID NO: 1337279 - RNA, 21 nt, Human
acggacaguuccagaagugug

SEQ ID NO: 1337280 - RNA, 18 nt, Human
acgcuggcaacacagagg

SEQ ID NO: 1337281 - RNA, 22 nt, Human
acuaaccuuccaaaaauuacuu

SEQ ID NO: 1337282 - RNA, 17 nt, Human
acguggcucagccagca

SEQ ID NO: 1337283 - RNA, 19 nt, Human
acguggcucagccagcacu

SEQ ID NO: 1337284 - RNA, 20 nt, Human
acguggccaagagaaacuuc

SEQ ID NO: 1337285 - RNA, 22 nt, Human
acuaacuaaaacaaagccacuu

SEQ ID NO: 1337286 - RNA, 20 nt, Human
acuaacuagacaccaaaguu

SEQ ID NO: 1337287 - RNA, 22 nt, Human
acuaacuagacaccaaaguucu

SEQ ID NO: 1337288 - RNA, 15 nt, Human
acuaacuaaaacaaa

SEQ ID NO: 1337289 - RNA, 14 nt, Human
acuaacuaaaacaa

SEQ ID NO: 1337290 - RNA, 18 nt, Human
acuaacguugagccccug

SEQ ID NO: 1337291 - RNA, 15 nt, Human
acuaaccuugccugg

SEQ ID NO: 1337292 - RNA, 17 nt, Human
acuaaccuugccuggua

SEQ ID NO: 1337293 - RNA, 21 nt, Human
acuaaccuugccugguacagu

SEQ ID NO: 1337294 - RNA, 22 nt, Human
acuaaccuugccugguacagua

SEQ ID NO: 1337295 - RNA, 15 nt, Human
acuaacuaugcaugg

SEQ ID NO: 1337296 - RNA, 23 nt, Human
acuaacuaugcauggugccccag

SEQ ID NO: 1337297 - RNA, 20 nt, Human
acuaacuccuaggaaaauac

SEQ ID NO: 1337298 - RNA, 17 nt, Human
acuaauauauuuaaaaa

SEQ ID NO: 1337299 - RNA, 18 nt, Human
acuaauauauuuaaaaau

SEQ ID NO: 1337300 - RNA, 20 nt, Human
acuaauauauuuaaaaauaa

SEQ ID NO: 1337301 - RNA, 19 nt, Human
acuaauauauuuaaaaaua

SEQ ID NO: 1337302 - RNA, 13 nt, Human
acuaauauuucug

SEQ ID NO: 1337303 - RNA, 14 nt, Human
acuaauauuucugu

SEQ ID NO: 1337304 - RNA, 15 nt, Human
acuaauauuucugua

SEQ ID NO: 1337305 - RNA, 17 nt, Human
acuaauauuucuguaau

SEQ ID NO: 1337306 - RNA, 17 nt, Human
acgucuggguggcccuu

SEQ ID NO: 1337307 - RNA, 23 nt, Human
acggaccaaagggagucugccag

SEQ ID NO: 1337308 - RNA, 18 nt, Human
acggagccacuccucuga

SEQ ID NO: 1337309 - RNA, 19 nt, Human
acggagccacuccucugac

SEQ ID NO: 1337310 - RNA, 20 nt, Human
acggagccacuccucugacu

SEQ ID NO: 1337311 - RNA, 16 nt, Human
acguggccucuugagc

SEQ ID NO: 1337312 - RNA, 14 nt, Human
acguggcucagcca

SEQ ID NO: 1337313 - RNA, 15 nt, Human
accugugagcccagc

SEQ ID NO: 1337314 - RNA, 17 nt, Human
accugugagcccagcug

SEQ ID NO: 1337315 - RNA, 18 nt, Human
accugugagcccagcugg

SEQ ID NO: 1337316 - RNA, 16 nt, Human
accuguguggacagga

SEQ ID NO: 1337317 - RNA, 19 nt, Human
accuguguggacaggacua

SEQ ID NO: 1337318 - RNA, 17 nt, Human
accucugccucagaaaa

SEQ ID NO: 1337319 - RNA, 18 nt, Human
accucugccucagaaaac

SEQ ID NO: 1337320 - RNA, 20 nt, Human
accugucugucugucugucc

SEQ ID NO: 1337321 - RNA, 18 nt, Human
accugucugucugucugu

SEQ ID NO: 1337322 - RNA, 14 nt, Human
accugucugucugu

SEQ ID NO: 1337323 - RNA, 23 nt, Human
accugcccugcccugccaccugu

SEQ ID NO: 1337324 - RNA, 18 nt, Human
accugcccuaccugcccc

SEQ ID NO: 1337325 - RNA, 22 nt, Human
accugcccugcccugccaccug

SEQ ID NO: 1337326 - RNA, 21 nt, Human
accugcccugcccugccaccu

SEQ ID NO: 1337327 - RNA, 20 nt, Human
accugcccugcccugccacc

SEQ ID NO: 1337328 - RNA, 18 nt, Human
accugcccugcccugcca

SEQ ID NO: 1337329 - RNA, 17 nt, Human
accugcccugcccugcc

SEQ ID NO: 1337330 - RNA, 16 nt, Human
accugcccugcccugc

SEQ ID NO: 1337331 - RNA, 13 nt, Human
accugcccugccc

SEQ ID NO: 1337332 - RNA, 12 nt, Human
accugcccugcc

SEQ ID NO: 1337333 - RNA, 23 nt, Human
accugccccuccucucugcccua

SEQ ID NO: 1337334 - RNA, 19 nt, Human
accugcccuaccugcccca

SEQ ID NO: 1337335 - RNA, 13 nt, Human
accugcccaaccu

SEQ ID NO: 1337336 - RNA, 20 nt, Human
accucugccucagaaaacaa

SEQ ID NO: 1337337 - RNA, 23 nt, Human
accggcggaccccagccauccag

SEQ ID NO: 1337338 - RNA, 16 nt, Human
accggccugccaggag

SEQ ID NO: 1337339 - RNA, 14 nt, Human
accggcucucaccu

SEQ ID NO: 1337340 - RNA, 21 nt, Human
accggcucucaccuggcccug

SEQ ID NO: 1337341 - RNA, 13 nt, Human
accggccugccag

SEQ ID NO: 1337342 - RNA, 15 nt, Human
accggccugccagga

SEQ ID NO: 1337343 - RNA, 17 nt, Human
accggccugccaggagg

SEQ ID NO: 1337344 - RNA, 16 nt, Human
accggcucucaccugg

SEQ ID NO: 1337345 - RNA, 14 nt, Human
accgguggggcugg

SEQ ID NO: 1337346 - RNA, 17 nt, Human
acccuguggucuuccuc

SEQ ID NO: 1337347 - RNA, 13 nt, Human
acccuguuccugc

SEQ ID NO: 1337348 - RNA, 14 nt, Human
acccuguuccugcu

SEQ ID NO: 1337349 - RNA, 15 nt, Human
acccuguuccugcug

SEQ ID NO: 1337350 - RNA, 16 nt, Human
acccuguuccugcugc

SEQ ID NO: 1337351 - RNA, 17 nt, Human
acccuguuccugcugcu

SEQ ID NO: 1337352 - RNA, 21 nt, Human
acccuguuccugcugcugucu

SEQ ID NO: 1337353 - RNA, 18 nt, Human
acccuguuccugcugcug

SEQ ID NO: 1337354 - RNA, 23 nt, Human
acccuuaaacaguugcacagcau

SEQ ID NO: 1337355 - RNA, 21 nt, Human
acccuuaaacaguugcacagc

SEQ ID NO: 1337356 - RNA, 13 nt, Human
acccuuacaguag

SEQ ID NO: 1337357 - RNA, 19 nt, Human
acccuuacaguaggagccc

SEQ ID NO: 1337358 - RNA, 20 nt, Human
accccaaccugcucuccucu

SEQ ID NO: 1337359 - RNA, 19 nt, Human
accccaaccugcucuccuc

SEQ ID NO: 1337360 - RNA, 20 nt, Human
accccaauuucggauuuuuu

SEQ ID NO: 1337361 - RNA, 21 nt, Human
accccaauuucggauuuuuuc

SEQ ID NO: 1337362 - RNA, 13 nt, Human
accccaauccucc

SEQ ID NO: 1337363 - RNA, 23 nt, Human
accucagguaaucgaccugccuc

SEQ ID NO: 1337364 - RNA, 15 nt, Human
accucaggugaucca

SEQ ID NO: 1337365 - RNA, 17 nt, Human
accucaguuuuaucauu

SEQ ID NO: 1337366 - RNA, 18 nt, Human
accucaguuuuaucauuu

SEQ ID NO: 1337367 - RNA, 15 nt, Human
accucaucuucuuca

SEQ ID NO: 1337368 - RNA, 22 nt, Human
accucagguaaucgaccugccu

SEQ ID NO: 1337369 - RNA, 20 nt, Human
acuucaaauccuugaagauu

SEQ ID NO: 1337370 - RNA, 19 nt, Human
acuucaagcauggcuauuu

SEQ ID NO: 1337371 - RNA, 23 nt, Human
acuucaagcauggcuauuuuaua

SEQ ID NO: 1337372 - RNA, 18 nt, Human
acuucagcgguuuauaua

SEQ ID NO: 1337373 - RNA, 19 nt, Human
acuucagcgguuuauauaa

SEQ ID NO: 1337374 - RNA, 13 nt, Human
acuucagcucugu

SEQ ID NO: 1337375 - RNA, 22 nt, Human
acuuggcucgaaucucugugcc

SEQ ID NO: 1337376 - RNA, 23 nt, Human
acuuggcucgaaucucugugccu

SEQ ID NO: 1337377 - RNA, 16 nt, Human
acuuggcugcaggaau

SEQ ID NO: 1337378 - RNA, 13 nt, Human
acuuggcuggugu

SEQ ID NO: 1337379 - RNA, 14 nt, Human
acuuggcuggugug

SEQ ID NO: 1337380 - RNA, 19 nt, Human
acuuggcuggugugguaca

SEQ ID NO: 1337381 - RNA, 22 nt, Human
acuuggcuggugugguacagag

SEQ ID NO: 1337382 - RNA, 23 nt, Human
acuuggcuggugugguacagaga

SEQ ID NO: 1337383 - RNA, 12 nt, Human
acuucugccugg

SEQ ID NO: 1337384 - RNA, 13 nt, Human
acuucugccugga

SEQ ID NO: 1337385 - RNA, 16 nt, Human
acuucugccuggagac

SEQ ID NO: 1337386 - RNA, 15 nt, Human
acuucuguuuuacca

SEQ ID NO: 1337387 - RNA, 22 nt, Human
acuuaaaauauuccugcauuug

SEQ ID NO: 1337388 - RNA, 19 nt, Human
acuuaaacuugcaucacuu

SEQ ID NO: 1337389 - RNA, 16 nt, Human
acuuaaagcuuucaga

SEQ ID NO: 1337390 - RNA, 22 nt, Human
acuuaaagcuuucagaauaugu

SEQ ID NO: 1337391 - RNA, 14 nt, Human
acuuaaaaaugguu

SEQ ID NO: 1337392 - RNA, 13 nt, Human
acuuaaaaauggu

SEQ ID NO: 1337393 - RNA, 21 nt, Human
acuuaaaaaugguuuaaaugg

SEQ ID NO: 1337394 - RNA, 21 nt, Human
acuggaccacugggcaaugau

SEQ ID NO: 1337395 - RNA, 21 nt, Human
acuggaaucagcucaggacug

SEQ ID NO: 1337396 - RNA, 16 nt, Human
acuggaauccuuucag

SEQ ID NO: 1337397 - RNA, 17 nt, Human
acuggaauccuuucagc

SEQ ID NO: 1337398 - RNA, 12 nt, Human
acuggacagcuu

SEQ ID NO: 1337399 - RNA, 13 nt, Human
acuggacagcuug

SEQ ID NO: 1337400 - RNA, 14 nt, Human
acuggacagcuugu

SEQ ID NO: 1337401 - RNA, 15 nt, Human
acuggacagcuugug

SEQ ID NO: 1337402 - RNA, 16 nt, Human
acuggaccacugggca

SEQ ID NO: 1337403 - RNA, 20 nt, Human
acuggaccacugggcaauga

SEQ ID NO: 1337404 - RNA, 22 nt, Human
acuugggaggcugagaugggag

SEQ ID NO: 1337405 - RNA, 13 nt, Human
acuugggaauaua

SEQ ID NO: 1337406 - RNA, 20 nt, Human
acuugggagaccuguaauca

SEQ ID NO: 1337407 - RNA, 17 nt, Human
acuuuaugcuaagugaa

SEQ ID NO: 1337408 - RNA, 12 nt, Human
acuuuaugcuaa

SEQ ID NO: 1337409 - RNA, 13 nt, Human
acuuuauguaguu

SEQ ID NO: 1337410 - RNA, 22 nt, Human
acuuucaggccacauggcuaaa

SEQ ID NO: 1337411 - RNA, 11 nt, Human
acuuucagcug

SEQ ID NO: 1337412 - RNA, 13 nt, Human
acuuucagcuguc

SEQ ID NO: 1337413 - RNA, 15 nt, Human
acuuucagcugucuu

SEQ ID NO: 1337414 - RNA, 22 nt, Human
acuuucagcugucuuuuggagg

SEQ ID NO: 1337415 - RNA, 14 nt, Human
acuuuccauuacaa

SEQ ID NO: 1337416 - RNA, 20 nt, Human
acuuucaaucuucaauccuu

SEQ ID NO: 1337417 - RNA, 11 nt, Human
acuuucaaucu

SEQ ID NO: 1337418 - RNA, 19 nt, Human
acugauucacaucucauuu

SEQ ID NO: 1337419 - RNA, 20 nt, Human
acugauucacaucucauuuu

SEQ ID NO: 1337420 - RNA, 14 nt, Human
acugauucaauuug

SEQ ID NO: 1337421 - RNA, 12 nt, Human
acugauuucaga

SEQ ID NO: 1337422 - RNA, 15 nt, Human
acugauuucagagug

SEQ ID NO: 1337423 - RNA, 22 nt, Human
acugcaaaaagaaaaucuuuau

SEQ ID NO: 1337424 - RNA, 18 nt, Human
acugcaaaucaggcuuuu

SEQ ID NO: 1337425 - RNA, 20 nt, Human
acugcaaaucaggcuuuugu

SEQ ID NO: 1337426 - RNA, 21 nt, Human
acugcaaaucaggcuuuuguu

SEQ ID NO: 1337427 - RNA, 22 nt, Human
acugaauaccacucuguaauug

SEQ ID NO: 1337428 - RNA, 21 nt, Human
acugaauaccacucuguaauu

SEQ ID NO: 1337429 - RNA, 13 nt, Human
acugaccagccuc

SEQ ID NO: 1337430 - RNA, 14 nt, Human
acugaccagcagcu

SEQ ID NO: 1337431 - RNA, 15 nt, Human
acugaccagcagcuu

SEQ ID NO: 1337432 - RNA, 15 nt, Human
acugaccagccucca

SEQ ID NO: 1337433 - RNA, 20 nt, Human
acugaccagccuccaugcug

SEQ ID NO: 1337434 - RNA, 12 nt, Human
acugaccagaac

SEQ ID NO: 1337435 - RNA, 14 nt, Human
acugaccagaacua

SEQ ID NO: 1337436 - RNA, 23 nt, Human
acugaccagccuccaugcugccu

SEQ ID NO: 1337437 - RNA, 11 nt, Human
acugaugcugc

SEQ ID NO: 1337438 - RNA, 12 nt, Human
acugaugcugcc

SEQ ID NO: 1337439 - RNA, 14 nt, Human
acugaugcugcccc

SEQ ID NO: 1337440 - RNA, 15 nt, Human
acugaugcugccccu

SEQ ID NO: 1337441 - RNA, 19 nt, Human
acugaugcugccccucauc

SEQ ID NO: 1337442 - RNA, 20 nt, Human
acugaugcugccccucaucu

SEQ ID NO: 1337443 - RNA, 15 nt, Human
acugaugcuuagaug

SEQ ID NO: 1337444 - RNA, 19 nt, Human
acucuguucauuccuccag

SEQ ID NO: 1337445 - RNA, 18 nt, Human
acucuguucauuccucca

SEQ ID NO: 1337446 - RNA, 16 nt, Human
acucuguucauuccuc

SEQ ID NO: 1337447 - RNA, 15 nt, Human
acucuguucauuccu

SEQ ID NO: 1337448 - RNA, 19 nt, Human
acucuagaguccaagguuu

SEQ ID NO: 1337449 - RNA, 13 nt, Human
acucuagauucca

SEQ ID NO: 1337450 - RNA, 14 nt, Human
acucuagauuccau

SEQ ID NO: 1337451 - RNA, 14 nt, Human
acucuuaagaagac

SEQ ID NO: 1337452 - RNA, 15 nt, Human
acucuuaagaagacu

SEQ ID NO: 1337453 - RNA, 20 nt, Human
acucuguucauuccuccagg

SEQ ID NO: 1337454 - RNA, 20 nt, Human
acucuuaagaagacugcauu

SEQ ID NO: 1337455 - RNA, 22 nt, Human
acugaauaaauuguacagccgg

SEQ ID NO: 1337456 - RNA, 23 nt, Human
acugaauaaauuguacagccggc

SEQ ID NO: 1337457 - RNA, 13 nt, Human
acugaauaccacu

SEQ ID NO: 1337458 - RNA, 14 nt, Human
acugaauaccacuc

SEQ ID NO: 1337459 - RNA, 17 nt, Human
acugaauaccacucugu

SEQ ID NO: 1337460 - RNA, 18 nt, Human
acugaauaccacucugua

SEQ ID NO: 1337461 - RNA, 19 nt, Human
acugaauaccacucuguaa

SEQ ID NO: 1337462 - RNA, 20 nt, Human
acugaauaccacucuguaau

SEQ ID NO: 1337463 - RNA, 14 nt, Human
acucuagaguccaa

SEQ ID NO: 1337464 - RNA, 20 nt, Human
acucuagaguccaagguuua

SEQ ID NO: 1337465 - RNA, 21 nt, Human
acucuagaugaaguuuuacau

SEQ ID NO: 1337466 - RNA, 22 nt, Human
acucuagaugaaguuuuacauu

SEQ ID NO: 1337467 - RNA, 20 nt, Human
acucuacuuagcaugucccu

SEQ ID NO: 1337468 - RNA, 19 nt, Human
acucuacuuaauccaaugg

SEQ ID NO: 1337469 - RNA, 21 nt, Human
acucuacuuagcaugucccua

SEQ ID NO: 1337470 - RNA, 21 nt, Human
acucuacuuaauccaaugggu

SEQ ID NO: 1337471 - RNA, 17 nt, Human
acucugucucaguccau

SEQ ID NO: 1337472 - RNA, 15 nt, Human
acucugucucagucc

SEQ ID NO: 1337473 - RNA, 12 nt, Human
acuauuuucaga

SEQ ID NO: 1337474 - RNA, 22 nt, Human
acuauuuucagaugugaaccau

SEQ ID NO: 1337475 - RNA, 18 nt, Human
acuauuugaugagucuua

SEQ ID NO: 1337476 - RNA, 13 nt, Human
acucuaaagcaaa

SEQ ID NO: 1337477 - RNA, 14 nt, Human
acucuaaagcaaau

SEQ ID NO: 1337478 - RNA, 18 nt, Human
acucuaaagcaaauuuau

SEQ ID NO: 1337479 - RNA, 14 nt, Human
acucuaaagucugu

SEQ ID NO: 1337480 - RNA, 13 nt, Human
acucuaagaaaga

SEQ ID NO: 1337481 - RNA, 14 nt, Human
acucuaagaaagaa

SEQ ID NO: 1337482 - RNA, 15 nt, Human
acucuaagaaagaac

SEQ ID NO: 1337483 - RNA, 12 nt, Human
acucuaagaucu

SEQ ID NO: 1337484 - RNA, 13 nt, Human
acucuaagaucuu

SEQ ID NO: 1337485 - RNA, 17 nt, Human
acucuaagaucuuagau

SEQ ID NO: 1337486 - RNA, 20 nt, Human
acucuaagaucuuagauucu

SEQ ID NO: 1337487 - RNA, 21 nt, Human
acucuaagaucuuagauucuc

SEQ ID NO: 1337488 - RNA, 13 nt, Human
acugccauaugau

SEQ ID NO: 1337489 - RNA, 19 nt, Human
acugccauaugauuuacau

SEQ ID NO: 1337490 - RNA, 16 nt, Human
acugccauauuaaauu

SEQ ID NO: 1337491 - RNA, 21 nt, Human
acugccauauuaaauuuuuug

SEQ ID NO: 1337492 - RNA, 18 nt, Human
acugccagucccccugcc

SEQ ID NO: 1337493 - RNA, 13 nt, Human
acugccaggcucu

SEQ ID NO: 1337494 - RNA, 14 nt, Human
acugccaggcucuc

SEQ ID NO: 1337495 - RNA, 17 nt, Human
acugccaggcucucuuu

SEQ ID NO: 1337496 - RNA, 18 nt, Human
acugccaggcucucuuug

SEQ ID NO: 1337497 - RNA, 19 nt, Human
acugccagucccccugccc

SEQ ID NO: 1337498 - RNA, 18 nt, Human
acuggaaggggaagggac

SEQ ID NO: 1337499 - RNA, 13 nt, Human
aagagaaggagca

SEQ ID NO: 1337500 - RNA, 13 nt, Human
aagagaaguagaa

SEQ ID NO: 1337501 - RNA, 21 nt, Human
aagagaaguuguaaaguaugu

SEQ ID NO: 1337502 - RNA, 23 nt, Human
aagagaaugcccuucuccuuauu

SEQ ID NO: 1337503 - RNA, 15 nt, Human
aagacuuuuaugaua

SEQ ID NO: 1337504 - RNA, 15 nt, Human
aagagaacuuccaga

SEQ ID NO: 1337505 - RNA, 20 nt, Human
aagagaacccacgaacauuc

SEQ ID NO: 1337506 - RNA, 22 nt, Human
aagagaaugcccuucuccuuau

SEQ ID NO: 1337507 - RNA, 19 nt, Human
aagagacaaacaccuccca

SEQ ID NO: 1337508 - RNA, 21 nt, Human
aagagacaaacaccucccagg

SEQ ID NO: 1337509 - RNA, 15 nt, Human
aagagacagcccagg

SEQ ID NO: 1337510 - RNA, 16 nt, Human
aagagacagcccagga

SEQ ID NO: 1337511 - RNA, 18 nt, Human
aagagagccugcaggauc

SEQ ID NO: 1337512 - RNA, 19 nt, Human
aacuguuguagaagacaaa

SEQ ID NO: 1337513 - RNA, 18 nt, Human
aacuguuguagaagacaa

SEQ ID NO: 1337514 - RNA, 19 nt, Human
aacuguuggaauggauuuu

SEQ ID NO: 1337515 - RNA, 19 nt, Human
aacuuaccugggcauucuu

SEQ ID NO: 1337516 - RNA, 21 nt, Human
aacuuaccaggcaccaaaaga

SEQ ID NO: 1337517 - RNA, 16 nt, Human
aacuuagauuuuacau

SEQ ID NO: 1337518 - RNA, 19 nt, Human
aacuuagauuuuacaugaa

SEQ ID NO: 1337519 - RNA, 22 nt, Human
aagacagcuucucauccugcag

SEQ ID NO: 1337520 - RNA, 15 nt, Human
aagacagcagaacug

SEQ ID NO: 1337521 - RNA, 23 nt, Human
aagacagugaaagaaaauaacaa

SEQ ID NO: 1337522 - RNA, 14 nt, Human
aagacaguggcccc

SEQ ID NO: 1337523 - RNA, 12 nt, Human
aagacaugucug

SEQ ID NO: 1337524 - RNA, 13 nt, Human
aagacaugucugu

SEQ ID NO: 1337525 - RNA, 16 nt, Human
aagacauucaggacug

SEQ ID NO: 1337526 - RNA, 16 nt, Human
aagacaugucuguucu

SEQ ID NO: 1337527 - RNA, 17 nt, Human
aagacaugucuguucua

SEQ ID NO: 1337528 - RNA, 19 nt, Human
aagacaugucuguucuaca

SEQ ID NO: 1337529 - RNA, 18 nt, Human
aagacauucuuauauuuc

SEQ ID NO: 1337530 - RNA, 22 nt, Human
aagacauucuuauauuucauau

SEQ ID NO: 1337531 - RNA, 16 nt, Human
aagauacugaaauaaa

SEQ ID NO: 1337532 - RNA, 20 nt, Human
aagauacugaaauaaacguc

SEQ ID NO: 1337533 - RNA, 14 nt, Human
aagauacuuaagug

SEQ ID NO: 1337534 - RNA, 17 nt, Human
aagauacuuaagugcug

SEQ ID NO: 1337535 - RNA, 17 nt, Human
aagauucaaucccagga

SEQ ID NO: 1337536 - RNA, 15 nt, Human
aagauuauagauucu

SEQ ID NO: 1337537 - RNA, 16 nt, Human
aagauuauagauucua

SEQ ID NO: 1337538 - RNA, 17 nt, Human
aagauuauagauucuaa

SEQ ID NO: 1337539 - RNA, 20 nt, Human
aagauuauagauucuaaaga

SEQ ID NO: 1337540 - RNA, 14 nt, Human
aagauuauagauuc

SEQ ID NO: 1337541 - RNA, 20 nt, Human
aagauucaaugccccugaau

SEQ ID NO: 1337542 - RNA, 21 nt, Human
aagauucaaugccccugaauu

SEQ ID NO: 1337543 - RNA, 15 nt, Human
aagauucagcuagug

SEQ ID NO: 1337544 - RNA, 14 nt, Human
aagauucagcuagu

SEQ ID NO: 1337545 - RNA, 13 nt, Human
aagauucagcuag

SEQ ID NO: 1337546 - RNA, 21 nt, Human
aagauuauagauucuaaagau

SEQ ID NO: 1337547 - RNA, 19 nt, Human
aagauucucuauguaucaa

SEQ ID NO: 1337548 - RNA, 20 nt, Human
aagauucucuauguaucaaa

SEQ ID NO: 1337549 - RNA, 16 nt, Human
aagauucuuucccaau

SEQ ID NO: 1337550 - RNA, 13 nt, Human
aagauucuuuccc

SEQ ID NO: 1337551 - RNA, 19 nt, Human
aagauugagcucucugccc

SEQ ID NO: 1337552 - RNA, 12 nt, Human
aagauugcugaa

SEQ ID NO: 1337553 - RNA, 15 nt, Human
aagauugcugaaauu

SEQ ID NO: 1337554 - RNA, 12 nt, Human
aagcagaaagug

SEQ ID NO: 1337555 - RNA, 13 nt, Human
aagcagaaagugc

SEQ ID NO: 1337556 - RNA, 15 nt, Human
aagcagaaagugccu

SEQ ID NO: 1337557 - RNA, 17 nt, Human
aagcagaaagugccuuu

SEQ ID NO: 1337558 - RNA, 18 nt, Human
aagcagaaagugccuuuc

SEQ ID NO: 1337559 - RNA, 19 nt, Human
aagcagaaagugccuuuca

SEQ ID NO: 1337560 - RNA, 20 nt, Human
aagcagaaagugccuuucag

SEQ ID NO: 1337561 - RNA, 23 nt, Human
aagcagaaagugccuuucaggau

SEQ ID NO: 1337562 - RNA, 15 nt, Human
aagcagaaauccaag

SEQ ID NO: 1337563 - RNA, 16 nt, Human
aagcagaaauccaagc

SEQ ID NO: 1337564 - RNA, 19 nt, Human
aagcagguggaucuauuuc

SEQ ID NO: 1337565 - RNA, 20 nt, Human
aagcagguggaucuauuuca

SEQ ID NO: 1337566 - RNA, 22 nt, Human
aagcagguggaucuauuucaug

SEQ ID NO: 1337567 - RNA, 14 nt, Human
aagcagguggaucu

SEQ ID NO: 1337568 - RNA, 15 nt, Human
aagcagggacuugaa

SEQ ID NO: 1337569 - RNA, 12 nt, Human
aaggucugcuuu

SEQ ID NO: 1337570 - RNA, 13 nt, Human
aaggucuuugguu

SEQ ID NO: 1337571 - RNA, 19 nt, Human
aaggucuuugguucagcua

SEQ ID NO: 1337572 - RNA, 17 nt, Human
aaggugaaacauuuucu

SEQ ID NO: 1337573 - RNA, 19 nt, Human
aaggugaaacauuuucucc

SEQ ID NO: 1337574 - RNA, 22 nt, Human
aaggugaaacauuuucucccug

SEQ ID NO: 1337575 - RNA, 15 nt, Human
aaggugaauagccau

SEQ ID NO: 1337576 - RNA, 19 nt, Human
aaggugacaucggaaaaau

SEQ ID NO: 1337577 - RNA, 20 nt, Human
aaggugacaucggaaaaaua

SEQ ID NO: 1337578 - RNA, 13 nt, Human
aagguggggugga

SEQ ID NO: 1337579 - RNA, 15 nt, Human
aaggugguguuucug

SEQ ID NO: 1337580 - RNA, 20 nt, Human
aagguguagccacaccagga

SEQ ID NO: 1337581 - RNA, 15 nt, Human
aagguguccuacaga

SEQ ID NO: 1337582 - RNA, 16 nt, Human
aagguguccuacagaa

SEQ ID NO: 1337583 - RNA, 18 nt, Human
aagguguccuacagaaaa

SEQ ID NO: 1337584 - RNA, 20 nt, Human
aagguguccuacagaaaaac

SEQ ID NO: 1337585 - RNA, 12 nt, Human
aaguagaggagg

SEQ ID NO: 1337586 - RNA, 19 nt, Human
aaguagaugauaaaggcca

SEQ ID NO: 1337587 - RNA, 15 nt, Human
aaguagaugcauuug

SEQ ID NO: 1337588 - RNA, 15 nt, Human
aaggugugagacugg

SEQ ID NO: 1337589 - RNA, 18 nt, Human
aagguuagagaauaaauu

SEQ ID NO: 1337590 - RNA, 15 nt, Human
aagguuaucagugcu

SEQ ID NO: 1337591 - RNA, 18 nt, Human
aagguuaucagugcuucc

SEQ ID NO: 1337592 - RNA, 17 nt, Human
aagguucccguugcauu

SEQ ID NO: 1337593 - RNA, 23 nt, Human
aagguuccgcuuggagcagaggg

SEQ ID NO: 1337594 - RNA, 11 nt, Human
aagguucuaag

SEQ ID NO: 1337595 - RNA, 13 nt, Human
aagguucuaaggc

SEQ ID NO: 1337596 - RNA, 14 nt, Human
aagguucuaaggcc

SEQ ID NO: 1337597 - RNA, 12 nt, Human
aagguucuaggu

SEQ ID NO: 1337598 - RNA, 13 nt, Human
aagguucuagguu

SEQ ID NO: 1337599 - RNA, 21 nt, Human
aagguucucagguguugccaa

SEQ ID NO: 1337600 - RNA, 17 nt, Human
aagggacugagaaauuu

SEQ ID NO: 1337601 - RNA, 15 nt, Human
aagggacugagaaau

SEQ ID NO: 1337602 - RNA, 21 nt, Human
aagggacugagagaugcagaa

SEQ ID NO: 1337603 - RNA, 12 nt, Human
aagggagguggg

SEQ ID NO: 1337604 - RNA, 17 nt, Human
aagggaggugggccgug

SEQ ID NO: 1337605 - RNA, 15 nt, Human
aagggagucugccag

SEQ ID NO: 1337606 - RNA, 16 nt, Human
aagggagucugccagg

SEQ ID NO: 1337607 - RNA, 13 nt, Human
aagggauccugcc

SEQ ID NO: 1337608 - RNA, 16 nt, Human
aagggauccugccugc

SEQ ID NO: 1337609 - RNA, 20 nt, Human
aagggcagcuuugcucauau

SEQ ID NO: 1337610 - RNA, 19 nt, Human
aagggcagcuuugcucaua

SEQ ID NO: 1337611 - RNA, 18 nt, Human
aagggcaaauuggagaaa

SEQ ID NO: 1337612 - RNA, 22 nt, Human
aagggcaacagaucaguaaaga

SEQ ID NO: 1337613 - RNA, 20 nt, Human
aagggcaacagaucaguaaa

SEQ ID NO: 1337614 - RNA, 16 nt, Human
aagggauggacaucuu

SEQ ID NO: 1337615 - RNA, 17 nt, Human
aagggauggacaucuug

SEQ ID NO: 1337616 - RNA, 17 nt, Human
aagcuggagugcagugg

SEQ ID NO: 1337617 - RNA, 21 nt, Human
aagcugcugagaaucuagccu

SEQ ID NO: 1337618 - RNA, 15 nt, Human
aagcugcccugccca

SEQ ID NO: 1337619 - RNA, 14 nt, Human
aaggaauuucuuaa

SEQ ID NO: 1337620 - RNA, 18 nt, Human
aagcugcaucuagaggcu

SEQ ID NO: 1337621 - RNA, 23 nt, Human
aaggcagccgugggccccacccu

SEQ ID NO: 1337622 - RNA, 19 nt, Human
aaggcagaggccugggcug

SEQ ID NO: 1337623 - RNA, 14 nt, Human
aaggcagcaaggcc

SEQ ID NO: 1337624 - RNA, 19 nt, Human
aaggcagcaaggcccgagc

SEQ ID NO: 1337625 - RNA, 16 nt, Human
aaggcagcaaggcccg

SEQ ID NO: 1337626 - RNA, 19 nt, Human
aaggcagccgugggcccca

SEQ ID NO: 1337627 - RNA, 16 nt, Human
aaggcacuugaggggg

SEQ ID NO: 1337628 - RNA, 14 nt, Human
aaggcagaggccug

SEQ ID NO: 1337629 - RNA, 15 nt, Human
aaggcagaggccugg

SEQ ID NO: 1337630 - RNA, 16 nt, Human
aaggcagaggccuggg

SEQ ID NO: 1337631 - RNA, 17 nt, Human
aaggcagaggccugggc

SEQ ID NO: 1337632 - RNA, 18 nt, Human
aaggcagaggccugggcu

SEQ ID NO: 1337633 - RNA, 14 nt, Human
aaggcaaaauugca

SEQ ID NO: 1337634 - RNA, 15 nt, Human
aaggcaaaauugcaa

SEQ ID NO: 1337635 - RNA, 19 nt, Human
aaggcaaaauugcaaaucu

SEQ ID NO: 1337636 - RNA, 18 nt, Human
aaggacuaauagaaaagu

SEQ ID NO: 1337637 - RNA, 15 nt, Human
aaggcaaacccauca

SEQ ID NO: 1337638 - RNA, 20 nt, Human
aaggcaaacccaucaacaaa

SEQ ID NO: 1337639 - RNA, 20 nt, Human
aaggcaaagcacgaaauguu

SEQ ID NO: 1337640 - RNA, 15 nt, Human
aaggcacucuagauu

SEQ ID NO: 1337641 - RNA, 16 nt, Human
aaggcacucuagauuc

SEQ ID NO: 1337642 - RNA, 19 nt, Human
aaggcacucuagauuccau

SEQ ID NO: 1337643 - RNA, 12 nt, Human
aaggaauuuuau

SEQ ID NO: 1337644 - RNA, 16 nt, Human
aaggaauuucuuaacu

SEQ ID NO: 1337645 - RNA, 17 nt, Human
aaggaauuucuuaacuu

SEQ ID NO: 1337646 - RNA, 19 nt, Human
aaggaauuucuuaacuucu

SEQ ID NO: 1337647 - RNA, 20 nt, Human
aaggaauuucuuaacuucuu

SEQ ID NO: 1337648 - RNA, 22 nt, Human
aaggacccggaggggccuggca

SEQ ID NO: 1337649 - RNA, 23 nt, Human
aaggaauuucuuaacuucuugcu

SEQ ID NO: 1337650 - RNA, 14 nt, Human
aaggacccugugag

SEQ ID NO: 1337651 - RNA, 12 nt, Human
aaggaccuaaaa

SEQ ID NO: 1337652 - RNA, 18 nt, Human
aaggaccugaaauuccaa

SEQ ID NO: 1337653 - RNA, 19 nt, Human
aaggaccugaaauuccaaa

SEQ ID NO: 1337654 - RNA, 13 nt, Human
aaggacuaggguc

SEQ ID NO: 1337655 - RNA, 14 nt, Human
aaggacgcacugag

SEQ ID NO: 1337656 - RNA, 15 nt, Human
aaggacuaauagaaa

SEQ ID NO: 1337657 - RNA, 15 nt, Human
aaggacuaggguccu

SEQ ID NO: 1337658 - RNA, 19 nt, Human
aaggacuaauagaaaagua

SEQ ID NO: 1337659 - RNA, 12 nt, Human
aaggcaaaauug

SEQ ID NO: 1337660 - RNA, 23 nt, Human
aagccagcaccggaccagccugg

SEQ ID NO: 1337661 - RNA, 17 nt, Human
aagccagcaccggacca

SEQ ID NO: 1337662 - RNA, 22 nt, Human
aagccagcaccggaccagccug

SEQ ID NO: 1337663 - RNA, 23 nt, Human
aagccagauuuuuuaaaauuuau

SEQ ID NO: 1337664 - RNA, 18 nt, Human
aagcagguucccaagcuc

SEQ ID NO: 1337665 - RNA, 19 nt, Human
aagcagguucccaagcuca

SEQ ID NO: 1337666 - RNA, 14 nt, Human
aauaauguuucaaa

SEQ ID NO: 1337667 - RNA, 19 nt, Human
aauaauguuucaaacauau

SEQ ID NO: 1337668 - RNA, 12 nt, Human
aauaauguuuca

SEQ ID NO: 1337669 - RNA, 15 nt, Human
aauaauauauuuucu

SEQ ID NO: 1337670 - RNA, 17 nt, Human
aauaauauauuuucugu

SEQ ID NO: 1337671 - RNA, 19 nt, Human
aauaauauauuuucuguuu

SEQ ID NO: 1337672 - RNA, 17 nt, Human
aauaauacauuauauuu

SEQ ID NO: 1337673 - RNA, 18 nt, Human
aauaauaccuaagccuuc

SEQ ID NO: 1337674 - RNA, 16 nt, Human
aauaauacugcugaga

SEQ ID NO: 1337675 - RNA, 17 nt, Human
aauaauauauuuuaaau

SEQ ID NO: 1337676 - RNA, 12 nt, Human
aauaaaauuuuu

SEQ ID NO: 1337677 - RNA, 17 nt, Human
aauaaaauuuguugcau

SEQ ID NO: 1337678 - RNA, 16 nt, Human
aauaaaauuuguugca

SEQ ID NO: 1337679 - RNA, 13 nt, Human
aauaaacaaauaa

SEQ ID NO: 1337680 - RNA, 18 nt, Human
aaguugauggugaugaaa

SEQ ID NO: 1337681 - RNA, 14 nt, Human
aaguugauuagaaa

SEQ ID NO: 1337682 - RNA, 14 nt, Human
aaguugcagcuguu

SEQ ID NO: 1337683 - RNA, 15 nt, Human
aaguugcagcuguuu

SEQ ID NO: 1337684 - RNA, 17 nt, Human
aaguugcagcuguuuug

SEQ ID NO: 1337685 - RNA, 21 nt, Human
aaguugcagcuguuuuguuga

SEQ ID NO: 1337686 - RNA, 19 nt, Human
aaguugcagcuguuuuguu

SEQ ID NO: 1337687 - RNA, 11 nt, Human
aauaaaauuug

SEQ ID NO: 1337688 - RNA, 12 nt, Human
aauaaaauuugu

SEQ ID NO: 1337689 - RNA, 13 nt, Human
aauaaaauuuguu

SEQ ID NO: 1337690 - RNA, 14 nt, Human
aauaaaauuuguug

SEQ ID NO: 1337691 - RNA, 22 nt, Human
aauaaaggacuguaaucuuauu

SEQ ID NO: 1337692 - RNA, 16 nt, Human
aauaaaggaugugauu

SEQ ID NO: 1337693 - RNA, 18 nt, Human
aauaaaggaugugauugu

SEQ ID NO: 1337694 - RNA, 18 nt, Human
aauaaaggacuguaaucu

SEQ ID NO: 1337695 - RNA, 11 nt, Human
aauaaaggacu

SEQ ID NO: 1337696 - RNA, 14 nt, Human
aauaaagcugcuga

SEQ ID NO: 1337697 - RNA, 19 nt, Human
aauaaagcuguguggcagu

SEQ ID NO: 1337698 - RNA, 11 nt, Human
aauaaagcugu

SEQ ID NO: 1337699 - RNA, 15 nt, Human
aauaaacgucuuaaa

SEQ ID NO: 1337700 - RNA, 16 nt, Human
aauaaacgucuuaaau

SEQ ID NO: 1337701 - RNA, 22 nt, Human
aaguugauaugccuuuucccaa

SEQ ID NO: 1337702 - RNA, 19 nt, Human
aaguucuguacucaaaugu

SEQ ID NO: 1337703 - RNA, 15 nt, Human
aaguggggacagagc

SEQ ID NO: 1337704 - RNA, 22 nt, Human
aagugggcuugauucugcagua

SEQ ID NO: 1337705 - RNA, 11 nt, Human
aagugggacag

SEQ ID NO: 1337706 - RNA, 12 nt, Human
aagugggcuuga

SEQ ID NO: 1337707 - RNA, 16 nt, Human
aagugggcuugauucu

SEQ ID NO: 1337708 - RNA, 20 nt, Human
aaguggggcagcagcagugg

SEQ ID NO: 1337709 - RNA, 23 nt, Human
aaguggggcgggcuucauagaga

SEQ ID NO: 1337710 - RNA, 15 nt, Human
aaguggguaccccca

SEQ ID NO: 1337711 - RNA, 19 nt, Human
aaguggguacccccaggac

SEQ ID NO: 1337712 - RNA, 14 nt, Human
aagugcugagauua

SEQ ID NO: 1337713 - RNA, 14 nt, Human
aagugcugcacuca

SEQ ID NO: 1337714 - RNA, 15 nt, Human
aagugcugcacucaa

SEQ ID NO: 1337715 - RNA, 19 nt, Human
aagugcugcacucaaauga

SEQ ID NO: 1337716 - RNA, 15 nt, Human
aagugcuaagguucu

SEQ ID NO: 1337717 - RNA, 16 nt, Human
aagugcuaagguucua

SEQ ID NO: 1337718 - RNA, 17 nt, Human
aagugcuaagguucuaa

SEQ ID NO: 1337719 - RNA, 18 nt, Human
aagugcuaagguucuaag

SEQ ID NO: 1337720 - RNA, 19 nt, Human
aagugcuaagguucuaagg

SEQ ID NO: 1337721 - RNA, 20 nt, Human
aagugcuaagguucuaaggc

SEQ ID NO: 1337722 - RNA, 21 nt, Human
aagugcuaagguucuaaggcc

SEQ ID NO: 1337723 - RNA, 13 nt, Human
aagugcugagauu

SEQ ID NO: 1337724 - RNA, 18 nt, Human
aaguaguuaucauguuag

SEQ ID NO: 1337725 - RNA, 19 nt, Human
aaguaguuaucauguuagu

SEQ ID NO: 1337726 - RNA, 17 nt, Human
aaguaguuaucauguua

SEQ ID NO: 1337727 - RNA, 15 nt, Human
aaguaguuaucaugu

SEQ ID NO: 1337728 - RNA, 13 nt, Human
aaguaguuaucau

SEQ ID NO: 1337729 - RNA, 13 nt, Human
aaguaggaaguaa

SEQ ID NO: 1337730 - RNA, 15 nt, Human
aaguauacauaaguu

SEQ ID NO: 1337731 - RNA, 19 nt, Human
aauacgugggcauucaaau

SEQ ID NO: 1337732 - RNA, 20 nt, Human
aauacgugggcauucaaaug

SEQ ID NO: 1337733 - RNA, 15 nt, Human
aauacuaaggaacca

SEQ ID NO: 1337734 - RNA, 14 nt, Human
aauacuaccuugaa

SEQ ID NO: 1337735 - RNA, 15 nt, Human
aauacuaccuugaaa

SEQ ID NO: 1337736 - RNA, 16 nt, Human
aauacuaccuugaaaa

SEQ ID NO: 1337737 - RNA, 19 nt, Human
aauaccuuagugcaguuau

SEQ ID NO: 1337738 - RNA, 13 nt, Human
aauacuaaugaaa

SEQ ID NO: 1337739 - RNA, 14 nt, Human
aauacuucucauuu

SEQ ID NO: 1337740 - RNA, 16 nt, Human
aauacuucucauuuuu

SEQ ID NO: 1337741 - RNA, 22 nt, Human
aauacuucucauuuuuuaaaaa

SEQ ID NO: 1337742 - RNA, 13 nt, Human
aauacuucuugug

SEQ ID NO: 1337743 - RNA, 14 nt, Human
aauacuucuugugu

SEQ ID NO: 1337744 - RNA, 17 nt, Human
aauacuucuugugugua

SEQ ID NO: 1337745 - RNA, 19 nt, Human
aauacuucuuguguguaug

SEQ ID NO: 1337746 - RNA, 21 nt, Human
aauacuucuuguguguaugca

SEQ ID NO: 1337747 - RNA, 13 nt, Human
aauagaaaauggu

SEQ ID NO: 1337748 - RNA, 14 nt, Human
aauagaaaaugguc

SEQ ID NO: 1337749 - RNA, 15 nt, Human
aauagaaaauggucc

SEQ ID NO: 1337750 - RNA, 22 nt, Human
aauagaaauaaaggaugugauu

SEQ ID NO: 1337751 - RNA, 17 nt, Human
aauagaacaaggcugag

SEQ ID NO: 1337752 - RNA, 13 nt, Human
aauagaacacagu

SEQ ID NO: 1337753 - RNA, 22 nt, Human
aauagaagcuaagguuuagaua

SEQ ID NO: 1337754 - RNA, 14 nt, Human
aauaguuuggauau

SEQ ID NO: 1337755 - RNA, 20 nt, Human
aauaguuuuauuaauaaaca

SEQ ID NO: 1337756 - RNA, 21 nt, Human
aauaguuuuauuaauaaacau

SEQ ID NO: 1337757 - RNA, 22 nt, Human
aauaguuuuauuaauaaacauu

SEQ ID NO: 1337758 - RNA, 14 nt, Human
aauauaaaauauga

SEQ ID NO: 1337759 - RNA, 23 nt, Human
aauauaaaauaugaagacauaaa

SEQ ID NO: 1337760 - RNA, 21 nt, Human
aauaugcuuauauuguucacu

SEQ ID NO: 1337761 - RNA, 23 nt, Human
aauaugcuuaaaauaagcaggug

SEQ ID NO: 1337762 - RNA, 16 nt, Human
aauaugcuuaaaauaa

SEQ ID NO: 1337763 - RNA, 19 nt, Human
aauaugcuuaaaauaagca

SEQ ID NO: 1337764 - RNA, 22 nt, Human
aauaugcuuaaaauaagcaggu

SEQ ID NO: 1337765 - RNA, 16 nt, Human
aauaugcuaauucuca

SEQ ID NO: 1337766 - RNA, 19 nt, Human
aauauacuuuuacaaguaa

SEQ ID NO: 1337767 - RNA, 18 nt, Human
aauauacuuuuacaagua

SEQ ID NO: 1337768 - RNA, 21 nt, Human
aauauagaucaguuauaagua

SEQ ID NO: 1337769 - RNA, 11 nt, Human
aauauaaagac

SEQ ID NO: 1337770 - RNA, 12 nt, Human
aauauaaagacg

SEQ ID NO: 1337771 - RNA, 23 nt, Human
aauauaaagacguuuuauaagca

SEQ ID NO: 1337772 - RNA, 18 nt, Human
aauauaaagacguuuuau

SEQ ID NO: 1337773 - RNA, 15 nt, Human
aauauaaaguuuuau

SEQ ID NO: 1337774 - RNA, 20 nt, Human
aauauaaaguuuuauauauu

SEQ ID NO: 1337775 - RNA, 21 nt, Human
aauauaaaguuuuauauauua

SEQ ID NO: 1337776 - RNA, 22 nt, Human
aauauaaaguuuuauauauuau

SEQ ID NO: 1337777 - RNA, 11 nt, Human
aauauaaaugc

SEQ ID NO: 1337778 - RNA, 12 nt, Human
aauauaaaugca

SEQ ID NO: 1337779 - RNA, 13 nt, Human
aauauaaaugcaa

SEQ ID NO: 1337780 - RNA, 14 nt, Human
aauauaaaugcaaa

SEQ ID NO: 1337781 - RNA, 15 nt, Human
aauauaaaugcaaau

SEQ ID NO: 1337782 - RNA, 16 nt, Human
aauauaaaugcaaaua

SEQ ID NO: 1337783 - RNA, 17 nt, Human
aauauaaaugcaaauaa

SEQ ID NO: 1337784 - RNA, 18 nt, Human
aauauaaaugcaaauaac

SEQ ID NO: 1337785 - RNA, 19 nt, Human
aauauaaaugcaaauaaca

SEQ ID NO: 1337786 - RNA, 20 nt, Human
aauauaaaugcaaauaacaa

SEQ ID NO: 1337787 - RNA, 22 nt, Human
aauauaaaugcaaauaacaaau

SEQ ID NO: 1337788 - RNA, 12 nt, Human
aaucaaaugaau

SEQ ID NO: 1337789 - RNA, 20 nt, Human
aaucaaauuuguaggguuuc

SEQ ID NO: 1337790 - RNA, 19 nt, Human
aaucaaauuuguaggguuu

SEQ ID NO: 1337791 - RNA, 13 nt, Human
aaucauuuuaugu

SEQ ID NO: 1337792 - RNA, 15 nt, Human
aaucauuuguuuaaa

SEQ ID NO: 1337793 - RNA, 13 nt, Human
aaucauuuugcaa

SEQ ID NO: 1337794 - RNA, 17 nt, Human
aaucauuuguuuaaaaa

SEQ ID NO: 1337795 - RNA, 15 nt, Human
aaucauuuuaauuau

SEQ ID NO: 1337796 - RNA, 16 nt, Human
aaucauuuuaauuauu

SEQ ID NO: 1337797 - RNA, 17 nt, Human
aaucauuuuaauuauua

SEQ ID NO: 1337798 - RNA, 19 nt, Human
aaucauuuuaauuauuauu

SEQ ID NO: 1337799 - RNA, 20 nt, Human
aaucauuuuaauuauuauuc

SEQ ID NO: 1337800 - RNA, 22 nt, Human
aaucauuuuaauuauuauucuu

SEQ ID NO: 1337801 - RNA, 20 nt, Human
aauccaaauggcgucuggaa

SEQ ID NO: 1337802 - RNA, 13 nt, Human
aauccaaauggcg

SEQ ID NO: 1337803 - RNA, 22 nt, Human
aauccaagauauuuuaaaaucu

SEQ ID NO: 1337804 - RNA, 15 nt, Human
aauccacauuucuaa

SEQ ID NO: 1337805 - RNA, 16 nt, Human
aauccacauuucuaaa

SEQ ID NO: 1337806 - RNA, 16 nt, Human
aauccauacauuugug

SEQ ID NO: 1337807 - RNA, 17 nt, Human
aauccauacauuugugu

SEQ ID NO: 1337808 - RNA, 23 nt, Human
aaucucgcucugucgcccaggcu

SEQ ID NO: 1337809 - RNA, 18 nt, Human
aaucucccauuuuggaau

SEQ ID NO: 1337810 - RNA, 18 nt, Human
aaucucggcucacugcau

SEQ ID NO: 1337811 - RNA, 19 nt, Human
aauccaugaaagaacuuaa

SEQ ID NO: 1337812 - RNA, 16 nt, Human
aaucucccauuuugga

SEQ ID NO: 1337813 - RNA, 22 nt, Human
aaucucccauuuuggaauuugc

SEQ ID NO: 1337814 - RNA, 15 nt, Human
aaucuggacuccucu

SEQ ID NO: 1337815 - RNA, 16 nt, Human
aaucuggacuccucug

SEQ ID NO: 1337816 - RNA, 15 nt, Human
aaucucuacaaaccc

SEQ ID NO: 1337817 - RNA, 17 nt, Human
aaucuggacuccucugu

SEQ ID NO: 1337818 - RNA, 18 nt, Human
aaucuggacuccucuguc

SEQ ID NO: 1337819 - RNA, 20 nt, Human
aaucuggacuccucugucca

SEQ ID NO: 1337820 - RNA, 14 nt, Human
aaugauaacuggaa

SEQ ID NO: 1337821 - RNA, 17 nt, Human
aaugaacaagagaagca

SEQ ID NO: 1337822 - RNA, 18 nt, Human
aaugaacaagagaagcau

SEQ ID NO: 1337823 - RNA, 22 nt, Human
aaugaacaagagaagcauucuc

SEQ ID NO: 1337824 - RNA, 14 nt, Human
aaugaaauuaacug

SEQ ID NO: 1337825 - RNA, 12 nt, Human
aaugaacaaaug

SEQ ID NO: 1337826 - RNA, 12 nt, Human
aaugaacaagag

SEQ ID NO: 1337827 - RNA, 13 nt, Human
aaugaacaagaga

SEQ ID NO: 1337828 - RNA, 14 nt, Human
aaugaacaagagaa

SEQ ID NO: 1337829 - RNA, 16 nt, Human
aaugaacaagagaagc

SEQ ID NO: 1337830 - RNA, 15 nt, Human
aaugauaacuggaaa

SEQ ID NO: 1337831 - RNA, 16 nt, Human
aaugauaacuggaaac

SEQ ID NO: 1337832 - RNA, 21 nt, Human
aaugauagacaauugagguaa

SEQ ID NO: 1337833 - RNA, 12 nt, Human
aaugaacagaac

SEQ ID NO: 1337834 - RNA, 17 nt, Human
aaugauaacuggaaacu

SEQ ID NO: 1337835 - RNA, 21 nt, Human
aaugaacacucuuuugcuuua

SEQ ID NO: 1337836 - RNA, 15 nt, Human
aaugaacacucuuuu

SEQ ID NO: 1337837 - RNA, 18 nt, Human
aaugaacacucuuuugcu

SEQ ID NO: 1337838 - RNA, 15 nt, Human
aaugauaugcuugua

SEQ ID NO: 1337839 - RNA, 17 nt, Human
aaugauaugcuuguaac

SEQ ID NO: 1337840 - RNA, 23 nt, Human
aaugauguauguugaagccuuug

SEQ ID NO: 1337841 - RNA, 19 nt, Human
aaugauaugcuuguaacua

SEQ ID NO: 1337842 - RNA, 18 nt, Human
aaugauaugcuuguaacu

SEQ ID NO: 1337843 - RNA, 19 nt, Human
aaugauauuguuauauaca

SEQ ID NO: 1337844 - RNA, 14 nt, Human
aaugaacagaacau

SEQ ID NO: 1337845 - RNA, 23 nt, Human
aauggucacguuuggugcuucuc

SEQ ID NO: 1337846 - RNA, 22 nt, Human
aauggucacguuuggugcuucu

SEQ ID NO: 1337847 - RNA, 20 nt, Human
aaugguccaauuaguuuccu

SEQ ID NO: 1337848 - RNA, 14 nt, Human
aaugguccaggaga

SEQ ID NO: 1337849 - RNA, 19 nt, Human
aaugguccaggagaaggcc

SEQ ID NO: 1337850 - RNA, 15 nt, Human
aauggguuacuugau

SEQ ID NO: 1337851 - RNA, 16 nt, Human
aauggguuuuucccug

SEQ ID NO: 1337852 - RNA, 12 nt, Human
aaugguaucuuu

SEQ ID NO: 1337853 - RNA, 22 nt, Human
aauggggccagauccagccugg

SEQ ID NO: 1337854 - RNA, 16 nt, Human
aaugcucuuauuucau

SEQ ID NO: 1337855 - RNA, 14 nt, Human
aaugcucuuauuuc

SEQ ID NO: 1337856 - RNA, 21 nt, Human
aaugggagcugaggccacacu

SEQ ID NO: 1337857 - RNA, 14 nt, Human
aaugggcacuuaaa

SEQ ID NO: 1337858 - RNA, 19 nt, Human
aaugggcacuuaaagcuuu

SEQ ID NO: 1337859 - RNA, 17 nt, Human
aauggggccagauccag

SEQ ID NO: 1337860 - RNA, 21 nt, Human
aaugcgcaggcuggcccugcc

SEQ ID NO: 1337861 - RNA, 15 nt, Human
aaugcgcaggcuggc

SEQ ID NO: 1337862 - RNA, 14 nt, Human
aaugcgcaggcugg

SEQ ID NO: 1337863 - RNA, 22 nt, Human
aaugccugacuagggagccaug

SEQ ID NO: 1337864 - RNA, 17 nt, Human
aaugcgcaggcuggccc

SEQ ID NO: 1337865 - RNA, 18 nt, Human
aaugcgcaggcuggcccu

SEQ ID NO: 1337866 - RNA, 19 nt, Human
aaugcgcaggcuggcccug

SEQ ID NO: 1337867 - RNA, 20 nt, Human
aaugcgcaggcuggcccugc

SEQ ID NO: 1337868 - RNA, 13 nt, Human
aaugcccuucacu

SEQ ID NO: 1337869 - RNA, 17 nt, Human
aaugcccuucacuguca

SEQ ID NO: 1337870 - RNA, 14 nt, Human
aaugcccuucacug

SEQ ID NO: 1337871 - RNA, 15 nt, Human
aaauaaacgucuuaa

SEQ ID NO: 1337872 - RNA, 16 nt, Human
aaauaaacgucuuaaa

SEQ ID NO: 1337873 - RNA, 21 nt, Human
aaauaaaacccguugauuacu

SEQ ID NO: 1337874 - RNA, 18 nt, Human
aaauaaaauuuguugcau

SEQ ID NO: 1337875 - RNA, 19 nt, Human
aaauaaaauuuguugcaua

SEQ ID NO: 1337876 - RNA, 18 nt, Human
aaauaaacaaauaacaau

SEQ ID NO: 1337877 - RNA, 14 nt, Human
aaagugccuuucag

SEQ ID NO: 1337878 - RNA, 15 nt, Human
aaagugccuuucagg

SEQ ID NO: 1337879 - RNA, 16 nt, Human
aaagugccuuucagga

SEQ ID NO: 1337880 - RNA, 17 nt, Human
aaagugccuuucaggau

SEQ ID NO: 1337881 - RNA, 19 nt, Human
aaagugccuuucaggaucu

SEQ ID NO: 1337882 - RNA, 20 nt, Human
aaagugccuuucaggaucua

SEQ ID NO: 1337883 - RNA, 23 nt, Human
aaagugccuuucaggaucuauuu

SEQ ID NO: 1337884 - RNA, 16 nt, Human
aaagugcuaagguucu

SEQ ID NO: 1337885 - RNA, 22 nt, Human
aaagugccuuucaggaucuauu

SEQ ID NO: 1337886 - RNA, 13 nt, Human
aaagugcuaaggu

SEQ ID NO: 1337887 - RNA, 14 nt, Human
aaauaaaaccagcu

SEQ ID NO: 1337888 - RNA, 18 nt, Human
aaagucagauucuugcau

SEQ ID NO: 1337889 - RNA, 15 nt, Human
aaagucauaauugca

SEQ ID NO: 1337890 - RNA, 15 nt, Human
aaagucaggaaucau

SEQ ID NO: 1337891 - RNA, 17 nt, Human
aaagucaauguuuucag

SEQ ID NO: 1337892 - RNA, 18 nt, Human
aaagucaauguuuucagu

SEQ ID NO: 1337893 - RNA, 15 nt, Human
aaaggcuguuaaaua

SEQ ID NO: 1337894 - RNA, 18 nt, Human
aaaggcuguuaaauacag

SEQ ID NO: 1337895 - RNA, 17 nt, Human
aaagucauaauugcauu

SEQ ID NO: 1337896 - RNA, 19 nt, Human
aaagugccauuaacaaaug

SEQ ID NO: 1337897 - RNA, 15 nt, Human
aaagugccaguauuu

SEQ ID NO: 1337898 - RNA, 19 nt, Human
aaagugccaguauuuuaaa

SEQ ID NO: 1337899 - RNA, 20 nt, Human
aaagugccugacacacuaac

SEQ ID NO: 1337900 - RNA, 17 nt, Human
aaauaaacgucuuaaau

SEQ ID NO: 1337901 - RNA, 21 nt, Human
aaauaaauguaucauagaaau

SEQ ID NO: 1337902 - RNA, 16 nt, Human
aaauaaauguaucaua

SEQ ID NO: 1337903 - RNA, 17 nt, Human
aaagcccauucauucca

SEQ ID NO: 1337904 - RNA, 16 nt, Human
aaagcccauucauucc

SEQ ID NO: 1337905 - RNA, 22 nt, Human
aaagcccauaugcuaccaccag

SEQ ID NO: 1337906 - RNA, 22 nt, Human
aaagccaaggagucacugagac

SEQ ID NO: 1337907 - RNA, 15 nt, Human
aaaggcaguuaccau

SEQ ID NO: 1337908 - RNA, 23 nt, Human
aaaggcaguuaccauuaaaccau

SEQ ID NO: 1337909 - RNA, 13 nt, Human
aaaggcaguuuuc

SEQ ID NO: 1337910 - RNA, 14 nt, Human
aaaggcaguuuucu

SEQ ID NO: 1337911 - RNA, 16 nt, Human
aaaggcaguuuucuaa

SEQ ID NO: 1337912 - RNA, 23 nt, Human
aaaggcaguuugcaaaaaauguu

SEQ ID NO: 1337913 - RNA, 14 nt, Human
aaagcccccagagc

SEQ ID NO: 1337914 - RNA, 21 nt, Human
aaagcccccagagcccaggcu

SEQ ID NO: 1337915 - RNA, 22 nt, Human
aaagcccccagagcccaggcuc

SEQ ID NO: 1337916 - RNA, 19 nt, Human
aaaggcuagguacacagcu

SEQ ID NO: 1337917 - RNA, 20 nt, Human
aaaggcuaugauugucuuug

SEQ ID NO: 1337918 - RNA, 21 nt, Human
aaagcauuuuguaauaauaaa

SEQ ID NO: 1337919 - RNA, 15 nt, Human
aaagccaaacauaua

SEQ ID NO: 1337920 - RNA, 13 nt, Human
aaagcauuuugua

SEQ ID NO: 1337921 - RNA, 14 nt, Human
aaagcauuuuguaa

SEQ ID NO: 1337922 - RNA, 15 nt, Human
aaagcauuuuguaau

SEQ ID NO: 1337923 - RNA, 23 nt, Human
aaagcauuuaaccccccuguaca

SEQ ID NO: 1337924 - RNA, 19 nt, Human
aaagaacggaagaagagau

SEQ ID NO: 1337925 - RNA, 23 nt, Human
aaagaacguggucagaguagaac

SEQ ID NO: 1337926 - RNA, 15 nt, Human
aaagaacggaagaag

SEQ ID NO: 1337927 - RNA, 20 nt, Human
aaagaacgcugauuuaaaga

SEQ ID NO: 1337928 - RNA, 23 nt, Human
aaagaaccaacaaccucaacugc

SEQ ID NO: 1337929 - RNA, 13 nt, Human
aaagaaccacuug

SEQ ID NO: 1337930 - RNA, 15 nt, Human
aaagaacgcugauuu

SEQ ID NO: 1337931 - RNA, 18 nt, Human
aaagaacgcugauuuaaa

SEQ ID NO: 1337932 - RNA, 13 nt, Human
aaagaaacauuug

SEQ ID NO: 1337933 - RNA, 12 nt, Human
aaagaaacuuuc

SEQ ID NO: 1337934 - RNA, 15 nt, Human
aaagaagacaaacuu

SEQ ID NO: 1337935 - RNA, 20 nt, Human
aaagaagaaggugggaggau

SEQ ID NO: 1337936 - RNA, 12 nt, Human
aaagaggcugag

SEQ ID NO: 1337937 - RNA, 19 nt, Human
aaagaggcugaggccugga

SEQ ID NO: 1337938 - RNA, 20 nt, Human
aaagaggcugaggccuggac

SEQ ID NO: 1337939 - RNA, 21 nt, Human
aaagaggcugaggccuggacu

SEQ ID NO: 1337940 - RNA, 19 nt, Human
aaagaggcugaggcuggca

SEQ ID NO: 1337941 - RNA, 14 nt, Human
aaagaggcugcccc

SEQ ID NO: 1337942 - RNA, 18 nt, Human
aaagaggcugccccucuc

SEQ ID NO: 1337943 - RNA, 20 nt, Human
aaagaggcugccccucucac

SEQ ID NO: 1337944 - RNA, 19 nt, Human
aaagaaaauuuuuguagua

SEQ ID NO: 1337945 - RNA, 12 nt, Human
aaagaaaauuuu

SEQ ID NO: 1337946 - RNA, 18 nt, Human
aaagaaaaugauacagca

SEQ ID NO: 1337947 - RNA, 13 nt, Human
aaagaaaauuaca

SEQ ID NO: 1337948 - RNA, 22 nt, Human
aaacugauccaguauaagacua

SEQ ID NO: 1337949 - RNA, 22 nt, Human
aaacugaagcagccucucccca

SEQ ID NO: 1337950 - RNA, 13 nt, Human
aaacugagugacu

SEQ ID NO: 1337951 - RNA, 20 nt, Human
aaacucuuuggucguuuuuu

SEQ ID NO: 1337952 - RNA, 21 nt, Human
aaacucuuuggucguuuuuuu

SEQ ID NO: 1337953 - RNA, 13 nt, Human
aaacucuuuuccc

SEQ ID NO: 1337954 - RNA, 18 nt, Human
aaacugaagcagccucuc

SEQ ID NO: 1337955 - RNA, 21 nt, Human
aaacugaagcagccucucccc

SEQ ID NO: 1337956 - RNA, 19 nt, Human
aaacccuugccaugugcua

SEQ ID NO: 1337957 - RNA, 19 nt, Human
aaaccgccagcucuguucu

SEQ ID NO: 1337958 - RNA, 14 nt, Human
aaaccgcuaaaaga

SEQ ID NO: 1337959 - RNA, 15 nt, Human
aaaccgcuaaaagaa

SEQ ID NO: 1337960 - RNA, 16 nt, Human
aaaccgcuaaaagaaa

SEQ ID NO: 1337961 - RNA, 18 nt, Human
aaaccgcuaaaagaaacu

SEQ ID NO: 1337962 - RNA, 23 nt, Human
aaaccgcuaaaagaaacuuucuu

SEQ ID NO: 1337963 - RNA, 21 nt, Human
aaaccgcuaaaagaaacuuuc

SEQ ID NO: 1337964 - RNA, 20 nt, Human
aaaccccaccccaaaauuag

SEQ ID NO: 1337965 - RNA, 20 nt, Human
aaaccccaccuuuauuccuu

SEQ ID NO: 1337966 - RNA, 22 nt, Human
aaacccauauuguaaaacaggu

SEQ ID NO: 1337967 - RNA, 21 nt, Human
aaacccugucucuacuaaaaa

SEQ ID NO: 1337968 - RNA, 15 nt, Human
aaaccccccagauau

SEQ ID NO: 1337969 - RNA, 17 nt, Human
aaacccaguugccaucu

SEQ ID NO: 1337970 - RNA, 18 nt, Human
aaagaggugaccccaggg

SEQ ID NO: 1337971 - RNA, 19 nt, Human
aaagaggugaccccagggc

SEQ ID NO: 1337972 - RNA, 21 nt, Human
aaagaggugaccccagggcac

SEQ ID NO: 1337973 - RNA, 22 nt, Human
aaagaggcugccccucucacca

SEQ ID NO: 1337974 - RNA, 23 nt, Human
aaagaggcugccccucucaccaa

SEQ ID NO: 1337975 - RNA, 18 nt, Human
aaagaggucgcuugggaa

SEQ ID NO: 1337976 - RNA, 21 nt, Human
aaagauaaauuauaucaauuu

SEQ ID NO: 1337977 - RNA, 20 nt, Human
aaagaggugaccccagggca

SEQ ID NO: 1337978 - RNA, 21 nt, Human
aaagauacagaacucuuucaa

SEQ ID NO: 1337979 - RNA, 12 nt, Human
aaacaggaucag

SEQ ID NO: 1337980 - RNA, 16 nt, Human
aaacaggcacugcccu

SEQ ID NO: 1337981 - RNA, 17 nt, Human
aaacagggccacauaga

SEQ ID NO: 1337982 - RNA, 17 nt, Human
aaacaggcacugcccug

SEQ ID NO: 1337983 - RNA, 15 nt, Human
aaacaggcacuuggc

SEQ ID NO: 1337984 - RNA, 23 nt, Human
aaacaggcacuuggcagccuugu

SEQ ID NO: 1337985 - RNA, 12 nt, Human
aaaauugaaugc

SEQ ID NO: 1337986 - RNA, 14 nt, Human
aaaauugaaugcaa

SEQ ID NO: 1337987 - RNA, 14 nt, Human
aaaauucugugccu

SEQ ID NO: 1337988 - RNA, 23 nt, Human
aaaauucugugccuuguuuuuug

SEQ ID NO: 1337989 - RNA, 14 nt, Human
aaaauugaaaugua

SEQ ID NO: 1337990 - RNA, 16 nt, Human
aaaauugaaauguaag

SEQ ID NO: 1337991 - RNA, 17 nt, Human
aaaauugaaauguaagg

SEQ ID NO: 1337992 - RNA, 18 nt, Human
aaaauugaaauguaaggc

SEQ ID NO: 1337993 - RNA, 21 nt, Human
aaaauugaaauguaaggcugu

SEQ ID NO: 1337994 - RNA, 21 nt, Human
aaaauugaaugcaaaccauag

SEQ ID NO: 1337995 - RNA, 13 nt, Human
aaaauucauuuuu

SEQ ID NO: 1337996 - RNA, 13 nt, Human
aaaauuccacuca

SEQ ID NO: 1337997 - RNA, 14 nt, Human
aaaauuccacucaa

SEQ ID NO: 1337998 - RNA, 15 nt, Human
aaaauaaaaaacacu

SEQ ID NO: 1337999 - RNA, 21 nt, Human
aaaauaaaaaagaucccaaau

SEQ ID NO: 1338000 - RNA, 12 nt, Human
aaaaguuuguuu

SEQ ID NO: 1338001 - RNA, 20 nt, Human
aaaaguuuuuuauuaugcau

SEQ ID NO: 1338002 - RNA, 21 nt, Human
aaaauccacuuuaucuugaau

SEQ ID NO: 1338003 - RNA, 20 nt, Human
aaaauaaaaagaucacuuuc

SEQ ID NO: 1338004 - RNA, 16 nt, Human
aaaauaaaaaagaucc

SEQ ID NO: 1338005 - RNA, 13 nt, Human
aaaaucaaauggu

SEQ ID NO: 1338006 - RNA, 13 nt, Human
aaaauuaucuaua

SEQ ID NO: 1338007 - RNA, 24 nt, Human
aaaauuauagcucuaauguuugca

SEQ ID NO: 1338008 - RNA, 19 nt, Human
aaaauuauagcucuaaugu

SEQ ID NO: 1338009 - RNA, 15 nt, Human
aaaauuauagcucua

SEQ ID NO: 1338010 - RNA, 16 nt, Human
aaaauuauagaaguuu

SEQ ID NO: 1338011 - RNA, 13 nt, Human
aaaauuauuuaaa

SEQ ID NO: 1338012 - RNA, 13 nt, Human
aaaauuauuugca

SEQ ID NO: 1338013 - RNA, 14 nt, Human
aaaauuauuugcau

SEQ ID NO: 1338014 - RNA, 14 nt, Human
aaaauuacaacuaa

SEQ ID NO: 1338015 - RNA, 23 nt, Human
aaaauuacuuaguauugcaaagu

SEQ ID NO: 1338016 - RNA, 21 nt, Human
aaaauuacuuaguauugcaaa

SEQ ID NO: 1338017 - RNA, 14 nt, Human
aaaauuacuguuua

SEQ ID NO: 1338018 - RNA, 19 nt, Human
aaaauuaggauuucaugau

SEQ ID NO: 1338019 - RNA, 19 nt, Human
aaaauuagccaguaauccu

SEQ ID NO: 1338020 - RNA, 17 nt, Human
aaaauuagccaguaauc

SEQ ID NO: 1338021 - RNA, 21 nt, Human
aaaauuagccaguaauccugu

SEQ ID NO: 1338022 - RNA, 22 nt, Human
aaaauuacuuaguauugcaaag

SEQ ID NO: 1338023 - RNA, 23 nt, Human
aaaauuagacugugauucagaaa

SEQ ID NO: 1338024 - RNA, 12 nt, Human
aaaauuaagaaa

SEQ ID NO: 1338025 - RNA, 22 nt, Human
aaaauuaacaugaauauuuagu

SEQ ID NO: 1338026 - RNA, 20 nt, Human
aaaauuaaaccggaccaucu

SEQ ID NO: 1338027 - RNA, 19 nt, Human
aaaauccauacauuugugu

SEQ ID NO: 1338028 - RNA, 20 nt, Human
aaaauuaagaaaggauaaag

SEQ ID NO: 1338029 - RNA, 13 nt, Human
aaaauuaagaaag

SEQ ID NO: 1338030 - RNA, 17 nt, Human
aaaauuaaaucaaccuu

SEQ ID NO: 1338031 - RNA, 23 nt, Human
aaaauuaaucugggccagaauuu

SEQ ID NO: 1338032 - RNA, 20 nt, Human
aacaggaucaguuaacuauu

SEQ ID NO: 1338033 - RNA, 17 nt, Human
aacaucccuuuuucaau

SEQ ID NO: 1338034 - RNA, 15 nt, Human
aacauccuacaagac

SEQ ID NO: 1338035 - RNA, 22 nt, Human
aacauccuacaagacacaguga

SEQ ID NO: 1338036 - RNA, 18 nt, Human
aacaucuacaaaacauua

SEQ ID NO: 1338037 - RNA, 20 nt, Human
aacaucuacaaaacauuaaa

SEQ ID NO: 1338038 - RNA, 20 nt, Human
aacaggaaacuccugugacc

SEQ ID NO: 1338039 - RNA, 19 nt, Human
aacagcguuccuagagaag

SEQ ID NO: 1338040 - RNA, 23 nt, Human
aacagcguuccuagagaagacag

SEQ ID NO: 1338041 - RNA, 20 nt, Human
aacagcaaaugcaaaaacuc

SEQ ID NO: 1338042 - RNA, 13 nt, Human
aacagcgcccaaa

SEQ ID NO: 1338043 - RNA, 15 nt, Human
aacagauuguuugca

SEQ ID NO: 1338044 - RNA, 16 nt, Human
aacagauuguuugcaa

SEQ ID NO: 1338045 - RNA, 13 nt, Human
aacagauuuggaa

SEQ ID NO: 1338046 - RNA, 14 nt, Human
aacagauuuggaaa

SEQ ID NO: 1338047 - RNA, 15 nt, Human
aacagauuuggaaag

SEQ ID NO: 1338048 - RNA, 17 nt, Human
aacacuaauucauaauc

SEQ ID NO: 1338049 - RNA, 18 nt, Human
aacacuagacaagccaga

SEQ ID NO: 1338050 - RNA, 19 nt, Human
aacacuagacaagccagaa

SEQ ID NO: 1338051 - RNA, 23 nt, Human
aacccuuaaacaguugcacagca

SEQ ID NO: 1338052 - RNA, 18 nt, Human
aacccuuaaacaguugca

SEQ ID NO: 1338053 - RNA, 18 nt, Human
aaccauaacaacuucaua

SEQ ID NO: 1338054 - RNA, 22 nt, Human
aaccauacaaaaauuccuuuuc

SEQ ID NO: 1338055 - RNA, 13 nt, Human
aaccauacugaaa

SEQ ID NO: 1338056 - RNA, 22 nt, Human
aaccauagcacaggcuaauuuu

SEQ ID NO: 1338057 - RNA, 16 nt, Human
aaccagguccaaugag

SEQ ID NO: 1338058 - RNA, 17 nt, Human
aaccagguccaaugagc

SEQ ID NO: 1338059 - RNA, 21 nt, Human
aaccagguccaaugagcuuuc

SEQ ID NO: 1338060 - RNA, 22 nt, Human
aaccagguccaaugagcuuucu

SEQ ID NO: 1338061 - RNA, 21 nt, Human
aacaucugagaaaagcuuuga

SEQ ID NO: 1338062 - RNA, 16 nt, Human
aacaucugaguccugg

SEQ ID NO: 1338063 - RNA, 19 nt, Human
aacaugcuguuauuuaggu

SEQ ID NO: 1338064 - RNA, 23 nt, Human
aacaugcuguuauuuagguauuu

SEQ ID NO: 1338065 - RNA, 22 nt, Human
aacccuuaaacaguugcacagc

SEQ ID NO: 1338066 - RNA, 14 nt, Human
aaccgccagcucug

SEQ ID NO: 1338067 - RNA, 15 nt, Human
aaccgccagcucugu

SEQ ID NO: 1338068 - RNA, 17 nt, Human
aaccgccagcucuguuc

SEQ ID NO: 1338069 - RNA, 22 nt, Human
aaccgccagcucuguucuuccu

SEQ ID NO: 1338070 - RNA, 16 nt, Human
aaccgcuaaaagaaac

SEQ ID NO: 1338071 - RNA, 22 nt, Human
aacucaucuagguaaauuacag

SEQ ID NO: 1338072 - RNA, 21 nt, Human
aacugaagcagccucucccca

SEQ ID NO: 1338073 - RNA, 15 nt, Human
aacucauauuuucau

SEQ ID NO: 1338074 - RNA, 16 nt, Human
aacucauauuuucaug

SEQ ID NO: 1338075 - RNA, 18 nt, Human
aacucauauuuucaugcu

SEQ ID NO: 1338076 - RNA, 12 nt, Human
aacugaaugaga

SEQ ID NO: 1338077 - RNA, 24 nt, Human
aacugaauaccacucuguaauugc

SEQ ID NO: 1338078 - RNA, 15 nt, Human
aacugaauaccacuc

SEQ ID NO: 1338079 - RNA, 17 nt, Human
aacugaauaccacucug

SEQ ID NO: 1338080 - RNA, 18 nt, Human
aacugaauaccacucugu

SEQ ID NO: 1338081 - RNA, 21 nt, Human
aacugaauaccacucuguaau

SEQ ID NO: 1338082 - RNA, 19 nt, Human
aacugaagggggcggccua

SEQ ID NO: 1338083 - RNA, 13 nt, Human
aacugaauaccac

SEQ ID NO: 1338084 - RNA, 14 nt, Human
aacugaauaccacu

SEQ ID NO: 1338085 - RNA, 12 nt, Human
aacugaggaauu

SEQ ID NO: 1338086 - RNA, 13 nt, Human
aacugaggaauuu

SEQ ID NO: 1338087 - RNA, 18 nt, Human
aacugaggaauuucaccu

SEQ ID NO: 1338088 - RNA, 16 nt, Human
aacugaggaauuuucu

SEQ ID NO: 1338089 - RNA, 18 nt, Human
aacugaggaauuuucuuu

SEQ ID NO: 1338090 - RNA, 16 nt, Human
aacgcuaucugggaag

SEQ ID NO: 1338091 - RNA, 16 nt, Human
aacgcuccaaagucau

SEQ ID NO: 1338092 - RNA, 20 nt, Human
aacgcuccaaagucauaauu

SEQ ID NO: 1338093 - RNA, 19 nt, Human
aacgccugagcccagggag

SEQ ID NO: 1338094 - RNA, 13 nt, Human
aacgccugagccc

SEQ ID NO: 1338095 - RNA, 17 nt, Human
aacgccugagcccaggg

SEQ ID NO: 1338096 - RNA, 18 nt, Human
aacgccugagcccaggga

SEQ ID NO: 1338097 - RNA, 15 nt, Human
aacguauaaaagccu

SEQ ID NO: 1338098 - RNA, 13 nt, Human
aacggugcucagg

SEQ ID NO: 1338099 - RNA, 16 nt, Human
aacucaaaauauuugu

SEQ ID NO: 1338100 - RNA, 22 nt, Human
aacucaaacugaggaauuucac

SEQ ID NO: 1338101 - RNA, 18 nt, Human
aacucaaauggggccaga

SEQ ID NO: 1338102 - RNA, 21 nt, Human
aacucaaauggggccagaucc

SEQ ID NO: 1338103 - RNA, 22 nt, Human
aacucaaauggggccagaucca

SEQ ID NO: 1338104 - RNA, 23 nt, Human
aacucaaauggggccagauccag

SEQ ID NO: 1338105 - RNA, 21 nt, Human
aacucaaaugugaguguuuuu

SEQ ID NO: 1338106 - RNA, 16 nt, Human
aacgaaaaugaaagcu

SEQ ID NO: 1338107 - RNA, 16 nt, Human
aacgagacuuuccauu

SEQ ID NO: 1338108 - RNA, 21 nt, Human
aacgagacuuuccauuacaag

SEQ ID NO: 1338109 - RNA, 11 nt, Human
aacgccugagc

SEQ ID NO: 1338110 - RNA, 12 nt, Human
aacgccugagcc

SEQ ID NO: 1338111 - RNA, 21 nt, Human
aaauguuuuuuuuuaaagacu

SEQ ID NO: 1338112 - RNA, 18 nt, Human
aaauguuuuuuuuuaaag

SEQ ID NO: 1338113 - RNA, 13 nt, Human
aaauguucuaagu

SEQ ID NO: 1338114 - RNA, 14 nt, Human
aaauguucuaaguu

SEQ ID NO: 1338115 - RNA, 17 nt, Human
aaauguucuaaguuucu

SEQ ID NO: 1338116 - RNA, 19 nt, Human
aaauguucuaaguuucuaa

SEQ ID NO: 1338117 - RNA, 21 nt, Human
aaauguucuaaguuucuaaga

SEQ ID NO: 1338118 - RNA, 15 nt, Human
aaauguucuguuugc

SEQ ID NO: 1338119 - RNA, 11 nt, Human
aaauguucuuu

SEQ ID NO: 1338120 - RNA, 23 nt, Human
aaauguugaaauaugauguuaaa

SEQ ID NO: 1338121 - RNA, 20 nt, Human
aaauguucaucaaugaauga

SEQ ID NO: 1338122 - RNA, 18 nt, Human
aaauugaugggauuuggu

SEQ ID NO: 1338123 - RNA, 23 nt, Human
aaauugagcuggaccucaccaag

SEQ ID NO: 1338124 - RNA, 15 nt, Human
aacaaacaauaccug

SEQ ID NO: 1338125 - RNA, 18 nt, Human
aacaaacauuugcugaau

SEQ ID NO: 1338126 - RNA, 22 nt, Human
aaauguuuuuuuuuaaagacuu

SEQ ID NO: 1338127 - RNA, 12 nt, Human
aaauuaaaaaag

SEQ ID NO: 1338128 - RNA, 14 nt, Human
aaauuaaaaaagau

SEQ ID NO: 1338129 - RNA, 15 nt, Human
aaauuaaaaaagaua

SEQ ID NO: 1338130 - RNA, 20 nt, Human
aaauuaaaaaagauaaacac

SEQ ID NO: 1338131 - RNA, 16 nt, Human
aaauuaaaaaagauaa

SEQ ID NO: 1338132 - RNA, 20 nt, Human
aaauuaacuggguaaugaaa

SEQ ID NO: 1338133 - RNA, 21 nt, Human
aaauuaacuggguaaugaaac

SEQ ID NO: 1338134 - RNA, 21 nt, Human
aacacccucacacugggacuu

SEQ ID NO: 1338135 - RNA, 17 nt, Human
aacacccucacacuggg

SEQ ID NO: 1338136 - RNA, 16 nt, Human
aacacccuauauuuug

SEQ ID NO: 1338137 - RNA, 16 nt, Human
aacacccauuuuuccu

SEQ ID NO: 1338138 - RNA, 21 nt, Human
aacacccauuuuuccuuuugc

SEQ ID NO: 1338139 - RNA, 16 nt, Human
aacacaucacagauga

SEQ ID NO: 1338140 - RNA, 13 nt, Human
aacaccucccagg

SEQ ID NO: 1338141 - RNA, 23 nt, Human
aacaccucccaggagacaguuca

SEQ ID NO: 1338142 - RNA, 16 nt, Human
aacaccuccucaugua

SEQ ID NO: 1338143 - RNA, 17 nt, Human
aacacccauuuuuccuu

SEQ ID NO: 1338144 - RNA, 18 nt, Human
aacacuaacuaugcaugg

SEQ ID NO: 1338145 - RNA, 13 nt, Human
aacacuaauauau

SEQ ID NO: 1338146 - RNA, 14 nt, Human
aacacuaauauauu

SEQ ID NO: 1338147 - RNA, 20 nt, Human
aacacuaauauauuuaaaaa

SEQ ID NO: 1338148 - RNA, 22 nt, Human
aacacuaauauauuuaaaaaua

SEQ ID NO: 1338149 - RNA, 23 nt, Human
aacacuaauauauuuaaaaauaa

SEQ ID NO: 1338150 - RNA, 14 nt, Human
aacacuaauucaua

SEQ ID NO: 1338151 - RNA, 15 nt, Human
aacacuaauucauaa

SEQ ID NO: 1338152 - RNA, 16 nt, Human
aacacuaauucauaau

SEQ ID NO: 1338153 - RNA, 19 nt, Human
aacaaaugccaaauuaaaa

SEQ ID NO: 1338154 - RNA, 14 nt, Human
aacaaaugaagaca

SEQ ID NO: 1338155 - RNA, 17 nt, Human
aacaaaugccaaauuaa

SEQ ID NO: 1338156 - RNA, 23 nt, Human
aacaaaugccaaauuaaaaaaga

SEQ ID NO: 1338157 - RNA, 12 nt, Human
aacaaaugaaga

SEQ ID NO: 1338158 - RNA, 20 nt, Human
aacaaacucguuuuuuacaa

SEQ ID NO: 1338159 - RNA, 16 nt, Human
aacaaacucguuuuuu

SEQ ID NO: 1338160 - RNA, 16 nt, Human
aacaaagguugagaug

SEQ ID NO: 1338161 - RNA, 16 nt, Human
aacaaauagucuauca

SEQ ID NO: 1338162 - RNA, 22 nt, Human
aaaucugcuggaguuucaugua

SEQ ID NO: 1338163 - RNA, 19 nt, Human
aaaucugccacaaaaacag

SEQ ID NO: 1338164 - RNA, 20 nt, Human
aaaucugcuggaguuucaug

SEQ ID NO: 1338165 - RNA, 18 nt, Human
aaaucugacccagugccc

SEQ ID NO: 1338166 - RNA, 11 nt, Human
aaaucugccac

SEQ ID NO: 1338167 - RNA, 19 nt, Human
aaaucugugccugagaaca

SEQ ID NO: 1338168 - RNA, 13 nt, Human
aaaucugcuugua

SEQ ID NO: 1338169 - RNA, 15 nt, Human
aaaugcuagguucua

SEQ ID NO: 1338170 - RNA, 16 nt, Human
aaaugcuagguucuac

SEQ ID NO: 1338171 - RNA, 18 nt, Human
aaaugcuagguucuaccu

SEQ ID NO: 1338172 - RNA, 16 nt, Human
aaaucucccauuuugg

SEQ ID NO: 1338173 - RNA, 21 nt, Human
aaaucucccauuuuggaauuu

SEQ ID NO: 1338174 - RNA, 18 nt, Human
aaaucucccauuuuggaa

SEQ ID NO: 1338175 - RNA, 20 nt, Human
aaaucucccauuuuggaauu

SEQ ID NO: 1338176 - RNA, 13 nt, Human
aaaucucuccacu

SEQ ID NO: 1338177 - RNA, 17 nt, Human
aaaucucuccacuuuca

SEQ ID NO: 1338178 - RNA, 19 nt, Human
aaaucucuccacuuucagc

SEQ ID NO: 1338179 - RNA, 20 nt, Human
aaaucucuccacuuucagcu

SEQ ID NO: 1338180 - RNA, 21 nt, Human
aaaucucuccacuuucagcug

SEQ ID NO: 1338181 - RNA, 23 nt, Human
aaaucucuccacuuucagcuguc

SEQ ID NO: 1338182 - RNA, 14 nt, Human
aaaucugacccagu

SEQ ID NO: 1338183 - RNA, 20 nt, Human
aaaucugacccagugccccc

SEQ ID NO: 1338184 - RNA, 23 nt, Human
aaaugcucuuauuucaucauuca

SEQ ID NO: 1338185 - RNA, 19 nt, Human
aaaugcucuuauuucauca

SEQ ID NO: 1338186 - RNA, 18 nt, Human
agaggaauuacgugcucu

SEQ ID NO: 1338187 - RNA, 23 nt, Human
agaggagggagcaucagugcccu

SEQ ID NO: 1338188 - RNA, 11 nt, Human
agagggcugga

SEQ ID NO: 1338189 - RNA, 12 nt, Human
agagggcuggag

SEQ ID NO: 1338190 - RNA, 17 nt, Human
agagggcuggaggccca

SEQ ID NO: 1338191 - RNA, 18 nt, Human
agagggcuggaggcccag

SEQ ID NO: 1338192 - RNA, 19 nt, Human
agagggcuggaggcccagg

SEQ ID NO: 1338193 - RNA, 14 nt, Human
agagggggcuggug

SEQ ID NO: 1338194 - RNA, 19 nt, Human
agagggggcuggugggugc

SEQ ID NO: 1338195 - RNA, 16 nt, Human
agagggggcugguggg

SEQ ID NO: 1338196 - RNA, 10 nt, Human
agagggcugc

SEQ ID NO: 1338197 - RNA, 14 nt, Human
agagggcgcaggcc

SEQ ID NO: 1338198 - RNA, 16 nt, Human
agagggcgcaggccgu

SEQ ID NO: 1338199 - RNA, 20 nt, Human
agagggcucgaggggugggc

SEQ ID NO: 1338200 - RNA, 13 nt, Human
agaggaaugaagu

SEQ ID NO: 1338201 - RNA, 23 nt, Human
agaggaaggggccagaggcucgu

SEQ ID NO: 1338202 - RNA, 18 nt, Human
agaggaaggggccagagg

SEQ ID NO: 1338203 - RNA, 20 nt, Human
agaggaaggggccagaggcu

SEQ ID NO: 1338204 - RNA, 15 nt, Human
agacgcugcugucac

SEQ ID NO: 1338205 - RNA, 14 nt, Human
agacgccuggcugc

SEQ ID NO: 1338206 - RNA, 15 nt, Human
agacgccuggcugcu

SEQ ID NO: 1338207 - RNA, 18 nt, Human
agacgccuuucuccucca

SEQ ID NO: 1338208 - RNA, 14 nt, Human
agacucuuuaugcu

SEQ ID NO: 1338209 - RNA, 14 nt, Human
agacugacgccagg

SEQ ID NO: 1338210 - RNA, 18 nt, Human
agacucugucucagucca

SEQ ID NO: 1338211 - RNA, 17 nt, Human
agacucuugccuguuuc

SEQ ID NO: 1338212 - RNA, 18 nt, Human
agacucuugccuguuucc

SEQ ID NO: 1338213 - RNA, 22 nt, Human
agacucuugccuguuucccagg

SEQ ID NO: 1338214 - RNA, 16 nt, Human
agacugcuguggccag

SEQ ID NO: 1338215 - RNA, 17 nt, Human
agacugcuguggccagg

SEQ ID NO: 1338216 - RNA, 18 nt, Human
agacugcuguggccagga

SEQ ID NO: 1338217 - RNA, 19 nt, Human
agacugcuguggccaggag

SEQ ID NO: 1338218 - RNA, 20 nt, Human
agacugcuguggccaggagg

SEQ ID NO: 1338219 - RNA, 21 nt, Human
agacugcuguggccaggaggu

SEQ ID NO: 1338220 - RNA, 19 nt, Human
agacugcuuccaauuuucu

SEQ ID NO: 1338221 - RNA, 18 nt, Human
agacuggaacacuagaca

SEQ ID NO: 1338222 - RNA, 13 nt, Human
agacuggaacuug

SEQ ID NO: 1338223 - RNA, 17 nt, Human
agacuggaacuugaacu

SEQ ID NO: 1338224 - RNA, 18 nt, Human
agacuggaacuugaacug

SEQ ID NO: 1338225 - RNA, 15 nt, Human
agacuggaacacuag

SEQ ID NO: 1338226 - RNA, 21 nt, Human
agacuggaagcuaauuugcau

SEQ ID NO: 1338227 - RNA, 23 nt, Human
agacuggaacuugaacugauuca

SEQ ID NO: 1338228 - RNA, 11 nt, Human
agacuggacag

SEQ ID NO: 1338229 - RNA, 13 nt, Human
agacuggacagcu

SEQ ID NO: 1338230 - RNA, 14 nt, Human
agacuggacagcuu

SEQ ID NO: 1338231 - RNA, 15 nt, Human
agacuggacagcuug

SEQ ID NO: 1338232 - RNA, 16 nt, Human
agacuggacagcuugu

SEQ ID NO: 1338233 - RNA, 17 nt, Human
agacuggacagcuugug

SEQ ID NO: 1338234 - RNA, 14 nt, Human
agagagagagggcc

SEQ ID NO: 1338235 - RNA, 23 nt, Human
agagagagggccugcuggagagc

SEQ ID NO: 1338236 - RNA, 14 nt, Human
agagaggccuuuug

SEQ ID NO: 1338237 - RNA, 20 nt, Human
agagaggccuuuuggaaugu

SEQ ID NO: 1338238 - RNA, 20 nt, Human
agagccuccuuucuggcuuu

SEQ ID NO: 1338239 - RNA, 11 nt, Human
agagccugagg

SEQ ID NO: 1338240 - RNA, 22 nt, Human
agagccaugucuucucccugga

SEQ ID NO: 1338241 - RNA, 19 nt, Human
agagccaugucuucucccu

SEQ ID NO: 1338242 - RNA, 22 nt, Human
agagccggggugggguggcugc

SEQ ID NO: 1338243 - RNA, 23 nt, Human
agagccggggugggguggcugca

SEQ ID NO: 1338244 - RNA, 18 nt, Human
agagccggguguccccaa

SEQ ID NO: 1338245 - RNA, 17 nt, Human
agaagagaucaggaaga

SEQ ID NO: 1338246 - RNA, 22 nt, Human
agaaggugggaggaugugaauu

SEQ ID NO: 1338247 - RNA, 14 nt, Human
agaaggugggagga

SEQ ID NO: 1338248 - RNA, 18 nt, Human
agaagucacauuccugaa

SEQ ID NO: 1338249 - RNA, 20 nt, Human
agaagucacauuccugaaca

SEQ ID NO: 1338250 - RNA, 21 nt, Human
agaagucacauuccugaacag

SEQ ID NO: 1338251 - RNA, 17 nt, Human
agaaguagaaaucauag

SEQ ID NO: 1338252 - RNA, 15 nt, Human
agaaguauaaagaau

SEQ ID NO: 1338253 - RNA, 16 nt, Human
agaaguauaaagaauu

SEQ ID NO: 1338254 - RNA, 19 nt, Human
agaaguauaaagaauugug

SEQ ID NO: 1338255 - RNA, 13 nt, Human
agaaguauacaua

SEQ ID NO: 1338256 - RNA, 22 nt, Human
agaaguaaaagcaaaaaagaaa

SEQ ID NO: 1338257 - RNA, 15 nt, Human
agaaguaaaagcaaa

SEQ ID NO: 1338258 - RNA, 14 nt, Human
agaaguaccagacu

SEQ ID NO: 1338259 - RNA, 16 nt, Human
agaaguaccagacuag

SEQ ID NO: 1338260 - RNA, 18 nt, Human
agaagguuucagaaagaa

SEQ ID NO: 1338261 - RNA, 16 nt, Human
agaagguugcucuaga

SEQ ID NO: 1338262 - RNA, 20 nt, Human
agaagguugcucuagauuga

SEQ ID NO: 1338263 - RNA, 18 nt, Human
agaagacugcauuauauu

SEQ ID NO: 1338264 - RNA, 17 nt, Human
agaagaccugagaaugu

SEQ ID NO: 1338265 - RNA, 21 nt, Human
acuuuccucuuagucgagcca

SEQ ID NO: 1338266 - RNA, 13 nt, Human
acuuucccuaccc

SEQ ID NO: 1338267 - RNA, 15 nt, Human
acuuuccauuacaag

SEQ ID NO: 1338268 - RNA, 17 nt, Human
acuuuccauuacaagua

SEQ ID NO: 1338269 - RNA, 21 nt, Human
acuuuccauuacaaguauuuu

SEQ ID NO: 1338270 - RNA, 17 nt, Human
acuuuccccaccagaug

SEQ ID NO: 1338271 - RNA, 19 nt, Human
acuuuccccaccagaugcu

SEQ ID NO: 1338272 - RNA, 20 nt, Human
acuuuccccaccagaugcug

SEQ ID NO: 1338273 - RNA, 21 nt, Human
acuuuccccaccagaugcuga

SEQ ID NO: 1338274 - RNA, 21 nt, Human
acuuucccuacccucuagaga

SEQ ID NO: 1338275 - RNA, 23 nt, Human
acuuuccccaccagaugcugaaa

SEQ ID NO: 1338276 - RNA, 19 nt, Human
acuuuccuccugaggcuuu

SEQ ID NO: 1338277 - RNA, 15 nt, Human
agaagacaauugaca

SEQ ID NO: 1338278 - RNA, 18 nt, Human
agaagacaggcuggaaga

SEQ ID NO: 1338279 - RNA, 13 nt, Human
agaagacaggcug

SEQ ID NO: 1338280 - RNA, 22 nt, Human
agaagucacauuccugaacagg

SEQ ID NO: 1338281 - RNA, 15 nt, Human
agaagucaucuugcu

SEQ ID NO: 1338282 - RNA, 16 nt, Human
agaagucaucuugcua

SEQ ID NO: 1338283 - RNA, 22 nt, Human
agaagucaucuugcuaccagua

SEQ ID NO: 1338284 - RNA, 21 nt, Human
agaagugaaaaucuacacucc

SEQ ID NO: 1338285 - RNA, 15 nt, Human
agaagugaagaaugc

SEQ ID NO: 1338286 - RNA, 16 nt, Human
agaagugaaugcuggg

SEQ ID NO: 1338287 - RNA, 17 nt, Human
agaagugaaugcuggga

SEQ ID NO: 1338288 - RNA, 19 nt, Human
agaagugaaugcugggacu

SEQ ID NO: 1338289 - RNA, 21 nt, Human
agaagugaaugcugggacuca

SEQ ID NO: 1338290 - RNA, 17 nt, Human
agaaugagagacacacu

SEQ ID NO: 1338291 - RNA, 22 nt, Human
agaaugagagacacacugaaga

SEQ ID NO: 1338292 - RNA, 14 nt, Human
agaaugagacaucc

SEQ ID NO: 1338293 - RNA, 18 nt, Human
agaauggcuuuggucucu

SEQ ID NO: 1338294 - RNA, 23 nt, Human
agaauggcuuuggucucuugcuu

SEQ ID NO: 1338295 - RNA, 13 nt, Human
agaaugauuucau

SEQ ID NO: 1338296 - RNA, 14 nt, Human
agaaugauuucaug

SEQ ID NO: 1338297 - RNA, 13 nt, Human
agaaugcuguaca

SEQ ID NO: 1338298 - RNA, 14 nt, Human
agaaugcuguacau

SEQ ID NO: 1338299 - RNA, 15 nt, Human
agaaugcuguacauc

SEQ ID NO: 1338300 - RNA, 20 nt, Human
agaaugcuguacaucuauuu

SEQ ID NO: 1338301 - RNA, 20 nt, Human
agaaugcuuaaucagauaga

SEQ ID NO: 1338302 - RNA, 14 nt, Human
agaaugcuuaauca

SEQ ID NO: 1338303 - RNA, 19 nt, Human
agaauggaucacaagaugg

SEQ ID NO: 1338304 - RNA, 16 nt, Human
agaauggcagaaaagu

SEQ ID NO: 1338305 - RNA, 20 nt, Human
agaauggaucacaagaugga

SEQ ID NO: 1338306 - RNA, 22 nt, Human
agacagccaacuauggccugug

SEQ ID NO: 1338307 - RNA, 14 nt, Human
agaccacugccaua

SEQ ID NO: 1338308 - RNA, 15 nt, Human
agacagaggcccuca

SEQ ID NO: 1338309 - RNA, 16 nt, Human
agacagaggcccucaa

SEQ ID NO: 1338310 - RNA, 18 nt, Human
agacagaggcccucaagu

SEQ ID NO: 1338311 - RNA, 19 nt, Human
agacccaaaaggcagaagc

SEQ ID NO: 1338312 - RNA, 15 nt, Human
agaccagcagacaga

SEQ ID NO: 1338313 - RNA, 16 nt, Human
agaccagcagacagag

SEQ ID NO: 1338314 - RNA, 21 nt, Human
agaccagcagacagagccagg

SEQ ID NO: 1338315 - RNA, 20 nt, Human
agaccagcagacagagccag

SEQ ID NO: 1338316 - RNA, 17 nt, Human
agacccagcccucaucc

SEQ ID NO: 1338317 - RNA, 18 nt, Human
agacccagcccucauccc

SEQ ID NO: 1338318 - RNA, 19 nt, Human
agacccagcccucaucccg

SEQ ID NO: 1338319 - RNA, 14 nt, Human
agacccagcggaca

SEQ ID NO: 1338320 - RNA, 23 nt, Human
agacgcacuuuggcuuauaauuc

SEQ ID NO: 1338321 - RNA, 13 nt, Human
agacgccugagga

SEQ ID NO: 1338322 - RNA, 15 nt, Human
agacgccugaggaac

SEQ ID NO: 1338323 - RNA, 13 nt, Human
agacgccuggcug

SEQ ID NO: 1338324 - RNA, 19 nt, Human
agacaaacaccucccagga

SEQ ID NO: 1338325 - RNA, 15 nt, Human
agacaaacuuugcau

SEQ ID NO: 1338326 - RNA, 18 nt, Human
agacaaagguuuuccucu

SEQ ID NO: 1338327 - RNA, 21 nt, Human
agacaaacuuugcaucucagu

SEQ ID NO: 1338328 - RNA, 19 nt, Human
agacaaauagaaaaugguc

SEQ ID NO: 1338329 - RNA, 21 nt, Human
agauguagccccucuccugga

SEQ ID NO: 1338330 - RNA, 13 nt, Human
agauucucaaagg

SEQ ID NO: 1338331 - RNA, 19 nt, Human
agauucucauaacuugaga

SEQ ID NO: 1338332 - RNA, 17 nt, Human
agauucucccuugcucu

SEQ ID NO: 1338333 - RNA, 14 nt, Human
agauucucuaugua

SEQ ID NO: 1338334 - RNA, 21 nt, Human
agauucucuggcuguaaggcu

SEQ ID NO: 1338335 - RNA, 20 nt, Human
agauucucauaacuugagac

SEQ ID NO: 1338336 - RNA, 23 nt, Human
agauucucuggcuguaaggcucu

SEQ ID NO: 1338337 - RNA, 16 nt, Human
agauucucugugucua

SEQ ID NO: 1338338 - RNA, 17 nt, Human
agauucucugugucuaa

SEQ ID NO: 1338339 - RNA, 12 nt, Human
agauucuugcau

SEQ ID NO: 1338340 - RNA, 19 nt, Human
agauucugccuuugccagg

SEQ ID NO: 1338341 - RNA, 19 nt, Human
agauucucugugucuaaga

SEQ ID NO: 1338342 - RNA, 20 nt, Human
agauucucugugucuaagau

SEQ ID NO: 1338343 - RNA, 22 nt, Human
agauucucugugucuaagauuc

SEQ ID NO: 1338344 - RNA, 23 nt, Human
agauucucugugucuaagauucu

SEQ ID NO: 1338345 - RNA, 14 nt, Human
agauucugauuuua

SEQ ID NO: 1338346 - RNA, 13 nt, Human
agauucugccuuu

SEQ ID NO: 1338347 - RNA, 19 nt, Human
agauguagaggagaaacug

SEQ ID NO: 1338348 - RNA, 17 nt, Human
agauguaaaagguauua

SEQ ID NO: 1338349 - RNA, 19 nt, Human
agaugaaguuuuacauugu

SEQ ID NO: 1338350 - RNA, 14 nt, Human
agaugauaaagaga

SEQ ID NO: 1338351 - RNA, 16 nt, Human
agaugauaaagagaca

SEQ ID NO: 1338352 - RNA, 18 nt, Human
agaugauaaagagacagu

SEQ ID NO: 1338353 - RNA, 16 nt, Human
agaugauacauccaaa

SEQ ID NO: 1338354 - RNA, 20 nt, Human
agaugauacauccaaagcag

SEQ ID NO: 1338355 - RNA, 11 nt, Human
agaugguggau

SEQ ID NO: 1338356 - RNA, 14 nt, Human
agaugguggcagua

SEQ ID NO: 1338357 - RNA, 13 nt, Human
agaucuggaaccu

SEQ ID NO: 1338358 - RNA, 14 nt, Human
agaucuggaaccuc

SEQ ID NO: 1338359 - RNA, 15 nt, Human
agaucuggaaccuca

SEQ ID NO: 1338360 - RNA, 17 nt, Human
agaucuggaaccucagc

SEQ ID NO: 1338361 - RNA, 19 nt, Human
agaucuggaaccucagccu

SEQ ID NO: 1338362 - RNA, 20 nt, Human
agaucuggaaccucagccug

SEQ ID NO: 1338363 - RNA, 13 nt, Human
agaucuggcaugu

SEQ ID NO: 1338364 - RNA, 14 nt, Human
agaucuguccucag

SEQ ID NO: 1338365 - RNA, 18 nt, Human
agaugaaauuccauuugu

SEQ ID NO: 1338366 - RNA, 17 nt, Human
agaugaaauuccauuug

SEQ ID NO: 1338367 - RNA, 18 nt, Human
agaucuguccucagccuu

SEQ ID NO: 1338368 - RNA, 15 nt, Human
agaucuguccucagc

SEQ ID NO: 1338369 - RNA, 17 nt, Human
agaucuguccucagccu

SEQ ID NO: 1338370 - RNA, 16 nt, Human
agaugaaggagaggca

SEQ ID NO: 1338371 - RNA, 19 nt, Human
agaucuguccucagccuug

SEQ ID NO: 1338372 - RNA, 15 nt, Human
agaugaaguuuuaca

SEQ ID NO: 1338373 - RNA, 20 nt, Human
agagugauagucuuuugcuu

SEQ ID NO: 1338374 - RNA, 22 nt, Human
agagugauagucuuuugcuuuu

SEQ ID NO: 1338375 - RNA, 21 nt, Human
agagugcuguccgguggagau

SEQ ID NO: 1338376 - RNA, 24 nt, Human
agcaaaauuuuuucucuaggaaau

SEQ ID NO: 1338377 - RNA, 21 nt, Human
agcaaaauaauuuuaaacaaa

SEQ ID NO: 1338378 - RNA, 13 nt, Human
agauugaccugga

SEQ ID NO: 1338379 - RNA, 14 nt, Human
agcaaaagaagaag

SEQ ID NO: 1338380 - RNA, 17 nt, Human
agcaaaagaauggcaga

SEQ ID NO: 1338381 - RNA, 21 nt, Human
agcaaaagaauggcagaaaag

SEQ ID NO: 1338382 - RNA, 13 nt, Human
agcaaaccuguaa

SEQ ID NO: 1338383 - RNA, 15 nt, Human
agcaaagcccccaga

SEQ ID NO: 1338384 - RNA, 16 nt, Human
agcaaagcccccagag

SEQ ID NO: 1338385 - RNA, 17 nt, Human
agcaaagcccccagagc

SEQ ID NO: 1338386 - RNA, 21 nt, Human
agcaaagcccccagagcccag

SEQ ID NO: 1338387 - RNA, 22 nt, Human
agcaaagcccccagagcccagg

SEQ ID NO: 1338388 - RNA, 20 nt, Human
agauugaaccugaauauugc

SEQ ID NO: 1338389 - RNA, 23 nt, Human
agauugaccuggauggggcaggc

SEQ ID NO: 1338390 - RNA, 12 nt, Human
agcaaagccugu

SEQ ID NO: 1338391 - RNA, 21 nt, Human
agcaaagccuguucauggcag

SEQ ID NO: 1338392 - RNA, 22 nt, Human
agcaaagccuguucauggcaga

SEQ ID NO: 1338393 - RNA, 20 nt, Human
agcaaaucgaaugaaauuaa

SEQ ID NO: 1338394 - RNA, 22 nt, Human
agcaaaucgaaugaaauuaacu

SEQ ID NO: 1338395 - RNA, 13 nt, Human
agcaaaugcaaaa

SEQ ID NO: 1338396 - RNA, 14 nt, Human
agcaaaugcaaaaa

SEQ ID NO: 1338397 - RNA, 22 nt, Human
agcaaaugcaaaaacucuuuga

SEQ ID NO: 1338398 - RNA, 15 nt, Human
agcaaauggccucau

SEQ ID NO: 1338399 - RNA, 20 nt, Human
agcaaauggccucaugucaa

SEQ ID NO: 1338400 - RNA, 17 nt, Human
agcaaaugucuuccugg

SEQ ID NO: 1338401 - RNA, 20 nt, Human
agcaaaugucuuccuggauu

SEQ ID NO: 1338402 - RNA, 16 nt, Human
agcaaauguggcuccu

SEQ ID NO: 1338403 - RNA, 19 nt, Human
agcaaaugucaugcugccu

SEQ ID NO: 1338404 - RNA, 20 nt, Human
agcaaaugucaugcugccuu

SEQ ID NO: 1338405 - RNA, 21 nt, Human
agcaaaugucaugcugccuua

SEQ ID NO: 1338406 - RNA, 21 nt, Human
agcaauuacaacggagucaaa

SEQ ID NO: 1338407 - RNA, 18 nt, Human
agcacaaagacccuggcu

SEQ ID NO: 1338408 - RNA, 19 nt, Human
agcacaaagacccuggcuu

SEQ ID NO: 1338409 - RNA, 19 nt, Human
agcacaaauuaguuauaua

SEQ ID NO: 1338410 - RNA, 21 nt, Human
agcacaaguguaaugaauacc

SEQ ID NO: 1338411 - RNA, 17 nt, Human
agcacaaguuauuuaaa

SEQ ID NO: 1338412 - RNA, 18 nt, Human
agcacaaguuauuuaaau

SEQ ID NO: 1338413 - RNA, 19 nt, Human
agcacaaguuauuuaaauc

SEQ ID NO: 1338414 - RNA, 13 nt, Human
agcacaaauuagu

SEQ ID NO: 1338415 - RNA, 21 nt, Human
agcacaaguuauuuaaaucug

SEQ ID NO: 1338416 - RNA, 17 nt, Human
agcacaauaaauggcug

SEQ ID NO: 1338417 - RNA, 18 nt, Human
agcacaauaaauggcugu

SEQ ID NO: 1338418 - RNA, 15 nt, Human
agcaauccucccacu

SEQ ID NO: 1338419 - RNA, 16 nt, Human
agcaaucugacccuau

SEQ ID NO: 1338420 - RNA, 14 nt, Human
agcacacagggcag

SEQ ID NO: 1338421 - RNA, 15 nt, Human
agcacggcucugucc

SEQ ID NO: 1338422 - RNA, 20 nt, Human
agcacggcucuguccccagc

SEQ ID NO: 1338423 - RNA, 20 nt, Human
agcacuguuuucuaguguau

SEQ ID NO: 1338424 - RNA, 21 nt, Human
agcacggcucuguccccagcc

SEQ ID NO: 1338425 - RNA, 22 nt, Human
agcacuguuuucuaguguauca

SEQ ID NO: 1338426 - RNA, 15 nt, Human
agcacuuauuuaaug

SEQ ID NO: 1338427 - RNA, 22 nt, Human
agcacuugcaaccgucuguuau

SEQ ID NO: 1338428 - RNA, 15 nt, Human
agcacuucuuuuucu

SEQ ID NO: 1338429 - RNA, 17 nt, Human
agcagccucgccccugg

SEQ ID NO: 1338430 - RNA, 20 nt, Human
agcagccucgccccuggcag

SEQ ID NO: 1338431 - RNA, 21 nt, Human
agcagccucgccccuggcaga

SEQ ID NO: 1338432 - RNA, 22 nt, Human
agcagccucgccccuggcagag

SEQ ID NO: 1338433 - RNA, 15 nt, Human
agcagccucucccca

SEQ ID NO: 1338434 - RNA, 18 nt, Human
agcagccucuccccaggu

SEQ ID NO: 1338435 - RNA, 20 nt, Human
agcagccucuccccaggucc

SEQ ID NO: 1338436 - RNA, 21 nt, Human
agcagccucuccccaggucca

SEQ ID NO: 1338437 - RNA, 23 nt, Human
agcagccucgccccuggcagaga

SEQ ID NO: 1338438 - RNA, 13 nt, Human
agcagccugagca

SEQ ID NO: 1338439 - RNA, 19 nt, Human
agcagccugagcaacucuu

SEQ ID NO: 1338440 - RNA, 12 nt, Human
agcagcuuccag

SEQ ID NO: 1338441 - RNA, 14 nt, Human
agcagcuuccagau

SEQ ID NO: 1338442 - RNA, 16 nt, Human
agcagcuuccagauug

SEQ ID NO: 1338443 - RNA, 23 nt, Human
agcccuccaucuaaacugccccc

SEQ ID NO: 1338444 - RNA, 12 nt, Human
agcccucccugc

SEQ ID NO: 1338445 - RNA, 13 nt, Human
agcccucccugcc

SEQ ID NO: 1338446 - RNA, 14 nt, Human
agccccacccaggc

SEQ ID NO: 1338447 - RNA, 22 nt, Human
agccccacaccagggccagccu

SEQ ID NO: 1338448 - RNA, 23 nt, Human
agccccacaccagggccagccuc

SEQ ID NO: 1338449 - RNA, 23 nt, Human
agcaggaaaugaaaaugucuugu

SEQ ID NO: 1338450 - RNA, 21 nt, Human
agcagcuuuagaaucccagcc

SEQ ID NO: 1338451 - RNA, 15 nt, Human
agcaggaaaugaaaa

SEQ ID NO: 1338452 - RNA, 21 nt, Human
agcaggaaaugaaaaugucuu

SEQ ID NO: 1338453 - RNA, 19 nt, Human
agcccacgacacugcagcc

SEQ ID NO: 1338454 - RNA, 20 nt, Human
agcccacgacacugcagccc

SEQ ID NO: 1338455 - RNA, 18 nt, Human
agcccacgcucacccccu

SEQ ID NO: 1338456 - RNA, 16 nt, Human
agcccacuccaucugg

SEQ ID NO: 1338457 - RNA, 21 nt, Human
agcccacuccaucugguagaa

SEQ ID NO: 1338458 - RNA, 16 nt, Human
agcccaaugaaaugaa

SEQ ID NO: 1338459 - RNA, 21 nt, Human
agcccaccauuuggcaucccu

SEQ ID NO: 1338460 - RNA, 22 nt, Human
agcccaccauuuggcaucccug

SEQ ID NO: 1338461 - RNA, 21 nt, Human
agccaaaccucaccaacuccu

SEQ ID NO: 1338462 - RNA, 11 nt, Human
agccaaagagu

SEQ ID NO: 1338463 - RNA, 15 nt, Human
agccaagcucugcag

SEQ ID NO: 1338464 - RNA, 19 nt, Human
agccaaggagucacugaga

SEQ ID NO: 1338465 - RNA, 21 nt, Human
agccaaggagucacugagacc

SEQ ID NO: 1338466 - RNA, 16 nt, Human
agccaagcucugcagu

SEQ ID NO: 1338467 - RNA, 20 nt, Human
agccaaggagucacugagac

SEQ ID NO: 1338468 - RNA, 21 nt, Human
agcuuuuaugugaaacauguu

SEQ ID NO: 1338469 - RNA, 15 nt, Human
agcuuuuaugugaaa

SEQ ID NO: 1338470 - RNA, 22 nt, Human
aggaaauucuuucccagucugu

SEQ ID NO: 1338471 - RNA, 13 nt, Human
aggaacaaacagg

SEQ ID NO: 1338472 - RNA, 14 nt, Human
aggaacaaacaggg

SEQ ID NO: 1338473 - RNA, 21 nt, Human
aggaaccaacaaucuuccugu

SEQ ID NO: 1338474 - RNA, 13 nt, Human
aggaaccaacaau

SEQ ID NO: 1338475 - RNA, 16 nt, Human
aggaaccgaggcaggg

SEQ ID NO: 1338476 - RNA, 19 nt, Human
aggaacccuuacaguagga

SEQ ID NO: 1338477 - RNA, 23 nt, Human
aggaaguugacuuauaguacaug

SEQ ID NO: 1338478 - RNA, 22 nt, Human
aggaaguugacuuauaguacau

SEQ ID NO: 1338479 - RNA, 18 nt, Human
aggaaguugacuuauagu

SEQ ID NO: 1338480 - RNA, 19 nt, Human
aggaauaaauugcuccuug

SEQ ID NO: 1338481 - RNA, 20 nt, Human
aggaauaaauugcuccuuga

SEQ ID NO: 1338482 - RNA, 17 nt, Human
aggaauacugaacaucu

SEQ ID NO: 1338483 - RNA, 22 nt, Human
aggaaggcugagaggagagaga

SEQ ID NO: 1338484 - RNA, 19 nt, Human
aggaaggcuuguugugcuu

SEQ ID NO: 1338485 - RNA, 22 nt, Human
aggaaggcuuguugugcuuuua

SEQ ID NO: 1338486 - RNA, 21 nt, Human
aggaaggcuuguugugcuuuu

SEQ ID NO: 1338487 - RNA, 16 nt, Human
aggaaggggccagagg

SEQ ID NO: 1338488 - RNA, 18 nt, Human
aggaaggggccagaggcu

SEQ ID NO: 1338489 - RNA, 20 nt, Human
aggaaggggccagaggcucg

SEQ ID NO: 1338490 - RNA, 20 nt, Human
aggaagggguuggauugcaa

SEQ ID NO: 1338491 - RNA, 14 nt, Human
aggaaguaggaagu

SEQ ID NO: 1338492 - RNA, 15 nt, Human
aggaaguaggaagua

SEQ ID NO: 1338493 - RNA, 18 nt, Human
aggaagucaaagcaagga

SEQ ID NO: 1338494 - RNA, 16 nt, Human
aggaagucucaucugg

SEQ ID NO: 1338495 - RNA, 19 nt, Human
aggaagucucaucugggga

SEQ ID NO: 1338496 - RNA, 20 nt, Human
aggaagucucaucuggggag

SEQ ID NO: 1338497 - RNA, 18 nt, Human
agcuucacuguaaaauaa

SEQ ID NO: 1338498 - RNA, 18 nt, Human
agcuucacaguacccaaa

SEQ ID NO: 1338499 - RNA, 19 nt, Human
agcuucauggcagaaggca

SEQ ID NO: 1338500 - RNA, 16 nt, Human
agcuuuuaaacccuau

SEQ ID NO: 1338501 - RNA, 16 nt, Human
agcuuuuaaaagauuu

SEQ ID NO: 1338502 - RNA, 19 nt, Human
agcuucugagacgucauga

SEQ ID NO: 1338503 - RNA, 15 nt, Human
agcuucugcccccug

SEQ ID NO: 1338504 - RNA, 19 nt, Human
agcuucugcccccugcaga

SEQ ID NO: 1338505 - RNA, 17 nt, Human
agcuucugcccccugca

SEQ ID NO: 1338506 - RNA, 12 nt, Human
agcuucugagac

SEQ ID NO: 1338507 - RNA, 13 nt, Human
agcuucugagacg

SEQ ID NO: 1338508 - RNA, 22 nt, Human
agcuguaaacuuccaauuucua

SEQ ID NO: 1338509 - RNA, 21 nt, Human
aggacccggaggggccuggca

SEQ ID NO: 1338510 - RNA, 22 nt, Human
aggacccggaggggccuggcag

SEQ ID NO: 1338511 - RNA, 16 nt, Human
aggaccagucccagag

SEQ ID NO: 1338512 - RNA, 15 nt, Human
aggacccugaagggg

SEQ ID NO: 1338513 - RNA, 19 nt, Human
aggacccugaaggggccau

SEQ ID NO: 1338514 - RNA, 18 nt, Human
aggaccugaaauuccaaa

SEQ ID NO: 1338515 - RNA, 20 nt, Human
aggaccugaaauuccaaagu

SEQ ID NO: 1338516 - RNA, 16 nt, Human
aggaccugagaccuga

SEQ ID NO: 1338517 - RNA, 12 nt, Human
aggaccugagcc

SEQ ID NO: 1338518 - RNA, 13 nt, Human
aggaccugagccu

SEQ ID NO: 1338519 - RNA, 14 nt, Human
aggaccugagccug

SEQ ID NO: 1338520 - RNA, 15 nt, Human
aggaccugagccugc

SEQ ID NO: 1338521 - RNA, 16 nt, Human
aggaccugagccugcc

SEQ ID NO: 1338522 - RNA, 17 nt, Human
aggaccugagccugccg

SEQ ID NO: 1338523 - RNA, 18 nt, Human
aggaccugagccugccga

SEQ ID NO: 1338524 - RNA, 18 nt, Human
aggacccggaggggccug

SEQ ID NO: 1338525 - RNA, 20 nt, Human
aggacccggaggggccuggc

SEQ ID NO: 1338526 - RNA, 19 nt, Human
aggaccagucaaccugggc

SEQ ID NO: 1338527 - RNA, 20 nt, Human
aggaccagucaaccugggca

SEQ ID NO: 1338528 - RNA, 17 nt, Human
aggaccagucccagagc

SEQ ID NO: 1338529 - RNA, 21 nt, Human
aggaccugagccugccgagca

SEQ ID NO: 1338530 - RNA, 19 nt, Human
aggaccugagccugccgag

SEQ ID NO: 1338531 - RNA, 13 nt, Human
aggaccuggcugc

SEQ ID NO: 1338532 - RNA, 16 nt, Human
aggaccuggcugccau

SEQ ID NO: 1338533 - RNA, 17 nt, Human
aggaccuggcugccaua

SEQ ID NO: 1338534 - RNA, 20 nt, Human
aggagacuguuuggaaauug

SEQ ID NO: 1338535 - RNA, 14 nt, Human
aggagagacacugg

SEQ ID NO: 1338536 - RNA, 14 nt, Human
aggagagaguugaa

SEQ ID NO: 1338537 - RNA, 24 nt, Human
aggaccagcucaggacagaugcca

SEQ ID NO: 1338538 - RNA, 20 nt, Human
aggaaucaucaggaacguuu

SEQ ID NO: 1338539 - RNA, 18 nt, Human
aggaauagcaugucacua

SEQ ID NO: 1338540 - RNA, 15 nt, Human
aggaauauuuuccaa

SEQ ID NO: 1338541 - RNA, 16 nt, Human
aggaauauuuuccaaa

SEQ ID NO: 1338542 - RNA, 20 nt, Human
aggaauauuuuccaaagagu

SEQ ID NO: 1338543 - RNA, 23 nt, Human
agcguuuuuuaaauguauacuau

SEQ ID NO: 1338544 - RNA, 20 nt, Human
agcguuuuuuaaauguauac

SEQ ID NO: 1338545 - RNA, 19 nt, Human
agcguuuuuuaaauguaua

SEQ ID NO: 1338546 - RNA, 18 nt, Human
agcguuuuuuaaauguau

SEQ ID NO: 1338547 - RNA, 12 nt, Human
agcuaaaauaaa

SEQ ID NO: 1338548 - RNA, 19 nt, Human
agcuaaaauaaagaaauag

SEQ ID NO: 1338549 - RNA, 17 nt, Human
agcuaaacggauuccaa

SEQ ID NO: 1338550 - RNA, 17 nt, Human
agcguuuuuuaaaugua

SEQ ID NO: 1338551 - RNA, 14 nt, Human
agcguuuuuuaaau

SEQ ID NO: 1338552 - RNA, 11 nt, Human
agcguuuuuua

SEQ ID NO: 1338553 - RNA, 11 nt, Human
agcguucuugu

SEQ ID NO: 1338554 - RNA, 12 nt, Human
agcguucuugua

SEQ ID NO: 1338555 - RNA, 18 nt, Human
agcguucuuguaauuuua

SEQ ID NO: 1338556 - RNA, 16 nt, Human
agcuaaucagcauucu

SEQ ID NO: 1338557 - RNA, 16 nt, Human
agcuaauaacugaucu

SEQ ID NO: 1338558 - RNA, 21 nt, Human
agcuaaucagcauucucacuc

SEQ ID NO: 1338559 - RNA, 18 nt, Human
agcuaauaaaaagcuuuu

SEQ ID NO: 1338560 - RNA, 19 nt, Human
agcuaauaaaaagcuuuug

SEQ ID NO: 1338561 - RNA, 21 nt, Human
agcuaauaaaaagcuuuuguc

SEQ ID NO: 1338562 - RNA, 23 nt, Human
agcuaauaaaaagcuuuugucua

SEQ ID NO: 1338563 - RNA, 18 nt, Human
agcuaauaacaugugaaa

SEQ ID NO: 1338564 - RNA, 12 nt, Human
agcuacaaaugc

SEQ ID NO: 1338565 - RNA, 20 nt, Human
agcuaauuugcauuaaauuc

SEQ ID NO: 1338566 - RNA, 22 nt, Human
agcuaauuugcauuaaauucac

SEQ ID NO: 1338567 - RNA, 15 nt, Human
agcuauuuuucuaac

SEQ ID NO: 1338568 - RNA, 20 nt, Human
agcuauuuuucuaacuacaa

SEQ ID NO: 1338569 - RNA, 17 nt, Human
agcuauuuuucuaacua

SEQ ID NO: 1338570 - RNA, 13 nt, Human
agcuaauuugcau

SEQ ID NO: 1338571 - RNA, 14 nt, Human
agcuaauuugcauu

SEQ ID NO: 1338572 - RNA, 21 nt, Human
agcuaauucuacucacagugc

SEQ ID NO: 1338573 - RNA, 13 nt, Human
agcucaaugagca

SEQ ID NO: 1338574 - RNA, 14 nt, Human
agcucaaugagcau

SEQ ID NO: 1338575 - RNA, 15 nt, Human
agcucaaugagcaug

SEQ ID NO: 1338576 - RNA, 17 nt, Human
agcucaaugagcauguu

SEQ ID NO: 1338577 - RNA, 14 nt, Human
agcucaauggacug

SEQ ID NO: 1338578 - RNA, 23 nt, Human
agcucaaugagcauguuuagacu

SEQ ID NO: 1338579 - RNA, 14 nt, Human
agcucacaaggcag

SEQ ID NO: 1338580 - RNA, 14 nt, Human
agcucaaagguuug

SEQ ID NO: 1338581 - RNA, 20 nt, Human
agcucaaagguuuggaagga

SEQ ID NO: 1338582 - RNA, 23 nt, Human
agcucaaagguuuggaaggagca

SEQ ID NO: 1338583 - RNA, 21 nt, Human
agcucaaagguuuggaaggag

SEQ ID NO: 1338584 - RNA, 14 nt, Human
agcucaacucucuu

SEQ ID NO: 1338585 - RNA, 22 nt, Human
agcucaacucucuuauugccuc

SEQ ID NO: 1338586 - RNA, 23 nt, Human
agcucaacucucuuauugccuca

SEQ ID NO: 1338587 - RNA, 12 nt, Human
agcucaaugagc

SEQ ID NO: 1338588 - RNA, 19 nt, Human
agcucacugcaaccuccac

SEQ ID NO: 1338589 - RNA, 13 nt, Human
agcucacuucugg

SEQ ID NO: 1338590 - RNA, 23 nt, Human
agcucacuucugggcuucaucug

SEQ ID NO: 1338591 - RNA, 18 nt, Human
agcucagaaaauaucccu

SEQ ID NO: 1338592 - RNA, 19 nt, Human
agcucagaaaauaucccuc

SEQ ID NO: 1338593 - RNA, 21 nt, Human
agcucacguccugagaaagcu

SEQ ID NO: 1338594 - RNA, 20 nt, Human
agcucacguccugagaaagc

SEQ ID NO: 1338595 - RNA, 19 nt, Human
agcucacuccccaaccccc

SEQ ID NO: 1338596 - RNA, 21 nt, Human
agcucagaaaauaucccuccu

SEQ ID NO: 1338597 - RNA, 19 nt, Human
agcucagaggcgcacugug

SEQ ID NO: 1338598 - RNA, 22 nt, Human
agcucagaggcgcacugugacc

SEQ ID NO: 1338599 - RNA, 13 nt, Human
agcucagcacugc

SEQ ID NO: 1338600 - RNA, 16 nt, Human
agcucacaaggcagca

SEQ ID NO: 1338601 - RNA, 15 nt, Human
agcucacaaggcagc

SEQ ID NO: 1338602 - RNA, 18 nt, Human
agccuggcuucaaauugu

SEQ ID NO: 1338603 - RNA, 17 nt, Human
agccuggcuucaaauug

SEQ ID NO: 1338604 - RNA, 15 nt, Human
agcccucccugcccc

SEQ ID NO: 1338605 - RNA, 16 nt, Human
agcccucccugccccu

SEQ ID NO: 1338606 - RNA, 17 nt, Human
agcccucccugccccuc

SEQ ID NO: 1338607 - RNA, 19 nt, Human
agcccucccugccccuccc

SEQ ID NO: 1338608 - RNA, 22 nt, Human
agcccucccugccccucccuuc

SEQ ID NO: 1338609 - RNA, 23 nt, Human
agcccucccugccccucccuuca

SEQ ID NO: 1338610 - RNA, 17 nt, Human
agccuggggcugaggcu

SEQ ID NO: 1338611 - RNA, 22 nt, Human
agccuggggcucuaacgccuga

SEQ ID NO: 1338612 - RNA, 23 nt, Human
agccuggggcucuaacgccugag

SEQ ID NO: 1338613 - RNA, 14 nt, Human
agccuggggcucua

SEQ ID NO: 1338614 - RNA, 15 nt, Human
agccuggggcucuaa

SEQ ID NO: 1338615 - RNA, 16 nt, Human
agccuggggcucuaac

SEQ ID NO: 1338616 - RNA, 21 nt, Human
agccuggggcucuaacgccug

SEQ ID NO: 1338617 - RNA, 18 nt, Human
agccugggcgcugguccu

SEQ ID NO: 1338618 - RNA, 23 nt, Human
agccugggccuauggagagcccu

SEQ ID NO: 1338619 - RNA, 13 nt, Human
agccuggggcucu

SEQ ID NO: 1338620 - RNA, 17 nt, Human
agccugggaaagccccu

SEQ ID NO: 1338621 - RNA, 12 nt, Human
agccugggccua

SEQ ID NO: 1338622 - RNA, 19 nt, Human
agccugggccuauggagag

SEQ ID NO: 1338623 - RNA, 20 nt, Human
agccugggccuauggagagc

SEQ ID NO: 1338624 - RNA, 21 nt, Human
agccugggccuauggagagcc

SEQ ID NO: 1338625 - RNA, 22 nt, Human
agccugggccuauggagagccc

SEQ ID NO: 1338626 - RNA, 24 nt, Human
agccugggccuauggagagcccug

SEQ ID NO: 1338627 - RNA, 19 nt, Human
agccugggaaagccccugc

SEQ ID NO: 1338628 - RNA, 19 nt, Human
agcgacuccguuggccacu

SEQ ID NO: 1338629 - RNA, 20 nt, Human
agcgacuccguuggccacuc

SEQ ID NO: 1338630 - RNA, 21 nt, Human
agcgacuccguuggccacucc

SEQ ID NO: 1338631 - RNA, 19 nt, Human
agcgagcgcccagcuccug

SEQ ID NO: 1338632 - RNA, 20 nt, Human
agcgaggagaugcuccuugg

SEQ ID NO: 1338633 - RNA, 15 nt, Human
agcgaggaggcucca

SEQ ID NO: 1338634 - RNA, 19 nt, Human
agcgaggaggcuccagagg

SEQ ID NO: 1338635 - RNA, 15 nt, Human
agcgagggcgugucu

SEQ ID NO: 1338636 - RNA, 19 nt, Human
agcgaguggagucugccac

SEQ ID NO: 1338637 - RNA, 22 nt, Human
agcgaguggagucugccaccca

SEQ ID NO: 1338638 - RNA, 21 nt, Human
agcgaguggagucugccaccc

SEQ ID NO: 1338639 - RNA, 19 nt, Human
agcgauucccucucccagg

SEQ ID NO: 1338640 - RNA, 20 nt, Human
agcgauucccucucccaggc

SEQ ID NO: 1338641 - RNA, 21 nt, Human
agcgauucccucucccaggcc

SEQ ID NO: 1338642 - RNA, 22 nt, Human
agcgauucccucucccaggccc

SEQ ID NO: 1338643 - RNA, 15 nt, Human
agccuuuggaaacag

SEQ ID NO: 1338644 - RNA, 14 nt, Human
agccuggggcuggc

SEQ ID NO: 1338645 - RNA, 14 nt, Human
agccuuuguucccc

SEQ ID NO: 1338646 - RNA, 20 nt, Human
agccuuuguuccccacugga

SEQ ID NO: 1338647 - RNA, 21 nt, Human
agccuuuguuccccacuggag

SEQ ID NO: 1338648 - RNA, 22 nt, Human
agccuuuguuccccacuggagc

SEQ ID NO: 1338649 - RNA, 24 nt, Human
agccuuuguuccccacuggagcag

SEQ ID NO: 1338650 - RNA, 23 nt, Human
agccuuuguuccccacuggagca

SEQ ID NO: 1338651 - RNA, 18 nt, Human
agccuuuucccucuuugg

SEQ ID NO: 1338652 - RNA, 23 nt, Human
agccuuuucccucuuuggcuccc

SEQ ID NO: 1338653 - RNA, 14 nt, Human
agcgaccgcccccu

SEQ ID NO: 1338654 - RNA, 15 nt, Human
agcgaccgcccccuc

SEQ ID NO: 1338655 - RNA, 16 nt, Human
agcgaccgcccccucc

SEQ ID NO: 1338656 - RNA, 17 nt, Human
agcgaccgcccccuccu

SEQ ID NO: 1338657 - RNA, 22 nt, Human
agcgaccuuccucauccacccc

SEQ ID NO: 1338658 - RNA, 16 nt, Human
agcgacuccguuggcc

SEQ ID NO: 1338659 - RNA, 17 nt, Human
agcgacuccguuggcca

SEQ ID NO: 1338660 - RNA, 21 nt, Human
agcugaggccacacucagcac

SEQ ID NO: 1338661 - RNA, 20 nt, Human
agcugguuuaauguuuuggc

SEQ ID NO: 1338662 - RNA, 23 nt, Human
agcugaagguuguggccuuugcg

SEQ ID NO: 1338663 - RNA, 15 nt, Human
agcugaauguuuuuc

SEQ ID NO: 1338664 - RNA, 16 nt, Human
agcugaauguuuuucu

SEQ ID NO: 1338665 - RNA, 17 nt, Human
agcugaauguuuuucua

SEQ ID NO: 1338666 - RNA, 18 nt, Human
agcugaauguuuuucuaa

SEQ ID NO: 1338667 - RNA, 20 nt, Human
agcugaauguuuuucuaaag

SEQ ID NO: 1338668 - RNA, 12 nt, Human
agcugagcgcca

SEQ ID NO: 1338669 - RNA, 14 nt, Human
agcugagcgccagg

SEQ ID NO: 1338670 - RNA, 15 nt, Human
agcugagcgccagga

SEQ ID NO: 1338671 - RNA, 17 nt, Human
agcugagcgccaggaug

SEQ ID NO: 1338672 - RNA, 17 nt, Human
agcugagcucacaaggc

SEQ ID NO: 1338673 - RNA, 18 nt, Human
agcugagcucacaaggca

SEQ ID NO: 1338674 - RNA, 19 nt, Human
agcugagcucacaaggcag

SEQ ID NO: 1338675 - RNA, 22 nt, Human
agcugagcucacaaggcagcaa

SEQ ID NO: 1338676 - RNA, 20 nt, Human
agcugagcucacaaggcagc

SEQ ID NO: 1338677 - RNA, 21 nt, Human
agcugagcucacaaggcagca

SEQ ID NO: 1338678 - RNA, 15 nt, Human
agcugaggcagcagu

SEQ ID NO: 1338679 - RNA, 16 nt, Human
agcugaggcagcagug

SEQ ID NO: 1338680 - RNA, 17 nt, Human
agcugaggcagcagugu

SEQ ID NO: 1338681 - RNA, 13 nt, Human
agcugaggccaca

SEQ ID NO: 1338682 - RNA, 17 nt, Human
agcugaggccacacuca

SEQ ID NO: 1338683 - RNA, 16 nt, Human
agcuccuuaaggcucu

SEQ ID NO: 1338684 - RNA, 17 nt, Human
agcuccuuaaggcucuu

SEQ ID NO: 1338685 - RNA, 18 nt, Human
agcuccuuaaggcucuuu

SEQ ID NO: 1338686 - RNA, 12 nt, Human
agcuccuguggc

SEQ ID NO: 1338687 - RNA, 13 nt, Human
agcuccuguggcc

SEQ ID NO: 1338688 - RNA, 15 nt, Human
agcuccuguggcccc

SEQ ID NO: 1338689 - RNA, 16 nt, Human
agcuccuguggcccca

SEQ ID NO: 1338690 - RNA, 19 nt, Human
agcuccuguggccccaccc

SEQ ID NO: 1338691 - RNA, 22 nt, Human
agcuccuguggccccacccugg

SEQ ID NO: 1338692 - RNA, 14 nt, Human
agcuccccucccca

SEQ ID NO: 1338693 - RNA, 18 nt, Human
agcuccccuccccaacug

SEQ ID NO: 1338694 - RNA, 15 nt, Human
agcuccccuccccaa

SEQ ID NO: 1338695 - RNA, 17 nt, Human
agcucagcacugccugc

SEQ ID NO: 1338696 - RNA, 20 nt, Human
agcucagcacugccugcucc

SEQ ID NO: 1338697 - RNA, 23 nt, Human
agcucagcacugccugcucccau

SEQ ID NO: 1338698 - RNA, 21 nt, Human
agcucagcacugccugcuccc

SEQ ID NO: 1338699 - RNA, 21 nt, Human
aggccggcuugccacaccccc

SEQ ID NO: 1338700 - RNA, 20 nt, Human
aggccggcuugccacacccc

SEQ ID NO: 1338701 - RNA, 19 nt, Human
aggccggcuugccacaccc

SEQ ID NO: 1338702 - RNA, 19 nt, Human
aggcggggcuugccuucug

SEQ ID NO: 1338703 - RNA, 14 nt, Human
aggcggggcuugcc

SEQ ID NO: 1338704 - RNA, 15 nt, Human
aggcggggcuugccu

SEQ ID NO: 1338705 - RNA, 16 nt, Human
aggcggggcuugccuu

SEQ ID NO: 1338706 - RNA, 18 nt, Human
aggcggggcuugccuucu

SEQ ID NO: 1338707 - RNA, 16 nt, Human
aggcggugggccuggu

SEQ ID NO: 1338708 - RNA, 14 nt, Human
aggcuaagcugccg

SEQ ID NO: 1338709 - RNA, 14 nt, Human
agggaccggcggac

SEQ ID NO: 1338710 - RNA, 13 nt, Human
agggacugagaga

SEQ ID NO: 1338711 - RNA, 20 nt, Human
agggacugagagaugcagaa

SEQ ID NO: 1338712 - RNA, 15 nt, Human
agggacugaggggag

SEQ ID NO: 1338713 - RNA, 23 nt, Human
agggacugccagucccccugccc

SEQ ID NO: 1338714 - RNA, 18 nt, Human
agggaccacacccuguac

SEQ ID NO: 1338715 - RNA, 13 nt, Human
agggacccagcua

SEQ ID NO: 1338716 - RNA, 23 nt, Human
aggcuggucucgaacuccugacc

SEQ ID NO: 1338717 - RNA, 23 nt, Human
aggcugguccuauggccucaugu

SEQ ID NO: 1338718 - RNA, 17 nt, Human
aggcuggucuaaaacuc

SEQ ID NO: 1338719 - RNA, 18 nt, Human
aggcugaggcuggcacag

SEQ ID NO: 1338720 - RNA, 17 nt, Human
aggcugguccuauggcc

SEQ ID NO: 1338721 - RNA, 22 nt, Human
aggcuggucucaaacuccugac

SEQ ID NO: 1338722 - RNA, 14 nt, Human
aggcugaggcuggc

SEQ ID NO: 1338723 - RNA, 15 nt, Human
aggcugaggcuggca

SEQ ID NO: 1338724 - RNA, 16 nt, Human
aggcugaggcuggcac

SEQ ID NO: 1338725 - RNA, 17 nt, Human
aggcugaggcuggcaca

SEQ ID NO: 1338726 - RNA, 13 nt, Human
aggcugaggccug

SEQ ID NO: 1338727 - RNA, 14 nt, Human
aggcugaggccugg

SEQ ID NO: 1338728 - RNA, 15 nt, Human
aggcugaggccugga

SEQ ID NO: 1338729 - RNA, 16 nt, Human
aggcugaggccuggac

SEQ ID NO: 1338730 - RNA, 17 nt, Human
aggcugaggccuggacu

SEQ ID NO: 1338731 - RNA, 16 nt, Human
aggcugaccacagcac

SEQ ID NO: 1338732 - RNA, 17 nt, Human
aggcugaccacagcaca

SEQ ID NO: 1338733 - RNA, 18 nt, Human
aggcugaccacagcacag

SEQ ID NO: 1338734 - RNA, 21 nt, Human
aggcugaccacagcacagcca

SEQ ID NO: 1338735 - RNA, 13 nt, Human
aggcugaccacag

SEQ ID NO: 1338736 - RNA, 14 nt, Human
aggcugaccacagc

SEQ ID NO: 1338737 - RNA, 12 nt, Human
aggcuaauuuuu

SEQ ID NO: 1338738 - RNA, 23 nt, Human
aggcuaauuuuuuuguauuuuag

SEQ ID NO: 1338739 - RNA, 22 nt, Human
aggcuaauuuuuuuguauuuua

SEQ ID NO: 1338740 - RNA, 12 nt, Human
aggcuacagaga

SEQ ID NO: 1338741 - RNA, 13 nt, Human
aggcuacagagaa

SEQ ID NO: 1338742 - RNA, 14 nt, Human
aggcuacagagaag

SEQ ID NO: 1338743 - RNA, 15 nt, Human
aggcuacagagaagc

SEQ ID NO: 1338744 - RNA, 16 nt, Human
aggcuacagagaagcc

SEQ ID NO: 1338745 - RNA, 17 nt, Human
aggcuacagagaagccu

SEQ ID NO: 1338746 - RNA, 18 nt, Human
aggcuacagagaagccuu

SEQ ID NO: 1338747 - RNA, 19 nt, Human
aggcuacagagaagccuuc

SEQ ID NO: 1338748 - RNA, 20 nt, Human
aggcuacagagaagccuuca

SEQ ID NO: 1338749 - RNA, 22 nt, Human
aggcuacagagaagccuucaag

SEQ ID NO: 1338750 - RNA, 15 nt, Human
aggcagagaagaaag

SEQ ID NO: 1338751 - RNA, 14 nt, Human
aggcagagaagaaa

SEQ ID NO: 1338752 - RNA, 13 nt, Human
aggcagagaagaa

SEQ ID NO: 1338753 - RNA, 14 nt, Human
aggcagaggcccag

SEQ ID NO: 1338754 - RNA, 17 nt, Human
aggcagaggcccaggcu

SEQ ID NO: 1338755 - RNA, 19 nt, Human
aggcagaggcccaggcugc

SEQ ID NO: 1338756 - RNA, 20 nt, Human
aggcagaggcccaggcugcc

SEQ ID NO: 1338757 - RNA, 21 nt, Human
aggcagaggcccaggcugccg

SEQ ID NO: 1338758 - RNA, 22 nt, Human
aggcagaggcccaggcugccgu

SEQ ID NO: 1338759 - RNA, 14 nt, Human
aggcagaggccugg

SEQ ID NO: 1338760 - RNA, 18 nt, Human
aggcagaggccugggcug

SEQ ID NO: 1338761 - RNA, 14 nt, Human
aggcacucuagauu

SEQ ID NO: 1338762 - RNA, 15 nt, Human
aggcacucuagauuc

SEQ ID NO: 1338763 - RNA, 17 nt, Human
aggcacucuagauucca

SEQ ID NO: 1338764 - RNA, 17 nt, Human
aggcacugaagugcuua

SEQ ID NO: 1338765 - RNA, 23 nt, Human
aggcacugagauaccagcgagga

SEQ ID NO: 1338766 - RNA, 20 nt, Human
aggagagggcgcuccucucu

SEQ ID NO: 1338767 - RNA, 21 nt, Human
aggagaggcaacauccaaaau

SEQ ID NO: 1338768 - RNA, 20 nt, Human
aggagaggcaacauccaaaa

SEQ ID NO: 1338769 - RNA, 21 nt, Human
aggcaccugguggccaugcuc

SEQ ID NO: 1338770 - RNA, 20 nt, Human
aggcaccugguggccaugcu

SEQ ID NO: 1338771 - RNA, 12 nt, Human
aggcauggugga

SEQ ID NO: 1338772 - RNA, 17 nt, Human
aggcagaggccugggcu

SEQ ID NO: 1338773 - RNA, 15 nt, Human
aggcagcaaggcccg

SEQ ID NO: 1338774 - RNA, 16 nt, Human
aggcagcaaggcccga

SEQ ID NO: 1338775 - RNA, 17 nt, Human
aggcagcaaggcccgag

SEQ ID NO: 1338776 - RNA, 18 nt, Human
aggcagcaaggcccgagc

SEQ ID NO: 1338777 - RNA, 23 nt, Human
aggcagcaaggcccgagcagcug

SEQ ID NO: 1338778 - RNA, 19 nt, Human
aggcagcagugugaggcca

SEQ ID NO: 1338779 - RNA, 20 nt, Human
aggcagcagugugaggccag

SEQ ID NO: 1338780 - RNA, 22 nt, Human
aggcagcagugugaggccaggg

SEQ ID NO: 1338781 - RNA, 23 nt, Human
aggcagcagugugaggccagggc

SEQ ID NO: 1338782 - RNA, 21 nt, Human
aggccaugggcacugugggua

SEQ ID NO: 1338783 - RNA, 23 nt, Human
aggccaugggcacuguggguaga

SEQ ID NO: 1338784 - RNA, 13 nt, Human
aggcccuggauca

SEQ ID NO: 1338785 - RNA, 18 nt, Human
aggcccuggaucagcgug

SEQ ID NO: 1338786 - RNA, 21 nt, Human
aggcccuggaucagcguggcc

SEQ ID NO: 1338787 - RNA, 23 nt, Human
aggcccuggaucagcguggccuu

SEQ ID NO: 1338788 - RNA, 14 nt, Human
aggcccuggccucc

SEQ ID NO: 1338789 - RNA, 15 nt, Human
aggcccuggccuccc

SEQ ID NO: 1338790 - RNA, 21 nt, Human
aggcccuggccuccccugcca

SEQ ID NO: 1338791 - RNA, 22 nt, Human
aggcccuggccuccccugccac

SEQ ID NO: 1338792 - RNA, 23 nt, Human
aggcccuggccuccccugccacc

SEQ ID NO: 1338793 - RNA, 22 nt, Human
aggcccuuccucuccacugccu

SEQ ID NO: 1338794 - RNA, 16 nt, Human
aggcccuuauuuucaa

SEQ ID NO: 1338795 - RNA, 13 nt, Human
aggcccugugccc

SEQ ID NO: 1338796 - RNA, 16 nt, Human
aggccagcugugguuu

SEQ ID NO: 1338797 - RNA, 20 nt, Human
aggccagcugugguuuucuu

SEQ ID NO: 1338798 - RNA, 21 nt, Human
aggccagcugugguuuucuuu

SEQ ID NO: 1338799 - RNA, 23 nt, Human
aggccagcugugguuuucuuuug

SEQ ID NO: 1338800 - RNA, 15 nt, Human
aggccaggacucugc

SEQ ID NO: 1338801 - RNA, 17 nt, Human
aggccaggacucugcag

SEQ ID NO: 1338802 - RNA, 18 nt, Human
aggccaggacucugcagc

SEQ ID NO: 1338803 - RNA, 19 nt, Human
aggccaggacucugcagcc

SEQ ID NO: 1338804 - RNA, 20 nt, Human
aggccaggacucugcagccu

SEQ ID NO: 1338805 - RNA, 21 nt, Human
aggccaggacucugcagccuc

SEQ ID NO: 1338806 - RNA, 23 nt, Human
aggccaggacucugcagccucag

SEQ ID NO: 1338807 - RNA, 11 nt, Human
aggccaggcau

SEQ ID NO: 1338808 - RNA, 22 nt, Human
aggccaggacucugcagccuca

SEQ ID NO: 1338809 - RNA, 18 nt, Human
aggccaguaguucucaaa

SEQ ID NO: 1338810 - RNA, 19 nt, Human
aggccaguaguucucaaag

SEQ ID NO: 1338811 - RNA, 16 nt, Human
aggccauaaaacaggu

SEQ ID NO: 1338812 - RNA, 21 nt, Human
aggccaucugggcuccuccag

SEQ ID NO: 1338813 - RNA, 22 nt, Human
aggccaucugggcuccuccagg

SEQ ID NO: 1338814 - RNA, 13 nt, Human
aggccauggacuc

SEQ ID NO: 1338815 - RNA, 17 nt, Human
aggccauggacucuguc

SEQ ID NO: 1338816 - RNA, 18 nt, Human
aggccauggacucugucc

SEQ ID NO: 1338817 - RNA, 19 nt, Human
aggccauggacucuguccu

SEQ ID NO: 1338818 - RNA, 20 nt, Human
aggccauggacucuguccug

SEQ ID NO: 1338819 - RNA, 21 nt, Human
aggccauggacucuguccuga

SEQ ID NO: 1338820 - RNA, 22 nt, Human
aggccauggacucuguccugaa

SEQ ID NO: 1338821 - RNA, 11 nt, Human
agguacuguau

SEQ ID NO: 1338822 - RNA, 12 nt, Human
agguacuauuau

SEQ ID NO: 1338823 - RNA, 18 nt, Human
agguccgguguucuaaga

SEQ ID NO: 1338824 - RNA, 19 nt, Human
agguccgguguucuaagau

SEQ ID NO: 1338825 - RNA, 15 nt, Human
agguaagaaguuuua

SEQ ID NO: 1338826 - RNA, 18 nt, Human
agguaacuaacugcauac

SEQ ID NO: 1338827 - RNA, 19 nt, Human
agguaacuaacugcauaca

SEQ ID NO: 1338828 - RNA, 19 nt, Human
agguacgaugacaguguuc

SEQ ID NO: 1338829 - RNA, 21 nt, Human
agguccucaguguccucaggg

SEQ ID NO: 1338830 - RNA, 15 nt, Human
agguccucagagaau

SEQ ID NO: 1338831 - RNA, 13 nt, Human
agguccucuguca

SEQ ID NO: 1338832 - RNA, 14 nt, Human
agguccucugucag

SEQ ID NO: 1338833 - RNA, 19 nt, Human
agguccucugucagucaca

SEQ ID NO: 1338834 - RNA, 23 nt, Human
agguccucugucagucacagcca

SEQ ID NO: 1338835 - RNA, 12 nt, Human
agguccugagca

SEQ ID NO: 1338836 - RNA, 13 nt, Human
agguccugagcac

SEQ ID NO: 1338837 - RNA, 15 nt, Human
agguccugagcacug

SEQ ID NO: 1338838 - RNA, 16 nt, Human
agguccugagcacugc

SEQ ID NO: 1338839 - RNA, 17 nt, Human
agguccugagcacugcc

SEQ ID NO: 1338840 - RNA, 18 nt, Human
agguccugagcacugcca

SEQ ID NO: 1338841 - RNA, 22 nt, Human
aggucgguagguucagccaagg

SEQ ID NO: 1338842 - RNA, 19 nt, Human
agguccugagcacugccag

SEQ ID NO: 1338843 - RNA, 12 nt, Human
aggucucagccc

SEQ ID NO: 1338844 - RNA, 14 nt, Human
aggucucagccccu

SEQ ID NO: 1338845 - RNA, 13 nt, Human
aggucucagcccc

SEQ ID NO: 1338846 - RNA, 13 nt, Human
aggucucccugga

SEQ ID NO: 1338847 - RNA, 21 nt, Human
aggguuugugacagggcgggg

SEQ ID NO: 1338848 - RNA, 16 nt, Human
aggguuuuaacuuugu

SEQ ID NO: 1338849 - RNA, 15 nt, Human
aggguuuuaacuuug

SEQ ID NO: 1338850 - RNA, 16 nt, Human
agggucggugccuuca

SEQ ID NO: 1338851 - RNA, 14 nt, Human
agggccugaugggg

SEQ ID NO: 1338852 - RNA, 19 nt, Human
agggccugaugggguggaa

SEQ ID NO: 1338853 - RNA, 17 nt, Human
agggcaaauuggagaaa

SEQ ID NO: 1338854 - RNA, 15 nt, Human
agggcaaagccaggu

SEQ ID NO: 1338855 - RNA, 18 nt, Human
agggcaaagccagguccc

SEQ ID NO: 1338856 - RNA, 20 nt, Human
agggcaaagccaggucccuc

SEQ ID NO: 1338857 - RNA, 18 nt, Human
agggcaacagaucaguaa

SEQ ID NO: 1338858 - RNA, 21 nt, Human
agggccugaugggguggaagg

SEQ ID NO: 1338859 - RNA, 13 nt, Human
agggauguggguu

SEQ ID NO: 1338860 - RNA, 21 nt, Human
agggauguggguuccacagac

SEQ ID NO: 1338861 - RNA, 22 nt, Human
agggauguggguuccacagacg

SEQ ID NO: 1338862 - RNA, 17 nt, Human
agggauuaaccucugca

SEQ ID NO: 1338863 - RNA, 18 nt, Human
agggauuaaccucugcac

SEQ ID NO: 1338864 - RNA, 15 nt, Human
agggaucccucaucu

SEQ ID NO: 1338865 - RNA, 16 nt, Human
agggaucccucaucug

SEQ ID NO: 1338866 - RNA, 19 nt, Human
agggaucccucaucugucc

SEQ ID NO: 1338867 - RNA, 22 nt, Human
agggaucccucaucugucccuc

SEQ ID NO: 1338868 - RNA, 11 nt, Human
agggcaaagcc

SEQ ID NO: 1338869 - RNA, 13 nt, Human
agggcaaagccag

SEQ ID NO: 1338870 - RNA, 14 nt, Human
agggcaaagccagg

SEQ ID NO: 1338871 - RNA, 21 nt, Human
agggcaaagccaggucccucu

SEQ ID NO: 1338872 - RNA, 19 nt, Human
agggauuaaccucugcacu

SEQ ID NO: 1338873 - RNA, 20 nt, Human
agggacuguaaacacagaca

SEQ ID NO: 1338874 - RNA, 16 nt, Human
agggacugucgcugcu

SEQ ID NO: 1338875 - RNA, 22 nt, Human
agggacugucgcugcuucgugg

SEQ ID NO: 1338876 - RNA, 12 nt, Human
aggggccuggca

SEQ ID NO: 1338877 - RNA, 18 nt, Human
aggggccuggagauccuc

SEQ ID NO: 1338878 - RNA, 21 nt, Human
aggggccuggagauccuccug

SEQ ID NO: 1338879 - RNA, 13 nt, Human
aggggccuggcag

SEQ ID NO: 1338880 - RNA, 15 nt, Human
aggggccuggcagcc

SEQ ID NO: 1338881 - RNA, 22 nt, Human
aggggccuggagauccuccugc

SEQ ID NO: 1338882 - RNA, 14 nt, Human
aggggccugcccag

SEQ ID NO: 1338883 - RNA, 15 nt, Human
aggguaugaagagug

SEQ ID NO: 1338884 - RNA, 21 nt, Human
aggguauggacuaucugucug

SEQ ID NO: 1338885 - RNA, 16 nt, Human
aggguaugaagagugu

SEQ ID NO: 1338886 - RNA, 19 nt, Human
agggucagacgccugagga

SEQ ID NO: 1338887 - RNA, 21 nt, Human
agggucagacgccugaggaac

SEQ ID NO: 1338888 - RNA, 17 nt, Human
aggguccuuuugacacu

SEQ ID NO: 1338889 - RNA, 22 nt, Human
aggguccuuuugacacugcucu

SEQ ID NO: 1338890 - RNA, 14 nt, Human
agggucgaaagcuc

SEQ ID NO: 1338891 - RNA, 15 nt, Human
agggucgaaagcucu

SEQ ID NO: 1338892 - RNA, 16 nt, Human
agggucgaaagcucua

SEQ ID NO: 1338893 - RNA, 18 nt, Human
agggucgaaagcucuaga

SEQ ID NO: 1338894 - RNA, 22 nt, Human
agggucgaaagcucuagaaucu

SEQ ID NO: 1338895 - RNA, 15 nt, Human
agggucggugccuuc

SEQ ID NO: 1338896 - RNA, 13 nt, Human
aggggccccucuc

SEQ ID NO: 1338897 - RNA, 14 nt, Human
aggggccccucuca

SEQ ID NO: 1338898 - RNA, 19 nt, Human
aggggccccucucagcccu

SEQ ID NO: 1338899 - RNA, 12 nt, Human
aggggccugagc

SEQ ID NO: 1338900 - RNA, 13 nt, Human
aggggccugagca

SEQ ID NO: 1338901 - RNA, 14 nt, Human
aggggccugagcag

SEQ ID NO: 1338902 - RNA, 15 nt, Human
aggggccugccaccu

SEQ ID NO: 1338903 - RNA, 17 nt, Human
aggggccugccaccugg

SEQ ID NO: 1338904 - RNA, 19 nt, Human
aggggccugccaccuggac

SEQ ID NO: 1338905 - RNA, 20 nt, Human
aggggccugccaccuggacc

SEQ ID NO: 1338906 - RNA, 21 nt, Human
aggggccugccaccuggaccc

SEQ ID NO: 1338907 - RNA, 22 nt, Human
aggggccugccaccuggacccc

SEQ ID NO: 1338908 - RNA, 13 nt, Human
aggggccugccca

SEQ ID NO: 1338909 - RNA, 13 nt, Human
aggggccuggaga

SEQ ID NO: 1338910 - RNA, 14 nt, Human
aggggccuggagau

SEQ ID NO: 1338911 - RNA, 13 nt, Human
agggccugcugga

SEQ ID NO: 1338912 - RNA, 13 nt, Human
agggcgcaggccg

SEQ ID NO: 1338913 - RNA, 14 nt, Human
agggcgcaggccgu

SEQ ID NO: 1338914 - RNA, 22 nt, Human
augcacaaauucugucucugga

SEQ ID NO: 1338915 - RNA, 15 nt, Human
augcacaaauucugu

SEQ ID NO: 1338916 - RNA, 23 nt, Human
augcacaaauucugucucuggau

SEQ ID NO: 1338917 - RNA, 18 nt, Human
augauguauacugccacu

SEQ ID NO: 1338918 - RNA, 21 nt, Human
augcacaauguagauaagugu

SEQ ID NO: 1338919 - RNA, 16 nt, Human
augcacaagaauggau

SEQ ID NO: 1338920 - RNA, 16 nt, Human
augauggguguuuuua

SEQ ID NO: 1338921 - RNA, 15 nt, Human
augauggaugccaau

SEQ ID NO: 1338922 - RNA, 19 nt, Human
augauggaugccaauauua

SEQ ID NO: 1338923 - RNA, 19 nt, Human
augauggcaauuuuguaac

SEQ ID NO: 1338924 - RNA, 12 nt, Human
augaugaaugag

SEQ ID NO: 1338925 - RNA, 15 nt, Human
augaugaaugagaau

SEQ ID NO: 1338926 - RNA, 19 nt, Human
augaugacuuaguacaaag

SEQ ID NO: 1338927 - RNA, 20 nt, Human
augaugaucaauuauaguuu

SEQ ID NO: 1338928 - RNA, 18 nt, Human
augccuuguuucauauuu

SEQ ID NO: 1338929 - RNA, 24 nt, Human
augccuugguuuuuacugcucuga

SEQ ID NO: 1338930 - RNA, 19 nt, Human
augccugucuuaauuuucu

SEQ ID NO: 1338931 - RNA, 16 nt, Human
augccuuacucuucuu

SEQ ID NO: 1338932 - RNA, 18 nt, Human
augccuuacucuucuuga

SEQ ID NO: 1338933 - RNA, 21 nt, Human
augcauuauaggaucauuugu

SEQ ID NO: 1338934 - RNA, 18 nt, Human
augcauuauaucaaaucu

SEQ ID NO: 1338935 - RNA, 22 nt, Human
augcauuauaggaucauuuguu

SEQ ID NO: 1338936 - RNA, 14 nt, Human
augcauucuucucu

SEQ ID NO: 1338937 - RNA, 19 nt, Human
augcauucuucucuguugu

SEQ ID NO: 1338938 - RNA, 17 nt, Human
augcauucuucucuguu

SEQ ID NO: 1338939 - RNA, 17 nt, Human
auggcuuugugauucaa

SEQ ID NO: 1338940 - RNA, 17 nt, Human
auggauaggcacaggaa

SEQ ID NO: 1338941 - RNA, 15 nt, Human
auggagucuugcucu

SEQ ID NO: 1338942 - RNA, 18 nt, Human
auggauaggcacaggaaa

SEQ ID NO: 1338943 - RNA, 22 nt, Human
auggauccacuggcuggacaaa

SEQ ID NO: 1338944 - RNA, 15 nt, Human
auggaucacaagaug

SEQ ID NO: 1338945 - RNA, 16 nt, Human
auggaucacaagaugg

SEQ ID NO: 1338946 - RNA, 22 nt, Human
auggauauaguuuuacuuuuaa

SEQ ID NO: 1338947 - RNA, 15 nt, Human
auggcugugccucug

SEQ ID NO: 1338948 - RNA, 16 nt, Human
auggcugugccucugc

SEQ ID NO: 1338949 - RNA, 17 nt, Human
auggcugugccucugcc

SEQ ID NO: 1338950 - RNA, 18 nt, Human
auggcugugccucugccu

SEQ ID NO: 1338951 - RNA, 16 nt, Human
auggauccuggaggau

SEQ ID NO: 1338952 - RNA, 19 nt, Human
auggaggggcagagccagg

SEQ ID NO: 1338953 - RNA, 12 nt, Human
auggagguucua

SEQ ID NO: 1338954 - RNA, 13 nt, Human
auggagguucuaa

SEQ ID NO: 1338955 - RNA, 15 nt, Human
auggagguucuaagg

SEQ ID NO: 1338956 - RNA, 16 nt, Human
auggagguucuaaggc

SEQ ID NO: 1338957 - RNA, 17 nt, Human
auggagguucuaaggcc

SEQ ID NO: 1338958 - RNA, 15 nt, Human
auggaggggcagagc

SEQ ID NO: 1338959 - RNA, 14 nt, Human
auggaggggcagag

SEQ ID NO: 1338960 - RNA, 16 nt, Human
auggagggaauaauac

SEQ ID NO: 1338961 - RNA, 21 nt, Human
augcuuuaggauguacaguua

SEQ ID NO: 1338962 - RNA, 18 nt, Human
augcuuuaggauguacag

SEQ ID NO: 1338963 - RNA, 13 nt, Human
augcugauggagc

SEQ ID NO: 1338964 - RNA, 21 nt, Human
augcugagauuacagguguga

SEQ ID NO: 1338965 - RNA, 14 nt, Human
augcugaggccugg

SEQ ID NO: 1338966 - RNA, 15 nt, Human
augcugaggccuggg

SEQ ID NO: 1338967 - RNA, 17 nt, Human
augcugaggccugggcc

SEQ ID NO: 1338968 - RNA, 18 nt, Human
augcugaggccugggccg

SEQ ID NO: 1338969 - RNA, 22 nt, Human
augcugaggccugggccgcugc

SEQ ID NO: 1338970 - RNA, 19 nt, Human
augcugacuguacuccucc

SEQ ID NO: 1338971 - RNA, 22 nt, Human
augcugacauucaccugcccca

SEQ ID NO: 1338972 - RNA, 20 nt, Human
augcugacuguacuccuccc

SEQ ID NO: 1338973 - RNA, 21 nt, Human
augcugacuguacuccuccca

SEQ ID NO: 1338974 - RNA, 23 nt, Human
augcugaauauacagcaggugcu

SEQ ID NO: 1338975 - RNA, 19 nt, Human
augcugacauucaccugcc

SEQ ID NO: 1338976 - RNA, 20 nt, Human
augcugacauucaccugccc

SEQ ID NO: 1338977 - RNA, 12 nt, Human
augcugccucca

SEQ ID NO: 1338978 - RNA, 15 nt, Human
augcugccuccagaa

SEQ ID NO: 1338979 - RNA, 23 nt, Human
augcugccuuauucagggaagga

SEQ ID NO: 1338980 - RNA, 17 nt, Human
auguguaagacaaaaag

SEQ ID NO: 1338981 - RNA, 19 nt, Human
auguguaagacaaaaagcu

SEQ ID NO: 1338982 - RNA, 21 nt, Human
auguguaaacaauuuuauaua

SEQ ID NO: 1338983 - RNA, 16 nt, Human
augugguuuuagauuu

SEQ ID NO: 1338984 - RNA, 20 nt, Human
auguguaugcacaguaaaaa

SEQ ID NO: 1338985 - RNA, 15 nt, Human
auguuccauuaaacg

SEQ ID NO: 1338986 - RNA, 14 nt, Human
auguuccauuaaac

SEQ ID NO: 1338987 - RNA, 19 nt, Human
auguguaugcacaguaaaa

SEQ ID NO: 1338988 - RNA, 15 nt, Human
auguguaugcacagu

SEQ ID NO: 1338989 - RNA, 15 nt, Human
auguguauaaacaag

SEQ ID NO: 1338990 - RNA, 16 nt, Human
auguguaguucaugua

SEQ ID NO: 1338991 - RNA, 18 nt, Human
auguguaguucauguaaa

SEQ ID NO: 1338992 - RNA, 20 nt, Human
auguguaguucauguaaaua

SEQ ID NO: 1338993 - RNA, 19 nt, Human
auguguaguucauguaaau

SEQ ID NO: 1338994 - RNA, 13 nt, Human
auguguauaaaaa

SEQ ID NO: 1338995 - RNA, 23 nt, Human
auguguauaaaaauaaaaaagau

SEQ ID NO: 1338996 - RNA, 12 nt, Human
auguguauaaac

SEQ ID NO: 1338997 - RNA, 13 nt, Human
auguguauaaaca

SEQ ID NO: 1338998 - RNA, 14 nt, Human
auguguauaaacaa

SEQ ID NO: 1338999 - RNA, 13 nt, Human
auguucugucccu

SEQ ID NO: 1339000 - RNA, 14 nt, Human
auguucugucccuu

SEQ ID NO: 1339001 - RNA, 20 nt, Human
auguucugucccuugccccc

SEQ ID NO: 1339002 - RNA, 23 nt, Human
auguucugucccuugccccccug

SEQ ID NO: 1339003 - RNA, 13 nt, Human
auguucuguuugc

SEQ ID NO: 1339004 - RNA, 16 nt, Human
auguucuguuugcugu

SEQ ID NO: 1339005 - RNA, 17 nt, Human
auguucuguuugcugug

SEQ ID NO: 1339006 - RNA, 13 nt, Human
auguuuccagcau

SEQ ID NO: 1339007 - RNA, 15 nt, Human
auguuuccagcauuc

SEQ ID NO: 1339008 - RNA, 16 nt, Human
auguuuccagcauucc

SEQ ID NO: 1339009 - RNA, 18 nt, Human
auguuuccagcauuccca

SEQ ID NO: 1339010 - RNA, 19 nt, Human
auguuuccagcauucccag

SEQ ID NO: 1339011 - RNA, 20 nt, Human
auguuuccagcauucccagg

SEQ ID NO: 1339012 - RNA, 21 nt, Human
auguuuccagcauucccaggu

SEQ ID NO: 1339013 - RNA, 14 nt, Human
auguuuccucuagu

SEQ ID NO: 1339014 - RNA, 20 nt, Human
auguuuccucuaguucuuug

SEQ ID NO: 1339015 - RNA, 12 nt, Human
auguuucuggau

SEQ ID NO: 1339016 - RNA, 15 nt, Human
auguuucuucuaggu

SEQ ID NO: 1339017 - RNA, 18 nt, Human
augugaaaucauucauuu

SEQ ID NO: 1339018 - RNA, 17 nt, Human
augugaaaucauucauu

SEQ ID NO: 1339019 - RNA, 20 nt, Human
augugaaauuuacaucauuu

SEQ ID NO: 1339020 - RNA, 22 nt, Human
augugaaaaugguccaggagaa

SEQ ID NO: 1339021 - RNA, 23 nt, Human
augugaaauuuacaucauuucuu

SEQ ID NO: 1339022 - RNA, 15 nt, Human
augugaaacauguuu

SEQ ID NO: 1339023 - RNA, 21 nt, Human
augugaaaaugguccaggaga

SEQ ID NO: 1339024 - RNA, 14 nt, Human
augugaaacauguu

SEQ ID NO: 1339025 - RNA, 16 nt, Human
augucaauuucugugu

SEQ ID NO: 1339026 - RNA, 19 nt, Human
augucaauuucuguguugc

SEQ ID NO: 1339027 - RNA, 14 nt, Human
auguaaauuuguac

SEQ ID NO: 1339028 - RNA, 15 nt, Human
auguaaauuuguacu

SEQ ID NO: 1339029 - RNA, 17 nt, Human
auguaaauuuguacuau

SEQ ID NO: 1339030 - RNA, 21 nt, Human
auguaaauuuguacuauuuaa

SEQ ID NO: 1339031 - RNA, 19 nt, Human
auguaaauuuguacuauuu

SEQ ID NO: 1339032 - RNA, 14 nt, Human
auguaacuagaauu

SEQ ID NO: 1339033 - RNA, 15 nt, Human
auguaacugccuaga

SEQ ID NO: 1339034 - RNA, 17 nt, Human
auguaacugccuagaaa

SEQ ID NO: 1339035 - RNA, 19 nt, Human
auguaacugccuagaaaca

SEQ ID NO: 1339036 - RNA, 18 nt, Human
auguaacugccuagaaac

SEQ ID NO: 1339037 - RNA, 14 nt, Human
auguaacuuuugua

SEQ ID NO: 1339038 - RNA, 15 nt, Human
auguaauuauuuaug

SEQ ID NO: 1339039 - RNA, 17 nt, Human
auguaauuauuuaugua

SEQ ID NO: 1339040 - RNA, 23 nt, Human
auguaauuauuuauguauggugc

SEQ ID NO: 1339041 - RNA, 21 nt, Human
auguaauuucaggaggaauac

SEQ ID NO: 1339042 - RNA, 12 nt, Human
auguaauuuugu

SEQ ID NO: 1339043 - RNA, 21 nt, Human
augucaaucagccuaguugau

SEQ ID NO: 1339044 - RNA, 17 nt, Human
auguauuuauaaauaua

SEQ ID NO: 1339045 - RNA, 15 nt, Human
auguaauuuugugua

SEQ ID NO: 1339046 - RNA, 16 nt, Human
auguaauuuuguguaa

SEQ ID NO: 1339047 - RNA, 17 nt, Human
auguaauuuuguguaag

SEQ ID NO: 1339048 - RNA, 22 nt, Human
auguaauuuuguguaagaaaua

SEQ ID NO: 1339049 - RNA, 23 nt, Human
auguaauuuuguguaagaaauac

SEQ ID NO: 1339050 - RNA, 20 nt, Human
auguacaaaaaaaaaacccu

SEQ ID NO: 1339051 - RNA, 15 nt, Human
auguauugugcaaug

SEQ ID NO: 1339052 - RNA, 17 nt, Human
auguauugugcaaugug

SEQ ID NO: 1339053 - RNA, 18 nt, Human
auguauugugcaaugugu

SEQ ID NO: 1339054 - RNA, 19 nt, Human
auguauugugcaaugugua

SEQ ID NO: 1339055 - RNA, 20 nt, Human
auguauugugcaauguguau

SEQ ID NO: 1339056 - RNA, 22 nt, Human
auguauugugcaauguguauaa

SEQ ID NO: 1339057 - RNA, 24 nt, Human
auguauugugcaauguguauaaac

SEQ ID NO: 1339058 - RNA, 22 nt, Human
auggguuagggaaaacauucca

SEQ ID NO: 1339059 - RNA, 13 nt, Human
auggguggaaagg

SEQ ID NO: 1339060 - RNA, 16 nt, Human
augguaaaaaauuuau

SEQ ID NO: 1339061 - RNA, 22 nt, Human
auggguuuuucccuguacagua

SEQ ID NO: 1339062 - RNA, 18 nt, Human
augguaaaaaauuuauaa

SEQ ID NO: 1339063 - RNA, 14 nt, Human
augguaacugcuuu

SEQ ID NO: 1339064 - RNA, 15 nt, Human
augguaacugcuuuc

SEQ ID NO: 1339065 - RNA, 20 nt, Human
augguaacugcuuucuguuc

SEQ ID NO: 1339066 - RNA, 23 nt, Human
augguaacugcuuucuguuccaa

SEQ ID NO: 1339067 - RNA, 14 nt, Human
augguaauuguugc

SEQ ID NO: 1339068 - RNA, 16 nt, Human
augguaccagaugcag

SEQ ID NO: 1339069 - RNA, 21 nt, Human
augguacugacuuugcuugcu

SEQ ID NO: 1339070 - RNA, 23 nt, Human
augguacuguacagcuggcucua

SEQ ID NO: 1339071 - RNA, 17 nt, Human
augguaggcauuuccua

SEQ ID NO: 1339072 - RNA, 18 nt, Human
augguaggcauuuccuau

SEQ ID NO: 1339073 - RNA, 13 nt, Human
augguccaggaga

SEQ ID NO: 1339074 - RNA, 16 nt, Human
augguccaggagaagg

SEQ ID NO: 1339075 - RNA, 18 nt, Human
augguccaggagaaggcc

SEQ ID NO: 1339076 - RNA, 19 nt, Human
augguccaggagaaggcca

SEQ ID NO: 1339077 - RNA, 20 nt, Human
augguccaauuaguuuccuu

SEQ ID NO: 1339078 - RNA, 17 nt, Human
auggucccacaucccug

SEQ ID NO: 1339079 - RNA, 19 nt, Human
auggucccacaucccuggg

SEQ ID NO: 1339080 - RNA, 20 nt, Human
auggucccacaucccugggc

SEQ ID NO: 1339081 - RNA, 22 nt, Human
auggucccacaucccugggccu

SEQ ID NO: 1339082 - RNA, 23 nt, Human
auggucccacaucccugggccug

SEQ ID NO: 1339083 - RNA, 19 nt, Human
auccucaguuuuugugaaa

SEQ ID NO: 1339084 - RNA, 13 nt, Human
aucccuacaugua

SEQ ID NO: 1339085 - RNA, 14 nt, Human
aucccuacauguau

SEQ ID NO: 1339086 - RNA, 15 nt, Human
aucccuacauguauu

SEQ ID NO: 1339087 - RNA, 18 nt, Human
aucccuacauguauugca

SEQ ID NO: 1339088 - RNA, 15 nt, Human
aucccggcugcccuu

SEQ ID NO: 1339089 - RNA, 15 nt, Human
auccccacgccacag

SEQ ID NO: 1339090 - RNA, 16 nt, Human
auccccacgccacagc

SEQ ID NO: 1339091 - RNA, 17 nt, Human
auccccacgccacagcc

SEQ ID NO: 1339092 - RNA, 18 nt, Human
auccccacgccacagccc

SEQ ID NO: 1339093 - RNA, 20 nt, Human
auccccacgccacagcccuu

SEQ ID NO: 1339094 - RNA, 21 nt, Human
auccccacgccacagcccuuu

SEQ ID NO: 1339095 - RNA, 13 nt, Human
aucccguguucuc

SEQ ID NO: 1339096 - RNA, 16 nt, Human
aucccguguucuccuu

SEQ ID NO: 1339097 - RNA, 12 nt, Human
aucccuacaugu

SEQ ID NO: 1339098 - RNA, 18 nt, Human
auccccaagccuggcaag

SEQ ID NO: 1339099 - RNA, 17 nt, Human
auccccaaggcacuuga

SEQ ID NO: 1339100 - RNA, 19 nt, Human
auccagagucccugccugg

SEQ ID NO: 1339101 - RNA, 20 nt, Human
auccagagucccugccugga

SEQ ID NO: 1339102 - RNA, 21 nt, Human
auccagagucccugccuggac

SEQ ID NO: 1339103 - RNA, 17 nt, Human
auccaccugccuuggcu

SEQ ID NO: 1339104 - RNA, 13 nt, Human
auccacucgccuu

SEQ ID NO: 1339105 - RNA, 22 nt, Human
auccuucaucuggauuccagag

SEQ ID NO: 1339106 - RNA, 16 nt, Human
auccuucacugcucac

SEQ ID NO: 1339107 - RNA, 16 nt, Human
auccuugagucaaaaa

SEQ ID NO: 1339108 - RNA, 23 nt, Human
auccuugaagguauaucuagguu

SEQ ID NO: 1339109 - RNA, 16 nt, Human
auccuugaagguauau

SEQ ID NO: 1339110 - RNA, 22 nt, Human
auccuugccaauagugucaucc

SEQ ID NO: 1339111 - RNA, 16 nt, Human
auccucacagugaaca

SEQ ID NO: 1339112 - RNA, 12 nt, Human
auccucaaucca

SEQ ID NO: 1339113 - RNA, 15 nt, Human
auccucaauccagcu

SEQ ID NO: 1339114 - RNA, 13 nt, Human
auccuuacaaguu

SEQ ID NO: 1339115 - RNA, 18 nt, Human
auccuuagaucuggcaug

SEQ ID NO: 1339116 - RNA, 14 nt, Human
auccuuagaucugg

SEQ ID NO: 1339117 - RNA, 15 nt, Human
aucgccuuccccacc

SEQ ID NO: 1339118 - RNA, 22 nt, Human
aucgcuccugcagccccagccc

SEQ ID NO: 1339119 - RNA, 12 nt, Human
aucgccuuuccc

SEQ ID NO: 1339120 - RNA, 14 nt, Human
auccuugucuuauu

SEQ ID NO: 1339121 - RNA, 20 nt, Human
auccuuucauauaguuagcu

SEQ ID NO: 1339122 - RNA, 17 nt, Human
auccuuucauauaguua

SEQ ID NO: 1339123 - RNA, 12 nt, Human
aucgccuucccc

SEQ ID NO: 1339124 - RNA, 13 nt, Human
aucgccuucccca

SEQ ID NO: 1339125 - RNA, 14 nt, Human
aucaaauauauuca

SEQ ID NO: 1339126 - RNA, 12 nt, Human
aucaaagaugaa

SEQ ID NO: 1339127 - RNA, 18 nt, Human
aucaaagcaucuugcauu

SEQ ID NO: 1339128 - RNA, 23 nt, Human
aucaaaaugcucuuauuucauca

SEQ ID NO: 1339129 - RNA, 22 nt, Human
aucaaacaccaacauaaaaaug

SEQ ID NO: 1339130 - RNA, 13 nt, Human
aucaaaaugcuuu

SEQ ID NO: 1339131 - RNA, 23 nt, Human
aucaaacaccaacauaaaaauga

SEQ ID NO: 1339132 - RNA, 15 nt, Human
aucaaacauuuucug

SEQ ID NO: 1339133 - RNA, 16 nt, Human
aucaaacauuuucugg

SEQ ID NO: 1339134 - RNA, 21 nt, Human
aucaaaaugcucuuauuucau

SEQ ID NO: 1339135 - RNA, 20 nt, Human
aucaaaaugcucuuauuuca

SEQ ID NO: 1339136 - RNA, 12 nt, Human
aucaaaaugcuu

SEQ ID NO: 1339137 - RNA, 22 nt, Human
aucaaaaugcuuuuuauuucug

SEQ ID NO: 1339138 - RNA, 21 nt, Human
auauuucccaugauuucaugu

SEQ ID NO: 1339139 - RNA, 19 nt, Human
auauuucccaugauuucau

SEQ ID NO: 1339140 - RNA, 19 nt, Human
aucaaaaugcucuuauuuc

SEQ ID NO: 1339141 - RNA, 15 nt, Human
aucaaaaugcucuua

SEQ ID NO: 1339142 - RNA, 23 nt, Human
aucaaaaucucuccacuuucagc

SEQ ID NO: 1339143 - RNA, 13 nt, Human
aucaaaaucucuc

SEQ ID NO: 1339144 - RNA, 15 nt, Human
aucaaaaucucucca

SEQ ID NO: 1339145 - RNA, 16 nt, Human
aucaaaaucucuccac

SEQ ID NO: 1339146 - RNA, 17 nt, Human
aucaaaaucucuccacu

SEQ ID NO: 1339147 - RNA, 16 nt, Human
aucaccgacugaaaau

SEQ ID NO: 1339148 - RNA, 16 nt, Human
aucacccaacgcucca

SEQ ID NO: 1339149 - RNA, 15 nt, Human
aucacccagacauaa

SEQ ID NO: 1339150 - RNA, 23 nt, Human
aucacccagacauaaaggaaaag

SEQ ID NO: 1339151 - RNA, 19 nt, Human
aucaccgugggcucccuga

SEQ ID NO: 1339152 - RNA, 20 nt, Human
aucaccgugggcucccugac

SEQ ID NO: 1339153 - RNA, 22 nt, Human
aucaccgugggcucccugacug

SEQ ID NO: 1339154 - RNA, 23 nt, Human
aucaccacaaacuguaauacaau

SEQ ID NO: 1339155 - RNA, 13 nt, Human
aucaccacaguuu

SEQ ID NO: 1339156 - RNA, 20 nt, Human
aucacaugaauuauuacagu

SEQ ID NO: 1339157 - RNA, 22 nt, Human
aucacaugaauuauuacagugu

SEQ ID NO: 1339158 - RNA, 22 nt, Human
aucaaauauauucagccuggcu

SEQ ID NO: 1339159 - RNA, 13 nt, Human
aucacacacauug

SEQ ID NO: 1339160 - RNA, 20 nt, Human
aucacacacauugcugugaa

SEQ ID NO: 1339161 - RNA, 13 nt, Human
aucacagcccagc

SEQ ID NO: 1339162 - RNA, 15 nt, Human
aucacagcccagccc

SEQ ID NO: 1339163 - RNA, 16 nt, Human
aucacagcccagcccg

SEQ ID NO: 1339164 - RNA, 19 nt, Human
aucaggaagagaaggagca

SEQ ID NO: 1339165 - RNA, 17 nt, Human
aucaggaagagaaggag

SEQ ID NO: 1339166 - RNA, 14 nt, Human
aucaggaagagaag

SEQ ID NO: 1339167 - RNA, 13 nt, Human
aucaggaacguuu

SEQ ID NO: 1339168 - RNA, 23 nt, Human
aucaccucagauggcagcuuuua

SEQ ID NO: 1339169 - RNA, 23 nt, Human
aucaggaacguuuagcugacaaa

SEQ ID NO: 1339170 - RNA, 18 nt, Human
aucaugaagauauuuuuc

SEQ ID NO: 1339171 - RNA, 13 nt, Human
aucagcuuauugu

SEQ ID NO: 1339172 - RNA, 19 nt, Human
aucaccuacucacacaggc

SEQ ID NO: 1339173 - RNA, 16 nt, Human
aucaccuagcugaaug

SEQ ID NO: 1339174 - RNA, 20 nt, Human
aucaccuagcugaauguuuu

SEQ ID NO: 1339175 - RNA, 21 nt, Human
aucaccuagcugaauguuuuu

SEQ ID NO: 1339176 - RNA, 23 nt, Human
aucaccuagcugaauguuuuucu

SEQ ID NO: 1339177 - RNA, 14 nt, Human
aucaccuauuucca

SEQ ID NO: 1339178 - RNA, 15 nt, Human
aucaccuauuuccau

SEQ ID NO: 1339179 - RNA, 22 nt, Human
aucaccuauuuccauucaacaa

SEQ ID NO: 1339180 - RNA, 15 nt, Human
aucaccucagauggc

SEQ ID NO: 1339181 - RNA, 16 nt, Human
aucaccucagauggca

SEQ ID NO: 1339182 - RNA, 19 nt, Human
aucaccucagauggcagcu

SEQ ID NO: 1339183 - RNA, 22 nt, Human
aucaccucagauggcagcuuuu

SEQ ID NO: 1339184 - RNA, 12 nt, Human
aucaugugaaau

SEQ ID NO: 1339185 - RNA, 14 nt, Human
aucaugugaaauca

SEQ ID NO: 1339186 - RNA, 17 nt, Human
aucaugaauuaguuuua

SEQ ID NO: 1339187 - RNA, 21 nt, Human
aucaugaauuaguuuuauaug

SEQ ID NO: 1339188 - RNA, 16 nt, Human
aucuauagaaagcuau

SEQ ID NO: 1339189 - RNA, 16 nt, Human
aucuauaauuuaccua

SEQ ID NO: 1339190 - RNA, 23 nt, Human
aucuauaauuuaccuaagauuac

SEQ ID NO: 1339191 - RNA, 23 nt, Human
aucuauaaggugcucucuuucug

SEQ ID NO: 1339192 - RNA, 11 nt, Human
aucuauaauuu

SEQ ID NO: 1339193 - RNA, 13 nt, Human
aucuauaauuuac

SEQ ID NO: 1339194 - RNA, 22 nt, Human
aucuaguuccccuguuuauuca

SEQ ID NO: 1339195 - RNA, 15 nt, Human
aucuauaaacuauaa

SEQ ID NO: 1339196 - RNA, 20 nt, Human
aucuaguuccccuguuuauu

SEQ ID NO: 1339197 - RNA, 19 nt, Human
aucuaguuccccuguuuau

SEQ ID NO: 1339198 - RNA, 23 nt, Human
aucuaguuccccuguuuauucau

SEQ ID NO: 1339199 - RNA, 17 nt, Human
aucuaguuccccuguuu

SEQ ID NO: 1339200 - RNA, 22 nt, Human
aucuaguuauuuacaggaacuu

SEQ ID NO: 1339201 - RNA, 23 nt, Human
aucuagguuuaugacaguaauug

SEQ ID NO: 1339202 - RNA, 22 nt, Human
aucuagguuuaugacaguaauu

SEQ ID NO: 1339203 - RNA, 21 nt, Human
aucuagguuuaugacaguaau

SEQ ID NO: 1339204 - RNA, 18 nt, Human
aucuagguuuaugacagu

SEQ ID NO: 1339205 - RNA, 15 nt, Human
aucuagguuuaugac

SEQ ID NO: 1339206 - RNA, 14 nt, Human
aucuagguuuauga

SEQ ID NO: 1339207 - RNA, 17 nt, Human
aucuauagaaagcuaua

SEQ ID NO: 1339208 - RNA, 16 nt, Human
aucuauagaacugaau

SEQ ID NO: 1339209 - RNA, 21 nt, Human
aucuauaggaagauugaaccu

SEQ ID NO: 1339210 - RNA, 15 nt, Human
aucuauauuuaacaa

SEQ ID NO: 1339211 - RNA, 14 nt, Human
aucuauauuuuaca

SEQ ID NO: 1339212 - RNA, 19 nt, Human
aucuauuucauguuuuuga

SEQ ID NO: 1339213 - RNA, 20 nt, Human
aucuccgucaacucauauuu

SEQ ID NO: 1339214 - RNA, 15 nt, Human
aucuccguggcuuug

SEQ ID NO: 1339215 - RNA, 14 nt, Human
aucuauuuuggauu

SEQ ID NO: 1339216 - RNA, 22 nt, Human
aucuauuuuggauuguauauug

SEQ ID NO: 1339217 - RNA, 12 nt, Human
aucuccugaaaa

SEQ ID NO: 1339218 - RNA, 16 nt, Human
aucuccugccuuccuc

SEQ ID NO: 1339219 - RNA, 17 nt, Human
aucuccugccuuccucc

SEQ ID NO: 1339220 - RNA, 20 nt, Human
aucuccugccuuccuccugg

SEQ ID NO: 1339221 - RNA, 17 nt, Human
aucucuccacuuucagc

SEQ ID NO: 1339222 - RNA, 18 nt, Human
aucucuccacuuucagcu

SEQ ID NO: 1339223 - RNA, 19 nt, Human
aucucuccacuuucagcug

SEQ ID NO: 1339224 - RNA, 21 nt, Human
aucucuccacuuucagcuguc

SEQ ID NO: 1339225 - RNA, 20 nt, Human
aucucuccacuuucagcugu

SEQ ID NO: 1339226 - RNA, 15 nt, Human
aucuggauuccagag

SEQ ID NO: 1339227 - RNA, 16 nt, Human
aucuggcaacaucuuu

SEQ ID NO: 1339228 - RNA, 17 nt, Human
aucuggcaacaucuuua

SEQ ID NO: 1339229 - RNA, 18 nt, Human
aucuggggagcaggcagc

SEQ ID NO: 1339230 - RNA, 19 nt, Human
aucuggggagcaggcagcc

SEQ ID NO: 1339231 - RNA, 21 nt, Human
aucuggggagcaggcagccag

SEQ ID NO: 1339232 - RNA, 16 nt, Human
aucuggagagaacagg

SEQ ID NO: 1339233 - RNA, 14 nt, Human
aucuggagagaaca

SEQ ID NO: 1339234 - RNA, 16 nt, Human
aucucugcuuuggaaa

SEQ ID NO: 1339235 - RNA, 19 nt, Human
aucucugaagccacaaaua

SEQ ID NO: 1339236 - RNA, 18 nt, Human
aucucugaagccacaaau

SEQ ID NO: 1339237 - RNA, 13 nt, Human
aucuuauuuagga

SEQ ID NO: 1339238 - RNA, 13 nt, Human
aucuuauucauuu

SEQ ID NO: 1339239 - RNA, 18 nt, Human
aucuuauucauuuucucu

SEQ ID NO: 1339240 - RNA, 14 nt, Human
aucuucaauccuug

SEQ ID NO: 1339241 - RNA, 20 nt, Human
aucuuauucauuuucucuaa

SEQ ID NO: 1339242 - RNA, 18 nt, Human
aucugggggccucuucug

SEQ ID NO: 1339243 - RNA, 23 nt, Human
aucuggggagcaggcagccagca

SEQ ID NO: 1339244 - RNA, 22 nt, Human
aucuggggagcaggcagccagc

SEQ ID NO: 1339245 - RNA, 15 nt, Human
aucugggucucuaau

SEQ ID NO: 1339246 - RNA, 18 nt, Human
aucugggucucuaaucug

SEQ ID NO: 1339247 - RNA, 13 nt, Human
aucuucuaaaugg

SEQ ID NO: 1339248 - RNA, 21 nt, Human
aucuucuaaacccaauccaaa

SEQ ID NO: 1339249 - RNA, 13 nt, Human
augaccaguaaag

SEQ ID NO: 1339250 - RNA, 19 nt, Human
augaccacuuuuuagaaag

SEQ ID NO: 1339251 - RNA, 18 nt, Human
augaccacacuccagcug

SEQ ID NO: 1339252 - RNA, 15 nt, Human
augaccacacuccag

SEQ ID NO: 1339253 - RNA, 15 nt, Human
augaaguuguaggua

SEQ ID NO: 1339254 - RNA, 20 nt, Human
augaaguccaagcauuuaga

SEQ ID NO: 1339255 - RNA, 23 nt, Human
augaaguccaagcauuuagaugu

SEQ ID NO: 1339256 - RNA, 14 nt, Human
augaaaaugucuug

SEQ ID NO: 1339257 - RNA, 12 nt, Human
augaaguauuuu

SEQ ID NO: 1339258 - RNA, 21 nt, Human
augaaguacucauacauguua

SEQ ID NO: 1339259 - RNA, 15 nt, Human
augaaaaugucuugu

SEQ ID NO: 1339260 - RNA, 17 nt, Human
augaaaacagaaugucu

SEQ ID NO: 1339261 - RNA, 14 nt, Human
augaaaauguccau

SEQ ID NO: 1339262 - RNA, 13 nt, Human
augaaaaugucuu

SEQ ID NO: 1339263 - RNA, 13 nt, Human
augacugcacaug

SEQ ID NO: 1339264 - RNA, 13 nt, Human
augacugaauggg

SEQ ID NO: 1339265 - RNA, 15 nt, Human
augacugccaagacu

SEQ ID NO: 1339266 - RNA, 16 nt, Human
augacugccaagacug

SEQ ID NO: 1339267 - RNA, 21 nt, Human
augacugccaagacugcugug

SEQ ID NO: 1339268 - RNA, 12 nt, Human
augacugcuugc

SEQ ID NO: 1339269 - RNA, 13 nt, Human
augacugcuugcc

SEQ ID NO: 1339270 - RNA, 22 nt, Human
augacugcuugcccuaagcaga

SEQ ID NO: 1339271 - RNA, 17 nt, Human
augacugcuugcccuaa

SEQ ID NO: 1339272 - RNA, 21 nt, Human
augacugcuugcccuaagcag

SEQ ID NO: 1339273 - RNA, 19 nt, Human
augacuguuuuucggacag

SEQ ID NO: 1339274 - RNA, 20 nt, Human
augagggguuccuccccucc

SEQ ID NO: 1339275 - RNA, 22 nt, Human
augacuguuuuucggacaguuu

SEQ ID NO: 1339276 - RNA, 21 nt, Human
augacuguuuuucggacaguu

SEQ ID NO: 1339277 - RNA, 13 nt, Human
augagggcagcag

SEQ ID NO: 1339278 - RNA, 14 nt, Human
augagggcagcagc

SEQ ID NO: 1339279 - RNA, 15 nt, Human
augagggcagcagcc

SEQ ID NO: 1339280 - RNA, 16 nt, Human
augagggcagcagcca

SEQ ID NO: 1339281 - RNA, 17 nt, Human
augagggcagcagccag

SEQ ID NO: 1339282 - RNA, 18 nt, Human
augagggcagcagccagc

SEQ ID NO: 1339283 - RNA, 19 nt, Human
augagggcagcagccagcc

SEQ ID NO: 1339284 - RNA, 20 nt, Human
augagggcagcagccagccc

SEQ ID NO: 1339285 - RNA, 23 nt, Human
augagggcagcagccagcccugc

SEQ ID NO: 1339286 - RNA, 22 nt, Human
augagggcagcagccagcccug

SEQ ID NO: 1339287 - RNA, 17 nt, Human
augagggguuccucccc

SEQ ID NO: 1339288 - RNA, 22 nt, Human
augagggguuccuccccuccag

SEQ ID NO: 1339289 - RNA, 15 nt, Human
augaaaacagaaugu

SEQ ID NO: 1339290 - RNA, 19 nt, Human
augaaaacagaaugucucu

SEQ ID NO: 1339291 - RNA, 17 nt, Human
agugacccugcucucac

SEQ ID NO: 1339292 - RNA, 16 nt, Human
agugacccuggcuccu

SEQ ID NO: 1339293 - RNA, 17 nt, Human
agugaccucagcuuuga

SEQ ID NO: 1339294 - RNA, 14 nt, Human
agugacccugcucu

SEQ ID NO: 1339295 - RNA, 15 nt, Human
agugaauucccucac

SEQ ID NO: 1339296 - RNA, 16 nt, Human
agugaauucccucacu

SEQ ID NO: 1339297 - RNA, 17 nt, Human
agugaauucccucacuc

SEQ ID NO: 1339298 - RNA, 14 nt, Human
agugaauuugccug

SEQ ID NO: 1339299 - RNA, 16 nt, Human
agucuguugauuaaag

SEQ ID NO: 1339300 - RNA, 17 nt, Human
agucuguuuacugcaag

SEQ ID NO: 1339301 - RNA, 19 nt, Human
agugaaugcugggacucag

SEQ ID NO: 1339302 - RNA, 19 nt, Human
agugaauuaguuuuaaaau

SEQ ID NO: 1339303 - RNA, 20 nt, Human
agugaauuaguuuuaaaaug

SEQ ID NO: 1339304 - RNA, 14 nt, Human
agugaauucccuca

SEQ ID NO: 1339305 - RNA, 23 nt, Human
agugaauucccucacucgucucc

SEQ ID NO: 1339306 - RNA, 16 nt, Human
agucugagagaggcca

SEQ ID NO: 1339307 - RNA, 16 nt, Human
agucugaauuuuuaaa

SEQ ID NO: 1339308 - RNA, 23 nt, Human
agucugagagaggccauucuuuc

SEQ ID NO: 1339309 - RNA, 14 nt, Human
agucugagguccug

SEQ ID NO: 1339310 - RNA, 15 nt, Human
agucugagguccuga

SEQ ID NO: 1339311 - RNA, 16 nt, Human
agucugagguccugag

SEQ ID NO: 1339312 - RNA, 17 nt, Human
agucugagguccugagc

SEQ ID NO: 1339313 - RNA, 18 nt, Human
agucugagguccugagca

SEQ ID NO: 1339314 - RNA, 19 nt, Human
agucugagguccugagcac

SEQ ID NO: 1339315 - RNA, 22 nt, Human
agucugagguccugagcacugc

SEQ ID NO: 1339316 - RNA, 20 nt, Human
agucugagguccugagcacu

SEQ ID NO: 1339317 - RNA, 20 nt, Human
agucugugccacguguuugu

SEQ ID NO: 1339318 - RNA, 14 nt, Human
agucuguggaucag

SEQ ID NO: 1339319 - RNA, 17 nt, Human
agucuguggaucagaga

SEQ ID NO: 1339320 - RNA, 18 nt, Human
agugaccucagcuuugau

SEQ ID NO: 1339321 - RNA, 15 nt, Human
agugacccuggcucc

SEQ ID NO: 1339322 - RNA, 17 nt, Human
agugacuaaaccauugu

SEQ ID NO: 1339323 - RNA, 16 nt, Human
agugacuaaaccauug

SEQ ID NO: 1339324 - RNA, 22 nt, Human
agugacuaaaccauugugcauu

SEQ ID NO: 1339325 - RNA, 15 nt, Human
agugacuaauggcau

SEQ ID NO: 1339326 - RNA, 21 nt, Human
agucauuuuuacaauguaauu

SEQ ID NO: 1339327 - RNA, 14 nt, Human
aguccaagaaucca

SEQ ID NO: 1339328 - RNA, 14 nt, Human
aguccugaaggaca

SEQ ID NO: 1339329 - RNA, 20 nt, Human
aguccugaucagagccgugg

SEQ ID NO: 1339330 - RNA, 19 nt, Human
agucaugcguuuaaucaca

SEQ ID NO: 1339331 - RNA, 20 nt, Human
agucauguaagcugaaaaua

SEQ ID NO: 1339332 - RNA, 12 nt, Human
agucaugugacc

SEQ ID NO: 1339333 - RNA, 14 nt, Human
agucauguuuaucu

SEQ ID NO: 1339334 - RNA, 19 nt, Human
agucauguuuaucugcuua

SEQ ID NO: 1339335 - RNA, 14 nt, Human
agucauuuuuacaa

SEQ ID NO: 1339336 - RNA, 22 nt, Human
agucauuuuuacaauguaauua

SEQ ID NO: 1339337 - RNA, 17 nt, Human
aguauuuuguuucagug

SEQ ID NO: 1339338 - RNA, 14 nt, Human
aguauuuuguuuca

SEQ ID NO: 1339339 - RNA, 21 nt, Human
aguauuuuuauauuuaaaugu

SEQ ID NO: 1339340 - RNA, 19 nt, Human
aguauuuuuauauuuaaau

SEQ ID NO: 1339341 - RNA, 16 nt, Human
aguauuuuuucaguau

SEQ ID NO: 1339342 - RNA, 21 nt, Human
aguauuuuuucaguauuauau

SEQ ID NO: 1339343 - RNA, 13 nt, Human
aguauuuuuugua

SEQ ID NO: 1339344 - RNA, 19 nt, Human
aguauuuuuuguauaauug

SEQ ID NO: 1339345 - RNA, 20 nt, Human
aguauuuuuuguauaauugg

SEQ ID NO: 1339346 - RNA, 19 nt, Human
aguaucggcacuguacaaa

SEQ ID NO: 1339347 - RNA, 16 nt, Human
aguaucggcacuguac

SEQ ID NO: 1339348 - RNA, 15 nt, Human
aguaucggcacugua

SEQ ID NO: 1339349 - RNA, 23 nt, Human
aguacuugggagaccuguaauca

SEQ ID NO: 1339350 - RNA, 13 nt, Human
aguacuuguaguu

SEQ ID NO: 1339351 - RNA, 17 nt, Human
aguacuuguaguuccac

SEQ ID NO: 1339352 - RNA, 14 nt, Human
aguacuuguaguuc

SEQ ID NO: 1339353 - RNA, 14 nt, Human
aguauccacuuugc

SEQ ID NO: 1339354 - RNA, 15 nt, Human
agucaaaaauuaaac

SEQ ID NO: 1339355 - RNA, 19 nt, Human
agucaaaacacuuguaauu

SEQ ID NO: 1339356 - RNA, 22 nt, Human
aguauuuuuuguauaauuggau

SEQ ID NO: 1339357 - RNA, 12 nt, Human
agucaaaaagaa

SEQ ID NO: 1339358 - RNA, 14 nt, Human
agucaaaaagaacc

SEQ ID NO: 1339359 - RNA, 17 nt, Human
agucaaaacuacaaauc

SEQ ID NO: 1339360 - RNA, 24 nt, Human
agucaaucaagucuguuuacugca

SEQ ID NO: 1339361 - RNA, 12 nt, Human
agucaaucaagu

SEQ ID NO: 1339362 - RNA, 18 nt, Human
agucaaucaagucuguuu

SEQ ID NO: 1339363 - RNA, 15 nt, Human
agucaaugacaugaa

SEQ ID NO: 1339364 - RNA, 18 nt, Human
agucaaugacaugaauuu

SEQ ID NO: 1339365 - RNA, 23 nt, Human
agucaauguuuucaguucucuug

SEQ ID NO: 1339366 - RNA, 17 nt, Human
agucaauuacucuauaa

SEQ ID NO: 1339367 - RNA, 21 nt, Human
agucaauuacucuauaauaca

SEQ ID NO: 1339368 - RNA, 11 nt, Human
agucacacagu

SEQ ID NO: 1339369 - RNA, 20 nt, Human
aguaaaucacgcuuuuugaa

SEQ ID NO: 1339370 - RNA, 19 nt, Human
aguaaaucacgcuuuuuga

SEQ ID NO: 1339371 - RNA, 20 nt, Human
aguaaaugugauucaccucu

SEQ ID NO: 1339372 - RNA, 20 nt, Human
aguaacaauacaaauggauu

SEQ ID NO: 1339373 - RNA, 15 nt, Human
aguaaaucuuuuaca

SEQ ID NO: 1339374 - RNA, 14 nt, Human
aguaagagguguua

SEQ ID NO: 1339375 - RNA, 15 nt, Human
aguaaauuauagcuc

SEQ ID NO: 1339376 - RNA, 12 nt, Human
aguaacaaaaau

SEQ ID NO: 1339377 - RNA, 15 nt, Human
aguaacaaaaauaaa

SEQ ID NO: 1339378 - RNA, 13 nt, Human
aguaacaaaaaua

SEQ ID NO: 1339379 - RNA, 19 nt, Human
aguaacaauacaaauggau

SEQ ID NO: 1339380 - RNA, 12 nt, Human
aguaacacuaau

SEQ ID NO: 1339381 - RNA, 13 nt, Human
aguaacacuaaua

SEQ ID NO: 1339382 - RNA, 16 nt, Human
aguaacacuaauauau

SEQ ID NO: 1339383 - RNA, 23 nt, Human
aguaacacuaauauauuuaaaaa

SEQ ID NO: 1339384 - RNA, 17 nt, Human
aguaacacuaauauauu

SEQ ID NO: 1339385 - RNA, 17 nt, Human
aguaacauuugcuguuu

SEQ ID NO: 1339386 - RNA, 15 nt, Human
aguaacauuugcugu

SEQ ID NO: 1339387 - RNA, 23 nt, Human
aguacuaacuccuaggaaaauac

SEQ ID NO: 1339388 - RNA, 13 nt, Human
aguacucauacau

SEQ ID NO: 1339389 - RNA, 20 nt, Human
aguacugggauuacaggcgu

SEQ ID NO: 1339390 - RNA, 16 nt, Human
aguacugggauuacag

SEQ ID NO: 1339391 - RNA, 23 nt, Human
aguacuuagcuaguuuuauucuu

SEQ ID NO: 1339392 - RNA, 20 nt, Human
agugcuaauuuugaaaaacu

SEQ ID NO: 1339393 - RNA, 18 nt, Human
agugcuaauuuugaaaaa

SEQ ID NO: 1339394 - RNA, 11 nt, Human
agugcucugau

SEQ ID NO: 1339395 - RNA, 16 nt, Human
agugcucugaucccuc

SEQ ID NO: 1339396 - RNA, 17 nt, Human
agugcucugaucccucu

SEQ ID NO: 1339397 - RNA, 21 nt, Human
agugcucugaucccucuacag

SEQ ID NO: 1339398 - RNA, 14 nt, Human
agugcucuuuucuc

SEQ ID NO: 1339399 - RNA, 17 nt, Human
agugcucuuuucuccuc

SEQ ID NO: 1339400 - RNA, 14 nt, Human
agugcugaacagug

SEQ ID NO: 1339401 - RNA, 15 nt, Human
agugcugaacagugg

SEQ ID NO: 1339402 - RNA, 16 nt, Human
agugcugaacagugga

SEQ ID NO: 1339403 - RNA, 15 nt, Human
agugcuaauuuugaa

SEQ ID NO: 1339404 - RNA, 17 nt, Human
agugaucugcccgccuc

SEQ ID NO: 1339405 - RNA, 17 nt, Human
agugaugcuaaaaccug

SEQ ID NO: 1339406 - RNA, 16 nt, Human
agugauccuuacaagu

SEQ ID NO: 1339407 - RNA, 20 nt, Human
agugauggguuaguggaugg

SEQ ID NO: 1339408 - RNA, 21 nt, Human
agugauucucaugccucagcc

SEQ ID NO: 1339409 - RNA, 19 nt, Human
agugucaaugcagccccca

SEQ ID NO: 1339410 - RNA, 22 nt, Human
agugggaggguaccagcagaaa

SEQ ID NO: 1339411 - RNA, 24 nt, Human
agugggcaaaagcuuacaaauacu

SEQ ID NO: 1339412 - RNA, 14 nt, Human
agugggcaaaagcu

SEQ ID NO: 1339413 - RNA, 20 nt, Human
agugucauuucucauccaca

SEQ ID NO: 1339414 - RNA, 22 nt, Human
aguguccuuggcaggcugauuu

SEQ ID NO: 1339415 - RNA, 18 nt, Human
agugucauuucucaucca

SEQ ID NO: 1339416 - RNA, 16 nt, Human
agugucacucaaggcg

SEQ ID NO: 1339417 - RNA, 14 nt, Human
agugucaggaggaa

SEQ ID NO: 1339418 - RNA, 14 nt, Human
agugucaggcacug

SEQ ID NO: 1339419 - RNA, 15 nt, Human
agugucaggcacugg

SEQ ID NO: 1339420 - RNA, 19 nt, Human
agugggacagggcauggcc

SEQ ID NO: 1339421 - RNA, 21 nt, Human
agugggacagggcauggccag

SEQ ID NO: 1339422 - RNA, 19 nt, Human
agugggaaaaauguaggag

SEQ ID NO: 1339423 - RNA, 12 nt, Human
agugggaagccc

SEQ ID NO: 1339424 - RNA, 17 nt, Human
agugggaagcccauccu

SEQ ID NO: 1339425 - RNA, 21 nt, Human
agugggaagcccauccugacc

SEQ ID NO: 1339426 - RNA, 22 nt, Human
agugggaagcccauccugacca

SEQ ID NO: 1339427 - RNA, 14 nt, Human
agugggaaaaaugu

SEQ ID NO: 1339428 - RNA, 17 nt, Human
agugggaaaaauguagg

SEQ ID NO: 1339429 - RNA, 18 nt, Human
agugggaaaaauguagga

SEQ ID NO: 1339430 - RNA, 16 nt, Human
agugucuguguuuuga

SEQ ID NO: 1339431 - RNA, 21 nt, Human
aguugacuuauaguacaugau

SEQ ID NO: 1339432 - RNA, 18 nt, Human
aguugacuuauaguacau

SEQ ID NO: 1339433 - RNA, 17 nt, Human
aguugacuuauaguaca

SEQ ID NO: 1339434 - RNA, 14 nt, Human
aguugagacaagaa

SEQ ID NO: 1339435 - RNA, 18 nt, Human
aguugagauaguuuucau

SEQ ID NO: 1339436 - RNA, 17 nt, Human
aguugagacaagaaaau

SEQ ID NO: 1339437 - RNA, 15 nt, Human
aguugacuuauagua

SEQ ID NO: 1339438 - RNA, 23 nt, Human
aguugaauuuuuuuuaacauucc

SEQ ID NO: 1339439 - RNA, 22 nt, Human
aguugaauuuuuuuuaacauuc

SEQ ID NO: 1339440 - RNA, 13 nt, Human
aguugaauuuuuu

SEQ ID NO: 1339441 - RNA, 18 nt, Human
aguugaauuuuuuuuaac

SEQ ID NO: 1339442 - RNA, 21 nt, Human
aguugaauuuuuuuuaacauu

SEQ ID NO: 1339443 - RNA, 17 nt, Human
aguugauaaagauuuuu

SEQ ID NO: 1339444 - RNA, 21 nt, Human
aguugauaaagauuuuuuaau

SEQ ID NO: 1339445 - RNA, 23 nt, Human
aguugauaaagauuuuuuaauaa

SEQ ID NO: 1339446 - RNA, 16 nt, Human
aguugaggacuucuug

SEQ ID NO: 1339447 - RNA, 15 nt, Human
aguugaggacuucuu

SEQ ID NO: 1339448 - RNA, 11 nt, Human
aguugaggcca

SEQ ID NO: 1339449 - RNA, 13 nt, Human
aguugaggccacu

SEQ ID NO: 1339450 - RNA, 19 nt, Human
aguugucccgauuguaacu

SEQ ID NO: 1339451 - RNA, 20 nt, Human
aguugucccgauuguaacuc

SEQ ID NO: 1339452 - RNA, 11 nt, Human
aguugucucug

SEQ ID NO: 1339453 - RNA, 12 nt, Human
aguugucucuga

SEQ ID NO: 1339454 - RNA, 13 nt, Human
aguugucucugau

SEQ ID NO: 1339455 - RNA, 16 nt, Human
aguugucucugaugca

SEQ ID NO: 1339456 - RNA, 22 nt, Human
aguugucucugaugcagcuuau

SEQ ID NO: 1339457 - RNA, 17 nt, Human
aguugucucugaugcag

SEQ ID NO: 1339458 - RNA, 22 nt, Human
aguugugaguuuaccuuguaua

SEQ ID NO: 1339459 - RNA, 14 nt, Human
aguugugcuugagc

SEQ ID NO: 1339460 - RNA, 21 nt, Human
aguucagcgcugucaggauug

SEQ ID NO: 1339461 - RNA, 21 nt, Human
aguucagcauccgcaggugcu

SEQ ID NO: 1339462 - RNA, 20 nt, Human
aguucagaguccuuaaaaug

SEQ ID NO: 1339463 - RNA, 20 nt, Human
auaguacaugauaaaugaua

SEQ ID NO: 1339464 - RNA, 17 nt, Human
auaguaccaaucauuuu

SEQ ID NO: 1339465 - RNA, 23 nt, Human
auaguagaacgcuaucugggaag

SEQ ID NO: 1339466 - RNA, 21 nt, Human
auauaauaaauguacauuaau

SEQ ID NO: 1339467 - RNA, 14 nt, Human
auauaaucauuauu

SEQ ID NO: 1339468 - RNA, 17 nt, Human
auauaaucaucaaguaa

SEQ ID NO: 1339469 - RNA, 24 nt, Human
auagguuuggacaaaauggaauac

SEQ ID NO: 1339470 - RNA, 15 nt, Human
auagccucugucugg

SEQ ID NO: 1339471 - RNA, 16 nt, Human
auagccucugucuggc

SEQ ID NO: 1339472 - RNA, 23 nt, Human
auagccucugucuggcaaugcca

SEQ ID NO: 1339473 - RNA, 23 nt, Human
auagcccuguccuggugguauuu

SEQ ID NO: 1339474 - RNA, 18 nt, Human
auagcccuguccuggugg

SEQ ID NO: 1339475 - RNA, 13 nt, Human
auaguaaaaauaa

SEQ ID NO: 1339476 - RNA, 14 nt, Human
auaguaaaaauaaa

SEQ ID NO: 1339477 - RNA, 19 nt, Human
auaguaaaucacgcuuuuu

SEQ ID NO: 1339478 - RNA, 13 nt, Human
auaguaaaucacg

SEQ ID NO: 1339479 - RNA, 19 nt, Human
auaguaacuucuuauggaa

SEQ ID NO: 1339480 - RNA, 21 nt, Human
auaguaacuucuuauggaauu

SEQ ID NO: 1339481 - RNA, 15 nt, Human
auauacagcucagaa

SEQ ID NO: 1339482 - RNA, 12 nt, Human
auagaaagcuau

SEQ ID NO: 1339483 - RNA, 22 nt, Human
auagaaauaaaggaugugauug

SEQ ID NO: 1339484 - RNA, 19 nt, Human
auagaaaugccaagcacuu

SEQ ID NO: 1339485 - RNA, 12 nt, Human
auagaaaugcca

SEQ ID NO: 1339486 - RNA, 16 nt, Human
auagaaaugccaagca

SEQ ID NO: 1339487 - RNA, 17 nt, Human
auagaaaugccaagcac

SEQ ID NO: 1339488 - RNA, 17 nt, Human
auagcacaggcuaauuu

SEQ ID NO: 1339489 - RNA, 21 nt, Human
auagcagaaaaaccaacaucu

SEQ ID NO: 1339490 - RNA, 16 nt, Human
auagcagacaguguuu

SEQ ID NO: 1339491 - RNA, 18 nt, Human
auagcagcuuauucacaa

SEQ ID NO: 1339492 - RNA, 13 nt, Human
auagcaugcaucu

SEQ ID NO: 1339493 - RNA, 15 nt, Human
auagcagcuuauuca

SEQ ID NO: 1339494 - RNA, 14 nt, Human
auagcacaggcuaa

SEQ ID NO: 1339495 - RNA, 13 nt, Human
auagcagccuuuc

SEQ ID NO: 1339496 - RNA, 19 nt, Human
auagcagccuuucucucuu

SEQ ID NO: 1339497 - RNA, 15 nt, Human
auagcauuguaaaag

SEQ ID NO: 1339498 - RNA, 14 nt, Human
auagcccuguccug

SEQ ID NO: 1339499 - RNA, 15 nt, Human
auagcccuguccugg

SEQ ID NO: 1339500 - RNA, 16 nt, Human
auagcccuguccuggu

SEQ ID NO: 1339501 - RNA, 16 nt, Human
auacuugucuguuuua

SEQ ID NO: 1339502 - RNA, 13 nt, Human
auacuugucuguu

SEQ ID NO: 1339503 - RNA, 17 nt, Human
auacuuguaauuaugga

SEQ ID NO: 1339504 - RNA, 15 nt, Human
auacuuguaauuaug

SEQ ID NO: 1339505 - RNA, 16 nt, Human
auacuuguaauuaugg

SEQ ID NO: 1339506 - RNA, 21 nt, Human
auacuuguaauuauggaguca

SEQ ID NO: 1339507 - RNA, 15 nt, Human
auacuuucccuaccc

SEQ ID NO: 1339508 - RNA, 21 nt, Human
auacuuucccuacccucuaga

SEQ ID NO: 1339509 - RNA, 22 nt, Human
auacuuucccuacccucuagag

SEQ ID NO: 1339510 - RNA, 23 nt, Human
auacuuucccuacccucuagaga

SEQ ID NO: 1339511 - RNA, 24 nt, Human
auacuuucccuacccucuagagaa

SEQ ID NO: 1339512 - RNA, 22 nt, Human
auacuuugaaaggagaugucuu

SEQ ID NO: 1339513 - RNA, 23 nt, Human
auacuuugaaaggagaugucuug

SEQ ID NO: 1339514 - RNA, 12 nt, Human
auacuuugaaug

SEQ ID NO: 1339515 - RNA, 13 nt, Human
auacuuugaaugu

SEQ ID NO: 1339516 - RNA, 15 nt, Human
auacuuugaaugugu

SEQ ID NO: 1339517 - RNA, 17 nt, Human
auacuuugaauguguuu

SEQ ID NO: 1339518 - RNA, 19 nt, Human
auacuuugaauguguuuca

SEQ ID NO: 1339519 - RNA, 20 nt, Human
auacuuugaauguguuucac

SEQ ID NO: 1339520 - RNA, 22 nt, Human
auacuuugaauguguuucacag

SEQ ID NO: 1339521 - RNA, 23 nt, Human
auacuuugaauguguuucacagu

SEQ ID NO: 1339522 - RNA, 22 nt, Human
auacuuugcagcacagcugaga

SEQ ID NO: 1339523 - RNA, 16 nt, Human
auacuuuuacaaguaa

SEQ ID NO: 1339524 - RNA, 22 nt, Human
auagaaaaguauguucuaaccu

SEQ ID NO: 1339525 - RNA, 23 nt, Human
auacuugaagggccagagccagg

SEQ ID NO: 1339526 - RNA, 12 nt, Human
auacuuggauuu

SEQ ID NO: 1339527 - RNA, 13 nt, Human
auacuuggauuua

SEQ ID NO: 1339528 - RNA, 16 nt, Human
auacuuggauuuaguu

SEQ ID NO: 1339529 - RNA, 17 nt, Human
auacuuggauuuaguuu

SEQ ID NO: 1339530 - RNA, 22 nt, Human
auacuuggauuuaguuucagua

SEQ ID NO: 1339531 - RNA, 13 nt, Human
auacuuguaauua

SEQ ID NO: 1339532 - RNA, 14 nt, Human
auacuuguaauuau

SEQ ID NO: 1339533 - RNA, 18 nt, Human
auauauuuuuuucugaaa

SEQ ID NO: 1339534 - RNA, 22 nt, Human
auauuauuuuauguugcauaga

SEQ ID NO: 1339535 - RNA, 15 nt, Human
auauuauuuuauguu

SEQ ID NO: 1339536 - RNA, 14 nt, Human
auauuauguuaaaa

SEQ ID NO: 1339537 - RNA, 16 nt, Human
auauuauguuaaaacu

SEQ ID NO: 1339538 - RNA, 20 nt, Human
auauucaauaaagcugcuga

SEQ ID NO: 1339539 - RNA, 15 nt, Human
auauucaauaaagcu

SEQ ID NO: 1339540 - RNA, 13 nt, Human
auauucaauaaag

SEQ ID NO: 1339541 - RNA, 22 nt, Human
auauuucccaugauuucaugua

SEQ ID NO: 1339542 - RNA, 18 nt, Human
auauuucccaugauuuca

SEQ ID NO: 1339543 - RNA, 11 nt, Human
auauuucauca

SEQ ID NO: 1339544 - RNA, 13 nt, Human
auauuauguuaaa

SEQ ID NO: 1339545 - RNA, 13 nt, Human
auauggccacagu

SEQ ID NO: 1339546 - RNA, 16 nt, Human
auaugcuuaaaauaag

SEQ ID NO: 1339547 - RNA, 18 nt, Human
auaugcuuaaaauaagca

SEQ ID NO: 1339548 - RNA, 14 nt, Human
auaugcuuacugau

SEQ ID NO: 1339549 - RNA, 19 nt, Human
auaugcuuaaaauaagcag

SEQ ID NO: 1339550 - RNA, 13 nt, Human
auaugcacuuaua

SEQ ID NO: 1339551 - RNA, 14 nt, Human
auaugcacuuauaa

SEQ ID NO: 1339552 - RNA, 21 nt, Human
auaucauaauggggguaaagu

SEQ ID NO: 1339553 - RNA, 13 nt, Human
auacagaaaaguu

SEQ ID NO: 1339554 - RNA, 17 nt, Human
auacccccugcaaagcc

SEQ ID NO: 1339555 - RNA, 19 nt, Human
auacccccugcaaagccca

SEQ ID NO: 1339556 - RNA, 23 nt, Human
auacacuuuuucucuuuccauga

SEQ ID NO: 1339557 - RNA, 13 nt, Human
auaccccccucug

SEQ ID NO: 1339558 - RNA, 22 nt, Human
auacacuuauuggaacucugcu

SEQ ID NO: 1339559 - RNA, 18 nt, Human
auaauguuucaaacauau

SEQ ID NO: 1339560 - RNA, 23 nt, Human
auaauguuucaaacauauauaac

SEQ ID NO: 1339561 - RNA, 19 nt, Human
auaauguuguuauuuaaag

SEQ ID NO: 1339562 - RNA, 20 nt, Human
auacccccugcaaagcccag

SEQ ID NO: 1339563 - RNA, 21 nt, Human
auacccccugcaaagcccagc

SEQ ID NO: 1339564 - RNA, 13 nt, Human
auaauggucagag

SEQ ID NO: 1339565 - RNA, 18 nt, Human
auaagguaaaaugccaug

SEQ ID NO: 1339566 - RNA, 20 nt, Human
auaaggugcucucuuucugu

SEQ ID NO: 1339567 - RNA, 17 nt, Human
auaaggugcucucuuuc

SEQ ID NO: 1339568 - RNA, 19 nt, Human
auaagggcaaauuggagaa

SEQ ID NO: 1339569 - RNA, 23 nt, Human
auaagggucccccacucuaaagc

SEQ ID NO: 1339570 - RNA, 16 nt, Human
auaagguaaaaugcca

SEQ ID NO: 1339571 - RNA, 13 nt, Human
auaauguuucaaa

SEQ ID NO: 1339572 - RNA, 14 nt, Human
auaauguuguuauu

SEQ ID NO: 1339573 - RNA, 15 nt, Human
auaauguaaauaaag

SEQ ID NO: 1339574 - RNA, 22 nt, Human
auaagccagacaucaacagaua

SEQ ID NO: 1339575 - RNA, 21 nt, Human
auaagccagacaucaacagau

SEQ ID NO: 1339576 - RNA, 23 nt, Human
auaagggaaguaguuaucauguu

SEQ ID NO: 1339577 - RNA, 22 nt, Human
auaagggaaguaguuaucaugu

SEQ ID NO: 1339578 - RNA, 12 nt, Human
auaagggaagua

SEQ ID NO: 1339579 - RNA, 11 nt, Human
auaaggcuuca

SEQ ID NO: 1339580 - RNA, 19 nt, Human
auaaaaaggacaucagcaa

SEQ ID NO: 1339581 - RNA, 13 nt, Human
auaaaacauuaau

SEQ ID NO: 1339582 - RNA, 14 nt, Human
auaaaaaggacauc

SEQ ID NO: 1339583 - RNA, 11 nt, Human
auaaaaaggac

SEQ ID NO: 1339584 - RNA, 17 nt, Human
auaaaaagcuuccauga

SEQ ID NO: 1339585 - RNA, 21 nt, Human
auaaaaagcuuccaugauucu

SEQ ID NO: 1339586 - RNA, 14 nt, Human
aguuugauuauuca

SEQ ID NO: 1339587 - RNA, 17 nt, Human
aguuugauuauucagug

SEQ ID NO: 1339588 - RNA, 18 nt, Human
aguuugauuauucagugu

SEQ ID NO: 1339589 - RNA, 23 nt, Human
aguuugauuauucagugucacug

SEQ ID NO: 1339590 - RNA, 17 nt, Human
aguuugcaaaaaauguu

SEQ ID NO: 1339591 - RNA, 20 nt, Human
aguuuggauauguaaaacau

SEQ ID NO: 1339592 - RNA, 16 nt, Human
aguuuggauauguaaa

SEQ ID NO: 1339593 - RNA, 17 nt, Human
aguuuggauauguaaaa

SEQ ID NO: 1339594 - RNA, 22 nt, Human
aguuuggauauguaaaacauuu

SEQ ID NO: 1339595 - RNA, 15 nt, Human
aguuugcuuugcccu

SEQ ID NO: 1339596 - RNA, 22 nt, Human
aguuuggagagagcagacuggc

SEQ ID NO: 1339597 - RNA, 12 nt, Human
aguuuggaggaa

SEQ ID NO: 1339598 - RNA, 14 nt, Human
aguuuggauaugua

SEQ ID NO: 1339599 - RNA, 15 nt, Human
aguuguuagauuaag

SEQ ID NO: 1339600 - RNA, 13 nt, Human
aguuucuugcuug

SEQ ID NO: 1339601 - RNA, 12 nt, Human
aguuugaaauaa

SEQ ID NO: 1339602 - RNA, 13 nt, Human
aguuugaaauaag

SEQ ID NO: 1339603 - RNA, 18 nt, Human
aguuugaaauaagcuauu

SEQ ID NO: 1339604 - RNA, 19 nt, Human
aguuugaaugcugcaaguu

SEQ ID NO: 1339605 - RNA, 11 nt, Human
auaaagcaauu

SEQ ID NO: 1339606 - RNA, 18 nt, Human
auaaagauuuuuuaauaa

SEQ ID NO: 1339607 - RNA, 13 nt, Human
auaaagauuuuuu

SEQ ID NO: 1339608 - RNA, 16 nt, Human
auaaagauuuuuuaau

SEQ ID NO: 1339609 - RNA, 17 nt, Human
auaaagauuuuuuaaua

SEQ ID NO: 1339610 - RNA, 21 nt, Human
auaaagauuuuuuaauaauuu

SEQ ID NO: 1339611 - RNA, 18 nt, Human
auaaauuucuauuuuuau

SEQ ID NO: 1339612 - RNA, 12 nt, Human
auaaauuugacu

SEQ ID NO: 1339613 - RNA, 18 nt, Human
auaaauuugacuuuucug

SEQ ID NO: 1339614 - RNA, 20 nt, Human
auaaauuugacuuuucugua

SEQ ID NO: 1339615 - RNA, 21 nt, Human
auaaauuugacuuuucuguaa

SEQ ID NO: 1339616 - RNA, 14 nt, Human
auaacaaugaaagu

SEQ ID NO: 1339617 - RNA, 15 nt, Human
auaacaaugcuguau

SEQ ID NO: 1339618 - RNA, 17 nt, Human
auaacaaugcuguauuu

SEQ ID NO: 1339619 - RNA, 19 nt, Human
auaacaaugcuguauuuua

SEQ ID NO: 1339620 - RNA, 20 nt, Human
auaacaaugcuguauuuuaa

SEQ ID NO: 1339621 - RNA, 21 nt, Human
auaacaaugcuguauuuuaaa

SEQ ID NO: 1339622 - RNA, 16 nt, Human
auaacaaugugcucuc

SEQ ID NO: 1339623 - RNA, 14 nt, Human
auaacaauuccucu

SEQ ID NO: 1339624 - RNA, 15 nt, Human
auaacaauuccucua

SEQ ID NO: 1339625 - RNA, 20 nt, Human
caaggaaaaaauaacaauga

SEQ ID NO: 1339626 - RNA, 18 nt, Human
caaggaaaaaauaacaau

SEQ ID NO: 1339627 - RNA, 14 nt, Human
caaggagccaaaca

SEQ ID NO: 1339628 - RNA, 14 nt, Human
caagcugcuguggc

SEQ ID NO: 1339629 - RNA, 21 nt, Human
caagcgauucucuugccucaa

SEQ ID NO: 1339630 - RNA, 15 nt, Human
caagcgauucucuug

SEQ ID NO: 1339631 - RNA, 14 nt, Human
caagcugcaucuag

SEQ ID NO: 1339632 - RNA, 14 nt, Human
caagccuugauugg

SEQ ID NO: 1339633 - RNA, 16 nt, Human
caagaggagcccccac

SEQ ID NO: 1339634 - RNA, 14 nt, Human
caagagucuaaaga

SEQ ID NO: 1339635 - RNA, 15 nt, Human
caagagucuaaagau

SEQ ID NO: 1339636 - RNA, 19 nt, Human
caagagugaauucccucac

SEQ ID NO: 1339637 - RNA, 20 nt, Human
caagagugaauucccucacu

SEQ ID NO: 1339638 - RNA, 14 nt, Human
caagauaaacauua

SEQ ID NO: 1339639 - RNA, 15 nt, Human
caagauaaacauuau

SEQ ID NO: 1339640 - RNA, 17 nt, Human
caauaaauagacacgca

SEQ ID NO: 1339641 - RNA, 16 nt, Human
caauaaauagaccauu

SEQ ID NO: 1339642 - RNA, 17 nt, Human
caauaaaucugacccag

SEQ ID NO: 1339643 - RNA, 18 nt, Human
caauaaaucugacccagu

SEQ ID NO: 1339644 - RNA, 20 nt, Human
caauaaaucugacccagugc

SEQ ID NO: 1339645 - RNA, 15 nt, Human
caauaaauggcugua

SEQ ID NO: 1339646 - RNA, 13 nt, Human
caauaaauagaca

SEQ ID NO: 1339647 - RNA, 14 nt, Human
caauaaagugaccc

SEQ ID NO: 1339648 - RNA, 21 nt, Human
caauaaagugacccugcucuc

SEQ ID NO: 1339649 - RNA, 15 nt, Human
caaggcuuucucuac

SEQ ID NO: 1339650 - RNA, 15 nt, Human
caagggaaaagucuc

SEQ ID NO: 1339651 - RNA, 16 nt, Human
caagggaaaagucucu

SEQ ID NO: 1339652 - RNA, 15 nt, Human
caagggaaccugugu

SEQ ID NO: 1339653 - RNA, 16 nt, Human
caagggaaccuguguc

SEQ ID NO: 1339654 - RNA, 15 nt, Human
caagggucaggccuu

SEQ ID NO: 1339655 - RNA, 18 nt, Human
caagggucaggccuuuga

SEQ ID NO: 1339656 - RNA, 16 nt, Human
caagggucaggccuuu

SEQ ID NO: 1339657 - RNA, 12 nt, Human
caauaagcaaaa

SEQ ID NO: 1339658 - RNA, 16 nt, Human
caauaacuccucccag

SEQ ID NO: 1339659 - RNA, 17 nt, Human
caauaacuccucccagg

SEQ ID NO: 1339660 - RNA, 18 nt, Human
caauaacuccucccaggg

SEQ ID NO: 1339661 - RNA, 19 nt, Human
caauaacuccucccagggu

SEQ ID NO: 1339662 - RNA, 23 nt, Human
caauaacguuuaagccaaaacaa

SEQ ID NO: 1339663 - RNA, 15 nt, Human
caauaacguuuaagc

SEQ ID NO: 1339664 - RNA, 18 nt, Human
caauaauaauaccucccu

SEQ ID NO: 1339665 - RNA, 17 nt, Human
caauaccugaaugcucu

SEQ ID NO: 1339666 - RNA, 19 nt, Human
caauaccugaaugcucugu

SEQ ID NO: 1339667 - RNA, 19 nt, Human
caauagucaaauuguguga

SEQ ID NO: 1339668 - RNA, 17 nt, Human
caauagcacauauggaa

SEQ ID NO: 1339669 - RNA, 14 nt, Human
caauagugucaucc

SEQ ID NO: 1339670 - RNA, 16 nt, Human
caauagcacauaugga

SEQ ID NO: 1339671 - RNA, 19 nt, Human
caauagcagacaguguuuu

SEQ ID NO: 1339672 - RNA, 13 nt, Human
cacaauaagcaaa

SEQ ID NO: 1339673 - RNA, 20 nt, Human
cacaauaacuccucccaggg

SEQ ID NO: 1339674 - RNA, 16 nt, Human
cacaauaaauggcugu

SEQ ID NO: 1339675 - RNA, 16 nt, Human
cacaauaacuccuccc

SEQ ID NO: 1339676 - RNA, 17 nt, Human
cacaauaacuccuccca

SEQ ID NO: 1339677 - RNA, 15 nt, Human
cacaauaauuuucua

SEQ ID NO: 1339678 - RNA, 14 nt, Human
cacaauagaauuau

SEQ ID NO: 1339679 - RNA, 15 nt, Human
cacaauagaauuaua

SEQ ID NO: 1339680 - RNA, 22 nt, Human
cacaaugcagugccuuucuucu

SEQ ID NO: 1339681 - RNA, 23 nt, Human
cacaaugagauugaauuucacug

SEQ ID NO: 1339682 - RNA, 23 nt, Human
cacacaaaagggaacccagcucu

SEQ ID NO: 1339683 - RNA, 17 nt, Human
cacaaguguaaugaaua

SEQ ID NO: 1339684 - RNA, 15 nt, Human
cacaaguguaaugaa

SEQ ID NO: 1339685 - RNA, 16 nt, Human
cacaaguuauuuaaau

SEQ ID NO: 1339686 - RNA, 18 nt, Human
cacaauaaaaauguuuaa

SEQ ID NO: 1339687 - RNA, 21 nt, Human
cacaagaaaugaaagcaggga

SEQ ID NO: 1339688 - RNA, 20 nt, Human
cacaagaaaugaaagcaggg

SEQ ID NO: 1339689 - RNA, 12 nt, Human
cacacacguuau

SEQ ID NO: 1339690 - RNA, 13 nt, Human
cacacaccuguag

SEQ ID NO: 1339691 - RNA, 18 nt, Human
cacacaaauaacaagaau

SEQ ID NO: 1339692 - RNA, 21 nt, Human
cacacaaauuaucuuaaaacu

SEQ ID NO: 1339693 - RNA, 23 nt, Human
caauuaaaaaaaaagaucuguuu

SEQ ID NO: 1339694 - RNA, 17 nt, Human
caauuacugguccaaaa

SEQ ID NO: 1339695 - RNA, 16 nt, Human
caauuagcuuauguua

SEQ ID NO: 1339696 - RNA, 21 nt, Human
caauuagcaauugacugucac

SEQ ID NO: 1339697 - RNA, 23 nt, Human
caauuaggcagacucuuuaugcu

SEQ ID NO: 1339698 - RNA, 11 nt, Human
caauuccccuc

SEQ ID NO: 1339699 - RNA, 12 nt, Human
caauuccccucu

SEQ ID NO: 1339700 - RNA, 13 nt, Human
caauuccccucug

SEQ ID NO: 1339701 - RNA, 14 nt, Human
caauuccccucugc

SEQ ID NO: 1339702 - RNA, 17 nt, Human
caauuccccucugcugc

SEQ ID NO: 1339703 - RNA, 22 nt, Human
cacaaaauauauuuuguuuaca

SEQ ID NO: 1339704 - RNA, 18 nt, Human
cacaaagcccuuccaugu

SEQ ID NO: 1339705 - RNA, 20 nt, Human
caauuuuuuaagugaaaaua

SEQ ID NO: 1339706 - RNA, 21 nt, Human
caauuuuuuaagugaaaauau

SEQ ID NO: 1339707 - RNA, 21 nt, Human
caauuuuuuaucaugcauguc

SEQ ID NO: 1339708 - RNA, 17 nt, Human
caauuuuuuuuauuagu

SEQ ID NO: 1339709 - RNA, 20 nt, Human
caauuuuuuuuauuaguauu

SEQ ID NO: 1339710 - RNA, 23 nt, Human
caauuuuuuuuauuaguauuguu

SEQ ID NO: 1339711 - RNA, 22 nt, Human
cacaaaauaaccaauccuggac

SEQ ID NO: 1339712 - RNA, 22 nt, Human
caaugugacuuaaugccacuaa

SEQ ID NO: 1339713 - RNA, 13 nt, Human
caaugugcucucg

SEQ ID NO: 1339714 - RNA, 23 nt, Human
caauguggcaaggaaaaacaggu

SEQ ID NO: 1339715 - RNA, 21 nt, Human
caauaucuuuuuuuuaauaaa

SEQ ID NO: 1339716 - RNA, 23 nt, Human
caauaucugaagcccucccaggu

SEQ ID NO: 1339717 - RNA, 13 nt, Human
caauaucugaagc

SEQ ID NO: 1339718 - RNA, 15 nt, Human
caauguguauaaaca

SEQ ID NO: 1339719 - RNA, 16 nt, Human
caauguguauaaacaa

SEQ ID NO: 1339720 - RNA, 17 nt, Human
caauguguauaaacaag

SEQ ID NO: 1339721 - RNA, 18 nt, Human
caauguguauaaacaaga

SEQ ID NO: 1339722 - RNA, 20 nt, Human
caauguguauaaacaagaaa

SEQ ID NO: 1339723 - RNA, 21 nt, Human
caauguguauaaacaagaaaa

SEQ ID NO: 1339724 - RNA, 23 nt, Human
caauguguauaaacaagaaaaau

SEQ ID NO: 1339725 - RNA, 12 nt, Human
caauguguguau

SEQ ID NO: 1339726 - RNA, 14 nt, Human
caauguguguauau

SEQ ID NO: 1339727 - RNA, 15 nt, Human
caauguguguauaug

SEQ ID NO: 1339728 - RNA, 16 nt, Human
caauguguguauaugg

SEQ ID NO: 1339729 - RNA, 17 nt, Human
caauguguguauaugga

SEQ ID NO: 1339730 - RNA, 18 nt, Human
caauguguguauauggac

SEQ ID NO: 1339731 - RNA, 20 nt, Human
caauguguugauacauuccc

SEQ ID NO: 1339732 - RNA, 21 nt, Human
caauguuaaacuuauaaccca

SEQ ID NO: 1339733 - RNA, 22 nt, Human
caauguuucaagaggagccccc

SEQ ID NO: 1339734 - RNA, 17 nt, Human
caauguuucuucuaggu

SEQ ID NO: 1339735 - RNA, 14 nt, Human
cacagcugccucuu

SEQ ID NO: 1339736 - RNA, 21 nt, Human
cacagcugccggucgcccuuu

SEQ ID NO: 1339737 - RNA, 14 nt, Human
cacagcugagaggc

SEQ ID NO: 1339738 - RNA, 14 nt, Human
cacagcccugucag

SEQ ID NO: 1339739 - RNA, 16 nt, Human
cacagcccugucagca

SEQ ID NO: 1339740 - RNA, 18 nt, Human
cacagcccugucagcaug

SEQ ID NO: 1339741 - RNA, 19 nt, Human
cacagcccugucagcauga

SEQ ID NO: 1339742 - RNA, 23 nt, Human
cacagcccugucagcaugaauuu

SEQ ID NO: 1339743 - RNA, 22 nt, Human
cacagcccugucagcaugaauu

SEQ ID NO: 1339744 - RNA, 23 nt, Human
cacagcccuuaugcgguuaauuu

SEQ ID NO: 1339745 - RNA, 14 nt, Human
cacagcccuuuugu

SEQ ID NO: 1339746 - RNA, 13 nt, Human
cacagcccuguca

SEQ ID NO: 1339747 - RNA, 13 nt, Human
cacagccaccccu

SEQ ID NO: 1339748 - RNA, 16 nt, Human
cacagauuugagcuca

SEQ ID NO: 1339749 - RNA, 17 nt, Human
cacagauuugagcucag

SEQ ID NO: 1339750 - RNA, 18 nt, Human
cacagauuugagcucagc

SEQ ID NO: 1339751 - RNA, 22 nt, Human
cacagauuugagcucagcccug

SEQ ID NO: 1339752 - RNA, 21 nt, Human
cacagcaguucugcagaggac

SEQ ID NO: 1339753 - RNA, 13 nt, Human
cacacugaagaag

SEQ ID NO: 1339754 - RNA, 14 nt, Human
cacacugaagaagc

SEQ ID NO: 1339755 - RNA, 14 nt, Human
cacacuccagcugg

SEQ ID NO: 1339756 - RNA, 20 nt, Human
cacacucaugcauuguccuc

SEQ ID NO: 1339757 - RNA, 15 nt, Human
cacagaggacacaga

SEQ ID NO: 1339758 - RNA, 19 nt, Human
cacagaggacacagagaag

SEQ ID NO: 1339759 - RNA, 21 nt, Human
cacagaggcagcccgcacacc

SEQ ID NO: 1339760 - RNA, 16 nt, Human
cacagagggcgugugc

SEQ ID NO: 1339761 - RNA, 23 nt, Human
cacagagguagucucacugcuug

SEQ ID NO: 1339762 - RNA, 22 nt, Human
cacagauaacugaaaauuauuu

SEQ ID NO: 1339763 - RNA, 19 nt, Human
cacagauaacugaaaauua

SEQ ID NO: 1339764 - RNA, 16 nt, Human
caacagcuggacccug

SEQ ID NO: 1339765 - RNA, 19 nt, Human
caacagcuggacccugacc

SEQ ID NO: 1339766 - RNA, 20 nt, Human
caacagcuggacccugacca

SEQ ID NO: 1339767 - RNA, 12 nt, Human
caacagcgccca

SEQ ID NO: 1339768 - RNA, 15 nt, Human
caacagcgcccaaag

SEQ ID NO: 1339769 - RNA, 15 nt, Human
caacagcguuccuag

SEQ ID NO: 1339770 - RNA, 23 nt, Human
caacagcguuccuagagaagaca

SEQ ID NO: 1339771 - RNA, 23 nt, Human
caacauagugggacccugucucu

SEQ ID NO: 1339772 - RNA, 17 nt, Human
caaccugcucuccucuu

SEQ ID NO: 1339773 - RNA, 18 nt, Human
caaccugcucuccucuug

SEQ ID NO: 1339774 - RNA, 21 nt, Human
caaccugcucuccucuugcca

SEQ ID NO: 1339775 - RNA, 23 nt, Human
caaccugcucuccucuugccacu

SEQ ID NO: 1339776 - RNA, 15 nt, Human
caacaggccucaggg

SEQ ID NO: 1339777 - RNA, 16 nt, Human
caacaggccucagggc

SEQ ID NO: 1339778 - RNA, 19 nt, Human
caacaggccucagggcucc

SEQ ID NO: 1339779 - RNA, 20 nt, Human
caacaggccucagggcuccu

SEQ ID NO: 1339780 - RNA, 21 nt, Human
caacauaguauucaugacuau

SEQ ID NO: 1339781 - RNA, 16 nt, Human
caaccuggucacagga

SEQ ID NO: 1339782 - RNA, 16 nt, Human
caaccuucuguggcuc

SEQ ID NO: 1339783 - RNA, 17 nt, Human
caaccuucuguggcuca

SEQ ID NO: 1339784 - RNA, 19 nt, Human
caaccuucuguggcucaca

SEQ ID NO: 1339785 - RNA, 20 nt, Human
caaccuucuguggcucacag

SEQ ID NO: 1339786 - RNA, 15 nt, Human
caaauuuuaucugcc

SEQ ID NO: 1339787 - RNA, 14 nt, Human
caaauuugauugau

SEQ ID NO: 1339788 - RNA, 17 nt, Human
caaauuugauugauuug

SEQ ID NO: 1339789 - RNA, 19 nt, Human
caaauuuguaggguuucua

SEQ ID NO: 1339790 - RNA, 19 nt, Human
caaauguuaaaauguguug

SEQ ID NO: 1339791 - RNA, 18 nt, Human
caaauuacuuugugaaua

SEQ ID NO: 1339792 - RNA, 21 nt, Human
caaauuacuuugugaauagaa

SEQ ID NO: 1339793 - RNA, 14 nt, Human
caaauuaguuauau

SEQ ID NO: 1339794 - RNA, 15 nt, Human
caaauuaguuauaua

SEQ ID NO: 1339795 - RNA, 20 nt, Human
caacagagacugaauagaua

SEQ ID NO: 1339796 - RNA, 14 nt, Human
caacagaucaguaa

SEQ ID NO: 1339797 - RNA, 13 nt, Human
caacagaucugga

SEQ ID NO: 1339798 - RNA, 14 nt, Human
caacagaucuggaa

SEQ ID NO: 1339799 - RNA, 17 nt, Human
caacagaucuggaaccu

SEQ ID NO: 1339800 - RNA, 23 nt, Human
caacagaucuggaaccucagccu

SEQ ID NO: 1339801 - RNA, 15 nt, Human
caacagcaaacaggu

SEQ ID NO: 1339802 - RNA, 17 nt, Human
caacagcaaacaggugc

SEQ ID NO: 1339803 - RNA, 17 nt, Human
caaaucaaucuguaaaa

SEQ ID NO: 1339804 - RNA, 18 nt, Human
caaaucaaaaucucucca

SEQ ID NO: 1339805 - RNA, 20 nt, Human
caaauauuuauuuucuuucu

SEQ ID NO: 1339806 - RNA, 23 nt, Human
caaauauauucagccuggcuuca

SEQ ID NO: 1339807 - RNA, 20 nt, Human
caaaucaaucuguaaaacua

SEQ ID NO: 1339808 - RNA, 16 nt, Human
caaaucaauuacuggu

SEQ ID NO: 1339809 - RNA, 14 nt, Human
caaaucacauauuu

SEQ ID NO: 1339810 - RNA, 15 nt, Human
caaaucacauauuuu

SEQ ID NO: 1339811 - RNA, 18 nt, Human
caaaucacauauuuuaaa

SEQ ID NO: 1339812 - RNA, 14 nt, Human
caaaucaccacaaa

SEQ ID NO: 1339813 - RNA, 19 nt, Human
caaaucacauauuuuaaaa

SEQ ID NO: 1339814 - RNA, 22 nt, Human
caaauggauuuugggagugacu

SEQ ID NO: 1339815 - RNA, 18 nt, Human
caaauggcgucuggaagu

SEQ ID NO: 1339816 - RNA, 20 nt, Human
caaauguucaucaaugaaug

SEQ ID NO: 1339817 - RNA, 22 nt, Human
caaauggcgucuggaaguccaa

SEQ ID NO: 1339818 - RNA, 18 nt, Human
caaauguucaucaaugaa

SEQ ID NO: 1339819 - RNA, 14 nt, Human
caaauguucaucaa

SEQ ID NO: 1339820 - RNA, 19 nt, Human
caaauggcgucuggaaguc

SEQ ID NO: 1339821 - RNA, 21 nt, Human
caaauggcgucuggaagucca

SEQ ID NO: 1339822 - RNA, 20 nt, Human
caaauguuaaaauguguugu

SEQ ID NO: 1339823 - RNA, 18 nt, Human
caaagugcugggauuaca

SEQ ID NO: 1339824 - RNA, 19 nt, Human
caaaguguggucucuggaa

SEQ ID NO: 1339825 - RNA, 15 nt, Human
caaaguguuuucucu

SEQ ID NO: 1339826 - RNA, 18 nt, Human
caaaguguuuucucugaa

SEQ ID NO: 1339827 - RNA, 20 nt, Human
caaaguucccuacuuccugu

SEQ ID NO: 1339828 - RNA, 21 nt, Human
caaaguucccuacuuccugug

SEQ ID NO: 1339829 - RNA, 21 nt, Human
caaagagagauuuuuuuuuaa

SEQ ID NO: 1339830 - RNA, 14 nt, Human
caaagaaccaaaga

SEQ ID NO: 1339831 - RNA, 17 nt, Human
caaagaaccaaagaaga

SEQ ID NO: 1339832 - RNA, 18 nt, Human
caaagaaccuucucuaug

SEQ ID NO: 1339833 - RNA, 19 nt, Human
caaagaaccaaagaagaaa

SEQ ID NO: 1339834 - RNA, 22 nt, Human
caaagaaggcauuugcaggguc

SEQ ID NO: 1339835 - RNA, 21 nt, Human
caaagaaggcauuugcagggu

SEQ ID NO: 1339836 - RNA, 18 nt, Human
caaagagaaugcccuucu

SEQ ID NO: 1339837 - RNA, 23 nt, Human
caaagagaaugcccuucuccuua

SEQ ID NO: 1339838 - RNA, 13 nt, Human
caagaagcagugg

SEQ ID NO: 1339839 - RNA, 14 nt, Human
caagaagcaguggc

SEQ ID NO: 1339840 - RNA, 18 nt, Human
caagaagcaguggccuua

SEQ ID NO: 1339841 - RNA, 19 nt, Human
caagaaaugaaagcaggga

SEQ ID NO: 1339842 - RNA, 17 nt, Human
caagaaaugaaagcagg

SEQ ID NO: 1339843 - RNA, 13 nt, Human
caacuuguccuag

SEQ ID NO: 1339844 - RNA, 19 nt, Human
caacuuguccuagcacaga

SEQ ID NO: 1339845 - RNA, 20 nt, Human
caacuuguccuagcacagau

SEQ ID NO: 1339846 - RNA, 12 nt, Human
caacuugggaac

SEQ ID NO: 1339847 - RNA, 16 nt, Human
caacuuguaaaugugg

SEQ ID NO: 1339848 - RNA, 18 nt, Human
caacgugcucuuuguuuu

SEQ ID NO: 1339849 - RNA, 14 nt, Human
caacuugcuuauca

SEQ ID NO: 1339850 - RNA, 16 nt, Human
caacuuggcugcagga

SEQ ID NO: 1339851 - RNA, 20 nt, Human
caacgugcucuuuguuuugu

SEQ ID NO: 1339852 - RNA, 23 nt, Human
caacguggcuuuuuuuuuuuccc

SEQ ID NO: 1339853 - RNA, 22 nt, Human
caagagcuacguauuuaauagc

SEQ ID NO: 1339854 - RNA, 19 nt, Human
caagagcuacauaauuuag

SEQ ID NO: 1339855 - RNA, 17 nt, Human
caagagcuuaacagugu

SEQ ID NO: 1339856 - RNA, 14 nt, Human
caagaggagaucca

SEQ ID NO: 1339857 - RNA, 14 nt, Human
caagaggagccccc

SEQ ID NO: 1339858 - RNA, 21 nt, Human
caagaggagcccccacccugu

SEQ ID NO: 1339859 - RNA, 19 nt, Human
caagaggccguggcugcug

SEQ ID NO: 1339860 - RNA, 16 nt, Human
caagagcaucaugccu

SEQ ID NO: 1339861 - RNA, 18 nt, Human
caagagcaucaugccucu

SEQ ID NO: 1339862 - RNA, 19 nt, Human
caagagcaucaugccucug

SEQ ID NO: 1339863 - RNA, 20 nt, Human
caagagcaucaugccucuga

SEQ ID NO: 1339864 - RNA, 21 nt, Human
caagagcaucaugccucugag

SEQ ID NO: 1339865 - RNA, 22 nt, Human
caagagcaucaugccucugagg

SEQ ID NO: 1339866 - RNA, 23 nt, Human
caagagcaucaugccucugaggc

SEQ ID NO: 1339867 - RNA, 13 nt, Human
caagagccacagu

SEQ ID NO: 1339868 - RNA, 17 nt, Human
caagaagcauuuuguaa

SEQ ID NO: 1339869 - RNA, 23 nt, Human
caagaagcauuuuguaaguugaa

SEQ ID NO: 1339870 - RNA, 13 nt, Human
caagagaagcauu

SEQ ID NO: 1339871 - RNA, 14 nt, Human
caagagaagcauuc

SEQ ID NO: 1339872 - RNA, 16 nt, Human
caagagaagcauucuc

SEQ ID NO: 1339873 - RNA, 22 nt, Human
caagagaagcauucucauugga

SEQ ID NO: 1339874 - RNA, 18 nt, Human
caagagaagcauucucau

SEQ ID NO: 1339875 - RNA, 12 nt, Human
caagagacugag

SEQ ID NO: 1339876 - RNA, 15 nt, Human
caagagacugaguca

SEQ ID NO: 1339877 - RNA, 13 nt, Human
caagagacugagu

SEQ ID NO: 1339878 - RNA, 13 nt, Human
caagagauaacug

SEQ ID NO: 1339879 - RNA, 23 nt, Human
caagggaauuucuucaacucccu

SEQ ID NO: 1339880 - RNA, 16 nt, Human
caaaaucaauuaaaau

SEQ ID NO: 1339881 - RNA, 17 nt, Human
caaaauauuuguacaua

SEQ ID NO: 1339882 - RNA, 16 nt, Human
caaaauauuuguacau

SEQ ID NO: 1339883 - RNA, 13 nt, Human
caaaauagggacu

SEQ ID NO: 1339884 - RNA, 17 nt, Human
caaaauaggguauauuu

SEQ ID NO: 1339885 - RNA, 18 nt, Human
caaaauaggguauauuuu

SEQ ID NO: 1339886 - RNA, 21 nt, Human
caaaauaggguauauuuuccu

SEQ ID NO: 1339887 - RNA, 16 nt, Human
caaaauagugccacua

SEQ ID NO: 1339888 - RNA, 20 nt, Human
caaaauauauuuuguuuaca

SEQ ID NO: 1339889 - RNA, 22 nt, Human
caaaauauauuuuguuuacaaa

SEQ ID NO: 1339890 - RNA, 20 nt, Human
caaaauccuugcuuaugaca

SEQ ID NO: 1339891 - RNA, 19 nt, Human
caaaaucucccauuuugga

SEQ ID NO: 1339892 - RNA, 16 nt, Human
caaaaucucuccacuu

SEQ ID NO: 1339893 - RNA, 21 nt, Human
caaaaucucuccacuuucagc

SEQ ID NO: 1339894 - RNA, 22 nt, Human
caaaaucucuccacuuucagcu

SEQ ID NO: 1339895 - RNA, 12 nt, Human
caaaaucaguuu

SEQ ID NO: 1339896 - RNA, 16 nt, Human
caaaaucaguuuuccu

SEQ ID NO: 1339897 - RNA, 15 nt, Human
caaaaucagguaacu

SEQ ID NO: 1339898 - RNA, 16 nt, Human
caaaauccuugcuuau

SEQ ID NO: 1339899 - RNA, 20 nt, Human
caaaauacuugucuguuuua

SEQ ID NO: 1339900 - RNA, 21 nt, Human
caaaauacuugucuguuuuaa

SEQ ID NO: 1339901 - RNA, 11 nt, Human
caaaacucuac

SEQ ID NO: 1339902 - RNA, 19 nt, Human
caaaacucuacuuaaucca

SEQ ID NO: 1339903 - RNA, 18 nt, Human
caaaaguuucauccuuuu

SEQ ID NO: 1339904 - RNA, 18 nt, Human
caaaaguuuguuugcuua

SEQ ID NO: 1339905 - RNA, 15 nt, Human
caaaacugcauuuca

SEQ ID NO: 1339906 - RNA, 22 nt, Human
caaaacugccucaggaggcagg

SEQ ID NO: 1339907 - RNA, 19 nt, Human
caaaaguuacauguuugca

SEQ ID NO: 1339908 - RNA, 14 nt, Human
caaaaguuccaaga

SEQ ID NO: 1339909 - RNA, 18 nt, Human
caaaaguuccaagagucu

SEQ ID NO: 1339910 - RNA, 23 nt, Human
caaaaguuccaagagucuaaaga

SEQ ID NO: 1339911 - RNA, 17 nt, Human
caaacugacucuuaaga

SEQ ID NO: 1339912 - RNA, 21 nt, Human
caaacugacucuuaagaagac

SEQ ID NO: 1339913 - RNA, 14 nt, Human
caaacucuuugguc

SEQ ID NO: 1339914 - RNA, 16 nt, Human
caaacugacucuuaag

SEQ ID NO: 1339915 - RNA, 23 nt, Human
caaacugaagcagccucucccca

SEQ ID NO: 1339916 - RNA, 18 nt, Human
caaacuccugaccucagg

SEQ ID NO: 1339917 - RNA, 19 nt, Human
caaacucuuuggucguuuu

SEQ ID NO: 1339918 - RNA, 17 nt, Human
caaacugaagcagccuc

SEQ ID NO: 1339919 - RNA, 19 nt, Human
caaacuccugaccucaggc

SEQ ID NO: 1339920 - RNA, 19 nt, Human
caaaccugaccccugcuca

SEQ ID NO: 1339921 - RNA, 20 nt, Human
caaaccugaccccugcucag

SEQ ID NO: 1339922 - RNA, 21 nt, Human
caaaaugagcccuguccugcc

SEQ ID NO: 1339923 - RNA, 22 nt, Human
caaaaucuugaucaguuaagaa

SEQ ID NO: 1339924 - RNA, 23 nt, Human
caaaaucucuccacuuucagcug

SEQ ID NO: 1339925 - RNA, 16 nt, Human
caaaaucuugaucagu

SEQ ID NO: 1339926 - RNA, 18 nt, Human
caaaaucuugaucaguua

SEQ ID NO: 1339927 - RNA, 16 nt, Human
caaacaaaaagguucu

SEQ ID NO: 1339928 - RNA, 14 nt, Human
caaacaccucccag

SEQ ID NO: 1339929 - RNA, 15 nt, Human
caaacaccucccagg

SEQ ID NO: 1339930 - RNA, 12 nt, Human
caaacaccuucc

SEQ ID NO: 1339931 - RNA, 21 nt, Human
caaacaccuuccagcuccugu

SEQ ID NO: 1339932 - RNA, 14 nt, Human
caaacaccuuccag

SEQ ID NO: 1339933 - RNA, 22 nt, Human
caaacaauaccugaaugcucug

SEQ ID NO: 1339934 - RNA, 15 nt, Human
caaacaauaccugaa

SEQ ID NO: 1339935 - RNA, 13 nt, Human
caaacaauaccug

SEQ ID NO: 1339936 - RNA, 20 nt, Human
caaacaaaaagguucucagg

SEQ ID NO: 1339937 - RNA, 21 nt, Human
caaacaaaaagguucucaggu

SEQ ID NO: 1339938 - RNA, 17 nt, Human
caaacugaggaauuuca

SEQ ID NO: 1339939 - RNA, 22 nt, Human
cacagcugccucuucccucuuc

SEQ ID NO: 1339940 - RNA, 15 nt, Human
cacagcugccucuuc

SEQ ID NO: 1339941 - RNA, 12 nt, Human
cacagcugcuca

SEQ ID NO: 1339942 - RNA, 22 nt, Human
cacagcugcucaauaaaguaca

SEQ ID NO: 1339943 - RNA, 18 nt, Human
cacagcuugaccugaggc

SEQ ID NO: 1339944 - RNA, 19 nt, Human
cacagcuugaccugaggcu

SEQ ID NO: 1339945 - RNA, 20 nt, Human
cacagcuugaccugaggcug

SEQ ID NO: 1339946 - RNA, 21 nt, Human
cacagcuugaccugaggcugu

SEQ ID NO: 1339947 - RNA, 22 nt, Human
cacagcuugaccugaggcugug

SEQ ID NO: 1339948 - RNA, 13 nt, Human
cacaggaaaccag

SEQ ID NO: 1339949 - RNA, 19 nt, Human
cacaggaaccacaagacug

SEQ ID NO: 1339950 - RNA, 12 nt, Human
cacagcuuuugc

SEQ ID NO: 1339951 - RNA, 13 nt, Human
cacagcuuuugca

SEQ ID NO: 1339952 - RNA, 16 nt, Human
cacaggcccuuccucu

SEQ ID NO: 1339953 - RNA, 17 nt, Human
cacaggcccuuccucuc

SEQ ID NO: 1339954 - RNA, 18 nt, Human
cacaggcccuuccucucc

SEQ ID NO: 1339955 - RNA, 19 nt, Human
cacaggcccuuccucucca

SEQ ID NO: 1339956 - RNA, 16 nt, Human
cacaguguuggagguu

SEQ ID NO: 1339957 - RNA, 21 nt, Human
cacaggcccuuccucuccacu

SEQ ID NO: 1339958 - RNA, 22 nt, Human
cacaggcccuuccucuccacug

SEQ ID NO: 1339959 - RNA, 18 nt, Human
cacagugcaucucagccc

SEQ ID NO: 1339960 - RNA, 19 nt, Human
cacagugcaucucagccca

SEQ ID NO: 1339961 - RNA, 14 nt, Human
cacagcuuuugcaa

SEQ ID NO: 1339962 - RNA, 16 nt, Human
cacagugcucuuuucu

SEQ ID NO: 1339963 - RNA, 18 nt, Human
cacagugcucuuuucucc

SEQ ID NO: 1339964 - RNA, 22 nt, Human
cacaguggaaagacagcuucuc

SEQ ID NO: 1339965 - RNA, 12 nt, Human
uuuuuuguuauu

SEQ ID NO: 1339966 - RNA, 21 nt, Human
ugugugaaagguacuucaaau

SEQ ID NO: 1339967 - RNA, 22 nt, Human
ugugugaaagguacuucaaauc

SEQ ID NO: 1339968 - RNA, 18 nt, Human
uguguaugcgugugugug

SEQ ID NO: 1339969 - RNA, 19 nt, Human
uguguaugcacaugaacuu

SEQ ID NO: 1339970 - RNA, 22 nt, Human
uguguagcugugaccugcugag

SEQ ID NO: 1339971 - RNA, 23 nt, Human
uguguaugcacaugaacuuagau

SEQ ID NO: 1339972 - RNA, 15 nt, Human
ugugugcuuauguau

SEQ ID NO: 1339973 - RNA, 22 nt, Human
ugugugcaacaggguauggacu

SEQ ID NO: 1339974 - RNA, 21 nt, Human
ugugugcguguuuggguuuuu

SEQ ID NO: 1339975 - RNA, 21 nt, Human
uguguggagagggaaugugaa

SEQ ID NO: 1339976 - RNA, 20 nt, Human
uguguggcuuucagagccuc

SEQ ID NO: 1339977 - RNA, 20 nt, Human
ugugugcuuuuuuugugugu

SEQ ID NO: 1339978 - RNA, 14 nt, Human
uguguggacaggac

SEQ ID NO: 1339979 - RNA, 22 nt, Human
uguguggagagggaaugugaaa

SEQ ID NO: 1339980 - RNA, 14 nt, Human
uguguggauucuuu

SEQ ID NO: 1339981 - RNA, 18 nt, Human
uguguuuuucauaaagca

SEQ ID NO: 1339982 - RNA, 14 nt, Human
uguguuuuucuauu

SEQ ID NO: 1339983 - RNA, 15 nt, Human
uguguuuuucauaaa

SEQ ID NO: 1339984 - RNA, 17 nt, Human
uguguuucuugccucau

SEQ ID NO: 1339985 - RNA, 16 nt, Human
uguguuuugaaagaau

SEQ ID NO: 1339986 - RNA, 19 nt, Human
uguguuuugcuaaaggaaa

SEQ ID NO: 1339987 - RNA, 15 nt, Human
uguguuuuuaacaug

SEQ ID NO: 1339988 - RNA, 13 nt, Human
uguguuuugcaag

SEQ ID NO: 1339989 - RNA, 19 nt, Human
uguguuuugcaagccagau

SEQ ID NO: 1339990 - RNA, 13 nt, Human
uguguuugaagca

SEQ ID NO: 1339991 - RNA, 21 nt, Human
uguguuucacaguuugaaaua

SEQ ID NO: 1339992 - RNA, 18 nt, Human
uguguuucacaguuugaa

SEQ ID NO: 1339993 - RNA, 19 nt, Human
uguguuucacaguuugaaa

SEQ ID NO: 1339994 - RNA, 23 nt, Human
uguguuucacaguuugaaauaag

SEQ ID NO: 1339995 - RNA, 12 nt, Human
uguguuuccaca

SEQ ID NO: 1339996 - RNA, 19 nt, Human
ugugugugcuuauguauga

SEQ ID NO: 1339997 - RNA, 20 nt, Human
ugugugugcuuauguaugag

SEQ ID NO: 1339998 - RNA, 14 nt, Human
ugugugugcccucu

SEQ ID NO: 1339999 - RNA, 22 nt, Human
ugugugugcccucugggcucug

SEQ ID NO: 1340000 - RNA, 17 nt, Human
uguguggcuuucagagc

SEQ ID NO: 1340001 - RNA, 17 nt, Human
ugugugugaaaaugugu

SEQ ID NO: 1340002 - RNA, 16 nt, Human
ugugugugaaugaaca

SEQ ID NO: 1340003 - RNA, 20 nt, Human
ugugugugaaugaacacucu

SEQ ID NO: 1340004 - RNA, 16 nt, Human
ugugugucuuaauuau

SEQ ID NO: 1340005 - RNA, 17 nt, Human
uguucauaaauaaaguu

SEQ ID NO: 1340006 - RNA, 14 nt, Human
uguucauagcccag

SEQ ID NO: 1340007 - RNA, 15 nt, Human
uguucauagcccagu

SEQ ID NO: 1340008 - RNA, 15 nt, Human
uguucagcacugucc

SEQ ID NO: 1340009 - RNA, 17 nt, Human
uguucagcacugucccu

SEQ ID NO: 1340010 - RNA, 18 nt, Human
uguucagcacugucccuu

SEQ ID NO: 1340011 - RNA, 14 nt, Human
uguuagugcaaauu

SEQ ID NO: 1340012 - RNA, 16 nt, Human
uguuaguaauaccucu

SEQ ID NO: 1340013 - RNA, 15 nt, Human
uguuagucauuugcu

SEQ ID NO: 1340014 - RNA, 16 nt, Human
uguucacuuuuccucc

SEQ ID NO: 1340015 - RNA, 19 nt, Human
uguucacuuuuccucccuc

SEQ ID NO: 1340016 - RNA, 17 nt, Human
uguucacuuuugacaaa

SEQ ID NO: 1340017 - RNA, 18 nt, Human
uguucagaagguugcucu

SEQ ID NO: 1340018 - RNA, 22 nt, Human
uguucagaagguugcucuagau

SEQ ID NO: 1340019 - RNA, 13 nt, Human
uguucagcacugu

SEQ ID NO: 1340020 - RNA, 14 nt, Human
uguucagcacuguc

SEQ ID NO: 1340021 - RNA, 15 nt, Human
uguuaguaauaccuc

SEQ ID NO: 1340022 - RNA, 14 nt, Human
uguuaguaauaccu

SEQ ID NO: 1340023 - RNA, 21 nt, Human
uguuacccaguaacucaucug

SEQ ID NO: 1340024 - RNA, 16 nt, Human
uguuaccuacuuugac

SEQ ID NO: 1340025 - RNA, 15 nt, Human
uguuaccugaaaaca

SEQ ID NO: 1340026 - RNA, 16 nt, Human
uguuaccugaaaacac

SEQ ID NO: 1340027 - RNA, 22 nt, Human
uguuaccugaaaacacugugca

SEQ ID NO: 1340028 - RNA, 14 nt, Human
uguuaccuguagau

SEQ ID NO: 1340029 - RNA, 15 nt, Human
uguguuuuucuauua

SEQ ID NO: 1340030 - RNA, 16 nt, Human
uguguuuuucuauuaa

SEQ ID NO: 1340031 - RNA, 17 nt, Human
uguguuuuucuauuaaa

SEQ ID NO: 1340032 - RNA, 19 nt, Human
uguguuuuucuauuaaaag

SEQ ID NO: 1340033 - RNA, 21 nt, Human
uguguuuuucuauuaaaagac

SEQ ID NO: 1340034 - RNA, 22 nt, Human
uguguuuuucuauuaaaagacu

SEQ ID NO: 1340035 - RNA, 19 nt, Human
uguuaaaaaaauaagaaga

SEQ ID NO: 1340036 - RNA, 20 nt, Human
uguuaaaaaaauaagaagaa

SEQ ID NO: 1340037 - RNA, 22 nt, Human
uguuaaaaaaauaagaagaaug

SEQ ID NO: 1340038 - RNA, 23 nt, Human
uguuaaaaaaauaagaagaaugc

SEQ ID NO: 1340039 - RNA, 14 nt, Human
uguuaaaaauguca

SEQ ID NO: 1340040 - RNA, 23 nt, Human
uguuaccugaaaacacugugcac

SEQ ID NO: 1340041 - RNA, 16 nt, Human
uguuacguagccuaag

SEQ ID NO: 1340042 - RNA, 20 nt, Human
uguuacuaaaaaaaagauga

SEQ ID NO: 1340043 - RNA, 17 nt, Human
uguuagccccauaauuu

SEQ ID NO: 1340044 - RNA, 19 nt, Human
uguuagccucaauuucuga

SEQ ID NO: 1340045 - RNA, 19 nt, Human
uguuagccuuuuuucccca

SEQ ID NO: 1340046 - RNA, 20 nt, Human
uguuagccuuuuuuccccag

SEQ ID NO: 1340047 - RNA, 21 nt, Human
uguuagccuuuuuuccccaga

SEQ ID NO: 1340048 - RNA, 12 nt, Human
uguuacuguaau

SEQ ID NO: 1340049 - RNA, 14 nt, Human
uguuacuguaauuc

SEQ ID NO: 1340050 - RNA, 15 nt, Human
uguuacuguaauucc

SEQ ID NO: 1340051 - RNA, 14 nt, Human
uguuagcagacagg

SEQ ID NO: 1340052 - RNA, 21 nt, Human
uguuagcaugcuggugagcca

SEQ ID NO: 1340053 - RNA, 20 nt, Human
uguugacaugggacauuugc

SEQ ID NO: 1340054 - RNA, 17 nt, Human
uguugacaguucauaug

SEQ ID NO: 1340055 - RNA, 13 nt, Human
uguugaauacuuu

SEQ ID NO: 1340056 - RNA, 18 nt, Human
uguugaauacuuuuuaca

SEQ ID NO: 1340057 - RNA, 12 nt, Human
uguugacauuag

SEQ ID NO: 1340058 - RNA, 14 nt, Human
uguugacauuaguc

SEQ ID NO: 1340059 - RNA, 14 nt, Human
uguugacauucuga

SEQ ID NO: 1340060 - RNA, 15 nt, Human
uguugacauucugaa

SEQ ID NO: 1340061 - RNA, 16 nt, Human
uguugacauucugaau

SEQ ID NO: 1340062 - RNA, 17 nt, Human
uguugacauucugaaug

SEQ ID NO: 1340063 - RNA, 23 nt, Human
uguugacauucugaaugcuucua

SEQ ID NO: 1340064 - RNA, 18 nt, Human
uguugacauucugaaugc

SEQ ID NO: 1340065 - RNA, 22 nt, Human
uguugagaaucccaaauuugau

SEQ ID NO: 1340066 - RNA, 23 nt, Human
uguugagaaucccaaauuugauu

SEQ ID NO: 1340067 - RNA, 21 nt, Human
uguugauacuguugcacgugu

SEQ ID NO: 1340068 - RNA, 20 nt, Human
uguucuuuuaaaugauugaa

SEQ ID NO: 1340069 - RNA, 22 nt, Human
uguucuuuggaaaguacacucu

SEQ ID NO: 1340070 - RNA, 13 nt, Human
uguucuuuuuaga

SEQ ID NO: 1340071 - RNA, 18 nt, Human
uguugaaaaaguuuguuu

SEQ ID NO: 1340072 - RNA, 18 nt, Human
uguucuuuggaaaguaca

SEQ ID NO: 1340073 - RNA, 20 nt, Human
uguucuuuggaaauacacag

SEQ ID NO: 1340074 - RNA, 15 nt, Human
uguucugcuuuccuc

SEQ ID NO: 1340075 - RNA, 13 nt, Human
uguucaugaaaga

SEQ ID NO: 1340076 - RNA, 14 nt, Human
uguucaugaaagau

SEQ ID NO: 1340077 - RNA, 23 nt, Human
uguucauauuaagaaugaucuga

SEQ ID NO: 1340078 - RNA, 18 nt, Human
uguucauauuaagaauga

SEQ ID NO: 1340079 - RNA, 17 nt, Human
uguucauauuaagaaug

SEQ ID NO: 1340080 - RNA, 23 nt, Human
uguucauagcccaguagaccuug

SEQ ID NO: 1340081 - RNA, 19 nt, Human
uguucauagcccaguagac

SEQ ID NO: 1340082 - RNA, 20 nt, Human
uguucauagcccaguagacc

SEQ ID NO: 1340083 - RNA, 20 nt, Human
uguucaugaaagauucaaug

SEQ ID NO: 1340084 - RNA, 21 nt, Human
uguucuccuuuuccucucucc

SEQ ID NO: 1340085 - RNA, 23 nt, Human
uguucuccugcugcucccucaga

SEQ ID NO: 1340086 - RNA, 12 nt, Human
uguuuaagagac

SEQ ID NO: 1340087 - RNA, 13 nt, Human
uguuuaaaguuca

SEQ ID NO: 1340088 - RNA, 14 nt, Human
uguugggagagggc

SEQ ID NO: 1340089 - RNA, 14 nt, Human
uguuuaaaccuuuu

SEQ ID NO: 1340090 - RNA, 12 nt, Human
uguuuaaaguuc

SEQ ID NO: 1340091 - RNA, 23 nt, Human
uguuuaaaguucaacauguuauu

SEQ ID NO: 1340092 - RNA, 13 nt, Human
uguuuacaugcuu

SEQ ID NO: 1340093 - RNA, 16 nt, Human
uguuuacaugcuuauu

SEQ ID NO: 1340094 - RNA, 21 nt, Human
uguuuacaugcuuauuccaug

SEQ ID NO: 1340095 - RNA, 22 nt, Human
uguuuacaugcuuauuccauga

SEQ ID NO: 1340096 - RNA, 20 nt, Human
uguuggcguaggcuacagag

SEQ ID NO: 1340097 - RNA, 21 nt, Human
uguuggcguaggcuacagaga

SEQ ID NO: 1340098 - RNA, 22 nt, Human
uguuggcguaggcuacagagaa

SEQ ID NO: 1340099 - RNA, 23 nt, Human
uguuggcguaggcuacagagaag

SEQ ID NO: 1340100 - RNA, 23 nt, Human
uguuggcguggggccuuugucag

SEQ ID NO: 1340101 - RNA, 24 nt, Human
uguuggcguaggcuacagagaagc

SEQ ID NO: 1340102 - RNA, 18 nt, Human
uguuggcaggcuggccag

SEQ ID NO: 1340103 - RNA, 21 nt, Human
uguuggcaggcuggccagucc

SEQ ID NO: 1340104 - RNA, 17 nt, Human
uguuggcauagcucugg

SEQ ID NO: 1340105 - RNA, 23 nt, Human
uguuggccaggcuggucuaaaac

SEQ ID NO: 1340106 - RNA, 18 nt, Human
uguuggcguaggcuacag

SEQ ID NO: 1340107 - RNA, 14 nt, Human
uguuggcuagccuc

SEQ ID NO: 1340108 - RNA, 19 nt, Human
uguugggaaacuuggcucg

SEQ ID NO: 1340109 - RNA, 14 nt, Human
uguugggacugcua

SEQ ID NO: 1340110 - RNA, 19 nt, Human
uguugggacugcuaaauaa

SEQ ID NO: 1340111 - RNA, 14 nt, Human
uguuggagaagaac

SEQ ID NO: 1340112 - RNA, 12 nt, Human
uguuggaaugaa

SEQ ID NO: 1340113 - RNA, 16 nt, Human
uguuggagaagaacug

SEQ ID NO: 1340114 - RNA, 17 nt, Human
uguuggagaagaacuga

SEQ ID NO: 1340115 - RNA, 23 nt, Human
uguugauacuguugcacgugugu

SEQ ID NO: 1340116 - RNA, 15 nt, Human
uguugauuaaagaug

SEQ ID NO: 1340117 - RNA, 16 nt, Human
uguugauuaaagauga

SEQ ID NO: 1340118 - RNA, 19 nt, Human
uguuggagaagaacugaaa

SEQ ID NO: 1340119 - RNA, 20 nt, Human
uguuggagaagaacugaaau

SEQ ID NO: 1340120 - RNA, 21 nt, Human
uguuggacaagcuucugagac

SEQ ID NO: 1340121 - RNA, 22 nt, Human
uguuggacaagcuucugagacg

SEQ ID NO: 1340122 - RNA, 21 nt, Human
uguuggacaccuuuagguucu

SEQ ID NO: 1340123 - RNA, 14 nt, Human
uguuggcagccucu

SEQ ID NO: 1340124 - RNA, 12 nt, Human
uguuggcaggcu

SEQ ID NO: 1340125 - RNA, 11 nt, Human
uguuucuguaa

SEQ ID NO: 1340126 - RNA, 16 nt, Human
uguuucuguaagaaac

SEQ ID NO: 1340127 - RNA, 15 nt, Human
uguuugugcuguggu

SEQ ID NO: 1340128 - RNA, 12 nt, Human
uguuuguguauu

SEQ ID NO: 1340129 - RNA, 14 nt, Human
uguuuguguauuua

SEQ ID NO: 1340130 - RNA, 11 nt, Human
uguuuguuggu

SEQ ID NO: 1340131 - RNA, 15 nt, Human
uguuuguuguagauu

SEQ ID NO: 1340132 - RNA, 14 nt, Human
uguuuccucuguuc

SEQ ID NO: 1340133 - RNA, 20 nt, Human
uguuucccuuucacuggcau

SEQ ID NO: 1340134 - RNA, 22 nt, Human
uguuuccccacaaaacaaagca

SEQ ID NO: 1340135 - RNA, 16 nt, Human
uguuuccuagcugugu

SEQ ID NO: 1340136 - RNA, 14 nt, Human
uguuuccucuaguu

SEQ ID NO: 1340137 - RNA, 12 nt, Human
uguuucugacuc

SEQ ID NO: 1340138 - RNA, 19 nt, Human
uguuucugacucugagcua

SEQ ID NO: 1340139 - RNA, 17 nt, Human
uguuucuggauuucaua

SEQ ID NO: 1340140 - RNA, 20 nt, Human
uguuuccagcauucccaggu

SEQ ID NO: 1340141 - RNA, 22 nt, Human
uguuucccaggcccacugugcc

SEQ ID NO: 1340142 - RNA, 18 nt, Human
uguuuccagcauucccag

SEQ ID NO: 1340143 - RNA, 20 nt, Human
uguuuacauuuuauggugcc

SEQ ID NO: 1340144 - RNA, 13 nt, Human
uguuuacuaggga

SEQ ID NO: 1340145 - RNA, 19 nt, Human
uguuuacuagggaucccuc

SEQ ID NO: 1340146 - RNA, 15 nt, Human
uguuuacugcaaggu

SEQ ID NO: 1340147 - RNA, 13 nt, Human
uuaaaaaaaaaga

SEQ ID NO: 1340148 - RNA, 22 nt, Human
uuaaaaaaaaaccugagcccca

SEQ ID NO: 1340149 - RNA, 23 nt, Human
uguuuuugcgugggagugugugc

SEQ ID NO: 1340150 - RNA, 10 nt, Human
uguuuuuggg

SEQ ID NO: 1340151 - RNA, 16 nt, Human
uguuuuuggucuuuua

SEQ ID NO: 1340152 - RNA, 18 nt, Human
uguuuuuacaaauguuaa

SEQ ID NO: 1340153 - RNA, 20 nt, Human
uguuuuuaaugcuuugauau

SEQ ID NO: 1340154 - RNA, 16 nt, Human
uguuuuugcacauguu

SEQ ID NO: 1340155 - RNA, 16 nt, Human
uguuuuaauaacuuau

SEQ ID NO: 1340156 - RNA, 13 nt, Human
uguuuuaauugua

SEQ ID NO: 1340157 - RNA, 22 nt, Human
uguuuuaauuuaaacaccuccu

SEQ ID NO: 1340158 - RNA, 23 nt, Human
uguuuuaauuuaaacaccuccuc

SEQ ID NO: 1340159 - RNA, 14 nt, Human
uguuuuuaaacugu

SEQ ID NO: 1340160 - RNA, 15 nt, Human
uguuuuuaaacugua

SEQ ID NO: 1340161 - RNA, 16 nt, Human
uguuuuuaaacuguac

SEQ ID NO: 1340162 - RNA, 18 nt, Human
uguuuuuaaacuguacag

SEQ ID NO: 1340163 - RNA, 19 nt, Human
uguuuuuaaacuguacagu

SEQ ID NO: 1340164 - RNA, 19 nt, Human
uguuuuuaacaugucaauc

SEQ ID NO: 1340165 - RNA, 23 nt, Human
uguuuuuaaacuguacagugucu

SEQ ID NO: 1340166 - RNA, 14 nt, Human
uuaaagccuccuca

SEQ ID NO: 1340167 - RNA, 13 nt, Human
uuaaagccuccuc

SEQ ID NO: 1340168 - RNA, 20 nt, Human
uuaaagcagguucuuguugg

SEQ ID NO: 1340169 - RNA, 21 nt, Human
uuaaagaaaaaaauguauuuu

SEQ ID NO: 1340170 - RNA, 17 nt, Human
uuaaagaaaaaaauuga

SEQ ID NO: 1340171 - RNA, 20 nt, Human
uuaaagaaaaaaauugaaau

SEQ ID NO: 1340172 - RNA, 22 nt, Human
uuaaagaaaaaaauugaaaugu

SEQ ID NO: 1340173 - RNA, 21 nt, Human
uuaaaugacacucauauaauu

SEQ ID NO: 1340174 - RNA, 16 nt, Human
uuaaaucucauugcuu

SEQ ID NO: 1340175 - RNA, 18 nt, Human
uuaaaucuguuuuucuaa

SEQ ID NO: 1340176 - RNA, 14 nt, Human
uuaaaugaacaaga

SEQ ID NO: 1340177 - RNA, 17 nt, Human
uuaaaugaacaagagaa

SEQ ID NO: 1340178 - RNA, 18 nt, Human
uuaaaugaacaagagaag

SEQ ID NO: 1340179 - RNA, 22 nt, Human
uuaaaugacacucauauaauua

SEQ ID NO: 1340180 - RNA, 20 nt, Human
uuaaaugaacaagagaagca

SEQ ID NO: 1340181 - RNA, 22 nt, Human
uuaaaugaacaagagaagcauu

SEQ ID NO: 1340182 - RNA, 18 nt, Human
uuaaaaaaaaagaucugu

SEQ ID NO: 1340183 - RNA, 18 nt, Human
uuaaaaccugcuuuucaa

SEQ ID NO: 1340184 - RNA, 21 nt, Human
uuaaaaccugcuuuucaaugu

SEQ ID NO: 1340185 - RNA, 12 nt, Human
uuaaaacuccug

SEQ ID NO: 1340186 - RNA, 15 nt, Human
uuaaaacuuguaauu

SEQ ID NO: 1340187 - RNA, 15 nt, Human
uuaaaacuuugaagu

SEQ ID NO: 1340188 - RNA, 17 nt, Human
uuaaaauacaagacugc

SEQ ID NO: 1340189 - RNA, 15 nt, Human
uuaaaauaauuauau

SEQ ID NO: 1340190 - RNA, 11 nt, Human
uuaaaauacaa

SEQ ID NO: 1340191 - RNA, 13 nt, Human
uuaaaauacaaga

SEQ ID NO: 1340192 - RNA, 15 nt, Human
uuaaaauacaagacu

SEQ ID NO: 1340193 - RNA, 14 nt, Human
uuaaacuaaaugug

SEQ ID NO: 1340194 - RNA, 22 nt, Human
uuaaacuaggagaaccaaaucu

SEQ ID NO: 1340195 - RNA, 17 nt, Human
uuaaacuugcaucacuu

SEQ ID NO: 1340196 - RNA, 17 nt, Human
uuaaacuuuuaauucau

SEQ ID NO: 1340197 - RNA, 18 nt, Human
uuaaacuuuuaauucauu

SEQ ID NO: 1340198 - RNA, 18 nt, Human
uuaaagaaaaaaauguau

SEQ ID NO: 1340199 - RNA, 19 nt, Human
uuaaagaaaaaaauguauu

SEQ ID NO: 1340200 - RNA, 20 nt, Human
uuaaagaaaaaaauguauuu

SEQ ID NO: 1340201 - RNA, 14 nt, Human
uuaauagcagccuu

SEQ ID NO: 1340202 - RNA, 15 nt, Human
uuaauagcagccuuu

SEQ ID NO: 1340203 - RNA, 22 nt, Human
uuaauagcagccuuucucucuu

SEQ ID NO: 1340204 - RNA, 15 nt, Human
uuaauagcaaagaau

SEQ ID NO: 1340205 - RNA, 16 nt, Human
uuaauagcaaagaauu

SEQ ID NO: 1340206 - RNA, 18 nt, Human
uuaauagcaaagaauuga

SEQ ID NO: 1340207 - RNA, 20 nt, Human
uuaauagcaaagaauugacu

SEQ ID NO: 1340208 - RNA, 16 nt, Human
uuaauaauguuucaaa

SEQ ID NO: 1340209 - RNA, 15 nt, Human
uuaauaccacagcuu

SEQ ID NO: 1340210 - RNA, 15 nt, Human
uuaauacuaccuuga

SEQ ID NO: 1340211 - RNA, 17 nt, Human
uuaauacuaccuugaaa

SEQ ID NO: 1340212 - RNA, 22 nt, Human
uuaauacucaaaugaguaacau

SEQ ID NO: 1340213 - RNA, 21 nt, Human
uuaauacucaaaugaguaaca

SEQ ID NO: 1340214 - RNA, 22 nt, Human
uuaagcaucuggcucuaauuca

SEQ ID NO: 1340215 - RNA, 16 nt, Human
uuaagccaaaacaaug

SEQ ID NO: 1340216 - RNA, 21 nt, Human
uuaagccacuuaaaauguuca

SEQ ID NO: 1340217 - RNA, 20 nt, Human
uuaagcccagugcacugaaa

SEQ ID NO: 1340218 - RNA, 12 nt, Human
uuaagaguaaaa

SEQ ID NO: 1340219 - RNA, 14 nt, Human
uuaacuuuguuuua

SEQ ID NO: 1340220 - RNA, 13 nt, Human
uuaagaguccaag

SEQ ID NO: 1340221 - RNA, 14 nt, Human
uuaagaguccaaga

SEQ ID NO: 1340222 - RNA, 19 nt, Human
uuaagaguccaagaaucca

SEQ ID NO: 1340223 - RNA, 14 nt, Human
uuaacuuuaauguu

SEQ ID NO: 1340224 - RNA, 11 nt, Human
uuaacuuuguu

SEQ ID NO: 1340225 - RNA, 16 nt, Human
uuaagauaauuauaau

SEQ ID NO: 1340226 - RNA, 14 nt, Human
uuaagauaauuaua

SEQ ID NO: 1340227 - RNA, 18 nt, Human
uuaagaucacagugaacu

SEQ ID NO: 1340228 - RNA, 20 nt, Human
uuaaauguuaugacuaugua

SEQ ID NO: 1340229 - RNA, 16 nt, Human
uuaaauguuaugacua

SEQ ID NO: 1340230 - RNA, 13 nt, Human
uuaaauguuauua

SEQ ID NO: 1340231 - RNA, 19 nt, Human
uuaaauguauacuauagua

SEQ ID NO: 1340232 - RNA, 14 nt, Human
uuaaauguauacua

SEQ ID NO: 1340233 - RNA, 12 nt, Human
uuaaauguauac

SEQ ID NO: 1340234 - RNA, 20 nt, Human
uuaaaugcaaccauuugaaa

SEQ ID NO: 1340235 - RNA, 23 nt, Human
uuacaacggagucaaaaauuaaa

SEQ ID NO: 1340236 - RNA, 19 nt, Human
uuacaacggagucaaaaau

SEQ ID NO: 1340237 - RNA, 22 nt, Human
uuacaacugccucgaaacacag

SEQ ID NO: 1340238 - RNA, 23 nt, Human
uuacaacugccucgaaacacaga

SEQ ID NO: 1340239 - RNA, 17 nt, Human
uuacacauuaagcaaau

SEQ ID NO: 1340240 - RNA, 16 nt, Human
uuacaacggagucaaa

SEQ ID NO: 1340241 - RNA, 19 nt, Human
uuacaaauguuaaaaugug

SEQ ID NO: 1340242 - RNA, 16 nt, Human
uuaauuaccaaccugu

SEQ ID NO: 1340243 - RNA, 19 nt, Human
uuaauuagccagugaaaaa

SEQ ID NO: 1340244 - RNA, 18 nt, Human
uuacaaauguuaaaaugu

SEQ ID NO: 1340245 - RNA, 21 nt, Human
uuacaaauguuaaaauguguu

SEQ ID NO: 1340246 - RNA, 20 nt, Human
uuaaugaaugcuuaaagaau

SEQ ID NO: 1340247 - RNA, 21 nt, Human
uuaaugaaugcuuaaagaauu

SEQ ID NO: 1340248 - RNA, 17 nt, Human
uuaaugaaugcuuaaag

SEQ ID NO: 1340249 - RNA, 15 nt, Human
uuaaugaaugcuuaa

SEQ ID NO: 1340250 - RNA, 13 nt, Human
uuaaugaaugcuu

SEQ ID NO: 1340251 - RNA, 16 nt, Human
uuaauagcagccuuuc

SEQ ID NO: 1340252 - RNA, 20 nt, Human
uuaauaaucucacauauaca

SEQ ID NO: 1340253 - RNA, 14 nt, Human
uuacauuuccuaaa

SEQ ID NO: 1340254 - RNA, 17 nt, Human
uuacauuuacaaacuga

SEQ ID NO: 1340255 - RNA, 18 nt, Human
uuacauuuacaaacugaa

SEQ ID NO: 1340256 - RNA, 19 nt, Human
uuacauuuacaaacugaag

SEQ ID NO: 1340257 - RNA, 20 nt, Human
uuacauuuacaaacugaaga

SEQ ID NO: 1340258 - RNA, 20 nt, Human
uuacagagacagaaagcaga

SEQ ID NO: 1340259 - RNA, 23 nt, Human
uuacagaauugcuuguuugcuuc

SEQ ID NO: 1340260 - RNA, 19 nt, Human
uuacagacgcugcugucac

SEQ ID NO: 1340261 - RNA, 13 nt, Human
uuacauucugaau

SEQ ID NO: 1340262 - RNA, 16 nt, Human
uuacacuuuuuggaag

SEQ ID NO: 1340263 - RNA, 17 nt, Human
uuacacgcuuuugugau

SEQ ID NO: 1340264 - RNA, 14 nt, Human
uuacacgcuuuugu

SEQ ID NO: 1340265 - RNA, 22 nt, Human
uuacacuacacacuguguacug

SEQ ID NO: 1340266 - RNA, 14 nt, Human
uuacacucuuugua

SEQ ID NO: 1340267 - RNA, 15 nt, Human
uuacacucuuuguaa

SEQ ID NO: 1340268 - RNA, 19 nt, Human
uguggaacauaaaaaggac

SEQ ID NO: 1340269 - RNA, 15 nt, Human
uguggaacugcugcc

SEQ ID NO: 1340270 - RNA, 17 nt, Human
uguggaacugcugccac

SEQ ID NO: 1340271 - RNA, 21 nt, Human
uguggaacauaaaaaggacau

SEQ ID NO: 1340272 - RNA, 22 nt, Human
uguggaacugcugccacugagg

SEQ ID NO: 1340273 - RNA, 18 nt, Human
uguggaacugcugccacu

SEQ ID NO: 1340274 - RNA, 14 nt, Human
uguggacaggacua

SEQ ID NO: 1340275 - RNA, 15 nt, Human
uguggccuaaccugc

SEQ ID NO: 1340276 - RNA, 22 nt, Human
uguggaccauggaguggcagcc

SEQ ID NO: 1340277 - RNA, 21 nt, Human
uguggaccauggaguggcagc

SEQ ID NO: 1340278 - RNA, 17 nt, Human
uguggccuaagaggcug

SEQ ID NO: 1340279 - RNA, 23 nt, Human
uguggccuaagaggcugcccucc

SEQ ID NO: 1340280 - RNA, 17 nt, Human
uguggccuuugcgcucc

SEQ ID NO: 1340281 - RNA, 18 nt, Human
uguggcgccgucuccagg

SEQ ID NO: 1340282 - RNA, 23 nt, Human
uguggccucagcucccacaagcc

SEQ ID NO: 1340283 - RNA, 19 nt, Human
uguggccuaagaggcugcc

SEQ ID NO: 1340284 - RNA, 23 nt, Human
ugugggagaccggccugccagga

SEQ ID NO: 1340285 - RNA, 17 nt, Human
ugugggagaccggccug

SEQ ID NO: 1340286 - RNA, 12 nt, Human
ugugggagccuc

SEQ ID NO: 1340287 - RNA, 10 nt, Human
uguggcucac

SEQ ID NO: 1340288 - RNA, 19 nt, Human
uguggcgccgucuccaggg

SEQ ID NO: 1340289 - RNA, 23 nt, Human
uguggcgccgucuccaggggcug

SEQ ID NO: 1340290 - RNA, 14 nt, Human
uguguagcuuugcu

SEQ ID NO: 1340291 - RNA, 17 nt, Human
uguguagcuuugcucuu

SEQ ID NO: 1340292 - RNA, 15 nt, Human
uguguacauaacuga

SEQ ID NO: 1340293 - RNA, 17 nt, Human
uguguacauaacugaaa

SEQ ID NO: 1340294 - RNA, 12 nt, Human
uguguagccuuu

SEQ ID NO: 1340295 - RNA, 13 nt, Human
uguguagccuuuu

SEQ ID NO: 1340296 - RNA, 14 nt, Human
uguguagccuuuuu

SEQ ID NO: 1340297 - RNA, 20 nt, Human
uguguagccuuuuuguauaa

SEQ ID NO: 1340298 - RNA, 16 nt, Human
uguguagcugugaccu

SEQ ID NO: 1340299 - RNA, 19 nt, Human
uguguagcugugaccugcu

SEQ ID NO: 1340300 - RNA, 22 nt, Human
ugugggcgugagaccugccccu

SEQ ID NO: 1340301 - RNA, 20 nt, Human
ugugggccugggcuccugga

SEQ ID NO: 1340302 - RNA, 21 nt, Human
uguguaauuagugccacuuaa

SEQ ID NO: 1340303 - RNA, 20 nt, Human
ugugggcgugagaccugccc

SEQ ID NO: 1340304 - RNA, 21 nt, Human
ugugggcgugagaccugcccc

SEQ ID NO: 1340305 - RNA, 11 nt, Human
ugugggccugg

SEQ ID NO: 1340306 - RNA, 13 nt, Human
ugugggccugggc

SEQ ID NO: 1340307 - RNA, 14 nt, Human
ugugggccugggcu

SEQ ID NO: 1340308 - RNA, 15 nt, Human
ugugggccugggcuc

SEQ ID NO: 1340309 - RNA, 17 nt, Human
ugugggccugggcuccu

SEQ ID NO: 1340310 - RNA, 19 nt, Human
ugugggccugggcuccugg

SEQ ID NO: 1340311 - RNA, 14 nt, Human
ugugggagccucgc

SEQ ID NO: 1340312 - RNA, 19 nt, Human
ugugggauguucagcacug

SEQ ID NO: 1340313 - RNA, 22 nt, Human
ugugggauguucagcacugucc

SEQ ID NO: 1340314 - RNA, 13 nt, Human
ugugggauuaugg

SEQ ID NO: 1340315 - RNA, 16 nt, Human
ugugggauuauggguc

SEQ ID NO: 1340316 - RNA, 18 nt, Human
ugugggauuaugggucac

SEQ ID NO: 1340317 - RNA, 23 nt, Human
ugugggauuaugggucacaggaa

SEQ ID NO: 1340318 - RNA, 16 nt, Human
uguggaacauaaaaag

SEQ ID NO: 1340319 - RNA, 14 nt, Human
ugugcuuugagaag

SEQ ID NO: 1340320 - RNA, 19 nt, Human
ugugcuugagccaggaggc

SEQ ID NO: 1340321 - RNA, 16 nt, Human
ugugcucaggagcccu

SEQ ID NO: 1340322 - RNA, 15 nt, Human
ugugcucaggagccc

SEQ ID NO: 1340323 - RNA, 17 nt, Human
ugugcucaggagcccug

SEQ ID NO: 1340324 - RNA, 20 nt, Human
ugugcucaggagcccuggga

SEQ ID NO: 1340325 - RNA, 14 nt, Human
ugugcuuguuaacu

SEQ ID NO: 1340326 - RNA, 19 nt, Human
ugugcuaguaauuggaaag

SEQ ID NO: 1340327 - RNA, 13 nt, Human
ugugcuauacugc

SEQ ID NO: 1340328 - RNA, 18 nt, Human
ugugcuauacugcauacu

SEQ ID NO: 1340329 - RNA, 20 nt, Human
ugugcuauacugcauacuuu

SEQ ID NO: 1340330 - RNA, 21 nt, Human
ugugcuauacugcauacuuuu

SEQ ID NO: 1340331 - RNA, 18 nt, Human
ugugcuauggugcucugu

SEQ ID NO: 1340332 - RNA, 12 nt, Human
ugugcucagccc

SEQ ID NO: 1340333 - RNA, 15 nt, Human
ugugcucagcccuga

SEQ ID NO: 1340334 - RNA, 13 nt, Human
ugugcacugccca

SEQ ID NO: 1340335 - RNA, 21 nt, Human
ugugcacugcccauggacagg

SEQ ID NO: 1340336 - RNA, 20 nt, Human
ugugcacuggcaccaagugc

SEQ ID NO: 1340337 - RNA, 17 nt, Human
ugugcacuuauuuauga

SEQ ID NO: 1340338 - RNA, 21 nt, Human
ugugcacaucugugucuuguu

SEQ ID NO: 1340339 - RNA, 16 nt, Human
ugugcauuauuuucca

SEQ ID NO: 1340340 - RNA, 15 nt, Human
ugugcauucuggauu

SEQ ID NO: 1340341 - RNA, 23 nt, Human
ugugccuucgucuuucccauggg

SEQ ID NO: 1340342 - RNA, 17 nt, Human
ugugccuugucacgcca

SEQ ID NO: 1340343 - RNA, 19 nt, Human
ugugccuugucacgccaga

SEQ ID NO: 1340344 - RNA, 20 nt, Human
ugugccuugucacgccagac

SEQ ID NO: 1340345 - RNA, 21 nt, Human
ugugccuucucucucccuuuu

SEQ ID NO: 1340346 - RNA, 13 nt, Human
ugugccuuguuuu

SEQ ID NO: 1340347 - RNA, 18 nt, Human
ugugccuuguuuuuuguu

SEQ ID NO: 1340348 - RNA, 15 nt, Human
ugugccuuguuuuuu

SEQ ID NO: 1340349 - RNA, 16 nt, Human
ugugauauaagugugu

SEQ ID NO: 1340350 - RNA, 17 nt, Human
ugugaguguuuuuaucu

SEQ ID NO: 1340351 - RNA, 16 nt, Human
ugugaguucucccugu

SEQ ID NO: 1340352 - RNA, 21 nt, Human
ugugaguuuaccuuguauacu

SEQ ID NO: 1340353 - RNA, 19 nt, Human
ugugaguuuaccuuguaua

SEQ ID NO: 1340354 - RNA, 13 nt, Human
ugugauauauaag

SEQ ID NO: 1340355 - RNA, 14 nt, Human
ugugauauauaagu

SEQ ID NO: 1340356 - RNA, 15 nt, Human
ugugauauauaagug

SEQ ID NO: 1340357 - RNA, 16 nt, Human
ugugauauauaagugu

SEQ ID NO: 1340358 - RNA, 21 nt, Human
ugugauaugcacaauguagau

SEQ ID NO: 1340359 - RNA, 22 nt, Human
ugugaguguuuuuaucuuuuua

SEQ ID NO: 1340360 - RNA, 14 nt, Human
ugugauauucuaag

SEQ ID NO: 1340361 - RNA, 15 nt, Human
ugugauauucuaaga

SEQ ID NO: 1340362 - RNA, 19 nt, Human
ugugauauucuaagacuua

SEQ ID NO: 1340363 - RNA, 15 nt, Human
ugugaucagaccaua

SEQ ID NO: 1340364 - RNA, 17 nt, Human
ugugcacaucugugucu

SEQ ID NO: 1340365 - RNA, 20 nt, Human
ugugcacaucugugucuugu

SEQ ID NO: 1340366 - RNA, 14 nt, Human
ugugaggccagggc

SEQ ID NO: 1340367 - RNA, 15 nt, Human
ugugaggccagggca

SEQ ID NO: 1340368 - RNA, 16 nt, Human
ugugaggccagggcag

SEQ ID NO: 1340369 - RNA, 17 nt, Human
ugugaggccagggcaga

SEQ ID NO: 1340370 - RNA, 22 nt, Human
ugugaggccagggcagagugag

SEQ ID NO: 1340371 - RNA, 14 nt, Human
ugugaggcuguccu

SEQ ID NO: 1340372 - RNA, 18 nt, Human
ugugagucuuugguucua

SEQ ID NO: 1340373 - RNA, 20 nt, Human
ugugagucuuugguucuaag

SEQ ID NO: 1340374 - RNA, 21 nt, Human
ugugagucuuugguucuaagg

SEQ ID NO: 1340375 - RNA, 22 nt, Human
ugugagucuuugguucuaagga

SEQ ID NO: 1340376 - RNA, 18 nt, Human
ugugacauuuuacauuaa

SEQ ID NO: 1340377 - RNA, 17 nt, Human
ugugacauuuuacauua

SEQ ID NO: 1340378 - RNA, 15 nt, Human
ugugacauuuuacau

SEQ ID NO: 1340379 - RNA, 18 nt, Human
ugugaccaaaaguuacau

SEQ ID NO: 1340380 - RNA, 17 nt, Human
ugugaccaaaaguuaca

SEQ ID NO: 1340381 - RNA, 15 nt, Human
ugugaccaaugucuu

SEQ ID NO: 1340382 - RNA, 16 nt, Human
ugugaccaaugucuug

SEQ ID NO: 1340383 - RNA, 13 nt, Human
ugugaggccaggg

SEQ ID NO: 1340384 - RNA, 17 nt, Human
ugugaaggugauuuaag

SEQ ID NO: 1340385 - RNA, 23 nt, Human
ugugaaggugauuuaagggccca

SEQ ID NO: 1340386 - RNA, 16 nt, Human
ugugaauuaagcccaa

SEQ ID NO: 1340387 - RNA, 19 nt, Human
ugugaauuaggcuguaacu

SEQ ID NO: 1340388 - RNA, 22 nt, Human
ugugaauuaggcuguaacuacu

SEQ ID NO: 1340389 - RNA, 23 nt, Human
ugugaauuaggcuguaacuacuu

SEQ ID NO: 1340390 - RNA, 24 nt, Human
ugugaauuaggcuguaacuacuuu

SEQ ID NO: 1340391 - RNA, 17 nt, Human
ugugacauuuauauauu

SEQ ID NO: 1340392 - RNA, 18 nt, Human
ugugacauuuauauauug

SEQ ID NO: 1340393 - RNA, 16 nt, Human
ugugaaaaugugugug

SEQ ID NO: 1340394 - RNA, 18 nt, Human
ugugaaaaugguccagga

SEQ ID NO: 1340395 - RNA, 22 nt, Human
ugugaaaaugguccaggagaag

SEQ ID NO: 1340396 - RNA, 17 nt, Human
ugugaaaaugugugugu

SEQ ID NO: 1340397 - RNA, 13 nt, Human
ugugaagccuucc

SEQ ID NO: 1340398 - RNA, 12 nt, Human
ugugaagccuuc

SEQ ID NO: 1340399 - RNA, 13 nt, Human
ugugaaggacccu

SEQ ID NO: 1340400 - RNA, 14 nt, Human
ugugaaggacccuu

SEQ ID NO: 1340401 - RNA, 13 nt, Human
ugucuuuuggagg

SEQ ID NO: 1340402 - RNA, 14 nt, Human
ugucuguccuuuau

SEQ ID NO: 1340403 - RNA, 17 nt, Human
ugucuggcacagccugg

SEQ ID NO: 1340404 - RNA, 23 nt, Human
ugucugguucucaauuccaacag

SEQ ID NO: 1340405 - RNA, 20 nt, Human
ugucuggcaaggacuuugua

SEQ ID NO: 1340406 - RNA, 15 nt, Human
ugucuggcaaugcca

SEQ ID NO: 1340407 - RNA, 16 nt, Human
ugucuggcaaugccac

SEQ ID NO: 1340408 - RNA, 19 nt, Human
ugucuggcaaugccacagc

SEQ ID NO: 1340409 - RNA, 22 nt, Human
ugucuggcaaugccacagcccu

SEQ ID NO: 1340410 - RNA, 15 nt, Human
ugucuggaagauggg

SEQ ID NO: 1340411 - RNA, 17 nt, Human
ugucuggaagaugggga

SEQ ID NO: 1340412 - RNA, 11 nt, Human
ugucuggagac

SEQ ID NO: 1340413 - RNA, 12 nt, Human
ugucuggagacc

SEQ ID NO: 1340414 - RNA, 13 nt, Human
ugucuggagacca

SEQ ID NO: 1340415 - RNA, 17 nt, Human
ugucuggagaccaccag

SEQ ID NO: 1340416 - RNA, 18 nt, Human
ugucuggagaccaccagg

SEQ ID NO: 1340417 - RNA, 20 nt, Human
ugucuggagaccaccagggc

SEQ ID NO: 1340418 - RNA, 21 nt, Human
ugucuggagaccaccagggca

SEQ ID NO: 1340419 - RNA, 14 nt, Human
ugucuggcaaggac

SEQ ID NO: 1340420 - RNA, 16 nt, Human
ugucugaagucacugc

SEQ ID NO: 1340421 - RNA, 16 nt, Human
ugucugaacuugcauu

SEQ ID NO: 1340422 - RNA, 17 nt, Human
ugucugaagucacugca

SEQ ID NO: 1340423 - RNA, 18 nt, Human
ugucugaagucacugcac

SEQ ID NO: 1340424 - RNA, 19 nt, Human
ugucugaagucacugcaca

SEQ ID NO: 1340425 - RNA, 20 nt, Human
ugucugaagucacugcacag

SEQ ID NO: 1340426 - RNA, 17 nt, Human
uguccucagccuugcca

SEQ ID NO: 1340427 - RNA, 20 nt, Human
uguccucagccuugccagag

SEQ ID NO: 1340428 - RNA, 21 nt, Human
uguccucagccuugccagaga

SEQ ID NO: 1340429 - RNA, 22 nt, Human
uguccucagccuugccagagau

SEQ ID NO: 1340430 - RNA, 18 nt, Human
uguccuagcacagauggc

SEQ ID NO: 1340431 - RNA, 23 nt, Human
uguccuccaacaccaagcacagc

SEQ ID NO: 1340432 - RNA, 23 nt, Human
uguccucccgagcuccucuucca

SEQ ID NO: 1340433 - RNA, 16 nt, Human
uguccucuucccucuc

SEQ ID NO: 1340434 - RNA, 13 nt, Human
uguccucuucccu

SEQ ID NO: 1340435 - RNA, 14 nt, Human
uguccucuuucagc

SEQ ID NO: 1340436 - RNA, 15 nt, Human
uguccucuuucagcu

SEQ ID NO: 1340437 - RNA, 16 nt, Human
uguccucuuucagcuc

SEQ ID NO: 1340438 - RNA, 17 nt, Human
uguccucuuucagcucc

SEQ ID NO: 1340439 - RNA, 18 nt, Human
uguccucuuucagcuccu

SEQ ID NO: 1340440 - RNA, 19 nt, Human
uguccucuuucagcuccug

SEQ ID NO: 1340441 - RNA, 21 nt, Human
uguccucuuucagcuccugac

SEQ ID NO: 1340442 - RNA, 12 nt, Human
uguccugaaggc

SEQ ID NO: 1340443 - RNA, 18 nt, Human
uguccugaaggccugagg

SEQ ID NO: 1340444 - RNA, 15 nt, Human
uguccugaaggccug

SEQ ID NO: 1340445 - RNA, 13 nt, Human
ugucugaacuugc

SEQ ID NO: 1340446 - RNA, 18 nt, Human
ugucugaacuugcauugu

SEQ ID NO: 1340447 - RNA, 18 nt, Human
uguagccccucuccugga

SEQ ID NO: 1340448 - RNA, 19 nt, Human
uguagcccuuuccaagcuu

SEQ ID NO: 1340449 - RNA, 23 nt, Human
uguagccucaaucgagugagaca

SEQ ID NO: 1340450 - RNA, 16 nt, Human
uguagccacaccagga

SEQ ID NO: 1340451 - RNA, 17 nt, Human
uguagccacaccaggau

SEQ ID NO: 1340452 - RNA, 18 nt, Human
uguagccacaccaggaua

SEQ ID NO: 1340453 - RNA, 15 nt, Human
uguagccagccgggg

SEQ ID NO: 1340454 - RNA, 12 nt, Human
uguagccagccg

SEQ ID NO: 1340455 - RNA, 14 nt, Human
uguagccagccggg

SEQ ID NO: 1340456 - RNA, 16 nt, Human
uguagccccagugaca

SEQ ID NO: 1340457 - RNA, 21 nt, Human
uguagccccagugacagcuag

SEQ ID NO: 1340458 - RNA, 12 nt, Human
uguagccuuuuu

SEQ ID NO: 1340459 - RNA, 13 nt, Human
uguagccuuuuug

SEQ ID NO: 1340460 - RNA, 16 nt, Human
uguagcgucuuucuuu

SEQ ID NO: 1340461 - RNA, 15 nt, Human
uguagcgucuuucuu

SEQ ID NO: 1340462 - RNA, 13 nt, Human
uguagcuacagag

SEQ ID NO: 1340463 - RNA, 14 nt, Human
uguagcuacagaga

SEQ ID NO: 1340464 - RNA, 15 nt, Human
uguagcuacagagaa

SEQ ID NO: 1340465 - RNA, 16 nt, Human
uguagcuacagagaaa

SEQ ID NO: 1340466 - RNA, 17 nt, Human
uguagcuacagagaaac

SEQ ID NO: 1340467 - RNA, 18 nt, Human
uguagcuacagagaaacc

SEQ ID NO: 1340468 - RNA, 19 nt, Human
uguagcuacagagaaacca

SEQ ID NO: 1340469 - RNA, 21 nt, Human
uguagcuacagagaaaccagc

SEQ ID NO: 1340470 - RNA, 22 nt, Human
uguagcuacagagaaaccagcu

SEQ ID NO: 1340471 - RNA, 23 nt, Human
uguagcuacagagaaaccagcuu

SEQ ID NO: 1340472 - RNA, 11 nt, Human
uguagcuccuc

SEQ ID NO: 1340473 - RNA, 17 nt, Human
uguagcuccuccccugg

SEQ ID NO: 1340474 - RNA, 18 nt, Human
uguagcuccuccccugga

SEQ ID NO: 1340475 - RNA, 17 nt, Human
uguagcucuaaaaucug

SEQ ID NO: 1340476 - RNA, 20 nt, Human
uguagcucuuugucagggag

SEQ ID NO: 1340477 - RNA, 15 nt, Human
uguagcugaggaggc

SEQ ID NO: 1340478 - RNA, 11 nt, Human
uguagcuguga

SEQ ID NO: 1340479 - RNA, 13 nt, Human
uguagcugugacc

SEQ ID NO: 1340480 - RNA, 14 nt, Human
uguagcugugaccu

SEQ ID NO: 1340481 - RNA, 15 nt, Human
uguagcugugaccug

SEQ ID NO: 1340482 - RNA, 16 nt, Human
uguagcugugaccugc

SEQ ID NO: 1340483 - RNA, 17 nt, Human
uguagcugugaccugcu

SEQ ID NO: 1340484 - RNA, 18 nt, Human
uguagcugugaccugcug

SEQ ID NO: 1340485 - RNA, 19 nt, Human
uguagcugugaccugcuga

SEQ ID NO: 1340486 - RNA, 20 nt, Human
uguagcugugaccugcugag

SEQ ID NO: 1340487 - RNA, 21 nt, Human
uguagcugugaccugcugagc

SEQ ID NO: 1340488 - RNA, 13 nt, Human
uguaguucaugua

SEQ ID NO: 1340489 - RNA, 14 nt, Human
uguaguucauguaa

SEQ ID NO: 1340490 - RNA, 20 nt, Human
uguaguucauguaaauaaua

SEQ ID NO: 1340491 - RNA, 22 nt, Human
uguaguuccacuuauagccucu

SEQ ID NO: 1340492 - RNA, 14 nt, Human
uguagcauccugga

SEQ ID NO: 1340493 - RNA, 16 nt, Human
uguagcauccuggaau

SEQ ID NO: 1340494 - RNA, 18 nt, Human
uguagauugauuguauug

SEQ ID NO: 1340495 - RNA, 22 nt, Human
uguagauugauuguauuguuga

SEQ ID NO: 1340496 - RNA, 17 nt, Human
uguagcauccuggaaua

SEQ ID NO: 1340497 - RNA, 18 nt, Human
uguagcauccuggaauau

SEQ ID NO: 1340498 - RNA, 13 nt, Human
uguagccacacca

SEQ ID NO: 1340499 - RNA, 16 nt, Human
uguacuguucuguguc

SEQ ID NO: 1340500 - RNA, 19 nt, Human
uguacuguucugugucuuu

SEQ ID NO: 1340501 - RNA, 16 nt, Human
uguagauucagguaau

SEQ ID NO: 1340502 - RNA, 14 nt, Human
uguagauugauugu

SEQ ID NO: 1340503 - RNA, 21 nt, Human
uguacggauuuucaguuacuu

SEQ ID NO: 1340504 - RNA, 18 nt, Human
uguacggauuuucaguua

SEQ ID NO: 1340505 - RNA, 12 nt, Human
uguacugccugc

SEQ ID NO: 1340506 - RNA, 13 nt, Human
uguacugccugcu

SEQ ID NO: 1340507 - RNA, 15 nt, Human
uguacugccugcuug

SEQ ID NO: 1340508 - RNA, 14 nt, Human
uguacugccugcuu

SEQ ID NO: 1340509 - RNA, 15 nt, Human
uguacuguucugugu

SEQ ID NO: 1340510 - RNA, 22 nt, Human
uguaccuuuugaggagccccag

SEQ ID NO: 1340511 - RNA, 22 nt, Human
uguaccgcgucuacccugggau

SEQ ID NO: 1340512 - RNA, 21 nt, Human
uguaccuuuugaggagcccca

SEQ ID NO: 1340513 - RNA, 21 nt, Human
uguaaucuugaauuguaacug

SEQ ID NO: 1340514 - RNA, 20 nt, Human
uguaaugucuugagcucuau

SEQ ID NO: 1340515 - RNA, 15 nt, Human
uguaaugucuugagc

SEQ ID NO: 1340516 - RNA, 19 nt, Human
uguaaugucuugagcucua

SEQ ID NO: 1340517 - RNA, 14 nt, Human
uguaauguuaauau

SEQ ID NO: 1340518 - RNA, 15 nt, Human
uguaauguuaauauu

SEQ ID NO: 1340519 - RNA, 18 nt, Human
uguaauguuaauauugau

SEQ ID NO: 1340520 - RNA, 17 nt, Human
uguaauguuaauauuga

SEQ ID NO: 1340521 - RNA, 20 nt, Human
uguaaucuuauuuaggaagu

SEQ ID NO: 1340522 - RNA, 15 nt, Human
uguaaucuugaauug

SEQ ID NO: 1340523 - RNA, 14 nt, Human
uguaaucacagcua

SEQ ID NO: 1340524 - RNA, 20 nt, Human
uguaaucaauguuucuucua

SEQ ID NO: 1340525 - RNA, 16 nt, Human
uguaauccgaaucucu

SEQ ID NO: 1340526 - RNA, 20 nt, Human
uguaauagggaaaauucuaa

SEQ ID NO: 1340527 - RNA, 17 nt, Human
uguaauauuucuucaaa

SEQ ID NO: 1340528 - RNA, 14 nt, Human
uguaaucaauguuu

SEQ ID NO: 1340529 - RNA, 17 nt, Human
uggucacaggaaguaga

SEQ ID NO: 1340530 - RNA, 15 nt, Human
uggucacagcggagg

SEQ ID NO: 1340531 - RNA, 21 nt, Human
uggucacagcggaggugugga

SEQ ID NO: 1340532 - RNA, 14 nt, Human
uggucacacacuga

SEQ ID NO: 1340533 - RNA, 15 nt, Human
uggucacacacugau

SEQ ID NO: 1340534 - RNA, 16 nt, Human
uggucacacacugaug

SEQ ID NO: 1340535 - RNA, 13 nt, Human
uggucacagcugu

SEQ ID NO: 1340536 - RNA, 14 nt, Human
uggucacagcugua

SEQ ID NO: 1340537 - RNA, 13 nt, Human
uguaauaaacuuu

SEQ ID NO: 1340538 - RNA, 15 nt, Human
uguaauaaacuuuaa

SEQ ID NO: 1340539 - RNA, 17 nt, Human
uguaauaaacuuuaaua

SEQ ID NO: 1340540 - RNA, 18 nt, Human
uguaauagauguuugaua

SEQ ID NO: 1340541 - RNA, 22 nt, Human
uguaccguaggcuuuguauuca

SEQ ID NO: 1340542 - RNA, 18 nt, Human
uguaccgcgucuacccug

SEQ ID NO: 1340543 - RNA, 19 nt, Human
uguaccgcgucuacccugg

SEQ ID NO: 1340544 - RNA, 20 nt, Human
uguaccgcgucuacccuggg

SEQ ID NO: 1340545 - RNA, 21 nt, Human
uguaccgcgucuacccuggga

SEQ ID NO: 1340546 - RNA, 16 nt, Human
uguaccgcaaugugac

SEQ ID NO: 1340547 - RNA, 21 nt, Human
uguacaguuaucuaaguuaau

SEQ ID NO: 1340548 - RNA, 22 nt, Human
uguacaguuaucuaaguuaauu

SEQ ID NO: 1340549 - RNA, 14 nt, Human
uguacagugucuuu

SEQ ID NO: 1340550 - RNA, 15 nt, Human
uguacagugucuuuu

SEQ ID NO: 1340551 - RNA, 22 nt, Human
uguacagugucuuuuuuuguau

SEQ ID NO: 1340552 - RNA, 23 nt, Human
uguacagugucuuuuuuuguaua

SEQ ID NO: 1340553 - RNA, 12 nt, Human
uguacaguguua

SEQ ID NO: 1340554 - RNA, 13 nt, Human
uguacaguguuac

SEQ ID NO: 1340555 - RNA, 14 nt, Human
uguacaguguuacc

SEQ ID NO: 1340556 - RNA, 17 nt, Human
uguacaguuaucuaagu

SEQ ID NO: 1340557 - RNA, 18 nt, Human
uguacaguuaucuaaguu

SEQ ID NO: 1340558 - RNA, 14 nt, Human
uguaauuaaaagca

SEQ ID NO: 1340559 - RNA, 16 nt, Human
uguaauuaaaagcaaa

SEQ ID NO: 1340560 - RNA, 20 nt, Human
uguaauuaaaagcaaaucau

SEQ ID NO: 1340561 - RNA, 16 nt, Human
uguacaaggacagccc

SEQ ID NO: 1340562 - RNA, 20 nt, Human
uguacaaggacagccccucc

SEQ ID NO: 1340563 - RNA, 23 nt, Human
uguacaaggacagccccuccucc

SEQ ID NO: 1340564 - RNA, 19 nt, Human
uguaauuaaaagcaaauca

SEQ ID NO: 1340565 - RNA, 15 nt, Human
uguacacaacucacu

SEQ ID NO: 1340566 - RNA, 21 nt, Human
uguacacaacucacuccuuuu

SEQ ID NO: 1340567 - RNA, 12 nt, Human
uguacacaguca

SEQ ID NO: 1340568 - RNA, 22 nt, Human
ugucacccagguuggagugcag

SEQ ID NO: 1340569 - RNA, 15 nt, Human
ugucaccagaucuga

SEQ ID NO: 1340570 - RNA, 23 nt, Human
ugucaccaauguacccaccgggc

SEQ ID NO: 1340571 - RNA, 18 nt, Human
ugucaccacccugcucau

SEQ ID NO: 1340572 - RNA, 22 nt, Human
ugucaccacccugcucauccac

SEQ ID NO: 1340573 - RNA, 14 nt, Human
uguauuuuguauug

SEQ ID NO: 1340574 - RNA, 20 nt, Human
uguauuuauuuaguauuuau

SEQ ID NO: 1340575 - RNA, 22 nt, Human
uguauuuauugguuuugcagaa

SEQ ID NO: 1340576 - RNA, 23 nt, Human
uguauuguugaaaaaguuuguuu

SEQ ID NO: 1340577 - RNA, 22 nt, Human
uguauuguugaaaaaguuuguu

SEQ ID NO: 1340578 - RNA, 23 nt, Human
uguauuuccccaacauguaauaa

SEQ ID NO: 1340579 - RNA, 16 nt, Human
uguauuuuagcagaga

SEQ ID NO: 1340580 - RNA, 12 nt, Human
uguauuuuaugu

SEQ ID NO: 1340581 - RNA, 13 nt, Human
uguauuuuauguu

SEQ ID NO: 1340582 - RNA, 14 nt, Human
uguauuuuauguua

SEQ ID NO: 1340583 - RNA, 17 nt, Human
uguauuuuauguuauau

SEQ ID NO: 1340584 - RNA, 22 nt, Human
uguauaaaagggacugagaaau

SEQ ID NO: 1340585 - RNA, 20 nt, Human
uguaugaucaaauguuuaau

SEQ ID NO: 1340586 - RNA, 19 nt, Human
uguaugaucaaauguuuaa

SEQ ID NO: 1340587 - RNA, 18 nt, Human
uguaugaucaaauguuua

SEQ ID NO: 1340588 - RNA, 16 nt, Human
uguaugaucaaauguu

SEQ ID NO: 1340589 - RNA, 15 nt, Human
uguaugaucaaaugu

SEQ ID NO: 1340590 - RNA, 14 nt, Human
uguaugaucaaaug

SEQ ID NO: 1340591 - RNA, 13 nt, Human
uguaugaucaaau

SEQ ID NO: 1340592 - RNA, 13 nt, Human
uguauaaaagugu

SEQ ID NO: 1340593 - RNA, 12 nt, Human
uguaugaucaaa

SEQ ID NO: 1340594 - RNA, 15 nt, Human
uguaugauucccagc

SEQ ID NO: 1340595 - RNA, 23 nt, Human
uguaugaucaaauguuuaaucau

SEQ ID NO: 1340596 - RNA, 12 nt, Human
uguaugauuacu

SEQ ID NO: 1340597 - RNA, 13 nt, Human
uguaugauuacug

SEQ ID NO: 1340598 - RNA, 13 nt, Human
uguaguucuaaga

SEQ ID NO: 1340599 - RNA, 15 nt, Human
uguaguucuaagacu

SEQ ID NO: 1340600 - RNA, 20 nt, Human
uguaguucugcuccagacag

SEQ ID NO: 1340601 - RNA, 19 nt, Human
uguaguuuuuauauguugu

SEQ ID NO: 1340602 - RNA, 20 nt, Human
uguaguuuuuauauguugua

SEQ ID NO: 1340603 - RNA, 14 nt, Human
uguauaaaaauaaa

SEQ ID NO: 1340604 - RNA, 22 nt, Human
uguauaaaaauaaaaaagaucc

SEQ ID NO: 1340605 - RNA, 15 nt, Human
uguauugugcaaugu

SEQ ID NO: 1340606 - RNA, 21 nt, Human
uguauuguauauuacaaugau

SEQ ID NO: 1340607 - RNA, 18 nt, Human
uguauugugcaaugugua

SEQ ID NO: 1340608 - RNA, 19 nt, Human
uguauugugcaauguguau

SEQ ID NO: 1340609 - RNA, 20 nt, Human
uguauugugcaauguguaua

SEQ ID NO: 1340610 - RNA, 18 nt, Human
uguauuguugaaaaaguu

SEQ ID NO: 1340611 - RNA, 20 nt, Human
uguauuguugaaaaaguuug

SEQ ID NO: 1340612 - RNA, 16 nt, Human
uguaugauucccagcc

SEQ ID NO: 1340613 - RNA, 22 nt, Human
uguaugauuacuggccuuuuuc

SEQ ID NO: 1340614 - RNA, 13 nt, Human
uguauucucugag

SEQ ID NO: 1340615 - RNA, 14 nt, Human
uguauucucugagc

SEQ ID NO: 1340616 - RNA, 19 nt, Human
uguauucucugagcugugc

SEQ ID NO: 1340617 - RNA, 20 nt, Human
uguauucucugagcugugca

SEQ ID NO: 1340618 - RNA, 21 nt, Human
uguauucucugagcugugcag

SEQ ID NO: 1340619 - RNA, 23 nt, Human
ugucccacccccacccccagcuc

SEQ ID NO: 1340620 - RNA, 18 nt, Human
uguccaugcgcucagggc

SEQ ID NO: 1340621 - RNA, 17 nt, Human
ugucccacccccacccc

SEQ ID NO: 1340622 - RNA, 18 nt, Human
ugucccacccccaccccc

SEQ ID NO: 1340623 - RNA, 22 nt, Human
ugucccacccccacccccagcu

SEQ ID NO: 1340624 - RNA, 12 nt, Human
uguccccagcag

SEQ ID NO: 1340625 - RNA, 14 nt, Human
uguccccccacucc

SEQ ID NO: 1340626 - RNA, 15 nt, Human
uguccccccacuccc

SEQ ID NO: 1340627 - RNA, 19 nt, Human
uguccccccacucccucac

SEQ ID NO: 1340628 - RNA, 18 nt, Human
ugucccccucuguccagg

SEQ ID NO: 1340629 - RNA, 21 nt, Human
uguccucagccccgcguggaa

SEQ ID NO: 1340630 - RNA, 21 nt, Human
ugucccccuuuagaucucuga

SEQ ID NO: 1340631 - RNA, 22 nt, Human
ugucccccuuuagaucucugaa

SEQ ID NO: 1340632 - RNA, 14 nt, Human
uguccuagcacaga

SEQ ID NO: 1340633 - RNA, 15 nt, Human
uguccuagcacagau

SEQ ID NO: 1340634 - RNA, 12 nt, Human
uguccucagccu

SEQ ID NO: 1340635 - RNA, 13 nt, Human
uguccucagccuu

SEQ ID NO: 1340636 - RNA, 16 nt, Human
uguccucagccuugcc

SEQ ID NO: 1340637 - RNA, 23 nt, Human
ugucauuguuauauaaucauuau

SEQ ID NO: 1340638 - RNA, 15 nt, Human
ugucauuucagaagu

SEQ ID NO: 1340639 - RNA, 16 nt, Human
ugucauuucagaaguu

SEQ ID NO: 1340640 - RNA, 14 nt, Human
ugucauuucauuuc

SEQ ID NO: 1340641 - RNA, 16 nt, Human
ugucauuucauuuccu

SEQ ID NO: 1340642 - RNA, 17 nt, Human
ugucauuucauuuccua

SEQ ID NO: 1340643 - RNA, 16 nt, Human
ugucccaacuuguaaa

SEQ ID NO: 1340644 - RNA, 20 nt, Human
uguccaugcgcucagggcca

SEQ ID NO: 1340645 - RNA, 18 nt, Human
uguccaucagaugacaag

SEQ ID NO: 1340646 - RNA, 17 nt, Human
uguccaucagaugacaa

SEQ ID NO: 1340647 - RNA, 16 nt, Human
uguccaucagaugaca

SEQ ID NO: 1340648 - RNA, 14 nt, Human
uguccaucagauga

SEQ ID NO: 1340649 - RNA, 14 nt, Human
ugucacgccagacu

SEQ ID NO: 1340650 - RNA, 13 nt, Human
ugucaucugugca

SEQ ID NO: 1340651 - RNA, 14 nt, Human
ugucaccugugcuu

SEQ ID NO: 1340652 - RNA, 13 nt, Human
ugucaugcugccu

SEQ ID NO: 1340653 - RNA, 14 nt, Human
ugucaugcugccuu

SEQ ID NO: 1340654 - RNA, 15 nt, Human
ugucaugcugccuua

SEQ ID NO: 1340655 - RNA, 16 nt, Human
ugucaugcugggauuu

SEQ ID NO: 1340656 - RNA, 20 nt, Human
ugucaugcugggauuuccaa

SEQ ID NO: 1340657 - RNA, 15 nt, Human
ugucauguguauaaa

SEQ ID NO: 1340658 - RNA, 11 nt, Human
ugucaugugua

SEQ ID NO: 1340659 - RNA, 13 nt, Human
ugucauguguaua

SEQ ID NO: 1340660 - RNA, 14 nt, Human
ugucauguguauaa

SEQ ID NO: 1340661 - RNA, 20 nt, Human
ugucauuuaguucagcaucc

SEQ ID NO: 1340662 - RNA, 21 nt, Human
uggggaaaggggucggcugac

SEQ ID NO: 1340663 - RNA, 22 nt, Human
uggggaaaggggucggcugacc

SEQ ID NO: 1340664 - RNA, 23 nt, Human
uggggaaaggggucggcugacca

SEQ ID NO: 1340665 - RNA, 13 nt, Human
uggggaagacagu

SEQ ID NO: 1340666 - RNA, 14 nt, Human
uggggaagacagug

SEQ ID NO: 1340667 - RNA, 17 nt, Human
uggggaagacaguggcc

SEQ ID NO: 1340668 - RNA, 13 nt, Human
ugggggcugcagu

SEQ ID NO: 1340669 - RNA, 17 nt, Human
ugggggcugaggagcag

SEQ ID NO: 1340670 - RNA, 12 nt, Human
ugggcagcaauu

SEQ ID NO: 1340671 - RNA, 17 nt, Human
ugggcagauuuucagca

SEQ ID NO: 1340672 - RNA, 20 nt, Human
ugggcgugagaccugccccu

SEQ ID NO: 1340673 - RNA, 23 nt, Human
ugggcagaggaccaggcuguagg

SEQ ID NO: 1340674 - RNA, 15 nt, Human
ugggcagauuuucag

SEQ ID NO: 1340675 - RNA, 13 nt, Human
ugggcuuauaucu

SEQ ID NO: 1340676 - RNA, 20 nt, Human
ugggcuuauaucuggccucu

SEQ ID NO: 1340677 - RNA, 21 nt, Human
ugggcuuauaucuggccucug

SEQ ID NO: 1340678 - RNA, 22 nt, Human
ugggcuuauaucuggccucugc

SEQ ID NO: 1340679 - RNA, 14 nt, Human
ugggcugguaucuc

SEQ ID NO: 1340680 - RNA, 18 nt, Human
ugggcugguaucucagaa

SEQ ID NO: 1340681 - RNA, 20 nt, Human
ugggcugguaucucagaaag

SEQ ID NO: 1340682 - RNA, 21 nt, Human
ugggcugguaucucagaaagu

SEQ ID NO: 1340683 - RNA, 23 nt, Human
ugggcugguaucucagaaagugc

SEQ ID NO: 1340684 - RNA, 14 nt, Human
ugggcuucagcugc

SEQ ID NO: 1340685 - RNA, 18 nt, Human
ugggcuucagcugccagu

SEQ ID NO: 1340686 - RNA, 17 nt, Human
ugggcuucagcugccag

SEQ ID NO: 1340687 - RNA, 18 nt, Human
ugggcuuguggggccugg

SEQ ID NO: 1340688 - RNA, 19 nt, Human
ugggcuuguggggccuggg

SEQ ID NO: 1340689 - RNA, 20 nt, Human
ugggcuuguggggccuggga

SEQ ID NO: 1340690 - RNA, 22 nt, Human
ugggcuuguggggccugggagg

SEQ ID NO: 1340691 - RNA, 16 nt, Human
uggggaaacagcaucu

SEQ ID NO: 1340692 - RNA, 18 nt, Human
uggggaaacagcaucucc

SEQ ID NO: 1340693 - RNA, 16 nt, Human
uggggaaacuggccau

SEQ ID NO: 1340694 - RNA, 18 nt, Human
uggggaaacuggccaugg

SEQ ID NO: 1340695 - RNA, 21 nt, Human
uggguuagggaaaacauucca

SEQ ID NO: 1340696 - RNA, 19 nt, Human
uggguuagggaaaacauuc

SEQ ID NO: 1340697 - RNA, 18 nt, Human
uggguuagggaaaacauu

SEQ ID NO: 1340698 - RNA, 16 nt, Human
uggguuagggaaaaca

SEQ ID NO: 1340699 - RNA, 14 nt, Human
uggguuaaguauua

SEQ ID NO: 1340700 - RNA, 15 nt, Human
uggguuagaccuaca

SEQ ID NO: 1340701 - RNA, 22 nt, Human
uggguguuaucaccuagcugaa

SEQ ID NO: 1340702 - RNA, 14 nt, Human
uggguguuaauuuu

SEQ ID NO: 1340703 - RNA, 14 nt, Human
uggguuaguggaug

SEQ ID NO: 1340704 - RNA, 14 nt, Human
uggguucugccugc

SEQ ID NO: 1340705 - RNA, 15 nt, Human
ugggggugagggucc

SEQ ID NO: 1340706 - RNA, 14 nt, Human
ugggggugccagga

SEQ ID NO: 1340707 - RNA, 23 nt, Human
uggguaaaauacuuuuacucugc

SEQ ID NO: 1340708 - RNA, 15 nt, Human
uggguaaaauacuuu

SEQ ID NO: 1340709 - RNA, 16 nt, Human
uggguaaaauacuuuu

SEQ ID NO: 1340710 - RNA, 13 nt, Human
ugggugguacccu

SEQ ID NO: 1340711 - RNA, 14 nt, Human
ugggugguacccuc

SEQ ID NO: 1340712 - RNA, 18 nt, Human
ugggugguacccucugga

SEQ ID NO: 1340713 - RNA, 22 nt, Human
ugggugguacccucuggagggg

SEQ ID NO: 1340714 - RNA, 23 nt, Human
ugguaugaacuugaggacacaug

SEQ ID NO: 1340715 - RNA, 22 nt, Human
ugguaugaacuugaggacacau

SEQ ID NO: 1340716 - RNA, 21 nt, Human
ugguaugaacuugaggacaca

SEQ ID NO: 1340717 - RNA, 19 nt, Human
ugguaugaacuugaggaca

SEQ ID NO: 1340718 - RNA, 22 nt, Human
ugguauauccaaaagcuuuuua

SEQ ID NO: 1340719 - RNA, 13 nt, Human
ugguaucucagaa

SEQ ID NO: 1340720 - RNA, 22 nt, Human
ugguaucucagaaagugccuga

SEQ ID NO: 1340721 - RNA, 16 nt, Human
ugguaucucagaaagu

SEQ ID NO: 1340722 - RNA, 16 nt, Human
uggguucugccugcca

SEQ ID NO: 1340723 - RNA, 19 nt, Human
uggguucugccugccagcu

SEQ ID NO: 1340724 - RNA, 17 nt, Human
uggguuugguguauggu

SEQ ID NO: 1340725 - RNA, 15 nt, Human
ugguaguuuuuucau

SEQ ID NO: 1340726 - RNA, 16 nt, Human
ugguaguuuuuucauc

SEQ ID NO: 1340727 - RNA, 17 nt, Human
ugguaguuuuuucaucu

SEQ ID NO: 1340728 - RNA, 18 nt, Human
ugguaguuuuuucaucuu

SEQ ID NO: 1340729 - RNA, 16 nt, Human
ugguauauccaaaagc

SEQ ID NO: 1340730 - RNA, 19 nt, Human
ugguauauccaaaagcuuu

SEQ ID NO: 1340731 - RNA, 22 nt, Human
uggccccacccucguggacacc

SEQ ID NO: 1340732 - RNA, 13 nt, Human
uggccccacccug

SEQ ID NO: 1340733 - RNA, 15 nt, Human
uggccccacccuggg

SEQ ID NO: 1340734 - RNA, 16 nt, Human
uggccccacccugggc

SEQ ID NO: 1340735 - RNA, 18 nt, Human
uggccccacccugggccc

SEQ ID NO: 1340736 - RNA, 14 nt, Human
uggcccagggccca

SEQ ID NO: 1340737 - RNA, 15 nt, Human
uggcccagggcccag

SEQ ID NO: 1340738 - RNA, 16 nt, Human
uggcccagggcccaga

SEQ ID NO: 1340739 - RNA, 22 nt, Human
uggccccacccugggcccuggg

SEQ ID NO: 1340740 - RNA, 12 nt, Human
uggccccagcac

SEQ ID NO: 1340741 - RNA, 13 nt, Human
uggcucuccuggc

SEQ ID NO: 1340742 - RNA, 17 nt, Human
uggcucuccuggcccug

SEQ ID NO: 1340743 - RNA, 14 nt, Human
uggcucuccuggcc

SEQ ID NO: 1340744 - RNA, 19 nt, Human
uggcucugagcgccuccau

SEQ ID NO: 1340745 - RNA, 20 nt, Human
uggcucugaggugccugucc

SEQ ID NO: 1340746 - RNA, 21 nt, Human
uggcucugaggugccuguccc

SEQ ID NO: 1340747 - RNA, 14 nt, Human
uggcuggacaaacu

SEQ ID NO: 1340748 - RNA, 13 nt, Human
uggcuggacccag

SEQ ID NO: 1340749 - RNA, 14 nt, Human
uggcuggacccagc

SEQ ID NO: 1340750 - RNA, 15 nt, Human
uggcuggacccagcc

SEQ ID NO: 1340751 - RNA, 16 nt, Human
uggcuggacccagcca

SEQ ID NO: 1340752 - RNA, 21 nt, Human
uggcuggacccagccaggccc

SEQ ID NO: 1340753 - RNA, 22 nt, Human
uggcuggacccagccaggccca

SEQ ID NO: 1340754 - RNA, 23 nt, Human
uggcuggacccagccaggcccag

SEQ ID NO: 1340755 - RNA, 14 nt, Human
uggcuggucaacuu

SEQ ID NO: 1340756 - RNA, 13 nt, Human
uggcugguccagg

SEQ ID NO: 1340757 - RNA, 15 nt, Human
uggcugguccagggc

SEQ ID NO: 1340758 - RNA, 16 nt, Human
uggcugguccagggcu

SEQ ID NO: 1340759 - RNA, 19 nt, Human
uggcuggaagauccugcgg

SEQ ID NO: 1340760 - RNA, 20 nt, Human
uggcuggaagauccugcggg

SEQ ID NO: 1340761 - RNA, 21 nt, Human
uggcuggaagauccugcgggu

SEQ ID NO: 1340762 - RNA, 22 nt, Human
uggcucugaggugccuguccca

SEQ ID NO: 1340763 - RNA, 12 nt, Human
uggcucugccag

SEQ ID NO: 1340764 - RNA, 13 nt, Human
uggcucugccagu

SEQ ID NO: 1340765 - RNA, 17 nt, Human
uggcucugccaguccug

SEQ ID NO: 1340766 - RNA, 19 nt, Human
uggcucugccaguccuguc

SEQ ID NO: 1340767 - RNA, 16 nt, Human
uggcuuccuggcaaua

SEQ ID NO: 1340768 - RNA, 18 nt, Human
uggcugguguuaacagaa

SEQ ID NO: 1340769 - RNA, 22 nt, Human
uggcuggucaacuugagcaugu

SEQ ID NO: 1340770 - RNA, 11 nt, Human
uggcuggugug

SEQ ID NO: 1340771 - RNA, 13 nt, Human
uggcugguguggu

SEQ ID NO: 1340772 - RNA, 17 nt, Human
uggcuggugugguacag

SEQ ID NO: 1340773 - RNA, 19 nt, Human
uggcuggugugguacagag

SEQ ID NO: 1340774 - RNA, 20 nt, Human
uggcuggugugguacagaga

SEQ ID NO: 1340775 - RNA, 21 nt, Human
uggcuggugugguacagagaa

SEQ ID NO: 1340776 - RNA, 22 nt, Human
uggcuggugugguacagagaag

SEQ ID NO: 1340777 - RNA, 23 nt, Human
uggcuggugugguacagagaagc

SEQ ID NO: 1340778 - RNA, 12 nt, Human
uggcugguguua

SEQ ID NO: 1340779 - RNA, 15 nt, Human
uggcugguguuaaca

SEQ ID NO: 1340780 - RNA, 16 nt, Human
uggcugguguuaacag

SEQ ID NO: 1340781 - RNA, 19 nt, Human
uggcugguguuaacagaag

SEQ ID NO: 1340782 - RNA, 13 nt, Human
uggcuucuggcca

SEQ ID NO: 1340783 - RNA, 15 nt, Human
uggcuucuggccagg

SEQ ID NO: 1340784 - RNA, 16 nt, Human
uggcuucuggccagga

SEQ ID NO: 1340785 - RNA, 17 nt, Human
uggcuucuggccaggaa

SEQ ID NO: 1340786 - RNA, 18 nt, Human
uggcuucuggccaggaag

SEQ ID NO: 1340787 - RNA, 19 nt, Human
uggcuucuggccaggaagc

SEQ ID NO: 1340788 - RNA, 21 nt, Human
uggcuucuggccaggaagcuu

SEQ ID NO: 1340789 - RNA, 15 nt, Human
uggcuugagaaauau

SEQ ID NO: 1340790 - RNA, 21 nt, Human
uggcuugaguuuaaauuguaa

SEQ ID NO: 1340791 - RNA, 17 nt, Human
uggcuuuaggagcagug

SEQ ID NO: 1340792 - RNA, 20 nt, Human
uggcuuuaggagcaguggga

SEQ ID NO: 1340793 - RNA, 15 nt, Human
uggcuuucagagccu

SEQ ID NO: 1340794 - RNA, 17 nt, Human
uggcuuucagagccucc

SEQ ID NO: 1340795 - RNA, 11 nt, Human
uggcuuucagg

SEQ ID NO: 1340796 - RNA, 14 nt, Human
uggcuuucagggag

SEQ ID NO: 1340797 - RNA, 21 nt, Human
uggcuuucauuuucucucagg

SEQ ID NO: 1340798 - RNA, 16 nt, Human
uggcuuugaugauaaa

SEQ ID NO: 1340799 - RNA, 13 nt, Human
uggcuuuggaagc

SEQ ID NO: 1340800 - RNA, 21 nt, Human
uggcuuuggucucuugcuugu

SEQ ID NO: 1340801 - RNA, 23 nt, Human
ugggagauucaagggacccauga

SEQ ID NO: 1340802 - RNA, 18 nt, Human
ugggagcaaacugcaugc

SEQ ID NO: 1340803 - RNA, 20 nt, Human
ugggagcugaggccacacuc

SEQ ID NO: 1340804 - RNA, 22 nt, Human
ugggagcugaggccacacucag

SEQ ID NO: 1340805 - RNA, 16 nt, Human
ugggacguggcucagc

SEQ ID NO: 1340806 - RNA, 20 nt, Human
ugggacguggcucagccagc

SEQ ID NO: 1340807 - RNA, 14 nt, Human
ugggagaggcagcc

SEQ ID NO: 1340808 - RNA, 15 nt, Human
ugggagaggcagccc

SEQ ID NO: 1340809 - RNA, 18 nt, Human
ugggagaggcagcccagg

SEQ ID NO: 1340810 - RNA, 22 nt, Human
ugggagaggcagcccaggaagu

SEQ ID NO: 1340811 - RNA, 12 nt, Human
ugggagagggcg

SEQ ID NO: 1340812 - RNA, 13 nt, Human
ugggagagggcgc

SEQ ID NO: 1340813 - RNA, 14 nt, Human
ugggagagggcgca

SEQ ID NO: 1340814 - RNA, 15 nt, Human
ugggagagggcgcag

SEQ ID NO: 1340815 - RNA, 20 nt, Human
ugggagagggcgcaggccgu

SEQ ID NO: 1340816 - RNA, 15 nt, Human
ugggaccgcuacacc

SEQ ID NO: 1340817 - RNA, 20 nt, Human
ugggaccgcuacaccacucu

SEQ ID NO: 1340818 - RNA, 21 nt, Human
ugggaccgcuacaccacucug

SEQ ID NO: 1340819 - RNA, 16 nt, Human
ugggaccuagggaggc

SEQ ID NO: 1340820 - RNA, 22 nt, Human
ugggaccgcuacaccacucugg

SEQ ID NO: 1340821 - RNA, 23 nt, Human
ugggaccucaguuuuaucauuuu

SEQ ID NO: 1340822 - RNA, 23 nt, Human
ugggacgggaugguucuggcugu

SEQ ID NO: 1340823 - RNA, 14 nt, Human
ugggacggugccca

SEQ ID NO: 1340824 - RNA, 23 nt, Human
ugggacggugcccaagccagagg

SEQ ID NO: 1340825 - RNA, 15 nt, Human
ugggacguggcucag

SEQ ID NO: 1340826 - RNA, 14 nt, Human
uggcuuuggucucu

SEQ ID NO: 1340827 - RNA, 20 nt, Human
uggcuuuugcgguucaggaa

SEQ ID NO: 1340828 - RNA, 15 nt, Human
ugggacaacugcucc

SEQ ID NO: 1340829 - RNA, 21 nt, Human
ugggacaccccgacuuuuguu

SEQ ID NO: 1340830 - RNA, 22 nt, Human
ugggacaauuagauaaaugucc

SEQ ID NO: 1340831 - RNA, 12 nt, Human
ugggacaauuag

SEQ ID NO: 1340832 - RNA, 20 nt, Human
ugggauuaugggucacagga

SEQ ID NO: 1340833 - RNA, 20 nt, Human
ugggauucaggaaaaggccu

SEQ ID NO: 1340834 - RNA, 21 nt, Human
ugggauucaggaaaaggccug

SEQ ID NO: 1340835 - RNA, 22 nt, Human
ugggauucaggaaaaggccugg

SEQ ID NO: 1340836 - RNA, 18 nt, Human
ugggcagagcuggcucug

SEQ ID NO: 1340837 - RNA, 20 nt, Human
ugggcagagcuggcucugag

SEQ ID NO: 1340838 - RNA, 17 nt, Human
ugggauuacagguguga

SEQ ID NO: 1340839 - RNA, 15 nt, Human
ugggauuauggguca

SEQ ID NO: 1340840 - RNA, 18 nt, Human
ugggauuaugggucacag

SEQ ID NO: 1340841 - RNA, 19 nt, Human
ugggauuaugggucacagg

SEQ ID NO: 1340842 - RNA, 21 nt, Human
ugggauuaugggucacaggaa

SEQ ID NO: 1340843 - RNA, 19 nt, Human
ugggagcaaacugcaugcc

SEQ ID NO: 1340844 - RNA, 16 nt, Human
ugggagcugccaagag

SEQ ID NO: 1340845 - RNA, 23 nt, Human
ugggagucacacaguguuggagg

SEQ ID NO: 1340846 - RNA, 15 nt, Human
ugggagucacacagu

SEQ ID NO: 1340847 - RNA, 19 nt, Human
uggaaccagacucuugccu

SEQ ID NO: 1340848 - RNA, 18 nt, Human
uggaacucgugucuggca

SEQ ID NO: 1340849 - RNA, 13 nt, Human
uggaaccagacuc

SEQ ID NO: 1340850 - RNA, 17 nt, Human
uggaacuacauuacugu

SEQ ID NO: 1340851 - RNA, 23 nt, Human
uggaacuacauuaguacacagca

SEQ ID NO: 1340852 - RNA, 18 nt, Human
uggaacuagguuuuaaua

SEQ ID NO: 1340853 - RNA, 20 nt, Human
uggaacuagguuuuaauaau

SEQ ID NO: 1340854 - RNA, 16 nt, Human
uggaauaucuccguca

SEQ ID NO: 1340855 - RNA, 14 nt, Human
uggaauauaauugu

SEQ ID NO: 1340856 - RNA, 22 nt, Human
uggaauaauccuaaacauauga

SEQ ID NO: 1340857 - RNA, 15 nt, Human
uggaauaaguucaaa

SEQ ID NO: 1340858 - RNA, 12 nt, Human
uggacagcccca

SEQ ID NO: 1340859 - RNA, 14 nt, Human
uggacagccccacc

SEQ ID NO: 1340860 - RNA, 20 nt, Human
uggacauccuccucccaccc

SEQ ID NO: 1340861 - RNA, 23 nt, Human
uggacauccuccucccacccggc

SEQ ID NO: 1340862 - RNA, 18 nt, Human
uggacaugaagauucuuu

SEQ ID NO: 1340863 - RNA, 21 nt, Human
uggacaugaagauucuuuccc

SEQ ID NO: 1340864 - RNA, 22 nt, Human
uggacaugaagauucuuuccca

SEQ ID NO: 1340865 - RNA, 18 nt, Human
uggacucaccucccccau

SEQ ID NO: 1340866 - RNA, 20 nt, Human
uggacucaccucccccaucu

SEQ ID NO: 1340867 - RNA, 22 nt, Human
uggacuaucugucugguggccc

SEQ ID NO: 1340868 - RNA, 23 nt, Human
uggacuaucugucugguggcccc

SEQ ID NO: 1340869 - RNA, 22 nt, Human
uggacuauggagugcaccaaag

SEQ ID NO: 1340870 - RNA, 14 nt, Human
uggacuaucugucu

SEQ ID NO: 1340871 - RNA, 15 nt, Human
uggacuaucugucug

SEQ ID NO: 1340872 - RNA, 17 nt, Human
uggacuaucugucuggu

SEQ ID NO: 1340873 - RNA, 20 nt, Human
uggacuaucugucugguggc

SEQ ID NO: 1340874 - RNA, 15 nt, Human
uggaauggauuuuuc

SEQ ID NO: 1340875 - RNA, 22 nt, Human
uggaauauaauuguuuuaucug

SEQ ID NO: 1340876 - RNA, 17 nt, Human
uggaaugaauuaaauaa

SEQ ID NO: 1340877 - RNA, 18 nt, Human
uggaaugaauuaaauaaa

SEQ ID NO: 1340878 - RNA, 17 nt, Human
uggaaugcccuucacug

SEQ ID NO: 1340879 - RNA, 17 nt, Human
uggaaacaagucaguca

SEQ ID NO: 1340880 - RNA, 17 nt, Human
uggaaacagcucgacuu

SEQ ID NO: 1340881 - RNA, 13 nt, Human
uggaaacaagaug

SEQ ID NO: 1340882 - RNA, 19 nt, Human
uggaaaacagaacacuuau

SEQ ID NO: 1340883 - RNA, 15 nt, Human
uggaaaauucauuuu

SEQ ID NO: 1340884 - RNA, 17 nt, Human
uggaaaacaaggaaguc

SEQ ID NO: 1340885 - RNA, 16 nt, Human
uggaaaacagaacacu

SEQ ID NO: 1340886 - RNA, 17 nt, Human
uggaaaacagaacacuu

SEQ ID NO: 1340887 - RNA, 18 nt, Human
uggaaaacagaacacuua

SEQ ID NO: 1340888 - RNA, 20 nt, Human
uggaaaacagaacacuuaug

SEQ ID NO: 1340889 - RNA, 23 nt, Human
uggaaacuucagcgguuuauaua

SEQ ID NO: 1340890 - RNA, 22 nt, Human
uggaaacagcucgacuuuaaaa

SEQ ID NO: 1340891 - RNA, 14 nt, Human
uggaaacuuuucuu

SEQ ID NO: 1340892 - RNA, 19 nt, Human
uggaaagacagcuucucau

SEQ ID NO: 1340893 - RNA, 14 nt, Human
uggaaagaguacuc

SEQ ID NO: 1340894 - RNA, 23 nt, Human
uggaaagacagcuucucauccug

SEQ ID NO: 1340895 - RNA, 22 nt, Human
uggaaacuuuucuuaaaaaguu

SEQ ID NO: 1340896 - RNA, 18 nt, Human
uggaaagauaacuaggaa

SEQ ID NO: 1340897 - RNA, 23 nt, Human
uggaaagauaacuaggaaaucca

SEQ ID NO: 1340898 - RNA, 12 nt, Human
uggaaagcaggu

SEQ ID NO: 1340899 - RNA, 14 nt, Human
uggaacauccuugg

SEQ ID NO: 1340900 - RNA, 13 nt, Human
uggaacauuggaa

SEQ ID NO: 1340901 - RNA, 17 nt, Human
uggaacauuggaauguu

SEQ ID NO: 1340902 - RNA, 20 nt, Human
uggaacauuggaauguucuc

SEQ ID NO: 1340903 - RNA, 12 nt, Human
uggaaccagacu

SEQ ID NO: 1340904 - RNA, 23 nt, Human
ugcuuugaaauugaaccuuugug

SEQ ID NO: 1340905 - RNA, 16 nt, Human
ugcuuugaaguagcuc

SEQ ID NO: 1340906 - RNA, 20 nt, Human
ugcuuugaaguagcucuuuu

SEQ ID NO: 1340907 - RNA, 14 nt, Human
ugcuuucuguucca

SEQ ID NO: 1340908 - RNA, 15 nt, Human
ugcuuucuguuccaa

SEQ ID NO: 1340909 - RNA, 16 nt, Human
ugcuuucuguuccaaa

SEQ ID NO: 1340910 - RNA, 17 nt, Human
ugcuuucuguuccaaau

SEQ ID NO: 1340911 - RNA, 22 nt, Human
ugcuuucuguuccaaauucagu

SEQ ID NO: 1340912 - RNA, 18 nt, Human
ugcuuucuuuguuuggcu

SEQ ID NO: 1340913 - RNA, 21 nt, Human
ugcuuugaaacagaaaaauau

SEQ ID NO: 1340914 - RNA, 16 nt, Human
ugcuuugaaacagaaa

SEQ ID NO: 1340915 - RNA, 17 nt, Human
ugcuggaauucuaacaa

SEQ ID NO: 1340916 - RNA, 14 nt, Human
ugcuggacugucau

SEQ ID NO: 1340917 - RNA, 15 nt, Human
ugcuggacugucaua

SEQ ID NO: 1340918 - RNA, 19 nt, Human
ugcuggacugucauagaaa

SEQ ID NO: 1340919 - RNA, 20 nt, Human
ugcuggagaggccccagccg

SEQ ID NO: 1340920 - RNA, 22 nt, Human
ugcuggagaggccccagccgcu

SEQ ID NO: 1340921 - RNA, 13 nt, Human
ugcuuuaauauaa

SEQ ID NO: 1340922 - RNA, 14 nt, Human
ugcuuuaauauaaa

SEQ ID NO: 1340923 - RNA, 18 nt, Human
ugcuuuaauauaaaugca

SEQ ID NO: 1340924 - RNA, 20 nt, Human
ugcuuuaauauaaaugcaaa

SEQ ID NO: 1340925 - RNA, 22 nt, Human
ugcuuuaauauaaaugcaaaua

SEQ ID NO: 1340926 - RNA, 21 nt, Human
ugcuuuaauauaaaugcaaau

SEQ ID NO: 1340927 - RNA, 15 nt, Human
uggcaggugcagccc

SEQ ID NO: 1340928 - RNA, 18 nt, Human
uggcaguccgugggacgg

SEQ ID NO: 1340929 - RNA, 18 nt, Human
uggcaguccuggaagcca

SEQ ID NO: 1340930 - RNA, 16 nt, Human
uggcagucugaauuuu

SEQ ID NO: 1340931 - RNA, 22 nt, Human
uggcagucugaauuuuuaaaac

SEQ ID NO: 1340932 - RNA, 15 nt, Human
uggcaggggacagga

SEQ ID NO: 1340933 - RNA, 18 nt, Human
uggcaggggacaggaguc

SEQ ID NO: 1340934 - RNA, 13 nt, Human
uggcagggggcug

SEQ ID NO: 1340935 - RNA, 15 nt, Human
uggcagggggcugcu

SEQ ID NO: 1340936 - RNA, 16 nt, Human
uggcagggggcugcug

SEQ ID NO: 1340937 - RNA, 17 nt, Human
uggcagggggcugcugc

SEQ ID NO: 1340938 - RNA, 18 nt, Human
uggcagggggcugcugcu

SEQ ID NO: 1340939 - RNA, 19 nt, Human
uggcagggggcugcugcug

SEQ ID NO: 1340940 - RNA, 21 nt, Human
uggcagggggcugcugcuggg

SEQ ID NO: 1340941 - RNA, 23 nt, Human
uggcagggggcugcugcugggcu

SEQ ID NO: 1340942 - RNA, 11 nt, Human
uggcagcuuuu

SEQ ID NO: 1340943 - RNA, 19 nt, Human
uggcaggaguuggaagugu

SEQ ID NO: 1340944 - RNA, 18 nt, Human
uggcagcuuuuaaaagau

SEQ ID NO: 1340945 - RNA, 12 nt, Human
uggcaggaaggc

SEQ ID NO: 1340946 - RNA, 17 nt, Human
uggcaggaaggcuuguu

SEQ ID NO: 1340947 - RNA, 15 nt, Human
uggcaggaaggcuug

SEQ ID NO: 1340948 - RNA, 22 nt, Human
uggcaacagaucuggaaccuca

SEQ ID NO: 1340949 - RNA, 16 nt, Human
uggcaccgaagcccag

SEQ ID NO: 1340950 - RNA, 17 nt, Human
uggcaccgaagcccaga

SEQ ID NO: 1340951 - RNA, 18 nt, Human
uggcaccgaagcccagag

SEQ ID NO: 1340952 - RNA, 24 nt, Human
uggcaccgaagcccagagggucug

SEQ ID NO: 1340953 - RNA, 20 nt, Human
uggcaccuaauccaggcaga

SEQ ID NO: 1340954 - RNA, 13 nt, Human
uggccagcagcac

SEQ ID NO: 1340955 - RNA, 15 nt, Human
uggccagcagcaccu

SEQ ID NO: 1340956 - RNA, 16 nt, Human
uggccagcagcaccug

SEQ ID NO: 1340957 - RNA, 18 nt, Human
uggccagcagcaccugcc

SEQ ID NO: 1340958 - RNA, 21 nt, Human
uggccagcagcaccugcccua

SEQ ID NO: 1340959 - RNA, 20 nt, Human
uggccagcagcaccugcccu

SEQ ID NO: 1340960 - RNA, 17 nt, Human
uggccacuccagacccc

SEQ ID NO: 1340961 - RNA, 20 nt, Human
uggccacuccagaccccugg

SEQ ID NO: 1340962 - RNA, 19 nt, Human
uggcagugggaaaaaugua

SEQ ID NO: 1340963 - RNA, 22 nt, Human
uggcagugggaaaaauguagga

SEQ ID NO: 1340964 - RNA, 23 nt, Human
uggcagugggaaaaauguaggag

SEQ ID NO: 1340965 - RNA, 11 nt, Human
uggccaggagg

SEQ ID NO: 1340966 - RNA, 16 nt, Human
uggccaggaggugcca

SEQ ID NO: 1340967 - RNA, 12 nt, Human
uggccaggaggu

SEQ ID NO: 1340968 - RNA, 13 nt, Human
uggccaggccggg

SEQ ID NO: 1340969 - RNA, 15 nt, Human
uggccaggccgggaa

SEQ ID NO: 1340970 - RNA, 22 nt, Human
uggccaggccgggaaaaagccc

SEQ ID NO: 1340971 - RNA, 11 nt, Human
uggagggaagc

SEQ ID NO: 1340972 - RNA, 22 nt, Human
uggagggacaaguggacucagg

SEQ ID NO: 1340973 - RNA, 17 nt, Human
uggaggaccugagccug

SEQ ID NO: 1340974 - RNA, 18 nt, Human
uggaggaccugagccugc

SEQ ID NO: 1340975 - RNA, 20 nt, Human
uggaggaccugagccugccg

SEQ ID NO: 1340976 - RNA, 19 nt, Human
uggaggaccugagccugcc

SEQ ID NO: 1340977 - RNA, 12 nt, Human
uggaggagccca

SEQ ID NO: 1340978 - RNA, 13 nt, Human
uggaggagcccag

SEQ ID NO: 1340979 - RNA, 14 nt, Human
uggaggagcccagg

SEQ ID NO: 1340980 - RNA, 19 nt, Human
uggaggagcccaggccagg

SEQ ID NO: 1340981 - RNA, 22 nt, Human
uggaggagcccaggccaggacu

SEQ ID NO: 1340982 - RNA, 23 nt, Human
uggaggagcccaggccaggacuc

SEQ ID NO: 1340983 - RNA, 18 nt, Human
uggaggaagagggacaga

SEQ ID NO: 1340984 - RNA, 16 nt, Human
uggaggaccugagccu

SEQ ID NO: 1340985 - RNA, 15 nt, Human
uggacuccucugucc

SEQ ID NO: 1340986 - RNA, 15 nt, Human
uggacuccugcacac

SEQ ID NO: 1340987 - RNA, 16 nt, Human
uggacucgccuguaau

SEQ ID NO: 1340988 - RNA, 14 nt, Human
uggacucuaaaguc

SEQ ID NO: 1340989 - RNA, 15 nt, Human
uggacucucagucuc

SEQ ID NO: 1340990 - RNA, 20 nt, Human
uggacucucagucucugagc

SEQ ID NO: 1340991 - RNA, 22 nt, Human
uggacucucagucucugagcag

SEQ ID NO: 1340992 - RNA, 16 nt, Human
uggauuuaguuucagu

SEQ ID NO: 1340993 - RNA, 15 nt, Human
uggauuuaguuucag

SEQ ID NO: 1340994 - RNA, 15 nt, Human
uggauuuccuaauac

SEQ ID NO: 1340995 - RNA, 21 nt, Human
uggauuuccuaauacugucau

SEQ ID NO: 1340996 - RNA, 15 nt, Human
uggauuucuuugaaa

SEQ ID NO: 1340997 - RNA, 19 nt, Human
uggauuucuuugaaaaaaa

SEQ ID NO: 1340998 - RNA, 21 nt, Human
uggauccacuggcuggacaaa

SEQ ID NO: 1340999 - RNA, 15 nt, Human
uggaucacucaccau

SEQ ID NO: 1341000 - RNA, 17 nt, Human
uggaucacucaccauuc

SEQ ID NO: 1341001 - RNA, 18 nt, Human
uggaucagcguggccuug

SEQ ID NO: 1341002 - RNA, 17 nt, Human
uggaucagcguggccuu

SEQ ID NO: 1341003 - RNA, 16 nt, Human
uggauccuguguggag

SEQ ID NO: 1341004 - RNA, 17 nt, Human
uggauccuguguggaga

SEQ ID NO: 1341005 - RNA, 14 nt, Human
uggaucuauuucau

SEQ ID NO: 1341006 - RNA, 18 nt, Human
uggaucuauuucauguuu

SEQ ID NO: 1341007 - RNA, 20 nt, Human
uggaucuauuucauguuuuu

SEQ ID NO: 1341008 - RNA, 18 nt, Human
uggaucucauuggacccu

SEQ ID NO: 1341009 - RNA, 18 nt, Human
uggauuucuuugaaaaaa

SEQ ID NO: 1341010 - RNA, 13 nt, Human
uggauuugacauu

SEQ ID NO: 1341011 - RNA, 14 nt, Human
uggauuugacauug

SEQ ID NO: 1341012 - RNA, 22 nt, Human
uggauuuuccaggacuguuuca

SEQ ID NO: 1341013 - RNA, 13 nt, Human
uggauuuuuacca

SEQ ID NO: 1341014 - RNA, 14 nt, Human
uggauuuuuaccag

SEQ ID NO: 1341015 - RNA, 22 nt, Human
uggauuuuuaccagucucacau

SEQ ID NO: 1341016 - RNA, 15 nt, Human
uggauuuuucuuuaa

SEQ ID NO: 1341017 - RNA, 18 nt, Human
uggauuuuucuuuaacug

SEQ ID NO: 1341018 - RNA, 13 nt, Human
uggcaacacagag

SEQ ID NO: 1341019 - RNA, 13 nt, Human
uggcaacagaucu

SEQ ID NO: 1341020 - RNA, 15 nt, Human
uggcaacagaucugg

SEQ ID NO: 1341021 - RNA, 16 nt, Human
uggcaacagaucugga

SEQ ID NO: 1341022 - RNA, 17 nt, Human
uggcaacagaucuggaa

SEQ ID NO: 1341023 - RNA, 18 nt, Human
uggcaacagaucuggaac

SEQ ID NO: 1341024 - RNA, 20 nt, Human
uggcaacagaucuggaaccu

SEQ ID NO: 1341025 - RNA, 17 nt, Human
ugccacccucaugcugu

SEQ ID NO: 1341026 - RNA, 16 nt, Human
ugccacccucaugcug

SEQ ID NO: 1341027 - RNA, 14 nt, Human
ugccaccaggccac

SEQ ID NO: 1341028 - RNA, 17 nt, Human
ugccaccaggccaccuc

SEQ ID NO: 1341029 - RNA, 18 nt, Human
ugccaccaggccaccucc

SEQ ID NO: 1341030 - RNA, 19 nt, Human
ugccacuaaccuuccaaaa

SEQ ID NO: 1341031 - RNA, 23 nt, Human
ugccaggagggacaaaggagccu

SEQ ID NO: 1341032 - RNA, 24 nt, Human
ugccaggagggacaaaggagccug

SEQ ID NO: 1341033 - RNA, 21 nt, Human
ugccaggaggacccagggcuc

SEQ ID NO: 1341034 - RNA, 22 nt, Human
ugccaggaggacccagggcucu

SEQ ID NO: 1341035 - RNA, 23 nt, Human
ugccaggaggacccagggcucug

SEQ ID NO: 1341036 - RNA, 13 nt, Human
ugccaggagggac

SEQ ID NO: 1341037 - RNA, 21 nt, Human
ugccaggagggacaaaggagc

SEQ ID NO: 1341038 - RNA, 22 nt, Human
ugccaggagggacaaaggagcc

SEQ ID NO: 1341039 - RNA, 21 nt, Human
ugcauauuuauaaaaauaaaa

SEQ ID NO: 1341040 - RNA, 15 nt, Human
ugcauauguugaaua

SEQ ID NO: 1341041 - RNA, 17 nt, Human
ugcauauguugaauacu

SEQ ID NO: 1341042 - RNA, 15 nt, Human
ugcauauuuguuuau

SEQ ID NO: 1341043 - RNA, 20 nt, Human
ugcauauuuauaaaaauaaa

SEQ ID NO: 1341044 - RNA, 13 nt, Human
ugcauauguugaa

SEQ ID NO: 1341045 - RNA, 18 nt, Human
ugccaaauauaaauaaaa

SEQ ID NO: 1341046 - RNA, 17 nt, Human
ugccaaauauaaauaaa

SEQ ID NO: 1341047 - RNA, 22 nt, Human
ugccaaauauaaauaaaaauaa

SEQ ID NO: 1341048 - RNA, 19 nt, Human
ugccaaauauaaauaaaaa

SEQ ID NO: 1341049 - RNA, 16 nt, Human
ugccaaauauguccug

SEQ ID NO: 1341050 - RNA, 13 nt, Human
ugccaccaggcca

SEQ ID NO: 1341051 - RNA, 16 nt, Human
ugccccaucagugcuc

SEQ ID NO: 1341052 - RNA, 18 nt, Human
ugccccaucagugcuccc

SEQ ID NO: 1341053 - RNA, 20 nt, Human
ugccccaucagugcucccuc

SEQ ID NO: 1341054 - RNA, 21 nt, Human
ugccccaucagugcucccuca

SEQ ID NO: 1341055 - RNA, 15 nt, Human
ugccccagggcuccc

SEQ ID NO: 1341056 - RNA, 14 nt, Human
ugccccaggccuga

SEQ ID NO: 1341057 - RNA, 14 nt, Human
ugccccaggaccag

SEQ ID NO: 1341058 - RNA, 18 nt, Human
ugccccaggaccagcuca

SEQ ID NO: 1341059 - RNA, 19 nt, Human
ugccccaggaccagcucag

SEQ ID NO: 1341060 - RNA, 20 nt, Human
ugccccaggaccagcucagg

SEQ ID NO: 1341061 - RNA, 13 nt, Human
ugccccucccuuc

SEQ ID NO: 1341062 - RNA, 17 nt, Human
ugccccaucccaugcug

SEQ ID NO: 1341063 - RNA, 14 nt, Human
ugcccaguuaaucu

SEQ ID NO: 1341064 - RNA, 20 nt, Human
ugcccaguuaaucuugcuuu

SEQ ID NO: 1341065 - RNA, 23 nt, Human
ugcccaguuaaucuugcuuucuu

SEQ ID NO: 1341066 - RNA, 22 nt, Human
ugcccaguuaaucuugcuuucu

SEQ ID NO: 1341067 - RNA, 20 nt, Human
ugcccaugcugggagcccac

SEQ ID NO: 1341068 - RNA, 24 nt, Human
ugcccauggacaggcuggcuccag

SEQ ID NO: 1341069 - RNA, 16 nt, Human
ugcccaugggagcugg

SEQ ID NO: 1341070 - RNA, 13 nt, Human
ugccccaggacca

SEQ ID NO: 1341071 - RNA, 22 nt, Human
ugcccacccucuggagaaggug

SEQ ID NO: 1341072 - RNA, 22 nt, Human
ugcccaccucagccucccaaag

SEQ ID NO: 1341073 - RNA, 22 nt, Human
ugcacugauauaucaugaguga

SEQ ID NO: 1341074 - RNA, 14 nt, Human
ugcacugaugcugc

SEQ ID NO: 1341075 - RNA, 16 nt, Human
ugcacugaugcugccc

SEQ ID NO: 1341076 - RNA, 17 nt, Human
ugcacugaugcugcccc

SEQ ID NO: 1341077 - RNA, 21 nt, Human
ugcacugaugcugccccucau

SEQ ID NO: 1341078 - RNA, 22 nt, Human
ugcacugaugcugccccucauc

SEQ ID NO: 1341079 - RNA, 13 nt, Human
ugcacugauguug

SEQ ID NO: 1341080 - RNA, 14 nt, Human
ugcacugauguugu

SEQ ID NO: 1341081 - RNA, 15 nt, Human
ugcacugauguugug

SEQ ID NO: 1341082 - RNA, 21 nt, Human
ugcacugauguuguguuuuua

SEQ ID NO: 1341083 - RNA, 19 nt, Human
ugcacugcccauggacagg

SEQ ID NO: 1341084 - RNA, 21 nt, Human
ugcacugcccauggacaggcu

SEQ ID NO: 1341085 - RNA, 12 nt, Human
ugcaccggggcc

SEQ ID NO: 1341086 - RNA, 16 nt, Human
ugcaccggggccuggg

SEQ ID NO: 1341087 - RNA, 22 nt, Human
ugcaccggggccugggcaggag

SEQ ID NO: 1341088 - RNA, 17 nt, Human
ugcacuggccccacccu

SEQ ID NO: 1341089 - RNA, 12 nt, Human
ugcacugggagg

SEQ ID NO: 1341090 - RNA, 17 nt, Human
ugcacugggaggcuccc

SEQ ID NO: 1341091 - RNA, 20 nt, Human
ugcacugggaggcuccccuu

SEQ ID NO: 1341092 - RNA, 16 nt, Human
ugcacuggccccaccc

SEQ ID NO: 1341093 - RNA, 15 nt, Human
ugcacuggccccacc

SEQ ID NO: 1341094 - RNA, 16 nt, Human
ugcacuggggagcccg

SEQ ID NO: 1341095 - RNA, 20 nt, Human
ugcacuggggagcccgucuc

SEQ ID NO: 1341096 - RNA, 21 nt, Human
ugcacugggaggcuccccuuc

SEQ ID NO: 1341097 - RNA, 12 nt, Human
ugcacuguaaaa

SEQ ID NO: 1341098 - RNA, 13 nt, Human
ugcacuguaaaau

SEQ ID NO: 1341099 - RNA, 14 nt, Human
ugcacuguaaaaug

SEQ ID NO: 1341100 - RNA, 17 nt, Human
ugcacuguaaaaugugg

SEQ ID NO: 1341101 - RNA, 15 nt, Human
ugcacuguaaaaugu

SEQ ID NO: 1341102 - RNA, 20 nt, Human
ugcacuuucuauccucugua

SEQ ID NO: 1341103 - RNA, 12 nt, Human
ugcacuuugcuu

SEQ ID NO: 1341104 - RNA, 16 nt, Human
ugcacuuugcuuuaau

SEQ ID NO: 1341105 - RNA, 17 nt, Human
ugcacuuugcuuuaaua

SEQ ID NO: 1341106 - RNA, 20 nt, Human
ugcacuuugcuuuaauauaa

SEQ ID NO: 1341107 - RNA, 22 nt, Human
ugcacuuugcuuuaauauaaau

SEQ ID NO: 1341108 - RNA, 23 nt, Human
ugcagcacagcugagaggcuguc

SEQ ID NO: 1341109 - RNA, 14 nt, Human
ugcagaggccagag

SEQ ID NO: 1341110 - RNA, 15 nt, Human
ugcagaggccagagg

SEQ ID NO: 1341111 - RNA, 17 nt, Human
ugcagaggccagaggcc

SEQ ID NO: 1341112 - RNA, 21 nt, Human
ugcagagcaggaaacaugacu

SEQ ID NO: 1341113 - RNA, 21 nt, Human
ugcacuuugcuuuaauauaaa

SEQ ID NO: 1341114 - RNA, 15 nt, Human
ugcaguucugaagaa

SEQ ID NO: 1341115 - RNA, 16 nt, Human
ugcaguucugaagaag

SEQ ID NO: 1341116 - RNA, 17 nt, Human
ugcaguucugaagaaga

SEQ ID NO: 1341117 - RNA, 18 nt, Human
ugcaguucugaagaagau

SEQ ID NO: 1341118 - RNA, 22 nt, Human
ugcaguggcgugaucucagcuc

SEQ ID NO: 1341119 - RNA, 22 nt, Human
ugcaguggcgcgaucucagcuc

SEQ ID NO: 1341120 - RNA, 22 nt, Human
ugcaguggcaucaucucagcuc

SEQ ID NO: 1341121 - RNA, 19 nt, Human
ugcaguucugaagaagaug

SEQ ID NO: 1341122 - RNA, 22 nt, Human
ugcaguucugaagaagauggua

SEQ ID NO: 1341123 - RNA, 20 nt, Human
ugcaguucuuuggcugaaag

SEQ ID NO: 1341124 - RNA, 21 nt, Human
ugcaguucuuuggcugaaagg

SEQ ID NO: 1341125 - RNA, 23 nt, Human
ugcauauaagggaaguaguuauc

SEQ ID NO: 1341126 - RNA, 22 nt, Human
ugcauauaagggaaguaguuau

SEQ ID NO: 1341127 - RNA, 21 nt, Human
ugcauauaagggaaguaguua

SEQ ID NO: 1341128 - RNA, 14 nt, Human
ugcaggcaggaaca

SEQ ID NO: 1341129 - RNA, 17 nt, Human
ugcaggcccuggccucc

SEQ ID NO: 1341130 - RNA, 19 nt, Human
ugcaggcccuggccucccc

SEQ ID NO: 1341131 - RNA, 20 nt, Human
ugcaggcaggaacaaacagg

SEQ ID NO: 1341132 - RNA, 19 nt, Human
ugcaggcaggaacaaacag

SEQ ID NO: 1341133 - RNA, 12 nt, Human
ugcaggcccugg

SEQ ID NO: 1341134 - RNA, 15 nt, Human
ugcaggcccuggccu

SEQ ID NO: 1341135 - RNA, 16 nt, Human
ugcaggcccuggccuc

SEQ ID NO: 1341136 - RNA, 20 nt, Human
ugcaggcccuggccuccccu

SEQ ID NO: 1341137 - RNA, 15 nt, Human
ugcuaagcauuccaa

SEQ ID NO: 1341138 - RNA, 19 nt, Human
ugcuaagcauuccaacuau

SEQ ID NO: 1341139 - RNA, 16 nt, Human
ugcuaagagaaguaga

SEQ ID NO: 1341140 - RNA, 13 nt, Human
ugcucaaggccag

SEQ ID NO: 1341141 - RNA, 16 nt, Human
ugcucaaggccagcuu

SEQ ID NO: 1341142 - RNA, 21 nt, Human
ugcucaauaaaugauucuuag

SEQ ID NO: 1341143 - RNA, 17 nt, Human
ugcucagagcaguguuu

SEQ ID NO: 1341144 - RNA, 21 nt, Human
ugcucagggggcgccuguggu

SEQ ID NO: 1341145 - RNA, 13 nt, Human
ugcucagguacuu

SEQ ID NO: 1341146 - RNA, 17 nt, Human
ugcucagguacuuguaa

SEQ ID NO: 1341147 - RNA, 17 nt, Human
ugcucaggugcuggggc

SEQ ID NO: 1341148 - RNA, 17 nt, Human
ugcucaguaauuugagg

SEQ ID NO: 1341149 - RNA, 16 nt, Human
ugcucagcccugagga

SEQ ID NO: 1341150 - RNA, 17 nt, Human
ugcucagcccugaggac

SEQ ID NO: 1341151 - RNA, 19 nt, Human
ugcucagcccugaggacag

SEQ ID NO: 1341152 - RNA, 13 nt, Human
ugcucagcccugc

SEQ ID NO: 1341153 - RNA, 17 nt, Human
ugcucagcucugggcca

SEQ ID NO: 1341154 - RNA, 23 nt, Human
ugcucagggacucaucuuucccu

SEQ ID NO: 1341155 - RNA, 14 nt, Human
ugcucgccccagca

SEQ ID NO: 1341156 - RNA, 16 nt, Human
ugcucgccccagcagg

SEQ ID NO: 1341157 - RNA, 13 nt, Human
ugcucgcccugcg

SEQ ID NO: 1341158 - RNA, 14 nt, Human
ugcucgcccugcgg

SEQ ID NO: 1341159 - RNA, 20 nt, Human
ugcucuaugugcuuguaaaa

SEQ ID NO: 1341160 - RNA, 19 nt, Human
ugcucuccauucugcuccu

SEQ ID NO: 1341161 - RNA, 20 nt, Human
ugcucuccauucugcuccuu

SEQ ID NO: 1341162 - RNA, 21 nt, Human
ugcucuccauucugcuccuuc

SEQ ID NO: 1341163 - RNA, 16 nt, Human
ugcucuccucuugcca

SEQ ID NO: 1341164 - RNA, 18 nt, Human
ugcucuccucuugccacu

SEQ ID NO: 1341165 - RNA, 21 nt, Human
ugcucuccucuugccacugcc

SEQ ID NO: 1341166 - RNA, 22 nt, Human
ugcucuccucuugccacugccu

SEQ ID NO: 1341167 - RNA, 20 nt, Human
ugcugaaacgcaucuaguuc

SEQ ID NO: 1341168 - RNA, 17 nt, Human
ugcugaaauuuuauaug

SEQ ID NO: 1341169 - RNA, 23 nt, Human
ugcugaaggaauaaauugcuccu

SEQ ID NO: 1341170 - RNA, 14 nt, Human
ugcugaacagugga

SEQ ID NO: 1341171 - RNA, 18 nt, Human
ugcugacauucaccugcc

SEQ ID NO: 1341172 - RNA, 17 nt, Human
ugcugauggagccuucc

SEQ ID NO: 1341173 - RNA, 13 nt, Human
ugcugcaaaccug

SEQ ID NO: 1341174 - RNA, 14 nt, Human
ugcugcaaaccuga

SEQ ID NO: 1341175 - RNA, 20 nt, Human
ugcugcaaaccugaccccug

SEQ ID NO: 1341176 - RNA, 19 nt, Human
ugcugcaagcacagcccuu

SEQ ID NO: 1341177 - RNA, 14 nt, Human
ugcugcauggcagg

SEQ ID NO: 1341178 - RNA, 16 nt, Human
ugcugcauggcagggg

SEQ ID NO: 1341179 - RNA, 21 nt, Human
ugcugcauggcagggggcugc

SEQ ID NO: 1341180 - RNA, 22 nt, Human
ugcugcauggcagggggcugcu

SEQ ID NO: 1341181 - RNA, 23 nt, Human
ugcugcauggcagggggcugcug

SEQ ID NO: 1341182 - RNA, 19 nt, Human
ugcugcuaauauuuuccuc

SEQ ID NO: 1341183 - RNA, 15 nt, Human
ugcugcuacuuauau

SEQ ID NO: 1341184 - RNA, 13 nt, Human
ugcugcugggcuc

SEQ ID NO: 1341185 - RNA, 14 nt, Human
ugcugcugggcuca

SEQ ID NO: 1341186 - RNA, 17 nt, Human
ugcugcugggcucagug

SEQ ID NO: 1341187 - RNA, 14 nt, Human
ugcugcuggggaag

SEQ ID NO: 1341188 - RNA, 15 nt, Human
ugcugcuggggaaga

SEQ ID NO: 1341189 - RNA, 19 nt, Human
ugcugcuggggaagacagu

SEQ ID NO: 1341190 - RNA, 20 nt, Human
ugcugcuggggaagacagug

SEQ ID NO: 1341191 - RNA, 21 nt, Human
ugcugcuggggaagacagugg

SEQ ID NO: 1341192 - RNA, 22 nt, Human
ugcugcuggggaagacaguggc

SEQ ID NO: 1341193 - RNA, 24 nt, Human
ugcugcuggggaagacaguggccc

SEQ ID NO: 1341194 - RNA, 13 nt, Human
ugcugcugucccu

SEQ ID NO: 1341195 - RNA, 23 nt, Human
ugcugcuggggaagacaguggcc

SEQ ID NO: 1341196 - RNA, 17 nt, Human
ugcugcugucugggugc

SEQ ID NO: 1341197 - RNA, 14 nt, Human
ugcugcugugugcu

SEQ ID NO: 1341198 - RNA, 18 nt, Human
ugcuggaaaauaauacug

SEQ ID NO: 1341199 - RNA, 22 nt, Human
ugcuggaagacgcaagggccug

SEQ ID NO: 1341200 - RNA, 17 nt, Human
ugcuggaauaaguucaa

SEQ ID NO: 1341201 - RNA, 16 nt, Human
ugcuggaauucuaaca

SEQ ID NO: 1341202 - RNA, 15 nt, Human
ugccuucucaacucc

SEQ ID NO: 1341203 - RNA, 17 nt, Human
ugccuucucaacuccaa

SEQ ID NO: 1341204 - RNA, 17 nt, Human
ugccugugaacugaacu

SEQ ID NO: 1341205 - RNA, 18 nt, Human
ugccugugaacugaacuc

SEQ ID NO: 1341206 - RNA, 21 nt, Human
ugccugugaacugaacucuga

SEQ ID NO: 1341207 - RNA, 21 nt, Human
ugccuucgcuucuugccucug

SEQ ID NO: 1341208 - RNA, 22 nt, Human
ugccuucgcuucuugccucugu

SEQ ID NO: 1341209 - RNA, 23 nt, Human
ugccuucgcuucuugccucugug

SEQ ID NO: 1341210 - RNA, 20 nt, Human
ugccuucgucuuucccaugg

SEQ ID NO: 1341211 - RNA, 16 nt, Human
ugccuucuacuuuuaa

SEQ ID NO: 1341212 - RNA, 20 nt, Human
ugcgagugcucauuucagga

SEQ ID NO: 1341213 - RNA, 16 nt, Human
ugccuugaaaaagaca

SEQ ID NO: 1341214 - RNA, 13 nt, Human
ugcgauagagucu

SEQ ID NO: 1341215 - RNA, 14 nt, Human
ugcgauagagucuc

SEQ ID NO: 1341216 - RNA, 16 nt, Human
ugcgauagagucucac

SEQ ID NO: 1341217 - RNA, 12 nt, Human
ugcuaaagacau

SEQ ID NO: 1341218 - RNA, 17 nt, Human
ugcuaaauaaaauuugu

SEQ ID NO: 1341219 - RNA, 21 nt, Human
ugcuaaauaaaauuuguugca

SEQ ID NO: 1341220 - RNA, 22 nt, Human
ugcuaaauaaaauuuguugcau

SEQ ID NO: 1341221 - RNA, 23 nt, Human
ugcuaaauaaaauuuguugcaua

SEQ ID NO: 1341222 - RNA, 16 nt, Human
ugcuaacaucuaaaaa

SEQ ID NO: 1341223 - RNA, 19 nt, Human
ugcuaagagaaaaaaaaga

SEQ ID NO: 1341224 - RNA, 13 nt, Human
ugcuaagagaagu

SEQ ID NO: 1341225 - RNA, 22 nt, Human
ugcuaagagaaguagaaaucau

SEQ ID NO: 1341226 - RNA, 13 nt, Human
ugcuaacaucuaa

SEQ ID NO: 1341227 - RNA, 22 nt, Human
ugcgugacaauaaaacauuaau

SEQ ID NO: 1341228 - RNA, 14 nt, Human
ugcgugacaauaaa

SEQ ID NO: 1341229 - RNA, 15 nt, Human
ugcgugacaauaaaa

SEQ ID NO: 1341230 - RNA, 17 nt, Human
ugcgugacaauaaaaca

SEQ ID NO: 1341231 - RNA, 9 nt, Human
ugccucucu

SEQ ID NO: 1341232 - RNA, 20 nt, Human
ugccucucgcuccucaaccc

SEQ ID NO: 1341233 - RNA, 15 nt, Human
ugccucuucugggag

SEQ ID NO: 1341234 - RNA, 18 nt, Human
ugccucucaucaacugaa

SEQ ID NO: 1341235 - RNA, 21 nt, Human
ugccucucaucaacugaauga

SEQ ID NO: 1341236 - RNA, 13 nt, Human
ugccucucccagg

SEQ ID NO: 1341237 - RNA, 17 nt, Human
ugccucucccaggcagg

SEQ ID NO: 1341238 - RNA, 16 nt, Human
ugccucucccaggcag

SEQ ID NO: 1341239 - RNA, 16 nt, Human
ugccugacacacuaac

SEQ ID NO: 1341240 - RNA, 21 nt, Human
ugccucuuuuuaaaguucaaa

SEQ ID NO: 1341241 - RNA, 16 nt, Human
ugccucuucugggagg

SEQ ID NO: 1341242 - RNA, 19 nt, Human
ugccucuucugggagggca

SEQ ID NO: 1341243 - RNA, 20 nt, Human
ugccucuucugggagggcag

SEQ ID NO: 1341244 - RNA, 21 nt, Human
ugccucuucugggagggcagc

SEQ ID NO: 1341245 - RNA, 13 nt, Human
ugccccuggcugg

SEQ ID NO: 1341246 - RNA, 14 nt, Human
ugccccuuccgcca

SEQ ID NO: 1341247 - RNA, 17 nt, Human
ugccccuuccgccacug

SEQ ID NO: 1341248 - RNA, 18 nt, Human
ugccccuuccgccacugg

SEQ ID NO: 1341249 - RNA, 19 nt, Human
ugccccuuccgccacuggg

SEQ ID NO: 1341250 - RNA, 23 nt, Human
ugccccuuccgccacuggggcuc

SEQ ID NO: 1341251 - RNA, 20 nt, Human
ugccccuuccgccacugggg

SEQ ID NO: 1341252 - RNA, 21 nt, Human
ugccccuuccgccacuggggc

SEQ ID NO: 1341253 - RNA, 23 nt, Human
ugccucgaaacacagaaaccuuu

SEQ ID NO: 1341254 - RNA, 20 nt, Human
ugccccuugacaacuggcag

SEQ ID NO: 1341255 - RNA, 18 nt, Human
ugccuguaaucacagcua

SEQ ID NO: 1341256 - RNA, 14 nt, Human
ugccugugaacuga

SEQ ID NO: 1341257 - RNA, 20 nt, Human
ugccuguagccccagugaca

SEQ ID NO: 1341258 - RNA, 22 nt, Human
ugccuguagccccagugacagc

SEQ ID NO: 1341259 - RNA, 21 nt, Human
ugccuguagccccagugacag

SEQ ID NO: 1341260 - RNA, 18 nt, Human
ugccugacauuuggagug

SEQ ID NO: 1341261 - RNA, 23 nt, Human
ugccugacccuacuucuuuugcu

SEQ ID NO: 1341262 - RNA, 21 nt, Human
ugccugacuagggagccaugu

SEQ ID NO: 1341263 - RNA, 20 nt, Human
ugaagagguuuuaaagcuuc

SEQ ID NO: 1341264 - RNA, 21 nt, Human
ugaagagguuuuaaagcuucc

SEQ ID NO: 1341265 - RNA, 23 nt, Human
ugaagaguaagucaaccugccug

SEQ ID NO: 1341266 - RNA, 23 nt, Human
ugaagaguaaucaaucuacucaa

SEQ ID NO: 1341267 - RNA, 16 nt, Human
ugaagacuaugaaaau

SEQ ID NO: 1341268 - RNA, 17 nt, Human
ugaagacuaugaaaaug

SEQ ID NO: 1341269 - RNA, 15 nt, Human
ugaagacuggaagcu

SEQ ID NO: 1341270 - RNA, 17 nt, Human
ugaagacuggaagcuaa

SEQ ID NO: 1341271 - RNA, 15 nt, Human
ugaagagauuuuuca

SEQ ID NO: 1341272 - RNA, 16 nt, Human
ugaagagauuuuucau

SEQ ID NO: 1341273 - RNA, 17 nt, Human
ugaagagccacugccau

SEQ ID NO: 1341274 - RNA, 21 nt, Human
ugaagcuuuuaugugaaacau

SEQ ID NO: 1341275 - RNA, 23 nt, Human
ugaagaguguuauuuucauucaa

SEQ ID NO: 1341276 - RNA, 12 nt, Human
ugaaggccugag

SEQ ID NO: 1341277 - RNA, 14 nt, Human
ugaaggccugaggu

SEQ ID NO: 1341278 - RNA, 13 nt, Human
ugaaacauguuuc

SEQ ID NO: 1341279 - RNA, 16 nt, Human
ugaaacacuuugcaua

SEQ ID NO: 1341280 - RNA, 12 nt, Human
ugaaacagaaaa

SEQ ID NO: 1341281 - RNA, 15 nt, Human
ugaaacagaaaaaua

SEQ ID NO: 1341282 - RNA, 13 nt, Human
ugaaacagaaaca

SEQ ID NO: 1341283 - RNA, 14 nt, Human
ugaaacagaaacaa

SEQ ID NO: 1341284 - RNA, 16 nt, Human
ugaaacagaaacaaaa

SEQ ID NO: 1341285 - RNA, 23 nt, Human
ugaaacagaaaaauauguaccaa

SEQ ID NO: 1341286 - RNA, 16 nt, Human
ugaacuugaggacaca

SEQ ID NO: 1341287 - RNA, 21 nt, Human
ugaacuugaaauauccugcuu

SEQ ID NO: 1341288 - RNA, 17 nt, Human
ugaacuuagauuuuaca

SEQ ID NO: 1341289 - RNA, 18 nt, Human
ugaacuuagauuuuacau

SEQ ID NO: 1341290 - RNA, 19 nt, Human
ugaacuuagauuuuacaug

SEQ ID NO: 1341291 - RNA, 20 nt, Human
ugaacuuagauuuuacauga

SEQ ID NO: 1341292 - RNA, 21 nt, Human
ugaacuuagauuuuacaugaa

SEQ ID NO: 1341293 - RNA, 20 nt, Human
ugaacuugaggacacauguc

SEQ ID NO: 1341294 - RNA, 19 nt, Human
ugaacuugaggacacaugu

SEQ ID NO: 1341295 - RNA, 18 nt, Human
ugaacuugaggacacaug

SEQ ID NO: 1341296 - RNA, 17 nt, Human
ugaacuugaggacacau

SEQ ID NO: 1341297 - RNA, 22 nt, Human
ugaacuugaggacacaugucca

SEQ ID NO: 1341298 - RNA, 21 nt, Human
ugaacuugaggacacaugucc

SEQ ID NO: 1341299 - RNA, 23 nt, Human
ugaagaccuuuuucugcacuaua

SEQ ID NO: 1341300 - RNA, 22 nt, Human
ugaagaccuuuuucugcacuau

SEQ ID NO: 1341301 - RNA, 21 nt, Human
ugaagaccuuuuucugcacua

SEQ ID NO: 1341302 - RNA, 19 nt, Human
ugaagaccuuuuucugcac

SEQ ID NO: 1341303 - RNA, 14 nt, Human
ugaaggcuguacac

SEQ ID NO: 1341304 - RNA, 13 nt, Human
ugaaggcuucucu

SEQ ID NO: 1341305 - RNA, 15 nt, Human
ugaaggcuucucucu

SEQ ID NO: 1341306 - RNA, 16 nt, Human
ugaaggcuucucucug

SEQ ID NO: 1341307 - RNA, 19 nt, Human
ugaaggcuucucucugugg

SEQ ID NO: 1341308 - RNA, 15 nt, Human
ugaaguuugaaugcu

SEQ ID NO: 1341309 - RNA, 14 nt, Human
ugaaguuuuacauu

SEQ ID NO: 1341310 - RNA, 15 nt, Human
ugaaguuuuacauug

SEQ ID NO: 1341311 - RNA, 16 nt, Human
ugaaguuuuacauugu

SEQ ID NO: 1341312 - RNA, 17 nt, Human
ugaaguuuuacauuguu

SEQ ID NO: 1341313 - RNA, 14 nt, Human
ugaaucacaugaau

SEQ ID NO: 1341314 - RNA, 14 nt, Human
ugaauccucucucu

SEQ ID NO: 1341315 - RNA, 16 nt, Human
ugaauccucucucugu

SEQ ID NO: 1341316 - RNA, 21 nt, Human
ugaauccucucucuguguuac

SEQ ID NO: 1341317 - RNA, 20 nt, Human
ugaaugaauggcuaagcaaa

SEQ ID NO: 1341318 - RNA, 15 nt, Human
ugaaugaauggcuaa

SEQ ID NO: 1341319 - RNA, 16 nt, Human
ugaaugauucaguguu

SEQ ID NO: 1341320 - RNA, 24 nt, Human
ugaaugaagcaaaugucaugcugc

SEQ ID NO: 1341321 - RNA, 15 nt, Human
ugaaugauuuuucuu

SEQ ID NO: 1341322 - RNA, 16 nt, Human
ugaaugauuuuucuuu

SEQ ID NO: 1341323 - RNA, 19 nt, Human
ugaaugauuuuucuuuaca

SEQ ID NO: 1341324 - RNA, 20 nt, Human
ugaaugauuuuucuuuacaa

SEQ ID NO: 1341325 - RNA, 15 nt, Human
ugaaugcaaaccaua

SEQ ID NO: 1341326 - RNA, 19 nt, Human
ugaaugcaaaccauagcac

SEQ ID NO: 1341327 - RNA, 14 nt, Human
ugaaugcauaaaau

SEQ ID NO: 1341328 - RNA, 19 nt, Human
ugaauguuuacacucuuug

SEQ ID NO: 1341329 - RNA, 22 nt, Human
ugaauguuuacacucuuuguaa

SEQ ID NO: 1341330 - RNA, 13 nt, Human
ugaauguuuuucu

SEQ ID NO: 1341331 - RNA, 15 nt, Human
ugaauguuuuucuaa

SEQ ID NO: 1341332 - RNA, 16 nt, Human
ugaauguuuuucuaaa

SEQ ID NO: 1341333 - RNA, 17 nt, Human
ugaauguuuuucuaaag

SEQ ID NO: 1341334 - RNA, 18 nt, Human
ugaauguuuuucuaaagg

SEQ ID NO: 1341335 - RNA, 20 nt, Human
ugaauguuuuucuaaaggag

SEQ ID NO: 1341336 - RNA, 16 nt, Human
ugaaucuuggugucua

SEQ ID NO: 1341337 - RNA, 12 nt, Human
ugaaugaacacu

SEQ ID NO: 1341338 - RNA, 15 nt, Human
ugaaugaacacucuu

SEQ ID NO: 1341339 - RNA, 11 nt, Human
ugaaugaagca

SEQ ID NO: 1341340 - RNA, 22 nt, Human
ugaaugaagcaaaugucaugcu

SEQ ID NO: 1341341 - RNA, 16 nt, Human
ugaauuuaaauagcuu

SEQ ID NO: 1341342 - RNA, 15 nt, Human
ugacaacagacuucu

SEQ ID NO: 1341343 - RNA, 18 nt, Human
ugacaacagacuucugaa

SEQ ID NO: 1341344 - RNA, 19 nt, Human
ugacaacagacuucugaaa

SEQ ID NO: 1341345 - RNA, 23 nt, Human
ugacaacauuucuauagccaaaa

SEQ ID NO: 1341346 - RNA, 16 nt, Human
ugacaacauuucuaua

SEQ ID NO: 1341347 - RNA, 14 nt, Human
ugaauuaaguuuuu

SEQ ID NO: 1341348 - RNA, 17 nt, Human
ugaauuaaauaaacccu

SEQ ID NO: 1341349 - RNA, 18 nt, Human
ugaauuaagcccaauuaa

SEQ ID NO: 1341350 - RNA, 13 nt, Human
ugaauuacauuug

SEQ ID NO: 1341351 - RNA, 16 nt, Human
ugaauuaauaucccua

SEQ ID NO: 1341352 - RNA, 19 nt, Human
ugaauuaauaucccuacau

SEQ ID NO: 1341353 - RNA, 22 nt, Human
ugaauuaauaucccuacaugua

SEQ ID NO: 1341354 - RNA, 23 nt, Human
ugaauuaauaucccuacauguau

SEQ ID NO: 1341355 - RNA, 14 nt, Human
ugaauuacauuugu

SEQ ID NO: 1341356 - RNA, 19 nt, Human
ugaauuguaacuguucuug

SEQ ID NO: 1341357 - RNA, 12 nt, Human
ugacaauaaaac

SEQ ID NO: 1341358 - RNA, 13 nt, Human
ugacaauaaaaca

SEQ ID NO: 1341359 - RNA, 14 nt, Human
ugacaauaaaacau

SEQ ID NO: 1341360 - RNA, 16 nt, Human
ugacaauaaaacauua

SEQ ID NO: 1341361 - RNA, 16 nt, Human
ugacaaccacuggucu

SEQ ID NO: 1341362 - RNA, 19 nt, Human
ugacaaccaugagaccacu

SEQ ID NO: 1341363 - RNA, 17 nt, Human
ugacaaccacuggucug

SEQ ID NO: 1341364 - RNA, 21 nt, Human
ugacaacguuucagcgacucc

SEQ ID NO: 1341365 - RNA, 13 nt, Human
ugacaacuggcag

SEQ ID NO: 1341366 - RNA, 14 nt, Human
ugacaacuggcagg

SEQ ID NO: 1341367 - RNA, 15 nt, Human
ugacaacuggcaggc

SEQ ID NO: 1341368 - RNA, 18 nt, Human
ugacaacuggcaggcagg

SEQ ID NO: 1341369 - RNA, 17 nt, Human
ugacaacuggcaggcag

SEQ ID NO: 1341370 - RNA, 16 nt, Human
ugacaugggacauuug

SEQ ID NO: 1341371 - RNA, 19 nt, Human
ugacauguguuggcagccu

SEQ ID NO: 1341372 - RNA, 19 nt, Human
ugacauguggggccagguc

SEQ ID NO: 1341373 - RNA, 20 nt, Human
ugacauguggggccagguca

SEQ ID NO: 1341374 - RNA, 17 nt, Human
ugacauguggggccagg

SEQ ID NO: 1341375 - RNA, 18 nt, Human
ugacauguggggccaggu

SEQ ID NO: 1341376 - RNA, 15 nt, Human
ugacaugaagcuguu

SEQ ID NO: 1341377 - RNA, 17 nt, Human
ugacaugaauuuuagcu

SEQ ID NO: 1341378 - RNA, 21 nt, Human
ugacaugaauuuuagcuuuug

SEQ ID NO: 1341379 - RNA, 22 nt, Human
ugacaugaauuuuagcuuuugu

SEQ ID NO: 1341380 - RNA, 17 nt, Human
ugacaugcaucaucuca

SEQ ID NO: 1341381 - RNA, 18 nt, Human
ugaccacugcagaagaca

SEQ ID NO: 1341382 - RNA, 17 nt, Human
ugaccacugcagaagac

SEQ ID NO: 1341383 - RNA, 16 nt, Human
ugaccacugcagaaga

SEQ ID NO: 1341384 - RNA, 21 nt, Human
ugaccagccuccaugcugccu

SEQ ID NO: 1341385 - RNA, 22 nt, Human
ugaccagccuccaugcugccuc

SEQ ID NO: 1341386 - RNA, 23 nt, Human
ugaccagccuccaugcugccucc

SEQ ID NO: 1341387 - RNA, 15 nt, Human
ugacauauuuuugcu

SEQ ID NO: 1341388 - RNA, 17 nt, Human
ugacaucaccacaguuu

SEQ ID NO: 1341389 - RNA, 14 nt, Human
ugacaucaaaaaag

SEQ ID NO: 1341390 - RNA, 13 nt, Human
ugacaucacuugu

SEQ ID NO: 1341391 - RNA, 16 nt, Human
ugacaucacuuguaca

SEQ ID NO: 1341392 - RNA, 17 nt, Human
ugacaucacuuguacaa

SEQ ID NO: 1341393 - RNA, 18 nt, Human
ugacaucacuuguacaaa

SEQ ID NO: 1341394 - RNA, 19 nt, Human
ugacaucacuuguacaaaa

SEQ ID NO: 1341395 - RNA, 20 nt, Human
ugacaucacuuguacaaaau

SEQ ID NO: 1341396 - RNA, 21 nt, Human
ugacaucacuuguacaaaaua

SEQ ID NO: 1341397 - RNA, 22 nt, Human
ugacaucacuuguacaaaauaa

SEQ ID NO: 1341398 - RNA, 23 nt, Human
ugacaucacuuguacaaaauaaa

SEQ ID NO: 1341399 - RNA, 18 nt, Human
ugacaucagguuuuuccc

SEQ ID NO: 1341400 - RNA, 21 nt, Human
ugacaucggaaaaauaaucaa

SEQ ID NO: 1341401 - RNA, 19 nt, Human
ugacaucggaaaaauaauc

SEQ ID NO: 1341402 - RNA, 16 nt, Human
ugacuuuggcugcaug

SEQ ID NO: 1341403 - RNA, 15 nt, Human
ugacuuugcuugcuu

SEQ ID NO: 1341404 - RNA, 16 nt, Human
ugacuuugcuugcuuu

SEQ ID NO: 1341405 - RNA, 22 nt, Human
ugacuuuccccaccagaugcug

SEQ ID NO: 1341406 - RNA, 23 nt, Human
ugacuuuccccaccagaugcuga

SEQ ID NO: 1341407 - RNA, 13 nt, Human
ugacuuucuuuuu

SEQ ID NO: 1341408 - RNA, 13 nt, Human
ugacuuugcuugc

SEQ ID NO: 1341409 - RNA, 15 nt, Human
ugacuggcuaaagcu

SEQ ID NO: 1341410 - RNA, 16 nt, Human
ugacugggaccaggca

SEQ ID NO: 1341411 - RNA, 17 nt, Human
ugacuggcuucagcaag

SEQ ID NO: 1341412 - RNA, 12 nt, Human
ugacuuucccca

SEQ ID NO: 1341413 - RNA, 21 nt, Human
ugacuuuccccaccagaugcu

SEQ ID NO: 1341414 - RNA, 14 nt, Human
ugacucuuuccaac

SEQ ID NO: 1341415 - RNA, 16 nt, Human
ugacucuuuccaaccg

SEQ ID NO: 1341416 - RNA, 13 nt, Human
ugacucuuuccaa

SEQ ID NO: 1341417 - RNA, 19 nt, Human
ugacucuuuccaaccggcu

SEQ ID NO: 1341418 - RNA, 14 nt, Human
ugacugcuugcccu

SEQ ID NO: 1341419 - RNA, 16 nt, Human
ugacugcuugcccuaa

SEQ ID NO: 1341420 - RNA, 14 nt, Human
ugacucuuaagaag

SEQ ID NO: 1341421 - RNA, 15 nt, Human
ugacucuuaagaaga

SEQ ID NO: 1341422 - RNA, 16 nt, Human
ugacucuuaagaagac

SEQ ID NO: 1341423 - RNA, 18 nt, Human
ugacuacagucaggaaag

SEQ ID NO: 1341424 - RNA, 15 nt, Human
ugacuaauggcauga

SEQ ID NO: 1341425 - RNA, 16 nt, Human
ugacuacagucaggaa

SEQ ID NO: 1341426 - RNA, 17 nt, Human
ugacuacagucaggaaa

SEQ ID NO: 1341427 - RNA, 12 nt, Human
ugaccaugcuca

SEQ ID NO: 1341428 - RNA, 16 nt, Human
ugaccaugcucaucug

SEQ ID NO: 1341429 - RNA, 18 nt, Human
ugaccaugcucaucugcu

SEQ ID NO: 1341430 - RNA, 19 nt, Human
ugaccaugcucaucugcug

SEQ ID NO: 1341431 - RNA, 17 nt, Human
ugaccagccgugagcau

SEQ ID NO: 1341432 - RNA, 19 nt, Human
ugacuaaaccauugugcau

SEQ ID NO: 1341433 - RNA, 15 nt, Human
ugacuaaaccauugu

SEQ ID NO: 1341434 - RNA, 14 nt, Human
ugacuaaaauauuu

SEQ ID NO: 1341435 - RNA, 12 nt, Human
ugacuaaacuuu

SEQ ID NO: 1341436 - RNA, 18 nt, Human
ugacuaaacuuuuuuucu

SEQ ID NO: 1341437 - RNA, 19 nt, Human
ugacuaaacuuuuuuucug

SEQ ID NO: 1341438 - RNA, 21 nt, Human
ugacuaaacuuuuuuucugua

SEQ ID NO: 1341439 - RNA, 17 nt, Human
ugacuaacaggccaaag

SEQ ID NO: 1341440 - RNA, 21 nt, Human
ugacuaacaggccaaagaguc

SEQ ID NO: 1341441 - RNA, 20 nt, Human
ugacuaacuagacaccaaag

SEQ ID NO: 1341442 - RNA, 23 nt, Human
ugacuaacuagacaccaaaguuc

SEQ ID NO: 1341443 - RNA, 14 nt, Human
ugacuaauggcaug

SEQ ID NO: 1341444 - RNA, 16 nt, Human
ugacuaauggcaugag

SEQ ID NO: 1341445 - RNA, 18 nt, Human
ugagaaaaauauauacua

SEQ ID NO: 1341446 - RNA, 17 nt, Human
ugacuuuuugcauuuaa

SEQ ID NO: 1341447 - RNA, 23 nt, Human
ugacuuuuugcauuuaaaacaga

SEQ ID NO: 1341448 - RNA, 12 nt, Human
ugagaaaacaug

SEQ ID NO: 1341449 - RNA, 19 nt, Human
ugagaaaagcuuugaaccc

SEQ ID NO: 1341450 - RNA, 20 nt, Human
ugagaaacaacaauuucuac

SEQ ID NO: 1341451 - RNA, 17 nt, Human
ugacuuugcuugcuuug

SEQ ID NO: 1341452 - RNA, 13 nt, Human
ugacuuuucugua

SEQ ID NO: 1341453 - RNA, 19 nt, Human
ugacuuuucuguaauucag

SEQ ID NO: 1341454 - RNA, 22 nt, Human
ugacuuuucuguaauucagguu

SEQ ID NO: 1341455 - RNA, 14 nt, Human
ugacuuuugugaaa

SEQ ID NO: 1341456 - RNA, 14 nt, Human
ugacuuuuugcauu

SEQ ID NO: 1341457 - RNA, 12 nt, Human
ugagacauccag

SEQ ID NO: 1341458 - RNA, 10 nt, Human
ugagacaucc

SEQ ID NO: 1341459 - RNA, 13 nt, Human
ugagaaaucuaaa

SEQ ID NO: 1341460 - RNA, 21 nt, Human
ugagaaauauggacacuuaau

SEQ ID NO: 1341461 - RNA, 22 nt, Human
ugagaaauagcuuaugaaaaga

SEQ ID NO: 1341462 - RNA, 21 nt, Human
ugagaaagucagauucuugca

SEQ ID NO: 1341463 - RNA, 20 nt, Human
ugagaaagucagauucuugc

SEQ ID NO: 1341464 - RNA, 21 nt, Human
ugagaaagucuuauuuauuca

SEQ ID NO: 1341465 - RNA, 15 nt, Human
ugagaaauauggaca

SEQ ID NO: 1341466 - RNA, 17 nt, Human
ugagaaauauggacacu

SEQ ID NO: 1341467 - RNA, 19 nt, Human
ugagaaacuuaaauguuau

SEQ ID NO: 1341468 - RNA, 14 nt, Human
ugagaaagccuucu

SEQ ID NO: 1341469 - RNA, 16 nt, Human
ugagaaagccuucuuu

SEQ ID NO: 1341470 - RNA, 19 nt, Human
ugagaaaggguagaauucu

SEQ ID NO: 1341471 - RNA, 18 nt, Human
ugagaaacuuaaauguua

SEQ ID NO: 1341472 - RNA, 13 nt, Human
ugagacauccagc

SEQ ID NO: 1341473 - RNA, 12 nt, Human
ugagaccugccc

SEQ ID NO: 1341474 - RNA, 13 nt, Human
ugagaccugcccc

SEQ ID NO: 1341475 - RNA, 14 nt, Human
ugagaccugccccu

SEQ ID NO: 1341476 - RNA, 15 nt, Human
ugagaccugccccuc

SEQ ID NO: 1341477 - RNA, 22 nt, Human
ugagaccugccccuccucucug

SEQ ID NO: 1341478 - RNA, 19 nt, Human
ugagaccuuccuuuuacuu

SEQ ID NO: 1341479 - RNA, 19 nt, Human
ugagaggcugucuguugua

SEQ ID NO: 1341480 - RNA, 20 nt, Human
ugagcagggccggggaacug

SEQ ID NO: 1341481 - RNA, 14 nt, Human
ugagcagggccggg

SEQ ID NO: 1341482 - RNA, 16 nt, Human
ugagcagggccgggga

SEQ ID NO: 1341483 - RNA, 22 nt, Human
ugagcaggccacacuucaaacu

SEQ ID NO: 1341484 - RNA, 12 nt, Human
ugagcagggccg

SEQ ID NO: 1341485 - RNA, 16 nt, Human
ugagauaguuuucauc

SEQ ID NO: 1341486 - RNA, 17 nt, Human
ugagcagcgagccugcu

SEQ ID NO: 1341487 - RNA, 22 nt, Human
ugagagggcucgaggggugggc

SEQ ID NO: 1341488 - RNA, 22 nt, Human
ugagauaaugugauauuauaca

SEQ ID NO: 1341489 - RNA, 14 nt, Human
ugagauacauacag

SEQ ID NO: 1341490 - RNA, 15 nt, Human
ugagauacauacaga

SEQ ID NO: 1341491 - RNA, 21 nt, Human
ugagauaccagcgaggaggcu

SEQ ID NO: 1341492 - RNA, 20 nt, Human
ugagauaccagcgaggaggc

SEQ ID NO: 1341493 - RNA, 21 nt, Human
ugagauacauacagaauuacu

SEQ ID NO: 1341494 - RNA, 15 nt, Human
ugagauaguuuucau

SEQ ID NO: 1341495 - RNA, 15 nt, Human
ugaggcacuggcgag

SEQ ID NO: 1341496 - RNA, 12 nt, Human
ugaggcaaaaga

SEQ ID NO: 1341497 - RNA, 17 nt, Human
ugaggcacaugucagca

SEQ ID NO: 1341498 - RNA, 20 nt, Human
ugaggcacaugucagcaagu

SEQ ID NO: 1341499 - RNA, 21 nt, Human
ugaggcagcagugugaggcca

SEQ ID NO: 1341500 - RNA, 11 nt, Human
ugaggccugga

SEQ ID NO: 1341501 - RNA, 12 nt, Human
ugaggccuggac

SEQ ID NO: 1341502 - RNA, 14 nt, Human
ugaggccuggacuu

SEQ ID NO: 1341503 - RNA, 17 nt, Human
ugaggccuggacuuucc

SEQ ID NO: 1341504 - RNA, 19 nt, Human
ugaggccuggacuuuccug

SEQ ID NO: 1341505 - RNA, 20 nt, Human
ugaggccuggacuuuccugc

SEQ ID NO: 1341506 - RNA, 23 nt, Human
ugaggccuggacuuuccugcaac

SEQ ID NO: 1341507 - RNA, 23 nt, Human
ugaggcgccccaacccguggagg

SEQ ID NO: 1341508 - RNA, 12 nt, Human
ugaggccugggc

SEQ ID NO: 1341509 - RNA, 13 nt, Human
ugaggccugggcc

SEQ ID NO: 1341510 - RNA, 22 nt, Human
ugaggccugggccgcugccacg

SEQ ID NO: 1341511 - RNA, 20 nt, Human
ugaggcgagaagggcugcuu

SEQ ID NO: 1341512 - RNA, 21 nt, Human
ugaggcgagaagggcugcuuc

SEQ ID NO: 1341513 - RNA, 16 nt, Human
ugaggugccuguccca

SEQ ID NO: 1341514 - RNA, 16 nt, Human
ugaggugcacugggag

SEQ ID NO: 1341515 - RNA, 12 nt, Human
ugaggugcccag

SEQ ID NO: 1341516 - RNA, 13 nt, Human
ugaggugcccagg

SEQ ID NO: 1341517 - RNA, 14 nt, Human
ugaggugcccagga

SEQ ID NO: 1341518 - RNA, 15 nt, Human
ugaggugcccaggag

SEQ ID NO: 1341519 - RNA, 16 nt, Human
ugaggugcccaggaga

SEQ ID NO: 1341520 - RNA, 17 nt, Human
ugaggugcccaggagaa

SEQ ID NO: 1341521 - RNA, 18 nt, Human
ugaggugcccaggagaag

SEQ ID NO: 1341522 - RNA, 14 nt, Human
ugaggugccugucc

SEQ ID NO: 1341523 - RNA, 15 nt, Human
ugaggugccuguccc

SEQ ID NO: 1341524 - RNA, 20 nt, Human
ugagucccaggcugagccuc

SEQ ID NO: 1341525 - RNA, 21 nt, Human
ugagucccaggcugagccuca

SEQ ID NO: 1341526 - RNA, 20 nt, Human
ugaguccccauugaggcuug

SEQ ID NO: 1341527 - RNA, 22 nt, Human
ugaguccccauugaggcuuggu

SEQ ID NO: 1341528 - RNA, 15 nt, Human
ugagguguccaacug

SEQ ID NO: 1341529 - RNA, 12 nt, Human
ugaggcuguccu

SEQ ID NO: 1341530 - RNA, 13 nt, Human
ugaggcuguccug

SEQ ID NO: 1341531 - RNA, 14 nt, Human
ugaggcuguccugu

SEQ ID NO: 1341532 - RNA, 22 nt, Human
ugaggucagcacaucucaacag

SEQ ID NO: 1341533 - RNA, 15 nt, Human
ugaggugcacuggga

SEQ ID NO: 1341534 - RNA, 19 nt, Human
ugaggugcacugggaggcu

SEQ ID NO: 1341535 - RNA, 17 nt, Human
ugaggaucagaguaauc

SEQ ID NO: 1341536 - RNA, 13 nt, Human
ugaggaucagagu

SEQ ID NO: 1341537 - RNA, 19 nt, Human
ugaggaucagaguaaucca

SEQ ID NO: 1341538 - RNA, 20 nt, Human
ugaggauacgacaguacacu

SEQ ID NO: 1341539 - RNA, 22 nt, Human
ugaggauguaaagaucaauaaa

SEQ ID NO: 1341540 - RNA, 14 nt, Human
ugaggcaaaagaag

SEQ ID NO: 1341541 - RNA, 23 nt, Human
ugagcuuaagaauuuugagcagg

SEQ ID NO: 1341542 - RNA, 21 nt, Human
ugagcuuaaaauacaagacug

SEQ ID NO: 1341543 - RNA, 22 nt, Human
ugagcuuaaaauacaagacugc

SEQ ID NO: 1341544 - RNA, 16 nt, Human
ugagcuuaaaauacaa

SEQ ID NO: 1341545 - RNA, 17 nt, Human
ugagcuuaaaauacaag

SEQ ID NO: 1341546 - RNA, 19 nt, Human
ugagcuuaaaauacaagac

SEQ ID NO: 1341547 - RNA, 20 nt, Human
ugagcuuaaaauacaagacu

SEQ ID NO: 1341548 - RNA, 13 nt, Human
ugaggagucugag

SEQ ID NO: 1341549 - RNA, 14 nt, Human
ugaggagucugagg

SEQ ID NO: 1341550 - RNA, 15 nt, Human
ugaggagucugaggu

SEQ ID NO: 1341551 - RNA, 16 nt, Human
ugaggagucugagguc

SEQ ID NO: 1341552 - RNA, 17 nt, Human
ugaggagucugaggucc

SEQ ID NO: 1341553 - RNA, 22 nt, Human
ugaggagucugagguccugagc

SEQ ID NO: 1341554 - RNA, 21 nt, Human
ugaggagucugagguccugag

SEQ ID NO: 1341555 - RNA, 15 nt, Human
ugagcagucaggaaa

SEQ ID NO: 1341556 - RNA, 16 nt, Human
ugagcuauugcuguuc

SEQ ID NO: 1341557 - RNA, 15 nt, Human
ugagcuauuucaucu

SEQ ID NO: 1341558 - RNA, 17 nt, Human
ugagcucacaaggcagc

SEQ ID NO: 1341559 - RNA, 18 nt, Human
ugagcucacaaggcagca

SEQ ID NO: 1341560 - RNA, 19 nt, Human
ugagcucacaaggcagcaa

SEQ ID NO: 1341561 - RNA, 11 nt, Human
ugagcucagcc

SEQ ID NO: 1341562 - RNA, 12 nt, Human
ugagcucagccc

SEQ ID NO: 1341563 - RNA, 20 nt, Human
ugagcucacaaggcagcaag

SEQ ID NO: 1341564 - RNA, 22 nt, Human
ugagcucacaaggcagcaaggc

SEQ ID NO: 1341565 - RNA, 23 nt, Human
ugagcucagaaaauaucccuccu

SEQ ID NO: 1341566 - RNA, 23 nt, Human
ugagcucacaaggcagcaaggcc

SEQ ID NO: 1341567 - RNA, 20 nt, Human
ugagcucagcccuggugggc

SEQ ID NO: 1341568 - RNA, 14 nt, Human
ugagcucagcgugg

SEQ ID NO: 1341569 - RNA, 18 nt, Human
ugagcugaaggugaaaca

SEQ ID NO: 1341570 - RNA, 15 nt, Human
ugagcugaccagccg

SEQ ID NO: 1341571 - RNA, 24 nt, Human
ugagcugaccagccgugagcaugu

SEQ ID NO: 1341572 - RNA, 14 nt, Human
ugagcugagcaggc

SEQ ID NO: 1341573 - RNA, 14 nt, Human
ugagcugaggcagc

SEQ ID NO: 1341574 - RNA, 14 nt, Human
ucuuauaauuuaaa

SEQ ID NO: 1341575 - RNA, 13 nt, Human
ucuuauaauuuaa

SEQ ID NO: 1341576 - RNA, 20 nt, Human
ucuuagcuaucauugcuucc

SEQ ID NO: 1341577 - RNA, 21 nt, Human
ucuuagcuaucauugcuuccu

SEQ ID NO: 1341578 - RNA, 15 nt, Human
ucuuagcucaaugag

SEQ ID NO: 1341579 - RNA, 16 nt, Human
ucuuagcucaaugagc

SEQ ID NO: 1341580 - RNA, 18 nt, Human
ucuuagcucaaugagcau

SEQ ID NO: 1341581 - RNA, 19 nt, Human
ucuuagcucaaugagcaug

SEQ ID NO: 1341582 - RNA, 21 nt, Human
ucuuagcucaaugagcauguu

SEQ ID NO: 1341583 - RNA, 16 nt, Human
ucugugugaaacuuuc

SEQ ID NO: 1341584 - RNA, 21 nt, Human
ucugugugaaacuuucauucc

SEQ ID NO: 1341585 - RNA, 19 nt, Human
ucugugugaaacuuucauu

SEQ ID NO: 1341586 - RNA, 14 nt, Human
ucugugugcacaaa

SEQ ID NO: 1341587 - RNA, 21 nt, Human
ucugugugcacaaauauuuau

SEQ ID NO: 1341588 - RNA, 12 nt, Human
ucuuagauucuc

SEQ ID NO: 1341589 - RNA, 21 nt, Human
ucuuagauucucugugucuaa

SEQ ID NO: 1341590 - RNA, 16 nt, Human
ucuuagcagcuuccag

SEQ ID NO: 1341591 - RNA, 22 nt, Human
ucuuagcucaaugagcauguuu

SEQ ID NO: 1341592 - RNA, 17 nt, Human
ucuuagucuagguccuu

SEQ ID NO: 1341593 - RNA, 16 nt, Human
ucuuauccuccaccgu

SEQ ID NO: 1341594 - RNA, 14 nt, Human
ucuuaugcaauuuc

SEQ ID NO: 1341595 - RNA, 14 nt, Human
ucuucagaggcccu

SEQ ID NO: 1341596 - RNA, 15 nt, Human
ucuucagaggcccuc

SEQ ID NO: 1341597 - RNA, 19 nt, Human
ucuucaguuaagccuuugg

SEQ ID NO: 1341598 - RNA, 20 nt, Human
ucuucaguuaagccuuugga

SEQ ID NO: 1341599 - RNA, 22 nt, Human
ucuucaguuaagccuuuggaaa

SEQ ID NO: 1341600 - RNA, 15 nt, Human
ucuucaguugucucu

SEQ ID NO: 1341601 - RNA, 21 nt, Human
ucuucaguugucucugaugca

SEQ ID NO: 1341602 - RNA, 16 nt, Human
ucuucaguugucucug

SEQ ID NO: 1341603 - RNA, 17 nt, Human
ucuucaguugucucuga

SEQ ID NO: 1341604 - RNA, 16 nt, Human
ucuucauggugacacu

SEQ ID NO: 1341605 - RNA, 16 nt, Human
ucuucauguuucagga

SEQ ID NO: 1341606 - RNA, 17 nt, Human
ucuucauggugacacuc

SEQ ID NO: 1341607 - RNA, 20 nt, Human
ucuucauaacaauuuuagga

SEQ ID NO: 1341608 - RNA, 19 nt, Human
ucuugccaaauauaaauaa

SEQ ID NO: 1341609 - RNA, 23 nt, Human
ucuugcauggcaaggacugcagg

SEQ ID NO: 1341610 - RNA, 12 nt, Human
ucuugcauguaa

SEQ ID NO: 1341611 - RNA, 15 nt, Human
ucuugcauuaugcaa

SEQ ID NO: 1341612 - RNA, 17 nt, Human
ucuugcauuaugcaauu

SEQ ID NO: 1341613 - RNA, 17 nt, Human
ucuugcccgcucaggcu

SEQ ID NO: 1341614 - RNA, 16 nt, Human
ucuugccacugccucu

SEQ ID NO: 1341615 - RNA, 17 nt, Human
ucuugccacugccucuu

SEQ ID NO: 1341616 - RNA, 16 nt, Human
ucuuguaauuuggauc

SEQ ID NO: 1341617 - RNA, 13 nt, Human
ucuuguaauuuua

SEQ ID NO: 1341618 - RNA, 11 nt, Human
ucuuguaauuu

SEQ ID NO: 1341619 - RNA, 19 nt, Human
ucuuguaauuuuacacgcu

SEQ ID NO: 1341620 - RNA, 15 nt, Human
ucuuguaauuuuaca

SEQ ID NO: 1341621 - RNA, 21 nt, Human
ucuuguauaagauccuagauc

SEQ ID NO: 1341622 - RNA, 20 nt, Human
ucuuguauaagauccuagau

SEQ ID NO: 1341623 - RNA, 12 nt, Human
ucuugucuauaa

SEQ ID NO: 1341624 - RNA, 13 nt, Human
ucuugucuauaaa

SEQ ID NO: 1341625 - RNA, 16 nt, Human
ucuugucuauaaagca

SEQ ID NO: 1341626 - RNA, 21 nt, Human
ucuugaaauuaagaaggcaaa

SEQ ID NO: 1341627 - RNA, 22 nt, Human
ucuugaaauuaagaaggcaaaa

SEQ ID NO: 1341628 - RNA, 14 nt, Human
ucuugaaauuaaga

SEQ ID NO: 1341629 - RNA, 20 nt, Human
ucuugaaauuaagaaggcaa

SEQ ID NO: 1341630 - RNA, 16 nt, Human
ucuucuuggucucagu

SEQ ID NO: 1341631 - RNA, 23 nt, Human
ucuucuuggccaugggaggccuu

SEQ ID NO: 1341632 - RNA, 19 nt, Human
ucuucuuggccaugggagg

SEQ ID NO: 1341633 - RNA, 17 nt, Human
ucuucuuucugucuuua

SEQ ID NO: 1341634 - RNA, 21 nt, Human
ucuucuuuuaaaccauuuucu

SEQ ID NO: 1341635 - RNA, 22 nt, Human
ucuucuuuuaaaccauuuucuu

SEQ ID NO: 1341636 - RNA, 15 nt, Human
ucuucuuuugugaag

SEQ ID NO: 1341637 - RNA, 17 nt, Human
ucuucgacuguuguuau

SEQ ID NO: 1341638 - RNA, 15 nt, Human
ucuucgacuguuguu

SEQ ID NO: 1341639 - RNA, 14 nt, Human
ucuucgacuguugu

SEQ ID NO: 1341640 - RNA, 22 nt, Human
ucuucgacuguuguuaucuguu

SEQ ID NO: 1341641 - RNA, 13 nt, Human
ucuuccuuuguaa

SEQ ID NO: 1341642 - RNA, 16 nt, Human
ucuuccuuuguaaaaa

SEQ ID NO: 1341643 - RNA, 10 nt, Human
ucuuccuuuu

SEQ ID NO: 1341644 - RNA, 14 nt, Human
ucuuccuuuuauca

SEQ ID NO: 1341645 - RNA, 23 nt, Human
ucuuccuugaagaacugcaggcc

SEQ ID NO: 1341646 - RNA, 15 nt, Human
ucuuccuuuucacug

SEQ ID NO: 1341647 - RNA, 18 nt, Human
ucuuccuuuucacugcug

SEQ ID NO: 1341648 - RNA, 17 nt, Human
ucuuuccacagaagcuc

SEQ ID NO: 1341649 - RNA, 15 nt, Human
ucuuguguguaugca

SEQ ID NO: 1341650 - RNA, 21 nt, Human
ucuuguguguaugcacaugaa

SEQ ID NO: 1341651 - RNA, 19 nt, Human
ucuuuccacagaagcucca

SEQ ID NO: 1341652 - RNA, 22 nt, Human
ucuuguguguaugcacaugaac

SEQ ID NO: 1341653 - RNA, 13 nt, Human
ucuuuccauuugc

SEQ ID NO: 1341654 - RNA, 19 nt, Human
ucuuuccaaccggcuuugu

SEQ ID NO: 1341655 - RNA, 14 nt, Human
ucuuuccauuugca

SEQ ID NO: 1341656 - RNA, 16 nt, Human
ucuuuccauuugcauu

SEQ ID NO: 1341657 - RNA, 17 nt, Human
ucuuuccauuugcauuu

SEQ ID NO: 1341658 - RNA, 22 nt, Human
ucuuuccauuugcauuuguuua

SEQ ID NO: 1341659 - RNA, 18 nt, Human
ucuuucccauggggaggg

SEQ ID NO: 1341660 - RNA, 16 nt, Human
ucuuugaauaaauguc

SEQ ID NO: 1341661 - RNA, 17 nt, Human
ucuuugaauaaauguca

SEQ ID NO: 1341662 - RNA, 21 nt, Human
ucuuugaauaaaugucacuuu

SEQ ID NO: 1341663 - RNA, 20 nt, Human
ucuuugaauaaaugucacuu

SEQ ID NO: 1341664 - RNA, 15 nt, Human
ucuugucuauaaagc

SEQ ID NO: 1341665 - RNA, 22 nt, Human
ucuugugcacuggcaccaagug

SEQ ID NO: 1341666 - RNA, 14 nt, Human
ucuugugcacuggc

SEQ ID NO: 1341667 - RNA, 22 nt, Human
ucuuugccacccucaugcugug

SEQ ID NO: 1341668 - RNA, 21 nt, Human
ucuuugccacccucaugcugu

SEQ ID NO: 1341669 - RNA, 21 nt, Human
ucuuugacaauugggagcugc

SEQ ID NO: 1341670 - RNA, 12 nt, Human
ucuuugagaggg

SEQ ID NO: 1341671 - RNA, 12 nt, Human
ucuuugccucaa

SEQ ID NO: 1341672 - RNA, 13 nt, Human
ucuuuucauacau

SEQ ID NO: 1341673 - RNA, 23 nt, Human
ucuuuucauacauuuucuaagaa

SEQ ID NO: 1341674 - RNA, 15 nt, Human
ugaaacacuuugcau

SEQ ID NO: 1341675 - RNA, 18 nt, Human
ugaaaaccacauuggaga

SEQ ID NO: 1341676 - RNA, 20 nt, Human
ugaaaauuaggauuucauga

SEQ ID NO: 1341677 - RNA, 13 nt, Human
ugaaaauuauuua

SEQ ID NO: 1341678 - RNA, 17 nt, Human
ugaaaauuauuuaaacc

SEQ ID NO: 1341679 - RNA, 14 nt, Human
ugaaaauuauuuaa

SEQ ID NO: 1341680 - RNA, 21 nt, Human
ucuuuuuacccauuuguucau

SEQ ID NO: 1341681 - RNA, 19 nt, Human
ucuuuuuaccuuucauaca

SEQ ID NO: 1341682 - RNA, 14 nt, Human
ucuuuuuaaaguuc

SEQ ID NO: 1341683 - RNA, 18 nt, Human
ucuuuuuaaaguucaaac

SEQ ID NO: 1341684 - RNA, 20 nt, Human
ucuuuuguucgcauggucac

SEQ ID NO: 1341685 - RNA, 12 nt, Human
ucuuuuguauua

SEQ ID NO: 1341686 - RNA, 14 nt, Human
ucuuuucauacauu

SEQ ID NO: 1341687 - RNA, 19 nt, Human
ucuuuucccacuguuuaag

SEQ ID NO: 1341688 - RNA, 16 nt, Human
ucuuuucccauuuauc

SEQ ID NO: 1341689 - RNA, 19 nt, Human
ucuuuucccauuuaucuaa

SEQ ID NO: 1341690 - RNA, 20 nt, Human
ucuuuucccauuuaucuaaa

SEQ ID NO: 1341691 - RNA, 21 nt, Human
ucuuuucccauuuaucuaaau

SEQ ID NO: 1341692 - RNA, 19 nt, Human
ucuuuucccccauuaauca

SEQ ID NO: 1341693 - RNA, 24 nt, Human
ucuuuucccccuuugugcacauuu

SEQ ID NO: 1341694 - RNA, 16 nt, Human
ugaaaacacugugcac

SEQ ID NO: 1341695 - RNA, 18 nt, Human
ugaaaacacugugcacau

SEQ ID NO: 1341696 - RNA, 14 nt, Human
ugaaaacagaaugu

SEQ ID NO: 1341697 - RNA, 22 nt, Human
ucuggagcccacuguacuugcu

SEQ ID NO: 1341698 - RNA, 16 nt, Human
ucuggagcccacugua

SEQ ID NO: 1341699 - RNA, 12 nt, Human
ucuggagcccac

SEQ ID NO: 1341700 - RNA, 15 nt, Human
ucuggagcauuucuc

SEQ ID NO: 1341701 - RNA, 14 nt, Human
ucuggagccagccg

SEQ ID NO: 1341702 - RNA, 22 nt, Human
ucuggagccagccgagcaggag

SEQ ID NO: 1341703 - RNA, 18 nt, Human
ucuggcugguagagcagg

SEQ ID NO: 1341704 - RNA, 12 nt, Human
ucuggcuggugu

SEQ ID NO: 1341705 - RNA, 13 nt, Human
ucuggcugguguu

SEQ ID NO: 1341706 - RNA, 17 nt, Human
ucuggcugguguuaaca

SEQ ID NO: 1341707 - RNA, 18 nt, Human
ucuggcugguguuaacag

SEQ ID NO: 1341708 - RNA, 20 nt, Human
ucuggcugguguuaacagaa

SEQ ID NO: 1341709 - RNA, 22 nt, Human
ucuggcuguaaggcucuagauc

SEQ ID NO: 1341710 - RNA, 16 nt, Human
ucuggcuguaaggcuc

SEQ ID NO: 1341711 - RNA, 18 nt, Human
ucuggcuguaaggcucua

SEQ ID NO: 1341712 - RNA, 21 nt, Human
ucuggcuguaaggcucuagau

SEQ ID NO: 1341713 - RNA, 15 nt, Human
ucuggcuucuggcca

SEQ ID NO: 1341714 - RNA, 18 nt, Human
ucuggcuucuggccagga

SEQ ID NO: 1341715 - RNA, 19 nt, Human
ucuggcuucuggccaggaa

SEQ ID NO: 1341716 - RNA, 22 nt, Human
ucuguaagaaaccuacugccca

SEQ ID NO: 1341717 - RNA, 14 nt, Human
ucuguaagaaaccu

SEQ ID NO: 1341718 - RNA, 20 nt, Human
ucuguaagaaaccuacugcc

SEQ ID NO: 1341719 - RNA, 16 nt, Human
ucuguaaaucuacaca

SEQ ID NO: 1341720 - RNA, 19 nt, Human
ucuguaaacuguguauucc

SEQ ID NO: 1341721 - RNA, 22 nt, Human
ucuguaaacuguguauuccaag

SEQ ID NO: 1341722 - RNA, 19 nt, Human
ucuguaaagcuaaaauaaa

SEQ ID NO: 1341723 - RNA, 13 nt, Human
ucuguaaagcuaa

SEQ ID NO: 1341724 - RNA, 12 nt, Human
ucuguaaacugu

SEQ ID NO: 1341725 - RNA, 13 nt, Human
ucuguaaacugug

SEQ ID NO: 1341726 - RNA, 14 nt, Human
ucuguaaacugugu

SEQ ID NO: 1341727 - RNA, 15 nt, Human
ucuguaaacugugua

SEQ ID NO: 1341728 - RNA, 16 nt, Human
ucuguaaacuguguau

SEQ ID NO: 1341729 - RNA, 20 nt, Human
ucuggcuucuggccaggaag

SEQ ID NO: 1341730 - RNA, 17 nt, Human
ucuggugaagcucacuu

SEQ ID NO: 1341731 - RNA, 20 nt, Human
ucuguaauucagguuuuucc

SEQ ID NO: 1341732 - RNA, 12 nt, Human
ucuguaauugca

SEQ ID NO: 1341733 - RNA, 13 nt, Human
ucuguaauugcaa

SEQ ID NO: 1341734 - RNA, 14 nt, Human
ucuguaauugcaaa

SEQ ID NO: 1341735 - RNA, 17 nt, Human
ucuguaauuguguguga

SEQ ID NO: 1341736 - RNA, 13 nt, Human
ucuguaauugugu

SEQ ID NO: 1341737 - RNA, 13 nt, Human
ucuguccucagcc

SEQ ID NO: 1341738 - RNA, 14 nt, Human
ucuguccucagccu

SEQ ID NO: 1341739 - RNA, 15 nt, Human
ucuguccucagccuu

SEQ ID NO: 1341740 - RNA, 19 nt, Human
ucuguccucagccuugcca

SEQ ID NO: 1341741 - RNA, 21 nt, Human
ucuguccucagccuugccaga

SEQ ID NO: 1341742 - RNA, 23 nt, Human
ucuguccucagccuugccagaga

SEQ ID NO: 1341743 - RNA, 17 nt, Human
ucugucgcccaugcugg

SEQ ID NO: 1341744 - RNA, 18 nt, Human
ucuguccugaaggccuga

SEQ ID NO: 1341745 - RNA, 15 nt, Human
ucugucuacuugcuc

SEQ ID NO: 1341746 - RNA, 18 nt, Human
ucugucuacuugcucagg

SEQ ID NO: 1341747 - RNA, 23 nt, Human
ucugucuacuugcucagguacuu

SEQ ID NO: 1341748 - RNA, 14 nt, Human
ucugucucagucca

SEQ ID NO: 1341749 - RNA, 13 nt, Human
ucugucucaucca

SEQ ID NO: 1341750 - RNA, 21 nt, Human
ucugucucauccaucaucaug

SEQ ID NO: 1341751 - RNA, 17 nt, Human
ucugucucauccaucau

SEQ ID NO: 1341752 - RNA, 14 nt, Human
ucuggaauuugaaa

SEQ ID NO: 1341753 - RNA, 18 nt, Human
ucuggacagccccacccu

SEQ ID NO: 1341754 - RNA, 19 nt, Human
ucuggacagccccacccug

SEQ ID NO: 1341755 - RNA, 23 nt, Human
ucugcuggaguuucauguacaag

SEQ ID NO: 1341756 - RNA, 19 nt, Human
ucugcuggaguuucaugua

SEQ ID NO: 1341757 - RNA, 15 nt, Human
ucuggaauguaauca

SEQ ID NO: 1341758 - RNA, 16 nt, Human
ucuggaauguaaucaa

SEQ ID NO: 1341759 - RNA, 18 nt, Human
ucuggaauguaaucaaug

SEQ ID NO: 1341760 - RNA, 22 nt, Human
ucuggaauguaaucaauguuuc

SEQ ID NO: 1341761 - RNA, 19 nt, Human
ucugcugccucccucugcu

SEQ ID NO: 1341762 - RNA, 18 nt, Human
ucugcugcugucccuccc

SEQ ID NO: 1341763 - RNA, 13 nt, Human
ucugcuggaguuu

SEQ ID NO: 1341764 - RNA, 15 nt, Human
ucuggacuccucugu

SEQ ID NO: 1341765 - RNA, 16 nt, Human
ucuggacuccucuguc

SEQ ID NO: 1341766 - RNA, 18 nt, Human
ucuggacuccucugucca

SEQ ID NO: 1341767 - RNA, 20 nt, Human
ucuggacagccccacccugg

SEQ ID NO: 1341768 - RNA, 19 nt, Human
ucuggacaggauguguuug

SEQ ID NO: 1341769 - RNA, 14 nt, Human
ucuggaccucuggg

SEQ ID NO: 1341770 - RNA, 15 nt, Human
ucuggaccucugggu

SEQ ID NO: 1341771 - RNA, 22 nt, Human
ucuggacuccucuguccaggca

SEQ ID NO: 1341772 - RNA, 21 nt, Human
ucuggagaaagggcccugggc

SEQ ID NO: 1341773 - RNA, 20 nt, Human
ucugcucuuucucugccagu

SEQ ID NO: 1341774 - RNA, 13 nt, Human
ucugcugaaggaa

SEQ ID NO: 1341775 - RNA, 18 nt, Human
ucugcucuuucucugcca

SEQ ID NO: 1341776 - RNA, 19 nt, Human
ucugcucuuucucugccag

SEQ ID NO: 1341777 - RNA, 14 nt, Human
ucugcucuuucucu

SEQ ID NO: 1341778 - RNA, 15 nt, Human
ucugcucuuucucug

SEQ ID NO: 1341779 - RNA, 16 nt, Human
ucugcucuuucucugc

SEQ ID NO: 1341780 - RNA, 17 nt, Human
ucugcucuuucucugcc

SEQ ID NO: 1341781 - RNA, 11 nt, Human
ucugcucugau

SEQ ID NO: 1341782 - RNA, 14 nt, Human
ucugcucugaugca

SEQ ID NO: 1341783 - RNA, 13 nt, Human
ucugcucugaugc

SEQ ID NO: 1341784 - RNA, 16 nt, Human
ucugcucugcguguca

SEQ ID NO: 1341785 - RNA, 21 nt, Human
ucugcucugcgugucaccugu

SEQ ID NO: 1341786 - RNA, 18 nt, Human
ucugcucugguuguuucu

SEQ ID NO: 1341787 - RNA, 21 nt, Human
ucugcucugguuguuucuguu

SEQ ID NO: 1341788 - RNA, 18 nt, Human
ucugccugccagcugcac

SEQ ID NO: 1341789 - RNA, 21 nt, Human
ucugccugccagcugcacuga

SEQ ID NO: 1341790 - RNA, 22 nt, Human
ucugccugccagcugcacugau

SEQ ID NO: 1341791 - RNA, 12 nt, Human
ucugcuccugga

SEQ ID NO: 1341792 - RNA, 15 nt, Human
ucugcuccuucccca

SEQ ID NO: 1341793 - RNA, 12 nt, Human
ucugcuccuucc

SEQ ID NO: 1341794 - RNA, 22 nt, Human
ucugcccaccucagccucccaa

SEQ ID NO: 1341795 - RNA, 21 nt, Human
ucugcagucucuauaccaaua

SEQ ID NO: 1341796 - RNA, 20 nt, Human
ucugcagucucuauaccaau

SEQ ID NO: 1341797 - RNA, 18 nt, Human
ucugcagucucuauacca

SEQ ID NO: 1341798 - RNA, 14 nt, Human
ucugcagucucuau

SEQ ID NO: 1341799 - RNA, 18 nt, Human
ucugcacuauaugcaaac

SEQ ID NO: 1341800 - RNA, 15 nt, Human
ucugcauauguugaa

SEQ ID NO: 1341801 - RNA, 16 nt, Human
ucugcauauguugaau

SEQ ID NO: 1341802 - RNA, 18 nt, Human
ucugcauauguugaauac

SEQ ID NO: 1341803 - RNA, 19 nt, Human
ucugcauauguugaauacu

SEQ ID NO: 1341804 - RNA, 21 nt, Human
ucugcauauguugaauacuuu

SEQ ID NO: 1341805 - RNA, 12 nt, Human
ucugcccaaccc

SEQ ID NO: 1341806 - RNA, 15 nt, Human
ucugccuccucuuca

SEQ ID NO: 1341807 - RNA, 15 nt, Human
ucugccucucuugua

SEQ ID NO: 1341808 - RNA, 15 nt, Human
ucugccucucuagga

SEQ ID NO: 1341809 - RNA, 21 nt, Human
ucugccuacagaacuucagaa

SEQ ID NO: 1341810 - RNA, 22 nt, Human
ucugccuccccuuaaaggggag

SEQ ID NO: 1341811 - RNA, 14 nt, Human
ucugccucuucugg

SEQ ID NO: 1341812 - RNA, 15 nt, Human
ucugccucuucuggg

SEQ ID NO: 1341813 - RNA, 17 nt, Human
ucugccucuucugggag

SEQ ID NO: 1341814 - RNA, 18 nt, Human
ucugccucuucugggagg

SEQ ID NO: 1341815 - RNA, 19 nt, Human
ucugccucuucugggaggg

SEQ ID NO: 1341816 - RNA, 16 nt, Human
ucugccugccagcugc

SEQ ID NO: 1341817 - RNA, 17 nt, Human
ucugccugccagcugca

SEQ ID NO: 1341818 - RNA, 13 nt, Human
ucucauccugcag

SEQ ID NO: 1341819 - RNA, 15 nt, Human
ucucaucaacugaau

SEQ ID NO: 1341820 - RNA, 17 nt, Human
ucucaucaacugaauga

SEQ ID NO: 1341821 - RNA, 12 nt, Human
ucucauccacau

SEQ ID NO: 1341822 - RNA, 13 nt, Human
ucucauccaucau

SEQ ID NO: 1341823 - RNA, 14 nt, Human
ucucauccaucauc

SEQ ID NO: 1341824 - RNA, 13 nt, Human
ucugagaggcccu

SEQ ID NO: 1341825 - RNA, 14 nt, Human
ucugagaggcccug

SEQ ID NO: 1341826 - RNA, 16 nt, Human
ucugagaggcccugga

SEQ ID NO: 1341827 - RNA, 17 nt, Human
ucugagaggcccuggau

SEQ ID NO: 1341828 - RNA, 18 nt, Human
ucugagaggcccuggauc

SEQ ID NO: 1341829 - RNA, 14 nt, Human
ucugagagucuaga

SEQ ID NO: 1341830 - RNA, 15 nt, Human
ucugagagucuagau

SEQ ID NO: 1341831 - RNA, 16 nt, Human
ucugagagucuagauu

SEQ ID NO: 1341832 - RNA, 17 nt, Human
ucugagagucuagauuc

SEQ ID NO: 1341833 - RNA, 18 nt, Human
ucugagagucuagauucu

SEQ ID NO: 1341834 - RNA, 19 nt, Human
ucugagagucuagauucuc

SEQ ID NO: 1341835 - RNA, 21 nt, Human
ucugagagucuagauucucug

SEQ ID NO: 1341836 - RNA, 22 nt, Human
ucugagagucuagauucucugg

SEQ ID NO: 1341837 - RNA, 21 nt, Human
ucugagcccgguaagagcaaa

SEQ ID NO: 1341838 - RNA, 23 nt, Human
ucugagcccgguaagagcaaaag

SEQ ID NO: 1341839 - RNA, 21 nt, Human
ucugagcgccuccauccaagg

SEQ ID NO: 1341840 - RNA, 14 nt, Human
ucugagcgccucca

SEQ ID NO: 1341841 - RNA, 17 nt, Human
ucugagcuauuucaucu

SEQ ID NO: 1341842 - RNA, 20 nt, Human
ucugagcuauuucaucuauu

SEQ ID NO: 1341843 - RNA, 22 nt, Human
ucugagcuauuucaucuauuuu

SEQ ID NO: 1341844 - RNA, 13 nt, Human
ucugagcuccagc

SEQ ID NO: 1341845 - RNA, 17 nt, Human
ucugauuuguaacccac

SEQ ID NO: 1341846 - RNA, 22 nt, Human
ucugauuuguaacccacugaga

SEQ ID NO: 1341847 - RNA, 13 nt, Human
ucugauuuuagga

SEQ ID NO: 1341848 - RNA, 22 nt, Human
ucugauuuuaggagcuaaggcu

SEQ ID NO: 1341849 - RNA, 24 nt, Human
ucugcaaacaccaacauguuggga

SEQ ID NO: 1341850 - RNA, 14 nt, Human
ucugcaaacugccu

SEQ ID NO: 1341851 - RNA, 15 nt, Human
ucugcaaacugccuu

SEQ ID NO: 1341852 - RNA, 21 nt, Human
ucugcacuacugacauguggg

SEQ ID NO: 1341853 - RNA, 18 nt, Human
ucugcacucccaccugac

SEQ ID NO: 1341854 - RNA, 21 nt, Human
ucugcacucccaccugacaca

SEQ ID NO: 1341855 - RNA, 16 nt, Human
ucugcaguaaaucuuu

SEQ ID NO: 1341856 - RNA, 18 nt, Human
ucugcacuacugacaugu

SEQ ID NO: 1341857 - RNA, 20 nt, Human
ucugcacuacugacaugugg

SEQ ID NO: 1341858 - RNA, 17 nt, Human
ucugcaaggucuuuggu

SEQ ID NO: 1341859 - RNA, 23 nt, Human
ucugcaaguauacuagggagcca

SEQ ID NO: 1341860 - RNA, 22 nt, Human
ucugcaaguauacuagggagcc

SEQ ID NO: 1341861 - RNA, 14 nt, Human
ucugcaauucaaaa

SEQ ID NO: 1341862 - RNA, 16 nt, Human
ucugcaauucaaaagu

SEQ ID NO: 1341863 - RNA, 19 nt, Human
ucugcaauucaaaaguucc

SEQ ID NO: 1341864 - RNA, 21 nt, Human
ucugcaauucaaaaguuccaa

SEQ ID NO: 1341865 - RNA, 17 nt, Human
uccuuaggccucugaga

SEQ ID NO: 1341866 - RNA, 14 nt, Human
uccuuaucaaagga

SEQ ID NO: 1341867 - RNA, 15 nt, Human
uccuuaucaaaggac

SEQ ID NO: 1341868 - RNA, 15 nt, Human
uccuuaccuuuuuau

SEQ ID NO: 1341869 - RNA, 20 nt, Human
uccuuaccuuuuuauuugca

SEQ ID NO: 1341870 - RNA, 16 nt, Human
uccuuacucccaggca

SEQ ID NO: 1341871 - RNA, 14 nt, Human
uccuuacuccugug

SEQ ID NO: 1341872 - RNA, 16 nt, Human
uccuuacuccuguggg

SEQ ID NO: 1341873 - RNA, 17 nt, Human
uccuuacuccuguggga

SEQ ID NO: 1341874 - RNA, 20 nt, Human
uccuuacuccugugggagcc

SEQ ID NO: 1341875 - RNA, 22 nt, Human
uccuuacuccugugggagccuc

SEQ ID NO: 1341876 - RNA, 23 nt, Human
uccuuacuccugugggagccucg

SEQ ID NO: 1341877 - RNA, 17 nt, Human
uccuuacuuuuuauaua

SEQ ID NO: 1341878 - RNA, 18 nt, Human
uccuuacuuuuuauauau

SEQ ID NO: 1341879 - RNA, 20 nt, Human
uccuuacuuuuuauauauau

SEQ ID NO: 1341880 - RNA, 17 nt, Human
uccuuaucaaaggacac

SEQ ID NO: 1341881 - RNA, 17 nt, Human
uccuuaucgaaacucau

SEQ ID NO: 1341882 - RNA, 17 nt, Human
uccuguccagcuccaac

SEQ ID NO: 1341883 - RNA, 16 nt, Human
uccuguccccugcuac

SEQ ID NO: 1341884 - RNA, 17 nt, Human
uccuguccccugcuaca

SEQ ID NO: 1341885 - RNA, 16 nt, Human
uccugaggcuuuggau

SEQ ID NO: 1341886 - RNA, 17 nt, Human
uccugaggcuuuggauu

SEQ ID NO: 1341887 - RNA, 18 nt, Human
uccugaggcuuuggauuu

SEQ ID NO: 1341888 - RNA, 13 nt, Human
uccuguccagcuc

SEQ ID NO: 1341889 - RNA, 14 nt, Human
uccuguccagcucc

SEQ ID NO: 1341890 - RNA, 15 nt, Human
uccuguccagcucca

SEQ ID NO: 1341891 - RNA, 16 nt, Human
uccuguccagcuccaa

SEQ ID NO: 1341892 - RNA, 23 nt, Human
uccuugcugaaacgcaucuaguu

SEQ ID NO: 1341893 - RNA, 22 nt, Human
uccuugcuuaugacaucacuug

SEQ ID NO: 1341894 - RNA, 18 nt, Human
uccuugaagaacugcagg

SEQ ID NO: 1341895 - RNA, 19 nt, Human
uccuugaagaacugcaggc

SEQ ID NO: 1341896 - RNA, 20 nt, Human
uccuugaagaacugcaggcc

SEQ ID NO: 1341897 - RNA, 20 nt, Human
uccuuugaauccucucucug

SEQ ID NO: 1341898 - RNA, 21 nt, Human
uccuuugaauccucucucugu

SEQ ID NO: 1341899 - RNA, 23 nt, Human
uccuuugggcuucagcugccagu

SEQ ID NO: 1341900 - RNA, 12 nt, Human
uccuuuguaaaa

SEQ ID NO: 1341901 - RNA, 14 nt, Human
uccuuugugaaaaa

SEQ ID NO: 1341902 - RNA, 17 nt, Human
uccuuugugcuuaguua

SEQ ID NO: 1341903 - RNA, 13 nt, Human
uccuuuugacacu

SEQ ID NO: 1341904 - RNA, 14 nt, Human
uccuuuugacacug

SEQ ID NO: 1341905 - RNA, 16 nt, Human
uccuuuugacacugcu

SEQ ID NO: 1341906 - RNA, 18 nt, Human
uccuuuugacacugcucu

SEQ ID NO: 1341907 - RNA, 20 nt, Human
uccuuuugacacugcucuaa

SEQ ID NO: 1341908 - RNA, 22 nt, Human
uccuuuugacacugcucuaaca

SEQ ID NO: 1341909 - RNA, 20 nt, Human
ucgauacugcgacuuucugc

SEQ ID NO: 1341910 - RNA, 22 nt, Human
ucgauacugcgacuuucugccu

SEQ ID NO: 1341911 - RNA, 23 nt, Human
ucgauacugcgacuuucugccug

SEQ ID NO: 1341912 - RNA, 14 nt, Human
ucgaugcaaugaac

SEQ ID NO: 1341913 - RNA, 17 nt, Human
ucgcagccacccugagg

SEQ ID NO: 1341914 - RNA, 18 nt, Human
ucgcagccacccugagga

SEQ ID NO: 1341915 - RNA, 19 nt, Human
ucgcagccacccugaggag

SEQ ID NO: 1341916 - RNA, 20 nt, Human
ucgcagccacccugaggagu

SEQ ID NO: 1341917 - RNA, 23 nt, Human
ucgcagccacccugaggagucug

SEQ ID NO: 1341918 - RNA, 21 nt, Human
ucgcagccacccugaggaguc

SEQ ID NO: 1341919 - RNA, 12 nt, Human
ucgauuagacug

SEQ ID NO: 1341920 - RNA, 13 nt, Human
ucgauuagacugg

SEQ ID NO: 1341921 - RNA, 14 nt, Human
ucgauuagacugga

SEQ ID NO: 1341922 - RNA, 18 nt, Human
ucgauuagacuggacagc

SEQ ID NO: 1341923 - RNA, 22 nt, Human
ucgauuagacuggacagcuugu

SEQ ID NO: 1341924 - RNA, 21 nt, Human
ucgauuagacuggacagcuug

SEQ ID NO: 1341925 - RNA, 13 nt, Human
ucgcagccacccu

SEQ ID NO: 1341926 - RNA, 14 nt, Human
ucgcagccacccug

SEQ ID NO: 1341927 - RNA, 16 nt, Human
ucgcagccacccugag

SEQ ID NO: 1341928 - RNA, 19 nt, Human
ucgcauggucacacacuga

SEQ ID NO: 1341929 - RNA, 20 nt, Human
ucgcauggucacacacugau

SEQ ID NO: 1341930 - RNA, 16 nt, Human
ucgccacacaguauuu

SEQ ID NO: 1341931 - RNA, 16 nt, Human
ucgcccauccccuuga

SEQ ID NO: 1341932 - RNA, 21 nt, Human
ucgcuucuugccucugugcug

SEQ ID NO: 1341933 - RNA, 17 nt, Human
ucggccuccauccugag

SEQ ID NO: 1341934 - RNA, 16 nt, Human
ucggccuccauccuga

SEQ ID NO: 1341935 - RNA, 15 nt, Human
ucggccuccauccug

SEQ ID NO: 1341936 - RNA, 19 nt, Human
ucgcuuuauuggcugagau

SEQ ID NO: 1341937 - RNA, 13 nt, Human
ucggaaaaauaau

SEQ ID NO: 1341938 - RNA, 19 nt, Human
ucggaaaaauaaucaaaag

SEQ ID NO: 1341939 - RNA, 12 nt, Human
ucggaggaagcc

SEQ ID NO: 1341940 - RNA, 13 nt, Human
ucggaggaagccc

SEQ ID NO: 1341941 - RNA, 13 nt, Human
ucuauauuuuaca

SEQ ID NO: 1341942 - RNA, 17 nt, Human
ucuagguuuaugacagu

SEQ ID NO: 1341943 - RNA, 23 nt, Human
ucuagguucuaaaaauugugauc

SEQ ID NO: 1341944 - RNA, 17 nt, Human
ucuagguccccauacuc

SEQ ID NO: 1341945 - RNA, 14 nt, Human
ucuagguucuaaaa

SEQ ID NO: 1341946 - RNA, 15 nt, Human
ucuagguaaauuaca

SEQ ID NO: 1341947 - RNA, 21 nt, Human
ucuagguacgaugacaguguu

SEQ ID NO: 1341948 - RNA, 17 nt, Human
ucuagguaggaaaugug

SEQ ID NO: 1341949 - RNA, 15 nt, Human
ucuagguccccauac

SEQ ID NO: 1341950 - RNA, 21 nt, Human
ucuaggcaguucaaagcagga

SEQ ID NO: 1341951 - RNA, 15 nt, Human
ucuaggcacuguagu

SEQ ID NO: 1341952 - RNA, 21 nt, Human
ucuaggcacuguaguucuaag

SEQ ID NO: 1341953 - RNA, 22 nt, Human
ucuaggcacuguaguucuaaga

SEQ ID NO: 1341954 - RNA, 24 nt, Human
ucuaggcacuguaguucuaagacu

SEQ ID NO: 1341955 - RNA, 18 nt, Human
ucuacuaauuccacaccu

SEQ ID NO: 1341956 - RNA, 20 nt, Human
ucuacucacuuuucccacuc

SEQ ID NO: 1341957 - RNA, 21 nt, Human
ucuacucacuuuucccacucc

SEQ ID NO: 1341958 - RNA, 19 nt, Human
ucuacuaaaaauacaaaaa

SEQ ID NO: 1341959 - RNA, 15 nt, Human
ucuacuaaaaauaca

SEQ ID NO: 1341960 - RNA, 14 nt, Human
ucuacuauuuaugu

SEQ ID NO: 1341961 - RNA, 14 nt, Human
ucuaauuuuuaaga

SEQ ID NO: 1341962 - RNA, 19 nt, Human
ucuacuaaugccucuucau

SEQ ID NO: 1341963 - RNA, 15 nt, Human
ucuacuaauuccaca

SEQ ID NO: 1341964 - RNA, 15 nt, Human
ucuaauuuuuaagaa

SEQ ID NO: 1341965 - RNA, 13 nt, Human
ucuaauugccaug

SEQ ID NO: 1341966 - RNA, 15 nt, Human
ucuaauugccaugua

SEQ ID NO: 1341967 - RNA, 14 nt, Human
ucuaauugccaugu

SEQ ID NO: 1341968 - RNA, 12 nt, Human
ucuaauugcuua

SEQ ID NO: 1341969 - RNA, 13 nt, Human
ucuaauugcuuau

SEQ ID NO: 1341970 - RNA, 14 nt, Human
ucuaauugcuuauu

SEQ ID NO: 1341971 - RNA, 18 nt, Human
ucuaauugcuuauuuauu

SEQ ID NO: 1341972 - RNA, 15 nt, Human
ucuaauugcuuauuu

SEQ ID NO: 1341973 - RNA, 13 nt, Human
ucuaauuuauaaa

SEQ ID NO: 1341974 - RNA, 14 nt, Human
ucuaauuuauaaaa

SEQ ID NO: 1341975 - RNA, 14 nt, Human
ucguccccaaguga

SEQ ID NO: 1341976 - RNA, 19 nt, Human
ucguccucguuuguguucu

SEQ ID NO: 1341977 - RNA, 15 nt, Human
ucguccuuacuccug

SEQ ID NO: 1341978 - RNA, 19 nt, Human
ucguccuuacuccuguggg

SEQ ID NO: 1341979 - RNA, 16 nt, Human
ucguccuuacuccugu

SEQ ID NO: 1341980 - RNA, 21 nt, Human
ucgucucggccuucacaaucu

SEQ ID NO: 1341981 - RNA, 23 nt, Human
ucgucucuuuuacccuggccccu

SEQ ID NO: 1341982 - RNA, 18 nt, Human
ucgucuguuuauaaacau

SEQ ID NO: 1341983 - RNA, 15 nt, Human
ucgucuucuuggcca

SEQ ID NO: 1341984 - RNA, 18 nt, Human
ucuaaucaugaaacuccc

SEQ ID NO: 1341985 - RNA, 19 nt, Human
ucuaaucuagauaucgacu

SEQ ID NO: 1341986 - RNA, 20 nt, Human
ucuaaucuagauaucgacuu

SEQ ID NO: 1341987 - RNA, 20 nt, Human
ucuaaucugugcuguuucaa

SEQ ID NO: 1341988 - RNA, 21 nt, Human
ucuaauucuauuaaagugcua

SEQ ID NO: 1341989 - RNA, 17 nt, Human
ucuaauucuuccuuugu

SEQ ID NO: 1341990 - RNA, 18 nt, Human
ucuaauucuuccuuugua

SEQ ID NO: 1341991 - RNA, 21 nt, Human
ucuaauucuuccuuuguaaaa

SEQ ID NO: 1341992 - RNA, 18 nt, Human
ucucagauuucugaggaa

SEQ ID NO: 1341993 - RNA, 17 nt, Human
ucucagauuucugagga

SEQ ID NO: 1341994 - RNA, 21 nt, Human
ucucaguugcagcccugcugc

SEQ ID NO: 1341995 - RNA, 16 nt, Human
ucucaguuuguguguc

SEQ ID NO: 1341996 - RNA, 17 nt, Human
ucucaguuugugugucu

SEQ ID NO: 1341997 - RNA, 18 nt, Human
ucucaguuugugugucuu

SEQ ID NO: 1341998 - RNA, 19 nt, Human
ucucaguuugugugucuua

SEQ ID NO: 1341999 - RNA, 15 nt, Human
ucucaguuuucauaa

SEQ ID NO: 1342000 - RNA, 16 nt, Human
ucucaguuuucauaag

SEQ ID NO: 1342001 - RNA, 14 nt, Human
ucucagauuucuga

SEQ ID NO: 1342002 - RNA, 17 nt, Human
ucucacugagcacuguu

SEQ ID NO: 1342003 - RNA, 14 nt, Human
ucucacugcuugaa

SEQ ID NO: 1342004 - RNA, 18 nt, Human
ucucacugagcacuguuu

SEQ ID NO: 1342005 - RNA, 18 nt, Human
ucucacugcuugaacuag

SEQ ID NO: 1342006 - RNA, 16 nt, Human
ucucacugcuugaacu

SEQ ID NO: 1342007 - RNA, 13 nt, Human
ucuaugaaauauu

SEQ ID NO: 1342008 - RNA, 15 nt, Human
ucucaauuccaacag

SEQ ID NO: 1342009 - RNA, 16 nt, Human
ucucaauuccaacagu

SEQ ID NO: 1342010 - RNA, 22 nt, Human
ucucaauuccaacaguuuaaug

SEQ ID NO: 1342011 - RNA, 17 nt, Human
ucucaauugcuuuguaa

SEQ ID NO: 1342012 - RNA, 12 nt, Human
ucucaauuucua

SEQ ID NO: 1342013 - RNA, 23 nt, Human
ucucaauuccaacaguuuaauga

SEQ ID NO: 1342014 - RNA, 16 nt, Human
ucucacugagcacugu

SEQ ID NO: 1342015 - RNA, 11 nt, Human
ucucacugagc

SEQ ID NO: 1342016 - RNA, 14 nt, Human
ucuauccucuguaa

SEQ ID NO: 1342017 - RNA, 22 nt, Human
ucuaucuuugagcgcccacuag

SEQ ID NO: 1342018 - RNA, 19 nt, Human
ucccuacccuaaccaaguu

SEQ ID NO: 1342019 - RNA, 16 nt, Human
ucccuacccucuagag

SEQ ID NO: 1342020 - RNA, 12 nt, Human
ucccaugcccug

SEQ ID NO: 1342021 - RNA, 22 nt, Human
ucccaugauuucauguacugca

SEQ ID NO: 1342022 - RNA, 19 nt, Human
ucccaugauuucauguacu

SEQ ID NO: 1342023 - RNA, 16 nt, Human
ucccaugauuucaugu

SEQ ID NO: 1342024 - RNA, 19 nt, Human
ucccuaccgagucucuucu

SEQ ID NO: 1342025 - RNA, 21 nt, Human
ucccuaccgagucucuucucc

SEQ ID NO: 1342026 - RNA, 22 nt, Human
ucccuaccgagucucuucucca

SEQ ID NO: 1342027 - RNA, 23 nt, Human
ucccuaccgagucucuucuccac

SEQ ID NO: 1342028 - RNA, 23 nt, Human
ucccaugagcuccuuaaggcucu

SEQ ID NO: 1342029 - RNA, 15 nt, Human
ucccaugaucccugu

SEQ ID NO: 1342030 - RNA, 14 nt, Human
ucccaugauuucau

SEQ ID NO: 1342031 - RNA, 13 nt, Human
ucccaugauuuca

SEQ ID NO: 1342032 - RNA, 16 nt, Human
ucccaugaucccugug

SEQ ID NO: 1342033 - RNA, 19 nt, Human
ucccaugaucccuguguug

SEQ ID NO: 1342034 - RNA, 18 nt, Human
ucccuagcugugaccucu

SEQ ID NO: 1342035 - RNA, 19 nt, Human
ucccuagaaacuuccaaau

SEQ ID NO: 1342036 - RNA, 18 nt, Human
ucccuagaaacuuccaaa

SEQ ID NO: 1342037 - RNA, 19 nt, Human
ucccuccgcccccagguag

SEQ ID NO: 1342038 - RNA, 14 nt, Human
ucccuccgggaccu

SEQ ID NO: 1342039 - RNA, 15 nt, Human
ucccuccgggaccug

SEQ ID NO: 1342040 - RNA, 13 nt, Human
ucccucccuuggg

SEQ ID NO: 1342041 - RNA, 14 nt, Human
ucccucccuugggg

SEQ ID NO: 1342042 - RNA, 14 nt, Human
ucccuccgccccca

SEQ ID NO: 1342043 - RNA, 16 nt, Human
ucccucugcagucucu

SEQ ID NO: 1342044 - RNA, 22 nt, Human
ucccucugcagucucuauacca

SEQ ID NO: 1342045 - RNA, 13 nt, Human
ucccucucuggag

SEQ ID NO: 1342046 - RNA, 15 nt, Human
ucccucucuggagaa

SEQ ID NO: 1342047 - RNA, 14 nt, Human
ucccucucuggaga

SEQ ID NO: 1342048 - RNA, 17 nt, Human
ucccucucaacacccag

SEQ ID NO: 1342049 - RNA, 16 nt, Human
ucccucucaggaucca

SEQ ID NO: 1342050 - RNA, 10 nt, Human
ucccucucau

SEQ ID NO: 1342051 - RNA, 22 nt, Human
ucccucucauuuagccuguccu

SEQ ID NO: 1342052 - RNA, 21 nt, Human
ucccucucauuuagccugucc

SEQ ID NO: 1342053 - RNA, 12 nt, Human
ucccucucccag

SEQ ID NO: 1342054 - RNA, 13 nt, Human
ucccucucccagg

SEQ ID NO: 1342055 - RNA, 14 nt, Human
ucccucucccaggc

SEQ ID NO: 1342056 - RNA, 15 nt, Human
ucccucucccaggcc

SEQ ID NO: 1342057 - RNA, 16 nt, Human
ucccucucccaggccc

SEQ ID NO: 1342058 - RNA, 21 nt, Human
ucccucuuccuucccugcugu

SEQ ID NO: 1342059 - RNA, 21 nt, Human
ucccucuuagucuagguccuu

SEQ ID NO: 1342060 - RNA, 13 nt, Human
ucccugcauggca

SEQ ID NO: 1342061 - RNA, 20 nt, Human
ucccugcauggcauccucca

SEQ ID NO: 1342062 - RNA, 21 nt, Human
ucccugcauggcauccuccag

SEQ ID NO: 1342063 - RNA, 19 nt, Human
ucccugggccuugggcucc

SEQ ID NO: 1342064 - RNA, 12 nt, Human
ucccugggccug

SEQ ID NO: 1342065 - RNA, 13 nt, Human
ucccugggccugc

SEQ ID NO: 1342066 - RNA, 14 nt, Human
ucccugggccugcu

SEQ ID NO: 1342067 - RNA, 15 nt, Human
ucccugggccugcug

SEQ ID NO: 1342068 - RNA, 16 nt, Human
ucccugggccugcugc

SEQ ID NO: 1342069 - RNA, 17 nt, Human
ucccugggccugcugcu

SEQ ID NO: 1342070 - RNA, 18 nt, Human
ucccugggccugcugcug

SEQ ID NO: 1342071 - RNA, 19 nt, Human
ucccugggccugcugcuga

SEQ ID NO: 1342072 - RNA, 20 nt, Human
ucccugggccugcugcugag

SEQ ID NO: 1342073 - RNA, 21 nt, Human
ucccugggccugcugcugaga

SEQ ID NO: 1342074 - RNA, 13 nt, Human
ucccugggccuug

SEQ ID NO: 1342075 - RNA, 14 nt, Human
ucccugggccuugg

SEQ ID NO: 1342076 - RNA, 15 nt, Human
ucccugggccuuggg

SEQ ID NO: 1342077 - RNA, 16 nt, Human
ucccugggccuugggc

SEQ ID NO: 1342078 - RNA, 20 nt, Human
ucccuggggcuagggggagc

SEQ ID NO: 1342079 - RNA, 16 nt, Human
ucccugccccccagcc

SEQ ID NO: 1342080 - RNA, 14 nt, Human
ucccugccccuccc

SEQ ID NO: 1342081 - RNA, 23 nt, Human
ucccugcauggcauccuccagcc

SEQ ID NO: 1342082 - RNA, 22 nt, Human
ucccugcauggcauccuccagc

SEQ ID NO: 1342083 - RNA, 18 nt, Human
ucccugccccucccuuca

SEQ ID NO: 1342084 - RNA, 19 nt, Human
ucccugccccucccuucaa

SEQ ID NO: 1342085 - RNA, 23 nt, Human
ucccugggagggacaugcuuagc

SEQ ID NO: 1342086 - RNA, 17 nt, Human
ucccuucuuuuucuucu

SEQ ID NO: 1342087 - RNA, 17 nt, Human
uccgacucuucugagca

SEQ ID NO: 1342088 - RNA, 16 nt, Human
uccgacucacaccacu

SEQ ID NO: 1342089 - RNA, 12 nt, Human
uccgacugcuuu

SEQ ID NO: 1342090 - RNA, 15 nt, Human
uccgacugcuuugga

SEQ ID NO: 1342091 - RNA, 12 nt, Human
uccggaaagaag

SEQ ID NO: 1342092 - RNA, 13 nt, Human
uccgcccugccac

SEQ ID NO: 1342093 - RNA, 14 nt, Human
uccgcccugccacu

SEQ ID NO: 1342094 - RNA, 15 nt, Human
uccgcccugccacuc

SEQ ID NO: 1342095 - RNA, 16 nt, Human
uccgcccugccacuca

SEQ ID NO: 1342096 - RNA, 16 nt, Human
uccgagaggugggcca

SEQ ID NO: 1342097 - RNA, 21 nt, Human
uccgaggacccaggaaaggca

SEQ ID NO: 1342098 - RNA, 21 nt, Human
uccgcccacaggaagccugca

SEQ ID NO: 1342099 - RNA, 14 nt, Human
uccgcccccaggua

SEQ ID NO: 1342100 - RNA, 16 nt, Human
uccgcccccagguagg

SEQ ID NO: 1342101 - RNA, 15 nt, Human
uccgcccccagguag

SEQ ID NO: 1342102 - RNA, 15 nt, Human
uccuaagcaucuaag

SEQ ID NO: 1342103 - RNA, 16 nt, Human
uccuaagcaucuaagu

SEQ ID NO: 1342104 - RNA, 13 nt, Human
uccuauccuccua

SEQ ID NO: 1342105 - RNA, 17 nt, Human
uccuaagcaucuaaguu

SEQ ID NO: 1342106 - RNA, 17 nt, Human
uccuaucuccagcggcc

SEQ ID NO: 1342107 - RNA, 19 nt, Human
uccuaucuccagcggcccu

SEQ ID NO: 1342108 - RNA, 23 nt, Human
uccuaucuccagcggcccuguca

SEQ ID NO: 1342109 - RNA, 13 nt, Human
uccuaucugggcu

SEQ ID NO: 1342110 - RNA, 16 nt, Human
uccuaucugggcuucc

SEQ ID NO: 1342111 - RNA, 18 nt, Human
uccuaucugggcuuccug

SEQ ID NO: 1342112 - RNA, 19 nt, Human
uccuaucugggcuuccugg

SEQ ID NO: 1342113 - RNA, 20 nt, Human
uccuaucugggcuuccugga

SEQ ID NO: 1342114 - RNA, 16 nt, Human
uccuaugauguauacu

SEQ ID NO: 1342115 - RNA, 12 nt, Human
uccuaugcaugg

SEQ ID NO: 1342116 - RNA, 22 nt, Human
uccuaugauguauacugccacu

SEQ ID NO: 1342117 - RNA, 15 nt, Human
uccuaugauguauac

SEQ ID NO: 1342118 - RNA, 12 nt, Human
uccuaugaugua

SEQ ID NO: 1342119 - RNA, 20 nt, Human
uccuaugcaugguuucagca

SEQ ID NO: 1342120 - RNA, 21 nt, Human
uccuaugcaugguuucagcac

SEQ ID NO: 1342121 - RNA, 22 nt, Human
uccuaugcaugguuucagcacu

SEQ ID NO: 1342122 - RNA, 13 nt, Human
uccuaugcuuuga

SEQ ID NO: 1342123 - RNA, 14 nt, Human
uccuaugcuuugaa

SEQ ID NO: 1342124 - RNA, 20 nt, Human
uccuaugcuuugaaacagaa

SEQ ID NO: 1342125 - RNA, 21 nt, Human
uccuauugugcaauguaaaua

SEQ ID NO: 1342126 - RNA, 17 nt, Human
uccuaagagugcugggc

SEQ ID NO: 1342127 - RNA, 19 nt, Human
uccuaagagugcugggcau

SEQ ID NO: 1342128 - RNA, 21 nt, Human
uccuaagcaacuaggccuuca

SEQ ID NO: 1342129 - RNA, 13 nt, Human
uccuaagcaucua

SEQ ID NO: 1342130 - RNA, 14 nt, Human
uccuaagcaucuaa

SEQ ID NO: 1342131 - RNA, 16 nt, Human
uccggauccuaagcau

SEQ ID NO: 1342132 - RNA, 14 nt, Human
uccuaagccuaaaa

SEQ ID NO: 1342133 - RNA, 20 nt, Human
uccucaaaacuucagacaua

SEQ ID NO: 1342134 - RNA, 12 nt, Human
uccuccucaggc

SEQ ID NO: 1342135 - RNA, 12 nt, Human
uccuccugcaga

SEQ ID NO: 1342136 - RNA, 15 nt, Human
uccuccugcagacca

SEQ ID NO: 1342137 - RNA, 20 nt, Human
uccuccugcagaccacgccc

SEQ ID NO: 1342138 - RNA, 17 nt, Human
uccuccgucaccucaga

SEQ ID NO: 1342139 - RNA, 17 nt, Human
uccucuguccaggcacu

SEQ ID NO: 1342140 - RNA, 21 nt, Human
uccucugucagucacagccac

SEQ ID NO: 1342141 - RNA, 22 nt, Human
uccucugucagucacagccacc

SEQ ID NO: 1342142 - RNA, 23 nt, Human
uccucuggcuuggccacagccag

SEQ ID NO: 1342143 - RNA, 19 nt, Human
uccucugucagucacagcc

SEQ ID NO: 1342144 - RNA, 22 nt, Human
uccucuguccaggcacugcugc

SEQ ID NO: 1342145 - RNA, 15 nt, Human
uccugaggcuccacu

SEQ ID NO: 1342146 - RNA, 22 nt, Human
uccucuggcuuggccacagcca

SEQ ID NO: 1342147 - RNA, 17 nt, Human
uccugaggcuccacuug

SEQ ID NO: 1342148 - RNA, 16 nt, Human
uccugaggcuccacuu

SEQ ID NO: 1342149 - RNA, 13 nt, Human
uccucuggagcca

SEQ ID NO: 1342150 - RNA, 17 nt, Human
uccucuggagccagccg

SEQ ID NO: 1342151 - RNA, 15 nt, Human
uccucuggcuuggcc

SEQ ID NO: 1342152 - RNA, 13 nt, Human
uccucucaauaaa

SEQ ID NO: 1342153 - RNA, 14 nt, Human
uccuccugggcccu

SEQ ID NO: 1342154 - RNA, 15 nt, Human
uccuccugggcccuc

SEQ ID NO: 1342155 - RNA, 16 nt, Human
uccuccugggcccucu

SEQ ID NO: 1342156 - RNA, 14 nt, Human
uccuccuuuuucca

SEQ ID NO: 1342157 - RNA, 13 nt, Human
uccuccuggacuc

SEQ ID NO: 1342158 - RNA, 12 nt, Human
uccuccugcuca

SEQ ID NO: 1342159 - RNA, 11 nt, Human
uccuccuggaa

SEQ ID NO: 1342160 - RNA, 16 nt, Human
uccucgagaucccaac

SEQ ID NO: 1342161 - RNA, 23 nt, Human
uccucgagaucccaacacugcca

SEQ ID NO: 1342162 - RNA, 12 nt, Human
uccauacauuug

SEQ ID NO: 1342163 - RNA, 22 nt, Human
uccauaaugcauucuucucugu

SEQ ID NO: 1342164 - RNA, 23 nt, Human
uccauaaucuggacuccucuguc

SEQ ID NO: 1342165 - RNA, 18 nt, Human
uccauaaugcauucuucu

SEQ ID NO: 1342166 - RNA, 14 nt, Human
uccagggcuaguga

SEQ ID NO: 1342167 - RNA, 12 nt, Human
uccauauaaaua

SEQ ID NO: 1342168 - RNA, 13 nt, Human
uccauauaaauau

SEQ ID NO: 1342169 - RNA, 19 nt, Human
uccauauaaauauuagaaa

SEQ ID NO: 1342170 - RNA, 19 nt, Human
uccauauggauccacuggc

SEQ ID NO: 1342171 - RNA, 21 nt, Human
uccauauggauccacuggcug

SEQ ID NO: 1342172 - RNA, 16 nt, Human
uccauauggauccacu

SEQ ID NO: 1342173 - RNA, 15 nt, Human
uccauaucacacaca

SEQ ID NO: 1342174 - RNA, 13 nt, Human
uccauaucacaca

SEQ ID NO: 1342175 - RNA, 14 nt, Human
ucccaacuuguaaa

SEQ ID NO: 1342176 - RNA, 16 nt, Human
ucccaacacugccagc

SEQ ID NO: 1342177 - RNA, 14 nt, Human
ucccaacacugcca

SEQ ID NO: 1342178 - RNA, 15 nt, Human
ucccaacacugccag

SEQ ID NO: 1342179 - RNA, 14 nt, Human
uccaugugcccagu

SEQ ID NO: 1342180 - RNA, 16 nt, Human
uccaugugcccaguua

SEQ ID NO: 1342181 - RNA, 17 nt, Human
uccaugucgccucugca

SEQ ID NO: 1342182 - RNA, 18 nt, Human
uccaugucgccucugcau

SEQ ID NO: 1342183 - RNA, 19 nt, Human
uccaugucgccucugcauu

SEQ ID NO: 1342184 - RNA, 16 nt, Human
uccaugucgccucugc

SEQ ID NO: 1342185 - RNA, 20 nt, Human
uccaugcguguuucugacuc

SEQ ID NO: 1342186 - RNA, 21 nt, Human
uccaugcguguuucugacucu

SEQ ID NO: 1342187 - RNA, 15 nt, Human
uccaugcgcucaggg

SEQ ID NO: 1342188 - RNA, 16 nt, Human
uccaugcgcucagggc

SEQ ID NO: 1342189 - RNA, 18 nt, Human
uccaugcguguuucugac

SEQ ID NO: 1342190 - RNA, 19 nt, Human
uccaugcguguuucugacu

SEQ ID NO: 1342191 - RNA, 12 nt, Human
uccaugauucua

SEQ ID NO: 1342192 - RNA, 21 nt, Human
uccaugcacccucauacacag

SEQ ID NO: 1342193 - RNA, 20 nt, Human
ucccaagcaccugggauuac

SEQ ID NO: 1342194 - RNA, 16 nt, Human
ucccaagcggugucuc

SEQ ID NO: 1342195 - RNA, 15 nt, Human
ucccaccuccauccc

SEQ ID NO: 1342196 - RNA, 17 nt, Human
ucccaccuccaucccag

SEQ ID NO: 1342197 - RNA, 15 nt, Human
ucccaccuccccuug

SEQ ID NO: 1342198 - RNA, 17 nt, Human
ucccaccuccccuuggg

SEQ ID NO: 1342199 - RNA, 21 nt, Human
ucccaagcaccugggauuaca

SEQ ID NO: 1342200 - RNA, 22 nt, Human
ucccaagagcaucaugccucug

SEQ ID NO: 1342201 - RNA, 13 nt, Human
ucccaagagcuac

SEQ ID NO: 1342202 - RNA, 17 nt, Human
ucccaagcggugucucu

SEQ ID NO: 1342203 - RNA, 18 nt, Human
ucccaccuccccuugggc

SEQ ID NO: 1342204 - RNA, 20 nt, Human
ucccaccuccugacacccuu

SEQ ID NO: 1342205 - RNA, 21 nt, Human
ucccaccuccugacacccuuc

SEQ ID NO: 1342206 - RNA, 17 nt, Human
ucccacucacaacagcu

SEQ ID NO: 1342207 - RNA, 22 nt, Human
ucccacucacaacagcugccug

SEQ ID NO: 1342208 - RNA, 20 nt, Human
ucccaccuuucgggccaugu

SEQ ID NO: 1342209 - RNA, 15 nt, Human
ucccacggccuuucu

SEQ ID NO: 1342210 - RNA, 17 nt, Human
ucccacggccuuucuag

SEQ ID NO: 1342211 - RNA, 21 nt, Human
ucccacuucagccucccaagc

SEQ ID NO: 1342212 - RNA, 13 nt, Human
ucccaggcaaggc

SEQ ID NO: 1342213 - RNA, 14 nt, Human
ucccacuccaagcc

SEQ ID NO: 1342214 - RNA, 13 nt, Human
ucccacuccaagc

SEQ ID NO: 1342215 - RNA, 22 nt, Human
ucccacuccaagcccagcccau

SEQ ID NO: 1342216 - RNA, 17 nt, Human
ucccacuccaagcccag

SEQ ID NO: 1342217 - RNA, 16 nt, Human
ucccacucuccuaggc

SEQ ID NO: 1342218 - RNA, 13 nt, Human
ucccacucuccua

SEQ ID NO: 1342219 - RNA, 18 nt, Human
ucccacuuaaaaauuaaa

SEQ ID NO: 1342220 - RNA, 15 nt, Human
ucccaggcaaggcug

SEQ ID NO: 1342221 - RNA, 16 nt, Human
ucccaggcaaggcugu

SEQ ID NO: 1342222 - RNA, 17 nt, Human
ucccaggcaaggcugug

SEQ ID NO: 1342223 - RNA, 19 nt, Human
ucccaggcaaggcugugga

SEQ ID NO: 1342224 - RNA, 19 nt, Human
ucccaggcugagccucagu

SEQ ID NO: 1342225 - RNA, 20 nt, Human
ucccaggcaaggcuguggac

SEQ ID NO: 1342226 - RNA, 18 nt, Human
ucccaggcacuguacuaa

SEQ ID NO: 1342227 - RNA, 16 nt, Human
ucccagggacaccugg

SEQ ID NO: 1342228 - RNA, 16 nt, Human
ucccagggccugucuc

SEQ ID NO: 1342229 - RNA, 17 nt, Human
uccagagcacugcucca

SEQ ID NO: 1342230 - RNA, 22 nt, Human
uccagagaguggcuccucccgg

SEQ ID NO: 1342231 - RNA, 19 nt, Human
uccagagaguggcuccucc

SEQ ID NO: 1342232 - RNA, 15 nt, Human
uccagagucccugcc

SEQ ID NO: 1342233 - RNA, 17 nt, Human
uccagagggcacucugc

SEQ ID NO: 1342234 - RNA, 15 nt, Human
uccagaugcagggca

SEQ ID NO: 1342235 - RNA, 20 nt, Human
uccagaggcuauuauuuuca

SEQ ID NO: 1342236 - RNA, 12 nt, Human
uccagagggcac

SEQ ID NO: 1342237 - RNA, 17 nt, Human
uccacuuuaucuugaau

SEQ ID NO: 1342238 - RNA, 16 nt, Human
uccacuuauagccucu

SEQ ID NO: 1342239 - RNA, 20 nt, Human
uccacuuauagccucugucu

SEQ ID NO: 1342240 - RNA, 22 nt, Human
uccacuuauagccucugucugg

SEQ ID NO: 1342241 - RNA, 23 nt, Human
uccacuuauagccucugucuggc

SEQ ID NO: 1342242 - RNA, 14 nt, Human
uccacuucugacag

SEQ ID NO: 1342243 - RNA, 15 nt, Human
uccacuucugacagc

SEQ ID NO: 1342244 - RNA, 12 nt, Human
uccacuuucagc

SEQ ID NO: 1342245 - RNA, 13 nt, Human
uccacuuucagcu

SEQ ID NO: 1342246 - RNA, 14 nt, Human
uccacuuucagcug

SEQ ID NO: 1342247 - RNA, 15 nt, Human
uccacuuucagcugu

SEQ ID NO: 1342248 - RNA, 16 nt, Human
uccacuuucagcuguc

SEQ ID NO: 1342249 - RNA, 17 nt, Human
uccacuuucagcugucu

SEQ ID NO: 1342250 - RNA, 18 nt, Human
uccacuuucagcugucuu

SEQ ID NO: 1342251 - RNA, 15 nt, Human
uccacuuuaucuuga

SEQ ID NO: 1342252 - RNA, 21 nt, Human
uccacuuagaaauugcauuuc

SEQ ID NO: 1342253 - RNA, 23 nt, Human
uccacuuagaaauugcauuuccu

SEQ ID NO: 1342254 - RNA, 14 nt, Human
uccacuuacaucca

SEQ ID NO: 1342255 - RNA, 16 nt, Human
uccacaggcuucugag

SEQ ID NO: 1342256 - RNA, 22 nt, Human
uccacccuggccgaguccaagc

SEQ ID NO: 1342257 - RNA, 22 nt, Human
uccagauuuuuuacagcugccu

SEQ ID NO: 1342258 - RNA, 17 nt, Human
uccagauuagagccugu

SEQ ID NO: 1342259 - RNA, 17 nt, Human
uccagauugacgacaag

SEQ ID NO: 1342260 - RNA, 16 nt, Human
uccagaugcagggcag

SEQ ID NO: 1342261 - RNA, 17 nt, Human
uccagaugcagggcagu

SEQ ID NO: 1342262 - RNA, 18 nt, Human
uccagaugcagggcaguc

SEQ ID NO: 1342263 - RNA, 19 nt, Human
uccagaugcagggcaguca

SEQ ID NO: 1342264 - RNA, 15 nt, Human
uccagaugccacaau

SEQ ID NO: 1342265 - RNA, 18 nt, Human
uccagcaauucuccugcc

SEQ ID NO: 1342266 - RNA, 19 nt, Human
uccagcaauucuccugccu

SEQ ID NO: 1342267 - RNA, 20 nt, Human
uccagcaauucuccugccuc

SEQ ID NO: 1342268 - RNA, 21 nt, Human
uccagcaauucuccugccuca

SEQ ID NO: 1342269 - RNA, 15 nt, Human
uccagcuggccggga

SEQ ID NO: 1342270 - RNA, 21 nt, Human
uccagcuggccgggagccuga

SEQ ID NO: 1342271 - RNA, 22 nt, Human
uccagcuggccgggagccugau

SEQ ID NO: 1342272 - RNA, 19 nt, Human
uccagcuggguuggaaaac

SEQ ID NO: 1342273 - RNA, 19 nt, Human
uccagcugggcucugcaau

SEQ ID NO: 1342274 - RNA, 22 nt, Human
uccaggaaaguggccaagaagc

SEQ ID NO: 1342275 - RNA, 20 nt, Human
uccaggacuauauuugggcc

SEQ ID NO: 1342276 - RNA, 23 nt, Human
uccaggacuauauuugggccugc

SEQ ID NO: 1342277 - RNA, 15 nt, Human
uccaggacuguuuca

SEQ ID NO: 1342278 - RNA, 19 nt, Human
uccaggacuguuucaaaca

SEQ ID NO: 1342279 - RNA, 20 nt, Human
uccaggacuguuucaaacau

SEQ ID NO: 1342280 - RNA, 21 nt, Human
uccaggacuguuucaaacaug

SEQ ID NO: 1342281 - RNA, 22 nt, Human
uccaggacuguuucaaacaugc

SEQ ID NO: 1342282 - RNA, 16 nt, Human
uccaggagaaggccaa

SEQ ID NO: 1342283 - RNA, 20 nt, Human
uccaggagaaggccaauucc

SEQ ID NO: 1342284 - RNA, 23 nt, Human
uccaggagaaggccaauuccuau

SEQ ID NO: 1342285 - RNA, 17 nt, Human
uccagggcccccaucuc

SEQ ID NO: 1342286 - RNA, 17 nt, Human
uccaagcaaaugugaau

SEQ ID NO: 1342287 - RNA, 20 nt, Human
uccaagacucuagaguccaa

SEQ ID NO: 1342288 - RNA, 23 nt, Human
uccaagacucuagaguccaaggu

SEQ ID NO: 1342289 - RNA, 15 nt, Human
uccaagagucuaaag

SEQ ID NO: 1342290 - RNA, 16 nt, Human
uccaagagucuaaaga

SEQ ID NO: 1342291 - RNA, 21 nt, Human
uccaagagcuacauaauuuag

SEQ ID NO: 1342292 - RNA, 13 nt, Human
uccaagacucuag

SEQ ID NO: 1342293 - RNA, 14 nt, Human
uccaagacucuaga

SEQ ID NO: 1342294 - RNA, 15 nt, Human
uccaagacucuagag

SEQ ID NO: 1342295 - RNA, 16 nt, Human
uccaagacucuagagu

SEQ ID NO: 1342296 - RNA, 23 nt, Human
ucaugucaaauauuuagauguaa

SEQ ID NO: 1342297 - RNA, 16 nt, Human
ucauguacugcauuau

SEQ ID NO: 1342298 - RNA, 19 nt, Human
ucauguacugcauuauuug

SEQ ID NO: 1342299 - RNA, 17 nt, Human
ucauguacaagaugaag

SEQ ID NO: 1342300 - RNA, 18 nt, Human
ucauguacaagaugaagg

SEQ ID NO: 1342301 - RNA, 23 nt, Human
uccacagcugccucuucccucuu

SEQ ID NO: 1342302 - RNA, 15 nt, Human
uccacagccugcaag

SEQ ID NO: 1342303 - RNA, 18 nt, Human
uccacagccugcaaguca

SEQ ID NO: 1342304 - RNA, 19 nt, Human
uccacagcaaccccaggcu

SEQ ID NO: 1342305 - RNA, 20 nt, Human
uccacagcaaccccaggcug

SEQ ID NO: 1342306 - RNA, 17 nt, Human
uccacacacauaauggc

SEQ ID NO: 1342307 - RNA, 19 nt, Human
uccacacagugcucaaggc

SEQ ID NO: 1342308 - RNA, 17 nt, Human
uccacacaugaaucugc

SEQ ID NO: 1342309 - RNA, 13 nt, Human
uccacacaugaau

SEQ ID NO: 1342310 - RNA, 13 nt, Human
uccacaccugcgg

SEQ ID NO: 1342311 - RNA, 14 nt, Human
uccacaccugcggc

SEQ ID NO: 1342312 - RNA, 18 nt, Human
uccacaccugcggcccaa

SEQ ID NO: 1342313 - RNA, 15 nt, Human
uccacaccugcggcc

SEQ ID NO: 1342314 - RNA, 15 nt, Human
uccacaccuuuuauu

SEQ ID NO: 1342315 - RNA, 21 nt, Human
uccacaccuuuuauugacaca

SEQ ID NO: 1342316 - RNA, 17 nt, Human
uccaagcucacucccca

SEQ ID NO: 1342317 - RNA, 14 nt, Human
uccaagcuaagcac

SEQ ID NO: 1342318 - RNA, 22 nt, Human
uccaagcuaagcacugccacug

SEQ ID NO: 1342319 - RNA, 22 nt, Human
uccaagcagcuuagaguuggcc

SEQ ID NO: 1342320 - RNA, 23 nt, Human
uccaagcagccugagcaacucuu

SEQ ID NO: 1342321 - RNA, 14 nt, Human
uccaagcagcuuag

SEQ ID NO: 1342322 - RNA, 15 nt, Human
uccaagcagcuuaga

SEQ ID NO: 1342323 - RNA, 19 nt, Human
uccaagcagcuuagaguug

SEQ ID NO: 1342324 - RNA, 19 nt, Human
uccaagcccagcccaugga

SEQ ID NO: 1342325 - RNA, 21 nt, Human
uccaagcccagcccauggaga

SEQ ID NO: 1342326 - RNA, 15 nt, Human
uccaagccccaucuu

SEQ ID NO: 1342327 - RNA, 19 nt, Human
uccaagccccaucuucuaa

SEQ ID NO: 1342328 - RNA, 23 nt, Human
uccaagccccaucuucuaaaugg

SEQ ID NO: 1342329 - RNA, 23 nt, Human
ucagauaagguaaaaugccauga

SEQ ID NO: 1342330 - RNA, 22 nt, Human
uaucauucaaguguaaaauauu

SEQ ID NO: 1342331 - RNA, 14 nt, Human
uaucauuccaaagg

SEQ ID NO: 1342332 - RNA, 19 nt, Human
uaucauugcuuccuccucc

SEQ ID NO: 1342333 - RNA, 20 nt, Human
ucagauaagguaaaaugcca

SEQ ID NO: 1342334 - RNA, 17 nt, Human
ucagauagaaugacagu

SEQ ID NO: 1342335 - RNA, 17 nt, Human
ucagauaugauucaaau

SEQ ID NO: 1342336 - RNA, 18 nt, Human
ucagauaugauucaaaug

SEQ ID NO: 1342337 - RNA, 22 nt, Human
ucagauaagguaaaaugccaug

SEQ ID NO: 1342338 - RNA, 13 nt, Human
ucagauccuccuc

SEQ ID NO: 1342339 - RNA, 15 nt, Human
ucagauccuccucau

SEQ ID NO: 1342340 - RNA, 14 nt, Human
ucagauccuccuca

SEQ ID NO: 1342341 - RNA, 14 nt, Human
ucagcacaucucaa

SEQ ID NO: 1342342 - RNA, 16 nt, Human
ucagcacaucucaaca

SEQ ID NO: 1342343 - RNA, 20 nt, Human
ucagcacaucucaacaggcc

SEQ ID NO: 1342344 - RNA, 14 nt, Human
ucagauccaggagc

SEQ ID NO: 1342345 - RNA, 15 nt, Human
ucagauccaggagcu

SEQ ID NO: 1342346 - RNA, 16 nt, Human
ucagauccaggagcuc

SEQ ID NO: 1342347 - RNA, 18 nt, Human
ucagauccaggagcucca

SEQ ID NO: 1342348 - RNA, 14 nt, Human
ucagauccagggac

SEQ ID NO: 1342349 - RNA, 15 nt, Human
ucagauccagggaca

SEQ ID NO: 1342350 - RNA, 16 nt, Human
ucagauccagggacag

SEQ ID NO: 1342351 - RNA, 23 nt, Human
ucagaucaguguaccauuugccu

SEQ ID NO: 1342352 - RNA, 17 nt, Human
ucagcagggacuguaaa

SEQ ID NO: 1342353 - RNA, 18 nt, Human
ucagcagggacuguaaac

SEQ ID NO: 1342354 - RNA, 22 nt, Human
ucagcagggacuguaaacacag

SEQ ID NO: 1342355 - RNA, 13 nt, Human
ucagcaugaauuu

SEQ ID NO: 1342356 - RNA, 19 nt, Human
ucagcucucaguugcagcc

SEQ ID NO: 1342357 - RNA, 14 nt, Human
ucaggacagaugcc

SEQ ID NO: 1342358 - RNA, 15 nt, Human
ucaggacagaugcca

SEQ ID NO: 1342359 - RNA, 20 nt, Human
ucaggaccaaagcuuucaug

SEQ ID NO: 1342360 - RNA, 15 nt, Human
ucaggacccagagga

SEQ ID NO: 1342361 - RNA, 16 nt, Human
ucaggacccagaggaa

SEQ ID NO: 1342362 - RNA, 19 nt, Human
ucaggacccagaggaaggg

SEQ ID NO: 1342363 - RNA, 12 nt, Human
ucaggacuggga

SEQ ID NO: 1342364 - RNA, 13 nt, Human
ucaggacugggag

SEQ ID NO: 1342365 - RNA, 14 nt, Human
ucaggacugggagc

SEQ ID NO: 1342366 - RNA, 15 nt, Human
ucaggacugggagcc

SEQ ID NO: 1342367 - RNA, 21 nt, Human
ucaggacugggagcccccagc

SEQ ID NO: 1342368 - RNA, 22 nt, Human
ucaggacugggagcccccagcc

SEQ ID NO: 1342369 - RNA, 23 nt, Human
ucaggacugggagcccccagccu

SEQ ID NO: 1342370 - RNA, 16 nt, Human
ucaggacuugaaagaa

SEQ ID NO: 1342371 - RNA, 17 nt, Human
ucaggacuugaaagaaa

SEQ ID NO: 1342372 - RNA, 20 nt, Human
ucaggagagaguugaaccua

SEQ ID NO: 1342373 - RNA, 16 nt, Human
ucaggaggaaggcuua

SEQ ID NO: 1342374 - RNA, 23 nt, Human
ucaggaggaaggcuuacacccac

SEQ ID NO: 1342375 - RNA, 17 nt, Human
ucaggaggaauacugaa

SEQ ID NO: 1342376 - RNA, 19 nt, Human
ucaggaggaauacugaaca

SEQ ID NO: 1342377 - RNA, 17 nt, Human
ucaggaggcaggaccuu

SEQ ID NO: 1342378 - RNA, 11 nt, Human
ucagcuccuga

SEQ ID NO: 1342379 - RNA, 12 nt, Human
ucagcuccugac

SEQ ID NO: 1342380 - RNA, 17 nt, Human
ucagcuccugaccaguu

SEQ ID NO: 1342381 - RNA, 18 nt, Human
ucagcuccugaccaguug

SEQ ID NO: 1342382 - RNA, 14 nt, Human
ucagcuccuuccug

SEQ ID NO: 1342383 - RNA, 15 nt, Human
ucagcuccuuccugg

SEQ ID NO: 1342384 - RNA, 16 nt, Human
ucagcuccuuccugga

SEQ ID NO: 1342385 - RNA, 17 nt, Human
ucagcuccuuccuggag

SEQ ID NO: 1342386 - RNA, 17 nt, Human
ucagccugaaccccagg

SEQ ID NO: 1342387 - RNA, 19 nt, Human
ucagccugaaccccagggc

SEQ ID NO: 1342388 - RNA, 23 nt, Human
ucagccuccauccuacccccugu

SEQ ID NO: 1342389 - RNA, 20 nt, Human
ucagccucccaaguagcugg

SEQ ID NO: 1342390 - RNA, 24 nt, Human
ucauggacuucugccagcauaaua

SEQ ID NO: 1342391 - RNA, 23 nt, Human
ucauggaugggggaacucagauc

SEQ ID NO: 1342392 - RNA, 20 nt, Human
ucauggauuuuccaggacug

SEQ ID NO: 1342393 - RNA, 22 nt, Human
ucauggcagaaggcaaacccau

SEQ ID NO: 1342394 - RNA, 18 nt, Human
ucauggcagauguaggag

SEQ ID NO: 1342395 - RNA, 21 nt, Human
ucauggcagauguaggaggga

SEQ ID NO: 1342396 - RNA, 22 nt, Human
ucauggcagauguaggagggac

SEQ ID NO: 1342397 - RNA, 13 nt, Human
ucauggccccucu

SEQ ID NO: 1342398 - RNA, 14 nt, Human
ucauggccccucug

SEQ ID NO: 1342399 - RNA, 18 nt, Human
ucauggccccucugaccu

SEQ ID NO: 1342400 - RNA, 16 nt, Human
ucauggccagcuggag

SEQ ID NO: 1342401 - RNA, 21 nt, Human
ucauggaauuggagcucgugg

SEQ ID NO: 1342402 - RNA, 15 nt, Human
ucaugaaagauucaa

SEQ ID NO: 1342403 - RNA, 13 nt, Human
ucaugaaagauuc

SEQ ID NO: 1342404 - RNA, 11 nt, Human
ucaugaaaauu

SEQ ID NO: 1342405 - RNA, 19 nt, Human
ucauggaauuggagcucgu

SEQ ID NO: 1342406 - RNA, 18 nt, Human
ucaucuggaaccaucaga

SEQ ID NO: 1342407 - RNA, 12 nt, Human
ucaucuggaacc

SEQ ID NO: 1342408 - RNA, 19 nt, Human
ucaucugcugguccguggg

SEQ ID NO: 1342409 - RNA, 14 nt, Human
ucauccaccccauc

SEQ ID NO: 1342410 - RNA, 16 nt, Human
ucauccaccccauccc

SEQ ID NO: 1342411 - RNA, 13 nt, Human
ucaucugcugguc

SEQ ID NO: 1342412 - RNA, 14 nt, Human
ucaucugcuggucc

SEQ ID NO: 1342413 - RNA, 19 nt, Human
ucauccaaguuaaauguag

SEQ ID NO: 1342414 - RNA, 19 nt, Human
ucauccacauacccugacc

SEQ ID NO: 1342415 - RNA, 12 nt, Human
ucauccacccca

SEQ ID NO: 1342416 - RNA, 17 nt, Human
ucaucuggauuccagag

SEQ ID NO: 1342417 - RNA, 13 nt, Human
ucaucuggaacca

SEQ ID NO: 1342418 - RNA, 19 nt, Human
ucaucuggcaacaucuuua

SEQ ID NO: 1342419 - RNA, 23 nt, Human
ucaucuggcaacaucuuuauccg

SEQ ID NO: 1342420 - RNA, 14 nt, Human
ucaucuuucuucca

SEQ ID NO: 1342421 - RNA, 17 nt, Human
ucaucuuucuuccaaac

SEQ ID NO: 1342422 - RNA, 22 nt, Human
ucauauuuuucauagcuaaaaa

SEQ ID NO: 1342423 - RNA, 23 nt, Human
ucauacuugaacguuuucuaauu

SEQ ID NO: 1342424 - RNA, 13 nt, Human
ucauagaaaugua

SEQ ID NO: 1342425 - RNA, 22 nt, Human
ucauagaaauguaacuuuugua

SEQ ID NO: 1342426 - RNA, 23 nt, Human
ucauagaaauguaacuuuuguaa

SEQ ID NO: 1342427 - RNA, 12 nt, Human
ucauacuugaac

SEQ ID NO: 1342428 - RNA, 14 nt, Human
ucauacuugaacgu

SEQ ID NO: 1342429 - RNA, 15 nt, Human
ucauacuugaacguu

SEQ ID NO: 1342430 - RNA, 19 nt, Human
ucauacuugaacguuuucu

SEQ ID NO: 1342431 - RNA, 21 nt, Human
ucauacuugaacguuuucuaa

SEQ ID NO: 1342432 - RNA, 22 nt, Human
ucauacuugaacguuuucuaau

SEQ ID NO: 1342433 - RNA, 19 nt, Human
ucaguucucuugauuuuca

SEQ ID NO: 1342434 - RNA, 13 nt, Human
ucaguucuaggaa

SEQ ID NO: 1342435 - RNA, 15 nt, Human
ucaguucuaggaaaa

SEQ ID NO: 1342436 - RNA, 16 nt, Human
ucaguucuaggaaaau

SEQ ID NO: 1342437 - RNA, 17 nt, Human
ucaucaucauggccagc

SEQ ID NO: 1342438 - RNA, 20 nt, Human
ucaucauucucugucucauc

SEQ ID NO: 1342439 - RNA, 22 nt, Human
ucaucauucucugucucaucca

SEQ ID NO: 1342440 - RNA, 17 nt, Human
ucauccaaguuaaaugu

SEQ ID NO: 1342441 - RNA, 16 nt, Human
ucaucaucauggccag

SEQ ID NO: 1342442 - RNA, 13 nt, Human
ucaucaacugaau

SEQ ID NO: 1342443 - RNA, 15 nt, Human
ucaucaacugaauga

SEQ ID NO: 1342444 - RNA, 22 nt, Human
ucaucaacugaaugaggucagc

SEQ ID NO: 1342445 - RNA, 13 nt, Human
ucaucaagagaau

SEQ ID NO: 1342446 - RNA, 21 nt, Human
ucaucaagagaauuuggggcu

SEQ ID NO: 1342447 - RNA, 19 nt, Human
ucaucaagagaauuugggg

SEQ ID NO: 1342448 - RNA, 20 nt, Human
ucaguuaacuauugcauuua

SEQ ID NO: 1342449 - RNA, 16 nt, Human
ucaguuaacuauugca

SEQ ID NO: 1342450 - RNA, 13 nt, Human
ucaguuaagaaau

SEQ ID NO: 1342451 - RNA, 15 nt, Human
ucaguguuaaaugug

SEQ ID NO: 1342452 - RNA, 17 nt, Human
ucaguguuaaaugugau

SEQ ID NO: 1342453 - RNA, 21 nt, Human
ucaguguuaaaugugaugaau

SEQ ID NO: 1342454 - RNA, 16 nt, Human
ucaguuaagccuuugg

SEQ ID NO: 1342455 - RNA, 17 nt, Human
ucaguuaagccuuugga

SEQ ID NO: 1342456 - RNA, 23 nt, Human
ucagucucuauaccaauaaagug

SEQ ID NO: 1342457 - RNA, 20 nt, Human
ucagucucucuucucuccag

SEQ ID NO: 1342458 - RNA, 22 nt, Human
ucagucucuauaccaauaaagu

SEQ ID NO: 1342459 - RNA, 13 nt, Human
ucagucucugagc

SEQ ID NO: 1342460 - RNA, 15 nt, Human
ucagucucugagcag

SEQ ID NO: 1342461 - RNA, 17 nt, Human
ucagucucugagcagug

SEQ ID NO: 1342462 - RNA, 20 nt, Human
ucagucucugagcagugaau

SEQ ID NO: 1342463 - RNA, 18 nt, Human
ucaguccaugaagaugua

SEQ ID NO: 1342464 - RNA, 18 nt, Human
ucaguccccgugaaggag

SEQ ID NO: 1342465 - RNA, 18 nt, Human
ucaguccccacagauaac

SEQ ID NO: 1342466 - RNA, 12 nt, Human
ucaguccaggau

SEQ ID NO: 1342467 - RNA, 15 nt, Human
ucaggugcuggggcc

SEQ ID NO: 1342468 - RNA, 23 nt, Human
ucaggugcuggggccugguuccc

SEQ ID NO: 1342469 - RNA, 17 nt, Human
uauagaacugaaugaga

SEQ ID NO: 1342470 - RNA, 18 nt, Human
uauagaacugaaugagaa

SEQ ID NO: 1342471 - RNA, 20 nt, Human
uauagaacuggauuuucaga

SEQ ID NO: 1342472 - RNA, 19 nt, Human
uauagaaguauaaagaauu

SEQ ID NO: 1342473 - RNA, 22 nt, Human
uauagaaguauaaagaauugug

SEQ ID NO: 1342474 - RNA, 13 nt, Human
uauagaaguuuag

SEQ ID NO: 1342475 - RNA, 24 nt, Human
uauagaaagcuauauaagacaaga

SEQ ID NO: 1342476 - RNA, 13 nt, Human
uauagaaagcuau

SEQ ID NO: 1342477 - RNA, 13 nt, Human
uauacuuuuacaa

SEQ ID NO: 1342478 - RNA, 22 nt, Human
uauaaauagaauguaaaugucu

SEQ ID NO: 1342479 - RNA, 15 nt, Human
uauacuuuaaauaau

SEQ ID NO: 1342480 - RNA, 18 nt, Human
uauacuuuaaauaauggu

SEQ ID NO: 1342481 - RNA, 12 nt, Human
uauacuuucccu

SEQ ID NO: 1342482 - RNA, 16 nt, Human
uauacuuucccuaccc

SEQ ID NO: 1342483 - RNA, 17 nt, Human
uauacuuucccuacccu

SEQ ID NO: 1342484 - RNA, 20 nt, Human
uauacuuucccuacccucua

SEQ ID NO: 1342485 - RNA, 11 nt, Human
uauacuuuuuu

SEQ ID NO: 1342486 - RNA, 20 nt, Human
uauaaauagaauguaaaugu

SEQ ID NO: 1342487 - RNA, 19 nt, Human
uauaaauagaauguaaaug

SEQ ID NO: 1342488 - RNA, 16 nt, Human
uauaaauagaauguaa

SEQ ID NO: 1342489 - RNA, 14 nt, Human
uauaaauagaaugu

SEQ ID NO: 1342490 - RNA, 18 nt, Human
uauaaauacugcaaauca

SEQ ID NO: 1342491 - RNA, 17 nt, Human
uauaaaguuuuauauau

SEQ ID NO: 1342492 - RNA, 18 nt, Human
uauaaaguuuuauauauu

SEQ ID NO: 1342493 - RNA, 22 nt, Human
uauaaaguuuuauauauuauau

SEQ ID NO: 1342494 - RNA, 21 nt, Human
uauaaaguuuuauauauuaua

SEQ ID NO: 1342495 - RNA, 18 nt, Human
uauaaaguaguccuguga

SEQ ID NO: 1342496 - RNA, 16 nt, Human
uauaaaguaguccugu

SEQ ID NO: 1342497 - RNA, 16 nt, Human
uauaguacaugauaaa

SEQ ID NO: 1342498 - RNA, 14 nt, Human
uauaguacaugaua

SEQ ID NO: 1342499 - RNA, 13 nt, Human
uauaguacaugau

SEQ ID NO: 1342500 - RNA, 12 nt, Human
uauaguacauga

SEQ ID NO: 1342501 - RNA, 13 nt, Human
uauaguccagcuu

SEQ ID NO: 1342502 - RNA, 13 nt, Human
uauagugauguaa

SEQ ID NO: 1342503 - RNA, 18 nt, Human
uauagugauguaaucuug

SEQ ID NO: 1342504 - RNA, 22 nt, Human
uauaguuuuacuuuuaaacugu

SEQ ID NO: 1342505 - RNA, 23 nt, Human
uauaguuuuacuuuuaaacugug

SEQ ID NO: 1342506 - RNA, 12 nt, Human
uauauaaagaaa

SEQ ID NO: 1342507 - RNA, 13 nt, Human
uauaucuggccuc

SEQ ID NO: 1342508 - RNA, 12 nt, Human
uauaucuuguuu

SEQ ID NO: 1342509 - RNA, 17 nt, Human
uauauaacaaugcugua

SEQ ID NO: 1342510 - RNA, 19 nt, Human
uauauaacaaugcuguauu

SEQ ID NO: 1342511 - RNA, 23 nt, Human
uauauaaagaaaaugauacagca

SEQ ID NO: 1342512 - RNA, 14 nt, Human
uauauuuuccuaua

SEQ ID NO: 1342513 - RNA, 14 nt, Human
uauauuuugccugu

SEQ ID NO: 1342514 - RNA, 14 nt, Human
uauauuuucuguuu

SEQ ID NO: 1342515 - RNA, 15 nt, Human
uauauuuucuuucuc

SEQ ID NO: 1342516 - RNA, 17 nt, Human
uauauuuuguuuacaaa

SEQ ID NO: 1342517 - RNA, 21 nt, Human
uauauuuuuuguuaaaugauu

SEQ ID NO: 1342518 - RNA, 16 nt, Human
uauauuuuuuucugaa

SEQ ID NO: 1342519 - RNA, 19 nt, Human
uauauuuuuuucugaaauu

SEQ ID NO: 1342520 - RNA, 20 nt, Human
uauauuuuuuucugaaauuu

SEQ ID NO: 1342521 - RNA, 21 nt, Human
uauauuuuuuuuuaagcucug

SEQ ID NO: 1342522 - RNA, 19 nt, Human
uaucaaaacuuucuuuucu

SEQ ID NO: 1342523 - RNA, 14 nt, Human
uauaugcuucuguu

SEQ ID NO: 1342524 - RNA, 18 nt, Human
uauaugaagaaaaucacu

SEQ ID NO: 1342525 - RNA, 16 nt, Human
uauaugcuucuguuuu

SEQ ID NO: 1342526 - RNA, 19 nt, Human
uauaugaagaaaaucacuu

SEQ ID NO: 1342527 - RNA, 14 nt, Human
uauauggaaauaua

SEQ ID NO: 1342528 - RNA, 18 nt, Human
uauauggaaauauauauu

SEQ ID NO: 1342529 - RNA, 19 nt, Human
uauauggaaauauauauua

SEQ ID NO: 1342530 - RNA, 17 nt, Human
uauauggaaauucugcu

SEQ ID NO: 1342531 - RNA, 22 nt, Human
uauauuugggccugcuccagac

SEQ ID NO: 1342532 - RNA, 22 nt, Human
uauauggaaauauauauuauac

SEQ ID NO: 1342533 - RNA, 18 nt, Human
uauauggacaaaacaaga

SEQ ID NO: 1342534 - RNA, 18 nt, Human
uaucaaacccuagccuug

SEQ ID NO: 1342535 - RNA, 19 nt, Human
uaucaaacccuagccuugc

SEQ ID NO: 1342536 - RNA, 20 nt, Human
uaucaaacccuagccuugcu

SEQ ID NO: 1342537 - RNA, 21 nt, Human
uaucaaacccuagccuugcuu

SEQ ID NO: 1342538 - RNA, 23 nt, Human
uaucaaacccuagccuugcuugu

SEQ ID NO: 1342539 - RNA, 14 nt, Human
uaucaaaagaaaga

SEQ ID NO: 1342540 - RNA, 22 nt, Human
uaucaaaaugcucuuauuucau

SEQ ID NO: 1342541 - RNA, 19 nt, Human
uaucaaacaccaacauaaa

SEQ ID NO: 1342542 - RNA, 14 nt, Human
uaucaaaaugcucu

SEQ ID NO: 1342543 - RNA, 23 nt, Human
uaucaaacaccaacauaaaaaug

SEQ ID NO: 1342544 - RNA, 17 nt, Human
uaucaaacccuagccuu

SEQ ID NO: 1342545 - RNA, 22 nt, Human
uaucaaacccuagccuugcuug

SEQ ID NO: 1342546 - RNA, 15 nt, Human
uaucaguaaauaacu

SEQ ID NO: 1342547 - RNA, 9 nt, Human
uaucaguag

SEQ ID NO: 1342548 - RNA, 20 nt, Human
uaucagucaauauuuuuaga

SEQ ID NO: 1342549 - RNA, 21 nt, Human
uaucagucaauauuuuuagau

SEQ ID NO: 1342550 - RNA, 22 nt, Human
uaucagucauaacuaaauaaag

SEQ ID NO: 1342551 - RNA, 14 nt, Human
uaucauagaaaugu

SEQ ID NO: 1342552 - RNA, 15 nt, Human
uaucauagaaaugua

SEQ ID NO: 1342553 - RNA, 20 nt, Human
uaucauguuaguaauaccuc

SEQ ID NO: 1342554 - RNA, 13 nt, Human
uaucauucaagug

SEQ ID NO: 1342555 - RNA, 14 nt, Human
uaucauucaagugu

SEQ ID NO: 1342556 - RNA, 21 nt, Human
uaucauguuaguaauaccucu

SEQ ID NO: 1342557 - RNA, 19 nt, Human
uaucauguuaguaauaccu

SEQ ID NO: 1342558 - RNA, 16 nt, Human
uaucauguuaguaaua

SEQ ID NO: 1342559 - RNA, 17 nt, Human
uaucaugcauguccugu

SEQ ID NO: 1342560 - RNA, 19 nt, Human
uaucaugcauguccuguaa

SEQ ID NO: 1342561 - RNA, 14 nt, Human
uaucaugcccugug

SEQ ID NO: 1342562 - RNA, 23 nt, Human
uaucauagaaauguaacuuuugu

SEQ ID NO: 1342563 - RNA, 18 nt, Human
uaucauagaaauguaacu

SEQ ID NO: 1342564 - RNA, 21 nt, Human
uaucauauauauacauacaug

SEQ ID NO: 1342565 - RNA, 18 nt, Human
uaucaucagauagcaucu

SEQ ID NO: 1342566 - RNA, 16 nt, Human
uaucaugagugaauaa

SEQ ID NO: 1342567 - RNA, 18 nt, Human
uauaaaccgaacugaugu

SEQ ID NO: 1342568 - RNA, 22 nt, Human
uaguugaauuuuuuuuaacauu

SEQ ID NO: 1342569 - RNA, 21 nt, Human
uauaaacaagaaaaauaaaga

SEQ ID NO: 1342570 - RNA, 13 nt, Human
uauaaacaagaaa

SEQ ID NO: 1342571 - RNA, 15 nt, Human
uauaaacaagaaaaa

SEQ ID NO: 1342572 - RNA, 19 nt, Human
uauaaacaagaaaaauaaa

SEQ ID NO: 1342573 - RNA, 20 nt, Human
uauaaacaagaaaaauaaag

SEQ ID NO: 1342574 - RNA, 22 nt, Human
uauaaacaagaaaaauaaagaa

SEQ ID NO: 1342575 - RNA, 17 nt, Human
uaguauuguccaggucu

SEQ ID NO: 1342576 - RNA, 18 nt, Human
uaguauugacaaaauguu

SEQ ID NO: 1342577 - RNA, 17 nt, Human
uaguauugacaaaaugu

SEQ ID NO: 1342578 - RNA, 14 nt, Human
uaguauugacaaaa

SEQ ID NO: 1342579 - RNA, 13 nt, Human
uaguauugacaaa

SEQ ID NO: 1342580 - RNA, 17 nt, Human
uaguauggccuguguca

SEQ ID NO: 1342581 - RNA, 19 nt, Human
uaguauggccugugucacu

SEQ ID NO: 1342582 - RNA, 16 nt, Human
uaguaggcauuuuuac

SEQ ID NO: 1342583 - RNA, 16 nt, Human
uaguauggccuguguc

SEQ ID NO: 1342584 - RNA, 16 nt, Human
uaguauuucuaugaaa

SEQ ID NO: 1342585 - RNA, 22 nt, Human
uaguauuguuguccuuuucaua

SEQ ID NO: 1342586 - RNA, 16 nt, Human
uaguauugcaaaguca

SEQ ID NO: 1342587 - RNA, 22 nt, Human
uaguauugacaaaauguuauuu

SEQ ID NO: 1342588 - RNA, 21 nt, Human
uaguauugacaaaauguuauu

SEQ ID NO: 1342589 - RNA, 19 nt, Human
uaguauugacaaaauguua

SEQ ID NO: 1342590 - RNA, 13 nt, Human
uaguauuguuguc

SEQ ID NO: 1342591 - RNA, 16 nt, Human
uaguauuguuguccuu

SEQ ID NO: 1342592 - RNA, 17 nt, Human
uaguauuguuguccuuu

SEQ ID NO: 1342593 - RNA, 21 nt, Human
uaguauuguuguccuuuucau

SEQ ID NO: 1342594 - RNA, 17 nt, Human
uaguucuuacugcuuaa

SEQ ID NO: 1342595 - RNA, 17 nt, Human
uaguugaaaauaaagug

SEQ ID NO: 1342596 - RNA, 17 nt, Human
uaguuguuguagagaaa

SEQ ID NO: 1342597 - RNA, 23 nt, Human
uaguugaauuuuuuuuaacauuc

SEQ ID NO: 1342598 - RNA, 12 nt, Human
uaguugaauuuu

SEQ ID NO: 1342599 - RNA, 23 nt, Human
uaguagcguuuuuuaaauguaua

SEQ ID NO: 1342600 - RNA, 21 nt, Human
uaguagcguuuuuuaaaugua

SEQ ID NO: 1342601 - RNA, 19 nt, Human
uaguagcguuuuuuaaaug

SEQ ID NO: 1342602 - RNA, 20 nt, Human
uaguagcagugauugucuua

SEQ ID NO: 1342603 - RNA, 22 nt, Human
uagguuauuaugauuagcuuug

SEQ ID NO: 1342604 - RNA, 13 nt, Human
uagguucuaaagu

SEQ ID NO: 1342605 - RNA, 12 nt, Human
uagguucuaaaa

SEQ ID NO: 1342606 - RNA, 15 nt, Human
uagguucagccaagg

SEQ ID NO: 1342607 - RNA, 15 nt, Human
uagguucuaaaguuc

SEQ ID NO: 1342608 - RNA, 16 nt, Human
uagguucuaaaguucu

SEQ ID NO: 1342609 - RNA, 17 nt, Human
uagguucuaaaguucua

SEQ ID NO: 1342610 - RNA, 18 nt, Human
uagguucuaaaguucuaa

SEQ ID NO: 1342611 - RNA, 20 nt, Human
uagguucuaaaguucuaaga

SEQ ID NO: 1342612 - RNA, 21 nt, Human
uagguucuaaaguucuaagau

SEQ ID NO: 1342613 - RNA, 22 nt, Human
uagguucuaaaguucuaagauu

SEQ ID NO: 1342614 - RNA, 18 nt, Human
uagguucuuugcugcauu

SEQ ID NO: 1342615 - RNA, 12 nt, Human
uagguugcacac

SEQ ID NO: 1342616 - RNA, 13 nt, Human
uagguugcacacu

SEQ ID NO: 1342617 - RNA, 16 nt, Human
uagguugcacacuuug

SEQ ID NO: 1342618 - RNA, 17 nt, Human
uagguugcacacuuugg

SEQ ID NO: 1342619 - RNA, 18 nt, Human
uagguugcacacuuuggu

SEQ ID NO: 1342620 - RNA, 19 nt, Human
uagguugcacacuuuggua

SEQ ID NO: 1342621 - RNA, 20 nt, Human
uagguuauuaugauuagcuu

SEQ ID NO: 1342622 - RNA, 22 nt, Human
uagguuauuuugauguaaagau

SEQ ID NO: 1342623 - RNA, 14 nt, Human
uagguucagccaag

SEQ ID NO: 1342624 - RNA, 20 nt, Human
uagguggguugaaagccaag

SEQ ID NO: 1342625 - RNA, 21 nt, Human
uagguguuuuguucaccauua

SEQ ID NO: 1342626 - RNA, 19 nt, Human
uaggucugaaauuuuucuu

SEQ ID NO: 1342627 - RNA, 14 nt, Human
uagcugggacuaca

SEQ ID NO: 1342628 - RNA, 22 nt, Human
uagcuguccuuuuuccucucca

SEQ ID NO: 1342629 - RNA, 21 nt, Human
uagcugucugcucagacagaa

SEQ ID NO: 1342630 - RNA, 16 nt, Human
uagcugugaccucucc

SEQ ID NO: 1342631 - RNA, 19 nt, Human
uaggcugacaccuaacucu

SEQ ID NO: 1342632 - RNA, 21 nt, Human
uaggcugacaccuaacucuuc

SEQ ID NO: 1342633 - RNA, 23 nt, Human
uaggcugacaccuaacucuucuu

SEQ ID NO: 1342634 - RNA, 20 nt, Human
uaggcuggaguuagggacug

SEQ ID NO: 1342635 - RNA, 19 nt, Human
uaggcuguaacuacuuuau

SEQ ID NO: 1342636 - RNA, 21 nt, Human
uaggcuguaacuacuuuauaa

SEQ ID NO: 1342637 - RNA, 18 nt, Human
uaggcuuaguuugugugu

SEQ ID NO: 1342638 - RNA, 12 nt, Human
uaggucugaaau

SEQ ID NO: 1342639 - RNA, 14 nt, Human
uaggucugaaauuu

SEQ ID NO: 1342640 - RNA, 18 nt, Human
uaggucugaaauuuuucu

SEQ ID NO: 1342641 - RNA, 22 nt, Human
uaggucugaaauuuuucuucuu

SEQ ID NO: 1342642 - RNA, 21 nt, Human
uaggucuuaauacacacaguu

SEQ ID NO: 1342643 - RNA, 19 nt, Human
uaggugcuauuugucaucu

SEQ ID NO: 1342644 - RNA, 13 nt, Human
uagcauccuggaa

SEQ ID NO: 1342645 - RNA, 15 nt, Human
uagcauccuggaaua

SEQ ID NO: 1342646 - RNA, 16 nt, Human
uagcauccuggaauau

SEQ ID NO: 1342647 - RNA, 18 nt, Human
uagcauccuggaauaucu

SEQ ID NO: 1342648 - RNA, 14 nt, Human
uagcagcuuccaga

SEQ ID NO: 1342649 - RNA, 15 nt, Human
uagcagcuuccagau

SEQ ID NO: 1342650 - RNA, 17 nt, Human
uagauuuuaaucaaauu

SEQ ID NO: 1342651 - RNA, 18 nt, Human
uagauuuuaaucaaauuu

SEQ ID NO: 1342652 - RNA, 14 nt, Human
uagauuuuacauga

SEQ ID NO: 1342653 - RNA, 15 nt, Human
uagauuuuacaugaa

SEQ ID NO: 1342654 - RNA, 20 nt, Human
uagauuuuacaugaaguauu

SEQ ID NO: 1342655 - RNA, 16 nt, Human
uagauuuuacaugaag

SEQ ID NO: 1342656 - RNA, 17 nt, Human
uagauuuuacaugaagu

SEQ ID NO: 1342657 - RNA, 18 nt, Human
uagauuuuacaugaagua

SEQ ID NO: 1342658 - RNA, 12 nt, Human
uagcagccuuuc

SEQ ID NO: 1342659 - RNA, 13 nt, Human
uagcagccuuucu

SEQ ID NO: 1342660 - RNA, 16 nt, Human
uagcagccuuucucuc

SEQ ID NO: 1342661 - RNA, 22 nt, Human
uagcagcggaacaaggagucag

SEQ ID NO: 1342662 - RNA, 20 nt, Human
uagauaggaagaaagaagac

SEQ ID NO: 1342663 - RNA, 13 nt, Human
uagauucaaaggu

SEQ ID NO: 1342664 - RNA, 15 nt, Human
uagauucaaagguuc

SEQ ID NO: 1342665 - RNA, 16 nt, Human
uagauucaaagguucu

SEQ ID NO: 1342666 - RNA, 17 nt, Human
uagauucaaagguucua

SEQ ID NO: 1342667 - RNA, 18 nt, Human
uagauucaaagguucuag

SEQ ID NO: 1342668 - RNA, 17 nt, Human
uagauucagguaauaca

SEQ ID NO: 1342669 - RNA, 19 nt, Human
uagauucagguaauacaaa

SEQ ID NO: 1342670 - RNA, 20 nt, Human
uagauuccauugguccaaga

SEQ ID NO: 1342671 - RNA, 21 nt, Human
uagauuccauugguccaagau

SEQ ID NO: 1342672 - RNA, 11 nt, Human
uagauucuaaa

SEQ ID NO: 1342673 - RNA, 12 nt, Human
uagauucuaaag

SEQ ID NO: 1342674 - RNA, 13 nt, Human
uagauucuaaaga

SEQ ID NO: 1342675 - RNA, 14 nt, Human
uagauucuaaagau

SEQ ID NO: 1342676 - RNA, 15 nt, Human
uagauucuaaagauu

SEQ ID NO: 1342677 - RNA, 11 nt, Human
uagauuuaugg

SEQ ID NO: 1342678 - RNA, 16 nt, Human
uagauuucauaguuca

SEQ ID NO: 1342679 - RNA, 18 nt, Human
uagauuucauaguucaga

SEQ ID NO: 1342680 - RNA, 19 nt, Human
uagauuucauaguucagaa

SEQ ID NO: 1342681 - RNA, 20 nt, Human
uagauuucauaguucagaau

SEQ ID NO: 1342682 - RNA, 22 nt, Human
uagauuucauaguucagaauuu

SEQ ID NO: 1342683 - RNA, 23 nt, Human
uagauuucauaguucagaauuua

SEQ ID NO: 1342684 - RNA, 20 nt, Human
uagauuuggcuccucugcuu

SEQ ID NO: 1342685 - RNA, 24 nt, Human
uagauuuggcuccucugcuucuca

SEQ ID NO: 1342686 - RNA, 19 nt, Human
uagauuugugugcaucagg

SEQ ID NO: 1342687 - RNA, 22 nt, Human
uagauuugugugcaucaggcuu

SEQ ID NO: 1342688 - RNA, 20 nt, Human
uagauuugugugcaucaggc

SEQ ID NO: 1342689 - RNA, 16 nt, Human
uagauuuuaaucaaau

SEQ ID NO: 1342690 - RNA, 17 nt, Human
uagauaggccaugggca

SEQ ID NO: 1342691 - RNA, 19 nt, Human
uagauagcccuguccuggu

SEQ ID NO: 1342692 - RNA, 23 nt, Human
uagauagcccuguccugguggua

SEQ ID NO: 1342693 - RNA, 14 nt, Human
uagauaggccaugg

SEQ ID NO: 1342694 - RNA, 15 nt, Human
uagauagcccugucc

SEQ ID NO: 1342695 - RNA, 17 nt, Human
uagauagcccuguccug

SEQ ID NO: 1342696 - RNA, 12 nt, Human
uagaguugcuga

SEQ ID NO: 1342697 - RNA, 23 nt, Human
uagauacccuacgcuguccagaa

SEQ ID NO: 1342698 - RNA, 16 nt, Human
uagccccucuccugga

SEQ ID NO: 1342699 - RNA, 22 nt, Human
uagcccccugguaauagcugua

SEQ ID NO: 1342700 - RNA, 14 nt, Human
uagccccugaaagc

SEQ ID NO: 1342701 - RNA, 22 nt, Human
uagccccugggguggccaccag

SEQ ID NO: 1342702 - RNA, 22 nt, Human
uagccauauuuguaaaaugaca

SEQ ID NO: 1342703 - RNA, 21 nt, Human
uagcccccugguaauagcugu

SEQ ID NO: 1342704 - RNA, 22 nt, Human
uagccaguaauccuguaggaag

SEQ ID NO: 1342705 - RNA, 18 nt, Human
uagccaguaauccuguag

SEQ ID NO: 1342706 - RNA, 17 nt, Human
uagccaguaauccugua

SEQ ID NO: 1342707 - RNA, 16 nt, Human
uagccaguaauccugu

SEQ ID NO: 1342708 - RNA, 15 nt, Human
uagccaguaauccug

SEQ ID NO: 1342709 - RNA, 15 nt, Human
uagccauauuuguaa

SEQ ID NO: 1342710 - RNA, 17 nt, Human
uagccauauuuguaaaa

SEQ ID NO: 1342711 - RNA, 19 nt, Human
uagccauauuuguaaaaug

SEQ ID NO: 1342712 - RNA, 20 nt, Human
uagccauauuuguaaaauga

SEQ ID NO: 1342713 - RNA, 23 nt, Human
uagccauauuuguaaaaugacaa

SEQ ID NO: 1342714 - RNA, 23 nt, Human
uagccagccggggcgaguggcac

SEQ ID NO: 1342715 - RNA, 17 nt, Human
uagcaugcuuguugcaa

SEQ ID NO: 1342716 - RNA, 18 nt, Human
uagcaugcuuguugcaau

SEQ ID NO: 1342717 - RNA, 23 nt, Human
uagcaugcuuguugcaauugccu

SEQ ID NO: 1342718 - RNA, 19 nt, Human
uagcucuuugucagggagu

SEQ ID NO: 1342719 - RNA, 15 nt, Human
uagcugaauguuuuu

SEQ ID NO: 1342720 - RNA, 18 nt, Human
uagcugacaaaauacuug

SEQ ID NO: 1342721 - RNA, 18 nt, Human
uagcugaauguuuuucua

SEQ ID NO: 1342722 - RNA, 19 nt, Human
uagcugaauguuuuucuaa

SEQ ID NO: 1342723 - RNA, 11 nt, Human
uagcugagcuc

SEQ ID NO: 1342724 - RNA, 21 nt, Human
uagcugagcucacaaggcagc

SEQ ID NO: 1342725 - RNA, 14 nt, Human
uagcugaucaguuu

SEQ ID NO: 1342726 - RNA, 12 nt, Human
uagcugagcuca

SEQ ID NO: 1342727 - RNA, 20 nt, Human
uagccuaaggcuccuguuuu

SEQ ID NO: 1342728 - RNA, 21 nt, Human
uagccuaaggcuccuguuuug

SEQ ID NO: 1342729 - RNA, 11 nt, Human
uagccuggacc

SEQ ID NO: 1342730 - RNA, 17 nt, Human
uagccuggaccucugac

SEQ ID NO: 1342731 - RNA, 21 nt, Human
uagccuggaccucugacagca

SEQ ID NO: 1342732 - RNA, 23 nt, Human
uagccuggaccucugacagcagc

SEQ ID NO: 1342733 - RNA, 22 nt, Human
uagccuggaccucugacagcag

SEQ ID NO: 1342734 - RNA, 14 nt, Human
uagccuggcuuggg

SEQ ID NO: 1342735 - RNA, 11 nt, Human
uagccuggcua

SEQ ID NO: 1342736 - RNA, 11 nt, Human
uagccuguccu

SEQ ID NO: 1342737 - RNA, 12 nt, Human
uagccuguccug

SEQ ID NO: 1342738 - RNA, 13 nt, Human
uagccuguccugu

SEQ ID NO: 1342739 - RNA, 14 nt, Human
uagccuguccuguc

SEQ ID NO: 1342740 - RNA, 16 nt, Human
uagccuguccugucau

SEQ ID NO: 1342741 - RNA, 20 nt, Human
uagccuguccugucaucauc

SEQ ID NO: 1342742 - RNA, 13 nt, Human
uagaauaugccuu

SEQ ID NO: 1342743 - RNA, 21 nt, Human
uagaaucaaacauuuugaaag

SEQ ID NO: 1342744 - RNA, 22 nt, Human
uagaaucaaacauuuugaaagu

SEQ ID NO: 1342745 - RNA, 23 nt, Human
uagaauacaguuuugaguagagu

SEQ ID NO: 1342746 - RNA, 23 nt, Human
uagaauaccacaggaaccacaag

SEQ ID NO: 1342747 - RNA, 19 nt, Human
uagaauaaaggcaguuuuc

SEQ ID NO: 1342748 - RNA, 21 nt, Human
uagaauaaaggcaguuuucua

SEQ ID NO: 1342749 - RNA, 22 nt, Human
uagaauaaaggcaguuuucuaa

SEQ ID NO: 1342750 - RNA, 20 nt, Human
uacuugucuguuuuaaaaac

SEQ ID NO: 1342751 - RNA, 15 nt, Human
uacuugucuguuuua

SEQ ID NO: 1342752 - RNA, 14 nt, Human
uacuugucuguuuu

SEQ ID NO: 1342753 - RNA, 14 nt, Human
uacuuguuucagag

SEQ ID NO: 1342754 - RNA, 15 nt, Human
uacuuguuucagagu

SEQ ID NO: 1342755 - RNA, 18 nt, Human
uagaauuaacacaugauc

SEQ ID NO: 1342756 - RNA, 16 nt, Human
uagaauuaacacauga

SEQ ID NO: 1342757 - RNA, 15 nt, Human
uagaauuaacacaug

SEQ ID NO: 1342758 - RNA, 22 nt, Human
uagaauuauaacuguaaagaug

SEQ ID NO: 1342759 - RNA, 15 nt, Human
uagaauuaucuaauu

SEQ ID NO: 1342760 - RNA, 16 nt, Human
uagaauuaucuaauuu

SEQ ID NO: 1342761 - RNA, 19 nt, Human
uagaauuaucuaauuuaua

SEQ ID NO: 1342762 - RNA, 21 nt, Human
uagaauuaucuaauuuauaaa

SEQ ID NO: 1342763 - RNA, 22 nt, Human
uagaauuaucuaauuuauaaaa

SEQ ID NO: 1342764 - RNA, 23 nt, Human
uagaauuaucuaauuuauaaaaa

SEQ ID NO: 1342765 - RNA, 12 nt, Human
uagaauuauuua

SEQ ID NO: 1342766 - RNA, 15 nt, Human
uagaauuauuuaaac

SEQ ID NO: 1342767 - RNA, 16 nt, Human
uagaauuauuuaaaca

SEQ ID NO: 1342768 - RNA, 21 nt, Human
uagaauuauaacuggaaagaa

SEQ ID NO: 1342769 - RNA, 17 nt, Human
uagaauguaaaugucuc

SEQ ID NO: 1342770 - RNA, 18 nt, Human
uagaauguaaaugucuca

SEQ ID NO: 1342771 - RNA, 19 nt, Human
uagaaugugugucaauuua

SEQ ID NO: 1342772 - RNA, 16 nt, Human
uagaauguaaaugucu

SEQ ID NO: 1342773 - RNA, 15 nt, Human
uagaauguaaauguc

SEQ ID NO: 1342774 - RNA, 14 nt, Human
uagaauguaaaugu

SEQ ID NO: 1342775 - RNA, 18 nt, Human
uagaauguaaagcuuguc

SEQ ID NO: 1342776 - RNA, 15 nt, Human
uagaauguaaagcuu

SEQ ID NO: 1342777 - RNA, 17 nt, Human
uagaauguaaagcuugu

SEQ ID NO: 1342778 - RNA, 16 nt, Human
uagaaugauuucaugc

SEQ ID NO: 1342779 - RNA, 18 nt, Human
uagaaucccagcccccug

SEQ ID NO: 1342780 - RNA, 22 nt, Human
uagaaucccagcccccugacca

SEQ ID NO: 1342781 - RNA, 21 nt, Human
uagaaucccagcccccugacc

SEQ ID NO: 1342782 - RNA, 18 nt, Human
uagaaucugcaauucaaa

SEQ ID NO: 1342783 - RNA, 22 nt, Human
uagaaucugcaauucaaaaguu

SEQ ID NO: 1342784 - RNA, 12 nt, Human
uagaaugacagu

SEQ ID NO: 1342785 - RNA, 21 nt, Human
uagaaugauuucaugcuaucu

SEQ ID NO: 1342786 - RNA, 22 nt, Human
uagacucugucuaccuggucug

SEQ ID NO: 1342787 - RNA, 17 nt, Human
uagacucugucuaccug

SEQ ID NO: 1342788 - RNA, 17 nt, Human
uagacugugauucagaa

SEQ ID NO: 1342789 - RNA, 18 nt, Human
uagacugugauucagaaa

SEQ ID NO: 1342790 - RNA, 22 nt, Human
uagacuucaagcauggcuauuu

SEQ ID NO: 1342791 - RNA, 17 nt, Human
uagaccuuuucauuugu

SEQ ID NO: 1342792 - RNA, 23 nt, Human
uagacggagcccuggcaugucaa

SEQ ID NO: 1342793 - RNA, 17 nt, Human
uagaccuuguuacuucu

SEQ ID NO: 1342794 - RNA, 19 nt, Human
uagaccuuguuacuucuga

SEQ ID NO: 1342795 - RNA, 23 nt, Human
uagacuaaggccauuauuguacu

SEQ ID NO: 1342796 - RNA, 20 nt, Human
uagacccacuggacucaccu

SEQ ID NO: 1342797 - RNA, 12 nt, Human
uagaccaauaaa

SEQ ID NO: 1342798 - RNA, 10 nt, Human
uagaccaaua

SEQ ID NO: 1342799 - RNA, 15 nt, Human
uagaccaccaagccu

SEQ ID NO: 1342800 - RNA, 16 nt, Human
uagaccaccaagccuu

SEQ ID NO: 1342801 - RNA, 17 nt, Human
uagaccaccaagccuug

SEQ ID NO: 1342802 - RNA, 19 nt, Human
uagaccaccaagccuugau

SEQ ID NO: 1342803 - RNA, 19 nt, Human
uagaccagcagacagagcc

SEQ ID NO: 1342804 - RNA, 22 nt, Human
uagaccagcagacagagccagg

SEQ ID NO: 1342805 - RNA, 16 nt, Human
uagagaagcaaguaaa

SEQ ID NO: 1342806 - RNA, 13 nt, Human
uagagaagcaagu

SEQ ID NO: 1342807 - RNA, 13 nt, Human
uagagaaggaccc

SEQ ID NO: 1342808 - RNA, 15 nt, Human
uagagaagacaggcu

SEQ ID NO: 1342809 - RNA, 18 nt, Human
uagagaagacaggcugga

SEQ ID NO: 1342810 - RNA, 22 nt, Human
uagagaaggacccggaggggcc

SEQ ID NO: 1342811 - RNA, 19 nt, Human
uagagaaguauacauaagu

SEQ ID NO: 1342812 - RNA, 22 nt, Human
uagagucccagguuggcucugc

SEQ ID NO: 1342813 - RNA, 16 nt, Human
uagaggugagaaauuu

SEQ ID NO: 1342814 - RNA, 17 nt, Human
uagaggugagaaauuua

SEQ ID NO: 1342815 - RNA, 17 nt, Human
uagagucugaacagcug

SEQ ID NO: 1342816 - RNA, 15 nt, Human
uagagugucuuucca

SEQ ID NO: 1342817 - RNA, 21 nt, Human
uacauggcuggagcuagaauu

SEQ ID NO: 1342818 - RNA, 12 nt, Human
uacaugaaacag

SEQ ID NO: 1342819 - RNA, 13 nt, Human
uacaugaaacaga

SEQ ID NO: 1342820 - RNA, 14 nt, Human
uacaugaaacagaa

SEQ ID NO: 1342821 - RNA, 15 nt, Human
uacaugaaacagaaa

SEQ ID NO: 1342822 - RNA, 21 nt, Human
uacaugaaacagaaacaaaaa

SEQ ID NO: 1342823 - RNA, 21 nt, Human
uacaugcacuuggcugcauaa

SEQ ID NO: 1342824 - RNA, 14 nt, Human
uacaugcauacacu

SEQ ID NO: 1342825 - RNA, 20 nt, Human
uacaugcauacacucucaaa

SEQ ID NO: 1342826 - RNA, 21 nt, Human
uacaugcauacacucucaaag

SEQ ID NO: 1342827 - RNA, 20 nt, Human
uacaugcauuacugcaugca

SEQ ID NO: 1342828 - RNA, 22 nt, Human
uacaugcauugagcucucucau

SEQ ID NO: 1342829 - RNA, 17 nt, Human
uacaugcuaagagaagu

SEQ ID NO: 1342830 - RNA, 18 nt, Human
uacaugcuaagagaagua

SEQ ID NO: 1342831 - RNA, 19 nt, Human
uacaugcuaagagaaguag

SEQ ID NO: 1342832 - RNA, 12 nt, Human
uacaugcuuauu

SEQ ID NO: 1342833 - RNA, 15 nt, Human
uacaugcuuauucca

SEQ ID NO: 1342834 - RNA, 16 nt, Human
uacaugcuuauuccau

SEQ ID NO: 1342835 - RNA, 17 nt, Human
uacaugcuuauuccaug

SEQ ID NO: 1342836 - RNA, 20 nt, Human
uacaugcuuauuccaugacu

SEQ ID NO: 1342837 - RNA, 21 nt, Human
uacaugcuuauuccaugacug

SEQ ID NO: 1342838 - RNA, 23 nt, Human
uacaugcuuauuccaugacugcu

SEQ ID NO: 1342839 - RNA, 18 nt, Human
uacaguuuugaguagagu

SEQ ID NO: 1342840 - RNA, 13 nt, Human
uacauaacugaaa

SEQ ID NO: 1342841 - RNA, 15 nt, Human
uacauaacugaaaau

SEQ ID NO: 1342842 - RNA, 17 nt, Human
uacauaacugaaaaugu

SEQ ID NO: 1342843 - RNA, 21 nt, Human
uacauaacugaaaaugugcua

SEQ ID NO: 1342844 - RNA, 14 nt, Human
uacaguuuuaacug

SEQ ID NO: 1342845 - RNA, 15 nt, Human
uacaguuuuaacugu

SEQ ID NO: 1342846 - RNA, 17 nt, Human
uacaguuuuaacugugg

SEQ ID NO: 1342847 - RNA, 19 nt, Human
uacaguuuuaacuguggau

SEQ ID NO: 1342848 - RNA, 21 nt, Human
uacaguuuuaacuguggauau

SEQ ID NO: 1342849 - RNA, 20 nt, Human
uacaguuuuaacuguggaua

SEQ ID NO: 1342850 - RNA, 23 nt, Human
uacaguucggugagcuacaaaug

SEQ ID NO: 1342851 - RNA, 20 nt, Human
uacaggaugaugacuaugga

SEQ ID NO: 1342852 - RNA, 14 nt, Human
uacaggauuugaaa

SEQ ID NO: 1342853 - RNA, 13 nt, Human
uacaguucugcuc

SEQ ID NO: 1342854 - RNA, 20 nt, Human
uacaguucugcucugguugu

SEQ ID NO: 1342855 - RNA, 14 nt, Human
uacaguucuguggu

SEQ ID NO: 1342856 - RNA, 15 nt, Human
uacaguucugugguu

SEQ ID NO: 1342857 - RNA, 21 nt, Human
uacaguucugugguuucaugu

SEQ ID NO: 1342858 - RNA, 16 nt, Human
uacagcuaaucagcau

SEQ ID NO: 1342859 - RNA, 18 nt, Human
uacagcuaaucagcauuc

SEQ ID NO: 1342860 - RNA, 17 nt, Human
uacacuguguaaauacc

SEQ ID NO: 1342861 - RNA, 15 nt, Human
uacagcuggggugca

SEQ ID NO: 1342862 - RNA, 14 nt, Human
uacagcuguauugu

SEQ ID NO: 1342863 - RNA, 19 nt, Human
uacagcuguauugucugaa

SEQ ID NO: 1342864 - RNA, 18 nt, Human
uacagcuguauugucuga

SEQ ID NO: 1342865 - RNA, 13 nt, Human
uacagcugccugc

SEQ ID NO: 1342866 - RNA, 15 nt, Human
uacagcugagcuaug

SEQ ID NO: 1342867 - RNA, 14 nt, Human
uacagcugccugca

SEQ ID NO: 1342868 - RNA, 13 nt, Human
uacagcuggcucu

SEQ ID NO: 1342869 - RNA, 17 nt, Human
uacagcuggggugcagg

SEQ ID NO: 1342870 - RNA, 21 nt, Human
uacagcucagaaguuucuucu

SEQ ID NO: 1342871 - RNA, 15 nt, Human
uacaaccuccgccuc

SEQ ID NO: 1342872 - RNA, 16 nt, Human
uacaaccaauggaaug

SEQ ID NO: 1342873 - RNA, 13 nt, Human
uacaaauggauuu

SEQ ID NO: 1342874 - RNA, 17 nt, Human
uacaaauguuaaaaugu

SEQ ID NO: 1342875 - RNA, 18 nt, Human
uacaaauguuaaaaugug

SEQ ID NO: 1342876 - RNA, 23 nt, Human
uacaaauguuaaaauguguuguu

SEQ ID NO: 1342877 - RNA, 21 nt, Human
uacaaauguuaaaauguguug

SEQ ID NO: 1342878 - RNA, 22 nt, Human
uacaacggagucaaaaauuaaa

SEQ ID NO: 1342879 - RNA, 15 nt, Human
uacaacggagucaaa

SEQ ID NO: 1342880 - RNA, 17 nt, Human
uacaacucauacacucg

SEQ ID NO: 1342881 - RNA, 23 nt, Human
uacaacugccucgaaacacagaa

SEQ ID NO: 1342882 - RNA, 14 nt, Human
uacaagaagcauuu

SEQ ID NO: 1342883 - RNA, 15 nt, Human
uacaagaagcauuuu

SEQ ID NO: 1342884 - RNA, 17 nt, Human
uacacacggugccuuua

SEQ ID NO: 1342885 - RNA, 16 nt, Human
uacacacggugccuuu

SEQ ID NO: 1342886 - RNA, 13 nt, Human
uacacagucagcu

SEQ ID NO: 1342887 - RNA, 21 nt, Human
uacacauguaucuaugcauuu

SEQ ID NO: 1342888 - RNA, 21 nt, Human
uacacucucaaagcaaauaau

SEQ ID NO: 1342889 - RNA, 19 nt, Human
uacacucguaugauacuuc

SEQ ID NO: 1342890 - RNA, 13 nt, Human
uacacucugcugu

SEQ ID NO: 1342891 - RNA, 14 nt, Human
uacacucugcuguu

SEQ ID NO: 1342892 - RNA, 23 nt, Human
uacacucugcuguuugacaccuc

SEQ ID NO: 1342893 - RNA, 16 nt, Human
uacacucuuuguaaga

SEQ ID NO: 1342894 - RNA, 15 nt, Human
uacacucugcuguuu

SEQ ID NO: 1342895 - RNA, 20 nt, Human
uaauuccuucagcacuuuag

SEQ ID NO: 1342896 - RNA, 21 nt, Human
uaauuccuucagcacuuuaga

SEQ ID NO: 1342897 - RNA, 11 nt, Human
uaauucuaaau

SEQ ID NO: 1342898 - RNA, 18 nt, Human
uaauucuaaaugaauguu

SEQ ID NO: 1342899 - RNA, 15 nt, Human
uaauucuaugagaua

SEQ ID NO: 1342900 - RNA, 15 nt, Human
uaauucuaugccugu

SEQ ID NO: 1342901 - RNA, 23 nt, Human
uaauucuauuaaagugcuaaggu

SEQ ID NO: 1342902 - RNA, 19 nt, Human
uaauucucagaaaggcaag

SEQ ID NO: 1342903 - RNA, 14 nt, Human
uaauuccuucagca

SEQ ID NO: 1342904 - RNA, 14 nt, Human
uaauuagugccacu

SEQ ID NO: 1342905 - RNA, 19 nt, Human
uaauuagugccacuuaaug

SEQ ID NO: 1342906 - RNA, 21 nt, Human
uaauuagugccacuuaaugua

SEQ ID NO: 1342907 - RNA, 22 nt, Human
uaauuagugccacuuaauguau

SEQ ID NO: 1342908 - RNA, 18 nt, Human
uaauuuugugaagcaaaa

SEQ ID NO: 1342909 - RNA, 13 nt, Human
uaauuuuguguaa

SEQ ID NO: 1342910 - RNA, 19 nt, Human
uaauuuuguguaagaaaua

SEQ ID NO: 1342911 - RNA, 20 nt, Human
uaauuuuguguaagaaauac

SEQ ID NO: 1342912 - RNA, 12 nt, Human
uaauuuuuauau

SEQ ID NO: 1342913 - RNA, 16 nt, Human
uaauuuuuacagaauu

SEQ ID NO: 1342914 - RNA, 17 nt, Human
uaauuuuuacagaauug

SEQ ID NO: 1342915 - RNA, 16 nt, Human
uaauuuuuauauuuga

SEQ ID NO: 1342916 - RNA, 17 nt, Human
uaauuuuuauauuugaa

SEQ ID NO: 1342917 - RNA, 22 nt, Human
uaauuuuuacagaauugcuugu

SEQ ID NO: 1342918 - RNA, 19 nt, Human
uacaaagguuuaaaugaac

SEQ ID NO: 1342919 - RNA, 20 nt, Human
uacaaagguuuaaaugaaca

SEQ ID NO: 1342920 - RNA, 20 nt, Human
uacaaaguuucaauuuguuu

SEQ ID NO: 1342921 - RNA, 16 nt, Human
uacaaaucaaguauuu

SEQ ID NO: 1342922 - RNA, 16 nt, Human
uacaaaucagaaguca

SEQ ID NO: 1342923 - RNA, 17 nt, Human
uacaaaucagaagucau

SEQ ID NO: 1342924 - RNA, 19 nt, Human
uacaaaucagaagucaucu

SEQ ID NO: 1342925 - RNA, 20 nt, Human
uacaaaucagaagucaucuu

SEQ ID NO: 1342926 - RNA, 21 nt, Human
uacaaaucagaagucaucuug

SEQ ID NO: 1342927 - RNA, 22 nt, Human
uacaaaucagaagucaucuugc

SEQ ID NO: 1342928 - RNA, 12 nt, Human
uacaaaugaaaa

SEQ ID NO: 1342929 - RNA, 15 nt, Human
uacaaagguuuaaau

SEQ ID NO: 1342930 - RNA, 16 nt, Human
uacaaagguuuaaaug

SEQ ID NO: 1342931 - RNA, 17 nt, Human
uacaaagguuuaaauga

SEQ ID NO: 1342932 - RNA, 18 nt, Human
uacaaagguuuaaaugaa

SEQ ID NO: 1342933 - RNA, 19 nt, Human
uacaaacugaagaguaauc

SEQ ID NO: 1342934 - RNA, 19 nt, Human
uacaaacucccacuuguca

SEQ ID NO: 1342935 - RNA, 15 nt, Human
uacaaacugaagagu

SEQ ID NO: 1342936 - RNA, 16 nt, Human
uacaaagauucucuau

SEQ ID NO: 1342937 - RNA, 17 nt, Human
uacaaagcccuuuuaua

SEQ ID NO: 1342938 - RNA, 18 nt, Human
uacaaaggcuuauuaauu

SEQ ID NO: 1342939 - RNA, 14 nt, Human
uacaaagguuuaaa

SEQ ID NO: 1342940 - RNA, 22 nt, Human
uaccaaaaaucucaauauuuca

SEQ ID NO: 1342941 - RNA, 20 nt, Human
uacauuuuuugggcagcaau

SEQ ID NO: 1342942 - RNA, 15 nt, Human
uaccaaaaauaaaua

SEQ ID NO: 1342943 - RNA, 20 nt, Human
uaccguaggcuuuguauuca

SEQ ID NO: 1342944 - RNA, 22 nt, Human
uaccgagucucuucuccacugg

SEQ ID NO: 1342945 - RNA, 19 nt, Human
uaccgcgucuacccuggga

SEQ ID NO: 1342946 - RNA, 20 nt, Human
uaccgaguucaagugauuuu

SEQ ID NO: 1342947 - RNA, 22 nt, Human
uaccuaacgaaguauccuucag

SEQ ID NO: 1342948 - RNA, 14 nt, Human
uaccgaaugugucu

SEQ ID NO: 1342949 - RNA, 15 nt, Human
uaccgaaugugucuu

SEQ ID NO: 1342950 - RNA, 17 nt, Human
uaccgagucucuucucc

SEQ ID NO: 1342951 - RNA, 17 nt, Human
uaccgaaugugucuuua

SEQ ID NO: 1342952 - RNA, 16 nt, Human
uaccgaaugugucuuu

SEQ ID NO: 1342953 - RNA, 18 nt, Human
uaccgagucucuucucca

SEQ ID NO: 1342954 - RNA, 21 nt, Human
uaccgagucucuucuccacug

SEQ ID NO: 1342955 - RNA, 17 nt, Human
uaccuaagauuacaaau

SEQ ID NO: 1342956 - RNA, 20 nt, Human
uaccuaagauuacaaaucag

SEQ ID NO: 1342957 - RNA, 22 nt, Human
uaccuaagauuacaaaucagaa

SEQ ID NO: 1342958 - RNA, 17 nt, Human
uaccuaagaaguacauu

SEQ ID NO: 1342959 - RNA, 13 nt, Human
uaccuacuuugac

SEQ ID NO: 1342960 - RNA, 14 nt, Human
uaccuacuuugacu

SEQ ID NO: 1342961 - RNA, 21 nt, Human
uaccuacuuugacuuuuugca

SEQ ID NO: 1342962 - RNA, 18 nt, Human
uaccuagauuuaauauaa

SEQ ID NO: 1342963 - RNA, 22 nt, Human
uaccuagcgggauggggcuccc

SEQ ID NO: 1342964 - RNA, 15 nt, Human
uaccuagcuggcucu

SEQ ID NO: 1342965 - RNA, 21 nt, Human
uaccucaauuuucacuguguc

SEQ ID NO: 1342966 - RNA, 20 nt, Human
uaccucaauuuucacugugu

SEQ ID NO: 1342967 - RNA, 18 nt, Human
uaccucaauuuucacugu

SEQ ID NO: 1342968 - RNA, 11 nt, Human
uaccucagccu

SEQ ID NO: 1342969 - RNA, 13 nt, Human
uaccucagccugg

SEQ ID NO: 1342970 - RNA, 21 nt, Human
uaccuaucccaccuccauccc

SEQ ID NO: 1342971 - RNA, 14 nt, Human
uaccucagccuggg

SEQ ID NO: 1342972 - RNA, 15 nt, Human
uaccucagccugggc

SEQ ID NO: 1342973 - RNA, 21 nt, Human
uaccucagccugggcgcuggu

SEQ ID NO: 1342974 - RNA, 14 nt, Human
uaccucaggcagcu

SEQ ID NO: 1342975 - RNA, 16 nt, Human
uaccucaggcagcuca

SEQ ID NO: 1342976 - RNA, 17 nt, Human
uaccucaggcagcucaa

SEQ ID NO: 1342977 - RNA, 18 nt, Human
uaccucaggcagcucaag

SEQ ID NO: 1342978 - RNA, 17 nt, Human
uaccucagccugggcgc

SEQ ID NO: 1342979 - RNA, 22 nt, Human
uacgaaccuacaguuuuaacug

SEQ ID NO: 1342980 - RNA, 18 nt, Human
uacuaaagccaaacauau

SEQ ID NO: 1342981 - RNA, 23 nt, Human
uacuaacaaucagcuccuuccug

SEQ ID NO: 1342982 - RNA, 14 nt, Human
uacuaaagccaaac

SEQ ID NO: 1342983 - RNA, 20 nt, Human
uacuaagcauugaauggcua

SEQ ID NO: 1342984 - RNA, 19 nt, Human
uacuaaggaagauuacuca

SEQ ID NO: 1342985 - RNA, 16 nt, Human
uacuaaggacguuguu

SEQ ID NO: 1342986 - RNA, 16 nt, Human
uacgaaauaauuguug

SEQ ID NO: 1342987 - RNA, 17 nt, Human
uacgaaauaauuguugu

SEQ ID NO: 1342988 - RNA, 22 nt, Human
uacgaaauaauuguuguucugu

SEQ ID NO: 1342989 - RNA, 20 nt, Human
uacgaaauaauuguuguucu

SEQ ID NO: 1342990 - RNA, 20 nt, Human
uaccuuuuuauuugcaugug

SEQ ID NO: 1342991 - RNA, 23 nt, Human
uaccucuccagccucagcucuca

SEQ ID NO: 1342992 - RNA, 15 nt, Human
uaccucuauauacca

SEQ ID NO: 1342993 - RNA, 16 nt, Human
uaccucuauauaccaa

SEQ ID NO: 1342994 - RNA, 19 nt, Human
uaccucuaauaguauaaac

SEQ ID NO: 1342995 - RNA, 18 nt, Human
uaccucuaauaguauaaa

SEQ ID NO: 1342996 - RNA, 17 nt, Human
uaccucuaauaguauaa

SEQ ID NO: 1342997 - RNA, 16 nt, Human
uaccucuaauaguaua

SEQ ID NO: 1342998 - RNA, 13 nt, Human
uaccuccugagaa

SEQ ID NO: 1342999 - RNA, 14 nt, Human
uaccuccugagaaa

SEQ ID NO: 1343000 - RNA, 21 nt, Human
uaccuuuugaggagccccagc

SEQ ID NO: 1343001 - RNA, 22 nt, Human
uaccuuagugcaguuauuugcu

SEQ ID NO: 1343002 - RNA, 18 nt, Human
uaccuuauaguuacugug

SEQ ID NO: 1343003 - RNA, 16 nt, Human
uaccuuauaguuacug

SEQ ID NO: 1343004 - RNA, 17 nt, Human
uaccuuauaguuacugu

SEQ ID NO: 1343005 - RNA, 20 nt, Human
uaccuuagugcaguuauuug

SEQ ID NO: 1343006 - RNA, 19 nt, Human
uaccuuagugcaguuauuu

SEQ ID NO: 1343007 - RNA, 18 nt, Human
uaccuuagugcaguuauu

SEQ ID NO: 1343008 - RNA, 17 nt, Human
uaccuuagugcaguuau

SEQ ID NO: 1343009 - RNA, 16 nt, Human
uaccuuagugcaguua

SEQ ID NO: 1343010 - RNA, 14 nt, Human
uaccuuagugcagu

SEQ ID NO: 1343011 - RNA, 15 nt, Human
uacugcucuccucca

SEQ ID NO: 1343012 - RNA, 12 nt, Human
uacugcucugag

SEQ ID NO: 1343013 - RNA, 13 nt, Human
uacugcucugaga

SEQ ID NO: 1343014 - RNA, 14 nt, Human
uacugcucugagaa

SEQ ID NO: 1343015 - RNA, 20 nt, Human
uacugcuacagcaauuucua

SEQ ID NO: 1343016 - RNA, 12 nt, Human
uacugcgacuuu

SEQ ID NO: 1343017 - RNA, 16 nt, Human
uacugcgacuuucugc

SEQ ID NO: 1343018 - RNA, 17 nt, Human
uacugcgacuuucugcc

SEQ ID NO: 1343019 - RNA, 18 nt, Human
uacugcgacuuucugccu

SEQ ID NO: 1343020 - RNA, 19 nt, Human
uacugcgacuuucugccug

SEQ ID NO: 1343021 - RNA, 20 nt, Human
uacugcgacuuucugccugg

SEQ ID NO: 1343022 - RNA, 21 nt, Human
uacugcgacuuucugccugga

SEQ ID NO: 1343023 - RNA, 22 nt, Human
uacugcgacuuucugccuggag

SEQ ID NO: 1343024 - RNA, 20 nt, Human
uacugcuuaauucaaauaau

SEQ ID NO: 1343025 - RNA, 19 nt, Human
uacugcuuaauucaaauaa

SEQ ID NO: 1343026 - RNA, 13 nt, Human
uacugcuuaauuc

SEQ ID NO: 1343027 - RNA, 20 nt, Human
uacugcugagauacauacag

SEQ ID NO: 1343028 - RNA, 21 nt, Human
uacugcugagauacauacaga

SEQ ID NO: 1343029 - RNA, 24 nt, Human
uacugcuuggagcugagcaaauca

SEQ ID NO: 1343030 - RNA, 19 nt, Human
uacugcuuggagcugagca

SEQ ID NO: 1343031 - RNA, 14 nt, Human
uacuggaaagcuuu

SEQ ID NO: 1343032 - RNA, 18 nt, Human
uacuggaaauuaggggau

SEQ ID NO: 1343033 - RNA, 23 nt, Human
uacugucauccucaaagaaagug

SEQ ID NO: 1343034 - RNA, 22 nt, Human
uacugugugugugaaugaacac

SEQ ID NO: 1343035 - RNA, 23 nt, Human
uacugugugugugaaugaacacu

SEQ ID NO: 1343036 - RNA, 15 nt, Human
uacuguguuaugcaa

SEQ ID NO: 1343037 - RNA, 16 nt, Human
uacuguguuaugcaaa

SEQ ID NO: 1343038 - RNA, 17 nt, Human
uacuguguuaugcaaaa

SEQ ID NO: 1343039 - RNA, 22 nt, Human
uacuguguuaugcaaaagcaag

SEQ ID NO: 1343040 - RNA, 19 nt, Human
uacuugcucuugaugccug

SEQ ID NO: 1343041 - RNA, 18 nt, Human
uacuugcucuugaugccu

SEQ ID NO: 1343042 - RNA, 14 nt, Human
uacuugcucuugau

SEQ ID NO: 1343043 - RNA, 13 nt, Human
uacuugcucuuga

SEQ ID NO: 1343044 - RNA, 20 nt, Human
uacuugcucuugaugccugg

SEQ ID NO: 1343045 - RNA, 18 nt, Human
uacuugaagggccagagc

SEQ ID NO: 1343046 - RNA, 19 nt, Human
uacuugaagggccagagcc

SEQ ID NO: 1343047 - RNA, 20 nt, Human
uacuugaagggccagagcca

SEQ ID NO: 1343048 - RNA, 19 nt, Human
uacuuguaaauauaaagac

SEQ ID NO: 1343049 - RNA, 20 nt, Human
uacuuguaaauauaaagacg

SEQ ID NO: 1343050 - RNA, 12 nt, Human
uacuuguaauua

SEQ ID NO: 1343051 - RNA, 13 nt, Human
uacuuguaauuau

SEQ ID NO: 1343052 - RNA, 15 nt, Human
uacuuguaauuaugg

SEQ ID NO: 1343053 - RNA, 13 nt, Human
uacuugucuguuu

SEQ ID NO: 1343054 - RNA, 14 nt, Human
uacuuguaauuaug

SEQ ID NO: 1343055 - RNA, 19 nt, Human
uacuguuuauuaaaguaca

SEQ ID NO: 1343056 - RNA, 16 nt, Human
uacuugaacguuuucu

SEQ ID NO: 1343057 - RNA, 18 nt, Human
uacuugaacguuuucuaa

SEQ ID NO: 1343058 - RNA, 19 nt, Human
uacuugaacguuuucuaau

SEQ ID NO: 1343059 - RNA, 20 nt, Human
uacuugaacguuuucuaauu

SEQ ID NO: 1343060 - RNA, 21 nt, Human
uacuugaacguuuucuaauug

SEQ ID NO: 1343061 - RNA, 23 nt, Human
uacuugaacguuuucuaauugcu

SEQ ID NO: 1343062 - RNA, 24 nt, Human
uacuugaacguuuucuaauugcuu

SEQ ID NO: 1343063 - RNA, 11 nt, Human
uacuugaaggg

SEQ ID NO: 1343064 - RNA, 12 nt, Human
uacuugaagggc

SEQ ID NO: 1343065 - RNA, 14 nt, Human
uacuugaagggcca

SEQ ID NO: 1343066 - RNA, 15 nt, Human
uacuugaagggccag

SEQ ID NO: 1343067 - RNA, 16 nt, Human
uacuugaagggccaga

SEQ ID NO: 1343068 - RNA, 17 nt, Human
uacuugaagggccagag

SEQ ID NO: 1343069 - RNA, 21 nt, Human
uacugccuauuuuaauaaaca

SEQ ID NO: 1343070 - RNA, 10 nt, Human
uacugccugc

SEQ ID NO: 1343071 - RNA, 11 nt, Human
uacugccugcu

SEQ ID NO: 1343072 - RNA, 12 nt, Human
uacugccugcuu

SEQ ID NO: 1343073 - RNA, 14 nt, Human
uacugccugcuugg

SEQ ID NO: 1343074 - RNA, 16 nt, Human
uacugccugcuugggg

SEQ ID NO: 1343075 - RNA, 14 nt, Human
uacugccuauuuua

SEQ ID NO: 1343076 - RNA, 20 nt, Human
uacugccauucacuucauaa

SEQ ID NO: 1343077 - RNA, 22 nt, Human
uacugccgucagugcugugcug

SEQ ID NO: 1343078 - RNA, 19 nt, Human
uacugcccaggccugccug

SEQ ID NO: 1343079 - RNA, 20 nt, Human
uacugcccaggccugccugu

SEQ ID NO: 1343080 - RNA, 21 nt, Human
uacugcccaggccugccuguu

SEQ ID NO: 1343081 - RNA, 22 nt, Human
uacugcccaggccugccuguuc

SEQ ID NO: 1343082 - RNA, 17 nt, Human
uacuccuaugaucugag

SEQ ID NO: 1343083 - RNA, 13 nt, Human
uacucuaagaucu

SEQ ID NO: 1343084 - RNA, 15 nt, Human
uacucuaagaucuua

SEQ ID NO: 1343085 - RNA, 18 nt, Human
uacucuaagaucuuagau

SEQ ID NO: 1343086 - RNA, 20 nt, Human
uacucuaagaucuuagauuc

SEQ ID NO: 1343087 - RNA, 21 nt, Human
uacucuaagaucuuagauucu

SEQ ID NO: 1343088 - RNA, 22 nt, Human
uacucuaagaucuuagauucuc

SEQ ID NO: 1343089 - RNA, 16 nt, Human
uacugcaaaaagaaaa

SEQ ID NO: 1343090 - RNA, 14 nt, Human
uacugcaaaucagg

SEQ ID NO: 1343091 - RNA, 21 nt, Human
uacugcaaaucaggcuuuugu

SEQ ID NO: 1343092 - RNA, 23 nt, Human
uacugcaaaucaggcuuuuguuu

SEQ ID NO: 1343093 - RNA, 16 nt, Human
uacugcauuauuugag

SEQ ID NO: 1343094 - RNA, 13 nt, Human
uacugcaugcacu

SEQ ID NO: 1343095 - RNA, 22 nt, Human
uacugcaaaucaggcuuuuguu

SEQ ID NO: 1343096 - RNA, 21 nt, Human
uacugcaagguucaacuuauu

SEQ ID NO: 1343097 - RNA, 12 nt, Human
uacugcagccuc

SEQ ID NO: 1343098 - RNA, 17 nt, Human
uacugcagccuccagag

SEQ ID NO: 1343099 - RNA, 12 nt, Human
uacuccucccag

SEQ ID NO: 1343100 - RNA, 19 nt, Human
uacuccuaugaucugaguc

SEQ ID NO: 1343101 - RNA, 13 nt, Human
uacucccaggcac

SEQ ID NO: 1343102 - RNA, 14 nt, Human
uacucccucucagg

SEQ ID NO: 1343103 - RNA, 22 nt, Human
uacuccaaaacuucguuuaaug

SEQ ID NO: 1343104 - RNA, 19 nt, Human
uacuccaaaacuucguuua

SEQ ID NO: 1343105 - RNA, 13 nt, Human
uacuccacacugc

SEQ ID NO: 1343106 - RNA, 14 nt, Human
uacuccacacugca

SEQ ID NO: 1343107 - RNA, 11 nt, Human
uacucauuuuu

SEQ ID NO: 1343108 - RNA, 14 nt, Human
uacucauuuuucau

SEQ ID NO: 1343109 - RNA, 16 nt, Human
uacucauuuuucauga

SEQ ID NO: 1343110 - RNA, 17 nt, Human
uacuccacacugcacaa

SEQ ID NO: 1343111 - RNA, 20 nt, Human
uacucccaggcacugucuua

SEQ ID NO: 1343112 - RNA, 16 nt, Human
uacuaauuccacaccu

SEQ ID NO: 1343113 - RNA, 13 nt, Human
uacuaaugaaaac

SEQ ID NO: 1343114 - RNA, 16 nt, Human
uacuaaugaaaacaga

SEQ ID NO: 1343115 - RNA, 13 nt, Human
uacuaauuccaca

SEQ ID NO: 1343116 - RNA, 12 nt, Human
uaaguccagugu

SEQ ID NO: 1343117 - RNA, 13 nt, Human
uaagucagaacag

SEQ ID NO: 1343118 - RNA, 14 nt, Human
uaaguccaguccag

SEQ ID NO: 1343119 - RNA, 22 nt, Human
uaaguccaguccaguccuaucu

SEQ ID NO: 1343120 - RNA, 13 nt, Human
uaagugaaauaag

SEQ ID NO: 1343121 - RNA, 15 nt, Human
uaagugaaaaacaug

SEQ ID NO: 1343122 - RNA, 15 nt, Human
uaagugaaaauauag

SEQ ID NO: 1343123 - RNA, 22 nt, Human
uaagugauugcugguuuuaguu

SEQ ID NO: 1343124 - RNA, 18 nt, Human
uaagugaacacccaugaa

SEQ ID NO: 1343125 - RNA, 16 nt, Human
uaagugcccucuccca

SEQ ID NO: 1343126 - RNA, 14 nt, Human
uaagugcccucucc

SEQ ID NO: 1343127 - RNA, 15 nt, Human
uaagugcccucuccc

SEQ ID NO: 1343128 - RNA, 21 nt, Human
uaagugcccucucccacccuc

SEQ ID NO: 1343129 - RNA, 16 nt, Human
uaagugauuguaugaa

SEQ ID NO: 1343130 - RNA, 20 nt, Human
uaauaaaggacuguaaucuu

SEQ ID NO: 1343131 - RNA, 16 nt, Human
uaauaaaggacuguaa

SEQ ID NO: 1343132 - RNA, 13 nt, Human
uaauaaaggacug

SEQ ID NO: 1343133 - RNA, 12 nt, Human
uaauaaaggacu

SEQ ID NO: 1343134 - RNA, 12 nt, Human
uaauaaagcugu

SEQ ID NO: 1343135 - RNA, 15 nt, Human
uaaguggugugugua

SEQ ID NO: 1343136 - RNA, 16 nt, Human
uaagugguguguguau

SEQ ID NO: 1343137 - RNA, 14 nt, Human
uaaguguacauaug

SEQ ID NO: 1343138 - RNA, 18 nt, Human
uaaguguacauaugugcu

SEQ ID NO: 1343139 - RNA, 14 nt, Human
uaaggcaaucaugg

SEQ ID NO: 1343140 - RNA, 19 nt, Human
uaaggcucuaugagucuag

SEQ ID NO: 1343141 - RNA, 22 nt, Human
uaaggcucuaugagucuagaug

SEQ ID NO: 1343142 - RNA, 14 nt, Human
uaaggcucugagag

SEQ ID NO: 1343143 - RNA, 15 nt, Human
uaaggcucugagagu

SEQ ID NO: 1343144 - RNA, 20 nt, Human
uaaggcaacaaaagaagccc

SEQ ID NO: 1343145 - RNA, 19 nt, Human
uaaggcucugagagucuag

SEQ ID NO: 1343146 - RNA, 22 nt, Human
uaaggcucugagagucuagauu

SEQ ID NO: 1343147 - RNA, 24 nt, Human
uaaggcucugagagucuagauucu

SEQ ID NO: 1343148 - RNA, 13 nt, Human
uaaggcuguguaa

SEQ ID NO: 1343149 - RNA, 16 nt, Human
uaaggcuguguaagau

SEQ ID NO: 1343150 - RNA, 22 nt, Human
uaaggcuguguaagauuuguuu

SEQ ID NO: 1343151 - RNA, 18 nt, Human
uaagcccagugcacugaa

SEQ ID NO: 1343152 - RNA, 16 nt, Human
uaagccuaaaaguggg

SEQ ID NO: 1343153 - RNA, 19 nt, Human
uaaggggaggaaccagagu

SEQ ID NO: 1343154 - RNA, 19 nt, Human
uaagggccagaaauaucuu

SEQ ID NO: 1343155 - RNA, 14 nt, Human
uaagggcacugacg

SEQ ID NO: 1343156 - RNA, 16 nt, Human
uaagggcccaggucag

SEQ ID NO: 1343157 - RNA, 22 nt, Human
uaagggaaguaguuaucauguu

SEQ ID NO: 1343158 - RNA, 19 nt, Human
uaagggaaguaguuaucau

SEQ ID NO: 1343159 - RNA, 13 nt, Human
uaagggaagaauu

SEQ ID NO: 1343160 - RNA, 13 nt, Human
uaagggguggggc

SEQ ID NO: 1343161 - RNA, 16 nt, Human
uaagggugacaaaugg

SEQ ID NO: 1343162 - RNA, 17 nt, Human
uaagggucgaaagcucu

SEQ ID NO: 1343163 - RNA, 18 nt, Human
uaagguacaagaagcauu

SEQ ID NO: 1343164 - RNA, 19 nt, Human
uaagguacaagaagcauuu

SEQ ID NO: 1343165 - RNA, 17 nt, Human
uaagguccgguguucua

SEQ ID NO: 1343166 - RNA, 18 nt, Human
uaagguccgguguucuaa

SEQ ID NO: 1343167 - RNA, 20 nt, Human
uaagguccgguguucuaaga

SEQ ID NO: 1343168 - RNA, 21 nt, Human
uaagguccgguguucuaagau

SEQ ID NO: 1343169 - RNA, 21 nt, Human
uaaggugcucucuuucugucu

SEQ ID NO: 1343170 - RNA, 13 nt, Human
uaagguguagcca

SEQ ID NO: 1343171 - RNA, 19 nt, Human
uaagguguagccacaccag

SEQ ID NO: 1343172 - RNA, 21 nt, Human
uaagguguagccacaccagga

SEQ ID NO: 1343173 - RNA, 16 nt, Human
uaagucaacuuagcau

SEQ ID NO: 1343174 - RNA, 17 nt, Human
uaagucaacaguaaacc

SEQ ID NO: 1343175 - RNA, 14 nt, Human
uaagucagaacagc

SEQ ID NO: 1343176 - RNA, 14 nt, Human
uaagucaacaguaa

SEQ ID NO: 1343177 - RNA, 15 nt, Human
uaagucaacaguaaa

SEQ ID NO: 1343178 - RNA, 16 nt, Human
uaagucaacaguaaac

SEQ ID NO: 1343179 - RNA, 15 nt, Human
uaagucaaccugccu

SEQ ID NO: 1343180 - RNA, 17 nt, Human
uaagucaaccugccuga

SEQ ID NO: 1343181 - RNA, 20 nt, Human
uaaguauuuuccuguuguca

SEQ ID NO: 1343182 - RNA, 21 nt, Human
uaaguauuuuccuguugucaa

SEQ ID NO: 1343183 - RNA, 14 nt, Human
uaauaauguuucaa

SEQ ID NO: 1343184 - RNA, 20 nt, Human
uaauaaucucacauauacaa

SEQ ID NO: 1343185 - RNA, 23 nt, Human
uaauaucccacugggagaaagga

SEQ ID NO: 1343186 - RNA, 17 nt, Human
uaauaucccuacaugua

SEQ ID NO: 1343187 - RNA, 18 nt, Human
uaauaucccuacauguau

SEQ ID NO: 1343188 - RNA, 12 nt, Human
uaauauccuaaa

SEQ ID NO: 1343189 - RNA, 14 nt, Human
uaauauccuaaaca

SEQ ID NO: 1343190 - RNA, 17 nt, Human
uaauauccuaaacauca

SEQ ID NO: 1343191 - RNA, 15 nt, Human
uaauauccuaaacau

SEQ ID NO: 1343192 - RNA, 22 nt, Human
uaauauggccacaguagucuug

SEQ ID NO: 1343193 - RNA, 18 nt, Human
uaauaugcuuaaaauaag

SEQ ID NO: 1343194 - RNA, 14 nt, Human
uaauccccuucucc

SEQ ID NO: 1343195 - RNA, 15 nt, Human
uaauccccuucuccc

SEQ ID NO: 1343196 - RNA, 17 nt, Human
uaauccccuucuccccu

SEQ ID NO: 1343197 - RNA, 18 nt, Human
uaauccccuucuccccug

SEQ ID NO: 1343198 - RNA, 21 nt, Human
uaauccccuucuccccugcac

SEQ ID NO: 1343199 - RNA, 13 nt, Human
uaaucccugcuuu

SEQ ID NO: 1343200 - RNA, 14 nt, Human
uaaucccugcuuuu

SEQ ID NO: 1343201 - RNA, 17 nt, Human
uaaucccugcuuuuugu

SEQ ID NO: 1343202 - RNA, 21 nt, Human
uaaucccugcuuuuuguguuu

SEQ ID NO: 1343203 - RNA, 19 nt, Human
uaauccgaaucucuuuuug

SEQ ID NO: 1343204 - RNA, 21 nt, Human
uaauccgaaucucuuuuugcu

SEQ ID NO: 1343205 - RNA, 16 nt, Human
uaauccgccaauauua

SEQ ID NO: 1343206 - RNA, 15 nt, Human
uaaucuggacuccuc

SEQ ID NO: 1343207 - RNA, 13 nt, Human
uaaucugccuccc

SEQ ID NO: 1343208 - RNA, 17 nt, Human
uaaucuggacuccucug

SEQ ID NO: 1343209 - RNA, 18 nt, Human
uaaucuggacuccucugu

SEQ ID NO: 1343210 - RNA, 18 nt, Human
uaauccgccaauauuagu

SEQ ID NO: 1343211 - RNA, 14 nt, Human
uaaucuagaacaca

SEQ ID NO: 1343212 - RNA, 22 nt, Human
uaaucuagaacacaggcaaaau

SEQ ID NO: 1343213 - RNA, 17 nt, Human
uaaucuagauaucgacu

SEQ ID NO: 1343214 - RNA, 22 nt, Human
uaaucuagauaucgacuuguuu

SEQ ID NO: 1343215 - RNA, 19 nt, Human
uaaucuggacuccucuguc

SEQ ID NO: 1343216 - RNA, 20 nt, Human
uaaucuggacuccucugucc

SEQ ID NO: 1343217 - RNA, 21 nt, Human
uaaucuggacuccucugucca

SEQ ID NO: 1343218 - RNA, 22 nt, Human
uaaucuggacuccucuguccag

SEQ ID NO: 1343219 - RNA, 18 nt, Human
uaaucugggccagaauuu

SEQ ID NO: 1343220 - RNA, 23 nt, Human
uaaucugggccagaauuucaaac

SEQ ID NO: 1343221 - RNA, 15 nt, Human
uaaucugccucccuc

SEQ ID NO: 1343222 - RNA, 17 nt, Human
uaaugauaacuggaaac

SEQ ID NO: 1343223 - RNA, 22 nt, Human
uaaugauaacuggaaacuucag

SEQ ID NO: 1343224 - RNA, 23 nt, Human
uaaugauaacuggaaacuucagc

SEQ ID NO: 1343225 - RNA, 17 nt, Human
uaauggcaugagaaaua

SEQ ID NO: 1343226 - RNA, 21 nt, Human
uaauggcugauaauuuuaaau

SEQ ID NO: 1343227 - RNA, 15 nt, Human
uaauggcaguuauau

SEQ ID NO: 1343228 - RNA, 21 nt, Human
uaauggcaguuauauuuugca

SEQ ID NO: 1343229 - RNA, 15 nt, Human
uaauggcaugagaaa

SEQ ID NO: 1343230 - RNA, 15 nt, Human
uaaugcuuugaaauu

SEQ ID NO: 1343231 - RNA, 22 nt, Human
uaauguuuuuugccacagcuuu

SEQ ID NO: 1343232 - RNA, 16 nt, Human
uaauguuugcauauaa

SEQ ID NO: 1343233 - RNA, 21 nt, Human
uaauguuuuuugccacagcuu

SEQ ID NO: 1343234 - RNA, 23 nt, Human
uaauguuuuuugccacagcuuuu

SEQ ID NO: 1343235 - RNA, 15 nt, Human
uaauguuugcauaua

SEQ ID NO: 1343236 - RNA, 14 nt, Human
uaauguuugcauau

SEQ ID NO: 1343237 - RNA, 22 nt, Human
uaauguuucuggauuucauacu

SEQ ID NO: 1343238 - RNA, 15 nt, Human
uaaugggauuuucuu

SEQ ID NO: 1343239 - RNA, 22 nt, Human
uaauggcugauaauuuuaaauu

SEQ ID NO: 1343240 - RNA, 19 nt, Human
uaaugguacugacuuugcu

SEQ ID NO: 1343241 - RNA, 23 nt, Human
uaaugguacugacuuugcuugcu

SEQ ID NO: 1343242 - RNA, 21 nt, Human
uaauguuggguagaaagagau

SEQ ID NO: 1343243 - RNA, 20 nt, Human
uaauguuguaugucuuguuu

SEQ ID NO: 1343244 - RNA, 21 nt, Human
uaauguuguaugucuuguuua

SEQ ID NO: 1343245 - RNA, 21 nt, Human
uaauguuggacaccuuuaggu

SEQ ID NO: 1343246 - RNA, 14 nt, Human
uaauguuguuauuu

SEQ ID NO: 1343247 - RNA, 18 nt, Human
uaauguuguuauuuaaag

SEQ ID NO: 1343248 - RNA, 22 nt, Human
uaauguuucaaacauauauaac

SEQ ID NO: 1343249 - RNA, 13 nt, Human
uaaauucuuucau

SEQ ID NO: 1343250 - RNA, 20 nt, Human
uaaauugacacuuaaaaaug

SEQ ID NO: 1343251 - RNA, 23 nt, Human
uaaauugacacuuaaaaaugguu

SEQ ID NO: 1343252 - RNA, 15 nt, Human
uaaauuuauuuucuu

SEQ ID NO: 1343253 - RNA, 20 nt, Human
uaaauuucuauuuuuaucug

SEQ ID NO: 1343254 - RNA, 17 nt, Human
uaaauuugacuuuucug

SEQ ID NO: 1343255 - RNA, 19 nt, Human
uaaauuugacuuuucugua

SEQ ID NO: 1343256 - RNA, 18 nt, Human
uaaauuugacuuuucugu

SEQ ID NO: 1343257 - RNA, 13 nt, Human
uaacacuaauaua

SEQ ID NO: 1343258 - RNA, 16 nt, Human
uaacacuaauauauuu

SEQ ID NO: 1343259 - RNA, 20 nt, Human
uaacacuaauauauuuaaaa

SEQ ID NO: 1343260 - RNA, 22 nt, Human
uaacacuaauauauuuaaaaau

SEQ ID NO: 1343261 - RNA, 23 nt, Human
uaacacuaauauauuuaaaaaua

SEQ ID NO: 1343262 - RNA, 14 nt, Human
uaacacucagaagc

SEQ ID NO: 1343263 - RNA, 18 nt, Human
uaacacucagaagccugg

SEQ ID NO: 1343264 - RNA, 19 nt, Human
uaacacucagaagccuggg

SEQ ID NO: 1343265 - RNA, 20 nt, Human
uaacacucagaagccugggg

SEQ ID NO: 1343266 - RNA, 21 nt, Human
uaacacucagaagccuggggg

SEQ ID NO: 1343267 - RNA, 22 nt, Human
uaaauucucucucuugcaggaa

SEQ ID NO: 1343268 - RNA, 18 nt, Human
uaaauucccguuuuguca

SEQ ID NO: 1343269 - RNA, 19 nt, Human
uaaauucccguuuugucac

SEQ ID NO: 1343270 - RNA, 17 nt, Human
uaaaugucucacugagc

SEQ ID NO: 1343271 - RNA, 15 nt, Human
uaaaugucucacuga

SEQ ID NO: 1343272 - RNA, 15 nt, Human
uaaauguccauucuu

SEQ ID NO: 1343273 - RNA, 20 nt, Human
uaaaugucuuuaaugcaaua

SEQ ID NO: 1343274 - RNA, 18 nt, Human
uaaaugucuuuaaugcaa

SEQ ID NO: 1343275 - RNA, 19 nt, Human
uaaaugucuuuaaugcaau

SEQ ID NO: 1343276 - RNA, 19 nt, Human
uaaaugugaugaauacugu

SEQ ID NO: 1343277 - RNA, 19 nt, Human
uaaaugugauucaccucuu

SEQ ID NO: 1343278 - RNA, 19 nt, Human
uaaaugugcaauagaaggu

SEQ ID NO: 1343279 - RNA, 22 nt, Human
uaaaugugcaauagaaggugau

SEQ ID NO: 1343280 - RNA, 16 nt, Human
uaaauucacaaacuuu

SEQ ID NO: 1343281 - RNA, 18 nt, Human
uaaauucacaaacuuuua

SEQ ID NO: 1343282 - RNA, 13 nt, Human
uaaauguauacua

SEQ ID NO: 1343283 - RNA, 12 nt, Human
uaaauguauacu

SEQ ID NO: 1343284 - RNA, 21 nt, Human
uaaauguaguucugcuccaga

SEQ ID NO: 1343285 - RNA, 17 nt, Human
uaaauguagaguuuuua

SEQ ID NO: 1343286 - RNA, 18 nt, Human
uaaauguagaguuuuuaa

SEQ ID NO: 1343287 - RNA, 17 nt, Human
uaaauguaaagacaaaa

SEQ ID NO: 1343288 - RNA, 13 nt, Human
uaaauguaaagau

SEQ ID NO: 1343289 - RNA, 16 nt, Human
uaaauguaaagauauu

SEQ ID NO: 1343290 - RNA, 17 nt, Human
uaaauguaaagauauuu

SEQ ID NO: 1343291 - RNA, 20 nt, Human
uaaauguauacuauaguacc

SEQ ID NO: 1343292 - RNA, 17 nt, Human
uaaauguauacuauagu

SEQ ID NO: 1343293 - RNA, 15 nt, Human
uaaauguauacuaua

SEQ ID NO: 1343294 - RNA, 17 nt, Human
uaaaugucacuuuuuga

SEQ ID NO: 1343295 - RNA, 21 nt, Human
uaaaugucacuuuuugaggca

SEQ ID NO: 1343296 - RNA, 22 nt, Human
uaaaugucacuuuuugaggcaa

SEQ ID NO: 1343297 - RNA, 23 nt, Human
uaaaugucacuuuuugaggcaaa

SEQ ID NO: 1343298 - RNA, 20 nt, Human
uaaauggcuuccuggcaaua

SEQ ID NO: 1343299 - RNA, 23 nt, Human
uaaauggccucauguggcuggaa

SEQ ID NO: 1343300 - RNA, 13 nt, Human
uaaauggcuguaa

SEQ ID NO: 1343301 - RNA, 17 nt, Human
uaaauggggcucacaaa

SEQ ID NO: 1343302 - RNA, 17 nt, Human
uaaaguugguaaaccuu

SEQ ID NO: 1343303 - RNA, 23 nt, Human
uaaaguucuguacucaaauguag

SEQ ID NO: 1343304 - RNA, 16 nt, Human
uaaaguugauaaagau

SEQ ID NO: 1343305 - RNA, 20 nt, Human
uaaaguugauaaagauuuuu

SEQ ID NO: 1343306 - RNA, 16 nt, Human
uaaaguugguaaaccu

SEQ ID NO: 1343307 - RNA, 13 nt, Human
uaaaguucuaaga

SEQ ID NO: 1343308 - RNA, 14 nt, Human
uaaaguucuaagau

SEQ ID NO: 1343309 - RNA, 15 nt, Human
uaaaguucuaagauu

SEQ ID NO: 1343310 - RNA, 16 nt, Human
uaaaguucuaagauuc

SEQ ID NO: 1343311 - RNA, 17 nt, Human
uaaaguucuaagauucu

SEQ ID NO: 1343312 - RNA, 18 nt, Human
uaaaguucuaagauucug

SEQ ID NO: 1343313 - RNA, 19 nt, Human
uaaaguucuaagauucuga

SEQ ID NO: 1343314 - RNA, 22 nt, Human
uaaaguucuaagauucugauuu

SEQ ID NO: 1343315 - RNA, 18 nt, Human
uaaaguuguuugugccuu

SEQ ID NO: 1343316 - RNA, 12 nt, Human
uaaauggccuca

SEQ ID NO: 1343317 - RNA, 16 nt, Human
uaaauggccucaugug

SEQ ID NO: 1343318 - RNA, 22 nt, Human
uaaauggccucauguggcugga

SEQ ID NO: 1343319 - RNA, 12 nt, Human
uaaaugcccugc

SEQ ID NO: 1343320 - RNA, 13 nt, Human
uaaaugcccugcu

SEQ ID NO: 1343321 - RNA, 14 nt, Human
uaagagagaaugag

SEQ ID NO: 1343322 - RNA, 23 nt, Human
uaagagagaaugagagacacacu

SEQ ID NO: 1343323 - RNA, 13 nt, Human
uaagagagaauga

SEQ ID NO: 1343324 - RNA, 16 nt, Human
uaagaacaacuaccug

SEQ ID NO: 1343325 - RNA, 18 nt, Human
uaagaaccauugauuuaa

SEQ ID NO: 1343326 - RNA, 14 nt, Human
uaagaaccuggaac

SEQ ID NO: 1343327 - RNA, 18 nt, Human
uaagaaauugaauacuuu

SEQ ID NO: 1343328 - RNA, 21 nt, Human
uaagaaauugaauacuuugaa

SEQ ID NO: 1343329 - RNA, 22 nt, Human
uaagaaauugaauacuuugaau

SEQ ID NO: 1343330 - RNA, 23 nt, Human
uaagaaauugaauacuuugaaug

SEQ ID NO: 1343331 - RNA, 14 nt, Human
uaagaaauuucaca

SEQ ID NO: 1343332 - RNA, 21 nt, Human
uaagaaaauaucacuugucaa

SEQ ID NO: 1343333 - RNA, 15 nt, Human
uaagaaaauaaaugu

SEQ ID NO: 1343334 - RNA, 20 nt, Human
uaagaaacaacucuuugaga

SEQ ID NO: 1343335 - RNA, 21 nt, Human
uaagaaacaacucuuugagaa

SEQ ID NO: 1343336 - RNA, 20 nt, Human
uaagaaacuuuuuuauuuaa

SEQ ID NO: 1343337 - RNA, 14 nt, Human
uaagaaauugaaua

SEQ ID NO: 1343338 - RNA, 15 nt, Human
uaagaaauugaauac

SEQ ID NO: 1343339 - RNA, 17 nt, Human
uaagaaauugaauacuu

SEQ ID NO: 1343340 - RNA, 23 nt, Human
uaagaaaccuacugcccaggcac

SEQ ID NO: 1343341 - RNA, 19 nt, Human
uaagaaacuuuuuuauuua

SEQ ID NO: 1343342 - RNA, 21 nt, Human
uaagaaacuuuuuuauuuaaa

SEQ ID NO: 1343343 - RNA, 15 nt, Human
uaacuggaaacuuca

SEQ ID NO: 1343344 - RNA, 14 nt, Human
uaacugcuuucugu

SEQ ID NO: 1343345 - RNA, 17 nt, Human
uaacugcuuucuguucc

SEQ ID NO: 1343346 - RNA, 20 nt, Human
uaacugcuuucuguuccaaa

SEQ ID NO: 1343347 - RNA, 21 nt, Human
uaacugcuuucuguuccaaau

SEQ ID NO: 1343348 - RNA, 15 nt, Human
uaacuggaaaacaga

SEQ ID NO: 1343349 - RNA, 18 nt, Human
uaacuggaaaacagaaca

SEQ ID NO: 1343350 - RNA, 19 nt, Human
uaacuggaaaacagaacac

SEQ ID NO: 1343351 - RNA, 20 nt, Human
uaacuggaaaacagaacacu

SEQ ID NO: 1343352 - RNA, 21 nt, Human
uaacuggaaaacagaacacuu

SEQ ID NO: 1343353 - RNA, 22 nt, Human
uaacuggaaaacagaacacuua

SEQ ID NO: 1343354 - RNA, 13 nt, Human
uaacuggaaagaa

SEQ ID NO: 1343355 - RNA, 15 nt, Human
uaacuggaaagaagu

SEQ ID NO: 1343356 - RNA, 14 nt, Human
uaacuggaaagaag

SEQ ID NO: 1343357 - RNA, 13 nt, Human
uaacuuuuguaag

SEQ ID NO: 1343358 - RNA, 18 nt, Human
uaacuuuuguaagacaaa

SEQ ID NO: 1343359 - RNA, 12 nt, Human
uaacuuuuguga

SEQ ID NO: 1343360 - RNA, 16 nt, Human
uaacuuuugugaauua

SEQ ID NO: 1343361 - RNA, 22 nt, Human
uaacuuuugugaauuaggcugu

SEQ ID NO: 1343362 - RNA, 19 nt, Human
uaacuuuuuuuuuucuuua

SEQ ID NO: 1343363 - RNA, 16 nt, Human
uaacuuuuuuuuuucu

SEQ ID NO: 1343364 - RNA, 23 nt, Human
uaacuauugcauuuauauguacc

SEQ ID NO: 1343365 - RNA, 21 nt, Human
uaacuauugcauuuauaugua

SEQ ID NO: 1343366 - RNA, 16 nt, Human
uaacuauugcauuuau

SEQ ID NO: 1343367 - RNA, 14 nt, Human
uaacucccauuacc

SEQ ID NO: 1343368 - RNA, 12 nt, Human
uaacuccuccca

SEQ ID NO: 1343369 - RNA, 15 nt, Human
uaacuauugcauuua

SEQ ID NO: 1343370 - RNA, 16 nt, Human
uaaccccccuguacac

SEQ ID NO: 1343371 - RNA, 17 nt, Human
uaaccccccuguacaca

SEQ ID NO: 1343372 - RNA, 22 nt, Human
uaacugacaagcuccauuuaaa

SEQ ID NO: 1343373 - RNA, 14 nt, Human
uaacugacuauucu

SEQ ID NO: 1343374 - RNA, 21 nt, Human
uaacugacuauucuugaugua

SEQ ID NO: 1343375 - RNA, 21 nt, Human
uaacugacaagcuccauuuaa

SEQ ID NO: 1343376 - RNA, 20 nt, Human
uaacugacaagccaucuuga

SEQ ID NO: 1343377 - RNA, 16 nt, Human
uaacugacaagccauc

SEQ ID NO: 1343378 - RNA, 17 nt, Human
uaacugacaagccaucu

SEQ ID NO: 1343379 - RNA, 22 nt, Human
uaacugacuauucuugauguaa

SEQ ID NO: 1343380 - RNA, 11 nt, Human
uaacugacaag

SEQ ID NO: 1343381 - RNA, 22 nt, Human
uaacugaauaccacucuguaau

SEQ ID NO: 1343382 - RNA, 19 nt, Human
uaacugaauaccacucugu

SEQ ID NO: 1343383 - RNA, 21 nt, Human
uaacugaauaccacucuguaa

SEQ ID NO: 1343384 - RNA, 14 nt, Human
uaacugaauaccac

SEQ ID NO: 1343385 - RNA, 15 nt, Human
uaacugaauaccacu

SEQ ID NO: 1343386 - RNA, 16 nt, Human
uaacugaauaccacuc

SEQ ID NO: 1343387 - RNA, 18 nt, Human
uaacugaauaccacucug

SEQ ID NO: 1343388 - RNA, 15 nt, Human
uaacuccucccaggg

SEQ ID NO: 1343389 - RNA, 16 nt, Human
uaacuccucccagggu

SEQ ID NO: 1343390 - RNA, 21 nt, Human
uaacuccucccaggguuuuaa

SEQ ID NO: 1343391 - RNA, 18 nt, Human
uaacuccucccaggguuu

SEQ ID NO: 1343392 - RNA, 14 nt, Human
uaacucucuuuaug

SEQ ID NO: 1343393 - RNA, 22 nt, Human
uaacucuucuuucauuucuucu

SEQ ID NO: 1343394 - RNA, 14 nt, Human
uaacugaaaaugug

SEQ ID NO: 1343395 - RNA, 20 nt, Human
uaacugaaaaugugcuauac

SEQ ID NO: 1343396 - RNA, 21 nt, Human
uaacugaaaaugugcuauacu

SEQ ID NO: 1343397 - RNA, 20 nt, Human
uaacugaaaauuauuuaaac

SEQ ID NO: 1343398 - RNA, 23 nt, Human
uaacugaacauccaaaaucuuga

SEQ ID NO: 1343399 - RNA, 13 nt, Human
uaaccagaucauu

SEQ ID NO: 1343400 - RNA, 22 nt, Human
uaaccagaucuagucaaucaag

SEQ ID NO: 1343401 - RNA, 20 nt, Human
uaaccagacacauacucauu

SEQ ID NO: 1343402 - RNA, 22 nt, Human
uaaccagacacauacucauuuu

SEQ ID NO: 1343403 - RNA, 19 nt, Human
uaaccauguguuauguuuu

SEQ ID NO: 1343404 - RNA, 17 nt, Human
uaacccacugagaggac

SEQ ID NO: 1343405 - RNA, 11 nt, Human
uaacauuccuc

SEQ ID NO: 1343406 - RNA, 20 nt, Human
uaacauuccucaugaaugua

SEQ ID NO: 1343407 - RNA, 21 nt, Human
uaacauuccucaugaauguaa

SEQ ID NO: 1343408 - RNA, 22 nt, Human
uaacauuccucaugaauguaaa

SEQ ID NO: 1343409 - RNA, 23 nt, Human
uaacauuccucaugaauguaaau

SEQ ID NO: 1343410 - RNA, 13 nt, Human
uaacauuugcugu

SEQ ID NO: 1343411 - RNA, 14 nt, Human
uaacauuugcuguu

SEQ ID NO: 1343412 - RNA, 16 nt, Human
uaacauuugcuguuuu

SEQ ID NO: 1343413 - RNA, 22 nt, Human
uaacauuugcuguuuuaaacau

SEQ ID NO: 1343414 - RNA, 17 nt, Human
uaacauuugcuguuuua

SEQ ID NO: 1343415 - RNA, 13 nt, Human
uaaccacugcuuc

SEQ ID NO: 1343416 - RNA, 12 nt, Human
uaaccacugcuu

SEQ ID NO: 1343417 - RNA, 22 nt, Human
guuucauauuuuucauagcuaa

SEQ ID NO: 1343418 - RNA, 16 nt, Human
guuucauccuuuucau

SEQ ID NO: 1343419 - RNA, 18 nt, Human
guuucauguaauccucaa

SEQ ID NO: 1343420 - RNA, 17 nt, Human
guuucauguuaguuacc

SEQ ID NO: 1343421 - RNA, 21 nt, Human
guuucauguuaguuaccuuau

SEQ ID NO: 1343422 - RNA, 14 nt, Human
guuuaucaguaaau

SEQ ID NO: 1343423 - RNA, 14 nt, Human
guuuaucauucaag

SEQ ID NO: 1343424 - RNA, 15 nt, Human
guuuaucauucaagu

SEQ ID NO: 1343425 - RNA, 16 nt, Human
guuuaucauucaagug

SEQ ID NO: 1343426 - RNA, 17 nt, Human
guuuaucauucaagugu

SEQ ID NO: 1343427 - RNA, 20 nt, Human
guuuaucauucaaguguaaa

SEQ ID NO: 1343428 - RNA, 22 nt, Human
guuuauccuuucauauaguuag

SEQ ID NO: 1343429 - RNA, 15 nt, Human
guuuauccuuucaua

SEQ ID NO: 1343430 - RNA, 18 nt, Human
guuuaugaaaaagaagaa

SEQ ID NO: 1343431 - RNA, 21 nt, Human
guuuagcuggaaaaguauguu

SEQ ID NO: 1343432 - RNA, 19 nt, Human
guuuaggaacuacugagga

SEQ ID NO: 1343433 - RNA, 20 nt, Human
guuuaggauguugaaaaagu

SEQ ID NO: 1343434 - RNA, 20 nt, Human
guuuauauaagcuuguauuc

SEQ ID NO: 1343435 - RNA, 15 nt, Human
guuuauacacugugu

SEQ ID NO: 1343436 - RNA, 18 nt, Human
guuuaguggcucaacauu

SEQ ID NO: 1343437 - RNA, 19 nt, Human
guuuauacacuguguaaau

SEQ ID NO: 1343438 - RNA, 15 nt, Human
guuguuaugaugugc

SEQ ID NO: 1343439 - RNA, 23 nt, Human
guuguuaugaugugcuuaacagg

SEQ ID NO: 1343440 - RNA, 17 nt, Human
guuguuaugugaucaug

SEQ ID NO: 1343441 - RNA, 16 nt, Human
guuguucgggccaagg

SEQ ID NO: 1343442 - RNA, 14 nt, Human
guuguuaugaugug

SEQ ID NO: 1343443 - RNA, 13 nt, Human
guuguuaugaugu

SEQ ID NO: 1343444 - RNA, 17 nt, Human
guuguuaucuguuugag

SEQ ID NO: 1343445 - RNA, 14 nt, Human
guuguuaucuguuu

SEQ ID NO: 1343446 - RNA, 17 nt, Human
guuguuucuguuccaaa

SEQ ID NO: 1343447 - RNA, 14 nt, Human
guuguuucuguucc

SEQ ID NO: 1343448 - RNA, 13 nt, Human
guuguucgggcca

SEQ ID NO: 1343449 - RNA, 12 nt, Human
guuguucuguua

SEQ ID NO: 1343450 - RNA, 14 nt, Human
guuguucuguuaac

SEQ ID NO: 1343451 - RNA, 15 nt, Human
guuguucuguuaacu

SEQ ID NO: 1343452 - RNA, 18 nt, Human
guuguucuguuaacugaa

SEQ ID NO: 1343453 - RNA, 10 nt, Human
guuguucuuu

SEQ ID NO: 1343454 - RNA, 13 nt, Human
guuguuucuguuc

SEQ ID NO: 1343455 - RNA, 16 nt, Human
guuuagaacacacaca

SEQ ID NO: 1343456 - RNA, 15 nt, Human
guuuacauuuuaugg

SEQ ID NO: 1343457 - RNA, 15 nt, Human
guuuaccagaaagca

SEQ ID NO: 1343458 - RNA, 18 nt, Human
guuuaccaguugccuuuu

SEQ ID NO: 1343459 - RNA, 22 nt, Human
guuuacauuuuauggugccuag

SEQ ID NO: 1343460 - RNA, 15 nt, Human
guuuaccaguugccu

SEQ ID NO: 1343461 - RNA, 12 nt, Human
guuuaccuugua

SEQ ID NO: 1343462 - RNA, 22 nt, Human
guuuacuagggaucccucaucu

SEQ ID NO: 1343463 - RNA, 19 nt, Human
guugucugcaacucugaag

SEQ ID NO: 1343464 - RNA, 22 nt, Human
guugucugaagucacugcacag

SEQ ID NO: 1343465 - RNA, 19 nt, Human
guugucugaagucacugca

SEQ ID NO: 1343466 - RNA, 15 nt, Human
guugucucugaugca

SEQ ID NO: 1343467 - RNA, 18 nt, Human
guugucucugaugcagcu

SEQ ID NO: 1343468 - RNA, 13 nt, Human
guugucucuguuu

SEQ ID NO: 1343469 - RNA, 15 nt, Human
guuguccuuuucaua

SEQ ID NO: 1343470 - RNA, 17 nt, Human
guugucguaaagauuug

SEQ ID NO: 1343471 - RNA, 14 nt, Human
guugucuaagaaau

SEQ ID NO: 1343472 - RNA, 15 nt, Human
guugucuaagaaauu

SEQ ID NO: 1343473 - RNA, 21 nt, Human
guugucuaagaaauugaauac

SEQ ID NO: 1343474 - RNA, 18 nt, Human
guugucuaagaaauugaa

SEQ ID NO: 1343475 - RNA, 18 nt, Human
guugucucuagagcaggg

SEQ ID NO: 1343476 - RNA, 11 nt, Human
guugucucuga

SEQ ID NO: 1343477 - RNA, 14 nt, Human
guugucucugaugc

SEQ ID NO: 1343478 - RNA, 20 nt, Human
guugucucugaugcagcuua

SEQ ID NO: 1343479 - RNA, 14 nt, Human
guugucuggcaagg

SEQ ID NO: 1343480 - RNA, 16 nt, Human
guugucuggcaaggac

SEQ ID NO: 1343481 - RNA, 20 nt, Human
guugugaguuuaccuuguau

SEQ ID NO: 1343482 - RNA, 12 nt, Human
guugugccaaau

SEQ ID NO: 1343483 - RNA, 13 nt, Human
guugugcuugagc

SEQ ID NO: 1343484 - RNA, 13 nt, Human
guuguggccuuug

SEQ ID NO: 1343485 - RNA, 21 nt, Human
guuguggccuuugcgcuccug

SEQ ID NO: 1343486 - RNA, 24 nt, Human
guuguggccuuugcgcuccuggcc

SEQ ID NO: 1343487 - RNA, 18 nt, Human
guuguggguaguggggaa

SEQ ID NO: 1343488 - RNA, 22 nt, Human
guuggcucugccaguccugucc

SEQ ID NO: 1343489 - RNA, 15 nt, Human
guuggcuagauuaac

SEQ ID NO: 1343490 - RNA, 24 nt, Human
guuggcguaggcuacagagaagcc

SEQ ID NO: 1343491 - RNA, 22 nt, Human
guuggcguaggcuacagagaag

SEQ ID NO: 1343492 - RNA, 23 nt, Human
guuggcguaggcuacagagaagc

SEQ ID NO: 1343493 - RNA, 15 nt, Human
guuggcucugccagu

SEQ ID NO: 1343494 - RNA, 19 nt, Human
guuggcucugccaguccug

SEQ ID NO: 1343495 - RNA, 23 nt, Human
guuggcucugccaguccuguccu

SEQ ID NO: 1343496 - RNA, 18 nt, Human
guuggcguaggcuacaga

SEQ ID NO: 1343497 - RNA, 19 nt, Human
guuggcguaggcuacagag

SEQ ID NO: 1343498 - RNA, 20 nt, Human
guuggcguaggcuacagaga

SEQ ID NO: 1343499 - RNA, 21 nt, Human
guuggcguaggcuacagagaa

SEQ ID NO: 1343500 - RNA, 18 nt, Human
guuggccaggcuggucua

SEQ ID NO: 1343501 - RNA, 22 nt, Human
guuggccauauuuaccucagcc

SEQ ID NO: 1343502 - RNA, 23 nt, Human
guuggccauauuuaccucagccu

SEQ ID NO: 1343503 - RNA, 14 nt, Human
guugucaagaauag

SEQ ID NO: 1343504 - RNA, 18 nt, Human
guugucaagaauagcauu

SEQ ID NO: 1343505 - RNA, 22 nt, Human
guugucaagaauagcauuguaa

SEQ ID NO: 1343506 - RNA, 16 nt, Human
guugucaccagaucug

SEQ ID NO: 1343507 - RNA, 17 nt, Human
guuguccucagccccgc

SEQ ID NO: 1343508 - RNA, 23 nt, Human
guuguccucagccccgcguggaa

SEQ ID NO: 1343509 - RNA, 20 nt, Human
guuguccuccuuccggggaa

SEQ ID NO: 1343510 - RNA, 22 nt, Human
guuguccuccuuccggggaagg

SEQ ID NO: 1343511 - RNA, 14 nt, Human
guuguccuuuucau

SEQ ID NO: 1343512 - RNA, 17 nt, Human
guuuuaaaaugagaaau

SEQ ID NO: 1343513 - RNA, 20 nt, Human
guuuucaaaauuguuacaaa

SEQ ID NO: 1343514 - RNA, 16 nt, Human
guuuuaaaaugagaaa

SEQ ID NO: 1343515 - RNA, 15 nt, Human
guuuuaaaaugagaa

SEQ ID NO: 1343516 - RNA, 17 nt, Human
guuuuaaaaaccuguuc

SEQ ID NO: 1343517 - RNA, 16 nt, Human
guuuuaaaaagccagu

SEQ ID NO: 1343518 - RNA, 15 nt, Human
guuuuaaaaagccag

SEQ ID NO: 1343519 - RNA, 13 nt, Human
guuuguuuguugc

SEQ ID NO: 1343520 - RNA, 14 nt, Human
guuuguuuuugcgu

SEQ ID NO: 1343521 - RNA, 12 nt, Human
guuuguuuuugg

SEQ ID NO: 1343522 - RNA, 21 nt, Human
guuuuccuaugcuuugaaaca

SEQ ID NO: 1343523 - RNA, 17 nt, Human
guuuuccuaugcuuuga

SEQ ID NO: 1343524 - RNA, 17 nt, Human
guuuuccucucaauaaa

SEQ ID NO: 1343525 - RNA, 17 nt, Human
guuuuggugguuuuagu

SEQ ID NO: 1343526 - RNA, 17 nt, Human
guuuuguguuuguugua

SEQ ID NO: 1343527 - RNA, 18 nt, Human
guuuuguguuuguuguag

SEQ ID NO: 1343528 - RNA, 17 nt, Human
guuuuguuauauaauuu

SEQ ID NO: 1343529 - RNA, 14 nt, Human
guuuuguucaccau

SEQ ID NO: 1343530 - RNA, 21 nt, Human
guuuuguucaccauuauaaug

SEQ ID NO: 1343531 - RNA, 14 nt, Human
guuuuguugacauu

SEQ ID NO: 1343532 - RNA, 16 nt, Human
guuuuguugacauucu

SEQ ID NO: 1343533 - RNA, 17 nt, Human
guuuuguugacauucug

SEQ ID NO: 1343534 - RNA, 18 nt, Human
guuuuguugacauucuga

SEQ ID NO: 1343535 - RNA, 21 nt, Human
guuuuguugacauucugaaug

SEQ ID NO: 1343536 - RNA, 22 nt, Human
guuuuguugacauucugaaugc

SEQ ID NO: 1343537 - RNA, 17 nt, Human
guuuccuccaagcuauu

SEQ ID NO: 1343538 - RNA, 18 nt, Human
guuuccucuaguucuuug

SEQ ID NO: 1343539 - RNA, 22 nt, Human
guuuccucuaguucuuuguuca

SEQ ID NO: 1343540 - RNA, 13 nt, Human
guuuccucuguuc

SEQ ID NO: 1343541 - RNA, 20 nt, Human
guuuccucuguucaaagcug

SEQ ID NO: 1343542 - RNA, 22 nt, Human
guuuccucuguucaaagcugcc

SEQ ID NO: 1343543 - RNA, 23 nt, Human
guuuccucuguucaaagcugccu

SEQ ID NO: 1343544 - RNA, 21 nt, Human
guuuccccacaaaacaaagca

SEQ ID NO: 1343545 - RNA, 18 nt, Human
guuucccuacugaagccc

SEQ ID NO: 1343546 - RNA, 22 nt, Human
guuucuuaaauaagaaacuuuu

SEQ ID NO: 1343547 - RNA, 21 nt, Human
guuucuuaaauaagaaacuuu

SEQ ID NO: 1343548 - RNA, 23 nt, Human
guuucuugccucauuuuuuuccu

SEQ ID NO: 1343549 - RNA, 13 nt, Human
guuucuugccuca

SEQ ID NO: 1343550 - RNA, 14 nt, Human
guuucuugccucau

SEQ ID NO: 1343551 - RNA, 22 nt, Human
guuucuugccucauuuuuuucc

SEQ ID NO: 1343552 - RNA, 15 nt, Human
guuucuuuaaaauug

SEQ ID NO: 1343553 - RNA, 19 nt, Human
guuucuuuguaaugaaaac

SEQ ID NO: 1343554 - RNA, 16 nt, Human
guuugacuagaugaug

SEQ ID NO: 1343555 - RNA, 18 nt, Human
guuugacuagaugaugga

SEQ ID NO: 1343556 - RNA, 19 nt, Human
guuugacuagaugauggau

SEQ ID NO: 1343557 - RNA, 13 nt, Human
guuuggugcuucu

SEQ ID NO: 1343558 - RNA, 19 nt, Human
guuuggggcagaaaggacu

SEQ ID NO: 1343559 - RNA, 15 nt, Human
guuuggggcaggagu

SEQ ID NO: 1343560 - RNA, 17 nt, Human
guuuggggcaggaguag

SEQ ID NO: 1343561 - RNA, 21 nt, Human
guuuggggcaggaguagcuga

SEQ ID NO: 1343562 - RNA, 23 nt, Human
guuuggggcaggaguagcugagc

SEQ ID NO: 1343563 - RNA, 19 nt, Human
guuuggguaaaauacuuuu

SEQ ID NO: 1343564 - RNA, 20 nt, Human
guuuggguaaaauacuuuua

SEQ ID NO: 1343565 - RNA, 17 nt, Human
guuuggguuuuuuuccu

SEQ ID NO: 1343566 - RNA, 18 nt, Human
guuuguuccccaagacau

SEQ ID NO: 1343567 - RNA, 20 nt, Human
guuuguguguugucucuuga

SEQ ID NO: 1343568 - RNA, 15 nt, Human
guuuguguucuguuu

SEQ ID NO: 1343569 - RNA, 17 nt, Human
guuuguguucuguuuug

SEQ ID NO: 1343570 - RNA, 22 nt, Human
guuuguguauuuacgcuuugau

SEQ ID NO: 1343571 - RNA, 13 nt, Human
guuugugugucuu

SEQ ID NO: 1343572 - RNA, 14 nt, Human
guuugugugucuua

SEQ ID NO: 1343573 - RNA, 15 nt, Human
guuugugugucuuaa

SEQ ID NO: 1343574 - RNA, 22 nt, Human
guuuguagugccacuguuguuu

SEQ ID NO: 1343575 - RNA, 13 nt, Human
guuuguaugaaac

SEQ ID NO: 1343576 - RNA, 18 nt, Human
guuugucgcucaugugug

SEQ ID NO: 1343577 - RNA, 15 nt, Human
uaaaauccauacauu

SEQ ID NO: 1343578 - RNA, 17 nt, Human
uaaaauccauacauuug

SEQ ID NO: 1343579 - RNA, 22 nt, Human
uaaaagguauuaaauugauguu

SEQ ID NO: 1343580 - RNA, 20 nt, Human
uaaaaucagcuauuuuguga

SEQ ID NO: 1343581 - RNA, 21 nt, Human
uaaaaggaaagaaaacaucuu

SEQ ID NO: 1343582 - RNA, 19 nt, Human
uaaaaggaagccaaagagu

SEQ ID NO: 1343583 - RNA, 13 nt, Human
uaaaagcacgaca

SEQ ID NO: 1343584 - RNA, 15 nt, Human
uaaaaggaaagaaaa

SEQ ID NO: 1343585 - RNA, 18 nt, Human
uaaaagcaaaaaagaaaa

SEQ ID NO: 1343586 - RNA, 19 nt, Human
uaaaagcaaaaaagaaaac

SEQ ID NO: 1343587 - RNA, 20 nt, Human
uaaaagcaaaaaagaaaacc

SEQ ID NO: 1343588 - RNA, 22 nt, Human
uaaaagcaaaaaagaaaaccuu

SEQ ID NO: 1343589 - RNA, 23 nt, Human
uaaaagcaaaaaagaaaaccuuu

SEQ ID NO: 1343590 - RNA, 13 nt, Human
uaaaagcaaauca

SEQ ID NO: 1343591 - RNA, 14 nt, Human
uaaaagcaaaucau

SEQ ID NO: 1343592 - RNA, 15 nt, Human
uaaaagcaaaucauu

SEQ ID NO: 1343593 - RNA, 20 nt, Human
uaaaagcaaaucauuuguuu

SEQ ID NO: 1343594 - RNA, 21 nt, Human
uaaaagcaaaucauuuguuua

SEQ ID NO: 1343595 - RNA, 14 nt, Human
uaaaaggaagccaa

SEQ ID NO: 1343596 - RNA, 12 nt, Human
uaaaagcaaaaa

SEQ ID NO: 1343597 - RNA, 16 nt, Human
uaaaagcaaaaaagaa

SEQ ID NO: 1343598 - RNA, 17 nt, Human
uaaaagcaaaaaagaaa

SEQ ID NO: 1343599 - RNA, 21 nt, Human
uaaaacagguuauaacagugu

SEQ ID NO: 1343600 - RNA, 22 nt, Human
uaaaacagguagaauuaucuaa

SEQ ID NO: 1343601 - RNA, 17 nt, Human
uaaaacaucauuacuau

SEQ ID NO: 1343602 - RNA, 19 nt, Human
uaaaacaucuuugaaauua

SEQ ID NO: 1343603 - RNA, 12 nt, Human
uaaaacauuaaa

SEQ ID NO: 1343604 - RNA, 15 nt, Human
uaaaacauuaaaaua

SEQ ID NO: 1343605 - RNA, 16 nt, Human
uaaaacauuaaaauau

SEQ ID NO: 1343606 - RNA, 19 nt, Human
uaaaacauuaaaauauaau

SEQ ID NO: 1343607 - RNA, 12 nt, Human
uaaaacauuaau

SEQ ID NO: 1343608 - RNA, 14 nt, Human
uaaaacauuuauuu

SEQ ID NO: 1343609 - RNA, 20 nt, Human
uaaaacauuuauuuugacau

SEQ ID NO: 1343610 - RNA, 21 nt, Human
uaaaaacaaagaaauuaugug

SEQ ID NO: 1343611 - RNA, 18 nt, Human
guuuuuaauguauaguaa

SEQ ID NO: 1343612 - RNA, 21 nt, Human
guuuuuaaggguuuguggaaa

SEQ ID NO: 1343613 - RNA, 19 nt, Human
guuuuuaauaaaagaaaau

SEQ ID NO: 1343614 - RNA, 13 nt, Human
guuuuguuuacag

SEQ ID NO: 1343615 - RNA, 12 nt, Human
guuuuuaaugua

SEQ ID NO: 1343616 - RNA, 13 nt, Human
guuuuuaauguau

SEQ ID NO: 1343617 - RNA, 21 nt, Human
guuuuuacaaauguuaaaaug

SEQ ID NO: 1343618 - RNA, 14 nt, Human
guuuuguuuacaga

SEQ ID NO: 1343619 - RNA, 20 nt, Human
guuuuguuucgcucuuugag

SEQ ID NO: 1343620 - RNA, 19 nt, Human
uaaaaaugguuuaaauggu

SEQ ID NO: 1343621 - RNA, 18 nt, Human
uaaaaaugguuuaaaugg

SEQ ID NO: 1343622 - RNA, 20 nt, Human
uaaaaacagauuuggaaaga

SEQ ID NO: 1343623 - RNA, 22 nt, Human
uaaaaacagauuuggaaagacu

SEQ ID NO: 1343624 - RNA, 15 nt, Human
uaaaaagaagugcug

SEQ ID NO: 1343625 - RNA, 13 nt, Human
uaaaaagaaaggc

SEQ ID NO: 1343626 - RNA, 14 nt, Human
uaaaaagaucacuu

SEQ ID NO: 1343627 - RNA, 18 nt, Human
uaaaaagauugaaguauu

SEQ ID NO: 1343628 - RNA, 20 nt, Human
uaaaaagauugaaguauuuu

SEQ ID NO: 1343629 - RNA, 22 nt, Human
uaaaacaagcacuaaacaaaga

SEQ ID NO: 1343630 - RNA, 22 nt, Human
uaaaacaaagccacuuucaauc

SEQ ID NO: 1343631 - RNA, 14 nt, Human
uaaaacaaagccac

SEQ ID NO: 1343632 - RNA, 18 nt, Human
uaaaacaaacaauaccug

SEQ ID NO: 1343633 - RNA, 13 nt, Human
uaaaaaugucuua

SEQ ID NO: 1343634 - RNA, 21 nt, Human
uaaaaauguucuauuuuaauu

SEQ ID NO: 1343635 - RNA, 23 nt, Human
uaaaaauuaaauuggaaagcagg

SEQ ID NO: 1343636 - RNA, 17 nt, Human
uaaaaauugugaucaga

SEQ ID NO: 1343637 - RNA, 22 nt, Human
uaaaaauuguuaauuuuuccua

SEQ ID NO: 1343638 - RNA, 19 nt, Human
uaaaacacuuccauaaucu

SEQ ID NO: 1343639 - RNA, 13 nt, Human
uaaaacaaugaau

SEQ ID NO: 1343640 - RNA, 14 nt, Human
uaaaacacacaggu

SEQ ID NO: 1343641 - RNA, 11 nt, Human
uaaaacacuug

SEQ ID NO: 1343642 - RNA, 14 nt, Human
uaaaacagaagccu

SEQ ID NO: 1343643 - RNA, 13 nt, Human
uaaaacagacacu

SEQ ID NO: 1343644 - RNA, 15 nt, Human
uaaaacagacacugg

SEQ ID NO: 1343645 - RNA, 17 nt, Human
uaaaacagacacuggca

SEQ ID NO: 1343646 - RNA, 18 nt, Human
uaaaacagacacuggcau

SEQ ID NO: 1343647 - RNA, 19 nt, Human
uaaaacagacacuggcaug

SEQ ID NO: 1343648 - RNA, 21 nt, Human
uaaaacagguagaauuaucua

SEQ ID NO: 1343649 - RNA, 14 nt, Human
uaaaggaauuuaaa

SEQ ID NO: 1343650 - RNA, 11 nt, Human
uaaaggaaaag

SEQ ID NO: 1343651 - RNA, 14 nt, Human
uaaaggaaaagaca

SEQ ID NO: 1343652 - RNA, 17 nt, Human
uaaaggaaaagacacau

SEQ ID NO: 1343653 - RNA, 16 nt, Human
uaaaggaaaagacaca

SEQ ID NO: 1343654 - RNA, 14 nt, Human
uaaaggcaguuuuc

SEQ ID NO: 1343655 - RNA, 17 nt, Human
uaaaggcaguuuucuaa

SEQ ID NO: 1343656 - RNA, 21 nt, Human
uaaagccucaagguuuuaggu

SEQ ID NO: 1343657 - RNA, 15 nt, Human
uaaagcugguuuaau

SEQ ID NO: 1343658 - RNA, 19 nt, Human
uaaagcugguuuaauguuu

SEQ ID NO: 1343659 - RNA, 19 nt, Human
uaaagcuugcaacaaaauu

SEQ ID NO: 1343660 - RNA, 11 nt, Human
uaaagcuuguc

SEQ ID NO: 1343661 - RNA, 19 nt, Human
uaaagcuuucagaauaugu

SEQ ID NO: 1343662 - RNA, 23 nt, Human
uaaagcuuucagaauaugucagu

SEQ ID NO: 1343663 - RNA, 14 nt, Human
uaaaguguuugaaa

SEQ ID NO: 1343664 - RNA, 14 nt, Human
uaaaguuaaguuga

SEQ ID NO: 1343665 - RNA, 20 nt, Human
uaaaguuaguaucuuuugau

SEQ ID NO: 1343666 - RNA, 14 nt, Human
uaaaguucaaacuc

SEQ ID NO: 1343667 - RNA, 15 nt, Human
uaaaguucaacaugu

SEQ ID NO: 1343668 - RNA, 18 nt, Human
uaaaguucaacauguuau

SEQ ID NO: 1343669 - RNA, 12 nt, Human
uaaaguucuaag

SEQ ID NO: 1343670 - RNA, 17 nt, Human
uaaagcagguucuuguu

SEQ ID NO: 1343671 - RNA, 15 nt, Human
uaaagccaugcugga

SEQ ID NO: 1343672 - RNA, 11 nt, Human
uaaagccucaa

SEQ ID NO: 1343673 - RNA, 12 nt, Human
uaaagccuccuc

SEQ ID NO: 1343674 - RNA, 18 nt, Human
uaaagcaggccuuuugau

SEQ ID NO: 1343675 - RNA, 19 nt, Human
uaaagcaggccuuuugaua

SEQ ID NO: 1343676 - RNA, 20 nt, Human
uaaagcaggccuuuugauau

SEQ ID NO: 1343677 - RNA, 16 nt, Human
uaaagcagguucuugu

SEQ ID NO: 1343678 - RNA, 18 nt, Human
uaaagcaggcagaacuca

SEQ ID NO: 1343679 - RNA, 12 nt, Human
uaaagaaaagau

SEQ ID NO: 1343680 - RNA, 13 nt, Human
uaaagaaaagaug

SEQ ID NO: 1343681 - RNA, 14 nt, Human
uaaagaaaagaugc

SEQ ID NO: 1343682 - RNA, 15 nt, Human
uaaagaaaagaugca

SEQ ID NO: 1343683 - RNA, 18 nt, Human
uaaagaaaagaugcacuu

SEQ ID NO: 1343684 - RNA, 15 nt, Human
uaaagcaauaugcau

SEQ ID NO: 1343685 - RNA, 17 nt, Human
uaaagcaauaugcauuu

SEQ ID NO: 1343686 - RNA, 18 nt, Human
uaaacacucuugaaaaau

SEQ ID NO: 1343687 - RNA, 15 nt, Human
uaaacaucaaucuuu

SEQ ID NO: 1343688 - RNA, 18 nt, Human
uaaacaucaaucuuuaaa

SEQ ID NO: 1343689 - RNA, 22 nt, Human
uaaacaugacuccauagaccuu

SEQ ID NO: 1343690 - RNA, 15 nt, Human
uaaacaucauucauu

SEQ ID NO: 1343691 - RNA, 17 nt, Human
uaaacaucauucauuuu

SEQ ID NO: 1343692 - RNA, 17 nt, Human
uaaacacucuugaaaaa

SEQ ID NO: 1343693 - RNA, 15 nt, Human
uaaacacucuugaaa

SEQ ID NO: 1343694 - RNA, 15 nt, Human
uaaaaucuugucaug

SEQ ID NO: 1343695 - RNA, 16 nt, Human
uaaaaucuugucaugu

SEQ ID NO: 1343696 - RNA, 18 nt, Human
uaaaaucuugucaugugu

SEQ ID NO: 1343697 - RNA, 18 nt, Human
uaaaauccauacauuugu

SEQ ID NO: 1343698 - RNA, 14 nt, Human
uaaaaucugucacg

SEQ ID NO: 1343699 - RNA, 13 nt, Human
uaaaaucuuauag

SEQ ID NO: 1343700 - RNA, 17 nt, Human
uaaaaucuuauaguucu

SEQ ID NO: 1343701 - RNA, 18 nt, Human
uaaaaucuuauaguucua

SEQ ID NO: 1343702 - RNA, 16 nt, Human
uaaaaucuugaaaaug

SEQ ID NO: 1343703 - RNA, 19 nt, Human
uaaaaucuuauaguucuag

SEQ ID NO: 1343704 - RNA, 11 nt, Human
uaaaaucuugu

SEQ ID NO: 1343705 - RNA, 12 nt, Human
uaaaaucuuguc

SEQ ID NO: 1343706 - RNA, 14 nt, Human
uaaaaucuugucau

SEQ ID NO: 1343707 - RNA, 19 nt, Human
uaaaaucuugucaugugua

SEQ ID NO: 1343708 - RNA, 18 nt, Human
uaaacuguuucuuuaaaa

SEQ ID NO: 1343709 - RNA, 16 nt, Human
uaaacuuauaacccac

SEQ ID NO: 1343710 - RNA, 18 nt, Human
uaaacuuccccaucuucu

SEQ ID NO: 1343711 - RNA, 9 nt, Human
uaaagaaaa

SEQ ID NO: 1343712 - RNA, 12 nt, Human
uaaagaaaaaaa

SEQ ID NO: 1343713 - RNA, 11 nt, Human
uaaagaaaaaa

SEQ ID NO: 1343714 - RNA, 16 nt, Human
uaaagaaaaaaaugua

SEQ ID NO: 1343715 - RNA, 17 nt, Human
uaaagaaaaaaauguau

SEQ ID NO: 1343716 - RNA, 23 nt, Human
uaaagaaaaaaauguauuuuaug

SEQ ID NO: 1343717 - RNA, 15 nt, Human
uaaagaaaaaaauug

SEQ ID NO: 1343718 - RNA, 16 nt, Human
uaaagaaaaaaauuga

SEQ ID NO: 1343719 - RNA, 17 nt, Human
uaaagaaaaaaauugaa

SEQ ID NO: 1343720 - RNA, 18 nt, Human
uaaagaaaaaaauugaaa

SEQ ID NO: 1343721 - RNA, 20 nt, Human
uaaagaaaaaaauugaaaug

SEQ ID NO: 1343722 - RNA, 21 nt, Human
uaaagaaaaaaauugaaaugu

SEQ ID NO: 1343723 - RNA, 22 nt, Human
uaaagaaaaaaauugaaaugua

SEQ ID NO: 1343724 - RNA, 23 nt, Human
uaaagaaaaaaauugaaauguaa

SEQ ID NO: 1343725 - RNA, 14 nt, Human
uaaagaaaaacaaa

SEQ ID NO: 1343726 - RNA, 15 nt, Human
uaaagaaaaacaaac

SEQ ID NO: 1343727 - RNA, 19 nt, Human
uaaaccaaggcuagaacca

SEQ ID NO: 1343728 - RNA, 19 nt, Human
uaaacuguacagugucuuu

SEQ ID NO: 1343729 - RNA, 12 nt, Human
uaaacugugcac

SEQ ID NO: 1343730 - RNA, 14 nt, Human
uaaacugugcacca

SEQ ID NO: 1343731 - RNA, 20 nt, Human
uaaacuguacagugucuuuu

SEQ ID NO: 1343732 - RNA, 15 nt, Human
uaaacuguguacaua

SEQ ID NO: 1343733 - RNA, 18 nt, Human
uaaacuguguacauaacu

SEQ ID NO: 1343734 - RNA, 17 nt, Human
uaaacuguguauuccaa

SEQ ID NO: 1343735 - RNA, 22 nt, Human
uaaacuguguauuccaagacau

SEQ ID NO: 1343736 - RNA, 18 nt, Human
uaaacaugacuccauaga

SEQ ID NO: 1343737 - RNA, 20 nt, Human
uaaacauuaauagcagccuu

SEQ ID NO: 1343738 - RNA, 22 nt, Human
uaaacauuaauagcagccuuuc

SEQ ID NO: 1343739 - RNA, 21 nt, Human
uaaacauuaauagcagccuuu

SEQ ID NO: 1343740 - RNA, 19 nt, Human
uaaacauuauuaaguaacu

SEQ ID NO: 1343741 - RNA, 23 nt, Human
uaaacauuauuaaguaacuuauu

SEQ ID NO: 1343742 - RNA, 18 nt, Human
guuccuuggccaugcaga

SEQ ID NO: 1343743 - RNA, 13 nt, Human
guuccuuucuuuu

SEQ ID NO: 1343744 - RNA, 17 nt, Human
guuccuuccucugagcc

SEQ ID NO: 1343745 - RNA, 13 nt, Human
guuccuucccaau

SEQ ID NO: 1343746 - RNA, 14 nt, Human
guuccuucccaauc

SEQ ID NO: 1343747 - RNA, 17 nt, Human
guuccuucccaauccag

SEQ ID NO: 1343748 - RNA, 20 nt, Human
guuccuucccugugccuccu

SEQ ID NO: 1343749 - RNA, 18 nt, Human
guuccuuccucugagccu

SEQ ID NO: 1343750 - RNA, 19 nt, Human
guuccuuccucugagccuu

SEQ ID NO: 1343751 - RNA, 13 nt, Human
guucgcagccacc

SEQ ID NO: 1343752 - RNA, 15 nt, Human
guucgcagccacccu

SEQ ID NO: 1343753 - RNA, 16 nt, Human
guucgcagccacccug

SEQ ID NO: 1343754 - RNA, 17 nt, Human
guucgcagccacccuga

SEQ ID NO: 1343755 - RNA, 19 nt, Human
guucgcagccacccugagg

SEQ ID NO: 1343756 - RNA, 14 nt, Human
guucgcauggucac

SEQ ID NO: 1343757 - RNA, 20 nt, Human
guucgcauggucacacacug

SEQ ID NO: 1343758 - RNA, 20 nt, Human
guucgcagccacccugagga

SEQ ID NO: 1343759 - RNA, 19 nt, Human
guucuaaaaauugugauca

SEQ ID NO: 1343760 - RNA, 16 nt, Human
guucuaaaagguguga

SEQ ID NO: 1343761 - RNA, 10 nt, Human
guucuaaagc

SEQ ID NO: 1343762 - RNA, 12 nt, Human
guucuaaagcuc

SEQ ID NO: 1343763 - RNA, 14 nt, Human
guucuaaagcucug

SEQ ID NO: 1343764 - RNA, 16 nt, Human
guucuaaagcucugac

SEQ ID NO: 1343765 - RNA, 12 nt, Human
guucuaaaguuc

SEQ ID NO: 1343766 - RNA, 13 nt, Human
guucuaaaguucu

SEQ ID NO: 1343767 - RNA, 14 nt, Human
guucuaaaguucua

SEQ ID NO: 1343768 - RNA, 15 nt, Human
guucuaaaguucuaa

SEQ ID NO: 1343769 - RNA, 16 nt, Human
guucuaaaguucuaag

SEQ ID NO: 1343770 - RNA, 17 nt, Human
guucuaaaguucuaaga

SEQ ID NO: 1343771 - RNA, 18 nt, Human
guucuaaaguucuaagau

SEQ ID NO: 1343772 - RNA, 19 nt, Human
guucuaaaguucuaagauu

SEQ ID NO: 1343773 - RNA, 21 nt, Human
guucuaaaguucuaagauucu

SEQ ID NO: 1343774 - RNA, 13 nt, Human
guucuaaccuccu

SEQ ID NO: 1343775 - RNA, 16 nt, Human
guucuaaccuuuacau

SEQ ID NO: 1343776 - RNA, 15 nt, Human
guucuaagacucaaa

SEQ ID NO: 1343777 - RNA, 17 nt, Human
guucuaagacucaaaug

SEQ ID NO: 1343778 - RNA, 20 nt, Human
guucuaagacucaaauguuc

SEQ ID NO: 1343779 - RNA, 21 nt, Human
guucuaagacucaaauguucu

SEQ ID NO: 1343780 - RNA, 13 nt, Human
guucuaagaugug

SEQ ID NO: 1343781 - RNA, 21 nt, Human
guucuaagaugugauauucua

SEQ ID NO: 1343782 - RNA, 22 nt, Human
guucuaagaugugauauucuaa

SEQ ID NO: 1343783 - RNA, 13 nt, Human
guucuaagauucu

SEQ ID NO: 1343784 - RNA, 14 nt, Human
guucuaagauucua

SEQ ID NO: 1343785 - RNA, 15 nt, Human
guucuaagauucuaa

SEQ ID NO: 1343786 - RNA, 17 nt, Human
guucuaagauucuaaug

SEQ ID NO: 1343787 - RNA, 20 nt, Human
guucuaagauucuaaugaug

SEQ ID NO: 1343788 - RNA, 14 nt, Human
guucuaagauucug

SEQ ID NO: 1343789 - RNA, 15 nt, Human
guucuaagauucuga

SEQ ID NO: 1343790 - RNA, 11 nt, Human
guucuaaggcc

SEQ ID NO: 1343791 - RNA, 13 nt, Human
guucuaaggccua

SEQ ID NO: 1343792 - RNA, 20 nt, Human
guucuaaggccuaggauucu

SEQ ID NO: 1343793 - RNA, 21 nt, Human
guucuaaggccuaggauucua

SEQ ID NO: 1343794 - RNA, 22 nt, Human
guucuaaggccuaggauucuaa

SEQ ID NO: 1343795 - RNA, 23 nt, Human
guucuaaggccuaggauucuaaa

SEQ ID NO: 1343796 - RNA, 11 nt, Human
guucuaaggcu

SEQ ID NO: 1343797 - RNA, 12 nt, Human
guucuaaggcuc

SEQ ID NO: 1343798 - RNA, 13 nt, Human
guucuaaggcucu

SEQ ID NO: 1343799 - RNA, 14 nt, Human
guucuaaggcucug

SEQ ID NO: 1343800 - RNA, 16 nt, Human
guucuaaggcucugag

SEQ ID NO: 1343801 - RNA, 17 nt, Human
guucuaaggcucugaga

SEQ ID NO: 1343802 - RNA, 16 nt, Human
guucuaagucuuucca

SEQ ID NO: 1343803 - RNA, 12 nt, Human
guucugaagaag

SEQ ID NO: 1343804 - RNA, 13 nt, Human
guucugaagaaga

SEQ ID NO: 1343805 - RNA, 17 nt, Human
guucuaagucuuuccau

SEQ ID NO: 1343806 - RNA, 19 nt, Human
guucuaagucuuuccauug

SEQ ID NO: 1343807 - RNA, 14 nt, Human
guucuaaguuucua

SEQ ID NO: 1343808 - RNA, 15 nt, Human
guucuaaguuucuaa

SEQ ID NO: 1343809 - RNA, 16 nt, Human
guucuaaguuucuaag

SEQ ID NO: 1343810 - RNA, 17 nt, Human
guucuaaguuucuaaga

SEQ ID NO: 1343811 - RNA, 18 nt, Human
guucuaaguuucuaagau

SEQ ID NO: 1343812 - RNA, 19 nt, Human
guucuaaguuucuaagauu

SEQ ID NO: 1343813 - RNA, 21 nt, Human
guucuaaguuucuaagauucu

SEQ ID NO: 1343814 - RNA, 22 nt, Human
guucuaaguuucuaagauucua

SEQ ID NO: 1343815 - RNA, 17 nt, Human
guucuaauaauuucuaa

SEQ ID NO: 1343816 - RNA, 19 nt, Human
guucuaauaauuucuaaug

SEQ ID NO: 1343817 - RNA, 14 nt, Human
guucugaagaagau

SEQ ID NO: 1343818 - RNA, 15 nt, Human
guucugaagaagaug

SEQ ID NO: 1343819 - RNA, 21 nt, Human
guucugagauggcucccaggg

SEQ ID NO: 1343820 - RNA, 20 nt, Human
guucugagauggcucccagg

SEQ ID NO: 1343821 - RNA, 15 nt, Human
guucugcacacagca

SEQ ID NO: 1343822 - RNA, 16 nt, Human
guucugcacacagcac

SEQ ID NO: 1343823 - RNA, 12 nt, Human
guucugccagga

SEQ ID NO: 1343824 - RNA, 13 nt, Human
guucugccaggag

SEQ ID NO: 1343825 - RNA, 14 nt, Human
guucugccaggaga

SEQ ID NO: 1343826 - RNA, 13 nt, Human
guucugccugcca

SEQ ID NO: 1343827 - RNA, 15 nt, Human
guucugccugccagc

SEQ ID NO: 1343828 - RNA, 17 nt, Human
guucugccugccagcug

SEQ ID NO: 1343829 - RNA, 19 nt, Human
guucugccugccagcugca

SEQ ID NO: 1343830 - RNA, 22 nt, Human
guucugccugccagcugcacug

SEQ ID NO: 1343831 - RNA, 23 nt, Human
guucugccugccagcugcacuga

SEQ ID NO: 1343832 - RNA, 14 nt, Human
guucuuucuuccuc

SEQ ID NO: 1343833 - RNA, 15 nt, Human
guucuuucuuccucu

SEQ ID NO: 1343834 - RNA, 16 nt, Human
guucuggcuguuugag

SEQ ID NO: 1343835 - RNA, 20 nt, Human
guucuuucauuugcuuugga

SEQ ID NO: 1343836 - RNA, 22 nt, Human
guucuuucauuugcuuuggaag

SEQ ID NO: 1343837 - RNA, 16 nt, Human
guucuuucuuccucug

SEQ ID NO: 1343838 - RNA, 17 nt, Human
guucuuucuuccucugc

SEQ ID NO: 1343839 - RNA, 18 nt, Human
guucuuucuuccucugcu

SEQ ID NO: 1343840 - RNA, 19 nt, Human
guucuuucuuccucugcug

SEQ ID NO: 1343841 - RNA, 21 nt, Human
guucuuuguucauagcccagu

SEQ ID NO: 1343842 - RNA, 19 nt, Human
guucuuuuugaaguauuua

SEQ ID NO: 1343843 - RNA, 23 nt, Human
guucuuugcugcauucugccucu

SEQ ID NO: 1343844 - RNA, 11 nt, Human
guucuuuggaa

SEQ ID NO: 1343845 - RNA, 15 nt, Human
guucuuugggccaga

SEQ ID NO: 1343846 - RNA, 16 nt, Human
guucuuugggccagac

SEQ ID NO: 1343847 - RNA, 17 nt, Human
guucuuugggccagaca

SEQ ID NO: 1343848 - RNA, 22 nt, Human
guucuuugggccagacaugcca

SEQ ID NO: 1343849 - RNA, 13 nt, Human
guucuuuguucau

SEQ ID NO: 1343850 - RNA, 20 nt, Human
guucuuuguucauagcccag

SEQ ID NO: 1343851 - RNA, 19 nt, Human
guugaaaaaguuuguuuuu

SEQ ID NO: 1343852 - RNA, 22 nt, Human
guugaaaauaaaguguauauuu

SEQ ID NO: 1343853 - RNA, 21 nt, Human
guugaaaaaguuuguuuuugc

SEQ ID NO: 1343854 - RNA, 14 nt, Human
guucugcucugguu

SEQ ID NO: 1343855 - RNA, 22 nt, Human
guucugcucugguuguuucugu

SEQ ID NO: 1343856 - RNA, 15 nt, Human
guucugcucaucauu

SEQ ID NO: 1343857 - RNA, 18 nt, Human
guucugcucaucauucuc

SEQ ID NO: 1343858 - RNA, 23 nt, Human
guucugcucaucauucucugucu

SEQ ID NO: 1343859 - RNA, 16 nt, Human
guucugcuccagacag

SEQ ID NO: 1343860 - RNA, 20 nt, Human
guucugcuccagacagggaa

SEQ ID NO: 1343861 - RNA, 17 nt, Human
guucugcuccagacagg

SEQ ID NO: 1343862 - RNA, 13 nt, Human
guugaauacuuuu

SEQ ID NO: 1343863 - RNA, 17 nt, Human
guugaauacuuuuuaca

SEQ ID NO: 1343864 - RNA, 13 nt, Human
guugaagccuuug

SEQ ID NO: 1343865 - RNA, 14 nt, Human
guugaagccuuugu

SEQ ID NO: 1343866 - RNA, 23 nt, Human
guugaagcaaaucgaaugaaauu

SEQ ID NO: 1343867 - RNA, 20 nt, Human
guugauggugguauguuuuc

SEQ ID NO: 1343868 - RNA, 21 nt, Human
guugauggugguauguuuuca

SEQ ID NO: 1343869 - RNA, 14 nt, Human
guugauuaaagaug

SEQ ID NO: 1343870 - RNA, 20 nt, Human
guugaaagguuuuuuuucag

SEQ ID NO: 1343871 - RNA, 21 nt, Human
guugaaagguuuuuuuucagu

SEQ ID NO: 1343872 - RNA, 16 nt, Human
guugaaauaugauguu

SEQ ID NO: 1343873 - RNA, 13 nt, Human
guugaaagguuuu

SEQ ID NO: 1343874 - RNA, 14 nt, Human
guugaaagguuuuu

SEQ ID NO: 1343875 - RNA, 18 nt, Human
guugaagagguuuuaaag

SEQ ID NO: 1343876 - RNA, 18 nt, Human
guugaagcaaaucgaaug

SEQ ID NO: 1343877 - RNA, 23 nt, Human
guugaaagguuuuuuuucaguug

SEQ ID NO: 1343878 - RNA, 14 nt, Human
guugcaacuuugua

SEQ ID NO: 1343879 - RNA, 22 nt, Human
guugauuuuuuuuuuuuuuucc

SEQ ID NO: 1343880 - RNA, 16 nt, Human
guugauuacagugcag

SEQ ID NO: 1343881 - RNA, 23 nt, Human
guugauucgguauccccccaucu

SEQ ID NO: 1343882 - RNA, 16 nt, Human
guugcaacuuuguaua

SEQ ID NO: 1343883 - RNA, 23 nt, Human
guugauuuuuuuuuuuuuuuccu

SEQ ID NO: 1343884 - RNA, 19 nt, Human
guugcacagcaucucagcu

SEQ ID NO: 1343885 - RNA, 16 nt, Human
guugcacagcaucuca

SEQ ID NO: 1343886 - RNA, 16 nt, Human
guugcacagcuaugaa

SEQ ID NO: 1343887 - RNA, 11 nt, Human
guugcacagca

SEQ ID NO: 1343888 - RNA, 10 nt, Human
guugcacagc

SEQ ID NO: 1343889 - RNA, 14 nt, Human
guugcacacuuugg

SEQ ID NO: 1343890 - RNA, 15 nt, Human
guugcacacuuuggu

SEQ ID NO: 1343891 - RNA, 23 nt, Human
guugcagcccugcugcugccugc

SEQ ID NO: 1343892 - RNA, 16 nt, Human
guugcagacaggaauc

SEQ ID NO: 1343893 - RNA, 20 nt, Human
guugcagacaggaaucuuaa

SEQ ID NO: 1343894 - RNA, 20 nt, Human
guugcagcuguuuuguugac

SEQ ID NO: 1343895 - RNA, 23 nt, Human
guugcagcuguuuuguugacauu

SEQ ID NO: 1343896 - RNA, 17 nt, Human
guugcagucacucuagu

SEQ ID NO: 1343897 - RNA, 20 nt, Human
guugcauguaguaacacuaa

SEQ ID NO: 1343898 - RNA, 20 nt, Human
guugcauuaaaaaugcauau

SEQ ID NO: 1343899 - RNA, 16 nt, Human
guugcauguaguaaca

SEQ ID NO: 1343900 - RNA, 23 nt, Human
guugcauuuguuuuguuuacaga

SEQ ID NO: 1343901 - RNA, 19 nt, Human
guugccaaauauguccugg

SEQ ID NO: 1343902 - RNA, 20 nt, Human
guugccaaauauguccuggg

SEQ ID NO: 1343903 - RNA, 14 nt, Human
guugcagacaggaa

SEQ ID NO: 1343904 - RNA, 15 nt, Human
guugcagacaggaau

SEQ ID NO: 1343905 - RNA, 17 nt, Human
guugcacguguguuuuu

SEQ ID NO: 1343906 - RNA, 19 nt, Human
guugcacguguguuuuucu

SEQ ID NO: 1343907 - RNA, 21 nt, Human
guugcacguguguuuuucuau

SEQ ID NO: 1343908 - RNA, 22 nt, Human
guugcacguguguuuuucuauu

SEQ ID NO: 1343909 - RNA, 23 nt, Human
guugcacguguguuuuucuauua

SEQ ID NO: 1343910 - RNA, 15 nt, Human
guuggagugcagugg

SEQ ID NO: 1343911 - RNA, 14 nt, Human
guuggagugcagug

SEQ ID NO: 1343912 - RNA, 13 nt, Human
guuggagcuccag

SEQ ID NO: 1343913 - RNA, 17 nt, Human
guuggagcuccagccug

SEQ ID NO: 1343914 - RNA, 17 nt, Human
guuggacaagcuucuga

SEQ ID NO: 1343915 - RNA, 21 nt, Human
guuggacaccuuuagguucuu

SEQ ID NO: 1343916 - RNA, 16 nt, Human
guugccaguuguccuc

SEQ ID NO: 1343917 - RNA, 23 nt, Human
guugccauccuaccgucuuuucc

SEQ ID NO: 1343918 - RNA, 21 nt, Human
guugccaaauauguccugggg

SEQ ID NO: 1343919 - RNA, 15 nt, Human
guugccaagcuccaa

SEQ ID NO: 1343920 - RNA, 18 nt, Human
guugccaagcuccaagcc

SEQ ID NO: 1343921 - RNA, 19 nt, Human
guugccaagcuccaagccc

SEQ ID NO: 1343922 - RNA, 14 nt, Human
guuggccaggcugc

SEQ ID NO: 1343923 - RNA, 19 nt, Human
guuggcauagcucuggggu

SEQ ID NO: 1343924 - RNA, 14 nt, Human
guuggccaggcugg

SEQ ID NO: 1343925 - RNA, 15 nt, Human
guuggccaggcuggu

SEQ ID NO: 1343926 - RNA, 19 nt, Human
guuggccaggcugcucuug

SEQ ID NO: 1343927 - RNA, 18 nt, Human
guuggccaggcuggucuc

SEQ ID NO: 1343928 - RNA, 15 nt, Human
guuggcauagcucug

SEQ ID NO: 1343929 - RNA, 18 nt, Human
guuggcauagcucugggg

SEQ ID NO: 1343930 - RNA, 13 nt, Human
guuggcaggcugg

SEQ ID NO: 1343931 - RNA, 14 nt, Human
guuggcaggcuggc

SEQ ID NO: 1343932 - RNA, 15 nt, Human
guuggcaggcuggcc

SEQ ID NO: 1343933 - RNA, 16 nt, Human
guuggcaggcuggcca

SEQ ID NO: 1343934 - RNA, 17 nt, Human
guuggcaggcuggccag

SEQ ID NO: 1343935 - RNA, 20 nt, Human
guuggcaggcuggccagucc

SEQ ID NO: 1343936 - RNA, 23 nt, Human
guuaccucugccucagaaaacaa

SEQ ID NO: 1343937 - RNA, 17 nt, Human
guuaccucuauauacca

SEQ ID NO: 1343938 - RNA, 21 nt, Human
guuaccucuauauaccaaagc

SEQ ID NO: 1343939 - RNA, 22 nt, Human
guuaccugaaaacacugugcac

SEQ ID NO: 1343940 - RNA, 13 nt, Human
guuaccuguagau

SEQ ID NO: 1343941 - RNA, 16 nt, Human
guuaccauuuacaugu

SEQ ID NO: 1343942 - RNA, 20 nt, Human
guuacccaguaacucaucug

SEQ ID NO: 1343943 - RNA, 13 nt, Human
guuaccuacuuug

SEQ ID NO: 1343944 - RNA, 16 nt, Human
guuaccuacuuugacu

SEQ ID NO: 1343945 - RNA, 16 nt, Human
guuacccaaauuaaga

SEQ ID NO: 1343946 - RNA, 23 nt, Human
guuaccauuaaaccaucucccug

SEQ ID NO: 1343947 - RNA, 15 nt, Human
guuaccaugucuuuc

SEQ ID NO: 1343948 - RNA, 16 nt, Human
guuaccauuaaaccau

SEQ ID NO: 1343949 - RNA, 19 nt, Human
guuaccauuaaaccaucuc

SEQ ID NO: 1343950 - RNA, 21 nt, Human
guuaccauuaaaccaucuccc

SEQ ID NO: 1343951 - RNA, 13 nt, Human
guuacagaagcug

SEQ ID NO: 1343952 - RNA, 13 nt, Human
guuacaguucugu

SEQ ID NO: 1343953 - RNA, 14 nt, Human
guuacaguucugug

SEQ ID NO: 1343954 - RNA, 15 nt, Human
guuacaguucugugg

SEQ ID NO: 1343955 - RNA, 14 nt, Human
guuacauguuugca

SEQ ID NO: 1343956 - RNA, 16 nt, Human
guuacauguuugcacc

SEQ ID NO: 1343957 - RNA, 21 nt, Human
guuacuccaaaacuucguuua

SEQ ID NO: 1343958 - RNA, 15 nt, Human
guuacuacaugcacu

SEQ ID NO: 1343959 - RNA, 15 nt, Human
guuaccuuauaguua

SEQ ID NO: 1343960 - RNA, 18 nt, Human
guuaccuuauaguuacug

SEQ ID NO: 1343961 - RNA, 20 nt, Human
guuaccuuauaguuacugug

SEQ ID NO: 1343962 - RNA, 22 nt, Human
guuaccuuauaguuacugugua

SEQ ID NO: 1343963 - RNA, 18 nt, Human
guuacguagccuaaggcu

SEQ ID NO: 1343964 - RNA, 16 nt, Human
guuaguuccacugaga

SEQ ID NO: 1343965 - RNA, 16 nt, Human
guuaguuuguauauau

SEQ ID NO: 1343966 - RNA, 17 nt, Human
guuaguuuguauauauu

SEQ ID NO: 1343967 - RNA, 21 nt, Human
guuaguuuguauauauuauua

SEQ ID NO: 1343968 - RNA, 15 nt, Human
guuauaaaaaauggu

SEQ ID NO: 1343969 - RNA, 22 nt, Human
guuauaaaaaaugguucagaau

SEQ ID NO: 1343970 - RNA, 16 nt, Human
guuauaaaaaaugguu

SEQ ID NO: 1343971 - RNA, 14 nt, Human
guuauaaagauaca

SEQ ID NO: 1343972 - RNA, 15 nt, Human
guuauaaagauacag

SEQ ID NO: 1343973 - RNA, 13 nt, Human
guuaucucugugu

SEQ ID NO: 1343974 - RNA, 14 nt, Human
guuaucucuguguu

SEQ ID NO: 1343975 - RNA, 19 nt, Human
guuaucuaauagggcaauu

SEQ ID NO: 1343976 - RNA, 12 nt, Human
guuaucucugug

SEQ ID NO: 1343977 - RNA, 15 nt, Human
guuaucuaaguuaau

SEQ ID NO: 1343978 - RNA, 18 nt, Human
guuaucuaaguuaauuua

SEQ ID NO: 1343979 - RNA, 21 nt, Human
guuaucuaaguuaauuuaaag

SEQ ID NO: 1343980 - RNA, 20 nt, Human
guuauccaccugccuuggcu

SEQ ID NO: 1343981 - RNA, 22 nt, Human
guuaucauguuaguaauaccuc

SEQ ID NO: 1343982 - RNA, 23 nt, Human
guuaucauguuaguaauaccucu

SEQ ID NO: 1343983 - RNA, 15 nt, Human
guuaugacuauguaa

SEQ ID NO: 1343984 - RNA, 22 nt, Human
guuaucuucucaaguucuaaga

SEQ ID NO: 1343985 - RNA, 20 nt, Human
guuaugaaauucacccccuu

SEQ ID NO: 1343986 - RNA, 17 nt, Human
guuaucuguuugagaaa

SEQ ID NO: 1343987 - RNA, 18 nt, Human
guuaucuucucaaguucu

SEQ ID NO: 1343988 - RNA, 19 nt, Human
guuaucuucucaaguucua

SEQ ID NO: 1343989 - RNA, 21 nt, Human
guuaucuucucaaguucuaag

SEQ ID NO: 1343990 - RNA, 23 nt, Human
guuaucuucucaaguucuaagau

SEQ ID NO: 1343991 - RNA, 17 nt, Human
guuaugacuauguaaac

SEQ ID NO: 1343992 - RNA, 22 nt, Human
guuaugaugugcuuaacaggga

SEQ ID NO: 1343993 - RNA, 17 nt, Human
guuaugaugugcuuaac

SEQ ID NO: 1343994 - RNA, 16 nt, Human
guuaugaugugcuuaa

SEQ ID NO: 1343995 - RNA, 14 nt, Human
guuaugaugugcuu

SEQ ID NO: 1343996 - RNA, 12 nt, Human
guuaucauguua

SEQ ID NO: 1343997 - RNA, 11 nt, Human
guuaucauguu

SEQ ID NO: 1343998 - RNA, 13 nt, Human
guuaucagugcuu

SEQ ID NO: 1343999 - RNA, 16 nt, Human
guuaucagugcuuccc

SEQ ID NO: 1344000 - RNA, 17 nt, Human
guuaucagugcuucccg

SEQ ID NO: 1344001 - RNA, 20 nt, Human
guuaucaccgugggcucccu

SEQ ID NO: 1344002 - RNA, 22 nt, Human
guuaucaccgugggcucccuga

SEQ ID NO: 1344003 - RNA, 20 nt, Human
guuaucaccuagcugaaugu

SEQ ID NO: 1344004 - RNA, 14 nt, Human
guuauauauaaaua

SEQ ID NO: 1344005 - RNA, 16 nt, Human
guuauauauaaauaua

SEQ ID NO: 1344006 - RNA, 19 nt, Human
guuauauauaaauauauua

SEQ ID NO: 1344007 - RNA, 22 nt, Human
guuauauauaaauauauuauua

SEQ ID NO: 1344008 - RNA, 22 nt, Human
guuauauauggggaugguaguu

SEQ ID NO: 1344009 - RNA, 19 nt, Human
guuauauugaaaaaauaga

SEQ ID NO: 1344010 - RNA, 14 nt, Human
guuauauuuugcag

SEQ ID NO: 1344011 - RNA, 13 nt, Human
guuauaagacucu

SEQ ID NO: 1344012 - RNA, 14 nt, Human
guuauaagacucuc

SEQ ID NO: 1344013 - RNA, 20 nt, Human
guuauagacagucguuccca

SEQ ID NO: 1344014 - RNA, 21 nt, Human
guuauagugaauacugcuaca

SEQ ID NO: 1344015 - RNA, 13 nt, Human
guuauauaaucau

SEQ ID NO: 1344016 - RNA, 12 nt, Human
guuauauaauuu

SEQ ID NO: 1344017 - RNA, 15 nt, Human
guuauauaauuuaga

SEQ ID NO: 1344018 - RNA, 14 nt, Human
guuauauaauuuag

SEQ ID NO: 1344019 - RNA, 13 nt, Human
guuauauauaaau

SEQ ID NO: 1344020 - RNA, 17 nt, Human
guuauuauauuuacaaa

SEQ ID NO: 1344021 - RNA, 21 nt, Human
guuauuaacuuuaauguuuuu

SEQ ID NO: 1344022 - RNA, 22 nt, Human
guuauuagagauuaccuccuga

SEQ ID NO: 1344023 - RNA, 20 nt, Human
guuaugauuuuuuuuucaua

SEQ ID NO: 1344024 - RNA, 16 nt, Human
guuaugcaaaagcaag

SEQ ID NO: 1344025 - RNA, 13 nt, Human
guuaugcugugac

SEQ ID NO: 1344026 - RNA, 23 nt, Human
guucaagugauucucaugccuca

SEQ ID NO: 1344027 - RNA, 21 nt, Human
guucaauauaagcuuuucuuu

SEQ ID NO: 1344028 - RNA, 12 nt, Human
guucaauauuuu

SEQ ID NO: 1344029 - RNA, 16 nt, Human
guucacaccagagaac

SEQ ID NO: 1344030 - RNA, 24 nt, Human
guucacucuacuuagcaugucccu

SEQ ID NO: 1344031 - RNA, 12 nt, Human
guucacauuuuu

SEQ ID NO: 1344032 - RNA, 17 nt, Human
guucaccauuauaauga

SEQ ID NO: 1344033 - RNA, 16 nt, Human
guucacuuuugacaaa

SEQ ID NO: 1344034 - RNA, 20 nt, Human
guucacuuuugacaaaggca

SEQ ID NO: 1344035 - RNA, 20 nt, Human
guucagaauuaaacuuuuaa

SEQ ID NO: 1344036 - RNA, 22 nt, Human
guucagaauuuaguguauccau

SEQ ID NO: 1344037 - RNA, 19 nt, Human
guucagaguccuuaaaaug

SEQ ID NO: 1344038 - RNA, 22 nt, Human
guucauggcagauguaggaggg

SEQ ID NO: 1344039 - RNA, 16 nt, Human
guucauguaaauaaua

SEQ ID NO: 1344040 - RNA, 20 nt, Human
guucaugggggagggggcag

SEQ ID NO: 1344041 - RNA, 12 nt, Human
guucaugagaau

SEQ ID NO: 1344042 - RNA, 19 nt, Human
guucaugagaaucuauauu

SEQ ID NO: 1344043 - RNA, 14 nt, Human
guucaugagaaucu

SEQ ID NO: 1344044 - RNA, 15 nt, Human
guucaugcagcugug

SEQ ID NO: 1344045 - RNA, 16 nt, Human
guucaugcagcugugg

SEQ ID NO: 1344046 - RNA, 12 nt, Human
guucaugaaaga

SEQ ID NO: 1344047 - RNA, 16 nt, Human
guucaucaaugaauga

SEQ ID NO: 1344048 - RNA, 16 nt, Human
guucauccauucuauu

SEQ ID NO: 1344049 - RNA, 18 nt, Human
guucauauuaagaaugau

SEQ ID NO: 1344050 - RNA, 15 nt, Human
guucagccaagguuu

SEQ ID NO: 1344051 - RNA, 18 nt, Human
guucagcacugucccuug

SEQ ID NO: 1344052 - RNA, 12 nt, Human
guucagaauuua

SEQ ID NO: 1344053 - RNA, 19 nt, Human
guucagcauggcauccaag

SEQ ID NO: 1344054 - RNA, 12 nt, Human
guucagccaagg

SEQ ID NO: 1344055 - RNA, 14 nt, Human
guucagcacugucc

SEQ ID NO: 1344056 - RNA, 15 nt, Human
guucagcacuguccc

SEQ ID NO: 1344057 - RNA, 16 nt, Human
guucagcacugucccu

SEQ ID NO: 1344058 - RNA, 22 nt, Human
guucagcacugucccuugccuc

SEQ ID NO: 1344059 - RNA, 15 nt, Human
guucauuccuccagg

SEQ ID NO: 1344060 - RNA, 16 nt, Human
guucauugcacuuuga

SEQ ID NO: 1344061 - RNA, 13 nt, Human
guucauuuccuca

SEQ ID NO: 1344062 - RNA, 13 nt, Human
guucauuugugua

SEQ ID NO: 1344063 - RNA, 14 nt, Human
guucauuccuccag

SEQ ID NO: 1344064 - RNA, 13 nt, Human
guucauuccucca

SEQ ID NO: 1344065 - RNA, 18 nt, Human
guucauuagaaauauuuu

SEQ ID NO: 1344066 - RNA, 16 nt, Human
guucauuagaaauauu

SEQ ID NO: 1344067 - RNA, 19 nt, Human
guucauuagaaauauuuua

SEQ ID NO: 1344068 - RNA, 14 nt, Human
guuccaaauucagu

SEQ ID NO: 1344069 - RNA, 15 nt, Human
guuccaaauucaguu

SEQ ID NO: 1344070 - RNA, 20 nt, Human
guuccaaauucaguuucaua

SEQ ID NO: 1344071 - RNA, 14 nt, Human
guuccaagagucua

SEQ ID NO: 1344072 - RNA, 16 nt, Human
guuccaagagucuaaa

SEQ ID NO: 1344073 - RNA, 18 nt, Human
guuccaagagucuaaaga

SEQ ID NO: 1344074 - RNA, 20 nt, Human
guuccaagagucuaaagaug

SEQ ID NO: 1344075 - RNA, 11 nt, Human
guuccacagac

SEQ ID NO: 1344076 - RNA, 14 nt, Human
guuccacagaggac

SEQ ID NO: 1344077 - RNA, 12 nt, Human
guuccacagacg

SEQ ID NO: 1344078 - RNA, 12 nt, Human
guuccacugaga

SEQ ID NO: 1344079 - RNA, 13 nt, Human
guuccacugagac

SEQ ID NO: 1344080 - RNA, 23 nt, Human
guuccagcaauucuccugccuca

SEQ ID NO: 1344081 - RNA, 20 nt, Human
guuccagcaauucuccugcc

SEQ ID NO: 1344082 - RNA, 21 nt, Human
guuccagcaauucuccugccu

SEQ ID NO: 1344083 - RNA, 14 nt, Human
guuccacugagacc

SEQ ID NO: 1344084 - RNA, 18 nt, Human
guuccacuuauagccucu

SEQ ID NO: 1344085 - RNA, 23 nt, Human
guuccuagugauggcuuaugaua

SEQ ID NO: 1344086 - RNA, 14 nt, Human
guuccuagagaaga

SEQ ID NO: 1344087 - RNA, 15 nt, Human
guuccggcauggaca

SEQ ID NO: 1344088 - RNA, 19 nt, Human
guuccuaagagugcugggc

SEQ ID NO: 1344089 - RNA, 20 nt, Human
guuccagggucccucugugu

SEQ ID NO: 1344090 - RNA, 21 nt, Human
guuccagggucccucugugua

SEQ ID NO: 1344091 - RNA, 17 nt, Human
guuccagaagugugacu

SEQ ID NO: 1344092 - RNA, 19 nt, Human
guuccacuuauagccucug

SEQ ID NO: 1344093 - RNA, 14 nt, Human
guuccagaaaguaa

SEQ ID NO: 1344094 - RNA, 17 nt, Human
guuccagggucccucug

SEQ ID NO: 1344095 - RNA, 19 nt, Human
guuccagggucccucugug

SEQ ID NO: 1344096 - RNA, 23 nt, Human
guuccuccccuccuccuggacuc

SEQ ID NO: 1344097 - RNA, 16 nt, Human
guuccuccccuccagc

SEQ ID NO: 1344098 - RNA, 23 nt, Human
guuccuccccuccagcucccugu

SEQ ID NO: 1344099 - RNA, 16 nt, Human
guuccugugcacagcc

SEQ ID NO: 1344100 - RNA, 15 nt, Human
guuccugugcacagc

SEQ ID NO: 1344101 - RNA, 14 nt, Human
guuccuguggcucc

SEQ ID NO: 1344102 - RNA, 16 nt, Human
guuccuguggcucccu

SEQ ID NO: 1344103 - RNA, 12 nt, Human
guuccuucccaa

SEQ ID NO: 1344104 - RNA, 12 nt, Human
guuccugcaugc

SEQ ID NO: 1344105 - RNA, 11 nt, Human
guuccugcugc

SEQ ID NO: 1344106 - RNA, 14 nt, Human
guuccugcugcugu

SEQ ID NO: 1344107 - RNA, 15 nt, Human
guuccugcugcuguc

SEQ ID NO: 1344108 - RNA, 22 nt, Human
guuccugcugcugucugggugc

SEQ ID NO: 1344109 - RNA, 17 nt, Human
guuccugcugcugucug

SEQ ID NO: 1344110 - RNA, 12 nt, Human
guguguuuuaaa

SEQ ID NO: 1344111 - RNA, 15 nt, Human
guguguuucugaucu

SEQ ID NO: 1344112 - RNA, 17 nt, Human
guguguugauacuguug

SEQ ID NO: 1344113 - RNA, 19 nt, Human
guguguugauacuguugca

SEQ ID NO: 1344114 - RNA, 20 nt, Human
guguguugauacuguugcac

SEQ ID NO: 1344115 - RNA, 21 nt, Human
guguguugauacuguugcacg

SEQ ID NO: 1344116 - RNA, 23 nt, Human
guguguugauacuguugcacgug

SEQ ID NO: 1344117 - RNA, 22 nt, Human
guguguugauacuguugcacgu

SEQ ID NO: 1344118 - RNA, 14 nt, Human
guguguugucucuu

SEQ ID NO: 1344119 - RNA, 16 nt, Human
guguguugucucuuga

SEQ ID NO: 1344120 - RNA, 16 nt, Human
gugugcuuuuuuugug

SEQ ID NO: 1344121 - RNA, 21 nt, Human
guguggaaguuauuaacuuua

SEQ ID NO: 1344122 - RNA, 14 nt, Human
guguggacaggacu

SEQ ID NO: 1344123 - RNA, 13 nt, Human
guguggacaggac

SEQ ID NO: 1344124 - RNA, 18 nt, Human
guguggagagggaaugug

SEQ ID NO: 1344125 - RNA, 20 nt, Human
guguggagagggaaugugaa

SEQ ID NO: 1344126 - RNA, 19 nt, Human
guguggcuuucagagccuc

SEQ ID NO: 1344127 - RNA, 11 nt, Human
gugugggagac

SEQ ID NO: 1344128 - RNA, 21 nt, Human
guguggagagggaaugugaaa

SEQ ID NO: 1344129 - RNA, 14 nt, Human
guguggcuccuucc

SEQ ID NO: 1344130 - RNA, 17 nt, Human
gugugcucaggagcccu

SEQ ID NO: 1344131 - RNA, 16 nt, Human
gugugcucaggagccc

SEQ ID NO: 1344132 - RNA, 16 nt, Human
gugugcggcugugugu

SEQ ID NO: 1344133 - RNA, 16 nt, Human
gugugcccccuucaag

SEQ ID NO: 1344134 - RNA, 13 nt, Human
gugugcccucugg

SEQ ID NO: 1344135 - RNA, 16 nt, Human
gugugcccucugggcu

SEQ ID NO: 1344136 - RNA, 17 nt, Human
gugugcccucugggcuc

SEQ ID NO: 1344137 - RNA, 22 nt, Human
gugugcccucugggcucugagu

SEQ ID NO: 1344138 - RNA, 21 nt, Human
gugugcccucugggcucugag

SEQ ID NO: 1344139 - RNA, 19 nt, Human
gugugcucaggagcccugg

SEQ ID NO: 1344140 - RNA, 18 nt, Human
gugugcucaggagcccug

SEQ ID NO: 1344141 - RNA, 15 nt, Human
gugugcucuccauuc

SEQ ID NO: 1344142 - RNA, 16 nt, Human
gugugcucuccauucu

SEQ ID NO: 1344143 - RNA, 21 nt, Human
gugugcucuccauucugcucc

SEQ ID NO: 1344144 - RNA, 22 nt, Human
gugugcucuccauucugcuccu

SEQ ID NO: 1344145 - RNA, 23 nt, Human
gugugcucuccauucugcuccuu

SEQ ID NO: 1344146 - RNA, 11 nt, Human
gugugcuggga

SEQ ID NO: 1344147 - RNA, 12 nt, Human
gugugcugggag

SEQ ID NO: 1344148 - RNA, 19 nt, Human
gugugcugggagcuccacu

SEQ ID NO: 1344149 - RNA, 17 nt, Human
gugugcuuuuuuugugu

SEQ ID NO: 1344150 - RNA, 17 nt, Human
gugucucaggcugccug

SEQ ID NO: 1344151 - RNA, 19 nt, Human
gugucucaggcugccugag

SEQ ID NO: 1344152 - RNA, 20 nt, Human
gugucucaggcugccugagu

SEQ ID NO: 1344153 - RNA, 14 nt, Human
gugucuaagauucu

SEQ ID NO: 1344154 - RNA, 15 nt, Human
gugucuaagauucua

SEQ ID NO: 1344155 - RNA, 16 nt, Human
gugucuaagauucuag

SEQ ID NO: 1344156 - RNA, 17 nt, Human
gugucuaagauucuaga

SEQ ID NO: 1344157 - RNA, 18 nt, Human
gugucuaagauucuagau

SEQ ID NO: 1344158 - RNA, 19 nt, Human
gugucuaagauucuagauc

SEQ ID NO: 1344159 - RNA, 20 nt, Human
gugucuaagauucuagauca

SEQ ID NO: 1344160 - RNA, 11 nt, Human
gugucucaggc

SEQ ID NO: 1344161 - RNA, 12 nt, Human
gugucucaggcu

SEQ ID NO: 1344162 - RNA, 14 nt, Human
gugucucaggcugc

SEQ ID NO: 1344163 - RNA, 15 nt, Human
gugucucaggcugcc

SEQ ID NO: 1344164 - RNA, 16 nt, Human
gugucucaggcugccu

SEQ ID NO: 1344165 - RNA, 14 nt, Human
gugucccuaaugug

SEQ ID NO: 1344166 - RNA, 12 nt, Human
guguccuacaga

SEQ ID NO: 1344167 - RNA, 14 nt, Human
guguccuacagaaa

SEQ ID NO: 1344168 - RNA, 13 nt, Human
guguccuacagaa

SEQ ID NO: 1344169 - RNA, 20 nt, Human
guguccuccugggguucuuu

SEQ ID NO: 1344170 - RNA, 18 nt, Human
guguccucuucccucucu

SEQ ID NO: 1344171 - RNA, 13 nt, Human
guguccugacacu

SEQ ID NO: 1344172 - RNA, 21 nt, Human
guguccugcaccggggccugg

SEQ ID NO: 1344173 - RNA, 22 nt, Human
guguccugagcucagcguggag

SEQ ID NO: 1344174 - RNA, 23 nt, Human
guguccugagccccagggagagg

SEQ ID NO: 1344175 - RNA, 13 nt, Human
guguccugagcuc

SEQ ID NO: 1344176 - RNA, 15 nt, Human
guguccugagcucag

SEQ ID NO: 1344177 - RNA, 16 nt, Human
gugucugagagauuca

SEQ ID NO: 1344178 - RNA, 17 nt, Human
gugucuggcacagccug

SEQ ID NO: 1344179 - RNA, 15 nt, Human
gugucugcucaguaa

SEQ ID NO: 1344180 - RNA, 14 nt, Human
gugugaucgucuga

SEQ ID NO: 1344181 - RNA, 14 nt, Human
gugugcaaggcagc

SEQ ID NO: 1344182 - RNA, 17 nt, Human
gugugcaaggcagccgu

SEQ ID NO: 1344183 - RNA, 20 nt, Human
gugugcacaaauauuuauuu

SEQ ID NO: 1344184 - RNA, 16 nt, Human
gugugcaccaggguug

SEQ ID NO: 1344185 - RNA, 19 nt, Human
gugugcacgcgugugcagg

SEQ ID NO: 1344186 - RNA, 13 nt, Human
gugugcaggagcg

SEQ ID NO: 1344187 - RNA, 18 nt, Human
guuaaaggugaacauugg

SEQ ID NO: 1344188 - RNA, 16 nt, Human
guuaaauacaggaaac

SEQ ID NO: 1344189 - RNA, 20 nt, Human
guuaaauacaggaaacaguu

SEQ ID NO: 1344190 - RNA, 12 nt, Human
guuaaaaugugu

SEQ ID NO: 1344191 - RNA, 20 nt, Human
guuaaaaacagauuuggaaa

SEQ ID NO: 1344192 - RNA, 14 nt, Human
guuaaaaauaaggu

SEQ ID NO: 1344193 - RNA, 17 nt, Human
guuaacuauugcauuua

SEQ ID NO: 1344194 - RNA, 24 nt, Human
guuaacauuccaagacucuagagu

SEQ ID NO: 1344195 - RNA, 14 nt, Human
guuaacugaauacc

SEQ ID NO: 1344196 - RNA, 16 nt, Human
guuaacugaauaccac

SEQ ID NO: 1344197 - RNA, 20 nt, Human
guuaacugaauaccacucug

SEQ ID NO: 1344198 - RNA, 22 nt, Human
guuaacugaauaccacucugua

SEQ ID NO: 1344199 - RNA, 23 nt, Human
guuaacugaauaccacucuguaa

SEQ ID NO: 1344200 - RNA, 20 nt, Human
guuaacagaagggagggcag

SEQ ID NO: 1344201 - RNA, 21 nt, Human
guuaacagaagggagggcaga

SEQ ID NO: 1344202 - RNA, 23 nt, Human
guuaacagaagggagggcagagc

SEQ ID NO: 1344203 - RNA, 23 nt, Human
guuaacauuccaagacucuagag

SEQ ID NO: 1344204 - RNA, 12 nt, Human
guuaaauguaga

SEQ ID NO: 1344205 - RNA, 21 nt, Human
guuaacacacuaccgaaugug

SEQ ID NO: 1344206 - RNA, 17 nt, Human
guuacacuuuuuggaag

SEQ ID NO: 1344207 - RNA, 18 nt, Human
guuacacuuuuuggaagu

SEQ ID NO: 1344208 - RNA, 22 nt, Human
guuacacuuuuuggaagugaaa

SEQ ID NO: 1344209 - RNA, 18 nt, Human
guuaacugagugccuuuu

SEQ ID NO: 1344210 - RNA, 14 nt, Human
guuaagaaaauaaa

SEQ ID NO: 1344211 - RNA, 15 nt, Human
guuaagaaaauaaau

SEQ ID NO: 1344212 - RNA, 15 nt, Human
guuaagaaauuucac

SEQ ID NO: 1344213 - RNA, 18 nt, Human
guguuuuucauaaagcag

SEQ ID NO: 1344214 - RNA, 21 nt, Human
guguuuuguucaccauuauaa

SEQ ID NO: 1344215 - RNA, 14 nt, Human
guguuuuucuauua

SEQ ID NO: 1344216 - RNA, 15 nt, Human
guguuuuucuauuaa

SEQ ID NO: 1344217 - RNA, 17 nt, Human
guguuuuucuauuaaaa

SEQ ID NO: 1344218 - RNA, 18 nt, Human
guguuuuucuauuaaaag

SEQ ID NO: 1344219 - RNA, 19 nt, Human
guguuuuucuauuaaaaga

SEQ ID NO: 1344220 - RNA, 21 nt, Human
guguuuuucuauuaaaagacu

SEQ ID NO: 1344221 - RNA, 23 nt, Human
guguuuuucuauuaaaagacuca

SEQ ID NO: 1344222 - RNA, 22 nt, Human
guguuuuucuauuaaaagacuc

SEQ ID NO: 1344223 - RNA, 19 nt, Human
guguuuuuuuaugaauggg

SEQ ID NO: 1344224 - RNA, 13 nt, Human
guguucugugaua

SEQ ID NO: 1344225 - RNA, 15 nt, Human
guguuuuaauuuaaa

SEQ ID NO: 1344226 - RNA, 15 nt, Human
guguuuugaaagaau

SEQ ID NO: 1344227 - RNA, 20 nt, Human
guguuuugaaagaauagaac

SEQ ID NO: 1344228 - RNA, 16 nt, Human
guguuuuguucaccau

SEQ ID NO: 1344229 - RNA, 16 nt, Human
guguuaucaccuagcu

SEQ ID NO: 1344230 - RNA, 21 nt, Human
guguuauuuggaaccuuguuu

SEQ ID NO: 1344231 - RNA, 20 nt, Human
guguuauuuucauucaaagu

SEQ ID NO: 1344232 - RNA, 23 nt, Human
guguuauuuuguuuuuccuucca

SEQ ID NO: 1344233 - RNA, 14 nt, Human
guguucaauauuuu

SEQ ID NO: 1344234 - RNA, 16 nt, Human
guguucaauauuuucu

SEQ ID NO: 1344235 - RNA, 14 nt, Human
guguucauuguuuc

SEQ ID NO: 1344236 - RNA, 17 nt, Human
guguucccauuucagcu

SEQ ID NO: 1344237 - RNA, 17 nt, Human
guguuccccacuguauc

SEQ ID NO: 1344238 - RNA, 21 nt, Human
guguucccauuucagcugauc

SEQ ID NO: 1344239 - RNA, 18 nt, Human
guguuccccuuccacuga

SEQ ID NO: 1344240 - RNA, 19 nt, Human
guguuccccuuccacugag

SEQ ID NO: 1344241 - RNA, 22 nt, Human
guguuccccuuccacugagggc

SEQ ID NO: 1344242 - RNA, 23 nt, Human
guguuccccuuccacugagggca

SEQ ID NO: 1344243 - RNA, 15 nt, Human
guguucccuauccaa

SEQ ID NO: 1344244 - RNA, 14 nt, Human
guguuccuuccgcu

SEQ ID NO: 1344245 - RNA, 13 nt, Human
guguucuaagaug

SEQ ID NO: 1344246 - RNA, 22 nt, Human
guguucuaagaugugauauucu

SEQ ID NO: 1344247 - RNA, 15 nt, Human
guguucuccugcugc

SEQ ID NO: 1344248 - RNA, 20 nt, Human
guguucuccugcugcucccu

SEQ ID NO: 1344249 - RNA, 22 nt, Human
guguucuccugcugcucccuca

SEQ ID NO: 1344250 - RNA, 23 nt, Human
guguucuccugcugcucccucag

SEQ ID NO: 1344251 - RNA, 11 nt, Human
guguucuccuu

SEQ ID NO: 1344252 - RNA, 16 nt, Human
guguucuccuuuuccu

SEQ ID NO: 1344253 - RNA, 14 nt, Human
guguguuuuucaua

SEQ ID NO: 1344254 - RNA, 14 nt, Human
guguguuuuucuau

SEQ ID NO: 1344255 - RNA, 15 nt, Human
guguguuuuucuauu

SEQ ID NO: 1344256 - RNA, 16 nt, Human
guguguuuuucuauua

SEQ ID NO: 1344257 - RNA, 20 nt, Human
guguguuuuucuauuaaaag

SEQ ID NO: 1344258 - RNA, 21 nt, Human
guguguuuuucuauuaaaaga

SEQ ID NO: 1344259 - RNA, 21 nt, Human
guguuaaaugugaugaauacu

SEQ ID NO: 1344260 - RNA, 14 nt, Human
guguuaacagaagg

SEQ ID NO: 1344261 - RNA, 22 nt, Human
guguuaacagaagggagggcag

SEQ ID NO: 1344262 - RNA, 23 nt, Human
guguuaacagaagggagggcaga

SEQ ID NO: 1344263 - RNA, 14 nt, Human
guguuaacauucca

SEQ ID NO: 1344264 - RNA, 17 nt, Human
guguuaacauuccaaga

SEQ ID NO: 1344265 - RNA, 15 nt, Human
guguuaagcucugcu

SEQ ID NO: 1344266 - RNA, 14 nt, Human
guguuaagcucugc

SEQ ID NO: 1344267 - RNA, 19 nt, Human
guguguuuuaaaaugagaa

SEQ ID NO: 1344268 - RNA, 16 nt, Human
guguguuuuaaaauga

SEQ ID NO: 1344269 - RNA, 13 nt, Human
guguguuuuaaaa

SEQ ID NO: 1344270 - RNA, 12 nt, Human
guguuaauuuuu

SEQ ID NO: 1344271 - RNA, 15 nt, Human
guguuaauuuuugau

SEQ ID NO: 1344272 - RNA, 23 nt, Human
guguuacccaguaacucaucugu

SEQ ID NO: 1344273 - RNA, 16 nt, Human
guguuaccugaaaaca

SEQ ID NO: 1344274 - RNA, 12 nt, Human
guguuaccugua

SEQ ID NO: 1344275 - RNA, 20 nt, Human
guguuacuaaaaaaaagaug

SEQ ID NO: 1344276 - RNA, 21 nt, Human
guguuacuaaaaaaaagauga

SEQ ID NO: 1344277 - RNA, 23 nt, Human
guguuagggaagggccugccaca

SEQ ID NO: 1344278 - RNA, 19 nt, Human
guguuacuguaauuccuca

SEQ ID NO: 1344279 - RNA, 15 nt, Human
guguuacuguaauuc

SEQ ID NO: 1344280 - RNA, 21 nt, Human
guguuagccuuuuuuccccag

SEQ ID NO: 1344281 - RNA, 16 nt, Human
guguuagggaagggcc

SEQ ID NO: 1344282 - RNA, 22 nt, Human
guguuagggaagggccugccac

SEQ ID NO: 1344283 - RNA, 14 nt, Human
guguaugcacagua

SEQ ID NO: 1344284 - RNA, 17 nt, Human
guguaugcacaugaacu

SEQ ID NO: 1344285 - RNA, 19 nt, Human
guguauggaaauaaaugua

SEQ ID NO: 1344286 - RNA, 22 nt, Human
gugucccagaagaugacugagg

SEQ ID NO: 1344287 - RNA, 18 nt, Human
gugucccagaagaugacu

SEQ ID NO: 1344288 - RNA, 21 nt, Human
gugucccauucccccagugcg

SEQ ID NO: 1344289 - RNA, 12 nt, Human
guguccccaaca

SEQ ID NO: 1344290 - RNA, 18 nt, Human
guguccccaacagcgccc

SEQ ID NO: 1344291 - RNA, 19 nt, Human
guguccccaacagcgccca

SEQ ID NO: 1344292 - RNA, 18 nt, Human
gugucccccucuguccag

SEQ ID NO: 1344293 - RNA, 14 nt, Human
gugucccccucugu

SEQ ID NO: 1344294 - RNA, 15 nt, Human
guguaucaaaaugcu

SEQ ID NO: 1344295 - RNA, 14 nt, Human
guguaucucacacu

SEQ ID NO: 1344296 - RNA, 17 nt, Human
guguauaaacaagaaaa

SEQ ID NO: 1344297 - RNA, 19 nt, Human
guguauaaacaagaaaaau

SEQ ID NO: 1344298 - RNA, 12 nt, Human
guguauauauau

SEQ ID NO: 1344299 - RNA, 13 nt, Human
guguauauggaca

SEQ ID NO: 1344300 - RNA, 22 nt, Human
guguagcuacagagaaaccagc

SEQ ID NO: 1344301 - RNA, 12 nt, Human
guguagcuguga

SEQ ID NO: 1344302 - RNA, 15 nt, Human
guguagcugugaccu

SEQ ID NO: 1344303 - RNA, 16 nt, Human
guguagcugugaccug

SEQ ID NO: 1344304 - RNA, 18 nt, Human
guguagcugugaccugcu

SEQ ID NO: 1344305 - RNA, 19 nt, Human
guguagcugugaccugcug

SEQ ID NO: 1344306 - RNA, 20 nt, Human
guguagcugugaccugcuga

SEQ ID NO: 1344307 - RNA, 21 nt, Human
guguagcugugaccugcugag

SEQ ID NO: 1344308 - RNA, 22 nt, Human
guguagcugugaccugcugagc

SEQ ID NO: 1344309 - RNA, 14 nt, Human
guguagcuuugcuc

SEQ ID NO: 1344310 - RNA, 23 nt, Human
guguagcugugaccugcugagcu

SEQ ID NO: 1344311 - RNA, 15 nt, Human
guguaguucauguaa

SEQ ID NO: 1344312 - RNA, 17 nt, Human
guguaguucauguaaau

SEQ ID NO: 1344313 - RNA, 12 nt, Human
guguauaaaaau

SEQ ID NO: 1344314 - RNA, 14 nt, Human
guguauaaaaauaa

SEQ ID NO: 1344315 - RNA, 18 nt, Human
guguauaaaaauaaaaaa

SEQ ID NO: 1344316 - RNA, 12 nt, Human
guguauaaacaa

SEQ ID NO: 1344317 - RNA, 14 nt, Human
guguauaaacaaga

SEQ ID NO: 1344318 - RNA, 17 nt, Human
guguaccauuugccucc

SEQ ID NO: 1344319 - RNA, 20 nt, Human
guguaccgcgucuacccugg

SEQ ID NO: 1344320 - RNA, 22 nt, Human
guguaccgcgucuacccuggga

SEQ ID NO: 1344321 - RNA, 14 nt, Human
guguagaacacuaa

SEQ ID NO: 1344322 - RNA, 15 nt, Human
guguagaacacuaau

SEQ ID NO: 1344323 - RNA, 19 nt, Human
guguagaacacuaauucau

SEQ ID NO: 1344324 - RNA, 16 nt, Human
guguagcaacuacagu

SEQ ID NO: 1344325 - RNA, 17 nt, Human
guguagccacaccagga

SEQ ID NO: 1344326 - RNA, 11 nt, Human
guguagccuuu

SEQ ID NO: 1344327 - RNA, 12 nt, Human
guguagccuuuu

SEQ ID NO: 1344328 - RNA, 13 nt, Human
guguagccuuuuu

SEQ ID NO: 1344329 - RNA, 20 nt, Human
guguagccuuuuuguauaaa

SEQ ID NO: 1344330 - RNA, 15 nt, Human
guguagcuacagaga

SEQ ID NO: 1344331 - RNA, 16 nt, Human
guguagcuacagagaa

SEQ ID NO: 1344332 - RNA, 17 nt, Human
guguagcuacagagaaa

SEQ ID NO: 1344333 - RNA, 18 nt, Human
guguagcuacagagaaac

SEQ ID NO: 1344334 - RNA, 20 nt, Human
guguagcuacagagaaacca

SEQ ID NO: 1344335 - RNA, 16 nt, Human
guguacauaacugaaa

SEQ ID NO: 1344336 - RNA, 12 nt, Human
guguacauaugu

SEQ ID NO: 1344337 - RNA, 15 nt, Human
guguacauaugugcu

SEQ ID NO: 1344338 - RNA, 14 nt, Human
guguacauaacuga

SEQ ID NO: 1344339 - RNA, 16 nt, Human
guguaaugaauaccuu

SEQ ID NO: 1344340 - RNA, 18 nt, Human
guguaauugagaaggaaa

SEQ ID NO: 1344341 - RNA, 17 nt, Human
guguaagacaaaaagcu

SEQ ID NO: 1344342 - RNA, 17 nt, Human
guggugcgagugcguga

SEQ ID NO: 1344343 - RNA, 21 nt, Human
guguaagauuuguuuuuaaac

SEQ ID NO: 1344344 - RNA, 19 nt, Human
guguaagggccagaaauau

SEQ ID NO: 1344345 - RNA, 21 nt, Human
guguaaguagauaggccaugg

SEQ ID NO: 1344346 - RNA, 23 nt, Human
guggugaaaagcagguugauaaa

SEQ ID NO: 1344347 - RNA, 20 nt, Human
guggucuguuggcaggcugg

SEQ ID NO: 1344348 - RNA, 21 nt, Human
guggucuguuggcaggcuggc

SEQ ID NO: 1344349 - RNA, 22 nt, Human
guggucuguuggcaggcuggcc

SEQ ID NO: 1344350 - RNA, 23 nt, Human
guggucuguuggcaggcuggcca

SEQ ID NO: 1344351 - RNA, 13 nt, Human
guggucuguuggc

SEQ ID NO: 1344352 - RNA, 17 nt, Human
guggucuguuggcaggc

SEQ ID NO: 1344353 - RNA, 19 nt, Human
guggucuguuggcaggcug

SEQ ID NO: 1344354 - RNA, 13 nt, Human
gugguagagaagc

SEQ ID NO: 1344355 - RNA, 14 nt, Human
gugguacccucugg

SEQ ID NO: 1344356 - RNA, 21 nt, Human
gugguaagcaacauggcuuug

SEQ ID NO: 1344357 - RNA, 12 nt, Human
gugguacagaga

SEQ ID NO: 1344358 - RNA, 13 nt, Human
gugguacagagaa

SEQ ID NO: 1344359 - RNA, 14 nt, Human
gugguacagagaag

SEQ ID NO: 1344360 - RNA, 15 nt, Human
gugguacagagaagc

SEQ ID NO: 1344361 - RNA, 16 nt, Human
gugguacagagaagcc

SEQ ID NO: 1344362 - RNA, 17 nt, Human
gugguacagagaagcca

SEQ ID NO: 1344363 - RNA, 18 nt, Human
gugguacagagaagccag

SEQ ID NO: 1344364 - RNA, 22 nt, Human
gugguacagagaagccagcuug

SEQ ID NO: 1344365 - RNA, 14 nt, Human
gugguaucuugcag

SEQ ID NO: 1344366 - RNA, 23 nt, Human
gugguacagagaagccagcuugu

SEQ ID NO: 1344367 - RNA, 14 nt, Human
gugguauuuucaau

SEQ ID NO: 1344368 - RNA, 23 nt, Human
gugguauuuucaauagccacuaa

SEQ ID NO: 1344369 - RNA, 15 nt, Human
guggucacagcggag

SEQ ID NO: 1344370 - RNA, 16 nt, Human
guggucacagcggagg

SEQ ID NO: 1344371 - RNA, 18 nt, Human
guggucacagcggaggug

SEQ ID NO: 1344372 - RNA, 22 nt, Human
guggucacagcggaggugugga

SEQ ID NO: 1344373 - RNA, 14 nt, Human
guggucacagcugu

SEQ ID NO: 1344374 - RNA, 21 nt, Human
gugguauuuucaauagccacu

SEQ ID NO: 1344375 - RNA, 15 nt, Human
gugggcauucaaaug

SEQ ID NO: 1344376 - RNA, 17 nt, Human
gugggccaacaaagaac

SEQ ID NO: 1344377 - RNA, 15 nt, Human
gugggccagucugug

SEQ ID NO: 1344378 - RNA, 16 nt, Human
gugggccagucugugg

SEQ ID NO: 1344379 - RNA, 13 nt, Human
gugggccugggcu

SEQ ID NO: 1344380 - RNA, 17 nt, Human
gugggccagucugugga

SEQ ID NO: 1344381 - RNA, 18 nt, Human
gugggccagucuguggau

SEQ ID NO: 1344382 - RNA, 14 nt, Human
gugggccccacccu

SEQ ID NO: 1344383 - RNA, 13 nt, Human
gugggcucccuga

SEQ ID NO: 1344384 - RNA, 14 nt, Human
gugggcucccugac

SEQ ID NO: 1344385 - RNA, 15 nt, Human
gugggcucccugacu

SEQ ID NO: 1344386 - RNA, 19 nt, Human
gugggccuucagggaguga

SEQ ID NO: 1344387 - RNA, 17 nt, Human
gugggccugggcuccug

SEQ ID NO: 1344388 - RNA, 18 nt, Human
gugggccugggcuccugg

SEQ ID NO: 1344389 - RNA, 20 nt, Human
gugggccugggcuccuggac

SEQ ID NO: 1344390 - RNA, 21 nt, Human
gugggccugggcuccuggacc

SEQ ID NO: 1344391 - RNA, 18 nt, Human
gugggcgugagaccugcc

SEQ ID NO: 1344392 - RNA, 21 nt, Human
gugggcgugagaccugccccu

SEQ ID NO: 1344393 - RNA, 22 nt, Human
gugggcgugagaccugccccuc

SEQ ID NO: 1344394 - RNA, 17 nt, Human
guggguuuuuauuuccu

SEQ ID NO: 1344395 - RNA, 12 nt, Human
gugguaaaaagg

SEQ ID NO: 1344396 - RNA, 18 nt, Human
guggguuuuuuaguugaa

SEQ ID NO: 1344397 - RNA, 14 nt, Human
guggggccagguca

SEQ ID NO: 1344398 - RNA, 17 nt, Human
guggggcagcuccucug

SEQ ID NO: 1344399 - RNA, 14 nt, Human
guggguuccacaga

SEQ ID NO: 1344400 - RNA, 15 nt, Human
guggguuccacagac

SEQ ID NO: 1344401 - RNA, 13 nt, Human
guggggcagaggc

SEQ ID NO: 1344402 - RNA, 21 nt, Human
guggggagagacgggcccugg

SEQ ID NO: 1344403 - RNA, 17 nt, Human
guggggagacugggcug

SEQ ID NO: 1344404 - RNA, 14 nt, Human
gugggcuugauucu

SEQ ID NO: 1344405 - RNA, 22 nt, Human
gugggcuuguggggccugggag

SEQ ID NO: 1344406 - RNA, 13 nt, Human
guggggaggggcu

SEQ ID NO: 1344407 - RNA, 19 nt, Human
guggggauaggccagccgc

SEQ ID NO: 1344408 - RNA, 12 nt, Human
guggggaguggg

SEQ ID NO: 1344409 - RNA, 15 nt, Human
gugcuaauuuugaaa

SEQ ID NO: 1344410 - RNA, 13 nt, Human
gugcuaauuuuga

SEQ ID NO: 1344411 - RNA, 15 nt, Human
guggcuacucugugc

SEQ ID NO: 1344412 - RNA, 16 nt, Human
guggcuacucugugcc

SEQ ID NO: 1344413 - RNA, 17 nt, Human
guggcuacucugugcca

SEQ ID NO: 1344414 - RNA, 18 nt, Human
guggcuacucugugccag

SEQ ID NO: 1344415 - RNA, 20 nt, Human
guggcuacucugugccagag

SEQ ID NO: 1344416 - RNA, 21 nt, Human
guggcuacucugugccagagc

SEQ ID NO: 1344417 - RNA, 22 nt, Human
guggcuacucugugccagagcc

SEQ ID NO: 1344418 - RNA, 23 nt, Human
guggcuacucugugccagagccu

SEQ ID NO: 1344419 - RNA, 13 nt, Human
guggcuccuuccc

SEQ ID NO: 1344420 - RNA, 15 nt, Human
guggcugcuguggga

SEQ ID NO: 1344421 - RNA, 16 nt, Human
guggcucgggaggcga

SEQ ID NO: 1344422 - RNA, 20 nt, Human
guggcuccucccggugccca

SEQ ID NO: 1344423 - RNA, 13 nt, Human
guggcuccucccg

SEQ ID NO: 1344424 - RNA, 15 nt, Human
guggcucagccagca

SEQ ID NO: 1344425 - RNA, 22 nt, Human
guggcucacucagcacuuggcc

SEQ ID NO: 1344426 - RNA, 15 nt, Human
guggcugguccaggg

SEQ ID NO: 1344427 - RNA, 17 nt, Human
guggcugguccagggcu

SEQ ID NO: 1344428 - RNA, 18 nt, Human
guggcuucccgcucagcc

SEQ ID NO: 1344429 - RNA, 19 nt, Human
guggcuucccgcucagccc

SEQ ID NO: 1344430 - RNA, 20 nt, Human
guggcuucccgcucagcccu

SEQ ID NO: 1344431 - RNA, 20 nt, Human
guggcuggaagauccugcgg

SEQ ID NO: 1344432 - RNA, 13 nt, Human
guggcuggggcau

SEQ ID NO: 1344433 - RNA, 12 nt, Human
guggcuggaaga

SEQ ID NO: 1344434 - RNA, 17 nt, Human
guggcuggaagauccug

SEQ ID NO: 1344435 - RNA, 18 nt, Human
gugcacuggccccacccu

SEQ ID NO: 1344436 - RNA, 13 nt, Human
gugcacugggagg

SEQ ID NO: 1344437 - RNA, 15 nt, Human
gugcacugggaggcu

SEQ ID NO: 1344438 - RNA, 17 nt, Human
gugcacuggccccaccc

SEQ ID NO: 1344439 - RNA, 16 nt, Human
gugcacuggccccacc

SEQ ID NO: 1344440 - RNA, 21 nt, Human
gugcacugggaggcuccccuu

SEQ ID NO: 1344441 - RNA, 20 nt, Human
gugcacugggaggcuccccu

SEQ ID NO: 1344442 - RNA, 13 nt, Human
gugcacuggcccc

SEQ ID NO: 1344443 - RNA, 21 nt, Human
gugcacugcccauggacaggc

SEQ ID NO: 1344444 - RNA, 19 nt, Human
gugcacugcccauggacag

SEQ ID NO: 1344445 - RNA, 20 nt, Human
gugcacugcccauggacagg

SEQ ID NO: 1344446 - RNA, 15 nt, Human
gugcacugcccaugg

SEQ ID NO: 1344447 - RNA, 21 nt, Human
gugauuuuuaugccaccugaa

SEQ ID NO: 1344448 - RNA, 23 nt, Human
gugauuuuuuuuuuuuuccuguc

SEQ ID NO: 1344449 - RNA, 24 nt, Human
gugauccacccgccucagccuccc

SEQ ID NO: 1344450 - RNA, 20 nt, Human
gugauccacccgccucagcc

SEQ ID NO: 1344451 - RNA, 18 nt, Human
gugauuuacgcucauugu

SEQ ID NO: 1344452 - RNA, 19 nt, Human
gugcagcccccacugccuu

SEQ ID NO: 1344453 - RNA, 17 nt, Human
gugcagccgcugagcga

SEQ ID NO: 1344454 - RNA, 18 nt, Human
gugcagccgcugagcgag

SEQ ID NO: 1344455 - RNA, 15 nt, Human
gugcagcauuucacu

SEQ ID NO: 1344456 - RNA, 16 nt, Human
gugcagcauuucacuu

SEQ ID NO: 1344457 - RNA, 16 nt, Human
gugcaguuauuugcuu

SEQ ID NO: 1344458 - RNA, 13 nt, Human
gugcaucucagcc

SEQ ID NO: 1344459 - RNA, 14 nt, Human
gugcaucucagccc

SEQ ID NO: 1344460 - RNA, 11 nt, Human
gugcaucaggc

SEQ ID NO: 1344461 - RNA, 20 nt, Human
gugcaucaggcuuucuuuuu

SEQ ID NO: 1344462 - RNA, 13 nt, Human
gugccaggaccag

SEQ ID NO: 1344463 - RNA, 16 nt, Human
gugccaggaccaguca

SEQ ID NO: 1344464 - RNA, 13 nt, Human
gugcuaagguucu

SEQ ID NO: 1344465 - RNA, 14 nt, Human
gugcuaagguucua

SEQ ID NO: 1344466 - RNA, 15 nt, Human
gugcuaagguucuaa

SEQ ID NO: 1344467 - RNA, 17 nt, Human
gugcuaagguucuaagg

SEQ ID NO: 1344468 - RNA, 16 nt, Human
gugcuaagguucuaag

SEQ ID NO: 1344469 - RNA, 21 nt, Human
gugcguggaaugcccuucacu

SEQ ID NO: 1344470 - RNA, 13 nt, Human
gugcguggugcga

SEQ ID NO: 1344471 - RNA, 15 nt, Human
gugcguggugguccc

SEQ ID NO: 1344472 - RNA, 19 nt, Human
gugcgugguggucccuggg

SEQ ID NO: 1344473 - RNA, 20 nt, Human
gugcgugguggucccugggu

SEQ ID NO: 1344474 - RNA, 14 nt, Human
gugcgcccagggcu

SEQ ID NO: 1344475 - RNA, 15 nt, Human
gugcgcccagggcug

SEQ ID NO: 1344476 - RNA, 16 nt, Human
gugcgcccagggcugg

SEQ ID NO: 1344477 - RNA, 18 nt, Human
gugcgagggacccagcua

SEQ ID NO: 1344478 - RNA, 12 nt, Human
gugcgcccaggg

SEQ ID NO: 1344479 - RNA, 13 nt, Human
gugcgcccagggc

SEQ ID NO: 1344480 - RNA, 15 nt, Human
gugcggaccacccuc

SEQ ID NO: 1344481 - RNA, 16 nt, Human
gugcggcuggccaugg

SEQ ID NO: 1344482 - RNA, 15 nt, Human
gugcguccacgagcu

SEQ ID NO: 1344483 - RNA, 13 nt, Human
gugcgugaauauu

SEQ ID NO: 1344484 - RNA, 14 nt, Human
gugccuucucucuc

SEQ ID NO: 1344485 - RNA, 23 nt, Human
gugccuuccuguuuuucacauuu

SEQ ID NO: 1344486 - RNA, 15 nt, Human
gugccuucucucucc

SEQ ID NO: 1344487 - RNA, 15 nt, Human
gugccuucagcucua

SEQ ID NO: 1344488 - RNA, 15 nt, Human
gugccccuuccgcca

SEQ ID NO: 1344489 - RNA, 17 nt, Human
gugccccuuccgccacu

SEQ ID NO: 1344490 - RNA, 19 nt, Human
gugccccuuccgccacugg

SEQ ID NO: 1344491 - RNA, 22 nt, Human
gugccccuuccgccacuggggc

SEQ ID NO: 1344492 - RNA, 20 nt, Human
gugccccuuccgccacuggg

SEQ ID NO: 1344493 - RNA, 11 nt, Human
gugccuucauu

SEQ ID NO: 1344494 - RNA, 12 nt, Human
gugccuucauuu

SEQ ID NO: 1344495 - RNA, 14 nt, Human
gugccuucauuugg

SEQ ID NO: 1344496 - RNA, 22 nt, Human
gugccaggugaggucagcacau

SEQ ID NO: 1344497 - RNA, 20 nt, Human
gugcccaagaauagaugcug

SEQ ID NO: 1344498 - RNA, 16 nt, Human
gugccaggugagguca

SEQ ID NO: 1344499 - RNA, 19 nt, Human
gugccaugucaaacaaaua

SEQ ID NO: 1344500 - RNA, 23 nt, Human
gugcccaagaauagaugcugacu

SEQ ID NO: 1344501 - RNA, 21 nt, Human
gugcccccuucaagccugugc

SEQ ID NO: 1344502 - RNA, 21 nt, Human
gugccccucuccuucuuagcu

SEQ ID NO: 1344503 - RNA, 18 nt, Human
gugaggagcuugaaaccc

SEQ ID NO: 1344504 - RNA, 14 nt, Human
gugagcuacaaaug

SEQ ID NO: 1344505 - RNA, 13 nt, Human
gugaggagcuggg

SEQ ID NO: 1344506 - RNA, 15 nt, Human
gugagcccagcuggg

SEQ ID NO: 1344507 - RNA, 18 nt, Human
gugagcccagcuggguca

SEQ ID NO: 1344508 - RNA, 20 nt, Human
gugagcccagcugggucagg

SEQ ID NO: 1344509 - RNA, 15 nt, Human
gugacgucugggugg

SEQ ID NO: 1344510 - RNA, 16 nt, Human
gugacgucuggguggc

SEQ ID NO: 1344511 - RNA, 19 nt, Human
gugacgucuggguggcccu

SEQ ID NO: 1344512 - RNA, 21 nt, Human
gugacgucuggguggcccuua

SEQ ID NO: 1344513 - RNA, 17 nt, Human
gugacuaauggcaugag

SEQ ID NO: 1344514 - RNA, 23 nt, Human
gugacuaacuagacaccaaaguu

SEQ ID NO: 1344515 - RNA, 19 nt, Human
gugauauaaguguguguuu

SEQ ID NO: 1344516 - RNA, 22 nt, Human
gugauagucuuuugcuuuuggc

SEQ ID NO: 1344517 - RNA, 21 nt, Human
gugauauauaaguguacauau

SEQ ID NO: 1344518 - RNA, 23 nt, Human
gugauauauaaguguacauaugu

SEQ ID NO: 1344519 - RNA, 19 nt, Human
gugauaugcacaauguaga

SEQ ID NO: 1344520 - RNA, 14 nt, Human
gugauaugcacaau

SEQ ID NO: 1344521 - RNA, 13 nt, Human
gugauauucuaag

SEQ ID NO: 1344522 - RNA, 20 nt, Human
gugaucagaccauaauguua

SEQ ID NO: 1344523 - RNA, 16 nt, Human
gugaucauguguggaa

SEQ ID NO: 1344524 - RNA, 17 nt, Human
gugaucauguguggaag

SEQ ID NO: 1344525 - RNA, 18 nt, Human
gugaucauguguggaagu

SEQ ID NO: 1344526 - RNA, 12 nt, Human
gugaguuggcuu

SEQ ID NO: 1344527 - RNA, 16 nt, Human
gugaguuggcuuaccu

SEQ ID NO: 1344528 - RNA, 20 nt, Human
gugaguuggcuuaccuggcc

SEQ ID NO: 1344529 - RNA, 17 nt, Human
gugaguguuuuuaucuu

SEQ ID NO: 1344530 - RNA, 13 nt, Human
gugaguucucccu

SEQ ID NO: 1344531 - RNA, 22 nt, Human
gugaguucucccuguacagugu

SEQ ID NO: 1344532 - RNA, 13 nt, Human
gugaaugcuggga

SEQ ID NO: 1344533 - RNA, 15 nt, Human
gugaaugcugggacu

SEQ ID NO: 1344534 - RNA, 20 nt, Human
gugaaugcugggacucagcc

SEQ ID NO: 1344535 - RNA, 21 nt, Human
gugaaugcugggacucagccu

SEQ ID NO: 1344536 - RNA, 14 nt, Human
gugaauucccucac

SEQ ID NO: 1344537 - RNA, 13 nt, Human
gugaauucccuca

SEQ ID NO: 1344538 - RNA, 18 nt, Human
gugaauuguuaguuucug

SEQ ID NO: 1344539 - RNA, 21 nt, Human
gugaacaaauuuacagagaca

SEQ ID NO: 1344540 - RNA, 17 nt, Human
gugaacaaagcagccac

SEQ ID NO: 1344541 - RNA, 18 nt, Human
gugaacaaagcagccacg

SEQ ID NO: 1344542 - RNA, 13 nt, Human
gugaaugaacacu

SEQ ID NO: 1344543 - RNA, 15 nt, Human
gucuuuuuuuguaua

SEQ ID NO: 1344544 - RNA, 16 nt, Human
gucuuuuuuuguauag

SEQ ID NO: 1344545 - RNA, 17 nt, Human
gucuuuuuuuguauagu

SEQ ID NO: 1344546 - RNA, 22 nt, Human
gucuuuuuuuguauaguuaaca

SEQ ID NO: 1344547 - RNA, 19 nt, Human
gugaaaacacauuugcuuu

SEQ ID NO: 1344548 - RNA, 17 nt, Human
gugacagacaggcucuu

SEQ ID NO: 1344549 - RNA, 12 nt, Human
gugacaauaaaa

SEQ ID NO: 1344550 - RNA, 14 nt, Human
gugacaauaaaaca

SEQ ID NO: 1344551 - RNA, 13 nt, Human
gugacacaaacac

SEQ ID NO: 1344552 - RNA, 14 nt, Human
gugacacaaacaca

SEQ ID NO: 1344553 - RNA, 18 nt, Human
gugacacaaacacacaca

SEQ ID NO: 1344554 - RNA, 21 nt, Human
gugacacaaacacacacaaaa

SEQ ID NO: 1344555 - RNA, 15 nt, Human
gugacagacaggcuc

SEQ ID NO: 1344556 - RNA, 16 nt, Human
gugacagacaggcucu

SEQ ID NO: 1344557 - RNA, 21 nt, Human
gucuugggcagagcuggcucu

SEQ ID NO: 1344558 - RNA, 22 nt, Human
gucuugggcagagcuggcucug

SEQ ID NO: 1344559 - RNA, 16 nt, Human
gucuugggcagagcug

SEQ ID NO: 1344560 - RNA, 19 nt, Human
gucuugggcagagcuggcu

SEQ ID NO: 1344561 - RNA, 20 nt, Human
gucuugggcagagcuggcuc

SEQ ID NO: 1344562 - RNA, 16 nt, Human
gucuuggaacuugccu

SEQ ID NO: 1344563 - RNA, 17 nt, Human
gucuuggaacuugccug

SEQ ID NO: 1344564 - RNA, 22 nt, Human
gucuuggaacuugccugccuuu

SEQ ID NO: 1344565 - RNA, 14 nt, Human
gucuugagcucuau

SEQ ID NO: 1344566 - RNA, 16 nt, Human
gucuugagcucuauua

SEQ ID NO: 1344567 - RNA, 18 nt, Human
gucuugaugaccaaaguc

SEQ ID NO: 1344568 - RNA, 20 nt, Human
gucuucuccaacaccaccuc

SEQ ID NO: 1344569 - RNA, 15 nt, Human
gucuucucccuggaa

SEQ ID NO: 1344570 - RNA, 17 nt, Human
gucuucuuacuuggaac

SEQ ID NO: 1344571 - RNA, 20 nt, Human
gucuucuuacuuggaacuga

SEQ ID NO: 1344572 - RNA, 12 nt, Human
gucuucuuggcc

SEQ ID NO: 1344573 - RNA, 22 nt, Human
gucugugaagugagaccuuccu

SEQ ID NO: 1344574 - RNA, 18 nt, Human
gucugugaagugagaccu

SEQ ID NO: 1344575 - RNA, 13 nt, Human
gucugugccccuu

SEQ ID NO: 1344576 - RNA, 19 nt, Human
gucugugccccuuccgcca

SEQ ID NO: 1344577 - RNA, 20 nt, Human
gucugugccccuuccgccac

SEQ ID NO: 1344578 - RNA, 23 nt, Human
gucugugccccuuccgccacugg

SEQ ID NO: 1344579 - RNA, 23 nt, Human
gucugugagaugcuagaacuccc

SEQ ID NO: 1344580 - RNA, 22 nt, Human
gucugugagaugcuagaacucc

SEQ ID NO: 1344581 - RNA, 21 nt, Human
gucugugagaugcuagaacuc

SEQ ID NO: 1344582 - RNA, 17 nt, Human
gucugugagaugcuaga

SEQ ID NO: 1344583 - RNA, 16 nt, Human
gucugugagaugcuag

SEQ ID NO: 1344584 - RNA, 15 nt, Human
gucugugagaugcua

SEQ ID NO: 1344585 - RNA, 13 nt, Human
gucugagagaggc

SEQ ID NO: 1344586 - RNA, 14 nt, Human
gucugagagaggcc

SEQ ID NO: 1344587 - RNA, 15 nt, Human
gucugagagaggcca

SEQ ID NO: 1344588 - RNA, 18 nt, Human
gucugagagaggccauuc

SEQ ID NO: 1344589 - RNA, 10 nt, Human
gucugccagg

SEQ ID NO: 1344590 - RNA, 21 nt, Human
gucugccagggccccucuccc

SEQ ID NO: 1344591 - RNA, 17 nt, Human
gucugccccgcccucau

SEQ ID NO: 1344592 - RNA, 21 nt, Human
gucugcccucugcauccucug

SEQ ID NO: 1344593 - RNA, 17 nt, Human
gucugcccucugcaucc

SEQ ID NO: 1344594 - RNA, 11 nt, Human
gucugccucuu

SEQ ID NO: 1344595 - RNA, 16 nt, Human
gucugcuaucauuauu

SEQ ID NO: 1344596 - RNA, 23 nt, Human
gucugcucagacagaaccccuac

SEQ ID NO: 1344597 - RNA, 13 nt, Human
gucuguugauuaa

SEQ ID NO: 1344598 - RNA, 16 nt, Human
gucuguugauuaaaga

SEQ ID NO: 1344599 - RNA, 19 nt, Human
gucuguugauuaaagauga

SEQ ID NO: 1344600 - RNA, 14 nt, Human
gucuguuggcaggc

SEQ ID NO: 1344601 - RNA, 16 nt, Human
gucuguuggcaggcug

SEQ ID NO: 1344602 - RNA, 18 nt, Human
gucuguuggcaggcuggc

SEQ ID NO: 1344603 - RNA, 19 nt, Human
gucuguuggcaggcuggcc

SEQ ID NO: 1344604 - RNA, 20 nt, Human
gucuguuuuaaaaaccuguu

SEQ ID NO: 1344605 - RNA, 12 nt, Human
gucuguuuacug

SEQ ID NO: 1344606 - RNA, 13 nt, Human
gucuguuuacugc

SEQ ID NO: 1344607 - RNA, 20 nt, Human
gucuguuggcaggcuggcca

SEQ ID NO: 1344608 - RNA, 21 nt, Human
gucuguuggcaggcuggccag

SEQ ID NO: 1344609 - RNA, 22 nt, Human
gucuguuggcaggcuggccagu

SEQ ID NO: 1344610 - RNA, 17 nt, Human
gucuguuuauaaacauu

SEQ ID NO: 1344611 - RNA, 17 nt, Human
gucuguguuuugaaaga

SEQ ID NO: 1344612 - RNA, 16 nt, Human
gucuguuaugcuguga

SEQ ID NO: 1344613 - RNA, 17 nt, Human
gucuguucacuuuuccu

SEQ ID NO: 1344614 - RNA, 18 nt, Human
gucuguucuguuucaagg

SEQ ID NO: 1344615 - RNA, 22 nt, Human
gucugugccccuuccgccacug

SEQ ID NO: 1344616 - RNA, 13 nt, Human
gucuguggaucag

SEQ ID NO: 1344617 - RNA, 16 nt, Human
gucuguggauuuuuuc

SEQ ID NO: 1344618 - RNA, 13 nt, Human
gucuguggauuuu

SEQ ID NO: 1344619 - RNA, 18 nt, Human
gucgucaaagcugaaaug

SEQ ID NO: 1344620 - RNA, 14 nt, Human
gucggucugugccc

SEQ ID NO: 1344621 - RNA, 14 nt, Human
gucggugccuucaa

SEQ ID NO: 1344622 - RNA, 14 nt, Human
gucguaaagauuug

SEQ ID NO: 1344623 - RNA, 12 nt, Human
gucguaaagauu

SEQ ID NO: 1344624 - RNA, 17 nt, Human
gucguccuuacuccugu

SEQ ID NO: 1344625 - RNA, 12 nt, Human
gucgugccugug

SEQ ID NO: 1344626 - RNA, 13 nt, Human
gucgugccugugu

SEQ ID NO: 1344627 - RNA, 14 nt, Human
gucgugccuguguc

SEQ ID NO: 1344628 - RNA, 15 nt, Human
gucgugccugugucc

SEQ ID NO: 1344629 - RNA, 17 nt, Human
gucgugccuguguccau

SEQ ID NO: 1344630 - RNA, 18 nt, Human
gucgugccuguguccaug

SEQ ID NO: 1344631 - RNA, 23 nt, Human
gucguggacacacacagacuauu

SEQ ID NO: 1344632 - RNA, 18 nt, Human
gucguggagagcuaggag

SEQ ID NO: 1344633 - RNA, 19 nt, Human
gucguggagagcuaggagc

SEQ ID NO: 1344634 - RNA, 20 nt, Human
gucguggagagcuaggagca

SEQ ID NO: 1344635 - RNA, 24 nt, Human
gucguggagagcuaggagcaaagc

SEQ ID NO: 1344636 - RNA, 17 nt, Human
gucguggggugugcugg

SEQ ID NO: 1344637 - RNA, 15 nt, Human
gucucacccuggagg

SEQ ID NO: 1344638 - RNA, 21 nt, Human
gucguggagagcuaggagcaa

SEQ ID NO: 1344639 - RNA, 23 nt, Human
gucuaaagauggaguuucuaagg

SEQ ID NO: 1344640 - RNA, 21 nt, Human
gucuaaagcugguuuaauguu

SEQ ID NO: 1344641 - RNA, 13 nt, Human
guccuuagccugg

SEQ ID NO: 1344642 - RNA, 14 nt, Human
guccuuagccugga

SEQ ID NO: 1344643 - RNA, 14 nt, Human
gucggcugaccaug

SEQ ID NO: 1344644 - RNA, 17 nt, Human
gucggcugaccaugcuc

SEQ ID NO: 1344645 - RNA, 18 nt, Human
gucggcugaccaugcuca

SEQ ID NO: 1344646 - RNA, 14 nt, Human
gucggggcaucugg

SEQ ID NO: 1344647 - RNA, 18 nt, Human
gucggggcaucuggccug

SEQ ID NO: 1344648 - RNA, 13 nt, Human
gucccugccugga

SEQ ID NO: 1344649 - RNA, 23 nt, Human
gucccugcacagugacuucugag

SEQ ID NO: 1344650 - RNA, 13 nt, Human
guccuuacuccug

SEQ ID NO: 1344651 - RNA, 15 nt, Human
guccuuacuccugug

SEQ ID NO: 1344652 - RNA, 17 nt, Human
guccuuacuccuguggg

SEQ ID NO: 1344653 - RNA, 18 nt, Human
guccuuacuccuguggga

SEQ ID NO: 1344654 - RNA, 22 nt, Human
guccuuacuccugugggagccu

SEQ ID NO: 1344655 - RNA, 23 nt, Human
guccuuacuccugugggagccuc

SEQ ID NO: 1344656 - RNA, 20 nt, Human
gucucuauaccaauaaagug

SEQ ID NO: 1344657 - RNA, 19 nt, Human
gucucuauaccaauaaagu

SEQ ID NO: 1344658 - RNA, 18 nt, Human
gucucuauaccaauaaag

SEQ ID NO: 1344659 - RNA, 17 nt, Human
gucucuauaccaauaaa

SEQ ID NO: 1344660 - RNA, 15 nt, Human
gucucucucucucua

SEQ ID NO: 1344661 - RNA, 18 nt, Human
gucucuagagcagggauu

SEQ ID NO: 1344662 - RNA, 14 nt, Human
gucucaggcugccu

SEQ ID NO: 1344663 - RNA, 15 nt, Human
gucucacugcuugaa

SEQ ID NO: 1344664 - RNA, 19 nt, Human
gucucagccccuuucccuu

SEQ ID NO: 1344665 - RNA, 13 nt, Human
gucucaggcugcc

SEQ ID NO: 1344666 - RNA, 15 nt, Human
gucucaggcugccug

SEQ ID NO: 1344667 - RNA, 22 nt, Human
gucucuaaucugugcuguuuca

SEQ ID NO: 1344668 - RNA, 21 nt, Human
gucucuaauucuauuaaagug

SEQ ID NO: 1344669 - RNA, 12 nt, Human
gucucuagagca

SEQ ID NO: 1344670 - RNA, 22 nt, Human
gucucacugagcacuguuuucu

SEQ ID NO: 1344671 - RNA, 14 nt, Human
gucucacugcuuga

SEQ ID NO: 1344672 - RNA, 16 nt, Human
gucucacugagcacug

SEQ ID NO: 1344673 - RNA, 20 nt, Human
gucucacccuggaggcaccu

SEQ ID NO: 1344674 - RNA, 18 nt, Human
gucucaccggcucucacc

SEQ ID NO: 1344675 - RNA, 19 nt, Human
gucucaccggcucucaccu

SEQ ID NO: 1344676 - RNA, 20 nt, Human
gucucaccggcucucaccug

SEQ ID NO: 1344677 - RNA, 19 nt, Human
gucucaccuggacuuaagc

SEQ ID NO: 1344678 - RNA, 17 nt, Human
gucucuggaauuugaaa

SEQ ID NO: 1344679 - RNA, 16 nt, Human
gucucugaugcagcuu

SEQ ID NO: 1344680 - RNA, 19 nt, Human
gucucugaugcagcuuaua

SEQ ID NO: 1344681 - RNA, 17 nt, Human
gucucugcaaacugccu

SEQ ID NO: 1344682 - RNA, 19 nt, Human
gucucugaggggcuaccag

SEQ ID NO: 1344683 - RNA, 15 nt, Human
gucucugaugcagcu

SEQ ID NO: 1344684 - RNA, 13 nt, Human
gucucugagcauu

SEQ ID NO: 1344685 - RNA, 18 nt, Human
gucucucugggccuuagg

SEQ ID NO: 1344686 - RNA, 19 nt, Human
gucucucucucucuacaaa

SEQ ID NO: 1344687 - RNA, 14 nt, Human
gucucucuucucuc

SEQ ID NO: 1344688 - RNA, 15 nt, Human
gucucucuucucucc

SEQ ID NO: 1344689 - RNA, 19 nt, Human
gucucucuucucuccagcu

SEQ ID NO: 1344690 - RNA, 20 nt, Human
gucucucuucucuccagcug

SEQ ID NO: 1344691 - RNA, 23 nt, Human
gucucucuucucuccagcugacu

SEQ ID NO: 1344692 - RNA, 21 nt, Human
gucucuggauuauauuaugaa

SEQ ID NO: 1344693 - RNA, 16 nt, Human
gucucugguuccuccc

SEQ ID NO: 1344694 - RNA, 17 nt, Human
gucucugguuccucccc

SEQ ID NO: 1344695 - RNA, 18 nt, Human
gucucuucuccacuggau

SEQ ID NO: 1344696 - RNA, 23 nt, Human
gucucuucugaauaaagcaauua

SEQ ID NO: 1344697 - RNA, 14 nt, Human
gucucuucugagcu

SEQ ID NO: 1344698 - RNA, 22 nt, Human
gucucuucugagcuauuucauc

SEQ ID NO: 1344699 - RNA, 22 nt, Human
gucucuucugaauaaagcaauu

SEQ ID NO: 1344700 - RNA, 21 nt, Human
gucucuucugaauaaagcaau

SEQ ID NO: 1344701 - RNA, 20 nt, Human
gucucuucugaauaaagcaa

SEQ ID NO: 1344702 - RNA, 19 nt, Human
gucucuucugaauaaagca

SEQ ID NO: 1344703 - RNA, 19 nt, Human
gucugacuuucuuuuuuga

SEQ ID NO: 1344704 - RNA, 12 nt, Human
gucucuugcuug

SEQ ID NO: 1344705 - RNA, 20 nt, Human
gucccuaauaaagcugugug

SEQ ID NO: 1344706 - RNA, 18 nt, Human
gucccuaauaaagcugug

SEQ ID NO: 1344707 - RNA, 21 nt, Human
gucccuaccgagucucuucuc

SEQ ID NO: 1344708 - RNA, 22 nt, Human
gucccuaccgagucucuucucc

SEQ ID NO: 1344709 - RNA, 23 nt, Human
gucccuaccgagucucuucucca

SEQ ID NO: 1344710 - RNA, 21 nt, Human
gucccuaccccauggugcuag

SEQ ID NO: 1344711 - RNA, 16 nt, Human
gucccucccccuuguc

SEQ ID NO: 1344712 - RNA, 23 nt, Human
gucccuccgggaccuggugcugc

SEQ ID NO: 1344713 - RNA, 21 nt, Human
gucccugcacagugacuucug

SEQ ID NO: 1344714 - RNA, 14 nt, Human
gucccucuguguau

SEQ ID NO: 1344715 - RNA, 22 nt, Human
gucccucuguguauuugcuuuu

SEQ ID NO: 1344716 - RNA, 22 nt, Human
gucccucucauuuagccugucc

SEQ ID NO: 1344717 - RNA, 11 nt, Human
gucccucugug

SEQ ID NO: 1344718 - RNA, 12 nt, Human
gucccucugugu

SEQ ID NO: 1344719 - RNA, 13 nt, Human
gucccucugugua

SEQ ID NO: 1344720 - RNA, 17 nt, Human
gucccuaauaaagcugu

SEQ ID NO: 1344721 - RNA, 16 nt, Human
gucccuaauaaagcug

SEQ ID NO: 1344722 - RNA, 17 nt, Human
gucccaugaucccugug

SEQ ID NO: 1344723 - RNA, 13 nt, Human
gucccauguggug

SEQ ID NO: 1344724 - RNA, 23 nt, Human
gucccauucccccagugcggcca

SEQ ID NO: 1344725 - RNA, 19 nt, Human
gucccauucccccagugcg

SEQ ID NO: 1344726 - RNA, 21 nt, Human
gucccauuuuagccaagcuua

SEQ ID NO: 1344727 - RNA, 15 nt, Human
guccccaacagcgcc

SEQ ID NO: 1344728 - RNA, 16 nt, Human
guccccaacagcgccc

SEQ ID NO: 1344729 - RNA, 19 nt, Human
guccccaacagcgcccaaa

SEQ ID NO: 1344730 - RNA, 15 nt, Human
gucccaucccugcgu

SEQ ID NO: 1344731 - RNA, 18 nt, Human
gucccaggcugagccuca

SEQ ID NO: 1344732 - RNA, 19 nt, Human
gucccaggcugagccucag

SEQ ID NO: 1344733 - RNA, 21 nt, Human
gucccaggcugagccucaguc

SEQ ID NO: 1344734 - RNA, 15 nt, Human
gucccaggcugagcc

SEQ ID NO: 1344735 - RNA, 16 nt, Human
gucccaggcugagccu

SEQ ID NO: 1344736 - RNA, 17 nt, Human
gucccaggcugagccuc

SEQ ID NO: 1344737 - RNA, 21 nt, Human
gucauucagauaugauucaaa

SEQ ID NO: 1344738 - RNA, 16 nt, Human
gucauucguucugugg

SEQ ID NO: 1344739 - RNA, 21 nt, Human
gucauucgcuacuaugauuua

SEQ ID NO: 1344740 - RNA, 21 nt, Human
gucauuguuauauaaucauua

SEQ ID NO: 1344741 - RNA, 13 nt, Human
gucaggaaagaga

SEQ ID NO: 1344742 - RNA, 22 nt, Human
gucagcugggacaccccgacuu

SEQ ID NO: 1344743 - RNA, 14 nt, Human
gucauguuuaucug

SEQ ID NO: 1344744 - RNA, 13 nt, Human
gucauguuuaucu

SEQ ID NO: 1344745 - RNA, 11 nt, Human
gucauuaaaug

SEQ ID NO: 1344746 - RNA, 22 nt, Human
guccacaggcuucugagcagcg

SEQ ID NO: 1344747 - RNA, 15 nt, Human
guccacgacugucuc

SEQ ID NO: 1344748 - RNA, 16 nt, Human
guccacgacugucucc

SEQ ID NO: 1344749 - RNA, 18 nt, Human
guccacgacugucuccau

SEQ ID NO: 1344750 - RNA, 15 nt, Human
guccaguccaguccu

SEQ ID NO: 1344751 - RNA, 17 nt, Human
guccaguccaguccuau

SEQ ID NO: 1344752 - RNA, 17 nt, Human
guccaguccuaucuggg

SEQ ID NO: 1344753 - RNA, 18 nt, Human
guccaguccuaucugggc

SEQ ID NO: 1344754 - RNA, 19 nt, Human
guccaguccuaucugggcu

SEQ ID NO: 1344755 - RNA, 23 nt, Human
guccaguccuaucugggcuuccu

SEQ ID NO: 1344756 - RNA, 15 nt, Human
guccagguccuggug

SEQ ID NO: 1344757 - RNA, 16 nt, Human
guccagguccuggugg

SEQ ID NO: 1344758 - RNA, 17 nt, Human
guccagguccugguggg

SEQ ID NO: 1344759 - RNA, 21 nt, Human
guccagguccugguggggcag

SEQ ID NO: 1344760 - RNA, 22 nt, Human
guccagguccugguggggcagc

SEQ ID NO: 1344761 - RNA, 23 nt, Human
guccagguccugguggggcagcu

SEQ ID NO: 1344762 - RNA, 14 nt, Human
guccagcuccaacc

SEQ ID NO: 1344763 - RNA, 18 nt, Human
guccagggcuagugacuu

SEQ ID NO: 1344764 - RNA, 15 nt, Human
guauuaagaaaggaa

SEQ ID NO: 1344765 - RNA, 16 nt, Human
guauuaagaaaggaag

SEQ ID NO: 1344766 - RNA, 20 nt, Human
guauuuuaaaagaaugauua

SEQ ID NO: 1344767 - RNA, 13 nt, Human
guauuuuaaucac

SEQ ID NO: 1344768 - RNA, 18 nt, Human
guauuacacucuguaauu

SEQ ID NO: 1344769 - RNA, 16 nt, Human
guauuacacucuguaa

SEQ ID NO: 1344770 - RNA, 18 nt, Human
guauuuuaaaauagcguu

SEQ ID NO: 1344771 - RNA, 23 nt, Human
guauuuuaaaauagcguucuugu

SEQ ID NO: 1344772 - RNA, 21 nt, Human
guauuuuaguaagagauuccu

SEQ ID NO: 1344773 - RNA, 19 nt, Human
guauuuuagugaacuugaa

SEQ ID NO: 1344774 - RNA, 20 nt, Human
guauuuuagugaacuugaaa

SEQ ID NO: 1344775 - RNA, 13 nt, Human
guauuuuauguua

SEQ ID NO: 1344776 - RNA, 16 nt, Human
guauuuuauguuauau

SEQ ID NO: 1344777 - RNA, 17 nt, Human
guauuuuauguuauaua

SEQ ID NO: 1344778 - RNA, 22 nt, Human
guauuuuauguuauauauaaau

SEQ ID NO: 1344779 - RNA, 13 nt, Human
guauuuucaauag

SEQ ID NO: 1344780 - RNA, 17 nt, Human
guauuuucaauagccac

SEQ ID NO: 1344781 - RNA, 18 nt, Human
guauuuuguauuguuuca

SEQ ID NO: 1344782 - RNA, 16 nt, Human
gucaccagagacuuua

SEQ ID NO: 1344783 - RNA, 21 nt, Human
gucaccacgacuggccagggc

SEQ ID NO: 1344784 - RNA, 13 nt, Human
gucaccagagacu

SEQ ID NO: 1344785 - RNA, 13 nt, Human
gucaccagguacu

SEQ ID NO: 1344786 - RNA, 17 nt, Human
gucaccacccugcucau

SEQ ID NO: 1344787 - RNA, 16 nt, Human
gucaccacgacuggcc

SEQ ID NO: 1344788 - RNA, 17 nt, Human
gucaccacgacuggcca

SEQ ID NO: 1344789 - RNA, 19 nt, Human
gucaccacgacuggccagg

SEQ ID NO: 1344790 - RNA, 15 nt, Human
gucaaugcagccccc

SEQ ID NO: 1344791 - RNA, 16 nt, Human
gucaaugacaugaauu

SEQ ID NO: 1344792 - RNA, 23 nt, Human
gucaaugacaugaauuuuagcuu

SEQ ID NO: 1344793 - RNA, 18 nt, Human
gucaaucaagucuguuua

SEQ ID NO: 1344794 - RNA, 23 nt, Human
gucaauaaaauccauacauuugu

SEQ ID NO: 1344795 - RNA, 22 nt, Human
gucaauaaaauccauacauuug

SEQ ID NO: 1344796 - RNA, 21 nt, Human
gucaagggcagcuuugcucau

SEQ ID NO: 1344797 - RNA, 16 nt, Human
gucacuacgccuggcu

SEQ ID NO: 1344798 - RNA, 13 nt, Human
gucacucaaggcg

SEQ ID NO: 1344799 - RNA, 22 nt, Human
gucacuaaagcaggccuuuuga

SEQ ID NO: 1344800 - RNA, 19 nt, Human
gucacucuagucaaugaca

SEQ ID NO: 1344801 - RNA, 16 nt, Human
gucagacccuggaggc

SEQ ID NO: 1344802 - RNA, 16 nt, Human
gucagacgccugagga

SEQ ID NO: 1344803 - RNA, 17 nt, Human
gucagacgccugaggaa

SEQ ID NO: 1344804 - RNA, 18 nt, Human
gucagacgccugaggaac

SEQ ID NO: 1344805 - RNA, 20 nt, Human
gucagauccaggagcuccag

SEQ ID NO: 1344806 - RNA, 14 nt, Human
gucagauccaggag

SEQ ID NO: 1344807 - RNA, 17 nt, Human
gucagauccaggagcuc

SEQ ID NO: 1344808 - RNA, 18 nt, Human
gucagauccaggagcucc

SEQ ID NO: 1344809 - RNA, 22 nt, Human
gucagaugcugugcaaauguua

SEQ ID NO: 1344810 - RNA, 17 nt, Human
gucagauucuugcaucc

SEQ ID NO: 1344811 - RNA, 15 nt, Human
gucagauucuugcau

SEQ ID NO: 1344812 - RNA, 16 nt, Human
gucagauucuugcauc

SEQ ID NO: 1344813 - RNA, 20 nt, Human
gucagagccaugucuucucc

SEQ ID NO: 1344814 - RNA, 21 nt, Human
gucagagccaugucuucuccc

SEQ ID NO: 1344815 - RNA, 22 nt, Human
gucagagccaugucuucucccu

SEQ ID NO: 1344816 - RNA, 15 nt, Human
guauacuauaguacc

SEQ ID NO: 1344817 - RNA, 15 nt, Human
guauacuguaggcac

SEQ ID NO: 1344818 - RNA, 15 nt, Human
guauaccugauuuuu

SEQ ID NO: 1344819 - RNA, 13 nt, Human
guauaccucacuu

SEQ ID NO: 1344820 - RNA, 23 nt, Human
guauacuagggagccauuugaga

SEQ ID NO: 1344821 - RNA, 18 nt, Human
guauaauuggauuuccua

SEQ ID NO: 1344822 - RNA, 19 nt, Human
guauaauuggauuuccuaa

SEQ ID NO: 1344823 - RNA, 20 nt, Human
guauaauuggauuuccuaau

SEQ ID NO: 1344824 - RNA, 13 nt, Human
guagugcuuugag

SEQ ID NO: 1344825 - RNA, 17 nt, Human
guauaauucacauugua

SEQ ID NO: 1344826 - RNA, 14 nt, Human
guaguguuggagaa

SEQ ID NO: 1344827 - RNA, 15 nt, Human
guaguguuggagaag

SEQ ID NO: 1344828 - RNA, 17 nt, Human
guaguguuggagaagaa

SEQ ID NO: 1344829 - RNA, 23 nt, Human
guagugcuacaggguccaacaua

SEQ ID NO: 1344830 - RNA, 18 nt, Human
guaguggggaagaggguu

SEQ ID NO: 1344831 - RNA, 19 nt, Human
guagugauuuuuaugccac

SEQ ID NO: 1344832 - RNA, 16 nt, Human
guagucuugaugacca

SEQ ID NO: 1344833 - RNA, 20 nt, Human
guagucucacugcuugaacu

SEQ ID NO: 1344834 - RNA, 19 nt, Human
guagucucacugcuugaac

SEQ ID NO: 1344835 - RNA, 12 nt, Human
guagucuugaug

SEQ ID NO: 1344836 - RNA, 12 nt, Human
guaguccuguga

SEQ ID NO: 1344837 - RNA, 22 nt, Human
guaguagcguuuuuuaaaugua

SEQ ID NO: 1344838 - RNA, 16 nt, Human
guaguaggcauuuuua

SEQ ID NO: 1344839 - RNA, 22 nt, Human
guaguaugauagguuauuuuga

SEQ ID NO: 1344840 - RNA, 13 nt, Human
guaguaugauggg

SEQ ID NO: 1344841 - RNA, 17 nt, Human
guaguauggccuguguc

SEQ ID NO: 1344842 - RNA, 20 nt, Human
guaguauggccugugucacu

SEQ ID NO: 1344843 - RNA, 15 nt, Human
guaguauuuuuugua

SEQ ID NO: 1344844 - RNA, 19 nt, Human
guaguauuuuuuguauaau

SEQ ID NO: 1344845 - RNA, 20 nt, Human
guaguauuuuuuguauaauu

SEQ ID NO: 1344846 - RNA, 23 nt, Human
guaguauuuuuuguauaauugga

SEQ ID NO: 1344847 - RNA, 17 nt, Human
guagguucagccaaggu

SEQ ID NO: 1344848 - RNA, 13 nt, Human
guagguugcacac

SEQ ID NO: 1344849 - RNA, 14 nt, Human
guagguugcacacu

SEQ ID NO: 1344850 - RNA, 19 nt, Human
guagguugcacacuuuggu

SEQ ID NO: 1344851 - RNA, 18 nt, Human
guagguugcacacuuugg

SEQ ID NO: 1344852 - RNA, 15 nt, Human
guaguaaauaaugcu

SEQ ID NO: 1344853 - RNA, 17 nt, Human
guaguaaauaaugcuuu

SEQ ID NO: 1344854 - RNA, 21 nt, Human
guaguaaauaaugcuuugaaa

SEQ ID NO: 1344855 - RNA, 13 nt, Human
guaguaacacuaa

SEQ ID NO: 1344856 - RNA, 14 nt, Human
guaguaacacuaau

SEQ ID NO: 1344857 - RNA, 15 nt, Human
guaguaauugacaug

SEQ ID NO: 1344858 - RNA, 15 nt, Human
guaguaacacuaaua

SEQ ID NO: 1344859 - RNA, 15 nt, Human
guaguaccaaaauaa

SEQ ID NO: 1344860 - RNA, 16 nt, Human
guaguaccaaaauaaa

SEQ ID NO: 1344861 - RNA, 22 nt, Human
guaggggcuuauaauaaaggac

SEQ ID NO: 1344862 - RNA, 16 nt, Human
guaggggcugggaaca

SEQ ID NO: 1344863 - RNA, 16 nt, Human
guagggggcuggagga

SEQ ID NO: 1344864 - RNA, 17 nt, Human
guagggggcuggaggag

SEQ ID NO: 1344865 - RNA, 19 nt, Human
guagggggcuggaggagcc

SEQ ID NO: 1344866 - RNA, 21 nt, Human
guagggggcuggaggagccca

SEQ ID NO: 1344867 - RNA, 13 nt, Human
guaggggccccuc

SEQ ID NO: 1344868 - RNA, 20 nt, Human
guaggggccccucucagccc

SEQ ID NO: 1344869 - RNA, 13 nt, Human
guaggggcuggga

SEQ ID NO: 1344870 - RNA, 15 nt, Human
guaggggcugggaac

SEQ ID NO: 1344871 - RNA, 17 nt, Human
guaggggcugggaacag

SEQ ID NO: 1344872 - RNA, 14 nt, Human
guagggugggccuu

SEQ ID NO: 1344873 - RNA, 20 nt, Human
guagggggcuggaggagccc

SEQ ID NO: 1344874 - RNA, 22 nt, Human
guaggguaaaucaguaagaggu

SEQ ID NO: 1344875 - RNA, 22 nt, Human
guaggguaauuaguaacaugug

SEQ ID NO: 1344876 - RNA, 17 nt, Human
guagggugggccuucag

SEQ ID NO: 1344877 - RNA, 22 nt, Human
guagggugggccuucagggagu

SEQ ID NO: 1344878 - RNA, 21 nt, Human
guagguuauuaugauuagcuu

SEQ ID NO: 1344879 - RNA, 24 nt, Human
guagguggaagcuagacacaugaa

SEQ ID NO: 1344880 - RNA, 23 nt, Human
guagguggaagcuagacacauga

SEQ ID NO: 1344881 - RNA, 15 nt, Human
guagguucagccaag

SEQ ID NO: 1344882 - RNA, 16 nt, Human
guagguucagccaagg

SEQ ID NO: 1344883 - RNA, 12 nt, Human
guagggugggag

SEQ ID NO: 1344884 - RNA, 15 nt, Human
guagggugggagugg

SEQ ID NO: 1344885 - RNA, 12 nt, Human
guaggguuucua

SEQ ID NO: 1344886 - RNA, 19 nt, Human
guagaguugaucaaaauca

SEQ ID NO: 1344887 - RNA, 14 nt, Human
guagaguugcugag

SEQ ID NO: 1344888 - RNA, 21 nt, Human
guagauaaguguucugucuga

SEQ ID NO: 1344889 - RNA, 23 nt, Human
guagaguugcugagagggcucga

SEQ ID NO: 1344890 - RNA, 15 nt, Human
guagaguugcugaga

SEQ ID NO: 1344891 - RNA, 22 nt, Human
guagauauuggacaaagaaccu

SEQ ID NO: 1344892 - RNA, 15 nt, Human
guagaugcauuuggg

SEQ ID NO: 1344893 - RNA, 20 nt, Human
guagaugcauuuggguccag

SEQ ID NO: 1344894 - RNA, 22 nt, Human
guagaugcauuuggguccagga

SEQ ID NO: 1344895 - RNA, 17 nt, Human
guagaugggagggaggc

SEQ ID NO: 1344896 - RNA, 21 nt, Human
guagaugggagggaggcucag

SEQ ID NO: 1344897 - RNA, 16 nt, Human
guagcauccuggaaua

SEQ ID NO: 1344898 - RNA, 13 nt, Human
guagcacuuacug

SEQ ID NO: 1344899 - RNA, 23 nt, Human
guagcacaaguuauuuaaaucug

SEQ ID NO: 1344900 - RNA, 14 nt, Human
guagauucagguaa

SEQ ID NO: 1344901 - RNA, 18 nt, Human
guagauucagguaauaca

SEQ ID NO: 1344902 - RNA, 15 nt, Human
guagauugauuguau

SEQ ID NO: 1344903 - RNA, 13 nt, Human
guagauugcagaa

SEQ ID NO: 1344904 - RNA, 21 nt, Human
guagauugcagaaaauucugu

SEQ ID NO: 1344905 - RNA, 23 nt, Human
guagauugcagaaaauucugugc

SEQ ID NO: 1344906 - RNA, 14 nt, Human
guagauuuuccaaa

SEQ ID NO: 1344907 - RNA, 21 nt, Human
guagcauuuguguugaagagg

SEQ ID NO: 1344908 - RNA, 17 nt, Human
guagcaugcuuguugca

SEQ ID NO: 1344909 - RNA, 13 nt, Human
guagccacaccag

SEQ ID NO: 1344910 - RNA, 16 nt, Human
guagccacaccaggau

SEQ ID NO: 1344911 - RNA, 15 nt, Human
guagccagcacacag

SEQ ID NO: 1344912 - RNA, 18 nt, Human
guagccagcacacagggc

SEQ ID NO: 1344913 - RNA, 19 nt, Human
guagccagcacacagggca

SEQ ID NO: 1344914 - RNA, 21 nt, Human
guagccagcacacagggcagu

SEQ ID NO: 1344915 - RNA, 15 nt, Human
guagccacaccagga

SEQ ID NO: 1344916 - RNA, 11 nt, Human
guagccagccg

SEQ ID NO: 1344917 - RNA, 21 nt, Human
guagccagccggggcgagugg

SEQ ID NO: 1344918 - RNA, 15 nt, Human
guagccagccggggc

SEQ ID NO: 1344919 - RNA, 15 nt, Human
guagccccagugaca

SEQ ID NO: 1344920 - RNA, 19 nt, Human
guagccccagugacagcua

SEQ ID NO: 1344921 - RNA, 16 nt, Human
guagccccagugacag

SEQ ID NO: 1344922 - RNA, 21 nt, Human
guaggcuacagagaagccuuc

SEQ ID NO: 1344923 - RNA, 14 nt, Human
guaggcuacagaga

SEQ ID NO: 1344924 - RNA, 15 nt, Human
guaggcuacagagaa

SEQ ID NO: 1344925 - RNA, 16 nt, Human
guaggcuacagagaag

SEQ ID NO: 1344926 - RNA, 17 nt, Human
guaggcuacagagaagc

SEQ ID NO: 1344927 - RNA, 18 nt, Human
guaggcuacagagaagcc

SEQ ID NO: 1344928 - RNA, 19 nt, Human
guaggcuacagagaagccu

SEQ ID NO: 1344929 - RNA, 20 nt, Human
guaggcuacagagaagccuu

SEQ ID NO: 1344930 - RNA, 22 nt, Human
guaggcuacagagaagccuuca

SEQ ID NO: 1344931 - RNA, 13 nt, Human
guagggagggcgg

SEQ ID NO: 1344932 - RNA, 15 nt, Human
guagggaguuguggg

SEQ ID NO: 1344933 - RNA, 17 nt, Human
guauguuagugcaaauu

SEQ ID NO: 1344934 - RNA, 12 nt, Human
guaugugugugu

SEQ ID NO: 1344935 - RNA, 13 nt, Human
guaugugugugug

SEQ ID NO: 1344936 - RNA, 22 nt, Human
guaugaucaaauguuuaaucau

SEQ ID NO: 1344937 - RNA, 17 nt, Human
guaugaucaaauguuua

SEQ ID NO: 1344938 - RNA, 16 nt, Human
guaugaucaaauguuu

SEQ ID NO: 1344939 - RNA, 15 nt, Human
guaugaucaaauguu

SEQ ID NO: 1344940 - RNA, 14 nt, Human
guaugaucaaaugu

SEQ ID NO: 1344941 - RNA, 13 nt, Human
guaugaucaaaug

SEQ ID NO: 1344942 - RNA, 24 nt, Human
guaugauagguuauuuugauguaa

SEQ ID NO: 1344943 - RNA, 16 nt, Human
guaugauacuucgaca

SEQ ID NO: 1344944 - RNA, 17 nt, Human
guauguugaagccuuug

SEQ ID NO: 1344945 - RNA, 22 nt, Human
guauguucaacuaggaucagaa

SEQ ID NO: 1344946 - RNA, 19 nt, Human
guauguucuaaccuuuaca

SEQ ID NO: 1344947 - RNA, 17 nt, Human
guauuaaaauguaugca

SEQ ID NO: 1344948 - RNA, 14 nt, Human
guauuaaaauguau

SEQ ID NO: 1344949 - RNA, 18 nt, Human
guauuaagaaaaucuauu

SEQ ID NO: 1344950 - RNA, 12 nt, Human
guauuaagaaag

SEQ ID NO: 1344951 - RNA, 14 nt, Human
guauuaagaaagga

SEQ ID NO: 1344952 - RNA, 16 nt, Human
guaugaacuugaggac

SEQ ID NO: 1344953 - RNA, 15 nt, Human
guaugaacuugagga

SEQ ID NO: 1344954 - RNA, 17 nt, Human
guaugaaccaccgcgcc

SEQ ID NO: 1344955 - RNA, 23 nt, Human
guaugaacuugaggacacauguc

SEQ ID NO: 1344956 - RNA, 22 nt, Human
guaugaacuugaggacacaugu

SEQ ID NO: 1344957 - RNA, 20 nt, Human
guaugaacuugaggacacau

SEQ ID NO: 1344958 - RNA, 19 nt, Human
guaugaacuugaggacaca

SEQ ID NO: 1344959 - RNA, 18 nt, Human
guaugaauaaagacaccu

SEQ ID NO: 1344960 - RNA, 19 nt, Human
guaugaauaaagacaccua

SEQ ID NO: 1344961 - RNA, 19 nt, Human
guaugaaacuaaagccuuu

SEQ ID NO: 1344962 - RNA, 16 nt, Human
guaugaagaguguuau

SEQ ID NO: 1344963 - RNA, 14 nt, Human
guaugaauuauuca

SEQ ID NO: 1344964 - RNA, 18 nt, Human
guaugaauuauucaauuu

SEQ ID NO: 1344965 - RNA, 22 nt, Human
guaugaaagauggcugugccuc

SEQ ID NO: 1344966 - RNA, 23 nt, Human
guaugaaagauggcugugccucu

SEQ ID NO: 1344967 - RNA, 13 nt, Human
guaucuuuugaua

SEQ ID NO: 1344968 - RNA, 17 nt, Human
guaugaaacuaaagccu

SEQ ID NO: 1344969 - RNA, 22 nt, Human
guaucuugcaguaucggcacug

SEQ ID NO: 1344970 - RNA, 14 nt, Human
guaucuugcaguau

SEQ ID NO: 1344971 - RNA, 16 nt, Human
guauagacuccugaaa

SEQ ID NO: 1344972 - RNA, 18 nt, Human
guauagcaugcaucuguu

SEQ ID NO: 1344973 - RNA, 20 nt, Human
guauagcaugcaucuguuua

SEQ ID NO: 1344974 - RNA, 18 nt, Human
guauagcugcuuccagug

SEQ ID NO: 1344975 - RNA, 14 nt, Human
guauaguuaacaca

SEQ ID NO: 1344976 - RNA, 23 nt, Human
guauauacacccaagaugggcau

SEQ ID NO: 1344977 - RNA, 12 nt, Human
guauauacuuug

SEQ ID NO: 1344978 - RNA, 12 nt, Human
guauauacuuuu

SEQ ID NO: 1344979 - RNA, 13 nt, Human
guauauacuuuuu

SEQ ID NO: 1344980 - RNA, 23 nt, Human
guauauacuuugaaaggagaugu

SEQ ID NO: 1344981 - RNA, 10 nt, Human
guauauauau

SEQ ID NO: 1344982 - RNA, 23 nt, Human
guauauauauauauauguacagu

SEQ ID NO: 1344983 - RNA, 18 nt, Human
guauauauauauauaugu

SEQ ID NO: 1344984 - RNA, 17 nt, Human
guaucucuucagucucu

SEQ ID NO: 1344985 - RNA, 13 nt, Human
guaucucuucagu

SEQ ID NO: 1344986 - RNA, 12 nt, Human
guaucucuucag

SEQ ID NO: 1344987 - RNA, 17 nt, Human
guaucuaugcauuuucu

SEQ ID NO: 1344988 - RNA, 13 nt, Human
guaucucacacuc

SEQ ID NO: 1344989 - RNA, 11 nt, Human
guaucucagaa

SEQ ID NO: 1344990 - RNA, 13 nt, Human
guaucucagaaag

SEQ ID NO: 1344991 - RNA, 14 nt, Human
guaucucagaaagu

SEQ ID NO: 1344992 - RNA, 18 nt, Human
guaucucagaaagugccu

SEQ ID NO: 1344993 - RNA, 20 nt, Human
guaucucagaaagugccuga

SEQ ID NO: 1344994 - RNA, 22 nt, Human
guaucucagaaagugccugaca

SEQ ID NO: 1344995 - RNA, 21 nt, Human
guaucucagaaagugccugac

SEQ ID NO: 1344996 - RNA, 18 nt, Human
guaucggcacuguacaaa

SEQ ID NO: 1344997 - RNA, 16 nt, Human
guaucggcacuguaca

SEQ ID NO: 1344998 - RNA, 15 nt, Human
guaucggcacuguac

SEQ ID NO: 1344999 - RNA, 13 nt, Human
guaucggcacugu

SEQ ID NO: 1345000 - RNA, 18 nt, Human
guaucuaggcaacauagu

SEQ ID NO: 1345001 - RNA, 15 nt, Human
guauauuacaaugau

SEQ ID NO: 1345002 - RNA, 14 nt, Human
guauauuacaauga

SEQ ID NO: 1345003 - RNA, 13 nt, Human
guauauuacaaug

SEQ ID NO: 1345004 - RNA, 13 nt, Human
guauaugucucag

SEQ ID NO: 1345005 - RNA, 15 nt, Human
guauaugucucaggu

SEQ ID NO: 1345006 - RNA, 21 nt, Human
guauaugucucaggucccugc

SEQ ID NO: 1345007 - RNA, 16 nt, Human
guauauguugggugca

SEQ ID NO: 1345008 - RNA, 16 nt, Human
guauaugguauuuauu

SEQ ID NO: 1345009 - RNA, 23 nt, Human
guauaucuagguuuaugacagua

SEQ ID NO: 1345010 - RNA, 20 nt, Human
guauaucuagguuuaugaca

SEQ ID NO: 1345011 - RNA, 19 nt, Human
guauaucuagguuuaugac

SEQ ID NO: 1345012 - RNA, 17 nt, Human
guauauauuuuuuuuua

SEQ ID NO: 1345013 - RNA, 15 nt, Human
uuucucugauacaga

SEQ ID NO: 1345014 - RNA, 16 nt, Human
uuucucugauacagaa

SEQ ID NO: 1345015 - RNA, 17 nt, Human
uuucucugauacagaaa

SEQ ID NO: 1345016 - RNA, 18 nt, Human
uuucucugauacagaaaa

SEQ ID NO: 1345017 - RNA, 21 nt, Human
uuucugaaauuuccugggagc

SEQ ID NO: 1345018 - RNA, 11 nt, Human
uuucucugcca

SEQ ID NO: 1345019 - RNA, 13 nt, Human
uuucucugcagaa

SEQ ID NO: 1345020 - RNA, 21 nt, Human
uuucucugcagaaacuacuga

SEQ ID NO: 1345021 - RNA, 13 nt, Human
uuucugaacagcu

SEQ ID NO: 1345022 - RNA, 15 nt, Human
uuucugaacagcugg

SEQ ID NO: 1345023 - RNA, 16 nt, Human
uuucugaacagcuggu

SEQ ID NO: 1345024 - RNA, 17 nt, Human
uuucugaacagcuggug

SEQ ID NO: 1345025 - RNA, 19 nt, Human
uuucugaacagcuggugua

SEQ ID NO: 1345026 - RNA, 22 nt, Human
uuucugaacagcugguguagcu

SEQ ID NO: 1345027 - RNA, 14 nt, Human
uuucuaaaguaaaa

SEQ ID NO: 1345028 - RNA, 12 nt, Human
uuucuaaaguaa

SEQ ID NO: 1345029 - RNA, 18 nt, Human
uuucuacuuugaagucau

SEQ ID NO: 1345030 - RNA, 22 nt, Human
uuucuacuuugaagucauacca

SEQ ID NO: 1345031 - RNA, 13 nt, Human
uuucuagaaagag

SEQ ID NO: 1345032 - RNA, 13 nt, Human
uuucuagaccaau

SEQ ID NO: 1345033 - RNA, 16 nt, Human
uuucuagagcacugcc

SEQ ID NO: 1345034 - RNA, 21 nt, Human
uuacauuuuuugggcagcaau

SEQ ID NO: 1345035 - RNA, 21 nt, Human
uuaccaaaaauaaauauaucu

SEQ ID NO: 1345036 - RNA, 15 nt, Human
uuaccaaaagucaac

SEQ ID NO: 1345037 - RNA, 16 nt, Human
uuaccaaagaugaaug

SEQ ID NO: 1345038 - RNA, 23 nt, Human
uuaccaaagaugaaugaagcaaa

SEQ ID NO: 1345039 - RNA, 12 nt, Human
uuaccaaccugu

SEQ ID NO: 1345040 - RNA, 13 nt, Human
uuaccaaccuguu

SEQ ID NO: 1345041 - RNA, 23 nt, Human
uuacauuuuauggugccuaguau

SEQ ID NO: 1345042 - RNA, 14 nt, Human
uuacauuuuauggu

SEQ ID NO: 1345043 - RNA, 18 nt, Human
uuacauuuuaaacacauu

SEQ ID NO: 1345044 - RNA, 12 nt, Human
uuacauuuucag

SEQ ID NO: 1345045 - RNA, 20 nt, Human
uuaccaaccuguuaccuacu

SEQ ID NO: 1345046 - RNA, 15 nt, Human
uuaccaaauaaagua

SEQ ID NO: 1345047 - RNA, 12 nt, Human
uuuccugcccug

SEQ ID NO: 1345048 - RNA, 13 nt, Human
uuuccugcccugg

SEQ ID NO: 1345049 - RNA, 22 nt, Human
uuuccugccuuuuaguuccugu

SEQ ID NO: 1345050 - RNA, 16 nt, Human
uuuccuggacacucag

SEQ ID NO: 1345051 - RNA, 20 nt, Human
uuuccuggacacucagaccu

SEQ ID NO: 1345052 - RNA, 23 nt, Human
uuuccugccuuuuaguuccugug

SEQ ID NO: 1345053 - RNA, 19 nt, Human
uuuccucagacucuaagaa

SEQ ID NO: 1345054 - RNA, 13 nt, Human
uuuccucccucag

SEQ ID NO: 1345055 - RNA, 18 nt, Human
uuugaaucaucaagucuu

SEQ ID NO: 1345056 - RNA, 18 nt, Human
uuugaagcacagugauca

SEQ ID NO: 1345057 - RNA, 19 nt, Human
uuugaaucaauaauauauu

SEQ ID NO: 1345058 - RNA, 18 nt, Human
uuugaaucacaugaauua

SEQ ID NO: 1345059 - RNA, 19 nt, Human
uuugaauccucucucugug

SEQ ID NO: 1345060 - RNA, 12 nt, Human
uuucuugccuca

SEQ ID NO: 1345061 - RNA, 13 nt, Human
uuucuugccucau

SEQ ID NO: 1345062 - RNA, 17 nt, Human
uuugaagaacaugugag

SEQ ID NO: 1345063 - RNA, 18 nt, Human
uuugaagaacaugugaga

SEQ ID NO: 1345064 - RNA, 14 nt, Human
uuugaacuuuuuau

SEQ ID NO: 1345065 - RNA, 14 nt, Human
uuucuuccucugcu

SEQ ID NO: 1345066 - RNA, 16 nt, Human
uuucuuccucugcuga

SEQ ID NO: 1345067 - RNA, 19 nt, Human
uuucuucuauugccucuga

SEQ ID NO: 1345068 - RNA, 17 nt, Human
uuucuucuauugccucu

SEQ ID NO: 1345069 - RNA, 11 nt, Human
uuucuuccucu

SEQ ID NO: 1345070 - RNA, 13 nt, Human
uuucuuccucugc

SEQ ID NO: 1345071 - RNA, 17 nt, Human
uuucuuccuaccaaguc

SEQ ID NO: 1345072 - RNA, 22 nt, Human
uuucuuccuaccaagucaaacu

SEQ ID NO: 1345073 - RNA, 23 nt, Human
uuucuuccuaccaagucaaacuu

SEQ ID NO: 1345074 - RNA, 18 nt, Human
uuucuucaccaaaucuug

SEQ ID NO: 1345075 - RNA, 16 nt, Human
uuucuucacugcaaca

SEQ ID NO: 1345076 - RNA, 17 nt, Human
uuucuucacugcaacau

SEQ ID NO: 1345077 - RNA, 19 nt, Human
uuucuucacugcaacauga

SEQ ID NO: 1345078 - RNA, 22 nt, Human
uuucuucacugcaacaugauga

SEQ ID NO: 1345079 - RNA, 14 nt, Human
uuucugaccaaaga

SEQ ID NO: 1345080 - RNA, 12 nt, Human
uuucuguuuucu

SEQ ID NO: 1345081 - RNA, 17 nt, Human
uuucuuaaaaaguuaua

SEQ ID NO: 1345082 - RNA, 16 nt, Human
uuucuuaaaccuucag

SEQ ID NO: 1345083 - RNA, 18 nt, Human
uuucuuaaaccuucaguu

SEQ ID NO: 1345084 - RNA, 18 nt, Human
uuuggagggaagcucuug

SEQ ID NO: 1345085 - RNA, 17 nt, Human
uuuggaguccccucacc

SEQ ID NO: 1345086 - RNA, 20 nt, Human
uuuggagucagacagaugug

SEQ ID NO: 1345087 - RNA, 18 nt, Human
uuuggagaguuuccugaa

SEQ ID NO: 1345088 - RNA, 19 nt, Human
uuuggacaaaauggaauac

SEQ ID NO: 1345089 - RNA, 11 nt, Human
uuuggaaugug

SEQ ID NO: 1345090 - RNA, 20 nt, Human
uuuggaguccccucaccucc

SEQ ID NO: 1345091 - RNA, 17 nt, Human
uuuggagguuuauuacg

SEQ ID NO: 1345092 - RNA, 15 nt, Human
uuuggauauguaaaa

SEQ ID NO: 1345093 - RNA, 21 nt, Human
uuuggauauguaaaacauuua

SEQ ID NO: 1345094 - RNA, 10 nt, Human
uuuggaugcc

SEQ ID NO: 1345095 - RNA, 15 nt, Human
uuuggucucuugcuu

SEQ ID NO: 1345096 - RNA, 19 nt, Human
uuuggauauguaaaacauu

SEQ ID NO: 1345097 - RNA, 18 nt, Human
uuuggugauuacauuuua

SEQ ID NO: 1345098 - RNA, 13 nt, Human
uuuguauaaaaua

SEQ ID NO: 1345099 - RNA, 14 nt, Human
uuuguauaaaauaa

SEQ ID NO: 1345100 - RNA, 16 nt, Human
uuuguauaaaauaauu

SEQ ID NO: 1345101 - RNA, 21 nt, Human
uuuggugcuucucagauuucu

SEQ ID NO: 1345102 - RNA, 14 nt, Human
uuuggugagaaccu

SEQ ID NO: 1345103 - RNA, 19 nt, Human
uuugguuuucacauuggaa

SEQ ID NO: 1345104 - RNA, 21 nt, Human
uuugguuucccaagagcuacg

SEQ ID NO: 1345105 - RNA, 15 nt, Human
uuugcaucugaaaau

SEQ ID NO: 1345106 - RNA, 13 nt, Human
uuugcaucucagu

SEQ ID NO: 1345107 - RNA, 17 nt, Human
uuugaauguguuucaca

SEQ ID NO: 1345108 - RNA, 15 nt, Human
uuugaauguguuuca

SEQ ID NO: 1345109 - RNA, 18 nt, Human
uuugaaugcugcaaguua

SEQ ID NO: 1345110 - RNA, 17 nt, Human
uuugaaugauuuuucuu

SEQ ID NO: 1345111 - RNA, 22 nt, Human
uuugaaugauuuuucuuuacaa

SEQ ID NO: 1345112 - RNA, 16 nt, Human
uuugcauuaaauuaca

SEQ ID NO: 1345113 - RNA, 19 nt, Human
uuugcauuaaauuacagaa

SEQ ID NO: 1345114 - RNA, 17 nt, Human
uuugcauuaaauucaca

SEQ ID NO: 1345115 - RNA, 14 nt, Human
uuugcaucucagua

SEQ ID NO: 1345116 - RNA, 14 nt, Human
uuugcauuaaauua

SEQ ID NO: 1345117 - RNA, 15 nt, Human
uuugcauuaaauuac

SEQ ID NO: 1345118 - RNA, 21 nt, Human
uuuuaaaagaaugauuaugaa

SEQ ID NO: 1345119 - RNA, 13 nt, Human
uuuguugacauua

SEQ ID NO: 1345120 - RNA, 14 nt, Human
uuuguugacauuag

SEQ ID NO: 1345121 - RNA, 15 nt, Human
uuuguugacauucug

SEQ ID NO: 1345122 - RNA, 16 nt, Human
uuuguugacauucuga

SEQ ID NO: 1345123 - RNA, 17 nt, Human
uuuguugacauucugaa

SEQ ID NO: 1345124 - RNA, 18 nt, Human
uuuuaaagacuuuuauga

SEQ ID NO: 1345125 - RNA, 12 nt, Human
uuuuaaagaauu

SEQ ID NO: 1345126 - RNA, 15 nt, Human
uuuguucuucuuaaa

SEQ ID NO: 1345127 - RNA, 20 nt, Human
uuuguucgcauggucacaca

SEQ ID NO: 1345128 - RNA, 14 nt, Human
uuuguauaaaagug

SEQ ID NO: 1345129 - RNA, 20 nt, Human
uuuguauaaaagugugaaau

SEQ ID NO: 1345130 - RNA, 14 nt, Human
uuuguaucuugaug

SEQ ID NO: 1345131 - RNA, 16 nt, Human
uuuuaaauguauacua

SEQ ID NO: 1345132 - RNA, 20 nt, Human
uuuuaaauucccguuuuguc

SEQ ID NO: 1345133 - RNA, 12 nt, Human
uuuuaaauguau

SEQ ID NO: 1345134 - RNA, 19 nt, Human
uuuuaaaugcauaaaugca

SEQ ID NO: 1345135 - RNA, 13 nt, Human
uuuuaaagaauug

SEQ ID NO: 1345136 - RNA, 18 nt, Human
uuuuaaagaccccuaacc

SEQ ID NO: 1345137 - RNA, 18 nt, Human
uuuuaaauauuuuuucuu

SEQ ID NO: 1345138 - RNA, 22 nt, Human
uuuuaauaugcuuaaaauaagc

SEQ ID NO: 1345139 - RNA, 18 nt, Human
uuuuaauccgccaauauu

SEQ ID NO: 1345140 - RNA, 19 nt, Human
uuuuaauccgccaauauua

SEQ ID NO: 1345141 - RNA, 20 nt, Human
uuuuaauccgccaauauuag

SEQ ID NO: 1345142 - RNA, 21 nt, Human
uuuuaaucucuaacaguggac

SEQ ID NO: 1345143 - RNA, 16 nt, Human
uuuuaaugaacaaaug

SEQ ID NO: 1345144 - RNA, 20 nt, Human
uuuuugaaaagcagacauuu

SEQ ID NO: 1345145 - RNA, 23 nt, Human
uuuuugaaaaagcgaaaaaauca

SEQ ID NO: 1345146 - RNA, 21 nt, Human
uuuuucuuuucggaaaucuua

SEQ ID NO: 1345147 - RNA, 17 nt, Human
uuuuugaaaaagcgaaa

SEQ ID NO: 1345148 - RNA, 13 nt, Human
uuuuucugauaaa

SEQ ID NO: 1345149 - RNA, 17 nt, Human
uuuuucugauaaaagau

SEQ ID NO: 1345150 - RNA, 12 nt, Human
uuuuucuugucu

SEQ ID NO: 1345151 - RNA, 22 nt, Human
uuuuucuugucuauaaagcauu

SEQ ID NO: 1345152 - RNA, 12 nt, Human
uuuuucuuuaca

SEQ ID NO: 1345153 - RNA, 17 nt, Human
uuuuucuugucuauaaa

SEQ ID NO: 1345154 - RNA, 19 nt, Human
uuuuucuuuauaagaaagc

SEQ ID NO: 1345155 - RNA, 16 nt, Human
uuuuuugggcagcaau

SEQ ID NO: 1345156 - RNA, 13 nt, Human
uuuuuuguaccaa

SEQ ID NO: 1345157 - RNA, 14 nt, Human
uuuuuuguaccauu

SEQ ID NO: 1345158 - RNA, 15 nt, Human
uuuuuuguauaguua

SEQ ID NO: 1345159 - RNA, 12 nt, Human
uuuuuuguauag

SEQ ID NO: 1345160 - RNA, 12 nt, Human
uuuuuuguugac

SEQ ID NO: 1345161 - RNA, 10 nt, Human
uuuuuugaga

SEQ ID NO: 1345162 - RNA, 15 nt, Human
uuuuugaagcuguau

SEQ ID NO: 1345163 - RNA, 9 nt, Human
uuuuuugca

SEQ ID NO: 1345164 - RNA, 10 nt, Human
uuuuuugcag

SEQ ID NO: 1345165 - RNA, 17 nt, Human
uuuuuugcaguaacugu

SEQ ID NO: 1345166 - RNA, 21 nt, Human
uuuuuuggccaucugcuccug

SEQ ID NO: 1345167 - RNA, 19 nt, Human
uuuuucucuaggaaauauu

SEQ ID NO: 1345168 - RNA, 23 nt, Human
uuuuucucugauacagaaaaguu

SEQ ID NO: 1345169 - RNA, 21 nt, Human
uuuuucucgcuguccuuucua

SEQ ID NO: 1345170 - RNA, 16 nt, Human
uuuuucucucaacacc

SEQ ID NO: 1345171 - RNA, 18 nt, Human
uuuuucucucaacaccau

SEQ ID NO: 1345172 - RNA, 15 nt, Human
uuuuucuaacuacaa

SEQ ID NO: 1345173 - RNA, 14 nt, Human
uuuuucuaaaggag

SEQ ID NO: 1345174 - RNA, 11 nt, Human
uuuuucuauua

SEQ ID NO: 1345175 - RNA, 13 nt, Human
uuuuucuauuaaa

SEQ ID NO: 1345176 - RNA, 18 nt, Human
uuuuucuauuaaaagacu

SEQ ID NO: 1345177 - RNA, 19 nt, Human
uuuuucuauuaaaagacuc

SEQ ID NO: 1345178 - RNA, 21 nt, Human
uuuuucuauuaaaagacucau

SEQ ID NO: 1345179 - RNA, 22 nt, Human
uuuuuccuucaaaguuuaauaa

SEQ ID NO: 1345180 - RNA, 18 nt, Human
uuuuuccuucaaaguuua

SEQ ID NO: 1345181 - RNA, 19 nt, Human
uuuuuccuucaaaguuuaa

SEQ ID NO: 1345182 - RNA, 11 nt, Human
uuuuuccuuuu

SEQ ID NO: 1345183 - RNA, 10 nt, Human
uuuuuccuuu

SEQ ID NO: 1345184 - RNA, 18 nt, Human
uuuuuccuuuaacugaca

SEQ ID NO: 1345185 - RNA, 16 nt, Human
uuuuucguuuguuugu

SEQ ID NO: 1345186 - RNA, 13 nt, Human
uuuuucuaaagga

SEQ ID NO: 1345187 - RNA, 13 nt, Human
uuuuuccucucca

SEQ ID NO: 1345188 - RNA, 11 nt, Human
uuuuuccuguc

SEQ ID NO: 1345189 - RNA, 18 nt, Human
uuuuuccuagcccucuca

SEQ ID NO: 1345190 - RNA, 13 nt, Human
uuuuuaagugaaa

SEQ ID NO: 1345191 - RNA, 20 nt, Human
uuuuuaagugaaaauauagc

SEQ ID NO: 1345192 - RNA, 16 nt, Human
uuuuuaagaauaucug

SEQ ID NO: 1345193 - RNA, 17 nt, Human
uuuuuaagaauaucugu

SEQ ID NO: 1345194 - RNA, 18 nt, Human
uuuuuaagaauaucugua

SEQ ID NO: 1345195 - RNA, 13 nt, Human
uuuuuaagaauug

SEQ ID NO: 1345196 - RNA, 14 nt, Human
uuuuuaagcucuga

SEQ ID NO: 1345197 - RNA, 20 nt, Human
uuuuuaagcucugagcuguc

SEQ ID NO: 1345198 - RNA, 18 nt, Human
uuuuuaaagacuuuuaug

SEQ ID NO: 1345199 - RNA, 13 nt, Human
uuuuuaaagacuu

SEQ ID NO: 1345200 - RNA, 12 nt, Human
uuuuuaaagacu

SEQ ID NO: 1345201 - RNA, 16 nt, Human
uuuuuaaacaaguauu

SEQ ID NO: 1345202 - RNA, 13 nt, Human
uuuuuaaacauca

SEQ ID NO: 1345203 - RNA, 13 nt, Human
uuuuuaaacugua

SEQ ID NO: 1345204 - RNA, 15 nt, Human
uuuuuaaacuguaca

SEQ ID NO: 1345205 - RNA, 16 nt, Human
uuuuuaaacuguacag

SEQ ID NO: 1345206 - RNA, 17 nt, Human
uuuuuaaacuguacagu

SEQ ID NO: 1345207 - RNA, 18 nt, Human
uuuuuaaacuguacagug

SEQ ID NO: 1345208 - RNA, 19 nt, Human
uuuuuaaacuguacagugu

SEQ ID NO: 1345209 - RNA, 21 nt, Human
uuuuuaaacuguacagugucu

SEQ ID NO: 1345210 - RNA, 18 nt, Human
uuuuuaaaaaagaaacau

SEQ ID NO: 1345211 - RNA, 11 nt, Human
uuuugucucug

SEQ ID NO: 1345212 - RNA, 15 nt, Human
uuuuuaaaaaagcuu

SEQ ID NO: 1345213 - RNA, 17 nt, Human
uuuuuaaaaaagcuuaa

SEQ ID NO: 1345214 - RNA, 22 nt, Human
uuuuuaaaaaagcuuaaaacuu

SEQ ID NO: 1345215 - RNA, 23 nt, Human
uuuuuaaaaaagcuuaaaacuuu

SEQ ID NO: 1345216 - RNA, 14 nt, Human
uuuuuaaaaagcaa

SEQ ID NO: 1345217 - RNA, 17 nt, Human
uuuuguauucucugagc

SEQ ID NO: 1345218 - RNA, 18 nt, Human
uuuugucacuuuuucuga

SEQ ID NO: 1345219 - RNA, 23 nt, Human
uuuugucaaugcaguugucucug

SEQ ID NO: 1345220 - RNA, 15 nt, Human
uuuugucuacacacc

SEQ ID NO: 1345221 - RNA, 10 nt, Human
uuuugucucu

SEQ ID NO: 1345222 - RNA, 12 nt, Human
uuuugucucugc

SEQ ID NO: 1345223 - RNA, 11 nt, Human
uuuuguaccaa

SEQ ID NO: 1345224 - RNA, 21 nt, Human
uuuuguagcuggggcuuugau

SEQ ID NO: 1345225 - RNA, 14 nt, Human
uuuuguauaauugg

SEQ ID NO: 1345226 - RNA, 16 nt, Human
uuuuguauaauuggau

SEQ ID NO: 1345227 - RNA, 23 nt, Human
uuuuguauaauuggauuuccuaa

SEQ ID NO: 1345228 - RNA, 24 nt, Human
uuuuguauaauuggauuuccuaau

SEQ ID NO: 1345229 - RNA, 16 nt, Human
uuuuguauaaaauaga

SEQ ID NO: 1345230 - RNA, 20 nt, Human
uuuuguauaguuaacacacu

SEQ ID NO: 1345231 - RNA, 20 nt, Human
uuuuggugguuuuagugauu

SEQ ID NO: 1345232 - RNA, 18 nt, Human
uuuuguaaacucaaaaua

SEQ ID NO: 1345233 - RNA, 14 nt, Human
uuuuguaagacaaa

SEQ ID NO: 1345234 - RNA, 19 nt, Human
uuuuguaaguugaagcaaa

SEQ ID NO: 1345235 - RNA, 17 nt, Human
uuuuguaauaauaaaga

SEQ ID NO: 1345236 - RNA, 19 nt, Human
uuuuguaauaauaaagaau

SEQ ID NO: 1345237 - RNA, 18 nt, Human
uuuucuaaaguaaaaaca

SEQ ID NO: 1345238 - RNA, 20 nt, Human
uuuucuaaaggaguuuaugu

SEQ ID NO: 1345239 - RNA, 23 nt, Human
uuuucuaacagaaagcaugauuu

SEQ ID NO: 1345240 - RNA, 12 nt, Human
uuuucuaacugg

SEQ ID NO: 1345241 - RNA, 16 nt, Human
uuuucuaagaaacauu

SEQ ID NO: 1345242 - RNA, 18 nt, Human
uuuucuaagaaacauuua

SEQ ID NO: 1345243 - RNA, 11 nt, Human
uuuucuuucuc

SEQ ID NO: 1345244 - RNA, 13 nt, Human
uuuucuuugaaua

SEQ ID NO: 1345245 - RNA, 20 nt, Human
uuuucuuugaauaaauguca

SEQ ID NO: 1345246 - RNA, 15 nt, Human
uuuucuuugaauaaa

SEQ ID NO: 1345247 - RNA, 12 nt, Human
uuuucuuugugu

SEQ ID NO: 1345248 - RNA, 19 nt, Human
uuuucuuuguguagcuuug

SEQ ID NO: 1345249 - RNA, 16 nt, Human
uuuucuuuguguagcu

SEQ ID NO: 1345250 - RNA, 14 nt, Human
uuuuccugaaaacc

SEQ ID NO: 1345251 - RNA, 17 nt, Human
uuuuaauuuacaaaaau

SEQ ID NO: 1345252 - RNA, 12 nt, Human
uuuuccuguccu

SEQ ID NO: 1345253 - RNA, 13 nt, Human
uuuuccuguccuc

SEQ ID NO: 1345254 - RNA, 20 nt, Human
uuuuccuguccucuuucagc

SEQ ID NO: 1345255 - RNA, 22 nt, Human
uuuuccuguccucuuucagcuc

SEQ ID NO: 1345256 - RNA, 21 nt, Human
uuuuccuguccucuuucagcu

SEQ ID NO: 1345257 - RNA, 16 nt, Human
uuuuccuucaaaguuu

SEQ ID NO: 1345258 - RNA, 11 nt, Human
uuuuaauuauu

SEQ ID NO: 1345259 - RNA, 16 nt, Human
uuuuaauuauuauucu

SEQ ID NO: 1345260 - RNA, 17 nt, Human
uuuuaauuauuauucuu

SEQ ID NO: 1345261 - RNA, 20 nt, Human
uuuuaauuauuauuuauaua

SEQ ID NO: 1345262 - RNA, 23 nt, Human
uuuuaauuauuauuuauauaugu

SEQ ID NO: 1345263 - RNA, 12 nt, Human
uuuuaauucauu

SEQ ID NO: 1345264 - RNA, 18 nt, Human
uuuuggucuggagggaag

SEQ ID NO: 1345265 - RNA, 14 nt, Human
uuuuggucauugua

SEQ ID NO: 1345266 - RNA, 21 nt, Human
uuuugguccaaguugugcuua

SEQ ID NO: 1345267 - RNA, 22 nt, Human
uuuuggcugaaauucuccugga

SEQ ID NO: 1345268 - RNA, 19 nt, Human
uuuugguaaagacuggcuu

SEQ ID NO: 1345269 - RNA, 16 nt, Human
uuuuggauuggacaaa

SEQ ID NO: 1345270 - RNA, 19 nt, Human
uuuuggcaaaacucuacuu

SEQ ID NO: 1345271 - RNA, 11 nt, Human
uuuuggcaccu

SEQ ID NO: 1345272 - RNA, 11 nt, Human
uuuuggaugcc

SEQ ID NO: 1345273 - RNA, 16 nt, Human
uuuuggauuguauauu

SEQ ID NO: 1345274 - RNA, 13 nt, Human
uuuugaaaaacug

SEQ ID NO: 1345275 - RNA, 13 nt, Human
uuuugaaucaaua

SEQ ID NO: 1345276 - RNA, 13 nt, Human
uuuucuuuucuau

SEQ ID NO: 1345277 - RNA, 16 nt, Human
gcgcgaucucagcuca

SEQ ID NO: 1345278 - RNA, 15 nt, Human
gcgcgaucucagcuc

SEQ ID NO: 1345279 - RNA, 20 nt, Human
gcgcgagggccucaaaggcc

SEQ ID NO: 1345280 - RNA, 22 nt, Human
gcgccgucuccaggggcugcuu

SEQ ID NO: 1345281 - RNA, 22 nt, Human
gcgacagugagacucugucuca

SEQ ID NO: 1345282 - RNA, 13 nt, Human
gcgccgucuccag

SEQ ID NO: 1345283 - RNA, 15 nt, Human
gcgccgucuccaggg

SEQ ID NO: 1345284 - RNA, 12 nt, Human
gcgacagugaga

SEQ ID NO: 1345285 - RNA, 15 nt, Human
gcgcuaucucccugc

SEQ ID NO: 1345286 - RNA, 20 nt, Human
gcgcuaucucccugccuccu

SEQ ID NO: 1345287 - RNA, 13 nt, Human
gcgcucagggcca

SEQ ID NO: 1345288 - RNA, 22 nt, Human
gcgcucagggccaugcugaggc

SEQ ID NO: 1345289 - RNA, 12 nt, Human
gcgcggcuggga

SEQ ID NO: 1345290 - RNA, 18 nt, Human
gcgcggcugggaggaggg

SEQ ID NO: 1345291 - RNA, 19 nt, Human
gcgcgugcaugugugcgug

SEQ ID NO: 1345292 - RNA, 22 nt, Human
gcgcuaauucaaggaauuucuu

SEQ ID NO: 1345293 - RNA, 16 nt, Human
gcgcucagggccaugc

SEQ ID NO: 1345294 - RNA, 10 nt, Human
gcggacacac

SEQ ID NO: 1345295 - RNA, 15 nt, Human
gcgggcagagggcug

SEQ ID NO: 1345296 - RNA, 16 nt, Human
gcgggcagagggcugg

SEQ ID NO: 1345297 - RNA, 17 nt, Human
gcgggcagagggcugga

SEQ ID NO: 1345298 - RNA, 19 nt, Human
gcgggcagagggcuggagg

SEQ ID NO: 1345299 - RNA, 13 nt, Human
gcgggucacagga

SEQ ID NO: 1345300 - RNA, 15 nt, Human
gcgggucacaggagg

SEQ ID NO: 1345301 - RNA, 15 nt, Human
gcgggcgcgugagug

SEQ ID NO: 1345302 - RNA, 21 nt, Human
gcggggcuugccuucuggugu

SEQ ID NO: 1345303 - RNA, 23 nt, Human
gcggggguuccguguccaccccc

SEQ ID NO: 1345304 - RNA, 18 nt, Human
gcgggcagagggcuggag

SEQ ID NO: 1345305 - RNA, 14 nt, Human
gcgucuacccuggg

SEQ ID NO: 1345306 - RNA, 15 nt, Human
gcgucuacccuggga

SEQ ID NO: 1345307 - RNA, 18 nt, Human
gcgguuccggcauggaca

SEQ ID NO: 1345308 - RNA, 20 nt, Human
gcgguuuacucacugcugca

SEQ ID NO: 1345309 - RNA, 21 nt, Human
gcgguuugguuugcagcgacu

SEQ ID NO: 1345310 - RNA, 14 nt, Human
gcguaaguacagag

SEQ ID NO: 1345311 - RNA, 15 nt, Human
gcguaaguacagaga

SEQ ID NO: 1345312 - RNA, 16 nt, Human
gcguaaguacagagaa

SEQ ID NO: 1345313 - RNA, 17 nt, Human
gcguaaguacagagaag

SEQ ID NO: 1345314 - RNA, 18 nt, Human
gcguaaguacagagaagc

SEQ ID NO: 1345315 - RNA, 19 nt, Human
gcguaaguacagagaagcc

SEQ ID NO: 1345316 - RNA, 20 nt, Human
gcguaaguacagagaagcca

SEQ ID NO: 1345317 - RNA, 21 nt, Human
gcguaaguacagagaagccau

SEQ ID NO: 1345318 - RNA, 23 nt, Human
gcguaaguacagagaagccauca

SEQ ID NO: 1345319 - RNA, 19 nt, Human
gcgggucacaggagggagg

SEQ ID NO: 1345320 - RNA, 20 nt, Human
gcgggucacaggagggaggg

SEQ ID NO: 1345321 - RNA, 15 nt, Human
gcgggucugcuccca

SEQ ID NO: 1345322 - RNA, 17 nt, Human
gcgggucugcucccaag

SEQ ID NO: 1345323 - RNA, 21 nt, Human
gcgggugaacaaagcagccac

SEQ ID NO: 1345324 - RNA, 22 nt, Human
gcgggugaacaaagcagccacg

SEQ ID NO: 1345325 - RNA, 17 nt, Human
gcggugcuugauagaaa

SEQ ID NO: 1345326 - RNA, 20 nt, Human
gcggugggaccuagggaggc

SEQ ID NO: 1345327 - RNA, 14 nt, Human
gcggugggccuggu

SEQ ID NO: 1345328 - RNA, 21 nt, Human
gcggugucucuccugccccuu

SEQ ID NO: 1345329 - RNA, 18 nt, Human
gcgguuauaaaaaauggu

SEQ ID NO: 1345330 - RNA, 19 nt, Human
gcgguuauaaaaaaugguu

SEQ ID NO: 1345331 - RNA, 23 nt, Human
gcgguuaugaaauucacccccuu

SEQ ID NO: 1345332 - RNA, 22 nt, Human
gcgguuauaaaaaaugguucag

SEQ ID NO: 1345333 - RNA, 12 nt, Human
gcgguucaggaa

SEQ ID NO: 1345334 - RNA, 16 nt, Human
gcgucuacccugggau

SEQ ID NO: 1345335 - RNA, 21 nt, Human
gcgucuggaaguccaaugugg

SEQ ID NO: 1345336 - RNA, 15 nt, Human
gcuaaagacaugaag

SEQ ID NO: 1345337 - RNA, 17 nt, Human
gcuaaagcaauaugcau

SEQ ID NO: 1345338 - RNA, 19 nt, Human
gcuaaagcaauaugcauuu

SEQ ID NO: 1345339 - RNA, 14 nt, Human
gcuaagacuuccua

SEQ ID NO: 1345340 - RNA, 13 nt, Human
gcuaagagaagua

SEQ ID NO: 1345341 - RNA, 14 nt, Human
gcuaagagaaguag

SEQ ID NO: 1345342 - RNA, 14 nt, Human
gcuacagagaagcc

SEQ ID NO: 1345343 - RNA, 15 nt, Human
gcuacagagaagccu

SEQ ID NO: 1345344 - RNA, 16 nt, Human
gcuacagagaagccuu

SEQ ID NO: 1345345 - RNA, 17 nt, Human
gcuacagagaagccuuc

SEQ ID NO: 1345346 - RNA, 23 nt, Human
gcuacagagaagccuucaagcuc

SEQ ID NO: 1345347 - RNA, 18 nt, Human
gcuacagagaagccuuca

SEQ ID NO: 1345348 - RNA, 17 nt, Human
gcuacagcaauuucuaa

SEQ ID NO: 1345349 - RNA, 19 nt, Human
gcuacagcaauuucuaauu

SEQ ID NO: 1345350 - RNA, 19 nt, Human
gcuaggaaauccagggugg

SEQ ID NO: 1345351 - RNA, 21 nt, Human
gcuagaauugaguguuuaaag

SEQ ID NO: 1345352 - RNA, 16 nt, Human
gcuagacacaugaagg

SEQ ID NO: 1345353 - RNA, 22 nt, Human
gcuaggaaauccaggguggugg

SEQ ID NO: 1345354 - RNA, 16 nt, Human
gcuauagaugucuuuu

SEQ ID NO: 1345355 - RNA, 20 nt, Human
gcuauagaugucuuuuccca

SEQ ID NO: 1345356 - RNA, 21 nt, Human
gcuauagaugucuuuucccau

SEQ ID NO: 1345357 - RNA, 19 nt, Human
gcuagaacucccuuucaac

SEQ ID NO: 1345358 - RNA, 18 nt, Human
gcuaccuguguggacagg

SEQ ID NO: 1345359 - RNA, 19 nt, Human
gcuaccuguguggacagga

SEQ ID NO: 1345360 - RNA, 20 nt, Human
gcuaccuguguggacaggac

SEQ ID NO: 1345361 - RNA, 13 nt, Human
gcuacauaauuua

SEQ ID NO: 1345362 - RNA, 19 nt, Human
gcuaccugcucagcccugc

SEQ ID NO: 1345363 - RNA, 20 nt, Human
gcuaccugcucagcccugca

SEQ ID NO: 1345364 - RNA, 14 nt, Human
gcuaccugugugga

SEQ ID NO: 1345365 - RNA, 17 nt, Human
gcuaccuguguggacag

SEQ ID NO: 1345366 - RNA, 22 nt, Human
gcuaccuguguggacaggacua

SEQ ID NO: 1345367 - RNA, 16 nt, Human
gccuuugaccugccuc

SEQ ID NO: 1345368 - RNA, 15 nt, Human
gccuuggccuguguu

SEQ ID NO: 1345369 - RNA, 15 nt, Human
gccuuggccucccaa

SEQ ID NO: 1345370 - RNA, 11 nt, Human
gccuuggccug

SEQ ID NO: 1345371 - RNA, 12 nt, Human
gccuuggccugg

SEQ ID NO: 1345372 - RNA, 13 nt, Human
gccuuggccugga

SEQ ID NO: 1345373 - RNA, 14 nt, Human
gccuuggccuggag

SEQ ID NO: 1345374 - RNA, 15 nt, Human
gccuuggccuggagc

SEQ ID NO: 1345375 - RNA, 16 nt, Human
gccuuggccuggagca

SEQ ID NO: 1345376 - RNA, 23 nt, Human
gccuuggccuguguucuuccugg

SEQ ID NO: 1345377 - RNA, 18 nt, Human
gccuuuggacuugucccg

SEQ ID NO: 1345378 - RNA, 23 nt, Human
gccuuugcgcuccuggcccagcc

SEQ ID NO: 1345379 - RNA, 22 nt, Human
gccuuuggaaacagcucgacuu

SEQ ID NO: 1345380 - RNA, 16 nt, Human
gccuuugcgcuccugg

SEQ ID NO: 1345381 - RNA, 18 nt, Human
gccuuugcgcuccuggcc

SEQ ID NO: 1345382 - RNA, 19 nt, Human
gccuuugcgcuccuggccc

SEQ ID NO: 1345383 - RNA, 21 nt, Human
gccuuugcgcuccuggcccag

SEQ ID NO: 1345384 - RNA, 14 nt, Human
gccuuugagcucag

SEQ ID NO: 1345385 - RNA, 14 nt, Human
gccuuugccaggug

SEQ ID NO: 1345386 - RNA, 16 nt, Human
gccuuugccaggugac

SEQ ID NO: 1345387 - RNA, 15 nt, Human
gccuuugccagguga

SEQ ID NO: 1345388 - RNA, 15 nt, Human
gccuuugcgcuccug

SEQ ID NO: 1345389 - RNA, 15 nt, Human
gccuuuggcaggugc

SEQ ID NO: 1345390 - RNA, 13 nt, Human
gccuuuggcaggu

SEQ ID NO: 1345391 - RNA, 14 nt, Human
gccuuuuucauuua

SEQ ID NO: 1345392 - RNA, 15 nt, Human
gccuuuuucauuuau

SEQ ID NO: 1345393 - RNA, 17 nt, Human
gccuuuuucauuuaucu

SEQ ID NO: 1345394 - RNA, 18 nt, Human
gccuuuuucauuuaucua

SEQ ID NO: 1345395 - RNA, 19 nt, Human
gccuuuuucauuuaucuau

SEQ ID NO: 1345396 - RNA, 15 nt, Human
gccuuuuuucuguau

SEQ ID NO: 1345397 - RNA, 23 nt, Human
gccuuuuuucuguauaaaugucu

SEQ ID NO: 1345398 - RNA, 22 nt, Human
gcgaaaaaaucagguggcuuuu

SEQ ID NO: 1345399 - RNA, 22 nt, Human
gccuuuuucauuuaucuauaau

SEQ ID NO: 1345400 - RNA, 17 nt, Human
gccuuuuuguuucaaug

SEQ ID NO: 1345401 - RNA, 13 nt, Human
gccuuuuuucccc

SEQ ID NO: 1345402 - RNA, 14 nt, Human
gccuuuuuucccca

SEQ ID NO: 1345403 - RNA, 15 nt, Human
gccuuuuuuccccag

SEQ ID NO: 1345404 - RNA, 16 nt, Human
gccuuuuuuccccaga

SEQ ID NO: 1345405 - RNA, 17 nt, Human
gccuuuuuuccccagac

SEQ ID NO: 1345406 - RNA, 19 nt, Human
gccuuuuuuccccagacuu

SEQ ID NO: 1345407 - RNA, 20 nt, Human
gccuuuuuuccccagacuug

SEQ ID NO: 1345408 - RNA, 23 nt, Human
gccuuuuuuccccagacuuguug

SEQ ID NO: 1345409 - RNA, 16 nt, Human
gccuucauucugcaag

SEQ ID NO: 1345410 - RNA, 12 nt, Human
gccuuccaccca

SEQ ID NO: 1345411 - RNA, 14 nt, Human
gccuuccacccagg

SEQ ID NO: 1345412 - RNA, 17 nt, Human
gccuuccacccaggggc

SEQ ID NO: 1345413 - RNA, 13 nt, Human
gccuucagggagu

SEQ ID NO: 1345414 - RNA, 21 nt, Human
gccuucagggagugagggauu

SEQ ID NO: 1345415 - RNA, 13 nt, Human
gccuucaucuccc

SEQ ID NO: 1345416 - RNA, 18 nt, Human
gccuucauaucauccaca

SEQ ID NO: 1345417 - RNA, 21 nt, Human
gccuucauaucauccacacau

SEQ ID NO: 1345418 - RNA, 18 nt, Human
gccuucgauacaccgggc

SEQ ID NO: 1345419 - RNA, 22 nt, Human
gccuucgauacaccgggccugg

SEQ ID NO: 1345420 - RNA, 19 nt, Human
gccuuccuguuuuucacau

SEQ ID NO: 1345421 - RNA, 23 nt, Human
gccuucgauacaccgggccugga

SEQ ID NO: 1345422 - RNA, 13 nt, Human
gccuugcuuguua

SEQ ID NO: 1345423 - RNA, 11 nt, Human
gccuugcuugu

SEQ ID NO: 1345424 - RNA, 13 nt, Human
gccuguuuaagag

SEQ ID NO: 1345425 - RNA, 19 nt, Human
gccuguuucccaggcccac

SEQ ID NO: 1345426 - RNA, 14 nt, Human
gccuguuuggccuc

SEQ ID NO: 1345427 - RNA, 16 nt, Human
gccuguuuggccucuc

SEQ ID NO: 1345428 - RNA, 21 nt, Human
gccuguuuggccucucuaucc

SEQ ID NO: 1345429 - RNA, 12 nt, Human
gccuguuuaaga

SEQ ID NO: 1345430 - RNA, 22 nt, Human
gccuuaucuugcaccccaaagc

SEQ ID NO: 1345431 - RNA, 18 nt, Human
gccuggucucacccugga

SEQ ID NO: 1345432 - RNA, 19 nt, Human
gccuggucucacccuggag

SEQ ID NO: 1345433 - RNA, 20 nt, Human
gccuggucucacccuggagg

SEQ ID NO: 1345434 - RNA, 22 nt, Human
gccuggucucacccuggaggca

SEQ ID NO: 1345435 - RNA, 14 nt, Human
gccuggggucugga

SEQ ID NO: 1345436 - RNA, 18 nt, Human
gccuggggugacccggca

SEQ ID NO: 1345437 - RNA, 22 nt, Human
gccuggggugacccggcacccc

SEQ ID NO: 1345438 - RNA, 19 nt, Human
gccuggggugacccggcac

SEQ ID NO: 1345439 - RNA, 21 nt, Human
gccugggucucaccggcucuc

SEQ ID NO: 1345440 - RNA, 20 nt, Human
gccuggugcccagcacaugu

SEQ ID NO: 1345441 - RNA, 16 nt, Human
gccugggggugccagg

SEQ ID NO: 1345442 - RNA, 17 nt, Human
gccugggggugccagga

SEQ ID NO: 1345443 - RNA, 21 nt, Human
gccugggggugccaggaccag

SEQ ID NO: 1345444 - RNA, 18 nt, Human
gccugccagcugcacuga

SEQ ID NO: 1345445 - RNA, 23 nt, Human
gccugccaccuggaccccugcau

SEQ ID NO: 1345446 - RNA, 11 nt, Human
gccugccagga

SEQ ID NO: 1345447 - RNA, 12 nt, Human
gccugccaggag

SEQ ID NO: 1345448 - RNA, 13 nt, Human
gccugccaggagg

SEQ ID NO: 1345449 - RNA, 14 nt, Human
gccugccaggagga

SEQ ID NO: 1345450 - RNA, 18 nt, Human
gccugccaggaggaccca

SEQ ID NO: 1345451 - RNA, 20 nt, Human
gccugccaggaggacccagg

SEQ ID NO: 1345452 - RNA, 21 nt, Human
gccugccaggaggacccaggg

SEQ ID NO: 1345453 - RNA, 23 nt, Human
gccugccaggaggacccagggcu

SEQ ID NO: 1345454 - RNA, 14 nt, Human
gccugccagcugca

SEQ ID NO: 1345455 - RNA, 15 nt, Human
gccugccagcugcac

SEQ ID NO: 1345456 - RNA, 16 nt, Human
gccugccaccuggacc

SEQ ID NO: 1345457 - RNA, 17 nt, Human
gccugccaccuggaccc

SEQ ID NO: 1345458 - RNA, 18 nt, Human
gccugccaccuggacccc

SEQ ID NO: 1345459 - RNA, 22 nt, Human
gccugccaccuggaccccugca

SEQ ID NO: 1345460 - RNA, 13 nt, Human
gccugcaaacugg

SEQ ID NO: 1345461 - RNA, 14 nt, Human
gccugcaaacuggg

SEQ ID NO: 1345462 - RNA, 16 nt, Human
gccugcaaacugggaa

SEQ ID NO: 1345463 - RNA, 17 nt, Human
gccugcaaacugggaac

SEQ ID NO: 1345464 - RNA, 23 nt, Human
gccugcaaacugggaaccccuuu

SEQ ID NO: 1345465 - RNA, 21 nt, Human
gccugccaccuccccccacaa

SEQ ID NO: 1345466 - RNA, 12 nt, Human
gccugccaccug

SEQ ID NO: 1345467 - RNA, 13 nt, Human
gccugccaccugg

SEQ ID NO: 1345468 - RNA, 14 nt, Human
gccugccaccugga

SEQ ID NO: 1345469 - RNA, 15 nt, Human
gccugccaccuggac

SEQ ID NO: 1345470 - RNA, 23 nt, Human
gccucccuucaugcauggaaauu

SEQ ID NO: 1345471 - RNA, 14 nt, Human
gccucccuuguggc

SEQ ID NO: 1345472 - RNA, 22 nt, Human
gccucccuucaugcauggaaau

SEQ ID NO: 1345473 - RNA, 20 nt, Human
gccucccuucaugcauggaa

SEQ ID NO: 1345474 - RNA, 18 nt, Human
gccucccuucaugcaugg

SEQ ID NO: 1345475 - RNA, 15 nt, Human
gccucccuucaugca

SEQ ID NO: 1345476 - RNA, 18 nt, Human
gccucucaucaacugaau

SEQ ID NO: 1345477 - RNA, 19 nt, Human
gccucucaucaacugaaug

SEQ ID NO: 1345478 - RNA, 21 nt, Human
gccuccucacccccagcuuug

SEQ ID NO: 1345479 - RNA, 16 nt, Human
gccucucaucaacuga

SEQ ID NO: 1345480 - RNA, 14 nt, Human
gccuccucaccccc

SEQ ID NO: 1345481 - RNA, 16 nt, Human
gccuccucacccccag

SEQ ID NO: 1345482 - RNA, 17 nt, Human
gccuccucacccccagc

SEQ ID NO: 1345483 - RNA, 18 nt, Human
gccuccucacccccagcu

SEQ ID NO: 1345484 - RNA, 19 nt, Human
gccuccucacccccagcuu

SEQ ID NO: 1345485 - RNA, 14 nt, Human
gccucccagguuca

SEQ ID NO: 1345486 - RNA, 12 nt, Human
gccucagagacc

SEQ ID NO: 1345487 - RNA, 15 nt, Human
gccucagagaccagg

SEQ ID NO: 1345488 - RNA, 17 nt, Human
gccucagagaccagggc

SEQ ID NO: 1345489 - RNA, 18 nt, Human
gccucagagaccagggcu

SEQ ID NO: 1345490 - RNA, 15 nt, Human
gccucagauuccuuc

SEQ ID NO: 1345491 - RNA, 22 nt, Human
gccucagauuccuucccaugga

SEQ ID NO: 1345492 - RNA, 16 nt, Human
gccucagauuccuucc

SEQ ID NO: 1345493 - RNA, 18 nt, Human
gccucagauuccuuccca

SEQ ID NO: 1345494 - RNA, 15 nt, Human
gccucccaaaugagc

SEQ ID NO: 1345495 - RNA, 23 nt, Human
gccucugaggccagccuggccuc

SEQ ID NO: 1345496 - RNA, 22 nt, Human
gccucugaggccagccuggccu

SEQ ID NO: 1345497 - RNA, 21 nt, Human
gccucugcacacccuccagag

SEQ ID NO: 1345498 - RNA, 23 nt, Human
gccucugccaaaggaugugauau

SEQ ID NO: 1345499 - RNA, 21 nt, Human
gccucugcccaggcacugcua

SEQ ID NO: 1345500 - RNA, 20 nt, Human
gccugacuagggagccaugu

SEQ ID NO: 1345501 - RNA, 19 nt, Human
gccugacuagggagccaug

SEQ ID NO: 1345502 - RNA, 14 nt, Human
gccugacugccaag

SEQ ID NO: 1345503 - RNA, 15 nt, Human
gccugacugccaagc

SEQ ID NO: 1345504 - RNA, 16 nt, Human
gccugacugccaagcc

SEQ ID NO: 1345505 - RNA, 17 nt, Human
gccugacugccaagcca

SEQ ID NO: 1345506 - RNA, 20 nt, Human
gccugacugccaagccaugg

SEQ ID NO: 1345507 - RNA, 13 nt, Human
gccugaguacucc

SEQ ID NO: 1345508 - RNA, 13 nt, Human
gccugagucaccu

SEQ ID NO: 1345509 - RNA, 16 nt, Human
gccugagguuacugga

SEQ ID NO: 1345510 - RNA, 18 nt, Human
gccugagggaaaggccag

SEQ ID NO: 1345511 - RNA, 20 nt, Human
gccugagggaaaggccagca

SEQ ID NO: 1345512 - RNA, 21 nt, Human
gccugaggucaggaguucaag

SEQ ID NO: 1345513 - RNA, 18 nt, Human
gccucugaggccagccug

SEQ ID NO: 1345514 - RNA, 19 nt, Human
gccucugaggccagccugg

SEQ ID NO: 1345515 - RNA, 20 nt, Human
gccucugaggccagccuggc

SEQ ID NO: 1345516 - RNA, 21 nt, Human
gccucugaggccagccuggcc

SEQ ID NO: 1345517 - RNA, 19 nt, Human
gccucugagaagcucugaa

SEQ ID NO: 1345518 - RNA, 13 nt, Human
gccucugagagca

SEQ ID NO: 1345519 - RNA, 14 nt, Human
gccucugagagcau

SEQ ID NO: 1345520 - RNA, 16 nt, Human
gccucugagagcauca

SEQ ID NO: 1345521 - RNA, 12 nt, Human
gccucugaggcc

SEQ ID NO: 1345522 - RNA, 13 nt, Human
gccucugaggcca

SEQ ID NO: 1345523 - RNA, 14 nt, Human
gccucugaggccag

SEQ ID NO: 1345524 - RNA, 15 nt, Human
gccucugaggccagc

SEQ ID NO: 1345525 - RNA, 16 nt, Human
gccucugaggccagcc

SEQ ID NO: 1345526 - RNA, 17 nt, Human
gccucugaggccagccu

SEQ ID NO: 1345527 - RNA, 20 nt, Human
gccucucuauccucucuucc

SEQ ID NO: 1345528 - RNA, 21 nt, Human
gccucucuauccucucuuccu

SEQ ID NO: 1345529 - RNA, 23 nt, Human
gccucucuauccucucuuccucu

SEQ ID NO: 1345530 - RNA, 21 nt, Human
gccucuccacucaugugacuc

SEQ ID NO: 1345531 - RNA, 24 nt, Human
gccucuccacucaugugacucuuu

SEQ ID NO: 1345532 - RNA, 18 nt, Human
gccuccguccccugccca

SEQ ID NO: 1345533 - RNA, 14 nt, Human
gccucucuacaguc

SEQ ID NO: 1345534 - RNA, 16 nt, Human
gccgugguccuuuggg

SEQ ID NO: 1345535 - RNA, 17 nt, Human
gccuaaccugccgagag

SEQ ID NO: 1345536 - RNA, 15 nt, Human
gccuaaccgagauca

SEQ ID NO: 1345537 - RNA, 13 nt, Human
gccuauggagagc

SEQ ID NO: 1345538 - RNA, 14 nt, Human
gccuauggagagcc

SEQ ID NO: 1345539 - RNA, 22 nt, Human
gccuaugugcaugcagcaucua

SEQ ID NO: 1345540 - RNA, 18 nt, Human
gccuauguggucuaaggu

SEQ ID NO: 1345541 - RNA, 16 nt, Human
gccuauggagagcccu

SEQ ID NO: 1345542 - RNA, 17 nt, Human
gccuauggagagcccug

SEQ ID NO: 1345543 - RNA, 18 nt, Human
gccuauggagagcccugg

SEQ ID NO: 1345544 - RNA, 19 nt, Human
gccuauggagagcccuggg

SEQ ID NO: 1345545 - RNA, 20 nt, Human
gccuauggagagcccuggga

SEQ ID NO: 1345546 - RNA, 21 nt, Human
gccuauggagagcccugggac

SEQ ID NO: 1345547 - RNA, 22 nt, Human
gccuauggagagcccugggacc

SEQ ID NO: 1345548 - RNA, 21 nt, Human
gccuauuaucugucagcugca

SEQ ID NO: 1345549 - RNA, 20 nt, Human
gccucaagguuuuagguucu

SEQ ID NO: 1345550 - RNA, 21 nt, Human
gccucaagguuuuagguucua

SEQ ID NO: 1345551 - RNA, 22 nt, Human
gccucaagguuuuagguucuaa

SEQ ID NO: 1345552 - RNA, 17 nt, Human
gccgugcucgccccagc

SEQ ID NO: 1345553 - RNA, 21 nt, Human
gccgugcucgccccagcaggu

SEQ ID NO: 1345554 - RNA, 19 nt, Human
gccguggcuucccgcucag

SEQ ID NO: 1345555 - RNA, 14 nt, Human
gccgugccuucagc

SEQ ID NO: 1345556 - RNA, 15 nt, Human
gccgugccuucagcu

SEQ ID NO: 1345557 - RNA, 17 nt, Human
gccgugccuucagcucu

SEQ ID NO: 1345558 - RNA, 19 nt, Human
gccgugccuucagcucuac

SEQ ID NO: 1345559 - RNA, 20 nt, Human
gccguggggccgccgccucu

SEQ ID NO: 1345560 - RNA, 23 nt, Human
gccguggggccgccgccucuuuc

SEQ ID NO: 1345561 - RNA, 21 nt, Human
gccguggcuucccgcucagcc

SEQ ID NO: 1345562 - RNA, 22 nt, Human
gccguggcuucccgcucagccc

SEQ ID NO: 1345563 - RNA, 20 nt, Human
gccgugcucgccccagcagg

SEQ ID NO: 1345564 - RNA, 23 nt, Human
gccgugggcaauugucugaaaag

SEQ ID NO: 1345565 - RNA, 17 nt, Human
gccgugggccccacccu

SEQ ID NO: 1345566 - RNA, 18 nt, Human
gccgugggccccacccuc

SEQ ID NO: 1345567 - RNA, 23 nt, Human
gccgugggccccacccucgggga

SEQ ID NO: 1345568 - RNA, 20 nt, Human
gccguccccuagagucccag

SEQ ID NO: 1345569 - RNA, 23 nt, Human
gccguccuaaccucgggccugcu

SEQ ID NO: 1345570 - RNA, 24 nt, Human
gccggucgcccuuugcugcauggc

SEQ ID NO: 1345571 - RNA, 21 nt, Human
gccggucgcccuuugcugcau

SEQ ID NO: 1345572 - RNA, 13 nt, Human
gccguaauuuaac

SEQ ID NO: 1345573 - RNA, 14 nt, Human
gccguaauuuaacu

SEQ ID NO: 1345574 - RNA, 17 nt, Human
gccgucagugcugugcu

SEQ ID NO: 1345575 - RNA, 16 nt, Human
gcccugcuuugggcug

SEQ ID NO: 1345576 - RNA, 18 nt, Human
gcccugcuuugggcugcc

SEQ ID NO: 1345577 - RNA, 18 nt, Human
gcccugcagacccugccc

SEQ ID NO: 1345578 - RNA, 19 nt, Human
gcccugcagacccugcccu

SEQ ID NO: 1345579 - RNA, 20 nt, Human
gcccugcagacccugcccuu

SEQ ID NO: 1345580 - RNA, 15 nt, Human
gcccugcuuccugcu

SEQ ID NO: 1345581 - RNA, 16 nt, Human
gcccugcuuccugcuu

SEQ ID NO: 1345582 - RNA, 19 nt, Human
gcccugcuuccugcuugcc

SEQ ID NO: 1345583 - RNA, 19 nt, Human
gcccugcuuugggcugccc

SEQ ID NO: 1345584 - RNA, 22 nt, Human
gcccugcuuccugcuugccaag

SEQ ID NO: 1345585 - RNA, 18 nt, Human
gcccuugcuuaccucuca

SEQ ID NO: 1345586 - RNA, 20 nt, Human
gcccuuggggguccuccucc

SEQ ID NO: 1345587 - RNA, 22 nt, Human
gcccuuggggguccuccuccag

SEQ ID NO: 1345588 - RNA, 21 nt, Human
gcccuuggggguccuccucca

SEQ ID NO: 1345589 - RNA, 23 nt, Human
gcccuugugaaucaagggucagg

SEQ ID NO: 1345590 - RNA, 17 nt, Human
gcccuuguuuggggcag

SEQ ID NO: 1345591 - RNA, 18 nt, Human
gcccuuguuuggggcagg

SEQ ID NO: 1345592 - RNA, 19 nt, Human
gcccuuguuuggggcagga

SEQ ID NO: 1345593 - RNA, 20 nt, Human
gcccuuguuuggggcaggag

SEQ ID NO: 1345594 - RNA, 21 nt, Human
gcccuuguuuggggcaggagu

SEQ ID NO: 1345595 - RNA, 22 nt, Human
gcccuuguuuggggcaggagua

SEQ ID NO: 1345596 - RNA, 14 nt, Human
gccgaagcuaacag

SEQ ID NO: 1345597 - RNA, 15 nt, Human
gccgaagcuaacagg

SEQ ID NO: 1345598 - RNA, 19 nt, Human
gccgaagcuaacagggaag

SEQ ID NO: 1345599 - RNA, 20 nt, Human
gccgacccccucucccugca

SEQ ID NO: 1345600 - RNA, 23 nt, Human
gccgacccccucucccugcaugg

SEQ ID NO: 1345601 - RNA, 22 nt, Human
gccgggaccacccugagccggc

SEQ ID NO: 1345602 - RNA, 20 nt, Human
gccgggcgugguggugagug

SEQ ID NO: 1345603 - RNA, 16 nt, Human
gccggggaacuggcca

SEQ ID NO: 1345604 - RNA, 17 nt, Human
gccggggaacuggccaa

SEQ ID NO: 1345605 - RNA, 20 nt, Human
gccggggaacuggccaagcu

SEQ ID NO: 1345606 - RNA, 22 nt, Human
gccggggaacuggccaagcuga

SEQ ID NO: 1345607 - RNA, 18 nt, Human
gccgggaccacccugagc

SEQ ID NO: 1345608 - RNA, 20 nt, Human
gccgggaccacccugagccg

SEQ ID NO: 1345609 - RNA, 13 nt, Human
gccggcuccuugg

SEQ ID NO: 1345610 - RNA, 19 nt, Human
gccggcuucaugccagcua

SEQ ID NO: 1345611 - RNA, 24 nt, Human
gccgacccccucucccugcauggc

SEQ ID NO: 1345612 - RNA, 15 nt, Human
gccaugcagaaagca

SEQ ID NO: 1345613 - RNA, 18 nt, Human
gccaugaugccucugucu

SEQ ID NO: 1345614 - RNA, 20 nt, Human
gccaugcgcccccuccgccc

SEQ ID NO: 1345615 - RNA, 19 nt, Human
gccaugacaacuucuaauu

SEQ ID NO: 1345616 - RNA, 23 nt, Human
gccaugacaacuucuaauugcca

SEQ ID NO: 1345617 - RNA, 14 nt, Human
gccaugacccugcc

SEQ ID NO: 1345618 - RNA, 21 nt, Human
gccaugacccugccucuccca

SEQ ID NO: 1345619 - RNA, 16 nt, Human
gccaugacccugccuc

SEQ ID NO: 1345620 - RNA, 17 nt, Human
gccaugacccugccucu

SEQ ID NO: 1345621 - RNA, 18 nt, Human
gccaugacccugccucuc

SEQ ID NO: 1345622 - RNA, 20 nt, Human
gccaugaguuccagaaagua

SEQ ID NO: 1345623 - RNA, 13 nt, Human
gccaugaugccuc

SEQ ID NO: 1345624 - RNA, 15 nt, Human
gccaugaugccucug

SEQ ID NO: 1345625 - RNA, 19 nt, Human
gccaugaugccucugucuu

SEQ ID NO: 1345626 - RNA, 17 nt, Human
gccaugauggcaacaga

SEQ ID NO: 1345627 - RNA, 19 nt, Human
gccaugauggcaacagauc

SEQ ID NO: 1345628 - RNA, 21 nt, Human
gccaugauggcaacagaucug

SEQ ID NO: 1345629 - RNA, 23 nt, Human
gccaugauggcaacagaucugga

SEQ ID NO: 1345630 - RNA, 16 nt, Human
gccaucugcuccugga

SEQ ID NO: 1345631 - RNA, 21 nt, Human
gccaucugggcuccuccaggg

SEQ ID NO: 1345632 - RNA, 17 nt, Human
gccaggcugggucgccc

SEQ ID NO: 1345633 - RNA, 15 nt, Human
gccaggcugaccaca

SEQ ID NO: 1345634 - RNA, 16 nt, Human
gccaggcugaccacag

SEQ ID NO: 1345635 - RNA, 17 nt, Human
gccaggcugaccacagc

SEQ ID NO: 1345636 - RNA, 23 nt, Human
gccaggcugggucgcccuggacu

SEQ ID NO: 1345637 - RNA, 18 nt, Human
gccaggcugaccacagca

SEQ ID NO: 1345638 - RNA, 19 nt, Human
gccaggcugaccacagcac

SEQ ID NO: 1345639 - RNA, 20 nt, Human
gccaggcugaccacagcaca

SEQ ID NO: 1345640 - RNA, 17 nt, Human
gccaggcuggucuaaaa

SEQ ID NO: 1345641 - RNA, 15 nt, Human
gccaguaacaggcuc

SEQ ID NO: 1345642 - RNA, 19 nt, Human
gccaguaacgcgucuuccu

SEQ ID NO: 1345643 - RNA, 12 nt, Human
gccagucaggcc

SEQ ID NO: 1345644 - RNA, 22 nt, Human
gccaggcugaccacagcacagc

SEQ ID NO: 1345645 - RNA, 14 nt, Human
gccaucaccucaga

SEQ ID NO: 1345646 - RNA, 15 nt, Human
gccaucaccucagau

SEQ ID NO: 1345647 - RNA, 19 nt, Human
gccaucaccucagauggca

SEQ ID NO: 1345648 - RNA, 23 nt, Human
gccaucaccucagauggcagcuu

SEQ ID NO: 1345649 - RNA, 14 nt, Human
gccaucaccuuaga

SEQ ID NO: 1345650 - RNA, 20 nt, Human
gccaucaccuuagaccacca

SEQ ID NO: 1345651 - RNA, 22 nt, Human
gccaucaccuuagaccaccaag

SEQ ID NO: 1345652 - RNA, 23 nt, Human
gccaucaucuccugccuuccucc

SEQ ID NO: 1345653 - RNA, 19 nt, Human
gccaguaauccuguaggaa

SEQ ID NO: 1345654 - RNA, 14 nt, Human
gccaguaauccugu

SEQ ID NO: 1345655 - RNA, 12 nt, Human
gccaguauuuua

SEQ ID NO: 1345656 - RNA, 20 nt, Human
gccaguaacgcgucuuccug

SEQ ID NO: 1345657 - RNA, 21 nt, Human
gccaguaacgcgucuuccuga

SEQ ID NO: 1345658 - RNA, 22 nt, Human
gccaguaacgcgucuuccugag

SEQ ID NO: 1345659 - RNA, 16 nt, Human
gccaguaacaggcuca

SEQ ID NO: 1345660 - RNA, 14 nt, Human
gccaguauuuuaaa

SEQ ID NO: 1345661 - RNA, 13 nt, Human
gccaguccaggcu

SEQ ID NO: 1345662 - RNA, 14 nt, Human
gccaguccaggcug

SEQ ID NO: 1345663 - RNA, 20 nt, Human
gccaguccaggcugccgugg

SEQ ID NO: 1345664 - RNA, 21 nt, Human
gccaguccaggcugccguggg

SEQ ID NO: 1345665 - RNA, 24 nt, Human
gcccaaccugcucuccucuugcca

SEQ ID NO: 1345666 - RNA, 16 nt, Human
gccaugcuccucuucc

SEQ ID NO: 1345667 - RNA, 18 nt, Human
gccaugcuccucuucccc

SEQ ID NO: 1345668 - RNA, 20 nt, Human
gccaugcuccucuuccccag

SEQ ID NO: 1345669 - RNA, 21 nt, Human
gccaugcuccucuuccccaga

SEQ ID NO: 1345670 - RNA, 17 nt, Human
gccauggguagccuggg

SEQ ID NO: 1345671 - RNA, 19 nt, Human
gccauggguagccugggug

SEQ ID NO: 1345672 - RNA, 20 nt, Human
gccauggguagccugggugu

SEQ ID NO: 1345673 - RNA, 21 nt, Human
gcccaagaauagaugcugacu

SEQ ID NO: 1345674 - RNA, 22 nt, Human
gcccaagaauagaugcugacug

SEQ ID NO: 1345675 - RNA, 20 nt, Human
gcccacauagugaugguucc

SEQ ID NO: 1345676 - RNA, 16 nt, Human
gcccacagugucaggc

SEQ ID NO: 1345677 - RNA, 15 nt, Human
gcccacauuggaaga

SEQ ID NO: 1345678 - RNA, 21 nt, Human
gcccaccauuuggcaucccug

SEQ ID NO: 1345679 - RNA, 15 nt, Human
gcccaagccagaggc

SEQ ID NO: 1345680 - RNA, 16 nt, Human
gcccaagccagaggcu

SEQ ID NO: 1345681 - RNA, 17 nt, Human
gcccaagccagaggcug

SEQ ID NO: 1345682 - RNA, 18 nt, Human
gcccaagccagaggcugg

SEQ ID NO: 1345683 - RNA, 21 nt, Human
gcccaagccagaggcuggguu

SEQ ID NO: 1345684 - RNA, 23 nt, Human
gcccaagccagaggcuggguuca

SEQ ID NO: 1345685 - RNA, 15 nt, Human
gcccaaggcucccgg

SEQ ID NO: 1345686 - RNA, 14 nt, Human
gcccaaggcucccg

SEQ ID NO: 1345687 - RNA, 16 nt, Human
gcccaccccacccacu

SEQ ID NO: 1345688 - RNA, 21 nt, Human
gcccaccccacccacuucugc

SEQ ID NO: 1345689 - RNA, 22 nt, Human
gcccaccccacccacuucugca

SEQ ID NO: 1345690 - RNA, 20 nt, Human
gcccagaauaaguuauugca

SEQ ID NO: 1345691 - RNA, 23 nt, Human
gcccagaauaaguuauugcaguu

SEQ ID NO: 1345692 - RNA, 16 nt, Human
gcccagaauaaguuau

SEQ ID NO: 1345693 - RNA, 21 nt, Human
gccacuccagaccccuggcuu

SEQ ID NO: 1345694 - RNA, 20 nt, Human
gccacuccagaccccuggcu

SEQ ID NO: 1345695 - RNA, 21 nt, Human
gccaacacgcaccugccucag

SEQ ID NO: 1345696 - RNA, 23 nt, Human
gccaacacgcaccugccucagga

SEQ ID NO: 1345697 - RNA, 21 nt, Human
gccaaauuuaaaacuguugga

SEQ ID NO: 1345698 - RNA, 17 nt, Human
gccaacacgcaccugcc

SEQ ID NO: 1345699 - RNA, 20 nt, Human
gccaacacgcaccugccuca

SEQ ID NO: 1345700 - RNA, 22 nt, Human
gccacuccagaccccuggcuuu

SEQ ID NO: 1345701 - RNA, 21 nt, Human
gccacuccgagaggugggcca

SEQ ID NO: 1345702 - RNA, 13 nt, Human
gccacuccucuga

SEQ ID NO: 1345703 - RNA, 14 nt, Human
gccacuccucugac

SEQ ID NO: 1345704 - RNA, 15 nt, Human
gccacuccucugacu

SEQ ID NO: 1345705 - RNA, 17 nt, Human
gccacuccucugacuca

SEQ ID NO: 1345706 - RNA, 21 nt, Human
gccacuccucugacucagggc

SEQ ID NO: 1345707 - RNA, 12 nt, Human
gccagaggcugg

SEQ ID NO: 1345708 - RNA, 13 nt, Human
gccagaggcuggg

SEQ ID NO: 1345709 - RNA, 15 nt, Human
gccagauccagccug

SEQ ID NO: 1345710 - RNA, 16 nt, Human
gccagauccagccugg

SEQ ID NO: 1345711 - RNA, 17 nt, Human
gccagauccagccuggg

SEQ ID NO: 1345712 - RNA, 20 nt, Human
gccagauccagccugggguc

SEQ ID NO: 1345713 - RNA, 21 nt, Human
gccagaugcacaucccuggaa

SEQ ID NO: 1345714 - RNA, 22 nt, Human
gccagaugcacaucccuggaag

SEQ ID NO: 1345715 - RNA, 13 nt, Human
gccagagauccaa

SEQ ID NO: 1345716 - RNA, 16 nt, Human
gccagagauccaaaag

SEQ ID NO: 1345717 - RNA, 20 nt, Human
gccagagauccaaaagaagc

SEQ ID NO: 1345718 - RNA, 21 nt, Human
gccagagauccaaaagaagcc

SEQ ID NO: 1345719 - RNA, 22 nt, Human
gccagagauccaaaagaagccc

SEQ ID NO: 1345720 - RNA, 14 nt, Human
gccagaggccccca

SEQ ID NO: 1345721 - RNA, 15 nt, Human
gccagaggcccccag

SEQ ID NO: 1345722 - RNA, 16 nt, Human
gccagaggcccccagc

SEQ ID NO: 1345723 - RNA, 18 nt, Human
gccagaggcccccagccc

SEQ ID NO: 1345724 - RNA, 19 nt, Human
gccagaggcccccagccca

SEQ ID NO: 1345725 - RNA, 20 nt, Human
gccagaggcccccagcccag

SEQ ID NO: 1345726 - RNA, 23 nt, Human
gccagaggcccccagcccagggc

SEQ ID NO: 1345727 - RNA, 24 nt, Human
gccagaggcccccagcccagggcu

SEQ ID NO: 1345728 - RNA, 22 nt, Human
gccagaggcucguugacuggcu

SEQ ID NO: 1345729 - RNA, 21 nt, Human
gccagccgagcaggaggccua

SEQ ID NO: 1345730 - RNA, 24 nt, Human
gccagccgagcaggaggccuagga

SEQ ID NO: 1345731 - RNA, 19 nt, Human
gccagccgcgcaucagacu

SEQ ID NO: 1345732 - RNA, 20 nt, Human
gccagccgcgcaucagacug

SEQ ID NO: 1345733 - RNA, 23 nt, Human
gccagccggggcgaguggcacgu

SEQ ID NO: 1345734 - RNA, 12 nt, Human
gccagcugcccc

SEQ ID NO: 1345735 - RNA, 19 nt, Human
gccagcugcccccagagcc

SEQ ID NO: 1345736 - RNA, 14 nt, Human
gccagccucgccca

SEQ ID NO: 1345737 - RNA, 12 nt, Human
gccagccuggcc

SEQ ID NO: 1345738 - RNA, 13 nt, Human
gccagccuggccu

SEQ ID NO: 1345739 - RNA, 14 nt, Human
gccagccuggccuc

SEQ ID NO: 1345740 - RNA, 15 nt, Human
gccagccuggccucc

SEQ ID NO: 1345741 - RNA, 16 nt, Human
gccagccuggccuccu

SEQ ID NO: 1345742 - RNA, 17 nt, Human
gccagccuggccuccug

SEQ ID NO: 1345743 - RNA, 19 nt, Human
gccagccuggccuccugcc

SEQ ID NO: 1345744 - RNA, 20 nt, Human
gccagccuggccuccugccu

SEQ ID NO: 1345745 - RNA, 23 nt, Human
gccagccuggccuccugccucua

SEQ ID NO: 1345746 - RNA, 22 nt, Human
gccagccuggccuccugccucu

SEQ ID NO: 1345747 - RNA, 23 nt, Human
gccagcucuguaucaggacccag

SEQ ID NO: 1345748 - RNA, 12 nt, Human
gccagcucuguu

SEQ ID NO: 1345749 - RNA, 13 nt, Human
gccagcucuguuc

SEQ ID NO: 1345750 - RNA, 18 nt, Human
gccagcucuguucuuccu

SEQ ID NO: 1345751 - RNA, 21 nt, Human
gccagcucuguucuuccucag

SEQ ID NO: 1345752 - RNA, 22 nt, Human
gccagcucuguucuuccucagc

SEQ ID NO: 1345753 - RNA, 23 nt, Human
gccagcucuguucuuccucagcc

SEQ ID NO: 1345754 - RNA, 14 nt, Human
gccagcugcacuga

SEQ ID NO: 1345755 - RNA, 20 nt, Human
gccagcugcacugaugcugc

SEQ ID NO: 1345756 - RNA, 22 nt, Human
gccaggaagcuuuggugagaac

SEQ ID NO: 1345757 - RNA, 17 nt, Human
gccaggaauuucccagg

SEQ ID NO: 1345758 - RNA, 18 nt, Human
gccaggaauuucccagga

SEQ ID NO: 1345759 - RNA, 19 nt, Human
gccaggaauuucccaggac

SEQ ID NO: 1345760 - RNA, 20 nt, Human
gccaggaauuucccaggacc

SEQ ID NO: 1345761 - RNA, 21 nt, Human
gccaggaauuucccaggaccc

SEQ ID NO: 1345762 - RNA, 22 nt, Human
gccaggaauuucccaggacccu

SEQ ID NO: 1345763 - RNA, 23 nt, Human
gccaggaauuucccaggacccug

SEQ ID NO: 1345764 - RNA, 22 nt, Human
gccaggaccagucaaccugggc

SEQ ID NO: 1345765 - RNA, 23 nt, Human
gccaggaccagucccagagcagg

SEQ ID NO: 1345766 - RNA, 13 nt, Human
gccaggacucugc

SEQ ID NO: 1345767 - RNA, 14 nt, Human
gccaggacucugca

SEQ ID NO: 1345768 - RNA, 15 nt, Human
gccaggacucugcag

SEQ ID NO: 1345769 - RNA, 16 nt, Human
gccaggacucugcagc

SEQ ID NO: 1345770 - RNA, 17 nt, Human
gccaggacucugcagcc

SEQ ID NO: 1345771 - RNA, 18 nt, Human
gccaggacucugcagccu

SEQ ID NO: 1345772 - RNA, 19 nt, Human
gccaggacucugcagccuc

SEQ ID NO: 1345773 - RNA, 20 nt, Human
gccaggacucugcagccuca

SEQ ID NO: 1345774 - RNA, 21 nt, Human
gccaggacucugcagccucag

SEQ ID NO: 1345775 - RNA, 12 nt, Human
gccaggagaagc

SEQ ID NO: 1345776 - RNA, 13 nt, Human
gccaggagaagcu

SEQ ID NO: 1345777 - RNA, 14 nt, Human
gccaggagaagcuc

SEQ ID NO: 1345778 - RNA, 15 nt, Human
gccaggagaagcuca

SEQ ID NO: 1345779 - RNA, 17 nt, Human
gccaggagaagcucagc

SEQ ID NO: 1345780 - RNA, 19 nt, Human
gccaggagaagcucagcug

SEQ ID NO: 1345781 - RNA, 22 nt, Human
gccaggagaagcucagcugcau

SEQ ID NO: 1345782 - RNA, 18 nt, Human
gccaggagcacggcucug

SEQ ID NO: 1345783 - RNA, 19 nt, Human
gccaggagcacggcucugu

SEQ ID NO: 1345784 - RNA, 21 nt, Human
gccaggagcacggcucugucc

SEQ ID NO: 1345785 - RNA, 15 nt, Human
gccaggcuaauuuuu

SEQ ID NO: 1345786 - RNA, 13 nt, Human
gccaggcucucuu

SEQ ID NO: 1345787 - RNA, 20 nt, Human
gccccuggucccucugcagu

SEQ ID NO: 1345788 - RNA, 21 nt, Human
gccccugggguggccaccagu

SEQ ID NO: 1345789 - RNA, 14 nt, Human
gccccuucugcuca

SEQ ID NO: 1345790 - RNA, 15 nt, Human
gccccuucugcucag

SEQ ID NO: 1345791 - RNA, 17 nt, Human
gccccuucugcucagcu

SEQ ID NO: 1345792 - RNA, 18 nt, Human
gccccuucugcucagcuc

SEQ ID NO: 1345793 - RNA, 15 nt, Human
gccccugggguggcc

SEQ ID NO: 1345794 - RNA, 20 nt, Human
gccccucuggucgcuccugc

SEQ ID NO: 1345795 - RNA, 22 nt, Human
gccccucuggucgcuccugccc

SEQ ID NO: 1345796 - RNA, 17 nt, Human
gccccucuuggagaagu

SEQ ID NO: 1345797 - RNA, 22 nt, Human
gccccucuuggagaagucucag

SEQ ID NO: 1345798 - RNA, 23 nt, Human
gccccucuuggagaagucucagc

SEQ ID NO: 1345799 - RNA, 16 nt, Human
gccccugaacaagaau

SEQ ID NO: 1345800 - RNA, 12 nt, Human
gcccgacagccu

SEQ ID NO: 1345801 - RNA, 14 nt, Human
gcccgacagccugg

SEQ ID NO: 1345802 - RNA, 15 nt, Human
gcccgacagccuggc

SEQ ID NO: 1345803 - RNA, 19 nt, Human
gcccgaggaggugucucag

SEQ ID NO: 1345804 - RNA, 20 nt, Human
gcccgaggaggugucucagg

SEQ ID NO: 1345805 - RNA, 21 nt, Human
gcccgaggaggugucucaggc

SEQ ID NO: 1345806 - RNA, 22 nt, Human
gcccgaggaggugucucaggcu

SEQ ID NO: 1345807 - RNA, 23 nt, Human
gcccgaggaggugucucaggcug

SEQ ID NO: 1345808 - RNA, 13 nt, Human
gcccgcacaccug

SEQ ID NO: 1345809 - RNA, 19 nt, Human
gccccuucugcucagcucu

SEQ ID NO: 1345810 - RNA, 20 nt, Human
gccccuucugcucagcucug

SEQ ID NO: 1345811 - RNA, 23 nt, Human
gccccuucugcucagcucugggc

SEQ ID NO: 1345812 - RNA, 19 nt, Human
gccccuugacaacuggcag

SEQ ID NO: 1345813 - RNA, 15 nt, Human
gccccuuggacacgc

SEQ ID NO: 1345814 - RNA, 12 nt, Human
gccccuuuauaa

SEQ ID NO: 1345815 - RNA, 13 nt, Human
gccccuuuauaaa

SEQ ID NO: 1345816 - RNA, 21 nt, Human
gccccuuucccuuguagcucc

SEQ ID NO: 1345817 - RNA, 23 nt, Human
gccccuuucccuuguagcuccuc

SEQ ID NO: 1345818 - RNA, 16 nt, Human
gccccuuugcugaccc

SEQ ID NO: 1345819 - RNA, 17 nt, Human
gccccuuugcugacccu

SEQ ID NO: 1345820 - RNA, 20 nt, Human
gccccuuugcugacccuccc

SEQ ID NO: 1345821 - RNA, 18 nt, Human
gccccuuugcugacccuc

SEQ ID NO: 1345822 - RNA, 16 nt, Human
gccccucccccugcca

SEQ ID NO: 1345823 - RNA, 17 nt, Human
gccccuccccuccaaaa

SEQ ID NO: 1345824 - RNA, 16 nt, Human
gccccuccccuccaaa

SEQ ID NO: 1345825 - RNA, 16 nt, Human
gccccucccucccaga

SEQ ID NO: 1345826 - RNA, 18 nt, Human
gccccucccucccagagc

SEQ ID NO: 1345827 - RNA, 20 nt, Human
gccccucccucccagagcac

SEQ ID NO: 1345828 - RNA, 14 nt, Human
gccccucuggucgc

SEQ ID NO: 1345829 - RNA, 18 nt, Human
gccccucuggucgcuccu

SEQ ID NO: 1345830 - RNA, 19 nt, Human
gccccucuggucgcuccug

SEQ ID NO: 1345831 - RNA, 17 nt, Human
gcccccugucucucagg

SEQ ID NO: 1345832 - RNA, 18 nt, Human
gccccucacccugccuua

SEQ ID NO: 1345833 - RNA, 18 nt, Human
gcccucccuguuccccag

SEQ ID NO: 1345834 - RNA, 20 nt, Human
gcccucccuguuccccagag

SEQ ID NO: 1345835 - RNA, 22 nt, Human
gcccucccuguuccccagagaa

SEQ ID NO: 1345836 - RNA, 21 nt, Human
gcccucccuguuccccagaga

SEQ ID NO: 1345837 - RNA, 12 nt, Human
gcccugagccag

SEQ ID NO: 1345838 - RNA, 19 nt, Human
gcccugagccagggucucc

SEQ ID NO: 1345839 - RNA, 21 nt, Human
gcccugagccagggucuccag

SEQ ID NO: 1345840 - RNA, 22 nt, Human
gcccugagccagggucuccaga

SEQ ID NO: 1345841 - RNA, 23 nt, Human
gcccugagccagggucuccagaa

SEQ ID NO: 1345842 - RNA, 17 nt, Human
gcccugcagacccugcc

SEQ ID NO: 1345843 - RNA, 13 nt, Human
gcccuccacaccu

SEQ ID NO: 1345844 - RNA, 14 nt, Human
gcccuccacaccug

SEQ ID NO: 1345845 - RNA, 15 nt, Human
gcccuccacaccugc

SEQ ID NO: 1345846 - RNA, 16 nt, Human
gcccuccacaccugcg

SEQ ID NO: 1345847 - RNA, 19 nt, Human
gcccuccacaccugcggcc

SEQ ID NO: 1345848 - RNA, 18 nt, Human
gcccuccacaccugcggc

SEQ ID NO: 1345849 - RNA, 20 nt, Human
gcccuccaucuaaacugccc

SEQ ID NO: 1345850 - RNA, 21 nt, Human
gcccuccaucuaaacugcccc

SEQ ID NO: 1345851 - RNA, 14 nt, Human
gcccuccaggcuuu

SEQ ID NO: 1345852 - RNA, 19 nt, Human
gcccucauggccccucuga

SEQ ID NO: 1345853 - RNA, 22 nt, Human
gcccucauggccccucugaccu

SEQ ID NO: 1345854 - RNA, 15 nt, Human
gcccgggagcucagg

SEQ ID NO: 1345855 - RNA, 15 nt, Human
gcccggcuccugguc

SEQ ID NO: 1345856 - RNA, 17 nt, Human
gcccgggagcucaggaa

SEQ ID NO: 1345857 - RNA, 19 nt, Human
gcccgggagcucaggaacc

SEQ ID NO: 1345858 - RNA, 20 nt, Human
gcccaggcuggagugcaaug

SEQ ID NO: 1345859 - RNA, 13 nt, Human
gcccagagcccag

SEQ ID NO: 1345860 - RNA, 12 nt, Human
gcccaggccuca

SEQ ID NO: 1345861 - RNA, 14 nt, Human
gcccaggccucacc

SEQ ID NO: 1345862 - RNA, 19 nt, Human
gcccaggcuggagugcagu

SEQ ID NO: 1345863 - RNA, 20 nt, Human
gcccaggcuggagugcagug

SEQ ID NO: 1345864 - RNA, 12 nt, Human
gcccagggaggc

SEQ ID NO: 1345865 - RNA, 13 nt, Human
gcccagggaggcc

SEQ ID NO: 1345866 - RNA, 21 nt, Human
gcccagggaggccgaagcuaa

SEQ ID NO: 1345867 - RNA, 14 nt, Human
gcccagggcccaga

SEQ ID NO: 1345868 - RNA, 12 nt, Human
gcccagggcucc

SEQ ID NO: 1345869 - RNA, 14 nt, Human
gcccagggcuccug

SEQ ID NO: 1345870 - RNA, 15 nt, Human
gcccagggcuccugc

SEQ ID NO: 1345871 - RNA, 16 nt, Human
gcccagggcuccugca

SEQ ID NO: 1345872 - RNA, 18 nt, Human
gcccagggcuccugcacu

SEQ ID NO: 1345873 - RNA, 15 nt, Human
gcccagggcugggag

SEQ ID NO: 1345874 - RNA, 14 nt, Human
gccccacuuguccu

SEQ ID NO: 1345875 - RNA, 16 nt, Human
gccccacuuguccuua

SEQ ID NO: 1345876 - RNA, 18 nt, Human
gccccacuuguccuuagc

SEQ ID NO: 1345877 - RNA, 17 nt, Human
gccccacuuguccuuag

SEQ ID NO: 1345878 - RNA, 22 nt, Human
gccccacccugggcccugggcu

SEQ ID NO: 1345879 - RNA, 23 nt, Human
gccccacccugggcccugggcug

SEQ ID NO: 1345880 - RNA, 24 nt, Human
gccccacccugggcccugggcugg

SEQ ID NO: 1345881 - RNA, 12 nt, Human
gccccacuccuc

SEQ ID NO: 1345882 - RNA, 20 nt, Human
gccccacuccucugcugacc

SEQ ID NO: 1345883 - RNA, 13 nt, Human
gccccacuccucu

SEQ ID NO: 1345884 - RNA, 17 nt, Human
gcccagggcugggagga

SEQ ID NO: 1345885 - RNA, 20 nt, Human
gcccagggcugggaggaagg

SEQ ID NO: 1345886 - RNA, 21 nt, Human
gcccagggcugggaggaagga

SEQ ID NO: 1345887 - RNA, 20 nt, Human
gcccauaugcuaccaccagc

SEQ ID NO: 1345888 - RNA, 21 nt, Human
gcccauaugcuaccaccagcu

SEQ ID NO: 1345889 - RNA, 23 nt, Human
gcccauaugcuaccaccagcugu

SEQ ID NO: 1345890 - RNA, 22 nt, Human
gcccauaugcuaccaccagcug

SEQ ID NO: 1345891 - RNA, 21 nt, Human
gcccaucaggguaggcuggag

SEQ ID NO: 1345892 - RNA, 12 nt, Human
gcccaucagggu

SEQ ID NO: 1345893 - RNA, 15 nt, Human
gccccacccugggcc

SEQ ID NO: 1345894 - RNA, 16 nt, Human
gccccacccugggccc

SEQ ID NO: 1345895 - RNA, 19 nt, Human
gccccacccugggcccugg

SEQ ID NO: 1345896 - RNA, 20 nt, Human
gccccacccugggcccuggg

SEQ ID NO: 1345897 - RNA, 14 nt, Human
gccccaucagugcu

SEQ ID NO: 1345898 - RNA, 19 nt, Human
gccccaguuguauuuauuu

SEQ ID NO: 1345899 - RNA, 21 nt, Human
gccccauaauuuuuuuuuucc

SEQ ID NO: 1345900 - RNA, 22 nt, Human
gccccaguuccuguggcucccu

SEQ ID NO: 1345901 - RNA, 14 nt, Human
gccccagugacagc

SEQ ID NO: 1345902 - RNA, 18 nt, Human
gccccaggggaacacugg

SEQ ID NO: 1345903 - RNA, 15 nt, Human
gccccaggccugaaa

SEQ ID NO: 1345904 - RNA, 19 nt, Human
gccccaggcucguggacug

SEQ ID NO: 1345905 - RNA, 19 nt, Human
gccccaggggaacacuggg

SEQ ID NO: 1345906 - RNA, 13 nt, Human
gccccagcacagc

SEQ ID NO: 1345907 - RNA, 20 nt, Human
gccccagcacagcuugaccu

SEQ ID NO: 1345908 - RNA, 12 nt, Human
gccccaggccug

SEQ ID NO: 1345909 - RNA, 12 nt, Human
gccccauuccug

SEQ ID NO: 1345910 - RNA, 15 nt, Human
gccccauuccuggga

SEQ ID NO: 1345911 - RNA, 21 nt, Human
gcccccaaccauuuccucaga

SEQ ID NO: 1345912 - RNA, 22 nt, Human
gcccccaaccauuuccucagac

SEQ ID NO: 1345913 - RNA, 14 nt, Human
gcccccaccccauu

SEQ ID NO: 1345914 - RNA, 11 nt, Human
gcccccacccu

SEQ ID NO: 1345915 - RNA, 12 nt, Human
gcccccacccug

SEQ ID NO: 1345916 - RNA, 14 nt, Human
gcccccugcccccc

SEQ ID NO: 1345917 - RNA, 18 nt, Human
gcccccugccccccagcc

SEQ ID NO: 1345918 - RNA, 14 nt, Human
gcccccacccuguu

SEQ ID NO: 1345919 - RNA, 15 nt, Human
gcccccugcugccau

SEQ ID NO: 1345920 - RNA, 14 nt, Human
gcccccugucucuc

SEQ ID NO: 1345921 - RNA, 16 nt, Human
gcccccugucucucag

SEQ ID NO: 1345922 - RNA, 19 nt, Human
gcauucaaauguauuacag

SEQ ID NO: 1345923 - RNA, 21 nt, Human
gcauuauuugagaagcugcuc

SEQ ID NO: 1345924 - RNA, 15 nt, Human
gcauuauuugagaag

SEQ ID NO: 1345925 - RNA, 18 nt, Human
gcauucagaagaaaaaga

SEQ ID NO: 1345926 - RNA, 16 nt, Human
gcauucagaagaaaaa

SEQ ID NO: 1345927 - RNA, 20 nt, Human
gcauucugccucucuaggac

SEQ ID NO: 1345928 - RNA, 16 nt, Human
gcauucuggaccucug

SEQ ID NO: 1345929 - RNA, 19 nt, Human
gcauucuggaccucugggu

SEQ ID NO: 1345930 - RNA, 13 nt, Human
gcauuauuuucca

SEQ ID NO: 1345931 - RNA, 14 nt, Human
gcauucuucucugu

SEQ ID NO: 1345932 - RNA, 13 nt, Human
gcauucuucucug

SEQ ID NO: 1345933 - RNA, 11 nt, Human
gcauuauuuga

SEQ ID NO: 1345934 - RNA, 23 nt, Human
gcauuauuggaauauaauuguuu

SEQ ID NO: 1345935 - RNA, 22 nt, Human
gcauuauuggaauauaauuguu

SEQ ID NO: 1345936 - RNA, 16 nt, Human
gcauuuguguugaaga

SEQ ID NO: 1345937 - RNA, 18 nt, Human
gcauuuguugguuuauca

SEQ ID NO: 1345938 - RNA, 18 nt, Human
gcauuuguuuauguaauu

SEQ ID NO: 1345939 - RNA, 19 nt, Human
gcauuuguuuauguaauuu

SEQ ID NO: 1345940 - RNA, 20 nt, Human
gcauuuguuuauguaauuuc

SEQ ID NO: 1345941 - RNA, 16 nt, Human
gcauugaaaagagcug

SEQ ID NO: 1345942 - RNA, 12 nt, Human
gcauugaacaca

SEQ ID NO: 1345943 - RNA, 16 nt, Human
gcauugaacacaaacu

SEQ ID NO: 1345944 - RNA, 18 nt, Human
gcauugaacacaaacugu

SEQ ID NO: 1345945 - RNA, 19 nt, Human
gcauugaacacaaacugua

SEQ ID NO: 1345946 - RNA, 22 nt, Human
gcauuuguuucuuucucugagg

SEQ ID NO: 1345947 - RNA, 16 nt, Human
gccaaaaaaaaauaca

SEQ ID NO: 1345948 - RNA, 17 nt, Human
gccaaaaagugaaauaa

SEQ ID NO: 1345949 - RNA, 13 nt, Human
gccaaaaauagcu

SEQ ID NO: 1345950 - RNA, 22 nt, Human
gccaaaaagugaaauaaugugu

SEQ ID NO: 1345951 - RNA, 17 nt, Human
gccaaaccucaccaacu

SEQ ID NO: 1345952 - RNA, 16 nt, Human
gcaucugaaaauugau

SEQ ID NO: 1345953 - RNA, 13 nt, Human
gcaucuguuuauu

SEQ ID NO: 1345954 - RNA, 23 nt, Human
gcaucacuuaacggaccaaagca

SEQ ID NO: 1345955 - RNA, 13 nt, Human
gcaucagaaagag

SEQ ID NO: 1345956 - RNA, 17 nt, Human
gcaucagaaagaggcag

SEQ ID NO: 1345957 - RNA, 16 nt, Human
gcaucagaaagggagg

SEQ ID NO: 1345958 - RNA, 18 nt, Human
gcaucagaaagggagggc

SEQ ID NO: 1345959 - RNA, 22 nt, Human
gcaucagacugugaaccccacg

SEQ ID NO: 1345960 - RNA, 19 nt, Human
gcaucagaaagggagggcu

SEQ ID NO: 1345961 - RNA, 21 nt, Human
gcaucagaaagggagggcucu

SEQ ID NO: 1345962 - RNA, 23 nt, Human
gcaucagaaagggagggcucuga

SEQ ID NO: 1345963 - RNA, 22 nt, Human
gcaucagaaagggagggcucug

SEQ ID NO: 1345964 - RNA, 12 nt, Human
gcaucuuuugua

SEQ ID NO: 1345965 - RNA, 16 nt, Human
gcaucuuuuguauuaa

SEQ ID NO: 1345966 - RNA, 23 nt, Human
gcaucuuuuguauuaagaaagga

SEQ ID NO: 1345967 - RNA, 19 nt, Human
gcaucuuuuguauuaagaa

SEQ ID NO: 1345968 - RNA, 22 nt, Human
gcaucuuggggggguggccgcu

SEQ ID NO: 1345969 - RNA, 13 nt, Human
gcauuauauuuau

SEQ ID NO: 1345970 - RNA, 20 nt, Human
gcauggcaaggacugcaggg

SEQ ID NO: 1345971 - RNA, 15 nt, Human
gcauggauuucuuug

SEQ ID NO: 1345972 - RNA, 16 nt, Human
gcauggauuucuuuga

SEQ ID NO: 1345973 - RNA, 18 nt, Human
gcauggauuucuuugaaa

SEQ ID NO: 1345974 - RNA, 20 nt, Human
gcauggauauaguuuuacuu

SEQ ID NO: 1345975 - RNA, 17 nt, Human
gcaugagaaauacaaaa

SEQ ID NO: 1345976 - RNA, 14 nt, Human
gcaugagaaauaca

SEQ ID NO: 1345977 - RNA, 17 nt, Human
gcaugagggguuccucc

SEQ ID NO: 1345978 - RNA, 19 nt, Human
gcaugagggguuccucccc

SEQ ID NO: 1345979 - RNA, 20 nt, Human
gcaugagggguuccuccccu

SEQ ID NO: 1345980 - RNA, 22 nt, Human
gcaugagggguuccuccccucc

SEQ ID NO: 1345981 - RNA, 22 nt, Human
gcaguggcaucaucucagcuca

SEQ ID NO: 1345982 - RNA, 12 nt, Human
gcaguggccuua

SEQ ID NO: 1345983 - RNA, 23 nt, Human
gcaguggauggccgugaaugggu

SEQ ID NO: 1345984 - RNA, 15 nt, Human
gcaguggcaggcaga

SEQ ID NO: 1345985 - RNA, 22 nt, Human
gcaguggcaggcagaggcccag

SEQ ID NO: 1345986 - RNA, 13 nt, Human
gcagugcuuuugg

SEQ ID NO: 1345987 - RNA, 22 nt, Human
gcagguaugaucggcaggacac

SEQ ID NO: 1345988 - RNA, 22 nt, Human
gcagggugcaguaucaugcccu

SEQ ID NO: 1345989 - RNA, 22 nt, Human
gcagggugggcuuguggggccu

SEQ ID NO: 1345990 - RNA, 13 nt, Human
gcagggcagucau

SEQ ID NO: 1345991 - RNA, 21 nt, Human
gcagggccccaggcauugcca

SEQ ID NO: 1345992 - RNA, 13 nt, Human
gcagggccgggga

SEQ ID NO: 1345993 - RNA, 14 nt, Human
gcagggccggggaa

SEQ ID NO: 1345994 - RNA, 20 nt, Human
gcagggccggggaacuggcc

SEQ ID NO: 1345995 - RNA, 23 nt, Human
gcagggccggggaacuggccaag

SEQ ID NO: 1345996 - RNA, 22 nt, Human
gcagggccggggaacuggccaa

SEQ ID NO: 1345997 - RNA, 16 nt, Human
gcaggggccuggagau

SEQ ID NO: 1345998 - RNA, 20 nt, Human
gcaggggccuggagauccuc

SEQ ID NO: 1345999 - RNA, 19 nt, Human
gcaggggccgggggcaguc

SEQ ID NO: 1346000 - RNA, 20 nt, Human
gcaggggccgggggcagucu

SEQ ID NO: 1346001 - RNA, 15 nt, Human
gcaggggccuccaug

SEQ ID NO: 1346002 - RNA, 13 nt, Human
gcaggggccugga

SEQ ID NO: 1346003 - RNA, 14 nt, Human
gcaggggccuggag

SEQ ID NO: 1346004 - RNA, 17 nt, Human
gcauagguuuaauaauu

SEQ ID NO: 1346005 - RNA, 13 nt, Human
gcauacuuuuuaa

SEQ ID NO: 1346006 - RNA, 20 nt, Human
gcauaguaccaaucauuuua

SEQ ID NO: 1346007 - RNA, 12 nt, Human
gcauauaaaauu

SEQ ID NO: 1346008 - RNA, 13 nt, Human
gcauaucauaaug

SEQ ID NO: 1346009 - RNA, 15 nt, Human
gcauauuuuuuuucu

SEQ ID NO: 1346010 - RNA, 19 nt, Human
gcauaugaguaagggcacu

SEQ ID NO: 1346011 - RNA, 23 nt, Human
gcauaugaguaagggcacugacg

SEQ ID NO: 1346012 - RNA, 22 nt, Human
gcaguggcgcgaucucagcuca

SEQ ID NO: 1346013 - RNA, 18 nt, Human
gcaguggcgcgaucucag

SEQ ID NO: 1346014 - RNA, 20 nt, Human
gcaguguagggaguuguggg

SEQ ID NO: 1346015 - RNA, 18 nt, Human
gcagugucuguguuuuga

SEQ ID NO: 1346016 - RNA, 15 nt, Human
gcagugugaggccag

SEQ ID NO: 1346017 - RNA, 22 nt, Human
gcaguggcgugaucucagcuca

SEQ ID NO: 1346018 - RNA, 13 nt, Human
gcauagaaguaaa

SEQ ID NO: 1346019 - RNA, 17 nt, Human
gcaguucugaagaagau

SEQ ID NO: 1346020 - RNA, 15 nt, Human
gcaguucugaagaag

SEQ ID NO: 1346021 - RNA, 12 nt, Human
gcaguuauuugc

SEQ ID NO: 1346022 - RNA, 17 nt, Human
gcagauucagaaaugag

SEQ ID NO: 1346023 - RNA, 21 nt, Human
gcagauucagaaaugaggcca

SEQ ID NO: 1346024 - RNA, 19 nt, Human
gcagauucagaaaugaggc

SEQ ID NO: 1346025 - RNA, 21 nt, Human
gcagauucucccuugcucugc

SEQ ID NO: 1346026 - RNA, 19 nt, Human
gcagauucucccuugcucu

SEQ ID NO: 1346027 - RNA, 21 nt, Human
gcagauuuucagcaaacucuu

SEQ ID NO: 1346028 - RNA, 14 nt, Human
gcagauccaggacu

SEQ ID NO: 1346029 - RNA, 17 nt, Human
gcagacauuuuaaaaaa

SEQ ID NO: 1346030 - RNA, 19 nt, Human
gcagacaugugcacuugaa

SEQ ID NO: 1346031 - RNA, 13 nt, Human
gcagaccaccccg

SEQ ID NO: 1346032 - RNA, 17 nt, Human
gcagaccaccccgccug

SEQ ID NO: 1346033 - RNA, 21 nt, Human
gcagaccaccccgccugcccu

SEQ ID NO: 1346034 - RNA, 20 nt, Human
gcagaccacgcccguccugc

SEQ ID NO: 1346035 - RNA, 23 nt, Human
gcagaccacgcccguccugccug

SEQ ID NO: 1346036 - RNA, 17 nt, Human
gcagaccacauugcuuu

SEQ ID NO: 1346037 - RNA, 14 nt, Human
gcagacccugcccu

SEQ ID NO: 1346038 - RNA, 15 nt, Human
gcagacccugcccuu

SEQ ID NO: 1346039 - RNA, 18 nt, Human
gcagauaaacaguaguga

SEQ ID NO: 1346040 - RNA, 16 nt, Human
gcagcaauuuaaaugu

SEQ ID NO: 1346041 - RNA, 15 nt, Human
gcagcaauuuaaaug

SEQ ID NO: 1346042 - RNA, 12 nt, Human
gcagcaauuuaa

SEQ ID NO: 1346043 - RNA, 17 nt, Human
gcagcaauuuaaauguu

SEQ ID NO: 1346044 - RNA, 18 nt, Human
gcagcacaaguguaauga

SEQ ID NO: 1346045 - RNA, 19 nt, Human
gcagcccccacccccaagg

SEQ ID NO: 1346046 - RNA, 14 nt, Human
gcagcccccagcuc

SEQ ID NO: 1346047 - RNA, 19 nt, Human
gcagcccccagcucccacc

SEQ ID NO: 1346048 - RNA, 20 nt, Human
gcagccccgugggguuccuc

SEQ ID NO: 1346049 - RNA, 23 nt, Human
gcagcccccagcucccaccuccc

SEQ ID NO: 1346050 - RNA, 21 nt, Human
gcagcccugcugcugccugcc

SEQ ID NO: 1346051 - RNA, 20 nt, Human
gcagcccugcugcugccugc

SEQ ID NO: 1346052 - RNA, 13 nt, Human
gcagcccugcuuu

SEQ ID NO: 1346053 - RNA, 14 nt, Human
gcagcccugcuuug

SEQ ID NO: 1346054 - RNA, 10 nt, Human
gcagccuggg

SEQ ID NO: 1346055 - RNA, 14 nt, Human
gcagccuggggcug

SEQ ID NO: 1346056 - RNA, 17 nt, Human
gcagccuggggcuggcc

SEQ ID NO: 1346057 - RNA, 12 nt, Human
gcagccuuguga

SEQ ID NO: 1346058 - RNA, 16 nt, Human
gcagcucaagagaucc

SEQ ID NO: 1346059 - RNA, 23 nt, Human
gcagcucaagcagcgaccgcccc

SEQ ID NO: 1346060 - RNA, 18 nt, Human
gcagcucaagagauccca

SEQ ID NO: 1346061 - RNA, 14 nt, Human
gcagcuuguagcca

SEQ ID NO: 1346062 - RNA, 15 nt, Human
gcagcuuguagccag

SEQ ID NO: 1346063 - RNA, 16 nt, Human
gcagcuuguagccagc

SEQ ID NO: 1346064 - RNA, 17 nt, Human
gcagcuuguagccagcc

SEQ ID NO: 1346065 - RNA, 18 nt, Human
gcagcuuguagccagccg

SEQ ID NO: 1346066 - RNA, 19 nt, Human
gcagcuuguagccagccgg

SEQ ID NO: 1346067 - RNA, 20 nt, Human
gcagcuuguagccagccggg

SEQ ID NO: 1346068 - RNA, 21 nt, Human
gcagcuuguagccagccgggg

SEQ ID NO: 1346069 - RNA, 22 nt, Human
gcagcuuguagccagccggggc

SEQ ID NO: 1346070 - RNA, 23 nt, Human
gcagcuuguagccagccggggcg

SEQ ID NO: 1346071 - RNA, 20 nt, Human
gcaggaaggcugagaggaga

SEQ ID NO: 1346072 - RNA, 15 nt, Human
gcagcuuugcucaua

SEQ ID NO: 1346073 - RNA, 13 nt, Human
gcaggaaggagcu

SEQ ID NO: 1346074 - RNA, 14 nt, Human
gcaggaaggagcug

SEQ ID NO: 1346075 - RNA, 15 nt, Human
gcaggaaggagcugc

SEQ ID NO: 1346076 - RNA, 16 nt, Human
gcaggaaggagcugcc

SEQ ID NO: 1346077 - RNA, 17 nt, Human
gcaggaaggagcugccu

SEQ ID NO: 1346078 - RNA, 18 nt, Human
gcaggaaggagcugccug

SEQ ID NO: 1346079 - RNA, 19 nt, Human
gcaggaaggagcugccugg

SEQ ID NO: 1346080 - RNA, 20 nt, Human
gcaggaaggagcugccugga

SEQ ID NO: 1346081 - RNA, 21 nt, Human
gcaggaaggagcugccuggac

SEQ ID NO: 1346082 - RNA, 23 nt, Human
gcaggaaggagcugccuggaccc

SEQ ID NO: 1346083 - RNA, 22 nt, Human
gcaggaaggagcugccuggacc

SEQ ID NO: 1346084 - RNA, 11 nt, Human
gcaggaaggcu

SEQ ID NO: 1346085 - RNA, 14 nt, Human
gcagcuuugcucau

SEQ ID NO: 1346086 - RNA, 13 nt, Human
gcagcuuugcuca

SEQ ID NO: 1346087 - RNA, 16 nt, Human
gcagcuuuuaaaagau

SEQ ID NO: 1346088 - RNA, 19 nt, Human
gcagcuuuagaaucccagc

SEQ ID NO: 1346089 - RNA, 21 nt, Human
gcaggaaaugaaaaugucuug

SEQ ID NO: 1346090 - RNA, 23 nt, Human
gcaggaaaugaaaaugucuugug

SEQ ID NO: 1346091 - RNA, 19 nt, Human
gcaggcagaggcccaggcu

SEQ ID NO: 1346092 - RNA, 20 nt, Human
gcaggcagaggcccaggcug

SEQ ID NO: 1346093 - RNA, 21 nt, Human
gcaggcagaggcccaggcugc

SEQ ID NO: 1346094 - RNA, 14 nt, Human
gcaggcagccagca

SEQ ID NO: 1346095 - RNA, 19 nt, Human
gcaggcagccagcaucugg

SEQ ID NO: 1346096 - RNA, 21 nt, Human
gcaggcagccagcaucugggc

SEQ ID NO: 1346097 - RNA, 15 nt, Human
gcaggcagaggccca

SEQ ID NO: 1346098 - RNA, 16 nt, Human
gcaggcagaggcccag

SEQ ID NO: 1346099 - RNA, 16 nt, Human
gcacggcagccacagc

SEQ ID NO: 1346100 - RNA, 14 nt, Human
gcacggcucugucc

SEQ ID NO: 1346101 - RNA, 18 nt, Human
gcacggcucuguccccag

SEQ ID NO: 1346102 - RNA, 19 nt, Human
gcacggcucuguccccagc

SEQ ID NO: 1346103 - RNA, 20 nt, Human
gcacggcucuguccccagcc

SEQ ID NO: 1346104 - RNA, 22 nt, Human
gcacggcucuguccccagccug

SEQ ID NO: 1346105 - RNA, 14 nt, Human
gcacggcagccaca

SEQ ID NO: 1346106 - RNA, 13 nt, Human
gcacgacagugga

SEQ ID NO: 1346107 - RNA, 17 nt, Human
gcaccugggcccugggg

SEQ ID NO: 1346108 - RNA, 13 nt, Human
gcaccuuucuagu

SEQ ID NO: 1346109 - RNA, 17 nt, Human
gcaccuuucuaguugaa

SEQ ID NO: 1346110 - RNA, 18 nt, Human
gcaccuuucuaguugaaa

SEQ ID NO: 1346111 - RNA, 15 nt, Human
gcacgaaauguuauu

SEQ ID NO: 1346112 - RNA, 16 nt, Human
gcacgaccgccccagu

SEQ ID NO: 1346113 - RNA, 21 nt, Human
gcacccuaguucuaccucagg

SEQ ID NO: 1346114 - RNA, 18 nt, Human
gcaccuggcaucgcacca

SEQ ID NO: 1346115 - RNA, 15 nt, Human
gcaccugggcccugg

SEQ ID NO: 1346116 - RNA, 16 nt, Human
gcaccugggcccuggg

SEQ ID NO: 1346117 - RNA, 18 nt, Human
gcaccugggcccuggggc

SEQ ID NO: 1346118 - RNA, 14 nt, Human
gcaccagacaccca

SEQ ID NO: 1346119 - RNA, 22 nt, Human
gcaaugccacagcccugucagc

SEQ ID NO: 1346120 - RNA, 16 nt, Human
gcaccagaauguauau

SEQ ID NO: 1346121 - RNA, 13 nt, Human
gcaccaggaagcc

SEQ ID NO: 1346122 - RNA, 14 nt, Human
gcaccaggaagccg

SEQ ID NO: 1346123 - RNA, 16 nt, Human
gcaccaugcugcuggg

SEQ ID NO: 1346124 - RNA, 18 nt, Human
gcaccaugcugcugggga

SEQ ID NO: 1346125 - RNA, 20 nt, Human
gcaccaugcugcuggggaag

SEQ ID NO: 1346126 - RNA, 23 nt, Human
gcaccaugcugcuggggaagaca

SEQ ID NO: 1346127 - RNA, 15 nt, Human
gcaccauucugacuc

SEQ ID NO: 1346128 - RNA, 17 nt, Human
gcaccauucugacucgg

SEQ ID NO: 1346129 - RNA, 23 nt, Human
gcaccauucugacucgguuucuc

SEQ ID NO: 1346130 - RNA, 12 nt, Human
gcacugcugccc

SEQ ID NO: 1346131 - RNA, 22 nt, Human
gcacugguggcccgacagccug

SEQ ID NO: 1346132 - RNA, 23 nt, Human
gcacugguggcccgacagccugg

SEQ ID NO: 1346133 - RNA, 24 nt, Human
gcacugguggcccgacagccuggc

SEQ ID NO: 1346134 - RNA, 19 nt, Human
gcacugcccugguggcccu

SEQ ID NO: 1346135 - RNA, 21 nt, Human
gcacugccugcucccauccug

SEQ ID NO: 1346136 - RNA, 19 nt, Human
gcacugccugcucccaucc

SEQ ID NO: 1346137 - RNA, 17 nt, Human
gcacguaaaguacuugu

SEQ ID NO: 1346138 - RNA, 21 nt, Human
gcacguaaaguacuuguaguu

SEQ ID NO: 1346139 - RNA, 18 nt, Human
gcacguaaaguacuugua

SEQ ID NO: 1346140 - RNA, 13 nt, Human
gcacguggccucu

SEQ ID NO: 1346141 - RNA, 14 nt, Human
gcacguggccucuu

SEQ ID NO: 1346142 - RNA, 15 nt, Human
gcacguggccucuug

SEQ ID NO: 1346143 - RNA, 17 nt, Human
gcacguggccucuugag

SEQ ID NO: 1346144 - RNA, 19 nt, Human
gcacguggccucuugagca

SEQ ID NO: 1346145 - RNA, 14 nt, Human
gcacugccacuggg

SEQ ID NO: 1346146 - RNA, 13 nt, Human
gcacugccaggag

SEQ ID NO: 1346147 - RNA, 14 nt, Human
gcacugccaggagg

SEQ ID NO: 1346148 - RNA, 15 nt, Human
gcacugccaggaggg

SEQ ID NO: 1346149 - RNA, 16 nt, Human
gcacugccaggaggga

SEQ ID NO: 1346150 - RNA, 17 nt, Human
gcacugccaggagggac

SEQ ID NO: 1346151 - RNA, 18 nt, Human
gcacugccaggagggaca

SEQ ID NO: 1346152 - RNA, 23 nt, Human
gcacugccaggagggacaaagga

SEQ ID NO: 1346153 - RNA, 21 nt, Human
gcacugcccauggacaggcug

SEQ ID NO: 1346154 - RNA, 12 nt, Human
gcacugcccugg

SEQ ID NO: 1346155 - RNA, 13 nt, Human
gcacugcccuggu

SEQ ID NO: 1346156 - RNA, 15 nt, Human
gcagacagcuccacc

SEQ ID NO: 1346157 - RNA, 20 nt, Human
gcagacaggccccgugaggc

SEQ ID NO: 1346158 - RNA, 21 nt, Human
gcacuguacaaaaaaaucuuc

SEQ ID NO: 1346159 - RNA, 18 nt, Human
gcacuuaaagcuuucaga

SEQ ID NO: 1346160 - RNA, 9 nt, Human
gcacuguaa

SEQ ID NO: 1346161 - RNA, 12 nt, Human
gcacuguaaaau

SEQ ID NO: 1346162 - RNA, 13 nt, Human
gcacuguaaaaug

SEQ ID NO: 1346163 - RNA, 14 nt, Human
gcacuguaaaaugu

SEQ ID NO: 1346164 - RNA, 16 nt, Human
gcacuguaaaaugugg

SEQ ID NO: 1346165 - RNA, 23 nt, Human
gcacuguaaaaugugggauuaug

SEQ ID NO: 1346166 - RNA, 22 nt, Human
gcacuuacugguaggaccaagc

SEQ ID NO: 1346167 - RNA, 18 nt, Human
gcacuuauuuaaugccga

SEQ ID NO: 1346168 - RNA, 18 nt, Human
gcacuucaaauucaaaua

SEQ ID NO: 1346169 - RNA, 20 nt, Human
gcacuuccucucgcggcccu

SEQ ID NO: 1346170 - RNA, 22 nt, Human
gcacuuccucucgcggcccuca

SEQ ID NO: 1346171 - RNA, 14 nt, Human
gcagaauaguauuu

SEQ ID NO: 1346172 - RNA, 23 nt, Human
gcagaauccuaggcuccacccca

SEQ ID NO: 1346173 - RNA, 15 nt, Human
gauuuccagccuucu

SEQ ID NO: 1346174 - RNA, 21 nt, Human
gauugcaauaucugaagcccu

SEQ ID NO: 1346175 - RNA, 15 nt, Human
gauugcacguggccu

SEQ ID NO: 1346176 - RNA, 16 nt, Human
gauugcacguggccuc

SEQ ID NO: 1346177 - RNA, 17 nt, Human
gauugcacguggccucu

SEQ ID NO: 1346178 - RNA, 19 nt, Human
gauugcacguggccucuug

SEQ ID NO: 1346179 - RNA, 20 nt, Human
gauugcacguggccucuuga

SEQ ID NO: 1346180 - RNA, 23 nt, Human
gauugcacguggccucuugagca

SEQ ID NO: 1346181 - RNA, 19 nt, Human
gauugcagaaaauucugug

SEQ ID NO: 1346182 - RNA, 14 nt, Human
gauuucugaggaaa

SEQ ID NO: 1346183 - RNA, 22 nt, Human
gauuuggucaacacuaacauga

SEQ ID NO: 1346184 - RNA, 20 nt, Human
gauuuggcuugacaaaggca

SEQ ID NO: 1346185 - RNA, 21 nt, Human
gauuugcauugaacacaaacu

SEQ ID NO: 1346186 - RNA, 15 nt, Human
gauuuuccugaaaac

SEQ ID NO: 1346187 - RNA, 13 nt, Human
gauuuuccaaaug

SEQ ID NO: 1346188 - RNA, 22 nt, Human
gauuuuccaggacuguuucaaa

SEQ ID NO: 1346189 - RNA, 12 nt, Human
gauuuucaguua

SEQ ID NO: 1346190 - RNA, 14 nt, Human
gauuuucaguuacu

SEQ ID NO: 1346191 - RNA, 20 nt, Human
gauuuucugcuacuuugcug

SEQ ID NO: 1346192 - RNA, 15 nt, Human
gauuuucugguucua

SEQ ID NO: 1346193 - RNA, 16 nt, Human
gauuuucugguucuaa

SEQ ID NO: 1346194 - RNA, 12 nt, Human
gauuuuuaccag

SEQ ID NO: 1346195 - RNA, 15 nt, Human
gauuuuuaugucugg

SEQ ID NO: 1346196 - RNA, 12 nt, Human
gauuuuucuuua

SEQ ID NO: 1346197 - RNA, 13 nt, Human
gauuuuucuuuaa

SEQ ID NO: 1346198 - RNA, 15 nt, Human
gauuuuucuuuaacu

SEQ ID NO: 1346199 - RNA, 14 nt, Human
gauuuuucuuuaca

SEQ ID NO: 1346200 - RNA, 20 nt, Human
gauuuuucuuuacaaaacaa

SEQ ID NO: 1346201 - RNA, 18 nt, Human
gauuuucaaagcuuuuuc

SEQ ID NO: 1346202 - RNA, 19 nt, Human
gauuuucaaagcuuuuucc

SEQ ID NO: 1346203 - RNA, 22 nt, Human
gauuugugucugugacuuuugu

SEQ ID NO: 1346204 - RNA, 14 nt, Human
gauuuguacugaaa

SEQ ID NO: 1346205 - RNA, 19 nt, Human
gauuuguaacccacugaga

SEQ ID NO: 1346206 - RNA, 14 nt, Human
gauuugucccaggu

SEQ ID NO: 1346207 - RNA, 19 nt, Human
gauuccagagcacugcucc

SEQ ID NO: 1346208 - RNA, 22 nt, Human
gauuccagagaguggcuccucc

SEQ ID NO: 1346209 - RNA, 19 nt, Human
gauuccagagaguggcucc

SEQ ID NO: 1346210 - RNA, 20 nt, Human
gauuccagagaguggcuccu

SEQ ID NO: 1346211 - RNA, 18 nt, Human
gauuccagccaucaccuu

SEQ ID NO: 1346212 - RNA, 14 nt, Human
gauuccagccauca

SEQ ID NO: 1346213 - RNA, 18 nt, Human
gauuccauugguccaaga

SEQ ID NO: 1346214 - RNA, 19 nt, Human
gauucauaguaacuucuua

SEQ ID NO: 1346215 - RNA, 18 nt, Human
gauggggguuucaccaua

SEQ ID NO: 1346216 - RNA, 18 nt, Human
gauggggaccagcagccc

SEQ ID NO: 1346217 - RNA, 23 nt, Human
gauggggcaggccaccuggcucu

SEQ ID NO: 1346218 - RNA, 16 nt, Human
gaugggggaacucaga

SEQ ID NO: 1346219 - RNA, 19 nt, Human
gaugggggaacucagaucc

SEQ ID NO: 1346220 - RNA, 20 nt, Human
gaugggggaacucagaucca

SEQ ID NO: 1346221 - RNA, 22 nt, Human
gaugggggaacucagauccagg

SEQ ID NO: 1346222 - RNA, 20 nt, Human
gauggcuaacuuacaaagau

SEQ ID NO: 1346223 - RNA, 13 nt, Human
gauuccuucccau

SEQ ID NO: 1346224 - RNA, 12 nt, Human
gauuccuuccca

SEQ ID NO: 1346225 - RNA, 13 nt, Human
gauuccuuuaaca

SEQ ID NO: 1346226 - RNA, 14 nt, Human
gauuccuuuaacaa

SEQ ID NO: 1346227 - RNA, 15 nt, Human
gauuccuuuaacaac

SEQ ID NO: 1346228 - RNA, 21 nt, Human
gauuccuuuaacaacauguuu

SEQ ID NO: 1346229 - RNA, 20 nt, Human
gauuccuuuaacaacauguu

SEQ ID NO: 1346230 - RNA, 17 nt, Human
gauucgaaugacacugu

SEQ ID NO: 1346231 - RNA, 16 nt, Human
gauucgaaugacacug

SEQ ID NO: 1346232 - RNA, 16 nt, Human
gauucgguaucccccc

SEQ ID NO: 1346233 - RNA, 17 nt, Human
gauucgguaucccccca

SEQ ID NO: 1346234 - RNA, 11 nt, Human
gauucuaaaau

SEQ ID NO: 1346235 - RNA, 12 nt, Human
gauucuaaaaug

SEQ ID NO: 1346236 - RNA, 22 nt, Human
gauucuaaaaugugauguucua

SEQ ID NO: 1346237 - RNA, 11 nt, Human
gauucuaaaga

SEQ ID NO: 1346238 - RNA, 12 nt, Human
gauucuaaagau

SEQ ID NO: 1346239 - RNA, 13 nt, Human
gauucuaaagauu

SEQ ID NO: 1346240 - RNA, 15 nt, Human
gauucuaaagauucu

SEQ ID NO: 1346241 - RNA, 14 nt, Human
gauucuaaagauuc

SEQ ID NO: 1346242 - RNA, 18 nt, Human
gauugcaauaucugaagc

SEQ ID NO: 1346243 - RNA, 21 nt, Human
gcaaacaggaucaguuaacua

SEQ ID NO: 1346244 - RNA, 13 nt, Human
gcaaagcccagcu

SEQ ID NO: 1346245 - RNA, 22 nt, Human
gcaaagcagcaacuauucacaa

SEQ ID NO: 1346246 - RNA, 16 nt, Human
gcaaagccaggucccu

SEQ ID NO: 1346247 - RNA, 21 nt, Human
gcaaagcccagcuugaaaccu

SEQ ID NO: 1346248 - RNA, 15 nt, Human
gauuuuucuuuacaa

SEQ ID NO: 1346249 - RNA, 13 nt, Human
gauuuuugccucu

SEQ ID NO: 1346250 - RNA, 22 nt, Human
gauuuuuguuuuguuuuuacaa

SEQ ID NO: 1346251 - RNA, 16 nt, Human
gauuuuuuaauaauuu

SEQ ID NO: 1346252 - RNA, 17 nt, Human
gauuuuuuaauaauuua

SEQ ID NO: 1346253 - RNA, 13 nt, Human
gcaaaauugcaaa

SEQ ID NO: 1346254 - RNA, 17 nt, Human
gcaaaauugcaaaucuu

SEQ ID NO: 1346255 - RNA, 12 nt, Human
gcaaacacuuaa

SEQ ID NO: 1346256 - RNA, 13 nt, Human
gcaaagcccccag

SEQ ID NO: 1346257 - RNA, 15 nt, Human
gcaaagcccccagag

SEQ ID NO: 1346258 - RNA, 19 nt, Human
gcaaagcccccagagccca

SEQ ID NO: 1346259 - RNA, 23 nt, Human
gcaaagcccccagagcccaggcu

SEQ ID NO: 1346260 - RNA, 11 nt, Human
gcaaagccugu

SEQ ID NO: 1346261 - RNA, 12 nt, Human
gcaaagccuguu

SEQ ID NO: 1346262 - RNA, 19 nt, Human
gcaaagccuguucauggca

SEQ ID NO: 1346263 - RNA, 20 nt, Human
gcaaagccuguucauggcag

SEQ ID NO: 1346264 - RNA, 18 nt, Human
gcaaaucauuuguuuaaa

SEQ ID NO: 1346265 - RNA, 14 nt, Human
gcaaaucauuuguu

SEQ ID NO: 1346266 - RNA, 17 nt, Human
gcaaaucaggcuuuugu

SEQ ID NO: 1346267 - RNA, 21 nt, Human
gcaaaucaccacaaacuguaa

SEQ ID NO: 1346268 - RNA, 21 nt, Human
gcaagaaucagagaaggaaca

SEQ ID NO: 1346269 - RNA, 21 nt, Human
gcaagaaggcaaaaauaguuu

SEQ ID NO: 1346270 - RNA, 15 nt, Human
gcaagaccaguugaa

SEQ ID NO: 1346271 - RNA, 19 nt, Human
gcaagacuucucuuugccu

SEQ ID NO: 1346272 - RNA, 21 nt, Human
gcaagacuucucuuugccuca

SEQ ID NO: 1346273 - RNA, 22 nt, Human
gcaagacuucucuuugccucaa

SEQ ID NO: 1346274 - RNA, 18 nt, Human
gcaagaggccguggcugc

SEQ ID NO: 1346275 - RNA, 20 nt, Human
gcaagaggccguggcugcug

SEQ ID NO: 1346276 - RNA, 22 nt, Human
gcaagaggccguggcugcugug

SEQ ID NO: 1346277 - RNA, 23 nt, Human
gcaagaggccguggcugcugugg

SEQ ID NO: 1346278 - RNA, 16 nt, Human
gcaagaaggcaaaaau

SEQ ID NO: 1346279 - RNA, 20 nt, Human
gcaagaaggcaaaaauaguu

SEQ ID NO: 1346280 - RNA, 23 nt, Human
gcaagaaggcaaaaauaguuugg

SEQ ID NO: 1346281 - RNA, 14 nt, Human
gcaacagaucugga

SEQ ID NO: 1346282 - RNA, 16 nt, Human
gcaacagaucuggaac

SEQ ID NO: 1346283 - RNA, 17 nt, Human
gcaacagaucuggaacc

SEQ ID NO: 1346284 - RNA, 18 nt, Human
gcaacagaucuggaaccu

SEQ ID NO: 1346285 - RNA, 20 nt, Human
gcaacagaucuggaaccuca

SEQ ID NO: 1346286 - RNA, 22 nt, Human
gcaacagaucuggaaccucagc

SEQ ID NO: 1346287 - RNA, 16 nt, Human
gcaacagaucaguaaa

SEQ ID NO: 1346288 - RNA, 17 nt, Human
gcaaauccuuugugaaa

SEQ ID NO: 1346289 - RNA, 18 nt, Human
gcaaauccuuugugaaaa

SEQ ID NO: 1346290 - RNA, 22 nt, Human
gcaaaucgaaugaaauuaacug

SEQ ID NO: 1346291 - RNA, 18 nt, Human
gcaacacuggucugcugu

SEQ ID NO: 1346292 - RNA, 18 nt, Human
gcaacacuuuuuauguua

SEQ ID NO: 1346293 - RNA, 19 nt, Human
gcaacacuggucugcuguu

SEQ ID NO: 1346294 - RNA, 15 nt, Human
gcaacagaucaguaa

SEQ ID NO: 1346295 - RNA, 12 nt, Human
gcaacagaucug

SEQ ID NO: 1346296 - RNA, 13 nt, Human
gcaacagaucugg

SEQ ID NO: 1346297 - RNA, 15 nt, Human
gcaagguacucuggu

SEQ ID NO: 1346298 - RNA, 17 nt, Human
gcaagguacucugguga

SEQ ID NO: 1346299 - RNA, 16 nt, Human
gcaaugaugaaugaga

SEQ ID NO: 1346300 - RNA, 17 nt, Human
gcaaugaugaaugagaa

SEQ ID NO: 1346301 - RNA, 13 nt, Human
gcaaugccacagc

SEQ ID NO: 1346302 - RNA, 17 nt, Human
gcaaugccacagcccug

SEQ ID NO: 1346303 - RNA, 19 nt, Human
gcaaugccacagcccuguc

SEQ ID NO: 1346304 - RNA, 21 nt, Human
gcaaugccacagcccugucag

SEQ ID NO: 1346305 - RNA, 15 nt, Human
gcaaugccaucaucu

SEQ ID NO: 1346306 - RNA, 18 nt, Human
gcaaugccaucaucuccu

SEQ ID NO: 1346307 - RNA, 19 nt, Human
gcaaugccaucaucuccug

SEQ ID NO: 1346308 - RNA, 20 nt, Human
gcaaggccugguguuucuug

SEQ ID NO: 1346309 - RNA, 24 nt, Human
gcaaggcccgagcagcugagcagg

SEQ ID NO: 1346310 - RNA, 14 nt, Human
gcaaggcccgagca

SEQ ID NO: 1346311 - RNA, 16 nt, Human
gcaaggcccgagcagc

SEQ ID NO: 1346312 - RNA, 17 nt, Human
gcaaggcccgagcagcu

SEQ ID NO: 1346313 - RNA, 18 nt, Human
gcaaggcccgagcagcug

SEQ ID NO: 1346314 - RNA, 19 nt, Human
gcaaggcccgagcagcuga

SEQ ID NO: 1346315 - RNA, 20 nt, Human
gcaaggcccgagcagcugag

SEQ ID NO: 1346316 - RNA, 21 nt, Human
gcaaggcccgagcagcugagc

SEQ ID NO: 1346317 - RNA, 22 nt, Human
gcaaggcccgagcagcugagca

SEQ ID NO: 1346318 - RNA, 23 nt, Human
gcaaggcccgagcagcugagcag

SEQ ID NO: 1346319 - RNA, 10 nt, Human
gcaagccaga

SEQ ID NO: 1346320 - RNA, 15 nt, Human
gcaagauaaacauua

SEQ ID NO: 1346321 - RNA, 18 nt, Human
gcaagauaaacauuauua

SEQ ID NO: 1346322 - RNA, 19 nt, Human
gcaagccuaagggauccug

SEQ ID NO: 1346323 - RNA, 17 nt, Human
gcaaggaccuaaaacau

SEQ ID NO: 1346324 - RNA, 14 nt, Human
gcaaggacuuugua

SEQ ID NO: 1346325 - RNA, 16 nt, Human
gcaaggacuuuguaca

SEQ ID NO: 1346326 - RNA, 19 nt, Human
gcaaggacuuuguacauuu

SEQ ID NO: 1346327 - RNA, 13 nt, Human
gcaaggcagccgu

SEQ ID NO: 1346328 - RNA, 15 nt, Human
gcaaggcagccgugg

SEQ ID NO: 1346329 - RNA, 19 nt, Human
gaucucagcucacugcaac

SEQ ID NO: 1346330 - RNA, 17 nt, Human
gaucucagcucacugca

SEQ ID NO: 1346331 - RNA, 17 nt, Human
gaucucagcucacuaca

SEQ ID NO: 1346332 - RNA, 12 nt, Human
gaucucagcuca

SEQ ID NO: 1346333 - RNA, 23 nt, Human
gaucucaccaggcagccucuggg

SEQ ID NO: 1346334 - RNA, 20 nt, Human
gaucucaccaggcagccucu

SEQ ID NO: 1346335 - RNA, 11 nt, Human
gaucuaaauaa

SEQ ID NO: 1346336 - RNA, 14 nt, Human
gaucuaaauaaaau

SEQ ID NO: 1346337 - RNA, 16 nt, Human
gaucuaaauaaaaugc

SEQ ID NO: 1346338 - RNA, 17 nt, Human
gaucuaaauaaaaugcu

SEQ ID NO: 1346339 - RNA, 18 nt, Human
gaucuaaauaaaaugcua

SEQ ID NO: 1346340 - RNA, 13 nt, Human
gaucuauuucaug

SEQ ID NO: 1346341 - RNA, 14 nt, Human
gaucuauuucaugu

SEQ ID NO: 1346342 - RNA, 16 nt, Human
gaucuauuucauguuu

SEQ ID NO: 1346343 - RNA, 14 nt, Human
gaucucaccaggca

SEQ ID NO: 1346344 - RNA, 15 nt, Human
gaucucaccaggcag

SEQ ID NO: 1346345 - RNA, 16 nt, Human
gaucucaccaggcagc

SEQ ID NO: 1346346 - RNA, 19 nt, Human
gaucucaccaggcagccuc

SEQ ID NO: 1346347 - RNA, 17 nt, Human
gauccugcggguggggc

SEQ ID NO: 1346348 - RNA, 18 nt, Human
gauccugcggguggggcu

SEQ ID NO: 1346349 - RNA, 13 nt, Human
gaucgccuucccc

SEQ ID NO: 1346350 - RNA, 14 nt, Human
gaucgccuucccca

SEQ ID NO: 1346351 - RNA, 16 nt, Human
gaucgccuuccccacc

SEQ ID NO: 1346352 - RNA, 17 nt, Human
gaucgccuuccccaccc

SEQ ID NO: 1346353 - RNA, 13 nt, Human
gaucggcaggaca

SEQ ID NO: 1346354 - RNA, 19 nt, Human
gaucggcaggacacccuga

SEQ ID NO: 1346355 - RNA, 18 nt, Human
gaucgucugacugguguu

SEQ ID NO: 1346356 - RNA, 16 nt, Human
gaucguucaaagcaug

SEQ ID NO: 1346357 - RNA, 13 nt, Human
gauccuggaaauc

SEQ ID NO: 1346358 - RNA, 19 nt, Human
gaucccuagcugugaccuc

SEQ ID NO: 1346359 - RNA, 21 nt, Human
gaucccuagcugugaccucuc

SEQ ID NO: 1346360 - RNA, 12 nt, Human
gaucccucaucu

SEQ ID NO: 1346361 - RNA, 21 nt, Human
gauccccacgccacagcccuu

SEQ ID NO: 1346362 - RNA, 18 nt, Human
gauccccacgccacagcc

SEQ ID NO: 1346363 - RNA, 19 nt, Human
gauccccacgccacagccc

SEQ ID NO: 1346364 - RNA, 15 nt, Human
gaucccuagcuguga

SEQ ID NO: 1346365 - RNA, 18 nt, Human
gaucuguuuugaaggcaa

SEQ ID NO: 1346366 - RNA, 19 nt, Human
gaucuguuuugaaggcaaa

SEQ ID NO: 1346367 - RNA, 13 nt, Human
gaucuguuuugaa

SEQ ID NO: 1346368 - RNA, 17 nt, Human
gaucuguuuugaaggca

SEQ ID NO: 1346369 - RNA, 19 nt, Human
gaugaaaauaaagaaugga

SEQ ID NO: 1346370 - RNA, 14 nt, Human
gaucuuuuauuuug

SEQ ID NO: 1346371 - RNA, 15 nt, Human
gaucuuuuauuuugc

SEQ ID NO: 1346372 - RNA, 21 nt, Human
gaugaagagagagagggccug

SEQ ID NO: 1346373 - RNA, 16 nt, Human
gaugaagggcccgaga

SEQ ID NO: 1346374 - RNA, 16 nt, Human
gaugcaccaccaagcc

SEQ ID NO: 1346375 - RNA, 15 nt, Human
gaugcacaucccugg

SEQ ID NO: 1346376 - RNA, 16 nt, Human
gaugcacaucccugga

SEQ ID NO: 1346377 - RNA, 22 nt, Human
gaugacaagaaaggcugcugua

SEQ ID NO: 1346378 - RNA, 16 nt, Human
gaugaaguuuuacauu

SEQ ID NO: 1346379 - RNA, 17 nt, Human
gaugaaguuuuacauug

SEQ ID NO: 1346380 - RNA, 15 nt, Human
gaugcauuugggucc

SEQ ID NO: 1346381 - RNA, 16 nt, Human
gaugcauuugggucca

SEQ ID NO: 1346382 - RNA, 18 nt, Human
gaugcauuuggguccagg

SEQ ID NO: 1346383 - RNA, 19 nt, Human
gaugcauuuggguccagga

SEQ ID NO: 1346384 - RNA, 20 nt, Human
gaugcauuuggguccaggag

SEQ ID NO: 1346385 - RNA, 21 nt, Human
gaugcauuuggguccaggagg

SEQ ID NO: 1346386 - RNA, 22 nt, Human
gaugcauuuggguccaggagga

SEQ ID NO: 1346387 - RNA, 19 nt, Human
gaugccaaaaaaaaauaca

SEQ ID NO: 1346388 - RNA, 19 nt, Human
gaugccaauauuaaaucug

SEQ ID NO: 1346389 - RNA, 15 nt, Human
gaugccacacaagga

SEQ ID NO: 1346390 - RNA, 15 nt, Human
gaugccagccaagcu

SEQ ID NO: 1346391 - RNA, 20 nt, Human
gauggcugugccucugccug

SEQ ID NO: 1346392 - RNA, 21 nt, Human
gauggcuaguaucaaaagaaa

SEQ ID NO: 1346393 - RNA, 13 nt, Human
gauggcucccagg

SEQ ID NO: 1346394 - RNA, 23 nt, Human
gauggcucccaggggcucccucc

SEQ ID NO: 1346395 - RNA, 18 nt, Human
gauggcucccaggggcuc

SEQ ID NO: 1346396 - RNA, 13 nt, Human
gauggcugugccu

SEQ ID NO: 1346397 - RNA, 17 nt, Human
gauggcugugccucugc

SEQ ID NO: 1346398 - RNA, 18 nt, Human
gauggcugugccucugcc

SEQ ID NO: 1346399 - RNA, 19 nt, Human
gauggcugugccucugccu

SEQ ID NO: 1346400 - RNA, 12 nt, Human
gaugccagccaa

SEQ ID NO: 1346401 - RNA, 23 nt, Human
gauggaugccaauauuaaaucug

SEQ ID NO: 1346402 - RNA, 12 nt, Human
gauggauuuuau

SEQ ID NO: 1346403 - RNA, 13 nt, Human
gauggauuuuaua

SEQ ID NO: 1346404 - RNA, 14 nt, Human
gauggcgcaggaac

SEQ ID NO: 1346405 - RNA, 11 nt, Human
gauacagaaaa

SEQ ID NO: 1346406 - RNA, 17 nt, Human
gauaagguaaaaugcca

SEQ ID NO: 1346407 - RNA, 19 nt, Human
gauaaguguucugucugac

SEQ ID NO: 1346408 - RNA, 19 nt, Human
gauacaccgggccuggaga

SEQ ID NO: 1346409 - RNA, 20 nt, Human
gauagaugcuggcccagggc

SEQ ID NO: 1346410 - RNA, 21 nt, Human
gauagaugcuggcccagggcc

SEQ ID NO: 1346411 - RNA, 12 nt, Human
gauagaugcugg

SEQ ID NO: 1346412 - RNA, 16 nt, Human
gauagaugcuggccca

SEQ ID NO: 1346413 - RNA, 17 nt, Human
gauagaugcuggcccag

SEQ ID NO: 1346414 - RNA, 18 nt, Human
gauagaugcuggcccagg

SEQ ID NO: 1346415 - RNA, 19 nt, Human
gauaaaguugguaaaccuu

SEQ ID NO: 1346416 - RNA, 19 nt, Human
gauaaagauuuuuuaauaa

SEQ ID NO: 1346417 - RNA, 17 nt, Human
gauaaagccucaagguu

SEQ ID NO: 1346418 - RNA, 17 nt, Human
gauaaagauuuuuuaau

SEQ ID NO: 1346419 - RNA, 22 nt, Human
gauaaauaguuuaugauuccac

SEQ ID NO: 1346420 - RNA, 21 nt, Human
gauaaauauugagcagaucua

SEQ ID NO: 1346421 - RNA, 22 nt, Human
gauaagaguagaaacugcaggg

SEQ ID NO: 1346422 - RNA, 16 nt, Human
gauaagaguuggcugg

SEQ ID NO: 1346423 - RNA, 14 nt, Human
gauaagaucuuuua

SEQ ID NO: 1346424 - RNA, 20 nt, Human
gauaagaucuuuuauuuugc

SEQ ID NO: 1346425 - RNA, 13 nt, Human
gauaaggaaauca

SEQ ID NO: 1346426 - RNA, 15 nt, Human
gauaaggccuguggg

SEQ ID NO: 1346427 - RNA, 20 nt, Human
gauaagguaaaaugccauga

SEQ ID NO: 1346428 - RNA, 22 nt, Human
gauaaguguucugucugacuuu

SEQ ID NO: 1346429 - RNA, 12 nt, Human
gaucccccagaa

SEQ ID NO: 1346430 - RNA, 16 nt, Human
gauccccacgccacag

SEQ ID NO: 1346431 - RNA, 17 nt, Human
gauccccacgccacagc

SEQ ID NO: 1346432 - RNA, 17 nt, Human
gaucccaugagcuccuu

SEQ ID NO: 1346433 - RNA, 20 nt, Human
gauccccaagccuggcaagg

SEQ ID NO: 1346434 - RNA, 20 nt, Human
gaucauugugaaauuauuca

SEQ ID NO: 1346435 - RNA, 15 nt, Human
gaucauguguggaag

SEQ ID NO: 1346436 - RNA, 18 nt, Human
gaucauuuguuggaauga

SEQ ID NO: 1346437 - RNA, 14 nt, Human
gaucauugugaaau

SEQ ID NO: 1346438 - RNA, 21 nt, Human
gaucauguguggaaguuauua

SEQ ID NO: 1346439 - RNA, 14 nt, Human
gaucaguuaacuau

SEQ ID NO: 1346440 - RNA, 20 nt, Human
gaucaguguaccauuugccu

SEQ ID NO: 1346441 - RNA, 21 nt, Human
gaucaguuaagaaauuucaca

SEQ ID NO: 1346442 - RNA, 18 nt, Human
gaucaguuauaaguagca

SEQ ID NO: 1346443 - RNA, 17 nt, Human
gaucaguauuuaacuaa

SEQ ID NO: 1346444 - RNA, 19 nt, Human
gaucaguauuuaacuaauu

SEQ ID NO: 1346445 - RNA, 23 nt, Human
gaucagugggccuccaaggaggg

SEQ ID NO: 1346446 - RNA, 21 nt, Human
gaucaaguuauuuuuaauuug

SEQ ID NO: 1346447 - RNA, 20 nt, Human
gaucaauuauaguuucugag

SEQ ID NO: 1346448 - RNA, 23 nt, Human
gauagucuuuugcuuuuggcaaa

SEQ ID NO: 1346449 - RNA, 13 nt, Human
gaucaaggccuua

SEQ ID NO: 1346450 - RNA, 23 nt, Human
gaucaaggccuuauuggaaagca

SEQ ID NO: 1346451 - RNA, 22 nt, Human
gaucaaggccuuauuggaaagc

SEQ ID NO: 1346452 - RNA, 16 nt, Human
gaucaauuauaguuuc

SEQ ID NO: 1346453 - RNA, 18 nt, Human
gaucaauuauaguuucug

SEQ ID NO: 1346454 - RNA, 19 nt, Human
gaucaauuauaguuucuga

SEQ ID NO: 1346455 - RNA, 17 nt, Human
gaucagaugcuccaaga

SEQ ID NO: 1346456 - RNA, 21 nt, Human
gaucagaugcuccaagauucu

SEQ ID NO: 1346457 - RNA, 22 nt, Human
gaucagaugcuccaagauucua

SEQ ID NO: 1346458 - RNA, 19 nt, Human
gaucagcaaaccggggccu

SEQ ID NO: 1346459 - RNA, 18 nt, Human
gaucagccagugaccaac

SEQ ID NO: 1346460 - RNA, 16 nt, Human
gaucagccccacccug

SEQ ID NO: 1346461 - RNA, 21 nt, Human
gaucagccccacccuggccua

SEQ ID NO: 1346462 - RNA, 22 nt, Human
gaucagccccacccuggccuag

SEQ ID NO: 1346463 - RNA, 23 nt, Human
gaucagccccacccuggccuaga

SEQ ID NO: 1346464 - RNA, 16 nt, Human
gagcucgugggacagu

SEQ ID NO: 1346465 - RNA, 14 nt, Human
gagcuccagccuga

SEQ ID NO: 1346466 - RNA, 14 nt, Human
gagcuccagcuccu

SEQ ID NO: 1346467 - RNA, 19 nt, Human
gagcuccagcuccuuuggg

SEQ ID NO: 1346468 - RNA, 20 nt, Human
gagcuccagcuccuuugggc

SEQ ID NO: 1346469 - RNA, 14 nt, Human
gagcuccagugucc

SEQ ID NO: 1346470 - RNA, 16 nt, Human
gagcuccaguguccug

SEQ ID NO: 1346471 - RNA, 18 nt, Human
gagcuccaguguccugag

SEQ ID NO: 1346472 - RNA, 19 nt, Human
gagcuccaguguccugagc

SEQ ID NO: 1346473 - RNA, 22 nt, Human
gagcuccaguguccugagcuca

SEQ ID NO: 1346474 - RNA, 23 nt, Human
gagcuccaguguccugagcucag

SEQ ID NO: 1346475 - RNA, 17 nt, Human
gagcucccacaagccug

SEQ ID NO: 1346476 - RNA, 19 nt, Human
gagcucccacaagccugag

SEQ ID NO: 1346477 - RNA, 20 nt, Human
gagcucccacaagccugagg

SEQ ID NO: 1346478 - RNA, 16 nt, Human
gagcugauggagaagg

SEQ ID NO: 1346479 - RNA, 15 nt, Human
gagcugauggagaag

SEQ ID NO: 1346480 - RNA, 16 nt, Human
gagcugaggcagcagu

SEQ ID NO: 1346481 - RNA, 17 nt, Human
gagcugaggccacacuc

SEQ ID NO: 1346482 - RNA, 22 nt, Human
gagcugaagguuguggccuuug

SEQ ID NO: 1346483 - RNA, 20 nt, Human
gagcugaagguuguggccuu

SEQ ID NO: 1346484 - RNA, 14 nt, Human
gagcugaccagccg

SEQ ID NO: 1346485 - RNA, 13 nt, Human
gagccugccgagc

SEQ ID NO: 1346486 - RNA, 14 nt, Human
gagccugccgagca

SEQ ID NO: 1346487 - RNA, 15 nt, Human
gagccugccgagcaa

SEQ ID NO: 1346488 - RNA, 16 nt, Human
gagccugccgagcaac

SEQ ID NO: 1346489 - RNA, 18 nt, Human
gagccugccgagcaaccg

SEQ ID NO: 1346490 - RNA, 21 nt, Human
gagccugccgagcaaccgugg

SEQ ID NO: 1346491 - RNA, 23 nt, Human
gagccugccgagcaaccguggcc

SEQ ID NO: 1346492 - RNA, 22 nt, Human
gagccugccgagcaaccguggc

SEQ ID NO: 1346493 - RNA, 20 nt, Human
gagcucaggaaccgaggcag

SEQ ID NO: 1346494 - RNA, 13 nt, Human
gagcucagcgugg

SEQ ID NO: 1346495 - RNA, 23 nt, Human
gagcucagaaaauaucccuccug

SEQ ID NO: 1346496 - RNA, 20 nt, Human
gagcucagaaaauaucccuc

SEQ ID NO: 1346497 - RNA, 21 nt, Human
gagcucaggaaccgaggcagg

SEQ ID NO: 1346498 - RNA, 22 nt, Human
gagcucaggaaccgaggcaggg

SEQ ID NO: 1346499 - RNA, 12 nt, Human
gagcuaggagca

SEQ ID NO: 1346500 - RNA, 17 nt, Human
gagcuaggagcaaagcc

SEQ ID NO: 1346501 - RNA, 18 nt, Human
gagcuaggagcaaagccu

SEQ ID NO: 1346502 - RNA, 19 nt, Human
gagcuaggagcaaagccug

SEQ ID NO: 1346503 - RNA, 21 nt, Human
gagcuaggagcaaagccuguu

SEQ ID NO: 1346504 - RNA, 20 nt, Human
gagcuaggagcaaagccugu

SEQ ID NO: 1346505 - RNA, 13 nt, Human
gagcuauugcugu

SEQ ID NO: 1346506 - RNA, 14 nt, Human
gagcucacaaggca

SEQ ID NO: 1346507 - RNA, 16 nt, Human
gagcucacaaggcagc

SEQ ID NO: 1346508 - RNA, 17 nt, Human
gagcucacaaggcagca

SEQ ID NO: 1346509 - RNA, 18 nt, Human
gagcucacaaggcagcaa

SEQ ID NO: 1346510 - RNA, 20 nt, Human
gagcucacaaggcagcaagg

SEQ ID NO: 1346511 - RNA, 21 nt, Human
gagcucacaaggcagcaaggc

SEQ ID NO: 1346512 - RNA, 23 nt, Human
gagcucacaaggcagcaaggccc

SEQ ID NO: 1346513 - RNA, 22 nt, Human
gagcucacaaggcagcaaggcc

SEQ ID NO: 1346514 - RNA, 19 nt, Human
gagcucagaaaauaucccu

SEQ ID NO: 1346515 - RNA, 14 nt, Human
gagcuuuuguagaa

SEQ ID NO: 1346516 - RNA, 23 nt, Human
gagcuuugucuacuucaaaaguu

SEQ ID NO: 1346517 - RNA, 21 nt, Human
gagcuuugacucaggagccug

SEQ ID NO: 1346518 - RNA, 18 nt, Human
gagcuuugacucaggagc

SEQ ID NO: 1346519 - RNA, 20 nt, Human
gaggaaaaccaagccguggc

SEQ ID NO: 1346520 - RNA, 21 nt, Human
gaggaaaaccaagccguggcu

SEQ ID NO: 1346521 - RNA, 23 nt, Human
gaggaaaaccaagccguggcuuc

SEQ ID NO: 1346522 - RNA, 12 nt, Human
gagcugccugga

SEQ ID NO: 1346523 - RNA, 14 nt, Human
gagcugccuggacc

SEQ ID NO: 1346524 - RNA, 15 nt, Human
gagcugccuggaccc

SEQ ID NO: 1346525 - RNA, 16 nt, Human
gagcugccuggacccg

SEQ ID NO: 1346526 - RNA, 13 nt, Human
gagcuugggaaug

SEQ ID NO: 1346527 - RNA, 17 nt, Human
gagcuuucugaacagcu

SEQ ID NO: 1346528 - RNA, 19 nt, Human
gagcuuucugaacagcugg

SEQ ID NO: 1346529 - RNA, 20 nt, Human
gagcuuucugaacagcuggu

SEQ ID NO: 1346530 - RNA, 22 nt, Human
gagcuuucugaacagcuggugu

SEQ ID NO: 1346531 - RNA, 23 nt, Human
gagcuuucugaacagcuggugua

SEQ ID NO: 1346532 - RNA, 15 nt, Human
gagcuuugacucagg

SEQ ID NO: 1346533 - RNA, 13 nt, Human
gaggaagaauggu

SEQ ID NO: 1346534 - RNA, 13 nt, Human
gaggaaaucccuu

SEQ ID NO: 1346535 - RNA, 15 nt, Human
gaggaaaucccuuca

SEQ ID NO: 1346536 - RNA, 20 nt, Human
gaggaaaucccuucauacuu

SEQ ID NO: 1346537 - RNA, 17 nt, Human
gaggaaaucccuucaua

SEQ ID NO: 1346538 - RNA, 23 nt, Human
gagcccacuguacuugcucuuga

SEQ ID NO: 1346539 - RNA, 11 nt, Human
gagcccacugu

SEQ ID NO: 1346540 - RNA, 21 nt, Human
gagcccacuguacuugcucuu

SEQ ID NO: 1346541 - RNA, 18 nt, Human
gagcccacuguacuugcu

SEQ ID NO: 1346542 - RNA, 20 nt, Human
gagcccacgacacugcagcc

SEQ ID NO: 1346543 - RNA, 14 nt, Human
gagcccacuccauc

SEQ ID NO: 1346544 - RNA, 22 nt, Human
gagcccacuccaucugguagaa

SEQ ID NO: 1346545 - RNA, 22 nt, Human
gagccgauuguccuaucuccag

SEQ ID NO: 1346546 - RNA, 16 nt, Human
gagccggccccaggcu

SEQ ID NO: 1346547 - RNA, 23 nt, Human
gagccggccccaggcucguggac

SEQ ID NO: 1346548 - RNA, 20 nt, Human
gagccggggugggguggcug

SEQ ID NO: 1346549 - RNA, 17 nt, Human
gagccgggucugccucu

SEQ ID NO: 1346550 - RNA, 20 nt, Human
gagccgggucugccucuucu

SEQ ID NO: 1346551 - RNA, 21 nt, Human
gagccgggucugccucuucug

SEQ ID NO: 1346552 - RNA, 22 nt, Human
gagccgggucugccucuucugg

SEQ ID NO: 1346553 - RNA, 19 nt, Human
gagccggguguccccaaca

SEQ ID NO: 1346554 - RNA, 20 nt, Human
gagccggguggaucgccuga

SEQ ID NO: 1346555 - RNA, 22 nt, Human
gagccggggugggguggcugca

SEQ ID NO: 1346556 - RNA, 19 nt, Human
gagccucagucucccuccc

SEQ ID NO: 1346557 - RNA, 13 nt, Human
gagccgugguccu

SEQ ID NO: 1346558 - RNA, 17 nt, Human
gagccgugguccuuugg

SEQ ID NO: 1346559 - RNA, 19 nt, Human
gagccucgcaacccgugcc

SEQ ID NO: 1346560 - RNA, 20 nt, Human
gagccucgcaacccgugcca

SEQ ID NO: 1346561 - RNA, 23 nt, Human
gagccucgcaacccgugccaagu

SEQ ID NO: 1346562 - RNA, 10 nt, Human
gagccugagg

SEQ ID NO: 1346563 - RNA, 12 nt, Human
gagccugaggga

SEQ ID NO: 1346564 - RNA, 15 nt, Human
gagccugagggaucu

SEQ ID NO: 1346565 - RNA, 21 nt, Human
gagccugacccucaucuuucu

SEQ ID NO: 1346566 - RNA, 19 nt, Human
gagccugaauuuuguugcu

SEQ ID NO: 1346567 - RNA, 21 nt, Human
gagccaggaagaucccccaga

SEQ ID NO: 1346568 - RNA, 12 nt, Human
gagccaggagaa

SEQ ID NO: 1346569 - RNA, 13 nt, Human
gagccaggagaag

SEQ ID NO: 1346570 - RNA, 14 nt, Human
gagccaggagaagc

SEQ ID NO: 1346571 - RNA, 15 nt, Human
gagccaggagaagcu

SEQ ID NO: 1346572 - RNA, 21 nt, Human
gagccaggagaagcucagcug

SEQ ID NO: 1346573 - RNA, 20 nt, Human
gagccaggaagaucccccag

SEQ ID NO: 1346574 - RNA, 21 nt, Human
gagccagcuaagggguggggc

SEQ ID NO: 1346575 - RNA, 22 nt, Human
gagccagcuaagggguggggcu

SEQ ID NO: 1346576 - RNA, 14 nt, Human
gagcagcgagccug

SEQ ID NO: 1346577 - RNA, 14 nt, Human
gagccagccgagca

SEQ ID NO: 1346578 - RNA, 19 nt, Human
gagccagccgagcaggagg

SEQ ID NO: 1346579 - RNA, 21 nt, Human
gagccagccgagcaggaggcc

SEQ ID NO: 1346580 - RNA, 20 nt, Human
gagccagccgagcaggaggc

SEQ ID NO: 1346581 - RNA, 18 nt, Human
gagccagcuaaggggugg

SEQ ID NO: 1346582 - RNA, 17 nt, Human
gagccaggagaagcuca

SEQ ID NO: 1346583 - RNA, 12 nt, Human
gagccagggucu

SEQ ID NO: 1346584 - RNA, 15 nt, Human
gagcagcgagccugc

SEQ ID NO: 1346585 - RNA, 23 nt, Human
gagcagagcugauggagaaggaa

SEQ ID NO: 1346586 - RNA, 20 nt, Human
gagcagagcugauggagaag

SEQ ID NO: 1346587 - RNA, 16 nt, Human
gagcagaggggcugaa

SEQ ID NO: 1346588 - RNA, 16 nt, Human
gagcagaggggcagag

SEQ ID NO: 1346589 - RNA, 20 nt, Human
gagcagaggggcagaggccc

SEQ ID NO: 1346590 - RNA, 15 nt, Human
gagcagaggggcuga

SEQ ID NO: 1346591 - RNA, 15 nt, Human
gagauaguuuucauc

SEQ ID NO: 1346592 - RNA, 16 nt, Human
gagauaguuuucaucc

SEQ ID NO: 1346593 - RNA, 17 nt, Human
gagauaguuuucaucca

SEQ ID NO: 1346594 - RNA, 16 nt, Human
gagauacauacagaau

SEQ ID NO: 1346595 - RNA, 13 nt, Human
gagauacauacag

SEQ ID NO: 1346596 - RNA, 22 nt, Human
gagaagcaaguaaaaaggcuaa

SEQ ID NO: 1346597 - RNA, 15 nt, Human
gagaagauaaggucu

SEQ ID NO: 1346598 - RNA, 14 nt, Human
gagaagaacugaaa

SEQ ID NO: 1346599 - RNA, 16 nt, Human
gagaagaacugaaauc

SEQ ID NO: 1346600 - RNA, 20 nt, Human
gagaacccagcccacccccg

SEQ ID NO: 1346601 - RNA, 13 nt, Human
gagaaugagccuc

SEQ ID NO: 1346602 - RNA, 16 nt, Human
gagaagccagcuuguu

SEQ ID NO: 1346603 - RNA, 20 nt, Human
gagaagccagcuuguuuaca

SEQ ID NO: 1346604 - RNA, 12 nt, Human
gagaagccagga

SEQ ID NO: 1346605 - RNA, 22 nt, Human
gagaagccaggaauuucccagg

SEQ ID NO: 1346606 - RNA, 23 nt, Human
gagaagccaggaauuucccagga

SEQ ID NO: 1346607 - RNA, 17 nt, Human
gagaagccaucaccuca

SEQ ID NO: 1346608 - RNA, 19 nt, Human
gagaagccaucaccucaga

SEQ ID NO: 1346609 - RNA, 20 nt, Human
gagaagccaucaccucagau

SEQ ID NO: 1346610 - RNA, 23 nt, Human
gagaagccaucaccucagauggc

SEQ ID NO: 1346611 - RNA, 22 nt, Human
gagaagccaucaccucagaugg

SEQ ID NO: 1346612 - RNA, 14 nt, Human
gagaagcccgugug

SEQ ID NO: 1346613 - RNA, 15 nt, Human
gagaagcccguguga

SEQ ID NO: 1346614 - RNA, 16 nt, Human
gagaagcccgugugag

SEQ ID NO: 1346615 - RNA, 12 nt, Human
gagaagccuuca

SEQ ID NO: 1346616 - RNA, 16 nt, Human
gagacagccaacuaug

SEQ ID NO: 1346617 - RNA, 17 nt, Human
gagacagacuagaaguu

SEQ ID NO: 1346618 - RNA, 15 nt, Human
gagacacuggccccu

SEQ ID NO: 1346619 - RNA, 17 nt, Human
gagacacuggccccuca

SEQ ID NO: 1346620 - RNA, 14 nt, Human
gagacacugguggg

SEQ ID NO: 1346621 - RNA, 17 nt, Human
gagacacugguggggau

SEQ ID NO: 1346622 - RNA, 15 nt, Human
gagacagacuagaag

SEQ ID NO: 1346623 - RNA, 9 nt, Human
gagacagag

SEQ ID NO: 1346624 - RNA, 18 nt, Human
gagacacacugaagaagc

SEQ ID NO: 1346625 - RNA, 11 nt, Human
gagacaaagcu

SEQ ID NO: 1346626 - RNA, 15 nt, Human
gagacacaccugagg

SEQ ID NO: 1346627 - RNA, 21 nt, Human
gagaauuucuaccauuucaga

SEQ ID NO: 1346628 - RNA, 19 nt, Human
gagacaaacaccucccagg

SEQ ID NO: 1346629 - RNA, 20 nt, Human
gagacaaacaccucccagga

SEQ ID NO: 1346630 - RNA, 22 nt, Human
gagacaaacaccucccaggaga

SEQ ID NO: 1346631 - RNA, 17 nt, Human
gagacaacgugcucuuu

SEQ ID NO: 1346632 - RNA, 12 nt, Human
gacuugugucug

SEQ ID NO: 1346633 - RNA, 23 nt, Human
gacuuguuggcguaggcuacaga

SEQ ID NO: 1346634 - RNA, 13 nt, Human
gacuuguguccca

SEQ ID NO: 1346635 - RNA, 18 nt, Human
gacuugugucccaugauc

SEQ ID NO: 1346636 - RNA, 13 nt, Human
gacuugugucucu

SEQ ID NO: 1346637 - RNA, 16 nt, Human
gacuugugucucugug

SEQ ID NO: 1346638 - RNA, 18 nt, Human
gacuugucccgggacacc

SEQ ID NO: 1346639 - RNA, 19 nt, Human
gacucgguuucuccaaacu

SEQ ID NO: 1346640 - RNA, 13 nt, Human
gacucgguuucuc

SEQ ID NO: 1346641 - RNA, 19 nt, Human
gacuuguauauuuuaagaa

SEQ ID NO: 1346642 - RNA, 16 nt, Human
gacuuguuuuugcaca

SEQ ID NO: 1346643 - RNA, 15 nt, Human
gacuuguuuuugcac

SEQ ID NO: 1346644 - RNA, 16 nt, Human
gacucggaaucuauuu

SEQ ID NO: 1346645 - RNA, 14 nt, Human
gacucggggguggg

SEQ ID NO: 1346646 - RNA, 16 nt, Human
gacucgggggugggga

SEQ ID NO: 1346647 - RNA, 12 nt, Human
gagaaaugaaaa

SEQ ID NO: 1346648 - RNA, 23 nt, Human
gagaaaucuggcuucuggccagg

SEQ ID NO: 1346649 - RNA, 17 nt, Human
gagaacaaacagaucga

SEQ ID NO: 1346650 - RNA, 13 nt, Human
gagaaccaaaucu

SEQ ID NO: 1346651 - RNA, 17 nt, Human
gagaaccaaaucuggaa

SEQ ID NO: 1346652 - RNA, 18 nt, Human
gagaaccaaaucuggaag

SEQ ID NO: 1346653 - RNA, 11 nt, Human
gagaaacuucc

SEQ ID NO: 1346654 - RNA, 19 nt, Human
gagaaagaggcaccaggaa

SEQ ID NO: 1346655 - RNA, 18 nt, Human
gagaaauaagugcccucu

SEQ ID NO: 1346656 - RNA, 14 nt, Human
gagaaauacaaaaa

SEQ ID NO: 1346657 - RNA, 15 nt, Human
gagaaauacaaaaau

SEQ ID NO: 1346658 - RNA, 23 nt, Human
gagaaauagcuuaugaaaagaau

SEQ ID NO: 1346659 - RNA, 20 nt, Human
gagaaauauggacacuuaau

SEQ ID NO: 1346660 - RNA, 17 nt, Human
gagaaacaguugguaac

SEQ ID NO: 1346661 - RNA, 18 nt, Human
gagaaacaguugguaacu

SEQ ID NO: 1346662 - RNA, 19 nt, Human
gagaaacaguugguaacuu

SEQ ID NO: 1346663 - RNA, 21 nt, Human
gagaaacaguugguaacuuuu

SEQ ID NO: 1346664 - RNA, 22 nt, Human
gagaaacaguugguaacuuuug

SEQ ID NO: 1346665 - RNA, 13 nt, Human
gagaaaccagcuu

SEQ ID NO: 1346666 - RNA, 14 nt, Human
gagaaaccagcuuc

SEQ ID NO: 1346667 - RNA, 15 nt, Human
gagaaaccagcuucc

SEQ ID NO: 1346668 - RNA, 16 nt, Human
gagaaaccagcuuccu

SEQ ID NO: 1346669 - RNA, 17 nt, Human
gagaaaccagcuuccuu

SEQ ID NO: 1346670 - RNA, 19 nt, Human
gagaaaccagcuuccuuca

SEQ ID NO: 1346671 - RNA, 21 nt, Human
gagaaaccagcuuccuucaga

SEQ ID NO: 1346672 - RNA, 23 nt, Human
gagaaaccagcuuccuucagaga

SEQ ID NO: 1346673 - RNA, 24 nt, Human
gagaaacuuaaauguuauuaucug

SEQ ID NO: 1346674 - RNA, 19 nt, Human
gagagagguugaaaaacaa

SEQ ID NO: 1346675 - RNA, 16 nt, Human
gagagaguugaaccua

SEQ ID NO: 1346676 - RNA, 21 nt, Human
gagagaguuguuuuaauaacu

SEQ ID NO: 1346677 - RNA, 16 nt, Human
gagagcagugcuuuug

SEQ ID NO: 1346678 - RNA, 14 nt, Human
gagagcaucaggcc

SEQ ID NO: 1346679 - RNA, 13 nt, Human
gagagcagugcuu

SEQ ID NO: 1346680 - RNA, 16 nt, Human
gagagccaccaagagg

SEQ ID NO: 1346681 - RNA, 17 nt, Human
gagagagguugaaaaac

SEQ ID NO: 1346682 - RNA, 13 nt, Human
gagagaggccauu

SEQ ID NO: 1346683 - RNA, 21 nt, Human
gagagaggccauucuuuccca

SEQ ID NO: 1346684 - RNA, 22 nt, Human
gagagccagcuaaggggugggg

SEQ ID NO: 1346685 - RNA, 19 nt, Human
gagagacacacugaagaag

SEQ ID NO: 1346686 - RNA, 11 nt, Human
gagacuuguuu

SEQ ID NO: 1346687 - RNA, 21 nt, Human
gagacuuuccauuacaaguau

SEQ ID NO: 1346688 - RNA, 17 nt, Human
gagauacagaauuuuau

SEQ ID NO: 1346689 - RNA, 13 nt, Human
gagaguggcuccu

SEQ ID NO: 1346690 - RNA, 14 nt, Human
gagaguuuccugaa

SEQ ID NO: 1346691 - RNA, 19 nt, Human
gagagugaacaaauuuaca

SEQ ID NO: 1346692 - RNA, 15 nt, Human
gagagugaacaaauu

SEQ ID NO: 1346693 - RNA, 17 nt, Human
gagagguugucuguggc

SEQ ID NO: 1346694 - RNA, 20 nt, Human
gagagguuugcagucccaag

SEQ ID NO: 1346695 - RNA, 20 nt, Human
gagagggcucgagggguggg

SEQ ID NO: 1346696 - RNA, 14 nt, Human
gagaggugggccag

SEQ ID NO: 1346697 - RNA, 22 nt, Human
gagaggugggccagucugugga

SEQ ID NO: 1346698 - RNA, 23 nt, Human
gagaggugggccagucuguggau

SEQ ID NO: 1346699 - RNA, 15 nt, Human
gagagggcgcaggcc

SEQ ID NO: 1346700 - RNA, 16 nt, Human
gagagggcgcaggccg

SEQ ID NO: 1346701 - RNA, 17 nt, Human
gagagggcgcaggccgu

SEQ ID NO: 1346702 - RNA, 18 nt, Human
gagagggcgcaggccgug

SEQ ID NO: 1346703 - RNA, 21 nt, Human
gagagggcucgaggggugggc

SEQ ID NO: 1346704 - RNA, 12 nt, Human
gagacauccagc

SEQ ID NO: 1346705 - RNA, 13 nt, Human
gagacaugugaca

SEQ ID NO: 1346706 - RNA, 11 nt, Human
gagacauccag

SEQ ID NO: 1346707 - RNA, 19 nt, Human
gagacauaaccacugcuuc

SEQ ID NO: 1346708 - RNA, 13 nt, Human
gagacaucagccc

SEQ ID NO: 1346709 - RNA, 14 nt, Human
gagacaugugacau

SEQ ID NO: 1346710 - RNA, 22 nt, Human
gagacauuaacucauuagacug

SEQ ID NO: 1346711 - RNA, 16 nt, Human
gagacauuaacucauu

SEQ ID NO: 1346712 - RNA, 13 nt, Human
gagacagcccagg

SEQ ID NO: 1346713 - RNA, 15 nt, Human
gagacauacuugaag

SEQ ID NO: 1346714 - RNA, 18 nt, Human
gagacauacuugaagggc

SEQ ID NO: 1346715 - RNA, 20 nt, Human
gagacauacuugaagggcca

SEQ ID NO: 1346716 - RNA, 21 nt, Human
gagacauacuugaagggccag

SEQ ID NO: 1346717 - RNA, 13 nt, Human
gagacagcucugc

SEQ ID NO: 1346718 - RNA, 18 nt, Human
gagacagcucugcauacu

SEQ ID NO: 1346719 - RNA, 15 nt, Human
gagacagcucugcau

SEQ ID NO: 1346720 - RNA, 12 nt, Human
gagaccaccucu

SEQ ID NO: 1346721 - RNA, 22 nt, Human
gagaccaagauggcccauccug

SEQ ID NO: 1346722 - RNA, 13 nt, Human
gagaccagggcuc

SEQ ID NO: 1346723 - RNA, 12 nt, Human
gagaccaccagg

SEQ ID NO: 1346724 - RNA, 12 nt, Human
gagaccagggcu

SEQ ID NO: 1346725 - RNA, 15 nt, Human
gagacugcccagcua

SEQ ID NO: 1346726 - RNA, 22 nt, Human
gagacugucucaagagggcacu

SEQ ID NO: 1346727 - RNA, 23 nt, Human
gagacugucucaagagggcacug

SEQ ID NO: 1346728 - RNA, 21 nt, Human
gagacugucuggccccccugg

SEQ ID NO: 1346729 - RNA, 22 nt, Human
gagacugucuggccccccuggu

SEQ ID NO: 1346730 - RNA, 17 nt, Human
gagacugugugugcccu

SEQ ID NO: 1346731 - RNA, 19 nt, Human
gagacugugugugcccucu

SEQ ID NO: 1346732 - RNA, 21 nt, Human
gagacugugugugcccucugg

SEQ ID NO: 1346733 - RNA, 22 nt, Human
gagacugugugugcccucuggg

SEQ ID NO: 1346734 - RNA, 13 nt, Human
gagacuuguauga

SEQ ID NO: 1346735 - RNA, 13 nt, Human
gagacuugggaau

SEQ ID NO: 1346736 - RNA, 23 nt, Human
gagacugugugugcccucugggc

SEQ ID NO: 1346737 - RNA, 14 nt, Human
gagacuguuuggaa

SEQ ID NO: 1346738 - RNA, 16 nt, Human
gagacuguuuggaaau

SEQ ID NO: 1346739 - RNA, 18 nt, Human
gagacuuagggcaccagg

SEQ ID NO: 1346740 - RNA, 21 nt, Human
gagacuuagggcaccaggggu

SEQ ID NO: 1346741 - RNA, 16 nt, Human
gacggguuucaccaug

SEQ ID NO: 1346742 - RNA, 17 nt, Human
gacgggguuucaccaug

SEQ ID NO: 1346743 - RNA, 15 nt, Human
gacgcacugagcaac

SEQ ID NO: 1346744 - RNA, 15 nt, Human
gacgcauaugaguaa

SEQ ID NO: 1346745 - RNA, 22 nt, Human
gacgacacggucggggcaucug

SEQ ID NO: 1346746 - RNA, 18 nt, Human
gacgaggggugucuuggg

SEQ ID NO: 1346747 - RNA, 19 nt, Human
gacgcaagggccugauggg

SEQ ID NO: 1346748 - RNA, 12 nt, Human
gacgcacugagc

SEQ ID NO: 1346749 - RNA, 16 nt, Human
gacggugcccaagcca

SEQ ID NO: 1346750 - RNA, 18 nt, Human
gacggugcccaagccaga

SEQ ID NO: 1346751 - RNA, 23 nt, Human
gacggugcccaagccagaggcug

SEQ ID NO: 1346752 - RNA, 17 nt, Human
gaccuuguuacuucuga

SEQ ID NO: 1346753 - RNA, 16 nt, Human
gaccuuguuacuucug

SEQ ID NO: 1346754 - RNA, 21 nt, Human
gaccuuuccaccacagccagc

SEQ ID NO: 1346755 - RNA, 23 nt, Human
gaccuuuccaccacagccagcac

SEQ ID NO: 1346756 - RNA, 13 nt, Human
gaccuuuccacca

SEQ ID NO: 1346757 - RNA, 17 nt, Human
gaccuuuccaccacagc

SEQ ID NO: 1346758 - RNA, 18 nt, Human
gaccuuuccaccacagcc

SEQ ID NO: 1346759 - RNA, 17 nt, Human
gaccuuuuucugcacua

SEQ ID NO: 1346760 - RNA, 21 nt, Human
gacgacaagugcugaacagug

SEQ ID NO: 1346761 - RNA, 19 nt, Human
gaccugccucggccuccca

SEQ ID NO: 1346762 - RNA, 18 nt, Human
gaccugccugcauaggag

SEQ ID NO: 1346763 - RNA, 12 nt, Human
gaccugccugua

SEQ ID NO: 1346764 - RNA, 15 nt, Human
gaccugcuaggccag

SEQ ID NO: 1346765 - RNA, 17 nt, Human
gaccugcuaggccagag

SEQ ID NO: 1346766 - RNA, 18 nt, Human
gaccugcuaggccagagc

SEQ ID NO: 1346767 - RNA, 19 nt, Human
gaccugcuaggccagagcc

SEQ ID NO: 1346768 - RNA, 23 nt, Human
gaccugcuaggccagagcccacu

SEQ ID NO: 1346769 - RNA, 10 nt, Human
gaccugcuga

SEQ ID NO: 1346770 - RNA, 21 nt, Human
gaccugcuaggccagagccca

SEQ ID NO: 1346771 - RNA, 18 nt, Human
gaccugcugaccugugca

SEQ ID NO: 1346772 - RNA, 19 nt, Human
gaccugcugaccugugcac

SEQ ID NO: 1346773 - RNA, 11 nt, Human
gaccugcugag

SEQ ID NO: 1346774 - RNA, 13 nt, Human
gaccugcugagcu

SEQ ID NO: 1346775 - RNA, 14 nt, Human
gaccugcugagcuc

SEQ ID NO: 1346776 - RNA, 16 nt, Human
gaccugcugagcucug

SEQ ID NO: 1346777 - RNA, 17 nt, Human
gaccugcugagcucuga

SEQ ID NO: 1346778 - RNA, 18 nt, Human
gaccugcugagcucugag

SEQ ID NO: 1346779 - RNA, 22 nt, Human
gaccugcugagcucugagaggc

SEQ ID NO: 1346780 - RNA, 19 nt, Human
gaccugcugagcucugaga

SEQ ID NO: 1346781 - RNA, 20 nt, Human
gaccuggaagggaggugggc

SEQ ID NO: 1346782 - RNA, 13 nt, Human
gacucauucugaa

SEQ ID NO: 1346783 - RNA, 16 nt, Human
gacucauucugaagga

SEQ ID NO: 1346784 - RNA, 17 nt, Human
gacucauucugaaggag

SEQ ID NO: 1346785 - RNA, 12 nt, Human
gacuccaggccc

SEQ ID NO: 1346786 - RNA, 14 nt, Human
gacuccaggcccaa

SEQ ID NO: 1346787 - RNA, 15 nt, Human
gacucagguugucug

SEQ ID NO: 1346788 - RNA, 19 nt, Human
gacucagguggcccuacug

SEQ ID NO: 1346789 - RNA, 15 nt, Human
gacucaguggggagg

SEQ ID NO: 1346790 - RNA, 15 nt, Human
gacucaucuuucccu

SEQ ID NO: 1346791 - RNA, 17 nt, Human
gacucaucuuucccucc

SEQ ID NO: 1346792 - RNA, 18 nt, Human
gacucaucuuucccuccu

SEQ ID NO: 1346793 - RNA, 19 nt, Human
gacucaucuuucccuccuu

SEQ ID NO: 1346794 - RNA, 21 nt, Human
gacucaucuuucccuccuugg

SEQ ID NO: 1346795 - RNA, 22 nt, Human
gacucaucuuucccuccuuggu

SEQ ID NO: 1346796 - RNA, 19 nt, Human
gacuccaggcccaaggcuc

SEQ ID NO: 1346797 - RNA, 18 nt, Human
gacuccaggcccaaggcu

SEQ ID NO: 1346798 - RNA, 13 nt, Human
gacucccauuccu

SEQ ID NO: 1346799 - RNA, 22 nt, Human
gacucccauuccugaagaacca

SEQ ID NO: 1346800 - RNA, 23 nt, Human
gacucccauuccugaagaaccag

SEQ ID NO: 1346801 - RNA, 12 nt, Human
gacuaauuucaa

SEQ ID NO: 1346802 - RNA, 13 nt, Human
gacuaauuucaaa

SEQ ID NO: 1346803 - RNA, 22 nt, Human
gacuaauuucaaaaugcuuuuu

SEQ ID NO: 1346804 - RNA, 19 nt, Human
gacuacagcuggggugcag

SEQ ID NO: 1346805 - RNA, 22 nt, Human
gacuacagcuggggugcaggga

SEQ ID NO: 1346806 - RNA, 18 nt, Human
gacuacuugggagcaccg

SEQ ID NO: 1346807 - RNA, 20 nt, Human
gacuacuugggagcaccgcc

SEQ ID NO: 1346808 - RNA, 20 nt, Human
gacuagaaaauuuaaaacau

SEQ ID NO: 1346809 - RNA, 19 nt, Human
gacuagaccuccagcuguu

SEQ ID NO: 1346810 - RNA, 22 nt, Human
gacucagcucugacauucugau

SEQ ID NO: 1346811 - RNA, 23 nt, Human
gacucagcucugacauucugauu

SEQ ID NO: 1346812 - RNA, 16 nt, Human
gacucaggagccugug

SEQ ID NO: 1346813 - RNA, 15 nt, Human
gacucaggagccugu

SEQ ID NO: 1346814 - RNA, 22 nt, Human
gacucaggcccccaccuggcuc

SEQ ID NO: 1346815 - RNA, 23 nt, Human
gacucaggcccccaccuggcuca

SEQ ID NO: 1346816 - RNA, 18 nt, Human
gacucagggaggcuaaau

SEQ ID NO: 1346817 - RNA, 12 nt, Human
gacucagggcag

SEQ ID NO: 1346818 - RNA, 13 nt, Human
gacucagggcagc

SEQ ID NO: 1346819 - RNA, 16 nt, Human
gacucagggcagcgcc

SEQ ID NO: 1346820 - RNA, 17 nt, Human
gacucagggcagcgcca

SEQ ID NO: 1346821 - RNA, 18 nt, Human
gacucagggcagcgccag

SEQ ID NO: 1346822 - RNA, 23 nt, Human
gacucagggcagcgccaggcuga

SEQ ID NO: 1346823 - RNA, 12 nt, Human
gacucagggcuc

SEQ ID NO: 1346824 - RNA, 13 nt, Human
gacucagggcucc

SEQ ID NO: 1346825 - RNA, 14 nt, Human
gacucagggcuccu

SEQ ID NO: 1346826 - RNA, 16 nt, Human
gacucagggcuccugg

SEQ ID NO: 1346827 - RNA, 17 nt, Human
gacucagggcuccuggg

SEQ ID NO: 1346828 - RNA, 19 nt, Human
gacucagggcuccuggguu

SEQ ID NO: 1346829 - RNA, 20 nt, Human
gaccggcggaccccagccau

SEQ ID NO: 1346830 - RNA, 19 nt, Human
gaccggcggaccccagcca

SEQ ID NO: 1346831 - RNA, 15 nt, Human
gaccggccugccagg

SEQ ID NO: 1346832 - RNA, 16 nt, Human
gaccggccugccagga

SEQ ID NO: 1346833 - RNA, 17 nt, Human
gaccggccugccaggag

SEQ ID NO: 1346834 - RNA, 18 nt, Human
gaccggccugccaggagg

SEQ ID NO: 1346835 - RNA, 15 nt, Human
gaccggcggcucgga

SEQ ID NO: 1346836 - RNA, 19 nt, Human
gaccggccugccaggagga

SEQ ID NO: 1346837 - RNA, 20 nt, Human
gacccuuauugcuguccugg

SEQ ID NO: 1346838 - RNA, 17 nt, Human
gacccuugacaccugcu

SEQ ID NO: 1346839 - RNA, 16 nt, Human
gacccuuauugcuguc

SEQ ID NO: 1346840 - RNA, 17 nt, Human
gaccggagagugggggu

SEQ ID NO: 1346841 - RNA, 16 nt, Human
gaccuaaauggccuca

SEQ ID NO: 1346842 - RNA, 20 nt, Human
gaccuaaauggccucaugug

SEQ ID NO: 1346843 - RNA, 13 nt, Human
gaccuacaggggg

SEQ ID NO: 1346844 - RNA, 20 nt, Human
gaccuacagggggucuggcu

SEQ ID NO: 1346845 - RNA, 21 nt, Human
gaccuacagggggucuggcug

SEQ ID NO: 1346846 - RNA, 22 nt, Human
gaccuacagggggucuggcugg

SEQ ID NO: 1346847 - RNA, 23 nt, Human
gaccuacagggggucuggcuggu

SEQ ID NO: 1346848 - RNA, 21 nt, Human
gaccucaccaagcugcugugg

SEQ ID NO: 1346849 - RNA, 13 nt, Human
gaccucagaagua

SEQ ID NO: 1346850 - RNA, 16 nt, Human
gaccucagaaguaaag

SEQ ID NO: 1346851 - RNA, 22 nt, Human
gaccugccucccuucaugcaug

SEQ ID NO: 1346852 - RNA, 11 nt, Human
gaccugccucc

SEQ ID NO: 1346853 - RNA, 15 nt, Human
gaccugccucggccu

SEQ ID NO: 1346854 - RNA, 21 nt, Human
gaccugccccuccucucugcc

SEQ ID NO: 1346855 - RNA, 23 nt, Human
gaccugauuucugagcauuuaau

SEQ ID NO: 1346856 - RNA, 14 nt, Human
gaccugauccugga

SEQ ID NO: 1346857 - RNA, 15 nt, Human
gaccugauccuggag

SEQ ID NO: 1346858 - RNA, 18 nt, Human
gaccugauccuggaggcc

SEQ ID NO: 1346859 - RNA, 21 nt, Human
gaccugauccuggaggcccag

SEQ ID NO: 1346860 - RNA, 16 nt, Human
gaccugcacuggggag

SEQ ID NO: 1346861 - RNA, 20 nt, Human
gaccugcacuggggagcccg

SEQ ID NO: 1346862 - RNA, 18 nt, Human
gaccucaggcaaucugcc

SEQ ID NO: 1346863 - RNA, 13 nt, Human
gaccugaggcugu

SEQ ID NO: 1346864 - RNA, 14 nt, Human
gaccugaggcugug

SEQ ID NO: 1346865 - RNA, 15 nt, Human
gaccugaggcugugg

SEQ ID NO: 1346866 - RNA, 17 nt, Human
gaccugaggcugugguc

SEQ ID NO: 1346867 - RNA, 22 nt, Human
gacccaggacaggauccaggcc

SEQ ID NO: 1346868 - RNA, 13 nt, Human
gacccaggacagg

SEQ ID NO: 1346869 - RNA, 12 nt, Human
gacccaggacag

SEQ ID NO: 1346870 - RNA, 15 nt, Human
gacccaggaaaggca

SEQ ID NO: 1346871 - RNA, 21 nt, Human
gacccaggaaaggcaggauug

SEQ ID NO: 1346872 - RNA, 14 nt, Human
gacccacaugccau

SEQ ID NO: 1346873 - RNA, 23 nt, Human
gacccacaugccauuuguacuga

SEQ ID NO: 1346874 - RNA, 12 nt, Human
gacccacaugcu

SEQ ID NO: 1346875 - RNA, 16 nt, Human
gacccagcggacacac

SEQ ID NO: 1346876 - RNA, 20 nt, Human
gaccaagauggcccauccug

SEQ ID NO: 1346877 - RNA, 23 nt, Human
gaccccucauagcccucacccug

SEQ ID NO: 1346878 - RNA, 22 nt, Human
gaccccucauagcccucacccu

SEQ ID NO: 1346879 - RNA, 11 nt, Human
gaccccagggc

SEQ ID NO: 1346880 - RNA, 13 nt, Human
gaccccagggcac

SEQ ID NO: 1346881 - RNA, 14 nt, Human
gaccccagggcaca

SEQ ID NO: 1346882 - RNA, 15 nt, Human
gaccccagggcacag

SEQ ID NO: 1346883 - RNA, 16 nt, Human
gaccccagggcacagg

SEQ ID NO: 1346884 - RNA, 17 nt, Human
gaccccagggcacagga

SEQ ID NO: 1346885 - RNA, 18 nt, Human
gaccccagggcacaggag

SEQ ID NO: 1346886 - RNA, 19 nt, Human
gaccccagggcacaggagc

SEQ ID NO: 1346887 - RNA, 21 nt, Human
gaccccagggcacaggagcua

SEQ ID NO: 1346888 - RNA, 19 nt, Human
gaccccaucaccuacucac

SEQ ID NO: 1346889 - RNA, 12 nt, Human
gacaccugcccu

SEQ ID NO: 1346890 - RNA, 11 nt, Human
gacaccugccc

SEQ ID NO: 1346891 - RNA, 10 nt, Human
gacaccugcc

SEQ ID NO: 1346892 - RNA, 9 nt, Human
gacaccugc

SEQ ID NO: 1346893 - RNA, 15 nt, Human
gacaccuaggcuagg

SEQ ID NO: 1346894 - RNA, 16 nt, Human
gacaccuaggcuaggg

SEQ ID NO: 1346895 - RNA, 20 nt, Human
gacaccuaggcuaggguggg

SEQ ID NO: 1346896 - RNA, 16 nt, Human
gacaccuaacucuucu

SEQ ID NO: 1346897 - RNA, 18 nt, Human
gacaccuaacucuucuuu

SEQ ID NO: 1346898 - RNA, 13 nt, Human
gacaccucuuuuu

SEQ ID NO: 1346899 - RNA, 17 nt, Human
gacaccuacugaguggc

SEQ ID NO: 1346900 - RNA, 15 nt, Human
gacaccuaacucuuc

SEQ ID NO: 1346901 - RNA, 15 nt, Human
gacacccuucuccca

SEQ ID NO: 1346902 - RNA, 19 nt, Human
gacacccuucucccacucu

SEQ ID NO: 1346903 - RNA, 23 nt, Human
gacacccuucucccacucuccua

SEQ ID NO: 1346904 - RNA, 12 nt, Human
gacacaggccug

SEQ ID NO: 1346905 - RNA, 13 nt, Human
gacacaggccugu

SEQ ID NO: 1346906 - RNA, 14 nt, Human
gacacaggccugug

SEQ ID NO: 1346907 - RNA, 15 nt, Human
gacacaggccugugu

SEQ ID NO: 1346908 - RNA, 16 nt, Human
gacacaggccugugua

SEQ ID NO: 1346909 - RNA, 17 nt, Human
gacacaggccuguguag

SEQ ID NO: 1346910 - RNA, 17 nt, Human
gacacagugaccauacu

SEQ ID NO: 1346911 - RNA, 13 nt, Human
gacacaguuccug

SEQ ID NO: 1346912 - RNA, 21 nt, Human
gacacaggccuguguagcugu

SEQ ID NO: 1346913 - RNA, 14 nt, Human
gacacaguuccugg

SEQ ID NO: 1346914 - RNA, 15 nt, Human
gacacaguuccuggg

SEQ ID NO: 1346915 - RNA, 19 nt, Human
gacacauacucauuuuuca

SEQ ID NO: 1346916 - RNA, 16 nt, Human
gacacaguuccuggga

SEQ ID NO: 1346917 - RNA, 23 nt, Human
gacaccugcccugcccugccacc

SEQ ID NO: 1346918 - RNA, 18 nt, Human
gacaccugggagaaaucu

SEQ ID NO: 1346919 - RNA, 14 nt, Human
gacaccuuggacau

SEQ ID NO: 1346920 - RNA, 12 nt, Human
gacaccugggag

SEQ ID NO: 1346921 - RNA, 14 nt, Human
gacaccuuuagguu

SEQ ID NO: 1346922 - RNA, 22 nt, Human
gacaccugcccugcccugccac

SEQ ID NO: 1346923 - RNA, 16 nt, Human
gacaccugcccugccc

SEQ ID NO: 1346924 - RNA, 15 nt, Human
gacaccugcccugcc

SEQ ID NO: 1346925 - RNA, 14 nt, Human
gacaccugcccugc

SEQ ID NO: 1346926 - RNA, 13 nt, Human
gacaccugcccug

SEQ ID NO: 1346927 - RNA, 19 nt, Human
gacaccuuuuuucaacagu

SEQ ID NO: 1346928 - RNA, 22 nt, Human
gacacggucggggcaucuggcc

SEQ ID NO: 1346929 - RNA, 15 nt, Human
gacaagcucacagac

SEQ ID NO: 1346930 - RNA, 21 nt, Human
gacaagcauggucccacaucc

SEQ ID NO: 1346931 - RNA, 16 nt, Human
gacaagccagaacuug

SEQ ID NO: 1346932 - RNA, 13 nt, Human
gacaaucaugugu

SEQ ID NO: 1346933 - RNA, 14 nt, Human
gacaaucaugugug

SEQ ID NO: 1346934 - RNA, 22 nt, Human
gacaagugaugcuaaaaccuga

SEQ ID NO: 1346935 - RNA, 20 nt, Human
gacaagugcugaacagugga

SEQ ID NO: 1346936 - RNA, 15 nt, Human
gacaaguggacucag

SEQ ID NO: 1346937 - RNA, 20 nt, Human
gacaaguggacucagggcag

SEQ ID NO: 1346938 - RNA, 14 nt, Human
gacaauaaaacauu

SEQ ID NO: 1346939 - RNA, 15 nt, Human
gacaaucaugugugu

SEQ ID NO: 1346940 - RNA, 13 nt, Human
gacaauuuauaau

SEQ ID NO: 1346941 - RNA, 17 nt, Human
gacacacacagacuauu

SEQ ID NO: 1346942 - RNA, 22 nt, Human
gacaugggacauuugcucaugg

SEQ ID NO: 1346943 - RNA, 20 nt, Human
gacauggagguucuaaggcc

SEQ ID NO: 1346944 - RNA, 21 nt, Human
gacauggagguucuaaggccu

SEQ ID NO: 1346945 - RNA, 13 nt, Human
gacaugaagccac

SEQ ID NO: 1346946 - RNA, 16 nt, Human
gacaugaagcuguugu

SEQ ID NO: 1346947 - RNA, 22 nt, Human
gacaugaagccacgggugccag

SEQ ID NO: 1346948 - RNA, 19 nt, Human
gacaugcgguagccagcac

SEQ ID NO: 1346949 - RNA, 22 nt, Human
gacaugcgguagccagcacaca

SEQ ID NO: 1346950 - RNA, 23 nt, Human
gacaugcgguagccagcacacag

SEQ ID NO: 1346951 - RNA, 14 nt, Human
gacauggagguucu

SEQ ID NO: 1346952 - RNA, 15 nt, Human
gacauggagguucua

SEQ ID NO: 1346953 - RNA, 16 nt, Human
gacauggagguucuaa

SEQ ID NO: 1346954 - RNA, 19 nt, Human
gacauggagguucuaaggc

SEQ ID NO: 1346955 - RNA, 14 nt, Human
gaccaaaaguuaca

SEQ ID NO: 1346956 - RNA, 19 nt, Human
gaccaaaaguuacauguuu

SEQ ID NO: 1346957 - RNA, 16 nt, Human
gaccaaagggagucug

SEQ ID NO: 1346958 - RNA, 21 nt, Human
gaccaaagggagucugccagg

SEQ ID NO: 1346959 - RNA, 15 nt, Human
gacaugucuguucua

SEQ ID NO: 1346960 - RNA, 17 nt, Human
gacaugucuguucuaca

SEQ ID NO: 1346961 - RNA, 18 nt, Human
gacaucaaaaaaggcagu

SEQ ID NO: 1346962 - RNA, 19 nt, Human
gacaucaaaaaaggcaguu

SEQ ID NO: 1346963 - RNA, 14 nt, Human
gacaucaacagaua

SEQ ID NO: 1346964 - RNA, 17 nt, Human
gacaucuugucauuuuu

SEQ ID NO: 1346965 - RNA, 20 nt, Human
gacaugaagauucuuuccca

SEQ ID NO: 1346966 - RNA, 21 nt, Human
gacaggcuggaagauagcugu

SEQ ID NO: 1346967 - RNA, 22 nt, Human
gacaggcuggaagauagcugug

SEQ ID NO: 1346968 - RNA, 18 nt, Human
gacaggcucuuagcagcu

SEQ ID NO: 1346969 - RNA, 19 nt, Human
gacaggcucuuagcagcuu

SEQ ID NO: 1346970 - RNA, 13 nt, Human
gacaggcucuuag

SEQ ID NO: 1346971 - RNA, 17 nt, Human
gacaggcucuuagcagc

SEQ ID NO: 1346972 - RNA, 12 nt, Human
gacaggcuggcu

SEQ ID NO: 1346973 - RNA, 14 nt, Human
gacaggcuggcucc

SEQ ID NO: 1346974 - RNA, 21 nt, Human
gacaggcuggcuccagaugca

SEQ ID NO: 1346975 - RNA, 22 nt, Human
gacaggcuggcuccagaugcag

SEQ ID NO: 1346976 - RNA, 17 nt, Human
gacauacccccuccccc

SEQ ID NO: 1346977 - RNA, 15 nt, Human
gacaggauccaggcc

SEQ ID NO: 1346978 - RNA, 13 nt, Human
gacaggauccagg

SEQ ID NO: 1346979 - RNA, 18 nt, Human
gacaggauccaggccggc

SEQ ID NO: 1346980 - RNA, 23 nt, Human
gacaggaugguucccuugaugaa

SEQ ID NO: 1346981 - RNA, 13 nt, Human
gacagcugugccu

SEQ ID NO: 1346982 - RNA, 14 nt, Human
gacagcugugccuc

SEQ ID NO: 1346983 - RNA, 15 nt, Human
gacagcugugccucg

SEQ ID NO: 1346984 - RNA, 17 nt, Human
gacagcugugccucgcu

SEQ ID NO: 1346985 - RNA, 19 nt, Human
gacagcugugccucgcucc

SEQ ID NO: 1346986 - RNA, 21 nt, Human
gacagcuucucauccugcagg

SEQ ID NO: 1346987 - RNA, 22 nt, Human
gacagcuucucauccugcaggc

SEQ ID NO: 1346988 - RNA, 19 nt, Human
gacaggacuaacacucaga

SEQ ID NO: 1346989 - RNA, 21 nt, Human
gacaggacuaacacucagaag

SEQ ID NO: 1346990 - RNA, 22 nt, Human
gacaggacuaacacucagaagc

SEQ ID NO: 1346991 - RNA, 23 nt, Human
gacaggacuaacacucagaagcc

SEQ ID NO: 1346992 - RNA, 24 nt, Human
gacaggacuaacacucagaagccu

SEQ ID NO: 1346993 - RNA, 19 nt, Human
gacagccaacuauggccug

SEQ ID NO: 1346994 - RNA, 12 nt, Human
gacagcaugaga

SEQ ID NO: 1346995 - RNA, 16 nt, Human
gacagaugaggcuuuc

SEQ ID NO: 1346996 - RNA, 19 nt, Human
gacagaugaaugccgugga

SEQ ID NO: 1346997 - RNA, 20 nt, Human
gacagaugaaugccguggau

SEQ ID NO: 1346998 - RNA, 15 nt, Human
gacagaugaggcuuu

SEQ ID NO: 1346999 - RNA, 20 nt, Human
gacagaugaggcuuuccaug

SEQ ID NO: 1347000 - RNA, 22 nt, Human
gacagccaacuauggccugugg

SEQ ID NO: 1347001 - RNA, 19 nt, Human
gacagaucucugcuuugga

SEQ ID NO: 1347002 - RNA, 21 nt, Human
gacagaucucugcuuuggaaa

SEQ ID NO: 1347003 - RNA, 23 nt, Human
gacagaucucugcuuuggaaauc

SEQ ID NO: 1347004 - RNA, 19 nt, Human
gacacggucggggcaucug

SEQ ID NO: 1347005 - RNA, 18 nt, Human
gaagaucccccagaaaag

SEQ ID NO: 1347006 - RNA, 15 nt, Human
gaagaucccccagaa

SEQ ID NO: 1347007 - RNA, 14 nt, Human
gaagaucccccaga

SEQ ID NO: 1347008 - RNA, 22 nt, Human
gaagauccugcggguggggcuu

SEQ ID NO: 1347009 - RNA, 14 nt, Human
gaagauccugcggg

SEQ ID NO: 1347010 - RNA, 21 nt, Human
gaagaucuaaauaaaaugcua

SEQ ID NO: 1347011 - RNA, 15 nt, Human
gaagauaaacgugga

SEQ ID NO: 1347012 - RNA, 14 nt, Human
gaagauauuuuucc

SEQ ID NO: 1347013 - RNA, 22 nt, Human
gaagauugagauguguucacaa

SEQ ID NO: 1347014 - RNA, 17 nt, Human
gaagauugagauguguu

SEQ ID NO: 1347015 - RNA, 14 nt, Human
gaagauucuuuccc

SEQ ID NO: 1347016 - RNA, 17 nt, Human
gaagauguagaggagaa

SEQ ID NO: 1347017 - RNA, 13 nt, Human
gaagaugacugag

SEQ ID NO: 1347018 - RNA, 14 nt, Human
gaagaugacugagg

SEQ ID NO: 1347019 - RNA, 19 nt, Human
gaagaaguuucaucauuuu

SEQ ID NO: 1347020 - RNA, 15 nt, Human
gaagagccuuccacc

SEQ ID NO: 1347021 - RNA, 14 nt, Human
gaagaaggugaaua

SEQ ID NO: 1347022 - RNA, 16 nt, Human
gaagaaggugggagga

SEQ ID NO: 1347023 - RNA, 16 nt, Human
gaagaagggcacccua

SEQ ID NO: 1347024 - RNA, 17 nt, Human
gaagagccuuccaccca

SEQ ID NO: 1347025 - RNA, 19 nt, Human
gaagagccuuccacccagg

SEQ ID NO: 1347026 - RNA, 22 nt, Human
gaagagcgagagaucaaagaug

SEQ ID NO: 1347027 - RNA, 22 nt, Human
gaagagccuuccacccaggggc

SEQ ID NO: 1347028 - RNA, 10 nt, Human
gaagaggacu

SEQ ID NO: 1347029 - RNA, 22 nt, Human
gaacuugaaauauccugcuuga

SEQ ID NO: 1347030 - RNA, 15 nt, Human
gaacuugaacugauu

SEQ ID NO: 1347031 - RNA, 16 nt, Human
gaacuugaacugauuc

SEQ ID NO: 1347032 - RNA, 14 nt, Human
gaaccacaagacug

SEQ ID NO: 1347033 - RNA, 15 nt, Human
gaaccacaagacugc

SEQ ID NO: 1347034 - RNA, 19 nt, Human
gaaccaauaaaauaauuuu

SEQ ID NO: 1347035 - RNA, 16 nt, Human
gaacucccuuucaaca

SEQ ID NO: 1347036 - RNA, 15 nt, Human
gaacuccuaaaucaa

SEQ ID NO: 1347037 - RNA, 16 nt, Human
gaacuccuaaaucaag

SEQ ID NO: 1347038 - RNA, 13 nt, Human
gaacuccugaccu

SEQ ID NO: 1347039 - RNA, 20 nt, Human
gaacuugugucccuaaugug

SEQ ID NO: 1347040 - RNA, 15 nt, Human
gaacuuguuuucugg

SEQ ID NO: 1347041 - RNA, 24 nt, Human
gaacuuuccacauucagagcuuac

SEQ ID NO: 1347042 - RNA, 22 nt, Human
gaacuuggggaguuaagaccug

SEQ ID NO: 1347043 - RNA, 14 nt, Human
gaagaaagaagaca

SEQ ID NO: 1347044 - RNA, 23 nt, Human
gaagaaagaggugaccccagggc

SEQ ID NO: 1347045 - RNA, 17 nt, Human
gaagaaagaggugaccc

SEQ ID NO: 1347046 - RNA, 15 nt, Human
gaagaaaguggaaaa

SEQ ID NO: 1347047 - RNA, 13 nt, Human
gaagaaccagucc

SEQ ID NO: 1347048 - RNA, 23 nt, Human
gaaguccaagcauuuagauguau

SEQ ID NO: 1347049 - RNA, 14 nt, Human
gaaguccaaugugg

SEQ ID NO: 1347050 - RNA, 17 nt, Human
gaaguccaauguggcaa

SEQ ID NO: 1347051 - RNA, 18 nt, Human
gaagucauaccaaugaaa

SEQ ID NO: 1347052 - RNA, 15 nt, Human
gaaguccggccccag

SEQ ID NO: 1347053 - RNA, 22 nt, Human
gaagucguccuuacuccugugg

SEQ ID NO: 1347054 - RNA, 23 nt, Human
gaagucguccuuacuccuguggg

SEQ ID NO: 1347055 - RNA, 24 nt, Human
gaagucguccuuacuccuguggga

SEQ ID NO: 1347056 - RNA, 16 nt, Human
gaagucacagggcagu

SEQ ID NO: 1347057 - RNA, 20 nt, Human
gaagucacagggcaguaccu

SEQ ID NO: 1347058 - RNA, 21 nt, Human
gaagucacauuccugaacagg

SEQ ID NO: 1347059 - RNA, 15 nt, Human
gaagucacugcacag

SEQ ID NO: 1347060 - RNA, 16 nt, Human
gaagucacauuccuga

SEQ ID NO: 1347061 - RNA, 20 nt, Human
gaagucacauuccugaacag

SEQ ID NO: 1347062 - RNA, 14 nt, Human
gaaguaacuacagu

SEQ ID NO: 1347063 - RNA, 19 nt, Human
gaaggugauguugccaucc

SEQ ID NO: 1347064 - RNA, 21 nt, Human
gaaggugauuuaagggcccag

SEQ ID NO: 1347065 - RNA, 21 nt, Human
gaaggugaggagcuugaaacc

SEQ ID NO: 1347066 - RNA, 19 nt, Human
gaaguauuuugcuggaaua

SEQ ID NO: 1347067 - RNA, 21 nt, Human
gaaguauuuuuucaguauuau

SEQ ID NO: 1347068 - RNA, 15 nt, Human
gaagucaaagcaagg

SEQ ID NO: 1347069 - RNA, 16 nt, Human
gaagucaaagcaagga

SEQ ID NO: 1347070 - RNA, 19 nt, Human
gaagucaauuacucuauaa

SEQ ID NO: 1347071 - RNA, 13 nt, Human
gaagucacagggc

SEQ ID NO: 1347072 - RNA, 15 nt, Human
gaagucacagggcag

SEQ ID NO: 1347073 - RNA, 20 nt, Human
gaagguauaucuagguuuau

SEQ ID NO: 1347074 - RNA, 14 nt, Human
gaagggggcggccu

SEQ ID NO: 1347075 - RNA, 20 nt, Human
gaaggugaaacauuuucucc

SEQ ID NO: 1347076 - RNA, 12 nt, Human
gaaggugaauag

SEQ ID NO: 1347077 - RNA, 22 nt, Human
gaaggugaauagccauauuugu

SEQ ID NO: 1347078 - RNA, 22 nt, Human
gaaggggccucaccgagugggg

SEQ ID NO: 1347079 - RNA, 19 nt, Human
gaaggcauuugcagggucc

SEQ ID NO: 1347080 - RNA, 22 nt, Human
gaaggcagggggaagguggggu

SEQ ID NO: 1347081 - RNA, 13 nt, Human
gaaggcauggcgg

SEQ ID NO: 1347082 - RNA, 17 nt, Human
gaaggcauuugcagggu

SEQ ID NO: 1347083 - RNA, 23 nt, Human
gaaggcauuugcaggguccucuu

SEQ ID NO: 1347084 - RNA, 14 nt, Human
gaaggggccagagg

SEQ ID NO: 1347085 - RNA, 16 nt, Human
gaaggggccagaggcu

SEQ ID NO: 1347086 - RNA, 17 nt, Human
gaaggggccagaggcuc

SEQ ID NO: 1347087 - RNA, 21 nt, Human
gaaggaucccaugagcuccuu

SEQ ID NO: 1347088 - RNA, 18 nt, Human
gaaggcagggagggccug

SEQ ID NO: 1347089 - RNA, 16 nt, Human
gaaggauucugcuggc

SEQ ID NO: 1347090 - RNA, 21 nt, Human
gaaggauucugcuggccucug

SEQ ID NO: 1347091 - RNA, 20 nt, Human
gaaggcagggagggccuggg

SEQ ID NO: 1347092 - RNA, 22 nt, Human
gaaggcagggagggccugggcc

SEQ ID NO: 1347093 - RNA, 23 nt, Human
gaaggcagggagggccugggccc

SEQ ID NO: 1347094 - RNA, 21 nt, Human
gaaggcagggggaaggugggg

SEQ ID NO: 1347095 - RNA, 22 nt, Human
gaaggaaggcuccaucuccagu

SEQ ID NO: 1347096 - RNA, 20 nt, Human
gaaggaaggcagggaggagg

SEQ ID NO: 1347097 - RNA, 19 nt, Human
gaaggaaggcagggaggag

SEQ ID NO: 1347098 - RNA, 18 nt, Human
gaaggaaggcagggagga

SEQ ID NO: 1347099 - RNA, 19 nt, Human
gaaggaggacccaggacag

SEQ ID NO: 1347100 - RNA, 18 nt, Human
gaaggaggacccaggaca

SEQ ID NO: 1347101 - RNA, 15 nt, Human
gaaggaggagccugu

SEQ ID NO: 1347102 - RNA, 16 nt, Human
gaaggaggagccuguc

SEQ ID NO: 1347103 - RNA, 22 nt, Human
gaaggaggagccuguccugccu

SEQ ID NO: 1347104 - RNA, 17 nt, Human
gaaggaggacccaggac

SEQ ID NO: 1347105 - RNA, 16 nt, Human
gaaggaggacccagga

SEQ ID NO: 1347106 - RNA, 15 nt, Human
gaaggaggacccagg

SEQ ID NO: 1347107 - RNA, 14 nt, Human
gaaggaggacccag

SEQ ID NO: 1347108 - RNA, 13 nt, Human
gaaggaggaccca

SEQ ID NO: 1347109 - RNA, 23 nt, Human
gaaggacccggaggggccuggca

SEQ ID NO: 1347110 - RNA, 22 nt, Human
gaaggacccggaggggccuggc

SEQ ID NO: 1347111 - RNA, 22 nt, Human
gaaggaauaaauugcuccuuga

SEQ ID NO: 1347112 - RNA, 13 nt, Human
gaagccaaagagu

SEQ ID NO: 1347113 - RNA, 19 nt, Human
gaagcauuuguuucuacuu

SEQ ID NO: 1347114 - RNA, 13 nt, Human
gaagcauuuguuu

SEQ ID NO: 1347115 - RNA, 16 nt, Human
gaagcuguugugugag

SEQ ID NO: 1347116 - RNA, 12 nt, Human
gaagccuggggg

SEQ ID NO: 1347117 - RNA, 13 nt, Human
gaagccugggggc

SEQ ID NO: 1347118 - RNA, 16 nt, Human
gaagccugggggccug

SEQ ID NO: 1347119 - RNA, 17 nt, Human
gaagccugggggccugg

SEQ ID NO: 1347120 - RNA, 18 nt, Human
gaagccugggggccuggc

SEQ ID NO: 1347121 - RNA, 19 nt, Human
gaagccugggggccuggcu

SEQ ID NO: 1347122 - RNA, 20 nt, Human
gaagccugggggccuggcug

SEQ ID NO: 1347123 - RNA, 22 nt, Human
gaagccugggggccuggcuggc

SEQ ID NO: 1347124 - RNA, 21 nt, Human
gaagccugggggccuggcugg

SEQ ID NO: 1347125 - RNA, 16 nt, Human
gaagccuucaagcucu

SEQ ID NO: 1347126 - RNA, 17 nt, Human
gaagccuucaagcucug

SEQ ID NO: 1347127 - RNA, 18 nt, Human
gaagccuucaagcucuga

SEQ ID NO: 1347128 - RNA, 19 nt, Human
gaagccuucaagcucugag

SEQ ID NO: 1347129 - RNA, 22 nt, Human
gaagccuucaagcucugaggga

SEQ ID NO: 1347130 - RNA, 20 nt, Human
gaagccuucaagcucugagg

SEQ ID NO: 1347131 - RNA, 10 nt, Human
gaagccuucc

SEQ ID NO: 1347132 - RNA, 23 nt, Human
gaagccuuccccuuauccucccu

SEQ ID NO: 1347133 - RNA, 14 nt, Human
gaaauaaacgucuu

SEQ ID NO: 1347134 - RNA, 23 nt, Human
gaaauaaaaggaagccaaagagu

SEQ ID NO: 1347135 - RNA, 16 nt, Human
gaaauaaacgucuuaa

SEQ ID NO: 1347136 - RNA, 17 nt, Human
gaaauaaacgucuuaaa

SEQ ID NO: 1347137 - RNA, 18 nt, Human
gaaauaaacgucuuaaau

SEQ ID NO: 1347138 - RNA, 21 nt, Human
gaaauaaacgucuuaaauauu

SEQ ID NO: 1347139 - RNA, 17 nt, Human
gaaauaaaggaugugau

SEQ ID NO: 1347140 - RNA, 20 nt, Human
gaaauaaaggaugugauugu

SEQ ID NO: 1347141 - RNA, 11 nt, Human
gaaauauauau

SEQ ID NO: 1347142 - RNA, 12 nt, Human
gaaauauauauu

SEQ ID NO: 1347143 - RNA, 13 nt, Human
gaaauauauauua

SEQ ID NO: 1347144 - RNA, 14 nt, Human
gaaauauauauuau

SEQ ID NO: 1347145 - RNA, 22 nt, Human
gaaauauauauuauacuuguaa

SEQ ID NO: 1347146 - RNA, 15 nt, Human
gaaauauauauuaua

SEQ ID NO: 1347147 - RNA, 15 nt, Human
gaaauauuuauuuua

SEQ ID NO: 1347148 - RNA, 16 nt, Human
gaaauauuuauuuuaa

SEQ ID NO: 1347149 - RNA, 15 nt, Human
gaaauauccugcuug

SEQ ID NO: 1347150 - RNA, 15 nt, Human
gaaaugaauuaaagu

SEQ ID NO: 1347151 - RNA, 13 nt, Human
gaaauauuuauuu

SEQ ID NO: 1347152 - RNA, 22 nt, Human
gaaaugaggccauggacucugu

SEQ ID NO: 1347153 - RNA, 23 nt, Human
gaaaugugguagccucacuuuua

SEQ ID NO: 1347154 - RNA, 17 nt, Human
gaaauuaccuguggaua

SEQ ID NO: 1347155 - RNA, 18 nt, Human
gaaauuaccuguggauau

SEQ ID NO: 1347156 - RNA, 22 nt, Human
gaaauucccuucaucuggaacc

SEQ ID NO: 1347157 - RNA, 21 nt, Human
gaaauucccuucaucuggaac

SEQ ID NO: 1347158 - RNA, 17 nt, Human
gaaauucccuucaucug

SEQ ID NO: 1347159 - RNA, 12 nt, Human
gaaauuccaaag

SEQ ID NO: 1347160 - RNA, 23 nt, Human
gaaauuaugugacauuuuacauu

SEQ ID NO: 1347161 - RNA, 22 nt, Human
gaaauuaugugacauuuuacau

SEQ ID NO: 1347162 - RNA, 23 nt, Human
gaaauuaguacuccccuccuuga

SEQ ID NO: 1347163 - RNA, 19 nt, Human
gaaauuaccuguggauauu

SEQ ID NO: 1347164 - RNA, 21 nt, Human
gaaauuuccugggagcuuuug

SEQ ID NO: 1347165 - RNA, 22 nt, Human
gaacaguuguguuugaagcaca

SEQ ID NO: 1347166 - RNA, 17 nt, Human
gaacaucccuuuuucaa

SEQ ID NO: 1347167 - RNA, 17 nt, Human
gaacaucugaguccugg

SEQ ID NO: 1347168 - RNA, 21 nt, Human
gaacaucugaguccuggauga

SEQ ID NO: 1347169 - RNA, 18 nt, Human
gaacaucugaguccugga

SEQ ID NO: 1347170 - RNA, 19 nt, Human
gaacauggccuaagggcca

SEQ ID NO: 1347171 - RNA, 15 nt, Human
gaacauggggaggag

SEQ ID NO: 1347172 - RNA, 19 nt, Human
gaacaugugagagguuuga

SEQ ID NO: 1347173 - RNA, 16 nt, Human
gaaccaaaucuggaag

SEQ ID NO: 1347174 - RNA, 17 nt, Human
gaaccaaaucuggaagc

SEQ ID NO: 1347175 - RNA, 24 nt, Human
gaaccaacaaccucaacugccuac

SEQ ID NO: 1347176 - RNA, 19 nt, Human
gaaccaacaaguaaauauu

SEQ ID NO: 1347177 - RNA, 15 nt, Human
gaaccaacacuaaca

SEQ ID NO: 1347178 - RNA, 24 nt, Human
gaacaguuaccucugccucagaaa

SEQ ID NO: 1347179 - RNA, 20 nt, Human
gaacaguuguguuugaagca

SEQ ID NO: 1347180 - RNA, 20 nt, Human
gaacagggaaaauaggcagg

SEQ ID NO: 1347181 - RNA, 21 nt, Human
gaacagggaaaauaggcagga

SEQ ID NO: 1347182 - RNA, 17 nt, Human
gaacaggauauucucac

SEQ ID NO: 1347183 - RNA, 20 nt, Human
gaacagcugguguagcuaca

SEQ ID NO: 1347184 - RNA, 22 nt, Human
gaacagcugguguagcuacaga

SEQ ID NO: 1347185 - RNA, 23 nt, Human
gaacagcugguguagcuacagag

SEQ ID NO: 1347186 - RNA, 24 nt, Human
gaacagcugguguagcuacagaga

SEQ ID NO: 1347187 - RNA, 15 nt, Human
gaacagcuguaaucu

SEQ ID NO: 1347188 - RNA, 15 nt, Human
gaacagcugguguag

SEQ ID NO: 1347189 - RNA, 19 nt, Human
gaacagcugguguagcuac

SEQ ID NO: 1347190 - RNA, 20 nt, Human
gaaagucagccauaucucca

SEQ ID NO: 1347191 - RNA, 19 nt, Human
gaaagucagauucuugcau

SEQ ID NO: 1347192 - RNA, 13 nt, Human
gaaagucuguccu

SEQ ID NO: 1347193 - RNA, 14 nt, Human
gaaagucuguccuu

SEQ ID NO: 1347194 - RNA, 23 nt, Human
gaaaggaagcauuguaaaauaau

SEQ ID NO: 1347195 - RNA, 21 nt, Human
gaaaggaagcauuguaaaaua

SEQ ID NO: 1347196 - RNA, 16 nt, Human
gaaaggaagcugugcg

SEQ ID NO: 1347197 - RNA, 12 nt, Human
gaaaggagaugu

SEQ ID NO: 1347198 - RNA, 23 nt, Human
gaaagccaaggagucacugagac

SEQ ID NO: 1347199 - RNA, 14 nt, Human
gaaaguuuacagga

SEQ ID NO: 1347200 - RNA, 16 nt, Human
gaaaguuuacaggaaa

SEQ ID NO: 1347201 - RNA, 16 nt, Human
gaaauaaaaggaagcc

SEQ ID NO: 1347202 - RNA, 17 nt, Human
gaaauaaaaggaagcca

SEQ ID NO: 1347203 - RNA, 18 nt, Human
gaaauaaaaggaagccaa

SEQ ID NO: 1347204 - RNA, 19 nt, Human
gaaauaaaaggaagccaaa

SEQ ID NO: 1347205 - RNA, 22 nt, Human
gaaagugagcaguguuagcuua

SEQ ID NO: 1347206 - RNA, 16 nt, Human
gaaagugagcaguguu

SEQ ID NO: 1347207 - RNA, 15 nt, Human
gaaagugagcagugu

SEQ ID NO: 1347208 - RNA, 13 nt, Human
gaaagugccugac

SEQ ID NO: 1347209 - RNA, 15 nt, Human
gaaagugccuuucag

SEQ ID NO: 1347210 - RNA, 16 nt, Human
gaaagugccuuucagg

SEQ ID NO: 1347211 - RNA, 15 nt, Human
gaaagucuguccuug

SEQ ID NO: 1347212 - RNA, 16 nt, Human
gaaagucuguccuuga

SEQ ID NO: 1347213 - RNA, 23 nt, Human
gaaagucuguccuugaaggacua

SEQ ID NO: 1347214 - RNA, 17 nt, Human
gaaagugccuuucagga

SEQ ID NO: 1347215 - RNA, 21 nt, Human
gaaagugccuuucaggaucua

SEQ ID NO: 1347216 - RNA, 22 nt, Human
gaaagugccuuucaggaucuau

SEQ ID NO: 1347217 - RNA, 17 nt, Human
gaaagugggcaaaagcu

SEQ ID NO: 1347218 - RNA, 18 nt, Human
gaaagugggcaaaagcuu

SEQ ID NO: 1347219 - RNA, 11 nt, Human
gaaaguguauu

SEQ ID NO: 1347220 - RNA, 15 nt, Human
gaaaguguauuugga

SEQ ID NO: 1347221 - RNA, 23 nt, Human
gaaaguguauuuggaaauaaagu

SEQ ID NO: 1347222 - RNA, 21 nt, Human
gaaacgagacuuuccauuaca

SEQ ID NO: 1347223 - RNA, 20 nt, Human
gaaacuaggugcauauuuau

SEQ ID NO: 1347224 - RNA, 23 nt, Human
gaaacgagacuuuccauuacaag

SEQ ID NO: 1347225 - RNA, 18 nt, Human
gaaacucauagacacuga

SEQ ID NO: 1347226 - RNA, 17 nt, Human
gaaaccuuccacccagu

SEQ ID NO: 1347227 - RNA, 15 nt, Human
gaaaccuuccaccca

SEQ ID NO: 1347228 - RNA, 12 nt, Human
gaaaaauguagg

SEQ ID NO: 1347229 - RNA, 14 nt, Human
gaaaaauguaggag

SEQ ID NO: 1347230 - RNA, 17 nt, Human
gaaaaauguaggagacu

SEQ ID NO: 1347231 - RNA, 20 nt, Human
gaaaaauguguauuuuaaga

SEQ ID NO: 1347232 - RNA, 20 nt, Human
gaaaaaucuaagugauauaa

SEQ ID NO: 1347233 - RNA, 21 nt, Human
gaaaaacuuuggaaccagacu

SEQ ID NO: 1347234 - RNA, 22 nt, Human
gaaaaacuuuggaaccagacuc

SEQ ID NO: 1347235 - RNA, 14 nt, Human
gaaaaagaagaauc

SEQ ID NO: 1347236 - RNA, 15 nt, Human
gaaaaagacauucag

SEQ ID NO: 1347237 - RNA, 12 nt, Human
gaaaaagaagca

SEQ ID NO: 1347238 - RNA, 22 nt, Human
gaaagauggcugugccucugcc

SEQ ID NO: 1347239 - RNA, 14 nt, Human
gaaagauaacuagg

SEQ ID NO: 1347240 - RNA, 17 nt, Human
gaaagauaauucacugu

SEQ ID NO: 1347241 - RNA, 16 nt, Human
gaaagagauacagagg

SEQ ID NO: 1347242 - RNA, 17 nt, Human
gaaagaguccauuguuu

SEQ ID NO: 1347243 - RNA, 14 nt, Human
gaaagcagaacagu

SEQ ID NO: 1347244 - RNA, 13 nt, Human
gaaagcagaacag

SEQ ID NO: 1347245 - RNA, 23 nt, Human
gaaagauggcugugccucugccu

SEQ ID NO: 1347246 - RNA, 12 nt, Human
gaaagcaaagca

SEQ ID NO: 1347247 - RNA, 15 nt, Human
gaaagcaaagcacag

SEQ ID NO: 1347248 - RNA, 16 nt, Human
gaaagcaaagcacaga

SEQ ID NO: 1347249 - RNA, 18 nt, Human
gaaagcaaagcacagaga

SEQ ID NO: 1347250 - RNA, 20 nt, Human
gaaagcaagaaucagagaag

SEQ ID NO: 1347251 - RNA, 18 nt, Human
gaaacugaggaauuuucu

SEQ ID NO: 1347252 - RNA, 22 nt, Human
gaaacugaggaauuuucuuugu

SEQ ID NO: 1347253 - RNA, 15 nt, Human
gaaacugcagggaaa

SEQ ID NO: 1347254 - RNA, 22 nt, Human
cuuuuaaaugauugaauuauau

SEQ ID NO: 1347255 - RNA, 23 nt, Human
cuuuuaaagaaaaaaauugaaau

SEQ ID NO: 1347256 - RNA, 15 nt, Human
cuuuuaaagaaaaaa

SEQ ID NO: 1347257 - RNA, 21 nt, Human
cuuuuaaagaaaaaaauugaa

SEQ ID NO: 1347258 - RNA, 22 nt, Human
cuuuuaaagaaaaaaauugaaa

SEQ ID NO: 1347259 - RNA, 15 nt, Human
cuuuuaaaagauuuu

SEQ ID NO: 1347260 - RNA, 17 nt, Human
cuuuuaaaccauuuucu

SEQ ID NO: 1347261 - RNA, 12 nt, Human
cuuuuaaacugu

SEQ ID NO: 1347262 - RNA, 13 nt, Human
cuuuuaaacugug

SEQ ID NO: 1347263 - RNA, 15 nt, Human
cuuuuaaacugugua

SEQ ID NO: 1347264 - RNA, 22 nt, Human
cuuuuaacuguuguagaagaca

SEQ ID NO: 1347265 - RNA, 22 nt, Human
cuuuuaacagagucugaaccua

SEQ ID NO: 1347266 - RNA, 22 nt, Human
cuuuggaguccccucaccuccu

SEQ ID NO: 1347267 - RNA, 14 nt, Human
cuuuggaguccccu

SEQ ID NO: 1347268 - RNA, 16 nt, Human
cuuuggaguccccuca

SEQ ID NO: 1347269 - RNA, 18 nt, Human
cuuuggaguccccucacc

SEQ ID NO: 1347270 - RNA, 18 nt, Human
cuuuuaaaacacuuccau

SEQ ID NO: 1347271 - RNA, 12 nt, Human
cuuuggacuugu

SEQ ID NO: 1347272 - RNA, 17 nt, Human
cuuuggaccuaauccaa

SEQ ID NO: 1347273 - RNA, 14 nt, Human
cuuuggaaccagac

SEQ ID NO: 1347274 - RNA, 15 nt, Human
cuuuggaaccagacu

SEQ ID NO: 1347275 - RNA, 16 nt, Human
cuuuggaaccagacuc

SEQ ID NO: 1347276 - RNA, 21 nt, Human
cuuuggaaccagacucuugcc

SEQ ID NO: 1347277 - RNA, 23 nt, Human
cuuuggaaccagacucuugccug

SEQ ID NO: 1347278 - RNA, 22 nt, Human
cuuuggaaccagacucuugccu

SEQ ID NO: 1347279 - RNA, 16 nt, Human
cuuuggaccuaaucca

SEQ ID NO: 1347280 - RNA, 12 nt, Human
cuuuucacugcu

SEQ ID NO: 1347281 - RNA, 15 nt, Human
cuuuuaaugaacaaa

SEQ ID NO: 1347282 - RNA, 16 nt, Human
cuuuuaaugaacaaau

SEQ ID NO: 1347283 - RNA, 18 nt, Human
cuuuuaaugaacaaaugg

SEQ ID NO: 1347284 - RNA, 21 nt, Human
cuuuucacauccauuuccccu

SEQ ID NO: 1347285 - RNA, 18 nt, Human
cuuuuccucucucccgga

SEQ ID NO: 1347286 - RNA, 15 nt, Human
cuuuuccuucccaaa

SEQ ID NO: 1347287 - RNA, 16 nt, Human
cuuuuccuucccuuuu

SEQ ID NO: 1347288 - RNA, 22 nt, Human
cuuuuccuucccuuuucuguuc

SEQ ID NO: 1347289 - RNA, 20 nt, Human
cuuuuccuucccuuuucugu

SEQ ID NO: 1347290 - RNA, 16 nt, Human
cuuuucacugcuggcu

SEQ ID NO: 1347291 - RNA, 13 nt, Human
cuuuucauuugug

SEQ ID NO: 1347292 - RNA, 14 nt, Human
cuuuucccuucuuu

SEQ ID NO: 1347293 - RNA, 19 nt, Human
cuuuucccuuugugaguca

SEQ ID NO: 1347294 - RNA, 16 nt, Human
cuuuuccucucucccg

SEQ ID NO: 1347295 - RNA, 16 nt, Human
cuuuuuucaaaagaaa

SEQ ID NO: 1347296 - RNA, 19 nt, Human
cuuuuuuaucaugugaaau

SEQ ID NO: 1347297 - RNA, 22 nt, Human
cuuuuuccaacucagaaauuca

SEQ ID NO: 1347298 - RNA, 21 nt, Human
cuuuuucuccagcugggcucu

SEQ ID NO: 1347299 - RNA, 13 nt, Human
cuuuuuccagagg

SEQ ID NO: 1347300 - RNA, 20 nt, Human
cuuuuuauauauauauauaa

SEQ ID NO: 1347301 - RNA, 12 nt, Human
cuuuuucauuua

SEQ ID NO: 1347302 - RNA, 13 nt, Human
cuuuuucauuuau

SEQ ID NO: 1347303 - RNA, 15 nt, Human
cuuuuucauuuaucu

SEQ ID NO: 1347304 - RNA, 23 nt, Human
cuuuuucauuuaucuauaauuua

SEQ ID NO: 1347305 - RNA, 14 nt, Human
cuuuuuauauauau

SEQ ID NO: 1347306 - RNA, 17 nt, Human
cuuuuuccaacaagaag

SEQ ID NO: 1347307 - RNA, 23 nt, Human
cuuuuuccaacuuggcugcagga

SEQ ID NO: 1347308 - RNA, 15 nt, Human
cuuuuuaauaugcuu

SEQ ID NO: 1347309 - RNA, 16 nt, Human
cuuuuuaauaugcuua

SEQ ID NO: 1347310 - RNA, 22 nt, Human
cuuuuuacccauuuguucauau

SEQ ID NO: 1347311 - RNA, 15 nt, Human
cuuuuuaccuuucau

SEQ ID NO: 1347312 - RNA, 20 nt, Human
cuuuuuaccaaguuucaggu

SEQ ID NO: 1347313 - RNA, 17 nt, Human
cuuuuuaccuuucauac

SEQ ID NO: 1347314 - RNA, 16 nt, Human
cuuuuuaccuuucaua

SEQ ID NO: 1347315 - RNA, 18 nt, Human
cuuuugcaacuuaauacu

SEQ ID NO: 1347316 - RNA, 18 nt, Human
cuuuuuaaaguucaaacu

SEQ ID NO: 1347317 - RNA, 20 nt, Human
cuuuuuaaauguaaagauau

SEQ ID NO: 1347318 - RNA, 21 nt, Human
cuuuuuaaauguaaagauauu

SEQ ID NO: 1347319 - RNA, 14 nt, Human
cuuuuuaauaugcu

SEQ ID NO: 1347320 - RNA, 15 nt, Human
cuuuugauaugcaua

SEQ ID NO: 1347321 - RNA, 23 nt, Human
cuuuugauaugcauauuuguuua

SEQ ID NO: 1347322 - RNA, 16 nt, Human
cuuuugauauuaaauu

SEQ ID NO: 1347323 - RNA, 13 nt, Human
cuuuugauauuaa

SEQ ID NO: 1347324 - RNA, 20 nt, Human
cuuuugcaaagaaagaaaaa

SEQ ID NO: 1347325 - RNA, 21 nt, Human
cuuuugcaaagaaagaaaaaa

SEQ ID NO: 1347326 - RNA, 15 nt, Human
cuuuugcaaccagga

SEQ ID NO: 1347327 - RNA, 16 nt, Human
cuuuugcaaccaggaa

SEQ ID NO: 1347328 - RNA, 17 nt, Human
cuuuugcaaccaggaac

SEQ ID NO: 1347329 - RNA, 24 nt, Human
cuuuugcaaccaggaacagcaaau

SEQ ID NO: 1347330 - RNA, 16 nt, Human
cuuuucuaacagaaag

SEQ ID NO: 1347331 - RNA, 20 nt, Human
cuuuucuaacagaaagcaug

SEQ ID NO: 1347332 - RNA, 21 nt, Human
cuuucuuucaauaaaacgcag

SEQ ID NO: 1347333 - RNA, 13 nt, Human
cuuucuuucuuua

SEQ ID NO: 1347334 - RNA, 15 nt, Human
cuuucuuuauuuuga

SEQ ID NO: 1347335 - RNA, 18 nt, Human
cuuucuuuguuuggcugg

SEQ ID NO: 1347336 - RNA, 22 nt, Human
cuuucuuuucuggaauguaauc

SEQ ID NO: 1347337 - RNA, 20 nt, Human
cuuugaaauuauguaaauua

SEQ ID NO: 1347338 - RNA, 18 nt, Human
cuuugaaauugaaccuuu

SEQ ID NO: 1347339 - RNA, 23 nt, Human
cuuugaaauugaaccuuugugcc

SEQ ID NO: 1347340 - RNA, 20 nt, Human
cuuugaaauugaaccuuugu

SEQ ID NO: 1347341 - RNA, 16 nt, Human
cuuugaaggggccuca

SEQ ID NO: 1347342 - RNA, 13 nt, Human
cuuucuuccaaac

SEQ ID NO: 1347343 - RNA, 19 nt, Human
cuuucuuccaaacaggcuc

SEQ ID NO: 1347344 - RNA, 22 nt, Human
cuuucuuccaaacaggcucaga

SEQ ID NO: 1347345 - RNA, 23 nt, Human
cuuucuguuccaaauucaguuuc

SEQ ID NO: 1347346 - RNA, 21 nt, Human
cuuugccacccucaugcugug

SEQ ID NO: 1347347 - RNA, 13 nt, Human
cuuugccagguga

SEQ ID NO: 1347348 - RNA, 16 nt, Human
cuuugcacugauauau

SEQ ID NO: 1347349 - RNA, 21 nt, Human
cuuugccaggugacugucugg

SEQ ID NO: 1347350 - RNA, 22 nt, Human
cuuugccaggugacugucuggg

SEQ ID NO: 1347351 - RNA, 15 nt, Human
cuuugcccagaaaga

SEQ ID NO: 1347352 - RNA, 18 nt, Human
cuuugcccaguuggagac

SEQ ID NO: 1347353 - RNA, 18 nt, Human
cuuugcccugcugcccuc

SEQ ID NO: 1347354 - RNA, 20 nt, Human
cuuugcccugcugcccuccc

SEQ ID NO: 1347355 - RNA, 22 nt, Human
cuuugcccugcugcccuccccc

SEQ ID NO: 1347356 - RNA, 19 nt, Human
cuuugcccuucuuucuacc

SEQ ID NO: 1347357 - RNA, 16 nt, Human
cuuugcccuucuuucu

SEQ ID NO: 1347358 - RNA, 11 nt, Human
cuuugccucaa

SEQ ID NO: 1347359 - RNA, 22 nt, Human
cuuuggaaaguacacucugcug

SEQ ID NO: 1347360 - RNA, 23 nt, Human
cuuuggaaaguacacucugcugu

SEQ ID NO: 1347361 - RNA, 24 nt, Human
cuuuggaaaguacacucugcuguu

SEQ ID NO: 1347362 - RNA, 23 nt, Human
cuuugaauguguuucacaguuug

SEQ ID NO: 1347363 - RNA, 18 nt, Human
cuuugaauguguuucaca

SEQ ID NO: 1347364 - RNA, 18 nt, Human
cuuugaaggggccucacc

SEQ ID NO: 1347365 - RNA, 13 nt, Human
cuuugaaguagcu

SEQ ID NO: 1347366 - RNA, 17 nt, Human
cuuugaaguagcucuuu

SEQ ID NO: 1347367 - RNA, 16 nt, Human
cuuugaagucauacca

SEQ ID NO: 1347368 - RNA, 11 nt, Human
cuuugaauaaa

SEQ ID NO: 1347369 - RNA, 21 nt, Human
cuuugaaguuagcuuuaacuu

SEQ ID NO: 1347370 - RNA, 12 nt, Human
cuuugaauaaau

SEQ ID NO: 1347371 - RNA, 14 nt, Human
cuuugaauaaaugu

SEQ ID NO: 1347372 - RNA, 16 nt, Human
cuuugaauaaauguca

SEQ ID NO: 1347373 - RNA, 18 nt, Human
cuuugaauaaaugucacu

SEQ ID NO: 1347374 - RNA, 19 nt, Human
cuuugaauaaaugucacuu

SEQ ID NO: 1347375 - RNA, 18 nt, Human
cuuugaauccucucucug

SEQ ID NO: 1347376 - RNA, 19 nt, Human
cuuugaauccucucucugu

SEQ ID NO: 1347377 - RNA, 23 nt, Human
cuuugaauccucucucuguguua

SEQ ID NO: 1347378 - RNA, 14 nt, Human
cuuugaauguguuu

SEQ ID NO: 1347379 - RNA, 16 nt, Human
cuuugaauguguuuca

SEQ ID NO: 1347380 - RNA, 19 nt, Human
cuuuauuuuguguuuagga

SEQ ID NO: 1347381 - RNA, 22 nt, Human
cuuguguguaugcacaugaacu

SEQ ID NO: 1347382 - RNA, 13 nt, Human
cuuuauuuugaga

SEQ ID NO: 1347383 - RNA, 14 nt, Human
cuugucaugugaca

SEQ ID NO: 1347384 - RNA, 17 nt, Human
cuugugucucugugcuu

SEQ ID NO: 1347385 - RNA, 18 nt, Human
cuugugucucugugcuuu

SEQ ID NO: 1347386 - RNA, 21 nt, Human
cuugugucucugugcuuuuaa

SEQ ID NO: 1347387 - RNA, 10 nt, Human
cuugugucug

SEQ ID NO: 1347388 - RNA, 20 nt, Human
cuuguguguaugcacaugaa

SEQ ID NO: 1347389 - RNA, 21 nt, Human
cuuguguguaugcacaugaac

SEQ ID NO: 1347390 - RNA, 11 nt, Human
cuuuauuuuga

SEQ ID NO: 1347391 - RNA, 19 nt, Human
cuuucaaaaccuuuugaaa

SEQ ID NO: 1347392 - RNA, 20 nt, Human
cuuucaaaggagaaugaauc

SEQ ID NO: 1347393 - RNA, 19 nt, Human
cuuucaagcagucgugccu

SEQ ID NO: 1347394 - RNA, 20 nt, Human
cuuucaagcagucgugccug

SEQ ID NO: 1347395 - RNA, 22 nt, Human
cuuucaagcagucgugccugug

SEQ ID NO: 1347396 - RNA, 23 nt, Human
cuuucaagcagucgugccugugu

SEQ ID NO: 1347397 - RNA, 20 nt, Human
cuuucaagucaguucuguga

SEQ ID NO: 1347398 - RNA, 17 nt, Human
cuuucaauacagauaua

SEQ ID NO: 1347399 - RNA, 17 nt, Human
cuuucauguaaacugug

SEQ ID NO: 1347400 - RNA, 19 nt, Human
cuuucauguaaacugugca

SEQ ID NO: 1347401 - RNA, 20 nt, Human
cuuucauguaaacugugcac

SEQ ID NO: 1347402 - RNA, 21 nt, Human
cuuucauguaaacugugcacc

SEQ ID NO: 1347403 - RNA, 17 nt, Human
cuuucccauggggaggg

SEQ ID NO: 1347404 - RNA, 18 nt, Human
cuuuccccaccagaugcu

SEQ ID NO: 1347405 - RNA, 22 nt, Human
cuuuccccaccagaugcugaaa

SEQ ID NO: 1347406 - RNA, 19 nt, Human
cuuuccccaccagaugcug

SEQ ID NO: 1347407 - RNA, 15 nt, Human
cuuuccccaugucuc

SEQ ID NO: 1347408 - RNA, 20 nt, Human
cuuuccccaugucucgacuc

SEQ ID NO: 1347409 - RNA, 21 nt, Human
cuuuccccaugucucgacuca

SEQ ID NO: 1347410 - RNA, 19 nt, Human
cuuuccucaaaacuucaga

SEQ ID NO: 1347411 - RNA, 21 nt, Human
cuuuccgguguuuaagacauu

SEQ ID NO: 1347412 - RNA, 21 nt, Human
cuuucccuuguagcuccuccc

SEQ ID NO: 1347413 - RNA, 23 nt, Human
cuuucccuuguagcuccuccccu

SEQ ID NO: 1347414 - RNA, 18 nt, Human
cuuucauuccuucagauu

SEQ ID NO: 1347415 - RNA, 21 nt, Human
cuuuccacggagccacuccuc

SEQ ID NO: 1347416 - RNA, 22 nt, Human
cuuuccacggagccacuccucu

SEQ ID NO: 1347417 - RNA, 13 nt, Human
cuuguauuaugug

SEQ ID NO: 1347418 - RNA, 18 nt, Human
cuuguauccccugcaggc

SEQ ID NO: 1347419 - RNA, 21 nt, Human
cuuguaugaaagauggcugug

SEQ ID NO: 1347420 - RNA, 14 nt, Human
cuuguaagacccuu

SEQ ID NO: 1347421 - RNA, 13 nt, Human
cuuguaaauauaa

SEQ ID NO: 1347422 - RNA, 14 nt, Human
cuuguaaauauaaa

SEQ ID NO: 1347423 - RNA, 16 nt, Human
cuuguaaauauaaaga

SEQ ID NO: 1347424 - RNA, 17 nt, Human
cuuguaaauauaaagac

SEQ ID NO: 1347425 - RNA, 23 nt, Human
cuuguaaauuauuaauuuaugca

SEQ ID NO: 1347426 - RNA, 14 nt, Human
cuuguaacuaaaau

SEQ ID NO: 1347427 - RNA, 16 nt, Human
cuuguaacuaaaauaa

SEQ ID NO: 1347428 - RNA, 17 nt, Human
cuuguaacuaaaauaau

SEQ ID NO: 1347429 - RNA, 22 nt, Human
cuuguaacuaaaauaauuuugu

SEQ ID NO: 1347430 - RNA, 19 nt, Human
cuuguaaauauaaagacgu

SEQ ID NO: 1347431 - RNA, 18 nt, Human
cuuguauuauguguguuu

SEQ ID NO: 1347432 - RNA, 16 nt, Human
cuuguauuccaagcau

SEQ ID NO: 1347433 - RNA, 20 nt, Human
cuuguauuccaagcauauaa

SEQ ID NO: 1347434 - RNA, 23 nt, Human
cuugucacgccagacuucccacg

SEQ ID NO: 1347435 - RNA, 15 nt, Human
cuugucacugguaga

SEQ ID NO: 1347436 - RNA, 23 nt, Human
cuugucacugguagaccaaaaua

SEQ ID NO: 1347437 - RNA, 22 nt, Human
cuugucacugguagaccaaaau

SEQ ID NO: 1347438 - RNA, 17 nt, Human
cuugucaggagugugug

SEQ ID NO: 1347439 - RNA, 21 nt, Human
cuugucaggagugugugugag

SEQ ID NO: 1347440 - RNA, 20 nt, Human
cuugucaggaguguguguga

SEQ ID NO: 1347441 - RNA, 18 nt, Human
cuuguaaaggaauuuaaa

SEQ ID NO: 1347442 - RNA, 23 nt, Human
cuugguuuuuacugcucugagaa

SEQ ID NO: 1347443 - RNA, 12 nt, Human
cuuguaaauaua

SEQ ID NO: 1347444 - RNA, 18 nt, Human
cuuguaaaaauuaaaagu

SEQ ID NO: 1347445 - RNA, 21 nt, Human
cuugguuuuuacugcucugag

SEQ ID NO: 1347446 - RNA, 22 nt, Human
cuugguuuuuacugcucugaga

SEQ ID NO: 1347447 - RNA, 21 nt, Human
cuugguuuugcuacauaauua

SEQ ID NO: 1347448 - RNA, 20 nt, Human
cuugguuuuuacugcucuga

SEQ ID NO: 1347449 - RNA, 22 nt, Human
cuuggggaguuaagaccuggca

SEQ ID NO: 1347450 - RNA, 23 nt, Human
cuuggggaguuaagaccuggcag

SEQ ID NO: 1347451 - RNA, 20 nt, Human
cuuggggaguuuaggguggg

SEQ ID NO: 1347452 - RNA, 21 nt, Human
cuuggggaguuuagggugggg

SEQ ID NO: 1347453 - RNA, 15 nt, Human
cuuggggccuaugca

SEQ ID NO: 1347454 - RNA, 19 nt, Human
cuuggggauucuuccaucu

SEQ ID NO: 1347455 - RNA, 21 nt, Human
cuuggggauucuuccaucuga

SEQ ID NO: 1347456 - RNA, 13 nt, Human
cuuggcugcagga

SEQ ID NO: 1347457 - RNA, 12 nt, Human
cuuggcuggugu

SEQ ID NO: 1347458 - RNA, 13 nt, Human
cuuggcuggugug

SEQ ID NO: 1347459 - RNA, 14 nt, Human
cuuggcuggugugg

SEQ ID NO: 1347460 - RNA, 20 nt, Human
cuuggcuggugugguacaga

SEQ ID NO: 1347461 - RNA, 21 nt, Human
cuuggcuggugugguacagag

SEQ ID NO: 1347462 - RNA, 22 nt, Human
cuuggcuggugugguacagaga

SEQ ID NO: 1347463 - RNA, 23 nt, Human
cuuggcuggugugguacagagaa

SEQ ID NO: 1347464 - RNA, 17 nt, Human
cuugccaaauauaaaua

SEQ ID NO: 1347465 - RNA, 13 nt, Human
cuugcauguaacg

SEQ ID NO: 1347466 - RNA, 13 nt, Human
cuugcuggaagac

SEQ ID NO: 1347467 - RNA, 15 nt, Human
cuugcuuuuaaaauc

SEQ ID NO: 1347468 - RNA, 13 nt, Human
cuugcuuuucaug

SEQ ID NO: 1347469 - RNA, 14 nt, Human
cuugcuuuucaugc

SEQ ID NO: 1347470 - RNA, 15 nt, Human
cuuggacauccuccu

SEQ ID NO: 1347471 - RNA, 16 nt, Human
cuuggacauccuccuc

SEQ ID NO: 1347472 - RNA, 17 nt, Human
cuuggacauccuccucc

SEQ ID NO: 1347473 - RNA, 19 nt, Human
cuuggacauccuccuccca

SEQ ID NO: 1347474 - RNA, 20 nt, Human
cuuggacauccuccucccac

SEQ ID NO: 1347475 - RNA, 21 nt, Human
cuuggacauccuccucccacc

SEQ ID NO: 1347476 - RNA, 22 nt, Human
cuuggacauccuccucccaccc

SEQ ID NO: 1347477 - RNA, 16 nt, Human
cuugcuggucuaguca

SEQ ID NO: 1347478 - RNA, 18 nt, Human
cuugcuuggggaacuugu

SEQ ID NO: 1347479 - RNA, 21 nt, Human
cuugcuuucuuuguuuggcug

SEQ ID NO: 1347480 - RNA, 23 nt, Human
cuuggcucacacucgacaugaaa

SEQ ID NO: 1347481 - RNA, 18 nt, Human
cuuggcucgaaucucugu

SEQ ID NO: 1347482 - RNA, 19 nt, Human
cuuggcucgaaucucugug

SEQ ID NO: 1347483 - RNA, 20 nt, Human
cuuggcucgaaucucugugc

SEQ ID NO: 1347484 - RNA, 21 nt, Human
cuuggcucgaaucucugugcc

SEQ ID NO: 1347485 - RNA, 22 nt, Human
cuuggcucgaaucucugugccu

SEQ ID NO: 1347486 - RNA, 19 nt, Human
cuuggagcuauuuuccagg

SEQ ID NO: 1347487 - RNA, 20 nt, Human
cuuggagcuauuuuccaggc

SEQ ID NO: 1347488 - RNA, 16 nt, Human
cuuggauacuuggauu

SEQ ID NO: 1347489 - RNA, 18 nt, Human
cuuggauguaccugcccc

SEQ ID NO: 1347490 - RNA, 17 nt, Human
cuuggauuccugauagu

SEQ ID NO: 1347491 - RNA, 16 nt, Human
cuuggauucuuuccau

SEQ ID NO: 1347492 - RNA, 17 nt, Human
cuuggauucuuuccauu

SEQ ID NO: 1347493 - RNA, 18 nt, Human
cuuggauucuuuccauuu

SEQ ID NO: 1347494 - RNA, 21 nt, Human
cuuggauucuuuccauuugca

SEQ ID NO: 1347495 - RNA, 18 nt, Human
cuugcuuuucaugcaaac

SEQ ID NO: 1347496 - RNA, 20 nt, Human
cuugaacccgggaggcagag

SEQ ID NO: 1347497 - RNA, 19 nt, Human
cuugaacccgggaggcaga

SEQ ID NO: 1347498 - RNA, 14 nt, Human
cuugaacugauuca

SEQ ID NO: 1347499 - RNA, 13 nt, Human
cuugaccaggcug

SEQ ID NO: 1347500 - RNA, 20 nt, Human
cuugaaauuaagaaggcaaa

SEQ ID NO: 1347501 - RNA, 13 nt, Human
cuugaaauuuuaa

SEQ ID NO: 1347502 - RNA, 14 nt, Human
cuugaaauuuuaac

SEQ ID NO: 1347503 - RNA, 13 nt, Human
cuucuuuccacag

SEQ ID NO: 1347504 - RNA, 19 nt, Human
cuucuuuccacagaagcuc

SEQ ID NO: 1347505 - RNA, 17 nt, Human
cuucuuucauuucuucu

SEQ ID NO: 1347506 - RNA, 16 nt, Human
cuucuuucugucuuua

SEQ ID NO: 1347507 - RNA, 17 nt, Human
cuucuuucugucuuuaa

SEQ ID NO: 1347508 - RNA, 16 nt, Human
cuucuuucuagaaaga

SEQ ID NO: 1347509 - RNA, 20 nt, Human
cuucuuuuuucaaaagaaag

SEQ ID NO: 1347510 - RNA, 19 nt, Human
cuucuuuuuucaaaagaaa

SEQ ID NO: 1347511 - RNA, 17 nt, Human
cuucuuuuuuugugaug

SEQ ID NO: 1347512 - RNA, 18 nt, Human
cuugaaauauccugcuug

SEQ ID NO: 1347513 - RNA, 19 nt, Human
cuugaaauauccugcuuga

SEQ ID NO: 1347514 - RNA, 21 nt, Human
cuugaaauuaagaaggcaaaa

SEQ ID NO: 1347515 - RNA, 19 nt, Human
cuucuuuuaaaccauuuuc

SEQ ID NO: 1347516 - RNA, 13 nt, Human
cuucuuuugcucu

SEQ ID NO: 1347517 - RNA, 14 nt, Human
cuucuuuugcucuu

SEQ ID NO: 1347518 - RNA, 13 nt, Human
cuucuuuugugaa

SEQ ID NO: 1347519 - RNA, 18 nt, Human
cuugaggacacaugucca

SEQ ID NO: 1347520 - RNA, 17 nt, Human
cuugaggacacaugucc

SEQ ID NO: 1347521 - RNA, 18 nt, Human
cuugagccaggaggccug

SEQ ID NO: 1347522 - RNA, 18 nt, Human
cuugagggcaagagccac

SEQ ID NO: 1347523 - RNA, 18 nt, Human
cuugaggucucagccccu

SEQ ID NO: 1347524 - RNA, 16 nt, Human
cuugaggacacauguc

SEQ ID NO: 1347525 - RNA, 15 nt, Human
cuugaggacacaugu

SEQ ID NO: 1347526 - RNA, 14 nt, Human
cuugaggacacaug

SEQ ID NO: 1347527 - RNA, 13 nt, Human
cuugaggacacau

SEQ ID NO: 1347528 - RNA, 12 nt, Human
cuugaggacaca

SEQ ID NO: 1347529 - RNA, 21 nt, Human
cuugagcaguggcugguccag

SEQ ID NO: 1347530 - RNA, 16 nt, Human
cuugagcauguuacug

SEQ ID NO: 1347531 - RNA, 22 nt, Human
cuugagcauguuacugacagag

SEQ ID NO: 1347532 - RNA, 13 nt, Human
cuugagccaguaa

SEQ ID NO: 1347533 - RNA, 16 nt, Human
cuugagccaguaauug

SEQ ID NO: 1347534 - RNA, 21 nt, Human
cuugaccaggcugccucccuu

SEQ ID NO: 1347535 - RNA, 13 nt, Human
cuugagcaguggc

SEQ ID NO: 1347536 - RNA, 14 nt, Human
cuugagcaguggcu

SEQ ID NO: 1347537 - RNA, 16 nt, Human
cuugagcaguggcugg

SEQ ID NO: 1347538 - RNA, 23 nt, Human
cuugcaggaaggacuaugaaaag

SEQ ID NO: 1347539 - RNA, 19 nt, Human
cuugcaguaucggcacugu

SEQ ID NO: 1347540 - RNA, 20 nt, Human
cuugcaguaucggcacugua

SEQ ID NO: 1347541 - RNA, 18 nt, Human
cuugcaguaucggcacug

SEQ ID NO: 1347542 - RNA, 21 nt, Human
cuugcaugguuuagaaagcuu

SEQ ID NO: 1347543 - RNA, 13 nt, Human
cuugcaugcuugc

SEQ ID NO: 1347544 - RNA, 21 nt, Human
cuugagugggguuaucucugu

SEQ ID NO: 1347545 - RNA, 23 nt, Human
cuugagugggguuaucucugugu

SEQ ID NO: 1347546 - RNA, 22 nt, Human
cuugagugggguuaucucugug

SEQ ID NO: 1347547 - RNA, 20 nt, Human
cuugcacgaccgccccaguu

SEQ ID NO: 1347548 - RNA, 19 nt, Human
cuugcacgaccgccccagu

SEQ ID NO: 1347549 - RNA, 22 nt, Human
cuguaccuuuugaggagcccca

SEQ ID NO: 1347550 - RNA, 20 nt, Human
cuguauagcugcuuccagug

SEQ ID NO: 1347551 - RNA, 14 nt, Human
cuguaccugagagg

SEQ ID NO: 1347552 - RNA, 20 nt, Human
cuguaccuuuugaggagccc

SEQ ID NO: 1347553 - RNA, 15 nt, Human
cuguaugauucccag

SEQ ID NO: 1347554 - RNA, 13 nt, Human
cuguauauacuuu

SEQ ID NO: 1347555 - RNA, 23 nt, Human
cuguaugaucaaauguuuaauca

SEQ ID NO: 1347556 - RNA, 16 nt, Human
cuguaugucuuaaaac

SEQ ID NO: 1347557 - RNA, 16 nt, Human
cuguauguucaacuag

SEQ ID NO: 1347558 - RNA, 15 nt, Human
cuguauuaagccacu

SEQ ID NO: 1347559 - RNA, 18 nt, Human
cuguauuugaaauaagaa

SEQ ID NO: 1347560 - RNA, 22 nt, Human
cuguauuugaaauaagaauuca

SEQ ID NO: 1347561 - RNA, 18 nt, Human
cuguauuugaaucagccu

SEQ ID NO: 1347562 - RNA, 13 nt, Human
cuguauuuuaaaa

SEQ ID NO: 1347563 - RNA, 16 nt, Human
cuguauuuuaaaagaa

SEQ ID NO: 1347564 - RNA, 15 nt, Human
cuguauuuguuccca

SEQ ID NO: 1347565 - RNA, 16 nt, Human
cuguauuuguucccaa

SEQ ID NO: 1347566 - RNA, 17 nt, Human
cuguauuuguucccaag

SEQ ID NO: 1347567 - RNA, 18 nt, Human
cuguauuuguucccaaga

SEQ ID NO: 1347568 - RNA, 19 nt, Human
cuguauuuguucccaagag

SEQ ID NO: 1347569 - RNA, 19 nt, Human
cuguauuuuaaaagaauga

SEQ ID NO: 1347570 - RNA, 14 nt, Human
cugucccaccccca

SEQ ID NO: 1347571 - RNA, 16 nt, Human
cugucccacccccacc

SEQ ID NO: 1347572 - RNA, 18 nt, Human
cuguccaggcacugcugc

SEQ ID NO: 1347573 - RNA, 19 nt, Human
cuguccaggcacugcugcc

SEQ ID NO: 1347574 - RNA, 17 nt, Human
cuguccacaggcuucug

SEQ ID NO: 1347575 - RNA, 22 nt, Human
cuguccacaggcuucugagcag

SEQ ID NO: 1347576 - RNA, 12 nt, Human
cuguccagaaag

SEQ ID NO: 1347577 - RNA, 20 nt, Human
cuguccaggcacugcugccc

SEQ ID NO: 1347578 - RNA, 21 nt, Human
cuguccaggcacugcugccca

SEQ ID NO: 1347579 - RNA, 22 nt, Human
cuguccaggcacugcugcccag

SEQ ID NO: 1347580 - RNA, 23 nt, Human
cuguccaggcacugcugcccagc

SEQ ID NO: 1347581 - RNA, 23 nt, Human
cugucccuugccccccuggccuc

SEQ ID NO: 1347582 - RNA, 18 nt, Human
cugucucaagagggcacu

SEQ ID NO: 1347583 - RNA, 19 nt, Human
cugucucaagagggcacug

SEQ ID NO: 1347584 - RNA, 20 nt, Human
cugucucaagagggcacugg

SEQ ID NO: 1347585 - RNA, 21 nt, Human
cugucucaagagggcacuggu

SEQ ID NO: 1347586 - RNA, 13 nt, Human
cuguccucagccu

SEQ ID NO: 1347587 - RNA, 12 nt, Human
cugucucaucca

SEQ ID NO: 1347588 - RNA, 15 nt, Human
cugucucauccauca

SEQ ID NO: 1347589 - RNA, 16 nt, Human
cugucucauccaucau

SEQ ID NO: 1347590 - RNA, 17 nt, Human
cugucucauccaucauc

SEQ ID NO: 1347591 - RNA, 20 nt, Human
cugucucauccaucaucaug

SEQ ID NO: 1347592 - RNA, 21 nt, Human
cugucucauccaucaucaugu

SEQ ID NO: 1347593 - RNA, 18 nt, Human
cugucucuacuaaaaaua

SEQ ID NO: 1347594 - RNA, 15 nt, Human
cugucucgagcgccc

SEQ ID NO: 1347595 - RNA, 16 nt, Human
cugucucgagcgcccu

SEQ ID NO: 1347596 - RNA, 17 nt, Human
cugucucgagcgcccug

SEQ ID NO: 1347597 - RNA, 18 nt, Human
cugucucgagcgcccugc

SEQ ID NO: 1347598 - RNA, 19 nt, Human
cugucucgagcgcccugca

SEQ ID NO: 1347599 - RNA, 20 nt, Human
cugucucgagcgcccugcag

SEQ ID NO: 1347600 - RNA, 21 nt, Human
cugucucgagcgcccugcaga

SEQ ID NO: 1347601 - RNA, 23 nt, Human
cugucucgagcgcccugcagacc

SEQ ID NO: 1347602 - RNA, 22 nt, Human
cugucucgagcgcccugcagac

SEQ ID NO: 1347603 - RNA, 19 nt, Human
cugucucucagggccaggc

SEQ ID NO: 1347604 - RNA, 20 nt, Human
cugucucucagggccaggcc

SEQ ID NO: 1347605 - RNA, 13 nt, Human
cugucucucauga

SEQ ID NO: 1347606 - RNA, 17 nt, Human
cugucucucaugaaccu

SEQ ID NO: 1347607 - RNA, 12 nt, Human
cuguccccagcc

SEQ ID NO: 1347608 - RNA, 14 nt, Human
cuguccccagccug

SEQ ID NO: 1347609 - RNA, 16 nt, Human
cuguccccagccuggg

SEQ ID NO: 1347610 - RNA, 15 nt, Human
cuguccccagccugg

SEQ ID NO: 1347611 - RNA, 13 nt, Human
cuguccccccacu

SEQ ID NO: 1347612 - RNA, 15 nt, Human
cuguccccccacucc

SEQ ID NO: 1347613 - RNA, 16 nt, Human
cuguccccccacuccc

SEQ ID NO: 1347614 - RNA, 21 nt, Human
cuguccccccacucccucaca

SEQ ID NO: 1347615 - RNA, 11 nt, Human
cugucccuagg

SEQ ID NO: 1347616 - RNA, 15 nt, Human
cugucccucccccuu

SEQ ID NO: 1347617 - RNA, 12 nt, Human
cugucccuccgg

SEQ ID NO: 1347618 - RNA, 17 nt, Human
cugucccuccgggaccu

SEQ ID NO: 1347619 - RNA, 18 nt, Human
cugucccuugccccccug

SEQ ID NO: 1347620 - RNA, 20 nt, Human
cugucccuugccccccuggc

SEQ ID NO: 1347621 - RNA, 21 nt, Human
cugucccuugccccccuggcc

SEQ ID NO: 1347622 - RNA, 22 nt, Human
cugucccuugccccccuggccu

SEQ ID NO: 1347623 - RNA, 13 nt, Human
cugucccuugccu

SEQ ID NO: 1347624 - RNA, 15 nt, Human
cugucccuugccuca

SEQ ID NO: 1347625 - RNA, 16 nt, Human
cugucccuugccucaa

SEQ ID NO: 1347626 - RNA, 20 nt, Human
cugucccuugccucaaugcc

SEQ ID NO: 1347627 - RNA, 21 nt, Human
cugucccuugccucaaugcca

SEQ ID NO: 1347628 - RNA, 22 nt, Human
cugggucgcccuggacugugug

SEQ ID NO: 1347629 - RNA, 23 nt, Human
cugggucucaccggcucucaccu

SEQ ID NO: 1347630 - RNA, 13 nt, Human
cugggucucuaau

SEQ ID NO: 1347631 - RNA, 19 nt, Human
cugggucucaccggcucuc

SEQ ID NO: 1347632 - RNA, 18 nt, Human
cugggucgcccuggacug

SEQ ID NO: 1347633 - RNA, 17 nt, Human
cugggucgcccuggacu

SEQ ID NO: 1347634 - RNA, 14 nt, Human
cuggguugggauca

SEQ ID NO: 1347635 - RNA, 16 nt, Human
cuggguugggaucagg

SEQ ID NO: 1347636 - RNA, 23 nt, Human
cuggguugggaucagggguagga

SEQ ID NO: 1347637 - RNA, 20 nt, Human
cugggccuauggagagcccu

SEQ ID NO: 1347638 - RNA, 21 nt, Human
cugggccuauggagagcccug

SEQ ID NO: 1347639 - RNA, 23 nt, Human
cugggccuauggagagcccuggg

SEQ ID NO: 1347640 - RNA, 22 nt, Human
cugggccuauggagagcccugg

SEQ ID NO: 1347641 - RNA, 22 nt, Human
cugggcuccggaggacucacca

SEQ ID NO: 1347642 - RNA, 15 nt, Human
cugguccaaaagauu

SEQ ID NO: 1347643 - RNA, 22 nt, Human
cugguccaaaagauugcugaaa

SEQ ID NO: 1347644 - RNA, 20 nt, Human
cuggucacaggacucugccu

SEQ ID NO: 1347645 - RNA, 21 nt, Human
cuggucacaggacucugccuc

SEQ ID NO: 1347646 - RNA, 22 nt, Human
cuggucacaggacucugccucc

SEQ ID NO: 1347647 - RNA, 23 nt, Human
cuggucacaggacucugccuccu

SEQ ID NO: 1347648 - RNA, 14 nt, Human
cuggucaccuagga

SEQ ID NO: 1347649 - RNA, 16 nt, Human
cuggucaccuaggaag

SEQ ID NO: 1347650 - RNA, 17 nt, Human
cuggucaccuaggaagc

SEQ ID NO: 1347651 - RNA, 18 nt, Human
cuggucaccuaggaagcc

SEQ ID NO: 1347652 - RNA, 19 nt, Human
cuggucaccuaggaagccu

SEQ ID NO: 1347653 - RNA, 22 nt, Human
cuggucaccuaggaagccucag

SEQ ID NO: 1347654 - RNA, 18 nt, Human
cuggucacggauuugugu

SEQ ID NO: 1347655 - RNA, 23 nt, Human
cuggucaccuaggaagccucaga

SEQ ID NO: 1347656 - RNA, 17 nt, Human
cugguagaagggaaagc

SEQ ID NO: 1347657 - RNA, 21 nt, Human
cugguagaagggaaagcccau

SEQ ID NO: 1347658 - RNA, 22 nt, Human
cugguagaagggaaagcccaua

SEQ ID NO: 1347659 - RNA, 13 nt, Human
cugguagagcagg

SEQ ID NO: 1347660 - RNA, 20 nt, Human
cugguaggaauagcauguca

SEQ ID NO: 1347661 - RNA, 22 nt, Human
cugguaggaauagcaugucacu

SEQ ID NO: 1347662 - RNA, 23 nt, Human
cugguaggaauagcaugucacua

SEQ ID NO: 1347663 - RNA, 15 nt, Human
cugguaggaccaagc

SEQ ID NO: 1347664 - RNA, 17 nt, Human
cugguaggaccaagcau

SEQ ID NO: 1347665 - RNA, 18 nt, Human
cugguaggaccaagcauc

SEQ ID NO: 1347666 - RNA, 18 nt, Human
cugguauauccaaaagcu

SEQ ID NO: 1347667 - RNA, 18 nt, Human
cuguaaggcaaucauggu

SEQ ID NO: 1347668 - RNA, 23 nt, Human
cugguuccagggucccucugugu

SEQ ID NO: 1347669 - RNA, 21 nt, Human
cuguaaggauccggaaagaag

SEQ ID NO: 1347670 - RNA, 20 nt, Human
cugguucacacugaccaaga

SEQ ID NO: 1347671 - RNA, 13 nt, Human
cugguuccagggu

SEQ ID NO: 1347672 - RNA, 14 nt, Human
cugguuccaggguc

SEQ ID NO: 1347673 - RNA, 15 nt, Human
cugguuccagggucc

SEQ ID NO: 1347674 - RNA, 16 nt, Human
cugguuccaggguccc

SEQ ID NO: 1347675 - RNA, 18 nt, Human
cugguuccagggucccuc

SEQ ID NO: 1347676 - RNA, 22 nt, Human
cugguuccagggucccucugug

SEQ ID NO: 1347677 - RNA, 14 nt, Human
cugguguuucuuga

SEQ ID NO: 1347678 - RNA, 13 nt, Human
cugguguuucuug

SEQ ID NO: 1347679 - RNA, 20 nt, Human
cugguguuggacaagcuucu

SEQ ID NO: 1347680 - RNA, 22 nt, Human
cugguguuggacaagcuucuga

SEQ ID NO: 1347681 - RNA, 23 nt, Human
cuggugugguacagagaagccag

SEQ ID NO: 1347682 - RNA, 12 nt, Human
cugguguuaaca

SEQ ID NO: 1347683 - RNA, 13 nt, Human
cugguguuaacag

SEQ ID NO: 1347684 - RNA, 14 nt, Human
cugguguuaacaga

SEQ ID NO: 1347685 - RNA, 15 nt, Human
cugguguuaacagaa

SEQ ID NO: 1347686 - RNA, 16 nt, Human
cugguguuaacagaag

SEQ ID NO: 1347687 - RNA, 17 nt, Human
cugguguuaacagaagg

SEQ ID NO: 1347688 - RNA, 22 nt, Human
cugguguuaacagaagggaggg

SEQ ID NO: 1347689 - RNA, 23 nt, Human
cugguuaauauuuauaggucacu

SEQ ID NO: 1347690 - RNA, 19 nt, Human
cugguuaaauaaggcaggg

SEQ ID NO: 1347691 - RNA, 22 nt, Human
cugguuagguuaggacuugccc

SEQ ID NO: 1347692 - RNA, 16 nt, Human
cuggucucgaacuccu

SEQ ID NO: 1347693 - RNA, 21 nt, Human
cuggucucgaacuccugaccu

SEQ ID NO: 1347694 - RNA, 14 nt, Human
cugguggcacagga

SEQ ID NO: 1347695 - RNA, 23 nt, Human
cuggucucaaacuccugaccuca

SEQ ID NO: 1347696 - RNA, 13 nt, Human
cuggucucacccu

SEQ ID NO: 1347697 - RNA, 16 nt, Human
cuggucucacccugga

SEQ ID NO: 1347698 - RNA, 17 nt, Human
cuggucucacccuggag

SEQ ID NO: 1347699 - RNA, 23 nt, Human
cuggucucacccuggaggcaccu

SEQ ID NO: 1347700 - RNA, 18 nt, Human
cuggucucacccuggagg

SEQ ID NO: 1347701 - RNA, 15 nt, Human
cugguggcacaggag

SEQ ID NO: 1347702 - RNA, 14 nt, Human
cuggugugguacag

SEQ ID NO: 1347703 - RNA, 16 nt, Human
cuggugugguacagag

SEQ ID NO: 1347704 - RNA, 17 nt, Human
cuggugugguacagaga

SEQ ID NO: 1347705 - RNA, 18 nt, Human
cuggugugguacagagaa

SEQ ID NO: 1347706 - RNA, 19 nt, Human
cuggugugguacagagaag

SEQ ID NO: 1347707 - RNA, 20 nt, Human
cuggugugguacagagaagc

SEQ ID NO: 1347708 - RNA, 21 nt, Human
cuggugugguacagagaagcc

SEQ ID NO: 1347709 - RNA, 22 nt, Human
cuggugugguacagagaagcca

SEQ ID NO: 1347710 - RNA, 13 nt, Human
cuguaaggcucua

SEQ ID NO: 1347711 - RNA, 14 nt, Human
cuguaaggcucuag

SEQ ID NO: 1347712 - RNA, 15 nt, Human
cuguaaggcucuaga

SEQ ID NO: 1347713 - RNA, 16 nt, Human
cuguaaggcucuagau

SEQ ID NO: 1347714 - RNA, 17 nt, Human
cuguaaggcucuagauc

SEQ ID NO: 1347715 - RNA, 18 nt, Human
cuguaaggcucuagauca

SEQ ID NO: 1347716 - RNA, 20 nt, Human
cuguaaggcucuagaucaua

SEQ ID NO: 1347717 - RNA, 22 nt, Human
cuguaaggcucuagaucauaag

SEQ ID NO: 1347718 - RNA, 20 nt, Human
cuguaaguagaugcauuugg

SEQ ID NO: 1347719 - RNA, 21 nt, Human
cuguaaguugggcuugcuauu

SEQ ID NO: 1347720 - RNA, 22 nt, Human
cuguaaguugggcuugcuauuc

SEQ ID NO: 1347721 - RNA, 24 nt, Human
cuguaaguugggcuugcuauucug

SEQ ID NO: 1347722 - RNA, 15 nt, Human
cuguacagcuggcuc

SEQ ID NO: 1347723 - RNA, 16 nt, Human
cuguacagcuggcucu

SEQ ID NO: 1347724 - RNA, 17 nt, Human
cuguacagcuggcucua

SEQ ID NO: 1347725 - RNA, 18 nt, Human
cuguacagcuggcucuac

SEQ ID NO: 1347726 - RNA, 11 nt, Human
cuguacagugu

SEQ ID NO: 1347727 - RNA, 14 nt, Human
cuguacagugucuu

SEQ ID NO: 1347728 - RNA, 15 nt, Human
cuguacagugucuuu

SEQ ID NO: 1347729 - RNA, 16 nt, Human
cuguacagugucuuuu

SEQ ID NO: 1347730 - RNA, 15 nt, Human
cuguacaguguuacc

SEQ ID NO: 1347731 - RNA, 17 nt, Human
cuguaccaguuaauuuu

SEQ ID NO: 1347732 - RNA, 18 nt, Human
cuguaccaguuaauuuuu

SEQ ID NO: 1347733 - RNA, 13 nt, Human
cuguacccaguuu

SEQ ID NO: 1347734 - RNA, 21 nt, Human
cuguacagugucuuuuuuugu

SEQ ID NO: 1347735 - RNA, 13 nt, Human
cuguacaguguua

SEQ ID NO: 1347736 - RNA, 15 nt, Human
cuguacauuguggga

SEQ ID NO: 1347737 - RNA, 12 nt, Human
cuguaccaguua

SEQ ID NO: 1347738 - RNA, 16 nt, Human
cuguaccaguuaauuu

SEQ ID NO: 1347739 - RNA, 21 nt, Human
cugggaggcucuggagcccac

SEQ ID NO: 1347740 - RNA, 20 nt, Human
cugggaggcucuggagccca

SEQ ID NO: 1347741 - RNA, 18 nt, Human
cugggaggcucuggagcc

SEQ ID NO: 1347742 - RNA, 14 nt, Human
cugggaggcaguga

SEQ ID NO: 1347743 - RNA, 22 nt, Human
cugggaggcucuggagcccacu

SEQ ID NO: 1347744 - RNA, 21 nt, Human
cugggaguaguugucuuuccu

SEQ ID NO: 1347745 - RNA, 23 nt, Human
cugggaguaguugucuuuccugg

SEQ ID NO: 1347746 - RNA, 14 nt, Human
cugggagucacaca

SEQ ID NO: 1347747 - RNA, 19 nt, Human
cugggaggagggcaggcau

SEQ ID NO: 1347748 - RNA, 14 nt, Human
cugggaggaaggac

SEQ ID NO: 1347749 - RNA, 23 nt, Human
cugggagcccccagccugucaga

SEQ ID NO: 1347750 - RNA, 16 nt, Human
cugggagcuccacucu

SEQ ID NO: 1347751 - RNA, 17 nt, Human
cugggagcuccacucug

SEQ ID NO: 1347752 - RNA, 20 nt, Human
cugggagcuccacucugcuu

SEQ ID NO: 1347753 - RNA, 21 nt, Human
cugggagcuccacucugcuuc

SEQ ID NO: 1347754 - RNA, 21 nt, Human
cugggagcccccagccuguca

SEQ ID NO: 1347755 - RNA, 22 nt, Human
cugggaggaaggacuucccugu

SEQ ID NO: 1347756 - RNA, 17 nt, Human
cugggagcccccagccu

SEQ ID NO: 1347757 - RNA, 18 nt, Human
cugggagcccccagccug

SEQ ID NO: 1347758 - RNA, 19 nt, Human
cugggagcccccagccugu

SEQ ID NO: 1347759 - RNA, 20 nt, Human
cugggagcccccagccuguc

SEQ ID NO: 1347760 - RNA, 14 nt, Human
cugggagaggcagc

SEQ ID NO: 1347761 - RNA, 15 nt, Human
cugggagaggcagcc

SEQ ID NO: 1347762 - RNA, 18 nt, Human
cugggagaggcagcccag

SEQ ID NO: 1347763 - RNA, 19 nt, Human
cugggagaggcagcccagg

SEQ ID NO: 1347764 - RNA, 23 nt, Human
cugggagaggcagcccaggaagu

SEQ ID NO: 1347765 - RNA, 20 nt, Human
cugggagaggcagcccagga

SEQ ID NO: 1347766 - RNA, 15 nt, Human
cugggagauucaagg

SEQ ID NO: 1347767 - RNA, 19 nt, Human
cugggagauucaagggacc

SEQ ID NO: 1347768 - RNA, 16 nt, Human
cugggagcccccagcc

SEQ ID NO: 1347769 - RNA, 23 nt, Human
cugggauuacaggugugagccac

SEQ ID NO: 1347770 - RNA, 13 nt, Human
cugggcccaugaa

SEQ ID NO: 1347771 - RNA, 10 nt, Human
cugggccccu

SEQ ID NO: 1347772 - RNA, 19 nt, Human
cugggccccaguuguauuu

SEQ ID NO: 1347773 - RNA, 15 nt, Human
cugggccccaguugu

SEQ ID NO: 1347774 - RNA, 13 nt, Human
cugggcccugggc

SEQ ID NO: 1347775 - RNA, 14 nt, Human
cugggcccugggcu

SEQ ID NO: 1347776 - RNA, 15 nt, Human
cugggcccugggcug

SEQ ID NO: 1347777 - RNA, 16 nt, Human
cugggcccugggcugg

SEQ ID NO: 1347778 - RNA, 18 nt, Human
cugggcccugggcuggaa

SEQ ID NO: 1347779 - RNA, 12 nt, Human
cugggcccuggg

SEQ ID NO: 1347780 - RNA, 13 nt, Human
cugggcccugggg

SEQ ID NO: 1347781 - RNA, 14 nt, Human
cugggcccuggggc

SEQ ID NO: 1347782 - RNA, 15 nt, Human
cugggcccuggggcc

SEQ ID NO: 1347783 - RNA, 17 nt, Human
cugggcccuggggccug

SEQ ID NO: 1347784 - RNA, 18 nt, Human
cugggcccuggggccugu

SEQ ID NO: 1347785 - RNA, 20 nt, Human
cugggcccuggggccuguac

SEQ ID NO: 1347786 - RNA, 22 nt, Human
cugggcccuggggccuguacug

SEQ ID NO: 1347787 - RNA, 15 nt, Human
cugggccgcugccac

SEQ ID NO: 1347788 - RNA, 16 nt, Human
cugggccgcugccacg

SEQ ID NO: 1347789 - RNA, 12 nt, Human
cugggccuaugg

SEQ ID NO: 1347790 - RNA, 16 nt, Human
cugggccuauggagag

SEQ ID NO: 1347791 - RNA, 17 nt, Human
cugggccuauggagagc

SEQ ID NO: 1347792 - RNA, 18 nt, Human
cugggccuauggagagcc

SEQ ID NO: 1347793 - RNA, 19 nt, Human
cugggccuauggagagccc

SEQ ID NO: 1347794 - RNA, 16 nt, Human
cugggauuacaggugu

SEQ ID NO: 1347795 - RNA, 18 nt, Human
cugggauuacagguguga

SEQ ID NO: 1347796 - RNA, 16 nt, Human
cugggagucacacagu

SEQ ID NO: 1347797 - RNA, 17 nt, Human
cugggagucacacagug

SEQ ID NO: 1347798 - RNA, 22 nt, Human
cugggagucacacaguguugga

SEQ ID NO: 1347799 - RNA, 18 nt, Human
cuggcuuggccacagcca

SEQ ID NO: 1347800 - RNA, 20 nt, Human
cuggcuuggccacagccagg

SEQ ID NO: 1347801 - RNA, 16 nt, Human
cuggcuugggcagcau

SEQ ID NO: 1347802 - RNA, 23 nt, Human
cuggcuugggacuaaaugcccug

SEQ ID NO: 1347803 - RNA, 21 nt, Human
cuggcuuucauuuucucucag

SEQ ID NO: 1347804 - RNA, 22 nt, Human
cuggcuuucauuuucucucagg

SEQ ID NO: 1347805 - RNA, 23 nt, Human
cuggcuuucauuuucucucaggu

SEQ ID NO: 1347806 - RNA, 23 nt, Human
cuggcuuuucacugcuggcugcc

SEQ ID NO: 1347807 - RNA, 14 nt, Human
cuggcuuuuauuaa

SEQ ID NO: 1347808 - RNA, 22 nt, Human
cuggcuuuuauuaaugcacuuu

SEQ ID NO: 1347809 - RNA, 23 nt, Human
cuggcuuuuauuaaugcacuuuc

SEQ ID NO: 1347810 - RNA, 23 nt, Human
cugggaaaaacuuuggaaccaga

SEQ ID NO: 1347811 - RNA, 22 nt, Human
cugggaaaaacuuuggaaccag

SEQ ID NO: 1347812 - RNA, 18 nt, Human
cugggaaagccccugccc

SEQ ID NO: 1347813 - RNA, 16 nt, Human
cugggaaagccccugc

SEQ ID NO: 1347814 - RNA, 13 nt, Human
cugggagaggcag

SEQ ID NO: 1347815 - RNA, 12 nt, Human
cuggcugguguu

SEQ ID NO: 1347816 - RNA, 16 nt, Human
cuggcugguguuaaca

SEQ ID NO: 1347817 - RNA, 18 nt, Human
cuggcugguguuaacaga

SEQ ID NO: 1347818 - RNA, 21 nt, Human
cuggcugguguuaacagaagg

SEQ ID NO: 1347819 - RNA, 22 nt, Human
cuggcugguguuaacagaaggg

SEQ ID NO: 1347820 - RNA, 15 nt, Human
cuggcuguaaggcuc

SEQ ID NO: 1347821 - RNA, 16 nt, Human
cuggcuguaaggcucu

SEQ ID NO: 1347822 - RNA, 17 nt, Human
cuggcuguaaggcucua

SEQ ID NO: 1347823 - RNA, 12 nt, Human
cuggcugggacg

SEQ ID NO: 1347824 - RNA, 16 nt, Human
cuggcugggacguggc

SEQ ID NO: 1347825 - RNA, 19 nt, Human
cuggcugggacguggcuca

SEQ ID NO: 1347826 - RNA, 21 nt, Human
cuggcugggacguggcucagc

SEQ ID NO: 1347827 - RNA, 23 nt, Human
cuggcugggacguggcucagcca

SEQ ID NO: 1347828 - RNA, 16 nt, Human
cuggcuggcugagggc

SEQ ID NO: 1347829 - RNA, 17 nt, Human
cuggcugguagagcagg

SEQ ID NO: 1347830 - RNA, 18 nt, Human
cuggcugguagagcaggu

SEQ ID NO: 1347831 - RNA, 18 nt, Human
cuggcuguggccuaaccu

SEQ ID NO: 1347832 - RNA, 19 nt, Human
cuggcuguaaggcucuaga

SEQ ID NO: 1347833 - RNA, 20 nt, Human
cuggcuguaaggcucuagau

SEQ ID NO: 1347834 - RNA, 17 nt, Human
cuggccuuuuucauuua

SEQ ID NO: 1347835 - RNA, 19 nt, Human
cuggccuuuuucauuuauc

SEQ ID NO: 1347836 - RNA, 20 nt, Human
cuggccuuuuucauuuaucu

SEQ ID NO: 1347837 - RNA, 21 nt, Human
cuggccuuuuucauuuaucua

SEQ ID NO: 1347838 - RNA, 22 nt, Human
cuggcgacacguagcagcuuag

SEQ ID NO: 1347839 - RNA, 17 nt, Human
cuggcuggccucaccca

SEQ ID NO: 1347840 - RNA, 13 nt, Human
cuggcuggccuca

SEQ ID NO: 1347841 - RNA, 11 nt, Human
cuggcuggcug

SEQ ID NO: 1347842 - RNA, 14 nt, Human
cuggcuggcugagg

SEQ ID NO: 1347843 - RNA, 15 nt, Human
cuggcuggcugaggg

SEQ ID NO: 1347844 - RNA, 17 nt, Human
cuggcuggcugagggca

SEQ ID NO: 1347845 - RNA, 18 nt, Human
cuggaauacaugaaauau

SEQ ID NO: 1347846 - RNA, 23 nt, Human
cuggaaucaggaauauuuuccaa

SEQ ID NO: 1347847 - RNA, 20 nt, Human
cuggaaucagcucaggacug

SEQ ID NO: 1347848 - RNA, 20 nt, Human
cuggaagugcuaauuuugaa

SEQ ID NO: 1347849 - RNA, 19 nt, Human
cuggaaugaguugaggcca

SEQ ID NO: 1347850 - RNA, 24 nt, Human
cuggaaugaguugaggccacugug

SEQ ID NO: 1347851 - RNA, 15 nt, Human
cuggcaacacagagg

SEQ ID NO: 1347852 - RNA, 16 nt, Human
cuggcaacacagaggc

SEQ ID NO: 1347853 - RNA, 14 nt, Human
cuggcaacaucuuu

SEQ ID NO: 1347854 - RNA, 17 nt, Human
cuggcaacaucuuuauc

SEQ ID NO: 1347855 - RNA, 23 nt, Human
cuggcacagccuggcuguggccu

SEQ ID NO: 1347856 - RNA, 15 nt, Human
cuggcacagggcagu

SEQ ID NO: 1347857 - RNA, 16 nt, Human
cuggcacagggcagug

SEQ ID NO: 1347858 - RNA, 16 nt, Human
cuggcacagccuggcu

SEQ ID NO: 1347859 - RNA, 21 nt, Human
cuggcacagccuggcuguggc

SEQ ID NO: 1347860 - RNA, 19 nt, Human
cuggcaaggacuuuguaca

SEQ ID NO: 1347861 - RNA, 20 nt, Human
cuggcaaggacuuuguacau

SEQ ID NO: 1347862 - RNA, 15 nt, Human
cuggcacagccuggc

SEQ ID NO: 1347863 - RNA, 23 nt, Human
cuggcauuacaggugugagccac

SEQ ID NO: 1347864 - RNA, 18 nt, Human
cuggcauuagaauuauuu

SEQ ID NO: 1347865 - RNA, 18 nt, Human
cuggcaugucaacagcgu

SEQ ID NO: 1347866 - RNA, 19 nt, Human
cuggcauuagaauuauuua

SEQ ID NO: 1347867 - RNA, 19 nt, Human
cuggccaagcugaggugcc

SEQ ID NO: 1347868 - RNA, 21 nt, Human
cuggccaagcugaggugccca

SEQ ID NO: 1347869 - RNA, 23 nt, Human
cuggccaagcugaggugcccagg

SEQ ID NO: 1347870 - RNA, 22 nt, Human
cuggccaagcugaggugcccag

SEQ ID NO: 1347871 - RNA, 15 nt, Human
cuggcauuacagcug

SEQ ID NO: 1347872 - RNA, 16 nt, Human
cuggcauuacagcugg

SEQ ID NO: 1347873 - RNA, 13 nt, Human
cuggccccccugg

SEQ ID NO: 1347874 - RNA, 19 nt, Human
cuggccccccugguccccu

SEQ ID NO: 1347875 - RNA, 22 nt, Human
cuggccccccugguccccuccu

SEQ ID NO: 1347876 - RNA, 13 nt, Human
cuggcccccuccc

SEQ ID NO: 1347877 - RNA, 15 nt, Human
cuggcccccucccug

SEQ ID NO: 1347878 - RNA, 16 nt, Human
cuggcccccucccugg

SEQ ID NO: 1347879 - RNA, 21 nt, Human
cuggccccaggaccuggcugc

SEQ ID NO: 1347880 - RNA, 17 nt, Human
cuggccccauggucagc

SEQ ID NO: 1347881 - RNA, 16 nt, Human
cuggccucccaaauga

SEQ ID NO: 1347882 - RNA, 20 nt, Human
cuggcccccucccuggauga

SEQ ID NO: 1347883 - RNA, 17 nt, Human
cuggcccccucccugga

SEQ ID NO: 1347884 - RNA, 18 nt, Human
cuggcccccucccuggau

SEQ ID NO: 1347885 - RNA, 22 nt, Human
cuggccucacccaccccugcac

SEQ ID NO: 1347886 - RNA, 19 nt, Human
cuggcccccucccuggaug

SEQ ID NO: 1347887 - RNA, 14 nt, Human
cuggccucccaaau

SEQ ID NO: 1347888 - RNA, 12 nt, Human
cuggccagcgag

SEQ ID NO: 1347889 - RNA, 20 nt, Human
cuggccagcgagcgcccagc

SEQ ID NO: 1347890 - RNA, 23 nt, Human
cuggccagcgagcgcccagcucc

SEQ ID NO: 1347891 - RNA, 13 nt, Human
cuggccagggcca

SEQ ID NO: 1347892 - RNA, 14 nt, Human
cuggccagggccac

SEQ ID NO: 1347893 - RNA, 17 nt, Human
cuggccagggccacgcu

SEQ ID NO: 1347894 - RNA, 18 nt, Human
cuggccagggccacgcuc

SEQ ID NO: 1347895 - RNA, 20 nt, Human
cuggccagggccacgcucca

SEQ ID NO: 1347896 - RNA, 22 nt, Human
cuggccagggccacgcuccagc

SEQ ID NO: 1347897 - RNA, 23 nt, Human
cuggccagggccacgcuccagcu

SEQ ID NO: 1347898 - RNA, 15 nt, Human
cuggccaguccaggc

SEQ ID NO: 1347899 - RNA, 16 nt, Human
cuggccaguccaggcu

SEQ ID NO: 1347900 - RNA, 17 nt, Human
cuggccaguccaggcug

SEQ ID NO: 1347901 - RNA, 18 nt, Human
cuggccaguccaggcugc

SEQ ID NO: 1347902 - RNA, 16 nt, Human
cuggccccaggaccug

SEQ ID NO: 1347903 - RNA, 20 nt, Human
cuggccccaggaccuggcug

SEQ ID NO: 1347904 - RNA, 14 nt, Human
cuggccuggacugu

SEQ ID NO: 1347905 - RNA, 15 nt, Human
cuggccuucggccuc

SEQ ID NO: 1347906 - RNA, 21 nt, Human
cuggccuucggccuccauccu

SEQ ID NO: 1347907 - RNA, 18 nt, Human
cuggccuucggccuccau

SEQ ID NO: 1347908 - RNA, 17 nt, Human
cuggccuucggccucca

SEQ ID NO: 1347909 - RNA, 16 nt, Human
cuggccuucggccucc

SEQ ID NO: 1347910 - RNA, 23 nt, Human
cugcaggucccuaauaaagcugu

SEQ ID NO: 1347911 - RNA, 14 nt, Human
cugcaguaaaucuu

SEQ ID NO: 1347912 - RNA, 17 nt, Human
cugcaguaaaucuuuua

SEQ ID NO: 1347913 - RNA, 16 nt, Human
cugcaguaugaaaaua

SEQ ID NO: 1347914 - RNA, 17 nt, Human
cugcaguaugaaaauaa

SEQ ID NO: 1347915 - RNA, 22 nt, Human
cugcaggucccuaauaaagcug

SEQ ID NO: 1347916 - RNA, 21 nt, Human
cugcaggucccuaauaaagcu

SEQ ID NO: 1347917 - RNA, 20 nt, Human
cugcaggucccuaauaaagc

SEQ ID NO: 1347918 - RNA, 19 nt, Human
cugcaggucccuaauaaag

SEQ ID NO: 1347919 - RNA, 23 nt, Human
cugcagucucuauaccaauaaag

SEQ ID NO: 1347920 - RNA, 21 nt, Human
cugcagucucuauaccaauaa

SEQ ID NO: 1347921 - RNA, 17 nt, Human
cugcagucucuauacca

SEQ ID NO: 1347922 - RNA, 13 nt, Human
cugcaguccugga

SEQ ID NO: 1347923 - RNA, 23 nt, Human
cugcagucccagcggugggaccu

SEQ ID NO: 1347924 - RNA, 15 nt, Human
cugcaguucgacucu

SEQ ID NO: 1347925 - RNA, 17 nt, Human
cugcaguucgacucugu

SEQ ID NO: 1347926 - RNA, 20 nt, Human
cugcaguucgacucugugcu

SEQ ID NO: 1347927 - RNA, 21 nt, Human
cugcaguucgacucugugcug

SEQ ID NO: 1347928 - RNA, 22 nt, Human
cugcaguuuugcuaucugggcu

SEQ ID NO: 1347929 - RNA, 18 nt, Human
cugcaggucccuaauaaa

SEQ ID NO: 1347930 - RNA, 17 nt, Human
cugcaggucccuaauaa

SEQ ID NO: 1347931 - RNA, 16 nt, Human
cugcaggucccuaaua

SEQ ID NO: 1347932 - RNA, 15 nt, Human
cugcaggucccuaau

SEQ ID NO: 1347933 - RNA, 14 nt, Human
cugcaggucccuaa

SEQ ID NO: 1347934 - RNA, 13 nt, Human
cugcaggucccua

SEQ ID NO: 1347935 - RNA, 12 nt, Human
cugcaggucccu

SEQ ID NO: 1347936 - RNA, 11 nt, Human
cugcagguccc

SEQ ID NO: 1347937 - RNA, 17 nt, Human
cugcagggggugugucu

SEQ ID NO: 1347938 - RNA, 20 nt, Human
cugcagggggugugucugcu

SEQ ID NO: 1347939 - RNA, 23 nt, Human
cugcagggggugugucugcucag

SEQ ID NO: 1347940 - RNA, 23 nt, Human
cugaggccagccuggccuccugc

SEQ ID NO: 1347941 - RNA, 20 nt, Human
cugcacccuggauuugcaua

SEQ ID NO: 1347942 - RNA, 20 nt, Human
cugcacuccagucuggguga

SEQ ID NO: 1347943 - RNA, 16 nt, Human
cugcacucccaccuga

SEQ ID NO: 1347944 - RNA, 18 nt, Human
cugcacucccaccugaca

SEQ ID NO: 1347945 - RNA, 19 nt, Human
cugcacucccaccugacac

SEQ ID NO: 1347946 - RNA, 22 nt, Human
cugcacucccaccugacacacc

SEQ ID NO: 1347947 - RNA, 16 nt, Human
cugcacuggggagccc

SEQ ID NO: 1347948 - RNA, 22 nt, Human
cugcacuggggagcccgucuca

SEQ ID NO: 1347949 - RNA, 11 nt, Human
cugcacuguaa

SEQ ID NO: 1347950 - RNA, 13 nt, Human
cugcacuguaaaa

SEQ ID NO: 1347951 - RNA, 14 nt, Human
cugcacuguaaaau

SEQ ID NO: 1347952 - RNA, 15 nt, Human
cugcacuguaaaaug

SEQ ID NO: 1347953 - RNA, 20 nt, Human
cugcacuguaaaauguggga

SEQ ID NO: 1347954 - RNA, 16 nt, Human
cugcacuguaaaaugu

SEQ ID NO: 1347955 - RNA, 18 nt, Human
cugcacuguaaaaugugg

SEQ ID NO: 1347956 - RNA, 15 nt, Human
cugcacuuacuugcu

SEQ ID NO: 1347957 - RNA, 22 nt, Human
cugcagaauuuggguucugccu

SEQ ID NO: 1347958 - RNA, 15 nt, Human
cugcagaccacgccc

SEQ ID NO: 1347959 - RNA, 13 nt, Human
cugcagacccugc

SEQ ID NO: 1347960 - RNA, 14 nt, Human
cugcagacccugcc

SEQ ID NO: 1347961 - RNA, 15 nt, Human
cugcagacccugccc

SEQ ID NO: 1347962 - RNA, 18 nt, Human
cugcagacuucccagcua

SEQ ID NO: 1347963 - RNA, 17 nt, Human
cugcagacuucccagcu

SEQ ID NO: 1347964 - RNA, 12 nt, Human
cugcagaggacg

SEQ ID NO: 1347965 - RNA, 11 nt, Human
cugcagaggcc

SEQ ID NO: 1347966 - RNA, 13 nt, Human
cugcagaggccag

SEQ ID NO: 1347967 - RNA, 16 nt, Human
cugcagacccugcccu

SEQ ID NO: 1347968 - RNA, 17 nt, Human
cugcagacccugcccuu

SEQ ID NO: 1347969 - RNA, 21 nt, Human
cugcagacccugcccuuguuu

SEQ ID NO: 1347970 - RNA, 15 nt, Human
cugcagacucacugu

SEQ ID NO: 1347971 - RNA, 14 nt, Human
cugcagacuuccca

SEQ ID NO: 1347972 - RNA, 15 nt, Human
cugcagacuucccag

SEQ ID NO: 1347973 - RNA, 16 nt, Human
cugcagacuucccagc

SEQ ID NO: 1347974 - RNA, 17 nt, Human
cugcagaggccagaggc

SEQ ID NO: 1347975 - RNA, 20 nt, Human
cugcagaggccagaggcccc

SEQ ID NO: 1347976 - RNA, 21 nt, Human
cugcagaggccagaggccccc

SEQ ID NO: 1347977 - RNA, 17 nt, Human
cugcccaggccugccug

SEQ ID NO: 1347978 - RNA, 15 nt, Human
cugccccaacuccuu

SEQ ID NO: 1347979 - RNA, 20 nt, Human
cugccccaacuccuuccagc

SEQ ID NO: 1347980 - RNA, 22 nt, Human
cugccccaacuccuuccagcua

SEQ ID NO: 1347981 - RNA, 13 nt, Human
cugccccaacucu

SEQ ID NO: 1347982 - RNA, 24 nt, Human
cugccccaacuccuuccagcuagu

SEQ ID NO: 1347983 - RNA, 18 nt, Human
cugccccacuuguccuua

SEQ ID NO: 1347984 - RNA, 21 nt, Human
cugccccacuuguccuuagcc

SEQ ID NO: 1347985 - RNA, 20 nt, Human
cugccccacuuguccuuagc

SEQ ID NO: 1347986 - RNA, 17 nt, Human
cugccauucacuucaua

SEQ ID NO: 1347987 - RNA, 17 nt, Human
cugccauuaaagaauau

SEQ ID NO: 1347988 - RNA, 21 nt, Human
cugcccaccucagccucccaa

SEQ ID NO: 1347989 - RNA, 22 nt, Human
cugccccuuggacacgcucagu

SEQ ID NO: 1347990 - RNA, 19 nt, Human
cugcccgggagcucaggaa

SEQ ID NO: 1347991 - RNA, 20 nt, Human
cugcccuaaugcgcaggcug

SEQ ID NO: 1347992 - RNA, 21 nt, Human
cugcccuaaugcgcaggcugg

SEQ ID NO: 1347993 - RNA, 22 nt, Human
cugcccuaaugcgcaggcuggc

SEQ ID NO: 1347994 - RNA, 17 nt, Human
cugcccuaccugcccca

SEQ ID NO: 1347995 - RNA, 14 nt, Human
cugcauacuuuuua

SEQ ID NO: 1347996 - RNA, 20 nt, Human
cugcauacuuuuuaaaugua

SEQ ID NO: 1347997 - RNA, 15 nt, Human
cugcaguuuugcuau

SEQ ID NO: 1347998 - RNA, 16 nt, Human
cugcaguuuugcuauc

SEQ ID NO: 1347999 - RNA, 21 nt, Human
cugcaguuuugcuaucugggc

SEQ ID NO: 1348000 - RNA, 15 nt, Human
cugcauaauguuucu

SEQ ID NO: 1348001 - RNA, 22 nt, Human
cugcauaauguuucuggauuuc

SEQ ID NO: 1348002 - RNA, 20 nt, Human
cugcauaggaguuuggagga

SEQ ID NO: 1348003 - RNA, 22 nt, Human
cugcauaggaguuuggaggaag

SEQ ID NO: 1348004 - RNA, 23 nt, Human
cugcauaggaguuuggaggaagu

SEQ ID NO: 1348005 - RNA, 14 nt, Human
cugcauauguugaa

SEQ ID NO: 1348006 - RNA, 21 nt, Human
cugcauauguugaauacuuuu

SEQ ID NO: 1348007 - RNA, 17 nt, Human
cugccacccagccccag

SEQ ID NO: 1348008 - RNA, 18 nt, Human
cugccacccagccccagc

SEQ ID NO: 1348009 - RNA, 20 nt, Human
cugccacccagccccagcca

SEQ ID NO: 1348010 - RNA, 23 nt, Human
cugccacccagccccagccaggg

SEQ ID NO: 1348011 - RNA, 12 nt, Human
cugccacccagg

SEQ ID NO: 1348012 - RNA, 14 nt, Human
cugccacccaggau

SEQ ID NO: 1348013 - RNA, 16 nt, Human
cugccacccaggaucc

SEQ ID NO: 1348014 - RNA, 14 nt, Human
cugccacccuugac

SEQ ID NO: 1348015 - RNA, 21 nt, Human
cugccaccuccccccacaagu

SEQ ID NO: 1348016 - RNA, 17 nt, Human
cugccaccuccccccac

SEQ ID NO: 1348017 - RNA, 11 nt, Human
cugccagcugc

SEQ ID NO: 1348018 - RNA, 12 nt, Human
cugccagcugca

SEQ ID NO: 1348019 - RNA, 13 nt, Human
cugccagcugcac

SEQ ID NO: 1348020 - RNA, 11 nt, Human
cugccaggaga

SEQ ID NO: 1348021 - RNA, 16 nt, Human
cugccagcugcacuga

SEQ ID NO: 1348022 - RNA, 17 nt, Human
cugccagcugcacugau

SEQ ID NO: 1348023 - RNA, 15 nt, Human
cugccauuaaagaau

SEQ ID NO: 1348024 - RNA, 23 nt, Human
cugcugccugcuuuuuauggccu

SEQ ID NO: 1348025 - RNA, 14 nt, Human
cugcugccugcuuu

SEQ ID NO: 1348026 - RNA, 11 nt, Human
cugcugccugc

SEQ ID NO: 1348027 - RNA, 15 nt, Human
cugcugccucccucu

SEQ ID NO: 1348028 - RNA, 21 nt, Human
cugcucuuggcuggacccagc

SEQ ID NO: 1348029 - RNA, 22 nt, Human
cugcucuuggcuggacccagcc

SEQ ID NO: 1348030 - RNA, 16 nt, Human
cugcucuuggcuggac

SEQ ID NO: 1348031 - RNA, 17 nt, Human
cugcucuuggcuggacc

SEQ ID NO: 1348032 - RNA, 19 nt, Human
cugcucuuggcuggaccca

SEQ ID NO: 1348033 - RNA, 20 nt, Human
cugcucuuggcuggacccag

SEQ ID NO: 1348034 - RNA, 17 nt, Human
cugcucugguuguuucu

SEQ ID NO: 1348035 - RNA, 18 nt, Human
cugcucugguuguuucug

SEQ ID NO: 1348036 - RNA, 21 nt, Human
cugcucugguuguuucuguuc

SEQ ID NO: 1348037 - RNA, 16 nt, Human
cugcucuugaacuccu

SEQ ID NO: 1348038 - RNA, 18 nt, Human
cugcucuugaacuccuga

SEQ ID NO: 1348039 - RNA, 19 nt, Human
cugcucuugaacuccugac

SEQ ID NO: 1348040 - RNA, 22 nt, Human
cugcucugguuguuucuguucc

SEQ ID NO: 1348041 - RNA, 15 nt, Human
cugcucuuggcugga

SEQ ID NO: 1348042 - RNA, 12 nt, Human
cugcucugaugc

SEQ ID NO: 1348043 - RNA, 13 nt, Human
cugcucugaugca

SEQ ID NO: 1348044 - RNA, 18 nt, Human
cugcucugaugcaucaga

SEQ ID NO: 1348045 - RNA, 20 nt, Human
cugcucugcgugucaccugu

SEQ ID NO: 1348046 - RNA, 21 nt, Human
cugcucugcgugucaccugug

SEQ ID NO: 1348047 - RNA, 22 nt, Human
cugcucugcgugucaccugugc

SEQ ID NO: 1348048 - RNA, 22 nt, Human
cugcgggugaacaaagcagcca

SEQ ID NO: 1348049 - RNA, 23 nt, Human
cugcgggugaacaaagcagccac

SEQ ID NO: 1348050 - RNA, 14 nt, Human
cugcucccauccug

SEQ ID NO: 1348051 - RNA, 19 nt, Human
cugcucccauccugugugu

SEQ ID NO: 1348052 - RNA, 18 nt, Human
cugcucccauccugugug

SEQ ID NO: 1348053 - RNA, 18 nt, Human
cugcucggggugcacagg

SEQ ID NO: 1348054 - RNA, 19 nt, Human
cugcucggggugcacagga

SEQ ID NO: 1348055 - RNA, 20 nt, Human
cugcucggggugcacaggag

SEQ ID NO: 1348056 - RNA, 21 nt, Human
cugcucggggugcacaggagg

SEQ ID NO: 1348057 - RNA, 22 nt, Human
cugcucggggugcacaggaggg

SEQ ID NO: 1348058 - RNA, 23 nt, Human
cugcucggggugcacaggagggg

SEQ ID NO: 1348059 - RNA, 18 nt, Human
cugcucguccccaaguga

SEQ ID NO: 1348060 - RNA, 21 nt, Human
cugcucguccccaagugaccu

SEQ ID NO: 1348061 - RNA, 22 nt, Human
cugcucguccccaagugaccua

SEQ ID NO: 1348062 - RNA, 12 nt, Human
cugcucuaacag

SEQ ID NO: 1348063 - RNA, 17 nt, Human
cugcucuaacagcccuc

SEQ ID NO: 1348064 - RNA, 22 nt, Human
cugccugcuuuuuauggccugu

SEQ ID NO: 1348065 - RNA, 15 nt, Human
cugccugcucccauc

SEQ ID NO: 1348066 - RNA, 18 nt, Human
cugccugcucccauccug

SEQ ID NO: 1348067 - RNA, 18 nt, Human
cugccugcucgcucccug

SEQ ID NO: 1348068 - RNA, 12 nt, Human
cugccugcuugg

SEQ ID NO: 1348069 - RNA, 13 nt, Human
cugccugcuuggg

SEQ ID NO: 1348070 - RNA, 19 nt, Human
cugccuggaagagcagccc

SEQ ID NO: 1348071 - RNA, 13 nt, Human
cugccuuccuccu

SEQ ID NO: 1348072 - RNA, 14 nt, Human
cugccuuccuccug

SEQ ID NO: 1348073 - RNA, 15 nt, Human
cugccuuccuccugg

SEQ ID NO: 1348074 - RNA, 16 nt, Human
cugccuuccuccuggg

SEQ ID NO: 1348075 - RNA, 18 nt, Human
cugccuuccuccugggcc

SEQ ID NO: 1348076 - RNA, 21 nt, Human
cugccuuccuccugggcccuc

SEQ ID NO: 1348077 - RNA, 13 nt, Human
cugccuucgcuuc

SEQ ID NO: 1348078 - RNA, 14 nt, Human
cugccuucgcuucu

SEQ ID NO: 1348079 - RNA, 15 nt, Human
cugccuucgcuucuu

SEQ ID NO: 1348080 - RNA, 17 nt, Human
cugccuucgcuucuugc

SEQ ID NO: 1348081 - RNA, 20 nt, Human
cugccuucgcuucuugccuc

SEQ ID NO: 1348082 - RNA, 12 nt, Human
cugcgcacugug

SEQ ID NO: 1348083 - RNA, 22 nt, Human
cugcgcccuuaacugcauccag

SEQ ID NO: 1348084 - RNA, 15 nt, Human
cugcgggucacagga

SEQ ID NO: 1348085 - RNA, 21 nt, Human
cugcgggucacaggagggagg

SEQ ID NO: 1348086 - RNA, 22 nt, Human
cugcgggucacaggagggaggg

SEQ ID NO: 1348087 - RNA, 23 nt, Human
cugcgggucacaggagggagggg

SEQ ID NO: 1348088 - RNA, 22 nt, Human
cugcccucucccaaaaaacuac

SEQ ID NO: 1348089 - RNA, 15 nt, Human
cugcccugcccugcc

SEQ ID NO: 1348090 - RNA, 14 nt, Human
cugcccugcccugc

SEQ ID NO: 1348091 - RNA, 20 nt, Human
cugccugcaguacuuuaccu

SEQ ID NO: 1348092 - RNA, 21 nt, Human
cugccugcaguacuuuaccuc

SEQ ID NO: 1348093 - RNA, 17 nt, Human
cugccugcauaggaguu

SEQ ID NO: 1348094 - RNA, 15 nt, Human
cugccugccagcugc

SEQ ID NO: 1348095 - RNA, 16 nt, Human
cugccugccagcugca

SEQ ID NO: 1348096 - RNA, 20 nt, Human
cugccugccagcugcacuga

SEQ ID NO: 1348097 - RNA, 21 nt, Human
cugccugccagcugcacugau

SEQ ID NO: 1348098 - RNA, 13 nt, Human
cugccugcuccca

SEQ ID NO: 1348099 - RNA, 14 nt, Human
cugccugcucccau

SEQ ID NO: 1348100 - RNA, 18 nt, Human
cuggaagugacuuuggcu

SEQ ID NO: 1348101 - RNA, 15 nt, Human
cuggaagugacuuug

SEQ ID NO: 1348102 - RNA, 16 nt, Human
cuggaaguccaaugug

SEQ ID NO: 1348103 - RNA, 19 nt, Human
cuggaaguccaauguggca

SEQ ID NO: 1348104 - RNA, 15 nt, Human
cuggaagggaggugg

SEQ ID NO: 1348105 - RNA, 19 nt, Human
cuggaaggggaagggacac

SEQ ID NO: 1348106 - RNA, 18 nt, Human
cuggaagcuaauuugcau

SEQ ID NO: 1348107 - RNA, 19 nt, Human
cuggaagcuaauuugcauu

SEQ ID NO: 1348108 - RNA, 22 nt, Human
cuggaagcuaauuugcauuaaa

SEQ ID NO: 1348109 - RNA, 15 nt, Human
cuggaagcugggagg

SEQ ID NO: 1348110 - RNA, 20 nt, Human
cuggaagcugggaggucagg

SEQ ID NO: 1348111 - RNA, 22 nt, Human
cuggaagccaaaauguaggcuu

SEQ ID NO: 1348112 - RNA, 15 nt, Human
cuggaagccagcuuu

SEQ ID NO: 1348113 - RNA, 16 nt, Human
cuggaagccagcuuuc

SEQ ID NO: 1348114 - RNA, 17 nt, Human
cuggaagccagcuuucc

SEQ ID NO: 1348115 - RNA, 17 nt, Human
cuggaagccccugggcc

SEQ ID NO: 1348116 - RNA, 21 nt, Human
cuggaagccccugggcccagu

SEQ ID NO: 1348117 - RNA, 20 nt, Human
cuggaagccccugggcccag

SEQ ID NO: 1348118 - RNA, 17 nt, Human
cuggaagcuaauuugca

SEQ ID NO: 1348119 - RNA, 18 nt, Human
cugcuuucuguuccaaau

SEQ ID NO: 1348120 - RNA, 17 nt, Human
cugcuuucuguuccaaa

SEQ ID NO: 1348121 - RNA, 19 nt, Human
cugcuuuaaaaaugucuua

SEQ ID NO: 1348122 - RNA, 17 nt, Human
cugcuuugggcugcccu

SEQ ID NO: 1348123 - RNA, 12 nt, Human
cugcuuugggcu

SEQ ID NO: 1348124 - RNA, 13 nt, Human
cugcuuuggaaau

SEQ ID NO: 1348125 - RNA, 21 nt, Human
cugcuuugcucuucaagaaau

SEQ ID NO: 1348126 - RNA, 16 nt, Human
cugcuuugggcugccc

SEQ ID NO: 1348127 - RNA, 20 nt, Human
cugcuuugggaagccgugcu

SEQ ID NO: 1348128 - RNA, 21 nt, Human
cugcuugaugggauucuggac

SEQ ID NO: 1348129 - RNA, 23 nt, Human
cugcuugaugggauucuggacag

SEQ ID NO: 1348130 - RNA, 13 nt, Human
cugcuugauuuuu

SEQ ID NO: 1348131 - RNA, 23 nt, Human
cugcuugccaaggcagaggccug

SEQ ID NO: 1348132 - RNA, 20 nt, Human
cugcuugauuuuugccucuu

SEQ ID NO: 1348133 - RNA, 18 nt, Human
cugcuugccaaggcagag

SEQ ID NO: 1348134 - RNA, 21 nt, Human
cugcuugccaaggcagaggcc

SEQ ID NO: 1348135 - RNA, 13 nt, Human
cugcuugcccuaa

SEQ ID NO: 1348136 - RNA, 15 nt, Human
cugcuugcccuaagc

SEQ ID NO: 1348137 - RNA, 16 nt, Human
cugcuugcccuaagca

SEQ ID NO: 1348138 - RNA, 19 nt, Human
cugcuugcccuaagcagaa

SEQ ID NO: 1348139 - RNA, 22 nt, Human
cugcuugcccuaagcagaaagu

SEQ ID NO: 1348140 - RNA, 20 nt, Human
cugcuugcccuaagcagaaa

SEQ ID NO: 1348141 - RNA, 17 nt, Human
cugcuuggagcugagca

SEQ ID NO: 1348142 - RNA, 16 nt, Human
cugcuuggagcugagc

SEQ ID NO: 1348143 - RNA, 19 nt, Human
cugcuuggggggugaugag

SEQ ID NO: 1348144 - RNA, 22 nt, Human
cugcuuggggggugaugagggc

SEQ ID NO: 1348145 - RNA, 21 nt, Human
cugcuuggggggugaugaggg

SEQ ID NO: 1348146 - RNA, 18 nt, Human
cugcuugguccuugauuu

SEQ ID NO: 1348147 - RNA, 19 nt, Human
cugcuucugacauaaucca

SEQ ID NO: 1348148 - RNA, 21 nt, Human
cugcuucucugacuucugccu

SEQ ID NO: 1348149 - RNA, 22 nt, Human
cugcuucucugacuucugccug

SEQ ID NO: 1348150 - RNA, 23 nt, Human
cugcuucucugacuucugccugg

SEQ ID NO: 1348151 - RNA, 22 nt, Human
cugcuucucccaggcaaggcug

SEQ ID NO: 1348152 - RNA, 20 nt, Human
cugcuucucccaggcaaggc

SEQ ID NO: 1348153 - RNA, 21 nt, Human
cugcuucucccaggcaaggcu

SEQ ID NO: 1348154 - RNA, 13 nt, Human
cugcuucucugac

SEQ ID NO: 1348155 - RNA, 14 nt, Human
cugcuucucugacu

SEQ ID NO: 1348156 - RNA, 15 nt, Human
cugcuucucugacuu

SEQ ID NO: 1348157 - RNA, 16 nt, Human
cugcuucucugacuuc

SEQ ID NO: 1348158 - RNA, 17 nt, Human
cugcuucucugacuucu

SEQ ID NO: 1348159 - RNA, 19 nt, Human
cugcuucucugacuucugc

SEQ ID NO: 1348160 - RNA, 20 nt, Human
cugcuucucugacuucugcc

SEQ ID NO: 1348161 - RNA, 12 nt, Human
cugcuugaggaa

SEQ ID NO: 1348162 - RNA, 13 nt, Human
cugcuugaggaaa

SEQ ID NO: 1348163 - RNA, 14 nt, Human
cugcuugaggaaaa

SEQ ID NO: 1348164 - RNA, 16 nt, Human
cugcuugaggaaaaca

SEQ ID NO: 1348165 - RNA, 14 nt, Human
cugcuguacugaag

SEQ ID NO: 1348166 - RNA, 15 nt, Human
cugcuguacugaagu

SEQ ID NO: 1348167 - RNA, 13 nt, Human
cugcuguacugaa

SEQ ID NO: 1348168 - RNA, 12 nt, Human
cugcuguacuga

SEQ ID NO: 1348169 - RNA, 17 nt, Human
cugcugucccucccccu

SEQ ID NO: 1348170 - RNA, 20 nt, Human
cugcugucccucccccuugu

SEQ ID NO: 1348171 - RNA, 12 nt, Human
cugcuuccugcu

SEQ ID NO: 1348172 - RNA, 13 nt, Human
cugcuuccugcuu

SEQ ID NO: 1348173 - RNA, 15 nt, Human
cugcuuccugcuugc

SEQ ID NO: 1348174 - RNA, 14 nt, Human
cugcuuccugcuug

SEQ ID NO: 1348175 - RNA, 13 nt, Human
cugcuucucccag

SEQ ID NO: 1348176 - RNA, 14 nt, Human
cugcuucucccagg

SEQ ID NO: 1348177 - RNA, 15 nt, Human
cugcuucucccaggc

SEQ ID NO: 1348178 - RNA, 17 nt, Human
cugcuucucccaggcaa

SEQ ID NO: 1348179 - RNA, 18 nt, Human
cugcuucucccaggcaag

SEQ ID NO: 1348180 - RNA, 19 nt, Human
cugcuucucccaggcaagg

SEQ ID NO: 1348181 - RNA, 13 nt, Human
cugcugccugccu

SEQ ID NO: 1348182 - RNA, 13 nt, Human
cugcuggcugccu

SEQ ID NO: 1348183 - RNA, 14 nt, Human
cugcuggcugccuu

SEQ ID NO: 1348184 - RNA, 15 nt, Human
cugcuggcugccuua

SEQ ID NO: 1348185 - RNA, 14 nt, Human
cugcugggcucagu

SEQ ID NO: 1348186 - RNA, 15 nt, Human
cugcugggcucagug

SEQ ID NO: 1348187 - RNA, 18 nt, Human
cugcugggcucagugaag

SEQ ID NO: 1348188 - RNA, 16 nt, Human
cugcugggcucaguga

SEQ ID NO: 1348189 - RNA, 13 nt, Human
cugcuggggccug

SEQ ID NO: 1348190 - RNA, 14 nt, Human
cugcuggggccugg

SEQ ID NO: 1348191 - RNA, 15 nt, Human
cugcuggggccuggg

SEQ ID NO: 1348192 - RNA, 16 nt, Human
cugcuggggccuggga

SEQ ID NO: 1348193 - RNA, 17 nt, Human
cugcuggggccugggac

SEQ ID NO: 1348194 - RNA, 18 nt, Human
cugcuggggccugggaca

SEQ ID NO: 1348195 - RNA, 22 nt, Human
cugcuggggccugggacaacug

SEQ ID NO: 1348196 - RNA, 19 nt, Human
cugcuggggccugggacaa

SEQ ID NO: 1348197 - RNA, 16 nt, Human
cugcugguccguggga

SEQ ID NO: 1348198 - RNA, 17 nt, Human
cugcugguccgugggac

SEQ ID NO: 1348199 - RNA, 19 nt, Human
cucuuuaaaaggaaagaaa

SEQ ID NO: 1348200 - RNA, 19 nt, Human
cucuucuuucauuucuucu

SEQ ID NO: 1348201 - RNA, 16 nt, Human
cucuuguugagccgug

SEQ ID NO: 1348202 - RNA, 21 nt, Human
cucuuguugagccgugggcaa

SEQ ID NO: 1348203 - RNA, 23 nt, Human
cucuuuaaaaggaaagaaaacau

SEQ ID NO: 1348204 - RNA, 20 nt, Human
cucuuuaaaaggaaagaaaa

SEQ ID NO: 1348205 - RNA, 14 nt, Human
cucuuuauacagcu

SEQ ID NO: 1348206 - RNA, 20 nt, Human
cucuuccgugacgucacugg

SEQ ID NO: 1348207 - RNA, 16 nt, Human
cucuuccuacuggucu

SEQ ID NO: 1348208 - RNA, 18 nt, Human
cucuuccuacuggucucu

SEQ ID NO: 1348209 - RNA, 20 nt, Human
cucuuccuacuggucucucu

SEQ ID NO: 1348210 - RNA, 23 nt, Human
cucuucuuaauguacauagugcu

SEQ ID NO: 1348211 - RNA, 20 nt, Human
cucuucuuccagguagcuga

SEQ ID NO: 1348212 - RNA, 24 nt, Human
cucuucuuaauguacauagugcua

SEQ ID NO: 1348213 - RNA, 22 nt, Human
cucuucuuaauguacauagugc

SEQ ID NO: 1348214 - RNA, 18 nt, Human
cucuucuuaauguacaua

SEQ ID NO: 1348215 - RNA, 13 nt, Human
cucuucuuaaugu

SEQ ID NO: 1348216 - RNA, 15 nt, Human
cucuucuugaaauuu

SEQ ID NO: 1348217 - RNA, 20 nt, Human
cucuucuugaaauuuuaacc

SEQ ID NO: 1348218 - RNA, 23 nt, Human
cucuucuuuuaaaccauuuucuu

SEQ ID NO: 1348219 - RNA, 17 nt, Human
cucuucuuuagaacagg

SEQ ID NO: 1348220 - RNA, 12 nt, Human
cucuucuuuaga

SEQ ID NO: 1348221 - RNA, 15 nt, Human
cucuugaacuccuga

SEQ ID NO: 1348222 - RNA, 23 nt, Human
cucuuggggaguuuagggugggg

SEQ ID NO: 1348223 - RNA, 21 nt, Human
cugaaauaaacgucuuaaaua

SEQ ID NO: 1348224 - RNA, 16 nt, Human
cugaaagccauggaga

SEQ ID NO: 1348225 - RNA, 22 nt, Human
cugaaauagacccacaagaggc

SEQ ID NO: 1348226 - RNA, 16 nt, Human
cugaaaggaagcugug

SEQ ID NO: 1348227 - RNA, 17 nt, Human
cucuuucuuucaauaaa

SEQ ID NO: 1348228 - RNA, 15 nt, Human
cucuuucuucccaug

SEQ ID NO: 1348229 - RNA, 15 nt, Human
cucuuucugucuucu

SEQ ID NO: 1348230 - RNA, 15 nt, Human
cucuuucuguauaua

SEQ ID NO: 1348231 - RNA, 21 nt, Human
cucuuuaugcuugcaaaaacu

SEQ ID NO: 1348232 - RNA, 17 nt, Human
cucuuuaugaucuggcc

SEQ ID NO: 1348233 - RNA, 13 nt, Human
cucuuucccuggu

SEQ ID NO: 1348234 - RNA, 14 nt, Human
cucuuucccugguc

SEQ ID NO: 1348235 - RNA, 15 nt, Human
cucuuucccuggucc

SEQ ID NO: 1348236 - RNA, 17 nt, Human
cucuuucccuggucccu

SEQ ID NO: 1348237 - RNA, 13 nt, Human
cucuuugccucaa

SEQ ID NO: 1348238 - RNA, 12 nt, Human
cucuuugagaaa

SEQ ID NO: 1348239 - RNA, 12 nt, Human
cucuuugccuca

SEQ ID NO: 1348240 - RNA, 10 nt, Human
cucuuugaga

SEQ ID NO: 1348241 - RNA, 14 nt, Human
cucuuugagaaaua

SEQ ID NO: 1348242 - RNA, 13 nt, Human
cugaaauuuccug

SEQ ID NO: 1348243 - RNA, 13 nt, Human
cugaaauuucaga

SEQ ID NO: 1348244 - RNA, 23 nt, Human
cugaaauuuccugggagcuuuug

SEQ ID NO: 1348245 - RNA, 18 nt, Human
cugaaaucaauuaaaagu

SEQ ID NO: 1348246 - RNA, 13 nt, Human
cugaaaugaagau

SEQ ID NO: 1348247 - RNA, 20 nt, Human
cugaaauucuccuggagguc

SEQ ID NO: 1348248 - RNA, 16 nt, Human
cugaaauuuccuggga

SEQ ID NO: 1348249 - RNA, 14 nt, Human
cugaaauuucagau

SEQ ID NO: 1348250 - RNA, 13 nt, Human
cugaaauuuuaua

SEQ ID NO: 1348251 - RNA, 19 nt, Human
cugaaauuuuauaugcuua

SEQ ID NO: 1348252 - RNA, 22 nt, Human
cugaacaccauagguagaaugu

SEQ ID NO: 1348253 - RNA, 18 nt, Human
cugaacaccauugaaggc

SEQ ID NO: 1348254 - RNA, 19 nt, Human
cugaacaccauugaaggcu

SEQ ID NO: 1348255 - RNA, 20 nt, Human
cugaacaccauugaaggcuu

SEQ ID NO: 1348256 - RNA, 12 nt, Human
cugaacagcugg

SEQ ID NO: 1348257 - RNA, 13 nt, Human
cugaacagcuggu

SEQ ID NO: 1348258 - RNA, 14 nt, Human
cugaacagcuggug

SEQ ID NO: 1348259 - RNA, 23 nt, Human
cugaagaagcaccaaucaugaau

SEQ ID NO: 1348260 - RNA, 21 nt, Human
cugaacuccugccauagucuu

SEQ ID NO: 1348261 - RNA, 13 nt, Human
cugaacugaacac

SEQ ID NO: 1348262 - RNA, 19 nt, Human
cugaacugauggguuucuc

SEQ ID NO: 1348263 - RNA, 23 nt, Human
cugaagacaccguucauucaggc

SEQ ID NO: 1348264 - RNA, 16 nt, Human
cugaacucugacaaca

SEQ ID NO: 1348265 - RNA, 17 nt, Human
cugaacucugacaacag

SEQ ID NO: 1348266 - RNA, 19 nt, Human
cugaacuaaagugcugcac

SEQ ID NO: 1348267 - RNA, 15 nt, Human
cugaacucaaacuga

SEQ ID NO: 1348268 - RNA, 18 nt, Human
cugaacucaaacugagga

SEQ ID NO: 1348269 - RNA, 13 nt, Human
cugaacucacuuu

SEQ ID NO: 1348270 - RNA, 15 nt, Human
cugaacagcuggugu

SEQ ID NO: 1348271 - RNA, 16 nt, Human
cugaacagcuggugua

SEQ ID NO: 1348272 - RNA, 13 nt, Human
cugaacagcugua

SEQ ID NO: 1348273 - RNA, 12 nt, Human
cugaacagugga

SEQ ID NO: 1348274 - RNA, 19 nt, Human
cugaacagcugguguagcu

SEQ ID NO: 1348275 - RNA, 15 nt, Human
cugaacuaaagugcu

SEQ ID NO: 1348276 - RNA, 22 nt, Human
cucugucuccuaagcuggagug

SEQ ID NO: 1348277 - RNA, 13 nt, Human
cucugucucgagc

SEQ ID NO: 1348278 - RNA, 18 nt, Human
cucugucucgagcgcccu

SEQ ID NO: 1348279 - RNA, 20 nt, Human
cucugucucgagcgcccugc

SEQ ID NO: 1348280 - RNA, 21 nt, Human
cucugucucgagcgcccugca

SEQ ID NO: 1348281 - RNA, 22 nt, Human
cucugucucgagcgcccugcag

SEQ ID NO: 1348282 - RNA, 23 nt, Human
cucugucucgagcgcccugcaga

SEQ ID NO: 1348283 - RNA, 22 nt, Human
cucuggcuuggccacagccagg

SEQ ID NO: 1348284 - RNA, 14 nt, Human
cucugucucaucca

SEQ ID NO: 1348285 - RNA, 15 nt, Human
cucugucucauccau

SEQ ID NO: 1348286 - RNA, 22 nt, Human
cucuggcuccagcuggccggga

SEQ ID NO: 1348287 - RNA, 19 nt, Human
cucuggcuguaaggcucua

SEQ ID NO: 1348288 - RNA, 20 nt, Human
cucuggcuguaaggcucuag

SEQ ID NO: 1348289 - RNA, 21 nt, Human
cucuggcuguaaggcucuaga

SEQ ID NO: 1348290 - RNA, 22 nt, Human
cucuggcuguaaggcucuagau

SEQ ID NO: 1348291 - RNA, 20 nt, Human
cucuggcuuggccacagcca

SEQ ID NO: 1348292 - RNA, 21 nt, Human
cucuggcuuggccacagccag

SEQ ID NO: 1348293 - RNA, 20 nt, Human
cucugugccagagccugggg

SEQ ID NO: 1348294 - RNA, 21 nt, Human
cucugugccagagccuggggc

SEQ ID NO: 1348295 - RNA, 13 nt, Human
cucugugccuucg

SEQ ID NO: 1348296 - RNA, 12 nt, Human
cucugugcuggc

SEQ ID NO: 1348297 - RNA, 15 nt, Human
cucugugcuggccag

SEQ ID NO: 1348298 - RNA, 19 nt, Human
cucugugcuggccagcgag

SEQ ID NO: 1348299 - RNA, 16 nt, Human
cucugugcuggccagc

SEQ ID NO: 1348300 - RNA, 13 nt, Human
cucugugcugugu

SEQ ID NO: 1348301 - RNA, 17 nt, Human
cucugucuggcaaugcc

SEQ ID NO: 1348302 - RNA, 20 nt, Human
cucugucuggcaaugccaca

SEQ ID NO: 1348303 - RNA, 13 nt, Human
cucugucuucugg

SEQ ID NO: 1348304 - RNA, 14 nt, Human
cucugucuucugga

SEQ ID NO: 1348305 - RNA, 17 nt, Human
cucugucuucuggacug

SEQ ID NO: 1348306 - RNA, 17 nt, Human
cucugugagggugcuga

SEQ ID NO: 1348307 - RNA, 20 nt, Human
cucugugcacuuauuuauga

SEQ ID NO: 1348308 - RNA, 14 nt, Human
cucugugccagagc

SEQ ID NO: 1348309 - RNA, 15 nt, Human
cucugugccagagcc

SEQ ID NO: 1348310 - RNA, 16 nt, Human
cucugugccagagccu

SEQ ID NO: 1348311 - RNA, 17 nt, Human
cucugugccagagccug

SEQ ID NO: 1348312 - RNA, 18 nt, Human
cucugugccagagccugg

SEQ ID NO: 1348313 - RNA, 19 nt, Human
cucugugccagagccuggg

SEQ ID NO: 1348314 - RNA, 19 nt, Human
cucuguucauuccuccagg

SEQ ID NO: 1348315 - RNA, 18 nt, Human
cucuguucauuccuccag

SEQ ID NO: 1348316 - RNA, 13 nt, Human
cucuguucauuuc

SEQ ID NO: 1348317 - RNA, 14 nt, Human
cucuguucauuucc

SEQ ID NO: 1348318 - RNA, 17 nt, Human
cucuguucauuccucca

SEQ ID NO: 1348319 - RNA, 15 nt, Human
cucuguucauuccuc

SEQ ID NO: 1348320 - RNA, 18 nt, Human
cucuguucaaagcugccu

SEQ ID NO: 1348321 - RNA, 20 nt, Human
cucuguuaauaaucucacau

SEQ ID NO: 1348322 - RNA, 22 nt, Human
cucuguuacacuuuuuggaagu

SEQ ID NO: 1348323 - RNA, 15 nt, Human
cucuguucaaagcug

SEQ ID NO: 1348324 - RNA, 22 nt, Human
cucuguucaaagcugccugucc

SEQ ID NO: 1348325 - RNA, 18 nt, Human
cucuguguauuugcuuuu

SEQ ID NO: 1348326 - RNA, 19 nt, Human
cucuguguauuugcuuuuu

SEQ ID NO: 1348327 - RNA, 22 nt, Human
cucugugcuuuuaaaugcauaa

SEQ ID NO: 1348328 - RNA, 17 nt, Human
cucugugggcuggcagu

SEQ ID NO: 1348329 - RNA, 17 nt, Human
cucuguucauuuccuca

SEQ ID NO: 1348330 - RNA, 16 nt, Human
cucuguucauuuccuc

SEQ ID NO: 1348331 - RNA, 12 nt, Human
cucuggccuucg

SEQ ID NO: 1348332 - RNA, 22 nt, Human
cucuggcagccacacuucucag

SEQ ID NO: 1348333 - RNA, 19 nt, Human
cucuggccuucggccucca

SEQ ID NO: 1348334 - RNA, 15 nt, Human
cucuggcuccagcug

SEQ ID NO: 1348335 - RNA, 16 nt, Human
cucuggcuccagcugg

SEQ ID NO: 1348336 - RNA, 14 nt, Human
cucuggaggggagg

SEQ ID NO: 1348337 - RNA, 15 nt, Human
cucuggaggggaggg

SEQ ID NO: 1348338 - RNA, 16 nt, Human
cucuggaggggagggg

SEQ ID NO: 1348339 - RNA, 19 nt, Human
cucuggagggguguggcuc

SEQ ID NO: 1348340 - RNA, 20 nt, Human
cucuggagggguguggcucc

SEQ ID NO: 1348341 - RNA, 21 nt, Human
cucuggagggguguggcuccu

SEQ ID NO: 1348342 - RNA, 13 nt, Human
cucucucccuuuu

SEQ ID NO: 1348343 - RNA, 14 nt, Human
cucugcuucucacg

SEQ ID NO: 1348344 - RNA, 12 nt, Human
cucugcuucucu

SEQ ID NO: 1348345 - RNA, 13 nt, Human
cucugcuucucug

SEQ ID NO: 1348346 - RNA, 14 nt, Human
cucugcuucucuga

SEQ ID NO: 1348347 - RNA, 15 nt, Human
cucugcuucucugac

SEQ ID NO: 1348348 - RNA, 16 nt, Human
cucugcuucucugacu

SEQ ID NO: 1348349 - RNA, 17 nt, Human
cucugcuucucugacuu

SEQ ID NO: 1348350 - RNA, 21 nt, Human
cucugcuucucugacuucugc

SEQ ID NO: 1348351 - RNA, 19 nt, Human
cugaggaucagaguaaucc

SEQ ID NO: 1348352 - RNA, 20 nt, Human
cugaggagucugagguccug

SEQ ID NO: 1348353 - RNA, 17 nt, Human
cugaggaucagaguaau

SEQ ID NO: 1348354 - RNA, 15 nt, Human
cugagcugaccagcc

SEQ ID NO: 1348355 - RNA, 12 nt, Human
cugagcugaggc

SEQ ID NO: 1348356 - RNA, 13 nt, Human
cugagcugaggca

SEQ ID NO: 1348357 - RNA, 15 nt, Human
cugagcugaggcagc

SEQ ID NO: 1348358 - RNA, 19 nt, Human
cugaggagucugagguccu

SEQ ID NO: 1348359 - RNA, 12 nt, Human
cugagcucugag

SEQ ID NO: 1348360 - RNA, 13 nt, Human
cugagcucugaga

SEQ ID NO: 1348361 - RNA, 14 nt, Human
cugagcucugagag

SEQ ID NO: 1348362 - RNA, 15 nt, Human
cugagcucugagagg

SEQ ID NO: 1348363 - RNA, 16 nt, Human
cugagcucugagaggc

SEQ ID NO: 1348364 - RNA, 17 nt, Human
cugagcucugagaggcc

SEQ ID NO: 1348365 - RNA, 18 nt, Human
cugagcucugagaggccc

SEQ ID NO: 1348366 - RNA, 19 nt, Human
cugagcucugagaggcccu

SEQ ID NO: 1348367 - RNA, 20 nt, Human
cugagcucugagaggcccug

SEQ ID NO: 1348368 - RNA, 21 nt, Human
cugagcucugagaggcccugg

SEQ ID NO: 1348369 - RNA, 23 nt, Human
cugagcucugagaggcccuggau

SEQ ID NO: 1348370 - RNA, 22 nt, Human
cugagcucugagaggcccugga

SEQ ID NO: 1348371 - RNA, 12 nt, Human
cugaggccacac

SEQ ID NO: 1348372 - RNA, 14 nt, Human
cugaggccacacuc

SEQ ID NO: 1348373 - RNA, 20 nt, Human
cugaggccacacucagcaca

SEQ ID NO: 1348374 - RNA, 21 nt, Human
cugaggccacacucagcacaa

SEQ ID NO: 1348375 - RNA, 24 nt, Human
cugaggccacacucagcacaaggc

SEQ ID NO: 1348376 - RNA, 17 nt, Human
cugaggccacccagagg

SEQ ID NO: 1348377 - RNA, 12 nt, Human
cugaggccagcc

SEQ ID NO: 1348378 - RNA, 13 nt, Human
cugaggccagccu

SEQ ID NO: 1348379 - RNA, 15 nt, Human
cugaggcagcagugu

SEQ ID NO: 1348380 - RNA, 17 nt, Human
cugaggcagcaguguga

SEQ ID NO: 1348381 - RNA, 22 nt, Human
cugaggcagcagugugaggcca

SEQ ID NO: 1348382 - RNA, 23 nt, Human
cugaggcagcagugugaggccag

SEQ ID NO: 1348383 - RNA, 24 nt, Human
cugaggcagcagugugaggccagg

SEQ ID NO: 1348384 - RNA, 14 nt, Human
cugaggccagccug

SEQ ID NO: 1348385 - RNA, 15 nt, Human
cugaggccagccugg

SEQ ID NO: 1348386 - RNA, 16 nt, Human
cugaggccagccuggc

SEQ ID NO: 1348387 - RNA, 17 nt, Human
cugaggccagccuggcc

SEQ ID NO: 1348388 - RNA, 18 nt, Human
cugaggccagccuggccu

SEQ ID NO: 1348389 - RNA, 19 nt, Human
cugaggccagccuggccuc

SEQ ID NO: 1348390 - RNA, 20 nt, Human
cugaggccagccuggccucc

SEQ ID NO: 1348391 - RNA, 22 nt, Human
cugaggccagccuggccuccug

SEQ ID NO: 1348392 - RNA, 15 nt, Human
cugagacaaugccuu

SEQ ID NO: 1348393 - RNA, 17 nt, Human
cugagccagggucucca

SEQ ID NO: 1348394 - RNA, 18 nt, Human
cugagccagggucuccag

SEQ ID NO: 1348395 - RNA, 19 nt, Human
cugagccagggucuccaga

SEQ ID NO: 1348396 - RNA, 22 nt, Human
cugagccagggucuccagaaag

SEQ ID NO: 1348397 - RNA, 16 nt, Human
cugagccagugucagg

SEQ ID NO: 1348398 - RNA, 22 nt, Human
cugagccagugucaggaggaag

SEQ ID NO: 1348399 - RNA, 20 nt, Human
cugagccagggucuccagaa

SEQ ID NO: 1348400 - RNA, 23 nt, Human
cugagcccgguaagagcaaaaga

SEQ ID NO: 1348401 - RNA, 16 nt, Human
cugagccucagucucc

SEQ ID NO: 1348402 - RNA, 21 nt, Human
cugagccucagucucccuccc

SEQ ID NO: 1348403 - RNA, 18 nt, Human
cugagccggccccaggcu

SEQ ID NO: 1348404 - RNA, 19 nt, Human
cugagccggccccaggcuc

SEQ ID NO: 1348405 - RNA, 23 nt, Human
cugagccggccccaggcucgugg

SEQ ID NO: 1348406 - RNA, 16 nt, Human
cugagccggccccagg

SEQ ID NO: 1348407 - RNA, 20 nt, Human
cugagcgacagugagacucu

SEQ ID NO: 1348408 - RNA, 16 nt, Human
cugagcgacagugaga

SEQ ID NO: 1348409 - RNA, 15 nt, Human
cugagccuuguaauu

SEQ ID NO: 1348410 - RNA, 16 nt, Human
cugagccuuguaauuc

SEQ ID NO: 1348411 - RNA, 22 nt, Human
cugagccucagucucccucccu

SEQ ID NO: 1348412 - RNA, 12 nt, Human
cugagccugccg

SEQ ID NO: 1348413 - RNA, 13 nt, Human
cugagccugccga

SEQ ID NO: 1348414 - RNA, 14 nt, Human
cugagccugccgag

SEQ ID NO: 1348415 - RNA, 15 nt, Human
cugagccugccgagc

SEQ ID NO: 1348416 - RNA, 16 nt, Human
cugagccugccgagca

SEQ ID NO: 1348417 - RNA, 19 nt, Human
cugagccugccgagcaacc

SEQ ID NO: 1348418 - RNA, 16 nt, Human
cugagcuauguaguau

SEQ ID NO: 1348419 - RNA, 14 nt, Human
cugagcucacaagg

SEQ ID NO: 1348420 - RNA, 17 nt, Human
cugagcucacaaggcag

SEQ ID NO: 1348421 - RNA, 18 nt, Human
cugagcucacaaggcagc

SEQ ID NO: 1348422 - RNA, 19 nt, Human
cugagcucacaaggcagca

SEQ ID NO: 1348423 - RNA, 20 nt, Human
cugagcucacaaggcagcaa

SEQ ID NO: 1348424 - RNA, 23 nt, Human
cugagcucacaaggcagcaaggc

SEQ ID NO: 1348425 - RNA, 22 nt, Human
cugagcucacaaggcagcaagg

SEQ ID NO: 1348426 - RNA, 15 nt, Human
cugagcucagcgugg

SEQ ID NO: 1348427 - RNA, 16 nt, Human
cugagcucagcgugga

SEQ ID NO: 1348428 - RNA, 17 nt, Human
cugagcucagcguggag

SEQ ID NO: 1348429 - RNA, 22 nt, Human
cugagcuccagcuccuuugggc

SEQ ID NO: 1348430 - RNA, 17 nt, Human
cugagcuccagcuccuu

SEQ ID NO: 1348431 - RNA, 12 nt, Human
cugagcuccugu

SEQ ID NO: 1348432 - RNA, 17 nt, Human
cugagcuccuguccccu

SEQ ID NO: 1348433 - RNA, 22 nt, Human
cugagcuccuguccccugcuac

SEQ ID NO: 1348434 - RNA, 21 nt, Human
cugagccuuguaauucuaaau

SEQ ID NO: 1348435 - RNA, 20 nt, Human
cugagcgaggagaugcuccu

SEQ ID NO: 1348436 - RNA, 21 nt, Human
cugagcgaguggagucugcca

SEQ ID NO: 1348437 - RNA, 15 nt, Human
cugagcgccaggaug

SEQ ID NO: 1348438 - RNA, 13 nt, Human
cugagcgccucca

SEQ ID NO: 1348439 - RNA, 15 nt, Human
cugagcgccuccauc

SEQ ID NO: 1348440 - RNA, 22 nt, Human
cugagcgccuccauccaaggcc

SEQ ID NO: 1348441 - RNA, 18 nt, Human
cugagcgaguggagucug

SEQ ID NO: 1348442 - RNA, 15 nt, Human
cugagcuagaacccu

SEQ ID NO: 1348443 - RNA, 13 nt, Human
cugagcuauuuca

SEQ ID NO: 1348444 - RNA, 16 nt, Human
cugagcuauuucaucu

SEQ ID NO: 1348445 - RNA, 21 nt, Human
cugagcuauuucaucuauuuu

SEQ ID NO: 1348446 - RNA, 14 nt, Human
cugagaaauuuaua

SEQ ID NO: 1348447 - RNA, 11 nt, Human
cugagaaauuu

SEQ ID NO: 1348448 - RNA, 16 nt, Human
cugagaaagcucaaag

SEQ ID NO: 1348449 - RNA, 22 nt, Human
cugagaaccguagaugauuuca

SEQ ID NO: 1348450 - RNA, 15 nt, Human
cugacuuggcuggug

SEQ ID NO: 1348451 - RNA, 16 nt, Human
cugacuuggcuggugu

SEQ ID NO: 1348452 - RNA, 17 nt, Human
cugacuuggcuggugug

SEQ ID NO: 1348453 - RNA, 20 nt, Human
cugacuuggcugguguggua

SEQ ID NO: 1348454 - RNA, 22 nt, Human
cugacuuggcuggugugguaca

SEQ ID NO: 1348455 - RNA, 19 nt, Human
cugacuuucuuuuuugaua

SEQ ID NO: 1348456 - RNA, 16 nt, Human
cugagaaucagacuga

SEQ ID NO: 1348457 - RNA, 21 nt, Human
cugagaauuguugagauacuu

SEQ ID NO: 1348458 - RNA, 12 nt, Human
cugagaaccugg

SEQ ID NO: 1348459 - RNA, 13 nt, Human
cugagaaccuggc

SEQ ID NO: 1348460 - RNA, 14 nt, Human
cugagaaccuggcc

SEQ ID NO: 1348461 - RNA, 15 nt, Human
cugagaaccuggccu

SEQ ID NO: 1348462 - RNA, 16 nt, Human
cugagaaccuggccuu

SEQ ID NO: 1348463 - RNA, 17 nt, Human
cugagaaccuggccuuc

SEQ ID NO: 1348464 - RNA, 18 nt, Human
cugagaaccuggccuuca

SEQ ID NO: 1348465 - RNA, 19 nt, Human
cugagaaccuggccuucag

SEQ ID NO: 1348466 - RNA, 20 nt, Human
cugagaaccuggccuucagu

SEQ ID NO: 1348467 - RNA, 16 nt, Human
cugagaagcucugaag

SEQ ID NO: 1348468 - RNA, 13 nt, Human
cugagaagcucug

SEQ ID NO: 1348469 - RNA, 17 nt, Human
cugacucuuaagaagac

SEQ ID NO: 1348470 - RNA, 18 nt, Human
cugacuagggagccaugu

SEQ ID NO: 1348471 - RNA, 18 nt, Human
cugacuauucuugaugua

SEQ ID NO: 1348472 - RNA, 19 nt, Human
cugacuauucuugauguaa

SEQ ID NO: 1348473 - RNA, 20 nt, Human
cugacuauucuugauguaaa

SEQ ID NO: 1348474 - RNA, 21 nt, Human
cugacuauucuugauguaaaa

SEQ ID NO: 1348475 - RNA, 22 nt, Human
cugacuauucuugauguaaaau

SEQ ID NO: 1348476 - RNA, 23 nt, Human
cugacuauucuugauguaaaauc

SEQ ID NO: 1348477 - RNA, 22 nt, Human
cugacucacaccugaacugaac

SEQ ID NO: 1348478 - RNA, 12 nt, Human
cugacucagggc

SEQ ID NO: 1348479 - RNA, 14 nt, Human
cugacucagggcuc

SEQ ID NO: 1348480 - RNA, 15 nt, Human
cugacucagggcucc

SEQ ID NO: 1348481 - RNA, 17 nt, Human
cugacuucaucucccac

SEQ ID NO: 1348482 - RNA, 23 nt, Human
cugacuucaucucccaccuagca

SEQ ID NO: 1348483 - RNA, 11 nt, Human
cugacuucugc

SEQ ID NO: 1348484 - RNA, 12 nt, Human
cugacuucugcc

SEQ ID NO: 1348485 - RNA, 13 nt, Human
cugacuucugccu

SEQ ID NO: 1348486 - RNA, 14 nt, Human
cugacuucugccug

SEQ ID NO: 1348487 - RNA, 15 nt, Human
cugacuucugccugg

SEQ ID NO: 1348488 - RNA, 16 nt, Human
cugacuucugccugga

SEQ ID NO: 1348489 - RNA, 18 nt, Human
cugacuucugccuggaga

SEQ ID NO: 1348490 - RNA, 19 nt, Human
cugacuucugccuggagac

SEQ ID NO: 1348491 - RNA, 12 nt, Human
cugacuuggcug

SEQ ID NO: 1348492 - RNA, 14 nt, Human
cugacuuggcuggu

SEQ ID NO: 1348493 - RNA, 11 nt, Human
cugacagcagc

SEQ ID NO: 1348494 - RNA, 15 nt, Human
cugacagcagcaucu

SEQ ID NO: 1348495 - RNA, 16 nt, Human
cugacagcagcaucuc

SEQ ID NO: 1348496 - RNA, 17 nt, Human
cugacagcagcaucucu

SEQ ID NO: 1348497 - RNA, 21 nt, Human
cugacaggugaggucuguucc

SEQ ID NO: 1348498 - RNA, 19 nt, Human
cugacaguuuacagacgcu

SEQ ID NO: 1348499 - RNA, 13 nt, Human
cugacaucaaaaa

SEQ ID NO: 1348500 - RNA, 15 nt, Human
cugacaucaaaaaag

SEQ ID NO: 1348501 - RNA, 17 nt, Human
cugacaucaaaaaaggc

SEQ ID NO: 1348502 - RNA, 23 nt, Human
cugacaugaagcuguugugugag

SEQ ID NO: 1348503 - RNA, 14 nt, Human
cugacauguggggc

SEQ ID NO: 1348504 - RNA, 19 nt, Human
cugacauguggggccaggu

SEQ ID NO: 1348505 - RNA, 21 nt, Human
cugacauguggggccagguca

SEQ ID NO: 1348506 - RNA, 18 nt, Human
cugacauuuggaguguuc

SEQ ID NO: 1348507 - RNA, 21 nt, Human
cugacauuuggaguguucccc

SEQ ID NO: 1348508 - RNA, 15 nt, Human
cugaccaaacagcca

SEQ ID NO: 1348509 - RNA, 15 nt, Human
cugaccacacgcggg

SEQ ID NO: 1348510 - RNA, 21 nt, Human
cugacuagggagccauguuuc

SEQ ID NO: 1348511 - RNA, 21 nt, Human
cucucucauacccucccuccc

SEQ ID NO: 1348512 - RNA, 23 nt, Human
cucucuaggguacauggugcugg

SEQ ID NO: 1348513 - RNA, 14 nt, Human
cucucuauccucuc

SEQ ID NO: 1348514 - RNA, 24 nt, Human
cucucuauccucucuuccucuucc

SEQ ID NO: 1348515 - RNA, 14 nt, Human
cucucuaugccucu

SEQ ID NO: 1348516 - RNA, 22 nt, Human
cucucuaggguacauggugcug

SEQ ID NO: 1348517 - RNA, 15 nt, Human
cucuccugucucccu

SEQ ID NO: 1348518 - RNA, 17 nt, Human
cucuccugucucccucc

SEQ ID NO: 1348519 - RNA, 16 nt, Human
cucuccuggcuuccca

SEQ ID NO: 1348520 - RNA, 17 nt, Human
cucuccuggcuucccau

SEQ ID NO: 1348521 - RNA, 18 nt, Human
cucuccugucucccuccu

SEQ ID NO: 1348522 - RNA, 22 nt, Human
cucuccuucaugacagccucca

SEQ ID NO: 1348523 - RNA, 14 nt, Human
cucuccuuccugug

SEQ ID NO: 1348524 - RNA, 12 nt, Human
cucuccuggcuu

SEQ ID NO: 1348525 - RNA, 13 nt, Human
cucuccuggcuuc

SEQ ID NO: 1348526 - RNA, 22 nt, Human
cucuccuggcuucccaucccca

SEQ ID NO: 1348527 - RNA, 18 nt, Human
cucuccagccucagcucu

SEQ ID NO: 1348528 - RNA, 15 nt, Human
cucuccacugccuuc

SEQ ID NO: 1348529 - RNA, 14 nt, Human
cucuccagcugacu

SEQ ID NO: 1348530 - RNA, 15 nt, Human
cucuccagcugacua

SEQ ID NO: 1348531 - RNA, 16 nt, Human
cucuccagcugacuaa

SEQ ID NO: 1348532 - RNA, 14 nt, Human
cucuccucuugcca

SEQ ID NO: 1348533 - RNA, 15 nt, Human
cucuccucuugccac

SEQ ID NO: 1348534 - RNA, 16 nt, Human
cucuccucuugccacu

SEQ ID NO: 1348535 - RNA, 17 nt, Human
cucuccucuugccacug

SEQ ID NO: 1348536 - RNA, 19 nt, Human
cucuccucuugccacugcc

SEQ ID NO: 1348537 - RNA, 22 nt, Human
cucuccucuugccacugccucu

SEQ ID NO: 1348538 - RNA, 12 nt, Human
cucuccucuucu

SEQ ID NO: 1348539 - RNA, 15 nt, Human
cucuccugccccuug

SEQ ID NO: 1348540 - RNA, 16 nt, Human
cucuccaaaccacuuu

SEQ ID NO: 1348541 - RNA, 15 nt, Human
cucuccaaaccacuu

SEQ ID NO: 1348542 - RNA, 18 nt, Human
cucucauuuagccugucc

SEQ ID NO: 1348543 - RNA, 17 nt, Human
cucucauuuagccuguc

SEQ ID NO: 1348544 - RNA, 12 nt, Human
cucuccacugcc

SEQ ID NO: 1348545 - RNA, 14 nt, Human
cucuccacugccuu

SEQ ID NO: 1348546 - RNA, 22 nt, Human
cucuccacucaugugacucuuu

SEQ ID NO: 1348547 - RNA, 11 nt, Human
cucuccacugc

SEQ ID NO: 1348548 - RNA, 21 nt, Human
cucuccacucaugugacucuu

SEQ ID NO: 1348549 - RNA, 17 nt, Human
cucuauaccaauaaagu

SEQ ID NO: 1348550 - RNA, 16 nt, Human
cucuauaccaauaaag

SEQ ID NO: 1348551 - RNA, 15 nt, Human
cucuauaccaauaaa

SEQ ID NO: 1348552 - RNA, 13 nt, Human
cucuaguucuuug

SEQ ID NO: 1348553 - RNA, 15 nt, Human
cucuaguucuuuguu

SEQ ID NO: 1348554 - RNA, 18 nt, Human
cucuaguucuuuguucau

SEQ ID NO: 1348555 - RNA, 17 nt, Human
cucuagugcgguuuacu

SEQ ID NO: 1348556 - RNA, 21 nt, Human
cucuaguuuuuucuuccuuuu

SEQ ID NO: 1348557 - RNA, 15 nt, Human
cucuaggaaauauuu

SEQ ID NO: 1348558 - RNA, 13 nt, Human
cucuagaguccaa

SEQ ID NO: 1348559 - RNA, 15 nt, Human
cucuagaguccaagg

SEQ ID NO: 1348560 - RNA, 16 nt, Human
cucuagaguccaaggu

SEQ ID NO: 1348561 - RNA, 14 nt, Human
cucuagaucauaag

SEQ ID NO: 1348562 - RNA, 12 nt, Human
cucuagauucca

SEQ ID NO: 1348563 - RNA, 12 nt, Human
cucuagaaucug

SEQ ID NO: 1348564 - RNA, 16 nt, Human
cucuagacacugccac

SEQ ID NO: 1348565 - RNA, 21 nt, Human
cucuagacacugccacacagg

SEQ ID NO: 1348566 - RNA, 21 nt, Human
cucuagagaaauaagaucuuu

SEQ ID NO: 1348567 - RNA, 19 nt, Human
cucuagagcagacuacagc

SEQ ID NO: 1348568 - RNA, 13 nt, Human
cucuagagcaggg

SEQ ID NO: 1348569 - RNA, 16 nt, Human
cucuagagcagggauu

SEQ ID NO: 1348570 - RNA, 22 nt, Human
cucuagagcagacuacagcugg

SEQ ID NO: 1348571 - RNA, 17 nt, Human
cucuaggaaauauuuau

SEQ ID NO: 1348572 - RNA, 16 nt, Human
cucuagcugugggggu

SEQ ID NO: 1348573 - RNA, 21 nt, Human
cucuaggguacauggugcugg

SEQ ID NO: 1348574 - RNA, 23 nt, Human
cucuagguacgaugacaguguuc

SEQ ID NO: 1348575 - RNA, 15 nt, Human
cucuaguauuccaga

SEQ ID NO: 1348576 - RNA, 15 nt, Human
cucuagucaaugaca

SEQ ID NO: 1348577 - RNA, 18 nt, Human
cucuagucaaugacauga

SEQ ID NO: 1348578 - RNA, 22 nt, Human
cucuagucaaugacaugaauuu

SEQ ID NO: 1348579 - RNA, 17 nt, Human
cucuacaucuucugccu

SEQ ID NO: 1348580 - RNA, 18 nt, Human
cucuacaucuucugccuu

SEQ ID NO: 1348581 - RNA, 12 nt, Human
cucuaccugaca

SEQ ID NO: 1348582 - RNA, 22 nt, Human
cucuaccugacacucccuuggg

SEQ ID NO: 1348583 - RNA, 19 nt, Human
cucuacccauauuacagau

SEQ ID NO: 1348584 - RNA, 16 nt, Human
cucuacccauauuaca

SEQ ID NO: 1348585 - RNA, 14 nt, Human
cucuaccccaauuu

SEQ ID NO: 1348586 - RNA, 16 nt, Human
cucuacuuagcauguc

SEQ ID NO: 1348587 - RNA, 17 nt, Human
cucuacuuaauccaaug

SEQ ID NO: 1348588 - RNA, 18 nt, Human
cucuacuuaauccaaugg

SEQ ID NO: 1348589 - RNA, 17 nt, Human
cucuacuuagcaugucc

SEQ ID NO: 1348590 - RNA, 19 nt, Human
cucuacuuagcaugucccu

SEQ ID NO: 1348591 - RNA, 20 nt, Human
cucuacuuagcaugucccua

SEQ ID NO: 1348592 - RNA, 14 nt, Human
cucuaccuucuccc

SEQ ID NO: 1348593 - RNA, 15 nt, Human
cucuaccuucucccc

SEQ ID NO: 1348594 - RNA, 16 nt, Human
cucuaccuucucccca

SEQ ID NO: 1348595 - RNA, 18 nt, Human
cucuaccuucuccccagc

SEQ ID NO: 1348596 - RNA, 21 nt, Human
cucuaccuucuccccagcucc

SEQ ID NO: 1348597 - RNA, 22 nt, Human
cucuaccuucuccccagcuccc

SEQ ID NO: 1348598 - RNA, 21 nt, Human
cucuacuaacaaucagcuccu

SEQ ID NO: 1348599 - RNA, 20 nt, Human
cucuacuaaugccucuucau

SEQ ID NO: 1348600 - RNA, 17 nt, Human
cucuacugaaugucauu

SEQ ID NO: 1348601 - RNA, 20 nt, Human
cucuacugaaugucauugaa

SEQ ID NO: 1348602 - RNA, 12 nt, Human
cucuacugggaa

SEQ ID NO: 1348603 - RNA, 13 nt, Human
cucuacugggaag

SEQ ID NO: 1348604 - RNA, 16 nt, Human
cucuacugggaaggcu

SEQ ID NO: 1348605 - RNA, 19 nt, Human
cucuacugggaaggcuacu

SEQ ID NO: 1348606 - RNA, 16 nt, Human
cucgcugccagcucug

SEQ ID NO: 1348607 - RNA, 19 nt, Human
cucgcugccagcucuguau

SEQ ID NO: 1348608 - RNA, 21 nt, Human
cuccuucaacaauucuaaaau

SEQ ID NO: 1348609 - RNA, 15 nt, Human
cucgcuggacucuca

SEQ ID NO: 1348610 - RNA, 16 nt, Human
cucgcuggacucucag

SEQ ID NO: 1348611 - RNA, 19 nt, Human
cucgcuggacucucagucu

SEQ ID NO: 1348612 - RNA, 18 nt, Human
cucgcuguccuuucuaga

SEQ ID NO: 1348613 - RNA, 17 nt, Human
cucggcucacugcaucc

SEQ ID NO: 1348614 - RNA, 18 nt, Human
cucggcucacugcauccu

SEQ ID NO: 1348615 - RNA, 19 nt, Human
cucggcuccccaugugucc

SEQ ID NO: 1348616 - RNA, 22 nt, Human
cucggcuccccauguguccugg

SEQ ID NO: 1348617 - RNA, 13 nt, Human
cucggaggaagcc

SEQ ID NO: 1348618 - RNA, 17 nt, Human
cucggaggaagccccca

SEQ ID NO: 1348619 - RNA, 21 nt, Human
cucuacagcuaaucagcauuc

SEQ ID NO: 1348620 - RNA, 23 nt, Human
cucuacagagcuucccugacuca

SEQ ID NO: 1348621 - RNA, 15 nt, Human
cucuacaucuucugc

SEQ ID NO: 1348622 - RNA, 17 nt, Human
cucuacagagcuucccu

SEQ ID NO: 1348623 - RNA, 18 nt, Human
cucuacagagcuucccug

SEQ ID NO: 1348624 - RNA, 20 nt, Human
cucuacagagcuucccugac

SEQ ID NO: 1348625 - RNA, 22 nt, Human
cucuacagagcuucccugacuc

SEQ ID NO: 1348626 - RNA, 18 nt, Human
cucuaauucuauuaaagu

SEQ ID NO: 1348627 - RNA, 17 nt, Human
cucuaauucuuccuuug

SEQ ID NO: 1348628 - RNA, 16 nt, Human
cucuacaaacucccac

SEQ ID NO: 1348629 - RNA, 17 nt, Human
cucuacaaacucccacu

SEQ ID NO: 1348630 - RNA, 15 nt, Human
cucuacacucuugua

SEQ ID NO: 1348631 - RNA, 20 nt, Human
cucuaauucacagugcucuu

SEQ ID NO: 1348632 - RNA, 17 nt, Human
cucuaacgccugagccc

SEQ ID NO: 1348633 - RNA, 18 nt, Human
cucuaacgccugagccca

SEQ ID NO: 1348634 - RNA, 20 nt, Human
cucuaacgccugagcccagg

SEQ ID NO: 1348635 - RNA, 21 nt, Human
cucuaacgccugagcccaggg

SEQ ID NO: 1348636 - RNA, 22 nt, Human
cucuaacgccugagcccaggga

SEQ ID NO: 1348637 - RNA, 20 nt, Human
cucuaacuuggcucacacuc

SEQ ID NO: 1348638 - RNA, 12 nt, Human
cucuaagaaaga

SEQ ID NO: 1348639 - RNA, 14 nt, Human
cucuaagaaagaac

SEQ ID NO: 1348640 - RNA, 14 nt, Human
cucuaagaucuuag

SEQ ID NO: 1348641 - RNA, 16 nt, Human
cucuaagaucuuagau

SEQ ID NO: 1348642 - RNA, 19 nt, Human
cucuaagaucuuagauucu

SEQ ID NO: 1348643 - RNA, 22 nt, Human
cucuaagaucuuagauucucug

SEQ ID NO: 1348644 - RNA, 13 nt, Human
cucuaacauuucc

SEQ ID NO: 1348645 - RNA, 12 nt, Human
cucuaacgccug

SEQ ID NO: 1348646 - RNA, 13 nt, Human
cucuaacgccuga

SEQ ID NO: 1348647 - RNA, 15 nt, Human
cucuaacgccugagc

SEQ ID NO: 1348648 - RNA, 16 nt, Human
cucuaacgccugagcc

SEQ ID NO: 1348649 - RNA, 22 nt, Human
cuccuccaggguggcagcaaca

SEQ ID NO: 1348650 - RNA, 15 nt, Human
cuccuccaugggaga

SEQ ID NO: 1348651 - RNA, 18 nt, Human
cuccuccaugggagaaaa

SEQ ID NO: 1348652 - RNA, 15 nt, Human
cuccucccacccggc

SEQ ID NO: 1348653 - RNA, 12 nt, Human
cuccucccaggg

SEQ ID NO: 1348654 - RNA, 14 nt, Human
cuccucccaggguu

SEQ ID NO: 1348655 - RNA, 21 nt, Human
cuccuccaggguggcagcaac

SEQ ID NO: 1348656 - RNA, 13 nt, Human
cuccuccagggug

SEQ ID NO: 1348657 - RNA, 14 nt, Human
cuccuccaccucaa

SEQ ID NO: 1348658 - RNA, 15 nt, Human
cuccuccaggaagcc

SEQ ID NO: 1348659 - RNA, 15 nt, Human
cuccuccaccucaac

SEQ ID NO: 1348660 - RNA, 16 nt, Human
cuccuccaggaagccu

SEQ ID NO: 1348661 - RNA, 13 nt, Human
cuccuccagggac

SEQ ID NO: 1348662 - RNA, 14 nt, Human
cuccuccagggaca

SEQ ID NO: 1348663 - RNA, 15 nt, Human
cuccucaucccgugu

SEQ ID NO: 1348664 - RNA, 11 nt, Human
cuccucaugua

SEQ ID NO: 1348665 - RNA, 20 nt, Human
cuccucauguacauacccug

SEQ ID NO: 1348666 - RNA, 18 nt, Human
cuccucauucacaucgca

SEQ ID NO: 1348667 - RNA, 17 nt, Human
cuccucgagaucccaac

SEQ ID NO: 1348668 - RNA, 15 nt, Human
cuccuccuuuuucca

SEQ ID NO: 1348669 - RNA, 21 nt, Human
cuccucgagaucccaacacug

SEQ ID NO: 1348670 - RNA, 24 nt, Human
cuccucgagaucccaacacugcca

SEQ ID NO: 1348671 - RNA, 15 nt, Human
cuccucuccccagcc

SEQ ID NO: 1348672 - RNA, 14 nt, Human
cuccucccggugcc

SEQ ID NO: 1348673 - RNA, 14 nt, Human
cuccuccccuggag

SEQ ID NO: 1348674 - RNA, 23 nt, Human
cuccuccccuggagggggaaugg

SEQ ID NO: 1348675 - RNA, 22 nt, Human
cuccucccaggguuuuaacuuu

SEQ ID NO: 1348676 - RNA, 21 nt, Human
cuccucccaggguuuuaacuu

SEQ ID NO: 1348677 - RNA, 19 nt, Human
cuccuccccaacugugggg

SEQ ID NO: 1348678 - RNA, 15 nt, Human
cuccucccggugccc

SEQ ID NO: 1348679 - RNA, 17 nt, Human
cuccucccggugcccaa

SEQ ID NO: 1348680 - RNA, 15 nt, Human
cuccuccccuggagg

SEQ ID NO: 1348681 - RNA, 10 nt, Human
cuccucccuc

SEQ ID NO: 1348682 - RNA, 16 nt, Human
cuccucccucccucuc

SEQ ID NO: 1348683 - RNA, 22 nt, Human
cucccucaucaaggacacgggc

SEQ ID NO: 1348684 - RNA, 23 nt, Human
cucccucaucaaggacacgggcc

SEQ ID NO: 1348685 - RNA, 13 nt, Human
cucccucauucca

SEQ ID NO: 1348686 - RNA, 14 nt, Human
cucccucagugccc

SEQ ID NO: 1348687 - RNA, 23 nt, Human
cucccucagugcccucauuuuau

SEQ ID NO: 1348688 - RNA, 15 nt, Human
cuccgccucccgggu

SEQ ID NO: 1348689 - RNA, 17 nt, Human
cuccgcccugccacuca

SEQ ID NO: 1348690 - RNA, 15 nt, Human
cuccgcccugccacu

SEQ ID NO: 1348691 - RNA, 16 nt, Human
cuccgcccugccacuc

SEQ ID NO: 1348692 - RNA, 13 nt, Human
cuccgcccugcca

SEQ ID NO: 1348693 - RNA, 14 nt, Human
cuccgcccugccac

SEQ ID NO: 1348694 - RNA, 13 nt, Human
cuccgccauccac

SEQ ID NO: 1348695 - RNA, 15 nt, Human
cuccgcccccaggua

SEQ ID NO: 1348696 - RNA, 16 nt, Human
cuccgcccccagguag

SEQ ID NO: 1348697 - RNA, 17 nt, Human
cuccucacccccagcuu

SEQ ID NO: 1348698 - RNA, 20 nt, Human
cuccucacccccagcuuugc

SEQ ID NO: 1348699 - RNA, 21 nt, Human
cuccucacccccagcuuugcu

SEQ ID NO: 1348700 - RNA, 16 nt, Human
cuccugccucagccuc

SEQ ID NO: 1348701 - RNA, 12 nt, Human
cuccugccucua

SEQ ID NO: 1348702 - RNA, 22 nt, Human
cuccugccucuacugggaaggc

SEQ ID NO: 1348703 - RNA, 15 nt, Human
cuccugccucuacug

SEQ ID NO: 1348704 - RNA, 16 nt, Human
cuccugccuuccuccu

SEQ ID NO: 1348705 - RNA, 18 nt, Human
cuccugccuuccuccugg

SEQ ID NO: 1348706 - RNA, 19 nt, Human
cuccugccuuccuccuggg

SEQ ID NO: 1348707 - RNA, 20 nt, Human
cuccugccuuccuccugggc

SEQ ID NO: 1348708 - RNA, 21 nt, Human
cuccugccuugaaaaagacau

SEQ ID NO: 1348709 - RNA, 14 nt, Human
cuccugccuugaaa

SEQ ID NO: 1348710 - RNA, 23 nt, Human
cuccugcuaacggugcucagggg

SEQ ID NO: 1348711 - RNA, 21 nt, Human
cuccuguggccccacccuggg

SEQ ID NO: 1348712 - RNA, 22 nt, Human
cuccuguggccccacccugggc

SEQ ID NO: 1348713 - RNA, 13 nt, Human
cuccugugggagc

SEQ ID NO: 1348714 - RNA, 15 nt, Human
cuccugugggagccu

SEQ ID NO: 1348715 - RNA, 16 nt, Human
cuccugugggagccuc

SEQ ID NO: 1348716 - RNA, 17 nt, Human
cuccugugggagccucg

SEQ ID NO: 1348717 - RNA, 18 nt, Human
cuccugugggagccucgc

SEQ ID NO: 1348718 - RNA, 19 nt, Human
cuccugugggagccucgca

SEQ ID NO: 1348719 - RNA, 11 nt, Human
cuccugugacc

SEQ ID NO: 1348720 - RNA, 14 nt, Human
cuccugugcucagc

SEQ ID NO: 1348721 - RNA, 16 nt, Human
cuccugugcucagccc

SEQ ID NO: 1348722 - RNA, 17 nt, Human
cuccugugcucagcccu

SEQ ID NO: 1348723 - RNA, 19 nt, Human
cuccugugcucagcccuga

SEQ ID NO: 1348724 - RNA, 20 nt, Human
cuccugugcucagcccugag

SEQ ID NO: 1348725 - RNA, 22 nt, Human
cuccugugcucagcccugagga

SEQ ID NO: 1348726 - RNA, 13 nt, Human
cuccuguggcccc

SEQ ID NO: 1348727 - RNA, 19 nt, Human
cuccuguggccccacccug

SEQ ID NO: 1348728 - RNA, 20 nt, Human
cuccuguggccccacccugg

SEQ ID NO: 1348729 - RNA, 18 nt, Human
cuccugcacuuacuugcu

SEQ ID NO: 1348730 - RNA, 19 nt, Human
cuccugcacuuacuugcuu

SEQ ID NO: 1348731 - RNA, 20 nt, Human
cuccugcacuuacuugcuua

SEQ ID NO: 1348732 - RNA, 22 nt, Human
cuccugcacuuacuugcuuauu

SEQ ID NO: 1348733 - RNA, 17 nt, Human
cuccucuccccagccca

SEQ ID NO: 1348734 - RNA, 18 nt, Human
cuccucuccccagcccag

SEQ ID NO: 1348735 - RNA, 19 nt, Human
cuccucuccccagcccaga

SEQ ID NO: 1348736 - RNA, 20 nt, Human
cuccucuccccagcccagag

SEQ ID NO: 1348737 - RNA, 21 nt, Human
cuccucuccccagcccagaga

SEQ ID NO: 1348738 - RNA, 22 nt, Human
cuccucuccccagcccagagac

SEQ ID NO: 1348739 - RNA, 23 nt, Human
cuccucuccccagcccagagaca

SEQ ID NO: 1348740 - RNA, 19 nt, Human
cuccugagugcuugcuuuu

SEQ ID NO: 1348741 - RNA, 16 nt, Human
cuccugagugcuugcu

SEQ ID NO: 1348742 - RNA, 15 nt, Human
cuccugcacuuacuu

SEQ ID NO: 1348743 - RNA, 17 nt, Human
cuccugcacuuacuugc

SEQ ID NO: 1348744 - RNA, 14 nt, Human
cuccugcagaccac

SEQ ID NO: 1348745 - RNA, 15 nt, Human
cuccugcagccccag

SEQ ID NO: 1348746 - RNA, 13 nt, Human
cuccugccucagc

SEQ ID NO: 1348747 - RNA, 20 nt, Human
cuccauggcccugccaugcu

SEQ ID NO: 1348748 - RNA, 13 nt, Human
cuccaugucucug

SEQ ID NO: 1348749 - RNA, 22 nt, Human
cuccaugucucugagcauuaga

SEQ ID NO: 1348750 - RNA, 17 nt, Human
cucccaaagugcuggga

SEQ ID NO: 1348751 - RNA, 16 nt, Human
cuccaucuccacucca

SEQ ID NO: 1348752 - RNA, 14 nt, Human
cuccaucugguaga

SEQ ID NO: 1348753 - RNA, 15 nt, Human
cuccaucugguagaa

SEQ ID NO: 1348754 - RNA, 13 nt, Human
cuccaugcugccu

SEQ ID NO: 1348755 - RNA, 23 nt, Human
cuccaucugguagaagggaaagc

SEQ ID NO: 1348756 - RNA, 18 nt, Human
cuccauccuacccccugu

SEQ ID NO: 1348757 - RNA, 23 nt, Human
cuccauccuacccccugugccuu

SEQ ID NO: 1348758 - RNA, 20 nt, Human
cuccauccuacccccugugc

SEQ ID NO: 1348759 - RNA, 22 nt, Human
cuccauccuacccccugugccu

SEQ ID NO: 1348760 - RNA, 20 nt, Human
cuccauccugaggcuccacu

SEQ ID NO: 1348761 - RNA, 18 nt, Human
cuccauccugaggcucca

SEQ ID NO: 1348762 - RNA, 16 nt, Human
cuccauccugaggcuc

SEQ ID NO: 1348763 - RNA, 11 nt, Human
cuccauccuga

SEQ ID NO: 1348764 - RNA, 22 nt, Human
cucccaagcaccugggauuaca

SEQ ID NO: 1348765 - RNA, 21 nt, Human
cucccaaagugcugggauuaa

SEQ ID NO: 1348766 - RNA, 16 nt, Human
cucccaggggcucccu

SEQ ID NO: 1348767 - RNA, 17 nt, Human
cucccaggggcucccuc

SEQ ID NO: 1348768 - RNA, 18 nt, Human
cucccaggggcucccucc

SEQ ID NO: 1348769 - RNA, 22 nt, Human
cucccaggggcucccuccgccc

SEQ ID NO: 1348770 - RNA, 18 nt, Human
cucccaaagugcugggau

SEQ ID NO: 1348771 - RNA, 22 nt, Human
cucccaaagugcugggauuaca

SEQ ID NO: 1348772 - RNA, 19 nt, Human
cucccaggggcucccuccg

SEQ ID NO: 1348773 - RNA, 21 nt, Human
cucccaggggcucccuccgcc

SEQ ID NO: 1348774 - RNA, 12 nt, Human
cucccaggguuu

SEQ ID NO: 1348775 - RNA, 15 nt, Human
cucccaggguuuuaa

SEQ ID NO: 1348776 - RNA, 16 nt, Human
cucccaggguuuuaac

SEQ ID NO: 1348777 - RNA, 20 nt, Human
cucccaggguuuuaacuuug

SEQ ID NO: 1348778 - RNA, 22 nt, Human
cucccaggguuuuaacuuuguu

SEQ ID NO: 1348779 - RNA, 21 nt, Human
cucccaggguuuuaacuuugu

SEQ ID NO: 1348780 - RNA, 13 nt, Human
cucccuacccuaa

SEQ ID NO: 1348781 - RNA, 20 nt, Human
cucccggcuaugggggcacu

SEQ ID NO: 1348782 - RNA, 17 nt, Human
cucccuaguuccuucau

SEQ ID NO: 1348783 - RNA, 21 nt, Human
cucccuauacugcuuggagcu

SEQ ID NO: 1348784 - RNA, 18 nt, Human
cucccuauacugcuugga

SEQ ID NO: 1348785 - RNA, 19 nt, Human
cucccuauuaaccuagaga

SEQ ID NO: 1348786 - RNA, 22 nt, Human
cucccggaauuccgucaccacg

SEQ ID NO: 1348787 - RNA, 19 nt, Human
cucccggagguuggguggg

SEQ ID NO: 1348788 - RNA, 20 nt, Human
cucccggagguugggugggc

SEQ ID NO: 1348789 - RNA, 22 nt, Human
cuccccacucugcucugaugca

SEQ ID NO: 1348790 - RNA, 20 nt, Human
cuccccaacugaccaccuuu

SEQ ID NO: 1348791 - RNA, 23 nt, Human
cuccccaacugaccaccuuuguu

SEQ ID NO: 1348792 - RNA, 16 nt, Human
cucccauuuuggaauu

SEQ ID NO: 1348793 - RNA, 21 nt, Human
cuccccaaaggcuuugcccug

SEQ ID NO: 1348794 - RNA, 19 nt, Human
cuccccaaaggcuuugccc

SEQ ID NO: 1348795 - RNA, 20 nt, Human
cuccccaaaggcuuugcccu

SEQ ID NO: 1348796 - RNA, 15 nt, Human
cuccccaacccccaa

SEQ ID NO: 1348797 - RNA, 21 nt, Human
cuccccacucugcucugaugc

SEQ ID NO: 1348798 - RNA, 18 nt, Human
cuccccagggaagcagca

SEQ ID NO: 1348799 - RNA, 14 nt, Human
cuccccagcuccca

SEQ ID NO: 1348800 - RNA, 16 nt, Human
cuccccagcucccagg

SEQ ID NO: 1348801 - RNA, 15 nt, Human
cuccccagcucccag

SEQ ID NO: 1348802 - RNA, 14 nt, Human
cuccccagggaagc

SEQ ID NO: 1348803 - RNA, 12 nt, Human
cuaccaggaaag

SEQ ID NO: 1348804 - RNA, 22 nt, Human
cuaccaggucaaaauagugcca

SEQ ID NO: 1348805 - RNA, 13 nt, Human
cuaccaguauuua

SEQ ID NO: 1348806 - RNA, 19 nt, Human
cuaccaguauuuagaagcc

SEQ ID NO: 1348807 - RNA, 20 nt, Human
cuaccaguauuuagaagcca

SEQ ID NO: 1348808 - RNA, 20 nt, Human
cuacagagcuucccugacuc

SEQ ID NO: 1348809 - RNA, 22 nt, Human
cuacagagaagccuucaagcuc

SEQ ID NO: 1348810 - RNA, 13 nt, Human
cuacccccugugc

SEQ ID NO: 1348811 - RNA, 14 nt, Human
cuacccccugugcc

SEQ ID NO: 1348812 - RNA, 15 nt, Human
cuaccccgcagacac

SEQ ID NO: 1348813 - RNA, 20 nt, Human
cuaccccgcagacaccuugg

SEQ ID NO: 1348814 - RNA, 16 nt, Human
cuacaauucauugugu

SEQ ID NO: 1348815 - RNA, 12 nt, Human
cuacacacccug

SEQ ID NO: 1348816 - RNA, 16 nt, Human
cuacacuccagugaga

SEQ ID NO: 1348817 - RNA, 17 nt, Human
cuacacuccagugagac

SEQ ID NO: 1348818 - RNA, 16 nt, Human
cuacagagaagccuuc

SEQ ID NO: 1348819 - RNA, 17 nt, Human
cuacagagaagccuuca

SEQ ID NO: 1348820 - RNA, 16 nt, Human
cuacagagcuucccug

SEQ ID NO: 1348821 - RNA, 17 nt, Human
cuacagagcuucccuga

SEQ ID NO: 1348822 - RNA, 18 nt, Human
cuacagagcuucccugac

SEQ ID NO: 1348823 - RNA, 16 nt, Human
cuacagagaaaccagc

SEQ ID NO: 1348824 - RNA, 17 nt, Human
cuacagagaaaccagcu

SEQ ID NO: 1348825 - RNA, 18 nt, Human
cuacagagaaaccagcuu

SEQ ID NO: 1348826 - RNA, 19 nt, Human
cuacagagaaaccagcuuc

SEQ ID NO: 1348827 - RNA, 20 nt, Human
cuacagagaaaccagcuucc

SEQ ID NO: 1348828 - RNA, 21 nt, Human
cuacagagaaaccagcuuccu

SEQ ID NO: 1348829 - RNA, 11 nt, Human
cuacagagaag

SEQ ID NO: 1348830 - RNA, 12 nt, Human
cuacagagaagc

SEQ ID NO: 1348831 - RNA, 13 nt, Human
cuacagagaagcc

SEQ ID NO: 1348832 - RNA, 14 nt, Human
cuacagagaagccu

SEQ ID NO: 1348833 - RNA, 15 nt, Human
cuacagagaagccuu

SEQ ID NO: 1348834 - RNA, 23 nt, Human
cuacagagaagccuucaagcucu

SEQ ID NO: 1348835 - RNA, 23 nt, Human
cuacacucuuguaauaaaauguc

SEQ ID NO: 1348836 - RNA, 12 nt, Human
cuacagaaaaac

SEQ ID NO: 1348837 - RNA, 13 nt, Human
cuacagaaaaacc

SEQ ID NO: 1348838 - RNA, 14 nt, Human
cuacagaaaaaccu

SEQ ID NO: 1348839 - RNA, 15 nt, Human
cuacagaaaaaccuu

SEQ ID NO: 1348840 - RNA, 16 nt, Human
cuacagaaaaaccuug

SEQ ID NO: 1348841 - RNA, 20 nt, Human
cuacagaaaaaccuuggguu

SEQ ID NO: 1348842 - RNA, 17 nt, Human
cuacagaaaaaccuugg

SEQ ID NO: 1348843 - RNA, 17 nt, Human
cuacagaacuucagaaa

SEQ ID NO: 1348844 - RNA, 20 nt, Human
cuacagaacuucagaaagac

SEQ ID NO: 1348845 - RNA, 19 nt, Human
cuacagaacuucagaaaga

SEQ ID NO: 1348846 - RNA, 10 nt, Human
cuacagagaa

SEQ ID NO: 1348847 - RNA, 11 nt, Human
cuacagagaaa

SEQ ID NO: 1348848 - RNA, 12 nt, Human
cuacagagaaac

SEQ ID NO: 1348849 - RNA, 14 nt, Human
cuacagagaaacca

SEQ ID NO: 1348850 - RNA, 15 nt, Human
cuacagagaaaccag

SEQ ID NO: 1348851 - RNA, 23 nt, Human
cuaauguggaccuuagaauacag

SEQ ID NO: 1348852 - RNA, 18 nt, Human
cuaauguuugcauauaag

SEQ ID NO: 1348853 - RNA, 16 nt, Human
cuaauguuugcauaua

SEQ ID NO: 1348854 - RNA, 15 nt, Human
cuaauguuugcauau

SEQ ID NO: 1348855 - RNA, 17 nt, Human
cuaauguuugcauauaa

SEQ ID NO: 1348856 - RNA, 17 nt, Human
cuaauuaauuguaaucu

SEQ ID NO: 1348857 - RNA, 19 nt, Human
cuaauuaauuguaaucuga

SEQ ID NO: 1348858 - RNA, 17 nt, Human
cuacaagcuaaaauuag

SEQ ID NO: 1348859 - RNA, 19 nt, Human
cuacaagcuaaaauuagau

SEQ ID NO: 1348860 - RNA, 16 nt, Human
cuaaugccucuucauu

SEQ ID NO: 1348861 - RNA, 19 nt, Human
cuaaugaaugcauaaaaug

SEQ ID NO: 1348862 - RNA, 22 nt, Human
cuaaugaaugcauaaaauguua

SEQ ID NO: 1348863 - RNA, 22 nt, Human
cuaaugacaucaccacaguuua

SEQ ID NO: 1348864 - RNA, 18 nt, Human
cuaaucugugcuguuuca

SEQ ID NO: 1348865 - RNA, 19 nt, Human
cuaaucugugcuguuucaa

SEQ ID NO: 1348866 - RNA, 20 nt, Human
cuaaucugugcuguuucaaa

SEQ ID NO: 1348867 - RNA, 21 nt, Human
cuaaucugugcuguuucaaag

SEQ ID NO: 1348868 - RNA, 22 nt, Human
cuaaucugugcuguuucaaagu

SEQ ID NO: 1348869 - RNA, 17 nt, Human
cuaaucuuauucauuuu

SEQ ID NO: 1348870 - RNA, 18 nt, Human
cuaaucuuauucauuuuc

SEQ ID NO: 1348871 - RNA, 19 nt, Human
cuaaucuuauucauuuucu

SEQ ID NO: 1348872 - RNA, 21 nt, Human
cuaaucuuauucauuuucucu

SEQ ID NO: 1348873 - RNA, 16 nt, Human
cuaaucuacuuucugu

SEQ ID NO: 1348874 - RNA, 19 nt, Human
cuaaucuagauaucgacuu

SEQ ID NO: 1348875 - RNA, 18 nt, Human
cuaaucuauggucgggag

SEQ ID NO: 1348876 - RNA, 20 nt, Human
cuaaucuauggucgggagac

SEQ ID NO: 1348877 - RNA, 16 nt, Human
cuaauccucuuuuucu

SEQ ID NO: 1348878 - RNA, 14 nt, Human
cuaaucucuguaaa

SEQ ID NO: 1348879 - RNA, 20 nt, Human
cuaaucucuguaaagcuaaa

SEQ ID NO: 1348880 - RNA, 17 nt, Human
cuaaucagcauucucac

SEQ ID NO: 1348881 - RNA, 19 nt, Human
cuaaucagcauucucacuc

SEQ ID NO: 1348882 - RNA, 20 nt, Human
cuaaucagcauucucacucc

SEQ ID NO: 1348883 - RNA, 17 nt, Human
cuaauccaggcagaucc

SEQ ID NO: 1348884 - RNA, 18 nt, Human
cuaauccaggcagaucca

SEQ ID NO: 1348885 - RNA, 19 nt, Human
cuaauccaggcagauccag

SEQ ID NO: 1348886 - RNA, 20 nt, Human
cuaauccaggcagauccagg

SEQ ID NO: 1348887 - RNA, 23 nt, Human
cuaauccaggcagauccaggacu

SEQ ID NO: 1348888 - RNA, 15 nt, Human
cuaauccccuucucc

SEQ ID NO: 1348889 - RNA, 16 nt, Human
cuaauccccuucuccc

SEQ ID NO: 1348890 - RNA, 18 nt, Human
cuaauccccuucuccccu

SEQ ID NO: 1348891 - RNA, 20 nt, Human
cuaauccccuucuccccugc

SEQ ID NO: 1348892 - RNA, 14 nt, Human
cuaauaaagcugug

SEQ ID NO: 1348893 - RNA, 11 nt, Human
cuaagguucua

SEQ ID NO: 1348894 - RNA, 12 nt, Human
cuaagguucuaa

SEQ ID NO: 1348895 - RNA, 15 nt, Human
cuaauaaacuaauaa

SEQ ID NO: 1348896 - RNA, 17 nt, Human
cuaauaaacuaauaauu

SEQ ID NO: 1348897 - RNA, 13 nt, Human
cuaauaaagcugu

SEQ ID NO: 1348898 - RNA, 18 nt, Human
cuaauaaacuaauaauug

SEQ ID NO: 1348899 - RNA, 19 nt, Human
cuaauaaacuaauaauugc

SEQ ID NO: 1348900 - RNA, 21 nt, Human
cuaauaaacuaauaauugcag

SEQ ID NO: 1348901 - RNA, 13 nt, Human
cuaauauuuuccu

SEQ ID NO: 1348902 - RNA, 17 nt, Human
cuaauauuuuccuccug

SEQ ID NO: 1348903 - RNA, 12 nt, Human
cuaauaaagcug

SEQ ID NO: 1348904 - RNA, 21 nt, Human
cuaaggucuuggaacuugccu

SEQ ID NO: 1348905 - RNA, 23 nt, Human
cuaaggucuuggaacuugccugc

SEQ ID NO: 1348906 - RNA, 13 nt, Human
cuaagguucuaag

SEQ ID NO: 1348907 - RNA, 17 nt, Human
cuaagcuaggaaugaaa

SEQ ID NO: 1348908 - RNA, 22 nt, Human
cuaagcuaggaaugaaauccug

SEQ ID NO: 1348909 - RNA, 22 nt, Human
cuaagccagcugcccccagagc

SEQ ID NO: 1348910 - RNA, 23 nt, Human
cuaagcgcuagaggaagcagcca

SEQ ID NO: 1348911 - RNA, 14 nt, Human
cuaagcuaggaaug

SEQ ID NO: 1348912 - RNA, 22 nt, Human
cuaagggucgaaagcucuagaa

SEQ ID NO: 1348913 - RNA, 19 nt, Human
cuaagguccgguguucuaa

SEQ ID NO: 1348914 - RNA, 20 nt, Human
cuaagguccgguguucuaag

SEQ ID NO: 1348915 - RNA, 21 nt, Human
cuaagguccgguguucuaaga

SEQ ID NO: 1348916 - RNA, 22 nt, Human
cuaagguccgguguucuaagau

SEQ ID NO: 1348917 - RNA, 17 nt, Human
cuaagggucgaaagcuc

SEQ ID NO: 1348918 - RNA, 18 nt, Human
cuaagggucgaaagcucu

SEQ ID NO: 1348919 - RNA, 19 nt, Human
cuaagggucgaaagcucua

SEQ ID NO: 1348920 - RNA, 21 nt, Human
cuaagggucgaaagcucuaga

SEQ ID NO: 1348921 - RNA, 23 nt, Human
cuaagggucgaaagcucuagaau

SEQ ID NO: 1348922 - RNA, 23 nt, Human
cuaaggaguguagcaacuacagu

SEQ ID NO: 1348923 - RNA, 14 nt, Human
cuaaggcugaacuu

SEQ ID NO: 1348924 - RNA, 22 nt, Human
cuaaggcucugagagucuagau

SEQ ID NO: 1348925 - RNA, 23 nt, Human
cuaaggcucugagagucuagauu

SEQ ID NO: 1348926 - RNA, 21 nt, Human
cuaaggcucugagagucuaga

SEQ ID NO: 1348927 - RNA, 16 nt, Human
cuaacaugaagaccuu

SEQ ID NO: 1348928 - RNA, 17 nt, Human
cuaacauguccugccua

SEQ ID NO: 1348929 - RNA, 18 nt, Human
cuaagauucuaaaggucc

SEQ ID NO: 1348930 - RNA, 13 nt, Human
cuaagauucuaau

SEQ ID NO: 1348931 - RNA, 15 nt, Human
cuaagauucuaauga

SEQ ID NO: 1348932 - RNA, 21 nt, Human
cuaagauucuaaugaugauca

SEQ ID NO: 1348933 - RNA, 12 nt, Human
cuaagauucuag

SEQ ID NO: 1348934 - RNA, 13 nt, Human
cuaagauucuaga

SEQ ID NO: 1348935 - RNA, 14 nt, Human
cuaagcaaaaugug

SEQ ID NO: 1348936 - RNA, 14 nt, Human
cuaagauucuagau

SEQ ID NO: 1348937 - RNA, 15 nt, Human
cuaagauucuagauc

SEQ ID NO: 1348938 - RNA, 16 nt, Human
cuaagauucuagauca

SEQ ID NO: 1348939 - RNA, 18 nt, Human
cuaagauucuagaucaga

SEQ ID NO: 1348940 - RNA, 22 nt, Human
cuaagauucuagaucagaugcu

SEQ ID NO: 1348941 - RNA, 11 nt, Human
cuaagauucug

SEQ ID NO: 1348942 - RNA, 12 nt, Human
cuaagauucuga

SEQ ID NO: 1348943 - RNA, 18 nt, Human
cuaagauucugauuuuag

SEQ ID NO: 1348944 - RNA, 18 nt, Human
cuaagcaaaaugugauau

SEQ ID NO: 1348945 - RNA, 15 nt, Human
cuaagcaaaauguga

SEQ ID NO: 1348946 - RNA, 19 nt, Human
cuaagauucugauuuuagg

SEQ ID NO: 1348947 - RNA, 16 nt, Human
cuaagcaacuaggccu

SEQ ID NO: 1348948 - RNA, 13 nt, Human
cuaagcagaaagu

SEQ ID NO: 1348949 - RNA, 14 nt, Human
cuaagcagaaagug

SEQ ID NO: 1348950 - RNA, 15 nt, Human
cuaagcagaaagugc

SEQ ID NO: 1348951 - RNA, 16 nt, Human
cuaagcagaaagugcc

SEQ ID NO: 1348952 - RNA, 17 nt, Human
cuaagcagaaagugccu

SEQ ID NO: 1348953 - RNA, 18 nt, Human
cuaagcagaaagugccuu

SEQ ID NO: 1348954 - RNA, 19 nt, Human
cuaagcagaaagugccuuu

SEQ ID NO: 1348955 - RNA, 21 nt, Human
cuaagcagaaagugccuuuca

SEQ ID NO: 1348956 - RNA, 23 nt, Human
cuaagcagaaagugccuuucagg

SEQ ID NO: 1348957 - RNA, 22 nt, Human
cuaagcagaaagugccuuucag

SEQ ID NO: 1348958 - RNA, 21 nt, Human
cuaagcauaaaagaugaaaga

SEQ ID NO: 1348959 - RNA, 13 nt, Human
cuaagcaucuaag

SEQ ID NO: 1348960 - RNA, 15 nt, Human
cuaagcaucuaaguu

SEQ ID NO: 1348961 - RNA, 14 nt, Human
cuaagcaucuaagu

SEQ ID NO: 1348962 - RNA, 19 nt, Human
cuaagccagcaccggacca

SEQ ID NO: 1348963 - RNA, 15 nt, Human
cuaagccagcugccc

SEQ ID NO: 1348964 - RNA, 16 nt, Human
cuaagccagcugcccc

SEQ ID NO: 1348965 - RNA, 23 nt, Human
cuacuucuuuuuucaaaagaaag

SEQ ID NO: 1348966 - RNA, 22 nt, Human
cuacuucuuuugcucuuagcug

SEQ ID NO: 1348967 - RNA, 14 nt, Human
cuacuugcucaggu

SEQ ID NO: 1348968 - RNA, 18 nt, Human
cuacuugggaggcugaga

SEQ ID NO: 1348969 - RNA, 15 nt, Human
cuacuugggaggcug

SEQ ID NO: 1348970 - RNA, 22 nt, Human
cuacuuucugugucuauggauu

SEQ ID NO: 1348971 - RNA, 19 nt, Human
cuacuuuauaacuaacaug

SEQ ID NO: 1348972 - RNA, 14 nt, Human
cuacuuuauaacua

SEQ ID NO: 1348973 - RNA, 18 nt, Human
cuacuuuauaacuaacau

SEQ ID NO: 1348974 - RNA, 18 nt, Human
cuacuuugacuuuuugca

SEQ ID NO: 1348975 - RNA, 19 nt, Human
cuacuuugacuuuuugcau

SEQ ID NO: 1348976 - RNA, 20 nt, Human
cuacuuugacuuuuugcauu

SEQ ID NO: 1348977 - RNA, 21 nt, Human
cuacuuugacuuuuugcauuu

SEQ ID NO: 1348978 - RNA, 19 nt, Human
cuacuugggaggcugagau

SEQ ID NO: 1348979 - RNA, 22 nt, Human
cuacuuauuguagcauccugga

SEQ ID NO: 1348980 - RNA, 18 nt, Human
cuacuuaugaaaugugca

SEQ ID NO: 1348981 - RNA, 19 nt, Human
cuacuuaugaaaugugcac

SEQ ID NO: 1348982 - RNA, 16 nt, Human
cuacuuccaaacuaau

SEQ ID NO: 1348983 - RNA, 19 nt, Human
cuacuuccaaacuaauuuu

SEQ ID NO: 1348984 - RNA, 23 nt, Human
cuacuguguuaugcaaaagcaag

SEQ ID NO: 1348985 - RNA, 15 nt, Human
cuacuguguguguga

SEQ ID NO: 1348986 - RNA, 17 nt, Human
cuacugugugugugaau

SEQ ID NO: 1348987 - RNA, 19 nt, Human
cuacugugugugugaauga

SEQ ID NO: 1348988 - RNA, 20 nt, Human
cuacugugugugugaaugaa

SEQ ID NO: 1348989 - RNA, 16 nt, Human
cuacuguguuaugcaa

SEQ ID NO: 1348990 - RNA, 14 nt, Human
cuacuuccccuucc

SEQ ID NO: 1348991 - RNA, 15 nt, Human
cuacuuccccuuccu

SEQ ID NO: 1348992 - RNA, 20 nt, Human
cuacuuccccuuccuaauuc

SEQ ID NO: 1348993 - RNA, 22 nt, Human
cuacuuccccauggcccugagc

SEQ ID NO: 1348994 - RNA, 23 nt, Human
cuacuuccccauggcccugagcg

SEQ ID NO: 1348995 - RNA, 13 nt, Human
cuacuuccuccuc

SEQ ID NO: 1348996 - RNA, 20 nt, Human
cuacuuccugugacuucagc

SEQ ID NO: 1348997 - RNA, 17 nt, Human
cuacuucggggcuggga

SEQ ID NO: 1348998 - RNA, 17 nt, Human
cuacuucuguaauugug

SEQ ID NO: 1348999 - RNA, 18 nt, Human
cuacuucuguaauugugu

SEQ ID NO: 1349000 - RNA, 17 nt, Human
cuacuuccuccucccca

SEQ ID NO: 1349001 - RNA, 19 nt, Human
cuacuuccuccuccccacu

SEQ ID NO: 1349002 - RNA, 20 nt, Human
cuacuuccuccuccccacuu

SEQ ID NO: 1349003 - RNA, 21 nt, Human
cuacuguaaggcaaucauggu

SEQ ID NO: 1349004 - RNA, 14 nt, Human
cuacugacaugugg

SEQ ID NO: 1349005 - RNA, 15 nt, Human
cuacugacauguggg

SEQ ID NO: 1349006 - RNA, 20 nt, Human
cuacugacauguggggccag

SEQ ID NO: 1349007 - RNA, 22 nt, Human
cuacugacggaguccuguguuu

SEQ ID NO: 1349008 - RNA, 13 nt, Human
cuacugaagcccu

SEQ ID NO: 1349009 - RNA, 14 nt, Human
cuacugaagcccuu

SEQ ID NO: 1349010 - RNA, 15 nt, Human
cuacugaaugucauu

SEQ ID NO: 1349011 - RNA, 15 nt, Human
cuacccuaaccaagu

SEQ ID NO: 1349012 - RNA, 16 nt, Human
cuagcaaaagugcaag

SEQ ID NO: 1349013 - RNA, 17 nt, Human
cuagcaaaagugcaaga

SEQ ID NO: 1349014 - RNA, 14 nt, Human
cuagcacagauggc

SEQ ID NO: 1349015 - RNA, 22 nt, Human
cuagauguuuauucuucuagag

SEQ ID NO: 1349016 - RNA, 12 nt, Human
cuagauucaaag

SEQ ID NO: 1349017 - RNA, 14 nt, Human
cuagauucaaaggu

SEQ ID NO: 1349018 - RNA, 15 nt, Human
cuagauucaaagguu

SEQ ID NO: 1349019 - RNA, 16 nt, Human
cuagauucaaagguuc

SEQ ID NO: 1349020 - RNA, 17 nt, Human
cuagauucaaagguucu

SEQ ID NO: 1349021 - RNA, 18 nt, Human
cuagauucaaagguucua

SEQ ID NO: 1349022 - RNA, 20 nt, Human
cuagauucaaagguucuagg

SEQ ID NO: 1349023 - RNA, 21 nt, Human
cuagauucaaagguucuaggu

SEQ ID NO: 1349024 - RNA, 14 nt, Human
cuagauucagggaa

SEQ ID NO: 1349025 - RNA, 22 nt, Human
cuagauuccauugguccaagau

SEQ ID NO: 1349026 - RNA, 23 nt, Human
cuagauuccauugguccaagauu

SEQ ID NO: 1349027 - RNA, 24 nt, Human
cuagauugagagaagagacaaaca

SEQ ID NO: 1349028 - RNA, 21 nt, Human
cuagauugcuaaggagcugau

SEQ ID NO: 1349029 - RNA, 12 nt, Human
cuagauuuaaua

SEQ ID NO: 1349030 - RNA, 14 nt, Human
cuagauuuaauaua

SEQ ID NO: 1349031 - RNA, 18 nt, Human
cuagauuuaauauaaagu

SEQ ID NO: 1349032 - RNA, 15 nt, Human
cuagaucagaugcuc

SEQ ID NO: 1349033 - RNA, 18 nt, Human
cuagaucagaugcuccaa

SEQ ID NO: 1349034 - RNA, 20 nt, Human
cuagaucagaugcuccaaga

SEQ ID NO: 1349035 - RNA, 15 nt, Human
cuagaucauaaggcu

SEQ ID NO: 1349036 - RNA, 17 nt, Human
cuagaucauaaggcuuc

SEQ ID NO: 1349037 - RNA, 18 nt, Human
cuagaucauaaggcuuca

SEQ ID NO: 1349038 - RNA, 22 nt, Human
cuagaucauaaggcuucaaaau

SEQ ID NO: 1349039 - RNA, 15 nt, Human
cuagauccuaagggu

SEQ ID NO: 1349040 - RNA, 16 nt, Human
cuagauccuaaggguc

SEQ ID NO: 1349041 - RNA, 17 nt, Human
cuagaugaaguuuuaca

SEQ ID NO: 1349042 - RNA, 17 nt, Human
cuagauccuaagggucg

SEQ ID NO: 1349043 - RNA, 20 nt, Human
cuagaugauuaaauaagauu

SEQ ID NO: 1349044 - RNA, 21 nt, Human
cuagaugauuaaauaagauuc

SEQ ID NO: 1349045 - RNA, 23 nt, Human
cuagaugauuaaauaagauucua

SEQ ID NO: 1349046 - RNA, 22 nt, Human
cuagaugauuaaauaagauucu

SEQ ID NO: 1349047 - RNA, 13 nt, Human
cuagauggaccug

SEQ ID NO: 1349048 - RNA, 16 nt, Human
cuagauggaccugccu

SEQ ID NO: 1349049 - RNA, 18 nt, Human
cuagauggaccugccugc

SEQ ID NO: 1349050 - RNA, 16 nt, Human
cuagauguaguauuuu

SEQ ID NO: 1349051 - RNA, 20 nt, Human
cuagauguaguauuuuuugu

SEQ ID NO: 1349052 - RNA, 22 nt, Human
cuagauguaguauuuuuuguau

SEQ ID NO: 1349053 - RNA, 23 nt, Human
cuagauguaguauuuuuuguaua

SEQ ID NO: 1349054 - RNA, 21 nt, Human
cuagauguauaacuaggagcu

SEQ ID NO: 1349055 - RNA, 21 nt, Human
cuagauguuuauucuucuaga

SEQ ID NO: 1349056 - RNA, 23 nt, Human
cuagauguuuauucuucuagagu

SEQ ID NO: 1349057 - RNA, 17 nt, Human
cuacuuugauaugacug

SEQ ID NO: 1349058 - RNA, 21 nt, Human
cuacuuugauaugacuguuuu

SEQ ID NO: 1349059 - RNA, 16 nt, Human
cuagaccuccagcugu

SEQ ID NO: 1349060 - RNA, 17 nt, Human
cuagaccuccagcuguu

SEQ ID NO: 1349061 - RNA, 18 nt, Human
cuagacucccaagcugga

SEQ ID NO: 1349062 - RNA, 11 nt, Human
cuagagcuccu

SEQ ID NO: 1349063 - RNA, 12 nt, Human
cuagagcuccuc

SEQ ID NO: 1349064 - RNA, 13 nt, Human
cuagagcuccucc

SEQ ID NO: 1349065 - RNA, 15 nt, Human
cuagagcuccucccu

SEQ ID NO: 1349066 - RNA, 17 nt, Human
cuagagcuccucccucu

SEQ ID NO: 1349067 - RNA, 19 nt, Human
cuagagcuccucccucuca

SEQ ID NO: 1349068 - RNA, 20 nt, Human
cuagagcuccucccucucaa

SEQ ID NO: 1349069 - RNA, 16 nt, Human
cuagaggaagcagcca

SEQ ID NO: 1349070 - RNA, 15 nt, Human
cuagaggugagaaau

SEQ ID NO: 1349071 - RNA, 17 nt, Human
cuagaggugagaaauuu

SEQ ID NO: 1349072 - RNA, 19 nt, Human
cuagaggugagaaauuuaa

SEQ ID NO: 1349073 - RNA, 15 nt, Human
cuagaguccaagguu

SEQ ID NO: 1349074 - RNA, 20 nt, Human
cuagaguccaagguuuaaag

SEQ ID NO: 1349075 - RNA, 23 nt, Human
cuagaguccaagguuuaaagagu

SEQ ID NO: 1349076 - RNA, 21 nt, Human
cuagagucccagguuggcucu

SEQ ID NO: 1349077 - RNA, 16 nt, Human
cuagagucugaacagc

SEQ ID NO: 1349078 - RNA, 19 nt, Human
cuagagucugaacagcugu

SEQ ID NO: 1349079 - RNA, 20 nt, Human
cuagagucugaacagcugua

SEQ ID NO: 1349080 - RNA, 22 nt, Human
cuaggacugaauuaugaaacuu

SEQ ID NO: 1349081 - RNA, 18 nt, Human
cuaggagaaccaaaucug

SEQ ID NO: 1349082 - RNA, 21 nt, Human
cuaggagaaccaaaucuggaa

SEQ ID NO: 1349083 - RNA, 23 nt, Human
cuaggagaaccaaaucuggaagc

SEQ ID NO: 1349084 - RNA, 20 nt, Human
cuaggacacaguuccuggga

SEQ ID NO: 1349085 - RNA, 21 nt, Human
cuaggaccaugguuaagaguc

SEQ ID NO: 1349086 - RNA, 23 nt, Human
cuaggaccaugguuaagagucca

SEQ ID NO: 1349087 - RNA, 16 nt, Human
cuaggaagaggagugg

SEQ ID NO: 1349088 - RNA, 14 nt, Human
cuaggaagccucag

SEQ ID NO: 1349089 - RNA, 16 nt, Human
cuaggaagccucagau

SEQ ID NO: 1349090 - RNA, 15 nt, Human
cuaggaagccucaga

SEQ ID NO: 1349091 - RNA, 16 nt, Human
cuaggaaugaaauccu

SEQ ID NO: 1349092 - RNA, 17 nt, Human
cuaggaaugaaauccug

SEQ ID NO: 1349093 - RNA, 15 nt, Human
cuaggacacaguucc

SEQ ID NO: 1349094 - RNA, 19 nt, Human
cuaggacacaguuccuggg

SEQ ID NO: 1349095 - RNA, 21 nt, Human
cuaggagcuuugacucaggag

SEQ ID NO: 1349096 - RNA, 22 nt, Human
cuaggagcuuugacucaggagc

SEQ ID NO: 1349097 - RNA, 13 nt, Human
cuaggagggagac

SEQ ID NO: 1349098 - RNA, 18 nt, Human
cuaggagggagacacugg

SEQ ID NO: 1349099 - RNA, 22 nt, Human
cuaggagggagacacuggcccc

SEQ ID NO: 1349100 - RNA, 13 nt, Human
cuaggagcaaagc

SEQ ID NO: 1349101 - RNA, 15 nt, Human
cuaggagcaaagccu

SEQ ID NO: 1349102 - RNA, 16 nt, Human
cuaggagcaaagccug

SEQ ID NO: 1349103 - RNA, 17 nt, Human
cuaggagcaaagccugu

SEQ ID NO: 1349104 - RNA, 20 nt, Human
cuaggagcaaagccuguuca

SEQ ID NO: 1349105 - RNA, 18 nt, Human
cuaggagcaaagccuguu

SEQ ID NO: 1349106 - RNA, 17 nt, Human
cuaggagcuuugacuca

SEQ ID NO: 1349107 - RNA, 20 nt, Human
cuaggagcuuugacucagga

SEQ ID NO: 1349108 - RNA, 23 nt, Human
cuaggagggagacacuggccccu

SEQ ID NO: 1349109 - RNA, 23 nt, Human
cuaggagcuuugacucaggagcc

SEQ ID NO: 1349110 - RNA, 15 nt, Human
cuaggaggguccucu

SEQ ID NO: 1349111 - RNA, 20 nt, Human
cuaggaggguccucugagac

SEQ ID NO: 1349112 - RNA, 16 nt, Human
cuaggaggguccucug

SEQ ID NO: 1349113 - RNA, 22 nt, Human
cuaggaugugcauucuccagcc

SEQ ID NO: 1349114 - RNA, 13 nt, Human
cuaggauuucaug

SEQ ID NO: 1349115 - RNA, 13 nt, Human
cuaggauucuaaa

SEQ ID NO: 1349116 - RNA, 13 nt, Human
cuaggcaacauag

SEQ ID NO: 1349117 - RNA, 19 nt, Human
cuaggcacuguaguucuaa

SEQ ID NO: 1349118 - RNA, 20 nt, Human
cuaggcacuguaguucuaag

SEQ ID NO: 1349119 - RNA, 21 nt, Human
cuaggcacuguaguucuaaga

SEQ ID NO: 1349120 - RNA, 22 nt, Human
cuagcagcaccguucugugcac

SEQ ID NO: 1349121 - RNA, 19 nt, Human
cuaggaagagcaggacucc

SEQ ID NO: 1349122 - RNA, 23 nt, Human
cuaggaagagcaggacuccaggc

SEQ ID NO: 1349123 - RNA, 15 nt, Human
cuaggaagaggagug

SEQ ID NO: 1349124 - RNA, 16 nt, Human
cuaggaaauccagggu

SEQ ID NO: 1349125 - RNA, 17 nt, Human
cuaggaaauccagggug

SEQ ID NO: 1349126 - RNA, 20 nt, Human
cuagcagcaccguucugugc

SEQ ID NO: 1349127 - RNA, 21 nt, Human
cuagcagcaccguucugugca

SEQ ID NO: 1349128 - RNA, 12 nt, Human
cuagcagcaccg

SEQ ID NO: 1349129 - RNA, 19 nt, Human
cuagcagcaccguucugug

SEQ ID NO: 1349130 - RNA, 22 nt, Human
cuaguauuucuaugaaauauua

SEQ ID NO: 1349131 - RNA, 18 nt, Human
cuaguauugacaaaaugu

SEQ ID NO: 1349132 - RNA, 17 nt, Human
cuaguauugacaaaaug

SEQ ID NO: 1349133 - RNA, 15 nt, Human
cuaguauugacaaaa

SEQ ID NO: 1349134 - RNA, 14 nt, Human
cuaguauugacaaa

SEQ ID NO: 1349135 - RNA, 19 nt, Human
cuaguauuucuaugaaaua

SEQ ID NO: 1349136 - RNA, 20 nt, Human
cuaguauuucuaugaaauau

SEQ ID NO: 1349137 - RNA, 23 nt, Human
cuaguaucaaaagaaagaaaauc

SEQ ID NO: 1349138 - RNA, 23 nt, Human
cuaguauuccagaccugaagaau

SEQ ID NO: 1349139 - RNA, 17 nt, Human
cuaguaucaaaagaaag

SEQ ID NO: 1349140 - RNA, 15 nt, Human
cuaguaucaaaagaa

SEQ ID NO: 1349141 - RNA, 20 nt, Human
cuaggcaguucaaagcagga

SEQ ID NO: 1349142 - RNA, 14 nt, Human
cuaggcauucugga

SEQ ID NO: 1349143 - RNA, 17 nt, Human
cuaggcauucuggaccu

SEQ ID NO: 1349144 - RNA, 20 nt, Human
cuaggcauucuggaccucug

SEQ ID NO: 1349145 - RNA, 21 nt, Human
cuaggcauucuggaccucugg

SEQ ID NO: 1349146 - RNA, 22 nt, Human
cuaggcauucuggaccucuggg

SEQ ID NO: 1349147 - RNA, 14 nt, Human
cuaggccagagccc

SEQ ID NO: 1349148 - RNA, 16 nt, Human
cuaggccagagcccac

SEQ ID NO: 1349149 - RNA, 15 nt, Human
cuaggccagagccca

SEQ ID NO: 1349150 - RNA, 13 nt, Human
cuaggcccccacu

SEQ ID NO: 1349151 - RNA, 15 nt, Human
cuaggcccccacuug

SEQ ID NO: 1349152 - RNA, 16 nt, Human
cuaggcccccacuugc

SEQ ID NO: 1349153 - RNA, 17 nt, Human
cuaggcccccacuugcc

SEQ ID NO: 1349154 - RNA, 22 nt, Human
cuaguacuugggagaccuguaa

SEQ ID NO: 1349155 - RNA, 20 nt, Human
cuaguguagaauugugcaac

SEQ ID NO: 1349156 - RNA, 13 nt, Human
cuaguguagaauu

SEQ ID NO: 1349157 - RNA, 18 nt, Human
cuaguguaucaaaaugcu

SEQ ID NO: 1349158 - RNA, 14 nt, Human
cuagugugaauuaa

SEQ ID NO: 1349159 - RNA, 15 nt, Human
cuaguguaucaaaau

SEQ ID NO: 1349160 - RNA, 19 nt, Human
cuaguauugacaaaauguu

SEQ ID NO: 1349161 - RNA, 20 nt, Human
cuaguauugacaaaauguua

SEQ ID NO: 1349162 - RNA, 12 nt, Human
cuaguccuuguu

SEQ ID NO: 1349163 - RNA, 13 nt, Human
cuagucuuuugcu

SEQ ID NO: 1349164 - RNA, 14 nt, Human
cuagucuuuugcuu

SEQ ID NO: 1349165 - RNA, 15 nt, Human
cuagucuuuugcuuu

SEQ ID NO: 1349166 - RNA, 16 nt, Human
cuagucuuuugcuuuu

SEQ ID NO: 1349167 - RNA, 12 nt, Human
cuaucuuugcca

SEQ ID NO: 1349168 - RNA, 18 nt, Human
cuaucuuacuauuucaca

SEQ ID NO: 1349169 - RNA, 19 nt, Human
cuaucuuugccacccucau

SEQ ID NO: 1349170 - RNA, 18 nt, Human
cuaucuuugccacccuca

SEQ ID NO: 1349171 - RNA, 15 nt, Human
cuaucuuugccaccc

SEQ ID NO: 1349172 - RNA, 14 nt, Human
cuaucuuugccacc

SEQ ID NO: 1349173 - RNA, 13 nt, Human
cuaugaaauauua

SEQ ID NO: 1349174 - RNA, 21 nt, Human
cuaucuuugccacccucaugc

SEQ ID NO: 1349175 - RNA, 16 nt, Human
cuaugaaaagcuagaa

SEQ ID NO: 1349176 - RNA, 21 nt, Human
cuaugaaaagcuagaauugag

SEQ ID NO: 1349177 - RNA, 17 nt, Human
cuaugaaaaugcuggcu

SEQ ID NO: 1349178 - RNA, 18 nt, Human
cuaugaaauauuauguua

SEQ ID NO: 1349179 - RNA, 17 nt, Human
cuaugaauucuaaguga

SEQ ID NO: 1349180 - RNA, 22 nt, Human
cuauauuuuuuguuaaaugauu

SEQ ID NO: 1349181 - RNA, 16 nt, Human
cuaucacccaacgcuc

SEQ ID NO: 1349182 - RNA, 19 nt, Human
cuaucacccaacgcuccaa

SEQ ID NO: 1349183 - RNA, 15 nt, Human
cuaucuuaauacuaa

SEQ ID NO: 1349184 - RNA, 16 nt, Human
cuaucaccuauuucca

SEQ ID NO: 1349185 - RNA, 21 nt, Human
cuaucaaccccagacacuggu

SEQ ID NO: 1349186 - RNA, 17 nt, Human
cuaucaaccccagacac

SEQ ID NO: 1349187 - RNA, 19 nt, Human
cuaucaaccccagacacug

SEQ ID NO: 1349188 - RNA, 20 nt, Human
cuaucaaccccagacacugg

SEQ ID NO: 1349189 - RNA, 16 nt, Human
cuaguuauacuuauuu

SEQ ID NO: 1349190 - RNA, 23 nt, Human
cuaguuauacuuauuuguauaug

SEQ ID NO: 1349191 - RNA, 20 nt, Human
cuaguuauuuacaggaacuu

SEQ ID NO: 1349192 - RNA, 22 nt, Human
cuaguuauuuacaggaacuuca

SEQ ID NO: 1349193 - RNA, 19 nt, Human
cuauauuguuugcuaagca

SEQ ID NO: 1349194 - RNA, 20 nt, Human
cuauauuuuuuguuaaauga

SEQ ID NO: 1349195 - RNA, 13 nt, Human
cucacauuuauau

SEQ ID NO: 1349196 - RNA, 16 nt, Human
cucacaucagagugac

SEQ ID NO: 1349197 - RNA, 22 nt, Human
cucacaugauuccagccaucac

SEQ ID NO: 1349198 - RNA, 15 nt, Human
cucacccauccuaga

SEQ ID NO: 1349199 - RNA, 14 nt, Human
cucacccauccuag

SEQ ID NO: 1349200 - RNA, 18 nt, Human
cucacaugauuccagcca

SEQ ID NO: 1349201 - RNA, 14 nt, Human
cucacccagugccc

SEQ ID NO: 1349202 - RNA, 16 nt, Human
cucacaugguuuacau

SEQ ID NO: 1349203 - RNA, 19 nt, Human
cucacaugguuuacauccu

SEQ ID NO: 1349204 - RNA, 22 nt, Human
cucacaugucaguaccuucaaa

SEQ ID NO: 1349205 - RNA, 16 nt, Human
cucaaggacuuugcag

SEQ ID NO: 1349206 - RNA, 22 nt, Human
cucaaggacuuugcagccggca

SEQ ID NO: 1349207 - RNA, 22 nt, Human
cucacagugaacacucaguggc

SEQ ID NO: 1349208 - RNA, 15 nt, Human
cucacagugcuuuua

SEQ ID NO: 1349209 - RNA, 17 nt, Human
cucacccauccuagagg

SEQ ID NO: 1349210 - RNA, 22 nt, Human
cucacccagugcccucuccccu

SEQ ID NO: 1349211 - RNA, 14 nt, Human
cucacccccucacc

SEQ ID NO: 1349212 - RNA, 15 nt, Human
cucacccccuucucc

SEQ ID NO: 1349213 - RNA, 16 nt, Human
cucacccccuucucca

SEQ ID NO: 1349214 - RNA, 17 nt, Human
cucacccccuucuccau

SEQ ID NO: 1349215 - RNA, 19 nt, Human
cucacccccuucuccaucc

SEQ ID NO: 1349216 - RNA, 20 nt, Human
cucacccccuucuccaucca

SEQ ID NO: 1349217 - RNA, 21 nt, Human
cucacccccuucuccauccac

SEQ ID NO: 1349218 - RNA, 20 nt, Human
cucacuaggcuucugguuga

SEQ ID NO: 1349219 - RNA, 23 nt, Human
cucacuaggcccccacuugccuc

SEQ ID NO: 1349220 - RNA, 17 nt, Human
cucacuauaccaguaua

SEQ ID NO: 1349221 - RNA, 20 nt, Human
cucacuaucccggcugcccu

SEQ ID NO: 1349222 - RNA, 21 nt, Human
cucacuaucccggcugcccuu

SEQ ID NO: 1349223 - RNA, 17 nt, Human
cucaccccuugccauaa

SEQ ID NO: 1349224 - RNA, 13 nt, Human
cucacuaggcuuc

SEQ ID NO: 1349225 - RNA, 16 nt, Human
cucacuaggcuucugg

SEQ ID NO: 1349226 - RNA, 22 nt, Human
cuauuuuaauaaacacucuuga

SEQ ID NO: 1349227 - RNA, 16 nt, Human
cuauuuuauuaugaag

SEQ ID NO: 1349228 - RNA, 18 nt, Human
cuauuuuaauaaacacuc

SEQ ID NO: 1349229 - RNA, 14 nt, Human
cuauuuguaaaucu

SEQ ID NO: 1349230 - RNA, 18 nt, Human
cuauuuguaaaucugcca

SEQ ID NO: 1349231 - RNA, 21 nt, Human
cuauuuguaaaucugccacaa

SEQ ID NO: 1349232 - RNA, 22 nt, Human
cuauuuguugaugcuuguguca

SEQ ID NO: 1349233 - RNA, 19 nt, Human
cuauuuguaaaucugccac

SEQ ID NO: 1349234 - RNA, 12 nt, Human
cuauuuucagau

SEQ ID NO: 1349235 - RNA, 18 nt, Human
cuauuuucagaugugaac

SEQ ID NO: 1349236 - RNA, 22 nt, Human
cuauuuucagaugugaaccauu

SEQ ID NO: 1349237 - RNA, 19 nt, Human
cuauuuuccaggcuucugc

SEQ ID NO: 1349238 - RNA, 23 nt, Human
cuauuuuccaggcuucugcuggg

SEQ ID NO: 1349239 - RNA, 21 nt, Human
cuauuuuccaggcuucugcug

SEQ ID NO: 1349240 - RNA, 17 nt, Human
cuauuuuggauuguaua

SEQ ID NO: 1349241 - RNA, 12 nt, Human
cuauuuuguaaa

SEQ ID NO: 1349242 - RNA, 19 nt, Human
cuauuuuguaaacucaaaa

SEQ ID NO: 1349243 - RNA, 15 nt, Human
cucaaauggggccag

SEQ ID NO: 1349244 - RNA, 16 nt, Human
cucaaauggggccaga

SEQ ID NO: 1349245 - RNA, 17 nt, Human
cucaaauggggccagau

SEQ ID NO: 1349246 - RNA, 21 nt, Human
cuaugcaugguuucagcacua

SEQ ID NO: 1349247 - RNA, 23 nt, Human
cuaugcaugguuucagcacuagc

SEQ ID NO: 1349248 - RNA, 14 nt, Human
cucaaccucuacag

SEQ ID NO: 1349249 - RNA, 19 nt, Human
cucaaauggggccagaucc

SEQ ID NO: 1349250 - RNA, 20 nt, Human
cucaaauggggccagaucca

SEQ ID NO: 1349251 - RNA, 21 nt, Human
cucaaauggggccagauccag

SEQ ID NO: 1349252 - RNA, 13 nt, Human
cucaaauguucua

SEQ ID NO: 1349253 - RNA, 15 nt, Human
cucaaauguucuaag

SEQ ID NO: 1349254 - RNA, 16 nt, Human
cucaaauguucuaagu

SEQ ID NO: 1349255 - RNA, 17 nt, Human
cucaaauguucuaaguu

SEQ ID NO: 1349256 - RNA, 19 nt, Human
cucaaauguucuaaguuuc

SEQ ID NO: 1349257 - RNA, 21 nt, Human
cucaaauguucuaaguuucua

SEQ ID NO: 1349258 - RNA, 22 nt, Human
cucaaauguucuaaguuucuaa

SEQ ID NO: 1349259 - RNA, 23 nt, Human
cucaaauguucuaaguuucuaag

SEQ ID NO: 1349260 - RNA, 24 nt, Human
cucaaauguucuaaguuucuaaga

SEQ ID NO: 1349261 - RNA, 15 nt, Human
cucaacguauuguuu

SEQ ID NO: 1349262 - RNA, 16 nt, Human
cucaacguauuguuuc

SEQ ID NO: 1349263 - RNA, 16 nt, Human
cucaaccuuaagaccu

SEQ ID NO: 1349264 - RNA, 17 nt, Human
cucaagagggcacuggu

SEQ ID NO: 1349265 - RNA, 19 nt, Human
cucaagagggcacuggugg

SEQ ID NO: 1349266 - RNA, 21 nt, Human
cucaagagggcacugguggcc

SEQ ID NO: 1349267 - RNA, 13 nt, Human
cucaacugccuac

SEQ ID NO: 1349268 - RNA, 15 nt, Human
cucaacugccuacuc

SEQ ID NO: 1349269 - RNA, 23 nt, Human
cucaacugccuacuccaaaaugu

SEQ ID NO: 1349270 - RNA, 16 nt, Human
cucaagaugaaggcaa

SEQ ID NO: 1349271 - RNA, 16 nt, Human
cucaagcgauucuccu

SEQ ID NO: 1349272 - RNA, 17 nt, Human
cucaagcgauucuccug

SEQ ID NO: 1349273 - RNA, 20 nt, Human
cucaagcucuuccuuacucc

SEQ ID NO: 1349274 - RNA, 17 nt, Human
cucaagcugcaucuaga

SEQ ID NO: 1349275 - RNA, 21 nt, Human
cuaugaccucgcccuccacaa

SEQ ID NO: 1349276 - RNA, 16 nt, Human
cuaugacuugggcacc

SEQ ID NO: 1349277 - RNA, 23 nt, Human
cuaugacuugggcacccccagcc

SEQ ID NO: 1349278 - RNA, 20 nt, Human
cuaugacuugggcaccccca

SEQ ID NO: 1349279 - RNA, 19 nt, Human
cuaugcaugguuucagcac

SEQ ID NO: 1349280 - RNA, 20 nt, Human
cuaugcaugguuucagcacu

SEQ ID NO: 1349281 - RNA, 15 nt, Human
cuaacaugauuuggg

SEQ ID NO: 1349282 - RNA, 19 nt, Human
cuaacacucagaagccugg

SEQ ID NO: 1349283 - RNA, 20 nt, Human
cuaacacucagaagccuggg

SEQ ID NO: 1349284 - RNA, 22 nt, Human
cuaacacucagaagccuggggg

SEQ ID NO: 1349285 - RNA, 23 nt, Human
cuaacacucagaagccugggggc

SEQ ID NO: 1349286 - RNA, 15 nt, Human
cuaacaugaagaccu

SEQ ID NO: 1349287 - RNA, 13 nt, Human
cuaacaaugacau

SEQ ID NO: 1349288 - RNA, 15 nt, Human
cuaacaaugacauuu

SEQ ID NO: 1349289 - RNA, 23 nt, Human
cuaacacggugcucauuuuuucu

SEQ ID NO: 1349290 - RNA, 16 nt, Human
cuaacacucagaagcc

SEQ ID NO: 1349291 - RNA, 17 nt, Human
cuaacacucagaagccu

SEQ ID NO: 1349292 - RNA, 22 nt, Human
cuaaauguaguucugcuccaga

SEQ ID NO: 1349293 - RNA, 18 nt, Human
cuaaaugugcaauagaag

SEQ ID NO: 1349294 - RNA, 21 nt, Human
cuaaaugugcaauagaaggug

SEQ ID NO: 1349295 - RNA, 17 nt, Human
cuaaauggccucaugug

SEQ ID NO: 1349296 - RNA, 19 nt, Human
cuaaauggccucauguggc

SEQ ID NO: 1349297 - RNA, 14 nt, Human
cuaaauuauuuacu

SEQ ID NO: 1349298 - RNA, 15 nt, Human
cuaaauuauuuacug

SEQ ID NO: 1349299 - RNA, 23 nt, Human
cuaaauuauuuacugcaaaaaga

SEQ ID NO: 1349300 - RNA, 23 nt, Human
cuaaauugacacuuaaaaauggu

SEQ ID NO: 1349301 - RNA, 17 nt, Human
cuaaauccuuuacuguu

SEQ ID NO: 1349302 - RNA, 21 nt, Human
cuaaauccuuuacuguuaguc

SEQ ID NO: 1349303 - RNA, 16 nt, Human
cuaaauauggacugcu

SEQ ID NO: 1349304 - RNA, 22 nt, Human
cuaaauauggacugcucaggaa

SEQ ID NO: 1349305 - RNA, 20 nt, Human
cuaaauauuaugagaugcug

SEQ ID NO: 1349306 - RNA, 20 nt, Human
cuaaauauauuuuaagacga

SEQ ID NO: 1349307 - RNA, 18 nt, Human
cuaaauauauuuuaagac

SEQ ID NO: 1349308 - RNA, 15 nt, Human
cuaaacggauuccaa

SEQ ID NO: 1349309 - RNA, 16 nt, Human
cuaaacggauuccaaa

SEQ ID NO: 1349310 - RNA, 17 nt, Human
cuaaacggauuccaaag

SEQ ID NO: 1349311 - RNA, 16 nt, Human
cuaaaugaauguuuac

SEQ ID NO: 1349312 - RNA, 14 nt, Human
cuaaaugcccugcu

SEQ ID NO: 1349313 - RNA, 13 nt, Human
cuaaaugcccugc

SEQ ID NO: 1349314 - RNA, 12 nt, Human
cuaaauggccuc

SEQ ID NO: 1349315 - RNA, 13 nt, Human
cuaaauggccuca

SEQ ID NO: 1349316 - RNA, 16 nt, Human
cuaaauggccucaugu

SEQ ID NO: 1349317 - RNA, 16 nt, Human
cguuguccucagcccc

SEQ ID NO: 1349318 - RNA, 17 nt, Human
cguuggcuagauuaacc

SEQ ID NO: 1349319 - RNA, 16 nt, Human
cguuggagaagcccgu

SEQ ID NO: 1349320 - RNA, 17 nt, Human
cguuuaagccaaaacaa

SEQ ID NO: 1349321 - RNA, 18 nt, Human
cguuuaagccaaaacaau

SEQ ID NO: 1349322 - RNA, 22 nt, Human
cguuuaagccaaaacaauguuu

SEQ ID NO: 1349323 - RNA, 23 nt, Human
cuaaaaccuuccaugucaagauu

SEQ ID NO: 1349324 - RNA, 14 nt, Human
cuaaaaccugaaau

SEQ ID NO: 1349325 - RNA, 14 nt, Human
cguuuaaugaaugc

SEQ ID NO: 1349326 - RNA, 13 nt, Human
cguuuaaugaaug

SEQ ID NO: 1349327 - RNA, 18 nt, Human
cguuuaaugaaugcuuaa

SEQ ID NO: 1349328 - RNA, 15 nt, Human
cuaaaccauugugca

SEQ ID NO: 1349329 - RNA, 13 nt, Human
cuaaacaucauuc

SEQ ID NO: 1349330 - RNA, 15 nt, Human
cuaaacccaauccaa

SEQ ID NO: 1349331 - RNA, 19 nt, Human
cuaaacccaauccaaaugg

SEQ ID NO: 1349332 - RNA, 16 nt, Human
cuaaacccaauccaaa

SEQ ID NO: 1349333 - RNA, 18 nt, Human
cuaaacacgugacacaaa

SEQ ID NO: 1349334 - RNA, 17 nt, Human
cuaaacacgugacacaa

SEQ ID NO: 1349335 - RNA, 23 nt, Human
cuaaacaucauucauuuuuguug

SEQ ID NO: 1349336 - RNA, 12 nt, Human
cuaaacauccau

SEQ ID NO: 1349337 - RNA, 17 nt, Human
cuaaaacucuuucggua

SEQ ID NO: 1349338 - RNA, 13 nt, Human
cuaaaagaaacuu

SEQ ID NO: 1349339 - RNA, 14 nt, Human
cuaaaagaaacuuu

SEQ ID NO: 1349340 - RNA, 19 nt, Human
cguggacaccugcccugcc

SEQ ID NO: 1349341 - RNA, 18 nt, Human
cguggacaccugcccugc

SEQ ID NO: 1349342 - RNA, 17 nt, Human
cguggacaccugcccug

SEQ ID NO: 1349343 - RNA, 15 nt, Human
cguggacaccugccc

SEQ ID NO: 1349344 - RNA, 14 nt, Human
cguggacaccugcc

SEQ ID NO: 1349345 - RNA, 13 nt, Human
cguggacaccugc

SEQ ID NO: 1349346 - RNA, 12 nt, Human
cguggacaccug

SEQ ID NO: 1349347 - RNA, 22 nt, Human
cguggaaugcccuucacuguca

SEQ ID NO: 1349348 - RNA, 15 nt, Human
cguggacugaguggg

SEQ ID NO: 1349349 - RNA, 19 nt, Human
cguggacugagugggaagc

SEQ ID NO: 1349350 - RNA, 21 nt, Human
cguggacugagugggaagccc

SEQ ID NO: 1349351 - RNA, 15 nt, Human
cguggagagcuagga

SEQ ID NO: 1349352 - RNA, 19 nt, Human
cguggagagcuaggagcaa

SEQ ID NO: 1349353 - RNA, 18 nt, Human
cguggagagcuaggagca

SEQ ID NO: 1349354 - RNA, 19 nt, Human
cgugcucgccccagcaggu

SEQ ID NO: 1349355 - RNA, 14 nt, Human
cgugcucuuuguuu

SEQ ID NO: 1349356 - RNA, 16 nt, Human
cgugcucuuuguuuug

SEQ ID NO: 1349357 - RNA, 17 nt, Human
cgugcucuuuguuuugu

SEQ ID NO: 1349358 - RNA, 22 nt, Human
cgugcucuuuguuuugugucuc

SEQ ID NO: 1349359 - RNA, 23 nt, Human
cgugcucuuuguuuugugucucu

SEQ ID NO: 1349360 - RNA, 23 nt, Human
cgugccaaguccagguccuggug

SEQ ID NO: 1349361 - RNA, 21 nt, Human
cgugccaaguccagguccugg

SEQ ID NO: 1349362 - RNA, 17 nt, Human
cgugggcucccugacug

SEQ ID NO: 1349363 - RNA, 11 nt, Human
cguggggaggu

SEQ ID NO: 1349364 - RNA, 12 nt, Human
cguugcccccau

SEQ ID NO: 1349365 - RNA, 21 nt, Human
cguugcccccauuucugaggu

SEQ ID NO: 1349366 - RNA, 16 nt, Human
cguugcccccauuucu

SEQ ID NO: 1349367 - RNA, 20 nt, Human
cguggcuucccgcucagccc

SEQ ID NO: 1349368 - RNA, 21 nt, Human
cguggcuucccgcucagcccu

SEQ ID NO: 1349369 - RNA, 19 nt, Human
cgugggacggugcccaagc

SEQ ID NO: 1349370 - RNA, 20 nt, Human
cgugggacggugcccaagcc

SEQ ID NO: 1349371 - RNA, 14 nt, Human
cgugggcauugucu

SEQ ID NO: 1349372 - RNA, 21 nt, Human
cgugggccccacccucgggga

SEQ ID NO: 1349373 - RNA, 13 nt, Human
cgugggcucccug

SEQ ID NO: 1349374 - RNA, 23 nt, Human
cguggcuguggcauccagagucc

SEQ ID NO: 1349375 - RNA, 18 nt, Human
cguggcuucccgcucagc

SEQ ID NO: 1349376 - RNA, 19 nt, Human
cguggcuucccgcucagcc

SEQ ID NO: 1349377 - RNA, 13 nt, Human
cguggaggcugcu

SEQ ID NO: 1349378 - RNA, 15 nt, Human
cguggaggcugcucg

SEQ ID NO: 1349379 - RNA, 14 nt, Human
cguggaggcugcuc

SEQ ID NO: 1349380 - RNA, 18 nt, Human
cguggagggguaggggcu

SEQ ID NO: 1349381 - RNA, 19 nt, Human
cguggagggguaggggcug

SEQ ID NO: 1349382 - RNA, 20 nt, Human
cguggagggguaggggcugg

SEQ ID NO: 1349383 - RNA, 17 nt, Human
cguggauugcacguggc

SEQ ID NO: 1349384 - RNA, 23 nt, Human
cguggagggguaggggcugggaa

SEQ ID NO: 1349385 - RNA, 21 nt, Human
cguggagggguaggggcuggg

SEQ ID NO: 1349386 - RNA, 21 nt, Human
cguccuuacuccugugggagc

SEQ ID NO: 1349387 - RNA, 11 nt, Human
cgucucagugu

SEQ ID NO: 1349388 - RNA, 14 nt, Human
cgucuccaggggcu

SEQ ID NO: 1349389 - RNA, 19 nt, Human
cgucuccaggggcugcuuc

SEQ ID NO: 1349390 - RNA, 20 nt, Human
cgucuccaggggcugcuucc

SEQ ID NO: 1349391 - RNA, 21 nt, Human
cgucuccaggggcugcuuccu

SEQ ID NO: 1349392 - RNA, 16 nt, Human
cguccugccuguggcg

SEQ ID NO: 1349393 - RNA, 14 nt, Human
cguccugccugugg

SEQ ID NO: 1349394 - RNA, 15 nt, Human
cguccugccuguggc

SEQ ID NO: 1349395 - RNA, 15 nt, Human
cguccuuacuccugu

SEQ ID NO: 1349396 - RNA, 16 nt, Human
cguccuuacuccugug

SEQ ID NO: 1349397 - RNA, 17 nt, Human
cguccuuacuccugugg

SEQ ID NO: 1349398 - RNA, 20 nt, Human
cguccuuacuccugugggag

SEQ ID NO: 1349399 - RNA, 22 nt, Human
cguccuuacuccugugggagcc

SEQ ID NO: 1349400 - RNA, 13 nt, Human
cguccuccucugu

SEQ ID NO: 1349401 - RNA, 14 nt, Human
cguccuccucugug

SEQ ID NO: 1349402 - RNA, 15 nt, Human
cguccuccucuguga

SEQ ID NO: 1349403 - RNA, 13 nt, Human
cguccugagaaag

SEQ ID NO: 1349404 - RNA, 13 nt, Human
cguccugccugug

SEQ ID NO: 1349405 - RNA, 23 nt, Human
cggugcccaagccagaggcuggg

SEQ ID NO: 1349406 - RNA, 17 nt, Human
cggugccuuuauuucca

SEQ ID NO: 1349407 - RNA, 21 nt, Human
cggugccuuuauuuccacugu

SEQ ID NO: 1349408 - RNA, 23 nt, Human
cggugccuuuauuuccacugugc

SEQ ID NO: 1349409 - RNA, 18 nt, Human
cgucuuuuccuguuuccu

SEQ ID NO: 1349410 - RNA, 19 nt, Human
cgugaaaacacauuugcuu

SEQ ID NO: 1349411 - RNA, 13 nt, Human
cgucuucuccaac

SEQ ID NO: 1349412 - RNA, 15 nt, Human
cgugccaaguccagg

SEQ ID NO: 1349413 - RNA, 20 nt, Human
cgugccaaguccagguccug

SEQ ID NO: 1349414 - RNA, 22 nt, Human
cuacagagaaaccagcuuccuu

SEQ ID NO: 1349415 - RNA, 17 nt, Human
cggucggggcaucuggc

SEQ ID NO: 1349416 - RNA, 24 nt, Human
cggucgcccuuugcugcauggcag

SEQ ID NO: 1349417 - RNA, 13 nt, Human
cggucugugcccc

SEQ ID NO: 1349418 - RNA, 17 nt, Human
cggugagcuacaaaugc

SEQ ID NO: 1349419 - RNA, 14 nt, Human
cggugcccaagcca

SEQ ID NO: 1349420 - RNA, 15 nt, Human
cggugcccaagccag

SEQ ID NO: 1349421 - RNA, 18 nt, Human
cggugcccaagccagagg

SEQ ID NO: 1349422 - RNA, 20 nt, Human
cggugcccaagccagaggcu

SEQ ID NO: 1349423 - RNA, 21 nt, Human
cggucuguucuguuucaaggc

SEQ ID NO: 1349424 - RNA, 14 nt, Human
cggucugugccccu

SEQ ID NO: 1349425 - RNA, 15 nt, Human
cgguagccagcacac

SEQ ID NO: 1349426 - RNA, 21 nt, Human
cgguagccagcacacagggca

SEQ ID NO: 1349427 - RNA, 22 nt, Human
cgguagccagcacacagggcag

SEQ ID NO: 1349428 - RNA, 18 nt, Human
cgguagguucagccaagg

SEQ ID NO: 1349429 - RNA, 18 nt, Human
cgguauccccccaucuug

SEQ ID NO: 1349430 - RNA, 22 nt, Human
cgguauccccccaucuugcuuc

SEQ ID NO: 1349431 - RNA, 13 nt, Human
cgggucugccucu

SEQ ID NO: 1349432 - RNA, 13 nt, Human
cgggucugcuccc

SEQ ID NO: 1349433 - RNA, 17 nt, Human
cgggucugcucccaagg

SEQ ID NO: 1349434 - RNA, 14 nt, Human
cgggucugcuccca

SEQ ID NO: 1349435 - RNA, 20 nt, Human
cgggugaacaaagcagccac

SEQ ID NO: 1349436 - RNA, 19 nt, Human
cgggucacaggagggaggg

SEQ ID NO: 1349437 - RNA, 11 nt, Human
cgggucacagg

SEQ ID NO: 1349438 - RNA, 16 nt, Human
cggggugggggcagca

SEQ ID NO: 1349439 - RNA, 22 nt, Human
cggggugggguggcugcagccu

SEQ ID NO: 1349440 - RNA, 21 nt, Human
cgggugaacaaagcagccacg

SEQ ID NO: 1349441 - RNA, 16 nt, Human
cgggugccagaagcua

SEQ ID NO: 1349442 - RNA, 16 nt, Human
cggguggggcuugggg

SEQ ID NO: 1349443 - RNA, 20 nt, Human
cggguggggcuuggggcuca

SEQ ID NO: 1349444 - RNA, 16 nt, Human
cggguugugugucugu

SEQ ID NO: 1349445 - RNA, 17 nt, Human
cggguugugugucuguu

SEQ ID NO: 1349446 - RNA, 14 nt, Human
cggggacucagccc

SEQ ID NO: 1349447 - RNA, 17 nt, Human
cggggccugggcaggag

SEQ ID NO: 1349448 - RNA, 18 nt, Human
cgggcagagggcuggagg

SEQ ID NO: 1349449 - RNA, 19 nt, Human
cgggcagagggcuggaggc

SEQ ID NO: 1349450 - RNA, 23 nt, Human
cgggcagagggcuggaggcccag

SEQ ID NO: 1349451 - RNA, 22 nt, Human
cgggcagagggcuggaggccca

SEQ ID NO: 1349452 - RNA, 19 nt, Human
cggggccugggcaggaggg

SEQ ID NO: 1349453 - RNA, 13 nt, Human
cggggcugggaag

SEQ ID NO: 1349454 - RNA, 12 nt, Human
cggggcuugccu

SEQ ID NO: 1349455 - RNA, 15 nt, Human
cggggcuugccuucu

SEQ ID NO: 1349456 - RNA, 16 nt, Human
cggggcuugccuucug

SEQ ID NO: 1349457 - RNA, 18 nt, Human
cggggcuugccuucuggu

SEQ ID NO: 1349458 - RNA, 19 nt, Human
cgggggaggguaggcagga

SEQ ID NO: 1349459 - RNA, 17 nt, Human
cgggggcagucugagag

SEQ ID NO: 1349460 - RNA, 18 nt, Human
cgggggcagucugagaga

SEQ ID NO: 1349461 - RNA, 21 nt, Human
cgggggcagucugagagaggc

SEQ ID NO: 1349462 - RNA, 17 nt, Human
cggggguggcggcggcc

SEQ ID NO: 1349463 - RNA, 21 nt, Human
cggggguggcggcggccccua

SEQ ID NO: 1349464 - RNA, 19 nt, Human
cggggguuccguguccacc

SEQ ID NO: 1349465 - RNA, 20 nt, Human
cggggguuccguguccaccc

SEQ ID NO: 1349466 - RNA, 22 nt, Human
cggggguuccguguccaccccc

SEQ ID NO: 1349467 - RNA, 22 nt, Human
cggggugagggggggcucccug

SEQ ID NO: 1349468 - RNA, 15 nt, Human
cggggugcacaggag

SEQ ID NO: 1349469 - RNA, 16 nt, Human
cggggugcacaggagg

SEQ ID NO: 1349470 - RNA, 17 nt, Human
cggggugcacaggaggg

SEQ ID NO: 1349471 - RNA, 16 nt, Human
cggggugcccacaggc

SEQ ID NO: 1349472 - RNA, 18 nt, Human
cggggugcacaggagggg

SEQ ID NO: 1349473 - RNA, 13 nt, Human
cgggacugcggag

SEQ ID NO: 1349474 - RNA, 12 nt, Human
cgggagacagca

SEQ ID NO: 1349475 - RNA, 17 nt, Human
cgggagccugacccuca

SEQ ID NO: 1349476 - RNA, 21 nt, Human
cgggagccugaucaccugccc

SEQ ID NO: 1349477 - RNA, 22 nt, Human
cgggagccaugcgcccccuccg

SEQ ID NO: 1349478 - RNA, 12 nt, Human
cggcugggagga

SEQ ID NO: 1349479 - RNA, 17 nt, Human
cgggauuaguacacacu

SEQ ID NO: 1349480 - RNA, 16 nt, Human
cgggaugguucuggcu

SEQ ID NO: 1349481 - RNA, 14 nt, Human
cgggcagagggcug

SEQ ID NO: 1349482 - RNA, 15 nt, Human
cgggcagagggcugg

SEQ ID NO: 1349483 - RNA, 16 nt, Human
cgggcagagggcugga

SEQ ID NO: 1349484 - RNA, 17 nt, Human
cggcccacaauuaauuu

SEQ ID NO: 1349485 - RNA, 17 nt, Human
cggccagggagaagcuc

SEQ ID NO: 1349486 - RNA, 16 nt, Human
cggccagggagaagcu

SEQ ID NO: 1349487 - RNA, 17 nt, Human
cggccacacagcugccg

SEQ ID NO: 1349488 - RNA, 15 nt, Human
cggcccaauccaagg

SEQ ID NO: 1349489 - RNA, 17 nt, Human
cggcccaauccaaggug

SEQ ID NO: 1349490 - RNA, 11 nt, Human
cggcugcccuu

SEQ ID NO: 1349491 - RNA, 12 nt, Human
cggcugcccuuu

SEQ ID NO: 1349492 - RNA, 17 nt, Human
cggccuaugacuugggc

SEQ ID NO: 1349493 - RNA, 18 nt, Human
cggccuaugacuugggca

SEQ ID NO: 1349494 - RNA, 19 nt, Human
cggccuaugacuugggcac

SEQ ID NO: 1349495 - RNA, 12 nt, Human
cggcugcagagg

SEQ ID NO: 1349496 - RNA, 15 nt, Human
cggcugcagaggcca

SEQ ID NO: 1349497 - RNA, 20 nt, Human
cggcugcagaggccagaggc

SEQ ID NO: 1349498 - RNA, 14 nt, Human
cggccuccauccug

SEQ ID NO: 1349499 - RNA, 12 nt, Human
cggccuccaucc

SEQ ID NO: 1349500 - RNA, 14 nt, Human
cggccggccagccc

SEQ ID NO: 1349501 - RNA, 16 nt, Human
cggccggccagccccu

SEQ ID NO: 1349502 - RNA, 23 nt, Human
cggccggccagccccuggcccca

SEQ ID NO: 1349503 - RNA, 11 nt, Human
cgcuuuuugaa

SEQ ID NO: 1349504 - RNA, 16 nt, Human
cgcuuuuugaaaaagc

SEQ ID NO: 1349505 - RNA, 15 nt, Human
cggaaggguaaacaa

SEQ ID NO: 1349506 - RNA, 17 nt, Human
cggaaggguaaacaaua

SEQ ID NO: 1349507 - RNA, 18 nt, Human
cggaaggguaaacaauau

SEQ ID NO: 1349508 - RNA, 19 nt, Human
cggaaggguaaacaauaua

SEQ ID NO: 1349509 - RNA, 21 nt, Human
cggcacagggucugcucuuuc

SEQ ID NO: 1349510 - RNA, 15 nt, Human
cggcacccccugcag

SEQ ID NO: 1349511 - RNA, 16 nt, Human
cggcacccccugcagc

SEQ ID NO: 1349512 - RNA, 17 nt, Human
cggcacccccugcagcu

SEQ ID NO: 1349513 - RNA, 19 nt, Human
cggcacccccugcagcuug

SEQ ID NO: 1349514 - RNA, 20 nt, Human
cggcacccccugcagcuugu

SEQ ID NO: 1349515 - RNA, 13 nt, Human
cggcaccugggcc

SEQ ID NO: 1349516 - RNA, 17 nt, Human
cggcaccugggcccugg

SEQ ID NO: 1349517 - RNA, 19 nt, Human
cggcaccugggcccugggg

SEQ ID NO: 1349518 - RNA, 20 nt, Human
cggcaccugggcccuggggc

SEQ ID NO: 1349519 - RNA, 23 nt, Human
cggcaccugggcccuggggccug

SEQ ID NO: 1349520 - RNA, 22 nt, Human
cggcaccugggcccuggggccu

SEQ ID NO: 1349521 - RNA, 13 nt, Human
cggcagcagcccc

SEQ ID NO: 1349522 - RNA, 17 nt, Human
cggcagcuucugccccc

SEQ ID NO: 1349523 - RNA, 20 nt, Human
cggcagcuucugcccccugc

SEQ ID NO: 1349524 - RNA, 21 nt, Human
cggcagcuucugcccccugca

SEQ ID NO: 1349525 - RNA, 22 nt, Human
cggcagcuucugcccccugcag

SEQ ID NO: 1349526 - RNA, 23 nt, Human
cggcagcuucugcccccugcaga

SEQ ID NO: 1349527 - RNA, 21 nt, Human
cggcauggacaauggaccgga

SEQ ID NO: 1349528 - RNA, 13 nt, Human
cggcauuuguuuc

SEQ ID NO: 1349529 - RNA, 15 nt, Human
cggccacacagcugc

SEQ ID NO: 1349530 - RNA, 16 nt, Human
cggccacacagcugcc

SEQ ID NO: 1349531 - RNA, 18 nt, Human
cggccacacagcugccgg

SEQ ID NO: 1349532 - RNA, 18 nt, Human
cggcugggaggagggcag

SEQ ID NO: 1349533 - RNA, 16 nt, Human
cgcccuggacugugug

SEQ ID NO: 1349534 - RNA, 13 nt, Human
cgccccuuccccc

SEQ ID NO: 1349535 - RNA, 14 nt, Human
cgcccuuuccuccu

SEQ ID NO: 1349536 - RNA, 16 nt, Human
cgcccuuuccuccuca

SEQ ID NO: 1349537 - RNA, 17 nt, Human
cgcccuuuccuccucag

SEQ ID NO: 1349538 - RNA, 19 nt, Human
cgcccuuuccuccucaggc

SEQ ID NO: 1349539 - RNA, 20 nt, Human
cgcccuuuccuccucaggca

SEQ ID NO: 1349540 - RNA, 20 nt, Human
cgcgauguggaacugcugcc

SEQ ID NO: 1349541 - RNA, 21 nt, Human
cgcgauguggaacugcugcca

SEQ ID NO: 1349542 - RNA, 22 nt, Human
cgcgauguggaacugcugccac

SEQ ID NO: 1349543 - RNA, 23 nt, Human
cgcgauguggaacugcugccacu

SEQ ID NO: 1349544 - RNA, 13 nt, Human
cgcccccugucuc

SEQ ID NO: 1349545 - RNA, 18 nt, Human
cgcccccugucucucagg

SEQ ID NO: 1349546 - RNA, 22 nt, Human
cgcccagagacccaagcugccu

SEQ ID NO: 1349547 - RNA, 22 nt, Human
ccucugcccaggcacugcuagg

SEQ ID NO: 1349548 - RNA, 12 nt, Human
cgccagcucugu

SEQ ID NO: 1349549 - RNA, 19 nt, Human
cgccagcucuguucuuccu

SEQ ID NO: 1349550 - RNA, 14 nt, Human
cgccagcucuguuc

SEQ ID NO: 1349551 - RNA, 20 nt, Human
cgcccacaggaagccugcag

SEQ ID NO: 1349552 - RNA, 21 nt, Human
cgcccacaggaagccugcagu

SEQ ID NO: 1349553 - RNA, 22 nt, Human
cgcccacaggaagccugcaguc

SEQ ID NO: 1349554 - RNA, 21 nt, Human
cgccaggauggaacacggcca

SEQ ID NO: 1349555 - RNA, 13 nt, Human
cgcccagcuccug

SEQ ID NO: 1349556 - RNA, 18 nt, Human
cgcugguccuuucuuccg

SEQ ID NO: 1349557 - RNA, 17 nt, Human
cgcuguaugucuuaaaa

SEQ ID NO: 1349558 - RNA, 13 nt, Human
cgcugucacaggc

SEQ ID NO: 1349559 - RNA, 18 nt, Human
cgcugucaggauugcgag

SEQ ID NO: 1349560 - RNA, 18 nt, Human
cgcucucuggccuucggc

SEQ ID NO: 1349561 - RNA, 13 nt, Human
cgcuccagcugcc

SEQ ID NO: 1349562 - RNA, 14 nt, Human
cgcugggugguacc

SEQ ID NO: 1349563 - RNA, 19 nt, Human
cgcugggugguacccucug

SEQ ID NO: 1349564 - RNA, 22 nt, Human
cgcugggugguacccucuggag

SEQ ID NO: 1349565 - RNA, 20 nt, Human
cgcugucaggauugcgagag

SEQ ID NO: 1349566 - RNA, 17 nt, Human
cgcuguccuuucuagag

SEQ ID NO: 1349567 - RNA, 16 nt, Human
cgcuguccuuucuaga

SEQ ID NO: 1349568 - RNA, 19 nt, Human
cgcuucuugccucugugcu

SEQ ID NO: 1349569 - RNA, 22 nt, Human
cgcuucuugccucugugcugug

SEQ ID NO: 1349570 - RNA, 14 nt, Human
cgcuuggagcagag

SEQ ID NO: 1349571 - RNA, 22 nt, Human
cgcuuggagcuauuuuccaggc

SEQ ID NO: 1349572 - RNA, 22 nt, Human
cgcuuggcgaugccagccaagc

SEQ ID NO: 1349573 - RNA, 20 nt, Human
cgcuuggcgaugccagccaa

SEQ ID NO: 1349574 - RNA, 12 nt, Human
cgcucagcccuc

SEQ ID NO: 1349575 - RNA, 16 nt, Human
cgcucagcccucccug

SEQ ID NO: 1349576 - RNA, 21 nt, Human
cgcucagcccucccugccccu

SEQ ID NO: 1349577 - RNA, 23 nt, Human
cgcuaauucaaggaauuucuuaa

SEQ ID NO: 1349578 - RNA, 16 nt, Human
cgcuacaccacucugg

SEQ ID NO: 1349579 - RNA, 17 nt, Human
cgcuacaccacucuggc

SEQ ID NO: 1349580 - RNA, 20 nt, Human
cgcuacaccacucuggcagc

SEQ ID NO: 1349581 - RNA, 23 nt, Human
cgcuacaccacucuggcagccac

SEQ ID NO: 1349582 - RNA, 15 nt, Human
cgcucucuggccuuc

SEQ ID NO: 1349583 - RNA, 15 nt, Human
cgcuccagcugcccc

SEQ ID NO: 1349584 - RNA, 19 nt, Human
cgcucagggccaugcugag

SEQ ID NO: 1349585 - RNA, 20 nt, Human
cgcucagggccaugcugagg

SEQ ID NO: 1349586 - RNA, 21 nt, Human
cgcucagggccaugcugaggc

SEQ ID NO: 1349587 - RNA, 22 nt, Human
cgcucagggccaugcugaggcc

SEQ ID NO: 1349588 - RNA, 23 nt, Human
cgcucagcucauccaugccucag

SEQ ID NO: 1349589 - RNA, 14 nt, Human
cgcggcccucagua

SEQ ID NO: 1349590 - RNA, 21 nt, Human
cgcggcccucaguagucccug

SEQ ID NO: 1349591 - RNA, 16 nt, Human
cgcgccaggauggcgc

SEQ ID NO: 1349592 - RNA, 21 nt, Human
caguggcgugaucucagcuca

SEQ ID NO: 1349593 - RNA, 21 nt, Human
caguggcgcgaucucagcuca

SEQ ID NO: 1349594 - RNA, 16 nt, Human
caguggcccauggcau

SEQ ID NO: 1349595 - RNA, 11 nt, Human
caguggccuua

SEQ ID NO: 1349596 - RNA, 21 nt, Human
caguggcaucaucucagcuca

SEQ ID NO: 1349597 - RNA, 21 nt, Human
caguggcccauggcauuuuau

SEQ ID NO: 1349598 - RNA, 13 nt, Human
caguggcaggcag

SEQ ID NO: 1349599 - RNA, 14 nt, Human
caguggcaggcaga

SEQ ID NO: 1349600 - RNA, 20 nt, Human
caguggcaggcagaggccca

SEQ ID NO: 1349601 - RNA, 21 nt, Human
caguggcaggcagaggcccag

SEQ ID NO: 1349602 - RNA, 11 nt, Human
cagugggaacu

SEQ ID NO: 1349603 - RNA, 16 nt, Human
cagugggacagggcau

SEQ ID NO: 1349604 - RNA, 18 nt, Human
caguggcugguccagggc

SEQ ID NO: 1349605 - RNA, 19 nt, Human
caguggcugguccagggcu

SEQ ID NO: 1349606 - RNA, 20 nt, Human
caguggcugguccagggcua

SEQ ID NO: 1349607 - RNA, 18 nt, Human
cagugggaaaaauguagg

SEQ ID NO: 1349608 - RNA, 19 nt, Human
cagugggaaaaauguagga

SEQ ID NO: 1349609 - RNA, 15 nt, Human
caguggaggaagagg

SEQ ID NO: 1349610 - RNA, 20 nt, Human
caguggaggaagagggacag

SEQ ID NO: 1349611 - RNA, 17 nt, Human
caguggaucacaaagug

SEQ ID NO: 1349612 - RNA, 20 nt, Human
cagugcuuuuaagugaaaau

SEQ ID NO: 1349613 - RNA, 12 nt, Human
cagugcuuuugg

SEQ ID NO: 1349614 - RNA, 21 nt, Human
cagugcuuuuggcggggagga

SEQ ID NO: 1349615 - RNA, 14 nt, Human
cagugucaaugcag

SEQ ID NO: 1349616 - RNA, 13 nt, Human
cagugucaggcac

SEQ ID NO: 1349617 - RNA, 16 nt, Human
cagugucaggcacugg

SEQ ID NO: 1349618 - RNA, 16 nt, Human
cagugucauuucucau

SEQ ID NO: 1349619 - RNA, 17 nt, Human
caguguauggaaauaaa

SEQ ID NO: 1349620 - RNA, 22 nt, Human
cagugucauuucucauccacau

SEQ ID NO: 1349621 - RNA, 13 nt, Human
caguguccugagc

SEQ ID NO: 1349622 - RNA, 14 nt, Human
caguguccugagcu

SEQ ID NO: 1349623 - RNA, 15 nt, Human
caguguccugagcuc

SEQ ID NO: 1349624 - RNA, 16 nt, Human
caguguccugagcuca

SEQ ID NO: 1349625 - RNA, 18 nt, Human
caguguccugagcucagc

SEQ ID NO: 1349626 - RNA, 22 nt, Human
caguguccugagcucagcgugg

SEQ ID NO: 1349627 - RNA, 19 nt, Human
caguguccugagcucagcg

SEQ ID NO: 1349628 - RNA, 20 nt, Human
caguguccuuggcaggcuga

SEQ ID NO: 1349629 - RNA, 12 nt, Human
cagugucuuuuu

SEQ ID NO: 1349630 - RNA, 17 nt, Human
cagugucuuuuuuugua

SEQ ID NO: 1349631 - RNA, 19 nt, Human
cagugucuuuuuuuguaua

SEQ ID NO: 1349632 - RNA, 23 nt, Human
cagugucuuuuuuuguauaguua

SEQ ID NO: 1349633 - RNA, 21 nt, Human
cagugucuuuuuuuguauagu

SEQ ID NO: 1349634 - RNA, 13 nt, Human
cagugucuguguu

SEQ ID NO: 1349635 - RNA, 23 nt, Human
cagugucuguguuuugaaagaau

SEQ ID NO: 1349636 - RNA, 16 nt, Human
cagugugaggccaggg

SEQ ID NO: 1349637 - RNA, 17 nt, Human
cagugugaggccagggc

SEQ ID NO: 1349638 - RNA, 18 nt, Human
cagugugaggccagggca

SEQ ID NO: 1349639 - RNA, 19 nt, Human
cagugugaggccagggcag

SEQ ID NO: 1349640 - RNA, 14 nt, Human
cagugugcaaggca

SEQ ID NO: 1349641 - RNA, 18 nt, Human
cagugugcaaggcagccg

SEQ ID NO: 1349642 - RNA, 20 nt, Human
cagugugcaaggcagccgug

SEQ ID NO: 1349643 - RNA, 21 nt, Human
cagugugcaaggcagccgugg

SEQ ID NO: 1349644 - RNA, 18 nt, Human
caguguggaggccacugu

SEQ ID NO: 1349645 - RNA, 19 nt, Human
caguguggaggccacuguu

SEQ ID NO: 1349646 - RNA, 20 nt, Human
caguguggaggccacuguuu

SEQ ID NO: 1349647 - RNA, 21 nt, Human
caguguguggcuuucagagcc

SEQ ID NO: 1349648 - RNA, 22 nt, Human
caguguguggcuuucagagccu

SEQ ID NO: 1349649 - RNA, 24 nt, Human
caguuaacuauugcauuuauaugu

SEQ ID NO: 1349650 - RNA, 21 nt, Human
caguuaacuauugcauuuaua

SEQ ID NO: 1349651 - RNA, 15 nt, Human
caguuaaaaaaaauu

SEQ ID NO: 1349652 - RNA, 16 nt, Human
caguuaaaaaaaauuu

SEQ ID NO: 1349653 - RNA, 19 nt, Human
caguuaaaaaaaauuuuaa

SEQ ID NO: 1349654 - RNA, 15 nt, Human
caguguuuucuggga

SEQ ID NO: 1349655 - RNA, 22 nt, Human
caguguuuucugggauaaguaa

SEQ ID NO: 1349656 - RNA, 21 nt, Human
caguguuuuuagaccuguguu

SEQ ID NO: 1349657 - RNA, 18 nt, Human
caguguuggggaugccuu

SEQ ID NO: 1349658 - RNA, 14 nt, Human
caguguugucacca

SEQ ID NO: 1349659 - RNA, 20 nt, Human
caguguugucaccagaucug

SEQ ID NO: 1349660 - RNA, 18 nt, Human
caguguuuauccuuucau

SEQ ID NO: 1349661 - RNA, 14 nt, Human
caguguuuaaaacu

SEQ ID NO: 1349662 - RNA, 18 nt, Human
caguguugagccuuuucc

SEQ ID NO: 1349663 - RNA, 19 nt, Human
caguguuagggaagggccu

SEQ ID NO: 1349664 - RNA, 13 nt, Human
caguguuagcuua

SEQ ID NO: 1349665 - RNA, 14 nt, Human
caguguuagcuuag

SEQ ID NO: 1349666 - RNA, 14 nt, Human
caguguuaaaugug

SEQ ID NO: 1349667 - RNA, 19 nt, Human
caguguuaaaugugaugaa

SEQ ID NO: 1349668 - RNA, 21 nt, Human
caguuaccucugccucagaaa

SEQ ID NO: 1349669 - RNA, 22 nt, Human
caguuacauaauucacucugag

SEQ ID NO: 1349670 - RNA, 18 nt, Human
caguuaccauuaaaccau

SEQ ID NO: 1349671 - RNA, 19 nt, Human
caguuaccauuaaaccauc

SEQ ID NO: 1349672 - RNA, 20 nt, Human
caguuaccauuaaaccaucu

SEQ ID NO: 1349673 - RNA, 23 nt, Human
caguuaccauuaaaccaucuccc

SEQ ID NO: 1349674 - RNA, 15 nt, Human
caguuccugggaaca

SEQ ID NO: 1349675 - RNA, 18 nt, Human
caguuccuguggcucccu

SEQ ID NO: 1349676 - RNA, 19 nt, Human
caguuccuguggcucccuc

SEQ ID NO: 1349677 - RNA, 14 nt, Human
caguuaagccuuug

SEQ ID NO: 1349678 - RNA, 15 nt, Human
caguuaagccuuugg

SEQ ID NO: 1349679 - RNA, 17 nt, Human
caguuaagccuuuggaa

SEQ ID NO: 1349680 - RNA, 20 nt, Human
caguuaagccuuuggaaaca

SEQ ID NO: 1349681 - RNA, 15 nt, Human
caguuaagaaauuuc

SEQ ID NO: 1349682 - RNA, 16 nt, Human
caguuaagaaauuuca

SEQ ID NO: 1349683 - RNA, 15 nt, Human
caguuaaucuugcuu

SEQ ID NO: 1349684 - RNA, 12 nt, Human
caguuaaucuug

SEQ ID NO: 1349685 - RNA, 12 nt, Human
caguuaauuuuu

SEQ ID NO: 1349686 - RNA, 12 nt, Human
caguuacacaug

SEQ ID NO: 1349687 - RNA, 13 nt, Human
caguuaauuuuuc

SEQ ID NO: 1349688 - RNA, 14 nt, Human
caguuaauuuuucc

SEQ ID NO: 1349689 - RNA, 16 nt, Human
caguuaauuuuuccaa

SEQ ID NO: 1349690 - RNA, 19 nt, Human
caguuaauuuuuccaacua

SEQ ID NO: 1349691 - RNA, 15 nt, Human
caguucugaagaaga

SEQ ID NO: 1349692 - RNA, 16 nt, Human
caguucugaagaagau

SEQ ID NO: 1349693 - RNA, 22 nt, Human
caguucugaagaagaugguacc

SEQ ID NO: 1349694 - RNA, 20 nt, Human
caguucucauggguggcacu

SEQ ID NO: 1349695 - RNA, 13 nt, Human
caguucugaagaa

SEQ ID NO: 1349696 - RNA, 14 nt, Human
caguucugaagaag

SEQ ID NO: 1349697 - RNA, 12 nt, Human
caguucugaaga

SEQ ID NO: 1349698 - RNA, 22 nt, Human
caguucggugagcuacaaaugc

SEQ ID NO: 1349699 - RNA, 15 nt, Human
caguuccuuucaaag

SEQ ID NO: 1349700 - RNA, 21 nt, Human
caguucgacucugugcuggcc

SEQ ID NO: 1349701 - RNA, 13 nt, Human
caguucgcagcca

SEQ ID NO: 1349702 - RNA, 14 nt, Human
caguucgcagccac

SEQ ID NO: 1349703 - RNA, 15 nt, Human
caguucgcagccacc

SEQ ID NO: 1349704 - RNA, 16 nt, Human
caguucgcagccaccc

SEQ ID NO: 1349705 - RNA, 18 nt, Human
caguucgcagccacccug

SEQ ID NO: 1349706 - RNA, 19 nt, Human
caguucgcagccacccuga

SEQ ID NO: 1349707 - RNA, 21 nt, Human
caguucgcagccacccugagg

SEQ ID NO: 1349708 - RNA, 22 nt, Human
caguucgcagccacccugagga

SEQ ID NO: 1349709 - RNA, 15 nt, Human
caguucuaaccuccu

SEQ ID NO: 1349710 - RNA, 18 nt, Human
caguucuaaccuccuaag

SEQ ID NO: 1349711 - RNA, 11 nt, Human
caguucuagga

SEQ ID NO: 1349712 - RNA, 15 nt, Human
caguucuaggaaaau

SEQ ID NO: 1349713 - RNA, 12 nt, Human
caguucuaggaa

SEQ ID NO: 1349714 - RNA, 16 nt, Human
caguucuuugggccag

SEQ ID NO: 1349715 - RNA, 17 nt, Human
caguucuuugggccaga

SEQ ID NO: 1349716 - RNA, 18 nt, Human
caguucuuugggccagac

SEQ ID NO: 1349717 - RNA, 19 nt, Human
caguucuuugggccagaca

SEQ ID NO: 1349718 - RNA, 19 nt, Human
caguucuucgacuguuguu

SEQ ID NO: 1349719 - RNA, 18 nt, Human
caguucuucgacuguugu

SEQ ID NO: 1349720 - RNA, 23 nt, Human
caguucugugaucugggucucua

SEQ ID NO: 1349721 - RNA, 20 nt, Human
caguucugugguuucauguu

SEQ ID NO: 1349722 - RNA, 15 nt, Human
cauaauacuugcuuu

SEQ ID NO: 1349723 - RNA, 18 nt, Human
cauaauccaguaaaauaa

SEQ ID NO: 1349724 - RNA, 17 nt, Human
cauaauccaguaaaaua

SEQ ID NO: 1349725 - RNA, 15 nt, Human
cauaaucacucuaau

SEQ ID NO: 1349726 - RNA, 16 nt, Human
cauaaucacucuaauu

SEQ ID NO: 1349727 - RNA, 19 nt, Human
cauaaucuggacuccucug

SEQ ID NO: 1349728 - RNA, 18 nt, Human
cauacauucuucaagauc

SEQ ID NO: 1349729 - RNA, 21 nt, Human
cauacauucuucaagauccca

SEQ ID NO: 1349730 - RNA, 14 nt, Human
cauacauuuucuaa

SEQ ID NO: 1349731 - RNA, 16 nt, Human
cauacauuuucuaaga

SEQ ID NO: 1349732 - RNA, 18 nt, Human
cauaccauggaggaaggc

SEQ ID NO: 1349733 - RNA, 17 nt, Human
cauacauuuuguaccaa

SEQ ID NO: 1349734 - RNA, 18 nt, Human
cauacauuuucuaagaaa

SEQ ID NO: 1349735 - RNA, 14 nt, Human
cauaccaaugaaaa

SEQ ID NO: 1349736 - RNA, 18 nt, Human
cauaagcuuaugcuuaaa

SEQ ID NO: 1349737 - RNA, 16 nt, Human
cauaagcuauuuuucu

SEQ ID NO: 1349738 - RNA, 17 nt, Human
cauaagcuauuuuucua

SEQ ID NO: 1349739 - RNA, 20 nt, Human
cauaagcuauuuuucuaacu

SEQ ID NO: 1349740 - RNA, 18 nt, Human
cauaagcuauuuuucuaa

SEQ ID NO: 1349741 - RNA, 15 nt, Human
cauaaggcuucaaaa

SEQ ID NO: 1349742 - RNA, 19 nt, Human
cauaaggcuucaaaauguu

SEQ ID NO: 1349743 - RNA, 19 nt, Human
cauaaguauuaugucucuu

SEQ ID NO: 1349744 - RNA, 15 nt, Human
cauaaguauuucaaa

SEQ ID NO: 1349745 - RNA, 12 nt, Human
cauaaguuucug

SEQ ID NO: 1349746 - RNA, 17 nt, Human
cauaagauauuuuucau

SEQ ID NO: 1349747 - RNA, 22 nt, Human
cauaacuaauacagcugagcua

SEQ ID NO: 1349748 - RNA, 17 nt, Human
cauaacuaauacagcug

SEQ ID NO: 1349749 - RNA, 11 nt, Human
cauaacugaaa

SEQ ID NO: 1349750 - RNA, 14 nt, Human
cauaacugaaaaug

SEQ ID NO: 1349751 - RNA, 14 nt, Human
cauaacugaacauc

SEQ ID NO: 1349752 - RNA, 19 nt, Human
cauaagaaaacuaagaaau

SEQ ID NO: 1349753 - RNA, 16 nt, Human
cauaaauccuugauga

SEQ ID NO: 1349754 - RNA, 11 nt, Human
cauaaauuauu

SEQ ID NO: 1349755 - RNA, 12 nt, Human
cauaaauuauug

SEQ ID NO: 1349756 - RNA, 21 nt, Human
cauaaaguugauaaagauuuu

SEQ ID NO: 1349757 - RNA, 13 nt, Human
cauaaaggaaaag

SEQ ID NO: 1349758 - RNA, 15 nt, Human
cauaaaggaaaagac

SEQ ID NO: 1349759 - RNA, 19 nt, Human
cauaaaggaaaagacacau

SEQ ID NO: 1349760 - RNA, 21 nt, Human
cauaaaggaaaagacacauuu

SEQ ID NO: 1349761 - RNA, 17 nt, Human
cauaacaauuccucuac

SEQ ID NO: 1349762 - RNA, 19 nt, Human
cauaaauuuaguauuuugu

SEQ ID NO: 1349763 - RNA, 20 nt, Human
cauaaauuuaguauuuuguu

SEQ ID NO: 1349764 - RNA, 15 nt, Human
cauaacaacuucaua

SEQ ID NO: 1349765 - RNA, 14 nt, Human
cauaacaauuccuc

SEQ ID NO: 1349766 - RNA, 15 nt, Human
cauaacaauuccucu

SEQ ID NO: 1349767 - RNA, 16 nt, Human
cauaacaauuccucua

SEQ ID NO: 1349768 - RNA, 13 nt, Human
cauaaccacugcu

SEQ ID NO: 1349769 - RNA, 14 nt, Human
cauaaccacugcuu

SEQ ID NO: 1349770 - RNA, 15 nt, Human
cauaaccacugcuuc

SEQ ID NO: 1349771 - RNA, 22 nt, Human
cauaacccaagguaccauccua

SEQ ID NO: 1349772 - RNA, 12 nt, Human
cauaaccugucu

SEQ ID NO: 1349773 - RNA, 23 nt, Human
cauaaccugucucaccuggacuu

SEQ ID NO: 1349774 - RNA, 18 nt, Human
cauaaccuuaccagauuu

SEQ ID NO: 1349775 - RNA, 16 nt, Human
cauaaagcaggcagaa

SEQ ID NO: 1349776 - RNA, 14 nt, Human
cauaaagcaggcag

SEQ ID NO: 1349777 - RNA, 20 nt, Human
cauaaacacaucacagauga

SEQ ID NO: 1349778 - RNA, 21 nt, Human
cauaaacccaguugccaucug

SEQ ID NO: 1349779 - RNA, 21 nt, Human
cauaaaaaggacaucagcaaa

SEQ ID NO: 1349780 - RNA, 20 nt, Human
cauaaaaaggacaucagcaa

SEQ ID NO: 1349781 - RNA, 19 nt, Human
cauaaaaaggacaucagca

SEQ ID NO: 1349782 - RNA, 13 nt, Human
cauaaaaaggaca

SEQ ID NO: 1349783 - RNA, 19 nt, Human
caguuuuuuuuuucuuguc

SEQ ID NO: 1349784 - RNA, 20 nt, Human
caguuuuuuuuuucuugucu

SEQ ID NO: 1349785 - RNA, 21 nt, Human
caguuuuuuuuuucuugucua

SEQ ID NO: 1349786 - RNA, 22 nt, Human
cauaaaaaggacaucagcaaac

SEQ ID NO: 1349787 - RNA, 12 nt, Human
cauaaaacaggu

SEQ ID NO: 1349788 - RNA, 15 nt, Human
cauaaaaaugaucua

SEQ ID NO: 1349789 - RNA, 11 nt, Human
caguugcagcc

SEQ ID NO: 1349790 - RNA, 22 nt, Human
caguugcacagcaucucagcuc

SEQ ID NO: 1349791 - RNA, 19 nt, Human
caguugcacuucuaagacu

SEQ ID NO: 1349792 - RNA, 11 nt, Human
caguugcaguc

SEQ ID NO: 1349793 - RNA, 14 nt, Human
caguugcagucacu

SEQ ID NO: 1349794 - RNA, 19 nt, Human
caguugcagucacucuagu

SEQ ID NO: 1349795 - RNA, 16 nt, Human
caguugcauguaguaa

SEQ ID NO: 1349796 - RNA, 18 nt, Human
caguugcauguaguaaca

SEQ ID NO: 1349797 - RNA, 19 nt, Human
caguugcauguaguaacac

SEQ ID NO: 1349798 - RNA, 20 nt, Human
caguugcauguaguaacacu

SEQ ID NO: 1349799 - RNA, 21 nt, Human
caguugcauguaguaacacua

SEQ ID NO: 1349800 - RNA, 21 nt, Human
caguugcacagcaucucagcu

SEQ ID NO: 1349801 - RNA, 18 nt, Human
caguugcacagcaucuca

SEQ ID NO: 1349802 - RNA, 17 nt, Human
caguugcacagcaucuc

SEQ ID NO: 1349803 - RNA, 16 nt, Human
caguugcacagcaucu

SEQ ID NO: 1349804 - RNA, 15 nt, Human
caguugcacagcauc

SEQ ID NO: 1349805 - RNA, 13 nt, Human
caguugcacagca

SEQ ID NO: 1349806 - RNA, 12 nt, Human
caguugcacagc

SEQ ID NO: 1349807 - RNA, 18 nt, Human
caguugagacaagaaaau

SEQ ID NO: 1349808 - RNA, 16 nt, Human
caguugagacaagaaa

SEQ ID NO: 1349809 - RNA, 16 nt, Human
caguugauuuucugga

SEQ ID NO: 1349810 - RNA, 17 nt, Human
caguugauuuucuggau

SEQ ID NO: 1349811 - RNA, 19 nt, Human
caguugaagggaggggcug

SEQ ID NO: 1349812 - RNA, 14 nt, Human
caguugaauuucau

SEQ ID NO: 1349813 - RNA, 20 nt, Human
caguucuuugggccagacau

SEQ ID NO: 1349814 - RNA, 21 nt, Human
caguucuuugggccagacaug

SEQ ID NO: 1349815 - RNA, 22 nt, Human
caguucuuugggccagacaugc

SEQ ID NO: 1349816 - RNA, 13 nt, Human
caguuuuuauuaa

SEQ ID NO: 1349817 - RNA, 19 nt, Human
caguuuuuucaccuggaag

SEQ ID NO: 1349818 - RNA, 16 nt, Human
caguuuuuuaugcuaa

SEQ ID NO: 1349819 - RNA, 18 nt, Human
caguuuuuuuuuucuugu

SEQ ID NO: 1349820 - RNA, 23 nt, Human
caguuuuuuuuuucuugucuaua

SEQ ID NO: 1349821 - RNA, 15 nt, Human
caguugucucuguuu

SEQ ID NO: 1349822 - RNA, 21 nt, Human
caguugucucugaugcagcuu

SEQ ID NO: 1349823 - RNA, 22 nt, Human
caguugucucugaugcagcuua

SEQ ID NO: 1349824 - RNA, 13 nt, Human
caguugucucugu

SEQ ID NO: 1349825 - RNA, 14 nt, Human
caguugguaacuuu

SEQ ID NO: 1349826 - RNA, 16 nt, Human
caguugguaacuuuug

SEQ ID NO: 1349827 - RNA, 17 nt, Human
caguugguaacuuuugu

SEQ ID NO: 1349828 - RNA, 14 nt, Human
caguuguauuuaac

SEQ ID NO: 1349829 - RNA, 18 nt, Human
caguuguauuuaacagaa

SEQ ID NO: 1349830 - RNA, 21 nt, Human
caguuguauuuaacagaaauu

SEQ ID NO: 1349831 - RNA, 18 nt, Human
caguugucccgauuguaa

SEQ ID NO: 1349832 - RNA, 20 nt, Human
caguugucccgauuguaacu

SEQ ID NO: 1349833 - RNA, 21 nt, Human
caguugucccgauuguaacuc

SEQ ID NO: 1349834 - RNA, 22 nt, Human
caguugucccgauuguaacuca

SEQ ID NO: 1349835 - RNA, 12 nt, Human
caguuguccucc

SEQ ID NO: 1349836 - RNA, 15 nt, Human
caguuguccuccuuc

SEQ ID NO: 1349837 - RNA, 11 nt, Human
caguugucucu

SEQ ID NO: 1349838 - RNA, 13 nt, Human
caguugucucuga

SEQ ID NO: 1349839 - RNA, 14 nt, Human
caguugucucugau

SEQ ID NO: 1349840 - RNA, 15 nt, Human
caguugucucugaug

SEQ ID NO: 1349841 - RNA, 17 nt, Human
caguugucucugaugca

SEQ ID NO: 1349842 - RNA, 23 nt, Human
caguugcauguaguaacacuaau

SEQ ID NO: 1349843 - RNA, 18 nt, Human
caguugcugcuucaauuu

SEQ ID NO: 1349844 - RNA, 19 nt, Human
caguugcugcuucaauuua

SEQ ID NO: 1349845 - RNA, 22 nt, Human
caguugccuuuuaucccaaagu

SEQ ID NO: 1349846 - RNA, 13 nt, Human
caguugccuuuua

SEQ ID NO: 1349847 - RNA, 13 nt, Human
caguuggacuuuu

SEQ ID NO: 1349848 - RNA, 15 nt, Human
caguuggacuuuuua

SEQ ID NO: 1349849 - RNA, 20 nt, Human
caguuggacuuuuuaaaaau

SEQ ID NO: 1349850 - RNA, 17 nt, Human
caguuggagcuccagcc

SEQ ID NO: 1349851 - RNA, 21 nt, Human
caguuggagcuccagccugac

SEQ ID NO: 1349852 - RNA, 22 nt, Human
caguuggagcuccagccugaca

SEQ ID NO: 1349853 - RNA, 22 nt, Human
caguuggaguuuuuuguaccaa

SEQ ID NO: 1349854 - RNA, 20 nt, Human
cauacuaauuauacccccug

SEQ ID NO: 1349855 - RNA, 15 nt, Human
cauacuaugaaauau

SEQ ID NO: 1349856 - RNA, 18 nt, Human
cauacuaugaaauaugua

SEQ ID NO: 1349857 - RNA, 17 nt, Human
cauacgcucagcucauc

SEQ ID NO: 1349858 - RNA, 22 nt, Human
cauacccuggccgcccccugcc

SEQ ID NO: 1349859 - RNA, 21 nt, Human
cauaccuccuauggguuguca

SEQ ID NO: 1349860 - RNA, 13 nt, Human
cauacccccuccc

SEQ ID NO: 1349861 - RNA, 15 nt, Human
cauacccccuccccc

SEQ ID NO: 1349862 - RNA, 18 nt, Human
cauaccccuuacaaauga

SEQ ID NO: 1349863 - RNA, 20 nt, Human
cauaccccuuacaaaugaaa

SEQ ID NO: 1349864 - RNA, 14 nt, Human
cauacccugaccug

SEQ ID NO: 1349865 - RNA, 15 nt, Human
cauacccugaccugg

SEQ ID NO: 1349866 - RNA, 16 nt, Human
cauacccugaccuggc

SEQ ID NO: 1349867 - RNA, 18 nt, Human
cauacccugaccuggccc

SEQ ID NO: 1349868 - RNA, 19 nt, Human
cauacccugaccuggcccc

SEQ ID NO: 1349869 - RNA, 12 nt, Human
cauauuuucaug

SEQ ID NO: 1349870 - RNA, 18 nt, Human
cauauuuucaccauuuga

SEQ ID NO: 1349871 - RNA, 15 nt, Human
caucaaaaaaggcag

SEQ ID NO: 1349872 - RNA, 21 nt, Human
caucaaaaaaggcaguuacca

SEQ ID NO: 1349873 - RNA, 18 nt, Human
caucaaaaacuuuggagu

SEQ ID NO: 1349874 - RNA, 22 nt, Human
caucaagucuuucacauuuaaa

SEQ ID NO: 1349875 - RNA, 16 nt, Human
caucaagacuuugcua

SEQ ID NO: 1349876 - RNA, 22 nt, Human
caucaagacuuugcuaaagaca

SEQ ID NO: 1349877 - RNA, 17 nt, Human
caucaagagacugaguc

SEQ ID NO: 1349878 - RNA, 12 nt, Human
caucaagagaau

SEQ ID NO: 1349879 - RNA, 20 nt, Human
caucaaggacacgggccugu

SEQ ID NO: 1349880 - RNA, 21 nt, Human
caucaaggacacgggccuguc

SEQ ID NO: 1349881 - RNA, 14 nt, Human
caucaaguaauaca

SEQ ID NO: 1349882 - RNA, 11 nt, Human
caucaaagagg

SEQ ID NO: 1349883 - RNA, 23 nt, Human
caucaaagaggcugaggcuggca

SEQ ID NO: 1349884 - RNA, 15 nt, Human
caucaagacuuugcu

SEQ ID NO: 1349885 - RNA, 13 nt, Human
caucaaaaugcuu

SEQ ID NO: 1349886 - RNA, 15 nt, Human
caucaaaaugcuuuu

SEQ ID NO: 1349887 - RNA, 18 nt, Human
caucaaugaaugaaugaa

SEQ ID NO: 1349888 - RNA, 19 nt, Human
caucaaguugugccaaauu

SEQ ID NO: 1349889 - RNA, 22 nt, Human
caucaauggggccagucaggcc

SEQ ID NO: 1349890 - RNA, 19 nt, Human
caucaauggggccagucag

SEQ ID NO: 1349891 - RNA, 16 nt, Human
caucaauuaaaggcaa

SEQ ID NO: 1349892 - RNA, 12 nt, Human
caucacagaaug

SEQ ID NO: 1349893 - RNA, 14 nt, Human
caucacacugggug

SEQ ID NO: 1349894 - RNA, 19 nt, Human
caucacacugggugguggc

SEQ ID NO: 1349895 - RNA, 13 nt, Human
caucacagcccag

SEQ ID NO: 1349896 - RNA, 14 nt, Human
caucacagcccagc

SEQ ID NO: 1349897 - RNA, 17 nt, Human
caucacagcccagcccg

SEQ ID NO: 1349898 - RNA, 17 nt, Human
cauauuuauaaaaauaa

SEQ ID NO: 1349899 - RNA, 19 nt, Human
cauauuuaccucagccugg

SEQ ID NO: 1349900 - RNA, 22 nt, Human
cauauuucccaugauuucaugu

SEQ ID NO: 1349901 - RNA, 18 nt, Human
cauauuuaccucagccug

SEQ ID NO: 1349902 - RNA, 12 nt, Human
cauauuuauaaa

SEQ ID NO: 1349903 - RNA, 20 nt, Human
cauaugcauauuuuuuuucu

SEQ ID NO: 1349904 - RNA, 17 nt, Human
cauauuuaccucagccu

SEQ ID NO: 1349905 - RNA, 20 nt, Human
cauagaauaaaauuuuuaau

SEQ ID NO: 1349906 - RNA, 15 nt, Human
cauagacagaagaaa

SEQ ID NO: 1349907 - RNA, 20 nt, Human
cauagacagaagaaacaagg

SEQ ID NO: 1349908 - RNA, 14 nt, Human
cauagaauaaaauu

SEQ ID NO: 1349909 - RNA, 23 nt, Human
cauagaaauguaacuuuuguaag

SEQ ID NO: 1349910 - RNA, 17 nt, Human
cauagaccuuuucauuu

SEQ ID NO: 1349911 - RNA, 19 nt, Human
cauagacagaagaaacaag

SEQ ID NO: 1349912 - RNA, 18 nt, Human
cauagagacuugggaaug

SEQ ID NO: 1349913 - RNA, 19 nt, Human
cauacuuuguuaggaaggg

SEQ ID NO: 1349914 - RNA, 22 nt, Human
cauacuuuuuaaauguaaagau

SEQ ID NO: 1349915 - RNA, 14 nt, Human
cauacuuuccugua

SEQ ID NO: 1349916 - RNA, 16 nt, Human
cauacuuuuuaaaugu

SEQ ID NO: 1349917 - RNA, 20 nt, Human
cauacuuuuuaaauguaaag

SEQ ID NO: 1349918 - RNA, 20 nt, Human
cauacuugaacguuuucuaa

SEQ ID NO: 1349919 - RNA, 21 nt, Human
cauacuugaacguuuucuaau

SEQ ID NO: 1349920 - RNA, 22 nt, Human
cauacuugaacguuuucuaauu

SEQ ID NO: 1349921 - RNA, 13 nt, Human
cauacuugaaggg

SEQ ID NO: 1349922 - RNA, 14 nt, Human
cauacuugaagggc

SEQ ID NO: 1349923 - RNA, 17 nt, Human
cauacuugaagggccag

SEQ ID NO: 1349924 - RNA, 18 nt, Human
cauacuugaagggccaga

SEQ ID NO: 1349925 - RNA, 20 nt, Human
cauacuugaagggccagagc

SEQ ID NO: 1349926 - RNA, 21 nt, Human
cauacuugaagggccagagcc

SEQ ID NO: 1349927 - RNA, 22 nt, Human
cauacuugaagggccagagcca

SEQ ID NO: 1349928 - RNA, 23 nt, Human
cauacuugaagggccagagccag

SEQ ID NO: 1349929 - RNA, 23 nt, Human
cauacuugaacguuuucuaauug

SEQ ID NO: 1349930 - RNA, 22 nt, Human
cauacucauuuuucaugauaau

SEQ ID NO: 1349931 - RNA, 13 nt, Human
cauacuggccugg

SEQ ID NO: 1349932 - RNA, 15 nt, Human
cauacuggccuggac

SEQ ID NO: 1349933 - RNA, 18 nt, Human
cauacuggccuggacugu

SEQ ID NO: 1349934 - RNA, 22 nt, Human
cauacuggccuggacuguuuuc

SEQ ID NO: 1349935 - RNA, 17 nt, Human
cauacuguaacauucag

SEQ ID NO: 1349936 - RNA, 21 nt, Human
cauaugauguacauguacuga

SEQ ID NO: 1349937 - RNA, 15 nt, Human
cauaugaucugucug

SEQ ID NO: 1349938 - RNA, 14 nt, Human
cauaugauuuacau

SEQ ID NO: 1349939 - RNA, 17 nt, Human
cauaugauguacaugua

SEQ ID NO: 1349940 - RNA, 15 nt, Human
cauaugauguacaug

SEQ ID NO: 1349941 - RNA, 14 nt, Human
cauaucauccacac

SEQ ID NO: 1349942 - RNA, 17 nt, Human
cauaucauccacacaug

SEQ ID NO: 1349943 - RNA, 18 nt, Human
cauaucauccacacauga

SEQ ID NO: 1349944 - RNA, 20 nt, Human
cauaucauccacacaugaau

SEQ ID NO: 1349945 - RNA, 18 nt, Human
cauauccaguauuguucc

SEQ ID NO: 1349946 - RNA, 22 nt, Human
cauaugaguaagggcacugacg

SEQ ID NO: 1349947 - RNA, 14 nt, Human
cauauauauacuau

SEQ ID NO: 1349948 - RNA, 14 nt, Human
cauaucacacacau

SEQ ID NO: 1349949 - RNA, 16 nt, Human
cauaucacacacauug

SEQ ID NO: 1349950 - RNA, 18 nt, Human
cauaucacacacauugcu

SEQ ID NO: 1349951 - RNA, 15 nt, Human
cauauaauguuguua

SEQ ID NO: 1349952 - RNA, 17 nt, Human
cauauaauguuguuauu

SEQ ID NO: 1349953 - RNA, 18 nt, Human
cauauaauguuguuauuu

SEQ ID NO: 1349954 - RNA, 15 nt, Human
cauauaauuauaugu

SEQ ID NO: 1349955 - RNA, 22 nt, Human
cauauaauuauauguuguaagc

SEQ ID NO: 1349956 - RNA, 16 nt, Human
cauauaauuauauguu

SEQ ID NO: 1349957 - RNA, 17 nt, Human
cauauacagcucagaag

SEQ ID NO: 1349958 - RNA, 17 nt, Human
cauauauauacuauuaa

SEQ ID NO: 1349959 - RNA, 20 nt, Human
cauagugcuaacaugaagac

SEQ ID NO: 1349960 - RNA, 12 nt, Human
cauaguucagaa

SEQ ID NO: 1349961 - RNA, 13 nt, Human
cauaguucagaau

SEQ ID NO: 1349962 - RNA, 16 nt, Human
cauauaaauagaaugu

SEQ ID NO: 1349963 - RNA, 15 nt, Human
cauauaaauagaaug

SEQ ID NO: 1349964 - RNA, 13 nt, Human
cauauaaauagaa

SEQ ID NO: 1349965 - RNA, 12 nt, Human
cauauaaaguau

SEQ ID NO: 1349966 - RNA, 19 nt, Human
cauagugcuaacaugaaga

SEQ ID NO: 1349967 - RNA, 18 nt, Human
cauagugcuaacaugaag

SEQ ID NO: 1349968 - RNA, 18 nt, Human
cauagauaaaacaucuuu

SEQ ID NO: 1349969 - RNA, 20 nt, Human
cauagagccgggugucccca

SEQ ID NO: 1349970 - RNA, 22 nt, Human
cauagagccggguguccccaac

SEQ ID NO: 1349971 - RNA, 21 nt, Human
cauagagccggguguccccaa

SEQ ID NO: 1349972 - RNA, 21 nt, Human
cauagauaaaacaucuuugaa

SEQ ID NO: 1349973 - RNA, 23 nt, Human
cauagaucagcaaaccggggccu

SEQ ID NO: 1349974 - RNA, 16 nt, Human
caucucuuguuuaaau

SEQ ID NO: 1349975 - RNA, 14 nt, Human
caucugagaaaagc

SEQ ID NO: 1349976 - RNA, 23 nt, Human
caucugagaaaagcuuugaaccc

SEQ ID NO: 1349977 - RNA, 15 nt, Human
caucugagguuuuau

SEQ ID NO: 1349978 - RNA, 21 nt, Human
caucugagguuuuauuucauu

SEQ ID NO: 1349979 - RNA, 21 nt, Human
caucugaguccuggaugauac

SEQ ID NO: 1349980 - RNA, 13 nt, Human
caucugauuaaaa

SEQ ID NO: 1349981 - RNA, 15 nt, Human
caucugaguccugga

SEQ ID NO: 1349982 - RNA, 14 nt, Human
caucuucaguuguc

SEQ ID NO: 1349983 - RNA, 15 nt, Human
caucuucaguugucu

SEQ ID NO: 1349984 - RNA, 20 nt, Human
caucuucaguugucucugau

SEQ ID NO: 1349985 - RNA, 22 nt, Human
caucuucaguugucucugaugc

SEQ ID NO: 1349986 - RNA, 23 nt, Human
caucuucaguugucucugaugca

SEQ ID NO: 1349987 - RNA, 15 nt, Human
caucuuauucagcac

SEQ ID NO: 1349988 - RNA, 14 nt, Human
caucuccacuccag

SEQ ID NO: 1349989 - RNA, 19 nt, Human
caucucauuuaauccuccc

SEQ ID NO: 1349990 - RNA, 13 nt, Human
caucuccaagcag

SEQ ID NO: 1349991 - RNA, 21 nt, Human
caucucccaccuagcagcacc

SEQ ID NO: 1349992 - RNA, 17 nt, Human
caucucccagauaaugu

SEQ ID NO: 1349993 - RNA, 18 nt, Human
caucucccagauaaugug

SEQ ID NO: 1349994 - RNA, 22 nt, Human
caucucuucuggguuccuuccu

SEQ ID NO: 1349995 - RNA, 22 nt, Human
caucucccagauaaugugaaaa

SEQ ID NO: 1349996 - RNA, 23 nt, Human
caucucugggcuggaugagcucc

SEQ ID NO: 1349997 - RNA, 14 nt, Human
caucuugcuaccag

SEQ ID NO: 1349998 - RNA, 16 nt, Human
caucuugcuaccagua

SEQ ID NO: 1349999 - RNA, 17 nt, Human
caucuugcuaccaguau

SEQ ID NO: 1350000 - RNA, 18 nt, Human
caucuugcuaccaguauu

SEQ ID NO: 1350001 - RNA, 20 nt, Human
caucuugcuaccaguauuua

SEQ ID NO: 1350002 - RNA, 22 nt, Human
caucuugcuaccaguauuuaga

SEQ ID NO: 1350003 - RNA, 23 nt, Human
caucuugcuaccaguauuuagaa

SEQ ID NO: 1350004 - RNA, 13 nt, Human
caucuugcuuccc

SEQ ID NO: 1350005 - RNA, 14 nt, Human
caucuugcuucccu

SEQ ID NO: 1350006 - RNA, 15 nt, Human
caucuugcuucccua

SEQ ID NO: 1350007 - RNA, 16 nt, Human
caucuuggaacugcau

SEQ ID NO: 1350008 - RNA, 11 nt, Human
caucuuggggg

SEQ ID NO: 1350009 - RNA, 21 nt, Human
caucuucuaaacccaauccaa

SEQ ID NO: 1350010 - RNA, 13 nt, Human
caucuucugccuu

SEQ ID NO: 1350011 - RNA, 17 nt, Human
caucuucugccuuaguc

SEQ ID NO: 1350012 - RNA, 13 nt, Human
caucuugcauuau

SEQ ID NO: 1350013 - RNA, 16 nt, Human
caucuugcauuaugca

SEQ ID NO: 1350014 - RNA, 17 nt, Human
caucuugcauuaugcaa

SEQ ID NO: 1350015 - RNA, 18 nt, Human
caucuugcccgcucaggc

SEQ ID NO: 1350016 - RNA, 20 nt, Human
caucuugcccgcucaggcug

SEQ ID NO: 1350017 - RNA, 19 nt, Human
caucuugcccgcucaggcu

SEQ ID NO: 1350018 - RNA, 12 nt, Human
caucuugcuacc

SEQ ID NO: 1350019 - RNA, 17 nt, Human
caucuagguaaauuaca

SEQ ID NO: 1350020 - RNA, 18 nt, Human
caucuagguaaauuacag

SEQ ID NO: 1350021 - RNA, 14 nt, Human
caucuagugagcag

SEQ ID NO: 1350022 - RNA, 12 nt, Human
caucuaggauuu

SEQ ID NO: 1350023 - RNA, 20 nt, Human
caucuagaggcuuccuucau

SEQ ID NO: 1350024 - RNA, 21 nt, Human
caucuagaggcuuccuucauu

SEQ ID NO: 1350025 - RNA, 22 nt, Human
caucuagaggcuuccuucauuu

SEQ ID NO: 1350026 - RNA, 23 nt, Human
caucuagaggcuuccuucauuuc

SEQ ID NO: 1350027 - RNA, 19 nt, Human
caucuaccuagauuuaaua

SEQ ID NO: 1350028 - RNA, 20 nt, Human
caucuaccuagauuuaauau

SEQ ID NO: 1350029 - RNA, 19 nt, Human
caucuagaggcuuccuuca

SEQ ID NO: 1350030 - RNA, 11 nt, Human
cauccucucca

SEQ ID NO: 1350031 - RNA, 17 nt, Human
cauccucuggagccagc

SEQ ID NO: 1350032 - RNA, 18 nt, Human
cauccucuggagccagcc

SEQ ID NO: 1350033 - RNA, 19 nt, Human
cauccucuggagccagccg

SEQ ID NO: 1350034 - RNA, 23 nt, Human
cauccucuggcuuggccacagcc

SEQ ID NO: 1350035 - RNA, 20 nt, Human
caucuaaguuauaagacucu

SEQ ID NO: 1350036 - RNA, 14 nt, Human
caucuacaaaacau

SEQ ID NO: 1350037 - RNA, 16 nt, Human
caucuacaaaacauua

SEQ ID NO: 1350038 - RNA, 20 nt, Human
caucuacaaaacauuaaacu

SEQ ID NO: 1350039 - RNA, 13 nt, Human
cauccuccuccca

SEQ ID NO: 1350040 - RNA, 16 nt, Human
cauccuccucccaccc

SEQ ID NO: 1350041 - RNA, 20 nt, Human
cauccuccucccacccggcu

SEQ ID NO: 1350042 - RNA, 17 nt, Human
caucuauagaaagcuau

SEQ ID NO: 1350043 - RNA, 22 nt, Human
caucuagugagcagucaggaaa

SEQ ID NO: 1350044 - RNA, 21 nt, Human
caucuaguuccccuguuuauu

SEQ ID NO: 1350045 - RNA, 23 nt, Human
caucuaguuccccuguuuauuca

SEQ ID NO: 1350046 - RNA, 20 nt, Human
caucuaguuccccuguuuau

SEQ ID NO: 1350047 - RNA, 14 nt, Human
caucuauuuuggau

SEQ ID NO: 1350048 - RNA, 16 nt, Human
caucuauuuuggauug

SEQ ID NO: 1350049 - RNA, 15 nt, Human
caucucaacaggccu

SEQ ID NO: 1350050 - RNA, 19 nt, Human
caucucaacaggccucagg

SEQ ID NO: 1350051 - RNA, 20 nt, Human
caucucaacaggccucaggg

SEQ ID NO: 1350052 - RNA, 22 nt, Human
caucucaacaggccucagggcu

SEQ ID NO: 1350053 - RNA, 21 nt, Human
caucucaacaggccucagggc

SEQ ID NO: 1350054 - RNA, 20 nt, Human
caucucagcucacugcaacc

SEQ ID NO: 1350055 - RNA, 19 nt, Human
caucucagcucacugcaac

SEQ ID NO: 1350056 - RNA, 21 nt, Human
caucucagcucaucuucacug

SEQ ID NO: 1350057 - RNA, 13 nt, Human
caucucagcccac

SEQ ID NO: 1350058 - RNA, 14 nt, Human
caucucaggccaga

SEQ ID NO: 1350059 - RNA, 17 nt, Human
caucucaggccagagcc

SEQ ID NO: 1350060 - RNA, 18 nt, Human
caucucaggccagagcca

SEQ ID NO: 1350061 - RNA, 17 nt, Human
caucucaguaugaauua

SEQ ID NO: 1350062 - RNA, 21 nt, Human
caucucagugaagaauacuuc

SEQ ID NO: 1350063 - RNA, 22 nt, Human
caucucagugaagaauacuucu

SEQ ID NO: 1350064 - RNA, 22 nt, Human
caucucaugccccuggcuggga

SEQ ID NO: 1350065 - RNA, 20 nt, Human
caucucauuuaauccucccu

SEQ ID NO: 1350066 - RNA, 15 nt, Human
cauccuaccgucuuu

SEQ ID NO: 1350067 - RNA, 17 nt, Human
cauccuaggcugacacc

SEQ ID NO: 1350068 - RNA, 14 nt, Human
cauccucaaagaaa

SEQ ID NO: 1350069 - RNA, 20 nt, Human
cauccucaaagaaaguguau

SEQ ID NO: 1350070 - RNA, 16 nt, Human
cauccuacaagacaca

SEQ ID NO: 1350071 - RNA, 18 nt, Human
cauccuaaagaacaaagu

SEQ ID NO: 1350072 - RNA, 19 nt, Human
cauccuaaagaacaaagua

SEQ ID NO: 1350073 - RNA, 20 nt, Human
cauccuccgccucccggguu

SEQ ID NO: 1350074 - RNA, 13 nt, Human
cauccuccagccc

SEQ ID NO: 1350075 - RNA, 14 nt, Human
cauccuccagcccc

SEQ ID NO: 1350076 - RNA, 15 nt, Human
cauccuccagccccu

SEQ ID NO: 1350077 - RNA, 22 nt, Human
cauccucaaagaaaguguauug

SEQ ID NO: 1350078 - RNA, 18 nt, Human
cauccuccacguucugcu

SEQ ID NO: 1350079 - RNA, 20 nt, Human
cauccuccacguucugcuca

SEQ ID NO: 1350080 - RNA, 21 nt, Human
cauccuccacguucugcucau

SEQ ID NO: 1350081 - RNA, 17 nt, Human
cauccuccagauagugu

SEQ ID NO: 1350082 - RNA, 12 nt, Human
cauccuccagcc

SEQ ID NO: 1350083 - RNA, 13 nt, Human
cauccagggggca

SEQ ID NO: 1350084 - RNA, 21 nt, Human
cauccagggcccccaucucau

SEQ ID NO: 1350085 - RNA, 22 nt, Human
cauccaggaggaauaagcuccc

SEQ ID NO: 1350086 - RNA, 11 nt, Human
cauccagggcc

SEQ ID NO: 1350087 - RNA, 23 nt, Human
cauccagcagauuuccagccuuc

SEQ ID NO: 1350088 - RNA, 15 nt, Human
cauccagcucacuca

SEQ ID NO: 1350089 - RNA, 16 nt, Human
cauccaauuagcuuau

SEQ ID NO: 1350090 - RNA, 14 nt, Human
cauccaaguuaaau

SEQ ID NO: 1350091 - RNA, 14 nt, Human
cauccacacaugaa

SEQ ID NO: 1350092 - RNA, 17 nt, Human
cauccacaugggagccg

SEQ ID NO: 1350093 - RNA, 20 nt, Human
cauccacauacccugaccug

SEQ ID NO: 1350094 - RNA, 12 nt, Human
cauccaccccau

SEQ ID NO: 1350095 - RNA, 14 nt, Human
cauccaccccaucc

SEQ ID NO: 1350096 - RNA, 20 nt, Human
caucccucacccauccuaga

SEQ ID NO: 1350097 - RNA, 13 nt, Human
caucccuccccag

SEQ ID NO: 1350098 - RNA, 14 nt, Human
caucccucacccau

SEQ ID NO: 1350099 - RNA, 13 nt, Human
caucccucaccca

SEQ ID NO: 1350100 - RNA, 14 nt, Human
caucccuccccagu

SEQ ID NO: 1350101 - RNA, 16 nt, Human
caucacagcccagccc

SEQ ID NO: 1350102 - RNA, 21 nt, Human
caucauucucugucucaucca

SEQ ID NO: 1350103 - RNA, 22 nt, Human
caucauucucugucucauccau

SEQ ID NO: 1350104 - RNA, 24 nt, Human
caucauucucugucucauccauca

SEQ ID NO: 1350105 - RNA, 12 nt, Human
caucauuucacu

SEQ ID NO: 1350106 - RNA, 15 nt, Human
caucauuucacuugu

SEQ ID NO: 1350107 - RNA, 20 nt, Human
caucauuucuuuuugggaga

SEQ ID NO: 1350108 - RNA, 14 nt, Human
caucauuuuuuacu

SEQ ID NO: 1350109 - RNA, 23 nt, Human
cauccaaaauaguuaagacauga

SEQ ID NO: 1350110 - RNA, 17 nt, Human
cauccaaaaucuugauc

SEQ ID NO: 1350111 - RNA, 23 nt, Human
cauccaaaaucuugaucaguuaa

SEQ ID NO: 1350112 - RNA, 15 nt, Human
cauccaaagcagaca

SEQ ID NO: 1350113 - RNA, 16 nt, Human
cauccaaagcagacag

SEQ ID NO: 1350114 - RNA, 17 nt, Human
cauccaaagcagacagc

SEQ ID NO: 1350115 - RNA, 18 nt, Human
cauccaaagcagacagcu

SEQ ID NO: 1350116 - RNA, 21 nt, Human
cauccaaagcagacagcucca

SEQ ID NO: 1350117 - RNA, 20 nt, Human
cauccaaggcacugucacua

SEQ ID NO: 1350118 - RNA, 21 nt, Human
cauccaaggccagguucuccg

SEQ ID NO: 1350119 - RNA, 17 nt, Human
cauccuacaagacacag

SEQ ID NO: 1350120 - RNA, 14 nt, Human
cauccuaacuccau

SEQ ID NO: 1350121 - RNA, 21 nt, Human
cauccuaacuccaugucucug

SEQ ID NO: 1350122 - RNA, 17 nt, Human
cauccgugccucuuuuu

SEQ ID NO: 1350123 - RNA, 21 nt, Human
cauccgugccucuuuuuaaag

SEQ ID NO: 1350124 - RNA, 22 nt, Human
cauuauuugagaagcugcucaa

SEQ ID NO: 1350125 - RNA, 20 nt, Human
cauuauuugagaagcugcuc

SEQ ID NO: 1350126 - RNA, 14 nt, Human
cauuauuugagaag

SEQ ID NO: 1350127 - RNA, 22 nt, Human
cauuauuuauguauugugcaau

SEQ ID NO: 1350128 - RNA, 17 nt, Human
cauuagcaguuugcuuu

SEQ ID NO: 1350129 - RNA, 18 nt, Human
cauuagcaguuugcuuug

SEQ ID NO: 1350130 - RNA, 15 nt, Human
cauuauuuauguauu

SEQ ID NO: 1350131 - RNA, 16 nt, Human
cauuauuuauguauug

SEQ ID NO: 1350132 - RNA, 15 nt, Human
cauuacuauaagaac

SEQ ID NO: 1350133 - RNA, 16 nt, Human
cauuagacuggaacuu

SEQ ID NO: 1350134 - RNA, 20 nt, Human
cauuagacuggaacuugaac

SEQ ID NO: 1350135 - RNA, 12 nt, Human
cauuaauucuau

SEQ ID NO: 1350136 - RNA, 15 nt, Human
cauuaccauguaaug

SEQ ID NO: 1350137 - RNA, 12 nt, Human
cauuaaucugcc

SEQ ID NO: 1350138 - RNA, 14 nt, Human
cauuaaauucacaa

SEQ ID NO: 1350139 - RNA, 17 nt, Human
cauuaaauucacaaacu

SEQ ID NO: 1350140 - RNA, 18 nt, Human
cauuaaauucacaaacuu

SEQ ID NO: 1350141 - RNA, 21 nt, Human
cauuaaauucacaaacuuuua

SEQ ID NO: 1350142 - RNA, 14 nt, Human
cauuaaauuacaga

SEQ ID NO: 1350143 - RNA, 15 nt, Human
cauuaauagcagccu

SEQ ID NO: 1350144 - RNA, 17 nt, Human
cauuaauagcagccuuu

SEQ ID NO: 1350145 - RNA, 20 nt, Human
cauuaauagcagccuuucuc

SEQ ID NO: 1350146 - RNA, 18 nt, Human
cauuaauagcagccuuuc

SEQ ID NO: 1350147 - RNA, 20 nt, Human
cauuaaucaguucauuagaa

SEQ ID NO: 1350148 - RNA, 18 nt, Human
cauuaaucugccucccuc

SEQ ID NO: 1350149 - RNA, 19 nt, Human
cauuaaacuaguguuauac

SEQ ID NO: 1350150 - RNA, 22 nt, Human
cauuaaacgauuuuuaaaaugu

SEQ ID NO: 1350151 - RNA, 11 nt, Human
cauuaaagaag

SEQ ID NO: 1350152 - RNA, 15 nt, Human
cauuaaagaagaccu

SEQ ID NO: 1350153 - RNA, 14 nt, Human
cauuaaagaagacc

SEQ ID NO: 1350154 - RNA, 13 nt, Human
cauuaaauaaauu

SEQ ID NO: 1350155 - RNA, 11 nt, Human
cauuaaauaaa

SEQ ID NO: 1350156 - RNA, 20 nt, Human
cauuaaauuacagaaauuua

SEQ ID NO: 1350157 - RNA, 13 nt, Human
cauuaaauucaca

SEQ ID NO: 1350158 - RNA, 17 nt, Human
caugugaaaucauucau

SEQ ID NO: 1350159 - RNA, 16 nt, Human
caugugaaaucauuca

SEQ ID NO: 1350160 - RNA, 15 nt, Human
caugugaaaucauuc

SEQ ID NO: 1350161 - RNA, 14 nt, Human
caugucgccucugc

SEQ ID NO: 1350162 - RNA, 15 nt, Human
caugucgccucugca

SEQ ID NO: 1350163 - RNA, 15 nt, Human
cauguacaugaagaa

SEQ ID NO: 1350164 - RNA, 17 nt, Human
cauguccuucugagccc

SEQ ID NO: 1350165 - RNA, 18 nt, Human
caugucgccucugcauuc

SEQ ID NO: 1350166 - RNA, 20 nt, Human
caugucgccucugcauucag

SEQ ID NO: 1350167 - RNA, 16 nt, Human
cauggucccacauccc

SEQ ID NO: 1350168 - RNA, 17 nt, Human
cauggucccacaucccu

SEQ ID NO: 1350169 - RNA, 18 nt, Human
cauggucccacaucccug

SEQ ID NO: 1350170 - RNA, 19 nt, Human
cauggucccacaucccugg

SEQ ID NO: 1350171 - RNA, 23 nt, Human
cauggucccacaucccugggccu

SEQ ID NO: 1350172 - RNA, 15 nt, Human
cauggugccccagga

SEQ ID NO: 1350173 - RNA, 20 nt, Human
cauggucccacaucccuggg

SEQ ID NO: 1350174 - RNA, 21 nt, Human
cauggucccacaucccugggc

SEQ ID NO: 1350175 - RNA, 22 nt, Human
cauggucccacaucccugggcc

SEQ ID NO: 1350176 - RNA, 16 nt, Human
cauggugccccaggac

SEQ ID NO: 1350177 - RNA, 17 nt, Human
cauggugccccaggacc

SEQ ID NO: 1350178 - RNA, 18 nt, Human
cauggugccccaggacca

SEQ ID NO: 1350179 - RNA, 19 nt, Human
cauggugccccaggaccag

SEQ ID NO: 1350180 - RNA, 20 nt, Human
cauggugccccaggaccagc

SEQ ID NO: 1350181 - RNA, 22 nt, Human
cauggugccccaggaccagcuc

SEQ ID NO: 1350182 - RNA, 16 nt, Human
caugguguccagacag

SEQ ID NO: 1350183 - RNA, 18 nt, Human
cauggugugaucgucuga

SEQ ID NO: 1350184 - RNA, 14 nt, Human
caugguguucuccu

SEQ ID NO: 1350185 - RNA, 15 nt, Human
caugguguucuccug

SEQ ID NO: 1350186 - RNA, 16 nt, Human
caugguguucuccugc

SEQ ID NO: 1350187 - RNA, 17 nt, Human
caugguguucuccugcu

SEQ ID NO: 1350188 - RNA, 19 nt, Human
caugguguucuccugcugc

SEQ ID NO: 1350189 - RNA, 13 nt, Human
caugguuaagagu

SEQ ID NO: 1350190 - RNA, 16 nt, Human
caugguuaagagucca

SEQ ID NO: 1350191 - RNA, 19 nt, Human
caugguuaagaguccaaga

SEQ ID NO: 1350192 - RNA, 17 nt, Human
caugguuaccaugucuu

SEQ ID NO: 1350193 - RNA, 18 nt, Human
caugguuaccaugucuuu

SEQ ID NO: 1350194 - RNA, 19 nt, Human
caugguuaccaugucuuuc

SEQ ID NO: 1350195 - RNA, 19 nt, Human
cauguaacgcaaguuccca

SEQ ID NO: 1350196 - RNA, 20 nt, Human
cauguaacgcaaguucccag

SEQ ID NO: 1350197 - RNA, 14 nt, Human
cauguaacugccua

SEQ ID NO: 1350198 - RNA, 15 nt, Human
cauguaacugccuag

SEQ ID NO: 1350199 - RNA, 16 nt, Human
cauguaacugccuaga

SEQ ID NO: 1350200 - RNA, 19 nt, Human
cauguaacugccuagaaac

SEQ ID NO: 1350201 - RNA, 20 nt, Human
cauguaacugccuagaaaca

SEQ ID NO: 1350202 - RNA, 21 nt, Human
cauguaacugccuagaaacaa

SEQ ID NO: 1350203 - RNA, 17 nt, Human
cauguaagcugaaaaua

SEQ ID NO: 1350204 - RNA, 18 nt, Human
cauguaagcugaaaauau

SEQ ID NO: 1350205 - RNA, 23 nt, Human
cauguaagcugaaaauauggcaa

SEQ ID NO: 1350206 - RNA, 14 nt, Human
cauguaauccucaa

SEQ ID NO: 1350207 - RNA, 21 nt, Human
cauguuucuuuguaaugaaaa

SEQ ID NO: 1350208 - RNA, 15 nt, Human
cauguuuaucugcuu

SEQ ID NO: 1350209 - RNA, 23 nt, Human
cauguguguccacgacugucucc

SEQ ID NO: 1350210 - RNA, 12 nt, Human
cauguguggaag

SEQ ID NO: 1350211 - RNA, 19 nt, Human
cauguuuagacuuuaacau

SEQ ID NO: 1350212 - RNA, 21 nt, Human
caugugugguacaugguguuu

SEQ ID NO: 1350213 - RNA, 13 nt, Human
cauguguggaagu

SEQ ID NO: 1350214 - RNA, 12 nt, Human
caugugugucca

SEQ ID NO: 1350215 - RNA, 21 nt, Human
cauguguguccacgacugucu

SEQ ID NO: 1350216 - RNA, 22 nt, Human
cauguguguccacgacugucuc

SEQ ID NO: 1350217 - RNA, 22 nt, Human
cauguuucuuuguaaugaaaac

SEQ ID NO: 1350218 - RNA, 21 nt, Human
cauguuuucugaaaauauaac

SEQ ID NO: 1350219 - RNA, 13 nt, Human
caugugacauuua

SEQ ID NO: 1350220 - RNA, 14 nt, Human
caugugacauuuau

SEQ ID NO: 1350221 - RNA, 16 nt, Human
caugugacauuuauau

SEQ ID NO: 1350222 - RNA, 16 nt, Human
caugugaccacucugu

SEQ ID NO: 1350223 - RNA, 12 nt, Human
caugugacauuu

SEQ ID NO: 1350224 - RNA, 18 nt, Human
caugugaccacucugucu

SEQ ID NO: 1350225 - RNA, 18 nt, Human
caugugcauuauuuucca

SEQ ID NO: 1350226 - RNA, 19 nt, Human
caugugcauuauuuuccag

SEQ ID NO: 1350227 - RNA, 22 nt, Human
caugugccagggcaaugaugaa

SEQ ID NO: 1350228 - RNA, 24 nt, Human
caugugccagggcaaugaugaaug

SEQ ID NO: 1350229 - RNA, 24 nt, Human
caugugcugcccuacagcacccug

SEQ ID NO: 1350230 - RNA, 12 nt, Human
cauguggcugga

SEQ ID NO: 1350231 - RNA, 13 nt, Human
cauguggcuggaa

SEQ ID NO: 1350232 - RNA, 15 nt, Human
cauguggcuggaaga

SEQ ID NO: 1350233 - RNA, 14 nt, Human
cauguggggccagg

SEQ ID NO: 1350234 - RNA, 15 nt, Human
cauguggggccaggu

SEQ ID NO: 1350235 - RNA, 17 nt, Human
cauguggggccagguca

SEQ ID NO: 1350236 - RNA, 23 nt, Human
cauguggggccaggucacccuuu

SEQ ID NO: 1350237 - RNA, 18 nt, Human
cauguggggccaggucac

SEQ ID NO: 1350238 - RNA, 22 nt, Human
caugugguggcacaggcccccu

SEQ ID NO: 1350239 - RNA, 23 nt, Human
caugugguggcacaggcccccuu

SEQ ID NO: 1350240 - RNA, 18 nt, Human
caugugugcaacagggua

SEQ ID NO: 1350241 - RNA, 23 nt, Human
cauggacacuacacccagcaaua

SEQ ID NO: 1350242 - RNA, 22 nt, Human
cauggacacuacacccagcaau

SEQ ID NO: 1350243 - RNA, 13 nt, Human
cauggaaggcaag

SEQ ID NO: 1350244 - RNA, 14 nt, Human
cauggaaggcaaga

SEQ ID NO: 1350245 - RNA, 23 nt, Human
cauggaaggcaagauuguguccc

SEQ ID NO: 1350246 - RNA, 14 nt, Human
cauggacaggcugg

SEQ ID NO: 1350247 - RNA, 15 nt, Human
cauggacaggcuggc

SEQ ID NO: 1350248 - RNA, 16 nt, Human
cauggacaggcuggcu

SEQ ID NO: 1350249 - RNA, 18 nt, Human
cauggacaggcuggcucc

SEQ ID NO: 1350250 - RNA, 15 nt, Human
caugcuucccuuucc

SEQ ID NO: 1350251 - RNA, 21 nt, Human
caugcuuauuccaugacugcu

SEQ ID NO: 1350252 - RNA, 16 nt, Human
caugcuuauuccauga

SEQ ID NO: 1350253 - RNA, 17 nt, Human
caugcuuauuccaugac

SEQ ID NO: 1350254 - RNA, 19 nt, Human
caugcuuauuccaugacug

SEQ ID NO: 1350255 - RNA, 16 nt, Human
caugcuucacaauguu

SEQ ID NO: 1350256 - RNA, 17 nt, Human
caugcuuagcagucccc

SEQ ID NO: 1350257 - RNA, 23 nt, Human
caugcuuagcaguccccuucccu

SEQ ID NO: 1350258 - RNA, 20 nt, Human
caugcuucccuuuccugagu

SEQ ID NO: 1350259 - RNA, 15 nt, Human
cauggaacacuucga

SEQ ID NO: 1350260 - RNA, 23 nt, Human
caugcugucuacacuaagagaga

SEQ ID NO: 1350261 - RNA, 19 nt, Human
caugcuaagagaaguagaa

SEQ ID NO: 1350262 - RNA, 20 nt, Human
caugcugugcgcccagggcu

SEQ ID NO: 1350263 - RNA, 22 nt, Human
caugcgcucagggccaugcuga

SEQ ID NO: 1350264 - RNA, 15 nt, Human
caugcgcucagggcc

SEQ ID NO: 1350265 - RNA, 13 nt, Human
caugcgguagcca

SEQ ID NO: 1350266 - RNA, 14 nt, Human
caugcgguagccag

SEQ ID NO: 1350267 - RNA, 15 nt, Human
caugcgguagccagc

SEQ ID NO: 1350268 - RNA, 16 nt, Human
caugcgguagccagca

SEQ ID NO: 1350269 - RNA, 17 nt, Human
caugcgguagccagcac

SEQ ID NO: 1350270 - RNA, 19 nt, Human
caugcgguagccagcacac

SEQ ID NO: 1350271 - RNA, 21 nt, Human
caugcgguagccagcacacag

SEQ ID NO: 1350272 - RNA, 16 nt, Human
caugcguguuucugac

SEQ ID NO: 1350273 - RNA, 17 nt, Human
caugcguguuucugacu

SEQ ID NO: 1350274 - RNA, 13 nt, Human
caugcuaagagaa

SEQ ID NO: 1350275 - RNA, 16 nt, Human
caugcuaagagaagua

SEQ ID NO: 1350276 - RNA, 17 nt, Human
caugcuaagagaaguag

SEQ ID NO: 1350277 - RNA, 21 nt, Human
caugcuaagagaaguagaaau

SEQ ID NO: 1350278 - RNA, 21 nt, Human
caugcgcccccuccgcccugc

SEQ ID NO: 1350279 - RNA, 23 nt, Human
caugcgcccccuccgcccugcca

SEQ ID NO: 1350280 - RNA, 14 nt, Human
caugcgcucagggc

SEQ ID NO: 1350281 - RNA, 17 nt, Human
cauggagauucucauaa

SEQ ID NO: 1350282 - RNA, 17 nt, Human
cauggagguucuaaggc

SEQ ID NO: 1350283 - RNA, 18 nt, Human
cauggagguucuaaggcc

SEQ ID NO: 1350284 - RNA, 13 nt, Human
cauggaguggcag

SEQ ID NO: 1350285 - RNA, 14 nt, Human
cauggaguggcagc

SEQ ID NO: 1350286 - RNA, 15 nt, Human
cauggaguggcagcc

SEQ ID NO: 1350287 - RNA, 17 nt, Human
cauggaguggcagccca

SEQ ID NO: 1350288 - RNA, 19 nt, Human
cauggaguggcagcccagc

SEQ ID NO: 1350289 - RNA, 20 nt, Human
cauggaguggcagcccagcc

SEQ ID NO: 1350290 - RNA, 21 nt, Human
cauggaguggcagcccagcca

SEQ ID NO: 1350291 - RNA, 23 nt, Human
cauggaguggcagcccagccagc

SEQ ID NO: 1350292 - RNA, 22 nt, Human
cauggaguggcagcccagccag

SEQ ID NO: 1350293 - RNA, 18 nt, Human
cauggauauaguuuuacu

SEQ ID NO: 1350294 - RNA, 13 nt, Human
cauggcagaaggc

SEQ ID NO: 1350295 - RNA, 19 nt, Human
cauggaugggggaacucag

SEQ ID NO: 1350296 - RNA, 12 nt, Human
cauggauuucuu

SEQ ID NO: 1350297 - RNA, 13 nt, Human
cauggauuucuuu

SEQ ID NO: 1350298 - RNA, 14 nt, Human
cauggauuuuccag

SEQ ID NO: 1350299 - RNA, 22 nt, Human
cauggcacagagauucugaacu

SEQ ID NO: 1350300 - RNA, 13 nt, Human
cauggagaaagcu

SEQ ID NO: 1350301 - RNA, 14 nt, Human
cauggagaaagcug

SEQ ID NO: 1350302 - RNA, 15 nt, Human
cauggagaaagcuga

SEQ ID NO: 1350303 - RNA, 17 nt, Human
cauggagaaagcugacu

SEQ ID NO: 1350304 - RNA, 18 nt, Human
cauggagaaagcugacuu

SEQ ID NO: 1350305 - RNA, 19 nt, Human
cauggagaaagcugacuug

SEQ ID NO: 1350306 - RNA, 20 nt, Human
cauggagaaagcugacuugg

SEQ ID NO: 1350307 - RNA, 21 nt, Human
cauggagaaagcugacuuggc

SEQ ID NO: 1350308 - RNA, 18 nt, Human
cauggagauugaccugga

SEQ ID NO: 1350309 - RNA, 23 nt, Human
cauggagaaagcugacuuggcug

SEQ ID NO: 1350310 - RNA, 22 nt, Human
cauggagaaagcugacuuggcu

SEQ ID NO: 1350311 - RNA, 17 nt, Human
caugggggagggggcag

SEQ ID NO: 1350312 - RNA, 19 nt, Human
caugggggagggggcagaa

SEQ ID NO: 1350313 - RNA, 21 nt, Human
caugggggagggggcagaagu

SEQ ID NO: 1350314 - RNA, 17 nt, Human
cauggucacacacugau

SEQ ID NO: 1350315 - RNA, 21 nt, Human
cauggucacacacugaugcuu

SEQ ID NO: 1350316 - RNA, 16 nt, Human
cauggucagcccuagg

SEQ ID NO: 1350317 - RNA, 19 nt, Human
cauggucagcccuagggug

SEQ ID NO: 1350318 - RNA, 15 nt, Human
cauggucccacaucc

SEQ ID NO: 1350319 - RNA, 17 nt, Human
caugggacagggaggac

SEQ ID NO: 1350320 - RNA, 23 nt, Human
caugggacagggaggacgcucuc

SEQ ID NO: 1350321 - RNA, 23 nt, Human
cauggggagggauucugguucca

SEQ ID NO: 1350322 - RNA, 13 nt, Human
caugggggagggg

SEQ ID NO: 1350323 - RNA, 11 nt, Human
cauggggaggg

SEQ ID NO: 1350324 - RNA, 20 nt, Human
cauggggagggauucugguu

SEQ ID NO: 1350325 - RNA, 20 nt, Human
caugggcccaggccucacca

SEQ ID NO: 1350326 - RNA, 20 nt, Human
caugggccccaggggaacac

SEQ ID NO: 1350327 - RNA, 23 nt, Human
caugcccugugcaaccucuuggc

SEQ ID NO: 1350328 - RNA, 16 nt, Human
caugccucagaagugc

SEQ ID NO: 1350329 - RNA, 18 nt, Human
caugccucagaagugcau

SEQ ID NO: 1350330 - RNA, 15 nt, Human
caugccccuggcugg

SEQ ID NO: 1350331 - RNA, 16 nt, Human
caugccccuggcuggg

SEQ ID NO: 1350332 - RNA, 21 nt, Human
caugcccggcuaauuuuugua

SEQ ID NO: 1350333 - RNA, 14 nt, Human
caugcccugugcaa

SEQ ID NO: 1350334 - RNA, 18 nt, Human
caugcccugugcaaccuc

SEQ ID NO: 1350335 - RNA, 19 nt, Human
caugcccugugcaaccucu

SEQ ID NO: 1350336 - RNA, 23 nt, Human
caugccucugaggccagccuggc

SEQ ID NO: 1350337 - RNA, 22 nt, Human
caugccucugaggccagccugg

SEQ ID NO: 1350338 - RNA, 13 nt, Human
caugccucugagg

SEQ ID NO: 1350339 - RNA, 14 nt, Human
caugccucugaggc

SEQ ID NO: 1350340 - RNA, 15 nt, Human
caugccucugaggcc

SEQ ID NO: 1350341 - RNA, 16 nt, Human
caugccucugaggcca

SEQ ID NO: 1350342 - RNA, 17 nt, Human
caugccucugaggccag

SEQ ID NO: 1350343 - RNA, 18 nt, Human
caugccucugaggccagc

SEQ ID NO: 1350344 - RNA, 19 nt, Human
caugccucugaggccagcc

SEQ ID NO: 1350345 - RNA, 20 nt, Human
caugccucugaggccagccu

SEQ ID NO: 1350346 - RNA, 21 nt, Human
caugccucugaggccagccug

SEQ ID NO: 1350347 - RNA, 14 nt, Human
caugccccuggcug

SEQ ID NO: 1350348 - RNA, 17 nt, Human
caugcauggaaauuccc

SEQ ID NO: 1350349 - RNA, 16 nt, Human
caugcauguccuguaa

SEQ ID NO: 1350350 - RNA, 15 nt, Human
caugcauggaaauuc

SEQ ID NO: 1350351 - RNA, 17 nt, Human
caugcauguccuguaaa

SEQ ID NO: 1350352 - RNA, 18 nt, Human
caugcauguccuguaaag

SEQ ID NO: 1350353 - RNA, 21 nt, Human
caugcauguccuguaaagguu

SEQ ID NO: 1350354 - RNA, 15 nt, Human
caugcauuacugcau

SEQ ID NO: 1350355 - RNA, 17 nt, Human
caugcauuacugcaugc

SEQ ID NO: 1350356 - RNA, 20 nt, Human
caugcauuacugcaugcacu

SEQ ID NO: 1350357 - RNA, 15 nt, Human
caugcauuguccucu

SEQ ID NO: 1350358 - RNA, 17 nt, Human
caugccacaaggacuuc

SEQ ID NO: 1350359 - RNA, 21 nt, Human
caugccacaaggacuuccugu

SEQ ID NO: 1350360 - RNA, 21 nt, Human
caugccagcuacuuccuccuc

SEQ ID NO: 1350361 - RNA, 14 nt, Human
caugcccagagacc

SEQ ID NO: 1350362 - RNA, 16 nt, Human
caugcccagagaccca

SEQ ID NO: 1350363 - RNA, 17 nt, Human
caugcccagagacccag

SEQ ID NO: 1350364 - RNA, 19 nt, Human
caugcccagagacccagcg

SEQ ID NO: 1350365 - RNA, 18 nt, Human
caugccccaucccaugcu

SEQ ID NO: 1350366 - RNA, 18 nt, Human
caugcccagagacccagc

SEQ ID NO: 1350367 - RNA, 16 nt, Human
caugccaggcuaauuu

SEQ ID NO: 1350368 - RNA, 18 nt, Human
caugccaggcuaauuuuu

SEQ ID NO: 1350369 - RNA, 19 nt, Human
caugccaguaacaggcuca

SEQ ID NO: 1350370 - RNA, 17 nt, Human
caugccaguaacaggcu

SEQ ID NO: 1350371 - RNA, 17 nt, Human
caugccauuuguacuga

SEQ ID NO: 1350372 - RNA, 18 nt, Human
caugccauuuguacugac

SEQ ID NO: 1350373 - RNA, 19 nt, Human
caugccauuuguacugacc

SEQ ID NO: 1350374 - RNA, 15 nt, Human
caugcauacacucuc

SEQ ID NO: 1350375 - RNA, 14 nt, Human
caugcaucaucuca

SEQ ID NO: 1350376 - RNA, 13 nt, Human
caugcaucuguuu

SEQ ID NO: 1350377 - RNA, 15 nt, Human
caugcaucuguuuau

SEQ ID NO: 1350378 - RNA, 22 nt, Human
caugcaucuguuuauucuauag

SEQ ID NO: 1350379 - RNA, 21 nt, Human
cauugaccuauuuccagaaau

SEQ ID NO: 1350380 - RNA, 15 nt, Human
cauugaccuauuucc

SEQ ID NO: 1350381 - RNA, 14 nt, Human
cauugaacacaaac

SEQ ID NO: 1350382 - RNA, 15 nt, Human
cauugaacacaaacu

SEQ ID NO: 1350383 - RNA, 16 nt, Human
cauugaacacaaacug

SEQ ID NO: 1350384 - RNA, 17 nt, Human
cauugaacacaaacugu

SEQ ID NO: 1350385 - RNA, 18 nt, Human
cauugaacacaaacugua

SEQ ID NO: 1350386 - RNA, 21 nt, Human
cauugaccgcgacuaauuuca

SEQ ID NO: 1350387 - RNA, 22 nt, Human
cauugaccgcgacuaauuucaa

SEQ ID NO: 1350388 - RNA, 15 nt, Human
cauuuccuaaauaua

SEQ ID NO: 1350389 - RNA, 15 nt, Human
cauuuccccuccuuc

SEQ ID NO: 1350390 - RNA, 19 nt, Human
cauuucuauuucuccucca

SEQ ID NO: 1350391 - RNA, 12 nt, Human
cauuucucaucc

SEQ ID NO: 1350392 - RNA, 15 nt, Human
cauuucucuaagaga

SEQ ID NO: 1350393 - RNA, 13 nt, Human
cauuucugaggug

SEQ ID NO: 1350394 - RNA, 21 nt, Human
cauuucugaggugcacuggga

SEQ ID NO: 1350395 - RNA, 18 nt, Human
cauuucugaggugcacug

SEQ ID NO: 1350396 - RNA, 23 nt, Human
cauuucuucuacaacucauacac

SEQ ID NO: 1350397 - RNA, 19 nt, Human
cauuuaaacagauguccau

SEQ ID NO: 1350398 - RNA, 16 nt, Human
cauuuaaacagauguc

SEQ ID NO: 1350399 - RNA, 14 nt, Human
cauuuaaacagaug

SEQ ID NO: 1350400 - RNA, 21 nt, Human
cauuuaaacagauguccauca

SEQ ID NO: 1350401 - RNA, 17 nt, Human
cauuuaaauacagucuu

SEQ ID NO: 1350402 - RNA, 18 nt, Human
cauuucccaacacaaaga

SEQ ID NO: 1350403 - RNA, 13 nt, Human
cauuuaaacagau

SEQ ID NO: 1350404 - RNA, 16 nt, Human
cauugcaucaaagcau

SEQ ID NO: 1350405 - RNA, 21 nt, Human
cauugacuuuccccaccagau

SEQ ID NO: 1350406 - RNA, 16 nt, Human
cauugacuuuccccac

SEQ ID NO: 1350407 - RNA, 15 nt, Human
cauuugcucauggaa

SEQ ID NO: 1350408 - RNA, 16 nt, Human
cauuugcucauggaau

SEQ ID NO: 1350409 - RNA, 18 nt, Human
cauuugcucauggaauug

SEQ ID NO: 1350410 - RNA, 17 nt, Human
cauuuuaaaguuaguau

SEQ ID NO: 1350411 - RNA, 16 nt, Human
cauuuuaacaucugag

SEQ ID NO: 1350412 - RNA, 17 nt, Human
cauuuuaauuauuauuc

SEQ ID NO: 1350413 - RNA, 14 nt, Human
cauuuuauggugcc

SEQ ID NO: 1350414 - RNA, 17 nt, Human
cauuuuauggugccuag

SEQ ID NO: 1350415 - RNA, 12 nt, Human
cauuuuauggug

SEQ ID NO: 1350416 - RNA, 23 nt, Human
cauuuucuggccaguguuuaaaa

SEQ ID NO: 1350417 - RNA, 22 nt, Human
cauuuucuggccaguguuuaaa

SEQ ID NO: 1350418 - RNA, 12 nt, Human
cauuuugaaagu

SEQ ID NO: 1350419 - RNA, 19 nt, Human
cauuuugaaagucuguccu

SEQ ID NO: 1350420 - RNA, 21 nt, Human
cauuuugaaagucuguccuug

SEQ ID NO: 1350421 - RNA, 23 nt, Human
cauuuugaaucacaugaauuauu

SEQ ID NO: 1350422 - RNA, 15 nt, Human
cauuuugaaucacau

SEQ ID NO: 1350423 - RNA, 20 nt, Human
cauuuuggagaguuuccuga

SEQ ID NO: 1350424 - RNA, 22 nt, Human
cauuuuggagaguuuccugaaa

SEQ ID NO: 1350425 - RNA, 16 nt, Human
cauuuugguacuuugg

SEQ ID NO: 1350426 - RNA, 14 nt, Human
cauuuugguacuuu

SEQ ID NO: 1350427 - RNA, 20 nt, Human
ccaaaaguuacauguuugca

SEQ ID NO: 1350428 - RNA, 23 nt, Human
ccaaaauaaauaaggaaaagcuu

SEQ ID NO: 1350429 - RNA, 20 nt, Human
ccaaaaucauaagauauuuu

SEQ ID NO: 1350430 - RNA, 13 nt, Human
ccaaaccucacca

SEQ ID NO: 1350431 - RNA, 15 nt, Human
ccaaaccucaccaac

SEQ ID NO: 1350432 - RNA, 16 nt, Human
ccaaaccucaccaacu

SEQ ID NO: 1350433 - RNA, 21 nt, Human
ccaaacgcccuuuccuccuca

SEQ ID NO: 1350434 - RNA, 14 nt, Human
ccaaacuaauuuuu

SEQ ID NO: 1350435 - RNA, 22 nt, Human
ccaaacgcccuuuccuccucag

SEQ ID NO: 1350436 - RNA, 14 nt, Human
ccaaagaacagccu

SEQ ID NO: 1350437 - RNA, 19 nt, Human
ccaaagaaccaaagaagaa

SEQ ID NO: 1350438 - RNA, 15 nt, Human
ccaaagaaccaaaga

SEQ ID NO: 1350439 - RNA, 12 nt, Human
ccaaagaggcug

SEQ ID NO: 1350440 - RNA, 13 nt, Human
ccaaagaggcugc

SEQ ID NO: 1350441 - RNA, 14 nt, Human
ccaaagaggcugcc

SEQ ID NO: 1350442 - RNA, 16 nt, Human
ccaaagaggcugcccc

SEQ ID NO: 1350443 - RNA, 15 nt, Human
ccaaagagugauagu

SEQ ID NO: 1350444 - RNA, 19 nt, Human
cauuugacccuugcuguga

SEQ ID NO: 1350445 - RNA, 17 nt, Human
ccacaacuauuuucaga

SEQ ID NO: 1350446 - RNA, 12 nt, Human
ccacaagccucu

SEQ ID NO: 1350447 - RNA, 21 nt, Human
ccacaagccucugcccaggca

SEQ ID NO: 1350448 - RNA, 14 nt, Human
ccacaagccugagg

SEQ ID NO: 1350449 - RNA, 21 nt, Human
ccacaagccugagggaaaggc

SEQ ID NO: 1350450 - RNA, 20 nt, Human
ccacaagccugagggaaagg

SEQ ID NO: 1350451 - RNA, 17 nt, Human
ccacaaggacuuccugu

SEQ ID NO: 1350452 - RNA, 21 nt, Human
ccacaaggacuuccuguccag

SEQ ID NO: 1350453 - RNA, 16 nt, Human
ccacaagugcccucca

SEQ ID NO: 1350454 - RNA, 20 nt, Human
ccacaagugcccuccaggcu

SEQ ID NO: 1350455 - RNA, 22 nt, Human
ccacacaaggauagaugcuggc

SEQ ID NO: 1350456 - RNA, 20 nt, Human
ccacacaaggauagaugcug

SEQ ID NO: 1350457 - RNA, 19 nt, Human
ccaaggcugauuaaaccaa

SEQ ID NO: 1350458 - RNA, 16 nt, Human
ccaaggcucugagcaa

SEQ ID NO: 1350459 - RNA, 13 nt, Human
ccaagguguccua

SEQ ID NO: 1350460 - RNA, 15 nt, Human
ccaagguguccuaca

SEQ ID NO: 1350461 - RNA, 16 nt, Human
ccaagguguccuacag

SEQ ID NO: 1350462 - RNA, 17 nt, Human
ccaagguguccuacaga

SEQ ID NO: 1350463 - RNA, 18 nt, Human
ccaagguguccuacagaa

SEQ ID NO: 1350464 - RNA, 19 nt, Human
ccaagguguccuacagaaa

SEQ ID NO: 1350465 - RNA, 20 nt, Human
ccaagguguccuacagaaaa

SEQ ID NO: 1350466 - RNA, 21 nt, Human
ccaagguguccuacagaaaaa

SEQ ID NO: 1350467 - RNA, 22 nt, Human
ccaagguguccuacagaaaaac

SEQ ID NO: 1350468 - RNA, 16 nt, Human
ccaagguucuccaaca

SEQ ID NO: 1350469 - RNA, 16 nt, Human
ccaagguuacuuaauu

SEQ ID NO: 1350470 - RNA, 19 nt, Human
ccaagguuuaaagagucua

SEQ ID NO: 1350471 - RNA, 20 nt, Human
ccaagguuuaaagagucuag

SEQ ID NO: 1350472 - RNA, 23 nt, Human
ccaagguuuaaagagucuagauu

SEQ ID NO: 1350473 - RNA, 20 nt, Human
ccaauauucauagcagcuua

SEQ ID NO: 1350474 - RNA, 16 nt, Human
ccaaguuaaauguaga

SEQ ID NO: 1350475 - RNA, 16 nt, Human
ccaaguggcucccaca

SEQ ID NO: 1350476 - RNA, 13 nt, Human
ccaaguggcuccc

SEQ ID NO: 1350477 - RNA, 22 nt, Human
ccaagguuuaaagagucuagau

SEQ ID NO: 1350478 - RNA, 20 nt, Human
ccaagugagucucucugggc

SEQ ID NO: 1350479 - RNA, 22 nt, Human
ccaagugaccuauaccuguguu

SEQ ID NO: 1350480 - RNA, 22 nt, Human
ccacaaaugggaaaaccagacu

SEQ ID NO: 1350481 - RNA, 13 nt, Human
ccacaacacacag

SEQ ID NO: 1350482 - RNA, 12 nt, Human
ccacaacaugag

SEQ ID NO: 1350483 - RNA, 17 nt, Human
ccacaacaugaggccac

SEQ ID NO: 1350484 - RNA, 16 nt, Human
ccacaacaugaggcca

SEQ ID NO: 1350485 - RNA, 15 nt, Human
ccacaacuauuuuca

SEQ ID NO: 1350486 - RNA, 22 nt, Human
ccacaagaaaugaaagcaggga

SEQ ID NO: 1350487 - RNA, 16 nt, Human
ccacaagaaaugaaag

SEQ ID NO: 1350488 - RNA, 19 nt, Human
ccaauuucaaguuccaagu

SEQ ID NO: 1350489 - RNA, 16 nt, Human
ccaauuucagacuccc

SEQ ID NO: 1350490 - RNA, 20 nt, Human
ccaauuucggauuuuuucca

SEQ ID NO: 1350491 - RNA, 21 nt, Human
ccaauuucggauuuuuuccaa

SEQ ID NO: 1350492 - RNA, 23 nt, Human
ccaauuucggauuuuuuccaaaa

SEQ ID NO: 1350493 - RNA, 22 nt, Human
ccaauuucggauuuuuuccaaa

SEQ ID NO: 1350494 - RNA, 23 nt, Human
ccaauuuuuuaagugaaaauaua

SEQ ID NO: 1350495 - RNA, 22 nt, Human
ccacaaaaacagguauauacuu

SEQ ID NO: 1350496 - RNA, 16 nt, Human
ccacaaaacaaagcaa

SEQ ID NO: 1350497 - RNA, 23 nt, Human
ccacaaaauaaccaauccuggac

SEQ ID NO: 1350498 - RNA, 14 nt, Human
ccacaaacuguaau

SEQ ID NO: 1350499 - RNA, 13 nt, Human
ccacaaaaacagg

SEQ ID NO: 1350500 - RNA, 23 nt, Human
ccaagccguggcuucccgcucag

SEQ ID NO: 1350501 - RNA, 13 nt, Human
ccaagcuccaagc

SEQ ID NO: 1350502 - RNA, 15 nt, Human
ccaagcuccaagccc

SEQ ID NO: 1350503 - RNA, 17 nt, Human
ccaagcuccaagcccca

SEQ ID NO: 1350504 - RNA, 13 nt, Human
ccaaggccagguu

SEQ ID NO: 1350505 - RNA, 14 nt, Human
ccaagcuccaucuc

SEQ ID NO: 1350506 - RNA, 18 nt, Human
ccaaggcuagaaccaccu

SEQ ID NO: 1350507 - RNA, 15 nt, Human
ccaagccguggcuuc

SEQ ID NO: 1350508 - RNA, 16 nt, Human
ccaagccguggcuucc

SEQ ID NO: 1350509 - RNA, 17 nt, Human
ccaagccguggcuuccc

SEQ ID NO: 1350510 - RNA, 21 nt, Human
ccaagccguggcuucccgcuc

SEQ ID NO: 1350511 - RNA, 22 nt, Human
ccaagagcuacguauuuaauag

SEQ ID NO: 1350512 - RNA, 18 nt, Human
ccaagcaggaaaugaaaa

SEQ ID NO: 1350513 - RNA, 17 nt, Human
ccaaagaggcugccccu

SEQ ID NO: 1350514 - RNA, 20 nt, Human
ccaaagaggcugccccucuc

SEQ ID NO: 1350515 - RNA, 21 nt, Human
ccaaagaggcugccccucuca

SEQ ID NO: 1350516 - RNA, 22 nt, Human
ccaaagaggcugccccucucac

SEQ ID NO: 1350517 - RNA, 23 nt, Human
ccaaagaggcugccccucucacc

SEQ ID NO: 1350518 - RNA, 9 nt, Human
ccaaagagu

SEQ ID NO: 1350519 - RNA, 23 nt, Human
ccaacaugcacugauguuguguu

SEQ ID NO: 1350520 - RNA, 18 nt, Human
ccaacaucuacaaaacau

SEQ ID NO: 1350521 - RNA, 13 nt, Human
ccaacaugcacug

SEQ ID NO: 1350522 - RNA, 17 nt, Human
ccaacaugcacugaugu

SEQ ID NO: 1350523 - RNA, 21 nt, Human
ccaacaugcacugauguugug

SEQ ID NO: 1350524 - RNA, 18 nt, Human
ccaacccuggcacccagg

SEQ ID NO: 1350525 - RNA, 16 nt, Human
ccaacccuguccuccc

SEQ ID NO: 1350526 - RNA, 21 nt, Human
ccaagacaugucuguucuaca

SEQ ID NO: 1350527 - RNA, 23 nt, Human
ccaagacaugucuguucuacaua

SEQ ID NO: 1350528 - RNA, 18 nt, Human
ccaaccuguucaagucua

SEQ ID NO: 1350529 - RNA, 15 nt, Human
ccaaccuguuaccua

SEQ ID NO: 1350530 - RNA, 23 nt, Human
ccaaccuuagauguucuaagucu

SEQ ID NO: 1350531 - RNA, 17 nt, Human
ccaaccugcaaagaucu

SEQ ID NO: 1350532 - RNA, 18 nt, Human
ccaaccugcaaagaucug

SEQ ID NO: 1350533 - RNA, 19 nt, Human
ccaaccugcaaagaucugu

SEQ ID NO: 1350534 - RNA, 12 nt, Human
ccaaccugcucu

SEQ ID NO: 1350535 - RNA, 13 nt, Human
ccaaccugcucuc

SEQ ID NO: 1350536 - RNA, 15 nt, Human
ccaaccugcucuccu

SEQ ID NO: 1350537 - RNA, 16 nt, Human
ccaaccugcucuccuc

SEQ ID NO: 1350538 - RNA, 17 nt, Human
ccaaccugcucuccucu

SEQ ID NO: 1350539 - RNA, 20 nt, Human
ccaaccugcucuccucuucu

SEQ ID NO: 1350540 - RNA, 18 nt, Human
ccaaccugcucuccucuu

SEQ ID NO: 1350541 - RNA, 22 nt, Human
ccaaagaguagaauugcauuga

SEQ ID NO: 1350542 - RNA, 16 nt, Human
ccaaagcaagcaagag

SEQ ID NO: 1350543 - RNA, 17 nt, Human
ccaaagcaagcaagagg

SEQ ID NO: 1350544 - RNA, 13 nt, Human
ccaaagcagacag

SEQ ID NO: 1350545 - RNA, 14 nt, Human
ccaaagcagacagc

SEQ ID NO: 1350546 - RNA, 13 nt, Human
ccaaagcacauuu

SEQ ID NO: 1350547 - RNA, 18 nt, Human
ccaaauuuaaaacuguug

SEQ ID NO: 1350548 - RNA, 11 nt, Human
ccaaauuuaaa

SEQ ID NO: 1350549 - RNA, 22 nt, Human
ccaacaguuuaaugaagaucua

SEQ ID NO: 1350550 - RNA, 15 nt, Human
ccaacauaaaaauga

SEQ ID NO: 1350551 - RNA, 17 nt, Human
ccaacaucacagcccag

SEQ ID NO: 1350552 - RNA, 18 nt, Human
ccaacaucacagcccagc

SEQ ID NO: 1350553 - RNA, 16 nt, Human
ccaacacgcaccugcc

SEQ ID NO: 1350554 - RNA, 17 nt, Human
ccaacacgcaccugccu

SEQ ID NO: 1350555 - RNA, 19 nt, Human
ccaagagcaucaugccucu

SEQ ID NO: 1350556 - RNA, 21 nt, Human
ccaagagcaucaugccucuga

SEQ ID NO: 1350557 - RNA, 22 nt, Human
ccaagagcaucaugccucugag

SEQ ID NO: 1350558 - RNA, 23 nt, Human
ccaagagcaucaugccucugagg

SEQ ID NO: 1350559 - RNA, 16 nt, Human
ccaagagcaucaugcc

SEQ ID NO: 1350560 - RNA, 17 nt, Human
ccaagagcaucaugccu

SEQ ID NO: 1350561 - RNA, 18 nt, Human
ccaagagcaucaugccuc

SEQ ID NO: 1350562 - RNA, 13 nt, Human
ccaagacucuaga

SEQ ID NO: 1350563 - RNA, 18 nt, Human
ccaucagaaacacccuca

SEQ ID NO: 1350564 - RNA, 22 nt, Human
ccaucagaaacacccucacacu

SEQ ID NO: 1350565 - RNA, 20 nt, Human
ccaucagaaacacccucaca

SEQ ID NO: 1350566 - RNA, 15 nt, Human
ccauccugaggcucc

SEQ ID NO: 1350567 - RNA, 16 nt, Human
ccauccugaggcucca

SEQ ID NO: 1350568 - RNA, 12 nt, Human
ccauccugacca

SEQ ID NO: 1350569 - RNA, 11 nt, Human
ccaucucaggc

SEQ ID NO: 1350570 - RNA, 18 nt, Human
ccaucucaggccagagcc

SEQ ID NO: 1350571 - RNA, 20 nt, Human
ccaucucaugccccuggcug

SEQ ID NO: 1350572 - RNA, 21 nt, Human
ccaucucaugccccuggcugg

SEQ ID NO: 1350573 - RNA, 14 nt, Human
ccaucucaggccag

SEQ ID NO: 1350574 - RNA, 16 nt, Human
ccaucgcugucaucuc

SEQ ID NO: 1350575 - RNA, 13 nt, Human
ccauccugugugu

SEQ ID NO: 1350576 - RNA, 14 nt, Human
ccauccuguguguu

SEQ ID NO: 1350577 - RNA, 22 nt, Human
ccauccuguguguuaagcucug

SEQ ID NO: 1350578 - RNA, 18 nt, Human
ccaucaacaaaaauuguc

SEQ ID NO: 1350579 - RNA, 13 nt, Human
ccaucaaccucug

SEQ ID NO: 1350580 - RNA, 19 nt, Human
ccaucaccuacucacacag

SEQ ID NO: 1350581 - RNA, 21 nt, Human
ccaucaccuacucacacaggc

SEQ ID NO: 1350582 - RNA, 16 nt, Human
ccaucaccucagaugg

SEQ ID NO: 1350583 - RNA, 17 nt, Human
ccaucaccucagauggc

SEQ ID NO: 1350584 - RNA, 18 nt, Human
ccaucaccuuagaccacc

SEQ ID NO: 1350585 - RNA, 23 nt, Human
ccaucaccuuagaccaccaagcc

SEQ ID NO: 1350586 - RNA, 19 nt, Human
ccaucaccuuagaccacca

SEQ ID NO: 1350587 - RNA, 18 nt, Human
ccaucacugaguuuucca

SEQ ID NO: 1350588 - RNA, 18 nt, Human
ccauauuuaccucagccu

SEQ ID NO: 1350589 - RNA, 19 nt, Human
ccauauuuaccucagccug

SEQ ID NO: 1350590 - RNA, 21 nt, Human
ccauauuuaccucagccuggg

SEQ ID NO: 1350591 - RNA, 20 nt, Human
ccauauuuaccucagccugg

SEQ ID NO: 1350592 - RNA, 12 nt, Human
ccauauuuguaa

SEQ ID NO: 1350593 - RNA, 13 nt, Human
ccauauuuguaaa

SEQ ID NO: 1350594 - RNA, 14 nt, Human
ccauauuuguaaaa

SEQ ID NO: 1350595 - RNA, 15 nt, Human
ccauauuuguaaaau

SEQ ID NO: 1350596 - RNA, 16 nt, Human
ccauauuuguaaaaug

SEQ ID NO: 1350597 - RNA, 17 nt, Human
ccauauuuguaaaauga

SEQ ID NO: 1350598 - RNA, 19 nt, Human
ccauauuuguaaaaugaca

SEQ ID NO: 1350599 - RNA, 22 nt, Human
ccauauuuguaaaaugacaauc

SEQ ID NO: 1350600 - RNA, 20 nt, Human
ccauauuuguaaaaugacaa

SEQ ID NO: 1350601 - RNA, 16 nt, Human
ccaucaaaaugcuuuu

SEQ ID NO: 1350602 - RNA, 19 nt, Human
ccaucaaaaugcuuuuuau

SEQ ID NO: 1350603 - RNA, 17 nt, Human
ccaucaacaaaaauugu

SEQ ID NO: 1350604 - RNA, 23 nt, Human
ccagugggaggugagaccaccuc

SEQ ID NO: 1350605 - RNA, 20 nt, Human
ccagugggaggugagaccac

SEQ ID NO: 1350606 - RNA, 14 nt, Human
ccaguggauuccca

SEQ ID NO: 1350607 - RNA, 22 nt, Human
ccagugcugaauuucccucucu

SEQ ID NO: 1350608 - RNA, 12 nt, Human
ccagugcugaau

SEQ ID NO: 1350609 - RNA, 14 nt, Human
ccagggaccggcgg

SEQ ID NO: 1350610 - RNA, 13 nt, Human
ccagggagaagcu

SEQ ID NO: 1350611 - RNA, 14 nt, Human
ccagggagaagcuc

SEQ ID NO: 1350612 - RNA, 15 nt, Human
ccagggagaagcucc

SEQ ID NO: 1350613 - RNA, 15 nt, Human
ccagggacucugccg

SEQ ID NO: 1350614 - RNA, 21 nt, Human
ccagggacagaggccccagcc

SEQ ID NO: 1350615 - RNA, 22 nt, Human
ccagggacagaggccccagccu

SEQ ID NO: 1350616 - RNA, 23 nt, Human
ccagggacagaggccccagccuc

SEQ ID NO: 1350617 - RNA, 20 nt, Human
ccagggacaccugggagaaa

SEQ ID NO: 1350618 - RNA, 18 nt, Human
ccagggacaccugggaga

SEQ ID NO: 1350619 - RNA, 13 nt, Human
ccagggacagagg

SEQ ID NO: 1350620 - RNA, 18 nt, Human
ccagggacagaggcccca

SEQ ID NO: 1350621 - RNA, 20 nt, Human
ccagggacagaggccccagc

SEQ ID NO: 1350622 - RNA, 12 nt, Human
ccaggccugccu

SEQ ID NO: 1350623 - RNA, 19 nt, Human
ccaggccugaaagaggcug

SEQ ID NO: 1350624 - RNA, 23 nt, Human
ccaggccucucccuccuccagga

SEQ ID NO: 1350625 - RNA, 13 nt, Human
ccagcugcacuga

SEQ ID NO: 1350626 - RNA, 12 nt, Human
ccagcuggccgg

SEQ ID NO: 1350627 - RNA, 14 nt, Human
ccagcuggccggga

SEQ ID NO: 1350628 - RNA, 20 nt, Human
ccagcuggccgggagccuga

SEQ ID NO: 1350629 - RNA, 14 nt, Human
ccagcugcacugau

SEQ ID NO: 1350630 - RNA, 18 nt, Human
ccagcugggucaggcagg

SEQ ID NO: 1350631 - RNA, 15 nt, Human
ccagcugucccccca

SEQ ID NO: 1350632 - RNA, 18 nt, Human
ccagcuguccccccacuc

SEQ ID NO: 1350633 - RNA, 19 nt, Human
ccagcuguccccccacucc

SEQ ID NO: 1350634 - RNA, 16 nt, Human
ccagcuggguuggaaa

SEQ ID NO: 1350635 - RNA, 17 nt, Human
ccagcuggguuggaaaa

SEQ ID NO: 1350636 - RNA, 14 nt, Human
ccagcugggcucug

SEQ ID NO: 1350637 - RNA, 16 nt, Human
ccagcugggucaggca

SEQ ID NO: 1350638 - RNA, 17 nt, Human
ccagcugggucaggcag

SEQ ID NO: 1350639 - RNA, 19 nt, Human
ccagccugagcgacaguga

SEQ ID NO: 1350640 - RNA, 12 nt, Human
ccagccuggccc

SEQ ID NO: 1350641 - RNA, 13 nt, Human
ccagccuggccca

SEQ ID NO: 1350642 - RNA, 12 nt, Human
ccagccuggccu

SEQ ID NO: 1350643 - RNA, 13 nt, Human
ccagccuggccuc

SEQ ID NO: 1350644 - RNA, 14 nt, Human
ccagccuggccucc

SEQ ID NO: 1350645 - RNA, 15 nt, Human
ccagccuggccuccu

SEQ ID NO: 1350646 - RNA, 16 nt, Human
ccagccuggccuccug

SEQ ID NO: 1350647 - RNA, 17 nt, Human
ccagccuggccuccugc

SEQ ID NO: 1350648 - RNA, 18 nt, Human
ccagccuggccuccugcc

SEQ ID NO: 1350649 - RNA, 19 nt, Human
ccagccuggccuccugccu

SEQ ID NO: 1350650 - RNA, 20 nt, Human
ccagccuggccuccugccuc

SEQ ID NO: 1350651 - RNA, 15 nt, Human
ccagcucugaaacca

SEQ ID NO: 1350652 - RNA, 20 nt, Human
ccagcucugaaaccaguguu

SEQ ID NO: 1350653 - RNA, 21 nt, Human
ccagcucugaaaccaguguua

SEQ ID NO: 1350654 - RNA, 14 nt, Human
ccagcucuggaggg

SEQ ID NO: 1350655 - RNA, 14 nt, Human
ccagcucuguauca

SEQ ID NO: 1350656 - RNA, 18 nt, Human
ccagcucuguaucaggac

SEQ ID NO: 1350657 - RNA, 21 nt, Human
ccagcucuguaucaggaccca

SEQ ID NO: 1350658 - RNA, 12 nt, Human
ccagcucuguuc

SEQ ID NO: 1350659 - RNA, 13 nt, Human
ccagcucuguucu

SEQ ID NO: 1350660 - RNA, 14 nt, Human
ccagcucuguucuu

SEQ ID NO: 1350661 - RNA, 16 nt, Human
ccagcucuguucuucc

SEQ ID NO: 1350662 - RNA, 17 nt, Human
ccagcucuguucuuccu

SEQ ID NO: 1350663 - RNA, 20 nt, Human
ccagcucuguucuuccucag

SEQ ID NO: 1350664 - RNA, 21 nt, Human
ccagcucuguucuuccucagc

SEQ ID NO: 1350665 - RNA, 22 nt, Human
ccagcucuguucuuccucagcc

SEQ ID NO: 1350666 - RNA, 23 nt, Human
ccagcucuguucuuccucagcca

SEQ ID NO: 1350667 - RNA, 14 nt, Human
ccagcugacuaaac

SEQ ID NO: 1350668 - RNA, 17 nt, Human
ccagcugacuaaacuuu

SEQ ID NO: 1350669 - RNA, 23 nt, Human
ccagcugacuaaacuuuuuuucu

SEQ ID NO: 1350670 - RNA, 15 nt, Human
ccagcugagcgccag

SEQ ID NO: 1350671 - RNA, 17 nt, Human
ccagcugagcgccagga

SEQ ID NO: 1350672 - RNA, 20 nt, Human
ccagcugagcgccaggaugg

SEQ ID NO: 1350673 - RNA, 23 nt, Human
ccagccucgcccauccccuugag

SEQ ID NO: 1350674 - RNA, 15 nt, Human
ccagccucuggcauu

SEQ ID NO: 1350675 - RNA, 14 nt, Human
ccagcugugcuuau

SEQ ID NO: 1350676 - RNA, 15 nt, Human
ccagcugugcuuaug

SEQ ID NO: 1350677 - RNA, 21 nt, Human
ccagcugugcuuaugguacca

SEQ ID NO: 1350678 - RNA, 13 nt, Human
ccagcugugguuu

SEQ ID NO: 1350679 - RNA, 14 nt, Human
ccagcugugguuuu

SEQ ID NO: 1350680 - RNA, 15 nt, Human
ccagcugugguuuuc

SEQ ID NO: 1350681 - RNA, 23 nt, Human
ccagcugugguuuucuuuugcca

SEQ ID NO: 1350682 - RNA, 13 nt, Human
ccagcugugucca

SEQ ID NO: 1350683 - RNA, 14 nt, Human
ccagcuguguccaa

SEQ ID NO: 1350684 - RNA, 16 nt, Human
ccaggaccacaggcuc

SEQ ID NO: 1350685 - RNA, 17 nt, Human
ccaggaccacaggcuca

SEQ ID NO: 1350686 - RNA, 18 nt, Human
ccaggaccacaggcucag

SEQ ID NO: 1350687 - RNA, 19 nt, Human
ccaggaccacaggcucagg

SEQ ID NO: 1350688 - RNA, 13 nt, Human
ccaggaccagcuc

SEQ ID NO: 1350689 - RNA, 14 nt, Human
ccaggaccagcuca

SEQ ID NO: 1350690 - RNA, 15 nt, Human
ccaggaccagcucag

SEQ ID NO: 1350691 - RNA, 16 nt, Human
ccaggaccagcucagg

SEQ ID NO: 1350692 - RNA, 17 nt, Human
ccaggaccagcucagga

SEQ ID NO: 1350693 - RNA, 20 nt, Human
ccaggaccagcucaggacag

SEQ ID NO: 1350694 - RNA, 21 nt, Human
ccaggaccacaggcucaggca

SEQ ID NO: 1350695 - RNA, 23 nt, Human
ccaggaccagucaaccugggcaa

SEQ ID NO: 1350696 - RNA, 14 nt, Human
ccaggacccugaag

SEQ ID NO: 1350697 - RNA, 16 nt, Human
ccaggacccugaaggg

SEQ ID NO: 1350698 - RNA, 18 nt, Human
ccaggacccugaaggggc

SEQ ID NO: 1350699 - RNA, 19 nt, Human
ccaggacccugaaggggcc

SEQ ID NO: 1350700 - RNA, 23 nt, Human
ccaggacccugaaggggccauga

SEQ ID NO: 1350701 - RNA, 11 nt, Human
ccaggacccca

SEQ ID NO: 1350702 - RNA, 18 nt, Human
ccaggacccuggacccag

SEQ ID NO: 1350703 - RNA, 19 nt, Human
ccaggacccuggacccagc

SEQ ID NO: 1350704 - RNA, 15 nt, Human
ccaggaccuggcugc

SEQ ID NO: 1350705 - RNA, 17 nt, Human
ccaggaccuggcugcca

SEQ ID NO: 1350706 - RNA, 18 nt, Human
ccaggaccuggcugccau

SEQ ID NO: 1350707 - RNA, 15 nt, Human
ccaggagaagaaaga

SEQ ID NO: 1350708 - RNA, 20 nt, Human
ccaggagaagaaagagguga

SEQ ID NO: 1350709 - RNA, 11 nt, Human
ccaggagaagc

SEQ ID NO: 1350710 - RNA, 14 nt, Human
ccaggagaagcuca

SEQ ID NO: 1350711 - RNA, 13 nt, Human
ccaggagaagcuc

SEQ ID NO: 1350712 - RNA, 15 nt, Human
ccaggacucugcagc

SEQ ID NO: 1350713 - RNA, 16 nt, Human
ccaggacucugcagcc

SEQ ID NO: 1350714 - RNA, 17 nt, Human
ccaggacucugcagccu

SEQ ID NO: 1350715 - RNA, 18 nt, Human
ccaggacucugcagccuc

SEQ ID NO: 1350716 - RNA, 19 nt, Human
ccaggacucugcagccuca

SEQ ID NO: 1350717 - RNA, 20 nt, Human
ccaggacucugcagccucag

SEQ ID NO: 1350718 - RNA, 21 nt, Human
ccaggacucugcagccucaga

SEQ ID NO: 1350719 - RNA, 22 nt, Human
ccaggacucugcagccucagag

SEQ ID NO: 1350720 - RNA, 14 nt, Human
ccaggacuguuuca

SEQ ID NO: 1350721 - RNA, 16 nt, Human
ccaggacuguuucaaa

SEQ ID NO: 1350722 - RNA, 21 nt, Human
ccaggacuuauuuaaacucug

SEQ ID NO: 1350723 - RNA, 16 nt, Human
ccaggagcacggcucu

SEQ ID NO: 1350724 - RNA, 17 nt, Human
ccaggagcacggcucug

SEQ ID NO: 1350725 - RNA, 18 nt, Human
ccaggagcacggcucugu

SEQ ID NO: 1350726 - RNA, 19 nt, Human
ccaggagcacggcucuguc

SEQ ID NO: 1350727 - RNA, 22 nt, Human
ccaggagcacggcucugucccc

SEQ ID NO: 1350728 - RNA, 10 nt, Human
cccaggacag

SEQ ID NO: 1350729 - RNA, 14 nt, Human
cccagcucugaaac

SEQ ID NO: 1350730 - RNA, 22 nt, Human
cccagcucugaaaccaguguua

SEQ ID NO: 1350731 - RNA, 22 nt, Human
cccagccugucagauccaggag

SEQ ID NO: 1350732 - RNA, 22 nt, Human
cccagccuuuguuccccacugg

SEQ ID NO: 1350733 - RNA, 11 nt, Human
cccagccuggg

SEQ ID NO: 1350734 - RNA, 13 nt, Human
cccagccugggcc

SEQ ID NO: 1350735 - RNA, 12 nt, Human
cccagccugggc

SEQ ID NO: 1350736 - RNA, 14 nt, Human
cccagccugggccu

SEQ ID NO: 1350737 - RNA, 15 nt, Human
cccagccugggccua

SEQ ID NO: 1350738 - RNA, 16 nt, Human
cccagccugggccuau

SEQ ID NO: 1350739 - RNA, 18 nt, Human
cccagccugggccuaugg

SEQ ID NO: 1350740 - RNA, 19 nt, Human
cccagccugggccuaugga

SEQ ID NO: 1350741 - RNA, 10 nt, Human
cccagccugu

SEQ ID NO: 1350742 - RNA, 11 nt, Human
cccagccuguc

SEQ ID NO: 1350743 - RNA, 12 nt, Human
cccagccuguca

SEQ ID NO: 1350744 - RNA, 14 nt, Human
cccagccugucaga

SEQ ID NO: 1350745 - RNA, 18 nt, Human
cccagccugucagaucca

SEQ ID NO: 1350746 - RNA, 19 nt, Human
cccagccugucagauccag

SEQ ID NO: 1350747 - RNA, 11 nt, Human
cccagcucaau

SEQ ID NO: 1350748 - RNA, 12 nt, Human
cccagcucugaa

SEQ ID NO: 1350749 - RNA, 13 nt, Human
cccagcuaggaag

SEQ ID NO: 1350750 - RNA, 18 nt, Human
cccagcuaggaagagcag

SEQ ID NO: 1350751 - RNA, 22 nt, Human
cccagcuaggaagagcaggacu

SEQ ID NO: 1350752 - RNA, 23 nt, Human
cccagcuaggaagagcaggacuc

SEQ ID NO: 1350753 - RNA, 17 nt, Human
cccaggacaggauccag

SEQ ID NO: 1350754 - RNA, 16 nt, Human
cccaggaccacaggcu

SEQ ID NO: 1350755 - RNA, 17 nt, Human
cccaggaccacaggcuc

SEQ ID NO: 1350756 - RNA, 21 nt, Human
cccaggaccacaggcucaggc

SEQ ID NO: 1350757 - RNA, 22 nt, Human
cccaggaccacaggcucaggca

SEQ ID NO: 1350758 - RNA, 23 nt, Human
cccaggaccacaggcucaggcag

SEQ ID NO: 1350759 - RNA, 12 nt, Human
cccaggaccaga

SEQ ID NO: 1350760 - RNA, 15 nt, Human
cccaggaccagaagc

SEQ ID NO: 1350761 - RNA, 22 nt, Human
cccaggaccagaagcuccccca

SEQ ID NO: 1350762 - RNA, 12 nt, Human
cccaggaccagc

SEQ ID NO: 1350763 - RNA, 23 nt, Human
cccaggaccagaagcucccccag

SEQ ID NO: 1350764 - RNA, 14 nt, Human
cccaggaccagcuc

SEQ ID NO: 1350765 - RNA, 15 nt, Human
cccaggaccagcuca

SEQ ID NO: 1350766 - RNA, 16 nt, Human
cccaggaccagcucag

SEQ ID NO: 1350767 - RNA, 17 nt, Human
cccaggaccagcucagg

SEQ ID NO: 1350768 - RNA, 20 nt, Human
cccaggaccagcucaggaca

SEQ ID NO: 1350769 - RNA, 21 nt, Human
cccaggaccagcucaggacag

SEQ ID NO: 1350770 - RNA, 22 nt, Human
cccaggaccagcucaggacaga

SEQ ID NO: 1350771 - RNA, 12 nt, Human
cccaggacccca

SEQ ID NO: 1350772 - RNA, 11 nt, Human
cccaggacccu

SEQ ID NO: 1350773 - RNA, 12 nt, Human
cccaggacccug

SEQ ID NO: 1350774 - RNA, 13 nt, Human
cccaggacccuga

SEQ ID NO: 1350775 - RNA, 23 nt, Human
cccaggacccugaaggggccaug

SEQ ID NO: 1350776 - RNA, 20 nt, Human
cccaggaccccauggcagug

SEQ ID NO: 1350777 - RNA, 19 nt, Human
cccaggacccuggacccag

SEQ ID NO: 1350778 - RNA, 20 nt, Human
cccaggacccuggacccagc

SEQ ID NO: 1350779 - RNA, 23 nt, Human
cccaggacccuggacccagccag

SEQ ID NO: 1350780 - RNA, 18 nt, Human
cccaggaccuggcugcca

SEQ ID NO: 1350781 - RNA, 16 nt, Human
cccaggaccuggcugc

SEQ ID NO: 1350782 - RNA, 15 nt, Human
cccaggagacaguuc

SEQ ID NO: 1350783 - RNA, 17 nt, Human
cccaggagacaguucaa

SEQ ID NO: 1350784 - RNA, 15 nt, Human
cccagcaaagccccc

SEQ ID NO: 1350785 - RNA, 17 nt, Human
cccagcaaagcccccag

SEQ ID NO: 1350786 - RNA, 23 nt, Human
cccagcaaagcccccagagccca

SEQ ID NO: 1350787 - RNA, 16 nt, Human
cccagccccacuccuc

SEQ ID NO: 1350788 - RNA, 16 nt, Human
cccagaggcuggguga

SEQ ID NO: 1350789 - RNA, 16 nt, Human
cccagaggauugcugc

SEQ ID NO: 1350790 - RNA, 21 nt, Human
cccagaggaaggggccagagg

SEQ ID NO: 1350791 - RNA, 22 nt, Human
cccagaggaaggggccagaggc

SEQ ID NO: 1350792 - RNA, 23 nt, Human
cccagaggaaggggccagaggcu

SEQ ID NO: 1350793 - RNA, 24 nt, Human
cccagaggaaggggccagaggcuc

SEQ ID NO: 1350794 - RNA, 20 nt, Human
cccagaggacagcacagacu

SEQ ID NO: 1350795 - RNA, 20 nt, Human
cccagaggagccaccaguuc

SEQ ID NO: 1350796 - RNA, 13 nt, Human
cccagagccacag

SEQ ID NO: 1350797 - RNA, 14 nt, Human
cccagagccacagu

SEQ ID NO: 1350798 - RNA, 12 nt, Human
cccagagcccag

SEQ ID NO: 1350799 - RNA, 13 nt, Human
cccagagcccagc

SEQ ID NO: 1350800 - RNA, 15 nt, Human
cccagagcccagcuc

SEQ ID NO: 1350801 - RNA, 16 nt, Human
cccagagcccagcucc

SEQ ID NO: 1350802 - RNA, 17 nt, Human
cccagagcccagcucca

SEQ ID NO: 1350803 - RNA, 14 nt, Human
cccagagcccaggc

SEQ ID NO: 1350804 - RNA, 15 nt, Human
cccagagcccaggcu

SEQ ID NO: 1350805 - RNA, 19 nt, Human
cccagagcccaggcucggc

SEQ ID NO: 1350806 - RNA, 16 nt, Human
cccagagcccaggcuc

SEQ ID NO: 1350807 - RNA, 12 nt, Human
cccagccccagc

SEQ ID NO: 1350808 - RNA, 22 nt, Human
cccagccccacuccucugcuga

SEQ ID NO: 1350809 - RNA, 15 nt, Human
cccagccccagccag

SEQ ID NO: 1350810 - RNA, 17 nt, Human
cccagccccagccaggg

SEQ ID NO: 1350811 - RNA, 18 nt, Human
cccagcccccuaagagag

SEQ ID NO: 1350812 - RNA, 21 nt, Human
cccagcccccuaagagagcac

SEQ ID NO: 1350813 - RNA, 23 nt, Human
cccagcccuccuuaucaaaggac

SEQ ID NO: 1350814 - RNA, 15 nt, Human
cccagcccucauccc

SEQ ID NO: 1350815 - RNA, 16 nt, Human
cccagcccucaucccg

SEQ ID NO: 1350816 - RNA, 14 nt, Human
cccagcccucaucc

SEQ ID NO: 1350817 - RNA, 19 nt, Human
cccagcccucaucccgagc

SEQ ID NO: 1350818 - RNA, 18 nt, Human
cccagccuccaagcucca

SEQ ID NO: 1350819 - RNA, 20 nt, Human
cccagccuccaagcuccauc

SEQ ID NO: 1350820 - RNA, 16 nt, Human
cccagccucccugaag

SEQ ID NO: 1350821 - RNA, 17 nt, Human
cccagccucccugaagc

SEQ ID NO: 1350822 - RNA, 18 nt, Human
cccagccucccugaagcc

SEQ ID NO: 1350823 - RNA, 15 nt, Human
cccagccucuggcau

SEQ ID NO: 1350824 - RNA, 20 nt, Human
ccauucauuccauucuggaa

SEQ ID NO: 1350825 - RNA, 20 nt, Human
ccauguuggccaggaugguc

SEQ ID NO: 1350826 - RNA, 17 nt, Human
ccaugugguggcacagg

SEQ ID NO: 1350827 - RNA, 18 nt, Human
ccaugugguggcacaggc

SEQ ID NO: 1350828 - RNA, 16 nt, Human
ccauucccccagugcg

SEQ ID NO: 1350829 - RNA, 15 nt, Human
ccauucccccagugc

SEQ ID NO: 1350830 - RNA, 13 nt, Human
ccauuccugaaga

SEQ ID NO: 1350831 - RNA, 16 nt, Human
ccauuccugaagaacc

SEQ ID NO: 1350832 - RNA, 16 nt, Human
ccauguuggccaggcu

SEQ ID NO: 1350833 - RNA, 22 nt, Human
ccauuccugggaaauauucccu

SEQ ID NO: 1350834 - RNA, 15 nt, Human
cccacgagggcuggc

SEQ ID NO: 1350835 - RNA, 13 nt, Human
cccacgccacagc

SEQ ID NO: 1350836 - RNA, 14 nt, Human
cccacgccacagcc

SEQ ID NO: 1350837 - RNA, 15 nt, Human
cccacgccacagccc

SEQ ID NO: 1350838 - RNA, 16 nt, Human
cccacgccacagcccu

SEQ ID NO: 1350839 - RNA, 17 nt, Human
cccacgccacagcccuu

SEQ ID NO: 1350840 - RNA, 16 nt, Human
cccagacacugguuug

SEQ ID NO: 1350841 - RNA, 16 nt, Human
cccagacauaaaggaa

SEQ ID NO: 1350842 - RNA, 17 nt, Human
cccagacauaaaggaaa

SEQ ID NO: 1350843 - RNA, 19 nt, Human
cccagacauaaaggaaaag

SEQ ID NO: 1350844 - RNA, 21 nt, Human
cccagaccuguuagcagacag

SEQ ID NO: 1350845 - RNA, 22 nt, Human
cccagaccuguuagcagacagg

SEQ ID NO: 1350846 - RNA, 15 nt, Human
cccagacgccuggcu

SEQ ID NO: 1350847 - RNA, 19 nt, Human
cccagacgccuggcugcug

SEQ ID NO: 1350848 - RNA, 20 nt, Human
cccagacuagauguaguauu

SEQ ID NO: 1350849 - RNA, 23 nt, Human
cccagacuagauguaguauuuuu

SEQ ID NO: 1350850 - RNA, 12 nt, Human
cccagacucaga

SEQ ID NO: 1350851 - RNA, 13 nt, Human
cccagacucagac

SEQ ID NO: 1350852 - RNA, 16 nt, Human
cccagacucagacauu

SEQ ID NO: 1350853 - RNA, 20 nt, Human
cccagacucagacauuggca

SEQ ID NO: 1350854 - RNA, 10 nt, Human
cccagacuug

SEQ ID NO: 1350855 - RNA, 23 nt, Human
cccagacuuguuggcguaggcua

SEQ ID NO: 1350856 - RNA, 13 nt, Human
cccagagagcccg

SEQ ID NO: 1350857 - RNA, 15 nt, Human
cccagagagcccgag

SEQ ID NO: 1350858 - RNA, 14 nt, Human
cccagagcaccugc

SEQ ID NO: 1350859 - RNA, 20 nt, Human
cccagagcaccugcugucug

SEQ ID NO: 1350860 - RNA, 17 nt, Human
cccagagcaccugcugu

SEQ ID NO: 1350861 - RNA, 23 nt, Human
ccauggacacuacacccagcaau

SEQ ID NO: 1350862 - RNA, 22 nt, Human
ccauggacacuacacccagcaa

SEQ ID NO: 1350863 - RNA, 21 nt, Human
ccauggacacuacacccagca

SEQ ID NO: 1350864 - RNA, 20 nt, Human
ccauggacacuacacccagc

SEQ ID NO: 1350865 - RNA, 19 nt, Human
ccauggacacuacacccag

SEQ ID NO: 1350866 - RNA, 14 nt, Human
ccauggacaggcug

SEQ ID NO: 1350867 - RNA, 15 nt, Human
ccauggacaggcugg

SEQ ID NO: 1350868 - RNA, 18 nt, Human
ccauggagaaagcugacu

SEQ ID NO: 1350869 - RNA, 19 nt, Human
ccauggagaaagcugacuu

SEQ ID NO: 1350870 - RNA, 20 nt, Human
ccauggagaaagcugacuug

SEQ ID NO: 1350871 - RNA, 23 nt, Human
ccauggagaaagcugacuuggcu

SEQ ID NO: 1350872 - RNA, 23 nt, Human
ccauggaggaaggcucuguucca

SEQ ID NO: 1350873 - RNA, 19 nt, Human
ccauggagggagggagugg

SEQ ID NO: 1350874 - RNA, 14 nt, Human
ccauggaguggcag

SEQ ID NO: 1350875 - RNA, 19 nt, Human
ccauggagauugaccugga

SEQ ID NO: 1350876 - RNA, 18 nt, Human
ccauggagauugaccugg

SEQ ID NO: 1350877 - RNA, 22 nt, Human
ccauggaguggcagcccagcca

SEQ ID NO: 1350878 - RNA, 14 nt, Human
ccauggcaggaagg

SEQ ID NO: 1350879 - RNA, 13 nt, Human
ccauggccagcag

SEQ ID NO: 1350880 - RNA, 16 nt, Human
ccauggccagcagcac

SEQ ID NO: 1350881 - RNA, 21 nt, Human
ccauggccagcagcaccugcc

SEQ ID NO: 1350882 - RNA, 20 nt, Human
ccauggccagcagcaccugc

SEQ ID NO: 1350883 - RNA, 23 nt, Human
ccauggcacucuauguucuaaga

SEQ ID NO: 1350884 - RNA, 15 nt, Human
ccauggaguggcagc

SEQ ID NO: 1350885 - RNA, 19 nt, Human
ccauggaguggcagcccag

SEQ ID NO: 1350886 - RNA, 20 nt, Human
ccauggaguggcagcccagc

SEQ ID NO: 1350887 - RNA, 21 nt, Human
ccauggaguggcagcccagcc

SEQ ID NO: 1350888 - RNA, 23 nt, Human
ccauggaguggcagcccagccag

SEQ ID NO: 1350889 - RNA, 13 nt, Human
ccaugugcccagu

SEQ ID NO: 1350890 - RNA, 14 nt, Human
ccaugcugccucca

SEQ ID NO: 1350891 - RNA, 14 nt, Human
ccaugcugcugggg

SEQ ID NO: 1350892 - RNA, 19 nt, Human
ccaugcugcuggggaagac

SEQ ID NO: 1350893 - RNA, 20 nt, Human
ccaugcugcuggggaagaca

SEQ ID NO: 1350894 - RNA, 21 nt, Human
ccaugcugcuggggaagacag

SEQ ID NO: 1350895 - RNA, 15 nt, Human
ccaugcugaggccug

SEQ ID NO: 1350896 - RNA, 16 nt, Human
ccaugcugaggccugg

SEQ ID NO: 1350897 - RNA, 17 nt, Human
ccaugcugaggccuggg

SEQ ID NO: 1350898 - RNA, 15 nt, Human
ccaugaaccaagacc

SEQ ID NO: 1350899 - RNA, 14 nt, Human
ccaugcgcccccuc

SEQ ID NO: 1350900 - RNA, 20 nt, Human
ccaugcgcccccuccgcccu

SEQ ID NO: 1350901 - RNA, 22 nt, Human
ccaugcgcccccuccgcccugc

SEQ ID NO: 1350902 - RNA, 15 nt, Human
cccauguucuguccc

SEQ ID NO: 1350903 - RNA, 21 nt, Human
cccauguguccugguucccgu

SEQ ID NO: 1350904 - RNA, 21 nt, Human
cccauguucugucccuugccc

SEQ ID NO: 1350905 - RNA, 13 nt, Human
cccauguuucaaa

SEQ ID NO: 1350906 - RNA, 16 nt, Human
cccaugucucgacuca

SEQ ID NO: 1350907 - RNA, 17 nt, Human
cccaugucucgacucau

SEQ ID NO: 1350908 - RNA, 17 nt, Human
cccaugucuacacagau

SEQ ID NO: 1350909 - RNA, 17 nt, Human
cccauggugcuaggaag

SEQ ID NO: 1350910 - RNA, 16 nt, Human
ccccaaagcuuuccug

SEQ ID NO: 1350911 - RNA, 18 nt, Human
ccccaaagcuuuccugcc

SEQ ID NO: 1350912 - RNA, 19 nt, Human
ccccaaagcuuuccugccc

SEQ ID NO: 1350913 - RNA, 21 nt, Human
ccccaaagcuuuccugcccca

SEQ ID NO: 1350914 - RNA, 22 nt, Human
ccccaaaggcuuugcccugcug

SEQ ID NO: 1350915 - RNA, 20 nt, Human
ccccaacccguggaggcugc

SEQ ID NO: 1350916 - RNA, 23 nt, Human
ccccaacccguggaggcugcucg

SEQ ID NO: 1350917 - RNA, 13 nt, Human
ccccaaccugcuc

SEQ ID NO: 1350918 - RNA, 14 nt, Human
ccccaaccugcucu

SEQ ID NO: 1350919 - RNA, 15 nt, Human
ccccaaccugcucuc

SEQ ID NO: 1350920 - RNA, 16 nt, Human
ccccaaccugcucucc

SEQ ID NO: 1350921 - RNA, 19 nt, Human
ccccaaccugcucuccucu

SEQ ID NO: 1350922 - RNA, 21 nt, Human
ccccaaccugcucuccucuuc

SEQ ID NO: 1350923 - RNA, 20 nt, Human
ccccaaccugcucuccucuu

SEQ ID NO: 1350924 - RNA, 20 nt, Human
ccccaacuacccccagcugu

SEQ ID NO: 1350925 - RNA, 19 nt, Human
cccaucgucucggccuuca

SEQ ID NO: 1350926 - RNA, 22 nt, Human
cccaucgucucggccuucacaa

SEQ ID NO: 1350927 - RNA, 20 nt, Human
cccaucguugcccccauuuc

SEQ ID NO: 1350928 - RNA, 22 nt, Human
cccaucguugcccccauuucug

SEQ ID NO: 1350929 - RNA, 11 nt, Human
cccaucucagg

SEQ ID NO: 1350930 - RNA, 16 nt, Human
cccaucucaggccaga

SEQ ID NO: 1350931 - RNA, 23 nt, Human
cccaucucaggccagagccaagg

SEQ ID NO: 1350932 - RNA, 20 nt, Human
cccaucucaugccccuggcu

SEQ ID NO: 1350933 - RNA, 14 nt, Human
cccaucucaugccc

SEQ ID NO: 1350934 - RNA, 12 nt, Human
cccaucuugcuu

SEQ ID NO: 1350935 - RNA, 19 nt, Human
cccauggggagggauucug

SEQ ID NO: 1350936 - RNA, 17 nt, Human
cccagguaggccaaggu

SEQ ID NO: 1350937 - RNA, 20 nt, Human
cccagguaggccaagguguc

SEQ ID NO: 1350938 - RNA, 17 nt, Human
cccagguaggggccccu

SEQ ID NO: 1350939 - RNA, 20 nt, Human
cccagguaggggccccucuc

SEQ ID NO: 1350940 - RNA, 21 nt, Human
cccagguaggggccccucuca

SEQ ID NO: 1350941 - RNA, 23 nt, Human
cccagguaggggccccucucagc

SEQ ID NO: 1350942 - RNA, 14 nt, Human
cccagguccagcuc

SEQ ID NO: 1350943 - RNA, 22 nt, Human
cccagguaggggccccucucag

SEQ ID NO: 1350944 - RNA, 15 nt, Human
cccaguaacucaucu

SEQ ID NO: 1350945 - RNA, 22 nt, Human
cccaguacacaggggcuugacu

SEQ ID NO: 1350946 - RNA, 21 nt, Human
cccaguaccuagcuggcucug

SEQ ID NO: 1350947 - RNA, 16 nt, Human
cccaguagaccuuguu

SEQ ID NO: 1350948 - RNA, 19 nt, Human
cccagggugggaagggcua

SEQ ID NO: 1350949 - RNA, 19 nt, Human
cccagugcccccacugacc

SEQ ID NO: 1350950 - RNA, 20 nt, Human
cccagugcccccacugacca

SEQ ID NO: 1350951 - RNA, 22 nt, Human
cccagugcccccacugaccaga

SEQ ID NO: 1350952 - RNA, 14 nt, Human
cccagugcccucuc

SEQ ID NO: 1350953 - RNA, 14 nt, Human
cccagugcccccac

SEQ ID NO: 1350954 - RNA, 18 nt, Human
cccagugcccucuccccu

SEQ ID NO: 1350955 - RNA, 14 nt, Human
cccaguuaaucuug

SEQ ID NO: 1350956 - RNA, 14 nt, Human
cccaguucacccug

SEQ ID NO: 1350957 - RNA, 12 nt, Human
cccaguguggcu

SEQ ID NO: 1350958 - RNA, 21 nt, Human
ccuccaggguggcagcaacaa

SEQ ID NO: 1350959 - RNA, 20 nt, Human
ccuccaggguggcagcaaca

SEQ ID NO: 1350960 - RNA, 17 nt, Human
ccuccagggugugugcu

SEQ ID NO: 1350961 - RNA, 17 nt, Human
ccuccauccuacccccu

SEQ ID NO: 1350962 - RNA, 12 nt, Human
ccuccaucccug

SEQ ID NO: 1350963 - RNA, 22 nt, Human
ccuccauccuacccccugugcc

SEQ ID NO: 1350964 - RNA, 23 nt, Human
ccuccauccuacccccugugccu

SEQ ID NO: 1350965 - RNA, 14 nt, Human
ccuccaucccuggc

SEQ ID NO: 1350966 - RNA, 16 nt, Human
ccuccaucccuggccc

SEQ ID NO: 1350967 - RNA, 17 nt, Human
ccuccaucccuggcccc

SEQ ID NO: 1350968 - RNA, 13 nt, Human
ccuccauccugag

SEQ ID NO: 1350969 - RNA, 12 nt, Human
ccuccauccuga

SEQ ID NO: 1350970 - RNA, 14 nt, Human
ccuccauccugagg

SEQ ID NO: 1350971 - RNA, 19 nt, Human
ccuccaugcugccuccaga

SEQ ID NO: 1350972 - RNA, 11 nt, Human
ccuccauggga

SEQ ID NO: 1350973 - RNA, 18 nt, Human
ccuccaugggccccaggg

SEQ ID NO: 1350974 - RNA, 15 nt, Human
ccuccacucuuucuu

SEQ ID NO: 1350975 - RNA, 20 nt, Human
ccuccacucuuucuuucaau

SEQ ID NO: 1350976 - RNA, 21 nt, Human
ccuccagcucccugugccccc

SEQ ID NO: 1350977 - RNA, 18 nt, Human
ccuccagcucccugugcc

SEQ ID NO: 1350978 - RNA, 12 nt, Human
ccuccagcuguu

SEQ ID NO: 1350979 - RNA, 11 nt, Human
ccuccagcugu

SEQ ID NO: 1350980 - RNA, 13 nt, Human
ccuccagcuuucc

SEQ ID NO: 1350981 - RNA, 14 nt, Human
ccuccagcuuuccu

SEQ ID NO: 1350982 - RNA, 17 nt, Human
ccuccagcuuuccugua

SEQ ID NO: 1350983 - RNA, 15 nt, Human
ccuccaggaagccuu

SEQ ID NO: 1350984 - RNA, 13 nt, Human
ccuccaggaagcc

SEQ ID NO: 1350985 - RNA, 19 nt, Human
ccucaguuuuaucauuuuc

SEQ ID NO: 1350986 - RNA, 12 nt, Human
ccuccccugcca

SEQ ID NO: 1350987 - RNA, 13 nt, Human
ccuccccugccac

SEQ ID NO: 1350988 - RNA, 14 nt, Human
ccuccccugccacc

SEQ ID NO: 1350989 - RNA, 17 nt, Human
ccuccccugccaccagg

SEQ ID NO: 1350990 - RNA, 13 nt, Human
ccuccccugccag

SEQ ID NO: 1350991 - RNA, 16 nt, Human
ccuccccugccagggc

SEQ ID NO: 1350992 - RNA, 18 nt, Human
ccuccccugccagggcag

SEQ ID NO: 1350993 - RNA, 15 nt, Human
ccuccccuccuccug

SEQ ID NO: 1350994 - RNA, 12 nt, Human
ccuccccuccag

SEQ ID NO: 1350995 - RNA, 13 nt, Human
ccuccccuccagc

SEQ ID NO: 1350996 - RNA, 14 nt, Human
ccuccccuccaucc

SEQ ID NO: 1350997 - RNA, 20 nt, Human
ccuccccuccaucccuggcc

SEQ ID NO: 1350998 - RNA, 16 nt, Human
ccuccccuccaucccu

SEQ ID NO: 1350999 - RNA, 12 nt, Human
ccuccaugggcc

SEQ ID NO: 1351000 - RNA, 15 nt, Human
ccucccccuccucuc

SEQ ID NO: 1351001 - RNA, 12 nt, Human
ccucccccugag

SEQ ID NO: 1351002 - RNA, 15 nt, Human
ccucccccccaugca

SEQ ID NO: 1351003 - RNA, 16 nt, Human
ccucccccccaugcac

SEQ ID NO: 1351004 - RNA, 17 nt, Human
ccucccccccaugcacu

SEQ ID NO: 1351005 - RNA, 19 nt, Human
ccucccccccaugcacugu

SEQ ID NO: 1351006 - RNA, 13 nt, Human
ccucccccugcca

SEQ ID NO: 1351007 - RNA, 14 nt, Human
ccucccccugccag

SEQ ID NO: 1351008 - RNA, 16 nt, Human
ccucccccugccagga

SEQ ID NO: 1351009 - RNA, 14 nt, Human
ccucccccuguccc

SEQ ID NO: 1351010 - RNA, 15 nt, Human
ccuccccgcaccccc

SEQ ID NO: 1351011 - RNA, 21 nt, Human
ccuccccgcaccccccaagcu

SEQ ID NO: 1351012 - RNA, 14 nt, Human
ccucccgagcuccu

SEQ ID NO: 1351013 - RNA, 19 nt, Human
ccucccgagcuccucuucc

SEQ ID NO: 1351014 - RNA, 20 nt, Human
ccucccgagcuccucuucca

SEQ ID NO: 1351015 - RNA, 22 nt, Human
ccucccucucguaagauuuccu

SEQ ID NO: 1351016 - RNA, 14 nt, Human
ccucccucugcugu

SEQ ID NO: 1351017 - RNA, 21 nt, Human
ccucccucugcugucaccuug

SEQ ID NO: 1351018 - RNA, 22 nt, Human
ccucguggacaccugcccugcc

SEQ ID NO: 1351019 - RNA, 21 nt, Human
ccucguggacaccugcccugc

SEQ ID NO: 1351020 - RNA, 20 nt, Human
ccucguggacaccugcccug

SEQ ID NO: 1351021 - RNA, 18 nt, Human
ccucguggacaccugccc

SEQ ID NO: 1351022 - RNA, 17 nt, Human
ccucguggacaccugcc

SEQ ID NO: 1351023 - RNA, 16 nt, Human
ccucguggacaccugc

SEQ ID NO: 1351024 - RNA, 15 nt, Human
ccucguggacaccug

SEQ ID NO: 1351025 - RNA, 17 nt, Human
ccucuaacuuggcucac

SEQ ID NO: 1351026 - RNA, 21 nt, Human
ccucuaacuuggcucacacuc

SEQ ID NO: 1351027 - RNA, 19 nt, Human
ccucuaagguugggcaggg

SEQ ID NO: 1351028 - RNA, 18 nt, Human
ccucuacagagcuucccu

SEQ ID NO: 1351029 - RNA, 14 nt, Human
ccuccuucugcugc

SEQ ID NO: 1351030 - RNA, 16 nt, Human
ccuccuuggugauucc

SEQ ID NO: 1351031 - RNA, 19 nt, Human
ccuccuuucaucacacugg

SEQ ID NO: 1351032 - RNA, 12 nt, Human
ccuccuccaggg

SEQ ID NO: 1351033 - RNA, 13 nt, Human
ccuccuccaggga

SEQ ID NO: 1351034 - RNA, 14 nt, Human
ccuccuccagggac

SEQ ID NO: 1351035 - RNA, 15 nt, Human
ccuccuccagggaca

SEQ ID NO: 1351036 - RNA, 16 nt, Human
ccuccuccagggacag

SEQ ID NO: 1351037 - RNA, 16 nt, Human
ccuccucccacccggc

SEQ ID NO: 1351038 - RNA, 19 nt, Human
ccuccucccacccggcugc

SEQ ID NO: 1351039 - RNA, 23 nt, Human
ccuccucccacccggcugcagag

SEQ ID NO: 1351040 - RNA, 18 nt, Human
ccuccuccagggacagca

SEQ ID NO: 1351041 - RNA, 19 nt, Human
ccuccucuaagguugggca

SEQ ID NO: 1351042 - RNA, 13 nt, Human
ccuccucucugcc

SEQ ID NO: 1351043 - RNA, 15 nt, Human
ccuccucucugcccu

SEQ ID NO: 1351044 - RNA, 15 nt, Human
ccuccucuccaccau

SEQ ID NO: 1351045 - RNA, 14 nt, Human
ccuccucuccacca

SEQ ID NO: 1351046 - RNA, 16 nt, Human
ccuccucucugcccua

SEQ ID NO: 1351047 - RNA, 17 nt, Human
ccuccuucugagcuccu

SEQ ID NO: 1351048 - RNA, 19 nt, Human
ccuccuucugagcuccugu

SEQ ID NO: 1351049 - RNA, 20 nt, Human
ccuccuucugagcuccuguc

SEQ ID NO: 1351050 - RNA, 21 nt, Human
ccuccuucugagcuccugucc

SEQ ID NO: 1351051 - RNA, 22 nt, Human
ccuccuucugagcuccuguccc

SEQ ID NO: 1351052 - RNA, 18 nt, Human
ccuccuucuucagggacu

SEQ ID NO: 1351053 - RNA, 12 nt, Human
ccucuccccagc

SEQ ID NO: 1351054 - RNA, 14 nt, Human
ccucuccccagccc

SEQ ID NO: 1351055 - RNA, 16 nt, Human
ccucuccccagcccag

SEQ ID NO: 1351056 - RNA, 17 nt, Human
ccucuccccagcccaga

SEQ ID NO: 1351057 - RNA, 18 nt, Human
ccucuccccugccugccc

SEQ ID NO: 1351058 - RNA, 18 nt, Human
ccucucccuccuccagga

SEQ ID NO: 1351059 - RNA, 23 nt, Human
ccucucccuccuccaggaagccu

SEQ ID NO: 1351060 - RNA, 16 nt, Human
ccucucccugcauggc

SEQ ID NO: 1351061 - RNA, 14 nt, Human
ccucucccugcaug

SEQ ID NO: 1351062 - RNA, 20 nt, Human
ccucucccacccucuuccua

SEQ ID NO: 1351063 - RNA, 12 nt, Human
ccucucccaggc

SEQ ID NO: 1351064 - RNA, 13 nt, Human
ccucucccacccu

SEQ ID NO: 1351065 - RNA, 14 nt, Human
ccucucccacccuc

SEQ ID NO: 1351066 - RNA, 15 nt, Human
ccucucccacccucu

SEQ ID NO: 1351067 - RNA, 16 nt, Human
ccucucccacccucuu

SEQ ID NO: 1351068 - RNA, 18 nt, Human
ccucucccacccucuucc

SEQ ID NO: 1351069 - RNA, 19 nt, Human
ccucucccacccucuuccu

SEQ ID NO: 1351070 - RNA, 20 nt, Human
ccucuacagagcuucccuga

SEQ ID NO: 1351071 - RNA, 21 nt, Human
ccucuacagagcuucccugac

SEQ ID NO: 1351072 - RNA, 24 nt, Human
ccucuacagagcuucccugacuca

SEQ ID NO: 1351073 - RNA, 11 nt, Human
ccucuacaggg

SEQ ID NO: 1351074 - RNA, 15 nt, Human
ccucuaccccaauuu

SEQ ID NO: 1351075 - RNA, 14 nt, Human
ccucuacugggaag

SEQ ID NO: 1351076 - RNA, 16 nt, Human
ccucuacugggaaggc

SEQ ID NO: 1351077 - RNA, 17 nt, Human
ccucuacugggaaggcu

SEQ ID NO: 1351078 - RNA, 22 nt, Human
ccucuacugggaaggcuacuuc

SEQ ID NO: 1351079 - RNA, 11 nt, Human
ccucugagccu

SEQ ID NO: 1351080 - RNA, 12 nt, Human
ccucugagccuu

SEQ ID NO: 1351081 - RNA, 16 nt, Human
ccucugagacuccaga

SEQ ID NO: 1351082 - RNA, 12 nt, Human
ccucugaggcca

SEQ ID NO: 1351083 - RNA, 14 nt, Human
ccucugaggccagc

SEQ ID NO: 1351084 - RNA, 15 nt, Human
ccucugaggccagcc

SEQ ID NO: 1351085 - RNA, 13 nt, Human
ccucugaggcuga

SEQ ID NO: 1351086 - RNA, 16 nt, Human
ccucugaggccagccu

SEQ ID NO: 1351087 - RNA, 17 nt, Human
ccucugaggccagccug

SEQ ID NO: 1351088 - RNA, 18 nt, Human
ccucugaggccagccugg

SEQ ID NO: 1351089 - RNA, 19 nt, Human
ccucugaggccagccuggc

SEQ ID NO: 1351090 - RNA, 20 nt, Human
ccucugaggccagccuggcc

SEQ ID NO: 1351091 - RNA, 21 nt, Human
ccucugaggccagccuggccu

SEQ ID NO: 1351092 - RNA, 22 nt, Human
ccucugaggccagccuggccuc

SEQ ID NO: 1351093 - RNA, 19 nt, Human
ccucucccuugggcucuga

SEQ ID NO: 1351094 - RNA, 20 nt, Human
ccucucccuugggcucugau

SEQ ID NO: 1351095 - RNA, 22 nt, Human
ccucucccuugggcucugauga

SEQ ID NO: 1351096 - RNA, 12 nt, Human
ccucugaaauac

SEQ ID NO: 1351097 - RNA, 12 nt, Human
ccucugacagca

SEQ ID NO: 1351098 - RNA, 13 nt, Human
ccucugacagcag

SEQ ID NO: 1351099 - RNA, 14 nt, Human
ccucugacagcagc

SEQ ID NO: 1351100 - RNA, 15 nt, Human
ccucugacagcagca

SEQ ID NO: 1351101 - RNA, 18 nt, Human
ccucugacagcagcaucu

SEQ ID NO: 1351102 - RNA, 20 nt, Human
ccucugacagcagcaucucu

SEQ ID NO: 1351103 - RNA, 19 nt, Human
ccucugacagcagcaucuc

SEQ ID NO: 1351104 - RNA, 14 nt, Human
ccucugaccugcac

SEQ ID NO: 1351105 - RNA, 16 nt, Human
ccucugaccugcacug

SEQ ID NO: 1351106 - RNA, 17 nt, Human
ccucugaccugcacugg

SEQ ID NO: 1351107 - RNA, 12 nt, Human
ccucugacucag

SEQ ID NO: 1351108 - RNA, 16 nt, Human
ccucugacucagggcu

SEQ ID NO: 1351109 - RNA, 17 nt, Human
ccucugacucagggcuc

SEQ ID NO: 1351110 - RNA, 19 nt, Human
ccucugacucagggcuccu

SEQ ID NO: 1351111 - RNA, 21 nt, Human
ccucugacucagggcuccugg

SEQ ID NO: 1351112 - RNA, 22 nt, Human
ccucugacucagggcuccuggg

SEQ ID NO: 1351113 - RNA, 20 nt, Human
ccucugagaagcucugaaga

SEQ ID NO: 1351114 - RNA, 15 nt, Human
ccucugagacuccag

SEQ ID NO: 1351115 - RNA, 19 nt, Human
ccucugagacuccagaccu

SEQ ID NO: 1351116 - RNA, 18 nt, Human
ccucaccagcccuggcaa

SEQ ID NO: 1351117 - RNA, 12 nt, Human
ccucaccauucc

SEQ ID NO: 1351118 - RNA, 14 nt, Human
ccucacccuggggc

SEQ ID NO: 1351119 - RNA, 18 nt, Human
ccucaccgagugggggca

SEQ ID NO: 1351120 - RNA, 14 nt, Human
ccucacccugccuu

SEQ ID NO: 1351121 - RNA, 15 nt, Human
ccucacccugccuua

SEQ ID NO: 1351122 - RNA, 22 nt, Human
ccucacccugccuuaucuugca

SEQ ID NO: 1351123 - RNA, 13 nt, Human
ccucaccuccucu

SEQ ID NO: 1351124 - RNA, 19 nt, Human
ccucacucgucucccccaa

SEQ ID NO: 1351125 - RNA, 16 nt, Human
ccucagagccaccccu

SEQ ID NO: 1351126 - RNA, 20 nt, Human
ccucagagacaucagcccuu

SEQ ID NO: 1351127 - RNA, 14 nt, Human
ccucagagaccagg

SEQ ID NO: 1351128 - RNA, 16 nt, Human
ccucagagaccagggc

SEQ ID NO: 1351129 - RNA, 17 nt, Human
ccucagagaccagggcu

SEQ ID NO: 1351130 - RNA, 19 nt, Human
ccucagagaccagggcucc

SEQ ID NO: 1351131 - RNA, 21 nt, Human
ccucagagaccagggcuccag

SEQ ID NO: 1351132 - RNA, 20 nt, Human
ccucacuguauccagguucc

SEQ ID NO: 1351133 - RNA, 15 nt, Human
ccucagacuggggca

SEQ ID NO: 1351134 - RNA, 16 nt, Human
ccucagagacaucagc

SEQ ID NO: 1351135 - RNA, 13 nt, Human
ccucacuggcucu

SEQ ID NO: 1351136 - RNA, 16 nt, Human
ccucacuggcucuccu

SEQ ID NO: 1351137 - RNA, 17 nt, Human
ccucacuggcucuccug

SEQ ID NO: 1351138 - RNA, 18 nt, Human
ccucacuggcucuccugg

SEQ ID NO: 1351139 - RNA, 19 nt, Human
ccucacuggcucuccuggc

SEQ ID NO: 1351140 - RNA, 15 nt, Human
ccucagggacucagg

SEQ ID NO: 1351141 - RNA, 16 nt, Human
ccucagggacucaggu

SEQ ID NO: 1351142 - RNA, 14 nt, Human
ccucagauggcagc

SEQ ID NO: 1351143 - RNA, 15 nt, Human
ccucagauggcagcu

SEQ ID NO: 1351144 - RNA, 16 nt, Human
ccucagauggcagcuu

SEQ ID NO: 1351145 - RNA, 17 nt, Human
ccucagauggcagcuuu

SEQ ID NO: 1351146 - RNA, 21 nt, Human
ccucagauggcagcuuuuaaa

SEQ ID NO: 1351147 - RNA, 23 nt, Human
ccucagauggcagcuuuuaaaag

SEQ ID NO: 1351148 - RNA, 16 nt, Human
ccucagauuccuuccc

SEQ ID NO: 1351149 - RNA, 17 nt, Human
ccucagauuccuuccca

SEQ ID NO: 1351150 - RNA, 22 nt, Human
ccucagauuccuucccauggag

SEQ ID NO: 1351151 - RNA, 21 nt, Human
ccucagauuccuucccaugga

SEQ ID NO: 1351152 - RNA, 12 nt, Human
ccucagccagcc

SEQ ID NO: 1351153 - RNA, 13 nt, Human
ccucagccagccu

SEQ ID NO: 1351154 - RNA, 14 nt, Human
ccucagccagccuc

SEQ ID NO: 1351155 - RNA, 18 nt, Human
ccucagccccgcguggaa

SEQ ID NO: 1351156 - RNA, 23 nt, Human
ccuauucaacacacacaugcuuc

SEQ ID NO: 1351157 - RNA, 21 nt, Human
ccuauucaacacacacaugcu

SEQ ID NO: 1351158 - RNA, 17 nt, Human
ccuauuaucccagcugc

SEQ ID NO: 1351159 - RNA, 18 nt, Human
ccuauuaucccagcugcc

SEQ ID NO: 1351160 - RNA, 17 nt, Human
ccuauuaucugucagcu

SEQ ID NO: 1351161 - RNA, 16 nt, Human
ccuauuaaccuagaga

SEQ ID NO: 1351162 - RNA, 12 nt, Human
ccuauuauccca

SEQ ID NO: 1351163 - RNA, 16 nt, Human
ccuauuaucccagcug

SEQ ID NO: 1351164 - RNA, 20 nt, Human
ccuaucugggcuuccuggag

SEQ ID NO: 1351165 - RNA, 22 nt, Human
ccuaucugggcuuccuggagca

SEQ ID NO: 1351166 - RNA, 22 nt, Human
ccuauguuuuuguucaaagcca

SEQ ID NO: 1351167 - RNA, 16 nt, Human
ccuaucugggcuuccu

SEQ ID NO: 1351168 - RNA, 17 nt, Human
ccuaucugggcuuccug

SEQ ID NO: 1351169 - RNA, 18 nt, Human
ccuaucugggcuuccugg

SEQ ID NO: 1351170 - RNA, 19 nt, Human
ccuaucugggcuuccugga

SEQ ID NO: 1351171 - RNA, 12 nt, Human
ccuaucugggcu

SEQ ID NO: 1351172 - RNA, 15 nt, Human
ccucacacugggacu

SEQ ID NO: 1351173 - RNA, 13 nt, Human
ccucacacuggga

SEQ ID NO: 1351174 - RNA, 12 nt, Human
ccucacacuggg

SEQ ID NO: 1351175 - RNA, 16 nt, Human
ccuauugcuagagcuc

SEQ ID NO: 1351176 - RNA, 18 nt, Human
ccuauugcuagagcuccu

SEQ ID NO: 1351177 - RNA, 22 nt, Human
ccuauugcuagagcuccucccu

SEQ ID NO: 1351178 - RNA, 13 nt, Human
ccucacagugaac

SEQ ID NO: 1351179 - RNA, 20 nt, Human
ccuagacucugucuaccugg

SEQ ID NO: 1351180 - RNA, 18 nt, Human
ccuagugaaggcuucucu

SEQ ID NO: 1351181 - RNA, 19 nt, Human
ccuagugaaggcuucucuc

SEQ ID NO: 1351182 - RNA, 21 nt, Human
ccuagugaaggcuucucucug

SEQ ID NO: 1351183 - RNA, 22 nt, Human
ccuagugaaggcuucucucugu

SEQ ID NO: 1351184 - RNA, 23 nt, Human
ccuagugaaggcuucucucugug

SEQ ID NO: 1351185 - RNA, 13 nt, Human
ccuaucccaccuc

SEQ ID NO: 1351186 - RNA, 20 nt, Human
ccuaucuccagcggcccugu

SEQ ID NO: 1351187 - RNA, 16 nt, Human
ccggaucugagggaga

SEQ ID NO: 1351188 - RNA, 21 nt, Human
ccggaggggccuggcagccgu

SEQ ID NO: 1351189 - RNA, 17 nt, Human
ccggcuuuguggcacug

SEQ ID NO: 1351190 - RNA, 19 nt, Human
ccggcuuuguggcacuggg

SEQ ID NO: 1351191 - RNA, 17 nt, Human
cccuuucccaccccaac

SEQ ID NO: 1351192 - RNA, 20 nt, Human
cccuuucccaccccaaccug

SEQ ID NO: 1351193 - RNA, 23 nt, Human
cccuuucccaccccaaccugcuc

SEQ ID NO: 1351194 - RNA, 20 nt, Human
ccggacucaagccccggacu

SEQ ID NO: 1351195 - RNA, 23 nt, Human
ccggacuuagaaaaccagcucag

SEQ ID NO: 1351196 - RNA, 15 nt, Human
ccggacuuuucugca

SEQ ID NO: 1351197 - RNA, 16 nt, Human
ccggacuuuucugcaa

SEQ ID NO: 1351198 - RNA, 13 nt, Human
ccggagagccagc

SEQ ID NO: 1351199 - RNA, 14 nt, Human
ccggagagccagcu

SEQ ID NO: 1351200 - RNA, 14 nt, Human
ccggagaggaccgg

SEQ ID NO: 1351201 - RNA, 16 nt, Human
ccggagagugggggug

SEQ ID NO: 1351202 - RNA, 14 nt, Human
ccggagaguggggg

SEQ ID NO: 1351203 - RNA, 16 nt, Human
ccgggagccugaucac

SEQ ID NO: 1351204 - RNA, 23 nt, Human
ccgggagccugaucaccugcccu

SEQ ID NO: 1351205 - RNA, 13 nt, Human
ccgggagcucagg

SEQ ID NO: 1351206 - RNA, 15 nt, Human
ccgggagcucaggaa

SEQ ID NO: 1351207 - RNA, 22 nt, Human
ccgggaggcagagguugcagug

SEQ ID NO: 1351208 - RNA, 15 nt, Human
ccggggaacuggcca

SEQ ID NO: 1351209 - RNA, 15 nt, Human
ccggggccugggcag

SEQ ID NO: 1351210 - RNA, 15 nt, Human
ccggggccagcacuu

SEQ ID NO: 1351211 - RNA, 19 nt, Human
ccggggccugggcaggagg

SEQ ID NO: 1351212 - RNA, 16 nt, Human
ccggggaacuggccaa

SEQ ID NO: 1351213 - RNA, 17 nt, Human
ccggggaacuggccaag

SEQ ID NO: 1351214 - RNA, 18 nt, Human
ccggggaacuggccaagc

SEQ ID NO: 1351215 - RNA, 19 nt, Human
ccggggaacuggccaagcu

SEQ ID NO: 1351216 - RNA, 20 nt, Human
ccggggaacuggccaagcug

SEQ ID NO: 1351217 - RNA, 14 nt, Human
ccggggcagccccc

SEQ ID NO: 1351218 - RNA, 18 nt, Human
ccggucgcccuuugcugc

SEQ ID NO: 1351219 - RNA, 23 nt, Human
ccggucgcccuuugcugcauggc

SEQ ID NO: 1351220 - RNA, 22 nt, Human
ccggucgcccuuugcugcaugg

SEQ ID NO: 1351221 - RNA, 12 nt, Human
ccgguguucuaa

SEQ ID NO: 1351222 - RNA, 13 nt, Human
ccgguguucuaag

SEQ ID NO: 1351223 - RNA, 14 nt, Human
ccgguguucuaaga

SEQ ID NO: 1351224 - RNA, 11 nt, Human
ccguggaggcu

SEQ ID NO: 1351225 - RNA, 12 nt, Human
ccguggaggcug

SEQ ID NO: 1351226 - RNA, 14 nt, Human
ccguggaggcugcu

SEQ ID NO: 1351227 - RNA, 15 nt, Human
ccguggaggcugcuc

SEQ ID NO: 1351228 - RNA, 22 nt, Human
ccguggaggcugcucggggugc

SEQ ID NO: 1351229 - RNA, 19 nt, Human
ccguggauugcacguggcc

SEQ ID NO: 1351230 - RNA, 20 nt, Human
ccguggauugcacguggccu

SEQ ID NO: 1351231 - RNA, 22 nt, Human
ccguggauugcacguggccucu

SEQ ID NO: 1351232 - RNA, 23 nt, Human
ccguggauugcacguggccucuu

SEQ ID NO: 1351233 - RNA, 16 nt, Human
ccguggaggcugcucg

SEQ ID NO: 1351234 - RNA, 16 nt, Human
cccuucaucuggaacc

SEQ ID NO: 1351235 - RNA, 14 nt, Human
cccuucaucuggaa

SEQ ID NO: 1351236 - RNA, 19 nt, Human
cccuucaguacccucucag

SEQ ID NO: 1351237 - RNA, 20 nt, Human
cccuucaguacccucucagc

SEQ ID NO: 1351238 - RNA, 21 nt, Human
cccuucaguacccucucagcu

SEQ ID NO: 1351239 - RNA, 14 nt, Human
cccuguucacucua

SEQ ID NO: 1351240 - RNA, 22 nt, Human
cccuguucacucuacuuagcau

SEQ ID NO: 1351241 - RNA, 23 nt, Human
cccuguguugucucuagagcagg

SEQ ID NO: 1351242 - RNA, 17 nt, Human
cccuucaguacccucuc

SEQ ID NO: 1351243 - RNA, 23 nt, Human
cccuggugggccaacaaagaaca

SEQ ID NO: 1351244 - RNA, 13 nt, Human
cccuguucacucu

SEQ ID NO: 1351245 - RNA, 18 nt, Human
cccuguguugucucuaga

SEQ ID NO: 1351246 - RNA, 21 nt, Human
cccuguguugucucuagagca

SEQ ID NO: 1351247 - RNA, 13 nt, Human
cccuguguugucu

SEQ ID NO: 1351248 - RNA, 15 nt, Human
cccuguguugucucu

SEQ ID NO: 1351249 - RNA, 16 nt, Human
cccuguguugucucua

SEQ ID NO: 1351250 - RNA, 17 nt, Human
cccuguguugucucuag

SEQ ID NO: 1351251 - RNA, 16 nt, Human
cccuucaugcauggaa

SEQ ID NO: 1351252 - RNA, 11 nt, Human
cccuucauuug

SEQ ID NO: 1351253 - RNA, 14 nt, Human
cccuucccacagga

SEQ ID NO: 1351254 - RNA, 23 nt, Human
cccuucccacaggacauuucucu

SEQ ID NO: 1351255 - RNA, 13 nt, Human
cccuuccuaauuc

SEQ ID NO: 1351256 - RNA, 14 nt, Human
cccuuccuaauucc

SEQ ID NO: 1351257 - RNA, 19 nt, Human
cccuuccuaauuccacagc

SEQ ID NO: 1351258 - RNA, 20 nt, Human
cccuuccuaauuccacagcu

SEQ ID NO: 1351259 - RNA, 15 nt, Human
cccuuccgccacugg

SEQ ID NO: 1351260 - RNA, 16 nt, Human
cccuuccgccacuggg

SEQ ID NO: 1351261 - RNA, 15 nt, Human
cccuugacaccugcu

SEQ ID NO: 1351262 - RNA, 19 nt, Human
cccuugacaacuggcaggc

SEQ ID NO: 1351263 - RNA, 16 nt, Human
cccuuggacacgcuca

SEQ ID NO: 1351264 - RNA, 14 nt, Human
cccuuggacacgcu

SEQ ID NO: 1351265 - RNA, 21 nt, Human
cccuuccuaauuccacagcug

SEQ ID NO: 1351266 - RNA, 11 nt, Human
cccuucuuuuu

SEQ ID NO: 1351267 - RNA, 19 nt, Human
cccuucuuuuucuucuuuu

SEQ ID NO: 1351268 - RNA, 18 nt, Human
cccuuccgccacuggggc

SEQ ID NO: 1351269 - RNA, 12 nt, Human
cccuugaacucu

SEQ ID NO: 1351270 - RNA, 17 nt, Human
cccuugacaacuggcag

SEQ ID NO: 1351271 - RNA, 18 nt, Human
cccuugacaacuggcagg

SEQ ID NO: 1351272 - RNA, 21 nt, Human
cccuugacaacuggcaggcag

SEQ ID NO: 1351273 - RNA, 17 nt, Human
cccuuguagcuccuccc

SEQ ID NO: 1351274 - RNA, 18 nt, Human
cccuuguagcuccucccc

SEQ ID NO: 1351275 - RNA, 18 nt, Human
cccuuguauccccugcag

SEQ ID NO: 1351276 - RNA, 21 nt, Human
cccuuguagcuccuccccugg

SEQ ID NO: 1351277 - RNA, 23 nt, Human
cccuuguagcuccuccccuggag

SEQ ID NO: 1351278 - RNA, 21 nt, Human
cccuugugaaucaagggucag

SEQ ID NO: 1351279 - RNA, 20 nt, Human
cccuuguuuggggcaggagu

SEQ ID NO: 1351280 - RNA, 18 nt, Human
cccuuuagaucucugaag

SEQ ID NO: 1351281 - RNA, 15 nt, Human
cccuuucacaggcag

SEQ ID NO: 1351282 - RNA, 20 nt, Human
cccuuucacaggcagccagu

SEQ ID NO: 1351283 - RNA, 12 nt, Human
cccuuucccacc

SEQ ID NO: 1351284 - RNA, 14 nt, Human
cccuuucccacccc

SEQ ID NO: 1351285 - RNA, 14 nt, Human
ccuaaauggccuca

SEQ ID NO: 1351286 - RNA, 18 nt, Human
ccuaaauggccucaugug

SEQ ID NO: 1351287 - RNA, 13 nt, Human
ccuaaauuuaaaa

SEQ ID NO: 1351288 - RNA, 15 nt, Human
ccuaaauuauuuacu

SEQ ID NO: 1351289 - RNA, 20 nt, Human
ccuaaauuuuccuguccucu

SEQ ID NO: 1351290 - RNA, 22 nt, Human
ccuaaauuuuccuguccucuuu

SEQ ID NO: 1351291 - RNA, 21 nt, Human
ccuaacaacauuguagccuca

SEQ ID NO: 1351292 - RNA, 22 nt, Human
ccuaacaacauuguagccucaa

SEQ ID NO: 1351293 - RNA, 20 nt, Human
ccuacagaacuucagaaaga

SEQ ID NO: 1351294 - RNA, 21 nt, Human
ccuacagaaaaaccuuggguu

SEQ ID NO: 1351295 - RNA, 18 nt, Human
ccguuagcuccuguggcc

SEQ ID NO: 1351296 - RNA, 13 nt, Human
ccuaaacauauga

SEQ ID NO: 1351297 - RNA, 13 nt, Human
ccguuagcuccug

SEQ ID NO: 1351298 - RNA, 14 nt, Human
ccguuagcuccugu

SEQ ID NO: 1351299 - RNA, 15 nt, Human
ccguuagcuccugug

SEQ ID NO: 1351300 - RNA, 17 nt, Human
ccguuagcuccuguggc

SEQ ID NO: 1351301 - RNA, 18 nt, Human
ccguguuggucuguacug

SEQ ID NO: 1351302 - RNA, 19 nt, Human
ccguguuggucuguacuga

SEQ ID NO: 1351303 - RNA, 21 nt, Human
ccgugugguaagcaacauggc

SEQ ID NO: 1351304 - RNA, 23 nt, Human
ccgugugguaagcaacauggcuu

SEQ ID NO: 1351305 - RNA, 22 nt, Human
ccgugugguaagcaacauggcu

SEQ ID NO: 1351306 - RNA, 22 nt, Human
ccuagguauaauucacauugua

SEQ ID NO: 1351307 - RNA, 13 nt, Human
ccuagaccagcag

SEQ ID NO: 1351308 - RNA, 23 nt, Human
ccuagaccagcagacagagccag

SEQ ID NO: 1351309 - RNA, 19 nt, Human
ccuagacuggugcuaaugu

SEQ ID NO: 1351310 - RNA, 19 nt, Human
ccuagacuguaaaccucuc

SEQ ID NO: 1351311 - RNA, 17 nt, Human
ccuagaaacaacacugu

SEQ ID NO: 1351312 - RNA, 18 nt, Human
ccuagaaacaacacugua

SEQ ID NO: 1351313 - RNA, 19 nt, Human
ccuagaaacaacacuguag

SEQ ID NO: 1351314 - RNA, 20 nt, Human
ccuagaaacaacacuguagu

SEQ ID NO: 1351315 - RNA, 13 nt, Human
ccuacuuccccuu

SEQ ID NO: 1351316 - RNA, 13 nt, Human
ccuacuguucuaa

SEQ ID NO: 1351317 - RNA, 15 nt, Human
ccuacuguucuaaag

SEQ ID NO: 1351318 - RNA, 16 nt, Human
ccuacuguucuaaagc

SEQ ID NO: 1351319 - RNA, 19 nt, Human
ccuacuguucuaaagcucu

SEQ ID NO: 1351320 - RNA, 16 nt, Human
ccuacuuccccuuccu

SEQ ID NO: 1351321 - RNA, 21 nt, Human
ccuacuuccccuuccuaauuc

SEQ ID NO: 1351322 - RNA, 22 nt, Human
ccuacuguucuaaagcucugac

SEQ ID NO: 1351323 - RNA, 23 nt, Human
ccuacuguucuaaagcucugaca

SEQ ID NO: 1351324 - RNA, 15 nt, Human
ccuacaguuuuaacu

SEQ ID NO: 1351325 - RNA, 17 nt, Human
ccuacaguuuuaacugu

SEQ ID NO: 1351326 - RNA, 19 nt, Human
ccuacaguuuuaacugugg

SEQ ID NO: 1351327 - RNA, 20 nt, Human
ccuacaguuuuaacugugga

SEQ ID NO: 1351328 - RNA, 21 nt, Human
ccuacaguuuuaacuguggau

SEQ ID NO: 1351329 - RNA, 22 nt, Human
ccuacaguuuuaacuguggaua

SEQ ID NO: 1351330 - RNA, 19 nt, Human
ccuacaugaaacagaaaca

SEQ ID NO: 1351331 - RNA, 20 nt, Human
ccuacugcccaggcacugca

SEQ ID NO: 1351332 - RNA, 16 nt, Human
ccuacugcccaggcac

SEQ ID NO: 1351333 - RNA, 16 nt, Human
ccuacuggucucucua

SEQ ID NO: 1351334 - RNA, 18 nt, Human
cccugccucucugcaggu

SEQ ID NO: 1351335 - RNA, 11 nt, Human
cccugccucuc

SEQ ID NO: 1351336 - RNA, 20 nt, Human
cccugcccacccucuggaga

SEQ ID NO: 1351337 - RNA, 14 nt, Human
cccugccagggcag

SEQ ID NO: 1351338 - RNA, 12 nt, Human
cccugccagggc

SEQ ID NO: 1351339 - RNA, 18 nt, Human
cccugccaccuccugccu

SEQ ID NO: 1351340 - RNA, 22 nt, Human
cccugccaggagcuuuggaccu

SEQ ID NO: 1351341 - RNA, 17 nt, Human
cccugccaccuccugcc

SEQ ID NO: 1351342 - RNA, 14 nt, Human
cccugccaccuccu

SEQ ID NO: 1351343 - RNA, 15 nt, Human
cccugccaccaggcc

SEQ ID NO: 1351344 - RNA, 21 nt, Human
cccugcauuggaacuggaggc

SEQ ID NO: 1351345 - RNA, 22 nt, Human
cccugcauuggaacuggaggca

SEQ ID NO: 1351346 - RNA, 23 nt, Human
cccugcauuggaacuggaggcag

SEQ ID NO: 1351347 - RNA, 14 nt, Human
cccugccaccaggc

SEQ ID NO: 1351348 - RNA, 18 nt, Human
cccugcaaaaggacucuc

SEQ ID NO: 1351349 - RNA, 20 nt, Human
cccugcaaaaggacucucag

SEQ ID NO: 1351350 - RNA, 23 nt, Human
cccugcagaaccggagagccagc

SEQ ID NO: 1351351 - RNA, 13 nt, Human
cccugcagacccu

SEQ ID NO: 1351352 - RNA, 14 nt, Human
cccugcagacccug

SEQ ID NO: 1351353 - RNA, 15 nt, Human
cccugcagacccugc

SEQ ID NO: 1351354 - RNA, 16 nt, Human
cccugcagacccugcc

SEQ ID NO: 1351355 - RNA, 17 nt, Human
cccugcagacccugccc

SEQ ID NO: 1351356 - RNA, 19 nt, Human
cccugcagacccugcccuu

SEQ ID NO: 1351357 - RNA, 13 nt, Human
cccuccgcccugc

SEQ ID NO: 1351358 - RNA, 18 nt, Human
cccucuacagagcuuccc

SEQ ID NO: 1351359 - RNA, 21 nt, Human
cccucuacagagcuucccuga

SEQ ID NO: 1351360 - RNA, 23 nt, Human
cccucuaguuuuuucuuccuuuu

SEQ ID NO: 1351361 - RNA, 13 nt, Human
cccucucaccaaa

SEQ ID NO: 1351362 - RNA, 17 nt, Human
cccucucaacacccagu

SEQ ID NO: 1351363 - RNA, 12 nt, Human
cccucucagccc

SEQ ID NO: 1351364 - RNA, 14 nt, Human
cccucucagcccuc

SEQ ID NO: 1351365 - RNA, 15 nt, Human
cccucucagcccuca

SEQ ID NO: 1351366 - RNA, 18 nt, Human
cccucucagcccucacac

SEQ ID NO: 1351367 - RNA, 13 nt, Human
cccucucagcucc

SEQ ID NO: 1351368 - RNA, 14 nt, Human
cccucucagcucca

SEQ ID NO: 1351369 - RNA, 17 nt, Human
cccucucagcuccaggu

SEQ ID NO: 1351370 - RNA, 14 nt, Human
cccugaucccagag

SEQ ID NO: 1351371 - RNA, 17 nt, Human
cccugaucccagagagc

SEQ ID NO: 1351372 - RNA, 20 nt, Human
cccugaucccagagagcccg

SEQ ID NO: 1351373 - RNA, 21 nt, Human
cccugauuuaggagaagccag

SEQ ID NO: 1351374 - RNA, 23 nt, Human
cccugauuuaggagaagccagga

SEQ ID NO: 1351375 - RNA, 22 nt, Human
cccugccucucugcaggucccu

SEQ ID NO: 1351376 - RNA, 21 nt, Human
cccugccucucugcagguccc

SEQ ID NO: 1351377 - RNA, 22 nt, Human
cccugccucucaucaacugaau

SEQ ID NO: 1351378 - RNA, 12 nt, Human
cccugccucuca

SEQ ID NO: 1351379 - RNA, 13 nt, Human
cccugccuggagg

SEQ ID NO: 1351380 - RNA, 14 nt, Human
cccugccuggagga

SEQ ID NO: 1351381 - RNA, 15 nt, Human
cccugccuggaggac

SEQ ID NO: 1351382 - RNA, 16 nt, Human
cccugccuggaggacc

SEQ ID NO: 1351383 - RNA, 17 nt, Human
cccugccuggaggaccu

SEQ ID NO: 1351384 - RNA, 18 nt, Human
cccugccuggaggaccug

SEQ ID NO: 1351385 - RNA, 19 nt, Human
cccugccuggaggaccuga

SEQ ID NO: 1351386 - RNA, 21 nt, Human
cccugccuggaggaccugagc

SEQ ID NO: 1351387 - RNA, 12 nt, Human
cccugccuggac

SEQ ID NO: 1351388 - RNA, 13 nt, Human
cccugccuggacc

SEQ ID NO: 1351389 - RNA, 18 nt, Human
cccugccuggaccagccu

SEQ ID NO: 1351390 - RNA, 10 nt, Human
cccugccugg

SEQ ID NO: 1351391 - RNA, 11 nt, Human
cccugccugga

SEQ ID NO: 1351392 - RNA, 12 nt, Human
cccugccuggag

SEQ ID NO: 1351393 - RNA, 22 nt, Human
cccuggaaaccuuccacccagu

SEQ ID NO: 1351394 - RNA, 15 nt, Human
cccuggaacugucuc

SEQ ID NO: 1351395 - RNA, 18 nt, Human
cccuggaacugucucuca

SEQ ID NO: 1351396 - RNA, 21 nt, Human
cccuggaaaccuuccacccag

SEQ ID NO: 1351397 - RNA, 19 nt, Human
cccuggaaaccuuccaccc

SEQ ID NO: 1351398 - RNA, 16 nt, Human
cccuggaaaccuucca

SEQ ID NO: 1351399 - RNA, 15 nt, Human
cccuggaaaccuucc

SEQ ID NO: 1351400 - RNA, 10 nt, Human
cccugcuuuu

SEQ ID NO: 1351401 - RNA, 17 nt, Human
cccuggacuugccucug

SEQ ID NO: 1351402 - RNA, 23 nt, Human
cccugcuuugggcugcccuggug

SEQ ID NO: 1351403 - RNA, 17 nt, Human
cccugcuuugggcuugg

SEQ ID NO: 1351404 - RNA, 18 nt, Human
cccugcuuugggcuuggg

SEQ ID NO: 1351405 - RNA, 22 nt, Human
cccugcuuugggcuugggccua

SEQ ID NO: 1351406 - RNA, 22 nt, Human
cccugccuggaggaccugagcc

SEQ ID NO: 1351407 - RNA, 23 nt, Human
cccugccuggaggaccugagccu

SEQ ID NO: 1351408 - RNA, 24 nt, Human
cccugccuggaggaccugagccug

SEQ ID NO: 1351409 - RNA, 18 nt, Human
cccugggaggcucuggag

SEQ ID NO: 1351410 - RNA, 17 nt, Human
cccugggaggcucugga

SEQ ID NO: 1351411 - RNA, 15 nt, Human
cccuggaggcaccug

SEQ ID NO: 1351412 - RNA, 21 nt, Human
cccuggagggggaauggcagc

SEQ ID NO: 1351413 - RNA, 23 nt, Human
cccugggagggacaugcuuagca

SEQ ID NO: 1351414 - RNA, 18 nt, Human
cccugggagggacaugcu

SEQ ID NO: 1351415 - RNA, 17 nt, Human
cccugggauucaggaaa

SEQ ID NO: 1351416 - RNA, 21 nt, Human
cccuggggccuguacugccug

SEQ ID NO: 1351417 - RNA, 22 nt, Human
cccuggggccuguacugccugc

SEQ ID NO: 1351418 - RNA, 16 nt, Human
cccugggaggcucugg

SEQ ID NO: 1351419 - RNA, 19 nt, Human
cccuggaggcacugaagug

SEQ ID NO: 1351420 - RNA, 20 nt, Human
cccugguggcccucuccccu

SEQ ID NO: 1351421 - RNA, 21 nt, Human
cccugguggcccucuccccug

SEQ ID NO: 1351422 - RNA, 22 nt, Human
cccugguggcccucuccccugc

SEQ ID NO: 1351423 - RNA, 16 nt, Human
cccuggugggccaaca

SEQ ID NO: 1351424 - RNA, 17 nt, Human
cccuggugcugccacac

SEQ ID NO: 1351425 - RNA, 21 nt, Human
cccuggugcugccacacuuca

SEQ ID NO: 1351426 - RNA, 23 nt, Human
cccuggggccuguacugccugcu

SEQ ID NO: 1351427 - RNA, 17 nt, Human
cccugggguggccacca

SEQ ID NO: 1351428 - RNA, 23 nt, Human
cccuggguagcgggggaggguag

SEQ ID NO: 1351429 - RNA, 12 nt, Human
cccucaugcugu

SEQ ID NO: 1351430 - RNA, 14 nt, Human
cccucaucuuucuu

SEQ ID NO: 1351431 - RNA, 17 nt, Human
cccucaucucucugccc

SEQ ID NO: 1351432 - RNA, 13 nt, Human
cccucaucugucc

SEQ ID NO: 1351433 - RNA, 14 nt, Human
cccucaucuguccc

SEQ ID NO: 1351434 - RNA, 22 nt, Human
cccucauuccaccuucccaugc

SEQ ID NO: 1351435 - RNA, 16 nt, Human
cccucauggccccucu

SEQ ID NO: 1351436 - RNA, 17 nt, Human
cccucauggccccucug

SEQ ID NO: 1351437 - RNA, 21 nt, Human
cccucauggccccucugaccu

SEQ ID NO: 1351438 - RNA, 13 nt, Human
cccucauagcccu

SEQ ID NO: 1351439 - RNA, 15 nt, Human
cccucauagcccuca

SEQ ID NO: 1351440 - RNA, 19 nt, Human
cccucagggcaaagccagg

SEQ ID NO: 1351441 - RNA, 20 nt, Human
cccucagggcaaagccaggu

SEQ ID NO: 1351442 - RNA, 21 nt, Human
cccucagggcaaagccagguc

SEQ ID NO: 1351443 - RNA, 19 nt, Human
cccucaguagucccugcac

SEQ ID NO: 1351444 - RNA, 19 nt, Human
cccucauagcccucacccu

SEQ ID NO: 1351445 - RNA, 16 nt, Human
cccucaucaaggacac

SEQ ID NO: 1351446 - RNA, 19 nt, Human
cccucaucaaggacacggg

SEQ ID NO: 1351447 - RNA, 17 nt, Human
cccucaucccgagcacc

SEQ ID NO: 1351448 - RNA, 15 nt, Human
cccuccagcucccug

SEQ ID NO: 1351449 - RNA, 12 nt, Human
cccuccaucccu

SEQ ID NO: 1351450 - RNA, 13 nt, Human
cccuccaucccug

SEQ ID NO: 1351451 - RNA, 14 nt, Human
cccuccaucccugg

SEQ ID NO: 1351452 - RNA, 13 nt, Human
cccuccacaccug

SEQ ID NO: 1351453 - RNA, 17 nt, Human
cccuccacaccugcggc

SEQ ID NO: 1351454 - RNA, 15 nt, Human
cccuccacaccugcg

SEQ ID NO: 1351455 - RNA, 19 nt, Human
cccuccaucuaaacugccc

SEQ ID NO: 1351456 - RNA, 17 nt, Human
cccuccaucccuggccc

SEQ ID NO: 1351457 - RNA, 22 nt, Human
cccuccaucccuggcccccucc

SEQ ID NO: 1351458 - RNA, 13 nt, Human
cccucccccugag

SEQ ID NO: 1351459 - RNA, 14 nt, Human
cccucccccugcca

SEQ ID NO: 1351460 - RNA, 12 nt, Human
cccucccccuug

SEQ ID NO: 1351461 - RNA, 13 nt, Human
cccucccccuugu

SEQ ID NO: 1351462 - RNA, 15 nt, Human
cccucccccuugucc

SEQ ID NO: 1351463 - RNA, 16 nt, Human
cccuccccgcaccccc

SEQ ID NO: 1351464 - RNA, 17 nt, Human
cccuccccgcacccccc

SEQ ID NO: 1351465 - RNA, 19 nt, Human
cccucccuguuccccagag

SEQ ID NO: 1351466 - RNA, 14 nt, Human
cccucccuucaacc

SEQ ID NO: 1351467 - RNA, 20 nt, Human
cccucccuguuccccagaga

SEQ ID NO: 1351468 - RNA, 18 nt, Human
cccuccccuccaucccug

SEQ ID NO: 1351469 - RNA, 18 nt, Human
cccuaauaaagcugugug

SEQ ID NO: 1351470 - RNA, 15 nt, Human
cccuaauaaagcugu

SEQ ID NO: 1351471 - RNA, 12 nt, Human
cccuaagccagc

SEQ ID NO: 1351472 - RNA, 18 nt, Human
cccuaagccagcugcccc

SEQ ID NO: 1351473 - RNA, 17 nt, Human
cccuaagccagcugccc

SEQ ID NO: 1351474 - RNA, 15 nt, Human
cccuaaucuaugguc

SEQ ID NO: 1351475 - RNA, 19 nt, Human
cccuacuucuuuugcucuu

SEQ ID NO: 1351476 - RNA, 18 nt, Human
cccuacuucuuuugcucu

SEQ ID NO: 1351477 - RNA, 17 nt, Human
cccuagaaacuuccaaa

SEQ ID NO: 1351478 - RNA, 14 nt, Human
cccuaauaaagcug

SEQ ID NO: 1351479 - RNA, 13 nt, Human
cccuaauaaagcu

SEQ ID NO: 1351480 - RNA, 12 nt, Human
cccuaauaaagc

SEQ ID NO: 1351481 - RNA, 14 nt, Human
cccuaacccuuugu

SEQ ID NO: 1351482 - RNA, 14 nt, Human
cccuaagagagcac

SEQ ID NO: 1351483 - RNA, 18 nt, Human
cccuaagagagcaccugg

SEQ ID NO: 1351484 - RNA, 16 nt, Human
cccuaagcagaaagug

SEQ ID NO: 1351485 - RNA, 20 nt, Human
cccuaagcagaaagugccuu

SEQ ID NO: 1351486 - RNA, 21 nt, Human
cccuaagcagaaagugccuuu

SEQ ID NO: 1351487 - RNA, 10 nt, Human
cccucagggc

SEQ ID NO: 1351488 - RNA, 16 nt, Human
cccucagggcaaagcc

SEQ ID NO: 1351489 - RNA, 18 nt, Human
cccucagggcaaagccag

SEQ ID NO: 1351490 - RNA, 14 nt, Human
cccuagagucccag

SEQ ID NO: 1351491 - RNA, 15 nt, Human
cccuaaccaaguucc

SEQ ID NO: 1351492 - RNA, 19 nt, Human
cccuaaauaauaaaaauaa

SEQ ID NO: 1351493 - RNA, 13 nt, Human
cccuaaagccuca

SEQ ID NO: 1351494 - RNA, 20 nt, Human
cccuaaaagaaacccugcac

SEQ ID NO: 1351495 - RNA, 13 nt, Human
cccguuuugucac

SEQ ID NO: 1351496 - RNA, 15 nt, Human
cccgugccaagucca

SEQ ID NO: 1351497 - RNA, 21 nt, Human
cccgugccaaguccagguccu

SEQ ID NO: 1351498 - RNA, 22 nt, Human
cccgugccaaguccagguccug

SEQ ID NO: 1351499 - RNA, 17 nt, Human
cccguggaggcugcucg

SEQ ID NO: 1351500 - RNA, 13 nt, Human
cccguggaggcug

SEQ ID NO: 1351501 - RNA, 12 nt, Human
cccguuucucca

SEQ ID NO: 1351502 - RNA, 16 nt, Human
cccguuucuccaccua

SEQ ID NO: 1351503 - RNA, 14 nt, Human
cccguuucuggugg

SEQ ID NO: 1351504 - RNA, 19 nt, Human
cccggcacccccugcagcu

SEQ ID NO: 1351505 - RNA, 18 nt, Human
cccggcacccccugcagc

SEQ ID NO: 1351506 - RNA, 12 nt, Human
cccggcagggcg

SEQ ID NO: 1351507 - RNA, 14 nt, Human
cccggcagggcggg

SEQ ID NO: 1351508 - RNA, 21 nt, Human
cccggcagggcgggcagaggg

SEQ ID NO: 1351509 - RNA, 17 nt, Human
cccggaggggccuggca

SEQ ID NO: 1351510 - RNA, 18 nt, Human
cccggaggggccuggcag

SEQ ID NO: 1351511 - RNA, 19 nt, Human
cccggaauuccgucaccac

SEQ ID NO: 1351512 - RNA, 20 nt, Human
cccggacgcccaggacccca

SEQ ID NO: 1351513 - RNA, 23 nt, Human
cccggagaagugugccuucucuc

SEQ ID NO: 1351514 - RNA, 18 nt, Human
cccggagguugggugggc

SEQ ID NO: 1351515 - RNA, 19 nt, Human
cccggaggcggugggccug

SEQ ID NO: 1351516 - RNA, 11 nt, Human
cccggcacccc

SEQ ID NO: 1351517 - RNA, 13 nt, Human
cccggcacccccu

SEQ ID NO: 1351518 - RNA, 15 nt, Human
cccggcacccccugc

SEQ ID NO: 1351519 - RNA, 16 nt, Human
cccggcacccccugca

SEQ ID NO: 1351520 - RNA, 17 nt, Human
cccggcacccccugcag

SEQ ID NO: 1351521 - RNA, 22 nt, Human
ccccagcuggggccaggcuggg

SEQ ID NO: 1351522 - RNA, 21 nt, Human
ccccagcuggggccaggcugg

SEQ ID NO: 1351523 - RNA, 15 nt, Human
ccccagccugggccu

SEQ ID NO: 1351524 - RNA, 11 nt, Human
ccccagccugg

SEQ ID NO: 1351525 - RNA, 12 nt, Human
ccccagccuggg

SEQ ID NO: 1351526 - RNA, 13 nt, Human
ccccagccugggc

SEQ ID NO: 1351527 - RNA, 16 nt, Human
ccccagccugggccua

SEQ ID NO: 1351528 - RNA, 16 nt, Human
ccccagcccccuaaga

SEQ ID NO: 1351529 - RNA, 19 nt, Human
ccccagcccuccuuaucaa

SEQ ID NO: 1351530 - RNA, 18 nt, Human
ccccaggaccagcucagg

SEQ ID NO: 1351531 - RNA, 19 nt, Human
ccccaggaccagcucagga

SEQ ID NO: 1351532 - RNA, 21 nt, Human
ccccaggaccagcucaggaca

SEQ ID NO: 1351533 - RNA, 15 nt, Human
ccccaggaccuggcu

SEQ ID NO: 1351534 - RNA, 17 nt, Human
ccccaggaccuggcugc

SEQ ID NO: 1351535 - RNA, 20 nt, Human
ccccaggaccuggcugccau

SEQ ID NO: 1351536 - RNA, 21 nt, Human
ccccaggaccuggcugccaua

SEQ ID NO: 1351537 - RNA, 22 nt, Human
ccccagcugucaucaauuaaag

SEQ ID NO: 1351538 - RNA, 12 nt, Human
ccccagggcagc

SEQ ID NO: 1351539 - RNA, 15 nt, Human
ccccagggcagccag

SEQ ID NO: 1351540 - RNA, 16 nt, Human
ccccagggcagccagg

SEQ ID NO: 1351541 - RNA, 22 nt, Human
ccccagggcagccagggagagc

SEQ ID NO: 1351542 - RNA, 22 nt, Human
ccccagggcuguaacugccagg

SEQ ID NO: 1351543 - RNA, 16 nt, Human
ccccaggguccuggga

SEQ ID NO: 1351544 - RNA, 17 nt, Human
ccccaggguccugggag

SEQ ID NO: 1351545 - RNA, 20 nt, Human
ccccaggguccugggaggag

SEQ ID NO: 1351546 - RNA, 18 nt, Human
ccccaggguccugggagg

SEQ ID NO: 1351547 - RNA, 20 nt, Human
ccccagguaggggccccucu

SEQ ID NO: 1351548 - RNA, 23 nt, Human
ccccagguaggggccccucucag

SEQ ID NO: 1351549 - RNA, 17 nt, Human
ccccagguccagcucug

SEQ ID NO: 1351550 - RNA, 21 nt, Human
ccccagguccagcucuggagg

SEQ ID NO: 1351551 - RNA, 22 nt, Human
ccccagguccagcucuggaggg

SEQ ID NO: 1351552 - RNA, 11 nt, Human
ccccuguacac

SEQ ID NO: 1351553 - RNA, 16 nt, Human
ccccuguacacaacuc

SEQ ID NO: 1351554 - RNA, 15 nt, Human
ccccuguaggccuca

SEQ ID NO: 1351555 - RNA, 23 nt, Human
ccccuggcuuuucacugcuggcu

SEQ ID NO: 1351556 - RNA, 14 nt, Human
ccccuuaccacugc

SEQ ID NO: 1351557 - RNA, 19 nt, Human
ccccuguuuauucauaugc

SEQ ID NO: 1351558 - RNA, 13 nt, Human
ccccuuagacaga

SEQ ID NO: 1351559 - RNA, 17 nt, Human
ccccuuagacagaggcc

SEQ ID NO: 1351560 - RNA, 24 nt, Human
ccccuuagacagaggcccucaagu

SEQ ID NO: 1351561 - RNA, 14 nt, Human
ccccuuauccuccc

SEQ ID NO: 1351562 - RNA, 15 nt, Human
ccccuuauccucccu

SEQ ID NO: 1351563 - RNA, 18 nt, Human
ccccuuauccucccugua

SEQ ID NO: 1351564 - RNA, 17 nt, Human
ccccuuauccucccugu

SEQ ID NO: 1351565 - RNA, 12 nt, Human
ccccuucccccu

SEQ ID NO: 1351566 - RNA, 14 nt, Human
ccccuuccgccacu

SEQ ID NO: 1351567 - RNA, 16 nt, Human
ccccuuccgccacugg

SEQ ID NO: 1351568 - RNA, 17 nt, Human
ccccuuccgccacuggg

SEQ ID NO: 1351569 - RNA, 20 nt, Human
ccccuuccuaauuccacagc

SEQ ID NO: 1351570 - RNA, 21 nt, Human
ccccuuccuaauuccacagcu

SEQ ID NO: 1351571 - RNA, 22 nt, Human
ccccuuccuaauuccacagcug

SEQ ID NO: 1351572 - RNA, 19 nt, Human
cccgcucagcccucccugc

SEQ ID NO: 1351573 - RNA, 17 nt, Human
cccgccugcccucaugg

SEQ ID NO: 1351574 - RNA, 12 nt, Human
cccgccuuggcc

SEQ ID NO: 1351575 - RNA, 13 nt, Human
cccgccuuggccu

SEQ ID NO: 1351576 - RNA, 14 nt, Human
cccgccuuggccug

SEQ ID NO: 1351577 - RNA, 17 nt, Human
cccgcgauguggaacug

SEQ ID NO: 1351578 - RNA, 22 nt, Human
cccgcgauguggaacugcugcc

SEQ ID NO: 1351579 - RNA, 23 nt, Human
cccgcgauguggaacugcugcca

SEQ ID NO: 1351580 - RNA, 23 nt, Human
cccgcucagcccucccugccccu

SEQ ID NO: 1351581 - RNA, 13 nt, Human
cccgcucaggcug

SEQ ID NO: 1351582 - RNA, 21 nt, Human
cccgcucuacaucuucugccu

SEQ ID NO: 1351583 - RNA, 19 nt, Human
cccgaggaggugucucagg

SEQ ID NO: 1351584 - RNA, 21 nt, Human
cccgaggaggugucucaggcu

SEQ ID NO: 1351585 - RNA, 14 nt, Human
cccgauuguaacuc

SEQ ID NO: 1351586 - RNA, 12 nt, Human
cccgcacaccug

SEQ ID NO: 1351587 - RNA, 13 nt, Human
cccgccugcccuc

SEQ ID NO: 1351588 - RNA, 14 nt, Human
cccgccugcccuca

SEQ ID NO: 1351589 - RNA, 19 nt, Human
cccgcaccccccaagcugu

SEQ ID NO: 1351590 - RNA, 15 nt, Human
ugggucugggaguca

SEQ ID NO: 1351591 - RNA, 19 nt, Human
ggcuuauaauaaaggacug

SEQ ID NO: 1351592 - RNA, 18 nt, Human
ggcuugaauaaggaaaug

SEQ ID NO: 1351593 - RNA, 13 nt, Human
uccugaagccaca

SEQ ID NO: 1351594 - RNA, 21 nt, Human
guggaacauaaaaaggacauc

SEQ ID NO: 1351595 - RNA, 20 nt, Human
gacuucaucccaaaggacag

SEQ ID NO: 1351596 - RNA, 15 nt, Human
gacuuauaguacaug

SEQ ID NO: 1351597 - RNA, 19 nt, Human
gcacucaggugacauccuc

SEQ ID NO: 1351598 - RNA, 16 nt, Human
gcugacuuacaucaug

SEQ ID NO: 1351599 - RNA, 22 nt, Human
ggaugaagggcccgagaacaug

SEQ ID NO: 1351600 - RNA, 23 nt, Human
ggcugaggcuggcacaggacaug

SEQ ID NO: 1351601 - RNA, 16 nt, Human
ggcuggagaggacaag

SEQ ID NO: 1351602 - RNA, 16 nt, Human
uccauguagaagccac

SEQ ID NO: 1351603 - RNA, 17 nt, Human
ggcugagucaggacuug

SEQ ID NO: 1351604 - RNA, 23 nt, Human
uggaggcccaggcugggaacuca

SEQ ID NO: 1351605 - RNA, 21 nt, Hepatitis C virus
cuucuuuaaugguggcuccau

SEQ ID NO: 1351606 - RNA, 22 nt, Hepatitis C virus
gcugugaaagguccgugagccg

SEQ ID NO: 1351607 - RNA, 16 nt, Hepatitis C virus
gagccgcaugacugca

SEQ ID NO: 1351608 - RNA, 21 nt, Hepatitis C virus
gagagugcugauacuggccuc

SEQ ID NO: 1351609 - RNA, 23 nt, Hepatitis C virus
gcagagagugcugauacuggccu

SEQ ID NO: 1351610 - RNA, 22 nt, Hepatitis C virus
uccuucuuuaaugguggcucca

SEQ ID NO: 1351611 - RNA, 23 nt, Hepatitis C virus
gcccuagucacggcuagcuguga

SEQ ID NO: 1351612 - RNA, 18 nt, Hepatitis C virus
ccuucuuuaaugguggcu

SEQ ID NO: 1351613 - RNA, 19 nt, Hepatitis C virus
gauacuggccucucugcag

SEQ ID NO: 1351614 - RNA, 16 nt, Hepatitis C virus
ugagccgcaugacugc

SEQ ID NO: 1351615 - RNA, 19 nt, Hepatitis C virus
guaaacacuccggccucuu

SEQ ID NO: 1351616 - RNA, 18 nt, Hepatitis C virus
acugcagagagugcugau

SEQ ID NO: 1351617 - RNA, 20 nt, Hepatitis C virus
gccucuuaggccauuuccug

SEQ ID NO: 1351618 - RNA, 20 nt, Hepatitis C virus
cugcagagagugcugauacu

SEQ ID NO: 1351619 - RNA, 15 nt, Hepatitis C virus
uuaaugguggcucca

SEQ ID NO: 1351620 - RNA, 20 nt, Hepatitis C virus
uuaggccauuuccuguuuuu

SEQ ID NO: 1351621 - RNA, 19 nt, Hepatitis C virus
ugaaagguccgugagccgc

SEQ ID NO: 1351622 - RNA, 13 nt, Hepatitis C virus
gccucucugcaga

SEQ ID NO: 1351623 - RNA, 12 nt, Hepatitis C virus
ggcuagcuguga

SEQ ID NO: 1351624 - RNA, 23 nt, Hepatitis C virus
agccgcaugacugcagagagugc

SEQ ID NO: 1351625 - RNA, 13 nt, Hepatitis C virus
auacuggccucuc

SEQ ID NO: 1351626 - RNA, 15 nt, Hepatitis C virus
gcuccaucuuagccc

SEQ ID NO: 1351627 - RNA, 13 nt, Hepatitis C virus
ccucucugcagau

SEQ ID NO: 1351628 - RNA, 18 nt, Hepatitis C virus
cuuucuuuuccuuccuuc

SEQ ID NO: 1351629 - RNA, 22 nt, Hepatitis C virus
cagagagugcugauacuggccu

SEQ ID NO: 1351630 - RNA, 23 nt, Hepatitis C virus
cugugaaagguccgugagccgca

SEQ ID NO: 1351631 - RNA, 16 nt, Hepatitis C virus
gugcugauacuggccu

SEQ ID NO: 1351632 - RNA, 12 nt, Hepatitis C virus
cuuuuccuuccu

SEQ ID NO: 1351633 - RNA, 13 nt, Hepatitis C virus
cuuuccuucuuuu

SEQ ID NO: 1351634 - RNA, 12 nt, Hepatitis C virus
aggccauuuccu

SEQ ID NO: 1351635 - RNA, 18 nt, Hepatitis C virus
aacacuccggccucuuag

SEQ ID NO: 1351636 - RNA, 19 nt, Hepatitis C virus
gugcugauacuggccucuc

SEQ ID NO: 1351637 - RNA, 13 nt, Hepatitis C virus
caugacugcagag

SEQ ID NO: 1351638 - RNA, 13 nt, Hepatitis C virus
gccgcaugacugc

SEQ ID NO: 1351639 - RNA, 15 nt, Hepatitis C virus
ccuuccuucuuuaau

SEQ ID NO: 1351640 - RNA, 22 nt, Hepatitis C virus
gagagugcugauacuggccucu

SEQ ID NO: 1351641 - RNA, 17 nt, Hepatitis C virus
agagugcugauacuggc

SEQ ID NO: 1351642 - RNA, 19 nt, Hepatitis C virus
agucacggcuagcugugaa

SEQ ID NO: 1351643 - RNA, 22 nt, Hepatitis C virus
gcugauacuggccucucugcag

SEQ ID NO: 1351644 - RNA, 19 nt, Hepatitis C virus
agagugcugauacuggccu

SEQ ID NO: 1351645 - RNA, 13 nt, Hepatitis C virus
ccuuccuucuuua

SEQ ID NO: 1351646 - RNA, 15 nt, Hepatitis C virus
acggcuagcugugaa

SEQ ID NO: 1351647 - RNA, 12 nt, Hepatitis C virus
gccauuuccugu

SEQ ID NO: 1351648 - RNA, 23 nt, Hepatitis C virus
ugagccgcaugacugcagagagu

SEQ ID NO: 1351649 - RNA, 20 nt, Hepatitis C virus
cugugaaagguccgugagcc

SEQ ID NO: 1351650 - RNA, 14 nt, Hepatitis C virus
aaacacuccggccu

SEQ ID NO: 1351651 - RNA, 16 nt, Hepatitis C virus
cuggccucucugcaga

SEQ ID NO: 1351652 - RNA, 19 nt, Hepatitis C virus
acuggccucucugcagauc

SEQ ID NO: 1351653 - RNA, 14 nt, Hepatitis C virus
gcuccaucuuagcc

SEQ ID NO: 1351654 - RNA, 14 nt, Hepatitis C virus
cacuccggccucuu

SEQ ID NO: 1351655 - RNA, 12 nt, Hepatitis C virus
cggcuagcugug

SEQ ID NO: 1351656 - RNA, 11 nt, Hepatitis C virus
ugguggcucca

SEQ ID NO: 1351657 - RNA, 19 nt, Hepatitis C virus
caugacugcagagagugcu

SEQ ID NO: 1351658 - RNA, 16 nt, Human
aaaaaauguauaugca

SEQ ID NO: 1351659 - RNA, 11 nt, Human
aaaaacuauuu

SEQ ID NO: 1351660 - RNA, 19 nt, Human
aaaaacuacaaccaaugga

SEQ ID NO: 1351661 - RNA, 17 nt, Human
aaaaacuaaaaacuaga

SEQ ID NO: 1351662 - RNA, 14 nt, Human
aaaaacuaaaaacu

SEQ ID NO: 1351663 - RNA, 13 nt, Human
aaaaaccuugggu

SEQ ID NO: 1351664 - RNA, 12 nt, Human
aaaaaccuuggg

SEQ ID NO: 1351665 - RNA, 23 nt, Human
aaaaaccugagauuuauuaaaga

SEQ ID NO: 1351666 - RNA, 22 nt, Human
aaaaaccugagauuuauuaaag

SEQ ID NO: 1351667 - RNA, 18 nt, Human
aaaaaccugagauuuauu

SEQ ID NO: 1351668 - RNA, 18 nt, Human
aaaaacagauuuggaaag

SEQ ID NO: 1351669 - RNA, 12 nt, Human
aaaaaaugguuc

SEQ ID NO: 1351670 - RNA, 14 nt, Human
aacuuuaucacuua

SEQ ID NO: 1351671 - RNA, 18 nt, Human
aacuuaaucuaaauggaa

SEQ ID NO: 1351672 - RNA, 15 nt, Human
aacuuaaucuaaaug

SEQ ID NO: 1351673 - RNA, 16 nt, Human
aacuuaaucuaaaugg

SEQ ID NO: 1351674 - RNA, 20 nt, Human
aacugaggaauuuucuuugu

SEQ ID NO: 1351675 - RNA, 18 nt, Human
aacugaggaauuuucuuu

SEQ ID NO: 1351676 - RNA, 18 nt, Human
aacugagauccuuccuuu

SEQ ID NO: 1351677 - RNA, 14 nt, Human
aacugauaaagaug

SEQ ID NO: 1351678 - RNA, 21 nt, Human
aacuuaaauguuauuaucugg

SEQ ID NO: 1351679 - RNA, 19 nt, Human
aacuuaaauguuauuaucu

SEQ ID NO: 1351680 - RNA, 15 nt, Human
aacuuaaauguuauu

SEQ ID NO: 1351681 - RNA, 19 nt, Human
aacuuaaauuuuaguucuu

SEQ ID NO: 1351682 - RNA, 23 nt, Human
aacugacuauucuugauguaaaa

SEQ ID NO: 1351683 - RNA, 22 nt, Human
aacugacuauucuugauguaaa

SEQ ID NO: 1351684 - RNA, 20 nt, Human
aacugacuauucuugaugua

SEQ ID NO: 1351685 - RNA, 20 nt, Human
aacugacucuuaagaagacu

SEQ ID NO: 1351686 - RNA, 19 nt, Human
aacugacucuuaagaagac

SEQ ID NO: 1351687 - RNA, 22 nt, Human
aacucagauccagggacagagg

SEQ ID NO: 1351688 - RNA, 15 nt, Human
aacucagauccaggg

SEQ ID NO: 1351689 - RNA, 14 nt, Human
aacucagauccagg

SEQ ID NO: 1351690 - RNA, 13 nt, Human
aacucagauccag

SEQ ID NO: 1351691 - RNA, 12 nt, Human
aacucagaucca

SEQ ID NO: 1351692 - RNA, 18 nt, Human
aacugacucuuaagaaga

SEQ ID NO: 1351693 - RNA, 15 nt, Human
aacugacucuuaaga

SEQ ID NO: 1351694 - RNA, 18 nt, Human
aacgauuuuuaaaaugua

SEQ ID NO: 1351695 - RNA, 19 nt, Human
aacgauuuuuaaaauguac

SEQ ID NO: 1351696 - RNA, 15 nt, Human
aacgauuuuuaaaau

SEQ ID NO: 1351697 - RNA, 14 nt, Human
aacgauuuuuaaaa

SEQ ID NO: 1351698 - RNA, 15 nt, Human
aacgcugauuuaaag

SEQ ID NO: 1351699 - RNA, 20 nt, Human
aacgcucuagguacgaugac

SEQ ID NO: 1351700 - RNA, 22 nt, Human
aacgcaaguucccaguuggagc

SEQ ID NO: 1351701 - RNA, 19 nt, Human
aacgcaaguucccaguugg

SEQ ID NO: 1351702 - RNA, 14 nt, Human
aacggaccaaagca

SEQ ID NO: 1351703 - RNA, 21 nt, Human
aacggaccaaagcaagacccu

SEQ ID NO: 1351704 - RNA, 14 nt, Human
aacggaagaagaga

SEQ ID NO: 1351705 - RNA, 12 nt, Human
aacggagucaaa

SEQ ID NO: 1351706 - RNA, 13 nt, Human
aacggaucagaaa

SEQ ID NO: 1351707 - RNA, 17 nt, Human
aacggaucagaaauaca

SEQ ID NO: 1351708 - RNA, 14 nt, Human
aacucacuuuccuc

SEQ ID NO: 1351709 - RNA, 20 nt, Human
aacucacuccuuuuaaagaa

SEQ ID NO: 1351710 - RNA, 17 nt, Human
aacucacuccuuuuaaa

SEQ ID NO: 1351711 - RNA, 16 nt, Human
aacucacuccuuuuaa

SEQ ID NO: 1351712 - RNA, 15 nt, Human
aacucaaaauauuug

SEQ ID NO: 1351713 - RNA, 16 nt, Human
aacuauuuucagaugu

SEQ ID NO: 1351714 - RNA, 20 nt, Human
aacuauuuucagaugugaac

SEQ ID NO: 1351715 - RNA, 14 nt, Human
aacuauuuucagau

SEQ ID NO: 1351716 - RNA, 13 nt, Human
aacuauuuucaga

SEQ ID NO: 1351717 - RNA, 12 nt, Human
aacuauuuucag

SEQ ID NO: 1351718 - RNA, 18 nt, Human
aacuauuuucaaagacuu

SEQ ID NO: 1351719 - RNA, 17 nt, Human
aacuauuuucaaagacu

SEQ ID NO: 1351720 - RNA, 15 nt, Human
aacggauuccaaaga

SEQ ID NO: 1351721 - RNA, 18 nt, Human
aacggaucagaaauacag

SEQ ID NO: 1351722 - RNA, 16 nt, Human
aacuauugcauuuaua

SEQ ID NO: 1351723 - RNA, 15 nt, Human
aacuauugcauuuau

SEQ ID NO: 1351724 - RNA, 21 nt, Human
aacuauugcauuuauauguac

SEQ ID NO: 1351725 - RNA, 22 nt, Human
aaauugaaccuuugugcccuau

SEQ ID NO: 1351726 - RNA, 15 nt, Human
aaauugaaccuuugu

SEQ ID NO: 1351727 - RNA, 12 nt, Human
aaauugaaccuu

SEQ ID NO: 1351728 - RNA, 20 nt, Human
aaauugaaauguaaggcugu

SEQ ID NO: 1351729 - RNA, 13 nt, Human
aaauugaaaugua

SEQ ID NO: 1351730 - RNA, 20 nt, Human
aaauucuuucccagucuguc

SEQ ID NO: 1351731 - RNA, 13 nt, Human
aaauucuuucauu

SEQ ID NO: 1351732 - RNA, 21 nt, Human
aaauucuugcaaaguaucccu

SEQ ID NO: 1351733 - RNA, 13 nt, Human
aaauuaaagcauu

SEQ ID NO: 1351734 - RNA, 19 nt, Human
aaauuaaacuuauuuacaa

SEQ ID NO: 1351735 - RNA, 19 nt, Human
aaauuaaaccggaccaucu

SEQ ID NO: 1351736 - RNA, 13 nt, Human
aaauugaaugcaa

SEQ ID NO: 1351737 - RNA, 20 nt, Human
aaauugaauacuuugaaugu

SEQ ID NO: 1351738 - RNA, 15 nt, Human
aaauugaaugcaaac

SEQ ID NO: 1351739 - RNA, 21 nt, Human
aaauugaauacuuugaaugug

SEQ ID NO: 1351740 - RNA, 19 nt, Human
aaauugaauacuuugaaug

SEQ ID NO: 1351741 - RNA, 18 nt, Human
aaauugaauacuuugaau

SEQ ID NO: 1351742 - RNA, 17 nt, Human
aaauugaauacuuugaa

SEQ ID NO: 1351743 - RNA, 14 nt, Human
aaauugaauacuuu

SEQ ID NO: 1351744 - RNA, 15 nt, Human
aaauugccauauugc

SEQ ID NO: 1351745 - RNA, 16 nt, Human
aaauugccauauugca

SEQ ID NO: 1351746 - RNA, 14 nt, Human
aaauugaaugcaaa

SEQ ID NO: 1351747 - RNA, 18 nt, Human
aaauugccauauugcaca

SEQ ID NO: 1351748 - RNA, 19 nt, Human
aaauugccauauugcacau

SEQ ID NO: 1351749 - RNA, 21 nt, Human
aaauugccauauugcacaugu

SEQ ID NO: 1351750 - RNA, 23 nt, Human
aaauugccauauugcacaugucu

SEQ ID NO: 1351751 - RNA, 23 nt, Human
aaauugcugacuguagcuuugga

SEQ ID NO: 1351752 - RNA, 19 nt, Human
aaauugcugacuguagcuu

SEQ ID NO: 1351753 - RNA, 15 nt, Human
aaauuuuuuuuacau

SEQ ID NO: 1351754 - RNA, 19 nt, Human
aaauguuggucauuuuaug

SEQ ID NO: 1351755 - RNA, 17 nt, Human
aaauguuggucauuuua

SEQ ID NO: 1351756 - RNA, 20 nt, Human
aaaucuuauaguucuaggca

SEQ ID NO: 1351757 - RNA, 19 nt, Human
aaaucuuauaguucuaggc

SEQ ID NO: 1351758 - RNA, 18 nt, Human
aaaucuuauaguucuagg

SEQ ID NO: 1351759 - RNA, 17 nt, Human
aaaucuuauaguucuag

SEQ ID NO: 1351760 - RNA, 16 nt, Human
aaaucuuauaguucua

SEQ ID NO: 1351761 - RNA, 17 nt, Human
aaaucuuauaauuuaaa

SEQ ID NO: 1351762 - RNA, 16 nt, Human
aaaugcgggguggggg

SEQ ID NO: 1351763 - RNA, 21 nt, Human
aaaugccuuuucccaaaaugu

SEQ ID NO: 1351764 - RNA, 16 nt, Human
aaaugccuuuucccaa

SEQ ID NO: 1351765 - RNA, 23 nt, Human
aaaugcgguuauaaaaaaugguu

SEQ ID NO: 1351766 - RNA, 22 nt, Human
aaaugcgguuauaaaaaauggu

SEQ ID NO: 1351767 - RNA, 15 nt, Human
aaaugcgguuauaaa

SEQ ID NO: 1351768 - RNA, 15 nt, Human
aaaugccuuuguacu

SEQ ID NO: 1351769 - RNA, 19 nt, Human
aacaccauugaaggcuuaa

SEQ ID NO: 1351770 - RNA, 20 nt, Human
aacacccagucuguucccca

SEQ ID NO: 1351771 - RNA, 17 nt, Human
aacaccauugaaggcuu

SEQ ID NO: 1351772 - RNA, 15 nt, Human
aacaccauugaaggc

SEQ ID NO: 1351773 - RNA, 20 nt, Human
aacaccaugauuccuuuaac

SEQ ID NO: 1351774 - RNA, 19 nt, Human
aacaccaugauuccuuuaa

SEQ ID NO: 1351775 - RNA, 18 nt, Human
aacaccaugauuccuuua

SEQ ID NO: 1351776 - RNA, 20 nt, Human
aacaccauagguagaaugua

SEQ ID NO: 1351777 - RNA, 18 nt, Human
aacaaccucaacugccua

SEQ ID NO: 1351778 - RNA, 14 nt, Human
aacaaccucaacug

SEQ ID NO: 1351779 - RNA, 20 nt, Human
aacaacauguuuccagcauu

SEQ ID NO: 1351780 - RNA, 14 nt, Human
aacaacacuguagu

SEQ ID NO: 1351781 - RNA, 19 nt, Human
aacaaaaacacuaaaaaua

SEQ ID NO: 1351782 - RNA, 16 nt, Human
aaauuuuuuuuacauu

SEQ ID NO: 1351783 - RNA, 17 nt, Human
aaauuuuuuuuacauuu

SEQ ID NO: 1351784 - RNA, 18 nt, Human
aaauuuuuuuuacauuuu

SEQ ID NO: 1351785 - RNA, 15 nt, Human
aacacuaaaaauaaa

SEQ ID NO: 1351786 - RNA, 14 nt, Human
aacacuaaaaauaa

SEQ ID NO: 1351787 - RNA, 21 nt, Human
aacacguaucccaccugacau

SEQ ID NO: 1351788 - RNA, 21 nt, Human
aacacggccacaucaaagagg

SEQ ID NO: 1351789 - RNA, 13 nt, Human
aacacggccacau

SEQ ID NO: 1351790 - RNA, 18 nt, Human
aacacuaacauauaaugu

SEQ ID NO: 1351791 - RNA, 17 nt, Human
aacacuaacaugauuug

SEQ ID NO: 1351792 - RNA, 15 nt, Human
aaccacgccucuuga

SEQ ID NO: 1351793 - RNA, 22 nt, Human
aaccacuuucuuauuuuuuucu

SEQ ID NO: 1351794 - RNA, 21 nt, Human
aaccacuuucuuauuuuuuuc

SEQ ID NO: 1351795 - RNA, 14 nt, Human
aaccacuuuuugca

SEQ ID NO: 1351796 - RNA, 15 nt, Human
aaccacuuuuugcag

SEQ ID NO: 1351797 - RNA, 17 nt, Human
aaccacuuuuugcagcu

SEQ ID NO: 1351798 - RNA, 14 nt, Human
aaccagacucuugc

SEQ ID NO: 1351799 - RNA, 15 nt, Human
aaccagagugcugaa

SEQ ID NO: 1351800 - RNA, 15 nt, Human
aacauccaaaaucuu

SEQ ID NO: 1351801 - RNA, 11 nt, Human
aacauccaaaa

SEQ ID NO: 1351802 - RNA, 22 nt, Human
aacagcugguguagcuacagag

SEQ ID NO: 1351803 - RNA, 15 nt, Human
aacaucccuccuggg

SEQ ID NO: 1351804 - RNA, 16 nt, Human
aaccaccccaucugca

SEQ ID NO: 1351805 - RNA, 20 nt, Human
aacccuugggccagaaguac

SEQ ID NO: 1351806 - RNA, 18 nt, Human
aacccuugggccagaagu

SEQ ID NO: 1351807 - RNA, 15 nt, Human
aacccuugggccaga

SEQ ID NO: 1351808 - RNA, 14 nt, Human
aacccuugggccag

SEQ ID NO: 1351809 - RNA, 20 nt, Human
aacccucacaucagagugac

SEQ ID NO: 1351810 - RNA, 20 nt, Human
aacccuuugugugcucucca

SEQ ID NO: 1351811 - RNA, 16 nt, Human
aacccuuugugugcuc

SEQ ID NO: 1351812 - RNA, 21 nt, Human
aaccgaacugauguaaguaaa

SEQ ID NO: 1351813 - RNA, 15 nt, Human
aacccguggaggcug

SEQ ID NO: 1351814 - RNA, 14 nt, Human
aacccguggaggcu

SEQ ID NO: 1351815 - RNA, 13 nt, Human
aacccguggaggc

SEQ ID NO: 1351816 - RNA, 14 nt, Human
aacccgugccaagu

SEQ ID NO: 1351817 - RNA, 15 nt, Human
aacccgucuggccca

SEQ ID NO: 1351818 - RNA, 16 nt, Human
aaccagauauauauuc

SEQ ID NO: 1351819 - RNA, 12 nt, Human
aaccagaucauu

SEQ ID NO: 1351820 - RNA, 21 nt, Human
aacccuauacuguaguauucu

SEQ ID NO: 1351821 - RNA, 19 nt, Human
aacccuagccuugcuuguu

SEQ ID NO: 1351822 - RNA, 18 nt, Human
aacccuagccuugcuugu

SEQ ID NO: 1351823 - RNA, 16 nt, Human
aacccuagccuugcuu

SEQ ID NO: 1351824 - RNA, 18 nt, Human
aacccguggaggcugcuc

SEQ ID NO: 1351825 - RNA, 23 nt, Human
aacccuaaauaauaaaaauaaac

SEQ ID NO: 1351826 - RNA, 13 nt, Human
aacccuagccuug

SEQ ID NO: 1351827 - RNA, 17 nt, Human
aacccguggaggcugcu

SEQ ID NO: 1351828 - RNA, 14 nt, Human
aacccuagcaaaag

SEQ ID NO: 1351829 - RNA, 11 nt, Human
aaccuagagau

SEQ ID NO: 1351830 - RNA, 20 nt, Human
aaccuacaguuuuaacugug

SEQ ID NO: 1351831 - RNA, 17 nt, Human
aaccuagggugauauua

SEQ ID NO: 1351832 - RNA, 20 nt, Human
aacagcagacucagcucuga

SEQ ID NO: 1351833 - RNA, 19 nt, Human
aacagcagacucagcucug

SEQ ID NO: 1351834 - RNA, 20 nt, Human
aacagcaccaaaucaaaauc

SEQ ID NO: 1351835 - RNA, 22 nt, Human
aacagcauguacggauuuucag

SEQ ID NO: 1351836 - RNA, 21 nt, Human
aacagcaucuccaagcagcuu

SEQ ID NO: 1351837 - RNA, 19 nt, Human
aacagcaucuccaagcagc

SEQ ID NO: 1351838 - RNA, 15 nt, Human
aacagcaucuccaag

SEQ ID NO: 1351839 - RNA, 10 nt, Human
aacagcaucu

SEQ ID NO: 1351840 - RNA, 23 nt, Human
aacagcugguguagcuacagaga

SEQ ID NO: 1351841 - RNA, 21 nt, Human
aacagcugguguagcuacaga

SEQ ID NO: 1351842 - RNA, 20 nt, Human
aacagcugguguagcuacag

SEQ ID NO: 1351843 - RNA, 17 nt, Human
aacagcugguguagcua

SEQ ID NO: 1351844 - RNA, 16 nt, Human
aacagcugguguagcu

SEQ ID NO: 1351845 - RNA, 13 nt, Human
aacagcuggugua

SEQ ID NO: 1351846 - RNA, 12 nt, Human
aacagcuggugu

SEQ ID NO: 1351847 - RNA, 17 nt, Human
aaacccuagccuugcuu

SEQ ID NO: 1351848 - RNA, 14 nt, Human
aaacccuagccuug

SEQ ID NO: 1351849 - RNA, 13 nt, Human
aaacccuagccuu

SEQ ID NO: 1351850 - RNA, 18 nt, Human
aaacccuagccuugcuug

SEQ ID NO: 1351851 - RNA, 16 nt, Human
aaacccuagccuugcu

SEQ ID NO: 1351852 - RNA, 15 nt, Human
aaacccuagccuugc

SEQ ID NO: 1351853 - RNA, 18 nt, Human
aaaccccuguaggccuca

SEQ ID NO: 1351854 - RNA, 13 nt, Human
aaaccauguagaa

SEQ ID NO: 1351855 - RNA, 15 nt, Human
aaaccaugcaaaugc

SEQ ID NO: 1351856 - RNA, 22 nt, Human
aaaccaucucccuggugcuuau

SEQ ID NO: 1351857 - RNA, 19 nt, Human
aaaccaucucccuggugcu

SEQ ID NO: 1351858 - RNA, 15 nt, Human
aaaccaucucccugg

SEQ ID NO: 1351859 - RNA, 13 nt, Human
aaaccaucucccu

SEQ ID NO: 1351860 - RNA, 22 nt, Human
aaaccaucaaguugugccaaau

SEQ ID NO: 1351861 - RNA, 23 nt, Human
aaaccaucucccuggugcuuaug

SEQ ID NO: 1351862 - RNA, 18 nt, Human
aaagauaaacacaagauu

SEQ ID NO: 1351863 - RNA, 17 nt, Human
aaagauaaacacaagau

SEQ ID NO: 1351864 - RNA, 16 nt, Human
aaagauaaacacaaga

SEQ ID NO: 1351865 - RNA, 12 nt, Human
aaagauaaacac

SEQ ID NO: 1351866 - RNA, 16 nt, Human
aaagaguucaagaaau

SEQ ID NO: 1351867 - RNA, 20 nt, Human
aaagaguucaagaaauaagu

SEQ ID NO: 1351868 - RNA, 14 nt, Human
aaagaguucaagaa

SEQ ID NO: 1351869 - RNA, 12 nt, Human
aaagauauuuug

SEQ ID NO: 1351870 - RNA, 16 nt, Human
aaagauauuuugcuuu

SEQ ID NO: 1351871 - RNA, 17 nt, Human
aaagauauuuugcuuug

SEQ ID NO: 1351872 - RNA, 20 nt, Human
aaagauauuuugcuuuguga

SEQ ID NO: 1351873 - RNA, 22 nt, Human
aaagaagagcgagagaucaaag

SEQ ID NO: 1351874 - RNA, 20 nt, Human
aaagaagaccugagaaugua

SEQ ID NO: 1351875 - RNA, 22 nt, Human
aaagaagaccugagaauguauc

SEQ ID NO: 1351876 - RNA, 18 nt, Human
aaagaagaccugagaaug

SEQ ID NO: 1351877 - RNA, 14 nt, Human
aaagaagaccugag

SEQ ID NO: 1351878 - RNA, 16 nt, Human
aaagaagcccccagcu

SEQ ID NO: 1351879 - RNA, 14 nt, Human
aaagagucuagauu

SEQ ID NO: 1351880 - RNA, 13 nt, Human
aaagagucuagau

SEQ ID NO: 1351881 - RNA, 15 nt, Human
aaagaaguaaaagca

SEQ ID NO: 1351882 - RNA, 21 nt, Human
aaagaagggcugguauuguuc

SEQ ID NO: 1351883 - RNA, 15 nt, Human
aaagagucuagauuc

SEQ ID NO: 1351884 - RNA, 21 nt, Human
aaagagucuagauucaaaggu

SEQ ID NO: 1351885 - RNA, 19 nt, Human
aaacugaggaauuuucuuu

SEQ ID NO: 1351886 - RNA, 18 nt, Human
aaacugaggaauuuucuu

SEQ ID NO: 1351887 - RNA, 19 nt, Human
aaacugaggaauuucaccu

SEQ ID NO: 1351888 - RNA, 14 nt, Human
aaacugaggaauuu

SEQ ID NO: 1351889 - RNA, 17 nt, Human
aaagaaauauaccuaaa

SEQ ID NO: 1351890 - RNA, 22 nt, Human
aaacugagauccuuccuuuuga

SEQ ID NO: 1351891 - RNA, 12 nt, Human
aaacagaacacu

SEQ ID NO: 1351892 - RNA, 21 nt, Human
aaacagaaacaaaaacacuaa

SEQ ID NO: 1351893 - RNA, 19 nt, Human
aaacagaaacaaaaacacu

SEQ ID NO: 1351894 - RNA, 13 nt, Human
aaacagaaacaaa

SEQ ID NO: 1351895 - RNA, 13 nt, Human
aaacagaaugucu

SEQ ID NO: 1351896 - RNA, 13 nt, Human
aaacagaacacuu

SEQ ID NO: 1351897 - RNA, 14 nt, Human
aaacagaacacuua

SEQ ID NO: 1351898 - RNA, 12 nt, Human
aaacagacacug

SEQ ID NO: 1351899 - RNA, 12 nt, Human
aaacagaagccu

SEQ ID NO: 1351900 - RNA, 17 nt, Human
aaaaucucaauauuuca

SEQ ID NO: 1351901 - RNA, 16 nt, Human
aaaaucucaauauuuc

SEQ ID NO: 1351902 - RNA, 19 nt, Human
aaaaucucaaauuucuaaa

SEQ ID NO: 1351903 - RNA, 22 nt, Human
aaaaucucaaauuucuaaaucu

SEQ ID NO: 1351904 - RNA, 15 nt, Human
aaaauugcaaaucuu

SEQ ID NO: 1351905 - RNA, 22 nt, Human
aaacaccuuccagcuccuguaa

SEQ ID NO: 1351906 - RNA, 12 nt, Human
aaaauugccaua

SEQ ID NO: 1351907 - RNA, 21 nt, Human
aaaauugaugggauuugguca

SEQ ID NO: 1351908 - RNA, 12 nt, Human
aaacacuuguaa

SEQ ID NO: 1351909 - RNA, 13 nt, Human
aaacacugugcac

SEQ ID NO: 1351910 - RNA, 22 nt, Human
aaacacugggagaaaugaaaaa

SEQ ID NO: 1351911 - RNA, 22 nt, Human
aaacacucaaguugauuagaaa

SEQ ID NO: 1351912 - RNA, 21 nt, Human
aaacacugggagaaaugaaaa

SEQ ID NO: 1351913 - RNA, 23 nt, Human
aaaaguggguuuuuuaguugaau

SEQ ID NO: 1351914 - RNA, 17 nt, Human
aaaagugggcuugauuc

SEQ ID NO: 1351915 - RNA, 18 nt, Human
aaaagugggcuugauucu

SEQ ID NO: 1351916 - RNA, 20 nt, Human
aaaagugccauuaacaaaug

SEQ ID NO: 1351917 - RNA, 23 nt, Human
aaaaagaaaggcuguuaaauaca

SEQ ID NO: 1351918 - RNA, 19 nt, Human
aaaaagaaaggcuguuaaa

SEQ ID NO: 1351919 - RNA, 14 nt, Human
aaaaagaagaaucu

SEQ ID NO: 1351920 - RNA, 16 nt, Human
aaaaagaaacauuugg

SEQ ID NO: 1351921 - RNA, 13 nt, Human
aaaaucaucagaa

SEQ ID NO: 1351922 - RNA, 15 nt, Human
aaaaucaucagaaag

SEQ ID NO: 1351923 - RNA, 21 nt, Human
aaaaucagguggcuuuugcgg

SEQ ID NO: 1351924 - RNA, 13 nt, Human
aaaauaaagaaug

SEQ ID NO: 1351925 - RNA, 18 nt, Human
aaaaucagcuauuuugug

SEQ ID NO: 1351926 - RNA, 12 nt, Human
aaaauaaagaau

SEQ ID NO: 1351927 - RNA, 21 nt, Human
aaaauaaagaaaagaugcacu

SEQ ID NO: 1351928 - RNA, 14 nt, Human
aaaauaaagaaaua

SEQ ID NO: 1351929 - RNA, 16 nt, Human
aaaauaaagaaaagau

SEQ ID NO: 1351930 - RNA, 20 nt, Human
aaaauccuugcuuaugacau

SEQ ID NO: 1351931 - RNA, 13 nt, Human
aaaauccuugcuu

SEQ ID NO: 1351932 - RNA, 12 nt, Human
aaaaguuauaac

SEQ ID NO: 1351933 - RNA, 19 nt, Human
aaaaguuacauguuugcac

SEQ ID NO: 1351934 - RNA, 18 nt, Human
aaaaguuacauguuugca

SEQ ID NO: 1351935 - RNA, 23 nt, Human
aaaaguuccaagagucuaaagau

SEQ ID NO: 1351936 - RNA, 22 nt, Human
aaaaguuccaagagucuaaaga

SEQ ID NO: 1351937 - RNA, 15 nt, Human
aaaaguuccaagagu

SEQ ID NO: 1351938 - RNA, 13 nt, Human
aaaaguuccaaga

SEQ ID NO: 1351939 - RNA, 14 nt, Human
aaaauaaacaaaua

SEQ ID NO: 1351940 - RNA, 12 nt, Human
aaaauaaacaaa

SEQ ID NO: 1351941 - RNA, 13 nt, Human
aaaaguugaauuu

SEQ ID NO: 1351942 - RNA, 17 nt, Human
aaaauaaaacuuuuuaa

SEQ ID NO: 1351943 - RNA, 14 nt, Human
aaagccaagggcaa

SEQ ID NO: 1351944 - RNA, 23 nt, Human
aaagccaaggagucacugagacc

SEQ ID NO: 1351945 - RNA, 22 nt, Human
aaagccaaggagucacugagac

SEQ ID NO: 1351946 - RNA, 21 nt, Human
aaagccagcguccuccucugu

SEQ ID NO: 1351947 - RNA, 19 nt, Human
aaagccaggucccucucau

SEQ ID NO: 1351948 - RNA, 19 nt, Human
aaagcccuuaggaagaauu

SEQ ID NO: 1351949 - RNA, 13 nt, Human
aaaggcaaggucc

SEQ ID NO: 1351950 - RNA, 14 nt, Human
aaaggcaagcacuu

SEQ ID NO: 1351951 - RNA, 12 nt, Human
aaaggcaaaggc

SEQ ID NO: 1351952 - RNA, 20 nt, Human
aaagccucaagguuuuaggu

SEQ ID NO: 1351953 - RNA, 15 nt, Human
aaagccaggucccuc

SEQ ID NO: 1351954 - RNA, 21 nt, Human
aaaggcacccccgucaagagu

SEQ ID NO: 1351955 - RNA, 13 nt, Human
aaaggccuggggu

SEQ ID NO: 1351956 - RNA, 12 nt, Human
aaaggccuuuaa

SEQ ID NO: 1351957 - RNA, 17 nt, Human
aaaggccuuuaaaauuu

SEQ ID NO: 1351958 - RNA, 12 nt, Human
aaaggccugggg

SEQ ID NO: 1351959 - RNA, 11 nt, Human
aaaggccuggg

SEQ ID NO: 1351960 - RNA, 10 nt, Human
aaaggccugg

SEQ ID NO: 1351961 - RNA, 21 nt, Human
aaaggccuaauucuaugccug

SEQ ID NO: 1351962 - RNA, 15 nt, Human
aaauaaauguaucau

SEQ ID NO: 1351963 - RNA, 22 nt, Human
aaaguccuuuuuuuccaucuuu

SEQ ID NO: 1351964 - RNA, 18 nt, Human
aaaguccuuuuuuuccau

SEQ ID NO: 1351965 - RNA, 16 nt, Human
aaaguccuuuuuuucc

SEQ ID NO: 1351966 - RNA, 23 nt, Human
aaagucauuggcuuuauccucuu

SEQ ID NO: 1351967 - RNA, 20 nt, Human
aaaguggaaaacaaggaagu

SEQ ID NO: 1351968 - RNA, 19 nt, Human
aaaguggaaaacaaggaag

SEQ ID NO: 1351969 - RNA, 13 nt, Human
aaagucauuggcu

SEQ ID NO: 1351970 - RNA, 14 nt, Human
aaagucauuggcuu

SEQ ID NO: 1351971 - RNA, 15 nt, Human
aaagucauuggcuuu

SEQ ID NO: 1351972 - RNA, 17 nt, Human
aaagucauuggcuuuau

SEQ ID NO: 1351973 - RNA, 21 nt, Human
aaagucauuggcuuuauccuc

SEQ ID NO: 1351974 - RNA, 19 nt, Human
aaaguggccaagaagcagu

SEQ ID NO: 1351975 - RNA, 20 nt, Human
aaaguggaacgaaaaugaaa

SEQ ID NO: 1351976 - RNA, 13 nt, Human
aaaguggaacgaa

SEQ ID NO: 1351977 - RNA, 13 nt, Human
aaauaaaacuuuu

SEQ ID NO: 1351978 - RNA, 16 nt, Human
aaauaaaacuuuuuaa

SEQ ID NO: 1351979 - RNA, 17 nt, Human
aaauaaaaggaagccaa

SEQ ID NO: 1351980 - RNA, 19 nt, Human
aaauaaaacuuuuuaaaau

SEQ ID NO: 1351981 - RNA, 19 nt, Human
aaauagcguucuuguaauu

SEQ ID NO: 1351982 - RNA, 18 nt, Human
aaauagcguucuuguaau

SEQ ID NO: 1351983 - RNA, 17 nt, Human
aaauagcguucuuguaa

SEQ ID NO: 1351984 - RNA, 15 nt, Human
aaauagcguucuugu

SEQ ID NO: 1351985 - RNA, 22 nt, Human
aaauaguuaagacaugauuucc

SEQ ID NO: 1351986 - RNA, 17 nt, Human
aaauaguuaagacauga

SEQ ID NO: 1351987 - RNA, 20 nt, Human
aaauaggguauauuuuccua

SEQ ID NO: 1351988 - RNA, 16 nt, Human
aaauagggucuaacuc

SEQ ID NO: 1351989 - RNA, 14 nt, Human
aaauaggcaggaag

SEQ ID NO: 1351990 - RNA, 15 nt, Human
aaauaggguauauuu

SEQ ID NO: 1351991 - RNA, 15 nt, Human
aaauagcuuaugaaa

SEQ ID NO: 1351992 - RNA, 20 nt, Human
aaauagcuuuuuucucugau

SEQ ID NO: 1351993 - RNA, 20 nt, Human
aaauagcguucuuguaauuu

SEQ ID NO: 1351994 - RNA, 21 nt, Human
aaauagcguucuuguaauuuu

SEQ ID NO: 1351995 - RNA, 16 nt, Human
aaauagcuuaugaaaa

SEQ ID NO: 1351996 - RNA, 17 nt, Human
aaauagcuuuuuucucu

SEQ ID NO: 1351997 - RNA, 14 nt, Human
aaauaguuuggaua

SEQ ID NO: 1351998 - RNA, 20 nt, Human
aaaucaaaaucucuccacuu

SEQ ID NO: 1351999 - RNA, 20 nt, Human
aaauauuuauuuuaauaaug

SEQ ID NO: 1352000 - RNA, 13 nt, Human
aaauauuuauuuu

SEQ ID NO: 1352001 - RNA, 15 nt, Human
aaauauuuauuuuaa

SEQ ID NO: 1352002 - RNA, 19 nt, Human
aaaucacauauuuuaaaau

SEQ ID NO: 1352003 - RNA, 23 nt, Human
aaaucaauuacugguccaaaaga

SEQ ID NO: 1352004 - RNA, 19 nt, Human
aaaucaauuacugguccaa

SEQ ID NO: 1352005 - RNA, 18 nt, Human
aaaucaaguauuugggaa

SEQ ID NO: 1352006 - RNA, 23 nt, Human
aaaucaaguauuugggaagugaa

SEQ ID NO: 1352007 - RNA, 20 nt, Human
aaaucaaucuguaaaacuaa

SEQ ID NO: 1352008 - RNA, 21 nt, Human
aaaucuggcuucuggccagga

SEQ ID NO: 1352009 - RNA, 18 nt, Human
aaaucuggcuucuggcca

SEQ ID NO: 1352010 - RNA, 14 nt, Human
aaaucuggcuucug

SEQ ID NO: 1352011 - RNA, 12 nt, Human
aaaucuggaagc

SEQ ID NO: 1352012 - RNA, 17 nt, Human
aagccaauucagacagg

SEQ ID NO: 1352013 - RNA, 20 nt, Human
aagcagcgaccgcccccucc

SEQ ID NO: 1352014 - RNA, 19 nt, Human
aagcagcgaccgcccccuc

SEQ ID NO: 1352015 - RNA, 21 nt, Human
aagcagcguuucuaugacaca

SEQ ID NO: 1352016 - RNA, 22 nt, Human
aagcagcguuucuaugacacau

SEQ ID NO: 1352017 - RNA, 21 nt, Human
aagcagcagccucgccccugg

SEQ ID NO: 1352018 - RNA, 16 nt, Human
aagcagcagccucgcc

SEQ ID NO: 1352019 - RNA, 14 nt, Human
aagcagcagccucg

SEQ ID NO: 1352020 - RNA, 12 nt, Human
aagcagcagccu

SEQ ID NO: 1352021 - RNA, 16 nt, Human
aagcagcacuuauaaa

SEQ ID NO: 1352022 - RNA, 19 nt, Human
aagcagcaacuuguccuag

SEQ ID NO: 1352023 - RNA, 20 nt, Human
aagauucuauaguucuagac

SEQ ID NO: 1352024 - RNA, 22 nt, Human
aagcagccucuccccaggucca

SEQ ID NO: 1352025 - RNA, 17 nt, Human
aagcagccucuccccag

SEQ ID NO: 1352026 - RNA, 16 nt, Human
aagcagccucucccca

SEQ ID NO: 1352027 - RNA, 14 nt, Human
aagcagcguuucua

SEQ ID NO: 1352028 - RNA, 17 nt, Human
aagcagcguuucuauga

SEQ ID NO: 1352029 - RNA, 20 nt, Human
aagcagcguuucuaugacac

SEQ ID NO: 1352030 - RNA, 17 nt, Human
aagccagcguccuccuc

SEQ ID NO: 1352031 - RNA, 14 nt, Human
aagccagcguccuc

SEQ ID NO: 1352032 - RNA, 19 nt, Human
aagccagcguccuccucug

SEQ ID NO: 1352033 - RNA, 22 nt, Human
aagaguuugaugaggcccucca

SEQ ID NO: 1352034 - RNA, 23 nt, Human
aagagugauagucuuuugcuuuu

SEQ ID NO: 1352035 - RNA, 18 nt, Human
aagagugaauucccucac

SEQ ID NO: 1352036 - RNA, 23 nt, Human
aagagucuagauucaaagguucu

SEQ ID NO: 1352037 - RNA, 20 nt, Human
aagagucuagauucaaaggu

SEQ ID NO: 1352038 - RNA, 14 nt, Human
aagagucuagauuc

SEQ ID NO: 1352039 - RNA, 19 nt, Human
aacuuucauuccuucagau

SEQ ID NO: 1352040 - RNA, 14 nt, Human
aacuuuccucgccu

SEQ ID NO: 1352041 - RNA, 16 nt, Human
aacuuuccaaacacca

SEQ ID NO: 1352042 - RNA, 23 nt, Human
aagaguuuugggaguuguaguua

SEQ ID NO: 1352043 - RNA, 13 nt, Human
aagaguuuuggga

SEQ ID NO: 1352044 - RNA, 17 nt, Human
aagauaaacacaagauu

SEQ ID NO: 1352045 - RNA, 14 nt, Human
aagaguuuugggag

SEQ ID NO: 1352046 - RNA, 22 nt, Human
aagauaaacacaagauuggugu

SEQ ID NO: 1352047 - RNA, 13 nt, Human
aagauacugaaau

SEQ ID NO: 1352048 - RNA, 19 nt, Human
aagauucuauaguucuaga

SEQ ID NO: 1352049 - RNA, 17 nt, Human
aagauucuauaguucua

SEQ ID NO: 1352050 - RNA, 15 nt, Human
aagauucuagaugau

SEQ ID NO: 1352051 - RNA, 14 nt, Human
aagauucuagauga

SEQ ID NO: 1352052 - RNA, 13 nt, Human
aagauucuagaug

SEQ ID NO: 1352053 - RNA, 20 nt, Human
aagauucuagaucagaugcu

SEQ ID NO: 1352054 - RNA, 13 nt, Human
aagauucuagauc

SEQ ID NO: 1352055 - RNA, 12 nt, Human
aagauucuagau

SEQ ID NO: 1352056 - RNA, 11 nt, Human
aagauucuaga

SEQ ID NO: 1352057 - RNA, 16 nt, Human
aagauucuaaugauga

SEQ ID NO: 1352058 - RNA, 14 nt, Human
aagauucuaaugau

SEQ ID NO: 1352059 - RNA, 13 nt, Human
aagauucuaaagg

SEQ ID NO: 1352060 - RNA, 12 nt, Human
aagauucuaaag

SEQ ID NO: 1352061 - RNA, 11 nt, Human
aagauucuaaa

SEQ ID NO: 1352062 - RNA, 24 nt, Human
aagauuccggauccuaagcaucua

SEQ ID NO: 1352063 - RNA, 21 nt, Human
aagauuccggauccuaagcau

SEQ ID NO: 1352064 - RNA, 20 nt, Human
aagauuacucaguaauuugu

SEQ ID NO: 1352065 - RNA, 21 nt, Human
aagauuacaaaucagaaguca

SEQ ID NO: 1352066 - RNA, 17 nt, Human
aagauuacuuuuucuuu

SEQ ID NO: 1352067 - RNA, 20 nt, Human
aagauuacaaaucagaaguc

SEQ ID NO: 1352068 - RNA, 20 nt, Human
aagauguuaugguguuuaga

SEQ ID NO: 1352069 - RNA, 20 nt, Human
aagauguucuggauaccauu

SEQ ID NO: 1352070 - RNA, 15 nt, Human
aagauguucuggaua

SEQ ID NO: 1352071 - RNA, 16 nt, Human
aagauguuaugguguu

SEQ ID NO: 1352072 - RNA, 21 nt, Human
aagaugugauauucuaagacu

SEQ ID NO: 1352073 - RNA, 20 nt, Human
aagauacuaaggacguuguu

SEQ ID NO: 1352074 - RNA, 20 nt, Human
aagaugugauauucuaagac

SEQ ID NO: 1352075 - RNA, 14 nt, Human
aagauacugaaaua

SEQ ID NO: 1352076 - RNA, 14 nt, Human
aagcgccuccaacc

SEQ ID NO: 1352077 - RNA, 15 nt, Human
aagcgccuccaaccc

SEQ ID NO: 1352078 - RNA, 14 nt, Human
aagcuaauuugcau

SEQ ID NO: 1352079 - RNA, 22 nt, Human
aagcgcuagaggaagcagccaa

SEQ ID NO: 1352080 - RNA, 16 nt, Human
aagcgccuccaacccu

SEQ ID NO: 1352081 - RNA, 20 nt, Human
aagcgccuccaacccuagca

SEQ ID NO: 1352082 - RNA, 23 nt, Human
aagcuaauuugcauuaaauucac

SEQ ID NO: 1352083 - RNA, 22 nt, Human
aagcuaauuugcauuaaauuca

SEQ ID NO: 1352084 - RNA, 15 nt, Human
aagcuaauuugcauu

SEQ ID NO: 1352085 - RNA, 20 nt, Human
aagcuacagaagaaacuggg

SEQ ID NO: 1352086 - RNA, 20 nt, Human
aaggcagcucuaaaugucaa

SEQ ID NO: 1352087 - RNA, 22 nt, Human
aaggcaggcagggcucuccugg

SEQ ID NO: 1352088 - RNA, 18 nt, Human
aaggcaggcagggcucuc

SEQ ID NO: 1352089 - RNA, 17 nt, Human
aaggcaggcagggcucu

SEQ ID NO: 1352090 - RNA, 16 nt, Human
aaggcaggcagggcuc

SEQ ID NO: 1352091 - RNA, 14 nt, Human
aaggcaggcagggc

SEQ ID NO: 1352092 - RNA, 21 nt, Human
aaggcaggcagggcucuccug

SEQ ID NO: 1352093 - RNA, 22 nt, Human
aaggauucugcuggccucugcg

SEQ ID NO: 1352094 - RNA, 20 nt, Human
aaggauucugcuggccucug

SEQ ID NO: 1352095 - RNA, 23 nt, Human
aaggacuuccuguccagcuccaa

SEQ ID NO: 1352096 - RNA, 19 nt, Human
aagcuacugugugugugaa

SEQ ID NO: 1352097 - RNA, 16 nt, Human
aagcugguuuaauguu

SEQ ID NO: 1352098 - RNA, 18 nt, Human
aagcuguguggcagucug

SEQ ID NO: 1352099 - RNA, 14 nt, Human
aaggacaucagcaa

SEQ ID NO: 1352100 - RNA, 15 nt, Human
aaggacaucagcaaa

SEQ ID NO: 1352101 - RNA, 22 nt, Human
aaggacuuccuguccagcucca

SEQ ID NO: 1352102 - RNA, 21 nt, Human
aaggacuuccuguccagcucc

SEQ ID NO: 1352103 - RNA, 20 nt, Human
aaggacuuccuguccagcuc

SEQ ID NO: 1352104 - RNA, 17 nt, Human
aaggacuuccuguccag

SEQ ID NO: 1352105 - RNA, 17 nt, Human
aaggacaucagcaaaca

SEQ ID NO: 1352106 - RNA, 18 nt, Human
aaguggacaaauuuugag

SEQ ID NO: 1352107 - RNA, 20 nt, Human
aaguggaacgaaaaugaaag

SEQ ID NO: 1352108 - RNA, 13 nt, Human
aagugcuuucuuc

SEQ ID NO: 1352109 - RNA, 14 nt, Human
aaguguacauaugu

SEQ ID NO: 1352110 - RNA, 14 nt, Human
aaguguaauugaga

SEQ ID NO: 1352111 - RNA, 16 nt, Human
aaguugacuuauagua

SEQ ID NO: 1352112 - RNA, 19 nt, Human
aaguugacuuauaguacau

SEQ ID NO: 1352113 - RNA, 20 nt, Human
aaguugacuuauaguacaug

SEQ ID NO: 1352114 - RNA, 21 nt, Human
aaguugacuuauaguacauga

SEQ ID NO: 1352115 - RNA, 19 nt, Human
aaguugagauaguuuucau

SEQ ID NO: 1352116 - RNA, 23 nt, Human
aaguugagauaguuuucauccau

SEQ ID NO: 1352117 - RNA, 18 nt, Human
aaguugagauaguuuuca

SEQ ID NO: 1352118 - RNA, 16 nt, Human
aaguugagauaguuuu

SEQ ID NO: 1352119 - RNA, 23 nt, Human
aaguugacuuauaguacaugaua

SEQ ID NO: 1352120 - RNA, 13 nt, Human
aaguugaggggcu

SEQ ID NO: 1352121 - RNA, 16 nt, Human
aagucuguuuacugca

SEQ ID NO: 1352122 - RNA, 14 nt, Human
aagucuguuuacug

SEQ ID NO: 1352123 - RNA, 13 nt, Human
aagucuguuuacu

SEQ ID NO: 1352124 - RNA, 20 nt, Human
aagucuguugauuaaagaug

SEQ ID NO: 1352125 - RNA, 18 nt, Human
aagucuguccuugaagga

SEQ ID NO: 1352126 - RNA, 21 nt, Human
aagucuguccuugaaggacua

SEQ ID NO: 1352127 - RNA, 16 nt, Human
aagucuguccuugaag

SEQ ID NO: 1352128 - RNA, 13 nt, Human
aagucuguccuug

SEQ ID NO: 1352129 - RNA, 17 nt, Human
aagucucaucuggggag

SEQ ID NO: 1352130 - RNA, 19 nt, Human
aagucucagcuaagcucac

SEQ ID NO: 1352131 - RNA, 15 nt, Human
aagucuccaaagucu

SEQ ID NO: 1352132 - RNA, 16 nt, Human
aagggaaaagucucuu

SEQ ID NO: 1352133 - RNA, 16 nt, Human
aagggccagagccagg

SEQ ID NO: 1352134 - RNA, 15 nt, Human
aagggccagagccag

SEQ ID NO: 1352135 - RNA, 14 nt, Human
aagggccagagcca

SEQ ID NO: 1352136 - RNA, 13 nt, Human
aagggccagagcc

SEQ ID NO: 1352137 - RNA, 12 nt, Human
aagggccagagc

SEQ ID NO: 1352138 - RNA, 11 nt, Human
aagggccagag

SEQ ID NO: 1352139 - RNA, 22 nt, Human
aagggccaaagaaccaaagaag

SEQ ID NO: 1352140 - RNA, 20 nt, Human
aagggccaaagaaccaaaga

SEQ ID NO: 1352141 - RNA, 12 nt, Human
aagggccaaaga

SEQ ID NO: 1352142 - RNA, 14 nt, Human
aagggagggcucug

SEQ ID NO: 1352143 - RNA, 13 nt, Human
aagggagggcucu

SEQ ID NO: 1352144 - RNA, 21 nt, Human
aagggagggcagagcuggugc

SEQ ID NO: 1352145 - RNA, 20 nt, Human
aagggagggcagagcuggug

SEQ ID NO: 1352146 - RNA, 19 nt, Human
aagggagggcagagcuggu

SEQ ID NO: 1352147 - RNA, 18 nt, Human
aagggagggcagagcugg

SEQ ID NO: 1352148 - RNA, 13 nt, Human
aagggagggcaga

SEQ ID NO: 1352149 - RNA, 16 nt, Human
aagggaggcugcugcu

SEQ ID NO: 1352150 - RNA, 19 nt, Human
aagggagggcucugaggcg

SEQ ID NO: 1352151 - RNA, 18 nt, Human
aagggagggcucugaggc

SEQ ID NO: 1352152 - RNA, 17 nt, Human
aagggagggcucugagg

SEQ ID NO: 1352153 - RNA, 16 nt, Human
aagggagggcucugag

SEQ ID NO: 1352154 - RNA, 21 nt, Human
aagggagggcucugaggcgcc

SEQ ID NO: 1352155 - RNA, 17 nt, Human
aagggccagagccaggg

SEQ ID NO: 1352156 - RNA, 19 nt, Human
aaggucauuuuuuuuaaga

SEQ ID NO: 1352157 - RNA, 15 nt, Human
aagggaaccuguguc

SEQ ID NO: 1352158 - RNA, 21 nt, Human
aagggagccaagggauggaca

SEQ ID NO: 1352159 - RNA, 19 nt, Human
aagggagccaagggaugga

SEQ ID NO: 1352160 - RNA, 18 nt, Human
aagggagccaagggaugg

SEQ ID NO: 1352161 - RNA, 14 nt, Human
aagggagccaaggg

SEQ ID NO: 1352162 - RNA, 13 nt, Human
aagggagccaagg

SEQ ID NO: 1352163 - RNA, 12 nt, Human
aagggagccaag

SEQ ID NO: 1352164 - RNA, 11 nt, Human
aagggagccaa

SEQ ID NO: 1352165 - RNA, 9 nt, Human
aagggagcc

SEQ ID NO: 1352166 - RNA, 21 nt, Human
aagucguccuuacuccugugg

SEQ ID NO: 1352167 - RNA, 20 nt, Human
aagucguccuuacuccugug

SEQ ID NO: 1352168 - RNA, 19 nt, Human
aagucguccuuacuccugu

SEQ ID NO: 1352169 - RNA, 14 nt, Human
aagucgguuagugg

SEQ ID NO: 1352170 - RNA, 21 nt, Human
aaguccuuuuuuuccaucuuu

SEQ ID NO: 1352171 - RNA, 22 nt, Human
aagucguccuuacuccuguggg

SEQ ID NO: 1352172 - RNA, 24 nt, Human
aagucguccuuacuccugugggag

SEQ ID NO: 1352173 - RNA, 12 nt, Human
aagucucagcua

SEQ ID NO: 1352174 - RNA, 11 nt, Human
aagucucagcu

SEQ ID NO: 1352175 - RNA, 14 nt, Human
aagucuccaaaguc

SEQ ID NO: 1352176 - RNA, 18 nt, Human
aaguccggccccaguaca

SEQ ID NO: 1352177 - RNA, 17 nt, Human
aaguccuacaagcuaaa

SEQ ID NO: 1352178 - RNA, 12 nt, Human
aaguccaaugug

SEQ ID NO: 1352179 - RNA, 18 nt, Human
aaguccaagcauuuagau

SEQ ID NO: 1352180 - RNA, 14 nt, Human
aaguaguccuguga

SEQ ID NO: 1352181 - RNA, 18 nt, Human
aaguaucccuacuguaau

SEQ ID NO: 1352182 - RNA, 23 nt, Human
aaguaucccuacuguaauuugug

SEQ ID NO: 1352183 - RNA, 20 nt, Human
aaggugacaucggaaaaaua

SEQ ID NO: 1352184 - RNA, 21 nt, Human
aaggugacaucggaaaaauaa

SEQ ID NO: 1352185 - RNA, 18 nt, Human
aaggucguuuuuuucauu

SEQ ID NO: 1352186 - RNA, 20 nt, Human
aaggucguuuuuuucauucc

SEQ ID NO: 1352187 - RNA, 20 nt, Human
aagguccucugucagucaca

SEQ ID NO: 1352188 - RNA, 19 nt, Human
aagguccgguguucuaaga

SEQ ID NO: 1352189 - RNA, 19 nt, Human
aagguccacaggucuagac

SEQ ID NO: 1352190 - RNA, 21 nt, Human
aagguccgguguucuaagaug

SEQ ID NO: 1352191 - RNA, 14 nt, Human
aaggucggaccagc

SEQ ID NO: 1352192 - RNA, 20 nt, Human
aaggugaggagcuugaaacc

SEQ ID NO: 1352193 - RNA, 18 nt, Human
aaugaaagcuacucauag

SEQ ID NO: 1352194 - RNA, 20 nt, Human
aaucucuuuuugcuuucgaa

SEQ ID NO: 1352195 - RNA, 13 nt, Human
aaucucugugccu

SEQ ID NO: 1352196 - RNA, 13 nt, Human
aaucucuguaaag

SEQ ID NO: 1352197 - RNA, 12 nt, Human
aaucucuguaaa

SEQ ID NO: 1352198 - RNA, 13 nt, Human
aaucucugggggc

SEQ ID NO: 1352199 - RNA, 22 nt, Human
aaucucuccacuuucagcuguc

SEQ ID NO: 1352200 - RNA, 20 nt, Human
aaucucuccacuuucagcug

SEQ ID NO: 1352201 - RNA, 19 nt, Human
aaucucuccacuuucagcu

SEQ ID NO: 1352202 - RNA, 23 nt, Human
aaucucuccacuuucagcugucu

SEQ ID NO: 1352203 - RNA, 18 nt, Human
aaucucuccacuuucagc

SEQ ID NO: 1352204 - RNA, 16 nt, Human
aaucucuccacuuuca

SEQ ID NO: 1352205 - RNA, 18 nt, Human
aauccaggcagauccagg

SEQ ID NO: 1352206 - RNA, 17 nt, Human
aauccaggcagauccag

SEQ ID NO: 1352207 - RNA, 17 nt, Human
aaucucaaauuucuaaa

SEQ ID NO: 1352208 - RNA, 18 nt, Human
aaucucaaauuucuaaau

SEQ ID NO: 1352209 - RNA, 15 nt, Human
aauccaaugaaauga

SEQ ID NO: 1352210 - RNA, 16 nt, Human
aaucucaaauuucuaa

SEQ ID NO: 1352211 - RNA, 23 nt, Human
aauccaaguagauaggaagaaag

SEQ ID NO: 1352212 - RNA, 13 nt, Human
aauccagccugcu

SEQ ID NO: 1352213 - RNA, 17 nt, Human
aaugaaguuguagguaa

SEQ ID NO: 1352214 - RNA, 12 nt, Human
aaugaaguuuga

SEQ ID NO: 1352215 - RNA, 13 nt, Human
aaugaaguuugaa

SEQ ID NO: 1352216 - RNA, 14 nt, Human
aaugaaguuugaau

SEQ ID NO: 1352217 - RNA, 15 nt, Human
aaugaaguuugaaug

SEQ ID NO: 1352218 - RNA, 16 nt, Human
aaugaaguuugaaugu

SEQ ID NO: 1352219 - RNA, 21 nt, Human
aaugaaauccugcuucagugu

SEQ ID NO: 1352220 - RNA, 23 nt, Human
aaugauccuguauucagacagau

SEQ ID NO: 1352221 - RNA, 21 nt, Human
aaugauccuguauucagacag

SEQ ID NO: 1352222 - RNA, 19 nt, Human
aaugauccuguauucagac

SEQ ID NO: 1352223 - RNA, 15 nt, Human
aaugauuaugaauua

SEQ ID NO: 1352224 - RNA, 23 nt, Human
aaugauuaugaauuacauuugua

SEQ ID NO: 1352225 - RNA, 21 nt, Human
aaugauuaugaauuacauuug

SEQ ID NO: 1352226 - RNA, 17 nt, Human
aauccaagcaaauguga

SEQ ID NO: 1352227 - RNA, 18 nt, Human
aauccaagcaaaugugaa

SEQ ID NO: 1352228 - RNA, 20 nt, Human
aauauaucuaccccagacua

SEQ ID NO: 1352229 - RNA, 18 nt, Human
aauauauauuaucuuuuc

SEQ ID NO: 1352230 - RNA, 19 nt, Human
aauauauauuaucuuuuca

SEQ ID NO: 1352231 - RNA, 16 nt, Human
aauauauauuaucuuu

SEQ ID NO: 1352232 - RNA, 15 nt, Human
aauauauauuaucuu

SEQ ID NO: 1352233 - RNA, 13 nt, Human
aauauauauuauc

SEQ ID NO: 1352234 - RNA, 23 nt, Human
aauauauauuauacuuguaauua

SEQ ID NO: 1352235 - RNA, 21 nt, Human
aauauauauuauacuuguaau

SEQ ID NO: 1352236 - RNA, 19 nt, Human
aauauauauuauacuugua

SEQ ID NO: 1352237 - RNA, 16 nt, Human
aauauauauuauacuu

SEQ ID NO: 1352238 - RNA, 14 nt, Human
aauauauauuauac

SEQ ID NO: 1352239 - RNA, 13 nt, Human
aauauauauuaua

SEQ ID NO: 1352240 - RNA, 16 nt, Human
aauauacuuguggacu

SEQ ID NO: 1352241 - RNA, 13 nt, Human
aauauacuugugg

SEQ ID NO: 1352242 - RNA, 15 nt, Human
aauauacuuguggac

SEQ ID NO: 1352243 - RNA, 22 nt, Human
aauagacaaauagaaaaugguc

SEQ ID NO: 1352244 - RNA, 17 nt, Human
aauauacuauauuuaug

SEQ ID NO: 1352245 - RNA, 14 nt, Human
aauagaaggugaug

SEQ ID NO: 1352246 - RNA, 16 nt, Human
aauagaauaaaggcag

SEQ ID NO: 1352247 - RNA, 15 nt, Human
aauagaauaaaggca

SEQ ID NO: 1352248 - RNA, 13 nt, Human
aauagaaggugau

SEQ ID NO: 1352249 - RNA, 19 nt, Human
aauagacaaauagaaaaug

SEQ ID NO: 1352250 - RNA, 14 nt, Human
aauagacaaauaga

SEQ ID NO: 1352251 - RNA, 16 nt, Human
aauagaauuauaacug

SEQ ID NO: 1352252 - RNA, 13 nt, Human
aauagacaauuua

SEQ ID NO: 1352253 - RNA, 17 nt, Human
aaucaagucuguuuacu

SEQ ID NO: 1352254 - RNA, 15 nt, Human
aaucaagucuguuua

SEQ ID NO: 1352255 - RNA, 18 nt, Human
aaucaagggucaggccuu

SEQ ID NO: 1352256 - RNA, 15 nt, Human
aaucaagggucaggc

SEQ ID NO: 1352257 - RNA, 14 nt, Human
aaucaagggucagg

SEQ ID NO: 1352258 - RNA, 18 nt, Human
aaucacaugaauuauuac

SEQ ID NO: 1352259 - RNA, 21 nt, Human
aaucaagucuguuuacugcaa

SEQ ID NO: 1352260 - RNA, 18 nt, Human
aaucaccacaaacuguaa

SEQ ID NO: 1352261 - RNA, 16 nt, Human
aauacuguauuuugua

SEQ ID NO: 1352262 - RNA, 21 nt, Human
aauacugcugagauacauaca

SEQ ID NO: 1352263 - RNA, 18 nt, Human
aauacugcugagauacau

SEQ ID NO: 1352264 - RNA, 15 nt, Human
aauacugcugagaua

SEQ ID NO: 1352265 - RNA, 13 nt, Human
aauacugcugaga

SEQ ID NO: 1352266 - RNA, 23 nt, Human
aauacugcuacagcaauuucuaa

SEQ ID NO: 1352267 - RNA, 14 nt, Human
aauacugcaaauca

SEQ ID NO: 1352268 - RNA, 10 nt, Human
aauacuuuuu

SEQ ID NO: 1352269 - RNA, 15 nt, Human
aauacuuuuuacaau

SEQ ID NO: 1352270 - RNA, 11 nt, Human
aauacuuuugc

SEQ ID NO: 1352271 - RNA, 20 nt, Human
aauacuuuuacucugccuac

SEQ ID NO: 1352272 - RNA, 18 nt, Human
aauacuuuuacucugccu

SEQ ID NO: 1352273 - RNA, 15 nt, Human
aauacuuuuacucug

SEQ ID NO: 1352274 - RNA, 20 nt, Human
aauacuuugaauguguuuca

SEQ ID NO: 1352275 - RNA, 17 nt, Human
aauacuuugaauguguu

SEQ ID NO: 1352276 - RNA, 23 nt, Human
aauacuuugcagcacagcugaga

SEQ ID NO: 1352277 - RNA, 16 nt, Human
aauacuuugaaugugu

SEQ ID NO: 1352278 - RNA, 15 nt, Human
aauacuuugaaugug

SEQ ID NO: 1352279 - RNA, 14 nt, Human
aauacuuugaaugu

SEQ ID NO: 1352280 - RNA, 13 nt, Human
aauacucaaauga

SEQ ID NO: 1352281 - RNA, 20 nt, Human
aauacucaaaugaguaacau

SEQ ID NO: 1352282 - RNA, 21 nt, Human
aauacuaccuugaaaauaaga

SEQ ID NO: 1352283 - RNA, 18 nt, Human
aauacuaccuugaaaaua

SEQ ID NO: 1352284 - RNA, 17 nt, Human
aauacuaccuugaaaau

SEQ ID NO: 1352285 - RNA, 15 nt, Human
aauacugaacaucug

SEQ ID NO: 1352286 - RNA, 13 nt, Human
aauacucuuauau

SEQ ID NO: 1352287 - RNA, 23 nt, Human
aaguugcugcuucucccaggcaa

SEQ ID NO: 1352288 - RNA, 21 nt, Human
aaguugcugcuucucccaggc

SEQ ID NO: 1352289 - RNA, 14 nt, Human
aaguugcugcuucu

SEQ ID NO: 1352290 - RNA, 12 nt, Human
aaguugcugcuu

SEQ ID NO: 1352291 - RNA, 15 nt, Human
aaugccuuuucccaa

SEQ ID NO: 1352292 - RNA, 23 nt, Human
aaugcgguuauaaaaaaugguuc

SEQ ID NO: 1352293 - RNA, 22 nt, Human
aaugcgguuauaaaaaaugguu

SEQ ID NO: 1352294 - RNA, 21 nt, Human
aaugcgguuauaaaaaauggu

SEQ ID NO: 1352295 - RNA, 18 nt, Human
aaugcgggugagaguaau

SEQ ID NO: 1352296 - RNA, 18 nt, Human
aaugcgugcauaccacuu

SEQ ID NO: 1352297 - RNA, 19 nt, Human
aaugcgugcauaccacuuu

SEQ ID NO: 1352298 - RNA, 23 nt, Human
aaugccuuacccucauguucuua

SEQ ID NO: 1352299 - RNA, 19 nt, Human
aaugucacuuuuugaggca

SEQ ID NO: 1352300 - RNA, 20 nt, Human
aaugucacuuuuugaggcaa

SEQ ID NO: 1352301 - RNA, 15 nt, Human
aaugguuguauuaga

SEQ ID NO: 1352302 - RNA, 16 nt, Human
aaugguuguauuagau

SEQ ID NO: 1352303 - RNA, 18 nt, Human
aaugguuguauuagaugu

SEQ ID NO: 1352304 - RNA, 15 nt, Human
aaugguucagaauua

SEQ ID NO: 1352305 - RNA, 22 nt, Human
aaugguucagaauuaaacuuuu

SEQ ID NO: 1352306 - RNA, 12 nt, Human
aaugguuguauu

SEQ ID NO: 1352307 - RNA, 13 nt, Human
aaugguuguauua

SEQ ID NO: 1352308 - RNA, 19 nt, Human
aaugucauuuugguacuuu

SEQ ID NO: 1352309 - RNA, 14 nt, Human
aaugucauuuuggu

SEQ ID NO: 1352310 - RNA, 19 nt, Human
aaugucauugaaaaacuaa

SEQ ID NO: 1352311 - RNA, 14 nt, Human
aaugucauugaaaa

SEQ ID NO: 1352312 - RNA, 17 nt, Human
aaugucaugcugccuua

SEQ ID NO: 1352313 - RNA, 19 nt, Human
aaugucaugcugccuuauu

SEQ ID NO: 1352314 - RNA, 16 nt, Human
aaugucaugcugccuu

SEQ ID NO: 1352315 - RNA, 15 nt, Human
aaugucaugcugccu

SEQ ID NO: 1352316 - RNA, 17 nt, Human
aaugcuagguucuaccu

SEQ ID NO: 1352317 - RNA, 15 nt, Human
aaugcuagguucuac

SEQ ID NO: 1352318 - RNA, 14 nt, Human
aaugcuagguucua

SEQ ID NO: 1352319 - RNA, 13 nt, Human
aaugcuagguucu

SEQ ID NO: 1352320 - RNA, 14 nt, Human
aauggugugggaga

SEQ ID NO: 1352321 - RNA, 15 nt, Human
aaugguguagaacac

SEQ ID NO: 1352322 - RNA, 23 nt, Human
aaugcuggcuauagaugucuuuu

SEQ ID NO: 1352323 - RNA, 19 nt, Human
aaugguguagaacacuaau

SEQ ID NO: 1352324 - RNA, 22 nt, Human
aaugcuggcuauagaugucuuu

SEQ ID NO: 1352325 - RNA, 21 nt, Human
aaugucuuuaaugcaauauac

SEQ ID NO: 1352326 - RNA, 20 nt, Human
aaugucuuuaaugcaauaua

SEQ ID NO: 1352327 - RNA, 17 nt, Human
aaugucuuuaaugcaau

SEQ ID NO: 1352328 - RNA, 23 nt, Human
aauguuuacacucuuuguaagag

SEQ ID NO: 1352329 - RNA, 20 nt, Human
aauguuuacacucuuuguaa

SEQ ID NO: 1352330 - RNA, 15 nt, Human
aauguuuaaaccuuu

SEQ ID NO: 1352331 - RNA, 23 nt, Human
aauguuucuucuagguucuaaaa

SEQ ID NO: 1352332 - RNA, 22 nt, Human
aauguuucuucuagguucuaaa

SEQ ID NO: 1352333 - RNA, 23 nt, Human
aauguuucaaacauauauaacaa

SEQ ID NO: 1352334 - RNA, 24 nt, Human
aauuaaaaaagauaaacacaagau

SEQ ID NO: 1352335 - RNA, 20 nt, Human
aauuaaaaaagauaaacaca

SEQ ID NO: 1352336 - RNA, 19 nt, Human
aauuaaaaaagauaaacac

SEQ ID NO: 1352337 - RNA, 18 nt, Human
aauuaaaaaagauaaaca

SEQ ID NO: 1352338 - RNA, 17 nt, Human
aauuaaaaaagauaaac

SEQ ID NO: 1352339 - RNA, 16 nt, Human
aauuaaaaaagauaaa

SEQ ID NO: 1352340 - RNA, 15 nt, Human
aauuaaaaaagauaa

SEQ ID NO: 1352341 - RNA, 13 nt, Human
aauuaaaaaagau

SEQ ID NO: 1352342 - RNA, 21 nt, Human
aauuaaaaaaaaagaucuguu

SEQ ID NO: 1352343 - RNA, 16 nt, Human
aauguuucuggauuuc

SEQ ID NO: 1352344 - RNA, 22 nt, Human
aauguuuuuuuuuaaagacuuu

SEQ ID NO: 1352345 - RNA, 15 nt, Human
aauguuuuuuuuuaa

SEQ ID NO: 1352346 - RNA, 20 nt, Human
aauguuuuuuuuuaaagacu

SEQ ID NO: 1352347 - RNA, 22 nt, Human
agaaaaugcgguuauaaaaaau

SEQ ID NO: 1352348 - RNA, 14 nt, Human
agaaaggccuuuaa

SEQ ID NO: 1352349 - RNA, 15 nt, Human
agaaaggccuuuaaa

SEQ ID NO: 1352350 - RNA, 16 nt, Human
agaaaaugauacagca

SEQ ID NO: 1352351 - RNA, 15 nt, Human
agaaaaucuuuauaa

SEQ ID NO: 1352352 - RNA, 13 nt, Human
agaaaaucacuua

SEQ ID NO: 1352353 - RNA, 17 nt, Human
agaaaggggagcccacu

SEQ ID NO: 1352354 - RNA, 16 nt, Human
agaaaggggagcccac

SEQ ID NO: 1352355 - RNA, 15 nt, Human
agaaaggggagccca

SEQ ID NO: 1352356 - RNA, 14 nt, Human
agaaaggggagccc

SEQ ID NO: 1352357 - RNA, 22 nt, Human
agaaagggcccugggccugccu

SEQ ID NO: 1352358 - RNA, 20 nt, Human
agaaagggcccugggccugc

SEQ ID NO: 1352359 - RNA, 16 nt, Human
agaaagggcccugggc

SEQ ID NO: 1352360 - RNA, 20 nt, Human
agaaagggagggcucugagg

SEQ ID NO: 1352361 - RNA, 21 nt, Human
agaaagggagggcucugaggc

SEQ ID NO: 1352362 - RNA, 19 nt, Human
agaaagggagggcucugag

SEQ ID NO: 1352363 - RNA, 18 nt, Human
agaaagggagggcucuga

SEQ ID NO: 1352364 - RNA, 17 nt, Human
agaaagggagggcucug

SEQ ID NO: 1352365 - RNA, 16 nt, Human
agaaagggagggcucu

SEQ ID NO: 1352366 - RNA, 15 nt, Human
agaaagggagggcuc

SEQ ID NO: 1352367 - RNA, 14 nt, Human
agaaagggagggcu

SEQ ID NO: 1352368 - RNA, 13 nt, Human
agaaagggagggc

SEQ ID NO: 1352369 - RNA, 22 nt, Human
agaaaggcuguuaaauacagga

SEQ ID NO: 1352370 - RNA, 21 nt, Human
agaaaggcuguuaaauacagg

SEQ ID NO: 1352371 - RNA, 16 nt, Human
agaaaggcuguuaaau

SEQ ID NO: 1352372 - RNA, 15 nt, Human
agaaaggcuguuaaa

SEQ ID NO: 1352373 - RNA, 19 nt, Human
agaaaggccuuuaaaauuu

SEQ ID NO: 1352374 - RNA, 16 nt, Human
agaaaggccuuuaaaa

SEQ ID NO: 1352375 - RNA, 17 nt, Human
agaaaggccuuuaaaau

SEQ ID NO: 1352376 - RNA, 23 nt, Human
agaaaguggaaaacaaggaaguc

SEQ ID NO: 1352377 - RNA, 20 nt, Human
agaaaguggaaaacaaggaa

SEQ ID NO: 1352378 - RNA, 19 nt, Human
agaaaguggaaaacaagga

SEQ ID NO: 1352379 - RNA, 22 nt, Human
agaaagugccuuucaggaucua

SEQ ID NO: 1352380 - RNA, 21 nt, Human
agaaagugccuuucaggaucu

SEQ ID NO: 1352381 - RNA, 18 nt, Human
agaaagugccuuucagga

SEQ ID NO: 1352382 - RNA, 17 nt, Human
agaaagugccuuucagg

SEQ ID NO: 1352383 - RNA, 16 nt, Human
agaaagugccuuucag

SEQ ID NO: 1352384 - RNA, 14 nt, Human
agaaagugccuuuc

SEQ ID NO: 1352385 - RNA, 22 nt, Human
agaaagugccugacacacuaac

SEQ ID NO: 1352386 - RNA, 19 nt, Human
agaaagugccugacacacu

SEQ ID NO: 1352387 - RNA, 15 nt, Human
agaaagugccugaca

SEQ ID NO: 1352388 - RNA, 16 nt, Human
agaaagguuaguauca

SEQ ID NO: 1352389 - RNA, 23 nt, Human
agaaagggcccugggccugccuc

SEQ ID NO: 1352390 - RNA, 17 nt, Human
agaaaguguauuuggaa

SEQ ID NO: 1352391 - RNA, 16 nt, Human
agaaaguguauuugga

SEQ ID NO: 1352392 - RNA, 13 nt, Human
agaaaguguauuu

SEQ ID NO: 1352393 - RNA, 11 nt, Human
agaaaguguau

SEQ ID NO: 1352394 - RNA, 18 nt, Human
agaaauaaaaggaagcca

SEQ ID NO: 1352395 - RNA, 17 nt, Human
agaaauaaaaggaagcc

SEQ ID NO: 1352396 - RNA, 12 nt, Human
agaaaguugauu

SEQ ID NO: 1352397 - RNA, 23 nt, Human
agaaauaaguuuuuguuucacag

SEQ ID NO: 1352398 - RNA, 16 nt, Human
agaaauaaguuuuugu

SEQ ID NO: 1352399 - RNA, 14 nt, Human
agaaauaaguuuuu

SEQ ID NO: 1352400 - RNA, 13 nt, Human
agaaauaaguuuu

SEQ ID NO: 1352401 - RNA, 19 nt, Human
agaaauaagugcccucucc

SEQ ID NO: 1352402 - RNA, 17 nt, Human
agaaauaaauuuauuuc

SEQ ID NO: 1352403 - RNA, 22 nt, Human
acuuuauuuucuauaauuuaaa

SEQ ID NO: 1352404 - RNA, 13 nt, Human
acuuuaucacuua

SEQ ID NO: 1352405 - RNA, 15 nt, Human
acuuuaucacuuaaa

SEQ ID NO: 1352406 - RNA, 22 nt, Human
acuuuaucuugaauaauguaag

SEQ ID NO: 1352407 - RNA, 13 nt, Human
acuuuuaauucau

SEQ ID NO: 1352408 - RNA, 18 nt, Human
acuuuuaaugaacaaaug

SEQ ID NO: 1352409 - RNA, 20 nt, Human
acuuuuaaacuguguacaua

SEQ ID NO: 1352410 - RNA, 21 nt, Human
acuuuuacucugccuacagaa

SEQ ID NO: 1352411 - RNA, 19 nt, Human
acuuuuacucugccuacag

SEQ ID NO: 1352412 - RNA, 16 nt, Human
acuuuuacucugccua

SEQ ID NO: 1352413 - RNA, 15 nt, Human
acuuuuacucugccu

SEQ ID NO: 1352414 - RNA, 21 nt, Human
acuuuuacaaguaacaaaaau

SEQ ID NO: 1352415 - RNA, 14 nt, Human
acuuuuacaaguaa

SEQ ID NO: 1352416 - RNA, 13 nt, Human
acuuuuacaagua

SEQ ID NO: 1352417 - RNA, 13 nt, Human
acuuuuauaaacu

SEQ ID NO: 1352418 - RNA, 12 nt, Human
acuuuuaugaua

SEQ ID NO: 1352419 - RNA, 16 nt, Human
acuuuuaugauacuug

SEQ ID NO: 1352420 - RNA, 15 nt, Human
acuuuucccacucca

SEQ ID NO: 1352421 - RNA, 14 nt, Human
acuuuucccacucc

SEQ ID NO: 1352422 - RNA, 16 nt, Human
acuuuuaguaaaguca

SEQ ID NO: 1352423 - RNA, 15 nt, Human
acuuuuauaaacuuu

SEQ ID NO: 1352424 - RNA, 23 nt, Human
acuuuuaugauacuugaaaauua

SEQ ID NO: 1352425 - RNA, 19 nt, Human
agaaaauaguggugugauu

SEQ ID NO: 1352426 - RNA, 15 nt, Human
acuuuugcccuuuga

SEQ ID NO: 1352427 - RNA, 12 nt, Human
acuuuugacaaa

SEQ ID NO: 1352428 - RNA, 22 nt, Human
agaaaauaaggcacccaucugu

SEQ ID NO: 1352429 - RNA, 22 nt, Human
acuuuugcuguaauguuaauau

SEQ ID NO: 1352430 - RNA, 14 nt, Human
acuuuuggaaggua

SEQ ID NO: 1352431 - RNA, 22 nt, Human
acuuauuuuugacaguguugaa

SEQ ID NO: 1352432 - RNA, 19 nt, Human
acuuauuuuugacaguguu

SEQ ID NO: 1352433 - RNA, 16 nt, Human
acuuauuuuugacagu

SEQ ID NO: 1352434 - RNA, 14 nt, Human
acuuauuuuugaca

SEQ ID NO: 1352435 - RNA, 19 nt, Human
acuguuuggaaauaaaucu

SEQ ID NO: 1352436 - RNA, 17 nt, Human
acuuauuuaugaaccug

SEQ ID NO: 1352437 - RNA, 23 nt, Human
acuguuuggaaauugauuuugaa

SEQ ID NO: 1352438 - RNA, 22 nt, Human
acuguuugccuucuacuuuuaa

SEQ ID NO: 1352439 - RNA, 21 nt, Human
acuguuugccuucuacuuuua

SEQ ID NO: 1352440 - RNA, 15 nt, Human
acuucaaaaguuugu

SEQ ID NO: 1352441 - RNA, 16 nt, Human
acuucagaaagacuug

SEQ ID NO: 1352442 - RNA, 12 nt, Human
acuucagaaaga

SEQ ID NO: 1352443 - RNA, 21 nt, Human
acuucuguaauuguguggauu

SEQ ID NO: 1352444 - RNA, 15 nt, Human
acuucuguaauugug

SEQ ID NO: 1352445 - RNA, 22 nt, Human
acuucugggcuucaucuggcaa

SEQ ID NO: 1352446 - RNA, 19 nt, Human
acuucugggcuucaucugg

SEQ ID NO: 1352447 - RNA, 17 nt, Human
acuucugggcuucaucu

SEQ ID NO: 1352448 - RNA, 12 nt, Human
acuucuugaagg

SEQ ID NO: 1352449 - RNA, 23 nt, Human
acuucuuauggaauugauuugca

SEQ ID NO: 1352450 - RNA, 21 nt, Human
acuucuuauggaauugauuug

SEQ ID NO: 1352451 - RNA, 20 nt, Human
acuucuuauggaauugauuu

SEQ ID NO: 1352452 - RNA, 17 nt, Human
acuucuuauggaauuga

SEQ ID NO: 1352453 - RNA, 16 nt, Human
acuucuuauggaauug

SEQ ID NO: 1352454 - RNA, 21 nt, Human
acuuggggaguuaagaccugg

SEQ ID NO: 1352455 - RNA, 23 nt, Human
acuugggcacccccagccugggc

SEQ ID NO: 1352456 - RNA, 22 nt, Human
acuugggcacccccagccuggg

SEQ ID NO: 1352457 - RNA, 21 nt, Human
acuugggcacccccagccugg

SEQ ID NO: 1352458 - RNA, 20 nt, Human
acuugggcacccccagccug

SEQ ID NO: 1352459 - RNA, 17 nt, Human
acuugggcacccccagc

SEQ ID NO: 1352460 - RNA, 13 nt, Human
acuugggcacccc

SEQ ID NO: 1352461 - RNA, 16 nt, Human
acuucuugaaggugcu

SEQ ID NO: 1352462 - RNA, 13 nt, Human
acuucuugaaggu

SEQ ID NO: 1352463 - RNA, 14 nt, Human
acuugguuuugcua

SEQ ID NO: 1352464 - RNA, 20 nt, Human
acuugguugguaggguggga

SEQ ID NO: 1352465 - RNA, 23 nt, Human
acuuggggaguuaagaccuggca

SEQ ID NO: 1352466 - RNA, 18 nt, Human
acuuguaaaggaauuuaa

SEQ ID NO: 1352467 - RNA, 23 nt, Human
acucuguccugaaggccugaggu

SEQ ID NO: 1352468 - RNA, 20 nt, Human
acucuguccugaaggccuga

SEQ ID NO: 1352469 - RNA, 19 nt, Human
acucuguccugaaggccug

SEQ ID NO: 1352470 - RNA, 13 nt, Human
acucuguccugaa

SEQ ID NO: 1352471 - RNA, 12 nt, Human
acucuguccuga

SEQ ID NO: 1352472 - RNA, 11 nt, Human
acucugugcca

SEQ ID NO: 1352473 - RNA, 15 nt, Human
acucugucuuguguu

SEQ ID NO: 1352474 - RNA, 22 nt, Human
acucuguccugaaggccugagg

SEQ ID NO: 1352475 - RNA, 12 nt, Human
acugccagcauu

SEQ ID NO: 1352476 - RNA, 15 nt, Human
acuggucuguaggga

SEQ ID NO: 1352477 - RNA, 12 nt, Human
acuggucucucu

SEQ ID NO: 1352478 - RNA, 22 nt, Human
acuggucacggauuugugucug

SEQ ID NO: 1352479 - RNA, 22 nt, Human
acugguccaaaagauugcugaa

SEQ ID NO: 1352480 - RNA, 21 nt, Human
acugguccaaaagauugcuga

SEQ ID NO: 1352481 - RNA, 18 nt, Human
acugguauguaaaagaaa

SEQ ID NO: 1352482 - RNA, 15 nt, Human
acugguaggaccaag

SEQ ID NO: 1352483 - RNA, 18 nt, Human
acugguaggaaacuaggu

SEQ ID NO: 1352484 - RNA, 15 nt, Human
acuggagcagaaggg

SEQ ID NO: 1352485 - RNA, 12 nt, Human
acuggagcacaa

SEQ ID NO: 1352486 - RNA, 21 nt, Human
acuggagacugugugugcccu

SEQ ID NO: 1352487 - RNA, 13 nt, Human
acuggagacugug

SEQ ID NO: 1352488 - RNA, 19 nt, Human
acuggaagcuaauuugcau

SEQ ID NO: 1352489 - RNA, 14 nt, Human
acugccaggaggga

SEQ ID NO: 1352490 - RNA, 13 nt, Human
acugccaggaggg

SEQ ID NO: 1352491 - RNA, 12 nt, Human
acugccaggagg

SEQ ID NO: 1352492 - RNA, 15 nt, Human
acugccaggagggac

SEQ ID NO: 1352493 - RNA, 21 nt, Human
acugccaggagggacaaagga

SEQ ID NO: 1352494 - RNA, 19 nt, Human
acugcccauggacaggcug

SEQ ID NO: 1352495 - RNA, 21 nt, Human
acugcccauggacaggcuggc

SEQ ID NO: 1352496 - RNA, 16 nt, Human
acuggaagcuaauuug

SEQ ID NO: 1352497 - RNA, 23 nt, Human
acugugccucagagaccagggcu

SEQ ID NO: 1352498 - RNA, 22 nt, Human
acugugccucagagaccagggc

SEQ ID NO: 1352499 - RNA, 20 nt, Human
acugugccucagagaccagg

SEQ ID NO: 1352500 - RNA, 19 nt, Human
acugugccucagagaccag

SEQ ID NO: 1352501 - RNA, 21 nt, Human
acugugacccccagcuccggc

SEQ ID NO: 1352502 - RNA, 19 nt, Human
acugugacccccagcuccg

SEQ ID NO: 1352503 - RNA, 16 nt, Human
acugugaaggacccuu

SEQ ID NO: 1352504 - RNA, 15 nt, Human
acugugaaggacccu

SEQ ID NO: 1352505 - RNA, 18 nt, Human
acugucucucaugaaccu

SEQ ID NO: 1352506 - RNA, 17 nt, Human
acugucucucaugaacc

SEQ ID NO: 1352507 - RNA, 15 nt, Human
acugucucucaugaa

SEQ ID NO: 1352508 - RNA, 21 nt, Human
acugucucgaugcaaugaaca

SEQ ID NO: 1352509 - RNA, 22 nt, Human
acugucuccauggcccugcaaa

SEQ ID NO: 1352510 - RNA, 17 nt, Human
acugguuugaagaaugu

SEQ ID NO: 1352511 - RNA, 20 nt, Human
acugguuugaagaauguuaa

SEQ ID NO: 1352512 - RNA, 13 nt, Human
acuggucugcugu

SEQ ID NO: 1352513 - RNA, 18 nt, Human
acugguuccauggccucu

SEQ ID NO: 1352514 - RNA, 22 nt, Human
acuguaagaaaauaucacuugu

SEQ ID NO: 1352515 - RNA, 13 nt, Human
acuguaagaaaau

SEQ ID NO: 1352516 - RNA, 19 nt, Human
acuguaagaaaauaucacu

SEQ ID NO: 1352517 - RNA, 12 nt, Human
acucuguaauug

SEQ ID NO: 1352518 - RNA, 17 nt, Human
acucuggugccuccaga

SEQ ID NO: 1352519 - RNA, 16 nt, Human
acucuggugccuccag

SEQ ID NO: 1352520 - RNA, 14 nt, Human
acucuggugccucc

SEQ ID NO: 1352521 - RNA, 19 nt, Human
acucugguggcacaggagu

SEQ ID NO: 1352522 - RNA, 20 nt, Human
acucuggugagucaccacuu

SEQ ID NO: 1352523 - RNA, 12 nt, Human
acucuauucuuu

SEQ ID NO: 1352524 - RNA, 15 nt, Human
acucuagucaaugac

SEQ ID NO: 1352525 - RNA, 13 nt, Human
acucuagucaaug

SEQ ID NO: 1352526 - RNA, 11 nt, Human
acucuguccug

SEQ ID NO: 1352527 - RNA, 15 nt, Human
acucuguaauugcaa

SEQ ID NO: 1352528 - RNA, 14 nt, Human
acucuguaauugca

SEQ ID NO: 1352529 - RNA, 13 nt, Human
acucuguaauugc

SEQ ID NO: 1352530 - RNA, 17 nt, Human
acucuagucaaugacau

SEQ ID NO: 1352531 - RNA, 23 nt, Human
acucuaucaaguauuauaccuuu

SEQ ID NO: 1352532 - RNA, 23 nt, Human
acucauauaauuauauguuguaa

SEQ ID NO: 1352533 - RNA, 19 nt, Human
acucauauaauuauauguu

SEQ ID NO: 1352534 - RNA, 18 nt, Human
acucauauaauuauaugu

SEQ ID NO: 1352535 - RNA, 17 nt, Human
acucauauaauuauaug

SEQ ID NO: 1352536 - RNA, 23 nt, Human
acucauacacucguaugauacuu

SEQ ID NO: 1352537 - RNA, 20 nt, Human
acucaucaauggggccaguc

SEQ ID NO: 1352538 - RNA, 15 nt, Human
acucauauuuucaug

SEQ ID NO: 1352539 - RNA, 17 nt, Human
acuagauguaguauuuu

SEQ ID NO: 1352540 - RNA, 16 nt, Human
acuagauguaguauuu

SEQ ID NO: 1352541 - RNA, 13 nt, Human
acuagcauaucug

SEQ ID NO: 1352542 - RNA, 13 nt, Human
acuagauguagua

SEQ ID NO: 1352543 - RNA, 12 nt, Human
acuagauguagu

SEQ ID NO: 1352544 - RNA, 18 nt, Human
acuagauggaccugccug

SEQ ID NO: 1352545 - RNA, 20 nt, Human
acuagauggaccugccugca

SEQ ID NO: 1352546 - RNA, 23 nt, Human
acucaaauggggccagauccagc

SEQ ID NO: 1352547 - RNA, 22 nt, Human
acucaaauggggccagauccag

SEQ ID NO: 1352548 - RNA, 21 nt, Human
acucaaauggggccagaucca

SEQ ID NO: 1352549 - RNA, 20 nt, Human
acucaaauggggccagaucc

SEQ ID NO: 1352550 - RNA, 17 nt, Human
acucaaauggggccaga

SEQ ID NO: 1352551 - RNA, 16 nt, Human
acucaaaugaguaaca

SEQ ID NO: 1352552 - RNA, 14 nt, Human
acucaaaugaguaa

SEQ ID NO: 1352553 - RNA, 17 nt, Human
acucaaaugaguaacau

SEQ ID NO: 1352554 - RNA, 17 nt, Human
acucaaauguucuaagu

SEQ ID NO: 1352555 - RNA, 16 nt, Human
acucaaauguucuaag

SEQ ID NO: 1352556 - RNA, 20 nt, Human
acucaaaugugaguguuuuu

SEQ ID NO: 1352557 - RNA, 18 nt, Human
acucagccacccugaguu

SEQ ID NO: 1352558 - RNA, 17 nt, Human
acucagccacccugagu

SEQ ID NO: 1352559 - RNA, 16 nt, Human
acucaggagccuguga

SEQ ID NO: 1352560 - RNA, 20 nt, Human
acucagcuuucuuuaaaguu

SEQ ID NO: 1352561 - RNA, 15 nt, Human
acucagguggcccua

SEQ ID NO: 1352562 - RNA, 16 nt, Human
acucagggcuccuggg

SEQ ID NO: 1352563 - RNA, 14 nt, Human
acucaguaauuugu

SEQ ID NO: 1352564 - RNA, 17 nt, Human
acucagucucucuucuc

SEQ ID NO: 1352565 - RNA, 17 nt, Human
acuauuuaacugacuau

SEQ ID NO: 1352566 - RNA, 16 nt, Human
acuauuuaacugacua

SEQ ID NO: 1352567 - RNA, 15 nt, Human
acuauuuaacugacu

SEQ ID NO: 1352568 - RNA, 14 nt, Human
acuauuuaacugac

SEQ ID NO: 1352569 - RNA, 13 nt, Human
acuauuuaacuga

SEQ ID NO: 1352570 - RNA, 12 nt, Human
acuauuuaacug

SEQ ID NO: 1352571 - RNA, 20 nt, Human
acuauuuaaagccuccucau

SEQ ID NO: 1352572 - RNA, 11 nt, Human
acuauuuaaag

SEQ ID NO: 1352573 - RNA, 18 nt, Human
acuauuuuucagaaucuc

SEQ ID NO: 1352574 - RNA, 16 nt, Human
acuagccaaaccucac

SEQ ID NO: 1352575 - RNA, 15 nt, Human
acuagccaaaccuca

SEQ ID NO: 1352576 - RNA, 19 nt, Human
acuagcauaucugccuuua

SEQ ID NO: 1352577 - RNA, 15 nt, Human
acuagcauaucugcc

SEQ ID NO: 1352578 - RNA, 17 nt, Human
acuagcauaucugccuu

SEQ ID NO: 1352579 - RNA, 20 nt, Human
acuaguauuucuaugaaaua

SEQ ID NO: 1352580 - RNA, 14 nt, Human
acuaauuucaaaau

SEQ ID NO: 1352581 - RNA, 23 nt, Human
acuaauuccacaccuuuuauuga

SEQ ID NO: 1352582 - RNA, 19 nt, Human
acuaauuucaaaaugcuuu

SEQ ID NO: 1352583 - RNA, 16 nt, Human
acuaauuucaaaaugc

SEQ ID NO: 1352584 - RNA, 20 nt, Human
acuaauuucaaaaugcuuuu

SEQ ID NO: 1352585 - RNA, 18 nt, Human
acuaagccagcaccggac

SEQ ID NO: 1352586 - RNA, 15 nt, Human
acuaauuccacaccu

SEQ ID NO: 1352587 - RNA, 15 nt, Human
acuaaguuuuuaugg

SEQ ID NO: 1352588 - RNA, 21 nt, Human
acgugaccggacuuuucugca

SEQ ID NO: 1352589 - RNA, 21 nt, Human
acgugacacaaacacacacaa

SEQ ID NO: 1352590 - RNA, 20 nt, Human
acgugacacaaacacacaca

SEQ ID NO: 1352591 - RNA, 17 nt, Human
acuaagagaaguuguaa

SEQ ID NO: 1352592 - RNA, 16 nt, Human
acuaagagaaguugua

SEQ ID NO: 1352593 - RNA, 15 nt, Human
acuaagagagaauga

SEQ ID NO: 1352594 - RNA, 13 nt, Human
acuaagagagaau

SEQ ID NO: 1352595 - RNA, 21 nt, Human
acgcaugcaguguuggggaug

SEQ ID NO: 1352596 - RNA, 16 nt, Human
acgcuuugauucauag

SEQ ID NO: 1352597 - RNA, 14 nt, Human
acgcuuugauucau

SEQ ID NO: 1352598 - RNA, 13 nt, Human
acgcuuugauuca

SEQ ID NO: 1352599 - RNA, 12 nt, Human
acgcuuugauuc

SEQ ID NO: 1352600 - RNA, 23 nt, Human
acgcuuuugugauggagugcugu

SEQ ID NO: 1352601 - RNA, 14 nt, Human
acgcuuuugugaug

SEQ ID NO: 1352602 - RNA, 17 nt, Human
acgcuuuuugaaaaagc

SEQ ID NO: 1352603 - RNA, 15 nt, Human
acggaaagugcuguc

SEQ ID NO: 1352604 - RNA, 11 nt, Human
acgcuuugauu

SEQ ID NO: 1352605 - RNA, 18 nt, Human
acgcuuuccugaauccaa

SEQ ID NO: 1352606 - RNA, 14 nt, Human
acggaacucaaaua

SEQ ID NO: 1352607 - RNA, 22 nt, Human
acggaagaagagaucaggaaga

SEQ ID NO: 1352608 - RNA, 17 nt, Human
accuuggguuagaccua

SEQ ID NO: 1352609 - RNA, 23 nt, Human
accuuggguuagaccuacagggg

SEQ ID NO: 1352610 - RNA, 22 nt, Human
accuguugagcaucacagaaug

SEQ ID NO: 1352611 - RNA, 20 nt, Human
accuguugagcaucacagaa

SEQ ID NO: 1352612 - RNA, 19 nt, Human
accuguugagcaucacaga

SEQ ID NO: 1352613 - RNA, 14 nt, Human
accuguugagcauc

SEQ ID NO: 1352614 - RNA, 17 nt, Human
accuguuagcagacagg

SEQ ID NO: 1352615 - RNA, 18 nt, Human
accuguuaccuacuuuga

SEQ ID NO: 1352616 - RNA, 17 nt, Human
accuguuaccuacuuug

SEQ ID NO: 1352617 - RNA, 21 nt, Human
accuguugagcaucacagaau

SEQ ID NO: 1352618 - RNA, 14 nt, Human
accuuuagguucuu

SEQ ID NO: 1352619 - RNA, 15 nt, Human
accuuucuaguugaa

SEQ ID NO: 1352620 - RNA, 11 nt, Human
accuuucuagu

SEQ ID NO: 1352621 - RNA, 18 nt, Human
accuuuccaccacagcca

SEQ ID NO: 1352622 - RNA, 11 nt, Human
accuuucauac

SEQ ID NO: 1352623 - RNA, 15 nt, Human
accucugcugccucc

SEQ ID NO: 1352624 - RNA, 18 nt, Human
accucuggguugggauca

SEQ ID NO: 1352625 - RNA, 21 nt, Human
accucuguauuugaaucagcc

SEQ ID NO: 1352626 - RNA, 13 nt, Human
accugccucagga

SEQ ID NO: 1352627 - RNA, 23 nt, Human
accugccgagaguccaucagccu

SEQ ID NO: 1352628 - RNA, 16 nt, Human
accugccgagagucca

SEQ ID NO: 1352629 - RNA, 11 nt, Human
accuguccaau

SEQ ID NO: 1352630 - RNA, 18 nt, Human
accugucucaccuggacu

SEQ ID NO: 1352631 - RNA, 13 nt, Human
accugucucacca

SEQ ID NO: 1352632 - RNA, 11 nt, Human
accugucuguc

SEQ ID NO: 1352633 - RNA, 12 nt, Human
accugucugucu

SEQ ID NO: 1352634 - RNA, 21 nt, Human
accuguguuucuugccucauu

SEQ ID NO: 1352635 - RNA, 20 nt, Human
accuguguuucuugccucau

SEQ ID NO: 1352636 - RNA, 19 nt, Human
accuguguuucuugccuca

SEQ ID NO: 1352637 - RNA, 18 nt, Human
accuguguuucuugccuc

SEQ ID NO: 1352638 - RNA, 17 nt, Human
accuguguuucuugccu

SEQ ID NO: 1352639 - RNA, 21 nt, Human
accucugcagcaauaaagcag

SEQ ID NO: 1352640 - RNA, 18 nt, Human
accucugcagcaauaaag

SEQ ID NO: 1352641 - RNA, 20 nt, Human
accucugcagcaauaaagca

SEQ ID NO: 1352642 - RNA, 22 nt, Human
acacgcgguuugguuugcagcg

SEQ ID NO: 1352643 - RNA, 18 nt, Human
acaccaacauaaaaauga

SEQ ID NO: 1352644 - RNA, 15 nt, Human
acaccaaaguucuaa

SEQ ID NO: 1352645 - RNA, 14 nt, Human
acaccaaaguucua

SEQ ID NO: 1352646 - RNA, 19 nt, Human
acacauuuuuuaggaaaug

SEQ ID NO: 1352647 - RNA, 16 nt, Human
acacauuuuuuaggaa

SEQ ID NO: 1352648 - RNA, 15 nt, Human
acacauuuuuuagga

SEQ ID NO: 1352649 - RNA, 14 nt, Human
acaccaagcacagc

SEQ ID NO: 1352650 - RNA, 17 nt, Human
acaccaacauaaaaaug

SEQ ID NO: 1352651 - RNA, 21 nt, Human
acaauuguguagccuuuuugu

SEQ ID NO: 1352652 - RNA, 23 nt, Human
acaauuguguagccuuuuuguau

SEQ ID NO: 1352653 - RNA, 18 nt, Human
acaauuguguagccuuuu

SEQ ID NO: 1352654 - RNA, 17 nt, Human
acaauuguguagccuuu

SEQ ID NO: 1352655 - RNA, 16 nt, Human
acaauuguguagccuu

SEQ ID NO: 1352656 - RNA, 14 nt, Human
acaauuguguagcc

SEQ ID NO: 1352657 - RNA, 13 nt, Human
acaauugaaguaa

SEQ ID NO: 1352658 - RNA, 22 nt, Human
acaauugaaguaaacuuuuugu

SEQ ID NO: 1352659 - RNA, 19 nt, Human
acaauugaaguaaacuuuu

SEQ ID NO: 1352660 - RNA, 16 nt, Human
acaauugaaguaaacu

SEQ ID NO: 1352661 - RNA, 22 nt, Human
acaauugagguaaguuuuuuga

SEQ ID NO: 1352662 - RNA, 22 nt, Human
acacauuuuauuuuauuaugca

SEQ ID NO: 1352663 - RNA, 12 nt, Human
acacauuuuucu

SEQ ID NO: 1352664 - RNA, 20 nt, Human
acacauuuuuuaaaugcacc

SEQ ID NO: 1352665 - RNA, 22 nt, Human
acacauuuuuuaaaugcaccug

SEQ ID NO: 1352666 - RNA, 18 nt, Human
acaaggccaucugggcuc

SEQ ID NO: 1352667 - RNA, 21 nt, Human
acaaggcagcaaggcccgagc

SEQ ID NO: 1352668 - RNA, 22 nt, Human
acaaggcagcaaggcccgagca

SEQ ID NO: 1352669 - RNA, 18 nt, Human
acaaggcagcaaggcccg

SEQ ID NO: 1352670 - RNA, 16 nt, Human
acaaggcagcaaggcc

SEQ ID NO: 1352671 - RNA, 15 nt, Human
acaaggcagcaaggc

SEQ ID NO: 1352672 - RNA, 23 nt, Human
acaagaaaauaagagcucaggau

SEQ ID NO: 1352673 - RNA, 23 nt, Human
acaagaaaaauaaagaaaagaug

SEQ ID NO: 1352674 - RNA, 20 nt, Human
acaagaaaaauaaagaaaag

SEQ ID NO: 1352675 - RNA, 18 nt, Human
acaagaaaaauaaagaaa

SEQ ID NO: 1352676 - RNA, 17 nt, Human
acaagaaaaauaaagaa

SEQ ID NO: 1352677 - RNA, 16 nt, Human
acaagaaaaauaaaga

SEQ ID NO: 1352678 - RNA, 19 nt, Human
acaagaaaauaagagcuca

SEQ ID NO: 1352679 - RNA, 18 nt, Human
acaacgugcucuuuguuu

SEQ ID NO: 1352680 - RNA, 10 nt, Human
acaacuaagu

SEQ ID NO: 1352681 - RNA, 22 nt, Human
acaacgugcucuuuguuuugug

SEQ ID NO: 1352682 - RNA, 22 nt, Human
acaacuaagugauuuguauguc

SEQ ID NO: 1352683 - RNA, 16 nt, Human
acaaaauguaugucug

SEQ ID NO: 1352684 - RNA, 14 nt, Human
acaacggagucaaa

SEQ ID NO: 1352685 - RNA, 20 nt, Human
acaacggagucaaaaauuaa

SEQ ID NO: 1352686 - RNA, 22 nt, Human
acaacggagucaaaaauuaaac

SEQ ID NO: 1352687 - RNA, 13 nt, Human
acaacgugcauug

SEQ ID NO: 1352688 - RNA, 14 nt, Human
acaacgugcauugu

SEQ ID NO: 1352689 - RNA, 15 nt, Human
acaacgugcauugug

SEQ ID NO: 1352690 - RNA, 16 nt, Human
acaacgugcauugugc

SEQ ID NO: 1352691 - RNA, 17 nt, Human
acaacgugcauugugcu

SEQ ID NO: 1352692 - RNA, 18 nt, Human
acaacgugcauugugcuu

SEQ ID NO: 1352693 - RNA, 22 nt, Human
aauuuucuggaauacaugaaau

SEQ ID NO: 1352694 - RNA, 23 nt, Human
aauuuuccuguccucuuucagcu

SEQ ID NO: 1352695 - RNA, 19 nt, Human
aauuuuccuaauaaaguuc

SEQ ID NO: 1352696 - RNA, 22 nt, Human
aauuuuccuguccucuuucagc

SEQ ID NO: 1352697 - RNA, 18 nt, Human
aauuuuguaauguaucaa

SEQ ID NO: 1352698 - RNA, 15 nt, Human
aauuuuguaacgaag

SEQ ID NO: 1352699 - RNA, 17 nt, Human
aauuuuguguaagaaau

SEQ ID NO: 1352700 - RNA, 15 nt, Human
aauuuuguguaagaa

SEQ ID NO: 1352701 - RNA, 14 nt, Human
aauuuuguguaaga

SEQ ID NO: 1352702 - RNA, 18 nt, Human
aauuuugugguuuucgag

SEQ ID NO: 1352703 - RNA, 13 nt, Human
aauuuugugaagc

SEQ ID NO: 1352704 - RNA, 22 nt, Human
aauuuuguguaagaaauacaga

SEQ ID NO: 1352705 - RNA, 18 nt, Human
aauuuuguguaagaaaua

SEQ ID NO: 1352706 - RNA, 13 nt, Human
aauuuuguugcug

SEQ ID NO: 1352707 - RNA, 21 nt, Human
acagccaacuagccccugggg

SEQ ID NO: 1352708 - RNA, 19 nt, Human
acaggcaaaauccuugcuu

SEQ ID NO: 1352709 - RNA, 22 nt, Human
acaggaugguucccuugaugaa

SEQ ID NO: 1352710 - RNA, 18 nt, Human
acaggauccaggccggcu

SEQ ID NO: 1352711 - RNA, 19 nt, Human
acaggaucaguuaacuauu

SEQ ID NO: 1352712 - RNA, 12 nt, Human
acaggauccagg

SEQ ID NO: 1352713 - RNA, 13 nt, Human
acaggauccaggc

SEQ ID NO: 1352714 - RNA, 21 nt, Human
acaggaugaugacuauggaaa

SEQ ID NO: 1352715 - RNA, 23 nt, Human
acacugcacaauaacuccuccca

SEQ ID NO: 1352716 - RNA, 20 nt, Human
acacugggugguggccuggu

SEQ ID NO: 1352717 - RNA, 23 nt, Human
acacugggugguggccugguccc

SEQ ID NO: 1352718 - RNA, 19 nt, Human
acacugggugguggccugg

SEQ ID NO: 1352719 - RNA, 18 nt, Human
acacugggugguggccug

SEQ ID NO: 1352720 - RNA, 13 nt, Human
acacuggguggug

SEQ ID NO: 1352721 - RNA, 14 nt, Human
acacuggccccuca

SEQ ID NO: 1352722 - RNA, 13 nt, Human
acacuggccccuc

SEQ ID NO: 1352723 - RNA, 16 nt, Human
acacugcacaauaacu

SEQ ID NO: 1352724 - RNA, 18 nt, Human
acacugcagccccaccca

SEQ ID NO: 1352725 - RNA, 11 nt, Human
acacugccagc

SEQ ID NO: 1352726 - RNA, 14 nt, Human
acacugcauguuug

SEQ ID NO: 1352727 - RNA, 15 nt, Human
acacugcauguuugu

SEQ ID NO: 1352728 - RNA, 20 nt, Human
acagaggcccucaagucuuu

SEQ ID NO: 1352729 - RNA, 22 nt, Human
acagaggccccagccucccuga

SEQ ID NO: 1352730 - RNA, 18 nt, Human
acagaggccccagccucc

SEQ ID NO: 1352731 - RNA, 17 nt, Human
acagaggccccagccuc

SEQ ID NO: 1352732 - RNA, 16 nt, Human
acagaggccccagccu

SEQ ID NO: 1352733 - RNA, 15 nt, Human
acagaggccccagcc

SEQ ID NO: 1352734 - RNA, 18 nt, Human
acagaauuuuauggugca

SEQ ID NO: 1352735 - RNA, 16 nt, Human
acagaauugcuuguuu

SEQ ID NO: 1352736 - RNA, 18 nt, Human
acagaaugugauaaggaa

SEQ ID NO: 1352737 - RNA, 22 nt, Human
acagaauuacuguaacugauua

SEQ ID NO: 1352738 - RNA, 22 nt, Human
acacuguaguaaauaaugcuuu

SEQ ID NO: 1352739 - RNA, 19 nt, Human
acacuguaguaaauaaugc

SEQ ID NO: 1352740 - RNA, 16 nt, Human
acacuggucugcuguc

SEQ ID NO: 1352741 - RNA, 20 nt, Human
acacuggucugcuguuccag

SEQ ID NO: 1352742 - RNA, 15 nt, Human
acacuggucugcugu

SEQ ID NO: 1352743 - RNA, 15 nt, Human
acagaggcccucaag

SEQ ID NO: 1352744 - RNA, 14 nt, Human
acagagucuuccuc

SEQ ID NO: 1352745 - RNA, 22 nt, Human
acagccaacacgcaccugccuc

SEQ ID NO: 1352746 - RNA, 21 nt, Human
acagccaacacgcaccugccu

SEQ ID NO: 1352747 - RNA, 20 nt, Human
acagccaacacgcaccugcc

SEQ ID NO: 1352748 - RNA, 14 nt, Human
acagccaaauuuaa

SEQ ID NO: 1352749 - RNA, 13 nt, Human
acagcaucagggu

SEQ ID NO: 1352750 - RNA, 19 nt, Human
acagagucuuccucugucu

SEQ ID NO: 1352751 - RNA, 18 nt, Human
acagccaacuagccccug

SEQ ID NO: 1352752 - RNA, 17 nt, Human
acagccaacuagccccu

SEQ ID NO: 1352753 - RNA, 16 nt, Human
acagccaacuagcccc

SEQ ID NO: 1352754 - RNA, 15 nt, Human
acagccaaauuuaaa

SEQ ID NO: 1352755 - RNA, 24 nt, Human
acagccaacacgcaccugccucag

SEQ ID NO: 1352756 - RNA, 17 nt, Human
acagccaacuauggccu

SEQ ID NO: 1352757 - RNA, 20 nt, Human
acagccaacuagccccuggg

SEQ ID NO: 1352758 - RNA, 19 nt, Human
acagccaacuagccccugg

SEQ ID NO: 1352759 - RNA, 19 nt, Human
acagccaacuauggccugu

SEQ ID NO: 1352760 - RNA, 17 nt, Human
acaugauuuccuugaau

SEQ ID NO: 1352761 - RNA, 16 nt, Human
acaugauuuccuugaa

SEQ ID NO: 1352762 - RNA, 16 nt, Human
acaugcauuacugcau

SEQ ID NO: 1352763 - RNA, 16 nt, Human
acaugugacauuuaua

SEQ ID NO: 1352764 - RNA, 15 nt, Human
acaugugacauuuau

SEQ ID NO: 1352765 - RNA, 14 nt, Human
acaugugacauuua

SEQ ID NO: 1352766 - RNA, 13 nt, Human
acaugugacauuu

SEQ ID NO: 1352767 - RNA, 20 nt, Human
acaugcauuacugcaugcac

SEQ ID NO: 1352768 - RNA, 13 nt, Human
acaugauuuccuu

SEQ ID NO: 1352769 - RNA, 13 nt, Human
acaugauucauuu

SEQ ID NO: 1352770 - RNA, 13 nt, Human
acaucagcaaaca

SEQ ID NO: 1352771 - RNA, 15 nt, Human
acaucagcacgauuu

SEQ ID NO: 1352772 - RNA, 17 nt, Human
acaucagcacgauuucu

SEQ ID NO: 1352773 - RNA, 18 nt, Human
acaucagcacgauuucug

SEQ ID NO: 1352774 - RNA, 19 nt, Human
acaucagcacgauuucugu

SEQ ID NO: 1352775 - RNA, 16 nt, Human
acauguuuccucuagu

SEQ ID NO: 1352776 - RNA, 23 nt, Human
acauguuuccagcauucccaggu

SEQ ID NO: 1352777 - RNA, 23 nt, Human
acauguuucuuuguaaugaaaac

SEQ ID NO: 1352778 - RNA, 11 nt, Human
acauguuuccu

SEQ ID NO: 1352779 - RNA, 22 nt, Human
acauguuuccagcauucccagg

SEQ ID NO: 1352780 - RNA, 21 nt, Human
acauguuuccagcauucccag

SEQ ID NO: 1352781 - RNA, 14 nt, Human
acauguuuccagca

SEQ ID NO: 1352782 - RNA, 13 nt, Human
acauguuuccagc

SEQ ID NO: 1352783 - RNA, 21 nt, Human
acaugugacauuuauauauug

SEQ ID NO: 1352784 - RNA, 19 nt, Human
acauguuucuuuguaauga

SEQ ID NO: 1352785 - RNA, 22 nt, Human
acauguuucuuuguaaugaaaa

SEQ ID NO: 1352786 - RNA, 15 nt, Human
acaggguuucaccau

SEQ ID NO: 1352787 - RNA, 24 nt, Human
acagggucugcucuuucucugcca

SEQ ID NO: 1352788 - RNA, 23 nt, Human
acagggucugcucuuucucugcc

SEQ ID NO: 1352789 - RNA, 22 nt, Human
acagggucugcucuuucucugc

SEQ ID NO: 1352790 - RNA, 15 nt, Human
acagggucugcucuu

SEQ ID NO: 1352791 - RNA, 14 nt, Human
acagggucugcucu

SEQ ID NO: 1352792 - RNA, 17 nt, Human
acaggcacacaccacca

SEQ ID NO: 1352793 - RNA, 23 nt, Human
acauaaugcgugcauaccacuuu

SEQ ID NO: 1352794 - RNA, 22 nt, Human
acauaaugcgugcauaccacuu

SEQ ID NO: 1352795 - RNA, 16 nt, Human
acauuuauuuugacau

SEQ ID NO: 1352796 - RNA, 15 nt, Human
acauuuauuuccucc

SEQ ID NO: 1352797 - RNA, 14 nt, Human
acauuuauuuccuc

SEQ ID NO: 1352798 - RNA, 13 nt, Human
acauuuauuuccu

SEQ ID NO: 1352799 - RNA, 19 nt, Human
acauuuguucuauagcuuu

SEQ ID NO: 1352800 - RNA, 19 nt, Human
accaagauuggccugaggc

SEQ ID NO: 1352801 - RNA, 19 nt, Human
accaagauggcccauccug

SEQ ID NO: 1352802 - RNA, 19 nt, Human
acauuuuaaaagugccauu

SEQ ID NO: 1352803 - RNA, 16 nt, Human
acauuuuaaacacauu

SEQ ID NO: 1352804 - RNA, 16 nt, Human
acauuuuaaaagugcc

SEQ ID NO: 1352805 - RNA, 20 nt, Human
acauuuuaaaaaauggucac

SEQ ID NO: 1352806 - RNA, 14 nt, Human
accaagcaucuugg

SEQ ID NO: 1352807 - RNA, 13 nt, Human
accaagcaggaaa

SEQ ID NO: 1352808 - RNA, 17 nt, Human
accaagcacagcagccu

SEQ ID NO: 1352809 - RNA, 16 nt, Human
accaagcacagcagcc

SEQ ID NO: 1352810 - RNA, 14 nt, Human
accaagcacagcag

SEQ ID NO: 1352811 - RNA, 23 nt, Human
accaaggcuuucucuacugauuc

SEQ ID NO: 1352812 - RNA, 17 nt, Human
accaaggcuuucucuac

SEQ ID NO: 1352813 - RNA, 23 nt, Human
accaagccaagggaaccuguguc

SEQ ID NO: 1352814 - RNA, 20 nt, Human
accaagccaagggaaccugu

SEQ ID NO: 1352815 - RNA, 23 nt, Human
accaaguuggaacauccuuggaa

SEQ ID NO: 1352816 - RNA, 17 nt, Human
accaauaaaauaauuuu

SEQ ID NO: 1352817 - RNA, 14 nt, Human
accacccugcucau

SEQ ID NO: 1352818 - RNA, 21 nt, Human
accacccugagccggccccag

SEQ ID NO: 1352819 - RNA, 23 nt, Human
accaauagggcugagcucucugu

SEQ ID NO: 1352820 - RNA, 11 nt, Human
accaauaaagu

SEQ ID NO: 1352821 - RNA, 12 nt, Human
accaauaaagug

SEQ ID NO: 1352822 - RNA, 17 nt, Human
accaauaaagugacccu

SEQ ID NO: 1352823 - RNA, 21 nt, Human
accagccauuggcuauuuaaa

SEQ ID NO: 1352824 - RNA, 17 nt, Human
accagccaguaaauggg

SEQ ID NO: 1352825 - RNA, 14 nt, Human
accagaugcugaaa

SEQ ID NO: 1352826 - RNA, 12 nt, Human
accagaugcuga

SEQ ID NO: 1352827 - RNA, 11 nt, Human
accagaugcug

SEQ ID NO: 1352828 - RNA, 10 nt, Human
accagaugcu

SEQ ID NO: 1352829 - RNA, 14 nt, Human
accagaugcagcuc

SEQ ID NO: 1352830 - RNA, 13 nt, Human
accagcagaaaug

SEQ ID NO: 1352831 - RNA, 21 nt, Human
accaccgcgcccagccuuuuu

SEQ ID NO: 1352832 - RNA, 17 nt, Human
accaccucuccagaggc

SEQ ID NO: 1352833 - RNA, 15 nt, Human
accaccucucaauau

SEQ ID NO: 1352834 - RNA, 23 nt, Human
accaccucucaauauucaauaaa

SEQ ID NO: 1352835 - RNA, 22 nt, Human
accagagugcugaaggaaugga

SEQ ID NO: 1352836 - RNA, 13 nt, Human
accagauaacuuu

SEQ ID NO: 1352837 - RNA, 14 nt, Human
accagauaacuuuu

SEQ ID NO: 1352838 - RNA, 13 nt, Human
accagaucauugu

SEQ ID NO: 1352839 - RNA, 23 nt, Human
acccaccgggccacuccuuccug

SEQ ID NO: 1352840 - RNA, 18 nt, Human
accaucucccuggugcuu

SEQ ID NO: 1352841 - RNA, 17 nt, Human
accaucucccuggugcu

SEQ ID NO: 1352842 - RNA, 16 nt, Human
accaucucccuggugc

SEQ ID NO: 1352843 - RNA, 14 nt, Human
accaucucccuggu

SEQ ID NO: 1352844 - RNA, 13 nt, Human
accaucucccugg

SEQ ID NO: 1352845 - RNA, 12 nt, Human
accaucucccug

SEQ ID NO: 1352846 - RNA, 11 nt, Human
accaucucccu

SEQ ID NO: 1352847 - RNA, 20 nt, Human
accaucucccuggugcuuau

SEQ ID NO: 1352848 - RNA, 15 nt, Human
accaucgcuuuauug

SEQ ID NO: 1352849 - RNA, 18 nt, Human
accauccuaggcugacac

SEQ ID NO: 1352850 - RNA, 20 nt, Human
accauauuaccacagacaua

SEQ ID NO: 1352851 - RNA, 12 nt, Human
acccccugcagc

SEQ ID NO: 1352852 - RNA, 16 nt, Human
acccauuccuucccag

SEQ ID NO: 1352853 - RNA, 23 nt, Human
acccauuccuucccagaggggcc

SEQ ID NO: 1352854 - RNA, 15 nt, Human
acccauuccuuccca

SEQ ID NO: 1352855 - RNA, 13 nt, Human
acccauuccuucc

SEQ ID NO: 1352856 - RNA, 20 nt, Human
acccauuuaaauuuuuuucc

SEQ ID NO: 1352857 - RNA, 23 nt, Human
acccauuuaaauuuuuuuccuua

SEQ ID NO: 1352858 - RNA, 22 nt, Human
acccauuagcagucccuccaca

SEQ ID NO: 1352859 - RNA, 21 nt, Human
acccaccugcuagugugaauu

SEQ ID NO: 1352860 - RNA, 22 nt, Human
acccagugcccccacugaccag

SEQ ID NO: 1352861 - RNA, 21 nt, Human
acccaguuucuaaacuggaga

SEQ ID NO: 1352862 - RNA, 20 nt, Human
acccaguuucuaaacuggag

SEQ ID NO: 1352863 - RNA, 17 nt, Human
acccaguuuccuuggga

SEQ ID NO: 1352864 - RNA, 18 nt, Human
acccaguugccaucugcg

SEQ ID NO: 1352865 - RNA, 17 nt, Human
acccaguugccaucugc

SEQ ID NO: 1352866 - RNA, 22 nt, Human
acccaguguuuuaggagcauga

SEQ ID NO: 1352867 - RNA, 22 nt, Human
acccagugcccucuccccucag

SEQ ID NO: 1352868 - RNA, 15 nt, Human
acccagugcccucuc

SEQ ID NO: 1352869 - RNA, 14 nt, Human
acccagugcccucu

SEQ ID NO: 1352870 - RNA, 14 nt, Human
acccagugcugaau

SEQ ID NO: 1352871 - RNA, 19 nt, Human
acccaguguuuuaggagca

SEQ ID NO: 1352872 - RNA, 14 nt, Human
accauauuaccaca

SEQ ID NO: 1352873 - RNA, 16 nt, Human
accauauuaccacaga

SEQ ID NO: 1352874 - RNA, 19 nt, Human
acccccuucuccauccaca

SEQ ID NO: 1352875 - RNA, 18 nt, Human
acccccuucuccauccac

SEQ ID NO: 1352876 - RNA, 13 nt, Human
acccccugcagcu

SEQ ID NO: 1352877 - RNA, 15 nt, Human
acccccugcagcuug

SEQ ID NO: 1352878 - RNA, 13 nt, Human
acccccugugccu

SEQ ID NO: 1352879 - RNA, 17 nt, Human
accccuccacucuuucu

SEQ ID NO: 1352880 - RNA, 20 nt, Human
accccuccccuccaucccug

SEQ ID NO: 1352881 - RNA, 19 nt, Human
accccuccccuccaucccu

SEQ ID NO: 1352882 - RNA, 14 nt, Human
accccuccccucca

SEQ ID NO: 1352883 - RNA, 13 nt, Human
accccuccccucc

SEQ ID NO: 1352884 - RNA, 12 nt, Human
accccuccccuc

SEQ ID NO: 1352885 - RNA, 13 nt, Human
accccuccacucu

SEQ ID NO: 1352886 - RNA, 22 nt, Human
aggcccuuauuuucaagaaacu

SEQ ID NO: 1352887 - RNA, 20 nt, Human
aggcccuuauuuucaagaaa

SEQ ID NO: 1352888 - RNA, 16 nt, Human
aggcccuuauuuucaa

SEQ ID NO: 1352889 - RNA, 23 nt, Human
aggccgaagcuaacagggaaggc

SEQ ID NO: 1352890 - RNA, 18 nt, Human
aggcgugagccaccaugc

SEQ ID NO: 1352891 - RNA, 17 nt, Human
aggcgugagccaccucg

SEQ ID NO: 1352892 - RNA, 18 nt, Human
aggcgugagccaccucgc

SEQ ID NO: 1352893 - RNA, 22 nt, Human
aggcuacuucggggcugggaag

SEQ ID NO: 1352894 - RNA, 20 nt, Human
aggcuacuucggggcuggga

SEQ ID NO: 1352895 - RNA, 17 nt, Human
aggcuacuucggggcug

SEQ ID NO: 1352896 - RNA, 18 nt, Human
aggcuaaagcccagagac

SEQ ID NO: 1352897 - RNA, 23 nt, Human
aggcuacuguaaggcaaucaugg

SEQ ID NO: 1352898 - RNA, 23 nt, Human
agggacgccugggggugccagga

SEQ ID NO: 1352899 - RNA, 15 nt, Human
agggacgccuggggg

SEQ ID NO: 1352900 - RNA, 13 nt, Human
agggacgccuggg

SEQ ID NO: 1352901 - RNA, 22 nt, Human
agggacgccugggggugccagg

SEQ ID NO: 1352902 - RNA, 18 nt, Human
agggacgccugggggugc

SEQ ID NO: 1352903 - RNA, 12 nt, Human
aggcuguaacua

SEQ ID NO: 1352904 - RNA, 17 nt, Human
aggcuagauguauguac

SEQ ID NO: 1352905 - RNA, 16 nt, Human
aggcuagauguaugua

SEQ ID NO: 1352906 - RNA, 15 nt, Human
aggcuagauguaugu

SEQ ID NO: 1352907 - RNA, 21 nt, Human
aggcuguccuguacauugugg

SEQ ID NO: 1352908 - RNA, 16 nt, Human
aggcuguccuguacau

SEQ ID NO: 1352909 - RNA, 15 nt, Human
aggcuguccuguaca

SEQ ID NO: 1352910 - RNA, 15 nt, Human
aggcuguaacuacuu

SEQ ID NO: 1352911 - RNA, 22 nt, Human
agggacagaugaaugccgugga

SEQ ID NO: 1352912 - RNA, 22 nt, Human
agggaccggcggaccccagcca

SEQ ID NO: 1352913 - RNA, 17 nt, Human
aggguccaacauagagc

SEQ ID NO: 1352914 - RNA, 22 nt, Human
agggucaggccuuugagcucag

SEQ ID NO: 1352915 - RNA, 14 nt, Human
agggucaggccuuu

SEQ ID NO: 1352916 - RNA, 13 nt, Human
agggucaggccuu

SEQ ID NO: 1352917 - RNA, 12 nt, Human
agggucaggccu

SEQ ID NO: 1352918 - RNA, 22 nt, Human
aggggccuccaugggccccagg

SEQ ID NO: 1352919 - RNA, 16 nt, Human
aggggccuccaugggc

SEQ ID NO: 1352920 - RNA, 21 nt, Human
agggucagacgccugaggaac

SEQ ID NO: 1352921 - RNA, 13 nt, Human
aggguccugggag

SEQ ID NO: 1352922 - RNA, 12 nt, Human
agggucccucug

SEQ ID NO: 1352923 - RNA, 23 nt, Human
agggucccccacucuaaagcaaa

SEQ ID NO: 1352924 - RNA, 20 nt, Human
agggucccucuguguauuug

SEQ ID NO: 1352925 - RNA, 18 nt, Human
agggucccucuguguauu

SEQ ID NO: 1352926 - RNA, 15 nt, Human
agggucccucugugu

SEQ ID NO: 1352927 - RNA, 14 nt, Human
agggucccucugug

SEQ ID NO: 1352928 - RNA, 21 nt, Human
aggugcuacacccuuuuccag

SEQ ID NO: 1352929 - RNA, 20 nt, Human
aggugcuacacccuuuucca

SEQ ID NO: 1352930 - RNA, 18 nt, Human
agguguuuuguucaccau

SEQ ID NO: 1352931 - RNA, 15 nt, Human
agguggauggcccca

SEQ ID NO: 1352932 - RNA, 16 nt, Human
agguggaucuauuuca

SEQ ID NO: 1352933 - RNA, 15 nt, Human
agguggaucuauuuc

SEQ ID NO: 1352934 - RNA, 22 nt, Human
agguguuuuguucaccauuaua

SEQ ID NO: 1352935 - RNA, 21 nt, Human
agguuacaagccugcacaaua

SEQ ID NO: 1352936 - RNA, 15 nt, Human
agguuacaagccugc

SEQ ID NO: 1352937 - RNA, 23 nt, Human
agguuccgcuuggagcagagggg

SEQ ID NO: 1352938 - RNA, 21 nt, Human
agguuccgcuuggagcagagg

SEQ ID NO: 1352939 - RNA, 18 nt, Human
agguuccgcuuggagcag

SEQ ID NO: 1352940 - RNA, 15 nt, Human
agguuaucagugcuu

SEQ ID NO: 1352941 - RNA, 14 nt, Human
agguucaaagauau

SEQ ID NO: 1352942 - RNA, 15 nt, Human
agguucaaagauauu

SEQ ID NO: 1352943 - RNA, 13 nt, Human
aggucugaaauuu

SEQ ID NO: 1352944 - RNA, 23 nt, Human
aggucugaaauuuuucuucuuga

SEQ ID NO: 1352945 - RNA, 18 nt, Human
aggucuguucuuuccaaa

SEQ ID NO: 1352946 - RNA, 13 nt, Human
aggucccuaauaa

SEQ ID NO: 1352947 - RNA, 15 nt, Human
aggucccuaauaaag

SEQ ID NO: 1352948 - RNA, 16 nt, Human
agguacaagaagcauu

SEQ ID NO: 1352949 - RNA, 16 nt, Human
agguacacagcucuag

SEQ ID NO: 1352950 - RNA, 16 nt, Human
aggucccuaauaaagc

SEQ ID NO: 1352951 - RNA, 22 nt, Human
aggucuguucuuuccaaaguac

SEQ ID NO: 1352952 - RNA, 23 nt, Human
aggucuguucuuuccaaaguaca

SEQ ID NO: 1352953 - RNA, 20 nt, Human
agguaaaagcaucacaugaa

SEQ ID NO: 1352954 - RNA, 22 nt, Human
agguaaaaugccaugaugccuc

SEQ ID NO: 1352955 - RNA, 13 nt, Human
agguaaaaugcca

SEQ ID NO: 1352956 - RNA, 16 nt, Human
agguaaaaugccauga

SEQ ID NO: 1352957 - RNA, 15 nt, Human
agguaaaaugccaug

SEQ ID NO: 1352958 - RNA, 14 nt, Human
agguaaaaugccau

SEQ ID NO: 1352959 - RNA, 18 nt, Human
agguaaaucagacuauga

SEQ ID NO: 1352960 - RNA, 20 nt, Human
agguaaauaaaaagaaaggc

SEQ ID NO: 1352961 - RNA, 14 nt, Human
agguaaauaaaaag

SEQ ID NO: 1352962 - RNA, 23 nt, Human
agguaaaucagacuaugaaguuu

SEQ ID NO: 1352963 - RNA, 17 nt, Human
agguaauuuuuuucacc

SEQ ID NO: 1352964 - RNA, 12 nt, Human
aggucccuaaua

SEQ ID NO: 1352965 - RNA, 11 nt, Human
aggucccuaau

SEQ ID NO: 1352966 - RNA, 22 nt, Human
agcuuccaugauucuauuuaua

SEQ ID NO: 1352967 - RNA, 14 nt, Human
agcuuccuucagag

SEQ ID NO: 1352968 - RNA, 15 nt, Human
agcuuccuucagaga

SEQ ID NO: 1352969 - RNA, 13 nt, Human
agcuuccuucaga

SEQ ID NO: 1352970 - RNA, 12 nt, Human
agcuuccuucag

SEQ ID NO: 1352971 - RNA, 17 nt, Human
agcugcuccccacguca

SEQ ID NO: 1352972 - RNA, 14 nt, Human
agcugcuccccacg

SEQ ID NO: 1352973 - RNA, 15 nt, Human
agcugagcagggccg

SEQ ID NO: 1352974 - RNA, 14 nt, Human
agcugagcagggcc

SEQ ID NO: 1352975 - RNA, 16 nt, Human
agcucccuucuucccu

SEQ ID NO: 1352976 - RNA, 19 nt, Human
agcucccugugcccccagg

SEQ ID NO: 1352977 - RNA, 21 nt, Human
agcucccugugcccccagggu

SEQ ID NO: 1352978 - RNA, 16 nt, Human
agcucccugugccccc

SEQ ID NO: 1352979 - RNA, 17 nt, Human
agcucuuugucagggag

SEQ ID NO: 1352980 - RNA, 16 nt, Human
agcucuuugucaggga

SEQ ID NO: 1352981 - RNA, 13 nt, Human
agcugagcagggc

SEQ ID NO: 1352982 - RNA, 15 nt, Human
agcugagcaggccac

SEQ ID NO: 1352983 - RNA, 20 nt, Human
agcugagcaaaucaccacaa

SEQ ID NO: 1352984 - RNA, 16 nt, Human
agcugagcaaaucacc

SEQ ID NO: 1352985 - RNA, 22 nt, Human
agcuccuuaaggcucuuuugua

SEQ ID NO: 1352986 - RNA, 15 nt, Human
agcucuuugucaggg

SEQ ID NO: 1352987 - RNA, 14 nt, Human
agcucuuugucagg

SEQ ID NO: 1352988 - RNA, 19 nt, Human
agcuccuuccuggagacug

SEQ ID NO: 1352989 - RNA, 15 nt, Human
agcuccuuccuggag

SEQ ID NO: 1352990 - RNA, 13 nt, Human
agcuccuuccugg

SEQ ID NO: 1352991 - RNA, 19 nt, Human
agcuuuuuccagaggcuau

SEQ ID NO: 1352992 - RNA, 22 nt, Human
agcuuuuuauuccuccugcuca

SEQ ID NO: 1352993 - RNA, 24 nt, Human
agcuuuugugggggacuguaaguu

SEQ ID NO: 1352994 - RNA, 22 nt, Human
agcuuuugugggggacuguaag

SEQ ID NO: 1352995 - RNA, 21 nt, Human
agcuuuugugggggacuguaa

SEQ ID NO: 1352996 - RNA, 13 nt, Human
agcuuuugucuac

SEQ ID NO: 1352997 - RNA, 17 nt, Human
agcuuuucuauuuuaau

SEQ ID NO: 1352998 - RNA, 21 nt, Human
agcuuuucccuuuuuuuaagu

SEQ ID NO: 1352999 - RNA, 15 nt, Human
aggacccagaggaag

SEQ ID NO: 1353000 - RNA, 13 nt, Human
aggacccagagga

SEQ ID NO: 1353001 - RNA, 17 nt, Human
aggacccuggacccagc

SEQ ID NO: 1353002 - RNA, 14 nt, Human
aggacccuggaccu

SEQ ID NO: 1353003 - RNA, 12 nt, Human
aggacccuuccc

SEQ ID NO: 1353004 - RNA, 13 nt, Human
aggacccuucccu

SEQ ID NO: 1353005 - RNA, 20 nt, Human
aggacccuucccuugagccc

SEQ ID NO: 1353006 - RNA, 17 nt, Human
aggacccagggcucugu

SEQ ID NO: 1353007 - RNA, 14 nt, Human
aggacccaggaaag

SEQ ID NO: 1353008 - RNA, 12 nt, Human
aggacccaggac

SEQ ID NO: 1353009 - RNA, 13 nt, Human
aggacccaggaca

SEQ ID NO: 1353010 - RNA, 14 nt, Human
aggacccaggacag

SEQ ID NO: 1353011 - RNA, 15 nt, Human
aggacccagggcucu

SEQ ID NO: 1353012 - RNA, 14 nt, Human
aggacccagggcuc

SEQ ID NO: 1353013 - RNA, 13 nt, Human
aggacccagggcu

SEQ ID NO: 1353014 - RNA, 12 nt, Human
aggacccagggc

SEQ ID NO: 1353015 - RNA, 18 nt, Human
aggacccaggacaggauc

SEQ ID NO: 1353016 - RNA, 23 nt, Human
aggacccaggacaggauccaggc

SEQ ID NO: 1353017 - RNA, 22 nt, Human
aggaguggguggggaguggggg

SEQ ID NO: 1353018 - RNA, 21 nt, Human
aggagucugagguccugagca

SEQ ID NO: 1353019 - RNA, 20 nt, Human
aggagucugagguccugagc

SEQ ID NO: 1353020 - RNA, 19 nt, Human
aggagucugagguccugag

SEQ ID NO: 1353021 - RNA, 18 nt, Human
aggagucugagguccuga

SEQ ID NO: 1353022 - RNA, 17 nt, Human
aggagucugagguccug

SEQ ID NO: 1353023 - RNA, 16 nt, Human
aggagucugagguccu

SEQ ID NO: 1353024 - RNA, 15 nt, Human
aggagucugaggucc

SEQ ID NO: 1353025 - RNA, 13 nt, Human
aggagucugaggu

SEQ ID NO: 1353026 - RNA, 22 nt, Human
aggaguuaguggauuacugcca

SEQ ID NO: 1353027 - RNA, 13 nt, Human
aggagugugugug

SEQ ID NO: 1353028 - RNA, 15 nt, Human
aggagugggugggga

SEQ ID NO: 1353029 - RNA, 14 nt, Human
aggaguguccucuu

SEQ ID NO: 1353030 - RNA, 21 nt, Human
aggaugcuuguacauaaugcg

SEQ ID NO: 1353031 - RNA, 23 nt, Human
aggaugcuuguacauaaugcgug

SEQ ID NO: 1353032 - RNA, 16 nt, Human
aggagucacugagacc

SEQ ID NO: 1353033 - RNA, 20 nt, Human
aggaguccacuuuguuucgu

SEQ ID NO: 1353034 - RNA, 17 nt, Human
aggagucacugagacca

SEQ ID NO: 1353035 - RNA, 15 nt, Human
aggagucacugagac

SEQ ID NO: 1353036 - RNA, 14 nt, Human
aggagucacugaga

SEQ ID NO: 1353037 - RNA, 18 nt, Human
aggaguaugcagggagcu

SEQ ID NO: 1353038 - RNA, 16 nt, Human
aggaguagcugagcuc

SEQ ID NO: 1353039 - RNA, 15 nt, Human
aggaguagcugagcu

SEQ ID NO: 1353040 - RNA, 18 nt, Human
aggagacacaccugaggc

SEQ ID NO: 1353041 - RNA, 15 nt, Human
aggagaaugagccuc

SEQ ID NO: 1353042 - RNA, 20 nt, Human
aggagaaucacuugaaccug

SEQ ID NO: 1353043 - RNA, 18 nt, Human
aggagaaucaucaggacc

SEQ ID NO: 1353044 - RNA, 16 nt, Human
aggaccuaaaacaucu

SEQ ID NO: 1353045 - RNA, 14 nt, Human
aggaccuaaaacau

SEQ ID NO: 1353046 - RNA, 13 nt, Human
aggacccuggacc

SEQ ID NO: 1353047 - RNA, 22 nt, Human
aggacccuucccuugagcccuc

SEQ ID NO: 1353048 - RNA, 16 nt, Human
aggaccggcggcucgg

SEQ ID NO: 1353049 - RNA, 19 nt, Human
aggauggaacacggccaca

SEQ ID NO: 1353050 - RNA, 14 nt, Human
aggauggaacacgg

SEQ ID NO: 1353051 - RNA, 19 nt, Human
aggauguaaagaucaauaa

SEQ ID NO: 1353052 - RNA, 17 nt, Human
aggauggagccagcucu

SEQ ID NO: 1353053 - RNA, 23 nt, Human
aggaugguucccuugaugaagaa

SEQ ID NO: 1353054 - RNA, 19 nt, Human
agccgcugagcgaggagau

SEQ ID NO: 1353055 - RNA, 15 nt, Human
agccgcugagcgagg

SEQ ID NO: 1353056 - RNA, 14 nt, Human
agccgggagccuga

SEQ ID NO: 1353057 - RNA, 19 nt, Human
agcccucacacacccuguc

SEQ ID NO: 1353058 - RNA, 16 nt, Human
agcccucaucccgagc

SEQ ID NO: 1353059 - RNA, 23 nt, Human
agcccuccgccauucucaagccc

SEQ ID NO: 1353060 - RNA, 24 nt, Human
agcccuccgccauucucaagcccu

SEQ ID NO: 1353061 - RNA, 17 nt, Human
agcccuccucugcacuc

SEQ ID NO: 1353062 - RNA, 18 nt, Human
agccucccauccagggcc

SEQ ID NO: 1353063 - RNA, 20 nt, Human
agccuccucaucccguguuc

SEQ ID NO: 1353064 - RNA, 17 nt, Human
agccucccauccagggc

SEQ ID NO: 1353065 - RNA, 13 nt, Human
agccguccuggcg

SEQ ID NO: 1353066 - RNA, 13 nt, Human
agccgugagcaug

SEQ ID NO: 1353067 - RNA, 23 nt, Human
agccguccuggcgccuggcaguc

SEQ ID NO: 1353068 - RNA, 12 nt, Human
agccguccuggc

SEQ ID NO: 1353069 - RNA, 18 nt, Human
agccgugcucgccccagc

SEQ ID NO: 1353070 - RNA, 13 nt, Human
agccccauuccug

SEQ ID NO: 1353071 - RNA, 17 nt, Human
agccccagugacagcua

SEQ ID NO: 1353072 - RNA, 15 nt, Human
agcccuaaacaucau

SEQ ID NO: 1353073 - RNA, 14 nt, Human
agcccuaaacauca

SEQ ID NO: 1353074 - RNA, 13 nt, Human
agcccuaaacauc

SEQ ID NO: 1353075 - RNA, 15 nt, Human
agcccgucucagugu

SEQ ID NO: 1353076 - RNA, 14 nt, Human
agcccgucucagug

SEQ ID NO: 1353077 - RNA, 22 nt, Human
agcccgguaagagcaaaagaau

SEQ ID NO: 1353078 - RNA, 21 nt, Human
agcccgguaagagcaaaagaa

SEQ ID NO: 1353079 - RNA, 21 nt, Human
agcccuaaacaucauucuuga

SEQ ID NO: 1353080 - RNA, 23 nt, Human
agcccucacacacccugucugcc

SEQ ID NO: 1353081 - RNA, 16 nt, Human
agcccucacacacccu

SEQ ID NO: 1353082 - RNA, 16 nt, Human
agcccgguaagagcaa

SEQ ID NO: 1353083 - RNA, 15 nt, Human
agcccgguaagagca

SEQ ID NO: 1353084 - RNA, 16 nt, Human
agccccauuccuggga

SEQ ID NO: 1353085 - RNA, 24 nt, Human
agaugggggaaagcaaagcacaga

SEQ ID NO: 1353086 - RNA, 23 nt, Human
agaugggggaaagcaaagcacag

SEQ ID NO: 1353087 - RNA, 21 nt, Human
agaugggggaaagcaaagcac

SEQ ID NO: 1353088 - RNA, 16 nt, Human
agaugggggaaagcaa

SEQ ID NO: 1353089 - RNA, 19 nt, Human
agauggggaccagcagccc

SEQ ID NO: 1353090 - RNA, 24 nt, Human
agcacucgcuagcaguggcaggca

SEQ ID NO: 1353091 - RNA, 23 nt, Human
agcacucgcuagcaguggcaggc

SEQ ID NO: 1353092 - RNA, 20 nt, Human
agcacucgcuagcaguggca

SEQ ID NO: 1353093 - RNA, 18 nt, Human
agcagcuuagacuaaggc

SEQ ID NO: 1353094 - RNA, 21 nt, Human
agcagcugccaggagcacggc

SEQ ID NO: 1353095 - RNA, 18 nt, Human
agcagcugccaggagcac

SEQ ID NO: 1353096 - RNA, 19 nt, Human
agcagcugagcagggccgg

SEQ ID NO: 1353097 - RNA, 18 nt, Human
agcagcugagcagggccg

SEQ ID NO: 1353098 - RNA, 17 nt, Human
agcagcugagcagggcc

SEQ ID NO: 1353099 - RNA, 16 nt, Human
agcagcugagcagggc

SEQ ID NO: 1353100 - RNA, 14 nt, Human
agcagcugagcagg

SEQ ID NO: 1353101 - RNA, 13 nt, Human
agcagcugagcag

SEQ ID NO: 1353102 - RNA, 12 nt, Human
agcagcugagca

SEQ ID NO: 1353103 - RNA, 11 nt, Human
agcagcugagc

SEQ ID NO: 1353104 - RNA, 22 nt, Human
agcacugucccuugccucaaug

SEQ ID NO: 1353105 - RNA, 19 nt, Human
agcacugucccuugccuca

SEQ ID NO: 1353106 - RNA, 16 nt, Human
agcacugucccuugcc

SEQ ID NO: 1353107 - RNA, 15 nt, Human
agcacugucccuugc

SEQ ID NO: 1353108 - RNA, 13 nt, Human
agcacugucccuu

SEQ ID NO: 1353109 - RNA, 12 nt, Human
agcacugucccu

SEQ ID NO: 1353110 - RNA, 22 nt, Human
agcagccuuucucucuuuauac

SEQ ID NO: 1353111 - RNA, 11 nt, Human
agcagccuuuc

SEQ ID NO: 1353112 - RNA, 14 nt, Human
agcagcgagccugc

SEQ ID NO: 1353113 - RNA, 15 nt, Human
agcagcgagccugcu

SEQ ID NO: 1353114 - RNA, 13 nt, Human
agcagcgagccug

SEQ ID NO: 1353115 - RNA, 23 nt, Human
agcagcgaccgcccccuccucua

SEQ ID NO: 1353116 - RNA, 18 nt, Human
agcagcgaccgcccccuc

SEQ ID NO: 1353117 - RNA, 13 nt, Human
agcagcguuucua

SEQ ID NO: 1353118 - RNA, 18 nt, Human
agcagcguuucuaugaca

SEQ ID NO: 1353119 - RNA, 17 nt, Human
agcaguucugcagagga

SEQ ID NO: 1353120 - RNA, 16 nt, Human
agcaguucugcagagg

SEQ ID NO: 1353121 - RNA, 21 nt, Human
agcagugugaggccagggcag

SEQ ID NO: 1353122 - RNA, 15 nt, Human
agcagugugaggcca

SEQ ID NO: 1353123 - RNA, 16 nt, Human
agcaugaauuuguaau

SEQ ID NO: 1353124 - RNA, 22 nt, Human
agccaacacgcaccugccucag

SEQ ID NO: 1353125 - RNA, 19 nt, Human
agccaacacgcaccugccu

SEQ ID NO: 1353126 - RNA, 18 nt, Human
agccaacacgcaccugcc

SEQ ID NO: 1353127 - RNA, 13 nt, Human
agccaaauuuaaa

SEQ ID NO: 1353128 - RNA, 19 nt, Human
agccaaauuuaaaacuguu

SEQ ID NO: 1353129 - RNA, 12 nt, Human
agccaaauuuaa

SEQ ID NO: 1353130 - RNA, 20 nt, Human
agcaugagagggaugaggca

SEQ ID NO: 1353131 - RNA, 17 nt, Human
agcauggaacacuucga

SEQ ID NO: 1353132 - RNA, 19 nt, Human
agcauggaacacuucgagu

SEQ ID NO: 1353133 - RNA, 17 nt, Human
agcaugagaggaggcag

SEQ ID NO: 1353134 - RNA, 15 nt, Human
agcaugccuucaaau

SEQ ID NO: 1353135 - RNA, 22 nt, Human
agccagcacuuguccagcugag

SEQ ID NO: 1353136 - RNA, 21 nt, Human
agccagcacuuguccagcuga

SEQ ID NO: 1353137 - RNA, 20 nt, Human
agccagcacuuguccagcug

SEQ ID NO: 1353138 - RNA, 24 nt, Human
agccagcaccggaccagccuggcc

SEQ ID NO: 1353139 - RNA, 23 nt, Human
agccagcaccuggcaucgcacca

SEQ ID NO: 1353140 - RNA, 15 nt, Human
agccagcaccuggca

SEQ ID NO: 1353141 - RNA, 14 nt, Human
agccagcaccuggc

SEQ ID NO: 1353142 - RNA, 13 nt, Human
agccagcaccugg

SEQ ID NO: 1353143 - RNA, 23 nt, Human
agccagcaccggaccagccuggc

SEQ ID NO: 1353144 - RNA, 22 nt, Human
agccagcaccggaccagccugg

SEQ ID NO: 1353145 - RNA, 21 nt, Human
agccagcaccggaccagccug

SEQ ID NO: 1353146 - RNA, 20 nt, Human
agccagcaccggaccagccu

SEQ ID NO: 1353147 - RNA, 16 nt, Human
agccagcaccggacca

SEQ ID NO: 1353148 - RNA, 19 nt, Human
agccagcacacagggcagu

SEQ ID NO: 1353149 - RNA, 18 nt, Human
agccagcacacagggcag

SEQ ID NO: 1353150 - RNA, 17 nt, Human
agccagcacacagggca

SEQ ID NO: 1353151 - RNA, 15 nt, Human
agccagcacacaggg

SEQ ID NO: 1353152 - RNA, 12 nt, Human
agccaauauaac

SEQ ID NO: 1353153 - RNA, 13 nt, Human
agccaagugcagg

SEQ ID NO: 1353154 - RNA, 23 nt, Human
agacugcgauuugucccaggucc

SEQ ID NO: 1353155 - RNA, 21 nt, Human
agacugccauauuaaauuuuu

SEQ ID NO: 1353156 - RNA, 20 nt, Human
agacugccauauuaaauuuu

SEQ ID NO: 1353157 - RNA, 20 nt, Human
agacuggaagcuaauuugca

SEQ ID NO: 1353158 - RNA, 20 nt, Human
agagaaaaagcagaggccaa

SEQ ID NO: 1353159 - RNA, 19 nt, Human
agacuggaagcuaauuugc

SEQ ID NO: 1353160 - RNA, 14 nt, Human
agacuggaagcuaa

SEQ ID NO: 1353161 - RNA, 13 nt, Human
agagcccaggagc

SEQ ID NO: 1353162 - RNA, 15 nt, Human
agagcccagcuccaa

SEQ ID NO: 1353163 - RNA, 15 nt, Human
agagagccugcagga

SEQ ID NO: 1353164 - RNA, 14 nt, Human
agagagccugcagg

SEQ ID NO: 1353165 - RNA, 18 nt, Human
agagagccugcaggaucu

SEQ ID NO: 1353166 - RNA, 18 nt, Human
agagagcccgaggaggug

SEQ ID NO: 1353167 - RNA, 13 nt, Human
agagagcccgagg

SEQ ID NO: 1353168 - RNA, 17 nt, Human
agagagcagugcuuuug

SEQ ID NO: 1353169 - RNA, 16 nt, Human
agagagcagugcuuuu

SEQ ID NO: 1353170 - RNA, 15 nt, Human
agagagcagugcuuu

SEQ ID NO: 1353171 - RNA, 16 nt, Human
agagaagacaggcugg

SEQ ID NO: 1353172 - RNA, 15 nt, Human
agagaagacaggcug

SEQ ID NO: 1353173 - RNA, 14 nt, Human
agagaagacaggcu

SEQ ID NO: 1353174 - RNA, 17 nt, Human
agagaacuuccagaucc

SEQ ID NO: 1353175 - RNA, 13 nt, Human
agagaagaaagaa

SEQ ID NO: 1353176 - RNA, 17 nt, Human
agagaagaaagaacgga

SEQ ID NO: 1353177 - RNA, 17 nt, Human
agacccauuccuuccca

SEQ ID NO: 1353178 - RNA, 22 nt, Human
agacccauuccuucccagaggg

SEQ ID NO: 1353179 - RNA, 15 nt, Human
agacccauuccuucc

SEQ ID NO: 1353180 - RNA, 19 nt, Human
agacgugaugccaggacca

SEQ ID NO: 1353181 - RNA, 21 nt, Human
agacgugcacgcacacugucu

SEQ ID NO: 1353182 - RNA, 22 nt, Human
agacgugcacgcacacugucug

SEQ ID NO: 1353183 - RNA, 20 nt, Human
agacggaaggguaaacaaua

SEQ ID NO: 1353184 - RNA, 22 nt, Human
agacggagcccuggcaugucaa

SEQ ID NO: 1353185 - RNA, 18 nt, Human
agacggaaggguaaacaa

SEQ ID NO: 1353186 - RNA, 21 nt, Human
agacaacgugcucuuuguuuu

SEQ ID NO: 1353187 - RNA, 23 nt, Human
agacaacgugcucuuuguuuugu

SEQ ID NO: 1353188 - RNA, 20 nt, Human
agacaacgugcucuuuguuu

SEQ ID NO: 1353189 - RNA, 19 nt, Human
agacaacgugcucuuuguu

SEQ ID NO: 1353190 - RNA, 16 nt, Human
agacaacgugcucuuu

SEQ ID NO: 1353191 - RNA, 21 nt, Human
agacagcuccacccuggccga

SEQ ID NO: 1353192 - RNA, 20 nt, Human
agacagagucuuccucuguc

SEQ ID NO: 1353193 - RNA, 19 nt, Human
agacagagucuuacucugu

SEQ ID NO: 1353194 - RNA, 20 nt, Human
agacagagucuuacucuguu

SEQ ID NO: 1353195 - RNA, 23 nt, Human
agacagagucuuccucugucucc

SEQ ID NO: 1353196 - RNA, 16 nt, Human
agaucuuuuauuuugc

SEQ ID NO: 1353197 - RNA, 18 nt, Human
agaucuuuuauuuugcca

SEQ ID NO: 1353198 - RNA, 15 nt, Human
agaugaaagagcagu

SEQ ID NO: 1353199 - RNA, 14 nt, Human
agaugaaagagcag

SEQ ID NO: 1353200 - RNA, 14 nt, Human
agauggcacuuuga

SEQ ID NO: 1353201 - RNA, 15 nt, Human
agauggcccauccug

SEQ ID NO: 1353202 - RNA, 20 nt, Human
agauggccagccccuuagac

SEQ ID NO: 1353203 - RNA, 20 nt, Human
agauggcaucaaaaaagaua

SEQ ID NO: 1353204 - RNA, 21 nt, Human
agauggcauaaccugucucac

SEQ ID NO: 1353205 - RNA, 21 nt, Human
agauggcagcuuuuaaaagau

SEQ ID NO: 1353206 - RNA, 14 nt, Human
agauggcagcuuuu

SEQ ID NO: 1353207 - RNA, 13 nt, Human
agauggcagcuuu

SEQ ID NO: 1353208 - RNA, 12 nt, Human
agauggcagcuu

SEQ ID NO: 1353209 - RNA, 17 nt, Human
agaugggcuucccaagg

SEQ ID NO: 1353210 - RNA, 22 nt, Human
agaugggcuucccaagggcugc

SEQ ID NO: 1353211 - RNA, 22 nt, Human
agaugggcaucuuuuguauuaa

SEQ ID NO: 1353212 - RNA, 21 nt, Human
agaugggcaucuuuuguauua

SEQ ID NO: 1353213 - RNA, 20 nt, Human
agaugggcaucuuuuguauu

SEQ ID NO: 1353214 - RNA, 18 nt, Human
agaugggcaucuuuugua

SEQ ID NO: 1353215 - RNA, 16 nt, Human
agaugggcaucuuuug

SEQ ID NO: 1353216 - RNA, 17 nt, Human
agauggcucccaggggc

SEQ ID NO: 1353217 - RNA, 23 nt, Human
agauggcucccaggggcucccuc

SEQ ID NO: 1353218 - RNA, 14 nt, Human
agauggcucccagg

SEQ ID NO: 1353219 - RNA, 13 nt, Human
agauggcucccag

SEQ ID NO: 1353220 - RNA, 16 nt, Human
agauaucgacuuguuu

SEQ ID NO: 1353221 - RNA, 21 nt, Human
agaguucaagaaauaaguuuu

SEQ ID NO: 1353222 - RNA, 18 nt, Human
agaguucaagaaauaagu

SEQ ID NO: 1353223 - RNA, 15 nt, Human
agaguucaagaaaua

SEQ ID NO: 1353224 - RNA, 14 nt, Human
agaguucaagaaau

SEQ ID NO: 1353225 - RNA, 12 nt, Human
agaguuagacug

SEQ ID NO: 1353226 - RNA, 13 nt, Human
agaguuagacugu

SEQ ID NO: 1353227 - RNA, 14 nt, Human
agaguuagacuguu

SEQ ID NO: 1353228 - RNA, 15 nt, Human
agaguuagacuguug

SEQ ID NO: 1353229 - RNA, 17 nt, Human
agaguuagacuguuggg

SEQ ID NO: 1353230 - RNA, 23 nt, Human
agauaucaucuaccuagauuuaa

SEQ ID NO: 1353231 - RNA, 17 nt, Human
agauauauuuucuuucu

SEQ ID NO: 1353232 - RNA, 19 nt, Human
agagcccaggagcuccccu

SEQ ID NO: 1353233 - RNA, 17 nt, Human
agagcccaggagcuccc

SEQ ID NO: 1353234 - RNA, 16 nt, Human
agagcccaggagcucc

SEQ ID NO: 1353235 - RNA, 15 nt, Human
agagcccaggagcuc

SEQ ID NO: 1353236 - RNA, 20 nt, Human
agagcccaggcucggccugc

SEQ ID NO: 1353237 - RNA, 13 nt, Human
agagcccaggcuc

SEQ ID NO: 1353238 - RNA, 14 nt, Human
agaggacgggaggc

SEQ ID NO: 1353239 - RNA, 15 nt, Human
agaggaccggcggcu

SEQ ID NO: 1353240 - RNA, 15 nt, Human
agaggaaggggccag

SEQ ID NO: 1353241 - RNA, 22 nt, Human
agaggacuguagggagggcggc

SEQ ID NO: 1353242 - RNA, 16 nt, Human
agagggcacucugcuu

SEQ ID NO: 1353243 - RNA, 14 nt, Human
agagugugaccaaa

SEQ ID NO: 1353244 - RNA, 11 nt, Human
agagugugacc

SEQ ID NO: 1353245 - RNA, 15 nt, Human
agagugucuuuccac

SEQ ID NO: 1353246 - RNA, 14 nt, Human
agagugucuuucca

SEQ ID NO: 1353247 - RNA, 21 nt, Human
agagugugaccaaaaguuaca

SEQ ID NO: 1353248 - RNA, 12 nt, Human
augcugccccuc

SEQ ID NO: 1353249 - RNA, 23 nt, Human
augcugaaaauguccuugugaug

SEQ ID NO: 1353250 - RNA, 12 nt, Human
augcugaaaaug

SEQ ID NO: 1353251 - RNA, 12 nt, Human
augcuugggaag

SEQ ID NO: 1353252 - RNA, 12 nt, Human
augcuuguacau

SEQ ID NO: 1353253 - RNA, 13 nt, Human
augcuuguacaua

SEQ ID NO: 1353254 - RNA, 14 nt, Human
augcuuguacauaa

SEQ ID NO: 1353255 - RNA, 19 nt, Human
auggaaagcuucagugcug

SEQ ID NO: 1353256 - RNA, 18 nt, Human
augcuugggaagacuccu

SEQ ID NO: 1353257 - RNA, 23 nt, Human
augcuugggaagacuccuagcug

SEQ ID NO: 1353258 - RNA, 15 nt, Human
augcuuguacauaau

SEQ ID NO: 1353259 - RNA, 16 nt, Human
auggaaauauauauua

SEQ ID NO: 1353260 - RNA, 15 nt, Human
auggaaauauauauu

SEQ ID NO: 1353261 - RNA, 13 nt, Human
auggaaaggaugg

SEQ ID NO: 1353262 - RNA, 18 nt, Human
auggauucuaaaaugccu

SEQ ID NO: 1353263 - RNA, 15 nt, Human
auggauucuaaaaug

SEQ ID NO: 1353264 - RNA, 14 nt, Human
auggauucuaaaau

SEQ ID NO: 1353265 - RNA, 13 nt, Human
auggauucuaaaa

SEQ ID NO: 1353266 - RNA, 19 nt, Human
augccucugucuucuggac

SEQ ID NO: 1353267 - RNA, 18 nt, Human
augccucugccaaaggau

SEQ ID NO: 1353268 - RNA, 22 nt, Human
augccucugccaaaggauguga

SEQ ID NO: 1353269 - RNA, 23 nt, Human
augccucugaggccagccuggcc

SEQ ID NO: 1353270 - RNA, 22 nt, Human
augccucugaggccagccuggc

SEQ ID NO: 1353271 - RNA, 21 nt, Human
augccucugaggccagccugg

SEQ ID NO: 1353272 - RNA, 20 nt, Human
augccucugaggccagccug

SEQ ID NO: 1353273 - RNA, 19 nt, Human
augccucugaggccagccu

SEQ ID NO: 1353274 - RNA, 18 nt, Human
augccucugaggccagcc

SEQ ID NO: 1353275 - RNA, 17 nt, Human
augccucugaggccagc

SEQ ID NO: 1353276 - RNA, 17 nt, Human
augauuaaauaagauuc

SEQ ID NO: 1353277 - RNA, 18 nt, Human
augauuaaauaagauucu

SEQ ID NO: 1353278 - RNA, 13 nt, Human
augcaauuuuuau

SEQ ID NO: 1353279 - RNA, 17 nt, Human
augcaauuuccuuuuuu

SEQ ID NO: 1353280 - RNA, 22 nt, Human
augaugccucugucuucuggac

SEQ ID NO: 1353281 - RNA, 21 nt, Human
augauguuaaaaaaauaagaa

SEQ ID NO: 1353282 - RNA, 22 nt, Human
augauguuaaaaaaauaagaag

SEQ ID NO: 1353283 - RNA, 14 nt, Human
augauguuaaaaaa

SEQ ID NO: 1353284 - RNA, 11 nt, Human
augcauauacu

SEQ ID NO: 1353285 - RNA, 17 nt, Human
augcacagaguuguuac

SEQ ID NO: 1353286 - RNA, 18 nt, Human
augcacagaguuguuaca

SEQ ID NO: 1353287 - RNA, 16 nt, Human
augcacagaguuguua

SEQ ID NO: 1353288 - RNA, 14 nt, Human
augccucugaggcc

SEQ ID NO: 1353289 - RNA, 13 nt, Human
augccucugaggc

SEQ ID NO: 1353290 - RNA, 12 nt, Human
augccucugagg

SEQ ID NO: 1353291 - RNA, 16 nt, Human
augcaugaaguaauau

SEQ ID NO: 1353292 - RNA, 20 nt, Human
augcaugaaguaauaugcac

SEQ ID NO: 1353293 - RNA, 20 nt, Human
augcaucuguuuauucuaua

SEQ ID NO: 1353294 - RNA, 12 nt, Human
augcaucuguuu

SEQ ID NO: 1353295 - RNA, 16 nt, Human
augcauauuauuuuau

SEQ ID NO: 1353296 - RNA, 20 nt, Human
augcauauuauuuuauguug

SEQ ID NO: 1353297 - RNA, 21 nt, Human
auguggcuugagaaauaugga

SEQ ID NO: 1353298 - RNA, 16 nt, Human
auguggcuugagaaau

SEQ ID NO: 1353299 - RNA, 14 nt, Human
augugggauuaugg

SEQ ID NO: 1353300 - RNA, 13 nt, Human
augugggauuaug

SEQ ID NO: 1353301 - RNA, 23 nt, Human
auguucuaaguuucuaagauucu

SEQ ID NO: 1353302 - RNA, 21 nt, Human
auguucuaaguuucuaagauu

SEQ ID NO: 1353303 - RNA, 20 nt, Human
auguucuaaguuucuaagau

SEQ ID NO: 1353304 - RNA, 19 nt, Human
auguucuaaguuucuaaga

SEQ ID NO: 1353305 - RNA, 16 nt, Human
auguucuaaguuucua

SEQ ID NO: 1353306 - RNA, 14 nt, Human
auguucucuaucau

SEQ ID NO: 1353307 - RNA, 15 nt, Human
auguucucuaucauu

SEQ ID NO: 1353308 - RNA, 16 nt, Human
auguucucuaucauuu

SEQ ID NO: 1353309 - RNA, 15 nt, Human
auguucuaaguuucu

SEQ ID NO: 1353310 - RNA, 13 nt, Human
auguucuaaguuu

SEQ ID NO: 1353311 - RNA, 12 nt, Human
auguucuaaguu

SEQ ID NO: 1353312 - RNA, 22 nt, Human
auguucuaaggcucugagaguc

SEQ ID NO: 1353313 - RNA, 19 nt, Human
auguucuaagucuuuccau

SEQ ID NO: 1353314 - RNA, 18 nt, Human
auguucuaagucuuucca

SEQ ID NO: 1353315 - RNA, 20 nt, Human
auguucuaaggcucugagag

SEQ ID NO: 1353316 - RNA, 19 nt, Human
auguucuaaggcucugaga

SEQ ID NO: 1353317 - RNA, 18 nt, Human
auguucuaaggcucugag

SEQ ID NO: 1353318 - RNA, 17 nt, Human
auguucuaaggcucuga

SEQ ID NO: 1353319 - RNA, 16 nt, Human
auguucuaaggcucug

SEQ ID NO: 1353320 - RNA, 15 nt, Human
auguucuaaggcucu

SEQ ID NO: 1353321 - RNA, 14 nt, Human
auguucuaaggcuc

SEQ ID NO: 1353322 - RNA, 13 nt, Human
auguucuaaggcu

SEQ ID NO: 1353323 - RNA, 20 nt, Human
auguucuauuuuuuguuuug

SEQ ID NO: 1353324 - RNA, 18 nt, Human
auguucucuaucauuuaa

SEQ ID NO: 1353325 - RNA, 19 nt, Human
auguucucuaucauuuaau

SEQ ID NO: 1353326 - RNA, 20 nt, Human
auguucucuaucauuuaaua

SEQ ID NO: 1353327 - RNA, 21 nt, Human
auguucucuaucauuuaauaa

SEQ ID NO: 1353328 - RNA, 12 nt, Human
auguucuaaggc

SEQ ID NO: 1353329 - RNA, 17 nt, Human
auguucuaaccuuuaca

SEQ ID NO: 1353330 - RNA, 11 nt, Human
auguuccuucc

SEQ ID NO: 1353331 - RNA, 12 nt, Human
auguuccuucca

SEQ ID NO: 1353332 - RNA, 22 nt, Human
augugugcaacaggguauggac

SEQ ID NO: 1353333 - RNA, 22 nt, Human
augugggauuaugggucacagg

SEQ ID NO: 1353334 - RNA, 20 nt, Human
augugggauuaugggucaca

SEQ ID NO: 1353335 - RNA, 18 nt, Human
augugggauuauggguca

SEQ ID NO: 1353336 - RNA, 12 nt, Human
auguuuccagca

SEQ ID NO: 1353337 - RNA, 21 nt, Human
auguuucaagaggagccccca

SEQ ID NO: 1353338 - RNA, 15 nt, Human
auguuucaagaggag

SEQ ID NO: 1353339 - RNA, 17 nt, Human
auguuucacaaggucuu

SEQ ID NO: 1353340 - RNA, 22 nt, Human
auguuugcucagcuucuccaac

SEQ ID NO: 1353341 - RNA, 15 nt, Human
auguuuucaggcuag

SEQ ID NO: 1353342 - RNA, 18 nt, Human
auguauuuuauguuauau

SEQ ID NO: 1353343 - RNA, 16 nt, Human
auguauuuuauguuau

SEQ ID NO: 1353344 - RNA, 14 nt, Human
auguauuuuauguu

SEQ ID NO: 1353345 - RNA, 13 nt, Human
auguauuuuaugu

SEQ ID NO: 1353346 - RNA, 22 nt, Human
auguauugcacauuguaaaaag

SEQ ID NO: 1353347 - RNA, 17 nt, Human
auguauugcacauugua

SEQ ID NO: 1353348 - RNA, 16 nt, Human
auguauugcacauugu

SEQ ID NO: 1353349 - RNA, 17 nt, Human
auguaauggcaguuaua

SEQ ID NO: 1353350 - RNA, 16 nt, Human
auguaauggcaguuau

SEQ ID NO: 1353351 - RNA, 18 nt, Human
auguaauggcaguuauau

SEQ ID NO: 1353352 - RNA, 23 nt, Human
auguaaggcuguguaagauuugu

SEQ ID NO: 1353353 - RNA, 23 nt, Human
auggucgagaaagaggcaccagg

SEQ ID NO: 1353354 - RNA, 15 nt, Human
auggucggaaaacau

SEQ ID NO: 1353355 - RNA, 14 nt, Human
auggucacacacug

SEQ ID NO: 1353356 - RNA, 19 nt, Human
augguaguuuuuucaucuu

SEQ ID NO: 1353357 - RNA, 23 nt, Human
augguaucaauaaauagaccauu

SEQ ID NO: 1353358 - RNA, 18 nt, Human
augguaguuuuuucaucu

SEQ ID NO: 1353359 - RNA, 17 nt, Human
augguaguuuuuucauc

SEQ ID NO: 1353360 - RNA, 14 nt, Human
augguaguuuuuuc

SEQ ID NO: 1353361 - RNA, 19 nt, Human
auggucacacacugaugcu

SEQ ID NO: 1353362 - RNA, 18 nt, Human
auggucacacacugaugc

SEQ ID NO: 1353363 - RNA, 16 nt, Human
auggucacacacugau

SEQ ID NO: 1353364 - RNA, 15 nt, Human
auggucacacacuga

SEQ ID NO: 1353365 - RNA, 20 nt, Human
auggucacacacugaugcuu

SEQ ID NO: 1353366 - RNA, 20 nt, Human
auggucacguuuggugcuuc

SEQ ID NO: 1353367 - RNA, 21 nt, Human
auggucacguuuggugcuucu

SEQ ID NO: 1353368 - RNA, 18 nt, Human
auggucagcccuagggug

SEQ ID NO: 1353369 - RNA, 24 nt, Human
auggucacguuuggugcuucucag

SEQ ID NO: 1353370 - RNA, 19 nt, Human
augguccaauuaguuuccu

SEQ ID NO: 1353371 - RNA, 15 nt, Human
augugaagccuuccc

SEQ ID NO: 1353372 - RNA, 17 nt, Human
augugaagccuuccccu

SEQ ID NO: 1353373 - RNA, 14 nt, Human
augugaagccuucc

SEQ ID NO: 1353374 - RNA, 13 nt, Human
augugaagccuuc

SEQ ID NO: 1353375 - RNA, 14 nt, Human
augucaaacaaaua

SEQ ID NO: 1353376 - RNA, 13 nt, Human
augucaaacaaau

SEQ ID NO: 1353377 - RNA, 20 nt, Human
augucuuaaugaaguuugaa

SEQ ID NO: 1353378 - RNA, 21 nt, Human
augucuuaaugaaguuugaau

SEQ ID NO: 1353379 - RNA, 23 nt, Human
augucuuaaugaaguuugaaugu

SEQ ID NO: 1353380 - RNA, 16 nt, Human
augucuuuaaugcaau

SEQ ID NO: 1353381 - RNA, 11 nt, Human
augucuugugu

SEQ ID NO: 1353382 - RNA, 10 nt, Human
augucuugug

SEQ ID NO: 1353383 - RNA, 14 nt, Human
augucuucucccug

SEQ ID NO: 1353384 - RNA, 21 nt, Human
augucuuuucccauuuaucua

SEQ ID NO: 1353385 - RNA, 17 nt, Human
augucuuuucccauuua

SEQ ID NO: 1353386 - RNA, 16 nt, Human
augucuuuucccauuu

SEQ ID NO: 1353387 - RNA, 14 nt, Human
augugaaaucauuc

SEQ ID NO: 1353388 - RNA, 22 nt, Human
augugaaacuggauuaaacuua

SEQ ID NO: 1353389 - RNA, 12 nt, Human
augugaagccuu

SEQ ID NO: 1353390 - RNA, 22 nt, Human
augugaagccaauucagacagg

SEQ ID NO: 1353391 - RNA, 21 nt, Human
augugaagccaauucagacag

SEQ ID NO: 1353392 - RNA, 12 nt, Human
augugaagccaa

SEQ ID NO: 1353393 - RNA, 12 nt, Human
augugaaccauu

SEQ ID NO: 1353394 - RNA, 22 nt, Human
augugaaccauuaaccagaucu

SEQ ID NO: 1353395 - RNA, 23 nt, Human
augugaacaguuguguuugaagc

SEQ ID NO: 1353396 - RNA, 21 nt, Human
augugaacaguuguguuugaa

SEQ ID NO: 1353397 - RNA, 11 nt, Human
augugaacagu

SEQ ID NO: 1353398 - RNA, 14 nt, Human
aucuucugccuucu

SEQ ID NO: 1353399 - RNA, 21 nt, Human
aucuucugccuuagucucagu

SEQ ID NO: 1353400 - RNA, 15 nt, Human
aucugggaagcuauu

SEQ ID NO: 1353401 - RNA, 20 nt, Human
aucuggcuucuggccaggaa

SEQ ID NO: 1353402 - RNA, 22 nt, Human
aucuggcuucuggccaggaagc

SEQ ID NO: 1353403 - RNA, 12 nt, Human
aucuggcuucug

SEQ ID NO: 1353404 - RNA, 19 nt, Human
aucuggccuggccagugcc

SEQ ID NO: 1353405 - RNA, 16 nt, Human
aucuggccuggccagu

SEQ ID NO: 1353406 - RNA, 21 nt, Human
aucuggccuggccagugcccu

SEQ ID NO: 1353407 - RNA, 14 nt, Human
aucuucuucaccau

SEQ ID NO: 1353408 - RNA, 20 nt, Human
aucuucuuaugcaauuuccu

SEQ ID NO: 1353409 - RNA, 17 nt, Human
aucuucuuaugcaauuu

SEQ ID NO: 1353410 - RNA, 18 nt, Human
aucuucugccuucucaug

SEQ ID NO: 1353411 - RNA, 16 nt, Human
aucuucugccuucuca

SEQ ID NO: 1353412 - RNA, 16 nt, Human
aucuugaauuguaacu

SEQ ID NO: 1353413 - RNA, 18 nt, Human
aucuugaauaauguaaga

SEQ ID NO: 1353414 - RNA, 19 nt, Human
aucucugugugcacaaaua

SEQ ID NO: 1353415 - RNA, 17 nt, Human
aucucugugugcacaaa

SEQ ID NO: 1353416 - RNA, 15 nt, Human
aucucugugugcaca

SEQ ID NO: 1353417 - RNA, 18 nt, Human
aucucugugccuucgucu

SEQ ID NO: 1353418 - RNA, 15 nt, Human
aucucugugccuucg

SEQ ID NO: 1353419 - RNA, 14 nt, Human
aucucugugccuuc

SEQ ID NO: 1353420 - RNA, 13 nt, Human
aucucugugccuu

SEQ ID NO: 1353421 - RNA, 17 nt, Human
aucucuguaaagcuaaa

SEQ ID NO: 1353422 - RNA, 13 nt, Human
aucucuguaaagc

SEQ ID NO: 1353423 - RNA, 21 nt, Human
aucucugggggcugaggagca

SEQ ID NO: 1353424 - RNA, 18 nt, Human
aucucuguaaagcuaaaa

SEQ ID NO: 1353425 - RNA, 23 nt, Human
aucucugggcuggaugagcuccc

SEQ ID NO: 1353426 - RNA, 22 nt, Human
aucucugggcuggaugagcucc

SEQ ID NO: 1353427 - RNA, 21 nt, Human
aucucccuuuuccaugacugu

SEQ ID NO: 1353428 - RNA, 23 nt, Human
aucucccuggugcuuaugcucuu

SEQ ID NO: 1353429 - RNA, 21 nt, Human
aucucccuggugcuuaugcuc

SEQ ID NO: 1353430 - RNA, 18 nt, Human
aucucccuggugcuuaug

SEQ ID NO: 1353431 - RNA, 14 nt, Human
aucuggccuggcca

SEQ ID NO: 1353432 - RNA, 17 nt, Human
aucuggcaacaucuuua

SEQ ID NO: 1353433 - RNA, 21 nt, Human
aucugcuuaggaguuuaggga

SEQ ID NO: 1353434 - RNA, 18 nt, Human
aucuggaacccagacuca

SEQ ID NO: 1353435 - RNA, 17 nt, Human
aucuggaacccagacuc

SEQ ID NO: 1353436 - RNA, 16 nt, Human
aucuggaacccagacu

SEQ ID NO: 1353437 - RNA, 15 nt, Human
aucuggaacccagac

SEQ ID NO: 1353438 - RNA, 14 nt, Human
aucuggaacccaga

SEQ ID NO: 1353439 - RNA, 11 nt, Human
aucuggaaccc

SEQ ID NO: 1353440 - RNA, 18 nt, Human
aucuggaaccaucagaaa

SEQ ID NO: 1353441 - RNA, 15 nt, Human
aucucccuggugcuu

SEQ ID NO: 1353442 - RNA, 14 nt, Human
aucucccuggugcu

SEQ ID NO: 1353443 - RNA, 10 nt, Human
aucucccugg

SEQ ID NO: 1353444 - RNA, 16 nt, Human
aucucccugccuccug

SEQ ID NO: 1353445 - RNA, 19 nt, Human
aucucccugccuccugccg

SEQ ID NO: 1353446 - RNA, 14 nt, Human
aucucccugccucc

SEQ ID NO: 1353447 - RNA, 13 nt, Human
aucucccugccuc

SEQ ID NO: 1353448 - RNA, 20 nt, Human
aucucccugagaugggcuuc

SEQ ID NO: 1353449 - RNA, 17 nt, Human
aucuauggucgggagac

SEQ ID NO: 1353450 - RNA, 18 nt, Human
aucuaugcauuuucugga

SEQ ID NO: 1353451 - RNA, 16 nt, Human
aucuaugcauuuucug

SEQ ID NO: 1353452 - RNA, 22 nt, Human
aucuaucuuaauacuaaggaac

SEQ ID NO: 1353453 - RNA, 21 nt, Human
aucuauauuuuacauaaauuu

SEQ ID NO: 1353454 - RNA, 17 nt, Human
aucuauauuuuacauaa

SEQ ID NO: 1353455 - RNA, 18 nt, Human
augaaaaauugcugacug

SEQ ID NO: 1353456 - RNA, 16 nt, Human
augaaaaagaagaauc

SEQ ID NO: 1353457 - RNA, 17 nt, Human
augaaaaagaagaaucu

SEQ ID NO: 1353458 - RNA, 15 nt, Human
augaaaaagaagaau

SEQ ID NO: 1353459 - RNA, 14 nt, Human
augaaaaagaagaa

SEQ ID NO: 1353460 - RNA, 16 nt, Human
augaaaaaauguauau

SEQ ID NO: 1353461 - RNA, 18 nt, Human
augaaggugucauacaga

SEQ ID NO: 1353462 - RNA, 17 nt, Human
augaagguaaauaaaaa

SEQ ID NO: 1353463 - RNA, 15 nt, Human
augaagguaaauaaa

SEQ ID NO: 1353464 - RNA, 15 nt, Human
augaagggcccgaga

SEQ ID NO: 1353465 - RNA, 21 nt, Human
augaaggagaggcaacaucca

SEQ ID NO: 1353466 - RNA, 22 nt, Human
augaagcuuuuaugugaaacau

SEQ ID NO: 1353467 - RNA, 16 nt, Human
augaaguuuuacauug

SEQ ID NO: 1353468 - RNA, 14 nt, Human
augaaguuuuacau

SEQ ID NO: 1353469 - RNA, 19 nt, Human
augaaguuugaauguuaaa

SEQ ID NO: 1353470 - RNA, 20 nt, Human
augaaguuugaauguuaaau

SEQ ID NO: 1353471 - RNA, 19 nt, Human
augaaguuuuuuuuauaca

SEQ ID NO: 1353472 - RNA, 13 nt, Human
augaaguuugaau

SEQ ID NO: 1353473 - RNA, 14 nt, Human
augaaguuugaaug

SEQ ID NO: 1353474 - RNA, 15 nt, Human
augaaguuugaaugu

SEQ ID NO: 1353475 - RNA, 16 nt, Human
augaaguuugaauguu

SEQ ID NO: 1353476 - RNA, 18 nt, Human
augaaguuugaauguuaa

SEQ ID NO: 1353477 - RNA, 19 nt, Human
augaggacucuauucuuua

SEQ ID NO: 1353478 - RNA, 21 nt, Human
augagcucccacaagccugag

SEQ ID NO: 1353479 - RNA, 22 nt, Human
augagcucccacaagccugagg

SEQ ID NO: 1353480 - RNA, 20 nt, Human
augagcucccacaagccuga

SEQ ID NO: 1353481 - RNA, 10 nt, Human
augagcuccc

SEQ ID NO: 1353482 - RNA, 19 nt, Human
augagcuccuuaaggcucu

SEQ ID NO: 1353483 - RNA, 23 nt, Human
augaaguuuuuuuuauacaggau

SEQ ID NO: 1353484 - RNA, 15 nt, Human
aucggaaaaauaauc

SEQ ID NO: 1353485 - RNA, 15 nt, Human
aucggagccuccucu

SEQ ID NO: 1353486 - RNA, 16 nt, Human
aucggagccuccucuc

SEQ ID NO: 1353487 - RNA, 13 nt, Human
aucggaaaaauaa

SEQ ID NO: 1353488 - RNA, 13 nt, Human
auccucccagaaa

SEQ ID NO: 1353489 - RNA, 21 nt, Human
aucgcugggaaaugagaugac

SEQ ID NO: 1353490 - RNA, 15 nt, Human
aucggcauuuguuuc

SEQ ID NO: 1353491 - RNA, 20 nt, Human
auccucccacuucagccucc

SEQ ID NO: 1353492 - RNA, 19 nt, Human
auccuccacguucugcuca

SEQ ID NO: 1353493 - RNA, 21 nt, Human
auccucaaagaaaguguauug

SEQ ID NO: 1353494 - RNA, 20 nt, Human
auccucaaagaaaguguauu

SEQ ID NO: 1353495 - RNA, 19 nt, Human
auccucaaagaaaguguau

SEQ ID NO: 1353496 - RNA, 18 nt, Human
auccucaaagaaagugua

SEQ ID NO: 1353497 - RNA, 16 nt, Human
auccucaaagaaagug

SEQ ID NO: 1353498 - RNA, 15 nt, Human
auccucaaagaaagu

SEQ ID NO: 1353499 - RNA, 20 nt, Human
auccuauguuuuuguucaaa

SEQ ID NO: 1353500 - RNA, 12 nt, Human
auccuauguuuu

SEQ ID NO: 1353501 - RNA, 13 nt, Human
auccccuucuccc

SEQ ID NO: 1353502 - RNA, 20 nt, Human
auccccaacaugcacugaug

SEQ ID NO: 1353503 - RNA, 21 nt, Human
auccaggagcuccaguguccu

SEQ ID NO: 1353504 - RNA, 16 nt, Human
auccaggagcuccagu

SEQ ID NO: 1353505 - RNA, 15 nt, Human
auccaggagcuccag

SEQ ID NO: 1353506 - RNA, 14 nt, Human
auccaggagcucca

SEQ ID NO: 1353507 - RNA, 12 nt, Human
auccaggagcuc

SEQ ID NO: 1353508 - RNA, 23 nt, Human
auccaggacuauauuugggccug

SEQ ID NO: 1353509 - RNA, 22 nt, Human
auccaggacuauauuugggccu

SEQ ID NO: 1353510 - RNA, 14 nt, Human
auccagcucacuca

SEQ ID NO: 1353511 - RNA, 15 nt, Human
auccagcuauguuau

SEQ ID NO: 1353512 - RNA, 16 nt, Human
auccaggcagauccag

SEQ ID NO: 1353513 - RNA, 15 nt, Human
auccaggcagaucca

SEQ ID NO: 1353514 - RNA, 14 nt, Human
auccaggcagaucc

SEQ ID NO: 1353515 - RNA, 19 nt, Human
auccaggcagauccaggac

SEQ ID NO: 1353516 - RNA, 18 nt, Human
auccagaaagaaaacuug

SEQ ID NO: 1353517 - RNA, 16 nt, Human
auccagaaagaaaacu

SEQ ID NO: 1353518 - RNA, 17 nt, Human
aucagcuccuuccugga

SEQ ID NO: 1353519 - RNA, 15 nt, Human
aucaugugaaaucau

SEQ ID NO: 1353520 - RNA, 16 nt, Human
aucaugugaaaucauu

SEQ ID NO: 1353521 - RNA, 15 nt, Human
aucagcuccuuccug

SEQ ID NO: 1353522 - RNA, 13 nt, Human
aucagcuccuucc

SEQ ID NO: 1353523 - RNA, 17 nt, Human
aucagcuauuuugugaa

SEQ ID NO: 1353524 - RNA, 21 nt, Human
aucagcguggccuuguucugu

SEQ ID NO: 1353525 - RNA, 16 nt, Human
aucagcguggccuugu

SEQ ID NO: 1353526 - RNA, 15 nt, Human
aucagcguggccuug

SEQ ID NO: 1353527 - RNA, 13 nt, Human
aucagcguggccu

SEQ ID NO: 1353528 - RNA, 12 nt, Human
aucagcguggcc

SEQ ID NO: 1353529 - RNA, 14 nt, Human
aucagccaauuaug

SEQ ID NO: 1353530 - RNA, 19 nt, Human
aucagcacgauuucuguuu

SEQ ID NO: 1353531 - RNA, 20 nt, Human
aucagcacgauuucuguuua

SEQ ID NO: 1353532 - RNA, 23 nt, Human
aucagcacgauuucuguuuagau

SEQ ID NO: 1353533 - RNA, 12 nt, Human
aucagccaauua

SEQ ID NO: 1353534 - RNA, 14 nt, Human
aucacagcuucagc

SEQ ID NO: 1353535 - RNA, 18 nt, Human
aucacagcuucagccagg

SEQ ID NO: 1353536 - RNA, 21 nt, Human
aucacagcuucagccaggagc

SEQ ID NO: 1353537 - RNA, 22 nt, Human
aucacagcuucagccaggagcu

SEQ ID NO: 1353538 - RNA, 15 nt, Human
auauuuauuuuaaua

SEQ ID NO: 1353539 - RNA, 14 nt, Human
auauuuauuuuaau

SEQ ID NO: 1353540 - RNA, 17 nt, Human
auauuuauuuuaauaau

SEQ ID NO: 1353541 - RNA, 17 nt, Human
auaaagaaauagaacaa

SEQ ID NO: 1353542 - RNA, 18 nt, Human
auaaagaaauagaacaag

SEQ ID NO: 1353543 - RNA, 11 nt, Human
auaaagaaugg

SEQ ID NO: 1353544 - RNA, 13 nt, Human
auaaagcagcguu

SEQ ID NO: 1353545 - RNA, 14 nt, Human
auaaagcagcguuu

SEQ ID NO: 1353546 - RNA, 18 nt, Human
auaaagcagcguuucuau

SEQ ID NO: 1353547 - RNA, 19 nt, Human
auaaagcagcguuucuaug

SEQ ID NO: 1353548 - RNA, 20 nt, Human
auaaagcagcguuucuauga

SEQ ID NO: 1353549 - RNA, 22 nt, Human
auaaagccucaagguuuuaggu

SEQ ID NO: 1353550 - RNA, 21 nt, Human
auaaagccucaagguuuuagg

SEQ ID NO: 1353551 - RNA, 18 nt, Human
auaaagccucaagguuuu

SEQ ID NO: 1353552 - RNA, 14 nt, Human
auaaagcauuuaac

SEQ ID NO: 1353553 - RNA, 13 nt, Human
auaaagcauuuaa

SEQ ID NO: 1353554 - RNA, 12 nt, Human
auaaagcauuua

SEQ ID NO: 1353555 - RNA, 14 nt, Human
auaaagcaguauuu

SEQ ID NO: 1353556 - RNA, 16 nt, Human
auaaagcaguauuuuu

SEQ ID NO: 1353557 - RNA, 15 nt, Human
auaaagcaggcagaa

SEQ ID NO: 1353558 - RNA, 12 nt, Human
auaaaggaaaag

SEQ ID NO: 1353559 - RNA, 18 nt, Human
auaaagcuguguggcagu

SEQ ID NO: 1353560 - RNA, 22 nt, Human
auaaaggaugugauuguggaau

SEQ ID NO: 1353561 - RNA, 21 nt, Human
auaaaggaugugauuguggaa

SEQ ID NO: 1353562 - RNA, 17 nt, Human
auaaaggaugugauugu

SEQ ID NO: 1353563 - RNA, 14 nt, Human
auaaaggaugugau

SEQ ID NO: 1353564 - RNA, 18 nt, Human
auaaaggaaaagacacau

SEQ ID NO: 1353565 - RNA, 16 nt, Human
auaaaggaaaagacac

SEQ ID NO: 1353566 - RNA, 15 nt, Human
auaaaggaaaagaca

SEQ ID NO: 1353567 - RNA, 13 nt, Human
auaaaggauguga

SEQ ID NO: 1353568 - RNA, 14 nt, Human
auaaaggacuguaa

SEQ ID NO: 1353569 - RNA, 12 nt, Human
auaaaaaggugu

SEQ ID NO: 1353570 - RNA, 16 nt, Human
auaaaaagugcuuuug

SEQ ID NO: 1353571 - RNA, 14 nt, Human
auaaaaauaaaaaa

SEQ ID NO: 1353572 - RNA, 19 nt, Human
auaaaaauaaaaaagaucc

SEQ ID NO: 1353573 - RNA, 15 nt, Human
auaaaacuuuuuaaa

SEQ ID NO: 1353574 - RNA, 11 nt, Human
auaaaacuuuu

SEQ ID NO: 1353575 - RNA, 16 nt, Human
auaaaagaaaauuaca

SEQ ID NO: 1353576 - RNA, 13 nt, Human
auaaaagaaaauu

SEQ ID NO: 1353577 - RNA, 12 nt, Human
auaaaagaaaau

SEQ ID NO: 1353578 - RNA, 17 nt, Human
auaaaacuuuuuaaaau

SEQ ID NO: 1353579 - RNA, 21 nt, Human
auaaacuuuaccuuuuuuaua

SEQ ID NO: 1353580 - RNA, 13 nt, Human
auaaagaaaauga

SEQ ID NO: 1353581 - RNA, 19 nt, Human
auaaagaaaagaugcacuu

SEQ ID NO: 1353582 - RNA, 17 nt, Human
auaaagaaaagaugcac

SEQ ID NO: 1353583 - RNA, 16 nt, Human
auaaagaaaagaugca

SEQ ID NO: 1353584 - RNA, 15 nt, Human
auaaagaaaagaugc

SEQ ID NO: 1353585 - RNA, 14 nt, Human
auaaagaaaagaug

SEQ ID NO: 1353586 - RNA, 13 nt, Human
auaaagaaaagau

SEQ ID NO: 1353587 - RNA, 14 nt, Human
auaaaagaaaauua

SEQ ID NO: 1353588 - RNA, 20 nt, Human
auaaacuuuuuucuuacugu

SEQ ID NO: 1353589 - RNA, 24 nt, Human
auaaacuuuaccuuuuuuauacau

SEQ ID NO: 1353590 - RNA, 18 nt, Human
auaaaggcaguuuucuaa

SEQ ID NO: 1353591 - RNA, 17 nt, Human
auaaaggcaguuuucua

SEQ ID NO: 1353592 - RNA, 16 nt, Human
auaaaggcaguuuucu

SEQ ID NO: 1353593 - RNA, 18 nt, Human
auaaaggauuaaugucaa

SEQ ID NO: 1353594 - RNA, 14 nt, Human
auaacaacuucaua

SEQ ID NO: 1353595 - RNA, 21 nt, Human
auaacaaaugccaaauuaaaa

SEQ ID NO: 1353596 - RNA, 20 nt, Human
auaacaaaugccaaauuaaa

SEQ ID NO: 1353597 - RNA, 17 nt, Human
auaacaaaugccaaauu

SEQ ID NO: 1353598 - RNA, 15 nt, Human
auaaauuuuuuauaa

SEQ ID NO: 1353599 - RNA, 21 nt, Human
auaccuguguuucuugccuca

SEQ ID NO: 1353600 - RNA, 22 nt, Human
auaccuguguuucuugccucau

SEQ ID NO: 1353601 - RNA, 20 nt, Human
auaccuguguuucuugccuc

SEQ ID NO: 1353602 - RNA, 19 nt, Human
auaccuguguuucuugccu

SEQ ID NO: 1353603 - RNA, 12 nt, Human
auaccucacuuu

SEQ ID NO: 1353604 - RNA, 13 nt, Human
auacccacccaga

SEQ ID NO: 1353605 - RNA, 14 nt, Human
auacccacccagaa

SEQ ID NO: 1353606 - RNA, 21 nt, Human
auaaugggauuuucuuuucuu

SEQ ID NO: 1353607 - RNA, 21 nt, Human
auaaugcgugcauaccacuuu

SEQ ID NO: 1353608 - RNA, 11 nt, Human
auaaggcaggg

SEQ ID NO: 1353609 - RNA, 19 nt, Human
auaaggccauaaaacaggu

SEQ ID NO: 1353610 - RNA, 24 nt, Human
auaaggaaaucaacuugcuuauca

SEQ ID NO: 1353611 - RNA, 22 nt, Human
auaaggaaaucaacuugcuuau

SEQ ID NO: 1353612 - RNA, 20 nt, Human
auaaggaaaucaacuugcuu

SEQ ID NO: 1353613 - RNA, 13 nt, Human
auaagcuuuucuu

SEQ ID NO: 1353614 - RNA, 13 nt, Human
auaaggaaaagcu

SEQ ID NO: 1353615 - RNA, 14 nt, Human
auaagcuuuucuuu

SEQ ID NO: 1353616 - RNA, 23 nt, Human
auaccauuauauguucccccugu

SEQ ID NO: 1353617 - RNA, 21 nt, Human
auacaccacuacauucuguua

SEQ ID NO: 1353618 - RNA, 19 nt, Human
auacaccacuacauucugu

SEQ ID NO: 1353619 - RNA, 20 nt, Human
auacaccacuacauucuguu

SEQ ID NO: 1353620 - RNA, 15 nt, Human
auaaugucccuucac

SEQ ID NO: 1353621 - RNA, 23 nt, Human
auaauguuucaaacauauauaac

SEQ ID NO: 1353622 - RNA, 22 nt, Human
auaugcuucuguuuuauaauuu

SEQ ID NO: 1353623 - RNA, 20 nt, Human
auaugcuucuguuuuauaau

SEQ ID NO: 1353624 - RNA, 17 nt, Human
auauuacgguuugcccc

SEQ ID NO: 1353625 - RNA, 20 nt, Human
auaugcucugauuuaucuga

SEQ ID NO: 1353626 - RNA, 23 nt, Human
auaugcuucuguuuuauaauuuu

SEQ ID NO: 1353627 - RNA, 22 nt, Human
auauuaccacagacauacuaac

SEQ ID NO: 1353628 - RNA, 22 nt, Human
auauccuaaacaucauucauuu

SEQ ID NO: 1353629 - RNA, 19 nt, Human
auauccaaaagcuuuuuau

SEQ ID NO: 1353630 - RNA, 12 nt, Human
auauccaaaagc

SEQ ID NO: 1353631 - RNA, 15 nt, Human
auauccuaaacauca

SEQ ID NO: 1353632 - RNA, 13 nt, Human
auauccuaaacau

SEQ ID NO: 1353633 - RNA, 18 nt, Human
auauuuaccucagccugg

SEQ ID NO: 1353634 - RNA, 13 nt, Human
auauuuauuuuaa

SEQ ID NO: 1353635 - RNA, 14 nt, Human
auauuauuuuaugu

SEQ ID NO: 1353636 - RNA, 19 nt, Human
auauuuaccucagccuggg

SEQ ID NO: 1353637 - RNA, 17 nt, Human
auauuuaccucagccug

SEQ ID NO: 1353638 - RNA, 16 nt, Human
auauuuaccucagccu

SEQ ID NO: 1353639 - RNA, 15 nt, Human
auauuuaccucagcc

SEQ ID NO: 1353640 - RNA, 21 nt, Human
auauuuacaugaauugcauuu

SEQ ID NO: 1353641 - RNA, 19 nt, Human
auauuauuccucaaaaaau

SEQ ID NO: 1353642 - RNA, 23 nt, Human
auauuauuauaaucuuauaauug

SEQ ID NO: 1353643 - RNA, 21 nt, Human
auauuauuauaaucuuauaau

SEQ ID NO: 1353644 - RNA, 19 nt, Human
auauuauuauaaucuuaua

SEQ ID NO: 1353645 - RNA, 18 nt, Human
auauuauuauaaucuuau

SEQ ID NO: 1353646 - RNA, 22 nt, Human
auauuauuaguuuugauuuaau

SEQ ID NO: 1353647 - RNA, 19 nt, Human
auauuauuaguuuugauuu

SEQ ID NO: 1353648 - RNA, 19 nt, Human
auauuauuacuuguaaaua

SEQ ID NO: 1353649 - RNA, 17 nt, Human
auauuauuacuuguaaa

SEQ ID NO: 1353650 - RNA, 15 nt, Human
auauuauuacuugua

SEQ ID NO: 1353651 - RNA, 12 nt, Human
auauuauuacuu

SEQ ID NO: 1353652 - RNA, 15 nt, Human
auauuaugagaugcu

SEQ ID NO: 1353653 - RNA, 14 nt, Human
auauuaugagaugc

SEQ ID NO: 1353654 - RNA, 16 nt, Human
auauuaugagaugcug

SEQ ID NO: 1353655 - RNA, 20 nt, Human
auauuauauggaaauauaua

SEQ ID NO: 1353656 - RNA, 19 nt, Human
auauuauauggaaauauau

SEQ ID NO: 1353657 - RNA, 18 nt, Human
auauuauauggaaauaua

SEQ ID NO: 1353658 - RNA, 13 nt, Human
auauuauauggaa

SEQ ID NO: 1353659 - RNA, 12 nt, Human
auauuauaugga

SEQ ID NO: 1353660 - RNA, 13 nt, Human
auauuaucuuuuc

SEQ ID NO: 1353661 - RNA, 23 nt, Human
auauuaugaagcuuuuaugugaa

SEQ ID NO: 1353662 - RNA, 21 nt, Human
auaucaucuaccuagauuuaa

SEQ ID NO: 1353663 - RNA, 21 nt, Human
auaucaugagugaauaaaugu

SEQ ID NO: 1353664 - RNA, 20 nt, Human
auaucaucuaccuagauuua

SEQ ID NO: 1353665 - RNA, 16 nt, Human
auaucaucuaccuaga

SEQ ID NO: 1353666 - RNA, 24 nt, Human
auaucauccacacaugaaucugca

SEQ ID NO: 1353667 - RNA, 18 nt, Human
auaucauccacacaugaa

SEQ ID NO: 1353668 - RNA, 16 nt, Human
auaucauccacacaug

SEQ ID NO: 1353669 - RNA, 23 nt, Human
auauauuuuuuuuuaagcucuga

SEQ ID NO: 1353670 - RNA, 19 nt, Human
auauauuuuuuucugaaau

SEQ ID NO: 1353671 - RNA, 16 nt, Human
auaucaaauauauuca

SEQ ID NO: 1353672 - RNA, 19 nt, Human
auagcccacuuacauuuac

SEQ ID NO: 1353673 - RNA, 15 nt, Human
auagcccacuuacau

SEQ ID NO: 1353674 - RNA, 13 nt, Human
auagcccacuuac

SEQ ID NO: 1353675 - RNA, 23 nt, Human
auagccauauuuguaaaaugaca

SEQ ID NO: 1353676 - RNA, 22 nt, Human
auagccauauuuguaaaaugac

SEQ ID NO: 1353677 - RNA, 20 nt, Human
auagccauauuuguaaaaug

SEQ ID NO: 1353678 - RNA, 16 nt, Human
auagccauauuuguaa

SEQ ID NO: 1353679 - RNA, 12 nt, Human
auagccauauuu

SEQ ID NO: 1353680 - RNA, 23 nt, Human
auagccacuaaccuugccuggua

SEQ ID NO: 1353681 - RNA, 22 nt, Human
auagccacuaaccuugccuggu

SEQ ID NO: 1353682 - RNA, 21 nt, Human
auagccacuaaccuugccugg

SEQ ID NO: 1353683 - RNA, 20 nt, Human
auagccacuaaccuugccug

SEQ ID NO: 1353684 - RNA, 15 nt, Human
auagccacuaaccuu

SEQ ID NO: 1353685 - RNA, 13 nt, Human
auagccacuaacc

SEQ ID NO: 1353686 - RNA, 23 nt, Human
auagccacauuuggaauacuuuu

SEQ ID NO: 1353687 - RNA, 22 nt, Human
auagccacauuuggaauacuuu

SEQ ID NO: 1353688 - RNA, 21 nt, Human
auagccacauuuggaauacuu

SEQ ID NO: 1353689 - RNA, 16 nt, Human
auagccacauuuggaa

SEQ ID NO: 1353690 - RNA, 13 nt, Human
auagccacauuug

SEQ ID NO: 1353691 - RNA, 18 nt, Human
auagccaaaaauagcuaa

SEQ ID NO: 1353692 - RNA, 16 nt, Human
auagccaaaaauagcu

SEQ ID NO: 1353693 - RNA, 15 nt, Human
auagccaaaaauagc

SEQ ID NO: 1353694 - RNA, 14 nt, Human
auagccaaaaauag

SEQ ID NO: 1353695 - RNA, 13 nt, Human
auagccaaaaaua

SEQ ID NO: 1353696 - RNA, 23 nt, Human
auaggugauccauguaacugccu

SEQ ID NO: 1353697 - RNA, 20 nt, Human
auaggugauccauguaacug

SEQ ID NO: 1353698 - RNA, 15 nt, Human
auaggucugaaauuu

SEQ ID NO: 1353699 - RNA, 14 nt, Human
auaggucugaaauu

SEQ ID NO: 1353700 - RNA, 13 nt, Human
auaggucugaaau

SEQ ID NO: 1353701 - RNA, 23 nt, Human
auagguagaauguaaagcuuguc

SEQ ID NO: 1353702 - RNA, 12 nt, Human
auagguuuagag

SEQ ID NO: 1353703 - RNA, 12 nt, Human
auagguuauuuu

SEQ ID NO: 1353704 - RNA, 18 nt, Human
auagguuuggacaaaaug

SEQ ID NO: 1353705 - RNA, 14 nt, Human
auagguuuggacaa

SEQ ID NO: 1353706 - RNA, 15 nt, Human
auagguuuaauaauu

SEQ ID NO: 1353707 - RNA, 17 nt, Human
auauagaaguauaaaga

SEQ ID NO: 1353708 - RNA, 20 nt, Human
auauagaaguauaaagaauu

SEQ ID NO: 1353709 - RNA, 20 nt, Human
auauacuuuuuuuucuuuaa

SEQ ID NO: 1353710 - RNA, 11 nt, Human
auauacuuuuu

SEQ ID NO: 1353711 - RNA, 18 nt, Human
auauacuuuuacaaguaa

SEQ ID NO: 1353712 - RNA, 23 nt, Human
auauagaucaguuauaaguagca

SEQ ID NO: 1353713 - RNA, 20 nt, Human
auauacuuugaaaggagaug

SEQ ID NO: 1353714 - RNA, 21 nt, Human
auauacuuguggacuaaaaga

SEQ ID NO: 1353715 - RNA, 14 nt, Human
auauacuuguggac

SEQ ID NO: 1353716 - RNA, 15 nt, Human
auauacuuguggacu

SEQ ID NO: 1353717 - RNA, 22 nt, Human
auauacucuagaugaaguuuua

SEQ ID NO: 1353718 - RNA, 17 nt, Human
auagucaaauuguguga

SEQ ID NO: 1353719 - RNA, 18 nt, Human
auaguauuuuuauauuua

SEQ ID NO: 1353720 - RNA, 14 nt, Human
auagucaaauugug

SEQ ID NO: 1353721 - RNA, 12 nt, Human
agugacagcuag

SEQ ID NO: 1353722 - RNA, 20 nt, Human
agugacagcuaggaugugca

SEQ ID NO: 1353723 - RNA, 16 nt, Human
agugaaguugcugcuu

SEQ ID NO: 1353724 - RNA, 23 nt, Human
agugaaguugcugcuucucccag

SEQ ID NO: 1353725 - RNA, 15 nt, Human
agugaaguugcugcu

SEQ ID NO: 1353726 - RNA, 14 nt, Human
agugaaguugcugc

SEQ ID NO: 1353727 - RNA, 21 nt, Human
agugaaggcuucucucugugg

SEQ ID NO: 1353728 - RNA, 15 nt, Human
agugaaggcuucucu

SEQ ID NO: 1353729 - RNA, 16 nt, Human
agugaagacuggaagc

SEQ ID NO: 1353730 - RNA, 15 nt, Human
agugaagacagaagu

SEQ ID NO: 1353731 - RNA, 21 nt, Human
agugaagacuagaaaauuaga

SEQ ID NO: 1353732 - RNA, 14 nt, Human
agugaagacagaag

SEQ ID NO: 1353733 - RNA, 20 nt, Human
agugaagacagaaccacagg

SEQ ID NO: 1353734 - RNA, 13 nt, Human
agugaagacagaa

SEQ ID NO: 1353735 - RNA, 12 nt, Human
agugaagacaga

SEQ ID NO: 1353736 - RNA, 16 nt, Human
agugaagacaaugacu

SEQ ID NO: 1353737 - RNA, 22 nt, Human
agugaagaauacuucucauuuu

SEQ ID NO: 1353738 - RNA, 14 nt, Human
agugaagaauacuu

SEQ ID NO: 1353739 - RNA, 12 nt, Human
agugaagaauac

SEQ ID NO: 1353740 - RNA, 14 nt, Human
agugaagacaauga

SEQ ID NO: 1353741 - RNA, 22 nt, Human
agucugccagggccccucuccc

SEQ ID NO: 1353742 - RNA, 13 nt, Human
agucugccagggc

SEQ ID NO: 1353743 - RNA, 11 nt, Human
agucugccagg

SEQ ID NO: 1353744 - RNA, 14 nt, Human
agucugccacccag

SEQ ID NO: 1353745 - RNA, 21 nt, Human
aguccugugaaugccacugcc

SEQ ID NO: 1353746 - RNA, 12 nt, Human
aguccuguaaug

SEQ ID NO: 1353747 - RNA, 20 nt, Human
aguccugugaaugccacugc

SEQ ID NO: 1353748 - RNA, 19 nt, Human
aguccugugaaugccacug

SEQ ID NO: 1353749 - RNA, 18 nt, Human
aguccugugaaugccacu

SEQ ID NO: 1353750 - RNA, 13 nt, Human
aguccugugaaug

SEQ ID NO: 1353751 - RNA, 19 nt, Human
aguccugggauuacaggug

SEQ ID NO: 1353752 - RNA, 17 nt, Human
agugacccacaugccau

SEQ ID NO: 1353753 - RNA, 16 nt, Human
agucaacaguaaacca

SEQ ID NO: 1353754 - RNA, 15 nt, Human
agucaacaguaaacc

SEQ ID NO: 1353755 - RNA, 14 nt, Human
agucaacaguaaac

SEQ ID NO: 1353756 - RNA, 13 nt, Human
agucaacaguaaa

SEQ ID NO: 1353757 - RNA, 21 nt, Human
agucaacaguaaaccacugaa

SEQ ID NO: 1353758 - RNA, 20 nt, Human
agucaacaguaaaccacuga

SEQ ID NO: 1353759 - RNA, 18 nt, Human
agucaacaguaaaccacu

SEQ ID NO: 1353760 - RNA, 17 nt, Human
agucaacaguaaaccac

SEQ ID NO: 1353761 - RNA, 22 nt, Human
agucaacaguaaaccacugaaa

SEQ ID NO: 1353762 - RNA, 19 nt, Human
aguauggggguuguaaauu

SEQ ID NO: 1353763 - RNA, 18 nt, Human
aguauggggguuguaaau

SEQ ID NO: 1353764 - RNA, 18 nt, Human
aguauggguuagggaaaa

SEQ ID NO: 1353765 - RNA, 14 nt, Human
agucaaauaacucc

SEQ ID NO: 1353766 - RNA, 23 nt, Human
agucaaaugguaggcauuuccua

SEQ ID NO: 1353767 - RNA, 22 nt, Human
agucaaaugguaggcauuuccu

SEQ ID NO: 1353768 - RNA, 23 nt, Human
agucaaauugugugaaagguacu

SEQ ID NO: 1353769 - RNA, 16 nt, Human
aguauggccuguguca

SEQ ID NO: 1353770 - RNA, 15 nt, Human
aguauggccuguguc

SEQ ID NO: 1353771 - RNA, 17 nt, Human
aguaugaauuauucaau

SEQ ID NO: 1353772 - RNA, 20 nt, Human
aguaugcuuggacugaaggg

SEQ ID NO: 1353773 - RNA, 22 nt, Human
aguaugaauuauucaauuuauu

SEQ ID NO: 1353774 - RNA, 17 nt, Human
aguaugaggcauuuguu

SEQ ID NO: 1353775 - RNA, 15 nt, Human
aguaugaggcauuug

SEQ ID NO: 1353776 - RNA, 16 nt, Human
aguaugaggcauuugu

SEQ ID NO: 1353777 - RNA, 12 nt, Human
aguaucuuuuga

SEQ ID NO: 1353778 - RNA, 16 nt, Human
aguaucuuuuuauuca

SEQ ID NO: 1353779 - RNA, 18 nt, Human
aguaucucuucagucucu

SEQ ID NO: 1353780 - RNA, 16 nt, Human
aguaucucuucagucu

SEQ ID NO: 1353781 - RNA, 18 nt, Human
aguuguucuuuuuagaaa

SEQ ID NO: 1353782 - RNA, 23 nt, Human
aguuguucgggccaaggaccuga

SEQ ID NO: 1353783 - RNA, 23 nt, Human
aguuguguuucaacggaaagugc

SEQ ID NO: 1353784 - RNA, 14 nt, Human
aguuguguuucaac

SEQ ID NO: 1353785 - RNA, 12 nt, Human
aguuguuguaac

SEQ ID NO: 1353786 - RNA, 16 nt, Human
aguuguuguaaccugc

SEQ ID NO: 1353787 - RNA, 21 nt, Human
aguugugucuggcaguuuaua

SEQ ID NO: 1353788 - RNA, 16 nt, Human
aguuguguuugaagca

SEQ ID NO: 1353789 - RNA, 19 nt, Human
aguugaaaauaaaguguau

SEQ ID NO: 1353790 - RNA, 18 nt, Human
aguugaaaauaaagugua

SEQ ID NO: 1353791 - RNA, 16 nt, Human
aguugaaaauaaagug

SEQ ID NO: 1353792 - RNA, 23 nt, Human
aguugaaaaucuuauaauuuaaa

SEQ ID NO: 1353793 - RNA, 18 nt, Human
aguuaaucuugcuuucuu

SEQ ID NO: 1353794 - RNA, 16 nt, Human
aguuaaucuugcuuuc

SEQ ID NO: 1353795 - RNA, 15 nt, Human
aguuaaucuugcuuu

SEQ ID NO: 1353796 - RNA, 14 nt, Human
aguuaaucuugcuu

SEQ ID NO: 1353797 - RNA, 18 nt, Human
aguuaaucaucaagagaa

SEQ ID NO: 1353798 - RNA, 19 nt, Human
aguuaaucaucaagagaau

SEQ ID NO: 1353799 - RNA, 15 nt, Human
aguuaaucaucaaga

SEQ ID NO: 1353800 - RNA, 19 nt, Human
aguuacagaaaugauuacu

SEQ ID NO: 1353801 - RNA, 18 nt, Human
aguucauuagaaauauuu

SEQ ID NO: 1353802 - RNA, 23 nt, Human
aguucauuagaaauauuuuaaaa

SEQ ID NO: 1353803 - RNA, 16 nt, Human
aguucauuagaaauau

SEQ ID NO: 1353804 - RNA, 15 nt, Human
aguucauuagaaaua

SEQ ID NO: 1353805 - RNA, 16 nt, Human
aguucaugucugcuau

SEQ ID NO: 1353806 - RNA, 17 nt, Human
aguucaugucugcuauc

SEQ ID NO: 1353807 - RNA, 17 nt, Human
aguucauguaaauaaua

SEQ ID NO: 1353808 - RNA, 16 nt, Human
aguucauguaaauaau

SEQ ID NO: 1353809 - RNA, 14 nt, Human
aguucauguaaaua

SEQ ID NO: 1353810 - RNA, 13 nt, Human
aguucauguaaau

SEQ ID NO: 1353811 - RNA, 22 nt, Human
aguucaugcagcuguggcagag

SEQ ID NO: 1353812 - RNA, 13 nt, Human
aguucaugcagcu

SEQ ID NO: 1353813 - RNA, 21 nt, Human
aguucaugagaaucuauauuu

SEQ ID NO: 1353814 - RNA, 13 nt, Human
aguucaugagaau

SEQ ID NO: 1353815 - RNA, 19 nt, Human
aguuccaagagucuaaaga

SEQ ID NO: 1353816 - RNA, 14 nt, Human
aguuccaagagucu

SEQ ID NO: 1353817 - RNA, 13 nt, Human
aguuccaagaguc

SEQ ID NO: 1353818 - RNA, 22 nt, Human
aguugaaaaucuuauaauuuaa

SEQ ID NO: 1353819 - RNA, 21 nt, Human
aguguccugagcucagcgugg

SEQ ID NO: 1353820 - RNA, 17 nt, Human
aguguccugagcucagc

SEQ ID NO: 1353821 - RNA, 15 nt, Human
aguguccugagcuca

SEQ ID NO: 1353822 - RNA, 20 nt, Human
aguguccugagcucagcgug

SEQ ID NO: 1353823 - RNA, 16 nt, Human
agugucuguguuuuga

SEQ ID NO: 1353824 - RNA, 22 nt, Human
agugucuguguuuugaaagaau

SEQ ID NO: 1353825 - RNA, 13 nt, Human
aguguccugagcu

SEQ ID NO: 1353826 - RNA, 18 nt, Human
aguguccugagccccagg

SEQ ID NO: 1353827 - RNA, 22 nt, Human
aguguccucuucccucucugca

SEQ ID NO: 1353828 - RNA, 14 nt, Human
aguguccucagggg

SEQ ID NO: 1353829 - RNA, 17 nt, Human
aguguauuuuuuuacua

SEQ ID NO: 1353830 - RNA, 18 nt, Human
aguguauuuuuuuacuaa

SEQ ID NO: 1353831 - RNA, 23 nt, Human
aguguauuuggaaauaaagucag

SEQ ID NO: 1353832 - RNA, 14 nt, Human
aguguauuuggaaa

SEQ ID NO: 1353833 - RNA, 22 nt, Human
aguguauggaaauaaauguauc

SEQ ID NO: 1353834 - RNA, 21 nt, Human
aguguauggaaauaaauguau

SEQ ID NO: 1353835 - RNA, 20 nt, Human
aguguauggaaauaaaugua

SEQ ID NO: 1353836 - RNA, 16 nt, Human
aguguauggaaauaaa

SEQ ID NO: 1353837 - RNA, 19 nt, Human
aguguaugauuacuggccu

SEQ ID NO: 1353838 - RNA, 15 nt, Human
aguguaugauuacug

SEQ ID NO: 1353839 - RNA, 14 nt, Human
aguguaugauuacu

SEQ ID NO: 1353840 - RNA, 18 nt, Human
aguguaugacugcacaug

SEQ ID NO: 1353841 - RNA, 17 nt, Human
aguggcuuuaaugaaua

SEQ ID NO: 1353842 - RNA, 14 nt, Human
agugggagccaggg

SEQ ID NO: 1353843 - RNA, 17 nt, Human
aguggcugguccagggc

SEQ ID NO: 1353844 - RNA, 15 nt, Human
aguggcugguccagg

SEQ ID NO: 1353845 - RNA, 19 nt, Human
aguggcugguccagggcua

SEQ ID NO: 1353846 - RNA, 18 nt, Human
aguggcugguccagggcu

SEQ ID NO: 1353847 - RNA, 19 nt, Human
aguggcgcgaucucagcuc

SEQ ID NO: 1353848 - RNA, 20 nt, Human
aguggcgcgaucucagcuca

SEQ ID NO: 1353849 - RNA, 19 nt, Human
aguggcgugaucucagcuc

SEQ ID NO: 1353850 - RNA, 14 nt, Human
aguggcucaacauu

SEQ ID NO: 1353851 - RNA, 20 nt, Human
aguggcgugaucucagcuca

SEQ ID NO: 1353852 - RNA, 17 nt, Human
ggagagacacugguggg

SEQ ID NO: 1353853 - RNA, 15 nt, Human
ggagacugcccagcu

SEQ ID NO: 1353854 - RNA, 13 nt, Human
ggcacucuagauu

SEQ ID NO: 1353855 - RNA, 13 nt, Human
ggcacaucagcac

SEQ ID NO: 1353856 - RNA, 19 nt, Human
ggcacagggucugcucuuu

SEQ ID NO: 1353857 - RNA, 18 nt, Human
ggcacagggucugcucuu

SEQ ID NO: 1353858 - RNA, 17 nt, Human
ggcacagggucugcucu

SEQ ID NO: 1353859 - RNA, 12 nt, Human
ggcacagggucu

SEQ ID NO: 1353860 - RNA, 22 nt, Human
ggcacuuugaaggggccucacc

SEQ ID NO: 1353861 - RNA, 18 nt, Human
ggcacuuggcagccuugu

SEQ ID NO: 1353862 - RNA, 17 nt, Human
ggcacuuggcagccuug

SEQ ID NO: 1353863 - RNA, 20 nt, Human
ggcacuguaguucuaagacu

SEQ ID NO: 1353864 - RNA, 14 nt, Human
ggcacuuaaagcuu

SEQ ID NO: 1353865 - RNA, 18 nt, Human
ggcacuguaguucuaaga

SEQ ID NO: 1353866 - RNA, 17 nt, Human
ggcacuguaguucuaag

SEQ ID NO: 1353867 - RNA, 24 nt, Human
ggcacugcccugguggcccucucc

SEQ ID NO: 1353868 - RNA, 14 nt, Human
ggcacugcccuggu

SEQ ID NO: 1353869 - RNA, 12 nt, Human
ggcacugcccug

SEQ ID NO: 1353870 - RNA, 20 nt, Human
ggcacugcccugguggcccu

SEQ ID NO: 1353871 - RNA, 18 nt, Human
ggcagcagggcuacccug

SEQ ID NO: 1353872 - RNA, 13 nt, Human
ggcagcagggcua

SEQ ID NO: 1353873 - RNA, 23 nt, Human
ggcagcagcccccagcucccacc

SEQ ID NO: 1353874 - RNA, 15 nt, Human
ggcagcagcccccag

SEQ ID NO: 1353875 - RNA, 14 nt, Human
ggcagcagccccca

SEQ ID NO: 1353876 - RNA, 12 nt, Human
ggcagcagcccc

SEQ ID NO: 1353877 - RNA, 22 nt, Human
ggcagcagccagcccugccugg

SEQ ID NO: 1353878 - RNA, 23 nt, Human
ggcagcagccagcccugccugga

SEQ ID NO: 1353879 - RNA, 21 nt, Human
ggcagcagccagcccugccug

SEQ ID NO: 1353880 - RNA, 20 nt, Human
ggcagcagccagcccugccu

SEQ ID NO: 1353881 - RNA, 19 nt, Human
ggcagcagccagcccugcc

SEQ ID NO: 1353882 - RNA, 18 nt, Human
ggcagcagccagcccugc

SEQ ID NO: 1353883 - RNA, 17 nt, Human
ggcagcagccagcccug

SEQ ID NO: 1353884 - RNA, 16 nt, Human
ggcagcagccagcccu

SEQ ID NO: 1353885 - RNA, 15 nt, Human
ggcagcagccagccc

SEQ ID NO: 1353886 - RNA, 14 nt, Human
ggcagcagccagcc

SEQ ID NO: 1353887 - RNA, 13 nt, Human
ggcagcagccagc

SEQ ID NO: 1353888 - RNA, 18 nt, Human
ggcagacucuuuaugcuu

SEQ ID NO: 1353889 - RNA, 20 nt, Human
ggcagcagugugaggccagg

SEQ ID NO: 1353890 - RNA, 19 nt, Human
ggcagcagugugaggccag

SEQ ID NO: 1353891 - RNA, 14 nt, Human
ggcagcagugugag

SEQ ID NO: 1353892 - RNA, 13 nt, Human
ggcagcaguguga

SEQ ID NO: 1353893 - RNA, 15 nt, Human
ggcagcagggguugg

SEQ ID NO: 1353894 - RNA, 22 nt, Human
ggcagcagggguuggggaaaca

SEQ ID NO: 1353895 - RNA, 21 nt, Human
ggcagcagggcuacccugagc

SEQ ID NO: 1353896 - RNA, 10 nt, Human
ggcaguuuuu

SEQ ID NO: 1353897 - RNA, 23 nt, Human
ggcaguucgcagccacccugagg

SEQ ID NO: 1353898 - RNA, 22 nt, Human
ggcaguucgcagccacccugag

SEQ ID NO: 1353899 - RNA, 21 nt, Human
ggcaguucgcagccacccuga

SEQ ID NO: 1353900 - RNA, 20 nt, Human
ggcaguucgcagccacccug

SEQ ID NO: 1353901 - RNA, 19 nt, Human
ggcaguucgcagccacccu

SEQ ID NO: 1353902 - RNA, 18 nt, Human
ggcaguucgcagccaccc

SEQ ID NO: 1353903 - RNA, 17 nt, Human
ggcaguucgcagccacc

SEQ ID NO: 1353904 - RNA, 16 nt, Human
ggcaguucgcagccac

SEQ ID NO: 1353905 - RNA, 15 nt, Human
ggcaguucgcagcca

SEQ ID NO: 1353906 - RNA, 16 nt, Human
ggcaguuauauuuugc

SEQ ID NO: 1353907 - RNA, 14 nt, Human
ggcaguuauauuuu

SEQ ID NO: 1353908 - RNA, 12 nt, Human
ggcaguuauauu

SEQ ID NO: 1353909 - RNA, 23 nt, Human
ggcaguuaccauuaaaccaucuc

SEQ ID NO: 1353910 - RNA, 24 nt, Human
ggcaguuaccauuaaaccaucucc

SEQ ID NO: 1353911 - RNA, 22 nt, Human
ggcaguuaccauuaaaccaucu

SEQ ID NO: 1353912 - RNA, 16 nt, Human
ggcaguuaccauuaaa

SEQ ID NO: 1353913 - RNA, 20 nt, Human
ggcaguggugguuuucuguu

SEQ ID NO: 1353914 - RNA, 21 nt, Human
ggcaguggugguuuucuguuc

SEQ ID NO: 1353915 - RNA, 14 nt, Human
ggcaggggacagga

SEQ ID NO: 1353916 - RNA, 20 nt, Human
ggcagggcucuccuggcuuc

SEQ ID NO: 1353917 - RNA, 18 nt, Human
ggcagggcucuccuggcu

SEQ ID NO: 1353918 - RNA, 17 nt, Human
ggcagggcucuccuggc

SEQ ID NO: 1353919 - RNA, 16 nt, Human
ggcagggcucuccugg

SEQ ID NO: 1353920 - RNA, 13 nt, Human
ggcagggcucucc

SEQ ID NO: 1353921 - RNA, 12 nt, Human
ggcagggcucuc

SEQ ID NO: 1353922 - RNA, 19 nt, Human
ggcagggcucuccuggcuu

SEQ ID NO: 1353923 - RNA, 22 nt, Human
ggcagggcgggcagagggcugg

SEQ ID NO: 1353924 - RNA, 23 nt, Human
ggcagggcgggcagagggcugga

SEQ ID NO: 1353925 - RNA, 21 nt, Human
ggcagggcgggcagagggcug

SEQ ID NO: 1353926 - RNA, 19 nt, Human
ggcagggcgggcagagggc

SEQ ID NO: 1353927 - RNA, 23 nt, Human
ggcccucgcugccagcucuguau

SEQ ID NO: 1353928 - RNA, 22 nt, Human
ggcccucgcugccagcucugua

SEQ ID NO: 1353929 - RNA, 21 nt, Human
ggcccucgcugccagcucugu

SEQ ID NO: 1353930 - RNA, 19 nt, Human
ggcccucgcugccagcucu

SEQ ID NO: 1353931 - RNA, 16 nt, Human
ggcccucgcugccagc

SEQ ID NO: 1353932 - RNA, 15 nt, Human
ggcccucgcugccag

SEQ ID NO: 1353933 - RNA, 18 nt, Human
ggcccggcagggcgggca

SEQ ID NO: 1353934 - RNA, 14 nt, Human
ggcccggcagggcg

SEQ ID NO: 1353935 - RNA, 13 nt, Human
ggcccggcagggc

SEQ ID NO: 1353936 - RNA, 18 nt, Human
ggccucagcucccacaag

SEQ ID NO: 1353937 - RNA, 19 nt, Human
ggccucaccgagugggggc

SEQ ID NO: 1353938 - RNA, 20 nt, Human
ggccgaagcuaacagggaag

SEQ ID NO: 1353939 - RNA, 18 nt, Human
ggccucaccgaguggggg

SEQ ID NO: 1353940 - RNA, 18 nt, Human
ggccucacccaccccugc

SEQ ID NO: 1353941 - RNA, 17 nt, Human
ggccucacccaccccug

SEQ ID NO: 1353942 - RNA, 13 nt, Human
ggccucacccacc

SEQ ID NO: 1353943 - RNA, 12 nt, Human
ggccucacccac

SEQ ID NO: 1353944 - RNA, 18 nt, Human
ggccgaagcuaacaggga

SEQ ID NO: 1353945 - RNA, 19 nt, Human
ggcccuugaguccccauug

SEQ ID NO: 1353946 - RNA, 19 nt, Human
ggccaguguuuaaaacuuc

SEQ ID NO: 1353947 - RNA, 14 nt, Human
ggccaguguuuaaa

SEQ ID NO: 1353948 - RNA, 14 nt, Human
ggccagucugugga

SEQ ID NO: 1353949 - RNA, 13 nt, Human
ggccagucugugg

SEQ ID NO: 1353950 - RNA, 23 nt, Human
ggccagucuguggaucagagaug

SEQ ID NO: 1353951 - RNA, 18 nt, Human
ggccagucuguggaucag

SEQ ID NO: 1353952 - RNA, 15 nt, Human
ggccagucuguggau

SEQ ID NO: 1353953 - RNA, 17 nt, Human
ggcauacuauguggaug

SEQ ID NO: 1353954 - RNA, 22 nt, Human
ggcauacgagagcagaggucuc

SEQ ID NO: 1353955 - RNA, 17 nt, Human
aaaaccaucaaguugug

SEQ ID NO: 1353956 - RNA, 22 nt, Human
aaaaccugagauuuauuaaaga

SEQ ID NO: 1353957 - RNA, 14 nt, Human
aaaaccuuuugaaa

SEQ ID NO: 1353958 - RNA, 12 nt, Human
aaaacucuuuga

SEQ ID NO: 1353959 - RNA, 15 nt, Human
aaaacucuuucggua

SEQ ID NO: 1353960 - RNA, 19 nt, Human
aaaacucuuauaaauuucu

SEQ ID NO: 1353961 - RNA, 21 nt, Human
aaaacucuacuuaauccaaug

SEQ ID NO: 1353962 - RNA, 16 nt, Human
aaaagcaaaaaagaaa

SEQ ID NO: 1353963 - RNA, 21 nt, Human
aaaagauugcugaaauuuuau

SEQ ID NO: 1353964 - RNA, 18 nt, Human
aaaagauugcugaaauuu

SEQ ID NO: 1353965 - RNA, 16 nt, Human
aaaagauugcugaaau

SEQ ID NO: 1353966 - RNA, 14 nt, Human
aaaagauugcugaa

SEQ ID NO: 1353967 - RNA, 21 nt, Human
aaaagauugaaguauuuugcu

SEQ ID NO: 1353968 - RNA, 21 nt, Human
aaaacuucaguuucacagaaa

SEQ ID NO: 1353969 - RNA, 21 nt, Human
aaaacuuaugcugauuuauuu

SEQ ID NO: 1353970 - RNA, 12 nt, Human
aaaaauguauuu

SEQ ID NO: 1353971 - RNA, 18 nt, Human
aaaaauguaggagacugu

SEQ ID NO: 1353972 - RNA, 16 nt, Human
aaaaauguauaugcac

SEQ ID NO: 1353973 - RNA, 12 nt, Human
aaaaauguagga

SEQ ID NO: 1353974 - RNA, 11 nt, Human
aaaaauguagg

SEQ ID NO: 1353975 - RNA, 13 nt, Human
aaaacaugcuaca

SEQ ID NO: 1353976 - RNA, 14 nt, Human
aaaacaugcuacac

SEQ ID NO: 1353977 - RNA, 20 nt, Human
aaaaccacauggcacagaga

SEQ ID NO: 1353978 - RNA, 24 nt, Human
aaaacaucuuugaaauuauguaaa

SEQ ID NO: 1353979 - RNA, 16 nt, Human
aaaacaucuuugaaau

SEQ ID NO: 1353980 - RNA, 14 nt, Human
aaaacaucuuugaa

SEQ ID NO: 1353981 - RNA, 15 nt, Human
aaaacaugcuacaca

SEQ ID NO: 1353982 - RNA, 13 nt, Human
aaaaaugguaauu

SEQ ID NO: 1353983 - RNA, 12 nt, Human
gggaccaggagu

SEQ ID NO: 1353984 - RNA, 18 nt, Human
gggaccaggagugggugg

SEQ ID NO: 1353985 - RNA, 19 nt, Human
gggaccacccugagccggc

SEQ ID NO: 1353986 - RNA, 20 nt, Human
gggaccagcagccccacacc

SEQ ID NO: 1353987 - RNA, 17 nt, Human
gggaccacccugagccg

SEQ ID NO: 1353988 - RNA, 20 nt, Human
gggacauuccaaagaacagc

SEQ ID NO: 1353989 - RNA, 19 nt, Human
gggacaugcuuagcagucc

SEQ ID NO: 1353990 - RNA, 19 nt, Human
gggacauuugcucauggaa

SEQ ID NO: 1353991 - RNA, 14 nt, Human
gggaggucauuuug

SEQ ID NO: 1353992 - RNA, 15 nt, Human
gggaggguaccagca

SEQ ID NO: 1353993 - RNA, 16 nt, Human
gggaggguaggcagga

SEQ ID NO: 1353994 - RNA, 20 nt, Human
gggaugacuaaaauauuuau

SEQ ID NO: 1353995 - RNA, 19 nt, Human
gggaugacuaaaauauuua

SEQ ID NO: 1353996 - RNA, 15 nt, Human
gggagggggcagaag

SEQ ID NO: 1353997 - RNA, 14 nt, Human
gggagggggcagaa

SEQ ID NO: 1353998 - RNA, 13 nt, Human
gggagggggcaga

SEQ ID NO: 1353999 - RNA, 22 nt, Human
gggagggauucugguuccaggg

SEQ ID NO: 1354000 - RNA, 18 nt, Human
gggagggaagggagccaa

SEQ ID NO: 1354001 - RNA, 15 nt, Human
gggagggaagggagc

SEQ ID NO: 1354002 - RNA, 20 nt, Human
gggaggcuggaagcugggag

SEQ ID NO: 1354003 - RNA, 10 nt, Human
gggagcccac

SEQ ID NO: 1354004 - RNA, 15 nt, Human
gggagccauuugaga

SEQ ID NO: 1354005 - RNA, 19 nt, Human
gggagccaugcgcccccuc

SEQ ID NO: 1354006 - RNA, 15 nt, Human
gggagccaagggaug

SEQ ID NO: 1354007 - RNA, 14 nt, Human
gggagccaagggau

SEQ ID NO: 1354008 - RNA, 12 nt, Human
gggagccagggc

SEQ ID NO: 1354009 - RNA, 13 nt, Human
gggagccaaggga

SEQ ID NO: 1354010 - RNA, 12 nt, Human
gggagccaaggg

SEQ ID NO: 1354011 - RNA, 11 nt, Human
gggagccaagg

SEQ ID NO: 1354012 - RNA, 9 nt, Human
gggagccaa

SEQ ID NO: 1354013 - RNA, 17 nt, Human
gggagcaugagaggagg

SEQ ID NO: 1354014 - RNA, 21 nt, Human
gggagcaugagaggaggcagc

SEQ ID NO: 1354015 - RNA, 14 nt, Human
gggagagggcgcag

SEQ ID NO: 1354016 - RNA, 12 nt, Human
gggagaggcagc

SEQ ID NO: 1354017 - RNA, 21 nt, Human
gggagaggcagcccaggaagu

SEQ ID NO: 1354018 - RNA, 20 nt, Human
gggagagcccaggagcuccc

SEQ ID NO: 1354019 - RNA, 18 nt, Human
gggagagcccaggagcuc

SEQ ID NO: 1354020 - RNA, 17 nt, Human
gggagagcccaggagcu

SEQ ID NO: 1354021 - RNA, 16 nt, Human
gggagagcccaggagc

SEQ ID NO: 1354022 - RNA, 13 nt, Human
gggagagcccagg

SEQ ID NO: 1354023 - RNA, 23 nt, Human
gggagaaauagucggugaagaaa

SEQ ID NO: 1354024 - RNA, 19 nt, Human
aaaagcccaccauuuggca

SEQ ID NO: 1354025 - RNA, 23 nt, Human
aaaagccagguuccacagaggac

SEQ ID NO: 1354026 - RNA, 15 nt, Human
aaaagcauuuuguaa

SEQ ID NO: 1354027 - RNA, 14 nt, Human
aaaagcauuuugua

SEQ ID NO: 1354028 - RNA, 16 nt, Human
aaaagcauuuuguaau

SEQ ID NO: 1354029 - RNA, 21 nt, Human
aaaagcuuugaacccugggac

SEQ ID NO: 1354030 - RNA, 13 nt, Human
aaaagcuuuuguc

SEQ ID NO: 1354031 - RNA, 14 nt, Human
aaaagcuuuuuauu

SEQ ID NO: 1354032 - RNA, 14 nt, Human
aaaaggaaagaaaa

SEQ ID NO: 1354033 - RNA, 18 nt, Human
aaaaggaagccaaagagu

SEQ ID NO: 1354034 - RNA, 13 nt, Human
aaaaggaaagaaa

SEQ ID NO: 1354035 - RNA, 16 nt, Human
aaaaauaagaagaaug

SEQ ID NO: 1354036 - RNA, 14 nt, Human
aaaaauaagaagaa

SEQ ID NO: 1354037 - RNA, 24 nt, Human
aaaaauaaauauaucuaccccaga

SEQ ID NO: 1354038 - RNA, 18 nt, Human
aaaaauaaauauaucuac

SEQ ID NO: 1354039 - RNA, 14 nt, Human
aaaaauaacaauga

SEQ ID NO: 1354040 - RNA, 21 nt, Human
ggcuggggucccagcagcugc

SEQ ID NO: 1354041 - RNA, 18 nt, Human
ggcuggggucccagcagc

SEQ ID NO: 1354042 - RNA, 17 nt, Human
ggcuggggucccagcag

SEQ ID NO: 1354043 - RNA, 16 nt, Human
ggcuggggucccagca

SEQ ID NO: 1354044 - RNA, 18 nt, Human
aaaaauaagucaacagua

SEQ ID NO: 1354045 - RNA, 12 nt, Human
aaaaauaauaau

SEQ ID NO: 1354046 - RNA, 21 nt, Human
aaaaauaagucaacaguaaac

SEQ ID NO: 1354047 - RNA, 22 nt, Human
aaaaauaagaagaaugcuuaau

SEQ ID NO: 1354048 - RNA, 14 nt, Human
ggcugggucgcccu

SEQ ID NO: 1354049 - RNA, 17 nt, Human
ggcugggucgcccugga

SEQ ID NO: 1354050 - RNA, 20 nt, Human
ggcugggucgcccuggacug

SEQ ID NO: 1354051 - RNA, 17 nt, Human
ggcuguaacugccaggc

SEQ ID NO: 1354052 - RNA, 16 nt, Human
ggcuguaacugccagg

SEQ ID NO: 1354053 - RNA, 15 nt, Human
ggcuguaacugccag

SEQ ID NO: 1354054 - RNA, 15 nt, Human
ggcuguaaggcucua

SEQ ID NO: 1354055 - RNA, 14 nt, Human
ggcuguaaggcucu

SEQ ID NO: 1354056 - RNA, 18 nt, Human
ggcuguaacugccaggcu

SEQ ID NO: 1354057 - RNA, 23 nt, Human
gggaacccugcccacucccagga

SEQ ID NO: 1354058 - RNA, 19 nt, Human
gggaacccugcccacuccc

SEQ ID NO: 1354059 - RNA, 17 nt, Human
gggaaccccuuucccac

SEQ ID NO: 1354060 - RNA, 14 nt, Human
gggaaccccuuucc

SEQ ID NO: 1354061 - RNA, 15 nt, Human
gggaaccuguguccg

SEQ ID NO: 1354062 - RNA, 14 nt, Human
gggaaccugugucc

SEQ ID NO: 1354063 - RNA, 13 nt, Human
gggaaccuguguc

SEQ ID NO: 1354064 - RNA, 16 nt, Human
gggaacucagauccag

SEQ ID NO: 1354065 - RNA, 19 nt, Human
gggaacuggccaagcugag

SEQ ID NO: 1354066 - RNA, 18 nt, Human
gggaacuggccaagcuga

SEQ ID NO: 1354067 - RNA, 16 nt, Human
gggaacuggccaagcu

SEQ ID NO: 1354068 - RNA, 15 nt, Human
gggaacuggccaagc

SEQ ID NO: 1354069 - RNA, 13 nt, Human
gggaacuggccaa

SEQ ID NO: 1354070 - RNA, 12 nt, Human
gggaacuggcca

SEQ ID NO: 1354071 - RNA, 14 nt, Human
gggaacauggggag

SEQ ID NO: 1354072 - RNA, 16 nt, Human
gggaacauggggagga

SEQ ID NO: 1354073 - RNA, 12 nt, Human
gggaacaugggg

SEQ ID NO: 1354074 - RNA, 20 nt, Human
gggaacagugugcaaggcag

SEQ ID NO: 1354075 - RNA, 20 nt, Human
ggcuucugcuggggccuggg

SEQ ID NO: 1354076 - RNA, 18 nt, Human
ggcuucuggccaggaagc

SEQ ID NO: 1354077 - RNA, 21 nt, Human
ggcuucugcuggggccuggga

SEQ ID NO: 1354078 - RNA, 19 nt, Human
ggcuucugcuggggccugg

SEQ ID NO: 1354079 - RNA, 15 nt, Human
ggcuucugcuggggc

SEQ ID NO: 1354080 - RNA, 12 nt, Human
ggcuucugcugg

SEQ ID NO: 1354081 - RNA, 14 nt, Human
ggcuucugagcagc

SEQ ID NO: 1354082 - RNA, 13 nt, Human
ggcuucugagcag

SEQ ID NO: 1354083 - RNA, 22 nt, Human
ggcuucugagcagcgagccugc

SEQ ID NO: 1354084 - RNA, 14 nt, Human
ggcuucucucugug

SEQ ID NO: 1354085 - RNA, 22 nt, Human
gggaagacuccuagcuguccuu

SEQ ID NO: 1354086 - RNA, 16 nt, Human
gggaagacaguggccc

SEQ ID NO: 1354087 - RNA, 22 nt, Human
gggaagacccauuccuucccag

SEQ ID NO: 1354088 - RNA, 22 nt, Human
gggacaccuaggcuaggguggg

SEQ ID NO: 1354089 - RNA, 14 nt, Human
gggaagacaguggc

SEQ ID NO: 1354090 - RNA, 12 nt, Human
gggaagacagug

SEQ ID NO: 1354091 - RNA, 11 nt, Human
gggaagacagu

SEQ ID NO: 1354092 - RNA, 20 nt, Human
gggaacuggccaagcugagg

SEQ ID NO: 1354093 - RNA, 21 nt, Human
gggaacuggccaagcugaggu

SEQ ID NO: 1354094 - RNA, 21 nt, Human
gggacagaggccccagccucc

SEQ ID NO: 1354095 - RNA, 20 nt, Human
gggacagaggccccagccuc

SEQ ID NO: 1354096 - RNA, 19 nt, Human
gggacagaggccccagccu

SEQ ID NO: 1354097 - RNA, 18 nt, Human
gggacagaggccccagcc

SEQ ID NO: 1354098 - RNA, 17 nt, Human
gggacagaggccccagc

SEQ ID NO: 1354099 - RNA, 17 nt, Human
gggacagguccucagug

SEQ ID NO: 1354100 - RNA, 22 nt, Human
gggacagucaccucauggaauu

SEQ ID NO: 1354101 - RNA, 21 nt, Human
gggacagucaccucauggaau

SEQ ID NO: 1354102 - RNA, 20 nt, Human
gggacagucaccucauggaa

SEQ ID NO: 1354103 - RNA, 20 nt, Human
ggcucagaggguguccugca

SEQ ID NO: 1354104 - RNA, 18 nt, Human
ggcucagagccggggugg

SEQ ID NO: 1354105 - RNA, 20 nt, Human
ggcucagugaaguugcugcu

SEQ ID NO: 1354106 - RNA, 21 nt, Human
ggcucagugaaguugcugcuu

SEQ ID NO: 1354107 - RNA, 19 nt, Human
ggcucagugaaguugcugc

SEQ ID NO: 1354108 - RNA, 18 nt, Human
ggcucagugaaguugcug

SEQ ID NO: 1354109 - RNA, 16 nt, Human
ggcucaggucacauaa

SEQ ID NO: 1354110 - RNA, 21 nt, Human
ggcucaggcaggggccuccau

SEQ ID NO: 1354111 - RNA, 17 nt, Human
ggcucaggcaggggccu

SEQ ID NO: 1354112 - RNA, 15 nt, Human
ggcucaggcaggggc

SEQ ID NO: 1354113 - RNA, 16 nt, Human
ggcucagauuguaaua

SEQ ID NO: 1354114 - RNA, 14 nt, Human
ggcuccuggacccc

SEQ ID NO: 1354115 - RNA, 12 nt, Human
ggcuccuggacc

SEQ ID NO: 1354116 - RNA, 11 nt, Human
ggcuccuggac

SEQ ID NO: 1354117 - RNA, 17 nt, Human
ggcuccuugguucuuga

SEQ ID NO: 1354118 - RNA, 20 nt, Human
ggcuccuucccaucgcuguc

SEQ ID NO: 1354119 - RNA, 15 nt, Human
ggcuccuguuuugca

SEQ ID NO: 1354120 - RNA, 14 nt, Human
ggcuccuguuuugc

SEQ ID NO: 1354121 - RNA, 23 nt, Human
ggcuccuggucaccuaggaagcc

SEQ ID NO: 1354122 - RNA, 10 nt, Human
ggcuccuggu

SEQ ID NO: 1354123 - RNA, 22 nt, Human
ggcucuagaucauaaggcuuca

SEQ ID NO: 1354124 - RNA, 11 nt, Human
ggcucuagauc

SEQ ID NO: 1354125 - RNA, 17 nt, Human
ggcucuacuuccccaug

SEQ ID NO: 1354126 - RNA, 19 nt, Human
ggcuccuugugggccuggg

SEQ ID NO: 1354127 - RNA, 17 nt, Human
ggcuccuugugggccug

SEQ ID NO: 1354128 - RNA, 19 nt, Human
ggcuccuugugccagagaa

SEQ ID NO: 1354129 - RNA, 16 nt, Human
ggcuccuugugccaga

SEQ ID NO: 1354130 - RNA, 23 nt, Human
ggcucuguccccagccugggaaa

SEQ ID NO: 1354131 - RNA, 18 nt, Human
ggcucuguccccagccug

SEQ ID NO: 1354132 - RNA, 17 nt, Human
ggcucuguccccagccu

SEQ ID NO: 1354133 - RNA, 23 nt, Human
ggcucuaugagucuagauguuua

SEQ ID NO: 1354134 - RNA, 18 nt, Human
ggcucuaugagucuagau

SEQ ID NO: 1354135 - RNA, 20 nt, Human
ggcucuuagcagcuuccaga

SEQ ID NO: 1354136 - RNA, 19 nt, Human
ggcucuuagcagcuuccag

SEQ ID NO: 1354137 - RNA, 18 nt, Human
ggcucuuagcagcuucca

SEQ ID NO: 1354138 - RNA, 21 nt, Human
ggcucuuagcagcuuccagau

SEQ ID NO: 1354139 - RNA, 12 nt, Human
ggcugccugagu

SEQ ID NO: 1354140 - RNA, 20 nt, Human
ggcugccucccuuguggcag

SEQ ID NO: 1354141 - RNA, 23 nt, Human
ggcugccugagucgugaccugcu

SEQ ID NO: 1354142 - RNA, 20 nt, Human
ggcugcauugaaaagagcug

SEQ ID NO: 1354143 - RNA, 21 nt, Human
ggcugcauugaaaagagcuga

SEQ ID NO: 1354144 - RNA, 19 nt, Human
ggcugaccacagcacagcc

SEQ ID NO: 1354145 - RNA, 16 nt, Human
ggcugaauagcagaag

SEQ ID NO: 1354146 - RNA, 22 nt, Human
ggcugaccacagcacagccaac

SEQ ID NO: 1354147 - RNA, 18 nt, Human
ggcugaccacagcacagc

SEQ ID NO: 1354148 - RNA, 17 nt, Human
ggcugaccacagcacag

SEQ ID NO: 1354149 - RNA, 16 nt, Human
ggcugaccacagcaca

SEQ ID NO: 1354150 - RNA, 15 nt, Human
ggcugaccacagcac

SEQ ID NO: 1354151 - RNA, 13 nt, Human
ggcugaccacagc

SEQ ID NO: 1354152 - RNA, 22 nt, Human
ggcugacaugaagcuguugugu

SEQ ID NO: 1354153 - RNA, 21 nt, Human
ggcugcucggggugcacagga

SEQ ID NO: 1354154 - RNA, 22 nt, Human
ggcugcucggggugcacaggag

SEQ ID NO: 1354155 - RNA, 14 nt, Human
ggcugcgcacugug

SEQ ID NO: 1354156 - RNA, 15 nt, Human
ggcugcgcacugugu

SEQ ID NO: 1354157 - RNA, 15 nt, Human
ggcugcucagggcug

SEQ ID NO: 1354158 - RNA, 22 nt, Human
aaacaacaauuucuacuuugaa

SEQ ID NO: 1354159 - RNA, 16 nt, Human
aaacaacaauuucuac

SEQ ID NO: 1354160 - RNA, 14 nt, Human
aaacaauauagucu

SEQ ID NO: 1354161 - RNA, 14 nt, Human
aaacaauguuuaaa

SEQ ID NO: 1354162 - RNA, 21 nt, Human
aaacagguauauacuuugaaa

SEQ ID NO: 1354163 - RNA, 18 nt, Human
aaacagguauauacuuug

SEQ ID NO: 1354164 - RNA, 17 nt, Human
aaacacauuaggaaaag

SEQ ID NO: 1354165 - RNA, 12 nt, Human
aaacacauuuuu

SEQ ID NO: 1354166 - RNA, 11 nt, Human
aaacacauuuu

SEQ ID NO: 1354167 - RNA, 22 nt, Human
aaaauguuuuuggucuuuuaua

SEQ ID NO: 1354168 - RNA, 21 nt, Human
aaaauguuggucauuuuaugu

SEQ ID NO: 1354169 - RNA, 17 nt, Human
aaaauguugaaauauga

SEQ ID NO: 1354170 - RNA, 17 nt, Human
aaaauguugcugaaaaa

SEQ ID NO: 1354171 - RNA, 14 nt, Human
aaaauguugagaau

SEQ ID NO: 1354172 - RNA, 13 nt, Human
aaaauguugaaau

SEQ ID NO: 1354173 - RNA, 12 nt, Human
aaaauguucuuu

SEQ ID NO: 1354174 - RNA, 15 nt, Human
aaaauguucuuugga

SEQ ID NO: 1354175 - RNA, 15 nt, Human
aaaauguucuguuug

SEQ ID NO: 1354176 - RNA, 16 nt, Human
aaaauguucagaaggu

SEQ ID NO: 1354177 - RNA, 22 nt, Human
aaaauguuaucuucucaaguuc

SEQ ID NO: 1354178 - RNA, 15 nt, Human
gggaugagaguuuug

SEQ ID NO: 1354179 - RNA, 20 nt, Human
aaaauuuauauuguaaauau

SEQ ID NO: 1354180 - RNA, 12 nt, Human
aaaauuuauaac

SEQ ID NO: 1354181 - RNA, 17 nt, Human
aaacaaagguugagaug

SEQ ID NO: 1354182 - RNA, 20 nt, Human
aaacaaaggccuaauucuau

SEQ ID NO: 1354183 - RNA, 15 nt, Human
aaaauuuuuaaucuu

SEQ ID NO: 1354184 - RNA, 20 nt, Human
aaaauuuugauguuuuaagg

SEQ ID NO: 1354185 - RNA, 17 nt, Human
ggggccgggggcagucu

SEQ ID NO: 1354186 - RNA, 21 nt, Human
ggggccgaugcccagagacac

SEQ ID NO: 1354187 - RNA, 19 nt, Human
ggggccgaugcccagagac

SEQ ID NO: 1354188 - RNA, 18 nt, Human
ggggacuuggccucucuc

SEQ ID NO: 1354189 - RNA, 15 nt, Human
ggggacuuggccucu

SEQ ID NO: 1354190 - RNA, 19 nt, Human
ggggacuuacaugauucau

SEQ ID NO: 1354191 - RNA, 21 nt, Human
ggggacuguaaguugggcuug

SEQ ID NO: 1354192 - RNA, 13 nt, Human
ggggaccaggagu

SEQ ID NO: 1354193 - RNA, 12 nt, Human
ggggaccaggag

SEQ ID NO: 1354194 - RNA, 17 nt, Human
ggggacacauguauuug

SEQ ID NO: 1354195 - RNA, 21 nt, Human
ggggaccaggagugggugggg

SEQ ID NO: 1354196 - RNA, 16 nt, Human
ggggaccuggaaggga

SEQ ID NO: 1354197 - RNA, 23 nt, Human
aaacagguauauacuuugaaagg

SEQ ID NO: 1354198 - RNA, 20 nt, Human
ggggaagagagccugcagga

SEQ ID NO: 1354199 - RNA, 22 nt, Human
ggggaagacccauuccuuccca

SEQ ID NO: 1354200 - RNA, 21 nt, Human
ggggaagacccauuccuuccc

SEQ ID NO: 1354201 - RNA, 17 nt, Human
ggggaagacaguggccc

SEQ ID NO: 1354202 - RNA, 19 nt, Human
ggggaagagagccugcagg

SEQ ID NO: 1354203 - RNA, 14 nt, Human
ggggaccagcagcc

SEQ ID NO: 1354204 - RNA, 19 nt, Human
ggggacacauguauuuggu

SEQ ID NO: 1354205 - RNA, 19 nt, Human
ggggaauugaggacacuga

SEQ ID NO: 1354206 - RNA, 18 nt, Human
aaacuguguauuccaaga

SEQ ID NO: 1354207 - RNA, 16 nt, Human
aaacuguguauuccaa

SEQ ID NO: 1354208 - RNA, 21 nt, Human
aaacuguguacauaacugaaa

SEQ ID NO: 1354209 - RNA, 20 nt, Human
aaacuguguacauaacugaa

SEQ ID NO: 1354210 - RNA, 20 nt, Human
aaacuguguaacugcccaaa

SEQ ID NO: 1354211 - RNA, 17 nt, Human
aaacuguguaacugccc

SEQ ID NO: 1354212 - RNA, 14 nt, Human
aaacuguguaacug

SEQ ID NO: 1354213 - RNA, 10 nt, Human
aaacugugua

SEQ ID NO: 1354214 - RNA, 12 nt, Human
aaacugugcacc

SEQ ID NO: 1354215 - RNA, 16 nt, Human
aaacucguuuuuuaca

SEQ ID NO: 1354216 - RNA, 19 nt, Human
aaacuguguauuccaagac

SEQ ID NO: 1354217 - RNA, 19 nt, Human
aaacuuaaucuaaauggaa

SEQ ID NO: 1354218 - RNA, 21 nt, Human
ggguggccgcugaguggcagg

SEQ ID NO: 1354219 - RNA, 17 nt, Human
ggguggccgcugagugg

SEQ ID NO: 1354220 - RNA, 20 nt, Human
ggguggccaggccgggaaaa

SEQ ID NO: 1354221 - RNA, 18 nt, Human
ggguggccaggccgggaa

SEQ ID NO: 1354222 - RNA, 14 nt, Human
ggguggccaggccg

SEQ ID NO: 1354223 - RNA, 13 nt, Human
ggguggccaggcc

SEQ ID NO: 1354224 - RNA, 12 nt, Human
ggguggccaggc

SEQ ID NO: 1354225 - RNA, 13 nt, Human
ggguggcagcaac

SEQ ID NO: 1354226 - RNA, 16 nt, Human
aaacuuaaucuaaaug

SEQ ID NO: 1354227 - RNA, 17 nt, Human
aaacuuaaucuaaaugg

SEQ ID NO: 1354228 - RNA, 18 nt, Human
aaacuuaaucuaaaugga

SEQ ID NO: 1354229 - RNA, 15 nt, Human
aaacgucuuaaauau

SEQ ID NO: 1354230 - RNA, 14 nt, Human
aaacgucuuaaaua

SEQ ID NO: 1354231 - RNA, 18 nt, Human
aaacuaggugcauauuua

SEQ ID NO: 1354232 - RNA, 13 nt, Human
aaacgucuuaaau

SEQ ID NO: 1354233 - RNA, 16 nt, Human
aaacuaucuuggugaa

SEQ ID NO: 1354234 - RNA, 22 nt, Human
aaacuauaagcaagaaggcaaa

SEQ ID NO: 1354235 - RNA, 18 nt, Human
aaacuagggccaagccca

SEQ ID NO: 1354236 - RNA, 22 nt, Human
aaacuaggugcauauuuauaaa

SEQ ID NO: 1354237 - RNA, 21 nt, Human
aaacucaaaauauuuguacau

SEQ ID NO: 1354238 - RNA, 13 nt, Human
aaacucaaaauau

SEQ ID NO: 1354239 - RNA, 21 nt, Human
aaacucauucauuagucaugu

SEQ ID NO: 1354240 - RNA, 15 nt, Human
aaacucguuaauuug

SEQ ID NO: 1354241 - RNA, 21 nt, Human
aaacauuaauagcagccuuuc

SEQ ID NO: 1354242 - RNA, 22 nt, Human
aaacauuaauagcagccuuucu

SEQ ID NO: 1354243 - RNA, 20 nt, Human
aaacauuaauagcagccuuu

SEQ ID NO: 1354244 - RNA, 14 nt, Human
aaaccucaccaacu

SEQ ID NO: 1354245 - RNA, 17 nt, Human
aaaccaauccuaugcau

SEQ ID NO: 1354246 - RNA, 16 nt, Human
aaaccaauugcugcua

SEQ ID NO: 1354247 - RNA, 22 nt, Human
aaaccugagauuuauuaaagaa

SEQ ID NO: 1354248 - RNA, 21 nt, Human
aaaccugagauuuauuaaaga

SEQ ID NO: 1354249 - RNA, 16 nt, Human
aaaccugagauuuauu

SEQ ID NO: 1354250 - RNA, 18 nt, Human
aaaccugaccccugcuca

SEQ ID NO: 1354251 - RNA, 13 nt, Human
aaaccuuuugaaa

SEQ ID NO: 1354252 - RNA, 17 nt, Human
aaaccuuucuucaccaa

SEQ ID NO: 1354253 - RNA, 18 nt, Human
aaaccuuuguuugcaucu

SEQ ID NO: 1354254 - RNA, 18 nt, Human
aaaccuuuuauauuuagu

SEQ ID NO: 1354255 - RNA, 19 nt, Human
ggggguccuccuccaggga

SEQ ID NO: 1354256 - RNA, 18 nt, Human
ggggguccuccuccaggg

SEQ ID NO: 1354257 - RNA, 16 nt, Human
ggggguccuccuccag

SEQ ID NO: 1354258 - RNA, 15 nt, Human
gggggcggccuauga

SEQ ID NO: 1354259 - RNA, 17 nt, Human
gggggccuggcuggcug

SEQ ID NO: 1354260 - RNA, 15 nt, Human
gggggccuggcuggc

SEQ ID NO: 1354261 - RNA, 14 nt, Human
gggggccuggcugg

SEQ ID NO: 1354262 - RNA, 13 nt, Human
gggggccuggcug

SEQ ID NO: 1354263 - RNA, 12 nt, Human
gggggccuggcu

SEQ ID NO: 1354264 - RNA, 11 nt, Human
gggggccuggc

SEQ ID NO: 1354265 - RNA, 15 nt, Human
gggggcgccuguggu

SEQ ID NO: 1354266 - RNA, 20 nt, Human
gggggccuggcuggcugagg

SEQ ID NO: 1354267 - RNA, 18 nt, Human
gggggcgcggcugggagg

SEQ ID NO: 1354268 - RNA, 12 nt, Human
ggguccaggagg

SEQ ID NO: 1354269 - RNA, 11 nt, Human
ggguccaggag

SEQ ID NO: 1354270 - RNA, 13 nt, Human
ggggguggccgcu

SEQ ID NO: 1354271 - RNA, 20 nt, Human
ggggguggccaggccgggaa

SEQ ID NO: 1354272 - RNA, 13 nt, Human
ggggguggccagg

SEQ ID NO: 1354273 - RNA, 22 nt, Human
gggggugaugagggcagcagcc

SEQ ID NO: 1354274 - RNA, 20 nt, Human
gggggugaugagggcagcag

SEQ ID NO: 1354275 - RNA, 18 nt, Human
gggggugaugagggcagc

SEQ ID NO: 1354276 - RNA, 22 nt, Human
gggggucuggcugguguuaaca

SEQ ID NO: 1354277 - RNA, 17 nt, Human
gggggucuggcuggugu

SEQ ID NO: 1354278 - RNA, 16 nt, Human
gggggucuggcuggug

SEQ ID NO: 1354279 - RNA, 12 nt, Human
gggggucuggcu

SEQ ID NO: 1354280 - RNA, 20 nt, Human
ggggguccuccuccagggac

SEQ ID NO: 1354281 - RNA, 19 nt, Human
gggggugcugggccccugc

SEQ ID NO: 1354282 - RNA, 16 nt, Human
gggucgaaagcucuag

SEQ ID NO: 1354283 - RNA, 14 nt, Human
gggucgaaagcucu

SEQ ID NO: 1354284 - RNA, 22 nt, Human
ggguccuuuugacacugcucua

SEQ ID NO: 1354285 - RNA, 19 nt, Human
ggguccuuuugacacugcu

SEQ ID NO: 1354286 - RNA, 13 nt, Human
gggucccagcagc

SEQ ID NO: 1354287 - RNA, 12 nt, Human
ggguccaugggc

SEQ ID NO: 1354288 - RNA, 20 nt, Human
gggucggcugaccaugcuca

SEQ ID NO: 1354289 - RNA, 15 nt, Human
gggucggcugaccau

SEQ ID NO: 1354290 - RNA, 14 nt, Human
gggucggcugacca

SEQ ID NO: 1354291 - RNA, 13 nt, Human
gggucgcccugga

SEQ ID NO: 1354292 - RNA, 15 nt, Human
gggucgcccuggacu

SEQ ID NO: 1354293 - RNA, 14 nt, Human
aaagagauacagag

SEQ ID NO: 1354294 - RNA, 23 nt, Human
aaagacuggcuuuuauuaaugca

SEQ ID NO: 1354295 - RNA, 21 nt, Human
aaagacuggcuuuuauuaaug

SEQ ID NO: 1354296 - RNA, 13 nt, Human
aaagacuggcuuu

SEQ ID NO: 1354297 - RNA, 12 nt, Human
aaagacuggcuu

SEQ ID NO: 1354298 - RNA, 15 nt, Human
aaagacguuuuauaa

SEQ ID NO: 1354299 - RNA, 23 nt, Human
aaagacgcacuuuggcuuauaau

SEQ ID NO: 1354300 - RNA, 23 nt, Human
aaagacugaguacguugugcauu

SEQ ID NO: 1354301 - RNA, 13 nt, Human
aaagaugcuuuua

SEQ ID NO: 1354302 - RNA, 12 nt, Human
aaagaugcuuuu

SEQ ID NO: 1354303 - RNA, 19 nt, Human
aaagaggcaccaggaagcc

SEQ ID NO: 1354304 - RNA, 14 nt, Human
aaagcaauaugcau

SEQ ID NO: 1354305 - RNA, 20 nt, Human
aaagcaaggaaacuauguaa

SEQ ID NO: 1354306 - RNA, 14 nt, Human
aaagcaaggaaacu

SEQ ID NO: 1354307 - RNA, 20 nt, Human
aaagcaagcugauuaaauga

SEQ ID NO: 1354308 - RNA, 19 nt, Human
aaagcaagcugauuaaaug

SEQ ID NO: 1354309 - RNA, 17 nt, Human
aaagauggggucuguaa

SEQ ID NO: 1354310 - RNA, 18 nt, Human
aaagauggggucuguaaa

SEQ ID NO: 1354311 - RNA, 19 nt, Human
aaagauggggucuguaaaa

SEQ ID NO: 1354312 - RNA, 21 nt, Human
aaagauggggucuguaaaauc

SEQ ID NO: 1354313 - RNA, 22 nt, Human
aaagauggggucuguaaaaucu

SEQ ID NO: 1354314 - RNA, 22 nt, Human
aaagcaagcauucagaagaaaa

SEQ ID NO: 1354315 - RNA, 21 nt, Human
aaagauggaguuucuaagguc

SEQ ID NO: 1354316 - RNA, 19 nt, Human
aaagauggaguuucuaagg

SEQ ID NO: 1354317 - RNA, 18 nt, Human
aaagauggaguuucuaag

SEQ ID NO: 1354318 - RNA, 17 nt, Human
aaagauggaguuucuaa

SEQ ID NO: 1354319 - RNA, 16 nt, Human
aaagauggaguuucua

SEQ ID NO: 1354320 - RNA, 15 nt, Human
aaagauggaguuucu

SEQ ID NO: 1354321 - RNA, 19 nt, Human
aaagaugcuuuuaacagag

SEQ ID NO: 1354322 - RNA, 10 nt, Human
gguccuucaa

SEQ ID NO: 1354323 - RNA, 21 nt, Human
gguccugguggggcagcuccu

SEQ ID NO: 1354324 - RNA, 23 nt, Human
gguccugagcacugccaggaggg

SEQ ID NO: 1354325 - RNA, 22 nt, Human
gguccugagcacugccaggagg

SEQ ID NO: 1354326 - RNA, 21 nt, Human
gguccugagcacugccaggag

SEQ ID NO: 1354327 - RNA, 20 nt, Human
gguccugagcacugccagga

SEQ ID NO: 1354328 - RNA, 14 nt, Human
gggugggggcagca

SEQ ID NO: 1354329 - RNA, 18 nt, Human
ggguggggagagacgggc

SEQ ID NO: 1354330 - RNA, 14 nt, Human
ggguggggagagac

SEQ ID NO: 1354331 - RNA, 13 nt, Human
ggguggggagaga

SEQ ID NO: 1354332 - RNA, 15 nt, Human
ggguggggggggugc

SEQ ID NO: 1354333 - RNA, 20 nt, Human
aaacuucaguuucacagaaa

SEQ ID NO: 1354334 - RNA, 22 nt, Human
aaacuucaguuucacagaaaau

SEQ ID NO: 1354335 - RNA, 23 nt, Human
aaacuucagcgguuuauauaagc

SEQ ID NO: 1354336 - RNA, 19 nt, Human
aaacuuggauacuuggauu

SEQ ID NO: 1354337 - RNA, 24 nt, Human
aaacuuggcucgaaucucugugcc

SEQ ID NO: 1354338 - RNA, 20 nt, Human
aaacuuggauacuuggauuu

SEQ ID NO: 1354339 - RNA, 18 nt, Human
aaacuuggauacuuggau

SEQ ID NO: 1354340 - RNA, 17 nt, Human
aaacuuggauacuugga

SEQ ID NO: 1354341 - RNA, 13 nt, Human
aaacuuggauacu

SEQ ID NO: 1354342 - RNA, 19 nt, Human
aaacuugcaucacuuaacg

SEQ ID NO: 1354343 - RNA, 16 nt, Human
aaacuuguaauuuuuu

SEQ ID NO: 1354344 - RNA, 16 nt, Human
aaacuuguauuaugug

SEQ ID NO: 1354345 - RNA, 16 nt, Human
aaacuuuuaauucauu

SEQ ID NO: 1354346 - RNA, 12 nt, Human
aaacuuuguagu

SEQ ID NO: 1354347 - RNA, 19 nt, Human
aaacuuuggaaccagacuc

SEQ ID NO: 1354348 - RNA, 16 nt, Human
aaacuuugaaguuagc

SEQ ID NO: 1354349 - RNA, 20 nt, Human
aaacuuucauuccuucagau

SEQ ID NO: 1354350 - RNA, 18 nt, Human
aaacuuuccucgccugac

SEQ ID NO: 1354351 - RNA, 20 nt, Human
aaacuuguaauuuuuuuaau

SEQ ID NO: 1354352 - RNA, 18 nt, Human
aaagacguuuuauaagca

SEQ ID NO: 1354353 - RNA, 18 nt, Human
aaagacccuggcuuucau

SEQ ID NO: 1354354 - RNA, 14 nt, Human
aaagacccuggcuu

SEQ ID NO: 1354355 - RNA, 14 nt, Human
aaagaccaggccaa

SEQ ID NO: 1354356 - RNA, 19 nt, Human
aaagacauucaggacugcu

SEQ ID NO: 1354357 - RNA, 16 nt, Human
aaagacaugaagccac

SEQ ID NO: 1354358 - RNA, 13 nt, Human
aaagacagugaaa

SEQ ID NO: 1354359 - RNA, 17 nt, Human
aaagcacgacaguggau

SEQ ID NO: 1354360 - RNA, 19 nt, Human
aaagcacgaaauguuauuu

SEQ ID NO: 1354361 - RNA, 14 nt, Human
aaagcucuagaauc

SEQ ID NO: 1354362 - RNA, 23 nt, Human
aaagcucaaagguuuggaaggag

SEQ ID NO: 1354363 - RNA, 17 nt, Human
aaagcucaaagguuugg

SEQ ID NO: 1354364 - RNA, 23 nt, Human
aaagcuuuccugccccaggccug

SEQ ID NO: 1354365 - RNA, 22 nt, Human
aaagcuuuccugccccaggccu

SEQ ID NO: 1354366 - RNA, 14 nt, Human
aaagcuuuccugcc

SEQ ID NO: 1354367 - RNA, 13 nt, Human
aaagcuuuccugc

SEQ ID NO: 1354368 - RNA, 12 nt, Human
aaagcuuuccug

SEQ ID NO: 1354369 - RNA, 13 nt, Human
aaagcuuucagaa

SEQ ID NO: 1354370 - RNA, 15 nt, Human
aaagcugguuuaaug

SEQ ID NO: 1354371 - RNA, 10 nt, Human
aaagcugccu

SEQ ID NO: 1354372 - RNA, 23 nt, Human
aaagcugcugagaaucuagccuc

SEQ ID NO: 1354373 - RNA, 15 nt, Human
aaaggaagccaaaga

SEQ ID NO: 1354374 - RNA, 14 nt, Human
aaaggaagccaaag

SEQ ID NO: 1354375 - RNA, 12 nt, Human
aaaggaagccaa

SEQ ID NO: 1354376 - RNA, 20 nt, Human
aaaggaagcauuguaaaaua

SEQ ID NO: 1354377 - RNA, 17 nt, Human
aaaggaagcauuguaaa

SEQ ID NO: 1354378 - RNA, 17 nt, Human
aaaggaaaucaaaugaa

SEQ ID NO: 1354379 - RNA, 15 nt, Human
aaaggaaaucaaaug

SEQ ID NO: 1354380 - RNA, 22 nt, Human
aaaggaagcauuguaaaauaau

SEQ ID NO: 1354381 - RNA, 22 nt, Human
aaagggagggcucugaggcgcc

SEQ ID NO: 1354382 - RNA, 19 nt, Human
aaagggagggcucugaggc

SEQ ID NO: 1354383 - RNA, 18 nt, Human
aaagggagggcucugagg

SEQ ID NO: 1354384 - RNA, 17 nt, Human
aaagggagggcucugag

SEQ ID NO: 1354385 - RNA, 11 nt, Human
aaaggagccug

SEQ ID NO: 1354386 - RNA, 21 nt, Human
aaagggagaagugacauugca

SEQ ID NO: 1354387 - RNA, 12 nt, Human
aaaggagccugu

SEQ ID NO: 1354388 - RNA, 17 nt, Human
aaagggagucugccagg

SEQ ID NO: 1354389 - RNA, 14 nt, Human
aaagguacuucaaa

SEQ ID NO: 1354390 - RNA, 14 nt, Human
aaagguaaaucaga

SEQ ID NO: 1354391 - RNA, 19 nt, Human
ggugaacaaagcagccacg

SEQ ID NO: 1354392 - RNA, 18 nt, Human
ggugaacaaagcagccac

SEQ ID NO: 1354393 - RNA, 18 nt, Human
gguccuuuugacacugcu

SEQ ID NO: 1354394 - RNA, 16 nt, Human
gguccuuuugacacug

SEQ ID NO: 1354395 - RNA, 15 nt, Human
gguccuuugggguga

SEQ ID NO: 1354396 - RNA, 16 nt, Human
ggucgaggaguaacaa

SEQ ID NO: 1354397 - RNA, 14 nt, Human
ggucgcccuggacu

SEQ ID NO: 1354398 - RNA, 13 nt, Human
ggugaaaggaaau

SEQ ID NO: 1354399 - RNA, 22 nt, Human
ggucgaggaguaacaauacaaa

SEQ ID NO: 1354400 - RNA, 20 nt, Human
ggucgcccuggacugugugc

SEQ ID NO: 1354401 - RNA, 16 nt, Human
ggugcagggauguggg

SEQ ID NO: 1354402 - RNA, 21 nt, Human
ggugcauauuuauaaaaauaa

SEQ ID NO: 1354403 - RNA, 21 nt, Human
ggugcauuugaggucuguucu

SEQ ID NO: 1354404 - RNA, 11 nt, Human
ggugcugggcc

SEQ ID NO: 1354405 - RNA, 13 nt, Human
ggugcugggcccc

SEQ ID NO: 1354406 - RNA, 15 nt, Human
ggugcugggccccug

SEQ ID NO: 1354407 - RNA, 16 nt, Human
ggugcugggccccugc

SEQ ID NO: 1354408 - RNA, 23 nt, Human
gguggagggccacaugggaggcu

SEQ ID NO: 1354409 - RNA, 13 nt, Human
gguggagggccac

SEQ ID NO: 1354410 - RNA, 19 nt, Human
gguggaagcuuggggaaga

SEQ ID NO: 1354411 - RNA, 21 nt, Human
gguggaaaggugugagacugg

SEQ ID NO: 1354412 - RNA, 15 nt, Human
gguggaacaagcaca

SEQ ID NO: 1354413 - RNA, 14 nt, Human
ggugcuucuccucu

SEQ ID NO: 1354414 - RNA, 22 nt, Human
ggugcuucuaguucugccagga

SEQ ID NO: 1354415 - RNA, 19 nt, Human
ggugcugggccccugccuc

SEQ ID NO: 1354416 - RNA, 20 nt, Human
aaagguccacaggucuagac

SEQ ID NO: 1354417 - RNA, 19 nt, Human
aaagguccacaggucuaga

SEQ ID NO: 1354418 - RNA, 20 nt, Human
aaaguacacuguuucaaacu

SEQ ID NO: 1354419 - RNA, 21 nt, Human
aaagguccacaggucuagacu

SEQ ID NO: 1354420 - RNA, 16 nt, Human
aaaguaguccugugaa

SEQ ID NO: 1354421 - RNA, 18 nt, Human
aaaguauguuagugcaaa

SEQ ID NO: 1354422 - RNA, 18 nt, Human
aaaguaucccuacuguaa

SEQ ID NO: 1354423 - RNA, 17 nt, Human
aaaguucuaagauucug

SEQ ID NO: 1354424 - RNA, 16 nt, Human
aaaguucuaagauucu

SEQ ID NO: 1354425 - RNA, 15 nt, Human
aaaguucuaagauuc

SEQ ID NO: 1354426 - RNA, 20 nt, Human
aaaguuaguaucuuuugaua

SEQ ID NO: 1354427 - RNA, 21 nt, Human
aaaguuaguaucuuuugauau

SEQ ID NO: 1354428 - RNA, 18 nt, Human
aaaguuaguaucuuuuga

SEQ ID NO: 1354429 - RNA, 14 nt, Human
aaaguucuguacuc

SEQ ID NO: 1354430 - RNA, 21 nt, Human
aaaguucuaauaauuucuaau

SEQ ID NO: 1354431 - RNA, 20 nt, Human
aaaguucuaauaauuucuaa

SEQ ID NO: 1354432 - RNA, 19 nt, Human
aaaguucuaauaauuucua

SEQ ID NO: 1354433 - RNA, 18 nt, Human
aaaguucuaauaauuucu

SEQ ID NO: 1354434 - RNA, 21 nt, Human
aaaguucuguacucaaaugua

SEQ ID NO: 1354435 - RNA, 23 nt, Human
aaaguugcagcuguuuuguugac

SEQ ID NO: 1354436 - RNA, 22 nt, Human
aaaguuaccagugccuuaaacu

SEQ ID NO: 1354437 - RNA, 16 nt, Human
aaaguuaccagugccu

SEQ ID NO: 1354438 - RNA, 21 nt, Human
aaaguauuuaauuagugcuaa

SEQ ID NO: 1354439 - RNA, 23 nt, Human
aaaguauuuaauuagugcuaagu

SEQ ID NO: 1354440 - RNA, 17 nt, Human
aaaguauuuaauuagug

SEQ ID NO: 1354441 - RNA, 18 nt, Human
aaaguauuuaauuagugc

SEQ ID NO: 1354442 - RNA, 19 nt, Human
aaaguauuuaauuagugcu

SEQ ID NO: 1354443 - RNA, 20 nt, Human
aaaguauuuaauuagugcua

SEQ ID NO: 1354444 - RNA, 22 nt, Human
aaaguauucuucucuuccuuuu

SEQ ID NO: 1354445 - RNA, 12 nt, Human
aaaguauucuuc

SEQ ID NO: 1354446 - RNA, 19 nt, Human
aaaguauguucuaaccuuu

SEQ ID NO: 1354447 - RNA, 12 nt, Human
aaaguauguucu

SEQ ID NO: 1354448 - RNA, 20 nt, Human
aaauaauuuuaaacaaaggu

SEQ ID NO: 1354449 - RNA, 18 nt, Human
aaauaauuuuaaacaaag

SEQ ID NO: 1354450 - RNA, 14 nt, Human
aaauaauuuuaaac

SEQ ID NO: 1354451 - RNA, 17 nt, Human
aaauaauuguuguucug

SEQ ID NO: 1354452 - RNA, 12 nt, Human
aaauaauuuuaa

SEQ ID NO: 1354453 - RNA, 15 nt, Human
aaauaauuguuguuc

SEQ ID NO: 1354454 - RNA, 13 nt, Human
aaauaauuguugu

SEQ ID NO: 1354455 - RNA, 14 nt, Human
aaauaauuuuguaa

SEQ ID NO: 1354456 - RNA, 13 nt, Human
aaauaauuuugua

SEQ ID NO: 1354457 - RNA, 20 nt, Human
guaaacagauggcacuuuga

SEQ ID NO: 1354458 - RNA, 15 nt, Human
aaauaauuuuuauau

SEQ ID NO: 1354459 - RNA, 12 nt, Human
aaauaauuuugu

SEQ ID NO: 1354460 - RNA, 19 nt, Human
aaauaauuuuaucucuuuc

SEQ ID NO: 1354461 - RNA, 16 nt, Human
guaaaccacugaaaaa

SEQ ID NO: 1354462 - RNA, 14 nt, Human
guaaaccacugaaa

SEQ ID NO: 1354463 - RNA, 13 nt, Human
guaaaccacugaa

SEQ ID NO: 1354464 - RNA, 12 nt, Human
guaaaccacuga

SEQ ID NO: 1354465 - RNA, 23 nt, Human
guaaaccaauccuaugcaugguu

SEQ ID NO: 1354466 - RNA, 22 nt, Human
guaaaccacugaaaaaauauau

SEQ ID NO: 1354467 - RNA, 19 nt, Human
guaaaccacugaaaaaaua

SEQ ID NO: 1354468 - RNA, 18 nt, Human
guaaaccacugaaaaaau

SEQ ID NO: 1354469 - RNA, 20 nt, Human
guaaaccacugaaaaaauau

SEQ ID NO: 1354470 - RNA, 12 nt, Human
aaauaagauucu

SEQ ID NO: 1354471 - RNA, 17 nt, Human
aaauaagagcucaggau

SEQ ID NO: 1354472 - RNA, 17 nt, Human
aaauaagaauagaaaua

SEQ ID NO: 1354473 - RNA, 14 nt, Human
aaauaagaauagaa

SEQ ID NO: 1354474 - RNA, 20 nt, Human
aaauaagaagaaugcuuaau

SEQ ID NO: 1354475 - RNA, 15 nt, Human
aaauaagaagaaugc

SEQ ID NO: 1354476 - RNA, 14 nt, Human
aaauaagaagaaug

SEQ ID NO: 1354477 - RNA, 15 nt, Human
aaauaagaaacuuuu

SEQ ID NO: 1354478 - RNA, 21 nt, Human
aaauaagaaacuuuuuuauuu

SEQ ID NO: 1354479 - RNA, 14 nt, Human
aaauaagaaacuuu

SEQ ID NO: 1354480 - RNA, 12 nt, Human
aaauaagaaacu

SEQ ID NO: 1354481 - RNA, 24 nt, Human
aaauaagaaacaacucuuugagaa

SEQ ID NO: 1354482 - RNA, 15 nt, Human
aaauaaucaaaagcu

SEQ ID NO: 1354483 - RNA, 14 nt, Human
aaauaaucaaaagc

SEQ ID NO: 1354484 - RNA, 16 nt, Human
aaauaaguuuuuguuu

SEQ ID NO: 1354485 - RNA, 13 nt, Human
aaauaaguuuuug

SEQ ID NO: 1354486 - RNA, 17 nt, Human
aaauaauacugcugaga

SEQ ID NO: 1354487 - RNA, 13 nt, Human
aaauaauacauua

SEQ ID NO: 1354488 - RNA, 13 nt, Human
aaauaauaauuuu

SEQ ID NO: 1354489 - RNA, 21 nt, Human
aaauaacuggaaaacagaaca

SEQ ID NO: 1354490 - RNA, 20 nt, Human
aaauaacuggaaaacagaac

SEQ ID NO: 1354491 - RNA, 19 nt, Human
aaauaacuggaaaacagaa

SEQ ID NO: 1354492 - RNA, 16 nt, Human
aaauaacuggaaaaca

SEQ ID NO: 1354493 - RNA, 13 nt, Human
aaauaacuggaaa

SEQ ID NO: 1354494 - RNA, 19 nt, Human
aaauaaccaauccuggaca

SEQ ID NO: 1354495 - RNA, 20 nt, Human
aaauaaaaagaaaggcuguu

SEQ ID NO: 1354496 - RNA, 19 nt, Human
aaauaaaaagaaaggcugu

SEQ ID NO: 1354497 - RNA, 13 nt, Human
aaauaaaaagaaa

SEQ ID NO: 1354498 - RNA, 16 nt, Human
aaauaaaaagugcuuu

SEQ ID NO: 1354499 - RNA, 20 nt, Human
aaaguuuaaaacagaagccu

SEQ ID NO: 1354500 - RNA, 15 nt, Human
aaaguuuaauaaauu

SEQ ID NO: 1354501 - RNA, 12 nt, Human
aaaguuuaauaa

SEQ ID NO: 1354502 - RNA, 13 nt, Human
aaaguuguuguaa

SEQ ID NO: 1354503 - RNA, 16 nt, Human
aaaguugguaaaccuu

SEQ ID NO: 1354504 - RNA, 17 nt, Human
aaaguugguaaaccuuu

SEQ ID NO: 1354505 - RNA, 22 nt, Human
aaaguugcuauuugaacuuuuu

SEQ ID NO: 1354506 - RNA, 16 nt, Human
guaauuuuguguaaga

SEQ ID NO: 1354507 - RNA, 14 nt, Human
guaauuuuguguaa

SEQ ID NO: 1354508 - RNA, 17 nt, Human
guaauuuuggauuuugc

SEQ ID NO: 1354509 - RNA, 14 nt, Human
guaauuuuggauuu

SEQ ID NO: 1354510 - RNA, 20 nt, Human
guaauuuuacacgcuuuugu

SEQ ID NO: 1354511 - RNA, 22 nt, Human
guaauuuuacacgcuuuuguga

SEQ ID NO: 1354512 - RNA, 21 nt, Human
guaauuuuuuuaauuuacaaa

SEQ ID NO: 1354513 - RNA, 20 nt, Human
guaauuuuguguaagaaaua

SEQ ID NO: 1354514 - RNA, 20 nt, Human
guacacagcucuagacacug

SEQ ID NO: 1354515 - RNA, 18 nt, Human
guacacagcaccagaaug

SEQ ID NO: 1354516 - RNA, 21 nt, Human
guaauuuuuuuaucgucacug

SEQ ID NO: 1354517 - RNA, 14 nt, Human
guacacucugcugu

SEQ ID NO: 1354518 - RNA, 18 nt, Human
guacacucugcuguuuga

SEQ ID NO: 1354519 - RNA, 13 nt, Human
guacacucugcug

SEQ ID NO: 1354520 - RNA, 14 nt, Human
guacaccccaccuc

SEQ ID NO: 1354521 - RNA, 15 nt, Human
guacaccccaccucu

SEQ ID NO: 1354522 - RNA, 17 nt, Human
guacaccccaccucuuc

SEQ ID NO: 1354523 - RNA, 23 nt, Human
guacacugccuucucaacuccaa

SEQ ID NO: 1354524 - RNA, 23 nt, Human
aaauaauuuuuauauuugaaaua

SEQ ID NO: 1354525 - RNA, 22 nt, Human
aaauaauuuuuauauuugaaau

SEQ ID NO: 1354526 - RNA, 11 nt, Human
aaauacaaaaa

SEQ ID NO: 1354527 - RNA, 15 nt, Human
aaauacaaaaauacu

SEQ ID NO: 1354528 - RNA, 14 nt, Human
aaauacaagacugc

SEQ ID NO: 1354529 - RNA, 13 nt, Human
aaauacaugacau

SEQ ID NO: 1354530 - RNA, 23 nt, Human
aaauacagucuuccauuugcaag

SEQ ID NO: 1354531 - RNA, 22 nt, Human
aaauacagucuuccauuugcaa

SEQ ID NO: 1354532 - RNA, 16 nt, Human
aaauacaggaaacagu

SEQ ID NO: 1354533 - RNA, 14 nt, Human
aaauacaggaaaca

SEQ ID NO: 1354534 - RNA, 13 nt, Human
aaauacaggaaac

SEQ ID NO: 1354535 - RNA, 17 nt, Human
aaauacagauuuugaua

SEQ ID NO: 1354536 - RNA, 23 nt, Human
aaauacagauuuugauagcaaag

SEQ ID NO: 1354537 - RNA, 15 nt, Human
aaauacagacuggau

SEQ ID NO: 1354538 - RNA, 15 nt, Human
aaauacagauuuuga

SEQ ID NO: 1354539 - RNA, 13 nt, Human
aaauacaauuuuu

SEQ ID NO: 1354540 - RNA, 13 nt, Human
aaauacaagacug

SEQ ID NO: 1354541 - RNA, 15 nt, Human
aaauacugcaaauca

SEQ ID NO: 1354542 - RNA, 20 nt, Human
aaauacuauuuaaagccucc

SEQ ID NO: 1354543 - RNA, 23 nt, Human
aaauacuaaugaaaacagaaugu

SEQ ID NO: 1354544 - RNA, 17 nt, Human
aaauacauuuaaaacau

SEQ ID NO: 1354545 - RNA, 18 nt, Human
aaauacaugcuaagagaa

SEQ ID NO: 1354546 - RNA, 13 nt, Human
aaauacaugcuaa

SEQ ID NO: 1354547 - RNA, 18 nt, Human
aaauacauuguauauaug

SEQ ID NO: 1354548 - RNA, 18 nt, Human
aaauaccagccaguaaau

SEQ ID NO: 1354549 - RNA, 23 nt, Human
guaauuugagagaaauaugaaga

SEQ ID NO: 1354550 - RNA, 16 nt, Human
guaauuugaggacaac

SEQ ID NO: 1354551 - RNA, 18 nt, Human
guaauuuagaaaucauuu

SEQ ID NO: 1354552 - RNA, 12 nt, Human
guaauuuaacuu

SEQ ID NO: 1354553 - RNA, 21 nt, Human
guaauuuaaaauaauuauaua

SEQ ID NO: 1354554 - RNA, 21 nt, Human
guaauuguguggauucuuuaa

SEQ ID NO: 1354555 - RNA, 15 nt, Human
guaauuguguggauu

SEQ ID NO: 1354556 - RNA, 21 nt, Human
guaauuguugcuaaucuucuu

SEQ ID NO: 1354557 - RNA, 21 nt, Human
guaauccaagcaaaugugaau

SEQ ID NO: 1354558 - RNA, 14 nt, Human
guaauaugcacaca

SEQ ID NO: 1354559 - RNA, 16 nt, Human
guaauaugcacacauu

SEQ ID NO: 1354560 - RNA, 17 nt, Human
guaauaugcacacauuu

SEQ ID NO: 1354561 - RNA, 18 nt, Human
guaauaugcacacauuuu

SEQ ID NO: 1354562 - RNA, 17 nt, Human
guaaacuuuaucacuua

SEQ ID NO: 1354563 - RNA, 19 nt, Human
guaaacuuuaucacuuaaa

SEQ ID NO: 1354564 - RNA, 20 nt, Human
guaaacuguguauuccaaga

SEQ ID NO: 1354565 - RNA, 16 nt, Human
guaaacuuuuugugcu

SEQ ID NO: 1354566 - RNA, 14 nt, Human
guaacugcuuucug

SEQ ID NO: 1354567 - RNA, 17 nt, Human
guaacugccuagaaaca

SEQ ID NO: 1354568 - RNA, 20 nt, Human
guaacugccuagaaacaaca

SEQ ID NO: 1354569 - RNA, 16 nt, Human
guaacugccuagaaac

SEQ ID NO: 1354570 - RNA, 14 nt, Human
guaacugccuagaa

SEQ ID NO: 1354571 - RNA, 12 nt, Human
guaacugccagg

SEQ ID NO: 1354572 - RNA, 15 nt, Human
guaacucaucuguca

SEQ ID NO: 1354573 - RNA, 22 nt, Human
guaacugcuuucuguuccaaau

SEQ ID NO: 1354574 - RNA, 20 nt, Human
guaacugcuuucuguuccaa

SEQ ID NO: 1354575 - RNA, 19 nt, Human
guaacugcuuucuguucca

SEQ ID NO: 1354576 - RNA, 17 nt, Human
guaacugcuuucuguuc

SEQ ID NO: 1354577 - RNA, 15 nt, Human
guaacugcuuucugu

SEQ ID NO: 1354578 - RNA, 15 nt, Human
guaauaaacuuuaau

SEQ ID NO: 1354579 - RNA, 20 nt, Human
guaauaggcguaacuaauuu

SEQ ID NO: 1354580 - RNA, 16 nt, Human
aaaucaguaagaggug

SEQ ID NO: 1354581 - RNA, 19 nt, Human
aaaucaguaagagguguua

SEQ ID NO: 1354582 - RNA, 15 nt, Human
aaaucaguaagaggu

SEQ ID NO: 1354583 - RNA, 13 nt, Human
aaaucaguaagag

SEQ ID NO: 1354584 - RNA, 11 nt, Human
aaaucaguaag

SEQ ID NO: 1354585 - RNA, 23 nt, Human
aaaucaggcuuuuguuuccuuuu

SEQ ID NO: 1354586 - RNA, 22 nt, Human
aaaucaggcuuuuguuuccuuu

SEQ ID NO: 1354587 - RNA, 12 nt, Human
aaaucauuuguu

SEQ ID NO: 1354588 - RNA, 14 nt, Human
aaaucauuuugcaa

SEQ ID NO: 1354589 - RNA, 15 nt, Human
aaauccacuuuaucu

SEQ ID NO: 1354590 - RNA, 16 nt, Human
aaauauuaugagaugc

SEQ ID NO: 1354591 - RNA, 17 nt, Human
aaauauuauguuaaaac

SEQ ID NO: 1354592 - RNA, 17 nt, Human
aaauauuaugagaugcu

SEQ ID NO: 1354593 - RNA, 12 nt, Human
aaaucagaaguc

SEQ ID NO: 1354594 - RNA, 20 nt, Human
aaaucacgcuuuuugaaaaa

SEQ ID NO: 1354595 - RNA, 20 nt, Human
aaaucaccacaaacuguaau

SEQ ID NO: 1354596 - RNA, 19 nt, Human
aaaucaccacaaacuguaa

SEQ ID NO: 1354597 - RNA, 19 nt, Human
aaauauucccuagaaacuu

SEQ ID NO: 1354598 - RNA, 18 nt, Human
aaauauucccuagaaacu

SEQ ID NO: 1354599 - RNA, 17 nt, Human
aaaucacgcuuuuugaa

SEQ ID NO: 1354600 - RNA, 17 nt, Human
aaaucagccaauuaugu

SEQ ID NO: 1354601 - RNA, 21 nt, Human
aaaucagaagucaucuugcua

SEQ ID NO: 1354602 - RNA, 18 nt, Human
aaaucagaagucaucuug

SEQ ID NO: 1354603 - RNA, 18 nt, Human
aaaucagccaauuauguu

SEQ ID NO: 1354604 - RNA, 20 nt, Human
aaaucagccaauuauguuaa

SEQ ID NO: 1354605 - RNA, 21 nt, Human
aaaucagccaauuauguuaaa

SEQ ID NO: 1354606 - RNA, 23 nt, Human
aaaucagccaauuauguuaaacu

SEQ ID NO: 1354607 - RNA, 14 nt, Human
aaaucagacuauga

SEQ ID NO: 1354608 - RNA, 21 nt, Human
aaaucagacuaugaaguuuuu

SEQ ID NO: 1354609 - RNA, 20 nt, Human
guaccaguuaauuuuuccaa

SEQ ID NO: 1354610 - RNA, 16 nt, Human
guaccaguuaauuuuu

SEQ ID NO: 1354611 - RNA, 11 nt, Human
guaccaguuaa

SEQ ID NO: 1354612 - RNA, 10 nt, Human
guaccaguua

SEQ ID NO: 1354613 - RNA, 17 nt, Human
guaccagauaacuuuuu

SEQ ID NO: 1354614 - RNA, 17 nt, Human
guaccagaugcagcuca

SEQ ID NO: 1354615 - RNA, 16 nt, Human
guaccagauaacuuuu

SEQ ID NO: 1354616 - RNA, 15 nt, Human
guaccagauaacuuu

SEQ ID NO: 1354617 - RNA, 22 nt, Human
guaccauuuaauggggaggaca

SEQ ID NO: 1354618 - RNA, 23 nt, Human
guaccaguuaauuuuuccaacua

SEQ ID NO: 1354619 - RNA, 22 nt, Human
guaccaguuaauuuuuccaacu

SEQ ID NO: 1354620 - RNA, 13 nt, Human
guaccauuuuaaa

SEQ ID NO: 1354621 - RNA, 23 nt, Human
guaccauuuaauggggaggacaa

SEQ ID NO: 1354622 - RNA, 15 nt, Human
guacauuuuguaaca

SEQ ID NO: 1354623 - RNA, 22 nt, Human
guacauuugggaguuuuuauga

SEQ ID NO: 1354624 - RNA, 21 nt, Human
guaccaaucauuuuaauuauu

SEQ ID NO: 1354625 - RNA, 15 nt, Human
guaccaaucauuuua

SEQ ID NO: 1354626 - RNA, 14 nt, Human
guaccaaucauuuu

SEQ ID NO: 1354627 - RNA, 21 nt, Human
guaccaagaaucuugguuugc

SEQ ID NO: 1354628 - RNA, 20 nt, Human
guaccaagacuacuagggaa

SEQ ID NO: 1354629 - RNA, 23 nt, Human
guaccaagacuacuagggaaaug

SEQ ID NO: 1354630 - RNA, 17 nt, Human
guacauggugcugggag

SEQ ID NO: 1354631 - RNA, 11 nt, Human
guacaugagaa

SEQ ID NO: 1354632 - RNA, 17 nt, Human
guacaugaaaacacauu

SEQ ID NO: 1354633 - RNA, 18 nt, Human
guacaugaaaacacauuu

SEQ ID NO: 1354634 - RNA, 19 nt, Human
guacaugaaaacacauuuu

SEQ ID NO: 1354635 - RNA, 20 nt, Human
guacaugaaaacacauuuuu

SEQ ID NO: 1354636 - RNA, 20 nt, Human
guacaucuauuuuggauugu

SEQ ID NO: 1354637 - RNA, 18 nt, Human
guacaucuauuuuggauu

SEQ ID NO: 1354638 - RNA, 14 nt, Human
guacaugaaaacac

SEQ ID NO: 1354639 - RNA, 15 nt, Human
guacaugaaaacaca

SEQ ID NO: 1354640 - RNA, 16 nt, Human
guacaugaaaacacau

SEQ ID NO: 1354641 - RNA, 18 nt, Human
aaauccauacauuugugu

SEQ ID NO: 1354642 - RNA, 15 nt, Human
aaauccauacauuug

SEQ ID NO: 1354643 - RNA, 21 nt, Human
guagccucaaucgagugagac

SEQ ID NO: 1354644 - RNA, 22 nt, Human
guagaccuuguuacuucugagg

SEQ ID NO: 1354645 - RNA, 21 nt, Human
guagaccuuguuacuucugag

SEQ ID NO: 1354646 - RNA, 20 nt, Human
guagaccuuguuacuucuga

SEQ ID NO: 1354647 - RNA, 19 nt, Human
guagaccuuguuacuucug

SEQ ID NO: 1354648 - RNA, 15 nt, Human
guagaccacugccau

SEQ ID NO: 1354649 - RNA, 16 nt, Human
guagaccaaaauaaaa

SEQ ID NO: 1354650 - RNA, 15 nt, Human
guagaccaaaauaaa

SEQ ID NO: 1354651 - RNA, 14 nt, Human
guagaccaaaauaa

SEQ ID NO: 1354652 - RNA, 18 nt, Human
guagacaguauauaacua

SEQ ID NO: 1354653 - RNA, 21 nt, Human
guagacggcucaguauagaua

SEQ ID NO: 1354654 - RNA, 20 nt, Human
guagacgugcacgcacacug

SEQ ID NO: 1354655 - RNA, 23 nt, Human
guagacgugcacgcacacugucu

SEQ ID NO: 1354656 - RNA, 15 nt, Human
guagaauugcauuga

SEQ ID NO: 1354657 - RNA, 14 nt, Human
guagaauugcauug

SEQ ID NO: 1354658 - RNA, 22 nt, Human
guagaauuaucuaauuuauaaa

SEQ ID NO: 1354659 - RNA, 17 nt, Human
guagaauuaucuaauuu

SEQ ID NO: 1354660 - RNA, 19 nt, Human
guagaauguaaagcuuguc

SEQ ID NO: 1354661 - RNA, 21 nt, Human
guagaauguaaagcuugucug

SEQ ID NO: 1354662 - RNA, 16 nt, Human
guagaauguaaagcuu

SEQ ID NO: 1354663 - RNA, 18 nt, Human
guagaagggaaagcccau

SEQ ID NO: 1354664 - RNA, 14 nt, Human
guagaagggaaagc

SEQ ID NO: 1354665 - RNA, 18 nt, Human
guagaacacuaauucaua

SEQ ID NO: 1354666 - RNA, 17 nt, Human
guagaacacuaauucau

SEQ ID NO: 1354667 - RNA, 15 nt, Human
guagaacacuaauuc

SEQ ID NO: 1354668 - RNA, 17 nt, Human
guagaaaugguuguauu

SEQ ID NO: 1354669 - RNA, 18 nt, Human
guagaaaugguuguauua

SEQ ID NO: 1354670 - RNA, 20 nt, Human
guagaaaugguuguauuaga

SEQ ID NO: 1354671 - RNA, 22 nt, Human
guagaaaugguuguauuagaug

SEQ ID NO: 1354672 - RNA, 21 nt, Human
guagaaaggccuuuaaaauuu

SEQ ID NO: 1354673 - RNA, 19 nt, Human
guacccaccgggccacucc

SEQ ID NO: 1354674 - RNA, 19 nt, Human
guacuccacauauuucagu

SEQ ID NO: 1354675 - RNA, 21 nt, Human
guacuccacacugcacaauaa

SEQ ID NO: 1354676 - RNA, 19 nt, Human
guacuccacacugcacaau

SEQ ID NO: 1354677 - RNA, 18 nt, Human
guacuccacacugcacaa

SEQ ID NO: 1354678 - RNA, 15 nt, Human
guacuauuuaacuga

SEQ ID NO: 1354679 - RNA, 20 nt, Human
guacucccucucaggaucca

SEQ ID NO: 1354680 - RNA, 16 nt, Human
guacucccucucagga

SEQ ID NO: 1354681 - RNA, 15 nt, Human
guacucccucucagg

SEQ ID NO: 1354682 - RNA, 15 nt, Human
guacucaaauguagc

SEQ ID NO: 1354683 - RNA, 18 nt, Human
guacuauuuaacugacua

SEQ ID NO: 1354684 - RNA, 14 nt, Human
guacuauuuaacug

SEQ ID NO: 1354685 - RNA, 16 nt, Human
guacugagccuuguaa

SEQ ID NO: 1354686 - RNA, 18 nt, Human
guacugacuuugcuugcu

SEQ ID NO: 1354687 - RNA, 20 nt, Human
guacugacuuugcuugcuuu

SEQ ID NO: 1354688 - RNA, 17 nt, Human
guacugacuuugcuugc

SEQ ID NO: 1354689 - RNA, 14 nt, Human
guacugacuuugcu

SEQ ID NO: 1354690 - RNA, 19 nt, Human
guacugaccccaucaccua

SEQ ID NO: 1354691 - RNA, 13 nt, Human
guacugcagccuc

SEQ ID NO: 1354692 - RNA, 16 nt, Human
guacugccugcuuggg

SEQ ID NO: 1354693 - RNA, 13 nt, Human
guacugccugcuu

SEQ ID NO: 1354694 - RNA, 11 nt, Human
guacugccugc

SEQ ID NO: 1354695 - RNA, 20 nt, Human
guacugggauuacaggcgug

SEQ ID NO: 1354696 - RNA, 20 nt, Human
guacuguacagcuggcucua

SEQ ID NO: 1354697 - RNA, 19 nt, Human
guacuguacagcuggcucu

SEQ ID NO: 1354698 - RNA, 15 nt, Human
guacuguacagcugg

SEQ ID NO: 1354699 - RNA, 19 nt, Human
guacuggcugauggaguaa

SEQ ID NO: 1354700 - RNA, 17 nt, Human
guacuguucugugucuu

SEQ ID NO: 1354701 - RNA, 18 nt, Human
guacuguucugugucuuu

SEQ ID NO: 1354702 - RNA, 15 nt, Human
guacuguucuguguc

SEQ ID NO: 1354703 - RNA, 14 nt, Human
guacuguucugugu

SEQ ID NO: 1354704 - RNA, 15 nt, Human
guacuucaugcuguc

SEQ ID NO: 1354705 - RNA, 22 nt, Human
guacuucaaauccuugaagauu

SEQ ID NO: 1354706 - RNA, 21 nt, Human
guacuucaaauccuugaagau

SEQ ID NO: 1354707 - RNA, 12 nt, Human
gcuggcuggccu

SEQ ID NO: 1354708 - RNA, 12 nt, Human
gcuggcucugag

SEQ ID NO: 1354709 - RNA, 23 nt, Human
gcuggcuccagaugcagggcagu

SEQ ID NO: 1354710 - RNA, 22 nt, Human
gcuggcuccagaugcagggcag

SEQ ID NO: 1354711 - RNA, 21 nt, Human
gcuggcuccagaugcagggca

SEQ ID NO: 1354712 - RNA, 17 nt, Human
gcuggcuccagaugcag

SEQ ID NO: 1354713 - RNA, 14 nt, Human
gcuggcuccagaug

SEQ ID NO: 1354714 - RNA, 14 nt, Human
gcuggcuggccuca

SEQ ID NO: 1354715 - RNA, 15 nt, Human
gcugggucaggcagg

SEQ ID NO: 1354716 - RNA, 14 nt, Human
gcugggucaggcag

SEQ ID NO: 1354717 - RNA, 13 nt, Human
gcugggucaggca

SEQ ID NO: 1354718 - RNA, 23 nt, Human
gcuggguccauaucacacacauu

SEQ ID NO: 1354719 - RNA, 19 nt, Human
gcuggguccaauuguggca

SEQ ID NO: 1354720 - RNA, 16 nt, Human
gcugggucaggcaggg

SEQ ID NO: 1354721 - RNA, 12 nt, Human
gcugggucgccc

SEQ ID NO: 1354722 - RNA, 21 nt, Human
gcugggccccugccucucugc

SEQ ID NO: 1354723 - RNA, 22 nt, Human
gcugggccccugccucucugca

SEQ ID NO: 1354724 - RNA, 14 nt, Human
gcugggcucaguga

SEQ ID NO: 1354725 - RNA, 22 nt, Human
gcugggccuggucucacccugg

SEQ ID NO: 1354726 - RNA, 13 nt, Human
gcugggccugguc

SEQ ID NO: 1354727 - RNA, 12 nt, Human
gcugggccuggu

SEQ ID NO: 1354728 - RNA, 23 nt, Human
gcugggccccugccucucugcag

SEQ ID NO: 1354729 - RNA, 17 nt, Human
gcugcugcugggcucag

SEQ ID NO: 1354730 - RNA, 16 nt, Human
gcugcugcugggcuca

SEQ ID NO: 1354731 - RNA, 15 nt, Human
gcugcugcugggcuc

SEQ ID NO: 1354732 - RNA, 13 nt, Human
gcugcugcugggc

SEQ ID NO: 1354733 - RNA, 21 nt, Human
gcucuggggugggcaguuuuu

SEQ ID NO: 1354734 - RNA, 19 nt, Human
gcucuggggugggcaguuu

SEQ ID NO: 1354735 - RNA, 23 nt, Human
gcucugggccauucuccacagca

SEQ ID NO: 1354736 - RNA, 20 nt, Human
gcucugggccauucuccaca

SEQ ID NO: 1354737 - RNA, 14 nt, Human
gcucugggccauuc

SEQ ID NO: 1354738 - RNA, 15 nt, Human
gcuggagugcagugg

SEQ ID NO: 1354739 - RNA, 16 nt, Human
gcuggaggcccaggcu

SEQ ID NO: 1354740 - RNA, 20 nt, Human
gcuggaggcccaggcuggga

SEQ ID NO: 1354741 - RNA, 15 nt, Human
gcuggaggcccaggc

SEQ ID NO: 1354742 - RNA, 14 nt, Human
gcuggaggcccagg

SEQ ID NO: 1354743 - RNA, 13 nt, Human
gcuggaggcccag

SEQ ID NO: 1354744 - RNA, 12 nt, Human
gcuggaggccca

SEQ ID NO: 1354745 - RNA, 23 nt, Human
gcuggaggcaggggcuuccuggu

SEQ ID NO: 1354746 - RNA, 22 nt, Human
gcuggaggcaggggcuuccugg

SEQ ID NO: 1354747 - RNA, 21 nt, Human
gcuggaggcaggggcuuccug

SEQ ID NO: 1354748 - RNA, 20 nt, Human
gcuggaggcaggggcuuccu

SEQ ID NO: 1354749 - RNA, 15 nt, Human
gcuucagcugccagu

SEQ ID NO: 1354750 - RNA, 17 nt, Human
gcuuauuuauuguauuc

SEQ ID NO: 1354751 - RNA, 19 nt, Human
gcuucagccaggagcuggg

SEQ ID NO: 1354752 - RNA, 20 nt, Human
gcuuauuuauuguauucugg

SEQ ID NO: 1354753 - RNA, 17 nt, Human
gcuuauuuccucauuuu

SEQ ID NO: 1354754 - RNA, 15 nt, Human
gcuucagccaggagc

SEQ ID NO: 1354755 - RNA, 19 nt, Human
gcuuauuccaugacugcuu

SEQ ID NO: 1354756 - RNA, 18 nt, Human
gcuuauuccaugacugcu

SEQ ID NO: 1354757 - RNA, 17 nt, Human
gcuuauuccaugacugc

SEQ ID NO: 1354758 - RNA, 15 nt, Human
gcuuauuccaugacu

SEQ ID NO: 1354759 - RNA, 15 nt, Human
gcuuauuuauuguau

SEQ ID NO: 1354760 - RNA, 20 nt, Human
gcuuaugguaccagaugcag

SEQ ID NO: 1354761 - RNA, 16 nt, Human
gcuuaugguaccagau

SEQ ID NO: 1354762 - RNA, 22 nt, Human
gcuucuaaguaaauacaauuuu

SEQ ID NO: 1354763 - RNA, 21 nt, Human
gcuucuaaguaaauacaauuu

SEQ ID NO: 1354764 - RNA, 20 nt, Human
gcuucuaaguaaauacaauu

SEQ ID NO: 1354765 - RNA, 19 nt, Human
gcuucuaaguaaauacaau

SEQ ID NO: 1354766 - RNA, 18 nt, Human
gcuucuaaguaaauacaa

SEQ ID NO: 1354767 - RNA, 16 nt, Human
gcuucuaaguaaauac

SEQ ID NO: 1354768 - RNA, 17 nt, Human
gcuucguuuauuuucaa

SEQ ID NO: 1354769 - RNA, 16 nt, Human
gcuucguuuauuuuca

SEQ ID NO: 1354770 - RNA, 14 nt, Human
gcuucguuuauuuu

SEQ ID NO: 1354771 - RNA, 16 nt, Human
gcuuccuccuggaaau

SEQ ID NO: 1354772 - RNA, 13 nt, Human
gcuuccuccugga

SEQ ID NO: 1354773 - RNA, 12 nt, Human
gcuuccuccugg

SEQ ID NO: 1354774 - RNA, 21 nt, Human
gcuuccuccuccccaacugug

SEQ ID NO: 1354775 - RNA, 17 nt, Human
gcuucuaguucugccag

SEQ ID NO: 1354776 - RNA, 16 nt, Human
gcuucuaguucugcca

SEQ ID NO: 1354777 - RNA, 17 nt, Human
gcuuugaaauugaaccu

SEQ ID NO: 1354778 - RNA, 19 nt, Human
gcuuugaaauugaaccuuu

SEQ ID NO: 1354779 - RNA, 15 nt, Human
gcuuugaaacagaaa

SEQ ID NO: 1354780 - RNA, 14 nt, Human
gcuuguagccagcc

SEQ ID NO: 1354781 - RNA, 17 nt, Human
gcuuguagccagccggg

SEQ ID NO: 1354782 - RNA, 21 nt, Human
gcuuguccaacccgaggcccg

SEQ ID NO: 1354783 - RNA, 22 nt, Human
gcuuguaggggaggggcuccuu

SEQ ID NO: 1354784 - RNA, 22 nt, Human
gcuuguagccagccggggcgag

SEQ ID NO: 1354785 - RNA, 16 nt, Human
gcuuguagccagccgg

SEQ ID NO: 1354786 - RNA, 15 nt, Human
gcuuguagccagccg

SEQ ID NO: 1354787 - RNA, 12 nt, Human
gcuuguacauaa

SEQ ID NO: 1354788 - RNA, 20 nt, Human
gcuugagaaauauggacacu

SEQ ID NO: 1354789 - RNA, 18 nt, Human
gcuucuugccucugugcu

SEQ ID NO: 1354790 - RNA, 17 nt, Human
gcuucuugccucugugc

SEQ ID NO: 1354791 - RNA, 16 nt, Human
gcuucuugccucugug

SEQ ID NO: 1354792 - RNA, 15 nt, Human
gcuucuugccucugu

SEQ ID NO: 1354793 - RNA, 14 nt, Human
gcuucuugccucug

SEQ ID NO: 1354794 - RNA, 13 nt, Human
gcuucuugccucu

SEQ ID NO: 1354795 - RNA, 12 nt, Human
gcuucuugccuc

SEQ ID NO: 1354796 - RNA, 23 nt, Human
gcuuguaacuaaaauaauuuugu

SEQ ID NO: 1354797 - RNA, 22 nt, Human
gcuuguaacuaaaauaauuuug

SEQ ID NO: 1354798 - RNA, 17 nt, Human
gcuuguaacuaaaauaa

SEQ ID NO: 1354799 - RNA, 20 nt, Human
gcuuugacucaggagccugu

SEQ ID NO: 1354800 - RNA, 24 nt, Human
gcuuugacucaggagccugugaca

SEQ ID NO: 1354801 - RNA, 16 nt, Human
gcuuugacucaggagc

SEQ ID NO: 1354802 - RNA, 15 nt, Human
gcuuugacucaggag

SEQ ID NO: 1354803 - RNA, 16 nt, Human
gcuuugagagagaaag

SEQ ID NO: 1354804 - RNA, 19 nt, Human
ggaacuggccaagcugagg

SEQ ID NO: 1354805 - RNA, 22 nt, Human
ggaacuggccaagcugaggugc

SEQ ID NO: 1354806 - RNA, 17 nt, Human
ggaacuggccaagcuga

SEQ ID NO: 1354807 - RNA, 16 nt, Human
ggaacuggccaagcug

SEQ ID NO: 1354808 - RNA, 14 nt, Human
ggaacuggccaagc

SEQ ID NO: 1354809 - RNA, 15 nt, Human
ggaacuggaggcagg

SEQ ID NO: 1354810 - RNA, 12 nt, Human
ggaacuggaggc

SEQ ID NO: 1354811 - RNA, 11 nt, Human
ggaacuggagg

SEQ ID NO: 1354812 - RNA, 17 nt, Human
ggaacuggaauccuuuc

SEQ ID NO: 1354813 - RNA, 21 nt, Human
ggaacacuggggacuuggccu

SEQ ID NO: 1354814 - RNA, 15 nt, Human
ggaagacaguggccc

SEQ ID NO: 1354815 - RNA, 14 nt, Human
ggaagacaguggcc

SEQ ID NO: 1354816 - RNA, 20 nt, Human
ggaacuugccugccuuucca

SEQ ID NO: 1354817 - RNA, 22 nt, Human
ggaacuuggggaguuaagaccu

SEQ ID NO: 1354818 - RNA, 17 nt, Human
ggaacuugccugccuuu

SEQ ID NO: 1354819 - RNA, 18 nt, Human
ggaacuugaacugauuca

SEQ ID NO: 1354820 - RNA, 16 nt, Human
ggaacuugaacugauu

SEQ ID NO: 1354821 - RNA, 14 nt, Human
ggaacuugaacuga

SEQ ID NO: 1354822 - RNA, 18 nt, Human
ggaagagagccugcagga

SEQ ID NO: 1354823 - RNA, 21 nt, Human
ggaagagagccugcaggaucu

SEQ ID NO: 1354824 - RNA, 12 nt, Human
ggaagagaagga

SEQ ID NO: 1354825 - RNA, 17 nt, Human
ggaagagaaggagcaga

SEQ ID NO: 1354826 - RNA, 20 nt, Human
ggacagcugugccucgcucc

SEQ ID NO: 1354827 - RNA, 22 nt, Human
ggacagcuuguggcaagugaau

SEQ ID NO: 1354828 - RNA, 17 nt, Human
ggacagcugugccucgc

SEQ ID NO: 1354829 - RNA, 15 nt, Human
ggacagcugugccuc

SEQ ID NO: 1354830 - RNA, 14 nt, Human
ggacagcugugccu

SEQ ID NO: 1354831 - RNA, 12 nt, Human
ggacagcugugc

SEQ ID NO: 1354832 - RNA, 11 nt, Human
ggacagcugug

SEQ ID NO: 1354833 - RNA, 21 nt, Human
ggacacgggccuguccacagg

SEQ ID NO: 1354834 - RNA, 23 nt, Human
ggacacgggccuguccacaggcu

SEQ ID NO: 1354835 - RNA, 23 nt, Human
ggacacgcucaguggggcagagg

SEQ ID NO: 1354836 - RNA, 22 nt, Human
ggacacgcucaguggggcagag

SEQ ID NO: 1354837 - RNA, 16 nt, Human
ggacacgcucaguggg

SEQ ID NO: 1354838 - RNA, 16 nt, Human
ggacaauggaccggag

SEQ ID NO: 1354839 - RNA, 20 nt, Human
ggacaaguggacucagggca

SEQ ID NO: 1354840 - RNA, 18 nt, Human
ggacaagcuucugagacg

SEQ ID NO: 1354841 - RNA, 19 nt, Human
ggacaccugggagaaaucu

SEQ ID NO: 1354842 - RNA, 17 nt, Human
ggacaccugcccugccc

SEQ ID NO: 1354843 - RNA, 19 nt, Human
ggaauaagguacaagaagc

SEQ ID NO: 1354844 - RNA, 24 nt, Human
ggaaucauuucuauuucuccucca

SEQ ID NO: 1354845 - RNA, 13 nt, Human
ggaauaauaccua

SEQ ID NO: 1354846 - RNA, 18 nt, Human
ggaauaagcucccagggc

SEQ ID NO: 1354847 - RNA, 13 nt, Human
ggacaagcauggu

SEQ ID NO: 1354848 - RNA, 16 nt, Human
ggacaagacccccagc

SEQ ID NO: 1354849 - RNA, 23 nt, Human
ggacaacugcucccaccuccuga

SEQ ID NO: 1354850 - RNA, 22 nt, Human
ggacaacugcucccaccuccug

SEQ ID NO: 1354851 - RNA, 21 nt, Human
ggacaacugcucccaccuccu

SEQ ID NO: 1354852 - RNA, 19 nt, Human
ggaaugaagauacugaaau

SEQ ID NO: 1354853 - RNA, 18 nt, Human
ggaaugaagcaaugcuuc

SEQ ID NO: 1354854 - RNA, 20 nt, Human
ggaagcucuuggagcuguga

SEQ ID NO: 1354855 - RNA, 17 nt, Human
ggaagcugcccugccca

SEQ ID NO: 1354856 - RNA, 21 nt, Human
ggaagcucuuggagcugugag

SEQ ID NO: 1354857 - RNA, 14 nt, Human
ggaagcuuggggaa

SEQ ID NO: 1354858 - RNA, 23 nt, Human
ggaagcuagucuuuugcuuuugc

SEQ ID NO: 1354859 - RNA, 20 nt, Human
ggaagcuuuggugagaaccu

SEQ ID NO: 1354860 - RNA, 21 nt, Human
ggaagcuuuggugagaaccug

SEQ ID NO: 1354861 - RNA, 17 nt, Human
ggaaguuuagcucugag

SEQ ID NO: 1354862 - RNA, 18 nt, Human
ggaaguuuagcucugaga

SEQ ID NO: 1354863 - RNA, 16 nt, Human
ggaaguuuagcucuga

SEQ ID NO: 1354864 - RNA, 15 nt, Human
ggaaguuuagcucug

SEQ ID NO: 1354865 - RNA, 18 nt, Human
ggaaguugacuuauagua

SEQ ID NO: 1354866 - RNA, 22 nt, Human
ggaagcccccaccgugggcagg

SEQ ID NO: 1354867 - RNA, 21 nt, Human
ggaagcccccaccgugggcag

SEQ ID NO: 1354868 - RNA, 13 nt, Human
ggaagcccccacc

SEQ ID NO: 1354869 - RNA, 20 nt, Human
ggaagcccauccugaccagc

SEQ ID NO: 1354870 - RNA, 18 nt, Human
ggaagcccauccugacca

SEQ ID NO: 1354871 - RNA, 19 nt, Human
ggaagcuagucuuuugcuu

SEQ ID NO: 1354872 - RNA, 17 nt, Human
ggaagcuagucuuuugc

SEQ ID NO: 1354873 - RNA, 16 nt, Human
ggaagcuagucuuuug

SEQ ID NO: 1354874 - RNA, 15 nt, Human
ggaagcuagucuuuu

SEQ ID NO: 1354875 - RNA, 19 nt, Human
ggaagcuagacacaugaag

SEQ ID NO: 1354876 - RNA, 22 nt, Human
ggaagcuagacacaugaaggua

SEQ ID NO: 1354877 - RNA, 18 nt, Human
ggaagcuagacacaugaa

SEQ ID NO: 1354878 - RNA, 16 nt, Human
ggaagcuaauuugcau

SEQ ID NO: 1354879 - RNA, 23 nt, Human
ggaccccccuuucacaggcagcc

SEQ ID NO: 1354880 - RNA, 21 nt, Human
ggacccuccgcucuguagugc

SEQ ID NO: 1354881 - RNA, 21 nt, Human
ggacguacguaauaagguuuu

SEQ ID NO: 1354882 - RNA, 21 nt, Human
ggacggugcccaagccagagg

SEQ ID NO: 1354883 - RNA, 19 nt, Human
ggacggugcccaagccaga

SEQ ID NO: 1354884 - RNA, 17 nt, Human
ggacggugcccaagcca

SEQ ID NO: 1354885 - RNA, 18 nt, Human
ggacguggcucagccagc

SEQ ID NO: 1354886 - RNA, 22 nt, Human
ggaccccccuuucacaggcagc

SEQ ID NO: 1354887 - RNA, 13 nt, Human
ggacccugugagc

SEQ ID NO: 1354888 - RNA, 15 nt, Human
ggacccugugagccg

SEQ ID NO: 1354889 - RNA, 13 nt, Human
ggacccuguugcu

SEQ ID NO: 1354890 - RNA, 17 nt, Human
ggacccuguugcuaagc

SEQ ID NO: 1354891 - RNA, 21 nt, Human
ggacccuucccuugagcccuc

SEQ ID NO: 1354892 - RNA, 11 nt, Human
ggacccugacc

SEQ ID NO: 1354893 - RNA, 13 nt, Human
ggacccugaaggg

SEQ ID NO: 1354894 - RNA, 15 nt, Human
ggacuccaggcccaa

SEQ ID NO: 1354895 - RNA, 14 nt, Human
ggacuccaggccca

SEQ ID NO: 1354896 - RNA, 20 nt, Human
ggacucagguggcccuacug

SEQ ID NO: 1354897 - RNA, 22 nt, Human
ggacucagggcagcgccaggcu

SEQ ID NO: 1354898 - RNA, 15 nt, Human
ggacucagggcagcg

SEQ ID NO: 1354899 - RNA, 13 nt, Human
ggacucagggcag

SEQ ID NO: 1354900 - RNA, 21 nt, Human
ggacucagccuucagacagag

SEQ ID NO: 1354901 - RNA, 17 nt, Human
ggacucagccuucagac

SEQ ID NO: 1354902 - RNA, 18 nt, Human
ggacucaagccccggacu

SEQ ID NO: 1354903 - RNA, 19 nt, Human
ggacuaugaaaagcuagaa

SEQ ID NO: 1354904 - RNA, 23 nt, Human
ggacuauauuugggccugcucca

SEQ ID NO: 1354905 - RNA, 14 nt, Human
ggacguuguuuugg

SEQ ID NO: 1354906 - RNA, 12 nt, Human
ggacuaaaagau

SEQ ID NO: 1354907 - RNA, 14 nt, Human
ggacuaaaagauau

SEQ ID NO: 1354908 - RNA, 19 nt, Human
ggacuaaaagauauaagug

SEQ ID NO: 1354909 - RNA, 19 nt, Human
ggacguggcucagccagca

SEQ ID NO: 1354910 - RNA, 23 nt, Human
ggacuaacacucagaagccuggg

SEQ ID NO: 1354911 - RNA, 22 nt, Human
ggacuaacacucagaagccugg

SEQ ID NO: 1354912 - RNA, 21 nt, Human
ggacuaacacucagaagccug

SEQ ID NO: 1354913 - RNA, 20 nt, Human
ggacuaacacucagaagccu

SEQ ID NO: 1354914 - RNA, 19 nt, Human
ggacuaacacucagaagcc

SEQ ID NO: 1354915 - RNA, 18 nt, Human
ggacuaacacucagaagc

SEQ ID NO: 1354916 - RNA, 15 nt, Human
ggacuugaacccagg

SEQ ID NO: 1354917 - RNA, 20 nt, Human
ggacuuuauagaucagccag

SEQ ID NO: 1354918 - RNA, 19 nt, Human
ggacuugcaaaaaggguca

SEQ ID NO: 1354919 - RNA, 22 nt, Human
ggacuccaggcccaaggcuccc

SEQ ID NO: 1354920 - RNA, 23 nt, Human
ggacuccaggcccaaggcucccg

SEQ ID NO: 1354921 - RNA, 17 nt, Human
ggacuuugcagccggca

SEQ ID NO: 1354922 - RNA, 16 nt, Human
ggacuuugcagccggc

SEQ ID NO: 1354923 - RNA, 22 nt, Human
ggacuuugcagccggcacaggg

SEQ ID NO: 1354924 - RNA, 16 nt, Human
ggagaaagggcccugg

SEQ ID NO: 1354925 - RNA, 23 nt, Human
ggagaaagcugacuuggcuggug

SEQ ID NO: 1354926 - RNA, 22 nt, Human
ggagaaagcugacuuggcuggu

SEQ ID NO: 1354927 - RNA, 15 nt, Human
ggagaaagcugacuu

SEQ ID NO: 1354928 - RNA, 14 nt, Human
ggagaaagcugacu

SEQ ID NO: 1354929 - RNA, 22 nt, Human
ggagaaaucuggcuucuggcca

SEQ ID NO: 1354930 - RNA, 18 nt, Human
ggagaaaugaaaaaauau

SEQ ID NO: 1354931 - RNA, 20 nt, Human
ggacaggauguguuugcuuu

SEQ ID NO: 1354932 - RNA, 19 nt, Human
ggacaggacuaacacucag

SEQ ID NO: 1354933 - RNA, 18 nt, Human
ggacaggauguguuugcu

SEQ ID NO: 1354934 - RNA, 17 nt, Human
ggacaggauguguuugc

SEQ ID NO: 1354935 - RNA, 12 nt, Human
ggacagcuugug

SEQ ID NO: 1354936 - RNA, 15 nt, Human
ggacaggauccaggc

SEQ ID NO: 1354937 - RNA, 18 nt, Human
gccugcccccaccccauu

SEQ ID NO: 1354938 - RNA, 19 nt, Human
gccugcccccaccccauuc

SEQ ID NO: 1354939 - RNA, 12 nt, Human
gccugcccccac

SEQ ID NO: 1354940 - RNA, 19 nt, Human
gccugcccaguugcacuca

SEQ ID NO: 1354941 - RNA, 16 nt, Human
gccugaaagaggcuga

SEQ ID NO: 1354942 - RNA, 23 nt, Human
gccucuuucaagcagucgugccu

SEQ ID NO: 1354943 - RNA, 21 nt, Human
gccucuuccagucuuccugac

SEQ ID NO: 1354944 - RNA, 13 nt, Human
gccucuucccucu

SEQ ID NO: 1354945 - RNA, 24 nt, Human
gccuccuuccucuuuuccuuccca

SEQ ID NO: 1354946 - RNA, 19 nt, Human
gccucuuaaauaaaccuuu

SEQ ID NO: 1354947 - RNA, 14 nt, Human
gccuccuuccucuu

SEQ ID NO: 1354948 - RNA, 13 nt, Human
gccuccuuccucu

SEQ ID NO: 1354949 - RNA, 15 nt, Human
gccucuuagaugcag

SEQ ID NO: 1354950 - RNA, 15 nt, Human
gccuccauccaaggc

SEQ ID NO: 1354951 - RNA, 23 nt, Human
gccuccauccuacccccugugcc

SEQ ID NO: 1354952 - RNA, 19 nt, Human
gccuccaugggccccaggg

SEQ ID NO: 1354953 - RNA, 15 nt, Human
gccuccaugggcccc

SEQ ID NO: 1354954 - RNA, 13 nt, Human
gccuccaugggcc

SEQ ID NO: 1354955 - RNA, 16 nt, Human
gccuccauccaaggcc

SEQ ID NO: 1354956 - RNA, 16 nt, Human
gccucccaaagugcug

SEQ ID NO: 1354957 - RNA, 13 nt, Human
gccucccaaagug

SEQ ID NO: 1354958 - RNA, 19 nt, Human
gccuccuuagaaaaaaaau

SEQ ID NO: 1354959 - RNA, 18 nt, Human
gccuugcggcuccucagg

SEQ ID NO: 1354960 - RNA, 20 nt, Human
gccuugcggcuccucaggga

SEQ ID NO: 1354961 - RNA, 17 nt, Human
gccuugcggcuccucag

SEQ ID NO: 1354962 - RNA, 16 nt, Human
gccuugcggcuccuca

SEQ ID NO: 1354963 - RNA, 17 nt, Human
gccuugccagagaucca

SEQ ID NO: 1354964 - RNA, 14 nt, Human
gccuugccagagau

SEQ ID NO: 1354965 - RNA, 18 nt, Human
gcgaggaggcuccagagg

SEQ ID NO: 1354966 - RNA, 17 nt, Human
gcgaggaggcuccagag

SEQ ID NO: 1354967 - RNA, 16 nt, Human
gcgaggaggcuccaga

SEQ ID NO: 1354968 - RNA, 15 nt, Human
gcgaggaggcuccag

SEQ ID NO: 1354969 - RNA, 20 nt, Human
gcgaggagaugcuccuuggg

SEQ ID NO: 1354970 - RNA, 19 nt, Human
gcgaggagaugcuccuugg

SEQ ID NO: 1354971 - RNA, 13 nt, Human
gcgagccugcuag

SEQ ID NO: 1354972 - RNA, 22 nt, Human
gcgcacugugacccccagcucc

SEQ ID NO: 1354973 - RNA, 19 nt, Human
gcgauucccucucccaggc

SEQ ID NO: 1354974 - RNA, 18 nt, Human
gcgauucccucucccagg

SEQ ID NO: 1354975 - RNA, 14 nt, Human
gcgauucccucucc

SEQ ID NO: 1354976 - RNA, 22 nt, Human
gcgauguggaacugcugccacu

SEQ ID NO: 1354977 - RNA, 23 nt, Human
gcgauguggaacugcugccacug

SEQ ID NO: 1354978 - RNA, 21 nt, Human
gcgauguggaacugcugccac

SEQ ID NO: 1354979 - RNA, 20 nt, Human
gcgauguggaacugcugcca

SEQ ID NO: 1354980 - RNA, 19 nt, Human
gcgauguggaacugcugcc

SEQ ID NO: 1354981 - RNA, 13 nt, Human
gcgauguggaacu

SEQ ID NO: 1354982 - RNA, 14 nt, Human
gcgaugccagccaa

SEQ ID NO: 1354983 - RNA, 13 nt, Human
gcgaugccagcca

SEQ ID NO: 1354984 - RNA, 12 nt, Human
gcgagccugcua

SEQ ID NO: 1354985 - RNA, 17 nt, Human
gcgaucucggcucacug

SEQ ID NO: 1354986 - RNA, 14 nt, Human
gcgaucucagcuca

SEQ ID NO: 1354987 - RNA, 21 nt, Human
gccuguguagcugugaccugc

SEQ ID NO: 1354988 - RNA, 20 nt, Human
gccuguguagcugugaccug

SEQ ID NO: 1354989 - RNA, 16 nt, Human
gccuguguagcuguga

SEQ ID NO: 1354990 - RNA, 15 nt, Human
gccuguguagcugug

SEQ ID NO: 1354991 - RNA, 14 nt, Human
gccuguguccaugc

SEQ ID NO: 1354992 - RNA, 12 nt, Human
gccuguguccau

SEQ ID NO: 1354993 - RNA, 19 nt, Human
gccuguguccaugcgcuca

SEQ ID NO: 1354994 - RNA, 22 nt, Human
gccuguguagcugugaccugcu

SEQ ID NO: 1354995 - RNA, 21 nt, Human
gccugugguucugagauggcu

SEQ ID NO: 1354996 - RNA, 16 nt, Human
gccugugguucugaga

SEQ ID NO: 1354997 - RNA, 12 nt, Human
gccugugguucu

SEQ ID NO: 1354998 - RNA, 23 nt, Human
gccuguggcgccgucuccagggg

SEQ ID NO: 1354999 - RNA, 21 nt, Human
gccuguggcgccgucuccagg

SEQ ID NO: 1355000 - RNA, 19 nt, Human
gccugugccuccucacccc

SEQ ID NO: 1355001 - RNA, 22 nt, Human
gccugugccaggugaggucagc

SEQ ID NO: 1355002 - RNA, 19 nt, Human
gccugugccaggugagguc

SEQ ID NO: 1355003 - RNA, 19 nt, Human
gccuguggcgccgucucca

SEQ ID NO: 1355004 - RNA, 15 nt, Human
gccugugccagguga

SEQ ID NO: 1355005 - RNA, 14 nt, Human
gccugugccaggug

SEQ ID NO: 1355006 - RNA, 13 nt, Human
gccuggccuggcc

SEQ ID NO: 1355007 - RNA, 23 nt, Human
gccuagugaaggcuucucucugu

SEQ ID NO: 1355008 - RNA, 22 nt, Human
gccuagugaaggcuucucucug

SEQ ID NO: 1355009 - RNA, 19 nt, Human
gccuagugaaggcuucucu

SEQ ID NO: 1355010 - RNA, 14 nt, Human
gccuaggcugcauu

SEQ ID NO: 1355011 - RNA, 17 nt, Human
gccuaggccuaguccug

SEQ ID NO: 1355012 - RNA, 16 nt, Human
gccuaggauucuaaaa

SEQ ID NO: 1355013 - RNA, 15 nt, Human
gccuaggauucuaaa

SEQ ID NO: 1355014 - RNA, 14 nt, Human
gccuaggauucuaa

SEQ ID NO: 1355015 - RNA, 13 nt, Human
gccuaggauucua

SEQ ID NO: 1355016 - RNA, 12 nt, Human
gccuaggauucu

SEQ ID NO: 1355017 - RNA, 16 nt, Human
gccuaggaggguccuc

SEQ ID NO: 1355018 - RNA, 15 nt, Human
gccuaggaggguccu

SEQ ID NO: 1355019 - RNA, 12 nt, Human
gccuaggcugca

SEQ ID NO: 1355020 - RNA, 19 nt, Human
gccuaggccugggcagugg

SEQ ID NO: 1355021 - RNA, 17 nt, Human
gccuaggccugggcagu

SEQ ID NO: 1355022 - RNA, 16 nt, Human
gccuaggccugggcag

SEQ ID NO: 1355023 - RNA, 12 nt, Human
gccuaggccugg

SEQ ID NO: 1355024 - RNA, 13 nt, Human
gccgccgccucuu

SEQ ID NO: 1355025 - RNA, 20 nt, Human
gccuagcauacguacacauu

SEQ ID NO: 1355026 - RNA, 21 nt, Human
gccuagcauacguacacauuu

SEQ ID NO: 1355027 - RNA, 22 nt, Human
gccuagcauacguacacauuuu

SEQ ID NO: 1355028 - RNA, 23 nt, Human
gccuagcauacguacacauuuua

SEQ ID NO: 1355029 - RNA, 18 nt, Human
gccgcccugcgggugaac

SEQ ID NO: 1355030 - RNA, 23 nt, Human
gccgcccccugccccccagccuc

SEQ ID NO: 1355031 - RNA, 17 nt, Human
gccgcccccugcccccc

SEQ ID NO: 1355032 - RNA, 20 nt, Human
gcccugugccccuugacaac

SEQ ID NO: 1355033 - RNA, 19 nt, Human
gcccugugaggcugggucc

SEQ ID NO: 1355034 - RNA, 22 nt, Human
gcccuguccuggugguauuuuc

SEQ ID NO: 1355035 - RNA, 17 nt, Human
gcccuguccugguggua

SEQ ID NO: 1355036 - RNA, 13 nt, Human
gcccuguccuggu

SEQ ID NO: 1355037 - RNA, 22 nt, Human
gcccugugccccuugacaacug

SEQ ID NO: 1355038 - RNA, 21 nt, Human
gcccugugcaaccucuuggcc

SEQ ID NO: 1355039 - RNA, 13 nt, Human
gcccugcccugcc

SEQ ID NO: 1355040 - RNA, 17 nt, Human
gcccugcccugccaccu

SEQ ID NO: 1355041 - RNA, 13 nt, Human
gcccugccaccug

SEQ ID NO: 1355042 - RNA, 14 nt, Human
gcccugccaccugu

SEQ ID NO: 1355043 - RNA, 15 nt, Human
gcccugccaccuguc

SEQ ID NO: 1355044 - RNA, 16 nt, Human
gcccugccaccugucu

SEQ ID NO: 1355045 - RNA, 17 nt, Human
gcccugccaccugucug

SEQ ID NO: 1355046 - RNA, 14 nt, Human
gcccucacccgccc

SEQ ID NO: 1355047 - RNA, 16 nt, Human
gcccucacacacccug

SEQ ID NO: 1355048 - RNA, 14 nt, Human
gcccucaagucuuu

SEQ ID NO: 1355049 - RNA, 23 nt, Human
gcccucaagacccuuuuggguuu

SEQ ID NO: 1355050 - RNA, 21 nt, Human
gcccuaagcagaaagugccuu

SEQ ID NO: 1355051 - RNA, 18 nt, Human
gcccuaagcagaaagugc

SEQ ID NO: 1355052 - RNA, 17 nt, Human
gcccuaagcagaaagug

SEQ ID NO: 1355053 - RNA, 16 nt, Human
gcccuaagcagaaagu

SEQ ID NO: 1355054 - RNA, 15 nt, Human
gcccuaagcagaaag

SEQ ID NO: 1355055 - RNA, 12 nt, Human
gcccuaagcaga

SEQ ID NO: 1355056 - RNA, 14 nt, Human
gcccguccugccug

SEQ ID NO: 1355057 - RNA, 13 nt, Human
gcccguccugccu

SEQ ID NO: 1355058 - RNA, 17 nt, Human
gcccgguaagagcaaaa

SEQ ID NO: 1355059 - RNA, 21 nt, Human
gccccugccauuguagcgucu

SEQ ID NO: 1355060 - RNA, 14 nt, Human
gcccccacccuguu

SEQ ID NO: 1355061 - RNA, 20 nt, Human
gccccugccucucugcaggu

SEQ ID NO: 1355062 - RNA, 23 nt, Human
gccccugccucucugcagguccc

SEQ ID NO: 1355063 - RNA, 23 nt, Human
gccccugccaccuccugccucag

SEQ ID NO: 1355064 - RNA, 16 nt, Human
gccccccagccucugg

SEQ ID NO: 1355065 - RNA, 19 nt, Human
gcccccacugccuuugacc

SEQ ID NO: 1355066 - RNA, 22 nt, Human
gcccccaccgugggcagggagc

SEQ ID NO: 1355067 - RNA, 20 nt, Human
gcccccaccgugggcaggga

SEQ ID NO: 1355068 - RNA, 18 nt, Human
gcccccaccgugggcagg

SEQ ID NO: 1355069 - RNA, 17 nt, Human
gcccccaccgugggcag

SEQ ID NO: 1355070 - RNA, 23 nt, Human
gcccccacccuguuccugcugcu

SEQ ID NO: 1355071 - RNA, 22 nt, Human
gcccccacccuguuccugcugc

SEQ ID NO: 1355072 - RNA, 18 nt, Human
gcccccacccuguuccug

SEQ ID NO: 1355073 - RNA, 17 nt, Human
gcccccacugaccagaa

SEQ ID NO: 1355074 - RNA, 12 nt, Human
gcccccacugac

SEQ ID NO: 1355075 - RNA, 16 nt, Human
gcccccaccuggcuca

SEQ ID NO: 1355076 - RNA, 16 nt, Human
gcuaauucuacucaca

SEQ ID NO: 1355077 - RNA, 22 nt, Human
gcuaauucaaggaauuucuuaa

SEQ ID NO: 1355078 - RNA, 17 nt, Human
gcuaauucaaggaauuu

SEQ ID NO: 1355079 - RNA, 15 nt, Human
gcuaauaacugaucu

SEQ ID NO: 1355080 - RNA, 23 nt, Human
gcuaauauuuuccuccugagugc

SEQ ID NO: 1355081 - RNA, 17 nt, Human
gcuaaaauaaagaaaua

SEQ ID NO: 1355082 - RNA, 16 nt, Human
gcuaaaagaaacuuuc

SEQ ID NO: 1355083 - RNA, 15 nt, Human
gcuaaaagaaacuuu

SEQ ID NO: 1355084 - RNA, 12 nt, Human
gcuaaaagaaac

SEQ ID NO: 1355085 - RNA, 17 nt, Human
gcuaaaacaaugaauaa

SEQ ID NO: 1355086 - RNA, 21 nt, Human
gcuaauaaaaagcuuuugucu

SEQ ID NO: 1355087 - RNA, 13 nt, Human
gcuaagugugaac

SEQ ID NO: 1355088 - RNA, 17 nt, Human
gcgugguggucccuggg

SEQ ID NO: 1355089 - RNA, 15 nt, Human
gcgugugcaggagcg

SEQ ID NO: 1355090 - RNA, 17 nt, Human
gcgugucaccugugcuu

SEQ ID NO: 1355091 - RNA, 18 nt, Human
gcgugguggucccugggu

SEQ ID NO: 1355092 - RNA, 16 nt, Human
gcgggauggggcuccc

SEQ ID NO: 1355093 - RNA, 11 nt, Human
gcgugcagaug

SEQ ID NO: 1355094 - RNA, 22 nt, Human
gcguuugaccuuuuauguagua

SEQ ID NO: 1355095 - RNA, 19 nt, Human
gcguuuuuuaaauguauac

SEQ ID NO: 1355096 - RNA, 18 nt, Human
gcguuucuaugacacaug

SEQ ID NO: 1355097 - RNA, 22 nt, Human
gcuacucugugccagagccugg

SEQ ID NO: 1355098 - RNA, 23 nt, Human
gcuacucugugccagagccuggg

SEQ ID NO: 1355099 - RNA, 21 nt, Human
gcuacucugugccagagccug

SEQ ID NO: 1355100 - RNA, 20 nt, Human
gcuacucugugccagagccu

SEQ ID NO: 1355101 - RNA, 19 nt, Human
gcuacucugugccagagcc

SEQ ID NO: 1355102 - RNA, 18 nt, Human
gcuacucugugccagagc

SEQ ID NO: 1355103 - RNA, 17 nt, Human
gcuacucugugccagag

SEQ ID NO: 1355104 - RNA, 16 nt, Human
gcuacucugugccaga

SEQ ID NO: 1355105 - RNA, 15 nt, Human
gcuacucugugccag

SEQ ID NO: 1355106 - RNA, 14 nt, Human
gcuacucugugcca

SEQ ID NO: 1355107 - RNA, 13 nt, Human
gcuacucugugcc

SEQ ID NO: 1355108 - RNA, 23 nt, Human
gcuacucuccccacgagggcugg

SEQ ID NO: 1355109 - RNA, 22 nt, Human
gcuacucuccccacgagggcug

SEQ ID NO: 1355110 - RNA, 21 nt, Human
gcuacucuaguauuccagacc

SEQ ID NO: 1355111 - RNA, 20 nt, Human
gcuacucuaguauuccagac

SEQ ID NO: 1355112 - RNA, 19 nt, Human
gcuacucuaguauuccaga

SEQ ID NO: 1355113 - RNA, 20 nt, Human
gcucaggacagaugccacac

SEQ ID NO: 1355114 - RNA, 17 nt, Human
gcucaggacagaugcca

SEQ ID NO: 1355115 - RNA, 21 nt, Human
gcucaggaaccgaggcaggga

SEQ ID NO: 1355116 - RNA, 20 nt, Human
gcucaggaaccgaggcaggg

SEQ ID NO: 1355117 - RNA, 19 nt, Human
gcucaggaaccgaggcagg

SEQ ID NO: 1355118 - RNA, 16 nt, Human
gcucaggaaccgaggc

SEQ ID NO: 1355119 - RNA, 19 nt, Human
gcucacugaccugccugua

SEQ ID NO: 1355120 - RNA, 19 nt, Human
gcucagggccaugcugagg

SEQ ID NO: 1355121 - RNA, 22 nt, Human
gcucaggcaggggccuccaugg

SEQ ID NO: 1355122 - RNA, 24 nt, Human
gcucaggcaggggccuccaugggc

SEQ ID NO: 1355123 - RNA, 19 nt, Human
gcucaggcaggggccucca

SEQ ID NO: 1355124 - RNA, 16 nt, Human
gcucaggcaggggccu

SEQ ID NO: 1355125 - RNA, 12 nt, Human
gcucaggcaggg

SEQ ID NO: 1355126 - RNA, 20 nt, Human
gcucaggaugagggaaaaga

SEQ ID NO: 1355127 - RNA, 18 nt, Human
gcucagggaccauggcuu

SEQ ID NO: 1355128 - RNA, 20 nt, Human
gcucagggccaugcugaggc

SEQ ID NO: 1355129 - RNA, 20 nt, Human
gcucacucagccacccugag

SEQ ID NO: 1355130 - RNA, 15 nt, Human
gcucacucagccacc

SEQ ID NO: 1355131 - RNA, 14 nt, Human
gcucacucagcacu

SEQ ID NO: 1355132 - RNA, 13 nt, Human
gcuauuuuucuaa

SEQ ID NO: 1355133 - RNA, 21 nt, Human
gcuauuuuucuaacuacaaag

SEQ ID NO: 1355134 - RNA, 13 nt, Human
gcuauuuugugaa

SEQ ID NO: 1355135 - RNA, 24 nt, Human
gcuauuuuccaggcuucugcuggg

SEQ ID NO: 1355136 - RNA, 15 nt, Human
gcuauuuuccaggcu

SEQ ID NO: 1355137 - RNA, 13 nt, Human
gcuauuuuccagg

SEQ ID NO: 1355138 - RNA, 23 nt, Human
gcuauuuuauauuacacuacaca

SEQ ID NO: 1355139 - RNA, 18 nt, Human
gcuauuuuauauuacacu

SEQ ID NO: 1355140 - RNA, 19 nt, Human
gcuauuuguaaaucugcca

SEQ ID NO: 1355141 - RNA, 14 nt, Human
gcuauuugucaucu

SEQ ID NO: 1355142 - RNA, 17 nt, Human
gcuauuuguaaaucugc

SEQ ID NO: 1355143 - RNA, 15 nt, Human
gcuauuuguaaaucu

SEQ ID NO: 1355144 - RNA, 17 nt, Human
gcuauuugauguaauac

SEQ ID NO: 1355145 - RNA, 19 nt, Human
gcuauuugauguaauacuu

SEQ ID NO: 1355146 - RNA, 15 nt, Human
gcuauuugauguaau

SEQ ID NO: 1355147 - RNA, 14 nt, Human
gcuauuugaagugu

SEQ ID NO: 1355148 - RNA, 16 nt, Human
gcuauucugucccuag

SEQ ID NO: 1355149 - RNA, 19 nt, Human
gcuauucugucccuaggug

SEQ ID NO: 1355150 - RNA, 14 nt, Human
gcuauucugucccu

SEQ ID NO: 1355151 - RNA, 19 nt, Human
gcuauuccagcuguccccc

SEQ ID NO: 1355152 - RNA, 23 nt, Human
gcucacucaucaauggggccagu

SEQ ID NO: 1355153 - RNA, 20 nt, Human
gcucacugcaaccucugccu

SEQ ID NO: 1355154 - RNA, 21 nt, Human
gcuagugacuugugucccaug

SEQ ID NO: 1355155 - RNA, 12 nt, Human
gcuaugcauuug

SEQ ID NO: 1355156 - RNA, 22 nt, Human
gcuagucuuuugcuuuugccca

SEQ ID NO: 1355157 - RNA, 14 nt, Human
gcuagugacuugug

SEQ ID NO: 1355158 - RNA, 16 nt, Human
gcuaugcucaggggcc

SEQ ID NO: 1355159 - RNA, 20 nt, Human
gcuaugcucaggggcccugg

SEQ ID NO: 1355160 - RNA, 13 nt, Human
gcuaugcauuuga

SEQ ID NO: 1355161 - RNA, 17 nt, Human
gcuagucuuuugcuuuu

SEQ ID NO: 1355162 - RNA, 15 nt, Human
gcuagucuuuugcuu

SEQ ID NO: 1355163 - RNA, 12 nt, Human
gcuagucuuuug

SEQ ID NO: 1355164 - RNA, 15 nt, Human
gcucuaacagcccuc

SEQ ID NO: 1355165 - RNA, 22 nt, Human
gcucguggacugagugggaagc

SEQ ID NO: 1355166 - RNA, 19 nt, Human
gcucguccccaagugaccu

SEQ ID NO: 1355167 - RNA, 21 nt, Human
gcucggggugcacaggagggg

SEQ ID NO: 1355168 - RNA, 20 nt, Human
gcucggggugcacaggaggg

SEQ ID NO: 1355169 - RNA, 19 nt, Human
gcucggggugcacaggagg

SEQ ID NO: 1355170 - RNA, 18 nt, Human
gcucggggugcacaggag

SEQ ID NO: 1355171 - RNA, 17 nt, Human
gcucuaacgccugagcc

SEQ ID NO: 1355172 - RNA, 16 nt, Human
gcucuaacgccugagc

SEQ ID NO: 1355173 - RNA, 15 nt, Human
gcucuaacgccugag

SEQ ID NO: 1355174 - RNA, 14 nt, Human
gcucuaacgccuga

SEQ ID NO: 1355175 - RNA, 13 nt, Human
gcucuaacgccug

SEQ ID NO: 1355176 - RNA, 22 nt, Human
gcucugaguaccccugcuuugg

SEQ ID NO: 1355177 - RNA, 17 nt, Human
gcucugagggaaagggc

SEQ ID NO: 1355178 - RNA, 13 nt, Human
gcucugagggaaa

SEQ ID NO: 1355179 - RNA, 11 nt, Human
gcucugaggga

SEQ ID NO: 1355180 - RNA, 20 nt, Human
gcucugaggcgccccaaccc

SEQ ID NO: 1355181 - RNA, 23 nt, Human
gcucugaggcgccccaacccgug

SEQ ID NO: 1355182 - RNA, 10 nt, Human
gcucugaggc

SEQ ID NO: 1355183 - RNA, 9 nt, Human
gcucugagg

SEQ ID NO: 1355184 - RNA, 14 nt, Human
gcucugagcuguca

SEQ ID NO: 1355185 - RNA, 13 nt, Human
gcucugagcuguc

SEQ ID NO: 1355186 - RNA, 12 nt, Human
gcucugagcugu

SEQ ID NO: 1355187 - RNA, 18 nt, Human
gcucugagcgccuccauc

SEQ ID NO: 1355188 - RNA, 17 nt, Human
gcucugagcgccuccau

SEQ ID NO: 1355189 - RNA, 14 nt, Human
gcucugagcgccuc

SEQ ID NO: 1355190 - RNA, 17 nt, Human
gcucugcaauuccccuc

SEQ ID NO: 1355191 - RNA, 20 nt, Human
gcucugaugcaucagaaagg

SEQ ID NO: 1355192 - RNA, 19 nt, Human
gcucugaugcaucagaaag

SEQ ID NO: 1355193 - RNA, 16 nt, Human
gcucugaugcaucaga

SEQ ID NO: 1355194 - RNA, 11 nt, Human
gcucugaugca

SEQ ID NO: 1355195 - RNA, 23 nt, Human
gcucugaugaaaaauugcugacu

SEQ ID NO: 1355196 - RNA, 13 nt, Human
gcucugaugaaaa

SEQ ID NO: 1355197 - RNA, 23 nt, Human
gcucugaucccucuacagagcuu

SEQ ID NO: 1355198 - RNA, 22 nt, Human
gcucugaucccucuacagagcu

SEQ ID NO: 1355199 - RNA, 13 nt, Human
gcucugaucccuc

SEQ ID NO: 1355200 - RNA, 20 nt, Human
gcuccugcacuuacuugcuu

SEQ ID NO: 1355201 - RNA, 12 nt, Human
gcuccugcacuu

SEQ ID NO: 1355202 - RNA, 19 nt, Human
gcuccuggcccagccuuug

SEQ ID NO: 1355203 - RNA, 17 nt, Human
gcuccuggcccagccuu

SEQ ID NO: 1355204 - RNA, 16 nt, Human
gcuccuggcccagccu

SEQ ID NO: 1355205 - RNA, 15 nt, Human
gcuccuggcccagcc

SEQ ID NO: 1355206 - RNA, 19 nt, Human
gcuccuggaccccccuuuc

SEQ ID NO: 1355207 - RNA, 11 nt, Human
gcuccuggacc

SEQ ID NO: 1355208 - RNA, 11 nt, Human
gcuccugcagc

SEQ ID NO: 1355209 - RNA, 16 nt, Human
gcucccaggaccacag

SEQ ID NO: 1355210 - RNA, 16 nt, Human
gcucccaccuccugac

SEQ ID NO: 1355211 - RNA, 22 nt, Human
gcucccaccuccugacacccuu

SEQ ID NO: 1355212 - RNA, 15 nt, Human
gcucccaccuccuga

SEQ ID NO: 1355213 - RNA, 22 nt, Human
gcucccacagucccaucugcuu

SEQ ID NO: 1355214 - RNA, 21 nt, Human
gcuccccccagcccccuaaga

SEQ ID NO: 1355215 - RNA, 22 nt, Human
gcucccccagcaaagcccccag

SEQ ID NO: 1355216 - RNA, 14 nt, Human
gcuccccauguguc

SEQ ID NO: 1355217 - RNA, 12 nt, Human
gcuccccaugug

SEQ ID NO: 1355218 - RNA, 23 nt, Human
gcuccacucugcuucucugacuu

SEQ ID NO: 1355219 - RNA, 19 nt, Human
gcuccacccuggccgaguc

SEQ ID NO: 1355220 - RNA, 16 nt, Human
gcuccacccuggccga

SEQ ID NO: 1355221 - RNA, 16 nt, Human
gcuccacucugcuucu

SEQ ID NO: 1355222 - RNA, 15 nt, Human
gcuccacucugcuuc

SEQ ID NO: 1355223 - RNA, 13 nt, Human
gcuccacucugcu

SEQ ID NO: 1355224 - RNA, 19 nt, Human
gcuccaccuugcagcucuc

SEQ ID NO: 1355225 - RNA, 21 nt, Human
gcuccacucugcuucucugac

SEQ ID NO: 1355226 - RNA, 20 nt, Human
gcuccacucugcuucucuga

SEQ ID NO: 1355227 - RNA, 19 nt, Human
gcuccacucugcuucucug

SEQ ID NO: 1355228 - RNA, 17 nt, Human
gcuccacucugcuucuc

SEQ ID NO: 1355229 - RNA, 17 nt, Human
cuggaucagcguggccu

SEQ ID NO: 1355230 - RNA, 16 nt, Human
cuggaucagcguggcc

SEQ ID NO: 1355231 - RNA, 14 nt, Human
cuggaucagcgugg

SEQ ID NO: 1355232 - RNA, 13 nt, Human
cuggaucagcgug

SEQ ID NO: 1355233 - RNA, 15 nt, Human
cuggaucagaacagg

SEQ ID NO: 1355234 - RNA, 18 nt, Human
cuggauaacuuccacagg

SEQ ID NO: 1355235 - RNA, 22 nt, Human
cuggauaacuuccacagggucc

SEQ ID NO: 1355236 - RNA, 17 nt, Human
cuggauaacuuccacag

SEQ ID NO: 1355237 - RNA, 18 nt, Human
cuggauaguccgucucug

SEQ ID NO: 1355238 - RNA, 19 nt, Human
cuggauaguccgucucugc

SEQ ID NO: 1355239 - RNA, 18 nt, Human
cuggaguuucauguacaa

SEQ ID NO: 1355240 - RNA, 22 nt, Human
cuggaguuucauguacaagaug

SEQ ID NO: 1355241 - RNA, 13 nt, Human
cuggaguuucaug

SEQ ID NO: 1355242 - RNA, 14 nt, Human
cuggaagaugggga

SEQ ID NO: 1355243 - RNA, 13 nt, Human
cuggaagaugggg

SEQ ID NO: 1355244 - RNA, 18 nt, Human
cuggaagauccugcgggu

SEQ ID NO: 1355245 - RNA, 14 nt, Human
cuggaagauccugc

SEQ ID NO: 1355246 - RNA, 19 nt, Human
cuggaagauagcugugacu

SEQ ID NO: 1355247 - RNA, 16 nt, Human
cuggaagauagcugug

SEQ ID NO: 1355248 - RNA, 15 nt, Human
cuggaagauagcugu

SEQ ID NO: 1355249 - RNA, 16 nt, Human
cuggaagagcagcccu

SEQ ID NO: 1355250 - RNA, 23 nt, Human
cuggaagauggggaccagcagcc

SEQ ID NO: 1355251 - RNA, 21 nt, Human
cuggaagacgcaagggccuga

SEQ ID NO: 1355252 - RNA, 20 nt, Human
cuggaacuugaacugauuca

SEQ ID NO: 1355253 - RNA, 14 nt, Human
cuggaacuugggga

SEQ ID NO: 1355254 - RNA, 22 nt, Human
cuggaguugaucuggaacccag

SEQ ID NO: 1355255 - RNA, 20 nt, Human
cuggaguugaucuggaaccc

SEQ ID NO: 1355256 - RNA, 18 nt, Human
cuggacuuuccugcaacu

SEQ ID NO: 1355257 - RNA, 16 nt, Human
cuggacuuuccugcaa

SEQ ID NO: 1355258 - RNA, 15 nt, Human
cuggacuuuccugca

SEQ ID NO: 1355259 - RNA, 14 nt, Human
cuggacuuuccugc

SEQ ID NO: 1355260 - RNA, 17 nt, Human
cuggacuuggccccugc

SEQ ID NO: 1355261 - RNA, 18 nt, Human
cuggacuuggccccugcc

SEQ ID NO: 1355262 - RNA, 13 nt, Human
cuggacuuuccug

SEQ ID NO: 1355263 - RNA, 19 nt, Human
cuggacuuggccccugcca

SEQ ID NO: 1355264 - RNA, 13 nt, Human
cugcucauccacu

SEQ ID NO: 1355265 - RNA, 22 nt, Human
cugcucaucauucucugucuca

SEQ ID NO: 1355266 - RNA, 18 nt, Human
cugcucaucauucucugu

SEQ ID NO: 1355267 - RNA, 17 nt, Human
cugcucaucauucucug

SEQ ID NO: 1355268 - RNA, 16 nt, Human
cugcucaucauucucu

SEQ ID NO: 1355269 - RNA, 19 nt, Human
cugcucauauugugauucu

SEQ ID NO: 1355270 - RNA, 15 nt, Human
cugcucauauuguga

SEQ ID NO: 1355271 - RNA, 19 nt, Human
cugcucaguaaagcacuug

SEQ ID NO: 1355272 - RNA, 18 nt, Human
cugcucaguaaagcacuu

SEQ ID NO: 1355273 - RNA, 13 nt, Human
cugcugagaaccu

SEQ ID NO: 1355274 - RNA, 14 nt, Human
cugcugagaaccug

SEQ ID NO: 1355275 - RNA, 12 nt, Human
cugcugagaacc

SEQ ID NO: 1355276 - RNA, 16 nt, Human
cugcugaccugugcac

SEQ ID NO: 1355277 - RNA, 15 nt, Human
cugcugaccugugca

SEQ ID NO: 1355278 - RNA, 21 nt, Human
cugcugaccugcugaccugug

SEQ ID NO: 1355279 - RNA, 15 nt, Human
cugcugaccugcuga

SEQ ID NO: 1355280 - RNA, 14 nt, Human
cugcugaccugcug

SEQ ID NO: 1355281 - RNA, 13 nt, Human
cugcugaccugcu

SEQ ID NO: 1355282 - RNA, 21 nt, Human
cugcuaggccagagcccacuc

SEQ ID NO: 1355283 - RNA, 20 nt, Human
cugcuaggccagagcccacu

SEQ ID NO: 1355284 - RNA, 19 nt, Human
cugcuaggccagagcccac

SEQ ID NO: 1355285 - RNA, 18 nt, Human
cugcuaggccagagccca

SEQ ID NO: 1355286 - RNA, 16 nt, Human
cugcuaggccagagcc

SEQ ID NO: 1355287 - RNA, 17 nt, Human
cugcucaggaaacgaga

SEQ ID NO: 1355288 - RNA, 15 nt, Human
cugcuaggccagagc

SEQ ID NO: 1355289 - RNA, 12 nt, Human
cugcuaggccag

SEQ ID NO: 1355290 - RNA, 21 nt, Human
cugccucucccaggcaggggc

SEQ ID NO: 1355291 - RNA, 20 nt, Human
cugccuggugcccagcacau

SEQ ID NO: 1355292 - RNA, 20 nt, Human
cugccucucccaggcagggg

SEQ ID NO: 1355293 - RNA, 19 nt, Human
cugccucucccaggcaggg

SEQ ID NO: 1355294 - RNA, 18 nt, Human
cugccucucccaggcagg

SEQ ID NO: 1355295 - RNA, 21 nt, Human
cugccucccuuguggcagcaa

SEQ ID NO: 1355296 - RNA, 16 nt, Human
cugccucccuuguggc

SEQ ID NO: 1355297 - RNA, 15 nt, Human
cugccucccuucaug

SEQ ID NO: 1355298 - RNA, 17 nt, Human
cugccucccuucaugca

SEQ ID NO: 1355299 - RNA, 18 nt, Human
cugccucccuucaugcau

SEQ ID NO: 1355300 - RNA, 19 nt, Human
cugccucccuucaugcaug

SEQ ID NO: 1355301 - RNA, 21 nt, Human
cugccucccuucaugcaugga

SEQ ID NO: 1355302 - RNA, 23 nt, Human
cugccucccuucaugcauggaaa

SEQ ID NO: 1355303 - RNA, 21 nt, Human
cugaugaacucuuaaucaaau

SEQ ID NO: 1355304 - RNA, 20 nt, Human
cugaugaaaauaaagaaugg

SEQ ID NO: 1355305 - RNA, 19 nt, Human
cugaugaaaauaaagaaug

SEQ ID NO: 1355306 - RNA, 18 nt, Human
cugaugaaaauaaagaau

SEQ ID NO: 1355307 - RNA, 17 nt, Human
cugaugaaaauaaagaa

SEQ ID NO: 1355308 - RNA, 16 nt, Human
cugaugaaaauaaaga

SEQ ID NO: 1355309 - RNA, 14 nt, Human
cugaugaaaauaaa

SEQ ID NO: 1355310 - RNA, 13 nt, Human
cugaugaaaauaa

SEQ ID NO: 1355311 - RNA, 12 nt, Human
cugaugaaaaua

SEQ ID NO: 1355312 - RNA, 22 nt, Human
cugaugaaaaauugcugacugu

SEQ ID NO: 1355313 - RNA, 20 nt, Human
cugccuccccucuccuuccu

SEQ ID NO: 1355314 - RNA, 22 nt, Human
cugccuccccuuaaaggggaga

SEQ ID NO: 1355315 - RNA, 14 nt, Human
cugccucccuucau

SEQ ID NO: 1355316 - RNA, 17 nt, Human
cuggcagagaugccucc

SEQ ID NO: 1355317 - RNA, 14 nt, Human
cuggcagagaugcc

SEQ ID NO: 1355318 - RNA, 15 nt, Human
cuggcagccucccau

SEQ ID NO: 1355319 - RNA, 14 nt, Human
cuggcagccuccca

SEQ ID NO: 1355320 - RNA, 12 nt, Human
cuggcagccucc

SEQ ID NO: 1355321 - RNA, 23 nt, Human
cuggcagccacacuucucaggac

SEQ ID NO: 1355322 - RNA, 22 nt, Human
cuggcagccacacuucucagga

SEQ ID NO: 1355323 - RNA, 15 nt, Human
cuggcagccacacuu

SEQ ID NO: 1355324 - RNA, 14 nt, Human
cuggcagccacacu

SEQ ID NO: 1355325 - RNA, 12 nt, Human
cuggcagccaca

SEQ ID NO: 1355326 - RNA, 20 nt, Human
cuggcagagaugccucccug

SEQ ID NO: 1355327 - RNA, 18 nt, Human
cuggcagagaugccuccc

SEQ ID NO: 1355328 - RNA, 24 nt, Human
cuggccccucucccuugggcucug

SEQ ID NO: 1355329 - RNA, 15 nt, Human
cuggccccucucccu

SEQ ID NO: 1355330 - RNA, 14 nt, Human
cuggccccucuccc

SEQ ID NO: 1355331 - RNA, 13 nt, Human
cuggccccucucc

SEQ ID NO: 1355332 - RNA, 23 nt, Human
cuggcagccucccauccagggcc

SEQ ID NO: 1355333 - RNA, 22 nt, Human
cuggcagccucccauccagggc

SEQ ID NO: 1355334 - RNA, 20 nt, Human
cuggcagccucccauccagg

SEQ ID NO: 1355335 - RNA, 21 nt, Human
cuggcucugagcgccuccauc

SEQ ID NO: 1355336 - RNA, 20 nt, Human
cuggcucugagcgccuccau

SEQ ID NO: 1355337 - RNA, 13 nt, Human
cuggcucugagcg

SEQ ID NO: 1355338 - RNA, 12 nt, Human
cuggcucugagc

SEQ ID NO: 1355339 - RNA, 15 nt, Human
cuggcucuccuggcc

SEQ ID NO: 1355340 - RNA, 17 nt, Human
cuggcucuccuggcccu

SEQ ID NO: 1355341 - RNA, 13 nt, Human
cuggcucuccugg

SEQ ID NO: 1355342 - RNA, 22 nt, Human
cuggccuagaccagcagacaga

SEQ ID NO: 1355343 - RNA, 20 nt, Human
cuggccuagaccagcagaca

SEQ ID NO: 1355344 - RNA, 19 nt, Human
cuggccuagaccagcagac

SEQ ID NO: 1355345 - RNA, 14 nt, Human
cuggccuagcauac

SEQ ID NO: 1355346 - RNA, 24 nt, Human
cuggcucugagcgccuccauccaa

SEQ ID NO: 1355347 - RNA, 23 nt, Human
cugggaagucguccuuacuccug

SEQ ID NO: 1355348 - RNA, 13 nt, Human
cugggaauggagg

SEQ ID NO: 1355349 - RNA, 20 nt, Human
cugggaauggaggggcagag

SEQ ID NO: 1355350 - RNA, 23 nt, Human
cugggaauggaggggcagagcca

SEQ ID NO: 1355351 - RNA, 21 nt, Human
cugggacucagccuucagaca

SEQ ID NO: 1355352 - RNA, 18 nt, Human
cugggacucagccuucag

SEQ ID NO: 1355353 - RNA, 17 nt, Human
cugggacucagccuuca

SEQ ID NO: 1355354 - RNA, 16 nt, Human
cugggacucagccuuc

SEQ ID NO: 1355355 - RNA, 15 nt, Human
cugggacucagccuu

SEQ ID NO: 1355356 - RNA, 14 nt, Human
cugggacucagccu

SEQ ID NO: 1355357 - RNA, 22 nt, Human
cugggacaacugcucccaccuc

SEQ ID NO: 1355358 - RNA, 18 nt, Human
cugggacaacugcuccca

SEQ ID NO: 1355359 - RNA, 13 nt, Human
cugggacucagcc

SEQ ID NO: 1355360 - RNA, 23 nt, Human
cugggacuauaggcaugcgccac

SEQ ID NO: 1355361 - RNA, 18 nt, Human
cugggacuugcaaaaagg

SEQ ID NO: 1355362 - RNA, 17 nt, Human
cuggguggcucacucag

SEQ ID NO: 1355363 - RNA, 15 nt, Human
cuggguggcucacuc

SEQ ID NO: 1355364 - RNA, 22 nt, Human
cuggguggcuacucugugccag

SEQ ID NO: 1355365 - RNA, 21 nt, Human
cuggguggcuacucugugcca

SEQ ID NO: 1355366 - RNA, 20 nt, Human
cuggguggcuacucugugcc

SEQ ID NO: 1355367 - RNA, 19 nt, Human
cuggguggcuacucugugc

SEQ ID NO: 1355368 - RNA, 17 nt, Human
cuggguggcuacucugu

SEQ ID NO: 1355369 - RNA, 15 nt, Human
cuggguggcuacucu

SEQ ID NO: 1355370 - RNA, 21 nt, Human
cuggggcaggcugggccaugu

SEQ ID NO: 1355371 - RNA, 19 nt, Human
cuggggcaggcugggccau

SEQ ID NO: 1355372 - RNA, 18 nt, Human
cuggggcaggcugggcca

SEQ ID NO: 1355373 - RNA, 17 nt, Human
cuggggcaggcugggcc

SEQ ID NO: 1355374 - RNA, 16 nt, Human
cuggggcaggcugggc

SEQ ID NO: 1355375 - RNA, 15 nt, Human
cuggggccaggcugg

SEQ ID NO: 1355376 - RNA, 12 nt, Human
cuggggcucaga

SEQ ID NO: 1355377 - RNA, 18 nt, Human
cuggggcuagggggagcc

SEQ ID NO: 1355378 - RNA, 23 nt, Human
cuggggcucuaacgccugagccc

SEQ ID NO: 1355379 - RNA, 22 nt, Human
cuggggcucuaacgccugagcc

SEQ ID NO: 1355380 - RNA, 21 nt, Human
cuggggcucuaacgccugagc

SEQ ID NO: 1355381 - RNA, 20 nt, Human
cuggggcucuaacgccugag

SEQ ID NO: 1355382 - RNA, 19 nt, Human
cuggggcucuaacgccuga

SEQ ID NO: 1355383 - RNA, 16 nt, Human
cuggggcucagagccg

SEQ ID NO: 1355384 - RNA, 17 nt, Human
cuggggcucagagccgg

SEQ ID NO: 1355385 - RNA, 14 nt, Human
cuggggcucagagc

SEQ ID NO: 1355386 - RNA, 13 nt, Human
cuggggcucagag

SEQ ID NO: 1355387 - RNA, 20 nt, Human
cuggggcugaggcugaggca

SEQ ID NO: 1355388 - RNA, 11 nt, Human
cuggggagcag

SEQ ID NO: 1355389 - RNA, 19 nt, Human
cugggccaacucaccugag

SEQ ID NO: 1355390 - RNA, 14 nt, Human
cuggggagcggguc

SEQ ID NO: 1355391 - RNA, 22 nt, Human
cuggggagcgggucugcuccca

SEQ ID NO: 1355392 - RNA, 20 nt, Human
cuggggagcccgucucagug

SEQ ID NO: 1355393 - RNA, 15 nt, Human
cuggggagcccgucu

SEQ ID NO: 1355394 - RNA, 12 nt, Human
cuggggagcccg

SEQ ID NO: 1355395 - RNA, 21 nt, Human
cuggggagcaggcagccagca

SEQ ID NO: 1355396 - RNA, 17 nt, Human
cuggggagcaggcagcc

SEQ ID NO: 1355397 - RNA, 16 nt, Human
cuggggagcaggcagc

SEQ ID NO: 1355398 - RNA, 15 nt, Human
cuggggagcaggcag

SEQ ID NO: 1355399 - RNA, 15 nt, Human
cuggggcaggcuggg

SEQ ID NO: 1355400 - RNA, 14 nt, Human
cuggggcaggcugg

SEQ ID NO: 1355401 - RNA, 12 nt, Human
cuggggcaggcu

SEQ ID NO: 1355402 - RNA, 17 nt, Human
cugugaccucuccccug

SEQ ID NO: 1355403 - RNA, 21 nt, Human
cugugacccccagcuccggcc

SEQ ID NO: 1355404 - RNA, 18 nt, Human
cugugacccccagcuccg

SEQ ID NO: 1355405 - RNA, 17 nt, Human
cugugacccccagcucc

SEQ ID NO: 1355406 - RNA, 16 nt, Human
cugugacccccagcuc

SEQ ID NO: 1355407 - RNA, 15 nt, Human
cugugacccccagcu

SEQ ID NO: 1355408 - RNA, 13 nt, Human
cugugacccccag

SEQ ID NO: 1355409 - RNA, 22 nt, Human
cugugaccugcugagcucugag

SEQ ID NO: 1355410 - RNA, 21 nt, Human
cugugaccugcugagcucuga

SEQ ID NO: 1355411 - RNA, 20 nt, Human
cugugaccugcugagcucug

SEQ ID NO: 1355412 - RNA, 19 nt, Human
cugugaccugcugagcucu

SEQ ID NO: 1355413 - RNA, 18 nt, Human
cugugaccugcugagcuc

SEQ ID NO: 1355414 - RNA, 17 nt, Human
cugugaccugcugagcu

SEQ ID NO: 1355415 - RNA, 16 nt, Human
cugugaccugcugagc

SEQ ID NO: 1355416 - RNA, 15 nt, Human
cugugaccugcugag

SEQ ID NO: 1355417 - RNA, 14 nt, Human
cugugaccugcuga

SEQ ID NO: 1355418 - RNA, 15 nt, Human
cugugccugaauauu

SEQ ID NO: 1355419 - RNA, 20 nt, Human
cugugccuugucacgccaga

SEQ ID NO: 1355420 - RNA, 17 nt, Human
cugugcgcccagggcug

SEQ ID NO: 1355421 - RNA, 23 nt, Human
cugugccuuguuuuuuguuuguu

SEQ ID NO: 1355422 - RNA, 14 nt, Human
cugugucacccagg

SEQ ID NO: 1355423 - RNA, 14 nt, Human
cugugcgcccaggg

SEQ ID NO: 1355424 - RNA, 18 nt, Human
cuguuagucauuugcuga

SEQ ID NO: 1355425 - RNA, 15 nt, Human
cuguuagucauuugc

SEQ ID NO: 1355426 - RNA, 14 nt, Human
cuguuagucauuug

SEQ ID NO: 1355427 - RNA, 13 nt, Human
cuguuagucauuu

SEQ ID NO: 1355428 - RNA, 13 nt, Human
cugugucuaagau

SEQ ID NO: 1355429 - RNA, 12 nt, Human
cugugucuaaga

SEQ ID NO: 1355430 - RNA, 19 nt, Human
cuguuauaaucuuucacag

SEQ ID NO: 1355431 - RNA, 13 nt, Human
cuguuauaaucuu

SEQ ID NO: 1355432 - RNA, 17 nt, Human
cugucgcugcuucgugg

SEQ ID NO: 1355433 - RNA, 17 nt, Human
cugucggagcccugucu

SEQ ID NO: 1355434 - RNA, 14 nt, Human
cugucgcugcuucg

SEQ ID NO: 1355435 - RNA, 13 nt, Human
cugucgcugcuuc

SEQ ID NO: 1355436 - RNA, 23 nt, Human
cugucggagcccugucuccucuc

SEQ ID NO: 1355437 - RNA, 14 nt, Human
cuguccuguacauu

SEQ ID NO: 1355438 - RNA, 23 nt, Human
cuguccuggugguauuuucaaua

SEQ ID NO: 1355439 - RNA, 20 nt, Human
cuguccuggugguauuuuca

SEQ ID NO: 1355440 - RNA, 19 nt, Human
cuguccuggugguauuuuc

SEQ ID NO: 1355441 - RNA, 17 nt, Human
cuguccuggugguauuu

SEQ ID NO: 1355442 - RNA, 14 nt, Human
cuguccugguggua

SEQ ID NO: 1355443 - RNA, 16 nt, Human
cugucgcucucaguuc

SEQ ID NO: 1355444 - RNA, 15 nt, Human
cugucgcucucaguu

SEQ ID NO: 1355445 - RNA, 21 nt, Human
cuguccuggugguauuuucaa

SEQ ID NO: 1355446 - RNA, 22 nt, Human
cuguccuguacauugugggaug

SEQ ID NO: 1355447 - RNA, 18 nt, Human
cuguccugggccugcaga

SEQ ID NO: 1355448 - RNA, 14 nt, Human
cuguccugggccug

SEQ ID NO: 1355449 - RNA, 13 nt, Human
cuguccugggccu

SEQ ID NO: 1355450 - RNA, 21 nt, Human
cuguccucuuucagcuccuga

SEQ ID NO: 1355451 - RNA, 20 nt, Human
cuguccucuuucagcuccug

SEQ ID NO: 1355452 - RNA, 19 nt, Human
cuguccucuuucagcuccu

SEQ ID NO: 1355453 - RNA, 18 nt, Human
cuguccucuuucagcucc

SEQ ID NO: 1355454 - RNA, 17 nt, Human
cuguccucuuucagcuc

SEQ ID NO: 1355455 - RNA, 16 nt, Human
cuguccucuuucagcu

SEQ ID NO: 1355456 - RNA, 15 nt, Human
cuguccucuuucagc

SEQ ID NO: 1355457 - RNA, 13 nt, Human
cuguccucuuuca

SEQ ID NO: 1355458 - RNA, 21 nt, Human
cuguccucccgagcuccucuu

SEQ ID NO: 1355459 - RNA, 19 nt, Human
cuguccucccgagcuccuc

SEQ ID NO: 1355460 - RNA, 23 nt, Human
cugucauccucaaagaaagugua

SEQ ID NO: 1355461 - RNA, 22 nt, Human
cugucauccucaaagaaagugu

SEQ ID NO: 1355462 - RNA, 21 nt, Human
cugucauccucaaagaaagug

SEQ ID NO: 1355463 - RNA, 20 nt, Human
cugucauccucaaagaaagu

SEQ ID NO: 1355464 - RNA, 17 nt, Human
cugucauccagcucacu

SEQ ID NO: 1355465 - RNA, 21 nt, Human
cugucaucaucauggccagcu

SEQ ID NO: 1355466 - RNA, 20 nt, Human
cugucaucaucauggccagc

SEQ ID NO: 1355467 - RNA, 19 nt, Human
cugucaucaucauggccag

SEQ ID NO: 1355468 - RNA, 17 nt, Human
cugucaucaucauggcc

SEQ ID NO: 1355469 - RNA, 16 nt, Human
cugucaucaucauggc

SEQ ID NO: 1355470 - RNA, 23 nt, Human
cugucaucaauuaaaggcaaagg

SEQ ID NO: 1355471 - RNA, 16 nt, Human
cugucaucaauuaaag

SEQ ID NO: 1355472 - RNA, 22 nt, Human
cugucauaugcucugauuuauc

SEQ ID NO: 1355473 - RNA, 16 nt, Human
cugucauagaaauuac

SEQ ID NO: 1355474 - RNA, 14 nt, Human
cugucauagaaauu

SEQ ID NO: 1355475 - RNA, 19 nt, Human
cugucaguucuaaccuccu

SEQ ID NO: 1355476 - RNA, 15 nt, Human
cugucacaaccaaga

SEQ ID NO: 1355477 - RNA, 16 nt, Human
cugucacaaccaagaa

SEQ ID NO: 1355478 - RNA, 21 nt, Human
cugguuguuucuguuccaaau

SEQ ID NO: 1355479 - RNA, 14 nt, Human
cugguuuaauguuu

SEQ ID NO: 1355480 - RNA, 19 nt, Human
cugguuguuucuguuccaa

SEQ ID NO: 1355481 - RNA, 16 nt, Human
cugguuguuucuguuc

SEQ ID NO: 1355482 - RNA, 16 nt, Human
cugguuguuaugugau

SEQ ID NO: 1355483 - RNA, 13 nt, Human
cuguaaacugugu

SEQ ID NO: 1355484 - RNA, 12 nt, Human
cuguaaacugug

SEQ ID NO: 1355485 - RNA, 20 nt, Human
cuguaaacuguguauuccaa

SEQ ID NO: 1355486 - RNA, 14 nt, Human
cuguaaacugugua

SEQ ID NO: 1355487 - RNA, 18 nt, Human
cuguaaacuuuaucacuu

SEQ ID NO: 1355488 - RNA, 19 nt, Human
cuguaaacuuuaucacuua

SEQ ID NO: 1355489 - RNA, 20 nt, Human
cuggugaagcucacuucugg

SEQ ID NO: 1355490 - RNA, 20 nt, Human
cuggucuuguggaauuggga

SEQ ID NO: 1355491 - RNA, 18 nt, Human
cuggucuuguggaauugg

SEQ ID NO: 1355492 - RNA, 20 nt, Human
cuggugacaucagguuuuuc

SEQ ID NO: 1355493 - RNA, 15 nt, Human
cuggugaagcucacu

SEQ ID NO: 1355494 - RNA, 13 nt, Human
cuguaacugucac

SEQ ID NO: 1355495 - RNA, 16 nt, Human
cuguaacugccaggcu

SEQ ID NO: 1355496 - RNA, 15 nt, Human
cuguaacugccaggc

SEQ ID NO: 1355497 - RNA, 14 nt, Human
cuguaacugccagg

SEQ ID NO: 1355498 - RNA, 19 nt, Human
cuguaacuacuuuauaacu

SEQ ID NO: 1355499 - RNA, 17 nt, Human
cuguaacuacuuuauaa

SEQ ID NO: 1355500 - RNA, 16 nt, Human
cuguaacuacuuuaua

SEQ ID NO: 1355501 - RNA, 15 nt, Human
cuguaacauucagga

SEQ ID NO: 1355502 - RNA, 23 nt, Human
cuguaaccucuucagaggcccuc

SEQ ID NO: 1355503 - RNA, 22 nt, Human
cuguaaccucuucagaggcccu

SEQ ID NO: 1355504 - RNA, 20 nt, Human
cuguaaccucuucagaggcc

SEQ ID NO: 1355505 - RNA, 19 nt, Human
cuguaaccucuucagaggc

SEQ ID NO: 1355506 - RNA, 15 nt, Human
cuguaaccucuucag

SEQ ID NO: 1355507 - RNA, 19 nt, Human
cuguaacauacuggccugg

SEQ ID NO: 1355508 - RNA, 20 nt, Human
cuguacuguucugugucuuu

SEQ ID NO: 1355509 - RNA, 17 nt, Human
cuguacuguucuguguc

SEQ ID NO: 1355510 - RNA, 19 nt, Human
cuguacugccugcuugggg

SEQ ID NO: 1355511 - RNA, 18 nt, Human
cuguacugccugcuuggg

SEQ ID NO: 1355512 - RNA, 17 nt, Human
cuguacugccugcuugg

SEQ ID NO: 1355513 - RNA, 16 nt, Human
cuguacugccugcuug

SEQ ID NO: 1355514 - RNA, 15 nt, Human
cuguacugccugcuu

SEQ ID NO: 1355515 - RNA, 14 nt, Human
cuguacugccugcu

SEQ ID NO: 1355516 - RNA, 13 nt, Human
cuguacugccugc

SEQ ID NO: 1355517 - RNA, 12 nt, Human
cuguacugccug

SEQ ID NO: 1355518 - RNA, 18 nt, Human
cuguaguaggcauuuuua

SEQ ID NO: 1355519 - RNA, 22 nt, Human
cuguaguaggcauuuuuaccau

SEQ ID NO: 1355520 - RNA, 20 nt, Human
cuguaguaaauaaugcuuug

SEQ ID NO: 1355521 - RNA, 19 nt, Human
cuguaguaaauaaugcuuu

SEQ ID NO: 1355522 - RNA, 18 nt, Human
cuguaguaaauaaugcuu

SEQ ID NO: 1355523 - RNA, 22 nt, Human
cuguaguaaauaaugcuuugaa

SEQ ID NO: 1355524 - RNA, 17 nt, Human
cuguaguaaauaaugcu

SEQ ID NO: 1355525 - RNA, 20 nt, Human
cuguagguugcacacuuugg

SEQ ID NO: 1355526 - RNA, 22 nt, Human
cuguagguugcacacuuuggua

SEQ ID NO: 1355527 - RNA, 19 nt, Human
cuguagguugcacacuuug

SEQ ID NO: 1355528 - RNA, 17 nt, Human
cuguagguugcacacuu

SEQ ID NO: 1355529 - RNA, 24 nt, Human
cuguaggguaauuaguaacaugug

SEQ ID NO: 1355530 - RNA, 16 nt, Human
cuguagguugcacacu

SEQ ID NO: 1355531 - RNA, 15 nt, Human
cuguagguugcacac

SEQ ID NO: 1355532 - RNA, 18 nt, Human
cuguagaacucaaccucu

SEQ ID NO: 1355533 - RNA, 17 nt, Human
cuguagaaaugguugua

SEQ ID NO: 1355534 - RNA, 19 nt, Human
cuguagaaaugguuguauu

SEQ ID NO: 1355535 - RNA, 23 nt, Human
cuguagaaaaaaaaauucacaug

SEQ ID NO: 1355536 - RNA, 13 nt, Human
cuguagaaauggu

SEQ ID NO: 1355537 - RNA, 18 nt, Human
cuguagacggcucaguau

SEQ ID NO: 1355538 - RNA, 20 nt, Human
cuguagaaaugguuguauua

SEQ ID NO: 1355539 - RNA, 22 nt, Human
cuuacauuuacaaacugaagag

SEQ ID NO: 1355540 - RNA, 18 nt, Human
cuuacaagccuaagaauc

SEQ ID NO: 1355541 - RNA, 21 nt, Human
cuuaaaaauuaaauuggaaag

SEQ ID NO: 1355542 - RNA, 14 nt, Human
cuuacaaaugaaaa

SEQ ID NO: 1355543 - RNA, 16 nt, Human
cuuaaauaagaaacuu

SEQ ID NO: 1355544 - RNA, 13 nt, Human
cuuaaauaaugug

SEQ ID NO: 1355545 - RNA, 13 nt, Human
cuuaaauaagaaa

SEQ ID NO: 1355546 - RNA, 17 nt, Human
cuuaaauaagaaacuuu

SEQ ID NO: 1355547 - RNA, 12 nt, Human
cuguugggagag

SEQ ID NO: 1355548 - RNA, 22 nt, Human
cuguugggguggguauaaaaga

SEQ ID NO: 1355549 - RNA, 23 nt, Human
cuguugggguggguauaaaagau

SEQ ID NO: 1355550 - RNA, 18 nt, Human
cuguuuaaaaaaccacau

SEQ ID NO: 1355551 - RNA, 20 nt, Human
cuguuuaaaaaaccacaugg

SEQ ID NO: 1355552 - RNA, 16 nt, Human
cuguuuaaaaaaccac

SEQ ID NO: 1355553 - RNA, 15 nt, Human
cuguuguagaagaca

SEQ ID NO: 1355554 - RNA, 12 nt, Human
cuguuuaagaga

SEQ ID NO: 1355555 - RNA, 14 nt, Human
cuguuuaagagaca

SEQ ID NO: 1355556 - RNA, 16 nt, Human
cuguucaaagcugccu

SEQ ID NO: 1355557 - RNA, 15 nt, Human
cuuagggcaccaggg

SEQ ID NO: 1355558 - RNA, 21 nt, Human
cuuagggacagucaaaaccaa

SEQ ID NO: 1355559 - RNA, 23 nt, Human
cuuaggaagagccuuccacccag

SEQ ID NO: 1355560 - RNA, 20 nt, Human
cuuaggaagagccuuccacc

SEQ ID NO: 1355561 - RNA, 16 nt, Human
cuuaggaagagccuuc

SEQ ID NO: 1355562 - RNA, 15 nt, Human
cuuaggaagaauuuu

SEQ ID NO: 1355563 - RNA, 19 nt, Human
cuuagggaaggauacaaaa

SEQ ID NO: 1355564 - RNA, 21 nt, Human
cuuagggaaggauacaaaagc

SEQ ID NO: 1355565 - RNA, 17 nt, Human
cuuagcaguccccuucc

SEQ ID NO: 1355566 - RNA, 12 nt, Human
cuuagcaguccc

SEQ ID NO: 1355567 - RNA, 18 nt, Human
cuuagcaguccccuuccc

SEQ ID NO: 1355568 - RNA, 20 nt, Human
cuuaccaggcaccaaaagaa

SEQ ID NO: 1355569 - RNA, 19 nt, Human
cuuaccaggcaccaaaaga

SEQ ID NO: 1355570 - RNA, 20 nt, Human
cuuagccuggaccucugaca

SEQ ID NO: 1355571 - RNA, 21 nt, Human
cuuagccuggaccucugacag

SEQ ID NO: 1355572 - RNA, 19 nt, Human
cuuagccuggaccucugac

SEQ ID NO: 1355573 - RNA, 18 nt, Human
cuuagccuggaccucuga

SEQ ID NO: 1355574 - RNA, 17 nt, Human
cuuagccuggaccucug

SEQ ID NO: 1355575 - RNA, 13 nt, Human
cuuagccuggacc

SEQ ID NO: 1355576 - RNA, 22 nt, Human
cuuagcucauucuccuuguguu

SEQ ID NO: 1355577 - RNA, 16 nt, Human
cuuagcuuuagaaaca

SEQ ID NO: 1355578 - RNA, 20 nt, Human
cuuagcuuuagaaacagugc

SEQ ID NO: 1355579 - RNA, 17 nt, Human
cuuagcugucugcucag

SEQ ID NO: 1355580 - RNA, 22 nt, Human
cuuagcucaaugagcauguuua

SEQ ID NO: 1355581 - RNA, 19 nt, Human
cuuagcucucccaacucuu

SEQ ID NO: 1355582 - RNA, 14 nt, Human
cuuagcugucugcu

SEQ ID NO: 1355583 - RNA, 20 nt, Human
cuuagcucaaugagcauguu

SEQ ID NO: 1355584 - RNA, 19 nt, Human
cuuagcucaaugagcaugu

SEQ ID NO: 1355585 - RNA, 18 nt, Human
cuuagcucaaugagcaug

SEQ ID NO: 1355586 - RNA, 16 nt, Human
cuuagcucaaugagca

SEQ ID NO: 1355587 - RNA, 19 nt, Human
cuuagcuaguuuuauucuu

SEQ ID NO: 1355588 - RNA, 23 nt, Human
cuuagcucauucuccuuguguua

SEQ ID NO: 1355589 - RNA, 20 nt, Human
cuuucagcaagacuucucuu

SEQ ID NO: 1355590 - RNA, 18 nt, Human
cuuuaauucuguaucugu

SEQ ID NO: 1355591 - RNA, 14 nt, Human
cuuuaauucuguau

SEQ ID NO: 1355592 - RNA, 21 nt, Human
cuuuaauguuuuuugccacag

SEQ ID NO: 1355593 - RNA, 19 nt, Human
cuuuaauuaccaaccuguu

SEQ ID NO: 1355594 - RNA, 18 nt, Human
cuuuaauuaccaaccugu

SEQ ID NO: 1355595 - RNA, 23 nt, Human
cuuuaauguuuuuugccacagcu

SEQ ID NO: 1355596 - RNA, 17 nt, Human
cuuuaauguuuuuugcc

SEQ ID NO: 1355597 - RNA, 13 nt, Human
cuuuaauguuuuu

SEQ ID NO: 1355598 - RNA, 18 nt, Human
cuuguggaauugggagcu

SEQ ID NO: 1355599 - RNA, 20 nt, Human
cuugugcccucccuguccuu

SEQ ID NO: 1355600 - RNA, 15 nt, Human
cuugugcaguguuga

SEQ ID NO: 1355601 - RNA, 17 nt, Human
cuugugcccucccuguc

SEQ ID NO: 1355602 - RNA, 16 nt, Human
cuuuaccaaagaugaa

SEQ ID NO: 1355603 - RNA, 19 nt, Human
cuuuaccaaagaugaauga

SEQ ID NO: 1355604 - RNA, 17 nt, Human
cuuuacaugaggacucu

SEQ ID NO: 1355605 - RNA, 20 nt, Human
cuuucacuaaaacacacagg

SEQ ID NO: 1355606 - RNA, 16 nt, Human
cuuuacccauuugggu

SEQ ID NO: 1355607 - RNA, 23 nt, Human
cuuggggguucaggcccggcagg

SEQ ID NO: 1355608 - RNA, 18 nt, Human
cuuggggguucaggcccg

SEQ ID NO: 1355609 - RNA, 19 nt, Human
cuuggguuagaccuacagg

SEQ ID NO: 1355610 - RNA, 22 nt, Human
cuuggguuagaccuacaggggg

SEQ ID NO: 1355611 - RNA, 18 nt, Human
cuuggguuagaccuacag

SEQ ID NO: 1355612 - RNA, 16 nt, Human
cuuggguuagaccuac

SEQ ID NO: 1355613 - RNA, 15 nt, Human
cuuggguuagaccua

SEQ ID NO: 1355614 - RNA, 22 nt, Human
cuuggugaauuuuuuuuuccua

SEQ ID NO: 1355615 - RNA, 20 nt, Human
cuuggugaauuuuuuuuucc

SEQ ID NO: 1355616 - RNA, 20 nt, Human
cuugucuauaaagcauuuaa

SEQ ID NO: 1355617 - RNA, 17 nt, Human
cuugucuauaaagcauu

SEQ ID NO: 1355618 - RNA, 16 nt, Human
cuugucuauaaagcau

SEQ ID NO: 1355619 - RNA, 14 nt, Human
cuugucucaaugcu

SEQ ID NO: 1355620 - RNA, 16 nt, Human
cuugucucaaugcuca

SEQ ID NO: 1355621 - RNA, 17 nt, Human
cuugucucaaugcucau

SEQ ID NO: 1355622 - RNA, 18 nt, Human
cuugucucaaugcucaua

SEQ ID NO: 1355623 - RNA, 19 nt, Human
cuugucucaaugcucauaa

SEQ ID NO: 1355624 - RNA, 23 nt, Human
cuugucucaaugcucauaacgga

SEQ ID NO: 1355625 - RNA, 22 nt, Human
cuugugaaucaagggucaggcc

SEQ ID NO: 1355626 - RNA, 20 nt, Human
cuugugaaucaagggucagg

SEQ ID NO: 1355627 - RNA, 19 nt, Human
cuugugaaucaagggucag

SEQ ID NO: 1355628 - RNA, 13 nt, Human
cuugucuuuauuu

SEQ ID NO: 1355629 - RNA, 14 nt, Human
cuuugguucagcua

SEQ ID NO: 1355630 - RNA, 14 nt, Human
cuuugcacgugcug

SEQ ID NO: 1355631 - RNA, 18 nt, Human
cuuugcacagcucuccgg

SEQ ID NO: 1355632 - RNA, 18 nt, Human
cuuugagagagaaaggac

SEQ ID NO: 1355633 - RNA, 15 nt, Human
cuuugagagagaaag

SEQ ID NO: 1355634 - RNA, 12 nt, Human
cuuugagagaga

SEQ ID NO: 1355635 - RNA, 17 nt, Human
cuuugacuuuuugcauu

SEQ ID NO: 1355636 - RNA, 15 nt, Human
cuuugacuuuuugca

SEQ ID NO: 1355637 - RNA, 14 nt, Human
cuuugacuuuuugc

SEQ ID NO: 1355638 - RNA, 17 nt, Human
cuuuguauucucuccug

SEQ ID NO: 1355639 - RNA, 16 nt, Human
cuuuguaaugaaaacc

SEQ ID NO: 1355640 - RNA, 16 nt, Human
cuuugguucuaaggac

SEQ ID NO: 1355641 - RNA, 15 nt, Human
cuuugguucuaagga

SEQ ID NO: 1355642 - RNA, 14 nt, Human
cuuugguucuaagg

SEQ ID NO: 1355643 - RNA, 13 nt, Human
cuuugguucuaag

SEQ ID NO: 1355644 - RNA, 22 nt, Human
cuuugcacgugcuguuugcugu

SEQ ID NO: 1355645 - RNA, 14 nt, Human
cuuuguaaugaaaa

SEQ ID NO: 1355646 - RNA, 15 nt, Human
cuuuguaaugaaaac

SEQ ID NO: 1355647 - RNA, 21 nt, Human
cuuuuauaauucucauuaaaa

SEQ ID NO: 1355648 - RNA, 12 nt, Human
cuuuuauaauuc

SEQ ID NO: 1355649 - RNA, 13 nt, Human
cuuuguauucaaa

SEQ ID NO: 1355650 - RNA, 22 nt, Human
cuuuguauuguauauuacaaug

SEQ ID NO: 1355651 - RNA, 22 nt, Human
cuuuguauucucuccuguaccu

SEQ ID NO: 1355652 - RNA, 20 nt, Human
cuuuuauaaacuuuaccuuu

SEQ ID NO: 1355653 - RNA, 21 nt, Human
cuuuuauaaacuuuaccuuuu

SEQ ID NO: 1355654 - RNA, 18 nt, Human
cuuucucaauaagccuca

SEQ ID NO: 1355655 - RNA, 21 nt, Human
cuuugacucuuuugccauuaa

SEQ ID NO: 1355656 - RNA, 23 nt, Human
cuuugacucaggagccugugaca

SEQ ID NO: 1355657 - RNA, 13 nt, Human
cuuugacucagga

SEQ ID NO: 1355658 - RNA, 23 nt, Human
cuuugaccugccucccuucaugc

SEQ ID NO: 1355659 - RNA, 20 nt, Human
cuuucucaguuuucauaagu

SEQ ID NO: 1355660 - RNA, 17 nt, Human
cuuucucaguuuucaua

SEQ ID NO: 1355661 - RNA, 16 nt, Human
cuuucucaguuuucau

SEQ ID NO: 1355662 - RNA, 15 nt, Human
cuuucucaguuuuca

SEQ ID NO: 1355663 - RNA, 22 nt, Human
cuuucucacuaaaucuuuuaua

SEQ ID NO: 1355664 - RNA, 17 nt, Human
cuuucucacuaaaucuu

SEQ ID NO: 1355665 - RNA, 20 nt, Human
cuuugaccugccucccuuca

SEQ ID NO: 1355666 - RNA, 21 nt, Human
cuuccucucgcggcccucagu

SEQ ID NO: 1355667 - RNA, 20 nt, Human
cuuccucucgcggcccucag

SEQ ID NO: 1355668 - RNA, 19 nt, Human
cuuccucuuuuccuuccca

SEQ ID NO: 1355669 - RNA, 18 nt, Human
cuuccugacacuuuaauu

SEQ ID NO: 1355670 - RNA, 17 nt, Human
cuuccugacacuuuaau

SEQ ID NO: 1355671 - RNA, 16 nt, Human
cuuccugacacuuuaa

SEQ ID NO: 1355672 - RNA, 15 nt, Human
cuuccugacacuuua

SEQ ID NO: 1355673 - RNA, 23 nt, Human
cuucuaaauggcaaaggaaggug

SEQ ID NO: 1355674 - RNA, 18 nt, Human
cuucuaguucugccagga

SEQ ID NO: 1355675 - RNA, 17 nt, Human
cuucuaguucugccagg

SEQ ID NO: 1355676 - RNA, 16 nt, Human
cuucuagguucuaaaa

SEQ ID NO: 1355677 - RNA, 16 nt, Human
cuucuaguucugccag

SEQ ID NO: 1355678 - RNA, 17 nt, Human
cuucucuguucauuucc

SEQ ID NO: 1355679 - RNA, 14 nt, Human
cuucucuguucauu

SEQ ID NO: 1355680 - RNA, 13 nt, Human
cuucucuguucau

SEQ ID NO: 1355681 - RNA, 19 nt, Human
cuucuaguucugccaggag

SEQ ID NO: 1355682 - RNA, 13 nt, Human
cuucucacauuua

SEQ ID NO: 1355683 - RNA, 20 nt, Human
cuucucacauuuauauuuuu

SEQ ID NO: 1355684 - RNA, 13 nt, Human
cuucuucaccauu

SEQ ID NO: 1355685 - RNA, 21 nt, Human
cuucuuacaauaauucuauga

SEQ ID NO: 1355686 - RNA, 19 nt, Human
cuucugacagccucaguga

SEQ ID NO: 1355687 - RNA, 22 nt, Human
cuucucuuccuuuuaucaguag

SEQ ID NO: 1355688 - RNA, 16 nt, Human
cuucucuuguuaggua

SEQ ID NO: 1355689 - RNA, 15 nt, Human
cuucugaauaaagca

SEQ ID NO: 1355690 - RNA, 16 nt, Human
cuucugaauaaagcaa

SEQ ID NO: 1355691 - RNA, 18 nt, Human
cuucugaauaaagcaauu

SEQ ID NO: 1355692 - RNA, 22 nt, Human
cuucugaauaaagcaauuagca

SEQ ID NO: 1355693 - RNA, 15 nt, Human
cuucugacagccuca

SEQ ID NO: 1355694 - RNA, 14 nt, Human
cuucugacagccuc

SEQ ID NO: 1355695 - RNA, 19 nt, Human
cuucugacauaauccagua

SEQ ID NO: 1355696 - RNA, 18 nt, Human
cuuggcgaugccagccaa

SEQ ID NO: 1355697 - RNA, 17 nt, Human
cuuggcgaugccagcca

SEQ ID NO: 1355698 - RNA, 15 nt, Human
cuuggcgaugccagc

SEQ ID NO: 1355699 - RNA, 14 nt, Human
cuuggcgaugccag

SEQ ID NO: 1355700 - RNA, 15 nt, Human
cuuggccuggagcac

SEQ ID NO: 1355701 - RNA, 14 nt, Human
cuuggccuggagca

SEQ ID NO: 1355702 - RNA, 13 nt, Human
cuuggccuggagc

SEQ ID NO: 1355703 - RNA, 17 nt, Human
cuuggccugaucagacc

SEQ ID NO: 1355704 - RNA, 16 nt, Human
cuuggccucucucuag

SEQ ID NO: 1355705 - RNA, 14 nt, Human
cuuggccucucucu

SEQ ID NO: 1355706 - RNA, 14 nt, Human
cuuggccucccaag

SEQ ID NO: 1355707 - RNA, 16 nt, Human
cuuggauuuaguuuca

SEQ ID NO: 1355708 - RNA, 20 nt, Human
cuugcuauucugucccuagg

SEQ ID NO: 1355709 - RNA, 23 nt, Human
cuugcuauucugucccuaggugu

SEQ ID NO: 1355710 - RNA, 17 nt, Human
cuugcuauucugucccu

SEQ ID NO: 1355711 - RNA, 15 nt, Human
cuugcuauucugucc

SEQ ID NO: 1355712 - RNA, 14 nt, Human
cuugcuauucuguc

SEQ ID NO: 1355713 - RNA, 13 nt, Human
cuugcuauucugu

SEQ ID NO: 1355714 - RNA, 20 nt, Human
cuugcuaccaguauuuagaa

SEQ ID NO: 1355715 - RNA, 18 nt, Human
cuugcuaccaguauuuag

SEQ ID NO: 1355716 - RNA, 17 nt, Human
cuugcuaccaguauuua

SEQ ID NO: 1355717 - RNA, 13 nt, Human
cuugcuaccagua

SEQ ID NO: 1355718 - RNA, 20 nt, Human
cuugcgguuccggcauggac

SEQ ID NO: 1355719 - RNA, 12 nt, Human
cuugcaaaguau

SEQ ID NO: 1355720 - RNA, 21 nt, Human
cuugauuuuagccuucucugu

SEQ ID NO: 1355721 - RNA, 20 nt, Human
cuugauuuuagccuucucug

SEQ ID NO: 1355722 - RNA, 19 nt, Human
cuugauuuuagccuucucu

SEQ ID NO: 1355723 - RNA, 16 nt, Human
cuugcaaaaaggguca

SEQ ID NO: 1355724 - RNA, 12 nt, Human
cuugauuuuugc

SEQ ID NO: 1355725 - RNA, 15 nt, Human
cuugcaaaaaggguc

SEQ ID NO: 1355726 - RNA, 16 nt, Human
cuugauuauccauauu

SEQ ID NO: 1355727 - RNA, 17 nt, Human
cuugauccauuucuaau

SEQ ID NO: 1355728 - RNA, 16 nt, Human
cuugauccauuucuaa

SEQ ID NO: 1355729 - RNA, 22 nt, Human
cuugaucaguuaagaaauuuca

SEQ ID NO: 1355730 - RNA, 18 nt, Human
cuugaucaguuaagaaau

SEQ ID NO: 1355731 - RNA, 23 nt, Human
cuugaucagccccacccuggccu

SEQ ID NO: 1355732 - RNA, 20 nt, Human
cuugaauuguaacuguucuu

SEQ ID NO: 1355733 - RNA, 17 nt, Human
cuugaauuguaacuguu

SEQ ID NO: 1355734 - RNA, 20 nt, Human
cuugaauguggcuugagaaa

SEQ ID NO: 1355735 - RNA, 22 nt, Human
cuugaauguggcuugagaaaua

SEQ ID NO: 1355736 - RNA, 19 nt, Human
cuugaauguggcuugagaa

SEQ ID NO: 1355737 - RNA, 22 nt, Human
cuugaaggugcugacggccagg

SEQ ID NO: 1355738 - RNA, 14 nt, Human
cuugaaggugcuga

SEQ ID NO: 1355739 - RNA, 20 nt, Human
cuugaagggccagagccagg

SEQ ID NO: 1355740 - RNA, 20 nt, Human
cuugacaguggaacuacauu

SEQ ID NO: 1355741 - RNA, 22 nt, Human
cuugaauuguaacuguucuuga

SEQ ID NO: 1355742 - RNA, 21 nt, Human
cuugaauuguaacuguucuug

SEQ ID NO: 1355743 - RNA, 21 nt, Human
cuugaagggccagagccaggg

SEQ ID NO: 1355744 - RNA, 19 nt, Human
cuugaagggccagagccag

SEQ ID NO: 1355745 - RNA, 18 nt, Human
cuugaagggccagagcca

SEQ ID NO: 1355746 - RNA, 17 nt, Human
cuugaagggccagagcc

SEQ ID NO: 1355747 - RNA, 16 nt, Human
cuugaagggccagagc

SEQ ID NO: 1355748 - RNA, 15 nt, Human
cuugaagggccagag

SEQ ID NO: 1355749 - RNA, 14 nt, Human
cuugaagggccaga

SEQ ID NO: 1355750 - RNA, 13 nt, Human
cuugaagggccag

SEQ ID NO: 1355751 - RNA, 16 nt, Human
cuugaaggacuaauag

SEQ ID NO: 1355752 - RNA, 13 nt, Human
cuugaaggagaau

SEQ ID NO: 1355753 - RNA, 15 nt, Human
gaaaauuauuugcau

SEQ ID NO: 1355754 - RNA, 23 nt, Human
gaaaauuauuuaaaccgcuaaaa

SEQ ID NO: 1355755 - RNA, 13 nt, Human
gaaaauuauuuaa

SEQ ID NO: 1355756 - RNA, 15 nt, Human
gaaaauguucuguuu

SEQ ID NO: 1355757 - RNA, 20 nt, Human
gaaaauguugagaaucccaa

SEQ ID NO: 1355758 - RNA, 17 nt, Human
gaaaauguugagaaucc

SEQ ID NO: 1355759 - RNA, 15 nt, Human
gaaaauguugagaau

SEQ ID NO: 1355760 - RNA, 21 nt, Human
gaaaauguucuguuugcugug

SEQ ID NO: 1355761 - RNA, 15 nt, Human
gaaaauguccaggaa

SEQ ID NO: 1355762 - RNA, 17 nt, Human
gaaaauguccuugugau

SEQ ID NO: 1355763 - RNA, 16 nt, Human
gaaaagcaacauucau

SEQ ID NO: 1355764 - RNA, 14 nt, Human
gaaaaugucuugug

SEQ ID NO: 1355765 - RNA, 14 nt, Human
gaaaauguccagga

SEQ ID NO: 1355766 - RNA, 20 nt, Human
gaaaagcaacauucauaguc

SEQ ID NO: 1355767 - RNA, 22 nt, Human
gaaaagaugcacuuugcuuuaa

SEQ ID NO: 1355768 - RNA, 11 nt, Human
gaaaagaugca

SEQ ID NO: 1355769 - RNA, 21 nt, Human
gaaaagacacauuuuuuagga

SEQ ID NO: 1355770 - RNA, 22 nt, Human
gaaaagaauuguuggggguuuu

SEQ ID NO: 1355771 - RNA, 14 nt, Human
gaaaagaauagaag

SEQ ID NO: 1355772 - RNA, 18 nt, Human
gaaaaaaauugaaaugua

SEQ ID NO: 1355773 - RNA, 19 nt, Human
gaaaaaaauugaaauguaa

SEQ ID NO: 1355774 - RNA, 16 nt, Human
gaaaaaaauugaaaug

SEQ ID NO: 1355775 - RNA, 15 nt, Human
gaaaaaaauugaaau

SEQ ID NO: 1355776 - RNA, 14 nt, Human
gaaaaaaauugaaa

SEQ ID NO: 1355777 - RNA, 12 nt, Human
gaaaaaaauuga

SEQ ID NO: 1355778 - RNA, 19 nt, Human
gaaaaaaauguauuuuaug

SEQ ID NO: 1355779 - RNA, 20 nt, Human
gaaaaaaauguauuuuaugu

SEQ ID NO: 1355780 - RNA, 15 nt, Human
gaaaaaaauguauuu

SEQ ID NO: 1355781 - RNA, 14 nt, Human
gaaaaaaauguauu

SEQ ID NO: 1355782 - RNA, 13 nt, Human
gaaaaaaauguau

SEQ ID NO: 1355783 - RNA, 12 nt, Human
gaaaacuuuaaa

SEQ ID NO: 1355784 - RNA, 16 nt, Human
gaaaacuuuaaagcgu

SEQ ID NO: 1355785 - RNA, 21 nt, Human
gaaaagaaaauuuuuguagua

SEQ ID NO: 1355786 - RNA, 15 nt, Human
gaaaagaaagcuaca

SEQ ID NO: 1355787 - RNA, 19 nt, Human
gaaaacuuguauuaugugu

SEQ ID NO: 1355788 - RNA, 22 nt, Human
gaaaacuuguauuauguguguu

SEQ ID NO: 1355789 - RNA, 17 nt, Human
gaaacaacacuguagua

SEQ ID NO: 1355790 - RNA, 12 nt, Human
gaaacaaagaug

SEQ ID NO: 1355791 - RNA, 23 nt, Human
gaaacaaagaguucaagaaauaa

SEQ ID NO: 1355792 - RNA, 16 nt, Human
gaaaauuauuugcaua

SEQ ID NO: 1355793 - RNA, 20 nt, Human
gaaacaacucuuugagaaac

SEQ ID NO: 1355794 - RNA, 17 nt, Human
gaaacaacucuuugaga

SEQ ID NO: 1355795 - RNA, 16 nt, Human
gaaacaaccaugucau

SEQ ID NO: 1355796 - RNA, 16 nt, Human
gaaacaacacuguagu

SEQ ID NO: 1355797 - RNA, 15 nt, Human
gaaacaacacuguag

SEQ ID NO: 1355798 - RNA, 14 nt, Human
gaaacaacacugua

SEQ ID NO: 1355799 - RNA, 14 nt, Human
gaaacaacuuggaa

SEQ ID NO: 1355800 - RNA, 21 nt, Human
gaaacaagucagucauucaga

SEQ ID NO: 1355801 - RNA, 20 nt, Human
gaacacagcaguucugcaga

SEQ ID NO: 1355802 - RNA, 17 nt, Human
gaacacaggcaaaaucc

SEQ ID NO: 1355803 - RNA, 19 nt, Human
gaacacaaacuguaaauaa

SEQ ID NO: 1355804 - RNA, 16 nt, Human
gaacaccauugaaggc

SEQ ID NO: 1355805 - RNA, 20 nt, Human
gaacaccauagguagaaugu

SEQ ID NO: 1355806 - RNA, 21 nt, Human
gaacaccagagaccucaaauu

SEQ ID NO: 1355807 - RNA, 17 nt, Human
gaacacaaacuguaaau

SEQ ID NO: 1355808 - RNA, 20 nt, Human
gaacaauuuggcaauuuugu

SEQ ID NO: 1355809 - RNA, 19 nt, Human
gaacaauuuggcaauuuug

SEQ ID NO: 1355810 - RNA, 15 nt, Human
gaacaauuuggcaau

SEQ ID NO: 1355811 - RNA, 20 nt, Human
gaacaauugaaguaaacuuu

SEQ ID NO: 1355812 - RNA, 17 nt, Human
gaacaauugaaguaaac

SEQ ID NO: 1355813 - RNA, 13 nt, Human
gaacaauugaagu

SEQ ID NO: 1355814 - RNA, 21 nt, Human
gaacaaugugcuaugugaaga

SEQ ID NO: 1355815 - RNA, 23 nt, Human
gaacaaauguuuauuaagcauca

SEQ ID NO: 1355816 - RNA, 15 nt, Human
gaacaaauggccuuu

SEQ ID NO: 1355817 - RNA, 20 nt, Human
gaacacuagacaagccagaa

SEQ ID NO: 1355818 - RNA, 18 nt, Human
gaacacuagacaagccag

SEQ ID NO: 1355819 - RNA, 17 nt, Human
gaacacuagacaagcca

SEQ ID NO: 1355820 - RNA, 15 nt, Human
gaacacuagacaagc

SEQ ID NO: 1355821 - RNA, 18 nt, Human
gaacacuaauucauaauc

SEQ ID NO: 1355822 - RNA, 15 nt, Human
gaacacuaauucaua

SEQ ID NO: 1355823 - RNA, 22 nt, Human
gaacacggccacaucaaagagg

SEQ ID NO: 1355824 - RNA, 14 nt, Human
gaacacggccacau

SEQ ID NO: 1355825 - RNA, 21 nt, Human
gaacaccuaugcaaagaugaa

SEQ ID NO: 1355826 - RNA, 18 nt, Human
gaacaccuaugcaaagau

SEQ ID NO: 1355827 - RNA, 16 nt, Human
gaacacccuauauuuu

SEQ ID NO: 1355828 - RNA, 20 nt, Human
gaacaccauugaaggcuuaa

SEQ ID NO: 1355829 - RNA, 19 nt, Human
gaacaccauugaaggcuua

SEQ ID NO: 1355830 - RNA, 19 nt, Human
gaacacuagacaagccaga

SEQ ID NO: 1355831 - RNA, 20 nt, Human
gaaaucccuucauacuugaa

SEQ ID NO: 1355832 - RNA, 19 nt, Human
gaaaucccuucauacuuga

SEQ ID NO: 1355833 - RNA, 15 nt, Human
gaaaucccuucauac

SEQ ID NO: 1355834 - RNA, 14 nt, Human
gaaaucccuucaua

SEQ ID NO: 1355835 - RNA, 13 nt, Human
gaaaucccuucau

SEQ ID NO: 1355836 - RNA, 21 nt, Human
gaaaucuaguuauuuacagga

SEQ ID NO: 1355837 - RNA, 16 nt, Human
gaaaggggagcccacu

SEQ ID NO: 1355838 - RNA, 15 nt, Human
gaaaggggagcccac

SEQ ID NO: 1355839 - RNA, 13 nt, Human
gaaaggggagccc

SEQ ID NO: 1355840 - RNA, 21 nt, Human
gaaagggcccugggccugccu

SEQ ID NO: 1355841 - RNA, 20 nt, Human
gaaagggcccuccuuccuaa

SEQ ID NO: 1355842 - RNA, 21 nt, Human
gaaagggagggcucugaggcg

SEQ ID NO: 1355843 - RNA, 20 nt, Human
gaaagggagggcucugaggc

SEQ ID NO: 1355844 - RNA, 19 nt, Human
gaaagggagggcucugagg

SEQ ID NO: 1355845 - RNA, 19 nt, Human
gaacaaagcagccacgagg

SEQ ID NO: 1355846 - RNA, 16 nt, Human
gaacaaagcagccacg

SEQ ID NO: 1355847 - RNA, 15 nt, Human
gaacaaagcagccac

SEQ ID NO: 1355848 - RNA, 14 nt, Human
gaacaaagcagcca

SEQ ID NO: 1355849 - RNA, 17 nt, Human
gaaauuuuucuucuuga

SEQ ID NO: 1355850 - RNA, 23 nt, Human
gaaaucuggcuucuggccaggaa

SEQ ID NO: 1355851 - RNA, 22 nt, Human
gaaaucuggcuucuggccagga

SEQ ID NO: 1355852 - RNA, 20 nt, Human
gaaaucuggcuucuggccag

SEQ ID NO: 1355853 - RNA, 20 nt, Human
gaaaucugugccugagaaca

SEQ ID NO: 1355854 - RNA, 11 nt, Human
gaaaugaaaaa

SEQ ID NO: 1355855 - RNA, 21 nt, Human
gaaacuggccauggccugcaa

SEQ ID NO: 1355856 - RNA, 20 nt, Human
gaaacuggccauggccugca

SEQ ID NO: 1355857 - RNA, 19 nt, Human
gaaacuggccauggccugc

SEQ ID NO: 1355858 - RNA, 18 nt, Human
gaaacuggccauggccug

SEQ ID NO: 1355859 - RNA, 14 nt, Human
gaaacuggccaugg

SEQ ID NO: 1355860 - RNA, 13 nt, Human
gaaacuggauuaa

SEQ ID NO: 1355861 - RNA, 17 nt, Human
gaaacuggauuaaacuu

SEQ ID NO: 1355862 - RNA, 18 nt, Human
gaaagggagggcucugag

SEQ ID NO: 1355863 - RNA, 17 nt, Human
gaaagggagggcucuga

SEQ ID NO: 1355864 - RNA, 16 nt, Human
gaaagggagggcucug

SEQ ID NO: 1355865 - RNA, 15 nt, Human
gaaagggagggcucu

SEQ ID NO: 1355866 - RNA, 14 nt, Human
gaaagggagggcuc

SEQ ID NO: 1355867 - RNA, 13 nt, Human
gaaagggagggcu

SEQ ID NO: 1355868 - RNA, 20 nt, Human
gaaagaacgcugauuuaaag

SEQ ID NO: 1355869 - RNA, 12 nt, Human
gaaagggauuuu

SEQ ID NO: 1355870 - RNA, 20 nt, Human
gaaagggauuuucagcccuc

SEQ ID NO: 1355871 - RNA, 20 nt, Human
gaacucuuaaucaaauagca

SEQ ID NO: 1355872 - RNA, 13 nt, Human
gaacucuuaauca

SEQ ID NO: 1355873 - RNA, 19 nt, Human
gaacucugguggcacagga

SEQ ID NO: 1355874 - RNA, 18 nt, Human
gaacucugguggcacagg

SEQ ID NO: 1355875 - RNA, 14 nt, Human
gaacucugguggca

SEQ ID NO: 1355876 - RNA, 17 nt, Human
gaacuccugccauaguc

SEQ ID NO: 1355877 - RNA, 15 nt, Human
gaacuccugaccuca

SEQ ID NO: 1355878 - RNA, 14 nt, Human
gaaccccuuuccca

SEQ ID NO: 1355879 - RNA, 23 nt, Human
gaacugcaggcccuggccucccc

SEQ ID NO: 1355880 - RNA, 21 nt, Human
gaacugcaggcccuggccucc

SEQ ID NO: 1355881 - RNA, 19 nt, Human
gaacugcaggcccuggccu

SEQ ID NO: 1355882 - RNA, 18 nt, Human
gaacugcaggcccuggcc

SEQ ID NO: 1355883 - RNA, 17 nt, Human
gaacugcaggcccuggc

SEQ ID NO: 1355884 - RNA, 16 nt, Human
gaacugcaggcccugg

SEQ ID NO: 1355885 - RNA, 14 nt, Human
gaacugcaggcccu

SEQ ID NO: 1355886 - RNA, 12 nt, Human
gaacugcaggcc

SEQ ID NO: 1355887 - RNA, 21 nt, Human
gaacugauucacaucucauuu

SEQ ID NO: 1355888 - RNA, 23 nt, Human
gaacugauucacaucucauuuuu

SEQ ID NO: 1355889 - RNA, 17 nt, Human
gaacugauguaaguaaa

SEQ ID NO: 1355890 - RNA, 13 nt, Human
gaacugaaaucau

SEQ ID NO: 1355891 - RNA, 17 nt, Human
gaacccagcccaccccc

SEQ ID NO: 1355892 - RNA, 16 nt, Human
gaacccagcccacccc

SEQ ID NO: 1355893 - RNA, 19 nt, Human
gaacccagacucagacauu

SEQ ID NO: 1355894 - RNA, 17 nt, Human
gaacccagacucagaca

SEQ ID NO: 1355895 - RNA, 16 nt, Human
gaacccagacucagac

SEQ ID NO: 1355896 - RNA, 13 nt, Human
gaacccagacuca

SEQ ID NO: 1355897 - RNA, 16 nt, Human
gaaccauuaaccagau

SEQ ID NO: 1355898 - RNA, 16 nt, Human
gaacccaggacaagca

SEQ ID NO: 1355899 - RNA, 19 nt, Human
gaacccaggacaagcaugg

SEQ ID NO: 1355900 - RNA, 13 nt, Human
gaacccaggacaa

SEQ ID NO: 1355901 - RNA, 12 nt, Human
gaacccaggaca

SEQ ID NO: 1355902 - RNA, 11 nt, Human
gaacccaggac

SEQ ID NO: 1355903 - RNA, 18 nt, Human
gaacccagcccacccccg

SEQ ID NO: 1355904 - RNA, 20 nt, Human
gaaccccggggugcccacag

SEQ ID NO: 1355905 - RNA, 17 nt, Human
gaaccccuucauccucu

SEQ ID NO: 1355906 - RNA, 21 nt, Human
gaaccccuacaugaaacagaa

SEQ ID NO: 1355907 - RNA, 17 nt, Human
gaaccagacucuugccu

SEQ ID NO: 1355908 - RNA, 16 nt, Human
gaaccagacucuugcc

SEQ ID NO: 1355909 - RNA, 11 nt, Human
gaaccagacuc

SEQ ID NO: 1355910 - RNA, 20 nt, Human
gaaccacuuucuuauuuuuu

SEQ ID NO: 1355911 - RNA, 15 nt, Human
gaaccacuuucuuau

SEQ ID NO: 1355912 - RNA, 13 nt, Human
gaaccacuuucuu

SEQ ID NO: 1355913 - RNA, 19 nt, Human
gaaccaguccccccacccu

SEQ ID NO: 1355914 - RNA, 12 nt, Human
gaaccaucagaa

SEQ ID NO: 1355915 - RNA, 22 nt, Human
gaaccauggucggaaaacaugc

SEQ ID NO: 1355916 - RNA, 17 nt, Human
gaagacagaaguuugca

SEQ ID NO: 1355917 - RNA, 18 nt, Human
gaagacagaaccacaggg

SEQ ID NO: 1355918 - RNA, 16 nt, Human
gaagacagaaccacag

SEQ ID NO: 1355919 - RNA, 14 nt, Human
gaagacccuccccg

SEQ ID NO: 1355920 - RNA, 22 nt, Human
gaagacccauuccuucccagag

SEQ ID NO: 1355921 - RNA, 20 nt, Human
gaagacccauuccuucccag

SEQ ID NO: 1355922 - RNA, 17 nt, Human
gaagaccugagaaugua

SEQ ID NO: 1355923 - RNA, 14 nt, Human
gaagaccugagaau

SEQ ID NO: 1355924 - RNA, 13 nt, Human
gaagacaguggcc

SEQ ID NO: 1355925 - RNA, 15 nt, Human
gaagacaguggcccc

SEQ ID NO: 1355926 - RNA, 12 nt, Human
gaagacaguggc

SEQ ID NO: 1355927 - RNA, 10 nt, Human
gaagacagug

SEQ ID NO: 1355928 - RNA, 19 nt, Human
gaagcagguucccaagcuc

SEQ ID NO: 1355929 - RNA, 12 nt, Human
gaagcagguucc

SEQ ID NO: 1355930 - RNA, 13 nt, Human
gaagcagcagccu

SEQ ID NO: 1355931 - RNA, 22 nt, Human
gaagcagccucuccccaggucc

SEQ ID NO: 1355932 - RNA, 12 nt, Human
gaagcagccucu

SEQ ID NO: 1355933 - RNA, 19 nt, Human
gaagcagcaacuuguccua

SEQ ID NO: 1355934 - RNA, 18 nt, Human
gaagcagcaacuuguccu

SEQ ID NO: 1355935 - RNA, 19 nt, Human
gaagcacgugguaaaacac

SEQ ID NO: 1355936 - RNA, 23 nt, Human
gaagacuaucuuacuauuucaca

SEQ ID NO: 1355937 - RNA, 21 nt, Human
gaagacgugaugccaggacca

SEQ ID NO: 1355938 - RNA, 17 nt, Human
gaagcacagugaucaag

SEQ ID NO: 1355939 - RNA, 20 nt, Human
gacccggcacccccugcagc

SEQ ID NO: 1355940 - RNA, 19 nt, Human
gacccucaucuuucuucca

SEQ ID NO: 1355941 - RNA, 15 nt, Human
gacccucaucuuucu

SEQ ID NO: 1355942 - RNA, 20 nt, Human
gacccucaucuuucuuccaa

SEQ ID NO: 1355943 - RNA, 19 nt, Human
gacccuccaccgcagaagg

SEQ ID NO: 1355944 - RNA, 17 nt, Human
gacccuccccgcacccc

SEQ ID NO: 1355945 - RNA, 15 nt, Human
gacccuccccgcacc

SEQ ID NO: 1355946 - RNA, 21 nt, Human
gacccuccaccgcagaaggaa

SEQ ID NO: 1355947 - RNA, 22 nt, Human
gacccuccaccgcagaaggaag

SEQ ID NO: 1355948 - RNA, 21 nt, Human
gacuauauuugggccugcucc

SEQ ID NO: 1355949 - RNA, 19 nt, Human
gacuauauuugggccugcu

SEQ ID NO: 1355950 - RNA, 19 nt, Human
gacucaagaagugaagaau

SEQ ID NO: 1355951 - RNA, 20 nt, Human
gacucaagaagugaagaaug

SEQ ID NO: 1355952 - RNA, 18 nt, Human
gacucaagaagugaagaa

SEQ ID NO: 1355953 - RNA, 23 nt, Human
gacucaaauguucuaaguuucua

SEQ ID NO: 1355954 - RNA, 19 nt, Human
gacucaaauguucuaaguu

SEQ ID NO: 1355955 - RNA, 18 nt, Human
gacucaaauguucuaagu

SEQ ID NO: 1355956 - RNA, 17 nt, Human
gacucaaauguucuaag

SEQ ID NO: 1355957 - RNA, 16 nt, Human
gacucaaauguucuaa

SEQ ID NO: 1355958 - RNA, 15 nt, Human
gacucaaauguucua

SEQ ID NO: 1355959 - RNA, 22 nt, Human
gacuauuaggugcaauuucaag

SEQ ID NO: 1355960 - RNA, 15 nt, Human
gacucaagccccgga

SEQ ID NO: 1355961 - RNA, 14 nt, Human
gacucaagccccgg

SEQ ID NO: 1355962 - RNA, 17 nt, Human
gacuguaaguugggcuu

SEQ ID NO: 1355963 - RNA, 13 nt, Human
gacuguaaguugg

SEQ ID NO: 1355964 - RNA, 18 nt, Human
gacuguaaacacagacag

SEQ ID NO: 1355965 - RNA, 17 nt, Human
gacuguaaacacagaca

SEQ ID NO: 1355966 - RNA, 19 nt, Human
gacucacaccacuagccuc

SEQ ID NO: 1355967 - RNA, 23 nt, Human
gacucacaccugaacugaacacc

SEQ ID NO: 1355968 - RNA, 22 nt, Human
gacugguguuaucaccgugggc

SEQ ID NO: 1355969 - RNA, 14 nt, Human
gacucacaccugaa

SEQ ID NO: 1355970 - RNA, 18 nt, Human
gacugucuccauggcccu

SEQ ID NO: 1355971 - RNA, 15 nt, Human
gacugucauagaaau

SEQ ID NO: 1355972 - RNA, 21 nt, Human
gacuguaaguugggcuugcua

SEQ ID NO: 1355973 - RNA, 20 nt, Human
gacuguaaguugggcuugcu

SEQ ID NO: 1355974 - RNA, 14 nt, Human
gacugugugcucag

SEQ ID NO: 1355975 - RNA, 16 nt, Human
gacugugugcucagga

SEQ ID NO: 1355976 - RNA, 17 nt, Human
gacugugugcucaggag

SEQ ID NO: 1355977 - RNA, 20 nt, Human
gacugugugcucaggagccc

SEQ ID NO: 1355978 - RNA, 21 nt, Human
gacuuugcagccggcacaggg

SEQ ID NO: 1355979 - RNA, 22 nt, Human
gacuuucuuuuuugauauagaa

SEQ ID NO: 1355980 - RNA, 23 nt, Human
gacuuucuuuuuugauauagaag

SEQ ID NO: 1355981 - RNA, 21 nt, Human
gacuuucuuuuuugauauaga

SEQ ID NO: 1355982 - RNA, 18 nt, Human
gacuuucuuuuuugauau

SEQ ID NO: 1355983 - RNA, 23 nt, Human
gacuuucuuuuuguagcuggggc

SEQ ID NO: 1355984 - RNA, 19 nt, Human
gacuuucuuuuuguagcug

SEQ ID NO: 1355985 - RNA, 18 nt, Human
gacuuucugccuggagug

SEQ ID NO: 1355986 - RNA, 16 nt, Human
gacuuucugccuggag

SEQ ID NO: 1355987 - RNA, 19 nt, Human
gacuguuuuucggacaguu

SEQ ID NO: 1355988 - RNA, 18 nt, Human
gacuguuuuucggacagu

SEQ ID NO: 1355989 - RNA, 21 nt, Human
gacuguuuucucucggcuccc

SEQ ID NO: 1355990 - RNA, 19 nt, Human
gacuguuuucucucggcuc

SEQ ID NO: 1355991 - RNA, 18 nt, Human
gacuuuucuguaauucag

SEQ ID NO: 1355992 - RNA, 13 nt, Human
gacuuuucuguaa

SEQ ID NO: 1355993 - RNA, 12 nt, Human
gacuuuucugua

SEQ ID NO: 1355994 - RNA, 14 nt, Human
gacuuuucugcaaa

SEQ ID NO: 1355995 - RNA, 13 nt, Human
gacuuuucugcaa

SEQ ID NO: 1355996 - RNA, 19 nt, Human
gacuuuggcugcaugcgag

SEQ ID NO: 1355997 - RNA, 14 nt, Human
gacuuugcuugcuu

SEQ ID NO: 1355998 - RNA, 12 nt, Human
gacuuugcuugc

SEQ ID NO: 1355999 - RNA, 17 nt, Human
gacuuugcuugcuuuga

SEQ ID NO: 1356000 - RNA, 15 nt, Human
gacuuugcuugcuuu

SEQ ID NO: 1356001 - RNA, 16 nt, Human
gacuuuggcugcaugc

SEQ ID NO: 1356002 - RNA, 17 nt, Human
gaccagucccagagcag

SEQ ID NO: 1356003 - RNA, 18 nt, Human
gaccagucaaccugggca

SEQ ID NO: 1356004 - RNA, 17 nt, Human
gaccagucaaccugggc

SEQ ID NO: 1356005 - RNA, 21 nt, Human
gaccagggcuccagccccucu

SEQ ID NO: 1356006 - RNA, 15 nt, Human
gaccaggcuguagga

SEQ ID NO: 1356007 - RNA, 13 nt, Human
gaccaggcuguag

SEQ ID NO: 1356008 - RNA, 15 nt, Human
gaccaggcugccucc

SEQ ID NO: 1356009 - RNA, 16 nt, Human
gaccaggcaccaggca

SEQ ID NO: 1356010 - RNA, 23 nt, Human
gaccaggcauccuccacaauagc

SEQ ID NO: 1356011 - RNA, 18 nt, Human
gaccaggagugggugggg

SEQ ID NO: 1356012 - RNA, 11 nt, Human
gaccaggagug

SEQ ID NO: 1356013 - RNA, 10 nt, Human
gaccaggagu

SEQ ID NO: 1356014 - RNA, 19 nt, Human
gaccaguugcagucacucu

SEQ ID NO: 1356015 - RNA, 22 nt, Human
gaccaguugcagucacucuagu

SEQ ID NO: 1356016 - RNA, 14 nt, Human
gaccaguugcaguc

SEQ ID NO: 1356017 - RNA, 16 nt, Human
gaccagucccagagca

SEQ ID NO: 1356018 - RNA, 19 nt, Human
gacccguucaugggggagg

SEQ ID NO: 1356019 - RNA, 16 nt, Human
gacccuaaaucuugac

SEQ ID NO: 1356020 - RNA, 23 nt, Human
gacccguucaugggggagggggc

SEQ ID NO: 1356021 - RNA, 22 nt, Human
gacccguucaacuuuuccuuug

SEQ ID NO: 1356022 - RNA, 21 nt, Human
gacccggcacccccugcagcu

SEQ ID NO: 1356023 - RNA, 16 nt, Human
gaccccuguucaugcc

SEQ ID NO: 1356024 - RNA, 23 nt, Human
gaccccugcucaguaaagcacuu

SEQ ID NO: 1356025 - RNA, 22 nt, Human
gaccaugguuaagaguccaaga

SEQ ID NO: 1356026 - RNA, 22 nt, Human
gaccauggaguggcagcccagc

SEQ ID NO: 1356027 - RNA, 21 nt, Human
gaccauggaguggcagcccag

SEQ ID NO: 1356028 - RNA, 20 nt, Human
gaccauggaguggcagccca

SEQ ID NO: 1356029 - RNA, 18 nt, Human
gaccauggaguggcagcc

SEQ ID NO: 1356030 - RNA, 23 nt, Human
gaccauggacacuacacccagca

SEQ ID NO: 1356031 - RNA, 22 nt, Human
gaccaugcucaucugcuggucc

SEQ ID NO: 1356032 - RNA, 21 nt, Human
gaccaugcucaucugcugguc

SEQ ID NO: 1356033 - RNA, 15 nt, Human
gaccauaauguuaca

SEQ ID NO: 1356034 - RNA, 16 nt, Human
gaccauggacacuaca

SEQ ID NO: 1356035 - RNA, 21 nt, Human
gaccauggacacuacacccag

SEQ ID NO: 1356036 - RNA, 12 nt, Human
gacaggguuuca

SEQ ID NO: 1356037 - RNA, 17 nt, Human
gacaggguuucaccaug

SEQ ID NO: 1356038 - RNA, 14 nt, Human
gacaguauauaacu

SEQ ID NO: 1356039 - RNA, 19 nt, Human
gacagggcggggguggcgg

SEQ ID NO: 1356040 - RNA, 20 nt, Human
gacagccucccccugucccc

SEQ ID NO: 1356041 - RNA, 21 nt, Human
gacacucccuugggcucccug

SEQ ID NO: 1356042 - RNA, 15 nt, Human
gacacucccuugggc

SEQ ID NO: 1356043 - RNA, 21 nt, Human
gacacuccccgaagucuuuug

SEQ ID NO: 1356044 - RNA, 16 nt, Human
gacacuccccgaaguc

SEQ ID NO: 1356045 - RNA, 16 nt, Human
gacagaaaacauguuu

SEQ ID NO: 1356046 - RNA, 18 nt, Human
gacagccucccccugucc

SEQ ID NO: 1356047 - RNA, 19 nt, Human
gacagccucagugacccug

SEQ ID NO: 1356048 - RNA, 15 nt, Human
gacagccgccuggag

SEQ ID NO: 1356049 - RNA, 21 nt, Human
gacagcccuucuuuccacaga

SEQ ID NO: 1356050 - RNA, 16 nt, Human
gacacucauauaauua

SEQ ID NO: 1356051 - RNA, 15 nt, Human
gacacucagaccuga

SEQ ID NO: 1356052 - RNA, 13 nt, Human
gacacucagaccu

SEQ ID NO: 1356053 - RNA, 14 nt, Human
gaagcaguggccuu

SEQ ID NO: 1356054 - RNA, 16 nt, Human
gaggggaccaggagug

SEQ ID NO: 1356055 - RNA, 15 nt, Human
gaggggaccaggagu

SEQ ID NO: 1356056 - RNA, 14 nt, Human
gaggggaccaggag

SEQ ID NO: 1356057 - RNA, 13 nt, Human
gaggggaccagga

SEQ ID NO: 1356058 - RNA, 12 nt, Human
gaggggaccagg

SEQ ID NO: 1356059 - RNA, 14 nt, Human
gaggccagccuggc

SEQ ID NO: 1356060 - RNA, 13 nt, Human
gaggccagccugg

SEQ ID NO: 1356061 - RNA, 11 nt, Human
gaggccagccu

SEQ ID NO: 1356062 - RNA, 21 nt, Human
gaggccagaggcccccagccc

SEQ ID NO: 1356063 - RNA, 17 nt, Human
gaggcuccagagggcac

SEQ ID NO: 1356064 - RNA, 16 nt, Human
gaggccagccuggccu

SEQ ID NO: 1356065 - RNA, 15 nt, Human
gaggccagccuggcc

SEQ ID NO: 1356066 - RNA, 14 nt, Human
gaggcucuggagcc

SEQ ID NO: 1356067 - RNA, 19 nt, Human
gaggcucuggagcccacug

SEQ ID NO: 1356068 - RNA, 11 nt, Human
gagggcucuga

SEQ ID NO: 1356069 - RNA, 21 nt, Human
gagggcucgaggggugggcug

SEQ ID NO: 1356070 - RNA, 19 nt, Human
gagggcucgaggggugggc

SEQ ID NO: 1356071 - RNA, 17 nt, Human
gagggcucacucagcca

SEQ ID NO: 1356072 - RNA, 14 nt, Human
gagggcucacucag

SEQ ID NO: 1356073 - RNA, 15 nt, Human
gaggggaagaggccu

SEQ ID NO: 1356074 - RNA, 16 nt, Human
gaggggaagaggccug

SEQ ID NO: 1356075 - RNA, 12 nt, Human
gaggggaagagg

SEQ ID NO: 1356076 - RNA, 12 nt, Human
gagggcgugucu

SEQ ID NO: 1356077 - RNA, 23 nt, Human
gagggcggcaggggccuggagau

SEQ ID NO: 1356078 - RNA, 19 nt, Human
gagggcggcaggggccugg

SEQ ID NO: 1356079 - RNA, 13 nt, Human
gagggcggcaggg

SEQ ID NO: 1356080 - RNA, 15 nt, Human
gagggcgcaggccgu

SEQ ID NO: 1356081 - RNA, 23 nt, Human
gaggcugcccuccugugcucagc

SEQ ID NO: 1356082 - RNA, 15 nt, Human
gaggcugcccuccug

SEQ ID NO: 1356083 - RNA, 14 nt, Human
gaggcugcccuccu

SEQ ID NO: 1356084 - RNA, 13 nt, Human
gaggcugcccucc

SEQ ID NO: 1356085 - RNA, 19 nt, Human
gaggcugccccucucacca

SEQ ID NO: 1356086 - RNA, 18 nt, Human
gaggcugccccucucacc

SEQ ID NO: 1356087 - RNA, 15 nt, Human
gaggcugccccucuc

SEQ ID NO: 1356088 - RNA, 14 nt, Human
gaggcugccccucu

SEQ ID NO: 1356089 - RNA, 20 nt, Human
gaggcucuggagcccacugu

SEQ ID NO: 1356090 - RNA, 15 nt, Human
gagucacugagacca

SEQ ID NO: 1356091 - RNA, 14 nt, Human
gagucacugagacc

SEQ ID NO: 1356092 - RNA, 14 nt, Human
gagguggcuggguu

SEQ ID NO: 1356093 - RNA, 16 nt, Human
gaguugaggccacugu

SEQ ID NO: 1356094 - RNA, 12 nt, Human
gaguugaggcca

SEQ ID NO: 1356095 - RNA, 19 nt, Human
gaguugauacuacaguuug

SEQ ID NO: 1356096 - RNA, 22 nt, Human
gaguugauacuacaguuuguua

SEQ ID NO: 1356097 - RNA, 15 nt, Human
gaguccaagaaucca

SEQ ID NO: 1356098 - RNA, 23 nt, Human
gagugagacccagcccucauccc

SEQ ID NO: 1356099 - RNA, 22 nt, Human
gagugagacccagcccucaucc

SEQ ID NO: 1356100 - RNA, 14 nt, Human
gagugagacagacu

SEQ ID NO: 1356101 - RNA, 14 nt, Human
gaguccaagcuggg

SEQ ID NO: 1356102 - RNA, 12 nt, Human
gaguccaagcug

SEQ ID NO: 1356103 - RNA, 14 nt, Human
gagucauuuuuaca

SEQ ID NO: 1356104 - RNA, 18 nt, Human
gagucauucguucugugg

SEQ ID NO: 1356105 - RNA, 18 nt, Human
gagcugugcaggugggga

SEQ ID NO: 1356106 - RNA, 23 nt, Human
gagccugugacauacccccuccc

SEQ ID NO: 1356107 - RNA, 18 nt, Human
gagcuguauuaagccacu

SEQ ID NO: 1356108 - RNA, 20 nt, Human
gagcuggugcggcuggccau

SEQ ID NO: 1356109 - RNA, 21 nt, Human
gagcugugaguucucccugua

SEQ ID NO: 1356110 - RNA, 20 nt, Human
gagcugugaguucucccugu

SEQ ID NO: 1356111 - RNA, 19 nt, Human
gagccugugccuccucacc

SEQ ID NO: 1356112 - RNA, 22 nt, Human
gagcccgaggaggugucucagg

SEQ ID NO: 1356113 - RNA, 24 nt, Human
gagcccgaggaggugucucaggcu

SEQ ID NO: 1356114 - RNA, 20 nt, Human
gagcccgaggaggugucuca

SEQ ID NO: 1356115 - RNA, 15 nt, Human
gagcccgaggaggug

SEQ ID NO: 1356116 - RNA, 24 nt, Human
gagcaucaugccucugaggccagc

SEQ ID NO: 1356117 - RNA, 23 nt, Human
gagcaucaugccucugaggccag

SEQ ID NO: 1356118 - RNA, 22 nt, Human
gagcaucaugccucugaggcca

SEQ ID NO: 1356119 - RNA, 21 nt, Human
gagcaucaugccucugaggcc

SEQ ID NO: 1356120 - RNA, 20 nt, Human
gagcaucaugccucugaggc

SEQ ID NO: 1356121 - RNA, 19 nt, Human
gagcaucaugccucugagg

SEQ ID NO: 1356122 - RNA, 18 nt, Human
gagcaucaugccucugag

SEQ ID NO: 1356123 - RNA, 17 nt, Human
gagcaucaugccucuga

SEQ ID NO: 1356124 - RNA, 16 nt, Human
gagcaucaugccucug

SEQ ID NO: 1356125 - RNA, 14 nt, Human
gagcaucaugccuc

SEQ ID NO: 1356126 - RNA, 13 nt, Human
gagcaucaugccu

SEQ ID NO: 1356127 - RNA, 21 nt, Human
gagcgaggagaugcuccuugg

SEQ ID NO: 1356128 - RNA, 18 nt, Human
gagcgaggagaugcuccu

SEQ ID NO: 1356129 - RNA, 20 nt, Human
gagcgagagaucaaagauga

SEQ ID NO: 1356130 - RNA, 19 nt, Human
gagcgagagaucaaagaug

SEQ ID NO: 1356131 - RNA, 17 nt, Human
gagcgagagaucaaaga

SEQ ID NO: 1356132 - RNA, 15 nt, Human
gagccuuccacccag

SEQ ID NO: 1356133 - RNA, 14 nt, Human
gagccuuccaccca

SEQ ID NO: 1356134 - RNA, 22 nt, Human
gagaagcuccucuccccagccc

SEQ ID NO: 1356135 - RNA, 19 nt, Human
gagaagcuccucuccccag

SEQ ID NO: 1356136 - RNA, 17 nt, Human
gagaagcucagcugcau

SEQ ID NO: 1356137 - RNA, 23 nt, Human
gagcaguggcugguccagggcua

SEQ ID NO: 1356138 - RNA, 14 nt, Human
gagcaguggcuggu

SEQ ID NO: 1356139 - RNA, 23 nt, Human
gagcagugcuuuuggcggggagg

SEQ ID NO: 1356140 - RNA, 21 nt, Human
gagcagugcuuuuggcgggga

SEQ ID NO: 1356141 - RNA, 15 nt, Human
gagcagugcuuuugg

SEQ ID NO: 1356142 - RNA, 13 nt, Human
gagcagugcuuuu

SEQ ID NO: 1356143 - RNA, 23 nt, Human
gagcaguccuuggccugcuaagg

SEQ ID NO: 1356144 - RNA, 21 nt, Human
gagcagugaaugauucagugu

SEQ ID NO: 1356145 - RNA, 22 nt, Human
gagcaguccuuggccugcuaag

SEQ ID NO: 1356146 - RNA, 18 nt, Human
gagcaguccuuggccugc

SEQ ID NO: 1356147 - RNA, 21 nt, Human
gagcagugggaggguaccagc

SEQ ID NO: 1356148 - RNA, 17 nt, Human
gagcaguccuuggccug

SEQ ID NO: 1356149 - RNA, 15 nt, Human
gccaaggaccugaga

SEQ ID NO: 1356150 - RNA, 14 nt, Human
gccaaggaaaggca

SEQ ID NO: 1356151 - RNA, 22 nt, Human
gccaagcugaggugcccaggag

SEQ ID NO: 1356152 - RNA, 23 nt, Human
gccaagcugaggugcccaggaga

SEQ ID NO: 1356153 - RNA, 21 nt, Human
gccaagcugaggugcccagga

SEQ ID NO: 1356154 - RNA, 18 nt, Human
gccaagcugaggugccca

SEQ ID NO: 1356155 - RNA, 15 nt, Human
gccaagcugaggugc

SEQ ID NO: 1356156 - RNA, 14 nt, Human
gccaagcugaggug

SEQ ID NO: 1356157 - RNA, 16 nt, Human
gccaagcuccaagccc

SEQ ID NO: 1356158 - RNA, 16 nt, Human
gccaaggcagaggccu

SEQ ID NO: 1356159 - RNA, 15 nt, Human
gccaaggcagaggcc

SEQ ID NO: 1356160 - RNA, 14 nt, Human
gccaaggcagaggc

SEQ ID NO: 1356161 - RNA, 21 nt, Human
gccaaggagucacugagacca

SEQ ID NO: 1356162 - RNA, 21 nt, Human
gccaaggcagaggccugggcu

SEQ ID NO: 1356163 - RNA, 20 nt, Human
gcauggcagggggcugcugc

SEQ ID NO: 1356164 - RNA, 19 nt, Human
gcauggcagggggcugcug

SEQ ID NO: 1356165 - RNA, 18 nt, Human
gcauggcagggggcugcu

SEQ ID NO: 1356166 - RNA, 21 nt, Human
gcauggcagggggcugcugcu

SEQ ID NO: 1356167 - RNA, 22 nt, Human
gcaucggacaagacccccagca

SEQ ID NO: 1356168 - RNA, 20 nt, Human
gcaucgcaccauucugacuc

SEQ ID NO: 1356169 - RNA, 21 nt, Human
gcauggcauccuccagccccu

SEQ ID NO: 1356170 - RNA, 18 nt, Human
gcauggcauccuccagcc

SEQ ID NO: 1356171 - RNA, 17 nt, Human
gcauggcauccuccagc

SEQ ID NO: 1356172 - RNA, 18 nt, Human
gcaucgcaccauucugac

SEQ ID NO: 1356173 - RNA, 23 nt, Human
gcauguaguaacacuaauauauu

SEQ ID NO: 1356174 - RNA, 24 nt, Human
gcauguaguaacacuaauauauuu

SEQ ID NO: 1356175 - RNA, 22 nt, Human
gcauguaguaacacuaauauau

SEQ ID NO: 1356176 - RNA, 21 nt, Human
gcauguaguaacacuaauaua

SEQ ID NO: 1356177 - RNA, 17 nt, Human
gcauguaguaacacuaa

SEQ ID NO: 1356178 - RNA, 16 nt, Human
gcauguaguaacacua

SEQ ID NO: 1356179 - RNA, 13 nt, Human
gcauguaguaaca

SEQ ID NO: 1356180 - RNA, 21 nt, Human
gcauguacggauuuucaguua

SEQ ID NO: 1356181 - RNA, 19 nt, Human
gcauggcauccuccagccc

SEQ ID NO: 1356182 - RNA, 16 nt, Human
gcauuguaaaauaauu

SEQ ID NO: 1356183 - RNA, 20 nt, Human
gcauuguaaaagcauuuugu

SEQ ID NO: 1356184 - RNA, 10 nt, Human
gcauuguaaa

SEQ ID NO: 1356185 - RNA, 19 nt, Human
gcauguccuguaaagguua

SEQ ID NO: 1356186 - RNA, 22 nt, Human
gcauuucacuuucccgguguuc

SEQ ID NO: 1356187 - RNA, 18 nt, Human
gcauuuaaaacagacacu

SEQ ID NO: 1356188 - RNA, 21 nt, Human
gcauuuccuaucaccuauuuc

SEQ ID NO: 1356189 - RNA, 18 nt, Human
gcauuucccuuccuuccu

SEQ ID NO: 1356190 - RNA, 22 nt, Human
gcauugugauuggccuguagag

SEQ ID NO: 1356191 - RNA, 17 nt, Human
gcauugugauuggccug

SEQ ID NO: 1356192 - RNA, 12 nt, Human
gcauuuaaaaga

SEQ ID NO: 1356193 - RNA, 15 nt, Human
gcauuuaaaagauac

SEQ ID NO: 1356194 - RNA, 15 nt, Human
gccaaccuaaaacuc

SEQ ID NO: 1356195 - RNA, 15 nt, Human
gcauuugaaugcauu

SEQ ID NO: 1356196 - RNA, 16 nt, Human
gcauuugaaugcauuu

SEQ ID NO: 1356197 - RNA, 21 nt, Human
gcauuuccuggguggcuacuc

SEQ ID NO: 1356198 - RNA, 14 nt, Human
gcauuuccugggug

SEQ ID NO: 1356199 - RNA, 13 nt, Human
gcauuuccugggu

SEQ ID NO: 1356200 - RNA, 12 nt, Human
gcauuuccuggg

SEQ ID NO: 1356201 - RNA, 14 nt, Human
gcauuugaaaauuu

SEQ ID NO: 1356202 - RNA, 16 nt, Human
gcauuugaaaauuuug

SEQ ID NO: 1356203 - RNA, 10 nt, Human
gcauuugaau

SEQ ID NO: 1356204 - RNA, 12 nt, Human
gcauuugaaugc

SEQ ID NO: 1356205 - RNA, 13 nt, Human
gcauuugaaugca

SEQ ID NO: 1356206 - RNA, 23 nt, Human
gccaagacugcuguggccaggag

SEQ ID NO: 1356207 - RNA, 22 nt, Human
gccaagacugcuguggccagga

SEQ ID NO: 1356208 - RNA, 21 nt, Human
gccaagacugcuguggccagg

SEQ ID NO: 1356209 - RNA, 20 nt, Human
gccaagacugcuguggccag

SEQ ID NO: 1356210 - RNA, 15 nt, Human
gccaagacugcugug

SEQ ID NO: 1356211 - RNA, 14 nt, Human
gccaagacugcugu

SEQ ID NO: 1356212 - RNA, 20 nt, Human
gccaagaagcaguggccuua

SEQ ID NO: 1356213 - RNA, 19 nt, Human
gccaagaagcaguggccuu

SEQ ID NO: 1356214 - RNA, 16 nt, Human
gccaagaagcaguggc

SEQ ID NO: 1356215 - RNA, 15 nt, Human
gccaagaagcagugg

SEQ ID NO: 1356216 - RNA, 22 nt, Human
gccaagaaacgucuucuaaacu

SEQ ID NO: 1356217 - RNA, 21 nt, Human
gccaagaaacgucuucuaaac

SEQ ID NO: 1356218 - RNA, 15 nt, Human
gccaagaaacgucuu

SEQ ID NO: 1356219 - RNA, 21 nt, Human
gccaacuuuccccacguuaaa

SEQ ID NO: 1356220 - RNA, 15 nt, Human
gccaacuagccccug

SEQ ID NO: 1356221 - RNA, 14 nt, Human
gccaacuauggccu

SEQ ID NO: 1356222 - RNA, 15 nt, Human
gccaacuauggccug

SEQ ID NO: 1356223 - RNA, 20 nt, Human
gccaacuagccccuggggug

SEQ ID NO: 1356224 - RNA, 18 nt, Human
gccaacuaugauuauuaa

SEQ ID NO: 1356225 - RNA, 17 nt, Human
gccaacuagccccuggg

SEQ ID NO: 1356226 - RNA, 16 nt, Human
gccaacuagccccugg

SEQ ID NO: 1356227 - RNA, 19 nt, Human
gccaacuauggccugugga

SEQ ID NO: 1356228 - RNA, 17 nt, Human
gcaguugagacaagaaa

SEQ ID NO: 1356229 - RNA, 23 nt, Human
gcagguucccacuuaaaaauuaa

SEQ ID NO: 1356230 - RNA, 12 nt, Human
gcagguucccac

SEQ ID NO: 1356231 - RNA, 19 nt, Human
gcagguucccaagcucaga

SEQ ID NO: 1356232 - RNA, 18 nt, Human
gcagguucccaagcucag

SEQ ID NO: 1356233 - RNA, 16 nt, Human
gcagguucccaagcuc

SEQ ID NO: 1356234 - RNA, 15 nt, Human
gcagguucccaagcu

SEQ ID NO: 1356235 - RNA, 13 nt, Human
gcagguucccaag

SEQ ID NO: 1356236 - RNA, 20 nt, Human
gcagggacuguaaacacaga

SEQ ID NO: 1356237 - RNA, 15 nt, Human
gcauaaaagaugaaa

SEQ ID NO: 1356238 - RNA, 23 nt, Human
gcaguuuuuuuuuucuugucuau

SEQ ID NO: 1356239 - RNA, 20 nt, Human
gcauacaaguuucauucucc

SEQ ID NO: 1356240 - RNA, 17 nt, Human
gcauaacaauuccucua

SEQ ID NO: 1356241 - RNA, 16 nt, Human
gcauaacaauuccucu

SEQ ID NO: 1356242 - RNA, 13 nt, Human
gcauaaauuauug

SEQ ID NO: 1356243 - RNA, 15 nt, Human
gcauaccacuuuugu

SEQ ID NO: 1356244 - RNA, 16 nt, Human
gcauaccacuuuuguu

SEQ ID NO: 1356245 - RNA, 19 nt, Human
gcagcuuagaguuggccau

SEQ ID NO: 1356246 - RNA, 17 nt, Human
gcagcuguuuuguugac

SEQ ID NO: 1356247 - RNA, 12 nt, Human
gcagcuuccaga

SEQ ID NO: 1356248 - RNA, 20 nt, Human
gcagcuguuuuguugacauu

SEQ ID NO: 1356249 - RNA, 22 nt, Human
gcagcuucugcccccugcagaa

SEQ ID NO: 1356250 - RNA, 20 nt, Human
gcagcuucugcccccugcag

SEQ ID NO: 1356251 - RNA, 17 nt, Human
gcagcuucugcccccug

SEQ ID NO: 1356252 - RNA, 16 nt, Human
gcagcuucugcccccu

SEQ ID NO: 1356253 - RNA, 17 nt, Human
gcaggcugauuucuagg

SEQ ID NO: 1356254 - RNA, 12 nt, Human
gcaggcugauuu

SEQ ID NO: 1356255 - RNA, 19 nt, Human
gcaggcugagugcauuugg

SEQ ID NO: 1356256 - RNA, 21 nt, Human
gcagcuucugcccccugcaga

SEQ ID NO: 1356257 - RNA, 23 nt, Human
gcaggcucccagggacaccuggg

SEQ ID NO: 1356258 - RNA, 14 nt, Human
gcaggcuggccagu

SEQ ID NO: 1356259 - RNA, 12 nt, Human
gcaggcuggcca

SEQ ID NO: 1356260 - RNA, 18 nt, Human
gcagggaacauggggagg

SEQ ID NO: 1356261 - RNA, 17 nt, Human
gcagggaacauggggag

SEQ ID NO: 1356262 - RNA, 22 nt, Human
gcaggcuggccaguccaggcug

SEQ ID NO: 1356263 - RNA, 15 nt, Human
gcacucuagauucca

SEQ ID NO: 1356264 - RNA, 20 nt, Human
gcacuuucuauccucuguaa

SEQ ID NO: 1356265 - RNA, 17 nt, Human
gcacugaagugcuuagu

SEQ ID NO: 1356266 - RNA, 22 nt, Human
gcacugaaagucacggcugcgc

SEQ ID NO: 1356267 - RNA, 20 nt, Human
gcacuuuggcuuauaauucu

SEQ ID NO: 1356268 - RNA, 21 nt, Human
gcacuuuggcuuauaauucuu

SEQ ID NO: 1356269 - RNA, 17 nt, Human
gcacuuuggcuuauaau

SEQ ID NO: 1356270 - RNA, 16 nt, Human
gcacuuuggcuuauaa

SEQ ID NO: 1356271 - RNA, 21 nt, Human
gcacuuugcuuuaauauaaau

SEQ ID NO: 1356272 - RNA, 20 nt, Human
gcacuuugcuuuaauauaaa

SEQ ID NO: 1356273 - RNA, 19 nt, Human
gcacuuugcuuuaauauaa

SEQ ID NO: 1356274 - RNA, 17 nt, Human
gcacuuugcuuuaauau

SEQ ID NO: 1356275 - RNA, 15 nt, Human
gcaacccgugccaag

SEQ ID NO: 1356276 - RNA, 23 nt, Human
gcaaaacucuacuuaauccaaug

SEQ ID NO: 1356277 - RNA, 22 nt, Human
gcaaaacucuacuuaauccaau

SEQ ID NO: 1356278 - RNA, 17 nt, Human
gcaaaacucuacuuaau

SEQ ID NO: 1356279 - RNA, 19 nt, Human
gcaaaagaauggcagaaaa

SEQ ID NO: 1356280 - RNA, 15 nt, Human
gcaaaagaagaaguu

SEQ ID NO: 1356281 - RNA, 11 nt, Human
gcaaaagaaga

SEQ ID NO: 1356282 - RNA, 23 nt, Human
gcaaccgucuguuaugcugugac

SEQ ID NO: 1356283 - RNA, 22 nt, Human
gcaacccgugccaaguccaggu

SEQ ID NO: 1356284 - RNA, 19 nt, Human
gcaacccgugccaagucca

SEQ ID NO: 1356285 - RNA, 18 nt, Human
gcaacccgugccaagucc

SEQ ID NO: 1356286 - RNA, 24 nt, Human
gcaaccguggcccuuccuggacag

SEQ ID NO: 1356287 - RNA, 22 nt, Human
gcaaccguggcccuuccuggac

SEQ ID NO: 1356288 - RNA, 21 nt, Human
gcaaccguggcccuuccugga

SEQ ID NO: 1356289 - RNA, 20 nt, Human
gcaaccguggcccuuccugg

SEQ ID NO: 1356290 - RNA, 19 nt, Human
gcaaccguggcccuuccug

SEQ ID NO: 1356291 - RNA, 18 nt, Human
gcaaccguggcccuuccu

SEQ ID NO: 1356292 - RNA, 17 nt, Human
gcaaccuccaccuccug

SEQ ID NO: 1356293 - RNA, 16 nt, Human
gcaaccuccaccuccu

SEQ ID NO: 1356294 - RNA, 19 nt, Human
gcaaccucaguaauuuaga

SEQ ID NO: 1356295 - RNA, 19 nt, Human
gcaaccuaccuguugagca

SEQ ID NO: 1356296 - RNA, 23 nt, Human
gcaaccguggcccuuccuggaca

SEQ ID NO: 1356297 - RNA, 13 nt, Human
gcaaccuccaccu

SEQ ID NO: 1356298 - RNA, 18 nt, Human
gcaaguuuccaucaucua

SEQ ID NO: 1356299 - RNA, 11 nt, Human
gcaauaaagca

SEQ ID NO: 1356300 - RNA, 13 nt, Human
gcaauacauacca

SEQ ID NO: 1356301 - RNA, 18 nt, Human
gcaauagucaaauugugu

SEQ ID NO: 1356302 - RNA, 21 nt, Human
gcaauaaagcagcguuucuau

SEQ ID NO: 1356303 - RNA, 22 nt, Human
gcaauagucaaauugugugaaa

SEQ ID NO: 1356304 - RNA, 22 nt, Human
gcacacaccaccacgccuggcu

SEQ ID NO: 1356305 - RNA, 11 nt, Human
gcaauagagac

SEQ ID NO: 1356306 - RNA, 23 nt, Human
gcaccuaauccaggcagauccag

SEQ ID NO: 1356307 - RNA, 22 nt, Human
gcaccuaauccaggcagaucca

SEQ ID NO: 1356308 - RNA, 18 nt, Human
gcaccuccacauccucca

SEQ ID NO: 1356309 - RNA, 18 nt, Human
gcaccuaauccaggcaga

SEQ ID NO: 1356310 - RNA, 17 nt, Human
gcaccuaauccaggcag

SEQ ID NO: 1356311 - RNA, 21 nt, Human
gcaccggaccagccuggccca

SEQ ID NO: 1356312 - RNA, 19 nt, Human
gcaccggaccagccuggcc

SEQ ID NO: 1356313 - RNA, 17 nt, Human
gcaccggaccagccugg

SEQ ID NO: 1356314 - RNA, 16 nt, Human
gcaccggaccagccug

SEQ ID NO: 1356315 - RNA, 15 nt, Human
gcaccggaccagccu

SEQ ID NO: 1356316 - RNA, 14 nt, Human
gcaccggaccagcc

SEQ ID NO: 1356317 - RNA, 14 nt, Human
gcacacauuuuuua

SEQ ID NO: 1356318 - RNA, 12 nt, Human
gcacacauuuuu

SEQ ID NO: 1356319 - RNA, 13 nt, Human
gcacacagggcag

SEQ ID NO: 1356320 - RNA, 13 nt, Human
gcacacagcuacu

SEQ ID NO: 1356321 - RNA, 11 nt, Human
gcacacauuuu

SEQ ID NO: 1356322 - RNA, 18 nt, Human
gcacacagcuacucuccc

SEQ ID NO: 1356323 - RNA, 16 nt, Human
gcaccuccucagccug

SEQ ID NO: 1356324 - RNA, 17 nt, Human
gcaccuccucagccuga

SEQ ID NO: 1356325 - RNA, 15 nt, Human
gcaccuccucagccu

SEQ ID NO: 1356326 - RNA, 14 nt, Human
gcaccuccucagcc

SEQ ID NO: 1356327 - RNA, 12 nt, Human
gcaccuccucag

SEQ ID NO: 1356328 - RNA, 19 nt, Human
gcacucaaccuuaagaccu

SEQ ID NO: 1356329 - RNA, 19 nt, Human
gcacuaucuuucagcucca

SEQ ID NO: 1356330 - RNA, 18 nt, Human
gcacuaucuuucagcucc

SEQ ID NO: 1356331 - RNA, 13 nt, Human
gcacucuagauuc

SEQ ID NO: 1356332 - RNA, 12 nt, Human
gcacucuagauu

SEQ ID NO: 1356333 - RNA, 11 nt, Human
gcacucuagau

SEQ ID NO: 1356334 - RNA, 22 nt, Human
gcacucccaccugacacaccag

SEQ ID NO: 1356335 - RNA, 18 nt, Human
gcacucccaccugacaca

SEQ ID NO: 1356336 - RNA, 17 nt, Human
gcacucccaccugacac

SEQ ID NO: 1356337 - RNA, 20 nt, Human
gauuuaagggcccaggucag

SEQ ID NO: 1356338 - RNA, 18 nt, Human
gauuuaacauuaucuagu

SEQ ID NO: 1356339 - RNA, 22 nt, Human
gauucuuuccauuugcauuugu

SEQ ID NO: 1356340 - RNA, 20 nt, Human
gauucuuucccaauucacau

SEQ ID NO: 1356341 - RNA, 21 nt, Human
gauuuuuuuuuuuucucucaa

SEQ ID NO: 1356342 - RNA, 16 nt, Human
gauuuuuuuuuuuucu

SEQ ID NO: 1356343 - RNA, 17 nt, Human
gauuucauaguucagaa

SEQ ID NO: 1356344 - RNA, 18 nt, Human
gauuucauaguucagaau

SEQ ID NO: 1356345 - RNA, 15 nt, Human
gauuucauaguucag

SEQ ID NO: 1356346 - RNA, 15 nt, Human
gauuucauacuguaa

SEQ ID NO: 1356347 - RNA, 19 nt, Human
gauuucaguucuaggaaaa

SEQ ID NO: 1356348 - RNA, 21 nt, Human
gauuuuuuuuuuuuuuuccuu

SEQ ID NO: 1356349 - RNA, 20 nt, Human
gauuuuuuuuuuuuuuuccu

SEQ ID NO: 1356350 - RNA, 13 nt, Human
gcaaaaaagaaaa

SEQ ID NO: 1356351 - RNA, 14 nt, Human
gcaaaaaagaaaac

SEQ ID NO: 1356352 - RNA, 19 nt, Human
gauucuuuccauuugcauu

SEQ ID NO: 1356353 - RNA, 18 nt, Human
gauucuuuccauuugcau

SEQ ID NO: 1356354 - RNA, 17 nt, Human
gauucuuuccauuugca

SEQ ID NO: 1356355 - RNA, 20 nt, Human
gauuuaacagaaauguacag

SEQ ID NO: 1356356 - RNA, 23 nt, Human
gauuuaacagaaauguacagcaa

SEQ ID NO: 1356357 - RNA, 12 nt, Human
gauucuguacau

SEQ ID NO: 1356358 - RNA, 11 nt, Human
gaugugcauuc

SEQ ID NO: 1356359 - RNA, 19 nt, Human
gaugugcacguaaaguacu

SEQ ID NO: 1356360 - RNA, 18 nt, Human
gaugugauuguggaaugg

SEQ ID NO: 1356361 - RNA, 16 nt, Human
gaugugauuguggaau

SEQ ID NO: 1356362 - RNA, 15 nt, Human
gaugugauuguggaa

SEQ ID NO: 1356363 - RNA, 15 nt, Human
gaugugauauucuaa

SEQ ID NO: 1356364 - RNA, 18 nt, Human
gaugugauauauaagugu

SEQ ID NO: 1356365 - RNA, 11 nt, Human
gaugugauaua

SEQ ID NO: 1356366 - RNA, 19 nt, Human
gaugugaguugcacagcua

SEQ ID NO: 1356367 - RNA, 12 nt, Human
gaugucuuuguu

SEQ ID NO: 1356368 - RNA, 16 nt, Human
gaugucuuuguuaaga

SEQ ID NO: 1356369 - RNA, 22 nt, Human
gaugucuuggaacauuggaaug

SEQ ID NO: 1356370 - RNA, 21 nt, Human
gaugucuuggaacauuggaau

SEQ ID NO: 1356371 - RNA, 13 nt, Human
gaugucuuggaac

SEQ ID NO: 1356372 - RNA, 15 nt, Human
gaugucuccuaagca

SEQ ID NO: 1356373 - RNA, 19 nt, Human
gaugucuccuaagcaccug

SEQ ID NO: 1356374 - RNA, 15 nt, Human
gauguccccagcaga

SEQ ID NO: 1356375 - RNA, 13 nt, Human
gauguccccagca

SEQ ID NO: 1356376 - RNA, 11 nt, Human
gauguccccag

SEQ ID NO: 1356377 - RNA, 20 nt, Human
gaugucauacagagaaguca

SEQ ID NO: 1356378 - RNA, 18 nt, Human
gaugucauacagagaagu

SEQ ID NO: 1356379 - RNA, 17 nt, Human
gaugucauacagagaag

SEQ ID NO: 1356380 - RNA, 16 nt, Human
gaugucauacagagaa

SEQ ID NO: 1356381 - RNA, 15 nt, Human
gaugucauacagaga

SEQ ID NO: 1356382 - RNA, 13 nt, Human
gauguaauuuugu

SEQ ID NO: 1356383 - RNA, 15 nt, Human
gauguaauacuucuu

SEQ ID NO: 1356384 - RNA, 14 nt, Human
gauguaauacuucu

SEQ ID NO: 1356385 - RNA, 22 nt, Human
gauguaauacuucuugugugua

SEQ ID NO: 1356386 - RNA, 13 nt, Human
gauguaauacuuc

SEQ ID NO: 1356387 - RNA, 17 nt, Human
gauguaaggaugggcau

SEQ ID NO: 1356388 - RNA, 19 nt, Human
gauguaauuuuguguaaga

SEQ ID NO: 1356389 - RNA, 14 nt, Human
gauguaaagauguu

SEQ ID NO: 1356390 - RNA, 17 nt, Human
gauggaguuucuaaggu

SEQ ID NO: 1356391 - RNA, 15 nt, Human
gauggaguuucuaag

SEQ ID NO: 1356392 - RNA, 13 nt, Human
gauggaguuucua

SEQ ID NO: 1356393 - RNA, 15 nt, Human
gauggagugcuguuu

SEQ ID NO: 1356394 - RNA, 14 nt, Human
gaugcuuuuaacag

SEQ ID NO: 1356395 - RNA, 15 nt, Human
gaugcuuuuaacaga

SEQ ID NO: 1356396 - RNA, 16 nt, Human
gaugcuugggaagacu

SEQ ID NO: 1356397 - RNA, 14 nt, Human
gaugcuuguacaua

SEQ ID NO: 1356398 - RNA, 16 nt, Human
gaugcuuguacauaau

SEQ ID NO: 1356399 - RNA, 23 nt, Human
gaugauuaaauaagauucuaacg

SEQ ID NO: 1356400 - RNA, 21 nt, Human
gaugcugucuucguacuggga

SEQ ID NO: 1356401 - RNA, 21 nt, Human
gaugagggaaaagaaaaagau

SEQ ID NO: 1356402 - RNA, 14 nt, Human
gaugaugacuaugg

SEQ ID NO: 1356403 - RNA, 13 nt, Human
gaugaggcaaccc

SEQ ID NO: 1356404 - RNA, 23 nt, Human
gaugagcucccacaagccugagg

SEQ ID NO: 1356405 - RNA, 21 nt, Human
gaugagcucccacaagccuga

SEQ ID NO: 1356406 - RNA, 20 nt, Human
gaugagcucccacaagccug

SEQ ID NO: 1356407 - RNA, 18 nt, Human
gaugagcucccacaagcc

SEQ ID NO: 1356408 - RNA, 21 nt, Human
gaugaggcccuccacaccugc

SEQ ID NO: 1356409 - RNA, 22 nt, Human
gaugaggcccuccacaccugcg

SEQ ID NO: 1356410 - RNA, 20 nt, Human
gaugaggcccuccacaccug

SEQ ID NO: 1356411 - RNA, 19 nt, Human
gaugaggcccuccacaccu

SEQ ID NO: 1356412 - RNA, 13 nt, Human
gaugaggccagac

SEQ ID NO: 1356413 - RNA, 15 nt, Human
gaugaggccagacca

SEQ ID NO: 1356414 - RNA, 15 nt, Human
gaugaggcccuccac

SEQ ID NO: 1356415 - RNA, 22 nt, Human
gaugaggccagaccauggacac

SEQ ID NO: 1356416 - RNA, 12 nt, Human
gaucuggcaugu

SEQ ID NO: 1356417 - RNA, 23 nt, Human
gaucuggaaccucagccuggcca

SEQ ID NO: 1356418 - RNA, 18 nt, Human
cagagcuucccugacuca

SEQ ID NO: 1356419 - RNA, 14 nt, Human
cagagcuucccuga

SEQ ID NO: 1356420 - RNA, 13 nt, Human
cagagcuucccug

SEQ ID NO: 1356421 - RNA, 23 nt, Human
cagagcuggugcggcuggccaug

SEQ ID NO: 1356422 - RNA, 22 nt, Human
cagagcuggugcggcuggccau

SEQ ID NO: 1356423 - RNA, 21 nt, Human
cagagcuggugcggcuggcca

SEQ ID NO: 1356424 - RNA, 20 nt, Human
cagagcuggugcggcuggcc

SEQ ID NO: 1356425 - RNA, 19 nt, Human
cagagcuggugcggcuggc

SEQ ID NO: 1356426 - RNA, 18 nt, Human
cagagcuggugcggcugg

SEQ ID NO: 1356427 - RNA, 13 nt, Human
cagagcuggugcg

SEQ ID NO: 1356428 - RNA, 12 nt, Human
cagagcuggugc

SEQ ID NO: 1356429 - RNA, 11 nt, Human
cagagcuggug

SEQ ID NO: 1356430 - RNA, 21 nt, Human
cagagggcuggaggcccaggc

SEQ ID NO: 1356431 - RNA, 16 nt, Human
cagaggggcagaggcc

SEQ ID NO: 1356432 - RNA, 20 nt, Human
cagagggcuggaggcccagg

SEQ ID NO: 1356433 - RNA, 19 nt, Human
cagagggcuggaggcccag

SEQ ID NO: 1356434 - RNA, 18 nt, Human
cagagggcuggaggccca

SEQ ID NO: 1356435 - RNA, 17 nt, Human
cagagggcuggaggccc

SEQ ID NO: 1356436 - RNA, 15 nt, Human
cagagggcuggaggc

SEQ ID NO: 1356437 - RNA, 14 nt, Human
cagagggcuggagg

SEQ ID NO: 1356438 - RNA, 13 nt, Human
cagagggcuggag

SEQ ID NO: 1356439 - RNA, 12 nt, Human
cagagggcugga

SEQ ID NO: 1356440 - RNA, 11 nt, Human
cagagggcugg

SEQ ID NO: 1356441 - RNA, 10 nt, Human
cagagggcug

SEQ ID NO: 1356442 - RNA, 23 nt, Human
cagagcuucccugacucauucug

SEQ ID NO: 1356443 - RNA, 20 nt, Human
cagaggggccugccaccugg

SEQ ID NO: 1356444 - RNA, 17 nt, Human
cagaggggccugccacc

SEQ ID NO: 1356445 - RNA, 14 nt, Human
cagaggggccugcc

SEQ ID NO: 1356446 - RNA, 21 nt, Human
cagaggggccugccaccugga

SEQ ID NO: 1356447 - RNA, 15 nt, Human
cagauauuugucaug

SEQ ID NO: 1356448 - RNA, 19 nt, Human
cagauaugauucaaauguc

SEQ ID NO: 1356449 - RNA, 17 nt, Human
cagauaugauucaaaug

SEQ ID NO: 1356450 - RNA, 16 nt, Human
cagauaugauucaaau

SEQ ID NO: 1356451 - RNA, 18 nt, Human
cagcaccguucugugcac

SEQ ID NO: 1356452 - RNA, 17 nt, Human
cagcaccguucugugca

SEQ ID NO: 1356453 - RNA, 16 nt, Human
cagcaccguucugugc

SEQ ID NO: 1356454 - RNA, 21 nt, Human
cagcaccggaccagccuggcc

SEQ ID NO: 1356455 - RNA, 20 nt, Human
cagcaccggaccagccuggc

SEQ ID NO: 1356456 - RNA, 19 nt, Human
cagcaccggaccagccugg

SEQ ID NO: 1356457 - RNA, 18 nt, Human
cagcaccggaccagccug

SEQ ID NO: 1356458 - RNA, 17 nt, Human
cagcaccggaccagccu

SEQ ID NO: 1356459 - RNA, 15 nt, Human
cagcaccggaccagc

SEQ ID NO: 1356460 - RNA, 13 nt, Human
cagcacagccaac

SEQ ID NO: 1356461 - RNA, 22 nt, Human
cagcaccggaccagccuggccc

SEQ ID NO: 1356462 - RNA, 19 nt, Human
cagcacacagggcagugag

SEQ ID NO: 1356463 - RNA, 22 nt, Human
cagcacagccucuuagaugcag

SEQ ID NO: 1356464 - RNA, 15 nt, Human
cagccaggagcuggg

SEQ ID NO: 1356465 - RNA, 16 nt, Human
cagccaggagcugggc

SEQ ID NO: 1356466 - RNA, 22 nt, Human
cagccaggagcugggcagaagg

SEQ ID NO: 1356467 - RNA, 12 nt, Human
cagccaggagcu

SEQ ID NO: 1356468 - RNA, 14 nt, Human
cagccaggagcugg

SEQ ID NO: 1356469 - RNA, 18 nt, Human
cagcgucggucugugccc

SEQ ID NO: 1356470 - RNA, 18 nt, Human
cagcguccuccucuguga

SEQ ID NO: 1356471 - RNA, 16 nt, Human
cagcguccuccucugu

SEQ ID NO: 1356472 - RNA, 15 nt, Human
cagcguccuccucug

SEQ ID NO: 1356473 - RNA, 19 nt, Human
cagcggugggaccuaggga

SEQ ID NO: 1356474 - RNA, 22 nt, Human
cagcggugggaccuagggaggc

SEQ ID NO: 1356475 - RNA, 21 nt, Human
cagccugagcaacucuugauu

SEQ ID NO: 1356476 - RNA, 15 nt, Human
cagcgugcuuuaaaa

SEQ ID NO: 1356477 - RNA, 19 nt, Human
cagcgucggucugugcccc

SEQ ID NO: 1356478 - RNA, 20 nt, Human
cagccugaaccccagggcug

SEQ ID NO: 1356479 - RNA, 22 nt, Human
cagccugaaccccagggcugua

SEQ ID NO: 1356480 - RNA, 20 nt, Human
cagccugagcaacucuugau

SEQ ID NO: 1356481 - RNA, 16 nt, Human
cagccugagcaacucu

SEQ ID NO: 1356482 - RNA, 23 nt, Human
cagccucugggggguggccaggc

SEQ ID NO: 1356483 - RNA, 22 nt, Human
cagccucugggggguggccagg

SEQ ID NO: 1356484 - RNA, 23 nt, Human
cagccgcuuggcgaugccagcca

SEQ ID NO: 1356485 - RNA, 23 nt, Human
cagccggcacagggucugcucuu

SEQ ID NO: 1356486 - RNA, 18 nt, Human
cagccggcacagggucug

SEQ ID NO: 1356487 - RNA, 17 nt, Human
cagccggcacagggucu

SEQ ID NO: 1356488 - RNA, 15 nt, Human
cagccggcacagggu

SEQ ID NO: 1356489 - RNA, 13 nt, Human
cagccggcacagg

SEQ ID NO: 1356490 - RNA, 21 nt, Human
cagccgcuuggcgaugccagc

SEQ ID NO: 1356491 - RNA, 12 nt, Human
cagccgcuuggc

SEQ ID NO: 1356492 - RNA, 11 nt, Human
cagccgcuugg

SEQ ID NO: 1356493 - RNA, 21 nt, Human
cagccgagcaggaggccuagg

SEQ ID NO: 1356494 - RNA, 23 nt, Human
cagccgagcaggaggccuaggag

SEQ ID NO: 1356495 - RNA, 19 nt, Human
cagccgagcaggaggccua

SEQ ID NO: 1356496 - RNA, 18 nt, Human
cagccgagcaggaggccu

SEQ ID NO: 1356497 - RNA, 17 nt, Human
cagccgagcaggaggcc

SEQ ID NO: 1356498 - RNA, 16 nt, Human
cagccgagcaggaggc

SEQ ID NO: 1356499 - RNA, 20 nt, Human
cagcccuucuuuccacagaa

SEQ ID NO: 1356500 - RNA, 19 nt, Human
cagcccuucuuuccacaga

SEQ ID NO: 1356501 - RNA, 16 nt, Human
cagcccuuccaaacuc

SEQ ID NO: 1356502 - RNA, 23 nt, Human
cagcccuuaugcgguuaauuuug

SEQ ID NO: 1356503 - RNA, 15 nt, Human
cagcccuucuuucca

SEQ ID NO: 1356504 - RNA, 20 nt, Human
cagcugugccucgcucccca

SEQ ID NO: 1356505 - RNA, 17 nt, Human
cagcugugccucgcucc

SEQ ID NO: 1356506 - RNA, 15 nt, Human
cagcuucagccagga

SEQ ID NO: 1356507 - RNA, 17 nt, Human
cagcuucagccaggagc

SEQ ID NO: 1356508 - RNA, 17 nt, Human
cagcugucuuuuggagg

SEQ ID NO: 1356509 - RNA, 18 nt, Human
cagcugucuuuuggagga

SEQ ID NO: 1356510 - RNA, 16 nt, Human
cagcugucuuuuggag

SEQ ID NO: 1356511 - RNA, 14 nt, Human
cagcugugccucgc

SEQ ID NO: 1356512 - RNA, 13 nt, Human
cagcugugccucg

SEQ ID NO: 1356513 - RNA, 12 nt, Human
cagcugugccuc

SEQ ID NO: 1356514 - RNA, 11 nt, Human
cagcugugccu

SEQ ID NO: 1356515 - RNA, 21 nt, Human
caggaaaugaaaaugucuugu

SEQ ID NO: 1356516 - RNA, 20 nt, Human
caggaaaugaaaaugucuug

SEQ ID NO: 1356517 - RNA, 13 nt, Human
caggaaaugaaaa

SEQ ID NO: 1356518 - RNA, 19 nt, Human
caggaaaggaaucauuucu

SEQ ID NO: 1356519 - RNA, 13 nt, Human
cagcuucagugau

SEQ ID NO: 1356520 - RNA, 20 nt, Human
caggaaagcgccuccaaccc

SEQ ID NO: 1356521 - RNA, 18 nt, Human
caggaaaggcccagccac

SEQ ID NO: 1356522 - RNA, 15 nt, Human
caggaaaggaaucau

SEQ ID NO: 1356523 - RNA, 19 nt, Human
caggaaagcgccuccaacc

SEQ ID NO: 1356524 - RNA, 22 nt, Human
cagcugcaagguacucugguga

SEQ ID NO: 1356525 - RNA, 20 nt, Human
cagcugcaagguacucuggu

SEQ ID NO: 1356526 - RNA, 19 nt, Human
cagcugcaagguacucugg

SEQ ID NO: 1356527 - RNA, 19 nt, Human
cagcucccacaagccucug

SEQ ID NO: 1356528 - RNA, 21 nt, Human
cagcucccacaagccucugcc

SEQ ID NO: 1356529 - RNA, 17 nt, Human
cagcugccccggccccu

SEQ ID NO: 1356530 - RNA, 15 nt, Human
cagcugccagugucc

SEQ ID NO: 1356531 - RNA, 11 nt, Human
cagcugccagu

SEQ ID NO: 1356532 - RNA, 19 nt, Human
cagcugccaggagcacggc

SEQ ID NO: 1356533 - RNA, 15 nt, Human
cagcugccaggagca

SEQ ID NO: 1356534 - RNA, 16 nt, Human
cagcugcauuccgcag

SEQ ID NO: 1356535 - RNA, 18 nt, Human
cagcugcacugaugcugc

SEQ ID NO: 1356536 - RNA, 12 nt, Human
cagcugcacuga

SEQ ID NO: 1356537 - RNA, 19 nt, Human
cagcugccccggccccucc

SEQ ID NO: 1356538 - RNA, 22 nt, Human
cagcugccccggccccuccccc

SEQ ID NO: 1356539 - RNA, 19 nt, Human
cagcugccucuucccucuu

SEQ ID NO: 1356540 - RNA, 21 nt, Human
cagcuccagguggcucugagg

SEQ ID NO: 1356541 - RNA, 17 nt, Human
cagcuccagguggcucu

SEQ ID NO: 1356542 - RNA, 17 nt, Human
cagcucccacaagccuc

SEQ ID NO: 1356543 - RNA, 12 nt, Human
cagcucccacaa

SEQ ID NO: 1356544 - RNA, 16 nt, Human
cagcuccaguuggagu

SEQ ID NO: 1356545 - RNA, 15 nt, Human
cagcuccacccuggc

SEQ ID NO: 1356546 - RNA, 13 nt, Human
cagcuccacccug

SEQ ID NO: 1356547 - RNA, 14 nt, Human
cagcuccagcugcu

SEQ ID NO: 1356548 - RNA, 23 nt, Human
cagcuccaaccugcaaagaucug

SEQ ID NO: 1356549 - RNA, 19 nt, Human
cagcuccaagaauuucuag

SEQ ID NO: 1356550 - RNA, 20 nt, Human
cagcuccaaccugcaaagau

SEQ ID NO: 1356551 - RNA, 17 nt, Human
cagcuccaaccugcaaa

SEQ ID NO: 1356552 - RNA, 16 nt, Human
cagcuccaagaauuuc

SEQ ID NO: 1356553 - RNA, 17 nt, Human
caggccucagggcuccu

SEQ ID NO: 1356554 - RNA, 23 nt, Human
caggccugaaagaggcugaggcc

SEQ ID NO: 1356555 - RNA, 16 nt, Human
caggccucagggcucc

SEQ ID NO: 1356556 - RNA, 14 nt, Human
caggccucagggcu

SEQ ID NO: 1356557 - RNA, 22 nt, Human
caggccugaaagaggcugaggc

SEQ ID NO: 1356558 - RNA, 13 nt, Human
cagggaggcuggu

SEQ ID NO: 1356559 - RNA, 23 nt, Human
cagggaggccgaagcuaacaggg

SEQ ID NO: 1356560 - RNA, 15 nt, Human
cagggaggccgaagc

SEQ ID NO: 1356561 - RNA, 12 nt, Human
cagggaggccga

SEQ ID NO: 1356562 - RNA, 17 nt, Human
cagggaggcccugugcc

SEQ ID NO: 1356563 - RNA, 17 nt, Human
cagggagcugggcuucc

SEQ ID NO: 1356564 - RNA, 15 nt, Human
caggcgcuaauucaa

SEQ ID NO: 1356565 - RNA, 22 nt, Human
cagggaggcugguccuauggcc

SEQ ID NO: 1356566 - RNA, 16 nt, Human
cagggaggcugguccu

SEQ ID NO: 1356567 - RNA, 14 nt, Human
cagggagguggcug

SEQ ID NO: 1356568 - RNA, 17 nt, Human
cagggagguggcugggu

SEQ ID NO: 1356569 - RNA, 18 nt, Human
caggcagauccaggacua

SEQ ID NO: 1356570 - RNA, 17 nt, Human
caggcagauccaggacu

SEQ ID NO: 1356571 - RNA, 15 nt, Human
caggcagauccagga

SEQ ID NO: 1356572 - RNA, 19 nt, Human
caggaggugccacuggagu

SEQ ID NO: 1356573 - RNA, 17 nt, Human
caggaggugccacugga

SEQ ID NO: 1356574 - RNA, 20 nt, Human
caggaggugccacuggagug

SEQ ID NO: 1356575 - RNA, 23 nt, Human
caggagggggucguggagagcua

SEQ ID NO: 1356576 - RNA, 21 nt, Human
caggagggggucguggagagc

SEQ ID NO: 1356577 - RNA, 20 nt, Human
caggagggggucguggagag

SEQ ID NO: 1356578 - RNA, 19 nt, Human
caggagggggucguggaga

SEQ ID NO: 1356579 - RNA, 18 nt, Human
caggagggggucguggag

SEQ ID NO: 1356580 - RNA, 16 nt, Human
caggagggggucgugg

SEQ ID NO: 1356581 - RNA, 23 nt, Human
caggaggggggagggaagggagc

SEQ ID NO: 1356582 - RNA, 15 nt, Human
caggaggggggaggg

SEQ ID NO: 1356583 - RNA, 22 nt, Human
caggagggcggccuccuucuga

SEQ ID NO: 1356584 - RNA, 21 nt, Human
caggagggcggccuccuucug

SEQ ID NO: 1356585 - RNA, 23 nt, Human
caggagggacaaaggagccugug

SEQ ID NO: 1356586 - RNA, 24 nt, Human
caggagggacaaaggagccuguga

SEQ ID NO: 1356587 - RNA, 22 nt, Human
caggagggacaaaggagccugu

SEQ ID NO: 1356588 - RNA, 21 nt, Human
caggagggacaaaggagccug

SEQ ID NO: 1356589 - RNA, 20 nt, Human
caggagggacaaaggagccu

SEQ ID NO: 1356590 - RNA, 19 nt, Human
caggagggacaaaggagcc

SEQ ID NO: 1356591 - RNA, 18 nt, Human
caggagggacaaaggagc

SEQ ID NO: 1356592 - RNA, 13 nt, Human
caggacccugaag

SEQ ID NO: 1356593 - RNA, 16 nt, Human
caggacccugaagggg

SEQ ID NO: 1356594 - RNA, 22 nt, Human
caggagcuccccuccccaacug

SEQ ID NO: 1356595 - RNA, 15 nt, Human
caggacccugaaggg

SEQ ID NO: 1356596 - RNA, 14 nt, Human
caggacccugaagg

SEQ ID NO: 1356597 - RNA, 12 nt, Human
caggagcugggc

SEQ ID NO: 1356598 - RNA, 15 nt, Human
caggagcugggcaga

SEQ ID NO: 1356599 - RNA, 23 nt, Human
caggagcugggcagaaggccaag

SEQ ID NO: 1356600 - RNA, 17 nt, Human
caggagcuuuggaccua

SEQ ID NO: 1356601 - RNA, 16 nt, Human
caggcagccagcaucu

SEQ ID NO: 1356602 - RNA, 14 nt, Human
caggcagccagcau

SEQ ID NO: 1356603 - RNA, 13 nt, Human
caggcagccagca

SEQ ID NO: 1356604 - RNA, 17 nt, Human
caggcagccagcaucug

SEQ ID NO: 1356605 - RNA, 20 nt, Human
caggguugaccccagaggau

SEQ ID NO: 1356606 - RNA, 19 nt, Human
caggguugaccccagagga

SEQ ID NO: 1356607 - RNA, 15 nt, Human
caggguuaagaagac

SEQ ID NO: 1356608 - RNA, 13 nt, Human
cagggugugugcu

SEQ ID NO: 1356609 - RNA, 23 nt, Human
cagggucugcucuuucucugcca

SEQ ID NO: 1356610 - RNA, 22 nt, Human
cagggucugcucuuucucugcc

SEQ ID NO: 1356611 - RNA, 21 nt, Human
cagggucugcucuuucucugc

SEQ ID NO: 1356612 - RNA, 16 nt, Human
cagggugggcuugugg

SEQ ID NO: 1356613 - RNA, 20 nt, Human
cagggucugcucuuucucug

SEQ ID NO: 1356614 - RNA, 17 nt, Human
cagggucugcucuuucu

SEQ ID NO: 1356615 - RNA, 14 nt, Human
cagggucugcucuu

SEQ ID NO: 1356616 - RNA, 13 nt, Human
cagggucugcucu

SEQ ID NO: 1356617 - RNA, 21 nt, Human
caggugaggucuguuccuuuu

SEQ ID NO: 1356618 - RNA, 16 nt, Human
caggugaggucuguuc

SEQ ID NO: 1356619 - RNA, 21 nt, Human
caggugaggucagcacaucuc

SEQ ID NO: 1356620 - RNA, 18 nt, Human
caggugcagcccccacug

SEQ ID NO: 1356621 - RNA, 20 nt, Human
caggugcagcccccacugcc

SEQ ID NO: 1356622 - RNA, 21 nt, Human
caggugcuacacccuuuucca

SEQ ID NO: 1356623 - RNA, 20 nt, Human
caggugcuaauuuguuuugg

SEQ ID NO: 1356624 - RNA, 22 nt, Human
cagguuggcucugccaguccug

SEQ ID NO: 1356625 - RNA, 23 nt, Human
cagguuggcucugccaguccugu

SEQ ID NO: 1356626 - RNA, 21 nt, Human
cagguuggcucugccaguccu

SEQ ID NO: 1356627 - RNA, 18 nt, Human
cagguuggcucugccagu

SEQ ID NO: 1356628 - RNA, 17 nt, Human
cagguuggcucugccag

SEQ ID NO: 1356629 - RNA, 16 nt, Human
cagguuggcucugcca

SEQ ID NO: 1356630 - RNA, 23 nt, Human
caggugcagcccccacugccuuu

SEQ ID NO: 1356631 - RNA, 21 nt, Human
cagucaaccugggcaaagccu

SEQ ID NO: 1356632 - RNA, 15 nt, Human
cagucaccucaugga

SEQ ID NO: 1356633 - RNA, 22 nt, Human
cagucaaccugggcaaagccua

SEQ ID NO: 1356634 - RNA, 16 nt, Human
cagucaaccugggcaa

SEQ ID NO: 1356635 - RNA, 15 nt, Human
cagucaaccugggca

SEQ ID NO: 1356636 - RNA, 14 nt, Human
cagucaaccugggc

SEQ ID NO: 1356637 - RNA, 24 nt, Human
cagucaaaaccaagucacuuaggu

SEQ ID NO: 1356638 - RNA, 17 nt, Human
caguauuuuuuuuuuua

SEQ ID NO: 1356639 - RNA, 21 nt, Human
caguauugcucacccagugcc

SEQ ID NO: 1356640 - RNA, 22 nt, Human
cagguuucuaagcauaaaagau

SEQ ID NO: 1356641 - RNA, 15 nt, Human
caguauugcucaccc

SEQ ID NO: 1356642 - RNA, 16 nt, Human
cagucgauagagcugu

SEQ ID NO: 1356643 - RNA, 15 nt, Human
cagucgauagagcug

SEQ ID NO: 1356644 - RNA, 19 nt, Human
caguccuuggccugcuaag

SEQ ID NO: 1356645 - RNA, 16 nt, Human
caguccuuggccugcu

SEQ ID NO: 1356646 - RNA, 15 nt, Human
caguccuuggccugc

SEQ ID NO: 1356647 - RNA, 13 nt, Human
caguccuuggccu

SEQ ID NO: 1356648 - RNA, 21 nt, Human
cagucucagaaugucauuuug

SEQ ID NO: 1356649 - RNA, 14 nt, Human
cagucgugccugug

SEQ ID NO: 1356650 - RNA, 13 nt, Human
cagucgugccugu

SEQ ID NO: 1356651 - RNA, 19 nt, Human
cagucucagaaugucauuu

SEQ ID NO: 1356652 - RNA, 22 nt, Human
cagucugaugagaacucugagc

SEQ ID NO: 1356653 - RNA, 18 nt, Human
cagucugagagaggccau

SEQ ID NO: 1356654 - RNA, 22 nt, Human
cagugggagcaaacugcaugcc

SEQ ID NO: 1356655 - RNA, 13 nt, Human
cagugggagccag

SEQ ID NO: 1356656 - RNA, 17 nt, Human
cagugggagccagggcu

SEQ ID NO: 1356657 - RNA, 18 nt, Human
cagugggagccagggcug

SEQ ID NO: 1356658 - RNA, 17 nt, Human
cagugcaccugucauau

SEQ ID NO: 1356659 - RNA, 14 nt, Human
cagugcacugaaag

SEQ ID NO: 1356660 - RNA, 22 nt, Human
cagugcacuaauguguaagaca

SEQ ID NO: 1356661 - RNA, 15 nt, Human
ccacuccucugcuga

SEQ ID NO: 1356662 - RNA, 14 nt, Human
ccacuccucugcug

SEQ ID NO: 1356663 - RNA, 20 nt, Human
ccacuccucugacucagggc

SEQ ID NO: 1356664 - RNA, 14 nt, Human
ccacuccucugacu

SEQ ID NO: 1356665 - RNA, 20 nt, Human
ccacgagggcuggcuggccu

SEQ ID NO: 1356666 - RNA, 22 nt, Human
ccacgagggcuggcuggccuca

SEQ ID NO: 1356667 - RNA, 19 nt, Human
ccacgagggcuggcuggcc

SEQ ID NO: 1356668 - RNA, 17 nt, Human
ccacgagggcuggcugg

SEQ ID NO: 1356669 - RNA, 15 nt, Human
ccacgagggcuggcu

SEQ ID NO: 1356670 - RNA, 14 nt, Human
ccacgagggcuggc

SEQ ID NO: 1356671 - RNA, 12 nt, Human
ccacgagggcug

SEQ ID NO: 1356672 - RNA, 18 nt, Human
ccaccucagaccccgggg

SEQ ID NO: 1356673 - RNA, 16 nt, Human
ccacgcuccagcugcc

SEQ ID NO: 1356674 - RNA, 13 nt, Human
ccacgcuccagcu

SEQ ID NO: 1356675 - RNA, 12 nt, Human
ccacgcuccagc

SEQ ID NO: 1356676 - RNA, 15 nt, Human
ccacgcucacccccu

SEQ ID NO: 1356677 - RNA, 18 nt, Human
ccacgcuagggcuggcuc

SEQ ID NO: 1356678 - RNA, 21 nt, Human
ccacgccucuugaccaggcug

SEQ ID NO: 1356679 - RNA, 19 nt, Human
ccacgccucuugaccaggc

SEQ ID NO: 1356680 - RNA, 18 nt, Human
ccacgccucuugaccagg

SEQ ID NO: 1356681 - RNA, 23 nt, Human
ccaccuagcagcaccguucugug

SEQ ID NO: 1356682 - RNA, 14 nt, Human
ccaccuagcagcac

SEQ ID NO: 1356683 - RNA, 13 nt, Human
ccaccuagcagca

SEQ ID NO: 1356684 - RNA, 21 nt, Human
ccaccuagacuguaaaccucu

SEQ ID NO: 1356685 - RNA, 22 nt, Human
ccaccgggccacuccuuccugc

SEQ ID NO: 1356686 - RNA, 21 nt, Human
ccaccgggccacuccuuccug

SEQ ID NO: 1356687 - RNA, 14 nt, Human
ccaccgggccacuc

SEQ ID NO: 1356688 - RNA, 13 nt, Human
ccaccgggccacu

SEQ ID NO: 1356689 - RNA, 20 nt, Human
ccaccgggccacuccuuccu

SEQ ID NO: 1356690 - RNA, 19 nt, Human
ccaccgggccacuccuucc

SEQ ID NO: 1356691 - RNA, 18 nt, Human
ccaccgggccacuccuuc

SEQ ID NO: 1356692 - RNA, 15 nt, Human
ccaccgggccacucc

SEQ ID NO: 1356693 - RNA, 20 nt, Human
ccaccagggcaucucugggc

SEQ ID NO: 1356694 - RNA, 15 nt, Human
ccacagcccugucag

SEQ ID NO: 1356695 - RNA, 14 nt, Human
ccacagcccuguca

SEQ ID NO: 1356696 - RNA, 12 nt, Human
ccacagcccugu

SEQ ID NO: 1356697 - RNA, 13 nt, Human
ccacagaggacac

SEQ ID NO: 1356698 - RNA, 23 nt, Human
ccacagacggaaggguaaacaau

SEQ ID NO: 1356699 - RNA, 18 nt, Human
ccacagauaacugaaaau

SEQ ID NO: 1356700 - RNA, 16 nt, Human
ccacagauaacugaaa

SEQ ID NO: 1356701 - RNA, 13 nt, Human
ccacagccagggg

SEQ ID NO: 1356702 - RNA, 11 nt, Human
ccacagccagg

SEQ ID NO: 1356703 - RNA, 22 nt, Human
ccacagacggaaggguaaacaa

SEQ ID NO: 1356704 - RNA, 21 nt, Human
ccacagacggaaggguaaaca

SEQ ID NO: 1356705 - RNA, 18 nt, Human
ccacagacggaaggguaa

SEQ ID NO: 1356706 - RNA, 16 nt, Human
ccacagaagugcuuuc

SEQ ID NO: 1356707 - RNA, 18 nt, Human
ccacagaagcuccaggua

SEQ ID NO: 1356708 - RNA, 19 nt, Human
ccacagcccugucagcaug

SEQ ID NO: 1356709 - RNA, 20 nt, Human
ccacagcccugucagcauga

SEQ ID NO: 1356710 - RNA, 17 nt, Human
ccacagcccugucagca

SEQ ID NO: 1356711 - RNA, 16 nt, Human
ccacagcccugucagc

SEQ ID NO: 1356712 - RNA, 21 nt, Human
ccaccagggcaucucugggcu

SEQ ID NO: 1356713 - RNA, 19 nt, Human
ccaccagggcaucucuggg

SEQ ID NO: 1356714 - RNA, 16 nt, Human
ccaccagggcaucucu

SEQ ID NO: 1356715 - RNA, 18 nt, Human
ccaccagucugacuguuu

SEQ ID NO: 1356716 - RNA, 22 nt, Human
ccaccaggcugcucagggcugg

SEQ ID NO: 1356717 - RNA, 18 nt, Human
ccacacuucaaacuacuu

SEQ ID NO: 1356718 - RNA, 17 nt, Human
ccacacuucaaacuacu

SEQ ID NO: 1356719 - RNA, 14 nt, Human
ccacacuucaaacu

SEQ ID NO: 1356720 - RNA, 16 nt, Human
ccacagaagcuccagg

SEQ ID NO: 1356721 - RNA, 15 nt, Human
ccaaugaaaaaaugu

SEQ ID NO: 1356722 - RNA, 23 nt, Human
ccaaugaaaaaauguauaugcac

SEQ ID NO: 1356723 - RNA, 16 nt, Human
ccaauccucccagaaa

SEQ ID NO: 1356724 - RNA, 23 nt, Human
ccaauccuaugcaugguuucagc

SEQ ID NO: 1356725 - RNA, 14 nt, Human
ccaauccuauguuu

SEQ ID NO: 1356726 - RNA, 13 nt, Human
ccaauccuauguu

SEQ ID NO: 1356727 - RNA, 22 nt, Human
ccaaggcagaggccugggcugg

SEQ ID NO: 1356728 - RNA, 21 nt, Human
ccaaggcagaggccugggcug

SEQ ID NO: 1356729 - RNA, 19 nt, Human
ccaaaguuguuguaaccug

SEQ ID NO: 1356730 - RNA, 23 nt, Human
ccaaaguuguuguaaccugcugu

SEQ ID NO: 1356731 - RNA, 15 nt, Human
ccaaaguuguuguaa

SEQ ID NO: 1356732 - RNA, 23 nt, Human
ccaaaguucuaauaauuucuaau

SEQ ID NO: 1356733 - RNA, 20 nt, Human
ccaaaguucuaauaauuucu

SEQ ID NO: 1356734 - RNA, 19 nt, Human
ccaaaguucuaauaauuuc

SEQ ID NO: 1356735 - RNA, 14 nt, Human
ccaaaguucuaaua

SEQ ID NO: 1356736 - RNA, 12 nt, Human
ccaaaguucuaa

SEQ ID NO: 1356737 - RNA, 11 nt, Human
ccaaaguucua

SEQ ID NO: 1356738 - RNA, 15 nt, Human
ccaaauauguccugg

SEQ ID NO: 1356739 - RNA, 13 nt, Human
ccaaauauguccu

SEQ ID NO: 1356740 - RNA, 19 nt, Human
ccaaauacuaaugaaaaca

SEQ ID NO: 1356741 - RNA, 14 nt, Human
ccaagaagcagugg

SEQ ID NO: 1356742 - RNA, 14 nt, Human
ccaagaaacgucuu

SEQ ID NO: 1356743 - RNA, 14 nt, Human
ccaacuuuucuauu

SEQ ID NO: 1356744 - RNA, 11 nt, Human
ccaacuuuucu

SEQ ID NO: 1356745 - RNA, 24 nt, Human
ccaacggcaagggaacaaguacuu

SEQ ID NO: 1356746 - RNA, 15 nt, Human
ccaacgcuccaaagu

SEQ ID NO: 1356747 - RNA, 18 nt, Human
ccaagaagcaguggccuu

SEQ ID NO: 1356748 - RNA, 20 nt, Human
ccaaggcagaggccugggcu

SEQ ID NO: 1356749 - RNA, 16 nt, Human
ccaaggcagaggccug

SEQ ID NO: 1356750 - RNA, 15 nt, Human
ccaaggcagaggccu

SEQ ID NO: 1356751 - RNA, 16 nt, Human
cauuguaaaauaauuc

SEQ ID NO: 1356752 - RNA, 15 nt, Human
cauuguaaaauaauu

SEQ ID NO: 1356753 - RNA, 14 nt, Human
cauuguaaaauaau

SEQ ID NO: 1356754 - RNA, 13 nt, Human
cauuguaaaauaa

SEQ ID NO: 1356755 - RNA, 23 nt, Human
cauuguaaaagcauuuuguaaua

SEQ ID NO: 1356756 - RNA, 22 nt, Human
cauuguaaaagcauuuuguaau

SEQ ID NO: 1356757 - RNA, 21 nt, Human
cauuguaaaagcauuuuguaa

SEQ ID NO: 1356758 - RNA, 20 nt, Human
cauuguaaaagcauuuugua

SEQ ID NO: 1356759 - RNA, 15 nt, Human
cauuguaaaagcauu

SEQ ID NO: 1356760 - RNA, 19 nt, Human
cauuggaacuggaggcagg

SEQ ID NO: 1356761 - RNA, 16 nt, Human
cauuggaacuggaggc

SEQ ID NO: 1356762 - RNA, 15 nt, Human
cauuggaacuggagg

SEQ ID NO: 1356763 - RNA, 14 nt, Human
cauuggaacuggag

SEQ ID NO: 1356764 - RNA, 21 nt, Human
cauuggaaauuuagcauugua

SEQ ID NO: 1356765 - RNA, 20 nt, Human
cauuggaaauuuagcauugu

SEQ ID NO: 1356766 - RNA, 19 nt, Human
cauuggaaauuuagcauug

SEQ ID NO: 1356767 - RNA, 13 nt, Human
cauuuauauauug

SEQ ID NO: 1356768 - RNA, 12 nt, Human
cauuuauauauu

SEQ ID NO: 1356769 - RNA, 15 nt, Human
cauuguaaacaaacu

SEQ ID NO: 1356770 - RNA, 23 nt, Human
cauuuaguuugauuauucagugu

SEQ ID NO: 1356771 - RNA, 18 nt, Human
cauuggaaauuuagcauu

SEQ ID NO: 1356772 - RNA, 11 nt, Human
cauugcuuuuc

SEQ ID NO: 1356773 - RNA, 15 nt, Human
cauuuggaauacuuu

SEQ ID NO: 1356774 - RNA, 17 nt, Human
cauuuggaauacuuuuu

SEQ ID NO: 1356775 - RNA, 20 nt, Human
cauuuggcaaugccaucauc

SEQ ID NO: 1356776 - RNA, 21 nt, Human
cauuuggauccuguguggaga

SEQ ID NO: 1356777 - RNA, 23 nt, Human
cauuuggaguguuccccuuccac

SEQ ID NO: 1356778 - RNA, 21 nt, Human
cauuucaucuaccauuuucug

SEQ ID NO: 1356779 - RNA, 23 nt, Human
cauuucagaaguuaguuuguaua

SEQ ID NO: 1356780 - RNA, 22 nt, Human
cauuucagaguucuuuuugaag

SEQ ID NO: 1356781 - RNA, 22 nt, Human
cauuuauauauugaauuaauau

SEQ ID NO: 1356782 - RNA, 15 nt, Human
cauuuauauauugaa

SEQ ID NO: 1356783 - RNA, 13 nt, Human
cauuuauauugau

SEQ ID NO: 1356784 - RNA, 13 nt, Human
cauuuauauguac

SEQ ID NO: 1356785 - RNA, 19 nt, Human
cauuuuuuaaaugcaccug

SEQ ID NO: 1356786 - RNA, 15 nt, Human
cauuuuuuaaaugca

SEQ ID NO: 1356787 - RNA, 16 nt, Human
cauuuuuuaaaugcac

SEQ ID NO: 1356788 - RNA, 23 nt, Human
cauguaguaacacuaauauauuu

SEQ ID NO: 1356789 - RNA, 22 nt, Human
cauguaguaacacuaauauauu

SEQ ID NO: 1356790 - RNA, 21 nt, Human
cauguaguaacacuaauauau

SEQ ID NO: 1356791 - RNA, 19 nt, Human
cauguaguaacacuaauau

SEQ ID NO: 1356792 - RNA, 17 nt, Human
cauguaguaacacuaau

SEQ ID NO: 1356793 - RNA, 16 nt, Human
cauguaguaacacuaa

SEQ ID NO: 1356794 - RNA, 22 nt, Human
caugucaacagcguuccuagag

SEQ ID NO: 1356795 - RNA, 20 nt, Human
cauguaucuaugcauuuucu

SEQ ID NO: 1356796 - RNA, 23 nt, Human
cauguaucuaugcauuuucugga

SEQ ID NO: 1356797 - RNA, 20 nt, Human
caugucaaggguucaagauu

SEQ ID NO: 1356798 - RNA, 18 nt, Human
caugucaaggguucaaga

SEQ ID NO: 1356799 - RNA, 22 nt, Human
cauuagucucagugaagacuau

SEQ ID NO: 1356800 - RNA, 22 nt, Human
cauuagucauguuuaucugcuu

SEQ ID NO: 1356801 - RNA, 21 nt, Human
cauuagucauguuuaucugcu

SEQ ID NO: 1356802 - RNA, 24 nt, Human
cauuaucuaguucauugaaucauu

SEQ ID NO: 1356803 - RNA, 23 nt, Human
cauuaucuagauacuguaucaug

SEQ ID NO: 1356804 - RNA, 21 nt, Human
cauuaguacacagcaccagaa

SEQ ID NO: 1356805 - RNA, 22 nt, Human
cauguugcccccgugagccaau

SEQ ID NO: 1356806 - RNA, 22 nt, Human
cauuaggugugacugaauuucu

SEQ ID NO: 1356807 - RNA, 20 nt, Human
cauucucacaggucccaaau

SEQ ID NO: 1356808 - RNA, 14 nt, Human
cauucucaagcccu

SEQ ID NO: 1356809 - RNA, 16 nt, Human
cauucucaagcccugc

SEQ ID NO: 1356810 - RNA, 17 nt, Human
cauucucaagcccugca

SEQ ID NO: 1356811 - RNA, 15 nt, Human
cauuccuucccagag

SEQ ID NO: 1356812 - RNA, 22 nt, Human
cauucgcuacuaugauuuaauu

SEQ ID NO: 1356813 - RNA, 22 nt, Human
cauuccuucccagaggggccug

SEQ ID NO: 1356814 - RNA, 12 nt, Human
cauuccuuccca

SEQ ID NO: 1356815 - RNA, 22 nt, Human
cauggcauccuccagccccugu

SEQ ID NO: 1356816 - RNA, 18 nt, Human
cauggcauccuccagccc

SEQ ID NO: 1356817 - RNA, 16 nt, Human
cauggcauccuccagc

SEQ ID NO: 1356818 - RNA, 15 nt, Human
cauggcauccuccag

SEQ ID NO: 1356819 - RNA, 14 nt, Human
cauggcauccucca

SEQ ID NO: 1356820 - RNA, 15 nt, Human
cauggcauccaagac

SEQ ID NO: 1356821 - RNA, 19 nt, Human
caugcuccucuuccccaga

SEQ ID NO: 1356822 - RNA, 21 nt, Human
cauggccagcuggaggcaggg

SEQ ID NO: 1356823 - RNA, 23 nt, Human
cauggccagcagcaccugcccua

SEQ ID NO: 1356824 - RNA, 22 nt, Human
cauggccagcagcaccugcccu

SEQ ID NO: 1356825 - RNA, 20 nt, Human
cauggccagcagcaccugcc

SEQ ID NO: 1356826 - RNA, 14 nt, Human
cauggccagcagca

SEQ ID NO: 1356827 - RNA, 13 nt, Human
cauggccagcagc

SEQ ID NO: 1356828 - RNA, 22 nt, Human
cauggccacuugggucuucccu

SEQ ID NO: 1356829 - RNA, 19 nt, Human
cauggcauccuccagcccc

SEQ ID NO: 1356830 - RNA, 20 nt, Human
cauggccagcuggaggcagg

SEQ ID NO: 1356831 - RNA, 14 nt, Human
cauggccagcugga

SEQ ID NO: 1356832 - RNA, 16 nt, Human
cauggccagcuaauuu

SEQ ID NO: 1356833 - RNA, 21 nt, Human
caugaagguaaauaaaaagaa

SEQ ID NO: 1356834 - RNA, 20 nt, Human
caugaagguaaauaaaaaga

SEQ ID NO: 1356835 - RNA, 17 nt, Human
caugaagguaaauaaaa

SEQ ID NO: 1356836 - RNA, 16 nt, Human
caugaagguaaauaaa

SEQ ID NO: 1356837 - RNA, 14 nt, Human
caugaagguaaaua

SEQ ID NO: 1356838 - RNA, 15 nt, Human
caugaagcuguugug

SEQ ID NO: 1356839 - RNA, 14 nt, Human
caugaaguauuuuu

SEQ ID NO: 1356840 - RNA, 21 nt, Human
caugaaguauuuuuucaguau

SEQ ID NO: 1356841 - RNA, 13 nt, Human
caugaaguauuuu

SEQ ID NO: 1356842 - RNA, 22 nt, Human
caugaagguaaauaaaaagaaa

SEQ ID NO: 1356843 - RNA, 16 nt, Human
caugaaggugucauac

SEQ ID NO: 1356844 - RNA, 15 nt, Human
caugaaguaauaugc

SEQ ID NO: 1356845 - RNA, 19 nt, Human
caugaaguaauaugcacac

SEQ ID NO: 1356846 - RNA, 22 nt, Human
caugaaguaauaugcacacauu

SEQ ID NO: 1356847 - RNA, 23 nt, Human
caugaaguaauaugcacacauuu

SEQ ID NO: 1356848 - RNA, 18 nt, Human
caugcuccucuuccccag

SEQ ID NO: 1356849 - RNA, 17 nt, Human
caugcuccucuucccca

SEQ ID NO: 1356850 - RNA, 16 nt, Human
caugcuccucuucccc

SEQ ID NO: 1356851 - RNA, 14 nt, Human
caugcuccucuucc

SEQ ID NO: 1356852 - RNA, 22 nt, Human
caugcuccagauuagagccugu

SEQ ID NO: 1356853 - RNA, 19 nt, Human
caugcucaucugcuggucc

SEQ ID NO: 1356854 - RNA, 18 nt, Human
caugcucaucugcugguc

SEQ ID NO: 1356855 - RNA, 17 nt, Human
caugcucaucugcuggu

SEQ ID NO: 1356856 - RNA, 16 nt, Human
caugcucaucugcugg

SEQ ID NO: 1356857 - RNA, 22 nt, Human
caugcacaguauuuguaauuaa

SEQ ID NO: 1356858 - RNA, 20 nt, Human
caugcacccucauacacaga

SEQ ID NO: 1356859 - RNA, 16 nt, Human
caugcacccucauaca

SEQ ID NO: 1356860 - RNA, 14 nt, Human
caugacagccucca

SEQ ID NO: 1356861 - RNA, 13 nt, Human
caugacagccucc

SEQ ID NO: 1356862 - RNA, 20 nt, Human
caugcacaguauuuguaauu

SEQ ID NO: 1356863 - RNA, 19 nt, Human
caugcacaguauuuguaau

SEQ ID NO: 1356864 - RNA, 18 nt, Human
caugcacaguauuuguaa

SEQ ID NO: 1356865 - RNA, 17 nt, Human
caugcacaguauuugua

SEQ ID NO: 1356866 - RNA, 14 nt, Human
caugcacaguauuu

SEQ ID NO: 1356867 - RNA, 12 nt, Human
caugcacaaauu

SEQ ID NO: 1356868 - RNA, 20 nt, Human
cauagcucuggggugggcag

SEQ ID NO: 1356869 - RNA, 13 nt, Human
cauagcucugggg

SEQ ID NO: 1356870 - RNA, 12 nt, Human
cauagcucuggg

SEQ ID NO: 1356871 - RNA, 22 nt, Human
cauagcaccuaacaacauugua

SEQ ID NO: 1356872 - RNA, 17 nt, Human
cauacagagaagucaca

SEQ ID NO: 1356873 - RNA, 15 nt, Human
cauacagagaaguca

SEQ ID NO: 1356874 - RNA, 13 nt, Human
cauacagagaagu

SEQ ID NO: 1356875 - RNA, 12 nt, Human
cauacagagaag

SEQ ID NO: 1356876 - RNA, 11 nt, Human
cauacagagaa

SEQ ID NO: 1356877 - RNA, 23 nt, Human
cauacagaauuacuguaacugau

SEQ ID NO: 1356878 - RNA, 14 nt, Human
cauacacuuuuucu

SEQ ID NO: 1356879 - RNA, 23 nt, Human
cauacacuuauuggaacucugcu

SEQ ID NO: 1356880 - RNA, 20 nt, Human
cauacaccuaugucauuuca

SEQ ID NO: 1356881 - RNA, 15 nt, Human
cauaauuuggaggga

SEQ ID NO: 1356882 - RNA, 18 nt, Human
cauaauugcauugacuuu

SEQ ID NO: 1356883 - RNA, 22 nt, Human
cauaauuuaguuucauauaaag

SEQ ID NO: 1356884 - RNA, 21 nt, Human
cauaauugugauuagacagaa

SEQ ID NO: 1356885 - RNA, 12 nt, Human
cauaauugcauu

SEQ ID NO: 1356886 - RNA, 19 nt, Human
cauaugcuaccaccagcug

SEQ ID NO: 1356887 - RNA, 18 nt, Human
cauaugcuaccaccagcu

SEQ ID NO: 1356888 - RNA, 17 nt, Human
cauaugcuaccaccagc

SEQ ID NO: 1356889 - RNA, 16 nt, Human
cauaugcuaccaccag

SEQ ID NO: 1356890 - RNA, 20 nt, Human
cauagcuugauaaagggcca

SEQ ID NO: 1356891 - RNA, 21 nt, Human
cauagcuugauaaagggccaa

SEQ ID NO: 1356892 - RNA, 19 nt, Human
caucuggggagcaggcagc

SEQ ID NO: 1356893 - RNA, 23 nt, Human
caucuggggagcaggcagccagc

SEQ ID NO: 1356894 - RNA, 18 nt, Human
caucuggggagcaggcag

SEQ ID NO: 1356895 - RNA, 20 nt, Human
caucugggcuccuccagggu

SEQ ID NO: 1356896 - RNA, 17 nt, Human
caucugggcuccuccag

SEQ ID NO: 1356897 - RNA, 16 nt, Human
caucugggcuccucca

SEQ ID NO: 1356898 - RNA, 23 nt, Human
caucugggccuuggccuggagca

SEQ ID NO: 1356899 - RNA, 20 nt, Human
caucugggccuuggccugga

SEQ ID NO: 1356900 - RNA, 18 nt, Human
caucugggccuuggccug

SEQ ID NO: 1356901 - RNA, 19 nt, Human
cauccauguuccgagaaga

SEQ ID NO: 1356902 - RNA, 18 nt, Human
cauccauguuccgagaag

SEQ ID NO: 1356903 - RNA, 18 nt, Human
cauccauguccaaccccc

SEQ ID NO: 1356904 - RNA, 22 nt, Human
cauccauggccagcagcaccug

SEQ ID NO: 1356905 - RNA, 21 nt, Human
cauccauggccagcagcaccu

SEQ ID NO: 1356906 - RNA, 18 nt, Human
cauccauggccagcagca

SEQ ID NO: 1356907 - RNA, 15 nt, Human
cauccauggccagca

SEQ ID NO: 1356908 - RNA, 14 nt, Human
cauccauggccagc

SEQ ID NO: 1356909 - RNA, 23 nt, Human
cauccaugccucagaagugcauc

SEQ ID NO: 1356910 - RNA, 17 nt, Human
cauccaugccucagaag

SEQ ID NO: 1356911 - RNA, 15 nt, Human
caucugggccuuggc

SEQ ID NO: 1356912 - RNA, 14 nt, Human
caucugcuccugga

SEQ ID NO: 1356913 - RNA, 22 nt, Human
caucugcuccuggaucucccug

SEQ ID NO: 1356914 - RNA, 11 nt, Human
caucugcuccu

SEQ ID NO: 1356915 - RNA, 10 nt, Human
caucugcucc

SEQ ID NO: 1356916 - RNA, 23 nt, Human
caucugcgugacaauaaaacauu

SEQ ID NO: 1356917 - RNA, 22 nt, Human
caucugcgugacaauaaaacau

SEQ ID NO: 1356918 - RNA, 19 nt, Human
caucugcgugacaauaaaa

SEQ ID NO: 1356919 - RNA, 18 nt, Human
caucugcgugacaauaaa

SEQ ID NO: 1356920 - RNA, 16 nt, Human
caucugcgugacaaua

SEQ ID NO: 1356921 - RNA, 18 nt, Human
cauccuuccucacaccag

SEQ ID NO: 1356922 - RNA, 23 nt, Human
cauccuucaucuggauuccagag

SEQ ID NO: 1356923 - RNA, 23 nt, Human
cauccuguguguuaagcucugcu

SEQ ID NO: 1356924 - RNA, 17 nt, Human
caaagauaucucaucuc

SEQ ID NO: 1356925 - RNA, 18 nt, Human
caaagaguuugaugaggc

SEQ ID NO: 1356926 - RNA, 21 nt, Human
caaagaguucaagaaauaagu

SEQ ID NO: 1356927 - RNA, 17 nt, Human
caaagaguucaagaaau

SEQ ID NO: 1356928 - RNA, 23 nt, Human
caaacauuuucuggccaguguuu

SEQ ID NO: 1356929 - RNA, 18 nt, Human
caaacauuuucuggccag

SEQ ID NO: 1356930 - RNA, 20 nt, Human
caaacauuuugaaagucugu

SEQ ID NO: 1356931 - RNA, 15 nt, Human
caaacccuagccuug

SEQ ID NO: 1356932 - RNA, 20 nt, Human
caaacccuagccuugcuugu

SEQ ID NO: 1356933 - RNA, 18 nt, Human
caaacccuagccuugcuu

SEQ ID NO: 1356934 - RNA, 15 nt, Human
caaacauuuugaaag

SEQ ID NO: 1356935 - RNA, 12 nt, Human
caaacauuuuga

SEQ ID NO: 1356936 - RNA, 17 nt, Human
caaacauauauaacaau

SEQ ID NO: 1356937 - RNA, 13 nt, Human
caaaagcuuuuua

SEQ ID NO: 1356938 - RNA, 21 nt, Human
caaaaggauaaugaauacuuu

SEQ ID NO: 1356939 - RNA, 14 nt, Human
auuuuuauauuuaa

SEQ ID NO: 1356940 - RNA, 16 nt, Human
auuuuuauauuugaaa

SEQ ID NO: 1356941 - RNA, 15 nt, Human
auuuuuauauuugaa

SEQ ID NO: 1356942 - RNA, 23 nt, Human
auuuuuauauuaaccagauauau

SEQ ID NO: 1356943 - RNA, 18 nt, Human
caaaagcuuacaaauacu

SEQ ID NO: 1356944 - RNA, 20 nt, Human
caaaagaauggcagaaaagu

SEQ ID NO: 1356945 - RNA, 19 nt, Human
caaaagaauggcagaaaag

SEQ ID NO: 1356946 - RNA, 18 nt, Human
caaaagaaguaaaagcaa

SEQ ID NO: 1356947 - RNA, 17 nt, Human
caaaagaaguaaaagca

SEQ ID NO: 1356948 - RNA, 19 nt, Human
caaaagaaguaaaagcaaa

SEQ ID NO: 1356949 - RNA, 12 nt, Human
caaaagaaguaa

SEQ ID NO: 1356950 - RNA, 22 nt, Human
caaaagaagcccggcuccuggu

SEQ ID NO: 1356951 - RNA, 20 nt, Human
caaaagaagcccggcuccug

SEQ ID NO: 1356952 - RNA, 19 nt, Human
caaaagaagcccccagcua

SEQ ID NO: 1356953 - RNA, 18 nt, Human
caaaagaagcccccagcu

SEQ ID NO: 1356954 - RNA, 17 nt, Human
caaaagaagcccccagc

SEQ ID NO: 1356955 - RNA, 16 nt, Human
caaaagaagcccccag

SEQ ID NO: 1356956 - RNA, 13 nt, Human
caaaagaagcccc

SEQ ID NO: 1356957 - RNA, 16 nt, Human
auuuuuauaaauacug

SEQ ID NO: 1356958 - RNA, 21 nt, Human
auuuuuagauaguuagaaccu

SEQ ID NO: 1356959 - RNA, 19 nt, Human
auuuuuaagugcugcauuu

SEQ ID NO: 1356960 - RNA, 16 nt, Human
auuuuuaagugcugca

SEQ ID NO: 1356961 - RNA, 18 nt, Human
auuuuuaagugcugcauu

SEQ ID NO: 1356962 - RNA, 22 nt, Human
auuuugaagugcuguuuauuaa

SEQ ID NO: 1356963 - RNA, 19 nt, Human
auuuugaagugcuguuuau

SEQ ID NO: 1356964 - RNA, 13 nt, Human
auuuugaagugcu

SEQ ID NO: 1356965 - RNA, 22 nt, Human
auuuugaaccugaugaaaauaa

SEQ ID NO: 1356966 - RNA, 20 nt, Human
auuuugaaccugaugaaaau

SEQ ID NO: 1356967 - RNA, 21 nt, Human
auuuucugugccugaauauuu

SEQ ID NO: 1356968 - RNA, 17 nt, Human
auuuugaaucaauaaua

SEQ ID NO: 1356969 - RNA, 15 nt, Human
auuuugaaucaauaa

SEQ ID NO: 1356970 - RNA, 14 nt, Human
auuuugaaucaaua

SEQ ID NO: 1356971 - RNA, 13 nt, Human
auuuugaaucaau

SEQ ID NO: 1356972 - RNA, 12 nt, Human
auuuugaaucaa

SEQ ID NO: 1356973 - RNA, 11 nt, Human
auuuugaauca

SEQ ID NO: 1356974 - RNA, 18 nt, Human
auuuugaaucaauaauau

SEQ ID NO: 1356975 - RNA, 13 nt, Human
auuuuagcuuuug

SEQ ID NO: 1356976 - RNA, 18 nt, Human
auuuuagcgugcucacug

SEQ ID NO: 1356977 - RNA, 22 nt, Human
auuuuaggagcuaaggcucuau

SEQ ID NO: 1356978 - RNA, 21 nt, Human
auuuuaggagcuaaggcucua

SEQ ID NO: 1356979 - RNA, 20 nt, Human
auuuuaggagcuaaggcucu

SEQ ID NO: 1356980 - RNA, 19 nt, Human
auuuuaggagcuaaggcuc

SEQ ID NO: 1356981 - RNA, 18 nt, Human
auuuuaggagcuaaggcu

SEQ ID NO: 1356982 - RNA, 19 nt, Human
auuuuagggguagcauuug

SEQ ID NO: 1356983 - RNA, 18 nt, Human
auuuuauaugcuuacuga

SEQ ID NO: 1356984 - RNA, 16 nt, Human
auuuuauaugcuuacu

SEQ ID NO: 1356985 - RNA, 15 nt, Human
auuuuauaugcuuac

SEQ ID NO: 1356986 - RNA, 12 nt, Human
auuuuauguuau

SEQ ID NO: 1356987 - RNA, 16 nt, Human
auuuuauggugcauua

SEQ ID NO: 1356988 - RNA, 22 nt, Human
auuuuauguuaagggaagaauu

SEQ ID NO: 1356989 - RNA, 14 nt, Human
auuuuauggugcau

SEQ ID NO: 1356990 - RNA, 20 nt, Human
auuuucugugccugaauauu

SEQ ID NO: 1356991 - RNA, 18 nt, Human
auuuucugugccugaaua

SEQ ID NO: 1356992 - RNA, 16 nt, Human
auuuucugugccugaa

SEQ ID NO: 1356993 - RNA, 17 nt, Human
auuuucugguucuaaca

SEQ ID NO: 1356994 - RNA, 15 nt, Human
auuuucugguucuaa

SEQ ID NO: 1356995 - RNA, 19 nt, Human
auuuucugguucuaacauu

SEQ ID NO: 1356996 - RNA, 14 nt, Human
auuuucugguucua

SEQ ID NO: 1356997 - RNA, 19 nt, Human
auuuucugguaggaauagc

SEQ ID NO: 1356998 - RNA, 18 nt, Human
auuuuauguuauauauaa

SEQ ID NO: 1356999 - RNA, 23 nt, Human
auuuuauguuauauauaaauaua

SEQ ID NO: 1357000 - RNA, 17 nt, Human
auuuuauguuauauaua

SEQ ID NO: 1357001 - RNA, 15 nt, Human
auuuuauguuauaua

SEQ ID NO: 1357002 - RNA, 14 nt, Human
auuuuauguuauau

SEQ ID NO: 1357003 - RNA, 13 nt, Human
auuuuauguuaua

SEQ ID NO: 1357004 - RNA, 14 nt, Human
auuuuauguugcau

SEQ ID NO: 1357005 - RNA, 21 nt, Human
caaaugccaaauuaaaaaaga

SEQ ID NO: 1357006 - RNA, 13 nt, Human
caaaugagccaug

SEQ ID NO: 1357007 - RNA, 12 nt, Human
caaaugagccau

SEQ ID NO: 1357008 - RNA, 14 nt, Human
caacaaagaacacu

SEQ ID NO: 1357009 - RNA, 20 nt, Human
caacaaagaaacaaagaugu

SEQ ID NO: 1357010 - RNA, 22 nt, Human
caaaucuugguugaugccaaaa

SEQ ID NO: 1357011 - RNA, 13 nt, Human
caaaucuugaaau

SEQ ID NO: 1357012 - RNA, 19 nt, Human
caaaucuugaaauuaagaa

SEQ ID NO: 1357013 - RNA, 12 nt, Human
caaaucuugaaa

SEQ ID NO: 1357014 - RNA, 13 nt, Human
caaaucuggaagc

SEQ ID NO: 1357015 - RNA, 23 nt, Human
caaaguccuuuuuuuccaucuuu

SEQ ID NO: 1357016 - RNA, 19 nt, Human
caaaguccuuuuuuuccau

SEQ ID NO: 1357017 - RNA, 17 nt, Human
caaaguccuuuuuuucc

SEQ ID NO: 1357018 - RNA, 14 nt, Human
caaaguccuuuuuu

SEQ ID NO: 1357019 - RNA, 19 nt, Human
caaaguccugggauuacag

SEQ ID NO: 1357020 - RNA, 16 nt, Human
caaagcaugaaaugga

SEQ ID NO: 1357021 - RNA, 23 nt, Human
caaagcaucuugcauuaugcaau

SEQ ID NO: 1357022 - RNA, 18 nt, Human
caaagauauuuugcuuug

SEQ ID NO: 1357023 - RNA, 14 nt, Human
caaagauauuuugc

SEQ ID NO: 1357024 - RNA, 16 nt, Human
caaagauauuuugcuu

SEQ ID NO: 1357025 - RNA, 23 nt, Human
caaagucauaauugcauugacuu

SEQ ID NO: 1357026 - RNA, 18 nt, Human
caaagucauaauugcauu

SEQ ID NO: 1357027 - RNA, 19 nt, Human
caaaguaucccuacuguaa

SEQ ID NO: 1357028 - RNA, 21 nt, Human
caaaguaucccuacuguaauu

SEQ ID NO: 1357029 - RNA, 14 nt, Human
caaagguaaaucag

SEQ ID NO: 1357030 - RNA, 13 nt, Human
caaaggguggaau

SEQ ID NO: 1357031 - RNA, 22 nt, Human
caaagguaaaucagacuaugaa

SEQ ID NO: 1357032 - RNA, 20 nt, Human
caacaagaagggacugagag

SEQ ID NO: 1357033 - RNA, 21 nt, Human
caacaagaagggacugagaga

SEQ ID NO: 1357034 - RNA, 18 nt, Human
caacaaccucaacugccu

SEQ ID NO: 1357035 - RNA, 19 nt, Human
caacaaccucaacugccua

SEQ ID NO: 1357036 - RNA, 15 nt, Human
caacacacacaugcu

SEQ ID NO: 1357037 - RNA, 23 nt, Human
caacacacacaugcuucccuuuc

SEQ ID NO: 1357038 - RNA, 13 nt, Human
caacaccaagcac

SEQ ID NO: 1357039 - RNA, 14 nt, Human
caacacagaggcag

SEQ ID NO: 1357040 - RNA, 18 nt, Human
caacacacacaugcuucc

SEQ ID NO: 1357041 - RNA, 13 nt, Human
caagaauggauca

SEQ ID NO: 1357042 - RNA, 24 nt, Human
caacucuccccugaccugugagcc

SEQ ID NO: 1357043 - RNA, 18 nt, Human
caacucuccccugaccug

SEQ ID NO: 1357044 - RNA, 19 nt, Human
caacucguauagcaugcau

SEQ ID NO: 1357045 - RNA, 21 nt, Human
caagaauuggaagcugcccug

SEQ ID NO: 1357046 - RNA, 22 nt, Human
caagaauggaucacaagaugga

SEQ ID NO: 1357047 - RNA, 21 nt, Human
caagaauggaucacaagaugg

SEQ ID NO: 1357048 - RNA, 14 nt, Human
caagaauggaucac

SEQ ID NO: 1357049 - RNA, 23 nt, Human
caacuccuaguucuagaaaaaca

SEQ ID NO: 1357050 - RNA, 22 nt, Human
caacuccuaguucuagaaaaac

SEQ ID NO: 1357051 - RNA, 20 nt, Human
caacuccuaguucuagaaaa

SEQ ID NO: 1357052 - RNA, 19 nt, Human
caacuccuaguucuagaaa

SEQ ID NO: 1357053 - RNA, 16 nt, Human
caacuccuaguucuag

SEQ ID NO: 1357054 - RNA, 22 nt, Human
caacucacuccuuuuaaagaaa

SEQ ID NO: 1357055 - RNA, 16 nt, Human
caacucguauagcaug

SEQ ID NO: 1357056 - RNA, 17 nt, Human
caacuccuuccagcuag

SEQ ID NO: 1357057 - RNA, 19 nt, Human
caacucgcuuuaggucagc

SEQ ID NO: 1357058 - RNA, 14 nt, Human
caacucgcuuuagg

SEQ ID NO: 1357059 - RNA, 20 nt, Human
caagaauuucuaggacugaa

SEQ ID NO: 1357060 - RNA, 17 nt, Human
caagaccacguuucuaa

SEQ ID NO: 1357061 - RNA, 18 nt, Human
caagaccacguuucuaaa

SEQ ID NO: 1357062 - RNA, 21 nt, Human
caagaugggcaucuuuuguau

SEQ ID NO: 1357063 - RNA, 20 nt, Human
caagaugggcaucuuuugua

SEQ ID NO: 1357064 - RNA, 19 nt, Human
caagauggaauuuaucaaa

SEQ ID NO: 1357065 - RNA, 18 nt, Human
caagaugggcaucuuuug

SEQ ID NO: 1357066 - RNA, 17 nt, Human
caagaugggcaucuuuu

SEQ ID NO: 1357067 - RNA, 16 nt, Human
caagaugggcaucuuu

SEQ ID NO: 1357068 - RNA, 15 nt, Human
caagauggcccaucc

SEQ ID NO: 1357069 - RNA, 22 nt, Human
caagauggggagugagaggcug

SEQ ID NO: 1357070 - RNA, 22 nt, Human
caaccccuccccuccaucccug

SEQ ID NO: 1357071 - RNA, 21 nt, Human
caaccccuccccuccaucccu

SEQ ID NO: 1357072 - RNA, 20 nt, Human
caaccagauugucagcuccu

SEQ ID NO: 1357073 - RNA, 19 nt, Human
caaccagauugucagcucc

SEQ ID NO: 1357074 - RNA, 21 nt, Human
caaccagaccauugucucaga

SEQ ID NO: 1357075 - RNA, 23 nt, Human
caaccaugagaccacuguuauca

SEQ ID NO: 1357076 - RNA, 18 nt, Human
caaccaugagaccacugu

SEQ ID NO: 1357077 - RNA, 13 nt, Human
caaccaucgcuuu

SEQ ID NO: 1357078 - RNA, 19 nt, Human
caacuacuaccuguaauga

SEQ ID NO: 1357079 - RNA, 21 nt, Human
caacuacuaauagaauaaagg

SEQ ID NO: 1357080 - RNA, 15 nt, Human
caacuacuaauagaa

SEQ ID NO: 1357081 - RNA, 13 nt, Human
caacuacuaauag

SEQ ID NO: 1357082 - RNA, 20 nt, Human
caacuacccccagcugugcu

SEQ ID NO: 1357083 - RNA, 19 nt, Human
caacuacccccagcugugc

SEQ ID NO: 1357084 - RNA, 17 nt, Human
caacuacccccagcugu

SEQ ID NO: 1357085 - RNA, 15 nt, Human
caacuacagucuaaa

SEQ ID NO: 1357086 - RNA, 19 nt, Human
caacuacagucuaaagcug

SEQ ID NO: 1357087 - RNA, 18 nt, Human
caacuagccccuggggug

SEQ ID NO: 1357088 - RNA, 17 nt, Human
caacuacuguguuaugc

SEQ ID NO: 1357089 - RNA, 18 nt, Human
caacucacuccuuuuaaa

SEQ ID NO: 1357090 - RNA, 17 nt, Human
caacucacuccuuuuaa

SEQ ID NO: 1357091 - RNA, 16 nt, Human
caacucacuccuuuua

SEQ ID NO: 1357092 - RNA, 15 nt, Human
caacucacuccuuuu

SEQ ID NO: 1357093 - RNA, 23 nt, Human
caacucacuccuuuuaaagaaaa

SEQ ID NO: 1357094 - RNA, 21 nt, Human
caacucacuccuuuuaaagaa

SEQ ID NO: 1357095 - RNA, 20 nt, Human
caacucacuccuuuuaaaga

SEQ ID NO: 1357096 - RNA, 17 nt, Human
caacucauauuuucaug

SEQ ID NO: 1357097 - RNA, 15 nt, Human
auuuaauaaucugua

SEQ ID NO: 1357098 - RNA, 19 nt, Human
auuuaauaauauacuugug

SEQ ID NO: 1357099 - RNA, 16 nt, Human
auuuaauaauauacuu

SEQ ID NO: 1357100 - RNA, 18 nt, Human
auuuaauaauauacuugu

SEQ ID NO: 1357101 - RNA, 13 nt, Human
auuuaauaauaua

SEQ ID NO: 1357102 - RNA, 15 nt, Human
auuuaauaauauacu

SEQ ID NO: 1357103 - RNA, 17 nt, Human
auuuaugagcucuucau

SEQ ID NO: 1357104 - RNA, 23 nt, Human
auuuaugaauugaauuaucuugg

SEQ ID NO: 1357105 - RNA, 22 nt, Human
auuuaucuuuacuuuuaaacag

SEQ ID NO: 1357106 - RNA, 19 nt, Human
auuuaucugagucaacucc

SEQ ID NO: 1357107 - RNA, 17 nt, Human
auuuauauguacaugag

SEQ ID NO: 1357108 - RNA, 16 nt, Human
auuuauauguacauga

SEQ ID NO: 1357109 - RNA, 15 nt, Human
auuuauauguacaug

SEQ ID NO: 1357110 - RNA, 15 nt, Human
auuuauaucacaugu

SEQ ID NO: 1357111 - RNA, 15 nt, Human
auuuauauuguaaau

SEQ ID NO: 1357112 - RNA, 22 nt, Human
auuuauauugauaagaucuuuu

SEQ ID NO: 1357113 - RNA, 21 nt, Human
auuuauauugauaagaucuuu

SEQ ID NO: 1357114 - RNA, 20 nt, Human
auuuauauugauaagaucuu

SEQ ID NO: 1357115 - RNA, 13 nt, Human
auuuauauugaua

SEQ ID NO: 1357116 - RNA, 19 nt, Human
auuucagaaguuaguuugu

SEQ ID NO: 1357117 - RNA, 12 nt, Human
auuucagaaguu

SEQ ID NO: 1357118 - RNA, 12 nt, Human
auuucacuuguc

SEQ ID NO: 1357119 - RNA, 23 nt, Human
auuucacugucuuuaauucugua

SEQ ID NO: 1357120 - RNA, 22 nt, Human
auuucacugucuuuaauucugu

SEQ ID NO: 1357121 - RNA, 13 nt, Human
auuucacugucuu

SEQ ID NO: 1357122 - RNA, 19 nt, Human
auuucacuggagcacaaua

SEQ ID NO: 1357123 - RNA, 17 nt, Human
auuucacuggagcacaa

SEQ ID NO: 1357124 - RNA, 16 nt, Human
auuucacuggagcaca

SEQ ID NO: 1357125 - RNA, 14 nt, Human
auuucacuggagca

SEQ ID NO: 1357126 - RNA, 12 nt, Human
auuucacuggag

SEQ ID NO: 1357127 - RNA, 20 nt, Human
auuuaugccucuguauuuaa

SEQ ID NO: 1357128 - RNA, 16 nt, Human
auuuaugcauauuauu

SEQ ID NO: 1357129 - RNA, 22 nt, Human
auuuaugcauauuauuuuaugu

SEQ ID NO: 1357130 - RNA, 11 nt, Human
auuucuguguu

SEQ ID NO: 1357131 - RNA, 17 nt, Human
auuucauaguucagaau

SEQ ID NO: 1357132 - RNA, 16 nt, Human
auuucauaguucagaa

SEQ ID NO: 1357133 - RNA, 15 nt, Human
auuucauaguucaga

SEQ ID NO: 1357134 - RNA, 14 nt, Human
auuucauaguucag

SEQ ID NO: 1357135 - RNA, 13 nt, Human
auuucauaguuca

SEQ ID NO: 1357136 - RNA, 23 nt, Human
auuucauacuguaacauucagga

SEQ ID NO: 1357137 - RNA, 19 nt, Human
auuucaguucuaggaaaau

SEQ ID NO: 1357138 - RNA, 18 nt, Human
auuucaguucuaggaaaa

SEQ ID NO: 1357139 - RNA, 17 nt, Human
auuucaguucuaggaaa

SEQ ID NO: 1357140 - RNA, 16 nt, Human
auuucaguucuaggaa

SEQ ID NO: 1357141 - RNA, 12 nt, Human
auuucagacucc

SEQ ID NO: 1357142 - RNA, 21 nt, Human
auuucagaaguuaguuuguau

SEQ ID NO: 1357143 - RNA, 14 nt, Human
auuucuaugaaaua

SEQ ID NO: 1357144 - RNA, 23 nt, Human
auuucuauagccaaaaauagcua

SEQ ID NO: 1357145 - RNA, 19 nt, Human
auuucauaguucagaauuu

SEQ ID NO: 1357146 - RNA, 16 nt, Human
auuucugccuccccuu

SEQ ID NO: 1357147 - RNA, 13 nt, Human
auuucugccuccc

SEQ ID NO: 1357148 - RNA, 23 nt, Human
auuucugcauauguugaauacuu

SEQ ID NO: 1357149 - RNA, 22 nt, Human
auuucugcauauguugaauacu

SEQ ID NO: 1357150 - RNA, 18 nt, Human
auuucugcauauguugaa

SEQ ID NO: 1357151 - RNA, 20 nt, Human
auuucuauuucuccuccaug

SEQ ID NO: 1357152 - RNA, 18 nt, Human
auuucuauuucuccucca

SEQ ID NO: 1357153 - RNA, 15 nt, Human
auuucuauuucuccu

SEQ ID NO: 1357154 - RNA, 11 nt, Human
auuucuauuaa

SEQ ID NO: 1357155 - RNA, 18 nt, Human
auuguaacccugucugga

SEQ ID NO: 1357156 - RNA, 21 nt, Human
auugcuuacaagccuaagaau

SEQ ID NO: 1357157 - RNA, 14 nt, Human
auugcuugcacaaa

SEQ ID NO: 1357158 - RNA, 13 nt, Human
auuguguuugugu

SEQ ID NO: 1357159 - RNA, 22 nt, Human
auuguguuugucauuagccuga

SEQ ID NO: 1357160 - RNA, 15 nt, Human
auuguguuugucauu

SEQ ID NO: 1357161 - RNA, 16 nt, Human
auuguguuugucauua

SEQ ID NO: 1357162 - RNA, 18 nt, Human
auuguguuugucauuagc

SEQ ID NO: 1357163 - RNA, 19 nt, Human
auuguguuugucauuagcc

SEQ ID NO: 1357164 - RNA, 15 nt, Human
auuguguucccauuu

SEQ ID NO: 1357165 - RNA, 20 nt, Human
auuguguuaccuguagauuc

SEQ ID NO: 1357166 - RNA, 13 nt, Human
auuguguuuguca

SEQ ID NO: 1357167 - RNA, 19 nt, Human
auuguuguucuguuaacug

SEQ ID NO: 1357168 - RNA, 21 nt, Human
auuguuguucuguuaacugaa

SEQ ID NO: 1357169 - RNA, 18 nt, Human
auuguuguucuguuaacu

SEQ ID NO: 1357170 - RNA, 14 nt, Human
auuguuguucuguu

SEQ ID NO: 1357171 - RNA, 13 nt, Human
auuguuguucugu

SEQ ID NO: 1357172 - RNA, 15 nt, Human
auuguuacagaagcu

SEQ ID NO: 1357173 - RNA, 17 nt, Human
auuguuaauuuuuccua

SEQ ID NO: 1357174 - RNA, 14 nt, Human
auuguuaaaggcua

SEQ ID NO: 1357175 - RNA, 10 nt, Human
auuguaacuc

SEQ ID NO: 1357176 - RNA, 19 nt, Human
auuguaacuguucuugaau

SEQ ID NO: 1357177 - RNA, 15 nt, Human
auuguaacuguucuu

SEQ ID NO: 1357178 - RNA, 13 nt, Human
auuguaacuguuc

SEQ ID NO: 1357179 - RNA, 18 nt, Human
auuguaagcaugcacaaa

SEQ ID NO: 1357180 - RNA, 20 nt, Human
auuguguucccauuucagcu

SEQ ID NO: 1357181 - RNA, 20 nt, Human
auucucugugucuaagauuc

SEQ ID NO: 1357182 - RNA, 18 nt, Human
auucucugugucuaagau

SEQ ID NO: 1357183 - RNA, 17 nt, Human
auucucugugucuaaga

SEQ ID NO: 1357184 - RNA, 19 nt, Human
auucucugucucauccauc

SEQ ID NO: 1357185 - RNA, 18 nt, Human
auucucugucucauccau

SEQ ID NO: 1357186 - RNA, 17 nt, Human
auucucugucucaucca

SEQ ID NO: 1357187 - RNA, 16 nt, Human
auucucugucucaucc

SEQ ID NO: 1357188 - RNA, 14 nt, Human
auucucugucucau

SEQ ID NO: 1357189 - RNA, 13 nt, Human
auucucugucuca

SEQ ID NO: 1357190 - RNA, 12 nt, Human
auucucugucuc

SEQ ID NO: 1357191 - RNA, 22 nt, Human
auucucuggcuguaaggcucua

SEQ ID NO: 1357192 - RNA, 21 nt, Human
auucucuggcuguaaggcucu

SEQ ID NO: 1357193 - RNA, 20 nt, Human
auucucuggcuguaaggcuc

SEQ ID NO: 1357194 - RNA, 19 nt, Human
auucucuggcuguaaggcu

SEQ ID NO: 1357195 - RNA, 17 nt, Human
auucucuggcuguaagg

SEQ ID NO: 1357196 - RNA, 18 nt, Human
auucucugagcugugcag

SEQ ID NO: 1357197 - RNA, 17 nt, Human
auucucugagcugugca

SEQ ID NO: 1357198 - RNA, 13 nt, Human
auucucugagcug

SEQ ID NO: 1357199 - RNA, 19 nt, Human
auucucuaguuugauuaaa

SEQ ID NO: 1357200 - RNA, 20 nt, Human
auuccuuuaacaacauguuu

SEQ ID NO: 1357201 - RNA, 18 nt, Human
auucuccuuguguuacua

SEQ ID NO: 1357202 - RNA, 19 nt, Human
auucuccuuguguuacuaa

SEQ ID NO: 1357203 - RNA, 21 nt, Human
auucuccuuguguuacuaagu

SEQ ID NO: 1357204 - RNA, 22 nt, Human
auucuccuuguguuacuaaguu

SEQ ID NO: 1357205 - RNA, 17 nt, Human
auucucuaguuugauua

SEQ ID NO: 1357206 - RNA, 18 nt, Human
auucucuaguuugauuaa

SEQ ID NO: 1357207 - RNA, 17 nt, Human
auuccucaacguauugu

SEQ ID NO: 1357208 - RNA, 22 nt, Human
auuccuauugugcaauguaaau

SEQ ID NO: 1357209 - RNA, 22 nt, Human
auuccucaugaauguaaauuug

SEQ ID NO: 1357210 - RNA, 20 nt, Human
auuccuccugcucauauugu

SEQ ID NO: 1357211 - RNA, 16 nt, Human
auuccuccugcucaua

SEQ ID NO: 1357212 - RNA, 15 nt, Human
auuccuccugcucau

SEQ ID NO: 1357213 - RNA, 14 nt, Human
auuccuccugcuca

SEQ ID NO: 1357214 - RNA, 13 nt, Human
auuccuccugcuc

SEQ ID NO: 1357215 - RNA, 19 nt, Human
auuccucaugaauguaaau

SEQ ID NO: 1357216 - RNA, 18 nt, Human
auuccucaugaauguaaa

SEQ ID NO: 1357217 - RNA, 17 nt, Human
auuccucaugaauguaa

SEQ ID NO: 1357218 - RNA, 16 nt, Human
auuccucaugaaugua

SEQ ID NO: 1357219 - RNA, 23 nt, Human
auuccucaugaauguaaauuugu

SEQ ID NO: 1357220 - RNA, 11 nt, Human
auuccuccagg

SEQ ID NO: 1357221 - RNA, 22 nt, Human
auuccuuagacucuuuuccuuc

SEQ ID NO: 1357222 - RNA, 19 nt, Human
auuccuuagacucuuuucc

SEQ ID NO: 1357223 - RNA, 22 nt, Human
auuccugggaaauauucccuag

SEQ ID NO: 1357224 - RNA, 17 nt, Human
auuccugggaaauauuc

SEQ ID NO: 1357225 - RNA, 12 nt, Human
auuccuucccau

SEQ ID NO: 1357226 - RNA, 15 nt, Human
auuccuucagcacuu

SEQ ID NO: 1357227 - RNA, 16 nt, Human
auuccuucccagaggg

SEQ ID NO: 1357228 - RNA, 15 nt, Human
auuccuucagauuug

SEQ ID NO: 1357229 - RNA, 17 nt, Human
auuccuucagcacuuua

SEQ ID NO: 1357230 - RNA, 20 nt, Human
auucuugauguaaaaucuug

SEQ ID NO: 1357231 - RNA, 19 nt, Human
auucuugauguaaaaucuu

SEQ ID NO: 1357232 - RNA, 18 nt, Human
auucuugauguaaaaucu

SEQ ID NO: 1357233 - RNA, 21 nt, Human
auucucugugucuaagauucu

SEQ ID NO: 1357234 - RNA, 14 nt, Human
auucuugcaaagua

SEQ ID NO: 1357235 - RNA, 15 nt, Human
auucuugcaaaguau

SEQ ID NO: 1357236 - RNA, 16 nt, Human
auucuugcaaaguauc

SEQ ID NO: 1357237 - RNA, 17 nt, Human
auucuugccaaauauaa

SEQ ID NO: 1357238 - RNA, 13 nt, Human
auuaaauuacaga

SEQ ID NO: 1357239 - RNA, 15 nt, Human
auuaaaugacacuca

SEQ ID NO: 1357240 - RNA, 21 nt, Human
auuaggcuguaacuacuuuau

SEQ ID NO: 1357241 - RNA, 17 nt, Human
auuaggcuguaacuacu

SEQ ID NO: 1357242 - RNA, 15 nt, Human
auuaggcuguaacua

SEQ ID NO: 1357243 - RNA, 14 nt, Human
auuaggcuguaacu

SEQ ID NO: 1357244 - RNA, 21 nt, Human
auuaggcagacucuuuaugcu

SEQ ID NO: 1357245 - RNA, 14 nt, Human
auuaggcagacucu

SEQ ID NO: 1357246 - RNA, 16 nt, Human
auuaugcauuauauca

SEQ ID NO: 1357247 - RNA, 19 nt, Human
auuaguacacagcaccaga

SEQ ID NO: 1357248 - RNA, 22 nt, Human
auuaugaauuacauuuguauaa

SEQ ID NO: 1357249 - RNA, 20 nt, Human
auuaugaauuacauuuguau

SEQ ID NO: 1357250 - RNA, 19 nt, Human
auuaugaauuacauuugua

SEQ ID NO: 1357251 - RNA, 13 nt, Human
auuaguaacaugu

SEQ ID NO: 1357252 - RNA, 13 nt, Human
auuaggccagcaa

SEQ ID NO: 1357253 - RNA, 23 nt, Human
auuaggcuguaacuacuuuauaa

SEQ ID NO: 1357254 - RNA, 22 nt, Human
auuaggcuguaacuacuuuaua

SEQ ID NO: 1357255 - RNA, 17 nt, Human
auuaguaacauguguua

SEQ ID NO: 1357256 - RNA, 16 nt, Human
auuaguaacauguguu

SEQ ID NO: 1357257 - RNA, 18 nt, Human
auuaguaagcuagcaaau

SEQ ID NO: 1357258 - RNA, 20 nt, Human
auuaguacuccccuccuuga

SEQ ID NO: 1357259 - RNA, 16 nt, Human
auucaaucuguaaacu

SEQ ID NO: 1357260 - RNA, 15 nt, Human
auucaaucuguaaac

SEQ ID NO: 1357261 - RNA, 14 nt, Human
auucaaucuguaaa

SEQ ID NO: 1357262 - RNA, 18 nt, Human
auucaaucuguaaacugu

SEQ ID NO: 1357263 - RNA, 17 nt, Human
auucaaucuguaaacug

SEQ ID NO: 1357264 - RNA, 22 nt, Human
auucaaucuguaaacuguguau

SEQ ID NO: 1357265 - RNA, 21 nt, Human
auucaauaaaguauuuaauua

SEQ ID NO: 1357266 - RNA, 22 nt, Human
auucaauaaaguauuuaauuag

SEQ ID NO: 1357267 - RNA, 13 nt, Human
auucaacaaacau

SEQ ID NO: 1357268 - RNA, 12 nt, Human
auucaacaaaca

SEQ ID NO: 1357269 - RNA, 18 nt, Human
auucaauaaaguauuuaa

SEQ ID NO: 1357270 - RNA, 20 nt, Human
auucaauaaaguauuuaauu

SEQ ID NO: 1357271 - RNA, 16 nt, Human
auucaaaugucuauaa

SEQ ID NO: 1357272 - RNA, 19 nt, Human
auuaugccuuuuuugauca

SEQ ID NO: 1357273 - RNA, 16 nt, Human
auuaugggucacagga

SEQ ID NO: 1357274 - RNA, 15 nt, Human
auuaugggucacagg

SEQ ID NO: 1357275 - RNA, 22 nt, Human
auuauggagucauuuuuacaau

SEQ ID NO: 1357276 - RNA, 17 nt, Human
auuaugggucacaggaa

SEQ ID NO: 1357277 - RNA, 18 nt, Human
cacaggcuucugagcagc

SEQ ID NO: 1357278 - RNA, 16 nt, Human
cacaggcucaggcagg

SEQ ID NO: 1357279 - RNA, 19 nt, Human
cacaggcucaggcaggggc

SEQ ID NO: 1357280 - RNA, 15 nt, Human
cacaggcucaggcag

SEQ ID NO: 1357281 - RNA, 14 nt, Human
cacaggcucaggca

SEQ ID NO: 1357282 - RNA, 13 nt, Human
cacaggcucaggc

SEQ ID NO: 1357283 - RNA, 24 nt, Human
cacaggccuguguagcugugaccu

SEQ ID NO: 1357284 - RNA, 23 nt, Human
cacaggccuguguagcugugacc

SEQ ID NO: 1357285 - RNA, 22 nt, Human
cacaggccuguguagcugugac

SEQ ID NO: 1357286 - RNA, 21 nt, Human
cacaggccuguguagcuguga

SEQ ID NO: 1357287 - RNA, 18 nt, Human
cacaggccuguguagcug

SEQ ID NO: 1357288 - RNA, 17 nt, Human
cacaggcuucugagcag

SEQ ID NO: 1357289 - RNA, 21 nt, Human
cacagcucuccggucucucuc

SEQ ID NO: 1357290 - RNA, 20 nt, Human
cacagcucuccggucucucu

SEQ ID NO: 1357291 - RNA, 14 nt, Human
cacaggccugugua

SEQ ID NO: 1357292 - RNA, 15 nt, Human
cacagcuccucccac

SEQ ID NO: 1357293 - RNA, 10 nt, Human
cacagcuccu

SEQ ID NO: 1357294 - RNA, 23 nt, Human
cacagaaaauaaggcacccaucu

SEQ ID NO: 1357295 - RNA, 12 nt, Human
cacagaaaccuu

SEQ ID NO: 1357296 - RNA, 16 nt, Human
cacagaaaccaauuuu

SEQ ID NO: 1357297 - RNA, 12 nt, Human
cacacuuuggua

SEQ ID NO: 1357298 - RNA, 17 nt, Human
cacacuuugguaccaga

SEQ ID NO: 1357299 - RNA, 17 nt, Human
cacagaaaauaaggcac

SEQ ID NO: 1357300 - RNA, 14 nt, Human
cacagaaaauaagg

SEQ ID NO: 1357301 - RNA, 13 nt, Human
cacacauugcugu

SEQ ID NO: 1357302 - RNA, 10 nt, Human
cacacauuuu

SEQ ID NO: 1357303 - RNA, 11 nt, Human
cacacauuuuu

SEQ ID NO: 1357304 - RNA, 12 nt, Human
cacacauuuuuu

SEQ ID NO: 1357305 - RNA, 16 nt, Human
cacacauuuuuuaaau

SEQ ID NO: 1357306 - RNA, 19 nt, Human
cacacauuuuuuaaaugca

SEQ ID NO: 1357307 - RNA, 20 nt, Human
cacacauuuuuuaaaugcac

SEQ ID NO: 1357308 - RNA, 23 nt, Human
cacaucugugucuuguuuggaau

SEQ ID NO: 1357309 - RNA, 18 nt, Human
cacaucugugucuuguuu

SEQ ID NO: 1357310 - RNA, 17 nt, Human
cacaucugugucuuguu

SEQ ID NO: 1357311 - RNA, 16 nt, Human
cacaucugugucuugu

SEQ ID NO: 1357312 - RNA, 17 nt, Human
cacauuuuauuuuauua

SEQ ID NO: 1357313 - RNA, 12 nt, Human
cacaucuguguc

SEQ ID NO: 1357314 - RNA, 23 nt, Human
cacaucucaacaggccucagggc

SEQ ID NO: 1357315 - RNA, 21 nt, Human
cacaucucaacaggccucagg

SEQ ID NO: 1357316 - RNA, 20 nt, Human
cacaucucaacaggccucag

SEQ ID NO: 1357317 - RNA, 14 nt, Human
cacaucucaacagg

SEQ ID NO: 1357318 - RNA, 13 nt, Human
cacaucucaacag

SEQ ID NO: 1357319 - RNA, 15 nt, Human
caccaaaagaaguaa

SEQ ID NO: 1357320 - RNA, 21 nt, Human
cacauuuuauuuuauuaugca

SEQ ID NO: 1357321 - RNA, 19 nt, Human
cacauuuuauuuuauuaug

SEQ ID NO: 1357322 - RNA, 20 nt, Human
cacauuuuauuuuauuaugc

SEQ ID NO: 1357323 - RNA, 13 nt, Human
caccaaaguucua

SEQ ID NO: 1357324 - RNA, 12 nt, Human
caccaaaguucu

SEQ ID NO: 1357325 - RNA, 13 nt, Human
caccaaagagaau

SEQ ID NO: 1357326 - RNA, 17 nt, Human
caccaaagagaaugccc

SEQ ID NO: 1357327 - RNA, 21 nt, Human
caccaaaucaaaaucucucca

SEQ ID NO: 1357328 - RNA, 18 nt, Human
caccaaaucaaaaucucu

SEQ ID NO: 1357329 - RNA, 16 nt, Human
caccaaaucaaaaucu

SEQ ID NO: 1357330 - RNA, 14 nt, Human
caccaaaucaaaau

SEQ ID NO: 1357331 - RNA, 22 nt, Human
caccaaaguucuaauaauuucu

SEQ ID NO: 1357332 - RNA, 17 nt, Human
caccaaaguucuaauaa

SEQ ID NO: 1357333 - RNA, 16 nt, Human
caccaaaguucuaaua

SEQ ID NO: 1357334 - RNA, 14 nt, Human
caccaaaguucuaa

SEQ ID NO: 1357335 - RNA, 13 nt, Human
caccaaaugugcu

SEQ ID NO: 1357336 - RNA, 16 nt, Human
caccaacccucagggc

SEQ ID NO: 1357337 - RNA, 15 nt, Human
caccaacccucaggg

SEQ ID NO: 1357338 - RNA, 14 nt, Human
caccaacccucagg

SEQ ID NO: 1357339 - RNA, 22 nt, Human
caccccaaccugcucuccucuu

SEQ ID NO: 1357340 - RNA, 21 nt, Human
caccccaaccugcucuccucu

SEQ ID NO: 1357341 - RNA, 20 nt, Human
caccccaaccugcucuccuc

SEQ ID NO: 1357342 - RNA, 16 nt, Human
caccccaaccugcucu

SEQ ID NO: 1357343 - RNA, 15 nt, Human
caccccaaccugcuc

SEQ ID NO: 1357344 - RNA, 19 nt, Human
caccccaaagcuuuccugc

SEQ ID NO: 1357345 - RNA, 18 nt, Human
caccccaaagcuuuccug

SEQ ID NO: 1357346 - RNA, 18 nt, Human
cacccauuuuuccuuuug

SEQ ID NO: 1357347 - RNA, 15 nt, Human
cacccauuuuuccuu

SEQ ID NO: 1357348 - RNA, 19 nt, Human
caccccaauccucccagaa

SEQ ID NO: 1357349 - RNA, 21 nt, Human
caccccacccacuucugcacu

SEQ ID NO: 1357350 - RNA, 15 nt, Human
caccccaauccuccc

SEQ ID NO: 1357351 - RNA, 19 nt, Human
cacccagccccagccaggg

SEQ ID NO: 1357352 - RNA, 22 nt, Human
caccagggcaucucugggcugg

SEQ ID NO: 1357353 - RNA, 21 nt, Human
caccagggcaucucugggcug

SEQ ID NO: 1357354 - RNA, 20 nt, Human
caccagggcaucucugggcu

SEQ ID NO: 1357355 - RNA, 19 nt, Human
caccagggcaucucugggc

SEQ ID NO: 1357356 - RNA, 18 nt, Human
caccagggcaucucuggg

SEQ ID NO: 1357357 - RNA, 17 nt, Human
caccagggcaucucugg

SEQ ID NO: 1357358 - RNA, 16 nt, Human
caccagggcaucucug

SEQ ID NO: 1357359 - RNA, 20 nt, Human
caccaggcuugccugcaggc

SEQ ID NO: 1357360 - RNA, 22 nt, Human
cacaagauggaauuuaucaaac

SEQ ID NO: 1357361 - RNA, 20 nt, Human
caauccaguggacuucgcag

SEQ ID NO: 1357362 - RNA, 17 nt, Human
caaucauuuuaauuauu

SEQ ID NO: 1357363 - RNA, 20 nt, Human
caaucccucaccuucugagu

SEQ ID NO: 1357364 - RNA, 22 nt, Human
caaucccuuaauauccuaaaca

SEQ ID NO: 1357365 - RNA, 18 nt, Human
cacaagauggaauuuauc

SEQ ID NO: 1357366 - RNA, 20 nt, Human
caauuucuguguugccaagc

SEQ ID NO: 1357367 - RNA, 22 nt, Human
caauuucuguguugccaagcuc

SEQ ID NO: 1357368 - RNA, 15 nt, Human
caauuucuguguugc

SEQ ID NO: 1357369 - RNA, 13 nt, Human
caauuucugaaca

SEQ ID NO: 1357370 - RNA, 19 nt, Human
caauuucuaauuuuuaaga

SEQ ID NO: 1357371 - RNA, 21 nt, Human
caauuucuacuuugaagucau

SEQ ID NO: 1357372 - RNA, 20 nt, Human
caauuucuacuuugaaguca

SEQ ID NO: 1357373 - RNA, 16 nt, Human
caauuucuacuuugaa

SEQ ID NO: 1357374 - RNA, 14 nt, Human
caauugacaacagu

SEQ ID NO: 1357375 - RNA, 18 nt, Human
caauugaaguaaacuuuu

SEQ ID NO: 1357376 - RNA, 21 nt, Human
caauugaaguaaacuuuuugu

SEQ ID NO: 1357377 - RNA, 17 nt, Human
caauugaaguaaacuuu

SEQ ID NO: 1357378 - RNA, 15 nt, Human
caauugaaguaaacu

SEQ ID NO: 1357379 - RNA, 17 nt, Human
caauuucuaauuuuuaa

SEQ ID NO: 1357380 - RNA, 22 nt, Human
caauuucggauuuuuuccaaaa

SEQ ID NO: 1357381 - RNA, 21 nt, Human
caauuucggauuuuuuccaaa

SEQ ID NO: 1357382 - RNA, 17 nt, Human
caauuucggauuuuuuc

SEQ ID NO: 1357383 - RNA, 13 nt, Human
caauuucggauuu

SEQ ID NO: 1357384 - RNA, 17 nt, Human
caauugcugcuacuuau

SEQ ID NO: 1357385 - RNA, 23 nt, Human
caauugcacgcggagugaguuuu

SEQ ID NO: 1357386 - RNA, 17 nt, Human
caauugcaucucccaga

SEQ ID NO: 1357387 - RNA, 15 nt, Human
caauugcaucuccca

SEQ ID NO: 1357388 - RNA, 14 nt, Human
caauugcaucuccc

SEQ ID NO: 1357389 - RNA, 21 nt, Human
caauugcacgcggagugaguu

SEQ ID NO: 1357390 - RNA, 19 nt, Human
caauugacugucacuguuc

SEQ ID NO: 1357391 - RNA, 22 nt, Human
caauugacaacaguuacauaau

SEQ ID NO: 1357392 - RNA, 21 nt, Human
caauugacaacaguuacauaa

SEQ ID NO: 1357393 - RNA, 14 nt, Human
caauugagaaaaau

SEQ ID NO: 1357394 - RNA, 23 nt, Human
caauugagaaaaauauauacuaa

SEQ ID NO: 1357395 - RNA, 20 nt, Human
caaggcccgagcagcugagc

SEQ ID NO: 1357396 - RNA, 21 nt, Human
caaggcccgagcagcugagca

SEQ ID NO: 1357397 - RNA, 19 nt, Human
caaggcccgagcagcugag

SEQ ID NO: 1357398 - RNA, 18 nt, Human
caaggcccgagcagcuga

SEQ ID NO: 1357399 - RNA, 17 nt, Human
caaggcccgagcagcug

SEQ ID NO: 1357400 - RNA, 16 nt, Human
caaggcccgagcagcu

SEQ ID NO: 1357401 - RNA, 14 nt, Human
caaggcccgagcag

SEQ ID NO: 1357402 - RNA, 13 nt, Human
caaggcccgagca

SEQ ID NO: 1357403 - RNA, 19 nt, Human
caaggcacucuagauucca

SEQ ID NO: 1357404 - RNA, 17 nt, Human
caaggcacucuagauuc

SEQ ID NO: 1357405 - RNA, 16 nt, Human
caaggcacucuagauu

SEQ ID NO: 1357406 - RNA, 22 nt, Human
caagauugguguuuuuuucuau

SEQ ID NO: 1357407 - RNA, 12 nt, Human
caagauuucaga

SEQ ID NO: 1357408 - RNA, 21 nt, Human
caagauugguguuuuuuucua

SEQ ID NO: 1357409 - RNA, 20 nt, Human
caagauugguguuuuuuucu

SEQ ID NO: 1357410 - RNA, 23 nt, Human
caagauugagcucucugcccuug

SEQ ID NO: 1357411 - RNA, 20 nt, Human
caagauugagcucucugccc

SEQ ID NO: 1357412 - RNA, 19 nt, Human
caagauugagcucucugcc

SEQ ID NO: 1357413 - RNA, 17 nt, Human
caagauugagcucucug

SEQ ID NO: 1357414 - RNA, 16 nt, Human
caagauugagcucucu

SEQ ID NO: 1357415 - RNA, 18 nt, Human
caagauucuagaugauua

SEQ ID NO: 1357416 - RNA, 17 nt, Human
caagauucuagaugauu

SEQ ID NO: 1357417 - RNA, 14 nt, Human
caagauucuagaug

SEQ ID NO: 1357418 - RNA, 13 nt, Human
caagauucuagau

SEQ ID NO: 1357419 - RNA, 15 nt, Human
caaggcacucuagau

SEQ ID NO: 1357420 - RNA, 14 nt, Human
caaggcacucuaga

SEQ ID NO: 1357421 - RNA, 22 nt, Human
caagauuguuccugcuuuuccc

SEQ ID NO: 1357422 - RNA, 19 nt, Human
caagucaggcccuuauuuu

SEQ ID NO: 1357423 - RNA, 20 nt, Human
caagucauagguuaauauuu

SEQ ID NO: 1357424 - RNA, 23 nt, Human
caagucaguccaggaugcuaaca

SEQ ID NO: 1357425 - RNA, 21 nt, Human
caagucagucauucagauaug

SEQ ID NO: 1357426 - RNA, 16 nt, Human
caaggcggugcuugau

SEQ ID NO: 1357427 - RNA, 13 nt, Human
caaggcggugcuu

SEQ ID NO: 1357428 - RNA, 22 nt, Human
caaggccuuauuggaaagcagu

SEQ ID NO: 1357429 - RNA, 22 nt, Human
caaggccugguguuucuugaua

SEQ ID NO: 1357430 - RNA, 21 nt, Human
caaggccugguguuucuugau

SEQ ID NO: 1357431 - RNA, 20 nt, Human
caaguuuaucaguaaauaac

SEQ ID NO: 1357432 - RNA, 22 nt, Human
caaguuuaucaguaaauaacug

SEQ ID NO: 1357433 - RNA, 19 nt, Human
caaguuguucgggccaagg

SEQ ID NO: 1357434 - RNA, 15 nt, Human
caauaaaacauuaau

SEQ ID NO: 1357435 - RNA, 14 nt, Human
caauaaaacauuaa

SEQ ID NO: 1357436 - RNA, 20 nt, Human
caauaaaaauguuuaacggu

SEQ ID NO: 1357437 - RNA, 23 nt, Human
caauaaaauccauacauuugugu

SEQ ID NO: 1357438 - RNA, 20 nt, Human
caauaaaauccauacauuug

SEQ ID NO: 1357439 - RNA, 20 nt, Human
cagaaaugaggccauggacu

SEQ ID NO: 1357440 - RNA, 23 nt, Human
cagaaaugaggccauggacucug

SEQ ID NO: 1357441 - RNA, 21 nt, Human
cagaaaugaggagacacaccu

SEQ ID NO: 1357442 - RNA, 21 nt, Human
cagaaauauuugugacaaaaa

SEQ ID NO: 1357443 - RNA, 22 nt, Human
cagaaauauuugugacaaaaaa

SEQ ID NO: 1357444 - RNA, 16 nt, Human
cagaaauguacagcaa

SEQ ID NO: 1357445 - RNA, 17 nt, Human
cagaaauguguuaucac

SEQ ID NO: 1357446 - RNA, 23 nt, Human
cagaaagggagggcucugaggcg

SEQ ID NO: 1357447 - RNA, 21 nt, Human
cagaaagggagggcucugagg

SEQ ID NO: 1357448 - RNA, 20 nt, Human
cagaaagggagggcucugag

SEQ ID NO: 1357449 - RNA, 19 nt, Human
cagaaagggagggcucuga

SEQ ID NO: 1357450 - RNA, 18 nt, Human
cagaaagggagggcucug

SEQ ID NO: 1357451 - RNA, 17 nt, Human
cagaaagggagggcucu

SEQ ID NO: 1357452 - RNA, 16 nt, Human
cagaaagggagggcuc

SEQ ID NO: 1357453 - RNA, 20 nt, Human
cagaaaggacuccuccuuuu

SEQ ID NO: 1357454 - RNA, 15 nt, Human
cagaaagggagggcu

SEQ ID NO: 1357455 - RNA, 19 nt, Human
cagaaaggaaaaacaaacu

SEQ ID NO: 1357456 - RNA, 17 nt, Human
cagaaaggaaaaacaaa

SEQ ID NO: 1357457 - RNA, 16 nt, Human
cagaaaggaaaaacaa

SEQ ID NO: 1357458 - RNA, 23 nt, Human
cagaaagugccuuucaggaucua

SEQ ID NO: 1357459 - RNA, 22 nt, Human
cagaaagugccuuucaggaucu

SEQ ID NO: 1357460 - RNA, 19 nt, Human
cagaaagugccuuucagga

SEQ ID NO: 1357461 - RNA, 18 nt, Human
cagaaagugccuuucagg

SEQ ID NO: 1357462 - RNA, 17 nt, Human
cagaaagugccuuucag

SEQ ID NO: 1357463 - RNA, 16 nt, Human
cagaaagugccuuuca

SEQ ID NO: 1357464 - RNA, 15 nt, Human
cagaaagugccuuuc

SEQ ID NO: 1357465 - RNA, 23 nt, Human
cagaaagugccugacacacuaac

SEQ ID NO: 1357466 - RNA, 19 nt, Human
cagaaagugccugacacac

SEQ ID NO: 1357467 - RNA, 16 nt, Human
cagaaagugccugaca

SEQ ID NO: 1357468 - RNA, 15 nt, Human
cagaaagugccugac

SEQ ID NO: 1357469 - RNA, 14 nt, Human
cagaaagugccuga

SEQ ID NO: 1357470 - RNA, 12 nt, Human
cagaaagugccu

SEQ ID NO: 1357471 - RNA, 22 nt, Human
cagaaagggagggcucugaggc

SEQ ID NO: 1357472 - RNA, 14 nt, Human
cagaaauacuacug

SEQ ID NO: 1357473 - RNA, 23 nt, Human
cagaaauacagauuuugauagca

SEQ ID NO: 1357474 - RNA, 14 nt, Human
cagaaauacaauuu

SEQ ID NO: 1357475 - RNA, 15 nt, Human
cagaaauacagauuu

SEQ ID NO: 1357476 - RNA, 20 nt, Human
cagaaauacagauuuugaua

SEQ ID NO: 1357477 - RNA, 18 nt, Human
cacugccauaugauuuac

SEQ ID NO: 1357478 - RNA, 22 nt, Human
cacuguuuguuuacaaaaucag

SEQ ID NO: 1357479 - RNA, 11 nt, Human
cacuguuuaag

SEQ ID NO: 1357480 - RNA, 15 nt, Human
cacuuaaacuugcau

SEQ ID NO: 1357481 - RNA, 20 nt, Human
cacugguagaccaaaauaaa

SEQ ID NO: 1357482 - RNA, 20 nt, Human
cacugggugguggccugguc

SEQ ID NO: 1357483 - RNA, 22 nt, Human
cacugggugguggccugguccc

SEQ ID NO: 1357484 - RNA, 18 nt, Human
cacugggugguggccugg

SEQ ID NO: 1357485 - RNA, 17 nt, Human
cacugggugguggccug

SEQ ID NO: 1357486 - RNA, 15 nt, Human
cacugggugguggcc

SEQ ID NO: 1357487 - RNA, 14 nt, Human
cacugggugguggc

SEQ ID NO: 1357488 - RNA, 18 nt, Human
cacugggaggcuccccuu

SEQ ID NO: 1357489 - RNA, 20 nt, Human
cacugggaggcuccccuucu

SEQ ID NO: 1357490 - RNA, 19 nt, Human
cacugggagaaaugaaaaa

SEQ ID NO: 1357491 - RNA, 23 nt, Human
cacuuaaccaagacaaaaagcca

SEQ ID NO: 1357492 - RNA, 14 nt, Human
cacuuaauguaugu

SEQ ID NO: 1357493 - RNA, 12 nt, Human
cacuuaauguau

SEQ ID NO: 1357494 - RNA, 22 nt, Human
cacuuaaguuaguuccacugag

SEQ ID NO: 1357495 - RNA, 20 nt, Human
cacuuaaguuaguuccacug

SEQ ID NO: 1357496 - RNA, 22 nt, Human
cacuuguggguuuuuguuuugu

SEQ ID NO: 1357497 - RNA, 15 nt, Human
cacuuaauguauguu

SEQ ID NO: 1357498 - RNA, 19 nt, Human
cacuuuaaaauaucuacau

SEQ ID NO: 1357499 - RNA, 17 nt, Human
cacuuguguuuugcaag

SEQ ID NO: 1357500 - RNA, 22 nt, Human
cacuuuacacaauagaauuaua

SEQ ID NO: 1357501 - RNA, 20 nt, Human
cacuuuaauuaccaaccugu

SEQ ID NO: 1357502 - RNA, 18 nt, Human
cacuuuagaauaugccuu

SEQ ID NO: 1357503 - RNA, 19 nt, Human
caccuaggaagccucagau

SEQ ID NO: 1357504 - RNA, 24 nt, Human
caccuaggaagccucagauuccuu

SEQ ID NO: 1357505 - RNA, 18 nt, Human
caccuaggaagccucaga

SEQ ID NO: 1357506 - RNA, 17 nt, Human
caccuaggaagccucag

SEQ ID NO: 1357507 - RNA, 23 nt, Human
caccuagcugaauguuuuucuaa

SEQ ID NO: 1357508 - RNA, 22 nt, Human
caccuagcugaauguuuuucua

SEQ ID NO: 1357509 - RNA, 21 nt, Human
caccuagcugaauguuuuucu

SEQ ID NO: 1357510 - RNA, 19 nt, Human
caccuagcugaauguuuuu

SEQ ID NO: 1357511 - RNA, 18 nt, Human
caccuagcugaauguuuu

SEQ ID NO: 1357512 - RNA, 14 nt, Human
caccuagcugaaug

SEQ ID NO: 1357513 - RNA, 13 nt, Human
caccuagcugaau

SEQ ID NO: 1357514 - RNA, 14 nt, Human
caccuagcagcacc

SEQ ID NO: 1357515 - RNA, 17 nt, Human
caccuaggcuagggugg

SEQ ID NO: 1357516 - RNA, 13 nt, Human
caccucagauggc

SEQ ID NO: 1357517 - RNA, 12 nt, Human
caccucagaugg

SEQ ID NO: 1357518 - RNA, 20 nt, Human
caccucagagacauacaccu

SEQ ID NO: 1357519 - RNA, 17 nt, Human
caccuuuuuucaacagu

SEQ ID NO: 1357520 - RNA, 19 nt, Human
caccuuuguuucuccccca

SEQ ID NO: 1357521 - RNA, 16 nt, Human
cacgaaauguuauuuu

SEQ ID NO: 1357522 - RNA, 15 nt, Human
cacgaaauguuauuu

SEQ ID NO: 1357523 - RNA, 13 nt, Human
cacgaaauguuau

SEQ ID NO: 1357524 - RNA, 17 nt, Human
cacgaaauguuauuuuu

SEQ ID NO: 1357525 - RNA, 17 nt, Human
caccuuucuaguugaaa

SEQ ID NO: 1357526 - RNA, 13 nt, Human
caccuuucuaguu

SEQ ID NO: 1357527 - RNA, 12 nt, Human
caccuuucuagu

SEQ ID NO: 1357528 - RNA, 17 nt, Human
caccuuuguuucucccc

SEQ ID NO: 1357529 - RNA, 16 nt, Human
caccugccccaacucu

SEQ ID NO: 1357530 - RNA, 15 nt, Human
caccugccccaacuc

SEQ ID NO: 1357531 - RNA, 21 nt, Human
caccucagauggcagcuuuua

SEQ ID NO: 1357532 - RNA, 20 nt, Human
caccucagauggcagcuuuu

SEQ ID NO: 1357533 - RNA, 19 nt, Human
caccucagauggcagcuuu

SEQ ID NO: 1357534 - RNA, 18 nt, Human
caccucagauggcagcuu

SEQ ID NO: 1357535 - RNA, 17 nt, Human
caccucagauggcagcu

SEQ ID NO: 1357536 - RNA, 22 nt, Human
cacucuguucauuccuccaggu

SEQ ID NO: 1357537 - RNA, 19 nt, Human
cacggccacaucaaagagg

SEQ ID NO: 1357538 - RNA, 13 nt, Human
cacggccacauca

SEQ ID NO: 1357539 - RNA, 19 nt, Human
cacggccacacagcugccg

SEQ ID NO: 1357540 - RNA, 18 nt, Human
cacggccacacagcugcc

SEQ ID NO: 1357541 - RNA, 17 nt, Human
cacggccacacagcugc

SEQ ID NO: 1357542 - RNA, 16 nt, Human
cacggccacacagcug

SEQ ID NO: 1357543 - RNA, 20 nt, Human
cacggccacacagcugccgg

SEQ ID NO: 1357544 - RNA, 20 nt, Human
cacggccuuucuagccuggc

SEQ ID NO: 1357545 - RNA, 12 nt, Human
cacggccuuucu

SEQ ID NO: 1357546 - RNA, 21 nt, Human
cacuacacccagcaauagaga

SEQ ID NO: 1357547 - RNA, 21 nt, Human
cacuacauucuguuaaucauu

SEQ ID NO: 1357548 - RNA, 16 nt, Human
cacuacauucuguuaa

SEQ ID NO: 1357549 - RNA, 17 nt, Human
cacuacauucuguuaau

SEQ ID NO: 1357550 - RNA, 20 nt, Human
cacuaccgaaugugucuuua

SEQ ID NO: 1357551 - RNA, 23 nt, Human
cacuaccgaaugugucuuuagau

SEQ ID NO: 1357552 - RNA, 17 nt, Human
cacucuguucauuccuc

SEQ ID NO: 1357553 - RNA, 18 nt, Human
cacucuguucauuccucc

SEQ ID NO: 1357554 - RNA, 19 nt, Human
cacucuguucauuccucca

SEQ ID NO: 1357555 - RNA, 20 nt, Human
cacucuguucauuccuccag

SEQ ID NO: 1357556 - RNA, 21 nt, Human
cacucuguucauuccuccagg

SEQ ID NO: 1357557 - RNA, 12 nt, Human
cccccuuuccug

SEQ ID NO: 1357558 - RNA, 18 nt, Human
cccccuuucacaggcagc

SEQ ID NO: 1357559 - RNA, 22 nt, Human
cccccuuucacaggcagccagu

SEQ ID NO: 1357560 - RNA, 17 nt, Human
cccccuuucacaggcag

SEQ ID NO: 1357561 - RNA, 21 nt, Human
cccccuuuagaucucugaagc

SEQ ID NO: 1357562 - RNA, 20 nt, Human
cccccuuuagaucucugaag

SEQ ID NO: 1357563 - RNA, 14 nt, Human
cccccuugaguggg

SEQ ID NO: 1357564 - RNA, 20 nt, Human
cccccuuuccuggacacuca

SEQ ID NO: 1357565 - RNA, 14 nt, Human
ccccgcagacaccu

SEQ ID NO: 1357566 - RNA, 13 nt, Human
cccauuuuuccuu

SEQ ID NO: 1357567 - RNA, 12 nt, Human
cccauuuuuccu

SEQ ID NO: 1357568 - RNA, 17 nt, Human
cccauuuugaaucacau

SEQ ID NO: 1357569 - RNA, 13 nt, Human
cccauuucugagg

SEQ ID NO: 1357570 - RNA, 13 nt, Human
ccccauucccgca

SEQ ID NO: 1357571 - RNA, 15 nt, Human
ccccauguucugucc

SEQ ID NO: 1357572 - RNA, 23 nt, Human
ccccauguguccugguucccguu

SEQ ID NO: 1357573 - RNA, 18 nt, Human
ccccauguguccugguuc

SEQ ID NO: 1357574 - RNA, 16 nt, Human
ccccauguguccuggu

SEQ ID NO: 1357575 - RNA, 14 nt, Human
ccccauguguccug

SEQ ID NO: 1357576 - RNA, 20 nt, Human
ccccauggugcuaggaagag

SEQ ID NO: 1357577 - RNA, 21 nt, Human
ccccauggugcuaggaagagg

SEQ ID NO: 1357578 - RNA, 19 nt, Human
ccccauggucagcccuagg

SEQ ID NO: 1357579 - RNA, 17 nt, Human
ccccauggcccugagcg

SEQ ID NO: 1357580 - RNA, 16 nt, Human
ccccauggcccugagc

SEQ ID NO: 1357581 - RNA, 13 nt, Human
ccccauggcccug

SEQ ID NO: 1357582 - RNA, 19 nt, Human
ccccauggagcugggcuaa

SEQ ID NO: 1357583 - RNA, 13 nt, Human
ccccaugcuggcc

SEQ ID NO: 1357584 - RNA, 14 nt, Human
ccccaugcuggccu

SEQ ID NO: 1357585 - RNA, 18 nt, Human
ccccaugcuggccuugcc

SEQ ID NO: 1357586 - RNA, 15 nt, Human
ccccagcccagggcu

SEQ ID NO: 1357587 - RNA, 14 nt, Human
ccccagcccagggc

SEQ ID NO: 1357588 - RNA, 12 nt, Human
ccccagcccagg

SEQ ID NO: 1357589 - RNA, 16 nt, Human
ccccagcccagagaca

SEQ ID NO: 1357590 - RNA, 15 nt, Human
ccccagcccagagac

SEQ ID NO: 1357591 - RNA, 13 nt, Human
ccccagcccagag

SEQ ID NO: 1357592 - RNA, 12 nt, Human
ccccagcccaga

SEQ ID NO: 1357593 - RNA, 21 nt, Human
ccccagcccagggcuccugca

SEQ ID NO: 1357594 - RNA, 20 nt, Human
ccccagcccagggcuccugc

SEQ ID NO: 1357595 - RNA, 11 nt, Human
ccccagauauc

SEQ ID NO: 1357596 - RNA, 22 nt, Human
cccauccuguguguuaagcucu

SEQ ID NO: 1357597 - RNA, 18 nt, Human
cccauccuguggucacug

SEQ ID NO: 1357598 - RNA, 15 nt, Human
cccauccugaccagc

SEQ ID NO: 1357599 - RNA, 16 nt, Human
cccaucccuccccagu

SEQ ID NO: 1357600 - RNA, 15 nt, Human
cccaucccuccccag

SEQ ID NO: 1357601 - RNA, 14 nt, Human
cccaucaggguagg

SEQ ID NO: 1357602 - RNA, 23 nt, Human
cccaucagugcucccucacaugu

SEQ ID NO: 1357603 - RNA, 22 nt, Human
cccaucagugcucccucacaug

SEQ ID NO: 1357604 - RNA, 18 nt, Human
cccaucagcuccagcugc

SEQ ID NO: 1357605 - RNA, 23 nt, Human
cccaucaccuacucacacaggca

SEQ ID NO: 1357606 - RNA, 22 nt, Human
cccaucaccuacucacacaggc

SEQ ID NO: 1357607 - RNA, 21 nt, Human
cccaucaccuacucacacagg

SEQ ID NO: 1357608 - RNA, 20 nt, Human
cccaucaccuacucacacag

SEQ ID NO: 1357609 - RNA, 19 nt, Human
cccagggacaccugggaga

SEQ ID NO: 1357610 - RNA, 18 nt, Human
cccagggacaccugggag

SEQ ID NO: 1357611 - RNA, 23 nt, Human
cccagggaagcagcagccucgcc

SEQ ID NO: 1357612 - RNA, 22 nt, Human
cccaggcugccguccccuagag

SEQ ID NO: 1357613 - RNA, 15 nt, Human
cccaggcugccgucc

SEQ ID NO: 1357614 - RNA, 14 nt, Human
cccaggcugccguc

SEQ ID NO: 1357615 - RNA, 12 nt, Human
cccaggcugccg

SEQ ID NO: 1357616 - RNA, 20 nt, Human
cccagggaagcagcagccuc

SEQ ID NO: 1357617 - RNA, 19 nt, Human
cccagggaagcagcagccu

SEQ ID NO: 1357618 - RNA, 17 nt, Human
cccagggaagcagcagc

SEQ ID NO: 1357619 - RNA, 15 nt, Human
cccagggaagcagca

SEQ ID NO: 1357620 - RNA, 20 nt, Human
cccagcuggggccaggcugg

SEQ ID NO: 1357621 - RNA, 22 nt, Human
cccagccagggcucaaucucug

SEQ ID NO: 1357622 - RNA, 16 nt, Human
cccagccagggcucaa

SEQ ID NO: 1357623 - RNA, 16 nt, Human
cccagccaggcccagc

SEQ ID NO: 1357624 - RNA, 15 nt, Human
cccagccaggcccag

SEQ ID NO: 1357625 - RNA, 14 nt, Human
cccagccaggccca

SEQ ID NO: 1357626 - RNA, 21 nt, Human
cccagccagggcucaaucucu

SEQ ID NO: 1357627 - RNA, 19 nt, Human
cccagccagggcucaaucu

SEQ ID NO: 1357628 - RNA, 13 nt, Human
cccagccauccag

SEQ ID NO: 1357629 - RNA, 17 nt, Human
cccagccaggcccagcc

SEQ ID NO: 1357630 - RNA, 13 nt, Human
cccagccaggccc

SEQ ID NO: 1357631 - RNA, 11 nt, Human
cccagccagcg

SEQ ID NO: 1357632 - RNA, 23 nt, Human
cccagccagcgucggucugugcc

SEQ ID NO: 1357633 - RNA, 19 nt, Human
cccagcacaugugcugccc

SEQ ID NO: 1357634 - RNA, 22 nt, Human
cccacuggagcagaaggggaga

SEQ ID NO: 1357635 - RNA, 13 nt, Human
cccacuggagcag

SEQ ID NO: 1357636 - RNA, 12 nt, Human
cccacuggagca

SEQ ID NO: 1357637 - RNA, 19 nt, Human
cccagcacagcuugaccug

SEQ ID NO: 1357638 - RNA, 18 nt, Human
cccagcacagcuugaccu

SEQ ID NO: 1357639 - RNA, 19 nt, Human
cccuccugugcucagcccu

SEQ ID NO: 1357640 - RNA, 18 nt, Human
cccuccugugcucagccc

SEQ ID NO: 1357641 - RNA, 17 nt, Human
cccuccuggugccaccu

SEQ ID NO: 1357642 - RNA, 13 nt, Human
cccuccuggcucu

SEQ ID NO: 1357643 - RNA, 20 nt, Human
cccucagccucuccccugcc

SEQ ID NO: 1357644 - RNA, 17 nt, Human
cccucacucgucucccc

SEQ ID NO: 1357645 - RNA, 23 nt, Human
cccucaccuuggcaccagacacc

SEQ ID NO: 1357646 - RNA, 21 nt, Human
cccucaccuuggcaccagaca

SEQ ID NO: 1357647 - RNA, 20 nt, Human
cccucaccuuggcaccagac

SEQ ID NO: 1357648 - RNA, 16 nt, Human
cccucaccuucugagu

SEQ ID NO: 1357649 - RNA, 21 nt, Human
cccucaccuguagcagccagu

SEQ ID NO: 1357650 - RNA, 23 nt, Human
cccucagccucuccccugccugc

SEQ ID NO: 1357651 - RNA, 17 nt, Human
cccggcuaauuuuugua

SEQ ID NO: 1357652 - RNA, 14 nt, Human
cccucaccuccucu

SEQ ID NO: 1357653 - RNA, 18 nt, Human
cccucaaccucauccucu

SEQ ID NO: 1357654 - RNA, 16 nt, Human
ccccucugcugcuguc

SEQ ID NO: 1357655 - RNA, 17 nt, Human
ccccugccccccagccu

SEQ ID NO: 1357656 - RNA, 11 nt, Human
ccccugccccc

SEQ ID NO: 1357657 - RNA, 23 nt, Human
ccccugccagggcagggccccag

SEQ ID NO: 1357658 - RNA, 19 nt, Human
ccccugccagggcagggcc

SEQ ID NO: 1357659 - RNA, 15 nt, Human
ccccugccagggcag

SEQ ID NO: 1357660 - RNA, 14 nt, Human
ccccugccagggca

SEQ ID NO: 1357661 - RNA, 20 nt, Human
ccccugccaccaggccaccu

SEQ ID NO: 1357662 - RNA, 12 nt, Human
ccccugccacca

SEQ ID NO: 1357663 - RNA, 15 nt, Human
ccccugccaccuccu

SEQ ID NO: 1357664 - RNA, 17 nt, Human
ccccugccaccuccugc

SEQ ID NO: 1357665 - RNA, 22 nt, Human
ccccucuuggagaagucucagc

SEQ ID NO: 1357666 - RNA, 14 nt, Human
ccccucuuggagaa

SEQ ID NO: 1357667 - RNA, 23 nt, Human
ccccucuuggagaagucucagcu

SEQ ID NO: 1357668 - RNA, 13 nt, Human
ccccugaauuuaa

SEQ ID NO: 1357669 - RNA, 16 nt, Human
ccccugaccacucaga

SEQ ID NO: 1357670 - RNA, 17 nt, Human
ccccugaauuuaaauag

SEQ ID NO: 1357671 - RNA, 12 nt, Human
ccagcuuuccug

SEQ ID NO: 1357672 - RNA, 23 nt, Human
ccagcuuguuuacaugcuuauuc

SEQ ID NO: 1357673 - RNA, 18 nt, Human
ccagcuuucccugccucu

SEQ ID NO: 1357674 - RNA, 14 nt, Human
ccagcuuucccugc

SEQ ID NO: 1357675 - RNA, 12 nt, Human
ccagcuuucccu

SEQ ID NO: 1357676 - RNA, 21 nt, Human
ccagcuuguuuacaugcuuau

SEQ ID NO: 1357677 - RNA, 15 nt, Human
ccagcucccccuccc

SEQ ID NO: 1357678 - RNA, 16 nt, Human
ccagcucccccucccu

SEQ ID NO: 1357679 - RNA, 23 nt, Human
ccagcucccaggaccacaggcuc

SEQ ID NO: 1357680 - RNA, 21 nt, Human
ccagcucccaggaccacaggc

SEQ ID NO: 1357681 - RNA, 20 nt, Human
ccagcucccaggaccacagg

SEQ ID NO: 1357682 - RNA, 13 nt, Human
ccagcucccagga

SEQ ID NO: 1357683 - RNA, 12 nt, Human
ccagcucccagg

SEQ ID NO: 1357684 - RNA, 22 nt, Human
ccagcucccaccuccccuuggg

SEQ ID NO: 1357685 - RNA, 19 nt, Human
ccagcucccaccuccccuu

SEQ ID NO: 1357686 - RNA, 15 nt, Human
ccagcucccaccucc

SEQ ID NO: 1357687 - RNA, 22 nt, Human
ccagcuccaaggggaaucagaa

SEQ ID NO: 1357688 - RNA, 20 nt, Human
ccagcuccaaccugcaaaga

SEQ ID NO: 1357689 - RNA, 15 nt, Human
ccagcuccaaccugc

SEQ ID NO: 1357690 - RNA, 14 nt, Human
ccagcuccaaccug

SEQ ID NO: 1357691 - RNA, 17 nt, Human
ccagcucaauggacugg

SEQ ID NO: 1357692 - RNA, 21 nt, Human
ccagcuagugacccacaugcc

SEQ ID NO: 1357693 - RNA, 22 nt, Human
ccagcuauguuauauugaaaaa

SEQ ID NO: 1357694 - RNA, 22 nt, Human
ccagcuagugacccacaugcca

SEQ ID NO: 1357695 - RNA, 20 nt, Human
ccagcuagugacccacaugc

SEQ ID NO: 1357696 - RNA, 18 nt, Human
ccagcuagugacccacau

SEQ ID NO: 1357697 - RNA, 14 nt, Human
ccagcuagugaccc

SEQ ID NO: 1357698 - RNA, 23 nt, Human
ccagcuaggaagagcaggacucc

SEQ ID NO: 1357699 - RNA, 17 nt, Human
ccagcuacuuccuccuc

SEQ ID NO: 1357700 - RNA, 15 nt, Human
ccagcuacuuccucc

SEQ ID NO: 1357701 - RNA, 14 nt, Human
ccagccccucuggu

SEQ ID NO: 1357702 - RNA, 13 nt, Human
ccagccccucugg

SEQ ID NO: 1357703 - RNA, 21 nt, Human
ccagcagacagagccaggaga

SEQ ID NO: 1357704 - RNA, 17 nt, Human
ccagcacuuccauggga

SEQ ID NO: 1357705 - RNA, 15 nt, Human
ccacucuaaagcaaa

SEQ ID NO: 1357706 - RNA, 16 nt, Human
ccacuccuuccugccc

SEQ ID NO: 1357707 - RNA, 18 nt, Human
ccacuccuuccugcccca

SEQ ID NO: 1357708 - RNA, 14 nt, Human
ccacuccuuccugc

SEQ ID NO: 1357709 - RNA, 13 nt, Human
ccacuccuuccug

SEQ ID NO: 1357710 - RNA, 22 nt, Human
ccacuccucugcugaccugcug

SEQ ID NO: 1357711 - RNA, 20 nt, Human
ccagcacuuguccagcugag

SEQ ID NO: 1357712 - RNA, 19 nt, Human
ccagcacuuguccagcuga

SEQ ID NO: 1357713 - RNA, 16 nt, Human
ccagcacuuguccagc

SEQ ID NO: 1357714 - RNA, 22 nt, Human
ccagcagacagagccaggagaa

SEQ ID NO: 1357715 - RNA, 20 nt, Human
ccagcagacagagccaggag

SEQ ID NO: 1357716 - RNA, 19 nt, Human
ccagcagacagagccagga

SEQ ID NO: 1357717 - RNA, 18 nt, Human
ccagcagacagagccagg

SEQ ID NO: 1357718 - RNA, 12 nt, Human
ccagcagaaaug

SEQ ID NO: 1357719 - RNA, 20 nt, Human
ccagcuuugcuaccaaagca

SEQ ID NO: 1357720 - RNA, 13 nt, Human
ccagcuuuucaaa

SEQ ID NO: 1357721 - RNA, 13 nt, Human
ccagcuuuuccca

SEQ ID NO: 1357722 - RNA, 23 nt, Human
ccagcuuuucccaaaagcccauu

SEQ ID NO: 1357723 - RNA, 17 nt, Human
ccagcagacagagccag

SEQ ID NO: 1357724 - RNA, 19 nt, Human
ccaguccuaucugggcuuc

SEQ ID NO: 1357725 - RNA, 21 nt, Human
ccaguccuaucugggcuuccu

SEQ ID NO: 1357726 - RNA, 18 nt, Human
ccaguccuaucugggcuu

SEQ ID NO: 1357727 - RNA, 17 nt, Human
ccaguccuaucugggcu

SEQ ID NO: 1357728 - RNA, 16 nt, Human
ccaguccuaucugggc

SEQ ID NO: 1357729 - RNA, 15 nt, Human
ccagucccagagcag

SEQ ID NO: 1357730 - RNA, 13 nt, Human
ccagucccagagc

SEQ ID NO: 1357731 - RNA, 14 nt, Human
ccaguccaguccua

SEQ ID NO: 1357732 - RNA, 17 nt, Human
ccaguccaccugaggaa

SEQ ID NO: 1357733 - RNA, 19 nt, Human
ccaguccaggcugccgugg

SEQ ID NO: 1357734 - RNA, 16 nt, Human
ccaguccaggcugccg

SEQ ID NO: 1357735 - RNA, 15 nt, Human
ccaguccaggcugcc

SEQ ID NO: 1357736 - RNA, 14 nt, Human
ccaguccaggcugc

SEQ ID NO: 1357737 - RNA, 13 nt, Human
ccaguccaggcug

SEQ ID NO: 1357738 - RNA, 15 nt, Human
ccagucaggcccagg

SEQ ID NO: 1357739 - RNA, 14 nt, Human
ccagucaggcccag

SEQ ID NO: 1357740 - RNA, 20 nt, Human
ccaggggggugaggagcugg

SEQ ID NO: 1357741 - RNA, 19 nt, Human
ccaggggggugaggagcug

SEQ ID NO: 1357742 - RNA, 17 nt, Human
ccaggggggugaggagc

SEQ ID NO: 1357743 - RNA, 21 nt, Human
ccaggauggaacacggccaca

SEQ ID NO: 1357744 - RNA, 18 nt, Human
ccaggaucguuuuuuccc

SEQ ID NO: 1357745 - RNA, 18 nt, Human
ccaggauagagacuggaa

SEQ ID NO: 1357746 - RNA, 16 nt, Human
ccaggauagagacugg

SEQ ID NO: 1357747 - RNA, 19 nt, Human
ccaggggagcagaggggca

SEQ ID NO: 1357748 - RNA, 20 nt, Human
ccaggggagcagaggggcag

SEQ ID NO: 1357749 - RNA, 15 nt, Human
ccaggggagcagagg

SEQ ID NO: 1357750 - RNA, 19 nt, Human
ccaggggaacacuggggac

SEQ ID NO: 1357751 - RNA, 17 nt, Human
ccaggcaggucugaagc

SEQ ID NO: 1357752 - RNA, 23 nt, Human
ccaggcugccucccuuguggcag

SEQ ID NO: 1357753 - RNA, 13 nt, Human
ccaggcugccucc

SEQ ID NO: 1357754 - RNA, 13 nt, Human
ccaggcugcucag

SEQ ID NO: 1357755 - RNA, 18 nt, Human
ccaggcugccguggggcc

SEQ ID NO: 1357756 - RNA, 15 nt, Human
ccaggcugccguggg

SEQ ID NO: 1357757 - RNA, 14 nt, Human
ccaggcugccgugg

SEQ ID NO: 1357758 - RNA, 21 nt, Human
ccaggcugccguccccuagag

SEQ ID NO: 1357759 - RNA, 14 nt, Human
ccaggcugccgucc

SEQ ID NO: 1357760 - RNA, 17 nt, Human
ccaggcugcucagggcu

SEQ ID NO: 1357761 - RNA, 19 nt, Human
ccaggcugcucagggcugg

SEQ ID NO: 1357762 - RNA, 17 nt, Human
ccaggcuggagugcagu

SEQ ID NO: 1357763 - RNA, 18 nt, Human
ccaggcuggagugcagug

SEQ ID NO: 1357764 - RNA, 12 nt, Human
ccaguugcaguc

SEQ ID NO: 1357765 - RNA, 18 nt, Human
ccaguugcacucagguga

SEQ ID NO: 1357766 - RNA, 14 nt, Human
ccaguugccuuuua

SEQ ID NO: 1357767 - RNA, 19 nt, Human
ccaguugcagucacucuag

SEQ ID NO: 1357768 - RNA, 15 nt, Human
ccaguugccaucugc

SEQ ID NO: 1357769 - RNA, 22 nt, Human
ccaguuggagcuccagccugac

SEQ ID NO: 1357770 - RNA, 19 nt, Human
ccaguuggagcuccagccu

SEQ ID NO: 1357771 - RNA, 16 nt, Human
ccaucccuccccaguu

SEQ ID NO: 1357772 - RNA, 22 nt, Human
ccauccccuugaggucucagcc

SEQ ID NO: 1357773 - RNA, 23 nt, Human
ccauccccuugaggucucagccc

SEQ ID NO: 1357774 - RNA, 13 nt, Human
ccaucccaugcug

SEQ ID NO: 1357775 - RNA, 13 nt, Human
ccauccccagcga

SEQ ID NO: 1357776 - RNA, 18 nt, Human
ccauccauggccagcagc

SEQ ID NO: 1357777 - RNA, 17 nt, Human
ccauccauggccagcag

SEQ ID NO: 1357778 - RNA, 16 nt, Human
ccauccauggccagca

SEQ ID NO: 1357779 - RNA, 15 nt, Human
ccauccauggccagc

SEQ ID NO: 1357780 - RNA, 14 nt, Human
ccauccauggccag

SEQ ID NO: 1357781 - RNA, 13 nt, Human
ccauccauggcca

SEQ ID NO: 1357782 - RNA, 15 nt, Human
ccaguuggaguuuuu

SEQ ID NO: 1357783 - RNA, 23 nt, Human
ccaguuggaguuuuuuguaccaa

SEQ ID NO: 1357784 - RNA, 16 nt, Human
ccauguagaaaauuug

SEQ ID NO: 1357785 - RNA, 15 nt, Human
ccauguagaaaauuu

SEQ ID NO: 1357786 - RNA, 16 nt, Human
ccauguacaugaagaa

SEQ ID NO: 1357787 - RNA, 23 nt, Human
ccauguaauggcaguuauauuuu

SEQ ID NO: 1357788 - RNA, 20 nt, Human
ccauguaauggcaguuauau

SEQ ID NO: 1357789 - RNA, 20 nt, Human
ccaugaugccucugucuucu

SEQ ID NO: 1357790 - RNA, 14 nt, Human
ccaugaugccucug

SEQ ID NO: 1357791 - RNA, 19 nt, Human
ccaugaguuccagaaagua

SEQ ID NO: 1357792 - RNA, 22 nt, Human
ccaugaucccuguguugucucu

SEQ ID NO: 1357793 - RNA, 17 nt, Human
ccaugaucccuguguug

SEQ ID NO: 1357794 - RNA, 23 nt, Human
ccauguccaaagaggcugccccu

SEQ ID NO: 1357795 - RNA, 16 nt, Human
ccaugaucccuguguu

SEQ ID NO: 1357796 - RNA, 14 nt, Human
ccaugaucccugug

SEQ ID NO: 1357797 - RNA, 23 nt, Human
ccaugaguuggggucuggcagcc

SEQ ID NO: 1357798 - RNA, 22 nt, Human
ccaugaguuggggucuggcagc

SEQ ID NO: 1357799 - RNA, 21 nt, Human
ccaugaguuggggucuggcag

SEQ ID NO: 1357800 - RNA, 19 nt, Human
ccauucuuccuaguuuucu

SEQ ID NO: 1357801 - RNA, 14 nt, Human
ccauucuuccuagu

SEQ ID NO: 1357802 - RNA, 20 nt, Human
ccauucuuucccaacaccuc

SEQ ID NO: 1357803 - RNA, 14 nt, Human
ccauucuuucccaa

SEQ ID NO: 1357804 - RNA, 20 nt, Human
ccauucuuccuaguuuucuc

SEQ ID NO: 1357805 - RNA, 12 nt, Human
ccauucuuuccc

SEQ ID NO: 1357806 - RNA, 13 nt, Human
ccauuucagagag

SEQ ID NO: 1357807 - RNA, 21 nt, Human
ccauuggcuauuuaaaacuug

SEQ ID NO: 1357808 - RNA, 20 nt, Human
ccauuggcuauuuaaaacuu

SEQ ID NO: 1357809 - RNA, 19 nt, Human
ccauuggcuauuuaaaacu

SEQ ID NO: 1357810 - RNA, 15 nt, Human
ccauuggaucucauu

SEQ ID NO: 1357811 - RNA, 13 nt, Human
cccacucugcucu

SEQ ID NO: 1357812 - RNA, 21 nt, Human
cccacucuccuaggcauucug

SEQ ID NO: 1357813 - RNA, 15 nt, Human
cccacucuccuaggc

SEQ ID NO: 1357814 - RNA, 14 nt, Human
cccacucuccuagg

SEQ ID NO: 1357815 - RNA, 12 nt, Human
cccacucuccua

SEQ ID NO: 1357816 - RNA, 23 nt, Human
cccacuccucugcugaccugcug

SEQ ID NO: 1357817 - RNA, 15 nt, Human
cccacugagaggaca

SEQ ID NO: 1357818 - RNA, 14 nt, Human
cccacugaccagaa

SEQ ID NO: 1357819 - RNA, 18 nt, Human
cccacucugcucugaugc

SEQ ID NO: 1357820 - RNA, 19 nt, Human
cccacucugcucugaugca

SEQ ID NO: 1357821 - RNA, 17 nt, Human
cccacucugcucugaug

SEQ ID NO: 1357822 - RNA, 16 nt, Human
cccacucugcucugau

SEQ ID NO: 1357823 - RNA, 15 nt, Human
cccacucugcucuga

SEQ ID NO: 1357824 - RNA, 14 nt, Human
cccacucugcucug

SEQ ID NO: 1357825 - RNA, 15 nt, Human
cccaccccugcacag

SEQ ID NO: 1357826 - RNA, 12 nt, Human
cccaccccugca

SEQ ID NO: 1357827 - RNA, 13 nt, Human
cccacccccaagg

SEQ ID NO: 1357828 - RNA, 17 nt, Human
cccaccccauucccgca

SEQ ID NO: 1357829 - RNA, 13 nt, Human
cccaccccauucc

SEQ ID NO: 1357830 - RNA, 15 nt, Human
cccaccccagggcag

SEQ ID NO: 1357831 - RNA, 18 nt, Human
cccaagagcaucaugccu

SEQ ID NO: 1357832 - RNA, 15 nt, Human
cccaacucuccccug

SEQ ID NO: 1357833 - RNA, 18 nt, Human
cccaacuccuuccagcua

SEQ ID NO: 1357834 - RNA, 16 nt, Human
cccaacuccuuccagc

SEQ ID NO: 1357835 - RNA, 15 nt, Human
cccaacuccuuccag

SEQ ID NO: 1357836 - RNA, 23 nt, Human
cccaacuacccccagcugugcuu

SEQ ID NO: 1357837 - RNA, 13 nt, Human
cccaacuccagaa

SEQ ID NO: 1357838 - RNA, 22 nt, Human
cccaccccaaccugcucuccuc

SEQ ID NO: 1357839 - RNA, 19 nt, Human
cccaccccaaccugcucuc

SEQ ID NO: 1357840 - RNA, 18 nt, Human
cccaccccaaccugcucu

SEQ ID NO: 1357841 - RNA, 21 nt, Human
cccacccaggccaggcaugug

SEQ ID NO: 1357842 - RNA, 17 nt, Human
cccacccaggccaggca

SEQ ID NO: 1357843 - RNA, 15 nt, Human
cccacccaggccagg

SEQ ID NO: 1357844 - RNA, 13 nt, Human
cccacccaggcca

SEQ ID NO: 1357845 - RNA, 23 nt, Human
cccacccagaugccccuuucugg

SEQ ID NO: 1357846 - RNA, 16 nt, Human
cccacccacuucugca

SEQ ID NO: 1357847 - RNA, 21 nt, Human
cccaagauugagcucucugcc

SEQ ID NO: 1357848 - RNA, 17 nt, Human
cccaagauugagcucuc

SEQ ID NO: 1357849 - RNA, 22 nt, Human
cccaagaugggcaucuuuugua

SEQ ID NO: 1357850 - RNA, 20 nt, Human
cccaagaugggcaucuuuug

SEQ ID NO: 1357851 - RNA, 22 nt, Human
cccaagagcaucaugccucuga

SEQ ID NO: 1357852 - RNA, 23 nt, Human
cccaagagcuacguauuuaauag

SEQ ID NO: 1357853 - RNA, 21 nt, Human
cccaagagcaucaugccucug

SEQ ID NO: 1357854 - RNA, 20 nt, Human
cccaagagcaucaugccucu

SEQ ID NO: 1357855 - RNA, 20 nt, Human
cccaagcaccugggauuaca

SEQ ID NO: 1357856 - RNA, 21 nt, Human
ccgcagcccccacccccaagg

SEQ ID NO: 1357857 - RNA, 15 nt, Human
ccgcagcccccaccc

SEQ ID NO: 1357858 - RNA, 23 nt, Human
ccgaagcuaacagggaaggcagg

SEQ ID NO: 1357859 - RNA, 21 nt, Human
ccgaagcuaacagggaaggca

SEQ ID NO: 1357860 - RNA, 18 nt, Human
ccgaagccgccuguggac

SEQ ID NO: 1357861 - RNA, 19 nt, Human
ccgaaggaaaagggcuuuc

SEQ ID NO: 1357862 - RNA, 21 nt, Human
cccuucuccccugcacuguaa

SEQ ID NO: 1357863 - RNA, 18 nt, Human
cccuucuccccugcacug

SEQ ID NO: 1357864 - RNA, 16 nt, Human
cccuucuccccugcac

SEQ ID NO: 1357865 - RNA, 15 nt, Human
cccuucuccccugca

SEQ ID NO: 1357866 - RNA, 14 nt, Human
cccuucuccccugc

SEQ ID NO: 1357867 - RNA, 20 nt, Human
cccuucucccacucuccuag

SEQ ID NO: 1357868 - RNA, 14 nt, Human
cccuucucccacuc

SEQ ID NO: 1357869 - RNA, 13 nt, Human
cccuccuucccaa

SEQ ID NO: 1357870 - RNA, 21 nt, Human
cccuccuucccaagugagucu

SEQ ID NO: 1357871 - RNA, 20 nt, Human
cccuccuguugggagagggc

SEQ ID NO: 1357872 - RNA, 20 nt, Human
cccuccugugcucagcccug

SEQ ID NO: 1357873 - RNA, 21 nt, Human
cccuccugugcucagcccuga

SEQ ID NO: 1357874 - RNA, 11 nt, Human
cccuccuuccu

SEQ ID NO: 1357875 - RNA, 14 nt, Human
cccuccuuccuaaa

SEQ ID NO: 1357876 - RNA, 13 nt, Human
cccuucuauaccc

SEQ ID NO: 1357877 - RNA, 18 nt, Human
cccuucuauacccaccca

SEQ ID NO: 1357878 - RNA, 19 nt, Human
cccuucuauacccacccag

SEQ ID NO: 1357879 - RNA, 20 nt, Human
cccuucuauacccacccaga

SEQ ID NO: 1357880 - RNA, 23 nt, Human
cccuucuauuuggggcuugauga

SEQ ID NO: 1357881 - RNA, 21 nt, Human
cccuucuauacccacccagaa

SEQ ID NO: 1357882 - RNA, 23 nt, Human
cccuucuccauccacaugggagc

SEQ ID NO: 1357883 - RNA, 21 nt, Human
cccuucuccauggcccugcca

SEQ ID NO: 1357884 - RNA, 15 nt, Human
ccggcacccccugca

SEQ ID NO: 1357885 - RNA, 14 nt, Human
ccggcacccccugc

SEQ ID NO: 1357886 - RNA, 20 nt, Human
ccggcacagggucugcucuu

SEQ ID NO: 1357887 - RNA, 19 nt, Human
ccggcacagggucugcucu

SEQ ID NO: 1357888 - RNA, 14 nt, Human
ccguaauuuaacuu

SEQ ID NO: 1357889 - RNA, 13 nt, Human
ccguaauuuaacu

SEQ ID NO: 1357890 - RNA, 12 nt, Human
ccguaauuuaac

SEQ ID NO: 1357891 - RNA, 15 nt, Human
ccguccugccugugg

SEQ ID NO: 1357892 - RNA, 13 nt, Human
ccguccugccugu

SEQ ID NO: 1357893 - RNA, 18 nt, Human
ccguccccuagaguccca

SEQ ID NO: 1357894 - RNA, 15 nt, Human
ccguccccuagaguc

SEQ ID NO: 1357895 - RNA, 24 nt, Human
ccguagacgugcacgcacacuguc

SEQ ID NO: 1357896 - RNA, 15 nt, Human
ccgguguucuaagau

SEQ ID NO: 1357897 - RNA, 11 nt, Human
ccggccagccc

SEQ ID NO: 1357898 - RNA, 23 nt, Human
ccggcagggcgggcagagggcug

SEQ ID NO: 1357899 - RNA, 21 nt, Human
ccggcagggcgggcagagggc

SEQ ID NO: 1357900 - RNA, 16 nt, Human
ccggcagggcgggcag

SEQ ID NO: 1357901 - RNA, 16 nt, Human
ccggcagcagccccca

SEQ ID NO: 1357902 - RNA, 20 nt, Human
ccggcacccccugcagcuug

SEQ ID NO: 1357903 - RNA, 21 nt, Human
ccggcacccccugcagcuugu

SEQ ID NO: 1357904 - RNA, 19 nt, Human
ccggcacccccugcagcuu

SEQ ID NO: 1357905 - RNA, 18 nt, Human
ccggcacccccugcagcu

SEQ ID NO: 1357906 - RNA, 17 nt, Human
ccggcacccccugcagc

SEQ ID NO: 1357907 - RNA, 16 nt, Human
ccggcacccccugcag

SEQ ID NO: 1357908 - RNA, 11 nt, Human
ccggcagggcg

SEQ ID NO: 1357909 - RNA, 20 nt, Human
ccggcagcuucugcccccug

SEQ ID NO: 1357910 - RNA, 19 nt, Human
ccggcagcuucugcccccu

SEQ ID NO: 1357911 - RNA, 18 nt, Human
ccggcagcuucugccccc

SEQ ID NO: 1357912 - RNA, 22 nt, Human
ccggcagcuucugcccccugca

SEQ ID NO: 1357913 - RNA, 13 nt, Human
ccuaauguguuua

SEQ ID NO: 1357914 - RNA, 13 nt, Human
ccuagcccucuca

SEQ ID NO: 1357915 - RNA, 16 nt, Human
ccuaauucaauucaaa

SEQ ID NO: 1357916 - RNA, 20 nt, Human
ccuaauucaauucaaagcug

SEQ ID NO: 1357917 - RNA, 22 nt, Human
ccgugagccaaucccucaccuu

SEQ ID NO: 1357918 - RNA, 15 nt, Human
ccgugagcauguuug

SEQ ID NO: 1357919 - RNA, 16 nt, Human
ccgugacgucugggug

SEQ ID NO: 1357920 - RNA, 14 nt, Human
ccgugacgucuggg

SEQ ID NO: 1357921 - RNA, 19 nt, Human
ccgugaaugggugcccaca

SEQ ID NO: 1357922 - RNA, 16 nt, Human
ccgucuuuuccuguuu

SEQ ID NO: 1357923 - RNA, 19 nt, Human
ccgucuuucuuuuauacug

SEQ ID NO: 1357924 - RNA, 14 nt, Human
ccguccugccugug

SEQ ID NO: 1357925 - RNA, 12 nt, Human
ccuaauaaagcu

SEQ ID NO: 1357926 - RNA, 13 nt, Human
ccuaauaaagcug

SEQ ID NO: 1357927 - RNA, 17 nt, Human
ccucgcuggacucucag

SEQ ID NO: 1357928 - RNA, 15 nt, Human
ccucgccccuggcag

SEQ ID NO: 1357929 - RNA, 16 nt, Human
ccucgccccuggcaga

SEQ ID NO: 1357930 - RNA, 21 nt, Human
ccucgcccagcggcaucaggc

SEQ ID NO: 1357931 - RNA, 20 nt, Human
ccucgcccagcggcaucagg

SEQ ID NO: 1357932 - RNA, 18 nt, Human
ccucgcuggacucucagu

SEQ ID NO: 1357933 - RNA, 23 nt, Human
ccucgcaacccgugccaagucca

SEQ ID NO: 1357934 - RNA, 20 nt, Human
ccucgaaacacagaaaccuu

SEQ ID NO: 1357935 - RNA, 16 nt, Human
ccucgaaacacagaaa

SEQ ID NO: 1357936 - RNA, 21 nt, Human
ccuccuuuuuccaugcccuaa

SEQ ID NO: 1357937 - RNA, 13 nt, Human
ccuccuuuuucca

SEQ ID NO: 1357938 - RNA, 16 nt, Human
ccuccucacccccagc

SEQ ID NO: 1357939 - RNA, 14 nt, Human
ccuccucaccccca

SEQ ID NO: 1357940 - RNA, 13 nt, Human
ccuccucaccccc

SEQ ID NO: 1357941 - RNA, 21 nt, Human
ccucccaggguuuuaacuuug

SEQ ID NO: 1357942 - RNA, 19 nt, Human
ccucccaggguuuuaacuu

SEQ ID NO: 1357943 - RNA, 18 nt, Human
ccucccaggguuuuaacu

SEQ ID NO: 1357944 - RNA, 13 nt, Human
ccucccaggguuu

SEQ ID NO: 1357945 - RNA, 12 nt, Human
ccucccaggguu

SEQ ID NO: 1357946 - RNA, 21 nt, Human
ccucauuuuuauaaugucccu

SEQ ID NO: 1357947 - RNA, 15 nt, Human
ccucccauccagggc

SEQ ID NO: 1357948 - RNA, 23 nt, Human
ccucauuauuuauguccaggugu

SEQ ID NO: 1357949 - RNA, 13 nt, Human
ccucaagucuuuc

SEQ ID NO: 1357950 - RNA, 23 nt, Human
ccucaagguuuuagguucuaaag

SEQ ID NO: 1357951 - RNA, 22 nt, Human
ccucaagguuuuagguucuaaa

SEQ ID NO: 1357952 - RNA, 20 nt, Human
ccucaagguuuuagguucua

SEQ ID NO: 1357953 - RNA, 12 nt, Human
ccucaaccuccc

SEQ ID NO: 1357954 - RNA, 16 nt, Human
ccucaagaaauaaaag

SEQ ID NO: 1357955 - RNA, 15 nt, Human
ccucaacugccuacu

SEQ ID NO: 1357956 - RNA, 14 nt, Human
ccucaacugccuac

SEQ ID NO: 1357957 - RNA, 14 nt, Human
ccucaaccucccaa

SEQ ID NO: 1357958 - RNA, 19 nt, Human
ccucaagucuuucucuuuc

SEQ ID NO: 1357959 - RNA, 22 nt, Human
ccucagccuugccagagaucca

SEQ ID NO: 1357960 - RNA, 21 nt, Human
ccucaagucuuucucuuuccc

SEQ ID NO: 1357961 - RNA, 15 nt, Human
ccucaagucuuucuc

SEQ ID NO: 1357962 - RNA, 14 nt, Human
ccucaagucuuucu

SEQ ID NO: 1357963 - RNA, 15 nt, Human
ccucagcucccacaa

SEQ ID NO: 1357964 - RNA, 20 nt, Human
ccucagcucccacaagccuc

SEQ ID NO: 1357965 - RNA, 14 nt, Human
ccucagcucccaca

SEQ ID NO: 1357966 - RNA, 17 nt, Human
ccucagcucucaguugc

SEQ ID NO: 1357967 - RNA, 15 nt, Human
ccucaaaucguccag

SEQ ID NO: 1357968 - RNA, 21 nt, Human
ccucaaauaaaaagugcuuuu

SEQ ID NO: 1357969 - RNA, 22 nt, Human
ccucaaauaaaaagugcuuuug

SEQ ID NO: 1357970 - RNA, 18 nt, Human
ccucaaauaaaaagugcu

SEQ ID NO: 1357971 - RNA, 17 nt, Human
ccucaaauuacuuugug

SEQ ID NO: 1357972 - RNA, 14 nt, Human
ccucaaccccuccc

SEQ ID NO: 1357973 - RNA, 23 nt, Human
ccucaaccccuccccuccauccc

SEQ ID NO: 1357974 - RNA, 13 nt, Human
ccucaaccucauc

SEQ ID NO: 1357975 - RNA, 14 nt, Human
ccucaaccucaucc

SEQ ID NO: 1357976 - RNA, 19 nt, Human
ccugucucucagggccagg

SEQ ID NO: 1357977 - RNA, 19 nt, Human
ccuguaaacuuuaucacuu

SEQ ID NO: 1357978 - RNA, 16 nt, Human
ccuguaacaagccaga

SEQ ID NO: 1357979 - RNA, 20 nt, Human
ccuguaaacuuuaucacuua

SEQ ID NO: 1357980 - RNA, 12 nt, Human
ccuguaaacuuu

SEQ ID NO: 1357981 - RNA, 13 nt, Human
ccuguaaaccuga

SEQ ID NO: 1357982 - RNA, 12 nt, Human
ccuguaaaccug

SEQ ID NO: 1357983 - RNA, 21 nt, Human
ccuguaaccucuucagaggcc

SEQ ID NO: 1357984 - RNA, 16 nt, Human
ccuguaaccucuucag

SEQ ID NO: 1357985 - RNA, 23 nt, Human
ccuguaacauacuggccuggacu

SEQ ID NO: 1357986 - RNA, 19 nt, Human
ccuguaacauacuggccug

SEQ ID NO: 1357987 - RNA, 10 nt, Human
ccuguaacuu

SEQ ID NO: 1357988 - RNA, 21 nt, Human
ccugucucccuccucugcccg

SEQ ID NO: 1357989 - RNA, 21 nt, Human
ccugguggggcagcuccucug

SEQ ID NO: 1357990 - RNA, 23 nt, Human
ccugguggggcagcuccucuguc

SEQ ID NO: 1357991 - RNA, 19 nt, Human
ccugguggggcagcuccuc

SEQ ID NO: 1357992 - RNA, 18 nt, Human
ccugguggggcagcuccu

SEQ ID NO: 1357993 - RNA, 21 nt, Human
ccuggugguauuuucaauagc

SEQ ID NO: 1357994 - RNA, 19 nt, Human
ccuggugguauuuucaaua

SEQ ID NO: 1357995 - RNA, 18 nt, Human
ccuggugguauuuucaau

SEQ ID NO: 1357996 - RNA, 16 nt, Human
ccuggugguauuuuca

SEQ ID NO: 1357997 - RNA, 18 nt, Human
ccuggugguggcucggga

SEQ ID NO: 1357998 - RNA, 16 nt, Human
ccugguggggcagcuc

SEQ ID NO: 1357999 - RNA, 15 nt, Human
ccugguggggcagcu

SEQ ID NO: 1358000 - RNA, 14 nt, Human
ccugguggggcagc

SEQ ID NO: 1358001 - RNA, 19 nt, Human
ccuggggcuggccucccaa

SEQ ID NO: 1358002 - RNA, 17 nt, Human
ccuggggcuggccuccc

SEQ ID NO: 1358003 - RNA, 16 nt, Human
ccuggggcuggccucc

SEQ ID NO: 1358004 - RNA, 15 nt, Human
ccuggggcuggccuc

SEQ ID NO: 1358005 - RNA, 22 nt, Human
ccuggggcucuaacgccugagc

SEQ ID NO: 1358006 - RNA, 23 nt, Human
ccuggggcucuaacgccugagcc

SEQ ID NO: 1358007 - RNA, 21 nt, Human
ccuggggcucuaacgccugag

SEQ ID NO: 1358008 - RNA, 20 nt, Human
ccuggggcucuaacgccuga

SEQ ID NO: 1358009 - RNA, 22 nt, Human
ccugguucccguuucuccaccu

SEQ ID NO: 1358010 - RNA, 13 nt, Human
ccugguucccguu

SEQ ID NO: 1358011 - RNA, 20 nt, Human
ccugguuaaauaaggcaggg

SEQ ID NO: 1358012 - RNA, 21 nt, Human
ccuggugguggcucgggaggc

SEQ ID NO: 1358013 - RNA, 15 nt, Human
ccugggcuccuggac

SEQ ID NO: 1358014 - RNA, 16 nt, Human
ccugggcuccuggacc

SEQ ID NO: 1358015 - RNA, 14 nt, Human
ccugggcuccugga

SEQ ID NO: 1358016 - RNA, 16 nt, Human
ccugggcgcugguccu

SEQ ID NO: 1358017 - RNA, 18 nt, Human
ccugggccuugggcuccg

SEQ ID NO: 1358018 - RNA, 18 nt, Human
ccuggccuucaguguacc

SEQ ID NO: 1358019 - RNA, 11 nt, Human
ccuggccuuca

SEQ ID NO: 1358020 - RNA, 15 nt, Human
ccugggcgcuggucc

SEQ ID NO: 1358021 - RNA, 13 nt, Human
ccugggcugggaa

SEQ ID NO: 1358022 - RNA, 14 nt, Human
ccugggcugggaaa

SEQ ID NO: 1358023 - RNA, 20 nt, Human
ccugggcuggaaucaggaau

SEQ ID NO: 1358024 - RNA, 14 nt, Human
ccugggcuggaauc

SEQ ID NO: 1358025 - RNA, 12 nt, Human
ccuggggcucua

SEQ ID NO: 1358026 - RNA, 15 nt, Human
ccuggccuccugccu

SEQ ID NO: 1358027 - RNA, 14 nt, Human
ccuggccuccugcc

SEQ ID NO: 1358028 - RNA, 13 nt, Human
ccuggccuccugc

SEQ ID NO: 1358029 - RNA, 20 nt, Human
ccuggccuccccugccacca

SEQ ID NO: 1358030 - RNA, 19 nt, Human
ccuggccuccccugccacc

SEQ ID NO: 1358031 - RNA, 18 nt, Human
ccuggccuccccugccac

SEQ ID NO: 1358032 - RNA, 17 nt, Human
ccuggccuccccugcca

SEQ ID NO: 1358033 - RNA, 15 nt, Human
ccuggccuccccugc

SEQ ID NO: 1358034 - RNA, 18 nt, Human
ccuggccucccccacuuu

SEQ ID NO: 1358035 - RNA, 17 nt, Human
ccuggccucccccacuu

SEQ ID NO: 1358036 - RNA, 14 nt, Human
ccuggccuccccca

SEQ ID NO: 1358037 - RNA, 12 nt, Human
ccuggccccucu

SEQ ID NO: 1358038 - RNA, 18 nt, Human
ccuggauggggcaggcca

SEQ ID NO: 1358039 - RNA, 18 nt, Human
ccugagggucuguagguu

SEQ ID NO: 1358040 - RNA, 13 nt, Human
ccugagggucugu

SEQ ID NO: 1358041 - RNA, 12 nt, Human
ccugagggucug

SEQ ID NO: 1358042 - RNA, 21 nt, Human
ccugagggaaaggccagcacu

SEQ ID NO: 1358043 - RNA, 22 nt, Human
ccugagggaaaggccagcacuc

SEQ ID NO: 1358044 - RNA, 20 nt, Human
ccugagggaaaggccagcac

SEQ ID NO: 1358045 - RNA, 19 nt, Human
ccugagggaaaggccagca

SEQ ID NO: 1358046 - RNA, 18 nt, Human
ccugagggaaaggccagc

SEQ ID NO: 1358047 - RNA, 13 nt, Human
ccugagggaaagg

SEQ ID NO: 1358048 - RNA, 22 nt, Human
ccugaggcuuuggauuugacau

SEQ ID NO: 1358049 - RNA, 20 nt, Human
ccugaggcuuuggauuugac

SEQ ID NO: 1358050 - RNA, 22 nt, Human
ccugaggucaggaguucaagac

SEQ ID NO: 1358051 - RNA, 19 nt, Human
ccugagggucuguagguug

SEQ ID NO: 1358052 - RNA, 17 nt, Human
ccugaggcuguggucac

SEQ ID NO: 1358053 - RNA, 16 nt, Human
ccugaggcugugguca

SEQ ID NO: 1358054 - RNA, 23 nt, Human
ccugagauuuauuaaagaaaaaa

SEQ ID NO: 1358055 - RNA, 22 nt, Human
ccugagauuuauuaaagaaaaa

SEQ ID NO: 1358056 - RNA, 21 nt, Human
ccugagauuuauuaaagaaaa

SEQ ID NO: 1358057 - RNA, 19 nt, Human
ccugagauuuauuaaagaa

SEQ ID NO: 1358058 - RNA, 15 nt, Human
ccugagauuuauuaa

SEQ ID NO: 1358059 - RNA, 14 nt, Human
ccugagauuuauua

SEQ ID NO: 1358060 - RNA, 18 nt, Human
ccugagaugggcuuccca

SEQ ID NO: 1358061 - RNA, 17 nt, Human
ccugagauucagauguc

SEQ ID NO: 1358062 - RNA, 21 nt, Human
ccugagaugggcuucccaagg

SEQ ID NO: 1358063 - RNA, 22 nt, Human
ccugacccucaucuuucuucca

SEQ ID NO: 1358064 - RNA, 19 nt, Human
ccugacccucaucuuucuu

SEQ ID NO: 1358065 - RNA, 15 nt, Human
ccugaccccugcuca

SEQ ID NO: 1358066 - RNA, 14 nt, Human
ccugaccccugcuc

SEQ ID NO: 1358067 - RNA, 16 nt, Human
ccugaccccugcucag

SEQ ID NO: 1358068 - RNA, 18 nt, Human
ccugacccucaucuuucu

SEQ ID NO: 1358069 - RNA, 20 nt, Human
ccugaguugcuuuucagcug

SEQ ID NO: 1358070 - RNA, 23 nt, Human
ccugcaggaucucaccaggcagc

SEQ ID NO: 1358071 - RNA, 22 nt, Human
ccugcaggaucucaccaggcag

SEQ ID NO: 1358072 - RNA, 22 nt, Human
ccucggccucccaaagugcugg

SEQ ID NO: 1358073 - RNA, 17 nt, Human
ccucuuucuucccauga

SEQ ID NO: 1358074 - RNA, 23 nt, Human
ccugaccccaaguuauccaccug

SEQ ID NO: 1358075 - RNA, 22 nt, Human
ccugccauuguagcgucuuucu

SEQ ID NO: 1358076 - RNA, 16 nt, Human
ccugccucagccuccc

SEQ ID NO: 1358077 - RNA, 14 nt, Human
ccugccucucccag

SEQ ID NO: 1358078 - RNA, 23 nt, Human
ccugccucucaucaacugaauga

SEQ ID NO: 1358079 - RNA, 12 nt, Human
ccugccucagga

SEQ ID NO: 1358080 - RNA, 21 nt, Human
ccugccucucccaggcagggg

SEQ ID NO: 1358081 - RNA, 18 nt, Human
ccugccucucccaggcag

SEQ ID NO: 1358082 - RNA, 15 nt, Human
ccugccucucccagg

SEQ ID NO: 1358083 - RNA, 13 nt, Human
ccugccucucugc

SEQ ID NO: 1358084 - RNA, 14 nt, Human
ccugccucucugca

SEQ ID NO: 1358085 - RNA, 15 nt, Human
ccugccucucugcag

SEQ ID NO: 1358086 - RNA, 22 nt, Human
cucaaagguuuggaaggagcag

SEQ ID NO: 1358087 - RNA, 23 nt, Human
cucaaagguuuggaaggagcaga

SEQ ID NO: 1358088 - RNA, 19 nt, Human
cucaaagguuuggaaggag

SEQ ID NO: 1358089 - RNA, 18 nt, Human
cucaaagguuuggaagga

SEQ ID NO: 1358090 - RNA, 17 nt, Human
cucaaagguuuggaagg

SEQ ID NO: 1358091 - RNA, 20 nt, Human
cucaaagcaugggauuauua

SEQ ID NO: 1358092 - RNA, 19 nt, Human
cucaaagcaagcauucaga

SEQ ID NO: 1358093 - RNA, 18 nt, Human
cucaaagagggagugcau

SEQ ID NO: 1358094 - RNA, 17 nt, Human
cucaaagaaaguguauu

SEQ ID NO: 1358095 - RNA, 16 nt, Human
cucaaagaaaguguau

SEQ ID NO: 1358096 - RNA, 13 nt, Human
cucaaagaaagug

SEQ ID NO: 1358097 - RNA, 22 nt, Human
cucaaacugaggaauuucaccu

SEQ ID NO: 1358098 - RNA, 19 nt, Human
cucaaacugaggaauuuca

SEQ ID NO: 1358099 - RNA, 14 nt, Human
cucaaaacaaaggc

SEQ ID NO: 1358100 - RNA, 22 nt, Human
cuauuuuuggcagucugaauuu

SEQ ID NO: 1358101 - RNA, 20 nt, Human
cuauuuuucuaacuacaaag

SEQ ID NO: 1358102 - RNA, 15 nt, Human
cuauuuuucuaacua

SEQ ID NO: 1358103 - RNA, 12 nt, Human
cuauuuuucuaa

SEQ ID NO: 1358104 - RNA, 13 nt, Human
cucaaaacaaagg

SEQ ID NO: 1358105 - RNA, 21 nt, Human
cuauuuuuggcagucugaauu

SEQ ID NO: 1358106 - RNA, 18 nt, Human
cuauuuuuggcagucuga

SEQ ID NO: 1358107 - RNA, 20 nt, Human
cuauuuuuggagguuuauua

SEQ ID NO: 1358108 - RNA, 13 nt, Human
cuauuuuuggagg

SEQ ID NO: 1358109 - RNA, 14 nt, Human
cuauuuuuaucuga

SEQ ID NO: 1358110 - RNA, 14 nt, Human
cuauuuuucagaau

SEQ ID NO: 1358111 - RNA, 17 nt, Human
cuauuuugugaagccau

SEQ ID NO: 1358112 - RNA, 18 nt, Human
cuaugucauuucauuucc

SEQ ID NO: 1358113 - RNA, 16 nt, Human
cuaugucauuucauuu

SEQ ID NO: 1358114 - RNA, 17 nt, Human
cuaucucugugugcaca

SEQ ID NO: 1358115 - RNA, 18 nt, Human
cuaucucccugccuccug

SEQ ID NO: 1358116 - RNA, 17 nt, Human
cuaucucccugccuccu

SEQ ID NO: 1358117 - RNA, 15 nt, Human
cuaucucccugccuc

SEQ ID NO: 1358118 - RNA, 16 nt, Human
cuaucugggaagcuau

SEQ ID NO: 1358119 - RNA, 21 nt, Human
cuaucucugugugcacaaaua

SEQ ID NO: 1358120 - RNA, 13 nt, Human
cucacacaggcau

SEQ ID NO: 1358121 - RNA, 12 nt, Human
cucacacaggca

SEQ ID NO: 1358122 - RNA, 22 nt, Human
cucacacaggcauuuccugggu

SEQ ID NO: 1358123 - RNA, 21 nt, Human
cucacacaggcauuuccuggg

SEQ ID NO: 1358124 - RNA, 23 nt, Human
cucacacaggcauuuccugggug

SEQ ID NO: 1358125 - RNA, 23 nt, Human
cucacacacccugucugccccgc

SEQ ID NO: 1358126 - RNA, 20 nt, Human
cucacaaguggguaccccca

SEQ ID NO: 1358127 - RNA, 21 nt, Human
cucacaaguggguacccccag

SEQ ID NO: 1358128 - RNA, 19 nt, Human
cucacaaguggguaccccc

SEQ ID NO: 1358129 - RNA, 21 nt, Human
cucacaaggcagcaaggcccg

SEQ ID NO: 1358130 - RNA, 20 nt, Human
cucacaaggcagcaaggccc

SEQ ID NO: 1358131 - RNA, 19 nt, Human
cucacaaggcagcaaggcc

SEQ ID NO: 1358132 - RNA, 17 nt, Human
cucacaaggcagcaagg

SEQ ID NO: 1358133 - RNA, 16 nt, Human
cucacaaggcagcaag

SEQ ID NO: 1358134 - RNA, 15 nt, Human
cucacaaggcagcaa

SEQ ID NO: 1358135 - RNA, 14 nt, Human
cucacaaggcagca

SEQ ID NO: 1358136 - RNA, 13 nt, Human
cucacaaggcagc

SEQ ID NO: 1358137 - RNA, 19 nt, Human
cucaaauaaaaagugcuuu

SEQ ID NO: 1358138 - RNA, 21 nt, Human
cucaaauaaaaagugcuuuug

SEQ ID NO: 1358139 - RNA, 17 nt, Human
cucacaacagcugccug

SEQ ID NO: 1358140 - RNA, 21 nt, Human
cucacccgccccacucccucc

SEQ ID NO: 1358141 - RNA, 15 nt, Human
cucacccugccuuau

SEQ ID NO: 1358142 - RNA, 14 nt, Human
cucacccugccuua

SEQ ID NO: 1358143 - RNA, 13 nt, Human
cucacccugccuu

SEQ ID NO: 1358144 - RNA, 15 nt, Human
cucacccuggaggca

SEQ ID NO: 1358145 - RNA, 21 nt, Human
cucacccugccuuaucuugca

SEQ ID NO: 1358146 - RNA, 12 nt, Human
cucaccuggacu

SEQ ID NO: 1358147 - RNA, 20 nt, Human
cucaccugcacuaacagagu

SEQ ID NO: 1358148 - RNA, 17 nt, Human
cucaccugcacuaacag

SEQ ID NO: 1358149 - RNA, 23 nt, Human
cucaccucuagguccccauacuc

SEQ ID NO: 1358150 - RNA, 22 nt, Human
cucaccucuagguccccauacu

SEQ ID NO: 1358151 - RNA, 19 nt, Human
cucaccugagucacccuac

SEQ ID NO: 1358152 - RNA, 21 nt, Human
cucaccggcucucaccuggcc

SEQ ID NO: 1358153 - RNA, 13 nt, Human
cucaccggcucuc

SEQ ID NO: 1358154 - RNA, 17 nt, Human
cucaccuuggcaccaga

SEQ ID NO: 1358155 - RNA, 16 nt, Human
cucaccuuggcaccag

SEQ ID NO: 1358156 - RNA, 21 nt, Human
cucaccuucugaguacagagu

SEQ ID NO: 1358157 - RNA, 14 nt, Human
cucaccuucugagu

SEQ ID NO: 1358158 - RNA, 17 nt, Human
cucaccuggcccugcuu

SEQ ID NO: 1358159 - RNA, 13 nt, Human
cucaccuggacuu

SEQ ID NO: 1358160 - RNA, 20 nt, Human
cucacuucugggcuucaucu

SEQ ID NO: 1358161 - RNA, 12 nt, Human
cucacuucaggu

SEQ ID NO: 1358162 - RNA, 19 nt, Human
cucaccuuggcaccagaca

SEQ ID NO: 1358163 - RNA, 21 nt, Human
cucacuuuucccacuccaagc

SEQ ID NO: 1358164 - RNA, 17 nt, Human
cucacuuuucccacucc

SEQ ID NO: 1358165 - RNA, 16 nt, Human
cucacuuuucccacuc

SEQ ID NO: 1358166 - RNA, 15 nt, Human
cucacuuuucccacu

SEQ ID NO: 1358167 - RNA, 14 nt, Human
cucacuuuucccac

SEQ ID NO: 1358168 - RNA, 12 nt, Human
cucacuuuuccc

SEQ ID NO: 1358169 - RNA, 22 nt, Human
cucacuuuuaaugaacaaaugg

SEQ ID NO: 1358170 - RNA, 21 nt, Human
cucacuuuuaaugaacaaaug

SEQ ID NO: 1358171 - RNA, 20 nt, Human
cucacuuuccuccugaggcu

SEQ ID NO: 1358172 - RNA, 18 nt, Human
cucacuuguuuuauuuaa

SEQ ID NO: 1358173 - RNA, 22 nt, Human
cucagaagugcaucuggagaga

SEQ ID NO: 1358174 - RNA, 19 nt, Human
cucagaaguuucuucuuua

SEQ ID NO: 1358175 - RNA, 16 nt, Human
cucagaaguuucuucu

SEQ ID NO: 1358176 - RNA, 21 nt, Human
cucagaagugcaucuggagag

SEQ ID NO: 1358177 - RNA, 13 nt, Human
cucagaaguaaag

SEQ ID NO: 1358178 - RNA, 12 nt, Human
cucagaaguaaa

SEQ ID NO: 1358179 - RNA, 11 nt, Human
cucagaaguaa

SEQ ID NO: 1358180 - RNA, 18 nt, Human
cucagaaagugccugaca

SEQ ID NO: 1358181 - RNA, 17 nt, Human
cucagaaagugccugac

SEQ ID NO: 1358182 - RNA, 16 nt, Human
cucagaaagugccuga

SEQ ID NO: 1358183 - RNA, 15 nt, Human
cucagaaagugccug

SEQ ID NO: 1358184 - RNA, 10 nt, Human
cucagaaagu

SEQ ID NO: 1358185 - RNA, 20 nt, Human
cucagaaaauaucccuccug

SEQ ID NO: 1358186 - RNA, 18 nt, Human
cucacuuuucccacucca

SEQ ID NO: 1358187 - RNA, 23 nt, Human
cucagaaaacaaggaugaauuaa

SEQ ID NO: 1358188 - RNA, 19 nt, Human
cucagaaaacaaggaugaa

SEQ ID NO: 1358189 - RNA, 23 nt, Human
cuagggggagccccuucugcuca

SEQ ID NO: 1358190 - RNA, 23 nt, Human
cuagggaggcauggucugcccuc

SEQ ID NO: 1358191 - RNA, 22 nt, Human
cuagggaggcauggucugcccu

SEQ ID NO: 1358192 - RNA, 17 nt, Human
cuagggagccauuugag

SEQ ID NO: 1358193 - RNA, 18 nt, Human
cuagggagccauuugaga

SEQ ID NO: 1358194 - RNA, 14 nt, Human
cuagggagccaugu

SEQ ID NO: 1358195 - RNA, 21 nt, Human
cuaggcugacaccuaacucuu

SEQ ID NO: 1358196 - RNA, 13 nt, Human
cuaggcuccaccc

SEQ ID NO: 1358197 - RNA, 15 nt, Human
cuaggcuaggguggg

SEQ ID NO: 1358198 - RNA, 23 nt, Human
cuaggcugcauugaaaagagcug

SEQ ID NO: 1358199 - RNA, 22 nt, Human
cuaggcucugucuggaagaugg

SEQ ID NO: 1358200 - RNA, 15 nt, Human
cuaggcucugucugg

SEQ ID NO: 1358201 - RNA, 21 nt, Human
cuaggguacauggugcuggga

SEQ ID NO: 1358202 - RNA, 17 nt, Human
cuaggguacauggugcu

SEQ ID NO: 1358203 - RNA, 15 nt, Human
cuaguucuagaaaaa

SEQ ID NO: 1358204 - RNA, 14 nt, Human
cuaguucuagaaaa

SEQ ID NO: 1358205 - RNA, 13 nt, Human
cuaguucugccag

SEQ ID NO: 1358206 - RNA, 15 nt, Human
cuaggguggggagag

SEQ ID NO: 1358207 - RNA, 23 nt, Human
cuaguucuagaaaaacaggcacu

SEQ ID NO: 1358208 - RNA, 16 nt, Human
cuaguucuagaaaaac

SEQ ID NO: 1358209 - RNA, 14 nt, Human
cuaguucuguagaa

SEQ ID NO: 1358210 - RNA, 16 nt, Human
cuaguucugccaggag

SEQ ID NO: 1358211 - RNA, 15 nt, Human
cuaguucugccagga

SEQ ID NO: 1358212 - RNA, 14 nt, Human
cuaguucugccagg

SEQ ID NO: 1358213 - RNA, 17 nt, Human
cuaguuugauuaaauuc

SEQ ID NO: 1358214 - RNA, 19 nt, Human
cuaguuugauuaaauucuu

SEQ ID NO: 1358215 - RNA, 15 nt, Human
cuauaaagcauuuaa

SEQ ID NO: 1358216 - RNA, 14 nt, Human
cuauaaagcauuua

SEQ ID NO: 1358217 - RNA, 13 nt, Human
cuauaaagcauuu

SEQ ID NO: 1358218 - RNA, 11 nt, Human
cuauaaagcau

SEQ ID NO: 1358219 - RNA, 19 nt, Human
cuauaaagcaguauuuuuc

SEQ ID NO: 1358220 - RNA, 18 nt, Human
cuauaaagcaguauuuuu

SEQ ID NO: 1358221 - RNA, 16 nt, Human
cuauaaagcaguauuu

SEQ ID NO: 1358222 - RNA, 14 nt, Human
cuauaaagcaguau

SEQ ID NO: 1358223 - RNA, 11 nt, Human
cuaguuuuuua

SEQ ID NO: 1358224 - RNA, 20 nt, Human
cuaguuuucuccucccagga

SEQ ID NO: 1358225 - RNA, 20 nt, Human
cuaguuugauuaaauucuug

SEQ ID NO: 1358226 - RNA, 21 nt, Human
cuaguuugauuaaauucuugc

SEQ ID NO: 1358227 - RNA, 15 nt, Human
cuaguucuguagaaa

SEQ ID NO: 1358228 - RNA, 16 nt, Human
cuaggccugggcagug

SEQ ID NO: 1358229 - RNA, 21 nt, Human
cuaggccuugcggcuccucag

SEQ ID NO: 1358230 - RNA, 15 nt, Human
cuaggccugggcagu

SEQ ID NO: 1358231 - RNA, 15 nt, Human
cuaggccuaguccug

SEQ ID NO: 1358232 - RNA, 23 nt, Human
cuaggcccccacuugccucuucc

SEQ ID NO: 1358233 - RNA, 22 nt, Human
cuaggcccccacuugccucuuc

SEQ ID NO: 1358234 - RNA, 20 nt, Human
cuaggcccccacuugccucu

SEQ ID NO: 1358235 - RNA, 19 nt, Human
cuaggcccccacuugccuc

SEQ ID NO: 1358236 - RNA, 18 nt, Human
cuagcccaaugaaaugaa

SEQ ID NO: 1358237 - RNA, 21 nt, Human
cuagccauacgcucagcucau

SEQ ID NO: 1358238 - RNA, 23 nt, Human
cuagaccagcagacagagccagg

SEQ ID NO: 1358239 - RNA, 22 nt, Human
cuagaccagcagacagagccag

SEQ ID NO: 1358240 - RNA, 21 nt, Human
cuagaauugaguguuuaaagu

SEQ ID NO: 1358241 - RNA, 19 nt, Human
cuagaauugaguguuuaaa

SEQ ID NO: 1358242 - RNA, 16 nt, Human
cuagaauugaguguuu

SEQ ID NO: 1358243 - RNA, 19 nt, Human
cuagaaucugcaauucaaa

SEQ ID NO: 1358244 - RNA, 21 nt, Human
cuagacauggagguucuaagg

SEQ ID NO: 1358245 - RNA, 20 nt, Human
cuagacauggagguucuaag

SEQ ID NO: 1358246 - RNA, 19 nt, Human
cuagacauggagguucuaa

SEQ ID NO: 1358247 - RNA, 18 nt, Human
cuagacauggagguucua

SEQ ID NO: 1358248 - RNA, 17 nt, Human
cuagacauggagguucu

SEQ ID NO: 1358249 - RNA, 21 nt, Human
cuagacaccaaaguucuaaua

SEQ ID NO: 1358250 - RNA, 13 nt, Human
cuagacacugcca

SEQ ID NO: 1358251 - RNA, 19 nt, Human
cuagacaccaaaguucuaa

SEQ ID NO: 1358252 - RNA, 18 nt, Human
cuagacaccaaaguucua

SEQ ID NO: 1358253 - RNA, 17 nt, Human
cuagacaccaaaguucu

SEQ ID NO: 1358254 - RNA, 16 nt, Human
cuagacaccaaaguuc

SEQ ID NO: 1358255 - RNA, 15 nt, Human
cuagacaccaaaguu

SEQ ID NO: 1358256 - RNA, 23 nt, Human
cuagacacaugaagguaaauaaa

SEQ ID NO: 1358257 - RNA, 22 nt, Human
cuagacacaugaagguaaauaa

SEQ ID NO: 1358258 - RNA, 14 nt, Human
cuagacacaugaag

SEQ ID NO: 1358259 - RNA, 12 nt, Human
cuagaccaauaa

SEQ ID NO: 1358260 - RNA, 11 nt, Human
cuagaccaaua

SEQ ID NO: 1358261 - RNA, 22 nt, Human
cuagacauggagguucuaaggc

SEQ ID NO: 1358262 - RNA, 23 nt, Human
cuagacauggagguucuaaggcc

SEQ ID NO: 1358263 - RNA, 21 nt, Human
cuagaccagcagacagagcca

SEQ ID NO: 1358264 - RNA, 20 nt, Human
cuagaccagcagacagagcc

SEQ ID NO: 1358265 - RNA, 18 nt, Human
cuagaccagcagacagag

SEQ ID NO: 1358266 - RNA, 17 nt, Human
cuagaccagcagacaga

SEQ ID NO: 1358267 - RNA, 16 nt, Human
cuagcauacguacaca

SEQ ID NO: 1358268 - RNA, 18 nt, Human
cuagcauacguacacauu

SEQ ID NO: 1358269 - RNA, 19 nt, Human
cuagcauacguacacauuu

SEQ ID NO: 1358270 - RNA, 20 nt, Human
cuagcauacguacacauuuu

SEQ ID NO: 1358271 - RNA, 21 nt, Human
cuaccuugguucccccacuga

SEQ ID NO: 1358272 - RNA, 19 nt, Human
cuaccuugaaaauaagaau

SEQ ID NO: 1358273 - RNA, 14 nt, Human
cuaccuugaaaaua

SEQ ID NO: 1358274 - RNA, 20 nt, Human
cuaccuucuccccagcuccc

SEQ ID NO: 1358275 - RNA, 21 nt, Human
cuaccuucuccccagcuccca

SEQ ID NO: 1358276 - RNA, 16 nt, Human
cuaccuucuccccagc

SEQ ID NO: 1358277 - RNA, 13 nt, Human
cuaccuucucccc

SEQ ID NO: 1358278 - RNA, 22 nt, Human
cuacuagagucugaacagcugu

SEQ ID NO: 1358279 - RNA, 17 nt, Human
cuacuaccuguaaugac

SEQ ID NO: 1358280 - RNA, 17 nt, Human
cuacuaauuccacaccu

SEQ ID NO: 1358281 - RNA, 15 nt, Human
cuacuaauuccacac

SEQ ID NO: 1358282 - RNA, 12 nt, Human
cuacuaauucca

SEQ ID NO: 1358283 - RNA, 18 nt, Human
cuacuaauagaauaaagg

SEQ ID NO: 1358284 - RNA, 17 nt, Human
cuacuaauagaauaaag

SEQ ID NO: 1358285 - RNA, 23 nt, Human
cuacuaacaaucagcuccuuccu

SEQ ID NO: 1358286 - RNA, 22 nt, Human
cuacucacacaggcauuuccug

SEQ ID NO: 1358287 - RNA, 23 nt, Human
cuacucacacaggcauuuccugg

SEQ ID NO: 1358288 - RNA, 15 nt, Human
cuacucacacaggca

SEQ ID NO: 1358289 - RNA, 14 nt, Human
cuacucacacaggc

SEQ ID NO: 1358290 - RNA, 13 nt, Human
cuacucacacagg

SEQ ID NO: 1358291 - RNA, 13 nt, Human
cuacucaaagcau

SEQ ID NO: 1358292 - RNA, 20 nt, Human
cuacuagggaaaugccuuug

SEQ ID NO: 1358293 - RNA, 15 nt, Human
cgaguaauaugccug

SEQ ID NO: 1358294 - RNA, 14 nt, Human
cgccuuccccaccc

SEQ ID NO: 1358295 - RNA, 22 nt, Human
cgauacugcgacuuucugccug

SEQ ID NO: 1358296 - RNA, 20 nt, Human
cgauacugcgacuuucugcc

SEQ ID NO: 1358297 - RNA, 19 nt, Human
cgauacugcgacuuucugc

SEQ ID NO: 1358298 - RNA, 15 nt, Human
cgcauaggaccuuuc

SEQ ID NO: 1358299 - RNA, 21 nt, Human
cgcaguuuuuuuuuucuuguc

SEQ ID NO: 1358300 - RNA, 20 nt, Human
cgcaguuuuuuuuuucuugu

SEQ ID NO: 1358301 - RNA, 23 nt, Human
cgauacugcgacuuucugccugg

SEQ ID NO: 1358302 - RNA, 12 nt, Human
cgcaguuuuuuu

SEQ ID NO: 1358303 - RNA, 13 nt, Human
cgcaucagacaga

SEQ ID NO: 1358304 - RNA, 20 nt, Human
cgcuggacucucagucucug

SEQ ID NO: 1358305 - RNA, 18 nt, Human
cgcugcuucgugggauac

SEQ ID NO: 1358306 - RNA, 13 nt, Human
cgcugcugucaca

SEQ ID NO: 1358307 - RNA, 12 nt, Human
cguaauuuaacu

SEQ ID NO: 1358308 - RNA, 16 nt, Human
cggugugcaccagggu

SEQ ID NO: 1358309 - RNA, 15 nt, Human
cggugugcaccaggg

SEQ ID NO: 1358310 - RNA, 11 nt, Human
cggugucucuc

SEQ ID NO: 1358311 - RNA, 22 nt, Human
cgguggggguagggggcuggag

SEQ ID NO: 1358312 - RNA, 19 nt, Human
cgguggggguagggggcug

SEQ ID NO: 1358313 - RNA, 11 nt, Human
cggugggggua

SEQ ID NO: 1358314 - RNA, 10 nt, Human
cggugggggu

SEQ ID NO: 1358315 - RNA, 12 nt, Human
cggugggccugg

SEQ ID NO: 1358316 - RNA, 13 nt, Human
cggugggccuggu

SEQ ID NO: 1358317 - RNA, 23 nt, Human
cggagaagugugccuucucucuc

SEQ ID NO: 1358318 - RNA, 23 nt, Human
cguaauaagguuuuaauuuagua

SEQ ID NO: 1358319 - RNA, 15 nt, Human
cguaauaagguuuua

SEQ ID NO: 1358320 - RNA, 13 nt, Human
cguaauaagguuu

SEQ ID NO: 1358321 - RNA, 21 nt, Human
cgguugaguuuugacugcuug

SEQ ID NO: 1358322 - RNA, 13 nt, Human
cguacacauuuua

SEQ ID NO: 1358323 - RNA, 16 nt, Human
cguacacauuuuauuu

SEQ ID NO: 1358324 - RNA, 20 nt, Human
cgguucaggaaaauugaaug

SEQ ID NO: 1358325 - RNA, 20 nt, Human
cgguuaugaaauucaccccc

SEQ ID NO: 1358326 - RNA, 15 nt, Human
cgguuuauauaagcu

SEQ ID NO: 1358327 - RNA, 15 nt, Human
cuaacugcauacacu

SEQ ID NO: 1358328 - RNA, 17 nt, Human
cuaacucuucuuucauu

SEQ ID NO: 1358329 - RNA, 19 nt, Human
cuaacuacaaagguuuaaa

SEQ ID NO: 1358330 - RNA, 23 nt, Human
cuaacuagacaccaaaguucuaa

SEQ ID NO: 1358331 - RNA, 22 nt, Human
cuaacuagacaccaaaguucua

SEQ ID NO: 1358332 - RNA, 21 nt, Human
cuaacuagacaccaaaguucu

SEQ ID NO: 1358333 - RNA, 15 nt, Human
cuaacuagacaccaa

SEQ ID NO: 1358334 - RNA, 23 nt, Human
cuaacuacaaagguuuaaaugaa

SEQ ID NO: 1358335 - RNA, 20 nt, Human
cuaacuacaaagguuuaaau

SEQ ID NO: 1358336 - RNA, 20 nt, Human
cuaaaguucuaagauucuga

SEQ ID NO: 1358337 - RNA, 19 nt, Human
cuaaaguucuaagauucug

SEQ ID NO: 1358338 - RNA, 18 nt, Human
cuaaaguucuaagauucu

SEQ ID NO: 1358339 - RNA, 17 nt, Human
cuaaaguucuaagauuc

SEQ ID NO: 1358340 - RNA, 15 nt, Human
cuaaaguucuaagau

SEQ ID NO: 1358341 - RNA, 14 nt, Human
cuaaaguucuaaga

SEQ ID NO: 1358342 - RNA, 13 nt, Human
cuaaaguucuaag

SEQ ID NO: 1358343 - RNA, 12 nt, Human
cuaaaguucuaa

SEQ ID NO: 1358344 - RNA, 11 nt, Human
cuaaaguucua

SEQ ID NO: 1358345 - RNA, 21 nt, Human
cuaaagguccacaggucuaga

SEQ ID NO: 1358346 - RNA, 20 nt, Human
cuaaagguccacaggucuag

SEQ ID NO: 1358347 - RNA, 19 nt, Human
cuaaagguccacaggucua

SEQ ID NO: 1358348 - RNA, 15 nt, Human
cuaaagguccacagg

SEQ ID NO: 1358349 - RNA, 13 nt, Human
cuaaaggaguuua

SEQ ID NO: 1358350 - RNA, 16 nt, Human
cuaaaggaguuuaugu

SEQ ID NO: 1358351 - RNA, 22 nt, Human
cuaaaguguauuuuuuuacuaa

SEQ ID NO: 1358352 - RNA, 17 nt, Human
cuaaaggcuaccuuugu

SEQ ID NO: 1358353 - RNA, 19 nt, Human
cuaaaggcuaccuuuguau

SEQ ID NO: 1358354 - RNA, 19 nt, Human
cuaaaggaaaucaaaugaa

SEQ ID NO: 1358355 - RNA, 19 nt, Human
cuaaaggaaaaaaccaucc

SEQ ID NO: 1358356 - RNA, 14 nt, Human
cuaaaggaaaaaac

SEQ ID NO: 1358357 - RNA, 18 nt, Human
cuaaagcugguuuaaugu

SEQ ID NO: 1358358 - RNA, 17 nt, Human
cuaaagcugguuuaaug

SEQ ID NO: 1358359 - RNA, 15 nt, Human
cuaaaggcuaccuuu

SEQ ID NO: 1358360 - RNA, 16 nt, Human
cuaaaggcuaccuuug

SEQ ID NO: 1358361 - RNA, 13 nt, Human
cuaaagaaaaaca

SEQ ID NO: 1358362 - RNA, 21 nt, Human
cuaaacuuuuuuucuguacca

SEQ ID NO: 1358363 - RNA, 18 nt, Human
cuaaacuuuuuuucugua

SEQ ID NO: 1358364 - RNA, 17 nt, Human
cuaaacuuuuuuucugu

SEQ ID NO: 1358365 - RNA, 20 nt, Human
cuaaagaaaaacaaacucgu

SEQ ID NO: 1358366 - RNA, 17 nt, Human
cuaaagaaaaacaaacu

SEQ ID NO: 1358367 - RNA, 14 nt, Human
cguguccaccccca

SEQ ID NO: 1358368 - RNA, 16 nt, Human
cgugucaccugugcuu

SEQ ID NO: 1358369 - RNA, 17 nt, Human
cguguccgacucuucug

SEQ ID NO: 1358370 - RNA, 21 nt, Human
cguguuuggguuuuuuuccuu

SEQ ID NO: 1358371 - RNA, 13 nt, Human
cguguccaccccc

SEQ ID NO: 1358372 - RNA, 13 nt, Human
cgugucuggcaca

SEQ ID NO: 1358373 - RNA, 21 nt, Human
cguuaaaaacagauuuggaaa

SEQ ID NO: 1358374 - RNA, 14 nt, Human
cguuaaaaacagau

SEQ ID NO: 1358375 - RNA, 13 nt, Human
cguuaaaauacca

SEQ ID NO: 1358376 - RNA, 21 nt, Human
cguuacuagcagucacuugau

SEQ ID NO: 1358377 - RNA, 15 nt, Human
cuaaacuuuuuuucu

SEQ ID NO: 1358378 - RNA, 13 nt, Human
cucagacauuggc

SEQ ID NO: 1358379 - RNA, 17 nt, Human
cucagacauuggcaccu

SEQ ID NO: 1358380 - RNA, 22 nt, Human
cuccaguguccugagcucagcg

SEQ ID NO: 1358381 - RNA, 21 nt, Human
cuccaguguccugagcucagc

SEQ ID NO: 1358382 - RNA, 20 nt, Human
cuccaguguccugagcucag

SEQ ID NO: 1358383 - RNA, 19 nt, Human
cuccaguguccugagcuca

SEQ ID NO: 1358384 - RNA, 18 nt, Human
cuccaguguccugagcuc

SEQ ID NO: 1358385 - RNA, 17 nt, Human
cuccaguguccugagcu

SEQ ID NO: 1358386 - RNA, 16 nt, Human
cuccaguguccugagc

SEQ ID NO: 1358387 - RNA, 14 nt, Human
cuccaguguccuga

SEQ ID NO: 1358388 - RNA, 13 nt, Human
cuccaguguccug

SEQ ID NO: 1358389 - RNA, 23 nt, Human
cuccagggacagcaacuaucaga

SEQ ID NO: 1358390 - RNA, 14 nt, Human
cuccagggacagca

SEQ ID NO: 1358391 - RNA, 23 nt, Human
cucccagaggagccaccaguucu

SEQ ID NO: 1358392 - RNA, 22 nt, Human
cucccagaggagccaccaguuc

SEQ ID NO: 1358393 - RNA, 21 nt, Human
cucccagaggagccaccaguu

SEQ ID NO: 1358394 - RNA, 19 nt, Human
cucccagaggagccaccag

SEQ ID NO: 1358395 - RNA, 15 nt, Human
cucccucccucuccg

SEQ ID NO: 1358396 - RNA, 14 nt, Human
cucccucccucucc

SEQ ID NO: 1358397 - RNA, 21 nt, Human
cucccuccccuugccugugcc

SEQ ID NO: 1358398 - RNA, 18 nt, Human
cucccuccccuugccugu

SEQ ID NO: 1358399 - RNA, 17 nt, Human
cucccuccccuugccug

SEQ ID NO: 1358400 - RNA, 11 nt, Human
cuccccaguuc

SEQ ID NO: 1358401 - RNA, 23 nt, Human
cuccccagguccagcucuggagg

SEQ ID NO: 1358402 - RNA, 22 nt, Human
cuccccaguacaccccaccucu

SEQ ID NO: 1358403 - RNA, 21 nt, Human
cuccccagguccagcucugga

SEQ ID NO: 1358404 - RNA, 20 nt, Human
cuccccagguccagcucugg

SEQ ID NO: 1358405 - RNA, 19 nt, Human
cuccccagguccagcucug

SEQ ID NO: 1358406 - RNA, 18 nt, Human
cuccccagguccagcucu

SEQ ID NO: 1358407 - RNA, 17 nt, Human
cuccccagguccagcuc

SEQ ID NO: 1358408 - RNA, 16 nt, Human
cuccccagguccagcu

SEQ ID NO: 1358409 - RNA, 20 nt, Human
cuccccagggaagcagcagc

SEQ ID NO: 1358410 - RNA, 22 nt, Human
cuccccagggaagcagcagccu

SEQ ID NO: 1358411 - RNA, 19 nt, Human
cuccccaugauguuuagaa

SEQ ID NO: 1358412 - RNA, 15 nt, Human
cuccgggaccuggug

SEQ ID NO: 1358413 - RNA, 14 nt, Human
cuccgucaacucau

SEQ ID NO: 1358414 - RNA, 13 nt, Human
cucugaacacauu

SEQ ID NO: 1358415 - RNA, 12 nt, Human
cucugaacacau

SEQ ID NO: 1358416 - RNA, 17 nt, Human
cucugaaagagaaacac

SEQ ID NO: 1358417 - RNA, 11 nt, Human
cucugaaauac

SEQ ID NO: 1358418 - RNA, 21 nt, Human
cucugaaagagaaacacguau

SEQ ID NO: 1358419 - RNA, 16 nt, Human
cucugaaagagaaaca

SEQ ID NO: 1358420 - RNA, 14 nt, Human
cucugaaagagaaa

SEQ ID NO: 1358421 - RNA, 13 nt, Human
cucugaaagagaa

SEQ ID NO: 1358422 - RNA, 17 nt, Human
cucugaaaccaguguua

SEQ ID NO: 1358423 - RNA, 12 nt, Human
cucugaaaccag

SEQ ID NO: 1358424 - RNA, 15 nt, Human
cucucuuugcccagu

SEQ ID NO: 1358425 - RNA, 23 nt, Human
cucucuuugcccaguuggagacu

SEQ ID NO: 1358426 - RNA, 18 nt, Human
cucucuuugcauggauuu

SEQ ID NO: 1358427 - RNA, 16 nt, Human
cucucuuugcauggau

SEQ ID NO: 1358428 - RNA, 19 nt, Human
cucucuuuauacagcugua

SEQ ID NO: 1358429 - RNA, 18 nt, Human
cucucuuuauacagcugu

SEQ ID NO: 1358430 - RNA, 17 nt, Human
cucucuuuauacagcug

SEQ ID NO: 1358431 - RNA, 23 nt, Human
cucucccuugggcucugaugaaa

SEQ ID NO: 1358432 - RNA, 21 nt, Human
cucucccuugggcucugauga

SEQ ID NO: 1358433 - RNA, 19 nt, Human
cucucccuugggcucugau

SEQ ID NO: 1358434 - RNA, 18 nt, Human
cucucccuugggcucuga

SEQ ID NO: 1358435 - RNA, 17 nt, Human
cucucccuugggcucug

SEQ ID NO: 1358436 - RNA, 16 nt, Human
cucucccuugggcucu

SEQ ID NO: 1358437 - RNA, 14 nt, Human
cucucccuugggcu

SEQ ID NO: 1358438 - RNA, 21 nt, Human
cucgaacuauuuucaaagacu

SEQ ID NO: 1358439 - RNA, 20 nt, Human
cucgaacuauuuucaaagac

SEQ ID NO: 1358440 - RNA, 13 nt, Human
cuccuuuuuccau

SEQ ID NO: 1358441 - RNA, 13 nt, Human
cuccuuuucccaa

SEQ ID NO: 1358442 - RNA, 23 nt, Human
cuccuuuuaaagaaaaaaauuga

SEQ ID NO: 1358443 - RNA, 19 nt, Human
cucgaaacacagaaaccuu

SEQ ID NO: 1358444 - RNA, 15 nt, Human
cucgaaacacagaaa

SEQ ID NO: 1358445 - RNA, 14 nt, Human
cucgaaacacagaa

SEQ ID NO: 1358446 - RNA, 20 nt, Human
cucgaaacacagaaaccuuu

SEQ ID NO: 1358447 - RNA, 14 nt, Human
cuccuuuuaaagaa

SEQ ID NO: 1358448 - RNA, 13 nt, Human
cuccuuuuaaaga

SEQ ID NO: 1358449 - RNA, 21 nt, Human
cuccuagcuguccuuuuuccu

SEQ ID NO: 1358450 - RNA, 14 nt, Human
cuccuagcuguccu

SEQ ID NO: 1358451 - RNA, 10 nt, Human
cuccuuucca

SEQ ID NO: 1358452 - RNA, 18 nt, Human
cuccuuucaucacacugg

SEQ ID NO: 1358453 - RNA, 18 nt, Human
cuccuuuccauaaauccu

SEQ ID NO: 1358454 - RNA, 14 nt, Human
cuccuuucuggcuu

SEQ ID NO: 1358455 - RNA, 19 nt, Human
cucggggugcacaggaggg

SEQ ID NO: 1358456 - RNA, 17 nt, Human
cucggggugcacaggag

SEQ ID NO: 1358457 - RNA, 16 nt, Human
cucggggugcacagga

SEQ ID NO: 1358458 - RNA, 15 nt, Human
cucggggugcacagg

SEQ ID NO: 1358459 - RNA, 19 nt, Human
cucggggauguguccugac

SEQ ID NO: 1358460 - RNA, 16 nt, Human
cucggggauguguccu

SEQ ID NO: 1358461 - RNA, 13 nt, Human
cucgguuucucca

SEQ ID NO: 1358462 - RNA, 16 nt, Human
cucguaagauuuccuu

SEQ ID NO: 1358463 - RNA, 18 nt, Human
cucggggugcacaggagg

SEQ ID NO: 1358464 - RNA, 14 nt, Human
cucguauagcaugc

SEQ ID NO: 1358465 - RNA, 13 nt, Human
cucguauagcaug

SEQ ID NO: 1358466 - RNA, 18 nt, Human
cucguccccaagugaccu

SEQ ID NO: 1358467 - RNA, 17 nt, Human
cucguggacaccugccc

SEQ ID NO: 1358468 - RNA, 19 nt, Human
cucguggacaccugcccug

SEQ ID NO: 1358469 - RNA, 20 nt, Human
cucguggacaccugcccugc

SEQ ID NO: 1358470 - RNA, 21 nt, Human
cucguggacaccugcccugcc

SEQ ID NO: 1358471 - RNA, 16 nt, Human
cugaccccaucaccua

SEQ ID NO: 1358472 - RNA, 15 nt, Human
cugaccccaucaccu

SEQ ID NO: 1358473 - RNA, 18 nt, Human
cugaccccaucaccuacu

SEQ ID NO: 1358474 - RNA, 22 nt, Human
cugacacacuaaccaagcugag

SEQ ID NO: 1358475 - RNA, 23 nt, Human
cugacacacuaaccaagcugagu

SEQ ID NO: 1358476 - RNA, 20 nt, Human
cugacacacuaaccaagcug

SEQ ID NO: 1358477 - RNA, 19 nt, Human
cugacacacuaaccaagcu

SEQ ID NO: 1358478 - RNA, 16 nt, Human
cugacacacuaaccaa

SEQ ID NO: 1358479 - RNA, 13 nt, Human
cugacacacuaac

SEQ ID NO: 1358480 - RNA, 21 nt, Human
cugacacaugcugaacaucac

SEQ ID NO: 1358481 - RNA, 23 nt, Human
cugacacaccaggcgcuaauuca

SEQ ID NO: 1358482 - RNA, 19 nt, Human
cugacacaccaggcgcuaa

SEQ ID NO: 1358483 - RNA, 17 nt, Human
cugacacaccaggcgcu

SEQ ID NO: 1358484 - RNA, 14 nt, Human
cugacacaccaggc

SEQ ID NO: 1358485 - RNA, 17 nt, Human
cugacacucccuugggc

SEQ ID NO: 1358486 - RNA, 19 nt, Human
cugacaccuaacucuucuu

SEQ ID NO: 1358487 - RNA, 16 nt, Human
cugacaccuaacucuu

SEQ ID NO: 1358488 - RNA, 21 nt, Human
cugacacccuucucccacucu

SEQ ID NO: 1358489 - RNA, 17 nt, Human
cugacacccuucuccca

SEQ ID NO: 1358490 - RNA, 16 nt, Human
cugacacccuucuccc

SEQ ID NO: 1358491 - RNA, 19 nt, Human
cugacacuuuaauuaccaa

SEQ ID NO: 1358492 - RNA, 21 nt, Human
cugacacugcuggagaggccc

SEQ ID NO: 1358493 - RNA, 15 nt, Human
cugacacugcuggag

SEQ ID NO: 1358494 - RNA, 14 nt, Human
cugacacugcugga

SEQ ID NO: 1358495 - RNA, 13 nt, Human
cugacacugcugg

SEQ ID NO: 1358496 - RNA, 20 nt, Human
cugacacugcuggagaggcc

SEQ ID NO: 1358497 - RNA, 15 nt, Human
cugaagcccucccag

SEQ ID NO: 1358498 - RNA, 21 nt, Human
cugaagcagguucccaagcuc

SEQ ID NO: 1358499 - RNA, 20 nt, Human
cugaagcagguucccaagcu

SEQ ID NO: 1358500 - RNA, 19 nt, Human
cugaagcagguucccaagc

SEQ ID NO: 1358501 - RNA, 20 nt, Human
cugaagcagccucuccccag

SEQ ID NO: 1358502 - RNA, 16 nt, Human
cugaagcagccucucc

SEQ ID NO: 1358503 - RNA, 15 nt, Human
cugaagcagccucuc

SEQ ID NO: 1358504 - RNA, 14 nt, Human
cugaagcagccucu

SEQ ID NO: 1358505 - RNA, 22 nt, Human
cugaaagaggcugaggccugga

SEQ ID NO: 1358506 - RNA, 14 nt, Human
cugaaagaggcuga

SEQ ID NO: 1358507 - RNA, 14 nt, Human
cugaaagagaaaca

SEQ ID NO: 1358508 - RNA, 23 nt, Human
cucuugaguuugucgcucaugug

SEQ ID NO: 1358509 - RNA, 23 nt, Human
cucuugauaccccccucugucuu

SEQ ID NO: 1358510 - RNA, 21 nt, Human
cucuugauaccccccucuguc

SEQ ID NO: 1358511 - RNA, 19 nt, Human
cucuugauaccccccucug

SEQ ID NO: 1358512 - RNA, 18 nt, Human
cucuugauaccccccucu

SEQ ID NO: 1358513 - RNA, 17 nt, Human
cucuuuuuucguuuguu

SEQ ID NO: 1358514 - RNA, 18 nt, Human
cucuugccucaaccuccc

SEQ ID NO: 1358515 - RNA, 20 nt, Human
cucuugccucaaccucccaa

SEQ ID NO: 1358516 - RNA, 20 nt, Human
cucuugcacagucacugcuc

SEQ ID NO: 1358517 - RNA, 21 nt, Human
cucuugcacagucacugcucu

SEQ ID NO: 1358518 - RNA, 15 nt, Human
cugaaaauauaacca

SEQ ID NO: 1358519 - RNA, 13 nt, Human
cugaaaauauaac

SEQ ID NO: 1358520 - RNA, 17 nt, Human
cugaaaagguuuaugaa

SEQ ID NO: 1358521 - RNA, 21 nt, Human
cugaaaaaugguaauuguugc

SEQ ID NO: 1358522 - RNA, 22 nt, Human
cugaaaaaucuaagugauauaa

SEQ ID NO: 1358523 - RNA, 19 nt, Human
cugaaaaaucuaagugaua

SEQ ID NO: 1358524 - RNA, 15 nt, Human
cugaaaaaauauaug

SEQ ID NO: 1358525 - RNA, 13 nt, Human
cugaaaaaauaua

SEQ ID NO: 1358526 - RNA, 15 nt, Human
cugaaaaaaaaccug

SEQ ID NO: 1358527 - RNA, 22 nt, Human
cugaaaauauaaccagccauug

SEQ ID NO: 1358528 - RNA, 17 nt, Human
cugaaaauauuguuuua

SEQ ID NO: 1358529 - RNA, 20 nt, Human
cugaaaauauuguuuuacaa

SEQ ID NO: 1358530 - RNA, 22 nt, Human
cugaaaauauuguuuuacaaua

SEQ ID NO: 1358531 - RNA, 24 nt, Human
cugaaaauauuguuuuacaauagu

SEQ ID NO: 1358532 - RNA, 19 nt, Human
cugagguuacuggaaauua

SEQ ID NO: 1358533 - RNA, 17 nt, Human
cugagguuacuggaaau

SEQ ID NO: 1358534 - RNA, 21 nt, Human
cugagguuacuggaaauuagg

SEQ ID NO: 1358535 - RNA, 17 nt, Human
cugaguaccccugcuuu

SEQ ID NO: 1358536 - RNA, 16 nt, Human
cugaggaauuuucuuu

SEQ ID NO: 1358537 - RNA, 16 nt, Human
cugaggaauuucaccu

SEQ ID NO: 1358538 - RNA, 17 nt, Human
cugaggggcuaccagga

SEQ ID NO: 1358539 - RNA, 21 nt, Human
cugagguccugagcacugcca

SEQ ID NO: 1358540 - RNA, 24 nt, Human
cugagguccugagcacugccagga

SEQ ID NO: 1358541 - RNA, 20 nt, Human
cugagguccugagcacugcc

SEQ ID NO: 1358542 - RNA, 19 nt, Human
cugagguccugagcacugc

SEQ ID NO: 1358543 - RNA, 18 nt, Human
cugagguccugagcacug

SEQ ID NO: 1358544 - RNA, 16 nt, Human
cugagguccugagcac

SEQ ID NO: 1358545 - RNA, 15 nt, Human
cugagguccugagca

SEQ ID NO: 1358546 - RNA, 14 nt, Human
cugagguccugagc

SEQ ID NO: 1358547 - RNA, 13 nt, Human
cugagguccugag

SEQ ID NO: 1358548 - RNA, 14 nt, Human
cugagggucuguag

SEQ ID NO: 1358549 - RNA, 16 nt, Human
cugagggucuguaggu

SEQ ID NO: 1358550 - RNA, 12 nt, Human
cugagggucugu

SEQ ID NO: 1358551 - RNA, 20 nt, Human
cugaggggcuaccaggaaag

SEQ ID NO: 1358552 - RNA, 16 nt, Human
cugaggggggauccag

SEQ ID NO: 1358553 - RNA, 18 nt, Human
cugaggggcuaccaggaa

SEQ ID NO: 1358554 - RNA, 11 nt, Human
cugagcuguca

SEQ ID NO: 1358555 - RNA, 15 nt, Human
cugagcugugcaggu

SEQ ID NO: 1358556 - RNA, 16 nt, Human
cugaggaacugucucg

SEQ ID NO: 1358557 - RNA, 22 nt, Human
cugaggaacccuuacaguagga

SEQ ID NO: 1358558 - RNA, 21 nt, Human
cugaggaaauugcuuuguauu

SEQ ID NO: 1358559 - RNA, 13 nt, Human
cugagcugugcag

SEQ ID NO: 1358560 - RNA, 18 nt, Human
cugagcugaggcagcagu

SEQ ID NO: 1358561 - RNA, 18 nt, Human
cugagcugcccacagcag

SEQ ID NO: 1358562 - RNA, 21 nt, Human
cugagcugcccacagcaggcc

SEQ ID NO: 1358563 - RNA, 22 nt, Human
cugagcugcccacagcaggcca

SEQ ID NO: 1358564 - RNA, 14 nt, Human
cugaccccugcuca

SEQ ID NO: 1358565 - RNA, 13 nt, Human
cugaccccugcuc

SEQ ID NO: 1358566 - RNA, 18 nt, Human
cugacccucaucuuucuu

SEQ ID NO: 1358567 - RNA, 16 nt, Human
cugaccccugcucagu

SEQ ID NO: 1358568 - RNA, 18 nt, Human
cugacccuccaccgcaga

SEQ ID NO: 1358569 - RNA, 23 nt, Human
cugacccuccaccgcagaaggaa

SEQ ID NO: 1358570 - RNA, 18 nt, Human
gucugguucucaauucca

SEQ ID NO: 1358571 - RNA, 14 nt, Human
gucugguucucaau

SEQ ID NO: 1358572 - RNA, 20 nt, Human
gucugguggccccguuucug

SEQ ID NO: 1358573 - RNA, 13 nt, Human
gucugguggcccc

SEQ ID NO: 1358574 - RNA, 15 nt, Human
gucuggugaagcuca

SEQ ID NO: 1358575 - RNA, 15 nt, Human
gucuggguggcucac

SEQ ID NO: 1358576 - RNA, 17 nt, Human
gucuggguggcucacuc

SEQ ID NO: 1358577 - RNA, 14 nt, Human
gucuggguggcuca

SEQ ID NO: 1358578 - RNA, 20 nt, Human
gucugggugcuacuggggaa

SEQ ID NO: 1358579 - RNA, 15 nt, Human
gucugggugcuacug

SEQ ID NO: 1358580 - RNA, 14 nt, Human
gucugggugcuacu

SEQ ID NO: 1358581 - RNA, 20 nt, Human
gucugggggcacaagacuga

SEQ ID NO: 1358582 - RNA, 19 nt, Human
gucugggggcacaagacug

SEQ ID NO: 1358583 - RNA, 14 nt, Human
gucugggggcacaa

SEQ ID NO: 1358584 - RNA, 23 nt, Human
gucuggggagcgggucugcuccc

SEQ ID NO: 1358585 - RNA, 22 nt, Human
gucuggggagcgggucugcucc

SEQ ID NO: 1358586 - RNA, 16 nt, Human
gucuggcaaugccaca

SEQ ID NO: 1358587 - RNA, 15 nt, Human
gucuggcaaugccac

SEQ ID NO: 1358588 - RNA, 21 nt, Human
gucuggauaacuuccacaggg

SEQ ID NO: 1358589 - RNA, 20 nt, Human
gucuggauaacuuccacagg

SEQ ID NO: 1358590 - RNA, 18 nt, Human
gucuggauaacuuccaca

SEQ ID NO: 1358591 - RNA, 16 nt, Human
gucuggauaacuucca

SEQ ID NO: 1358592 - RNA, 21 nt, Human
gucuggaguugaucuggaacc

SEQ ID NO: 1358593 - RNA, 17 nt, Human
gucuggagaccaccagg

SEQ ID NO: 1358594 - RNA, 21 nt, Human
gucuggagaccaccagggcau

SEQ ID NO: 1358595 - RNA, 10 nt, Human
gucuggagac

SEQ ID NO: 1358596 - RNA, 13 nt, Human
gucucuuguaauc

SEQ ID NO: 1358597 - RNA, 19 nt, Human
aaccaucucccuggugcuu

SEQ ID NO: 1358598 - RNA, 18 nt, Human
aaccaucucccuggugcu

SEQ ID NO: 1358599 - RNA, 14 nt, Human
aaccaucucccugg

SEQ ID NO: 1358600 - RNA, 13 nt, Human
aaccaucucccug

SEQ ID NO: 1358601 - RNA, 12 nt, Human
aaccaucucccu

SEQ ID NO: 1358602 - RNA, 19 nt, Human
aaccaugcaaaugcuauga

SEQ ID NO: 1358603 - RNA, 22 nt, Human
aaccaugagaccacuguuauca

SEQ ID NO: 1358604 - RNA, 22 nt, Human
gucucuuuaaaaggaaagaaaa

SEQ ID NO: 1358605 - RNA, 19 nt, Human
gucuuuguuaagacugcug

SEQ ID NO: 1358606 - RNA, 15 nt, Human
gucuuccauuugcaa

SEQ ID NO: 1358607 - RNA, 13 nt, Human
gucuucccaccca

SEQ ID NO: 1358608 - RNA, 18 nt, Human
aaccuuaauuuauuauua

SEQ ID NO: 1358609 - RNA, 13 nt, Human
aaccuuaagauac

SEQ ID NO: 1358610 - RNA, 13 nt, Human
aaccuuaagaccu

SEQ ID NO: 1358611 - RNA, 24 nt, Human
aaccuguuaccuacuuugacuuuu

SEQ ID NO: 1358612 - RNA, 21 nt, Human
aaccuguuaccuacuuugacu

SEQ ID NO: 1358613 - RNA, 24 nt, Human
gucuuuuaggacccuucccuugag

SEQ ID NO: 1358614 - RNA, 15 nt, Human
aaccuuguuuuggac

SEQ ID NO: 1358615 - RNA, 19 nt, Human
aaccuuuacaugaggacuc

SEQ ID NO: 1358616 - RNA, 23 nt, Human
aaccuuguuuuggacaguuuacc

SEQ ID NO: 1358617 - RNA, 13 nt, Human
aaccuuguuuugg

SEQ ID NO: 1358618 - RNA, 17 nt, Human
aaccuuaauuuauuauu

SEQ ID NO: 1358619 - RNA, 23 nt, Human
aaccuuagauguucuaagucuuu

SEQ ID NO: 1358620 - RNA, 18 nt, Human
aacguuaagaauuguuaa

SEQ ID NO: 1358621 - RNA, 17 nt, Human
aacguguucaauauuuu

SEQ ID NO: 1358622 - RNA, 18 nt, Human
aaccuuucuucaccaaau

SEQ ID NO: 1358623 - RNA, 16 nt, Human
aaccuuucuucaccaa

SEQ ID NO: 1358624 - RNA, 11 nt, Human
aacuaacaugu

SEQ ID NO: 1358625 - RNA, 16 nt, Human
aacguguucaauauuu

SEQ ID NO: 1358626 - RNA, 14 nt, Human
aacguugcucccca

SEQ ID NO: 1358627 - RNA, 20 nt, Human
aacguuuaagccaaaacaau

SEQ ID NO: 1358628 - RNA, 15 nt, Human
aacuaacauguccug

SEQ ID NO: 1358629 - RNA, 14 nt, Human
aacuaacauguccu

SEQ ID NO: 1358630 - RNA, 15 nt, Human
aacuaagaaacuuaa

SEQ ID NO: 1358631 - RNA, 23 nt, Human
aacuaagaaauaugcacaauagc

SEQ ID NO: 1358632 - RNA, 19 nt, Human
aacuaagaaacuuaaauuu

SEQ ID NO: 1358633 - RNA, 16 nt, Human
aacuacuuugcugcua

SEQ ID NO: 1358634 - RNA, 19 nt, Human
aacuacuuugcugcuaaua

SEQ ID NO: 1358635 - RNA, 17 nt, Human
aacuacuuuauaacuaa

SEQ ID NO: 1358636 - RNA, 15 nt, Human
aacuacuuuauaacu

SEQ ID NO: 1358637 - RNA, 13 nt, Human
aacuacuuuauaa

SEQ ID NO: 1358638 - RNA, 22 nt, Human
aacuacuucucuuguuagguaa

SEQ ID NO: 1358639 - RNA, 13 nt, Human
gugaaggacccuu

SEQ ID NO: 1358640 - RNA, 12 nt, Human
gugaaggacccu

SEQ ID NO: 1358641 - RNA, 12 nt, Human
gugaagccuucc

SEQ ID NO: 1358642 - RNA, 11 nt, Human
gugaagccuuc

SEQ ID NO: 1358643 - RNA, 10 nt, Human
gugaagccuu

SEQ ID NO: 1358644 - RNA, 22 nt, Human
gugaagccaauucagacaggca

SEQ ID NO: 1358645 - RNA, 20 nt, Human
gugaagccaauucagacagg

SEQ ID NO: 1358646 - RNA, 10 nt, Human
gugaagccaa

SEQ ID NO: 1358647 - RNA, 22 nt, Human
gugaaggcuucucucuguggga

SEQ ID NO: 1358648 - RNA, 17 nt, Human
gugaaggcuucucucug

SEQ ID NO: 1358649 - RNA, 14 nt, Human
gugaaggcuucucu

SEQ ID NO: 1358650 - RNA, 14 nt, Human
gugaagugaagaca

SEQ ID NO: 1358651 - RNA, 23 nt, Human
gugaagaaugcacaagaauggau

SEQ ID NO: 1358652 - RNA, 14 nt, Human
gugaagacagaagu

SEQ ID NO: 1358653 - RNA, 21 nt, Human
gugaagaaugcacaagaaugg

SEQ ID NO: 1358654 - RNA, 14 nt, Human
gugaagaauacuuc

SEQ ID NO: 1358655 - RNA, 23 nt, Human
gugaagacaaugacuuacuguac

SEQ ID NO: 1358656 - RNA, 23 nt, Human
aacuaucucauuuccaagcaagu

SEQ ID NO: 1358657 - RNA, 20 nt, Human
aacuaucucauuuccaagca

SEQ ID NO: 1358658 - RNA, 20 nt, Human
aacuagacaccaaaguucua

SEQ ID NO: 1358659 - RNA, 17 nt, Human
aacuagacaccaaaguu

SEQ ID NO: 1358660 - RNA, 16 nt, Human
aacuagaauuugauua

SEQ ID NO: 1358661 - RNA, 15 nt, Human
aacuagaauuugauu

SEQ ID NO: 1358662 - RNA, 13 nt, Human
aacuauauuguuu

SEQ ID NO: 1358663 - RNA, 19 nt, Human
gugacaucggaaaaauaau

SEQ ID NO: 1358664 - RNA, 18 nt, Human
gugacaucggaaaaauaa

SEQ ID NO: 1358665 - RNA, 16 nt, Human
gugacaucggaaaaau

SEQ ID NO: 1358666 - RNA, 14 nt, Human
gugacauccaggag

SEQ ID NO: 1358667 - RNA, 16 nt, Human
gugacccacaugccau

SEQ ID NO: 1358668 - RNA, 17 nt, Human
gugaccaggcauccucc

SEQ ID NO: 1358669 - RNA, 17 nt, Human
gugaccacucugucuug

SEQ ID NO: 1358670 - RNA, 16 nt, Human
gugaccaaugucuuga

SEQ ID NO: 1358671 - RNA, 15 nt, Human
gugaccaaugucuug

SEQ ID NO: 1358672 - RNA, 17 nt, Human
gugacauuuuacauuaa

SEQ ID NO: 1358673 - RNA, 19 nt, Human
gugacauuuuacauuaaau

SEQ ID NO: 1358674 - RNA, 17 nt, Human
gugaccaaaaguuacau

SEQ ID NO: 1358675 - RNA, 20 nt, Human
gugacauuuuacauuaaauu

SEQ ID NO: 1358676 - RNA, 21 nt, Human
gugacauuuuacauuaaauuu

SEQ ID NO: 1358677 - RNA, 20 nt, Human
gugagaagugaaugcuggga

SEQ ID NO: 1358678 - RNA, 22 nt, Human
gugagaaccuggguugcagaca

SEQ ID NO: 1358679 - RNA, 15 nt, Human
gugagaaauuuaaac

SEQ ID NO: 1358680 - RNA, 20 nt, Human
gugagaaccuggguugcaga

SEQ ID NO: 1358681 - RNA, 22 nt, Human
gugagaagugaaugcugggacu

SEQ ID NO: 1358682 - RNA, 21 nt, Human
gugagaagugaaugcugggac

SEQ ID NO: 1358683 - RNA, 16 nt, Human
gugacccccagcuccg

SEQ ID NO: 1358684 - RNA, 17 nt, Human
gugacccccagcuccgg

SEQ ID NO: 1358685 - RNA, 15 nt, Human
gugacccccagcucc

SEQ ID NO: 1358686 - RNA, 23 nt, Human
gugaccccagggcacaggagcua

SEQ ID NO: 1358687 - RNA, 22 nt, Human
gugaccccagggcacaggagcu

SEQ ID NO: 1358688 - RNA, 21 nt, Human
gugaccccagggcacaggagc

SEQ ID NO: 1358689 - RNA, 19 nt, Human
gugaccccagggcacagga

SEQ ID NO: 1358690 - RNA, 15 nt, Human
gugaccccagggcac

SEQ ID NO: 1358691 - RNA, 14 nt, Human
gugaccccagggca

SEQ ID NO: 1358692 - RNA, 13 nt, Human
gugaccccagggc

SEQ ID NO: 1358693 - RNA, 14 nt, Human
gugacccacaugcc

SEQ ID NO: 1358694 - RNA, 14 nt, Human
gugagcacagccua

SEQ ID NO: 1358695 - RNA, 12 nt, Human
gugagacagacu

SEQ ID NO: 1358696 - RNA, 17 nt, Human
gugagcagccuggagcc

SEQ ID NO: 1358697 - RNA, 21 nt, Human
gugagcagccuggagcccugg

SEQ ID NO: 1358698 - RNA, 16 nt, Human
aacucugcuugauuuu

SEQ ID NO: 1358699 - RNA, 16 nt, Human
aacucugcauucuagu

SEQ ID NO: 1358700 - RNA, 18 nt, Human
gugaguaauuuuggauuu

SEQ ID NO: 1358701 - RNA, 14 nt, Human
gugagucaccacuu

SEQ ID NO: 1358702 - RNA, 21 nt, Human
aacugcaggcccuggccuccc

SEQ ID NO: 1358703 - RNA, 20 nt, Human
aacugcaggcccuggccucc

SEQ ID NO: 1358704 - RNA, 19 nt, Human
aacugcaggcccuggccuc

SEQ ID NO: 1358705 - RNA, 18 nt, Human
aacugcaggcccuggccu

SEQ ID NO: 1358706 - RNA, 17 nt, Human
aacugcaggcccuggcc

SEQ ID NO: 1358707 - RNA, 16 nt, Human
aacugcaggcccuggc

SEQ ID NO: 1358708 - RNA, 14 nt, Human
aacugcaggcccug

SEQ ID NO: 1358709 - RNA, 23 nt, Human
aacugaacaccauugaaggcuua

SEQ ID NO: 1358710 - RNA, 22 nt, Human
aacugaacaccauugaaggcuu

SEQ ID NO: 1358711 - RNA, 21 nt, Human
aacugaacaccauugaaggcu

SEQ ID NO: 1358712 - RNA, 16 nt, Human
aacucuguuacacuuu

SEQ ID NO: 1358713 - RNA, 13 nt, Human
aacucugguggca

SEQ ID NO: 1358714 - RNA, 12 nt, Human
aacucugguggc

SEQ ID NO: 1358715 - RNA, 18 nt, Human
aacucugguggcacagga

SEQ ID NO: 1358716 - RNA, 20 nt, Human
aacugaaaucauacuucuua

SEQ ID NO: 1358717 - RNA, 12 nt, Human
aacagaggauau

SEQ ID NO: 1358718 - RNA, 19 nt, Human
aacagagacugaauagaua

SEQ ID NO: 1358719 - RNA, 16 nt, Human
guccuacagaaaaacc

SEQ ID NO: 1358720 - RNA, 15 nt, Human
guccuacagaaaaac

SEQ ID NO: 1358721 - RNA, 14 nt, Human
guccuacagaaaaa

SEQ ID NO: 1358722 - RNA, 18 nt, Human
aacagguauauacuuuga

SEQ ID NO: 1358723 - RNA, 17 nt, Human
aacagguauauacuuug

SEQ ID NO: 1358724 - RNA, 16 nt, Human
aacagugaagacagaa

SEQ ID NO: 1358725 - RNA, 19 nt, Human
aacagguuauaacaguguu

SEQ ID NO: 1358726 - RNA, 22 nt, Human
aacauaaucuucugccuucuca

SEQ ID NO: 1358727 - RNA, 13 nt, Human
aacagugagccug

SEQ ID NO: 1358728 - RNA, 17 nt, Human
aacagugaagacagaag

SEQ ID NO: 1358729 - RNA, 21 nt, Human
aacagugagccugaauuuugu

SEQ ID NO: 1358730 - RNA, 20 nt, Human
aacauaaucuucugccuucu

SEQ ID NO: 1358731 - RNA, 22 nt, Human
aacauaagcuauuuuucuaacu

SEQ ID NO: 1358732 - RNA, 20 nt, Human
aacauaagcuauuuuucuaa

SEQ ID NO: 1358733 - RNA, 18 nt, Human
aacauaagcuauuuuucu

SEQ ID NO: 1358734 - RNA, 15 nt, Human
aacauaagcuauuuu

SEQ ID NO: 1358735 - RNA, 13 nt, Human
aacauaagcuauu

SEQ ID NO: 1358736 - RNA, 15 nt, Human
aacauauauauacua

SEQ ID NO: 1358737 - RNA, 16 nt, Human
aacauagacagaagaa

SEQ ID NO: 1358738 - RNA, 15 nt, Human
aacauagacagaaga

SEQ ID NO: 1358739 - RNA, 22 nt, Human
aacauagaaauugccugacgaa

SEQ ID NO: 1358740 - RNA, 16 nt, Human
aacauauauaacaaug

SEQ ID NO: 1358741 - RNA, 19 nt, Human
aacauagacagaagaaaca

SEQ ID NO: 1358742 - RNA, 17 nt, Human
aacauguuuccagcauu

SEQ ID NO: 1358743 - RNA, 16 nt, Human
aacauguuuccagcau

SEQ ID NO: 1358744 - RNA, 15 nt, Human
aacauguuuccagca

SEQ ID NO: 1358745 - RNA, 11 nt, Human
aacauguuucc

SEQ ID NO: 1358746 - RNA, 20 nt, Human
aacauguuauuuguaauaga

SEQ ID NO: 1358747 - RNA, 14 nt, Human
aacauauuguugaa

SEQ ID NO: 1358748 - RNA, 20 nt, Human
guccuaauaauaucccacug

SEQ ID NO: 1358749 - RNA, 22 nt, Human
guccuaaccucgggccugcugc

SEQ ID NO: 1358750 - RNA, 19 nt, Human
guccguucacauguguggu

SEQ ID NO: 1358751 - RNA, 18 nt, Human
gucccggaggcggugggc

SEQ ID NO: 1358752 - RNA, 16 nt, Human
gucccgauuguaacuc

SEQ ID NO: 1358753 - RNA, 12 nt, Human
guccccucaccu

SEQ ID NO: 1358754 - RNA, 17 nt, Human
guccccuagagucccag

SEQ ID NO: 1358755 - RNA, 21 nt, Human
gucccccucuguccaggcacu

SEQ ID NO: 1358756 - RNA, 19 nt, Human
gucccccucuguccaggca

SEQ ID NO: 1358757 - RNA, 13 nt, Human
gucccccucuguc

SEQ ID NO: 1358758 - RNA, 23 nt, Human
guccaugggcagagcccaaggga

SEQ ID NO: 1358759 - RNA, 18 nt, Human
guccaugggcagagccca

SEQ ID NO: 1358760 - RNA, 16 nt, Human
guccaugggcagagcc

SEQ ID NO: 1358761 - RNA, 14 nt, Human
guccaugggcagag

SEQ ID NO: 1358762 - RNA, 13 nt, Human
guccaugggcaga

SEQ ID NO: 1358763 - RNA, 14 nt, Human
guccccccacuccc

SEQ ID NO: 1358764 - RNA, 12 nt, Human
guccccccacuc

SEQ ID NO: 1358765 - RNA, 19 nt, Human
guagcuccuccccuggagg

SEQ ID NO: 1358766 - RNA, 13 nt, Human
guagcuccucccc

SEQ ID NO: 1358767 - RNA, 12 nt, Human
guagcuccuccc

SEQ ID NO: 1358768 - RNA, 10 nt, Human
guagcuccuc

SEQ ID NO: 1358769 - RNA, 18 nt, Human
guagcuacagagaaacca

SEQ ID NO: 1358770 - RNA, 23 nt, Human
guagcuacagagaaaccagcuuc

SEQ ID NO: 1358771 - RNA, 18 nt, Human
guagccuuuuuguauaaa

SEQ ID NO: 1358772 - RNA, 11 nt, Human
guagccuuuuu

SEQ ID NO: 1358773 - RNA, 22 nt, Human
guagccucaaucgagugagaca

SEQ ID NO: 1358774 - RNA, 17 nt, Human
guagcgucuuucuuuuu

SEQ ID NO: 1358775 - RNA, 23 nt, Human
guagcgggggaggguaggcagga

SEQ ID NO: 1358776 - RNA, 13 nt, Human
guagcguuuuuua

SEQ ID NO: 1358777 - RNA, 17 nt, Human
guagcguuuuuuaaaug

SEQ ID NO: 1358778 - RNA, 18 nt, Human
guagcguuuuuuaaaugu

SEQ ID NO: 1358779 - RNA, 16 nt, Human
guagcuacagagaaac

SEQ ID NO: 1358780 - RNA, 15 nt, Human
guagcuacagagaaa

SEQ ID NO: 1358781 - RNA, 14 nt, Human
guagcuacagagaa

SEQ ID NO: 1358782 - RNA, 13 nt, Human
guagcuacagaga

SEQ ID NO: 1358783 - RNA, 18 nt, Human
guagcgucuuucuuuuuu

SEQ ID NO: 1358784 - RNA, 22 nt, Human
guagcguuuuuuaaauguauac

SEQ ID NO: 1358785 - RNA, 23 nt, Human
gucuccagaaagccccacccagg

SEQ ID NO: 1358786 - RNA, 15 nt, Human
gucuccagaaagccc

SEQ ID NO: 1358787 - RNA, 13 nt, Human
gucuccagaaagc

SEQ ID NO: 1358788 - RNA, 16 nt, Human
gucucaggcugccuga

SEQ ID NO: 1358789 - RNA, 18 nt, Human
gucucaggcugccugagu

SEQ ID NO: 1358790 - RNA, 17 nt, Human
gucucaaugcucauaac

SEQ ID NO: 1358791 - RNA, 12 nt, Human
gucucaaugcuc

SEQ ID NO: 1358792 - RNA, 14 nt, Human
gucucaaugcucau

SEQ ID NO: 1358793 - RNA, 22 nt, Human
gucucaaacuccugaccucagg

SEQ ID NO: 1358794 - RNA, 13 nt, Human
gucuauaaagcau

SEQ ID NO: 1358795 - RNA, 15 nt, Human
gucucaaacuccuga

SEQ ID NO: 1358796 - RNA, 14 nt, Human
gucuccauggcccu

SEQ ID NO: 1358797 - RNA, 16 nt, Human
aacauuuucuggccag

SEQ ID NO: 1358798 - RNA, 12 nt, Human
aacauuuucugg

SEQ ID NO: 1358799 - RNA, 21 nt, Human
gucuccaggggcugcuuccuc

SEQ ID NO: 1358800 - RNA, 20 nt, Human
gucuccaggggcugcuuccu

SEQ ID NO: 1358801 - RNA, 19 nt, Human
gucuccaggggcugcuucc

SEQ ID NO: 1358802 - RNA, 16 nt, Human
gucuccaggggcugcu

SEQ ID NO: 1358803 - RNA, 15 nt, Human
gucuccaggggcugc

SEQ ID NO: 1358804 - RNA, 20 nt, Human
gucuccagaaagccccaccc

SEQ ID NO: 1358805 - RNA, 21 nt, Human
gucuccaguauccacuuugca

SEQ ID NO: 1358806 - RNA, 23 nt, Human
gucuccaggggcugcuuccuccu

SEQ ID NO: 1358807 - RNA, 22 nt, Human
gucuccaggggcugcuuccucc

SEQ ID NO: 1358808 - RNA, 16 nt, Human
aaccaacuuuucuauu

SEQ ID NO: 1358809 - RNA, 23 nt, Human
aacauuuugaaagucuguccuug

SEQ ID NO: 1358810 - RNA, 15 nt, Human
aaccaaaucuggaag

SEQ ID NO: 1358811 - RNA, 22 nt, Human
aaccaaaucacugaacuuugcu

SEQ ID NO: 1358812 - RNA, 16 nt, Human
aaccaaauauuccaga

SEQ ID NO: 1358813 - RNA, 19 nt, Human
aacauuaauagcagccuuu

SEQ ID NO: 1358814 - RNA, 20 nt, Human
aacauuaauagcagccuuuc

SEQ ID NO: 1358815 - RNA, 13 nt, Human
aacauuaaaauau

SEQ ID NO: 1358816 - RNA, 22 nt, Human
aacauguuuccagcauucccag

SEQ ID NO: 1358817 - RNA, 21 nt, Human
aacauguuuccagcauuccca

SEQ ID NO: 1358818 - RNA, 19 nt, Human
aacauguuuccagcauucc

SEQ ID NO: 1358819 - RNA, 18 nt, Human
aacauguuuccagcauuc

SEQ ID NO: 1358820 - RNA, 17 nt, Human
guccugaucagagccgu

SEQ ID NO: 1358821 - RNA, 21 nt, Human
aacauuacucugaaauuguaa

SEQ ID NO: 1358822 - RNA, 20 nt, Human
guccugcaccggggccuggg

SEQ ID NO: 1358823 - RNA, 19 nt, Human
guccugcaccggggccugg

SEQ ID NO: 1358824 - RNA, 15 nt, Human
guccugcaccggggc

SEQ ID NO: 1358825 - RNA, 21 nt, Human
guccuugugaugugcacguaa

SEQ ID NO: 1358826 - RNA, 14 nt, Human
guccuuggccugcu

SEQ ID NO: 1358827 - RNA, 20 nt, Human
guccuuggcaggcugauuuc

SEQ ID NO: 1358828 - RNA, 22 nt, Human
guccugccuguggcgccgucuc

SEQ ID NO: 1358829 - RNA, 16 nt, Human
gucgaaagcucuagaa

SEQ ID NO: 1358830 - RNA, 20 nt, Human
guccuuuuuccucuccacac

SEQ ID NO: 1358831 - RNA, 19 nt, Human
guccuuuuuuuccaucuuu

SEQ ID NO: 1358832 - RNA, 16 nt, Human
guccuuuuuuuccauc

SEQ ID NO: 1358833 - RNA, 16 nt, Human
guccuuuuuccucucc

SEQ ID NO: 1358834 - RNA, 22 nt, Human
gucgagaaagaggcaccaggaa

SEQ ID NO: 1358835 - RNA, 20 nt, Human
gucgcccaggcuggagugca

SEQ ID NO: 1358836 - RNA, 13 nt, Human
gucgccaggcuag

SEQ ID NO: 1358837 - RNA, 22 nt, Human
gucuaucaaccccagacacugg

SEQ ID NO: 1358838 - RNA, 23 nt, Human
gucuaucaaccccagacacuggu

SEQ ID NO: 1358839 - RNA, 21 nt, Human
gucuaucaaccccagacacug

SEQ ID NO: 1358840 - RNA, 20 nt, Human
gucuauaaagcauuuaaccc

SEQ ID NO: 1358841 - RNA, 15 nt, Human
gucuauaaagcauuu

SEQ ID NO: 1358842 - RNA, 15 nt, Human
gucuacuugcucagg

SEQ ID NO: 1358843 - RNA, 14 nt, Human
gucgcccuggacug

SEQ ID NO: 1358844 - RNA, 20 nt, Human
gucgcccaugcuggagugca

SEQ ID NO: 1358845 - RNA, 18 nt, Human
gucgcccuggacugugug

SEQ ID NO: 1358846 - RNA, 16 nt, Human
aagaaaaauaaagaaa

SEQ ID NO: 1358847 - RNA, 15 nt, Human
aagaaaaauaaagaa

SEQ ID NO: 1358848 - RNA, 14 nt, Human
aagaaaaauaaaga

SEQ ID NO: 1358849 - RNA, 22 nt, Human
aagaaaaaggaugcacagaguu

SEQ ID NO: 1358850 - RNA, 20 nt, Human
aagaaaaaggaugcacagag

SEQ ID NO: 1358851 - RNA, 19 nt, Human
aacuugugucccuaaugug

SEQ ID NO: 1358852 - RNA, 16 nt, Human
aacuugugcccucccu

SEQ ID NO: 1358853 - RNA, 20 nt, Human
aagaaaauaagagcucagga

SEQ ID NO: 1358854 - RNA, 22 nt, Human
aagaaaagguucuuacugcuug

SEQ ID NO: 1358855 - RNA, 23 nt, Human
aagaaaagaugcacuuugcuuua

SEQ ID NO: 1358856 - RNA, 11 nt, Human
aagaaaagaug

SEQ ID NO: 1358857 - RNA, 13 nt, Human
aagaaaacaucuu

SEQ ID NO: 1358858 - RNA, 17 nt, Human
aagaaaacaucuuuaag

SEQ ID NO: 1358859 - RNA, 16 nt, Human
aagaagggacugagag

SEQ ID NO: 1358860 - RNA, 23 nt, Human
aagaaggcaucgucaugcacagu

SEQ ID NO: 1358861 - RNA, 24 nt, Human
aagaagcccggcuccuggucaccu

SEQ ID NO: 1358862 - RNA, 19 nt, Human
aagaagcccggcuccuggu

SEQ ID NO: 1358863 - RNA, 17 nt, Human
aagaagcccggcuccug

SEQ ID NO: 1358864 - RNA, 19 nt, Human
aagaagcccccagcuaaga

SEQ ID NO: 1358865 - RNA, 16 nt, Human
aagaagcccccagcua

SEQ ID NO: 1358866 - RNA, 15 nt, Human
aagaagcccccagcu

SEQ ID NO: 1358867 - RNA, 19 nt, Human
aagaagccacagaccuagg

SEQ ID NO: 1358868 - RNA, 22 nt, Human
aagaagcauuuuguaaguugaa

SEQ ID NO: 1358869 - RNA, 22 nt, Human
aagaagcaguggccuuauugca

SEQ ID NO: 1358870 - RNA, 16 nt, Human
aagaaaauuacaaaaa

SEQ ID NO: 1358871 - RNA, 15 nt, Human
aagaaaaucuuuaua

SEQ ID NO: 1358872 - RNA, 13 nt, Human
aagaaaaucacuu

SEQ ID NO: 1358873 - RNA, 13 nt, Human
aagaaaauaucac

SEQ ID NO: 1358874 - RNA, 15 nt, Human
aagaaauaaguuuuu

SEQ ID NO: 1358875 - RNA, 23 nt, Human
aagaaauaaaaggaagccaaaga

SEQ ID NO: 1358876 - RNA, 21 nt, Human
aagaaauaaaaggaagccaaa

SEQ ID NO: 1358877 - RNA, 18 nt, Human
aagaaaguguauuuggaa

SEQ ID NO: 1358878 - RNA, 15 nt, Human
aagaaaguguauuug

SEQ ID NO: 1358879 - RNA, 12 nt, Human
aagaaaguguau

SEQ ID NO: 1358880 - RNA, 13 nt, Human
aagaaaguccacc

SEQ ID NO: 1358881 - RNA, 16 nt, Human
aagaaagucagccaua

SEQ ID NO: 1358882 - RNA, 20 nt, Human
aagaaaggcuguuaaauaca

SEQ ID NO: 1358883 - RNA, 23 nt, Human
aagaaaggaagcauuguaaaaua

SEQ ID NO: 1358884 - RNA, 19 nt, Human
aagaaaauuuuuguaguag

SEQ ID NO: 1358885 - RNA, 20 nt, Human
aagaaaggaagcauuguaaa

SEQ ID NO: 1358886 - RNA, 21 nt, Human
gugccugacacacuaaccaag

SEQ ID NO: 1358887 - RNA, 14 nt, Human
gugccaauuucaag

SEQ ID NO: 1358888 - RNA, 22 nt, Human
gugccaaguccagguccuggug

SEQ ID NO: 1358889 - RNA, 18 nt, Human
aacuugcuuaucaacuuc

SEQ ID NO: 1358890 - RNA, 14 nt, Human
aacuuggaaauagu

SEQ ID NO: 1358891 - RNA, 17 nt, Human
aacuuggauacuuggau

SEQ ID NO: 1358892 - RNA, 22 nt, Human
aacuugguuuugcuacauaauu

SEQ ID NO: 1358893 - RNA, 16 nt, Human
aacuugguuuugcuac

SEQ ID NO: 1358894 - RNA, 21 nt, Human
aacuugguuuugcuacauaau

SEQ ID NO: 1358895 - RNA, 20 nt, Human
aacuuguaauuuuuuuaauu

SEQ ID NO: 1358896 - RNA, 15 nt, Human
aacuuguauuaugug

SEQ ID NO: 1358897 - RNA, 23 nt, Human
gugcacguaaaguacuuguaguu

SEQ ID NO: 1358898 - RNA, 22 nt, Human
aacugcaugcccagagacccag

SEQ ID NO: 1358899 - RNA, 18 nt, Human
aacugcaugcccagagac

SEQ ID NO: 1358900 - RNA, 17 nt, Human
aacugcaugcccagaga

SEQ ID NO: 1358901 - RNA, 16 nt, Human
aacugcauacacuuuu

SEQ ID NO: 1358902 - RNA, 23 nt, Human
aacugcagggaaaauuauuugca

SEQ ID NO: 1358903 - RNA, 14 nt, Human
aacugcagggaaaa

SEQ ID NO: 1358904 - RNA, 23 nt, Human
aacugcaggcccuggccuccccu

SEQ ID NO: 1358905 - RNA, 21 nt, Human
gugccaaguccagguccuggu

SEQ ID NO: 1358906 - RNA, 20 nt, Human
gugccaaguccagguccugg

SEQ ID NO: 1358907 - RNA, 19 nt, Human
gugccaaguccagguccug

SEQ ID NO: 1358908 - RNA, 18 nt, Human
gugccaaguccagguccu

SEQ ID NO: 1358909 - RNA, 19 nt, Human
gugcauuuggagggaguga

SEQ ID NO: 1358910 - RNA, 15 nt, Human
gugcauuuggugguu

SEQ ID NO: 1358911 - RNA, 22 nt, Human
gugcacuaauguguaagacaaa

SEQ ID NO: 1358912 - RNA, 20 nt, Human
gugcacuaauguguaagaca

SEQ ID NO: 1358913 - RNA, 21 nt, Human
gugcauuugaggucuguucuu

SEQ ID NO: 1358914 - RNA, 22 nt, Human
gugcauuugaggucuguucuuu

SEQ ID NO: 1358915 - RNA, 14 nt, Human
aagaaguaaaagca

SEQ ID NO: 1358916 - RNA, 22 nt, Human
aagaaguaaaagcaaaaaagaa

SEQ ID NO: 1358917 - RNA, 14 nt, Human
aagaaggugaauag

SEQ ID NO: 1358918 - RNA, 17 nt, Human
aagaagggacugagaga

SEQ ID NO: 1358919 - RNA, 16 nt, Human
aagaagggcugguauu

SEQ ID NO: 1358920 - RNA, 18 nt, Human
gugcuggaauucuaacaa

SEQ ID NO: 1358921 - RNA, 16 nt, Human
gugcugcugugugcuu

SEQ ID NO: 1358922 - RNA, 15 nt, Human
gugcugcugugugcu

SEQ ID NO: 1358923 - RNA, 18 nt, Human
gugcuggagguuggaucu

SEQ ID NO: 1358924 - RNA, 16 nt, Human
gugcugggccccugcc

SEQ ID NO: 1358925 - RNA, 19 nt, Human
gugcugggccccugccucu

SEQ ID NO: 1358926 - RNA, 19 nt, Human
gugcuggggccugguuccc

SEQ ID NO: 1358927 - RNA, 20 nt, Human
gugcuggucccggggccagc

SEQ ID NO: 1358928 - RNA, 15 nt, Human
gugcuggggccuggu

SEQ ID NO: 1358929 - RNA, 13 nt, Human
gugcuguauaaaa

SEQ ID NO: 1358930 - RNA, 15 nt, Human
gugcuguauaaaauc

SEQ ID NO: 1358931 - RNA, 16 nt, Human
guggaacugcugccac

SEQ ID NO: 1358932 - RNA, 16 nt, Human
gugcuguauaaaauca

SEQ ID NO: 1358933 - RNA, 17 nt, Human
gugcuguauaaaaucag

SEQ ID NO: 1358934 - RNA, 21 nt, Human
gugcuguauaaaaucagccaa

SEQ ID NO: 1358935 - RNA, 14 nt, Human
guggaagcuugggg

SEQ ID NO: 1358936 - RNA, 19 nt, Human
guggaagcuuggggaagac

SEQ ID NO: 1358937 - RNA, 16 nt, Human
guggacacacacagac

SEQ ID NO: 1358938 - RNA, 16 nt, Human
guggaagcuuggggaa

SEQ ID NO: 1358939 - RNA, 11 nt, Human
guggacaccug

SEQ ID NO: 1358940 - RNA, 12 nt, Human
guggacaccugc

SEQ ID NO: 1358941 - RNA, 13 nt, Human
guggacaccugcc

SEQ ID NO: 1358942 - RNA, 14 nt, Human
guggacaccugccc

SEQ ID NO: 1358943 - RNA, 16 nt, Human
guggacaccugcccug

SEQ ID NO: 1358944 - RNA, 17 nt, Human
guggacaccugcccugc

SEQ ID NO: 1358945 - RNA, 18 nt, Human
guggacaccugcccugcc

SEQ ID NO: 1358946 - RNA, 19 nt, Human
guggacaccugcccugccc

SEQ ID NO: 1358947 - RNA, 15 nt, Human
guggacuaaaagaua

SEQ ID NO: 1358948 - RNA, 23 nt, Human
guggacuaaaagauauaagugcu

SEQ ID NO: 1358949 - RNA, 16 nt, Human
guggcacaggcccccu

SEQ ID NO: 1358950 - RNA, 18 nt, Human
guggcacuggggcagggg

SEQ ID NO: 1358951 - RNA, 17 nt, Human
guggcacuggggcaggg

SEQ ID NO: 1358952 - RNA, 15 nt, Human
guggcagaguuacag

SEQ ID NO: 1358953 - RNA, 12 nt, Human
guggcacaggcc

SEQ ID NO: 1358954 - RNA, 19 nt, Human
guggcaagugaauuugccu

SEQ ID NO: 1358955 - RNA, 22 nt, Human
guggcaaagccuucauugccuu

SEQ ID NO: 1358956 - RNA, 23 nt, Human
guggauuuaacagaaauguacag

SEQ ID NO: 1358957 - RNA, 12 nt, Human
guggacucuggu

SEQ ID NO: 1358958 - RNA, 21 nt, Human
guggacuagaccuccagcugu

SEQ ID NO: 1358959 - RNA, 21 nt, Human
guggacucagggcagcgccag

SEQ ID NO: 1358960 - RNA, 16 nt, Human
guggacucagggcagc

SEQ ID NO: 1358961 - RNA, 15 nt, Human
guggacucagggcag

SEQ ID NO: 1358962 - RNA, 14 nt, Human
guggacucagggca

SEQ ID NO: 1358963 - RNA, 20 nt, Human
guggacugagugggaagccc

SEQ ID NO: 1358964 - RNA, 18 nt, Human
guggacugagugggaagc

SEQ ID NO: 1358965 - RNA, 17 nt, Human
guggacugagugggaag

SEQ ID NO: 1358966 - RNA, 21 nt, Human
guggauuuaacagaaauguac

SEQ ID NO: 1358967 - RNA, 12 nt, Human
aagaauguuaag

SEQ ID NO: 1358968 - RNA, 12 nt, Human
aagaaucagaga

SEQ ID NO: 1358969 - RNA, 19 nt, Human
aagaauguuaagacuugac

SEQ ID NO: 1358970 - RNA, 23 nt, Human
aagaaucagagaaggaacauacc

SEQ ID NO: 1358971 - RNA, 21 nt, Human
aagaaucacaauaauuuucua

SEQ ID NO: 1358972 - RNA, 19 nt, Human
aagaauaucuguaauggua

SEQ ID NO: 1358973 - RNA, 17 nt, Human
aagaauaucuguaaugg

SEQ ID NO: 1358974 - RNA, 20 nt, Human
aagaauaucuguaaugguac

SEQ ID NO: 1358975 - RNA, 16 nt, Human
aagaauaucuggcaaa

SEQ ID NO: 1358976 - RNA, 19 nt, Human
guggcagcaacggcacagc

SEQ ID NO: 1358977 - RNA, 13 nt, Human
guggcagcaacaa

SEQ ID NO: 1358978 - RNA, 16 nt, Human
aagacaaaaagcuacu

SEQ ID NO: 1358979 - RNA, 14 nt, Human
aagaauuauuuugu

SEQ ID NO: 1358980 - RNA, 16 nt, Human
aagaauuauuuugaug

SEQ ID NO: 1358981 - RNA, 11 nt, Human
aagaauuauuu

SEQ ID NO: 1358982 - RNA, 18 nt, Human
aagaauguuaagacuuga

SEQ ID NO: 1358983 - RNA, 24 nt, Human
aagaauuucuaggacugaauuaug

SEQ ID NO: 1358984 - RNA, 13 nt, Human
aagagcucaggau

SEQ ID NO: 1358985 - RNA, 12 nt, Human
aagagcucagga

SEQ ID NO: 1358986 - RNA, 20 nt, Human
aagagcuacguauuuaauag

SEQ ID NO: 1358987 - RNA, 23 nt, Human
guggccccacccugggcccuggg

SEQ ID NO: 1358988 - RNA, 21 nt, Human
guggccccacccugggcccug

SEQ ID NO: 1358989 - RNA, 17 nt, Human
guggccccguuucuggu

SEQ ID NO: 1358990 - RNA, 16 nt, Human
guggccccguuucugg

SEQ ID NO: 1358991 - RNA, 22 nt, Human
aagacuggcuuuuauuaaugca

SEQ ID NO: 1358992 - RNA, 15 nt, Human
aagagauuccugagc

SEQ ID NO: 1358993 - RNA, 23 nt, Human
aagacuggcuuuuauuaaugcac

SEQ ID NO: 1358994 - RNA, 11 nt, Human
aagacuggcuu

SEQ ID NO: 1358995 - RNA, 22 nt, Human
aagacugcuguggccaggaggu

SEQ ID NO: 1358996 - RNA, 23 nt, Human
aagacuggaagcuaauuugcauu

SEQ ID NO: 1358997 - RNA, 22 nt, Human
aagacuggaagcuaauuugcau

SEQ ID NO: 1358998 - RNA, 20 nt, Human
aagacuggaagcuaauuugc

SEQ ID NO: 1358999 - RNA, 21 nt, Human
aagacugcuguggccaggagg

SEQ ID NO: 1359000 - RNA, 20 nt, Human
aagacugcuguggccaggag

SEQ ID NO: 1359001 - RNA, 19 nt, Human
aagacugcuguggccagga

SEQ ID NO: 1359002 - RNA, 18 nt, Human
aagacugcuguggccagg

SEQ ID NO: 1359003 - RNA, 14 nt, Human
aagacuccuagcug

SEQ ID NO: 1359004 - RNA, 12 nt, Human
aagacucauccg

SEQ ID NO: 1359005 - RNA, 11 nt, Human
aagacucaucc

SEQ ID NO: 1359006 - RNA, 10 nt, Human
aagacucauc

SEQ ID NO: 1359007 - RNA, 19 nt, Human
aagacucaaauguucuaag

SEQ ID NO: 1359008 - RNA, 18 nt, Human
aagacucaaauguucuaa

SEQ ID NO: 1359009 - RNA, 17 nt, Human
aagacucaaauguucua

SEQ ID NO: 1359010 - RNA, 16 nt, Human
aagacucaaauguucu

SEQ ID NO: 1359011 - RNA, 14 nt, Human
aagacucaaauguu

SEQ ID NO: 1359012 - RNA, 15 nt, Human
aagaccccuaacccu

SEQ ID NO: 1359013 - RNA, 15 nt, Human
aagacccccagcacu

SEQ ID NO: 1359014 - RNA, 13 nt, Human
aagacccccagca

SEQ ID NO: 1359015 - RNA, 23 nt, Human
gugggauguucagcacugucccu

SEQ ID NO: 1359016 - RNA, 14 nt, Human
gugggagccucgca

SEQ ID NO: 1359017 - RNA, 12 nt, Human
gugggagccucg

SEQ ID NO: 1359018 - RNA, 11 nt, Human
gugggagccuc

SEQ ID NO: 1359019 - RNA, 13 nt, Human
gugggagccucgc

SEQ ID NO: 1359020 - RNA, 19 nt, Human
gugggagcaaacugcaugc

SEQ ID NO: 1359021 - RNA, 23 nt, Human
gugggagaccggccugccaggag

SEQ ID NO: 1359022 - RNA, 22 nt, Human
gugggagaccggccugccagga

SEQ ID NO: 1359023 - RNA, 21 nt, Human
gugggagaccggccugccagg

SEQ ID NO: 1359024 - RNA, 20 nt, Human
gugggagcaaacugcaugcc

SEQ ID NO: 1359025 - RNA, 23 nt, Human
gugggagcaaacugcaugcccag

SEQ ID NO: 1359026 - RNA, 16 nt, Human
gugggaaaugguacug

SEQ ID NO: 1359027 - RNA, 23 nt, Human
gugggaaagauuacuuuuucuuu

SEQ ID NO: 1359028 - RNA, 19 nt, Human
guggcuuuaggagcagugg

SEQ ID NO: 1359029 - RNA, 17 nt, Human
guggcuuucagagccuc

SEQ ID NO: 1359030 - RNA, 22 nt, Human
guggcuugagaaauauggacac

SEQ ID NO: 1359031 - RNA, 23 nt, Human
guggccucagcucccacaagccu

SEQ ID NO: 1359032 - RNA, 23 nt, Human
guggccccguuucugguggucug

SEQ ID NO: 1359033 - RNA, 13 nt, Human
gugguggccuggu

SEQ ID NO: 1359034 - RNA, 18 nt, Human
gugguggccuggucccug

SEQ ID NO: 1359035 - RNA, 16 nt, Human
gugguggcacaggccc

SEQ ID NO: 1359036 - RNA, 22 nt, Human
gugguggaaacuuuucuuaaaa

SEQ ID NO: 1359037 - RNA, 23 nt, Human
guggugugucccccucuguccag

SEQ ID NO: 1359038 - RNA, 15 nt, Human
guggugucagacccu

SEQ ID NO: 1359039 - RNA, 22 nt, Human
guggguccaugggcagagccca

SEQ ID NO: 1359040 - RNA, 20 nt, Human
guggguccaugggcagagcc

SEQ ID NO: 1359041 - RNA, 18 nt, Human
guggguccaugggcagag

SEQ ID NO: 1359042 - RNA, 16 nt, Human
guggguauaaaagaug

SEQ ID NO: 1359043 - RNA, 12 nt, Human
guggguauaaaa

SEQ ID NO: 1359044 - RNA, 13 nt, Human
guggguauaaaag

SEQ ID NO: 1359045 - RNA, 15 nt, Human
guggguauaaaagau

SEQ ID NO: 1359046 - RNA, 22 nt, Human
guggggguagggggcuggagga

SEQ ID NO: 1359047 - RNA, 19 nt, Human
guggggguagggggcugga

SEQ ID NO: 1359048 - RNA, 19 nt, Human
guggggggucccaaagagu

SEQ ID NO: 1359049 - RNA, 22 nt, Human
gugggauuaugggucacaggaa

SEQ ID NO: 1359050 - RNA, 24 nt, Human
gugggauguucagcacugucccuu

SEQ ID NO: 1359051 - RNA, 18 nt, Human
guggggggggugcugggc

SEQ ID NO: 1359052 - RNA, 23 nt, Human
aagaucacuuucucaguuuucau

SEQ ID NO: 1359053 - RNA, 17 nt, Human
aagaucacuuucucagu

SEQ ID NO: 1359054 - RNA, 15 nt, Human
aagaucacuuucuca

SEQ ID NO: 1359055 - RNA, 12 nt, Human
aagaucaauaaa

SEQ ID NO: 1359056 - RNA, 22 nt, Human
aagauccuagauccuaaggguc

SEQ ID NO: 1359057 - RNA, 17 nt, Human
aagauauuuugcuuugu

SEQ ID NO: 1359058 - RNA, 20 nt, Human
aagauauuuugcuuugugau

SEQ ID NO: 1359059 - RNA, 22 nt, Human
aagauauuuugcuuugugauuu

SEQ ID NO: 1359060 - RNA, 16 nt, Human
aagaugcacuuugcuu

SEQ ID NO: 1359061 - RNA, 15 nt, Human
aagaugacugagggu

SEQ ID NO: 1359062 - RNA, 14 nt, Human
aagaugacugaggg

SEQ ID NO: 1359063 - RNA, 13 nt, Human
aagaugacugagg

SEQ ID NO: 1359064 - RNA, 13 nt, Human
aagaugaucauuu

SEQ ID NO: 1359065 - RNA, 19 nt, Human
aagcaaaucauuuguuuaa

SEQ ID NO: 1359066 - RNA, 16 nt, Human
aagcaaaucauuuguu

SEQ ID NO: 1359067 - RNA, 14 nt, Human
aagcaaaucauuug

SEQ ID NO: 1359068 - RNA, 21 nt, Human
aagcaaacucuaaaauuauaa

SEQ ID NO: 1359069 - RNA, 22 nt, Human
aagcaaaauuauagaaguuuag

SEQ ID NO: 1359070 - RNA, 19 nt, Human
aagcaaaauuuuuucucua

SEQ ID NO: 1359071 - RNA, 19 nt, Human
aagcaaaugucaugcugcc

SEQ ID NO: 1359072 - RNA, 16 nt, Human
aagcaaaugucaugcu

SEQ ID NO: 1359073 - RNA, 18 nt, Human
aagcaaaucgaaugaaau

SEQ ID NO: 1359074 - RNA, 17 nt, Human
aagcaaaucgaaugaaa

SEQ ID NO: 1359075 - RNA, 13 nt, Human
aagcaaaugugaa

SEQ ID NO: 1359076 - RNA, 14 nt, Human
aagcaaaugugaau

SEQ ID NO: 1359077 - RNA, 20 nt, Human
aagcaaaugugaaucauuuu

SEQ ID NO: 1359078 - RNA, 16 nt, Human
aagcaagauuucagau

SEQ ID NO: 1359079 - RNA, 17 nt, Human
gugugaggccagggcag

SEQ ID NO: 1359080 - RNA, 15 nt, Human
gugugaggccagggc

SEQ ID NO: 1359081 - RNA, 14 nt, Human
gugugaggccaggg

SEQ ID NO: 1359082 - RNA, 12 nt, Human
gugugaggccag

SEQ ID NO: 1359083 - RNA, 23 nt, Human
gugucuugggcagagcuggcucu

SEQ ID NO: 1359084 - RNA, 20 nt, Human
gugucuugggcagagcuggc

SEQ ID NO: 1359085 - RNA, 17 nt, Human
gugucuugggcagagcu

SEQ ID NO: 1359086 - RNA, 16 nt, Human
gugucuugggcagagc

SEQ ID NO: 1359087 - RNA, 21 nt, Human
guguccaugcgcucagggcca

SEQ ID NO: 1359088 - RNA, 20 nt, Human
guguccaugcgcucagggcc

SEQ ID NO: 1359089 - RNA, 19 nt, Human
guguccaugcgcucagggc

SEQ ID NO: 1359090 - RNA, 18 nt, Human
guguccaugcgcucaggg

SEQ ID NO: 1359091 - RNA, 16 nt, Human
aagcaaguauuagaau

SEQ ID NO: 1359092 - RNA, 19 nt, Human
aagcaagcugauuaaauga

SEQ ID NO: 1359093 - RNA, 18 nt, Human
guguccacgacugucucc

SEQ ID NO: 1359094 - RNA, 20 nt, Human
aagcaaguaaaaaggcuaaa

SEQ ID NO: 1359095 - RNA, 19 nt, Human
aagcaagcauucagaagaa

SEQ ID NO: 1359096 - RNA, 15 nt, Human
aagcaagcauucaga

SEQ ID NO: 1359097 - RNA, 15 nt, Human
aagcaagcaagaggc

SEQ ID NO: 1359098 - RNA, 14 nt, Human
aagcaagcaagagg

SEQ ID NO: 1359099 - RNA, 22 nt, Human
aagcaaaugucaugcugccuua

SEQ ID NO: 1359100 - RNA, 21 nt, Human
aagcaaaugucaugcugccuu

SEQ ID NO: 1359101 - RNA, 20 nt, Human
aagcaaaugucaugcugccu

SEQ ID NO: 1359102 - RNA, 13 nt, Human
aagcaagcuuaau

SEQ ID NO: 1359103 - RNA, 21 nt, Human
aagcaagcauucagaagaaaa

SEQ ID NO: 1359104 - RNA, 19 nt, Human
aagcaaguaaaaaggcuaa

SEQ ID NO: 1359105 - RNA, 13 nt, Human
gugugugugaaug

SEQ ID NO: 1359106 - RNA, 15 nt, Human
guguguguauauaua

SEQ ID NO: 1359107 - RNA, 16 nt, Human
guguugaaaauguuca

SEQ ID NO: 1359108 - RNA, 13 nt, Human
guguucuguuuug

SEQ ID NO: 1359109 - RNA, 15 nt, Human
guguucuguuuuguu

SEQ ID NO: 1359110 - RNA, 14 nt, Human
guguguugauacug

SEQ ID NO: 1359111 - RNA, 17 nt, Human
guguguuaagcucugcu

SEQ ID NO: 1359112 - RNA, 16 nt, Human
guguguuaagcucugc

SEQ ID NO: 1359113 - RNA, 21 nt, Human
guguuuaaaguucaacauguu

SEQ ID NO: 1359114 - RNA, 12 nt, Human
guguuuaaaacu

SEQ ID NO: 1359115 - RNA, 14 nt, Human
guguugauacuguu

SEQ ID NO: 1359116 - RNA, 13 nt, Human
guguugauacugu

SEQ ID NO: 1359117 - RNA, 22 nt, Human
guguugagcaucugucccccuu

SEQ ID NO: 1359118 - RNA, 19 nt, Human
guguugagccuuuucccuc

SEQ ID NO: 1359119 - RNA, 17 nt, Human
guguugaaaauguucag

SEQ ID NO: 1359120 - RNA, 18 nt, Human
aaguuauuaauuucuuca

SEQ ID NO: 1359121 - RNA, 17 nt, Human
aaguuauuaauuucuuc

SEQ ID NO: 1359122 - RNA, 20 nt, Human
aaguuacauguuugcaccuu

SEQ ID NO: 1359123 - RNA, 19 nt, Human
aaguuacauguuugcaccu

SEQ ID NO: 1359124 - RNA, 16 nt, Human
aaguuacauguuugca

SEQ ID NO: 1359125 - RNA, 17 nt, Human
aaguuaaauguagaguu

SEQ ID NO: 1359126 - RNA, 13 nt, Human
aaguuaaauguag

SEQ ID NO: 1359127 - RNA, 14 nt, Human
aaguguuuucucug

SEQ ID NO: 1359128 - RNA, 22 nt, Human
aaguguuuucucugaacacauu

SEQ ID NO: 1359129 - RNA, 13 nt, Human
aaguguuuucucu

SEQ ID NO: 1359130 - RNA, 23 nt, Human
aaguguuucauaaauuugagagu

SEQ ID NO: 1359131 - RNA, 14 nt, Human
aaguguucauuguu

SEQ ID NO: 1359132 - RNA, 22 nt, Human
aaguguuagccuuuuuucccca

SEQ ID NO: 1359133 - RNA, 23 nt, Human
aaguguuagccuuuuuuccccag

SEQ ID NO: 1359134 - RNA, 16 nt, Human
guuuuuuuuuuguuug

SEQ ID NO: 1359135 - RNA, 21 nt, Human
guuuuuuuuuucuugucuaua

SEQ ID NO: 1359136 - RNA, 18 nt, Human
guuuuuuuuuucuugucu

SEQ ID NO: 1359137 - RNA, 17 nt, Human
guuuuuuuuuuguuugu

SEQ ID NO: 1359138 - RNA, 17 nt, Human
guuuuuuuuuucuuguc

SEQ ID NO: 1359139 - RNA, 17 nt, Human
guuuuuuuuuaaagacu

SEQ ID NO: 1359140 - RNA, 23 nt, Human
aaguuauugcaguuuaucauuca

SEQ ID NO: 1359141 - RNA, 17 nt, Human
aaguuauugcaguuuau

SEQ ID NO: 1359142 - RNA, 15 nt, Human
aaguuauugcaguuu

SEQ ID NO: 1359143 - RNA, 14 nt, Human
aaguuauugcaguu

SEQ ID NO: 1359144 - RNA, 21 nt, Human
aaguucuaauaauuucuaaug

SEQ ID NO: 1359145 - RNA, 19 nt, Human
aaguucuaauaauuucuaa

SEQ ID NO: 1359146 - RNA, 18 nt, Human
aaguucuaauaauuucua

SEQ ID NO: 1359147 - RNA, 17 nt, Human
aaguucuaauaauuucu

SEQ ID NO: 1359148 - RNA, 17 nt, Human
aaguucuaagauucuga

SEQ ID NO: 1359149 - RNA, 16 nt, Human
aaguucuaagauucug

SEQ ID NO: 1359150 - RNA, 21 nt, Human
aaguucuaagauucuaaugau

SEQ ID NO: 1359151 - RNA, 20 nt, Human
aaguucuaagauucuaauga

SEQ ID NO: 1359152 - RNA, 19 nt, Human
aaguucuaagauucuaaug

SEQ ID NO: 1359153 - RNA, 18 nt, Human
aaguucuaagauucuaau

SEQ ID NO: 1359154 - RNA, 16 nt, Human
aaguucuaagauucua

SEQ ID NO: 1359155 - RNA, 15 nt, Human
aaguucuaagauucu

SEQ ID NO: 1359156 - RNA, 14 nt, Human
aaguucuaagauuc

SEQ ID NO: 1359157 - RNA, 12 nt, Human
aaguucuaagau

SEQ ID NO: 1359158 - RNA, 21 nt, Human
aaguuccaagagucuaaagau

SEQ ID NO: 1359159 - RNA, 20 nt, Human
aaguuccaagagucuaaaga

SEQ ID NO: 1359160 - RNA, 17 nt, Human
aaguuccaagagucuaa

SEQ ID NO: 1359161 - RNA, 16 nt, Human
aaguuccaagagucua

SEQ ID NO: 1359162 - RNA, 15 nt, Human
aaguuccaagagucu

SEQ ID NO: 1359163 - RNA, 21 nt, Human
aaguuuagccccugaaagcca

SEQ ID NO: 1359164 - RNA, 17 nt, Human
aaguuuagauuuuaauc

SEQ ID NO: 1359165 - RNA, 16 nt, Human
aaguuuaccagaaagc

SEQ ID NO: 1359166 - RNA, 20 nt, Human
aaguuuaauggugccuucau

SEQ ID NO: 1359167 - RNA, 13 nt, Human
uaaaauuacaacu

SEQ ID NO: 1359168 - RNA, 15 nt, Human
uaaaauuacaacuaa

SEQ ID NO: 1359169 - RNA, 17 nt, Human
uaaaauuacaacuaagu

SEQ ID NO: 1359170 - RNA, 19 nt, Human
uaaaauuacaacuaaguga

SEQ ID NO: 1359171 - RNA, 20 nt, Human
uaaaauuuguucuuguauuu

SEQ ID NO: 1359172 - RNA, 15 nt, Human
uaaaauuuguugcau

SEQ ID NO: 1359173 - RNA, 14 nt, Human
uaaaauuuguugca

SEQ ID NO: 1359174 - RNA, 13 nt, Human
uaaaauuauuuca

SEQ ID NO: 1359175 - RNA, 17 nt, Human
uaaaauuuuuaaucuuu

SEQ ID NO: 1359176 - RNA, 13 nt, Human
uaaacaaagguug

SEQ ID NO: 1359177 - RNA, 22 nt, Human
uaaacaaacuguguaacugccc

SEQ ID NO: 1359178 - RNA, 19 nt, Human
uaaacaaacuguguaacug

SEQ ID NO: 1359179 - RNA, 18 nt, Human
uaaacaaacuguguaacu

SEQ ID NO: 1359180 - RNA, 13 nt, Human
uaaaccaucuccc

SEQ ID NO: 1359181 - RNA, 20 nt, Human
uaaaccacugaaaaaauaua

SEQ ID NO: 1359182 - RNA, 13 nt, Human
uaaaccacugaaa

SEQ ID NO: 1359183 - RNA, 19 nt, Human
uaaaauuuuuaaucuuuaa

SEQ ID NO: 1359184 - RNA, 16 nt, Human
uaaaauuuuuuuagaa

SEQ ID NO: 1359185 - RNA, 17 nt, Human
uaaaauuuuuuuagaaa

SEQ ID NO: 1359186 - RNA, 18 nt, Human
uaaaauuuuuuuagaaag

SEQ ID NO: 1359187 - RNA, 19 nt, Human
uaaaauuuuuuuagaaagc

SEQ ID NO: 1359188 - RNA, 20 nt, Human
uaaaauuuuuuuagaaagca

SEQ ID NO: 1359189 - RNA, 21 nt, Human
uaaaauuuuuuuagaaagcau

SEQ ID NO: 1359190 - RNA, 22 nt, Human
uaaaauguucacuuuugacaaa

SEQ ID NO: 1359191 - RNA, 17 nt, Human
uaaaauguucacuuuug

SEQ ID NO: 1359192 - RNA, 23 nt, Human
uaaaauguguuguuccaaauacu

SEQ ID NO: 1359193 - RNA, 23 nt, Human
aaguuuuauauauuauauggaaa

SEQ ID NO: 1359194 - RNA, 21 nt, Human
aaguuuuauauauuauaugga

SEQ ID NO: 1359195 - RNA, 17 nt, Human
aaguuuuauauauuaua

SEQ ID NO: 1359196 - RNA, 16 nt, Human
aaguuuuauauauuau

SEQ ID NO: 1359197 - RNA, 15 nt, Human
aaguuuuauauauua

SEQ ID NO: 1359198 - RNA, 14 nt, Human
aaguuuuauauauu

SEQ ID NO: 1359199 - RNA, 13 nt, Human
aaguuuuauauau

SEQ ID NO: 1359200 - RNA, 19 nt, Human
aaguuuuaaaaagccaguu

SEQ ID NO: 1359201 - RNA, 17 nt, Human
aaguuuuaaaaagccag

SEQ ID NO: 1359202 - RNA, 16 nt, Human
aaguuuguuuuugcgu

SEQ ID NO: 1359203 - RNA, 20 nt, Human
aaguuugcacuaucuuucag

SEQ ID NO: 1359204 - RNA, 21 nt, Human
aaguuugcacuaucuuucagc

SEQ ID NO: 1359205 - RNA, 19 nt, Human
aaguuugcacuaucuuuca

SEQ ID NO: 1359206 - RNA, 23 nt, Human
aaguuucauucucccuuucacua

SEQ ID NO: 1359207 - RNA, 15 nt, Human
aaguuucaucauuuu

SEQ ID NO: 1359208 - RNA, 20 nt, Human
aaguuuaucaguaaauaacu

SEQ ID NO: 1359209 - RNA, 18 nt, Human
aaguuuaucaguaaauaa

SEQ ID NO: 1359210 - RNA, 16 nt, Human
aaguuuagcucugaga

SEQ ID NO: 1359211 - RNA, 15 nt, Human
aaguuuagcucugag

SEQ ID NO: 1359212 - RNA, 14 nt, Human
aaguuuagcucuga

SEQ ID NO: 1359213 - RNA, 13 nt, Human
aaguuuagcucug

SEQ ID NO: 1359214 - RNA, 23 nt, Human
aaguuuagccccugaaagccaug

SEQ ID NO: 1359215 - RNA, 22 nt, Human
aaguuuaguuugaggaauucuu

SEQ ID NO: 1359216 - RNA, 18 nt, Human
uaaagauggaguuucuaa

SEQ ID NO: 1359217 - RNA, 17 nt, Human
uaaagauggaguuucua

SEQ ID NO: 1359218 - RNA, 19 nt, Human
uaaagaugagcuuugucua

SEQ ID NO: 1359219 - RNA, 22 nt, Human
uaaagauauuuuuaucuuuaua

SEQ ID NO: 1359220 - RNA, 21 nt, Human
uaaagauauuuuuaucuuuau

SEQ ID NO: 1359221 - RNA, 18 nt, Human
uaaagauauuuuuaucuu

SEQ ID NO: 1359222 - RNA, 23 nt, Human
uaaagagucuagauucaaagguu

SEQ ID NO: 1359223 - RNA, 23 nt, Human
uaaagauacagaacucuuucaaa

SEQ ID NO: 1359224 - RNA, 13 nt, Human
uaaagagacgaau

SEQ ID NO: 1359225 - RNA, 18 nt, Human
uaaagagucuagauucaa

SEQ ID NO: 1359226 - RNA, 15 nt, Human
uaaagagucuagauu

SEQ ID NO: 1359227 - RNA, 13 nt, Human
uaaagagucuaga

SEQ ID NO: 1359228 - RNA, 21 nt, Human
uaaagagucuagauucaaagg

SEQ ID NO: 1359229 - RNA, 19 nt, Human
uaaagagucuagauucaaa

SEQ ID NO: 1359230 - RNA, 21 nt, Human
uaaagauuuuuuaauaauuua

SEQ ID NO: 1359231 - RNA, 20 nt, Human
uaaagauuuuuuaauaauuu

SEQ ID NO: 1359232 - RNA, 17 nt, Human
uaaagauuuuuuaauaa

SEQ ID NO: 1359233 - RNA, 16 nt, Human
uaaagauuuuuuaaua

SEQ ID NO: 1359234 - RNA, 12 nt, Human
uaaagauuuuuu

SEQ ID NO: 1359235 - RNA, 13 nt, Human
uaaagauuugggu

SEQ ID NO: 1359236 - RNA, 24 nt, Human
uaaagauucuauaguucuagacau

SEQ ID NO: 1359237 - RNA, 21 nt, Human
uaaagauucuauaguucuaga

SEQ ID NO: 1359238 - RNA, 20 nt, Human
uaaagauucuauaguucuag

SEQ ID NO: 1359239 - RNA, 19 nt, Human
uaaagauucuauaguucua

SEQ ID NO: 1359240 - RNA, 22 nt, Human
uaaagauggaguuucuaagguc

SEQ ID NO: 1359241 - RNA, 21 nt, Human
uaaagauggaguuucuaaggu

SEQ ID NO: 1359242 - RNA, 19 nt, Human
uaaagauggaguuucuaag

SEQ ID NO: 1359243 - RNA, 22 nt, Human
uaaagauuuuuuaauaauuuag

SEQ ID NO: 1359244 - RNA, 10 nt, Human
uaaagcaaau

SEQ ID NO: 1359245 - RNA, 19 nt, Human
uaaaggcuaccuuuguauu

SEQ ID NO: 1359246 - RNA, 21 nt, Human
uaaaggcuaccuuuguauucu

SEQ ID NO: 1359247 - RNA, 21 nt, Human
uaaagaagaccugagaaugua

SEQ ID NO: 1359248 - RNA, 20 nt, Human
uaaagaagaccugagaaugu

SEQ ID NO: 1359249 - RNA, 16 nt, Human
uaaagaagaccugaga

SEQ ID NO: 1359250 - RNA, 12 nt, Human
uaaagaagaccu

SEQ ID NO: 1359251 - RNA, 11 nt, Human
uaaagaagacc

SEQ ID NO: 1359252 - RNA, 19 nt, Human
uaaagaacacccuauauuu

SEQ ID NO: 1359253 - RNA, 16 nt, Human
uaaagaaauagaacaa

SEQ ID NO: 1359254 - RNA, 17 nt, Human
uaaagaaauagaacaag

SEQ ID NO: 1359255 - RNA, 24 nt, Human
uaaagaaaguguauuuggaaauaa

SEQ ID NO: 1359256 - RNA, 23 nt, Human
uaaagaaaguguauuuggaaaua

SEQ ID NO: 1359257 - RNA, 20 nt, Human
uaaagaaaguguauuuggaa

SEQ ID NO: 1359258 - RNA, 14 nt, Human
uaaagacaaaaaac

SEQ ID NO: 1359259 - RNA, 18 nt, Human
uaaagaauugugguuuau

SEQ ID NO: 1359260 - RNA, 20 nt, Human
uaaagaauugugguuuauau

SEQ ID NO: 1359261 - RNA, 13 nt, Human
uaaagaauuauuu

SEQ ID NO: 1359262 - RNA, 17 nt, Human
uaaagaauaugaaacau

SEQ ID NO: 1359263 - RNA, 16 nt, Human
uaaagaauuauuuugu

SEQ ID NO: 1359264 - RNA, 15 nt, Human
uaaagaauuauuuug

SEQ ID NO: 1359265 - RNA, 16 nt, Human
uaaagacaugaagcca

SEQ ID NO: 1359266 - RNA, 13 nt, Human
uaaagacaugaag

SEQ ID NO: 1359267 - RNA, 22 nt, Human
uaaagagacagugauauuggaa

SEQ ID NO: 1359268 - RNA, 15 nt, Human
uaaagacuggcuuuu

SEQ ID NO: 1359269 - RNA, 20 nt, Human
uaaagacuggcuuuuauuaa

SEQ ID NO: 1359270 - RNA, 14 nt, Human
uaaagacuggcuuu

SEQ ID NO: 1359271 - RNA, 23 nt, Human
uaaagacguuuuauaagcaucau

SEQ ID NO: 1359272 - RNA, 21 nt, Human
uaaagacguuuuauaagcauc

SEQ ID NO: 1359273 - RNA, 16 nt, Human
uaaagacguuuuauaa

SEQ ID NO: 1359274 - RNA, 16 nt, Human
uaaagacuuuuaugau

SEQ ID NO: 1359275 - RNA, 23 nt, Human
uaaacucaaaauauuuguacaua

SEQ ID NO: 1359276 - RNA, 22 nt, Human
uaaacucaaaauauuuguacau

SEQ ID NO: 1359277 - RNA, 21 nt, Human
uaaacucaaaauauuuguaca

SEQ ID NO: 1359278 - RNA, 19 nt, Human
uaaacucaaaauauuugua

SEQ ID NO: 1359279 - RNA, 16 nt, Human
uaaacucaaaauauuu

SEQ ID NO: 1359280 - RNA, 14 nt, Human
uaaacucaaaauau

SEQ ID NO: 1359281 - RNA, 12 nt, Human
uaaacucauuuc

SEQ ID NO: 1359282 - RNA, 17 nt, Human
uaaacucauuucuagca

SEQ ID NO: 1359283 - RNA, 22 nt, Human
uaaacuaucuuggugaauuuuu

SEQ ID NO: 1359284 - RNA, 21 nt, Human
uaaacuaucuuggugaauuuu

SEQ ID NO: 1359285 - RNA, 20 nt, Human
uaaacuaucuuggugaauuu

SEQ ID NO: 1359286 - RNA, 15 nt, Human
uaaacuauaagcaag

SEQ ID NO: 1359287 - RNA, 17 nt, Human
uaaacuauaagcaagaa

SEQ ID NO: 1359288 - RNA, 17 nt, Human
uaaacuagcauaucugc

SEQ ID NO: 1359289 - RNA, 19 nt, Human
uaaacuagcauaucugccu

SEQ ID NO: 1359290 - RNA, 21 nt, Human
uaaacuagcauaucugccuuu

SEQ ID NO: 1359291 - RNA, 22 nt, Human
uaaacuagcauaucugccuuua

SEQ ID NO: 1359292 - RNA, 23 nt, Human
uaaacuagcauaucugccuuuau

SEQ ID NO: 1359293 - RNA, 15 nt, Human
uaaacucuguugcaa

SEQ ID NO: 1359294 - RNA, 17 nt, Human
uaaagaaaguguauuug

SEQ ID NO: 1359295 - RNA, 16 nt, Human
uaaagaaaguguauuu

SEQ ID NO: 1359296 - RNA, 15 nt, Human
uaaagaaaguguauu

SEQ ID NO: 1359297 - RNA, 14 nt, Human
uaaagaaaguguau

SEQ ID NO: 1359298 - RNA, 13 nt, Human
uaaagaaagugua

SEQ ID NO: 1359299 - RNA, 11 nt, Human
uaaagaaagug

SEQ ID NO: 1359300 - RNA, 17 nt, Human
uaaaccgcuaaaagaaa

SEQ ID NO: 1359301 - RNA, 16 nt, Human
uaaaccggaccaucuc

SEQ ID NO: 1359302 - RNA, 19 nt, Human
uaaaccaucucccuggugc

SEQ ID NO: 1359303 - RNA, 16 nt, Human
uaaaccaucucccugg

SEQ ID NO: 1359304 - RNA, 19 nt, Human
uaaacccaguaguggugac

SEQ ID NO: 1359305 - RNA, 22 nt, Human
uaaaccaucucccuggugcuua

SEQ ID NO: 1359306 - RNA, 23 nt, Human
uaaacccauauuguaaaacaggu

SEQ ID NO: 1359307 - RNA, 20 nt, Human
uaaaccccaccuuuauuccu

SEQ ID NO: 1359308 - RNA, 15 nt, Human
uaaacggauuccaaa

SEQ ID NO: 1359309 - RNA, 21 nt, Human
uaaacgauuuuuaaaauguac

SEQ ID NO: 1359310 - RNA, 20 nt, Human
uaaacgauuuuuaaaaugua

SEQ ID NO: 1359311 - RNA, 19 nt, Human
uaaacgauuuuuaaaaugu

SEQ ID NO: 1359312 - RNA, 18 nt, Human
uaaacgauuuuuaaaaug

SEQ ID NO: 1359313 - RNA, 17 nt, Human
uaaacgauuuuuaaaau

SEQ ID NO: 1359314 - RNA, 16 nt, Human
uaaacgauuuuuaaaa

SEQ ID NO: 1359315 - RNA, 13 nt, Human
uaaaccuuuuuug

SEQ ID NO: 1359316 - RNA, 17 nt, Human
uaaacuaauaauugcag

SEQ ID NO: 1359317 - RNA, 16 nt, Human
uaaacuaauaauugca

SEQ ID NO: 1359318 - RNA, 14 nt, Human
uaaacuaaaugugc

SEQ ID NO: 1359319 - RNA, 13 nt, Human
uaaacuaaaugug

SEQ ID NO: 1359320 - RNA, 13 nt, Human
uaaacuaaacacg

SEQ ID NO: 1359321 - RNA, 17 nt, Human
uaaacgucuuaaauauu

SEQ ID NO: 1359322 - RNA, 13 nt, Human
uaaacgucuuaaa

SEQ ID NO: 1359323 - RNA, 19 nt, Human
uaacaagaacuuuaaauug

SEQ ID NO: 1359324 - RNA, 15 nt, Human
uaacaaccaaagacu

SEQ ID NO: 1359325 - RNA, 15 nt, Human
uaacaagccagauuu

SEQ ID NO: 1359326 - RNA, 17 nt, Human
uaacaaugcuguauuuu

SEQ ID NO: 1359327 - RNA, 15 nt, Human
uaacaaugcuguauu

SEQ ID NO: 1359328 - RNA, 24 nt, Human
uaaauuuuccuguccucuuucagc

SEQ ID NO: 1359329 - RNA, 23 nt, Human
uaaauuuuccuguccucuuucag

SEQ ID NO: 1359330 - RNA, 18 nt, Human
uaaauuuuccuguccucu

SEQ ID NO: 1359331 - RNA, 16 nt, Human
uaaauuuuccuguccu

SEQ ID NO: 1359332 - RNA, 21 nt, Human
uaaauuuguacuauuuaacug

SEQ ID NO: 1359333 - RNA, 16 nt, Human
uaaauuuuuuuccuua

SEQ ID NO: 1359334 - RNA, 20 nt, Human
uaacaaaaauaaaaacucuu

SEQ ID NO: 1359335 - RNA, 20 nt, Human
uaacaaaugccaaauuaaaa

SEQ ID NO: 1359336 - RNA, 13 nt, Human
uaacaaaaauaaa

SEQ ID NO: 1359337 - RNA, 21 nt, Human
uaacaacauguuuccagcauu

SEQ ID NO: 1359338 - RNA, 20 nt, Human
uaacaacauguuuccagcau

SEQ ID NO: 1359339 - RNA, 19 nt, Human
uaacaacauguuuccagca

SEQ ID NO: 1359340 - RNA, 14 nt, Human
uaacaacauguuuc

SEQ ID NO: 1359341 - RNA, 17 nt, Human
uaaaugcaaauaacaaa

SEQ ID NO: 1359342 - RNA, 16 nt, Human
uaaaugcaaauaacaa

SEQ ID NO: 1359343 - RNA, 15 nt, Human
uaaaugcaaauaaca

SEQ ID NO: 1359344 - RNA, 19 nt, Human
uaaaugcaaccauuugaaa

SEQ ID NO: 1359345 - RNA, 17 nt, Human
uaaaugauucuuaguga

SEQ ID NO: 1359346 - RNA, 13 nt, Human
uaaaugacacuca

SEQ ID NO: 1359347 - RNA, 13 nt, Human
uaaaugaauguuu

SEQ ID NO: 1359348 - RNA, 22 nt, Human
uaaaucuccaaaauaaaacuuu

SEQ ID NO: 1359349 - RNA, 20 nt, Human
uaaaucuccaaaauaaaacu

SEQ ID NO: 1359350 - RNA, 21 nt, Human
uaaaucuccaaaauaaaacuu

SEQ ID NO: 1359351 - RNA, 22 nt, Human
uaaauuuguacuauuuaacuga

SEQ ID NO: 1359352 - RNA, 20 nt, Human
uaaauuuguacuauuuaacu

SEQ ID NO: 1359353 - RNA, 19 nt, Human
uaaauuuguacuauuuaac

SEQ ID NO: 1359354 - RNA, 14 nt, Human
uaaauuuguacuau

SEQ ID NO: 1359355 - RNA, 13 nt, Human
uaaauuuguacua

SEQ ID NO: 1359356 - RNA, 16 nt, Human
uaaauuacagaaauuu

SEQ ID NO: 1359357 - RNA, 20 nt, Human
uaaauguuuuuuuuuaaaga

SEQ ID NO: 1359358 - RNA, 23 nt, Human
uaaauguuuuuuuuuaaagacuu

SEQ ID NO: 1359359 - RNA, 15 nt, Human
uaaauaacuggaaaa

SEQ ID NO: 1359360 - RNA, 14 nt, Human
uaaauaacuggaaa

SEQ ID NO: 1359361 - RNA, 16 nt, Human
uaaauaaauuugacuu

SEQ ID NO: 1359362 - RNA, 14 nt, Human
uaaauaaauuugac

SEQ ID NO: 1359363 - RNA, 13 nt, Human
uaaauaaauuuga

SEQ ID NO: 1359364 - RNA, 21 nt, Human
uaaauaaauuguauauucacu

SEQ ID NO: 1359365 - RNA, 22 nt, Human
uaaauaaauuguauauucacuu

SEQ ID NO: 1359366 - RNA, 14 nt, Human
uaaauaaauuguau

SEQ ID NO: 1359367 - RNA, 15 nt, Human
uaaauaaauuguaua

SEQ ID NO: 1359368 - RNA, 16 nt, Human
uaaauaaauuguauau

SEQ ID NO: 1359369 - RNA, 17 nt, Human
uaaauaaauuguauauu

SEQ ID NO: 1359370 - RNA, 18 nt, Human
uaaauaaauuguauauuc

SEQ ID NO: 1359371 - RNA, 19 nt, Human
uaaauaaauuguauauuca

SEQ ID NO: 1359372 - RNA, 20 nt, Human
uaaauaaauuguauauucac

SEQ ID NO: 1359373 - RNA, 16 nt, Human
aauacaccacuacauu

SEQ ID NO: 1359374 - RNA, 18 nt, Human
aauacaccacuacauucu

SEQ ID NO: 1359375 - RNA, 20 nt, Human
aauacaccacuacauucugu

SEQ ID NO: 1359376 - RNA, 21 nt, Human
aauacaccacuacauucuguu

SEQ ID NO: 1359377 - RNA, 20 nt, Human
aauacaauuuuuuuuauuag

SEQ ID NO: 1359378 - RNA, 15 nt, Human
aauacaccacuacau

SEQ ID NO: 1359379 - RNA, 17 nt, Human
uaaauccuuuacuguua

SEQ ID NO: 1359380 - RNA, 13 nt, Human
uaaaucuacacac

SEQ ID NO: 1359381 - RNA, 15 nt, Human
uaaaucuacacacgg

SEQ ID NO: 1359382 - RNA, 19 nt, Human
uaaaucuccaaaauaaaac

SEQ ID NO: 1359383 - RNA, 12 nt, Human
uaaauaguauuu

SEQ ID NO: 1359384 - RNA, 22 nt, Human
uaaauaggcggggcuugccuuc

SEQ ID NO: 1359385 - RNA, 21 nt, Human
uaaauaggcggggcuugccuu

SEQ ID NO: 1359386 - RNA, 13 nt, Human
uaaauaguauuuc

SEQ ID NO: 1359387 - RNA, 23 nt, Human
uaaauauaaagacguuuuauaag

SEQ ID NO: 1359388 - RNA, 17 nt, Human
uaaauauaaagacguuu

SEQ ID NO: 1359389 - RNA, 14 nt, Human
uaaauauaaagacg

SEQ ID NO: 1359390 - RNA, 13 nt, Human
uaaauauaaagac

SEQ ID NO: 1359391 - RNA, 12 nt, Human
uaaauauaaaga

SEQ ID NO: 1359392 - RNA, 12 nt, Human
uaaauagcuuuu

SEQ ID NO: 1359393 - RNA, 19 nt, Human
uaaauacaauuuuuuuuau

SEQ ID NO: 1359394 - RNA, 19 nt, Human
aauaaaggcaguuuucuaa

SEQ ID NO: 1359395 - RNA, 18 nt, Human
aauaaaggcaguuuucua

SEQ ID NO: 1359396 - RNA, 16 nt, Human
aauaaaggcaguuuuc

SEQ ID NO: 1359397 - RNA, 15 nt, Human
aauaaaggcaguuuu

SEQ ID NO: 1359398 - RNA, 18 nt, Human
aauaaaggaugugauugu

SEQ ID NO: 1359399 - RNA, 22 nt, Human
aauaaaauccauacauuugugu

SEQ ID NO: 1359400 - RNA, 16 nt, Human
aauaaaagugaccuuu

SEQ ID NO: 1359401 - RNA, 21 nt, Human
aauaaaaggaagccaaagagu

SEQ ID NO: 1359402 - RNA, 20 nt, Human
aauaaaaggaagccaaagag

SEQ ID NO: 1359403 - RNA, 15 nt, Human
aauaaaaauguuuaa

SEQ ID NO: 1359404 - RNA, 14 nt, Human
aauaaaaauguuua

SEQ ID NO: 1359405 - RNA, 16 nt, Human
aauaaaagaaaauuac

SEQ ID NO: 1359406 - RNA, 15 nt, Human
aauaaaaagaaaggc

SEQ ID NO: 1359407 - RNA, 12 nt, Human
aauaaaaauaau

SEQ ID NO: 1359408 - RNA, 21 nt, Human
uaaagucuguugauuaaagau

SEQ ID NO: 1359409 - RNA, 17 nt, Human
uaaagucagauggaaaa

SEQ ID NO: 1359410 - RNA, 13 nt, Human
uaaagucagaugg

SEQ ID NO: 1359411 - RNA, 15 nt, Human
uaaagucagauggaa

SEQ ID NO: 1359412 - RNA, 19 nt, Human
uaaagugcuaagguucuaa

SEQ ID NO: 1359413 - RNA, 18 nt, Human
uaaagugcuaagguucua

SEQ ID NO: 1359414 - RNA, 17 nt, Human
uaaagugcuaagguucu

SEQ ID NO: 1359415 - RNA, 16 nt, Human
uaaagugcuaagguuc

SEQ ID NO: 1359416 - RNA, 15 nt, Human
uaaagugcuaagguu

SEQ ID NO: 1359417 - RNA, 23 nt, Human
uaaagugccaguauuuuaaaaua

SEQ ID NO: 1359418 - RNA, 22 nt, Human
uaaagugccaguauuuuaaaau

SEQ ID NO: 1359419 - RNA, 18 nt, Human
uaaagugccaguauuuua

SEQ ID NO: 1359420 - RNA, 15 nt, Human
uaaagugccaguauu

SEQ ID NO: 1359421 - RNA, 19 nt, Human
uaaagugacuaauggcaug

SEQ ID NO: 1359422 - RNA, 22 nt, Human
uaaagucuguugauuaaagaug

SEQ ID NO: 1359423 - RNA, 17 nt, Human
uaaagugacccugcucu

SEQ ID NO: 1359424 - RNA, 20 nt, Human
uaaagugacccugcucucac

SEQ ID NO: 1359425 - RNA, 22 nt, Human
uaaagugcuaagguucuaaggc

SEQ ID NO: 1359426 - RNA, 21 nt, Human
uaaagugcuaagguucuaagg

SEQ ID NO: 1359427 - RNA, 20 nt, Human
uaaagugcuaagguucuaag

SEQ ID NO: 1359428 - RNA, 14 nt, Human
uaaaguguauuuuu

SEQ ID NO: 1359429 - RNA, 15 nt, Human
uaaaguguauuuuuu

SEQ ID NO: 1359430 - RNA, 19 nt, Human
uaaaguguauuuuuuuacu

SEQ ID NO: 1359431 - RNA, 19 nt, Human
uaaaguguaacaauugugu

SEQ ID NO: 1359432 - RNA, 20 nt, Human
uaaaguguauuuuuuuacua

SEQ ID NO: 1359433 - RNA, 15 nt, Human
aauaaaaaagauccc

SEQ ID NO: 1359434 - RNA, 18 nt, Human
aauaacaaaugccaaauu

SEQ ID NO: 1359435 - RNA, 22 nt, Human
aauaacaaaugccaaauuaaaa

SEQ ID NO: 1359436 - RNA, 22 nt, Human
aauaaauuuuuuauaaaagugu

SEQ ID NO: 1359437 - RNA, 15 nt, Human
aauaacaauaaaaga

SEQ ID NO: 1359438 - RNA, 20 nt, Human
aauaaauauccuuuaauuga

SEQ ID NO: 1359439 - RNA, 23 nt, Human
aauaaauauaucuaccccagacu

SEQ ID NO: 1359440 - RNA, 15 nt, Human
aauaaauauaucuac

SEQ ID NO: 1359441 - RNA, 19 nt, Human
aauaaauaaggaaaagcuu

SEQ ID NO: 1359442 - RNA, 14 nt, Human
aauaagaucuuuuu

SEQ ID NO: 1359443 - RNA, 22 nt, Human
aauaacuccucccaggguuuua

SEQ ID NO: 1359444 - RNA, 17 nt, Human
aauaacuccucccaggg

SEQ ID NO: 1359445 - RNA, 16 nt, Human
aauaacuccucccagg

SEQ ID NO: 1359446 - RNA, 14 nt, Human
aauaacuccuccca

SEQ ID NO: 1359447 - RNA, 19 nt, Human
aauaacuccucauuguaaa

SEQ ID NO: 1359448 - RNA, 22 nt, Human
aauaacguuuaagccaaaacaa

SEQ ID NO: 1359449 - RNA, 23 nt, Human
aauaagcagguggaucuauuuca

SEQ ID NO: 1359450 - RNA, 18 nt, Human
aauaagcagguggaucua

SEQ ID NO: 1359451 - RNA, 14 nt, Human
aauaagcaggugga

SEQ ID NO: 1359452 - RNA, 14 nt, Human
aauaagauucuaac

SEQ ID NO: 1359453 - RNA, 13 nt, Human
aauaagauucuaa

SEQ ID NO: 1359454 - RNA, 12 nt, Human
aauaagauucua

SEQ ID NO: 1359455 - RNA, 21 nt, Human
aauaagcuauuugauguaaua

SEQ ID NO: 1359456 - RNA, 18 nt, Human
aauaagcuauuugaugua

SEQ ID NO: 1359457 - RNA, 16 nt, Human
aauaagcuauuugaug

SEQ ID NO: 1359458 - RNA, 14 nt, Human
aauaagcuauuuga

SEQ ID NO: 1359459 - RNA, 22 nt, Human
aauaagucaacaguaaaccacu

SEQ ID NO: 1359460 - RNA, 16 nt, Human
aauaagucaacaguaa

SEQ ID NO: 1359461 - RNA, 15 nt, Human
aauaagucaacagua

SEQ ID NO: 1359462 - RNA, 14 nt, Human
aauaagucaacagu

SEQ ID NO: 1359463 - RNA, 15 nt, Human
aauaagguacaagaa

SEQ ID NO: 1359464 - RNA, 13 nt, Human
aauaagguuuuaa

SEQ ID NO: 1359465 - RNA, 19 nt, Human
aauaagguacaagaagcau

SEQ ID NO: 1359466 - RNA, 18 nt, Human
aauaaggcacccaucugu

SEQ ID NO: 1359467 - RNA, 12 nt, Human
aauaaggcaggg

SEQ ID NO: 1359468 - RNA, 16 nt, Human
aauaaggcacccaucu

SEQ ID NO: 1359469 - RNA, 15 nt, Human
aauaaggaaaagcuu

SEQ ID NO: 1359470 - RNA, 14 nt, Human
aauaaggaaaagcu

SEQ ID NO: 1359471 - RNA, 20 nt, Human
aauaagcuauuugauguaau

SEQ ID NO: 1359472 - RNA, 14 nt, Human
aaggguugagcugg

SEQ ID NO: 1359473 - RNA, 21 nt, Human
aaggguguugggagggugguu

SEQ ID NO: 1359474 - RNA, 16 nt, Human
aagggucaggccuuug

SEQ ID NO: 1359475 - RNA, 20 nt, Human
aagggucaggccuuugagcu

SEQ ID NO: 1359476 - RNA, 14 nt, Human
aagggucaggccuu

SEQ ID NO: 1359477 - RNA, 13 nt, Human
aagggucaggccu

SEQ ID NO: 1359478 - RNA, 12 nt, Human
aagggucaggcc

SEQ ID NO: 1359479 - RNA, 11 nt, Human
aagggucaggc

SEQ ID NO: 1359480 - RNA, 22 nt, Human
guuucuaagguccgguguucua

SEQ ID NO: 1359481 - RNA, 11 nt, Human
guuucuaaggu

SEQ ID NO: 1359482 - RNA, 21 nt, Human
guuucuaagauucuaaagguc

SEQ ID NO: 1359483 - RNA, 20 nt, Human
guuucuaagauucuaaaggu

SEQ ID NO: 1359484 - RNA, 21 nt, Human
guuucuagcaugaagacagag

SEQ ID NO: 1359485 - RNA, 19 nt, Human
guuucuaagauucuaaagg

SEQ ID NO: 1359486 - RNA, 18 nt, Human
guuucuaagauucuaaag

SEQ ID NO: 1359487 - RNA, 17 nt, Human
guuucuaagauucuaaa

SEQ ID NO: 1359488 - RNA, 16 nt, Human
guuucuaagauucuaa

SEQ ID NO: 1359489 - RNA, 17 nt, Human
aaguaaauacaauuuuu

SEQ ID NO: 1359490 - RNA, 15 nt, Human
aaguaaauacaauuu

SEQ ID NO: 1359491 - RNA, 13 nt, Human
aaguaaauacaau

SEQ ID NO: 1359492 - RNA, 12 nt, Human
aaguaaauacaa

SEQ ID NO: 1359493 - RNA, 12 nt, Human
aaguaaacuuuu

SEQ ID NO: 1359494 - RNA, 20 nt, Human
aaguaaacuuuuuguucugg

SEQ ID NO: 1359495 - RNA, 18 nt, Human
aaguaaaagcaaaaaaga

SEQ ID NO: 1359496 - RNA, 21 nt, Human
aaguaaaagcaaaaaagaaaa

SEQ ID NO: 1359497 - RNA, 13 nt, Human
aaguaaaagcaaa

SEQ ID NO: 1359498 - RNA, 20 nt, Human
aaggggauuuuuaugucugg

SEQ ID NO: 1359499 - RNA, 14 nt, Human
aaggggauuuuuau

SEQ ID NO: 1359500 - RNA, 16 nt, Human
aaggggagcccacugu

SEQ ID NO: 1359501 - RNA, 13 nt, Human
aaggggagcccac

SEQ ID NO: 1359502 - RNA, 23 nt, Human
aagggccugcccaguugcacuca

SEQ ID NO: 1359503 - RNA, 12 nt, Human
aagggcccuggg

SEQ ID NO: 1359504 - RNA, 16 nt, Human
aagggcccuccuuccu

SEQ ID NO: 1359505 - RNA, 14 nt, Human
aaggggcaguggug

SEQ ID NO: 1359506 - RNA, 17 nt, Human
aaggggcaguggugguu

SEQ ID NO: 1359507 - RNA, 16 nt, Human
aaggcugaugucaauu

SEQ ID NO: 1359508 - RNA, 17 nt, Human
guuguaaccugcuguga

SEQ ID NO: 1359509 - RNA, 14 nt, Human
guuguaaccugcug

SEQ ID NO: 1359510 - RNA, 22 nt, Human
guuguaaauuggcauggaaauu

SEQ ID NO: 1359511 - RNA, 16 nt, Human
guuguaaauuggcaug

SEQ ID NO: 1359512 - RNA, 14 nt, Human
guuguaaauuggca

SEQ ID NO: 1359513 - RNA, 21 nt, Human
guuguaaaguauguauuauuu

SEQ ID NO: 1359514 - RNA, 16 nt, Human
guuguaaaccaaguga

SEQ ID NO: 1359515 - RNA, 22 nt, Human
guuucucccccauguucugucc

SEQ ID NO: 1359516 - RNA, 17 nt, Human
guuucucccccauguuc

SEQ ID NO: 1359517 - RNA, 11 nt, Human
guuucuccccc

SEQ ID NO: 1359518 - RNA, 18 nt, Human
guuucuccaaacugaagc

SEQ ID NO: 1359519 - RNA, 23 nt, Human
guuucuagguaauuuuuacagaa

SEQ ID NO: 1359520 - RNA, 22 nt, Human
guuucuaugacacaugcaaggu

SEQ ID NO: 1359521 - RNA, 14 nt, Human
guuucuggauuuca

SEQ ID NO: 1359522 - RNA, 21 nt, Human
guuucugguggucuguuggca

SEQ ID NO: 1359523 - RNA, 18 nt, Human
guuucugguggucuguug

SEQ ID NO: 1359524 - RNA, 18 nt, Human
guuugccuucuacuuuua

SEQ ID NO: 1359525 - RNA, 15 nt, Human
guuugccuuccagaa

SEQ ID NO: 1359526 - RNA, 19 nt, Human
guuugcaucugaaaauuga

SEQ ID NO: 1359527 - RNA, 21 nt, Human
guuugcagaagggggucucuu

SEQ ID NO: 1359528 - RNA, 14 nt, Human
guuugcacuuccuc

SEQ ID NO: 1359529 - RNA, 15 nt, Human
guuugcacuuccucu

SEQ ID NO: 1359530 - RNA, 22 nt, Human
guuugcagguggccaaguuccu

SEQ ID NO: 1359531 - RNA, 16 nt, Human
guuugcagucccaagc

SEQ ID NO: 1359532 - RNA, 17 nt, Human
guuugcacuaucuuuca

SEQ ID NO: 1359533 - RNA, 13 nt, Human
guuuuaacuuugu

SEQ ID NO: 1359534 - RNA, 14 nt, Human
guuuuaacuuuguu

SEQ ID NO: 1359535 - RNA, 18 nt, Human
guuuuaaggaugcuugua

SEQ ID NO: 1359536 - RNA, 22 nt, Human
guuuuaacuguggauauuguua

SEQ ID NO: 1359537 - RNA, 21 nt, Human
guuuuacuuuuaaacugugua

SEQ ID NO: 1359538 - RNA, 18 nt, Human
guuuuacuuuuaaacugu

SEQ ID NO: 1359539 - RNA, 13 nt, Human
guuuuacuuuuaa

SEQ ID NO: 1359540 - RNA, 19 nt, Human
guuuuauauauuauaugga

SEQ ID NO: 1359541 - RNA, 12 nt, Human
guuuuauauauu

SEQ ID NO: 1359542 - RNA, 11 nt, Human
guuuuauauau

SEQ ID NO: 1359543 - RNA, 22 nt, Human
guuuuauaauuuugugaagcaa

SEQ ID NO: 1359544 - RNA, 15 nt, Human
guuuuauaauuuugu

SEQ ID NO: 1359545 - RNA, 23 nt, Human
aagucaucuugcuaccaguauuu

SEQ ID NO: 1359546 - RNA, 20 nt, Human
aagucaucuugcuaccagua

SEQ ID NO: 1359547 - RNA, 14 nt, Human
aagucaucuugcua

SEQ ID NO: 1359548 - RNA, 13 nt, Human
aagucaucuugcu

SEQ ID NO: 1359549 - RNA, 15 nt, Human
aagugaaugcuggga

SEQ ID NO: 1359550 - RNA, 22 nt, Human
aagucuuauauauuguagauaa

SEQ ID NO: 1359551 - RNA, 22 nt, Human
aagugacauugcaucaaagcau

SEQ ID NO: 1359552 - RNA, 17 nt, Human
aagugaauuugccugua

SEQ ID NO: 1359553 - RNA, 20 nt, Human
aagugaauuugccuguaaca

SEQ ID NO: 1359554 - RNA, 16 nt, Human
aagugaauuugccugu

SEQ ID NO: 1359555 - RNA, 15 nt, Human
aagugaauuugccug

SEQ ID NO: 1359556 - RNA, 12 nt, Human
guuuuucuauua

SEQ ID NO: 1359557 - RNA, 11 nt, Human
guuuuucuauu

SEQ ID NO: 1359558 - RNA, 20 nt, Human
guuuuucuaaaggaguuuau

SEQ ID NO: 1359559 - RNA, 13 nt, Human
guuuuucuaaagg

SEQ ID NO: 1359560 - RNA, 19 nt, Human
aagugacuaauggcaugag

SEQ ID NO: 1359561 - RNA, 20 nt, Human
aagugaccuauaccuguguu

SEQ ID NO: 1359562 - RNA, 19 nt, Human
aagugacuuuggcugcaug

SEQ ID NO: 1359563 - RNA, 18 nt, Human
guuuuugguuuuuaaaac

SEQ ID NO: 1359564 - RNA, 15 nt, Human
guuuuugcacauguu

SEQ ID NO: 1359565 - RNA, 23 nt, Human
guuuuugaucaaaaacuauuugg

SEQ ID NO: 1359566 - RNA, 22 nt, Human
guuuuucuauuaaaagacucau

SEQ ID NO: 1359567 - RNA, 21 nt, Human
guuuuucuauuaaaagacuca

SEQ ID NO: 1359568 - RNA, 20 nt, Human
guuuuucuauuaaaagacuc

SEQ ID NO: 1359569 - RNA, 19 nt, Human
guuuuucuauuaaaagacu

SEQ ID NO: 1359570 - RNA, 18 nt, Human
guuuuucuauuaaaagac

SEQ ID NO: 1359571 - RNA, 17 nt, Human
guuuuucuauuaaaaga

SEQ ID NO: 1359572 - RNA, 16 nt, Human
guuuuucuauuaaaag

SEQ ID NO: 1359573 - RNA, 15 nt, Human
guuuuucuauuaaaa

SEQ ID NO: 1359574 - RNA, 13 nt, Human
guuuuucuauuaa

SEQ ID NO: 1359575 - RNA, 15 nt, Human
guuuuuguucaaagc

SEQ ID NO: 1359576 - RNA, 20 nt, Human
guuuuuggucuuuuauaauu

SEQ ID NO: 1359577 - RNA, 14 nt, Human
guuuuuuguaccaa

SEQ ID NO: 1359578 - RNA, 23 nt, Human
guuuuuugccacagcuuuugcaa

SEQ ID NO: 1359579 - RNA, 14 nt, Human
guuuuuugccacag

SEQ ID NO: 1359580 - RNA, 22 nt, Human
guuuuuucaucuucaguugucu

SEQ ID NO: 1359581 - RNA, 11 nt, Human
guuuuuucauc

SEQ ID NO: 1359582 - RNA, 16 nt, Human
guuuuuuaguugaauu

SEQ ID NO: 1359583 - RNA, 15 nt, Human
guuuuuuaugcuaau

SEQ ID NO: 1359584 - RNA, 12 nt, Human
guuuuuuaaguc

SEQ ID NO: 1359585 - RNA, 23 nt, Human
guuuuuuuuuaaaaaagaaacau

SEQ ID NO: 1359586 - RNA, 15 nt, Human
guuuuuuuuuaaaga

SEQ ID NO: 1359587 - RNA, 12 nt, Human
guuuuuuucuau

SEQ ID NO: 1359588 - RNA, 15 nt, Human
guuuuuuuucaguug

SEQ ID NO: 1359589 - RNA, 14 nt, Human
guuuuuuucuaaua

SEQ ID NO: 1359590 - RNA, 17 nt, Human
guuuuuuuguuauuaaa

SEQ ID NO: 1359591 - RNA, 20 nt, Human
guuuuauauauuauauggaa

SEQ ID NO: 1359592 - RNA, 23 nt, Human
aaguauguuagugcaaauuguca

SEQ ID NO: 1359593 - RNA, 13 nt, Human
aaguauguucuaa

SEQ ID NO: 1359594 - RNA, 16 nt, Human
aagucaacaguaaacc

SEQ ID NO: 1359595 - RNA, 15 nt, Human
aagucaacaguaaac

SEQ ID NO: 1359596 - RNA, 14 nt, Human
aagucaacaguaaa

SEQ ID NO: 1359597 - RNA, 13 nt, Human
aagucaacaguaa

SEQ ID NO: 1359598 - RNA, 21 nt, Human
aagucaacaguaaaccacuga

SEQ ID NO: 1359599 - RNA, 19 nt, Human
aagucaacaguaaaccacu

SEQ ID NO: 1359600 - RNA, 17 nt, Human
aagucaacaguaaacca

SEQ ID NO: 1359601 - RNA, 16 nt, Human
aagucaaccugccuga

SEQ ID NO: 1359602 - RNA, 13 nt, Human
aagucaaggagaa

SEQ ID NO: 1359603 - RNA, 15 nt, Human
aagucauaauugcau

SEQ ID NO: 1359604 - RNA, 14 nt, Human
aagucauaauugca

SEQ ID NO: 1359605 - RNA, 23 nt, Human
aagucaguccaggaugcuaacau

SEQ ID NO: 1359606 - RNA, 21 nt, Human
aagucacggcugcgcacugug

SEQ ID NO: 1359607 - RNA, 23 nt, Human
aagucacagggcaguaccugagg

SEQ ID NO: 1359608 - RNA, 15 nt, Human
aagucacagggcagu

SEQ ID NO: 1359609 - RNA, 14 nt, Human
aagucacagggcag

SEQ ID NO: 1359610 - RNA, 19 nt, Human
aagucacagggcaguaccu

SEQ ID NO: 1359611 - RNA, 20 nt, Human
aagucacauuccugaacagg

SEQ ID NO: 1359612 - RNA, 17 nt, Human
aaggauccggaaagaag

SEQ ID NO: 1359613 - RNA, 16 nt, Human
aaggauccggaaagaa

SEQ ID NO: 1359614 - RNA, 22 nt, Human
aaggauaggccuucauuaacaa

SEQ ID NO: 1359615 - RNA, 20 nt, Human
aaggauagaugcuggcccag

SEQ ID NO: 1359616 - RNA, 19 nt, Human
aaggagccccauuccuggg

SEQ ID NO: 1359617 - RNA, 17 nt, Human
aaggagccccauuccug

SEQ ID NO: 1359618 - RNA, 23 nt, Human
aaggagcagagcugauggagaag

SEQ ID NO: 1359619 - RNA, 13 nt, Human
aaggaggacccag

SEQ ID NO: 1359620 - RNA, 14 nt, Human
aaggaggacccagg

SEQ ID NO: 1359621 - RNA, 15 nt, Human
aaggaggacccagga

SEQ ID NO: 1359622 - RNA, 17 nt, Human
aaggaggacccaggaca

SEQ ID NO: 1359623 - RNA, 18 nt, Human
aaggaggacccaggacag

SEQ ID NO: 1359624 - RNA, 21 nt, Human
aaggaggacccaggacaggau

SEQ ID NO: 1359625 - RNA, 22 nt, Human
aaggaggacccaggacaggauc

SEQ ID NO: 1359626 - RNA, 13 nt, Human
aaggauaaugaau

SEQ ID NO: 1359627 - RNA, 23 nt, Human
aaggauaaaguugguaaaccuuu

SEQ ID NO: 1359628 - RNA, 23 nt, Human
aaggaggauggcauauaauacaa

SEQ ID NO: 1359629 - RNA, 22 nt, Human
aaggaggagccuguccugccug

SEQ ID NO: 1359630 - RNA, 17 nt, Human
aaggaggagccuguccu

SEQ ID NO: 1359631 - RNA, 16 nt, Human
aaggaggagccugucc

SEQ ID NO: 1359632 - RNA, 15 nt, Human
aaggaggagccuguc

SEQ ID NO: 1359633 - RNA, 21 nt, Human
aaggauaaaguugguaaaccu

SEQ ID NO: 1359634 - RNA, 22 nt, Human
guugaucuggaacccagacuca

SEQ ID NO: 1359635 - RNA, 17 nt, Human
guugaucuggaacccag

SEQ ID NO: 1359636 - RNA, 16 nt, Human
guugaucuggaaccca

SEQ ID NO: 1359637 - RNA, 15 nt, Human
guugaucuggaaccc

SEQ ID NO: 1359638 - RNA, 20 nt, Human
aaggaaacaaccaugucauu

SEQ ID NO: 1359639 - RNA, 19 nt, Human
guugaucuggaacccagac

SEQ ID NO: 1359640 - RNA, 17 nt, Human
aaggaagguggauggcc

SEQ ID NO: 1359641 - RNA, 12 nt, Human
aaggaaggugga

SEQ ID NO: 1359642 - RNA, 17 nt, Human
aaggaaggcagggagga

SEQ ID NO: 1359643 - RNA, 17 nt, Human
aaggaaggcuccaucuc

SEQ ID NO: 1359644 - RNA, 21 nt, Human
aaggaagucaaagcaaggaaa

SEQ ID NO: 1359645 - RNA, 18 nt, Human
aaggaagguggauggccc

SEQ ID NO: 1359646 - RNA, 23 nt, Human
aaggagaaucaucaggacccugg

SEQ ID NO: 1359647 - RNA, 22 nt, Human
aaggagcaagucagaauagaaa

SEQ ID NO: 1359648 - RNA, 18 nt, Human
aaggagauuuacaacugg

SEQ ID NO: 1359649 - RNA, 18 nt, Human
guugggacuacaggcgug

SEQ ID NO: 1359650 - RNA, 16 nt, Human
guuggcuuaccuggcc

SEQ ID NO: 1359651 - RNA, 14 nt, Human
guuggcuuaccugg

SEQ ID NO: 1359652 - RNA, 17 nt, Human
guuggcuuaccuggccc

SEQ ID NO: 1359653 - RNA, 16 nt, Human
guuggggucuggcagc

SEQ ID NO: 1359654 - RNA, 21 nt, Human
guugggguggguauaaaagau

SEQ ID NO: 1359655 - RNA, 21 nt, Human
guuggggacacauguauuugg

SEQ ID NO: 1359656 - RNA, 18 nt, Human
guuggggaagggccugcc

SEQ ID NO: 1359657 - RNA, 23 nt, Human
guuggggaaacagcaucuccaag

SEQ ID NO: 1359658 - RNA, 20 nt, Human
guugggagagggcgcaggcc

SEQ ID NO: 1359659 - RNA, 15 nt, Human
guugguuuucuucuu

SEQ ID NO: 1359660 - RNA, 12 nt, Human
guugguuuucuu

SEQ ID NO: 1359661 - RNA, 14 nt, Human
guugguugguuuuc

SEQ ID NO: 1359662 - RNA, 23 nt, Human
guugggguggguauaaaagaugg

SEQ ID NO: 1359663 - RNA, 22 nt, Human
guugcuccgccuggccuggcca

SEQ ID NO: 1359664 - RNA, 19 nt, Human
guugcuccgccuggccugg

SEQ ID NO: 1359665 - RNA, 13 nt, Human
guugcugaauagg

SEQ ID NO: 1359666 - RNA, 17 nt, Human
guugcuaagccccagca

SEQ ID NO: 1359667 - RNA, 22 nt, Human
guugcuaagccccagcaagcaa

SEQ ID NO: 1359668 - RNA, 23 nt, Human
guugcugaugaacucuuaaucaa

SEQ ID NO: 1359669 - RNA, 15 nt, Human
aaggccuccuggcug

SEQ ID NO: 1359670 - RNA, 14 nt, Human
aaggcccgagcagc

SEQ ID NO: 1359671 - RNA, 24 nt, Human
aaggaugcacagaguuguuacauu

SEQ ID NO: 1359672 - RNA, 18 nt, Human
aaggccuucaacccgaga

SEQ ID NO: 1359673 - RNA, 22 nt, Human
aaggccuggggugacccggcac

SEQ ID NO: 1359674 - RNA, 11 nt, Human
aaggccuuuaa

SEQ ID NO: 1359675 - RNA, 15 nt, Human
aaggccuuuaaaauu

SEQ ID NO: 1359676 - RNA, 16 nt, Human
aaggccuuuaaaauuu

SEQ ID NO: 1359677 - RNA, 17 nt, Human
aaggccuuuaaaauuuu

SEQ ID NO: 1359678 - RNA, 21 nt, Human
aaggccuggggugacccggca

SEQ ID NO: 1359679 - RNA, 17 nt, Human
aaggccuggggugaccc

SEQ ID NO: 1359680 - RNA, 15 nt, Human
aaggccuggggugac

SEQ ID NO: 1359681 - RNA, 11 nt, Human
aaggccugggg

SEQ ID NO: 1359682 - RNA, 20 nt, Human
aaggccugguguuucuugau

SEQ ID NO: 1359683 - RNA, 13 nt, Human
aaggcuaccuuug

SEQ ID NO: 1359684 - RNA, 15 nt, Human
aaggcuaccuuugua

SEQ ID NO: 1359685 - RNA, 22 nt, Human
guucuccaacaucacagcccag

SEQ ID NO: 1359686 - RNA, 21 nt, Human
guucuccaacaucacagccca

SEQ ID NO: 1359687 - RNA, 19 nt, Human
guucucauggguggcacuc

SEQ ID NO: 1359688 - RNA, 17 nt, Human
guucucagguguugcca

SEQ ID NO: 1359689 - RNA, 23 nt, Human
guucucagaaucccuuaacaguu

SEQ ID NO: 1359690 - RNA, 21 nt, Human
guucucacacuggucugcugu

SEQ ID NO: 1359691 - RNA, 21 nt, Human
guucucaauuccaacaguuua

SEQ ID NO: 1359692 - RNA, 17 nt, Human
guucucaauuccaacag

SEQ ID NO: 1359693 - RNA, 14 nt, Human
guucucaauuccaa

SEQ ID NO: 1359694 - RNA, 14 nt, Human
guucuaguuuuuua

SEQ ID NO: 1359695 - RNA, 13 nt, Human
guuccccuuccac

SEQ ID NO: 1359696 - RNA, 11 nt, Human
guucugugcac

SEQ ID NO: 1359697 - RNA, 18 nt, Human
guucugucccuugccccc

SEQ ID NO: 1359698 - RNA, 16 nt, Human
guucugucccuugccc

SEQ ID NO: 1359699 - RNA, 11 nt, Human
guucugucccu

SEQ ID NO: 1359700 - RNA, 12 nt, Human
guucugucacca

SEQ ID NO: 1359701 - RNA, 21 nt, Human
guucuccguuagcuccugugg

SEQ ID NO: 1359702 - RNA, 19 nt, Human
guucuccguuagcuccugu

SEQ ID NO: 1359703 - RNA, 18 nt, Human
guucuccguuagcuccug

SEQ ID NO: 1359704 - RNA, 20 nt, Human
guucucccuguacaguguua

SEQ ID NO: 1359705 - RNA, 23 nt, Human
guucuccaacaucacagcccagc

SEQ ID NO: 1359706 - RNA, 14 nt, Human
guugagccuuuucc

SEQ ID NO: 1359707 - RNA, 15 nt, Human
guugagccccuggag

SEQ ID NO: 1359708 - RNA, 16 nt, Human
guugagcaucuguccc

SEQ ID NO: 1359709 - RNA, 17 nt, Human
guugagauaguuuucau

SEQ ID NO: 1359710 - RNA, 18 nt, Human
guugagauaguuuucauc

SEQ ID NO: 1359711 - RNA, 17 nt, Human
guugagagugugaccaa

SEQ ID NO: 1359712 - RNA, 15 nt, Human
guugagagugugacc

SEQ ID NO: 1359713 - RNA, 18 nt, Human
guugacaguucauaugua

SEQ ID NO: 1359714 - RNA, 12 nt, Human
guugagacagag

SEQ ID NO: 1359715 - RNA, 13 nt, Human
guugacaugggac

SEQ ID NO: 1359716 - RNA, 21 nt, Human
guucuguuaacugaauaccac

SEQ ID NO: 1359717 - RNA, 19 nt, Human
guucuguuaacugaauacc

SEQ ID NO: 1359718 - RNA, 18 nt, Human
guucuguuaacugaauac

SEQ ID NO: 1359719 - RNA, 17 nt, Human
guucuguuaacugaaua

SEQ ID NO: 1359720 - RNA, 16 nt, Human
guucuguuaacugaau

SEQ ID NO: 1359721 - RNA, 14 nt, Human
guucuguuaacuga

SEQ ID NO: 1359722 - RNA, 13 nt, Human
guucuguuaacug

SEQ ID NO: 1359723 - RNA, 23 nt, Human
guucugugucuuucacagcuccu

SEQ ID NO: 1359724 - RNA, 22 nt, Human
guucugugucuuucacagcucc

SEQ ID NO: 1359725 - RNA, 13 nt, Human
guucugugucuuu

SEQ ID NO: 1359726 - RNA, 21 nt, Human
guucugugguuucauguuagu

SEQ ID NO: 1359727 - RNA, 19 nt, Human
guucugugguuucauguua

SEQ ID NO: 1359728 - RNA, 16 nt, Human
guucugugguuucaug

SEQ ID NO: 1359729 - RNA, 12 nt, Human
guucuguuuugu

SEQ ID NO: 1359730 - RNA, 18 nt, Human
guucuguuucaaggcacu

SEQ ID NO: 1359731 - RNA, 13 nt, Human
guucuguuugcug

SEQ ID NO: 1359732 - RNA, 14 nt, Human
guucuguuucaagg

SEQ ID NO: 1359733 - RNA, 13 nt, Human
guucuguuucaag

SEQ ID NO: 1359734 - RNA, 23 nt, Human
guugaauuuuuuuuaacauuccu

SEQ ID NO: 1359735 - RNA, 21 nt, Human
guugaauuuuuuuuaacauuc

SEQ ID NO: 1359736 - RNA, 20 nt, Human
guugaauuuuuuuuaacauu

SEQ ID NO: 1359737 - RNA, 13 nt, Human
guugaauuuuaca

SEQ ID NO: 1359738 - RNA, 22 nt, Human
guguuuauccuaucucuccaac

SEQ ID NO: 1359739 - RNA, 15 nt, Human
guguuuauccuuuca

SEQ ID NO: 1359740 - RNA, 17 nt, Human
guguuuauccuuucaua

SEQ ID NO: 1359741 - RNA, 16 nt, Human
aagcucugagcuguca

SEQ ID NO: 1359742 - RNA, 15 nt, Human
aagcucugagcuguc

SEQ ID NO: 1359743 - RNA, 12 nt, Human
aagcucugagcu

SEQ ID NO: 1359744 - RNA, 11 nt, Human
aagcucugagc

SEQ ID NO: 1359745 - RNA, 12 nt, Human
aagcucugacau

SEQ ID NO: 1359746 - RNA, 9 nt, Human
aagcucuga

SEQ ID NO: 1359747 - RNA, 15 nt, Human
aagcucuagaaucug

SEQ ID NO: 1359748 - RNA, 16 nt, Human
aagcuccucuccccag

SEQ ID NO: 1359749 - RNA, 15 nt, Human
aagcucccccagcaa

SEQ ID NO: 1359750 - RNA, 23 nt, Human
aagcucccccagcaaagccccca

SEQ ID NO: 1359751 - RNA, 15 nt, Human
aagcucccagggccu

SEQ ID NO: 1359752 - RNA, 19 nt, Human
aagcuuuggugagaaccug

SEQ ID NO: 1359753 - RNA, 22 nt, Human
aagcuuuggugagaaccugggu

SEQ ID NO: 1359754 - RNA, 22 nt, Human
aagcuuuccugccccaggccug

SEQ ID NO: 1359755 - RNA, 21 nt, Human
aagcuuuccugccccaggccu

SEQ ID NO: 1359756 - RNA, 18 nt, Human
aagcuuuccugccccagg

SEQ ID NO: 1359757 - RNA, 16 nt, Human
aagcuuuccugcccca

SEQ ID NO: 1359758 - RNA, 14 nt, Human
aagcucugcuauua

SEQ ID NO: 1359759 - RNA, 13 nt, Human
aagcucugaggga

SEQ ID NO: 1359760 - RNA, 16 nt, Human
aaggaaaaaauaacaa

SEQ ID NO: 1359761 - RNA, 19 nt, Human
aaggaaaaaauaacaauga

SEQ ID NO: 1359762 - RNA, 16 nt, Human
aagcuuuuaugugaaa

SEQ ID NO: 1359763 - RNA, 22 nt, Human
aauacauaccacgcuagggcug

SEQ ID NO: 1359764 - RNA, 17 nt, Human
aauacaguucugcucug

SEQ ID NO: 1359765 - RNA, 16 nt, Human
aauacaguucugcucu

SEQ ID NO: 1359766 - RNA, 21 nt, Human
aauacagucuuccauuugcaa

SEQ ID NO: 1359767 - RNA, 19 nt, Human
uaacaaugcuguauuuuaa

SEQ ID NO: 1359768 - RNA, 18 nt, Human
uaauacagcaacaauuua

SEQ ID NO: 1359769 - RNA, 19 nt, Human
aauacauagggauaugcgu

SEQ ID NO: 1359770 - RNA, 23 nt, Human
uaauacaccacuacauucuguua

SEQ ID NO: 1359771 - RNA, 23 nt, Human
aauacaucccuuaccugggaaag

SEQ ID NO: 1359772 - RNA, 22 nt, Human
uaauacaccacuacauucuguu

SEQ ID NO: 1359773 - RNA, 22 nt, Human
uaauacagcaacaauuuaugaa

SEQ ID NO: 1359774 - RNA, 21 nt, Human
uaauacagcaacaauuuauga

SEQ ID NO: 1359775 - RNA, 17 nt, Human
uaauacauuauauuucu

SEQ ID NO: 1359776 - RNA, 16 nt, Human
uaauacauuauauuuc

SEQ ID NO: 1359777 - RNA, 20 nt, Human
uaauacauuccaacucguau

SEQ ID NO: 1359778 - RNA, 16 nt, Human
uaauagaauaaaggca

SEQ ID NO: 1359779 - RNA, 14 nt, Human
uaauagaauaaagg

SEQ ID NO: 1359780 - RNA, 17 nt, Human
uaauagaaaaguauguu

SEQ ID NO: 1359781 - RNA, 17 nt, Human
uaauacuucuugugugu

SEQ ID NO: 1359782 - RNA, 18 nt, Human
uaauacuugcuuuggaaa

SEQ ID NO: 1359783 - RNA, 22 nt, Human
uaaucagguccucagagaauuu

SEQ ID NO: 1359784 - RNA, 19 nt, Human
uaaucagguccucagagaa

SEQ ID NO: 1359785 - RNA, 19 nt, Human
uaaucagggaggucauuuu

SEQ ID NO: 1359786 - RNA, 16 nt, Human
uaauauugauuuauua

SEQ ID NO: 1359787 - RNA, 18 nt, Human
uaauauugacuuguauau

SEQ ID NO: 1359788 - RNA, 16 nt, Human
uaauauugacuuguau

SEQ ID NO: 1359789 - RNA, 22 nt, Human
uaauagaauaaaggcaguuuuc

SEQ ID NO: 1359790 - RNA, 20 nt, Human
uaauagaauaaaggcaguuu

SEQ ID NO: 1359791 - RNA, 14 nt, Human
uaauagacaauuua

SEQ ID NO: 1359792 - RNA, 15 nt, Human
uaaucuugcuuucuu

SEQ ID NO: 1359793 - RNA, 14 nt, Human
uaaucuugcuuucu

SEQ ID NO: 1359794 - RNA, 22 nt, Human
uaaucuugaauuguaacuguuc

SEQ ID NO: 1359795 - RNA, 16 nt, Human
uaaucuugaauuguaa

SEQ ID NO: 1359796 - RNA, 15 nt, Human
uaaucuucugccuuc

SEQ ID NO: 1359797 - RNA, 14 nt, Human
uaaucuucugccuu

SEQ ID NO: 1359798 - RNA, 13 nt, Human
uaaucuuucacag

SEQ ID NO: 1359799 - RNA, 17 nt, Human
uaaucuuuaauuuuaca

SEQ ID NO: 1359800 - RNA, 19 nt, Human
uaauccaauggguuuuucc

SEQ ID NO: 1359801 - RNA, 22 nt, Human
uaauccaagcaaaugugaauca

SEQ ID NO: 1359802 - RNA, 21 nt, Human
uaaugugaaaaugguccagga

SEQ ID NO: 1359803 - RNA, 16 nt, Human
aaucuuuuauaggauu

SEQ ID NO: 1359804 - RNA, 17 nt, Human
aaucuugucauguguau

SEQ ID NO: 1359805 - RNA, 15 nt, Human
aaucuugucaugugu

SEQ ID NO: 1359806 - RNA, 13 nt, Human
aaucuugguuugc

SEQ ID NO: 1359807 - RNA, 19 nt, Human
aaucuugguugaugccaaa

SEQ ID NO: 1359808 - RNA, 18 nt, Human
aaucuugcuuucuuuguu

SEQ ID NO: 1359809 - RNA, 15 nt, Human
aaucuugcuuucuuu

SEQ ID NO: 1359810 - RNA, 23 nt, Human
aaucuugaucaguuaagaaauuu

SEQ ID NO: 1359811 - RNA, 13 nt, Human
aaucuugcaugua

SEQ ID NO: 1359812 - RNA, 22 nt, Human
aaucuugacuacagucaggaaa

SEQ ID NO: 1359813 - RNA, 17 nt, Human
aaucuugaaauuaagaa

SEQ ID NO: 1359814 - RNA, 14 nt, Human
aaucuugaaauuaa

SEQ ID NO: 1359815 - RNA, 19 nt, Human
aaugaaaaauuccacucaa

SEQ ID NO: 1359816 - RNA, 14 nt, Human
aaugaaaaauucca

SEQ ID NO: 1359817 - RNA, 14 nt, Human
aaugaaaaaaugua

SEQ ID NO: 1359818 - RNA, 16 nt, Human
aaucuugucaugugua

SEQ ID NO: 1359819 - RNA, 16 nt, Human
uaaugaagaucuaaau

SEQ ID NO: 1359820 - RNA, 19 nt, Human
uaaugaaguuugaauguua

SEQ ID NO: 1359821 - RNA, 12 nt, Human
uaaugugaaacu

SEQ ID NO: 1359822 - RNA, 20 nt, Human
uaaugugaaacuggauuaaa

SEQ ID NO: 1359823 - RNA, 22 nt, Human
uaaugugaaacuggauuaaacu

SEQ ID NO: 1359824 - RNA, 23 nt, Human
uaaugugaaacuggauuaaacuu

SEQ ID NO: 1359825 - RNA, 17 nt, Human
uaaugaagaucuaaaua

SEQ ID NO: 1359826 - RNA, 13 nt, Human
uaaugaaguuuga

SEQ ID NO: 1359827 - RNA, 14 nt, Human
uaaugaaguuugaa

SEQ ID NO: 1359828 - RNA, 15 nt, Human
uaaugaagaucuaaa

SEQ ID NO: 1359829 - RNA, 14 nt, Human
uaaugaagaucuaa

SEQ ID NO: 1359830 - RNA, 13 nt, Human
uaaugaagaucua

SEQ ID NO: 1359831 - RNA, 23 nt, Human
uaaugaagaaaguggaaaacaag

SEQ ID NO: 1359832 - RNA, 22 nt, Human
uaaugaagaaaguggaaaacaa

SEQ ID NO: 1359833 - RNA, 17 nt, Human
uaaugaagaaaguggaa

SEQ ID NO: 1359834 - RNA, 16 nt, Human
uaaugaagaaagugga

SEQ ID NO: 1359835 - RNA, 14 nt, Human
uaaugaacaaaugg

SEQ ID NO: 1359836 - RNA, 13 nt, Human
uaaugaacaaaug

SEQ ID NO: 1359837 - RNA, 15 nt, Human
uaauguaagacaaau

SEQ ID NO: 1359838 - RNA, 15 nt, Human
uaaugaaguuugaau

SEQ ID NO: 1359839 - RNA, 16 nt, Human
uaaugaaguuugaaug

SEQ ID NO: 1359840 - RNA, 17 nt, Human
uaaugaaguuugaaugu

SEQ ID NO: 1359841 - RNA, 18 nt, Human
uaaugaaguuugaauguu

SEQ ID NO: 1359842 - RNA, 18 nt, Human
aaugcaaccauuugaaac

SEQ ID NO: 1359843 - RNA, 17 nt, Human
aaugcaaccauuugaaa

SEQ ID NO: 1359844 - RNA, 13 nt, Human
aaugcaaccauuu

SEQ ID NO: 1359845 - RNA, 17 nt, Human
aaugcaaauaacaaaug

SEQ ID NO: 1359846 - RNA, 16 nt, Human
aaugcaaauaacaaau

SEQ ID NO: 1359847 - RNA, 14 nt, Human
aaugcaaauaacaa

SEQ ID NO: 1359848 - RNA, 13 nt, Human
aaugcaaauaaca

SEQ ID NO: 1359849 - RNA, 21 nt, Human
uaauuagugcuaagugugaac

SEQ ID NO: 1359850 - RNA, 20 nt, Human
uaauucacuguacuaucagg

SEQ ID NO: 1359851 - RNA, 22 nt, Human
uaauucacagugcucuuuucuc

SEQ ID NO: 1359852 - RNA, 21 nt, Human
uaauucacagugcucuuuucu

SEQ ID NO: 1359853 - RNA, 14 nt, Human
uaauucacagugcu

SEQ ID NO: 1359854 - RNA, 20 nt, Human
uaauuauggagucauuuuua

SEQ ID NO: 1359855 - RNA, 19 nt, Human
uaauucaauucaaagcugu

SEQ ID NO: 1359856 - RNA, 17 nt, Human
uaauuauggagucauuu

SEQ ID NO: 1359857 - RNA, 22 nt, Human
uaauuauggagucauuuuuaca

SEQ ID NO: 1359858 - RNA, 21 nt, Human
uaauuaugccuuuuuugauca

SEQ ID NO: 1359859 - RNA, 20 nt, Human
uaauuauauaacuguauuug

SEQ ID NO: 1359860 - RNA, 17 nt, Human
uaauuauauaacuguau

SEQ ID NO: 1359861 - RNA, 16 nt, Human
uaauuauauaacugua

SEQ ID NO: 1359862 - RNA, 14 nt, Human
uaauuauauaacug

SEQ ID NO: 1359863 - RNA, 23 nt, Human
uaauuauaccgcuaucauuccaa

SEQ ID NO: 1359864 - RNA, 14 nt, Human
uaauuauccaggaa

SEQ ID NO: 1359865 - RNA, 16 nt, Human
uaauuauauguuguaa

SEQ ID NO: 1359866 - RNA, 15 nt, Human
uaauuauauguugua

SEQ ID NO: 1359867 - RNA, 14 nt, Human
uaauuuuuuuaauu

SEQ ID NO: 1359868 - RNA, 21 nt, Human
uacaagcauucugucuugaag

SEQ ID NO: 1359869 - RNA, 15 nt, Human
uacaaguuggaguca

SEQ ID NO: 1359870 - RNA, 15 nt, Human
uacaaguuagaaaac

SEQ ID NO: 1359871 - RNA, 13 nt, Human
uacaaguuagaaa

SEQ ID NO: 1359872 - RNA, 16 nt, Human
uacaagccugcacaau

SEQ ID NO: 1359873 - RNA, 19 nt, Human
uacaaguauuuuuaauuaa

SEQ ID NO: 1359874 - RNA, 20 nt, Human
uaauuugcauuaaauucaca

SEQ ID NO: 1359875 - RNA, 17 nt, Human
uaauuugcauuaaauuc

SEQ ID NO: 1359876 - RNA, 16 nt, Human
uaauuugcauuaaauu

SEQ ID NO: 1359877 - RNA, 12 nt, Human
uaauuugcauua

SEQ ID NO: 1359878 - RNA, 22 nt, Human
uaauuugaggacaaccauucca

SEQ ID NO: 1359879 - RNA, 18 nt, Human
uaauuugaggacaaccau

SEQ ID NO: 1359880 - RNA, 15 nt, Human
uaauuugagagaaau

SEQ ID NO: 1359881 - RNA, 16 nt, Human
uaauuugacuagaaaa

SEQ ID NO: 1359882 - RNA, 15 nt, Human
uaauuugacuagaaa

SEQ ID NO: 1359883 - RNA, 13 nt, Human
uaauuucuaaugu

SEQ ID NO: 1359884 - RNA, 22 nt, Human
uaauuuaccuaagauuacaaau

SEQ ID NO: 1359885 - RNA, 21 nt, Human
uaauuuaccuaagauuacaaa

SEQ ID NO: 1359886 - RNA, 22 nt, Human
uaauuuacaaaaauauaaaaua

SEQ ID NO: 1359887 - RNA, 21 nt, Human
uaauuuacaaaaauauaaaau

SEQ ID NO: 1359888 - RNA, 19 nt, Human
uaauuuacaaaaauauaaa

SEQ ID NO: 1359889 - RNA, 19 nt, Human
uaauucagguuuuuccuuu

SEQ ID NO: 1359890 - RNA, 21 nt, Human
uaauucagguuuuuccuuuuu

SEQ ID NO: 1359891 - RNA, 17 nt, Human
uaauucagguuuuuccu

SEQ ID NO: 1359892 - RNA, 16 nt, Human
uaauucagguuuuucc

SEQ ID NO: 1359893 - RNA, 14 nt, Human
uaauucagguuuuu

SEQ ID NO: 1359894 - RNA, 13 nt, Human
uaauucauguugc

SEQ ID NO: 1359895 - RNA, 17 nt, Human
uacacgcuuuugugaug

SEQ ID NO: 1359896 - RNA, 18 nt, Human
uacaccuauuaucccagc

SEQ ID NO: 1359897 - RNA, 16 nt, Human
uacaccuauuauccca

SEQ ID NO: 1359898 - RNA, 18 nt, Human
aauguacccaccgggcca

SEQ ID NO: 1359899 - RNA, 21 nt, Human
uacaccuaugucauuucauuu

SEQ ID NO: 1359900 - RNA, 17 nt, Human
uacaccuaugucauuuc

SEQ ID NO: 1359901 - RNA, 14 nt, Human
uacaccuaugucau

SEQ ID NO: 1359902 - RNA, 22 nt, Human
aauguacccaccgggccacucc

SEQ ID NO: 1359903 - RNA, 15 nt, Human
aauguacauuaauua

SEQ ID NO: 1359904 - RNA, 21 nt, Human
aauguacagcaaggagauuua

SEQ ID NO: 1359905 - RNA, 23 nt, Human
aauguacagcaaggagauuuaca

SEQ ID NO: 1359906 - RNA, 15 nt, Human
uacagagaagccauc

SEQ ID NO: 1359907 - RNA, 14 nt, Human
uacagagaagccau

SEQ ID NO: 1359908 - RNA, 21 nt, Human
uacagagaagccagcuuguuu

SEQ ID NO: 1359909 - RNA, 20 nt, Human
uacagagaagccagcuuguu

SEQ ID NO: 1359910 - RNA, 19 nt, Human
uacagagaagccagcuugu

SEQ ID NO: 1359911 - RNA, 18 nt, Human
uacagagaagccagcuug

SEQ ID NO: 1359912 - RNA, 17 nt, Human
uacagagaagccagcuu

SEQ ID NO: 1359913 - RNA, 15 nt, Human
uacagagaagccagc

SEQ ID NO: 1359914 - RNA, 14 nt, Human
uacagagaagccag

SEQ ID NO: 1359915 - RNA, 13 nt, Human
uacagagaagcca

SEQ ID NO: 1359916 - RNA, 12 nt, Human
uacagagaagcc

SEQ ID NO: 1359917 - RNA, 11 nt, Human
uacagagaagc

SEQ ID NO: 1359918 - RNA, 10 nt, Human
uacagagaag

SEQ ID NO: 1359919 - RNA, 19 nt, Human
uacagagaaaccagcuucc

SEQ ID NO: 1359920 - RNA, 20 nt, Human
uacagagaaaccagcuuccu

SEQ ID NO: 1359921 - RNA, 18 nt, Human
uacagagaaaccagcuuc

SEQ ID NO: 1359922 - RNA, 17 nt, Human
uacagagaaaccagcuu

SEQ ID NO: 1359923 - RNA, 15 nt, Human
uacagagaaaccagc

SEQ ID NO: 1359924 - RNA, 19 nt, Human
uacagacuggauguaccac

SEQ ID NO: 1359925 - RNA, 21 nt, Human
uacacguauuugaauggccuu

SEQ ID NO: 1359926 - RNA, 15 nt, Human
uacagauuuugauag

SEQ ID NO: 1359927 - RNA, 16 nt, Human
uacagauuuugauagc

SEQ ID NO: 1359928 - RNA, 17 nt, Human
uacagauuuugauagca

SEQ ID NO: 1359929 - RNA, 18 nt, Human
uacagauuuugauagcaa

SEQ ID NO: 1359930 - RNA, 16 nt, Human
uacagagaagccuuca

SEQ ID NO: 1359931 - RNA, 15 nt, Human
uacagagaagccuuc

SEQ ID NO: 1359932 - RNA, 14 nt, Human
uacagagaagccuu

SEQ ID NO: 1359933 - RNA, 13 nt, Human
uacagagaagccu

SEQ ID NO: 1359934 - RNA, 23 nt, Human
uacagagaagccaucaccucaga

SEQ ID NO: 1359935 - RNA, 22 nt, Human
uacagagaagccaucaccucag

SEQ ID NO: 1359936 - RNA, 18 nt, Human
uacagagaagccaucacc

SEQ ID NO: 1359937 - RNA, 16 nt, Human
uacagagaagccauca

SEQ ID NO: 1359938 - RNA, 23 nt, Human
uacagauuuugauagcaaagcga

SEQ ID NO: 1359939 - RNA, 21 nt, Human
uacagauuuugauagcaaagc

SEQ ID NO: 1359940 - RNA, 22 nt, Human
uacagauuuugauagcaaagcg

SEQ ID NO: 1359941 - RNA, 22 nt, Human
uacagcaaggagauuuacaacu

SEQ ID NO: 1359942 - RNA, 16 nt, Human
uacaauaauucuauga

SEQ ID NO: 1359943 - RNA, 23 nt, Human
uacaaugaaaaggacuuuauaga

SEQ ID NO: 1359944 - RNA, 19 nt, Human
aaugguuguauuagauguu

SEQ ID NO: 1359945 - RNA, 21 nt, Human
aaugguuguauuagauguucu

SEQ ID NO: 1359946 - RNA, 23 nt, Human
aaugguuguauuagauguucucu

SEQ ID NO: 1359947 - RNA, 24 nt, Human
aaugguuguauuagauguucucua

SEQ ID NO: 1359948 - RNA, 23 nt, Human
aauguaagauuauagauucuaaa

SEQ ID NO: 1359949 - RNA, 22 nt, Human
aauguaagauuauagauucuaa

SEQ ID NO: 1359950 - RNA, 21 nt, Human
aauguaagauuauagauucua

SEQ ID NO: 1359951 - RNA, 20 nt, Human
aauguaagauuauagauucu

SEQ ID NO: 1359952 - RNA, 19 nt, Human
aauguaagauuauagauuc

SEQ ID NO: 1359953 - RNA, 16 nt, Human
aauguaagauuauaga

SEQ ID NO: 1359954 - RNA, 13 nt, Human
aauguaagacaaa

SEQ ID NO: 1359955 - RNA, 14 nt, Human
uacauagaugcuua

SEQ ID NO: 1359956 - RNA, 22 nt, Human
uacauacccuggccgcccccug

SEQ ID NO: 1359957 - RNA, 23 nt, Human
uacauaccacgcuagggcuggcu

SEQ ID NO: 1359958 - RNA, 20 nt, Human
uacauaccacgcuagggcug

SEQ ID NO: 1359959 - RNA, 20 nt, Human
uacauacagaauuacuguaa

SEQ ID NO: 1359960 - RNA, 12 nt, Human
uacauacagaau

SEQ ID NO: 1359961 - RNA, 23 nt, Human
aauguaguucugcuccagacagg

SEQ ID NO: 1359962 - RNA, 22 nt, Human
aauguaggcuuaguuugugugu

SEQ ID NO: 1359963 - RNA, 19 nt, Human
aauguaggcuuaguuugug

SEQ ID NO: 1359964 - RNA, 16 nt, Human
aauguaggcuuaguuu

SEQ ID NO: 1359965 - RNA, 22 nt, Human
aauguaggagacuguuuggaaa

SEQ ID NO: 1359966 - RNA, 18 nt, Human
aauguagauaaguguucu

SEQ ID NO: 1359967 - RNA, 16 nt, Human
aauguagauaaguguu

SEQ ID NO: 1359968 - RNA, 15 nt, Human
aauguagauaagugu

SEQ ID NO: 1359969 - RNA, 14 nt, Human
aauguagauaagug

SEQ ID NO: 1359970 - RNA, 21 nt, Human
aauguagaguuuuuaaacauc

SEQ ID NO: 1359971 - RNA, 22 nt, Human
aauguaucauagaaauguaacu

SEQ ID NO: 1359972 - RNA, 19 nt, Human
aauguaucauagaaaugua

SEQ ID NO: 1359973 - RNA, 18 nt, Human
aauguaucauagaaaugu

SEQ ID NO: 1359974 - RNA, 16 nt, Human
aauguaucauagaaau

SEQ ID NO: 1359975 - RNA, 13 nt, Human
aauguaugcaugu

SEQ ID NO: 1359976 - RNA, 19 nt, Human
aauguaugcauguugucua

SEQ ID NO: 1359977 - RNA, 22 nt, Human
aaugugaaacuggauuaaacuu

SEQ ID NO: 1359978 - RNA, 20 nt, Human
uacagcaacaauuuaugaau

SEQ ID NO: 1359979 - RNA, 19 nt, Human
uacagcaacaauuuaugaa

SEQ ID NO: 1359980 - RNA, 22 nt, Human
uacagcaacaauuuaugaauug

SEQ ID NO: 1359981 - RNA, 24 nt, Human
uacagcaaggagauuuacaacugg

SEQ ID NO: 1359982 - RNA, 17 nt, Human
uacagucucgucucuuu

SEQ ID NO: 1359983 - RNA, 15 nt, Human
uacagucuaaagcug

SEQ ID NO: 1359984 - RNA, 14 nt, Human
uacagucuaaagcu

SEQ ID NO: 1359985 - RNA, 22 nt, Human
uacaguauggggguuguaaauu

SEQ ID NO: 1359986 - RNA, 21 nt, Human
uacaguauggggguuguaaau

SEQ ID NO: 1359987 - RNA, 20 nt, Human
uacaguauggggguuguaaa

SEQ ID NO: 1359988 - RNA, 19 nt, Human
uacagucuucuuacuugga

SEQ ID NO: 1359989 - RNA, 22 nt, Human
uacagucuuccauuugcaaggg

SEQ ID NO: 1359990 - RNA, 20 nt, Human
uacagucuuccauuugcaag

SEQ ID NO: 1359991 - RNA, 19 nt, Human
uacagucuuccauuugcaa

SEQ ID NO: 1359992 - RNA, 18 nt, Human
uacagucuuccauuugca

SEQ ID NO: 1359993 - RNA, 15 nt, Human
uacagucucgucucu

SEQ ID NO: 1359994 - RNA, 15 nt, Human
uacauaaguuuagga

SEQ ID NO: 1359995 - RNA, 15 nt, Human
uacauaaugcgugca

SEQ ID NO: 1359996 - RNA, 20 nt, Human
uacaguggggaaugaagaua

SEQ ID NO: 1359997 - RNA, 16 nt, Human
aauuaaggcauaagaa

SEQ ID NO: 1359998 - RNA, 15 nt, Human
uacaugguguuugug

SEQ ID NO: 1359999 - RNA, 23 nt, Human
uacauggugcugggagaggcagc

SEQ ID NO: 1360000 - RNA, 17 nt, Human
uacauggugcugggaga

SEQ ID NO: 1360001 - RNA, 14 nt, Human
uacauggugcuggg

SEQ ID NO: 1360002 - RNA, 23 nt, Human
uacauggcuggagcuagaauuug

SEQ ID NO: 1360003 - RNA, 17 nt, Human
uacauguacugauuacu

SEQ ID NO: 1360004 - RNA, 15 nt, Human
uacauguauugcaca

SEQ ID NO: 1360005 - RNA, 13 nt, Human
uacauguuugcac

SEQ ID NO: 1360006 - RNA, 12 nt, Human
uacauguuugca

SEQ ID NO: 1360007 - RNA, 22 nt, Human
uacauguuugcaccuuucuagu

SEQ ID NO: 1360008 - RNA, 23 nt, Human
uacauuguugagcuauugcuguu

SEQ ID NO: 1360009 - RNA, 13 nt, Human
uacauuguugagc

SEQ ID NO: 1360010 - RNA, 17 nt, Human
uacauuguuaccucuau

SEQ ID NO: 1360011 - RNA, 21 nt, Human
uacauuguuaccucuauauac

SEQ ID NO: 1360012 - RNA, 23 nt, Human
uacauugugggauguucagcacu

SEQ ID NO: 1360013 - RNA, 15 nt, Human
uacauuguauauaug

SEQ ID NO: 1360014 - RNA, 20 nt, Human
aauuaagaaaggauaaaguu

SEQ ID NO: 1360015 - RNA, 22 nt, Human
aauuaacuuuuauaaacuuuac

SEQ ID NO: 1360016 - RNA, 18 nt, Human
aauuaacuuuuauaaacu

SEQ ID NO: 1360017 - RNA, 20 nt, Human
aauuaacuuuuauaaacuuu

SEQ ID NO: 1360018 - RNA, 17 nt, Human
aauguugcugaaaaaug

SEQ ID NO: 1360019 - RNA, 19 nt, Human
aauuaacaugaauauuuag

SEQ ID NO: 1360020 - RNA, 15 nt, Human
aaugugaagccuucc

SEQ ID NO: 1360021 - RNA, 14 nt, Human
aaugugaagccuuc

SEQ ID NO: 1360022 - RNA, 13 nt, Human
aaugugaagccuu

SEQ ID NO: 1360023 - RNA, 14 nt, Human
aauguugcugaaaa

SEQ ID NO: 1360024 - RNA, 13 nt, Human
aauguugcugaaa

SEQ ID NO: 1360025 - RNA, 19 nt, Human
aauguugauuacagugcag

SEQ ID NO: 1360026 - RNA, 18 nt, Human
aauguugagaaucccaaa

SEQ ID NO: 1360027 - RNA, 18 nt, Human
aauguugacaugggacau

SEQ ID NO: 1360028 - RNA, 22 nt, Human
uacccucuggagggguguggcu

SEQ ID NO: 1360029 - RNA, 14 nt, Human
uacccucuggaggg

SEQ ID NO: 1360030 - RNA, 12 nt, Human
uacccucuggag

SEQ ID NO: 1360031 - RNA, 16 nt, Human
uacccucugaaauaca

SEQ ID NO: 1360032 - RNA, 15 nt, Human
uacccucugaaauac

SEQ ID NO: 1360033 - RNA, 14 nt, Human
uacccucugaaaua

SEQ ID NO: 1360034 - RNA, 13 nt, Human
uacccucugaaau

SEQ ID NO: 1360035 - RNA, 21 nt, Human
uacccucucagcuccaggugg

SEQ ID NO: 1360036 - RNA, 20 nt, Human
uacccucucagcuccaggug

SEQ ID NO: 1360037 - RNA, 17 nt, Human
uacccucucagcuccag

SEQ ID NO: 1360038 - RNA, 16 nt, Human
uacccucucagcucca

SEQ ID NO: 1360039 - RNA, 15 nt, Human
uacccucucagcucc

SEQ ID NO: 1360040 - RNA, 13 nt, Human
uacccucucagcu

SEQ ID NO: 1360041 - RNA, 18 nt, Human
uacccuccuuuuuuuccc

SEQ ID NO: 1360042 - RNA, 18 nt, Human
uacccugagcugaggcag

SEQ ID NO: 1360043 - RNA, 17 nt, Human
uacccugagcugaggca

SEQ ID NO: 1360044 - RNA, 16 nt, Human
uacccugagcugaggc

SEQ ID NO: 1360045 - RNA, 22 nt, Human
uacccugaccuggcccccucag

SEQ ID NO: 1360046 - RNA, 20 nt, Human
uacccugaccuggcccccuc

SEQ ID NO: 1360047 - RNA, 14 nt, Human
uacccugaccuggc

SEQ ID NO: 1360048 - RNA, 13 nt, Human
uacccugaccugg

SEQ ID NO: 1360049 - RNA, 17 nt, Human
uacccucugaaauacau

SEQ ID NO: 1360050 - RNA, 22 nt, Human
uacccucuucauggauggggga

SEQ ID NO: 1360051 - RNA, 15 nt, Human
uacccuccuggcucu

SEQ ID NO: 1360052 - RNA, 12 nt, Human
uacccuccuggc

SEQ ID NO: 1360053 - RNA, 16 nt, Human
uacccucauguucuua

SEQ ID NO: 1360054 - RNA, 17 nt, Human
uaccccgcagacaccuu

SEQ ID NO: 1360055 - RNA, 19 nt, Human
uaccccuuacaaaugaaaa

SEQ ID NO: 1360056 - RNA, 14 nt, Human
uacccgcagaguuc

SEQ ID NO: 1360057 - RNA, 18 nt, Human
uacauuuacaaacugaag

SEQ ID NO: 1360058 - RNA, 17 nt, Human
uacauuuacaaacugaa

SEQ ID NO: 1360059 - RNA, 16 nt, Human
uacauuuacaaacuga

SEQ ID NO: 1360060 - RNA, 15 nt, Human
uacauuuacaaacug

SEQ ID NO: 1360061 - RNA, 11 nt, Human
uacauuuaaua

SEQ ID NO: 1360062 - RNA, 20 nt, Human
uacauuuaaaacauuaaaau

SEQ ID NO: 1360063 - RNA, 19 nt, Human
uacauuuaaaacauuaaaa

SEQ ID NO: 1360064 - RNA, 16 nt, Human
uacauuuaaaacauua

SEQ ID NO: 1360065 - RNA, 15 nt, Human
uacauuuaaaacauu

SEQ ID NO: 1360066 - RNA, 13 nt, Human
uaccagaaagcag

SEQ ID NO: 1360067 - RNA, 21 nt, Human
uaccacugcugauauuuucuc

SEQ ID NO: 1360068 - RNA, 22 nt, Human
uaccacugcugauauuuucucu

SEQ ID NO: 1360069 - RNA, 19 nt, Human
uaccagagaaaaagggagg

SEQ ID NO: 1360070 - RNA, 12 nt, Human
uaccaguugccu

SEQ ID NO: 1360071 - RNA, 20 nt, Human
uaccacugcugauauuuucu

SEQ ID NO: 1360072 - RNA, 17 nt, Human
uaccacugcugauauuu

SEQ ID NO: 1360073 - RNA, 17 nt, Human
uaccacuuuuguucuug

SEQ ID NO: 1360074 - RNA, 17 nt, Human
uaccaucacugaguuuu

SEQ ID NO: 1360075 - RNA, 20 nt, Human
uaccaucacugaguuuucca

SEQ ID NO: 1360076 - RNA, 19 nt, Human
uaccaguugccuuuuaucc

SEQ ID NO: 1360077 - RNA, 16 nt, Human
uaccauauacagcuca

SEQ ID NO: 1360078 - RNA, 16 nt, Human
uaccaguugccuuuua

SEQ ID NO: 1360079 - RNA, 14 nt, Human
uaccaguugccuuu

SEQ ID NO: 1360080 - RNA, 15 nt, Human
uaccccccucugucu

SEQ ID NO: 1360081 - RNA, 16 nt, Human
uacccccagcugugcu

SEQ ID NO: 1360082 - RNA, 20 nt, Human
uaccccauggagcugggcua

SEQ ID NO: 1360083 - RNA, 18 nt, Human
uaccccaauuucggauuu

SEQ ID NO: 1360084 - RNA, 22 nt, Human
uaccccagacuagauguaguau

SEQ ID NO: 1360085 - RNA, 21 nt, Human
uaccccagacuagauguagua

SEQ ID NO: 1360086 - RNA, 23 nt, Human
uaccccaccucccucaaccucau

SEQ ID NO: 1360087 - RNA, 14 nt, Human
uagagcuccucccu

SEQ ID NO: 1360088 - RNA, 23 nt, Human
uagagcagggauuaaccucugca

SEQ ID NO: 1360089 - RNA, 20 nt, Human
uagagcuguauuaagccacu

SEQ ID NO: 1360090 - RNA, 23 nt, Human
uagagcaggacugaugucuccua

SEQ ID NO: 1360091 - RNA, 17 nt, Human
uagagcaggacugaugu

SEQ ID NO: 1360092 - RNA, 16 nt, Human
uagagcaggacugaug

SEQ ID NO: 1360093 - RNA, 16 nt, Human
uagagcagacuacagc

SEQ ID NO: 1360094 - RNA, 17 nt, Human
uagagcagacuacagcu

SEQ ID NO: 1360095 - RNA, 16 nt, Human
uagagcacugccacca

SEQ ID NO: 1360096 - RNA, 17 nt, Human
uagagcacugccaccag

SEQ ID NO: 1360097 - RNA, 14 nt, Human
uagagcacugccac

SEQ ID NO: 1360098 - RNA, 22 nt, Human
acaaaaacagguauauacuuug

SEQ ID NO: 1360099 - RNA, 14 nt, Human
acaaaaagaaaaga

SEQ ID NO: 1360100 - RNA, 18 nt, Human
acaaaaagaaaagaaaau

SEQ ID NO: 1360101 - RNA, 21 nt, Human
uagaucauaaggcuucaaaau

SEQ ID NO: 1360102 - RNA, 15 nt, Human
uagaucauaaggcuu

SEQ ID NO: 1360103 - RNA, 14 nt, Human
uagaucauaaggcu

SEQ ID NO: 1360104 - RNA, 23 nt, Human
uagaucagaugcuccaagauucu

SEQ ID NO: 1360105 - RNA, 20 nt, Human
uagaucagaugcuccaagau

SEQ ID NO: 1360106 - RNA, 19 nt, Human
uagaucagaugcuccaaga

SEQ ID NO: 1360107 - RNA, 18 nt, Human
uagaucagaugcuccaag

SEQ ID NO: 1360108 - RNA, 19 nt, Human
uagaugcaguucugaagaa

SEQ ID NO: 1360109 - RNA, 17 nt, Human
uagaugcaguucugaag

SEQ ID NO: 1360110 - RNA, 14 nt, Human
uagaucagaugcuc

SEQ ID NO: 1360111 - RNA, 16 nt, Human
uagauauuggacaaag

SEQ ID NO: 1360112 - RNA, 15 nt, Human
uagaggaagcagcca

SEQ ID NO: 1360113 - RNA, 22 nt, Human
uagauuuucugguucuaacauu

SEQ ID NO: 1360114 - RNA, 21 nt, Human
uagauuuucugguucuaacau

SEQ ID NO: 1360115 - RNA, 19 nt, Human
uagauuuucugguucuaac

SEQ ID NO: 1360116 - RNA, 17 nt, Human
uagauuuucugguucua

SEQ ID NO: 1360117 - RNA, 14 nt, Human
uagauuuucugguu

SEQ ID NO: 1360118 - RNA, 13 nt, Human
uagauuuucugcu

SEQ ID NO: 1360119 - RNA, 13 nt, Human
uagauuuuccaaa

SEQ ID NO: 1360120 - RNA, 12 nt, Human
uagauuuuccaa

SEQ ID NO: 1360121 - RNA, 22 nt, Human
uagauuuuacaugaaguauuuu

SEQ ID NO: 1360122 - RNA, 21 nt, Human
uagauuuuacaugaaguauuu

SEQ ID NO: 1360123 - RNA, 20 nt, Human
uagaugcaguucugaagaag

SEQ ID NO: 1360124 - RNA, 17 nt, Human
uagcacagauggccagc

SEQ ID NO: 1360125 - RNA, 21 nt, Human
uagcaugucgucaaagcugaa

SEQ ID NO: 1360126 - RNA, 14 nt, Human
acaagcuaaaauua

SEQ ID NO: 1360127 - RNA, 14 nt, Human
acaagccagaacuu

SEQ ID NO: 1360128 - RNA, 22 nt, Human
acaagccagaacuugacccuga

SEQ ID NO: 1360129 - RNA, 23 nt, Human
acaagcauggucccacaucccug

SEQ ID NO: 1360130 - RNA, 21 nt, Human
acaagagcacuacauucauuu

SEQ ID NO: 1360131 - RNA, 15 nt, Human
acaagagcacuacau

SEQ ID NO: 1360132 - RNA, 23 nt, Human
acaagaauggaucacaagaugga

SEQ ID NO: 1360133 - RNA, 19 nt, Human
acaagagaagcauucucau

SEQ ID NO: 1360134 - RNA, 21 nt, Human
acaagcauucugucuugaagg

SEQ ID NO: 1360135 - RNA, 18 nt, Human
acaagcacuaaacaaaga

SEQ ID NO: 1360136 - RNA, 14 nt, Human
acaagaauggauca

SEQ ID NO: 1360137 - RNA, 13 nt, Human
acaagaauggauc

SEQ ID NO: 1360138 - RNA, 20 nt, Human
acaagaagccacagaccuag

SEQ ID NO: 1360139 - RNA, 18 nt, Human
acaagaagcauuuuguaa

SEQ ID NO: 1360140 - RNA, 17 nt, Human
acaagaagcauuuugua

SEQ ID NO: 1360141 - RNA, 15 nt, Human
acaagaagcauuuug

SEQ ID NO: 1360142 - RNA, 14 nt, Human
acaagaagaagggc

SEQ ID NO: 1360143 - RNA, 13 nt, Human
acaacacccauuu

SEQ ID NO: 1360144 - RNA, 18 nt, Human
acaaauucugucucugga

SEQ ID NO: 1360145 - RNA, 17 nt, Human
acaaauuauuaaugaaa

SEQ ID NO: 1360146 - RNA, 15 nt, Human
acaaauuaucuuaaa

SEQ ID NO: 1360147 - RNA, 15 nt, Human
acaaauuaguuauau

SEQ ID NO: 1360148 - RNA, 19 nt, Human
acaaauguuaaaauguguu

SEQ ID NO: 1360149 - RNA, 20 nt, Human
acaaauguuaaaauguguug

SEQ ID NO: 1360150 - RNA, 18 nt, Human
acaaauguuaaaaugugu

SEQ ID NO: 1360151 - RNA, 24 nt, Human
uagcauuguaaaauuauuucauga

SEQ ID NO: 1360152 - RNA, 19 nt, Human
uagcauuguaaaagcauuu

SEQ ID NO: 1360153 - RNA, 18 nt, Human
uagcauuguaaaagcauu

SEQ ID NO: 1360154 - RNA, 21 nt, Human
uagcauuguagugcuuugaga

SEQ ID NO: 1360155 - RNA, 19 nt, Human
uagcauuuguguugaagag

SEQ ID NO: 1360156 - RNA, 14 nt, Human
acaaaaaaaaauuu

SEQ ID NO: 1360157 - RNA, 20 nt, Human
acaaaaacagguauauacuu

SEQ ID NO: 1360158 - RNA, 13 nt, Human
acaaaaacaggua

SEQ ID NO: 1360159 - RNA, 20 nt, Human
aauuuuuuuccuuaccuuuu

SEQ ID NO: 1360160 - RNA, 20 nt, Human
aauuuuuuucaccuagauuu

SEQ ID NO: 1360161 - RNA, 19 nt, Human
acaaaaaaaaaauuugcca

SEQ ID NO: 1360162 - RNA, 20 nt, Human
aauuuuuccaacuacuaaua

SEQ ID NO: 1360163 - RNA, 14 nt, Human
aauuuuuccaacua

SEQ ID NO: 1360164 - RNA, 15 nt, Human
aauuuuuuaaaaagc

SEQ ID NO: 1360165 - RNA, 13 nt, Human
aauuuuuguagua

SEQ ID NO: 1360166 - RNA, 17 nt, Human
aauuuuuuauaaaagug

SEQ ID NO: 1360167 - RNA, 22 nt, Human
aauuuuuucucuaggaaauauu

SEQ ID NO: 1360168 - RNA, 13 nt, Human
aauuuuuuucacc

SEQ ID NO: 1360169 - RNA, 20 nt, Human
aauuuuuuaucaugcauguc

SEQ ID NO: 1360170 - RNA, 18 nt, Human
aauuuuuuaucaugcaug

SEQ ID NO: 1360171 - RNA, 21 nt, Human
aauuuuuuaagugaaaauaua

SEQ ID NO: 1360172 - RNA, 19 nt, Human
aauuuuuucucuaggaaau

SEQ ID NO: 1360173 - RNA, 17 nt, Human
aauuuguuuuggauaua

SEQ ID NO: 1360174 - RNA, 19 nt, Human
aauuuguacuauuuaacug

SEQ ID NO: 1360175 - RNA, 17 nt, Human
aauuuguaggguuucua

SEQ ID NO: 1360176 - RNA, 20 nt, Human
aauuuguaaugucuugagcu

SEQ ID NO: 1360177 - RNA, 18 nt, Human
aauuuguaaugucuugag

SEQ ID NO: 1360178 - RNA, 17 nt, Human
aauuuguaaugucuuga

SEQ ID NO: 1360179 - RNA, 22 nt, Human
aauuuuuauuuuugcugagacu

SEQ ID NO: 1360180 - RNA, 15 nt, Human
aauuuuuauuucuuc

SEQ ID NO: 1360181 - RNA, 19 nt, Human
aauuuuaaccuaugauauu

SEQ ID NO: 1360182 - RNA, 14 nt, Human
aauuuuaaacaaag

SEQ ID NO: 1360183 - RNA, 17 nt, Human
aauuuuaaacaaagguu

SEQ ID NO: 1360184 - RNA, 19 nt, Human
aauuuuuauauuugaaaua

SEQ ID NO: 1360185 - RNA, 19 nt, Human
uagacaagccagaacuuga

SEQ ID NO: 1360186 - RNA, 15 nt, Human
uagacaagccagaac

SEQ ID NO: 1360187 - RNA, 14 nt, Human
uagacaagccagaa

SEQ ID NO: 1360188 - RNA, 22 nt, Human
uagacaaguccagccuggcaag

SEQ ID NO: 1360189 - RNA, 16 nt, Human
uagacaauuuauuaug

SEQ ID NO: 1360190 - RNA, 15 nt, Human
uagacaauugaggua

SEQ ID NO: 1360191 - RNA, 14 nt, Human
uagacagcaugaga

SEQ ID NO: 1360192 - RNA, 18 nt, Human
uagacaauugagguaagu

SEQ ID NO: 1360193 - RNA, 15 nt, Human
uagaauugcauugac

SEQ ID NO: 1360194 - RNA, 14 nt, Human
uagaauugcauuga

SEQ ID NO: 1360195 - RNA, 13 nt, Human
uagaauugcauug

SEQ ID NO: 1360196 - RNA, 19 nt, Human
uagaauugaguguuuaaag

SEQ ID NO: 1360197 - RNA, 13 nt, Human
uagacaagccaga

SEQ ID NO: 1360198 - RNA, 19 nt, Human
uagacaaauagaaaauggu

SEQ ID NO: 1360199 - RNA, 20 nt, Human
uagacaaauagaaaaugguc

SEQ ID NO: 1360200 - RNA, 17 nt, Human
uagacaaauagaaaaug

SEQ ID NO: 1360201 - RNA, 19 nt, Human
uagaauuugauaugugaac

SEQ ID NO: 1360202 - RNA, 20 nt, Human
uagaauugaguguuuaaagu

SEQ ID NO: 1360203 - RNA, 17 nt, Human
uagaauugaguguuuaa

SEQ ID NO: 1360204 - RNA, 12 nt, Human
uagaagccugca

SEQ ID NO: 1360205 - RNA, 23 nt, Human
uagaagucacauuccugaacagg

SEQ ID NO: 1360206 - RNA, 23 nt, Human
uagaacucaaccucuacaggguu

SEQ ID NO: 1360207 - RNA, 16 nt, Human
uacuucaugcugucua

SEQ ID NO: 1360208 - RNA, 22 nt, Human
uacuucaaaaguuuguuugcuu

SEQ ID NO: 1360209 - RNA, 17 nt, Human
uacuucaaaaguuuguu

SEQ ID NO: 1360210 - RNA, 21 nt, Human
uacuucaaauccuugaagauu

SEQ ID NO: 1360211 - RNA, 22 nt, Human
uagaacuuggauguaccugccc

SEQ ID NO: 1360212 - RNA, 21 nt, Human
uagaacucaaccucuacaggg

SEQ ID NO: 1360213 - RNA, 19 nt, Human
uagaacucugaaaugaaga

SEQ ID NO: 1360214 - RNA, 14 nt, Human
uagaagagagaggu

SEQ ID NO: 1360215 - RNA, 22 nt, Human
uagaagagagagguugaaaaac

SEQ ID NO: 1360216 - RNA, 22 nt, Human
aauuguuguucuguuaacugaa

SEQ ID NO: 1360217 - RNA, 23 nt, Human
aauuguuguucuguuaacugaau

SEQ ID NO: 1360218 - RNA, 17 nt, Human
aauuguuguucuguuaa

SEQ ID NO: 1360219 - RNA, 16 nt, Human
aauuguuguucuguua

SEQ ID NO: 1360220 - RNA, 15 nt, Human
aauuguuguucuguu

SEQ ID NO: 1360221 - RNA, 14 nt, Human
aauuguuguucugu

SEQ ID NO: 1360222 - RNA, 13 nt, Human
aauuguuguucug

SEQ ID NO: 1360223 - RNA, 12 nt, Human
aauuguuguucu

SEQ ID NO: 1360224 - RNA, 23 nt, Human
aauugugugugaugugaagccaa

SEQ ID NO: 1360225 - RNA, 19 nt, Human
aauuguguggauucuuuaa

SEQ ID NO: 1360226 - RNA, 15 nt, Human
aauuguguggauucu

SEQ ID NO: 1360227 - RNA, 20 nt, Human
aauuguguuuauaauuuuaa

SEQ ID NO: 1360228 - RNA, 16 nt, Human
uacuguaacauucagg

SEQ ID NO: 1360229 - RNA, 13 nt, Human
uacuguaagaaaa

SEQ ID NO: 1360230 - RNA, 13 nt, Human
aauugcugcuacu

SEQ ID NO: 1360231 - RNA, 19 nt, Human
aauugcugacuguagcuuu

SEQ ID NO: 1360232 - RNA, 18 nt, Human
aauugcugacuguagcuu

SEQ ID NO: 1360233 - RNA, 17 nt, Human
aauugcugacuguagcu

SEQ ID NO: 1360234 - RNA, 23 nt, Human
aauugugugaaagguacuucaaa

SEQ ID NO: 1360235 - RNA, 20 nt, Human
aauuuaaagcagguucuugu

SEQ ID NO: 1360236 - RNA, 22 nt, Human
aauuuaaagcagguucuuguug

SEQ ID NO: 1360237 - RNA, 19 nt, Human
aauuuaaagcagguucuug

SEQ ID NO: 1360238 - RNA, 12 nt, Human
aauuuaaagcag

SEQ ID NO: 1360239 - RNA, 11 nt, Human
aauuuaaagca

SEQ ID NO: 1360240 - RNA, 22 nt, Human
aauuuaaacuauaagcaagaag

SEQ ID NO: 1360241 - RNA, 19 nt, Human
aauuuaaacaccuccucau

SEQ ID NO: 1360242 - RNA, 15 nt, Human
aauuuaaacaccucc

SEQ ID NO: 1360243 - RNA, 10 nt, Human
aauuuaaaca

SEQ ID NO: 1360244 - RNA, 9 nt, Human
aauuuaaac

SEQ ID NO: 1360245 - RNA, 19 nt, Human
aauuuaaaauaauuauaua

SEQ ID NO: 1360246 - RNA, 22 nt, Human
aauuguuuuaucugaauuuuua

SEQ ID NO: 1360247 - RNA, 19 nt, Human
aauuguuuuaucugaauuu

SEQ ID NO: 1360248 - RNA, 21 nt, Human
aauuuacaaaaauauaaaaua

SEQ ID NO: 1360249 - RNA, 18 nt, Human
aauuuacaaaaauauaaa

SEQ ID NO: 1360250 - RNA, 16 nt, Human
aauuuacaaaaauaua

SEQ ID NO: 1360251 - RNA, 16 nt, Human
aauuuacaucauuucu

SEQ ID NO: 1360252 - RNA, 16 nt, Human
aauuuaaauagcuuuu

SEQ ID NO: 1360253 - RNA, 22 nt, Human
aauuuaaaguuguuugugccuu

SEQ ID NO: 1360254 - RNA, 15 nt, Human
aauuuaaauagcuuu

SEQ ID NO: 1360255 - RNA, 17 nt, Human
aauuucuacuuugaagu

SEQ ID NO: 1360256 - RNA, 16 nt, Human
aauuucuacuuugaag

SEQ ID NO: 1360257 - RNA, 15 nt, Human
aauuucuacuuugaa

SEQ ID NO: 1360258 - RNA, 18 nt, Human
aauuucuaccauuucaga

SEQ ID NO: 1360259 - RNA, 16 nt, Human
aauuucuaccauuuca

SEQ ID NO: 1360260 - RNA, 23 nt, Human
aauuuaugaauugaauuaucuug

SEQ ID NO: 1360261 - RNA, 21 nt, Human
aauuuaugaauugaauuaucu

SEQ ID NO: 1360262 - RNA, 13 nt, Human
aauuucuaaaucu

SEQ ID NO: 1360263 - RNA, 21 nt, Human
aauuucuaaaucuccaaaaua

SEQ ID NO: 1360264 - RNA, 15 nt, Human
aauuuaguaaaccaa

SEQ ID NO: 1360265 - RNA, 23 nt, Human
aauuuauccugaaauuucagauu

SEQ ID NO: 1360266 - RNA, 19 nt, Human
aauuuauccugaaauuuca

SEQ ID NO: 1360267 - RNA, 18 nt, Human
aauuuauccugaaauuuc

SEQ ID NO: 1360268 - RNA, 20 nt, Human
aauuuaguaaaccaauccua

SEQ ID NO: 1360269 - RNA, 16 nt, Human
aauuuagcauuguagu

SEQ ID NO: 1360270 - RNA, 14 nt, Human
aauuuagcauugua

SEQ ID NO: 1360271 - RNA, 13 nt, Human
aauuuagcauugu

SEQ ID NO: 1360272 - RNA, 20 nt, Human
aauuuagacuuggauucuuu

SEQ ID NO: 1360273 - RNA, 16 nt, Human
aauuuagacuuggauu

SEQ ID NO: 1360274 - RNA, 17 nt, Human
aauuuagacuucaagca

SEQ ID NO: 1360275 - RNA, 21 nt, Human
aauuuagaaaucauuuugcaa

SEQ ID NO: 1360276 - RNA, 20 nt, Human
aauuuagaaaucauuuugca

SEQ ID NO: 1360277 - RNA, 17 nt, Human
aauuuagaaaucauuuu

SEQ ID NO: 1360278 - RNA, 15 nt, Human
aauuuagaaaucauu

SEQ ID NO: 1360279 - RNA, 14 nt, Human
aauuuagaaaucau

SEQ ID NO: 1360280 - RNA, 15 nt, Human
aauuuagaaaacuuu

SEQ ID NO: 1360281 - RNA, 16 nt, Human
aauuuagaaaacuuua

SEQ ID NO: 1360282 - RNA, 17 nt, Human
aauuuaccuaagauuac

SEQ ID NO: 1360283 - RNA, 16 nt, Human
aauuuaccuaagauua

SEQ ID NO: 1360284 - RNA, 14 nt, Human
aauuuaccuaagau

SEQ ID NO: 1360285 - RNA, 13 nt, Human
aauuuaccuaaga

SEQ ID NO: 1360286 - RNA, 21 nt, Human
aauuuaccuaagauuacaaau

SEQ ID NO: 1360287 - RNA, 18 nt, Human
aauuuaccuaagauuaca

SEQ ID NO: 1360288 - RNA, 13 nt, Human
aauuugagugcuc

SEQ ID NO: 1360289 - RNA, 19 nt, Human
aauuugacuuuucuguaau

SEQ ID NO: 1360290 - RNA, 14 nt, Human
aauuugaggacaac

SEQ ID NO: 1360291 - RNA, 18 nt, Human
aauuugauaugugaacag

SEQ ID NO: 1360292 - RNA, 16 nt, Human
aauuugauaugugaac

SEQ ID NO: 1360293 - RNA, 15 nt, Human
aauuugauaugugaa

SEQ ID NO: 1360294 - RNA, 20 nt, Human
uacuuauuuuugacaguguu

SEQ ID NO: 1360295 - RNA, 19 nt, Human
aauuugauaugugaacagu

SEQ ID NO: 1360296 - RNA, 19 nt, Human
uacuucaaauccuugaaga

SEQ ID NO: 1360297 - RNA, 14 nt, Human
uacuucaaauccuu

SEQ ID NO: 1360298 - RNA, 12 nt, Human
aauuucuuaacu

SEQ ID NO: 1360299 - RNA, 21 nt, Human
aauuucuguguugccaagcuc

SEQ ID NO: 1360300 - RNA, 20 nt, Human
aauuugaaacacuuugcaua

SEQ ID NO: 1360301 - RNA, 13 nt, Human
aauuugaggacaa

SEQ ID NO: 1360302 - RNA, 17 nt, Human
aauuugagauacaaaca

SEQ ID NO: 1360303 - RNA, 20 nt, Human
aauuugagagaaauaugaag

SEQ ID NO: 1360304 - RNA, 18 nt, Human
aauuugagagaaauauga

SEQ ID NO: 1360305 - RNA, 18 nt, Human
aauuugacuuuucuguaa

SEQ ID NO: 1360306 - RNA, 17 nt, Human
aauuugacuuuucugua

SEQ ID NO: 1360307 - RNA, 16 nt, Human
aauuugacuuuucugu

SEQ ID NO: 1360308 - RNA, 14 nt, Human
uacguaugucuggu

SEQ ID NO: 1360309 - RNA, 12 nt, Human
uacguaugucug

SEQ ID NO: 1360310 - RNA, 21 nt, Human
uacguagccuaaggcuccugu

SEQ ID NO: 1360311 - RNA, 19 nt, Human
uacgugggcauugucuuuu

SEQ ID NO: 1360312 - RNA, 16 nt, Human
uacguauuuaauagca

SEQ ID NO: 1360313 - RNA, 21 nt, Human
uacguaugucugguucucaau

SEQ ID NO: 1360314 - RNA, 18 nt, Human
uacguaugucugguucuc

SEQ ID NO: 1360315 - RNA, 22 nt, Human
uacguaugucugguucucaauu

SEQ ID NO: 1360316 - RNA, 18 nt, Human
uacgugcucugugggucu

SEQ ID NO: 1360317 - RNA, 20 nt, Human
uacuagucaccagagacuuu

SEQ ID NO: 1360318 - RNA, 21 nt, Human
uacuagucaccagagacuuua

SEQ ID NO: 1360319 - RNA, 13 nt, Human
uacguugugcauu

SEQ ID NO: 1360320 - RNA, 14 nt, Human
uacguugugcauuu

SEQ ID NO: 1360321 - RNA, 15 nt, Human
uacuauuguuacauu

SEQ ID NO: 1360322 - RNA, 19 nt, Human
uacuauguggaugugacag

SEQ ID NO: 1360323 - RNA, 17 nt, Human
uacuauaagaacuuuga

SEQ ID NO: 1360324 - RNA, 23 nt, Human
uacucaaaugaguaacauuugcu

SEQ ID NO: 1360325 - RNA, 18 nt, Human
uacucaaaugaguaacau

SEQ ID NO: 1360326 - RNA, 17 nt, Human
uacucaaaugaguaaca

SEQ ID NO: 1360327 - RNA, 11 nt, Human
uacuauuuaaa

SEQ ID NO: 1360328 - RNA, 12 nt, Human
uacuauuaaaaa

SEQ ID NO: 1360329 - RNA, 22 nt, Human
uacuagucaccagagacuuuag

SEQ ID NO: 1360330 - RNA, 20 nt, Human
uacugaacaucugaguccug

SEQ ID NO: 1360331 - RNA, 21 nt, Human
uacugaacaucugaguccugg

SEQ ID NO: 1360332 - RNA, 19 nt, Human
uacugaacaucugaguccu

SEQ ID NO: 1360333 - RNA, 18 nt, Human
uacugaacaucugagucc

SEQ ID NO: 1360334 - RNA, 18 nt, Human
uacucuucuugaaauuuu

SEQ ID NO: 1360335 - RNA, 17 nt, Human
uacucuucuugaaauuu

SEQ ID NO: 1360336 - RNA, 14 nt, Human
uacucuucuugaaa

SEQ ID NO: 1360337 - RNA, 20 nt, Human
uacugacauguggggccagg

SEQ ID NO: 1360338 - RNA, 13 nt, Human
uacugacaugugg

SEQ ID NO: 1360339 - RNA, 19 nt, Human
uacugaaugucauugaaaa

SEQ ID NO: 1360340 - RNA, 13 nt, Human
uacugaaucugcu

SEQ ID NO: 1360341 - RNA, 22 nt, Human
uacucuuauaucuauauuuuac

SEQ ID NO: 1360342 - RNA, 20 nt, Human
uacucuuauaucuauauuuu

SEQ ID NO: 1360343 - RNA, 21 nt, Human
uacucacacaggcauuuccug

SEQ ID NO: 1360344 - RNA, 14 nt, Human
uacucacacaggca

SEQ ID NO: 1360345 - RNA, 13 nt, Human
uacucacacaggc

SEQ ID NO: 1360346 - RNA, 21 nt, Human
aauucuugccaaauauaaaua

SEQ ID NO: 1360347 - RNA, 14 nt, Human
aauucuugcaaagu

SEQ ID NO: 1360348 - RNA, 20 nt, Human
aauucuugcaaaguaucccu

SEQ ID NO: 1360349 - RNA, 18 nt, Human
aauucuucugaacucaaa

SEQ ID NO: 1360350 - RNA, 15 nt, Human
aauucuucugaacuc

SEQ ID NO: 1360351 - RNA, 11 nt, Human
aauucuucccu

SEQ ID NO: 1360352 - RNA, 13 nt, Human
aauucuucugaac

SEQ ID NO: 1360353 - RNA, 21 nt, Human
aauucuucccuaucuuugcca

SEQ ID NO: 1360354 - RNA, 19 nt, Human
uacccuuuuucuccagcug

SEQ ID NO: 1360355 - RNA, 18 nt, Human
uacccuuuuucuccagcu

SEQ ID NO: 1360356 - RNA, 17 nt, Human
uacccuuuuucuccagc

SEQ ID NO: 1360357 - RNA, 22 nt, Human
uacccuuuucugaccaaagaga

SEQ ID NO: 1360358 - RNA, 18 nt, Human
uacccuggccgcccccug

SEQ ID NO: 1360359 - RNA, 21 nt, Human
uacccuggccccucucccuug

SEQ ID NO: 1360360 - RNA, 19 nt, Human
uacccuggccccucucccu

SEQ ID NO: 1360361 - RNA, 16 nt, Human
uacccuggccccucuc

SEQ ID NO: 1360362 - RNA, 14 nt, Human
uacccuggccccuc

SEQ ID NO: 1360363 - RNA, 13 nt, Human
uacccuggccccu

SEQ ID NO: 1360364 - RNA, 12 nt, Human
uacccuggcccc

SEQ ID NO: 1360365 - RNA, 19 nt, Human
aauucuuaugccauauaau

SEQ ID NO: 1360366 - RNA, 21 nt, Human
aauugaaccuuugugcccuau

SEQ ID NO: 1360367 - RNA, 23 nt, Human
aauugaaccuuugugcccuauca

SEQ ID NO: 1360368 - RNA, 13 nt, Human
aauugaaccuuug

SEQ ID NO: 1360369 - RNA, 12 nt, Human
aauugaaccuuu

SEQ ID NO: 1360370 - RNA, 24 nt, Human
aauugaaauguaaggcuguguaag

SEQ ID NO: 1360371 - RNA, 16 nt, Human
aauugaaauguaaggc

SEQ ID NO: 1360372 - RNA, 15 nt, Human
aauugaaauguaagg

SEQ ID NO: 1360373 - RNA, 13 nt, Human
aauugaaauguaa

SEQ ID NO: 1360374 - RNA, 12 nt, Human
aauugaaaugua

SEQ ID NO: 1360375 - RNA, 22 nt, Human
aauugaaagugggcaaaagcuu

SEQ ID NO: 1360376 - RNA, 18 nt, Human
aauugaaguaaacuuuuu

SEQ ID NO: 1360377 - RNA, 17 nt, Human
aauugaaguaaacuuuu

SEQ ID NO: 1360378 - RNA, 15 nt, Human
uacguacacauuuua

SEQ ID NO: 1360379 - RNA, 22 nt, Human
aauucuuucaauacagauauau

SEQ ID NO: 1360380 - RNA, 21 nt, Human
aauucuuucaauacagauaua

SEQ ID NO: 1360381 - RNA, 20 nt, Human
aauucuuucaauacagauau

SEQ ID NO: 1360382 - RNA, 19 nt, Human
aauucuuucaauacagaua

SEQ ID NO: 1360383 - RNA, 18 nt, Human
aauucuuucaauacagau

SEQ ID NO: 1360384 - RNA, 14 nt, Human
aauucuuucauuuu

SEQ ID NO: 1360385 - RNA, 20 nt, Human
aauucuugguugaggaaaca

SEQ ID NO: 1360386 - RNA, 19 nt, Human
aauucuugguugaggaaac

SEQ ID NO: 1360387 - RNA, 18 nt, Human
aauucuugguugaggaaa

SEQ ID NO: 1360388 - RNA, 23 nt, Human
aauucuucugaacucaaacugag

SEQ ID NO: 1360389 - RNA, 17 nt, Human
aauucuuucaauacaga

SEQ ID NO: 1360390 - RNA, 17 nt, Human
aauucuuuaaaauuaca

SEQ ID NO: 1360391 - RNA, 22 nt, Human
aauucuuuaaaauuacaacuaa

SEQ ID NO: 1360392 - RNA, 23 nt, Human
uauaaaauaauuuuuauauuuga

SEQ ID NO: 1360393 - RNA, 19 nt, Human
uauaaaagccuguuuaaga

SEQ ID NO: 1360394 - RNA, 19 nt, Human
acacaugcaaggucauuuu

SEQ ID NO: 1360395 - RNA, 20 nt, Human
acacaugcaaggucauuuuu

SEQ ID NO: 1360396 - RNA, 22 nt, Human
uauaaaauaauuuuuauauuug

SEQ ID NO: 1360397 - RNA, 21 nt, Human
uauaaaauaauuuuuauauuu

SEQ ID NO: 1360398 - RNA, 14 nt, Human
uauaaaagccuguu

SEQ ID NO: 1360399 - RNA, 17 nt, Human
uauaaaagccuguuuaa

SEQ ID NO: 1360400 - RNA, 22 nt, Human
uaguuuucauccauaacugaac

SEQ ID NO: 1360401 - RNA, 11 nt, Human
uauaaaagaug

SEQ ID NO: 1360402 - RNA, 13 nt, Human
uaguuuuauucuu

SEQ ID NO: 1360403 - RNA, 12 nt, Human
uauaaaagccug

SEQ ID NO: 1360404 - RNA, 20 nt, Human
uauaaaagauggggucugua

SEQ ID NO: 1360405 - RNA, 21 nt, Human
uauaaaagauggggucuguaa

SEQ ID NO: 1360406 - RNA, 22 nt, Human
uauaaaagauggggucuguaaa

SEQ ID NO: 1360407 - RNA, 23 nt, Human
uauaaaagauggggucuguaaaa

SEQ ID NO: 1360408 - RNA, 21 nt, Human
acaccaggcuugccugcaggc

SEQ ID NO: 1360409 - RNA, 22 nt, Human
acaccaggauagagacuggaac

SEQ ID NO: 1360410 - RNA, 19 nt, Human
acacaugaagguaaauaaa

SEQ ID NO: 1360411 - RNA, 21 nt, Human
acacaugcaaggucauuuuuu

SEQ ID NO: 1360412 - RNA, 17 nt, Human
acaccagggccagccuc

SEQ ID NO: 1360413 - RNA, 18 nt, Human
acaccagggccagccucu

SEQ ID NO: 1360414 - RNA, 14 nt, Human
acaccagggccagc

SEQ ID NO: 1360415 - RNA, 22 nt, Human
acacccuguacuguucuguguc

SEQ ID NO: 1360416 - RNA, 13 nt, Human
acacccuguacug

SEQ ID NO: 1360417 - RNA, 18 nt, Human
acaccguucauucaggca

SEQ ID NO: 1360418 - RNA, 21 nt, Human
acaccuacuagucaccagaga

SEQ ID NO: 1360419 - RNA, 21 nt, Human
acaaggaagucaaagcaagga

SEQ ID NO: 1360420 - RNA, 16 nt, Human
acaagcuucugagacg

SEQ ID NO: 1360421 - RNA, 15 nt, Human
acaagcuucugagac

SEQ ID NO: 1360422 - RNA, 13 nt, Human
acaagcuucugag

SEQ ID NO: 1360423 - RNA, 22 nt, Human
acaagcucacagaccuuugaac

SEQ ID NO: 1360424 - RNA, 22 nt, Human
uagucucaguuugugugucuua

SEQ ID NO: 1360425 - RNA, 19 nt, Human
uagucucaguuuguguguc

SEQ ID NO: 1360426 - RNA, 11 nt, Human
uagucucaguu

SEQ ID NO: 1360427 - RNA, 18 nt, Human
uagucucagugaagacua

SEQ ID NO: 1360428 - RNA, 15 nt, Human
uagucauguuuaucu

SEQ ID NO: 1360429 - RNA, 13 nt, Human
uagucaugugacc

SEQ ID NO: 1360430 - RNA, 22 nt, Human
uagugagcagucaggaaagaga

SEQ ID NO: 1360431 - RNA, 18 nt, Human
uagucucuuuaaaaggaa

SEQ ID NO: 1360432 - RNA, 16 nt, Human
uagucucuuuaaaagg

SEQ ID NO: 1360433 - RNA, 19 nt, Human
uagugaucaaauugugcag

SEQ ID NO: 1360434 - RNA, 16 nt, Human
uagugacuuguguccc

SEQ ID NO: 1360435 - RNA, 19 nt, Human
uaguuacuguguaauuagu

SEQ ID NO: 1360436 - RNA, 18 nt, Human
uaguuacuguguaauuag

SEQ ID NO: 1360437 - RNA, 17 nt, Human
uaguuacuguguaauua

SEQ ID NO: 1360438 - RNA, 22 nt, Human
uaguuagcuaauaaaaagcuuu

SEQ ID NO: 1360439 - RNA, 19 nt, Human
uaguuauacuuauuuguau

SEQ ID NO: 1360440 - RNA, 15 nt, Human
uaguucuaggcacug

SEQ ID NO: 1360441 - RNA, 23 nt, Human
uaguucuagacauggagguucua

SEQ ID NO: 1360442 - RNA, 12 nt, Human
uaguucuagaca

SEQ ID NO: 1360443 - RNA, 11 nt, Human
uaguucuagac

SEQ ID NO: 1360444 - RNA, 22 nt, Human
uaguucuagaaaaacaggcacu

SEQ ID NO: 1360445 - RNA, 16 nt, Human
uaguucuagaaaaaca

SEQ ID NO: 1360446 - RNA, 15 nt, Human
uaguucuagaaaaac

SEQ ID NO: 1360447 - RNA, 14 nt, Human
uaguucuagaaaaa

SEQ ID NO: 1360448 - RNA, 13 nt, Human
uaguucuagaaaa

SEQ ID NO: 1360449 - RNA, 15 nt, Human
uaguucuaagacuca

SEQ ID NO: 1360450 - RNA, 14 nt, Human
uaguucuaagacuc

SEQ ID NO: 1360451 - RNA, 13 nt, Human
uaguucuaagacu

SEQ ID NO: 1360452 - RNA, 21 nt, Human
uaguuccugcuaaaacaauga

SEQ ID NO: 1360453 - RNA, 15 nt, Human
uaguucugcuccaga

SEQ ID NO: 1360454 - RNA, 14 nt, Human
uaguucugccagga

SEQ ID NO: 1360455 - RNA, 16 nt, Human
uaguucuaggcacugu

SEQ ID NO: 1360456 - RNA, 13 nt, Human
uaguucugccagg

SEQ ID NO: 1360457 - RNA, 18 nt, Human
uaguucugcuccagacag

SEQ ID NO: 1360458 - RNA, 16 nt, Human
uaguucuguagaaaug

SEQ ID NO: 1360459 - RNA, 18 nt, Human
uaguucuguagaaauggu

SEQ ID NO: 1360460 - RNA, 19 nt, Human
uaguucugcuccagacagg

SEQ ID NO: 1360461 - RNA, 13 nt, Human
uaguucuguagaa

SEQ ID NO: 1360462 - RNA, 14 nt, Human
uaguucuguagaaa

SEQ ID NO: 1360463 - RNA, 15 nt, Human
uaguucuguagaaau

SEQ ID NO: 1360464 - RNA, 16 nt, Human
uaguuuuauaugcuuc

SEQ ID NO: 1360465 - RNA, 20 nt, Human
uauauauaaucaucaaguaa

SEQ ID NO: 1360466 - RNA, 12 nt, Human
uauauauaaaua

SEQ ID NO: 1360467 - RNA, 11 nt, Human
uauauauaaau

SEQ ID NO: 1360468 - RNA, 17 nt, Human
uauagauuguccuuuug

SEQ ID NO: 1360469 - RNA, 14 nt, Human
uauagcuaaguaca

SEQ ID NO: 1360470 - RNA, 20 nt, Human
uauauccaaaagcuuuuuau

SEQ ID NO: 1360471 - RNA, 22 nt, Human
uauaucacccagacauaaagga

SEQ ID NO: 1360472 - RNA, 13 nt, Human
uauaucacccaga

SEQ ID NO: 1360473 - RNA, 19 nt, Human
uauaucacauguuuucucu

SEQ ID NO: 1360474 - RNA, 23 nt, Human
uauauauuuuuuucugaaauuuc

SEQ ID NO: 1360475 - RNA, 22 nt, Human
uauauauuuuuuucugaaauuu

SEQ ID NO: 1360476 - RNA, 21 nt, Human
uauauauuuuuuucugaaauu

SEQ ID NO: 1360477 - RNA, 16 nt, Human
uauauauauauaugua

SEQ ID NO: 1360478 - RNA, 13 nt, Human
uauauauauauau

SEQ ID NO: 1360479 - RNA, 15 nt, Human
uauauauauauaaag

SEQ ID NO: 1360480 - RNA, 16 nt, Human
uauauauagcagcuuu

SEQ ID NO: 1360481 - RNA, 15 nt, Human
uauauauauauguac

SEQ ID NO: 1360482 - RNA, 14 nt, Human
uauauauauauaug

SEQ ID NO: 1360483 - RNA, 13 nt, Human
uauauaucaaaua

SEQ ID NO: 1360484 - RNA, 12 nt, Human
uauacacugugu

SEQ ID NO: 1360485 - RNA, 13 nt, Human
uauacauaaacaa

SEQ ID NO: 1360486 - RNA, 14 nt, Human
uauacauaaacaag

SEQ ID NO: 1360487 - RNA, 19 nt, Human
uauaauuuugugaagcaaa

SEQ ID NO: 1360488 - RNA, 22 nt, Human
uauaccaaagcacauuuuaaaa

SEQ ID NO: 1360489 - RNA, 15 nt, Human
uauaccaaaauguug

SEQ ID NO: 1360490 - RNA, 12 nt, Human
uauaccaauaaa

SEQ ID NO: 1360491 - RNA, 13 nt, Human
uauaccaauaaag

SEQ ID NO: 1360492 - RNA, 15 nt, Human
uauaccaauaaagug

SEQ ID NO: 1360493 - RNA, 17 nt, Human
uauaccaaagcacauuu

SEQ ID NO: 1360494 - RNA, 19 nt, Human
uauaccaguauaauugagu

SEQ ID NO: 1360495 - RNA, 14 nt, Human
uauaccaauaaagu

SEQ ID NO: 1360496 - RNA, 14 nt, Human
uauacccacccaga

SEQ ID NO: 1360497 - RNA, 17 nt, Human
uauagauucuaaagauu

SEQ ID NO: 1360498 - RNA, 15 nt, Human
uauagauucuaaaga

SEQ ID NO: 1360499 - RNA, 14 nt, Human
uauagauucuaaag

SEQ ID NO: 1360500 - RNA, 13 nt, Human
uauagauucuaaa

SEQ ID NO: 1360501 - RNA, 12 nt, Human
uauagauucuaa

SEQ ID NO: 1360502 - RNA, 19 nt, Human
uauaaccaacuuuucuauu

SEQ ID NO: 1360503 - RNA, 16 nt, Human
uauaacaguguuuaaa

SEQ ID NO: 1360504 - RNA, 12 nt, Human
acaccucccagg

SEQ ID NO: 1360505 - RNA, 22 nt, Human
acaccuauuaucccagcugccu

SEQ ID NO: 1360506 - RNA, 20 nt, Human
acaccuauuaucccagcugc

SEQ ID NO: 1360507 - RNA, 19 nt, Human
acaccuauuaucccagcug

SEQ ID NO: 1360508 - RNA, 18 nt, Human
acaccuauuaucccagcu

SEQ ID NO: 1360509 - RNA, 20 nt, Human
acaccuaugucauuucauuu

SEQ ID NO: 1360510 - RNA, 17 nt, Human
acaccuaugucauuuca

SEQ ID NO: 1360511 - RNA, 23 nt, Human
acaccuaggcuaggguggggaga

SEQ ID NO: 1360512 - RNA, 17 nt, Human
acaccuacccuccuuuu

SEQ ID NO: 1360513 - RNA, 20 nt, Human
acaccuaggcuagggugggg

SEQ ID NO: 1360514 - RNA, 16 nt, Human
uauaagcaucauuauu

SEQ ID NO: 1360515 - RNA, 15 nt, Human
uauaagcaucauuau

SEQ ID NO: 1360516 - RNA, 22 nt, Human
uauaagcaagaaggcaaaaaua

SEQ ID NO: 1360517 - RNA, 21 nt, Human
uauaagauccuagauccuaag

SEQ ID NO: 1360518 - RNA, 19 nt, Human
uauaagauccuagauccua

SEQ ID NO: 1360519 - RNA, 18 nt, Human
uauaagauccuagauccu

SEQ ID NO: 1360520 - RNA, 14 nt, Human
uauaagauccuaga

SEQ ID NO: 1360521 - RNA, 12 nt, Human
uauaagacucuc

SEQ ID NO: 1360522 - RNA, 15 nt, Human
uauaagaaagccuga

SEQ ID NO: 1360523 - RNA, 14 nt, Human
uauaagaaagccug

SEQ ID NO: 1360524 - RNA, 13 nt, Human
uauaagaaagccu

SEQ ID NO: 1360525 - RNA, 12 nt, Human
uauaagaaagcc

SEQ ID NO: 1360526 - RNA, 16 nt, Human
uauaaccagacacaua

SEQ ID NO: 1360527 - RNA, 20 nt, Human
uauaaccaguguuguggauu

SEQ ID NO: 1360528 - RNA, 17 nt, Human
uauaagcaucauuauuu

SEQ ID NO: 1360529 - RNA, 21 nt, Human
uauaagcaucauuauuuaugu

SEQ ID NO: 1360530 - RNA, 14 nt, Human
uauaauuuugugaa

SEQ ID NO: 1360531 - RNA, 22 nt, Human
acagccuccccugccagggcag

SEQ ID NO: 1360532 - RNA, 21 nt, Human
acagccuccccugccagggca

SEQ ID NO: 1360533 - RNA, 19 nt, Human
acagccuccccugccaggg

SEQ ID NO: 1360534 - RNA, 18 nt, Human
acagccuccccugccagg

SEQ ID NO: 1360535 - RNA, 17 nt, Human
acagccuccccugccag

SEQ ID NO: 1360536 - RNA, 15 nt, Human
acagccuccccugcc

SEQ ID NO: 1360537 - RNA, 12 nt, Human
acagccucagaa

SEQ ID NO: 1360538 - RNA, 15 nt, Human
acagccccacccugg

SEQ ID NO: 1360539 - RNA, 14 nt, Human
acagccccacccug

SEQ ID NO: 1360540 - RNA, 13 nt, Human
acagccccacccu

SEQ ID NO: 1360541 - RNA, 12 nt, Human
acagccccaccc

SEQ ID NO: 1360542 - RNA, 22 nt, Human
acagcagccuggggcuggccuc

SEQ ID NO: 1360543 - RNA, 14 nt, Human
acagauaacugaaa

SEQ ID NO: 1360544 - RNA, 22 nt, Human
acagcaggccagguccagagag

SEQ ID NO: 1360545 - RNA, 18 nt, Human
acagauaacugaaaauua

SEQ ID NO: 1360546 - RNA, 16 nt, Human
acagaguugauuuuuu

SEQ ID NO: 1360547 - RNA, 13 nt, Human
acagaguugauuu

SEQ ID NO: 1360548 - RNA, 18 nt, Human
acagaguguggacucugg

SEQ ID NO: 1360549 - RNA, 15 nt, Human
acagaguuguuacau

SEQ ID NO: 1360550 - RNA, 23 nt, Human
uaugaggacuugugucucugugc

SEQ ID NO: 1360551 - RNA, 17 nt, Human
uaugaggacuugugucu

SEQ ID NO: 1360552 - RNA, 17 nt, Human
uaucuuggacaaaucac

SEQ ID NO: 1360553 - RNA, 13 nt, Human
uaugaggcauuug

SEQ ID NO: 1360554 - RNA, 19 nt, Human
uaucuuggacaaaucacau

SEQ ID NO: 1360555 - RNA, 15 nt, Human
uaucuugaauaaugu

SEQ ID NO: 1360556 - RNA, 16 nt, Human
uaugagucuagauguu

SEQ ID NO: 1360557 - RNA, 14 nt, Human
uaugagucuagaug

SEQ ID NO: 1360558 - RNA, 15 nt, Human
uaugauaauagauuc

SEQ ID NO: 1360559 - RNA, 18 nt, Human
uaugauguuaaaaaaaua

SEQ ID NO: 1360560 - RNA, 14 nt, Human
uaugauguuaaaaa

SEQ ID NO: 1360561 - RNA, 21 nt, Human
uaugauggguguuuuuagcag

SEQ ID NO: 1360562 - RNA, 14 nt, Human
uaugaucugucugu

SEQ ID NO: 1360563 - RNA, 16 nt, Human
uaugaucugucugugg

SEQ ID NO: 1360564 - RNA, 17 nt, Human
uaugcucuuaauugcca

SEQ ID NO: 1360565 - RNA, 18 nt, Human
uaugcucuuaauugccac

SEQ ID NO: 1360566 - RNA, 16 nt, Human
uaugcucuuaauugcc

SEQ ID NO: 1360567 - RNA, 21 nt, Human
uauggcguaaguacagagaag

SEQ ID NO: 1360568 - RNA, 20 nt, Human
uauggcguaaguacagagaa

SEQ ID NO: 1360569 - RNA, 19 nt, Human
uauggcguaaguacagaga

SEQ ID NO: 1360570 - RNA, 18 nt, Human
uauggcguaaguacagag

SEQ ID NO: 1360571 - RNA, 17 nt, Human
uauggcguaaguacaga

SEQ ID NO: 1360572 - RNA, 14 nt, Human
uauggccuguguca

SEQ ID NO: 1360573 - RNA, 13 nt, Human
uauggccuguguc

SEQ ID NO: 1360574 - RNA, 22 nt, Human
uauggccugugagcuaggaauu

SEQ ID NO: 1360575 - RNA, 14 nt, Human
uauggccuguggau

SEQ ID NO: 1360576 - RNA, 12 nt, Human
acagccuggcug

SEQ ID NO: 1360577 - RNA, 21 nt, Human
uauggggaagguuaucagugc

SEQ ID NO: 1360578 - RNA, 22 nt, Human
uauggcguaaguacagagaagc

SEQ ID NO: 1360579 - RNA, 23 nt, Human
uauggcguaaguacagagaagcc

SEQ ID NO: 1360580 - RNA, 16 nt, Human
uauggcuuuugugcau

SEQ ID NO: 1360581 - RNA, 23 nt, Human
uauggggaagguuaucagugcuu

SEQ ID NO: 1360582 - RNA, 17 nt, Human
acagcuccacccuggcc

SEQ ID NO: 1360583 - RNA, 15 nt, Human
acagcuccaagaauu

SEQ ID NO: 1360584 - RNA, 16 nt, Human
acagagaggacuguag

SEQ ID NO: 1360585 - RNA, 20 nt, Human
acagagacugaauagauaug

SEQ ID NO: 1360586 - RNA, 14 nt, Human
acagagaccaagau

SEQ ID NO: 1360587 - RNA, 13 nt, Human
acagagaccaaga

SEQ ID NO: 1360588 - RNA, 12 nt, Human
acagagaccaag

SEQ ID NO: 1360589 - RNA, 14 nt, Human
acagagaaaccagc

SEQ ID NO: 1360590 - RNA, 15 nt, Human
acagagaaaccagcu

SEQ ID NO: 1360591 - RNA, 13 nt, Human
acagagaaaccag

SEQ ID NO: 1360592 - RNA, 20 nt, Human
acagacuggauguaccacca

SEQ ID NO: 1360593 - RNA, 14 nt, Human
acagaguggccguc

SEQ ID NO: 1360594 - RNA, 23 nt, Human
acagagcgugagcugagcaggcc

SEQ ID NO: 1360595 - RNA, 22 nt, Human
acagagcgugagcugagcaggc

SEQ ID NO: 1360596 - RNA, 22 nt, Human
uaucuacuuccaaacuaauuuu

SEQ ID NO: 1360597 - RNA, 22 nt, Human
uaucccaaaguuguuguaaccu

SEQ ID NO: 1360598 - RNA, 15 nt, Human
uaucuagauacugua

SEQ ID NO: 1360599 - RNA, 16 nt, Human
uaucuagauacuguau

SEQ ID NO: 1360600 - RNA, 16 nt, Human
uaucacuuaaacuugc

SEQ ID NO: 1360601 - RNA, 22 nt, Human
uauccauauugagucaaauggu

SEQ ID NO: 1360602 - RNA, 17 nt, Human
uaucuaggcaacauagu

SEQ ID NO: 1360603 - RNA, 17 nt, Human
uaucuacuuccaaacua

SEQ ID NO: 1360604 - RNA, 19 nt, Human
uaucuagauacuguaucau

SEQ ID NO: 1360605 - RNA, 16 nt, Human
uaucucccugccuccu

SEQ ID NO: 1360606 - RNA, 22 nt, Human
uaucucccugccuccugccggc

SEQ ID NO: 1360607 - RNA, 15 nt, Human
uauauuuacaaaugg

SEQ ID NO: 1360608 - RNA, 21 nt, Human
uaucaaguauuauaccuuuuu

SEQ ID NO: 1360609 - RNA, 16 nt, Human
uauauugauaagaucu

SEQ ID NO: 1360610 - RNA, 14 nt, Human
uauauuuacaaaug

SEQ ID NO: 1360611 - RNA, 12 nt, Human
uaucacauguuu

SEQ ID NO: 1360612 - RNA, 20 nt, Human
uaucacacacauugcuguga

SEQ ID NO: 1360613 - RNA, 19 nt, Human
uaucacacacauugcugug

SEQ ID NO: 1360614 - RNA, 13 nt, Human
uaucacacacauu

SEQ ID NO: 1360615 - RNA, 19 nt, Human
uaucaauaaauagaccauu

SEQ ID NO: 1360616 - RNA, 16 nt, Human
uaucacacaaagcaga

SEQ ID NO: 1360617 - RNA, 18 nt, Human
uaucacauguuuucucug

SEQ ID NO: 1360618 - RNA, 18 nt, Human
uaucacccagaagaaaau

SEQ ID NO: 1360619 - RNA, 22 nt, Human
uaucacuuaaacuugcaucacu

SEQ ID NO: 1360620 - RNA, 18 nt, Human
uaucacugaagcuuuuua

SEQ ID NO: 1360621 - RNA, 21 nt, Human
uaucacccaacgcuccaaagu

SEQ ID NO: 1360622 - RNA, 16 nt, Human
uaucacccaacgcucc

SEQ ID NO: 1360623 - RNA, 14 nt, Human
acagacacuggcau

SEQ ID NO: 1360624 - RNA, 14 nt, Human
acacucccuugggc

SEQ ID NO: 1360625 - RNA, 15 nt, Human
acacuccccgaaguc

SEQ ID NO: 1360626 - RNA, 23 nt, Human
acagacuauuuuuagauuuucuu

SEQ ID NO: 1360627 - RNA, 17 nt, Human
acagacuauuuuuagau

SEQ ID NO: 1360628 - RNA, 14 nt, Human
acagacuauuuuua

SEQ ID NO: 1360629 - RNA, 23 nt, Human
acagacugcgauuugucccaggu

SEQ ID NO: 1360630 - RNA, 16 nt, Human
uauauugauccagaaa

SEQ ID NO: 1360631 - RNA, 15 nt, Human
uauucugucccuagg

SEQ ID NO: 1360632 - RNA, 13 nt, Human
uauucugucccua

SEQ ID NO: 1360633 - RNA, 12 nt, Human
uauucugucccu

SEQ ID NO: 1360634 - RNA, 11 nt, Human
uauucuguccc

SEQ ID NO: 1360635 - RNA, 18 nt, Human
uauucugggguauggcgu

SEQ ID NO: 1360636 - RNA, 19 nt, Human
uauucugggggcugcaguu

SEQ ID NO: 1360637 - RNA, 13 nt, Human
uauucuucucuuc

SEQ ID NO: 1360638 - RNA, 18 nt, Human
uauucuucuagaguucag

SEQ ID NO: 1360639 - RNA, 17 nt, Human
uauucuucuagaguuca

SEQ ID NO: 1360640 - RNA, 14 nt, Human
uauucuucuagagu

SEQ ID NO: 1360641 - RNA, 13 nt, Human
uauucuucuagag

SEQ ID NO: 1360642 - RNA, 14 nt, Human
uauucuucauaaca

SEQ ID NO: 1360643 - RNA, 19 nt, Human
uauucucugagcugugcag

SEQ ID NO: 1360644 - RNA, 18 nt, Human
uauucucugagcugugca

SEQ ID NO: 1360645 - RNA, 12 nt, Human
uauucucugagc

SEQ ID NO: 1360646 - RNA, 19 nt, Human
acaguucuuugggccagac

SEQ ID NO: 1360647 - RNA, 20 nt, Human
acaguucuuugggccagaca

SEQ ID NO: 1360648 - RNA, 20 nt, Human
uauucucuccuguaccucuu

SEQ ID NO: 1360649 - RNA, 24 nt, Human
uauucucuccuguaccucuugagc

SEQ ID NO: 1360650 - RNA, 18 nt, Human
acaguucuuugggccaga

SEQ ID NO: 1360651 - RNA, 17 nt, Human
acaguucuuugggccag

SEQ ID NO: 1360652 - RNA, 21 nt, Human
acaguucugcucugguuguuu

SEQ ID NO: 1360653 - RNA, 22 nt, Human
acaguucugugguuucauguua

SEQ ID NO: 1360654 - RNA, 12 nt, Human
acaguucugugg

SEQ ID NO: 1360655 - RNA, 16 nt, Human
acaguucugcucuggu

SEQ ID NO: 1360656 - RNA, 15 nt, Human
acaguucauauguac

SEQ ID NO: 1360657 - RNA, 16 nt, Human
acaguucaagaaagcu

SEQ ID NO: 1360658 - RNA, 20 nt, Human
acaguucaagaaagcuucaa

SEQ ID NO: 1360659 - RNA, 12 nt, Human
acaguucaagaa

SEQ ID NO: 1360660 - RNA, 23 nt, Human
acaguuaucuaaguuaauuuaaa

SEQ ID NO: 1360661 - RNA, 17 nt, Human
acaguuaucuaaguuaa

SEQ ID NO: 1360662 - RNA, 16 nt, Human
acaguuaucuaaguua

SEQ ID NO: 1360663 - RNA, 15 nt, Human
acaguuaucuaaguu

SEQ ID NO: 1360664 - RNA, 13 nt, Human
acaguuacucaga

SEQ ID NO: 1360665 - RNA, 20 nt, Human
acaguuacucagaauucucu

SEQ ID NO: 1360666 - RNA, 23 nt, Human
acaguucggugagcuacaaaugc

SEQ ID NO: 1360667 - RNA, 19 nt, Human
acaguucggugagcuacaa

SEQ ID NO: 1360668 - RNA, 22 nt, Human
acaguucggugagcuacaaaug

SEQ ID NO: 1360669 - RNA, 13 nt, Human
uauucuugguuuu

SEQ ID NO: 1360670 - RNA, 14 nt, Human
uauucuugauguaa

SEQ ID NO: 1360671 - RNA, 14 nt, Human
uauucuugguuuuc

SEQ ID NO: 1360672 - RNA, 16 nt, Human
uauucuugauguaaaa

SEQ ID NO: 1360673 - RNA, 22 nt, Human
uauucuucucuuccuuuuauca

SEQ ID NO: 1360674 - RNA, 20 nt, Human
uauugacacagaaaauguug

SEQ ID NO: 1360675 - RNA, 18 nt, Human
uauugacacagaaaaugu

SEQ ID NO: 1360676 - RNA, 16 nt, Human
uauugacacagaaaau

SEQ ID NO: 1360677 - RNA, 13 nt, Human
uauugacacagaa

SEQ ID NO: 1360678 - RNA, 23 nt, Human
uauugacacagaaaauguugaga

SEQ ID NO: 1360679 - RNA, 17 nt, Human
uauugacuuguauauuu

SEQ ID NO: 1360680 - RNA, 15 nt, Human
uauugacuuguauau

SEQ ID NO: 1360681 - RNA, 14 nt, Human
uauugacuuguaua

SEQ ID NO: 1360682 - RNA, 22 nt, Human
uauugacuaacaggccaaagag

SEQ ID NO: 1360683 - RNA, 14 nt, Human
uauugagucaaaug

SEQ ID NO: 1360684 - RNA, 20 nt, Human
uauuguaacccugucuggau

SEQ ID NO: 1360685 - RNA, 15 nt, Human
uauuguaaauauugu

SEQ ID NO: 1360686 - RNA, 15 nt, Human
uauuguaaaacaggu

SEQ ID NO: 1360687 - RNA, 20 nt, Human
uauugguuuaaagaaagugu

SEQ ID NO: 1360688 - RNA, 17 nt, Human
uauugguguaagguacu

SEQ ID NO: 1360689 - RNA, 17 nt, Human
uauuggggucugacccc

SEQ ID NO: 1360690 - RNA, 16 nt, Human
uauuggggucugaccc

SEQ ID NO: 1360691 - RNA, 23 nt, Human
uauuuagaugauaaagagacagu

SEQ ID NO: 1360692 - RNA, 17 nt, Human
uauuuaccucagccugg

SEQ ID NO: 1360693 - RNA, 14 nt, Human
uauuuacgcuuuga

SEQ ID NO: 1360694 - RNA, 16 nt, Human
uauuuaccucagccug

SEQ ID NO: 1360695 - RNA, 15 nt, Human
uauuuaccucagccu

SEQ ID NO: 1360696 - RNA, 14 nt, Human
uauuuaccucagcc

SEQ ID NO: 1360697 - RNA, 13 nt, Human
uauuuaccucagc

SEQ ID NO: 1360698 - RNA, 17 nt, Human
uauuuaccccuccccua

SEQ ID NO: 1360699 - RNA, 14 nt, Human
uauuuacauuuaau

SEQ ID NO: 1360700 - RNA, 21 nt, Human
uauuuacaugaauugcauuuu

SEQ ID NO: 1360701 - RNA, 22 nt, Human
uauuuacgcuuugauucauagu

SEQ ID NO: 1360702 - RNA, 19 nt, Human
uauuuacgcuuugauucau

SEQ ID NO: 1360703 - RNA, 15 nt, Human
uauuuacgcuuugau

SEQ ID NO: 1360704 - RNA, 14 nt, Human
uauuuaaugcugug

SEQ ID NO: 1360705 - RNA, 21 nt, Human
uauuuaaugccgauauacucu

SEQ ID NO: 1360706 - RNA, 16 nt, Human
uauuuaauuagugcua

SEQ ID NO: 1360707 - RNA, 17 nt, Human
uauuuaauuagugcuaa

SEQ ID NO: 1360708 - RNA, 18 nt, Human
uauuuaauuagugcuaag

SEQ ID NO: 1360709 - RNA, 19 nt, Human
uauuuaauuagugcuaagu

SEQ ID NO: 1360710 - RNA, 21 nt, Human
uauuuaauuagugcuaagugu

SEQ ID NO: 1360711 - RNA, 14 nt, Human
uauuuaauucaugu

SEQ ID NO: 1360712 - RNA, 19 nt, Human
uauuuagcuugggaaaggu

SEQ ID NO: 1360713 - RNA, 21 nt, Human
uauuuagaugauaaagagaca

SEQ ID NO: 1360714 - RNA, 19 nt, Human
uauuuaguguucauaaaua

SEQ ID NO: 1360715 - RNA, 14 nt, Human
uauuucacuggagc

SEQ ID NO: 1360716 - RNA, 15 nt, Human
uauuucacuggagca

SEQ ID NO: 1360717 - RNA, 15 nt, Human
uauuucacaacagcc

SEQ ID NO: 1360718 - RNA, 15 nt, Human
uauuucaauguuagc

SEQ ID NO: 1360719 - RNA, 16 nt, Human
uauuucaauguuagcc

SEQ ID NO: 1360720 - RNA, 18 nt, Human
uauuucaaauuggagcuu

SEQ ID NO: 1360721 - RNA, 14 nt, Human
uauuucaaauugga

SEQ ID NO: 1360722 - RNA, 20 nt, Human
uauuuauuuuuuuuaaguau

SEQ ID NO: 1360723 - RNA, 18 nt, Human
uauuuauuuuaauaaugu

SEQ ID NO: 1360724 - RNA, 16 nt, Human
uauuuauuuuaauaau

SEQ ID NO: 1360725 - RNA, 14 nt, Human
uauuuauuuuaaua

SEQ ID NO: 1360726 - RNA, 13 nt, Human
uauuuaauagcaa

SEQ ID NO: 1360727 - RNA, 20 nt, Human
uauuuaagauaauuauaaua

SEQ ID NO: 1360728 - RNA, 17 nt, Human
uauuuaagauaauuaua

SEQ ID NO: 1360729 - RNA, 22 nt, Human
uauuuaauagcaaagaauugac

SEQ ID NO: 1360730 - RNA, 20 nt, Human
uauuuaauagcaaagaauug

SEQ ID NO: 1360731 - RNA, 19 nt, Human
uauuuaauagcaaagaauu

SEQ ID NO: 1360732 - RNA, 18 nt, Human
uauuuaauagcaaagaau

SEQ ID NO: 1360733 - RNA, 14 nt, Human
uauuuaauagguuu

SEQ ID NO: 1360734 - RNA, 21 nt, Human
uauuuaacugccuuguguaca

SEQ ID NO: 1360735 - RNA, 13 nt, Human
uauuuaacugacu

SEQ ID NO: 1360736 - RNA, 11 nt, Human
uauuuaacuga

SEQ ID NO: 1360737 - RNA, 23 nt, Human
uauuuaacucucuuuaugucugu

SEQ ID NO: 1360738 - RNA, 16 nt, Human
uauuuaacucucuuua

SEQ ID NO: 1360739 - RNA, 13 nt, Human
uauuuaacuaauu

SEQ ID NO: 1360740 - RNA, 19 nt, Human
uauuuaacagaaauuguau

SEQ ID NO: 1360741 - RNA, 17 nt, Human
uauugugcaauguaaau

SEQ ID NO: 1360742 - RNA, 16 nt, Human
uauuuaacagaaauug

SEQ ID NO: 1360743 - RNA, 18 nt, Human
uauuuaaccucuaaauuc

SEQ ID NO: 1360744 - RNA, 17 nt, Human
uauuuaaccucuaaauu

SEQ ID NO: 1360745 - RNA, 23 nt, Human
uauugucugaacuugcauuguga

SEQ ID NO: 1360746 - RNA, 17 nt, Human
uauuguccauuguccaa

SEQ ID NO: 1360747 - RNA, 15 nt, Human
uauuguccauugucc

SEQ ID NO: 1360748 - RNA, 17 nt, Human
uauugucuagugaaacu

SEQ ID NO: 1360749 - RNA, 13 nt, Human
uauuguauucugg

SEQ ID NO: 1360750 - RNA, 10 nt, Human
uauuguauuu

SEQ ID NO: 1360751 - RNA, 15 nt, Human
uauuguauuuauuca

SEQ ID NO: 1360752 - RNA, 16 nt, Human
uauuguauuuauucaa

SEQ ID NO: 1360753 - RNA, 17 nt, Human
uauuguauuuauucaau

SEQ ID NO: 1360754 - RNA, 18 nt, Human
uauuguauuuauucaaua

SEQ ID NO: 1360755 - RNA, 20 nt, Human
uauuguauuuauucaauaaa

SEQ ID NO: 1360756 - RNA, 21 nt, Human
uauuguagcauccuggaauau

SEQ ID NO: 1360757 - RNA, 20 nt, Human
uauuguagcauccuggaaua

SEQ ID NO: 1360758 - RNA, 18 nt, Human
uauuguagcauccuggaa

SEQ ID NO: 1360759 - RNA, 17 nt, Human
uauuguagcauccugga

SEQ ID NO: 1360760 - RNA, 16 nt, Human
uauuguauauuacaau

SEQ ID NO: 1360761 - RNA, 17 nt, Human
uauuguauauuacaaug

SEQ ID NO: 1360762 - RNA, 19 nt, Human
uauuguauauuacaaugau

SEQ ID NO: 1360763 - RNA, 21 nt, Human
acaguccgucaaaacagauug

SEQ ID NO: 1360764 - RNA, 17 nt, Human
acaguccgucaaaacag

SEQ ID NO: 1360765 - RNA, 18 nt, Human
acagucaaaaccaaguca

SEQ ID NO: 1360766 - RNA, 18 nt, Human
acaguauuuguaauuaaa

SEQ ID NO: 1360767 - RNA, 17 nt, Human
acaguauuuguaauuaa

SEQ ID NO: 1360768 - RNA, 14 nt, Human
acaguauuuguaau

SEQ ID NO: 1360769 - RNA, 22 nt, Human
acaguauugcucacccagugcc

SEQ ID NO: 1360770 - RNA, 16 nt, Human
acaguauugcucaccc

SEQ ID NO: 1360771 - RNA, 15 nt, Human
acaguauugcucacc

SEQ ID NO: 1360772 - RNA, 12 nt, Human
acaguauugcuc

SEQ ID NO: 1360773 - RNA, 20 nt, Human
acaguauuauacgcuggcaa

SEQ ID NO: 1360774 - RNA, 20 nt, Human
acagggcaguaccugagggu

SEQ ID NO: 1360775 - RNA, 22 nt, Human
uauucauccaaguuaaauguag

SEQ ID NO: 1360776 - RNA, 23 nt, Human
acaguauggggguuguaaauugg

SEQ ID NO: 1360777 - RNA, 22 nt, Human
acaguauggggguuguaaauug

SEQ ID NO: 1360778 - RNA, 21 nt, Human
acaguauggggguuguaaauu

SEQ ID NO: 1360779 - RNA, 20 nt, Human
acaguauggggguuguaaau

SEQ ID NO: 1360780 - RNA, 19 nt, Human
acaguauggggguuguaaa

SEQ ID NO: 1360781 - RNA, 22 nt, Human
acaguaaaccacugaaaaaaua

SEQ ID NO: 1360782 - RNA, 20 nt, Human
acaguaaaccacugaaaaaa

SEQ ID NO: 1360783 - RNA, 19 nt, Human
acaguaaaccacugaaaaa

SEQ ID NO: 1360784 - RNA, 18 nt, Human
acaguaaaccacugaaaa

SEQ ID NO: 1360785 - RNA, 17 nt, Human
acaguaaaccacugaaa

SEQ ID NO: 1360786 - RNA, 16 nt, Human
acaguaaaccacugaa

SEQ ID NO: 1360787 - RNA, 15 nt, Human
acaguaaaccacuga

SEQ ID NO: 1360788 - RNA, 21 nt, Human
acaguaaaccacugaaaaaau

SEQ ID NO: 1360789 - RNA, 14 nt, Human
acagucuaaagcug

SEQ ID NO: 1360790 - RNA, 15 nt, Human
acagucuaaagcugg

SEQ ID NO: 1360791 - RNA, 12 nt, Human
acagucuaaagc

SEQ ID NO: 1360792 - RNA, 19 nt, Human
acagucuuccauuugcaag

SEQ ID NO: 1360793 - RNA, 14 nt, Human
acagucuuccauuu

SEQ ID NO: 1360794 - RNA, 20 nt, Human
acagugaaagaaaauaacaa

SEQ ID NO: 1360795 - RNA, 22 nt, Human
acagugugcaaggcagccgugg

SEQ ID NO: 1360796 - RNA, 13 nt, Human
acagugugcaagg

SEQ ID NO: 1360797 - RNA, 19 nt, Human
acagugucuuuuuuuguau

SEQ ID NO: 1360798 - RNA, 21 nt, Human
acagugucuuuuuuuguauag

SEQ ID NO: 1360799 - RNA, 14 nt, Human
acagugucuuuuuu

SEQ ID NO: 1360800 - RNA, 12 nt, Human
acagugucuuuu

SEQ ID NO: 1360801 - RNA, 11 nt, Human
acagugucuuu

SEQ ID NO: 1360802 - RNA, 17 nt, Human
acagugagccugaauuu

SEQ ID NO: 1360803 - RNA, 14 nt, Human
acagugagccugaa

SEQ ID NO: 1360804 - RNA, 12 nt, Human
acagugagccug

SEQ ID NO: 1360805 - RNA, 17 nt, Human
acagugacuucugagau

SEQ ID NO: 1360806 - RNA, 15 nt, Human
acagugacuucugag

SEQ ID NO: 1360807 - RNA, 14 nt, Human
acagugacuucuga

SEQ ID NO: 1360808 - RNA, 19 nt, Human
acagugaagacagaaguuu

SEQ ID NO: 1360809 - RNA, 21 nt, Human
acagugaagacagaaguuugc

SEQ ID NO: 1360810 - RNA, 18 nt, Human
acagugaagacagaaguu

SEQ ID NO: 1360811 - RNA, 14 nt, Human
acagugaagacaga

SEQ ID NO: 1360812 - RNA, 13 nt, Human
acagugaagacag

SEQ ID NO: 1360813 - RNA, 20 nt, Human
acaguguuuauccuuucaua

SEQ ID NO: 1360814 - RNA, 21 nt, Human
acaguguuuauccuuucauau

SEQ ID NO: 1360815 - RNA, 18 nt, Human
acaguguuuauccuuuca

SEQ ID NO: 1360816 - RNA, 14 nt, Human
acaguguuuauccu

SEQ ID NO: 1360817 - RNA, 21 nt, Human
acaguguugaaaauguucaga

SEQ ID NO: 1360818 - RNA, 19 nt, Human
acaguguugaaaauguuca

SEQ ID NO: 1360819 - RNA, 19 nt, Human
acaguuacauaauucacuc

SEQ ID NO: 1360820 - RNA, 13 nt, Human
acaguuacauaau

SEQ ID NO: 1360821 - RNA, 21 nt, Human
acaguuaccucugccucagaa

SEQ ID NO: 1360822 - RNA, 21 nt, Human
uauucauccaaguuaaaugua

SEQ ID NO: 1360823 - RNA, 17 nt, Human
uauucauccaaguuaaa

SEQ ID NO: 1360824 - RNA, 16 nt, Human
uauucauaguuuaauu

SEQ ID NO: 1360825 - RNA, 23 nt, Human
uauucagggaaggaggagccugu

SEQ ID NO: 1360826 - RNA, 20 nt, Human
uauucagggaaggaggagcc

SEQ ID NO: 1360827 - RNA, 20 nt, Human
uauucaggacuugaaagaaa

SEQ ID NO: 1360828 - RNA, 13 nt, Human
uauucagacagau

SEQ ID NO: 1360829 - RNA, 11 nt, Human
uauucaauaaa

SEQ ID NO: 1360830 - RNA, 15 nt, Human
uauucagcucaugga

SEQ ID NO: 1360831 - RNA, 18 nt, Human
uauuagagugucuuucca

SEQ ID NO: 1360832 - RNA, 15 nt, Human
uauuagagugucuuu

SEQ ID NO: 1360833 - RNA, 22 nt, Human
uauuagaaucaaacauuuugaa

SEQ ID NO: 1360834 - RNA, 23 nt, Human
uauuagaaucaaacauuuugaaa

SEQ ID NO: 1360835 - RNA, 21 nt, Human
uauuagaaucaaacauuuuga

SEQ ID NO: 1360836 - RNA, 17 nt, Human
uauuagaaucaaacauu

SEQ ID NO: 1360837 - RNA, 15 nt, Human
uauuaccccuuuucg

SEQ ID NO: 1360838 - RNA, 15 nt, Human
uauuacauuuucagu

SEQ ID NO: 1360839 - RNA, 16 nt, Human
uauuaccacagacaua

SEQ ID NO: 1360840 - RNA, 14 nt, Human
uauuaguuuugauu

SEQ ID NO: 1360841 - RNA, 16 nt, Human
uauuagugcuuugcca

SEQ ID NO: 1360842 - RNA, 22 nt, Human
uauuagcccuucuccauggccc

SEQ ID NO: 1360843 - RNA, 12 nt, Human
uauuagauguuc

SEQ ID NO: 1360844 - RNA, 14 nt, Human
uauuagauguucuc

SEQ ID NO: 1360845 - RNA, 15 nt, Human
uauuagauguucucu

SEQ ID NO: 1360846 - RNA, 17 nt, Human
uauuagauguucucuau

SEQ ID NO: 1360847 - RNA, 21 nt, Human
uauuagauguucucuaucauu

SEQ ID NO: 1360848 - RNA, 22 nt, Human
uauuagauguucucuaucauuu

SEQ ID NO: 1360849 - RNA, 20 nt, Human
uauuaaagaaaaaaauguau

SEQ ID NO: 1360850 - RNA, 18 nt, Human
uauuaaagaaaaaaaugu

SEQ ID NO: 1360851 - RNA, 13 nt, Human
uauuaaagaaaaa

SEQ ID NO: 1360852 - RNA, 22 nt, Human
uauuaaagaaaaaaauguauuu

SEQ ID NO: 1360853 - RNA, 23 nt, Human
uauuaaaaaucucaaauuucuaa

SEQ ID NO: 1360854 - RNA, 19 nt, Human
uauuacaguguuuauccuu

SEQ ID NO: 1360855 - RNA, 16 nt, Human
uauuacaguguuuauc

SEQ ID NO: 1360856 - RNA, 15 nt, Human
uauuacaguguuuau

SEQ ID NO: 1360857 - RNA, 23 nt, Human
uauuacaguggggaaugaagaua

SEQ ID NO: 1360858 - RNA, 22 nt, Human
uauuaaagugcuaagguucuaa

SEQ ID NO: 1360859 - RNA, 24 nt, Human
uauuaaagugcuaagguucuaagg

SEQ ID NO: 1360860 - RNA, 18 nt, Human
uauuaaagugcuaagguu

SEQ ID NO: 1360861 - RNA, 14 nt, Human
uauuaaagugcuaa

SEQ ID NO: 1360862 - RNA, 21 nt, Human
uauuaaagaaaaaaauguauu

SEQ ID NO: 1360863 - RNA, 21 nt, Human
uauguuuucaggcuagaugua

SEQ ID NO: 1360864 - RNA, 16 nt, Human
uauuaaaaaucucaaa

SEQ ID NO: 1360865 - RNA, 18 nt, Human
uauuaaaaaucucaaauu

SEQ ID NO: 1360866 - RNA, 20 nt, Human
uauuaaaaaucucaaauuuc

SEQ ID NO: 1360867 - RNA, 22 nt, Human
uauuaaaaaucucaaauuucua

SEQ ID NO: 1360868 - RNA, 23 nt, Human
acagcuggggugcagggaugugg

SEQ ID NO: 1360869 - RNA, 21 nt, Human
acagcuggggugcagggaugu

SEQ ID NO: 1360870 - RNA, 16 nt, Human
acagcuggggugcagg

SEQ ID NO: 1360871 - RNA, 20 nt, Human
acagcuggcucuacuucccc

SEQ ID NO: 1360872 - RNA, 16 nt, Human
acagcuggcucuacuu

SEQ ID NO: 1360873 - RNA, 13 nt, Human
acagcuggcucua

SEQ ID NO: 1360874 - RNA, 17 nt, Human
acagcuggacccugacc

SEQ ID NO: 1360875 - RNA, 14 nt, Human
acagcuggacccug

SEQ ID NO: 1360876 - RNA, 14 nt, Human
acagcuccucccac

SEQ ID NO: 1360877 - RNA, 12 nt, Human
acagcuccuccc

SEQ ID NO: 1360878 - RNA, 16 nt, Human
accagggcuccagccc

SEQ ID NO: 1360879 - RNA, 15 nt, Human
accagggcuccagcc

SEQ ID NO: 1360880 - RNA, 17 nt, Human
accagggccagccucua

SEQ ID NO: 1360881 - RNA, 16 nt, Human
accagggccagccucu

SEQ ID NO: 1360882 - RNA, 22 nt, Human
accagggcaucucugggcugga

SEQ ID NO: 1360883 - RNA, 21 nt, Human
accagggcaucucugggcugg

SEQ ID NO: 1360884 - RNA, 20 nt, Human
accagggcaucucugggcug

SEQ ID NO: 1360885 - RNA, 19 nt, Human
accagggcaucucugggcu

SEQ ID NO: 1360886 - RNA, 18 nt, Human
accagggcaucucugggc

SEQ ID NO: 1360887 - RNA, 17 nt, Human
accagggcaucucuggg

SEQ ID NO: 1360888 - RNA, 21 nt, Human
accagggaugaugcaacaucc

SEQ ID NO: 1360889 - RNA, 19 nt, Human
ucacugucuuuaauucugu

SEQ ID NO: 1360890 - RNA, 16 nt, Human
accaguucucaugggu

SEQ ID NO: 1360891 - RNA, 16 nt, Human
accaguuaauuuuucc

SEQ ID NO: 1360892 - RNA, 14 nt, Human
accaguuaauuuuu

SEQ ID NO: 1360893 - RNA, 13 nt, Human
accaguuaauuuu

SEQ ID NO: 1360894 - RNA, 12 nt, Human
accaguuaauuu

SEQ ID NO: 1360895 - RNA, 21 nt, Human
accaguugcagucacucuagu

SEQ ID NO: 1360896 - RNA, 20 nt, Human
accaguugcagucacucuag

SEQ ID NO: 1360897 - RNA, 15 nt, Human
accaguugcagucac

SEQ ID NO: 1360898 - RNA, 21 nt, Human
accaguucucauggguggcac

SEQ ID NO: 1360899 - RNA, 15 nt, Human
accaguugccuuuua

SEQ ID NO: 1360900 - RNA, 14 nt, Human
accaguugccuuuu

SEQ ID NO: 1360901 - RNA, 13 nt, Human
accaguugccuuu

SEQ ID NO: 1360902 - RNA, 12 nt, Human
accaguugccuu

SEQ ID NO: 1360903 - RNA, 12 nt, Human
accagugccuua

SEQ ID NO: 1360904 - RNA, 21 nt, Human
accaguguuguggauuuaaca

SEQ ID NO: 1360905 - RNA, 14 nt, Human
ucaccuggcccugc

SEQ ID NO: 1360906 - RNA, 13 nt, Human
ucaccuggcccug

SEQ ID NO: 1360907 - RNA, 12 nt, Human
ucaccuggcccu

SEQ ID NO: 1360908 - RNA, 19 nt, Human
ucaccuggaagcauuuguu

SEQ ID NO: 1360909 - RNA, 22 nt, Human
ucaccuggacuuaagcaucugg

SEQ ID NO: 1360910 - RNA, 13 nt, Human
ucaccuggaagca

SEQ ID NO: 1360911 - RNA, 23 nt, Human
ucaccuggcccugcuuccugcuu

SEQ ID NO: 1360912 - RNA, 19 nt, Human
ucaccuggcccugcuuccu

SEQ ID NO: 1360913 - RNA, 16 nt, Human
ucaccuggcccugcuu

SEQ ID NO: 1360914 - RNA, 20 nt, Human
ucacugucuuuaauucugua

SEQ ID NO: 1360915 - RNA, 21 nt, Human
ucacuguagaaugauuucaug

SEQ ID NO: 1360916 - RNA, 19 nt, Human
accauuuccucagacucua

SEQ ID NO: 1360917 - RNA, 20 nt, Human
accauuucagagaggccuuu

SEQ ID NO: 1360918 - RNA, 14 nt, Human
accauuucagagag

SEQ ID NO: 1360919 - RNA, 11 nt, Human
accauuucaga

SEQ ID NO: 1360920 - RNA, 15 nt, Human
accauuuccucagac

SEQ ID NO: 1360921 - RNA, 13 nt, Human
accauuuccucag

SEQ ID NO: 1360922 - RNA, 23 nt, Human
accauuuuguuauugacuaacag

SEQ ID NO: 1360923 - RNA, 16 nt, Human
accaguugccuuuuau

SEQ ID NO: 1360924 - RNA, 14 nt, Human
accaugauuccuuu

SEQ ID NO: 1360925 - RNA, 23 nt, Human
acccaaccacaucccacucacaa

SEQ ID NO: 1360926 - RNA, 17 nt, Human
acccacuucugcacuug

SEQ ID NO: 1360927 - RNA, 20 nt, Human
acccaagaugcaagaaggag

SEQ ID NO: 1360928 - RNA, 22 nt, Human
acccaagaugggcaucuuuugu

SEQ ID NO: 1360929 - RNA, 16 nt, Human
acccaacgcuccaaag

SEQ ID NO: 1360930 - RNA, 13 nt, Human
acccaacgcucca

SEQ ID NO: 1360931 - RNA, 19 nt, Human
acccacuugcuuuuaaaau

SEQ ID NO: 1360932 - RNA, 16 nt, Human
acccagaagaaaauag

SEQ ID NO: 1360933 - RNA, 23 nt, Human
ucagaacagcagacucagcucug

SEQ ID NO: 1360934 - RNA, 14 nt, Human
ucagaacagcagac

SEQ ID NO: 1360935 - RNA, 15 nt, Human
acccagacauaaagg

SEQ ID NO: 1360936 - RNA, 17 nt, Human
acccagacauaaaggaa

SEQ ID NO: 1360937 - RNA, 15 nt, Human
acccacuucugcacu

SEQ ID NO: 1360938 - RNA, 22 nt, Human
acccacuuuaaaauaucuacau

SEQ ID NO: 1360939 - RNA, 18 nt, Human
acccagaaugagacaucc

SEQ ID NO: 1360940 - RNA, 20 nt, Human
acccagaaugagacauccag

SEQ ID NO: 1360941 - RNA, 19 nt, Human
acccagaaugagacaucca

SEQ ID NO: 1360942 - RNA, 21 nt, Human
uauuucauguuuuugaucaaa

SEQ ID NO: 1360943 - RNA, 13 nt, Human
uauuucauguuuu

SEQ ID NO: 1360944 - RNA, 21 nt, Human
uauuucaggcauuggauauuu

SEQ ID NO: 1360945 - RNA, 17 nt, Human
accacagccagcaccug

SEQ ID NO: 1360946 - RNA, 16 nt, Human
accacagccagcaccu

SEQ ID NO: 1360947 - RNA, 16 nt, Human
accacagcacagccaa

SEQ ID NO: 1360948 - RNA, 15 nt, Human
accacagcacagcca

SEQ ID NO: 1360949 - RNA, 21 nt, Human
accacagacauacuaaccagc

SEQ ID NO: 1360950 - RNA, 22 nt, Human
accacagacauacuaaccagca

SEQ ID NO: 1360951 - RNA, 12 nt, Human
accacucuguaa

SEQ ID NO: 1360952 - RNA, 20 nt, Human
accacucuggcagccacacu

SEQ ID NO: 1360953 - RNA, 18 nt, Human
accacucuggcagccaca

SEQ ID NO: 1360954 - RNA, 17 nt, Human
accacucuggcagccac

SEQ ID NO: 1360955 - RNA, 16 nt, Human
accacucuggcagcca

SEQ ID NO: 1360956 - RNA, 15 nt, Human
accacucuggcagcc

SEQ ID NO: 1360957 - RNA, 14 nt, Human
accacucuggcagc

SEQ ID NO: 1360958 - RNA, 13 nt, Human
accacucuggcag

SEQ ID NO: 1360959 - RNA, 12 nt, Human
accacucuggca

SEQ ID NO: 1360960 - RNA, 14 nt, Human
accacucagagaca

SEQ ID NO: 1360961 - RNA, 13 nt, Human
accacucagagac

SEQ ID NO: 1360962 - RNA, 20 nt, Human
accacucagagacaugcaga

SEQ ID NO: 1360963 - RNA, 12 nt, Human
accacucagaga

SEQ ID NO: 1360964 - RNA, 20 nt, Human
accacucuaucaaguauuau

SEQ ID NO: 1360965 - RNA, 19 nt, Human
accacugaaaaaauauaug

SEQ ID NO: 1360966 - RNA, 17 nt, Human
accacugaaaaaauaua

SEQ ID NO: 1360967 - RNA, 16 nt, Human
accacugaaaaaauau

SEQ ID NO: 1360968 - RNA, 15 nt, Human
accacugaaaaaaua

SEQ ID NO: 1360969 - RNA, 14 nt, Human
accacugaaaaaau

SEQ ID NO: 1360970 - RNA, 14 nt, Human
accacucuguaauu

SEQ ID NO: 1360971 - RNA, 21 nt, Human
accacugcccccugcugccau

SEQ ID NO: 1360972 - RNA, 23 nt, Human
accagcgaggaggcuccagaggg

SEQ ID NO: 1360973 - RNA, 12 nt, Human
accaggccaccu

SEQ ID NO: 1360974 - RNA, 21 nt, Human
accaggcagccucuggggggu

SEQ ID NO: 1360975 - RNA, 20 nt, Human
accaggcagccucugggggg

SEQ ID NO: 1360976 - RNA, 17 nt, Human
accaggcagccucuggg

SEQ ID NO: 1360977 - RNA, 21 nt, Human
accaggcaccaaaagaaguaa

SEQ ID NO: 1360978 - RNA, 15 nt, Human
accaggcaccaggca

SEQ ID NO: 1360979 - RNA, 19 nt, Human
accaggauagagacuggaa

SEQ ID NO: 1360980 - RNA, 16 nt, Human
accaggauagagacug

SEQ ID NO: 1360981 - RNA, 14 nt, Human
accaggauagagac

SEQ ID NO: 1360982 - RNA, 20 nt, Human
accaggaguggguggggagu

SEQ ID NO: 1360983 - RNA, 16 nt, Human
accaggaguggguggg

SEQ ID NO: 1360984 - RNA, 20 nt, Human
accaggcaccaaaagaagua

SEQ ID NO: 1360985 - RNA, 19 nt, Human
accaggcaccaaaagaagu

SEQ ID NO: 1360986 - RNA, 17 nt, Human
accaggcaccaaaagaa

SEQ ID NO: 1360987 - RNA, 17 nt, Human
accaggauagagacugg

SEQ ID NO: 1360988 - RNA, 17 nt, Human
accaggccaccucccca

SEQ ID NO: 1360989 - RNA, 14 nt, Human
accaggccaccucc

SEQ ID NO: 1360990 - RNA, 22 nt, Human
ucaccuccucuaagguugggca

SEQ ID NO: 1360991 - RNA, 12 nt, Human
ucaccuccucua

SEQ ID NO: 1360992 - RNA, 14 nt, Human
accagccuggccca

SEQ ID NO: 1360993 - RNA, 13 nt, Human
accagccuggccc

SEQ ID NO: 1360994 - RNA, 15 nt, Human
accagagagaguugu

SEQ ID NO: 1360995 - RNA, 15 nt, Human
accacuuucuuauuu

SEQ ID NO: 1360996 - RNA, 20 nt, Human
accagagaaaaagggagggg

SEQ ID NO: 1360997 - RNA, 18 nt, Human
accagagaaaaagggagg

SEQ ID NO: 1360998 - RNA, 23 nt, Human
accacuuguguuuugcaagccag

SEQ ID NO: 1360999 - RNA, 19 nt, Human
accacuuguguuuugcaag

SEQ ID NO: 1361000 - RNA, 12 nt, Human
accacuuuuguu

SEQ ID NO: 1361001 - RNA, 17 nt, Human
acccccucaccccucca

SEQ ID NO: 1361002 - RNA, 15 nt, Human
acccccggcagcagc

SEQ ID NO: 1361003 - RNA, 14 nt, Human
accccccaagcugu

SEQ ID NO: 1361004 - RNA, 14 nt, Human
acccccagcuuugc

SEQ ID NO: 1361005 - RNA, 18 nt, Human
acccccagcuccggccug

SEQ ID NO: 1361006 - RNA, 21 nt, Human
acccccagcucaauggacugg

SEQ ID NO: 1361007 - RNA, 20 nt, Human
acccccagcucaauggacug

SEQ ID NO: 1361008 - RNA, 13 nt, Human
acccccagcucaa

SEQ ID NO: 1361009 - RNA, 12 nt, Human
acccccagcuca

SEQ ID NO: 1361010 - RNA, 16 nt, Human
acccccagcuuugcua

SEQ ID NO: 1361011 - RNA, 15 nt, Human
acccccaggaccaga

SEQ ID NO: 1361012 - RNA, 22 nt, Human
accccauggcagugggaaaaau

SEQ ID NO: 1361013 - RNA, 19 nt, Human
accccauggagcugggcua

SEQ ID NO: 1361014 - RNA, 19 nt, Human
accccaugcuggccuugcc

SEQ ID NO: 1361015 - RNA, 18 nt, Human
acccagugcccccacuga

SEQ ID NO: 1361016 - RNA, 15 nt, Human
acccagugcccccac

SEQ ID NO: 1361017 - RNA, 16 nt, Human
acccagucuguucccc

SEQ ID NO: 1361018 - RNA, 15 nt, Human
accccauucccgcag

SEQ ID NO: 1361019 - RNA, 14 nt, Human
accccauucccgca

SEQ ID NO: 1361020 - RNA, 13 nt, Human
accccauucccgc

SEQ ID NO: 1361021 - RNA, 21 nt, Human
accccauggugcuaggaagag

SEQ ID NO: 1361022 - RNA, 17 nt, Human
acccccagccugggccu

SEQ ID NO: 1361023 - RNA, 16 nt, Human
acccccagccugggcc

SEQ ID NO: 1361024 - RNA, 15 nt, Human
acccccagccugggc

SEQ ID NO: 1361025 - RNA, 14 nt, Human
acccccagccuggg

SEQ ID NO: 1361026 - RNA, 13 nt, Human
acccccagccugg

SEQ ID NO: 1361027 - RNA, 13 nt, Human
acccccucacccc

SEQ ID NO: 1361028 - RNA, 17 nt, Human
acccccgucaagaguga

SEQ ID NO: 1361029 - RNA, 13 nt, Human
accccuguuucug

SEQ ID NO: 1361030 - RNA, 19 nt, Human
ucagccuggcuucaaauug

SEQ ID NO: 1361031 - RNA, 16 nt, Human
ucagaagaaaaagaag

SEQ ID NO: 1361032 - RNA, 13 nt, Human
ucagaagaaaaag

SEQ ID NO: 1361033 - RNA, 22 nt, Human
ucagaacucaaauggggccaga

SEQ ID NO: 1361034 - RNA, 21 nt, Human
ucagaacucaaauggggccag

SEQ ID NO: 1361035 - RNA, 15 nt, Human
ucagaacuagaauuu

SEQ ID NO: 1361036 - RNA, 17 nt, Human
ucagaagaaaaagaagc

SEQ ID NO: 1361037 - RNA, 18 nt, Human
ucagaagaaaaagaagca

SEQ ID NO: 1361038 - RNA, 18 nt, Human
ucagauggcagcuuuuaa

SEQ ID NO: 1361039 - RNA, 17 nt, Human
ucagauggcagcuuuua

SEQ ID NO: 1361040 - RNA, 16 nt, Human
ucagauggcagcuuuu

SEQ ID NO: 1361041 - RNA, 15 nt, Human
ucagauggcagcuuu

SEQ ID NO: 1361042 - RNA, 18 nt, Human
ucagaugcacaugagcug

SEQ ID NO: 1361043 - RNA, 14 nt, Human
ucagauucccagag

SEQ ID NO: 1361044 - RNA, 15 nt, Human
ucagcccugcaccau

SEQ ID NO: 1361045 - RNA, 20 nt, Human
acccagcucccuucuucccu

SEQ ID NO: 1361046 - RNA, 17 nt, Human
acccaggacaagcaugg

SEQ ID NO: 1361047 - RNA, 16 nt, Human
acccaggacaagcaug

SEQ ID NO: 1361048 - RNA, 14 nt, Human
acccaggacaagca

SEQ ID NO: 1361049 - RNA, 10 nt, Human
acccaggaca

SEQ ID NO: 1361050 - RNA, 11 nt, Human
acccaggacag

SEQ ID NO: 1361051 - RNA, 19 nt, Human
acccagguuggagugcagu

SEQ ID NO: 1361052 - RNA, 17 nt, Human
acccagguuaagaaaau

SEQ ID NO: 1361053 - RNA, 16 nt, Human
acccaguccacaaaau

SEQ ID NO: 1361054 - RNA, 18 nt, Human
acccaguaacucaucugu

SEQ ID NO: 1361055 - RNA, 17 nt, Human
acccaguaacucaucug

SEQ ID NO: 1361056 - RNA, 20 nt, Human
acccagguuggagugcagug

SEQ ID NO: 1361057 - RNA, 14 nt, Human
ucagcccugcacca

SEQ ID NO: 1361058 - RNA, 13 nt, Human
ucagcccugagga

SEQ ID NO: 1361059 - RNA, 16 nt, Human
ucagccccgcguggaa

SEQ ID NO: 1361060 - RNA, 23 nt, Human
ucagccccaccccagggcagcca

SEQ ID NO: 1361061 - RNA, 18 nt, Human
ucagccccacccuggccu

SEQ ID NO: 1361062 - RNA, 19 nt, Human
ucagccccaccccagggca

SEQ ID NO: 1361063 - RNA, 18 nt, Human
ucagccccaccccagggc

SEQ ID NO: 1361064 - RNA, 15 nt, Human
ucagccccaccccag

SEQ ID NO: 1361065 - RNA, 20 nt, Human
acccuucucccacucuccua

SEQ ID NO: 1361066 - RNA, 18 nt, Human
acccuucucccacucucc

SEQ ID NO: 1361067 - RNA, 17 nt, Human
acccuucucccacucuc

SEQ ID NO: 1361068 - RNA, 16 nt, Human
acccuucucccacucu

SEQ ID NO: 1361069 - RNA, 15 nt, Human
acccuucucccacuc

SEQ ID NO: 1361070 - RNA, 14 nt, Human
acccuucucccacu

SEQ ID NO: 1361071 - RNA, 19 nt, Human
acccuucccuugagcccuc

SEQ ID NO: 1361072 - RNA, 20 nt, Human
acccuucccuugagcccucu

SEQ ID NO: 1361073 - RNA, 15 nt, Human
acccucuuccuacug

SEQ ID NO: 1361074 - RNA, 16 nt, Human
acccucuuccuacugg

SEQ ID NO: 1361075 - RNA, 13 nt, Human
acccucuucaugg

SEQ ID NO: 1361076 - RNA, 21 nt, Human
acccucuguuccuucccugug

SEQ ID NO: 1361077 - RNA, 20 nt, Human
acccucuguuccuucccugu

SEQ ID NO: 1361078 - RNA, 14 nt, Human
acccucuguuccuu

SEQ ID NO: 1361079 - RNA, 23 nt, Human
acccucuggagggguguggcucc

SEQ ID NO: 1361080 - RNA, 21 nt, Human
acccgagucauucguucugug

SEQ ID NO: 1361081 - RNA, 16 nt, Human
acccgaggcugagaau

SEQ ID NO: 1361082 - RNA, 14 nt, Human
acccgaggcccgca

SEQ ID NO: 1361083 - RNA, 21 nt, Human
accccuuucuagaccaauaaa

SEQ ID NO: 1361084 - RNA, 19 nt, Human
accccuuucuagaccaaua

SEQ ID NO: 1361085 - RNA, 16 nt, Human
accccuuucccacccc

SEQ ID NO: 1361086 - RNA, 17 nt, Human
accccuuucccacccca

SEQ ID NO: 1361087 - RNA, 14 nt, Human
accccuuucccacc

SEQ ID NO: 1361088 - RNA, 13 nt, Human
accccuuucccac

SEQ ID NO: 1361089 - RNA, 21 nt, Human
accccuugucgccccucccuc

SEQ ID NO: 1361090 - RNA, 15 nt, Human
ucaggguaggcugga

SEQ ID NO: 1361091 - RNA, 13 nt, Human
acccuccuggcuc

SEQ ID NO: 1361092 - RNA, 11 nt, Human
acccuccuggc

SEQ ID NO: 1361093 - RNA, 18 nt, Human
acccuccaccgcagaagg

SEQ ID NO: 1361094 - RNA, 20 nt, Human
acccuccaccgcagaaggaa

SEQ ID NO: 1361095 - RNA, 21 nt, Human
acccuccaccgcagaaggaag

SEQ ID NO: 1361096 - RNA, 20 nt, Human
ucaggcccccgccuuggccu

SEQ ID NO: 1361097 - RNA, 19 nt, Human
ucaggcccccgccuuggcc

SEQ ID NO: 1361098 - RNA, 21 nt, Human
ucaggcccccaccuggcucac

SEQ ID NO: 1361099 - RNA, 20 nt, Human
ucaggcccccaccuggcuca

SEQ ID NO: 1361100 - RNA, 15 nt, Human
ucaggcccaggcacu

SEQ ID NO: 1361101 - RNA, 12 nt, Human
ucaggcccaggc

SEQ ID NO: 1361102 - RNA, 21 nt, Human
ucaggcccggcagggcgggca

SEQ ID NO: 1361103 - RNA, 16 nt, Human
ucaggcccggcagggc

SEQ ID NO: 1361104 - RNA, 22 nt, Human
ucaggcccccgccuuggccugu

SEQ ID NO: 1361105 - RNA, 19 nt, Human
ucaggcccuuauuuucaag

SEQ ID NO: 1361106 - RNA, 20 nt, Human
ucaggcauuggauauuuuuu

SEQ ID NO: 1361107 - RNA, 20 nt, Human
ucaggaagagaaggagcaga

SEQ ID NO: 1361108 - RNA, 13 nt, Human
ucagccugggcgc

SEQ ID NO: 1361109 - RNA, 20 nt, Human
ucagccuggccagacacagg

SEQ ID NO: 1361110 - RNA, 19 nt, Human
ucagccuggccagacacag

SEQ ID NO: 1361111 - RNA, 18 nt, Human
ucaggaaccgaggcaggg

SEQ ID NO: 1361112 - RNA, 19 nt, Human
ucagccugggcgcuggucc

SEQ ID NO: 1361113 - RNA, 16 nt, Human
ucagccugggcgcugg

SEQ ID NO: 1361114 - RNA, 15 nt, Human
ucaggaagagaagga

SEQ ID NO: 1361115 - RNA, 16 nt, Human
ucaggaagagaaggag

SEQ ID NO: 1361116 - RNA, 21 nt, Human
uccagccugacaucaaaaaag

SEQ ID NO: 1361117 - RNA, 13 nt, Human
uccagccugacau

SEQ ID NO: 1361118 - RNA, 11 nt, Human
uccagccugac

SEQ ID NO: 1361119 - RNA, 21 nt, Human
uccacguucugcucaucauuc

SEQ ID NO: 1361120 - RNA, 20 nt, Human
uccacguucugcucaucauu

SEQ ID NO: 1361121 - RNA, 19 nt, Human
uccacguucugcucaucau

SEQ ID NO: 1361122 - RNA, 18 nt, Human
uccacguacugcagccuc

SEQ ID NO: 1361123 - RNA, 17 nt, Human
uccacguacugcagccu

SEQ ID NO: 1361124 - RNA, 15 nt, Human
uccacguacugcagc

SEQ ID NO: 1361125 - RNA, 22 nt, Human
accuugaaaaaaaacaguggau

SEQ ID NO: 1361126 - RNA, 23 nt, Human
accuuuguauucucuccuguacc

SEQ ID NO: 1361127 - RNA, 15 nt, Human
accuuuguauucucu

SEQ ID NO: 1361128 - RNA, 19 nt, Human
accuuuguauucucuccug

SEQ ID NO: 1361129 - RNA, 17 nt, Human
uccagaaugcuguacau

SEQ ID NO: 1361130 - RNA, 16 nt, Human
uccagaaugcuguaca

SEQ ID NO: 1361131 - RNA, 15 nt, Human
uccagaaugcuguac

SEQ ID NO: 1361132 - RNA, 13 nt, Human
uccagaaugcugu

SEQ ID NO: 1361133 - RNA, 19 nt, Human
uccagaagugugacuggcu

SEQ ID NO: 1361134 - RNA, 20 nt, Human
uccagaagugugacuggcua

SEQ ID NO: 1361135 - RNA, 15 nt, Human
uccagaagugugacu

SEQ ID NO: 1361136 - RNA, 14 nt, Human
uccagaagugugac

SEQ ID NO: 1361137 - RNA, 15 nt, Human
uccacugagggcagu

SEQ ID NO: 1361138 - RNA, 20 nt, Human
uccacucugcuucucugacu

SEQ ID NO: 1361139 - RNA, 19 nt, Human
uccacucugcuucucugac

SEQ ID NO: 1361140 - RNA, 15 nt, Human
uccacucugcuucuc

SEQ ID NO: 1361141 - RNA, 14 nt, Human
uccacucugcuucu

SEQ ID NO: 1361142 - RNA, 12 nt, Human
uccacucugcuu

SEQ ID NO: 1361143 - RNA, 24 nt, Human
uccacucugcuucucugacuucug

SEQ ID NO: 1361144 - RNA, 23 nt, Human
uccacucugcuucucugacuucu

SEQ ID NO: 1361145 - RNA, 21 nt, Human
uccacucugcuucucugacuu

SEQ ID NO: 1361146 - RNA, 13 nt, Human
uccacucuuucuu

SEQ ID NO: 1361147 - RNA, 15 nt, Human
uccacucuuucuuuc

SEQ ID NO: 1361148 - RNA, 16 nt, Human
uccacucuuucuuuca

SEQ ID NO: 1361149 - RNA, 14 nt, Human
accuuaauuuauua

SEQ ID NO: 1361150 - RNA, 15 nt, Human
accuuaauuuauuau

SEQ ID NO: 1361151 - RNA, 22 nt, Human
accuuaagaccuacuguucuaa

SEQ ID NO: 1361152 - RNA, 12 nt, Human
accuuaagaccu

SEQ ID NO: 1361153 - RNA, 16 nt, Human
accuggugcugccucu

SEQ ID NO: 1361154 - RNA, 14 nt, Human
accuggucucuccu

SEQ ID NO: 1361155 - RNA, 20 nt, Human
accuuauaguuacuguguaa

SEQ ID NO: 1361156 - RNA, 19 nt, Human
accuuauaguuacugugua

SEQ ID NO: 1361157 - RNA, 18 nt, Human
accuuauaguuacugugu

SEQ ID NO: 1361158 - RNA, 14 nt, Human
accuuauaguuacu

SEQ ID NO: 1361159 - RNA, 12 nt, Human
accuuauaguua

SEQ ID NO: 1361160 - RNA, 22 nt, Human
accuuagcuggcauuacagcug

SEQ ID NO: 1361161 - RNA, 21 nt, Human
accuuagcuggcauuacagcu

SEQ ID NO: 1361162 - RNA, 23 nt, Human
accuuaggaauaaucuccuguua

SEQ ID NO: 1361163 - RNA, 14 nt, Human
accuuagaauacag

SEQ ID NO: 1361164 - RNA, 18 nt, Human
accuugaaaaaaaacagu

SEQ ID NO: 1361165 - RNA, 16 nt, Human
accuugaaaaaaaaca

SEQ ID NO: 1361166 - RNA, 14 nt, Human
accuucuccccagc

SEQ ID NO: 1361167 - RNA, 22 nt, Human
accuucuccccagcucccagga

SEQ ID NO: 1361168 - RNA, 23 nt, Human
accuucuccccagcucccaggac

SEQ ID NO: 1361169 - RNA, 21 nt, Human
accuucuccccagcucccagg

SEQ ID NO: 1361170 - RNA, 19 nt, Human
accuucuccccagcuccca

SEQ ID NO: 1361171 - RNA, 18 nt, Human
accuucuccccagcuccc

SEQ ID NO: 1361172 - RNA, 15 nt, Human
accuucuccccagcu

SEQ ID NO: 1361173 - RNA, 23 nt, Human
accuuauaguuacuguguaauua

SEQ ID NO: 1361174 - RNA, 22 nt, Human
accuuauaguuacuguguaauu

SEQ ID NO: 1361175 - RNA, 12 nt, Human
accuuccaccca

SEQ ID NO: 1361176 - RNA, 17 nt, Human
accuuccagcuccugua

SEQ ID NO: 1361177 - RNA, 14 nt, Human
accuuccagcuccu

SEQ ID NO: 1361178 - RNA, 13 nt, Human
accuuccagcucc

SEQ ID NO: 1361179 - RNA, 23 nt, Human
accuuccagaaauacuacugugu

SEQ ID NO: 1361180 - RNA, 15 nt, Human
accuuccagaaauac

SEQ ID NO: 1361181 - RNA, 14 nt, Human
accuuccacccagu

SEQ ID NO: 1361182 - RNA, 16 nt, Human
uccacauuucuaaaau

SEQ ID NO: 1361183 - RNA, 14 nt, Human
uccacauuucuaaa

SEQ ID NO: 1361184 - RNA, 13 nt, Human
uccacauuucuaa

SEQ ID NO: 1361185 - RNA, 15 nt, Human
uccacauuucuaaaa

SEQ ID NO: 1361186 - RNA, 19 nt, Human
uccaccaaaugugcuuuga

SEQ ID NO: 1361187 - RNA, 17 nt, Human
uccacaggucuagacua

SEQ ID NO: 1361188 - RNA, 16 nt, Human
uccacaggucuagacu

SEQ ID NO: 1361189 - RNA, 15 nt, Human
uccacaggucuagac

SEQ ID NO: 1361190 - RNA, 14 nt, Human
uccacaggucuaga

SEQ ID NO: 1361191 - RNA, 14 nt, Human
uccacagugacucc

SEQ ID NO: 1361192 - RNA, 21 nt, Human
uccacagggucccacagccac

SEQ ID NO: 1361193 - RNA, 20 nt, Human
uccacagggucccacagcca

SEQ ID NO: 1361194 - RNA, 18 nt, Human
uccacagggucccacagc

SEQ ID NO: 1361195 - RNA, 17 nt, Human
uccacagggucccacag

SEQ ID NO: 1361196 - RNA, 16 nt, Human
uccacagggucccaca

SEQ ID NO: 1361197 - RNA, 15 nt, Human
uccacagggucccac

SEQ ID NO: 1361198 - RNA, 20 nt, Human
uccaaucaaucuugcaugua

SEQ ID NO: 1361199 - RNA, 21 nt, Human
uccaaucaaucuugcauguaa

SEQ ID NO: 1361200 - RNA, 19 nt, Human
uccaaucaaucuugcaugu

SEQ ID NO: 1361201 - RNA, 17 nt, Human
uccaaguuguucgggcc

SEQ ID NO: 1361202 - RNA, 22 nt, Human
uccaaguuguucgggccaagga

SEQ ID NO: 1361203 - RNA, 17 nt, Human
uccaaguuaaauguaga

SEQ ID NO: 1361204 - RNA, 16 nt, Human
uccaaguuaaauguag

SEQ ID NO: 1361205 - RNA, 15 nt, Human
uccaaguuaaaugua

SEQ ID NO: 1361206 - RNA, 14 nt, Human
uccaaguuaaaugu

SEQ ID NO: 1361207 - RNA, 22 nt, Human
uccaagcugggagauucaaggg

SEQ ID NO: 1361208 - RNA, 12 nt, Human
uccaagcuggga

SEQ ID NO: 1361209 - RNA, 19 nt, Human
uccaacuaaugccuuacuc

SEQ ID NO: 1361210 - RNA, 15 nt, Human
uccaacuaaugccuu

SEQ ID NO: 1361211 - RNA, 14 nt, Human
uccaacguggccca

SEQ ID NO: 1361212 - RNA, 16 nt, Human
uccaacguggcccaga

SEQ ID NO: 1361213 - RNA, 20 nt, Human
uccaacaucacagcccagcc

SEQ ID NO: 1361214 - RNA, 23 nt, Human
uccaacaguuuaaugaagaucua

SEQ ID NO: 1361215 - RNA, 21 nt, Human
uccaacaguuuaaugaagauc

SEQ ID NO: 1361216 - RNA, 18 nt, Human
uccaacaguuuaaugaag

SEQ ID NO: 1361217 - RNA, 15 nt, Human
uccaacaguuuaaug

SEQ ID NO: 1361218 - RNA, 23 nt, Human
uccaacaccaagcacagcagccu

SEQ ID NO: 1361219 - RNA, 21 nt, Human
uccaacaccaagcacagcagc

SEQ ID NO: 1361220 - RNA, 17 nt, Human
uccaacaccaagcacag

SEQ ID NO: 1361221 - RNA, 17 nt, Human
uccaaauacuaaugaaa

SEQ ID NO: 1361222 - RNA, 22 nt, Human
uccaagcucacuccccaacccc

SEQ ID NO: 1361223 - RNA, 17 nt, Human
uccaagcucacucccca

SEQ ID NO: 1361224 - RNA, 23 nt, Human
uccaacuacuaauagaauaaagg

SEQ ID NO: 1361225 - RNA, 21 nt, Human
uccaacuacuaauagaauaaa

SEQ ID NO: 1361226 - RNA, 20 nt, Human
uccaacuacuaauagaauaa

SEQ ID NO: 1361227 - RNA, 22 nt, Human
uccaacuaaugccuuacucuuc

SEQ ID NO: 1361228 - RNA, 21 nt, Human
uccaacuaucucauuuccaag

SEQ ID NO: 1361229 - RNA, 15 nt, Human
accugaaggguugac

SEQ ID NO: 1361230 - RNA, 18 nt, Human
accugaauaaagaaugaa

SEQ ID NO: 1361231 - RNA, 18 nt, Human
accuggaacuuggggagu

SEQ ID NO: 1361232 - RNA, 17 nt, Human
accugcugagcucugag

SEQ ID NO: 1361233 - RNA, 16 nt, Human
accugcugagcucuga

SEQ ID NO: 1361234 - RNA, 15 nt, Human
accugcugagcucug

SEQ ID NO: 1361235 - RNA, 14 nt, Human
accugcugagcucu

SEQ ID NO: 1361236 - RNA, 13 nt, Human
accugcugagcuc

SEQ ID NO: 1361237 - RNA, 12 nt, Human
accugcugagcu

SEQ ID NO: 1361238 - RNA, 11 nt, Human
accugcugagc

SEQ ID NO: 1361239 - RNA, 17 nt, Human
accugcugaccugugca

SEQ ID NO: 1361240 - RNA, 18 nt, Human
accugcugaccugugcac

SEQ ID NO: 1361241 - RNA, 16 nt, Human
accugcugaccugugc

SEQ ID NO: 1361242 - RNA, 23 nt, Human
accuggaagcauuuguuucuacu

SEQ ID NO: 1361243 - RNA, 18 nt, Human
accuggaagcauuuguuu

SEQ ID NO: 1361244 - RNA, 14 nt, Human
accuggaauauaua

SEQ ID NO: 1361245 - RNA, 17 nt, Human
accuggaauauauaacc

SEQ ID NO: 1361246 - RNA, 16 nt, Human
ucauuuuuuaaaaaag

SEQ ID NO: 1361247 - RNA, 15 nt, Human
ucauuuuauguuaag

SEQ ID NO: 1361248 - RNA, 18 nt, Human
ucauuuuuuuccuugcaa

SEQ ID NO: 1361249 - RNA, 15 nt, Human
ucauuuuuuuccuug

SEQ ID NO: 1361250 - RNA, 13 nt, Human
ucauuuuuuuuaa

SEQ ID NO: 1361251 - RNA, 18 nt, Human
uccaaagucucuaauucu

SEQ ID NO: 1361252 - RNA, 17 nt, Human
uccaaagucucuaauuc

SEQ ID NO: 1361253 - RNA, 14 nt, Human
uccaaagucucuaa

SEQ ID NO: 1361254 - RNA, 13 nt, Human
uccaaagucucua

SEQ ID NO: 1361255 - RNA, 17 nt, Human
ucauuuuuuuuaagaaa

SEQ ID NO: 1361256 - RNA, 23 nt, Human
uccaaagucucuggaauuugaaa

SEQ ID NO: 1361257 - RNA, 14 nt, Human
ucauuugcuuugga

SEQ ID NO: 1361258 - RNA, 22 nt, Human
ucauuuuaacaucugagaaaag

SEQ ID NO: 1361259 - RNA, 21 nt, Human
ucauuuguuuaaaaaggcagu

SEQ ID NO: 1361260 - RNA, 17 nt, Human
ucauuuguuuaaaaagg

SEQ ID NO: 1361261 - RNA, 13 nt, Human
ucauuuguuuaaa

SEQ ID NO: 1361262 - RNA, 12 nt, Human
ucauuuguuuaa

SEQ ID NO: 1361263 - RNA, 15 nt, Human
ucauuuguuggaaug

SEQ ID NO: 1361264 - RNA, 14 nt, Human
ucauuuuaauuauu

SEQ ID NO: 1361265 - RNA, 13 nt, Human
ucauuuuaauuau

SEQ ID NO: 1361266 - RNA, 20 nt, Human
ucauuuuaacaucugagaaa

SEQ ID NO: 1361267 - RNA, 20 nt, Human
ucauuuuagggguagcauuu

SEQ ID NO: 1361268 - RNA, 23 nt, Human
accuccucagccugaaccccagg

SEQ ID NO: 1361269 - RNA, 15 nt, Human
accuccucagccuga

SEQ ID NO: 1361270 - RNA, 14 nt, Human
accuccucagccug

SEQ ID NO: 1361271 - RNA, 13 nt, Human
accuccucagccu

SEQ ID NO: 1361272 - RNA, 19 nt, Human
accuccuauggguugucac

SEQ ID NO: 1361273 - RNA, 19 nt, Human
accucagauggcagcuuuu

SEQ ID NO: 1361274 - RNA, 18 nt, Human
accucagauggcagcuuu

SEQ ID NO: 1361275 - RNA, 16 nt, Human
accucagauggcagcu

SEQ ID NO: 1361276 - RNA, 15 nt, Human
accucagauggcagc

SEQ ID NO: 1361277 - RNA, 14 nt, Human
accucagauggcag

SEQ ID NO: 1361278 - RNA, 20 nt, Human
accucagaaguaaaggaauu

SEQ ID NO: 1361279 - RNA, 17 nt, Human
accucagaccccggggu

SEQ ID NO: 1361280 - RNA, 13 nt, Human
accucagaaguaa

SEQ ID NO: 1361281 - RNA, 22 nt, Human
accucagauggcagcuuuuaaa

SEQ ID NO: 1361282 - RNA, 21 nt, Human
accucagauggcagcuuuuaa

SEQ ID NO: 1361283 - RNA, 20 nt, Human
accucagauggcagcuuuua

SEQ ID NO: 1361284 - RNA, 19 nt, Human
accucaccaacuccuaguu

SEQ ID NO: 1361285 - RNA, 17 nt, Human
accucaccaagcugcug

SEQ ID NO: 1361286 - RNA, 17 nt, Human
accucaccaacuccuag

SEQ ID NO: 1361287 - RNA, 16 nt, Human
accucaccaacuccua

SEQ ID NO: 1361288 - RNA, 15 nt, Human
accucaccaacuccu

SEQ ID NO: 1361289 - RNA, 19 nt, Human
accucaagugaucugccca

SEQ ID NO: 1361290 - RNA, 16 nt, Human
accucaagcugcaucu

SEQ ID NO: 1361291 - RNA, 21 nt, Human
accucaaucagucucagaaug

SEQ ID NO: 1361292 - RNA, 19 nt, Human
accucaaucagucucagaa

SEQ ID NO: 1361293 - RNA, 23 nt, Human
accucaagugaucugcccaccuc

SEQ ID NO: 1361294 - RNA, 13 nt, Human
accucaauguccc

SEQ ID NO: 1361295 - RNA, 19 nt, Human
accuaugucauuucauuuc

SEQ ID NO: 1361296 - RNA, 14 nt, Human
accucaagcugcau

SEQ ID NO: 1361297 - RNA, 18 nt, Human
accuaugucauuucauuu

SEQ ID NO: 1361298 - RNA, 16 nt, Human
accuaugucauuucau

SEQ ID NO: 1361299 - RNA, 15 nt, Human
accuaugucauuuca

SEQ ID NO: 1361300 - RNA, 12 nt, Human
accuaugucauu

SEQ ID NO: 1361301 - RNA, 19 nt, Human
accuaugauauuuucugug

SEQ ID NO: 1361302 - RNA, 14 nt, Human
accuaucccaccuc

SEQ ID NO: 1361303 - RNA, 17 nt, Human
accuaucccaccuccau

SEQ ID NO: 1361304 - RNA, 18 nt, Human
accuauaccuguguuucu

SEQ ID NO: 1361305 - RNA, 15 nt, Human
accuauaccuguguu

SEQ ID NO: 1361306 - RNA, 23 nt, Human
accuagcugaauguuuuucuaaa

SEQ ID NO: 1361307 - RNA, 22 nt, Human
accuagcugaauguuuuucuaa

SEQ ID NO: 1361308 - RNA, 21 nt, Human
accuagcugaauguuuuucua

SEQ ID NO: 1361309 - RNA, 20 nt, Human
accuagcugaauguuuuucu

SEQ ID NO: 1361310 - RNA, 19 nt, Human
accuagcugaauguuuuuc

SEQ ID NO: 1361311 - RNA, 18 nt, Human
accuagcugaauguuuuu

SEQ ID NO: 1361312 - RNA, 21 nt, Human
accuagcgggauggggcuccc

SEQ ID NO: 1361313 - RNA, 17 nt, Human
accuagauuuaauauaa

SEQ ID NO: 1361314 - RNA, 23 nt, Human
accuagcagcaccguucugugca

SEQ ID NO: 1361315 - RNA, 22 nt, Human
accuagcagcaccguucugugc

SEQ ID NO: 1361316 - RNA, 21 nt, Human
accuagcagcaccguucugug

SEQ ID NO: 1361317 - RNA, 14 nt, Human
accuagcagcaccg

SEQ ID NO: 1361318 - RNA, 13 nt, Human
accuagauuuaau

SEQ ID NO: 1361319 - RNA, 21 nt, Human
accuagauguauaacuaggag

SEQ ID NO: 1361320 - RNA, 13 nt, Human
accguugucucau

SEQ ID NO: 1361321 - RNA, 14 nt, Human
accguucugugcac

SEQ ID NO: 1361322 - RNA, 16 nt, Human
accgugggcucccuga

SEQ ID NO: 1361323 - RNA, 14 nt, Human
accgugggcucccu

SEQ ID NO: 1361324 - RNA, 21 nt, Human
accuaagauuacaaaucagaa

SEQ ID NO: 1361325 - RNA, 18 nt, Human
accuaacucuucuuucau

SEQ ID NO: 1361326 - RNA, 17 nt, Human
accuaacucuucuuuca

SEQ ID NO: 1361327 - RNA, 15 nt, Human
accuaauccaggcag

SEQ ID NO: 1361328 - RNA, 11 nt, Human
accuaauccaa

SEQ ID NO: 1361329 - RNA, 21 nt, Human
accuaauccaggcagauccag

SEQ ID NO: 1361330 - RNA, 20 nt, Human
accuaauccaggcagaucca

SEQ ID NO: 1361331 - RNA, 12 nt, Human
accuagauuuuu

SEQ ID NO: 1361332 - RNA, 19 nt, Human
accgaaugugucuuuagau

SEQ ID NO: 1361333 - RNA, 22 nt, Human
accgaaugugucuuuagauagc

SEQ ID NO: 1361334 - RNA, 16 nt, Human
accgaaugugucuuua

SEQ ID NO: 1361335 - RNA, 15 nt, Human
accgaaugugucuuu

SEQ ID NO: 1361336 - RNA, 18 nt, Human
accgaagcccagaggguc

SEQ ID NO: 1361337 - RNA, 13 nt, Human
accgaagcccaga

SEQ ID NO: 1361338 - RNA, 12 nt, Human
accgaagcccag

SEQ ID NO: 1361339 - RNA, 12 nt, Human
acccuuuuccag

SEQ ID NO: 1361340 - RNA, 11 nt, Human
acccuuuucau

SEQ ID NO: 1361341 - RNA, 19 nt, Human
acccuuugugugcucucca

SEQ ID NO: 1361342 - RNA, 23 nt, Human
acccuuugugugcucuccauucu

SEQ ID NO: 1361343 - RNA, 23 nt, Human
acccuuugcugugaggcuguccu

SEQ ID NO: 1361344 - RNA, 22 nt, Human
acccuuugcugugaggcugucc

SEQ ID NO: 1361345 - RNA, 17 nt, Human
acccuuuucaugauuuu

SEQ ID NO: 1361346 - RNA, 21 nt, Human
accgccagcucuguucuuccu

SEQ ID NO: 1361347 - RNA, 16 nt, Human
accgccagcucuguuc

SEQ ID NO: 1361348 - RNA, 14 nt, Human
accgccagcucugu

SEQ ID NO: 1361349 - RNA, 13 nt, Human
accgccagcucug

SEQ ID NO: 1361350 - RNA, 12 nt, Human
accgccagcucu

SEQ ID NO: 1361351 - RNA, 20 nt, Human
accgcccagcggcuugccug

SEQ ID NO: 1361352 - RNA, 19 nt, Human
accgcccccugucucucag

SEQ ID NO: 1361353 - RNA, 19 nt, Human
accgcccccuccucuagcu

SEQ ID NO: 1361354 - RNA, 14 nt, Human
accgcccccuccuc

SEQ ID NO: 1361355 - RNA, 12 nt, Human
accgcccccucc

SEQ ID NO: 1361356 - RNA, 11 nt, Human
accgcccccuc

SEQ ID NO: 1361357 - RNA, 23 nt, Human
accgcccagcggcuugccugccu

SEQ ID NO: 1361358 - RNA, 18 nt, Human
accggaccagccuggccc

SEQ ID NO: 1361359 - RNA, 16 nt, Human
accggaccagccuggc

SEQ ID NO: 1361360 - RNA, 15 nt, Human
accggaccagccugg

SEQ ID NO: 1361361 - RNA, 18 nt, Human
accgugggcagggagcgg

SEQ ID NO: 1361362 - RNA, 16 nt, Human
accgugggcagggagc

SEQ ID NO: 1361363 - RNA, 22 nt, Human
accguggcccuuccuggacagc

SEQ ID NO: 1361364 - RNA, 20 nt, Human
accguggcccuuccuggaca

SEQ ID NO: 1361365 - RNA, 19 nt, Human
accguggcccuuccuggac

SEQ ID NO: 1361366 - RNA, 18 nt, Human
accguggcccuuccugga

SEQ ID NO: 1361367 - RNA, 19 nt, Human
accggagaguggggguggg

SEQ ID NO: 1361368 - RNA, 16 nt, Human
accggacuuuucugca

SEQ ID NO: 1361369 - RNA, 15 nt, Human
accggacuuuucugc

SEQ ID NO: 1361370 - RNA, 12 nt, Human
accggaccaucu

SEQ ID NO: 1361371 - RNA, 13 nt, Human
ucauugcuuacaa

SEQ ID NO: 1361372 - RNA, 15 nt, Human
ucauucguucugugg

SEQ ID NO: 1361373 - RNA, 23 nt, Human
ucauucgcuacuaugauuuaauu

SEQ ID NO: 1361374 - RNA, 21 nt, Human
ucauucuccuuguguuacuaa

SEQ ID NO: 1361375 - RNA, 19 nt, Human
accuccuuucaucacacug

SEQ ID NO: 1361376 - RNA, 22 nt, Human
accuccuuucaucacacugggu

SEQ ID NO: 1361377 - RNA, 13 nt, Human
ucauuguaaucac

SEQ ID NO: 1361378 - RNA, 16 nt, Human
ucauuguaaacaaacu

SEQ ID NO: 1361379 - RNA, 21 nt, Human
ucauuggaaauuuagcauugu

SEQ ID NO: 1361380 - RNA, 19 nt, Human
ucauuggaaauuuagcauu

SEQ ID NO: 1361381 - RNA, 15 nt, Human
ucauuggaaauuuag

SEQ ID NO: 1361382 - RNA, 14 nt, Human
ucauuggaaauuua

SEQ ID NO: 1361383 - RNA, 11 nt, Human
ucauuggcuuu

SEQ ID NO: 1361384 - RNA, 14 nt, Human
ucauuggcuuuauc

SEQ ID NO: 1361385 - RNA, 16 nt, Human
ucauuggcuuuauccu

SEQ ID NO: 1361386 - RNA, 17 nt, Human
ucauuggcuuuauccuc

SEQ ID NO: 1361387 - RNA, 16 nt, Human
accucgcuggacucuc

SEQ ID NO: 1361388 - RNA, 14 nt, Human
accucgcuggacuc

SEQ ID NO: 1361389 - RNA, 23 nt, Human
accucgcccagcggcaucaggcu

SEQ ID NO: 1361390 - RNA, 15 nt, Human
accucgggccugcug

SEQ ID NO: 1361391 - RNA, 18 nt, Human
accucgcuggacucucag

SEQ ID NO: 1361392 - RNA, 18 nt, Human
accucuaaauucuuucau

SEQ ID NO: 1361393 - RNA, 20 nt, Human
accucugacagcagcaucuc

SEQ ID NO: 1361394 - RNA, 19 nt, Human
accucugacagcagcaucu

SEQ ID NO: 1361395 - RNA, 17 nt, Human
accucugacagcagcau

SEQ ID NO: 1361396 - RNA, 15 nt, Human
accucugacagcagc

SEQ ID NO: 1361397 - RNA, 14 nt, Human
accucugacagcag

SEQ ID NO: 1361398 - RNA, 13 nt, Human
accucugacagca

SEQ ID NO: 1361399 - RNA, 21 nt, Human
accucugacagcagcaucucu

SEQ ID NO: 1361400 - RNA, 19 nt, Human
accucuaacagcaccaaau

SEQ ID NO: 1361401 - RNA, 16 nt, Human
accucuaacagcacca

SEQ ID NO: 1361402 - RNA, 15 nt, Human
accucuaacagcacc

SEQ ID NO: 1361403 - RNA, 21 nt, Human
accucuaaauucuuucauuuu

SEQ ID NO: 1361404 - RNA, 19 nt, Human
accucuagguccccauacu

SEQ ID NO: 1361405 - RNA, 21 nt, Human
accucuccccuggaacugucu

SEQ ID NO: 1361406 - RNA, 12 nt, Human
accucucaauau

SEQ ID NO: 1361407 - RNA, 17 nt, Human
ucauuccuucagauuug

SEQ ID NO: 1361408 - RNA, 19 nt, Human
ucauuaaauaaauuugacu

SEQ ID NO: 1361409 - RNA, 14 nt, Human
ucauuaaauaaauu

SEQ ID NO: 1361410 - RNA, 13 nt, Human
ucauuaaauaaau

SEQ ID NO: 1361411 - RNA, 15 nt, Human
ucauuaaauggggcu

SEQ ID NO: 1361412 - RNA, 12 nt, Human
ucauuaaauaaa

SEQ ID NO: 1361413 - RNA, 12 nt, Human
ucauguuuuuga

SEQ ID NO: 1361414 - RNA, 15 nt, Human
ucauguuuuugauca

SEQ ID NO: 1361415 - RNA, 17 nt, Human
ucauguugaagccacug

SEQ ID NO: 1361416 - RNA, 11 nt, Human
ucauguucuua

SEQ ID NO: 1361417 - RNA, 17 nt, Human
ucauguucuuaauucuu

SEQ ID NO: 1361418 - RNA, 12 nt, Human
ucauguguguua

SEQ ID NO: 1361419 - RNA, 23 nt, Human
ucauguguguccacgacugucuc

SEQ ID NO: 1361420 - RNA, 21 nt, Human
ucauguguguccacgacuguc

SEQ ID NO: 1361421 - RNA, 16 nt, Human
ucauguguguccacga

SEQ ID NO: 1361422 - RNA, 22 nt, Human
ucauguuaaauaggcggggcuu

SEQ ID NO: 1361423 - RNA, 23 nt, Human
ucauguuaguuaccuuauaguua

SEQ ID NO: 1361424 - RNA, 19 nt, Human
ucauguuaguuaccuuaua

SEQ ID NO: 1361425 - RNA, 15 nt, Human
ucauguuaguuaccu

SEQ ID NO: 1361426 - RNA, 14 nt, Human
ucaugugaaaucau

SEQ ID NO: 1361427 - RNA, 12 nt, Human
ucaugugugucc

SEQ ID NO: 1361428 - RNA, 22 nt, Human
ucaugugucccagaagaugacu

SEQ ID NO: 1361429 - RNA, 20 nt, Human
ucaugugugcaacaggguau

SEQ ID NO: 1361430 - RNA, 18 nt, Human
ucaugugucccagaagau

SEQ ID NO: 1361431 - RNA, 17 nt, Human
ucaugugucccagaaga

SEQ ID NO: 1361432 - RNA, 22 nt, Human
ucaugaauuaguuuuauaugcu

SEQ ID NO: 1361433 - RNA, 14 nt, Human
ucaugacagccucc

SEQ ID NO: 1361434 - RNA, 14 nt, Human
ucaugaccaguaaa

SEQ ID NO: 1361435 - RNA, 15 nt, Human
ucaugaccaguaaag

SEQ ID NO: 1361436 - RNA, 19 nt, Human
ucaugacaaagacugagua

SEQ ID NO: 1361437 - RNA, 23 nt, Human
ucaugccagcuacuuccuccucc

SEQ ID NO: 1361438 - RNA, 21 nt, Human
ucaugccagcuacuuccuccu

SEQ ID NO: 1361439 - RNA, 12 nt, Human
ucaugccagcua

SEQ ID NO: 1361440 - RNA, 18 nt, Human
ucaugagugaauaaaugu

SEQ ID NO: 1361441 - RNA, 22 nt, Human
ucaugaggagauucugccuuug

SEQ ID NO: 1361442 - RNA, 23 nt, Human
ucaugaggagauucugccuuugc

SEQ ID NO: 1361443 - RNA, 21 nt, Human
ucaugaggagauucugccuuu

SEQ ID NO: 1361444 - RNA, 20 nt, Human
ucaugaggagauucugccuu

SEQ ID NO: 1361445 - RNA, 16 nt, Human
ucaugaggagauucug

SEQ ID NO: 1361446 - RNA, 13 nt, Human
ucaugauccaacu

SEQ ID NO: 1361447 - RNA, 21 nt, Human
ucaugauaaugaacagaacau

SEQ ID NO: 1361448 - RNA, 17 nt, Human
ucaugauaaugaacaga

SEQ ID NO: 1361449 - RNA, 18 nt, Human
ucaugcauguccuguaaa

SEQ ID NO: 1361450 - RNA, 15 nt, Human
ucaugcauggaaauu

SEQ ID NO: 1361451 - RNA, 15 nt, Human
ucccagguuggcucu

SEQ ID NO: 1361452 - RNA, 23 nt, Human
ucccagguguuaacauuccaaga

SEQ ID NO: 1361453 - RNA, 22 nt, Human
ucccagguguuaacauuccaag

SEQ ID NO: 1361454 - RNA, 21 nt, Human
ucccagguguuaacauuccaa

SEQ ID NO: 1361455 - RNA, 15 nt, Human
ucccagguguuaaca

SEQ ID NO: 1361456 - RNA, 20 nt, Human
ucccaggguuuuaacuuugu

SEQ ID NO: 1361457 - RNA, 19 nt, Human
ucccaggguuuuaacuuug

SEQ ID NO: 1361458 - RNA, 18 nt, Human
ucccaggguuuuaacuuu

SEQ ID NO: 1361459 - RNA, 14 nt, Human
ucccaggguuuuaa

SEQ ID NO: 1361460 - RNA, 18 nt, Human
ucccaggggcucccuccg

SEQ ID NO: 1361461 - RNA, 13 nt, Human
acuacauucauuu

SEQ ID NO: 1361462 - RNA, 11 nt, Human
acuacauucug

SEQ ID NO: 1361463 - RNA, 14 nt, Human
acuacaugcacuug

SEQ ID NO: 1361464 - RNA, 12 nt, Human
acuacaugcacu

SEQ ID NO: 1361465 - RNA, 20 nt, Human
acuacaugagaacaaacaga

SEQ ID NO: 1361466 - RNA, 15 nt, Human
acuacagucaggaaa

SEQ ID NO: 1361467 - RNA, 22 nt, Human
uccccaaguacaaccacaccca

SEQ ID NO: 1361468 - RNA, 18 nt, Human
uccccaacugaccaccuu

SEQ ID NO: 1361469 - RNA, 16 nt, Human
uccccaacccccaacu

SEQ ID NO: 1361470 - RNA, 19 nt, Human
uccccaacugaccaccuuu

SEQ ID NO: 1361471 - RNA, 14 nt, Human
uccccaacugacca

SEQ ID NO: 1361472 - RNA, 20 nt, Human
uccccaacagcgcccaaagg

SEQ ID NO: 1361473 - RNA, 17 nt, Human
uccccaacagcgcccaa

SEQ ID NO: 1361474 - RNA, 16 nt, Human
uccccaacagcgccca

SEQ ID NO: 1361475 - RNA, 15 nt, Human
uccccaacagcgccc

SEQ ID NO: 1361476 - RNA, 19 nt, Human
uccccaaaagcgugagcuu

SEQ ID NO: 1361477 - RNA, 18 nt, Human
ucccauuuuggaauuugc

SEQ ID NO: 1361478 - RNA, 13 nt, Human
ucccaucuaggga

SEQ ID NO: 1361479 - RNA, 20 nt, Human
ucccaucgucucggccuuca

SEQ ID NO: 1361480 - RNA, 22 nt, Human
ucccaucgucucggccuucaca

SEQ ID NO: 1361481 - RNA, 13 nt, Human
ucccaucgcuguc

SEQ ID NO: 1361482 - RNA, 17 nt, Human
ucccauagccaggaaac

SEQ ID NO: 1361483 - RNA, 21 nt, Human
ucccaguuggagcuccagccu

SEQ ID NO: 1361484 - RNA, 22 nt, Human
ucccaguuggagcuccagccug

SEQ ID NO: 1361485 - RNA, 22 nt, Human
acuaaaguuagaaaguugauuu

SEQ ID NO: 1361486 - RNA, 12 nt, Human
acuaaagccuuu

SEQ ID NO: 1361487 - RNA, 23 nt, Human
acuaaagccaaacauauauauac

SEQ ID NO: 1361488 - RNA, 17 nt, Human
acuaaagccaaacauau

SEQ ID NO: 1361489 - RNA, 16 nt, Human
acuaaagccaaacaua

SEQ ID NO: 1361490 - RNA, 17 nt, Human
acuaaacucuuaccaua

SEQ ID NO: 1361491 - RNA, 18 nt, Human
acuaaacacgugacacaa

SEQ ID NO: 1361492 - RNA, 14 nt, Human
acuaaaauauuuau

SEQ ID NO: 1361493 - RNA, 20 nt, Human
acuaaaauaauuuuguaaug

SEQ ID NO: 1361494 - RNA, 19 nt, Human
acuaaaauaauuuuguaau

SEQ ID NO: 1361495 - RNA, 17 nt, Human
acuaaaauaauuuugua

SEQ ID NO: 1361496 - RNA, 16 nt, Human
acuaaaauaauuuugu

SEQ ID NO: 1361497 - RNA, 15 nt, Human
acuaaaauaauuuug

SEQ ID NO: 1361498 - RNA, 14 nt, Human
acuaaaauaauuuu

SEQ ID NO: 1361499 - RNA, 23 nt, Human
acuaaaagauauaagugcuguau

SEQ ID NO: 1361500 - RNA, 16 nt, Human
acuaaaagauauaagu

SEQ ID NO: 1361501 - RNA, 19 nt, Human
acuaaaagauauaagugcu

SEQ ID NO: 1361502 - RNA, 20 nt, Human
acuaaaagauauaagugcug

SEQ ID NO: 1361503 - RNA, 21 nt, Human
acuaaaagauauaagugcugu

SEQ ID NO: 1361504 - RNA, 21 nt, Human
acuaaccauguguuauguuuu

SEQ ID NO: 1361505 - RNA, 17 nt, Human
acuaaccagcagaaaug

SEQ ID NO: 1361506 - RNA, 16 nt, Human
acuaaccagcagaaau

SEQ ID NO: 1361507 - RNA, 17 nt, Human
acuaaaaaaaagaugaa

SEQ ID NO: 1361508 - RNA, 11 nt, Human
acuaaaagaua

SEQ ID NO: 1361509 - RNA, 16 nt, Human
acuaaaaaaaagauga

SEQ ID NO: 1361510 - RNA, 15 nt, Human
acuaaaaaaaagaug

SEQ ID NO: 1361511 - RNA, 19 nt, Human
acguuuucuaauugcuuau

SEQ ID NO: 1361512 - RNA, 18 nt, Human
acguuuucuaauugcuua

SEQ ID NO: 1361513 - RNA, 17 nt, Human
acguuuucuaauugcuu

SEQ ID NO: 1361514 - RNA, 16 nt, Human
acguuuucuaauugcu

SEQ ID NO: 1361515 - RNA, 13 nt, Human
acguuuucuaauu

SEQ ID NO: 1361516 - RNA, 12 nt, Human
acguuuucuaau

SEQ ID NO: 1361517 - RNA, 20 nt, Human
acguuuuauaagcaucauua

SEQ ID NO: 1361518 - RNA, 21 nt, Human
acguuuuauaagcaucauuau

SEQ ID NO: 1361519 - RNA, 14 nt, Human
acguuuuauaagca

SEQ ID NO: 1361520 - RNA, 15 nt, Human
acguuucuaaaggcu

SEQ ID NO: 1361521 - RNA, 14 nt, Human
acguuucuaaaggc

SEQ ID NO: 1361522 - RNA, 19 nt, Human
acguuuaagccaaaacaau

SEQ ID NO: 1361523 - RNA, 23 nt, Human
acguuuaagccaaaacaauguuu

SEQ ID NO: 1361524 - RNA, 12 nt, Human
acguuucuaaag

SEQ ID NO: 1361525 - RNA, 20 nt, Human
uccagcuagugacccacaug

SEQ ID NO: 1361526 - RNA, 15 nt, Human
uccagcuagugaccc

SEQ ID NO: 1361527 - RNA, 14 nt, Human
uccagcggcccugu

SEQ ID NO: 1361528 - RNA, 17 nt, Human
uccagccuggggucugg

SEQ ID NO: 1361529 - RNA, 19 nt, Human
uccagccuggggcugaggc

SEQ ID NO: 1361530 - RNA, 22 nt, Human
acucaaauguucuaaguuucua

SEQ ID NO: 1361531 - RNA, 18 nt, Human
acucaaauguucuaaguu

SEQ ID NO: 1361532 - RNA, 18 nt, Human
acuauuauccccauuucu

SEQ ID NO: 1361533 - RNA, 22 nt, Human
acuauuaggugcaauuucaagg

SEQ ID NO: 1361534 - RNA, 22 nt, Human
acuauuaaaaagguuuacagaa

SEQ ID NO: 1361535 - RNA, 18 nt, Human
acuaucuuucagcuccag

SEQ ID NO: 1361536 - RNA, 16 nt, Human
acuaucuuggugaauu

SEQ ID NO: 1361537 - RNA, 20 nt, Human
acuaucuuacuauuucacaa

SEQ ID NO: 1361538 - RNA, 18 nt, Human
acuaugaaaaugcuggcu

SEQ ID NO: 1361539 - RNA, 16 nt, Human
acuaugaaaaugcugg

SEQ ID NO: 1361540 - RNA, 21 nt, Human
acuaugaaaagcuagaauuga

SEQ ID NO: 1361541 - RNA, 20 nt, Human
acuaugaaaagcuagaauug

SEQ ID NO: 1361542 - RNA, 19 nt, Human
acuaugaaaagcuagaauu

SEQ ID NO: 1361543 - RNA, 16 nt, Human
acuaugaaaagcuaga

SEQ ID NO: 1361544 - RNA, 22 nt, Human
acuaugaaguuuuuuuuauaca

SEQ ID NO: 1361545 - RNA, 16 nt, Human
uccccaggcaccucac

SEQ ID NO: 1361546 - RNA, 20 nt, Human
uccccacgagggcuggcugg

SEQ ID NO: 1361547 - RNA, 17 nt, Human
uccccacgagggcuggc

SEQ ID NO: 1361548 - RNA, 16 nt, Human
uccccacgagggcugg

SEQ ID NO: 1361549 - RNA, 15 nt, Human
uccccacgagggcug

SEQ ID NO: 1361550 - RNA, 21 nt, Human
uccccagggaagcagcagccu

SEQ ID NO: 1361551 - RNA, 20 nt, Human
uccccagggaagcagcagcc

SEQ ID NO: 1361552 - RNA, 19 nt, Human
uccccagggaagcagcagc

SEQ ID NO: 1361553 - RNA, 17 nt, Human
uccccagggaagcagca

SEQ ID NO: 1361554 - RNA, 13 nt, Human
acuauauguaugg

SEQ ID NO: 1361555 - RNA, 19 nt, Human
uccccuccaaaaugugccu

SEQ ID NO: 1361556 - RNA, 17 nt, Human
uccccucaccuccucua

SEQ ID NO: 1361557 - RNA, 15 nt, Human
uccccucaccuccuc

SEQ ID NO: 1361558 - RNA, 17 nt, Human
acucaagaagugaagaa

SEQ ID NO: 1361559 - RNA, 23 nt, Human
acucaagaagugaagaaugcaca

SEQ ID NO: 1361560 - RNA, 23 nt, Human
acucaaccuuaagaccuacuguu

SEQ ID NO: 1361561 - RNA, 19 nt, Human
uccccuugaggucucagcc

SEQ ID NO: 1361562 - RNA, 18 nt, Human
uccccuugaggucucagc

SEQ ID NO: 1361563 - RNA, 17 nt, Human
uccccuugaggucucag

SEQ ID NO: 1361564 - RNA, 18 nt, Human
uccccuugaacucuucac

SEQ ID NO: 1361565 - RNA, 13 nt, Human
uccccuucucugu

SEQ ID NO: 1361566 - RNA, 18 nt, Human
uccccuucuccccugcac

SEQ ID NO: 1361567 - RNA, 20 nt, Human
uccccuucuccccugcacug

SEQ ID NO: 1361568 - RNA, 14 nt, Human
uccccuucuccccu

SEQ ID NO: 1361569 - RNA, 21 nt, Human
uccccuugaggucucagcccc

SEQ ID NO: 1361570 - RNA, 20 nt, Human
uccccuugaggucucagccc

SEQ ID NO: 1361571 - RNA, 20 nt, Human
ucccgcagugggagcaaacu

SEQ ID NO: 1361572 - RNA, 19 nt, Human
ucccgcagugggagcaaac

SEQ ID NO: 1361573 - RNA, 15 nt, Human
ucccgauuguaacuc

SEQ ID NO: 1361574 - RNA, 19 nt, Human
ucccgauucacccugucca

SEQ ID NO: 1361575 - RNA, 18 nt, Human
ucccggagguuggguggg

SEQ ID NO: 1361576 - RNA, 18 nt, Human
ucccucaaccucauccuc

SEQ ID NO: 1361577 - RNA, 13 nt, Human
ucccucacaagug

SEQ ID NO: 1361578 - RNA, 19 nt, Human
ucccucaaccucauccucu

SEQ ID NO: 1361579 - RNA, 14 nt, Human
ucccucacaagugg

SEQ ID NO: 1361580 - RNA, 12 nt, Human
ucccucacccau

SEQ ID NO: 1361581 - RNA, 18 nt, Human
ucccucacccauccuaga

SEQ ID NO: 1361582 - RNA, 20 nt, Human
ucccucaccuguagcagcca

SEQ ID NO: 1361583 - RNA, 14 nt, Human
ucccucaccuguag

SEQ ID NO: 1361584 - RNA, 13 nt, Human
ucccucaccugua

SEQ ID NO: 1361585 - RNA, 12 nt, Human
ucccucaccugu

SEQ ID NO: 1361586 - RNA, 14 nt, Human
ucccucacccaucc

SEQ ID NO: 1361587 - RNA, 19 nt, Human
ucccuuguauccccugcag

SEQ ID NO: 1361588 - RNA, 21 nt, Human
ucccuuguauccccugcaggc

SEQ ID NO: 1361589 - RNA, 16 nt, Human
ucccuuguauccccug

SEQ ID NO: 1361590 - RNA, 15 nt, Human
ucccuuguauccccu

SEQ ID NO: 1361591 - RNA, 16 nt, Human
ucccuuguagcuccuc

SEQ ID NO: 1361592 - RNA, 15 nt, Human
ucccuuguagcuccu

SEQ ID NO: 1361593 - RNA, 22 nt, Human
ucccuguuucuuccacagugcc

SEQ ID NO: 1361594 - RNA, 17 nt, Human
ucccuguuccccagaga

SEQ ID NO: 1361595 - RNA, 18 nt, Human
ucccuguuccccagagaa

SEQ ID NO: 1361596 - RNA, 16 nt, Human
ucccuguuccccagag

SEQ ID NO: 1361597 - RNA, 15 nt, Human
ucccuguuccccaga

SEQ ID NO: 1361598 - RNA, 17 nt, Human
ucccuguguugucucua

SEQ ID NO: 1361599 - RNA, 12 nt, Human
ucccuguaacuu

SEQ ID NO: 1361600 - RNA, 15 nt, Human
ucccuguaacuugau

SEQ ID NO: 1361601 - RNA, 23 nt, Human
ucccuguaaccucuucagaggcc

SEQ ID NO: 1361602 - RNA, 22 nt, Human
ucccuguaaccucuucagaggc

SEQ ID NO: 1361603 - RNA, 19 nt, Human
ucccuguaaccucuucaga

SEQ ID NO: 1361604 - RNA, 18 nt, Human
ucccuguaaccucuucag

SEQ ID NO: 1361605 - RNA, 14 nt, Human
ucccuguaaccucu

SEQ ID NO: 1361606 - RNA, 23 nt, Human
uccuaaacugagacaaugccuug

SEQ ID NO: 1361607 - RNA, 21 nt, Human
uccuaaacaucauucauuuuu

SEQ ID NO: 1361608 - RNA, 15 nt, Human
uccguuggccacucc

SEQ ID NO: 1361609 - RNA, 13 nt, Human
uccguuggccacu

SEQ ID NO: 1361610 - RNA, 23 nt, Human
uccuagauccuaagggucgaaag

SEQ ID NO: 1361611 - RNA, 14 nt, Human
uccuagauccuaag

SEQ ID NO: 1361612 - RNA, 13 nt, Human
uccuagauccuaa

SEQ ID NO: 1361613 - RNA, 16 nt, Human
uccuagcacagauggc

SEQ ID NO: 1361614 - RNA, 15 nt, Human
uccuagcacagaugg

SEQ ID NO: 1361615 - RNA, 12 nt, Human
uccuagcacaga

SEQ ID NO: 1361616 - RNA, 17 nt, Human
ucccuuugcccagaaag

SEQ ID NO: 1361617 - RNA, 18 nt, Human
uccguccccugcccaugc

SEQ ID NO: 1361618 - RNA, 14 nt, Human
uccguccccugccc

SEQ ID NO: 1361619 - RNA, 16 nt, Human
uccgucaaaacagauu

SEQ ID NO: 1361620 - RNA, 23 nt, Human
uccgucaaaacagauuguuugca

SEQ ID NO: 1361621 - RNA, 16 nt, Human
uccguucacaugugug

SEQ ID NO: 1361622 - RNA, 16 nt, Human
ucccucaucugucccu

SEQ ID NO: 1361623 - RNA, 15 nt, Human
ucccucaccuucuga

SEQ ID NO: 1361624 - RNA, 16 nt, Human
ucccucagugcccuca

SEQ ID NO: 1361625 - RNA, 20 nt, Human
ucccucaccuuggcaccaga

SEQ ID NO: 1361626 - RNA, 21 nt, Human
ucccucaccuuggcaccagac

SEQ ID NO: 1361627 - RNA, 15 nt, Human
ucccucaccuuggca

SEQ ID NO: 1361628 - RNA, 14 nt, Human
ucccucaccuucug

SEQ ID NO: 1361629 - RNA, 21 nt, Human
ucccucaucugucccuccggg

SEQ ID NO: 1361630 - RNA, 16 nt, Human
acucaucuagguaaau

SEQ ID NO: 1361631 - RNA, 18 nt, Human
acucaucuagguaaauua

SEQ ID NO: 1361632 - RNA, 17 nt, Human
acucaugugacucuuuc

SEQ ID NO: 1361633 - RNA, 16 nt, Human
acucaugugacucuuu

SEQ ID NO: 1361634 - RNA, 15 nt, Human
acucaugugacucuu

SEQ ID NO: 1361635 - RNA, 21 nt, Human
acucaucuagguaaauuacag

SEQ ID NO: 1361636 - RNA, 13 nt, Human
acuccacacugca

SEQ ID NO: 1361637 - RNA, 12 nt, Human
acuccacacugc

SEQ ID NO: 1361638 - RNA, 18 nt, Human
acuccaagcccagcccau

SEQ ID NO: 1361639 - RNA, 17 nt, Human
acuccaagcccagccca

SEQ ID NO: 1361640 - RNA, 15 nt, Human
acuccaagcccagcc

SEQ ID NO: 1361641 - RNA, 14 nt, Human
acuccaacucuucc

SEQ ID NO: 1361642 - RNA, 17 nt, Human
acuccacacugcacaau

SEQ ID NO: 1361643 - RNA, 21 nt, Human
acuccacacugcacaauaacu

SEQ ID NO: 1361644 - RNA, 16 nt, Human
acuccacacugcacaa

SEQ ID NO: 1361645 - RNA, 14 nt, Human
acuccacacugcac

SEQ ID NO: 1361646 - RNA, 14 nt, Human
acuccaggcccaag

SEQ ID NO: 1361647 - RNA, 13 nt, Human
acuccaggcccaa

SEQ ID NO: 1361648 - RNA, 19 nt, Human
acuccaggcccaaggcucc

SEQ ID NO: 1361649 - RNA, 17 nt, Human
acuccaggcccaaggcu

SEQ ID NO: 1361650 - RNA, 16 nt, Human
acuccaggcccaaggc

SEQ ID NO: 1361651 - RNA, 21 nt, Human
acuccaggcccaaggcucccg

SEQ ID NO: 1361652 - RNA, 17 nt, Human
acuccugaccucaggca

SEQ ID NO: 1361653 - RNA, 23 nt, Human
acuccuagcuguccuuuuuccuc

SEQ ID NO: 1361654 - RNA, 16 nt, Human
acuccuagcuguccuu

SEQ ID NO: 1361655 - RNA, 16 nt, Human
acuccugaccucaggc

SEQ ID NO: 1361656 - RNA, 15 nt, Human
acuccugaccucagg

SEQ ID NO: 1361657 - RNA, 14 nt, Human
acuccugaccucag

SEQ ID NO: 1361658 - RNA, 18 nt, Human
acuccugaccucaaguga

SEQ ID NO: 1361659 - RNA, 20 nt, Human
uccucacccccagcuuugcu

SEQ ID NO: 1361660 - RNA, 16 nt, Human
uccucacccccagcuu

SEQ ID NO: 1361661 - RNA, 13 nt, Human
uccucacccccag

SEQ ID NO: 1361662 - RNA, 17 nt, Human
uccucagacucuaagaa

SEQ ID NO: 1361663 - RNA, 20 nt, Human
uccucagagaauuucuacca

SEQ ID NO: 1361664 - RNA, 17 nt, Human
uccucagagaauuucua

SEQ ID NO: 1361665 - RNA, 15 nt, Human
uccucagccagccuc

SEQ ID NO: 1361666 - RNA, 13 nt, Human
uccucagccagcc

SEQ ID NO: 1361667 - RNA, 12 nt, Human
uccucagccagc

SEQ ID NO: 1361668 - RNA, 10 nt, Human
uccucagcca

SEQ ID NO: 1361669 - RNA, 11 nt, Human
uccucagcccc

SEQ ID NO: 1361670 - RNA, 21 nt, Human
uccucagacucuaagaaagaa

SEQ ID NO: 1361671 - RNA, 16 nt, Human
uccucagacucuaaga

SEQ ID NO: 1361672 - RNA, 14 nt, Human
uccucacuguaucc

SEQ ID NO: 1361673 - RNA, 14 nt, Human
uccucaauccagcu

SEQ ID NO: 1361674 - RNA, 13 nt, Human
uccucaauccagc

SEQ ID NO: 1361675 - RNA, 12 nt, Human
uccucaauccag

SEQ ID NO: 1361676 - RNA, 19 nt, Human
uccucaaccccuccccucc

SEQ ID NO: 1361677 - RNA, 23 nt, Human
uccucaagaaauaaaaggaagcc

SEQ ID NO: 1361678 - RNA, 17 nt, Human
uccucaagaaauaaaag

SEQ ID NO: 1361679 - RNA, 22 nt, Human
uccucaaccccuccccuccauc

SEQ ID NO: 1361680 - RNA, 17 nt, Human
uccucaacacccaacug

SEQ ID NO: 1361681 - RNA, 19 nt, Human
uccucaaagaaaguguauu

SEQ ID NO: 1361682 - RNA, 18 nt, Human
uccucaaagaaaguguau

SEQ ID NO: 1361683 - RNA, 16 nt, Human
uccucaaagaaagugu

SEQ ID NO: 1361684 - RNA, 15 nt, Human
uccucaaagaaagug

SEQ ID NO: 1361685 - RNA, 21 nt, Human
acucuuaugcuguacccaguu

SEQ ID NO: 1361686 - RNA, 18 nt, Human
uccucagccuugccagag

SEQ ID NO: 1361687 - RNA, 21 nt, Human
uccucagccugaaccccaggg

SEQ ID NO: 1361688 - RNA, 11 nt, Human
uccucagccuu

SEQ ID NO: 1361689 - RNA, 14 nt, Human
uccucagccugaac

SEQ ID NO: 1361690 - RNA, 12 nt, Human
uccucagccuga

SEQ ID NO: 1361691 - RNA, 16 nt, Human
uccucagccagccucg

SEQ ID NO: 1361692 - RNA, 14 nt, Human
uccuccccuggagg

SEQ ID NO: 1361693 - RNA, 15 nt, Human
uccuccccuggaggg

SEQ ID NO: 1361694 - RNA, 13 nt, Human
uccuccccuggag

SEQ ID NO: 1361695 - RNA, 18 nt, Human
acucgcuagcaguggcag

SEQ ID NO: 1361696 - RNA, 16 nt, Human
acucgcuagcaguggc

SEQ ID NO: 1361697 - RNA, 14 nt, Human
acucgcuagcagug

SEQ ID NO: 1361698 - RNA, 18 nt, Human
uccuagguaggguuuaau

SEQ ID NO: 1361699 - RNA, 22 nt, Human
uccuaggcuccaccccauccag

SEQ ID NO: 1361700 - RNA, 20 nt, Human
uccuaggcuccaccccaucc

SEQ ID NO: 1361701 - RNA, 20 nt, Human
uccuagcacagauggccagc

SEQ ID NO: 1361702 - RNA, 21 nt, Human
uccuagcacagauggccagcc

SEQ ID NO: 1361703 - RNA, 22 nt, Human
acucggccucccaaagugcugg

SEQ ID NO: 1361704 - RNA, 21 nt, Human
acucggccucccaaagugcug

SEQ ID NO: 1361705 - RNA, 22 nt, Human
acucggcagcccuuccaaacuc

SEQ ID NO: 1361706 - RNA, 23 nt, Human
acucgcuagcaguggcaggcaga

SEQ ID NO: 1361707 - RNA, 22 nt, Human
acucuccccacgagggcuggcu

SEQ ID NO: 1361708 - RNA, 20 nt, Human
acucuccccacgagggcugg

SEQ ID NO: 1361709 - RNA, 19 nt, Human
acucuccccacgagggcug

SEQ ID NO: 1361710 - RNA, 16 nt, Human
acucugaaaugaagau

SEQ ID NO: 1361711 - RNA, 23 nt, Human
acucucuuauugccucacuucag

SEQ ID NO: 1361712 - RNA, 21 nt, Human
acucucuuauugccucacuuc

SEQ ID NO: 1361713 - RNA, 21 nt, Human
acucuccccacgagggcuggc

SEQ ID NO: 1361714 - RNA, 21 nt, Human
acucugcuucucugacuucug

SEQ ID NO: 1361715 - RNA, 20 nt, Human
acucugcuucucugacuucu

SEQ ID NO: 1361716 - RNA, 18 nt, Human
acucugcuucucugacuu

SEQ ID NO: 1361717 - RNA, 17 nt, Human
acucugcuucucugacu

SEQ ID NO: 1361718 - RNA, 16 nt, Human
acucugcauucuagua

SEQ ID NO: 1361719 - RNA, 16 nt, Human
acucugcagccucaga

SEQ ID NO: 1361720 - RNA, 17 nt, Human
acucugcagccucagag

SEQ ID NO: 1361721 - RNA, 15 nt, Human
acucugcagccucag

SEQ ID NO: 1361722 - RNA, 14 nt, Human
acucugcagccuca

SEQ ID NO: 1361723 - RNA, 13 nt, Human
acucugcagccuc

SEQ ID NO: 1361724 - RNA, 12 nt, Human
acucugcagccu

SEQ ID NO: 1361725 - RNA, 13 nt, Human
acucugcuuguua

SEQ ID NO: 1361726 - RNA, 18 nt, Human
acucugcuugauuuuugc

SEQ ID NO: 1361727 - RNA, 16 nt, Human
acucugcuugauuuuu

SEQ ID NO: 1361728 - RNA, 15 nt, Human
acucugcuugauuuu

SEQ ID NO: 1361729 - RNA, 22 nt, Human
acucugcuucucugacuucugc

SEQ ID NO: 1361730 - RNA, 23 nt, Human
acucuuauaucuauauuuuacau

SEQ ID NO: 1361731 - RNA, 14 nt, Human
uccuguuuuucaca

SEQ ID NO: 1361732 - RNA, 21 nt, Human
uccuguuuugcacagccaaau

SEQ ID NO: 1361733 - RNA, 17 nt, Human
uccuguuugucuacaua

SEQ ID NO: 1361734 - RNA, 13 nt, Human
uccuguuugucua

SEQ ID NO: 1361735 - RNA, 18 nt, Human
uccuguuuccuagcugug

SEQ ID NO: 1361736 - RNA, 21 nt, Human
uccuguugggagagggcgcag

SEQ ID NO: 1361737 - RNA, 17 nt, Human
uccuguugucaagaaua

SEQ ID NO: 1361738 - RNA, 14 nt, Human
uccuguugggagag

SEQ ID NO: 1361739 - RNA, 13 nt, Human
uccuguugggaga

SEQ ID NO: 1361740 - RNA, 15 nt, Human
uccuguucacaccag

SEQ ID NO: 1361741 - RNA, 14 nt, Human
uccuguguuuguga

SEQ ID NO: 1361742 - RNA, 22 nt, Human
uccuguguguuaagcucugcua

SEQ ID NO: 1361743 - RNA, 21 nt, Human
uccuguguguuaagcucugcu

SEQ ID NO: 1361744 - RNA, 20 nt, Human
uccuguguguuaagcucugc

SEQ ID NO: 1361745 - RNA, 19 nt, Human
uccuguguguuaagcucug

SEQ ID NO: 1361746 - RNA, 18 nt, Human
uccuguguguuaagcucu

SEQ ID NO: 1361747 - RNA, 12 nt, Human
uccuguguguua

SEQ ID NO: 1361748 - RNA, 21 nt, Human
uccuguguggagagggaaugu

SEQ ID NO: 1361749 - RNA, 22 nt, Human
uccuguguguccaaaacugccu

SEQ ID NO: 1361750 - RNA, 22 nt, Human
uccuguguggagagggaaugug

SEQ ID NO: 1361751 - RNA, 18 nt, Human
uccuguguggagagggaa

SEQ ID NO: 1361752 - RNA, 16 nt, Human
uccuguguggagaggg

SEQ ID NO: 1361753 - RNA, 15 nt, Human
uccuguguggagagg

SEQ ID NO: 1361754 - RNA, 18 nt, Human
uccuuaaaauguaagauu

SEQ ID NO: 1361755 - RNA, 17 nt, Human
uccuguuuugcacagcc

SEQ ID NO: 1361756 - RNA, 22 nt, Human
acugcaggcccuggccuccccu

SEQ ID NO: 1361757 - RNA, 19 nt, Human
acugcaggcccuggccucc

SEQ ID NO: 1361758 - RNA, 18 nt, Human
acugcaggcccuggccuc

SEQ ID NO: 1361759 - RNA, 17 nt, Human
acugcaggcccuggccu

SEQ ID NO: 1361760 - RNA, 23 nt, Human
acugcagggaaaauuauuugcau

SEQ ID NO: 1361761 - RNA, 10 nt, Human
acugcaggga

SEQ ID NO: 1361762 - RNA, 16 nt, Human
acugcaggcccuggcc

SEQ ID NO: 1361763 - RNA, 15 nt, Human
acugcaggcccuggc

SEQ ID NO: 1361764 - RNA, 14 nt, Human
acugcaggcccugg

SEQ ID NO: 1361765 - RNA, 13 nt, Human
acugcaggcccug

SEQ ID NO: 1361766 - RNA, 12 nt, Human
acugcaggcccu

SEQ ID NO: 1361767 - RNA, 16 nt, Human
uccugugaaugccacu

SEQ ID NO: 1361768 - RNA, 21 nt, Human
uccugucuuauccuccaccgu

SEQ ID NO: 1361769 - RNA, 14 nt, Human
uccugucuuauccu

SEQ ID NO: 1361770 - RNA, 16 nt, Human
uccuggucaccuagga

SEQ ID NO: 1361771 - RNA, 23 nt, Human
uccuggguuuuguauucucugag

SEQ ID NO: 1361772 - RNA, 22 nt, Human
uccuggguuuuguauucucuga

SEQ ID NO: 1361773 - RNA, 21 nt, Human
uccuggguuuuguauucucug

SEQ ID NO: 1361774 - RNA, 20 nt, Human
uccuggguuuuguauucucu

SEQ ID NO: 1361775 - RNA, 17 nt, Human
uccuggguuuuguauuc

SEQ ID NO: 1361776 - RNA, 23 nt, Human
uccuggguggcuacucugugcca

SEQ ID NO: 1361777 - RNA, 24 nt, Human
uccuggguggcuacucugugccag

SEQ ID NO: 1361778 - RNA, 22 nt, Human
uccuggguggcuacucugugcc

SEQ ID NO: 1361779 - RNA, 17 nt, Human
uccuggguggcuacucu

SEQ ID NO: 1361780 - RNA, 15 nt, Human
uccuggguggcuacu

SEQ ID NO: 1361781 - RNA, 13 nt, Human
uccuggguggcua

SEQ ID NO: 1361782 - RNA, 23 nt, Human
uccugggguauaaaacuuuccuc

SEQ ID NO: 1361783 - RNA, 18 nt, Human
uccugugggagccucgca

SEQ ID NO: 1361784 - RNA, 16 nt, Human
uccugugggagccucg

SEQ ID NO: 1361785 - RNA, 15 nt, Human
uccugugggagccuc

SEQ ID NO: 1361786 - RNA, 14 nt, Human
uccugugggagccu

SEQ ID NO: 1361787 - RNA, 13 nt, Human
uccugugggagcc

SEQ ID NO: 1361788 - RNA, 14 nt, Human
uccuguggcucccu

SEQ ID NO: 1361789 - RNA, 12 nt, Human
uccuguggcucc

SEQ ID NO: 1361790 - RNA, 23 nt, Human
uccuguggccccacccugggccc

SEQ ID NO: 1361791 - RNA, 22 nt, Human
uccuguggccccacccugggcc

SEQ ID NO: 1361792 - RNA, 12 nt, Human
uccuguggcccc

SEQ ID NO: 1361793 - RNA, 16 nt, Human
uccugugcucagcccu

SEQ ID NO: 1361794 - RNA, 15 nt, Human
uccugugcucagccc

SEQ ID NO: 1361795 - RNA, 18 nt, Human
uccugugcucagcccuga

SEQ ID NO: 1361796 - RNA, 22 nt, Human
uccugugaaugccacugccuuc

SEQ ID NO: 1361797 - RNA, 20 nt, Human
uccugugaaugccacugccu

SEQ ID NO: 1361798 - RNA, 16 nt, Human
uccugggccugcagaa

SEQ ID NO: 1361799 - RNA, 15 nt, Human
uccugggccugcaga

SEQ ID NO: 1361800 - RNA, 13 nt, Human
uccugggccugca

SEQ ID NO: 1361801 - RNA, 12 nt, Human
uccugggccugc

SEQ ID NO: 1361802 - RNA, 23 nt, Human
uccugggcccucucugcucugcg

SEQ ID NO: 1361803 - RNA, 21 nt, Human
uccugggcccucucugcucug

SEQ ID NO: 1361804 - RNA, 17 nt, Human
uccugggcccucucugc

SEQ ID NO: 1361805 - RNA, 16 nt, Human
uccugggcccucucug

SEQ ID NO: 1361806 - RNA, 23 nt, Human
acugagggcagucgauagagcug

SEQ ID NO: 1361807 - RNA, 18 nt, Human
acugaguacguugugcau

SEQ ID NO: 1361808 - RNA, 19 nt, Human
acugaguacguugugcauu

SEQ ID NO: 1361809 - RNA, 21 nt, Human
acugaguacguugugcauuug

SEQ ID NO: 1361810 - RNA, 24 nt, Human
acugagggugaguuggcuuaccug

SEQ ID NO: 1361811 - RNA, 19 nt, Human
uccuccccuccagcucccu

SEQ ID NO: 1361812 - RNA, 20 nt, Human
acugaggggggauccaguuu

SEQ ID NO: 1361813 - RNA, 14 nt, Human
acugagugggaagc

SEQ ID NO: 1361814 - RNA, 13 nt, Human
acugagugggaag

SEQ ID NO: 1361815 - RNA, 23 nt, Human
acugagugacucuauauagcuga

SEQ ID NO: 1361816 - RNA, 12 nt, Human
acugagugacuc

SEQ ID NO: 1361817 - RNA, 22 nt, Human
acugaguacguugugcauuugg

SEQ ID NO: 1361818 - RNA, 23 nt, Human
acugaguacguugugcauuuggu

SEQ ID NO: 1361819 - RNA, 14 nt, Human
acugcaaccuccac

SEQ ID NO: 1361820 - RNA, 13 nt, Human
acugcaaccucca

SEQ ID NO: 1361821 - RNA, 13 nt, Human
acugaguuuucca

SEQ ID NO: 1361822 - RNA, 22 nt, Human
acugcaaaucaggcuuuuguuu

SEQ ID NO: 1361823 - RNA, 18 nt, Human
acugaguuuuccauggca

SEQ ID NO: 1361824 - RNA, 16 nt, Human
acugagugggaagccc

SEQ ID NO: 1361825 - RNA, 15 nt, Human
acugagugggaagcc

SEQ ID NO: 1361826 - RNA, 16 nt, Human
acugcaaccuccaccu

SEQ ID NO: 1361827 - RNA, 17 nt, Human
acugcaaccuccaccuc

SEQ ID NO: 1361828 - RNA, 18 nt, Human
acugcaaccuccaccucc

SEQ ID NO: 1361829 - RNA, 20 nt, Human
acugcaaccuccaccucgca

SEQ ID NO: 1361830 - RNA, 16 nt, Human
acugaggaauuuucuu

SEQ ID NO: 1361831 - RNA, 19 nt, Human
acugaggaauuucaccugu

SEQ ID NO: 1361832 - RNA, 17 nt, Human
acugaggaauuucaccu

SEQ ID NO: 1361833 - RNA, 20 nt, Human
uccucuccccagcccagaga

SEQ ID NO: 1361834 - RNA, 19 nt, Human
uccucuccccagcccagag

SEQ ID NO: 1361835 - RNA, 18 nt, Human
uccucuccccagcccaga

SEQ ID NO: 1361836 - RNA, 17 nt, Human
uccucuccccagcccag

SEQ ID NO: 1361837 - RNA, 16 nt, Human
uccucuccccagccca

SEQ ID NO: 1361838 - RNA, 15 nt, Human
uccucuccccagccc

SEQ ID NO: 1361839 - RNA, 14 nt, Human
uccucuccccagcc

SEQ ID NO: 1361840 - RNA, 12 nt, Human
acugagggcagu

SEQ ID NO: 1361841 - RNA, 20 nt, Human
acugaggaauuuucuuugug

SEQ ID NO: 1361842 - RNA, 14 nt, Human
acugaggaucagag

SEQ ID NO: 1361843 - RNA, 16 nt, Human
uccugcucauauugug

SEQ ID NO: 1361844 - RNA, 15 nt, Human
uccugcucauauugu

SEQ ID NO: 1361845 - RNA, 18 nt, Human
uccugcuaaguuaauguu

SEQ ID NO: 1361846 - RNA, 20 nt, Human
uccugcuaacggugcucagg

SEQ ID NO: 1361847 - RNA, 17 nt, Human
uccugcuaaaacaauga

SEQ ID NO: 1361848 - RNA, 14 nt, Human
uccugcgggugggg

SEQ ID NO: 1361849 - RNA, 13 nt, Human
uccugcggguggg

SEQ ID NO: 1361850 - RNA, 12 nt, Human
uccugcagcccc

SEQ ID NO: 1361851 - RNA, 13 nt, Human
uccugcagcccca

SEQ ID NO: 1361852 - RNA, 17 nt, Human
uccugcagaccacgccc

SEQ ID NO: 1361853 - RNA, 21 nt, Human
uccugcacuuacuugcuuauu

SEQ ID NO: 1361854 - RNA, 21 nt, Human
uccugcaccggggccugggca

SEQ ID NO: 1361855 - RNA, 17 nt, Human
uccugcaacucaaggac

SEQ ID NO: 1361856 - RNA, 18 nt, Human
uccugcaacucaaggacu

SEQ ID NO: 1361857 - RNA, 20 nt, Human
uccugcaccggggccugggc

SEQ ID NO: 1361858 - RNA, 15 nt, Human
uccugagugcuugcu

SEQ ID NO: 1361859 - RNA, 15 nt, Human
uccugaguggugcca

SEQ ID NO: 1361860 - RNA, 13 nt, Human
uccugaguagcug

SEQ ID NO: 1361861 - RNA, 20 nt, Human
acugcacaauaacuccuccc

SEQ ID NO: 1361862 - RNA, 21 nt, Human
acugcacaauaacuccuccca

SEQ ID NO: 1361863 - RNA, 14 nt, Human
acugcacaauaacu

SEQ ID NO: 1361864 - RNA, 15 nt, Human
acugcaaccuucacc

SEQ ID NO: 1361865 - RNA, 16 nt, Human
acugcaaccucugccu

SEQ ID NO: 1361866 - RNA, 21 nt, Human
acugcuggagaggccccagcc

SEQ ID NO: 1361867 - RNA, 16 nt, Human
acugcuggagaggccc

SEQ ID NO: 1361868 - RNA, 17 nt, Human
acugcugccacugaggg

SEQ ID NO: 1361869 - RNA, 14 nt, Human
acugcugccacuga

SEQ ID NO: 1361870 - RNA, 22 nt, Human
acugcuugcccuaagcagaaag

SEQ ID NO: 1361871 - RNA, 20 nt, Human
acugcuugcccuaagcagaa

SEQ ID NO: 1361872 - RNA, 16 nt, Human
acugcuugcccuaagc

SEQ ID NO: 1361873 - RNA, 18 nt, Human
acugcuugaggaaaacaa

SEQ ID NO: 1361874 - RNA, 15 nt, Human
acugcuugaggaaaa

SEQ ID NO: 1361875 - RNA, 14 nt, Human
acugcuugaggaaa

SEQ ID NO: 1361876 - RNA, 22 nt, Human
acugcuggagaggccccagccg

SEQ ID NO: 1361877 - RNA, 16 nt, Human
acugcuuggagcugag

SEQ ID NO: 1361878 - RNA, 13 nt, Human
acugcuuggagcu

SEQ ID NO: 1361879 - RNA, 18 nt, Human
acugcuuggagcugagca

SEQ ID NO: 1361880 - RNA, 22 nt, Human
acugccuucucaacuccaaacu

SEQ ID NO: 1361881 - RNA, 11 nt, Human
acugccuuuga

SEQ ID NO: 1361882 - RNA, 18 nt, Human
acugcgacuuucugccug

SEQ ID NO: 1361883 - RNA, 17 nt, Human
acugcgacuuucugccu

SEQ ID NO: 1361884 - RNA, 15 nt, Human
acugcgacuuucugc

SEQ ID NO: 1361885 - RNA, 13 nt, Human
acugccuuugacc

SEQ ID NO: 1361886 - RNA, 16 nt, Human
acugccuuuggcagag

SEQ ID NO: 1361887 - RNA, 19 nt, Human
acugccuuuggcagaguuc

SEQ ID NO: 1361888 - RNA, 23 nt, Human
acugcgacuuucugccuggagug

SEQ ID NO: 1361889 - RNA, 22 nt, Human
acugcgacuuucugccuggagu

SEQ ID NO: 1361890 - RNA, 21 nt, Human
acugcgacuuucugccuggag

SEQ ID NO: 1361891 - RNA, 19 nt, Human
acugcgacuuucugccugg

SEQ ID NO: 1361892 - RNA, 23 nt, Human
acugcgcccuuaacugcauccag

SEQ ID NO: 1361893 - RNA, 13 nt, Human
acugcugccacug

SEQ ID NO: 1361894 - RNA, 12 nt, Human
acugcugccacu

SEQ ID NO: 1361895 - RNA, 22 nt, Human
acugcugagauacauacagaau

SEQ ID NO: 1361896 - RNA, 20 nt, Human
acugcugagauacauacaga

SEQ ID NO: 1361897 - RNA, 19 nt, Human
acugcugagauacauacag

SEQ ID NO: 1361898 - RNA, 18 nt, Human
acugcugagauacauaca

SEQ ID NO: 1361899 - RNA, 13 nt, Human
acugcucugagaa

SEQ ID NO: 1361900 - RNA, 12 nt, Human
acugcucugaga

SEQ ID NO: 1361901 - RNA, 18 nt, Human
acugcucccaccuccuga

SEQ ID NO: 1361902 - RNA, 19 nt, Human
acugcucccaccuccugac

SEQ ID NO: 1361903 - RNA, 16 nt, Human
acugcucccaccuccu

SEQ ID NO: 1361904 - RNA, 15 nt, Human
acugcucccaccucc

SEQ ID NO: 1361905 - RNA, 15 nt, Human
acugcucuccuccac

SEQ ID NO: 1361906 - RNA, 21 nt, Human
acugcucuccuccaccucaac

SEQ ID NO: 1361907 - RNA, 21 nt, Human
acuggcaggcaggcucccagg

SEQ ID NO: 1361908 - RNA, 15 nt, Human
acuggcggggggccc

SEQ ID NO: 1361909 - RNA, 19 nt, Human
acuggcgacacguagcagc

SEQ ID NO: 1361910 - RNA, 18 nt, Human
acuggccuuuuucauuua

SEQ ID NO: 1361911 - RNA, 23 nt, Human
acuggcauggauauaguuuuacu

SEQ ID NO: 1361912 - RNA, 21 nt, Human
acuggcauggauauaguuuua

SEQ ID NO: 1361913 - RNA, 15 nt, Human
acuggcucuccuggc

SEQ ID NO: 1361914 - RNA, 17 nt, Human
acuggcucuccuggccc

SEQ ID NO: 1361915 - RNA, 23 nt, Human
uccuucagagagcagugcuuuug

SEQ ID NO: 1361916 - RNA, 21 nt, Human
uccuucagagagcagugcuuu

SEQ ID NO: 1361917 - RNA, 20 nt, Human
uccuucagagagcagugcuu

SEQ ID NO: 1361918 - RNA, 19 nt, Human
uccuucagagagcagugcu

SEQ ID NO: 1361919 - RNA, 13 nt, Human
uccuucagagagc

SEQ ID NO: 1361920 - RNA, 14 nt, Human
uccuucagauuugg

SEQ ID NO: 1361921 - RNA, 22 nt, Human
uccuucagagagcagugcuuuu

SEQ ID NO: 1361922 - RNA, 18 nt, Human
uccuucagcacuuuagaa

SEQ ID NO: 1361923 - RNA, 15 nt, Human
uccuucagcacuuua

SEQ ID NO: 1361924 - RNA, 14 nt, Human
uccuucauuuccuc

SEQ ID NO: 1361925 - RNA, 11 nt, Human
uccuucauuuc

SEQ ID NO: 1361926 - RNA, 19 nt, Human
uccuucaugacagccucca

SEQ ID NO: 1361927 - RNA, 14 nt, Human
uccuuccugcccca

SEQ ID NO: 1361928 - RNA, 12 nt, Human
uccuuccugccc

SEQ ID NO: 1361929 - RNA, 10 nt, Human
uccuuccugc

SEQ ID NO: 1361930 - RNA, 16 nt, Human
uccuuccucacaccag

SEQ ID NO: 1361931 - RNA, 23 nt, Human
uccuuccuaaauuuuccuguccu

SEQ ID NO: 1361932 - RNA, 23 nt, Human
uccuuccgcuuggagcuauuuuc

SEQ ID NO: 1361933 - RNA, 16 nt, Human
uccuuccgcuuggagc

SEQ ID NO: 1361934 - RNA, 21 nt, Human
uccuuccucacaccaggcuug

SEQ ID NO: 1361935 - RNA, 12 nt, Human
uccuucccucuc

SEQ ID NO: 1361936 - RNA, 14 nt, Human
uccuucccauggag

SEQ ID NO: 1361937 - RNA, 23 nt, Human
uccuucccagaggggccugccac

SEQ ID NO: 1361938 - RNA, 15 nt, Human
uccuucauuuccucc

SEQ ID NO: 1361939 - RNA, 17 nt, Human
uccuucccuuuucuguu

SEQ ID NO: 1361940 - RNA, 16 nt, Human
uccuucccuuuucugu

SEQ ID NO: 1361941 - RNA, 19 nt, Human
uccuucccugugccuccuc

SEQ ID NO: 1361942 - RNA, 14 nt, Human
uccuucccucucug

SEQ ID NO: 1361943 - RNA, 18 nt, Human
uccuuccaaugucuggag

SEQ ID NO: 1361944 - RNA, 14 nt, Human
uccuucccugcugu

SEQ ID NO: 1361945 - RNA, 20 nt, Human
ucgacucugugcuggccagc

SEQ ID NO: 1361946 - RNA, 23 nt, Human
ucgacucugugcuggccagcgag

SEQ ID NO: 1361947 - RNA, 22 nt, Human
ucgacacuguucuuagcucaau

SEQ ID NO: 1361948 - RNA, 17 nt, Human
ucgagcagcauuuuauu

SEQ ID NO: 1361949 - RNA, 20 nt, Human
ucgagauuaucguuuucuua

SEQ ID NO: 1361950 - RNA, 19 nt, Human
ucgagauuaucguuuucuu

SEQ ID NO: 1361951 - RNA, 23 nt, Human
ucgagaucccaacacugccagca

SEQ ID NO: 1361952 - RNA, 22 nt, Human
ucgagaucccaacacugccagc

SEQ ID NO: 1361953 - RNA, 23 nt, Human
ucgccuuucccaggugcuacacc

SEQ ID NO: 1361954 - RNA, 12 nt, Human
ucgccuucccca

SEQ ID NO: 1361955 - RNA, 20 nt, Human
ucgcuccccacucugcucug

SEQ ID NO: 1361956 - RNA, 21 nt, Human
ucgcuccccacucugcucuga

SEQ ID NO: 1361957 - RNA, 17 nt, Human
ucgaggaguaacaauac

SEQ ID NO: 1361958 - RNA, 16 nt, Human
ucgccuguaaucucac

SEQ ID NO: 1361959 - RNA, 20 nt, Human
ucgaggaguaacaauacaaa

SEQ ID NO: 1361960 - RNA, 14 nt, Human
ucgaggaguaacaa

SEQ ID NO: 1361961 - RNA, 19 nt, Human
uccuuucauauaguuagcu

SEQ ID NO: 1361962 - RNA, 16 nt, Human
uccuuuagguaagaag

SEQ ID NO: 1361963 - RNA, 20 nt, Human
acuguagaaugauuucaugc

SEQ ID NO: 1361964 - RNA, 19 nt, Human
acuguagaaugauuucaug

SEQ ID NO: 1361965 - RNA, 18 nt, Human
acuguagaaugauuucau

SEQ ID NO: 1361966 - RNA, 16 nt, Human
acuguacagugucuuu

SEQ ID NO: 1361967 - RNA, 15 nt, Human
acuguacagugucuu

SEQ ID NO: 1361968 - RNA, 12 nt, Human
acuguacagugu

SEQ ID NO: 1361969 - RNA, 11 nt, Human
acuguacagug

SEQ ID NO: 1361970 - RNA, 21 nt, Human
acuguacagugucuuuuuuug

SEQ ID NO: 1361971 - RNA, 17 nt, Human
acuguacagugucuuuu

SEQ ID NO: 1361972 - RNA, 16 nt, Human
acuguacaugaaaaca

SEQ ID NO: 1361973 - RNA, 23 nt, Human
acuguacaugaaaacacauuuuu

SEQ ID NO: 1361974 - RNA, 13 nt, Human
acuguacaugaaa

SEQ ID NO: 1361975 - RNA, 14 nt, Human
acuguacaugaaaa

SEQ ID NO: 1361976 - RNA, 18 nt, Human
acuguacagcuggcucua

SEQ ID NO: 1361977 - RNA, 14 nt, Human
acuguacagcuggc

SEQ ID NO: 1361978 - RNA, 13 nt, Human
acuguacagcugg

SEQ ID NO: 1361979 - RNA, 20 nt, Human
acuguacagacagaaaaaac

SEQ ID NO: 1361980 - RNA, 16 nt, Human
acuguaaguugggcuu

SEQ ID NO: 1361981 - RNA, 19 nt, Human
acuguaaucuuauuuagga

SEQ ID NO: 1361982 - RNA, 22 nt, Human
acuguaaucuuauuuaggaagu

SEQ ID NO: 1361983 - RNA, 19 nt, Human
acuguaauuugugauacaa

SEQ ID NO: 1361984 - RNA, 23 nt, Human
acugggcaugagggguuccuccc

SEQ ID NO: 1361985 - RNA, 18 nt, Human
acugggcaaugauggcaa

SEQ ID NO: 1361986 - RNA, 13 nt, Human
acugggcaaugau

SEQ ID NO: 1361987 - RNA, 17 nt, Human
acugggaggcuccccuu

SEQ ID NO: 1361988 - RNA, 12 nt, Human
acugggaggcuc

SEQ ID NO: 1361989 - RNA, 21 nt, Human
acugggagcccccagccuguc

SEQ ID NO: 1361990 - RNA, 20 nt, Human
acugggagcccccagccugu

SEQ ID NO: 1361991 - RNA, 19 nt, Human
acugggagcccccagccug

SEQ ID NO: 1361992 - RNA, 18 nt, Human
acugggagcccccagccu

SEQ ID NO: 1361993 - RNA, 17 nt, Human
acugggagcccccagcc

SEQ ID NO: 1361994 - RNA, 15 nt, Human
acugggagcccccag

SEQ ID NO: 1361995 - RNA, 15 nt, Human
ucgcuccugcagccc

SEQ ID NO: 1361996 - RNA, 14 nt, Human
ucgcuccugcccac

SEQ ID NO: 1361997 - RNA, 22 nt, Human
ucgcuccucaaccccuccccuc

SEQ ID NO: 1361998 - RNA, 19 nt, Human
ucgcuccucaaccccuccc

SEQ ID NO: 1361999 - RNA, 18 nt, Human
ucgcuccucaaccccucc

SEQ ID NO: 1362000 - RNA, 16 nt, Human
ucgcuccucaaccccu

SEQ ID NO: 1362001 - RNA, 19 nt, Human
acuggggacuuggccucuc

SEQ ID NO: 1362002 - RNA, 21 nt, Human
acuggggagcccgucucagug

SEQ ID NO: 1362003 - RNA, 17 nt, Human
acuggggagcccgucuc

SEQ ID NO: 1362004 - RNA, 13 nt, Human
acuggggagcccg

SEQ ID NO: 1362005 - RNA, 18 nt, Human
acuggggacuuggccucu

SEQ ID NO: 1362006 - RNA, 17 nt, Human
acuggggacuuggccuc

SEQ ID NO: 1362007 - RNA, 15 nt, Human
acuggggacuuggcc

SEQ ID NO: 1362008 - RNA, 18 nt, Human
acuggggaaacuggccau

SEQ ID NO: 1362009 - RNA, 15 nt, Human
acuggggaaacuggc

SEQ ID NO: 1362010 - RNA, 19 nt, Human
acuggggaaaacuccaccu

SEQ ID NO: 1362011 - RNA, 15 nt, Human
acugggcaugagggg

SEQ ID NO: 1362012 - RNA, 14 nt, Human
acuggggcaggggc

SEQ ID NO: 1362013 - RNA, 16 nt, Human
acuguaaggcaaucau

SEQ ID NO: 1362014 - RNA, 22 nt, Human
agcacuuggggguucaggcccg

SEQ ID NO: 1362015 - RNA, 14 nt, Human
agcacuuggcccuu

SEQ ID NO: 1362016 - RNA, 17 nt, Human
agcacgacaguggaugc

SEQ ID NO: 1362017 - RNA, 18 nt, Human
agcacgaaauguuauuuu

SEQ ID NO: 1362018 - RNA, 16 nt, Human
agcacgauuucuguuu

SEQ ID NO: 1362019 - RNA, 14 nt, Human
agcacgauuucugu

SEQ ID NO: 1362020 - RNA, 15 nt, Human
agcacgauuucuguu

SEQ ID NO: 1362021 - RNA, 17 nt, Human
agcacgaaauguuauuu

SEQ ID NO: 1362022 - RNA, 13 nt, Human
agcacgauuucug

SEQ ID NO: 1362023 - RNA, 14 nt, Human
agcaccugcugucu

SEQ ID NO: 1362024 - RNA, 15 nt, Human
agcaccugcugucug

SEQ ID NO: 1362025 - RNA, 14 nt, Human
agcaccagaaugua

SEQ ID NO: 1362026 - RNA, 23 nt, Human
agcagaaggggagauggacgaca

SEQ ID NO: 1362027 - RNA, 17 nt, Human
agcagaaggggagaugg

SEQ ID NO: 1362028 - RNA, 13 nt, Human
agcagaagcagca

SEQ ID NO: 1362029 - RNA, 14 nt, Human
agcagaagcagcaa

SEQ ID NO: 1362030 - RNA, 21 nt, Human
agcagaaagugccuuucagga

SEQ ID NO: 1362031 - RNA, 18 nt, Human
agcagaaauccaagcacc

SEQ ID NO: 1362032 - RNA, 23 nt, Human
agcagaaagugccuuucaggauc

SEQ ID NO: 1362033 - RNA, 19 nt, Human
agcagaaaugccuuacccu

SEQ ID NO: 1362034 - RNA, 12 nt, Human
agcagaaaugcc

SEQ ID NO: 1362035 - RNA, 13 nt, Human
agcagaaaugccu

SEQ ID NO: 1362036 - RNA, 20 nt, Human
agcagaaagugccuuucagg

SEQ ID NO: 1362037 - RNA, 19 nt, Human
agcagaaagugccuuucag

SEQ ID NO: 1362038 - RNA, 18 nt, Human
agcagaaagugccuuuca

SEQ ID NO: 1362039 - RNA, 15 nt, Human
agcagaaagugccuu

SEQ ID NO: 1362040 - RNA, 14 nt, Human
agcagaaagugccu

SEQ ID NO: 1362041 - RNA, 22 nt, Human
agcagaaaacccuugggccaga

SEQ ID NO: 1362042 - RNA, 21 nt, Human
agcagaaaacccuugggccag

SEQ ID NO: 1362043 - RNA, 15 nt, Human
agcagaaaacccuug

SEQ ID NO: 1362044 - RNA, 20 nt, Human
agcacuuuagaauaugccuu

SEQ ID NO: 1362045 - RNA, 16 nt, Human
agcacuuguccagcug

SEQ ID NO: 1362046 - RNA, 15 nt, Human
agcacuuggcccuuc

SEQ ID NO: 1362047 - RNA, 21 nt, Human
agcacuuguggguuuuuguuu

SEQ ID NO: 1362048 - RNA, 14 nt, Human
agcacuuuagaaua

SEQ ID NO: 1362049 - RNA, 21 nt, Human
agcacuuuagaauaugccuug

SEQ ID NO: 1362050 - RNA, 15 nt, Human
ugagccuugaacuuu

SEQ ID NO: 1362051 - RNA, 17 nt, Human
ugagccuugaacuuuga

SEQ ID NO: 1362052 - RNA, 18 nt, Human
ugagccuugaacuuugac

SEQ ID NO: 1362053 - RNA, 19 nt, Human
ugagccuugaacuuugacc

SEQ ID NO: 1362054 - RNA, 14 nt, Human
ugagccuugaacuu

SEQ ID NO: 1362055 - RNA, 23 nt, Human
agcagacagagccaggagaagcu

SEQ ID NO: 1362056 - RNA, 21 nt, Human
agcagacaguguuuucuggga

SEQ ID NO: 1362057 - RNA, 12 nt, Human
agcagacaggcc

SEQ ID NO: 1362058 - RNA, 19 nt, Human
agcagacagagccaggaga

SEQ ID NO: 1362059 - RNA, 18 nt, Human
agcagacagagccaggag

SEQ ID NO: 1362060 - RNA, 17 nt, Human
agcagacagagccagga

SEQ ID NO: 1362061 - RNA, 16 nt, Human
agcagacagagccagg

SEQ ID NO: 1362062 - RNA, 15 nt, Human
agcagacagagccag

SEQ ID NO: 1362063 - RNA, 14 nt, Human
agcagacagagcca

SEQ ID NO: 1362064 - RNA, 20 nt, Human
agcagacucagcucugacau

SEQ ID NO: 1362065 - RNA, 19 nt, Human
agcagacucagcucugaca

SEQ ID NO: 1362066 - RNA, 16 nt, Human
agcagacucagcucug

SEQ ID NO: 1362067 - RNA, 23 nt, Human
agcagacuacagcuggggugcag

SEQ ID NO: 1362068 - RNA, 22 nt, Human
agcagacuacagcuggggugca

SEQ ID NO: 1362069 - RNA, 17 nt, Human
agcagacuacagcuggg

SEQ ID NO: 1362070 - RNA, 13 nt, Human
agcagacuacagc

SEQ ID NO: 1362071 - RNA, 22 nt, Human
agcagaccaccccgccugcccu

SEQ ID NO: 1362072 - RNA, 11 nt, Human
agcagacauuu

SEQ ID NO: 1362073 - RNA, 16 nt, Human
ugagcacugccaggag

SEQ ID NO: 1362074 - RNA, 15 nt, Human
ugagcacugccagga

SEQ ID NO: 1362075 - RNA, 14 nt, Human
ugagcacugccagg

SEQ ID NO: 1362076 - RNA, 13 nt, Human
ugagcacugccag

SEQ ID NO: 1362077 - RNA, 22 nt, Human
ugagcacugccaggagggacaa

SEQ ID NO: 1362078 - RNA, 18 nt, Human
ugagcacugccaggaggg

SEQ ID NO: 1362079 - RNA, 17 nt, Human
ugagcacugccaggagg

SEQ ID NO: 1362080 - RNA, 15 nt, Human
ugagcacuguuuaua

SEQ ID NO: 1362081 - RNA, 19 nt, Human
ugagcacugccaggaggga

SEQ ID NO: 1362082 - RNA, 22 nt, Human
ugagcacuguuuauacacugug

SEQ ID NO: 1362083 - RNA, 17 nt, Human
ugagcacagccuagggc

SEQ ID NO: 1362084 - RNA, 15 nt, Human
agcaaccuguagagu

SEQ ID NO: 1362085 - RNA, 23 nt, Human
agcaaccguggcccuuccuggac

SEQ ID NO: 1362086 - RNA, 15 nt, Human
agcaaccucaguaau

SEQ ID NO: 1362087 - RNA, 22 nt, Human
agcaaccguggcccuuccugga

SEQ ID NO: 1362088 - RNA, 21 nt, Human
agcaaccguggcccuuccugg

SEQ ID NO: 1362089 - RNA, 20 nt, Human
agcaaccguggcccuuccug

SEQ ID NO: 1362090 - RNA, 19 nt, Human
agcaaccguggcccuuccu

SEQ ID NO: 1362091 - RNA, 16 nt, Human
agcaaccguggcccuu

SEQ ID NO: 1362092 - RNA, 15 nt, Human
agcaaccguggcccu

SEQ ID NO: 1362093 - RNA, 18 nt, Human
ugagcaacucuugauuau

SEQ ID NO: 1362094 - RNA, 16 nt, Human
ugagcaacucuugauu

SEQ ID NO: 1362095 - RNA, 21 nt, Human
ugagcaacgcuauuccagcug

SEQ ID NO: 1362096 - RNA, 13 nt, Human
ugagccagggucu

SEQ ID NO: 1362097 - RNA, 22 nt, Human
ugagccagggucuccagaaagc

SEQ ID NO: 1362098 - RNA, 12 nt, Human
agcacagcagcc

SEQ ID NO: 1362099 - RNA, 10 nt, Human
agcacagcag

SEQ ID NO: 1362100 - RNA, 18 nt, Human
agcaaguucgucuguugu

SEQ ID NO: 1362101 - RNA, 23 nt, Human
agcacagccaacacgcaccugcc

SEQ ID NO: 1362102 - RNA, 13 nt, Human
agcacagccaaca

SEQ ID NO: 1362103 - RNA, 12 nt, Human
agcacagccaac

SEQ ID NO: 1362104 - RNA, 23 nt, Human
agcacagcagccuggggcuggcc

SEQ ID NO: 1362105 - RNA, 15 nt, Human
agcacagcagccugg

SEQ ID NO: 1362106 - RNA, 13 nt, Human
agcacagcagccu

SEQ ID NO: 1362107 - RNA, 15 nt, Human
agcaaguucgucugu

SEQ ID NO: 1362108 - RNA, 23 nt, Human
agcacaucucaacaggccucagg

SEQ ID NO: 1362109 - RNA, 19 nt, Human
agcacaucucaacaggccu

SEQ ID NO: 1362110 - RNA, 16 nt, Human
agcacaucucaacagg

SEQ ID NO: 1362111 - RNA, 15 nt, Human
agcacaucucaacag

SEQ ID NO: 1362112 - RNA, 20 nt, Human
agcacaucucaacaggccuc

SEQ ID NO: 1362113 - RNA, 22 nt, Human
agcaccaccaaacacaguguau

SEQ ID NO: 1362114 - RNA, 22 nt, Human
agcaccaaaucaaaaucucucc

SEQ ID NO: 1362115 - RNA, 18 nt, Human
agcaccaaaucaaaaucu

SEQ ID NO: 1362116 - RNA, 17 nt, Human
agcaccaaaucaaaauc

SEQ ID NO: 1362117 - RNA, 16 nt, Human
agcaccaaucaugaau

SEQ ID NO: 1362118 - RNA, 12 nt, Human
agcacagccuag

SEQ ID NO: 1362119 - RNA, 12 nt, Human
agcacagcccuu

SEQ ID NO: 1362120 - RNA, 22 nt, Human
agcacagccucuuagaugcagu

SEQ ID NO: 1362121 - RNA, 16 nt, Human
agcacauauggaauuu

SEQ ID NO: 1362122 - RNA, 20 nt, Human
agcacagcuuagauuucaua

SEQ ID NO: 1362123 - RNA, 18 nt, Human
agcacagcuuagauuuca

SEQ ID NO: 1362124 - RNA, 16 nt, Human
agcacagcuuagauuu

SEQ ID NO: 1362125 - RNA, 15 nt, Human
agcacagugaucaag

SEQ ID NO: 1362126 - RNA, 22 nt, Human
ugaggacaagagaaaaaagcca

SEQ ID NO: 1362127 - RNA, 13 nt, Human
ugaggacaagaga

SEQ ID NO: 1362128 - RNA, 20 nt, Human
ugaggacaaccauuccagac

SEQ ID NO: 1362129 - RNA, 19 nt, Human
ugaggacaaccauuccaga

SEQ ID NO: 1362130 - RNA, 18 nt, Human
ugaggaauuuucuuugug

SEQ ID NO: 1362131 - RNA, 14 nt, Human
ugaggaauuuucuu

SEQ ID NO: 1362132 - RNA, 13 nt, Human
ugaggaauuuucu

SEQ ID NO: 1362133 - RNA, 22 nt, Human
ugaggaauuucaccuguaaacc

SEQ ID NO: 1362134 - RNA, 21 nt, Human
ugaggaauuucaccuguaaac

SEQ ID NO: 1362135 - RNA, 15 nt, Human
ugaggaauuucaccu

SEQ ID NO: 1362136 - RNA, 19 nt, Human
ugaggccacacucagcaca

SEQ ID NO: 1362137 - RNA, 13 nt, Human
ugaggccacacuc

SEQ ID NO: 1362138 - RNA, 12 nt, Human
ugaggccacacu

SEQ ID NO: 1362139 - RNA, 15 nt, Human
ugaggccacuguguu

SEQ ID NO: 1362140 - RNA, 16 nt, Human
ugaggccacccagagg

SEQ ID NO: 1362141 - RNA, 23 nt, Human
ugaggccacacucagcacaaggc

SEQ ID NO: 1362142 - RNA, 20 nt, Human
ugaggccacacucagcacaa

SEQ ID NO: 1362143 - RNA, 12 nt, Human
ugaggacacaug

SEQ ID NO: 1362144 - RNA, 13 nt, Human
ugaggacacaugu

SEQ ID NO: 1362145 - RNA, 14 nt, Human
ugaggacacauguc

SEQ ID NO: 1362146 - RNA, 15 nt, Human
ugaggacacaugucc

SEQ ID NO: 1362147 - RNA, 15 nt, Human
ugaggacacugauau

SEQ ID NO: 1362148 - RNA, 20 nt, Human
ugaggacagaugccuccuuc

SEQ ID NO: 1362149 - RNA, 18 nt, Human
ugaggacagaugccuccu

SEQ ID NO: 1362150 - RNA, 15 nt, Human
ugaggacagaugccu

SEQ ID NO: 1362151 - RNA, 16 nt, Human
ugaggacacaugucca

SEQ ID NO: 1362152 - RNA, 23 nt, Human
ugaggccauggacucuguccuga

SEQ ID NO: 1362153 - RNA, 20 nt, Human
ugaggccauggacucugucc

SEQ ID NO: 1362154 - RNA, 14 nt, Human
ugaggccauggacu

SEQ ID NO: 1362155 - RNA, 16 nt, Human
ugaggccagggcagag

SEQ ID NO: 1362156 - RNA, 15 nt, Human
ugaggccagggcaga

SEQ ID NO: 1362157 - RNA, 14 nt, Human
ugaggccagggcag

SEQ ID NO: 1362158 - RNA, 13 nt, Human
ugaggccagggca

SEQ ID NO: 1362159 - RNA, 22 nt, Human
ugaggccagccuggccuccugc

SEQ ID NO: 1362160 - RNA, 21 nt, Human
ugaggccagccuggccuccug

SEQ ID NO: 1362161 - RNA, 20 nt, Human
ugaggccagccuggccuccu

SEQ ID NO: 1362162 - RNA, 18 nt, Human
ugaggccagccuggccuc

SEQ ID NO: 1362163 - RNA, 17 nt, Human
ugaggccagccuggccu

SEQ ID NO: 1362164 - RNA, 16 nt, Human
ugaggccagccuggcc

SEQ ID NO: 1362165 - RNA, 15 nt, Human
ugaggccagccuggc

SEQ ID NO: 1362166 - RNA, 14 nt, Human
ugaggccagccugg

SEQ ID NO: 1362167 - RNA, 13 nt, Human
ugaggccagccug

SEQ ID NO: 1362168 - RNA, 12 nt, Human
ugaggccagccu

SEQ ID NO: 1362169 - RNA, 21 nt, Human
ugaggccacuguguuccuucc

SEQ ID NO: 1362170 - RNA, 13 nt, Human
ugaggccagacca

SEQ ID NO: 1362171 - RNA, 18 nt, Human
ugaggaaagcaagaauca

SEQ ID NO: 1362172 - RNA, 15 nt, Human
ugaggaaagucauug

SEQ ID NO: 1362173 - RNA, 17 nt, Human
ugaggaaagucauuggc

SEQ ID NO: 1362174 - RNA, 18 nt, Human
ugaggaaagucauuggcu

SEQ ID NO: 1362175 - RNA, 19 nt, Human
ugaggaaagucauuggcuu

SEQ ID NO: 1362176 - RNA, 21 nt, Human
ugaggaaagucauuggcuuua

SEQ ID NO: 1362177 - RNA, 22 nt, Human
ugaggaaagucauuggcuuuau

SEQ ID NO: 1362178 - RNA, 20 nt, Human
ugagcgccuccauccaaggc

SEQ ID NO: 1362179 - RNA, 23 nt, Human
ugagcgccuccauccaaggccag

SEQ ID NO: 1362180 - RNA, 18 nt, Human
ugagcgccuccauccaag

SEQ ID NO: 1362181 - RNA, 12 nt, Human
ugagcgccagga

SEQ ID NO: 1362182 - RNA, 23 nt, Human
ugagcgaguggagucugccaccc

SEQ ID NO: 1362183 - RNA, 21 nt, Human
ugagcgaguggagucugccac

SEQ ID NO: 1362184 - RNA, 23 nt, Human
ugagcgaggagaugcuccuuggg

SEQ ID NO: 1362185 - RNA, 22 nt, Human
ugagcgaggagaugcuccuugg

SEQ ID NO: 1362186 - RNA, 16 nt, Human
ugagccuuuucccucu

SEQ ID NO: 1362187 - RNA, 13 nt, Human
ugagccuuguaau

SEQ ID NO: 1362188 - RNA, 13 nt, Human
ugagcuacaaaug

SEQ ID NO: 1362189 - RNA, 14 nt, Human
ugagcuacaaaugc

SEQ ID NO: 1362190 - RNA, 17 nt, Human
ugagcuagaacccucug

SEQ ID NO: 1362191 - RNA, 18 nt, Human
ugagcuagaacccucugu

SEQ ID NO: 1362192 - RNA, 16 nt, Human
ugagcuagaacccucu

SEQ ID NO: 1362193 - RNA, 21 nt, Human
ugagcuacugccgucagugcu

SEQ ID NO: 1362194 - RNA, 24 nt, Human
ugagcuacugccgucagugcugug

SEQ ID NO: 1362195 - RNA, 16 nt, Human
ugagcuacaaaugcau

SEQ ID NO: 1362196 - RNA, 23 nt, Human
ugagcuuucugaacagcuggugu

SEQ ID NO: 1362197 - RNA, 22 nt, Human
ugagcuuucugaacagcuggug

SEQ ID NO: 1362198 - RNA, 20 nt, Human
ugagcuuucugaacagcugg

SEQ ID NO: 1362199 - RNA, 19 nt, Human
ugagcuuucugaacagcug

SEQ ID NO: 1362200 - RNA, 18 nt, Human
ugagcuuucugaacagcu

SEQ ID NO: 1362201 - RNA, 17 nt, Human
ugagcuuucugaacagc

SEQ ID NO: 1362202 - RNA, 16 nt, Human
ugagcuuucugaacag

SEQ ID NO: 1362203 - RNA, 14 nt, Human
ugagcuuucugaac

SEQ ID NO: 1362204 - RNA, 13 nt, Human
ugagcuuucugaa

SEQ ID NO: 1362205 - RNA, 14 nt, Human
ugagcuaggaauug

SEQ ID NO: 1362206 - RNA, 22 nt, Human
ugaggcccuccacaccugcggc

SEQ ID NO: 1362207 - RNA, 21 nt, Human
ugaggcccuccacaccugcgg

SEQ ID NO: 1362208 - RNA, 19 nt, Human
ugaggcccuccacaccugc

SEQ ID NO: 1362209 - RNA, 18 nt, Human
ugaggcccuccacaccug

SEQ ID NO: 1362210 - RNA, 17 nt, Human
ugaggcccuccacaccu

SEQ ID NO: 1362211 - RNA, 13 nt, Human
ugaggcccuccac

SEQ ID NO: 1362212 - RNA, 12 nt, Human
ugaggcccucca

SEQ ID NO: 1362213 - RNA, 23 nt, Human
ugaggcccuccacaccugcggcc

SEQ ID NO: 1362214 - RNA, 23 nt, Human
ugagggcagcagccagcccugcc

SEQ ID NO: 1362215 - RNA, 22 nt, Human
ugagggcagcagccagcccugc

SEQ ID NO: 1362216 - RNA, 21 nt, Human
ugagggcagcagccagcccug

SEQ ID NO: 1362217 - RNA, 20 nt, Human
ugagggcagcagccagcccu

SEQ ID NO: 1362218 - RNA, 18 nt, Human
ugagggcagcagccagcc

SEQ ID NO: 1362219 - RNA, 17 nt, Human
ugagggcagcagccagc

SEQ ID NO: 1362220 - RNA, 16 nt, Human
ugagggcagcagccag

SEQ ID NO: 1362221 - RNA, 15 nt, Human
ugagggcagcagcca

SEQ ID NO: 1362222 - RNA, 14 nt, Human
ugagggcagcagcc

SEQ ID NO: 1362223 - RNA, 13 nt, Human
ugagggcagcagc

SEQ ID NO: 1362224 - RNA, 12 nt, Human
ugagggcagcag

SEQ ID NO: 1362225 - RNA, 23 nt, Human
ugagggcaguucgcagccacccu

SEQ ID NO: 1362226 - RNA, 21 nt, Human
ugagggcaguucgcagccacc

SEQ ID NO: 1362227 - RNA, 20 nt, Human
ugagggcaguucgcagccac

SEQ ID NO: 1362228 - RNA, 19 nt, Human
ugagggcaguucgcagcca

SEQ ID NO: 1362229 - RNA, 18 nt, Human
ugagggcaguucgcagcc

SEQ ID NO: 1362230 - RNA, 11 nt, Human
ugagggcaguc

SEQ ID NO: 1362231 - RNA, 22 nt, Human
ugaggggaccaggagugggugg

SEQ ID NO: 1362232 - RNA, 18 nt, Human
ugaggggaccaggagugg

SEQ ID NO: 1362233 - RNA, 16 nt, Human
ugaggggaccaggagu

SEQ ID NO: 1362234 - RNA, 15 nt, Human
ugaggggaccaggag

SEQ ID NO: 1362235 - RNA, 14 nt, Human
ugaggggaccagga

SEQ ID NO: 1362236 - RNA, 13 nt, Human
ugaggggaccagg

SEQ ID NO: 1362237 - RNA, 18 nt, Human
ugaggggaagcuagucuu

SEQ ID NO: 1362238 - RNA, 18 nt, Human
ugagggucuguagguugc

SEQ ID NO: 1362239 - RNA, 15 nt, Human
ugagggucuguaggu

SEQ ID NO: 1362240 - RNA, 18 nt, Human
ugagggguuccuccccuc

SEQ ID NO: 1362241 - RNA, 14 nt, Human
ugaggguaaguauu

SEQ ID NO: 1362242 - RNA, 22 nt, Human
ugagggguuccuccccuccagc

SEQ ID NO: 1362243 - RNA, 17 nt, Human
ugagggguuccuccccu

SEQ ID NO: 1362244 - RNA, 16 nt, Human
ugagggguuccucccc

SEQ ID NO: 1362245 - RNA, 15 nt, Human
ugagggguuccuccc

SEQ ID NO: 1362246 - RNA, 13 nt, Human
ugagggguuccuc

SEQ ID NO: 1362247 - RNA, 20 nt, Human
ugagggggggcucccugggg

SEQ ID NO: 1362248 - RNA, 16 nt, Human
ugaggggcuaccagga

SEQ ID NO: 1362249 - RNA, 17 nt, Human
ugaggggcuaccaggaa

SEQ ID NO: 1362250 - RNA, 19 nt, Human
ugaggggcuaccaggaaag

SEQ ID NO: 1362251 - RNA, 20 nt, Human
agcagaggggcagaggccca

SEQ ID NO: 1362252 - RNA, 14 nt, Human
agcagaggggcuga

SEQ ID NO: 1362253 - RNA, 13 nt, Human
agcagaggucucc

SEQ ID NO: 1362254 - RNA, 18 nt, Human
agcagagcuagguggaaa

SEQ ID NO: 1362255 - RNA, 17 nt, Human
agcagagcugauggaga

SEQ ID NO: 1362256 - RNA, 19 nt, Human
agcagagcugauggagaag

SEQ ID NO: 1362257 - RNA, 21 nt, Human
agcagagcugauggagaagga

SEQ ID NO: 1362258 - RNA, 22 nt, Human
agcagagcugauggagaaggaa

SEQ ID NO: 1362259 - RNA, 23 nt, Human
agcagagcugauggagaaggaag

SEQ ID NO: 1362260 - RNA, 17 nt, Human
agcagcaacuuguccua

SEQ ID NO: 1362261 - RNA, 24 nt, Human
agcagauucagaaaugaggccaug

SEQ ID NO: 1362262 - RNA, 22 nt, Human
ugagggucuguagguugcacac

SEQ ID NO: 1362263 - RNA, 23 nt, Human
ugagggucuguagguugcacacu

SEQ ID NO: 1362264 - RNA, 15 nt, Human
ugagguaaguuuuuu

SEQ ID NO: 1362265 - RNA, 17 nt, Human
agauuuggcuugacaaa

SEQ ID NO: 1362266 - RNA, 19 nt, Human
agauuuauuaaagaaaaaa

SEQ ID NO: 1362267 - RNA, 18 nt, Human
agauuuauuaaagaaaaa

SEQ ID NO: 1362268 - RNA, 17 nt, Human
agauuuauuaaagaaaa

SEQ ID NO: 1362269 - RNA, 16 nt, Human
agauuuauuaaagaaa

SEQ ID NO: 1362270 - RNA, 15 nt, Human
agauuuauuaaagaa

SEQ ID NO: 1362271 - RNA, 14 nt, Human
agauuuauuaaaga

SEQ ID NO: 1362272 - RNA, 20 nt, Human
agauugguguuuuuuucuau

SEQ ID NO: 1362273 - RNA, 19 nt, Human
agauugguguuuuuuucua

SEQ ID NO: 1362274 - RNA, 14 nt, Human
agauugguguuuuu

SEQ ID NO: 1362275 - RNA, 23 nt, Human
agauuuaauauaaaguuuuauau

SEQ ID NO: 1362276 - RNA, 20 nt, Human
agauuguccuuuugcaaaga

SEQ ID NO: 1362277 - RNA, 13 nt, Human
agauuguccuuuu

SEQ ID NO: 1362278 - RNA, 16 nt, Human
agauuuaccacuugug

SEQ ID NO: 1362279 - RNA, 20 nt, Human
agauuuaaucugccaagggc

SEQ ID NO: 1362280 - RNA, 14 nt, Human
agauuuaugcauau

SEQ ID NO: 1362281 - RNA, 16 nt, Human
agcaaccccaggcuga

SEQ ID NO: 1362282 - RNA, 15 nt, Human
agcaaccccaggcug

SEQ ID NO: 1362283 - RNA, 14 nt, Human
agcaaccccaggcu

SEQ ID NO: 1362284 - RNA, 14 nt, Human
agcaacauggcuuu

SEQ ID NO: 1362285 - RNA, 15 nt, Human
agcaacauucauagu

SEQ ID NO: 1362286 - RNA, 13 nt, Human
agcaacauggcuu

SEQ ID NO: 1362287 - RNA, 12 nt, Human
agcaacauggcu

SEQ ID NO: 1362288 - RNA, 21 nt, Human
agcaacaauuuaugaauugaa

SEQ ID NO: 1362289 - RNA, 19 nt, Human
agauuuucagcaaacucuu

SEQ ID NO: 1362290 - RNA, 14 nt, Human
agauuuuccugaaa

SEQ ID NO: 1362291 - RNA, 21 nt, Human
agcaaaaccaaauauuccaga

SEQ ID NO: 1362292 - RNA, 20 nt, Human
ugacucauucugaaggagcc

SEQ ID NO: 1362293 - RNA, 19 nt, Human
ugacucagggcuccugggu

SEQ ID NO: 1362294 - RNA, 18 nt, Human
ugacucagggcuccuggg

SEQ ID NO: 1362295 - RNA, 17 nt, Human
ugacucagggcuccugg

SEQ ID NO: 1362296 - RNA, 15 nt, Human
ugacucagggcuccu

SEQ ID NO: 1362297 - RNA, 14 nt, Human
ugacucagggcucc

SEQ ID NO: 1362298 - RNA, 13 nt, Human
ugacucagggcuc

SEQ ID NO: 1362299 - RNA, 21 nt, Human
ugacucaggagccugugacau

SEQ ID NO: 1362300 - RNA, 19 nt, Human
ugacucaggagccugugac

SEQ ID NO: 1362301 - RNA, 15 nt, Human
ugacucaggagccug

SEQ ID NO: 1362302 - RNA, 14 nt, Human
ugacucaggagccu

SEQ ID NO: 1362303 - RNA, 12 nt, Human
ugacucaggagc

SEQ ID NO: 1362304 - RNA, 12 nt, Human
ugacugucuggg

SEQ ID NO: 1362305 - RNA, 17 nt, Human
ugacugucacuguuccu

SEQ ID NO: 1362306 - RNA, 16 nt, Human
ugacugucacuguucc

SEQ ID NO: 1362307 - RNA, 13 nt, Human
ugacugucacugu

SEQ ID NO: 1362308 - RNA, 21 nt, Human
ugacugugguagccagcaucg

SEQ ID NO: 1362309 - RNA, 22 nt, Human
ugacugucuggggagcgggucu

SEQ ID NO: 1362310 - RNA, 14 nt, Human
ugacugucugggga

SEQ ID NO: 1362311 - RNA, 15 nt, Human
ugacuguuuccauca

SEQ ID NO: 1362312 - RNA, 16 nt, Human
ugacuucugccuggag

SEQ ID NO: 1362313 - RNA, 15 nt, Human
ugacuucugccugga

SEQ ID NO: 1362314 - RNA, 13 nt, Human
ugacuucugccug

SEQ ID NO: 1362315 - RNA, 12 nt, Human
ugacuucugccu

SEQ ID NO: 1362316 - RNA, 13 nt, Human
ugacuucugagau

SEQ ID NO: 1362317 - RNA, 15 nt, Human
ugacuugugucccau

SEQ ID NO: 1362318 - RNA, 19 nt, Human
ugacuuguauauuuuaaga

SEQ ID NO: 1362319 - RNA, 12 nt, Human
ugacuuguauau

SEQ ID NO: 1362320 - RNA, 23 nt, Human
ugacuugggcacccccagccugg

SEQ ID NO: 1362321 - RNA, 21 nt, Human
ugacuugggcacccccagccu

SEQ ID NO: 1362322 - RNA, 19 nt, Human
ugacuugggcacccccagc

SEQ ID NO: 1362323 - RNA, 17 nt, Human
ugacuugggcaccccca

SEQ ID NO: 1362324 - RNA, 21 nt, Human
ugacuuggcuggugugguaca

SEQ ID NO: 1362325 - RNA, 16 nt, Human
ugacuuggcuggugug

SEQ ID NO: 1362326 - RNA, 15 nt, Human
ugacuuggcuggugu

SEQ ID NO: 1362327 - RNA, 13 nt, Human
ugacuuggcuggu

SEQ ID NO: 1362328 - RNA, 12 nt, Human
ugacuuggcugg

SEQ ID NO: 1362329 - RNA, 18 nt, Human
ugacuucugccuggagac

SEQ ID NO: 1362330 - RNA, 21 nt, Human
agauucaaagguucuagguuu

SEQ ID NO: 1362331 - RNA, 22 nt, Human
agauucaaugccccugaauuua

SEQ ID NO: 1362332 - RNA, 21 nt, Human
agauucaaugccccugaauuu

SEQ ID NO: 1362333 - RNA, 19 nt, Human
agauucaaagguucuaggu

SEQ ID NO: 1362334 - RNA, 18 nt, Human
agauucaaagguucuagg

SEQ ID NO: 1362335 - RNA, 17 nt, Human
agauucaaagguucuag

SEQ ID NO: 1362336 - RNA, 16 nt, Human
agauucaaagguucua

SEQ ID NO: 1362337 - RNA, 15 nt, Human
agauucaaagguucu

SEQ ID NO: 1362338 - RNA, 14 nt, Human
agauucaaagguuc

SEQ ID NO: 1362339 - RNA, 22 nt, Human
ugacuugggcacccccagccug

SEQ ID NO: 1362340 - RNA, 19 nt, Human
agauuaucguuuucuuaaa

SEQ ID NO: 1362341 - RNA, 17 nt, Human
agauuaucguuuucuua

SEQ ID NO: 1362342 - RNA, 16 nt, Human
agauuaucguuuucuu

SEQ ID NO: 1362343 - RNA, 15 nt, Human
agauuaucguuuucu

SEQ ID NO: 1362344 - RNA, 23 nt, Human
agauuauagauucuaaagauucu

SEQ ID NO: 1362345 - RNA, 21 nt, Human
agauuauagauucuaaagauu

SEQ ID NO: 1362346 - RNA, 23 nt, Human
agauuauauauauuuuuuucuga

SEQ ID NO: 1362347 - RNA, 18 nt, Human
agauggaguuucuaaggu

SEQ ID NO: 1362348 - RNA, 17 nt, Human
agauggaguuucuaagg

SEQ ID NO: 1362349 - RNA, 16 nt, Human
agauggaguuucuaag

SEQ ID NO: 1362350 - RNA, 15 nt, Human
agauggaguuucuaa

SEQ ID NO: 1362351 - RNA, 14 nt, Human
agauggaguuucua

SEQ ID NO: 1362352 - RNA, 13 nt, Human
agauggaguuucu

SEQ ID NO: 1362353 - RNA, 23 nt, Human
agaugucauuuaguucagcaucc

SEQ ID NO: 1362354 - RNA, 23 nt, Human
agaugcuccaagauucuagauga

SEQ ID NO: 1362355 - RNA, 22 nt, Human
agaugcuccaagauucuagaug

SEQ ID NO: 1362356 - RNA, 21 nt, Human
agaugcuccaagauucuagau

SEQ ID NO: 1362357 - RNA, 20 nt, Human
agaugcuccaagauucuaga

SEQ ID NO: 1362358 - RNA, 19 nt, Human
agaugcuccaagauucuag

SEQ ID NO: 1362359 - RNA, 18 nt, Human
agaugcuccaagauucua

SEQ ID NO: 1362360 - RNA, 15 nt, Human
agaugcuccaagauu

SEQ ID NO: 1362361 - RNA, 13 nt, Human
agaugcuccaaga

SEQ ID NO: 1362362 - RNA, 22 nt, Human
agauggaaaauucauuuuuuaa

SEQ ID NO: 1362363 - RNA, 18 nt, Human
agauggaaaauucauuuu

SEQ ID NO: 1362364 - RNA, 18 nt, Human
agaugcuuuuaacagagu

SEQ ID NO: 1362365 - RNA, 20 nt, Human
agaugcuuuuaacagagucu

SEQ ID NO: 1362366 - RNA, 11 nt, Human
agaugcuuuua

SEQ ID NO: 1362367 - RNA, 21 nt, Human
ugaccccagggcacaggagcu

SEQ ID NO: 1362368 - RNA, 14 nt, Human
ugacccccagcucc

SEQ ID NO: 1362369 - RNA, 22 nt, Human
ugaccccagggcacaggagcua

SEQ ID NO: 1362370 - RNA, 24 nt, Human
agauguguguugauacuguugcac

SEQ ID NO: 1362371 - RNA, 23 nt, Human
agauguguguugauacuguugca

SEQ ID NO: 1362372 - RNA, 16 nt, Human
ugacccagugccccca

SEQ ID NO: 1362373 - RNA, 18 nt, Human
ugacccagugcccccacu

SEQ ID NO: 1362374 - RNA, 17 nt, Human
ugacccagugcccccac

SEQ ID NO: 1362375 - RNA, 23 nt, Human
ugacccagugcccccacugacca

SEQ ID NO: 1362376 - RNA, 22 nt, Human
agauguguguugauacuguugc

SEQ ID NO: 1362377 - RNA, 21 nt, Human
agauguguguugauacuguug

SEQ ID NO: 1362378 - RNA, 20 nt, Human
agauguguguugauacuguu

SEQ ID NO: 1362379 - RNA, 19 nt, Human
agauguguguugauacugu

SEQ ID NO: 1362380 - RNA, 18 nt, Human
agauguguguugauacug

SEQ ID NO: 1362381 - RNA, 17 nt, Human
agauguguguugauacu

SEQ ID NO: 1362382 - RNA, 15 nt, Human
agauguguguugaua

SEQ ID NO: 1362383 - RNA, 13 nt, Human
agauguguguuga

SEQ ID NO: 1362384 - RNA, 15 nt, Human
agauguguucacaau

SEQ ID NO: 1362385 - RNA, 18 nt, Human
agauguguucacaaugga

SEQ ID NO: 1362386 - RNA, 17 nt, Human
ugaauuuagugagcaua

SEQ ID NO: 1362387 - RNA, 21 nt, Human
ugaauuuagugagcauaggug

SEQ ID NO: 1362388 - RNA, 15 nt, Human
ugaauuuagugagca

SEQ ID NO: 1362389 - RNA, 19 nt, Human
ugaauuuaauaaucuguag

SEQ ID NO: 1362390 - RNA, 23 nt, Human
agaucagaugcuccaagauucua

SEQ ID NO: 1362391 - RNA, 20 nt, Human
agaucagcaaaccggggccu

SEQ ID NO: 1362392 - RNA, 22 nt, Human
agaucagaugcuccaagauucu

SEQ ID NO: 1362393 - RNA, 18 nt, Human
agaucagaugcuccaaga

SEQ ID NO: 1362394 - RNA, 23 nt, Human
agaucacuuucucaguuuucaua

SEQ ID NO: 1362395 - RNA, 19 nt, Human
agaucacuuucucaguuuu

SEQ ID NO: 1362396 - RNA, 18 nt, Human
agaucacuuucucaguuu

SEQ ID NO: 1362397 - RNA, 22 nt, Human
ugacaguauuauacgcuggcaa

SEQ ID NO: 1362398 - RNA, 19 nt, Human
ugacauugcguuugaccuu

SEQ ID NO: 1362399 - RNA, 15 nt, Human
ugacauugcguuuga

SEQ ID NO: 1362400 - RNA, 20 nt, Human
ugacauucugaaugcuucua

SEQ ID NO: 1362401 - RNA, 19 nt, Human
ugacauucugaaugcuucu

SEQ ID NO: 1362402 - RNA, 22 nt, Human
ugacaguccgucaaaacagauu

SEQ ID NO: 1362403 - RNA, 18 nt, Human
ugacaguccgucaaaaca

SEQ ID NO: 1362404 - RNA, 21 nt, Human
ugacaguauuauacgcuggca

SEQ ID NO: 1362405 - RNA, 12 nt, Human
ugacauuuuaca

SEQ ID NO: 1362406 - RNA, 14 nt, Human
ugacauuuuacauu

SEQ ID NO: 1362407 - RNA, 16 nt, Human
ugaccaaaguccuuuu

SEQ ID NO: 1362408 - RNA, 14 nt, Human
ugaccaaaguccuu

SEQ ID NO: 1362409 - RNA, 23 nt, Human
ugaccaaaaguuacauguuugca

SEQ ID NO: 1362410 - RNA, 22 nt, Human
ugaccaaaaguuacauguuugc

SEQ ID NO: 1362411 - RNA, 16 nt, Human
ugaccaaaaguuacau

SEQ ID NO: 1362412 - RNA, 15 nt, Human
ugaccaaaaguuaca

SEQ ID NO: 1362413 - RNA, 15 nt, Human
ugacauuuuacauua

SEQ ID NO: 1362414 - RNA, 16 nt, Human
ugacauuuuacauuaa

SEQ ID NO: 1362415 - RNA, 23 nt, Human
agaugauuucaguucuaggaaaa

SEQ ID NO: 1362416 - RNA, 20 nt, Human
agaugauuucaguucuagga

SEQ ID NO: 1362417 - RNA, 22 nt, Human
agaugauuaaauaagauucuaa

SEQ ID NO: 1362418 - RNA, 21 nt, Human
agaugauuaaauaagauucua

SEQ ID NO: 1362419 - RNA, 20 nt, Human
agaugauuaaauaagauucu

SEQ ID NO: 1362420 - RNA, 19 nt, Human
agaugauuaaauaagauuc

SEQ ID NO: 1362421 - RNA, 18 nt, Human
agaugauuaaauaagauu

SEQ ID NO: 1362422 - RNA, 19 nt, Human
agaugauggaugccaauau

SEQ ID NO: 1362423 - RNA, 16 nt, Human
agaugauggaugccaa

SEQ ID NO: 1362424 - RNA, 12 nt, Human
agauccaggacu

SEQ ID NO: 1362425 - RNA, 15 nt, Human
agauccuuccuuuug

SEQ ID NO: 1362426 - RNA, 13 nt, Human
agauccaggacua

SEQ ID NO: 1362427 - RNA, 14 nt, Human
agauccagccuggg

SEQ ID NO: 1362428 - RNA, 13 nt, Human
agauccagccugg

SEQ ID NO: 1362429 - RNA, 21 nt, Human
agauccaaaagaagcccccag

SEQ ID NO: 1362430 - RNA, 23 nt, Human
agauccaaaagaagcccccagcu

SEQ ID NO: 1362431 - RNA, 18 nt, Human
agauccaaaagaagcccc

SEQ ID NO: 1362432 - RNA, 14 nt, Human
ugaccacagcacag

SEQ ID NO: 1362433 - RNA, 21 nt, Human
agaucauugugaaauuauuca

SEQ ID NO: 1362434 - RNA, 11 nt, Human
agaucacuuuc

SEQ ID NO: 1362435 - RNA, 21 nt, Human
agauauuuuuaucuuuauaug

SEQ ID NO: 1362436 - RNA, 20 nt, Human
agauauuuuuaucuuuauau

SEQ ID NO: 1362437 - RNA, 19 nt, Human
agauauuuuuaucuuuaua

SEQ ID NO: 1362438 - RNA, 17 nt, Human
agauauuuuuaucuuua

SEQ ID NO: 1362439 - RNA, 23 nt, Human
agauacccuacgcuguccagaaa

SEQ ID NO: 1362440 - RNA, 22 nt, Human
agauacccuacgcuguccagaa

SEQ ID NO: 1362441 - RNA, 23 nt, Human
agauaccagcgaggaggcuccag

SEQ ID NO: 1362442 - RNA, 21 nt, Human
agauaccagcgaggaggcucc

SEQ ID NO: 1362443 - RNA, 19 nt, Human
agauaccagcgaggaggcu

SEQ ID NO: 1362444 - RNA, 14 nt, Human
agauaccagcgagg

SEQ ID NO: 1362445 - RNA, 20 nt, Human
agauacagaacucuuucaaa

SEQ ID NO: 1362446 - RNA, 18 nt, Human
agauacagaacucuuuca

SEQ ID NO: 1362447 - RNA, 14 nt, Human
agauaauucacugu

SEQ ID NO: 1362448 - RNA, 12 nt, Human
agaguuuuggga

SEQ ID NO: 1362449 - RNA, 13 nt, Human
agagugagagaca

SEQ ID NO: 1362450 - RNA, 22 nt, Human
agagugagagacauuaacucau

SEQ ID NO: 1362451 - RNA, 18 nt, Human
agagugagacucagucuu

SEQ ID NO: 1362452 - RNA, 17 nt, Human
agagugaauucccucac

SEQ ID NO: 1362453 - RNA, 15 nt, Human
agauaaacacaagau

SEQ ID NO: 1362454 - RNA, 14 nt, Human
agauaaacacaaga

SEQ ID NO: 1362455 - RNA, 18 nt, Human
agauaaugugaaaauggu

SEQ ID NO: 1362456 - RNA, 13 nt, Human
agauaaugugaaa

SEQ ID NO: 1362457 - RNA, 12 nt, Human
agauaaugugaa

SEQ ID NO: 1362458 - RNA, 23 nt, Human
agauaaucuagaacacaggcaaa

SEQ ID NO: 1362459 - RNA, 16 nt, Human
agauaaucuagaacac

SEQ ID NO: 1362460 - RNA, 13 nt, Human
agauaaucccugu

SEQ ID NO: 1362461 - RNA, 12 nt, Human
agauaauuauaa

SEQ ID NO: 1362462 - RNA, 19 nt, Human
agauaauuaccuacucugg

SEQ ID NO: 1362463 - RNA, 18 nt, Human
agauaagguaaaaugcca

SEQ ID NO: 1362464 - RNA, 18 nt, Human
agauaauacaccacuaca

SEQ ID NO: 1362465 - RNA, 13 nt, Human
agagucuagauuc

SEQ ID NO: 1362466 - RNA, 12 nt, Human
agagucuagauu

SEQ ID NO: 1362467 - RNA, 11 nt, Human
agagucuagau

SEQ ID NO: 1362468 - RNA, 23 nt, Human
agagucuaaagauggaguuucua

SEQ ID NO: 1362469 - RNA, 22 nt, Human
agagucuaaagauggaguuucu

SEQ ID NO: 1362470 - RNA, 17 nt, Human
agagucuaaagauggag

SEQ ID NO: 1362471 - RNA, 14 nt, Human
agagucuaaagaug

SEQ ID NO: 1362472 - RNA, 13 nt, Human
agagucuaaagau

SEQ ID NO: 1362473 - RNA, 12 nt, Human
agagucuaaaga

SEQ ID NO: 1362474 - RNA, 21 nt, Human
ugaauggcuauguuuuuaaug

SEQ ID NO: 1362475 - RNA, 20 nt, Human
ugaauggcuauguuuuuaau

SEQ ID NO: 1362476 - RNA, 23 nt, Human
ugaauggccuucauaucauccac

SEQ ID NO: 1362477 - RNA, 15 nt, Human
agagucuagauucuc

SEQ ID NO: 1362478 - RNA, 23 nt, Human
agagucuagauucaaagguucua

SEQ ID NO: 1362479 - RNA, 22 nt, Human
agagucuagauucaaagguucu

SEQ ID NO: 1362480 - RNA, 21 nt, Human
agagucuagauucaaagguuc

SEQ ID NO: 1362481 - RNA, 19 nt, Human
agagucuagauucaaaggu

SEQ ID NO: 1362482 - RNA, 17 nt, Human
agagucuagauucaaag

SEQ ID NO: 1362483 - RNA, 15 nt, Human
agagucuagauucaa

SEQ ID NO: 1362484 - RNA, 16 nt, Human
agagugaauucccuca

SEQ ID NO: 1362485 - RNA, 14 nt, Human
agagucuagauucu

SEQ ID NO: 1362486 - RNA, 18 nt, Human
agagucuauuuacggaac

SEQ ID NO: 1362487 - RNA, 17 nt, Human
ugaaugcuucuaaguaa

SEQ ID NO: 1362488 - RNA, 23 nt, Human
ugaaugcuucuaaguaaauacaa

SEQ ID NO: 1362489 - RNA, 22 nt, Human
ugaaugccacugccuucgcuuc

SEQ ID NO: 1362490 - RNA, 21 nt, Human
ugaaugccacugccuucgcuu

SEQ ID NO: 1362491 - RNA, 15 nt, Human
ugaaugccacugccu

SEQ ID NO: 1362492 - RNA, 22 nt, Human
ugaaugcauuuuguuugguauu

SEQ ID NO: 1362493 - RNA, 15 nt, Human
ugaaugcauuuuguu

SEQ ID NO: 1362494 - RNA, 21 nt, Human
ugaaugcauuuuguuugguau

SEQ ID NO: 1362495 - RNA, 12 nt, Human
ugaaugcauuuu

SEQ ID NO: 1362496 - RNA, 13 nt, Human
ugaaugcauuuug

SEQ ID NO: 1362497 - RNA, 14 nt, Human
ugaaugcauuuugu

SEQ ID NO: 1362498 - RNA, 21 nt, Human
ugaauauacagcaggugcuca

SEQ ID NO: 1362499 - RNA, 18 nt, Human
ugaagguuguggccuuug

SEQ ID NO: 1362500 - RNA, 15 nt, Human
ugaagguuguggccu

SEQ ID NO: 1362501 - RNA, 15 nt, Human
ugaaggugcugacgg

SEQ ID NO: 1362502 - RNA, 16 nt, Human
ugaagcuuuuauguga

SEQ ID NO: 1362503 - RNA, 22 nt, Human
ugaaggugauuuaagggcccag

SEQ ID NO: 1362504 - RNA, 20 nt, Human
ugaaggugcugacggccagg

SEQ ID NO: 1362505 - RNA, 19 nt, Human
ugaaggugcugacggccag

SEQ ID NO: 1362506 - RNA, 18 nt, Human
ugaagguggaaauaaacu

SEQ ID NO: 1362507 - RNA, 16 nt, Human
agagcuucccugacuc

SEQ ID NO: 1362508 - RNA, 13 nt, Human
agagcuucccuga

SEQ ID NO: 1362509 - RNA, 20 nt, Human
agagcuucccugacucauuc

SEQ ID NO: 1362510 - RNA, 17 nt, Human
agagcuucccugacuca

SEQ ID NO: 1362511 - RNA, 11 nt, Human
agagcuggugc

SEQ ID NO: 1362512 - RNA, 16 nt, Human
agagcuggcucugagc

SEQ ID NO: 1362513 - RNA, 15 nt, Human
agagcuggcucugag

SEQ ID NO: 1362514 - RNA, 13 nt, Human
agagcuggcucug

SEQ ID NO: 1362515 - RNA, 21 nt, Human
ugaagacaaugacuuacugua

SEQ ID NO: 1362516 - RNA, 12 nt, Human
ucuuuguaauga

SEQ ID NO: 1362517 - RNA, 16 nt, Human
ucuuuguaaugaaaac

SEQ ID NO: 1362518 - RNA, 11 nt, Human
ugaacuuugac

SEQ ID NO: 1362519 - RNA, 13 nt, Human
ucuuuguaaugaa

SEQ ID NO: 1362520 - RNA, 15 nt, Human
ucuuuguaaugaaaa

SEQ ID NO: 1362521 - RNA, 20 nt, Human
ugaagaagcaccaaucauga

SEQ ID NO: 1362522 - RNA, 14 nt, Human
ugaagaagauggua

SEQ ID NO: 1362523 - RNA, 16 nt, Human
ugaacuuugaccucug

SEQ ID NO: 1362524 - RNA, 17 nt, Human
ugaacuuugaccucugc

SEQ ID NO: 1362525 - RNA, 23 nt, Human
ugaagaacugcaggcccuggccu

SEQ ID NO: 1362526 - RNA, 22 nt, Human
ugaagaagcaccaaucaugaau

SEQ ID NO: 1362527 - RNA, 11 nt, Human
ugaagacaaug

SEQ ID NO: 1362528 - RNA, 13 nt, Human
ugaagacaaugac

SEQ ID NO: 1362529 - RNA, 17 nt, Human
ugaagacaaugacuuac

SEQ ID NO: 1362530 - RNA, 19 nt, Human
ugaagcuguugugugaggu

SEQ ID NO: 1362531 - RNA, 16 nt, Human
ugaagcuguuguguga

SEQ ID NO: 1362532 - RNA, 15 nt, Human
ugaagcuguugugug

SEQ ID NO: 1362533 - RNA, 15 nt, Human
ugaagcccucccagg

SEQ ID NO: 1362534 - RNA, 18 nt, Human
ugaagccugaacccaaga

SEQ ID NO: 1362535 - RNA, 21 nt, Human
ugaagccaugaguuccagaaa

SEQ ID NO: 1362536 - RNA, 20 nt, Human
ugaagcagguucccaagcuc

SEQ ID NO: 1362537 - RNA, 19 nt, Human
ugaagcagguucccaagcu

SEQ ID NO: 1362538 - RNA, 21 nt, Human
agaggugggccagucugugga

SEQ ID NO: 1362539 - RNA, 13 nt, Human
agaggugggccag

SEQ ID NO: 1362540 - RNA, 15 nt, Human
agagguggaaaaaca

SEQ ID NO: 1362541 - RNA, 20 nt, Human
ugaagcagccucuccccagg

SEQ ID NO: 1362542 - RNA, 15 nt, Human
ugaagcagccucucc

SEQ ID NO: 1362543 - RNA, 13 nt, Human
ugaagcagccucu

SEQ ID NO: 1362544 - RNA, 16 nt, Human
ugaagauucuuuccca

SEQ ID NO: 1362545 - RNA, 18 nt, Human
agagggaaugugaaauuu

SEQ ID NO: 1362546 - RNA, 12 nt, Human
agagggacagau

SEQ ID NO: 1362547 - RNA, 16 nt, Human
agagggaaugugaaau

SEQ ID NO: 1362548 - RNA, 15 nt, Human
agagggaaugugaaa

SEQ ID NO: 1362549 - RNA, 14 nt, Human
agagggaaugugaa

SEQ ID NO: 1362550 - RNA, 13 nt, Human
agagggaauguga

SEQ ID NO: 1362551 - RNA, 12 nt, Human
agagggaaugug

SEQ ID NO: 1362552 - RNA, 16 nt, Human
agaggugagaaauuua

SEQ ID NO: 1362553 - RNA, 17 nt, Human
agaggugagaaauuuaa

SEQ ID NO: 1362554 - RNA, 24 nt, Human
agaggugaccccagggcacaggag

SEQ ID NO: 1362555 - RNA, 23 nt, Human
agaggugaccccagggcacagga

SEQ ID NO: 1362556 - RNA, 18 nt, Human
agaggugaccccagggca

SEQ ID NO: 1362557 - RNA, 17 nt, Human
agaggugaccccagggc

SEQ ID NO: 1362558 - RNA, 16 nt, Human
agaggugaccccaggg

SEQ ID NO: 1362559 - RNA, 15 nt, Human
agaggugaccccagg

SEQ ID NO: 1362560 - RNA, 15 nt, Human
agagggacgccuggg

SEQ ID NO: 1362561 - RNA, 21 nt, Human
agagggacgccugggggugcc

SEQ ID NO: 1362562 - RNA, 19 nt, Human
agaggccuuuuggaaugug

SEQ ID NO: 1362563 - RNA, 17 nt, Human
agaggcaccaggaagcc

SEQ ID NO: 1362564 - RNA, 18 nt, Human
agaggcaccugucccaga

SEQ ID NO: 1362565 - RNA, 14 nt, Human
agaggcaccaggaa

SEQ ID NO: 1362566 - RNA, 13 nt, Human
agaggcaccagga

SEQ ID NO: 1362567 - RNA, 11 nt, Human
agaggcaccag

SEQ ID NO: 1362568 - RNA, 21 nt, Human
agaggcgcaugaauuugugaa

SEQ ID NO: 1362569 - RNA, 23 nt, Human
agacugugugugcccucugggcu

SEQ ID NO: 1362570 - RNA, 11 nt, Human
agacuguuggg

SEQ ID NO: 1362571 - RNA, 23 nt, Human
agacuguugggguggguauaaaa

SEQ ID NO: 1362572 - RNA, 22 nt, Human
agacugugugugcccucugggc

SEQ ID NO: 1362573 - RNA, 20 nt, Human
agacugugugugcccucugg

SEQ ID NO: 1362574 - RNA, 19 nt, Human
agacugugugugcccucug

SEQ ID NO: 1362575 - RNA, 18 nt, Human
agacugugugugcccucu

SEQ ID NO: 1362576 - RNA, 17 nt, Human
agacugugugugcccuc

SEQ ID NO: 1362577 - RNA, 16 nt, Human
agacugugugugcccu

SEQ ID NO: 1362578 - RNA, 17 nt, Human
agacugugauucagaaa

SEQ ID NO: 1362579 - RNA, 16 nt, Human
agacugugauucagaa

SEQ ID NO: 1362580 - RNA, 18 nt, Human
agacugucuggccccccu

SEQ ID NO: 1362581 - RNA, 17 nt, Human
agacucuaagaaagaac

SEQ ID NO: 1362582 - RNA, 16 nt, Human
agacucuaagaaagaa

SEQ ID NO: 1362583 - RNA, 21 nt, Human
agacuggauaguccgucucug

SEQ ID NO: 1362584 - RNA, 15 nt, Human
agacuuggauucuuu

SEQ ID NO: 1362585 - RNA, 21 nt, Human
agacuuggauucuuuccauuu

SEQ ID NO: 1362586 - RNA, 15 nt, Human
agacuugacagugga

SEQ ID NO: 1362587 - RNA, 14 nt, Human
agacuugacagugg

SEQ ID NO: 1362588 - RNA, 13 nt, Human
agacuugacagug

SEQ ID NO: 1362589 - RNA, 12 nt, Human
agacuugacagu

SEQ ID NO: 1362590 - RNA, 22 nt, Human
agacuucaagcauggcuauuuu

SEQ ID NO: 1362591 - RNA, 19 nt, Human
agacuucaagcauggcuau

SEQ ID NO: 1362592 - RNA, 22 nt, Human
agacuuugcuaaagacaugaag

SEQ ID NO: 1362593 - RNA, 15 nt, Human
agagaaugagagaca

SEQ ID NO: 1362594 - RNA, 21 nt, Human
agagaaugcccuucuccuuau

SEQ ID NO: 1362595 - RNA, 17 nt, Human
agagacacacugaagaa

SEQ ID NO: 1362596 - RNA, 16 nt, Human
ucuuuggggugccccu

SEQ ID NO: 1362597 - RNA, 20 nt, Human
ucuuugggccagacaugcca

SEQ ID NO: 1362598 - RNA, 16 nt, Human
ucuuugggccagacau

SEQ ID NO: 1362599 - RNA, 15 nt, Human
ucuuugggccagaca

SEQ ID NO: 1362600 - RNA, 20 nt, Human
agagaccagggcuccagccc

SEQ ID NO: 1362601 - RNA, 19 nt, Human
agagaccagggcuccagcc

SEQ ID NO: 1362602 - RNA, 14 nt, Human
agagaccagggcuc

SEQ ID NO: 1362603 - RNA, 13 nt, Human
agagaccagggcu

SEQ ID NO: 1362604 - RNA, 20 nt, Human
agagacacacugaagaagca

SEQ ID NO: 1362605 - RNA, 18 nt, Human
agagacacacugaagaag

SEQ ID NO: 1362606 - RNA, 12 nt, Human
agacucuaagaa

SEQ ID NO: 1362607 - RNA, 21 nt, Human
ucuuuagauagcccuguccug

SEQ ID NO: 1362608 - RNA, 23 nt, Human
ucuuuagauagcccuguccuggu

SEQ ID NO: 1362609 - RNA, 20 nt, Human
ucuuuagauagcccuguccu

SEQ ID NO: 1362610 - RNA, 19 nt, Human
ucuuuagaguuagacuguu

SEQ ID NO: 1362611 - RNA, 14 nt, Human
ucuuuagaguuaga

SEQ ID NO: 1362612 - RNA, 16 nt, Human
ucuuuagaguuagacu

SEQ ID NO: 1362613 - RNA, 17 nt, Human
ucuuuagaguuagacug

SEQ ID NO: 1362614 - RNA, 18 nt, Human
ucuuuagaguuagacugu

SEQ ID NO: 1362615 - RNA, 11 nt, Human
ucuuuagaaca

SEQ ID NO: 1362616 - RNA, 12 nt, Human
ucuuuagaguua

SEQ ID NO: 1362617 - RNA, 12 nt, Human
ucuuuacuuuua

SEQ ID NO: 1362618 - RNA, 23 nt, Human
ucuuuacaaaacaaacucauuca

SEQ ID NO: 1362619 - RNA, 22 nt, Human
ucuuuacaaaacaaacucauuc

SEQ ID NO: 1362620 - RNA, 14 nt, Human
ucuuuacaaaacaa

SEQ ID NO: 1362621 - RNA, 15 nt, Human
ucuuggagcugugag

SEQ ID NO: 1362622 - RNA, 14 nt, Human
ucuuggagcuguga

SEQ ID NO: 1362623 - RNA, 23 nt, Human
ucuuggagcugugaguucucccu

SEQ ID NO: 1362624 - RNA, 19 nt, Human
ucuuggagaagucucagcu

SEQ ID NO: 1362625 - RNA, 20 nt, Human
ucuuggagaagucucagcua

SEQ ID NO: 1362626 - RNA, 23 nt, Human
ucuuuaaagugacuaauggcaug

SEQ ID NO: 1362627 - RNA, 20 nt, Human
ucuuuaaaauguaaagccau

SEQ ID NO: 1362628 - RNA, 15 nt, Human
ucuuuaaaauuacaa

SEQ ID NO: 1362629 - RNA, 20 nt, Human
ucuuuaaaauuacaacuaag

SEQ ID NO: 1362630 - RNA, 17 nt, Human
agaccuacuguucuaaa

SEQ ID NO: 1362631 - RNA, 16 nt, Human
agaccuacuguucuaa

SEQ ID NO: 1362632 - RNA, 15 nt, Human
agaccuacuguucua

SEQ ID NO: 1362633 - RNA, 22 nt, Human
agaccuacagggggucuggcug

SEQ ID NO: 1362634 - RNA, 23 nt, Human
agaccuacagggggucuggcugg

SEQ ID NO: 1362635 - RNA, 21 nt, Human
agaccuacagggggucuggcu

SEQ ID NO: 1362636 - RNA, 19 nt, Human
agaccuacagggggucugg

SEQ ID NO: 1362637 - RNA, 14 nt, Human
agaccuacaggggg

SEQ ID NO: 1362638 - RNA, 11 nt, Human
agaccuacagg

SEQ ID NO: 1362639 - RNA, 21 nt, Human
agaccuaaucucuguaaagcu

SEQ ID NO: 1362640 - RNA, 19 nt, Human
agaccuaaucucuguaaag

SEQ ID NO: 1362641 - RNA, 19 nt, Human
agaccuaacgagaaauaga

SEQ ID NO: 1362642 - RNA, 22 nt, Human
agacccuuucuucagcucugaa

SEQ ID NO: 1362643 - RNA, 18 nt, Human
agacccuugacaccugcu

SEQ ID NO: 1362644 - RNA, 14 nt, Human
agacccuggaggcc

SEQ ID NO: 1362645 - RNA, 12 nt, Human
agacccuggagg

SEQ ID NO: 1362646 - RNA, 17 nt, Human
agacaugugacauuuau

SEQ ID NO: 1362647 - RNA, 16 nt, Human
agacaugugacauuua

SEQ ID NO: 1362648 - RNA, 15 nt, Human
agacaugugacauuu

SEQ ID NO: 1362649 - RNA, 14 nt, Human
agacaugugacauu

SEQ ID NO: 1362650 - RNA, 13 nt, Human
agacaugugacau

SEQ ID NO: 1362651 - RNA, 12 nt, Human
agacaugugaca

SEQ ID NO: 1362652 - RNA, 20 nt, Human
agacaugucuguucuacaua

SEQ ID NO: 1362653 - RNA, 18 nt, Human
agacaugucuguucuaca

SEQ ID NO: 1362654 - RNA, 14 nt, Human
ucuuccucagccag

SEQ ID NO: 1362655 - RNA, 15 nt, Human
ucuuccucagccagc

SEQ ID NO: 1362656 - RNA, 13 nt, Human
ucuuccucagcca

SEQ ID NO: 1362657 - RNA, 12 nt, Human
ucuuccucagcc

SEQ ID NO: 1362658 - RNA, 23 nt, Human
ucuuccuaguuuucuccucccag

SEQ ID NO: 1362659 - RNA, 21 nt, Human
ucuuccuaguuuucuccuccc

SEQ ID NO: 1362660 - RNA, 19 nt, Human
ucuuccuaguuuucuccuc

SEQ ID NO: 1362661 - RNA, 20 nt, Human
ucuuccuacuggucucucua

SEQ ID NO: 1362662 - RNA, 17 nt, Human
ucuuccuacuggucucu

SEQ ID NO: 1362663 - RNA, 17 nt, Human
ucuuccuaccuauccca

SEQ ID NO: 1362664 - RNA, 20 nt, Human
ucuuccuaccaagucaaacu

SEQ ID NO: 1362665 - RNA, 21 nt, Human
ucuuccuaccaagucaaacuu

SEQ ID NO: 1362666 - RNA, 23 nt, Human
ucuuccggccccuccccuccaaa

SEQ ID NO: 1362667 - RNA, 20 nt, Human
ucuuccggccccuccccucc

SEQ ID NO: 1362668 - RNA, 12 nt, Human
agacccugcccu

SEQ ID NO: 1362669 - RNA, 16 nt, Human
agaccugauccuggag

SEQ ID NO: 1362670 - RNA, 15 nt, Human
agaccugauccugga

SEQ ID NO: 1362671 - RNA, 14 nt, Human
agaccugauccugg

SEQ ID NO: 1362672 - RNA, 16 nt, Human
agaccugagaauguau

SEQ ID NO: 1362673 - RNA, 19 nt, Human
agaccuacuguucuaaagc

SEQ ID NO: 1362674 - RNA, 18 nt, Human
agaccuacuguucuaaag

SEQ ID NO: 1362675 - RNA, 22 nt, Human
agaccugauccuggaggcccag

SEQ ID NO: 1362676 - RNA, 21 nt, Human
agaccugauccuggaggccca

SEQ ID NO: 1362677 - RNA, 19 nt, Human
agaccugauccuggaggcc

SEQ ID NO: 1362678 - RNA, 18 nt, Human
agaccugauccuggaggc

SEQ ID NO: 1362679 - RNA, 17 nt, Human
agacuaucuuacuauuu

SEQ ID NO: 1362680 - RNA, 15 nt, Human
ucuuggacaaaucac

SEQ ID NO: 1362681 - RNA, 16 nt, Human
ucuuggaacuugccug

SEQ ID NO: 1362682 - RNA, 20 nt, Human
ucuuggaacuugccugccuu

SEQ ID NO: 1362683 - RNA, 15 nt, Human
ucuuggaacuugccu

SEQ ID NO: 1362684 - RNA, 21 nt, Human
ucuuggaacauuggaauguuc

SEQ ID NO: 1362685 - RNA, 17 nt, Human
ucuuggagaagucucag

SEQ ID NO: 1362686 - RNA, 16 nt, Human
ucuuggagaagucuca

SEQ ID NO: 1362687 - RNA, 12 nt, Human
ucuuggagaagu

SEQ ID NO: 1362688 - RNA, 14 nt, Human
ucuugcuuucuuug

SEQ ID NO: 1362689 - RNA, 18 nt, Human
ucuugaucaguuaagaaa

SEQ ID NO: 1362690 - RNA, 23 nt, Human
ucuugaucaguuaagaaauuuca

SEQ ID NO: 1362691 - RNA, 23 nt, Human
agaccugauccuggaggcccagu

SEQ ID NO: 1362692 - RNA, 12 nt, Human
ucuugaugacca

SEQ ID NO: 1362693 - RNA, 14 nt, Human
ucuugaugccuggc

SEQ ID NO: 1362694 - RNA, 21 nt, Human
ucuugaugcaugcacuguucc

SEQ ID NO: 1362695 - RNA, 13 nt, Human
ucuugaugcaugc

SEQ ID NO: 1362696 - RNA, 20 nt, Human
ucuugaugccuggcggggug

SEQ ID NO: 1362697 - RNA, 16 nt, Human
ucuucaccaaaucuug

SEQ ID NO: 1362698 - RNA, 17 nt, Human
ucuucaccauuuggcaa

SEQ ID NO: 1362699 - RNA, 14 nt, Human
ucuucaaaugccug

SEQ ID NO: 1362700 - RNA, 16 nt, Human
ucuuauuuuuuucuau

SEQ ID NO: 1362701 - RNA, 20 nt, Human
ucuuccaguuugcuuugccc

SEQ ID NO: 1362702 - RNA, 21 nt, Human
ucuuccagucuuccugacacu

SEQ ID NO: 1362703 - RNA, 18 nt, Human
ucuuccagucuuccugac

SEQ ID NO: 1362704 - RNA, 22 nt, Human
ucuuccaguuugcuuugcccuu

SEQ ID NO: 1362705 - RNA, 16 nt, Human
ucuucccucucugcag

SEQ ID NO: 1362706 - RNA, 21 nt, Human
ucuucccuggaaaccuuccac

SEQ ID NO: 1362707 - RNA, 20 nt, Human
ucuuaauuauuauuuguguu

SEQ ID NO: 1362708 - RNA, 11 nt, Human
ucuuagaaauu

SEQ ID NO: 1362709 - RNA, 12 nt, Human
ucuuaauuauua

SEQ ID NO: 1362710 - RNA, 15 nt, Human
ucuuagaaauuuauu

SEQ ID NO: 1362711 - RNA, 12 nt, Human
ucuuagaaauuu

SEQ ID NO: 1362712 - RNA, 22 nt, Human
ucuuagaugcaguucugaagaa

SEQ ID NO: 1362713 - RNA, 19 nt, Human
agacagggucaaaguguuu

SEQ ID NO: 1362714 - RNA, 21 nt, Human
agacagggaauuaggccccca

SEQ ID NO: 1362715 - RNA, 22 nt, Human
agacaggcuggaagauagcugu

SEQ ID NO: 1362716 - RNA, 15 nt, Human
agacaggcuggaaga

SEQ ID NO: 1362717 - RNA, 20 nt, Human
agacaggcucuuagcagcuu

SEQ ID NO: 1362718 - RNA, 15 nt, Human
agacaggcucuuagc

SEQ ID NO: 1362719 - RNA, 22 nt, Human
agacaggucccuccccuucucu

SEQ ID NO: 1362720 - RNA, 22 nt, Human
agacagggaauuaggcccccau

SEQ ID NO: 1362721 - RNA, 23 nt, Human
agacaggguuucaccauguugcc

SEQ ID NO: 1362722 - RNA, 18 nt, Human
agacaguauauaacuaac

SEQ ID NO: 1362723 - RNA, 19 nt, Human
ucuuaauauguucuuuuaa

SEQ ID NO: 1362724 - RNA, 20 nt, Human
agacacuccccgaagucuuu

SEQ ID NO: 1362725 - RNA, 17 nt, Human
agacaccguucauucag

SEQ ID NO: 1362726 - RNA, 16 nt, Human
agacacccaggacuua

SEQ ID NO: 1362727 - RNA, 15 nt, Human
agacacccaggacuu

SEQ ID NO: 1362728 - RNA, 14 nt, Human
agacacccaggacu

SEQ ID NO: 1362729 - RNA, 13 nt, Human
agacacccaggac

SEQ ID NO: 1362730 - RNA, 12 nt, Human
agacacccagga

SEQ ID NO: 1362731 - RNA, 18 nt, Human
agacaccaaaguucuaau

SEQ ID NO: 1362732 - RNA, 17 nt, Human
agacaccaaaguucuaa

SEQ ID NO: 1362733 - RNA, 16 nt, Human
agacaccaaaguucua

SEQ ID NO: 1362734 - RNA, 15 nt, Human
agacaccaaaguucu

SEQ ID NO: 1362735 - RNA, 14 nt, Human
agacaccaaaguuc

SEQ ID NO: 1362736 - RNA, 13 nt, Human
agacaccaaaguu

SEQ ID NO: 1362737 - RNA, 18 nt, Human
agaauuugagugcucuga

SEQ ID NO: 1362738 - RNA, 21 nt, Human
agaauuugauaugugaacagu

SEQ ID NO: 1362739 - RNA, 20 nt, Human
agaauuugauaugugaacag

SEQ ID NO: 1362740 - RNA, 19 nt, Human
agaauuugauaugugaaca

SEQ ID NO: 1362741 - RNA, 18 nt, Human
agaauuugauaugugaac

SEQ ID NO: 1362742 - RNA, 17 nt, Human
agaauuugagugcucug

SEQ ID NO: 1362743 - RNA, 17 nt, Human
agaauuugauaugugaa

SEQ ID NO: 1362744 - RNA, 23 nt, Human
agacagcuucucauccugcaggc

SEQ ID NO: 1362745 - RNA, 22 nt, Human
agacagcuucucauccugcagg

SEQ ID NO: 1362746 - RNA, 14 nt, Human
agacagacuagaag

SEQ ID NO: 1362747 - RNA, 18 nt, Human
agacacugaaaaaucuaa

SEQ ID NO: 1362748 - RNA, 23 nt, Human
agacacuccccgaagucuuuugu

SEQ ID NO: 1362749 - RNA, 22 nt, Human
agacacuccccgaagucuuuug

SEQ ID NO: 1362750 - RNA, 20 nt, Human
agacagaaucucagucuguc

SEQ ID NO: 1362751 - RNA, 19 nt, Human
ucugggugcuacuggggaa

SEQ ID NO: 1362752 - RNA, 18 nt, Human
ucugggugcuacugggga

SEQ ID NO: 1362753 - RNA, 17 nt, Human
ucuggucgcuccugccc

SEQ ID NO: 1362754 - RNA, 15 nt, Human
ucuggucgcuccugc

SEQ ID NO: 1362755 - RNA, 13 nt, Human
ucugguccuuuuu

SEQ ID NO: 1362756 - RNA, 14 nt, Human
ucuggguggcucac

SEQ ID NO: 1362757 - RNA, 22 nt, Human
ucuggguggcucacucagcacu

SEQ ID NO: 1362758 - RNA, 13 nt, Human
ucuggguggcccu

SEQ ID NO: 1362759 - RNA, 21 nt, Human
agaaggaaaauuuuagcgugc

SEQ ID NO: 1362760 - RNA, 11 nt, Human
agaaggaaggc

SEQ ID NO: 1362761 - RNA, 17 nt, Human
agaaggaaggcagggag

SEQ ID NO: 1362762 - RNA, 19 nt, Human
agaaggaaggcagggagga

SEQ ID NO: 1362763 - RNA, 21 nt, Human
ucuggggcaggcugggccaug

SEQ ID NO: 1362764 - RNA, 20 nt, Human
ucuggggcaggcugggccau

SEQ ID NO: 1362765 - RNA, 19 nt, Human
ucuggggcaggcugggcca

SEQ ID NO: 1362766 - RNA, 18 nt, Human
ucuggggcaggcugggcc

SEQ ID NO: 1362767 - RNA, 17 nt, Human
ucuggggcaggcugggc

SEQ ID NO: 1362768 - RNA, 23 nt, Human
ucuggggagcgggucugcuccca

SEQ ID NO: 1362769 - RNA, 19 nt, Human
ucuggggagcgggucugcu

SEQ ID NO: 1362770 - RNA, 22 nt, Human
ucuggggagcaggcagccagca

SEQ ID NO: 1362771 - RNA, 21 nt, Human
ucuggggagcaggcagccagc

SEQ ID NO: 1362772 - RNA, 19 nt, Human
ucuggggagcaggcagcca

SEQ ID NO: 1362773 - RNA, 17 nt, Human
ucuggggagcaggcagc

SEQ ID NO: 1362774 - RNA, 20 nt, Human
agaaggaaggcagggaggag

SEQ ID NO: 1362775 - RNA, 21 nt, Human
agaaggaaggcagggaggagg

SEQ ID NO: 1362776 - RNA, 12 nt, Human
ucugucaguucu

SEQ ID NO: 1362777 - RNA, 19 nt, Human
ucugucagucacagccacc

SEQ ID NO: 1362778 - RNA, 17 nt, Human
ucugucagucacagcca

SEQ ID NO: 1362779 - RNA, 13 nt, Human
ucugucagucaca

SEQ ID NO: 1362780 - RNA, 14 nt, Human
ucugucagcugcaa

SEQ ID NO: 1362781 - RNA, 13 nt, Human
ucugucagcugca

SEQ ID NO: 1362782 - RNA, 20 nt, Human
ucuguaggguaauuaguaac

SEQ ID NO: 1362783 - RNA, 22 nt, Human
ucuguagggauuuuuggcuaca

SEQ ID NO: 1362784 - RNA, 14 nt, Human
ucuggucucgaacu

SEQ ID NO: 1362785 - RNA, 23 nt, Human
ucuguagguugcacacuuuggua

SEQ ID NO: 1362786 - RNA, 21 nt, Human
ucuguagguugcacacuuugg

SEQ ID NO: 1362787 - RNA, 20 nt, Human
ucuguagguugcacacuuug

SEQ ID NO: 1362788 - RNA, 19 nt, Human
ucuguagguugcacacuuu

SEQ ID NO: 1362789 - RNA, 18 nt, Human
ucuguagguugcacacuu

SEQ ID NO: 1362790 - RNA, 17 nt, Human
ucuguagguugcacacu

SEQ ID NO: 1362791 - RNA, 16 nt, Human
ucuguagguugcacac

SEQ ID NO: 1362792 - RNA, 15 nt, Human
ucuguagguugcaca

SEQ ID NO: 1362793 - RNA, 20 nt, Human
ucuguauaaaugucuuuaau

SEQ ID NO: 1362794 - RNA, 15 nt, Human
ucuguauaaaugucu

SEQ ID NO: 1362795 - RNA, 18 nt, Human
ucugugccccuuccgcca

SEQ ID NO: 1362796 - RNA, 17 nt, Human
ucugugccuuguuuuuu

SEQ ID NO: 1362797 - RNA, 16 nt, Human
ucugugccuucgucuu

SEQ ID NO: 1362798 - RNA, 17 nt, Human
ucugugccugaauauuu

SEQ ID NO: 1362799 - RNA, 15 nt, Human
ucugugccugaauau

SEQ ID NO: 1362800 - RNA, 20 nt, Human
ucugugccccuuccgccacu

SEQ ID NO: 1362801 - RNA, 20 nt, Human
ucuguucuacauagaugcuu

SEQ ID NO: 1362802 - RNA, 17 nt, Human
ucuguuccaaauucagu

SEQ ID NO: 1362803 - RNA, 14 nt, Human
ucuguuccaaauuc

SEQ ID NO: 1362804 - RNA, 13 nt, Human
ucuguuccaaauu

SEQ ID NO: 1362805 - RNA, 13 nt, Human
ucuguuccaaaug

SEQ ID NO: 1362806 - RNA, 12 nt, Human
ucuguuccaaau

SEQ ID NO: 1362807 - RNA, 18 nt, Human
ucuguucauuuccucaaa

SEQ ID NO: 1362808 - RNA, 23 nt, Human
ucuguuccaaauucaguuucaua

SEQ ID NO: 1362809 - RNA, 20 nt, Human
ucuguuccccauggccacuu

SEQ ID NO: 1362810 - RNA, 22 nt, Human
ucuguuccaaauucaguuucau

SEQ ID NO: 1362811 - RNA, 19 nt, Human
ucuguuccaaauucaguuu

SEQ ID NO: 1362812 - RNA, 13 nt, Human
ucugugcuggcca

SEQ ID NO: 1362813 - RNA, 12 nt, Human
ucugugcugugu

SEQ ID NO: 1362814 - RNA, 16 nt, Human
ucuguucauuccucca

SEQ ID NO: 1362815 - RNA, 17 nt, Human
ucuguucauuccuccag

SEQ ID NO: 1362816 - RNA, 14 nt, Human
agaauuuaguguau

SEQ ID NO: 1362817 - RNA, 21 nt, Human
agaauuguuggggguuuuuuu

SEQ ID NO: 1362818 - RNA, 20 nt, Human
agaauuucuaccauuucaga

SEQ ID NO: 1362819 - RNA, 16 nt, Human
agaauuucuaccauuu

SEQ ID NO: 1362820 - RNA, 21 nt, Human
agaauuucuaccauuucagag

SEQ ID NO: 1362821 - RNA, 21 nt, Human
agaauuucuaggacugaauua

SEQ ID NO: 1362822 - RNA, 13 nt, Human
agaauuucuagga

SEQ ID NO: 1362823 - RNA, 23 nt, Human
agaauuguuggggguuuuuuugg

SEQ ID NO: 1362824 - RNA, 17 nt, Human
agaauuguugagauacu

SEQ ID NO: 1362825 - RNA, 16 nt, Human
agaauuguugagauac

SEQ ID NO: 1362826 - RNA, 20 nt, Human
agaauugugucagacuguuu

SEQ ID NO: 1362827 - RNA, 23 nt, Human
agaauugugucagacuguuuagu

SEQ ID NO: 1362828 - RNA, 19 nt, Human
agaauugugucagacuguu

SEQ ID NO: 1362829 - RNA, 23 nt, Human
agaauugugguuuauauauuuaa

SEQ ID NO: 1362830 - RNA, 22 nt, Human
agaauugugguuuauauauuua

SEQ ID NO: 1362831 - RNA, 12 nt, Human
agaauugugguu

SEQ ID NO: 1362832 - RNA, 14 nt, Human
ucuguuuuacaagu

SEQ ID NO: 1362833 - RNA, 18 nt, Human
ucuguuugcuguggaacu

SEQ ID NO: 1362834 - RNA, 13 nt, Human
ucuguuugcugug

SEQ ID NO: 1362835 - RNA, 20 nt, Human
ucuguucuaguuuuuuacuu

SEQ ID NO: 1362836 - RNA, 15 nt, Human
ucuguucuaguuuuu

SEQ ID NO: 1362837 - RNA, 13 nt, Human
ucuguucuaguuu

SEQ ID NO: 1362838 - RNA, 18 nt, Human
ucuguuuuauaauuuugu

SEQ ID NO: 1362839 - RNA, 20 nt, Human
ucuguuuuauaauuuuguga

SEQ ID NO: 1362840 - RNA, 13 nt, Human
ucucugcccaacc

SEQ ID NO: 1362841 - RNA, 12 nt, Human
ucucugcccaac

SEQ ID NO: 1362842 - RNA, 21 nt, Human
ucucugccagugacagacagg

SEQ ID NO: 1362843 - RNA, 15 nt, Human
ucucugccagugaca

SEQ ID NO: 1362844 - RNA, 14 nt, Human
ucucugccagugac

SEQ ID NO: 1362845 - RNA, 19 nt, Human
ucucuccuuguucugauaa

SEQ ID NO: 1362846 - RNA, 15 nt, Human
ucucuccuuguucug

SEQ ID NO: 1362847 - RNA, 20 nt, Human
ucucuccacuuucagcuguc

SEQ ID NO: 1362848 - RNA, 22 nt, Human
ucucuccacuuucagcugucuu

SEQ ID NO: 1362849 - RNA, 20 nt, Human
ucucuccuguaccucuugag

SEQ ID NO: 1362850 - RNA, 22 nt, Human
ucucuccuguaccucuugagcc

SEQ ID NO: 1362851 - RNA, 16 nt, Human
ucuccuuccugugugu

SEQ ID NO: 1362852 - RNA, 21 nt, Human
ucuccuucaugacagccucca

SEQ ID NO: 1362853 - RNA, 14 nt, Human
ucuccuuccugugu

SEQ ID NO: 1362854 - RNA, 13 nt, Human
ucuccuuccugug

SEQ ID NO: 1362855 - RNA, 22 nt, Human
ucucuucugagcuauuucaucu

SEQ ID NO: 1362856 - RNA, 21 nt, Human
ucucuucugagcuauuucauc

SEQ ID NO: 1362857 - RNA, 21 nt, Human
ucucugcucugcgugucaccu

SEQ ID NO: 1362858 - RNA, 18 nt, Human
ucucugcucugcguguca

SEQ ID NO: 1362859 - RNA, 22 nt, Human
ucucugcucugcgugucaccug

SEQ ID NO: 1362860 - RNA, 23 nt, Human
ucucugcucugcgugucaccugu

SEQ ID NO: 1362861 - RNA, 20 nt, Human
ucucugcccuugaucagccc

SEQ ID NO: 1362862 - RNA, 22 nt, Human
ucucugcccuugaucagcccca

SEQ ID NO: 1362863 - RNA, 12 nt, Human
ucucuuucuguc

SEQ ID NO: 1362864 - RNA, 19 nt, Human
ucucuuucccuggucccuu

SEQ ID NO: 1362865 - RNA, 17 nt, Human
ucucuuucccugguccc

SEQ ID NO: 1362866 - RNA, 16 nt, Human
ucucuuucccuggucc

SEQ ID NO: 1362867 - RNA, 14 nt, Human
ucucuuucccuggu

SEQ ID NO: 1362868 - RNA, 12 nt, Human
ucucuuuccaug

SEQ ID NO: 1362869 - RNA, 19 nt, Human
ucucuuuaugucuguggau

SEQ ID NO: 1362870 - RNA, 17 nt, Human
ucucuuuauacagcugu

SEQ ID NO: 1362871 - RNA, 16 nt, Human
ucucuuuauacagcug

SEQ ID NO: 1362872 - RNA, 16 nt, Human
agaaaaauauguacca

SEQ ID NO: 1362873 - RNA, 14 nt, Human
agaaaaauaaagaa

SEQ ID NO: 1362874 - RNA, 13 nt, Human
agaaaaauaaaga

SEQ ID NO: 1362875 - RNA, 20 nt, Human
agaaaaauaaagaaaagaug

SEQ ID NO: 1362876 - RNA, 17 nt, Human
agaaaaauauauacuaa

SEQ ID NO: 1362877 - RNA, 23 nt, Human
agaaaacauaaucuucugccuuc

SEQ ID NO: 1362878 - RNA, 20 nt, Human
agaaaacaggcacugcccug

SEQ ID NO: 1362879 - RNA, 19 nt, Human
agaaaacaaggaugaauua

SEQ ID NO: 1362880 - RNA, 16 nt, Human
agaaacugaggaauuu

SEQ ID NO: 1362881 - RNA, 13 nt, Human
agaaacugaggaa

SEQ ID NO: 1362882 - RNA, 16 nt, Human
agaaaccuacugccca

SEQ ID NO: 1362883 - RNA, 15 nt, Human
agaaaccuacugccc

SEQ ID NO: 1362884 - RNA, 23 nt, Human
agaaaccuacugcccaggcacug

SEQ ID NO: 1362885 - RNA, 22 nt, Human
agaaagaagacaaacuuugcau

SEQ ID NO: 1362886 - RNA, 15 nt, Human
agaaagaagaugaau

SEQ ID NO: 1362887 - RNA, 15 nt, Human
agaaacugcagggaa

SEQ ID NO: 1362888 - RNA, 18 nt, Human
agaaacugaggaauuuuc

SEQ ID NO: 1362889 - RNA, 20 nt, Human
agaaagaacggaagaagaga

SEQ ID NO: 1362890 - RNA, 16 nt, Human
agaaaaccuuucuuca

SEQ ID NO: 1362891 - RNA, 22 nt, Human
agaaaacccuugggccagaagu

SEQ ID NO: 1362892 - RNA, 20 nt, Human
agaaaacccuugggccagaa

SEQ ID NO: 1362893 - RNA, 19 nt, Human
agaaaacccuugggccaga

SEQ ID NO: 1362894 - RNA, 20 nt, Human
agaaaaccagcucagcacug

SEQ ID NO: 1362895 - RNA, 21 nt, Human
agaaaaccagcucagcacugc

SEQ ID NO: 1362896 - RNA, 16 nt, Human
agaaaaccagcucagc

SEQ ID NO: 1362897 - RNA, 15 nt, Human
agaaaacaugccucu

SEQ ID NO: 1362898 - RNA, 22 nt, Human
agaaaacaggcacugcccuggu

SEQ ID NO: 1362899 - RNA, 13 nt, Human
agaaaacauguuu

SEQ ID NO: 1362900 - RNA, 16 nt, Human
agaaaccagcuuccuu

SEQ ID NO: 1362901 - RNA, 15 nt, Human
agaaaccagcuuccu

SEQ ID NO: 1362902 - RNA, 14 nt, Human
agaaaccagcuucc

SEQ ID NO: 1362903 - RNA, 13 nt, Human
agaaaccagcuuc

SEQ ID NO: 1362904 - RNA, 19 nt, Human
agaaaacuuguauuaugug

SEQ ID NO: 1362905 - RNA, 22 nt, Human
agaaaccagcuuccuucagaga

SEQ ID NO: 1362906 - RNA, 20 nt, Human
agaaaccagcuuccuucaga

SEQ ID NO: 1362907 - RNA, 19 nt, Human
agaaaccagcuuccuucag

SEQ ID NO: 1362908 - RNA, 21 nt, Human
agaaaccagcuuccuucagag

SEQ ID NO: 1362909 - RNA, 13 nt, Human
agaaacccugcac

SEQ ID NO: 1362910 - RNA, 11 nt, Human
ucucccaguug

SEQ ID NO: 1362911 - RNA, 23 nt, Human
ucucccaggccccaugaccucca

SEQ ID NO: 1362912 - RNA, 21 nt, Human
ucucccaggccccaugaccuc

SEQ ID NO: 1362913 - RNA, 20 nt, Human
ucucccaggccccaugaccu

SEQ ID NO: 1362914 - RNA, 17 nt, Human
ucucccaggccccauga

SEQ ID NO: 1362915 - RNA, 14 nt, Human
ucucccaggcccca

SEQ ID NO: 1362916 - RNA, 13 nt, Human
ucucccaggcccc

SEQ ID NO: 1362917 - RNA, 12 nt, Human
ucucccaggccc

SEQ ID NO: 1362918 - RNA, 20 nt, Human
ucucccaggcaaggcugugg

SEQ ID NO: 1362919 - RNA, 13 nt, Human
ucucccaggcagg

SEQ ID NO: 1362920 - RNA, 19 nt, Human
ucucccaggcaaggcugug

SEQ ID NO: 1362921 - RNA, 22 nt, Human
ucucccaacucuugcacaguca

SEQ ID NO: 1362922 - RNA, 19 nt, Human
ucucccaacucuugcacag

SEQ ID NO: 1362923 - RNA, 18 nt, Human
ucucccaaaaaacuacuu

SEQ ID NO: 1362924 - RNA, 17 nt, Human
acuguaguucuaagacu

SEQ ID NO: 1362925 - RNA, 16 nt, Human
acuguaguucuaagac

SEQ ID NO: 1362926 - RNA, 15 nt, Human
acuguaguucuaaga

SEQ ID NO: 1362927 - RNA, 13 nt, Human
acuguaguucuaa

SEQ ID NO: 1362928 - RNA, 22 nt, Human
acuguaguaaauaaugcuuuga

SEQ ID NO: 1362929 - RNA, 21 nt, Human
acuguaguaaauaaugcuuug

SEQ ID NO: 1362930 - RNA, 20 nt, Human
acuguaguaaauaaugcuuu

SEQ ID NO: 1362931 - RNA, 19 nt, Human
acuguaguaaauaaugcuu

SEQ ID NO: 1362932 - RNA, 18 nt, Human
acuguaguaaauaaugcu

SEQ ID NO: 1362933 - RNA, 16 nt, Human
acuguaguaaauaaug

SEQ ID NO: 1362934 - RNA, 13 nt, Human
acuguagggaggg

SEQ ID NO: 1362935 - RNA, 15 nt, Human
acuguaggcacacuu

SEQ ID NO: 1362936 - RNA, 15 nt, Human
acuguagcuuuggaa

SEQ ID NO: 1362937 - RNA, 18 nt, Human
ucuccauucugcuccuuc

SEQ ID NO: 1362938 - RNA, 21 nt, Human
ucuccauucugcuccuucccc

SEQ ID NO: 1362939 - RNA, 19 nt, Human
ucuccauugugccuaaguc

SEQ ID NO: 1362940 - RNA, 19 nt, Human
ucuccguuagcuccugugg

SEQ ID NO: 1362941 - RNA, 18 nt, Human
ucuccguuagcuccugug

SEQ ID NO: 1362942 - RNA, 17 nt, Human
ucuccguuagcuccugu

SEQ ID NO: 1362943 - RNA, 16 nt, Human
ucuccguuagcuccug

SEQ ID NO: 1362944 - RNA, 20 nt, Human
ucuccguuagcuccuguggc

SEQ ID NO: 1362945 - RNA, 15 nt, Human
ucuccucucucugua

SEQ ID NO: 1362946 - RNA, 22 nt, Human
acuugugucucugugcuuuuaa

SEQ ID NO: 1362947 - RNA, 21 nt, Human
acuugugucucugugcuuuua

SEQ ID NO: 1362948 - RNA, 16 nt, Human
acuugugucucugugc

SEQ ID NO: 1362949 - RNA, 14 nt, Human
acuugugucucugu

SEQ ID NO: 1362950 - RNA, 22 nt, Human
acuugugucccuaauguguuua

SEQ ID NO: 1362951 - RNA, 23 nt, Human
acuugugucccaugaucccugug

SEQ ID NO: 1362952 - RNA, 20 nt, Human
acuuugacuuuuugcauuua

SEQ ID NO: 1362953 - RNA, 15 nt, Human
acuuugacuuuuugc

SEQ ID NO: 1362954 - RNA, 23 nt, Human
acuuugaccucugcagcaauaaa

SEQ ID NO: 1362955 - RNA, 23 nt, Human
acuuuaccuuuuuuauacauaaa

SEQ ID NO: 1362956 - RNA, 19 nt, Human
acuuugaccucugcagcaa

SEQ ID NO: 1362957 - RNA, 22 nt, Human
acuuguuggcguaggcuacaga

SEQ ID NO: 1362958 - RNA, 23 nt, Human
acuuguuggcguaggcuacagag

SEQ ID NO: 1362959 - RNA, 18 nt, Human
acuuuaccuuuuuuauac

SEQ ID NO: 1362960 - RNA, 19 nt, Human
acuuuaccuuuuuuauaca

SEQ ID NO: 1362961 - RNA, 22 nt, Human
acuuuaccuuuuuuauacauaa

SEQ ID NO: 1362962 - RNA, 21 nt, Human
acuuugacuuuuugcauuuaa

SEQ ID NO: 1362963 - RNA, 23 nt, Human
acuuuggcuuauaauucuuucaa

SEQ ID NO: 1362964 - RNA, 22 nt, Human
acuuuggcuuauaauucuuuca

SEQ ID NO: 1362965 - RNA, 21 nt, Human
acuuuggcuuauaauucuuuc

SEQ ID NO: 1362966 - RNA, 19 nt, Human
acuuuggcuuauaauucuu

SEQ ID NO: 1362967 - RNA, 14 nt, Human
acuuuggcugcaug

SEQ ID NO: 1362968 - RNA, 17 nt, Human
acuuuggcugcaugcga

SEQ ID NO: 1362969 - RNA, 12 nt, Human
acuuuuucugau

SEQ ID NO: 1362970 - RNA, 11 nt, Human
acuuuuucuga

SEQ ID NO: 1362971 - RNA, 15 nt, Human
acuuuuuauugauuu

SEQ ID NO: 1362972 - RNA, 22 nt, Human
acuuuugugaauuaggcuguaa

SEQ ID NO: 1362973 - RNA, 12 nt, Human
acuuuugugaaa

SEQ ID NO: 1362974 - RNA, 12 nt, Human
acuuuuguaaga

SEQ ID NO: 1362975 - RNA, 17 nt, Human
acuuuuguaagacaaag

SEQ ID NO: 1362976 - RNA, 17 nt, Human
acuuugguaccagauaa

SEQ ID NO: 1362977 - RNA, 16 nt, Human
acuuugguaccagaua

SEQ ID NO: 1362978 - RNA, 17 nt, Human
acuuuggggcuaauuua

SEQ ID NO: 1362979 - RNA, 14 nt, Human
acuuuuggcauuuu

SEQ ID NO: 1362980 - RNA, 23 nt, Human
acuuuuuuauuuaaaaaacuaaa

SEQ ID NO: 1362981 - RNA, 15 nt, Human
acuuuuuuauuuaaa

SEQ ID NO: 1362982 - RNA, 18 nt, Human
acuuuuuguucugguccu

SEQ ID NO: 1362983 - RNA, 19 nt, Human
acuuuuugaggcaaaagaa

SEQ ID NO: 1362984 - RNA, 23 nt, Human
acuuuuuguucugguccuuuuug

SEQ ID NO: 1362985 - RNA, 16 nt, Human
acuuuuugaggcaaaa

SEQ ID NO: 1362986 - RNA, 15 nt, Human
acuuuuugaggcaaa

SEQ ID NO: 1362987 - RNA, 12 nt, Human
acuuuuugcagc

SEQ ID NO: 1362988 - RNA, 15 nt, Human
acuuuuucuuuaugu

SEQ ID NO: 1362989 - RNA, 13 nt, Human
acuuuuugcagcu

SEQ ID NO: 1362990 - RNA, 15 nt, Human
acuuuuugcagcuuu

SEQ ID NO: 1362991 - RNA, 13 nt, Human
acuuuuugcauuu

SEQ ID NO: 1362992 - RNA, 17 nt, Human
acuuuuugcagcuuucu

SEQ ID NO: 1362993 - RNA, 21 nt, Human
acuuuuuuucuguaccaguua

SEQ ID NO: 1362994 - RNA, 20 nt, Human
acuuuuuuucuguaccaguu

SEQ ID NO: 1362995 - RNA, 23 nt, Human
acuuuuuuucuguaccaguuaau

SEQ ID NO: 1362996 - RNA, 22 nt, Human
acuuuuuuuuuuuaagaguaaa

SEQ ID NO: 1362997 - RNA, 19 nt, Human
agaaccuaauucaauucaa

SEQ ID NO: 1362998 - RNA, 15 nt, Human
agaaccuaauucaau

SEQ ID NO: 1362999 - RNA, 14 nt, Human
agaaccuaauucaa

SEQ ID NO: 1363000 - RNA, 19 nt, Human
agaaccguagaugauuuca

SEQ ID NO: 1363001 - RNA, 18 nt, Human
agaaccggagagccagcu

SEQ ID NO: 1363002 - RNA, 24 nt, Human
agaaauuuaaacuauaagcaagaa

SEQ ID NO: 1363003 - RNA, 17 nt, Human
agaaauuuaauucagaa

SEQ ID NO: 1363004 - RNA, 20 nt, Human
agaaauuuaaacuauaagca

SEQ ID NO: 1363005 - RNA, 16 nt, Human
agaaauuuaaacuaua

SEQ ID NO: 1363006 - RNA, 13 nt, Human
agaaauuuaaacu

SEQ ID NO: 1363007 - RNA, 21 nt, Human
agaaauuguauauuguaauuu

SEQ ID NO: 1363008 - RNA, 20 nt, Human
agaaauuguauauuguaauu

SEQ ID NO: 1363009 - RNA, 17 nt, Human
agaaauuguauauugua

SEQ ID NO: 1363010 - RNA, 16 nt, Human
agaaauuguauauugu

SEQ ID NO: 1363011 - RNA, 14 nt, Human
agaaauuguauauu

SEQ ID NO: 1363012 - RNA, 18 nt, Human
ucugcagacuucccagcu

SEQ ID NO: 1363013 - RNA, 16 nt, Human
ucugcagacuucccag

SEQ ID NO: 1363014 - RNA, 23 nt, Human
ucugcacuugcgguuccggcaug

SEQ ID NO: 1363015 - RNA, 17 nt, Human
agaaauguacagcaagg

SEQ ID NO: 1363016 - RNA, 16 nt, Human
agaaauguacagcaag

SEQ ID NO: 1363017 - RNA, 19 nt, Human
ucugcagacuucccagcua

SEQ ID NO: 1363018 - RNA, 11 nt, Human
agaaauguguu

SEQ ID NO: 1363019 - RNA, 19 nt, Human
agaagaaaagguucuuacu

SEQ ID NO: 1363020 - RNA, 15 nt, Human
agaagaaaaagaagc

SEQ ID NO: 1363021 - RNA, 13 nt, Human
agaagaaaaagaa

SEQ ID NO: 1363022 - RNA, 15 nt, Human
agaacugaaugagaa

SEQ ID NO: 1363023 - RNA, 14 nt, Human
agaacucuuucaaa

SEQ ID NO: 1363024 - RNA, 13 nt, Human
agaacguggucag

SEQ ID NO: 1363025 - RNA, 21 nt, Human
agaacucaugacggaagaguu

SEQ ID NO: 1363026 - RNA, 20 nt, Human
ucugacuuucuuuuuugaua

SEQ ID NO: 1363027 - RNA, 20 nt, Human
ucugacuucugccuggagac

SEQ ID NO: 1363028 - RNA, 19 nt, Human
ucugacuucugccuggaga

SEQ ID NO: 1363029 - RNA, 17 nt, Human
ucugacuucugccugga

SEQ ID NO: 1363030 - RNA, 16 nt, Human
ucugacuucugccugg

SEQ ID NO: 1363031 - RNA, 15 nt, Human
ucugacuucugccug

SEQ ID NO: 1363032 - RNA, 14 nt, Human
ucugacuucugccu

SEQ ID NO: 1363033 - RNA, 12 nt, Human
ucugacuucugc

SEQ ID NO: 1363034 - RNA, 21 nt, Human
ucugacuguuuccaucaaggg

SEQ ID NO: 1363035 - RNA, 18 nt, Human
ucugaccugcacugggga

SEQ ID NO: 1363036 - RNA, 15 nt, Human
ucugaucaaggccuu

SEQ ID NO: 1363037 - RNA, 21 nt, Human
ucugauaggguuugugacagg

SEQ ID NO: 1363038 - RNA, 22 nt, Human
ucugauaggguuugugacaggg

SEQ ID NO: 1363039 - RNA, 21 nt, Human
ucugagguccugagcacugcc

SEQ ID NO: 1363040 - RNA, 17 nt, Human
ucugauacagaaaaguu

SEQ ID NO: 1363041 - RNA, 16 nt, Human
ucugauacagaaaagu

SEQ ID NO: 1363042 - RNA, 22 nt, Human
ucugagaaaagcuuugaacccu

SEQ ID NO: 1363043 - RNA, 23 nt, Human
ucugacuuucuuuuuugauauag

SEQ ID NO: 1363044 - RNA, 20 nt, Human
ucugagguccugagcacugc

SEQ ID NO: 1363045 - RNA, 19 nt, Human
ucugagguccugagcacug

SEQ ID NO: 1363046 - RNA, 18 nt, Human
ucugagguccugagcacu

SEQ ID NO: 1363047 - RNA, 17 nt, Human
ucugagguccugagcac

SEQ ID NO: 1363048 - RNA, 16 nt, Human
ucugagguccugagca

SEQ ID NO: 1363049 - RNA, 15 nt, Human
ucugagguccugagc

SEQ ID NO: 1363050 - RNA, 14 nt, Human
ucugagguccugag

SEQ ID NO: 1363051 - RNA, 19 nt, Human
ucugaggggcuaccaggaa

SEQ ID NO: 1363052 - RNA, 20 nt, Human
ucugaggggcuaccaggaaa

SEQ ID NO: 1363053 - RNA, 21 nt, Human
ucugaggggcuaccaggaaag

SEQ ID NO: 1363054 - RNA, 16 nt, Human
ucugcuguuccagugg

SEQ ID NO: 1363055 - RNA, 15 nt, Human
ucugcuguuccagug

SEQ ID NO: 1363056 - RNA, 14 nt, Human
ucugcuguuccagu

SEQ ID NO: 1363057 - RNA, 12 nt, Human
ucugcuguagaa

SEQ ID NO: 1363058 - RNA, 13 nt, Human
ucugcuguagaaa

SEQ ID NO: 1363059 - RNA, 23 nt, Human
ucugcucaucauucucugucuca

SEQ ID NO: 1363060 - RNA, 22 nt, Human
ucugcucaucauucucugucuc

SEQ ID NO: 1363061 - RNA, 18 nt, Human
ucugcucaucauucucug

SEQ ID NO: 1363062 - RNA, 15 nt, Human
ucugcucaucauucu

SEQ ID NO: 1363063 - RNA, 14 nt, Human
ucugcucaucauuc

SEQ ID NO: 1363064 - RNA, 18 nt, Human
ucugcuugauuuuugccu

SEQ ID NO: 1363065 - RNA, 22 nt, Human
ucugcuucucugacuucugccu

SEQ ID NO: 1363066 - RNA, 19 nt, Human
ucugcuucucugacuucug

SEQ ID NO: 1363067 - RNA, 16 nt, Human
ucugcuucucugacuu

SEQ ID NO: 1363068 - RNA, 14 nt, Human
ucugcuucucugac

SEQ ID NO: 1363069 - RNA, 12 nt, Human
ucugcucaucau

SEQ ID NO: 1363070 - RNA, 22 nt, Human
ucugcucaguaauuugaggaca

SEQ ID NO: 1363071 - RNA, 16 nt, Human
ucugcucagcucuggg

SEQ ID NO: 1363072 - RNA, 14 nt, Human
ucugcucagcucug

SEQ ID NO: 1363073 - RNA, 16 nt, Human
ucugcuacuuugcugc

SEQ ID NO: 1363074 - RNA, 22 nt, Human
ucugccuuuggggacuuuucuu

SEQ ID NO: 1363075 - RNA, 21 nt, Human
ucugccuuugccaggugacug

SEQ ID NO: 1363076 - RNA, 15 nt, Human
ucugccuuugccagg

SEQ ID NO: 1363077 - RNA, 20 nt, Human
ucugccuucucaugauccaa

SEQ ID NO: 1363078 - RNA, 11 nt, Human
ucugccuuuau

SEQ ID NO: 1363079 - RNA, 16 nt, Human
ucugccuuuauugugu

SEQ ID NO: 1363080 - RNA, 18 nt, Human
ucugccuuuauuguguuu

SEQ ID NO: 1363081 - RNA, 23 nt, Human
ucugccuuuauuguguuugucau

SEQ ID NO: 1363082 - RNA, 20 nt, Human
ucugccuuuauuguguuugu

SEQ ID NO: 1363083 - RNA, 21 nt, Human
agaagaaacaagguuuucagu

SEQ ID NO: 1363084 - RNA, 16 nt, Human
agaagaaagaacggaa

SEQ ID NO: 1363085 - RNA, 13 nt, Human
agaagaaacaagg

SEQ ID NO: 1363086 - RNA, 18 nt, Human
agaagaaagaacggaaga

SEQ ID NO: 1363087 - RNA, 21 nt, Human
agaagaacugaaaucauacuu

SEQ ID NO: 1363088 - RNA, 21 nt, Human
ucuggaguugaucuggaaccc

SEQ ID NO: 1363089 - RNA, 17 nt, Human
ucuggaguugaucugga

SEQ ID NO: 1363090 - RNA, 16 nt, Human
ucuggaguugaucugg

SEQ ID NO: 1363091 - RNA, 21 nt, Human
ucuggagucucacuugucuca

SEQ ID NO: 1363092 - RNA, 17 nt, Human
ucuggaguauucuauaa

SEQ ID NO: 1363093 - RNA, 16 nt, Human
ucuggaaccucagccu

SEQ ID NO: 1363094 - RNA, 15 nt, Human
ucuggaaccucagcc

SEQ ID NO: 1363095 - RNA, 23 nt, Human
ucuggaacccagacucagacauu

SEQ ID NO: 1363096 - RNA, 22 nt, Human
ucuggaacccagacucagacau

SEQ ID NO: 1363097 - RNA, 18 nt, Human
ucuggaacccagacucag

SEQ ID NO: 1363098 - RNA, 17 nt, Human
ucuggaacccagacuca

SEQ ID NO: 1363099 - RNA, 16 nt, Human
ucuggaacccagacuc

SEQ ID NO: 1363100 - RNA, 15 nt, Human
ucuggaacccagacu

SEQ ID NO: 1363101 - RNA, 14 nt, Human
ucuggaacccagac

SEQ ID NO: 1363102 - RNA, 13 nt, Human
ucuggaacccaga

SEQ ID NO: 1363103 - RNA, 16 nt, Human
ucuggcagccucccau

SEQ ID NO: 1363104 - RNA, 23 nt, Human
ucuggcagccacacuucucagga

SEQ ID NO: 1363105 - RNA, 22 nt, Human
ucuggcagccacacuucucagg

SEQ ID NO: 1363106 - RNA, 21 nt, Human
ucuggcagccacacuucucag

SEQ ID NO: 1363107 - RNA, 18 nt, Human
ucuggcagccacacuucu

SEQ ID NO: 1363108 - RNA, 15 nt, Human
ucuggcagccacacu

SEQ ID NO: 1363109 - RNA, 13 nt, Human
ucuggcagccaca

SEQ ID NO: 1363110 - RNA, 12 nt, Human
ucuggcagccac

SEQ ID NO: 1363111 - RNA, 11 nt, Human
ucuggcagcca

SEQ ID NO: 1363112 - RNA, 19 nt, Human
ucuggauuauucugggggc

SEQ ID NO: 1363113 - RNA, 23 nt, Human
ucuggauaacuuccacagggucc

SEQ ID NO: 1363114 - RNA, 21 nt, Human
ucuggauaacuuccacagggu

SEQ ID NO: 1363115 - RNA, 18 nt, Human
ucuggauaacuuccacag

SEQ ID NO: 1363116 - RNA, 12 nt, Human
ucuggauuauau

SEQ ID NO: 1363117 - RNA, 18 nt, Human
ucuggauuauauuaugaa

SEQ ID NO: 1363118 - RNA, 23 nt, Human
agaagccuucaagcucugaggga

SEQ ID NO: 1363119 - RNA, 21 nt, Human
agaagccuucaagcucugagg

SEQ ID NO: 1363120 - RNA, 20 nt, Human
agaagccuucaagcucugag

SEQ ID NO: 1363121 - RNA, 19 nt, Human
agaagccuucaagcucuga

SEQ ID NO: 1363122 - RNA, 18 nt, Human
agaagccuucaagcucug

SEQ ID NO: 1363123 - RNA, 17 nt, Human
agaagccuucaagcucu

SEQ ID NO: 1363124 - RNA, 15 nt, Human
agaagccuucaagcu

SEQ ID NO: 1363125 - RNA, 11 nt, Human
agaagccuuca

SEQ ID NO: 1363126 - RNA, 21 nt, Human
agaagccugggggccuggcug

SEQ ID NO: 1363127 - RNA, 20 nt, Human
agaagccugggggccuggcu

SEQ ID NO: 1363128 - RNA, 19 nt, Human
agaagccugggggccuggc

SEQ ID NO: 1363129 - RNA, 18 nt, Human
agaagccugggggccugg

SEQ ID NO: 1363130 - RNA, 17 nt, Human
agaagccugggggccug

SEQ ID NO: 1363131 - RNA, 14 nt, Human
agaagccugggggc

SEQ ID NO: 1363132 - RNA, 13 nt, Human
agaagccuggggg

SEQ ID NO: 1363133 - RNA, 12 nt, Human
agaagccugggg

SEQ ID NO: 1363134 - RNA, 11 nt, Human
agaagccuggg

SEQ ID NO: 1363135 - RNA, 21 nt, Human
agaagccugcauaauguuucu

SEQ ID NO: 1363136 - RNA, 11 nt, Human
agaagccugca

SEQ ID NO: 1363137 - RNA, 10 nt, Human
agaagccugc

SEQ ID NO: 1363138 - RNA, 12 nt, Human
ucuggccccccu

SEQ ID NO: 1363139 - RNA, 22 nt, Human
ucuggccccccugguccccucc

SEQ ID NO: 1363140 - RNA, 21 nt, Human
ucuggccaguguuuaaaacuu

SEQ ID NO: 1363141 - RNA, 16 nt, Human
ucuggcccaccagggu

SEQ ID NO: 1363142 - RNA, 14 nt, Human
ucuggcccaccagg

SEQ ID NO: 1363143 - RNA, 16 nt, Human
ucuggccaggaagcuu

SEQ ID NO: 1363144 - RNA, 17 nt, Human
ucuggccaggaagcuuu

SEQ ID NO: 1363145 - RNA, 18 nt, Human
ucuggcauuagaauuauu

SEQ ID NO: 1363146 - RNA, 21 nt, Human
ucuggcagccucccauccagg

SEQ ID NO: 1363147 - RNA, 17 nt, Human
agaagcucagcugcauu

SEQ ID NO: 1363148 - RNA, 13 nt, Human
agaagcucagcug

SEQ ID NO: 1363149 - RNA, 18 nt, Human
agaagcuaagguuuagau

SEQ ID NO: 1363150 - RNA, 18 nt, Human
agaagcucagcugcauuc

SEQ ID NO: 1363151 - RNA, 14 nt, Human
agaagcuccaggua

SEQ ID NO: 1363152 - RNA, 22 nt, Human
ugcccccugcaggaaggagcug

SEQ ID NO: 1363153 - RNA, 23 nt, Human
ugcccccugcaggaaggagcugc

SEQ ID NO: 1363154 - RNA, 21 nt, Human
ugcccccugcaggaaggagcu

SEQ ID NO: 1363155 - RNA, 18 nt, Human
ugcccccugcaggaagga

SEQ ID NO: 1363156 - RNA, 17 nt, Human
ugcccccugcaggaagg

SEQ ID NO: 1363157 - RNA, 16 nt, Human
ugcccccugcaggaag

SEQ ID NO: 1363158 - RNA, 14 nt, Human
ugcccccugcagga

SEQ ID NO: 1363159 - RNA, 20 nt, Human
ugccccccagccucuggcau

SEQ ID NO: 1363160 - RNA, 12 nt, Human
ugcccccacccc

SEQ ID NO: 1363161 - RNA, 19 nt, Human
ugccccccagccucuggca

SEQ ID NO: 1363162 - RNA, 15 nt, Human
ugccccccagccucu

SEQ ID NO: 1363163 - RNA, 14 nt, Human
ugccccccagccuc

SEQ ID NO: 1363164 - RNA, 15 nt, Human
ugcccccauuucuga

SEQ ID NO: 1363165 - RNA, 18 nt, Human
ugcccccauuucugaggu

SEQ ID NO: 1363166 - RNA, 22 nt, Human
ugcccccaggguccugggagga

SEQ ID NO: 1363167 - RNA, 21 nt, Human
ugcccccaggguccugggagg

SEQ ID NO: 1363168 - RNA, 18 nt, Human
ugcccccaggguccuggg

SEQ ID NO: 1363169 - RNA, 23 nt, Human
ugcccucauggccccucugaccu

SEQ ID NO: 1363170 - RNA, 19 nt, Human
ugcccucauggccccucug

SEQ ID NO: 1363171 - RNA, 17 nt, Human
ugcccucauggccccuc

SEQ ID NO: 1363172 - RNA, 19 nt, Human
ugcccuaucacccaacgcu

SEQ ID NO: 1363173 - RNA, 17 nt, Human
ugcccccacugaccaga

SEQ ID NO: 1363174 - RNA, 19 nt, Human
ugcccccaccccauucccg

SEQ ID NO: 1363175 - RNA, 22 nt, Human
ugcccccaccccauucccgcag

SEQ ID NO: 1363176 - RNA, 17 nt, Human
ugcccccaccccauucc

SEQ ID NO: 1363177 - RNA, 22 nt, Human
ugcccaagccagaggcuggguu

SEQ ID NO: 1363178 - RNA, 14 nt, Human
agcuauuuuucuaa

SEQ ID NO: 1363179 - RNA, 21 nt, Human
agcuauuuuccaggcuucugc

SEQ ID NO: 1363180 - RNA, 13 nt, Human
agcuauuuuguga

SEQ ID NO: 1363181 - RNA, 13 nt, Human
agcuauuuuccag

SEQ ID NO: 1363182 - RNA, 12 nt, Human
agcuauuuucca

SEQ ID NO: 1363183 - RNA, 20 nt, Human
agcuauuugauguaauacuu

SEQ ID NO: 1363184 - RNA, 17 nt, Human
agcuauuugauguaaua

SEQ ID NO: 1363185 - RNA, 15 nt, Human
agcuauuugauguaa

SEQ ID NO: 1363186 - RNA, 23 nt, Human
ugcccaagccagaggcuggguuc

SEQ ID NO: 1363187 - RNA, 11 nt, Human
ugccauuguag

SEQ ID NO: 1363188 - RNA, 22 nt, Human
ugcccaacccuucccucaccuu

SEQ ID NO: 1363189 - RNA, 20 nt, Human
ugcccaacccuucccucacc

SEQ ID NO: 1363190 - RNA, 19 nt, Human
ugccauugggguaguugug

SEQ ID NO: 1363191 - RNA, 16 nt, Human
ugccauucacuucaua

SEQ ID NO: 1363192 - RNA, 14 nt, Human
ugccauuaacaaau

SEQ ID NO: 1363193 - RNA, 14 nt, Human
ugccauuaaagaau

SEQ ID NO: 1363194 - RNA, 13 nt, Human
agcuauuuuucua

SEQ ID NO: 1363195 - RNA, 22 nt, Human
agcuauaaagcaguauuuuucu

SEQ ID NO: 1363196 - RNA, 18 nt, Human
agcuauaaaaugaauaca

SEQ ID NO: 1363197 - RNA, 22 nt, Human
agcuaguuuuauucuugguuuu

SEQ ID NO: 1363198 - RNA, 21 nt, Human
agcuacuuccuccuccccacu

SEQ ID NO: 1363199 - RNA, 16 nt, Human
agcuacuuccuccucc

SEQ ID NO: 1363200 - RNA, 15 nt, Human
agcuacuuccuccuc

SEQ ID NO: 1363201 - RNA, 23 nt, Human
agcuacugugugugugaaugaac

SEQ ID NO: 1363202 - RNA, 20 nt, Human
agcuacugugugugugaaug

SEQ ID NO: 1363203 - RNA, 19 nt, Human
agcuacugugugugugaau

SEQ ID NO: 1363204 - RNA, 15 nt, Human
agcuacugugugugu

SEQ ID NO: 1363205 - RNA, 23 nt, Human
agcuacugccgucagugcugugc

SEQ ID NO: 1363206 - RNA, 22 nt, Human
agcuacucuccccacgagggcu

SEQ ID NO: 1363207 - RNA, 23 nt, Human
agcuacucuccccacgagggcug

SEQ ID NO: 1363208 - RNA, 21 nt, Human
agcuauuucaucuauuuuugg

SEQ ID NO: 1363209 - RNA, 17 nt, Human
agcuauuucaucuauuu

SEQ ID NO: 1363210 - RNA, 14 nt, Human
agcuauuucaucua

SEQ ID NO: 1363211 - RNA, 13 nt, Human
agcuauuucaucu

SEQ ID NO: 1363212 - RNA, 15 nt, Human
agcuauuuaaagcau

SEQ ID NO: 1363213 - RNA, 19 nt, Human
agcuauggugucauaggcu

SEQ ID NO: 1363214 - RNA, 11 nt, Human
agcuauauaag

SEQ ID NO: 1363215 - RNA, 17 nt, Human
agcuauauaagacaaga

SEQ ID NO: 1363216 - RNA, 22 nt, Human
agcguggccuuguucugucacc

SEQ ID NO: 1363217 - RNA, 18 nt, Human
agcguggccuuguucugu

SEQ ID NO: 1363218 - RNA, 20 nt, Human
agcguggagggguaggggcu

SEQ ID NO: 1363219 - RNA, 14 nt, Human
agcguggaggggua

SEQ ID NO: 1363220 - RNA, 17 nt, Human
agcgugcuuuaaaaaau

SEQ ID NO: 1363221 - RNA, 23 nt, Human
ugccauauuaaauuuuuuguuga

SEQ ID NO: 1363222 - RNA, 16 nt, Human
ugccauauuaaauuuu

SEQ ID NO: 1363223 - RNA, 14 nt, Human
ugccauauuaaauu

SEQ ID NO: 1363224 - RNA, 15 nt, Human
ugccauauugcacau

SEQ ID NO: 1363225 - RNA, 16 nt, Human
ugccauauugcacaug

SEQ ID NO: 1363226 - RNA, 19 nt, Human
ugccauauugcacaugucu

SEQ ID NO: 1363227 - RNA, 20 nt, Human
ugccauauugcacaugucuu

SEQ ID NO: 1363228 - RNA, 18 nt, Human
ugccauaugauuuacauu

SEQ ID NO: 1363229 - RNA, 20 nt, Human
ugccauagucuuaacugguc

SEQ ID NO: 1363230 - RNA, 17 nt, Human
ugccauagucuuaacug

SEQ ID NO: 1363231 - RNA, 12 nt, Human
ugccacuguugu

SEQ ID NO: 1363232 - RNA, 23 nt, Human
ugccacuuaauguauguuaccaa

SEQ ID NO: 1363233 - RNA, 20 nt, Human
ugccacuuaauguauguuac

SEQ ID NO: 1363234 - RNA, 18 nt, Human
ugccacuuaauguauguu

SEQ ID NO: 1363235 - RNA, 17 nt, Human
ugccacuuaauguaugu

SEQ ID NO: 1363236 - RNA, 14 nt, Human
ugccacuuaaugua

SEQ ID NO: 1363237 - RNA, 19 nt, Human
ugccacuggggaaaacucc

SEQ ID NO: 1363238 - RNA, 13 nt, Human
ugccacuggagug

SEQ ID NO: 1363239 - RNA, 22 nt, Human
ugccacugccuucgcuucuugc

SEQ ID NO: 1363240 - RNA, 21 nt, Human
ugccacugccuucgcuucuug

SEQ ID NO: 1363241 - RNA, 19 nt, Human
ugccacugccuucgcuucu

SEQ ID NO: 1363242 - RNA, 18 nt, Human
agcggcccugucauccag

SEQ ID NO: 1363243 - RNA, 22 nt, Human
agcggccggccagccccuggcc

SEQ ID NO: 1363244 - RNA, 18 nt, Human
agcggccggccagccccu

SEQ ID NO: 1363245 - RNA, 11 nt, Human
agcggccggcc

SEQ ID NO: 1363246 - RNA, 14 nt, Human
agcggcccugucau

SEQ ID NO: 1363247 - RNA, 13 nt, Human
agcggcaucaggc

SEQ ID NO: 1363248 - RNA, 15 nt, Human
agcggcaucaggcuu

SEQ ID NO: 1363249 - RNA, 14 nt, Human
agcggcagaugggg

SEQ ID NO: 1363250 - RNA, 17 nt, Human
agcgcuaucucccugcc

SEQ ID NO: 1363251 - RNA, 18 nt, Human
agcgcuaucucccugccu

SEQ ID NO: 1363252 - RNA, 13 nt, Human
agcgcuaucuccc

SEQ ID NO: 1363253 - RNA, 20 nt, Human
agcgcuagaggaagcagcca

SEQ ID NO: 1363254 - RNA, 19 nt, Human
agcgcuagaggaagcagcc

SEQ ID NO: 1363255 - RNA, 16 nt, Human
agcgcccagcuccuga

SEQ ID NO: 1363256 - RNA, 14 nt, Human
agcgcccagcuccu

SEQ ID NO: 1363257 - RNA, 22 nt, Human
agcgcccaaaggacgcacugag

SEQ ID NO: 1363258 - RNA, 21 nt, Human
agccugcgccaccgcccagag

SEQ ID NO: 1363259 - RNA, 17 nt, Human
agccugccgagcaaccg

SEQ ID NO: 1363260 - RNA, 21 nt, Human
agcgccaggcugaccacagca

SEQ ID NO: 1363261 - RNA, 12 nt, Human
agcgccaggcug

SEQ ID NO: 1363262 - RNA, 10 nt, Human
agccugcuca

SEQ ID NO: 1363263 - RNA, 18 nt, Human
ugcauugaacacaaacug

SEQ ID NO: 1363264 - RNA, 17 nt, Human
ugcauugaacacaaacu

SEQ ID NO: 1363265 - RNA, 15 nt, Human
ugcauugaacacaaa

SEQ ID NO: 1363266 - RNA, 14 nt, Human
ugcauugaacacaa

SEQ ID NO: 1363267 - RNA, 13 nt, Human
ugcauugaacaca

SEQ ID NO: 1363268 - RNA, 20 nt, Human
ugcauugaaaagagcugaag

SEQ ID NO: 1363269 - RNA, 18 nt, Human
ugcauugaaaagagcuga

SEQ ID NO: 1363270 - RNA, 17 nt, Human
ugcauugaaaagagcug

SEQ ID NO: 1363271 - RNA, 20 nt, Human
ugcauucuucugagcacugu

SEQ ID NO: 1363272 - RNA, 16 nt, Human
ugcauucuucugagca

SEQ ID NO: 1363273 - RNA, 16 nt, Human
ugcauucuucucuguu

SEQ ID NO: 1363274 - RNA, 15 nt, Human
ugcauucuucucugu

SEQ ID NO: 1363275 - RNA, 16 nt, Human
ugcauucuggauuuua

SEQ ID NO: 1363276 - RNA, 21 nt, Human
ugcauugaacacaaacuguaa

SEQ ID NO: 1363277 - RNA, 19 nt, Human
ugcauugaacacaaacugu

SEQ ID NO: 1363278 - RNA, 22 nt, Human
ugcauugaacacaaacuguaaa

SEQ ID NO: 1363279 - RNA, 19 nt, Human
ugcauuugaaaauuuugau

SEQ ID NO: 1363280 - RNA, 23 nt, Human
ugcauuugaaaauuuugauguuu

SEQ ID NO: 1363281 - RNA, 22 nt, Human
ugccacacaaggauagaugcug

SEQ ID NO: 1363282 - RNA, 19 nt, Human
ugccacaaggacuuccugu

SEQ ID NO: 1363283 - RNA, 19 nt, Human
ugccaauauuaaaucugcu

SEQ ID NO: 1363284 - RNA, 18 nt, Human
ugccaauauuaaaucugc

SEQ ID NO: 1363285 - RNA, 21 nt, Human
ugccacaccccccaccccuag

SEQ ID NO: 1363286 - RNA, 23 nt, Human
ugccacaccccccaccccuagga

SEQ ID NO: 1363287 - RNA, 18 nt, Human
ugcauuugaggucuguuc

SEQ ID NO: 1363288 - RNA, 14 nt, Human
ugcacuacugacau

SEQ ID NO: 1363289 - RNA, 17 nt, Human
ugcacuaacagaguggc

SEQ ID NO: 1363290 - RNA, 17 nt, Human
ugcacguggccucuuga

SEQ ID NO: 1363291 - RNA, 16 nt, Human
ugcacguggccucuug

SEQ ID NO: 1363292 - RNA, 15 nt, Human
ugcacguggccucuu

SEQ ID NO: 1363293 - RNA, 14 nt, Human
ugcacguggccucu

SEQ ID NO: 1363294 - RNA, 15 nt, Human
ugcacucccaccuga

SEQ ID NO: 1363295 - RNA, 14 nt, Human
ugcacucccaccug

SEQ ID NO: 1363296 - RNA, 18 nt, Human
ugcacuacugacaugugg

SEQ ID NO: 1363297 - RNA, 16 nt, Human
ugcacuacugacaugu

SEQ ID NO: 1363298 - RNA, 15 nt, Human
ugcacuacugacaug

SEQ ID NO: 1363299 - RNA, 19 nt, Human
ugcaccaccaagccaaggg

SEQ ID NO: 1363300 - RNA, 18 nt, Human
ugcaccaccaagccaagg

SEQ ID NO: 1363301 - RNA, 16 nt, Human
ugcaccaccaagccaa

SEQ ID NO: 1363302 - RNA, 14 nt, Human
ugcaccaagcagga

SEQ ID NO: 1363303 - RNA, 14 nt, Human
ugcacaugucuuaa

SEQ ID NO: 1363304 - RNA, 15 nt, Human
ugcacaugucuuaau

SEQ ID NO: 1363305 - RNA, 16 nt, Human
ugcacaugucuuaaug

SEQ ID NO: 1363306 - RNA, 15 nt, Human
ugcaccaccaagcca

SEQ ID NO: 1363307 - RNA, 14 nt, Human
ugcaccaccaagcc

SEQ ID NO: 1363308 - RNA, 12 nt, Human
ugcaccaccaag

SEQ ID NO: 1363309 - RNA, 22 nt, Human
ugcaccaagcaggaaaugaaaa

SEQ ID NO: 1363310 - RNA, 17 nt, Human
ugcacaugaacuuagau

SEQ ID NO: 1363311 - RNA, 21 nt, Human
ugcacaugacucggggguggg

SEQ ID NO: 1363312 - RNA, 12 nt, Human
ugcacaugucuu

SEQ ID NO: 1363313 - RNA, 21 nt, Human
ugcacaugaacuuagauuuua

SEQ ID NO: 1363314 - RNA, 14 nt, Human
ugcacaugaacuua

SEQ ID NO: 1363315 - RNA, 13 nt, Human
ugcacaauguaga

SEQ ID NO: 1363316 - RNA, 21 nt, Human
ugcacaauaacuccucccagg

SEQ ID NO: 1363317 - RNA, 22 nt, Human
ugcacaauaacuccucccaggg

SEQ ID NO: 1363318 - RNA, 19 nt, Human
ugcacaauaacuccuccca

SEQ ID NO: 1363319 - RNA, 18 nt, Human
ugcacaauaacuccuccc

SEQ ID NO: 1363320 - RNA, 21 nt, Human
ugcacaauaaaaauguuuaac

SEQ ID NO: 1363321 - RNA, 20 nt, Human
ugcacaauaaaaauguuuaa

SEQ ID NO: 1363322 - RNA, 15 nt, Human
ugcacaauaaaaaug

SEQ ID NO: 1363323 - RNA, 20 nt, Human
ugcacaagaauggaucacaa

SEQ ID NO: 1363324 - RNA, 23 nt, Human
ugcacaagaauggaucacaagau

SEQ ID NO: 1363325 - RNA, 16 nt, Human
ugcacaagaauggauc

SEQ ID NO: 1363326 - RNA, 15 nt, Human
ugcacaagaauggau

SEQ ID NO: 1363327 - RNA, 14 nt, Human
ugcacaagaaugga

SEQ ID NO: 1363328 - RNA, 18 nt, Human
agcagcaccguucugugc

SEQ ID NO: 1363329 - RNA, 16 nt, Human
agcagcaacuuguccu

SEQ ID NO: 1363330 - RNA, 22 nt, Human
agcccuuaugcgguuaauuuug

SEQ ID NO: 1363331 - RNA, 21 nt, Human
agcccuuaugcgguuaauuuu

SEQ ID NO: 1363332 - RNA, 16 nt, Human
ugcagacuucccagcu

SEQ ID NO: 1363333 - RNA, 22 nt, Human
ugcagacuucccagcuaggaag

SEQ ID NO: 1363334 - RNA, 15 nt, Human
ugcagacuucccagc

SEQ ID NO: 1363335 - RNA, 18 nt, Human
ugcagaaaauucugugcc

SEQ ID NO: 1363336 - RNA, 19 nt, Human
ugcacucccaccugacaca

SEQ ID NO: 1363337 - RNA, 17 nt, Human
ugcacucccaccugaca

SEQ ID NO: 1363338 - RNA, 21 nt, Human
ugcagaaccggagagccagcu

SEQ ID NO: 1363339 - RNA, 20 nt, Human
ugcagaaccggagagccagc

SEQ ID NO: 1363340 - RNA, 15 nt, Human
ugcagaaacuacuga

SEQ ID NO: 1363341 - RNA, 17 nt, Human
ugcagaaaauucugugc

SEQ ID NO: 1363342 - RNA, 13 nt, Human
ugcagaaagcauc

SEQ ID NO: 1363343 - RNA, 20 nt, Human
ugcagaaagcaucccucacc

SEQ ID NO: 1363344 - RNA, 18 nt, Human
agccucaaaacaaaggcc

SEQ ID NO: 1363345 - RNA, 20 nt, Human
agccucaaaacaaaggccua

SEQ ID NO: 1363346 - RNA, 20 nt, Human
agccuagugaaggcuucucu

SEQ ID NO: 1363347 - RNA, 23 nt, Human
agccuagugaaggcuucucucug

SEQ ID NO: 1363348 - RNA, 14 nt, Human
agccuagugaaggc

SEQ ID NO: 1363349 - RNA, 22 nt, Human
agccuaggccuaguccugcgaa

SEQ ID NO: 1363350 - RNA, 19 nt, Human
agccuaggccuaguccugc

SEQ ID NO: 1363351 - RNA, 17 nt, Human
agccuaggccuaguccu

SEQ ID NO: 1363352 - RNA, 14 nt, Human
agccuacaggccuc

SEQ ID NO: 1363353 - RNA, 13 nt, Human
agccuacaggccu

SEQ ID NO: 1363354 - RNA, 19 nt, Human
agccuaaggcuccuguuuu

SEQ ID NO: 1363355 - RNA, 18 nt, Human
agccuaaggcuccuguuu

SEQ ID NO: 1363356 - RNA, 17 nt, Human
agcccuugcauugcaga

SEQ ID NO: 1363357 - RNA, 19 nt, Human
agcccuucuuuccacagaa

SEQ ID NO: 1363358 - RNA, 18 nt, Human
agcccuucuuuccacaga

SEQ ID NO: 1363359 - RNA, 21 nt, Human
ugcaucuggagagaacagguu

SEQ ID NO: 1363360 - RNA, 17 nt, Human
ugcaucuggagagaaca

SEQ ID NO: 1363361 - RNA, 18 nt, Human
ugcaucucccagauaaug

SEQ ID NO: 1363362 - RNA, 13 nt, Human
ugcaucucccaga

SEQ ID NO: 1363363 - RNA, 22 nt, Human
ugcauaccacuuuuguucuugg

SEQ ID NO: 1363364 - RNA, 22 nt, Human
ugcaugaaguaauaugcacaca

SEQ ID NO: 1363365 - RNA, 23 nt, Human
agccugcaggaucucaccaggca

SEQ ID NO: 1363366 - RNA, 22 nt, Human
agccugcaggaucucaccaggc

SEQ ID NO: 1363367 - RNA, 14 nt, Human
agccugcaggaucu

SEQ ID NO: 1363368 - RNA, 19 nt, Human
agccugacccucaucuuuc

SEQ ID NO: 1363369 - RNA, 21 nt, Human
agccugagcaacucuugauua

SEQ ID NO: 1363370 - RNA, 16 nt, Human
agccugagcaacucuu

SEQ ID NO: 1363371 - RNA, 21 nt, Human
ugcagcuguuuuguugacauu

SEQ ID NO: 1363372 - RNA, 23 nt, Human
ugcagcuguuuuguugacauucu

SEQ ID NO: 1363373 - RNA, 18 nt, Human
ugcagcuguuuuguugac

SEQ ID NO: 1363374 - RNA, 15 nt, Human
ugcagcuguuuuguu

SEQ ID NO: 1363375 - RNA, 22 nt, Human
ugcagcuguggcagaguuacag

SEQ ID NO: 1363376 - RNA, 20 nt, Human
ugcagcuguggcagaguuac

SEQ ID NO: 1363377 - RNA, 19 nt, Human
ugcagccggcacagggucu

SEQ ID NO: 1363378 - RNA, 18 nt, Human
ugcagccggcacaggguc

SEQ ID NO: 1363379 - RNA, 17 nt, Human
ugcagccggcacagggu

SEQ ID NO: 1363380 - RNA, 14 nt, Human
ugcagccgcugagc

SEQ ID NO: 1363381 - RNA, 22 nt, Human
ugcagcccugcugcugccugcc

SEQ ID NO: 1363382 - RNA, 21 nt, Human
ugcaggucccuaauaaagcug

SEQ ID NO: 1363383 - RNA, 20 nt, Human
ugcagcuuguagccagccgg

SEQ ID NO: 1363384 - RNA, 19 nt, Human
ugcagcuuguagccagccg

SEQ ID NO: 1363385 - RNA, 18 nt, Human
ugcagcuuguagccagcc

SEQ ID NO: 1363386 - RNA, 17 nt, Human
ugcagcuuguagccagc

SEQ ID NO: 1363387 - RNA, 16 nt, Human
ugcagcuuguagccag

SEQ ID NO: 1363388 - RNA, 14 nt, Human
ugcagcuuguagcc

SEQ ID NO: 1363389 - RNA, 18 nt, Human
ugcaggucccuaauaaag

SEQ ID NO: 1363390 - RNA, 19 nt, Human
ugcaggucccuaauaaagc

SEQ ID NO: 1363391 - RNA, 20 nt, Human
ugcaggucccuaauaaagcu

SEQ ID NO: 1363392 - RNA, 18 nt, Human
ugcauaacaauuccucua

SEQ ID NO: 1363393 - RNA, 17 nt, Human
ugcauaacaauuccucu

SEQ ID NO: 1363394 - RNA, 22 nt, Human
ugcauaacguauaaaagccugu

SEQ ID NO: 1363395 - RNA, 18 nt, Human
ugcauaauguuucuggau

SEQ ID NO: 1363396 - RNA, 17 nt, Human
ugcauaauguuucugga

SEQ ID NO: 1363397 - RNA, 15 nt, Human
ugcauaauggucaga

SEQ ID NO: 1363398 - RNA, 14 nt, Human
ugcuaguaauugga

SEQ ID NO: 1363399 - RNA, 17 nt, Human
aggaaagaggaagcaaa

SEQ ID NO: 1363400 - RNA, 13 nt, Human
ugcuauacugcau

SEQ ID NO: 1363401 - RNA, 11 nt, Human
ugcuaguguga

SEQ ID NO: 1363402 - RNA, 16 nt, Human
ugcuaguaauuggaaa

SEQ ID NO: 1363403 - RNA, 19 nt, Human
aggaaagagaacuuccaga

SEQ ID NO: 1363404 - RNA, 13 nt, Human
aggaaagagaacu

SEQ ID NO: 1363405 - RNA, 21 nt, Human
aggaaacucugcauucuagua

SEQ ID NO: 1363406 - RNA, 20 nt, Human
aggaaacgagacuuuccauu

SEQ ID NO: 1363407 - RNA, 22 nt, Human
aggaaacuccugugaccacaac

SEQ ID NO: 1363408 - RNA, 12 nt, Human
aggaaagaaaac

SEQ ID NO: 1363409 - RNA, 13 nt, Human
aggaaagaaaaca

SEQ ID NO: 1363410 - RNA, 15 nt, Human
aggaaacgagacuuu

SEQ ID NO: 1363411 - RNA, 18 nt, Human
aggaaaaggccuggggug

SEQ ID NO: 1363412 - RNA, 16 nt, Human
aggaaaaggccugggg

SEQ ID NO: 1363413 - RNA, 15 nt, Human
aggaaaaggccuggg

SEQ ID NO: 1363414 - RNA, 14 nt, Human
aggaaaaggccugg

SEQ ID NO: 1363415 - RNA, 13 nt, Human
aggaaaaggccug

SEQ ID NO: 1363416 - RNA, 21 nt, Human
agcuuugacucaggagccugu

SEQ ID NO: 1363417 - RNA, 20 nt, Human
agcuuugacucaggagccug

SEQ ID NO: 1363418 - RNA, 16 nt, Human
agcuuugacucaggag

SEQ ID NO: 1363419 - RNA, 15 nt, Human
agcuuugacucagga

SEQ ID NO: 1363420 - RNA, 17 nt, Human
aggaaaaggccuggggu

SEQ ID NO: 1363421 - RNA, 21 nt, Human
agcuuauacgaaauaauuguu

SEQ ID NO: 1363422 - RNA, 21 nt, Human
agcuuagcuuuagaaacagug

SEQ ID NO: 1363423 - RNA, 15 nt, Human
agcuuaaaauacaag

SEQ ID NO: 1363424 - RNA, 14 nt, Human
agcuuaaaauacaa

SEQ ID NO: 1363425 - RNA, 13 nt, Human
agcuuaaaauaca

SEQ ID NO: 1363426 - RNA, 16 nt, Human
agcuuaaaacuuugaa

SEQ ID NO: 1363427 - RNA, 22 nt, Human
agcuuaaaacuuugaaguuagc

SEQ ID NO: 1363428 - RNA, 14 nt, Human
agcuuaaaacuuug

SEQ ID NO: 1363429 - RNA, 13 nt, Human
agcuuaaaacuuu

SEQ ID NO: 1363430 - RNA, 12 nt, Human
agcuuaaaacuu

SEQ ID NO: 1363431 - RNA, 14 nt, Human
agcuguuuuguuga

SEQ ID NO: 1363432 - RNA, 23 nt, Human
agcuguuuuguugacauucugaa

SEQ ID NO: 1363433 - RNA, 14 nt, Human
agcuguuuucuucu

SEQ ID NO: 1363434 - RNA, 18 nt, Human
agcuuagcuuuagaaaca

SEQ ID NO: 1363435 - RNA, 16 nt, Human
agcuuagauuucauag

SEQ ID NO: 1363436 - RNA, 15 nt, Human
agcuuagauuucaua

SEQ ID NO: 1363437 - RNA, 13 nt, Human
agcuuagauuuca

SEQ ID NO: 1363438 - RNA, 22 nt, Human
agcuuagaguuggccauauuua

SEQ ID NO: 1363439 - RNA, 20 nt, Human
agcuuaaaauacaagacugc

SEQ ID NO: 1363440 - RNA, 18 nt, Human
agcuuaaaauacaagacu

SEQ ID NO: 1363441 - RNA, 17 nt, Human
agcuuaaaauacaagac

SEQ ID NO: 1363442 - RNA, 22 nt, Human
agcuuucugaacagcuggugua

SEQ ID NO: 1363443 - RNA, 21 nt, Human
agcuuucugaacagcuggugu

SEQ ID NO: 1363444 - RNA, 20 nt, Human
agcuuucugaacagcuggug

SEQ ID NO: 1363445 - RNA, 19 nt, Human
agcuuucugaacagcuggu

SEQ ID NO: 1363446 - RNA, 18 nt, Human
agcuuucugaacagcugg

SEQ ID NO: 1363447 - RNA, 17 nt, Human
agcuuucugaacagcug

SEQ ID NO: 1363448 - RNA, 16 nt, Human
agcuuucugaacagcu

SEQ ID NO: 1363449 - RNA, 15 nt, Human
agcuuucugaacagc

SEQ ID NO: 1363450 - RNA, 12 nt, Human
agcuuucugaac

SEQ ID NO: 1363451 - RNA, 20 nt, Human
agcuugggaaaggugguguu

SEQ ID NO: 1363452 - RNA, 14 nt, Human
agcuugggaaugga

SEQ ID NO: 1363453 - RNA, 12 nt, Human
agcuugggaaug

SEQ ID NO: 1363454 - RNA, 23 nt, Human
agcuuaucuacuuccaaacuaau

SEQ ID NO: 1363455 - RNA, 20 nt, Human
agcuuauacgaaauaauugu

SEQ ID NO: 1363456 - RNA, 18 nt, Human
agcuuauacgaaauaauu

SEQ ID NO: 1363457 - RNA, 19 nt, Human
agcuuagcuuuagaaacag

SEQ ID NO: 1363458 - RNA, 16 nt, Human
agcuuaugaaaagaau

SEQ ID NO: 1363459 - RNA, 15 nt, Human
agcuuaugaaaagaa

SEQ ID NO: 1363460 - RNA, 21 nt, Human
agcuuauugucuagugaaacu

SEQ ID NO: 1363461 - RNA, 17 nt, Human
agcuuggaaaggaccag

SEQ ID NO: 1363462 - RNA, 14 nt, Human
ugcugccacugagg

SEQ ID NO: 1363463 - RNA, 14 nt, Human
aggacaaccauucc

SEQ ID NO: 1363464 - RNA, 16 nt, Human
aggaauuuucuuugug

SEQ ID NO: 1363465 - RNA, 14 nt, Human
aggaauuuucuuug

SEQ ID NO: 1363466 - RNA, 22 nt, Human
aggaauuuuauuuuuuucugaa

SEQ ID NO: 1363467 - RNA, 12 nt, Human
aggaagagaagg

SEQ ID NO: 1363468 - RNA, 14 nt, Human
aggaagagaaggag

SEQ ID NO: 1363469 - RNA, 16 nt, Human
aggaagagaaggagca

SEQ ID NO: 1363470 - RNA, 17 nt, Human
aggaagagaaggagcag

SEQ ID NO: 1363471 - RNA, 16 nt, Human
aggaaucuuuaaaaga

SEQ ID NO: 1363472 - RNA, 22 nt, Human
aggaaucuuuaaaagaugcuuu

SEQ ID NO: 1363473 - RNA, 22 nt, Human
aggaaucugugggucugggagu

SEQ ID NO: 1363474 - RNA, 19 nt, Human
aggaaucugugggucuggg

SEQ ID NO: 1363475 - RNA, 23 nt, Human
aggaaugaaauccugcuucagug

SEQ ID NO: 1363476 - RNA, 21 nt, Human
ugcucugguuguuucuguucc

SEQ ID NO: 1363477 - RNA, 19 nt, Human
ugcucugguuguuucuguu

SEQ ID NO: 1363478 - RNA, 18 nt, Human
ugcucugguuguuucugu

SEQ ID NO: 1363479 - RNA, 23 nt, Human
ugcucugguuguuucuguuccaa

SEQ ID NO: 1363480 - RNA, 21 nt, Human
ugcucuuaauugccaccucua

SEQ ID NO: 1363481 - RNA, 16 nt, Human
ugcucuuaauugccac

SEQ ID NO: 1363482 - RNA, 15 nt, Human
ugcucuuaauugcca

SEQ ID NO: 1363483 - RNA, 13 nt, Human
ugcucuuaauugc

SEQ ID NO: 1363484 - RNA, 22 nt, Human
ugcucugucuucuuugcccaca

SEQ ID NO: 1363485 - RNA, 17 nt, Human
ugcuaucauuauucgua

SEQ ID NO: 1363486 - RNA, 18 nt, Human
ugcucugaugcaucagaa

SEQ ID NO: 1363487 - RNA, 14 nt, Human
ugcucugauuuauc

SEQ ID NO: 1363488 - RNA, 17 nt, Human
ugcucugaugcaucaga

SEQ ID NO: 1363489 - RNA, 16 nt, Human
ugcucugaugcaucag

SEQ ID NO: 1363490 - RNA, 19 nt, Human
ugcucugaucccucuacag

SEQ ID NO: 1363491 - RNA, 16 nt, Human
ugcucugaucccucua

SEQ ID NO: 1363492 - RNA, 14 nt, Human
ugcucugaucccuc

SEQ ID NO: 1363493 - RNA, 13 nt, Human
ugcucugaucccu

SEQ ID NO: 1363494 - RNA, 12 nt, Human
ugcucuuagcug

SEQ ID NO: 1363495 - RNA, 15 nt, Human
ugcucuuagcugucu

SEQ ID NO: 1363496 - RNA, 13 nt, Human
aggaaagcaagaa

SEQ ID NO: 1363497 - RNA, 24 nt, Human
aggaaagcgccuccaacccuagca

SEQ ID NO: 1363498 - RNA, 18 nt, Human
aggaaauauuuauuuuaa

SEQ ID NO: 1363499 - RNA, 14 nt, Human
aggaaauauuuauu

SEQ ID NO: 1363500 - RNA, 18 nt, Human
agcucuccggucucucuc

SEQ ID NO: 1363501 - RNA, 18 nt, Human
ugcccucauuuuauguca

SEQ ID NO: 1363502 - RNA, 21 nt, Human
ugcccucauggccccucugac

SEQ ID NO: 1363503 - RNA, 16 nt, Human
agcucuauuaugaaug

SEQ ID NO: 1363504 - RNA, 19 nt, Human
agcucuauuaugaauguga

SEQ ID NO: 1363505 - RNA, 17 nt, Human
agcucucaguugcagcc

SEQ ID NO: 1363506 - RNA, 21 nt, Human
agcucucaguugcagcccugc

SEQ ID NO: 1363507 - RNA, 18 nt, Human
agcucuucuuaaaguauu

SEQ ID NO: 1363508 - RNA, 14 nt, Human
agcucuucuccauc

SEQ ID NO: 1363509 - RNA, 23 nt, Human
agcucuguaucaggacccagagg

SEQ ID NO: 1363510 - RNA, 22 nt, Human
agcucuguaucaggacccagag

SEQ ID NO: 1363511 - RNA, 12 nt, Human
agcucuguauca

SEQ ID NO: 1363512 - RNA, 23 nt, Human
agcucugcuauuaggccagcaag

SEQ ID NO: 1363513 - RNA, 14 nt, Human
agcugauggagaag

SEQ ID NO: 1363514 - RNA, 15 nt, Human
agcugauggagaagg

SEQ ID NO: 1363515 - RNA, 16 nt, Human
agcugauggagaagga

SEQ ID NO: 1363516 - RNA, 17 nt, Human
agcugauggagaaggaa

SEQ ID NO: 1363517 - RNA, 16 nt, Human
agcugauuaaaugaca

SEQ ID NO: 1363518 - RNA, 19 nt, Human
agcugauggagaaggaagg

SEQ ID NO: 1363519 - RNA, 21 nt, Human
ugccucauuuuuuuccuugca

SEQ ID NO: 1363520 - RNA, 16 nt, Human
ugccucauuuuuuucc

SEQ ID NO: 1363521 - RNA, 16 nt, Human
ugccggggcagccccc

SEQ ID NO: 1363522 - RNA, 24 nt, Human
ugcccuuguuuggggcaggaguag

SEQ ID NO: 1363523 - RNA, 23 nt, Human
ugcccuuguuuggggcaggagua

SEQ ID NO: 1363524 - RNA, 20 nt, Human
ugcccuuguuuggggcagga

SEQ ID NO: 1363525 - RNA, 18 nt, Human
agcugcauuccgcagccc

SEQ ID NO: 1363526 - RNA, 15 nt, Human
agcugcauuccgcag

SEQ ID NO: 1363527 - RNA, 21 nt, Human
ugcccuucuuucuacccugcu

SEQ ID NO: 1363528 - RNA, 12 nt, Human
ugccucucuaca

SEQ ID NO: 1363529 - RNA, 16 nt, Human
ugccucucugcagguc

SEQ ID NO: 1363530 - RNA, 18 nt, Human
ugccucucugcagguccc

SEQ ID NO: 1363531 - RNA, 19 nt, Human
ugccucucugcaggucccu

SEQ ID NO: 1363532 - RNA, 20 nt, Human
ugccucucugcaggucccua

SEQ ID NO: 1363533 - RNA, 15 nt, Human
agcuggagaagaccc

SEQ ID NO: 1363534 - RNA, 13 nt, Human
ugcccccugcagg

SEQ ID NO: 1363535 - RNA, 16 nt, Human
agcugggcagaaggcc

SEQ ID NO: 1363536 - RNA, 18 nt, Human
agcugggcagaaggccaa

SEQ ID NO: 1363537 - RNA, 15 nt, Human
agcugggccuggucu

SEQ ID NO: 1363538 - RNA, 15 nt, Human
agcugggcucugcaa

SEQ ID NO: 1363539 - RNA, 17 nt, Human
agcugggcuaaguaaau

SEQ ID NO: 1363540 - RNA, 13 nt, Human
agcugggccuggu

SEQ ID NO: 1363541 - RNA, 22 nt, Human
agcuggggaucccuccccccca

SEQ ID NO: 1363542 - RNA, 15 nt, Human
agcuggggaucccuc

SEQ ID NO: 1363543 - RNA, 14 nt, Human
agcuggggaccugg

SEQ ID NO: 1363544 - RNA, 17 nt, Human
agcuggggccaggcugg

SEQ ID NO: 1363545 - RNA, 16 nt, Human
agcuggaccucaccaa

SEQ ID NO: 1363546 - RNA, 15 nt, Human
agcuggaccucacca

SEQ ID NO: 1363547 - RNA, 17 nt, Human
agcuggacccugaccag

SEQ ID NO: 1363548 - RNA, 15 nt, Human
agcuggacccugacc

SEQ ID NO: 1363549 - RNA, 14 nt, Human
agcuggacccugac

SEQ ID NO: 1363550 - RNA, 15 nt, Human
agcugccuggacccg

SEQ ID NO: 1363551 - RNA, 15 nt, Human
agcugccugguauau

SEQ ID NO: 1363552 - RNA, 14 nt, Human
agcugccuggaccc

SEQ ID NO: 1363553 - RNA, 13 nt, Human
agcugccuggacc

SEQ ID NO: 1363554 - RNA, 21 nt, Human
agcugccuggaagagcagccc

SEQ ID NO: 1363555 - RNA, 20 nt, Human
agcugccuggaagagcagcc

SEQ ID NO: 1363556 - RNA, 11 nt, Human
ugccucugagg

SEQ ID NO: 1363557 - RNA, 15 nt, Human
ugccucucuaggacc

SEQ ID NO: 1363558 - RNA, 12 nt, Human
ugccucucuagg

SEQ ID NO: 1363559 - RNA, 21 nt, Human
ugccucucugcaggucccuaa

SEQ ID NO: 1363560 - RNA, 20 nt, Human
agcugccuccccucuccuuc

SEQ ID NO: 1363561 - RNA, 23 nt, Human
agcugccuccccucuccuuccug

SEQ ID NO: 1363562 - RNA, 15 nt, Human
agcugccucuucccu

SEQ ID NO: 1363563 - RNA, 19 nt, Human
agcugccucuucccucuuc

SEQ ID NO: 1363564 - RNA, 15 nt, Human
ugcgagagaugugug

SEQ ID NO: 1363565 - RNA, 14 nt, Human
ugcgagagaugugu

SEQ ID NO: 1363566 - RNA, 13 nt, Human
ugcgagagaugug

SEQ ID NO: 1363567 - RNA, 12 nt, Human
ugcgagagaugu

SEQ ID NO: 1363568 - RNA, 21 nt, Human
ugcgacuuucugccuggagug

SEQ ID NO: 1363569 - RNA, 18 nt, Human
ugcgacuuucugccugga

SEQ ID NO: 1363570 - RNA, 17 nt, Human
ugcgacuuucugccugg

SEQ ID NO: 1363571 - RNA, 16 nt, Human
ugcgacuuucugccug

SEQ ID NO: 1363572 - RNA, 15 nt, Human
ugcgacuuucugccu

SEQ ID NO: 1363573 - RNA, 23 nt, Human
ugcgagagauguguguugauacu

SEQ ID NO: 1363574 - RNA, 17 nt, Human
ugcgagagauguguguu

SEQ ID NO: 1363575 - RNA, 16 nt, Human
ugcgagagaugugugu

SEQ ID NO: 1363576 - RNA, 14 nt, Human
ugccuuuuuugauc

SEQ ID NO: 1363577 - RNA, 23 nt, Human
ugccuuuuuucuguauaaauguc

SEQ ID NO: 1363578 - RNA, 22 nt, Human
ugccuuuuuucuguauaaaugu

SEQ ID NO: 1363579 - RNA, 20 nt, Human
ugccuuuuuucuguauaaau

SEQ ID NO: 1363580 - RNA, 22 nt, Human
ugccuuuuuauuuuuguuuuua

SEQ ID NO: 1363581 - RNA, 16 nt, Human
ugccuuguuuuuuguu

SEQ ID NO: 1363582 - RNA, 20 nt, Human
ugccuuguuuuuuguuuguu

SEQ ID NO: 1363583 - RNA, 13 nt, Human
ugccuuguuucau

SEQ ID NO: 1363584 - RNA, 14 nt, Human
ugccuuuauugugu

SEQ ID NO: 1363585 - RNA, 17 nt, Human
ugccuuuauuuccacug

SEQ ID NO: 1363586 - RNA, 20 nt, Human
ugccuuuauuguguuuguca

SEQ ID NO: 1363587 - RNA, 21 nt, Human
ugccuuuauuguguuugucau

SEQ ID NO: 1363588 - RNA, 19 nt, Human
ugccuuacucuucuugaaa

SEQ ID NO: 1363589 - RNA, 18 nt, Human
ugccuuacucuucuugaa

SEQ ID NO: 1363590 - RNA, 15 nt, Human
ugccuuacucuucuu

SEQ ID NO: 1363591 - RNA, 17 nt, Human
ugccuugucacgccaga

SEQ ID NO: 1363592 - RNA, 19 nt, Human
ugccuuguguacaguuauu

SEQ ID NO: 1363593 - RNA, 19 nt, Human
agcugugcagguggggaga

SEQ ID NO: 1363594 - RNA, 18 nt, Human
agcugugcagguggggag

SEQ ID NO: 1363595 - RNA, 12 nt, Human
agcugugcaggu

SEQ ID NO: 1363596 - RNA, 10 nt, Human
agcugugcag

SEQ ID NO: 1363597 - RNA, 19 nt, Human
agcugugaguucucccugu

SEQ ID NO: 1363598 - RNA, 19 nt, Human
agcugugacuucuauuuua

SEQ ID NO: 1363599 - RNA, 23 nt, Human
agcugugaccugcugagcucuga

SEQ ID NO: 1363600 - RNA, 22 nt, Human
agcugugaccugcugagcucug

SEQ ID NO: 1363601 - RNA, 20 nt, Human
agcugugaccugcugagcuc

SEQ ID NO: 1363602 - RNA, 19 nt, Human
agcugugaccugcugagcu

SEQ ID NO: 1363603 - RNA, 18 nt, Human
agcugugaccugcugagc

SEQ ID NO: 1363604 - RNA, 17 nt, Human
agcugugaccugcugag

SEQ ID NO: 1363605 - RNA, 16 nt, Human
agcugugaccugcuga

SEQ ID NO: 1363606 - RNA, 15 nt, Human
agcugugaccugcug

SEQ ID NO: 1363607 - RNA, 14 nt, Human
agcugugaccugcu

SEQ ID NO: 1363608 - RNA, 17 nt, Human
agcugugaccucucccc

SEQ ID NO: 1363609 - RNA, 19 nt, Human
agcugucuuuuggaggacg

SEQ ID NO: 1363610 - RNA, 17 nt, Human
agcugucuuuuggagga

SEQ ID NO: 1363611 - RNA, 16 nt, Human
agcugucuuuuggagg

SEQ ID NO: 1363612 - RNA, 18 nt, Human
agcuggggugcagggaug

SEQ ID NO: 1363613 - RNA, 15 nt, Human
agcuggggugcaggg

SEQ ID NO: 1363614 - RNA, 14 nt, Human
agcuggggugcagg

SEQ ID NO: 1363615 - RNA, 22 nt, Human
agcuggggcuuugauguuccuu

SEQ ID NO: 1363616 - RNA, 20 nt, Human
agcuggggccaggcuggguc

SEQ ID NO: 1363617 - RNA, 20 nt, Human
aggcucaggcaggggccucc

SEQ ID NO: 1363618 - RNA, 16 nt, Human
aggcucaggucccugg

SEQ ID NO: 1363619 - RNA, 10 nt, Human
aggcucaggu

SEQ ID NO: 1363620 - RNA, 21 nt, Human
aggcucaggcaggggccucca

SEQ ID NO: 1363621 - RNA, 14 nt, Human
aggcucaggcaggg

SEQ ID NO: 1363622 - RNA, 20 nt, Human
aggcucagaggguguccugc

SEQ ID NO: 1363623 - RNA, 19 nt, Human
aggcucagaggguguccug

SEQ ID NO: 1363624 - RNA, 23 nt, Human
aggcucacccccuucuccaucca

SEQ ID NO: 1363625 - RNA, 21 nt, Human
aggcucacccccuucuccauc

SEQ ID NO: 1363626 - RNA, 19 nt, Human
aggcucacccccuucucca

SEQ ID NO: 1363627 - RNA, 16 nt, Human
aggcucacccccuucu

SEQ ID NO: 1363628 - RNA, 15 nt, Human
aggcucaaacaauga

SEQ ID NO: 1363629 - RNA, 14 nt, Human
aggcucacugguca

SEQ ID NO: 1363630 - RNA, 18 nt, Human
aggcucagaggguguccu

SEQ ID NO: 1363631 - RNA, 14 nt, Human
aggcuccagagggc

SEQ ID NO: 1363632 - RNA, 13 nt, Human
aggcuccagaggg

SEQ ID NO: 1363633 - RNA, 22 nt, Human
aggcuccaccccauccaguuca

SEQ ID NO: 1363634 - RNA, 23 nt, Human
aggcucaaacaaugacaaagcag

SEQ ID NO: 1363635 - RNA, 22 nt, Human
aggcuauuuguaaaucugccac

SEQ ID NO: 1363636 - RNA, 21 nt, Human
aggcuauuuguaaaucugcca

SEQ ID NO: 1363637 - RNA, 17 nt, Human
aggcuauuuguaaaucu

SEQ ID NO: 1363638 - RNA, 16 nt, Human
aggcuauuuguaaauc

SEQ ID NO: 1363639 - RNA, 11 nt, Human
aggcuauuugu

SEQ ID NO: 1363640 - RNA, 19 nt, Human
aggcuauuauuuucacugu

SEQ ID NO: 1363641 - RNA, 18 nt, Human
aggcuauuauuuucacug

SEQ ID NO: 1363642 - RNA, 16 nt, Human
aggcuauuauuuucac

SEQ ID NO: 1363643 - RNA, 22 nt, Human
aggcgcacugugacccccagcu

SEQ ID NO: 1363644 - RNA, 21 nt, Human
aggcgcacugugacccccagc

SEQ ID NO: 1363645 - RNA, 19 nt, Human
aggcgaucacaacgugcau

SEQ ID NO: 1363646 - RNA, 20 nt, Human
aggcgaucacaacgugcauu

SEQ ID NO: 1363647 - RNA, 21 nt, Human
aggcgaucacaacgugcauug

SEQ ID NO: 1363648 - RNA, 22 nt, Human
aggcgccccaacccguggaggc

SEQ ID NO: 1363649 - RNA, 21 nt, Human
aggcgccccaacccguggagg

SEQ ID NO: 1363650 - RNA, 14 nt, Human
aggccuuuaaaauu

SEQ ID NO: 1363651 - RNA, 15 nt, Human
aggccuuuaaaauuu

SEQ ID NO: 1363652 - RNA, 18 nt, Human
aggcgagaagggcugcuu

SEQ ID NO: 1363653 - RNA, 19 nt, Human
aggcgagaagggcugcuuc

SEQ ID NO: 1363654 - RNA, 16 nt, Human
aggccuuuuggaaugu

SEQ ID NO: 1363655 - RNA, 18 nt, Human
aggcgaagcguuguccuc

SEQ ID NO: 1363656 - RNA, 22 nt, Human
aggccuugcggcuccucaggga

SEQ ID NO: 1363657 - RNA, 23 nt, Human
aggccuugcggcuccucagggac

SEQ ID NO: 1363658 - RNA, 20 nt, Human
aggccuugcggcuccucagg

SEQ ID NO: 1363659 - RNA, 19 nt, Human
aggccuugcggcuccucag

SEQ ID NO: 1363660 - RNA, 19 nt, Human
uggccuguguucuuccugg

SEQ ID NO: 1363661 - RNA, 16 nt, Human
uggccugugucacuca

SEQ ID NO: 1363662 - RNA, 18 nt, Human
uggccuguagaguugcug

SEQ ID NO: 1363663 - RNA, 15 nt, Human
uggccuguagaguug

SEQ ID NO: 1363664 - RNA, 13 nt, Human
uggccuggacugu

SEQ ID NO: 1363665 - RNA, 20 nt, Human
uggccugcuaaggucuugga

SEQ ID NO: 1363666 - RNA, 20 nt, Human
uggccugcaaacugggaacc

SEQ ID NO: 1363667 - RNA, 23 nt, Human
uggccugcaaacugggaaccccu

SEQ ID NO: 1363668 - RNA, 19 nt, Human
uggccugcaaacugggaac

SEQ ID NO: 1363669 - RNA, 18 nt, Human
uggccugcaaacugggaa

SEQ ID NO: 1363670 - RNA, 17 nt, Human
uggccugcaaacuggga

SEQ ID NO: 1363671 - RNA, 16 nt, Human
uggccugcaaacuggg

SEQ ID NO: 1363672 - RNA, 15 nt, Human
uggccugcaaacugg

SEQ ID NO: 1363673 - RNA, 22 nt, Human
uggccugaucagaccacggcuc

SEQ ID NO: 1363674 - RNA, 14 nt, Human
uggccucugcuuuc

SEQ ID NO: 1363675 - RNA, 19 nt, Human
uggcccuugcuuaccucuc

SEQ ID NO: 1363676 - RNA, 21 nt, Human
uggcccuuccuggacagcugu

SEQ ID NO: 1363677 - RNA, 18 nt, Human
uggcccuuccuggacagc

SEQ ID NO: 1363678 - RNA, 17 nt, Human
uggcccuuccuggacag

SEQ ID NO: 1363679 - RNA, 16 nt, Human
uggcccuuccuggaca

SEQ ID NO: 1363680 - RNA, 15 nt, Human
uggcccuuccuggac

SEQ ID NO: 1363681 - RNA, 13 nt, Human
uggcccuuccugg

SEQ ID NO: 1363682 - RNA, 21 nt, Human
uggcccuuaugacugccaaga

SEQ ID NO: 1363683 - RNA, 12 nt, Human
uggccucugcuu

SEQ ID NO: 1363684 - RNA, 20 nt, Human
uggcccuuccuggacagcug

SEQ ID NO: 1363685 - RNA, 15 nt, Human
uggccgaguccaagc

SEQ ID NO: 1363686 - RNA, 13 nt, Human
uggcccagccuuu

SEQ ID NO: 1363687 - RNA, 12 nt, Human
uggcccagccuu

SEQ ID NO: 1363688 - RNA, 11 nt, Human
uggcccagccu

SEQ ID NO: 1363689 - RNA, 19 nt, Human
uggcccucuccccugcccc

SEQ ID NO: 1363690 - RNA, 18 nt, Human
uggcccucuccccugccc

SEQ ID NO: 1363691 - RNA, 17 nt, Human
uggcccucuccccugcc

SEQ ID NO: 1363692 - RNA, 16 nt, Human
uggcccucuccccugc

SEQ ID NO: 1363693 - RNA, 21 nt, Human
uggcccucuccccugcccccu

SEQ ID NO: 1363694 - RNA, 15 nt, Human
uggcccugcaaaagg

SEQ ID NO: 1363695 - RNA, 17 nt, Human
uggcauuagaauuauuu

SEQ ID NO: 1363696 - RNA, 19 nt, Human
uggcauuacagcuggagaa

SEQ ID NO: 1363697 - RNA, 20 nt, Human
uggcauguuagcccuuccuc

SEQ ID NO: 1363698 - RNA, 12 nt, Human
uggcauguguuu

SEQ ID NO: 1363699 - RNA, 13 nt, Human
aggccauuauugu

SEQ ID NO: 1363700 - RNA, 15 nt, Human
aggccauucuuuccc

SEQ ID NO: 1363701 - RNA, 14 nt, Human
aggccauucuuucc

SEQ ID NO: 1363702 - RNA, 17 nt, Human
aggccagagcccacucc

SEQ ID NO: 1363703 - RNA, 18 nt, Human
aggccagaggcccccagc

SEQ ID NO: 1363704 - RNA, 15 nt, Human
aggccagagcccacu

SEQ ID NO: 1363705 - RNA, 14 nt, Human
aggccagagcccac

SEQ ID NO: 1363706 - RNA, 14 nt, Human
aggccagagccaag

SEQ ID NO: 1363707 - RNA, 18 nt, Human
aggcauccuuccucacac

SEQ ID NO: 1363708 - RNA, 20 nt, Human
aggcauccuuccucacacca

SEQ ID NO: 1363709 - RNA, 21 nt, Human
uggcaccagacacccaggacu

SEQ ID NO: 1363710 - RNA, 20 nt, Human
uggcaccagacacccaggac

SEQ ID NO: 1363711 - RNA, 16 nt, Human
uggcacaggcccccuu

SEQ ID NO: 1363712 - RNA, 21 nt, Human
uggcacaggaguguccucuuc

SEQ ID NO: 1363713 - RNA, 14 nt, Human
uggcacaggacaug

SEQ ID NO: 1363714 - RNA, 22 nt, Human
uggcacagccuggcuguggccu

SEQ ID NO: 1363715 - RNA, 23 nt, Human
uggcaccagacacccaggacuua

SEQ ID NO: 1363716 - RNA, 20 nt, Human
uggcagauguaggagggacu

SEQ ID NO: 1363717 - RNA, 19 nt, Human
uggcagauguaggagggac

SEQ ID NO: 1363718 - RNA, 18 nt, Human
uggcagauguaggaggga

SEQ ID NO: 1363719 - RNA, 17 nt, Human
uggcagauguaggaggg

SEQ ID NO: 1363720 - RNA, 15 nt, Human
uggcagauguaggag

SEQ ID NO: 1363721 - RNA, 20 nt, Human
uggcagcaacggcacagcua

SEQ ID NO: 1363722 - RNA, 13 nt, Human
uggcagcaacaau

SEQ ID NO: 1363723 - RNA, 22 nt, Human
aggccgugacgucuggguggcc

SEQ ID NO: 1363724 - RNA, 21 nt, Human
aggccgugacgucuggguggc

SEQ ID NO: 1363725 - RNA, 20 nt, Human
aggccgugacgucugggugg

SEQ ID NO: 1363726 - RNA, 17 nt, Human
aggccgugacgucuggg

SEQ ID NO: 1363727 - RNA, 14 nt, Human
aggccgggaaaaag

SEQ ID NO: 1363728 - RNA, 18 nt, Human
aggccgggaaaaagccca

SEQ ID NO: 1363729 - RNA, 14 nt, Human
aggcccgagcagcu

SEQ ID NO: 1363730 - RNA, 21 nt, Human
aggccccugucucagggugag

SEQ ID NO: 1363731 - RNA, 23 nt, Human
aggccugaaagaggcugaggccu

SEQ ID NO: 1363732 - RNA, 21 nt, Human
aggccugaaagaggcugaggc

SEQ ID NO: 1363733 - RNA, 17 nt, Human
aggccugaaagaggcug

SEQ ID NO: 1363734 - RNA, 17 nt, Human
aggccuaguccugcgaa

SEQ ID NO: 1363735 - RNA, 15 nt, Human
aggccuaguccugcg

SEQ ID NO: 1363736 - RNA, 17 nt, Human
aggccuaggauucuaaa

SEQ ID NO: 1363737 - RNA, 16 nt, Human
aggccuaggauucuaa

SEQ ID NO: 1363738 - RNA, 15 nt, Human
aggccuaggauucua

SEQ ID NO: 1363739 - RNA, 21 nt, Human
aggccuaggaggguccucuga

SEQ ID NO: 1363740 - RNA, 18 nt, Human
aggccuaggaggguccuc

SEQ ID NO: 1363741 - RNA, 17 nt, Human
aggccuaggaggguccu

SEQ ID NO: 1363742 - RNA, 22 nt, Human
aggccuaccccgcagacaccuu

SEQ ID NO: 1363743 - RNA, 19 nt, Human
aggccuaccccgcagacac

SEQ ID NO: 1363744 - RNA, 16 nt, Human
aggccuaccccgcaga

SEQ ID NO: 1363745 - RNA, 22 nt, Human
aggccuaauucuaugccugucu

SEQ ID NO: 1363746 - RNA, 19 nt, Human
aggccuaauucuaugccug

SEQ ID NO: 1363747 - RNA, 15 nt, Human
aggccguggcugcug

SEQ ID NO: 1363748 - RNA, 20 nt, Human
aggccguggcugcuguggga

SEQ ID NO: 1363749 - RNA, 22 nt, Human
aggccuggacuuuccugcaacu

SEQ ID NO: 1363750 - RNA, 19 nt, Human
aggccuggacuuuccugca

SEQ ID NO: 1363751 - RNA, 18 nt, Human
aggccuggacuuuccugc

SEQ ID NO: 1363752 - RNA, 17 nt, Human
aggccuggacuuuccug

SEQ ID NO: 1363753 - RNA, 22 nt, Human
uggcauccagagucccugccug

SEQ ID NO: 1363754 - RNA, 21 nt, Human
uggcauccagagucccugccu

SEQ ID NO: 1363755 - RNA, 20 nt, Human
uggcauccagagucccugcc

SEQ ID NO: 1363756 - RNA, 18 nt, Human
uggcaucaucucagcuca

SEQ ID NO: 1363757 - RNA, 23 nt, Human
aggcaggaccuucgggcugugcc

SEQ ID NO: 1363758 - RNA, 22 nt, Human
aggcaggaccuucgggcugugc

SEQ ID NO: 1363759 - RNA, 21 nt, Human
aggcaggaccuucgggcugug

SEQ ID NO: 1363760 - RNA, 20 nt, Human
aggcaggaguuucguuuuca

SEQ ID NO: 1363761 - RNA, 23 nt, Human
aggcagggaacauggggaggagg

SEQ ID NO: 1363762 - RNA, 17 nt, Human
aggcaggagaaucacuu

SEQ ID NO: 1363763 - RNA, 22 nt, Human
aggcagggaggaggcagagaag

SEQ ID NO: 1363764 - RNA, 21 nt, Human
aggcagggaacauggggagga

SEQ ID NO: 1363765 - RNA, 16 nt, Human
aggcaccaggaagccg

SEQ ID NO: 1363766 - RNA, 15 nt, Human
aggcaccaggaagcc

SEQ ID NO: 1363767 - RNA, 14 nt, Human
aggcaccaggaagc

SEQ ID NO: 1363768 - RNA, 14 nt, Human
aggcagccucuggg

SEQ ID NO: 1363769 - RNA, 13 nt, Human
aggcagccucugg

SEQ ID NO: 1363770 - RNA, 23 nt, Human
aggcagccgugggccccacccuc

SEQ ID NO: 1363771 - RNA, 21 nt, Human
aggcagccucugggggguggc

SEQ ID NO: 1363772 - RNA, 22 nt, Human
aggcagccucugggggguggcc

SEQ ID NO: 1363773 - RNA, 16 nt, Human
aggcagccucuggggg

SEQ ID NO: 1363774 - RNA, 15 nt, Human
aggcagccucugggg

SEQ ID NO: 1363775 - RNA, 20 nt, Human
aggcagcucuaaaugucaau

SEQ ID NO: 1363776 - RNA, 14 nt, Human
aggcagggugcagu

SEQ ID NO: 1363777 - RNA, 23 nt, Human
aggcaguuaccauuaaaccaucu

SEQ ID NO: 1363778 - RNA, 22 nt, Human
aggcaguuaccauuaaaccauc

SEQ ID NO: 1363779 - RNA, 21 nt, Human
aggcaguuaccauuaaaccau

SEQ ID NO: 1363780 - RNA, 18 nt, Human
aggcaguuaccauuaaac

SEQ ID NO: 1363781 - RNA, 24 nt, Human
aggcaguuaccauuaaaccaucuc

SEQ ID NO: 1363782 - RNA, 18 nt, Human
aggcaguucaaagcagga

SEQ ID NO: 1363783 - RNA, 19 nt, Human
aggcaguucaaagcaggau

SEQ ID NO: 1363784 - RNA, 20 nt, Human
uggacccguucaugggggag

SEQ ID NO: 1363785 - RNA, 16 nt, Human
uggaccccugcauugg

SEQ ID NO: 1363786 - RNA, 13 nt, Human
uggaccccugcau

SEQ ID NO: 1363787 - RNA, 12 nt, Human
uggaccccugca

SEQ ID NO: 1363788 - RNA, 21 nt, Human
uggacccguucaugggggagg

SEQ ID NO: 1363789 - RNA, 22 nt, Human
uggacccguucaugggggaggg

SEQ ID NO: 1363790 - RNA, 23 nt, Human
uggaccccccuuucacaggcagc

SEQ ID NO: 1363791 - RNA, 22 nt, Human
uggaccccccuuucacaggcag

SEQ ID NO: 1363792 - RNA, 20 nt, Human
uggaccccccuuucacaggc

SEQ ID NO: 1363793 - RNA, 17 nt, Human
uggaccccccuuucaca

SEQ ID NO: 1363794 - RNA, 15 nt, Human
uggaccccccuuuca

SEQ ID NO: 1363795 - RNA, 17 nt, Human
uggacaccugcccugcc

SEQ ID NO: 1363796 - RNA, 18 nt, Human
uggacaccugcccugccc

SEQ ID NO: 1363797 - RNA, 23 nt, Human
uggacaccugcccugcccugcca

SEQ ID NO: 1363798 - RNA, 17 nt, Human
uggagaagacccucccc

SEQ ID NO: 1363799 - RNA, 16 nt, Human
uggagaagaacugaaa

SEQ ID NO: 1363800 - RNA, 16 nt, Human
uggagcccacuguacu

SEQ ID NO: 1363801 - RNA, 19 nt, Human
uggagcccacuguacuugc

SEQ ID NO: 1363802 - RNA, 23 nt, Human
uggagcccacuguacuugcucuu

SEQ ID NO: 1363803 - RNA, 13 nt, Human
aggcaccaggaag

SEQ ID NO: 1363804 - RNA, 12 nt, Human
aggcaccaggaa

SEQ ID NO: 1363805 - RNA, 11 nt, Human
aggcaccagga

SEQ ID NO: 1363806 - RNA, 18 nt, Human
aggcaccaaaagaaguaa

SEQ ID NO: 1363807 - RNA, 20 nt, Human
aggcaccaaaagaaguaaaa

SEQ ID NO: 1363808 - RNA, 17 nt, Human
aggcaccaaaagaagua

SEQ ID NO: 1363809 - RNA, 16 nt, Human
aggcacaugucagcaa

SEQ ID NO: 1363810 - RNA, 21 nt, Human
aggcaauuagacacuuuggaa

SEQ ID NO: 1363811 - RNA, 12 nt, Human
aggcaauuagac

SEQ ID NO: 1363812 - RNA, 21 nt, Human
uggagcuucauggcagaaggc

SEQ ID NO: 1363813 - RNA, 12 nt, Human
uggagcugagca

SEQ ID NO: 1363814 - RNA, 12 nt, Human
uggagccgaggc

SEQ ID NO: 1363815 - RNA, 17 nt, Human
uggagccgaggccuacc

SEQ ID NO: 1363816 - RNA, 20 nt, Human
aggauuugguccgucauaac

SEQ ID NO: 1363817 - RNA, 20 nt, Human
aggauuucaugauuucauuu

SEQ ID NO: 1363818 - RNA, 19 nt, Human
aggauuucaugauuucauu

SEQ ID NO: 1363819 - RNA, 17 nt, Human
aggauuuauuuaaaaua

SEQ ID NO: 1363820 - RNA, 21 nt, Human
aggauuggggaagagagccug

SEQ ID NO: 1363821 - RNA, 12 nt, Human
aggauuggggaa

SEQ ID NO: 1363822 - RNA, 13 nt, Human
aggaugcuuggga

SEQ ID NO: 1363823 - RNA, 18 nt, Human
aggaugcuuguacauaau

SEQ ID NO: 1363824 - RNA, 23 nt, Human
aggaugcuaacaucuaaaaauag

SEQ ID NO: 1363825 - RNA, 22 nt, Human
aggaugcuaacaucuaaaaaua

SEQ ID NO: 1363826 - RNA, 15 nt, Human
aggaugcuuguacau

SEQ ID NO: 1363827 - RNA, 16 nt, Human
aggaugcuuguacaua

SEQ ID NO: 1363828 - RNA, 18 nt, Human
aggaucucaccaggcagc

SEQ ID NO: 1363829 - RNA, 23 nt, Human
aggaucucaccaggcagccucug

SEQ ID NO: 1363830 - RNA, 17 nt, Human
aggaucucaccaggcag

SEQ ID NO: 1363831 - RNA, 21 nt, Human
aggaucuauuuuuggagguuu

SEQ ID NO: 1363832 - RNA, 20 nt, Human
aggaucuauuuuuggagguu

SEQ ID NO: 1363833 - RNA, 19 nt, Human
aggaucuauuuuuggaggu

SEQ ID NO: 1363834 - RNA, 18 nt, Human
aggaucuauuuuuggagg

SEQ ID NO: 1363835 - RNA, 16 nt, Human
uggaauuugccugcug

SEQ ID NO: 1363836 - RNA, 14 nt, Human
uggaauuugaaaca

SEQ ID NO: 1363837 - RNA, 17 nt, Human
uggaauuugccugcugg

SEQ ID NO: 1363838 - RNA, 22 nt, Human
uggacaaaucacauauuuuaaa

SEQ ID NO: 1363839 - RNA, 10 nt, Human
uggacaccug

SEQ ID NO: 1363840 - RNA, 11 nt, Human
uggacaccugc

SEQ ID NO: 1363841 - RNA, 12 nt, Human
uggacaccugcc

SEQ ID NO: 1363842 - RNA, 13 nt, Human
uggacaccugccc

SEQ ID NO: 1363843 - RNA, 14 nt, Human
uggacaccugcccu

SEQ ID NO: 1363844 - RNA, 15 nt, Human
uggacaccugcccug

SEQ ID NO: 1363845 - RNA, 16 nt, Human
uggacaccugcccugc

SEQ ID NO: 1363846 - RNA, 22 nt, Human
uggaauuuugcaaagauuuaau

SEQ ID NO: 1363847 - RNA, 15 nt, Human
uggaauuuugcaaag

SEQ ID NO: 1363848 - RNA, 23 nt, Human
uggaauuuugcaaagauuuaauc

SEQ ID NO: 1363849 - RNA, 14 nt, Human
uggacaaaauggaa

SEQ ID NO: 1363850 - RNA, 23 nt, Human
uggacaaaucacauauuuuaaaa

SEQ ID NO: 1363851 - RNA, 21 nt, Human
uggacaaaucacauauuuuaa

SEQ ID NO: 1363852 - RNA, 15 nt, Human
uggacaaaucacaua

SEQ ID NO: 1363853 - RNA, 15 nt, Human
uggacaaagaaccuu

SEQ ID NO: 1363854 - RNA, 19 nt, Human
uggacaaaacaagaaagac

SEQ ID NO: 1363855 - RNA, 17 nt, Human
uggacaaaauggaauac

SEQ ID NO: 1363856 - RNA, 17 nt, Human
uggaaguccaauguggc

SEQ ID NO: 1363857 - RNA, 18 nt, Human
uggaagcugcccugccca

SEQ ID NO: 1363858 - RNA, 17 nt, Human
uggaagcugcccugccc

SEQ ID NO: 1363859 - RNA, 20 nt, Human
uggaagcuagacacaugaag

SEQ ID NO: 1363860 - RNA, 23 nt, Human
uggaagcuagacacaugaaggua

SEQ ID NO: 1363861 - RNA, 19 nt, Human
uggaagcuagacacaugaa

SEQ ID NO: 1363862 - RNA, 21 nt, Human
uggaacacuagacaagccaga

SEQ ID NO: 1363863 - RNA, 18 nt, Human
uggaagcuaauuugcauu

SEQ ID NO: 1363864 - RNA, 17 nt, Human
uggaagcuaauuugcau

SEQ ID NO: 1363865 - RNA, 16 nt, Human
uggaagcuaauuugca

SEQ ID NO: 1363866 - RNA, 22 nt, Human
uggaacacuagacaagccagaa

SEQ ID NO: 1363867 - RNA, 20 nt, Human
uggaacacuagacaagccag

SEQ ID NO: 1363868 - RNA, 17 nt, Human
uggaacacggccacauc

SEQ ID NO: 1363869 - RNA, 15 nt, Human
uggaacacggccaca

SEQ ID NO: 1363870 - RNA, 15 nt, Human
uggaacaccaggcug

SEQ ID NO: 1363871 - RNA, 14 nt, Human
uggaacaccaggcu

SEQ ID NO: 1363872 - RNA, 17 nt, Human
ugcugcccauguuucaa

SEQ ID NO: 1363873 - RNA, 21 nt, Human
ugcugccccaucagugcuccc

SEQ ID NO: 1363874 - RNA, 19 nt, Human
ugcugccccaucagugcuc

SEQ ID NO: 1363875 - RNA, 18 nt, Human
ugcugccccaucagugcu

SEQ ID NO: 1363876 - RNA, 16 nt, Human
ugcugcccauguuuca

SEQ ID NO: 1363877 - RNA, 14 nt, Human
aggaguuuggagga

SEQ ID NO: 1363878 - RNA, 19 nt, Human
aggaguuucguuuucaaaa

SEQ ID NO: 1363879 - RNA, 14 nt, Human
uggaagugcuaauu

SEQ ID NO: 1363880 - RNA, 19 nt, Human
uggaagugaaaacuuugua

SEQ ID NO: 1363881 - RNA, 18 nt, Human
uggaagugaaaacuuugu

SEQ ID NO: 1363882 - RNA, 15 nt, Human
uggaagugacuuugg

SEQ ID NO: 1363883 - RNA, 17 nt, Human
uggaagugacuuuggcu

SEQ ID NO: 1363884 - RNA, 23 nt, Human
uggaagugacuuuggcugcaugc

SEQ ID NO: 1363885 - RNA, 14 nt, Human
agggagucugccag

SEQ ID NO: 1363886 - RNA, 13 nt, Human
agggagucugcca

SEQ ID NO: 1363887 - RNA, 15 nt, Human
agggagggcugucau

SEQ ID NO: 1363888 - RNA, 20 nt, Human
agggagggcucugaggcgcc

SEQ ID NO: 1363889 - RNA, 18 nt, Human
agggagggcucugaggcg

SEQ ID NO: 1363890 - RNA, 17 nt, Human
agggagggcucugaggc

SEQ ID NO: 1363891 - RNA, 16 nt, Human
agggagggcucugagg

SEQ ID NO: 1363892 - RNA, 15 nt, Human
agggagggcucugag

SEQ ID NO: 1363893 - RNA, 14 nt, Human
agggagggcucuga

SEQ ID NO: 1363894 - RNA, 13 nt, Human
agggagggcucug

SEQ ID NO: 1363895 - RNA, 12 nt, Human
agggagggcucu

SEQ ID NO: 1363896 - RNA, 21 nt, Human
agggagggcagagcuggugcg

SEQ ID NO: 1363897 - RNA, 20 nt, Human
agggagggcagagcuggugc

SEQ ID NO: 1363898 - RNA, 19 nt, Human
agggagggcagagcuggug

SEQ ID NO: 1363899 - RNA, 18 nt, Human
agggagggcagagcuggu

SEQ ID NO: 1363900 - RNA, 17 nt, Human
agggagggcagagcugg

SEQ ID NO: 1363901 - RNA, 16 nt, Human
agggagggcagagcug

SEQ ID NO: 1363902 - RNA, 12 nt, Human
agggagggcaga

SEQ ID NO: 1363903 - RNA, 13 nt, Human
agggagggagugg

SEQ ID NO: 1363904 - RNA, 16 nt, Human
ugggccaacucaccug

SEQ ID NO: 1363905 - RNA, 23 nt, Human
ugggccaacaaagaacacuaacu

SEQ ID NO: 1363906 - RNA, 22 nt, Human
agggcaguucgcagccacccug

SEQ ID NO: 1363907 - RNA, 16 nt, Human
agggcauaaauuauug

SEQ ID NO: 1363908 - RNA, 23 nt, Human
agggcaguucgcagccacccuga

SEQ ID NO: 1363909 - RNA, 21 nt, Human
agggccaagcccagcacugcu

SEQ ID NO: 1363910 - RNA, 16 nt, Human
agggccaaagaaccaa

SEQ ID NO: 1363911 - RNA, 23 nt, Human
agggccaaagaaccaaagaagaa

SEQ ID NO: 1363912 - RNA, 13 nt, Human
agggccaaagaac

SEQ ID NO: 1363913 - RNA, 21 nt, Human
agggcaguucgcagccacccu

SEQ ID NO: 1363914 - RNA, 20 nt, Human
agggcaguucgcagccaccc

SEQ ID NO: 1363915 - RNA, 19 nt, Human
agggcaguucgcagccacc

SEQ ID NO: 1363916 - RNA, 18 nt, Human
agggcaguucgcagccac

SEQ ID NO: 1363917 - RNA, 17 nt, Human
agggcaguucgcagcca

SEQ ID NO: 1363918 - RNA, 16 nt, Human
agggcaguucgcagcc

SEQ ID NO: 1363919 - RNA, 14 nt, Human
agggcaguucgcag

SEQ ID NO: 1363920 - RNA, 12 nt, Human
agggcagaguga

SEQ ID NO: 1363921 - RNA, 16 nt, Human
agggcagagcuggugc

SEQ ID NO: 1363922 - RNA, 17 nt, Human
agggcagagcuggugcg

SEQ ID NO: 1363923 - RNA, 15 nt, Human
agggcagagcuggug

SEQ ID NO: 1363924 - RNA, 14 nt, Human
agggcagagcuggu

SEQ ID NO: 1363925 - RNA, 13 nt, Human
agggcagagcugg

SEQ ID NO: 1363926 - RNA, 12 nt, Human
agggcagagcug

SEQ ID NO: 1363927 - RNA, 17 nt, Human
agggaguguucccuauc

SEQ ID NO: 1363928 - RNA, 20 nt, Human
agggcagaccacauugcuuu

SEQ ID NO: 1363929 - RNA, 19 nt, Human
agggccccucacccugccu

SEQ ID NO: 1363930 - RNA, 14 nt, Human
agggcuccagcccc

SEQ ID NO: 1363931 - RNA, 13 nt, Human
agggccccucucc

SEQ ID NO: 1363932 - RNA, 12 nt, Human
agggccccucuc

SEQ ID NO: 1363933 - RNA, 18 nt, Human
agggccccucuccccagg

SEQ ID NO: 1363934 - RNA, 21 nt, Human
agggcccagagcccagcucca

SEQ ID NO: 1363935 - RNA, 20 nt, Human
agggcccagagcccagcucc

SEQ ID NO: 1363936 - RNA, 19 nt, Human
agggcccagagcccagcuc

SEQ ID NO: 1363937 - RNA, 18 nt, Human
agggcccagagcccagcu

SEQ ID NO: 1363938 - RNA, 17 nt, Human
agggcccagagcccagc

SEQ ID NO: 1363939 - RNA, 19 nt, Human
agggccacaucccacugcc

SEQ ID NO: 1363940 - RNA, 20 nt, Human
agggcugcuucccugaagcu

SEQ ID NO: 1363941 - RNA, 18 nt, Human
agggcuccuugugggccu

SEQ ID NO: 1363942 - RNA, 16 nt, Human
agggcugagcugggga

SEQ ID NO: 1363943 - RNA, 17 nt, Human
agggcugagcucucugu

SEQ ID NO: 1363944 - RNA, 12 nt, Human
agggcuccuggg

SEQ ID NO: 1363945 - RNA, 11 nt, Human
agggcuccugc

SEQ ID NO: 1363946 - RNA, 23 nt, Human
agggcuccagccccucuuggaga

SEQ ID NO: 1363947 - RNA, 20 nt, Human
agggcuccagccccucuugg

SEQ ID NO: 1363948 - RNA, 15 nt, Human
agggcuccagccccu

SEQ ID NO: 1363949 - RNA, 15 nt, Human
agggcuccuauucaa

SEQ ID NO: 1363950 - RNA, 14 nt, Human
ugggcucugaugaa

SEQ ID NO: 1363951 - RNA, 13 nt, Human
ugggcucugauga

SEQ ID NO: 1363952 - RNA, 11 nt, Human
ugggcucugau

SEQ ID NO: 1363953 - RNA, 21 nt, Human
ugggcucugaguaccccugcu

SEQ ID NO: 1363954 - RNA, 18 nt, Human
ugggcuccuggacccccc

SEQ ID NO: 1363955 - RNA, 13 nt, Human
ugggcuccuggac

SEQ ID NO: 1363956 - RNA, 12 nt, Human
ugggcuccugga

SEQ ID NO: 1363957 - RNA, 11 nt, Human
ugggcuccugg

SEQ ID NO: 1363958 - RNA, 18 nt, Human
ugggcuccgugugggaga

SEQ ID NO: 1363959 - RNA, 23 nt, Human
ugggcuccuccagggugugugcu

SEQ ID NO: 1363960 - RNA, 15 nt, Human
ugggcuccuccaggg

SEQ ID NO: 1363961 - RNA, 13 nt, Human
ugggcuccuccag

SEQ ID NO: 1363962 - RNA, 21 nt, Human
ugggcuccggaggacucacca

SEQ ID NO: 1363963 - RNA, 19 nt, Human
ugggcucccugacugggag

SEQ ID NO: 1363964 - RNA, 15 nt, Human
ugggcucccugacug

SEQ ID NO: 1363965 - RNA, 11 nt, Human
ugggcucccug

SEQ ID NO: 1363966 - RNA, 19 nt, Human
ugggcucagugaaguugcu

SEQ ID NO: 1363967 - RNA, 14 nt, Human
ugggcucagugaag

SEQ ID NO: 1363968 - RNA, 18 nt, Human
agggcugggaggaaggac

SEQ ID NO: 1363969 - RNA, 16 nt, Human
agggcugggaggaagg

SEQ ID NO: 1363970 - RNA, 14 nt, Human
agggcugggaggaa

SEQ ID NO: 1363971 - RNA, 12 nt, Human
agggcugggagg

SEQ ID NO: 1363972 - RNA, 17 nt, Human
agggcuggcuggccuca

SEQ ID NO: 1363973 - RNA, 20 nt, Human
agggcuggcuggccucaccc

SEQ ID NO: 1363974 - RNA, 13 nt, Human
agggcuggcuggc

SEQ ID NO: 1363975 - RNA, 12 nt, Human
agggcuggcugg

SEQ ID NO: 1363976 - RNA, 17 nt, Human
agggcuggcucaauuga

SEQ ID NO: 1363977 - RNA, 21 nt, Human
agggcuggaggcccaggcugg

SEQ ID NO: 1363978 - RNA, 19 nt, Human
agggcuggaggcccaggcu

SEQ ID NO: 1363979 - RNA, 18 nt, Human
agggcuggaggcccaggc

SEQ ID NO: 1363980 - RNA, 17 nt, Human
agggcuggaggcccagg

SEQ ID NO: 1363981 - RNA, 16 nt, Human
agggcuggaggcccag

SEQ ID NO: 1363982 - RNA, 15 nt, Human
agggcuggaggccca

SEQ ID NO: 1363983 - RNA, 18 nt, Human
ugggcucaaccagaaaag

SEQ ID NO: 1363984 - RNA, 19 nt, Human
agggcuguaacugccaggc

SEQ ID NO: 1363985 - RNA, 20 nt, Human
agggcugucaucugugcacu

SEQ ID NO: 1363986 - RNA, 19 nt, Human
agggcugucaucugugcac

SEQ ID NO: 1363987 - RNA, 18 nt, Human
agggcugucaucugugca

SEQ ID NO: 1363988 - RNA, 20 nt, Human
agggcuguaacugccaggcu

SEQ ID NO: 1363989 - RNA, 18 nt, Human
agggcuguaacugccagg

SEQ ID NO: 1363990 - RNA, 22 nt, Human
agggcuguuauaaucuuucaca

SEQ ID NO: 1363991 - RNA, 17 nt, Human
agggagccauuugagag

SEQ ID NO: 1363992 - RNA, 15 nt, Human
agggagccauuugag

SEQ ID NO: 1363993 - RNA, 16 nt, Human
agggagccauguuuca

SEQ ID NO: 1363994 - RNA, 21 nt, Human
agggagccaagggauggacau

SEQ ID NO: 1363995 - RNA, 20 nt, Human
agggagccaagggauggaca

SEQ ID NO: 1363996 - RNA, 17 nt, Human
agggagccaagggaugg

SEQ ID NO: 1363997 - RNA, 16 nt, Human
agggagccaagggaug

SEQ ID NO: 1363998 - RNA, 15 nt, Human
agggagccaagggau

SEQ ID NO: 1363999 - RNA, 14 nt, Human
agggagccaaggga

SEQ ID NO: 1364000 - RNA, 13 nt, Human
agggagccaaggg

SEQ ID NO: 1364001 - RNA, 12 nt, Human
agggagccaagg

SEQ ID NO: 1364002 - RNA, 11 nt, Human
agggagccaag

SEQ ID NO: 1364003 - RNA, 10 nt, Human
agggagccaa

SEQ ID NO: 1364004 - RNA, 17 nt, Human
agggagcaugagaggag

SEQ ID NO: 1364005 - RNA, 20 nt, Human
agggagcaugagaggaggca

SEQ ID NO: 1364006 - RNA, 19 nt, Human
agggagcggccggccagcc

SEQ ID NO: 1364007 - RNA, 14 nt, Human
agggagccuggccc

SEQ ID NO: 1364008 - RNA, 22 nt, Human
agggagcggccggccagccccu

SEQ ID NO: 1364009 - RNA, 21 nt, Human
agggagcggccggccagcccc

SEQ ID NO: 1364010 - RNA, 19 nt, Human
ugggacuagccuggcuugg

SEQ ID NO: 1364011 - RNA, 17 nt, Human
ugggacuagccuggcuu

SEQ ID NO: 1364012 - RNA, 15 nt, Human
ugggagaaaugaaaa

SEQ ID NO: 1364013 - RNA, 22 nt, Human
agggacuucaggaucaaguccu

SEQ ID NO: 1364014 - RNA, 18 nt, Human
agggaaaggccagcacuc

SEQ ID NO: 1364015 - RNA, 13 nt, Human
agggaaaggccag

SEQ ID NO: 1364016 - RNA, 13 nt, Human
agggaaagcccau

SEQ ID NO: 1364017 - RNA, 22 nt, Human
agggaaagcccauaugcuacca

SEQ ID NO: 1364018 - RNA, 13 nt, Human
agggaaauuucag

SEQ ID NO: 1364019 - RNA, 20 nt, Human
agggagacacuggccccuca

SEQ ID NO: 1364020 - RNA, 13 nt, Human
agggagaagcucc

SEQ ID NO: 1364021 - RNA, 21 nt, Human
agggagacuggguaggaaaga

SEQ ID NO: 1364022 - RNA, 13 nt, Human
ugggaggcucacc

SEQ ID NO: 1364023 - RNA, 19 nt, Human
ugggagaaaucuggcuucu

SEQ ID NO: 1364024 - RNA, 16 nt, Human
ugggagaaaugaaaaa

SEQ ID NO: 1364025 - RNA, 22 nt, Human
ugggagggaggcucaggucccu

SEQ ID NO: 1364026 - RNA, 17 nt, Human
ugggagggaggcucagg

SEQ ID NO: 1364027 - RNA, 16 nt, Human
ugggagggaggcucag

SEQ ID NO: 1364028 - RNA, 15 nt, Human
ugggaggcuccccuu

SEQ ID NO: 1364029 - RNA, 14 nt, Human
ugggaggcuccccu

SEQ ID NO: 1364030 - RNA, 22 nt, Human
ugggaggcucacccccuucucc

SEQ ID NO: 1364031 - RNA, 20 nt, Human
ugggaggcucacccccuucu

SEQ ID NO: 1364032 - RNA, 14 nt, Human
ugggaggcucugga

SEQ ID NO: 1364033 - RNA, 17 nt, Human
ugggaggcucuggagcc

SEQ ID NO: 1364034 - RNA, 23 nt, Human
ugggaggcucuggagcccacugu

SEQ ID NO: 1364035 - RNA, 21 nt, Human
ugggcaaagccuagugaaggc

SEQ ID NO: 1364036 - RNA, 15 nt, Human
ugggcaaagccuagu

SEQ ID NO: 1364037 - RNA, 22 nt, Human
ugggcaagcuggcggcuggggu

SEQ ID NO: 1364038 - RNA, 19 nt, Human
ugggagggcagcagggcua

SEQ ID NO: 1364039 - RNA, 18 nt, Human
ugggagggcagcagggcu

SEQ ID NO: 1364040 - RNA, 17 nt, Human
ugggagggcagcagggc

SEQ ID NO: 1364041 - RNA, 14 nt, Human
ugggagggcagcag

SEQ ID NO: 1364042 - RNA, 15 nt, Human
ugggcaauugucuga

SEQ ID NO: 1364043 - RNA, 19 nt, Human
ugggcaaugauggcaauuu

SEQ ID NO: 1364044 - RNA, 14 nt, Human
ugggcauucaaaug

SEQ ID NO: 1364045 - RNA, 20 nt, Human
aggcuugguuccuucccaau

SEQ ID NO: 1364046 - RNA, 19 nt, Human
aggcuugguuccuucccaa

SEQ ID NO: 1364047 - RNA, 14 nt, Human
aggcuugguuccuu

SEQ ID NO: 1364048 - RNA, 17 nt, Human
aggcuuggggcuggaga

SEQ ID NO: 1364049 - RNA, 21 nt, Human
aggcuugggauuugcugugua

SEQ ID NO: 1364050 - RNA, 17 nt, Human
aggcuugccugcaggca

SEQ ID NO: 1364051 - RNA, 16 nt, Human
aggcuugccugcaggc

SEQ ID NO: 1364052 - RNA, 15 nt, Human
aggcuugccugcagg

SEQ ID NO: 1364053 - RNA, 21 nt, Human
aggcuucugcuggggccuggg

SEQ ID NO: 1364054 - RNA, 21 nt, Human
aggcuuccuucauuuccuccg

SEQ ID NO: 1364055 - RNA, 15 nt, Human
aggcuucugagcagc

SEQ ID NO: 1364056 - RNA, 16 nt, Human
aggcuucucucugugg

SEQ ID NO: 1364057 - RNA, 19 nt, Human
aggcuucugcuggggccug

SEQ ID NO: 1364058 - RNA, 18 nt, Human
aggcuucugcuggggccu

SEQ ID NO: 1364059 - RNA, 17 nt, Human
aggcuucugcuggggcc

SEQ ID NO: 1364060 - RNA, 14 nt, Human
aggcuucugcuggg

SEQ ID NO: 1364061 - RNA, 19 nt, Human
aggcuuccuucauuuccuc

SEQ ID NO: 1364062 - RNA, 18 nt, Human
aggcuuccuucauuuccu

SEQ ID NO: 1364063 - RNA, 16 nt, Human
aggcuuccuucauuuc

SEQ ID NO: 1364064 - RNA, 14 nt, Human
aggcuuccuucauu

SEQ ID NO: 1364065 - RNA, 23 nt, Human
aggcuuccacguacugcagccuc

SEQ ID NO: 1364066 - RNA, 19 nt, Human
aggcuucaaaauguuaucu

SEQ ID NO: 1364067 - RNA, 15 nt, Human
aggcuuaguuugugu

SEQ ID NO: 1364068 - RNA, 14 nt, Human
aggcuuaguuugug

SEQ ID NO: 1364069 - RNA, 18 nt, Human
agggaaaauuauuugcau

SEQ ID NO: 1364070 - RNA, 20 nt, Human
agggaaaauaggcaggaagc

SEQ ID NO: 1364071 - RNA, 18 nt, Human
agggaaaauaggcaggaa

SEQ ID NO: 1364072 - RNA, 23 nt, Human
aggcuuuaugauaauagauucuc

SEQ ID NO: 1364073 - RNA, 22 nt, Human
aggcuuuaugauaauagauucu

SEQ ID NO: 1364074 - RNA, 15 nt, Human
aggcuuguugugcuu

SEQ ID NO: 1364075 - RNA, 16 nt, Human
aggcuuguugugcuuu

SEQ ID NO: 1364076 - RNA, 14 nt, Human
aggcuuguugugcu

SEQ ID NO: 1364077 - RNA, 13 nt, Human
aggcuuucucuac

SEQ ID NO: 1364078 - RNA, 15 nt, Human
aggcuuuuuuaucau

SEQ ID NO: 1364079 - RNA, 18 nt, Human
aggcuuuuuuaucaugug

SEQ ID NO: 1364080 - RNA, 21 nt, Human
aggcuuuuuuaucaugugaaa

SEQ ID NO: 1364081 - RNA, 22 nt, Human
aggcuuuuguuuccuuuuucag

SEQ ID NO: 1364082 - RNA, 19 nt, Human
aggcuuuggauuugacauu

SEQ ID NO: 1364083 - RNA, 15 nt, Human
agggaaaacauucca

SEQ ID NO: 1364084 - RNA, 16 nt, Human
agggaaaacauuccau

SEQ ID NO: 1364085 - RNA, 18 nt, Human
agggaaaacauuccaucc

SEQ ID NO: 1364086 - RNA, 22 nt, Human
aggcugggccauguccaaagag

SEQ ID NO: 1364087 - RNA, 21 nt, Human
aggcugggccauguccaaaga

SEQ ID NO: 1364088 - RNA, 20 nt, Human
aggcugggccauguccaaag

SEQ ID NO: 1364089 - RNA, 18 nt, Human
aggcugggccauguccaa

SEQ ID NO: 1364090 - RNA, 12 nt, Human
aggcugggccau

SEQ ID NO: 1364091 - RNA, 10 nt, Human
aggcugggcc

SEQ ID NO: 1364092 - RNA, 22 nt, Human
ugggaaccccuucauccucuga

SEQ ID NO: 1364093 - RNA, 20 nt, Human
ugggaaccccuucauccucu

SEQ ID NO: 1364094 - RNA, 10 nt, Human
aggcuggguc

SEQ ID NO: 1364095 - RNA, 15 nt, Human
aggcugggucgcccu

SEQ ID NO: 1364096 - RNA, 18 nt, Human
aggcugggucgcccugga

SEQ ID NO: 1364097 - RNA, 20 nt, Human
aggcugggucgcccuggacu

SEQ ID NO: 1364098 - RNA, 21 nt, Human
aggcugggucgcccuggacug

SEQ ID NO: 1364099 - RNA, 18 nt, Human
uggcugacaugaagcugu

SEQ ID NO: 1364100 - RNA, 21 nt, Human
uggcugaauagcuucuccaaa

SEQ ID NO: 1364101 - RNA, 22 nt, Human
uggcugaaauucuccuggaggu

SEQ ID NO: 1364102 - RNA, 21 nt, Human
uggcugaaauucuccuggagg

SEQ ID NO: 1364103 - RNA, 20 nt, Human
uggcugaaauucuccuggag

SEQ ID NO: 1364104 - RNA, 19 nt, Human
uggcugaaauucuccugga

SEQ ID NO: 1364105 - RNA, 18 nt, Human
uggcugaaauucuccugg

SEQ ID NO: 1364106 - RNA, 16 nt, Human
uggcugaaauucuccu

SEQ ID NO: 1364107 - RNA, 23 nt, Human
uggcucuugauaccccccucugu

SEQ ID NO: 1364108 - RNA, 21 nt, Human
uggcucuugauaccccccucu

SEQ ID NO: 1364109 - RNA, 20 nt, Human
uggcucuugauaccccccuc

SEQ ID NO: 1364110 - RNA, 19 nt, Human
uggcucuugauaccccccu

SEQ ID NO: 1364111 - RNA, 18 nt, Human
uggcucacucagcacuug

SEQ ID NO: 1364112 - RNA, 16 nt, Human
uggcucagccagcacu

SEQ ID NO: 1364113 - RNA, 13 nt, Human
uggcucagccagc

SEQ ID NO: 1364114 - RNA, 12 nt, Human
uggcucagccag

SEQ ID NO: 1364115 - RNA, 21 nt, Human
uggcucacacucgacaugaaa

SEQ ID NO: 1364116 - RNA, 18 nt, Human
uggcuauagaugucuuuu

SEQ ID NO: 1364117 - RNA, 17 nt, Human
uggcuauagaugucuuu

SEQ ID NO: 1364118 - RNA, 19 nt, Human
uggcuauagaugucuuuuc

SEQ ID NO: 1364119 - RNA, 17 nt, Human
uggcucacucagcacuu

SEQ ID NO: 1364120 - RNA, 22 nt, Human
uggcucacucagcacuuggccc

SEQ ID NO: 1364121 - RNA, 17 nt, Human
uggcucacgccuguaau

SEQ ID NO: 1364122 - RNA, 17 nt, Human
uggcucacacucgacau

SEQ ID NO: 1364123 - RNA, 22 nt, Human
uggcuauagaugucuuuuccca

SEQ ID NO: 1364124 - RNA, 24 nt, Human
uggcuacucugugccagagccugg

SEQ ID NO: 1364125 - RNA, 23 nt, Human
uggcuacucugugccagagccug

SEQ ID NO: 1364126 - RNA, 22 nt, Human
uggcuacucugugccagagccu

SEQ ID NO: 1364127 - RNA, 21 nt, Human
uggcuacucugugccagagcc

SEQ ID NO: 1364128 - RNA, 20 nt, Human
uggcuacucugugccagagc

SEQ ID NO: 1364129 - RNA, 19 nt, Human
uggcuacucugugccagag

SEQ ID NO: 1364130 - RNA, 18 nt, Human
uggcuacucugugccaga

SEQ ID NO: 1364131 - RNA, 17 nt, Human
uggcuacucugugccag

SEQ ID NO: 1364132 - RNA, 16 nt, Human
uggcuacucugugcca

SEQ ID NO: 1364133 - RNA, 15 nt, Human
uggcuacucugugcc

SEQ ID NO: 1364134 - RNA, 14 nt, Human
uggcuacucugugc

SEQ ID NO: 1364135 - RNA, 16 nt, Human
aggcuccagagggcac

SEQ ID NO: 1364136 - RNA, 15 nt, Human
aggcuccagagggca

SEQ ID NO: 1364137 - RNA, 15 nt, Human
aggcucccagggaca

SEQ ID NO: 1364138 - RNA, 14 nt, Human
uggcuaaccaagag

SEQ ID NO: 1364139 - RNA, 13 nt, Human
aggcuccccuucu

SEQ ID NO: 1364140 - RNA, 20 nt, Human
uggcuguggccuaaccugcc

SEQ ID NO: 1364141 - RNA, 14 nt, Human
uggcuguggcaggc

SEQ ID NO: 1364142 - RNA, 17 nt, Human
uggcuguggcauccaga

SEQ ID NO: 1364143 - RNA, 19 nt, Human
uggcugcaggaaucuuuaa

SEQ ID NO: 1364144 - RNA, 16 nt, Human
uggcugcaggaaucuu

SEQ ID NO: 1364145 - RNA, 14 nt, Human
uggcugcaggaauc

SEQ ID NO: 1364146 - RNA, 23 nt, Human
uggcugcagccucaggacuggga

SEQ ID NO: 1364147 - RNA, 20 nt, Human
uggcugcagccucaggacug

SEQ ID NO: 1364148 - RNA, 17 nt, Human
uggcugcagccucagga

SEQ ID NO: 1364149 - RNA, 16 nt, Human
uggcugcagccucagg

SEQ ID NO: 1364150 - RNA, 15 nt, Human
uggcugcagccucag

SEQ ID NO: 1364151 - RNA, 13 nt, Human
uggcugcagccuc

SEQ ID NO: 1364152 - RNA, 12 nt, Human
uggcugcagccu

SEQ ID NO: 1364153 - RNA, 19 nt, Human
uggcugagauaugaacaua

SEQ ID NO: 1364154 - RNA, 20 nt, Human
uggcugacuuacaucaugug

SEQ ID NO: 1364155 - RNA, 18 nt, Human
ugggaaacuuggcucgaa

SEQ ID NO: 1364156 - RNA, 16 nt, Human
ugggaaaaauguagga

SEQ ID NO: 1364157 - RNA, 17 nt, Human
ugggaaaaauguaggag

SEQ ID NO: 1364158 - RNA, 14 nt, Human
uggcuguuugagau

SEQ ID NO: 1364159 - RNA, 21 nt, Human
uggcuuuugugcauuaucuag

SEQ ID NO: 1364160 - RNA, 18 nt, Human
ugggaaacaaaaggauaa

SEQ ID NO: 1364161 - RNA, 16 nt, Human
uggcuuuugugcauua

SEQ ID NO: 1364162 - RNA, 15 nt, Human
uguacauaacugaaa

SEQ ID NO: 1364163 - RNA, 14 nt, Human
uguacauaacugaa

SEQ ID NO: 1364164 - RNA, 13 nt, Human
uguacauaacuga

SEQ ID NO: 1364165 - RNA, 17 nt, Human
uguacaaaauaaacaaa

SEQ ID NO: 1364166 - RNA, 22 nt, Human
uguacaaaauaaacaaauaaca

SEQ ID NO: 1364167 - RNA, 19 nt, Human
uguacauaaugcgugcaua

SEQ ID NO: 1364168 - RNA, 20 nt, Human
uguacauaaugcgugcauac

SEQ ID NO: 1364169 - RNA, 20 nt, Human
uguaauuuuguguaagaaau

SEQ ID NO: 1364170 - RNA, 16 nt, Human
uguaauuuuguguaag

SEQ ID NO: 1364171 - RNA, 15 nt, Human
uguaauuuuguguaa

SEQ ID NO: 1364172 - RNA, 21 nt, Human
uguaauuguguggauucuuua

SEQ ID NO: 1364173 - RNA, 20 nt, Human
uguaauuguguggauucuuu

SEQ ID NO: 1364174 - RNA, 16 nt, Human
uguaauuguguggauu

SEQ ID NO: 1364175 - RNA, 13 nt, Human
uguacaaaauaaa

SEQ ID NO: 1364176 - RNA, 20 nt, Human
uguaauuuuuuuaucgucac

SEQ ID NO: 1364177 - RNA, 23 nt, Human
uguacaucuauuuuggauuguau

SEQ ID NO: 1364178 - RNA, 16 nt, Human
uguacaugaaaacaca

SEQ ID NO: 1364179 - RNA, 21 nt, Human
uguacaucuauuuuggauugu

SEQ ID NO: 1364180 - RNA, 20 nt, Human
uguacaucuauuuuggauug

SEQ ID NO: 1364181 - RNA, 19 nt, Human
uguacaucuauuuuggauu

SEQ ID NO: 1364182 - RNA, 18 nt, Human
uguacaucuauuuuggau

SEQ ID NO: 1364183 - RNA, 14 nt, Human
uguacaugaaaaca

SEQ ID NO: 1364184 - RNA, 21 nt, Human
uguacauacccuggccgcccc

SEQ ID NO: 1364185 - RNA, 19 nt, Human
uguacauaacugaaaaugu

SEQ ID NO: 1364186 - RNA, 18 nt, Human
uguacauaacugaaaaug

SEQ ID NO: 1364187 - RNA, 17 nt, Human
uguacauaacugaaaau

SEQ ID NO: 1364188 - RNA, 18 nt, Human
uguacauaguuauuuauu

SEQ ID NO: 1364189 - RNA, 14 nt, Human
uguacauauaagug

SEQ ID NO: 1364190 - RNA, 19 nt, Human
uguaauugaauauuauucc

SEQ ID NO: 1364191 - RNA, 17 nt, Human
uguaauugaauauuauu

SEQ ID NO: 1364192 - RNA, 16 nt, Human
uguaauucuaaaugaa

SEQ ID NO: 1364193 - RNA, 15 nt, Human
uguaauucuaaauga

SEQ ID NO: 1364194 - RNA, 14 nt, Human
uguaauucuaaaug

SEQ ID NO: 1364195 - RNA, 13 nt, Human
uguaauucuaaau

SEQ ID NO: 1364196 - RNA, 19 nt, Human
uguaauucagguuuuuccu

SEQ ID NO: 1364197 - RNA, 21 nt, Human
uguaaggcuguguaagauuug

SEQ ID NO: 1364198 - RNA, 20 nt, Human
uguaaggcuguguaagauuu

SEQ ID NO: 1364199 - RNA, 14 nt, Human
uguaaggcugugua

SEQ ID NO: 1364200 - RNA, 18 nt, Human
uguaaggcucuagaucau

SEQ ID NO: 1364201 - RNA, 15 nt, Human
uguaaggcucuagau

SEQ ID NO: 1364202 - RNA, 14 nt, Human
uguaaggcucuaga

SEQ ID NO: 1364203 - RNA, 21 nt, Human
agguuucugaguuccugcaug

SEQ ID NO: 1364204 - RNA, 19 nt, Human
agguuucugaguuccugca

SEQ ID NO: 1364205 - RNA, 14 nt, Human
agguuucaaagaug

SEQ ID NO: 1364206 - RNA, 13 nt, Human
agguuucaaagau

SEQ ID NO: 1364207 - RNA, 17 nt, Human
agguuucaaagaugcug

SEQ ID NO: 1364208 - RNA, 20 nt, Human
agguuucacuguguuggcca

SEQ ID NO: 1364209 - RNA, 16 nt, Human
ugggcugagggagccu

SEQ ID NO: 1364210 - RNA, 12 nt, Human
ugggcugaggga

SEQ ID NO: 1364211 - RNA, 15 nt, Human
ugggcucugaugaaa

SEQ ID NO: 1364212 - RNA, 22 nt, Human
ugggcucugcaauuccccucug

SEQ ID NO: 1364213 - RNA, 20 nt, Human
ugggcucugcaauuccccuc

SEQ ID NO: 1364214 - RNA, 23 nt, Human
aggugcuaauuuguuuuggauau

SEQ ID NO: 1364215 - RNA, 20 nt, Human
aggugcuaauuuguuuugga

SEQ ID NO: 1364216 - RNA, 17 nt, Human
aggugcuaauuuguuuu

SEQ ID NO: 1364217 - RNA, 21 nt, Human
aggugucauacagauuugcaa

SEQ ID NO: 1364218 - RNA, 15 nt, Human
aggugucauacagau

SEQ ID NO: 1364219 - RNA, 20 nt, Human
agguguagccacaccaggau

SEQ ID NO: 1364220 - RNA, 18 nt, Human
agguggggagacugggcu

SEQ ID NO: 1364221 - RNA, 17 nt, Human
agguucuuguuggugca

SEQ ID NO: 1364222 - RNA, 18 nt, Human
agguucuuguuggugcac

SEQ ID NO: 1364223 - RNA, 13 nt, Human
agguugaaaaaca

SEQ ID NO: 1364224 - RNA, 17 nt, Human
aguacagagaagccauc

SEQ ID NO: 1364225 - RNA, 20 nt, Human
aguacagagaagccaucacc

SEQ ID NO: 1364226 - RNA, 16 nt, Human
aguacagagaagccau

SEQ ID NO: 1364227 - RNA, 15 nt, Human
aguacagagaagcca

SEQ ID NO: 1364228 - RNA, 14 nt, Human
aguacagagaagcc

SEQ ID NO: 1364229 - RNA, 13 nt, Human
aguacagagaagc

SEQ ID NO: 1364230 - RNA, 12 nt, Human
aguacagagaag

SEQ ID NO: 1364231 - RNA, 17 nt, Human
aguaauuuagaaaucau

SEQ ID NO: 1364232 - RNA, 23 nt, Human
aguacacuguuucaaacuuuacu

SEQ ID NO: 1364233 - RNA, 22 nt, Human
aguaauugguccgaucuuugac

SEQ ID NO: 1364234 - RNA, 23 nt, Human
aguaauuuagaaaucauuuugca

SEQ ID NO: 1364235 - RNA, 14 nt, Human
aguaauuuagaaau

SEQ ID NO: 1364236 - RNA, 12 nt, Human
aguaauuuagaa

SEQ ID NO: 1364237 - RNA, 21 nt, Human
aguacacuguuucaaacuuua

SEQ ID NO: 1364238 - RNA, 20 nt, Human
aguaauugacaugugccagg

SEQ ID NO: 1364239 - RNA, 18 nt, Human
aguaauugacaugugcca

SEQ ID NO: 1364240 - RNA, 13 nt, Human
aguaauuggaaag

SEQ ID NO: 1364241 - RNA, 12 nt, Human
aguaauuggaaa

SEQ ID NO: 1364242 - RNA, 23 nt, Human
aguaaucugcauuauuggaauau

SEQ ID NO: 1364243 - RNA, 13 nt, Human
aguaaucugcauu

SEQ ID NO: 1364244 - RNA, 19 nt, Human
aguaaucuaauauggccac

SEQ ID NO: 1364245 - RNA, 13 nt, Human
aguaaugauaacu

SEQ ID NO: 1364246 - RNA, 23 nt, Human
aguaauaaaauucaacaaacauu

SEQ ID NO: 1364247 - RNA, 15 nt, Human
aguaauaaaauucaa

SEQ ID NO: 1364248 - RNA, 22 nt, Human
aguaauaaaauucaacaaacau

SEQ ID NO: 1364249 - RNA, 13 nt, Human
aguaauacaaacu

SEQ ID NO: 1364250 - RNA, 22 nt, Human
uguacaugaagaagcuaaaucc

SEQ ID NO: 1364251 - RNA, 16 nt, Human
uguacaugagaaggaa

SEQ ID NO: 1364252 - RNA, 17 nt, Human
agguuuuuuuucaguug

SEQ ID NO: 1364253 - RNA, 16 nt, Human
aguaaaaacaaagaaa

SEQ ID NO: 1364254 - RNA, 23 nt, Human
aguaaaaacaaagaaauuaugug

SEQ ID NO: 1364255 - RNA, 16 nt, Human
agguuuuuuuucaguu

SEQ ID NO: 1364256 - RNA, 14 nt, Human
aguaaaaaggcuaa

SEQ ID NO: 1364257 - RNA, 15 nt, Human
uguauauauauauau

SEQ ID NO: 1364258 - RNA, 13 nt, Human
uguauauacuuuu

SEQ ID NO: 1364259 - RNA, 12 nt, Human
uguauauacuuu

SEQ ID NO: 1364260 - RNA, 14 nt, Human
uguauauauuauua

SEQ ID NO: 1364261 - RNA, 20 nt, Human
uguauauauuauuauaaucu

SEQ ID NO: 1364262 - RNA, 16 nt, Human
uguauauuaaggugug

SEQ ID NO: 1364263 - RNA, 14 nt, Human
uguauauuacaaug

SEQ ID NO: 1364264 - RNA, 15 nt, Human
uguauauuacaauga

SEQ ID NO: 1364265 - RNA, 14 nt, Human
uguauaguucacgu

SEQ ID NO: 1364266 - RNA, 17 nt, Human
uguauaguuaacacacu

SEQ ID NO: 1364267 - RNA, 16 nt, Human
uguauaguuaacacac

SEQ ID NO: 1364268 - RNA, 15 nt, Human
uguauaguuaacaca

SEQ ID NO: 1364269 - RNA, 19 nt, Human
uguaguguuggagaagaac

SEQ ID NO: 1364270 - RNA, 18 nt, Human
uguaguguuggagaagaa

SEQ ID NO: 1364271 - RNA, 17 nt, Human
uguaguguuggagaaga

SEQ ID NO: 1364272 - RNA, 21 nt, Human
uguagugauuuuuaugccacc

SEQ ID NO: 1364273 - RNA, 20 nt, Human
uguagugauuuuuaugccac

SEQ ID NO: 1364274 - RNA, 22 nt, Human
uguaggggaggggcuccuuucc

SEQ ID NO: 1364275 - RNA, 13 nt, Human
uguaggguuucua

SEQ ID NO: 1364276 - RNA, 23 nt, Human
uguaggggaggggcuccuuucca

SEQ ID NO: 1364277 - RNA, 21 nt, Human
uguaggggaggggcuccuuuc

SEQ ID NO: 1364278 - RNA, 22 nt, Human
uguagggagggcggcaggggcc

SEQ ID NO: 1364279 - RNA, 22 nt, Human
aguagcagugauugucuuaaua

SEQ ID NO: 1364280 - RNA, 14 nt, Human
aguagcagugauug

SEQ ID NO: 1364281 - RNA, 18 nt, Human
aguagcacccuggauuga

SEQ ID NO: 1364282 - RNA, 23 nt, Human
aguagcacaaguuauuuaaaucu

SEQ ID NO: 1364283 - RNA, 15 nt, Human
aguagauuuuccaaa

SEQ ID NO: 1364284 - RNA, 16 nt, Human
aguaccaaucauuuua

SEQ ID NO: 1364285 - RNA, 15 nt, Human
aguaccaaucauuuu

SEQ ID NO: 1364286 - RNA, 20 nt, Human
aguagauugcagaaaauucu

SEQ ID NO: 1364287 - RNA, 14 nt, Human
aguaccagacuaga

SEQ ID NO: 1364288 - RNA, 23 nt, Human
aguaccaguaggggcuuauaaua

SEQ ID NO: 1364289 - RNA, 20 nt, Human
agucauauauaucacccaga

SEQ ID NO: 1364290 - RNA, 22 nt, Human
agucauagguuaauauuuaaga

SEQ ID NO: 1364291 - RNA, 16 nt, Human
agucauagguuaauau

SEQ ID NO: 1364292 - RNA, 23 nt, Human
agucauaccaaugaaaaaaugua

SEQ ID NO: 1364293 - RNA, 17 nt, Human
agucauaccaaugaaaa

SEQ ID NO: 1364294 - RNA, 14 nt, Human
agucauaccaauga

SEQ ID NO: 1364295 - RNA, 17 nt, Human
agucauaauugcauuga

SEQ ID NO: 1364296 - RNA, 13 nt, Human
agucauaauugca

SEQ ID NO: 1364297 - RNA, 20 nt, Human
agucccaagcggugucucuc

SEQ ID NO: 1364298 - RNA, 19 nt, Human
agucccaagcggugucucu

SEQ ID NO: 1364299 - RNA, 14 nt, Human
agucccaagcggug

SEQ ID NO: 1364300 - RNA, 18 nt, Human
aguccccauugaggcuug

SEQ ID NO: 1364301 - RNA, 12 nt, Human
ugucgcugcuuc

SEQ ID NO: 1364302 - RNA, 15 nt, Human
ugucgcugcuucgug

SEQ ID NO: 1364303 - RNA, 22 nt, Human
ugucgcucaugugugcaacagg

SEQ ID NO: 1364304 - RNA, 16 nt, Human
ugucgcucaugugugc

SEQ ID NO: 1364305 - RNA, 15 nt, Human
ugucgcucaugugug

SEQ ID NO: 1364306 - RNA, 14 nt, Human
ugucgcucaugugu

SEQ ID NO: 1364307 - RNA, 16 nt, Human
ugucccuuaaacaaaa

SEQ ID NO: 1364308 - RNA, 23 nt, Human
agucacuggucuguuugcauuug

SEQ ID NO: 1364309 - RNA, 12 nt, Human
agucacugcucu

SEQ ID NO: 1364310 - RNA, 17 nt, Human
agucagaacagcagacu

SEQ ID NO: 1364311 - RNA, 15 nt, Human
agucagaacagcaga

SEQ ID NO: 1364312 - RNA, 14 nt, Human
agucagaacagcag

SEQ ID NO: 1364313 - RNA, 12 nt, Human
agucagaacagc

SEQ ID NO: 1364314 - RNA, 22 nt, Human
agucagaacagcagacucagcu

SEQ ID NO: 1364315 - RNA, 15 nt, Human
agucaggaaagagaa

SEQ ID NO: 1364316 - RNA, 14 nt, Human
agucaggaaagaga

SEQ ID NO: 1364317 - RNA, 24 nt, Human
aguccuaucugggcuuccuggagc

SEQ ID NO: 1364318 - RNA, 23 nt, Human
aguccuaucugggcuuccuggag

SEQ ID NO: 1364319 - RNA, 22 nt, Human
aguccuaucugggcuuccugga

SEQ ID NO: 1364320 - RNA, 20 nt, Human
aguccuaucugggcuuccug

SEQ ID NO: 1364321 - RNA, 19 nt, Human
aguccuaucugggcuuccu

SEQ ID NO: 1364322 - RNA, 16 nt, Human
aguccuaucugggcuu

SEQ ID NO: 1364323 - RNA, 15 nt, Human
aguccuaucugggcu

SEQ ID NO: 1364324 - RNA, 20 nt, Human
aguccuacaagcuaaaauua

SEQ ID NO: 1364325 - RNA, 16 nt, Human
aguccccucaccuccu

SEQ ID NO: 1364326 - RNA, 20 nt, Human
agucuaaagcugguuuaaug

SEQ ID NO: 1364327 - RNA, 21 nt, Human
agucuaaagcugguuuaaugu

SEQ ID NO: 1364328 - RNA, 23 nt, Human
agucuaaagauggaguuucuaag

SEQ ID NO: 1364329 - RNA, 21 nt, Human
agucguccuuacuccuguggg

SEQ ID NO: 1364330 - RNA, 22 nt, Human
agucguccuuacuccuguggga

SEQ ID NO: 1364331 - RNA, 20 nt, Human
agucguccuuacuccugugg

SEQ ID NO: 1364332 - RNA, 19 nt, Human
agucguccuuacuccugug

SEQ ID NO: 1364333 - RNA, 17 nt, Human
agucguccuuacuccug

SEQ ID NO: 1364334 - RNA, 18 nt, Human
agucguacagaaagcugc

SEQ ID NO: 1364335 - RNA, 12 nt, Human
agucggauuaga

SEQ ID NO: 1364336 - RNA, 21 nt, Human
ugucucaugccaguaacaggc

SEQ ID NO: 1364337 - RNA, 21 nt, Human
ugucucauccaucaucaugug

SEQ ID NO: 1364338 - RNA, 17 nt, Human
ugucucauccaucauca

SEQ ID NO: 1364339 - RNA, 16 nt, Human
ugucucauccaucauc

SEQ ID NO: 1364340 - RNA, 11 nt, Human
ugucucaucca

SEQ ID NO: 1364341 - RNA, 13 nt, Human
agucucagcuaag

SEQ ID NO: 1364342 - RNA, 18 nt, Human
agucucagcuaagcucac

SEQ ID NO: 1364343 - RNA, 11 nt, Human
agucucagcua

SEQ ID NO: 1364344 - RNA, 19 nt, Human
agucucagaaugucauuuu

SEQ ID NO: 1364345 - RNA, 19 nt, Human
agucucacuuugucgccca

SEQ ID NO: 1364346 - RNA, 23 nt, Human
agucuaucaaccccagacacugg

SEQ ID NO: 1364347 - RNA, 22 nt, Human
agucuaucaaccccagacacug

SEQ ID NO: 1364348 - RNA, 20 nt, Human
agucuauuuacggaacucaa

SEQ ID NO: 1364349 - RNA, 15 nt, Human
agucuauuuacggaa

SEQ ID NO: 1364350 - RNA, 16 nt, Human
ugucccgauuguaacu

SEQ ID NO: 1364351 - RNA, 17 nt, Human
ugucccgauuguaacuc

SEQ ID NO: 1364352 - RNA, 21 nt, Human
uguccagacagagcccuguga

SEQ ID NO: 1364353 - RNA, 22 nt, Human
uguccagacagagcccugugag

SEQ ID NO: 1364354 - RNA, 14 nt, Human
uguccaauccuaug

SEQ ID NO: 1364355 - RNA, 19 nt, Human
uguccaacuggcccuauuu

SEQ ID NO: 1364356 - RNA, 14 nt, Human
uguccaacuggccc

SEQ ID NO: 1364357 - RNA, 20 nt, Human
uguccagccccguagacgug

SEQ ID NO: 1364358 - RNA, 21 nt, Human
uguccaaagaggcugccccuc

SEQ ID NO: 1364359 - RNA, 20 nt, Human
uguccaaagaggcugccccu

SEQ ID NO: 1364360 - RNA, 19 nt, Human
uguccaaagaggcugcccc

SEQ ID NO: 1364361 - RNA, 17 nt, Human
uguccaaagaggcugcc

SEQ ID NO: 1364362 - RNA, 11 nt, Human
uguccaaagag

SEQ ID NO: 1364363 - RNA, 22 nt, Human
uguccaaacugccuaagcccuc

SEQ ID NO: 1364364 - RNA, 15 nt, Human
uguccaaacugccua

SEQ ID NO: 1364365 - RNA, 17 nt, Human
uguccaaacugccuaag

SEQ ID NO: 1364366 - RNA, 16 nt, Human
uguccaaaacugccuc

SEQ ID NO: 1364367 - RNA, 16 nt, Human
ugucagcagggacugu

SEQ ID NO: 1364368 - RNA, 18 nt, Human
uguccaacccgaggcccg

SEQ ID NO: 1364369 - RNA, 21 nt, Human
ugucagauccaggagcuccag

SEQ ID NO: 1364370 - RNA, 20 nt, Human
ugucagauccaggagcucca

SEQ ID NO: 1364371 - RNA, 18 nt, Human
ugucagauccaggagcuc

SEQ ID NO: 1364372 - RNA, 24 nt, Human
ugucagauccaggagcuccagugu

SEQ ID NO: 1364373 - RNA, 23 nt, Human
aguauacuagggagccauuugag

SEQ ID NO: 1364374 - RNA, 15 nt, Human
aguauaccugauuuu

SEQ ID NO: 1364375 - RNA, 19 nt, Human
aguauaagacuacugaauc

SEQ ID NO: 1364376 - RNA, 20 nt, Human
aguauuccagaccugaagaa

SEQ ID NO: 1364377 - RNA, 18 nt, Human
aguauuaaaauguaugca

SEQ ID NO: 1364378 - RNA, 15 nt, Human
aguauuaaaauguau

SEQ ID NO: 1364379 - RNA, 14 nt, Human
aguauuaaaaugua

SEQ ID NO: 1364380 - RNA, 13 nt, Human
aguauuaaaaugu

SEQ ID NO: 1364381 - RNA, 19 nt, Human
aguauuaaaauguaugcau

SEQ ID NO: 1364382 - RNA, 20 nt, Human
uguauauuguguuuguguau

SEQ ID NO: 1364383 - RNA, 17 nt, Human
uguauauuguaauuuaa

SEQ ID NO: 1364384 - RNA, 14 nt, Human
uguauauuguaauu

SEQ ID NO: 1364385 - RNA, 13 nt, Human
uguauauuguaau

SEQ ID NO: 1364386 - RNA, 12 nt, Human
uguauauucacu

SEQ ID NO: 1364387 - RNA, 14 nt, Human
uguauauucacuuu

SEQ ID NO: 1364388 - RNA, 19 nt, Human
uguauauuaagguguggcu

SEQ ID NO: 1364389 - RNA, 19 nt, Human
uguauauuacaaugaucac

SEQ ID NO: 1364390 - RNA, 16 nt, Human
aguauuuuaaaauagc

SEQ ID NO: 1364391 - RNA, 18 nt, Human
aguauuuguuaauuuaga

SEQ ID NO: 1364392 - RNA, 15 nt, Human
aguauuuguuaauuu

SEQ ID NO: 1364393 - RNA, 14 nt, Human
aguauuuguuaauu

SEQ ID NO: 1364394 - RNA, 13 nt, Human
aguauuuguuaau

SEQ ID NO: 1364395 - RNA, 20 nt, Human
aguauuucaaauuggagcuu

SEQ ID NO: 1364396 - RNA, 16 nt, Human
aguauuucaaauugga

SEQ ID NO: 1364397 - RNA, 19 nt, Human
aguauuuagaagccaacua

SEQ ID NO: 1364398 - RNA, 17 nt, Human
aguauuuugcuggaaua

SEQ ID NO: 1364399 - RNA, 21 nt, Human
aguauuuuccuguugucaaga

SEQ ID NO: 1364400 - RNA, 18 nt, Human
aguauuuuagugaacuug

SEQ ID NO: 1364401 - RNA, 20 nt, Human
aguauuuuagugaacuugaa

SEQ ID NO: 1364402 - RNA, 17 nt, Human
aguauuuuaaaauagcg

SEQ ID NO: 1364403 - RNA, 14 nt, Human
agucaccagagacu

SEQ ID NO: 1364404 - RNA, 16 nt, Human
ugucuccuaccucugc

SEQ ID NO: 1364405 - RNA, 21 nt, Human
ugucuccuaagcaccuguaau

SEQ ID NO: 1364406 - RNA, 16 nt, Human
ugucuccuaagcaccu

SEQ ID NO: 1364407 - RNA, 13 nt, Human
ugucuccuaagca

SEQ ID NO: 1364408 - RNA, 15 nt, Human
ugucuccauggcccu

SEQ ID NO: 1364409 - RNA, 13 nt, Human
ugucucaugccag

SEQ ID NO: 1364410 - RNA, 16 nt, Human
ugugacuuuugugaaa

SEQ ID NO: 1364411 - RNA, 23 nt, Human
ugugacuucuauuuuaaagacaa

SEQ ID NO: 1364412 - RNA, 18 nt, Human
ugugacuggcuaaagcuc

SEQ ID NO: 1364413 - RNA, 20 nt, Human
ugugacuggcuaaagcucga

SEQ ID NO: 1364414 - RNA, 17 nt, Human
ugugacuggcuaaagcu

SEQ ID NO: 1364415 - RNA, 24 nt, Human
ugugagaagugaaugcugggacuc

SEQ ID NO: 1364416 - RNA, 23 nt, Human
ugugagaagugaaugcugggacu

SEQ ID NO: 1364417 - RNA, 22 nt, Human
ugugagaagugaaugcugggac

SEQ ID NO: 1364418 - RNA, 21 nt, Human
ugugagaagugaaugcuggga

SEQ ID NO: 1364419 - RNA, 18 nt, Human
ugugagcccagcuggguc

SEQ ID NO: 1364420 - RNA, 16 nt, Human
ugugaggaaagucauu

SEQ ID NO: 1364421 - RNA, 22 nt, Human
ugugaggaaagucauuggcuuu

SEQ ID NO: 1364422 - RNA, 23 nt, Human
ugugaggaaagucauuggcuuua

SEQ ID NO: 1364423 - RNA, 14 nt, Human
agucucuaauucua

SEQ ID NO: 1364424 - RNA, 20 nt, Human
agucucgucucuuuuacccu

SEQ ID NO: 1364425 - RNA, 18 nt, Human
agucugaacagcuguaau

SEQ ID NO: 1364426 - RNA, 16 nt, Human
agucugaacagcugua

SEQ ID NO: 1364427 - RNA, 15 nt, Human
agucugaacagcugu

SEQ ID NO: 1364428 - RNA, 20 nt, Human
agucugaaccuauuucuuaa

SEQ ID NO: 1364429 - RNA, 17 nt, Human
agugacuaauggcauga

SEQ ID NO: 1364430 - RNA, 16 nt, Human
agugacuaauggcaug

SEQ ID NO: 1364431 - RNA, 18 nt, Human
agugaacuuaguccuguu

SEQ ID NO: 1364432 - RNA, 16 nt, Human
agucuuucacauuuaa

SEQ ID NO: 1364433 - RNA, 18 nt, Human
agucuuucacauuuaaau

SEQ ID NO: 1364434 - RNA, 21 nt, Human
agugagccugaauuuuguugc

SEQ ID NO: 1364435 - RNA, 11 nt, Human
agugagccuga

SEQ ID NO: 1364436 - RNA, 12 nt, Human
agugagaggcug

SEQ ID NO: 1364437 - RNA, 14 nt, Human
agugacuucugaga

SEQ ID NO: 1364438 - RNA, 13 nt, Human
agugacuucugag

SEQ ID NO: 1364439 - RNA, 12 nt, Human
agugacuucuga

SEQ ID NO: 1364440 - RNA, 18 nt, Human
agugacucuauauagcug

SEQ ID NO: 1364441 - RNA, 18 nt, Human
agugacuugugucccaug

SEQ ID NO: 1364442 - RNA, 16 nt, Human
agugacuuguguccca

SEQ ID NO: 1364443 - RNA, 15 nt, Human
agugacuucugagau

SEQ ID NO: 1364444 - RNA, 17 nt, Human
agugacuucugagaucu

SEQ ID NO: 1364445 - RNA, 18 nt, Human
agugacuuuggcugcaug

SEQ ID NO: 1364446 - RNA, 15 nt, Human
ugugcugugugugac

SEQ ID NO: 1364447 - RNA, 12 nt, Human
ugugcugugugu

SEQ ID NO: 1364448 - RNA, 19 nt, Human
ugugcugugcuauggugcu

SEQ ID NO: 1364449 - RNA, 14 nt, Human
uguggaucagagau

SEQ ID NO: 1364450 - RNA, 17 nt, Human
uguggaucagagaugca

SEQ ID NO: 1364451 - RNA, 20 nt, Human
uguggaucaaccaucgcuuu

SEQ ID NO: 1364452 - RNA, 19 nt, Human
uguggaucaaccaucgcuu

SEQ ID NO: 1364453 - RNA, 21 nt, Human
uguggaucaaauccagccugc

SEQ ID NO: 1364454 - RNA, 19 nt, Human
uguggauuuaacagaaaug

SEQ ID NO: 1364455 - RNA, 20 nt, Human
uguggauuuaacagaaaugu

SEQ ID NO: 1364456 - RNA, 22 nt, Human
uguggauuuaacagaaauguac

SEQ ID NO: 1364457 - RNA, 18 nt, Human
ugugcccucugggcucug

SEQ ID NO: 1364458 - RNA, 21 nt, Human
ugugcccucugggcucugagu

SEQ ID NO: 1364459 - RNA, 17 nt, Human
ugugcccucugggcucu

SEQ ID NO: 1364460 - RNA, 15 nt, Human
ugugcccucugggcu

SEQ ID NO: 1364461 - RNA, 14 nt, Human
ugugcccucugggc

SEQ ID NO: 1364462 - RNA, 13 nt, Human
ugugcccucuggg

SEQ ID NO: 1364463 - RNA, 12 nt, Human
ugugcccucugg

SEQ ID NO: 1364464 - RNA, 17 nt, Human
ugugauuggccuguaga

SEQ ID NO: 1364465 - RNA, 15 nt, Human
ugugauuggccugua

SEQ ID NO: 1364466 - RNA, 14 nt, Human
ugugauuggccugu

SEQ ID NO: 1364467 - RNA, 13 nt, Human
ugugcccucccug

SEQ ID NO: 1364468 - RNA, 20 nt, Human
ugugauucagaaaauguucu

SEQ ID NO: 1364469 - RNA, 23 nt, Human
ugugauucagaaaauguucuguu

SEQ ID NO: 1364470 - RNA, 22 nt, Human
ugugauucaaucuguaaacugu

SEQ ID NO: 1364471 - RNA, 20 nt, Human
ugugauucaaucuguaaacu

SEQ ID NO: 1364472 - RNA, 16 nt, Human
ugugauucaaucugua

SEQ ID NO: 1364473 - RNA, 21 nt, Human
ugugcucuccauucugcuccu

SEQ ID NO: 1364474 - RNA, 19 nt, Human
ugugccuauugcuagagcu

SEQ ID NO: 1364475 - RNA, 21 nt, Human
ugugcucaggagcccugggag

SEQ ID NO: 1364476 - RNA, 14 nt, Human
uguggauucuuuaa

SEQ ID NO: 1364477 - RNA, 21 nt, Human
agugagcuuggaaaggaccag

SEQ ID NO: 1364478 - RNA, 17 nt, Human
agugauagucuuuugcu

SEQ ID NO: 1364479 - RNA, 15 nt, Human
agugauagucuuuug

SEQ ID NO: 1364480 - RNA, 19 nt, Human
agugaguuuuuuagugcgu

SEQ ID NO: 1364481 - RNA, 15 nt, Human
agugaguuuuuuagu

SEQ ID NO: 1364482 - RNA, 14 nt, Human
agugauauaaauca

SEQ ID NO: 1364483 - RNA, 21 nt, Human
agugauagucuuuugcuuuug

SEQ ID NO: 1364484 - RNA, 20 nt, Human
agugauagucuuuugcuuuu

SEQ ID NO: 1364485 - RNA, 20 nt, Human
agugauuuuuaugccaccug

SEQ ID NO: 1364486 - RNA, 16 nt, Human
agugauuuuuaugcca

SEQ ID NO: 1364487 - RNA, 21 nt, Human
agugcaacacuggucugcugu

SEQ ID NO: 1364488 - RNA, 16 nt, Human
agugcaacacuggucu

SEQ ID NO: 1364489 - RNA, 13 nt, Human
agugcaacacugg

SEQ ID NO: 1364490 - RNA, 21 nt, Human
agugauuuuuaugccaccuga

SEQ ID NO: 1364491 - RNA, 14 nt, Human
agugcaaauuguca

SEQ ID NO: 1364492 - RNA, 19 nt, Human
agugcagaaugcuccucca

SEQ ID NO: 1364493 - RNA, 23 nt, Human
agugcauagcuacuaaaaucagu

SEQ ID NO: 1364494 - RNA, 23 nt, Human
agugcaguggcgcgaucucagcu

SEQ ID NO: 1364495 - RNA, 23 nt, Human
agugcaguggcgugaucucagcu

SEQ ID NO: 1364496 - RNA, 23 nt, Human
agugcaguccugaucagagccgu

SEQ ID NO: 1364497 - RNA, 23 nt, Human
agugcaguggcaucaucucagcu

SEQ ID NO: 1364498 - RNA, 23 nt, Human
agugcaauaaaucugacccagug

SEQ ID NO: 1364499 - RNA, 22 nt, Human
agugcaauaaaucugacccagu

SEQ ID NO: 1364500 - RNA, 21 nt, Human
agugcaauaaaucugacccag

SEQ ID NO: 1364501 - RNA, 20 nt, Human
agugcaauaaaucugaccca

SEQ ID NO: 1364502 - RNA, 18 nt, Human
agugcacuugcuggaaga

SEQ ID NO: 1364503 - RNA, 20 nt, Human
agugcacuugcuggaagacg

SEQ ID NO: 1364504 - RNA, 16 nt, Human
agugcacuugcuggaa

SEQ ID NO: 1364505 - RNA, 14 nt, Human
agugcaaggaccua

SEQ ID NO: 1364506 - RNA, 21 nt, Human
agugcacugaaagucacggcu

SEQ ID NO: 1364507 - RNA, 21 nt, Human
agugcacuaauguguaagaca

SEQ ID NO: 1364508 - RNA, 17 nt, Human
agugcacuaauguguaa

SEQ ID NO: 1364509 - RNA, 22 nt, Human
agugcauuuaugagcucuucau

SEQ ID NO: 1364510 - RNA, 21 nt, Human
agugccacuuaauguauguua

SEQ ID NO: 1364511 - RNA, 20 nt, Human
agugccacuuaauguauguu

SEQ ID NO: 1364512 - RNA, 18 nt, Human
agugccacuuaauguaug

SEQ ID NO: 1364513 - RNA, 18 nt, Human
agugccagcaccugccca

SEQ ID NO: 1364514 - RNA, 21 nt, Human
aguguguggcuuucagagccu

SEQ ID NO: 1364515 - RNA, 22 nt, Human
uguugcccacagcuguaugauu

SEQ ID NO: 1364516 - RNA, 21 nt, Human
uguugcacguguguuuuucua

SEQ ID NO: 1364517 - RNA, 14 nt, Human
uguugcacgugugu

SEQ ID NO: 1364518 - RNA, 14 nt, Human
uguucuaaggcucu

SEQ ID NO: 1364519 - RNA, 12 nt, Human
uguucuaaggcu

SEQ ID NO: 1364520 - RNA, 16 nt, Human
uguucuaagaugugau

SEQ ID NO: 1364521 - RNA, 22 nt, Human
uguucuaagaugugauauucua

SEQ ID NO: 1364522 - RNA, 14 nt, Human
uguucuaagaugug

SEQ ID NO: 1364523 - RNA, 13 nt, Human
uguucuaagaugu

SEQ ID NO: 1364524 - RNA, 16 nt, Human
uguucuaaccuuuaca

SEQ ID NO: 1364525 - RNA, 19 nt, Human
uguucuaaagcucugacau

SEQ ID NO: 1364526 - RNA, 18 nt, Human
uguucuaaagcucugaca

SEQ ID NO: 1364527 - RNA, 20 nt, Human
uguugccaagcuccaagccc

SEQ ID NO: 1364528 - RNA, 18 nt, Human
uguugccaagcuccaagc

SEQ ID NO: 1364529 - RNA, 23 nt, Human
uguugccaaauauguccuggggu

SEQ ID NO: 1364530 - RNA, 22 nt, Human
uguugccaaauauguccugggg

SEQ ID NO: 1364531 - RNA, 20 nt, Human
uguugccaaauauguccugg

SEQ ID NO: 1364532 - RNA, 19 nt, Human
uguugccaaauauguccug

SEQ ID NO: 1364533 - RNA, 15 nt, Human
uguugcauagaauaa

SEQ ID NO: 1364534 - RNA, 18 nt, Human
aguuagcuaauaaaaagc

SEQ ID NO: 1364535 - RNA, 11 nt, Human
aguuagcacca

SEQ ID NO: 1364536 - RNA, 13 nt, Human
aguuagacuguug

SEQ ID NO: 1364537 - RNA, 19 nt, Human
aguguuguggauuuaacag

SEQ ID NO: 1364538 - RNA, 20 nt, Human
aguguuguggauuuaacaga

SEQ ID NO: 1364539 - RNA, 13 nt, Human
aguuacucagaau

SEQ ID NO: 1364540 - RNA, 19 nt, Human
aguguucugucugacuuuc

SEQ ID NO: 1364541 - RNA, 22 nt, Human
aguguucccuauccaaucaauc

SEQ ID NO: 1364542 - RNA, 23 nt, Human
aguguucccuauccaaucaaucu

SEQ ID NO: 1364543 - RNA, 17 nt, Human
aguguugaaaauguuca

SEQ ID NO: 1364544 - RNA, 16 nt, Human
aguguugaaaauguuc

SEQ ID NO: 1364545 - RNA, 16 nt, Human
aguguuguggauuuaa

SEQ ID NO: 1364546 - RNA, 16 nt, Human
aguguuccccuuccac

SEQ ID NO: 1364547 - RNA, 15 nt, Human
aguguucccuaucca

SEQ ID NO: 1364548 - RNA, 14 nt, Human
aguguucccuaucc

SEQ ID NO: 1364549 - RNA, 21 nt, Human
aguguuccccuuccacugagg

SEQ ID NO: 1364550 - RNA, 18 nt, Human
aguguguguuuuucauaa

SEQ ID NO: 1364551 - RNA, 19 nt, Human
aguguguguuuuucauaaa

SEQ ID NO: 1364552 - RNA, 15 nt, Human
aguguggaggccacu

SEQ ID NO: 1364553 - RNA, 14 nt, Human
aguguggacucugg

SEQ ID NO: 1364554 - RNA, 22 nt, Human
agugugcuucuguuaucaaaca

SEQ ID NO: 1364555 - RNA, 23 nt, Human
agugugcgugguggucccugggu

SEQ ID NO: 1364556 - RNA, 22 nt, Human
agugugcgugguggucccuggg

SEQ ID NO: 1364557 - RNA, 20 nt, Human
agugugcgugguggucccug

SEQ ID NO: 1364558 - RNA, 17 nt, Human
agugugcggcugugugu

SEQ ID NO: 1364559 - RNA, 14 nt, Human
agugugccuucucu

SEQ ID NO: 1364560 - RNA, 18 nt, Human
agugugaggccagggcag

SEQ ID NO: 1364561 - RNA, 17 nt, Human
agugguaagcuaugucc

SEQ ID NO: 1364562 - RNA, 19 nt, Human
agugguaaaaaggccuccu

SEQ ID NO: 1364563 - RNA, 23 nt, Human
aguggguuuuuuaguugaauuuu

SEQ ID NO: 1364564 - RNA, 15 nt, Human
agugugaggccaggg

SEQ ID NO: 1364565 - RNA, 22 nt, Human
agugugaccaaaaguuacaugu

SEQ ID NO: 1364566 - RNA, 14 nt, Human
agugugaccaggca

SEQ ID NO: 1364567 - RNA, 19 nt, Human
agugugaccaaaaguuaca

SEQ ID NO: 1364568 - RNA, 17 nt, Human
agugugaccaaaaguua

SEQ ID NO: 1364569 - RNA, 16 nt, Human
uguucuaaagcucuga

SEQ ID NO: 1364570 - RNA, 14 nt, Human
uguucuaaagcucu

SEQ ID NO: 1364571 - RNA, 13 nt, Human
uguucuaaagcuc

SEQ ID NO: 1364572 - RNA, 22 nt, Human
uguucgggccaaggaccugaga

SEQ ID NO: 1364573 - RNA, 19 nt, Human
uguucgggccaaggaccug

SEQ ID NO: 1364574 - RNA, 23 nt, Human
uguucgcauggucacacacugau

SEQ ID NO: 1364575 - RNA, 22 nt, Human
uguucgcauggucacacacuga

SEQ ID NO: 1364576 - RNA, 20 nt, Human
uguucgcauggucacacacu

SEQ ID NO: 1364577 - RNA, 19 nt, Human
uguuccuuccgcuuggagc

SEQ ID NO: 1364578 - RNA, 18 nt, Human
uguuccuucccugugccu

SEQ ID NO: 1364579 - RNA, 17 nt, Human
uguuccuucccugugcc

SEQ ID NO: 1364580 - RNA, 22 nt, Human
uguuccuuccagugucauuucu

SEQ ID NO: 1364581 - RNA, 19 nt, Human
uguuccuuaagucagaaca

SEQ ID NO: 1364582 - RNA, 21 nt, Human
uguuccaaauucaguuucaua

SEQ ID NO: 1364583 - RNA, 22 nt, Human
uguuccaaauucaguuucauaa

SEQ ID NO: 1364584 - RNA, 20 nt, Human
uguuccaaauucaguuucau

SEQ ID NO: 1364585 - RNA, 19 nt, Human
uguuccaaauucaguuuca

SEQ ID NO: 1364586 - RNA, 18 nt, Human
uguuccaaauucaguuuc

SEQ ID NO: 1364587 - RNA, 17 nt, Human
uguuccaaauucaguuu

SEQ ID NO: 1364588 - RNA, 16 nt, Human
uguuccugcugcuguc

SEQ ID NO: 1364589 - RNA, 13 nt, Human
uguuccugcugcu

SEQ ID NO: 1364590 - RNA, 12 nt, Human
uguuccugcugc

SEQ ID NO: 1364591 - RNA, 23 nt, Human
uguuaucuucucaaguucuaaga

SEQ ID NO: 1364592 - RNA, 22 nt, Human
uguuaucuucucaaguucuaag

SEQ ID NO: 1364593 - RNA, 10 nt, Human
uguuccaaau

SEQ ID NO: 1364594 - RNA, 14 nt, Human
uguucauuuccuca

SEQ ID NO: 1364595 - RNA, 16 nt, Human
uguuaugacuauguaa

SEQ ID NO: 1364596 - RNA, 17 nt, Human
uguuaugacuauguaaa

SEQ ID NO: 1364597 - RNA, 18 nt, Human
uguuaugacuauguaaac

SEQ ID NO: 1364598 - RNA, 20 nt, Human
uguuaugacuauguaaacua

SEQ ID NO: 1364599 - RNA, 16 nt, Human
ugugguacaugguguu

SEQ ID NO: 1364600 - RNA, 23 nt, Human
ugugguacagagaagccagcuug

SEQ ID NO: 1364601 - RNA, 19 nt, Human
ugugguacaugguguuugu

SEQ ID NO: 1364602 - RNA, 21 nt, Human
ugugguacagagaagccagcu

SEQ ID NO: 1364603 - RNA, 20 nt, Human
ugugguacagagaagccagc

SEQ ID NO: 1364604 - RNA, 19 nt, Human
ugugguacagagaagccag

SEQ ID NO: 1364605 - RNA, 18 nt, Human
ugugguacagagaagcca

SEQ ID NO: 1364606 - RNA, 17 nt, Human
ugugguacagagaagcc

SEQ ID NO: 1364607 - RNA, 16 nt, Human
ugugguacagagaagc

SEQ ID NO: 1364608 - RNA, 15 nt, Human
ugugguacagagaag

SEQ ID NO: 1364609 - RNA, 14 nt, Human
ugugguacagagaa

SEQ ID NO: 1364610 - RNA, 13 nt, Human
ugugguacagaga

SEQ ID NO: 1364611 - RNA, 12 nt, Human
ugugguacagag

SEQ ID NO: 1364612 - RNA, 21 nt, Human
ugugguaagcaacauggcuuu

SEQ ID NO: 1364613 - RNA, 21 nt, Human
ugugguacaagcauucugucu

SEQ ID NO: 1364614 - RNA, 20 nt, Human
ugugguaagcaacauggcuu

SEQ ID NO: 1364615 - RNA, 23 nt, Human
agugcccucucccacccucuucc

SEQ ID NO: 1364616 - RNA, 19 nt, Human
agugcccucucccacccuc

SEQ ID NO: 1364617 - RNA, 18 nt, Human
agugcccucucccacccu

SEQ ID NO: 1364618 - RNA, 15 nt, Human
agugcccucucccac

SEQ ID NO: 1364619 - RNA, 13 nt, Human
agugcccucuccc

SEQ ID NO: 1364620 - RNA, 22 nt, Human
agugcccucucccacccucuuc

SEQ ID NO: 1364621 - RNA, 21 nt, Human
agugcccucucccacccucuu

SEQ ID NO: 1364622 - RNA, 18 nt, Human
agugcccccacugaccag

SEQ ID NO: 1364623 - RNA, 23 nt, Human
agugccaguauuuuaaaauagcg

SEQ ID NO: 1364624 - RNA, 16 nt, Human
agugccauuaacaaau

SEQ ID NO: 1364625 - RNA, 12 nt, Human
agugcccucucc

SEQ ID NO: 1364626 - RNA, 23 nt, Human
uguguccaaaaccgccagcucug

SEQ ID NO: 1364627 - RNA, 21 nt, Human
uguguccaaaaccgccagcuc

SEQ ID NO: 1364628 - RNA, 19 nt, Human
uguguccaaaaccgccagc

SEQ ID NO: 1364629 - RNA, 17 nt, Human
uguguccaaaaccgcca

SEQ ID NO: 1364630 - RNA, 20 nt, Human
ugugguuuucuuuugccaug

SEQ ID NO: 1364631 - RNA, 21 nt, Human
ugugguuuucuuuugccauga

SEQ ID NO: 1364632 - RNA, 19 nt, Human
ugugguuuucuuuugccau

SEQ ID NO: 1364633 - RNA, 18 nt, Human
ugugguuuucgagauuau

SEQ ID NO: 1364634 - RNA, 23 nt, Human
uguggucacagcuguauagcugc

SEQ ID NO: 1364635 - RNA, 23 nt, Human
uguggucacagcggaggugugga

SEQ ID NO: 1364636 - RNA, 15 nt, Human
uguggucacagcugu

SEQ ID NO: 1364637 - RNA, 14 nt, Human
uguguccugguucc

SEQ ID NO: 1364638 - RNA, 14 nt, Human
uguguccugacacu

SEQ ID NO: 1364639 - RNA, 17 nt, Human
uguguccugacacugca

SEQ ID NO: 1364640 - RNA, 21 nt, Human
ugugucccccucuguccaggc

SEQ ID NO: 1364641 - RNA, 18 nt, Human
ugugucccccucugucca

SEQ ID NO: 1364642 - RNA, 16 nt, Human
ugugucccccucuguc

SEQ ID NO: 1364643 - RNA, 20 nt, Human
ugugucccaugaucccugug

SEQ ID NO: 1364644 - RNA, 19 nt, Human
ugugucccaugaucccugu

SEQ ID NO: 1364645 - RNA, 23 nt, Human
ugugucccagaagaugacugagg

SEQ ID NO: 1364646 - RNA, 21 nt, Human
ugugucccagaagaugacuga

SEQ ID NO: 1364647 - RNA, 20 nt, Human
uguguccaugcgcucagggc

SEQ ID NO: 1364648 - RNA, 19 nt, Human
uguguccacgacugucucc

SEQ ID NO: 1364649 - RNA, 18 nt, Human
uguguccacgacugucuc

SEQ ID NO: 1364650 - RNA, 17 nt, Human
uguguccacgacugucu

SEQ ID NO: 1364651 - RNA, 16 nt, Human
uguguccaaaacugcc

SEQ ID NO: 1364652 - RNA, 16 nt, Human
ugugucuuaauuauua

SEQ ID NO: 1364653 - RNA, 14 nt, Human
ugugucuuaauuau

SEQ ID NO: 1364654 - RNA, 14 nt, Human
ugugucugcucagu

SEQ ID NO: 1364655 - RNA, 18 nt, Human
uguguguugucucuugag

SEQ ID NO: 1364656 - RNA, 21 nt, Human
uguguguugauacuguugcac

SEQ ID NO: 1364657 - RNA, 20 nt, Human
uguguguugauacuguugca

SEQ ID NO: 1364658 - RNA, 19 nt, Human
uguguguugauacuguugc

SEQ ID NO: 1364659 - RNA, 17 nt, Human
uguguguugauacuguu

SEQ ID NO: 1364660 - RNA, 20 nt, Human
uguuaagacuugacagugga

SEQ ID NO: 1364661 - RNA, 17 nt, Human
uguuaagacuugacagu

SEQ ID NO: 1364662 - RNA, 15 nt, Human
uguuaagacuugaca

SEQ ID NO: 1364663 - RNA, 22 nt, Human
uguuaacugaauaccacucugu

SEQ ID NO: 1364664 - RNA, 18 nt, Human
uguuaacugaauaccacu

SEQ ID NO: 1364665 - RNA, 17 nt, Human
uguuaacugaauaccac

SEQ ID NO: 1364666 - RNA, 15 nt, Human
uguuaacugaauacc

SEQ ID NO: 1364667 - RNA, 14 nt, Human
uguuaacugaauac

SEQ ID NO: 1364668 - RNA, 12 nt, Human
uguuaacugaau

SEQ ID NO: 1364669 - RNA, 23 nt, Human
uguguuacuaaaaaaaagaugaa

SEQ ID NO: 1364670 - RNA, 23 nt, Human
uguguuaccugaaaacacugugc

SEQ ID NO: 1364671 - RNA, 23 nt, Human
uguguuaucacccagaagaaaau

SEQ ID NO: 1364672 - RNA, 22 nt, Human
uguguuaucacccagaagaaaa

SEQ ID NO: 1364673 - RNA, 19 nt, Human
uguuaauauugauuuauua

SEQ ID NO: 1364674 - RNA, 21 nt, Human
uguuaaguuauagugaauacu

SEQ ID NO: 1364675 - RNA, 17 nt, Human
uguuaaguuauagugaa

SEQ ID NO: 1364676 - RNA, 18 nt, Human
uguuacacuuuuuggaag

SEQ ID NO: 1364677 - RNA, 13 nt, Human
uguuaauauugau

SEQ ID NO: 1364678 - RNA, 17 nt, Human
uguuacaaauuguagaa

SEQ ID NO: 1364679 - RNA, 18 nt, Human
uguuacaaauuguagaag

SEQ ID NO: 1364680 - RNA, 20 nt, Human
aguggcagcccagccagcgu

SEQ ID NO: 1364681 - RNA, 17 nt, Human
aguggcagcccagccag

SEQ ID NO: 1364682 - RNA, 16 nt, Human
aguggcagcccagcca

SEQ ID NO: 1364683 - RNA, 15 nt, Human
aguggcagcccagcc

SEQ ID NO: 1364684 - RNA, 14 nt, Human
aguggcagcccagc

SEQ ID NO: 1364685 - RNA, 13 nt, Human
aguggcagcccag

SEQ ID NO: 1364686 - RNA, 22 nt, Human
aguggacuggccucaaagcaag

SEQ ID NO: 1364687 - RNA, 16 nt, Human
aguggaugcugggucc

SEQ ID NO: 1364688 - RNA, 16 nt, Human
aguggacucagggcag

SEQ ID NO: 1364689 - RNA, 13 nt, Human
aguggacucaggg

SEQ ID NO: 1364690 - RNA, 20 nt, Human
agugggguuaucucuguguu

SEQ ID NO: 1364691 - RNA, 20 nt, Human
agugggguggugucagaccc

SEQ ID NO: 1364692 - RNA, 19 nt, Human
agugggguuaucucugugu

SEQ ID NO: 1364693 - RNA, 18 nt, Human
agugggguuaucucugug

SEQ ID NO: 1364694 - RNA, 19 nt, Human
aguggggguggggguaggg

SEQ ID NO: 1364695 - RNA, 16 nt, Human
aguggggguggggggu

SEQ ID NO: 1364696 - RNA, 12 nt, Human
aguggggguggg

SEQ ID NO: 1364697 - RNA, 21 nt, Human
aguggcagcccagccagcguc

SEQ ID NO: 1364698 - RNA, 22 nt, Human
agugggcuugauucugcaguaa

SEQ ID NO: 1364699 - RNA, 16 nt, Human
agugggcuugauucug

SEQ ID NO: 1364700 - RNA, 16 nt, Human
aguggggaaugaagau

SEQ ID NO: 1364701 - RNA, 17 nt, Human
auacuaaaaagaagugc

SEQ ID NO: 1364702 - RNA, 13 nt, Human
auacuaaaaagaa

SEQ ID NO: 1364703 - RNA, 15 nt, Human
auacgguggggguag

SEQ ID NO: 1364704 - RNA, 13 nt, Human
auacuaaccagca

SEQ ID NO: 1364705 - RNA, 19 nt, Human
auacuaaccagcagaaaug

SEQ ID NO: 1364706 - RNA, 20 nt, Human
auacuaaccagcagaaaugc

SEQ ID NO: 1364707 - RNA, 22 nt, Human
auacuauuaaaaagguuuacag

SEQ ID NO: 1364708 - RNA, 23 nt, Human
auacuauguggaugugacagugg

SEQ ID NO: 1364709 - RNA, 19 nt, Human
auacuauguggaugugaca

SEQ ID NO: 1364710 - RNA, 21 nt, Human
auacuagggagccauuugaga

SEQ ID NO: 1364711 - RNA, 19 nt, Human
auacuaaaaagaagugcug

SEQ ID NO: 1364712 - RNA, 14 nt, Human
auacuauauuuaug

SEQ ID NO: 1364713 - RNA, 14 nt, Human
auacuauaguacca

SEQ ID NO: 1364714 - RNA, 20 nt, Human
auacuagggagccauuugag

SEQ ID NO: 1364715 - RNA, 13 nt, Human
uuaucacacaaag

SEQ ID NO: 1364716 - RNA, 19 nt, Human
uuaucacacaaagcagaau

SEQ ID NO: 1364717 - RNA, 15 nt, Human
uuaucaaaacuuucu

SEQ ID NO: 1364718 - RNA, 15 nt, Human
uuauauuuugcaguu

SEQ ID NO: 1364719 - RNA, 21 nt, Human
auacuauuaaaaagguuuaca

SEQ ID NO: 1364720 - RNA, 19 nt, Human
uuauauuugaaauauugac

SEQ ID NO: 1364721 - RNA, 16 nt, Human
auacgacaguacacug

SEQ ID NO: 1364722 - RNA, 21 nt, Human
auacgaaauaauuguuguucu

SEQ ID NO: 1364723 - RNA, 19 nt, Human
auacgaaauaauuguuguu

SEQ ID NO: 1364724 - RNA, 18 nt, Human
auacgaaauaauuguugu

SEQ ID NO: 1364725 - RNA, 15 nt, Human
auacgaaauaauugu

SEQ ID NO: 1364726 - RNA, 14 nt, Human
auacgaaauaauug

SEQ ID NO: 1364727 - RNA, 19 nt, Human
auaccacucuguaauugca

SEQ ID NO: 1364728 - RNA, 18 nt, Human
auaccacucuguaauugc

SEQ ID NO: 1364729 - RNA, 17 nt, Human
auaccacucuguaauug

SEQ ID NO: 1364730 - RNA, 15 nt, Human
auaccacucuguaau

SEQ ID NO: 1364731 - RNA, 14 nt, Human
auaccacucuguaa

SEQ ID NO: 1364732 - RNA, 17 nt, Human
auaccagccaguaaaug

SEQ ID NO: 1364733 - RNA, 14 nt, Human
auaccuuuuuuaga

SEQ ID NO: 1364734 - RNA, 17 nt, Human
auaccacgcuagggcug

SEQ ID NO: 1364735 - RNA, 17 nt, Human
auaccacuuuuguucuu

SEQ ID NO: 1364736 - RNA, 18 nt, Human
auaccacuuuuguucuug

SEQ ID NO: 1364737 - RNA, 19 nt, Human
auacgagagcagaggucuc

SEQ ID NO: 1364738 - RNA, 20 nt, Human
auacgagagcagaggucucc

SEQ ID NO: 1364739 - RNA, 17 nt, Human
auacgagagcagagguc

SEQ ID NO: 1364740 - RNA, 16 nt, Human
auacgagagcagaggu

SEQ ID NO: 1364741 - RNA, 13 nt, Human
auacggugggggu

SEQ ID NO: 1364742 - RNA, 15 nt, Human
auacggcuccccagu

SEQ ID NO: 1364743 - RNA, 21 nt, Human
auacgcuggcaacacagaggc

SEQ ID NO: 1364744 - RNA, 23 nt, Human
auacgcucagcucauccaugccu

SEQ ID NO: 1364745 - RNA, 21 nt, Human
auacgcucagcucauccaugc

SEQ ID NO: 1364746 - RNA, 14 nt, Human
auacgcucagcuca

SEQ ID NO: 1364747 - RNA, 13 nt, Human
auacguacacauu

SEQ ID NO: 1364748 - RNA, 19 nt, Human
auacgugggcauucaaaug

SEQ ID NO: 1364749 - RNA, 18 nt, Human
auacgugggcauucaaau

SEQ ID NO: 1364750 - RNA, 16 nt, Human
auacguacacauuuua

SEQ ID NO: 1364751 - RNA, 14 nt, Human
auacguacacauuu

SEQ ID NO: 1364752 - RNA, 15 nt, Human
auacguacacauuuu

SEQ ID NO: 1364753 - RNA, 20 nt, Human
auacagaauuacuguaacug

SEQ ID NO: 1364754 - RNA, 23 nt, Human
auacagaacucuuucaaaaccuu

SEQ ID NO: 1364755 - RNA, 20 nt, Human
auacagaacucuuucaaaac

SEQ ID NO: 1364756 - RNA, 18 nt, Human
auacagaacucuuucaaa

SEQ ID NO: 1364757 - RNA, 16 nt, Human
auacagaacucuuuca

SEQ ID NO: 1364758 - RNA, 15 nt, Human
auacagaacucuuuc

SEQ ID NO: 1364759 - RNA, 14 nt, Human
auacagaacucuuu

SEQ ID NO: 1364760 - RNA, 12 nt, Human
auacaagacugc

SEQ ID NO: 1364761 - RNA, 15 nt, Human
auacagagaagucac

SEQ ID NO: 1364762 - RNA, 14 nt, Human
auacagagaaguca

SEQ ID NO: 1364763 - RNA, 12 nt, Human
uuauaaacuuuu

SEQ ID NO: 1364764 - RNA, 16 nt, Human
uuauaaacuuuuuucu

SEQ ID NO: 1364765 - RNA, 17 nt, Human
uuauaaacuuuaccuuu

SEQ ID NO: 1364766 - RNA, 18 nt, Human
uuauaaacuuuaccuuuu

SEQ ID NO: 1364767 - RNA, 15 nt, Human
uuauaaauauauuua

SEQ ID NO: 1364768 - RNA, 19 nt, Human
uuauaaauacugcaaauca

SEQ ID NO: 1364769 - RNA, 22 nt, Human
uuauaaacuuuuuucuuacugu

SEQ ID NO: 1364770 - RNA, 12 nt, Human
auacauacagaa

SEQ ID NO: 1364771 - RNA, 17 nt, Human
auacauacagaauuacu

SEQ ID NO: 1364772 - RNA, 20 nt, Human
auacaguuacucagaauucu

SEQ ID NO: 1364773 - RNA, 18 nt, Human
auacauagggauaugcgu

SEQ ID NO: 1364774 - RNA, 18 nt, Human
auacaugcuaagagaagu

SEQ ID NO: 1364775 - RNA, 22 nt, Human
auacaugcuaagagaaguagaa

SEQ ID NO: 1364776 - RNA, 22 nt, Human
auacauguaauucuaccaaggu

SEQ ID NO: 1364777 - RNA, 15 nt, Human
auacaggaaacaguu

SEQ ID NO: 1364778 - RNA, 14 nt, Human
auacaggaaacagu

SEQ ID NO: 1364779 - RNA, 13 nt, Human
auacaggaaacag

SEQ ID NO: 1364780 - RNA, 18 nt, Human
auacagauauauuuucuu

SEQ ID NO: 1364781 - RNA, 17 nt, Human
auacagaucaucuugga

SEQ ID NO: 1364782 - RNA, 14 nt, Human
auacagauauauuu

SEQ ID NO: 1364783 - RNA, 13 nt, Human
auacagauauauu

SEQ ID NO: 1364784 - RNA, 23 nt, Human
auacagagaagucacagggcagu

SEQ ID NO: 1364785 - RNA, 20 nt, Human
auacagucuuccauuugcaa

SEQ ID NO: 1364786 - RNA, 19 nt, Human
auacagucuuccauuugca

SEQ ID NO: 1364787 - RNA, 18 nt, Human
auacaguuacucagaauu

SEQ ID NO: 1364788 - RNA, 16 nt, Human
auacaggaaacaguug

SEQ ID NO: 1364789 - RNA, 17 nt, Human
auacaggagauucucuu

SEQ ID NO: 1364790 - RNA, 21 nt, Human
auacaggaugaugacuaugga

SEQ ID NO: 1364791 - RNA, 23 nt, Human
uuaugacaucacuuguacaaaau

SEQ ID NO: 1364792 - RNA, 21 nt, Human
uuaugacaucacuuguacaaa

SEQ ID NO: 1364793 - RNA, 18 nt, Human
uuaugacaucacuuguac

SEQ ID NO: 1364794 - RNA, 16 nt, Human
uuaugacaucacuugu

SEQ ID NO: 1364795 - RNA, 20 nt, Human
uuaugaaugugaagccuucc

SEQ ID NO: 1364796 - RNA, 19 nt, Human
uuaugaaugugaagccuuc

SEQ ID NO: 1364797 - RNA, 21 nt, Human
uuaugaauuacauuuguauaa

SEQ ID NO: 1364798 - RNA, 17 nt, Human
uuaugaauuacauuugu

SEQ ID NO: 1364799 - RNA, 16 nt, Human
uuaugaauuacauuug

SEQ ID NO: 1364800 - RNA, 18 nt, Human
uuaugaaugugaagccuu

SEQ ID NO: 1364801 - RNA, 17 nt, Human
uuaugaaugugaagccu

SEQ ID NO: 1364802 - RNA, 14 nt, Human
uuaugaauuacauu

SEQ ID NO: 1364803 - RNA, 18 nt, Human
uuaugagcucuucauguu

SEQ ID NO: 1364804 - RNA, 15 nt, Human
uuaugagaaagccuu

SEQ ID NO: 1364805 - RNA, 22 nt, Human
uuaugagaaacuuaaauguuau

SEQ ID NO: 1364806 - RNA, 13 nt, Human
uuaugagaaacuu

SEQ ID NO: 1364807 - RNA, 15 nt, Human
uuaugacugccaaga

SEQ ID NO: 1364808 - RNA, 15 nt, Human
uuaugacuauguaaa

SEQ ID NO: 1364809 - RNA, 16 nt, Human
uuaugacuauguaaac

SEQ ID NO: 1364810 - RNA, 20 nt, Human
uuaugauacuugaaaauuaa

SEQ ID NO: 1364811 - RNA, 22 nt, Human
uuaugauagcaaauggccucau

SEQ ID NO: 1364812 - RNA, 17 nt, Human
uuaugauaauagauucu

SEQ ID NO: 1364813 - RNA, 16 nt, Human
uuaugauaauagauuc

SEQ ID NO: 1364814 - RNA, 20 nt, Human
uuaucccucaccuguagcag

SEQ ID NO: 1364815 - RNA, 17 nt, Human
uuaucccucaccuguag

SEQ ID NO: 1364816 - RNA, 15 nt, Human
uuaucccucaccugu

SEQ ID NO: 1364817 - RNA, 15 nt, Human
uuaucccagcugccu

SEQ ID NO: 1364818 - RNA, 13 nt, Human
uuaucccagcugc

SEQ ID NO: 1364819 - RNA, 23 nt, Human
uuaucccaaaguuguuguaaccu

SEQ ID NO: 1364820 - RNA, 19 nt, Human
uuauccauauugagucaaa

SEQ ID NO: 1364821 - RNA, 17 nt, Human
uuauccauauugaguca

SEQ ID NO: 1364822 - RNA, 16 nt, Human
uuaucauuuucaaaau

SEQ ID NO: 1364823 - RNA, 12 nt, Human
uuaucauuuuca

SEQ ID NO: 1364824 - RNA, 18 nt, Human
uuaucaccgugggcuccc

SEQ ID NO: 1364825 - RNA, 17 nt, Human
uuaucacccagaagaaa

SEQ ID NO: 1364826 - RNA, 18 nt, Human
uuaucacccagaagaaaa

SEQ ID NO: 1364827 - RNA, 19 nt, Human
uuaucacccagaagaaaau

SEQ ID NO: 1364828 - RNA, 21 nt, Human
uuaucacccagaagaaaauag

SEQ ID NO: 1364829 - RNA, 19 nt, Human
uuaugaaauucacccccuu

SEQ ID NO: 1364830 - RNA, 19 nt, Human
uuaugaaacuuuuggaagg

SEQ ID NO: 1364831 - RNA, 22 nt, Human
uuaugaagaaggugaauagcca

SEQ ID NO: 1364832 - RNA, 20 nt, Human
uuaugaagcuuuuaugugaa

SEQ ID NO: 1364833 - RNA, 18 nt, Human
uuaugaaacuuuuggaag

SEQ ID NO: 1364834 - RNA, 17 nt, Human
uuaugaaacuuuuggaa

SEQ ID NO: 1364835 - RNA, 14 nt, Human
uuaugaaacuuuug

SEQ ID NO: 1364836 - RNA, 19 nt, Human
uuaugaaaaagaagaaucu

SEQ ID NO: 1364837 - RNA, 18 nt, Human
uuaugaaaaagaagaauc

SEQ ID NO: 1364838 - RNA, 16 nt, Human
uuaucccagcugccua

SEQ ID NO: 1364839 - RNA, 23 nt, Human
uuaugggaaccccuucauccucu

SEQ ID NO: 1364840 - RNA, 22 nt, Human
uuaugauuaaguaaugauaacu

SEQ ID NO: 1364841 - RNA, 19 nt, Human
uuauggcuuuugugcauua

SEQ ID NO: 1364842 - RNA, 19 nt, Human
uuaugauuaaguaaugaua

SEQ ID NO: 1364843 - RNA, 21 nt, Human
uuaugaucuggcccuugcuua

SEQ ID NO: 1364844 - RNA, 13 nt, Human
uuaugaucuggcc

SEQ ID NO: 1364845 - RNA, 18 nt, Human
uuaugauaauagauucuc

SEQ ID NO: 1364846 - RNA, 23 nt, Human
uuaugguaacugcuuucuguucc

SEQ ID NO: 1364847 - RNA, 22 nt, Human
uuaugguaacugcuuucuguuc

SEQ ID NO: 1364848 - RNA, 21 nt, Human
uuaugguaacugcuuucuguu

SEQ ID NO: 1364849 - RNA, 15 nt, Human
uuaugggucacagga

SEQ ID NO: 1364850 - RNA, 13 nt, Human
uuaugggucacag

SEQ ID NO: 1364851 - RNA, 11 nt, Human
uuaugggucac

SEQ ID NO: 1364852 - RNA, 20 nt, Human
uuaugugguuuuagauuuuc

SEQ ID NO: 1364853 - RNA, 19 nt, Human
uuaugugguuuuagauuuu

SEQ ID NO: 1364854 - RNA, 18 nt, Human
uuaugugguuuuagauuu

SEQ ID NO: 1364855 - RNA, 16 nt, Human
uuaugugguuuuagau

SEQ ID NO: 1364856 - RNA, 16 nt, Human
uuaugugaucaugugu

SEQ ID NO: 1364857 - RNA, 15 nt, Human
uuaugugaaacaugu

SEQ ID NO: 1364858 - RNA, 14 nt, Human
uuaugugacauuuu

SEQ ID NO: 1364859 - RNA, 19 nt, Human
uuaugugacauuuuacauu

SEQ ID NO: 1364860 - RNA, 22 nt, Human
uuaugugccagauuuaugcaua

SEQ ID NO: 1364861 - RNA, 20 nt, Human
uuaugugacauuuuacauua

SEQ ID NO: 1364862 - RNA, 21 nt, Human
uuauguaguuuuuauauguug

SEQ ID NO: 1364863 - RNA, 11 nt, Human
uuauguaguuu

SEQ ID NO: 1364864 - RNA, 18 nt, Human
uuauguagcucuuuguca

SEQ ID NO: 1364865 - RNA, 19 nt, Human
uuauguaguaauugacaug

SEQ ID NO: 1364866 - RNA, 16 nt, Human
uuauguaguaauugac

SEQ ID NO: 1364867 - RNA, 15 nt, Human
uuauguaguaauuga

SEQ ID NO: 1364868 - RNA, 16 nt, Human
uuauguagcucuuugu

SEQ ID NO: 1364869 - RNA, 13 nt, Human
uuauguagcucuu

SEQ ID NO: 1364870 - RNA, 11 nt, Human
uuauguaauuu

SEQ ID NO: 1364871 - RNA, 13 nt, Human
uuauguaauuuca

SEQ ID NO: 1364872 - RNA, 17 nt, Human
uuauguaaauuauguaa

SEQ ID NO: 1364873 - RNA, 22 nt, Human
uuauguaaauuaucaggcaaau

SEQ ID NO: 1364874 - RNA, 15 nt, Human
uuaugucucuucuga

SEQ ID NO: 1364875 - RNA, 14 nt, Human
uuauguauugugca

SEQ ID NO: 1364876 - RNA, 20 nt, Human
uuauguauugugcaaugugu

SEQ ID NO: 1364877 - RNA, 11 nt, Human
uuaugucuggg

SEQ ID NO: 1364878 - RNA, 17 nt, Human
uuaugucuguggauuuu

SEQ ID NO: 1364879 - RNA, 13 nt, Human
uuaugugaaacau

SEQ ID NO: 1364880 - RNA, 16 nt, Human
uuauuauuauuuuuua

SEQ ID NO: 1364881 - RNA, 14 nt, Human
uuauuaugcauuau

SEQ ID NO: 1364882 - RNA, 13 nt, Human
uuauuaugcauga

SEQ ID NO: 1364883 - RNA, 22 nt, Human
uuauuauuuguguuuuaauuua

SEQ ID NO: 1364884 - RNA, 12 nt, Human
uuauucaauaaa

SEQ ID NO: 1364885 - RNA, 21 nt, Human
uuauucaauuuauuugaauga

SEQ ID NO: 1364886 - RNA, 20 nt, Human
uuauucaauuuauuugaaug

SEQ ID NO: 1364887 - RNA, 18 nt, Human
uuauucaauuuauuugaa

SEQ ID NO: 1364888 - RNA, 17 nt, Human
uuauucaauuuauuuga

SEQ ID NO: 1364889 - RNA, 14 nt, Human
uuauucaauaaagu

SEQ ID NO: 1364890 - RNA, 17 nt, Human
uuauucaauaaaguauu

SEQ ID NO: 1364891 - RNA, 19 nt, Human
uuauucaauaaaguauuua

SEQ ID NO: 1364892 - RNA, 20 nt, Human
uuauucaauaaaguauuuaa

SEQ ID NO: 1364893 - RNA, 21 nt, Human
uuauucaauaaaguauuuaau

SEQ ID NO: 1364894 - RNA, 15 nt, Human
uuauucagggaagga

SEQ ID NO: 1364895 - RNA, 14 nt, Human
uuauucagugucac

SEQ ID NO: 1364896 - RNA, 13 nt, Human
uuauucaguguca

SEQ ID NO: 1364897 - RNA, 12 nt, Human
uuauucauaauu

SEQ ID NO: 1364898 - RNA, 13 nt, Human
uuauuaugaagaa

SEQ ID NO: 1364899 - RNA, 12 nt, Human
uuauuaugcaug

SEQ ID NO: 1364900 - RNA, 15 nt, Human
uuauuauauuuacaa

SEQ ID NO: 1364901 - RNA, 22 nt, Human
uuauuauaaucuuauaauuguu

SEQ ID NO: 1364902 - RNA, 21 nt, Human
uuauuauaaucuuauaauugu

SEQ ID NO: 1364903 - RNA, 18 nt, Human
uuauguuauauauaaaua

SEQ ID NO: 1364904 - RNA, 17 nt, Human
uuauguuauauauaaau

SEQ ID NO: 1364905 - RNA, 16 nt, Human
uuauguuauauauaaa

SEQ ID NO: 1364906 - RNA, 15 nt, Human
uuauguuauauauaa

SEQ ID NO: 1364907 - RNA, 13 nt, Human
uuauguuauauau

SEQ ID NO: 1364908 - RNA, 22 nt, Human
uuauguuaagggaagaauucca

SEQ ID NO: 1364909 - RNA, 17 nt, Human
uuauguuaaaucaauaa

SEQ ID NO: 1364910 - RNA, 14 nt, Human
uuauguuaaacuag

SEQ ID NO: 1364911 - RNA, 19 nt, Human
uuauguuaaaacugggaca

SEQ ID NO: 1364912 - RNA, 10 nt, Human
uuauguuaaa

SEQ ID NO: 1364913 - RNA, 11 nt, Human
uuauguuaaac

SEQ ID NO: 1364914 - RNA, 12 nt, Human
uuauguuaaacu

SEQ ID NO: 1364915 - RNA, 13 nt, Human
uuauguuaaacua

SEQ ID NO: 1364916 - RNA, 14 nt, Human
uuauuauauuuaca

SEQ ID NO: 1364917 - RNA, 18 nt, Human
uuauuaguauuguugucc

SEQ ID NO: 1364918 - RNA, 19 nt, Human
uuauuaguauuguuguccu

SEQ ID NO: 1364919 - RNA, 16 nt, Human
uuauuaguauuguugu

SEQ ID NO: 1364920 - RNA, 23 nt, Human
uuauucccuuccugccagccccu

SEQ ID NO: 1364921 - RNA, 13 nt, Human
uuauucccuuccu

SEQ ID NO: 1364922 - RNA, 20 nt, Human
uuauuccccauucuuccuag

SEQ ID NO: 1364923 - RNA, 23 nt, Human
uuauuccaugacugcuugcccua

SEQ ID NO: 1364924 - RNA, 16 nt, Human
uuauuccaugacugcu

SEQ ID NO: 1364925 - RNA, 13 nt, Human
uuauuccaugacu

SEQ ID NO: 1364926 - RNA, 22 nt, Human
uuauuccagaaugcuguacauc

SEQ ID NO: 1364927 - RNA, 20 nt, Human
uuauuccagaaugcuguaca

SEQ ID NO: 1364928 - RNA, 17 nt, Human
uuauuccagaaugcugu

SEQ ID NO: 1364929 - RNA, 18 nt, Human
uuauucccuuccugccag

SEQ ID NO: 1364930 - RNA, 20 nt, Human
uuauuccuccugcucauauu

SEQ ID NO: 1364931 - RNA, 16 nt, Human
uuauuccuccugcuca

SEQ ID NO: 1364932 - RNA, 23 nt, Human
auacucuagaugaaguuuuacau

SEQ ID NO: 1364933 - RNA, 17 nt, Human
auacucuagaugaaguu

SEQ ID NO: 1364934 - RNA, 17 nt, Human
auacucauuuuucauga

SEQ ID NO: 1364935 - RNA, 20 nt, Human
auacucucaccauuuggauc

SEQ ID NO: 1364936 - RNA, 18 nt, Human
auacucuuauaucuauau

SEQ ID NO: 1364937 - RNA, 14 nt, Human
auacucuuauaucu

SEQ ID NO: 1364938 - RNA, 22 nt, Human
auacugaacaucugaguccugg

SEQ ID NO: 1364939 - RNA, 23 nt, Human
auacugaacaucugaguccugga

SEQ ID NO: 1364940 - RNA, 20 nt, Human
auacugaacaucugaguccu

SEQ ID NO: 1364941 - RNA, 15 nt, Human
auacugaacaucuga

SEQ ID NO: 1364942 - RNA, 23 nt, Human
auacucuuucuguauauacuuuu

SEQ ID NO: 1364943 - RNA, 22 nt, Human
auacucuuucuguauauacuuu

SEQ ID NO: 1364944 - RNA, 17 nt, Human
auacucuuucuguauau

SEQ ID NO: 1364945 - RNA, 16 nt, Human
auacucuuucuguaua

SEQ ID NO: 1364946 - RNA, 15 nt, Human
auacucuuucuguau

SEQ ID NO: 1364947 - RNA, 14 nt, Human
auacucuuucugua

SEQ ID NO: 1364948 - RNA, 21 nt, Human
auacugcauacuuuuuaaaug

SEQ ID NO: 1364949 - RNA, 15 nt, Human
auacugcauacuuuu

SEQ ID NO: 1364950 - RNA, 14 nt, Human
auacuggaaagcuu

SEQ ID NO: 1364951 - RNA, 21 nt, Human
auacugcuuggagcugagcaa

SEQ ID NO: 1364952 - RNA, 20 nt, Human
auacugcuuggagcugagca

SEQ ID NO: 1364953 - RNA, 15 nt, Human
auacugcuuggagcu

SEQ ID NO: 1364954 - RNA, 22 nt, Human
auacugcugagauacauacaga

SEQ ID NO: 1364955 - RNA, 10 nt, Human
auacugcuug

SEQ ID NO: 1364956 - RNA, 21 nt, Human
auacugcugagauacauacag

SEQ ID NO: 1364957 - RNA, 19 nt, Human
auacugcugagauacauac

SEQ ID NO: 1364958 - RNA, 18 nt, Human
auacugcugagauacaua

SEQ ID NO: 1364959 - RNA, 12 nt, Human
auacugcugaga

SEQ ID NO: 1364960 - RNA, 22 nt, Human
auacugcuacagcaauuucuaa

SEQ ID NO: 1364961 - RNA, 19 nt, Human
auacugcuacagcaauuuc

SEQ ID NO: 1364962 - RNA, 15 nt, Human
auacugcuacagcaa

SEQ ID NO: 1364963 - RNA, 22 nt, Human
auacugcgacuuucugccugga

SEQ ID NO: 1364964 - RNA, 20 nt, Human
auacugcgacuuucugccug

SEQ ID NO: 1364965 - RNA, 19 nt, Human
auacugcgacuuucugccu

SEQ ID NO: 1364966 - RNA, 15 nt, Human
auacuggccuggacu

SEQ ID NO: 1364967 - RNA, 14 nt, Human
auacuggccuggac

SEQ ID NO: 1364968 - RNA, 22 nt, Human
auagaauuauaacuggaaagaa

SEQ ID NO: 1364969 - RNA, 17 nt, Human
auagacaaauagaaaau

SEQ ID NO: 1364970 - RNA, 16 nt, Human
auagacaaauagaaaa

SEQ ID NO: 1364971 - RNA, 14 nt, Human
auagacaauugagg

SEQ ID NO: 1364972 - RNA, 16 nt, Human
auagacaauuuauuau

SEQ ID NO: 1364973 - RNA, 22 nt, Human
auagacaauuuauuauggcaca

SEQ ID NO: 1364974 - RNA, 18 nt, Human
auagacagaagaaacaag

SEQ ID NO: 1364975 - RNA, 15 nt, Human
auagacagcaugaga

SEQ ID NO: 1364976 - RNA, 19 nt, Human
auagacagaagaaacaagg

SEQ ID NO: 1364977 - RNA, 17 nt, Human
auagacagaagaaacaa

SEQ ID NO: 1364978 - RNA, 16 nt, Human
auagacagaagaaaca

SEQ ID NO: 1364979 - RNA, 14 nt, Human
auagacagaagaaa

SEQ ID NO: 1364980 - RNA, 13 nt, Human
auagacagaagaa

SEQ ID NO: 1364981 - RNA, 19 nt, Human
auagacaaauagaaaaugg

SEQ ID NO: 1364982 - RNA, 21 nt, Human
auagacaauugagguaaguuu

SEQ ID NO: 1364983 - RNA, 22 nt, Human
auagacacuccccgaagucuuu

SEQ ID NO: 1364984 - RNA, 12 nt, Human
auagacacgcac

SEQ ID NO: 1364985 - RNA, 23 nt, Human
auagacaauuuauuauggcacau

SEQ ID NO: 1364986 - RNA, 22 nt, Human
auagaauaaaggcaguuuucua

SEQ ID NO: 1364987 - RNA, 20 nt, Human
auagaauaaaggcaguuuuc

SEQ ID NO: 1364988 - RNA, 18 nt, Human
auagaaugguaucaauaa

SEQ ID NO: 1364989 - RNA, 13 nt, Human
auagaaugacagu

SEQ ID NO: 1364990 - RNA, 14 nt, Human
auagaauaaaauuu

SEQ ID NO: 1364991 - RNA, 19 nt, Human
auagaauaaaauuuuuaau

SEQ ID NO: 1364992 - RNA, 19 nt, Human
auagaauaaaggcaguuuu

SEQ ID NO: 1364993 - RNA, 18 nt, Human
auagaauaaaggcaguuu

SEQ ID NO: 1364994 - RNA, 17 nt, Human
auagaauaaaggcaguu

SEQ ID NO: 1364995 - RNA, 12 nt, Human
auagaauaaagg

SEQ ID NO: 1364996 - RNA, 22 nt, Human
auagaauaaaauuuuuaaucuu

SEQ ID NO: 1364997 - RNA, 14 nt, Human
auagaacugaauga

SEQ ID NO: 1364998 - RNA, 18 nt, Human
auagaacucugaaaugaa

SEQ ID NO: 1364999 - RNA, 14 nt, Human
auagaaguuuagau

SEQ ID NO: 1365000 - RNA, 13 nt, Human
auagaaggugaug

SEQ ID NO: 1365001 - RNA, 18 nt, Human
auagaaguauaaagaauu

SEQ ID NO: 1365002 - RNA, 13 nt, Human
auagaaguaaaaa

SEQ ID NO: 1365003 - RNA, 19 nt, Human
auacuguauauucaggacu

SEQ ID NO: 1365004 - RNA, 16 nt, Human
auacuguaguauucuu

SEQ ID NO: 1365005 - RNA, 14 nt, Human
auagaacaaggcug

SEQ ID NO: 1365006 - RNA, 14 nt, Human
auagagcuguauua

SEQ ID NO: 1365007 - RNA, 15 nt, Human
auagagccugaggga

SEQ ID NO: 1365008 - RNA, 13 nt, Human
auagagccugagg

SEQ ID NO: 1365009 - RNA, 20 nt, Human
auagagccggguguccccaa

SEQ ID NO: 1365010 - RNA, 19 nt, Human
auagagccgggugucccca

SEQ ID NO: 1365011 - RNA, 15 nt, Human
auagacuuaaaucuc

SEQ ID NO: 1365012 - RNA, 14 nt, Human
auagagacgggacu

SEQ ID NO: 1365013 - RNA, 18 nt, Human
auagauaggucagugcaa

SEQ ID NO: 1365014 - RNA, 22 nt, Human
auagaggauggucuuacagcag

SEQ ID NO: 1365015 - RNA, 13 nt, Human
auagagcuguauu

SEQ ID NO: 1365016 - RNA, 20 nt, Human
auagaugcuggcccagggcc

SEQ ID NO: 1365017 - RNA, 17 nt, Human
auagaugcuggcccagg

SEQ ID NO: 1365018 - RNA, 16 nt, Human
auagaugcuggcccag

SEQ ID NO: 1365019 - RNA, 15 nt, Human
auagaugcuggccca

SEQ ID NO: 1365020 - RNA, 21 nt, Human
auagauacccuacgcugucca

SEQ ID NO: 1365021 - RNA, 20 nt, Human
auagauaaaacaucuuugaa

SEQ ID NO: 1365022 - RNA, 21 nt, Human
auagauaaaacaucuuugaaa

SEQ ID NO: 1365023 - RNA, 20 nt, Human
auagauaagaguagaaacug

SEQ ID NO: 1365024 - RNA, 14 nt, Human
auagaguguuauca

SEQ ID NO: 1365025 - RNA, 22 nt, Human
auagaugggggaaagcaaagca

SEQ ID NO: 1365026 - RNA, 23 nt, Human
auagaugcuggcccagggcccag

SEQ ID NO: 1365027 - RNA, 13 nt, Human
auagaugucuuuu

SEQ ID NO: 1365028 - RNA, 12 nt, Human
auagauguuuga

SEQ ID NO: 1365029 - RNA, 17 nt, Human
auagaugucuuuuccca

SEQ ID NO: 1365030 - RNA, 14 nt, Human
auagaugucuuuuc

SEQ ID NO: 1365031 - RNA, 21 nt, Human
auagauuguccuuuugcaaag

SEQ ID NO: 1365032 - RNA, 20 nt, Human
auagauuguccuuuugcaaa

SEQ ID NO: 1365033 - RNA, 14 nt, Human
auagauuguccuuu

SEQ ID NO: 1365034 - RNA, 18 nt, Human
auagauucuaaagauucu

SEQ ID NO: 1365035 - RNA, 19 nt, Human
auagauucucuuguauaag

SEQ ID NO: 1365036 - RNA, 16 nt, Human
auagauucuaaagauu

SEQ ID NO: 1365037 - RNA, 15 nt, Human
auagauucuaaagau

SEQ ID NO: 1365038 - RNA, 14 nt, Human
auagauucuaaaga

SEQ ID NO: 1365039 - RNA, 13 nt, Human
auagauucuaaag

SEQ ID NO: 1365040 - RNA, 12 nt, Human
auagauucuaaa

SEQ ID NO: 1365041 - RNA, 23 nt, Human
aguuucuaagguccgguguucua

SEQ ID NO: 1365042 - RNA, 12 nt, Human
aguuucuaaggu

SEQ ID NO: 1365043 - RNA, 11 nt, Human
aguuucuaagg

SEQ ID NO: 1365044 - RNA, 20 nt, Human
aguuucuaagauucuaaagg

SEQ ID NO: 1365045 - RNA, 19 nt, Human
aguuucuaagauucuaaag

SEQ ID NO: 1365046 - RNA, 18 nt, Human
aguuucuaagauucuaaa

SEQ ID NO: 1365047 - RNA, 17 nt, Human
aguuucuaagauucuaa

SEQ ID NO: 1365048 - RNA, 16 nt, Human
aguuucuaagauucua

SEQ ID NO: 1365049 - RNA, 15 nt, Human
aguuucuaagauucu

SEQ ID NO: 1365050 - RNA, 14 nt, Human
aguuucuaagauuc

SEQ ID NO: 1365051 - RNA, 20 nt, Human
aguuucuaaacuggagacug

SEQ ID NO: 1365052 - RNA, 19 nt, Human
aguuucuaaacuggagacu

SEQ ID NO: 1365053 - RNA, 18 nt, Human
aguuucuaaacuggagac

SEQ ID NO: 1365054 - RNA, 17 nt, Human
aguuucuaaacuggaga

SEQ ID NO: 1365055 - RNA, 13 nt, Human
aguuuauuuguug

SEQ ID NO: 1365056 - RNA, 23 nt, Human
aguuucucugcagaaacuacuga

SEQ ID NO: 1365057 - RNA, 21 nt, Human
aguuuguguguugucucuuga

SEQ ID NO: 1365058 - RNA, 14 nt, Human
aguuuguguguugu

SEQ ID NO: 1365059 - RNA, 22 nt, Human
aguuugugugucuuaauuauua

SEQ ID NO: 1365060 - RNA, 22 nt, Human
aguuuguuaguaugaggcauuu

SEQ ID NO: 1365061 - RNA, 16 nt, Human
aguuugugugucuuaa

SEQ ID NO: 1365062 - RNA, 15 nt, Human
aguuugugugucuua

SEQ ID NO: 1365063 - RNA, 14 nt, Human
aguuugugugucuu

SEQ ID NO: 1365064 - RNA, 18 nt, Human
aguuuuaacuguggauau

SEQ ID NO: 1365065 - RNA, 13 nt, Human
aguuuuaacugug

SEQ ID NO: 1365066 - RNA, 22 nt, Human
aguuuuaaaaagccaguuuggg

SEQ ID NO: 1365067 - RNA, 13 nt, Human
aguuuguuuuugc

SEQ ID NO: 1365068 - RNA, 15 nt, Human
aguuuguugaaacac

SEQ ID NO: 1365069 - RNA, 16 nt, Human
uuaaauuuuuuguuga

SEQ ID NO: 1365070 - RNA, 18 nt, Human
uuaaauuuuuuguugaca

SEQ ID NO: 1365071 - RNA, 12 nt, Human
uuaacagaaaug

SEQ ID NO: 1365072 - RNA, 13 nt, Human
uuaacagaaaugu

SEQ ID NO: 1365073 - RNA, 14 nt, Human
uuaacagaaaugua

SEQ ID NO: 1365074 - RNA, 17 nt, Human
aguuuaucauucaagug

SEQ ID NO: 1365075 - RNA, 16 nt, Human
aguuuaucauucaagu

SEQ ID NO: 1365076 - RNA, 15 nt, Human
aguuuaucauucaag

SEQ ID NO: 1365077 - RNA, 14 nt, Human
aguuuaucauucaa

SEQ ID NO: 1365078 - RNA, 19 nt, Human
aguuuaucaguaaauaacu

SEQ ID NO: 1365079 - RNA, 18 nt, Human
aguuuaucaguaaauaac

SEQ ID NO: 1365080 - RNA, 18 nt, Human
aguuuauauuuaacucuc

SEQ ID NO: 1365081 - RNA, 16 nt, Human
aguuuauauuuaacuc

SEQ ID NO: 1365082 - RNA, 15 nt, Human
aguuuauauuuaacu

SEQ ID NO: 1365083 - RNA, 16 nt, Human
uuaaauuuuuuuuaca

SEQ ID NO: 1365084 - RNA, 16 nt, Human
uuaacagaaauguaca

SEQ ID NO: 1365085 - RNA, 15 nt, Human
uuaaaguuguuugug

SEQ ID NO: 1365086 - RNA, 23 nt, Human
uuaaaguuaguaucuuuugauau

SEQ ID NO: 1365087 - RNA, 23 nt, Human
uuaaaccaucucccuggugcuua

SEQ ID NO: 1365088 - RNA, 13 nt, Human
uuaaaauccucaa

SEQ ID NO: 1365089 - RNA, 12 nt, Human
uuaaaauccuca

SEQ ID NO: 1365090 - RNA, 19 nt, Human
uuaaaaaucucaaauuucu

SEQ ID NO: 1365091 - RNA, 20 nt, Human
uuaaaaaucucaaauuucua

SEQ ID NO: 1365092 - RNA, 17 nt, Human
uuaaaauguaaagccau

SEQ ID NO: 1365093 - RNA, 16 nt, Human
uuaaaauguaaagcca

SEQ ID NO: 1365094 - RNA, 12 nt, Human
uuaaaaugagaa

SEQ ID NO: 1365095 - RNA, 19 nt, Human
uuaaaaugagaaaucuaaa

SEQ ID NO: 1365096 - RNA, 19 nt, Human
uuaaaauguaugcauguug

SEQ ID NO: 1365097 - RNA, 14 nt, Human
uuaaaauguaugca

SEQ ID NO: 1365098 - RNA, 24 nt, Human
uuaaaauguaagauuauagauucu

SEQ ID NO: 1365099 - RNA, 17 nt, Human
uuaaaauguaagauuau

SEQ ID NO: 1365100 - RNA, 15 nt, Human
uuaaaccaucucccu

SEQ ID NO: 1365101 - RNA, 14 nt, Human
uuaaaccaucuccc

SEQ ID NO: 1365102 - RNA, 17 nt, Human
uuaaaauguaugcaugu

SEQ ID NO: 1365103 - RNA, 22 nt, Human
uuaaaccaucucccuggugcuu

SEQ ID NO: 1365104 - RNA, 21 nt, Human
uuaaaccaucucccuggugcu

SEQ ID NO: 1365105 - RNA, 18 nt, Human
uuaaaccaucucccuggu

SEQ ID NO: 1365106 - RNA, 17 nt, Human
uuaaaccaucucccugg

SEQ ID NO: 1365107 - RNA, 19 nt, Human
uuaaaaaagcuuaaaacuu

SEQ ID NO: 1365108 - RNA, 12 nt, Human
uuaaaaaagcuu

SEQ ID NO: 1365109 - RNA, 21 nt, Human
uuaaaaaagcuuaaaacuuug

SEQ ID NO: 1365110 - RNA, 21 nt, Human
uuaaaaaagauaaacacaaga

SEQ ID NO: 1365111 - RNA, 18 nt, Human
uuaaaaaagauaaacaca

SEQ ID NO: 1365112 - RNA, 17 nt, Human
uuaaaaaagauaaacac

SEQ ID NO: 1365113 - RNA, 15 nt, Human
uuaaaaaagauaaac

SEQ ID NO: 1365114 - RNA, 13 nt, Human
uuaaaaaagauaa

SEQ ID NO: 1365115 - RNA, 12 nt, Human
uuaaaaaagaua

SEQ ID NO: 1365116 - RNA, 14 nt, Human
aguuuagcucugag

SEQ ID NO: 1365117 - RNA, 16 nt, Human
aguuuagcuggaaaag

SEQ ID NO: 1365118 - RNA, 20 nt, Human
aguuuaccuuguauacugua

SEQ ID NO: 1365119 - RNA, 14 nt, Human
aguuuaccuuguau

SEQ ID NO: 1365120 - RNA, 15 nt, Human
aguuuagcuggaaaa

SEQ ID NO: 1365121 - RNA, 20 nt, Human
aguuuaccaguugccuuuua

SEQ ID NO: 1365122 - RNA, 21 nt, Human
aguuagcuuuaacuuaaauag

SEQ ID NO: 1365123 - RNA, 22 nt, Human
aguuagcuuuaacuuaaauagu

SEQ ID NO: 1365124 - RNA, 20 nt, Human
aguuagcuuuaacuuaaaua

SEQ ID NO: 1365125 - RNA, 15 nt, Human
aguuagcuuuaacuu

SEQ ID NO: 1365126 - RNA, 17 nt, Human
aguuuaaauuguaauag

SEQ ID NO: 1365127 - RNA, 20 nt, Human
aguuuaaauuguaauaggcg

SEQ ID NO: 1365128 - RNA, 20 nt, Human
uuaagacacugaaaaaucua

SEQ ID NO: 1365129 - RNA, 19 nt, Human
uuaagaauugaguaauggu

SEQ ID NO: 1365130 - RNA, 20 nt, Human
uuaagaauaucuguaauggu

SEQ ID NO: 1365131 - RNA, 10 nt, Human
uuaagaauau

SEQ ID NO: 1365132 - RNA, 18 nt, Human
uuaagaaggcaaaaaugu

SEQ ID NO: 1365133 - RNA, 19 nt, Human
uuaagaaaaaggaugcaca

SEQ ID NO: 1365134 - RNA, 18 nt, Human
uuaagaccuacuguucua

SEQ ID NO: 1365135 - RNA, 18 nt, Human
uuaagacaugauuuccuu

SEQ ID NO: 1365136 - RNA, 16 nt, Human
uuaagacaugauuucc

SEQ ID NO: 1365137 - RNA, 18 nt, Human
uuaagaccuggcagcucu

SEQ ID NO: 1365138 - RNA, 14 nt, Human
uuaagaccuggcag

SEQ ID NO: 1365139 - RNA, 11 nt, Human
uuaagaccugg

SEQ ID NO: 1365140 - RNA, 21 nt, Human
uuaagaccuacuguucuaaag

SEQ ID NO: 1365141 - RNA, 20 nt, Human
uuaagaccuacuguucuaaa

SEQ ID NO: 1365142 - RNA, 19 nt, Human
uuaagacgaaacauuuguu

SEQ ID NO: 1365143 - RNA, 20 nt, Human
auaaaaggaagccaaagagu

SEQ ID NO: 1365144 - RNA, 19 nt, Human
auaaaaggaagccaaagag

SEQ ID NO: 1365145 - RNA, 23 nt, Human
uuaacuuuuauaaacuuuaccuu

SEQ ID NO: 1365146 - RNA, 22 nt, Human
auaaaagggacugagaaauuua

SEQ ID NO: 1365147 - RNA, 22 nt, Human
uuaacuuuuauaaacuuuaccu

SEQ ID NO: 1365148 - RNA, 22 nt, Human
aguuuuuuuuuucuugucuaua

SEQ ID NO: 1365149 - RNA, 15 nt, Human
aguuuuuuguaccaa

SEQ ID NO: 1365150 - RNA, 18 nt, Human
aguuuuuuuuuucuuguc

SEQ ID NO: 1365151 - RNA, 23 nt, Human
aguuuuuugaaauuaugugacau

SEQ ID NO: 1365152 - RNA, 17 nt, Human
auaaaaggaagccaaag

SEQ ID NO: 1365153 - RNA, 15 nt, Human
auaaaaggaagccaa

SEQ ID NO: 1365154 - RNA, 19 nt, Human
aguuuuuuuuuucuugucu

SEQ ID NO: 1365155 - RNA, 20 nt, Human
auaaaagccuguuuaagaga

SEQ ID NO: 1365156 - RNA, 13 nt, Human
aguuuuauauauu

SEQ ID NO: 1365157 - RNA, 12 nt, Human
aguuuuauauau

SEQ ID NO: 1365158 - RNA, 20 nt, Human
aguuuuacuuuuaaacugug

SEQ ID NO: 1365159 - RNA, 19 nt, Human
aguuuuacuuuuaaacugu

SEQ ID NO: 1365160 - RNA, 21 nt, Human
aguuuuauauauuauauggaa

SEQ ID NO: 1365161 - RNA, 20 nt, Human
aguuuuauauauuauaugga

SEQ ID NO: 1365162 - RNA, 16 nt, Human
aguuuuauauauuaua

SEQ ID NO: 1365163 - RNA, 14 nt, Human
aguuuuauauauua

SEQ ID NO: 1365164 - RNA, 16 nt, Human
aguuuuauaugcuucu

SEQ ID NO: 1365165 - RNA, 16 nt, Human
aguuuuguguuuguug

SEQ ID NO: 1365166 - RNA, 12 nt, Human
aguuuuguguuu

SEQ ID NO: 1365167 - RNA, 13 nt, Human
aguuuuaucauuu

SEQ ID NO: 1365168 - RNA, 12 nt, Human
aguuuuaucauu

SEQ ID NO: 1365169 - RNA, 22 nt, Human
aguuuuguguuuguuguagauu

SEQ ID NO: 1365170 - RNA, 21 nt, Human
aguuuuguguuuguuguagau

SEQ ID NO: 1365171 - RNA, 19 nt, Human
aguuuuguguuuguuguag

SEQ ID NO: 1365172 - RNA, 22 nt, Human
aguuuuucauuaaauaaauuug

SEQ ID NO: 1365173 - RNA, 20 nt, Human
aguuuuucauuaaauaaauu

SEQ ID NO: 1365174 - RNA, 18 nt, Human
aguuuuucauuaaauaaa

SEQ ID NO: 1365175 - RNA, 9 nt, Human
aguuuuuca

SEQ ID NO: 1365176 - RNA, 15 nt, Human
aguuuuuaaacauca

SEQ ID NO: 1365177 - RNA, 14 nt, Human
aguuuuuucaucuu

SEQ ID NO: 1365178 - RNA, 13 nt, Human
aguuuuuucaucu

SEQ ID NO: 1365179 - RNA, 12 nt, Human
aguuuuuucauc

SEQ ID NO: 1365180 - RNA, 17 nt, Human
aguuuuuuauuaugcau

SEQ ID NO: 1365181 - RNA, 21 nt, Human
aguuuuuuacuuuuguuuauu

SEQ ID NO: 1365182 - RNA, 20 nt, Human
aguuuuuucaucuucaguug

SEQ ID NO: 1365183 - RNA, 23 nt, Human
aguuuuuucaucuucaguugucu

SEQ ID NO: 1365184 - RNA, 22 nt, Human
aguuuuuugaaaaugggcucaa

SEQ ID NO: 1365185 - RNA, 21 nt, Human
aguuuuuugaaauuaugugac

SEQ ID NO: 1365186 - RNA, 15 nt, Human
aguuuuuuuuauaca

SEQ ID NO: 1365187 - RNA, 17 nt, Human
uuaauaaaagaaaauua

SEQ ID NO: 1365188 - RNA, 20 nt, Human
uuaaucagguccucagagaa

SEQ ID NO: 1365189 - RNA, 22 nt, Human
uuaaucaguucauuagaaauau

SEQ ID NO: 1365190 - RNA, 17 nt, Human
uuaaucagauagauauu

SEQ ID NO: 1365191 - RNA, 17 nt, Human
uuaaucaucaagagaau

SEQ ID NO: 1365192 - RNA, 16 nt, Human
uuaaucaucaagagaa

SEQ ID NO: 1365193 - RNA, 15 nt, Human
uuaaucaucaagaga

SEQ ID NO: 1365194 - RNA, 12 nt, Human
uuaauccaaugg

SEQ ID NO: 1365195 - RNA, 17 nt, Human
uuaauccccaguaaaau

SEQ ID NO: 1365196 - RNA, 18 nt, Human
uuaauccccaguaaaauu

SEQ ID NO: 1365197 - RNA, 21 nt, Human
uuaauccccaguaaaauugcc

SEQ ID NO: 1365198 - RNA, 20 nt, Human
uuaauccgccaauauuagua

SEQ ID NO: 1365199 - RNA, 15 nt, Human
uuaaucuaaauggaa

SEQ ID NO: 1365200 - RNA, 20 nt, Human
uuaauaaaagaaaauuacaa

SEQ ID NO: 1365201 - RNA, 14 nt, Human
uuaauaaaagaaaa

SEQ ID NO: 1365202 - RNA, 12 nt, Human
uuaauaaaagaa

SEQ ID NO: 1365203 - RNA, 11 nt, Human
uuaauaaaaga

SEQ ID NO: 1365204 - RNA, 14 nt, Human
uuaauaaaaauaau

SEQ ID NO: 1365205 - RNA, 17 nt, Human
uuaaguuucucugcaga

SEQ ID NO: 1365206 - RNA, 13 nt, Human
uuaagacuugaca

SEQ ID NO: 1365207 - RNA, 17 nt, Human
uuaagacuugacagugg

SEQ ID NO: 1365208 - RNA, 22 nt, Human
uuaagaccuacuguucuaaagc

SEQ ID NO: 1365209 - RNA, 22 nt, Human
uuaagagagucuauuuacggaa

SEQ ID NO: 1365210 - RNA, 22 nt, Human
uuaagacgaaacauuuguucua

SEQ ID NO: 1365211 - RNA, 16 nt, Human
uuaauuugguuuucac

SEQ ID NO: 1365212 - RNA, 19 nt, Human
uuaauuuugaagugcuguu

SEQ ID NO: 1365213 - RNA, 13 nt, Human
uuaauuuuccugg

SEQ ID NO: 1365214 - RNA, 23 nt, Human
uuaauuuuauuuuuuauaaaaua

SEQ ID NO: 1365215 - RNA, 21 nt, Human
uuaauuuuaguuuuucauuaa

SEQ ID NO: 1365216 - RNA, 17 nt, Human
uuaauuuuaguuuuuca

SEQ ID NO: 1365217 - RNA, 15 nt, Human
uuaauuuuaguuuuu

SEQ ID NO: 1365218 - RNA, 23 nt, Human
uuaauuuugaagugcuguuuauu

SEQ ID NO: 1365219 - RNA, 20 nt, Human
uuaauuuugaagugcuguuu

SEQ ID NO: 1365220 - RNA, 15 nt, Human
uuaauuuuuccaacu

SEQ ID NO: 1365221 - RNA, 13 nt, Human
uuaauuuuuccaa

SEQ ID NO: 1365222 - RNA, 18 nt, Human
uuaauuuuuauuucuucc

SEQ ID NO: 1365223 - RNA, 15 nt, Human
uuaauuugaaauaug

SEQ ID NO: 1365224 - RNA, 13 nt, Human
uuaauuugaaaua

SEQ ID NO: 1365225 - RNA, 14 nt, Human
uuaauuuaugcaga

SEQ ID NO: 1365226 - RNA, 14 nt, Human
uuaauuuauuauua

SEQ ID NO: 1365227 - RNA, 21 nt, Human
uuaaucuuaguguaugauuac

SEQ ID NO: 1365228 - RNA, 19 nt, Human
uuaaucuuaguguaugauu

SEQ ID NO: 1365229 - RNA, 13 nt, Human
uuaaucuuuaauu

SEQ ID NO: 1365230 - RNA, 17 nt, Human
uuaaucuuugaaagguu

SEQ ID NO: 1365231 - RNA, 17 nt, Human
uuaaucuuuaauuuuac

SEQ ID NO: 1365232 - RNA, 14 nt, Human
uuaccaguugccuu

SEQ ID NO: 1365233 - RNA, 19 nt, Human
uuaccaguugccuuuuauc

SEQ ID NO: 1365234 - RNA, 18 nt, Human
uuaccagugccuuaaacu

SEQ ID NO: 1365235 - RNA, 16 nt, Human
uuacucaguaauuugu

SEQ ID NO: 1365236 - RNA, 22 nt, Human
uuacucuaagaucuuagauucu

SEQ ID NO: 1365237 - RNA, 21 nt, Human
uuacucuaagaucuuagauuc

SEQ ID NO: 1365238 - RNA, 19 nt, Human
uuacucuaagaucuuagau

SEQ ID NO: 1365239 - RNA, 14 nt, Human
uuacucuaagaucu

SEQ ID NO: 1365240 - RNA, 12 nt, Human
uuacucuaagau

SEQ ID NO: 1365241 - RNA, 19 nt, Human
uuacuccugugggagccuc

SEQ ID NO: 1365242 - RNA, 23 nt, Human
uuacuguacagacagaaaaaacu

SEQ ID NO: 1365243 - RNA, 12 nt, Human
uuacuguacaug

SEQ ID NO: 1365244 - RNA, 18 nt, Human
uuacuggccuuuuucauu

SEQ ID NO: 1365245 - RNA, 16 nt, Human
uuacuggccuuuuuca

SEQ ID NO: 1365246 - RNA, 13 nt, Human
uuacuggccuuuu

SEQ ID NO: 1365247 - RNA, 15 nt, Human
uuacugcucugagaa

SEQ ID NO: 1365248 - RNA, 14 nt, Human
uuacugcucugaga

SEQ ID NO: 1365249 - RNA, 20 nt, Human
uuacugcuuaauucaaauaa

SEQ ID NO: 1365250 - RNA, 13 nt, Human
uuacuguacauga

SEQ ID NO: 1365251 - RNA, 14 nt, Human
uuacuguacaugaa

SEQ ID NO: 1365252 - RNA, 22 nt, Human
uuacuguacaugaaaacacauu

SEQ ID NO: 1365253 - RNA, 23 nt, Human
uuacuguacaugaaaacacauuu

SEQ ID NO: 1365254 - RNA, 16 nt, Human
uuagaauuauuuaaac

SEQ ID NO: 1365255 - RNA, 15 nt, Human
uuagaauuauuuaaa

SEQ ID NO: 1365256 - RNA, 13 nt, Human
uuagaauuauuua

SEQ ID NO: 1365257 - RNA, 12 nt, Human
uuagaauuauuu

SEQ ID NO: 1365258 - RNA, 20 nt, Human
uuagaaucaaacauuuugaa

SEQ ID NO: 1365259 - RNA, 18 nt, Human
uuagaaucaaacauuuug

SEQ ID NO: 1365260 - RNA, 17 nt, Human
uuagaaucaaacauuuu

SEQ ID NO: 1365261 - RNA, 23 nt, Human
uuagaaucaaacauuuugaaagu

SEQ ID NO: 1365262 - RNA, 20 nt, Human
uuacuggccuuuuucauuua

SEQ ID NO: 1365263 - RNA, 15 nt, Human
uuacuguaauuccuc

SEQ ID NO: 1365264 - RNA, 17 nt, Human
uuacugucuuuuuucua

SEQ ID NO: 1365265 - RNA, 15 nt, Human
auaagaaagccugag

SEQ ID NO: 1365266 - RNA, 14 nt, Human
auaagaaagccuga

SEQ ID NO: 1365267 - RNA, 13 nt, Human
auaagaaagccug

SEQ ID NO: 1365268 - RNA, 11 nt, Human
auaagaaagcc

SEQ ID NO: 1365269 - RNA, 21 nt, Human
auaagaaacuuuuuuauuuaa

SEQ ID NO: 1365270 - RNA, 22 nt, Human
auaagaaacuuuuuuauuuaaa

SEQ ID NO: 1365271 - RNA, 14 nt, Human
auaagaaacuuuuu

SEQ ID NO: 1365272 - RNA, 13 nt, Human
auaagaaacuuuu

SEQ ID NO: 1365273 - RNA, 20 nt, Human
auaagaucuuuuauuuugcc

SEQ ID NO: 1365274 - RNA, 17 nt, Human
auaagaucuuuuauuuu

SEQ ID NO: 1365275 - RNA, 15 nt, Human
auaagaucuuuuauu

SEQ ID NO: 1365276 - RNA, 13 nt, Human
auaagaucuuuua

SEQ ID NO: 1365277 - RNA, 19 nt, Human
auaagauccuagauccuaa

SEQ ID NO: 1365278 - RNA, 23 nt, Human
auaacuuuuuuuuuucuuuauaa

SEQ ID NO: 1365279 - RNA, 17 nt, Human
auaacuccucauuguaa

SEQ ID NO: 1365280 - RNA, 15 nt, Human
auaacuccucauugu

SEQ ID NO: 1365281 - RNA, 14 nt, Human
auaaauuguauauu

SEQ ID NO: 1365282 - RNA, 17 nt, Human
auaaauuguacagccgg

SEQ ID NO: 1365283 - RNA, 13 nt, Human
auaaauuguauau

SEQ ID NO: 1365284 - RNA, 22 nt, Human
auaacuccucccaggguuuuaa

SEQ ID NO: 1365285 - RNA, 18 nt, Human
auaacuccucccaggguu

SEQ ID NO: 1365286 - RNA, 16 nt, Human
auaacuccucccaggg

SEQ ID NO: 1365287 - RNA, 14 nt, Human
auaacuccucccag

SEQ ID NO: 1365288 - RNA, 12 nt, Human
auaacuccuccc

SEQ ID NO: 1365289 - RNA, 23 nt, Human
uuaccaggcaccaaaagaaguaa

SEQ ID NO: 1365290 - RNA, 21 nt, Human
uuaccaggcaccaaaagaagu

SEQ ID NO: 1365291 - RNA, 22 nt, Human
uuacaguucugugguuucaugu

SEQ ID NO: 1365292 - RNA, 14 nt, Human
uuacaguucugugg

SEQ ID NO: 1365293 - RNA, 13 nt, Human
uuacaguucugug

SEQ ID NO: 1365294 - RNA, 12 nt, Human
uuacaguucugu

SEQ ID NO: 1365295 - RNA, 11 nt, Human
uuacaguucug

SEQ ID NO: 1365296 - RNA, 12 nt, Human
uuacaguguuua

SEQ ID NO: 1365297 - RNA, 14 nt, Human
uuacagugcagugc

SEQ ID NO: 1365298 - RNA, 17 nt, Human
uuacaguaggagcccag

SEQ ID NO: 1365299 - RNA, 17 nt, Human
uuacaguggggaaugaa

SEQ ID NO: 1365300 - RNA, 19 nt, Human
auaaaucugacccagugcc

SEQ ID NO: 1365301 - RNA, 18 nt, Human
auaaaucugacccagugc

SEQ ID NO: 1365302 - RNA, 16 nt, Human
auaaaucugacccagu

SEQ ID NO: 1365303 - RNA, 15 nt, Human
auaaaucugacccag

SEQ ID NO: 1365304 - RNA, 21 nt, Human
uuacaaaugaaaaauuccacu

SEQ ID NO: 1365305 - RNA, 22 nt, Human
uuacaaaucagaagucaucuug

SEQ ID NO: 1365306 - RNA, 17 nt, Human
uuacaaaucagaaguca

SEQ ID NO: 1365307 - RNA, 16 nt, Human
uuacaaaucagaaguc

SEQ ID NO: 1365308 - RNA, 13 nt, Human
uuacaaacugaag

SEQ ID NO: 1365309 - RNA, 18 nt, Human
uuacaaagcccuuuuaua

SEQ ID NO: 1365310 - RNA, 16 nt, Human
uuacaaacugaagagu

SEQ ID NO: 1365311 - RNA, 15 nt, Human
uuaauuuuugauacu

SEQ ID NO: 1365312 - RNA, 13 nt, Human
uuaauuuuugaua

SEQ ID NO: 1365313 - RNA, 12 nt, Human
uuaauuuuugau

SEQ ID NO: 1365314 - RNA, 13 nt, Human
uuaauuuuuccua

SEQ ID NO: 1365315 - RNA, 18 nt, Human
uuaauuuuuccaacuacu

SEQ ID NO: 1365316 - RNA, 13 nt, Human
auaaauugcucaa

SEQ ID NO: 1365317 - RNA, 21 nt, Human
auaaauugcacaccuuggaau

SEQ ID NO: 1365318 - RNA, 19 nt, Human
auaaauugauuuuuauaaa

SEQ ID NO: 1365319 - RNA, 18 nt, Human
auaaaugauucuuaguga

SEQ ID NO: 1365320 - RNA, 16 nt, Human
auaaaugauucuuagu

SEQ ID NO: 1365321 - RNA, 13 nt, Human
auaaaugcaaaua

SEQ ID NO: 1365322 - RNA, 14 nt, Human
auaaaugcaaauaa

SEQ ID NO: 1365323 - RNA, 12 nt, Human
auaaaugcaaau

SEQ ID NO: 1365324 - RNA, 14 nt, Human
uuauaaaaaauggu

SEQ ID NO: 1365325 - RNA, 15 nt, Human
uuauaaaaauaaaaa

SEQ ID NO: 1365326 - RNA, 19 nt, Human
uuaguacuccccuccuuga

SEQ ID NO: 1365327 - RNA, 12 nt, Human
uuauaaaagugu

SEQ ID NO: 1365328 - RNA, 16 nt, Human
uuauaaaaguguucau

SEQ ID NO: 1365329 - RNA, 13 nt, Human
uuauaaacuuuac

SEQ ID NO: 1365330 - RNA, 17 nt, Human
uuauaaaaaaugguuca

SEQ ID NO: 1365331 - RNA, 19 nt, Human
uuauaaaaagguguuuuga

SEQ ID NO: 1365332 - RNA, 18 nt, Human
uuauaaaaaaugguucag

SEQ ID NO: 1365333 - RNA, 15 nt, Human
uuauaaaaaaugguu

SEQ ID NO: 1365334 - RNA, 21 nt, Human
uuauaaaaauaaaaaacacug

SEQ ID NO: 1365335 - RNA, 22 nt, Human
uuauaaaaauaaaaaacacugg

SEQ ID NO: 1365336 - RNA, 18 nt, Human
uuagguucuaaaguucua

SEQ ID NO: 1365337 - RNA, 16 nt, Human
uuagguucuaaaguuc

SEQ ID NO: 1365338 - RNA, 14 nt, Human
uuagguucuaaagu

SEQ ID NO: 1365339 - RNA, 13 nt, Human
uuagguucuaaag

SEQ ID NO: 1365340 - RNA, 12 nt, Human
uuagguucuaaa

SEQ ID NO: 1365341 - RNA, 14 nt, Human
uuagguuaggacuu

SEQ ID NO: 1365342 - RNA, 23 nt, Human
uuagguaagaaguuuuaaaaagc

SEQ ID NO: 1365343 - RNA, 17 nt, Human
uuagguaauuuuuuuca

SEQ ID NO: 1365344 - RNA, 22 nt, Human
uuagguucuaaaguucuaagau

SEQ ID NO: 1365345 - RNA, 20 nt, Human
uuagguucuaaaguucuaag

SEQ ID NO: 1365346 - RNA, 19 nt, Human
uuagguucuaaaguucuaa

SEQ ID NO: 1365347 - RNA, 13 nt, Human
uuaguaaucauau

SEQ ID NO: 1365348 - RNA, 14 nt, Human
uuaguaaucauauu

SEQ ID NO: 1365349 - RNA, 15 nt, Human
uuagauuaagaaaua

SEQ ID NO: 1365350 - RNA, 19 nt, Human
uuagauuaagaaauagaca

SEQ ID NO: 1365351 - RNA, 21 nt, Human
uuagauguucucuaucauuua

SEQ ID NO: 1365352 - RNA, 22 nt, Human
uuagauguucucuaucauuuaa

SEQ ID NO: 1365353 - RNA, 23 nt, Human
uuagauguucucuaucauuuaau

SEQ ID NO: 1365354 - RNA, 17 nt, Human
uuagggcaccagggguu

SEQ ID NO: 1365355 - RNA, 16 nt, Human
uuaggguuaugauuaa

SEQ ID NO: 1365356 - RNA, 14 nt, Human
uuaggguuaugauu

SEQ ID NO: 1365357 - RNA, 15 nt, Human
auaauauauuuucug

SEQ ID NO: 1365358 - RNA, 17 nt, Human
auaaucuucugccuucu

SEQ ID NO: 1365359 - RNA, 15 nt, Human
auaaucuucugccuu

SEQ ID NO: 1365360 - RNA, 14 nt, Human
auaaucuucugccu

SEQ ID NO: 1365361 - RNA, 17 nt, Human
auaaucuuauaauuguu

SEQ ID NO: 1365362 - RNA, 13 nt, Human
auaauauauuuuc

SEQ ID NO: 1365363 - RNA, 13 nt, Human
auaauauacuugu

SEQ ID NO: 1365364 - RNA, 14 nt, Human
auaauauacuugug

SEQ ID NO: 1365365 - RNA, 20 nt, Human
auaauauacuuguggacuaa

SEQ ID NO: 1365366 - RNA, 17 nt, Human
auaagcaucauuauuua

SEQ ID NO: 1365367 - RNA, 19 nt, Human
auaagcaucauuauuuaug

SEQ ID NO: 1365368 - RNA, 15 nt, Human
auaagcaucauuauu

SEQ ID NO: 1365369 - RNA, 14 nt, Human
auaagcaucauuau

SEQ ID NO: 1365370 - RNA, 22 nt, Human
auaagcagguggaucuauuuca

SEQ ID NO: 1365371 - RNA, 17 nt, Human
auaagcagguggaucua

SEQ ID NO: 1365372 - RNA, 12 nt, Human
auaagauucuaa

SEQ ID NO: 1365373 - RNA, 11 nt, Human
auaagauucua

SEQ ID NO: 1365374 - RNA, 20 nt, Human
auaaucuucugccuucucau

SEQ ID NO: 1365375 - RNA, 21 nt, Human
auaaucuuucacaggggacag

SEQ ID NO: 1365376 - RNA, 14 nt, Human
auaaucuuucacag

SEQ ID NO: 1365377 - RNA, 23 nt, Human
auaauucacauuguauucagagu

SEQ ID NO: 1365378 - RNA, 22 nt, Human
auaauucacuguacuaucaggu

SEQ ID NO: 1365379 - RNA, 17 nt, Human
auaauuuaguuucauau

SEQ ID NO: 1365380 - RNA, 20 nt, Human
auaauuuaguuucauauaaa

SEQ ID NO: 1365381 - RNA, 14 nt, Human
auaauuuagauggu

SEQ ID NO: 1365382 - RNA, 15 nt, Human
auaauuuuaaacaaa

SEQ ID NO: 1365383 - RNA, 14 nt, Human
auaauuucuaaugu

SEQ ID NO: 1365384 - RNA, 12 nt, Human
auaauuucuaau

SEQ ID NO: 1365385 - RNA, 12 nt, Human
auaauuuuaaau

SEQ ID NO: 1365386 - RNA, 13 nt, Human
auaauuuuaaaug

SEQ ID NO: 1365387 - RNA, 22 nt, Human
uuagauguucuaagucuuucca

SEQ ID NO: 1365388 - RNA, 15 nt, Human
uuagauguucucuau

SEQ ID NO: 1365389 - RNA, 19 nt, Human
uuagauguucucuaucauu

SEQ ID NO: 1365390 - RNA, 20 nt, Human
uuagauguucucuaucauuu

SEQ ID NO: 1365391 - RNA, 20 nt, Human
uuagauguucuaagucuuuc

SEQ ID NO: 1365392 - RNA, 13 nt, Human
uuagauguucuaa

SEQ ID NO: 1365393 - RNA, 22 nt, Human
uuagauguuccaguaaucuaau

SEQ ID NO: 1365394 - RNA, 21 nt, Human
uuagauguuccaguaaucuaa

SEQ ID NO: 1365395 - RNA, 14 nt, Human
auaauuuuaaauuc

SEQ ID NO: 1365396 - RNA, 14 nt, Human
auaauuuuaaaugu

SEQ ID NO: 1365397 - RNA, 20 nt, Human
aucuuugaaauuauguaaau

SEQ ID NO: 1365398 - RNA, 19 nt, Human
aucuuugaaauuauguaaa

SEQ ID NO: 1365399 - RNA, 17 nt, Human
aucuuugaaauuaugua

SEQ ID NO: 1365400 - RNA, 16 nt, Human
aucuuugaaauuaugu

SEQ ID NO: 1365401 - RNA, 22 nt, Human
aucuuugaaagguuagagaaua

SEQ ID NO: 1365402 - RNA, 21 nt, Human
aucuuugaaagguuagagaau

SEQ ID NO: 1365403 - RNA, 15 nt, Human
aucuuucuuucuuag

SEQ ID NO: 1365404 - RNA, 17 nt, Human
aucuuucuuucuuagaa

SEQ ID NO: 1365405 - RNA, 20 nt, Human
aucuuucuuucuuagaaauu

SEQ ID NO: 1365406 - RNA, 21 nt, Human
aucuuucuuucuuagaaauuu

SEQ ID NO: 1365407 - RNA, 21 nt, Human
uuggcucgaaucucugugccu

SEQ ID NO: 1365408 - RNA, 20 nt, Human
uuggcucgaaucucugugcc

SEQ ID NO: 1365409 - RNA, 17 nt, Human
uuggcucgaaucucugu

SEQ ID NO: 1365410 - RNA, 18 nt, Human
uuggcucacacucgacau

SEQ ID NO: 1365411 - RNA, 23 nt, Human
aucuuuugauaugcauauuuguu

SEQ ID NO: 1365412 - RNA, 14 nt, Human
aucuuuucauacau

SEQ ID NO: 1365413 - RNA, 17 nt, Human
uuggcuauuuaaaacuu

SEQ ID NO: 1365414 - RNA, 16 nt, Human
uuggcuauuuaaaacu

SEQ ID NO: 1365415 - RNA, 17 nt, Human
uuggccugaucagacca

SEQ ID NO: 1365416 - RNA, 16 nt, Human
uuggccucucucuagg

SEQ ID NO: 1365417 - RNA, 21 nt, Human
uuggagucacucuuaugcugu

SEQ ID NO: 1365418 - RNA, 23 nt, Human
uuggaguccccucaccuccucua

SEQ ID NO: 1365419 - RNA, 13 nt, Human
uuggagucacucu

SEQ ID NO: 1365420 - RNA, 18 nt, Human
uuggagaguuuccugaaa

SEQ ID NO: 1365421 - RNA, 16 nt, Human
uuggagaguuuccuga

SEQ ID NO: 1365422 - RNA, 15 nt, Human
uuggagaguuuccug

SEQ ID NO: 1365423 - RNA, 22 nt, Human
uuggagacugucuggccccccu

SEQ ID NO: 1365424 - RNA, 16 nt, Human
uuggugcacagcacaa

SEQ ID NO: 1365425 - RNA, 22 nt, Human
uuggugcacagcacaaauuagu

SEQ ID NO: 1365426 - RNA, 20 nt, Human
uuggggaguuaagaccuggc

SEQ ID NO: 1365427 - RNA, 19 nt, Human
uuggggaguuaagaccugg

SEQ ID NO: 1365428 - RNA, 17 nt, Human
uuggggaguuaagaccu

SEQ ID NO: 1365429 - RNA, 14 nt, Human
uuggugagaaccug

SEQ ID NO: 1365430 - RNA, 21 nt, Human
uuggggaguuaagaccuggca

SEQ ID NO: 1365431 - RNA, 14 nt, Human
uuggggauauuuuu

SEQ ID NO: 1365432 - RNA, 20 nt, Human
uuggggacacauguauuugg

SEQ ID NO: 1365433 - RNA, 14 nt, Human
uuggggacacaugu

SEQ ID NO: 1365434 - RNA, 18 nt, Human
uuggggaagggccugccc

SEQ ID NO: 1365435 - RNA, 23 nt, Human
uuggggaagagagccugcaggau

SEQ ID NO: 1365436 - RNA, 22 nt, Human
uuggggaagagagccugcagga

SEQ ID NO: 1365437 - RNA, 11 nt, Human
uuggggaagag

SEQ ID NO: 1365438 - RNA, 17 nt, Human
augaauuacauuuguau

SEQ ID NO: 1365439 - RNA, 16 nt, Human
augaauuacauuugua

SEQ ID NO: 1365440 - RNA, 21 nt, Human
augaauauuuaguguucauaa

SEQ ID NO: 1365441 - RNA, 15 nt, Human
augaauguaaauuug

SEQ ID NO: 1365442 - RNA, 13 nt, Human
augaauguaaauu

SEQ ID NO: 1365443 - RNA, 12 nt, Human
augaauguaaau

SEQ ID NO: 1365444 - RNA, 21 nt, Human
augaauguaaauuuguacuau

SEQ ID NO: 1365445 - RNA, 19 nt, Human
augaauguaaauuuguacu

SEQ ID NO: 1365446 - RNA, 16 nt, Human
augaauguaaauuugu

SEQ ID NO: 1365447 - RNA, 15 nt, Human
augaauuacauuugu

SEQ ID NO: 1365448 - RNA, 16 nt, Human
aucuuuuguauuaaga

SEQ ID NO: 1365449 - RNA, 13 nt, Human
aucuuuuguauua

SEQ ID NO: 1365450 - RNA, 13 nt, Human
augaacuugagga

SEQ ID NO: 1365451 - RNA, 15 nt, Human
augaacuugaggaca

SEQ ID NO: 1365452 - RNA, 16 nt, Human
augaauauuuaguguu

SEQ ID NO: 1365453 - RNA, 18 nt, Human
augaacuuguaaaggaau

SEQ ID NO: 1365454 - RNA, 16 nt, Human
augaacuugaggacac

SEQ ID NO: 1365455 - RNA, 17 nt, Human
augaacuugaggacaca

SEQ ID NO: 1365456 - RNA, 18 nt, Human
augaacuugaggacacau

SEQ ID NO: 1365457 - RNA, 19 nt, Human
augaacuugaggacacaug

SEQ ID NO: 1365458 - RNA, 20 nt, Human
augaacuugaggacacaugu

SEQ ID NO: 1365459 - RNA, 21 nt, Human
augaacuugaggacacauguc

SEQ ID NO: 1365460 - RNA, 22 nt, Human
augaacuugaggacacaugucc

SEQ ID NO: 1365461 - RNA, 14 nt, Human
aucuguccucagcc

SEQ ID NO: 1365462 - RNA, 18 nt, Human
aucugucccccuuuagau

SEQ ID NO: 1365463 - RNA, 15 nt, Human
aucugucccccuuua

SEQ ID NO: 1365464 - RNA, 22 nt, Human
aucugucugccaaccuaaaacu

SEQ ID NO: 1365465 - RNA, 23 nt, Human
aucugucugccaaccuaaaacuc

SEQ ID NO: 1365466 - RNA, 19 nt, Human
aucugucugccaaccuaaa

SEQ ID NO: 1365467 - RNA, 21 nt, Human
aucuguccucagccuugccag

SEQ ID NO: 1365468 - RNA, 18 nt, Human
aucuguccucagccuugc

SEQ ID NO: 1365469 - RNA, 17 nt, Human
aucuguccucagccuug

SEQ ID NO: 1365470 - RNA, 16 nt, Human
aucuguccucagccuu

SEQ ID NO: 1365471 - RNA, 15 nt, Human
aucuguccucagccu

SEQ ID NO: 1365472 - RNA, 19 nt, Human
aucugucuguggcaaaagu

SEQ ID NO: 1365473 - RNA, 15 nt, Human
aucugucuguggcaa

SEQ ID NO: 1365474 - RNA, 16 nt, Human
aucugucugguggccc

SEQ ID NO: 1365475 - RNA, 14 nt, Human
aucugucugguggc

SEQ ID NO: 1365476 - RNA, 18 nt, Human
aucuguauacccucuguu

SEQ ID NO: 1365477 - RNA, 12 nt, Human
aucugccucccu

SEQ ID NO: 1365478 - RNA, 16 nt, Human
aucugccuuuauugug

SEQ ID NO: 1365479 - RNA, 16 nt, Human
aucugcgugacaauaa

SEQ ID NO: 1365480 - RNA, 19 nt, Human
aucugccuuuauuguguuu

SEQ ID NO: 1365481 - RNA, 21 nt, Human
aucugccuuuauuguguuugu

SEQ ID NO: 1365482 - RNA, 22 nt, Human
aucugccuuuauuguguuuguc

SEQ ID NO: 1365483 - RNA, 23 nt, Human
aucugcgugacaauaaaacauua

SEQ ID NO: 1365484 - RNA, 22 nt, Human
aucugcgugacaauaaaacauu

SEQ ID NO: 1365485 - RNA, 21 nt, Human
aucugcgugacaauaaaacau

SEQ ID NO: 1365486 - RNA, 17 nt, Human
aucugcgugacaauaaa

SEQ ID NO: 1365487 - RNA, 18 nt, Human
aucugcuaccaaaacagu

SEQ ID NO: 1365488 - RNA, 15 nt, Human
aucugcgugugugca

SEQ ID NO: 1365489 - RNA, 23 nt, Human
aucugcccaccucagccucccaa

SEQ ID NO: 1365490 - RNA, 15 nt, Human
aucugcccaccucag

SEQ ID NO: 1365491 - RNA, 16 nt, Human
aucugccaagggccga

SEQ ID NO: 1365492 - RNA, 15 nt, Human
aucugccacaaaaac

SEQ ID NO: 1365493 - RNA, 23 nt, Human
uugccaaaaagugaaauaaugug

SEQ ID NO: 1365494 - RNA, 19 nt, Human
uugccaaaaagugaaauaa

SEQ ID NO: 1365495 - RNA, 18 nt, Human
uugccaaaaagugaaaua

SEQ ID NO: 1365496 - RNA, 18 nt, Human
uugcauuuguuuuguuua

SEQ ID NO: 1365497 - RNA, 22 nt, Human
uugcauuuguuuuguuuacaga

SEQ ID NO: 1365498 - RNA, 20 nt, Human
uugcauuuguuuauguaauu

SEQ ID NO: 1365499 - RNA, 14 nt, Human
uugcauuuguuuau

SEQ ID NO: 1365500 - RNA, 22 nt, Human
uugcauuuaaaacagacacugg

SEQ ID NO: 1365501 - RNA, 15 nt, Human
uugcauuuauaugua

SEQ ID NO: 1365502 - RNA, 20 nt, Human
uugcauuuauauguaccgua

SEQ ID NO: 1365503 - RNA, 19 nt, Human
uugcuauucugucccuagg

SEQ ID NO: 1365504 - RNA, 17 nt, Human
uugcuauucugucccua

SEQ ID NO: 1365505 - RNA, 16 nt, Human
uugcuauucugucccu

SEQ ID NO: 1365506 - RNA, 15 nt, Human
uugcuauucuguccc

SEQ ID NO: 1365507 - RNA, 14 nt, Human
uugcuauucugucc

SEQ ID NO: 1365508 - RNA, 13 nt, Human
uugcuauucuguc

SEQ ID NO: 1365509 - RNA, 12 nt, Human
uugcuauucugu

SEQ ID NO: 1365510 - RNA, 19 nt, Human
aucuugucauguguauaaa

SEQ ID NO: 1365511 - RNA, 23 nt, Human
aucuugucucaaugcucauaacg

SEQ ID NO: 1365512 - RNA, 17 nt, Human
aucuuguccccaacacc

SEQ ID NO: 1365513 - RNA, 13 nt, Human
aucuugucucaau

SEQ ID NO: 1365514 - RNA, 14 nt, Human
aucuuguccccaac

SEQ ID NO: 1365515 - RNA, 17 nt, Human
aucuugucauguguaua

SEQ ID NO: 1365516 - RNA, 16 nt, Human
aucuugucauguguau

SEQ ID NO: 1365517 - RNA, 14 nt, Human
aucuugucucaaug

SEQ ID NO: 1365518 - RNA, 15 nt, Human
aucuugucucaaugc

SEQ ID NO: 1365519 - RNA, 16 nt, Human
aucuugucucaaugcu

SEQ ID NO: 1365520 - RNA, 20 nt, Human
aucuugucucaaugcucaua

SEQ ID NO: 1365521 - RNA, 15 nt, Human
aucuugucaugugua

SEQ ID NO: 1365522 - RNA, 14 nt, Human
aucuugucaugugu

SEQ ID NO: 1365523 - RNA, 12 nt, Human
aucuugucaugu

SEQ ID NO: 1365524 - RNA, 11 nt, Human
aucuugucaug

SEQ ID NO: 1365525 - RNA, 20 nt, Human
aucuugguuugccuuccaga

SEQ ID NO: 1365526 - RNA, 17 nt, Human
aucuugguuugccuucc

SEQ ID NO: 1365527 - RNA, 14 nt, Human
aucuugguuugccu

SEQ ID NO: 1365528 - RNA, 20 nt, Human
uugcuucuuucuagaaagag

SEQ ID NO: 1365529 - RNA, 17 nt, Human
uugcuucuuucuagaaa

SEQ ID NO: 1365530 - RNA, 12 nt, Human
uugcuucuuucu

SEQ ID NO: 1365531 - RNA, 19 nt, Human
uugcucacccagugcccuc

SEQ ID NO: 1365532 - RNA, 12 nt, Human
uugcucacccag

SEQ ID NO: 1365533 - RNA, 13 nt, Human
uugcucacccagu

SEQ ID NO: 1365534 - RNA, 11 nt, Human
uugcuccuccu

SEQ ID NO: 1365535 - RNA, 19 nt, Human
aucuuaguguaugauuacu

SEQ ID NO: 1365536 - RNA, 16 nt, Human
aucuuaguguaugauu

SEQ ID NO: 1365537 - RNA, 15 nt, Human
aucuuaguguaugau

SEQ ID NO: 1365538 - RNA, 14 nt, Human
aucuuaguguauga

SEQ ID NO: 1365539 - RNA, 13 nt, Human
aucuuaguguaug

SEQ ID NO: 1365540 - RNA, 19 nt, Human
aucuguuuugaaggcaaaa

SEQ ID NO: 1365541 - RNA, 18 nt, Human
aucuguuuugaaggcaaa

SEQ ID NO: 1365542 - RNA, 17 nt, Human
aucuguuuugaaggcaa

SEQ ID NO: 1365543 - RNA, 22 nt, Human
aucugucuguggcaaaaguuua

SEQ ID NO: 1365544 - RNA, 21 nt, Human
aucuugguuugccuuccagaa

SEQ ID NO: 1365545 - RNA, 21 nt, Human
aucuugguugaugccaaaaaa

SEQ ID NO: 1365546 - RNA, 20 nt, Human
aucuugguugaugccaaaaa

SEQ ID NO: 1365547 - RNA, 23 nt, Human
aucuugcuaccaguauuuagaag

SEQ ID NO: 1365548 - RNA, 19 nt, Human
aucuugcuaccaguauuua

SEQ ID NO: 1365549 - RNA, 16 nt, Human
aucuugcuaccaguau

SEQ ID NO: 1365550 - RNA, 14 nt, Human
aucuugcuaccagu

SEQ ID NO: 1365551 - RNA, 19 nt, Human
aucuugcccgcucaggcug

SEQ ID NO: 1365552 - RNA, 18 nt, Human
aucuugcauuaugcaauu

SEQ ID NO: 1365553 - RNA, 14 nt, Human
aucuugcauguaac

SEQ ID NO: 1365554 - RNA, 13 nt, Human
aucuugcauguaa

SEQ ID NO: 1365555 - RNA, 24 nt, Human
aucuugcaccccaaagcuuuccug

SEQ ID NO: 1365556 - RNA, 17 nt, Human
aucuugaugucuuuguu

SEQ ID NO: 1365557 - RNA, 16 nt, Human
aucuuauaauuguucu

SEQ ID NO: 1365558 - RNA, 14 nt, Human
aucuuauaauuguu

SEQ ID NO: 1365559 - RNA, 14 nt, Human
aucuuauaauuuaa

SEQ ID NO: 1365560 - RNA, 18 nt, Human
aucguuuucuuaaagugc

SEQ ID NO: 1365561 - RNA, 17 nt, Human
aucguuuucuuaaagug

SEQ ID NO: 1365562 - RNA, 14 nt, Human
aucguuuucuuaaa

SEQ ID NO: 1365563 - RNA, 14 nt, Human
aucguugcccccau

SEQ ID NO: 1365564 - RNA, 18 nt, Human
aucguucucucuuugcau

SEQ ID NO: 1365565 - RNA, 19 nt, Human
aucuaaaaauagacuuaaa

SEQ ID NO: 1365566 - RNA, 13 nt, Human
aucuaaauggaac

SEQ ID NO: 1365567 - RNA, 17 nt, Human
aucuaaauggaaccacu

SEQ ID NO: 1365568 - RNA, 18 nt, Human
aucuaaauggaaccacuc

SEQ ID NO: 1365569 - RNA, 19 nt, Human
aucuaaauggaaccacucu

SEQ ID NO: 1365570 - RNA, 20 nt, Human
auccucuguaaacuuuuugu

SEQ ID NO: 1365571 - RNA, 13 nt, Human
auccucuggcuug

SEQ ID NO: 1365572 - RNA, 11 nt, Human
auccuccugca

SEQ ID NO: 1365573 - RNA, 14 nt, Human
auccuccucccacc

SEQ ID NO: 1365574 - RNA, 17 nt, Human
auccucuggagccagcc

SEQ ID NO: 1365575 - RNA, 20 nt, Human
auccucucuuccucuucccc

SEQ ID NO: 1365576 - RNA, 18 nt, Human
auccucugagugugacca

SEQ ID NO: 1365577 - RNA, 17 nt, Human
auccucucuuccucuuc

SEQ ID NO: 1365578 - RNA, 16 nt, Human
auccucucuuccucuu

SEQ ID NO: 1365579 - RNA, 15 nt, Human
auccucucuuccucu

SEQ ID NO: 1365580 - RNA, 13 nt, Human
auccucucuuccu

SEQ ID NO: 1365581 - RNA, 21 nt, Human
auccucuccacagcugccucu

SEQ ID NO: 1365582 - RNA, 15 nt, Human
uugaauccucucucu

SEQ ID NO: 1365583 - RNA, 15 nt, Human
uugaaucacaugaau

SEQ ID NO: 1365584 - RNA, 23 nt, Human
uugaaucaauaauauauuuucug

SEQ ID NO: 1365585 - RNA, 17 nt, Human
uugaauaaaugucacuu

SEQ ID NO: 1365586 - RNA, 15 nt, Human
uugaauaaggaaaug

SEQ ID NO: 1365587 - RNA, 14 nt, Human
uugaauaaauguca

SEQ ID NO: 1365588 - RNA, 13 nt, Human
uugaauaaauguc

SEQ ID NO: 1365589 - RNA, 10 nt, Human
uugaaucaau

SEQ ID NO: 1365590 - RNA, 23 nt, Human
uugaauauuauuccucaaaaaau

SEQ ID NO: 1365591 - RNA, 18 nt, Human
uugaauacuuugaaugug

SEQ ID NO: 1365592 - RNA, 17 nt, Human
uugaauacuuugaaugu

SEQ ID NO: 1365593 - RNA, 15 nt, Human
uugaauacuuugaau

SEQ ID NO: 1365594 - RNA, 22 nt, Human
uugaaucaauaauauauuuucu

SEQ ID NO: 1365595 - RNA, 14 nt, Human
uugaaucaauaaua

SEQ ID NO: 1365596 - RNA, 17 nt, Human
uugaaggcaaaauugca

SEQ ID NO: 1365597 - RNA, 15 nt, Human
uugaaggcaaaauug

SEQ ID NO: 1365598 - RNA, 12 nt, Human
uugaaggcaaaa

SEQ ID NO: 1365599 - RNA, 15 nt, Human
uugaagccacugccu

SEQ ID NO: 1365600 - RNA, 12 nt, Human
uugaaggcuuaa

SEQ ID NO: 1365601 - RNA, 11 nt, Human
uugaaggcuua

SEQ ID NO: 1365602 - RNA, 17 nt, Human
uugaagggaaauuucag

SEQ ID NO: 1365603 - RNA, 14 nt, Human
aucuacacacggug

SEQ ID NO: 1365604 - RNA, 23 nt, Human
aucuaauauggccacaguagucu

SEQ ID NO: 1365605 - RNA, 16 nt, Human
aucuaauauggccaca

SEQ ID NO: 1365606 - RNA, 15 nt, Human
uugauaccccccucu

SEQ ID NO: 1365607 - RNA, 13 nt, Human
uugauaccccccu

SEQ ID NO: 1365608 - RNA, 15 nt, Human
uugauacuaagcauu

SEQ ID NO: 1365609 - RNA, 15 nt, Human
uugauacuacaguuu

SEQ ID NO: 1365610 - RNA, 19 nt, Human
uugaguuuucaguggggca

SEQ ID NO: 1365611 - RNA, 14 nt, Human
uugaguuuucagug

SEQ ID NO: 1365612 - RNA, 23 nt, Human
uugaguuugucgcucaugugugc

SEQ ID NO: 1365613 - RNA, 11 nt, Human
uugaguuuguc

SEQ ID NO: 1365614 - RNA, 20 nt, Human
uugaguugguuacuucauau

SEQ ID NO: 1365615 - RNA, 21 nt, Human
uugagauggagucuugcucug

SEQ ID NO: 1365616 - RNA, 23 nt, Human
uugagagaaauaugaagaacuga

SEQ ID NO: 1365617 - RNA, 16 nt, Human
uugagauguguucaca

SEQ ID NO: 1365618 - RNA, 14 nt, Human
uugagucugugcca

SEQ ID NO: 1365619 - RNA, 16 nt, Human
uugagucaaaaaaucu

SEQ ID NO: 1365620 - RNA, 22 nt, Human
uugacuuuccccaccagaugcu

SEQ ID NO: 1365621 - RNA, 23 nt, Human
uugacuuuccccaccagaugcug

SEQ ID NO: 1365622 - RNA, 19 nt, Human
uugacuuuccccaccagau

SEQ ID NO: 1365623 - RNA, 13 nt, Human
uugacuuucccca

SEQ ID NO: 1365624 - RNA, 18 nt, Human
uugacuuauaguacauga

SEQ ID NO: 1365625 - RNA, 19 nt, Human
uugcaagggaaaagucucu

SEQ ID NO: 1365626 - RNA, 13 nt, Human
uugcaagggaaaa

SEQ ID NO: 1365627 - RNA, 17 nt, Human
uugauuauucaguguca

SEQ ID NO: 1365628 - RNA, 15 nt, Human
uugauuauucagugu

SEQ ID NO: 1365629 - RNA, 21 nt, Human
uugauuauccauauugaguca

SEQ ID NO: 1365630 - RNA, 17 nt, Human
uugauuacagugcagug

SEQ ID NO: 1365631 - RNA, 14 nt, Human
uugauuacagugca

SEQ ID NO: 1365632 - RNA, 14 nt, Human
uugauuaaagauga

SEQ ID NO: 1365633 - RNA, 14 nt, Human
uugauuaaauucuu

SEQ ID NO: 1365634 - RNA, 13 nt, Human
uugauuaaagaug

SEQ ID NO: 1365635 - RNA, 13 nt, Human
aucugacccagug

SEQ ID NO: 1365636 - RNA, 12 nt, Human
aucugacccagu

SEQ ID NO: 1365637 - RNA, 13 nt, Human
uugauuaaauucu

SEQ ID NO: 1365638 - RNA, 23 nt, Human
uugauguuuuaaggaugcuugua

SEQ ID NO: 1365639 - RNA, 20 nt, Human
aucugaauuuuuaaacaagu

SEQ ID NO: 1365640 - RNA, 19 nt, Human
aucugaauuuuuaaacaag

SEQ ID NO: 1365641 - RNA, 18 nt, Human
aucugaauuuuuaaacaa

SEQ ID NO: 1365642 - RNA, 14 nt, Human
aucugaauuuuuaa

SEQ ID NO: 1365643 - RNA, 12 nt, Human
aucugaauuuuu

SEQ ID NO: 1365644 - RNA, 21 nt, Human
uugcauuuaaaacagacacug

SEQ ID NO: 1365645 - RNA, 20 nt, Human
uugcauuuaaaacagacacu

SEQ ID NO: 1365646 - RNA, 15 nt, Human
uugcauuuaaaacag

SEQ ID NO: 1365647 - RNA, 19 nt, Human
uugcauugacuuuccccac

SEQ ID NO: 1365648 - RNA, 13 nt, Human
uugcauugacuuu

SEQ ID NO: 1365649 - RNA, 21 nt, Human
uugcauugaccgcgacuaauu

SEQ ID NO: 1365650 - RNA, 23 nt, Human
uugcauugaacacaaacuguaaa

SEQ ID NO: 1365651 - RNA, 22 nt, Human
uugcauugaacacaaacuguaa

SEQ ID NO: 1365652 - RNA, 18 nt, Human
uugcauugaacacaaacu

SEQ ID NO: 1365653 - RNA, 15 nt, Human
uugcauugaacacaa

SEQ ID NO: 1365654 - RNA, 14 nt, Human
uugcauugaacaca

SEQ ID NO: 1365655 - RNA, 22 nt, Human
uugcaucacuuaacggaccaaa

SEQ ID NO: 1365656 - RNA, 23 nt, Human
uugcauaguaccaaucauuuuaa

SEQ ID NO: 1365657 - RNA, 22 nt, Human
uugcaagggaaaagucucuugu

SEQ ID NO: 1365658 - RNA, 14 nt, Human
aucucuucuuuuaa

SEQ ID NO: 1365659 - RNA, 23 nt, Human
aucuccaagcagcuuagaguugg

SEQ ID NO: 1365660 - RNA, 17 nt, Human
aucuccaagcagcuuag

SEQ ID NO: 1365661 - RNA, 15 nt, Human
aucuccaagcagcuu

SEQ ID NO: 1365662 - RNA, 23 nt, Human
aucuagaggcuuccuucauuucc

SEQ ID NO: 1365663 - RNA, 19 nt, Human
aucuagaggcuuccuucau

SEQ ID NO: 1365664 - RNA, 17 nt, Human
aucuagaggcuuccuuc

SEQ ID NO: 1365665 - RNA, 21 nt, Human
aucuagaacacaggcaaaauc

SEQ ID NO: 1365666 - RNA, 23 nt, Human
aucuacuucuguaauugugugga

SEQ ID NO: 1365667 - RNA, 20 nt, Human
aucuacuucuguaauugugu

SEQ ID NO: 1365668 - RNA, 19 nt, Human
aucuacuucuguaauugug

SEQ ID NO: 1365669 - RNA, 19 nt, Human
aucuacuuccaaacuaauu

SEQ ID NO: 1365670 - RNA, 15 nt, Human
aucuacuuccaaacu

SEQ ID NO: 1365671 - RNA, 13 nt, Human
aucuacuuccaaa

SEQ ID NO: 1365672 - RNA, 23 nt, Human
aucucaugccccuggcugggacg

SEQ ID NO: 1365673 - RNA, 21 nt, Human
aucucaugccccuggcuggga

SEQ ID NO: 1365674 - RNA, 18 nt, Human
aucucaguaugaauuauu

SEQ ID NO: 1365675 - RNA, 22 nt, Human
aucucaguaugaauuauucaau

SEQ ID NO: 1365676 - RNA, 20 nt, Human
aucucauuggacccuuccau

SEQ ID NO: 1365677 - RNA, 19 nt, Human
aucucauuggacccuucca

SEQ ID NO: 1365678 - RNA, 15 nt, Human
aucucauuggacccu

SEQ ID NO: 1365679 - RNA, 14 nt, Human
aucucauuggaccc

SEQ ID NO: 1365680 - RNA, 17 nt, Human
aucucauugcuuacaag

SEQ ID NO: 1365681 - RNA, 16 nt, Human
aucucauugcuuacaa

SEQ ID NO: 1365682 - RNA, 14 nt, Human
aucucauuuccaag

SEQ ID NO: 1365683 - RNA, 14 nt, Human
aucuccaaaauaaa

SEQ ID NO: 1365684 - RNA, 17 nt, Human
aucuccaaaauaaaacu

SEQ ID NO: 1365685 - RNA, 20 nt, Human
aucuccaaaauaaaacuuuu

SEQ ID NO: 1365686 - RNA, 21 nt, Human
aucuccaaaauaaaacuuuuu

SEQ ID NO: 1365687 - RNA, 19 nt, Human
uucugcccccugcagaacc

SEQ ID NO: 1365688 - RNA, 15 nt, Human
uucugcccugcccac

SEQ ID NO: 1365689 - RNA, 16 nt, Human
uucugcccccugcaga

SEQ ID NO: 1365690 - RNA, 13 nt, Human
uucugccaggaga

SEQ ID NO: 1365691 - RNA, 22 nt, Human
uucugaacucaaacugaggaau

SEQ ID NO: 1365692 - RNA, 18 nt, Human
uucugaacucaaacugag

SEQ ID NO: 1365693 - RNA, 17 nt, Human
uucugaacucaaacuga

SEQ ID NO: 1365694 - RNA, 16 nt, Human
uucugaacucaaacug

SEQ ID NO: 1365695 - RNA, 19 nt, Human
uucucuuguauaagauccu

SEQ ID NO: 1365696 - RNA, 22 nt, Human
uucugaacuaaagugcugcacu

SEQ ID NO: 1365697 - RNA, 22 nt, Human
uucucuugggaacugaacucac

SEQ ID NO: 1365698 - RNA, 17 nt, Human
uucucuugggaacugaa

SEQ ID NO: 1365699 - RNA, 21 nt, Human
uucugggagggcagcagggcu

SEQ ID NO: 1365700 - RNA, 14 nt, Human
uucugggagggcag

SEQ ID NO: 1365701 - RNA, 15 nt, Human
uucuggcuguuugag

SEQ ID NO: 1365702 - RNA, 14 nt, Human
uucugccuggagac

SEQ ID NO: 1365703 - RNA, 10 nt, Human
uucuccugga

SEQ ID NO: 1365704 - RNA, 22 nt, Human
uucuccugcugcucccucagac

SEQ ID NO: 1365705 - RNA, 21 nt, Human
uucuccugcugcucccucaga

SEQ ID NO: 1365706 - RNA, 20 nt, Human
uucuccugcugcucccucag

SEQ ID NO: 1365707 - RNA, 19 nt, Human
uucuccugcugcucccuca

SEQ ID NO: 1365708 - RNA, 16 nt, Human
uucuccugcugcuccc

SEQ ID NO: 1365709 - RNA, 23 nt, Human
aucaguaguucacauacaaauca

SEQ ID NO: 1365710 - RNA, 23 nt, Human
uucuccugcugcucccucagacu

SEQ ID NO: 1365711 - RNA, 21 nt, Human
uucuccuuguguuacuaaguu

SEQ ID NO: 1365712 - RNA, 16 nt, Human
aucaguaguucacaua

SEQ ID NO: 1365713 - RNA, 18 nt, Human
aucaguagccagcaucug

SEQ ID NO: 1365714 - RNA, 23 nt, Human
aucaguaagagguguuauuugga

SEQ ID NO: 1365715 - RNA, 17 nt, Human
aucaguaagagguguua

SEQ ID NO: 1365716 - RNA, 18 nt, Human
aucaguaaauaacuggaa

SEQ ID NO: 1365717 - RNA, 14 nt, Human
aucaguaaauaacu

SEQ ID NO: 1365718 - RNA, 14 nt, Human
aucagguuuuuccc

SEQ ID NO: 1365719 - RNA, 13 nt, Human
uucucuugccuca

SEQ ID NO: 1365720 - RNA, 20 nt, Human
uucucuuccuuuuaucagua

SEQ ID NO: 1365721 - RNA, 20 nt, Human
uucucuaguuugauuaaauu

SEQ ID NO: 1365722 - RNA, 12 nt, Human
uucucuaggaaa

SEQ ID NO: 1365723 - RNA, 15 nt, Human
uucucuaguuugauu

SEQ ID NO: 1365724 - RNA, 17 nt, Human
uucucuaguuugauuaa

SEQ ID NO: 1365725 - RNA, 21 nt, Human
uucuggggcaggcugggccau

SEQ ID NO: 1365726 - RNA, 20 nt, Human
uucuggggcaggcugggcca

SEQ ID NO: 1365727 - RNA, 19 nt, Human
uucuggggcaggcugggcc

SEQ ID NO: 1365728 - RNA, 18 nt, Human
uucuggggcaggcugggc

SEQ ID NO: 1365729 - RNA, 17 nt, Human
uucuggggcaggcuggg

SEQ ID NO: 1365730 - RNA, 16 nt, Human
uucugggcuucaucug

SEQ ID NO: 1365731 - RNA, 15 nt, Human
uucugggccugacca

SEQ ID NO: 1365732 - RNA, 22 nt, Human
aucauuuugcaaucccuuaaua

SEQ ID NO: 1365733 - RNA, 21 nt, Human
auccaagcaccaccaaacaca

SEQ ID NO: 1365734 - RNA, 15 nt, Human
aucccaaaguuguug

SEQ ID NO: 1365735 - RNA, 20 nt, Human
aucccaaaggacagccgccu

SEQ ID NO: 1365736 - RNA, 16 nt, Human
aucccaaaggacagcc

SEQ ID NO: 1365737 - RNA, 16 nt, Human
aucccagcccccugac

SEQ ID NO: 1365738 - RNA, 14 nt, Human
aucccagcccccug

SEQ ID NO: 1365739 - RNA, 22 nt, Human
aucccaaaguuguuguaaccug

SEQ ID NO: 1365740 - RNA, 20 nt, Human
aucccaaaguuguuguaacc

SEQ ID NO: 1365741 - RNA, 19 nt, Human
aucccagcccccugaccac

SEQ ID NO: 1365742 - RNA, 24 nt, Human
aucccagcccccugaccacucaga

SEQ ID NO: 1365743 - RNA, 13 nt, Human
aucccagcugccu

SEQ ID NO: 1365744 - RNA, 14 nt, Human
aucccagcugccua

SEQ ID NO: 1365745 - RNA, 16 nt, Human
auccacauuucuaaaa

SEQ ID NO: 1365746 - RNA, 15 nt, Human
auccacauuucuaaa

SEQ ID NO: 1365747 - RNA, 16 nt, Human
auccaguucaugagaa

SEQ ID NO: 1365748 - RNA, 21 nt, Human
auccagugauccuuacaaguu

SEQ ID NO: 1365749 - RNA, 16 nt, Human
auccagugauccuuac

SEQ ID NO: 1365750 - RNA, 18 nt, Human
auccaguuuugucaaugc

SEQ ID NO: 1365751 - RNA, 20 nt, Human
auccauauugagucaaaugg

SEQ ID NO: 1365752 - RNA, 18 nt, Human
auccauauugagucaaau

SEQ ID NO: 1365753 - RNA, 14 nt, Human
auccaucaucaugu

SEQ ID NO: 1365754 - RNA, 13 nt, Human
uucuucugaacuc

SEQ ID NO: 1365755 - RNA, 17 nt, Human
uucuuaacuucuugcuu

SEQ ID NO: 1365756 - RNA, 16 nt, Human
uucuuaacuucuugcu

SEQ ID NO: 1365757 - RNA, 13 nt, Human
uucuuaacuucuu

SEQ ID NO: 1365758 - RNA, 11 nt, Human
aucccucaucu

SEQ ID NO: 1365759 - RNA, 23 nt, Human
aucccaucgucucggccuucaca

SEQ ID NO: 1365760 - RNA, 21 nt, Human
aucccaucgucucggccuuca

SEQ ID NO: 1365761 - RNA, 20 nt, Human
uucuuuggaaaguacacucu

SEQ ID NO: 1365762 - RNA, 16 nt, Human
uucuuuggaaaguaca

SEQ ID NO: 1365763 - RNA, 18 nt, Human
uucuuugggaauauuuga

SEQ ID NO: 1365764 - RNA, 20 nt, Human
uucuuugggaauauuugaau

SEQ ID NO: 1365765 - RNA, 16 nt, Human
uucuucuugaggggaa

SEQ ID NO: 1365766 - RNA, 14 nt, Human
uucuucuucucguc

SEQ ID NO: 1365767 - RNA, 22 nt, Human
uucuucuuccaacguggcccag

SEQ ID NO: 1365768 - RNA, 23 nt, Human
uucuucugaacucaaacugagga

SEQ ID NO: 1365769 - RNA, 20 nt, Human
uucuucugaacucaaacuga

SEQ ID NO: 1365770 - RNA, 16 nt, Human
uucuuuuuuuagagaa

SEQ ID NO: 1365771 - RNA, 23 nt, Human
uucuuuuuuggccaucugcuccu

SEQ ID NO: 1365772 - RNA, 22 nt, Human
uucuuuuuugauauagaaguau

SEQ ID NO: 1365773 - RNA, 23 nt, Human
uucuuuuuguagcuggggcuuug

SEQ ID NO: 1365774 - RNA, 21 nt, Human
uucuuuuugggagagacuugu

SEQ ID NO: 1365775 - RNA, 19 nt, Human
uucuuuuugggagagacuu

SEQ ID NO: 1365776 - RNA, 23 nt, Human
uucuuuuuugauauagaaguaua

SEQ ID NO: 1365777 - RNA, 13 nt, Human
uucuuugggccag

SEQ ID NO: 1365778 - RNA, 22 nt, Human
uucuuugggaauauuugaaucu

SEQ ID NO: 1365779 - RNA, 15 nt, Human
uucuuuguaaugaaa

SEQ ID NO: 1365780 - RNA, 18 nt, Human
uucuuuuugggagagacu

SEQ ID NO: 1365781 - RNA, 22 nt, Human
uucuuugguuucccaagagcua

SEQ ID NO: 1365782 - RNA, 16 nt, Human
uucuuuguaaugaaaa

SEQ ID NO: 1365783 - RNA, 15 nt, Human
auccuagauccuaag

SEQ ID NO: 1365784 - RNA, 16 nt, Human
auccuacccccugugc

SEQ ID NO: 1365785 - RNA, 18 nt, Human
auccuaagcaucuaaguu

SEQ ID NO: 1365786 - RNA, 22 nt, Human
auccuaccacaaugcagugccu

SEQ ID NO: 1365787 - RNA, 21 nt, Human
auccuaccacaaugcagugcc

SEQ ID NO: 1365788 - RNA, 14 nt, Human
auccuacccccugu

SEQ ID NO: 1365789 - RNA, 11 nt, Human
auccuccuccc

SEQ ID NO: 1365790 - RNA, 11 nt, Human
auccuccucau

SEQ ID NO: 1365791 - RNA, 16 nt, Human
auccuagauccuaagg

SEQ ID NO: 1365792 - RNA, 21 nt, Human
auccgucuuuggccuccucca

SEQ ID NO: 1365793 - RNA, 22 nt, Human
auccggcaacaucaacccgagu

SEQ ID NO: 1365794 - RNA, 13 nt, Human
auccggaaagaag

SEQ ID NO: 1365795 - RNA, 14 nt, Human
auccgccaauauua

SEQ ID NO: 1365796 - RNA, 17 nt, Human
auccuaagcaucuaagu

SEQ ID NO: 1365797 - RNA, 14 nt, Human
auccuaaacaucau

SEQ ID NO: 1365798 - RNA, 17 nt, Human
auccgacugcuuuggac

SEQ ID NO: 1365799 - RNA, 20 nt, Human
uugaacguuuucuaauugcu

SEQ ID NO: 1365800 - RNA, 19 nt, Human
uugaacguuuucuaauugc

SEQ ID NO: 1365801 - RNA, 18 nt, Human
uugaacguuuucuaauug

SEQ ID NO: 1365802 - RNA, 17 nt, Human
uugaacguuuucuaauu

SEQ ID NO: 1365803 - RNA, 16 nt, Human
uugaacguuuucuaau

SEQ ID NO: 1365804 - RNA, 19 nt, Human
uugaaccuuugugcccuau

SEQ ID NO: 1365805 - RNA, 17 nt, Human
uugaaccuuugugcccu

SEQ ID NO: 1365806 - RNA, 19 nt, Human
uugaaccugaugaaaauaa

SEQ ID NO: 1365807 - RNA, 20 nt, Human
uugaaccugaugaaaauaaa

SEQ ID NO: 1365808 - RNA, 18 nt, Human
uugaaccugaugaaaaua

SEQ ID NO: 1365809 - RNA, 18 nt, Human
uugaaauugaaccuuugu

SEQ ID NO: 1365810 - RNA, 17 nt, Human
uugaaauuguauuacaa

SEQ ID NO: 1365811 - RNA, 20 nt, Human
uugaaauguaaggcugugua

SEQ ID NO: 1365812 - RNA, 17 nt, Human
uugaaauguaaggcugu

SEQ ID NO: 1365813 - RNA, 11 nt, Human
uugaaauguaa

SEQ ID NO: 1365814 - RNA, 22 nt, Human
uugaaagguuuuuuuucaguug

SEQ ID NO: 1365815 - RNA, 21 nt, Human
uugaaagguuuuuuuucaguu

SEQ ID NO: 1365816 - RNA, 21 nt, Human
uugaaagggguugugaagagg

SEQ ID NO: 1365817 - RNA, 20 nt, Human
uugaaauuaagaaggcaaaa

SEQ ID NO: 1365818 - RNA, 21 nt, Human
uugaaauguaaggcuguguaa

SEQ ID NO: 1365819 - RNA, 18 nt, Human
uugaaauuaaccucucac

SEQ ID NO: 1365820 - RNA, 17 nt, Human
uugaaauuaugugacau

SEQ ID NO: 1365821 - RNA, 20 nt, Human
uugaaauuaugugacauuuu

SEQ ID NO: 1365822 - RNA, 14 nt, Human
aucaacauuucuca

SEQ ID NO: 1365823 - RNA, 13 nt, Human
aucaagcccuuua

SEQ ID NO: 1365824 - RNA, 21 nt, Human
aucaaauuuguaggguuucua

SEQ ID NO: 1365825 - RNA, 16 nt, Human
aucaacaaaaauuguc

SEQ ID NO: 1365826 - RNA, 22 nt, Human
auauuuuuaucuuuauaugaag

SEQ ID NO: 1365827 - RNA, 20 nt, Human
auauuuuuaucuuuauauga

SEQ ID NO: 1365828 - RNA, 15 nt, Human
auauuuuuaucuuua

SEQ ID NO: 1365829 - RNA, 14 nt, Human
auauuuuuaucuuu

SEQ ID NO: 1365830 - RNA, 19 nt, Human
uuccugucuuauccuccac

SEQ ID NO: 1365831 - RNA, 21 nt, Human
uuccuguccucuuucagcucc

SEQ ID NO: 1365832 - RNA, 24 nt, Human
uuccuguccucuuucagcuccuga

SEQ ID NO: 1365833 - RNA, 20 nt, Human
uuccuguccucuuucagcuc

SEQ ID NO: 1365834 - RNA, 19 nt, Human
uuccuguccucuuucagcu

SEQ ID NO: 1365835 - RNA, 13 nt, Human
uuccuguggcucc

SEQ ID NO: 1365836 - RNA, 18 nt, Human
aucacugaguuuuccaug

SEQ ID NO: 1365837 - RNA, 17 nt, Human
aucacugaguuuuccau

SEQ ID NO: 1365838 - RNA, 16 nt, Human
aucacugaguuuucca

SEQ ID NO: 1365839 - RNA, 15 nt, Human
aucacugaguuuucc

SEQ ID NO: 1365840 - RNA, 18 nt, Human
aucacgcuuuuugaaaaa

SEQ ID NO: 1365841 - RNA, 18 nt, Human
aucacgcuuuccugaauc

SEQ ID NO: 1365842 - RNA, 14 nt, Human
aucacgcuuuccug

SEQ ID NO: 1365843 - RNA, 18 nt, Human
aucaaucuugcauguaac

SEQ ID NO: 1365844 - RNA, 17 nt, Human
aucaaucuugcauguaa

SEQ ID NO: 1365845 - RNA, 16 nt, Human
aucaaucuugcaugua

SEQ ID NO: 1365846 - RNA, 21 nt, Human
aucaaucuguaaaacuaagaa

SEQ ID NO: 1365847 - RNA, 22 nt, Human
aucaaucuuuaaaccaauugcu

SEQ ID NO: 1365848 - RNA, 22 nt, Human
aucaaggccuuauuggaaagca

SEQ ID NO: 1365849 - RNA, 18 nt, Human
aucaaggccuuauuggaa

SEQ ID NO: 1365850 - RNA, 16 nt, Human
aucaaggguacacugc

SEQ ID NO: 1365851 - RNA, 15 nt, Human
auagcaaagaauuga

SEQ ID NO: 1365852 - RNA, 14 nt, Human
auagcaaagaauug

SEQ ID NO: 1365853 - RNA, 22 nt, Human
auagcaaagcgacguuagucgu

SEQ ID NO: 1365854 - RNA, 13 nt, Human
auagcaaagaauu

SEQ ID NO: 1365855 - RNA, 19 nt, Human
auagcaaaagaagaaguuu

SEQ ID NO: 1365856 - RNA, 18 nt, Human
auagcaaaagaagaaguu

SEQ ID NO: 1365857 - RNA, 17 nt, Human
auagcaaaagaagaagu

SEQ ID NO: 1365858 - RNA, 16 nt, Human
auagcaaaagaagaag

SEQ ID NO: 1365859 - RNA, 15 nt, Human
auagcaaaagaagaa

SEQ ID NO: 1365860 - RNA, 21 nt, Human
uucccucaccuuggcaccaga

SEQ ID NO: 1365861 - RNA, 18 nt, Human
uuccgugacgucacugga

SEQ ID NO: 1365862 - RNA, 21 nt, Human
uuccgucaccacgacuggcca

SEQ ID NO: 1365863 - RNA, 18 nt, Human
uuccggccccuccccucc

SEQ ID NO: 1365864 - RNA, 21 nt, Human
uuccggccccuccccuccaaa

SEQ ID NO: 1365865 - RNA, 14 nt, Human
uuccguuaaaauac

SEQ ID NO: 1365866 - RNA, 16 nt, Human
uuccguuaaaauacca

SEQ ID NO: 1365867 - RNA, 17 nt, Human
uuccggccccuccccuc

SEQ ID NO: 1365868 - RNA, 13 nt, Human
uuccggccccucc

SEQ ID NO: 1365869 - RNA, 22 nt, Human
uuccggcauggacaauggaccg

SEQ ID NO: 1365870 - RNA, 22 nt, Human
uuccggauccuaagcaucuaag

SEQ ID NO: 1365871 - RNA, 19 nt, Human
uucccucccagaggagcca

SEQ ID NO: 1365872 - RNA, 21 nt, Human
uucccucacucgucuccccca

SEQ ID NO: 1365873 - RNA, 20 nt, Human
uucccucacucgucuccccc

SEQ ID NO: 1365874 - RNA, 19 nt, Human
uuccguagguuauuuucag

SEQ ID NO: 1365875 - RNA, 19 nt, Human
uuccugaagaaccaguccc

SEQ ID NO: 1365876 - RNA, 16 nt, Human
uuccugaagaaccagu

SEQ ID NO: 1365877 - RNA, 15 nt, Human
uuccugaagaaccag

SEQ ID NO: 1365878 - RNA, 15 nt, Human
uuccugaacaggaua

SEQ ID NO: 1365879 - RNA, 14 nt, Human
uuccugaacaggau

SEQ ID NO: 1365880 - RNA, 17 nt, Human
uuccguguccaccccca

SEQ ID NO: 1365881 - RNA, 15 nt, Human
uuccguguccacccc

SEQ ID NO: 1365882 - RNA, 20 nt, Human
uuccuaaauauauuuuaaga

SEQ ID NO: 1365883 - RNA, 24 nt, Human
uucuagaucagaugcuccaagauu

SEQ ID NO: 1365884 - RNA, 23 nt, Human
uucuaagguccgguguucuaaga

SEQ ID NO: 1365885 - RNA, 21 nt, Human
uucuaagguccgguguucuaa

SEQ ID NO: 1365886 - RNA, 20 nt, Human
uucuaagguccgguguucua

SEQ ID NO: 1365887 - RNA, 20 nt, Human
uucuaaggcucugagagucu

SEQ ID NO: 1365888 - RNA, 18 nt, Human
uucuaaggcucugagagu

SEQ ID NO: 1365889 - RNA, 17 nt, Human
uucuaaggcucugagag

SEQ ID NO: 1365890 - RNA, 16 nt, Human
uucuaaggcucugaga

SEQ ID NO: 1365891 - RNA, 13 nt, Human
uucuaaggcucug

SEQ ID NO: 1365892 - RNA, 12 nt, Human
uucuaaggcucu

SEQ ID NO: 1365893 - RNA, 22 nt, Human
uucuaaggccuaggauucuaaa

SEQ ID NO: 1365894 - RNA, 21 nt, Human
uucuaaggccuaggauucuaa

SEQ ID NO: 1365895 - RNA, 20 nt, Human
uucuaaggccuaggauucua

SEQ ID NO: 1365896 - RNA, 21 nt, Human
uucuaagacuuacucuaagau

SEQ ID NO: 1365897 - RNA, 20 nt, Human
uucuaagacuuacucuaaga

SEQ ID NO: 1365898 - RNA, 22 nt, Human
uucuaagacucaaauguucuaa

SEQ ID NO: 1365899 - RNA, 21 nt, Human
uucuaagacucaaauguucua

SEQ ID NO: 1365900 - RNA, 20 nt, Human
uucuaagacucaaauguucu

SEQ ID NO: 1365901 - RNA, 16 nt, Human
uucuaagacucaaaug

SEQ ID NO: 1365902 - RNA, 13 nt, Human
uucuaagacucaa

SEQ ID NO: 1365903 - RNA, 12 nt, Human
uucuaagacuca

SEQ ID NO: 1365904 - RNA, 22 nt, Human
uucuagaugauuaaauaagauu

SEQ ID NO: 1365905 - RNA, 12 nt, Human
uucuagaugauu

SEQ ID NO: 1365906 - RNA, 19 nt, Human
uucuagcaugaagacagag

SEQ ID NO: 1365907 - RNA, 16 nt, Human
uucuagcgcaguuuuu

SEQ ID NO: 1365908 - RNA, 22 nt, Human
uucgcuucuugccucugugcug

SEQ ID NO: 1365909 - RNA, 14 nt, Human
uucgcucuuugaga

SEQ ID NO: 1365910 - RNA, 20 nt, Human
uucggacaguuuauuuguug

SEQ ID NO: 1365911 - RNA, 19 nt, Human
uucggacaguuuauuuguu

SEQ ID NO: 1365912 - RNA, 16 nt, Human
aucacugcucacacug

SEQ ID NO: 1365913 - RNA, 17 nt, Human
uucggccccauguaucu

SEQ ID NO: 1365914 - RNA, 20 nt, Human
uucuaaaggcuaccuuugua

SEQ ID NO: 1365915 - RNA, 21 nt, Human
uucuaaaggcuaccuuuguau

SEQ ID NO: 1365916 - RNA, 21 nt, Human
uucuaaaugaauguuuacacu

SEQ ID NO: 1365917 - RNA, 18 nt, Human
uucuaaaugaauguuuac

SEQ ID NO: 1365918 - RNA, 15 nt, Human
uucuaaaugaauguu

SEQ ID NO: 1365919 - RNA, 12 nt, Human
uucuaaaugaau

SEQ ID NO: 1365920 - RNA, 16 nt, Human
uucuaaagguccacag

SEQ ID NO: 1365921 - RNA, 13 nt, Human
uucuaaaggucca

SEQ ID NO: 1365922 - RNA, 18 nt, Human
uucggccccauguaucuc

SEQ ID NO: 1365923 - RNA, 13 nt, Human
uucuaaaguaaaa

SEQ ID NO: 1365924 - RNA, 21 nt, Human
uucuaaaucuccaaaauaaaa

SEQ ID NO: 1365925 - RNA, 18 nt, Human
aucacuuguacaaaauaa

SEQ ID NO: 1365926 - RNA, 17 nt, Human
aucacuuguacaaaaua

SEQ ID NO: 1365927 - RNA, 16 nt, Human
aucacuuguacaaaau

SEQ ID NO: 1365928 - RNA, 14 nt, Human
aucacuuguacaaa

SEQ ID NO: 1365929 - RNA, 19 nt, Human
uucucagguguugccaaau

SEQ ID NO: 1365930 - RNA, 17 nt, Human
uucucagguguugccaa

SEQ ID NO: 1365931 - RNA, 16 nt, Human
uucucagguguugcca

SEQ ID NO: 1365932 - RNA, 19 nt, Human
aucagaauagccacauuug

SEQ ID NO: 1365933 - RNA, 19 nt, Human
aucagaagucaucuugcua

SEQ ID NO: 1365934 - RNA, 16 nt, Human
aucacuuucucaguuu

SEQ ID NO: 1365935 - RNA, 21 nt, Human
aucacuuguacaaaauaaaca

SEQ ID NO: 1365936 - RNA, 22 nt, Human
aucacuugucaauaaaauccau

SEQ ID NO: 1365937 - RNA, 15 nt, Human
uucucacuaaaucuu

SEQ ID NO: 1365938 - RNA, 15 nt, Human
uucucacuaauuugu

SEQ ID NO: 1365939 - RNA, 23 nt, Human
uucucaggacacaggccugugua

SEQ ID NO: 1365940 - RNA, 22 nt, Human
uucucaggacacaggccugugu

SEQ ID NO: 1365941 - RNA, 20 nt, Human
uucucaggacacaggccugu

SEQ ID NO: 1365942 - RNA, 19 nt, Human
uucucaggacacaggccug

SEQ ID NO: 1365943 - RNA, 18 nt, Human
uucucaggacacaggccu

SEQ ID NO: 1365944 - RNA, 16 nt, Human
uucucaggacacaggc

SEQ ID NO: 1365945 - RNA, 18 nt, Human
uucucacaggucccaaau

SEQ ID NO: 1365946 - RNA, 19 nt, Human
uucucacagugggagccag

SEQ ID NO: 1365947 - RNA, 21 nt, Human
uucucacagugggagccaggg

SEQ ID NO: 1365948 - RNA, 22 nt, Human
uucucacagugggagccagggc

SEQ ID NO: 1365949 - RNA, 23 nt, Human
uucuaggacugaauuaugaaacu

SEQ ID NO: 1365950 - RNA, 16 nt, Human
uucuaggacugaauua

SEQ ID NO: 1365951 - RNA, 12 nt, Human
uucuaggaaaau

SEQ ID NO: 1365952 - RNA, 16 nt, Human
uucuaggaaaauaaaa

SEQ ID NO: 1365953 - RNA, 11 nt, Human
uucuaggaaaa

SEQ ID NO: 1365954 - RNA, 22 nt, Human
uucuagcuuaucuacuuccaaa

SEQ ID NO: 1365955 - RNA, 14 nt, Human
uucuaggacugaau

SEQ ID NO: 1365956 - RNA, 13 nt, Human
uucuaggacugaa

SEQ ID NO: 1365957 - RNA, 21 nt, Human
aucagcaaaccggggccuacu

SEQ ID NO: 1365958 - RNA, 23 nt, Human
aucagaugcuccaagauucuaga

SEQ ID NO: 1365959 - RNA, 22 nt, Human
aucagaugcuccaagauucuag

SEQ ID NO: 1365960 - RNA, 21 nt, Human
aucagaugcuccaagauucua

SEQ ID NO: 1365961 - RNA, 19 nt, Human
aucagaauaucacagaaaa

SEQ ID NO: 1365962 - RNA, 22 nt, Human
aucagaauagccacauuuggaa

SEQ ID NO: 1365963 - RNA, 13 nt, Human
aucagcacgauuu

SEQ ID NO: 1365964 - RNA, 22 nt, Human
aucaggcuuucuuuuuuuucuu

SEQ ID NO: 1365965 - RNA, 14 nt, Human
aucaggcuuucuuu

SEQ ID NO: 1365966 - RNA, 22 nt, Human
aucaggcuuucuuaaagugaga

SEQ ID NO: 1365967 - RNA, 14 nt, Human
aucaggcuuucuua

SEQ ID NO: 1365968 - RNA, 20 nt, Human
aucagguccucagagaauuu

SEQ ID NO: 1365969 - RNA, 16 nt, Human
aucagguccucagaga

SEQ ID NO: 1365970 - RNA, 23 nt, Human
aucagguaacuaacugcauacac

SEQ ID NO: 1365971 - RNA, 20 nt, Human
aucagggguaggaauggaaa

SEQ ID NO: 1365972 - RNA, 18 nt, Human
aucagggaggucauuuug

SEQ ID NO: 1365973 - RNA, 16 nt, Human
aucaggcuuuuguuuc

SEQ ID NO: 1365974 - RNA, 17 nt, Human
aucaggguuaguauugu

SEQ ID NO: 1365975 - RNA, 19 nt, Human
auggcguaaguacagagaa

SEQ ID NO: 1365976 - RNA, 18 nt, Human
auggcguaaguacagaga

SEQ ID NO: 1365977 - RNA, 17 nt, Human
auggcguaaguacagag

SEQ ID NO: 1365978 - RNA, 23 nt, Human
auggccccucugaccugcacugg

SEQ ID NO: 1365979 - RNA, 18 nt, Human
auggccccucugaccugc

SEQ ID NO: 1365980 - RNA, 11 nt, Human
auggccccucu

SEQ ID NO: 1365981 - RNA, 22 nt, Human
auggcguaaguacagagaagcc

SEQ ID NO: 1365982 - RNA, 23 nt, Human
auggcguaaguacagagaagcca

SEQ ID NO: 1365983 - RNA, 21 nt, Human
auggcguaaguacagagaagc

SEQ ID NO: 1365984 - RNA, 20 nt, Human
auggcguaaguacagagaag

SEQ ID NO: 1365985 - RNA, 13 nt, Human
auggcuauuuuau

SEQ ID NO: 1365986 - RNA, 19 nt, Human
auggcuauguuuuuaaugu

SEQ ID NO: 1365987 - RNA, 12 nt, Human
auggcucccagg

SEQ ID NO: 1365988 - RNA, 18 nt, Human
augggagacccuugacac

SEQ ID NO: 1365989 - RNA, 17 nt, Human
augggagacccuugaca

SEQ ID NO: 1365990 - RNA, 22 nt, Human
augggagcugguuagaaaugca

SEQ ID NO: 1365991 - RNA, 20 nt, Human
augggagcugguuagaaaug

SEQ ID NO: 1365992 - RNA, 23 nt, Human
augggaggcucacccccuucucc

SEQ ID NO: 1365993 - RNA, 21 nt, Human
augggagcugguuagaaaugc

SEQ ID NO: 1365994 - RNA, 18 nt, Human
augggagggaggcucagg

SEQ ID NO: 1365995 - RNA, 20 nt, Human
auggccccagcacagcuuga

SEQ ID NO: 1365996 - RNA, 18 nt, Human
auggccccagcacagcuu

SEQ ID NO: 1365997 - RNA, 17 nt, Human
auggccccagcacagcu

SEQ ID NO: 1365998 - RNA, 15 nt, Human
auggccccagcacag

SEQ ID NO: 1365999 - RNA, 14 nt, Human
auggccccagcaca

SEQ ID NO: 1366000 - RNA, 15 nt, Human
auggcccauccugug

SEQ ID NO: 1366001 - RNA, 22 nt, Human
auggccauggaguguacaagua

SEQ ID NO: 1366002 - RNA, 17 nt, Human
auggcaugagaaauaca

SEQ ID NO: 1366003 - RNA, 15 nt, Human
auggcaugagaaaua

SEQ ID NO: 1366004 - RNA, 16 nt, Human
auggcauccuccagcc

SEQ ID NO: 1366005 - RNA, 17 nt, Human
auggcauaaccugucuc

SEQ ID NO: 1366006 - RNA, 16 nt, Human
auggcauaaccugucu

SEQ ID NO: 1366007 - RNA, 15 nt, Human
auggcaguuauauuu

SEQ ID NO: 1366008 - RNA, 24 nt, Human
auggcaggggguggaauuauuacu

SEQ ID NO: 1366009 - RNA, 17 nt, Human
auggcaggggguggaau

SEQ ID NO: 1366010 - RNA, 22 nt, Human
auggcagggggcugcugcuggg

SEQ ID NO: 1366011 - RNA, 20 nt, Human
auggcagggggcugcugcug

SEQ ID NO: 1366012 - RNA, 19 nt, Human
auggcagggggcugcugcu

SEQ ID NO: 1366013 - RNA, 17 nt, Human
auggcagggggcugcug

SEQ ID NO: 1366014 - RNA, 16 nt, Human
auggcagggggcugcu

SEQ ID NO: 1366015 - RNA, 15 nt, Human
auggcagggggcugc

SEQ ID NO: 1366016 - RNA, 18 nt, Human
auggcagcuuuuaaaaga

SEQ ID NO: 1366017 - RNA, 17 nt, Human
auggcaggaaggcuugu

SEQ ID NO: 1366018 - RNA, 13 nt, Human
auggcagcagggg

SEQ ID NO: 1366019 - RNA, 11 nt, Human
auggcagcagg

SEQ ID NO: 1366020 - RNA, 21 nt, Human
auggcagauguaggagggacu

SEQ ID NO: 1366021 - RNA, 20 nt, Human
auggcagauguaggagggac

SEQ ID NO: 1366022 - RNA, 19 nt, Human
auggcagauguaggaggga

SEQ ID NO: 1366023 - RNA, 14 nt, Human
auggcagauguagg

SEQ ID NO: 1366024 - RNA, 16 nt, Human
auggcacuaguauuuc

SEQ ID NO: 1366025 - RNA, 14 nt, Human
auggcacuaguauu

SEQ ID NO: 1366026 - RNA, 14 nt, Human
auggagaaggaagg

SEQ ID NO: 1366027 - RNA, 15 nt, Human
auggagaaggaaggc

SEQ ID NO: 1366028 - RNA, 12 nt, Human
uuuccaucuuua

SEQ ID NO: 1366029 - RNA, 19 nt, Human
uuuccauccauggccagca

SEQ ID NO: 1366030 - RNA, 23 nt, Human
uuuccaugcacccucauacacag

SEQ ID NO: 1366031 - RNA, 19 nt, Human
uuuccaugcguguuucuga

SEQ ID NO: 1366032 - RNA, 18 nt, Human
uuucccccuagccugccu

SEQ ID NO: 1366033 - RNA, 21 nt, Human
uuucaaauuggagcuucaugg

SEQ ID NO: 1366034 - RNA, 20 nt, Human
uuucaaauagggucuaacuc

SEQ ID NO: 1366035 - RNA, 19 nt, Human
uuucaaauagggucuaacu

SEQ ID NO: 1366036 - RNA, 17 nt, Human
uuucaaagcuuuuucca

SEQ ID NO: 1366037 - RNA, 19 nt, Human
uuucaaagaugcugugagu

SEQ ID NO: 1366038 - RNA, 14 nt, Human
uuucaaagaugcug

SEQ ID NO: 1366039 - RNA, 13 nt, Human
uuucaaagaugcu

SEQ ID NO: 1366040 - RNA, 19 nt, Human
uuucaacagugaagacaga

SEQ ID NO: 1366041 - RNA, 22 nt, Human
uuucauuaaauaaauuugacuu

SEQ ID NO: 1366042 - RNA, 21 nt, Human
uuucauuaauacagggcauuu

SEQ ID NO: 1366043 - RNA, 20 nt, Human
uuucaacagugaagacagaa

SEQ ID NO: 1366044 - RNA, 17 nt, Human
uuucaacagugaagaca

SEQ ID NO: 1366045 - RNA, 15 nt, Human
auggagaaagcugac

SEQ ID NO: 1366046 - RNA, 14 nt, Human
auggagaaagcuga

SEQ ID NO: 1366047 - RNA, 13 nt, Human
auggagaaagcug

SEQ ID NO: 1366048 - RNA, 12 nt, Human
auggagaaagcu

SEQ ID NO: 1366049 - RNA, 23 nt, Human
auggagaaagcugacuuggcugg

SEQ ID NO: 1366050 - RNA, 16 nt, Human
auggagaaagcugacu

SEQ ID NO: 1366051 - RNA, 12 nt, Human
auggagaaggaa

SEQ ID NO: 1366052 - RNA, 13 nt, Human
auggagaaggaag

SEQ ID NO: 1366053 - RNA, 14 nt, Human
auggacucuguccu

SEQ ID NO: 1366054 - RNA, 13 nt, Human
auggacucugucc

SEQ ID NO: 1366055 - RNA, 15 nt, Human
auggacucuguccug

SEQ ID NO: 1366056 - RNA, 16 nt, Human
auggacucuguccuga

SEQ ID NO: 1366057 - RNA, 14 nt, Human
auggacugcucagg

SEQ ID NO: 1366058 - RNA, 19 nt, Human
auggaauuuugcaaagauu

SEQ ID NO: 1366059 - RNA, 19 nt, Human
uuucccggacuuagaaaac

SEQ ID NO: 1366060 - RNA, 15 nt, Human
auggacaauggaccg

SEQ ID NO: 1366061 - RNA, 13 nt, Human
auggacaauggac

SEQ ID NO: 1366062 - RNA, 15 nt, Human
auggacacuacaccc

SEQ ID NO: 1366063 - RNA, 16 nt, Human
auggacacuacaccca

SEQ ID NO: 1366064 - RNA, 17 nt, Human
auggacacuacacccag

SEQ ID NO: 1366065 - RNA, 18 nt, Human
auggacacuacacccagc

SEQ ID NO: 1366066 - RNA, 19 nt, Human
auggacacuacacccagca

SEQ ID NO: 1366067 - RNA, 22 nt, Human
auggacuaucugucugguggcc

SEQ ID NO: 1366068 - RNA, 21 nt, Human
auggacuaucugucugguggc

SEQ ID NO: 1366069 - RNA, 20 nt, Human
auggacuaucugucuggugg

SEQ ID NO: 1366070 - RNA, 17 nt, Human
auggacuaucugucugg

SEQ ID NO: 1366071 - RNA, 13 nt, Human
auggacuaucugu

SEQ ID NO: 1366072 - RNA, 22 nt, Human
auggacacuacacccagcaaua

SEQ ID NO: 1366073 - RNA, 17 nt, Human
uuucaaacauauauaac

SEQ ID NO: 1366074 - RNA, 16 nt, Human
uuucaaacuuuacuau

SEQ ID NO: 1366075 - RNA, 22 nt, Human
uuucaaacuuuacuauggcccu

SEQ ID NO: 1366076 - RNA, 15 nt, Human
uuucaaaaugcuuuu

SEQ ID NO: 1366077 - RNA, 13 nt, Human
uuucaaaaugcuu

SEQ ID NO: 1366078 - RNA, 12 nt, Human
uuucaaaaugcu

SEQ ID NO: 1366079 - RNA, 21 nt, Human
uuucaaaaccagguccaauga

SEQ ID NO: 1366080 - RNA, 16 nt, Human
uuucaaacauauauaa

SEQ ID NO: 1366081 - RNA, 22 nt, Human
uuucaaaauuguuacaaauugu

SEQ ID NO: 1366082 - RNA, 20 nt, Human
uuuauuuuguguuuaggaac

SEQ ID NO: 1366083 - RNA, 12 nt, Human
uuuauuuuucau

SEQ ID NO: 1366084 - RNA, 17 nt, Human
uuuauuuuucuugucuu

SEQ ID NO: 1366085 - RNA, 17 nt, Human
uuuauuuuucauuuagu

SEQ ID NO: 1366086 - RNA, 13 nt, Human
uuucaaaaccagg

SEQ ID NO: 1366087 - RNA, 12 nt, Human
uuucaaaaccag

SEQ ID NO: 1366088 - RNA, 18 nt, Human
uuucaaaaccuuuugaaa

SEQ ID NO: 1366089 - RNA, 13 nt, Human
uuucaaaagaaag

SEQ ID NO: 1366090 - RNA, 23 nt, Human
augcuucuaaguaaauacaauuu

SEQ ID NO: 1366091 - RNA, 22 nt, Human
augcuucuaaguaaauacaauu

SEQ ID NO: 1366092 - RNA, 21 nt, Human
augcuucuaaguaaauacaau

SEQ ID NO: 1366093 - RNA, 20 nt, Human
augcuucuaaguaaauacaa

SEQ ID NO: 1366094 - RNA, 19 nt, Human
augcuguucaugaaagauu

SEQ ID NO: 1366095 - RNA, 14 nt, Human
augcugugugacuc

SEQ ID NO: 1366096 - RNA, 23 nt, Human
augcuguucaugaaagauucaau

SEQ ID NO: 1366097 - RNA, 19 nt, Human
augcuucuaaguaaauaca

SEQ ID NO: 1366098 - RNA, 15 nt, Human
augcuucuaaguaaa

SEQ ID NO: 1366099 - RNA, 15 nt, Human
augcuuccucccagc

SEQ ID NO: 1366100 - RNA, 16 nt, Human
augcuucccuuuccug

SEQ ID NO: 1366101 - RNA, 19 nt, Human
augcugcuggggaagacag

SEQ ID NO: 1366102 - RNA, 18 nt, Human
augcugcuggggaagaca

SEQ ID NO: 1366103 - RNA, 17 nt, Human
augcugcuggggaagac

SEQ ID NO: 1366104 - RNA, 16 nt, Human
augcugcuggggaaga

SEQ ID NO: 1366105 - RNA, 14 nt, Human
augcugcuggggaa

SEQ ID NO: 1366106 - RNA, 13 nt, Human
augcugcugggga

SEQ ID NO: 1366107 - RNA, 20 nt, Human
augcugcuggggaagacagu

SEQ ID NO: 1366108 - RNA, 21 nt, Human
augcugcuggggaagacagug

SEQ ID NO: 1366109 - RNA, 18 nt, Human
augcugugcgcccagggc

SEQ ID NO: 1366110 - RNA, 21 nt, Human
augcuguggcaugggugaaga

SEQ ID NO: 1366111 - RNA, 20 nt, Human
augcugugcgcccagggcug

SEQ ID NO: 1366112 - RNA, 17 nt, Human
augcuguucaugaaaga

SEQ ID NO: 1366113 - RNA, 13 nt, Human
uuuauuaaucuua

SEQ ID NO: 1366114 - RNA, 17 nt, Human
uuuauuaauauauauua

SEQ ID NO: 1366115 - RNA, 19 nt, Human
uuuauuaauauauauuauc

SEQ ID NO: 1366116 - RNA, 17 nt, Human
uuuauuaaugcacuuuc

SEQ ID NO: 1366117 - RNA, 12 nt, Human
uuuauuaaugca

SEQ ID NO: 1366118 - RNA, 19 nt, Human
uuuauuaaucuuaguguau

SEQ ID NO: 1366119 - RNA, 13 nt, Human
augcuaucucugu

SEQ ID NO: 1366120 - RNA, 14 nt, Human
augcuagguucuac

SEQ ID NO: 1366121 - RNA, 13 nt, Human
augcuagguucua

SEQ ID NO: 1366122 - RNA, 20 nt, Human
augcuccaagauucuagaug

SEQ ID NO: 1366123 - RNA, 22 nt, Human
augcuccagauuagagccugua

SEQ ID NO: 1366124 - RNA, 19 nt, Human
augcuccaagauucuagau

SEQ ID NO: 1366125 - RNA, 18 nt, Human
augcuccaagauucuaga

SEQ ID NO: 1366126 - RNA, 17 nt, Human
augcuccaagauucuag

SEQ ID NO: 1366127 - RNA, 16 nt, Human
augcuccaagauucua

SEQ ID NO: 1366128 - RNA, 17 nt, Human
augcuaacaucuaaaaa

SEQ ID NO: 1366129 - RNA, 16 nt, Human
augcuaacaucuaaaa

SEQ ID NO: 1366130 - RNA, 14 nt, Human
augcuaacaucuaa

SEQ ID NO: 1366131 - RNA, 19 nt, Human
augcuaacaucuaaaaaua

SEQ ID NO: 1366132 - RNA, 18 nt, Human
augcuaagagaaguagaa

SEQ ID NO: 1366133 - RNA, 22 nt, Human
augcuaagagaaguagaaauca

SEQ ID NO: 1366134 - RNA, 17 nt, Human
augcuaagagaaguaga

SEQ ID NO: 1366135 - RNA, 16 nt, Human
augcuaagagaaguag

SEQ ID NO: 1366136 - RNA, 15 nt, Human
augcuaagagaagua

SEQ ID NO: 1366137 - RNA, 13 nt, Human
uuuauauguugua

SEQ ID NO: 1366138 - RNA, 22 nt, Human
uuuauauugauaagaucuuuua

SEQ ID NO: 1366139 - RNA, 16 nt, Human
uuuauauuacacuaca

SEQ ID NO: 1366140 - RNA, 14 nt, Human
uuuauauuuaaaug

SEQ ID NO: 1366141 - RNA, 16 nt, Human
uuuauauuguaaauau

SEQ ID NO: 1366142 - RNA, 14 nt, Human
uuuauauuguaaau

SEQ ID NO: 1366143 - RNA, 19 nt, Human
uuuauauuguaaauauugu

SEQ ID NO: 1366144 - RNA, 22 nt, Human
uuuaucaaacccuagccuugcu

SEQ ID NO: 1366145 - RNA, 21 nt, Human
uuuaucaaacccuagccuugc

SEQ ID NO: 1366146 - RNA, 23 nt, Human
uuuaucaugcauguccuguaaag

SEQ ID NO: 1366147 - RNA, 22 nt, Human
uuuaucaugcauguccuguaaa

SEQ ID NO: 1366148 - RNA, 16 nt, Human
uuuaucaugcaugucc

SEQ ID NO: 1366149 - RNA, 17 nt, Human
uuuaucaugugaaauca

SEQ ID NO: 1366150 - RNA, 12 nt, Human
uuuaucauuuuc

SEQ ID NO: 1366151 - RNA, 17 nt, Human
uuuaucauucaagugua

SEQ ID NO: 1366152 - RNA, 15 nt, Human
uuuaucauucaagug

SEQ ID NO: 1366153 - RNA, 14 nt, Human
uuuaucauucaagu

SEQ ID NO: 1366154 - RNA, 18 nt, Human
uuuaucaugugaaaucau

SEQ ID NO: 1366155 - RNA, 21 nt, Human
uuguuccaaauacuaaugaaa

SEQ ID NO: 1366156 - RNA, 15 nt, Human
uuguucauagcccag

SEQ ID NO: 1366157 - RNA, 13 nt, Human
uuguguuacuaag

SEQ ID NO: 1366158 - RNA, 15 nt, Human
uuguguuacuaaguu

SEQ ID NO: 1366159 - RNA, 20 nt, Human
uuguguuacuaaguuuuuau

SEQ ID NO: 1366160 - RNA, 16 nt, Human
uuguugaaaaaguuug

SEQ ID NO: 1366161 - RNA, 22 nt, Human
uuguugaaaaaguuuguuuuug

SEQ ID NO: 1366162 - RNA, 15 nt, Human
uuguucuuguauuua

SEQ ID NO: 1366163 - RNA, 14 nt, Human
uuguucuuguauuu

SEQ ID NO: 1366164 - RNA, 16 nt, Human
uuguuccccacuggag

SEQ ID NO: 1366165 - RNA, 12 nt, Human
augauaaugaac

SEQ ID NO: 1366166 - RNA, 15 nt, Human
augauaaugaacaga

SEQ ID NO: 1366167 - RNA, 19 nt, Human
augauaauagauucucuug

SEQ ID NO: 1366168 - RNA, 15 nt, Human
augauaauagauucu

SEQ ID NO: 1366169 - RNA, 18 nt, Human
uuguugagcuauugcugu

SEQ ID NO: 1366170 - RNA, 20 nt, Human
uuguugacauucugaaugcu

SEQ ID NO: 1366171 - RNA, 17 nt, Human
uuguugacauucugaau

SEQ ID NO: 1366172 - RNA, 16 nt, Human
uuguugacauucugaa

SEQ ID NO: 1366173 - RNA, 15 nt, Human
uuguugacauucuga

SEQ ID NO: 1366174 - RNA, 12 nt, Human
uuguugacauuc

SEQ ID NO: 1366175 - RNA, 12 nt, Human
uuguugacauua

SEQ ID NO: 1366176 - RNA, 15 nt, Human
augauaacuggaaac

SEQ ID NO: 1366177 - RNA, 13 nt, Human
augaucccugugu

SEQ ID NO: 1366178 - RNA, 14 nt, Human
augauuacuggccu

SEQ ID NO: 1366179 - RNA, 18 nt, Human
augauuaaguaaugauaa

SEQ ID NO: 1366180 - RNA, 14 nt, Human
augauuaaguaaug

SEQ ID NO: 1366181 - RNA, 19 nt, Human
augauacuaauaaacuaau

SEQ ID NO: 1366182 - RNA, 15 nt, Human
augauacauccaaag

SEQ ID NO: 1366183 - RNA, 17 nt, Human
augauacagcagagcua

SEQ ID NO: 1366184 - RNA, 17 nt, Human
augauacuugaaaauua

SEQ ID NO: 1366185 - RNA, 18 nt, Human
augauacuucgacacugu

SEQ ID NO: 1366186 - RNA, 16 nt, Human
augauacuucgacacu

SEQ ID NO: 1366187 - RNA, 21 nt, Human
augauacuugaaaauuaacau

SEQ ID NO: 1366188 - RNA, 21 nt, Human
augauccaacuaaugccuuac

SEQ ID NO: 1366189 - RNA, 23 nt, Human
augauaugcuuguaacuaaaaua

SEQ ID NO: 1366190 - RNA, 17 nt, Human
augauaugcuuguaacu

SEQ ID NO: 1366191 - RNA, 23 nt, Human
augauacuucgacacuguucuua

SEQ ID NO: 1366192 - RNA, 17 nt, Human
uuuaaaguuguuugugc

SEQ ID NO: 1366193 - RNA, 22 nt, Human
uuuaaaguuaguaucuuuugau

SEQ ID NO: 1366194 - RNA, 22 nt, Human
uuuaaagugacuaauggcauga

SEQ ID NO: 1366195 - RNA, 18 nt, Human
uuuaaagucucaguuucu

SEQ ID NO: 1366196 - RNA, 23 nt, Human
uuuaaagagucuagauucaaagg

SEQ ID NO: 1366197 - RNA, 21 nt, Human
uuuaaagagucuagauucaaa

SEQ ID NO: 1366198 - RNA, 18 nt, Human
uuuaaagagucuagauuc

SEQ ID NO: 1366199 - RNA, 17 nt, Human
uuuaaagagucuagauu

SEQ ID NO: 1366200 - RNA, 16 nt, Human
uuuaaagagucuagau

SEQ ID NO: 1366201 - RNA, 15 nt, Human
uuuaaagagucuaga

SEQ ID NO: 1366202 - RNA, 13 nt, Human
uuuaaagagucua

SEQ ID NO: 1366203 - RNA, 18 nt, Human
uuuaaagacaauguuaaa

SEQ ID NO: 1366204 - RNA, 12 nt, Human
uuuaaagaauug

SEQ ID NO: 1366205 - RNA, 13 nt, Human
uuuaaagaauugu

SEQ ID NO: 1366206 - RNA, 13 nt, Human
uuuaaagaaagug

SEQ ID NO: 1366207 - RNA, 16 nt, Human
uuuaaagaaaguguau

SEQ ID NO: 1366208 - RNA, 14 nt, Human
uuuaaagaaagugu

SEQ ID NO: 1366209 - RNA, 17 nt, Human
uuuaaaaauagacacuc

SEQ ID NO: 1366210 - RNA, 14 nt, Human
uuguuuuggaugcc

SEQ ID NO: 1366211 - RNA, 22 nt, Human
uuguuuuggcugaaauucuccu

SEQ ID NO: 1366212 - RNA, 20 nt, Human
uuguuuugcacacuuugcca

SEQ ID NO: 1366213 - RNA, 23 nt, Human
augcaccuaaagaaaaacaaacu

SEQ ID NO: 1366214 - RNA, 18 nt, Human
augcaccuaaagaaaaac

SEQ ID NO: 1366215 - RNA, 16 nt, Human
augcaccuaaagaaaa

SEQ ID NO: 1366216 - RNA, 15 nt, Human
augcaccuaaagaaa

SEQ ID NO: 1366217 - RNA, 14 nt, Human
augcaccuaaagaa

SEQ ID NO: 1366218 - RNA, 20 nt, Human
augcacccucauacacagaa

SEQ ID NO: 1366219 - RNA, 13 nt, Human
augcaccuggaau

SEQ ID NO: 1366220 - RNA, 15 nt, Human
augcaaccauuugaa

SEQ ID NO: 1366221 - RNA, 13 nt, Human
augcaagaaggag

SEQ ID NO: 1366222 - RNA, 14 nt, Human
augcaagaaggagg

SEQ ID NO: 1366223 - RNA, 23 nt, Human
augauucuauuuauauguacaug

SEQ ID NO: 1366224 - RNA, 22 nt, Human
augauucuauuuauauguacau

SEQ ID NO: 1366225 - RNA, 22 nt, Human
augauuagaaauuaccugugga

SEQ ID NO: 1366226 - RNA, 22 nt, Human
augauuacuggccuuuuucauu

SEQ ID NO: 1366227 - RNA, 19 nt, Human
augauuacuggccuuuuuc

SEQ ID NO: 1366228 - RNA, 15 nt, Human
augauuacuggccuu

SEQ ID NO: 1366229 - RNA, 22 nt, Human
augauuccuugauggagauauu

SEQ ID NO: 1366230 - RNA, 19 nt, Human
augauugaauuauauguuc

SEQ ID NO: 1366231 - RNA, 14 nt, Human
augccucccugagc

SEQ ID NO: 1366232 - RNA, 19 nt, Human
augcgguuaauuuugaagu

SEQ ID NO: 1366233 - RNA, 21 nt, Human
augcgguagccagcacacagg

SEQ ID NO: 1366234 - RNA, 20 nt, Human
augcgguagccagcacacag

SEQ ID NO: 1366235 - RNA, 18 nt, Human
augcgguagccagcacac

SEQ ID NO: 1366236 - RNA, 15 nt, Human
augcgguagccagca

SEQ ID NO: 1366237 - RNA, 14 nt, Human
augcgguagccagc

SEQ ID NO: 1366238 - RNA, 21 nt, Human
augcguauuauaccaaaaugu

SEQ ID NO: 1366239 - RNA, 21 nt, Human
augcgguuauaaaaaaugguu

SEQ ID NO: 1366240 - RNA, 20 nt, Human
augcgugcauaccacuuuug

SEQ ID NO: 1366241 - RNA, 16 nt, Human
augcccuucuccuuau

SEQ ID NO: 1366242 - RNA, 12 nt, Human
augcccuucacu

SEQ ID NO: 1366243 - RNA, 19 nt, Human
augccgauauacucuagau

SEQ ID NO: 1366244 - RNA, 23 nt, Human
augcccugugcaaccucuuggcc

SEQ ID NO: 1366245 - RNA, 13 nt, Human
augcccugugcaa

SEQ ID NO: 1366246 - RNA, 12 nt, Human
augcccugugca

SEQ ID NO: 1366247 - RNA, 23 nt, Human
augcccugcucugaacacgaagc

SEQ ID NO: 1366248 - RNA, 16 nt, Human
augccauuuguacuga

SEQ ID NO: 1366249 - RNA, 12 nt, Human
augccacauuca

SEQ ID NO: 1366250 - RNA, 14 nt, Human
augccaugaugccu

SEQ ID NO: 1366251 - RNA, 15 nt, Human
augccacauucaaaa

SEQ ID NO: 1366252 - RNA, 19 nt, Human
augccacagcccugucagc

SEQ ID NO: 1366253 - RNA, 18 nt, Human
augccacagcccugucag

SEQ ID NO: 1366254 - RNA, 17 nt, Human
augccacagcccuguca

SEQ ID NO: 1366255 - RNA, 15 nt, Human
augccacagcccugu

SEQ ID NO: 1366256 - RNA, 14 nt, Human
augccacagcccug

SEQ ID NO: 1366257 - RNA, 13 nt, Human
augccacagcccu

SEQ ID NO: 1366258 - RNA, 19 nt, Human
augccacaaggacuuccug

SEQ ID NO: 1366259 - RNA, 16 nt, Human
augccacaaggacuuc

SEQ ID NO: 1366260 - RNA, 22 nt, Human
augccaauuagcaauugacugu

SEQ ID NO: 1366261 - RNA, 17 nt, Human
augccaauauuaaaucu

SEQ ID NO: 1366262 - RNA, 19 nt, Human
augccaaaaaaaaauacau

SEQ ID NO: 1366263 - RNA, 18 nt, Human
augccaaaaaaaaauaca

SEQ ID NO: 1366264 - RNA, 17 nt, Human
augccaaaaaaaaauac

SEQ ID NO: 1366265 - RNA, 23 nt, Human
augcauuuuguuugguauuguau

SEQ ID NO: 1366266 - RNA, 22 nt, Human
augcauuuggguccaggaggaa

SEQ ID NO: 1366267 - RNA, 20 nt, Human
augcauuuggguccaggagg

SEQ ID NO: 1366268 - RNA, 19 nt, Human
augcauuuggguccaggag

SEQ ID NO: 1366269 - RNA, 18 nt, Human
augcauuuggguccagga

SEQ ID NO: 1366270 - RNA, 17 nt, Human
augcauuuggguccagg

SEQ ID NO: 1366271 - RNA, 15 nt, Human
augcauuugggucca

SEQ ID NO: 1366272 - RNA, 19 nt, Human
augcauuuuguuugguauu

SEQ ID NO: 1366273 - RNA, 22 nt, Human
augcauuuuguuugguauugua

SEQ ID NO: 1366274 - RNA, 13 nt, Human
augcaguucugaa

SEQ ID NO: 1366275 - RNA, 20 nt, Human
uuuacaaauguuaaaaugug

SEQ ID NO: 1366276 - RNA, 21 nt, Human
uuuacaaauguuaaaaugugu

SEQ ID NO: 1366277 - RNA, 15 nt, Human
uuuacaaacugaaga

SEQ ID NO: 1366278 - RNA, 16 nt, Human
uuuacaaacugaagag

SEQ ID NO: 1366279 - RNA, 14 nt, Human
uuuacaaacugaag

SEQ ID NO: 1366280 - RNA, 13 nt, Human
uuuacaaacugaa

SEQ ID NO: 1366281 - RNA, 19 nt, Human
uuuacaaaacuacaugaga

SEQ ID NO: 1366282 - RNA, 18 nt, Human
uuuacaaaacaaacucau

SEQ ID NO: 1366283 - RNA, 16 nt, Human
uuuacaaaaauauaaa

SEQ ID NO: 1366284 - RNA, 15 nt, Human
uuuacaaaaauauaa

SEQ ID NO: 1366285 - RNA, 16 nt, Human
uuuaauuugaaauaug

SEQ ID NO: 1366286 - RNA, 18 nt, Human
uuuaauuuaguaaaccaa

SEQ ID NO: 1366287 - RNA, 22 nt, Human
uuuaauuuaguaaaccaauccu

SEQ ID NO: 1366288 - RNA, 16 nt, Human
augcagcuuauacgaa

SEQ ID NO: 1366289 - RNA, 21 nt, Human
augcagcuuauacgaaauaau

SEQ ID NO: 1366290 - RNA, 15 nt, Human
augcagcuuauacga

SEQ ID NO: 1366291 - RNA, 15 nt, Human
augcagcuguggcag

SEQ ID NO: 1366292 - RNA, 13 nt, Human
augcagcucaaga

SEQ ID NO: 1366293 - RNA, 21 nt, Human
uuuaauguuuaaaacaucauu

SEQ ID NO: 1366294 - RNA, 17 nt, Human
uuuaauguuuaaaacau

SEQ ID NO: 1366295 - RNA, 16 nt, Human
uuuaauguuuaaaaca

SEQ ID NO: 1366296 - RNA, 20 nt, Human
uuuaauguauaguaaaucac

SEQ ID NO: 1366297 - RNA, 20 nt, Human
uuuaauuaauugggccagcu

SEQ ID NO: 1366298 - RNA, 14 nt, Human
uuuaauuagugcua

SEQ ID NO: 1366299 - RNA, 22 nt, Human
uuuaauuaauugggccagcuuu

SEQ ID NO: 1366300 - RNA, 14 nt, Human
uuuaauuaauuggg

SEQ ID NO: 1366301 - RNA, 15 nt, Human
uuuaauuagugcuaa

SEQ ID NO: 1366302 - RNA, 17 nt, Human
uuuaauuagugcuaagu

SEQ ID NO: 1366303 - RNA, 19 nt, Human
uuuaauuagugcuaagugu

SEQ ID NO: 1366304 - RNA, 20 nt, Human
uuuaauuagugcuaagugug

SEQ ID NO: 1366305 - RNA, 23 nt, Human
uuuaauuauuauucuucauaaca

SEQ ID NO: 1366306 - RNA, 14 nt, Human
uuuaauuauuauuc

SEQ ID NO: 1366307 - RNA, 21 nt, Human
uuuaauuagugcuaaguguga

SEQ ID NO: 1366308 - RNA, 22 nt, Human
uuuaauuagugcuaagugugaa

SEQ ID NO: 1366309 - RNA, 23 nt, Human
uuuaauuauuauuuauauaugua

SEQ ID NO: 1366310 - RNA, 17 nt, Human
uuuaagugaaaaugguc

SEQ ID NO: 1366311 - RNA, 15 nt, Human
uuuaagugaaaaugg

SEQ ID NO: 1366312 - RNA, 15 nt, Human
uuuaagucucucgua

SEQ ID NO: 1366313 - RNA, 18 nt, Human
uuuaaguauuuagguuuu

SEQ ID NO: 1366314 - RNA, 13 nt, Human
uuuaaguauuuag

SEQ ID NO: 1366315 - RNA, 18 nt, Human
uuuaaauauaugcuaagu

SEQ ID NO: 1366316 - RNA, 20 nt, Human
uuuaaauacagucuuccauu

SEQ ID NO: 1366317 - RNA, 17 nt, Human
uuugauguuccuuccag

SEQ ID NO: 1366318 - RNA, 15 nt, Human
uuugauguuccuucc

SEQ ID NO: 1366319 - RNA, 12 nt, Human
uuugauguaaua

SEQ ID NO: 1366320 - RNA, 13 nt, Human
uuugauuaaauuc

SEQ ID NO: 1366321 - RNA, 18 nt, Human
uuugauuaaauucuugca

SEQ ID NO: 1366322 - RNA, 21 nt, Human
uuugauuaaauucuugcaaag

SEQ ID NO: 1366323 - RNA, 23 nt, Human
uuugauuaaauucuugcaaagua

SEQ ID NO: 1366324 - RNA, 20 nt, Human
uuugauguaaagauguucug

SEQ ID NO: 1366325 - RNA, 12 nt, Human
uuugacucuuuu

SEQ ID NO: 1366326 - RNA, 19 nt, Human
uuugacuagaugauggaug

SEQ ID NO: 1366327 - RNA, 19 nt, Human
uuugaccuuuuauguagua

SEQ ID NO: 1366328 - RNA, 19 nt, Human
uuugacgggaaacaaaacu

SEQ ID NO: 1366329 - RNA, 16 nt, Human
uuuggcaauuuugugg

SEQ ID NO: 1366330 - RNA, 17 nt, Human
uuuggcaaugccaucau

SEQ ID NO: 1366331 - RNA, 15 nt, Human
uuugcuggaauaagu

SEQ ID NO: 1366332 - RNA, 22 nt, Human
uuugcugcugcccauguuucaa

SEQ ID NO: 1366333 - RNA, 20 nt, Human
uuugcugcuaauauuuuccu

SEQ ID NO: 1366334 - RNA, 19 nt, Human
uuugcugagcauguacuga

SEQ ID NO: 1366335 - RNA, 12 nt, Human
uuugcugagacu

SEQ ID NO: 1366336 - RNA, 20 nt, Human
uuugcucuucaagaaaucug

SEQ ID NO: 1366337 - RNA, 18 nt, Human
uuugcucuucaagaaauc

SEQ ID NO: 1366338 - RNA, 14 nt, Human
uuugccuguaacaa

SEQ ID NO: 1366339 - RNA, 13 nt, Human
uuugccuguaaca

SEQ ID NO: 1366340 - RNA, 21 nt, Human
uuugccuguaacaagccagau

SEQ ID NO: 1366341 - RNA, 12 nt, Human
uuugccuguaac

SEQ ID NO: 1366342 - RNA, 17 nt, Human
uuugccucuuccagucu

SEQ ID NO: 1366343 - RNA, 23 nt, Human
uuugccucaaauaaaaagugcuu

SEQ ID NO: 1366344 - RNA, 14 nt, Human
uuugcaaccucgcu

SEQ ID NO: 1366345 - RNA, 15 nt, Human
uuugcaaccaggaac

SEQ ID NO: 1366346 - RNA, 14 nt, Human
uuugcaaccaggaa

SEQ ID NO: 1366347 - RNA, 14 nt, Human
uuugcaaagugcaa

SEQ ID NO: 1366348 - RNA, 20 nt, Human
uuugauucauaguaacuucu

SEQ ID NO: 1366349 - RNA, 15 nt, Human
uuugauucauaguaa

SEQ ID NO: 1366350 - RNA, 14 nt, Human
uuugccucaaauaa

SEQ ID NO: 1366351 - RNA, 21 nt, Human
uuugcaaggugcauuuuuacu

SEQ ID NO: 1366352 - RNA, 21 nt, Human
uuugcaagggaaaagucucuu

SEQ ID NO: 1366353 - RNA, 20 nt, Human
uuugcaagggaaaagucucu

SEQ ID NO: 1366354 - RNA, 15 nt, Human
uuugccguuauuaaa

SEQ ID NO: 1366355 - RNA, 17 nt, Human
uuugcaacuuaauacuc

SEQ ID NO: 1366356 - RNA, 23 nt, Human
uuugcaaccaggaacagcaaaug

SEQ ID NO: 1366357 - RNA, 14 nt, Human
uuugcaagccagau

SEQ ID NO: 1366358 - RNA, 20 nt, Human
auguaguaacacuaauauau

SEQ ID NO: 1366359 - RNA, 18 nt, Human
auguaguaauugacaugu

SEQ ID NO: 1366360 - RNA, 17 nt, Human
auguaguaauugacaug

SEQ ID NO: 1366361 - RNA, 16 nt, Human
auguaguaauugacau

SEQ ID NO: 1366362 - RNA, 13 nt, Human
auguaguaauuga

SEQ ID NO: 1366363 - RNA, 22 nt, Human
auguaguaacacuaauauauuu

SEQ ID NO: 1366364 - RNA, 17 nt, Human
auguaguaacacuaaua

SEQ ID NO: 1366365 - RNA, 16 nt, Human
auguaguaacacuaau

SEQ ID NO: 1366366 - RNA, 15 nt, Human
auguaguaacacuaa

SEQ ID NO: 1366367 - RNA, 14 nt, Human
auguaguaacacua

SEQ ID NO: 1366368 - RNA, 13 nt, Human
auguaguaacacu

SEQ ID NO: 1366369 - RNA, 12 nt, Human
auguaguaacac

SEQ ID NO: 1366370 - RNA, 13 nt, Human
auguaggagggac

SEQ ID NO: 1366371 - RNA, 13 nt, Human
uuugacaguguuu

SEQ ID NO: 1366372 - RNA, 19 nt, Human
uuugacaguguugaaaaug

SEQ ID NO: 1366373 - RNA, 18 nt, Human
uuugacaguguugaaaau

SEQ ID NO: 1366374 - RNA, 20 nt, Human
uuugacauugcguuugaccu

SEQ ID NO: 1366375 - RNA, 18 nt, Human
uuugaccucugcagcaau

SEQ ID NO: 1366376 - RNA, 12 nt, Human
uuugaccucugc

SEQ ID NO: 1366377 - RNA, 19 nt, Human
auguagcaugcuuguugca

SEQ ID NO: 1366378 - RNA, 14 nt, Human
auguagcaugcuug

SEQ ID NO: 1366379 - RNA, 21 nt, Human
auguagcaaaauacaugacau

SEQ ID NO: 1366380 - RNA, 12 nt, Human
auguaggaggga

SEQ ID NO: 1366381 - RNA, 21 nt, Human
auguagcucuuugucagggag

SEQ ID NO: 1366382 - RNA, 14 nt, Human
auguaggaaguagg

SEQ ID NO: 1366383 - RNA, 22 nt, Human
auguagcucuuugucagggagu

SEQ ID NO: 1366384 - RNA, 12 nt, Human
auguagcucuuu

SEQ ID NO: 1366385 - RNA, 19 nt, Human
auguagccccucuccugga

SEQ ID NO: 1366386 - RNA, 14 nt, Human
auguagaaaauuug

SEQ ID NO: 1366387 - RNA, 19 nt, Human
auguagauaacaagaccuc

SEQ ID NO: 1366388 - RNA, 18 nt, Human
auguacugagccuuguaa

SEQ ID NO: 1366389 - RNA, 19 nt, Human
auguacuguauauuacaga

SEQ ID NO: 1366390 - RNA, 16 nt, Human
auguacuucaugcugu

SEQ ID NO: 1366391 - RNA, 18 nt, Human
auguacggauuuucaguu

SEQ ID NO: 1366392 - RNA, 18 nt, Human
auguacccucugaaauac

SEQ ID NO: 1366393 - RNA, 17 nt, Human
auguacccucugaaaua

SEQ ID NO: 1366394 - RNA, 21 nt, Human
auguacccaccgggccacucc

SEQ ID NO: 1366395 - RNA, 21 nt, Human
auguaccauguacaugaagaa

SEQ ID NO: 1366396 - RNA, 15 nt, Human
auguaccauguacau

SEQ ID NO: 1366397 - RNA, 20 nt, Human
auguacccaccgggccacuc

SEQ ID NO: 1366398 - RNA, 16 nt, Human
auguacccaccgggcc

SEQ ID NO: 1366399 - RNA, 16 nt, Human
auguaccguaggcuuu

SEQ ID NO: 1366400 - RNA, 20 nt, Human
augucuccuaagcaccugua

SEQ ID NO: 1366401 - RNA, 18 nt, Human
augucuccuaagcaccug

SEQ ID NO: 1366402 - RNA, 15 nt, Human
augucuccuaagcac

SEQ ID NO: 1366403 - RNA, 14 nt, Human
augucuccuaagca

SEQ ID NO: 1366404 - RNA, 23 nt, Human
auguccuugugaugugcacguaa

SEQ ID NO: 1366405 - RNA, 16 nt, Human
auguccuucugagccc

SEQ ID NO: 1366406 - RNA, 14 nt, Human
auguccuguaaagg

SEQ ID NO: 1366407 - RNA, 13 nt, Human
auguccuguaaag

SEQ ID NO: 1366408 - RNA, 22 nt, Human
auguccugccuauuaucuguca

SEQ ID NO: 1366409 - RNA, 21 nt, Human
auguccugccuauuaucuguc

SEQ ID NO: 1366410 - RNA, 20 nt, Human
auguccugccuauuaucugu

SEQ ID NO: 1366411 - RNA, 16 nt, Human
auguccugccuauuau

SEQ ID NO: 1366412 - RNA, 12 nt, Human
auguccaggaaa

SEQ ID NO: 1366413 - RNA, 15 nt, Human
augucagugcugaug

SEQ ID NO: 1366414 - RNA, 14 nt, Human
auguauguuaccaa

SEQ ID NO: 1366415 - RNA, 13 nt, Human
auguauguuacca

SEQ ID NO: 1366416 - RNA, 12 nt, Human
auguauguuacc

SEQ ID NO: 1366417 - RNA, 22 nt, Human
auguauuacaguggggaaugaa

SEQ ID NO: 1366418 - RNA, 18 nt, Human
uuuggcaucccugggccu

SEQ ID NO: 1366419 - RNA, 16 nt, Human
uuuggcaucccugggc

SEQ ID NO: 1366420 - RNA, 19 nt, Human
auguaugcauguugucuaa

SEQ ID NO: 1366421 - RNA, 15 nt, Human
auguaugcauguugu

SEQ ID NO: 1366422 - RNA, 19 nt, Human
auguaugaggaauuucugu

SEQ ID NO: 1366423 - RNA, 23 nt, Human
uuuggcaucccugggccuugggc

SEQ ID NO: 1366424 - RNA, 13 nt, Human
uuuggcaggugca

SEQ ID NO: 1366425 - RNA, 13 nt, Human
uuuggcagaguuc

SEQ ID NO: 1366426 - RNA, 22 nt, Human
augugauuguggaauggagauu

SEQ ID NO: 1366427 - RNA, 17 nt, Human
augugauuguggaaugg

SEQ ID NO: 1366428 - RNA, 15 nt, Human
augugauuguggaau

SEQ ID NO: 1366429 - RNA, 14 nt, Human
augugauuguggaa

SEQ ID NO: 1366430 - RNA, 21 nt, Human
augugauguucuaaggcucug

SEQ ID NO: 1366431 - RNA, 20 nt, Human
augugauguucuaaggcucu

SEQ ID NO: 1366432 - RNA, 19 nt, Human
augugauguucuaaggcuc

SEQ ID NO: 1366433 - RNA, 17 nt, Human
augugauguucuaaggc

SEQ ID NO: 1366434 - RNA, 16 nt, Human
augugauguucuaagg

SEQ ID NO: 1366435 - RNA, 15 nt, Human
augugauguucuaag

SEQ ID NO: 1366436 - RNA, 14 nt, Human
augugauguucuaa

SEQ ID NO: 1366437 - RNA, 19 nt, Human
uuuguaauaauaaagaaua

SEQ ID NO: 1366438 - RNA, 18 nt, Human
augugcaauagaagguga

SEQ ID NO: 1366439 - RNA, 13 nt, Human
augugcaauagaa

SEQ ID NO: 1366440 - RNA, 15 nt, Human
augugcaaguuuauc

SEQ ID NO: 1366441 - RNA, 21 nt, Human
augugacucuuuccaaccggc

SEQ ID NO: 1366442 - RNA, 17 nt, Human
augucucuucugagcua

SEQ ID NO: 1366443 - RNA, 16 nt, Human
augucucuucugagcu

SEQ ID NO: 1366444 - RNA, 13 nt, Human
augucucuucuga

SEQ ID NO: 1366445 - RNA, 15 nt, Human
augucucuuccuggu

SEQ ID NO: 1366446 - RNA, 16 nt, Human
augucucuuccuggua

SEQ ID NO: 1366447 - RNA, 16 nt, Human
augugacauuuuacau

SEQ ID NO: 1366448 - RNA, 16 nt, Human
augugacucuuuccaa

SEQ ID NO: 1366449 - RNA, 12 nt, Human
augugacucuuu

SEQ ID NO: 1366450 - RNA, 19 nt, Human
augugaccacucugucuug

SEQ ID NO: 1366451 - RNA, 18 nt, Human
augugacauuuuacauua

SEQ ID NO: 1366452 - RNA, 21 nt, Human
uuuguaguguuggagaagaac

SEQ ID NO: 1366453 - RNA, 19 nt, Human
uuuguaguguuggagaaga

SEQ ID NO: 1366454 - RNA, 15 nt, Human
uuuguaguugaauau

SEQ ID NO: 1366455 - RNA, 14 nt, Human
uuuguaguugaaua

SEQ ID NO: 1366456 - RNA, 12 nt, Human
uuuguauaaaag

SEQ ID NO: 1366457 - RNA, 22 nt, Human
uuuguaauuaaaagcaaaucau

SEQ ID NO: 1366458 - RNA, 23 nt, Human
uuuguaauuaaaagcaaaucauu

SEQ ID NO: 1366459 - RNA, 14 nt, Human
uuuguaauuaaaag

SEQ ID NO: 1366460 - RNA, 23 nt, Human
uuuguaaugucuugagcucuauu

SEQ ID NO: 1366461 - RNA, 21 nt, Human
uuuguaauaauaaagaauagc

SEQ ID NO: 1366462 - RNA, 13 nt, Human
uuuguaaugaaaa

SEQ ID NO: 1366463 - RNA, 14 nt, Human
uuuguaaugaaaac

SEQ ID NO: 1366464 - RNA, 17 nt, Human
uuugugaagcaaaauuu

SEQ ID NO: 1366465 - RNA, 18 nt, Human
uuugugaauagaacucug

SEQ ID NO: 1366466 - RNA, 20 nt, Human
uuugugaagguggaaauaaa

SEQ ID NO: 1366467 - RNA, 22 nt, Human
uuugugaauuaggcuguaacua

SEQ ID NO: 1366468 - RNA, 15 nt, Human
uuugugaauuaggcu

SEQ ID NO: 1366469 - RNA, 21 nt, Human
augguucagaauuaaacuuuu

SEQ ID NO: 1366470 - RNA, 20 nt, Human
augguucagaauuaaacuuu

SEQ ID NO: 1366471 - RNA, 22 nt, Human
augguuaccaugucuuucucuc

SEQ ID NO: 1366472 - RNA, 17 nt, Human
augguuaccaugucuuu

SEQ ID NO: 1366473 - RNA, 23 nt, Human
augguuaagaguccaagaaucca

SEQ ID NO: 1366474 - RNA, 18 nt, Human
augguuaagaguccaaga

SEQ ID NO: 1366475 - RNA, 13 nt, Human
augguuaacuaau

SEQ ID NO: 1366476 - RNA, 22 nt, Human
augguguucuccugcugcuccc

SEQ ID NO: 1366477 - RNA, 22 nt, Human
augguguagaacacuaauucau

SEQ ID NO: 1366478 - RNA, 19 nt, Human
augguguagaacacuaauu

SEQ ID NO: 1366479 - RNA, 18 nt, Human
augguguagaacacuaau

SEQ ID NO: 1366480 - RNA, 16 nt, Human
augguguagaacacua

SEQ ID NO: 1366481 - RNA, 18 nt, Human
auggugucucuucuuuag

SEQ ID NO: 1366482 - RNA, 15 nt, Human
augguguucuccugc

SEQ ID NO: 1366483 - RNA, 13 nt, Human
auggugcugggag

SEQ ID NO: 1366484 - RNA, 16 nt, Human
auggugccuucauuug

SEQ ID NO: 1366485 - RNA, 14 nt, Human
auggugccuucauu

SEQ ID NO: 1366486 - RNA, 14 nt, Human
augguggagggcca

SEQ ID NO: 1366487 - RNA, 13 nt, Human
augguggagggcc

SEQ ID NO: 1366488 - RNA, 20 nt, Human
augguggacucgccuguaau

SEQ ID NO: 1366489 - RNA, 22 nt, Human
auggugccccaggaccagcuca

SEQ ID NO: 1366490 - RNA, 21 nt, Human
auggugccccaggaccagcuc

SEQ ID NO: 1366491 - RNA, 20 nt, Human
auggugccccaggaccagcu

SEQ ID NO: 1366492 - RNA, 19 nt, Human
auggugccccaggaccagc

SEQ ID NO: 1366493 - RNA, 18 nt, Human
auggugccccaggaccag

SEQ ID NO: 1366494 - RNA, 17 nt, Human
auggugccccaggacca

SEQ ID NO: 1366495 - RNA, 16 nt, Human
auggugccccaggacc

SEQ ID NO: 1366496 - RNA, 15 nt, Human
auggugccccaggac

SEQ ID NO: 1366497 - RNA, 14 nt, Human
auggugccccagga

SEQ ID NO: 1366498 - RNA, 19 nt, Human
auggugcauuacgugggca

SEQ ID NO: 1366499 - RNA, 17 nt, Human
augggugcccacagugu

SEQ ID NO: 1366500 - RNA, 15 nt, Human
auguaaaacauuuau

SEQ ID NO: 1366501 - RNA, 14 nt, Human
auguaaaacauuua

SEQ ID NO: 1366502 - RNA, 13 nt, Human
auguaaaacauuu

SEQ ID NO: 1366503 - RNA, 18 nt, Human
augguuuuugagauauua

SEQ ID NO: 1366504 - RNA, 17 nt, Human
augguuuuugagauauu

SEQ ID NO: 1366505 - RNA, 21 nt, Human
augguuuucuccaagagcuac

SEQ ID NO: 1366506 - RNA, 20 nt, Human
augguuuucuccaagagcua

SEQ ID NO: 1366507 - RNA, 14 nt, Human
augguuuucuccaa

SEQ ID NO: 1366508 - RNA, 15 nt, Human
augguuucagcacua

SEQ ID NO: 1366509 - RNA, 19 nt, Human
augguucuggcuguuugag

SEQ ID NO: 1366510 - RNA, 18 nt, Human
augguucuggcuguuuga

SEQ ID NO: 1366511 - RNA, 21 nt, Human
augguucccuugaugaagaag

SEQ ID NO: 1366512 - RNA, 22 nt, Human
augguuucagcacuagccaaac

SEQ ID NO: 1366513 - RNA, 14 nt, Human
augguuucagcacu

SEQ ID NO: 1366514 - RNA, 13 nt, Human
augguuucagcac

SEQ ID NO: 1366515 - RNA, 18 nt, Human
augguuguauuagauguu

SEQ ID NO: 1366516 - RNA, 21 nt, Human
augguuguauuagauguucuc

SEQ ID NO: 1366517 - RNA, 13 nt, Human
augguuguacaua

SEQ ID NO: 1366518 - RNA, 12 nt, Human
augguuguauua

SEQ ID NO: 1366519 - RNA, 13 nt, Human
augguuguauuag

SEQ ID NO: 1366520 - RNA, 14 nt, Human
augguuguauuaga

SEQ ID NO: 1366521 - RNA, 16 nt, Human
augguuguauuagaug

SEQ ID NO: 1366522 - RNA, 16 nt, Human
auguaaagcuugucug

SEQ ID NO: 1366523 - RNA, 14 nt, Human
auguaaagcuuguc

SEQ ID NO: 1366524 - RNA, 14 nt, Human
auguaaagccaugc

SEQ ID NO: 1366525 - RNA, 13 nt, Human
auguaaagccaug

SEQ ID NO: 1366526 - RNA, 17 nt, Human
auguaaagaucaauaaa

SEQ ID NO: 1366527 - RNA, 21 nt, Human
auguaaagauauuuuuaucuu

SEQ ID NO: 1366528 - RNA, 14 nt, Human
auguaaagauauuu

SEQ ID NO: 1366529 - RNA, 19 nt, Human
auguaaagacaaaaaacua

SEQ ID NO: 1366530 - RNA, 13 nt, Human
auguaaagacaaa

SEQ ID NO: 1366531 - RNA, 14 nt, Human
auguaaacugugca

SEQ ID NO: 1366532 - RNA, 23 nt, Human
auguaaaaucuugucauguguau

SEQ ID NO: 1366533 - RNA, 22 nt, Human
auguaaaaucuugucaugugua

SEQ ID NO: 1366534 - RNA, 21 nt, Human
auguaaaaucuugucaugugu

SEQ ID NO: 1366535 - RNA, 20 nt, Human
auguaaaaucuugucaugug

SEQ ID NO: 1366536 - RNA, 16 nt, Human
auguaaaaucuuguca

SEQ ID NO: 1366537 - RNA, 15 nt, Human
auguaaaaucuuguc

SEQ ID NO: 1366538 - RNA, 14 nt, Human
auguaaaaucuugu

SEQ ID NO: 1366539 - RNA, 13 nt, Human
auguaaaaucuug

SEQ ID NO: 1366540 - RNA, 12 nt, Human
auguaaaaucuu

SEQ ID NO: 1366541 - RNA, 21 nt, Human
auguaaaagguauuaaauuga

SEQ ID NO: 1366542 - RNA, 17 nt, Human
auguaaaagaaaaucca

SEQ ID NO: 1366543 - RNA, 21 nt, Human
auguaaaacauuuauuuugac

SEQ ID NO: 1366544 - RNA, 20 nt, Human
auguaaaacauuuauuuuga

SEQ ID NO: 1366545 - RNA, 14 nt, Human
auguacauuaauua

SEQ ID NO: 1366546 - RNA, 13 nt, Human
auguaaauuugua

SEQ ID NO: 1366547 - RNA, 12 nt, Human
auguaaauuugu

SEQ ID NO: 1366548 - RNA, 23 nt, Human
auguaaauuaucaggcaaauuug

SEQ ID NO: 1366549 - RNA, 14 nt, Human
auguaaauuaugua

SEQ ID NO: 1366550 - RNA, 17 nt, Human
auguaaauaauacauua

SEQ ID NO: 1366551 - RNA, 20 nt, Human
auguaaaggagucaaaacua

SEQ ID NO: 1366552 - RNA, 23 nt, Human
auguaaauauuuuaaagaauugu

SEQ ID NO: 1366553 - RNA, 21 nt, Human
auguaaauauuuuaaagaauu

SEQ ID NO: 1366554 - RNA, 20 nt, Human
auguaaauauuuuaaagaau

SEQ ID NO: 1366555 - RNA, 19 nt, Human
auguaaauauuuuaaagaa

SEQ ID NO: 1366556 - RNA, 15 nt, Human
auguaaauauuuuaa

SEQ ID NO: 1366557 - RNA, 13 nt, Human
auguaaauauuuu

SEQ ID NO: 1366558 - RNA, 14 nt, Human
uuucuuugaauaaa

SEQ ID NO: 1366559 - RNA, 15 nt, Human
uuucuuugaauaaau

SEQ ID NO: 1366560 - RNA, 13 nt, Human
uuucuuugaauaa

SEQ ID NO: 1366561 - RNA, 21 nt, Human
uuucuuugaaaaaaaauaaau

SEQ ID NO: 1366562 - RNA, 20 nt, Human
uuucuuugaaaaaaaauaaa

SEQ ID NO: 1366563 - RNA, 13 nt, Human
uuucuuucuuucu

SEQ ID NO: 1366564 - RNA, 14 nt, Human
uuucuguucuaguu

SEQ ID NO: 1366565 - RNA, 13 nt, Human
uuucuuucuuaga

SEQ ID NO: 1366566 - RNA, 15 nt, Human
uuucuuucuuagaaa

SEQ ID NO: 1366567 - RNA, 22 nt, Human
uuucuguuccaaauucaguuuc

SEQ ID NO: 1366568 - RNA, 20 nt, Human
uuucuguuccaaauucaguu

SEQ ID NO: 1366569 - RNA, 16 nt, Human
uuucuguuccaaauuc

SEQ ID NO: 1366570 - RNA, 15 nt, Human
uuucuguuccaaauu

SEQ ID NO: 1366571 - RNA, 14 nt, Human
uuucuguuccaaau

SEQ ID NO: 1366572 - RNA, 12 nt, Human
uuucuguuccaa

SEQ ID NO: 1366573 - RNA, 9 nt, Human
uuucuguuc

SEQ ID NO: 1366574 - RNA, 17 nt, Human
uuucugugccugaauau

SEQ ID NO: 1366575 - RNA, 20 nt, Human
uuucugguggucuguuggca

SEQ ID NO: 1366576 - RNA, 17 nt, Human
uuucugguggucuguug

SEQ ID NO: 1366577 - RNA, 15 nt, Human
uuucugguggucugu

SEQ ID NO: 1366578 - RNA, 16 nt, Human
uuucugggauaaguaa

SEQ ID NO: 1366579 - RNA, 23 nt, Human
uuucugggagacagaaaacaugu

SEQ ID NO: 1366580 - RNA, 23 nt, Human
uuucuguaauucagguuuuuccu

SEQ ID NO: 1366581 - RNA, 19 nt, Human
uuucuguaauucagguuuu

SEQ ID NO: 1366582 - RNA, 22 nt, Human
uuucuguaagaaaccuacugcc

SEQ ID NO: 1366583 - RNA, 22 nt, Human
uuucugguucuuguguuggcug

SEQ ID NO: 1366584 - RNA, 21 nt, Human
uuucugguuguuaugugauca

SEQ ID NO: 1366585 - RNA, 15 nt, Human
uuucugguucuaaca

SEQ ID NO: 1366586 - RNA, 15 nt, Human
uuucuguaccaguua

SEQ ID NO: 1366587 - RNA, 14 nt, Human
uuucuguaccaguu

SEQ ID NO: 1366588 - RNA, 17 nt, Human
uuucuguauauacuuuu

SEQ ID NO: 1366589 - RNA, 17 nt, Human
uuucuguauaaaugucu

SEQ ID NO: 1366590 - RNA, 15 nt, Human
uuucuggcuaugcau

SEQ ID NO: 1366591 - RNA, 16 nt, Human
uuucuggcuaugcauu

SEQ ID NO: 1366592 - RNA, 18 nt, Human
uuucuggcuaugcauuug

SEQ ID NO: 1366593 - RNA, 19 nt, Human
uuucuggcuaugcauuuga

SEQ ID NO: 1366594 - RNA, 21 nt, Human
uuucucccccauguucugucc

SEQ ID NO: 1366595 - RNA, 14 nt, Human
augggauucuggac

SEQ ID NO: 1366596 - RNA, 17 nt, Human
augggauucuggacagg

SEQ ID NO: 1366597 - RNA, 18 nt, Human
augggaugguggagggcc

SEQ ID NO: 1366598 - RNA, 23 nt, Human
augggggaaagcaaagcacagag

SEQ ID NO: 1366599 - RNA, 21 nt, Human
augggggaaagcaaagcacag

SEQ ID NO: 1366600 - RNA, 22 nt, Human
auggggccagauccagccuggg

SEQ ID NO: 1366601 - RNA, 21 nt, Human
auggggccagauccagccugg

SEQ ID NO: 1366602 - RNA, 19 nt, Human
auggggccagauccagccu

SEQ ID NO: 1366603 - RNA, 15 nt, Human
auggggccagaucca

SEQ ID NO: 1366604 - RNA, 14 nt, Human
auggggccagaucc

SEQ ID NO: 1366605 - RNA, 13 nt, Human
auggggccagauc

SEQ ID NO: 1366606 - RNA, 18 nt, Human
augggggagggggcagaa

SEQ ID NO: 1366607 - RNA, 21 nt, Human
augggggaacucagauccagg

SEQ ID NO: 1366608 - RNA, 19 nt, Human
augggggaacucagaucca

SEQ ID NO: 1366609 - RNA, 18 nt, Human
augggggaacucagaucc

SEQ ID NO: 1366610 - RNA, 14 nt, Human
augggggugcauuu

SEQ ID NO: 1366611 - RNA, 13 nt, Human
augggucacagga

SEQ ID NO: 1366612 - RNA, 14 nt, Human
augggucacaggaa

SEQ ID NO: 1366613 - RNA, 12 nt, Human
augggucacagg

SEQ ID NO: 1366614 - RNA, 17 nt, Human
auggguaggguaaauca

SEQ ID NO: 1366615 - RNA, 16 nt, Human
auggguaggguaaauc

SEQ ID NO: 1366616 - RNA, 12 nt, Human
auggguagggua

SEQ ID NO: 1366617 - RNA, 15 nt, Human
augggguggaaggca

SEQ ID NO: 1366618 - RNA, 17 nt, Human
auggggucuguaaaauc

SEQ ID NO: 1366619 - RNA, 18 nt, Human
auggggucuguaaaaucu

SEQ ID NO: 1366620 - RNA, 16 nt, Human
auggggucuguaaaau

SEQ ID NO: 1366621 - RNA, 14 nt, Human
auggggguaaaguu

SEQ ID NO: 1366622 - RNA, 14 nt, Human
auggggguuucacc

SEQ ID NO: 1366623 - RNA, 15 nt, Human
augggggugcauuug

SEQ ID NO: 1366624 - RNA, 19 nt, Human
uuugaaaacauguuuauuu

SEQ ID NO: 1366625 - RNA, 17 nt, Human
uuugaaaacauguuuau

SEQ ID NO: 1366626 - RNA, 20 nt, Human
uuugaaaaagcgaaaaaauc

SEQ ID NO: 1366627 - RNA, 23 nt, Human
uuugaaaaagcgaaaaaaucagg

SEQ ID NO: 1366628 - RNA, 15 nt, Human
uuugaaaaagcgaaa

SEQ ID NO: 1366629 - RNA, 16 nt, Human
uuugaaaaaaaauaaa

SEQ ID NO: 1366630 - RNA, 15 nt, Human
uuucuuuuuugauau

SEQ ID NO: 1366631 - RNA, 17 nt, Human
uuucuuugggaauauuu

SEQ ID NO: 1366632 - RNA, 19 nt, Human
uuucuuugggaauauuuga

SEQ ID NO: 1366633 - RNA, 21 nt, Human
uuucuuugggaauauuugaau

SEQ ID NO: 1366634 - RNA, 23 nt, Human
uuucuuugggaauauuugaaucu

SEQ ID NO: 1366635 - RNA, 21 nt, Human
auggggcauccucuuuuucca

SEQ ID NO: 1366636 - RNA, 23 nt, Human
auggggcaggccaccuggcucuc

SEQ ID NO: 1366637 - RNA, 17 nt, Human
auggggcaggccaccug

SEQ ID NO: 1366638 - RNA, 15 nt, Human
auggggcaggccacc

SEQ ID NO: 1366639 - RNA, 21 nt, Human
uuugaaauuauguaaauuaug

SEQ ID NO: 1366640 - RNA, 22 nt, Human
uuugaaauuaugugacauuuua

SEQ ID NO: 1366641 - RNA, 17 nt, Human
uuugaaauuauguaaau

SEQ ID NO: 1366642 - RNA, 16 nt, Human
uuugaaauuauguaaa

SEQ ID NO: 1366643 - RNA, 18 nt, Human
uuugaaauuaaccucuca

SEQ ID NO: 1366644 - RNA, 15 nt, Human
uuugaaauuauguga

SEQ ID NO: 1366645 - RNA, 17 nt, Human
uuugaaauuaugugaca

SEQ ID NO: 1366646 - RNA, 14 nt, Human
auugucucagagca

SEQ ID NO: 1366647 - RNA, 12 nt, Human
auugucucagag

SEQ ID NO: 1366648 - RNA, 17 nt, Human
auuguccuuuugcaaag

SEQ ID NO: 1366649 - RNA, 18 nt, Human
auuguccuuuugcaaaga

SEQ ID NO: 1366650 - RNA, 16 nt, Human
auuguccuuuugcaaa

SEQ ID NO: 1366651 - RNA, 15 nt, Human
auuguccuuuugcaa

SEQ ID NO: 1366652 - RNA, 13 nt, Human
auugucuagugaa

SEQ ID NO: 1366653 - RNA, 19 nt, Human
auuuaaagaacacccuaua

SEQ ID NO: 1366654 - RNA, 20 nt, Human
auuuaaacuauaagcaagaa

SEQ ID NO: 1366655 - RNA, 19 nt, Human
auuuaaacuauaagcaaga

SEQ ID NO: 1366656 - RNA, 12 nt, Human
auuuaaacuaua

SEQ ID NO: 1366657 - RNA, 24 nt, Human
auuuaaaccgcuaaaagaaacuuu

SEQ ID NO: 1366658 - RNA, 23 nt, Human
auuuaaaccgcuaaaagaaacuu

SEQ ID NO: 1366659 - RNA, 22 nt, Human
auuuaaaccgcuaaaagaaacu

SEQ ID NO: 1366660 - RNA, 21 nt, Human
auuuaaaccgcuaaaagaaac

SEQ ID NO: 1366661 - RNA, 20 nt, Human
auuuaaaccgcuaaaagaaa

SEQ ID NO: 1366662 - RNA, 19 nt, Human
auuuaaaccgcuaaaagaa

SEQ ID NO: 1366663 - RNA, 18 nt, Human
auuuaaaccgcuaaaaga

SEQ ID NO: 1366664 - RNA, 15 nt, Human
auuguuuuacaauag

SEQ ID NO: 1366665 - RNA, 17 nt, Human
auuguuuuacaauaguu

SEQ ID NO: 1366666 - RNA, 18 nt, Human
auuguuuuacaauaguuc

SEQ ID NO: 1366667 - RNA, 17 nt, Human
auuuaaaagauacaguu

SEQ ID NO: 1366668 - RNA, 14 nt, Human
auuuaaaagauaca

SEQ ID NO: 1366669 - RNA, 16 nt, Human
auuuaaaagauacagu

SEQ ID NO: 1366670 - RNA, 16 nt, Human
auuguggguguuaauu

SEQ ID NO: 1366671 - RNA, 13 nt, Human
auuguuuuacaau

SEQ ID NO: 1366672 - RNA, 14 nt, Human
auuguuuuacaaua

SEQ ID NO: 1366673 - RNA, 21 nt, Human
auugcuuuguauuguauauua

SEQ ID NO: 1366674 - RNA, 21 nt, Human
auugauuuccguuaaaauacc

SEQ ID NO: 1366675 - RNA, 16 nt, Human
auugauuguauuguug

SEQ ID NO: 1366676 - RNA, 13 nt, Human
auugauuguauug

SEQ ID NO: 1366677 - RNA, 18 nt, Human
auugacuuuuuauggcac

SEQ ID NO: 1366678 - RNA, 13 nt, Human
auugacuuuuuau

SEQ ID NO: 1366679 - RNA, 11 nt, Human
auuggauauuu

SEQ ID NO: 1366680 - RNA, 22 nt, Human
auuggauauuuuuuacuuuaga

SEQ ID NO: 1366681 - RNA, 14 nt, Human
auuggacccuucca

SEQ ID NO: 1366682 - RNA, 17 nt, Human
auuggacaaagaaccuu

SEQ ID NO: 1366683 - RNA, 18 nt, Human
auuggaauguucucagau

SEQ ID NO: 1366684 - RNA, 13 nt, Human
auuggaaacaagu

SEQ ID NO: 1366685 - RNA, 19 nt, Human
auuggacaguaaaauccac

SEQ ID NO: 1366686 - RNA, 18 nt, Human
auugguuuaaagaaagug

SEQ ID NO: 1366687 - RNA, 17 nt, Human
auugguuuaaagaaagu

SEQ ID NO: 1366688 - RNA, 15 nt, Human
auugguuuaaagaaa

SEQ ID NO: 1366689 - RNA, 19 nt, Human
auugguguuuuuuucuaug

SEQ ID NO: 1366690 - RNA, 22 nt, Human
auuggguuuuuggacuucuggg

SEQ ID NO: 1366691 - RNA, 19 nt, Human
auuggguuuuuggacuucu

SEQ ID NO: 1366692 - RNA, 21 nt, Human
auugggagcuugggaauggau

SEQ ID NO: 1366693 - RNA, 18 nt, Human
auugggagcuugggaaug

SEQ ID NO: 1366694 - RNA, 23 nt, Human
auuggauuuccuaauacugucau

SEQ ID NO: 1366695 - RNA, 22 nt, Human
auuggauuuccuaauacuguca

SEQ ID NO: 1366696 - RNA, 15 nt, Human
auuggauuuccuaau

SEQ ID NO: 1366697 - RNA, 14 nt, Human
auuggauuuccuaa

SEQ ID NO: 1366698 - RNA, 20 nt, Human
auuggcaccuaauccaggca

SEQ ID NO: 1366699 - RNA, 18 nt, Human
auuggcaccgaagcccag

SEQ ID NO: 1366700 - RNA, 19 nt, Human
auuggcaccgaagcccaga

SEQ ID NO: 1366701 - RNA, 19 nt, Human
auuucccaggacccugaag

SEQ ID NO: 1366702 - RNA, 16 nt, Human
auuucccaggacccug

SEQ ID NO: 1366703 - RNA, 14 nt, Human
auuucccaggaccc

SEQ ID NO: 1366704 - RNA, 13 nt, Human
auuucccaggacc

SEQ ID NO: 1366705 - RNA, 12 nt, Human
auuucccaggac

SEQ ID NO: 1366706 - RNA, 19 nt, Human
auuucccaacacaaagauu

SEQ ID NO: 1366707 - RNA, 18 nt, Human
auuucccaacacaaagau

SEQ ID NO: 1366708 - RNA, 20 nt, Human
auuuccaacucgaaucugug

SEQ ID NO: 1366709 - RNA, 19 nt, Human
auuuccaacucgaaucugu

SEQ ID NO: 1366710 - RNA, 16 nt, Human
auuuauuuaaaauagc

SEQ ID NO: 1366711 - RNA, 14 nt, Human
auuuauuuaaaaua

SEQ ID NO: 1366712 - RNA, 21 nt, Human
auuuauuugaaugauuuuucu

SEQ ID NO: 1366713 - RNA, 13 nt, Human
auuuauuugaaug

SEQ ID NO: 1366714 - RNA, 15 nt, Human
auuuauuuccucccu

SEQ ID NO: 1366715 - RNA, 17 nt, Human
auuuauuuccucccucu

SEQ ID NO: 1366716 - RNA, 12 nt, Human
auuuauuuccuc

SEQ ID NO: 1366717 - RNA, 13 nt, Human
auuuauuuccuag

SEQ ID NO: 1366718 - RNA, 18 nt, Human
auuuauuuccuaguucug

SEQ ID NO: 1366719 - RNA, 23 nt, Human
auuuauuuccuaguucuguagaa

SEQ ID NO: 1366720 - RNA, 16 nt, Human
auuuauuugaaugauu

SEQ ID NO: 1366721 - RNA, 23 nt, Human
auuucauuuuucaauagcacaua

SEQ ID NO: 1366722 - RNA, 17 nt, Human
auuuauuuuaauaaugu

SEQ ID NO: 1366723 - RNA, 14 nt, Human
auuuauuuuaauaa

SEQ ID NO: 1366724 - RNA, 14 nt, Human
auuucuucuuacca

SEQ ID NO: 1366725 - RNA, 23 nt, Human
auuucuuccuaccaagucaaacu

SEQ ID NO: 1366726 - RNA, 16 nt, Human
auuugaaaauuuugau

SEQ ID NO: 1366727 - RNA, 20 nt, Human
auuucuuccuaccaagucaa

SEQ ID NO: 1366728 - RNA, 19 nt, Human
auuucuuccuaccaaguca

SEQ ID NO: 1366729 - RNA, 17 nt, Human
auuucuauagccaaaaa

SEQ ID NO: 1366730 - RNA, 20 nt, Human
auuucuugagguaaaagcau

SEQ ID NO: 1366731 - RNA, 18 nt, Human
auuugaaacacuuugcau

SEQ ID NO: 1366732 - RNA, 19 nt, Human
auuucuagguaggaaaugu

SEQ ID NO: 1366733 - RNA, 20 nt, Human
auuucuagguaggaaaugug

SEQ ID NO: 1366734 - RNA, 11 nt, Human
auuucuaggua

SEQ ID NO: 1366735 - RNA, 23 nt, Human
auuucuaggacugaauuaugaaa

SEQ ID NO: 1366736 - RNA, 20 nt, Human
auuucuaggacugaauuaug

SEQ ID NO: 1366737 - RNA, 16 nt, Human
auuucccuuccuuccu

SEQ ID NO: 1366738 - RNA, 20 nt, Human
auuucccuuccuuccucucc

SEQ ID NO: 1366739 - RNA, 14 nt, Human
auuucccucucuca

SEQ ID NO: 1366740 - RNA, 18 nt, Human
auuucuaggacugaauua

SEQ ID NO: 1366741 - RNA, 17 nt, Human
auuucuaggacugaauu

SEQ ID NO: 1366742 - RNA, 23 nt, Human
auuugugaagguggaaauaaacu

SEQ ID NO: 1366743 - RNA, 16 nt, Human
auuuuaaaagaaugau

SEQ ID NO: 1366744 - RNA, 18 nt, Human
auuugugaagguggaaau

SEQ ID NO: 1366745 - RNA, 21 nt, Human
auuugugaagguggaaauaaa

SEQ ID NO: 1366746 - RNA, 22 nt, Human
auuuuaaccuaugauauuuucu

SEQ ID NO: 1366747 - RNA, 13 nt, Human
auuuuaaaaucag

SEQ ID NO: 1366748 - RNA, 23 nt, Human
auuuuaaaauagcguucuuguaa

SEQ ID NO: 1366749 - RNA, 22 nt, Human
auuuuaaaauagcguucuugua

SEQ ID NO: 1366750 - RNA, 20 nt, Human
auuuuaaaauagcguucuug

SEQ ID NO: 1366751 - RNA, 18 nt, Human
auuuuaaaauagcguucu

SEQ ID NO: 1366752 - RNA, 23 nt, Human
auuuuaaaagaaugauuaugaau

SEQ ID NO: 1366753 - RNA, 18 nt, Human
auuugggaagugaagacu

SEQ ID NO: 1366754 - RNA, 14 nt, Human
auuugggaagugaa

SEQ ID NO: 1366755 - RNA, 19 nt, Human
auuuggcuugacaaaggca

SEQ ID NO: 1366756 - RNA, 16 nt, Human
auuugacuuuucugua

SEQ ID NO: 1366757 - RNA, 15 nt, Human
auuugacuuuucugu

SEQ ID NO: 1366758 - RNA, 23 nt, Human
auuugggccugcuccagaccuga

SEQ ID NO: 1366759 - RNA, 22 nt, Human
auuugggccugcuccagaccug

SEQ ID NO: 1366760 - RNA, 21 nt, Human
auuugggccugcuccagaccu

SEQ ID NO: 1366761 - RNA, 19 nt, Human
auuugggccugcuccagac

SEQ ID NO: 1366762 - RNA, 19 nt, Human
auuugggagacaugugaca

SEQ ID NO: 1366763 - RNA, 17 nt, Human
auuugggagacauguga

SEQ ID NO: 1366764 - RNA, 17 nt, Human
auuuguaaaucugccac

SEQ ID NO: 1366765 - RNA, 16 nt, Human
auuuguaaaucugcca

SEQ ID NO: 1366766 - RNA, 12 nt, Human
auuuguaaaucu

SEQ ID NO: 1366767 - RNA, 23 nt, Human
auuuguaacccacugagaggaca

SEQ ID NO: 1366768 - RNA, 19 nt, Human
auuugucaugcugggauuu

SEQ ID NO: 1366769 - RNA, 13 nt, Human
auuugucaacaaa

SEQ ID NO: 1366770 - RNA, 15 nt, Human
auuugucaacaaagu

SEQ ID NO: 1366771 - RNA, 15 nt, Human
auuuguauaaaauaa

SEQ ID NO: 1366772 - RNA, 14 nt, Human
auuuguauaaaaua

SEQ ID NO: 1366773 - RNA, 22 nt, Human
auuuguaguguuggagaagaac

SEQ ID NO: 1366774 - RNA, 14 nt, Human
auuuuggaauuugc

SEQ ID NO: 1366775 - RNA, 19 nt, Human
auuuuguauuguuucaauu

SEQ ID NO: 1366776 - RNA, 16 nt, Human
auuuuguaucuugaug

SEQ ID NO: 1366777 - RNA, 23 nt, Human
auuuuguaauguaucaaauacau

SEQ ID NO: 1366778 - RNA, 20 nt, Human
auuuuguaauguaucaaaua

SEQ ID NO: 1366779 - RNA, 22 nt, Human
auuuuguaauaauaaagaauag

SEQ ID NO: 1366780 - RNA, 19 nt, Human
auuuuguaauaauaaagaa

SEQ ID NO: 1366781 - RNA, 14 nt, Human
auuuuguaauaaua

SEQ ID NO: 1366782 - RNA, 12 nt, Human
auuuuguaaguu

SEQ ID NO: 1366783 - RNA, 19 nt, Human
auuuuguaacgaagacaca

SEQ ID NO: 1366784 - RNA, 18 nt, Human
auuuuguaacgaagacac

SEQ ID NO: 1366785 - RNA, 20 nt, Human
auuuuguaaacucaaaauau

SEQ ID NO: 1366786 - RNA, 11 nt, Human
auuuuggaauu

SEQ ID NO: 1366787 - RNA, 12 nt, Human
auuuuggaauuu

SEQ ID NO: 1366788 - RNA, 12 nt, Human
auuuugcuuugu

SEQ ID NO: 1366789 - RNA, 18 nt, Human
auuuugcuuugugauuuu

SEQ ID NO: 1366790 - RNA, 20 nt, Human
auuuugcuuugugauuuuug

SEQ ID NO: 1366791 - RNA, 20 nt, Human
auuuuguguaagaaauacag

SEQ ID NO: 1366792 - RNA, 18 nt, Human
auuuuguguaagaaauac

SEQ ID NO: 1366793 - RNA, 17 nt, Human
auuuuguguaagaaaua

SEQ ID NO: 1366794 - RNA, 16 nt, Human
auuuuguguaagaaau

SEQ ID NO: 1366795 - RNA, 23 nt, Human
auuuugugguuuucgagauuauc

SEQ ID NO: 1366796 - RNA, 17 nt, Human
auuuugugaugcaaaua

SEQ ID NO: 1366797 - RNA, 21 nt, Human
auuuuguuggcauagcucugg

SEQ ID NO: 1366798 - RNA, 15 nt, Human
auuuuguuggcauag

SEQ ID NO: 1366799 - RNA, 23 nt, Human
auuuuguugcuguuuugauuugu

SEQ ID NO: 1366800 - RNA, 19 nt, Human
auuuuguugcuguuuugau

SEQ ID NO: 1366801 - RNA, 12 nt, Human
auuuuguuuaca

SEQ ID NO: 1366802 - RNA, 11 nt, Human
auuuuguuuac

SEQ ID NO: 1366803 - RNA, 16 nt, Human
auuuuguuucagugca

SEQ ID NO: 1366804 - RNA, 18 nt, Human
auuuugugaugcaaauaa

SEQ ID NO: 1366805 - RNA, 17 nt, Human
auuuuguguuuaggaac

SEQ ID NO: 1366806 - RNA, 18 nt, Human
auuuugcaaggugcauuu

SEQ ID NO: 1366807 - RNA, 21 nt, Human
auuuugcaaucccuuaauauc

SEQ ID NO: 1366808 - RNA, 21 nt, Human
auuuugcaaagauuuaaucug

SEQ ID NO: 1366809 - RNA, 16 nt, Human
auuuugcaaagauuua

SEQ ID NO: 1366810 - RNA, 13 nt, Human
auuuugcaaagau

SEQ ID NO: 1366811 - RNA, 19 nt, Human
auuuugccaagggcauaaa

SEQ ID NO: 1366812 - RNA, 14 nt, Human
auuuugcuggaaua

SEQ ID NO: 1366813 - RNA, 20 nt, Human
auuuugccaagggcauaaau

SEQ ID NO: 1366814 - RNA, 18 nt, Human
auuuugauguaaagaugu

SEQ ID NO: 1366815 - RNA, 17 nt, Human
auuuugauguaaagaug

SEQ ID NO: 1366816 - RNA, 15 nt, Human
auuuugauguuuuaa

SEQ ID NO: 1366817 - RNA, 17 nt, Human
auuuugauguuuuaagg

SEQ ID NO: 1366818 - RNA, 19 nt, Human
auuuuccuguugucaagaa

SEQ ID NO: 1366819 - RNA, 23 nt, Human
auuuuccuguccucuuucagcuc

SEQ ID NO: 1366820 - RNA, 22 nt, Human
auuuuccuguccucuuucagcu

SEQ ID NO: 1366821 - RNA, 21 nt, Human
auuuuccuguccucuuucagc

SEQ ID NO: 1366822 - RNA, 19 nt, Human
auuuuccuguccucuuuca

SEQ ID NO: 1366823 - RNA, 16 nt, Human
auuuuccuguccucuu

SEQ ID NO: 1366824 - RNA, 23 nt, Human
auuuuccuggugccaauuucaag

SEQ ID NO: 1366825 - RNA, 22 nt, Human
auuuuccuggugccaauuucaa

SEQ ID NO: 1366826 - RNA, 18 nt, Human
auuuuccuggugccaauu

SEQ ID NO: 1366827 - RNA, 14 nt, Human
auuuucuauaauuu

SEQ ID NO: 1366828 - RNA, 15 nt, Human
auuuucuauaauuua

SEQ ID NO: 1366829 - RNA, 12 nt, Human
auuuuaauaaug

SEQ ID NO: 1366830 - RNA, 18 nt, Human
auuuuaauaaaaauaauu

SEQ ID NO: 1366831 - RNA, 15 nt, Human
auuuuaauaaaaaua

SEQ ID NO: 1366832 - RNA, 15 nt, Human
auuuuaauaaacacu

SEQ ID NO: 1366833 - RNA, 16 nt, Human
auuuuaauaaacacuc

SEQ ID NO: 1366834 - RNA, 17 nt, Human
auuuuaauaaacacucu

SEQ ID NO: 1366835 - RNA, 18 nt, Human
auuuuuuaaaaagcaaaa

SEQ ID NO: 1366836 - RNA, 16 nt, Human
auuuuuuaaaaagcaa

SEQ ID NO: 1366837 - RNA, 15 nt, Human
auuuuuuaaaaagca

SEQ ID NO: 1366838 - RNA, 20 nt, Human
auuuuuuaaaaaagcuuaaa

SEQ ID NO: 1366839 - RNA, 19 nt, Human
auuuuuuaaaaaagcuuaa

SEQ ID NO: 1366840 - RNA, 18 nt, Human
auuuuuuaaaaaagcuua

SEQ ID NO: 1366841 - RNA, 17 nt, Human
auuuuuuaaaaaagcuu

SEQ ID NO: 1366842 - RNA, 14 nt, Human
auuuuuuaaaaaag

SEQ ID NO: 1366843 - RNA, 21 nt, Human
auuuuuguuuuguuuuuacaa

SEQ ID NO: 1366844 - RNA, 13 nt, Human
auuuuuuaaauuc

SEQ ID NO: 1366845 - RNA, 13 nt, Human
auuuuuuaaaugc

SEQ ID NO: 1366846 - RNA, 14 nt, Human
auuuuuuaaaugca

SEQ ID NO: 1366847 - RNA, 12 nt, Human
auuuuuguaauu

SEQ ID NO: 1366848 - RNA, 15 nt, Human
auuuuuguaguagcg

SEQ ID NO: 1366849 - RNA, 22 nt, Human
auuuuugugauuuugugauuga

SEQ ID NO: 1366850 - RNA, 23 nt, Human
auuuuuuccuucaaaguuuaaua

SEQ ID NO: 1366851 - RNA, 21 nt, Human
auuuuuuccuucaaaguuuaa

SEQ ID NO: 1366852 - RNA, 20 nt, Human
auuuuuuccuucaaaguuua

SEQ ID NO: 1366853 - RNA, 14 nt, Human
auuuuuuccaaaau

SEQ ID NO: 1366854 - RNA, 23 nt, Human
auuuuuuccaaaaucucccauuu

SEQ ID NO: 1366855 - RNA, 13 nt, Human
auuuuuuccaaaa

SEQ ID NO: 1366856 - RNA, 12 nt, Human
auuuuuuccaaa

SEQ ID NO: 1366857 - RNA, 22 nt, Human
auuuuuucaguauuauauguac

SEQ ID NO: 1366858 - RNA, 15 nt, Human
auuuuuucaguauua

SEQ ID NO: 1366859 - RNA, 21 nt, Human
auuuuuuaucaugcauguccu

SEQ ID NO: 1366860 - RNA, 16 nt, Human
auuuuuuaucaugcau

SEQ ID NO: 1366861 - RNA, 14 nt, Human
auuuuuuaauaauu

SEQ ID NO: 1366862 - RNA, 21 nt, Human
auuuuuuaagugaaaauauag

SEQ ID NO: 1366863 - RNA, 17 nt, Human
auuuuuuauaaaauaca

SEQ ID NO: 1366864 - RNA, 14 nt, Human
auuuuuuaggaaau

SEQ ID NO: 1366865 - RNA, 13 nt, Human
auuuuuuaggaaa

SEQ ID NO: 1366866 - RNA, 20 nt, Human
auuuuuuaauuauuauuuau

SEQ ID NO: 1366867 - RNA, 15 nt, Human
auuuuuuaauuauua

SEQ ID NO: 1366868 - RNA, 17 nt, Human
auuuuuuguugacauua

SEQ ID NO: 1366869 - RNA, 21 nt, Human
auuuuuuguugacauuagucu

SEQ ID NO: 1366870 - RNA, 16 nt, Human
auuuuuuguugacauu

SEQ ID NO: 1366871 - RNA, 14 nt, Human
auuuuuuguugaca

SEQ ID NO: 1366872 - RNA, 12 nt, Human
auuuuuuguuga

SEQ ID NO: 1366873 - RNA, 16 nt, Human
auuuuuuguauaauug

SEQ ID NO: 1366874 - RNA, 15 nt, Human
auuuuuuguauaauu

SEQ ID NO: 1366875 - RNA, 14 nt, Human
auuuuuuguauaau

SEQ ID NO: 1366876 - RNA, 22 nt, Human
auuuuuugggcagcaauuuaaa

SEQ ID NO: 1366877 - RNA, 23 nt, Human
auuuuuucucuaggaaauauuua

SEQ ID NO: 1366878 - RNA, 20 nt, Human
auuuuuucucuaggaaauau

SEQ ID NO: 1366879 - RNA, 16 nt, Human
auuuuuugaaaagcag

SEQ ID NO: 1366880 - RNA, 19 nt, Human
auuuuuugaaaagcagaca

SEQ ID NO: 1366881 - RNA, 18 nt, Human
auuuuuggagguuuauua

SEQ ID NO: 1366882 - RNA, 18 nt, Human
auuuuuggucauuguaau

SEQ ID NO: 1366883 - RNA, 19 nt, Human
auuuuuggcagucugaauu

SEQ ID NO: 1366884 - RNA, 21 nt, Human
auuuuuggggggaguaaagaa

SEQ ID NO: 1366885 - RNA, 19 nt, Human
auuuuuggagguuuauuac

SEQ ID NO: 1366886 - RNA, 17 nt, Human
auuuuuggagguuuauu

SEQ ID NO: 1366887 - RNA, 23 nt, Human
auuuuuggaagaggacuccuuaa

SEQ ID NO: 1366888 - RNA, 15 nt, Human
auuuuugcugagacu

SEQ ID NO: 1366889 - RNA, 21 nt, Human
auuuuugccucuuccagucuu

SEQ ID NO: 1366890 - RNA, 18 nt, Human
auuuuugccucuuccagu

SEQ ID NO: 1366891 - RNA, 12 nt, Human
auuuuugccucu

SEQ ID NO: 1366892 - RNA, 19 nt, Human
auuuuugauacuaagcauu

SEQ ID NO: 1366893 - RNA, 21 nt, Human
auuuuugauacuaagcauuga

SEQ ID NO: 1366894 - RNA, 21 nt, Human
auuuuugauaaagccucaagg

SEQ ID NO: 1366895 - RNA, 15 nt, Human
auuuuugacaguguu

SEQ ID NO: 1366896 - RNA, 16 nt, Human
auuuuucuuuacaaaa

SEQ ID NO: 1366897 - RNA, 15 nt, Human
auuuuucuuuacaaa

SEQ ID NO: 1366898 - RNA, 14 nt, Human
auuuuucuuuacaa

SEQ ID NO: 1366899 - RNA, 13 nt, Human
auuuuucuuuaca

SEQ ID NO: 1366900 - RNA, 16 nt, Human
auuuuucuuuaacugc

SEQ ID NO: 1366901 - RNA, 15 nt, Human
auuuuucuuuaacug

SEQ ID NO: 1366902 - RNA, 14 nt, Human
auuuuucuucuuga

SEQ ID NO: 1366903 - RNA, 22 nt, Human
auuuuucuuagggaaggauaca

SEQ ID NO: 1366904 - RNA, 13 nt, Human
auuuuuccaacua

SEQ ID NO: 1366905 - RNA, 18 nt, Human
auuuuucaugauaaugaa

SEQ ID NO: 1366906 - RNA, 20 nt, Human
auuuuucaauagcacauaug

SEQ ID NO: 1366907 - RNA, 15 nt, Human
auuuuucacuucaaa

SEQ ID NO: 1366908 - RNA, 19 nt, Human
auuuuucuaacuacaaagg

SEQ ID NO: 1366909 - RNA, 12 nt, Human
auuuuucuaacu

SEQ ID NO: 1366910 - RNA, 10 nt, Human
auuuuuccua

SEQ ID NO: 1366911 - RNA, 21 nt, Human
auuuuuccaacuacuaauaga

SEQ ID NO: 1366912 - RNA, 21 nt, Human
auuuuucuuagggaaggauac

SEQ ID NO: 1366913 - RNA, 22 nt, Human
auuuuucaauagcacauaugga

SEQ ID NO: 1366914 - RNA, 21 nt, Human
auuuuuauuuuugcugagacu

SEQ ID NO: 1366915 - RNA, 18 nt, Human
auuuuguuuuuccuucca

SEQ ID NO: 1366916 - RNA, 20 nt, Human
auuuuguuugguauuguauu

SEQ ID NO: 1366917 - RNA, 21 nt, Human
auuuuguuugguauuguauuu

SEQ ID NO: 1366918 - RNA, 22 nt, Human
auuuuguuugguauuguauuua

SEQ ID NO: 1366919 - RNA, 14 nt, Human
auuuuguuugguau

SEQ ID NO: 1366920 - RNA, 17 nt, Human
auuuuguuugguauugu

SEQ ID NO: 1366921 - RNA, 18 nt, Human
auuuuguuugguauugua

SEQ ID NO: 1366922 - RNA, 19 nt, Human
auuuuguuugguauuguau

SEQ ID NO: 1366923 - RNA, 21 nt, Human
auucucauuggaaauuuagca

SEQ ID NO: 1366924 - RNA, 11 nt, Human
auucucauugg

SEQ ID NO: 1366925 - RNA, 18 nt, Human
auucucauuaaaagaaua

SEQ ID NO: 1366926 - RNA, 19 nt, Human
auucucauuaaaagaauau

SEQ ID NO: 1366927 - RNA, 12 nt, Human
auucucauuaaa

SEQ ID NO: 1366928 - RNA, 16 nt, Human
auucuccacagcaacc

SEQ ID NO: 1366929 - RNA, 14 nt, Human
auucuccacagcaa

SEQ ID NO: 1366930 - RNA, 13 nt, Human
auucuccacagca

SEQ ID NO: 1366931 - RNA, 23 nt, Human
auucucauuggaaauuuagcauu

SEQ ID NO: 1366932 - RNA, 22 nt, Human
auucucauuggaaauuuagcau

SEQ ID NO: 1366933 - RNA, 17 nt, Human
auucugccucucuagga

SEQ ID NO: 1366934 - RNA, 16 nt, Human
auucugccucucuagg

SEQ ID NO: 1366935 - RNA, 15 nt, Human
auucugccucucuag

SEQ ID NO: 1366936 - RNA, 16 nt, Human
auucugccuuugccag

SEQ ID NO: 1366937 - RNA, 19 nt, Human
auucugccuuugccaggug

SEQ ID NO: 1366938 - RNA, 23 nt, Human
auucugguuccagggucccucug

SEQ ID NO: 1366939 - RNA, 22 nt, Human
auugacuuuccccaccagaugc

SEQ ID NO: 1366940 - RNA, 14 nt, Human
auugacuuguauau

SEQ ID NO: 1366941 - RNA, 14 nt, Human
auugaccuggaugg

SEQ ID NO: 1366942 - RNA, 21 nt, Human
auugacgacaagugcugaaca

SEQ ID NO: 1366943 - RNA, 22 nt, Human
auugacgacaagugcugaacag

SEQ ID NO: 1366944 - RNA, 18 nt, Human
auugacacaguaccauuu

SEQ ID NO: 1366945 - RNA, 17 nt, Human
auugacacagaaaaugu

SEQ ID NO: 1366946 - RNA, 17 nt, Human
auugacaacaguuacau

SEQ ID NO: 1366947 - RNA, 18 nt, Human
auugaaccuuugugcccu

SEQ ID NO: 1366948 - RNA, 23 nt, Human
auugaaccuuugugcccuaucac

SEQ ID NO: 1366949 - RNA, 14 nt, Human
auugacacagaaaa

SEQ ID NO: 1366950 - RNA, 12 nt, Human
auugacacagaa

SEQ ID NO: 1366951 - RNA, 17 nt, Human
auugacaacacccauuu

SEQ ID NO: 1366952 - RNA, 14 nt, Human
auugaaauguaagg

SEQ ID NO: 1366953 - RNA, 18 nt, Human
auugaaaaaauagagccu

SEQ ID NO: 1366954 - RNA, 14 nt, Human
auugaaaaaauaga

SEQ ID NO: 1366955 - RNA, 22 nt, Human
auugaaaaaauagagccugagg

SEQ ID NO: 1366956 - RNA, 19 nt, Human
auugaaaaaauagagccug

SEQ ID NO: 1366957 - RNA, 23 nt, Human
auucuuccaucugauugugaugu

SEQ ID NO: 1366958 - RNA, 15 nt, Human
auucuuccaucugau

SEQ ID NO: 1366959 - RNA, 14 nt, Human
auucuuccaucuga

SEQ ID NO: 1366960 - RNA, 13 nt, Human
auucuuccaucug

SEQ ID NO: 1366961 - RNA, 19 nt, Human
auucuuccuaguuuucucc

SEQ ID NO: 1366962 - RNA, 17 nt, Human
auucuuccuaguuuucu

SEQ ID NO: 1366963 - RNA, 21 nt, Human
auucuucccuaucuuugccac

SEQ ID NO: 1366964 - RNA, 12 nt, Human
auucuuccuagu

SEQ ID NO: 1366965 - RNA, 20 nt, Human
auucuucccuaucuuugcca

SEQ ID NO: 1366966 - RNA, 20 nt, Human
auuaguuuccuuuuuaauau

SEQ ID NO: 1366967 - RNA, 18 nt, Human
auuaguuuccuuuuuaau

SEQ ID NO: 1366968 - RNA, 17 nt, Human
auuaguuuccuuuuuaa

SEQ ID NO: 1366969 - RNA, 12 nt, Human
auuaguuuccuu

SEQ ID NO: 1366970 - RNA, 12 nt, Human
auuaguuauaua

SEQ ID NO: 1366971 - RNA, 18 nt, Human
auuagugcuaagugugaa

SEQ ID NO: 1366972 - RNA, 20 nt, Human
auuagugcuaagugugaacu

SEQ ID NO: 1366973 - RNA, 22 nt, Human
auuagugcuaagugugaacugg

SEQ ID NO: 1366974 - RNA, 15 nt, Human
auuauauuuacaaau

SEQ ID NO: 1366975 - RNA, 20 nt, Human
auuauauuauuaguuuugau

SEQ ID NO: 1366976 - RNA, 14 nt, Human
auuauauuaugaag

SEQ ID NO: 1366977 - RNA, 16 nt, Human
auuauaccaaaauguu

SEQ ID NO: 1366978 - RNA, 15 nt, Human
auuauaccaaaaugu

SEQ ID NO: 1366979 - RNA, 20 nt, Human
auuauaccaaaauguugcug

SEQ ID NO: 1366980 - RNA, 19 nt, Human
auuauaccaaaauguugcu

SEQ ID NO: 1366981 - RNA, 18 nt, Human
auuauaccaaaauguugc

SEQ ID NO: 1366982 - RNA, 14 nt, Human
auuauacuuguaau

SEQ ID NO: 1366983 - RNA, 14 nt, Human
auuauacgcuggca

SEQ ID NO: 1366984 - RNA, 18 nt, Human
auuauacuuguaauuaug

SEQ ID NO: 1366985 - RNA, 17 nt, Human
auuauauguuguaagca

SEQ ID NO: 1366986 - RNA, 17 nt, Human
auuauacuuguaauuau

SEQ ID NO: 1366987 - RNA, 16 nt, Human
auuauacuuguaauua

SEQ ID NO: 1366988 - RNA, 18 nt, Human
auuauauguucagauuau

SEQ ID NO: 1366989 - RNA, 14 nt, Human
auuaucuaauuuau

SEQ ID NO: 1366990 - RNA, 13 nt, Human
auuaucuaauuua

SEQ ID NO: 1366991 - RNA, 21 nt, Human
auuauguuaaaacugggacag

SEQ ID NO: 1366992 - RNA, 14 nt, Human
auuaucuagauacu

SEQ ID NO: 1366993 - RNA, 18 nt, Human
auuaucuagauacuguau

SEQ ID NO: 1366994 - RNA, 22 nt, Human
auuauauuucuauuuuauuaug

SEQ ID NO: 1366995 - RNA, 23 nt, Human
auuauauuucuauuuuauuauga

SEQ ID NO: 1366996 - RNA, 22 nt, Human
auuauauguacccucugaaaua

SEQ ID NO: 1366997 - RNA, 20 nt, Human
auuaucguuuucuuaaagug

SEQ ID NO: 1366998 - RNA, 18 nt, Human
auuauauuuauuacugua

SEQ ID NO: 1366999 - RNA, 15 nt, Human
auuauauuuauuacu

SEQ ID NO: 1367000 - RNA, 17 nt, Human
auuauuacuuguaaaua

SEQ ID NO: 1367001 - RNA, 16 nt, Human
auuauuacuuguaaau

SEQ ID NO: 1367002 - RNA, 14 nt, Human
auuauuacuuguaa

SEQ ID NO: 1367003 - RNA, 13 nt, Human
auuauuacuugua

SEQ ID NO: 1367004 - RNA, 21 nt, Human
auuauuacuuauuuuugacag

SEQ ID NO: 1367005 - RNA, 20 nt, Human
auuauuacuuauuuuugaca

SEQ ID NO: 1367006 - RNA, 12 nt, Human
auuauguuaaac

SEQ ID NO: 1367007 - RNA, 13 nt, Human
auuauguuaaacu

SEQ ID NO: 1367008 - RNA, 14 nt, Human
auuauguuaaacua

SEQ ID NO: 1367009 - RNA, 22 nt, Human
auuauguuaaacuagcauaucu

SEQ ID NO: 1367010 - RNA, 23 nt, Human
auuauguuaaacuagcauaucug

SEQ ID NO: 1367011 - RNA, 22 nt, Human
auuauuaguuuugauuuaaugu

SEQ ID NO: 1367012 - RNA, 17 nt, Human
auuauuagaaucaaaca

SEQ ID NO: 1367013 - RNA, 23 nt, Human
auuauuagaaucaaacauuuuga

SEQ ID NO: 1367014 - RNA, 15 nt, Human
auuauuacuuuugcu

SEQ ID NO: 1367015 - RNA, 14 nt, Human
auuauuacuuuugc

SEQ ID NO: 1367016 - RNA, 22 nt, Human
auuauuacuuguaaauauaaag

SEQ ID NO: 1367017 - RNA, 23 nt, Human
auuauuacuuguaaauauaaaga

SEQ ID NO: 1367018 - RNA, 20 nt, Human
auuauuacuuguaaauauaa

SEQ ID NO: 1367019 - RNA, 19 nt, Human
auuauuacuuguaaauaua

SEQ ID NO: 1367020 - RNA, 15 nt, Human
auuauuauucuucau

SEQ ID NO: 1367021 - RNA, 15 nt, Human
auuauuauuuggccc

SEQ ID NO: 1367022 - RNA, 16 nt, Human
auucacaucucauuuu

SEQ ID NO: 1367023 - RNA, 15 nt, Human
auucacaucucauuu

SEQ ID NO: 1367024 - RNA, 18 nt, Human
auucacaucgcagauucu

SEQ ID NO: 1367025 - RNA, 20 nt, Human
auucacaucuaaccucaucu

SEQ ID NO: 1367026 - RNA, 17 nt, Human
auucacaucuaaccuca

SEQ ID NO: 1367027 - RNA, 23 nt, Human
auucacaguucuuugggccagac

SEQ ID NO: 1367028 - RNA, 12 nt, Human
auuauuuuguga

SEQ ID NO: 1367029 - RNA, 12 nt, Human
auuauuuugaug

SEQ ID NO: 1367030 - RNA, 11 nt, Human
auuauuugcau

SEQ ID NO: 1367031 - RNA, 15 nt, Human
auuauuauuuguguu

SEQ ID NO: 1367032 - RNA, 16 nt, Human
auuauuauucuucaua

SEQ ID NO: 1367033 - RNA, 17 nt, Human
auucaggaaaaggccug

SEQ ID NO: 1367034 - RNA, 20 nt, Human
auucagacagaugaggcuuu

SEQ ID NO: 1367035 - RNA, 14 nt, Human
auucagacagauga

SEQ ID NO: 1367036 - RNA, 21 nt, Human
auucaggaaaaggccuggggu

SEQ ID NO: 1367037 - RNA, 19 nt, Human
auucaggaaaaggccuggg

SEQ ID NO: 1367038 - RNA, 18 nt, Human
auucaggaaaaggccugg

SEQ ID NO: 1367039 - RNA, 13 nt, Human
auucagacagaug

SEQ ID NO: 1367040 - RNA, 18 nt, Human
auucagaagaaaaagaag

SEQ ID NO: 1367041 - RNA, 17 nt, Human
auucagaagaaaaagaa

SEQ ID NO: 1367042 - RNA, 16 nt, Human
auucagaagaaaaaga

SEQ ID NO: 1367043 - RNA, 14 nt, Human
auucagaagaaaaa

SEQ ID NO: 1367044 - RNA, 23 nt, Human
auucagaaccccaacuacugugu

SEQ ID NO: 1367045 - RNA, 13 nt, Human
auucagaaaugag

SEQ ID NO: 1367046 - RNA, 13 nt, Human
auucacauuguau

SEQ ID NO: 1367047 - RNA, 20 nt, Human
auucacauuguauucagagu

SEQ ID NO: 1367048 - RNA, 23 nt, Human
auucuaaugaugaucaauuauag

SEQ ID NO: 1367049 - RNA, 23 nt, Human
auucuaagacuuacucuaagauc

SEQ ID NO: 1367050 - RNA, 15 nt, Human
auucuaagugaaauu

SEQ ID NO: 1367051 - RNA, 22 nt, Human
auucuaagacuuacucuaagau

SEQ ID NO: 1367052 - RNA, 20 nt, Human
auucuaagacuuacucuaag

SEQ ID NO: 1367053 - RNA, 12 nt, Human
auucuaagacuu

SEQ ID NO: 1367054 - RNA, 18 nt, Human
auucuaacggucuguucu

SEQ ID NO: 1367055 - RNA, 21 nt, Human
auucccuagaaacuuccaaau

SEQ ID NO: 1367056 - RNA, 20 nt, Human
auucccuagaaacuuccaaa

SEQ ID NO: 1367057 - RNA, 17 nt, Human
auucccuagaaacuucc

SEQ ID NO: 1367058 - RNA, 23 nt, Human
auucccguuuugucacuuuuucu

SEQ ID NO: 1367059 - RNA, 21 nt, Human
auucccguuuugucacuuuuu

SEQ ID NO: 1367060 - RNA, 18 nt, Human
auucccguuuugucacuu

SEQ ID NO: 1367061 - RNA, 16 nt, Human
auucccguuuugucac

SEQ ID NO: 1367062 - RNA, 15 nt, Human
auucccgcaguggga

SEQ ID NO: 1367063 - RNA, 22 nt, Human
auuccccucugcugcugucccu

SEQ ID NO: 1367064 - RNA, 15 nt, Human
auuccccucugcugc

SEQ ID NO: 1367065 - RNA, 13 nt, Human
auuccccucugcu

SEQ ID NO: 1367066 - RNA, 23 nt, Human
auucccagguaggccaagguguc

SEQ ID NO: 1367067 - RNA, 19 nt, Human
auucccagguaggccaagg

SEQ ID NO: 1367068 - RNA, 19 nt, Human
auucccagagcaaaauaau

SEQ ID NO: 1367069 - RNA, 17 nt, Human
auucccagagcaaaaua

SEQ ID NO: 1367070 - RNA, 12 nt, Human
auucccagcucu

SEQ ID NO: 1367071 - RNA, 14 nt, Human
auuccagccccucu

SEQ ID NO: 1367072 - RNA, 13 nt, Human
auuccagccccuc

SEQ ID NO: 1367073 - RNA, 20 nt, Human
auucaggaaaaggccugggg

SEQ ID NO: 1367074 - RNA, 17 nt, Human
auuccagagcacugcuc

SEQ ID NO: 1367075 - RNA, 14 nt, Human
caauuaaaggcaaa

SEQ ID NO: 1367076 - RNA, 23 nt, Human
caaugucuugaugcaugcacugu

SEQ ID NO: 1367077 - RNA, 21 nt, Human
caaugucuugaugcaugcacu

SEQ ID NO: 1367078 - RNA, 11 nt, Human
caaugucuuga

SEQ ID NO: 1367079 - RNA, 20 nt, Human
caaugucuggagaccaccag

SEQ ID NO: 1367080 - RNA, 21 nt, Human
caaugucuggagaccaccagg

SEQ ID NO: 1367081 - RNA, 16 nt, Human
caaugucuggagacca

SEQ ID NO: 1367082 - RNA, 15 nt, Human
caaugucuggagacc

SEQ ID NO: 1367083 - RNA, 14 nt, Human
caaugucuggagac

SEQ ID NO: 1367084 - RNA, 13 nt, Human
caaugucuggaga

SEQ ID NO: 1367085 - RNA, 19 nt, Human
caaugccacagcccuguca

SEQ ID NO: 1367086 - RNA, 17 nt, Human
caaugccacagcccugu

SEQ ID NO: 1367087 - RNA, 16 nt, Human
caaugccacagcccug

SEQ ID NO: 1367088 - RNA, 15 nt, Human
caaugccacagcccu

SEQ ID NO: 1367089 - RNA, 19 nt, Human
caaugcaguugucucuguu

SEQ ID NO: 1367090 - RNA, 20 nt, Human
caaugcaguugucucuguuu

SEQ ID NO: 1367091 - RNA, 18 nt, Human
caaugcaguugucucugu

SEQ ID NO: 1367092 - RNA, 17 nt, Human
caaugcaguugucucug

SEQ ID NO: 1367093 - RNA, 18 nt, Human
caauucauccucacucag

SEQ ID NO: 1367094 - RNA, 23 nt, Human
caauucagacaggcaaauaaaag

SEQ ID NO: 1367095 - RNA, 15 nt, Human
caauucagacaggca

SEQ ID NO: 1367096 - RNA, 14 nt, Human
caauucagacaggc

SEQ ID NO: 1367097 - RNA, 13 nt, Human
caauucagacagg

SEQ ID NO: 1367098 - RNA, 20 nt, Human
caauucacaucuaaccucau

SEQ ID NO: 1367099 - RNA, 13 nt, Human
caauucaaagcug

SEQ ID NO: 1367100 - RNA, 17 nt, Human
caauucaaaaguuccaa

SEQ ID NO: 1367101 - RNA, 15 nt, Human
caauucaaaaguucc

SEQ ID NO: 1367102 - RNA, 21 nt, Human
caauuuuaucccucaccugua

SEQ ID NO: 1367103 - RNA, 22 nt, Human
caauuccaacaguuuaaugaag

SEQ ID NO: 1367104 - RNA, 21 nt, Human
caauuccaacaguuuaaugaa

SEQ ID NO: 1367105 - RNA, 19 nt, Human
caauuccaacaguuuaaug

SEQ ID NO: 1367106 - RNA, 18 nt, Human
caauuccaacaguuuaau

SEQ ID NO: 1367107 - RNA, 15 nt, Human
caauuccaacaguuu

SEQ ID NO: 1367108 - RNA, 20 nt, Human
cacaaagacccuggcuuuca

SEQ ID NO: 1367109 - RNA, 17 nt, Human
cacaaagacccuggcuu

SEQ ID NO: 1367110 - RNA, 16 nt, Human
cacaaagacccuggcu

SEQ ID NO: 1367111 - RNA, 15 nt, Human
cacaaagacccuggc

SEQ ID NO: 1367112 - RNA, 17 nt, Human
cacaaacuguaauacaa

SEQ ID NO: 1367113 - RNA, 19 nt, Human
cacaaacuuuuauacucuu

SEQ ID NO: 1367114 - RNA, 23 nt, Human
cacaaacuguaaauaaaaagaaa

SEQ ID NO: 1367115 - RNA, 15 nt, Human
cacaaacuguaaaua

SEQ ID NO: 1367116 - RNA, 16 nt, Human
cacaaaacccagaccu

SEQ ID NO: 1367117 - RNA, 14 nt, Human
cacaaacuguaaau

SEQ ID NO: 1367118 - RNA, 19 nt, Human
caauuuucuggaauacaug

SEQ ID NO: 1367119 - RNA, 23 nt, Human
cacaacagccugacaacauuucu

SEQ ID NO: 1367120 - RNA, 20 nt, Human
cacaaauuauuaaugaaaau

SEQ ID NO: 1367121 - RNA, 17 nt, Human
cacaaauuauuaaugaa

SEQ ID NO: 1367122 - RNA, 15 nt, Human
cacaaauuaucuuaa

SEQ ID NO: 1367123 - RNA, 21 nt, Human
cacaaauucugucucuggauu

SEQ ID NO: 1367124 - RNA, 21 nt, Human
caaguguaaaauauuuugaau

SEQ ID NO: 1367125 - RNA, 16 nt, Human
caaguguaaaauauuu

SEQ ID NO: 1367126 - RNA, 15 nt, Human
caaguguaaaauauu

SEQ ID NO: 1367127 - RNA, 18 nt, Human
caauaugggggccuuuug

SEQ ID NO: 1367128 - RNA, 17 nt, Human
caauagucaaauugugu

SEQ ID NO: 1367129 - RNA, 20 nt, Human
caauccuauguuuuuguuca

SEQ ID NO: 1367130 - RNA, 14 nt, Human
caauccuauguuuu

SEQ ID NO: 1367131 - RNA, 22 nt, Human
caauccuaugcaugguuucagc

SEQ ID NO: 1367132 - RNA, 20 nt, Human
caauccuaugcaugguuuca

SEQ ID NO: 1367133 - RNA, 18 nt, Human
caauccuaugcaugguuu

SEQ ID NO: 1367134 - RNA, 16 nt, Human
caauccuaugcauggu

SEQ ID NO: 1367135 - RNA, 14 nt, Human
caauccuaugcaug

SEQ ID NO: 1367136 - RNA, 12 nt, Human
caauccuaugca

SEQ ID NO: 1367137 - RNA, 17 nt, Human
caauccuagguaggguu

SEQ ID NO: 1367138 - RNA, 17 nt, Human
caaugaacaucccuuuu

SEQ ID NO: 1367139 - RNA, 23 nt, Human
caaugaaaugaauuaaaguggac

SEQ ID NO: 1367140 - RNA, 21 nt, Human
caaugaaaugaauuaaagugg

SEQ ID NO: 1367141 - RNA, 11 nt, Human
caauccuggac

SEQ ID NO: 1367142 - RNA, 15 nt, Human
caauccucccagaaa

SEQ ID NO: 1367143 - RNA, 23 nt, Human
caauccuaugcaugguuucagca

SEQ ID NO: 1367144 - RNA, 18 nt, Human
caauccucccacuucagc

SEQ ID NO: 1367145 - RNA, 22 nt, Human
caauccucccacuucagccucc

SEQ ID NO: 1367146 - RNA, 16 nt, Human
caaugcaguugucucu

SEQ ID NO: 1367147 - RNA, 16 nt, Human
caaugcagugccuuuc

SEQ ID NO: 1367148 - RNA, 21 nt, Human
caaugauggcaauuuuguaac

SEQ ID NO: 1367149 - RNA, 16 nt, Human
caaugauggcaauuuu

SEQ ID NO: 1367150 - RNA, 13 nt, Human
caaugauggcaau

SEQ ID NO: 1367151 - RNA, 21 nt, Human
caaugaugaaugagaaucuac

SEQ ID NO: 1367152 - RNA, 16 nt, Human
caaugacaaagcagau

SEQ ID NO: 1367153 - RNA, 15 nt, Human
caaugacaaagcaga

SEQ ID NO: 1367154 - RNA, 14 nt, Human
caaugacaaagcag

SEQ ID NO: 1367155 - RNA, 23 nt, Human
caaugaauuuuauaaucugcagc

SEQ ID NO: 1367156 - RNA, 22 nt, Human
caaugaauaaaaacucaaggag

SEQ ID NO: 1367157 - RNA, 21 nt, Human
caaugaauaaaaacucaagga

SEQ ID NO: 1367158 - RNA, 20 nt, Human
caaugaauaaaaacucaagg

SEQ ID NO: 1367159 - RNA, 13 nt, Human
caaugacaugaau

SEQ ID NO: 1367160 - RNA, 12 nt, Human
caaugacaugaa

SEQ ID NO: 1367161 - RNA, 20 nt, Human
caaugagguguccaacuggc

SEQ ID NO: 1367162 - RNA, 15 nt, Human
caaugacaugaauuu

SEQ ID NO: 1367163 - RNA, 14 nt, Human
caaugacaugaauu

SEQ ID NO: 1367164 - RNA, 14 nt, Human
caaugaugaaugag

SEQ ID NO: 1367165 - RNA, 19 nt, Human
caaugauccuguauucaga

SEQ ID NO: 1367166 - RNA, 20 nt, Human
caaugacaugaauuuuagcu

SEQ ID NO: 1367167 - RNA, 20 nt, Human
caaugaucaccgacugaaaa

SEQ ID NO: 1367168 - RNA, 23 nt, Human
cacaacucacuccuuuuaaagaa

SEQ ID NO: 1367169 - RNA, 20 nt, Human
cacaccagggccagccucua

SEQ ID NO: 1367170 - RNA, 19 nt, Human
cacaccagggccagccucu

SEQ ID NO: 1367171 - RNA, 18 nt, Human
cacaccagggccagccuc

SEQ ID NO: 1367172 - RNA, 15 nt, Human
cacaccagggccagc

SEQ ID NO: 1367173 - RNA, 22 nt, Human
cacaccaggcuugccugcaggc

SEQ ID NO: 1367174 - RNA, 21 nt, Human
cacaccaggcuugccugcagg

SEQ ID NO: 1367175 - RNA, 13 nt, Human
cacaccagagaac

SEQ ID NO: 1367176 - RNA, 19 nt, Human
cacaccacuagccucaggg

SEQ ID NO: 1367177 - RNA, 14 nt, Human
cacaccacuagccu

SEQ ID NO: 1367178 - RNA, 18 nt, Human
cacacagcuacucucccc

SEQ ID NO: 1367179 - RNA, 22 nt, Human
cacaccuccuucccucucugga

SEQ ID NO: 1367180 - RNA, 19 nt, Human
cacaccuccuucccucucu

SEQ ID NO: 1367181 - RNA, 22 nt, Human
cacaccuuuuauugacacagaa

SEQ ID NO: 1367182 - RNA, 16 nt, Human
cacaccuguagcacuu

SEQ ID NO: 1367183 - RNA, 23 nt, Human
cacaccuuuuauugacacagaaa

SEQ ID NO: 1367184 - RNA, 17 nt, Human
cacaccccacucccaca

SEQ ID NO: 1367185 - RNA, 12 nt, Human
cacaccccacuc

SEQ ID NO: 1367186 - RNA, 21 nt, Human
cacacccuguacuguucugug

SEQ ID NO: 1367187 - RNA, 15 nt, Human
cacacagacuauuuu

SEQ ID NO: 1367188 - RNA, 22 nt, Human
cacacacauugcugugaacagg

SEQ ID NO: 1367189 - RNA, 18 nt, Human
cacacacaugcuucccuu

SEQ ID NO: 1367190 - RNA, 22 nt, Human
cacaacucacuccuuuuaaaga

SEQ ID NO: 1367191 - RNA, 19 nt, Human
cacaacucacuccuuuuaa

SEQ ID NO: 1367192 - RNA, 11 nt, Human
cacaacuagga

SEQ ID NO: 1367193 - RNA, 13 nt, Human
cacaacuauauug

SEQ ID NO: 1367194 - RNA, 14 nt, Human
cacaacgugcauug

SEQ ID NO: 1367195 - RNA, 17 nt, Human
cacaacgugcauugugc

SEQ ID NO: 1367196 - RNA, 19 nt, Human
cacaacgugcauugugcuu

SEQ ID NO: 1367197 - RNA, 17 nt, Human
cacagagauucugaacu

SEQ ID NO: 1367198 - RNA, 10 nt, Human
cacagagagu

SEQ ID NO: 1367199 - RNA, 16 nt, Human
cacagaguuguuacau

SEQ ID NO: 1367200 - RNA, 17 nt, Human
cacagaguuguuacauu

SEQ ID NO: 1367201 - RNA, 14 nt, Human
cacagacuauuuuu

SEQ ID NO: 1367202 - RNA, 13 nt, Human
cacagacuauuuu

SEQ ID NO: 1367203 - RNA, 23 nt, Human
cacagacggaaggguaaacaaua

SEQ ID NO: 1367204 - RNA, 10 nt, Human
cacacuuguc

SEQ ID NO: 1367205 - RNA, 14 nt, Human
cacacuucucagga

SEQ ID NO: 1367206 - RNA, 18 nt, Human
cacacuucaaacuacuuu

SEQ ID NO: 1367207 - RNA, 13 nt, Human
cacacuucaaacu

SEQ ID NO: 1367208 - RNA, 17 nt, Human
cacacuucucaggacac

SEQ ID NO: 1367209 - RNA, 23 nt, Human
cacacuucucaggacacaggccu

SEQ ID NO: 1367210 - RNA, 12 nt, Human
cacacugcacaa

SEQ ID NO: 1367211 - RNA, 18 nt, Human
cacacugaugcuuagaug

SEQ ID NO: 1367212 - RNA, 14 nt, Human
cacacugaugcuua

SEQ ID NO: 1367213 - RNA, 20 nt, Human
cacacucagauccuccucau

SEQ ID NO: 1367214 - RNA, 19 nt, Human
cacacucagauccuccuca

SEQ ID NO: 1367215 - RNA, 21 nt, Human
cacacuaccgaaugugucuuu

SEQ ID NO: 1367216 - RNA, 22 nt, Human
cacacuaccgaaugugucuuua

SEQ ID NO: 1367217 - RNA, 18 nt, Human
cacacuaccgaauguguc

SEQ ID NO: 1367218 - RNA, 16 nt, Human
cacacuaccgaaugug

SEQ ID NO: 1367219 - RNA, 14 nt, Human
cacacuuacuuuuu

SEQ ID NO: 1367220 - RNA, 16 nt, Human
cacacuuacuuuuucu

SEQ ID NO: 1367221 - RNA, 22 nt, Human
cacacugggugguggccugguc

SEQ ID NO: 1367222 - RNA, 19 nt, Human
cacacugggacuugcaaaa

SEQ ID NO: 1367223 - RNA, 14 nt, Human
cacagcagccuggg

SEQ ID NO: 1367224 - RNA, 16 nt, Human
cacagccaaauuuaaa

SEQ ID NO: 1367225 - RNA, 16 nt, Human
cacagcauuguauaug

SEQ ID NO: 1367226 - RNA, 19 nt, Human
cacagccuccccugccagg

SEQ ID NO: 1367227 - RNA, 17 nt, Human
cacagccuccccugcca

SEQ ID NO: 1367228 - RNA, 14 nt, Human
cacagccuccccug

SEQ ID NO: 1367229 - RNA, 22 nt, Human
cacagccaacacgcaccugccu

SEQ ID NO: 1367230 - RNA, 12 nt, Human
cacagcagccug

SEQ ID NO: 1367231 - RNA, 16 nt, Human
cacagcaccagaaugu

SEQ ID NO: 1367232 - RNA, 19 nt, Human
cacagcaccagaauguaua

SEQ ID NO: 1367233 - RNA, 14 nt, Human
cacagauggccagc

SEQ ID NO: 1367234 - RNA, 13 nt, Human
cacagauggccag

SEQ ID NO: 1367235 - RNA, 20 nt, Human
cacagaguuguuacauuuuu

SEQ ID NO: 1367236 - RNA, 21 nt, Human
cacagaguuguuacauuuuua

SEQ ID NO: 1367237 - RNA, 13 nt, Human
cacaguuugaaau

SEQ ID NO: 1367238 - RNA, 12 nt, Human
cacauaaaacuu

SEQ ID NO: 1367239 - RNA, 15 nt, Human
cacaguuugaaauaa

SEQ ID NO: 1367240 - RNA, 18 nt, Human
cacaguugaagggagggg

SEQ ID NO: 1367241 - RNA, 23 nt, Human
cacaguucuuugggccagacaug

SEQ ID NO: 1367242 - RNA, 23 nt, Human
cacaguugaagggaggggcugug

SEQ ID NO: 1367243 - RNA, 13 nt, Human
cacaggcccuccc

SEQ ID NO: 1367244 - RNA, 16 nt, Human
cacaggaguguccucu

SEQ ID NO: 1367245 - RNA, 23 nt, Human
cacaggcagccagugcccugagc

SEQ ID NO: 1367246 - RNA, 20 nt, Human
cacaggcagccagugcccug

SEQ ID NO: 1367247 - RNA, 19 nt, Human
cacaggcagccagugcccu

SEQ ID NO: 1367248 - RNA, 17 nt, Human
cacaggcagccagugcc

SEQ ID NO: 1367249 - RNA, 16 nt, Human
cacaggcagccagugc

SEQ ID NO: 1367250 - RNA, 15 nt, Human
cacaggcagccagug

SEQ ID NO: 1367251 - RNA, 11 nt, Human
cacaggcagcc

SEQ ID NO: 1367252 - RNA, 22 nt, Human
cacaggaguguccucuucccuc

SEQ ID NO: 1367253 - RNA, 10 nt, Human
cacaggcagc

SEQ ID NO: 1367254 - RNA, 20 nt, Human
cacaggaguguccucuuccc

SEQ ID NO: 1367255 - RNA, 22 nt, Human
cacaggaagccugcaguccugg

SEQ ID NO: 1367256 - RNA, 23 nt, Human
cacagccuccccugccagggcag

SEQ ID NO: 1367257 - RNA, 21 nt, Human
cacagccuccccugccagggc

SEQ ID NO: 1367258 - RNA, 20 nt, Human
cacagccuccccugccaggg

SEQ ID NO: 1367259 - RNA, 20 nt, Human
cacaggaaccacaagacugc

SEQ ID NO: 1367260 - RNA, 18 nt, Human
caccacuagccucagggg

SEQ ID NO: 1367261 - RNA, 15 nt, Human
caccacuagccucag

SEQ ID NO: 1367262 - RNA, 19 nt, Human
caccacuacauucuguuaa

SEQ ID NO: 1367263 - RNA, 20 nt, Human
caccacuacauucuguuaau

SEQ ID NO: 1367264 - RNA, 16 nt, Human
caccacuacauucugu

SEQ ID NO: 1367265 - RNA, 17 nt, Human
caccacuacauucuguu

SEQ ID NO: 1367266 - RNA, 18 nt, Human
caccacuacauucuguua

SEQ ID NO: 1367267 - RNA, 20 nt, Human
caccacccugcucauccacu

SEQ ID NO: 1367268 - RNA, 13 nt, Human
caccaccaagcca

SEQ ID NO: 1367269 - RNA, 16 nt, Human
caccaagcuaggugcu

SEQ ID NO: 1367270 - RNA, 19 nt, Human
caccacagccagcaccugg

SEQ ID NO: 1367271 - RNA, 17 nt, Human
caccacagccagcaccu

SEQ ID NO: 1367272 - RNA, 13 nt, Human
caccacagccagc

SEQ ID NO: 1367273 - RNA, 21 nt, Human
cacauuggaagagcagcaccu

SEQ ID NO: 1367274 - RNA, 20 nt, Human
cacauugcugugaacaggaa

SEQ ID NO: 1367275 - RNA, 17 nt, Human
cacauuggaaacaaguc

SEQ ID NO: 1367276 - RNA, 18 nt, Human
cacauuggagauguuuag

SEQ ID NO: 1367277 - RNA, 15 nt, Human
cacauauuuuaaaau

SEQ ID NO: 1367278 - RNA, 14 nt, Human
cacauauuuuaaaa

SEQ ID NO: 1367279 - RNA, 12 nt, Human
cacauauuuuaa

SEQ ID NO: 1367280 - RNA, 17 nt, Human
cacauauuucagugagg

SEQ ID NO: 1367281 - RNA, 18 nt, Human
cacaucagcacgauuucu

SEQ ID NO: 1367282 - RNA, 19 nt, Human
cacaucagcacgauuucug

SEQ ID NO: 1367283 - RNA, 23 nt, Human
cacauggccccucccccugccag

SEQ ID NO: 1367284 - RNA, 20 nt, Human
cacaucacaagacuaugcca

SEQ ID NO: 1367285 - RNA, 13 nt, Human
cacaucaaagagg

SEQ ID NO: 1367286 - RNA, 17 nt, Human
cacauauuuuaaaauuu

SEQ ID NO: 1367287 - RNA, 17 nt, Human
cacauguaucuaugcau

SEQ ID NO: 1367288 - RNA, 18 nt, Human
cacaugggugaacacuca

SEQ ID NO: 1367289 - RNA, 12 nt, Human
cacauguccagu

SEQ ID NO: 1367290 - RNA, 12 nt, Human
cacaugucuuaa

SEQ ID NO: 1367291 - RNA, 13 nt, Human
cacaugucuuaau

SEQ ID NO: 1367292 - RNA, 14 nt, Human
cacaugucuuaaug

SEQ ID NO: 1367293 - RNA, 15 nt, Human
cacaugucuuaauga

SEQ ID NO: 1367294 - RNA, 15 nt, Human
cacauguuuccucua

SEQ ID NO: 1367295 - RNA, 14 nt, Human
cacauguuuccucu

SEQ ID NO: 1367296 - RNA, 12 nt, Human
cacauguuuccu

SEQ ID NO: 1367297 - RNA, 12 nt, Human
cacauguguggu

SEQ ID NO: 1367298 - RNA, 14 nt, Human
cacaugugcugccc

SEQ ID NO: 1367299 - RNA, 22 nt, Human
cacaugugagcaugucacuucc

SEQ ID NO: 1367300 - RNA, 16 nt, Human
cacaugucuuaaugaa

SEQ ID NO: 1367301 - RNA, 17 nt, Human
cacaugucuuaaugaag

SEQ ID NO: 1367302 - RNA, 18 nt, Human
cacaugucuuaaugaagu

SEQ ID NO: 1367303 - RNA, 22 nt, Human
cacaugucuuaaugaaguuuga

SEQ ID NO: 1367304 - RNA, 23 nt, Human
cacaugucuuaaugaaguuugaa

SEQ ID NO: 1367305 - RNA, 21 nt, Human
cacauuaggaaaaguugcuau

SEQ ID NO: 1367306 - RNA, 21 nt, Human
cacauuagaagacaauugaca

SEQ ID NO: 1367307 - RNA, 20 nt, Human
cacauuaaagaagaccugag

SEQ ID NO: 1367308 - RNA, 16 nt, Human
cacauuaaagaagacc

SEQ ID NO: 1367309 - RNA, 12 nt, Human
cacauuaaagaa

SEQ ID NO: 1367310 - RNA, 15 nt, Human
cacauguuuucucug

SEQ ID NO: 1367311 - RNA, 23 nt, Human
cacauucagggcuauuuuuuccc

SEQ ID NO: 1367312 - RNA, 22 nt, Human
cacauucaaaauaggguauauu

SEQ ID NO: 1367313 - RNA, 16 nt, Human
cacauuccugaacagg

SEQ ID NO: 1367314 - RNA, 13 nt, Human
caaggaaaggcac

SEQ ID NO: 1367315 - RNA, 16 nt, Human
caagcggugucucucc

SEQ ID NO: 1367316 - RNA, 15 nt, Human
caagcggugucucuc

SEQ ID NO: 1367317 - RNA, 13 nt, Human
caagcggugucuc

SEQ ID NO: 1367318 - RNA, 15 nt, Human
caaggaaaaacaggu

SEQ ID NO: 1367319 - RNA, 17 nt, Human
caaggauagaugcuggc

SEQ ID NO: 1367320 - RNA, 16 nt, Human
caaggauagaugcugg

SEQ ID NO: 1367321 - RNA, 15 nt, Human
caaggauagaugcug

SEQ ID NO: 1367322 - RNA, 17 nt, Human
caaggauagaaguauac

SEQ ID NO: 1367323 - RNA, 16 nt, Human
caaggagucagacauu

SEQ ID NO: 1367324 - RNA, 18 nt, Human
caaggagucacugagacc

SEQ ID NO: 1367325 - RNA, 17 nt, Human
caaggagucacugagac

SEQ ID NO: 1367326 - RNA, 23 nt, Human
caaggauagaugcuggcccaggg

SEQ ID NO: 1367327 - RNA, 22 nt, Human
caaggauagaugcuggcccagg

SEQ ID NO: 1367328 - RNA, 21 nt, Human
caaggauagaugcuggcccag

SEQ ID NO: 1367329 - RNA, 20 nt, Human
caaggauagaugcuggccca

SEQ ID NO: 1367330 - RNA, 23 nt, Human
caagccaagggaaccuguguccg

SEQ ID NO: 1367331 - RNA, 22 nt, Human
caagccaagggaaccugugucc

SEQ ID NO: 1367332 - RNA, 21 nt, Human
caagccaagggaaccuguguc

SEQ ID NO: 1367333 - RNA, 18 nt, Human
caagaaacugaggaauuu

SEQ ID NO: 1367334 - RNA, 18 nt, Human
caagaaaauaagagcuca

SEQ ID NO: 1367335 - RNA, 20 nt, Human
caagaaaauaagagcucagg

SEQ ID NO: 1367336 - RNA, 23 nt, Human
caagaaaacaggcacugcccugg

SEQ ID NO: 1367337 - RNA, 22 nt, Human
caagaaaacaggcacugcccug

SEQ ID NO: 1367338 - RNA, 21 nt, Human
caagaaaacaggcacugcccu

SEQ ID NO: 1367339 - RNA, 20 nt, Human
caagaaaacaggcacugccc

SEQ ID NO: 1367340 - RNA, 19 nt, Human
caagaaaacaggcacugcc

SEQ ID NO: 1367341 - RNA, 19 nt, Human
caagaaacugaggaauuuu

SEQ ID NO: 1367342 - RNA, 18 nt, Human
caagccaagggaaccugu

SEQ ID NO: 1367343 - RNA, 14 nt, Human
caagcacuucuuuu

SEQ ID NO: 1367344 - RNA, 17 nt, Human
caagcacuaaacaaaga

SEQ ID NO: 1367345 - RNA, 18 nt, Human
caaguccugccucuuaaa

SEQ ID NO: 1367346 - RNA, 13 nt, Human
caaggucuuuaaa

SEQ ID NO: 1367347 - RNA, 14 nt, Human
caaggucuuugguu

SEQ ID NO: 1367348 - RNA, 14 nt, Human
caaggucugcuuuu

SEQ ID NO: 1367349 - RNA, 20 nt, Human
caagggcuuuguuuugcaca

SEQ ID NO: 1367350 - RNA, 20 nt, Human
caagucuguuuacugcaagg

SEQ ID NO: 1367351 - RNA, 14 nt, Human
caagucuguuuacu

SEQ ID NO: 1367352 - RNA, 21 nt, Human
caagucuuucucuuucccugg

SEQ ID NO: 1367353 - RNA, 20 nt, Human
caagucuuucucuuucccug

SEQ ID NO: 1367354 - RNA, 19 nt, Human
caagucuuucucuuucccu

SEQ ID NO: 1367355 - RNA, 17 nt, Human
caagucuuucucuuucc

SEQ ID NO: 1367356 - RNA, 17 nt, Human
caaguggguacccccag

SEQ ID NO: 1367357 - RNA, 19 nt, Human
caaguggguacccccagga

SEQ ID NO: 1367358 - RNA, 23 nt, Human
caagucuuucucuuucccugguc

SEQ ID NO: 1367359 - RNA, 22 nt, Human
caagugcagggccuguaauccc

SEQ ID NO: 1367360 - RNA, 23 nt, Human
caacauguuauuuguaauagaug

SEQ ID NO: 1367361 - RNA, 20 nt, Human
caacauguuuccagcauucc

SEQ ID NO: 1367362 - RNA, 23 nt, Human
caacauguugggaaacuuggcuc

SEQ ID NO: 1367363 - RNA, 22 nt, Human
caacauguugggaaacuuggcu

SEQ ID NO: 1367364 - RNA, 19 nt, Human
caacauguugggaaacuug

SEQ ID NO: 1367365 - RNA, 22 nt, Human
caacauguuauuuguaauagau

SEQ ID NO: 1367366 - RNA, 15 nt, Human
caacauguuauuugu

SEQ ID NO: 1367367 - RNA, 13 nt, Human
caacauggcuuug

SEQ ID NO: 1367368 - RNA, 12 nt, Human
caacauggcuuu

SEQ ID NO: 1367369 - RNA, 22 nt, Human
caacaugaugagguaguaccuu

SEQ ID NO: 1367370 - RNA, 15 nt, Human
caacaugcacugaug

SEQ ID NO: 1367371 - RNA, 15 nt, Human
caacaugaugaggua

SEQ ID NO: 1367372 - RNA, 19 nt, Human
caacaugaggccacuggag

SEQ ID NO: 1367373 - RNA, 14 nt, Human
caaccacacccaca

SEQ ID NO: 1367374 - RNA, 14 nt, Human
caaccaauggaaug

SEQ ID NO: 1367375 - RNA, 22 nt, Human
caaccaagaauguuaugugcaa

SEQ ID NO: 1367376 - RNA, 17 nt, Human
caacauuucucaauaau

SEQ ID NO: 1367377 - RNA, 16 nt, Human
caacauuucucaauaa

SEQ ID NO: 1367378 - RNA, 14 nt, Human
caacauuucucaau

SEQ ID NO: 1367379 - RNA, 22 nt, Human
caacauuucuauagccaaaaau

SEQ ID NO: 1367380 - RNA, 16 nt, Human
caacauuguagccuca

SEQ ID NO: 1367381 - RNA, 16 nt, Human
caacaucacagcccag

SEQ ID NO: 1367382 - RNA, 14 nt, Human
caacaucacagccc

SEQ ID NO: 1367383 - RNA, 16 nt, Human
caacagugaagacaga

SEQ ID NO: 1367384 - RNA, 17 nt, Human
caacaguaaaccacuga

SEQ ID NO: 1367385 - RNA, 22 nt, Human
caacaguaaaccacugaaaaaa

SEQ ID NO: 1367386 - RNA, 17 nt, Human
caacaucacagcccagc

SEQ ID NO: 1367387 - RNA, 20 nt, Human
caacaucacagcccagcccg

SEQ ID NO: 1367388 - RNA, 15 nt, Human
caacaguaaaccacu

SEQ ID NO: 1367389 - RNA, 19 nt, Human
caaauuuaaaacuguugga

SEQ ID NO: 1367390 - RNA, 16 nt, Human
caaauucgcaaacuuu

SEQ ID NO: 1367391 - RNA, 15 nt, Human
caaauucugucucug

SEQ ID NO: 1367392 - RNA, 18 nt, Human
caaauucugucucuggau

SEQ ID NO: 1367393 - RNA, 18 nt, Human
caacccuucccucaccuu

SEQ ID NO: 1367394 - RNA, 17 nt, Human
caacccuucccucaccu

SEQ ID NO: 1367395 - RNA, 22 nt, Human
caacccucagggcaaagccagg

SEQ ID NO: 1367396 - RNA, 21 nt, Human
caacccucagggcaaagccag

SEQ ID NO: 1367397 - RNA, 13 nt, Human
caacccucagggc

SEQ ID NO: 1367398 - RNA, 12 nt, Human
caacccucaggg

SEQ ID NO: 1367399 - RNA, 11 nt, Human
caacccucagg

SEQ ID NO: 1367400 - RNA, 24 nt, Human
caaccugaauacccuuuucugacc

SEQ ID NO: 1367401 - RNA, 15 nt, Human
caaccucuuggccug

SEQ ID NO: 1367402 - RNA, 13 nt, Human
caaccucuuggcc

SEQ ID NO: 1367403 - RNA, 21 nt, Human
caaccugaauacccuuuucug

SEQ ID NO: 1367404 - RNA, 14 nt, Human
caacgcuauuccag

SEQ ID NO: 1367405 - RNA, 15 nt, Human
caacugccuacucca

SEQ ID NO: 1367406 - RNA, 14 nt, Human
caacugccuacucc

SEQ ID NO: 1367407 - RNA, 21 nt, Human
caacucuucccccucucccag

SEQ ID NO: 1367408 - RNA, 22 nt, Human
caacucucuuauugccucacuu

SEQ ID NO: 1367409 - RNA, 21 nt, Human
caacucucuuauugccucacu

SEQ ID NO: 1367410 - RNA, 16 nt, Human
caacucucuuauugcc

SEQ ID NO: 1367411 - RNA, 13 nt, Human
caacucucuuauu

SEQ ID NO: 1367412 - RNA, 21 nt, Human
caacucugaaggguaauuaua

SEQ ID NO: 1367413 - RNA, 22 nt, Human
caacuuaauacucaaaugagua

SEQ ID NO: 1367414 - RNA, 22 nt, Human
caacugcucccaccuccugaca

SEQ ID NO: 1367415 - RNA, 19 nt, Human
caacugcucccaccuccug

SEQ ID NO: 1367416 - RNA, 23 nt, Human
caacugccucgaaacacagaaac

SEQ ID NO: 1367417 - RNA, 21 nt, Human
caacugccucgaaacacagaa

SEQ ID NO: 1367418 - RNA, 22 nt, Human
caacugccuacuccaaaauguu

SEQ ID NO: 1367419 - RNA, 18 nt, Human
caacugccuacuccaaaa

SEQ ID NO: 1367420 - RNA, 18 nt, Human
caacugcucccaccuccu

SEQ ID NO: 1367421 - RNA, 17 nt, Human
caacugcucccaccucc

SEQ ID NO: 1367422 - RNA, 15 nt, Human
caacugcucccaccu

SEQ ID NO: 1367423 - RNA, 14 nt, Human
caacugcucccacc

SEQ ID NO: 1367424 - RNA, 11 nt, Human
caacugcuccc

SEQ ID NO: 1367425 - RNA, 15 nt, Human
caacugcuaaucuac

SEQ ID NO: 1367426 - RNA, 14 nt, Human
caacuucuaauugc

SEQ ID NO: 1367427 - RNA, 14 nt, Human
caacuucguuuccu

SEQ ID NO: 1367428 - RNA, 11 nt, Human
caacuuauuaa

SEQ ID NO: 1367429 - RNA, 14 nt, Human
caacuucaguccaa

SEQ ID NO: 1367430 - RNA, 11 nt, Human
caacuuuguau

SEQ ID NO: 1367431 - RNA, 17 nt, Human
caagaaaacaggcacug

SEQ ID NO: 1367432 - RNA, 16 nt, Human
caagaaaacaggcacu

SEQ ID NO: 1367433 - RNA, 15 nt, Human
caagaaaacaggcac

SEQ ID NO: 1367434 - RNA, 12 nt, Human
caacuuuguaua

SEQ ID NO: 1367435 - RNA, 16 nt, Human
caacuucuaauugcca

SEQ ID NO: 1367436 - RNA, 18 nt, Human
caaaugugcuuugagaag

SEQ ID NO: 1367437 - RNA, 14 nt, Human
caaaugugcuuuga

SEQ ID NO: 1367438 - RNA, 12 nt, Human
caaauguucuaa

SEQ ID NO: 1367439 - RNA, 16 nt, Human
caaauguuaaaaugug

SEQ ID NO: 1367440 - RNA, 15 nt, Human
caaauguuaaaaugu

SEQ ID NO: 1367441 - RNA, 21 nt, Human
caaauguucuaaguuucuaag

SEQ ID NO: 1367442 - RNA, 19 nt, Human
caaauguucuaaguuucua

SEQ ID NO: 1367443 - RNA, 15 nt, Human
caaauguucuaaguu

SEQ ID NO: 1367444 - RNA, 14 nt, Human
caaauguucuaagu

SEQ ID NO: 1367445 - RNA, 23 nt, Human
caaauguucuaaguuucuaagau

SEQ ID NO: 1367446 - RNA, 22 nt, Human
caaauguucuaaguuucuaaga

SEQ ID NO: 1367447 - RNA, 18 nt, Human
caaauucaguuucauaaa

SEQ ID NO: 1367448 - RNA, 20 nt, Human
caaauucaguuucauaaaag

SEQ ID NO: 1367449 - RNA, 17 nt, Human
caaauucaguuucauaa

SEQ ID NO: 1367450 - RNA, 22 nt, Human
caaaucagaagucaucuugcua

SEQ ID NO: 1367451 - RNA, 15 nt, Human
caaaucagaagucau

SEQ ID NO: 1367452 - RNA, 14 nt, Human
caaaucagaaguca

SEQ ID NO: 1367453 - RNA, 15 nt, Human
caaaucacugaacuu

SEQ ID NO: 1367454 - RNA, 15 nt, Human
caaaucaccacaaac

SEQ ID NO: 1367455 - RNA, 20 nt, Human
caaaucaccacaaacuguaa

SEQ ID NO: 1367456 - RNA, 19 nt, Human
caaaucaccacaaacugua

SEQ ID NO: 1367457 - RNA, 14 nt, Human
caaaucacugaacu

SEQ ID NO: 1367458 - RNA, 18 nt, Human
caaauaaaaagugcuuuu

SEQ ID NO: 1367459 - RNA, 17 nt, Human
caaauaaaaagugcuuu

SEQ ID NO: 1367460 - RNA, 19 nt, Human
caaaguuuaccagaaagca

SEQ ID NO: 1367461 - RNA, 20 nt, Human
caaaguuuaauaaauuuauu

SEQ ID NO: 1367462 - RNA, 13 nt, Human
caaaggaugugau

SEQ ID NO: 1367463 - RNA, 15 nt, Human
caaaggcaagcacuu

SEQ ID NO: 1367464 - RNA, 21 nt, Human
caaaggaugugauauauaagu

SEQ ID NO: 1367465 - RNA, 17 nt, Human
caaaggaugugauauau

SEQ ID NO: 1367466 - RNA, 14 nt, Human
caaaggaugugaua

SEQ ID NO: 1367467 - RNA, 13 nt, Human
caaaguuuaauaa

SEQ ID NO: 1367468 - RNA, 22 nt, Human
caaaguuguuguaaccugcugu

SEQ ID NO: 1367469 - RNA, 15 nt, Human
caaaguuguuguaac

SEQ ID NO: 1367470 - RNA, 19 nt, Human
caaauacauuuaaaacauu

SEQ ID NO: 1367471 - RNA, 20 nt, Human
caaauaauuuuucacuucaa

SEQ ID NO: 1367472 - RNA, 18 nt, Human
caaauaggaugcuuggga

SEQ ID NO: 1367473 - RNA, 15 nt, Human
caaauagcauaaguu

SEQ ID NO: 1367474 - RNA, 16 nt, Human
caaauagaaaaugguc

SEQ ID NO: 1367475 - RNA, 12 nt, Human
caaauauauuca

SEQ ID NO: 1367476 - RNA, 16 nt, Human
caaagcuuuuuccaga

SEQ ID NO: 1367477 - RNA, 23 nt, Human
caaagcuuuccugccccaggccu

SEQ ID NO: 1367478 - RNA, 22 nt, Human
caaagcuuuccugccccaggcc

SEQ ID NO: 1367479 - RNA, 18 nt, Human
caaagcuuuccugcccca

SEQ ID NO: 1367480 - RNA, 18 nt, Human
caaaggagcgagcauguc

SEQ ID NO: 1367481 - RNA, 16 nt, Human
caaagcuuuccugccc

SEQ ID NO: 1367482 - RNA, 14 nt, Human
caaagcuuuccugc

SEQ ID NO: 1367483 - RNA, 13 nt, Human
caaagcuuuccug

SEQ ID NO: 1367484 - RNA, 19 nt, Human
caaagcaugggauuauuag

SEQ ID NO: 1367485 - RNA, 13 nt, Human
caaagagguauuu

SEQ ID NO: 1367486 - RNA, 23 nt, Human
caaagaggcugccccucucacca

SEQ ID NO: 1367487 - RNA, 22 nt, Human
caaagaggcugccccucucacc

SEQ ID NO: 1367488 - RNA, 21 nt, Human
caaagaggcugccccucucac

SEQ ID NO: 1367489 - RNA, 16 nt, Human
caaagaggcugccccu

SEQ ID NO: 1367490 - RNA, 15 nt, Human
caaagaggcugcccc

SEQ ID NO: 1367491 - RNA, 13 nt, Human
caaagaggcugcc

SEQ ID NO: 1367492 - RNA, 12 nt, Human
caaagaggcugc

SEQ ID NO: 1367493 - RNA, 22 nt, Human
caaagaggcugaggcuggcaca

SEQ ID NO: 1367494 - RNA, 20 nt, Human
caaagaggcugaggcuggca

SEQ ID NO: 1367495 - RNA, 14 nt, Human
caaagaaaguguau

SEQ ID NO: 1367496 - RNA, 13 nt, Human
caaagaaagugua

SEQ ID NO: 1367497 - RNA, 17 nt, Human
caaagaaacaaagaugu

SEQ ID NO: 1367498 - RNA, 16 nt, Human
caaagaaacaaagaug

SEQ ID NO: 1367499 - RNA, 20 nt, Human
caaacuuugcaucucaguau

SEQ ID NO: 1367500 - RNA, 13 nt, Human
caaacuuugcauc

SEQ ID NO: 1367501 - RNA, 12 nt, Human
caaacuuugcau

SEQ ID NO: 1367502 - RNA, 18 nt, Human
caaacuuuuauacucuuu

SEQ ID NO: 1367503 - RNA, 18 nt, Human
caaacuuggauacuugga

SEQ ID NO: 1367504 - RNA, 18 nt, Human
auuuuuuuaauuuacaaa

SEQ ID NO: 1367505 - RNA, 18 nt, Human
auuuuuuuacuaauagac

SEQ ID NO: 1367506 - RNA, 17 nt, Human
auuuuuuuagaaagcau

SEQ ID NO: 1367507 - RNA, 23 nt, Human
auuuuuuuagaaagcauuugaau

SEQ ID NO: 1367508 - RNA, 14 nt, Human
caaaaaagaaaacc

SEQ ID NO: 1367509 - RNA, 12 nt, Human
caaaaaagaaaa

SEQ ID NO: 1367510 - RNA, 11 nt, Human
caaaaaacuac

SEQ ID NO: 1367511 - RNA, 15 nt, Human
caaaaaacuacuucu

SEQ ID NO: 1367512 - RNA, 23 nt, Human
caccacugcccccugcugccaug

SEQ ID NO: 1367513 - RNA, 21 nt, Human
caccacucuggcagccacacu

SEQ ID NO: 1367514 - RNA, 19 nt, Human
caccacucuggcagccaca

SEQ ID NO: 1367515 - RNA, 18 nt, Human
caccacucuggcagccac

SEQ ID NO: 1367516 - RNA, 17 nt, Human
caccacucuggcagcca

SEQ ID NO: 1367517 - RNA, 15 nt, Human
caccacucuggcagc

SEQ ID NO: 1367518 - RNA, 14 nt, Human
caccacucuggcag

SEQ ID NO: 1367519 - RNA, 13 nt, Human
caccacucuggca

SEQ ID NO: 1367520 - RNA, 12 nt, Human
caccacucuggc

SEQ ID NO: 1367521 - RNA, 20 nt, Human
cacccaccaacccucagggc

SEQ ID NO: 1367522 - RNA, 18 nt, Human
cacccaccaacccucagg

SEQ ID NO: 1367523 - RNA, 17 nt, Human
cacccaccaacccucag

SEQ ID NO: 1367524 - RNA, 16 nt, Human
cacccaccaacccuca

SEQ ID NO: 1367525 - RNA, 17 nt, Human
cacccaauucaaaacau

SEQ ID NO: 1367526 - RNA, 16 nt, Human
cacccaauucaaaaca

SEQ ID NO: 1367527 - RNA, 14 nt, Human
caccagacacccag

SEQ ID NO: 1367528 - RNA, 17 nt, Human
caccccauucccgcagu

SEQ ID NO: 1367529 - RNA, 15 nt, Human
caccccauucccgca

SEQ ID NO: 1367530 - RNA, 13 nt, Human
caccccauucccg

SEQ ID NO: 1367531 - RNA, 14 nt, Human
caccccaugcuggc

SEQ ID NO: 1367532 - RNA, 15 nt, Human
caccccaugcuggcc

SEQ ID NO: 1367533 - RNA, 20 nt, Human
caccccaugcuggccuugcc

SEQ ID NO: 1367534 - RNA, 19 nt, Human
caccccagggcagccaggg

SEQ ID NO: 1367535 - RNA, 22 nt, Human
caccccagggcagccagggaga

SEQ ID NO: 1367536 - RNA, 18 nt, Human
caccccagggcagccagg

SEQ ID NO: 1367537 - RNA, 16 nt, Human
caccccagggcagcca

SEQ ID NO: 1367538 - RNA, 13 nt, Human
caccccagggcag

SEQ ID NO: 1367539 - RNA, 16 nt, Human
cacccaccccugcaca

SEQ ID NO: 1367540 - RNA, 14 nt, Human
cacccaccccugca

SEQ ID NO: 1367541 - RNA, 22 nt, Human
cacccaccaguugaauuucauc

SEQ ID NO: 1367542 - RNA, 17 nt, Human
cacccccugcagcuugu

SEQ ID NO: 1367543 - RNA, 14 nt, Human
cacccccugcagcu

SEQ ID NO: 1367544 - RNA, 13 nt, Human
cacccccugcagc

SEQ ID NO: 1367545 - RNA, 12 nt, Human
cacccccugcag

SEQ ID NO: 1367546 - RNA, 18 nt, Human
cacccccucaccccucca

SEQ ID NO: 1367547 - RNA, 11 nt, Human
cacccccguca

SEQ ID NO: 1367548 - RNA, 21 nt, Human
cacccccggcagcagccccca

SEQ ID NO: 1367549 - RNA, 18 nt, Human
cacccccggcagcagccc

SEQ ID NO: 1367550 - RNA, 18 nt, Human
cacccccuucuccaucca

SEQ ID NO: 1367551 - RNA, 16 nt, Human
caccccgccugcccuc

SEQ ID NO: 1367552 - RNA, 14 nt, Human
cacccccuuuccug

SEQ ID NO: 1367553 - RNA, 12 nt, Human
cacccccuuucc

SEQ ID NO: 1367554 - RNA, 16 nt, Human
caccccgacuuuuguu

SEQ ID NO: 1367555 - RNA, 15 nt, Human
caccccccaagcugu

SEQ ID NO: 1367556 - RNA, 14 nt, Human
caccccccaagcug

SEQ ID NO: 1367557 - RNA, 12 nt, Human
cacccccagcuu

SEQ ID NO: 1367558 - RNA, 14 nt, Human
cacccccagcucaa

SEQ ID NO: 1367559 - RNA, 13 nt, Human
cacccccagcuca

SEQ ID NO: 1367560 - RNA, 12 nt, Human
cacccccagcuc

SEQ ID NO: 1367561 - RNA, 19 nt, Human
cacccccagccugggccua

SEQ ID NO: 1367562 - RNA, 18 nt, Human
cacccccagccugggccu

SEQ ID NO: 1367563 - RNA, 17 nt, Human
cacccccagccugggcc

SEQ ID NO: 1367564 - RNA, 16 nt, Human
cacccccagccugggc

SEQ ID NO: 1367565 - RNA, 15 nt, Human
cacccccagccuggg

SEQ ID NO: 1367566 - RNA, 14 nt, Human
cacccccagccugg

SEQ ID NO: 1367567 - RNA, 13 nt, Human
cacccccagccug

SEQ ID NO: 1367568 - RNA, 12 nt, Human
cacccccagccu

SEQ ID NO: 1367569 - RNA, 17 nt, Human
cacccccacccccagcu

SEQ ID NO: 1367570 - RNA, 14 nt, Human
cacccccaccccca

SEQ ID NO: 1367571 - RNA, 11 nt, Human
cacccccaccc

SEQ ID NO: 1367572 - RNA, 12 nt, Human
cacccccaaggu

SEQ ID NO: 1367573 - RNA, 19 nt, Human
caccccauucccgcagugg

SEQ ID NO: 1367574 - RNA, 23 nt, Human
caccccuaaaagaaacccugcac

SEQ ID NO: 1367575 - RNA, 21 nt, Human
ccagauugacgacaagugcug

SEQ ID NO: 1367576 - RNA, 19 nt, Human
ccagauugacgacaagugc

SEQ ID NO: 1367577 - RNA, 18 nt, Human
ccagauugacgacaagug

SEQ ID NO: 1367578 - RNA, 13 nt, Human
ccagauugacgac

SEQ ID NO: 1367579 - RNA, 20 nt, Human
ccagagcuacccgcagaguu

SEQ ID NO: 1367580 - RNA, 20 nt, Human
ccagagccuggggcucuaac

SEQ ID NO: 1367581 - RNA, 18 nt, Human
ccagagccuggggcucua

SEQ ID NO: 1367582 - RNA, 16 nt, Human
ccagagccuggggcuc

SEQ ID NO: 1367583 - RNA, 15 nt, Human
ccagagccuggggcu

SEQ ID NO: 1367584 - RNA, 14 nt, Human
ccagagccuggggc

SEQ ID NO: 1367585 - RNA, 13 nt, Human
ccagagccugggg

SEQ ID NO: 1367586 - RNA, 12 nt, Human
ccagagccuggg

SEQ ID NO: 1367587 - RNA, 11 nt, Human
ccagagccugg

SEQ ID NO: 1367588 - RNA, 15 nt, Human
ccagagcccaggcuc

SEQ ID NO: 1367589 - RNA, 14 nt, Human
ccagagcccaggcu

SEQ ID NO: 1367590 - RNA, 18 nt, Human
ccagagcccagcuccaag

SEQ ID NO: 1367591 - RNA, 17 nt, Human
ccagagcccagcuccaa

SEQ ID NO: 1367592 - RNA, 11 nt, Human
ccagagcccac

SEQ ID NO: 1367593 - RNA, 16 nt, Human
ccagauuuuuacacau

SEQ ID NO: 1367594 - RNA, 24 nt, Human
ccagcaaagcccccagagcccagg

SEQ ID NO: 1367595 - RNA, 21 nt, Human
ccagcaaagcccccagagccc

SEQ ID NO: 1367596 - RNA, 19 nt, Human
ccagcaaagcccccagagc

SEQ ID NO: 1367597 - RNA, 17 nt, Human
ccagcaaagcccccaga

SEQ ID NO: 1367598 - RNA, 16 nt, Human
ccagcaaagcccccag

SEQ ID NO: 1367599 - RNA, 15 nt, Human
ccagcaaagccccca

SEQ ID NO: 1367600 - RNA, 21 nt, Human
ccagauuugcuaauuuauccu

SEQ ID NO: 1367601 - RNA, 22 nt, Human
ccagauuuuuuaaaauuuauau

SEQ ID NO: 1367602 - RNA, 17 nt, Human
ccagcacagcuugaccu

SEQ ID NO: 1367603 - RNA, 13 nt, Human
ccagcacagcuug

SEQ ID NO: 1367604 - RNA, 22 nt, Human
ccagcacagcuuagauuucaua

SEQ ID NO: 1367605 - RNA, 20 nt, Human
ccagcacagcuuagauuuca

SEQ ID NO: 1367606 - RNA, 19 nt, Human
ccagcacagcuuagauuuc

SEQ ID NO: 1367607 - RNA, 16 nt, Human
ccagcacacagggcag

SEQ ID NO: 1367608 - RNA, 23 nt, Human
ccagcaaagcccccagagcccag

SEQ ID NO: 1367609 - RNA, 21 nt, Human
ccagcaccggaccagccuggc

SEQ ID NO: 1367610 - RNA, 15 nt, Human
ccagcaccuggcauc

SEQ ID NO: 1367611 - RNA, 18 nt, Human
ccagcaccggaccagccu

SEQ ID NO: 1367612 - RNA, 20 nt, Human
ccagcaccggaccagccugg

SEQ ID NO: 1367613 - RNA, 19 nt, Human
ccagcaccggaccagccug

SEQ ID NO: 1367614 - RNA, 21 nt, Human
ccagcccugccuggaggaccu

SEQ ID NO: 1367615 - RNA, 22 nt, Human
ccagcccugccuggaggaccug

SEQ ID NO: 1367616 - RNA, 18 nt, Human
ccagcccugccuggagga

SEQ ID NO: 1367617 - RNA, 17 nt, Human
ccagcccugccuggagg

SEQ ID NO: 1367618 - RNA, 16 nt, Human
ccagcccugccuggag

SEQ ID NO: 1367619 - RNA, 15 nt, Human
ccagcccugccugga

SEQ ID NO: 1367620 - RNA, 14 nt, Human
ccagcccugccugg

SEQ ID NO: 1367621 - RNA, 13 nt, Human
ccagcccugccug

SEQ ID NO: 1367622 - RNA, 14 nt, Human
ccagcccauggaga

SEQ ID NO: 1367623 - RNA, 21 nt, Human
ccagcccagggcuccugcacu

SEQ ID NO: 1367624 - RNA, 19 nt, Human
ccagcccagggcuccugca

SEQ ID NO: 1367625 - RNA, 17 nt, Human
ccagcccagggcuccug

SEQ ID NO: 1367626 - RNA, 23 nt, Human
ccagcccauggagauugaccugg

SEQ ID NO: 1367627 - RNA, 20 nt, Human
ccagccggggcgaguggcac

SEQ ID NO: 1367628 - RNA, 21 nt, Human
ccagccggggcgaguggcacg

SEQ ID NO: 1367629 - RNA, 23 nt, Human
ccagccgcuuggcgaugccagcc

SEQ ID NO: 1367630 - RNA, 22 nt, Human
ccagccgcuuggcgaugccagc

SEQ ID NO: 1367631 - RNA, 19 nt, Human
ccagccgcgcaucagacug

SEQ ID NO: 1367632 - RNA, 23 nt, Human
ccagccgacccccucucccugca

SEQ ID NO: 1367633 - RNA, 22 nt, Human
ccagccgacccccucucccugc

SEQ ID NO: 1367634 - RNA, 20 nt, Human
ccagccgacccccucucccu

SEQ ID NO: 1367635 - RNA, 18 nt, Human
ccagccgacccccucucc

SEQ ID NO: 1367636 - RNA, 15 nt, Human
ccagcccagggcucc

SEQ ID NO: 1367637 - RNA, 14 nt, Human
ccagcccagggcuc

SEQ ID NO: 1367638 - RNA, 13 nt, Human
ccagcccagggcu

SEQ ID NO: 1367639 - RNA, 16 nt, Human
ccagcccagccccacu

SEQ ID NO: 1367640 - RNA, 23 nt, Human
ccagcccagagacauacuugaag

SEQ ID NO: 1367641 - RNA, 22 nt, Human
ccagcccagagacauacuugaa

SEQ ID NO: 1367642 - RNA, 14 nt, Human
ccagcccagagaca

SEQ ID NO: 1367643 - RNA, 13 nt, Human
ccagcccagagac

SEQ ID NO: 1367644 - RNA, 12 nt, Human
ccagcccagaga

SEQ ID NO: 1367645 - RNA, 11 nt, Human
ccagcccagag

SEQ ID NO: 1367646 - RNA, 18 nt, Human
ccagcccacccccggcag

SEQ ID NO: 1367647 - RNA, 21 nt, Human
ccagcccacccccggcagcag

SEQ ID NO: 1367648 - RNA, 17 nt, Human
ccagcccacccccggca

SEQ ID NO: 1367649 - RNA, 14 nt, Human
ccagcccacccccg

SEQ ID NO: 1367650 - RNA, 13 nt, Human
ccagcccaccccc

SEQ ID NO: 1367651 - RNA, 20 nt, Human
ccagccaucaagagacugag

SEQ ID NO: 1367652 - RNA, 18 nt, Human
ccagccaucaagagacug

SEQ ID NO: 1367653 - RNA, 18 nt, Human
ccagccaucaaaaugcuu

SEQ ID NO: 1367654 - RNA, 16 nt, Human
ccagccaucaaaaugc

SEQ ID NO: 1367655 - RNA, 20 nt, Human
ccagccugggaaagccccug

SEQ ID NO: 1367656 - RNA, 22 nt, Human
ccagccuggccuccugccucua

SEQ ID NO: 1367657 - RNA, 21 nt, Human
ccagccuggccuccugccucu

SEQ ID NO: 1367658 - RNA, 20 nt, Human
ccagccuggccuccugccuc

SEQ ID NO: 1367659 - RNA, 13 nt, Human
ccagccugggccu

SEQ ID NO: 1367660 - RNA, 11 nt, Human
ccagccugggc

SEQ ID NO: 1367661 - RNA, 12 nt, Human
ccagccugggcc

SEQ ID NO: 1367662 - RNA, 21 nt, Human
ccagccugggccuauggagag

SEQ ID NO: 1367663 - RNA, 19 nt, Human
ccagccugggccuauggag

SEQ ID NO: 1367664 - RNA, 17 nt, Human
ccagccugggccuaugg

SEQ ID NO: 1367665 - RNA, 14 nt, Human
ccagccugggccua

SEQ ID NO: 1367666 - RNA, 20 nt, Human
ccagcuccggccuguccucc

SEQ ID NO: 1367667 - RNA, 19 nt, Human
ccagcuccggccuguccuc

SEQ ID NO: 1367668 - RNA, 18 nt, Human
ccagcuccggccuguccu

SEQ ID NO: 1367669 - RNA, 17 nt, Human
ccagcucccuucuuccc

SEQ ID NO: 1367670 - RNA, 22 nt, Human
ccagcucccugugcccccaggg

SEQ ID NO: 1367671 - RNA, 19 nt, Human
ccagcucccugugccccca

SEQ ID NO: 1367672 - RNA, 18 nt, Human
ccagcucccugugccccc

SEQ ID NO: 1367673 - RNA, 23 nt, Human
ccagccuuuguuccccacuggag

SEQ ID NO: 1367674 - RNA, 21 nt, Human
ccagccuuuguuccccacugg

SEQ ID NO: 1367675 - RNA, 16 nt, Human
ccagccuuuguucccc

SEQ ID NO: 1367676 - RNA, 15 nt, Human
ccagccuuuguuccc

SEQ ID NO: 1367677 - RNA, 10 nt, Human
ccagccuguc

SEQ ID NO: 1367678 - RNA, 18 nt, Human
ccagccugucagauccag

SEQ ID NO: 1367679 - RNA, 13 nt, Human
ccagccugggguc

SEQ ID NO: 1367680 - RNA, 22 nt, Human
ccagccugggccuauggagagc

SEQ ID NO: 1367681 - RNA, 21 nt, Human
ccagccuggggcugaggcuga

SEQ ID NO: 1367682 - RNA, 21 nt, Human
ccaccugguacucccucucag

SEQ ID NO: 1367683 - RNA, 22 nt, Human
ccaccuggcucucaccucuagg

SEQ ID NO: 1367684 - RNA, 19 nt, Human
ccaccuggcucucaccucu

SEQ ID NO: 1367685 - RNA, 18 nt, Human
ccaccuggcucucaccuc

SEQ ID NO: 1367686 - RNA, 15 nt, Human
ccaccuggcucucac

SEQ ID NO: 1367687 - RNA, 12 nt, Human
ccaccuggcuca

SEQ ID NO: 1367688 - RNA, 20 nt, Human
ccaccuggaccccugcauug

SEQ ID NO: 1367689 - RNA, 21 nt, Human
ccaccuggaccccugcauugg

SEQ ID NO: 1367690 - RNA, 19 nt, Human
ccaccuggaccccugcauu

SEQ ID NO: 1367691 - RNA, 18 nt, Human
ccaccuggaccccugcau

SEQ ID NO: 1367692 - RNA, 17 nt, Human
ccaccuggaccccugca

SEQ ID NO: 1367693 - RNA, 12 nt, Human
ccaccuggaccc

SEQ ID NO: 1367694 - RNA, 11 nt, Human
ccaccuggacc

SEQ ID NO: 1367695 - RNA, 17 nt, Human
ccaccucugcugccucc

SEQ ID NO: 1367696 - RNA, 13 nt, Human
ccaccucugcugc

SEQ ID NO: 1367697 - RNA, 20 nt, Human
ccacccugcucauccacucu

SEQ ID NO: 1367698 - RNA, 13 nt, Human
ccacccugcucau

SEQ ID NO: 1367699 - RNA, 21 nt, Human
ccacccugaguugcuuuucag

SEQ ID NO: 1367700 - RNA, 20 nt, Human
ccacccugaguugcuuuuca

SEQ ID NO: 1367701 - RNA, 23 nt, Human
ccacccugaggagucugaggucc

SEQ ID NO: 1367702 - RNA, 21 nt, Human
ccacccugaggagucugaggu

SEQ ID NO: 1367703 - RNA, 15 nt, Human
ccacccugaggaguc

SEQ ID NO: 1367704 - RNA, 22 nt, Human
ccacccugagccggccccaggc

SEQ ID NO: 1367705 - RNA, 21 nt, Human
ccacccugagccggccccagg

SEQ ID NO: 1367706 - RNA, 21 nt, Human
ccaccuccugacacccuucuc

SEQ ID NO: 1367707 - RNA, 19 nt, Human
ccaccuccugacacccuuc

SEQ ID NO: 1367708 - RNA, 14 nt, Human
ccaccuccugacac

SEQ ID NO: 1367709 - RNA, 18 nt, Human
ccaccucuaacagcacca

SEQ ID NO: 1367710 - RNA, 15 nt, Human
ccaccucuaacagca

SEQ ID NO: 1367711 - RNA, 14 nt, Human
ccaccucuaacagc

SEQ ID NO: 1367712 - RNA, 20 nt, Human
ccaccucgcagguucaagca

SEQ ID NO: 1367713 - RNA, 21 nt, Human
ccaccucgcagguucaagcaa

SEQ ID NO: 1367714 - RNA, 21 nt, Human
ccaccucuaacagcaccaaau

SEQ ID NO: 1367715 - RNA, 20 nt, Human
ccaccucuaacagcaccaaa

SEQ ID NO: 1367716 - RNA, 13 nt, Human
ccaccucucaaua

SEQ ID NO: 1367717 - RNA, 14 nt, Human
ccaccucucaauau

SEQ ID NO: 1367718 - RNA, 23 nt, Human
ccaccucucaauauucaauaaag

SEQ ID NO: 1367719 - RNA, 14 nt, Human
ccacccccggcagc

SEQ ID NO: 1367720 - RNA, 16 nt, Human
ccacccccagcucaau

SEQ ID NO: 1367721 - RNA, 13 nt, Human
ccacccccagcuc

SEQ ID NO: 1367722 - RNA, 15 nt, Human
ccacccccaccccca

SEQ ID NO: 1367723 - RNA, 22 nt, Human
ccacccucggggauguguccug

SEQ ID NO: 1367724 - RNA, 20 nt, Human
ccacccucggggaugugucc

SEQ ID NO: 1367725 - RNA, 19 nt, Human
ccacccucggggauguguc

SEQ ID NO: 1367726 - RNA, 17 nt, Human
ccacccucguggacacc

SEQ ID NO: 1367727 - RNA, 18 nt, Human
ccacccucguggacaccu

SEQ ID NO: 1367728 - RNA, 15 nt, Human
ccacccugagccggc

SEQ ID NO: 1367729 - RNA, 13 nt, Human
ccacccugagccg

SEQ ID NO: 1367730 - RNA, 19 nt, Human
ccacccucguggacaccug

SEQ ID NO: 1367731 - RNA, 21 nt, Human
ccacuguccugggccugcaga

SEQ ID NO: 1367732 - RNA, 20 nt, Human
ccacuguccugggccugcag

SEQ ID NO: 1367733 - RNA, 19 nt, Human
ccacuguccugggccugca

SEQ ID NO: 1367734 - RNA, 15 nt, Human
ccacuguccugggcc

SEQ ID NO: 1367735 - RNA, 18 nt, Human
ccacuggggcucagagcc

SEQ ID NO: 1367736 - RNA, 15 nt, Human
ccacuggggcucaga

SEQ ID NO: 1367737 - RNA, 14 nt, Human
ccacuggggcucag

SEQ ID NO: 1367738 - RNA, 14 nt, Human
ccacugcuuuuccc

SEQ ID NO: 1367739 - RNA, 20 nt, Human
ccacugcugauauuuucucu

SEQ ID NO: 1367740 - RNA, 22 nt, Human
ccacugcugauauuuucucuag

SEQ ID NO: 1367741 - RNA, 19 nt, Human
ccacugcugauauuuucuc

SEQ ID NO: 1367742 - RNA, 18 nt, Human
ccacugcugauauuuucu

SEQ ID NO: 1367743 - RNA, 12 nt, Human
ccacugccuucg

SEQ ID NO: 1367744 - RNA, 23 nt, Human
ccaccugguacucccucucagga

SEQ ID NO: 1367745 - RNA, 21 nt, Human
ccagaaugcuguacaucuauu

SEQ ID NO: 1367746 - RNA, 14 nt, Human
ccacugugccucag

SEQ ID NO: 1367747 - RNA, 18 nt, Human
ccacugugcagguuccca

SEQ ID NO: 1367748 - RNA, 14 nt, Human
ccacuguuaucaaa

SEQ ID NO: 1367749 - RNA, 13 nt, Human
ccacuguguuccu

SEQ ID NO: 1367750 - RNA, 20 nt, Human
ccacugugccucagagacca

SEQ ID NO: 1367751 - RNA, 22 nt, Human
ccacugugccucagagaccagg

SEQ ID NO: 1367752 - RNA, 19 nt, Human
ccacugugccucagagacc

SEQ ID NO: 1367753 - RNA, 18 nt, Human
ccacugugccucagagac

SEQ ID NO: 1367754 - RNA, 16 nt, Human
ccacugugccucagag

SEQ ID NO: 1367755 - RNA, 15 nt, Human
ccacugugccucaga

SEQ ID NO: 1367756 - RNA, 16 nt, Human
ccacuguguuccuucc

SEQ ID NO: 1367757 - RNA, 15 nt, Human
ccacuguuuggaaau

SEQ ID NO: 1367758 - RNA, 14 nt, Human
ccacuuuuuagaaa

SEQ ID NO: 1367759 - RNA, 13 nt, Human
ccacuuuuugcag

SEQ ID NO: 1367760 - RNA, 20 nt, Human
ccagaacuugacccugagcu

SEQ ID NO: 1367761 - RNA, 22 nt, Human
ccagaagaaaauagugguguga

SEQ ID NO: 1367762 - RNA, 14 nt, Human
ccacuuuuugcagc

SEQ ID NO: 1367763 - RNA, 15 nt, Human
ccacuuuuugcagcu

SEQ ID NO: 1367764 - RNA, 17 nt, Human
ccacuuuuugcagcuuu

SEQ ID NO: 1367765 - RNA, 13 nt, Human
ccagaaaacaaaa

SEQ ID NO: 1367766 - RNA, 16 nt, Human
ccagaaaacaaaacug

SEQ ID NO: 1367767 - RNA, 16 nt, Human
ccacuuuuugcagcuu

SEQ ID NO: 1367768 - RNA, 16 nt, Human
ccagaaccaauuauuu

SEQ ID NO: 1367769 - RNA, 18 nt, Human
ccagaaaccuuuguuugc

SEQ ID NO: 1367770 - RNA, 23 nt, Human
ccagagccaggggggugaggagc

SEQ ID NO: 1367771 - RNA, 22 nt, Human
ccagagccaggggggugaggag

SEQ ID NO: 1367772 - RNA, 12 nt, Human
ccagagccaggg

SEQ ID NO: 1367773 - RNA, 11 nt, Human
ccagagccagg

SEQ ID NO: 1367774 - RNA, 13 nt, Human
ccagagccaaggg

SEQ ID NO: 1367775 - RNA, 13 nt, Human
ccagagauccaaa

SEQ ID NO: 1367776 - RNA, 13 nt, Human
ccagacacccagg

SEQ ID NO: 1367777 - RNA, 20 nt, Human
ccagacaugccacaaggacu

SEQ ID NO: 1367778 - RNA, 14 nt, Human
ccagacaugccaca

SEQ ID NO: 1367779 - RNA, 18 nt, Human
ccagacauaaaggaaaag

SEQ ID NO: 1367780 - RNA, 17 nt, Human
ccagacauaaaggaaaa

SEQ ID NO: 1367781 - RNA, 16 nt, Human
ccagacauaaaggaaa

SEQ ID NO: 1367782 - RNA, 14 nt, Human
ccagaccauggaca

SEQ ID NO: 1367783 - RNA, 20 nt, Human
ccagaaguaccagacuagau

SEQ ID NO: 1367784 - RNA, 16 nt, Human
ccagaaguaccagacu

SEQ ID NO: 1367785 - RNA, 19 nt, Human
ccagaagcucccccagcaa

SEQ ID NO: 1367786 - RNA, 20 nt, Human
ccagaagcucccccagcaaa

SEQ ID NO: 1367787 - RNA, 18 nt, Human
ccagaagcucccccagca

SEQ ID NO: 1367788 - RNA, 17 nt, Human
ccagaagcucccccagc

SEQ ID NO: 1367789 - RNA, 16 nt, Human
ccagaagcucccccag

SEQ ID NO: 1367790 - RNA, 15 nt, Human
ccagaagcuccccca

SEQ ID NO: 1367791 - RNA, 23 nt, Human
ccagaauaaguuauugcaguuua

SEQ ID NO: 1367792 - RNA, 22 nt, Human
ccagaauaaguuauugcaguuu

SEQ ID NO: 1367793 - RNA, 21 nt, Human
ccagaauaaguuauugcaguu

SEQ ID NO: 1367794 - RNA, 19 nt, Human
ccagaauaaguuauugcag

SEQ ID NO: 1367795 - RNA, 15 nt, Human
ccagaauaaguuauu

SEQ ID NO: 1367796 - RNA, 19 nt, Human
ccagacacaggcccucccu

SEQ ID NO: 1367797 - RNA, 17 nt, Human
ccagaaugcuguacauc

SEQ ID NO: 1367798 - RNA, 16 nt, Human
ccagaaugcuguacau

SEQ ID NO: 1367799 - RNA, 16 nt, Human
ccagaaugagacaucc

SEQ ID NO: 1367800 - RNA, 16 nt, Human
ccagugcacuugcugg

SEQ ID NO: 1367801 - RNA, 14 nt, Human
ccagugcacugaaa

SEQ ID NO: 1367802 - RNA, 20 nt, Human
ccagugcacuugcuggaaga

SEQ ID NO: 1367803 - RNA, 19 nt, Human
ccagugagcagccuggagc

SEQ ID NO: 1367804 - RNA, 16 nt, Human
ccagugaccaaccuuu

SEQ ID NO: 1367805 - RNA, 14 nt, Human
ccagugacagcuag

SEQ ID NO: 1367806 - RNA, 12 nt, Human
ccagugacagcu

SEQ ID NO: 1367807 - RNA, 21 nt, Human
ccagugacagacaggcucuua

SEQ ID NO: 1367808 - RNA, 19 nt, Human
ccagugacagacaggcucu

SEQ ID NO: 1367809 - RNA, 18 nt, Human
ccagugacagacaggcuc

SEQ ID NO: 1367810 - RNA, 17 nt, Human
ccagugacagacaggcu

SEQ ID NO: 1367811 - RNA, 15 nt, Human
ccagugacagacagg

SEQ ID NO: 1367812 - RNA, 23 nt, Human
ccaguaaaugggggugcauuuga

SEQ ID NO: 1367813 - RNA, 24 nt, Human
ccagguuggcucugccaguccugu

SEQ ID NO: 1367814 - RNA, 20 nt, Human
ccagguuggcucugccaguc

SEQ ID NO: 1367815 - RNA, 19 nt, Human
ccagguuggcucugccagu

SEQ ID NO: 1367816 - RNA, 20 nt, Human
ccaguaaaugggggugcauu

SEQ ID NO: 1367817 - RNA, 21 nt, Human
ccaguaaaugggggugcauuu

SEQ ID NO: 1367818 - RNA, 22 nt, Human
ccaguaaaugggggugcauuug

SEQ ID NO: 1367819 - RNA, 20 nt, Human
ccagguaggggccccucuca

SEQ ID NO: 1367820 - RNA, 21 nt, Human
ccagguaggccaagguguccu

SEQ ID NO: 1367821 - RNA, 15 nt, Human
ccagguaggccaagg

SEQ ID NO: 1367822 - RNA, 14 nt, Human
ccagguaggccaag

SEQ ID NO: 1367823 - RNA, 20 nt, Human
ccagguauucguuaucuaau

SEQ ID NO: 1367824 - RNA, 21 nt, Human
ccagguauucguuaucuaaua

SEQ ID NO: 1367825 - RNA, 23 nt, Human
ccauauuaaauuuuuuguugaca

SEQ ID NO: 1367826 - RNA, 22 nt, Human
ccauauuaaauuuuuuguugac

SEQ ID NO: 1367827 - RNA, 20 nt, Human
ccauauuaaauuuuuuguug

SEQ ID NO: 1367828 - RNA, 12 nt, Human
ccauauuaaauu

SEQ ID NO: 1367829 - RNA, 21 nt, Human
ccauaugcuaccaccagcugu

SEQ ID NO: 1367830 - RNA, 19 nt, Human
ccauaugcuaccaccagcu

SEQ ID NO: 1367831 - RNA, 18 nt, Human
ccauaugcuaccaccagc

SEQ ID NO: 1367832 - RNA, 17 nt, Human
ccauaugcuaccaccag

SEQ ID NO: 1367833 - RNA, 22 nt, Human
ccauaugcuaccaccagcugug

SEQ ID NO: 1367834 - RNA, 13 nt, Human
ccaucaucuccug

SEQ ID NO: 1367835 - RNA, 15 nt, Human
ccaucauccucuggc

SEQ ID NO: 1367836 - RNA, 14 nt, Human
ccaucauccucugg

SEQ ID NO: 1367837 - RNA, 13 nt, Human
ccaucauccucug

SEQ ID NO: 1367838 - RNA, 18 nt, Human
ccaucaaggguacacugc

SEQ ID NO: 1367839 - RNA, 19 nt, Human
ccauauuaccacagacaua

SEQ ID NO: 1367840 - RNA, 16 nt, Human
ccaucauccucuggcu

SEQ ID NO: 1367841 - RNA, 20 nt, Human
ccaucaucuauagaaagcua

SEQ ID NO: 1367842 - RNA, 24 nt, Human
ccagggccccucuccccagggaag

SEQ ID NO: 1367843 - RNA, 22 nt, Human
ccagggccccucuccccaggga

SEQ ID NO: 1367844 - RNA, 15 nt, Human
ccagggccccucucc

SEQ ID NO: 1367845 - RNA, 11 nt, Human
ccagggccccu

SEQ ID NO: 1367846 - RNA, 22 nt, Human
ccagggccccucacccugccuu

SEQ ID NO: 1367847 - RNA, 21 nt, Human
ccagggccccucacccugccu

SEQ ID NO: 1367848 - RNA, 17 nt, Human
ccagggcccccaucuca

SEQ ID NO: 1367849 - RNA, 20 nt, Human
ccagggcacaggagcuaccu

SEQ ID NO: 1367850 - RNA, 22 nt, Human
ccagggcacaggagcuaccugu

SEQ ID NO: 1367851 - RNA, 17 nt, Human
ccagggcacaggagcua

SEQ ID NO: 1367852 - RNA, 16 nt, Human
ccagggcacaggagcu

SEQ ID NO: 1367853 - RNA, 15 nt, Human
ccagggcacaggagc

SEQ ID NO: 1367854 - RNA, 14 nt, Human
ccagggcacaggag

SEQ ID NO: 1367855 - RNA, 13 nt, Human
ccagggcacagga

SEQ ID NO: 1367856 - RNA, 10 nt, Human
ccagggcaca

SEQ ID NO: 1367857 - RNA, 17 nt, Human
ccagggaggcugguccu

SEQ ID NO: 1367858 - RNA, 20 nt, Human
ccaggcuucugcuggggccu

SEQ ID NO: 1367859 - RNA, 18 nt, Human
ccaggcuucugcuggggc

SEQ ID NO: 1367860 - RNA, 16 nt, Human
ccaggcuucugcuggg

SEQ ID NO: 1367861 - RNA, 15 nt, Human
ccaggcuucugcugg

SEQ ID NO: 1367862 - RNA, 13 nt, Human
ccaggcuucugcu

SEQ ID NO: 1367863 - RNA, 20 nt, Human
ccaggcuggucuaaaacucc

SEQ ID NO: 1367864 - RNA, 17 nt, Human
ccaggcuggucuaaaac

SEQ ID NO: 1367865 - RNA, 16 nt, Human
ccaggcuggucuaaaa

SEQ ID NO: 1367866 - RNA, 15 nt, Human
ccagggucuccagaa

SEQ ID NO: 1367867 - RNA, 17 nt, Human
ccagggucuccagaaag

SEQ ID NO: 1367868 - RNA, 13 nt, Human
ccagggucuccag

SEQ ID NO: 1367869 - RNA, 12 nt, Human
ccagggucucca

SEQ ID NO: 1367870 - RNA, 23 nt, Human
ccaggguccugggaggagagaca

SEQ ID NO: 1367871 - RNA, 16 nt, Human
ccaggguccugggagg

SEQ ID NO: 1367872 - RNA, 14 nt, Human
ccaggguccuggga

SEQ ID NO: 1367873 - RNA, 16 nt, Human
ccagguacuugagaaa

SEQ ID NO: 1367874 - RNA, 14 nt, Human
ccagggugugugcu

SEQ ID NO: 1367875 - RNA, 20 nt, Human
ccagguagaggguguguaag

SEQ ID NO: 1367876 - RNA, 14 nt, Human
ccaggguggcagca

SEQ ID NO: 1367877 - RNA, 16 nt, Human
ccaggguggcagcaac

SEQ ID NO: 1367878 - RNA, 17 nt, Human
ccaggguggcagcaaca

SEQ ID NO: 1367879 - RNA, 13 nt, Human
ccaggccaccucc

SEQ ID NO: 1367880 - RNA, 17 nt, Human
ccaggagggacaaagga

SEQ ID NO: 1367881 - RNA, 16 nt, Human
ccaggagggacaaagg

SEQ ID NO: 1367882 - RNA, 17 nt, Human
ccaggccaccuccccag

SEQ ID NO: 1367883 - RNA, 16 nt, Human
ccaggccaccucccca

SEQ ID NO: 1367884 - RNA, 13 nt, Human
ccagcuccuuugg

SEQ ID NO: 1367885 - RNA, 20 nt, Human
ccagcucuacccugcauggc

SEQ ID NO: 1367886 - RNA, 14 nt, Human
ccagcuccuuuggg

SEQ ID NO: 1367887 - RNA, 23 nt, Human
ccagcuccugacacugcuggaga

SEQ ID NO: 1367888 - RNA, 20 nt, Human
ccagcuccugacacugcugg

SEQ ID NO: 1367889 - RNA, 12 nt, Human
ccagcuccugac

SEQ ID NO: 1367890 - RNA, 11 nt, Human
ccagcuccuga

SEQ ID NO: 1367891 - RNA, 21 nt, Human
ccaggccaccuccccagcauu

SEQ ID NO: 1367892 - RNA, 12 nt, Human
ccaggcuggguc

SEQ ID NO: 1367893 - RNA, 16 nt, Human
ccaggcugggucgccc

SEQ ID NO: 1367894 - RNA, 21 nt, Human
ccaggcugggucgcccuggac

SEQ ID NO: 1367895 - RNA, 22 nt, Human
ccaggcugggucgcccuggacu

SEQ ID NO: 1367896 - RNA, 23 nt, Human
ccaggcugggucgcccuggacug

SEQ ID NO: 1367897 - RNA, 24 nt, Human
ccaggcugggucgcccuggacugu

SEQ ID NO: 1367898 - RNA, 15 nt, Human
ccauucgugaaaaca

SEQ ID NO: 1367899 - RNA, 16 nt, Human
ccauuccuucccagag

SEQ ID NO: 1367900 - RNA, 13 nt, Human
ccauuccuuccca

SEQ ID NO: 1367901 - RNA, 20 nt, Human
ccauuauaaccuuaauuuau

SEQ ID NO: 1367902 - RNA, 20 nt, Human
ccauuauaaugaauuuagug

SEQ ID NO: 1367903 - RNA, 18 nt, Human
ccauucuccacagcaacc

SEQ ID NO: 1367904 - RNA, 16 nt, Human
ccauucuccacagcaa

SEQ ID NO: 1367905 - RNA, 15 nt, Human
ccauucuccacagca

SEQ ID NO: 1367906 - RNA, 13 nt, Human
ccauucuccacag

SEQ ID NO: 1367907 - RNA, 21 nt, Human
ccauucucacaggucccaaau

SEQ ID NO: 1367908 - RNA, 17 nt, Human
ccauucucaagcccugc

SEQ ID NO: 1367909 - RNA, 18 nt, Human
ccauucucaagcccugca

SEQ ID NO: 1367910 - RNA, 13 nt, Human
ccauucugacucg

SEQ ID NO: 1367911 - RNA, 12 nt, Human
ccauucugacuc

SEQ ID NO: 1367912 - RNA, 13 nt, Human
ccauucuccugag

SEQ ID NO: 1367913 - RNA, 22 nt, Human
ccauuugcauuuguuuauguaa

SEQ ID NO: 1367914 - RNA, 12 nt, Human
ccauuugcauuu

SEQ ID NO: 1367915 - RNA, 19 nt, Human
ccauuucugaggugcacug

SEQ ID NO: 1367916 - RNA, 20 nt, Human
ccauucugacucgguuucuc

SEQ ID NO: 1367917 - RNA, 22 nt, Human
ccauuuuaaaguuaguaucuuu

SEQ ID NO: 1367918 - RNA, 16 nt, Human
ccauuugcuuuuucac

SEQ ID NO: 1367919 - RNA, 15 nt, Human
ccauuugcauuuguu

SEQ ID NO: 1367920 - RNA, 17 nt, Human
ccauguguccugguucc

SEQ ID NO: 1367921 - RNA, 14 nt, Human
ccauguguccuggu

SEQ ID NO: 1367922 - RNA, 21 nt, Human
ccaucuugcuucccuaaucua

SEQ ID NO: 1367923 - RNA, 20 nt, Human
ccaucuugcuucccuaaucu

SEQ ID NO: 1367924 - RNA, 21 nt, Human
ccaucuugcccgcucaggcug

SEQ ID NO: 1367925 - RNA, 19 nt, Human
ccaucuugcccgcucaggc

SEQ ID NO: 1367926 - RNA, 15 nt, Human
ccaucugucugccaa

SEQ ID NO: 1367927 - RNA, 23 nt, Human
ccaucucugauuuucaaagcuuu

SEQ ID NO: 1367928 - RNA, 18 nt, Human
ccaucucugauuuucaaa

SEQ ID NO: 1367929 - RNA, 20 nt, Human
ccauuaaagaauaugaaaca

SEQ ID NO: 1367930 - RNA, 16 nt, Human
ccauuaaagaauauga

SEQ ID NO: 1367931 - RNA, 14 nt, Human
ccauuaaagaauau

SEQ ID NO: 1367932 - RNA, 12 nt, Human
ccauuaaagaau

SEQ ID NO: 1367933 - RNA, 23 nt, Human
ccauuaaacgauuuuuaaaaugu

SEQ ID NO: 1367934 - RNA, 10 nt, Human
ccauuaaacg

SEQ ID NO: 1367935 - RNA, 19 nt, Human
ccauuaaaccaucucccug

SEQ ID NO: 1367936 - RNA, 18 nt, Human
ccauuaaaccaucucccu

SEQ ID NO: 1367937 - RNA, 12 nt, Human
ccauuaaaccau

SEQ ID NO: 1367938 - RNA, 16 nt, Human
ccauuaccauguaaug

SEQ ID NO: 1367939 - RNA, 17 nt, Human
ccauuaaucaguucauu

SEQ ID NO: 1367940 - RNA, 22 nt, Human
ccauuaaccagaucuagucaau

SEQ ID NO: 1367941 - RNA, 18 nt, Human
ccauuaaagaauaugaaa

SEQ ID NO: 1367942 - RNA, 22 nt, Human
ccauguucugucccuugccccc

SEQ ID NO: 1367943 - RNA, 15 nt, Human
ccauguucugucccu

SEQ ID NO: 1367944 - RNA, 18 nt, Human
ccauguuagccaggcugg

SEQ ID NO: 1367945 - RNA, 16 nt, Human
ccauguguuauguuuu

SEQ ID NO: 1367946 - RNA, 20 nt, Human
ccauguuaaccccuccacuc

SEQ ID NO: 1367947 - RNA, 12 nt, Human
ccauuuuuccuu

SEQ ID NO: 1367948 - RNA, 22 nt, Human
ccauuuuguuauugacuaacag

SEQ ID NO: 1367949 - RNA, 23 nt, Human
ccauuuuguuauugacuaacagg

SEQ ID NO: 1367950 - RNA, 16 nt, Human
cccaacacugccagca

SEQ ID NO: 1367951 - RNA, 15 nt, Human
cccaacacugccagc

SEQ ID NO: 1367952 - RNA, 14 nt, Human
cccaacacugccag

SEQ ID NO: 1367953 - RNA, 18 nt, Human
ccauuuuguuauugacua

SEQ ID NO: 1367954 - RNA, 14 nt, Human
ccauuuucugguuc

SEQ ID NO: 1367955 - RNA, 17 nt, Human
cccaaccauuuccucag

SEQ ID NO: 1367956 - RNA, 18 nt, Human
cccaaccauuuccucaga

SEQ ID NO: 1367957 - RNA, 15 nt, Human
cccaacagcuggacc

SEQ ID NO: 1367958 - RNA, 23 nt, Human
cccaacagcuggacccugaccag

SEQ ID NO: 1367959 - RNA, 22 nt, Human
cccacacucagauccuccucau

SEQ ID NO: 1367960 - RNA, 20 nt, Human
cccaagugagucucucuggg

SEQ ID NO: 1367961 - RNA, 13 nt, Human
cccaagugagucu

SEQ ID NO: 1367962 - RNA, 23 nt, Human
cccaaguagcugggauuacaggu

SEQ ID NO: 1367963 - RNA, 17 nt, Human
cccaagguaccauccua

SEQ ID NO: 1367964 - RNA, 18 nt, Human
cccaaggggccugagcag

SEQ ID NO: 1367965 - RNA, 17 nt, Human
cccaacccguggaggcu

SEQ ID NO: 1367966 - RNA, 13 nt, Human
cccaacccgugga

SEQ ID NO: 1367967 - RNA, 14 nt, Human
cccacaucccuggg

SEQ ID NO: 1367968 - RNA, 13 nt, Human
cccacaucccugg

SEQ ID NO: 1367969 - RNA, 17 nt, Human
cccacaucccaucgucu

SEQ ID NO: 1367970 - RNA, 19 nt, Human
cccacagugucaggcacug

SEQ ID NO: 1367971 - RNA, 21 nt, Human
cccacagugucaggcacuggg

SEQ ID NO: 1367972 - RNA, 12 nt, Human
cccacagcaggc

SEQ ID NO: 1367973 - RNA, 18 nt, Human
cccaccucagccucccaa

SEQ ID NO: 1367974 - RNA, 17 nt, Human
cccaccgugggcaggga

SEQ ID NO: 1367975 - RNA, 15 nt, Human
cccaccgugggcagg

SEQ ID NO: 1367976 - RNA, 23 nt, Human
cccacaucccugggccugcugcu

SEQ ID NO: 1367977 - RNA, 24 nt, Human
cccacaucccugggccugcugcug

SEQ ID NO: 1367978 - RNA, 22 nt, Human
cccacaucccugggccugcugc

SEQ ID NO: 1367979 - RNA, 21 nt, Human
cccacaucccugggccugcug

SEQ ID NO: 1367980 - RNA, 20 nt, Human
cccacaucccugggccugcu

SEQ ID NO: 1367981 - RNA, 19 nt, Human
cccacaucccugggccugc

SEQ ID NO: 1367982 - RNA, 18 nt, Human
cccacaucccugggccug

SEQ ID NO: 1367983 - RNA, 17 nt, Human
cccacaucccugggccu

SEQ ID NO: 1367984 - RNA, 16 nt, Human
cccacaucccugggcc

SEQ ID NO: 1367985 - RNA, 15 nt, Human
cccacaucccugggc

SEQ ID NO: 1367986 - RNA, 20 nt, Human
cccaccguugucucaugcca

SEQ ID NO: 1367987 - RNA, 17 nt, Human
cccaccguugucucaug

SEQ ID NO: 1367988 - RNA, 19 nt, Human
cccaccgugggcagggagc

SEQ ID NO: 1367989 - RNA, 15 nt, Human
cccacgcucaccccc

SEQ ID NO: 1367990 - RNA, 16 nt, Human
cccacgcucacccccu

SEQ ID NO: 1367991 - RNA, 14 nt, Human
cccacgccuuaucc

SEQ ID NO: 1367992 - RNA, 15 nt, Human
cccacgucagcuggg

SEQ ID NO: 1367993 - RNA, 15 nt, Human
cccacggccuuucua

SEQ ID NO: 1367994 - RNA, 15 nt, Human
cccacggcuccucga

SEQ ID NO: 1367995 - RNA, 20 nt, Human
cccacggagucguggggugu

SEQ ID NO: 1367996 - RNA, 19 nt, Human
cccagaauaaguuauugca

SEQ ID NO: 1367997 - RNA, 22 nt, Human
cccagaauaaguuauugcaguu

SEQ ID NO: 1367998 - RNA, 12 nt, Human
cccagaaugaga

SEQ ID NO: 1367999 - RNA, 18 nt, Human
cccagaaugagacaucca

SEQ ID NO: 1368000 - RNA, 16 nt, Human
ccccacuccucugcug

SEQ ID NO: 1368001 - RNA, 21 nt, Human
ccccacuccucugcugaccug

SEQ ID NO: 1368002 - RNA, 12 nt, Human
ccccacuccucu

SEQ ID NO: 1368003 - RNA, 14 nt, Human
ccccacucccucac

SEQ ID NO: 1368004 - RNA, 13 nt, Human
ccccacucccuca

SEQ ID NO: 1368005 - RNA, 15 nt, Human
ccccacucccucaca

SEQ ID NO: 1368006 - RNA, 14 nt, Human
ccccacucccacau

SEQ ID NO: 1368007 - RNA, 19 nt, Human
ccccacuuguccuuagccu

SEQ ID NO: 1368008 - RNA, 15 nt, Human
ccccacuuucuuucu

SEQ ID NO: 1368009 - RNA, 21 nt, Human
ccccacuugccucuuccuuga

SEQ ID NO: 1368010 - RNA, 16 nt, Human
ccccacuugccucuuc

SEQ ID NO: 1368011 - RNA, 15 nt, Human
ccccacuugccucuu

SEQ ID NO: 1368012 - RNA, 14 nt, Human
ccccacuugccucu

SEQ ID NO: 1368013 - RNA, 13 nt, Human
ccccacuugccuc

SEQ ID NO: 1368014 - RNA, 14 nt, Human
ccccacuguaucua

SEQ ID NO: 1368015 - RNA, 21 nt, Human
ccccacgagggcuggcuggcc

SEQ ID NO: 1368016 - RNA, 18 nt, Human
ccccacgagggcuggcug

SEQ ID NO: 1368017 - RNA, 17 nt, Human
ccccacgagggcuggcu

SEQ ID NO: 1368018 - RNA, 16 nt, Human
ccccacgagggcuggc

SEQ ID NO: 1368019 - RNA, 15 nt, Human
ccccacgagggcugg

SEQ ID NO: 1368020 - RNA, 14 nt, Human
ccccacgagggcug

SEQ ID NO: 1368021 - RNA, 13 nt, Human
ccccacgagggcu

SEQ ID NO: 1368022 - RNA, 14 nt, Human
ccccaccuggcuca

SEQ ID NO: 1368023 - RNA, 22 nt, Human
ccccaccguugucucaugccag

SEQ ID NO: 1368024 - RNA, 21 nt, Human
ccccacccuguuccugcugcu

SEQ ID NO: 1368025 - RNA, 20 nt, Human
ccccacccuguuccugcugc

SEQ ID NO: 1368026 - RNA, 19 nt, Human
ccccacccuguuccugcug

SEQ ID NO: 1368027 - RNA, 18 nt, Human
ccccacccuguuccugcu

SEQ ID NO: 1368028 - RNA, 17 nt, Human
ccccacccuguuccugc

SEQ ID NO: 1368029 - RNA, 14 nt, Human
ccccacccuguucc

SEQ ID NO: 1368030 - RNA, 20 nt, Human
ccccacccuggugggccaac

SEQ ID NO: 1368031 - RNA, 14 nt, Human
ccccaauccuccca

SEQ ID NO: 1368032 - RNA, 13 nt, Human
ccccaagguucuc

SEQ ID NO: 1368033 - RNA, 20 nt, Human
ccccacaccagggccagccu

SEQ ID NO: 1368034 - RNA, 18 nt, Human
ccccacaagugcccucca

SEQ ID NO: 1368035 - RNA, 18 nt, Human
cccauucauuccauucug

SEQ ID NO: 1368036 - RNA, 22 nt, Human
cccauucauuccauucuggaag

SEQ ID NO: 1368037 - RNA, 18 nt, Human
cccauuccugaagaacca

SEQ ID NO: 1368038 - RNA, 13 nt, Human
cccauuccugaag

SEQ ID NO: 1368039 - RNA, 12 nt, Human
cccauuccugaa

SEQ ID NO: 1368040 - RNA, 18 nt, Human
cccauucccgcaguggga

SEQ ID NO: 1368041 - RNA, 16 nt, Human
cccauucccgcagugg

SEQ ID NO: 1368042 - RNA, 15 nt, Human
cccauucccgcagug

SEQ ID NO: 1368043 - RNA, 12 nt, Human
cccauucccgca

SEQ ID NO: 1368044 - RNA, 21 nt, Human
cccauucauuccauucuggaa

SEQ ID NO: 1368045 - RNA, 20 nt, Human
ccccacccccagcucaaugg

SEQ ID NO: 1368046 - RNA, 17 nt, Human
ccccacccccagcucaa

SEQ ID NO: 1368047 - RNA, 16 nt, Human
ccccacccccagcuca

SEQ ID NO: 1368048 - RNA, 13 nt, Human
ccccacccccagc

SEQ ID NO: 1368049 - RNA, 20 nt, Human
ccccaccccagggcagccag

SEQ ID NO: 1368050 - RNA, 16 nt, Human
ccccaccccagggcag

SEQ ID NO: 1368051 - RNA, 15 nt, Human
ccccaccccagggca

SEQ ID NO: 1368052 - RNA, 14 nt, Human
ccccaccccagggc

SEQ ID NO: 1368053 - RNA, 13 nt, Human
ccccacccacuuc

SEQ ID NO: 1368054 - RNA, 22 nt, Human
ccccacccaccaacccucaggg

SEQ ID NO: 1368055 - RNA, 21 nt, Human
ccccacccaccaacccucagg

SEQ ID NO: 1368056 - RNA, 16 nt, Human
ccccacccacuucugc

SEQ ID NO: 1368057 - RNA, 18 nt, Human
ccccacccaggccaggca

SEQ ID NO: 1368058 - RNA, 14 nt, Human
ccccacccacuucu

SEQ ID NO: 1368059 - RNA, 15 nt, Human
ccccacccucgggga

SEQ ID NO: 1368060 - RNA, 14 nt, Human
ccccacccccaagg

SEQ ID NO: 1368061 - RNA, 12 nt, Human
ccccacccucau

SEQ ID NO: 1368062 - RNA, 23 nt, Human
ccccacccucggggauguguccu

SEQ ID NO: 1368063 - RNA, 21 nt, Human
ccccacccucggggauguguc

SEQ ID NO: 1368064 - RNA, 21 nt, Human
ccccacccucguggacaccug

SEQ ID NO: 1368065 - RNA, 22 nt, Human
ccccacccucguggacaccugc

SEQ ID NO: 1368066 - RNA, 23 nt, Human
ccccacccucguggacaccugcc

SEQ ID NO: 1368067 - RNA, 14 nt, Human
ccccacccuggccu

SEQ ID NO: 1368068 - RNA, 20 nt, Human
ccccacccugggcccugggc

SEQ ID NO: 1368069 - RNA, 15 nt, Human
ccccacccugggccc

SEQ ID NO: 1368070 - RNA, 14 nt, Human
ccccacccugggcc

SEQ ID NO: 1368071 - RNA, 12 nt, Human
ccccacccuggg

SEQ ID NO: 1368072 - RNA, 22 nt, Human
cccauggacaggcuggcuccag

SEQ ID NO: 1368073 - RNA, 20 nt, Human
cccauggacaggcuggcucc

SEQ ID NO: 1368074 - RNA, 15 nt, Human
cccauggacaggcug

SEQ ID NO: 1368075 - RNA, 18 nt, Human
cccaugcuguccauccau

SEQ ID NO: 1368076 - RNA, 23 nt, Human
cccaugcuggccuugccacacuc

SEQ ID NO: 1368077 - RNA, 22 nt, Human
cccaugcacugugaaggacccu

SEQ ID NO: 1368078 - RNA, 20 nt, Human
cccaugcacugugaaggacc

SEQ ID NO: 1368079 - RNA, 19 nt, Human
cccaugcacugugaaggac

SEQ ID NO: 1368080 - RNA, 18 nt, Human
cccaugcacugugaagga

SEQ ID NO: 1368081 - RNA, 16 nt, Human
cccaugcacugugaag

SEQ ID NO: 1368082 - RNA, 14 nt, Human
cccaugcacuguga

SEQ ID NO: 1368083 - RNA, 12 nt, Human
cccaugcacugu

SEQ ID NO: 1368084 - RNA, 15 nt, Human
cccaugaucccugug

SEQ ID NO: 1368085 - RNA, 23 nt, Human
cccaugaguuggggucuggcagc

SEQ ID NO: 1368086 - RNA, 22 nt, Human
cccaugagcuccuuaaggcucu

SEQ ID NO: 1368087 - RNA, 15 nt, Human
cccaugagcuccuua

SEQ ID NO: 1368088 - RNA, 14 nt, Human
cccaugagcuccuu

SEQ ID NO: 1368089 - RNA, 16 nt, Human
cccaugaccuccagcu

SEQ ID NO: 1368090 - RNA, 15 nt, Human
cccaugaccuccagc

SEQ ID NO: 1368091 - RNA, 14 nt, Human
cccaugaccuccag

SEQ ID NO: 1368092 - RNA, 13 nt, Human
cccaugagcuccu

SEQ ID NO: 1368093 - RNA, 18 nt, Human
cccaugaccccaaagcca

SEQ ID NO: 1368094 - RNA, 17 nt, Human
cccaucugucugccaac

SEQ ID NO: 1368095 - RNA, 18 nt, Human
cccaucugcauucccagc

SEQ ID NO: 1368096 - RNA, 22 nt, Human
cccaucucaugccccuggcugg

SEQ ID NO: 1368097 - RNA, 21 nt, Human
cccaucucaugccccuggcug

SEQ ID NO: 1368098 - RNA, 22 nt, Human
cccaguuggagcuccagccuga

SEQ ID NO: 1368099 - RNA, 21 nt, Human
cccaguuggagcuccagccug

SEQ ID NO: 1368100 - RNA, 17 nt, Human
cccaguuggagcuccag

SEQ ID NO: 1368101 - RNA, 16 nt, Human
cccaguuggagcucca

SEQ ID NO: 1368102 - RNA, 15 nt, Human
cccaguuggagcucc

SEQ ID NO: 1368103 - RNA, 20 nt, Human
cccaguugcacucaggugac

SEQ ID NO: 1368104 - RNA, 17 nt, Human
cccaguugccaucugcg

SEQ ID NO: 1368105 - RNA, 15 nt, Human
cccaguugccaucug

SEQ ID NO: 1368106 - RNA, 19 nt, Human
cccaguugcacucagguga

SEQ ID NO: 1368107 - RNA, 21 nt, Human
cccaguuccuguggcucccuc

SEQ ID NO: 1368108 - RNA, 18 nt, Human
cccaguuccuguggcucc

SEQ ID NO: 1368109 - RNA, 16 nt, Human
cccaguuccuguggcu

SEQ ID NO: 1368110 - RNA, 15 nt, Human
cccagagacccagcg

SEQ ID NO: 1368111 - RNA, 14 nt, Human
cccagagacccagc

SEQ ID NO: 1368112 - RNA, 13 nt, Human
cccagagacccag

SEQ ID NO: 1368113 - RNA, 23 nt, Human
cccagagacauacuugaagggcc

SEQ ID NO: 1368114 - RNA, 22 nt, Human
cccagagacauacuugaagggc

SEQ ID NO: 1368115 - RNA, 21 nt, Human
cccagagacauacuugaaggg

SEQ ID NO: 1368116 - RNA, 18 nt, Human
cccagagacauacuugaa

SEQ ID NO: 1368117 - RNA, 22 nt, Human
cccagagaaaggggagcccacu

SEQ ID NO: 1368118 - RNA, 13 nt, Human
cccagagaagcca

SEQ ID NO: 1368119 - RNA, 20 nt, Human
cccagaaugagacauccagc

SEQ ID NO: 1368120 - RNA, 21 nt, Human
ccccaguuccuguggcucccu

SEQ ID NO: 1368121 - RNA, 22 nt, Human
ccccaguuccuguggcucccuc

SEQ ID NO: 1368122 - RNA, 15 nt, Human
ccccagugacagcua

SEQ ID NO: 1368123 - RNA, 20 nt, Human
ccccaucagugcucccucac

SEQ ID NO: 1368124 - RNA, 14 nt, Human
ccccaucagugcuc

SEQ ID NO: 1368125 - RNA, 13 nt, Human
ccccaucagugcu

SEQ ID NO: 1368126 - RNA, 15 nt, Human
ccccauacuccuaug

SEQ ID NO: 1368127 - RNA, 11 nt, Human
ccccagggcac

SEQ ID NO: 1368128 - RNA, 22 nt, Human
ccccagggaagcagcagccucg

SEQ ID NO: 1368129 - RNA, 20 nt, Human
ccccagggaagcagcagccu

SEQ ID NO: 1368130 - RNA, 18 nt, Human
ccccagggaagcagcagc

SEQ ID NO: 1368131 - RNA, 16 nt, Human
ccccagggaagcagca

SEQ ID NO: 1368132 - RNA, 13 nt, Human
ccccaggcugaag

SEQ ID NO: 1368133 - RNA, 18 nt, Human
ccccaggcucguggacug

SEQ ID NO: 1368134 - RNA, 15 nt, Human
ccccaggcucgugga

SEQ ID NO: 1368135 - RNA, 23 nt, Human
ccccaggccugaaagaggcugag

SEQ ID NO: 1368136 - RNA, 21 nt, Human
ccccaggccugaaagaggcug

SEQ ID NO: 1368137 - RNA, 18 nt, Human
ccccagacuagauguagu

SEQ ID NO: 1368138 - RNA, 15 nt, Human
ccccagacuagaugu

SEQ ID NO: 1368139 - RNA, 13 nt, Human
ccccagacacugg

SEQ ID NO: 1368140 - RNA, 22 nt, Human
ccccagggcacaggagcuaccu

SEQ ID NO: 1368141 - RNA, 23 nt, Human
ccccagggcacaggagcuaccug

SEQ ID NO: 1368142 - RNA, 13 nt, Human
ccccaguaaaauu

SEQ ID NO: 1368143 - RNA, 14 nt, Human
ccccaguaaaauug

SEQ ID NO: 1368144 - RNA, 19 nt, Human
ccccagggcacaggagcua

SEQ ID NO: 1368145 - RNA, 18 nt, Human
ccccagggcacaggagcu

SEQ ID NO: 1368146 - RNA, 17 nt, Human
ccccagggcacaggagc

SEQ ID NO: 1368147 - RNA, 16 nt, Human
ccccagggcacaggag

SEQ ID NO: 1368148 - RNA, 15 nt, Human
ccccagggcacagga

SEQ ID NO: 1368149 - RNA, 14 nt, Human
ccccagggcacagg

SEQ ID NO: 1368150 - RNA, 12 nt, Human
ccccagggcaca

SEQ ID NO: 1368151 - RNA, 12 nt, Human
ccccagggagag

SEQ ID NO: 1368152 - RNA, 14 nt, Human
ccccaguacacagg

SEQ ID NO: 1368153 - RNA, 18 nt, Human
ccccaguaucucuucagu

SEQ ID NO: 1368154 - RNA, 17 nt, Human
ccccaguaaaauugcca

SEQ ID NO: 1368155 - RNA, 14 nt, Human
cccccacccccagc

SEQ ID NO: 1368156 - RNA, 14 nt, Human
ccccaucccaugcu

SEQ ID NO: 1368157 - RNA, 17 nt, Human
ccccaucauccucuggc

SEQ ID NO: 1368158 - RNA, 16 nt, Human
ccccaucauccucugg

SEQ ID NO: 1368159 - RNA, 17 nt, Human
ccccaucauugguaccc

SEQ ID NO: 1368160 - RNA, 22 nt, Human
cccccacuugccucuuccuuga

SEQ ID NO: 1368161 - RNA, 22 nt, Human
cccccagaaaagaaagcuacag

SEQ ID NO: 1368162 - RNA, 18 nt, Human
cccccacccuguuccugc

SEQ ID NO: 1368163 - RNA, 14 nt, Human
cccccacccuguuc

SEQ ID NO: 1368164 - RNA, 11 nt, Human
cccccacccug

SEQ ID NO: 1368165 - RNA, 17 nt, Human
cccccacccccagcuca

SEQ ID NO: 1368166 - RNA, 15 nt, Human
cccccacccccagcu

SEQ ID NO: 1368167 - RNA, 20 nt, Human
cccccaccuggcucaccuug

SEQ ID NO: 1368168 - RNA, 15 nt, Human
cccccaccuggcuca

SEQ ID NO: 1368169 - RNA, 20 nt, Human
cccccaccucugcugccucc

SEQ ID NO: 1368170 - RNA, 14 nt, Human
cccccacucccuca

SEQ ID NO: 1368171 - RNA, 17 nt, Human
cccccacugccuuugac

SEQ ID NO: 1368172 - RNA, 15 nt, Human
ccccucuccuucuua

SEQ ID NO: 1368173 - RNA, 22 nt, Human
ccccucucccuugggcucugau

SEQ ID NO: 1368174 - RNA, 19 nt, Human
ccccucuccuuccugugug

SEQ ID NO: 1368175 - RNA, 14 nt, Human
ccccucuccuuccu

SEQ ID NO: 1368176 - RNA, 15 nt, Human
ccccucucccuuggg

SEQ ID NO: 1368177 - RNA, 18 nt, Human
ccccucucccugcauggc

SEQ ID NO: 1368178 - RNA, 12 nt, Human
ccccucucccuu

SEQ ID NO: 1368179 - RNA, 14 nt, Human
ccccucucccugca

SEQ ID NO: 1368180 - RNA, 17 nt, Human
ccccucucccaguuguc

SEQ ID NO: 1368181 - RNA, 14 nt, Human
ccccucucagcccu

SEQ ID NO: 1368182 - RNA, 15 nt, Human
ccccucucagcccuc

SEQ ID NO: 1368183 - RNA, 13 nt, Human
ccccucucagccc

SEQ ID NO: 1368184 - RNA, 12 nt, Human
ccccucucacca

SEQ ID NO: 1368185 - RNA, 14 nt, Human
ccccuccuucccaa

SEQ ID NO: 1368186 - RNA, 21 nt, Human
ccccuccucuagcuguggggg

SEQ ID NO: 1368187 - RNA, 19 nt, Human
ccccuccgcccugccacuc

SEQ ID NO: 1368188 - RNA, 18 nt, Human
ccccuccgcccugccacu

SEQ ID NO: 1368189 - RNA, 17 nt, Human
ccccuccgcccugccac

SEQ ID NO: 1368190 - RNA, 19 nt, Human
ccccuccucuagcuguggg

SEQ ID NO: 1368191 - RNA, 17 nt, Human
ccccuccucuagcugug

SEQ ID NO: 1368192 - RNA, 14 nt, Human
ccccucccuggaug

SEQ ID NO: 1368193 - RNA, 16 nt, Human
ccccuccgcccugcca

SEQ ID NO: 1368194 - RNA, 14 nt, Human
ccccucaccuccuc

SEQ ID NO: 1368195 - RNA, 13 nt, Human
ccccucaccuccu

SEQ ID NO: 1368196 - RNA, 12 nt, Human
ccccucaccucc

SEQ ID NO: 1368197 - RNA, 16 nt, Human
ccccucacccugccuu

SEQ ID NO: 1368198 - RNA, 13 nt, Human
ccccucacccugc

SEQ ID NO: 1368199 - RNA, 23 nt, Human
ccccucagccucuccccugccug

SEQ ID NO: 1368200 - RNA, 20 nt, Human
ccccucaucucucugcccaa

SEQ ID NO: 1368201 - RNA, 16 nt, Human
ccccuccaaaaugugc

SEQ ID NO: 1368202 - RNA, 21 nt, Human
ccccuccaaaaugugccuauu

SEQ ID NO: 1368203 - RNA, 12 nt, Human
ccccuccacucu

SEQ ID NO: 1368204 - RNA, 17 nt, Human
ccccuccacucuuucuu

SEQ ID NO: 1368205 - RNA, 13 nt, Human
cccccucccccac

SEQ ID NO: 1368206 - RNA, 15 nt, Human
cccccagcuccggcc

SEQ ID NO: 1368207 - RNA, 15 nt, Human
cccccagcucccacc

SEQ ID NO: 1368208 - RNA, 21 nt, Human
cccccagcuaagaaccuggaa

SEQ ID NO: 1368209 - RNA, 18 nt, Human
cccccagcuaagaaccug

SEQ ID NO: 1368210 - RNA, 13 nt, Human
cccccagcuaaga

SEQ ID NO: 1368211 - RNA, 13 nt, Human
cccccagccuguc

SEQ ID NO: 1368212 - RNA, 12 nt, Human
cccccagccugu

SEQ ID NO: 1368213 - RNA, 16 nt, Human
cccccagccugggccu

SEQ ID NO: 1368214 - RNA, 15 nt, Human
cccccagccugggcc

SEQ ID NO: 1368215 - RNA, 14 nt, Human
cccccagccugggc

SEQ ID NO: 1368216 - RNA, 13 nt, Human
cccccagccuggg

SEQ ID NO: 1368217 - RNA, 12 nt, Human
cccccagccugg

SEQ ID NO: 1368218 - RNA, 11 nt, Human
cccccagccug

SEQ ID NO: 1368219 - RNA, 15 nt, Human
cccccagccucuggc

SEQ ID NO: 1368220 - RNA, 20 nt, Human
cccccagcaaagcccccaga

SEQ ID NO: 1368221 - RNA, 12 nt, Human
cccccagauauc

SEQ ID NO: 1368222 - RNA, 23 nt, Human
cccccagagcccaggcucggccu

SEQ ID NO: 1368223 - RNA, 16 nt, Human
cccccagagcccaggc

SEQ ID NO: 1368224 - RNA, 16 nt, Human
cccccugccccccagc

SEQ ID NO: 1368225 - RNA, 14 nt, Human
cccccugcaggaag

SEQ ID NO: 1368226 - RNA, 12 nt, Human
cccccugcagga

SEQ ID NO: 1368227 - RNA, 23 nt, Human
cccccugcagcuuguagccagcc

SEQ ID NO: 1368228 - RNA, 14 nt, Human
cccccugcagcuug

SEQ ID NO: 1368229 - RNA, 17 nt, Human
cccccugaccacucaga

SEQ ID NO: 1368230 - RNA, 11 nt, Human
cccccugcagc

SEQ ID NO: 1368231 - RNA, 14 nt, Human
cccccucccuggau

SEQ ID NO: 1368232 - RNA, 19 nt, Human
cccccuccgcccugccacu

SEQ ID NO: 1368233 - RNA, 16 nt, Human
cccccucccuggauga

SEQ ID NO: 1368234 - RNA, 13 nt, Human
cccccucccugga

SEQ ID NO: 1368235 - RNA, 12 nt, Human
cccccucccucc

SEQ ID NO: 1368236 - RNA, 16 nt, Human
cccccucugucuugug

SEQ ID NO: 1368237 - RNA, 12 nt, Human
cccccucugucc

SEQ ID NO: 1368238 - RNA, 12 nt, Human
cccccugugcag

SEQ ID NO: 1368239 - RNA, 18 nt, Human
cccccuguacacaacuca

SEQ ID NO: 1368240 - RNA, 20 nt, Human
cccccuguacacaacucacu

SEQ ID NO: 1368241 - RNA, 12 nt, Human
cccccuguacac

SEQ ID NO: 1368242 - RNA, 17 nt, Human
cccccugguccccuccu

SEQ ID NO: 1368243 - RNA, 15 nt, Human
cccccugguccccuc

SEQ ID NO: 1368244 - RNA, 21 nt, Human
cccccugccccccagccucug

SEQ ID NO: 1368245 - RNA, 23 nt, Human
cccccugucucucagggccaggc

SEQ ID NO: 1368246 - RNA, 21 nt, Human
cccccugugcagccgcugagc

SEQ ID NO: 1368247 - RNA, 13 nt, Human
ccccucaccccuc

SEQ ID NO: 1368248 - RNA, 20 nt, Human
ccccucacaguauugcucac

SEQ ID NO: 1368249 - RNA, 18 nt, Human
ccccucaaaucguccagc

SEQ ID NO: 1368250 - RNA, 20 nt, Human
ccccuagcgcuaucucccug

SEQ ID NO: 1368251 - RNA, 15 nt, Human
ccccuagccugccuc

SEQ ID NO: 1368252 - RNA, 19 nt, Human
ccccuggccucccccacuu

SEQ ID NO: 1368253 - RNA, 21 nt, Human
ccccuggcagagaugccuccc

SEQ ID NO: 1368254 - RNA, 12 nt, Human
ccccuggcagag

SEQ ID NO: 1368255 - RNA, 15 nt, Human
ccccuggagggggaa

SEQ ID NO: 1368256 - RNA, 20 nt, Human
ccccuggaggcacugaagug

SEQ ID NO: 1368257 - RNA, 14 nt, Human
ccccugcuuugggc

SEQ ID NO: 1368258 - RNA, 22 nt, Human
ccccugcuuugggcuugggccu

SEQ ID NO: 1368259 - RNA, 15 nt, Human
ccccugccugcccug

SEQ ID NO: 1368260 - RNA, 19 nt, Human
ccccugccugcccugguga

SEQ ID NO: 1368261 - RNA, 18 nt, Human
ccccugcccccugcagga

SEQ ID NO: 1368262 - RNA, 17 nt, Human
ccccugcccccugcagg

SEQ ID NO: 1368263 - RNA, 16 nt, Human
ccccugcccccugcag

SEQ ID NO: 1368264 - RNA, 15 nt, Human
ccccugcccccugca

SEQ ID NO: 1368265 - RNA, 18 nt, Human
ccccucugaccugcacug

SEQ ID NO: 1368266 - RNA, 15 nt, Human
ccccucugaccugca

SEQ ID NO: 1368267 - RNA, 13 nt, Human
ccccugccccucc

SEQ ID NO: 1368268 - RNA, 14 nt, Human
ccccugccucucug

SEQ ID NO: 1368269 - RNA, 15 nt, Human
ccccugccucucugc

SEQ ID NO: 1368270 - RNA, 16 nt, Human
ccccugccucucugca

SEQ ID NO: 1368271 - RNA, 17 nt, Human
ccccugccucucugcag

SEQ ID NO: 1368272 - RNA, 19 nt, Human
ccccugccucucugcaggu

SEQ ID NO: 1368273 - RNA, 22 nt, Human
cccgagcagcugagcagggccg

SEQ ID NO: 1368274 - RNA, 21 nt, Human
cccgagcagcugagcagggcc

SEQ ID NO: 1368275 - RNA, 19 nt, Human
cccgagcagcugagcaggg

SEQ ID NO: 1368276 - RNA, 16 nt, Human
cccgagcagcugagca

SEQ ID NO: 1368277 - RNA, 15 nt, Human
cccgagcagcugagc

SEQ ID NO: 1368278 - RNA, 13 nt, Human
cccgagcagcuga

SEQ ID NO: 1368279 - RNA, 12 nt, Human
cccgagcagcug

SEQ ID NO: 1368280 - RNA, 20 nt, Human
cccgagaaaacaaacccagg

SEQ ID NO: 1368281 - RNA, 21 nt, Human
cccgagaacauggccuaaggg

SEQ ID NO: 1368282 - RNA, 17 nt, Human
cccgacuggggcagggu

SEQ ID NO: 1368283 - RNA, 16 nt, Human
cccgcagacaccuugg

SEQ ID NO: 1368284 - RNA, 15 nt, Human
cccgcagacaccuug

SEQ ID NO: 1368285 - RNA, 14 nt, Human
cccgagcuccucuu

SEQ ID NO: 1368286 - RNA, 17 nt, Human
cccgagcuccucuucca

SEQ ID NO: 1368287 - RNA, 23 nt, Human
cccgcagugggagcaaacugcau

SEQ ID NO: 1368288 - RNA, 20 nt, Human
ccccugugcagccgcugagc

SEQ ID NO: 1368289 - RNA, 19 nt, Human
ccccugugcagccgcugag

SEQ ID NO: 1368290 - RNA, 14 nt, Human
ccccugugccuugu

SEQ ID NO: 1368291 - RNA, 14 nt, Human
ccccuguucaugcc

SEQ ID NO: 1368292 - RNA, 14 nt, Human
ccccuuccacugag

SEQ ID NO: 1368293 - RNA, 16 nt, Human
ccccuucauccucuga

SEQ ID NO: 1368294 - RNA, 20 nt, Human
ccccugggguggccaccagu

SEQ ID NO: 1368295 - RNA, 19 nt, Human
ccccugggguggccaccag

SEQ ID NO: 1368296 - RNA, 13 nt, Human
ccccugggguggc

SEQ ID NO: 1368297 - RNA, 23 nt, Human
ccccuggcugggacguggcucag

SEQ ID NO: 1368298 - RNA, 22 nt, Human
ccccuggcugggacguggcuca

SEQ ID NO: 1368299 - RNA, 11 nt, Human
ccccugugcag

SEQ ID NO: 1368300 - RNA, 23 nt, Human
ccccugucucucagggccaggcc

SEQ ID NO: 1368301 - RNA, 22 nt, Human
ccccugucucucagggccaggc

SEQ ID NO: 1368302 - RNA, 21 nt, Human
ccccugguccccuccuuccca

SEQ ID NO: 1368303 - RNA, 17 nt, Human
ccccugguccccuccuu

SEQ ID NO: 1368304 - RNA, 17 nt, Human
ccccuggucccucugca

SEQ ID NO: 1368305 - RNA, 18 nt, Human
ccccuggucccucugcag

SEQ ID NO: 1368306 - RNA, 23 nt, Human
ccccuggugcacuggccccaccc

SEQ ID NO: 1368307 - RNA, 14 nt, Human
cccucuccuuccug

SEQ ID NO: 1368308 - RNA, 17 nt, Human
cccucuccuuccugugu

SEQ ID NO: 1368309 - RNA, 22 nt, Human
cccucucccuugggcucugaug

SEQ ID NO: 1368310 - RNA, 17 nt, Human
cccucucccugcauggc

SEQ ID NO: 1368311 - RNA, 16 nt, Human
cccucucccugcaugg

SEQ ID NO: 1368312 - RNA, 15 nt, Human
cccucucccugcaug

SEQ ID NO: 1368313 - RNA, 14 nt, Human
cccucucccugcau

SEQ ID NO: 1368314 - RNA, 13 nt, Human
cccucucccugca

SEQ ID NO: 1368315 - RNA, 22 nt, Human
cccucuccccugcccccugcag

SEQ ID NO: 1368316 - RNA, 18 nt, Human
cccucuccccugcccccu

SEQ ID NO: 1368317 - RNA, 15 nt, Human
cccucuccccugccc

SEQ ID NO: 1368318 - RNA, 14 nt, Human
cccucucccaggcc

SEQ ID NO: 1368319 - RNA, 22 nt, Human
cccucuccccagggaagcagca

SEQ ID NO: 1368320 - RNA, 15 nt, Human
cccucuacagagcuu

SEQ ID NO: 1368321 - RNA, 20 nt, Human
cccucucccaggccccauga

SEQ ID NO: 1368322 - RNA, 13 nt, Human
cccucucccaggc

SEQ ID NO: 1368323 - RNA, 19 nt, Human
cccucucccacccucuucc

SEQ ID NO: 1368324 - RNA, 12 nt, Human
cccucucccagg

SEQ ID NO: 1368325 - RNA, 18 nt, Human
cccucucccacccucuuc

SEQ ID NO: 1368326 - RNA, 17 nt, Human
cccucucccacccucuu

SEQ ID NO: 1368327 - RNA, 13 nt, Human
cccucucccaccc

SEQ ID NO: 1368328 - RNA, 12 nt, Human
cccucucccacc

SEQ ID NO: 1368329 - RNA, 11 nt, Human
cccucucccac

SEQ ID NO: 1368330 - RNA, 16 nt, Human
cccucucauuuagccu

SEQ ID NO: 1368331 - RNA, 20 nt, Human
cccucucccaaaaaacuacu

SEQ ID NO: 1368332 - RNA, 16 nt, Human
cccucugggcucugag

SEQ ID NO: 1368333 - RNA, 12 nt, Human
cccucugggcuc

SEQ ID NO: 1368334 - RNA, 11 nt, Human
cccucugggcu

SEQ ID NO: 1368335 - RNA, 10 nt, Human
cccucugggc

SEQ ID NO: 1368336 - RNA, 19 nt, Human
cccucuuccuacuggucuc

SEQ ID NO: 1368337 - RNA, 14 nt, Human
cccucuuccuacug

SEQ ID NO: 1368338 - RNA, 22 nt, Human
cccucuuccuacuggucucucu

SEQ ID NO: 1368339 - RNA, 18 nt, Human
cccucuguuccuucccug

SEQ ID NO: 1368340 - RNA, 17 nt, Human
cccucugggcucugagu

SEQ ID NO: 1368341 - RNA, 20 nt, Human
cccucuguguauuugcuuuu

SEQ ID NO: 1368342 - RNA, 21 nt, Human
cccucuuuggcuccccuguac

SEQ ID NO: 1368343 - RNA, 20 nt, Human
cccucuuuggcuccccugua

SEQ ID NO: 1368344 - RNA, 19 nt, Human
cccucuuuggcuccccugu

SEQ ID NO: 1368345 - RNA, 17 nt, Human
cccucuuuggcuccccu

SEQ ID NO: 1368346 - RNA, 23 nt, Human
cccucuuggagaagucucagcua

SEQ ID NO: 1368347 - RNA, 15 nt, Human
cccucuuggagaagu

SEQ ID NO: 1368348 - RNA, 13 nt, Human
cccucuuccuucc

SEQ ID NO: 1368349 - RNA, 21 nt, Human
cccuccccuugccugugccag

SEQ ID NO: 1368350 - RNA, 23 nt, Human
cccuccccuugccugugccaggu

SEQ ID NO: 1368351 - RNA, 14 nt, Human
cccuccccuugccu

SEQ ID NO: 1368352 - RNA, 14 nt, Human
cccuccccuucucu

SEQ ID NO: 1368353 - RNA, 17 nt, Human
cccucccagagcaccug

SEQ ID NO: 1368354 - RNA, 15 nt, Human
cccucccuacccuaa

SEQ ID NO: 1368355 - RNA, 16 nt, Human
cccucccuacccuaac

SEQ ID NO: 1368356 - RNA, 16 nt, Human
cccucguggacaccug

SEQ ID NO: 1368357 - RNA, 17 nt, Human
cccucguggacaccugc

SEQ ID NO: 1368358 - RNA, 18 nt, Human
cccucguggacaccugcc

SEQ ID NO: 1368359 - RNA, 19 nt, Human
cccucguggacaccugccc

SEQ ID NO: 1368360 - RNA, 22 nt, Human
cccucguggacaccugcccugc

SEQ ID NO: 1368361 - RNA, 23 nt, Human
cccucguggacaccugcccugcc

SEQ ID NO: 1368362 - RNA, 12 nt, Human
cccuggggccug

SEQ ID NO: 1368363 - RNA, 18 nt, Human
cccuggggccuguacugc

SEQ ID NO: 1368364 - RNA, 17 nt, Human
cccuggggccuguacug

SEQ ID NO: 1368365 - RNA, 13 nt, Human
cccuggggccugu

SEQ ID NO: 1368366 - RNA, 16 nt, Human
cccugcugcugccugc

SEQ ID NO: 1368367 - RNA, 17 nt, Human
cccugcugcugccugcc

SEQ ID NO: 1368368 - RNA, 18 nt, Human
cccugcugcugccugccu

SEQ ID NO: 1368369 - RNA, 14 nt, Human
cccugggcuggaau

SEQ ID NO: 1368370 - RNA, 13 nt, Human
cccugggcuggaa

SEQ ID NO: 1368371 - RNA, 16 nt, Human
cccugcuuccugcuug

SEQ ID NO: 1368372 - RNA, 19 nt, Human
cccugcuuccugcuugcca

SEQ ID NO: 1368373 - RNA, 15 nt, Human
cccugcuuccugcuu

SEQ ID NO: 1368374 - RNA, 14 nt, Human
cccuuaaaggggag

SEQ ID NO: 1368375 - RNA, 20 nt, Human
cccuguuuuccccccaaggg

SEQ ID NO: 1368376 - RNA, 16 nt, Human
cccuguuuucccccca

SEQ ID NO: 1368377 - RNA, 22 nt, Human
cccuguuuucccacgaggaauc

SEQ ID NO: 1368378 - RNA, 17 nt, Human
cccuguuccugcugcug

SEQ ID NO: 1368379 - RNA, 20 nt, Human
cccuguuccugcugcugucu

SEQ ID NO: 1368380 - RNA, 16 nt, Human
cccuguuccugcugcu

SEQ ID NO: 1368381 - RNA, 15 nt, Human
cccuguuccugcugc

SEQ ID NO: 1368382 - RNA, 14 nt, Human
cccuguuccugcug

SEQ ID NO: 1368383 - RNA, 13 nt, Human
cccuguuccugcu

SEQ ID NO: 1368384 - RNA, 17 nt, Human
cccuguuccccagagaa

SEQ ID NO: 1368385 - RNA, 16 nt, Human
cccuguuccccagaga

SEQ ID NO: 1368386 - RNA, 14 nt, Human
cccuguuccccaga

SEQ ID NO: 1368387 - RNA, 21 nt, Human
cccuguccaaacugccuaagc

SEQ ID NO: 1368388 - RNA, 20 nt, Human
cccugucauccagcucacuc

SEQ ID NO: 1368389 - RNA, 14 nt, Human
cccuguccaaacug

SEQ ID NO: 1368390 - RNA, 15 nt, Human
cccugucagcaugaa

SEQ ID NO: 1368391 - RNA, 18 nt, Human
cccugucagcaugaauuu

SEQ ID NO: 1368392 - RNA, 15 nt, Human
cccuguaggccucag

SEQ ID NO: 1368393 - RNA, 14 nt, Human
cccuguaggccuca

SEQ ID NO: 1368394 - RNA, 21 nt, Human
cccuggugcacuggccccacc

SEQ ID NO: 1368395 - RNA, 12 nt, Human
cccuuauuuuca

SEQ ID NO: 1368396 - RNA, 19 nt, Human
cccuuaugcgguuaauuuu

SEQ ID NO: 1368397 - RNA, 17 nt, Human
cccuuaugacugccaag

SEQ ID NO: 1368398 - RNA, 16 nt, Human
cccuuauccucccugu

SEQ ID NO: 1368399 - RNA, 21 nt, Human
cccuuauccucccuguaacuu

SEQ ID NO: 1368400 - RNA, 13 nt, Human
cccuuccacugag

SEQ ID NO: 1368401 - RNA, 16 nt, Human
cccuuccacugagggc

SEQ ID NO: 1368402 - RNA, 14 nt, Human
cccuuauccucccu

SEQ ID NO: 1368403 - RNA, 22 nt, Human
cccuuagacagaggcccucaag

SEQ ID NO: 1368404 - RNA, 21 nt, Human
cccuuagacagaggcccucaa

SEQ ID NO: 1368405 - RNA, 16 nt, Human
cccuuagacagaggcc

SEQ ID NO: 1368406 - RNA, 15 nt, Human
cccuuagacagaggc

SEQ ID NO: 1368407 - RNA, 12 nt, Human
cccuuagacaga

SEQ ID NO: 1368408 - RNA, 15 nt, Human
cccuugcugugaauu

SEQ ID NO: 1368409 - RNA, 20 nt, Human
cccuugccugugccagguga

SEQ ID NO: 1368410 - RNA, 19 nt, Human
cccuugccugugccaggug

SEQ ID NO: 1368411 - RNA, 15 nt, Human
cccuugccugugcca

SEQ ID NO: 1368412 - RNA, 22 nt, Human
cccuugccccccuggccucccc

SEQ ID NO: 1368413 - RNA, 18 nt, Human
cccuugccccccuggccu

SEQ ID NO: 1368414 - RNA, 17 nt, Human
cccuugccccccuggcc

SEQ ID NO: 1368415 - RNA, 15 nt, Human
cccuugccccccugg

SEQ ID NO: 1368416 - RNA, 21 nt, Human
cccuugaucagccccacccug

SEQ ID NO: 1368417 - RNA, 16 nt, Human
cccuugaguccccauu

SEQ ID NO: 1368418 - RNA, 18 nt, Human
cccuugaggucucagccc

SEQ ID NO: 1368419 - RNA, 15 nt, Human
cccuugaggucucag

SEQ ID NO: 1368420 - RNA, 13 nt, Human
cccuucccucacc

SEQ ID NO: 1368421 - RNA, 15 nt, Human
cccuugaugaagaag

SEQ ID NO: 1368422 - RNA, 17 nt, Human
cccuugagcccucuaug

SEQ ID NO: 1368423 - RNA, 17 nt, Human
cccuucccuugagcccu

SEQ ID NO: 1368424 - RNA, 13 nt, Human
cccugcugccaug

SEQ ID NO: 1368425 - RNA, 13 nt, Human
cccugcugcugcc

SEQ ID NO: 1368426 - RNA, 17 nt, Human
cccugcucccacagaac

SEQ ID NO: 1368427 - RNA, 15 nt, Human
cccugcucauccacu

SEQ ID NO: 1368428 - RNA, 16 nt, Human
cccugcucaguaaagc

SEQ ID NO: 1368429 - RNA, 16 nt, Human
cccugcuacaccuauu

SEQ ID NO: 1368430 - RNA, 13 nt, Human
cccugcuacaccu

SEQ ID NO: 1368431 - RNA, 17 nt, Human
cccugcgguagauggga

SEQ ID NO: 1368432 - RNA, 22 nt, Human
cccugcgggugaacaaagcagc

SEQ ID NO: 1368433 - RNA, 22 nt, Human
cccugccuuaucuugcacccca

SEQ ID NO: 1368434 - RNA, 15 nt, Human
cccugccucucugca

SEQ ID NO: 1368435 - RNA, 20 nt, Human
cccugccucucccaggcagg

SEQ ID NO: 1368436 - RNA, 16 nt, Human
cccugccucucugcag

SEQ ID NO: 1368437 - RNA, 18 nt, Human
cccugcaggcugagugca

SEQ ID NO: 1368438 - RNA, 23 nt, Human
cccugcaggaaggagcugccugg

SEQ ID NO: 1368439 - RNA, 22 nt, Human
cccugcaggaaggagcugccug

SEQ ID NO: 1368440 - RNA, 21 nt, Human
cccugcaggaaggagcugccu

SEQ ID NO: 1368441 - RNA, 20 nt, Human
cccugcaggaaggagcugcc

SEQ ID NO: 1368442 - RNA, 19 nt, Human
cccugcaggaaggagcugc

SEQ ID NO: 1368443 - RNA, 18 nt, Human
cccugcaggaaggagcug

SEQ ID NO: 1368444 - RNA, 17 nt, Human
cccugcaggaaggagcu

SEQ ID NO: 1368445 - RNA, 15 nt, Human
cccugcaggaaggag

SEQ ID NO: 1368446 - RNA, 22 nt, Human
cccugcagcuuguagccagccg

SEQ ID NO: 1368447 - RNA, 21 nt, Human
cccugcagcuuguagccagcc

SEQ ID NO: 1368448 - RNA, 20 nt, Human
cccugcagcuuguagccagc

SEQ ID NO: 1368449 - RNA, 19 nt, Human
cccugcagcuuguagccag

SEQ ID NO: 1368450 - RNA, 21 nt, Human
cccugaggagucugagguccu

SEQ ID NO: 1368451 - RNA, 16 nt, Human
cccugaggagucugag

SEQ ID NO: 1368452 - RNA, 15 nt, Human
cccugaggagucuga

SEQ ID NO: 1368453 - RNA, 14 nt, Human
cccugaggagucug

SEQ ID NO: 1368454 - RNA, 13 nt, Human
cccugaggagucu

SEQ ID NO: 1368455 - RNA, 22 nt, Human
cccugaggagucugagguccug

SEQ ID NO: 1368456 - RNA, 19 nt, Human
cccugaggagucugagguc

SEQ ID NO: 1368457 - RNA, 18 nt, Human
cccugaggagucugaggu

SEQ ID NO: 1368458 - RNA, 23 nt, Human
cccugcccuuguuuggggcagga

SEQ ID NO: 1368459 - RNA, 19 nt, Human
cccugccucucccaggcag

SEQ ID NO: 1368460 - RNA, 15 nt, Human
cccugccucucccag

SEQ ID NO: 1368461 - RNA, 14 nt, Human
cccugccucuccca

SEQ ID NO: 1368462 - RNA, 17 nt, Human
cccugccuccugccggc

SEQ ID NO: 1368463 - RNA, 22 nt, Human
cccugccucucaucaacugaau

SEQ ID NO: 1368464 - RNA, 13 nt, Human
cccugccucucug

SEQ ID NO: 1368465 - RNA, 14 nt, Human
cccugccucucugc

SEQ ID NO: 1368466 - RNA, 20 nt, Human
ccgcucuacaucuucugccu

SEQ ID NO: 1368467 - RNA, 17 nt, Human
ccgaggacccaggaaag

SEQ ID NO: 1368468 - RNA, 17 nt, Human
ccgaggagggagagucu

SEQ ID NO: 1368469 - RNA, 13 nt, Human
ccgaggacccagg

SEQ ID NO: 1368470 - RNA, 16 nt, Human
ccgcagacaccuugga

SEQ ID NO: 1368471 - RNA, 15 nt, Human
ccgcagacaccuugg

SEQ ID NO: 1368472 - RNA, 13 nt, Human
ccgcagaaggaag

SEQ ID NO: 1368473 - RNA, 15 nt, Human
ccgcagaaggaaggc

SEQ ID NO: 1368474 - RNA, 14 nt, Human
ccgcagacaccuug

SEQ ID NO: 1368475 - RNA, 18 nt, Human
ccgcagaaggaaggcagg

SEQ ID NO: 1368476 - RNA, 18 nt, Human
ccgccucagccucccaaa

SEQ ID NO: 1368477 - RNA, 21 nt, Human
ccgagaggugggccagucugu

SEQ ID NO: 1368478 - RNA, 19 nt, Human
ccgagaggugggccagucu

SEQ ID NO: 1368479 - RNA, 15 nt, Human
ccgagaggugggcca

SEQ ID NO: 1368480 - RNA, 17 nt, Human
ccgacugcuuuggaccu

SEQ ID NO: 1368481 - RNA, 16 nt, Human
ccgacugcuuuggacc

SEQ ID NO: 1368482 - RNA, 20 nt, Human
ccgagaguccaucagccucc

SEQ ID NO: 1368483 - RNA, 21 nt, Human
ccgagaguccaucagccucca

SEQ ID NO: 1368484 - RNA, 19 nt, Human
ccgagaucaguauuuaacu

SEQ ID NO: 1368485 - RNA, 23 nt, Human
ccgacucacaccacuagccucag

SEQ ID NO: 1368486 - RNA, 14 nt, Human
ccgacucacaccac

SEQ ID NO: 1368487 - RNA, 20 nt, Human
ccgacucacaccacuagccu

SEQ ID NO: 1368488 - RNA, 14 nt, Human
ccgacugcuuugga

SEQ ID NO: 1368489 - RNA, 20 nt, Human
ccgacugaaaauauuguuuu

SEQ ID NO: 1368490 - RNA, 19 nt, Human
ccgcucuacaucuucugcc

SEQ ID NO: 1368491 - RNA, 18 nt, Human
ccgcucuacaucuucugc

SEQ ID NO: 1368492 - RNA, 20 nt, Human
ccggaggcggugggccuggu

SEQ ID NO: 1368493 - RNA, 14 nt, Human
ccgccuggccuggc

SEQ ID NO: 1368494 - RNA, 17 nt, Human
ccgccugggucuccuaa

SEQ ID NO: 1368495 - RNA, 22 nt, Human
ccgccuggaugcggauggccgg

SEQ ID NO: 1368496 - RNA, 16 nt, Human
ccgccugcccucaugg

SEQ ID NO: 1368497 - RNA, 14 nt, Human
ccgccugcccucau

SEQ ID NO: 1368498 - RNA, 20 nt, Human
ccgccucgaccucucucaaa

SEQ ID NO: 1368499 - RNA, 13 nt, Human
ccgggccacuccu

SEQ ID NO: 1368500 - RNA, 15 nt, Human
ccggcuccuggucac

SEQ ID NO: 1368501 - RNA, 17 nt, Human
ccggcucucaccuggcc

SEQ ID NO: 1368502 - RNA, 17 nt, Human
ccggcuccuggucaccu

SEQ ID NO: 1368503 - RNA, 14 nt, Human
ccggcuccugguca

SEQ ID NO: 1368504 - RNA, 18 nt, Human
ccggcucccuucuacagc

SEQ ID NO: 1368505 - RNA, 18 nt, Human
ccgggccacuccuuccug

SEQ ID NO: 1368506 - RNA, 20 nt, Human
ccggggugggguggcugcag

SEQ ID NO: 1368507 - RNA, 18 nt, Human
ccggggugggguggcugc

SEQ ID NO: 1368508 - RNA, 20 nt, Human
ccggggugcccacaggccgc

SEQ ID NO: 1368509 - RNA, 22 nt, Human
ccggggugagggggggcucccu

SEQ ID NO: 1368510 - RNA, 20 nt, Human
ccggggccugggcaggaggg

SEQ ID NO: 1368511 - RNA, 21 nt, Human
ccgggggcagucugagagagg

SEQ ID NO: 1368512 - RNA, 16 nt, Human
ccggggggucucuucu

SEQ ID NO: 1368513 - RNA, 23 nt, Human
ccuaggccugggcaguggauggc

SEQ ID NO: 1368514 - RNA, 13 nt, Human
ccuaggccugggc

SEQ ID NO: 1368515 - RNA, 15 nt, Human
ccuaggccugggcag

SEQ ID NO: 1368516 - RNA, 17 nt, Human
ccuagguguuuuguuca

SEQ ID NO: 1368517 - RNA, 16 nt, Human
ccuaggcuaggguggg

SEQ ID NO: 1368518 - RNA, 13 nt, Human
ccuacccucuaga

SEQ ID NO: 1368519 - RNA, 21 nt, Human
ccuacagggggucuggcuggu

SEQ ID NO: 1368520 - RNA, 19 nt, Human
ccuacagggggucuggcug

SEQ ID NO: 1368521 - RNA, 18 nt, Human
ccuacagggggucuggcu

SEQ ID NO: 1368522 - RNA, 23 nt, Human
ccuacucacacaggcauuuccug

SEQ ID NO: 1368523 - RNA, 16 nt, Human
ccuacuccaaaauguu

SEQ ID NO: 1368524 - RNA, 22 nt, Human
ccuacucacacaggcauuuccu

SEQ ID NO: 1368525 - RNA, 16 nt, Human
ccuacucacacaggca

SEQ ID NO: 1368526 - RNA, 15 nt, Human
ccuacucacacaggc

SEQ ID NO: 1368527 - RNA, 14 nt, Human
ccuacucacacagg

SEQ ID NO: 1368528 - RNA, 16 nt, Human
ccuacuagucaccaga

SEQ ID NO: 1368529 - RNA, 23 nt, Human
ccguucaugggggagggggcaga

SEQ ID NO: 1368530 - RNA, 16 nt, Human
ccguucaugggggagg

SEQ ID NO: 1368531 - RNA, 15 nt, Human
ccguucaugggggag

SEQ ID NO: 1368532 - RNA, 14 nt, Human
ccguucacaugugu

SEQ ID NO: 1368533 - RNA, 22 nt, Human
ccguggcccuuccuggacagcu

SEQ ID NO: 1368534 - RNA, 20 nt, Human
ccguggcccuuccuggacag

SEQ ID NO: 1368535 - RNA, 19 nt, Human
ccguggcccuuccuggaca

SEQ ID NO: 1368536 - RNA, 17 nt, Human
ccguggcccuuccugga

SEQ ID NO: 1368537 - RNA, 16 nt, Human
ccguggcccuuccugg

SEQ ID NO: 1368538 - RNA, 14 nt, Human
ccguggcccuuccu

SEQ ID NO: 1368539 - RNA, 20 nt, Human
ccguggcugcugugggaaau

SEQ ID NO: 1368540 - RNA, 17 nt, Human
ccguggcugcuguggga

SEQ ID NO: 1368541 - RNA, 16 nt, Human
ccguggcugcuguggg

SEQ ID NO: 1368542 - RNA, 21 nt, Human
ccguggcccuuccuggacagc

SEQ ID NO: 1368543 - RNA, 23 nt, Human
ccguggcuguggcauccagaguc

SEQ ID NO: 1368544 - RNA, 20 nt, Human
ccgugccaaguccagguccu

SEQ ID NO: 1368545 - RNA, 21 nt, Human
ccgugccaaguccagguccug

SEQ ID NO: 1368546 - RNA, 14 nt, Human
ccgugccaagucca

SEQ ID NO: 1368547 - RNA, 21 nt, Human
ccggggugggguggcugcagc

SEQ ID NO: 1368548 - RNA, 16 nt, Human
ccuacagggggucugg

SEQ ID NO: 1368549 - RNA, 13 nt, Human
ccuaaccugccga

SEQ ID NO: 1368550 - RNA, 12 nt, Human
ccuaaccugccg

SEQ ID NO: 1368551 - RNA, 12 nt, Human
ccguugcauuug

SEQ ID NO: 1368552 - RNA, 18 nt, Human
ccuaaccucgggccugcu

SEQ ID NO: 1368553 - RNA, 13 nt, Human
ccuaacccuuugu

SEQ ID NO: 1368554 - RNA, 11 nt, Human
ccuaaccaagu

SEQ ID NO: 1368555 - RNA, 19 nt, Human
ccuggacuuuccugcaacu

SEQ ID NO: 1368556 - RNA, 17 nt, Human
ccuggacuuuccugcaa

SEQ ID NO: 1368557 - RNA, 16 nt, Human
ccuggacuuuccugca

SEQ ID NO: 1368558 - RNA, 15 nt, Human
ccuggacuuuccugc

SEQ ID NO: 1368559 - RNA, 15 nt, Human
ccugcuaggccagag

SEQ ID NO: 1368560 - RNA, 14 nt, Human
ccuggacuuuccug

SEQ ID NO: 1368561 - RNA, 13 nt, Human
ccuggacuuuccu

SEQ ID NO: 1368562 - RNA, 16 nt, Human
ccugcuaggccagagc

SEQ ID NO: 1368563 - RNA, 14 nt, Human
ccugcuaggccaga

SEQ ID NO: 1368564 - RNA, 13 nt, Human
ccugcuaggccag

SEQ ID NO: 1368565 - RNA, 21 nt, Human
ccugcuacaccuauuauccca

SEQ ID NO: 1368566 - RNA, 23 nt, Human
ccugcuacaccuauuaucccagc

SEQ ID NO: 1368567 - RNA, 20 nt, Human
ccugcuacaccuauuauccc

SEQ ID NO: 1368568 - RNA, 14 nt, Human
ccugcuacaccuau

SEQ ID NO: 1368569 - RNA, 23 nt, Human
ccugccuguggcgccgucuccag

SEQ ID NO: 1368570 - RNA, 19 nt, Human
ccuggcaugucaacagcgu

SEQ ID NO: 1368571 - RNA, 23 nt, Human
ccuggcaucgcaccauucugacu

SEQ ID NO: 1368572 - RNA, 21 nt, Human
ccuggcaucgcaccauucuga

SEQ ID NO: 1368573 - RNA, 21 nt, Human
ccuggcaguccgugggacggg

SEQ ID NO: 1368574 - RNA, 15 nt, Human
ccuggagaccccacc

SEQ ID NO: 1368575 - RNA, 18 nt, Human
ccuggguagcgggggagg

SEQ ID NO: 1368576 - RNA, 18 nt, Human
ccuggggugacccggcac

SEQ ID NO: 1368577 - RNA, 15 nt, Human
ccuggggugacccgg

SEQ ID NO: 1368578 - RNA, 14 nt, Human
ccuggggucuggag

SEQ ID NO: 1368579 - RNA, 22 nt, Human
ccugggguauaaaacuuuccuc

SEQ ID NO: 1368580 - RNA, 22 nt, Human
ccugggagaaucgcuccugcag

SEQ ID NO: 1368581 - RNA, 22 nt, Human
ccugggagaaaucuggcuucug

SEQ ID NO: 1368582 - RNA, 23 nt, Human
ccugggaccgcuacaccacucug

SEQ ID NO: 1368583 - RNA, 17 nt, Human
ccugggaggagagacac

SEQ ID NO: 1368584 - RNA, 12 nt, Human
ccugggaggaga

SEQ ID NO: 1368585 - RNA, 21 nt, Human
ccuggcuuucauuuucucuca

SEQ ID NO: 1368586 - RNA, 16 nt, Human
ccuggcucucaccucu

SEQ ID NO: 1368587 - RNA, 15 nt, Human
ccuggcucucaccuc

SEQ ID NO: 1368588 - RNA, 14 nt, Human
ccuggcucucaccu

SEQ ID NO: 1368589 - RNA, 13 nt, Human
ccuggcucucacc

SEQ ID NO: 1368590 - RNA, 22 nt, Human
ccuggcuccuugugccagagaa

SEQ ID NO: 1368591 - RNA, 21 nt, Human
ccuggcuccuugugccagaga

SEQ ID NO: 1368592 - RNA, 20 nt, Human
ccuggcuccuugugccagag

SEQ ID NO: 1368593 - RNA, 21 nt, Human
ccuggcuccguccaggagccu

SEQ ID NO: 1368594 - RNA, 23 nt, Human
ccugggacaacugcucccaccuc

SEQ ID NO: 1368595 - RNA, 22 nt, Human
ccugggacaacugcucccaccu

SEQ ID NO: 1368596 - RNA, 19 nt, Human
ccugggacaacugcuccca

SEQ ID NO: 1368597 - RNA, 18 nt, Human
ccugggacaacugcuccc

SEQ ID NO: 1368598 - RNA, 15 nt, Human
ccugggacaacugcu

SEQ ID NO: 1368599 - RNA, 18 nt, Human
ccugggaaauauucccua

SEQ ID NO: 1368600 - RNA, 17 nt, Human
ccugggaaauauucccu

SEQ ID NO: 1368601 - RNA, 18 nt, Human
ccugggaaagccccugcc

SEQ ID NO: 1368602 - RNA, 22 nt, Human
ccuggcuuucauuuucucucag

SEQ ID NO: 1368603 - RNA, 23 nt, Human
ccuggcuuucauuuucucucagg

SEQ ID NO: 1368604 - RNA, 18 nt, Human
ccuggccccauggucagc

SEQ ID NO: 1368605 - RNA, 13 nt, Human
ccuggccccagga

SEQ ID NO: 1368606 - RNA, 12 nt, Human
ccuggccccagg

SEQ ID NO: 1368607 - RNA, 15 nt, Human
ccuggcccaucaggg

SEQ ID NO: 1368608 - RNA, 16 nt, Human
ccuggcccagccuuug

SEQ ID NO: 1368609 - RNA, 14 nt, Human
ccuggcccagccuu

SEQ ID NO: 1368610 - RNA, 13 nt, Human
ccuggcccagccu

SEQ ID NO: 1368611 - RNA, 12 nt, Human
ccuggcccagcc

SEQ ID NO: 1368612 - RNA, 22 nt, Human
ccuggcccaccccacccacuuc

SEQ ID NO: 1368613 - RNA, 21 nt, Human
ccuggcccaccccacccacuu

SEQ ID NO: 1368614 - RNA, 14 nt, Human
ccuggcccacccca

SEQ ID NO: 1368615 - RNA, 16 nt, Human
ccuggguuaaguauua

SEQ ID NO: 1368616 - RNA, 19 nt, Human
ccuggguccaaugcucagg

SEQ ID NO: 1368617 - RNA, 19 nt, Human
ccuggucucacccuggagg

SEQ ID NO: 1368618 - RNA, 21 nt, Human
ccuggucucacccuggaggca

SEQ ID NO: 1368619 - RNA, 18 nt, Human
ccuggucucacccuggag

SEQ ID NO: 1368620 - RNA, 17 nt, Human
ccuggucucacccugga

SEQ ID NO: 1368621 - RNA, 13 nt, Human
ccuggucucaccc

SEQ ID NO: 1368622 - RNA, 23 nt, Human
ccuguagaacucaaccucuacag

SEQ ID NO: 1368623 - RNA, 22 nt, Human
ccuguagaacucaaccucuaca

SEQ ID NO: 1368624 - RNA, 17 nt, Human
ccuguaccccagcacuu

SEQ ID NO: 1368625 - RNA, 14 nt, Human
ccuguaccccagca

SEQ ID NO: 1368626 - RNA, 12 nt, Human
ccuguaccucuu

SEQ ID NO: 1368627 - RNA, 16 nt, Human
ccuguacauuguggga

SEQ ID NO: 1368628 - RNA, 14 nt, Human
ccuguacaguguua

SEQ ID NO: 1368629 - RNA, 22 nt, Human
ccuguacaguagauuuuccaaa

SEQ ID NO: 1368630 - RNA, 10 nt, Human
ccuguaccuc

SEQ ID NO: 1368631 - RNA, 21 nt, Human
ccuguacaguagauuuuccaa

SEQ ID NO: 1368632 - RNA, 20 nt, Human
ccuguacaguagauuuucca

SEQ ID NO: 1368633 - RNA, 14 nt, Human
ccuguacaguagau

SEQ ID NO: 1368634 - RNA, 22 nt, Human
ccuguagccccagugacagcua

SEQ ID NO: 1368635 - RNA, 20 nt, Human
ccuguagccccagugacagc

SEQ ID NO: 1368636 - RNA, 17 nt, Human
ccuguagcacuuacugg

SEQ ID NO: 1368637 - RNA, 13 nt, Human
ccugucagcauga

SEQ ID NO: 1368638 - RNA, 12 nt, Human
ccugucagcaug

SEQ ID NO: 1368639 - RNA, 23 nt, Human
ccugucagauccaggagcuccag

SEQ ID NO: 1368640 - RNA, 22 nt, Human
ccugucagauccaggagcucca

SEQ ID NO: 1368641 - RNA, 20 nt, Human
ccugucagauccaggagcuc

SEQ ID NO: 1368642 - RNA, 19 nt, Human
ccugucagauccaggagcu

SEQ ID NO: 1368643 - RNA, 17 nt, Human
ccugucagauccaggag

SEQ ID NO: 1368644 - RNA, 16 nt, Human
ccuguaugucuccagu

SEQ ID NO: 1368645 - RNA, 19 nt, Human
ccuguauaccuccuccagc

SEQ ID NO: 1368646 - RNA, 14 nt, Human
ccuguauaccuccu

SEQ ID NO: 1368647 - RNA, 13 nt, Human
ccugucccacccc

SEQ ID NO: 1368648 - RNA, 11 nt, Human
ccugucccacc

SEQ ID NO: 1368649 - RNA, 20 nt, Human
ccugucaugguguccagaca

SEQ ID NO: 1368650 - RNA, 17 nt, Human
ccuguccaaacugccua

SEQ ID NO: 1368651 - RNA, 20 nt, Human
ccugucauccagcucacuca

SEQ ID NO: 1368652 - RNA, 20 nt, Human
ccugucagcaugaauuugua

SEQ ID NO: 1368653 - RNA, 22 nt, Human
ccugucagcaugaauuuguaau

SEQ ID NO: 1368654 - RNA, 17 nt, Human
ccugucagcaugaauuu

SEQ ID NO: 1368655 - RNA, 16 nt, Human
ccugucagcaugaauu

SEQ ID NO: 1368656 - RNA, 19 nt, Human
ccugucaucaucauggcca

SEQ ID NO: 1368657 - RNA, 18 nt, Human
ccugucccacccccaccc

SEQ ID NO: 1368658 - RNA, 17 nt, Human
ccugucccacccccacc

SEQ ID NO: 1368659 - RNA, 15 nt, Human
ccugucccaccccca

SEQ ID NO: 1368660 - RNA, 18 nt, Human
ccugagcugaggcagcag

SEQ ID NO: 1368661 - RNA, 14 nt, Human
ccugagcucagcgu

SEQ ID NO: 1368662 - RNA, 16 nt, Human
ccugagcugaggcagc

SEQ ID NO: 1368663 - RNA, 15 nt, Human
ccugagcugaggcag

SEQ ID NO: 1368664 - RNA, 17 nt, Human
ccugagcugaccagccg

SEQ ID NO: 1368665 - RNA, 14 nt, Human
ccugagcucugaua

SEQ ID NO: 1368666 - RNA, 13 nt, Human
ccugagcucagcg

SEQ ID NO: 1368667 - RNA, 12 nt, Human
ccugagcucagc

SEQ ID NO: 1368668 - RNA, 23 nt, Human
ccugagcgaguggagucugccac

SEQ ID NO: 1368669 - RNA, 22 nt, Human
ccugagcgaguggagucugcca

SEQ ID NO: 1368670 - RNA, 21 nt, Human
ccugagcgaguggagucugcc

SEQ ID NO: 1368671 - RNA, 20 nt, Human
ccugagcgaguggagucugc

SEQ ID NO: 1368672 - RNA, 19 nt, Human
ccugagcgaguggagucug

SEQ ID NO: 1368673 - RNA, 23 nt, Human
ccugagccugccgagcaaccgug

SEQ ID NO: 1368674 - RNA, 21 nt, Human
ccugagccugccgagcaaccg

SEQ ID NO: 1368675 - RNA, 20 nt, Human
ccugagccugccgagcaacc

SEQ ID NO: 1368676 - RNA, 17 nt, Human
ccugagccugccgagca

SEQ ID NO: 1368677 - RNA, 16 nt, Human
ccugagccugccgagc

SEQ ID NO: 1368678 - RNA, 15 nt, Human
ccugagccugccgag

SEQ ID NO: 1368679 - RNA, 14 nt, Human
ccugagccugccga

SEQ ID NO: 1368680 - RNA, 13 nt, Human
ccugagccugccg

SEQ ID NO: 1368681 - RNA, 12 nt, Human
ccugagccugcc

SEQ ID NO: 1368682 - RNA, 17 nt, Human
ccugagccggccccagg

SEQ ID NO: 1368683 - RNA, 16 nt, Human
ccugagccggccccag

SEQ ID NO: 1368684 - RNA, 21 nt, Human
ccugaauacccuuuucugacc

SEQ ID NO: 1368685 - RNA, 21 nt, Human
ccugagccccagggagagggg

SEQ ID NO: 1368686 - RNA, 12 nt, Human
ccugcaaacugg

SEQ ID NO: 1368687 - RNA, 20 nt, Human
ccugauccuggaggcccagu

SEQ ID NO: 1368688 - RNA, 19 nt, Human
ccugauccuggaggcccag

SEQ ID NO: 1368689 - RNA, 18 nt, Human
ccugauccuggaggccca

SEQ ID NO: 1368690 - RNA, 15 nt, Human
ccugauccuggaggc

SEQ ID NO: 1368691 - RNA, 13 nt, Human
ccugauccuggag

SEQ ID NO: 1368692 - RNA, 19 nt, Human
ccugaucccagagagcccg

SEQ ID NO: 1368693 - RNA, 17 nt, Human
ccugaucccagagagcc

SEQ ID NO: 1368694 - RNA, 14 nt, Human
ccugaucccagaga

SEQ ID NO: 1368695 - RNA, 13 nt, Human
ccugaucagagcc

SEQ ID NO: 1368696 - RNA, 19 nt, Human
ccugaucagaccacggcuc

SEQ ID NO: 1368697 - RNA, 18 nt, Human
ccugaucagaccacggcu

SEQ ID NO: 1368698 - RNA, 14 nt, Human
ccugaucagaccac

SEQ ID NO: 1368699 - RNA, 22 nt, Human
ccugcaaacugggaaccccuuu

SEQ ID NO: 1368700 - RNA, 20 nt, Human
ccugcaaacugggaaccccu

SEQ ID NO: 1368701 - RNA, 16 nt, Human
ccugcaaacugggaac

SEQ ID NO: 1368702 - RNA, 13 nt, Human
ccugcaaacuggg

SEQ ID NO: 1368703 - RNA, 22 nt, Human
ccugcacagugacuucugagau

SEQ ID NO: 1368704 - RNA, 21 nt, Human
ccugcacagugacuucugaga

SEQ ID NO: 1368705 - RNA, 20 nt, Human
ccugcacagugacuucugag

SEQ ID NO: 1368706 - RNA, 18 nt, Human
ccugcacagugacuucug

SEQ ID NO: 1368707 - RNA, 17 nt, Human
ccugcacagugacuucu

SEQ ID NO: 1368708 - RNA, 15 nt, Human
ccugcacagugacuu

SEQ ID NO: 1368709 - RNA, 19 nt, Human
ccugcacaauaaaaauguu

SEQ ID NO: 1368710 - RNA, 20 nt, Human
ccugcacaauaaaaauguuu

SEQ ID NO: 1368711 - RNA, 14 nt, Human
ccugcacuguaaaa

SEQ ID NO: 1368712 - RNA, 13 nt, Human
ccugcacuguaaa

SEQ ID NO: 1368713 - RNA, 12 nt, Human
ccugcacuguaa

SEQ ID NO: 1368714 - RNA, 11 nt, Human
ccugcacugua

SEQ ID NO: 1368715 - RNA, 21 nt, Human
ccugcacuggggagcccgucu

SEQ ID NO: 1368716 - RNA, 14 nt, Human
ccugcacuggggag

SEQ ID NO: 1368717 - RNA, 17 nt, Human
ccugcaccggggccugg

SEQ ID NO: 1368718 - RNA, 19 nt, Human
ccugcaccaugcugcuggg

SEQ ID NO: 1368719 - RNA, 15 nt, Human
ccugcaccggggccu

SEQ ID NO: 1368720 - RNA, 19 nt, Human
ccugccaccaggccaccuc

SEQ ID NO: 1368721 - RNA, 18 nt, Human
ccugccaccaggccaccu

SEQ ID NO: 1368722 - RNA, 15 nt, Human
ccugccaccaggcca

SEQ ID NO: 1368723 - RNA, 14 nt, Human
ccugccaccaggcc

SEQ ID NO: 1368724 - RNA, 13 nt, Human
ccugccaccaggc

SEQ ID NO: 1368725 - RNA, 12 nt, Human
ccugccaccagg

SEQ ID NO: 1368726 - RNA, 12 nt, Human
ccugccacagcc

SEQ ID NO: 1368727 - RNA, 17 nt, Human
ccugcacuuacuugcuu

SEQ ID NO: 1368728 - RNA, 14 nt, Human
ccugcacuuacuug

SEQ ID NO: 1368729 - RNA, 15 nt, Human
ccugcacuguaaaau

SEQ ID NO: 1368730 - RNA, 16 nt, Human
ccugcacuguaaaaug

SEQ ID NO: 1368731 - RNA, 23 nt, Human
ccugcauuggaacuggaggcagg

SEQ ID NO: 1368732 - RNA, 22 nt, Human
ccugcauuggaacuggaggcag

SEQ ID NO: 1368733 - RNA, 21 nt, Human
ccugcauuggaacuggaggca

SEQ ID NO: 1368734 - RNA, 20 nt, Human
ccugcauuggaacuggaggc

SEQ ID NO: 1368735 - RNA, 19 nt, Human
ccugcauuggaacuggagg

SEQ ID NO: 1368736 - RNA, 18 nt, Human
ccugcauuggaacuggag

SEQ ID NO: 1368737 - RNA, 16 nt, Human
ccugcauuggaacugg

SEQ ID NO: 1368738 - RNA, 18 nt, Human
ccugccacccagccccag

SEQ ID NO: 1368739 - RNA, 17 nt, Human
ccugccacccagcccca

SEQ ID NO: 1368740 - RNA, 14 nt, Human
ccugccacccagcc

SEQ ID NO: 1368741 - RNA, 18 nt, Human
ccugccaccuccccccac

SEQ ID NO: 1368742 - RNA, 13 nt, Human
ccugccaccuccc

SEQ ID NO: 1368743 - RNA, 14 nt, Human
ccugccaccuccug

SEQ ID NO: 1368744 - RNA, 16 nt, Human
ccugccaccuccugcc

SEQ ID NO: 1368745 - RNA, 19 nt, Human
ccugccaccuccugccuca

SEQ ID NO: 1368746 - RNA, 13 nt, Human
ccugaaauuccaa

SEQ ID NO: 1368747 - RNA, 20 nt, Human
ccugaaggggccaugauggc

SEQ ID NO: 1368748 - RNA, 23 nt, Human
ccugaaggccugagguuacugga

SEQ ID NO: 1368749 - RNA, 16 nt, Human
ccugaaggccugaggu

SEQ ID NO: 1368750 - RNA, 20 nt, Human
ccugaagcuaucguaaaauu

SEQ ID NO: 1368751 - RNA, 17 nt, Human
ccuaugauauuuucugu

SEQ ID NO: 1368752 - RNA, 14 nt, Human
ccucuucagaggcc

SEQ ID NO: 1368753 - RNA, 13 nt, Human
ccucuucagaggc

SEQ ID NO: 1368754 - RNA, 16 nt, Human
ccucuuccaugcugug

SEQ ID NO: 1368755 - RNA, 14 nt, Human
ccucuuccagucuu

SEQ ID NO: 1368756 - RNA, 12 nt, Human
ccucuuccaguc

SEQ ID NO: 1368757 - RNA, 18 nt, Human
ccucuucauggauggggg

SEQ ID NO: 1368758 - RNA, 16 nt, Human
ccucuucagaggcccu

SEQ ID NO: 1368759 - RNA, 12 nt, Human
ccuaucuuugcc

SEQ ID NO: 1368760 - RNA, 22 nt, Human
ccuaugacuugggcacccccag

SEQ ID NO: 1368761 - RNA, 17 nt, Human
ccuaugacuugggcacc

SEQ ID NO: 1368762 - RNA, 16 nt, Human
ccuaugacuugggcac

SEQ ID NO: 1368763 - RNA, 13 nt, Human
ccuaucuuugcca

SEQ ID NO: 1368764 - RNA, 15 nt, Human
ccuaucuuugccacc

SEQ ID NO: 1368765 - RNA, 19 nt, Human
ccuaucuuugccacccuca

SEQ ID NO: 1368766 - RNA, 20 nt, Human
ccuaucuuugccacccucau

SEQ ID NO: 1368767 - RNA, 15 nt, Human
ccugaaacaacuugg

SEQ ID NO: 1368768 - RNA, 22 nt, Human
ccugaaaagguuuaugaaaaag

SEQ ID NO: 1368769 - RNA, 18 nt, Human
ccugaaaacacugugcac

SEQ ID NO: 1368770 - RNA, 23 nt, Human
ccucuucuacucacuuuucccac

SEQ ID NO: 1368771 - RNA, 18 nt, Human
ccucuucuauuuuguaaa

SEQ ID NO: 1368772 - RNA, 17 nt, Human
ccucuucuauuuuguaa

SEQ ID NO: 1368773 - RNA, 21 nt, Human
ccucuucuacucacuuuuccc

SEQ ID NO: 1368774 - RNA, 15 nt, Human
ccucuucuacucacu

SEQ ID NO: 1368775 - RNA, 15 nt, Human
ccucuucccccaaga

SEQ ID NO: 1368776 - RNA, 16 nt, Human
ccucuucccccaagau

SEQ ID NO: 1368777 - RNA, 22 nt, Human
ccucuuccccagacgccuggcu

SEQ ID NO: 1368778 - RNA, 21 nt, Human
ccucuuccccagacgccuggc

SEQ ID NO: 1368779 - RNA, 13 nt, Human
ccucuuccccaga

SEQ ID NO: 1368780 - RNA, 12 nt, Human
ccucuuccccag

SEQ ID NO: 1368781 - RNA, 23 nt, Human
ccucuuccuucccugcugugaaa

SEQ ID NO: 1368782 - RNA, 19 nt, Human
ccugcccccugcaggaagg

SEQ ID NO: 1368783 - RNA, 22 nt, Human
ccugccccuccucucccucauc

SEQ ID NO: 1368784 - RNA, 23 nt, Human
ccugcccucauggccccucugac

SEQ ID NO: 1368785 - RNA, 21 nt, Human
ccugcccucauggccccucug

SEQ ID NO: 1368786 - RNA, 18 nt, Human
ccugcccuaccugcccca

SEQ ID NO: 1368787 - RNA, 20 nt, Human
ccugcccccugcaggaagga

SEQ ID NO: 1368788 - RNA, 16 nt, Human
ccugcccccugcagga

SEQ ID NO: 1368789 - RNA, 15 nt, Human
ccugcccccugcagg

SEQ ID NO: 1368790 - RNA, 14 nt, Human
ccugcccccugcag

SEQ ID NO: 1368791 - RNA, 22 nt, Human
ccugccccccagccucuggcau

SEQ ID NO: 1368792 - RNA, 18 nt, Human
ccugccccccagccucug

SEQ ID NO: 1368793 - RNA, 17 nt, Human
ccugccccccagccucu

SEQ ID NO: 1368794 - RNA, 15 nt, Human
ccugccccccagccu

SEQ ID NO: 1368795 - RNA, 19 nt, Human
ccugccagggcagggcccc

SEQ ID NO: 1368796 - RNA, 17 nt, Human
ccugccagggcagggcc

SEQ ID NO: 1368797 - RNA, 13 nt, Human
ccugccagggcag

SEQ ID NO: 1368798 - RNA, 23 nt, Human
ccugccaggaggacccagggcuc

SEQ ID NO: 1368799 - RNA, 19 nt, Human
ccugccaggaggacccagg

SEQ ID NO: 1368800 - RNA, 15 nt, Human
ccugccaggaggacc

SEQ ID NO: 1368801 - RNA, 22 nt, Human
ccugccacucacuaggccccca

SEQ ID NO: 1368802 - RNA, 21 nt, Human
ccugccacucacuaggccccc

SEQ ID NO: 1368803 - RNA, 18 nt, Human
ccugccacucacuaggcc

SEQ ID NO: 1368804 - RNA, 16 nt, Human
ccugccacucacuagg

SEQ ID NO: 1368805 - RNA, 15 nt, Human
ccugccacucacuag

SEQ ID NO: 1368806 - RNA, 13 nt, Human
ccugccacucacu

SEQ ID NO: 1368807 - RNA, 22 nt, Human
ccugccaggaggacccagggcu

SEQ ID NO: 1368808 - RNA, 22 nt, Human
ccugccaccuggaccccugcau

SEQ ID NO: 1368809 - RNA, 17 nt, Human
ccugccaccuggacccc

SEQ ID NO: 1368810 - RNA, 16 nt, Human
ccugccaccuggaccc

SEQ ID NO: 1368811 - RNA, 15 nt, Human
ccugccaccuggacc

SEQ ID NO: 1368812 - RNA, 13 nt, Human
ccugccaccugga

SEQ ID NO: 1368813 - RNA, 17 nt, Human
ccugccaccuccugccu

SEQ ID NO: 1368814 - RNA, 21 nt, Human
ccugccaccuggaccccugca

SEQ ID NO: 1368815 - RNA, 12 nt, Human
ccugccaccugu

SEQ ID NO: 1368816 - RNA, 13 nt, Human
ccugccaccuguc

SEQ ID NO: 1368817 - RNA, 14 nt, Human
ccugccaccugucu

SEQ ID NO: 1368818 - RNA, 15 nt, Human
ccugccaccugucug

SEQ ID NO: 1368819 - RNA, 16 nt, Human
ccugccaccugucugu

SEQ ID NO: 1368820 - RNA, 17 nt, Human
ccugccaccugucuguc

SEQ ID NO: 1368821 - RNA, 22 nt, Human
ccugcccuuguuuggggcagga

SEQ ID NO: 1368822 - RNA, 23 nt, Human
ccugccgagaguccaucagccuc

SEQ ID NO: 1368823 - RNA, 22 nt, Human
ccugccgagaguccaucagccu

SEQ ID NO: 1368824 - RNA, 21 nt, Human
ccugcccuuguuuggggcagg

SEQ ID NO: 1368825 - RNA, 14 nt, Human
ccugccgagagucc

SEQ ID NO: 1368826 - RNA, 14 nt, Human
ccugccuguggcca

SEQ ID NO: 1368827 - RNA, 12 nt, Human
ccugccuguggc

SEQ ID NO: 1368828 - RNA, 22 nt, Human
ccugccgagcaaccguggcccu

SEQ ID NO: 1368829 - RNA, 21 nt, Human
ccugcccugccaccugucugu

SEQ ID NO: 1368830 - RNA, 18 nt, Human
ccugcccugccaccuguc

SEQ ID NO: 1368831 - RNA, 15 nt, Human
ccugcccugcccugc

SEQ ID NO: 1368832 - RNA, 16 nt, Human
ccugcccugcccugcc

SEQ ID NO: 1368833 - RNA, 17 nt, Human
ccugcccugcccugcca

SEQ ID NO: 1368834 - RNA, 11 nt, Human
ccugcccugcc

SEQ ID NO: 1368835 - RNA, 12 nt, Human
ccugcccugcca

SEQ ID NO: 1368836 - RNA, 14 nt, Human
ccugcccugccacc

SEQ ID NO: 1368837 - RNA, 15 nt, Human
ccugcccugccaccu

SEQ ID NO: 1368838 - RNA, 17 nt, Human
ccugcccugccaccugu

SEQ ID NO: 1368839 - RNA, 13 nt, Human
ccuugugcugggg

SEQ ID NO: 1368840 - RNA, 23 nt, Human
ccuugugaugucauacagagaag

SEQ ID NO: 1368841 - RNA, 12 nt, Human
ccuugugccaga

SEQ ID NO: 1368842 - RNA, 20 nt, Human
ccuugugaugugcacguaaa

SEQ ID NO: 1368843 - RNA, 22 nt, Human
ccuugugaugucauacagagaa

SEQ ID NO: 1368844 - RNA, 21 nt, Human
ccuugugaugucauacagaga

SEQ ID NO: 1368845 - RNA, 20 nt, Human
ccuugugaaucaagggucag

SEQ ID NO: 1368846 - RNA, 21 nt, Human
ccuugucuuauucccuuccug

SEQ ID NO: 1368847 - RNA, 19 nt, Human
ccuugucuuauucccuucc

SEQ ID NO: 1368848 - RNA, 17 nt, Human
ccuuguauccccugcag

SEQ ID NO: 1368849 - RNA, 21 nt, Human
ccuugugggccugggcuccug

SEQ ID NO: 1368850 - RNA, 20 nt, Human
ccuugugggccugggcuccu

SEQ ID NO: 1368851 - RNA, 17 nt, Human
ccuugugggccugggcu

SEQ ID NO: 1368852 - RNA, 16 nt, Human
ccuugugggccugggc

SEQ ID NO: 1368853 - RNA, 15 nt, Human
ccuugugggccuggg

SEQ ID NO: 1368854 - RNA, 19 nt, Human
ccuuugggcuucagcugcc

SEQ ID NO: 1368855 - RNA, 22 nt, Human
ccuuugggcuucagcugccagu

SEQ ID NO: 1368856 - RNA, 24 nt, Human
ccuuuguauucucuccuguaccuc

SEQ ID NO: 1368857 - RNA, 22 nt, Human
ccuuuguauucucuccuguacc

SEQ ID NO: 1368858 - RNA, 23 nt, Human
ccuuuguauucucuccuguaccu

SEQ ID NO: 1368859 - RNA, 12 nt, Human
ccuuuuaaagaa

SEQ ID NO: 1368860 - RNA, 23 nt, Human
ccuuuguuggagucaaaaagaac

SEQ ID NO: 1368861 - RNA, 21 nt, Human
ccuuuguuccccacuggagca

SEQ ID NO: 1368862 - RNA, 20 nt, Human
ccuuuguuccccacuggagc

SEQ ID NO: 1368863 - RNA, 18 nt, Human
ccuuuguuccccacugga

SEQ ID NO: 1368864 - RNA, 20 nt, Human
ccuuugugugcucuccauuc

SEQ ID NO: 1368865 - RNA, 18 nt, Human
ccuuugugugcucuccau

SEQ ID NO: 1368866 - RNA, 17 nt, Human
ccuuugugugcucucca

SEQ ID NO: 1368867 - RNA, 14 nt, Human
ccuuugugugcucu

SEQ ID NO: 1368868 - RNA, 14 nt, Human
ccuuugugcccuau

SEQ ID NO: 1368869 - RNA, 13 nt, Human
ccuuugugcccua

SEQ ID NO: 1368870 - RNA, 22 nt, Human
ccuuugugcacauuuauuuccu

SEQ ID NO: 1368871 - RNA, 16 nt, Human
ccuuugugagucaaua

SEQ ID NO: 1368872 - RNA, 13 nt, Human
ccuuugugaguca

SEQ ID NO: 1368873 - RNA, 14 nt, Human
ccuuuuuuccccag

SEQ ID NO: 1368874 - RNA, 13 nt, Human
ccuuuuuugauca

SEQ ID NO: 1368875 - RNA, 12 nt, Human
ccuuuuuugauc

SEQ ID NO: 1368876 - RNA, 15 nt, Human
ccuuuuuucuguaua

SEQ ID NO: 1368877 - RNA, 15 nt, Human
ccuuuuuuccccaga

SEQ ID NO: 1368878 - RNA, 18 nt, Human
ccuuuuuuccccagacuu

SEQ ID NO: 1368879 - RNA, 23 nt, Human
cgaagcccagagggucugggggc

SEQ ID NO: 1368880 - RNA, 18 nt, Human
cgaagcccagagggucug

SEQ ID NO: 1368881 - RNA, 21 nt, Human
cgaagcguuguccucagcccc

SEQ ID NO: 1368882 - RNA, 17 nt, Human
cgaagcguuguccucag

SEQ ID NO: 1368883 - RNA, 16 nt, Human
cgaagcguuguccuca

SEQ ID NO: 1368884 - RNA, 15 nt, Human
cgaagcguuguccuc

SEQ ID NO: 1368885 - RNA, 22 nt, Human
cgaaauguuauuuuuuaauuau

SEQ ID NO: 1368886 - RNA, 14 nt, Human
cgaaauguuauuuu

SEQ ID NO: 1368887 - RNA, 13 nt, Human
cgaaauguuauuu

SEQ ID NO: 1368888 - RNA, 22 nt, Human
cgaaauaauuguuguucuguua

SEQ ID NO: 1368889 - RNA, 21 nt, Human
cgaaauaauuguuguucuguu

SEQ ID NO: 1368890 - RNA, 20 nt, Human
cgaaauaauuguuguucugu

SEQ ID NO: 1368891 - RNA, 19 nt, Human
cgaaauaauuguuguucug

SEQ ID NO: 1368892 - RNA, 16 nt, Human
cgaaauaauuguuguu

SEQ ID NO: 1368893 - RNA, 18 nt, Human
cgaaugugucuuuagaua

SEQ ID NO: 1368894 - RNA, 19 nt, Human
cgaaugugucuuuagauag

SEQ ID NO: 1368895 - RNA, 16 nt, Human
cgaaugugucuuuaga

SEQ ID NO: 1368896 - RNA, 15 nt, Human
cgaaugugucuuuag

SEQ ID NO: 1368897 - RNA, 14 nt, Human
cgaaugugucuuua

SEQ ID NO: 1368898 - RNA, 13 nt, Human
cgaaugugucuuu

SEQ ID NO: 1368899 - RNA, 13 nt, Human
cgaaugacacugu

SEQ ID NO: 1368900 - RNA, 16 nt, Human
cgaaugacacuguuca

SEQ ID NO: 1368901 - RNA, 12 nt, Human
cgaaugacacug

SEQ ID NO: 1368902 - RNA, 22 nt, Human
cgaaucucuuuuugcuuucgaa

SEQ ID NO: 1368903 - RNA, 16 nt, Human
cgaaucucugugccuu

SEQ ID NO: 1368904 - RNA, 12 nt, Human
cgaaucucugug

SEQ ID NO: 1368905 - RNA, 17 nt, Human
cgaaucuacuaauucca

SEQ ID NO: 1368906 - RNA, 23 nt, Human
cgaaggaaaagggcuuucucaau

SEQ ID NO: 1368907 - RNA, 17 nt, Human
cgaagcuaacagggaag

SEQ ID NO: 1368908 - RNA, 22 nt, Human
cgaagcuaacagggaaggcagg

SEQ ID NO: 1368909 - RNA, 20 nt, Human
ccuuguauccccugcaggcu

SEQ ID NO: 1368910 - RNA, 17 nt, Human
ccuuguagcuccucccc

SEQ ID NO: 1368911 - RNA, 15 nt, Human
ccuuguagcuccucc

SEQ ID NO: 1368912 - RNA, 14 nt, Human
ccuuguagcuccuc

SEQ ID NO: 1368913 - RNA, 19 nt, Human
ccuuguaauucuaaaugaa

SEQ ID NO: 1368914 - RNA, 16 nt, Human
ccuuguaauucuaaau

SEQ ID NO: 1368915 - RNA, 23 nt, Human
ccuugguuuuuacugcucugaga

SEQ ID NO: 1368916 - RNA, 21 nt, Human
ccuugguuuuuacugcucuga

SEQ ID NO: 1368917 - RNA, 22 nt, Human
ccuugguugucuggcaaggacu

SEQ ID NO: 1368918 - RNA, 21 nt, Human
ccuugguugucuggcaaggac

SEQ ID NO: 1368919 - RNA, 22 nt, Human
ccuugguucuugaggggaccag

SEQ ID NO: 1368920 - RNA, 13 nt, Human
ccuugguuccuaa

SEQ ID NO: 1368921 - RNA, 16 nt, Human
ccuugguucccccacu

SEQ ID NO: 1368922 - RNA, 20 nt, Human
ccuugggcucugaugaaaaa

SEQ ID NO: 1368923 - RNA, 15 nt, Human
ccuugggcucugaug

SEQ ID NO: 1368924 - RNA, 14 nt, Human
ccuugggcucugau

SEQ ID NO: 1368925 - RNA, 21 nt, Human
ccuugggcuccgugugggaga

SEQ ID NO: 1368926 - RNA, 13 nt, Human
ccuugggcucccu

SEQ ID NO: 1368927 - RNA, 12 nt, Human
ccuugggcuccc

SEQ ID NO: 1368928 - RNA, 16 nt, Human
ccuugggcucugauga

SEQ ID NO: 1368929 - RNA, 14 nt, Human
ccuuggccuguguu

SEQ ID NO: 1368930 - RNA, 15 nt, Human
ccuuggccuggagca

SEQ ID NO: 1368931 - RNA, 21 nt, Human
ccuuggccuggagcacaaaga

SEQ ID NO: 1368932 - RNA, 14 nt, Human
ccuuggccuggagc

SEQ ID NO: 1368933 - RNA, 13 nt, Human
ccuuggccuggag

SEQ ID NO: 1368934 - RNA, 12 nt, Human
ccuuggccugga

SEQ ID NO: 1368935 - RNA, 16 nt, Human
ccuuggccucuuuccu

SEQ ID NO: 1368936 - RNA, 19 nt, Human
ccuuccuguuuuucacauu

SEQ ID NO: 1368937 - RNA, 17 nt, Human
ccuuccuguuuuucaca

SEQ ID NO: 1368938 - RNA, 19 nt, Human
ccuuccuggggcaucuggc

SEQ ID NO: 1368939 - RNA, 17 nt, Human
ccuucgucuuucccaug

SEQ ID NO: 1368940 - RNA, 16 nt, Human
ccuucgucuuucccau

SEQ ID NO: 1368941 - RNA, 16 nt, Human
ccuucgggcugugccc

SEQ ID NO: 1368942 - RNA, 15 nt, Human
ccuucgggcugugcc

SEQ ID NO: 1368943 - RNA, 22 nt, Human
ccuuccuguuuuucacauuuuc

SEQ ID NO: 1368944 - RNA, 17 nt, Human
ccuuccagcuccuguaa

SEQ ID NO: 1368945 - RNA, 16 nt, Human
ccuuccagcuccugua

SEQ ID NO: 1368946 - RNA, 15 nt, Human
ccuuccagcuccugu

SEQ ID NO: 1368947 - RNA, 13 nt, Human
ccuuccagcuccu

SEQ ID NO: 1368948 - RNA, 12 nt, Human
ccuuccagcucc

SEQ ID NO: 1368949 - RNA, 20 nt, Human
ccuuccuggagacugcccag

SEQ ID NO: 1368950 - RNA, 22 nt, Human
ccuuccuggacagcugugccuc

SEQ ID NO: 1368951 - RNA, 21 nt, Human
ccuuccuggacagcugugccu

SEQ ID NO: 1368952 - RNA, 20 nt, Human
ccuuccuggacagcugugcc

SEQ ID NO: 1368953 - RNA, 19 nt, Human
ccuuccuggacagcugugc

SEQ ID NO: 1368954 - RNA, 18 nt, Human
ccuuccuggacagcugug

SEQ ID NO: 1368955 - RNA, 17 nt, Human
ccuuccuggacagcugu

SEQ ID NO: 1368956 - RNA, 23 nt, Human
ccuuccauggugugaucgucuga

SEQ ID NO: 1368957 - RNA, 23 nt, Human
ccuucuccccugcacuguaaaau

SEQ ID NO: 1368958 - RNA, 24 nt, Human
ccuucuccccugcacuguaaaaug

SEQ ID NO: 1368959 - RNA, 22 nt, Human
ccuucuccccugcacuguaaaa

SEQ ID NO: 1368960 - RNA, 17 nt, Human
ccuucuccccugcacug

SEQ ID NO: 1368961 - RNA, 16 nt, Human
ccuucuccccugcacu

SEQ ID NO: 1368962 - RNA, 15 nt, Human
ccuucuccccugcac

SEQ ID NO: 1368963 - RNA, 13 nt, Human
ccuucuccccugc

SEQ ID NO: 1368964 - RNA, 23 nt, Human
ccuucuccccagcucccaggacc

SEQ ID NO: 1368965 - RNA, 21 nt, Human
ccuucuccccagcucccagga

SEQ ID NO: 1368966 - RNA, 20 nt, Human
ccuucuccccagcucccagg

SEQ ID NO: 1368967 - RNA, 19 nt, Human
ccuucuccccagcucccag

SEQ ID NO: 1368968 - RNA, 18 nt, Human
ccuucuccccagcuccca

SEQ ID NO: 1368969 - RNA, 16 nt, Human
ccuucuauuuggggcu

SEQ ID NO: 1368970 - RNA, 22 nt, Human
ccuucuauuuggggcuugauga

SEQ ID NO: 1368971 - RNA, 15 nt, Human
ccuucuauuuggggc

SEQ ID NO: 1368972 - RNA, 14 nt, Human
ccuucuauuugggg

SEQ ID NO: 1368973 - RNA, 22 nt, Human
ccuucuccauccacaugggagc

SEQ ID NO: 1368974 - RNA, 16 nt, Human
ccuucuccauccacau

SEQ ID NO: 1368975 - RNA, 13 nt, Human
ccuucuccaucca

SEQ ID NO: 1368976 - RNA, 11 nt, Human
ccuucuccauc

SEQ ID NO: 1368977 - RNA, 22 nt, Human
ccuucuccauggcccugccaug

SEQ ID NO: 1368978 - RNA, 17 nt, Human
ccuucuccccagcuccc

SEQ ID NO: 1368979 - RNA, 14 nt, Human
ccuucuccccagcu

SEQ ID NO: 1368980 - RNA, 13 nt, Human
ccuucuccccagc

SEQ ID NO: 1368981 - RNA, 12 nt, Human
ccuucuccccag

SEQ ID NO: 1368982 - RNA, 20 nt, Human
ccuucucccacucuccuagg

SEQ ID NO: 1368983 - RNA, 18 nt, Human
ccuucucccacucuccua

SEQ ID NO: 1368984 - RNA, 17 nt, Human
ccuucucccacucuccu

SEQ ID NO: 1368985 - RNA, 15 nt, Human
ccuucucccacucuc

SEQ ID NO: 1368986 - RNA, 14 nt, Human
ccuucucccacucu

SEQ ID NO: 1368987 - RNA, 13 nt, Human
ccuucucccacuc

SEQ ID NO: 1368988 - RNA, 19 nt, Human
ccuucuccauggcccugcc

SEQ ID NO: 1368989 - RNA, 23 nt, Human
ccuuccagcuagugacccacaug

SEQ ID NO: 1368990 - RNA, 15 nt, Human
ccuucauuuccuccg

SEQ ID NO: 1368991 - RNA, 14 nt, Human
ccuucauuuccucc

SEQ ID NO: 1368992 - RNA, 13 nt, Human
ccuucauuuccuc

SEQ ID NO: 1368993 - RNA, 12 nt, Human
ccuucauuuccu

SEQ ID NO: 1368994 - RNA, 23 nt, Human
ccuucauugccuuaacuggagcc

SEQ ID NO: 1368995 - RNA, 23 nt, Human
ccuucauucugcaaguauacuag

SEQ ID NO: 1368996 - RNA, 20 nt, Human
ccuucauugccuuaacugga

SEQ ID NO: 1368997 - RNA, 15 nt, Human
ccuucaugcauggaa

SEQ ID NO: 1368998 - RNA, 19 nt, Human
ccugugguucugagauggc

SEQ ID NO: 1368999 - RNA, 15 nt, Human
ccugugguucugaga

SEQ ID NO: 1369000 - RNA, 16 nt, Human
ccuguggucacugacu

SEQ ID NO: 1369001 - RNA, 22 nt, Human
ccugugggggguaaucccugcu

SEQ ID NO: 1369002 - RNA, 18 nt, Human
ccuucaugacagccucca

SEQ ID NO: 1369003 - RNA, 17 nt, Human
ccuucaugacagccucc

SEQ ID NO: 1369004 - RNA, 12 nt, Human
ccuucaugcaug

SEQ ID NO: 1369005 - RNA, 21 nt, Human
ccuucaugcauggaaauuccc

SEQ ID NO: 1369006 - RNA, 17 nt, Human
ccugugcucagcccuga

SEQ ID NO: 1369007 - RNA, 16 nt, Human
ccugugcucagcccug

SEQ ID NO: 1369008 - RNA, 15 nt, Human
ccugugcucagcccu

SEQ ID NO: 1369009 - RNA, 14 nt, Human
ccugugcucagccc

SEQ ID NO: 1369010 - RNA, 15 nt, Human
ccugugccugacccu

SEQ ID NO: 1369011 - RNA, 9 nt, Human
ccuguccuc

SEQ ID NO: 1369012 - RNA, 14 nt, Human
ccugugggagccuc

SEQ ID NO: 1369013 - RNA, 13 nt, Human
ccugugggagccu

SEQ ID NO: 1369014 - RNA, 22 nt, Human
ccuguggcgccgucuccagggg

SEQ ID NO: 1369015 - RNA, 17 nt, Human
ccugugggagccucgca

SEQ ID NO: 1369016 - RNA, 16 nt, Human
ccugugggagccucgc

SEQ ID NO: 1369017 - RNA, 15 nt, Human
ccugugggagccucg

SEQ ID NO: 1369018 - RNA, 21 nt, Human
ccuguggcgccgucuccaggg

SEQ ID NO: 1369019 - RNA, 12 nt, Human
ccuguggauauu

SEQ ID NO: 1369020 - RNA, 18 nt, Human
ccuguggaucaaauccag

SEQ ID NO: 1369021 - RNA, 16 nt, Human
cgcuuugauucauagu

SEQ ID NO: 1369022 - RNA, 18 nt, Human
cgcccacaggaagccugc

SEQ ID NO: 1369023 - RNA, 15 nt, Human
cgaugcaaugaacac

SEQ ID NO: 1369024 - RNA, 23 nt, Human
cgaggccuaccccgcagacaccu

SEQ ID NO: 1369025 - RNA, 17 nt, Human
cgaggccuaccccgcag

SEQ ID NO: 1369026 - RNA, 13 nt, Human
cgaggcccgcaug

SEQ ID NO: 1369027 - RNA, 22 nt, Human
cgaggaguaacaauacaaaugg

SEQ ID NO: 1369028 - RNA, 21 nt, Human
cgaggaguaacaauacaaaug

SEQ ID NO: 1369029 - RNA, 14 nt, Human
cgaggaguaacaau

SEQ ID NO: 1369030 - RNA, 13 nt, Human
cgaggaguaacaa

SEQ ID NO: 1369031 - RNA, 12 nt, Human
cgaggaguaaca

SEQ ID NO: 1369032 - RNA, 22 nt, Human
cgaggaggugucucaggcugcc

SEQ ID NO: 1369033 - RNA, 21 nt, Human
cgaggaggugucucaggcugc

SEQ ID NO: 1369034 - RNA, 20 nt, Human
cgaggaggugucucaggcug

SEQ ID NO: 1369035 - RNA, 18 nt, Human
cgaggaggugucucaggc

SEQ ID NO: 1369036 - RNA, 18 nt, Human
cgaggagggagagucucc

SEQ ID NO: 1369037 - RNA, 23 nt, Human
cgaggagggagagucucccaggg

SEQ ID NO: 1369038 - RNA, 17 nt, Human
cgaggagguaaugaauu

SEQ ID NO: 1369039 - RNA, 20 nt, Human
cgaggaggcuccagagggca

SEQ ID NO: 1369040 - RNA, 19 nt, Human
cgaggaggcuccagagggc

SEQ ID NO: 1369041 - RNA, 15 nt, Human
cgaggacccaggaaa

SEQ ID NO: 1369042 - RNA, 14 nt, Human
cgagcgcccugcag

SEQ ID NO: 1369043 - RNA, 13 nt, Human
cgagcgcccugca

SEQ ID NO: 1369044 - RNA, 19 nt, Human
cgagcgcccagcuccugac

SEQ ID NO: 1369045 - RNA, 15 nt, Human
cgagcgcccagcucc

SEQ ID NO: 1369046 - RNA, 17 nt, Human
cgagagauguguguuga

SEQ ID NO: 1369047 - RNA, 14 nt, Human
cgagagaugugugu

SEQ ID NO: 1369048 - RNA, 13 nt, Human
cgagagaugugug

SEQ ID NO: 1369049 - RNA, 12 nt, Human
cgagagaugugu

SEQ ID NO: 1369050 - RNA, 17 nt, Human
cgagagaucaaagauga

SEQ ID NO: 1369051 - RNA, 16 nt, Human
cgagagaucaaagaug

SEQ ID NO: 1369052 - RNA, 14 nt, Human
cgagacuuuccauu

SEQ ID NO: 1369053 - RNA, 22 nt, Human
cgcacugugacccccagcuccg

SEQ ID NO: 1369054 - RNA, 17 nt, Human
cgcacugugacccccag

SEQ ID NO: 1369055 - RNA, 14 nt, Human
cgaugcccagagac

SEQ ID NO: 1369056 - RNA, 13 nt, Human
cgaugcccagaga

SEQ ID NO: 1369057 - RNA, 12 nt, Human
cgaugcccagag

SEQ ID NO: 1369058 - RNA, 13 nt, Human
cgaugccagccaa

SEQ ID NO: 1369059 - RNA, 16 nt, Human
cgcaccugccucagga

SEQ ID NO: 1369060 - RNA, 15 nt, Human
cgcaccugccucagg

SEQ ID NO: 1369061 - RNA, 14 nt, Human
cgcaccugccucag

SEQ ID NO: 1369062 - RNA, 16 nt, Human
cgcacggcagccacag

SEQ ID NO: 1369063 - RNA, 15 nt, Human
cgcuucuugccucug

SEQ ID NO: 1369064 - RNA, 20 nt, Human
cgcuuaucaacuaaugauuu

SEQ ID NO: 1369065 - RNA, 13 nt, Human
cgcuguugcugaa

SEQ ID NO: 1369066 - RNA, 14 nt, Human
cgcuguugcugaau

SEQ ID NO: 1369067 - RNA, 17 nt, Human
cgcuguugcugaauagg

SEQ ID NO: 1369068 - RNA, 18 nt, Human
cgcuccugcagccccagc

SEQ ID NO: 1369069 - RNA, 14 nt, Human
cgcuccugcagccc

SEQ ID NO: 1369070 - RNA, 17 nt, Human
cgcuccccacucugcuc

SEQ ID NO: 1369071 - RNA, 19 nt, Human
cgcuccccacucugcucug

SEQ ID NO: 1369072 - RNA, 16 nt, Human
cgcuccccacucugcu

SEQ ID NO: 1369073 - RNA, 15 nt, Human
cgcuccccacucugc

SEQ ID NO: 1369074 - RNA, 16 nt, Human
cgcuccagcugccccg

SEQ ID NO: 1369075 - RNA, 18 nt, Human
cgcuccagcugccccggc

SEQ ID NO: 1369076 - RNA, 17 nt, Human
cgcuccuggcccagccu

SEQ ID NO: 1369077 - RNA, 18 nt, Human
cgcuccuggcccagccuu

SEQ ID NO: 1369078 - RNA, 16 nt, Human
cgcuccuggcccagcc

SEQ ID NO: 1369079 - RNA, 15 nt, Human
cgcuccuggcccagc

SEQ ID NO: 1369080 - RNA, 23 nt, Human
cgcuccugcuaacggugcucagg

SEQ ID NO: 1369081 - RNA, 22 nt, Human
cgcuccugcuaacggugcucag

SEQ ID NO: 1369082 - RNA, 14 nt, Human
cgcuuuccugaauc

SEQ ID NO: 1369083 - RNA, 17 nt, Human
cgcuucuugccucugug

SEQ ID NO: 1369084 - RNA, 16 nt, Human
cgcuucuugccucugu

SEQ ID NO: 1369085 - RNA, 23 nt, Human
cggacuuagaaaaccagcucagc

SEQ ID NO: 1369086 - RNA, 23 nt, Human
cggagucguggggugugcuggga

SEQ ID NO: 1369087 - RNA, 22 nt, Human
cggagucguggggugugcuggg

SEQ ID NO: 1369088 - RNA, 16 nt, Human
cggacuuuucugcaaa

SEQ ID NO: 1369089 - RNA, 15 nt, Human
cggacuuuucugcaa

SEQ ID NO: 1369090 - RNA, 14 nt, Human
cggacuuuucugca

SEQ ID NO: 1369091 - RNA, 19 nt, Human
cggaccaaagggagucugc

SEQ ID NO: 1369092 - RNA, 23 nt, Human
cggacaguuccagaagugugacu

SEQ ID NO: 1369093 - RNA, 21 nt, Human
cggacaguuccagaaguguga

SEQ ID NO: 1369094 - RNA, 12 nt, Human
cggaccagccug

SEQ ID NO: 1369095 - RNA, 22 nt, Human
cggacuuagaaaaccagcucag

SEQ ID NO: 1369096 - RNA, 21 nt, Human
cggaccacccucacuggcucu

SEQ ID NO: 1369097 - RNA, 23 nt, Human
cggaccaaagggagucugccagg

SEQ ID NO: 1369098 - RNA, 21 nt, Human
cggaccaaagggagucugcca

SEQ ID NO: 1369099 - RNA, 22 nt, Human
cgcccaaaggacgcacugagca

SEQ ID NO: 1369100 - RNA, 20 nt, Human
cgcccaaaggacgcacugag

SEQ ID NO: 1369101 - RNA, 18 nt, Human
cgcccaaaggacgcacug

SEQ ID NO: 1369102 - RNA, 17 nt, Human
cgcccaaaggacgcacu

SEQ ID NO: 1369103 - RNA, 18 nt, Human
cgccauucucaagcccug

SEQ ID NO: 1369104 - RNA, 23 nt, Human
cgcgggagccaugcgcccccucc

SEQ ID NO: 1369105 - RNA, 16 nt, Human
cgcggcugggaggagg

SEQ ID NO: 1369106 - RNA, 12 nt, Human
cgcggcugggag

SEQ ID NO: 1369107 - RNA, 11 nt, Human
cgcggcuggga

SEQ ID NO: 1369108 - RNA, 13 nt, Human
cgccuuucccagg

SEQ ID NO: 1369109 - RNA, 17 nt, Human
cgcccguccugccugug

SEQ ID NO: 1369110 - RNA, 15 nt, Human
cgcccguccugccug

SEQ ID NO: 1369111 - RNA, 14 nt, Human
cgcccguccugccu

SEQ ID NO: 1369112 - RNA, 12 nt, Human
cgcccguccugc

SEQ ID NO: 1369113 - RNA, 16 nt, Human
cgccuuggccuguguu

SEQ ID NO: 1369114 - RNA, 13 nt, Human
cgcuaaaagaaac

SEQ ID NO: 1369115 - RNA, 15 nt, Human
cgcuaaaagaaacuu

SEQ ID NO: 1369116 - RNA, 21 nt, Human
cggccuccuucugagcuccug

SEQ ID NO: 1369117 - RNA, 22 nt, Human
cggccuccuucugagcuccugu

SEQ ID NO: 1369118 - RNA, 20 nt, Human
cggccuccuucugagcuccu

SEQ ID NO: 1369119 - RNA, 12 nt, Human
cggccuccuucu

SEQ ID NO: 1369120 - RNA, 21 nt, Human
cggccuccguccaggagccug

SEQ ID NO: 1369121 - RNA, 22 nt, Human
cggccuccguccaggagccugg

SEQ ID NO: 1369122 - RNA, 15 nt, Human
cggccucccaaagug

SEQ ID NO: 1369123 - RNA, 21 nt, Human
cggcccucaguagucccugca

SEQ ID NO: 1369124 - RNA, 17 nt, Human
cggauccuaagcaucua

SEQ ID NO: 1369125 - RNA, 14 nt, Human
cggauccuaagcau

SEQ ID NO: 1369126 - RNA, 21 nt, Human
cggauccagggaggcuggucc

SEQ ID NO: 1369127 - RNA, 22 nt, Human
cggccagccccuggccccagga

SEQ ID NO: 1369128 - RNA, 23 nt, Human
cggagugcggaccacccucacug

SEQ ID NO: 1369129 - RNA, 14 nt, Human
cggagugcggacca

SEQ ID NO: 1369130 - RNA, 18 nt, Human
cggagugaguuuuuuagu

SEQ ID NO: 1369131 - RNA, 22 nt, Human
cggauccagggaggcugguccu

SEQ ID NO: 1369132 - RNA, 18 nt, Human
cggauccagggaggcugg

SEQ ID NO: 1369133 - RNA, 13 nt, Human
cggauccagggag

SEQ ID NO: 1369134 - RNA, 16 nt, Human
cggcuucaugccagcu

SEQ ID NO: 1369135 - RNA, 15 nt, Human
cggcuucaugccagc

SEQ ID NO: 1369136 - RNA, 22 nt, Human
cggcugugugugcacgcgugug

SEQ ID NO: 1369137 - RNA, 13 nt, Human
cggcugugugugc

SEQ ID NO: 1369138 - RNA, 21 nt, Human
cggcuggccauggagaaagcu

SEQ ID NO: 1369139 - RNA, 20 nt, Human
cggcuggccauggagaaagc

SEQ ID NO: 1369140 - RNA, 13 nt, Human
cggcuggccaugg

SEQ ID NO: 1369141 - RNA, 15 nt, Human
cgggaaaaagcccac

SEQ ID NO: 1369142 - RNA, 19 nt, Human
cggcuucaugccagcuacu

SEQ ID NO: 1369143 - RNA, 16 nt, Human
cggcuugccacacccc

SEQ ID NO: 1369144 - RNA, 19 nt, Human
cgggacaccuaggcuaggg

SEQ ID NO: 1369145 - RNA, 18 nt, Human
cgggacaccuaggcuagg

SEQ ID NO: 1369146 - RNA, 18 nt, Human
cgggaauuuucaucuagg

SEQ ID NO: 1369147 - RNA, 20 nt, Human
cgggaauuuucaucuaggau

SEQ ID NO: 1369148 - RNA, 18 nt, Human
cuaaaauaauuuuguaau

SEQ ID NO: 1369149 - RNA, 17 nt, Human
cuaaaauaauuuuguaa

SEQ ID NO: 1369150 - RNA, 15 nt, Human
cuaaaauaauuuugu

SEQ ID NO: 1369151 - RNA, 22 nt, Human
cuaaaauaaagaaauagaacaa

SEQ ID NO: 1369152 - RNA, 16 nt, Human
cuaaaauaaagaaaua

SEQ ID NO: 1369153 - RNA, 14 nt, Human
cuaaaauaaagaaa

SEQ ID NO: 1369154 - RNA, 20 nt, Human
cuaaaagugggcuugauucu

SEQ ID NO: 1369155 - RNA, 23 nt, Human
cuaaaagugggcuugauucugca

SEQ ID NO: 1369156 - RNA, 21 nt, Human
cuaaaaauagacuuaaaucuc

SEQ ID NO: 1369157 - RNA, 11 nt, Human
cuaaaaauaaa

SEQ ID NO: 1369158 - RNA, 15 nt, Human
cuaaaaaaaagauga

SEQ ID NO: 1369159 - RNA, 14 nt, Human
cuaaaaaaaagaug

SEQ ID NO: 1369160 - RNA, 16 nt, Human
cguuuuauaagcauca

SEQ ID NO: 1369161 - RNA, 13 nt, Human
cguuuuaaaaaag

SEQ ID NO: 1369162 - RNA, 19 nt, Human
cguuuguuuguuuguuuaa

SEQ ID NO: 1369163 - RNA, 18 nt, Human
cgggaccacccugagccg

SEQ ID NO: 1369164 - RNA, 17 nt, Human
cgggaccacccugagcc

SEQ ID NO: 1369165 - RNA, 16 nt, Human
cgggaccacccugagc

SEQ ID NO: 1369166 - RNA, 11 nt, Human
cggcugugugu

SEQ ID NO: 1369167 - RNA, 13 nt, Human
cgggaccuggugc

SEQ ID NO: 1369168 - RNA, 20 nt, Human
cguuuguguucuguuuuguu

SEQ ID NO: 1369169 - RNA, 19 nt, Human
cguuuguguucuguuuugu

SEQ ID NO: 1369170 - RNA, 11 nt, Human
cguuuguguuc

SEQ ID NO: 1369171 - RNA, 18 nt, Human
cguuuggugcuucucaga

SEQ ID NO: 1369172 - RNA, 19 nt, Human
cuaaauaccucaaucaguc

SEQ ID NO: 1369173 - RNA, 23 nt, Human
cuaaauaaagcuugcaacaaaau

SEQ ID NO: 1369174 - RNA, 20 nt, Human
cuaaauaaaauuuguugcau

SEQ ID NO: 1369175 - RNA, 15 nt, Human
cuaaauaaaauuugu

SEQ ID NO: 1369176 - RNA, 22 nt, Human
cuaaauaaaaugcuagguucua

SEQ ID NO: 1369177 - RNA, 21 nt, Human
cuaaauaaaaugcuagguucu

SEQ ID NO: 1369178 - RNA, 19 nt, Human
cuaaauaaaaugcuagguu

SEQ ID NO: 1369179 - RNA, 15 nt, Human
cuaaauaaaaugcua

SEQ ID NO: 1369180 - RNA, 13 nt, Human
cuaaauaaaaugc

SEQ ID NO: 1369181 - RNA, 20 nt, Human
cuaaacugagacaaugccuu

SEQ ID NO: 1369182 - RNA, 17 nt, Human
cuaaauauauuuuaaga

SEQ ID NO: 1369183 - RNA, 21 nt, Human
cuaaaucuccaaaauaaaacu

SEQ ID NO: 1369184 - RNA, 23 nt, Human
cuaaaaugugauguucuaaggcu

SEQ ID NO: 1369185 - RNA, 22 nt, Human
cuaaaaugugauguucuaaggc

SEQ ID NO: 1369186 - RNA, 21 nt, Human
cuaaaaugugauguucuaagg

SEQ ID NO: 1369187 - RNA, 20 nt, Human
cuaaaaugugauguucuaag

SEQ ID NO: 1369188 - RNA, 19 nt, Human
cuaaaaugugauguucuaa

SEQ ID NO: 1369189 - RNA, 18 nt, Human
cuaaaaugugauguucua

SEQ ID NO: 1369190 - RNA, 23 nt, Human
cuaaaauauuuauuuuuuuuaag

SEQ ID NO: 1369191 - RNA, 15 nt, Human
cuaaaauauuuauuu

SEQ ID NO: 1369192 - RNA, 14 nt, Human
cuaaaauauuuauu

SEQ ID NO: 1369193 - RNA, 22 nt, Human
cuaaaaucuuauaguucuaggc

SEQ ID NO: 1369194 - RNA, 21 nt, Human
cuaaaaucuuauaguucuagg

SEQ ID NO: 1369195 - RNA, 19 nt, Human
cuaaaaucuuauaguucua

SEQ ID NO: 1369196 - RNA, 17 nt, Human
cuaaaaucuuauaguuc

SEQ ID NO: 1369197 - RNA, 20 nt, Human
cuaagaucuuagauucucug

SEQ ID NO: 1369198 - RNA, 17 nt, Human
cuaagaucuuagauucu

SEQ ID NO: 1369199 - RNA, 16 nt, Human
cuaagaucuuagauuc

SEQ ID NO: 1369200 - RNA, 14 nt, Human
cuaagaucuuagau

SEQ ID NO: 1369201 - RNA, 12 nt, Human
cuaagaucuuag

SEQ ID NO: 1369202 - RNA, 23 nt, Human
cuaagaggcugcccuccugugcu

SEQ ID NO: 1369203 - RNA, 22 nt, Human
cuaagagugcugggcauuuuua

SEQ ID NO: 1369204 - RNA, 18 nt, Human
cuaagaggcugcccuccu

SEQ ID NO: 1369205 - RNA, 16 nt, Human
cuaagaggcugcccuc

SEQ ID NO: 1369206 - RNA, 14 nt, Human
cuaagaggcugccc

SEQ ID NO: 1369207 - RNA, 17 nt, Human
cuaaccucgggccugcu

SEQ ID NO: 1369208 - RNA, 22 nt, Human
cuaacccuuugugugcucucca

SEQ ID NO: 1369209 - RNA, 15 nt, Human
cuaaccucaucuucu

SEQ ID NO: 1369210 - RNA, 12 nt, Human
cuaaccucaucu

SEQ ID NO: 1369211 - RNA, 23 nt, Human
cuaacccuuugugugcucuccau

SEQ ID NO: 1369212 - RNA, 23 nt, Human
cuaacccuauacuguaguauucu

SEQ ID NO: 1369213 - RNA, 18 nt, Human
cuaaccauguguuauguu

SEQ ID NO: 1369214 - RNA, 16 nt, Human
cuaagagagcaccugg

SEQ ID NO: 1369215 - RNA, 21 nt, Human
cuaagagaaguuguaaaguau

SEQ ID NO: 1369216 - RNA, 15 nt, Human
cuaagagagaaugag

SEQ ID NO: 1369217 - RNA, 14 nt, Human
cuaagagagaauga

SEQ ID NO: 1369218 - RNA, 23 nt, Human
cuaacauauaauguuguuauuua

SEQ ID NO: 1369219 - RNA, 22 nt, Human
cuaacauauaauguuguuauuu

SEQ ID NO: 1369220 - RNA, 12 nt, Human
cuaacauauaau

SEQ ID NO: 1369221 - RNA, 18 nt, Human
cuaacagggaaggcaggc

SEQ ID NO: 1369222 - RNA, 21 nt, Human
cuaacagggaaggcaggcagg

SEQ ID NO: 1369223 - RNA, 17 nt, Human
cuaacagggaaggcagg

SEQ ID NO: 1369224 - RNA, 16 nt, Human
cuaacagggaaggcag

SEQ ID NO: 1369225 - RNA, 15 nt, Human
cuaacagggaaggca

SEQ ID NO: 1369226 - RNA, 14 nt, Human
cuaacagggaaggc

SEQ ID NO: 1369227 - RNA, 22 nt, Human
cuaacagcccuccucugcacuc

SEQ ID NO: 1369228 - RNA, 21 nt, Human
cuaacagcccuccucugcacu

SEQ ID NO: 1369229 - RNA, 12 nt, Human
cuaacagcccuc

SEQ ID NO: 1369230 - RNA, 22 nt, Human
cuaacaagucauagguuaauau

SEQ ID NO: 1369231 - RNA, 21 nt, Human
cuaacauuuuugauaaagccu

SEQ ID NO: 1369232 - RNA, 20 nt, Human
cuaaccaagcugaguuuccu

SEQ ID NO: 1369233 - RNA, 15 nt, Human
cuaaccaagcugagu

SEQ ID NO: 1369234 - RNA, 10 nt, Human
cuaaccaagu

SEQ ID NO: 1369235 - RNA, 21 nt, Human
cuaaccaagcugaguuuccua

SEQ ID NO: 1369236 - RNA, 12 nt, Human
cuaaccaaguuc

SEQ ID NO: 1369237 - RNA, 16 nt, Human
cuaacaaccaaagacu

SEQ ID NO: 1369238 - RNA, 20 nt, Human
cuaacaacauuguagccuca

SEQ ID NO: 1369239 - RNA, 17 nt, Human
cuaaauuuuccuguccu

SEQ ID NO: 1369240 - RNA, 16 nt, Human
cuaaauuuuccugucc

SEQ ID NO: 1369241 - RNA, 19 nt, Human
cuaaauuuuccuguccucu

SEQ ID NO: 1369242 - RNA, 14 nt, Human
cuaaaugaauguuu

SEQ ID NO: 1369243 - RNA, 12 nt, Human
cuaaaugaaugu

SEQ ID NO: 1369244 - RNA, 15 nt, Human
cuaaaugaauguuua

SEQ ID NO: 1369245 - RNA, 20 nt, Human
cuaaaucuuuuauaggauuu

SEQ ID NO: 1369246 - RNA, 19 nt, Human
cuaaauucuuucauuuuag

SEQ ID NO: 1369247 - RNA, 13 nt, Human
cguuuucaaaauu

SEQ ID NO: 1369248 - RNA, 16 nt, Human
cuaagauucuaaaggu

SEQ ID NO: 1369249 - RNA, 15 nt, Human
cuaauucaauucaaa

SEQ ID NO: 1369250 - RNA, 20 nt, Human
cuaauucaaggaauuucuua

SEQ ID NO: 1369251 - RNA, 18 nt, Human
cuaauucaaggaauuucu

SEQ ID NO: 1369252 - RNA, 16 nt, Human
cuaauucaaggaauuu

SEQ ID NO: 1369253 - RNA, 18 nt, Human
cuaauuauguagcucuuu

SEQ ID NO: 1369254 - RNA, 17 nt, Human
cuaauuauguagcucuu

SEQ ID NO: 1369255 - RNA, 15 nt, Human
cuaauuauguagcuc

SEQ ID NO: 1369256 - RNA, 18 nt, Human
cuaauggcaugagaaaua

SEQ ID NO: 1369257 - RNA, 16 nt, Human
cuaauggcaugagaaa

SEQ ID NO: 1369258 - RNA, 14 nt, Human
cuaauggcaugaga

SEQ ID NO: 1369259 - RNA, 18 nt, Human
cuaaugccuuacucuucu

SEQ ID NO: 1369260 - RNA, 14 nt, Human
cuaaucaugaaacu

SEQ ID NO: 1369261 - RNA, 21 nt, Human
cuaaucagggaggucauuuug

SEQ ID NO: 1369262 - RNA, 20 nt, Human
cuaaucagggaggucauuuu

SEQ ID NO: 1369263 - RNA, 19 nt, Human
cuaaucagggaggucauuu

SEQ ID NO: 1369264 - RNA, 20 nt, Human
cuaauauggccacaguaguc

SEQ ID NO: 1369265 - RNA, 17 nt, Human
cuaauauggcaaccauu

SEQ ID NO: 1369266 - RNA, 10 nt, Human
cuaauucaua

SEQ ID NO: 1369267 - RNA, 22 nt, Human
cuaauucacagugcucuuuucu

SEQ ID NO: 1369268 - RNA, 16 nt, Human
cuaauucacagugcuc

SEQ ID NO: 1369269 - RNA, 15 nt, Human
cuaauucacagugcu

SEQ ID NO: 1369270 - RNA, 17 nt, Human
cuaauuccacaccuuuu

SEQ ID NO: 1369271 - RNA, 15 nt, Human
cuaauuccacaccuu

SEQ ID NO: 1369272 - RNA, 18 nt, Human
cuacaccacucuggcagc

SEQ ID NO: 1369273 - RNA, 16 nt, Human
cuacaccacucuggca

SEQ ID NO: 1369274 - RNA, 15 nt, Human
cuacaccacucuggc

SEQ ID NO: 1369275 - RNA, 14 nt, Human
cuacaccacucugg

SEQ ID NO: 1369276 - RNA, 13 nt, Human
cuacaccacucug

SEQ ID NO: 1369277 - RNA, 16 nt, Human
cuaaugccucuucauu

SEQ ID NO: 1369278 - RNA, 14 nt, Human
cuacacuaagagag

SEQ ID NO: 1369279 - RNA, 23 nt, Human
cuacacgagauacagaauuuuau

SEQ ID NO: 1369280 - RNA, 18 nt, Human
cuacaccuauuaucccag

SEQ ID NO: 1369281 - RNA, 17 nt, Human
cuacaccuauuauccca

SEQ ID NO: 1369282 - RNA, 16 nt, Human
cuacaccuauuauccc

SEQ ID NO: 1369283 - RNA, 18 nt, Human
cuacacccuuuuccagcu

SEQ ID NO: 1369284 - RNA, 16 nt, Human
cuacacccuuuuccag

SEQ ID NO: 1369285 - RNA, 22 nt, Human
cuacaccacucuggcagccaca

SEQ ID NO: 1369286 - RNA, 21 nt, Human
cuacaccacucuggcagccac

SEQ ID NO: 1369287 - RNA, 20 nt, Human
cuacaccacucuggcagcca

SEQ ID NO: 1369288 - RNA, 19 nt, Human
cuacaccacucuggcagcc

SEQ ID NO: 1369289 - RNA, 11 nt, Human
cuacacccagc

SEQ ID NO: 1369290 - RNA, 12 nt, Human
cuacacccagca

SEQ ID NO: 1369291 - RNA, 13 nt, Human
cuacacccagcaa

SEQ ID NO: 1369292 - RNA, 14 nt, Human
cuacacccagcaau

SEQ ID NO: 1369293 - RNA, 16 nt, Human
cuacacccagcaauag

SEQ ID NO: 1369294 - RNA, 23 nt, Human
cuaagaugugauauucuaagacu

SEQ ID NO: 1369295 - RNA, 22 nt, Human
cuaagaugugauauucuaagac

SEQ ID NO: 1369296 - RNA, 21 nt, Human
cuaagaugugauauucuaaga

SEQ ID NO: 1369297 - RNA, 20 nt, Human
cuaagaugugauauucuaag

SEQ ID NO: 1369298 - RNA, 19 nt, Human
cuaagaugugauauucuaa

SEQ ID NO: 1369299 - RNA, 18 nt, Human
cuaagaugugauauucua

SEQ ID NO: 1369300 - RNA, 23 nt, Human
cuaagauuacaaaucagaaguca

SEQ ID NO: 1369301 - RNA, 22 nt, Human
cuaagauuacaaaucagaaguc

SEQ ID NO: 1369302 - RNA, 21 nt, Human
cuaagauuacaaaucagaagu

SEQ ID NO: 1369303 - RNA, 19 nt, Human
cuaagauuacaaaucagaa

SEQ ID NO: 1369304 - RNA, 15 nt, Human
cuaagauucuaaagg

SEQ ID NO: 1369305 - RNA, 14 nt, Human
cuaagauucuaaag

SEQ ID NO: 1369306 - RNA, 16 nt, Human
cuaagcucacguccug

SEQ ID NO: 1369307 - RNA, 13 nt, Human
cuaagauucuaaa

SEQ ID NO: 1369308 - RNA, 12 nt, Human
cuaagauucuaa

SEQ ID NO: 1369309 - RNA, 11 nt, Human
cuaagauucua

SEQ ID NO: 1369310 - RNA, 21 nt, Human
cuaagcuucacuguaaaauaa

SEQ ID NO: 1369311 - RNA, 17 nt, Human
cuaagguucuaaggccu

SEQ ID NO: 1369312 - RNA, 16 nt, Human
cuaagguucuaaggcc

SEQ ID NO: 1369313 - RNA, 15 nt, Human
cuaagguucuaaggc

SEQ ID NO: 1369314 - RNA, 14 nt, Human
cuaagguucuaagg

SEQ ID NO: 1369315 - RNA, 13 nt, Human
cuaagguucuaag

SEQ ID NO: 1369316 - RNA, 19 nt, Human
cuaaggcucugagagucua

SEQ ID NO: 1369317 - RNA, 15 nt, Human
cuaaggcucugagag

SEQ ID NO: 1369318 - RNA, 14 nt, Human
cuaaggcucugaga

SEQ ID NO: 1369319 - RNA, 13 nt, Human
cuaaggcucugag

SEQ ID NO: 1369320 - RNA, 11 nt, Human
cuaaggcucug

SEQ ID NO: 1369321 - RNA, 23 nt, Human
cuaaggcucuaugagucuagaug

SEQ ID NO: 1369322 - RNA, 22 nt, Human
cuaaggcucuaugagucuagau

SEQ ID NO: 1369323 - RNA, 21 nt, Human
cuaaggcucuaugagucuaga

SEQ ID NO: 1369324 - RNA, 20 nt, Human
cuaaggcucuaugagucuag

SEQ ID NO: 1369325 - RNA, 19 nt, Human
cuaaggcucuaugagucua

SEQ ID NO: 1369326 - RNA, 18 nt, Human
cuaaggcucuaugagucu

SEQ ID NO: 1369327 - RNA, 16 nt, Human
cuaaggcuccuguuuu

SEQ ID NO: 1369328 - RNA, 22 nt, Human
cuaaggccuaggauucuaaaau

SEQ ID NO: 1369329 - RNA, 21 nt, Human
cuaaggccuaggauucuaaaa

SEQ ID NO: 1369330 - RNA, 20 nt, Human
cuaaggccuaggauucuaaa

SEQ ID NO: 1369331 - RNA, 19 nt, Human
cuaaggccuaggauucuaa

SEQ ID NO: 1369332 - RNA, 14 nt, Human
cuaaggccuaggau

SEQ ID NO: 1369333 - RNA, 13 nt, Human
cuaaggccuacuu

SEQ ID NO: 1369334 - RNA, 22 nt, Human
cuaaggaccugaaauuccaaag

SEQ ID NO: 1369335 - RNA, 20 nt, Human
cuaaggaccugaaauuccaa

SEQ ID NO: 1369336 - RNA, 19 nt, Human
cuaaggaccugaaauucca

SEQ ID NO: 1369337 - RNA, 14 nt, Human
cuaaggaaccaaca

SEQ ID NO: 1369338 - RNA, 17 nt, Human
cuaauaacaugugaaaa

SEQ ID NO: 1369339 - RNA, 23 nt, Human
cuaauacagcaacaauuuaugaa

SEQ ID NO: 1369340 - RNA, 19 nt, Human
cuaauacagcaacaauuua

SEQ ID NO: 1369341 - RNA, 18 nt, Human
cuaauaauuucuaauguu

SEQ ID NO: 1369342 - RNA, 17 nt, Human
cuaauaauuucuaaugu

SEQ ID NO: 1369343 - RNA, 16 nt, Human
cuaauaauuucuaaug

SEQ ID NO: 1369344 - RNA, 15 nt, Human
cuaauaauuucuaau

SEQ ID NO: 1369345 - RNA, 14 nt, Human
cuaauaauuucuaa

SEQ ID NO: 1369346 - RNA, 21 nt, Human
cuaauagaauaaaggcaguuu

SEQ ID NO: 1369347 - RNA, 20 nt, Human
cuaauagaauaaaggcaguu

SEQ ID NO: 1369348 - RNA, 18 nt, Human
cuaauagaaaaguauguu

SEQ ID NO: 1369349 - RNA, 17 nt, Human
cuaauagacaauuuauu

SEQ ID NO: 1369350 - RNA, 19 nt, Human
cuaauagacaauuuauuau

SEQ ID NO: 1369351 - RNA, 23 nt, Human
cuaauagacaauuuauuauggca

SEQ ID NO: 1369352 - RNA, 17 nt, Human
cuaauauauuuaaaaau

SEQ ID NO: 1369353 - RNA, 16 nt, Human
cuaauauauuuaaaaa

SEQ ID NO: 1369354 - RNA, 15 nt, Human
cuaauauauuuaaaa

SEQ ID NO: 1369355 - RNA, 14 nt, Human
cuaauauauuuaaa

SEQ ID NO: 1369356 - RNA, 13 nt, Human
cuaauauauuuaa

SEQ ID NO: 1369357 - RNA, 23 nt, Human
cuaauagaauaaaggcaguuuuc

SEQ ID NO: 1369358 - RNA, 22 nt, Human
cuaauagggcaauuaauuccuu

SEQ ID NO: 1369359 - RNA, 17 nt, Human
cuacuggucuuguggaa

SEQ ID NO: 1369360 - RNA, 21 nt, Human
cuacagucaggaaaggaauca

SEQ ID NO: 1369361 - RNA, 18 nt, Human
cuacagucaggaaaggaa

SEQ ID NO: 1369362 - RNA, 15 nt, Human
cuacagucaggaaag

SEQ ID NO: 1369363 - RNA, 14 nt, Human
cuacagucaggaaa

SEQ ID NO: 1369364 - RNA, 17 nt, Human
cuacaggguccaacaua

SEQ ID NO: 1369365 - RNA, 23 nt, Human
cuacagggggucuggcugguguu

SEQ ID NO: 1369366 - RNA, 22 nt, Human
cuacagggggucuggcuggugu

SEQ ID NO: 1369367 - RNA, 21 nt, Human
cuacagggggucuggcuggug

SEQ ID NO: 1369368 - RNA, 20 nt, Human
cuacagggggucuggcuggu

SEQ ID NO: 1369369 - RNA, 19 nt, Human
cuacagggggucuggcugg

SEQ ID NO: 1369370 - RNA, 17 nt, Human
cuacagggggucuggcu

SEQ ID NO: 1369371 - RNA, 15 nt, Human
cuacagggggucugg

SEQ ID NO: 1369372 - RNA, 21 nt, Human
cuacaggcgugagccaccaug

SEQ ID NO: 1369373 - RNA, 20 nt, Human
cuacaggccucacacacaau

SEQ ID NO: 1369374 - RNA, 16 nt, Human
cuacaggccucacaca

SEQ ID NO: 1369375 - RNA, 12 nt, Human
cuacaggccuca

SEQ ID NO: 1369376 - RNA, 15 nt, Human
cuacacucaccugca

SEQ ID NO: 1369377 - RNA, 14 nt, Human
cuacagccucagaa

SEQ ID NO: 1369378 - RNA, 18 nt, Human
cuacagccucagaaacca

SEQ ID NO: 1369379 - RNA, 14 nt, Human
cuacagaugaguca

SEQ ID NO: 1369380 - RNA, 22 nt, Human
cuacagcuggggugcagggaug

SEQ ID NO: 1369381 - RNA, 18 nt, Human
cuacagcuggggugcagg

SEQ ID NO: 1369382 - RNA, 17 nt, Human
cuacagcuggggugcag

SEQ ID NO: 1369383 - RNA, 18 nt, Human
cuacccccagcugugcuu

SEQ ID NO: 1369384 - RNA, 19 nt, Human
cuacccccagcugugcuua

SEQ ID NO: 1369385 - RNA, 16 nt, Human
cuacccuaaccaaguu

SEQ ID NO: 1369386 - RNA, 16 nt, Human
cuacccuuuuucucca

SEQ ID NO: 1369387 - RNA, 14 nt, Human
cuacccugcauggc

SEQ ID NO: 1369388 - RNA, 20 nt, Human
cuacccugcauggcugagcu

SEQ ID NO: 1369389 - RNA, 18 nt, Human
cuacccugagcugaggca

SEQ ID NO: 1369390 - RNA, 17 nt, Human
cuacccugagcugaggc

SEQ ID NO: 1369391 - RNA, 12 nt, Human
cuacccugagcu

SEQ ID NO: 1369392 - RNA, 16 nt, Human
cuacccucuagagaaa

SEQ ID NO: 1369393 - RNA, 14 nt, Human
cuacccucuagaga

SEQ ID NO: 1369394 - RNA, 13 nt, Human
cuacccucuagag

SEQ ID NO: 1369395 - RNA, 17 nt, Human
cuacccccagcugugcu

SEQ ID NO: 1369396 - RNA, 19 nt, Human
cuaccccauggugcuagga

SEQ ID NO: 1369397 - RNA, 22 nt, Human
cuacauguauugcacauuguaa

SEQ ID NO: 1369398 - RNA, 21 nt, Human
cuacauguauugcacauugua

SEQ ID NO: 1369399 - RNA, 18 nt, Human
cuacauguauugcacauu

SEQ ID NO: 1369400 - RNA, 13 nt, Human
cuacauguauugc

SEQ ID NO: 1369401 - RNA, 23 nt, Human
cuacaugguugaaaccccaucuc

SEQ ID NO: 1369402 - RNA, 12 nt, Human
cuacauucauuu

SEQ ID NO: 1369403 - RNA, 14 nt, Human
cuaccaaagcaccu

SEQ ID NO: 1369404 - RNA, 13 nt, Human
cuacauucuguua

SEQ ID NO: 1369405 - RNA, 14 nt, Human
cuacauucuguuaa

SEQ ID NO: 1369406 - RNA, 13 nt, Human
cuaccauuucaga

SEQ ID NO: 1369407 - RNA, 12 nt, Human
cuaccauuucag

SEQ ID NO: 1369408 - RNA, 18 nt, Human
cuaccaccagcugugucc

SEQ ID NO: 1369409 - RNA, 19 nt, Human
cuaccaccagcugugucca

SEQ ID NO: 1369410 - RNA, 16 nt, Human
cuaccaccagcugugu

SEQ ID NO: 1369411 - RNA, 15 nt, Human
cuaccaccagcugug

SEQ ID NO: 1369412 - RNA, 14 nt, Human
cuaccaccagcugu

SEQ ID NO: 1369413 - RNA, 13 nt, Human
cuaccaccagcug

SEQ ID NO: 1369414 - RNA, 15 nt, Human
cuaccaaagcaccuu

SEQ ID NO: 1369415 - RNA, 20 nt, Human
cuaccaaggucuucuuaaua

SEQ ID NO: 1369416 - RNA, 22 nt, Human
cuaggaaauauuuauuuuaaua

SEQ ID NO: 1369417 - RNA, 18 nt, Human
cucagaggcgcacuguga

SEQ ID NO: 1369418 - RNA, 17 nt, Human
cucagaggcgcacugug

SEQ ID NO: 1369419 - RNA, 19 nt, Human
cucagaggcgcacugugac

SEQ ID NO: 1369420 - RNA, 16 nt, Human
cucagaggguguccug

SEQ ID NO: 1369421 - RNA, 20 nt, Human
cucagauggcagcuuuuaaa

SEQ ID NO: 1369422 - RNA, 17 nt, Human
cucagauggcagcuuuu

SEQ ID NO: 1369423 - RNA, 21 nt, Human
cucagauggcagcuuuuaaaa

SEQ ID NO: 1369424 - RNA, 16 nt, Human
cucagauggcagcuuu

SEQ ID NO: 1369425 - RNA, 15 nt, Human
cucagauggcagcuu

SEQ ID NO: 1369426 - RNA, 14 nt, Human
cucagauggcagcu

SEQ ID NO: 1369427 - RNA, 13 nt, Human
cucagauggcagc

SEQ ID NO: 1369428 - RNA, 12 nt, Human
cucagauggcag

SEQ ID NO: 1369429 - RNA, 21 nt, Human
cucagaugcacaugagcuggc

SEQ ID NO: 1369430 - RNA, 21 nt, Human
cucacuggcucuccuggcccu

SEQ ID NO: 1369431 - RNA, 19 nt, Human
cucacuggcucuccuggcc

SEQ ID NO: 1369432 - RNA, 18 nt, Human
cucacuggcucuccuggc

SEQ ID NO: 1369433 - RNA, 17 nt, Human
cucacuggcucuccugg

SEQ ID NO: 1369434 - RNA, 15 nt, Human
cucacuggcucuccu

SEQ ID NO: 1369435 - RNA, 19 nt, Human
cucacugugucacccaggc

SEQ ID NO: 1369436 - RNA, 20 nt, Human
cucagcucccacaagccucu

SEQ ID NO: 1369437 - RNA, 22 nt, Human
cucagcucccacaagccucugc

SEQ ID NO: 1369438 - RNA, 18 nt, Human
cucagcucccacaagccu

SEQ ID NO: 1369439 - RNA, 13 nt, Human
cucagcucccaca

SEQ ID NO: 1369440 - RNA, 14 nt, Human
cucagcucauccau

SEQ ID NO: 1369441 - RNA, 20 nt, Human
cucagcuccagguggcucug

SEQ ID NO: 1369442 - RNA, 19 nt, Human
cucagcuccagguggcucu

SEQ ID NO: 1369443 - RNA, 15 nt, Human
cucagcuaagcucac

SEQ ID NO: 1369444 - RNA, 15 nt, Human
cucagcucacugcaa

SEQ ID NO: 1369445 - RNA, 20 nt, Human
cucagcucacuacaaccucc

SEQ ID NO: 1369446 - RNA, 14 nt, Human
cucagcucacugca

SEQ ID NO: 1369447 - RNA, 20 nt, Human
cucagcucacugcaaccucc

SEQ ID NO: 1369448 - RNA, 18 nt, Human
cucagcccucacacaccc

SEQ ID NO: 1369449 - RNA, 17 nt, Human
cucagcccucacacacc

SEQ ID NO: 1369450 - RNA, 16 nt, Human
cucagccccuuucccu

SEQ ID NO: 1369451 - RNA, 21 nt, Human
cucagccccaccccagggcag

SEQ ID NO: 1369452 - RNA, 19 nt, Human
cucagccccaccccagggc

SEQ ID NO: 1369453 - RNA, 22 nt, Human
cucagccccaccccagggcagc

SEQ ID NO: 1369454 - RNA, 17 nt, Human
cucagccccgcguggaa

SEQ ID NO: 1369455 - RNA, 16 nt, Human
cucaggugcuggggcc

SEQ ID NO: 1369456 - RNA, 22 nt, Human
cucaggugcuggggccugguuc

SEQ ID NO: 1369457 - RNA, 15 nt, Human
cucaggugcuggggc

SEQ ID NO: 1369458 - RNA, 13 nt, Human
cucaggugcuggg

SEQ ID NO: 1369459 - RNA, 20 nt, Human
cucagggccaugcugaggcc

SEQ ID NO: 1369460 - RNA, 19 nt, Human
cucagggccaugcugaggc

SEQ ID NO: 1369461 - RNA, 18 nt, Human
cucagggccaugcugagg

SEQ ID NO: 1369462 - RNA, 17 nt, Human
cucagggccaugcugag

SEQ ID NO: 1369463 - RNA, 15 nt, Human
cucagggccaugcug

SEQ ID NO: 1369464 - RNA, 21 nt, Human
cucagggccaggccucucccu

SEQ ID NO: 1369465 - RNA, 13 nt, Human
cucagggccaugc

SEQ ID NO: 1369466 - RNA, 18 nt, Human
cucagggccaggccucuc

SEQ ID NO: 1369467 - RNA, 16 nt, Human
cucagggccaggccuc

SEQ ID NO: 1369468 - RNA, 14 nt, Human
cucagggccaggcc

SEQ ID NO: 1369469 - RNA, 20 nt, Human
cucagggcagcgccaggcug

SEQ ID NO: 1369470 - RNA, 16 nt, Human
cucaggagccugugac

SEQ ID NO: 1369471 - RNA, 18 nt, Human
cucaggaggcaggaccuu

SEQ ID NO: 1369472 - RNA, 17 nt, Human
cucaggaggcaggaccu

SEQ ID NO: 1369473 - RNA, 16 nt, Human
cucaggaggcaggacc

SEQ ID NO: 1369474 - RNA, 14 nt, Human
cucaggagccugug

SEQ ID NO: 1369475 - RNA, 24 nt, Human
cucaggagcccugggaggcucugg

SEQ ID NO: 1369476 - RNA, 23 nt, Human
cucaggaaacgagacuuuccauu

SEQ ID NO: 1369477 - RNA, 22 nt, Human
cucaggaaacgagacuuuccau

SEQ ID NO: 1369478 - RNA, 14 nt, Human
cucagcuuucuaag

SEQ ID NO: 1369479 - RNA, 20 nt, Human
cucaggacacaggccugugu

SEQ ID NO: 1369480 - RNA, 19 nt, Human
cucaggacacaggccugug

SEQ ID NO: 1369481 - RNA, 18 nt, Human
cucaggacacaggccugu

SEQ ID NO: 1369482 - RNA, 17 nt, Human
cucaggacacaggccug

SEQ ID NO: 1369483 - RNA, 16 nt, Human
cucaggacacaggccu

SEQ ID NO: 1369484 - RNA, 15 nt, Human
cucaggacacaggcc

SEQ ID NO: 1369485 - RNA, 14 nt, Human
cucaggacacaggc

SEQ ID NO: 1369486 - RNA, 13 nt, Human
cucaggacacagg

SEQ ID NO: 1369487 - RNA, 19 nt, Human
cucaggaaccgaggcaggg

SEQ ID NO: 1369488 - RNA, 18 nt, Human
cucaggaaccgaggcagg

SEQ ID NO: 1369489 - RNA, 17 nt, Human
cucaggaaccgaggcag

SEQ ID NO: 1369490 - RNA, 19 nt, Human
cucagcugucaaggcucag

SEQ ID NO: 1369491 - RNA, 18 nt, Human
cucagcugucaaggcuca

SEQ ID NO: 1369492 - RNA, 11 nt, Human
cucagcugcau

SEQ ID NO: 1369493 - RNA, 23 nt, Human
cucagcucugacauucugauucg

SEQ ID NO: 1369494 - RNA, 23 nt, Human
cucagcucugggccauucuccac

SEQ ID NO: 1369495 - RNA, 14 nt, Human
cucagcucugggcc

SEQ ID NO: 1369496 - RNA, 20 nt, Human
cucagcucucaguugcagcc

SEQ ID NO: 1369497 - RNA, 21 nt, Human
cucaggacacaggccugugua

SEQ ID NO: 1369498 - RNA, 22 nt, Human
cucaggaccaaagcuuucaugu

SEQ ID NO: 1369499 - RNA, 21 nt, Human
cucaggaccaaagcuuucaug

SEQ ID NO: 1369500 - RNA, 20 nt, Human
cucaggaccaaagcuuucau

SEQ ID NO: 1369501 - RNA, 19 nt, Human
cucaggacagaugccacac

SEQ ID NO: 1369502 - RNA, 18 nt, Human
cucaggacagaugccaca

SEQ ID NO: 1369503 - RNA, 16 nt, Human
cucaggacagaugcca

SEQ ID NO: 1369504 - RNA, 14 nt, Human
cucaggacagaugc

SEQ ID NO: 1369505 - RNA, 12 nt, Human
cucaggacagau

SEQ ID NO: 1369506 - RNA, 23 nt, Human
cucaggacugggagcccccagcc

SEQ ID NO: 1369507 - RNA, 15 nt, Human
cucaggacugggagc

SEQ ID NO: 1369508 - RNA, 14 nt, Human
cucaggacugggag

SEQ ID NO: 1369509 - RNA, 14 nt, Human
cucaggacugcgac

SEQ ID NO: 1369510 - RNA, 12 nt, Human
cucaggagcccu

SEQ ID NO: 1369511 - RNA, 13 nt, Human
cucaggagcccug

SEQ ID NO: 1369512 - RNA, 14 nt, Human
cucaggagcccugg

SEQ ID NO: 1369513 - RNA, 15 nt, Human
cucaggagcccuggg

SEQ ID NO: 1369514 - RNA, 16 nt, Human
cucaggagcccuggga

SEQ ID NO: 1369515 - RNA, 17 nt, Human
cucaggagcccugggag

SEQ ID NO: 1369516 - RNA, 20 nt, Human
cucaggagcccugggaggcu

SEQ ID NO: 1369517 - RNA, 21 nt, Human
cucaggagcccugggaggcuc

SEQ ID NO: 1369518 - RNA, 22 nt, Human
cucaggagcccugggaggcucu

SEQ ID NO: 1369519 - RNA, 23 nt, Human
cucaggagcccugggaggcucug

SEQ ID NO: 1369520 - RNA, 18 nt, Human
cucauuuagccuguccug

SEQ ID NO: 1369521 - RNA, 21 nt, Human
cucauuuccaagcaaguauua

SEQ ID NO: 1369522 - RNA, 17 nt, Human
cucauuuccaagcaagu

SEQ ID NO: 1369523 - RNA, 14 nt, Human
cucauuuccaagca

SEQ ID NO: 1369524 - RNA, 13 nt, Human
cucauuuccaagc

SEQ ID NO: 1369525 - RNA, 12 nt, Human
cucauuuccaag

SEQ ID NO: 1369526 - RNA, 12 nt, Human
cucauuucagga

SEQ ID NO: 1369527 - RNA, 13 nt, Human
cucauuucaggau

SEQ ID NO: 1369528 - RNA, 22 nt, Human
cuccaaggaggggcuguaaaau

SEQ ID NO: 1369529 - RNA, 21 nt, Human
cuccaaggaggggcuguaaaa

SEQ ID NO: 1369530 - RNA, 20 nt, Human
cuccaaggaggggcuguaaa

SEQ ID NO: 1369531 - RNA, 19 nt, Human
cuccaaggaggggcuguaa

SEQ ID NO: 1369532 - RNA, 23 nt, Human
cuccaaacugaagcagccucucc

SEQ ID NO: 1369533 - RNA, 22 nt, Human
cuccaaacugaagcagccucuc

SEQ ID NO: 1369534 - RNA, 18 nt, Human
cuccaaacugaagcagcc

SEQ ID NO: 1369535 - RNA, 16 nt, Human
cuccaaaaugugccua

SEQ ID NO: 1369536 - RNA, 13 nt, Human
cucauuuuuuaaa

SEQ ID NO: 1369537 - RNA, 22 nt, Human
cucauuuuuccguaaaaaugau

SEQ ID NO: 1369538 - RNA, 18 nt, Human
cucauuuuaggcaaauau

SEQ ID NO: 1369539 - RNA, 23 nt, Human
cucauuuuuauaaugucccuuca

SEQ ID NO: 1369540 - RNA, 22 nt, Human
cuccaaaauguuggucauuuua

SEQ ID NO: 1369541 - RNA, 15 nt, Human
cuccaaaaugugccu

SEQ ID NO: 1369542 - RNA, 14 nt, Human
cuccaaaaugugcc

SEQ ID NO: 1369543 - RNA, 13 nt, Human
cuccaaaccacuu

SEQ ID NO: 1369544 - RNA, 22 nt, Human
cuccaaaccacuuuuugcagcu

SEQ ID NO: 1369545 - RNA, 19 nt, Human
cucauuuagccuguccugu

SEQ ID NO: 1369546 - RNA, 18 nt, Human
cucaggcaggggccucca

SEQ ID NO: 1369547 - RNA, 19 nt, Human
cucauucugaaggagcccc

SEQ ID NO: 1369548 - RNA, 17 nt, Human
cucauucugaaggagcc

SEQ ID NO: 1369549 - RNA, 18 nt, Human
cucauucuccuuguguua

SEQ ID NO: 1369550 - RNA, 22 nt, Human
cucauucuccuuguguuacuaa

SEQ ID NO: 1369551 - RNA, 14 nt, Human
cucaguuuucauaa

SEQ ID NO: 1369552 - RNA, 13 nt, Human
cucaguuuucaua

SEQ ID NO: 1369553 - RNA, 18 nt, Human
cucaguuuuaucauuuuc

SEQ ID NO: 1369554 - RNA, 17 nt, Human
cucaguuuuaucauuuu

SEQ ID NO: 1369555 - RNA, 22 nt, Human
cucaguuugugugucuuaauua

SEQ ID NO: 1369556 - RNA, 15 nt, Human
cucaguuucuugcuu

SEQ ID NO: 1369557 - RNA, 20 nt, Human
cucaguugugacuaacuaga

SEQ ID NO: 1369558 - RNA, 20 nt, Human
cucaguugauuuucuggauu

SEQ ID NO: 1369559 - RNA, 18 nt, Human
cucaguugauuuucugga

SEQ ID NO: 1369560 - RNA, 16 nt, Human
cucaguugauuuucug

SEQ ID NO: 1369561 - RNA, 15 nt, Human
cucaguugauuuucu

SEQ ID NO: 1369562 - RNA, 13 nt, Human
cucaguugcagcc

SEQ ID NO: 1369563 - RNA, 19 nt, Human
cuccagccccucuuggaga

SEQ ID NO: 1369564 - RNA, 18 nt, Human
cuccagccccucuuggag

SEQ ID NO: 1369565 - RNA, 16 nt, Human
cuccagccccucuugg

SEQ ID NO: 1369566 - RNA, 22 nt, Human
cuccagauuagagccuguaaac

SEQ ID NO: 1369567 - RNA, 23 nt, Human
cuccagccaucaagagacugagu

SEQ ID NO: 1369568 - RNA, 19 nt, Human
cuccagauuagagccugua

SEQ ID NO: 1369569 - RNA, 21 nt, Human
cuccagagaguaucugaggca

SEQ ID NO: 1369570 - RNA, 23 nt, Human
cuccagaccugauccuggaggcc

SEQ ID NO: 1369571 - RNA, 19 nt, Human
cuccagaccugauccugga

SEQ ID NO: 1369572 - RNA, 14 nt, Human
cuccagaccugauc

SEQ ID NO: 1369573 - RNA, 12 nt, Human
cuccagaccuga

SEQ ID NO: 1369574 - RNA, 11 nt, Human
cuccagaccug

SEQ ID NO: 1369575 - RNA, 21 nt, Human
cuccagaugcagggcagucau

SEQ ID NO: 1369576 - RNA, 18 nt, Human
cuccagaugcagggcagu

SEQ ID NO: 1369577 - RNA, 17 nt, Human
cuccagaugcagggcag

SEQ ID NO: 1369578 - RNA, 16 nt, Human
cuccagaugcagggca

SEQ ID NO: 1369579 - RNA, 20 nt, Human
cuccagaggggcucagguca

SEQ ID NO: 1369580 - RNA, 21 nt, Human
cuccagagggcacucugcuug

SEQ ID NO: 1369581 - RNA, 20 nt, Human
cuccagagggcacucugcuu

SEQ ID NO: 1369582 - RNA, 13 nt, Human
cuccagagggcac

SEQ ID NO: 1369583 - RNA, 22 nt, Human
cuccacucaugugacucuuucc

SEQ ID NO: 1369584 - RNA, 16 nt, Human
cuccacucaugugacu

SEQ ID NO: 1369585 - RNA, 20 nt, Human
cuccacguucugcucaucau

SEQ ID NO: 1369586 - RNA, 15 nt, Human
cuccaccuagacugu

SEQ ID NO: 1369587 - RNA, 18 nt, Human
cuccaccgcagaaggaag

SEQ ID NO: 1369588 - RNA, 20 nt, Human
cuccaaggggaaucagaacu

SEQ ID NO: 1369589 - RNA, 16 nt, Human
cuccaccgcagaagga

SEQ ID NO: 1369590 - RNA, 17 nt, Human
cuccaccgcagaaggaa

SEQ ID NO: 1369591 - RNA, 22 nt, Human
cucccauccagggcccccaucu

SEQ ID NO: 1369592 - RNA, 15 nt, Human
cucccauccagggcc

SEQ ID NO: 1369593 - RNA, 14 nt, Human
cucccauccagggc

SEQ ID NO: 1369594 - RNA, 18 nt, Human
cuccccacgagggcuggc

SEQ ID NO: 1369595 - RNA, 15 nt, Human
cuccccacgagggcu

SEQ ID NO: 1369596 - RNA, 19 nt, Human
cucccauuccugaagaacc

SEQ ID NO: 1369597 - RNA, 17 nt, Human
cucccauuccugaagaa

SEQ ID NO: 1369598 - RNA, 16 nt, Human
cucccauuccugaaga

SEQ ID NO: 1369599 - RNA, 15 nt, Human
cucccauuccugaag

SEQ ID NO: 1369600 - RNA, 14 nt, Human
cucccauuccugaa

SEQ ID NO: 1369601 - RNA, 23 nt, Human
cucccacaagccugagggaaagg

SEQ ID NO: 1369602 - RNA, 16 nt, Human
cucccacaagccugag

SEQ ID NO: 1369603 - RNA, 15 nt, Human
cucccacaagccuga

SEQ ID NO: 1369604 - RNA, 23 nt, Human
cucccacaagccucugcccaggc

SEQ ID NO: 1369605 - RNA, 21 nt, Human
cucccacaagccucugcccag

SEQ ID NO: 1369606 - RNA, 15 nt, Human
cucccacaagccucu

SEQ ID NO: 1369607 - RNA, 21 nt, Human
cucccaauuucagacucccau

SEQ ID NO: 1369608 - RNA, 19 nt, Human
cucccaauuucagacuccc

SEQ ID NO: 1369609 - RNA, 13 nt, Human
cucccaauucauc

SEQ ID NO: 1369610 - RNA, 17 nt, Human
cucccacaagccugagg

SEQ ID NO: 1369611 - RNA, 22 nt, Human
cucccagggagcaugagaggag

SEQ ID NO: 1369612 - RNA, 15 nt, Human
cucccaaaugagcca

SEQ ID NO: 1369613 - RNA, 22 nt, Human
cucccaaagugcugagauuaca

SEQ ID NO: 1369614 - RNA, 20 nt, Human
cucccaaagugcugagauua

SEQ ID NO: 1369615 - RNA, 20 nt, Human
cucccaaacgcccuuuccuc

SEQ ID NO: 1369616 - RNA, 18 nt, Human
cucccaaacgcccuuucc

SEQ ID NO: 1369617 - RNA, 20 nt, Human
cuccagcugggcucugcaau

SEQ ID NO: 1369618 - RNA, 19 nt, Human
cuccagcugggcucugcaa

SEQ ID NO: 1369619 - RNA, 15 nt, Human
cuccagcugggcucu

SEQ ID NO: 1369620 - RNA, 13 nt, Human
cuccagcugcccc

SEQ ID NO: 1369621 - RNA, 11 nt, Human
cuccagcugcc

SEQ ID NO: 1369622 - RNA, 14 nt, Human
cuccagcugccccg

SEQ ID NO: 1369623 - RNA, 20 nt, Human
cuccagcugcucugucuucu

SEQ ID NO: 1369624 - RNA, 20 nt, Human
cuccagcugacuaaacuuuu

SEQ ID NO: 1369625 - RNA, 21 nt, Human
cuccagccccucuuggagaag

SEQ ID NO: 1369626 - RNA, 20 nt, Human
cuccagccccucuuggagaa

SEQ ID NO: 1369627 - RNA, 22 nt, Human
cuccagccccucuuggagaagu

SEQ ID NO: 1369628 - RNA, 15 nt, Human
cuccauggcccugcc

SEQ ID NO: 1369629 - RNA, 16 nt, Human
cuccauggcccugcca

SEQ ID NO: 1369630 - RNA, 19 nt, Human
cuccauggcccugccaugc

SEQ ID NO: 1369631 - RNA, 13 nt, Human
cuccccagcccag

SEQ ID NO: 1369632 - RNA, 19 nt, Human
cuccccacucugcucugau

SEQ ID NO: 1369633 - RNA, 23 nt, Human
cuccccagcauuccagccccucu

SEQ ID NO: 1369634 - RNA, 22 nt, Human
cuccccagcauuccagccccuc
